United States Patent Application Publication US 2006/0257851 A1 - sequence listing, part 10

SEQ ID NO: 314060 - RNA, 32 nt, Homo Sapiens
guccugcaccugcccucugcagcccucugcca

SEQ ID NO: 314061 - RNA, 32 nt, Homo Sapiens
guaaaaucauuuguuucuuuugacucaaauug

SEQ ID NO: 314062 - RNA, 32 nt, Homo Sapiens
cucucuuguaauuuggaucucuucuuaaugua

SEQ ID NO: 314063 - RNA, 32 nt, Homo Sapiens
ucccagcagcgaaggccucugcggagcugcca

SEQ ID NO: 314064 - RNA, 32 nt, Homo Sapiens
acauucaaagugguccaagauggcucuuuuuu

SEQ ID NO: 314065 - RNA, 32 nt, Homo Sapiens
ucugaccuuggagaguguaaacaucauauaug

SEQ ID NO: 314066 - RNA, 32 nt, Homo Sapiens
uuucaccugcugcuuuuucuccccaaggcagg

SEQ ID NO: 314067 - RNA, 32 nt, Homo Sapiens
cccugucuuuaacuggggguauguccacucua

SEQ ID NO: 314068 - RNA, 32 nt, Homo Sapiens
agggaagaucgccauugguuauacauaacagc

SEQ ID NO: 314069 - RNA, 32 nt, Homo Sapiens
caauagauugaauauuugauaauagaauauua

SEQ ID NO: 314070 - RNA, 32 nt, Homo Sapiens
gccgaugaccucauuucguuuauuuuauuuuu

SEQ ID NO: 314071 - RNA, 32 nt, Homo Sapiens
gcugccagcaugucgcugccuccggagaaagc

SEQ ID NO: 314072 - RNA, 32 nt, Homo Sapiens
aguguuaacaauauuuuuguucugaucuucuu

SEQ ID NO: 314073 - RNA, 32 nt, Homo Sapiens
cuuucaucuggagaugucagggaaauaccaca

SEQ ID NO: 314074 - RNA, 32 nt, Homo Sapiens
agcaagagcaaaaacucaguuaaaugcguucu

SEQ ID NO: 314075 - RNA, 32 nt, Homo Sapiens
ugcgucagccugcugcuucgugucucacucga

SEQ ID NO: 314076 - RNA, 32 nt, Homo Sapiens
cugcaaauaaaaagacaauuccuuauugucug

SEQ ID NO: 314077 - RNA, 32 nt, Homo Sapiens
cugucauguuucucuguaaauuguuguguguu

SEQ ID NO: 314078 - RNA, 32 nt, Homo Sapiens
auacuaauaaaauuauuaaaaggagcacuaaa

SEQ ID NO: 314079 - RNA, 32 nt, Homo Sapiens
agcugugcggugcaggauggcguggcugugga

SEQ ID NO: 314080 - RNA, 32 nt, Homo Sapiens
cuuuuacagaaaccauuuagauugaugggccu

SEQ ID NO: 314081 - RNA, 32 nt, Homo Sapiens
cuccgccaccgagaguccugugcuucggaaug

SEQ ID NO: 314082 - RNA, 32 nt, Homo Sapiens
ccugccccaccucggggcugccgccacccgcu

SEQ ID NO: 314083 - RNA, 32 nt, Homo Sapiens
uaauauuaguuauaagguuguggaauuuaugc

SEQ ID NO: 314084 - RNA, 31 nt, Homo Sapiens
uggaaccauaugugaaggaugugaugacagu

SEQ ID NO: 314085 - RNA, 32 nt, Homo Sapiens
acagagugaaacugugacccucucccuucccu

SEQ ID NO: 314086 - RNA, 32 nt, Homo Sapiens
gguauaucuauuuuuauuuacuuuguaagaaa

SEQ ID NO: 314087 - RNA, 32 nt, Homo Sapiens
ugggaaggggagauggagacgcccccuuuacc

SEQ ID NO: 314088 - RNA, 32 nt, Homo Sapiens
uuucuguuuccauggccuccucugccaccucu

SEQ ID NO: 314089 - RNA, 32 nt, Homo Sapiens
gcuaugaguauuuuauuuuucuuucagacuuc

SEQ ID NO: 314090 - RNA, 32 nt, Homo Sapiens
cuuuugucuuuuuugaugagggcucacuccag

SEQ ID NO: 314091 - RNA, 32 nt, Homo Sapiens
gagaucuugaguugcaguccacagcauucaca

SEQ ID NO: 314092 - RNA, 29 nt, Homo Sapiens
uuuugaaguaaacuauauuuuacaaugug

SEQ ID NO: 314093 - RNA, 32 nt, Homo Sapiens
auauuaacuaaauaaacagauguauuaugcug

SEQ ID NO: 314094 - RNA, 32 nt, Homo Sapiens
ugguuuugacauuauaguauaauuauguaaga

SEQ ID NO: 314095 - RNA, 32 nt, Homo Sapiens
cccgggcagacacugaggacccuccucgcgca

SEQ ID NO: 314096 - RNA, 32 nt, Homo Sapiens
caauacacagaaaaagggggaaaggcuguuuc

SEQ ID NO: 314097 - RNA, 32 nt, Homo Sapiens
gguugagcaccucuguacucagcccucugucu

SEQ ID NO: 314098 - RNA, 32 nt, Homo Sapiens
guuuucuuucuuuucuuaauccuauccaagua

SEQ ID NO: 314099 - RNA, 32 nt, Homo Sapiens
guagugccaaaauagauguuuaucaaugugag

SEQ ID NO: 314100 - RNA, 32 nt, Homo Sapiens
uuuuuucuuuuuucuuuuuuuaaagaaauggu

SEQ ID NO: 314101 - RNA, 32 nt, Homo Sapiens
aaagggccggaaguagguagucugcacggcuc

SEQ ID NO: 314102 - RNA, 32 nt, Homo Sapiens
cagucaacagagcuacgcacuccuuuccuuuu

SEQ ID NO: 314103 - RNA, 32 nt, Homo Sapiens
gcccuggcugccagaugcccacagcacccugg

SEQ ID NO: 314104 - RNA, 32 nt, Homo Sapiens
ucugccggguucggggcgcgcggggcagguug

SEQ ID NO: 314105 - RNA, 32 nt, Homo Sapiens
auuacccaagucaaaacaaaauguauuuuuag

SEQ ID NO: 314106 - RNA, 32 nt, Homo Sapiens
uauuugugcagucagagcugacuuguaaacua

SEQ ID NO: 314107 - RNA, 32 nt, Homo Sapiens
caucccucuccagccacugcgacccggcgaag

SEQ ID NO: 314108 - RNA, 32 nt, Homo Sapiens
cuuccgaacgagucuccuuuccuuggggcucg

SEQ ID NO: 314109 - RNA, 32 nt, Homo Sapiens
auuugaaaacagaaggaaaaaaauauaccuuu

SEQ ID NO: 314110 - RNA, 32 nt, Homo Sapiens
acuggucagcuccuccugcccuccccccaacg

SEQ ID NO: 314111 - RNA, 32 nt, Homo Sapiens
auguggccucagaacacuacuuauuacucaau

SEQ ID NO: 314112 - RNA, 32 nt, Homo Sapiens
uauccucccccuccaaccugaugggaaaaaug

SEQ ID NO: 314113 - RNA, 32 nt, Homo Sapiens
cagcuuagcauauacagccuguauucagauaa

SEQ ID NO: 314114 - RNA, 32 nt, Homo Sapiens
uuaaagucaauacaauggaaaucaauaaaucu

SEQ ID NO: 314115 - RNA, 32 nt, Homo Sapiens
ccagcucgcgcgcgucuguggggccgccugac

SEQ ID NO: 314116 - RNA, 32 nt, Homo Sapiens
agaguuagcuggaagccacagcccugccucuu

SEQ ID NO: 314117 - RNA, 32 nt, Homo Sapiens
uguguguguaugccugugcagacugacaggau

SEQ ID NO: 314118 - RNA, 32 nt, Homo Sapiens
gggucucuucccguaacugucugacguccugu

SEQ ID NO: 314119 - RNA, 32 nt, Homo Sapiens
auggacaacuguagugcagugauccuuuacag

SEQ ID NO: 314120 - RNA, 32 nt, Homo Sapiens
uugaauacccacagucagaaauauuuuguugu

SEQ ID NO: 314121 - RNA, 32 nt, Homo Sapiens
aaagcucuggcccaagcuucuacacagcaaag

SEQ ID NO: 314122 - RNA, 32 nt, Homo Sapiens
uaccaaaaccugacaggcacaaugaaaaaaga

SEQ ID NO: 314123 - RNA, 32 nt, Homo Sapiens
gcacccucaaagcuccggaagccauucagugu

SEQ ID NO: 314124 - RNA, 32 nt, Homo Sapiens
uguguccccaucucggccggcccggagcucgc

SEQ ID NO: 314125 - RNA, 32 nt, Homo Sapiens
gucagaguucccuuggcagggccuuggaggcc

SEQ ID NO: 314126 - RNA, 32 nt, Homo Sapiens
uuguagaaauucuuaauuuggaucuauuuauu

SEQ ID NO: 314127 - RNA, 32 nt, Homo Sapiens
ggacauuugggcgacccccgggcggggccagc

SEQ ID NO: 314128 - RNA, 27 nt, Homo Sapiens
guaagucauuucuucaguccuucuccu

SEQ ID NO: 314129 - RNA, 32 nt, Homo Sapiens
agucacaccccuccccgucucuauagcggagg

SEQ ID NO: 314130 - RNA, 32 nt, Homo Sapiens
uauuucacucaauuuauauuuucaucauugac

SEQ ID NO: 314131 - RNA, 29 nt, Homo Sapiens
gggagaucuauccacauaccucagguaac

SEQ ID NO: 314132 - RNA, 32 nt, Homo Sapiens
ccucccuguggcggcggcuuguuguuguggag

SEQ ID NO: 314133 - RNA, 32 nt, Homo Sapiens
aauucccuucccgccuggcgccgcccgggaga

SEQ ID NO: 314134 - RNA, 32 nt, Homo Sapiens
cacauacuggaacacaggaggugcucaauuac

SEQ ID NO: 314135 - RNA, 32 nt, Homo Sapiens
agcccuuccucccagagcccucauuccaauuc

SEQ ID NO: 314136 - RNA, 32 nt, Homo Sapiens
gugacagcuguccaauggaggcccuccgugcu

SEQ ID NO: 314137 - RNA, 32 nt, Homo Sapiens
uauggaaacugggaaucauaugaagaagaauc

SEQ ID NO: 314138 - RNA, 32 nt, Homo Sapiens
cuugcccggccgcgcccagcccggcgucccga

SEQ ID NO: 314139 - RNA, 32 nt, Homo Sapiens
auagauaaguaucaggucugaccccaguggaa

SEQ ID NO: 314140 - RNA, 32 nt, Homo Sapiens
aaugugcacuccuagcuuggugucucagacau

SEQ ID NO: 314141 - RNA, 32 nt, Homo Sapiens
cccacucccuccccacucccuccuggcacugc

SEQ ID NO: 314142 - RNA, 32 nt, Homo Sapiens
uaaguuuaggauuauuuacuuaccaaauuaga

SEQ ID NO: 314143 - RNA, 32 nt, Homo Sapiens
aaagagugcugacaccaucacaguauguuccc

SEQ ID NO: 314144 - RNA, 27 nt, Homo Sapiens
caaggucauuucuucagucagaaaacu

SEQ ID NO: 314145 - RNA, 32 nt, Homo Sapiens
gcaugcauguuuguguaacaaacaggucuuuu

SEQ ID NO: 314146 - RNA, 32 nt, Homo Sapiens
gagaccagccuggccaacguggcaaaaccccg

SEQ ID NO: 314147 - RNA, 32 nt, Homo Sapiens
gaccgaagcagccccuuucucaggcuuacugu

SEQ ID NO: 314148 - RNA, 32 nt, Homo Sapiens
acuuugaagugugaaaacauuuccuguaauug

SEQ ID NO: 314149 - RNA, 32 nt, Homo Sapiens
uugaguucugugucacauuccagaggccacaa

SEQ ID NO: 314150 - RNA, 32 nt, Homo Sapiens
gauggaauaagaaaacaaaaagcugcuuuccc

SEQ ID NO: 314151 - RNA, 32 nt, Homo Sapiens
ugggguagagagagggguagcaaguucaugug

SEQ ID NO: 314152 - RNA, 32 nt, Homo Sapiens
cucaaguauaaauagugguaacuauauguuuu

SEQ ID NO: 314153 - RNA, 32 nt, Homo Sapiens
cggcugagguguucaauaaacaucucuuaaac

SEQ ID NO: 314154 - RNA, 32 nt, Homo Sapiens
uuucccugugaccccuuacucuccuggccaga

SEQ ID NO: 314155 - RNA, 32 nt, Homo Sapiens
cugacuccugaguaaauugauuuuccaguuuu

SEQ ID NO: 314156 - RNA, 32 nt, Homo Sapiens
aacugagauguuucuagaaugaaacaguaaau

SEQ ID NO: 314157 - RNA, 32 nt, Homo Sapiens
auucuccuucgcugcuggcuugugcugguuua

SEQ ID NO: 314158 - RNA, 32 nt, Homo Sapiens
gacaaaagauaaaaugguuccuauauccuaau

SEQ ID NO: 314159 - RNA, 32 nt, Homo Sapiens
cacaucuaagaaaauuuacuguaacuucuuaa

SEQ ID NO: 314160 - RNA, 32 nt, Homo Sapiens
ucuuuuuggagucaguuuuucaauaugccuca

SEQ ID NO: 314161 - RNA, 32 nt, Homo Sapiens
ucagacccacccaggggccaggggccaggcug

SEQ ID NO: 314162 - RNA, 32 nt, Homo Sapiens
ugggcaacagagugagacgcugccucacugcu

SEQ ID NO: 314163 - RNA, 32 nt, Homo Sapiens
guugaaguccuuucgugccgcugccuuccucg

SEQ ID NO: 314164 - RNA, 32 nt, Homo Sapiens
uuuugaucucacauuuuuauaccuguuuaaau

SEQ ID NO: 314165 - RNA, 32 nt, Homo Sapiens
ccgccccgcucgccgccgcgaugccaguguuu

SEQ ID NO: 314166 - RNA, 32 nt, Homo Sapiens
guuccccagggucagaaguucuaauuaugaug

SEQ ID NO: 314167 - RNA, 32 nt, Homo Sapiens
ccaggugaagcagaaucagagaaggcuugaag

SEQ ID NO: 314168 - RNA, 32 nt, Homo Sapiens
cccaaagaacuaaagagucagcuccacaaaaa

SEQ ID NO: 314169 - RNA, 32 nt, Homo Sapiens
cccccgaccucccaggcggaccgcccuucccu

SEQ ID NO: 314170 - RNA, 32 nt, Homo Sapiens
ucaauagagcacugccuauuugguauccaguu

SEQ ID NO: 314171 - RNA, 32 nt, Homo Sapiens
gacuuuguucugguauuuuuugauauguagaa

SEQ ID NO: 314172 - RNA, 32 nt, Homo Sapiens
cuugacaaauugagauuugcugauggaagaag

SEQ ID NO: 314173 - RNA, 32 nt, Homo Sapiens
agagcgcgcgccccgcagccccgcgccuagcc

SEQ ID NO: 314174 - RNA, 32 nt, Homo Sapiens
gcacucucgcgcccuccgcgggccucccaauu

SEQ ID NO: 314175 - RNA, 32 nt, Homo Sapiens
uuuuaaagcuugggugggaugugugugggcug

SEQ ID NO: 314176 - RNA, 32 nt, Homo Sapiens
accaagugaugaaaguguugaaaaacuuaaua

SEQ ID NO: 314177 - RNA, 32 nt, Homo Sapiens
ccuccagagccucgugccagcugcuggugcag

SEQ ID NO: 314178 - RNA, 32 nt, Homo Sapiens
gagagcuaauguaguauuggcuccaccugcuc

SEQ ID NO: 314179 - RNA, 32 nt, Homo Sapiens
gucuggaagaacugcaaguucugaggccugaa

SEQ ID NO: 314180 - RNA, 32 nt, Homo Sapiens
uuuauuggcuucaaggcccaccucucuguacu

SEQ ID NO: 314181 - RNA, 32 nt, Homo Sapiens
cugccagacaccugagccgacugguaguaggg

SEQ ID NO: 314182 - RNA, 32 nt, Homo Sapiens
ugagggcggugggagggagcggugccugcgcu

SEQ ID NO: 314183 - RNA, 32 nt, Homo Sapiens
aaguaaaacaauuuaaauguuuuacugaaagu

SEQ ID NO: 314184 - RNA, 32 nt, Homo Sapiens
cuuuggagauguuauguuuccuuuuucauauu

SEQ ID NO: 314185 - RNA, 32 nt, Homo Sapiens
uucuugccccccucccagaggaccccgccagu

SEQ ID NO: 314186 - RNA, 32 nt, Homo Sapiens
cugcuguuccugacuacagccaucaugccucg

SEQ ID NO: 314187 - RNA, 32 nt, Homo Sapiens
ucaguuccucacaacuggucuucuacagacuu

SEQ ID NO: 314188 - RNA, 32 nt, Homo Sapiens
uaaaaugaagcaacaaucacauaaagauuuuc

SEQ ID NO: 314189 - RNA, 32 nt, Homo Sapiens
gcacugccaugucugcccuuuuuugugguguc

SEQ ID NO: 314190 - RNA, 32 nt, Homo Sapiens
uuuccauuuuuucauguaaauuuugcacaguu

SEQ ID NO: 314191 - RNA, 32 nt, Homo Sapiens
cgugaacucgcuccaaagucuuucucgcauga

SEQ ID NO: 314192 - RNA, 32 nt, Homo Sapiens
gugauucauuuuuaguuuuucuaauucuggaa

SEQ ID NO: 314193 - RNA, 32 nt, Homo Sapiens
ugggcuuuuaauccugugugugauuacuagua

SEQ ID NO: 314194 - RNA, 32 nt, Homo Sapiens
cuuugucuaauaggaguuuuaaguauguuaaa

SEQ ID NO: 314195 - RNA, 32 nt, Homo Sapiens
augugauuacaucaucuuucugacaucauugu

SEQ ID NO: 314196 - RNA, 32 nt, Homo Sapiens
gacgcuucguggugcuggacggcgcgggccgc

SEQ ID NO: 314197 - RNA, 32 nt, Homo Sapiens
acacuccuacgcugcgucccagccccuccagc

SEQ ID NO: 314198 - RNA, 32 nt, Homo Sapiens
uaacgggaaugggugggagugcuggugaaaag

SEQ ID NO: 314199 - RNA, 32 nt, Homo Sapiens
uuaucccagauggcagaacaugcuuucaaaac

SEQ ID NO: 314200 - RNA, 32 nt, Homo Sapiens
gaacccggcgccgcccgagggcaagcccuccu

SEQ ID NO: 314201 - RNA, 32 nt, Homo Sapiens
uccagggccacggacacccccucucacaaguc

SEQ ID NO: 314202 - RNA, 32 nt, Homo Sapiens
aaaugguuucuuaauguuuauauuuuauuuuc

SEQ ID NO: 314203 - RNA, 32 nt, Homo Sapiens
gguugugguaguccuguuuuccuaauaacuuu

SEQ ID NO: 314204 - RNA, 32 nt, Homo Sapiens
auuuaagaaucuggaauauugcagcuuuuggu

SEQ ID NO: 314205 - RNA, 32 nt, Homo Sapiens
uuuguuuuucuuuuaaaguaaaugcaaguacc

SEQ ID NO: 314206 - RNA, 32 nt, Homo Sapiens
ucggcgccaccuccggccccgggcccgucaag

SEQ ID NO: 314207 - RNA, 32 nt, Homo Sapiens
uucuacggcuguggcccgccucugugaaccau

SEQ ID NO: 314208 - RNA, 32 nt, Homo Sapiens
gacccaccauggacauacuggaccuuaauucc

SEQ ID NO: 314209 - RNA, 32 nt, Homo Sapiens
ggucucacaggcuguucagggauaaucuaaau

SEQ ID NO: 314210 - RNA, 32 nt, Homo Sapiens
gguagagaacugaaguucagauauauugaaac

SEQ ID NO: 314211 - RNA, 29 nt, Homo Sapiens
auucccuugggacagaggcuacagguugg

SEQ ID NO: 314212 - RNA, 32 nt, Homo Sapiens
acugcccuaggagccuggaccccacgagcuca

SEQ ID NO: 314213 - RNA, 32 nt, Homo Sapiens
acaaaaguauuaggucuuuaaaacuuuuccaa

SEQ ID NO: 314214 - RNA, 32 nt, Homo Sapiens
cugauauucuuccacaauuaauauauucaauu

SEQ ID NO: 314215 - RNA, 32 nt, Homo Sapiens
aacuaccaaacacuuauaaaaccaucagaucu

SEQ ID NO: 314216 - RNA, 32 nt, Homo Sapiens
gccagggaaggucggauggcggcggccagggc

SEQ ID NO: 314217 - RNA, 32 nt, Homo Sapiens
gccacugcacuccagccugggcgacagaauga

SEQ ID NO: 314218 - RNA, 32 nt, Homo Sapiens
uuaguggcucugccgccagugagacuucccgc

SEQ ID NO: 314219 - RNA, 32 nt, Homo Sapiens
ccugaggccgcuugcccucccgccccauggag

SEQ ID NO: 314220 - RNA, 32 nt, Homo Sapiens
agaauaacaagauuauauaguaaucaguuuca

SEQ ID NO: 314221 - RNA, 32 nt, Homo Sapiens
acuuaucugugaauaaaaccauaaaucuuuga

SEQ ID NO: 314222 - RNA, 32 nt, Homo Sapiens
gugagcgcgcuggagcccgcguggagaacaug

SEQ ID NO: 314223 - RNA, 32 nt, Homo Sapiens
gaugcaguguaagaaggaaaauacucaucucu

SEQ ID NO: 314224 - RNA, 32 nt, Homo Sapiens
cucucaaguggccacugaaacccaggcucucu

SEQ ID NO: 314225 - RNA, 32 nt, Homo Sapiens
agcaggaagugccucugacagauuccaagacu

SEQ ID NO: 314226 - RNA, 32 nt, Homo Sapiens
gagcuacaugcaccucuccuccccucagccac

SEQ ID NO: 314227 - RNA, 30 nt, Homo Sapiens
gcuuuuccacuaaaacuccaucuuagugaa

SEQ ID NO: 314228 - RNA, 29 nt, Homo Sapiens
ugccugcauggugugcaccauagguuucc

SEQ ID NO: 314229 - RNA, 32 nt, Homo Sapiens
ggacgccgccgggagcugcggagcaugcgugg

SEQ ID NO: 314230 - RNA, 32 nt, Homo Sapiens
gacgccugcccccagcccccgcagcccucugg

SEQ ID NO: 314231 - RNA, 32 nt, Homo Sapiens
gagcgaggcggggcccggggcugucaaggaga

SEQ ID NO: 314232 - RNA, 32 nt, Homo Sapiens
gggagggggaaguuaagggggucaccuccauu

SEQ ID NO: 314233 - RNA, 32 nt, Homo Sapiens
auugcccauggcggcccuaggcccuagcagcc

SEQ ID NO: 314234 - RNA, 32 nt, Homo Sapiens
aauaggauucagaaagcuaacaguuuucauuc

SEQ ID NO: 314235 - RNA, 32 nt, Homo Sapiens
uccugagucauugcuuugggcuggggccaugg

SEQ ID NO: 314236 - RNA, 32 nt, Homo Sapiens
caaacggcauuuggcaagauggauuaucaacu

SEQ ID NO: 314237 - RNA, 32 nt, Homo Sapiens
gaaauuuacauaucaauguuucuacaguauug

SEQ ID NO: 314238 - RNA, 32 nt, Homo Sapiens
ggcagcgugucgugcaagcaucugcaauccca

SEQ ID NO: 314239 - RNA, 32 nt, Homo Sapiens
aaguguuuccugcccuggcccgagacggccca

SEQ ID NO: 314240 - RNA, 32 nt, Homo Sapiens
gaagcaucagcacaucagcaucaccuggaaau

SEQ ID NO: 314241 - RNA, 32 nt, Homo Sapiens
ccccuggccuguuccuuggaaugaggcccuuu

SEQ ID NO: 314242 - RNA, 32 nt, Homo Sapiens
cauuuccggcaaugcccugugcaugccauggu

SEQ ID NO: 314243 - RNA, 32 nt, Homo Sapiens
ccauccaagccagggaugaaauuuaacggcaa

SEQ ID NO: 314244 - RNA, 32 nt, Homo Sapiens
cugcccgcuccacaaccucaggccucguugaa

SEQ ID NO: 314245 - RNA, 32 nt, Homo Sapiens
cuucugcccugcagccuccguccuggccucag

SEQ ID NO: 314246 - RNA, 32 nt, Homo Sapiens
uuguuauggcaaacagaaacgcaacaaaaaga

SEQ ID NO: 314247 - RNA, 32 nt, Homo Sapiens
ugaccagcagugccuggcugucuccugugaug

SEQ ID NO: 314248 - RNA, 32 nt, Homo Sapiens
augacuuccuuccuugguaagccacaggacuu

SEQ ID NO: 314249 - RNA, 32 nt, Homo Sapiens
cauggggcgugaaggcacacugucccaccaca

SEQ ID NO: 314250 - RNA, 32 nt, Homo Sapiens
uauaaaacuccuuaauagauauuuuugaaauu

SEQ ID NO: 314251 - RNA, 32 nt, Homo Sapiens
uagagaggaggagggcggggcuggaggaaugu

SEQ ID NO: 314252 - RNA, 32 nt, Homo Sapiens
aagcaugcaauaaugugcaaauuuugcauuua

SEQ ID NO: 314253 - RNA, 32 nt, Homo Sapiens
gccaugggauccaaaaagucuccaucacauuu

SEQ ID NO: 314254 - RNA, 32 nt, Homo Sapiens
cgaguuggugauagauugguggucauccaaca

SEQ ID NO: 314255 - RNA, 32 nt, Homo Sapiens
uggcccaggggccgcacagacgaggcgugguc

SEQ ID NO: 314256 - RNA, 32 nt, Homo Sapiens
cucccgggacgaaggacuucccgagcggugug

SEQ ID NO: 314257 - RNA, 32 nt, Homo Sapiens
uuacaagugugagccaccacaccuggccugga

SEQ ID NO: 314258 - RNA, 32 nt, Homo Sapiens
ucagggggcuguacccugggggugccaggaaa

SEQ ID NO: 314259 - RNA, 32 nt, Homo Sapiens
gguucaacaacaacuaauuagggagacgcgca

SEQ ID NO: 314260 - RNA, 32 nt, Homo Sapiens
ccuggaaucugugccaggacuguguuuuuagc

SEQ ID NO: 314261 - RNA, 32 nt, Homo Sapiens
cuccuuccaaccccacuccccguucagcacag

SEQ ID NO: 314262 - RNA, 32 nt, Homo Sapiens
ggcuugagccaccuucuuuaccucugagcuuu

SEQ ID NO: 314263 - RNA, 32 nt, Homo Sapiens
ccugcacuccucgggggcguggggcgugccuu

SEQ ID NO: 314264 - RNA, 32 nt, Homo Sapiens
agguggucaccgaguuauuuuccaaaagcuga

SEQ ID NO: 314265 - RNA, 32 nt, Homo Sapiens
uaacccuugaagaucauuuagucaaagaaauu

SEQ ID NO: 314266 - RNA, 32 nt, Homo Sapiens
ucucugaaggcccugagcugccugccaccugc

SEQ ID NO: 314267 - RNA, 32 nt, Homo Sapiens
ccagcucuuuggcggcagcccccaccagcucc

SEQ ID NO: 314268 - RNA, 32 nt, Homo Sapiens
aaauaauaauacacaaaaaggggcuuuuccug

SEQ ID NO: 314269 - RNA, 32 nt, Homo Sapiens
cguggccucucgggccuccgcggcagcuccag

SEQ ID NO: 314270 - RNA, 32 nt, Homo Sapiens
gagccucuuuggggugaagccuggacauccca

SEQ ID NO: 314271 - RNA, 32 nt, Homo Sapiens
cugagcugggugcacggugugauuccaggagg

SEQ ID NO: 314272 - RNA, 32 nt, Homo Sapiens
cuugucagugggaaacaaacugucuaaaaauu

SEQ ID NO: 314273 - RNA, 32 nt, Homo Sapiens
uuugcuuauuuuuacuuugaguggaauguuca

SEQ ID NO: 314274 - RNA, 32 nt, Homo Sapiens
cgggcugucccuugaggugccuggacagggua

SEQ ID NO: 314275 - RNA, 32 nt, Homo Sapiens
ucauguaaaaauuuguuaauagagaaucaagu

SEQ ID NO: 314276 - RNA, 32 nt, Homo Sapiens
ccggucggguccgcaaacaccggggaucccag

SEQ ID NO: 314277 - RNA, 29 nt, Homo Sapiens
gagcauccgguccgagggcgcacacaggc

SEQ ID NO: 314278 - RNA, 29 nt, Homo Sapiens
ucgggggacagucucaguuucgugccguu

SEQ ID NO: 314279 - RNA, 32 nt, Homo Sapiens
acucggaucaacuggcagucguuguugguauu

SEQ ID NO: 314280 - RNA, 32 nt, Homo Sapiens
acccaggcaccucgagggcuauucuccugggu

SEQ ID NO: 314281 - RNA, 32 nt, Homo Sapiens
accuacugucugccuauauuaaggguccacac

SEQ ID NO: 314282 - RNA, 32 nt, Homo Sapiens
gucggauuagggagguagaaucaauaagacuc

SEQ ID NO: 314283 - RNA, 32 nt, Homo Sapiens
cuugccgcaucucuaaauaggcaaauuuucag

SEQ ID NO: 314284 - RNA, 31 nt, Homo Sapiens
cuucaucauuugaugugaugccagauacuaa

SEQ ID NO: 314285 - RNA, 32 nt, Homo Sapiens
ccucuuccacucuggagugaaguuaaugaaag

SEQ ID NO: 314286 - RNA, 32 nt, Homo Sapiens
aaaaccauuuuucuaauucuaacaaguuagaa

SEQ ID NO: 314287 - RNA, 32 nt, Homo Sapiens
cucccacaagcaugcaacagcaguaggaauug

SEQ ID NO: 314288 - RNA, 31 nt, Homo Sapiens
aucugcucgcugagaaaguccuugcugggaa

SEQ ID NO: 314289 - RNA, 32 nt, Homo Sapiens
agcagcccacccaggucagguagccagcaggg

SEQ ID NO: 314290 - RNA, 32 nt, Homo Sapiens
cggcgugcggcacgcugcagggcugaagcggc

SEQ ID NO: 314291 - RNA, 32 nt, Homo Sapiens
aguuauuaaaugauuaggcuuauuuggcaaau

SEQ ID NO: 314292 - RNA, 32 nt, Homo Sapiens
ggccgcgugugagcgcccuuugcaccuccuau

SEQ ID NO: 314293 - RNA, 32 nt, Homo Sapiens
uggcucaacacuuuaggaaacauagauuauuu

SEQ ID NO: 314294 - RNA, 32 nt, Homo Sapiens
ccuaggccagguggagaugaggauggguaaca

SEQ ID NO: 314295 - RNA, 32 nt, Homo Sapiens
acccugucucaaaaaacaaaaacaagacaugu

SEQ ID NO: 314296 - RNA, 32 nt, Homo Sapiens
aagacaguugcgccugaagauugaguguaaau

SEQ ID NO: 314297 - RNA, 32 nt, Homo Sapiens
gggcugagccccacccccaaaucccuggggca

SEQ ID NO: 314298 - RNA, 32 nt, Homo Sapiens
cccugaggccugugggggcugcaggggaggag

SEQ ID NO: 314299 - RNA, 32 nt, Homo Sapiens
ccuugcagaggucgccgaggggcccgcgccgc

SEQ ID NO: 314300 - RNA, 32 nt, Homo Sapiens
gaugaugagugauuuuuauaugcuuuuuaaau

SEQ ID NO: 314301 - RNA, 32 nt, Homo Sapiens
uacugguuucauaaguuuuacuagacucuccu

SEQ ID NO: 314302 - RNA, 32 nt, Homo Sapiens
aaacccccaucccagcaccccauccuguuguu

SEQ ID NO: 314303 - RNA, 32 nt, Homo Sapiens
acaaaagcuaagaacaaacuugcuucacaguu

SEQ ID NO: 314304 - RNA, 32 nt, Homo Sapiens
cuucucgccccggccgcggccggguccucagu

SEQ ID NO: 314305 - RNA, 32 nt, Homo Sapiens
gcugugagauggauguauuuguagccagucuc

SEQ ID NO: 314306 - RNA, 32 nt, Homo Sapiens
gaaauggggggugggggacagauucuuacgga

SEQ ID NO: 314307 - RNA, 32 nt, Homo Sapiens
ugcaacccugucauuacgucaacgcaacgucu

SEQ ID NO: 314308 - RNA, 32 nt, Homo Sapiens
ccuguaagaaugagaagucugccaagucuaag

SEQ ID NO: 314309 - RNA, 32 nt, Homo Sapiens
gauucucaacuuuuuccaaccauagaaaaggg

SEQ ID NO: 314310 - RNA, 32 nt, Homo Sapiens
ugaaugaggaaugaaacuauuguuccuguuuc

SEQ ID NO: 314311 - RNA, 32 nt, Homo Sapiens
uauuuguugaugagaaauacacugaugaaaca

SEQ ID NO: 314312 - RNA, 32 nt, Homo Sapiens
agggacgcagcuggggguguccuggaauucac

SEQ ID NO: 314313 - RNA, 31 nt, Homo Sapiens
gcuggccuggacugccugugcucugggcucc

SEQ ID NO: 314314 - RNA, 32 nt, Homo Sapiens
gaaucugccucccacccacugacucagggcuc

SEQ ID NO: 314315 - RNA, 32 nt, Homo Sapiens
guugagggugacaugcacagaacuggaacaga

SEQ ID NO: 314316 - RNA, 32 nt, Homo Sapiens
ccacucuugcauucugggugccugcagacuua

SEQ ID NO: 314317 - RNA, 32 nt, Homo Sapiens
uuccuaauuaaaagcugaauaaacuuugagaa

SEQ ID NO: 314318 - RNA, 32 nt, Homo Sapiens
acugcucuaaaaguuggagaagucuugcaguu

SEQ ID NO: 314319 - RNA, 32 nt, Homo Sapiens
ccggcgggaggcagccaguccaggcgcccgcu

SEQ ID NO: 314320 - RNA, 32 nt, Homo Sapiens
cuuuucagaagucgggaagcaguauguuugcc

SEQ ID NO: 314321 - RNA, 32 nt, Homo Sapiens
aaaaagcaaaaauaaaauaauuauaaaugguc

SEQ ID NO: 314322 - RNA, 32 nt, Homo Sapiens
gguuucaccguguuggcuaggcuggucucaaa

SEQ ID NO: 314323 - RNA, 32 nt, Homo Sapiens
uccugugguagugucuuucagguauccguucc

SEQ ID NO: 314324 - RNA, 32 nt, Homo Sapiens
ugccaucucugguuaagaugggcucacccucu

SEQ ID NO: 314325 - RNA, 32 nt, Homo Sapiens
ggacaucacuguauuuggaauucugccugcua

SEQ ID NO: 314326 - RNA, 32 nt, Homo Sapiens
uacauucuaacccuacauuucuaaucauuguu

SEQ ID NO: 314327 - RNA, 32 nt, Homo Sapiens
guucagcuguccucccuccaccuaccacucac

SEQ ID NO: 314328 - RNA, 32 nt, Homo Sapiens
uuauaaauauauuauucugaaauaauguuguc

SEQ ID NO: 314329 - RNA, 32 nt, Homo Sapiens
agugagagacaguaaaugugacaaaaguaaaa

SEQ ID NO: 314330 - RNA, 32 nt, Homo Sapiens
aucugaccaauauggguaaccaaugcccuuag

SEQ ID NO: 314331 - RNA, 32 nt, Homo Sapiens
acuuccuguccgcccuucuccucugccaucca

SEQ ID NO: 314332 - RNA, 32 nt, Homo Sapiens
agaaaaaagcaucucaguuaggagaagagaca

SEQ ID NO: 314333 - RNA, 32 nt, Homo Sapiens
gccauuuuggaaagaaucacauucuuaaaugu

SEQ ID NO: 314334 - RNA, 32 nt, Homo Sapiens
ggacaagaaguaccugaggaguggaggaguga

SEQ ID NO: 314335 - RNA, 32 nt, Homo Sapiens
uauucacagcucuuccauguagacuuaccuuu

SEQ ID NO: 314336 - RNA, 32 nt, Homo Sapiens
aaagacagcuggauguggugaaaggcuguggc

SEQ ID NO: 314337 - RNA, 32 nt, Homo Sapiens
cauuacugggguaccuaggagucaggacuuuu

SEQ ID NO: 314338 - RNA, 32 nt, Homo Sapiens
gccacaaaacugacaguaaaucucacaaauga

SEQ ID NO: 314339 - RNA, 32 nt, Homo Sapiens
agagcaauuauugaggacaauuauugagcuuu

SEQ ID NO: 314340 - RNA, 32 nt, Homo Sapiens
gcauuagguucaaaacagaggcuauaagugug

SEQ ID NO: 314341 - RNA, 32 nt, Homo Sapiens
cggucugcgcauccuccugcguuuucucgcuu

SEQ ID NO: 314342 - RNA, 32 nt, Homo Sapiens
ggagcugccguggccacccccgcugcccagug

SEQ ID NO: 314343 - RNA, 32 nt, Homo Sapiens
agaagggaccagggagguugcaucauuguuuu

SEQ ID NO: 314344 - RNA, 32 nt, Homo Sapiens
aaggucaaaguucugguccacaaacccuuccc

SEQ ID NO: 314345 - RNA, 32 nt, Homo Sapiens
gagccaccgcgcccggccccaaucaucuguuu

SEQ ID NO: 314346 - RNA, 32 nt, Homo Sapiens
gaggcagugucugcuguauaucagugcccagu

SEQ ID NO: 314347 - RNA, 32 nt, Homo Sapiens
ugggagacgucgcuuuccuaccgggcgagaag

SEQ ID NO: 314348 - RNA, 32 nt, Homo Sapiens
aaaacuagguaguauugugcacugauuugacc

SEQ ID NO: 314349 - RNA, 32 nt, Homo Sapiens
caguuaauuacauagucaugauuguucuacgu

SEQ ID NO: 314350 - RNA, 30 nt, Homo Sapiens
gaaccugggcuaaugggagacuguagagaa

SEQ ID NO: 314351 - RNA, 32 nt, Homo Sapiens
aauauucgaggugaaucugauguugcgaguuc

SEQ ID NO: 314352 - RNA, 32 nt, Homo Sapiens
uuuuaauccucugaugcuuccaucuuccuguu

SEQ ID NO: 314353 - RNA, 32 nt, Homo Sapiens
gagccacccacgccgccgcggccccacgcugg

SEQ ID NO: 314354 - RNA, 32 nt, Homo Sapiens
guuuccaccaagaauucuuagcacugguguaa

SEQ ID NO: 314355 - RNA, 32 nt, Homo Sapiens
ccagagagccgcggcgccucguuccgaggagc

SEQ ID NO: 314356 - RNA, 32 nt, Homo Sapiens
guuugagccugggcaauguagcaagacccccc

SEQ ID NO: 314357 - RNA, 32 nt, Homo Sapiens
aauuauuccuucuuacucuccucuucuagcau

SEQ ID NO: 314358 - RNA, 32 nt, Homo Sapiens
acuauuucuuccuuuuaagauucauaaguaac

SEQ ID NO: 314359 - RNA, 32 nt, Homo Sapiens
uuuggggaaggaaaagaaaguaguuguuuuac

SEQ ID NO: 314360 - RNA, 32 nt, Homo Sapiens
ggaacuugcaagcagccagggaacgcugaaaa

SEQ ID NO: 314361 - RNA, 32 nt, Homo Sapiens
cuagagggcuaaggauucugucugcugcuuug

SEQ ID NO: 314362 - RNA, 32 nt, Homo Sapiens
uugaugacuauuaaacaaaaacccuguugucg

SEQ ID NO: 314363 - RNA, 32 nt, Homo Sapiens
ucaacagaggauguaccagcaacugugucccc

SEQ ID NO: 314364 - RNA, 32 nt, Homo Sapiens
gcaguucuccucccggcccccguuaccccccu

SEQ ID NO: 314365 - RNA, 32 nt, Homo Sapiens
ugaguucuugucagcaagaucaccugcuuuua

SEQ ID NO: 314366 - RNA, 32 nt, Homo Sapiens
guguguuuuccacagucccugcuucccgaggu

SEQ ID NO: 314367 - RNA, 32 nt, Homo Sapiens
uagcacucuguuggauuaccaauacacaaaac

SEQ ID NO: 314368 - RNA, 32 nt, Homo Sapiens
uggacucccagcugacacccugccggaggcaa

SEQ ID NO: 314369 - RNA, 32 nt, Homo Sapiens
uaacaggagcacauuuuacaaaagugagaucc

SEQ ID NO: 314370 - RNA, 32 nt, Homo Sapiens
aauuguuggagcucaguaaagguaggaggaag

SEQ ID NO: 314371 - RNA, 32 nt, Homo Sapiens
uuguuaaguucuuuagaaaguaguugucaagu

SEQ ID NO: 314372 - RNA, 32 nt, Homo Sapiens
aaagacgcccugcaugguuacaauggcucagg

SEQ ID NO: 314373 - RNA, 32 nt, Homo Sapiens
acuaguagaaaguucauauucuaccucuaaaa

SEQ ID NO: 314374 - RNA, 32 nt, Homo Sapiens
guucacaguggauuucuuucugccgaagacac

SEQ ID NO: 314375 - RNA, 32 nt, Homo Sapiens
cuggccccaggcagcccuuuucccuccagugg

SEQ ID NO: 314376 - RNA, 32 nt, Homo Sapiens
aaaagaagcuacuuccuauauuacaguaugaa

SEQ ID NO: 314377 - RNA, 32 nt, Homo Sapiens
gaccucgcgcaugcgagcaccuuccugucucu

SEQ ID NO: 314378 - RNA, 32 nt, Homo Sapiens
cuaagggacuuccaucuuggucugaaguccug

SEQ ID NO: 314379 - RNA, 32 nt, Homo Sapiens
ugugugggggucaucacugccuuggggaggag

SEQ ID NO: 314380 - RNA, 27 nt, Homo Sapiens
gucaccuccuucuucucccuuagagaa

SEQ ID NO: 314381 - RNA, 32 nt, Homo Sapiens
agaauugcacuaauucauagaacucuuuacau

SEQ ID NO: 314382 - RNA, 32 nt, Homo Sapiens
ccuacauuuuggacgguuuaucaauaaacaug

SEQ ID NO: 314383 - RNA, 32 nt, Homo Sapiens
aaugcacagccacuucccuuccccagcuuggc

SEQ ID NO: 314384 - RNA, 32 nt, Homo Sapiens
ccaccgccccgaccccucuccucucugcaaga

SEQ ID NO: 314385 - RNA, 32 nt, Homo Sapiens
uuaaaguuauuuaagaaaaacuguuacaucac

SEQ ID NO: 314386 - RNA, 32 nt, Homo Sapiens
cccgcagccccggcccccugcccaccaugaac

SEQ ID NO: 314387 - RNA, 32 nt, Homo Sapiens
ccccugcgcgcccccucccgcggggauccagu

SEQ ID NO: 314388 - RNA, 32 nt, Homo Sapiens
uugauugugucuuuuuuuuuuuuuuuggaguc

SEQ ID NO: 314389 - RNA, 32 nt, Homo Sapiens
agcagggagcagccugggucucugucccagac

SEQ ID NO: 314390 - RNA, 32 nt, Homo Sapiens
uauucaaagaaaacaggaaaaaaguuauugua

SEQ ID NO: 314391 - RNA, 32 nt, Homo Sapiens
cggugugaacagggauugccccccgccuucaa

SEQ ID NO: 314392 - RNA, 32 nt, Homo Sapiens
acugggagggucaagaaugaauccggagcugg

SEQ ID NO: 314393 - RNA, 32 nt, Homo Sapiens
gagaaaguugagguucuucaccuaccaacgag

SEQ ID NO: 314394 - RNA, 32 nt, Homo Sapiens
acagccuucauuuuuccaaggugaguaggaug

SEQ ID NO: 314395 - RNA, 32 nt, Homo Sapiens
auguuggaauaauuuuuaaauaauguuuacau

SEQ ID NO: 314396 - RNA, 32 nt, Homo Sapiens
uccugucacccauuuugaagaguggcagaacu

SEQ ID NO: 314397 - RNA, 32 nt, Homo Sapiens
gccagguuggcagcugacgggacagccggggu

SEQ ID NO: 314398 - RNA, 32 nt, Homo Sapiens
uucuauucugcacuacaaucauuuugacaauu

SEQ ID NO: 314399 - RNA, 32 nt, Homo Sapiens
uacuucauaguaacuacuuaaauaaugguaag

SEQ ID NO: 314400 - RNA, 32 nt, Homo Sapiens
ccaccuccaucccagacaggucccuccccuuc

SEQ ID NO: 314401 - RNA, 32 nt, Homo Sapiens
gcugaguaaaaugaaggaaaagcauguuaugu

SEQ ID NO: 314402 - RNA, 32 nt, Homo Sapiens
accuggaggauaccugcuaccuauuuugugaa

SEQ ID NO: 314403 - RNA, 32 nt, Homo Sapiens
ccagauucucccugacagcccugucccccucu

SEQ ID NO: 314404 - RNA, 27 nt, Homo Sapiens
ggccucuuguuucucagcccccgcagc

SEQ ID NO: 314405 - RNA, 32 nt, Homo Sapiens
cacagugucuccugggcuguggucucaucuca

SEQ ID NO: 314406 - RNA, 32 nt, Homo Sapiens
uugaccuguauuccacuuacuccaccuuccau

SEQ ID NO: 314407 - RNA, 32 nt, Homo Sapiens
uaaaagcauccguggggaccgaaagagguuuu

SEQ ID NO: 314408 - RNA, 32 nt, Homo Sapiens
ggcgcaaccuggugggggcccccagcagggac

SEQ ID NO: 314409 - RNA, 32 nt, Homo Sapiens
cccaucuugaggcggcagcggcugcgcuacgg

SEQ ID NO: 314410 - RNA, 32 nt, Homo Sapiens
cgcaccauaccggcgcgggcaccuggggagaa

SEQ ID NO: 314411 - RNA, 32 nt, Homo Sapiens
cucaauucccucaccugaaauaggaaaugaga

SEQ ID NO: 314412 - RNA, 32 nt, Homo Sapiens
gucccguguuacucaccucaacguguuuuaac

SEQ ID NO: 314413 - RNA, 32 nt, Homo Sapiens
uggacagcaggggccacguggagcccgggccg

SEQ ID NO: 314414 - RNA, 32 nt, Homo Sapiens
accccucgaggaacaagguugcacaccagcuu

SEQ ID NO: 314415 - RNA, 32 nt, Homo Sapiens
uucaaaaugcaaagugaaugauuaguaaaauu

SEQ ID NO: 314416 - RNA, 32 nt, Homo Sapiens
ccggcgaggaggagggagggccgccagugucg

SEQ ID NO: 314417 - RNA, 32 nt, Homo Sapiens
cgauaaguaguaaaacaguauuugaguuucaa

SEQ ID NO: 314418 - RNA, 32 nt, Homo Sapiens
cccagcacgcguugcggcagccuggcgagcgu

SEQ ID NO: 314419 - RNA, 32 nt, Homo Sapiens
aauacugugaaaaaaaucaugagaaguauccu

SEQ ID NO: 314420 - RNA, 32 nt, Homo Sapiens
ccgggcagggcuggagcugggcugggaucccg

SEQ ID NO: 314421 - RNA, 32 nt, Homo Sapiens
agccccagucacugucagggucgggccagccc

SEQ ID NO: 314422 - RNA, 32 nt, Homo Sapiens
guccaccgcucccggcgccggcuccccgccuc

SEQ ID NO: 314423 - RNA, 32 nt, Homo Sapiens
aaaacacaaaaauuagccagguguggcggcga

SEQ ID NO: 314424 - RNA, 32 nt, Homo Sapiens
ggaaugggguuuggagcagcccugccccucgc

SEQ ID NO: 314425 - RNA, 32 nt, Homo Sapiens
ccuucuguaguaauaaaguuuuugccacugua

SEQ ID NO: 314426 - RNA, 32 nt, Homo Sapiens
cacuccuauccugguuuuggucaggcccuugg

SEQ ID NO: 314427 - RNA, 32 nt, Homo Sapiens
ccaucaaauacauguuuccaauaaagacuauu

SEQ ID NO: 314428 - RNA, 32 nt, Homo Sapiens
guaaagaugauuaaaacguaucuuuccuuuau

SEQ ID NO: 314429 - RNA, 32 nt, Homo Sapiens
agccuggcuguuucacaguauuucaugaauuu

SEQ ID NO: 314430 - RNA, 32 nt, Homo Sapiens
caaugccuagagacaugcucccugcccucucc

SEQ ID NO: 314431 - RNA, 32 nt, Homo Sapiens
ggcucagagugccgcggggggcguggggcggu

SEQ ID NO: 314432 - RNA, 32 nt, Homo Sapiens
ugagucauuauguagcugucguacauugagca

SEQ ID NO: 314433 - RNA, 32 nt, Homo Sapiens
gugucagggggccccagggucugugucugagc

SEQ ID NO: 314434 - RNA, 32 nt, Homo Sapiens
cccuuauggguacauuucaguaaucucucacu

SEQ ID NO: 314435 - RNA, 32 nt, Homo Sapiens
cagaaaacacaagugccuucuccacggugcaa

SEQ ID NO: 314436 - RNA, 32 nt, Homo Sapiens
cccugugccccucccacccugcccuugggcac

SEQ ID NO: 314437 - RNA, 32 nt, Homo Sapiens
ggaggguggguccgcucucgcggccgccgaag

SEQ ID NO: 314438 - RNA, 32 nt, Homo Sapiens
ugguaggccacaguccugaacugcacaacugg

SEQ ID NO: 314439 - RNA, 32 nt, Homo Sapiens
cuagugccauugcagguggcuuucucacauuc

SEQ ID NO: 314440 - RNA, 32 nt, Homo Sapiens
aggugcccacccagcuacuggggaggcugagu

SEQ ID NO: 314441 - RNA, 32 nt, Homo Sapiens
caucggccggcgaccguuccggcggccauugc

SEQ ID NO: 314442 - RNA, 32 nt, Homo Sapiens
ccugcguuaggucugguggcggucaaugcgcu

SEQ ID NO: 314443 - RNA, 32 nt, Homo Sapiens
ggaagggagguagcucagggaccuccacugug

SEQ ID NO: 314444 - RNA, 32 nt, Homo Sapiens
uggcugugucauuguuuaacuuggauauuuua

SEQ ID NO: 314445 - RNA, 32 nt, Homo Sapiens
agccugggugacucagcgguggucuccauuca

SEQ ID NO: 314446 - RNA, 32 nt, Homo Sapiens
ccagggguccagugcagcugcugcugggcacu

SEQ ID NO: 314447 - RNA, 32 nt, Homo Sapiens
acauaagcuguguauacacacacacacacaca

SEQ ID NO: 314448 - RNA, 32 nt, Homo Sapiens
ugguuuugggguuuuuuuuuuaaauuguuuug

SEQ ID NO: 314449 - RNA, 32 nt, Homo Sapiens
gggaagacacagagacucguaccugcgcuguu

SEQ ID NO: 314450 - RNA, 32 nt, Homo Sapiens
agagcuggcugggccaccuggucucagccacc

SEQ ID NO: 314451 - RNA, 32 nt, Homo Sapiens
gcuaaccuuauauaucucuauagacaaaugug

SEQ ID NO: 314452 - RNA, 32 nt, Homo Sapiens
ugcucuuggcuucaugguguuccuggaaggca

SEQ ID NO: 314453 - RNA, 32 nt, Homo Sapiens
ccucuggaggacaauggacaaaaugucucuua

SEQ ID NO: 314454 - RNA, 32 nt, Homo Sapiens
cugacucuugagcccaaaacuuccucaaauca

SEQ ID NO: 314455 - RNA, 31 nt, Homo Sapiens
gcugcgcguaacugccuggucagugcccaga

SEQ ID NO: 314456 - RNA, 32 nt, Homo Sapiens
ugacauguccacucuaaacaugucacuuuucu

SEQ ID NO: 314457 - RNA, 32 nt, Homo Sapiens
caaacucggcauucuucagucagcuugaggau

SEQ ID NO: 314458 - RNA, 32 nt, Homo Sapiens
aaccuuuugggguugauguggguugccaguua

SEQ ID NO: 314459 - RNA, 32 nt, Homo Sapiens
gcccgugcguugcugcagaccaucuggggucu

SEQ ID NO: 314460 - RNA, 32 nt, Homo Sapiens
cugcugcugcuucuccugcugcugggaccugc

SEQ ID NO: 314461 - RNA, 32 nt, Homo Sapiens
agcaagagccgaucuccucacaagggagucaa

SEQ ID NO: 314462 - RNA, 32 nt, Homo Sapiens
aggaagaaauuuaaaacuauauaacuucuaaa

SEQ ID NO: 314463 - RNA, 30 nt, Homo Sapiens
ccuggggucaagaaguuugagucugggagc

SEQ ID NO: 314464 - RNA, 32 nt, Homo Sapiens
acccugaggccauuaggccugauuuuaccuug

SEQ ID NO: 314465 - RNA, 32 nt, Homo Sapiens
uuuuuucucccucugaacgguuaggcuauggc

SEQ ID NO: 314466 - RNA, 32 nt, Homo Sapiens
ucagcauuaauuuggggaauuuuuucacuuag

SEQ ID NO: 314467 - RNA, 32 nt, Homo Sapiens
uuuuaaaaaugaauuugacuaacuuaagugca

SEQ ID NO: 314468 - RNA, 32 nt, Homo Sapiens
cuccaucugaaacaggccaggugagcaucaug

SEQ ID NO: 314469 - RNA, 32 nt, Homo Sapiens
cugugauuuguuuuuauugcuuguuuuguuuc

SEQ ID NO: 314470 - RNA, 32 nt, Homo Sapiens
cugugguugaagauuucuuugacauuauuuau

SEQ ID NO: 314471 - RNA, 32 nt, Homo Sapiens
cgggggcgggugcgcagacaaggagaugaguu

SEQ ID NO: 314472 - RNA, 32 nt, Homo Sapiens
auuuuagcuauggaagugaccugcugugacac

SEQ ID NO: 314473 - RNA, 32 nt, Homo Sapiens
gacagcaucccugaucccggcgcucccugcca

SEQ ID NO: 314474 - RNA, 32 nt, Homo Sapiens
agccccacgcaugcgcgacuuuucuagcccga

SEQ ID NO: 314475 - RNA, 32 nt, Homo Sapiens
auuagaucaggugagaagaucacacaggauuc

SEQ ID NO: 314476 - RNA, 32 nt, Homo Sapiens
agaccccacccccugccugcucucuuucccua

SEQ ID NO: 314477 - RNA, 32 nt, Homo Sapiens
guccaagcuggcgaacuauuaagcuguuuaaa

SEQ ID NO: 314478 - RNA, 32 nt, Homo Sapiens
gauuugagaaaguuguacagaaauguguucau

SEQ ID NO: 314479 - RNA, 32 nt, Homo Sapiens
uguaguauccuuucacuucuuaaaggaaacaa

SEQ ID NO: 314480 - RNA, 32 nt, Homo Sapiens
ccuuuagaaaaaauucaccacuauaggcuucu

SEQ ID NO: 314481 - RNA, 30 nt, Homo Sapiens
caaucuuuggacugcauccugguugccucu

SEQ ID NO: 314482 - RNA, 32 nt, Homo Sapiens
uccuagguaagagccccuaaacaucaagcaau

SEQ ID NO: 314483 - RNA, 32 nt, Homo Sapiens
auguuuguuuaaccuuucaucagugauggaca

SEQ ID NO: 314484 - RNA, 32 nt, Homo Sapiens
gaauccaggcuggucguaaacaucucagagau

SEQ ID NO: 314485 - RNA, 32 nt, Homo Sapiens
cacuggacguuggcagggaguuggcugugaga

SEQ ID NO: 314486 - RNA, 32 nt, Homo Sapiens
aagaaaaaagacaaaaucgaccauaaaagacc

SEQ ID NO: 314487 - RNA, 32 nt, Homo Sapiens
ugcccugaauucuauccuacuccaccuucagc

SEQ ID NO: 314488 - RNA, 32 nt, Homo Sapiens
gguagucugccuccagagcuagugucaacugu

SEQ ID NO: 314489 - RNA, 32 nt, Homo Sapiens
ggggaauuauaugcuuaagaaaaaguaggaca

SEQ ID NO: 314490 - RNA, 32 nt, Homo Sapiens
ggcggacuccuggccugacugcggggcuuuuu

SEQ ID NO: 314491 - RNA, 32 nt, Homo Sapiens
aucuuuauauuaaaaaaguaaacuguuaugaa

SEQ ID NO: 314492 - RNA, 32 nt, Homo Sapiens
ccgaccugguuuucagccccagccccgccacu

SEQ ID NO: 314493 - RNA, 32 nt, Homo Sapiens
ggggcugaaguaccuaagugugaaugucucuc

SEQ ID NO: 314494 - RNA, 32 nt, Homo Sapiens
aaggauuuuuaaaaauaaauaacagucuuacc

SEQ ID NO: 314495 - RNA, 32 nt, Homo Sapiens
guuauccgccgccaccaagacgcggcacggcg

SEQ ID NO: 314496 - RNA, 32 nt, Homo Sapiens
ggagucugagauuuuacccaacuugugaguua

SEQ ID NO: 314497 - RNA, 32 nt, Homo Sapiens
aagcugcuuaaguuccuuaaguauuguuugua

SEQ ID NO: 314498 - RNA, 32 nt, Homo Sapiens
ugggagacuuuggcgagggucuguggguaaaa

SEQ ID NO: 314499 - RNA, 32 nt, Homo Sapiens
uuaauauuuaugucucuguuauuguuaguuuu

SEQ ID NO: 314500 - RNA, 32 nt, Homo Sapiens
uuuaaucagacauucucaaguuucacacagua

SEQ ID NO: 314501 - RNA, 32 nt, Homo Sapiens
uaaacuccacuuuacgcuggaaugcuuucuuu

SEQ ID NO: 314502 - RNA, 32 nt, Homo Sapiens
ccuggacccagcuuugcuaggucuccuuggaa

SEQ ID NO: 314503 - RNA, 32 nt, Homo Sapiens
auacuguuucuuucuuuuuuuuuucauuacug

SEQ ID NO: 314504 - RNA, 32 nt, Homo Sapiens
gagcuccuggacgcagaggcccugcccuugcc

SEQ ID NO: 314505 - RNA, 32 nt, Homo Sapiens
uggugccagacaaagcacuuuaugagacgagu

SEQ ID NO: 314506 - RNA, 32 nt, Homo Sapiens
aaaauuuccagaaggucaggaauuuuuggaga

SEQ ID NO: 314507 - RNA, 31 nt, Homo Sapiens
uagcccuugcggagaaacacccuguuaguuc

SEQ ID NO: 314508 - RNA, 29 nt, Homo Sapiens
ccauugaaaguucucuauuuucuaagaag

SEQ ID NO: 314509 - RNA, 32 nt, Homo Sapiens
uuauuagucuuagggauuuauuuucaauuaau

SEQ ID NO: 314510 - RNA, 32 nt, Homo Sapiens
ggaacugucacagauuagaggaguaaggagaa

SEQ ID NO: 314511 - RNA, 32 nt, Homo Sapiens
accuccgccucccagguucacgccauucuccu

SEQ ID NO: 314512 - RNA, 32 nt, Homo Sapiens
ucucuuuaaauguugaaagauguuagguuguc

SEQ ID NO: 314513 - RNA, 30 nt, Homo Sapiens
auaaugauguagcaucugcaaaauauaugc

SEQ ID NO: 314514 - RNA, 32 nt, Homo Sapiens
auggcauuaacuuauaaaugaguguguuugac

SEQ ID NO: 314515 - RNA, 32 nt, Homo Sapiens
gggugccggggccccuuuggcuccucaccgug

SEQ ID NO: 314516 - RNA, 32 nt, Homo Sapiens
ucuaaagccuacguugguuaggcugauggcag

SEQ ID NO: 314517 - RNA, 32 nt, Homo Sapiens
auggcagcagugcuugccaucuuguugcacag

SEQ ID NO: 314518 - RNA, 32 nt, Homo Sapiens
aaguuaguaguacuguacuaagagcucugccc

SEQ ID NO: 314519 - RNA, 32 nt, Homo Sapiens
caccccacagcuccaggaaccuugaagccaau

SEQ ID NO: 314520 - RNA, 32 nt, Homo Sapiens
agcgcuccucccuggaguucagcccucggcuu

SEQ ID NO: 314521 - RNA, 32 nt, Homo Sapiens
aacuuuucgggaacuggaacuguuuaacuuga

SEQ ID NO: 314522 - RNA, 32 nt, Homo Sapiens
guguaaaaagaaauaaauuuuauuuuuuacgu

SEQ ID NO: 314523 - RNA, 32 nt, Homo Sapiens
aucaaaauauuuuuggguuuuuuguuuuguuu

SEQ ID NO: 314524 - RNA, 32 nt, Homo Sapiens
ugccaccggccgcgggacuggcugggacuggc

SEQ ID NO: 314525 - RNA, 32 nt, Homo Sapiens
cagaacguggcucugcuggccggagcaaacuc

SEQ ID NO: 314526 - RNA, 32 nt, Homo Sapiens
ugucggugaauaaaugaaaccaaucucaauuu

SEQ ID NO: 314527 - RNA, 32 nt, Homo Sapiens
aguauuugauaaaaacagguaauguugaugaa

SEQ ID NO: 314528 - RNA, 32 nt, Homo Sapiens
gacuaccccguccaaaguuugaugcuauguag

SEQ ID NO: 314529 - RNA, 32 nt, Homo Sapiens
ucccagcuuuugguugucaucaugucugugug

SEQ ID NO: 314530 - RNA, 32 nt, Homo Sapiens
gauauguuggacaugaauuacccugucaugaa

SEQ ID NO: 314531 - RNA, 32 nt, Homo Sapiens
ggaucaauauauuuaggugguauugaaaaugc

SEQ ID NO: 314532 - RNA, 32 nt, Homo Sapiens
ugagcuguuuuaaauacugguguauuuucaga

SEQ ID NO: 314533 - RNA, 32 nt, Homo Sapiens
ggcgguggcacccccuccugcuggugccagug

SEQ ID NO: 314534 - RNA, 32 nt, Homo Sapiens
auaaauuaaaaauaaauuguguuugaaguaua

SEQ ID NO: 314535 - RNA, 32 nt, Homo Sapiens
uggcucacaccuguaauugcagcacucuggga

SEQ ID NO: 314536 - RNA, 32 nt, Homo Sapiens
aagaauaugugcuacauacacaacggaguacu

SEQ ID NO: 314537 - RNA, 32 nt, Homo Sapiens
cuugggugggagcagccacgggucagccacaa

SEQ ID NO: 314538 - RNA, 32 nt, Homo Sapiens
cucccuucuggugaugacucaggguuguauag

SEQ ID NO: 314539 - RNA, 32 nt, Homo Sapiens
uaaaaaucaaagaugaucucuaucacuuugcc

SEQ ID NO: 314540 - RNA, 32 nt, Homo Sapiens
agaaacaaacaaacaauaaauuuaaacuagaa

SEQ ID NO: 314541 - RNA, 32 nt, Homo Sapiens
ccacaccccaggccggcccccgcccaucgcug

SEQ ID NO: 314542 - RNA, 32 nt, Homo Sapiens
gguggcagucugaucugacaugauuuucuugc

SEQ ID NO: 314543 - RNA, 32 nt, Homo Sapiens
caauauggacucagcucuggcucucuguguga

SEQ ID NO: 314544 - RNA, 32 nt, Homo Sapiens
uuguauuguuuaauuuuuuuuaacaguugucu

SEQ ID NO: 314545 - RNA, 32 nt, Homo Sapiens
uccuguauauauauguauguauauacacacgu

SEQ ID NO: 314546 - RNA, 32 nt, Homo Sapiens
uauuugagaaaauaaacaucugagucauucaa

SEQ ID NO: 314547 - RNA, 32 nt, Homo Sapiens
ccucuccucacgggaggguuggagguggggaa

SEQ ID NO: 314548 - RNA, 32 nt, Homo Sapiens
uaaauguccaacaaagggaagagagcaccucu

SEQ ID NO: 314549 - RNA, 32 nt, Homo Sapiens
aauagcuggaguuuuucuuauucagguuuaau

SEQ ID NO: 314550 - RNA, 32 nt, Homo Sapiens
cagggcccagcuccaugguucuccucgccuca

SEQ ID NO: 314551 - RNA, 32 nt, Homo Sapiens
acgcugccuacagucacggaaugccaaggaca

SEQ ID NO: 314552 - RNA, 32 nt, Homo Sapiens
ucagcugcaacaugagcuccgcagccaggucc

SEQ ID NO: 314553 - RNA, 32 nt, Homo Sapiens
gaggccaggguggaacugggguugccagcagg

SEQ ID NO: 314554 - RNA, 32 nt, Homo Sapiens
uuuuaauuacaauaaugaguucacuacagacg

SEQ ID NO: 314555 - RNA, 32 nt, Homo Sapiens
augaggcccgcgagacccagcacgcugaggag

SEQ ID NO: 314556 - RNA, 32 nt, Homo Sapiens
aaaggaaaucccaaucuuauuauggaaagcca

SEQ ID NO: 314557 - RNA, 32 nt, Homo Sapiens
cauccuuuuuaaaauaauguucugauacuuaa

SEQ ID NO: 314558 - RNA, 32 nt, Homo Sapiens
uguguuuaaagucuuguaaaguucaugucuuu

SEQ ID NO: 314559 - RNA, 32 nt, Homo Sapiens
uaaaccaagaaauacgcauauuuuuaaggcuu

SEQ ID NO: 314560 - RNA, 32 nt, Homo Sapiens
gccugcaaucccagcgcuuugggaggccgacg

SEQ ID NO: 314561 - RNA, 32 nt, Homo Sapiens
agagagacaccuggucacccaggcugcagaaa

SEQ ID NO: 314562 - RNA, 32 nt, Homo Sapiens
aggaguuaagcggccucugggguguuggggaa

SEQ ID NO: 314563 - RNA, 32 nt, Homo Sapiens
uuuuuuacgguuuuuauuuauucgugagccuc

SEQ ID NO: 314564 - RNA, 32 nt, Homo Sapiens
uucaugcaggaaucagaugccucgaauuuccu

SEQ ID NO: 314565 - RNA, 32 nt, Homo Sapiens
ccuaacauuguaauauacaguacugccacauu

SEQ ID NO: 314566 - RNA, 32 nt, Homo Sapiens
gaaauuaaccaccuaggaauuuaauauuguug

SEQ ID NO: 314567 - RNA, 32 nt, Homo Sapiens
uacaacaguuuagguuuaagaugaccaaugac

SEQ ID NO: 314568 - RNA, 32 nt, Homo Sapiens
cuugccacccucagugccacaagaggggaccc

SEQ ID NO: 314569 - RNA, 32 nt, Homo Sapiens
uauuuauaccaauaaaaugauuuuacaagugg

SEQ ID NO: 314570 - RNA, 32 nt, Homo Sapiens
acagggguucccucagucuuuccaguagugcc

SEQ ID NO: 314571 - RNA, 32 nt, Homo Sapiens
gcacgagggggaagaaaagggaauuccaaccu

SEQ ID NO: 314572 - RNA, 32 nt, Homo Sapiens
ugguccaucagcugccagccccggcccuggcc

SEQ ID NO: 314573 - RNA, 32 nt, Homo Sapiens
ugcaaaauuggaaacguggucuguauauuauu

SEQ ID NO: 314574 - RNA, 32 nt, Homo Sapiens
ugguuuuccugaccugcccugauuccacaugc

SEQ ID NO: 314575 - RNA, 32 nt, Homo Sapiens
ggcaagguuuuuaaucgaaaagcaaaacuugc

SEQ ID NO: 314576 - RNA, 32 nt, Homo Sapiens
cacagaaccagggauggcucuguagcucugac

SEQ ID NO: 314577 - RNA, 32 nt, Homo Sapiens
uuguuugucugucaaggugccuuccucugcug

SEQ ID NO: 314578 - RNA, 32 nt, Homo Sapiens
acuccuccaguagcggcugcacgucgugcaau

SEQ ID NO: 314579 - RNA, 32 nt, Homo Sapiens
gugggaucuugccaaggugcugccuuuaggau

SEQ ID NO: 314580 - RNA, 32 nt, Homo Sapiens
ggguccagugcgggcucccgcugcugggggag

SEQ ID NO: 314581 - RNA, 32 nt, Homo Sapiens
cucggcuccucgcacgcugcugggguaaguug

SEQ ID NO: 314582 - RNA, 32 nt, Homo Sapiens
cugccuggcgagucaggcgcgcggggcggcgu

SEQ ID NO: 314583 - RNA, 32 nt, Homo Sapiens
gaccaugcuccgccuccaccagggccacagag

SEQ ID NO: 314584 - RNA, 32 nt, Homo Sapiens
ugaaagggagaagagggaaaaggaagcacguc

SEQ ID NO: 314585 - RNA, 32 nt, Homo Sapiens
uuuuuacuauauucacaggguugugcaaccau

SEQ ID NO: 314586 - RNA, 32 nt, Homo Sapiens
cgcuccgggaggcccgggagcggcaguggaac

SEQ ID NO: 314587 - RNA, 32 nt, Homo Sapiens
gcaacuagaaaagaaaaagaaagguuccaagg

SEQ ID NO: 314588 - RNA, 32 nt, Homo Sapiens
uccagacaugguuguagcauauuuucaauuag

SEQ ID NO: 314589 - RNA, 32 nt, Homo Sapiens
cuagagacaaugaugcuaguuugcauauguuu

SEQ ID NO: 314590 - RNA, 32 nt, Homo Sapiens
augaagaccuaaaugaccucagcaaauccucu

SEQ ID NO: 314591 - RNA, 32 nt, Homo Sapiens
gccugagggugggcaugagucuugccagaaug

SEQ ID NO: 314592 - RNA, 32 nt, Homo Sapiens
ccugccugaggguggggcacacacaaccaggg

SEQ ID NO: 314593 - RNA, 32 nt, Homo Sapiens
uccaacacuuccccagauuaauuccuaccugc

SEQ ID NO: 314594 - RNA, 32 nt, Homo Sapiens
uauucaagaaaacggaucuuggaucuuugcau

SEQ ID NO: 314595 - RNA, 32 nt, Homo Sapiens
gccauggauuaccuggaacaaagugcagauua

SEQ ID NO: 314596 - RNA, 32 nt, Homo Sapiens
aagcgcaggaagcucacuaauaauagcaagau

SEQ ID NO: 314597 - RNA, 32 nt, Homo Sapiens
cacuucgggaggugggggcacuccacacuggg

SEQ ID NO: 314598 - RNA, 32 nt, Homo Sapiens
uacuuuuaacugugacuacaguauuuacugag

SEQ ID NO: 314599 - RNA, 32 nt, Homo Sapiens
auccugaaaaggaaagugcauuugagugaacu

SEQ ID NO: 314600 - RNA, 32 nt, Homo Sapiens
auuaaaauauccagugagcucuuuagaaggac

SEQ ID NO: 314601 - RNA, 32 nt, Homo Sapiens
gcacuugauuacaaugaaaaugucugccgggg

SEQ ID NO: 314602 - RNA, 32 nt, Homo Sapiens
ucccaggaauaguuucuugggggacucacuca

SEQ ID NO: 314603 - RNA, 32 nt, Homo Sapiens
ccagugcccgucuucgcugucccaucugcuca

SEQ ID NO: 314604 - RNA, 32 nt, Homo Sapiens
uacuucccacccaacuaaaagggaagauaaaa

SEQ ID NO: 314605 - RNA, 32 nt, Homo Sapiens
uuugacuccacuuuuccuuuaaaaaugaaugu

SEQ ID NO: 314606 - RNA, 32 nt, Homo Sapiens
caaaaaucacuuuaacuuuucuuguuccuuua

SEQ ID NO: 314607 - RNA, 32 nt, Homo Sapiens
ugugguuuuuaaauuuuugucuagggguuucu

SEQ ID NO: 314608 - RNA, 32 nt, Homo Sapiens
cagccaggugugcucccuccccaggcccuagg

SEQ ID NO: 314609 - RNA, 32 nt, Homo Sapiens
uuugcucuaaugaucaggaaugaugcuuauua

SEQ ID NO: 314610 - RNA, 32 nt, Homo Sapiens
gggaggccuagggaggugggccccacuuagaa

SEQ ID NO: 314611 - RNA, 32 nt, Homo Sapiens
ugaccuaacaagguauuugcaugagucacaau

SEQ ID NO: 314612 - RNA, 32 nt, Homo Sapiens
ccaaguagaaaaugcagaggcucgggcuuguu

SEQ ID NO: 314613 - RNA, 32 nt, Homo Sapiens
cugccggcgccaccugggccccggcccuugag

SEQ ID NO: 314614 - RNA, 32 nt, Homo Sapiens
gcuuuuacuacauauugacaaaaugguuuccg

SEQ ID NO: 314615 - RNA, 32 nt, Homo Sapiens
ggcgcgugcgcccgccguuuucguggcccgag

SEQ ID NO: 314616 - RNA, 32 nt, Homo Sapiens
aauauaggugcacgccaccacacccaacaaau

SEQ ID NO: 314617 - RNA, 32 nt, Homo Sapiens
acugccuaaacacaaaguuacacugagcuuuu

SEQ ID NO: 314618 - RNA, 32 nt, Homo Sapiens
cagcacuguugaccacgcugcguaugagggca

SEQ ID NO: 314619 - RNA, 32 nt, Homo Sapiens
gauuuuguagaguauugguccauacagagaaa

SEQ ID NO: 314620 - RNA, 32 nt, Homo Sapiens
ucaagcaguccucccaccucagucucccaaau

SEQ ID NO: 314621 - RNA, 32 nt, Homo Sapiens
cggcucaaguagccuuccucugcucugggacc

SEQ ID NO: 314622 - RNA, 32 nt, Homo Sapiens
aucaaauauauuuuaagcaaguaaguguccuc

SEQ ID NO: 314623 - RNA, 32 nt, Homo Sapiens
ugcaauuaggacaacuaaccaaguagacgaaa

SEQ ID NO: 314624 - RNA, 32 nt, Homo Sapiens
cccagcuacugagggaggggacagacugcugg

SEQ ID NO: 314625 - RNA, 32 nt, Homo Sapiens
ucagcacaauguuaauguuuucguucucauuu

SEQ ID NO: 314626 - RNA, 32 nt, Homo Sapiens
guuuuaggugucaccuugucuggauuaaggaa

SEQ ID NO: 314627 - RNA, 32 nt, Homo Sapiens
acacauuguauauauaucaccacagacuauaa

SEQ ID NO: 314628 - RNA, 32 nt, Homo Sapiens
gaagagcaggucaguacagagguucugucuac

SEQ ID NO: 314629 - RNA, 32 nt, Homo Sapiens
uuggcaguggugccggccucacaggccuugcc

SEQ ID NO: 314630 - RNA, 32 nt, Homo Sapiens
agauuuauaugaugauaugacaucuggcuaaa

SEQ ID NO: 314631 - RNA, 32 nt, Homo Sapiens
uauuuucagugcuacccgcuagcugauuuuaa

SEQ ID NO: 314632 - RNA, 32 nt, Homo Sapiens
uccuccaccgagucgugcucucgccccaaccc

SEQ ID NO: 314633 - RNA, 32 nt, Homo Sapiens
uucuuccucacgagaauaaacacacauuuuac

SEQ ID NO: 314634 - RNA, 32 nt, Homo Sapiens
ggcugcaggcgggggugcugcagaggacacga

SEQ ID NO: 314635 - RNA, 32 nt, Homo Sapiens
cuuuuuugacccaaaauggaagcugggaaucu

SEQ ID NO: 314636 - RNA, 32 nt, Homo Sapiens
aagaggcgccgucuucccgggucccgagcacu

SEQ ID NO: 314637 - RNA, 32 nt, Homo Sapiens
cggcggcggcggcggcagcugcggcgggagaa

SEQ ID NO: 314638 - RNA, 32 nt, Homo Sapiens
caucuucacagcaacccuggcacuggcuucuc

SEQ ID NO: 314639 - RNA, 32 nt, Homo Sapiens
ugcugguuuauuuguuguuuucugggggaaaa

SEQ ID NO: 314640 - RNA, 32 nt, Homo Sapiens
gagcguggagagcggagcgaagcuggauaaca

SEQ ID NO: 314641 - RNA, 32 nt, Homo Sapiens
ggaugugccguggaggcgccagcugccuguuc

SEQ ID NO: 314642 - RNA, 32 nt, Homo Sapiens
cuaccuucuauuuagaggaagaaugagagcuu

SEQ ID NO: 314643 - RNA, 32 nt, Homo Sapiens
cacccggaccccgaccccgacccggccuggcc

SEQ ID NO: 314644 - RNA, 32 nt, Homo Sapiens
gagccgggcucugccugcgcccggggcagagc

SEQ ID NO: 314645 - RNA, 32 nt, Homo Sapiens
uuuuugcaguauauuucugaaaugacagaaug

SEQ ID NO: 314646 - RNA, 32 nt, Homo Sapiens
gaaacuuugugcuacaugacgacaaagcugcu

SEQ ID NO: 314647 - RNA, 32 nt, Homo Sapiens
gccauucauauccuaagcaacaaaacaucagc

SEQ ID NO: 314648 - RNA, 32 nt, Homo Sapiens
gcucugggaaccaccucucugcucuccaucgc

SEQ ID NO: 314649 - RNA, 32 nt, Homo Sapiens
uucucuugucaacacgagguuaugucaacuuc

SEQ ID NO: 314650 - RNA, 32 nt, Homo Sapiens
caaguuucugccucuggaaagggggcgggccc

SEQ ID NO: 314651 - RNA, 32 nt, Homo Sapiens
aaguguaaagaagccucauaagaucauaagga

SEQ ID NO: 314652 - RNA, 32 nt, Homo Sapiens
ccagacagacucccaaccagacugaccccuua

SEQ ID NO: 314653 - RNA, 32 nt, Homo Sapiens
uucuuuuuuuuuucuuuuuuuuuuuuuuuuuu

SEQ ID NO: 314654 - RNA, 32 nt, Homo Sapiens
ggugcuggcgggggcgcggggcccggcgcggc

SEQ ID NO: 314655 - RNA, 32 nt, Homo Sapiens
auggaaaucauuggucaguuuaaccugggauu

SEQ ID NO: 314656 - RNA, 32 nt, Homo Sapiens
ccguccugcgugaccuggggccccacuggggu

SEQ ID NO: 314657 - RNA, 31 nt, Homo Sapiens
ccccagcgccacugccuguggaggccccagc

SEQ ID NO: 314658 - RNA, 32 nt, Homo Sapiens
uuuuacuggagucugugguuguguacagguau

SEQ ID NO: 314659 - RNA, 32 nt, Homo Sapiens
ucuucuucaaauauuuuuucugaucccccacu

SEQ ID NO: 314660 - RNA, 32 nt, Homo Sapiens
gaaaggcccuguaaccaagauacugacugaac

SEQ ID NO: 314661 - RNA, 32 nt, Homo Sapiens
acaaccguccccagccagucugcuccuagugg

SEQ ID NO: 314662 - RNA, 32 nt, Homo Sapiens
uggccugcugucagcuuugcaccaggagacag

SEQ ID NO: 314663 - RNA, 32 nt, Homo Sapiens
uuacauuugacaaaaaguuuuguacuuuucac

SEQ ID NO: 314664 - RNA, 32 nt, Homo Sapiens
ucacauaccauuuuuguuaaaguauauaauaa

SEQ ID NO: 314665 - RNA, 32 nt, Homo Sapiens
gcuggauugaaaauuuuauauuguaauguaga

SEQ ID NO: 314666 - RNA, 32 nt, Homo Sapiens
ggaaggagagaggcggccguccugucaacagg

SEQ ID NO: 314667 - RNA, 29 nt, Homo Sapiens
uauauugugacuuacuuuccaagcugacu

SEQ ID NO: 314668 - RNA, 32 nt, Homo Sapiens
aaucucaggauuggaagagauuuuaaaggcca

SEQ ID NO: 314669 - RNA, 32 nt, Homo Sapiens
ugucuggagcuuuucuuuccuuuauuauuaac

SEQ ID NO: 314670 - RNA, 32 nt, Homo Sapiens
caggucacuuuucaaaacacuugcaucauuac

SEQ ID NO: 314671 - RNA, 32 nt, Homo Sapiens
cucggcuuaauuaaccauuuaucgcaucauau

SEQ ID NO: 314672 - RNA, 32 nt, Homo Sapiens
aucacuugcuguagauggcuuauuuugcauuc

SEQ ID NO: 314673 - RNA, 32 nt, Homo Sapiens
caccaugacagcugucgccugcggcuggugga

SEQ ID NO: 314674 - RNA, 32 nt, Homo Sapiens
aaauuucucuuuagagcuaaauccauugagug

SEQ ID NO: 314675 - RNA, 32 nt, Homo Sapiens
uauaaggugaaauucagaauuccguuuccuuc

SEQ ID NO: 314676 - RNA, 32 nt, Homo Sapiens
cccggagcgaugaaaggcauauuuucuuuguu

SEQ ID NO: 314677 - RNA, 32 nt, Homo Sapiens
cgucuuggacggguggaccugugguugccagc

SEQ ID NO: 314678 - RNA, 32 nt, Homo Sapiens
cagcuggggucgcucucgggugguuggguguu

SEQ ID NO: 314679 - RNA, 32 nt, Homo Sapiens
uuuuugcuacuucugcagaccuucccucucuu

SEQ ID NO: 314680 - RNA, 32 nt, Homo Sapiens
agcggccucagccaccgccuccccuuucuucc

SEQ ID NO: 314681 - RNA, 32 nt, Homo Sapiens
uggaucuuucuuugcccuuccucuccuagcug

SEQ ID NO: 314682 - RNA, 32 nt, Homo Sapiens
cuucgcccgagacccagcgcccaggcgugucg

SEQ ID NO: 314683 - RNA, 32 nt, Homo Sapiens
gagacagacacuugguuaguggcugccucaua

SEQ ID NO: 314684 - RNA, 32 nt, Homo Sapiens
guguaaaaguauaaaucagguauuuguauuaa

SEQ ID NO: 314685 - RNA, 32 nt, Homo Sapiens
ugguggucuaucugccccuaccucuggcccuc

SEQ ID NO: 314686 - RNA, 32 nt, Homo Sapiens
caaucuggguggcaagggcugguagauuauuu

SEQ ID NO: 314687 - RNA, 28 nt, Homo Sapiens
ggugggguuacagggcacaggugacagg

SEQ ID NO: 314688 - RNA, 32 nt, Homo Sapiens
cgugggguccccggggcccaccgucugcacuu

SEQ ID NO: 314689 - RNA, 32 nt, Homo Sapiens
agcccagccccaggcucugugcagccuaguga

SEQ ID NO: 314690 - RNA, 32 nt, Homo Sapiens
auggauauguacaaauaaaauaaauggaagac

SEQ ID NO: 314691 - RNA, 32 nt, Homo Sapiens
gccccgcagacacccuucguaccuccaaccca

SEQ ID NO: 314692 - RNA, 32 nt, Homo Sapiens
acucauuuuucuuuucuggacucuaauaggcc

SEQ ID NO: 314693 - RNA, 32 nt, Homo Sapiens
cgaugcacagcucagcuguggagccagcagcu

SEQ ID NO: 314694 - RNA, 32 nt, Homo Sapiens
uuuccauucaguguuaacuacuuguuacugcc

SEQ ID NO: 314695 - RNA, 32 nt, Homo Sapiens
ggagcagcugucccggcugagacaacaggaca

SEQ ID NO: 314696 - RNA, 32 nt, Homo Sapiens
gccguuucggaggaagaccucggcugcugccu

SEQ ID NO: 314697 - RNA, 32 nt, Homo Sapiens
guguauuuuuaacguccccauauuuaugugac

SEQ ID NO: 314698 - RNA, 32 nt, Homo Sapiens
gaugccacauucaaaauaggguauauuuuccu

SEQ ID NO: 314699 - RNA, 32 nt, Homo Sapiens
ggggaaaaaaaaagaugucagcuccuccgcug

SEQ ID NO: 314700 - RNA, 32 nt, Homo Sapiens
ggccaacacaauuuacuauccaaacugaaguc

SEQ ID NO: 314701 - RNA, 32 nt, Homo Sapiens
ccuccucugcccggccgcagcagugcacaugg

SEQ ID NO: 314702 - RNA, 32 nt, Homo Sapiens
auaauuuucaaauauguauuaaaaggcaaggg

SEQ ID NO: 314703 - RNA, 32 nt, Homo Sapiens
uuuuauagugucagucagucaccccacagucu

SEQ ID NO: 314704 - RNA, 32 nt, Homo Sapiens
uccaccuccuccuggggcaaugcagagucuca

SEQ ID NO: 314705 - RNA, 32 nt, Homo Sapiens
aguuucuuguugcugugcugcacgggacccag

SEQ ID NO: 314706 - RNA, 32 nt, Homo Sapiens
gaaauaaaggagaaccuggagaucugggagaa

SEQ ID NO: 314707 - RNA, 32 nt, Homo Sapiens
uguaucugcaccuucucaacugagagaagaac

SEQ ID NO: 314708 - RNA, 32 nt, Homo Sapiens
cggaaccucugcucagccuggugaaccacaca

SEQ ID NO: 314709 - RNA, 32 nt, Homo Sapiens
ugcagauacccugacuagccagcccucuacuc

SEQ ID NO: 314710 - RNA, 32 nt, Homo Sapiens
agaccucaaagucuuugaguuuuagagucugu

SEQ ID NO: 314711 - RNA, 32 nt, Homo Sapiens
cuuucugugugaacuaaagugauucaaugucu

SEQ ID NO: 314712 - RNA, 32 nt, Homo Sapiens
uuuacauccaacaaaugguuagcuagggaaaa

SEQ ID NO: 314713 - RNA, 32 nt, Homo Sapiens
aaaaguuccaaacugggacucggaccaagaaa

SEQ ID NO: 314714 - RNA, 32 nt, Homo Sapiens
ugccaaagcugauggugagaccauucuaaaag

SEQ ID NO: 314715 - RNA, 32 nt, Homo Sapiens
ugggcuacugguuuacuuaauuaaucagccgg

SEQ ID NO: 314716 - RNA, 32 nt, Homo Sapiens
guuuugucaaaguuuuacgaaaauauaugaua

SEQ ID NO: 314717 - RNA, 32 nt, Homo Sapiens
caggccaucugccugcucaugggguccuaaag

SEQ ID NO: 314718 - RNA, 32 nt, Homo Sapiens
aacagaagauacucuuuuuuaugcuccuuacu

SEQ ID NO: 314719 - RNA, 32 nt, Homo Sapiens
uggaaaaguccucucuucccagcuccugauuc

SEQ ID NO: 314720 - RNA, 32 nt, Homo Sapiens
uuucacaaaaaagaaguaggggaagacaugca

SEQ ID NO: 314721 - RNA, 32 nt, Homo Sapiens
uugugggcacucaaguucggaccucugggauc

SEQ ID NO: 314722 - RNA, 32 nt, Homo Sapiens
gaagggcgcugggcaguguggccgccaacuuc

SEQ ID NO: 314723 - RNA, 32 nt, Homo Sapiens
aguuuuuaauaaagcaauauuugaaauuugcu

SEQ ID NO: 314724 - RNA, 32 nt, Homo Sapiens
ggaggagagggacuccuggggggccugccccu

SEQ ID NO: 314725 - RNA, 32 nt, Homo Sapiens
gaagaaugagagacccauuaacagaaggcaaa

SEQ ID NO: 314726 - RNA, 32 nt, Homo Sapiens
gaagaggcuuggugccggggccuggggcucug

SEQ ID NO: 314727 - RNA, 32 nt, Homo Sapiens
ucagugagggucagagugggggugggggaugu

SEQ ID NO: 314728 - RNA, 32 nt, Homo Sapiens
uuucuccgccgagaggaucguccccagcgugg

SEQ ID NO: 314729 - RNA, 32 nt, Homo Sapiens
aacauggcaugugaaaaguaaaacagauuugu

SEQ ID NO: 314730 - RNA, 32 nt, Homo Sapiens
ugguaauaaaauuucuuuuuuauuuuucuuuu

SEQ ID NO: 314731 - RNA, 32 nt, Homo Sapiens
ccaguccggcgcgcuccgggccgcauccuuag

SEQ ID NO: 314732 - RNA, 32 nt, Homo Sapiens
ggugcgucaaaauaaauuccuuucuuaaauac

SEQ ID NO: 314733 - RNA, 32 nt, Homo Sapiens
uggcuauggcaccauuaaugcugcugaauauc

SEQ ID NO: 314734 - RNA, 32 nt, Homo Sapiens
gcagcggcccaucacccuguggugcggccuca

SEQ ID NO: 314735 - RNA, 32 nt, Homo Sapiens
ucaucuucgucguccccguggaccucccccuu

SEQ ID NO: 314736 - RNA, 32 nt, Homo Sapiens
gugggcucugcuucugccaggaccacaccgag

SEQ ID NO: 314737 - RNA, 32 nt, Homo Sapiens
acuuuaagaacaaacucugaaagaccuaugag

SEQ ID NO: 314738 - RNA, 32 nt, Homo Sapiens
uacuugggaggcugagguggagggaucgcuug

SEQ ID NO: 314739 - RNA, 32 nt, Homo Sapiens
aaaauuuauuagguauuuuucaaugcuaaguc

SEQ ID NO: 314740 - RNA, 32 nt, Homo Sapiens
guuacaaaccaucaaauuagcagguggaaaau

SEQ ID NO: 314741 - RNA, 32 nt, Homo Sapiens
accacugggcaaacagaagaauuuuucugucu

SEQ ID NO: 314742 - RNA, 32 nt, Homo Sapiens
gcugcuccuaccucacugccugucccagagca

SEQ ID NO: 314743 - RNA, 32 nt, Homo Sapiens
gaaugacgaugaugugaauauuuagaauguac

SEQ ID NO: 314744 - RNA, 28 nt, Homo Sapiens
aaugcaaagaguuugcauuugaaaauaa

SEQ ID NO: 314745 - RNA, 32 nt, Homo Sapiens
uaauaggaccagcuuugaauuucugacauugg

SEQ ID NO: 314746 - RNA, 32 nt, Homo Sapiens
cuaauggaagacuggaugucuuucuucuucau

SEQ ID NO: 314747 - RNA, 32 nt, Homo Sapiens
acccugcucccucucucugucccuaggcugcc

SEQ ID NO: 314748 - RNA, 32 nt, Homo Sapiens
gcaccaagccgccccgagguucucagaggcga

SEQ ID NO: 314749 - RNA, 32 nt, Homo Sapiens
uucagugaaacacugaacgcucucggaaagcu

SEQ ID NO: 314750 - RNA, 26 nt, Homo Sapiens
caugugucugcgccucggaggccuga

SEQ ID NO: 314751 - RNA, 32 nt, Homo Sapiens
gagggcucagaaaaaagacaggaagauguggg

SEQ ID NO: 314752 - RNA, 32 nt, Homo Sapiens
aaauugcuacuguuuucuuaaaguuaacuuca

SEQ ID NO: 314753 - RNA, 32 nt, Homo Sapiens
cgggggaggaggaguggguggccuccuugaug

SEQ ID NO: 314754 - RNA, 32 nt, Homo Sapiens
caggcucagguucugaggaagaagaggaggag

SEQ ID NO: 314755 - RNA, 32 nt, Homo Sapiens
aaggaccucccucuugcacucuaagccuuagu

SEQ ID NO: 314756 - RNA, 32 nt, Homo Sapiens
gauauuuagagcaucaccuuguuuuuauaugc

SEQ ID NO: 314757 - RNA, 32 nt, Homo Sapiens
gacugacgcggcugcuccugcauguuauuuau

SEQ ID NO: 314758 - RNA, 32 nt, Homo Sapiens
gcuugcuuaagccccagugcuccaugccagca

SEQ ID NO: 314759 - RNA, 32 nt, Homo Sapiens
guccugguacccagcccucaguugucauuugg

SEQ ID NO: 314760 - RNA, 32 nt, Homo Sapiens
cuuuugauauauaugccuuacugaguacaugc

SEQ ID NO: 314761 - RNA, 32 nt, Homo Sapiens
guggcaaaacuucuaaccauuucucaaccuuu

SEQ ID NO: 314762 - RNA, 32 nt, Homo Sapiens
cugcccauguguucccugaaucaaaaauuaaa

SEQ ID NO: 314763 - RNA, 32 nt, Homo Sapiens
gacgccaugagcgcgcugcugcggcugcugcg

SEQ ID NO: 314764 - RNA, 30 nt, Homo Sapiens
cgacugcgcgcgcggcugcgggcaaacauc

SEQ ID NO: 314765 - RNA, 32 nt, Homo Sapiens
cggagcagccccacauaccucacugucucguc

SEQ ID NO: 314766 - RNA, 32 nt, Homo Sapiens
ucaugguacuguaggcagcugaagaaccgccg

SEQ ID NO: 314767 - RNA, 32 nt, Homo Sapiens
uuccuucuuuuggaaaaaaccuacaugcuaca

SEQ ID NO: 314768 - RNA, 32 nt, Homo Sapiens
cagaccucauuucaggcaccagauuggucgcu

SEQ ID NO: 314769 - RNA, 32 nt, Homo Sapiens
uuuuaauacaguguggcuggaacugaguauuu

SEQ ID NO: 314770 - RNA, 32 nt, Homo Sapiens
ucggucuguuuucauuuucaguuuuuuccucc

SEQ ID NO: 314771 - RNA, 32 nt, Homo Sapiens
aaaauccucggggccuggcccaguggccuccu

SEQ ID NO: 314772 - RNA, 32 nt, Homo Sapiens
gacugcuuaaauaaauuaugguauaucuguau

SEQ ID NO: 314773 - RNA, 32 nt, Homo Sapiens
ugguuucccuaaguuuacuucucuaaaacccu

SEQ ID NO: 314774 - RNA, 32 nt, Homo Sapiens
uugggggccuucuuggagccgugugugaguga

SEQ ID NO: 314775 - RNA, 31 nt, Homo Sapiens
auuuguguacaaaugaaaguucgaaagcugu

SEQ ID NO: 314776 - RNA, 32 nt, Homo Sapiens
cugauuuccaagccaagacucccaugcugccu

SEQ ID NO: 314777 - RNA, 32 nt, Homo Sapiens
uuuacccgauguauggaaauaaaggcccuuuu

SEQ ID NO: 314778 - RNA, 31 nt, Homo Sapiens
agugcaugggcgguguccaaccucuggugcu

SEQ ID NO: 314779 - RNA, 32 nt, Homo Sapiens
uacacccccuccccuuuugaaacccuuaauua

SEQ ID NO: 314780 - RNA, 32 nt, Homo Sapiens
ucggugaagcggcaguggcggcggcggcggcg

SEQ ID NO: 314781 - RNA, 31 nt, Homo Sapiens
acacagcugccggucgcccuuugcugcaugg

SEQ ID NO: 314782 - RNA, 32 nt, Homo Sapiens
gcucucaaucuggggcaugacuuugaagggaa

SEQ ID NO: 314783 - RNA, 32 nt, Homo Sapiens
acacuucuugagauuuugauugggauuuaauu

SEQ ID NO: 314784 - RNA, 32 nt, Homo Sapiens
aaacaaaugguuauuucuuuuauaauccauau

SEQ ID NO: 314785 - RNA, 32 nt, Homo Sapiens
cuagacauuuuucauacacuuaauaguacugu

SEQ ID NO: 314786 - RNA, 32 nt, Homo Sapiens
gcucaagaagucuacugcacaauccagaaguu

SEQ ID NO: 314787 - RNA, 32 nt, Homo Sapiens
auauuuuuaauccuaagauuuugcccuacaau

SEQ ID NO: 314788 - RNA, 32 nt, Homo Sapiens
gacgggcgccuggcggggcccugggaggcucg

SEQ ID NO: 314789 - RNA, 32 nt, Homo Sapiens
acugugcugucaagcaucaugauuccgggcag

SEQ ID NO: 314790 - RNA, 32 nt, Homo Sapiens
ggucgcgggucgccgcguccggagccgcccac

SEQ ID NO: 314791 - RNA, 32 nt, Homo Sapiens
ggggcggugcugacgccggccggucacguggg

SEQ ID NO: 314792 - RNA, 32 nt, Homo Sapiens
uaacuucaacauauaauagggauugugaccug

SEQ ID NO: 314793 - RNA, 32 nt, Homo Sapiens
ucgcugcgcucccuguugcccagcgcgggccc

SEQ ID NO: 314794 - RNA, 32 nt, Homo Sapiens
uuggcugcggguggagaacguuugucaggggc

SEQ ID NO: 314795 - RNA, 32 nt, Homo Sapiens
cgcuguuuccacaaaagaaugacucuaacagc

SEQ ID NO: 314796 - RNA, 32 nt, Homo Sapiens
gaaggcacauggaucuggggcgacuguuccag

SEQ ID NO: 314797 - RNA, 32 nt, Homo Sapiens
cuuggccccucacauccucuccaggaaggcag

SEQ ID NO: 314798 - RNA, 32 nt, Homo Sapiens
aaagguaugcauuuuauacauguaacagagua

SEQ ID NO: 314799 - RNA, 32 nt, Homo Sapiens
aaaaagugugacacugguuaacuuuuuccaga

SEQ ID NO: 314800 - RNA, 32 nt, Homo Sapiens
gagaagcaagguggccuccacguuuccugagc

SEQ ID NO: 314801 - RNA, 32 nt, Homo Sapiens
ucccaauccuaguagcugggaguaucagguga

SEQ ID NO: 314802 - RNA, 32 nt, Homo Sapiens
ugcccugcugggacaggccuccccuuauagcc

SEQ ID NO: 314803 - RNA, 32 nt, Homo Sapiens
accucccucccuccccaguguuuuugcaggug

SEQ ID NO: 314804 - RNA, 32 nt, Homo Sapiens
cccacccugccugcaccuccgcgggcugacug

SEQ ID NO: 314805 - RNA, 32 nt, Homo Sapiens
ccacuccccucccaagacccagccgccgccgu

SEQ ID NO: 314806 - RNA, 32 nt, Homo Sapiens
ccuaacagcugaggcgcuuuacggcgacggcg

SEQ ID NO: 314807 - RNA, 32 nt, Homo Sapiens
cuugccccuggaggccacgccaggcgcucacc

SEQ ID NO: 314808 - RNA, 32 nt, Homo Sapiens
uggaugugguuuaauuguuuguccucaaaagg

SEQ ID NO: 314809 - RNA, 32 nt, Homo Sapiens
ccuuuugucugcuucuacuacuccaucaaggu

SEQ ID NO: 314810 - RNA, 31 nt, Homo Sapiens
uggcauuauuugacuucuuuuuaaguacacg

SEQ ID NO: 314811 - RNA, 32 nt, Homo Sapiens
uccuuuuuucaguacaucccacagcauccuau

SEQ ID NO: 314812 - RNA, 32 nt, Homo Sapiens
ugaaagaauaguuuuuaaaccaaguaaugcaa

SEQ ID NO: 314813 - RNA, 32 nt, Homo Sapiens
caaguggccuuagacauaacugcugcccaagg

SEQ ID NO: 314814 - RNA, 32 nt, Homo Sapiens
aauuaucauccugauggaacuauucaaguaag

SEQ ID NO: 314815 - RNA, 32 nt, Homo Sapiens
ucucuauuuuuuccuucccugauggauuugca

SEQ ID NO: 314816 - RNA, 32 nt, Homo Sapiens
ucauacaccuguucuuugaacaucucagaaag

SEQ ID NO: 314817 - RNA, 32 nt, Homo Sapiens
acaaaagcauuaugaggccuauguauucuacu

SEQ ID NO: 314818 - RNA, 32 nt, Homo Sapiens
aaggauguguuuacuuccccuucugcugugau

SEQ ID NO: 314819 - RNA, 32 nt, Homo Sapiens
cacucggggauacaugggugauguuucugugu

SEQ ID NO: 314820 - RNA, 32 nt, Homo Sapiens
cugcccaaucagcuccacggaacucagccaug

SEQ ID NO: 314821 - RNA, 32 nt, Homo Sapiens
caccuaaaaaucaucuggcuuuauaguggauc

SEQ ID NO: 314822 - RNA, 30 nt, Homo Sapiens
gcuguucuggacucugauguguguggaggg

SEQ ID NO: 314823 - RNA, 32 nt, Homo Sapiens
ucauaaauugaggccagagacucauuguauau

SEQ ID NO: 314824 - RNA, 32 nt, Homo Sapiens
gaccccacgcccacuaggaucccggcuggguc

SEQ ID NO: 314825 - RNA, 32 nt, Homo Sapiens
cgguuguaguaggagcugaaauccaugcugag

SEQ ID NO: 314826 - RNA, 32 nt, Homo Sapiens
uuaccugaacagagaccugccaagacgcccuc

SEQ ID NO: 314827 - RNA, 32 nt, Homo Sapiens
uugcucugccccagccccacacuugcucugaa

SEQ ID NO: 314828 - RNA, 32 nt, Homo Sapiens
uuucuagccagauugcauuaauccuuacugag

SEQ ID NO: 314829 - RNA, 32 nt, Homo Sapiens
auuuaaagguggacaaaagcuaccucccuaaa

SEQ ID NO: 314830 - RNA, 32 nt, Homo Sapiens
guucccacauacaaggcugacuucugaggauu

SEQ ID NO: 314831 - RNA, 32 nt, Homo Sapiens
auguguccauuguccuucuccauuccauggac

SEQ ID NO: 314832 - RNA, 32 nt, Homo Sapiens
acuugaugcaugcacacacacacacacauacc

SEQ ID NO: 314833 - RNA, 29 nt, Homo Sapiens
uuuaaauaaaguuucuuuuucuggagaug

SEQ ID NO: 314834 - RNA, 32 nt, Homo Sapiens
uaaauuugcccuaauaccaaggcgcuacguuu

SEQ ID NO: 314835 - RNA, 32 nt, Homo Sapiens
ucaggaucagcuugcagagucuugcuuuuagg

SEQ ID NO: 314836 - RNA, 32 nt, Homo Sapiens
gccagccucccuccccacagcugagugaagaa

SEQ ID NO: 314837 - RNA, 32 nt, Homo Sapiens
gauuauaagaagaagggcagauaauauaugaa

SEQ ID NO: 314838 - RNA, 32 nt, Homo Sapiens
ggauccggagccugggggaaaagcggcgcggg

SEQ ID NO: 314839 - RNA, 32 nt, Homo Sapiens
ccaagcccugucacugcugcccagccacacgu

SEQ ID NO: 314840 - RNA, 30 nt, Homo Sapiens
aauaaggugggauccaacaagaguguagua

SEQ ID NO: 314841 - RNA, 32 nt, Homo Sapiens
uacuuuuuaacuuuauacucaguugcauuauc

SEQ ID NO: 314842 - RNA, 32 nt, Homo Sapiens
ugccagugagucgagaucgcgccacugcacuc

SEQ ID NO: 314843 - RNA, 32 nt, Homo Sapiens
gguguggcuggcggcccugccugggcgcggag

SEQ ID NO: 314844 - RNA, 32 nt, Homo Sapiens
gggcagagggugggacagggaccuuuuaaaau

SEQ ID NO: 314845 - RNA, 32 nt, Homo Sapiens
agccacacagaaaggcucacuggaagauccaa

SEQ ID NO: 314846 - RNA, 32 nt, Homo Sapiens
uaggugaucauuuggaucuggagcagagucug

SEQ ID NO: 314847 - RNA, 32 nt, Homo Sapiens
cacagugcuuugcuguaggauuuagacgggga

SEQ ID NO: 314848 - RNA, 32 nt, Homo Sapiens
uucagggaauauauuuauauuuuucuaugaaa

SEQ ID NO: 314849 - RNA, 32 nt, Homo Sapiens
aggcgccgucuucccgggucccgagcacucug

SEQ ID NO: 314850 - RNA, 32 nt, Homo Sapiens
aacaagccccagccuuacucccggccccccag

SEQ ID NO: 314851 - RNA, 32 nt, Homo Sapiens
cacgcccggcauaauuuuuuuauuuuuagucg

SEQ ID NO: 314852 - RNA, 32 nt, Homo Sapiens
uggugauuuguuucaugguuuuuguauuugag

SEQ ID NO: 314853 - RNA, 32 nt, Homo Sapiens
gcucucguauguggggaaugggaugaaucccc

SEQ ID NO: 314854 - RNA, 32 nt, Homo Sapiens
gccaaggguccugucaucccucauggccaccc

SEQ ID NO: 314855 - RNA, 32 nt, Homo Sapiens
caaacuugaggaaugggcaugaauaacuggcu

SEQ ID NO: 314856 - RNA, 32 nt, Homo Sapiens
uauugcuucuaaaaaugcauuauguuuuacaa

SEQ ID NO: 314857 - RNA, 32 nt, Homo Sapiens
cugucauuggcagaucuugguagcacuuuaua

SEQ ID NO: 314858 - RNA, 32 nt, Homo Sapiens
guacugggcgcgcgcggcuccggcucgggacg

SEQ ID NO: 314859 - RNA, 32 nt, Homo Sapiens
cacacaggcccagccucugugcugucuccucc

SEQ ID NO: 314860 - RNA, 32 nt, Homo Sapiens
ucucggaagagaaaugcuuguacagggucguc

SEQ ID NO: 314861 - RNA, 32 nt, Homo Sapiens
gaauagugccuaaagugcugcagccaaagaca

SEQ ID NO: 314862 - RNA, 32 nt, Homo Sapiens
uucacauuaaaccaccugaaugaaccuugaau

SEQ ID NO: 314863 - RNA, 32 nt, Homo Sapiens
aaaguucugagguauuuuuaggguguugcaaa

SEQ ID NO: 314864 - RNA, 32 nt, Homo Sapiens
gacggggucucccuguguuacccaggcugguc

SEQ ID NO: 314865 - RNA, 32 nt, Homo Sapiens
gaugccggcccgcuccuucccagcuccucccc

SEQ ID NO: 314866 - RNA, 32 nt, Homo Sapiens
ugugauucauguuuguuacuuuucucuucccc

SEQ ID NO: 314867 - RNA, 32 nt, Homo Sapiens
ggcagcagcccaggggccccaggccuccuccc

SEQ ID NO: 314868 - RNA, 32 nt, Homo Sapiens
ucgucggucuaccccacuaccuccaggguuuu

SEQ ID NO: 314869 - RNA, 32 nt, Homo Sapiens
aaaucuaaaagaaaacagacacagagcaagac

SEQ ID NO: 314870 - RNA, 32 nt, Homo Sapiens
gguuuguggagaaggaagcauucuuuaggcug

SEQ ID NO: 314871 - RNA, 32 nt, Homo Sapiens
auuugggaaaauuuuccaagguuagauuccaa

SEQ ID NO: 314872 - RNA, 32 nt, Homo Sapiens
gccagaaaagggccccgccuugccagauaaac

SEQ ID NO: 314873 - RNA, 32 nt, Homo Sapiens
ggccauggggcaauuguuggcagccaugacug

SEQ ID NO: 314874 - RNA, 32 nt, Homo Sapiens
uccuguccaucccagucucugccagaccaagg

SEQ ID NO: 314875 - RNA, 32 nt, Homo Sapiens
ccccuuuccucauucugacacccagaagacag

SEQ ID NO: 314876 - RNA, 32 nt, Homo Sapiens
uaucuuuccuuccuuccuugcuaagaggagcc

SEQ ID NO: 314877 - RNA, 32 nt, Homo Sapiens
cagucaagaaggaaacauguauauuagugaag

SEQ ID NO: 314878 - RNA, 32 nt, Homo Sapiens
gaauguugcuaaggagggaagcuauacaugug

SEQ ID NO: 314879 - RNA, 32 nt, Homo Sapiens
ugcuguuaauaaauauuguuucauucuucuuu

SEQ ID NO: 314880 - RNA, 32 nt, Homo Sapiens
aagauugccccaucuagacuagcaaucucuuc

SEQ ID NO: 314881 - RNA, 28 nt, Homo Sapiens
gaaacuuaucuuacaaaguguauuuuau

SEQ ID NO: 314882 - RNA, 32 nt, Homo Sapiens
agucccagagcaccucaccucccgaagccacc

SEQ ID NO: 314883 - RNA, 32 nt, Homo Sapiens
caaaaauguaauuguucaucuuuaaauucuuu

SEQ ID NO: 314884 - RNA, 32 nt, Homo Sapiens
gaacauggccacacccaccgccccacacgaga

SEQ ID NO: 314885 - RNA, 32 nt, Homo Sapiens
caucauggcagacaggcccuggaugugcugga

SEQ ID NO: 314886 - RNA, 32 nt, Homo Sapiens
cuguaacauuuguaauaaaggucuucugacau

SEQ ID NO: 314887 - RNA, 32 nt, Homo Sapiens
ccuuucccaguuccuuuuugcuggucacaaaa

SEQ ID NO: 314888 - RNA, 32 nt, Homo Sapiens
agccuuaaaauauauuuggaagcaaaaaucag

SEQ ID NO: 314889 - RNA, 32 nt, Homo Sapiens
ugacucaugcuugacacccccacgcccaggga

SEQ ID NO: 314890 - RNA, 32 nt, Homo Sapiens
ugaaguugguccuauuuaaauuauuaaacuau

SEQ ID NO: 314891 - RNA, 32 nt, Homo Sapiens
caagagggugggguggggaggggcguucucag

SEQ ID NO: 314892 - RNA, 32 nt, Homo Sapiens
aaacugucaucuaaauuuuucuugcugauuuu

SEQ ID NO: 314893 - RNA, 32 nt, Homo Sapiens
gcccuucugaggaggagaagaggaaccccgcg

SEQ ID NO: 314894 - RNA, 32 nt, Homo Sapiens
uucccagaaguuacagaugccuuaaagacuuu

SEQ ID NO: 314895 - RNA, 32 nt, Homo Sapiens
gcgggcgcggggaggcgcgggcggcaaacugc

SEQ ID NO: 314896 - RNA, 32 nt, Homo Sapiens
agcagcgcggcggcgccggcgucgucccaacu

SEQ ID NO: 314897 - RNA, 32 nt, Homo Sapiens
caggaaggugaacacgggcuuccucaugucgu

SEQ ID NO: 314898 - RNA, 32 nt, Homo Sapiens
ugucuuuauuauaaauucuguaucacuucuaa

SEQ ID NO: 314899 - RNA, 32 nt, Homo Sapiens
agcuuacuguuuaaucaccagaauagaagaaa

SEQ ID NO: 314900 - RNA, 32 nt, Homo Sapiens
agauggguccccaaaguggaguguauuuacag

SEQ ID NO: 314901 - RNA, 32 nt, Homo Sapiens
gugccguccucccggggcuggcucucucccca

SEQ ID NO: 314902 - RNA, 32 nt, Homo Sapiens
gccaagauccccucagaaggcaggagugcugc

SEQ ID NO: 314903 - RNA, 32 nt, Homo Sapiens
ucugggaccugccaugcugaggacccauucuc

SEQ ID NO: 314904 - RNA, 32 nt, Homo Sapiens
guuccaaaaguaccagauggcuuaaauaauag

SEQ ID NO: 314905 - RNA, 30 nt, Homo Sapiens
ggguugucauuuuuugcagaagucauauga

SEQ ID NO: 314906 - RNA, 32 nt, Homo Sapiens
cacauuuugcacugguuuauggcgauuguuuu

SEQ ID NO: 314907 - RNA, 32 nt, Homo Sapiens
aucaacugguuguauauuuuuauauuguuuuu

SEQ ID NO: 314908 - RNA, 32 nt, Homo Sapiens
agccuaacccccagccccuccaugucuaugcu

SEQ ID NO: 314909 - RNA, 32 nt, Homo Sapiens
guuuuucucccacugggucaccucaaggauca

SEQ ID NO: 314910 - RNA, 32 nt, Homo Sapiens
cugccuccgacagcgccgcgcucucucagccg

SEQ ID NO: 314911 - RNA, 32 nt, Homo Sapiens
uauuaugacagugucuuccucugacguauuua

SEQ ID NO: 314912 - RNA, 32 nt, Homo Sapiens
ccgccgccccacucaccuccggugugucugca

SEQ ID NO: 314913 - RNA, 32 nt, Homo Sapiens
ucccccuccccccacacaaaauaaaaacagua

SEQ ID NO: 314914 - RNA, 32 nt, Homo Sapiens
uuuaguacagaaaaacaaaacuggaaaacaca

SEQ ID NO: 314915 - RNA, 32 nt, Homo Sapiens
acagaugaaaagacaaguagagacaacaugua

SEQ ID NO: 314916 - RNA, 32 nt, Homo Sapiens
augccacccugggcugcccuggcaccuagcaa

SEQ ID NO: 314917 - RNA, 32 nt, Homo Sapiens
caucuucugauugggauuguguccaguccucu

SEQ ID NO: 314918 - RNA, 32 nt, Homo Sapiens
ggugcuaaagauuguuaaauucaaugcuugau

SEQ ID NO: 314919 - RNA, 32 nt, Homo Sapiens
gaaugcuguccuguguccccacuuccuccaga

SEQ ID NO: 314920 - RNA, 32 nt, Homo Sapiens
cucgccgcgcggaggaggagcagcgcgggagc

SEQ ID NO: 314921 - RNA, 32 nt, Homo Sapiens
cucugagccaaggugggaacacaguuaaugcc

SEQ ID NO: 314922 - RNA, 32 nt, Homo Sapiens
gaccaucucauguuuuuuuucuugcuaugacu

SEQ ID NO: 314923 - RNA, 32 nt, Homo Sapiens
cccgggcgucgccuccuguguggugccggaag

SEQ ID NO: 314924 - RNA, 32 nt, Homo Sapiens
gggacauuugcaccccaccccacccucuggcu

SEQ ID NO: 314925 - RNA, 32 nt, Homo Sapiens
cagcuucagaucuggguauuuauccaaaagac

SEQ ID NO: 314926 - RNA, 32 nt, Homo Sapiens
caucagccccugggagcaggccccacucccuc

SEQ ID NO: 314927 - RNA, 32 nt, Homo Sapiens
ucccagggaaaagauaacuucucuaagccagg

SEQ ID NO: 314928 - RNA, 32 nt, Homo Sapiens
ccguccugacccgacgggggcccggcccacug

SEQ ID NO: 314929 - RNA, 32 nt, Homo Sapiens
cccagccccugggccuggucacuacacagugg

SEQ ID NO: 314930 - RNA, 28 nt, Homo Sapiens
accauccuggcuaccagauggaaccuuc

SEQ ID NO: 314931 - RNA, 32 nt, Homo Sapiens
uuuaggaguccgccagggucuuucuggccacc

SEQ ID NO: 314932 - RNA, 32 nt, Homo Sapiens
agaauuaccauuuguuaauaucacucauuaau

SEQ ID NO: 314933 - RNA, 32 nt, Homo Sapiens
uuuuuacagacuguucaguguuugucaagcuu

SEQ ID NO: 314934 - RNA, 32 nt, Homo Sapiens
cuaauagauuugucuuuuuuacuucuccugaa

SEQ ID NO: 314935 - RNA, 32 nt, Homo Sapiens
augcgcccaagccccacaggaagccuuccucc

SEQ ID NO: 314936 - RNA, 32 nt, Homo Sapiens
gcggucccuccuccccucuccuugcacccaua

SEQ ID NO: 314937 - RNA, 32 nt, Homo Sapiens
cauuauuccaguucuucaguaauucuguuuaa

SEQ ID NO: 314938 - RNA, 32 nt, Homo Sapiens
aguguaaaguacaucagaaauaaaacuguauc

SEQ ID NO: 314939 - RNA, 32 nt, Homo Sapiens
auaggguguggagugaagaacaugcuguaugu

SEQ ID NO: 314940 - RNA, 32 nt, Homo Sapiens
aagguuucugaaccucuuucugguucucagca

SEQ ID NO: 314941 - RNA, 32 nt, Homo Sapiens
cuugcugcugugccugcgucgcggcggauccg

SEQ ID NO: 314942 - RNA, 32 nt, Homo Sapiens
aaccuaauuguacaguggcucuggccaucuuu

SEQ ID NO: 314943 - RNA, 32 nt, Homo Sapiens
aaguugguguuuuugguugaugagaauuuacg

SEQ ID NO: 314944 - RNA, 31 nt, Homo Sapiens
cagagaggaaggcagaaccagucaggcuuau

SEQ ID NO: 314945 - RNA, 32 nt, Homo Sapiens
ucggcccucagcucagcccgccaggagucagg

SEQ ID NO: 314946 - RNA, 32 nt, Homo Sapiens
agagcuaccacugagaaaaaacaaugcagauu

SEQ ID NO: 314947 - RNA, 32 nt, Homo Sapiens
ggcgugggcacguguccgcagcugggacuggc

SEQ ID NO: 314948 - RNA, 32 nt, Homo Sapiens
aaaaacaauaauuuauaaacauaaaagcucau

SEQ ID NO: 314949 - RNA, 32 nt, Homo Sapiens
uacaucccaggggccucaugccuaagauagag

SEQ ID NO: 314950 - RNA, 32 nt, Homo Sapiens
ccuggccgccgggccagcgggcgcagggcaca

SEQ ID NO: 314951 - RNA, 32 nt, Homo Sapiens
gagguaaacacuugguccaaagguuugcagag

SEQ ID NO: 314952 - RNA, 32 nt, Homo Sapiens
uguguguguacaugugcauguguagauaugug

SEQ ID NO: 314953 - RNA, 32 nt, Homo Sapiens
gugaccuaagaaaagacccacuagaaaguaau

SEQ ID NO: 314954 - RNA, 32 nt, Homo Sapiens
acuuuucucacauuugaacuuccacuaucauu

SEQ ID NO: 314955 - RNA, 32 nt, Homo Sapiens
ugaaucugugauaauguuugcauaucagaaug

SEQ ID NO: 314956 - RNA, 29 nt, Homo Sapiens
agucuuauaaauaaaacuuauaaugcaug

SEQ ID NO: 314957 - RNA, 32 nt, Homo Sapiens
ucccucugucucccuccuggccauucugggcu

SEQ ID NO: 314958 - RNA, 32 nt, Homo Sapiens
caacaaaaauucccgguagcauaaauaugcac

SEQ ID NO: 314959 - RNA, 32 nt, Homo Sapiens
uggaaguacaugagaagcacaaacgcagggca

SEQ ID NO: 314960 - RNA, 32 nt, Homo Sapiens
augggcuccuucauggugacgccccgucaacc

SEQ ID NO: 314961 - RNA, 32 nt, Homo Sapiens
cucuuaaaugcuuaucucugguacccucaguc

SEQ ID NO: 314962 - RNA, 31 nt, Homo Sapiens
cucccccaauaaaaauaccacuaucagagua

SEQ ID NO: 314963 - RNA, 32 nt, Homo Sapiens
cggggugcugaaggaauccuagcuguggaaca

SEQ ID NO: 314964 - RNA, 32 nt, Homo Sapiens
gcuguccccucuauccucacugcuugaauuug

SEQ ID NO: 314965 - RNA, 32 nt, Homo Sapiens
cgucagagguguuuacucagccugcugcccac

SEQ ID NO: 314966 - RNA, 32 nt, Homo Sapiens
gauuuagaauacuaggccauaugucauauaaa

SEQ ID NO: 314967 - RNA, 28 nt, Homo Sapiens
gccucuggaaauaaauguuccgggauca

SEQ ID NO: 314968 - RNA, 32 nt, Homo Sapiens
augagcagagcauugauguggugaacaaggau

SEQ ID NO: 314969 - RNA, 32 nt, Homo Sapiens
aacaauggcauuaagguuugacuugaguuggu

SEQ ID NO: 314970 - RNA, 32 nt, Homo Sapiens
ugugaccucaggugauccacccgccucggccu

SEQ ID NO: 314971 - RNA, 32 nt, Homo Sapiens
uuaaaccaccaggcugccccuuuuaguggacc

SEQ ID NO: 314972 - RNA, 30 nt, Homo Sapiens
ggccacuggguuaggaccugaggaccucac

SEQ ID NO: 314973 - RNA, 32 nt, Homo Sapiens
cgugggccucaucgagcgcagccgggugguga

SEQ ID NO: 314974 - RNA, 32 nt, Homo Sapiens
cuaauaaauauguauucagaugaaaccuguau

SEQ ID NO: 314975 - RNA, 32 nt, Homo Sapiens
ucuguuuuuuccucuuuuuuuuuuuucuggug

SEQ ID NO: 314976 - RNA, 32 nt, Homo Sapiens
cuucaaauuuaguuaugacagugucacuguau

SEQ ID NO: 314977 - RNA, 32 nt, Homo Sapiens
agcucaucguucacccaauguacuugguauuu

SEQ ID NO: 314978 - RNA, 32 nt, Homo Sapiens
uagcaagaccccaucucuacaaaaauuuaaaa

SEQ ID NO: 314979 - RNA, 32 nt, Homo Sapiens
uacugccgccccauguggugccucaccugcau

SEQ ID NO: 314980 - RNA, 32 nt, Homo Sapiens
cugugcugccaaucgacucggcguggcgucgg

SEQ ID NO: 314981 - RNA, 32 nt, Homo Sapiens
ggagacccugaauaaaucacugccagccauac

SEQ ID NO: 314982 - RNA, 32 nt, Homo Sapiens
aguguuacagagaguagucugaagauuccugu

SEQ ID NO: 314983 - RNA, 32 nt, Homo Sapiens
auguagacacgauaaaaugauuagauugggaa

SEQ ID NO: 314984 - RNA, 32 nt, Homo Sapiens
ggucagaaacaaaaaguggggaauguauugaa

SEQ ID NO: 314985 - RNA, 32 nt, Homo Sapiens
uaggagacccuuuucuucuccuuaaacccuag

SEQ ID NO: 314986 - RNA, 32 nt, Homo Sapiens
uaguguuacugauaacaaaccuacuuaagaga

SEQ ID NO: 314987 - RNA, 30 nt, Homo Sapiens
uaagguggaggugggcuacaaaacugggga

SEQ ID NO: 314988 - RNA, 32 nt, Homo Sapiens
aacaacucggacugggcugcccggggccacug

SEQ ID NO: 314989 - RNA, 32 nt, Homo Sapiens
uuaaugugcuucacuauaguaaccauuucaca

SEQ ID NO: 314990 - RNA, 32 nt, Homo Sapiens
uaauuuugaagauacaaagacuaaguuaauuu

SEQ ID NO: 314991 - RNA, 32 nt, Homo Sapiens
ugcuuucuauuaucuauacauaaaaccugagc

SEQ ID NO: 314992 - RNA, 32 nt, Homo Sapiens
ccuccuccucacaauccaucucuucuuaaguu

SEQ ID NO: 314993 - RNA, 32 nt, Homo Sapiens
ggccgaaggggcaaaacugagugaaaguaacu

SEQ ID NO: 314994 - RNA, 32 nt, Homo Sapiens
cccucagcccuccuggcccuucagucuuggug

SEQ ID NO: 314995 - RNA, 32 nt, Homo Sapiens
gccaucaaggccagcugggaugaguccgggaa

SEQ ID NO: 314996 - RNA, 32 nt, Homo Sapiens
aguccagcuguguuuucuuuuuaauuugauuc

SEQ ID NO: 314997 - RNA, 31 nt, Homo Sapiens
gccucugcaaggucagaaggguuguuugugg

SEQ ID NO: 314998 - RNA, 32 nt, Homo Sapiens
cggagagccaaagggaagccucgauggugccu

SEQ ID NO: 314999 - RNA, 32 nt, Homo Sapiens
ggaguucugggagagggaccagauuggggggu

SEQ ID NO: 315000 - RNA, 32 nt, Homo Sapiens
gagcgaggcccaggccagcccggagcagccau

SEQ ID NO: 315001 - RNA, 32 nt, Homo Sapiens
agugcccgccccacccgcaugcucuuugucac

SEQ ID NO: 315002 - RNA, 32 nt, Homo Sapiens
ucaaucccugucauaaaccaggcacccugggg

SEQ ID NO: 315003 - RNA, 32 nt, Homo Sapiens
auagaauauaaaauaaaacguuacuuguaaaa

SEQ ID NO: 315004 - RNA, 32 nt, Homo Sapiens
gcgcggccaacgcccaggauccgcaagcugcg

SEQ ID NO: 315005 - RNA, 32 nt, Homo Sapiens
aguccaaucccagacugggaaccaccaucuga

SEQ ID NO: 315006 - RNA, 32 nt, Homo Sapiens
caauuuaauaaugugauauuuccuaugucuac

SEQ ID NO: 315007 - RNA, 32 nt, Homo Sapiens
ccuucagacagccugcccaggcuguggaucca

SEQ ID NO: 315008 - RNA, 32 nt, Homo Sapiens
gcgccgcccgcaccacagaccuucgccucgcc

SEQ ID NO: 315009 - RNA, 32 nt, Homo Sapiens
cuucguuccacacccugacucuacgcccugcc

SEQ ID NO: 315010 - RNA, 32 nt, Homo Sapiens
agcaugaggaacugcaccuuuaggccaucuca

SEQ ID NO: 315011 - RNA, 32 nt, Homo Sapiens
cagaccuggcuuucaccuccacaguccuuaag

SEQ ID NO: 315012 - RNA, 32 nt, Homo Sapiens
agcacaggacaaagccgggcgcgguggcucau

SEQ ID NO: 315013 - RNA, 32 nt, Homo Sapiens
augugccugcuucuccuucgccuucuaacaug

SEQ ID NO: 315014 - RNA, 32 nt, Homo Sapiens
aaaagcagucaauuuuaacccauucccaacag

SEQ ID NO: 315015 - RNA, 32 nt, Homo Sapiens
augauucuguguauaucuguuacagcuaguug

SEQ ID NO: 315016 - RNA, 32 nt, Homo Sapiens
cuuuuugcauuggucuuaaacuuuuacuuuuu

SEQ ID NO: 315017 - RNA, 32 nt, Homo Sapiens
uguaccccaucccaagcauagccagcuccccc

SEQ ID NO: 315018 - RNA, 32 nt, Homo Sapiens
gcuucauccccgacguuggacaauggucauuu

SEQ ID NO: 315019 - RNA, 32 nt, Homo Sapiens
ccucacucauugauuacccugggauagggcac

SEQ ID NO: 315020 - RNA, 32 nt, Homo Sapiens
ucaacuuaaggguaggcucaaaacaggguugu

SEQ ID NO: 315021 - RNA, 32 nt, Homo Sapiens
ccuuuauuucuuuuuuaaauuauguaaucaga

SEQ ID NO: 315022 - RNA, 32 nt, Homo Sapiens
aggcaggucuuccguccucagagccuuucugg

SEQ ID NO: 315023 - RNA, 32 nt, Homo Sapiens
ugugucucaugccagcagcacgucgccauccg

SEQ ID NO: 315024 - RNA, 32 nt, Homo Sapiens
gcaccuuccccucccaggucugguuagggcag

SEQ ID NO: 315025 - RNA, 32 nt, Homo Sapiens
uugcaccacgggacaucacagggugcgcucgg

SEQ ID NO: 315026 - RNA, 32 nt, Homo Sapiens
gcuguucuccccaccccaggugccuuuggagg

SEQ ID NO: 315027 - RNA, 32 nt, Homo Sapiens
aacacuucuuggaaaaucuagguaauucaagc

SEQ ID NO: 315028 - RNA, 32 nt, Homo Sapiens
aacaaaacaaaaucuggagaugcugaauuuug

SEQ ID NO: 315029 - RNA, 32 nt, Homo Sapiens
gcuuauauuuuauugcugaaguaaauuuucaa

SEQ ID NO: 315030 - RNA, 28 nt, Homo Sapiens
uagauggggaagggcuguggguuggcuc

SEQ ID NO: 315031 - RNA, 32 nt, Homo Sapiens
cccucaaauauguuguuucuugugacucccua

SEQ ID NO: 315032 - RNA, 32 nt, Homo Sapiens
aaagauguaacgacauugaugaagacuggaug

SEQ ID NO: 315033 - RNA, 32 nt, Homo Sapiens
gggggcgagccuuagcagcugcaccgccaucc

SEQ ID NO: 315034 - RNA, 32 nt, Homo Sapiens
auaaagcggccugcguucccggcgucugcgug

SEQ ID NO: 315035 - RNA, 32 nt, Homo Sapiens
agcugucuuuauucugcccccaucccaaccca

SEQ ID NO: 315036 - RNA, 32 nt, Homo Sapiens
uuaaaacucuuccagacacccucagguugaca

SEQ ID NO: 315037 - RNA, 32 nt, Homo Sapiens
uaggauuccuuccacggcuccggccgcuagga

SEQ ID NO: 315038 - RNA, 32 nt, Homo Sapiens
aagaaaaucaaacacuuacaaaacagaaguca

SEQ ID NO: 315039 - RNA, 32 nt, Homo Sapiens
ccucugccccucccgggcggaccuccugaggc

SEQ ID NO: 315040 - RNA, 32 nt, Homo Sapiens
cagcuacggcggcggcagcggcggcgcgguug

SEQ ID NO: 315041 - RNA, 32 nt, Homo Sapiens
gaugaggaaaccgagagaaguggcccaagguc

SEQ ID NO: 315042 - RNA, 32 nt, Homo Sapiens
accuauuugucaaaaauaauguuaaauccaga

SEQ ID NO: 315043 - RNA, 32 nt, Homo Sapiens
acacaggucacuuuucaaaacacuugcaucau

SEQ ID NO: 315044 - RNA, 32 nt, Homo Sapiens
uuaaaauuucuuuuccugggaaucaagguaac

SEQ ID NO: 315045 - RNA, 31 nt, Homo Sapiens
uaauaggcgggccccucagcauucacgcucc

SEQ ID NO: 315046 - RNA, 32 nt, Homo Sapiens
cuuagaacuuugaccaaaaauuuuacaguaaa

SEQ ID NO: 315047 - RNA, 32 nt, Homo Sapiens
ggccccugcccugcugcccccaacagcgucug

SEQ ID NO: 315048 - RNA, 32 nt, Homo Sapiens
uuuaaucgacagagaccccaccuacuuugggc

SEQ ID NO: 315049 - RNA, 32 nt, Homo Sapiens
acgggaggcuggaagcugggaggucagguggg

SEQ ID NO: 315050 - RNA, 32 nt, Homo Sapiens
gagccaaagagaagaaaugauuuauuaacaug

SEQ ID NO: 315051 - RNA, 32 nt, Homo Sapiens
uacgaguccccucuccucguaggccucucgga

SEQ ID NO: 315052 - RNA, 32 nt, Homo Sapiens
uuuauccuaggugauuuuuaaaugaaaaugug

SEQ ID NO: 315053 - RNA, 32 nt, Homo Sapiens
guguuggccauacucacccccauccugggaau

SEQ ID NO: 315054 - RNA, 30 nt, Homo Sapiens
cuuuuggcggccucugcaggccucgacaag

SEQ ID NO: 315055 - RNA, 32 nt, Homo Sapiens
guugcugccucguaucucagguuuuucucugu

SEQ ID NO: 315056 - RNA, 32 nt, Homo Sapiens
uagagaugcauuuaagaauuauucacaaaaug

SEQ ID NO: 315057 - RNA, 32 nt, Homo Sapiens
uaaaaauaaaaagcacaguuguaacuaccuga

SEQ ID NO: 315058 - RNA, 30 nt, Homo Sapiens
ucuccuuaucaccacugcuuuaauguaguu

SEQ ID NO: 315059 - RNA, 32 nt, Homo Sapiens
gugagggagaccgcggcucggccguagcggag

SEQ ID NO: 315060 - RNA, 32 nt, Homo Sapiens
ugguggaggacggagagaaaccucuuuauuuc

SEQ ID NO: 315061 - RNA, 32 nt, Homo Sapiens
gacuguuauuauaugccuuguuuucugucaag

SEQ ID NO: 315062 - RNA, 31 nt, Homo Sapiens
ccaugggauucccagaaccugcuaacagaau

SEQ ID NO: 315063 - RNA, 32 nt, Homo Sapiens
cauaauaguggaagaaaauucaguggaagguu

SEQ ID NO: 315064 - RNA, 32 nt, Homo Sapiens
accaaagcuucuuucuguuguguuugauuuua

SEQ ID NO: 315065 - RNA, 32 nt, Homo Sapiens
auccuaucucaagagagagauauuuuacucau

SEQ ID NO: 315066 - RNA, 32 nt, Homo Sapiens
augaucugcacugucaaguaaacuacaguuag

SEQ ID NO: 315067 - RNA, 30 nt, Homo Sapiens
aggacaucguugcugccgccgugacugguu

SEQ ID NO: 315068 - RNA, 32 nt, Homo Sapiens
cuuuaaccaguuaggugcuagauccuaagagg

SEQ ID NO: 315069 - RNA, 32 nt, Homo Sapiens
guuuggugcucuauugauuggugagugaccag

SEQ ID NO: 315070 - RNA, 32 nt, Homo Sapiens
cugccacucacaguccacggacucaaauuuua

SEQ ID NO: 315071 - RNA, 32 nt, Homo Sapiens
gcuugucccuccccucccucuucagcuuccca

SEQ ID NO: 315072 - RNA, 32 nt, Homo Sapiens
ggagaggggucaccgccuccuucagcgaggag

SEQ ID NO: 315073 - RNA, 32 nt, Homo Sapiens
caguuuugcacauaaaauaccaucaugcacuu

SEQ ID NO: 315074 - RNA, 32 nt, Homo Sapiens
agaguuuacaaugugcuuuuuccgccaaucag

SEQ ID NO: 315075 - RNA, 32 nt, Homo Sapiens
cccugauaucaacuuuuuauaaagcucuuaau

SEQ ID NO: 315076 - RNA, 32 nt, Homo Sapiens
ggcugggugcgguggcuguuggcauuuuggga

SEQ ID NO: 315077 - RNA, 28 nt, Homo Sapiens
auagaguuuaguaaaauguguuucaaaa

SEQ ID NO: 315078 - RNA, 32 nt, Homo Sapiens
cuuccaggagucagaaaucugugacuuucaag

SEQ ID NO: 315079 - RNA, 32 nt, Homo Sapiens
augauguuagugaacuauuaauaauccaauua

SEQ ID NO: 315080 - RNA, 32 nt, Homo Sapiens
gaccugcuuuguauuuaacucuccauguguca

SEQ ID NO: 315081 - RNA, 32 nt, Homo Sapiens
caugggggagcuggaggcagggacuagaacag

SEQ ID NO: 315082 - RNA, 32 nt, Homo Sapiens
ggaaagacaccuuguauauaugcuguuguggg

SEQ ID NO: 315083 - RNA, 32 nt, Homo Sapiens
ccagccaccucugcaacugcagcccucaguca

SEQ ID NO: 315084 - RNA, 32 nt, Homo Sapiens
cgaaguccucuggauuucuugauauuaucagg

SEQ ID NO: 315085 - RNA, 32 nt, Homo Sapiens
aaguaaccggugccuucccaggcacuggcguu

SEQ ID NO: 315086 - RNA, 32 nt, Homo Sapiens
uccuacuucaacagaagaacaauauaaaauua

SEQ ID NO: 315087 - RNA, 32 nt, Homo Sapiens
uuaucauacgcggccgccuucuccucguacug

SEQ ID NO: 315088 - RNA, 32 nt, Homo Sapiens
ccucugaccugccuguaccacguggguccucu

SEQ ID NO: 315089 - RNA, 32 nt, Homo Sapiens
ucuuucugcaucuuguagaauucagcuaugaa

SEQ ID NO: 315090 - RNA, 32 nt, Homo Sapiens
cugcgaggaaagggcgcggucagcccgcccca

SEQ ID NO: 315091 - RNA, 32 nt, Homo Sapiens
gucggggcugagggcugcugcggcgcagggag

SEQ ID NO: 315092 - RNA, 30 nt, Homo Sapiens
gucacacagcuaauggcagaacuggcacua

SEQ ID NO: 315093 - RNA, 32 nt, Homo Sapiens
uucucuuaaugaacaaggucguucuggaccuu

SEQ ID NO: 315094 - RNA, 32 nt, Homo Sapiens
ugggugugguggcucacgccuauaaucccagc

SEQ ID NO: 315095 - RNA, 32 nt, Homo Sapiens
gaaagcuguaucaugagcugccugcacuucua

SEQ ID NO: 315096 - RNA, 32 nt, Homo Sapiens
ugauggucuggggucccaccccugccccacuu

SEQ ID NO: 315097 - RNA, 32 nt, Homo Sapiens
ccagcacuucccugccucccccaggccucagg

SEQ ID NO: 315098 - RNA, 32 nt, Homo Sapiens
uguauuauuuuuucucuuuucucauaaaccgc

SEQ ID NO: 315099 - RNA, 32 nt, Homo Sapiens
gccuuuccagcauugcacaucuaugauacuua

SEQ ID NO: 315100 - RNA, 32 nt, Homo Sapiens
aggagcagaacaaaaauaagaaauaauuagca

SEQ ID NO: 315101 - RNA, 32 nt, Homo Sapiens
uuuaaagugaauuguuguaaugaaguuccugu

SEQ ID NO: 315102 - RNA, 29 nt, Homo Sapiens
gaaacugugacuuuccaaaugagccuuuc

SEQ ID NO: 315103 - RNA, 32 nt, Homo Sapiens
ugcaucuucugggcccuucucuccuuuaggcc

SEQ ID NO: 315104 - RNA, 32 nt, Homo Sapiens
aacagagccccggccgccgccagcgcgauguu

SEQ ID NO: 315105 - RNA, 32 nt, Homo Sapiens
uucaauaaccucugccucccccaccccuuaac

SEQ ID NO: 315106 - RNA, 32 nt, Homo Sapiens
uuugucuuuacucccuuuauugugucuuuuga

SEQ ID NO: 315107 - RNA, 32 nt, Homo Sapiens
caaccagcagugccuucuugcugcauccucug

SEQ ID NO: 315108 - RNA, 32 nt, Homo Sapiens
uccuuuacuuuuacuuuuuuuuuuucuuugga

SEQ ID NO: 315109 - RNA, 32 nt, Homo Sapiens
cagggggccucggucugacacugucuucucuc

SEQ ID NO: 315110 - RNA, 32 nt, Homo Sapiens
acugaaguuuuacaauaaaaacuaauuuaaau

SEQ ID NO: 315111 - RNA, 32 nt, Homo Sapiens
acucacugucuccucacaggcuuucaggacgu

SEQ ID NO: 315112 - RNA, 32 nt, Homo Sapiens
caacggccagcaggugccccauccucugccca

SEQ ID NO: 315113 - RNA, 32 nt, Homo Sapiens
ccaccgucaacggcuucccaucggaggugguu

SEQ ID NO: 315114 - RNA, 32 nt, Homo Sapiens
ccaggauaugguguucauuuuaugauauuacg

SEQ ID NO: 315115 - RNA, 32 nt, Homo Sapiens
aaaaaccaaaauacagaauggcuucugugaua

SEQ ID NO: 315116 - RNA, 32 nt, Homo Sapiens
cgcuuuccggcccgcggcgaccgccggcaacu

SEQ ID NO: 315117 - RNA, 32 nt, Homo Sapiens
augggcguauaguacaugauaauuucucuagu

SEQ ID NO: 315118 - RNA, 32 nt, Homo Sapiens
cuaaagauagaguaaaaagaaaacaaaaccaa

SEQ ID NO: 315119 - RNA, 32 nt, Homo Sapiens
augaauguaugccacugcaauuagaguaucca

SEQ ID NO: 315120 - RNA, 32 nt, Homo Sapiens
ucuaucuagauuaggagaggguccuggcuagg

SEQ ID NO: 315121 - RNA, 32 nt, Homo Sapiens
uucugcuggaagcugauguggaaggcuucccu

SEQ ID NO: 315122 - RNA, 32 nt, Homo Sapiens
ggaaguggcagagcuaggacacaaaauuccua

SEQ ID NO: 315123 - RNA, 32 nt, Homo Sapiens
gccuggugcuugucuuggcgagauggacaggu

SEQ ID NO: 315124 - RNA, 32 nt, Homo Sapiens
gacuugaguaguuacagacugauuccagugaa

SEQ ID NO: 315125 - RNA, 30 nt, Homo Sapiens
cuauauuaaaagcugauugagucuguacau

SEQ ID NO: 315126 - RNA, 32 nt, Homo Sapiens
ucgugucccucagcugcagggcacuguguugg

SEQ ID NO: 315127 - RNA, 32 nt, Homo Sapiens
uacuuccgcccgguucuccuucccgcagucug

SEQ ID NO: 315128 - RNA, 32 nt, Homo Sapiens
acuuugugucuaggaacaauggauuuuguauc

SEQ ID NO: 315129 - RNA, 32 nt, Homo Sapiens
cuguuccggcgccggaccccuguuugcaaagg

SEQ ID NO: 315130 - RNA, 32 nt, Homo Sapiens
aguuuaaacagcaagcacuuagagagcuuuua

SEQ ID NO: 315131 - RNA, 32 nt, Homo Sapiens
aaaccauguuuuaaguagcuacaggagcuaua

SEQ ID NO: 315132 - RNA, 30 nt, Homo Sapiens
gccgaaugacccgggcgcacgcggcggagc

SEQ ID NO: 315133 - RNA, 32 nt, Homo Sapiens
cuggacccugucaggaugggccccaccucaga

SEQ ID NO: 315134 - RNA, 29 nt, Homo Sapiens
ugaacuggugcuuuccuguaaaauauuca

SEQ ID NO: 315135 - RNA, 32 nt, Homo Sapiens
caauuccagaguaguuucaaguuucacaucgu

SEQ ID NO: 315136 - RNA, 32 nt, Homo Sapiens
gccucggccccguucccuccccggaccccccg

SEQ ID NO: 315137 - RNA, 32 nt, Homo Sapiens
caugagcuggacuucauguuucccucaaagac

SEQ ID NO: 315138 - RNA, 32 nt, Homo Sapiens
ugcucucaggacgguggaccggugaccccuuu

SEQ ID NO: 315139 - RNA, 32 nt, Homo Sapiens
gcgaagcgaauucuccagggaauuaagagcuu

SEQ ID NO: 315140 - RNA, 32 nt, Homo Sapiens
ccagccuccuucccuuccagcucuguccuagg

SEQ ID NO: 315141 - RNA, 32 nt, Homo Sapiens
caccccaccccucccccgccguguguggcccc

SEQ ID NO: 315142 - RNA, 32 nt, Homo Sapiens
ggggugcagggccccagggauggcccccaauc

SEQ ID NO: 315143 - RNA, 32 nt, Homo Sapiens
ccuuuuccgccugccgcccccggaugggaugg

SEQ ID NO: 315144 - RNA, 32 nt, Homo Sapiens
auuguauuaaaaagcauauuugaaaguauuca

SEQ ID NO: 315145 - RNA, 32 nt, Homo Sapiens
gacuaacacggcuccucaaauuccuucccugu

SEQ ID NO: 315146 - RNA, 32 nt, Homo Sapiens
ggcagccugaccaacauagugaaaccccaucu

SEQ ID NO: 315147 - RNA, 32 nt, Homo Sapiens
gccagccugaccaacauggugaaacaccaucu

SEQ ID NO: 315148 - RNA, 32 nt, Homo Sapiens
acuucuacuaggcaaagcaauacaucggucca

SEQ ID NO: 315149 - RNA, 30 nt, Homo Sapiens
acggagggagguggagcuucaagaugccug

SEQ ID NO: 315150 - RNA, 32 nt, Homo Sapiens
agcgccuuuguccucugaacuucucaccaguu

SEQ ID NO: 315151 - RNA, 32 nt, Homo Sapiens
ugguuauuuuguauaaaguacaugcuuaaaau

SEQ ID NO: 315152 - RNA, 32 nt, Homo Sapiens
acacacaacacauacacacacacacacacaca

SEQ ID NO: 315153 - RNA, 32 nt, Homo Sapiens
cagccuccugaguagcugggaguacaggcgug

SEQ ID NO: 315154 - RNA, 32 nt, Homo Sapiens
cggggcauauaaaaaugcaacuuguauuccuu

SEQ ID NO: 315155 - RNA, 32 nt, Homo Sapiens
gaaaguuugucaauuuguuuucacuauaaggc

SEQ ID NO: 315156 - RNA, 32 nt, Homo Sapiens
aaguccuaagcucacaggauccuccgagcaug

SEQ ID NO: 315157 - RNA, 32 nt, Homo Sapiens
auucauaaaaauuaaaauuauucauuaaaaac

SEQ ID NO: 315158 - RNA, 32 nt, Homo Sapiens
ugcagcagugggcugaagggcuccucaagugc

SEQ ID NO: 315159 - RNA, 32 nt, Homo Sapiens
ugugauucaucaagcagcacaaacuuucauuu

SEQ ID NO: 315160 - RNA, 32 nt, Homo Sapiens
cauucuggaagcuccagcugcugcugggcugc

SEQ ID NO: 315161 - RNA, 32 nt, Homo Sapiens
cauuuaaagacacccaucucugccugagcugu

SEQ ID NO: 315162 - RNA, 32 nt, Homo Sapiens
gggagggaagggggaacaugagccuuuguugc

SEQ ID NO: 315163 - RNA, 32 nt, Homo Sapiens
auuacaacuaaauuauuaugcccucuucucac

SEQ ID NO: 315164 - RNA, 32 nt, Homo Sapiens
ccacuucagccuccagaguggcugggaccaca

SEQ ID NO: 315165 - RNA, 31 nt, Homo Sapiens
acuauguguaugcucuaagaccucucagcac

SEQ ID NO: 315166 - RNA, 32 nt, Homo Sapiens
auucagccaagggccaguggcagcuucccagc

SEQ ID NO: 315167 - RNA, 32 nt, Homo Sapiens
ugugaccuuucugccagagcucccagccaggc

SEQ ID NO: 315168 - RNA, 32 nt, Homo Sapiens
caaagagucccacguggacagcgacuccuccu

SEQ ID NO: 315169 - RNA, 32 nt, Homo Sapiens
uaagcuccaaauacccuauaucuuucuuuaau

SEQ ID NO: 315170 - RNA, 32 nt, Homo Sapiens
ugugggcaccuuuguccuugcugcuggugggg

SEQ ID NO: 315171 - RNA, 32 nt, Homo Sapiens
auaagcuucuaagggaggaaggcagcauuggg

SEQ ID NO: 315172 - RNA, 32 nt, Homo Sapiens
ggaaggaaaaagaucauaugcuggaguuacua

SEQ ID NO: 315173 - RNA, 32 nt, Homo Sapiens
caucaaaggaauauaaaagggcacauaucugu

SEQ ID NO: 315174 - RNA, 32 nt, Homo Sapiens
gggcagaucauuugagcccaggaguuccagac

SEQ ID NO: 315175 - RNA, 32 nt, Homo Sapiens
ucccauuuuccacaguuuuuuccgcagacuuc

SEQ ID NO: 315176 - RNA, 32 nt, Homo Sapiens
aggcacccugcagggcaaugcaugucauccca

SEQ ID NO: 315177 - RNA, 32 nt, Homo Sapiens
uaccuguguguauguguguguuugugugucua

SEQ ID NO: 315178 - RNA, 32 nt, Homo Sapiens
ccaugaacggaauaccugcuagguuccaggaa

SEQ ID NO: 315179 - RNA, 32 nt, Homo Sapiens
auguaguuagucuuuucuuaacuuauaccaaa

SEQ ID NO: 315180 - RNA, 32 nt, Homo Sapiens
ccaggccguucuccugcccccgcggcuggagc

SEQ ID NO: 315181 - RNA, 32 nt, Homo Sapiens
cuccugcccacccacacugacggcaucuuccc

SEQ ID NO: 315182 - RNA, 32 nt, Homo Sapiens
ggguuucugccuuugcuucucuugucauucuc

SEQ ID NO: 315183 - RNA, 32 nt, Homo Sapiens
aacuccacguuaagcugucagcauacacaaac

SEQ ID NO: 315184 - RNA, 31 nt, Homo Sapiens
gacaugcugugcucaguauuguguggaacgu

SEQ ID NO: 315185 - RNA, 32 nt, Homo Sapiens
guccucuggcuuggguuaauucuuggaugacg

SEQ ID NO: 315186 - RNA, 32 nt, Homo Sapiens
gugaggagaaagaagaaaauggcugcccauuu

SEQ ID NO: 315187 - RNA, 32 nt, Homo Sapiens
cugccgcuggaacuccgggucucgucuucacu

SEQ ID NO: 315188 - RNA, 32 nt, Homo Sapiens
aggagcugcccccaguggacaccaaugaaccc

SEQ ID NO: 315189 - RNA, 32 nt, Homo Sapiens
aggaggagauaaaggaucucauugaucagcug

SEQ ID NO: 315190 - RNA, 29 nt, Homo Sapiens
ggcugcauugacaauuauuguagggguag

SEQ ID NO: 315191 - RNA, 31 nt, Homo Sapiens
guauuuuuauuuauucugccaaaugaaaccc

SEQ ID NO: 315192 - RNA, 32 nt, Homo Sapiens
ugaugcugggccuuaaauucauguuaguguua

SEQ ID NO: 315193 - RNA, 32 nt, Homo Sapiens
uugaucuuuuaaaaaauacagugugauuucau

SEQ ID NO: 315194 - RNA, 32 nt, Homo Sapiens
cugucugaacagaggccagacucugguuuccc

SEQ ID NO: 315195 - RNA, 32 nt, Homo Sapiens
ccaagugaaguccacaagauggcugcuguggc

SEQ ID NO: 315196 - RNA, 28 nt, Homo Sapiens
cacacccaggggccauagucaacgaagc

SEQ ID NO: 315197 - RNA, 32 nt, Homo Sapiens
gcggcccgccggggccauggcgaagaagagcg

SEQ ID NO: 315198 - RNA, 32 nt, Homo Sapiens
ggacgccaugagggcucugcugcuccuggggu

SEQ ID NO: 315199 - RNA, 32 nt, Homo Sapiens
uuccaagaugacccugaacucaugcuguuggu

SEQ ID NO: 315200 - RNA, 32 nt, Homo Sapiens
uucacuagcucuuugacagaauuuguuuaaac

SEQ ID NO: 315201 - RNA, 32 nt, Homo Sapiens
uuggaggagcccagagaccguuugcuuuauac

SEQ ID NO: 315202 - RNA, 32 nt, Homo Sapiens
ugcagucccagcucagcauaguaugaaggacc

SEQ ID NO: 315203 - RNA, 32 nt, Homo Sapiens
agcaaagcccgcgcgccgcugcauccugcgcc

SEQ ID NO: 315204 - RNA, 32 nt, Homo Sapiens
uagacaucaguucuuuaagucucagaaaacgc

SEQ ID NO: 315205 - RNA, 32 nt, Homo Sapiens
ugauagucugcuucucucugguaacuugucug

SEQ ID NO: 315206 - RNA, 32 nt, Homo Sapiens
cugcugcuucaucucucccccagccugccaug

SEQ ID NO: 315207 - RNA, 32 nt, Homo Sapiens
ccccuguaauccuagcacuuugggaggcugag

SEQ ID NO: 315208 - RNA, 32 nt, Homo Sapiens
aaguaacaaaaauuuuaagcuuuuaaaaaugu

SEQ ID NO: 315209 - RNA, 32 nt, Homo Sapiens
uuuuuuguagccagguccuuggugcaguauuu

SEQ ID NO: 315210 - RNA, 32 nt, Homo Sapiens
ucgaacuucaguguuauuucaguuagagauac

SEQ ID NO: 315211 - RNA, 32 nt, Homo Sapiens
aaucaccagagaugcaaucuccugcuagaugu

SEQ ID NO: 315212 - RNA, 28 nt, Homo Sapiens
ucaaugaagcagccgaucauggcggaug

SEQ ID NO: 315213 - RNA, 32 nt, Homo Sapiens
uguuaaacagauuuaaugacggucauggcaac

SEQ ID NO: 315214 - RNA, 32 nt, Homo Sapiens
uuagggaagauaaguugaguuguccaagagca

SEQ ID NO: 315215 - RNA, 32 nt, Homo Sapiens
gcgugcggccccagccccgccaccuuccuggg

SEQ ID NO: 315216 - RNA, 32 nt, Homo Sapiens
aggucguccgucggccggcgcguccuccugcu

SEQ ID NO: 315217 - RNA, 32 nt, Homo Sapiens
acugugaugauuaaauuaguugauucauauaa

SEQ ID NO: 315218 - RNA, 32 nt, Homo Sapiens
cccugccugugccugccugggaguuuuguauu

SEQ ID NO: 315219 - RNA, 32 nt, Homo Sapiens
aaaugucaaggaaugaagaacaacaacucuca

SEQ ID NO: 315220 - RNA, 32 nt, Homo Sapiens
cccaagaguauacuccaccgagaaccaccagc

SEQ ID NO: 315221 - RNA, 32 nt, Homo Sapiens
ucaggaaggaccagugcccuccauagccugag

SEQ ID NO: 315222 - RNA, 32 nt, Homo Sapiens
cccaccccaucccucuccccagucuuggauac

SEQ ID NO: 315223 - RNA, 32 nt, Homo Sapiens
ucucucccccgccccccaccgccccaccacac

SEQ ID NO: 315224 - RNA, 32 nt, Homo Sapiens
ucuacccaagauguuucuuuuccuaguggugg

SEQ ID NO: 315225 - RNA, 30 nt, Homo Sapiens
ccaugaaaaagcggcggcggcgggagagag

SEQ ID NO: 315226 - RNA, 29 nt, Homo Sapiens
gcaggggguaagguggccauaccagcaca

SEQ ID NO: 315227 - RNA, 32 nt, Homo Sapiens
aagaacaacccggcuggcuuaaacccuggagc

SEQ ID NO: 315228 - RNA, 32 nt, Homo Sapiens
uggaagggcuucugcccccuuccucgaggaca

SEQ ID NO: 315229 - RNA, 32 nt, Homo Sapiens
guuuguguuuuucuauagaaaaaguaaaagau

SEQ ID NO: 315230 - RNA, 32 nt, Homo Sapiens
cgagccagccgugcgccgcgcuccagggccca

SEQ ID NO: 315231 - RNA, 32 nt, Homo Sapiens
auauaggugggaagaaaaggugacuuguuaua

SEQ ID NO: 315232 - RNA, 32 nt, Homo Sapiens
uuuaaaacaugcuauauguacuguauguccug

SEQ ID NO: 315233 - RNA, 32 nt, Homo Sapiens
gaauuaugcucuuguaccuguguggcuggguu

SEQ ID NO: 315234 - RNA, 32 nt, Homo Sapiens
uuaauuuaauuauuuuaauucuuaauacuuua

SEQ ID NO: 315235 - RNA, 32 nt, Homo Sapiens
cuaauuuaauaaagaaaccuguaaauuacugu

SEQ ID NO: 315236 - RNA, 32 nt, Homo Sapiens
aauuguaaucaucaaucuuucauauuauuaau

SEQ ID NO: 315237 - RNA, 32 nt, Homo Sapiens
uauuuuccucaauuaugacugcccagauuuag

SEQ ID NO: 315238 - RNA, 32 nt, Homo Sapiens
aauagaaauaccaacgagaaaggagaguccuu

SEQ ID NO: 315239 - RNA, 32 nt, Homo Sapiens
ugcugcgggcugugagcagagccccguccuug

SEQ ID NO: 315240 - RNA, 32 nt, Homo Sapiens
gugugguacagcgagcuguugucuggcuaugg

SEQ ID NO: 315241 - RNA, 32 nt, Homo Sapiens
cauugggaccagagaccccgcaaguggccugu

SEQ ID NO: 315242 - RNA, 32 nt, Homo Sapiens
uaguggcaacucucuuguauauguggguuaaa

SEQ ID NO: 315243 - RNA, 32 nt, Homo Sapiens
ggcugggagaagcggaguguuggugagugacg

SEQ ID NO: 315244 - RNA, 32 nt, Homo Sapiens
cagccucccaaaaagcugggauuacuagcaug

SEQ ID NO: 315245 - RNA, 32 nt, Homo Sapiens
acauuacuugcaaagaaaaguuuauaguauuu

SEQ ID NO: 315246 - RNA, 32 nt, Homo Sapiens
ccaccagcagugccuccuauuaaccugugaca

SEQ ID NO: 315247 - RNA, 32 nt, Homo Sapiens
cugcagucugcacucuuuaaaccuguuuaagg

SEQ ID NO: 315248 - RNA, 32 nt, Homo Sapiens
cgcaaggccgucagaugcuuguccuggaaacc

SEQ ID NO: 315249 - RNA, 32 nt, Homo Sapiens
ucucuguauuuucaggaguuugaaaauucaaa

SEQ ID NO: 315250 - RNA, 32 nt, Homo Sapiens
aagucagugaacaugaaaacucagacaaagca

SEQ ID NO: 315251 - RNA, 32 nt, Homo Sapiens
uucaaaucuauuaucuaauguauuagguuaau

SEQ ID NO: 315252 - RNA, 32 nt, Homo Sapiens
aaauugagaucaguguuucuaaccaaggaagg

SEQ ID NO: 315253 - RNA, 31 nt, Homo Sapiens
aacuuaaauugggccaaucagaauuguuauc

SEQ ID NO: 315254 - RNA, 32 nt, Homo Sapiens
ugucaccacaguguuggccagaugcacagguc

SEQ ID NO: 315255 - RNA, 32 nt, Homo Sapiens
ggaaagauagaguaccagguccuaggucagua

SEQ ID NO: 315256 - RNA, 32 nt, Homo Sapiens
ccagaccccagccuccccuccucccucccauc

SEQ ID NO: 315257 - RNA, 32 nt, Homo Sapiens
uuccuuacugcauuguuaaauagaagaguguu

SEQ ID NO: 315258 - RNA, 32 nt, Homo Sapiens
auuuugcuggggagaggcuaaagggaaaggua

SEQ ID NO: 315259 - RNA, 32 nt, Homo Sapiens
acugagugugucagaagugcugguuaaugacg

SEQ ID NO: 315260 - RNA, 32 nt, Homo Sapiens
uugaccagcagaacuguaccuguugggcacuu

SEQ ID NO: 315261 - RNA, 32 nt, Homo Sapiens
aagcugaaggugaugaggaagaagagacgaac

SEQ ID NO: 315262 - RNA, 30 nt, Homo Sapiens
acuuagaucuucgguggccucauguaaacg

SEQ ID NO: 315263 - RNA, 32 nt, Homo Sapiens
gcagagaaggauuuaacucuucugauugcaau

SEQ ID NO: 315264 - RNA, 32 nt, Homo Sapiens
aauggcacaauuuuugcucaggguucuuacag

SEQ ID NO: 315265 - RNA, 32 nt, Homo Sapiens
cacuauuaauaaauugaaagcuugcuguacaa

SEQ ID NO: 315266 - RNA, 32 nt, Homo Sapiens
ggcugcggcacgggaaaggcucagugacugaa

SEQ ID NO: 315267 - RNA, 32 nt, Homo Sapiens
cacuucccugaaugccucccccaucuccauca

SEQ ID NO: 315268 - RNA, 32 nt, Homo Sapiens
uuuuauaacuuuagcucuggcuuacucuucuc

SEQ ID NO: 315269 - RNA, 32 nt, Homo Sapiens
ccgccugccggcccgcccggcgccgggccaug

SEQ ID NO: 315270 - RNA, 32 nt, Homo Sapiens
guccuagucuccugcuccccccgccccgcuug

SEQ ID NO: 315271 - RNA, 32 nt, Homo Sapiens
aauagagaaggaacacaggucuggccagggac

SEQ ID NO: 315272 - RNA, 32 nt, Homo Sapiens
accaagauccguccggccgcuggagacccagg

SEQ ID NO: 315273 - RNA, 32 nt, Homo Sapiens
cauagagucuucugcucuuccucaacuaccaa

SEQ ID NO: 315274 - RNA, 32 nt, Homo Sapiens
ggagccgcggaccccagaccccugccugccca

SEQ ID NO: 315275 - RNA, 27 nt, Homo Sapiens
uuuaaauaaaguuuacuaauuuugacc

SEQ ID NO: 315276 - RNA, 32 nt, Homo Sapiens
agucaaguucccuccugcagccugcccccuag

SEQ ID NO: 315277 - RNA, 32 nt, Homo Sapiens
gucacugcagcagacaucauggcuguggaugu

SEQ ID NO: 315278 - RNA, 32 nt, Homo Sapiens
cacacacacauuuuguggaacaauaaauacau

SEQ ID NO: 315279 - RNA, 32 nt, Homo Sapiens
uuuugcugucccuuuuccuuuuuugauguucu

SEQ ID NO: 315280 - RNA, 32 nt, Homo Sapiens
uuccuuuagcugacaaggacacuccugagguc

SEQ ID NO: 315281 - RNA, 32 nt, Homo Sapiens
gggggauucacuguucaguuugcaaaguaaug

SEQ ID NO: 315282 - RNA, 32 nt, Homo Sapiens
cuggagcucauguggaggaacagaaggccaag

SEQ ID NO: 315283 - RNA, 32 nt, Homo Sapiens
cacugaaaggaaaacgugaaaacacucaaggc

SEQ ID NO: 315284 - RNA, 32 nt, Homo Sapiens
auggcgucgaggcuuccauggggugggggagg

SEQ ID NO: 315285 - RNA, 32 nt, Homo Sapiens
acugaacauucaucgauggucuccauguauuc

SEQ ID NO: 315286 - RNA, 32 nt, Homo Sapiens
caggacaacaggaaacagacagcagugaagau

SEQ ID NO: 315287 - RNA, 32 nt, Homo Sapiens
ugcuaaagugauuuuuuuuuuauuugaccaaa

SEQ ID NO: 315288 - RNA, 32 nt, Homo Sapiens
gagacaacuauauuacucaauuucauauacau

SEQ ID NO: 315289 - RNA, 32 nt, Homo Sapiens
ccgccuuggucuuuuuugucuuuugugcaggg

SEQ ID NO: 315290 - RNA, 32 nt, Homo Sapiens
gugauguauauucucuucuacucuucauguau

SEQ ID NO: 315291 - RNA, 32 nt, Homo Sapiens
guacaagacagagguugagccucauuuuaaua

SEQ ID NO: 315292 - RNA, 32 nt, Homo Sapiens
uggucaugguuugguuuauuuauuuuguccuu

SEQ ID NO: 315293 - RNA, 32 nt, Homo Sapiens
agcgcccuguucugaggcaccuccucaccuca

SEQ ID NO: 315294 - RNA, 32 nt, Homo Sapiens
ggaugaggagaagaagcaggugaccauggagg

SEQ ID NO: 315295 - RNA, 32 nt, Homo Sapiens
aggagggugguugggauacaccggauaccucu

SEQ ID NO: 315296 - RNA, 32 nt, Homo Sapiens
guuggaccauugagggcagcucugccaacauu

SEQ ID NO: 315297 - RNA, 32 nt, Homo Sapiens
caaagauucaacuugccauacaccucaaauuc

SEQ ID NO: 315298 - RNA, 32 nt, Homo Sapiens
aaagccccugcagggccuggcucccuguuggu

SEQ ID NO: 315299 - RNA, 32 nt, Homo Sapiens
gccauuaagcauuuuaaaaugcuuagccuuua

SEQ ID NO: 315300 - RNA, 32 nt, Homo Sapiens
augccacuguccaaguuacgacuuccaaccaa

SEQ ID NO: 315301 - RNA, 32 nt, Homo Sapiens
gcaggccuggucugcuggggccgccugcgcug

SEQ ID NO: 315302 - RNA, 32 nt, Homo Sapiens
uacaaagcucuuuugagcauuuagacucucga

SEQ ID NO: 315303 - RNA, 32 nt, Homo Sapiens
cgcuuucuuccucuccuuuggccacacccucu

SEQ ID NO: 315304 - RNA, 32 nt, Homo Sapiens
uuuuuuccuucuuuuuugagaccaucucacuc

SEQ ID NO: 315305 - RNA, 32 nt, Homo Sapiens
ccgugcgugaaguaggcauauaucacuaagcu

SEQ ID NO: 315306 - RNA, 32 nt, Homo Sapiens
uucgggaggccgagaugggcagagcacuugag

SEQ ID NO: 315307 - RNA, 32 nt, Homo Sapiens
ugcgcacuacucaagaacuacgggcugcucua

SEQ ID NO: 315308 - RNA, 32 nt, Homo Sapiens
acgaucuuaauagauaagauagguuccuauuu

SEQ ID NO: 315309 - RNA, 32 nt, Homo Sapiens
ucuggagcugaaucguggcuggcuggauuuga

SEQ ID NO: 315310 - RNA, 30 nt, Homo Sapiens
uggugagagaagcuuccuuucugcaguuua

SEQ ID NO: 315311 - RNA, 32 nt, Homo Sapiens
aaaagugguggaacaaauaccaacauccaucc

SEQ ID NO: 315312 - RNA, 32 nt, Homo Sapiens
gauugcgggcccaccccucccccugucugccu

SEQ ID NO: 315313 - RNA, 32 nt, Homo Sapiens
ugaucucaugucacggcaaccuccgccuccca

SEQ ID NO: 315314 - RNA, 32 nt, Homo Sapiens
gccgcgacccgaggcgggggccccacaugacc

SEQ ID NO: 315315 - RNA, 32 nt, Homo Sapiens
uacaucaaacagaguucaaauuccacacagau

SEQ ID NO: 315316 - RNA, 32 nt, Homo Sapiens
uguaguccugaugaauaauuucauuuuccuca

SEQ ID NO: 315317 - RNA, 32 nt, Homo Sapiens
ugcuugucgauguagcugauucuguaugggug

SEQ ID NO: 315318 - RNA, 32 nt, Homo Sapiens
cgucuuggcagucauggugacaaugacguuga

SEQ ID NO: 315319 - RNA, 32 nt, Homo Sapiens
cuuguuuuuucauauuacaucuacaagagggg

SEQ ID NO: 315320 - RNA, 32 nt, Homo Sapiens
uuaaagaagucucuuaauucugaugcuagguu

SEQ ID NO: 315321 - RNA, 32 nt, Homo Sapiens
acauugaguuaugaaauuaccugguucuaaga

SEQ ID NO: 315322 - RNA, 32 nt, Homo Sapiens
aaagcauuugauuugcagaugggugauucgua

SEQ ID NO: 315323 - RNA, 32 nt, Homo Sapiens
uuccuguuacugaguuagcucuauucuuuugg

SEQ ID NO: 315324 - RNA, 32 nt, Homo Sapiens
gccgcaaccaaggagcuaucuagcucuggagg

SEQ ID NO: 315325 - RNA, 32 nt, Homo Sapiens
cugcuucaaaaauucuuucuaaccucaaaaau

SEQ ID NO: 315326 - RNA, 32 nt, Homo Sapiens
cauucuggguggcagagugagacucugucuca

SEQ ID NO: 315327 - RNA, 32 nt, Homo Sapiens
ggcgguuaagcucagggccuugguaaaugaca

SEQ ID NO: 315328 - RNA, 32 nt, Homo Sapiens
gauauucauauagaaaaacaaacagaaauaau

SEQ ID NO: 315329 - RNA, 30 nt, Homo Sapiens
cccgaggcgcccggcccggcuccauugagc

SEQ ID NO: 315330 - RNA, 32 nt, Homo Sapiens
acagcaacucagagaauaaccagagaacaacc

SEQ ID NO: 315331 - RNA, 32 nt, Homo Sapiens
aagcgcggccuggccuggccuggguggcgggc

SEQ ID NO: 315332 - RNA, 32 nt, Homo Sapiens
uugacaaagauauuuuuaaaaacaacucucag

SEQ ID NO: 315333 - RNA, 31 nt, Homo Sapiens
ugugagaccuacccuauucagaauuaaaccu

SEQ ID NO: 315334 - RNA, 32 nt, Homo Sapiens
guggccugauggagcagccccauuccaggguc

SEQ ID NO: 315335 - RNA, 32 nt, Homo Sapiens
cgaggaguaagcaucagaggcugcggcgccug

SEQ ID NO: 315336 - RNA, 32 nt, Homo Sapiens
ugagggacugcacuuucuggggccccccggga

SEQ ID NO: 315337 - RNA, 32 nt, Homo Sapiens
ggagcugagcgggacgcuggagggaugggacc

SEQ ID NO: 315338 - RNA, 32 nt, Homo Sapiens
aagaaggaaaauacccacuuaagauuacuaca

SEQ ID NO: 315339 - RNA, 32 nt, Homo Sapiens
uucugggugugugucuucguguguguauuugc

SEQ ID NO: 315340 - RNA, 32 nt, Homo Sapiens
agaagaggaagauggagguggaguacugguuu

SEQ ID NO: 315341 - RNA, 32 nt, Homo Sapiens
cuuaaauagaaagggcuugucaagacuggcca

SEQ ID NO: 315342 - RNA, 32 nt, Homo Sapiens
gucuuuugaaacaaaauugguuucaagugaaa

SEQ ID NO: 315343 - RNA, 32 nt, Homo Sapiens
ccaggagccagaccacugggggugcaucauug

SEQ ID NO: 315344 - RNA, 32 nt, Homo Sapiens
accacaaugaauuguccuuaauuaccaacagu

SEQ ID NO: 315345 - RNA, 32 nt, Homo Sapiens
ggcauggaaauauacaugaaacugaagaaccu

SEQ ID NO: 315346 - RNA, 32 nt, Homo Sapiens
auucaaaaaggaaauaaaaaauacucaauaug

SEQ ID NO: 315347 - RNA, 32 nt, Homo Sapiens
gggguccccgcggcgcgcagcggcugaaggag

SEQ ID NO: 315348 - RNA, 32 nt, Homo Sapiens
ugucucaaaaaagaagaagagaaagggccagg

SEQ ID NO: 315349 - RNA, 32 nt, Homo Sapiens
uguggcggggcaagacguuaaguugggugaca

SEQ ID NO: 315350 - RNA, 32 nt, Homo Sapiens
uuacuuuuguuaagcuaguuaaagguucguug

SEQ ID NO: 315351 - RNA, 32 nt, Homo Sapiens
aauguauauuccaggauuguuaaggauccucg

SEQ ID NO: 315352 - RNA, 32 nt, Homo Sapiens
ggucgggcaggggcuggagggaggcgggggcu

SEQ ID NO: 315353 - RNA, 32 nt, Homo Sapiens
aaucuaugugagaaaaaauuugaaaggaagau

SEQ ID NO: 315354 - RNA, 28 nt, Homo Sapiens
gucauggauuuugagaaucuuuucucaa

SEQ ID NO: 315355 - RNA, 32 nt, Homo Sapiens
cuguaauguaaaucuaggguccagucauaucc

SEQ ID NO: 315356 - RNA, 30 nt, Homo Sapiens
cugugagagggaaugggggaagccugauga

SEQ ID NO: 315357 - RNA, 32 nt, Homo Sapiens
cgaauuuuuaucaugcuucucuuggaacucaa

SEQ ID NO: 315358 - RNA, 32 nt, Homo Sapiens
gagcagcucacagauggcaagcugcgcuucgu

SEQ ID NO: 315359 - RNA, 27 nt, Homo Sapiens
ccauggcggagcaggagagccuggaau

SEQ ID NO: 315360 - RNA, 32 nt, Homo Sapiens
guucccgacaccagaagcuguugggagaaagc

SEQ ID NO: 315361 - RNA, 32 nt, Homo Sapiens
uccaucagacugcuguccuccuggacccaucu

SEQ ID NO: 315362 - RNA, 30 nt, Homo Sapiens
uccacccuggacugaguguucggggcagcc

SEQ ID NO: 315363 - RNA, 32 nt, Homo Sapiens
ggaauuacuagauuuuaaaccucauuacacug

SEQ ID NO: 315364 - RNA, 32 nt, Homo Sapiens
uuuuauuuuuguaauuuuaucuguaagucaua

SEQ ID NO: 315365 - RNA, 32 nt, Homo Sapiens
ggggcaagauuuuccuuuuuuauacacauaau

SEQ ID NO: 315366 - RNA, 32 nt, Homo Sapiens
uuuguuuggauucugagaaaugucugggcuuc

SEQ ID NO: 315367 - RNA, 32 nt, Homo Sapiens
ucaugagucagcccccccgcccgcccccaccc

SEQ ID NO: 315368 - RNA, 32 nt, Homo Sapiens
cccaaguagucuuuuuauaauuuggauuauau

SEQ ID NO: 315369 - RNA, 32 nt, Homo Sapiens
gcccggcaugggcaccacgugcgcuggcguag

SEQ ID NO: 315370 - RNA, 32 nt, Homo Sapiens
gcucccagccgcgcccgagucagacucgggug

SEQ ID NO: 315371 - RNA, 31 nt, Homo Sapiens
cuuguauucaguguuuugccaauuaauauua

SEQ ID NO: 315372 - RNA, 32 nt, Homo Sapiens
auuacgucacugcaggaacugcuucugaaagg

SEQ ID NO: 315373 - RNA, 27 nt, Homo Sapiens
agaguccacaucuucagcuccgugugg

SEQ ID NO: 315374 - RNA, 32 nt, Homo Sapiens
ugugacuuaaaucuggccuuucuggcccaguc

SEQ ID NO: 315375 - RNA, 32 nt, Homo Sapiens
uuuauuuacaugccacuauuaagcugcuaauu

SEQ ID NO: 315376 - RNA, 32 nt, Homo Sapiens
guucuccacugaucuuuuccaaggcuguacag

SEQ ID NO: 315377 - RNA, 32 nt, Homo Sapiens
ugggauuuucccuuguuggucaggcuagucau

SEQ ID NO: 315378 - RNA, 32 nt, Homo Sapiens
agcgccagcucugggcuggacaucagcacccc

SEQ ID NO: 315379 - RNA, 32 nt, Homo Sapiens
gacuuuggugccugugcuauaagcagcagauu

SEQ ID NO: 315380 - RNA, 32 nt, Homo Sapiens
uguaggcuuuaaaauguaaaugucuggauuuu

SEQ ID NO: 315381 - RNA, 32 nt, Homo Sapiens
aaaccuggauuccacaauucuacguuaagugu

SEQ ID NO: 315382 - RNA, 32 nt, Homo Sapiens
cggucccagccccggccgucccggcgucgcuu

SEQ ID NO: 315383 - RNA, 32 nt, Homo Sapiens
gcccuccaccgccauuucuuggucugucuaug

SEQ ID NO: 315384 - RNA, 32 nt, Homo Sapiens
ggccaggcucaggggcagaggcugggacacaa

SEQ ID NO: 315385 - RNA, 32 nt, Homo Sapiens
uuuuggacugagauuucuuaaaucuuucuuca

SEQ ID NO: 315386 - RNA, 32 nt, Homo Sapiens
ugcucagaguuccuuuagggcagagcugaggg

SEQ ID NO: 315387 - RNA, 32 nt, Homo Sapiens
ccuagccucuacaacuaagccaaauaaauuuc

SEQ ID NO: 315388 - RNA, 32 nt, Homo Sapiens
cgggagcaucaccgcuuucuggaccuguccuu

SEQ ID NO: 315389 - RNA, 32 nt, Homo Sapiens
ggaggacaccgacuaauuugggaaacggauga

SEQ ID NO: 315390 - RNA, 32 nt, Homo Sapiens
ugugauuuucuuuuuccaaaaauuccugagua

SEQ ID NO: 315391 - RNA, 32 nt, Homo Sapiens
cucugaucccucugggggcucuggccaagggc

SEQ ID NO: 315392 - RNA, 32 nt, Homo Sapiens
gcuggguguauggccaccuggcccaaaacuac

SEQ ID NO: 315393 - RNA, 32 nt, Homo Sapiens
guguucugagaaaugugucauuaggugauucc

SEQ ID NO: 315394 - RNA, 32 nt, Homo Sapiens
guaaaauaagaaagcccuaaaauacuauugga

SEQ ID NO: 315395 - RNA, 32 nt, Homo Sapiens
aggaagcagggguggggggugcaggugggcac

SEQ ID NO: 315396 - RNA, 32 nt, Homo Sapiens
guaagaaguuaaaacuugagaagcaaaaaaug

SEQ ID NO: 315397 - RNA, 32 nt, Homo Sapiens
ucauuaggaacagugaggcuaguugagaaauu

SEQ ID NO: 315398 - RNA, 32 nt, Homo Sapiens
agguuggucucucugcuucucuauaccaggac

SEQ ID NO: 315399 - RNA, 32 nt, Homo Sapiens
ggcccguggacaccccagaccugcgaaggaug

SEQ ID NO: 315400 - RNA, 32 nt, Homo Sapiens
aggcaccuguaaauaaaucagcauuuaugacc

SEQ ID NO: 315401 - RNA, 32 nt, Homo Sapiens
gacaugggacauuugcucauggaauuggagcu

SEQ ID NO: 315402 - RNA, 32 nt, Homo Sapiens
auacuagaauauauuuuuuccagaugcaguaa

SEQ ID NO: 315403 - RNA, 32 nt, Homo Sapiens
ggacucuaagaugaaucccgaccuggacaccg

SEQ ID NO: 315404 - RNA, 32 nt, Homo Sapiens
ugggaagacguucuggauaguucuucuuuccc

SEQ ID NO: 315405 - RNA, 32 nt, Homo Sapiens
aagcaaaauguaaagcacuuuaauuuauagcu

SEQ ID NO: 315406 - RNA, 32 nt, Homo Sapiens
agccgauaaguauuccacuccucccuuuuugc

SEQ ID NO: 315407 - RNA, 32 nt, Homo Sapiens
ggucgggcggccuggcuacgcaggacccagcc

SEQ ID NO: 315408 - RNA, 32 nt, Homo Sapiens
gcaacuugugaauugaaugaccaugacaaaag

SEQ ID NO: 315409 - RNA, 32 nt, Homo Sapiens
auauucgaauguuuccaauauuuuaaaaugua

SEQ ID NO: 315410 - RNA, 32 nt, Homo Sapiens
gacccguggcggugcuggcaacacaagcacca

SEQ ID NO: 315411 - RNA, 28 nt, Homo Sapiens
guaacaguggcuacacacgagguaacac

SEQ ID NO: 315412 - RNA, 32 nt, Homo Sapiens
auacuuucauauauuuaucuuuaucuaaauac

SEQ ID NO: 315413 - RNA, 32 nt, Homo Sapiens
cuuccagcucuguccuaggagcauaggcggga

SEQ ID NO: 315414 - RNA, 32 nt, Homo Sapiens
cuuaauccacacuaaugugcgcaauuauaaua

SEQ ID NO: 315415 - RNA, 32 nt, Homo Sapiens
ugaaaguucaacauggaagaauuccaaaaugu

SEQ ID NO: 315416 - RNA, 32 nt, Homo Sapiens
acgagauaaggaggacaagagaagggacacac

SEQ ID NO: 315417 - RNA, 32 nt, Homo Sapiens
aguccaguugucccuacaggauaaaagcuucu

SEQ ID NO: 315418 - RNA, 32 nt, Homo Sapiens
acuuucagcagggcuuugaggcugggaaacug

SEQ ID NO: 315419 - RNA, 32 nt, Homo Sapiens
cgagaucccagccgccgcucuccgugcaggag

SEQ ID NO: 315420 - RNA, 32 nt, Homo Sapiens
ugacgccugccaguucucccugcccagccggg

SEQ ID NO: 315421 - RNA, 32 nt, Homo Sapiens
guccaaucacacaauuucuuauggaaaaccuu

SEQ ID NO: 315422 - RNA, 32 nt, Homo Sapiens
cuuuuacccucgcgccccccgccguuggcugc

SEQ ID NO: 315423 - RNA, 32 nt, Homo Sapiens
uugucccugcgguuggagccaucugagcuugu

SEQ ID NO: 315424 - RNA, 32 nt, Homo Sapiens
auuugugcauuacauuucauuucuugugagcu

SEQ ID NO: 315425 - RNA, 32 nt, Homo Sapiens
guuuuagaauaguuucucugguggaugcaaug

SEQ ID NO: 315426 - RNA, 32 nt, Homo Sapiens
aaaaaagcauaaaaacaaaaccagaagugauc

SEQ ID NO: 315427 - RNA, 32 nt, Homo Sapiens
aaagcuuuauuuucaucucucaucuuuugucc

SEQ ID NO: 315428 - RNA, 32 nt, Homo Sapiens
caggcaggcggucugaggaagauaagggccca

SEQ ID NO: 315429 - RNA, 32 nt, Homo Sapiens
uaaaugcuaaaaaaggagauaauuauaaaaua

SEQ ID NO: 315430 - RNA, 32 nt, Homo Sapiens
gcacaggccugucccgggucccggcaggucug

SEQ ID NO: 315431 - RNA, 32 nt, Homo Sapiens
gagggcaguuaagagggaucacaggcccggcu

SEQ ID NO: 315432 - RNA, 32 nt, Homo Sapiens
caccuguuguuugaaagcucucagcgggacaa

SEQ ID NO: 315433 - RNA, 32 nt, Homo Sapiens
uaauuuauuuaguugugcagucagugucaauc

SEQ ID NO: 315434 - RNA, 32 nt, Homo Sapiens
cugacgugugcuucuuuuuuaagaccacaguu

SEQ ID NO: 315435 - RNA, 32 nt, Homo Sapiens
uacauaguugaauuauuuuaucaugcuguugc

SEQ ID NO: 315436 - RNA, 32 nt, Homo Sapiens
gcucggagaagcugcagcugcaggagugcuug

SEQ ID NO: 315437 - RNA, 32 nt, Homo Sapiens
uugagucuauaaauauagaaaauauauauugg

SEQ ID NO: 315438 - RNA, 32 nt, Homo Sapiens
gagcugcggcgguggcggugcaggaggccggg

SEQ ID NO: 315439 - RNA, 32 nt, Homo Sapiens
cucuucugagcacuuuuauuuaauagcagaau

SEQ ID NO: 315440 - RNA, 32 nt, Homo Sapiens
agaaggcuaaugucauucuuccaguagaauca

SEQ ID NO: 315441 - RNA, 32 nt, Homo Sapiens
aaacauucaggagcuuccuguccucccagcuc

SEQ ID NO: 315442 - RNA, 32 nt, Homo Sapiens
agucuuaaagccgccgccaucuggagaaccag

SEQ ID NO: 315443 - RNA, 32 nt, Homo Sapiens
acauccagggguccucauuucuccggcucugg

SEQ ID NO: 315444 - RNA, 32 nt, Homo Sapiens
caguguuucaguguuggagauugaggcugugc

SEQ ID NO: 315445 - RNA, 32 nt, Homo Sapiens
cgccgccaccgccacuacugccuuuaccgucu

SEQ ID NO: 315446 - RNA, 32 nt, Homo Sapiens
gguccuacuggcggaacuacuuugagagcacc

SEQ ID NO: 315447 - RNA, 32 nt, Homo Sapiens
agcagcccuccccgcagcuagcagcgagggca

SEQ ID NO: 315448 - RNA, 32 nt, Homo Sapiens
ccccagagggcagaagcagcguggaggggccc

SEQ ID NO: 315449 - RNA, 32 nt, Homo Sapiens
gauugucuuaucaccuuuauuagauaaaucau

SEQ ID NO: 315450 - RNA, 32 nt, Homo Sapiens
gaggaagaggccggggcccggugcggcagcgc

SEQ ID NO: 315451 - RNA, 32 nt, Homo Sapiens
ucagccuccagauuaacugggucucacucuau

SEQ ID NO: 315452 - RNA, 32 nt, Homo Sapiens
cacaguguuggcuugccacaccuccaggggca

SEQ ID NO: 315453 - RNA, 32 nt, Homo Sapiens
cugagugauguagcguaacaaacaaaaucaug

SEQ ID NO: 315454 - RNA, 32 nt, Homo Sapiens
gugacaccccggggggccugaugugugugggu

SEQ ID NO: 315455 - RNA, 28 nt, Homo Sapiens
uccugagcaagggcgaugaccugguuuu

SEQ ID NO: 315456 - RNA, 32 nt, Homo Sapiens
uucuacccauguuguugaaauggcaagauuuu

SEQ ID NO: 315457 - RNA, 32 nt, Homo Sapiens
ggcccgcccucccaucacugagcuccacuccu

SEQ ID NO: 315458 - RNA, 32 nt, Homo Sapiens
uggaugaauggcaacgcggcucucugcagccu

SEQ ID NO: 315459 - RNA, 32 nt, Homo Sapiens
acgcgcucucgccgggaccccgcuuccgcugg

SEQ ID NO: 315460 - RNA, 32 nt, Homo Sapiens
gcugcaggccccaggaagacuuuccuucaccc

SEQ ID NO: 315461 - RNA, 32 nt, Homo Sapiens
cggaggagcagcggccggguguccacccccau

SEQ ID NO: 315462 - RNA, 32 nt, Homo Sapiens
aaguccaggaggagaagggcucauugcaggcc

SEQ ID NO: 315463 - RNA, 32 nt, Homo Sapiens
acuuucuaaagaugaauuguguggcagugauu

SEQ ID NO: 315464 - RNA, 32 nt, Homo Sapiens
agcccaugcucuccuuuuuuugcuuauuuucc

SEQ ID NO: 315465 - RNA, 32 nt, Homo Sapiens
augacaauuuaaaagucagccuaaagaaugua

SEQ ID NO: 315466 - RNA, 32 nt, Homo Sapiens
ggaggggagguuucuagaugauacuaaaagcc

SEQ ID NO: 315467 - RNA, 32 nt, Homo Sapiens
guccacugacucaucacccuccccugucccuc

SEQ ID NO: 315468 - RNA, 32 nt, Homo Sapiens
uuuaaggaaagcaaaaucauuuccuaaaugca

SEQ ID NO: 315469 - RNA, 32 nt, Homo Sapiens
agcugggccugguggcucuugccuguaauucc

SEQ ID NO: 315470 - RNA, 32 nt, Homo Sapiens
agaaggcauccacagccuucucagguccggga

SEQ ID NO: 315471 - RNA, 32 nt, Homo Sapiens
cuccuggucuccauccccaucccggcaaggga

SEQ ID NO: 315472 - RNA, 32 nt, Homo Sapiens
guuccuuuuuauuucucugugggcuuuuguuu

SEQ ID NO: 315473 - RNA, 32 nt, Homo Sapiens
cuuuuuuuuucuuuuucuuuuaaaaaaugucu

SEQ ID NO: 315474 - RNA, 32 nt, Homo Sapiens
auuuuguugggucucaacauuggcucacgaau

SEQ ID NO: 315475 - RNA, 32 nt, Homo Sapiens
uugggcuccgaaacucuuaccaaacaucaauu

SEQ ID NO: 315476 - RNA, 32 nt, Homo Sapiens
ugccggcccacccacuguucaggcugagagcg

SEQ ID NO: 315477 - RNA, 32 nt, Homo Sapiens
ugcgucuuucccucuuccgcugccucauuccu

SEQ ID NO: 315478 - RNA, 32 nt, Homo Sapiens
ucuucccaggacuuccauuaccuacuuuuuuu

SEQ ID NO: 315479 - RNA, 32 nt, Homo Sapiens
ccggcccgggagaggggacuugagcgcuucgc

SEQ ID NO: 315480 - RNA, 32 nt, Homo Sapiens
gggggugggggcaggggcaggggcuuuaugug

SEQ ID NO: 315481 - RNA, 32 nt, Homo Sapiens
aaugucucccaaucucuuuccuuucucucuuc

SEQ ID NO: 315482 - RNA, 32 nt, Homo Sapiens
uucugcucacccaaagacccagccuggacuuc

SEQ ID NO: 315483 - RNA, 32 nt, Homo Sapiens
cuuacuccaaaauaaaucaaggcugcaaugca

SEQ ID NO: 315484 - RNA, 32 nt, Homo Sapiens
gucuacccuguaccgaagacagaggcuguggg

SEQ ID NO: 315485 - RNA, 32 nt, Homo Sapiens
augacauugcccgcccucccccuaggcccaga

SEQ ID NO: 315486 - RNA, 32 nt, Homo Sapiens
ucuagcugcccagccgcaccugcgaagagacu

SEQ ID NO: 315487 - RNA, 32 nt, Homo Sapiens
auugggucauucauguccuacccagcuaaaac

SEQ ID NO: 315488 - RNA, 29 nt, Homo Sapiens
uauuugucauaugaaaagagggcugagac

SEQ ID NO: 315489 - RNA, 32 nt, Homo Sapiens
agagaccuaguucuuugcguuugugcaauaac

SEQ ID NO: 315490 - RNA, 32 nt, Homo Sapiens
ugacugugggucuuaaaagguucuggaaagca

SEQ ID NO: 315491 - RNA, 32 nt, Homo Sapiens
caagaggaagcaguggaggaacaggagggugg

SEQ ID NO: 315492 - RNA, 32 nt, Homo Sapiens
caaguuuauguggcacacaauccuauaaaugu

SEQ ID NO: 315493 - RNA, 32 nt, Homo Sapiens
cuguguggggagaggugugugacguuuuucca

SEQ ID NO: 315494 - RNA, 32 nt, Homo Sapiens
gugaaacccagcuccagcucccguuagccagg

SEQ ID NO: 315495 - RNA, 32 nt, Homo Sapiens
ggcagaagcgccccucaccucccggauggggc

SEQ ID NO: 315496 - RNA, 32 nt, Homo Sapiens
uuguuaggagaugucugcuuuuccaugaaaug

SEQ ID NO: 315497 - RNA, 32 nt, Homo Sapiens
ugggcacagagcuggcacuggugcugagccuc

SEQ ID NO: 315498 - RNA, 32 nt, Homo Sapiens
gccucucugcccguggcguuaccgccaccuug

SEQ ID NO: 315499 - RNA, 32 nt, Homo Sapiens
ggacucaugccuuuaauuccaguguuuuggga

SEQ ID NO: 315500 - RNA, 32 nt, Homo Sapiens
gaaggauguaaacgaggauauauaacuguuuc

SEQ ID NO: 315501 - RNA, 32 nt, Homo Sapiens
agguuugugaucuugauguagcaaagcgauuc

SEQ ID NO: 315502 - RNA, 32 nt, Homo Sapiens
ccaaccaagauuucuuuuucuaacuucugcua

SEQ ID NO: 315503 - RNA, 32 nt, Homo Sapiens
uguggugucguggucacaucucccgcuucccc

SEQ ID NO: 315504 - RNA, 32 nt, Homo Sapiens
gcagccgccccgauaugccccggcacugaagu

SEQ ID NO: 315505 - RNA, 32 nt, Homo Sapiens
cacguagcaauugggagcaagaugcauccaug

SEQ ID NO: 315506 - RNA, 32 nt, Homo Sapiens
uccccuccauuauuuagugacucuguaaguaa

SEQ ID NO: 315507 - RNA, 32 nt, Homo Sapiens
ccagcccuggguggaggugggugcaagcagga

SEQ ID NO: 315508 - RNA, 32 nt, Homo Sapiens
aaacugcaaggaucagcauaaaguguuccuuu

SEQ ID NO: 315509 - RNA, 32 nt, Homo Sapiens
ccugcuggggacgguggcccugccuucaugcc

SEQ ID NO: 315510 - RNA, 32 nt, Homo Sapiens
aaguuuggaauuuuaagugucuguggaaaaug

SEQ ID NO: 315511 - RNA, 32 nt, Homo Sapiens
cagucauaacccaaaagcuacgggagaaaaag

SEQ ID NO: 315512 - RNA, 32 nt, Homo Sapiens
uggguuccaggcuggaggaaugcaggcagaaa

SEQ ID NO: 315513 - RNA, 32 nt, Homo Sapiens
ggucccaccuaaagucccuaaccgggaggcau

SEQ ID NO: 315514 - RNA, 32 nt, Homo Sapiens
ccuccagcacgcugaggaugagcugcugucau

SEQ ID NO: 315515 - RNA, 32 nt, Homo Sapiens
cugccuuccuucccaaucucccugccagggcc

SEQ ID NO: 315516 - RNA, 32 nt, Homo Sapiens
accauagugucugacacauagugagugcucca

SEQ ID NO: 315517 - RNA, 32 nt, Homo Sapiens
acuccguggaagcucugcugagaugcagacag

SEQ ID NO: 315518 - RNA, 32 nt, Homo Sapiens
cucugcaagcccaggaugcccgggccacaggc

SEQ ID NO: 315519 - RNA, 32 nt, Homo Sapiens
ccucaccauuaguggcagcaucauguaacuga

SEQ ID NO: 315520 - RNA, 32 nt, Homo Sapiens
aaagggacucuccagcuuuugggagcagacug

SEQ ID NO: 315521 - RNA, 32 nt, Homo Sapiens
uguaucucaaggaacuaaauaagaugacgcua

SEQ ID NO: 315522 - RNA, 32 nt, Homo Sapiens
auacaguaccuugcucuuucugguggcaucau

SEQ ID NO: 315523 - RNA, 32 nt, Homo Sapiens
auuugaacacagacuagauauuugaggauauu

SEQ ID NO: 315524 - RNA, 32 nt, Homo Sapiens
uuuuuuauguuguagaauauuuucauuagcuu

SEQ ID NO: 315525 - RNA, 32 nt, Homo Sapiens
uuccuuauuuaaccucuucuuuugccacucgc

SEQ ID NO: 315526 - RNA, 32 nt, Homo Sapiens
aggccaccaaaggggcugcugucuccugcaua

SEQ ID NO: 315527 - RNA, 32 nt, Homo Sapiens
uggcacucauuucugacagugaucaagaaauc

SEQ ID NO: 315528 - RNA, 32 nt, Homo Sapiens
caaaauuaaaaugugaagguugauaagaacuu

SEQ ID NO: 315529 - RNA, 32 nt, Homo Sapiens
auucagcauccacuaacauuuagguuuuuuau

SEQ ID NO: 315530 - RNA, 32 nt, Homo Sapiens
aguuaguucaacaugaacuaaaauggcaugcu

SEQ ID NO: 315531 - RNA, 32 nt, Homo Sapiens
cacucuaaggauagcguugaaaaaagaaugca

SEQ ID NO: 315532 - RNA, 32 nt, Homo Sapiens
aaaaaacaagauauauagauggaaaaauuaug

SEQ ID NO: 315533 - RNA, 32 nt, Homo Sapiens
gcgggaccugcccaucaguccugggccaggag

SEQ ID NO: 315534 - RNA, 32 nt, Homo Sapiens
aagccagaaucaacagcuccagcccucugcgc

SEQ ID NO: 315535 - RNA, 32 nt, Homo Sapiens
uuauuuuguaagucauggaaaagggcaauuga

SEQ ID NO: 315536 - RNA, 32 nt, Homo Sapiens
uuuaaaauuuaaagaaugugucuucaacuaaa

SEQ ID NO: 315537 - RNA, 32 nt, Homo Sapiens
gcaucgcagguucgagucccgccccgccuggg

SEQ ID NO: 315538 - RNA, 32 nt, Homo Sapiens
gggaagggacccaggccaccucccuuccgcag

SEQ ID NO: 315539 - RNA, 32 nt, Homo Sapiens
agcaaaucuugaugaauuuccacucuuaccau

SEQ ID NO: 315540 - RNA, 32 nt, Homo Sapiens
uucagaauuuuuaaaguaccauuugaaugauc

SEQ ID NO: 315541 - RNA, 32 nt, Homo Sapiens
uggccaaaauuuaaacuguauaauggagcuag

SEQ ID NO: 315542 - RNA, 31 nt, Homo Sapiens
accuccacgcugccugcgccccgcgccgcaa

SEQ ID NO: 315543 - RNA, 32 nt, Homo Sapiens
ucugugguucccucccucauuuuuccuggacg

SEQ ID NO: 315544 - RNA, 32 nt, Homo Sapiens
gaaguagcauauaaaugcucacaguuaaaucu

SEQ ID NO: 315545 - RNA, 32 nt, Homo Sapiens
cugcugacuggagagcugggaauauggcauuu

SEQ ID NO: 315546 - RNA, 32 nt, Homo Sapiens
caucugccucagccugaaagugcuaggauuac

SEQ ID NO: 315547 - RNA, 32 nt, Homo Sapiens
gccccagccaaggagcugagcgaggcugucug

SEQ ID NO: 315548 - RNA, 32 nt, Homo Sapiens
cucucuagacugccccuccuccaucgccuucc

SEQ ID NO: 315549 - RNA, 32 nt, Homo Sapiens
agucaagaaacacuggaugccagcuagauuau

SEQ ID NO: 315550 - RNA, 32 nt, Homo Sapiens
ccacacugcccggcugacccgguggucucgga

SEQ ID NO: 315551 - RNA, 32 nt, Homo Sapiens
aaacuggggaccagcccccuucucccacaaau

SEQ ID NO: 315552 - RNA, 32 nt, Homo Sapiens
gcccggcagaaagcaaauauuucagaugaugg

SEQ ID NO: 315553 - RNA, 32 nt, Homo Sapiens
cugcagccaucugugaggcccgcggggauggg

SEQ ID NO: 315554 - RNA, 32 nt, Homo Sapiens
ugccguagcugaggaagaagggaggcuucaca

SEQ ID NO: 315555 - RNA, 32 nt, Homo Sapiens
gagucaaccccuucuuuuuuuuuuuuuuuuuu

SEQ ID NO: 315556 - RNA, 27 nt, Homo Sapiens
ggccucuccagccucagcccccugcuu

SEQ ID NO: 315557 - RNA, 32 nt, Homo Sapiens
cgccucccgcggcugccagcgugcacugggcg

SEQ ID NO: 315558 - RNA, 32 nt, Homo Sapiens
agaauauaaagaaagggagauguuggaaacuu

SEQ ID NO: 315559 - RNA, 32 nt, Homo Sapiens
aaguuugugcaaauacagucgguguuucucuc

SEQ ID NO: 315560 - RNA, 32 nt, Homo Sapiens
uccuucuuccuucugaccuccucccaggcacu

SEQ ID NO: 315561 - RNA, 32 nt, Homo Sapiens
aaaaccagaaacaaaaucgcagacugccgugg

SEQ ID NO: 315562 - RNA, 32 nt, Homo Sapiens
caccaccugcuggcagaagccguagcacauga

SEQ ID NO: 315563 - RNA, 32 nt, Homo Sapiens
ugcagccuccggccggccggcgagccagugcg

SEQ ID NO: 315564 - RNA, 32 nt, Homo Sapiens
aaucaagagagacugugauaugugcuaagaag

SEQ ID NO: 315565 - RNA, 32 nt, Homo Sapiens
uccaccagcagcauggcauagccccggccccc

SEQ ID NO: 315566 - RNA, 32 nt, Homo Sapiens
gguuucaacauucgcuugcaauuaccaauaau

SEQ ID NO: 315567 - RNA, 32 nt, Homo Sapiens
uggcugcccgucugguaacuagcagccgggau

SEQ ID NO: 315568 - RNA, 32 nt, Homo Sapiens
cacaugcagacacaccaggccggccccucuuu

SEQ ID NO: 315569 - RNA, 32 nt, Homo Sapiens
uucuuacaugccccgucuccaucuacaggaaa

SEQ ID NO: 315570 - RNA, 32 nt, Homo Sapiens
gcucuggggucuuuuuaugcauuugcauuugc

SEQ ID NO: 315571 - RNA, 32 nt, Homo Sapiens
uggcguugucaauauuucuuccguuaaccauu

SEQ ID NO: 315572 - RNA, 32 nt, Homo Sapiens
gcuaauauuuuuguuucuugcaaaaggaccac

SEQ ID NO: 315573 - RNA, 32 nt, Homo Sapiens
aggugggggugacacugggaggugggagggcc

SEQ ID NO: 315574 - RNA, 32 nt, Homo Sapiens
cagucuccggugcccaagcccggccccauggc

SEQ ID NO: 315575 - RNA, 32 nt, Homo Sapiens
uacaggcacacgggcacccagccccucucaga

SEQ ID NO: 315576 - RNA, 32 nt, Homo Sapiens
ggauucguggucaggcaugggcugggaaccca

SEQ ID NO: 315577 - RNA, 32 nt, Homo Sapiens
uggaugucuccugacccuuccaccccgccuca

SEQ ID NO: 315578 - RNA, 32 nt, Homo Sapiens
uccgugugaacaugaagacaaugcugccucug

SEQ ID NO: 315579 - RNA, 32 nt, Homo Sapiens
ggccucucccuucuccauggacuuccaagaga

SEQ ID NO: 315580 - RNA, 32 nt, Homo Sapiens
uagaaugagaaccuuuuuuggacuagcuuuuu

SEQ ID NO: 315581 - RNA, 32 nt, Homo Sapiens
cccaaguggaguggaaauacauauggucaacu

SEQ ID NO: 315582 - RNA, 32 nt, Homo Sapiens
gcgggccaggcacugcccuuuucaggaagcuc

SEQ ID NO: 315583 - RNA, 32 nt, Homo Sapiens
uggcacauuucuuuuucuuuuucuuucuuuuu

SEQ ID NO: 315584 - RNA, 32 nt, Homo Sapiens
ucaccuguuugccgcuuucugcauaguaaugu

SEQ ID NO: 315585 - RNA, 32 nt, Homo Sapiens
agggcagggauuuuugucuguuguguucucug

SEQ ID NO: 315586 - RNA, 32 nt, Homo Sapiens
cuguccagggcugcuuccuguccuggaggggc

SEQ ID NO: 315587 - RNA, 32 nt, Homo Sapiens
cuuaauauccagugacuucaucuccccuuucu

SEQ ID NO: 315588 - RNA, 29 nt, Homo Sapiens
caagauggagccaggaggagagcccacag

SEQ ID NO: 315589 - RNA, 32 nt, Homo Sapiens
uuuucacuugucacgccagaagcacacuugag

SEQ ID NO: 315590 - RNA, 32 nt, Homo Sapiens
aucaccacugccaacaacuccucccccagaga

SEQ ID NO: 315591 - RNA, 32 nt, Homo Sapiens
uaagaugcuguaacuagcauuuuuugaaugcc

SEQ ID NO: 315592 - RNA, 32 nt, Homo Sapiens
gcccuggcggccucgcuguuaccagaagacgu

SEQ ID NO: 315593 - RNA, 32 nt, Homo Sapiens
aucaagcuggcauggggcuuuuauugacagug

SEQ ID NO: 315594 - RNA, 32 nt, Homo Sapiens
uucagcagggcagaacccuucuccagaugugu

SEQ ID NO: 315595 - RNA, 32 nt, Homo Sapiens
uuuuuuacagaaaaguacuugcaggagcaucc

SEQ ID NO: 315596 - RNA, 32 nt, Homo Sapiens
aagaggcucccuccugucucuaagucaauucc

SEQ ID NO: 315597 - RNA, 32 nt, Homo Sapiens
uuagacaaggagagucaagaaacuacuuguca

SEQ ID NO: 315598 - RNA, 32 nt, Homo Sapiens
uuaguaguauauaaaagguaagaguacugaaa

SEQ ID NO: 315599 - RNA, 32 nt, Homo Sapiens
agcuuguucaacaguugaaucauuguaauuua

SEQ ID NO: 315600 - RNA, 32 nt, Homo Sapiens
caggcacaguggcucacgccuauaaucccagc

SEQ ID NO: 315601 - RNA, 32 nt, Homo Sapiens
gaacagaaagcaggaugcaggaugggaggaca

SEQ ID NO: 315602 - RNA, 32 nt, Homo Sapiens
uaauacugccagcuuguguugccugaaccaag

SEQ ID NO: 315603 - RNA, 32 nt, Homo Sapiens
uaucccugggcccaaccuccccgccgacccgc

SEQ ID NO: 315604 - RNA, 32 nt, Homo Sapiens
uaauauuuaaagauuauagcucccaaaagaau

SEQ ID NO: 315605 - RNA, 32 nt, Homo Sapiens
cugcacuugugagagaaaauacuauuucaagu

SEQ ID NO: 315606 - RNA, 32 nt, Homo Sapiens
ucugacacagcuuucaugagguuacagaaaag

SEQ ID NO: 315607 - RNA, 32 nt, Homo Sapiens
uaugauaaauguuucacuugaaucuuauugua

SEQ ID NO: 315608 - RNA, 32 nt, Homo Sapiens
gagaucuucacguaucauucugcuaaaccaga

SEQ ID NO: 315609 - RNA, 32 nt, Homo Sapiens
cauaaacugcggugucccaauccuggcuuuuc

SEQ ID NO: 315610 - RNA, 30 nt, Homo Sapiens
cggacagauccucggcgcggcagggccggg

SEQ ID NO: 315611 - RNA, 32 nt, Homo Sapiens
gagugccaucuuaaaacuuauacuggagauug

SEQ ID NO: 315612 - RNA, 32 nt, Homo Sapiens
agcuucauuaugauacguaauuuuauaaggua

SEQ ID NO: 315613 - RNA, 32 nt, Homo Sapiens
cauuuuuaauuucaagauauugguacauuuua

SEQ ID NO: 315614 - RNA, 32 nt, Homo Sapiens
uuaaacuguugcaauuaaaggcauguuuauac

SEQ ID NO: 315615 - RNA, 32 nt, Homo Sapiens
uguuauguuuauguaacauaguccagagaacu

SEQ ID NO: 315616 - RNA, 32 nt, Homo Sapiens
guaugcugugugguacaggaucuuacaguuuc

SEQ ID NO: 315617 - RNA, 32 nt, Homo Sapiens
uggcauuuuaaaaauaaugugaaugguguauc

SEQ ID NO: 315618 - RNA, 32 nt, Homo Sapiens
gguccuguaucuacagacacguggugagaaau

SEQ ID NO: 315619 - RNA, 32 nt, Homo Sapiens
acuacacacacacacacacacacacacacaca

SEQ ID NO: 315620 - RNA, 32 nt, Homo Sapiens
gagacugucggcgggggcgcgggaagggacuu

SEQ ID NO: 315621 - RNA, 32 nt, Homo Sapiens
uuauaaaauauuuuaaguguacucaaaauauc

SEQ ID NO: 315622 - RNA, 32 nt, Homo Sapiens
uccuagcagggccugaggcccuccucuucucg

SEQ ID NO: 315623 - RNA, 32 nt, Homo Sapiens
cccacguacuaaaagaccgguuuuugaaggca

SEQ ID NO: 315624 - RNA, 32 nt, Homo Sapiens
cccucuguccccaggccuggcuccccgagggc

SEQ ID NO: 315625 - RNA, 32 nt, Homo Sapiens
aguacaauguguuuuucuccagugcuguccau

SEQ ID NO: 315626 - RNA, 32 nt, Homo Sapiens
ggcugagaaaugauucauuugaagauacaauu

SEQ ID NO: 315627 - RNA, 32 nt, Homo Sapiens
gaggggcaggccaggaggagcuugggcgcagg

SEQ ID NO: 315628 - RNA, 32 nt, Homo Sapiens
uuuagauccagaaggagaguuuuaaucauugu

SEQ ID NO: 315629 - RNA, 32 nt, Homo Sapiens
ugucauuuucuuuucuuuugggugguggggcu

SEQ ID NO: 315630 - RNA, 31 nt, Homo Sapiens
augacgagggguggugcuggaguccagguga

SEQ ID NO: 315631 - RNA, 32 nt, Homo Sapiens
gguuucaccauguuggacaggcuggucucgaa

SEQ ID NO: 315632 - RNA, 32 nt, Homo Sapiens
gccucgcugcccggcgaggcgcucgccgaccu

SEQ ID NO: 315633 - RNA, 32 nt, Homo Sapiens
aauauaacaggaacugaugaccaaguacagca

SEQ ID NO: 315634 - RNA, 32 nt, Homo Sapiens
uaagaagaauuugaacauucaggccuugcugg

SEQ ID NO: 315635 - RNA, 32 nt, Homo Sapiens
uccagccuccccuccccuggggacgccaagga

SEQ ID NO: 315636 - RNA, 32 nt, Homo Sapiens
ccgcacuguauuuaacuuaaucaaauguggua

SEQ ID NO: 315637 - RNA, 32 nt, Homo Sapiens
uggcucacaccuguaaucccaacacuuugagc

SEQ ID NO: 315638 - RNA, 32 nt, Homo Sapiens
gccaaggcuccggcccgagagggucuuuaagu

SEQ ID NO: 315639 - RNA, 32 nt, Homo Sapiens
aaugcugcugucuuggagccugggcacguuug

SEQ ID NO: 315640 - RNA, 32 nt, Homo Sapiens
uuucagcugcaaugccgggauuuuaaauagca

SEQ ID NO: 315641 - RNA, 32 nt, Homo Sapiens
guaaauaaacagaacagcuuucaccaaagugg

SEQ ID NO: 315642 - RNA, 32 nt, Homo Sapiens
ggggagcgcgcccgucucauccucauccuugu

SEQ ID NO: 315643 - RNA, 32 nt, Homo Sapiens
uucuguauaaggcaaucagaauaaucaucuuc

SEQ ID NO: 315644 - RNA, 32 nt, Homo Sapiens
uuugaugugacaucuucauauucaucaaugcu

SEQ ID NO: 315645 - RNA, 32 nt, Homo Sapiens
gccgcgggugccuccccgccucaccgcuucgc

SEQ ID NO: 315646 - RNA, 32 nt, Homo Sapiens
guggcuuuuguaaauuaauuuuugaugacauu

SEQ ID NO: 315647 - RNA, 32 nt, Homo Sapiens
aaauagugcuccaccaugaggcacauuaucca

SEQ ID NO: 315648 - RNA, 32 nt, Homo Sapiens
ccugagugggucugaaaaagcuuugagagaga

SEQ ID NO: 315649 - RNA, 32 nt, Homo Sapiens
ugaaagaacuaaugguuuuguuuuuuggaaua

SEQ ID NO: 315650 - RNA, 32 nt, Homo Sapiens
cucccaggccgcggcgccucgcgcuuuccccc

SEQ ID NO: 315651 - RNA, 32 nt, Homo Sapiens
guggucacaaaacauuuugacaugagaaaggc

SEQ ID NO: 315652 - RNA, 32 nt, Homo Sapiens
aaaugcaaacaggcuguucaccaccaucucca

SEQ ID NO: 315653 - RNA, 32 nt, Homo Sapiens
uagacuuuauaaacagugggagcccaugaaca

SEQ ID NO: 315654 - RNA, 32 nt, Homo Sapiens
uuuguuuaauaaaaugaaggcaaaacuauuuu

SEQ ID NO: 315655 - RNA, 32 nt, Homo Sapiens
cccguuguguguggugggggucgggguugggg

SEQ ID NO: 315656 - RNA, 32 nt, Homo Sapiens
aaucugagaaaguuaacuccaggauagguagg

SEQ ID NO: 315657 - RNA, 32 nt, Homo Sapiens
gcacugccaaaccaauaaauuuacagaagaga

SEQ ID NO: 315658 - RNA, 32 nt, Homo Sapiens
caccauuucagaagcugccucaggacuaagcu

SEQ ID NO: 315659 - RNA, 32 nt, Homo Sapiens
cagcuaauuuuuguauuuuuaguggggauggg

SEQ ID NO: 315660 - RNA, 32 nt, Homo Sapiens
cggcuaauuuuuguauuuuuaguggagauggg

SEQ ID NO: 315661 - RNA, 32 nt, Homo Sapiens
uauaaagguaaaacuugucuccaaccaguuuc

SEQ ID NO: 315662 - RNA, 32 nt, Homo Sapiens
ggagcccuagggugggggcugggcuugaccag

SEQ ID NO: 315663 - RNA, 32 nt, Homo Sapiens
cugucuuuauucugcccccaucccaacccagc

SEQ ID NO: 315664 - RNA, 32 nt, Homo Sapiens
gugauuucugcauuuccaacugagguacccgg

SEQ ID NO: 315665 - RNA, 32 nt, Homo Sapiens
augccaaguggacuuggagcugcacaaaguca

SEQ ID NO: 315666 - RNA, 32 nt, Homo Sapiens
aaaugauuugcuaugauuuuuaugaagaauaa

SEQ ID NO: 315667 - RNA, 32 nt, Homo Sapiens
ucguguuugugcuuuucuccaagucagcaccc

SEQ ID NO: 315668 - RNA, 32 nt, Homo Sapiens
ucauagcagauguggugauacgcacugcuccu

SEQ ID NO: 315669 - RNA, 32 nt, Homo Sapiens
gaggucuuguguccaaaacugcucuugcaucu

SEQ ID NO: 315670 - RNA, 32 nt, Homo Sapiens
acgaggucaggagaucgagaccacccuggcua

SEQ ID NO: 315671 - RNA, 32 nt, Homo Sapiens
gucugggugccacggggccagcauuuuggagg

SEQ ID NO: 315672 - RNA, 32 nt, Homo Sapiens
uugaaggagaggagggcggggaaguuugcguc

SEQ ID NO: 315673 - RNA, 32 nt, Homo Sapiens
acgaggucaggagauugagaccauccuggcua

SEQ ID NO: 315674 - RNA, 32 nt, Homo Sapiens
uuccugguguucuggcaucaccuugugccggu

SEQ ID NO: 315675 - RNA, 32 nt, Homo Sapiens
gugggcugugccucgggcuuggcuccaccuca

SEQ ID NO: 315676 - RNA, 32 nt, Homo Sapiens
cuccuccuccucgccccggcgccggcggugau

SEQ ID NO: 315677 - RNA, 32 nt, Homo Sapiens
agaggccccgccucuggugggcuuggccucca

SEQ ID NO: 315678 - RNA, 32 nt, Homo Sapiens
uccgacagcuccccaucugugcuccugccugc

SEQ ID NO: 315679 - RNA, 32 nt, Homo Sapiens
cauguuuuggugcacaaaauccuucugugggc

SEQ ID NO: 315680 - RNA, 32 nt, Homo Sapiens
acagccagaaggggcugcuugcuuuugccucu

SEQ ID NO: 315681 - RNA, 32 nt, Homo Sapiens
cacacuguaccugaggucuugccgggcccaua

SEQ ID NO: 315682 - RNA, 32 nt, Homo Sapiens
augaacugacuucaacugggauacauuuggaa

SEQ ID NO: 315683 - RNA, 32 nt, Homo Sapiens
ggagagcagacacagccccauggcccucccuc

SEQ ID NO: 315684 - RNA, 32 nt, Homo Sapiens
augcuguaaacaaaacaaaacaaaauaaaaca

SEQ ID NO: 315685 - RNA, 32 nt, Homo Sapiens
gcggcguccagggcuauggcugugacucugga

SEQ ID NO: 315686 - RNA, 28 nt, Homo Sapiens
caguaggggcggcugggcagaggcgccc

SEQ ID NO: 315687 - RNA, 32 nt, Homo Sapiens
gcggccgggaccagaggcgcgcgcccucagug

SEQ ID NO: 315688 - RNA, 32 nt, Homo Sapiens
cuccuuauuccuccuaccucccgccccgccca

SEQ ID NO: 315689 - RNA, 32 nt, Homo Sapiens
ugauuugaauguuuaaauauaugagacacucu

SEQ ID NO: 315690 - RNA, 32 nt, Homo Sapiens
caucaaaaucauaauaauauuuucagaacaag

SEQ ID NO: 315691 - RNA, 32 nt, Homo Sapiens
cugggcagcgcgggcucgaugugugucagcca

SEQ ID NO: 315692 - RNA, 31 nt, Homo Sapiens
uccuauccaggcaccaccugagaaaguuguc

SEQ ID NO: 315693 - RNA, 32 nt, Homo Sapiens
ucucgcugcccccggggcucagcauucacauu

SEQ ID NO: 315694 - RNA, 32 nt, Homo Sapiens
gggcaagagggccgugcccaccccuuccugga

SEQ ID NO: 315695 - RNA, 32 nt, Homo Sapiens
uggacuuguguuuuuucuuuuuaaagaggcaa

SEQ ID NO: 315696 - RNA, 32 nt, Homo Sapiens
aggaaagaaaaagaaguaccuaguaucagcau

SEQ ID NO: 315697 - RNA, 32 nt, Homo Sapiens
uuucuugauguauuucccauggcugcuucauu

SEQ ID NO: 315698 - RNA, 32 nt, Homo Sapiens
gcaaaagaggaugcaaggcuauauuaacccag

SEQ ID NO: 315699 - RNA, 32 nt, Homo Sapiens
ucgcggccggacaccgggcccuggacaugcug

SEQ ID NO: 315700 - RNA, 32 nt, Homo Sapiens
gcuugccccagauggggaccaaaagcugcuuc

SEQ ID NO: 315701 - RNA, 32 nt, Homo Sapiens
gucuugucacuaacccaagcuaauuccacccu

SEQ ID NO: 315702 - RNA, 32 nt, Homo Sapiens
cauauaggcacaaauaacugcagacauucuga

SEQ ID NO: 315703 - RNA, 32 nt, Homo Sapiens
ugccguccagcaugauuaaagaaugcugucuc

SEQ ID NO: 315704 - RNA, 32 nt, Homo Sapiens
gggugaaacuggggcuggagggaaggaggagc

SEQ ID NO: 315705 - RNA, 32 nt, Homo Sapiens
ggccacaggggcagaggcuucuccggcaggcu

SEQ ID NO: 315706 - RNA, 32 nt, Homo Sapiens
aacaauuagccauaguucugaaugcacuucaa

SEQ ID NO: 315707 - RNA, 32 nt, Homo Sapiens
ccaacuacugaauccaggaguaccaaauaaua

SEQ ID NO: 315708 - RNA, 32 nt, Homo Sapiens
cgggcggggccgguggaucuggagccgugugu

SEQ ID NO: 315709 - RNA, 29 nt, Homo Sapiens
cucuucauagugaugucauuagaaaggac

SEQ ID NO: 315710 - RNA, 32 nt, Homo Sapiens
aguucucuuucaacuccaguacucuguaaguu

SEQ ID NO: 315711 - RNA, 32 nt, Homo Sapiens
cucauagcucgucaucucggcccuuguccaca

SEQ ID NO: 315712 - RNA, 32 nt, Homo Sapiens
cgaggcugugcgcgcccucccggacccuccac

SEQ ID NO: 315713 - RNA, 32 nt, Homo Sapiens
acaccuggucuuuucuagaaaucccugcuugg

SEQ ID NO: 315714 - RNA, 32 nt, Homo Sapiens
cuuacuuaucuaaagcaauaagucaaaggagu

SEQ ID NO: 315715 - RNA, 32 nt, Homo Sapiens
gagugguuggucugaaguccuugcaagacgcu

SEQ ID NO: 315716 - RNA, 32 nt, Homo Sapiens
agugauacuggcucagaagaauuuaaguucua

SEQ ID NO: 315717 - RNA, 32 nt, Homo Sapiens
aggccuggggacggcuuuuacuuaaaccgcca

SEQ ID NO: 315718 - RNA, 32 nt, Homo Sapiens
uccugaaccgcucuggucugcuccucagagag

SEQ ID NO: 315719 - RNA, 32 nt, Homo Sapiens
uagcauuuuuaaaaaauaagauuaauggaaga

SEQ ID NO: 315720 - RNA, 32 nt, Homo Sapiens
acuaauugaagaaaaauguaaacuacuugaaa

SEQ ID NO: 315721 - RNA, 32 nt, Homo Sapiens
gaaccuguucccucuccccacaucccccgccc

SEQ ID NO: 315722 - RNA, 32 nt, Homo Sapiens
uucuccgccugcugcuucggcgcggcuguauc

SEQ ID NO: 315723 - RNA, 32 nt, Homo Sapiens
gaaguucaagggaccgugaaagcccucagagu

SEQ ID NO: 315724 - RNA, 32 nt, Homo Sapiens
ugcguguggaugcaguuauacacauuaaagca

SEQ ID NO: 315725 - RNA, 32 nt, Homo Sapiens
caaguuguccucucuccugcugauggaaaugg

SEQ ID NO: 315726 - RNA, 32 nt, Homo Sapiens
cccaccgggcugcaggugcugcugaugcgcug

SEQ ID NO: 315727 - RNA, 32 nt, Homo Sapiens
ccacuucucaacuggcagaacuucugaaguuu

SEQ ID NO: 315728 - RNA, 32 nt, Homo Sapiens
uaagucaaacuacacugaaacuuuuauccuuu

SEQ ID NO: 315729 - RNA, 32 nt, Homo Sapiens
ucuccugaagccauuggccgcuccuccaccca

SEQ ID NO: 315730 - RNA, 32 nt, Homo Sapiens
cuguccuucguguguggaaacacaccucuccu

SEQ ID NO: 315731 - RNA, 29 nt, Homo Sapiens
ccuggggagaagguggccucguugcccgg

SEQ ID NO: 315732 - RNA, 32 nt, Homo Sapiens
caaguuucuagcuaccccacugagagaaccau

SEQ ID NO: 315733 - RNA, 31 nt, Homo Sapiens
ggagcgcagcgcagcgcagccgcgggcgcuc

SEQ ID NO: 315734 - RNA, 30 nt, Homo Sapiens
agaggaggcaggcugcuguccugaaagugg

SEQ ID NO: 315735 - RNA, 32 nt, Homo Sapiens
uuugccacguacacucgagccaucgcgagugu

SEQ ID NO: 315736 - RNA, 29 nt, Homo Sapiens
agacauggagcccaaaccugcaaccaaga

SEQ ID NO: 315737 - RNA, 32 nt, Homo Sapiens
ggugcugccuuguagauggagcaagugagcac

SEQ ID NO: 315738 - RNA, 32 nt, Homo Sapiens
agagaaacagaaaauauauagagauauaaaau

SEQ ID NO: 315739 - RNA, 32 nt, Homo Sapiens
gaagcauuccccaccccaccuugccucugucc

SEQ ID NO: 315740 - RNA, 32 nt, Homo Sapiens
aagggucuugguuuccucuccuacucccuucc

SEQ ID NO: 315741 - RNA, 32 nt, Homo Sapiens
cugggccuggggaggaggcagcccugggcccg

SEQ ID NO: 315742 - RNA, 32 nt, Homo Sapiens
cuaaguguuuaaaauuaugcucuguaacucug

SEQ ID NO: 315743 - RNA, 32 nt, Homo Sapiens
uuaugaauauacuauuaguugggcauuaaaaa

SEQ ID NO: 315744 - RNA, 32 nt, Homo Sapiens
uucugaagagaacuuuuugcuccucugucuca

SEQ ID NO: 315745 - RNA, 32 nt, Homo Sapiens
ggcaugcugacugucugauggagacuuacuuu

SEQ ID NO: 315746 - RNA, 32 nt, Homo Sapiens
uuuucauguuuuauuuuaaauuuuaacaauaa

SEQ ID NO: 315747 - RNA, 32 nt, Homo Sapiens
acguuaguuacugaaaaacaacagacaaucgc

SEQ ID NO: 315748 - RNA, 32 nt, Homo Sapiens
ugccagccaaccccagguggccucucgggggu

SEQ ID NO: 315749 - RNA, 32 nt, Homo Sapiens
gacagucuugugacauccauggagggccuuau

SEQ ID NO: 315750 - RNA, 32 nt, Homo Sapiens
cuuuuuuggggauaugcuuaguaaugcuacgu

SEQ ID NO: 315751 - RNA, 32 nt, Homo Sapiens
gcuggaggaccgagaggggucucaggcuggcg

SEQ ID NO: 315752 - RNA, 32 nt, Homo Sapiens
aauaaaaaggguuuuaaaugcuaugcagucau

SEQ ID NO: 315753 - RNA, 32 nt, Homo Sapiens
agcaaaagcucuuuucuguccugucagucucc

SEQ ID NO: 315754 - RNA, 32 nt, Homo Sapiens
cauggcauaacacuaaggcgcagacuccuaag

SEQ ID NO: 315755 - RNA, 32 nt, Homo Sapiens
uguuuacuacuaguaaaaagcagcauugccaa

SEQ ID NO: 315756 - RNA, 32 nt, Homo Sapiens
agaaacuccauaaguaucaucucugugggaaa

SEQ ID NO: 315757 - RNA, 32 nt, Homo Sapiens
caugugugguagguguccuguauuuuguuugg

SEQ ID NO: 315758 - RNA, 32 nt, Homo Sapiens
gaacucaggagguggagguugcggugagccaa

SEQ ID NO: 315759 - RNA, 32 nt, Homo Sapiens
gcccccgcccagcucaucagucugaauggagu

SEQ ID NO: 315760 - RNA, 32 nt, Homo Sapiens
accaaaguuggaaaagaagaauuguagugguc

SEQ ID NO: 315761 - RNA, 32 nt, Homo Sapiens
uugaggucaugaauuugagaccagccuggcca

SEQ ID NO: 315762 - RNA, 32 nt, Homo Sapiens
cacauugaagagugggccagguccugucuggg

SEQ ID NO: 315763 - RNA, 32 nt, Homo Sapiens
ggaagguaacgcgccgcgcccggggcugcgcg

SEQ ID NO: 315764 - RNA, 32 nt, Homo Sapiens
gcaugaaggacagugauguggggaggccgugg

SEQ ID NO: 315765 - RNA, 32 nt, Homo Sapiens
gcagaauaaggguaacugcauguaacaaucau

SEQ ID NO: 315766 - RNA, 32 nt, Homo Sapiens
cccgcaggccccaaggcaucacuccggccacc

SEQ ID NO: 315767 - RNA, 32 nt, Homo Sapiens
guucuguuuuucuaaauaaccuguggacaagg

SEQ ID NO: 315768 - RNA, 32 nt, Homo Sapiens
gcucagggccgcgcccccugggcuggcgucgu

SEQ ID NO: 315769 - RNA, 32 nt, Homo Sapiens
uguuuuuguaaaauuuucaaaugucagucaag

SEQ ID NO: 315770 - RNA, 32 nt, Homo Sapiens
acccccgccccuccccaugcccaggguggccg

SEQ ID NO: 315771 - RNA, 32 nt, Homo Sapiens
ccguuuugucauucccucagacuuugaauaca

SEQ ID NO: 315772 - RNA, 32 nt, Homo Sapiens
caguuagaucauaauucuuaugaaauagagag

SEQ ID NO: 315773 - RNA, 32 nt, Homo Sapiens
ccaguacccauccuguagaaacauuauacugu

SEQ ID NO: 315774 - RNA, 32 nt, Homo Sapiens
ccuucuuguugcuccugucaugugucaccauc

SEQ ID NO: 315775 - RNA, 32 nt, Homo Sapiens
gccugauagccagugaggagccaggcacacaa

SEQ ID NO: 315776 - RNA, 32 nt, Homo Sapiens
uuagagggguucccggccgccgcucgccccgu

SEQ ID NO: 315777 - RNA, 32 nt, Homo Sapiens
ucaccauuuuauuugaaccucuaaucagaguc

SEQ ID NO: 315778 - RNA, 32 nt, Homo Sapiens
gacacgaccuuggaggacuugcaggucauggu

SEQ ID NO: 315779 - RNA, 32 nt, Homo Sapiens
ggcaccugccccccugcuccccacacaucaua

SEQ ID NO: 315780 - RNA, 32 nt, Homo Sapiens
ucugagccugccuccuucuugcuucucagcag

SEQ ID NO: 315781 - RNA, 32 nt, Homo Sapiens
cgcauucggguccccuccccccgggaggcuug

SEQ ID NO: 315782 - RNA, 32 nt, Homo Sapiens
aauaaagaagcaaaucucuuuaccgggaccuu

SEQ ID NO: 315783 - RNA, 32 nt, Homo Sapiens
uuacagagagggguccaaauggugaaugcuca

SEQ ID NO: 315784 - RNA, 32 nt, Homo Sapiens
caauaaauuuuauauccaaugucuaguauaaa

SEQ ID NO: 315785 - RNA, 32 nt, Homo Sapiens
gcuccgagguggugggggcgccgcacgcucca

SEQ ID NO: 315786 - RNA, 32 nt, Homo Sapiens
uggucugacaccugggcuggagugcaguggug

SEQ ID NO: 315787 - RNA, 32 nt, Homo Sapiens
uaaccacucaagcuacuggcacauaugaaaga

SEQ ID NO: 315788 - RNA, 32 nt, Homo Sapiens
gggagaauauauauuuaggaucuuggauaugu

SEQ ID NO: 315789 - RNA, 32 nt, Homo Sapiens
acaguuaaguuuuggggaguaaaaacuguuuc

SEQ ID NO: 315790 - RNA, 32 nt, Homo Sapiens
acgaccuugaagaucggcgggcgcagcggggc

SEQ ID NO: 315791 - RNA, 32 nt, Homo Sapiens
augggacugcugagaagaaggugugcagaaag

SEQ ID NO: 315792 - RNA, 32 nt, Homo Sapiens
gggagaugaaaggagguccucuuaccauaccc

SEQ ID NO: 315793 - RNA, 32 nt, Homo Sapiens
uuccaccccaauaccuggucuuccuucccggc

SEQ ID NO: 315794 - RNA, 32 nt, Homo Sapiens
ccuaacuacaucuauuucuauaauuuuuaagg

SEQ ID NO: 315795 - RNA, 32 nt, Homo Sapiens
augaggacaaagugggccacguuagcaucugc

SEQ ID NO: 315796 - RNA, 32 nt, Homo Sapiens
acuucagcagcagcuuuuuuuguuguauuuug

SEQ ID NO: 315797 - RNA, 32 nt, Homo Sapiens
aauuauaugacuauauuaagguuguguuuaua

SEQ ID NO: 315798 - RNA, 32 nt, Homo Sapiens
cgcucaggcgacccucagcccggcggggaggc

SEQ ID NO: 315799 - RNA, 32 nt, Homo Sapiens
aagcauuguacuggcaggcagacgugggcacu

SEQ ID NO: 315800 - RNA, 32 nt, Homo Sapiens
ugaacagaugaccccugcccagaucagccaga

SEQ ID NO: 315801 - RNA, 32 nt, Homo Sapiens
cccacucccucugccgcacgccgcccgucuau

SEQ ID NO: 315802 - RNA, 32 nt, Homo Sapiens
ggccgccucgguacggcagagcccggggccgg

SEQ ID NO: 315803 - RNA, 32 nt, Homo Sapiens
uuauccgcgccgggcgcccgccagacccgcug

SEQ ID NO: 315804 - RNA, 32 nt, Homo Sapiens
ugcccgucuugucccucugccccucccaccug

SEQ ID NO: 315805 - RNA, 32 nt, Homo Sapiens
aaaagggguuaccaugcagcuuuuaaauauga

SEQ ID NO: 315806 - RNA, 32 nt, Homo Sapiens
gggguccuuugugaaagagcaagauggagcaa

SEQ ID NO: 315807 - RNA, 30 nt, Homo Sapiens
gugaggcuucuaauggggggugcaugacuu

SEQ ID NO: 315808 - RNA, 32 nt, Homo Sapiens
ccuaucauuuuuguuuugucucagggugcaac

SEQ ID NO: 315809 - RNA, 32 nt, Homo Sapiens
cuuuggcagagggacuuccucagcauggcugu

SEQ ID NO: 315810 - RNA, 32 nt, Homo Sapiens
aauuuguucuaccuagcauuuuaacuaguuuu

SEQ ID NO: 315811 - RNA, 32 nt, Homo Sapiens
cgggcagaucacaaggucaguagaucgagacc

SEQ ID NO: 315812 - RNA, 32 nt, Homo Sapiens
cugaggacccgggccucaaaucagggaggaua

SEQ ID NO: 315813 - RNA, 32 nt, Homo Sapiens
acugaggccacugcacccuuucucggggaaga

SEQ ID NO: 315814 - RNA, 32 nt, Homo Sapiens
ugucagcuccuacauagcauuagucuuucacg

SEQ ID NO: 315815 - RNA, 30 nt, Homo Sapiens
gucugagguccgcggcagggucccgcaugg

SEQ ID NO: 315816 - RNA, 32 nt, Homo Sapiens
aaagaccugggauucauagaaagggaauguuc

SEQ ID NO: 315817 - RNA, 32 nt, Homo Sapiens
aguuugccugaaggauuagguuggggaugggu

SEQ ID NO: 315818 - RNA, 32 nt, Homo Sapiens
uuucuuccaaaauaaaaguaacaagcugacug

SEQ ID NO: 315819 - RNA, 32 nt, Homo Sapiens
cacaugcgugggguagacaugcuugggauaga

SEQ ID NO: 315820 - RNA, 32 nt, Homo Sapiens
caccccgcuccagccgcccccagagccugucc

SEQ ID NO: 315821 - RNA, 32 nt, Homo Sapiens
ucucgauuucuugucuguaaaauagagauagu

SEQ ID NO: 315822 - RNA, 32 nt, Homo Sapiens
gcacgcagcgcgcgcccuuggaugccgucccg

SEQ ID NO: 315823 - RNA, 32 nt, Homo Sapiens
aguucagauuccuuucacugguaaauaacuuc

SEQ ID NO: 315824 - RNA, 32 nt, Homo Sapiens
ccugcgguccgcggcccggggaaucugaagcg

SEQ ID NO: 315825 - RNA, 25 nt, Homo Sapiens
augcaaugggacaauuuuacucuua

SEQ ID NO: 315826 - RNA, 32 nt, Homo Sapiens
augguucucuucuguuguccaaggcuguaaaa

SEQ ID NO: 315827 - RNA, 32 nt, Homo Sapiens
aucccaucauuuggaaaaauaaaggcaucuga

SEQ ID NO: 315828 - RNA, 32 nt, Homo Sapiens
uaacuuauauuguaagaaauacuguacaauga

SEQ ID NO: 315829 - RNA, 32 nt, Homo Sapiens
uaacaaagaacaaaagauguagaauaauagac

SEQ ID NO: 315830 - RNA, 30 nt, Homo Sapiens
ugcagugaagcaucaggugagucugauaug

SEQ ID NO: 315831 - RNA, 28 nt, Homo Sapiens
cgcgcggguccggcgccgagguucuuga

SEQ ID NO: 315832 - RNA, 32 nt, Homo Sapiens
aaucuucuauguaaguuuuuuaauuaaaguua

SEQ ID NO: 315833 - RNA, 32 nt, Homo Sapiens
ggucguggugcaggcgagcagacgccagacuc

SEQ ID NO: 315834 - RNA, 32 nt, Homo Sapiens
ucaacuuacaaaguacacuauguaagaacuga

SEQ ID NO: 315835 - RNA, 32 nt, Homo Sapiens
uucugccugccagacgugccacugccccacca

SEQ ID NO: 315836 - RNA, 32 nt, Homo Sapiens
cagccagccucgcuccucgcuccucgcuccuc

SEQ ID NO: 315837 - RNA, 32 nt, Homo Sapiens
gaaaaagacaccggauuccuagcuggggcccu

SEQ ID NO: 315838 - RNA, 32 nt, Homo Sapiens
gagcaucuggaacaacagauggcugcgcacca

SEQ ID NO: 315839 - RNA, 32 nt, Homo Sapiens
uggugacuggguccagaauggcuucggauucg

SEQ ID NO: 315840 - RNA, 32 nt, Homo Sapiens
cgccgccgcgcgccccaccgucuguugcagug

SEQ ID NO: 315841 - RNA, 32 nt, Homo Sapiens
cgggccccgagcucggucccgcgcccgaggau

SEQ ID NO: 315842 - RNA, 32 nt, Homo Sapiens
cuggaaugucauuuuugcuuuuaagccauuuc

SEQ ID NO: 315843 - RNA, 32 nt, Homo Sapiens
auauugccauacaauuuuaauuuauacaagua

SEQ ID NO: 315844 - RNA, 32 nt, Homo Sapiens
gggaagagcucccaccuucucuggaugugccu

SEQ ID NO: 315845 - RNA, 32 nt, Homo Sapiens
gcagcucugggcacgccgcacccacgcccccc

SEQ ID NO: 315846 - RNA, 32 nt, Homo Sapiens
ugaccaaagggagaucccagccugggcagccu

SEQ ID NO: 315847 - RNA, 32 nt, Homo Sapiens
cucugccccuugcugcagugagcccaccuugc

SEQ ID NO: 315848 - RNA, 32 nt, Homo Sapiens
aaguguuucuccugcccuuggggcugucuucc

SEQ ID NO: 315849 - RNA, 32 nt, Homo Sapiens
cucucccugguccccucccccauccccaccac

SEQ ID NO: 315850 - RNA, 32 nt, Homo Sapiens
gcauuauuuuucugauuuacuuaacauuuuag

SEQ ID NO: 315851 - RNA, 32 nt, Homo Sapiens
ccugcuccccgccgcuuccguuucucgaggga

SEQ ID NO: 315852 - RNA, 32 nt, Homo Sapiens
gggaagcgggaggagagccacacggucaaguu

SEQ ID NO: 315853 - RNA, 32 nt, Homo Sapiens
uaggagagccucagccgggucaucucaucuca

SEQ ID NO: 315854 - RNA, 32 nt, Homo Sapiens
cgcguuugccuugcuggaugauuccgcuuguu

SEQ ID NO: 315855 - RNA, 32 nt, Homo Sapiens
aagcuuugaugauggccugggcuuugaauacg

SEQ ID NO: 315856 - RNA, 32 nt, Homo Sapiens
gguaauccuccagcaccuguguuuccucuaac

SEQ ID NO: 315857 - RNA, 32 nt, Homo Sapiens
cgcgccggcgccugcgcagucgccccagagcg

SEQ ID NO: 315858 - RNA, 32 nt, Homo Sapiens
ucuacccacacccaccuaauuaggggugcuaa

SEQ ID NO: 315859 - RNA, 32 nt, Homo Sapiens
uuucaaagucauuuuugacacaucagugcugc

SEQ ID NO: 315860 - RNA, 32 nt, Homo Sapiens
agaggaggagcgcacgccggccucgaagaacu

SEQ ID NO: 315861 - RNA, 32 nt, Homo Sapiens
uauucagauuguguagauaugcuauuuaaaua

SEQ ID NO: 315862 - RNA, 32 nt, Homo Sapiens
ggacacugcccccuaccuucucugcccacacc

SEQ ID NO: 315863 - RNA, 32 nt, Homo Sapiens
aacauuuuauuuuuuucuucucagcaaggcag

SEQ ID NO: 315864 - RNA, 32 nt, Homo Sapiens
ugugggaaguccucccuggugucugcccugcu

SEQ ID NO: 315865 - RNA, 32 nt, Homo Sapiens
cugaccucgaccaagccgcgaccgccagcaag

SEQ ID NO: 315866 - RNA, 32 nt, Homo Sapiens
ucccccggccccagcccgugccucagcagagc

SEQ ID NO: 315867 - RNA, 32 nt, Homo Sapiens
uucacaggagaccaagcagagaauaagacagu

SEQ ID NO: 315868 - RNA, 32 nt, Homo Sapiens
aaaaguuuaguaagaacaaaugcugaaaucaa

SEQ ID NO: 315869 - RNA, 32 nt, Homo Sapiens
guggggaagagauaaucuuucugauuaccugu

SEQ ID NO: 315870 - RNA, 31 nt, Homo Sapiens
ccgggcggggcggugucuccuuucacagcuu

SEQ ID NO: 315871 - RNA, 32 nt, Homo Sapiens
uuuuaaaacaguuuggccauaauccuagaugc

SEQ ID NO: 315872 - RNA, 32 nt, Homo Sapiens
uaagugcacuguauucccucugagcuacuucc

SEQ ID NO: 315873 - RNA, 32 nt, Homo Sapiens
ucccuucccuccuacuugcgcgcggagccgag

SEQ ID NO: 315874 - RNA, 32 nt, Homo Sapiens
uggcgguggaccagccagcugcuguccaugug

SEQ ID NO: 315875 - RNA, 32 nt, Homo Sapiens
gagauaaaauauuguaccauuaaacuuuaaua

SEQ ID NO: 315876 - RNA, 32 nt, Homo Sapiens
agcccuagcgcccggggcuccacgcgccgcca

SEQ ID NO: 315877 - RNA, 32 nt, Homo Sapiens
ucgcuuaugccucggcgcugagccgcucuccc

SEQ ID NO: 315878 - RNA, 32 nt, Homo Sapiens
gcccccagcucccauuggggucggcgaaccug

SEQ ID NO: 315879 - RNA, 32 nt, Homo Sapiens
uuaauuaguuugugggcaguuuucauaugcuc

SEQ ID NO: 315880 - RNA, 32 nt, Homo Sapiens
aaggcugguguccuggccccaguccaccucug

SEQ ID NO: 315881 - RNA, 32 nt, Homo Sapiens
gcagcauagaauuuuggaauuuuggggcuuuc

SEQ ID NO: 315882 - RNA, 32 nt, Homo Sapiens
cuggacggcgggcggcagcgugucccgcgggc

SEQ ID NO: 315883 - RNA, 32 nt, Homo Sapiens
cuugcuuaauaaauaucugcuggauucuuuca

SEQ ID NO: 315884 - RNA, 32 nt, Homo Sapiens
accagcuugaauggcugcucuaucuugggcug

SEQ ID NO: 315885 - RNA, 32 nt, Homo Sapiens
aauauaaaaaucuuuguaaaucucaaaaaaaa

SEQ ID NO: 315886 - RNA, 32 nt, Homo Sapiens
uucaagaaacugaguauuuaugggcauugaag

SEQ ID NO: 315887 - RNA, 32 nt, Homo Sapiens
uggaggaguccuccccggccggugcuccaggg

SEQ ID NO: 315888 - RNA, 32 nt, Homo Sapiens
agucagcaucacaugcgccuucccuuucuccc

SEQ ID NO: 315889 - RNA, 31 nt, Homo Sapiens
gauuacaaaaauaaagcaaaaacuaacaaau

SEQ ID NO: 315890 - RNA, 32 nt, Homo Sapiens
accugacagaauacuucuccucuuccucaccu

SEQ ID NO: 315891 - RNA, 32 nt, Homo Sapiens
agcagcaaaauuuauguaaaucuuugacgggg

SEQ ID NO: 315892 - RNA, 32 nt, Homo Sapiens
auauccaugaucuugaguccauuugggggauu

SEQ ID NO: 315893 - RNA, 32 nt, Homo Sapiens
uccugcagcuccagcuuugugcucugccucug

SEQ ID NO: 315894 - RNA, 32 nt, Homo Sapiens
cuguacugcgcgcgcacaugcgcgcaaacccg

SEQ ID NO: 315895 - RNA, 32 nt, Homo Sapiens
cuggguucuguugagggugauuguuaggacgu

SEQ ID NO: 315896 - RNA, 32 nt, Homo Sapiens
cuggacccaagcucagcucagcguccggaccc

SEQ ID NO: 315897 - RNA, 32 nt, Homo Sapiens
aaugcagucuuacugauuugcagcaauuuuau

SEQ ID NO: 315898 - RNA, 32 nt, Homo Sapiens
agccaggaacgcccggcaggcaggcgcucucc

SEQ ID NO: 315899 - RNA, 32 nt, Homo Sapiens
ugaaacagugguuuuuacuuagaucaugaguu

SEQ ID NO: 315900 - RNA, 32 nt, Homo Sapiens
ccacaccuggcuaauuuuuuuaaaauuuuuug

SEQ ID NO: 315901 - RNA, 32 nt, Homo Sapiens
guagaggagagccaccugacagcugaccaggu

SEQ ID NO: 315902 - RNA, 32 nt, Homo Sapiens
ugggugaggaucugagaaaugcuaaaggcuug

SEQ ID NO: 315903 - RNA, 32 nt, Homo Sapiens
acuugauugaaaaacuaagaacaugaaauguc

SEQ ID NO: 315904 - RNA, 32 nt, Homo Sapiens
ugaaguaaaaauuuauuacucuagguauucac

SEQ ID NO: 315905 - RNA, 32 nt, Homo Sapiens
cagggcagagcagugccucuacgugucugcgc

SEQ ID NO: 315906 - RNA, 32 nt, Homo Sapiens
accaccaggacucggaagcuacaggagcaacg

SEQ ID NO: 315907 - RNA, 32 nt, Homo Sapiens
acacagauaauaggaacaaaauguaguuccca

SEQ ID NO: 315908 - RNA, 32 nt, Homo Sapiens
guuuuugcaagagcuuuuuuuuuuuuuaaacu

SEQ ID NO: 315909 - RNA, 32 nt, Homo Sapiens
ccguggggucauggcaggggcuggggaguccc

SEQ ID NO: 315910 - RNA, 32 nt, Homo Sapiens
cauccggcuaccugcccucccugccuucccca

SEQ ID NO: 315911 - RNA, 32 nt, Homo Sapiens
ggggagguggaggugcgaguauaaaugaucaa

SEQ ID NO: 315912 - RNA, 32 nt, Homo Sapiens
guccuagaagaaagagcagagagggagacuga

SEQ ID NO: 315913 - RNA, 32 nt, Homo Sapiens
uaugaaaguguugggaugagguucccacaagu

SEQ ID NO: 315914 - RNA, 32 nt, Homo Sapiens
aaaagacaccccagccaccuggcucagagagg

SEQ ID NO: 315915 - RNA, 32 nt, Homo Sapiens
aguuacuuuuuuuuuuuuuuuaaauaaaaguc

SEQ ID NO: 315916 - RNA, 32 nt, Homo Sapiens
ccuguucauccccgucuuucugaacugcuggc

SEQ ID NO: 315917 - RNA, 32 nt, Homo Sapiens
aacugggcugggccucuuuccugugguucaca

SEQ ID NO: 315918 - RNA, 32 nt, Homo Sapiens
agguggauggggauggaagaugaugcuccuau

SEQ ID NO: 315919 - RNA, 32 nt, Homo Sapiens
ggaagagcucgccggggcgccgggccaggacg

SEQ ID NO: 315920 - RNA, 32 nt, Homo Sapiens
ccuuccccguaggcagcucgcccgccaguccg

SEQ ID NO: 315921 - RNA, 32 nt, Homo Sapiens
ccgccccuuagugcuuuuuguuuucuaaccuc

SEQ ID NO: 315922 - RNA, 32 nt, Homo Sapiens
cggugagguaggggcgggaggcggggggagac

SEQ ID NO: 315923 - RNA, 32 nt, Homo Sapiens
cgaggcugugucgcguggcccagcgucggcgu

SEQ ID NO: 315924 - RNA, 32 nt, Homo Sapiens
uguguggggggcuggacucaggcggccagagg

SEQ ID NO: 315925 - RNA, 32 nt, Homo Sapiens
augaaguaucuaggaacuucauucucaaguuu

SEQ ID NO: 315926 - RNA, 32 nt, Homo Sapiens
agcugggccggacgacugugcuucucgugcuu

SEQ ID NO: 315927 - RNA, 32 nt, Homo Sapiens
gcugcagccccgaggaacugggcacccucgag

SEQ ID NO: 315928 - RNA, 32 nt, Homo Sapiens
augauggaauuugaacauuacuucaagagguu

SEQ ID NO: 315929 - RNA, 32 nt, Homo Sapiens
uaaaugggugcacuuuacuguuugaauuugua

SEQ ID NO: 315930 - RNA, 32 nt, Homo Sapiens
ccccaagccuccuggggaggcagggcaaaaac

SEQ ID NO: 315931 - RNA, 32 nt, Homo Sapiens
ucugaguuguuuuuauuuucuuccuuuggugu

SEQ ID NO: 315932 - RNA, 32 nt, Homo Sapiens
ggcagaggaguggucauuuuucuucuuguggc

SEQ ID NO: 315933 - RNA, 32 nt, Homo Sapiens
cggguucgcggggcggggucccggggcagcac

SEQ ID NO: 315934 - RNA, 32 nt, Homo Sapiens
ccagugggugacugaguaacugaaaugcugcu

SEQ ID NO: 315935 - RNA, 32 nt, Homo Sapiens
cccaucccgggucccacccccaaacccccaga

SEQ ID NO: 315936 - RNA, 31 nt, Homo Sapiens
guuuaauuuuugacuuuuacagguaagugca

SEQ ID NO: 315937 - RNA, 28 nt, Homo Sapiens
gggaugagaaacugcaaaauggcccggg

SEQ ID NO: 315938 - RNA, 32 nt, Homo Sapiens
uccggagcccucucggccgcccccgccaggcg

SEQ ID NO: 315939 - RNA, 32 nt, Homo Sapiens
acuuuaagaucuaauccaauguccuaacuuua

SEQ ID NO: 315940 - RNA, 32 nt, Homo Sapiens
ggcuugagcccaagaguucagagcagccuggc

SEQ ID NO: 315941 - RNA, 32 nt, Homo Sapiens
uccacccuccccacccccucggggcagaguuu

SEQ ID NO: 315942 - RNA, 32 nt, Homo Sapiens
ggcacuuggagggguucuggggugccugacaa

SEQ ID NO: 315943 - RNA, 32 nt, Homo Sapiens
ugaccguguuaacauuuucagaucacgaggga

SEQ ID NO: 315944 - RNA, 32 nt, Homo Sapiens
gcauuuuaauuucaaaaagucuuccuuccaag

SEQ ID NO: 315945 - RNA, 32 nt, Homo Sapiens
ccugggaggcggagguugcugugagcugagau

SEQ ID NO: 315946 - RNA, 32 nt, Homo Sapiens
cagcgcggggcgaaagagcgggcuucucuugu

SEQ ID NO: 315947 - RNA, 32 nt, Homo Sapiens
cauaaucuugaaaaucuuuagcacuaaagucu

SEQ ID NO: 315948 - RNA, 32 nt, Homo Sapiens
cucagugcuucuugugcagugccuggacccag

SEQ ID NO: 315949 - RNA, 32 nt, Homo Sapiens
agccgcgccagcugccgggacacugcugccag

SEQ ID NO: 315950 - RNA, 32 nt, Homo Sapiens
agcgccgggaccgcggauuggcugccucggcu

SEQ ID NO: 315951 - RNA, 32 nt, Homo Sapiens
uggauuuugucaaauagaugaucuuugacacg

SEQ ID NO: 315952 - RNA, 23 nt, Homo Sapiens
cugaaauaaaguuugacuuuuug

SEQ ID NO: 315953 - RNA, 32 nt, Homo Sapiens
cagccggcugggccaccugagcagaagguggu

SEQ ID NO: 315954 - RNA, 32 nt, Homo Sapiens
acuguuuagaaaaacaggaauacaaugguugu

SEQ ID NO: 315955 - RNA, 32 nt, Homo Sapiens
agcaagguuugagaugcuauauuaacauuuaa

SEQ ID NO: 315956 - RNA, 32 nt, Homo Sapiens
auggcaaguauuuguguauugaaacauaaggg

SEQ ID NO: 315957 - RNA, 32 nt, Homo Sapiens
agcugugugaauaccugcucacgucaaaugca

SEQ ID NO: 315958 - RNA, 32 nt, Homo Sapiens
uccuuauaccuucucccuuccauuucugagau

SEQ ID NO: 315959 - RNA, 32 nt, Homo Sapiens
cuggagagaaaccuuacaaaugcaaugaaugu

SEQ ID NO: 315960 - RNA, 32 nt, Homo Sapiens
uuuguucugaaauuaaaguaugcaaaauaaag

SEQ ID NO: 315961 - RNA, 32 nt, Homo Sapiens
gcuggccgaccugcuguccacccagcgcucca

SEQ ID NO: 315962 - RNA, 32 nt, Homo Sapiens
auaucagcaaaauaauucaauuuugcagguug

SEQ ID NO: 315963 - RNA, 32 nt, Homo Sapiens
agauguauaaucuauuuagauguuaauuaaag

SEQ ID NO: 315964 - RNA, 32 nt, Homo Sapiens
cuuuuuugagacggagucucucucugucgcca

SEQ ID NO: 315965 - RNA, 32 nt, Homo Sapiens
uaauuucagguuuuuuacauuuuaacaaaaua

SEQ ID NO: 315966 - RNA, 32 nt, Homo Sapiens
uacaguaacuguaaagucggaguuuuaguaaa

SEQ ID NO: 315967 - RNA, 32 nt, Homo Sapiens
aaggaugcaccuguacucucugcucuacagcc

SEQ ID NO: 315968 - RNA, 32 nt, Homo Sapiens
agagcuagaucugugugcauguguguguuugu

SEQ ID NO: 315969 - RNA, 32 nt, Homo Sapiens
caacuaagaacaaaaauuaacgagaaaaacaa

SEQ ID NO: 315970 - RNA, 32 nt, Homo Sapiens
ccgcgaaugauggcuuuugaauuaaugaggca

SEQ ID NO: 315971 - RNA, 32 nt, Homo Sapiens
aaauuggauuuuauuuuauuuuaucuuauaau

SEQ ID NO: 315972 - RNA, 32 nt, Homo Sapiens
ugggguauaaaacacuccucccugcccccauu

SEQ ID NO: 315973 - RNA, 32 nt, Homo Sapiens
acaauacggugauuccucaagaaauuagaaac

SEQ ID NO: 315974 - RNA, 32 nt, Homo Sapiens
gggaagggaugugugucgguguguguggagag

SEQ ID NO: 315975 - RNA, 32 nt, Homo Sapiens
aauguucuuuugcuucugucugcaauguuauc

SEQ ID NO: 315976 - RNA, 32 nt, Homo Sapiens
cauaucuuuuucuucagaacaauguagacuuc

SEQ ID NO: 315977 - RNA, 32 nt, Homo Sapiens
cucuuggacagagcuuccuguucucuuauuuc

SEQ ID NO: 315978 - RNA, 32 nt, Homo Sapiens
ugaccggccuguggagaugaugacuggcccac

SEQ ID NO: 315979 - RNA, 32 nt, Homo Sapiens
ggcugggugcgguggcacaugccuguaauccc

SEQ ID NO: 315980 - RNA, 32 nt, Homo Sapiens
uuaaaaucugacugcuuuacuuugauguauca

SEQ ID NO: 315981 - RNA, 32 nt, Homo Sapiens
gcugaaagcaccuuaacauauucaaugcgauu

SEQ ID NO: 315982 - RNA, 32 nt, Homo Sapiens
gaaauauggcauugcccuccucaucuuacagg

SEQ ID NO: 315983 - RNA, 32 nt, Homo Sapiens
cuauacaucgacguuuucaaugugcuuaaauu

SEQ ID NO: 315984 - RNA, 32 nt, Homo Sapiens
guuucucuaacaaacaaacaaacaaacagccu

SEQ ID NO: 315985 - RNA, 32 nt, Homo Sapiens
aauaaauaucuagaaaugauaauuugcuaaag

SEQ ID NO: 315986 - RNA, 32 nt, Homo Sapiens
auuaaccaaggauucuuaauuguuaauuugaa

SEQ ID NO: 315987 - RNA, 32 nt, Homo Sapiens
aguuguuugcuuauuuuauggaacaggcauug

SEQ ID NO: 315988 - RNA, 32 nt, Homo Sapiens
uugcaggggacaagggcccacccaggccuugg

SEQ ID NO: 315989 - RNA, 32 nt, Homo Sapiens
ugugguaaaaagauuauauaucauaaaguaug

SEQ ID NO: 315990 - RNA, 32 nt, Homo Sapiens
ugcaagggggaggagggaaaucugugcauguu

SEQ ID NO: 315991 - RNA, 32 nt, Homo Sapiens
ccaucucacacgccucccuccugugccgccgg

SEQ ID NO: 315992 - RNA, 32 nt, Homo Sapiens
ugcaaaauaauggccaguuguuuaggaaggcc

SEQ ID NO: 315993 - RNA, 32 nt, Homo Sapiens
gaucaggaugccguguuuggcccagagacuca

SEQ ID NO: 315994 - RNA, 32 nt, Homo Sapiens
ggcaucucucuugcuuuguccuuucuauacug

SEQ ID NO: 315995 - RNA, 32 nt, Homo Sapiens
uccucgguccaguugcuaaaguucuuaguauu

SEQ ID NO: 315996 - RNA, 32 nt, Homo Sapiens
uuuuaacaaaauuuauuccaaauauaggagua

SEQ ID NO: 315997 - RNA, 32 nt, Homo Sapiens
aacucaucuuugauucaucauugucucuuggu

SEQ ID NO: 315998 - RNA, 32 nt, Homo Sapiens
caaacaacaaaguuguggugaagcuauaauau

SEQ ID NO: 315999 - RNA, 32 nt, Homo Sapiens
aaaauacuaaaaaauaaagacacacacagagc

SEQ ID NO: 316000 - RNA, 32 nt, Homo Sapiens
ucccacccccggagacccccgaugccugccuc

SEQ ID NO: 316001 - RNA, 32 nt, Homo Sapiens
agggaucugccuggccagcagugagccugagc

SEQ ID NO: 316002 - RNA, 32 nt, Homo Sapiens
cucaggaacagccuucuccugccuccucugca

SEQ ID NO: 316003 - RNA, 32 nt, Homo Sapiens
acccacuucugggaggcuuucagggacucaac

SEQ ID NO: 316004 - RNA, 31 nt, Homo Sapiens
cagaccuacccucagcccagcuauaccagua

SEQ ID NO: 316005 - RNA, 32 nt, Homo Sapiens
ugaauccugcaccuuccguuuuucugugcuug

SEQ ID NO: 316006 - RNA, 32 nt, Homo Sapiens
cuccaacucaucuccuuccuguccuuugaguu

SEQ ID NO: 316007 - RNA, 32 nt, Homo Sapiens
gacucuggauaggaaagccaucuuacagcaag

SEQ ID NO: 316008 - RNA, 32 nt, Homo Sapiens
cugcuuguccccagcccugaacugauaaagcc

SEQ ID NO: 316009 - RNA, 32 nt, Homo Sapiens
acugggcacaacugcaauaacuucugaccuuu

SEQ ID NO: 316010 - RNA, 32 nt, Homo Sapiens
uuacugcauaaugauuucauuuugauaaugug

SEQ ID NO: 316011 - RNA, 32 nt, Homo Sapiens
cgccccugcagcggcccgagcuguggccggcg

SEQ ID NO: 316012 - RNA, 32 nt, Homo Sapiens
ggacuuggucugauuucaggauacucugucag

SEQ ID NO: 316013 - RNA, 32 nt, Homo Sapiens
ccugcuccaucgcgccagcgaccucucugccu

SEQ ID NO: 316014 - RNA, 31 nt, Homo Sapiens
ccgcccggcgcgagccugcccccagcucugc

SEQ ID NO: 316015 - RNA, 32 nt, Homo Sapiens
gcugucaggaagagggggugcugguuugaggg

SEQ ID NO: 316016 - RNA, 32 nt, Homo Sapiens
guacuguuugucuacaccugguuuucuuccau

SEQ ID NO: 316017 - RNA, 32 nt, Homo Sapiens
gaggcuggcgguggcccauugccggcgcgugu

SEQ ID NO: 316018 - RNA, 32 nt, Homo Sapiens
ucugccagcucuuuguugucugucuccuuaaa

SEQ ID NO: 316019 - RNA, 32 nt, Homo Sapiens
cacaaggaucacaugcuucgaagggcaauaaa

SEQ ID NO: 316020 - RNA, 32 nt, Homo Sapiens
agccacugcgccccgccagacgucugcaucuu

SEQ ID NO: 316021 - RNA, 32 nt, Homo Sapiens
ugugaggauaaaauaaaaggugugacauuucu

SEQ ID NO: 316022 - RNA, 32 nt, Homo Sapiens
cacacagcauggaugcaauaauguagagcaau

SEQ ID NO: 316023 - RNA, 31 nt, Homo Sapiens
auggaggcucggcugaaccaggacuccucac

SEQ ID NO: 316024 - RNA, 32 nt, Homo Sapiens
aaagagcagcucuuuagaauccugcuaaagcu

SEQ ID NO: 316025 - RNA, 32 nt, Homo Sapiens
ucgucgcuggaaagauucugaagcuuggcgga

SEQ ID NO: 316026 - RNA, 32 nt, Homo Sapiens
cagaugccugaggccuggcuggggcugccccc

SEQ ID NO: 316027 - RNA, 30 nt, Homo Sapiens
aagcuccagagaaugggggcaaccaugggg

SEQ ID NO: 316028 - RNA, 32 nt, Homo Sapiens
uuuguauuugaauuaauuaucauuccagcuuu

SEQ ID NO: 316029 - RNA, 32 nt, Homo Sapiens
augcuuagagcccaggcuccagcccugagugc

SEQ ID NO: 316030 - RNA, 32 nt, Homo Sapiens
uggccuccacguucccucuccucucacccaca

SEQ ID NO: 316031 - RNA, 32 nt, Homo Sapiens
aucacuguauguauuaaaaugacuguaucaaa

SEQ ID NO: 316032 - RNA, 32 nt, Homo Sapiens
aacccuugaguggccuggcggggagcgggccu

SEQ ID NO: 316033 - RNA, 32 nt, Homo Sapiens
aaggucugauaaacugaugaaauggcacagca

SEQ ID NO: 316034 - RNA, 32 nt, Homo Sapiens
uaguagauaaaauacugccuucugccuuuggg

SEQ ID NO: 316035 - RNA, 32 nt, Homo Sapiens
gggaagggguggcaucgaggaccuucuugcau

SEQ ID NO: 316036 - RNA, 32 nt, Homo Sapiens
acauguuuuugauauuugauaaugaaaaaaau

SEQ ID NO: 316037 - RNA, 32 nt, Homo Sapiens
ggagagaggaggaggcggcggcggggcaguga

SEQ ID NO: 316038 - RNA, 32 nt, Homo Sapiens
agccgccgggagcuguaguucucccgcggcuc

SEQ ID NO: 316039 - RNA, 31 nt, Homo Sapiens
uggugcgugaaggcucucagaccuuacacac

SEQ ID NO: 316040 - RNA, 32 nt, Homo Sapiens
uuuauaguuuuccacagcacaaugagcaaaag

SEQ ID NO: 316041 - RNA, 32 nt, Homo Sapiens
ucugccuuggaaugcaaauaguucuuauuugc

SEQ ID NO: 316042 - RNA, 32 nt, Homo Sapiens
gauccagaagugcaagcagagaaacacguaau

SEQ ID NO: 316043 - RNA, 32 nt, Homo Sapiens
uguaccaaaacaaacaaacaaacaaacaaaac

SEQ ID NO: 316044 - RNA, 32 nt, Homo Sapiens
ggaguacaaccuggucuggcgccccaggccca

SEQ ID NO: 316045 - RNA, 32 nt, Homo Sapiens
ucuguguaaaaugaguaggaugucucuuggaa

SEQ ID NO: 316046 - RNA, 32 nt, Homo Sapiens
gcuagccauauguagaaagcugaaacuggauc

SEQ ID NO: 316047 - RNA, 32 nt, Homo Sapiens
uagcacacagcacuugggccagcaaauccugg

SEQ ID NO: 316048 - RNA, 32 nt, Homo Sapiens
uagauuuauuauuaaaggaaauccaugugugg

SEQ ID NO: 316049 - RNA, 32 nt, Homo Sapiens
agaggauccgccaagagguagcaagaaacagu

SEQ ID NO: 316050 - RNA, 32 nt, Homo Sapiens
gaaagucugucugcaccuugaagcugagggug

SEQ ID NO: 316051 - RNA, 32 nt, Homo Sapiens
uagauggacgucggcaacucccggcccagccu

SEQ ID NO: 316052 - RNA, 32 nt, Homo Sapiens
aggggucgugcgaggagaaggcagcggcagcc

SEQ ID NO: 316053 - RNA, 32 nt, Homo Sapiens
caagggcagggccacacucucgccgcugauga

SEQ ID NO: 316054 - RNA, 30 nt, Homo Sapiens
uucugucuaauccuucucuaacucugugac

SEQ ID NO: 316055 - RNA, 32 nt, Homo Sapiens
aaaccagacaccugacauagagucuuuauuuu

SEQ ID NO: 316056 - RNA, 32 nt, Homo Sapiens
auaauuauguauuugauuauaauuacugauug

SEQ ID NO: 316057 - RNA, 32 nt, Homo Sapiens
aagcaccucaauuaaccagagcuuagcaaaug

SEQ ID NO: 316058 - RNA, 32 nt, Homo Sapiens
agaccccucccagcccucuccuccuguuccuc

SEQ ID NO: 316059 - RNA, 32 nt, Homo Sapiens
gagagcugugaaugaauucuccggguggacga

SEQ ID NO: 316060 - RNA, 32 nt, Homo Sapiens
uugaacaauuuaaccuugaagucuauauccgu

SEQ ID NO: 316061 - RNA, 32 nt, Homo Sapiens
agcucuccaagccccauuguguagggauuuuu

SEQ ID NO: 316062 - RNA, 32 nt, Homo Sapiens
cuaucccugcacacuuuccccuggcugcuguu

SEQ ID NO: 316063 - RNA, 32 nt, Homo Sapiens
uuuugguacugggggauagugaaaugggaaau

SEQ ID NO: 316064 - RNA, 32 nt, Homo Sapiens
uauggccguuuuuuaucaugucuuaaaaaugc

SEQ ID NO: 316065 - RNA, 32 nt, Homo Sapiens
gaggaacaugacagaugggcaaugcacuuuga

SEQ ID NO: 316066 - RNA, 32 nt, Homo Sapiens
cucaccccaagcacacgaggucagccuggcag

SEQ ID NO: 316067 - RNA, 32 nt, Homo Sapiens
uguugauuaaucuauuuucauauuuauaaagg

SEQ ID NO: 316068 - RNA, 32 nt, Homo Sapiens
cccgugagaacucgacugccccugccagcucu

SEQ ID NO: 316069 - RNA, 32 nt, Homo Sapiens
accugcagauauugggagauccacagcuaaga

SEQ ID NO: 316070 - RNA, 32 nt, Homo Sapiens
ggucauauucccuccucagccugcccacgcac

SEQ ID NO: 316071 - RNA, 32 nt, Homo Sapiens
aagaggaguggaagaagacagagagaaucaau

SEQ ID NO: 316072 - RNA, 32 nt, Homo Sapiens
ucgcccugcgccccggccggggccccacacac

SEQ ID NO: 316073 - RNA, 32 nt, Homo Sapiens
cuccuccccccgccaucugccuggcucauggg

SEQ ID NO: 316074 - RNA, 32 nt, Homo Sapiens
cacccguccucuguccucuccuccuucccaag

SEQ ID NO: 316075 - RNA, 32 nt, Homo Sapiens
gucucuuagaccagcuccugaguucucucucu

SEQ ID NO: 316076 - RNA, 32 nt, Homo Sapiens
uuauaaucucaaccucuagaggaagccauugu

SEQ ID NO: 316077 - RNA, 32 nt, Homo Sapiens
ccuuguccuauaaagcacuuuggaacaggccc

SEQ ID NO: 316078 - RNA, 32 nt, Homo Sapiens
gggccagguuagcacagcgcuggccccagcau

SEQ ID NO: 316079 - RNA, 32 nt, Homo Sapiens
ccugcacuggaggauuucucagacacaugcac

SEQ ID NO: 316080 - RNA, 32 nt, Homo Sapiens
ucugacagcgggucugcguaggcggcagcguc

SEQ ID NO: 316081 - RNA, 32 nt, Homo Sapiens
auguuggggcuuuguccgaacagcuccccucu

SEQ ID NO: 316082 - RNA, 32 nt, Homo Sapiens
auucaaaaaaucaucuuggacauaauuaauau

SEQ ID NO: 316083 - RNA, 32 nt, Homo Sapiens
ucgcucauucaugccuucuccugaucauacuu

SEQ ID NO: 316084 - RNA, 32 nt, Homo Sapiens
gcuuaggacacgcugagagacuaguugugauu

SEQ ID NO: 316085 - RNA, 32 nt, Homo Sapiens
gugguggggggccuggugugcuggcaucaagu

SEQ ID NO: 316086 - RNA, 32 nt, Homo Sapiens
cauaaccuaccuuuguauuaagacuugcaauu

SEQ ID NO: 316087 - RNA, 32 nt, Homo Sapiens
gccuuuuuucgccugcggcgccggcgacagau

SEQ ID NO: 316088 - RNA, 32 nt, Homo Sapiens
ucauggaagagcugaggccugugcuugguguu

SEQ ID NO: 316089 - RNA, 32 nt, Homo Sapiens
ggaucugguguguggcagaaaggucugaacag

SEQ ID NO: 316090 - RNA, 32 nt, Homo Sapiens
uauuacaccguaaaaggcauugaucaccauaa

SEQ ID NO: 316091 - RNA, 32 nt, Homo Sapiens
agcucucuggaaagguucagaaauguggugag

SEQ ID NO: 316092 - RNA, 32 nt, Homo Sapiens
ugcugcaccaaaacaggaucucuccaaggcac

SEQ ID NO: 316093 - RNA, 32 nt, Homo Sapiens
uaguccccgcggcgucucccagucgggcuccu

SEQ ID NO: 316094 - RNA, 32 nt, Homo Sapiens
gcacgaaaacaaaaauuccauaucaaugugcc

SEQ ID NO: 316095 - RNA, 32 nt, Homo Sapiens
ucugucugacuucugcaucuccuuccagguca

SEQ ID NO: 316096 - RNA, 32 nt, Homo Sapiens
cuuagugcucaauaauauaagaccuguuguua

SEQ ID NO: 316097 - RNA, 32 nt, Homo Sapiens
cuggaacagauuuuaauaauuaucagaguaau

SEQ ID NO: 316098 - RNA, 32 nt, Homo Sapiens
uccugcugcccccacacccccgucagucacug

SEQ ID NO: 316099 - RNA, 32 nt, Homo Sapiens
ugucugacauuuccaugaaaacaaaggaacca

SEQ ID NO: 316100 - RNA, 32 nt, Homo Sapiens
uuauuccaacagagauccuaauucuuuucccu

SEQ ID NO: 316101 - RNA, 31 nt, Homo Sapiens
ccggcaggacacugccuggaacgccuggagc

SEQ ID NO: 316102 - RNA, 32 nt, Homo Sapiens
gcauguggcguagaagucugcuguggccugaa

SEQ ID NO: 316103 - RNA, 32 nt, Homo Sapiens
augggcaaccccuuuugccucuccggaccccu

SEQ ID NO: 316104 - RNA, 32 nt, Homo Sapiens
guuggaggagacugggcaccccugccuccugc

SEQ ID NO: 316105 - RNA, 32 nt, Homo Sapiens
ugucaacagcuggcgcagcugccgcgcugcgc

SEQ ID NO: 316106 - RNA, 32 nt, Homo Sapiens
ccuaccccagaugcuaaagugauucaaggacu

SEQ ID NO: 316107 - RNA, 32 nt, Homo Sapiens
uugcuauuagacuguaggaagaguagcauuuc

SEQ ID NO: 316108 - RNA, 32 nt, Homo Sapiens
ggagaggggggucgggaauggggggaauguuu

SEQ ID NO: 316109 - RNA, 32 nt, Homo Sapiens
caaaaguaauaaauucuuacugacgacuugua

SEQ ID NO: 316110 - RNA, 32 nt, Homo Sapiens
ugguccccaagccuauugacacuaguugccua

SEQ ID NO: 316111 - RNA, 32 nt, Homo Sapiens
cucacaggcuccgauggcggcggccgcccuga

SEQ ID NO: 316112 - RNA, 32 nt, Homo Sapiens
ccauguuaaugaucguaauaaaagcuuucuac

SEQ ID NO: 316113 - RNA, 32 nt, Homo Sapiens
gaggccccaagggaacacguggagagcuucuu

SEQ ID NO: 316114 - RNA, 32 nt, Homo Sapiens
ucacaagcccggggagggaucccgccuuugaa

SEQ ID NO: 316115 - RNA, 32 nt, Homo Sapiens
agaaagggagagagggccaggcagucgcacug

SEQ ID NO: 316116 - RNA, 32 nt, Homo Sapiens
uauugugcuguaaguugauguuuaaaauugag

SEQ ID NO: 316117 - RNA, 32 nt, Homo Sapiens
cuuacugcauguguauauuguaaaaugauuag

SEQ ID NO: 316118 - RNA, 32 nt, Homo Sapiens
uuuagaauuuguguuuauauuuccuguaagug

SEQ ID NO: 316119 - RNA, 32 nt, Homo Sapiens
ucccaacaagcacaguucugaucacuucucca

SEQ ID NO: 316120 - RNA, 32 nt, Homo Sapiens
gaggaggcggagggcgcaaagcgagccggugg

SEQ ID NO: 316121 - RNA, 32 nt, Homo Sapiens
ccccucucaucccacucccggcggcccaggca

SEQ ID NO: 316122 - RNA, 32 nt, Homo Sapiens
cuuagaagaaugcucuuggucuguggguccag

SEQ ID NO: 316123 - RNA, 32 nt, Homo Sapiens
uuuuuguguguuuugaggccaugaugauuaca

SEQ ID NO: 316124 - RNA, 32 nt, Homo Sapiens
guagacauugugauauuaaauauacaugaugc

SEQ ID NO: 316125 - RNA, 32 nt, Homo Sapiens
gcucuucuuaucuuggcugggaucucacacau

SEQ ID NO: 316126 - RNA, 32 nt, Homo Sapiens
auccuggcuaacacagugaaaccccgucucca

SEQ ID NO: 316127 - RNA, 32 nt, Homo Sapiens
gugguagcgaucucggcucacagugcaaccuc

SEQ ID NO: 316128 - RNA, 32 nt, Homo Sapiens
ggcacccgcgcgcgcacacucgcacaccgcac

SEQ ID NO: 316129 - RNA, 32 nt, Homo Sapiens
uauaaauguacaaauaguuacugaaaugacga

SEQ ID NO: 316130 - RNA, 32 nt, Homo Sapiens
guuggagcagcugcaggcgcgcgccggggccg

SEQ ID NO: 316131 - RNA, 32 nt, Homo Sapiens
aguuuaaauuuauuuguguuucuaauuuauag

SEQ ID NO: 316132 - RNA, 32 nt, Homo Sapiens
gugcauguauugcauuguuguccuuugaauau

SEQ ID NO: 316133 - RNA, 32 nt, Homo Sapiens
uuauauuaugaaccgauuucaacaaguuuuaa

SEQ ID NO: 316134 - RNA, 31 nt, Homo Sapiens
guugacaguguuucacaagugcuguuacaac

SEQ ID NO: 316135 - RNA, 32 nt, Homo Sapiens
ccugggcugguuagccucucccgaccucauuc

SEQ ID NO: 316136 - RNA, 32 nt, Homo Sapiens
acuuaugagauaauuaaugauuaaacuauuaa

SEQ ID NO: 316137 - RNA, 32 nt, Homo Sapiens
uuauguauacuuccugauuugaaaggaggagg

SEQ ID NO: 316138 - RNA, 32 nt, Homo Sapiens
uuuuaacuccucaaauacaaauaaauuaauga

SEQ ID NO: 316139 - RNA, 32 nt, Homo Sapiens
ccggacacccgacuccaguccaagucucgcua

SEQ ID NO: 316140 - RNA, 32 nt, Homo Sapiens
uugacucuucauuuguuucagaauagcucuuc

SEQ ID NO: 316141 - RNA, 32 nt, Homo Sapiens
cccaucuccucccagaacgucacagugcucag

SEQ ID NO: 316142 - RNA, 32 nt, Homo Sapiens
acaaggaguggcucaccuccuugccuguggca

SEQ ID NO: 316143 - RNA, 32 nt, Homo Sapiens
cgaccucaucccccaaguggacacgguuugcc

SEQ ID NO: 316144 - RNA, 32 nt, Homo Sapiens
agagugugaacaggauuguggacucuuccaag

SEQ ID NO: 316145 - RNA, 32 nt, Homo Sapiens
ggucucaaacuccuggccucaagcaauccuca

SEQ ID NO: 316146 - RNA, 32 nt, Homo Sapiens
auugucuuagccugaaaaagaauagagaaaac

SEQ ID NO: 316147 - RNA, 32 nt, Homo Sapiens
agccaggccugagaauucugugcgcccggcgg

SEQ ID NO: 316148 - RNA, 32 nt, Homo Sapiens
agaaagaccaaguggauaccaggagccccgug

SEQ ID NO: 316149 - RNA, 32 nt, Homo Sapiens
gccacugcacuccagccugggcgacagagugg

SEQ ID NO: 316150 - RNA, 32 nt, Homo Sapiens
ccuuaaguguuaauaaaaaauaaaugagauaa

SEQ ID NO: 316151 - RNA, 32 nt, Homo Sapiens
caaaauucuaguuuuccaauauaagguuuaac

SEQ ID NO: 316152 - RNA, 27 nt, Homo Sapiens
aauaucacccuuuucagcccucccaug

SEQ ID NO: 316153 - RNA, 32 nt, Homo Sapiens
agaagacaaagugucacgcaguugacugguuu

SEQ ID NO: 316154 - RNA, 32 nt, Homo Sapiens
gagauggaaaaguuguuucauggcauccaaga

SEQ ID NO: 316155 - RNA, 32 nt, Homo Sapiens
ucucuuuuuaucauauaugacauuaaggcuac

SEQ ID NO: 316156 - RNA, 32 nt, Homo Sapiens
ugccuguaauccaagcacuuugagaggcugag

SEQ ID NO: 316157 - RNA, 32 nt, Homo Sapiens
guaaacccagcugugagacaagagggacaagu

SEQ ID NO: 316158 - RNA, 32 nt, Homo Sapiens
ggaaaccaaacacaaagcugauaaccuuucuu

SEQ ID NO: 316159 - RNA, 32 nt, Homo Sapiens
uugcagauuuccccuuuuuccuguauuguaac

SEQ ID NO: 316160 - RNA, 31 nt, Homo Sapiens
ugcuguucuagcugcugaccauagacagcau

SEQ ID NO: 316161 - RNA, 32 nt, Homo Sapiens
agaguaauagggaugagauauuaaauggccuu

SEQ ID NO: 316162 - RNA, 32 nt, Homo Sapiens
ccuggcauccccagccuccucuaaaccaccuc

SEQ ID NO: 316163 - RNA, 32 nt, Homo Sapiens
ugagggcugcaccuaugaccgccccugccgcu

SEQ ID NO: 316164 - RNA, 32 nt, Homo Sapiens
acccacugccagcugagagcugcuucccaaug

SEQ ID NO: 316165 - RNA, 32 nt, Homo Sapiens
cuauuuuaaaaauaccuuuaguaccugggaga

SEQ ID NO: 316166 - RNA, 32 nt, Homo Sapiens
ucauggucauucagucaagugucucauaaaga

SEQ ID NO: 316167 - RNA, 32 nt, Homo Sapiens
cccccuccagugucccucccccgccgguggcu

SEQ ID NO: 316168 - RNA, 32 nt, Homo Sapiens
aacugcuguucagaagaguugcagcuucaaca

SEQ ID NO: 316169 - RNA, 32 nt, Homo Sapiens
agagaccccuucagagcagggauugugccggg

SEQ ID NO: 316170 - RNA, 32 nt, Homo Sapiens
gcccgucuucugcugagugcugccgccccuuc

SEQ ID NO: 316171 - RNA, 32 nt, Homo Sapiens
aaauuuuaguguccauaaauaaaguuucagcg

SEQ ID NO: 316172 - RNA, 32 nt, Homo Sapiens
acgccagugaggaggaugacuggccucgggau

SEQ ID NO: 316173 - RNA, 27 nt, Homo Sapiens
aguuacucuuaauucuuuauaaaacuu

SEQ ID NO: 316174 - RNA, 32 nt, Homo Sapiens
gggaggucaggagggcuggcagcugaacgcac

SEQ ID NO: 316175 - RNA, 32 nt, Homo Sapiens
gcccccugagggcugggucuccaggagcaccc

SEQ ID NO: 316176 - RNA, 32 nt, Homo Sapiens
gauguauaucaagaucauaauuuuauagaaga

SEQ ID NO: 316177 - RNA, 32 nt, Homo Sapiens
aaacccaaccauauuucuguaaccauucaaau

SEQ ID NO: 316178 - RNA, 32 nt, Homo Sapiens
ucuccuagcugaguauuuuuuaucaguaagua

SEQ ID NO: 316179 - RNA, 32 nt, Homo Sapiens
uauugugcgcuaaacuuuucugauagaggaag

SEQ ID NO: 316180 - RNA, 32 nt, Homo Sapiens
gcugugcacguaggaagaaggggucuuacagc

SEQ ID NO: 316181 - RNA, 32 nt, Homo Sapiens
auuucaaaguuuccggguccccgcccccuuug

SEQ ID NO: 316182 - RNA, 32 nt, Homo Sapiens
uucuagccuuucccuuuccccuaacugcauca

SEQ ID NO: 316183 - RNA, 32 nt, Homo Sapiens
aucugaaaacaguggagucagugaccccaggu

SEQ ID NO: 316184 - RNA, 32 nt, Homo Sapiens
ucccugcucacagagaugacaaacuggcaucc

SEQ ID NO: 316185 - RNA, 32 nt, Homo Sapiens
uucagccucccgcuccaggcacaucccaccuu

SEQ ID NO: 316186 - RNA, 32 nt, Homo Sapiens
uucuucugugucucuauuucucuuccugucac

SEQ ID NO: 316187 - RNA, 32 nt, Homo Sapiens
acccggaggaggagaggcuccgcgcggggcuc

SEQ ID NO: 316188 - RNA, 32 nt, Homo Sapiens
ccagcuacuuggaauuggaaaucgccugaacc

SEQ ID NO: 316189 - RNA, 32 nt, Homo Sapiens
acccaggacagucccccuccccgggccucucu

SEQ ID NO: 316190 - RNA, 32 nt, Homo Sapiens
ugaugggacugggcgccguggagcagggggug

SEQ ID NO: 316191 - RNA, 32 nt, Homo Sapiens
caguccaauaccauguagcgcugagugauaaa

SEQ ID NO: 316192 - RNA, 32 nt, Homo Sapiens
acucugugagguuuuucuccagugccauaauu

SEQ ID NO: 316193 - RNA, 32 nt, Homo Sapiens
gguuuccugggcauggggacuggcugccuggc

SEQ ID NO: 316194 - RNA, 32 nt, Homo Sapiens
uaguacugauguuaaaucaugauagucuccac

SEQ ID NO: 316195 - RNA, 30 nt, Homo Sapiens
uguggcacucuugccacuccuugacauugu

SEQ ID NO: 316196 - RNA, 32 nt, Homo Sapiens
ugcuuuaaugaaaucacagagaaacuugguac

SEQ ID NO: 316197 - RNA, 32 nt, Homo Sapiens
gcaagccggccaauauccguggcaccgugaag

SEQ ID NO: 316198 - RNA, 32 nt, Homo Sapiens
aaauguuuauuaugaguaguuugugcuaggaa

SEQ ID NO: 316199 - RNA, 32 nt, Homo Sapiens
ggcucccccguccccaugacccuccaccugca

SEQ ID NO: 316200 - RNA, 32 nt, Homo Sapiens
uuaagcacauaaauauaaagcagcuuccauca

SEQ ID NO: 316201 - RNA, 32 nt, Homo Sapiens
uugaucuuuucaucugugccuaucauuccugg

SEQ ID NO: 316202 - RNA, 32 nt, Homo Sapiens
uuuaaccaaauaugaaacauacccccuauuuu

SEQ ID NO: 316203 - RNA, 32 nt, Homo Sapiens
cugcacggggagagggaaguauuuugccgaaa

SEQ ID NO: 316204 - RNA, 32 nt, Homo Sapiens
ucuccggcggguggucgggagcuggggcucug

SEQ ID NO: 316205 - RNA, 32 nt, Homo Sapiens
acuuaaccucucagaacugaacaaagacaaca

SEQ ID NO: 316206 - RNA, 32 nt, Homo Sapiens
cugccccgcgcgccgaaacccuccgccggacg

SEQ ID NO: 316207 - RNA, 30 nt, Homo Sapiens
accaucaucgcugguggggaaacugguggu

SEQ ID NO: 316208 - RNA, 32 nt, Homo Sapiens
cugugugcuuggacucggcuccagguggaagc

SEQ ID NO: 316209 - RNA, 32 nt, Homo Sapiens
ccuguccugugcugcucacucaacaacaucuu

SEQ ID NO: 316210 - RNA, 32 nt, Homo Sapiens
gugcguccuguugcagggaccggagcugaugg

SEQ ID NO: 316211 - RNA, 32 nt, Homo Sapiens
ggcggccgugcaggcggaggacuucggcgcgg

SEQ ID NO: 316212 - RNA, 32 nt, Homo Sapiens
aggacccgaugcagacuccugaaacagacuac

SEQ ID NO: 316213 - RNA, 32 nt, Homo Sapiens
cgccacgccggugccggagccggagcggggag

SEQ ID NO: 316214 - RNA, 32 nt, Homo Sapiens
acaaggcccagaagccugaucuuugggcauca

SEQ ID NO: 316215 - RNA, 32 nt, Homo Sapiens
cagccucucugcuauaagaaaagcagacgcag

SEQ ID NO: 316216 - RNA, 32 nt, Homo Sapiens
auacuaaaaugaauguaaaauaaggaucguau

SEQ ID NO: 316217 - RNA, 32 nt, Homo Sapiens
cacuggaauuacaaagcagaauuaaaauuaua

SEQ ID NO: 316218 - RNA, 32 nt, Homo Sapiens
acuugucucccauuuugagaguuccuaucuaa

SEQ ID NO: 316219 - RNA, 32 nt, Homo Sapiens
ccagccuuggcgacaaaccaagacccugucuc

SEQ ID NO: 316220 - RNA, 32 nt, Homo Sapiens
agagaggagaaguguauacauguuuuauuuua

SEQ ID NO: 316221 - RNA, 32 nt, Homo Sapiens
uaacagcccacuuuuauguuuccagagaaauu

SEQ ID NO: 316222 - RNA, 32 nt, Homo Sapiens
gcgacgcucacgaacgaucagagcugcgggcg

SEQ ID NO: 316223 - RNA, 32 nt, Homo Sapiens
gcagccuccgccucugggguucaagcgauccu

SEQ ID NO: 316224 - RNA, 32 nt, Homo Sapiens
ggcaguggagcaugcaucuggagggcagagac

SEQ ID NO: 316225 - RNA, 32 nt, Homo Sapiens
cauacuaguaacaaauguaaaauacaugaaac

SEQ ID NO: 316226 - RNA, 32 nt, Homo Sapiens
ucgccccgccgggcgucgcgggccaacauggg

SEQ ID NO: 316227 - RNA, 32 nt, Homo Sapiens
uaaccggcauuugcugcuaaaggauacccaga

SEQ ID NO: 316228 - RNA, 32 nt, Homo Sapiens
aguuuacaacuuuuuaccaucgauguacacau

SEQ ID NO: 316229 - RNA, 32 nt, Homo Sapiens
auaagugaauauauacacacacauacagacac

SEQ ID NO: 316230 - RNA, 32 nt, Homo Sapiens
agaggagauuagcauggcccccugcgcgagga

SEQ ID NO: 316231 - RNA, 32 nt, Homo Sapiens
uuuugauuuguaacaaauauugugaucucaca

SEQ ID NO: 316232 - RNA, 32 nt, Homo Sapiens
gggcguggcugccacgauuuucaaaugggggu

SEQ ID NO: 316233 - RNA, 32 nt, Homo Sapiens
uacgcagucacugacuuccucaccuacaacug

SEQ ID NO: 316234 - RNA, 32 nt, Homo Sapiens
gagagaggcggcccgcgcugacggugucccug

SEQ ID NO: 316235 - RNA, 32 nt, Homo Sapiens
cgcagaggacaaaggagcacgucggcgccggg

SEQ ID NO: 316236 - RNA, 32 nt, Homo Sapiens
uucagagcauuguuagcaaggguccaugugau

SEQ ID NO: 316237 - RNA, 32 nt, Homo Sapiens
cugaggcucacagaagauagccccaguguuuu

SEQ ID NO: 316238 - RNA, 32 nt, Homo Sapiens
agagagaugauuacugcuuugacacuuccuuu

SEQ ID NO: 316239 - RNA, 32 nt, Homo Sapiens
agcugccugucggcugcccucugccacgcggg

SEQ ID NO: 316240 - RNA, 32 nt, Homo Sapiens
ccagccaagaugguugcccccgcagugaaggu

SEQ ID NO: 316241 - RNA, 32 nt, Homo Sapiens
aaauguuggcuucuaacuaaaacaggcagaua

SEQ ID NO: 316242 - RNA, 32 nt, Homo Sapiens
augacaaggcuauggaggaaacccgggcccaa

SEQ ID NO: 316243 - RNA, 32 nt, Homo Sapiens
acugcgggcaggucggcggaguuagauggcag

SEQ ID NO: 316244 - RNA, 32 nt, Homo Sapiens
gaguuugaccuaaaagucauuaaaauaacaug

SEQ ID NO: 316245 - RNA, 27 nt, Homo Sapiens
cauagccucuucuucaggcccuaauua

SEQ ID NO: 316246 - RNA, 32 nt, Homo Sapiens
ggaaagaccucaguugggcauucuuuaauagg

SEQ ID NO: 316247 - RNA, 32 nt, Homo Sapiens
guuucauccaauguggagaggagcguuguccu

SEQ ID NO: 316248 - RNA, 32 nt, Homo Sapiens
ugcuuuuugugauugcuuaugucauuagugcc

SEQ ID NO: 316249 - RNA, 32 nt, Homo Sapiens
uuuauagaaaauaaaaauauuuuuaugugccu

SEQ ID NO: 316250 - RNA, 32 nt, Homo Sapiens
uggguggauuuauguauuugaaaacucacaga

SEQ ID NO: 316251 - RNA, 32 nt, Homo Sapiens
acuguaguucccuuuggaagcccagucauagg

SEQ ID NO: 316252 - RNA, 32 nt, Homo Sapiens
ccauacaaauguuucuauuuuauuguuccuuc

SEQ ID NO: 316253 - RNA, 32 nt, Homo Sapiens
cuaaaauuaauacagcucugugggucuuccuu

SEQ ID NO: 316254 - RNA, 30 nt, Homo Sapiens
gcgaucagcgccucuccgccggccgggcua

SEQ ID NO: 316255 - RNA, 32 nt, Homo Sapiens
agagaggaggaagagggagucuggcaugaguu

SEQ ID NO: 316256 - RNA, 32 nt, Homo Sapiens
ugcccaucaaggaaaagcuguggcuaaugcuu

SEQ ID NO: 316257 - RNA, 32 nt, Homo Sapiens
ugcaguguuucugauccaaugauucaguaaug

SEQ ID NO: 316258 - RNA, 32 nt, Homo Sapiens
agcagaguaagauuacguucugauguaagcuu

SEQ ID NO: 316259 - RNA, 32 nt, Homo Sapiens
gcaggggcggggcuccugugcugcugcgcgcg

SEQ ID NO: 316260 - RNA, 32 nt, Homo Sapiens
aacguuaagugcuaguugugauuuuauacaua

SEQ ID NO: 316261 - RNA, 32 nt, Homo Sapiens
ccaagacugugacacccuuucuggggcucugu

SEQ ID NO: 316262 - RNA, 32 nt, Homo Sapiens
cgcgaccucugcgcgcccucaggccgccuucc

SEQ ID NO: 316263 - RNA, 32 nt, Homo Sapiens
ccuggaagucaggacucugcuuccucagggag

SEQ ID NO: 316264 - RNA, 32 nt, Homo Sapiens
uccugugaacaaaauucagagccuguuuguuu

SEQ ID NO: 316265 - RNA, 32 nt, Homo Sapiens
aauauaaacaaauguuuauauuuguugcuucu

SEQ ID NO: 316266 - RNA, 32 nt, Homo Sapiens
cagcuccuggggauuuugaccuuuuccccacc

SEQ ID NO: 316267 - RNA, 32 nt, Homo Sapiens
uucauacaaucgucuuaaguuuuuuaugccuu

SEQ ID NO: 316268 - RNA, 32 nt, Homo Sapiens
acucuucgucaucaccucuccuauucgccugg

SEQ ID NO: 316269 - RNA, 32 nt, Homo Sapiens
aacauccuuguacauguuuauacaucuuuuug

SEQ ID NO: 316270 - RNA, 32 nt, Homo Sapiens
ugggggcacagggugcaaagccaggcacugug

SEQ ID NO: 316271 - RNA, 32 nt, Homo Sapiens
cgggagccggaccgccgccggaggagcucgga

SEQ ID NO: 316272 - RNA, 32 nt, Homo Sapiens
uccacaggccuggccugggggcugugggacug

SEQ ID NO: 316273 - RNA, 32 nt, Homo Sapiens
aggagcaaccagagaccccccaauacuagaau

SEQ ID NO: 316274 - RNA, 32 nt, Homo Sapiens
gaggcugccaggugcuggcagcuggaagcauc

SEQ ID NO: 316275 - RNA, 32 nt, Homo Sapiens
cguccuguccccagccugcuugugucccguga

SEQ ID NO: 316276 - RNA, 32 nt, Homo Sapiens
cacugcacuccagccuggacaacagaguggga

SEQ ID NO: 316277 - RNA, 32 nt, Homo Sapiens
cauuaugcagagcacacaggacaggcuggugc

SEQ ID NO: 316278 - RNA, 32 nt, Homo Sapiens
aguuucuguccaccuuaaucgaaacaacacau

SEQ ID NO: 316279 - RNA, 32 nt, Homo Sapiens
auucuccugccucagcucccaaguagcugaga

SEQ ID NO: 316280 - RNA, 32 nt, Homo Sapiens
gcaaagaggggagggggaaaggauaguuaaau

SEQ ID NO: 316281 - RNA, 32 nt, Homo Sapiens
gaucugcagggcauugacccuuugcuuucccu

SEQ ID NO: 316282 - RNA, 32 nt, Homo Sapiens
uugcaguugccacagagcuggcuccuucucau

SEQ ID NO: 316283 - RNA, 31 nt, Homo Sapiens
gagggcuggcacugccucccggauccugccg

SEQ ID NO: 316284 - RNA, 32 nt, Homo Sapiens
ugacaucagagguaagagcaucuggaagugag

SEQ ID NO: 316285 - RNA, 32 nt, Homo Sapiens
cgaagacuaaccucaccagccagucaucuaca

SEQ ID NO: 316286 - RNA, 32 nt, Homo Sapiens
acuccuggauaaacuuuucuuuuuucccugag

SEQ ID NO: 316287 - RNA, 32 nt, Homo Sapiens
gccaagauucagaggaaaaugacuccagugug

SEQ ID NO: 316288 - RNA, 32 nt, Homo Sapiens
ggcaaagucggaagcucugugcugcugcuggc

SEQ ID NO: 316289 - RNA, 32 nt, Homo Sapiens
uguugcaaccucaccagaacagcugaagaaug

SEQ ID NO: 316290 - RNA, 32 nt, Homo Sapiens
caccugcgccucgcccgccgccgccucgggga

SEQ ID NO: 316291 - RNA, 32 nt, Homo Sapiens
agccguguaccccgcagagccgccagccccgg

SEQ ID NO: 316292 - RNA, 32 nt, Homo Sapiens
caugguggcagacaccuguagucccagcuacu

SEQ ID NO: 316293 - RNA, 31 nt, Homo Sapiens
aaccauuuguaaaacauuccaaauaauucca

SEQ ID NO: 316294 - RNA, 32 nt, Homo Sapiens
gccucuguuggccucccugaccuccccuccca

SEQ ID NO: 316295 - RNA, 32 nt, Homo Sapiens
augaguucuacaaggacaauagugaaaaagga

SEQ ID NO: 316296 - RNA, 29 nt, Homo Sapiens
guuauauuuauccaauaaagucauaaucg

SEQ ID NO: 316297 - RNA, 32 nt, Homo Sapiens
cggcgguggaggggacauaggaggcggccaug

SEQ ID NO: 316298 - RNA, 32 nt, Homo Sapiens
uuccuacagacuccaaccaaccauuauuuccc

SEQ ID NO: 316299 - RNA, 32 nt, Homo Sapiens
gaggcccaaagccccagaucauggugcuguag

SEQ ID NO: 316300 - RNA, 32 nt, Homo Sapiens
acaaaauaaugagaugcucugugcagucugag

SEQ ID NO: 316301 - RNA, 32 nt, Homo Sapiens
gggccccgccuccuuucuguuuuauuuuugag

SEQ ID NO: 316302 - RNA, 32 nt, Homo Sapiens
aggcagugcagguuguauauuugaacaggaag

SEQ ID NO: 316303 - RNA, 32 nt, Homo Sapiens
cugaacuuaagagcuuuaaauaugaggguugu

SEQ ID NO: 316304 - RNA, 32 nt, Homo Sapiens
cuaucugcuaaagcgaguaaaugccacaacug

SEQ ID NO: 316305 - RNA, 32 nt, Homo Sapiens
uuccucuauaaaauauggagauaauaauaccu

SEQ ID NO: 316306 - RNA, 32 nt, Homo Sapiens
cuggaugggcuacggcagcugaaguggacgcc

SEQ ID NO: 316307 - RNA, 32 nt, Homo Sapiens
ucuccgaggagcgcggcacgccgcgcaccaug

SEQ ID NO: 316308 - RNA, 32 nt, Homo Sapiens
ugggucuucccucucccugccucagccuccuc

SEQ ID NO: 316309 - RNA, 32 nt, Homo Sapiens
uaauggagagagagacagaggacccuccucac

SEQ ID NO: 316310 - RNA, 30 nt, Homo Sapiens
gucucaggcaggcagcugcgucuuguuggu

SEQ ID NO: 316311 - RNA, 32 nt, Homo Sapiens
gaaaauauccuuagucuuccaagcaaucugcu

SEQ ID NO: 316312 - RNA, 32 nt, Homo Sapiens
uuggagacauucaagcaaagguuggacaacua

SEQ ID NO: 316313 - RNA, 32 nt, Homo Sapiens
ucacauucuggucuaaggcuuauuuauuaaua

SEQ ID NO: 316314 - RNA, 32 nt, Homo Sapiens
gccuggaauaaaauauaaaacugaaauaaacc

SEQ ID NO: 316315 - RNA, 32 nt, Homo Sapiens
cuccuggcuaugcccugagaucagcgcuauuu

SEQ ID NO: 316316 - RNA, 32 nt, Homo Sapiens
cugccuuagagaguuuaaaaggugauaaaaaa

SEQ ID NO: 316317 - RNA, 32 nt, Homo Sapiens
gccugguauccugaggacacguggcccagcag

SEQ ID NO: 316318 - RNA, 32 nt, Homo Sapiens
agcgcucccucccccggaggcccccgcgccuu

SEQ ID NO: 316319 - RNA, 32 nt, Homo Sapiens
cauuucuuccacaagagcccaggccuccuaca

SEQ ID NO: 316320 - RNA, 32 nt, Homo Sapiens
aacaugaagucuuugaugugggcugaagauuu

SEQ ID NO: 316321 - RNA, 32 nt, Homo Sapiens
aaguuagucaauccugucauauaauaaaaaaa

SEQ ID NO: 316322 - RNA, 32 nt, Homo Sapiens
aucugggcaagcuaagaaagccugcugcucuc

SEQ ID NO: 316323 - RNA, 32 nt, Homo Sapiens
aggaaaaaaaauuuauggcuaaaaaggguagc

SEQ ID NO: 316324 - RNA, 32 nt, Homo Sapiens
cucagaaaaugucuuuucuuuaaaagauaggc

SEQ ID NO: 316325 - RNA, 32 nt, Homo Sapiens
guuacccuuuauguaaaagcucugcuacaugg

SEQ ID NO: 316326 - RNA, 32 nt, Homo Sapiens
gggaggccaaggugggcagaucaugaggucag

SEQ ID NO: 316327 - RNA, 32 nt, Homo Sapiens
gcauuuuacuuuguuaauaucuaguuuaguuc

SEQ ID NO: 316328 - RNA, 32 nt, Homo Sapiens
ggaggaccggugcgagugaggcagccccgagg

SEQ ID NO: 316329 - RNA, 32 nt, Homo Sapiens
uuauuuccagcaugcuaaaucccuacccacgu

SEQ ID NO: 316330 - RNA, 32 nt, Homo Sapiens
guuaggaaucagacuccuagcuuuuguuccag

SEQ ID NO: 316331 - RNA, 32 nt, Homo Sapiens
ugucagaguuuuaugucuuucugcuccucaaa

SEQ ID NO: 316332 - RNA, 32 nt, Homo Sapiens
uccagcuuguucuuucuuucucuucaguccuc

SEQ ID NO: 316333 - RNA, 32 nt, Homo Sapiens
aaccguaacagccaccagacaagcuucagugg

SEQ ID NO: 316334 - RNA, 32 nt, Homo Sapiens
ccgauggagcccugcguuccccggggacacag

SEQ ID NO: 316335 - RNA, 32 nt, Homo Sapiens
cuuuugcaguuuaaaauguugggaugccugag

SEQ ID NO: 316336 - RNA, 32 nt, Homo Sapiens
gaauaguuagacauggaaauuauuuuauaagc

SEQ ID NO: 316337 - RNA, 32 nt, Homo Sapiens
aucucuuugcuuaaaauugaguuucuuguaaa

SEQ ID NO: 316338 - RNA, 32 nt, Homo Sapiens
cguggugggcagcagggcugcccggcaggcuu

SEQ ID NO: 316339 - RNA, 32 nt, Homo Sapiens
augaaagcagcuucuccuuucugggcugggcu

SEQ ID NO: 316340 - RNA, 32 nt, Homo Sapiens
cuggcuucagaagaacgacaaaagccgguuuc

SEQ ID NO: 316341 - RNA, 32 nt, Homo Sapiens
aauauguagggguauuauuacauauuaucagu

SEQ ID NO: 316342 - RNA, 32 nt, Homo Sapiens
gagccccagcauggaggagaaccuggcauaga

SEQ ID NO: 316343 - RNA, 32 nt, Homo Sapiens
aaaacggugcugucaccucugccugggccuca

SEQ ID NO: 316344 - RNA, 32 nt, Homo Sapiens
gugcuuuccuuccaauaccccaguagcuuuua

SEQ ID NO: 316345 - RNA, 32 nt, Homo Sapiens
agaaaaaacccacugcuguacucuguacauga

SEQ ID NO: 316346 - RNA, 32 nt, Homo Sapiens
ucugucacucugcucuggucaagccccauuug

SEQ ID NO: 316347 - RNA, 32 nt, Homo Sapiens
ggccucccuccucgccgccccggaggcgaagc

SEQ ID NO: 316348 - RNA, 32 nt, Homo Sapiens
ccauuauggaaacacaucccuuguaagcuaaa

SEQ ID NO: 316349 - RNA, 32 nt, Homo Sapiens
auggcuagaagaaggagcucaguaaacuagaa

SEQ ID NO: 316350 - RNA, 32 nt, Homo Sapiens
aaguagaaccaugaagugacugucacacaugc

SEQ ID NO: 316351 - RNA, 32 nt, Homo Sapiens
ccgucgggagaaggccccguggagagcaccag

SEQ ID NO: 316352 - RNA, 32 nt, Homo Sapiens
uaaugaguuccgaagguucauggagaagaauc

SEQ ID NO: 316353 - RNA, 32 nt, Homo Sapiens
cacauaucucagggaguugaugaccuuguuuu

SEQ ID NO: 316354 - RNA, 32 nt, Homo Sapiens
uuucuagaauccacccucuugugcccuuaagc

SEQ ID NO: 316355 - RNA, 30 nt, Homo Sapiens
gagacugucugugaucaaugagccccuguc

SEQ ID NO: 316356 - RNA, 32 nt, Homo Sapiens
auucaucaauuuuauaaagaaaacaauauuga

SEQ ID NO: 316357 - RNA, 32 nt, Homo Sapiens
ucucuuucuaaagacaggagagauuauuuaca

SEQ ID NO: 316358 - RNA, 32 nt, Homo Sapiens
cgaguccccagcugugcaccagcuccccgccu

SEQ ID NO: 316359 - RNA, 32 nt, Homo Sapiens
gaucuucuucauggcugcugucucucugugga

SEQ ID NO: 316360 - RNA, 32 nt, Homo Sapiens
gcuuccaagccuuuugcuccagcccugcggcu

SEQ ID NO: 316361 - RNA, 30 nt, Homo Sapiens
ccucucucacacuuguauucucgacacaaa

SEQ ID NO: 316362 - RNA, 32 nt, Homo Sapiens
uucaccccaaagagacuacuagguuaccacuc

SEQ ID NO: 316363 - RNA, 32 nt, Homo Sapiens
ggugccguuuuuccuuagaaaucagagaaaug

SEQ ID NO: 316364 - RNA, 32 nt, Homo Sapiens
gaucuccgaagccccauccgcgcugagcgaga

SEQ ID NO: 316365 - RNA, 32 nt, Homo Sapiens
auuguuccugguuuuuuccagucagcagccuc

SEQ ID NO: 316366 - RNA, 32 nt, Homo Sapiens
ucuggaacauucagucuagaaagaaaacauug

SEQ ID NO: 316367 - RNA, 32 nt, Homo Sapiens
uggagcggggcacuccgcauggagcgggagua

SEQ ID NO: 316368 - RNA, 31 nt, Homo Sapiens
auucggaagcuccagaacccaggcccuaauc

SEQ ID NO: 316369 - RNA, 32 nt, Homo Sapiens
cgccuguggucccagcacuuuggcagguguga

SEQ ID NO: 316370 - RNA, 32 nt, Homo Sapiens
gcaggucugggugaaagagcugugaauggauu

SEQ ID NO: 316371 - RNA, 32 nt, Homo Sapiens
gggguucaggcauugucuuuuuuccuccuugu

SEQ ID NO: 316372 - RNA, 32 nt, Homo Sapiens
agccccagccccagccccagccccgccgcguc

SEQ ID NO: 316373 - RNA, 32 nt, Homo Sapiens
caacagcgcagggcagagcggcuggcgccgcc

SEQ ID NO: 316374 - RNA, 32 nt, Homo Sapiens
ucccuucauagaucuuuuuucuuuuuuuuaag

SEQ ID NO: 316375 - RNA, 32 nt, Homo Sapiens
acaggcuugagccacugcgccuggccuggucu

SEQ ID NO: 316376 - RNA, 32 nt, Homo Sapiens
aaguuggcaguucuugaacagcaucagauauc

SEQ ID NO: 316377 - RNA, 32 nt, Homo Sapiens
cgcgccacccgcuuccgcugcccgccggggaa

SEQ ID NO: 316378 - RNA, 32 nt, Homo Sapiens
uguuuuaaccuuugcaccuucucagugcugua

SEQ ID NO: 316379 - RNA, 32 nt, Homo Sapiens
ggcagucaggucgaaucaauucaccagcagcg

SEQ ID NO: 316380 - RNA, 32 nt, Homo Sapiens
uuuguuguuguugcauugcaguucuuuaugua

SEQ ID NO: 316381 - RNA, 32 nt, Homo Sapiens
ccuggcuacaaucaaaguuuuaccacagcaag

SEQ ID NO: 316382 - RNA, 32 nt, Homo Sapiens
ccuggcccuguucuccuccccaagucggcacc

SEQ ID NO: 316383 - RNA, 32 nt, Homo Sapiens
ucucccauuuccgcugcgugcacagaggggcu

SEQ ID NO: 316384 - RNA, 32 nt, Homo Sapiens
accuccugcccccacaccccgacccacaagua

SEQ ID NO: 316385 - RNA, 32 nt, Homo Sapiens
cggggacuggccgaggccccugcacccugcgc

SEQ ID NO: 316386 - RNA, 32 nt, Homo Sapiens
agucaucagagcaacucuaccugguauuauca

SEQ ID NO: 316387 - RNA, 32 nt, Homo Sapiens
gucuguuaucgaacacauucagugauaaagcu

SEQ ID NO: 316388 - RNA, 32 nt, Homo Sapiens
cuacaccuuucugcaccugauguaaaaugaca

SEQ ID NO: 316389 - RNA, 32 nt, Homo Sapiens
aaaucuuaaguaccaaugggaagcagggaauu

SEQ ID NO: 316390 - RNA, 32 nt, Homo Sapiens
gccgcucgugccugaagcagacgcugcacaag

SEQ ID NO: 316391 - RNA, 32 nt, Homo Sapiens
uuggggccggggucgggcacuccagcuuucuu

SEQ ID NO: 316392 - RNA, 32 nt, Homo Sapiens
uugccucccuucucaggcuggugcuggauccu

SEQ ID NO: 316393 - RNA, 32 nt, Homo Sapiens
ugaugccacaaaaacuaacugaugcagccacu

SEQ ID NO: 316394 - RNA, 32 nt, Homo Sapiens
aaagggaaaaaaauauaauaagaucaucuacc

SEQ ID NO: 316395 - RNA, 32 nt, Homo Sapiens
uacagaccuuggagacgcgauagauggguccu

SEQ ID NO: 316396 - RNA, 32 nt, Homo Sapiens
cagagauagaaagggcaugaaaauugauuauu

SEQ ID NO: 316397 - RNA, 32 nt, Homo Sapiens
uuacaggugugagccaccacgaucagccucua

SEQ ID NO: 316398 - RNA, 32 nt, Homo Sapiens
ucaaugagggcuuucuugggucagaggacuuc

SEQ ID NO: 316399 - RNA, 32 nt, Homo Sapiens
gaauuuaaaggaguuucuuaauuucgaccuug

SEQ ID NO: 316400 - RNA, 32 nt, Homo Sapiens
uucuccaucuucugugcuuuuuccccuaccug

SEQ ID NO: 316401 - RNA, 32 nt, Homo Sapiens
auagaaaagaaggaggagaggaguguaagucc

SEQ ID NO: 316402 - RNA, 32 nt, Homo Sapiens
gcgggauagcgggaccccggcggcgcggugcg

SEQ ID NO: 316403 - RNA, 32 nt, Homo Sapiens
gggcugggauguuggaggaagacgcggucaug

SEQ ID NO: 316404 - RNA, 32 nt, Homo Sapiens
auuuacaaaaaguugcaaaaauaaaaaccagu

SEQ ID NO: 316405 - RNA, 32 nt, Homo Sapiens
ccccucggcuccgacccgcccuccucaccacc

SEQ ID NO: 316406 - RNA, 32 nt, Homo Sapiens
cucugaauaaaauuauucugaaugauagcuua

SEQ ID NO: 316407 - RNA, 32 nt, Homo Sapiens
ucuccuaagaucugugaaugggauuaaggugg

SEQ ID NO: 316408 - RNA, 32 nt, Homo Sapiens
ccucaucucauuggauuggucuacacaucaag

SEQ ID NO: 316409 - RNA, 32 nt, Homo Sapiens
ucaggaaguuaucuggaaagauaccuggaugu

SEQ ID NO: 316410 - RNA, 32 nt, Homo Sapiens
uagacaauuccauuucuuucugguuauuauaa

SEQ ID NO: 316411 - RNA, 32 nt, Homo Sapiens
gaauguaagcaucuccgcugaacgacucccug

SEQ ID NO: 316412 - RNA, 32 nt, Homo Sapiens
ggugcccgagggugguggguguguccucucug

SEQ ID NO: 316413 - RNA, 32 nt, Homo Sapiens
gcugagccaauguguggccuagcggaagcugc

SEQ ID NO: 316414 - RNA, 31 nt, Homo Sapiens
gaaucuguggaccacauucaaggguguggca

SEQ ID NO: 316415 - RNA, 32 nt, Homo Sapiens
aaucacaucacuguaucuuuuacaucaauagc

SEQ ID NO: 316416 - RNA, 32 nt, Homo Sapiens
ggggagugggaagguaggugggaaaugacaag

SEQ ID NO: 316417 - RNA, 32 nt, Homo Sapiens
ucucaggagagccacaggugccacugccuccu

SEQ ID NO: 316418 - RNA, 32 nt, Homo Sapiens
acaagguuaucaggaacuuuguuuccuucugu

SEQ ID NO: 316419 - RNA, 32 nt, Homo Sapiens
uauauaucuaucuauuugaggaaaaaaaaaaa

SEQ ID NO: 316420 - RNA, 32 nt, Homo Sapiens
cuuuuuuucuacugccuacuacuaggagaaag

SEQ ID NO: 316421 - RNA, 32 nt, Homo Sapiens
cugggcgugcgcggccgcaaugaacugggagc

SEQ ID NO: 316422 - RNA, 32 nt, Homo Sapiens
accaggaggggccgccuacguaccccagcucc

SEQ ID NO: 316423 - RNA, 32 nt, Homo Sapiens
gccugugacuccucuccuccccggccccuacc

SEQ ID NO: 316424 - RNA, 32 nt, Homo Sapiens
auauguuugucaauaaacuuaugacgugaaaa

SEQ ID NO: 316425 - RNA, 32 nt, Homo Sapiens
aggcgggcaaagggcugaugucgguagucccc

SEQ ID NO: 316426 - RNA, 32 nt, Homo Sapiens
uuggcuccagcaugaaaacacguuuacaggaa

SEQ ID NO: 316427 - RNA, 32 nt, Homo Sapiens
ccccacucugucuccugcccccgggggccugu

SEQ ID NO: 316428 - RNA, 32 nt, Homo Sapiens
aauggcagaggggguuggggcugggacucugg

SEQ ID NO: 316429 - RNA, 32 nt, Homo Sapiens
guggaaaauauuagaaacuucuauguggaaaa

SEQ ID NO: 316430 - RNA, 32 nt, Homo Sapiens
ggcucucaaaucaaccugugccugugaugucc

SEQ ID NO: 316431 - RNA, 32 nt, Homo Sapiens
auauugguacugcccaguauauuuguaucagc

SEQ ID NO: 316432 - RNA, 32 nt, Homo Sapiens
uccaccugacaccagcacaucaggccugguuc

SEQ ID NO: 316433 - RNA, 32 nt, Homo Sapiens
agucuguuuuauuugcaguaaaccgaucucca

SEQ ID NO: 316434 - RNA, 32 nt, Homo Sapiens
uaaugugaguccugggccuuucugccuccuga

SEQ ID NO: 316435 - RNA, 32 nt, Homo Sapiens
gggccaagcuccccggaacccucggccgucgc

SEQ ID NO: 316436 - RNA, 32 nt, Homo Sapiens
gauuggagaagagcuucuggcaccagaacccu

SEQ ID NO: 316437 - RNA, 32 nt, Homo Sapiens
ggcuggccgcucacugcuugggcccccuugau

SEQ ID NO: 316438 - RNA, 32 nt, Homo Sapiens
aaaucagaaaaaauagaggaugcuuuauuaug

SEQ ID NO: 316439 - RNA, 32 nt, Homo Sapiens
uuuugcuuuuuuaaauucugauuuuauaugaa

SEQ ID NO: 316440 - RNA, 32 nt, Homo Sapiens
aagcaagaaaagaguucagaaacuacuguuuu

SEQ ID NO: 316441 - RNA, 32 nt, Homo Sapiens
cuucaugcagccggagcuccgcggcgggagcg

SEQ ID NO: 316442 - RNA, 32 nt, Homo Sapiens
agugcuaugcuugcacagccugcugaccauga

SEQ ID NO: 316443 - RNA, 32 nt, Homo Sapiens
uuuaaaguaguggauguuuuugaaguaucuaa

SEQ ID NO: 316444 - RNA, 32 nt, Homo Sapiens
cugcagagcugauggagugauguugugggcac

SEQ ID NO: 316445 - RNA, 32 nt, Homo Sapiens
acuuggucagauguuuauucuacauuguuccc

SEQ ID NO: 316446 - RNA, 32 nt, Homo Sapiens
caaaauuuauuacuuuuuaaaaaauaacaugc

SEQ ID NO: 316447 - RNA, 32 nt, Homo Sapiens
agcaacagaaaagcaguagaauccuaaaggac

SEQ ID NO: 316448 - RNA, 32 nt, Homo Sapiens
cagcaagugaacugucaggcggccgugaacuc

SEQ ID NO: 316449 - RNA, 32 nt, Homo Sapiens
gggcuggcuccuccccgugaauucugggcaca

SEQ ID NO: 316450 - RNA, 32 nt, Homo Sapiens
ugaccugcuuucuguuuuucaauaucauacau

SEQ ID NO: 316451 - RNA, 32 nt, Homo Sapiens
cuucuuaaguugcaggagggagcuuuucuccu

SEQ ID NO: 316452 - RNA, 32 nt, Homo Sapiens
gaggucuuggccauggggcugcggaggcugcu

SEQ ID NO: 316453 - RNA, 32 nt, Homo Sapiens
ucaugugugcgcgccggccacaccugcaguca

SEQ ID NO: 316454 - RNA, 32 nt, Homo Sapiens
ggcacgaggggcggccggugagggggaagcaa

SEQ ID NO: 316455 - RNA, 32 nt, Homo Sapiens
uccccggcagccaaucagggacaggcuggggg

SEQ ID NO: 316456 - RNA, 32 nt, Homo Sapiens
gguguauuuuuauuuuccugugacuguuuuug

SEQ ID NO: 316457 - RNA, 32 nt, Homo Sapiens
cgcccaucugcucuaagcugcuguguauuccc

SEQ ID NO: 316458 - RNA, 32 nt, Homo Sapiens
uggauuguggaagagaaaccuuauauuuacca

SEQ ID NO: 316459 - RNA, 32 nt, Homo Sapiens
aucgccuuccuggccugugccagucagauguu

SEQ ID NO: 316460 - RNA, 32 nt, Homo Sapiens
gauucggacuuccccgaggcuuacagagugac

SEQ ID NO: 316461 - RNA, 32 nt, Homo Sapiens
caguuucuaaaauggaauagacaggaaaagau

SEQ ID NO: 316462 - RNA, 32 nt, Homo Sapiens
cacaaaaaaagacaaaaaaaaaaaaagaaaau

SEQ ID NO: 316463 - RNA, 32 nt, Homo Sapiens
uagaggaagaccaaaugcugccaggacacgga

SEQ ID NO: 316464 - RNA, 32 nt, Homo Sapiens
agaaagaaaaaagaagcuagggcugggcgcgg

SEQ ID NO: 316465 - RNA, 32 nt, Homo Sapiens
gcuggugcugacccacaaggaccuccucucug

SEQ ID NO: 316466 - RNA, 32 nt, Homo Sapiens
gacagcaccgcgcaggagcggcuggaccaggg

SEQ ID NO: 316467 - RNA, 32 nt, Homo Sapiens
acugcgaagagcaaagcaucucuggaaaugaa

SEQ ID NO: 316468 - RNA, 32 nt, Homo Sapiens
uucuccuuuuguuuuucuuuuuuuuuuguuug

SEQ ID NO: 316469 - RNA, 32 nt, Homo Sapiens
aucugacuugccucuuguuucuguaaauaaaa

SEQ ID NO: 316470 - RNA, 32 nt, Homo Sapiens
cuagggagcugguggagaagguggcggccgcu

SEQ ID NO: 316471 - RNA, 32 nt, Homo Sapiens
agcagacuaugaauauuauaguauuauaggcc

SEQ ID NO: 316472 - RNA, 32 nt, Homo Sapiens
ugucaccaaccuccuccucguccuccuuuaaa

SEQ ID NO: 316473 - RNA, 32 nt, Homo Sapiens
cagcugcucgcuuccucccgggcucacuggag

SEQ ID NO: 316474 - RNA, 32 nt, Homo Sapiens
ccaauaaguggaagggaacagcgugguaacaa

SEQ ID NO: 316475 - RNA, 32 nt, Homo Sapiens
uuccucccacccaggcgcaaguuagggaagug

SEQ ID NO: 316476 - RNA, 32 nt, Homo Sapiens
cguaagggcuucacuuccuucuccggaggccu

SEQ ID NO: 316477 - RNA, 32 nt, Homo Sapiens
gucaccucagaauugggagacaucaguaagcu

SEQ ID NO: 316478 - RNA, 32 nt, Homo Sapiens
agacacagcacugaauucacaaacauuggacc

SEQ ID NO: 316479 - RNA, 32 nt, Homo Sapiens
aguacaggccaagaauugggggugggggagau

SEQ ID NO: 316480 - RNA, 32 nt, Homo Sapiens
cauuuuacuuuuuaucauugauguguucaaac

SEQ ID NO: 316481 - RNA, 32 nt, Homo Sapiens
cggacugcugguccccucuccuucccuccuuc

SEQ ID NO: 316482 - RNA, 32 nt, Homo Sapiens
gcuucauggggugguucuggcucagggucuca

SEQ ID NO: 316483 - RNA, 32 nt, Homo Sapiens
gagcagcagcagcagcagcaggagcccgccuc

SEQ ID NO: 316484 - RNA, 32 nt, Homo Sapiens
auccugcugugacgccacccucgagaccuucu

SEQ ID NO: 316485 - RNA, 32 nt, Homo Sapiens
ugggcagugcucagggccuccucggagccaaa

SEQ ID NO: 316486 - RNA, 32 nt, Homo Sapiens
uacagccucagccaaugaccccggcucggcgg

SEQ ID NO: 316487 - RNA, 32 nt, Homo Sapiens
cgagggauguuucugguuucauuucaaauaau

SEQ ID NO: 316488 - RNA, 32 nt, Homo Sapiens
cagaauuaagauaaacaaaauugauugcccca

SEQ ID NO: 316489 - RNA, 32 nt, Homo Sapiens
uagccccaaggcgcugagcagccccgggaaac

SEQ ID NO: 316490 - RNA, 32 nt, Homo Sapiens
ggagggugggcaggcaaccuccccgggcaggg

SEQ ID NO: 316491 - RNA, 32 nt, Homo Sapiens
guugcuggguugaagacgucaugcguauuaaa

SEQ ID NO: 316492 - RNA, 31 nt, Homo Sapiens
agauuuaugacaaaguccaguuuucaacaau

SEQ ID NO: 316493 - RNA, 32 nt, Homo Sapiens
uguuuaauuuucugggguguuuuuguuguugu

SEQ ID NO: 316494 - RNA, 32 nt, Homo Sapiens
acuguccugcgguuucauggccuuucuuccau

SEQ ID NO: 316495 - RNA, 32 nt, Homo Sapiens
uuugacaacuaaaauuaggacuguauaaguac

SEQ ID NO: 316496 - RNA, 32 nt, Homo Sapiens
aauuagccaggugugauggugcaugccuguaa

SEQ ID NO: 316497 - RNA, 32 nt, Homo Sapiens
aauuagccaggugugguggugcaugccuguag

SEQ ID NO: 316498 - RNA, 31 nt, Homo Sapiens
caauccaacaggacccacucgagccauccac

SEQ ID NO: 316499 - RNA, 32 nt, Homo Sapiens
cggacagagccuuacgugcccgagggcggggc

SEQ ID NO: 316500 - RNA, 32 nt, Homo Sapiens
cccaaaccucccgccaugccccggccccaacg

SEQ ID NO: 316501 - RNA, 32 nt, Homo Sapiens
uacuucuccacuuuuuagagcggcgucuuagu

SEQ ID NO: 316502 - RNA, 32 nt, Homo Sapiens
auggagcuuucagcuuugaacaaaaucccuuc

SEQ ID NO: 316503 - RNA, 32 nt, Homo Sapiens
aauauuacuccuauuucuuuuagauuuuaaug

SEQ ID NO: 316504 - RNA, 32 nt, Homo Sapiens
cuuccgucaagagcugucuuggaaggagaaag

SEQ ID NO: 316505 - RNA, 32 nt, Homo Sapiens
cccaucccaucccaccuugaaaaucgcugcuc

SEQ ID NO: 316506 - RNA, 32 nt, Homo Sapiens
gccucuuguuccagccucuuggaaugcccagc

SEQ ID NO: 316507 - RNA, 32 nt, Homo Sapiens
cccuaaauaaaaauuucauaugcugaacucag

SEQ ID NO: 316508 - RNA, 32 nt, Homo Sapiens
caaaagaccgggagaaagaaaagcugaaggag

SEQ ID NO: 316509 - RNA, 32 nt, Homo Sapiens
uuuacuagaaaggcaugaaaugaucaugggaa

SEQ ID NO: 316510 - RNA, 29 nt, Homo Sapiens
gaauguccggucccugugguguugccagg

SEQ ID NO: 316511 - RNA, 32 nt, Homo Sapiens
augcccagcaccagcucgcccuucugagaaag

SEQ ID NO: 316512 - RNA, 32 nt, Homo Sapiens
uuucuuuuugaaaaacuagugguggacacauu

SEQ ID NO: 316513 - RNA, 32 nt, Homo Sapiens
acauugaauuguauugcccuugucaguuauuu

SEQ ID NO: 316514 - RNA, 32 nt, Homo Sapiens
agggagguggguagccgggcucccaggcacgu

SEQ ID NO: 316515 - RNA, 32 nt, Homo Sapiens
ugcuagcagggccagccuugaacucgcuggac

SEQ ID NO: 316516 - RNA, 32 nt, Homo Sapiens
agucuuucuccuccagcccuucucuucaaugg

SEQ ID NO: 316517 - RNA, 32 nt, Homo Sapiens
cccacuuccuucccuccaguccccacucacuc

SEQ ID NO: 316518 - RNA, 32 nt, Homo Sapiens
ccuuggucaucccacauccccggaccccgccu

SEQ ID NO: 316519 - RNA, 32 nt, Homo Sapiens
uuuccucgugcgccugcagcccuugguucuug

SEQ ID NO: 316520 - RNA, 32 nt, Homo Sapiens
cugcggcaggaccagaggagcgagacgagcaa

SEQ ID NO: 316521 - RNA, 32 nt, Homo Sapiens
ugccagguucuugcaaacuuugaaaaacauua

SEQ ID NO: 316522 - RNA, 32 nt, Homo Sapiens
cuaggggcgggcccgcgugcacgcgcuuggcu

SEQ ID NO: 316523 - RNA, 32 nt, Homo Sapiens
uauguggugguuaagaucuuaaaggacaaagc

SEQ ID NO: 316524 - RNA, 32 nt, Homo Sapiens
uaauucaccaaggauccuuggcguggagucuu

SEQ ID NO: 316525 - RNA, 32 nt, Homo Sapiens
cugagggggcaagagggauagacugaaucugu

SEQ ID NO: 316526 - RNA, 32 nt, Homo Sapiens
ugcccccucccuucacagggguacagaaauua

SEQ ID NO: 316527 - RNA, 32 nt, Homo Sapiens
uguuacuggugccuggaacugaggggaguaug

SEQ ID NO: 316528 - RNA, 32 nt, Homo Sapiens
ugauccacggguugcacagaucuguggaagaa

SEQ ID NO: 316529 - RNA, 32 nt, Homo Sapiens
gcagccugcuuggccuggcagccucuuccugg

SEQ ID NO: 316530 - RNA, 32 nt, Homo Sapiens
aaaagaacaaggaaacaaaaguaacaaggcuu

SEQ ID NO: 316531 - RNA, 32 nt, Homo Sapiens
gugcuuaugguaccagaugcagcucaagagau

SEQ ID NO: 316532 - RNA, 32 nt, Homo Sapiens
aucacuccauucugcccuuccuuucccuccca

SEQ ID NO: 316533 - RNA, 32 nt, Homo Sapiens
gacauuuuagcuuuauugugucuuaaaaacaa

SEQ ID NO: 316534 - RNA, 32 nt, Homo Sapiens
aggaucgaguuuacaguugugaaaucuugaag

SEQ ID NO: 316535 - RNA, 32 nt, Homo Sapiens
ugcuuuaaaaauuaagaugaagauacagucau

SEQ ID NO: 316536 - RNA, 32 nt, Homo Sapiens
aauggaagacugagguuaagcaguggucccag

SEQ ID NO: 316537 - RNA, 32 nt, Homo Sapiens
ccagauccugaauaaagucaaaacucaaccaa

SEQ ID NO: 316538 - RNA, 32 nt, Homo Sapiens
accggcccgcggcagccugcgccgcgccaugg

SEQ ID NO: 316539 - RNA, 32 nt, Homo Sapiens
ugaucuucuggugggcagcuugauggcugaug

SEQ ID NO: 316540 - RNA, 32 nt, Homo Sapiens
cagcuugauauuucuaucaaacaaaugacuuu

SEQ ID NO: 316541 - RNA, 32 nt, Homo Sapiens
uugcuuggcguauccuugaggaccucauuauu

SEQ ID NO: 316542 - RNA, 32 nt, Homo Sapiens
ucggguaggaagguaugcugcagacauuuggu

SEQ ID NO: 316543 - RNA, 32 nt, Homo Sapiens
uuguguaaaugaaucuuggaaggcaaaagcua

SEQ ID NO: 316544 - RNA, 32 nt, Homo Sapiens
ccgcgaggccucugggguggguucgccaggag

SEQ ID NO: 316545 - RNA, 32 nt, Homo Sapiens
aagagagggucuuuaagagauaagauuuaggc

SEQ ID NO: 316546 - RNA, 32 nt, Homo Sapiens
cuaacgcgguccccggcacgcaccaucuguug

SEQ ID NO: 316547 - RNA, 32 nt, Homo Sapiens
ccuggccuugcuaugggaugcuuaccaaagga

SEQ ID NO: 316548 - RNA, 32 nt, Homo Sapiens
uagccccagccaaaacaaaagagcugaagaau

SEQ ID NO: 316549 - RNA, 32 nt, Homo Sapiens
auauagcugaagucaaaauauguaagaacaca

SEQ ID NO: 316550 - RNA, 32 nt, Homo Sapiens
aucagaucaaggacucuggauaauuggcauaa

SEQ ID NO: 316551 - RNA, 32 nt, Homo Sapiens
auuuucucaggcaguaggcauucuuuagucua

SEQ ID NO: 316552 - RNA, 32 nt, Homo Sapiens
ccugcccgccccaagcccugccccuccuguac

SEQ ID NO: 316553 - RNA, 32 nt, Homo Sapiens
gcaaaccauuuuccuaugcagccauaggaaaa

SEQ ID NO: 316554 - RNA, 32 nt, Homo Sapiens
gucuuuguccucuguacuugucucucuccuug

SEQ ID NO: 316555 - RNA, 32 nt, Homo Sapiens
gagcuucccucgcaccgcacaguccugggagc

SEQ ID NO: 316556 - RNA, 32 nt, Homo Sapiens
aggaggaggaggaggaggaggucguggaugac

SEQ ID NO: 316557 - RNA, 32 nt, Homo Sapiens
cacgggcccucccucccagcgcucugggagcc

SEQ ID NO: 316558 - RNA, 32 nt, Homo Sapiens
uuuuugcacucuuuaaauuugcuuuaaaaaua

SEQ ID NO: 316559 - RNA, 32 nt, Homo Sapiens
agguuuccugagugauauguugaggcacaauu

SEQ ID NO: 316560 - RNA, 32 nt, Homo Sapiens
cacaacuuguaaagggcacagccaagauucag

SEQ ID NO: 316561 - RNA, 32 nt, Homo Sapiens
gagacgccgcggcugcgacuaggcgcgcccag

SEQ ID NO: 316562 - RNA, 32 nt, Homo Sapiens
cagagaacugaauaaaccauuaacuggccauc

SEQ ID NO: 316563 - RNA, 32 nt, Homo Sapiens
cuucccuucaccuggugucuugaguagggcgu

SEQ ID NO: 316564 - RNA, 32 nt, Homo Sapiens
caagacuuuuucuaaaaagauaguggaaguuc

SEQ ID NO: 316565 - RNA, 32 nt, Homo Sapiens
gaagggcaauuaaccaucuggcugcuuguccc

SEQ ID NO: 316566 - RNA, 32 nt, Homo Sapiens
uccuucuggggaggagggaggacccaggacaa

SEQ ID NO: 316567 - RNA, 32 nt, Homo Sapiens
gcuucaggccacuuugagggguugcaggucag

SEQ ID NO: 316568 - RNA, 32 nt, Homo Sapiens
ccgggccgagcccgggggcgcuuucgcacgcg

SEQ ID NO: 316569 - RNA, 32 nt, Homo Sapiens
ggcagaagggagagagggaggggcagcuaugc

SEQ ID NO: 316570 - RNA, 32 nt, Homo Sapiens
caagcuuggaaagccaggacacaacgcugcug

SEQ ID NO: 316571 - RNA, 32 nt, Homo Sapiens
gcaguccccucgucucccuuucugggcagcuu

SEQ ID NO: 316572 - RNA, 28 nt, Homo Sapiens
ccucuuguuccugaaauguguuuccuuu

SEQ ID NO: 316573 - RNA, 32 nt, Homo Sapiens
cugcaguccguggucaucuagcccuacuccgc

SEQ ID NO: 316574 - RNA, 32 nt, Homo Sapiens
gcugcugcgcgcccgcgccuagagcugccgcc

SEQ ID NO: 316575 - RNA, 32 nt, Homo Sapiens
gagguuugcuuugcuuuuuuuucagaaguucc

SEQ ID NO: 316576 - RNA, 32 nt, Homo Sapiens
uguuguggagauguggcuggacagguuugcca

SEQ ID NO: 316577 - RNA, 32 nt, Homo Sapiens
aggcucugggcggcugcagaggccggccgucc

SEQ ID NO: 316578 - RNA, 32 nt, Homo Sapiens
caggggucuugaauuugggguuccucguaaga

SEQ ID NO: 316579 - RNA, 32 nt, Homo Sapiens
ccagguaauagucaucccucugaugguaaaag

SEQ ID NO: 316580 - RNA, 32 nt, Homo Sapiens
cgcguggucccggcccccuccacccgccgucu

SEQ ID NO: 316581 - RNA, 32 nt, Homo Sapiens
uauguaagauaaaauauuugcucaauucuuuu

SEQ ID NO: 316582 - RNA, 32 nt, Homo Sapiens
uguaacaaggaacacuaaaacaguguugauuc

SEQ ID NO: 316583 - RNA, 32 nt, Homo Sapiens
cucuggggauggugggugggggugucaauauc

SEQ ID NO: 316584 - RNA, 32 nt, Homo Sapiens
ggacucuacagagugcuugaccucaacacacu

SEQ ID NO: 316585 - RNA, 32 nt, Homo Sapiens
aaaaaacaaaacaaaaaggaggcacaaaaccc

SEQ ID NO: 316586 - RNA, 32 nt, Homo Sapiens
acaccuccuggcacaacaccaccuucuuuggg

SEQ ID NO: 316587 - RNA, 32 nt, Homo Sapiens
gucucauagauauauauuuuugaauaaagaug

SEQ ID NO: 316588 - RNA, 32 nt, Homo Sapiens
acaaaacuuuaauaauaccacuacugaccaag

SEQ ID NO: 316589 - RNA, 32 nt, Homo Sapiens
cuguuucauguagaauaguguuugucaacugu

SEQ ID NO: 316590 - RNA, 32 nt, Homo Sapiens
uucucuuccuugucucccacucuuucuucaua

SEQ ID NO: 316591 - RNA, 32 nt, Homo Sapiens
caugcggacuuacuuugguccuggaugaauaa

SEQ ID NO: 316592 - RNA, 32 nt, Homo Sapiens
uuuuauuugcuuaauauuagcuuugccccuuu

SEQ ID NO: 316593 - RNA, 32 nt, Homo Sapiens
aagugaauuuaaaaagagugcauaaaagcuug

SEQ ID NO: 316594 - RNA, 27 nt, Homo Sapiens
gccuccaugagaaucugguauuucuug

SEQ ID NO: 316595 - RNA, 32 nt, Homo Sapiens
ccucaggauuauguagcuuuuauuuuuuaugu

SEQ ID NO: 316596 - RNA, 32 nt, Homo Sapiens
cuagguagaaaguuaggaaagguccugaggac

SEQ ID NO: 316597 - RNA, 32 nt, Homo Sapiens
cagaagaaaaauacaggccagcugcccuugaa

SEQ ID NO: 316598 - RNA, 32 nt, Homo Sapiens
aacacaucacaucuaagaauaaaggcugccuc

SEQ ID NO: 316599 - RNA, 32 nt, Homo Sapiens
ggcacgguggcucaugccucuaaucccagcac

SEQ ID NO: 316600 - RNA, 28 nt, Homo Sapiens
cggacggggcggcuggccaggcagaggg

SEQ ID NO: 316601 - RNA, 32 nt, Homo Sapiens
acugccugcauggggggcgcggggagugacca

SEQ ID NO: 316602 - RNA, 32 nt, Homo Sapiens
acuaucuauugguuccauaacucuguaucaug

SEQ ID NO: 316603 - RNA, 32 nt, Homo Sapiens
cucuaaccuuggaagguuuugacaauauuucu

SEQ ID NO: 316604 - RNA, 30 nt, Homo Sapiens
cagaaaccacuugcuaaaagcgucucuaug

SEQ ID NO: 316605 - RNA, 32 nt, Homo Sapiens
ugaaugugaugaaugugggaaagccuuuaacu

SEQ ID NO: 316606 - RNA, 32 nt, Homo Sapiens
gcccccagcgcccccagcccagcccacucccc

SEQ ID NO: 316607 - RNA, 32 nt, Homo Sapiens
uaacaggugaagaucucgggagaccaugacua

SEQ ID NO: 316608 - RNA, 30 nt, Homo Sapiens
ccaagauggcggugcugucagcuccuggcc

SEQ ID NO: 316609 - RNA, 32 nt, Homo Sapiens
ugaauaaugaacuuugaguuugggugcaagca

SEQ ID NO: 316610 - RNA, 32 nt, Homo Sapiens
ucgaaauguuaauauuugauaaaucuagaaaa

SEQ ID NO: 316611 - RNA, 32 nt, Homo Sapiens
ggaggcggcugggcagggcggcguggggcuuc

SEQ ID NO: 316612 - RNA, 32 nt, Homo Sapiens
uagcggggccgcgucagcccggccggguacga

SEQ ID NO: 316613 - RNA, 32 nt, Homo Sapiens
ugccacugcauuccagccugguugacagagug

SEQ ID NO: 316614 - RNA, 32 nt, Homo Sapiens
cagaggcuggaggcagcggggagcuagggucc

SEQ ID NO: 316615 - RNA, 32 nt, Homo Sapiens
agucuccagugcaggguccccauccuaucuga

SEQ ID NO: 316616 - RNA, 32 nt, Homo Sapiens
uguaccaagauauuuugcucuugcuauuguuu

SEQ ID NO: 316617 - RNA, 32 nt, Homo Sapiens
acguagcucccaccccacccucuuccuguguc

SEQ ID NO: 316618 - RNA, 32 nt, Homo Sapiens
agauuauguuuucuuccuucugcagcagcuuu

SEQ ID NO: 316619 - RNA, 32 nt, Homo Sapiens
ccggcccccagccccggcacucgcucuccucc

SEQ ID NO: 316620 - RNA, 32 nt, Homo Sapiens
cguucaugggggacacaaggcuuuuaugcucc

SEQ ID NO: 316621 - RNA, 32 nt, Homo Sapiens
augagcuuccaagucccuuuccacuuuaaccu

SEQ ID NO: 316622 - RNA, 32 nt, Homo Sapiens
cagggaggggcggcgggggcgcacugaacauu

SEQ ID NO: 316623 - RNA, 32 nt, Homo Sapiens
accauaaaugaaucaucaaagcucacaccaaa

SEQ ID NO: 316624 - RNA, 32 nt, Homo Sapiens
gggguucucugcggaacagagcgcuagcuccc

SEQ ID NO: 316625 - RNA, 32 nt, Homo Sapiens
cggccccgcagggacccuccccagaccgccug

SEQ ID NO: 316626 - RNA, 32 nt, Homo Sapiens
agugggagaugaaggacaaaaguaaaacccuu

SEQ ID NO: 316627 - RNA, 32 nt, Homo Sapiens
gaaugguggaaaucaguauuucuguuuguggu

SEQ ID NO: 316628 - RNA, 32 nt, Homo Sapiens
guauauugguaguuaucaauauagcaguacua

SEQ ID NO: 316629 - RNA, 32 nt, Homo Sapiens
ggcacuguggaggggcgccuaguaggcaggcg

SEQ ID NO: 316630 - RNA, 32 nt, Homo Sapiens
uggggagcucugcggugaugagcacggccauc

SEQ ID NO: 316631 - RNA, 32 nt, Homo Sapiens
cgacacucagggcagcugccuggccaugcugu

SEQ ID NO: 316632 - RNA, 32 nt, Homo Sapiens
ucucuaaaguaugguuaccaucagcauccaga

SEQ ID NO: 316633 - RNA, 32 nt, Homo Sapiens
cugacuuggccauguucucagcugagccacgc

SEQ ID NO: 316634 - RNA, 32 nt, Homo Sapiens
cucacagugcaaggcuuuugccaggcaucccc

SEQ ID NO: 316635 - RNA, 32 nt, Homo Sapiens
accauccaguugcaggaaaacaagcuugacac

SEQ ID NO: 316636 - RNA, 32 nt, Homo Sapiens
caaaacuccugccccuguucucuuccacucuc

SEQ ID NO: 316637 - RNA, 32 nt, Homo Sapiens
ugguauggccagggcugcaugcuuuauggagc

SEQ ID NO: 316638 - RNA, 32 nt, Homo Sapiens
uuugcuccucuggggcagcugcaccucgggcc

SEQ ID NO: 316639 - RNA, 32 nt, Homo Sapiens
gacgcgcgggagagggggcagaccccgcguua

SEQ ID NO: 316640 - RNA, 32 nt, Homo Sapiens
ggcucaagggaagcugggucugaggggagacu

SEQ ID NO: 316641 - RNA, 32 nt, Homo Sapiens
agcugcguuuugaaccgcguaggguucugggu

SEQ ID NO: 316642 - RNA, 32 nt, Homo Sapiens
uggccucugugccccagcagugccuugugcaa

SEQ ID NO: 316643 - RNA, 32 nt, Homo Sapiens
aaccuccaacucccugguuuaagggauucucc

SEQ ID NO: 316644 - RNA, 32 nt, Homo Sapiens
ccuacucccuggauguguguaccuagcacacu

SEQ ID NO: 316645 - RNA, 32 nt, Homo Sapiens
ccggcgauggucguuaacuccuuguauuuucu

SEQ ID NO: 316646 - RNA, 30 nt, Homo Sapiens
gggaacccuuugugcacccaucaccuagca

SEQ ID NO: 316647 - RNA, 32 nt, Homo Sapiens
gagcgggugaacuaagagcgggggcgagaucu

SEQ ID NO: 316648 - RNA, 32 nt, Homo Sapiens
accaggggauuuccaugauguuuuccaugagu

SEQ ID NO: 316649 - RNA, 32 nt, Homo Sapiens
gccacugcugccuuaggugcugccgcacgguu

SEQ ID NO: 316650 - RNA, 32 nt, Homo Sapiens
uuuguuuuugguuuuuuaugguuuuuuaagga

SEQ ID NO: 316651 - RNA, 32 nt, Homo Sapiens
ugaagucccagcauugaugacagcgccucauc

SEQ ID NO: 316652 - RNA, 30 nt, Homo Sapiens
ggcccaggcaggcagugcggagcuggccgu

SEQ ID NO: 316653 - RNA, 32 nt, Homo Sapiens
uuaacaucugugacuacuaaggaaaccuauuu

SEQ ID NO: 316654 - RNA, 32 nt, Homo Sapiens
ugcuuaccaaaggcuagugcgauguuucagga

SEQ ID NO: 316655 - RNA, 32 nt, Homo Sapiens
ccauagccuugucccccucucuuuugcaacuu

SEQ ID NO: 316656 - RNA, 32 nt, Homo Sapiens
agacuuuaucccaaagcaagagccuugcuugu

SEQ ID NO: 316657 - RNA, 32 nt, Homo Sapiens
guaccucagagucugaggauguuaacuuugga

SEQ ID NO: 316658 - RNA, 32 nt, Homo Sapiens
aguuccacugccuuccucucccucuccuucca

SEQ ID NO: 316659 - RNA, 32 nt, Homo Sapiens
uucuuuuauauugccuauauaagcaaaaaacc

SEQ ID NO: 316660 - RNA, 32 nt, Homo Sapiens
cuaggccaaccuggacuccuucaccccaaaug

SEQ ID NO: 316661 - RNA, 32 nt, Homo Sapiens
ccuuauuucuucauauuaauacauauguauac

SEQ ID NO: 316662 - RNA, 32 nt, Homo Sapiens
ccuaccaccuucugcuggaccugugcuugggc

SEQ ID NO: 316663 - RNA, 32 nt, Homo Sapiens
gagugcgcaugcgcagagcggccaacccguga

SEQ ID NO: 316664 - RNA, 32 nt, Homo Sapiens
acagccuauggggaacugcccuugacuccacc

SEQ ID NO: 316665 - RNA, 32 nt, Homo Sapiens
uguaauaguaacagccugauggucaaggguau

SEQ ID NO: 316666 - RNA, 32 nt, Homo Sapiens
ggaccagacaccuucauccuguccuugaagac

SEQ ID NO: 316667 - RNA, 32 nt, Homo Sapiens
cagguauggcagugacucaccugguuuuaaua

SEQ ID NO: 316668 - RNA, 32 nt, Homo Sapiens
gacccuuguuaaagaauugugaguuuaggaaa

SEQ ID NO: 316669 - RNA, 32 nt, Homo Sapiens
ucaguauuaggaauaagauacuuuuuauucca

SEQ ID NO: 316670 - RNA, 32 nt, Homo Sapiens
aggagcucagcaccucuuccagcccuuaaagc

SEQ ID NO: 316671 - RNA, 32 nt, Homo Sapiens
ccaccuucaaggaaccucaggcaccaacagug

SEQ ID NO: 316672 - RNA, 32 nt, Homo Sapiens
uauuauagucauuuuugagaugccuguagaga

SEQ ID NO: 316673 - RNA, 32 nt, Homo Sapiens
uaggaggucugcuuacugaaaacaaggagacc

SEQ ID NO: 316674 - RNA, 32 nt, Homo Sapiens
auuuuucaaaaauugaauuuuaaaauuucuua

SEQ ID NO: 316675 - RNA, 32 nt, Homo Sapiens
ugcuguacugucagccucucuguggaggcauu

SEQ ID NO: 316676 - RNA, 32 nt, Homo Sapiens
ccacauauugauuaacagcaaacaagucauua

SEQ ID NO: 316677 - RNA, 32 nt, Homo Sapiens
agagacucuggcggccuccguccaggagccug

SEQ ID NO: 316678 - RNA, 32 nt, Homo Sapiens
agaauacaagaguaggagauguagccagcagc

SEQ ID NO: 316679 - RNA, 32 nt, Homo Sapiens
uuguuggcccugucuguaauuuuuuuaaguug

SEQ ID NO: 316680 - RNA, 32 nt, Homo Sapiens
aagaaacccaagugggggcagagggcagaggc

SEQ ID NO: 316681 - RNA, 32 nt, Homo Sapiens
aaccucugucucccagguucaggugauucucc

SEQ ID NO: 316682 - RNA, 32 nt, Homo Sapiens
cgcuuccugcugauugccgccggccggaccau

SEQ ID NO: 316683 - RNA, 32 nt, Homo Sapiens
cuucaccauuuuuuuuucucucucuuuucauu

SEQ ID NO: 316684 - RNA, 32 nt, Homo Sapiens
caagcaucucaaccacaguuuuuguguuuacu

SEQ ID NO: 316685 - RNA, 32 nt, Homo Sapiens
gagggaaagggagggagaguuuugcggggguu

SEQ ID NO: 316686 - RNA, 32 nt, Homo Sapiens
gggacgaguuccagcccugccacugcccuggg

SEQ ID NO: 316687 - RNA, 32 nt, Homo Sapiens
aggaugcuguugagcacauugcagcuauguaa

SEQ ID NO: 316688 - RNA, 32 nt, Homo Sapiens
cccugcccggcccaagcucuacuuguguacag

SEQ ID NO: 316689 - RNA, 32 nt, Homo Sapiens
ugacccggguggcgggacaagacuugcuuccc

SEQ ID NO: 316690 - RNA, 32 nt, Homo Sapiens
gccuucccacccauucgccaacgcgggaaagg

SEQ ID NO: 316691 - RNA, 32 nt, Homo Sapiens
agcucaggccccagcacagcccggccucuggc

SEQ ID NO: 316692 - RNA, 32 nt, Homo Sapiens
uucacucugccuguuuucaaggggaguaagau

SEQ ID NO: 316693 - RNA, 32 nt, Homo Sapiens
cguggagaagacuggaggaaacucgaggaaga

SEQ ID NO: 316694 - RNA, 32 nt, Homo Sapiens
accuccucagauccugcaaggcugggucugcc

SEQ ID NO: 316695 - RNA, 32 nt, Homo Sapiens
gggcccuccauggcccgggccgcugcccuccu

SEQ ID NO: 316696 - RNA, 32 nt, Homo Sapiens
ggaacccggaacaauuccuucacagaacaauu

SEQ ID NO: 316697 - RNA, 32 nt, Homo Sapiens
gcuccugcccugcaggcuggcucccggggguc

SEQ ID NO: 316698 - RNA, 32 nt, Homo Sapiens
uggcccuggcccuccugcugcugcugguccag

SEQ ID NO: 316699 - RNA, 32 nt, Homo Sapiens
ccuaccuaggacccuuccuguggggggucuac

SEQ ID NO: 316700 - RNA, 32 nt, Homo Sapiens
cucaaucuggucugggagacgaauccugcuga

SEQ ID NO: 316701 - RNA, 32 nt, Homo Sapiens
gcuguggcaggagggcggcggcggcggcugcg

SEQ ID NO: 316702 - RNA, 32 nt, Homo Sapiens
gcacccccgcggccgcgcucaggcacaaaucc

SEQ ID NO: 316703 - RNA, 32 nt, Homo Sapiens
gacagugaacaaagccagcccaagcugguaag

SEQ ID NO: 316704 - RNA, 32 nt, Homo Sapiens
ugucagaggcccaugugaaaucuuucauucug

SEQ ID NO: 316705 - RNA, 32 nt, Homo Sapiens
cugcgcggcgcggcgggcgauccgagccggga

SEQ ID NO: 316706 - RNA, 32 nt, Homo Sapiens
ugcuuugggcauguccucuggagccccacaga

SEQ ID NO: 316707 - RNA, 32 nt, Homo Sapiens
ggugccagggcaggcagcucacguucugggga

SEQ ID NO: 316708 - RNA, 32 nt, Homo Sapiens
aacacggucugcaccuucuguugcuggugaua

SEQ ID NO: 316709 - RNA, 32 nt, Homo Sapiens
ccucuuggcuaccccgcgucggaggcuuagau

SEQ ID NO: 316710 - RNA, 32 nt, Homo Sapiens
cacacaaguaaaucuuuuuuucuugaauuuaa

SEQ ID NO: 316711 - RNA, 32 nt, Homo Sapiens
aaaucauuccuuaucucagaaaacagaaaccg

SEQ ID NO: 316712 - RNA, 32 nt, Homo Sapiens
gagcagccaaccccgggcgcgucggggccaug

SEQ ID NO: 316713 - RNA, 32 nt, Homo Sapiens
caucagagucagcuccaggaaccaucaugaau

SEQ ID NO: 316714 - RNA, 31 nt, Homo Sapiens
cccaggcugccggugcugagggacgcggagu

SEQ ID NO: 316715 - RNA, 32 nt, Homo Sapiens
caaaagcagcuuccgccgacugagcgcucacc

SEQ ID NO: 316716 - RNA, 32 nt, Homo Sapiens
uguuauuuuuauuuuggauauagcuuugaugu

SEQ ID NO: 316717 - RNA, 32 nt, Homo Sapiens
acauuuccaacauggcagcuucuagggaccua

SEQ ID NO: 316718 - RNA, 32 nt, Homo Sapiens
ccguguuugacuuucuuggagaggugaaagag

SEQ ID NO: 316719 - RNA, 32 nt, Homo Sapiens
ucuggggagggcacccuggucugugccuugug

SEQ ID NO: 316720 - RNA, 32 nt, Homo Sapiens
caucgcaggggggugaggcaccccccgcgaug

SEQ ID NO: 316721 - RNA, 32 nt, Homo Sapiens
aggaggcgcuggcucuuuggcggcucggagga

SEQ ID NO: 316722 - RNA, 32 nt, Homo Sapiens
aaaaaaagaauaacuuuuuuugccucuuuaga

SEQ ID NO: 316723 - RNA, 28 nt, Homo Sapiens
aaggggaaagauuugcagcuuugccaaa

SEQ ID NO: 316724 - RNA, 32 nt, Homo Sapiens
guaagcugcauaauucauucuacauuucuuca

SEQ ID NO: 316725 - RNA, 32 nt, Homo Sapiens
cagccuggcucugccccucccccaugggcugu

SEQ ID NO: 316726 - RNA, 32 nt, Homo Sapiens
gcccgcagccucagccagggagucccagccgc

SEQ ID NO: 316727 - RNA, 32 nt, Homo Sapiens
auucucaugcuucagccucccaaguagcuagg

SEQ ID NO: 316728 - RNA, 32 nt, Homo Sapiens
uaucacauauauauguuuuuuguauauguaua

SEQ ID NO: 316729 - RNA, 32 nt, Homo Sapiens
agaagggagguagcuggcugcuugucuccaaa

SEQ ID NO: 316730 - RNA, 32 nt, Homo Sapiens
cgcauuaggaccagucuggguuuuaaggcucu

SEQ ID NO: 316731 - RNA, 32 nt, Homo Sapiens
caggcgcccucccggucccccacacccgugca

SEQ ID NO: 316732 - RNA, 32 nt, Homo Sapiens
aucuguaucaaauuauuuuggauguaaagauu

SEQ ID NO: 316733 - RNA, 32 nt, Homo Sapiens
aauuuugucaaauacuuuuucuugacugauau

SEQ ID NO: 316734 - RNA, 28 nt, Homo Sapiens
uuccugaauauuuaaauguguuuguaug

SEQ ID NO: 316735 - RNA, 32 nt, Homo Sapiens
gauucaaggggaggagaaauagaguccacuuc

SEQ ID NO: 316736 - RNA, 32 nt, Homo Sapiens
ggagcuguagcggcacuguaacugcgagggca

SEQ ID NO: 316737 - RNA, 32 nt, Homo Sapiens
gguggcugggacuacaggcgcgugccaccacg

SEQ ID NO: 316738 - RNA, 32 nt, Homo Sapiens
cuaccaggagucacugccagggcugccguucu

SEQ ID NO: 316739 - RNA, 32 nt, Homo Sapiens
cauuuggagcaucuugaaaagcuggagcuuca

SEQ ID NO: 316740 - RNA, 32 nt, Homo Sapiens
cugagaggccccaagaagcugagcuggcagag

SEQ ID NO: 316741 - RNA, 32 nt, Homo Sapiens
ugaccucaaaccauuguuuuuauucuuacacg

SEQ ID NO: 316742 - RNA, 32 nt, Homo Sapiens
cuuuccuguccccaagccguucuagacgcgga

SEQ ID NO: 316743 - RNA, 32 nt, Homo Sapiens
cagaugggcccagcgcccuuccccucaaccaa

SEQ ID NO: 316744 - RNA, 32 nt, Homo Sapiens
uguacggcaaggggcgggaacuggaacuuggc

SEQ ID NO: 316745 - RNA, 32 nt, Homo Sapiens
uggcacugucuccucucaagccugguuguagu

SEQ ID NO: 316746 - RNA, 32 nt, Homo Sapiens
ccggccuaugauucuuuuuuuuuuuuuuuuuu

SEQ ID NO: 316747 - RNA, 32 nt, Homo Sapiens
guggccaagaaggugaguuuauguaaagauau

SEQ ID NO: 316748 - RNA, 32 nt, Homo Sapiens
ccucccccgccagccccaagcugggccgaggc

SEQ ID NO: 316749 - RNA, 32 nt, Homo Sapiens
acauaggcggccagcuccccagcccggcuuuc

SEQ ID NO: 316750 - RNA, 32 nt, Homo Sapiens
acggagccgagccaugugucuuuacaccucgc

SEQ ID NO: 316751 - RNA, 32 nt, Homo Sapiens
aggcugaggaccagcccuggcccugccccgcc

SEQ ID NO: 316752 - RNA, 32 nt, Homo Sapiens
aguuuaaacaauuugucaaaaauuuucugucu

SEQ ID NO: 316753 - RNA, 32 nt, Homo Sapiens
gguccuccuuuggccuggacccaggacuuaau

SEQ ID NO: 316754 - RNA, 32 nt, Homo Sapiens
cugaccugugacuuauacugcucuuaccgaug

SEQ ID NO: 316755 - RNA, 32 nt, Homo Sapiens
uaaccuugauaaaagguuagaggaauugcuaa

SEQ ID NO: 316756 - RNA, 32 nt, Homo Sapiens
cagccuuuuaucauacuacuguugcuaguacu

SEQ ID NO: 316757 - RNA, 32 nt, Homo Sapiens
gaccaccaacagcaacagcagcuccuccuccg

SEQ ID NO: 316758 - RNA, 32 nt, Homo Sapiens
cuuuguuguaggaugcauaauaaaauacauga

SEQ ID NO: 316759 - RNA, 32 nt, Homo Sapiens
acugguggaugcuggugggaaaacacagguaa

SEQ ID NO: 316760 - RNA, 32 nt, Homo Sapiens
cccauaauuugcuuuaguaaagucacuuuaug

SEQ ID NO: 316761 - RNA, 32 nt, Homo Sapiens
aaacgauccuucccccucagccucccgaguau

SEQ ID NO: 316762 - RNA, 32 nt, Homo Sapiens
aacgccuggugccccagcaccaaccuuccaag

SEQ ID NO: 316763 - RNA, 32 nt, Homo Sapiens
gcugcgugagacuccggcuccaggcguucgca

SEQ ID NO: 316764 - RNA, 32 nt, Homo Sapiens
ggccugggguggaaaggcaggggagggagggu

SEQ ID NO: 316765 - RNA, 32 nt, Homo Sapiens
gcguguuucagggucucucgucucucuccuac

SEQ ID NO: 316766 - RNA, 28 nt, Homo Sapiens
aggaacucaaaguaacauuugauuuccc

SEQ ID NO: 316767 - RNA, 28 nt, Homo Sapiens
ucuuggagaugucggccaggugcuccca

SEQ ID NO: 316768 - RNA, 32 nt, Homo Sapiens
ccgccgcgccgccgucgcucuccaacgccagc

SEQ ID NO: 316769 - RNA, 32 nt, Homo Sapiens
uggaugcccacccaccacugagccucauggag

SEQ ID NO: 316770 - RNA, 32 nt, Homo Sapiens
auacuuacaggggaaauuaauauuuugacuau

SEQ ID NO: 316771 - RNA, 32 nt, Homo Sapiens
agaacugcagcccuuauucagaauugagcagu

SEQ ID NO: 316772 - RNA, 32 nt, Homo Sapiens
ggucuucaacauggucuagagcuuaccaguga

SEQ ID NO: 316773 - RNA, 32 nt, Homo Sapiens
uucugcugagccagcucugcuuccuggccucg

SEQ ID NO: 316774 - RNA, 32 nt, Homo Sapiens
ggagggauaaaacaucucggcaccuaguaaug

SEQ ID NO: 316775 - RNA, 32 nt, Homo Sapiens
uuuuuguuuuuucacuaacaacagauaaggua

SEQ ID NO: 316776 - RNA, 32 nt, Homo Sapiens
gugugacguuuuaguaucuggagcucagugau

SEQ ID NO: 316777 - RNA, 32 nt, Homo Sapiens
ucaucccggcgcccagggucaccuucccacgg

SEQ ID NO: 316778 - RNA, 32 nt, Homo Sapiens
ugucucauuuuaauguaaagauuugcuuccau

SEQ ID NO: 316779 - RNA, 32 nt, Homo Sapiens
ggguuuuguaaguggaacucuggauugacugg

SEQ ID NO: 316780 - RNA, 32 nt, Homo Sapiens
uagcuggucccaucacggggccccuguuuugc

SEQ ID NO: 316781 - RNA, 32 nt, Homo Sapiens
ggcucgcuagccguccugcgggacgccggcgc

SEQ ID NO: 316782 - RNA, 32 nt, Homo Sapiens
uaagaagcgaacaaaaaguaauguauaucugu

SEQ ID NO: 316783 - RNA, 32 nt, Homo Sapiens
agaaucaggggagaggagaggccugauggggc

SEQ ID NO: 316784 - RNA, 32 nt, Homo Sapiens
cucacgcgccgcggccgauccccccgguucac

SEQ ID NO: 316785 - RNA, 32 nt, Homo Sapiens
cgcggccgguuuggucuggggaccacgggcug

SEQ ID NO: 316786 - RNA, 32 nt, Homo Sapiens
uaaauucgagggugaggcugucaagcgguccc

SEQ ID NO: 316787 - RNA, 32 nt, Homo Sapiens
aguggccuggaaauuuccgagcccgcgcggag

SEQ ID NO: 316788 - RNA, 32 nt, Homo Sapiens
ugugauugugccaaacaaaaaaugugccagaa

SEQ ID NO: 316789 - RNA, 32 nt, Homo Sapiens
gggugggcauuugaugcgggagguggguggug

SEQ ID NO: 316790 - RNA, 32 nt, Homo Sapiens
cccccagccggcccccaccuccgcuucccggu

SEQ ID NO: 316791 - RNA, 32 nt, Homo Sapiens
gucgggucgccggcuucaccggaccgcaggcu

SEQ ID NO: 316792 - RNA, 32 nt, Homo Sapiens
aggggaaaugaugugugaggcucuacaaggag

SEQ ID NO: 316793 - RNA, 32 nt, Homo Sapiens
ccuucuuaaaauguacccuucuuaaaauaaac

SEQ ID NO: 316794 - RNA, 32 nt, Homo Sapiens
caaaccuccccagaccagccaggccgccugcc

SEQ ID NO: 316795 - RNA, 32 nt, Homo Sapiens
aggugggccgcaggcgggaaaagcagcccuug

SEQ ID NO: 316796 - RNA, 32 nt, Homo Sapiens
uccaucaucaucaacugacuaaaauuaggggu

SEQ ID NO: 316797 - RNA, 31 nt, Homo Sapiens
acucugccaugcugagcuccaagggugcuac

SEQ ID NO: 316798 - RNA, 32 nt, Homo Sapiens
cgaccccggccauggggugcugcuacagcagc

SEQ ID NO: 316799 - RNA, 32 nt, Homo Sapiens
aguuaugauauuuggauggauuuuuaaauucu

SEQ ID NO: 316800 - RNA, 32 nt, Homo Sapiens
aacugccaguuaggaagaacaguaaacaguga

SEQ ID NO: 316801 - RNA, 32 nt, Homo Sapiens
caccaugugugcuguuuucagaugugauugag

SEQ ID NO: 316802 - RNA, 32 nt, Homo Sapiens
cuagccuguccacuuagcugaauaccaguuug

SEQ ID NO: 316803 - RNA, 32 nt, Homo Sapiens
uauguuuauuauuugcacagaagaguucuagg

SEQ ID NO: 316804 - RNA, 32 nt, Homo Sapiens
ucgucaucuuuuaacuaguguuucacaaggau

SEQ ID NO: 316805 - RNA, 32 nt, Homo Sapiens
caccauggaggcaggcucccccugccuuugaa

SEQ ID NO: 316806 - RNA, 32 nt, Homo Sapiens
acuagaauuguucauucuuucauucaucaaua

SEQ ID NO: 316807 - RNA, 32 nt, Homo Sapiens
gcaguacucaacaugaucacagagggagcgca

SEQ ID NO: 316808 - RNA, 32 nt, Homo Sapiens
cuguaguuacuggaagauaaaagggaaagcaa

SEQ ID NO: 316809 - RNA, 32 nt, Homo Sapiens
agaucauuuuaaaaaacugaaucuauauuaug

SEQ ID NO: 316810 - RNA, 32 nt, Homo Sapiens
ggccuguguuggcuguaggcaacgaaaggagc

SEQ ID NO: 316811 - RNA, 32 nt, Homo Sapiens
gagcaagguguaaauuaauuauuugaaagcaa

SEQ ID NO: 316812 - RNA, 32 nt, Homo Sapiens
ccugacucuaagucagugacuuugcucccauu

SEQ ID NO: 316813 - RNA, 32 nt, Homo Sapiens
gccacgguucuuccagaaccagcccugagcug

SEQ ID NO: 316814 - RNA, 32 nt, Homo Sapiens
aaagaaauaauucauuaucucuaguaauacau

SEQ ID NO: 316815 - RNA, 32 nt, Homo Sapiens
gaagucugaaaaucauuaugguauauaaucua

SEQ ID NO: 316816 - RNA, 32 nt, Homo Sapiens
uucuuuuuggaaauaaaauacuucuaccaaca

SEQ ID NO: 316817 - RNA, 32 nt, Homo Sapiens
aauguugugugauuuguguuauacugguugua

SEQ ID NO: 316818 - RNA, 32 nt, Homo Sapiens
gccuuauuucuucuucucuuuggugaccuaca

SEQ ID NO: 316819 - RNA, 32 nt, Homo Sapiens
aaacugggccgggaaccccuccccucaguguc

SEQ ID NO: 316820 - RNA, 32 nt, Homo Sapiens
uccuccaugggguggggaaggcaggcaugggg

SEQ ID NO: 316821 - RNA, 32 nt, Homo Sapiens
ggccuguaaucccagcacuuugggaggccgag

SEQ ID NO: 316822 - RNA, 32 nt, Homo Sapiens
aauuuccagcuauuucuagguauaaagagcag

SEQ ID NO: 316823 - RNA, 32 nt, Homo Sapiens
acuuuggucauguaucucugcaaagcaucaaa

SEQ ID NO: 316824 - RNA, 32 nt, Homo Sapiens
uacgauucucagggucccacuccuuccagauc

SEQ ID NO: 316825 - RNA, 32 nt, Homo Sapiens
gcauucuugaguggcagcgucuggacuccagg

SEQ ID NO: 316826 - RNA, 32 nt, Homo Sapiens
uuuuuauagagacaaggcaauguaacuuuuag

SEQ ID NO: 316827 - RNA, 32 nt, Homo Sapiens
auacauagcaaugguaaaaucaucaucuggau

SEQ ID NO: 316828 - RNA, 32 nt, Homo Sapiens
guuacccaucuguguccccaugcccaguucag

SEQ ID NO: 316829 - RNA, 32 nt, Homo Sapiens
cacccgcugggccagcagcucccaacggcgau

SEQ ID NO: 316830 - RNA, 32 nt, Homo Sapiens
gcugcauuucuuuuuauacuaaauaugugacu

SEQ ID NO: 316831 - RNA, 32 nt, Homo Sapiens
aagauauaagaacuaaauuugcuaaugacaua

SEQ ID NO: 316832 - RNA, 32 nt, Homo Sapiens
ggcagccaguugggcaguggcucacaaaguuc

SEQ ID NO: 316833 - RNA, 32 nt, Homo Sapiens
aucuuuucaauuaaaaucuuuagggccuguaa

SEQ ID NO: 316834 - RNA, 32 nt, Homo Sapiens
gagugagcugcggagccuggaauauggucggg

SEQ ID NO: 316835 - RNA, 32 nt, Homo Sapiens
cugguccacuacacaacacaggcgcugucccu

SEQ ID NO: 316836 - RNA, 30 nt, Homo Sapiens
ucccaguggagcgaucaccugugccucccc

SEQ ID NO: 316837 - RNA, 32 nt, Homo Sapiens
uccuacuaaaagaaguggccugcagaaguuua

SEQ ID NO: 316838 - RNA, 32 nt, Homo Sapiens
ccgguuugcuggaagcguucggaaauggcaac

SEQ ID NO: 316839 - RNA, 32 nt, Homo Sapiens
aacuaacaagguggugggucuuuacccacagc

SEQ ID NO: 316840 - RNA, 32 nt, Homo Sapiens
guccccggugguagcucaguuuuuggagugaa

SEQ ID NO: 316841 - RNA, 32 nt, Homo Sapiens
uguauuuuaugguggcaaauguuugguagaac

SEQ ID NO: 316842 - RNA, 32 nt, Homo Sapiens
agaaggggguggggcgggucuauggggagaaa

SEQ ID NO: 316843 - RNA, 32 nt, Homo Sapiens
aagagaauacucaaaaauauuuaaaacuguau

SEQ ID NO: 316844 - RNA, 32 nt, Homo Sapiens
ugccagcucccucuucccuuacuaggcucuau

SEQ ID NO: 316845 - RNA, 32 nt, Homo Sapiens
aggaccuugucaugggacugaugcugagcagg

SEQ ID NO: 316846 - RNA, 32 nt, Homo Sapiens
uuggcauuaaaccacaucauggaccaaaugug

SEQ ID NO: 316847 - RNA, 32 nt, Homo Sapiens
aauuaagguuuuucacuacaguucuugaauaa

SEQ ID NO: 316848 - RNA, 32 nt, Homo Sapiens
acccccacuccuacccagccagcccucaaaac

SEQ ID NO: 316849 - RNA, 32 nt, Homo Sapiens
aaacaaaaacaaaaacuguuagugaagguucc

SEQ ID NO: 316850 - RNA, 32 nt, Homo Sapiens
cacaaaauaugauucuauucauuuuaagcaca

SEQ ID NO: 316851 - RNA, 32 nt, Homo Sapiens
gaggccugccucuccuucccaagcccccuucc

SEQ ID NO: 316852 - RNA, 30 nt, Homo Sapiens
gaaugugccguuccugcccugccuccaccc

SEQ ID NO: 316853 - RNA, 31 nt, Homo Sapiens
ucccacagccucugccugccuuggcuaagca

SEQ ID NO: 316854 - RNA, 32 nt, Homo Sapiens
cuccaggacauuccuuucccagcuccagccug

SEQ ID NO: 316855 - RNA, 32 nt, Homo Sapiens
uuauauauauauauuuuuuuuuugguuaggaa

SEQ ID NO: 316856 - RNA, 32 nt, Homo Sapiens
uuuucauuaagaaaacaaaaguccucuggauu

SEQ ID NO: 316857 - RNA, 32 nt, Homo Sapiens
agauagguacuguuguuuuuuauuaccgccga

SEQ ID NO: 316858 - RNA, 32 nt, Homo Sapiens
gaaaauccauggaguuuuuucuuggcuuuugu

SEQ ID NO: 316859 - RNA, 32 nt, Homo Sapiens
aagaaaauggcagauuucuuuccauugugggc

SEQ ID NO: 316860 - RNA, 29 nt, Homo Sapiens
uuuacucaguguuucagaaguggagaaca

SEQ ID NO: 316861 - RNA, 32 nt, Homo Sapiens
caaaagaaugcccgaaucugggacaucuguca

SEQ ID NO: 316862 - RNA, 32 nt, Homo Sapiens
gaggagggggugccaccagucuguggacgaag

SEQ ID NO: 316863 - RNA, 32 nt, Homo Sapiens
uuccuuucacguauuucuuuuagcagcacuuc

SEQ ID NO: 316864 - RNA, 32 nt, Homo Sapiens
cuggccugccacuccuccugcuaugaugccug

SEQ ID NO: 316865 - RNA, 32 nt, Homo Sapiens
acccggaagcgggucgcguggagugacggucc

SEQ ID NO: 316866 - RNA, 32 nt, Homo Sapiens
gacuuuccggagcugccuggaacagagccugu

SEQ ID NO: 316867 - RNA, 32 nt, Homo Sapiens
uuucuuuaaugauuuugauccuaaaucugccu

SEQ ID NO: 316868 - RNA, 32 nt, Homo Sapiens
gccucuuccucccuucccuccccucccccuuc

SEQ ID NO: 316869 - RNA, 32 nt, Homo Sapiens
auugugcccuguacugcaguuacuuguuugaa

SEQ ID NO: 316870 - RNA, 32 nt, Homo Sapiens
cccgugggcagacaggggagccggggcuuugc

SEQ ID NO: 316871 - RNA, 32 nt, Homo Sapiens
acaguaaccaaaacagcauaguacuggcacaa

SEQ ID NO: 316872 - RNA, 32 nt, Homo Sapiens
guccgccaaccuccucagucucccaggccugg

SEQ ID NO: 316873 - RNA, 32 nt, Homo Sapiens
cucuccucucacccacaccccuggccauggcu

SEQ ID NO: 316874 - RNA, 32 nt, Homo Sapiens
acggcgcugcgcgcuccuucgccacgccgccg

SEQ ID NO: 316875 - RNA, 32 nt, Homo Sapiens
agugagaccccguuucuaaaauaaaaauaaaa

SEQ ID NO: 316876 - RNA, 32 nt, Homo Sapiens
caaugggggaaaagauaggaacaaagagaguu

SEQ ID NO: 316877 - RNA, 32 nt, Homo Sapiens
gagguaauauuguauagaauuuuauagccuac

SEQ ID NO: 316878 - RNA, 32 nt, Homo Sapiens
aaauaguaguugcagauccuguuuuuuacuaa

SEQ ID NO: 316879 - RNA, 32 nt, Homo Sapiens
cuugguuuagccccuuccuuucucugggcuca

SEQ ID NO: 316880 - RNA, 32 nt, Homo Sapiens
gagcuggagccaugggaggggcugggacugga

SEQ ID NO: 316881 - RNA, 32 nt, Homo Sapiens
uuaauguaaaauguccauuauugaagggaaaa

SEQ ID NO: 316882 - RNA, 32 nt, Homo Sapiens
acagucuccaugagaaagucaagaucagcuca

SEQ ID NO: 316883 - RNA, 32 nt, Homo Sapiens
aagugauaagaccagcagaagcagauauaaag

SEQ ID NO: 316884 - RNA, 29 nt, Homo Sapiens
aaguacaagagguuggauuuucuauguug

SEQ ID NO: 316885 - RNA, 32 nt, Homo Sapiens
gaacuuuucccucucuccuaagccccaguugc

SEQ ID NO: 316886 - RNA, 32 nt, Homo Sapiens
gccagcgcguccucgcagccaugagcagugag

SEQ ID NO: 316887 - RNA, 32 nt, Homo Sapiens
gaucucauauuuuuugcuuuuauuuuuaguau

SEQ ID NO: 316888 - RNA, 32 nt, Homo Sapiens
uuucaauguuauucuucaguccuauuuaaaaa

SEQ ID NO: 316889 - RNA, 32 nt, Homo Sapiens
gcaacagcaccuuccuccaccuggacacccag

SEQ ID NO: 316890 - RNA, 32 nt, Homo Sapiens
uguucguauuccuucuccccagccggcauaca

SEQ ID NO: 316891 - RNA, 32 nt, Homo Sapiens
ccgagauggaggcguguccucccgcccauccc

SEQ ID NO: 316892 - RNA, 32 nt, Homo Sapiens
uuuuuuacuuuuugauacuagugaugauggua

SEQ ID NO: 316893 - RNA, 32 nt, Homo Sapiens
cugugugucugauguuuguugcuaggacauau

SEQ ID NO: 316894 - RNA, 32 nt, Homo Sapiens
aggccuccuccauuuuagguccuuaauauucu

SEQ ID NO: 316895 - RNA, 32 nt, Homo Sapiens
auuuguuagacuuuuaaacaccagcuaaggua

SEQ ID NO: 316896 - RNA, 32 nt, Homo Sapiens
acaaaaagaauauuuuuuaaaccccaucaaaa

SEQ ID NO: 316897 - RNA, 32 nt, Homo Sapiens
ucuuccuagcagcuccuccuccucccucccaa

SEQ ID NO: 316898 - RNA, 32 nt, Homo Sapiens
uggaccuugggguuggugaauccuaaacagag

SEQ ID NO: 316899 - RNA, 32 nt, Homo Sapiens
uuggauggaaagaaauucugugugcucccagg

SEQ ID NO: 316900 - RNA, 32 nt, Homo Sapiens
auaccagagucuuacuaacuccuuugaaauac

SEQ ID NO: 316901 - RNA, 32 nt, Homo Sapiens
ucuccaggcucauaucccacuccacuccucug

SEQ ID NO: 316902 - RNA, 32 nt, Homo Sapiens
gugauguuuaagccaaugucagggcaaggcaa

SEQ ID NO: 316903 - RNA, 32 nt, Homo Sapiens
auuaggguggucuacuugaggcagaugggaua

SEQ ID NO: 316904 - RNA, 31 nt, Homo Sapiens
cuucguguuguuaauguuccaagggauuugg

SEQ ID NO: 316905 - RNA, 32 nt, Homo Sapiens
accauuguuuaaauaaaaucaagcaaaugcuu

SEQ ID NO: 316906 - RNA, 32 nt, Homo Sapiens
ucuaguuuuuuacuuuuguuuauuuuuauggu

SEQ ID NO: 316907 - RNA, 32 nt, Homo Sapiens
ggagccccccacauccuccccuacaucccaga

SEQ ID NO: 316908 - RNA, 32 nt, Homo Sapiens
auaggcugauuuucuuuuuucuuuuuuuuuuu

SEQ ID NO: 316909 - RNA, 32 nt, Homo Sapiens
cuagaagaagauguggccaaagggcuagagcc

SEQ ID NO: 316910 - RNA, 32 nt, Homo Sapiens
caagcacugcugucaccucugccaaaucccgu

SEQ ID NO: 316911 - RNA, 32 nt, Homo Sapiens
caagcgacagaccggcggggcugggccucgca

SEQ ID NO: 316912 - RNA, 32 nt, Homo Sapiens
cugcucugggaaugcugcuuggacaacccuca

SEQ ID NO: 316913 - RNA, 32 nt, Homo Sapiens
gcacccuccuggaugaauaagccugugguuga

SEQ ID NO: 316914 - RNA, 32 nt, Homo Sapiens
ucuuuuaaaaauugaaauuuuaaaauauggag

SEQ ID NO: 316915 - RNA, 32 nt, Homo Sapiens
gagcacaucguuucuggugccucaucuaaagg

SEQ ID NO: 316916 - RNA, 32 nt, Homo Sapiens
cucugugcuuucauuccuagagauguuuuaua

SEQ ID NO: 316917 - RNA, 32 nt, Homo Sapiens
gcaaaggcugcucacuggcccgucuccucuca

SEQ ID NO: 316918 - RNA, 32 nt, Homo Sapiens
cauacguguauuacuuggucacuggaugcaga

SEQ ID NO: 316919 - RNA, 31 nt, Homo Sapiens
gaaucucauuugagaaguuggauaagaucuc

SEQ ID NO: 316920 - RNA, 32 nt, Homo Sapiens
gcacuucguaaggauaaugaugauuugaguua

SEQ ID NO: 316921 - RNA, 32 nt, Homo Sapiens
gcaauaauaauagaaauaaagggcacaauaaa

SEQ ID NO: 316922 - RNA, 32 nt, Homo Sapiens
gacagugcccucgcccucggccccggggccug

SEQ ID NO: 316923 - RNA, 32 nt, Homo Sapiens
ucaagcaguccucccgcauuggccuccaaaag

SEQ ID NO: 316924 - RNA, 32 nt, Homo Sapiens
ggcuagcaguguggggcgcuauucccaccccu

SEQ ID NO: 316925 - RNA, 32 nt, Homo Sapiens
acaguggcggcuuuguggaguggagguggggg

SEQ ID NO: 316926 - RNA, 32 nt, Homo Sapiens
gcaagagaagggcggagaagggcggcuucuuc

SEQ ID NO: 316927 - RNA, 32 nt, Homo Sapiens
cuuuaaaaaauacucaaaaauauguaaguuuu

SEQ ID NO: 316928 - RNA, 32 nt, Homo Sapiens
ugugguuguguuucugaaggggauaaaagagg

SEQ ID NO: 316929 - RNA, 32 nt, Homo Sapiens
aucccaagcccagcccaccucccucccccggc

SEQ ID NO: 316930 - RNA, 32 nt, Homo Sapiens
cuccuaucagacuggcagaaauccaaagguuu

SEQ ID NO: 316931 - RNA, 32 nt, Homo Sapiens
caggcagcggccuccuugcuccccucccuuac

SEQ ID NO: 316932 - RNA, 32 nt, Homo Sapiens
gcaaaccugcaccuuccgccugauucccgauc

SEQ ID NO: 316933 - RNA, 32 nt, Homo Sapiens
uacugucuggggaugugugguuauaguucugu

SEQ ID NO: 316934 - RNA, 32 nt, Homo Sapiens
aggaaucuauuaauuuagaauuuuauaagaua

SEQ ID NO: 316935 - RNA, 32 nt, Homo Sapiens
ugcgucuucucucagcccuccacacacgcuca

SEQ ID NO: 316936 - RNA, 32 nt, Homo Sapiens
gacaaauauuacguuuaucuaguuagaagcua

SEQ ID NO: 316937 - RNA, 32 nt, Homo Sapiens
aacucugccucccagguucacgccauccuccu

SEQ ID NO: 316938 - RNA, 32 nt, Homo Sapiens
uuaaguuguuaauaaaaguacauguuaaacuu

SEQ ID NO: 316939 - RNA, 32 nt, Homo Sapiens
accugaaagaucucuuccuuucuggagcuccu

SEQ ID NO: 316940 - RNA, 32 nt, Homo Sapiens
aggccauacuuauuauccacaggguaacaggu

SEQ ID NO: 316941 - RNA, 32 nt, Homo Sapiens
ccugaagucuguguacuccgagguggaucucc

SEQ ID NO: 316942 - RNA, 32 nt, Homo Sapiens
cugggcuacuguauacaguguacaauguguau

SEQ ID NO: 316943 - RNA, 29 nt, Homo Sapiens
ccaggcuggggacaguggggcugaggguu

SEQ ID NO: 316944 - RNA, 32 nt, Homo Sapiens
ggaccccagccggcugcuggagcccagaggcc

SEQ ID NO: 316945 - RNA, 32 nt, Homo Sapiens
uucuugcgcuucuucaaaguuaauuuugucaa

SEQ ID NO: 316946 - RNA, 32 nt, Homo Sapiens
aaaaaucuauuaugaaagucaauaaaauagau

SEQ ID NO: 316947 - RNA, 32 nt, Homo Sapiens
ucagaagacguucuaaagucaguaagaaagug

SEQ ID NO: 316948 - RNA, 32 nt, Homo Sapiens
uugggacugauaagcucugugcuguguccaug

SEQ ID NO: 316949 - RNA, 31 nt, Homo Sapiens
cacuaaaaacaaaaauauaugugaauaaaau

SEQ ID NO: 316950 - RNA, 32 nt, Homo Sapiens
cugcucauuaggaugcuuuguaguuuuugccu

SEQ ID NO: 316951 - RNA, 32 nt, Homo Sapiens
gcuugcccgagccgugcgagccaggacuagga

SEQ ID NO: 316952 - RNA, 32 nt, Homo Sapiens
augaaaagauucccaauugaaaaaauuauuca

SEQ ID NO: 316953 - RNA, 32 nt, Homo Sapiens
gacaccagaugccaaagcugcccccaccccca

SEQ ID NO: 316954 - RNA, 32 nt, Homo Sapiens
caacaguuuacuauuugguaagaguggaauaa

SEQ ID NO: 316955 - RNA, 32 nt, Homo Sapiens
gauuuuuugaguuuuguuuguaagaugaucac

SEQ ID NO: 316956 - RNA, 32 nt, Homo Sapiens
ugucuuucucuggagcucuguuauuuugagua

SEQ ID NO: 316957 - RNA, 32 nt, Homo Sapiens
uuguaaagggaagaucaaagagccagaagucg

SEQ ID NO: 316958 - RNA, 32 nt, Homo Sapiens
uuuuuaccaaaaugaaucauuacucuauguug

SEQ ID NO: 316959 - RNA, 32 nt, Homo Sapiens
uggggagccagacagaggcugggggugauggc

SEQ ID NO: 316960 - RNA, 32 nt, Homo Sapiens
ugaaaugucuuacuguacaaaaagucuaagcc

SEQ ID NO: 316961 - RNA, 32 nt, Homo Sapiens
acagaucucugugccuggaaugggacugugcc

SEQ ID NO: 316962 - RNA, 32 nt, Homo Sapiens
cccggcccgggcccgcgguucuccacccguac

SEQ ID NO: 316963 - RNA, 32 nt, Homo Sapiens
uucuaccucaaccgcgagaccuaugcaaggac

SEQ ID NO: 316964 - RNA, 32 nt, Homo Sapiens
gcagcugcccucacuguuuuaaauaaagaauc

SEQ ID NO: 316965 - RNA, 32 nt, Homo Sapiens
ccaacaaaacaguaagggagcauuucagggag

SEQ ID NO: 316966 - RNA, 32 nt, Homo Sapiens
gcucuucugccacuccucccaccccguagcuc

SEQ ID NO: 316967 - RNA, 32 nt, Homo Sapiens
auuacucuccaaguugagagaugucuuugggu

SEQ ID NO: 316968 - RNA, 30 nt, Homo Sapiens
uaagggggcaggcgugugaguggacgccau

SEQ ID NO: 316969 - RNA, 32 nt, Homo Sapiens
agauaccauuuaugaaacauucuugcuauaac

SEQ ID NO: 316970 - RNA, 32 nt, Homo Sapiens
auuuuugggccacuccacggcaggucccuagc

SEQ ID NO: 316971 - RNA, 32 nt, Homo Sapiens
auguccaaagcaaauugugaagaucaaaugug

SEQ ID NO: 316972 - RNA, 32 nt, Homo Sapiens
cacuuuuuuucuuuuucuuuuucuuucuuugu

SEQ ID NO: 316973 - RNA, 32 nt, Homo Sapiens
cagaaguuuuaacuuccaguggcugguuucug

SEQ ID NO: 316974 - RNA, 32 nt, Homo Sapiens
cagcugcacauccuacagcggaacgacacuaa

SEQ ID NO: 316975 - RNA, 32 nt, Homo Sapiens
acgccacuaugaaacaaugcaauguucauuuu

SEQ ID NO: 316976 - RNA, 32 nt, Homo Sapiens
aggcaugagagggaucuagguuaugcuccuua

SEQ ID NO: 316977 - RNA, 32 nt, Homo Sapiens
auauaagggaaugcuauugguuuuuacacauu

SEQ ID NO: 316978 - RNA, 32 nt, Homo Sapiens
guucuuguacuauucgggcugcaucuucuuug

SEQ ID NO: 316979 - RNA, 32 nt, Homo Sapiens
gacuguugaagaaaauucaucugugaauuuuu

SEQ ID NO: 316980 - RNA, 32 nt, Homo Sapiens
aucugccuuggaaugcaaauaguucuuauuug

SEQ ID NO: 316981 - RNA, 32 nt, Homo Sapiens
gaaagcacaagugacuaguccuaugauguaca

SEQ ID NO: 316982 - RNA, 32 nt, Homo Sapiens
agcugagaggaucaacaacauaaauauacucg

SEQ ID NO: 316983 - RNA, 32 nt, Homo Sapiens
ugggcccuauugucugggucugggggcccuuu

SEQ ID NO: 316984 - RNA, 32 nt, Homo Sapiens
auguggauauuguaacuggccacaagaaugaa

SEQ ID NO: 316985 - RNA, 32 nt, Homo Sapiens
guccgccguagcuuuaccauuuuagugaggga

SEQ ID NO: 316986 - RNA, 32 nt, Homo Sapiens
auucucaccaccuucugguuaagcaaguguca

SEQ ID NO: 316987 - RNA, 32 nt, Homo Sapiens
ucugccagauaggggguaucugacccagucuu

SEQ ID NO: 316988 - RNA, 32 nt, Homo Sapiens
ucccacagcccuuucauuuccuccccacccca

SEQ ID NO: 316989 - RNA, 32 nt, Homo Sapiens
uuauggcuauuuuuacacgaugaugaauuuug

SEQ ID NO: 316990 - RNA, 32 nt, Homo Sapiens
acuucugucuccccggagcagcuccuccagcu

SEQ ID NO: 316991 - RNA, 32 nt, Homo Sapiens
ccauggccuugaugauucacuguuggggagaa

SEQ ID NO: 316992 - RNA, 32 nt, Homo Sapiens
gggaaaacuaaauuaucauaaagauagcauua

SEQ ID NO: 316993 - RNA, 32 nt, Homo Sapiens
cugaggcggaggaggagcugggacgaacaagg

SEQ ID NO: 316994 - RNA, 32 nt, Homo Sapiens
ugcccgaccccaucgugggaucucggcuccua

SEQ ID NO: 316995 - RNA, 32 nt, Homo Sapiens
ccugccaacugggaugacuggggagggccacg

SEQ ID NO: 316996 - RNA, 32 nt, Homo Sapiens
agcgugcgcgcgcguggccugaggcgcgcgcu

SEQ ID NO: 316997 - RNA, 32 nt, Homo Sapiens
aaagauuugggguuuucuaaaacuaaagaauc

SEQ ID NO: 316998 - RNA, 28 nt, Homo Sapiens
gagguugggcggccgccucgguuaacuc

SEQ ID NO: 316999 - RNA, 32 nt, Homo Sapiens
uuucuuuuuuuuucuuuuuuucaauaucagug

SEQ ID NO: 317000 - RNA, 32 nt, Homo Sapiens
gaaccuaaguaauaugauacaauuauaacguu

SEQ ID NO: 317001 - RNA, 32 nt, Homo Sapiens
gcgacggcgggcggccccgggcauguacgccc

SEQ ID NO: 317002 - RNA, 32 nt, Homo Sapiens
ggcauacagacuggggacccuggacaugcggg

SEQ ID NO: 317003 - RNA, 32 nt, Homo Sapiens
cuagguggccgcggcgggagugugcuggagcc

SEQ ID NO: 317004 - RNA, 32 nt, Homo Sapiens
gccaucccaagcccugggaaacauagcucaga

SEQ ID NO: 317005 - RNA, 32 nt, Homo Sapiens
uugcggcagggguggggcaggggugggagugg

SEQ ID NO: 317006 - RNA, 32 nt, Homo Sapiens
gggaucuuugucgcuagcucccggcccuucug

SEQ ID NO: 317007 - RNA, 32 nt, Homo Sapiens
ccacagccucccuguccaagaagugcuguuga

SEQ ID NO: 317008 - RNA, 32 nt, Homo Sapiens
cagaggccgccauuuuggauucuuauggacaa

SEQ ID NO: 317009 - RNA, 32 nt, Homo Sapiens
gucugggggucgggaguaggcuggggacauca

SEQ ID NO: 317010 - RNA, 32 nt, Homo Sapiens
uuacauugccauccaugauuuaacagacugua

SEQ ID NO: 317011 - RNA, 32 nt, Homo Sapiens
ccuggagcacaugagguuaaacaaagggcccu

SEQ ID NO: 317012 - RNA, 32 nt, Homo Sapiens
gagggcggagcggggagaagggagcugacggg

SEQ ID NO: 317013 - RNA, 32 nt, Homo Sapiens
ggagauuucuaaaaauuuaauguuuauuaaua

SEQ ID NO: 317014 - RNA, 32 nt, Homo Sapiens
gcaucuuucuuuaaagagacaccucuggaccu

SEQ ID NO: 317015 - RNA, 32 nt, Homo Sapiens
aucaacacauucaauggcuguuguuaaccuuu

SEQ ID NO: 317016 - RNA, 32 nt, Homo Sapiens
ccgagaagaucucagcuggaugccaacauguu

SEQ ID NO: 317017 - RNA, 32 nt, Homo Sapiens
ucuuuguuucguuuccucugcugucuucucca

SEQ ID NO: 317018 - RNA, 32 nt, Homo Sapiens
uuuaugucacagaagaaaaaacaaauaaaaac

SEQ ID NO: 317019 - RNA, 32 nt, Homo Sapiens
cccaaaauuauuaauuuuauuaggcuuuugga

SEQ ID NO: 317020 - RNA, 32 nt, Homo Sapiens
aggcgccaccccacccuuugagagccuggcgg

SEQ ID NO: 317021 - RNA, 32 nt, Homo Sapiens
aacauuucaaaagggagggaauucucugaaaa

SEQ ID NO: 317022 - RNA, 32 nt, Homo Sapiens
cuggggugugggaugcacggccucgugggggc

SEQ ID NO: 317023 - RNA, 32 nt, Homo Sapiens
uagaaacaacaucaguuuccuuguaagcaggu

SEQ ID NO: 317024 - RNA, 32 nt, Homo Sapiens
uccggcgcuucggucuccggagacgcccggcc

SEQ ID NO: 317025 - RNA, 32 nt, Homo Sapiens
gcucggugugacucaguuuccucacucccauu

SEQ ID NO: 317026 - RNA, 32 nt, Homo Sapiens
caauucuuguuuuagcacaucuguuauccgua

SEQ ID NO: 317027 - RNA, 32 nt, Homo Sapiens
aagccuauguguccuuguguccugcagguauc

SEQ ID NO: 317028 - RNA, 32 nt, Homo Sapiens
uuuugugaugaaaaggcagcauuugaauacuc

SEQ ID NO: 317029 - RNA, 32 nt, Homo Sapiens
uuguggauauaaaacuguuggguauucuacaa

SEQ ID NO: 317030 - RNA, 32 nt, Homo Sapiens
auuagaaauggcaucuguuuuaggucucaaaa

SEQ ID NO: 317031 - RNA, 32 nt, Homo Sapiens
ccccacggccccaccuuuccccauggagaaag

SEQ ID NO: 317032 - RNA, 32 nt, Homo Sapiens
ccagcugcgaggaccucugugguggaggaguu

SEQ ID NO: 317033 - RNA, 32 nt, Homo Sapiens
cucuuccauuuuauuuuauuuuauuuuuuuga

SEQ ID NO: 317034 - RNA, 32 nt, Homo Sapiens
uaucccuucaaauggacggucacuacagaaac

SEQ ID NO: 317035 - RNA, 32 nt, Homo Sapiens
guguuauuacgauaaaauguuacuacaaacuu

SEQ ID NO: 317036 - RNA, 32 nt, Homo Sapiens
gauaugcauauccaaaacauagauaaaaucau

SEQ ID NO: 317037 - RNA, 32 nt, Homo Sapiens
ccuacaaaggacacaaucucucuucuucaaau

SEQ ID NO: 317038 - RNA, 32 nt, Homo Sapiens
gacuuuguauaaaacaauaggauguuagaauc

SEQ ID NO: 317039 - RNA, 32 nt, Homo Sapiens
aaguaugcauaaauaaaugaguggcucagcac

SEQ ID NO: 317040 - RNA, 32 nt, Homo Sapiens
cauaaauguuugccgcucuauauuacaaguug

SEQ ID NO: 317041 - RNA, 30 nt, Homo Sapiens
gucacugugcuaauggugaccgggaaggga

SEQ ID NO: 317042 - RNA, 28 nt, Homo Sapiens
ccuuauuaaagaacucuuucugaaaccc

SEQ ID NO: 317043 - RNA, 32 nt, Homo Sapiens
ccugccgucaucacuauggcaggaaaacagag

SEQ ID NO: 317044 - RNA, 32 nt, Homo Sapiens
gauccucaugaggcuuuaauauguaaaaguga

SEQ ID NO: 317045 - RNA, 32 nt, Homo Sapiens
aguuugauuucauugggacagacugcaaagug

SEQ ID NO: 317046 - RNA, 32 nt, Homo Sapiens
caggagaggaaggagggcaggggcggaguugc

SEQ ID NO: 317047 - RNA, 32 nt, Homo Sapiens
auagaguacuacaaaaucauguugaugacuuc

SEQ ID NO: 317048 - RNA, 32 nt, Homo Sapiens
gguucauccauguugcugcaugugucagaauu

SEQ ID NO: 317049 - RNA, 32 nt, Homo Sapiens
aguuucccaguuuauaacuuuaugacaaugag

SEQ ID NO: 317050 - RNA, 32 nt, Homo Sapiens
uaacuugaugcccugcgggacaucagccuccc

SEQ ID NO: 317051 - RNA, 32 nt, Homo Sapiens
cucuauugcauguaauaccgccggcggcacuc

SEQ ID NO: 317052 - RNA, 32 nt, Homo Sapiens
uaucuuucuaugucucuuucugacauaguaau

SEQ ID NO: 317053 - RNA, 32 nt, Homo Sapiens
ccgccggggccggcccgcgggaucagcacagc

SEQ ID NO: 317054 - RNA, 32 nt, Homo Sapiens
gccuacuacgcaggcgcacgcugcgggcguca

SEQ ID NO: 317055 - RNA, 32 nt, Homo Sapiens
gcgaggcuggcauggggugcugaagugggguc

SEQ ID NO: 317056 - RNA, 32 nt, Homo Sapiens
uuuccuugcauuuucuuuuuuauucuauugcu

SEQ ID NO: 317057 - RNA, 32 nt, Homo Sapiens
gcuuuaaaaaaucccacaaauuuuaugaaauu

SEQ ID NO: 317058 - RNA, 32 nt, Homo Sapiens
agacuggaagcugaaauugaaucaucagucua

SEQ ID NO: 317059 - RNA, 32 nt, Homo Sapiens
gcccuggagguggcggccugcugcuguuaucu

SEQ ID NO: 317060 - RNA, 32 nt, Homo Sapiens
ggucugagucucugcuggcuaagccgccgccu

SEQ ID NO: 317061 - RNA, 32 nt, Homo Sapiens
auuucaauuuauuaguuuuucauuauucuaag

SEQ ID NO: 317062 - RNA, 32 nt, Homo Sapiens
uggaauggcagccuugguagcuaacaugggca

SEQ ID NO: 317063 - RNA, 32 nt, Homo Sapiens
uacucaaguugcuuagagagccaccaggguga

SEQ ID NO: 317064 - RNA, 32 nt, Homo Sapiens
cuuuaauacuuauuuugauuguaaaaaacuga

SEQ ID NO: 317065 - RNA, 32 nt, Homo Sapiens
uaaggguguuuguuagucucaaaacugugaag

SEQ ID NO: 317066 - RNA, 32 nt, Homo Sapiens
uguugggguccucccucccuuugcauucccac

SEQ ID NO: 317067 - RNA, 32 nt, Homo Sapiens
uuuaucaaggauuauccaucuugcuaauggcc

SEQ ID NO: 317068 - RNA, 32 nt, Homo Sapiens
gaaauucuuuaaagguuuaacgcuagauugug

SEQ ID NO: 317069 - RNA, 32 nt, Homo Sapiens
cguccucguggccuuagcccggacugugaguc

SEQ ID NO: 317070 - RNA, 32 nt, Homo Sapiens
ucuuccucuuuucucuacugguauguggguca

SEQ ID NO: 317071 - RNA, 27 nt, Homo Sapiens
ccgcgguccuucucagcgcccuacccg

SEQ ID NO: 317072 - RNA, 32 nt, Homo Sapiens
cccuguacccuggccugccuggguccagaucu

SEQ ID NO: 317073 - RNA, 32 nt, Homo Sapiens
cuaugcauuugacccaaccuuauuuauuauug

SEQ ID NO: 317074 - RNA, 32 nt, Homo Sapiens
aauccacccucaaagaggacuacuucggauac

SEQ ID NO: 317075 - RNA, 32 nt, Homo Sapiens
ucaaggaggucuucccauaggccugcaguagg

SEQ ID NO: 317076 - RNA, 32 nt, Homo Sapiens
cccgcacacuuauuccuccuccccucuucccg

SEQ ID NO: 317077 - RNA, 32 nt, Homo Sapiens
cuuaggaguaugcgccuguaacuauagcugag

SEQ ID NO: 317078 - RNA, 32 nt, Homo Sapiens
uaucauccacugcagcugcuaguuagaaaggu

SEQ ID NO: 317079 - RNA, 32 nt, Homo Sapiens
ggccauggcucuucuuguccuuccucuucuca

SEQ ID NO: 317080 - RNA, 32 nt, Homo Sapiens
cuaucagaaucuacauucuaaaacagaaauug

SEQ ID NO: 317081 - RNA, 32 nt, Homo Sapiens
uggaagcuuagggguucucaggugauagggag

SEQ ID NO: 317082 - RNA, 32 nt, Homo Sapiens
accaagaagaucugggcagcuucuguuccugc

SEQ ID NO: 317083 - RNA, 32 nt, Homo Sapiens
ccaaagagcugggauuacaggcgugagacacc

SEQ ID NO: 317084 - RNA, 32 nt, Homo Sapiens
guucaaaacacuuucagauagaagucuuucua

SEQ ID NO: 317085 - RNA, 32 nt, Homo Sapiens
aguguuauugacacagggucuuucuagcuuac

SEQ ID NO: 317086 - RNA, 32 nt, Homo Sapiens
gcuauguucuggaacccagugaaucuuggggg

SEQ ID NO: 317087 - RNA, 32 nt, Homo Sapiens
acagccuguucuaucaaucaccagcuguuuuc

SEQ ID NO: 317088 - RNA, 32 nt, Homo Sapiens
caccgcgcagguccuagggccgcggccgggcc

SEQ ID NO: 317089 - RNA, 32 nt, Homo Sapiens
uuuaauuccaacaacaauauuagucguaucca

SEQ ID NO: 317090 - RNA, 32 nt, Homo Sapiens
uucaguugucuccucccaucuucagaucauuc

SEQ ID NO: 317091 - RNA, 32 nt, Homo Sapiens
uauaacaaccucugcauauuccaggucuggca

SEQ ID NO: 317092 - RNA, 32 nt, Homo Sapiens
augaucugcccccugccagccucccacagugc

SEQ ID NO: 317093 - RNA, 32 nt, Homo Sapiens
cauguuugauuuuagcguuuccuuuguucuuc

SEQ ID NO: 317094 - RNA, 32 nt, Homo Sapiens
gagguugauuuuucuuuuuuccuaccguuuca

SEQ ID NO: 317095 - RNA, 32 nt, Homo Sapiens
uauaucaugaucuggguuuucuuuuuuccuuu

SEQ ID NO: 317096 - RNA, 32 nt, Homo Sapiens
aacaugccaccaagcccucuucgacagaaguc

SEQ ID NO: 317097 - RNA, 32 nt, Homo Sapiens
ugcccacuccggcuuguccucaucucuaccca

SEQ ID NO: 317098 - RNA, 32 nt, Homo Sapiens
gccauugucgaccuauugugggacauuuuuau

SEQ ID NO: 317099 - RNA, 32 nt, Homo Sapiens
agccgagauugugccacuguacuccagccugg

SEQ ID NO: 317100 - RNA, 32 nt, Homo Sapiens
agcugagauugugccacugcacuccagccugg

SEQ ID NO: 317101 - RNA, 32 nt, Homo Sapiens
auaggaauaacguuggaccauugugaguuaaa

SEQ ID NO: 317102 - RNA, 32 nt, Homo Sapiens
ugauauauaccugccgcuaacacacacacaca

SEQ ID NO: 317103 - RNA, 32 nt, Homo Sapiens
ggaagcggacgcccgguccccacacagcgccg

SEQ ID NO: 317104 - RNA, 32 nt, Homo Sapiens
cuuugagacagagggcaaugaugugugcaagu

SEQ ID NO: 317105 - RNA, 32 nt, Homo Sapiens
caauuuagucugaaacacaauugugcugaauc

SEQ ID NO: 317106 - RNA, 32 nt, Homo Sapiens
cgaagaaugacaauuuucuaccacugguguaa

SEQ ID NO: 317107 - RNA, 32 nt, Homo Sapiens
ugcaccugugcacacucacauccacccauaca

SEQ ID NO: 317108 - RNA, 32 nt, Homo Sapiens
uugcauguauauucuguuucuuucucauaaau

SEQ ID NO: 317109 - RNA, 32 nt, Homo Sapiens
auucucguguaacacuuguugcuuggcaacag

SEQ ID NO: 317110 - RNA, 32 nt, Homo Sapiens
cauucuucuucccuccuccccccauuaauaug

SEQ ID NO: 317111 - RNA, 32 nt, Homo Sapiens
uuauuuucucucugagguucugcauuagauuu

SEQ ID NO: 317112 - RNA, 32 nt, Homo Sapiens
gacuagcagcggggccaccuccacaaccacca

SEQ ID NO: 317113 - RNA, 32 nt, Homo Sapiens
uguaacuuggaggaagaugcuuagccugagcc

SEQ ID NO: 317114 - RNA, 32 nt, Homo Sapiens
gucaucugccagcugaccuccguguuccccca

SEQ ID NO: 317115 - RNA, 32 nt, Homo Sapiens
auuccagggacuuggcugggggugggaaacuu

SEQ ID NO: 317116 - RNA, 32 nt, Homo Sapiens
gcggaggaucuggagagggaaggggcgugcga

SEQ ID NO: 317117 - RNA, 32 nt, Homo Sapiens
ugguuucgguugcggcagucgcgucccgggag

SEQ ID NO: 317118 - RNA, 32 nt, Homo Sapiens
ucuccuggauccugcccugcucucagccauag

SEQ ID NO: 317119 - RNA, 32 nt, Homo Sapiens
gaauugccaucggucauguguugcaccguucu

SEQ ID NO: 317120 - RNA, 32 nt, Homo Sapiens
aagagcagcccucuggugggcgggaaaccagu

SEQ ID NO: 317121 - RNA, 32 nt, Homo Sapiens
agaauaugaugugaaaauuggaccucaaaggg

SEQ ID NO: 317122 - RNA, 32 nt, Homo Sapiens
caaugaaagggaggagacacaggcaagccuca

SEQ ID NO: 317123 - RNA, 32 nt, Homo Sapiens
ugcccgccucccacccacugugccuggagcca

SEQ ID NO: 317124 - RNA, 32 nt, Homo Sapiens
aggagcgcagugcccuccuuuuguguucagga

SEQ ID NO: 317125 - RNA, 32 nt, Homo Sapiens
uguguaacuuaaacauacuuugaaguggagga

SEQ ID NO: 317126 - RNA, 32 nt, Homo Sapiens
cccugcuuucgugcauuuuguaaaauauguuu

SEQ ID NO: 317127 - RNA, 32 nt, Homo Sapiens
guacguacaggcuuuuuauauaccaaaaguau

SEQ ID NO: 317128 - RNA, 32 nt, Homo Sapiens
ggugcuaaugaacaugauuuagcuuuaacacu

SEQ ID NO: 317129 - RNA, 32 nt, Homo Sapiens
acuuuguaauuugauuugauuauacuguaaag

SEQ ID NO: 317130 - RNA, 32 nt, Homo Sapiens
guccccagcuucuacagcuucaccagacccug

SEQ ID NO: 317131 - RNA, 31 nt, Homo Sapiens
cugagugugaagcgucucagaggcauuucag

SEQ ID NO: 317132 - RNA, 32 nt, Homo Sapiens
ugaguaguucauucuuuuuaucuuagaauaug

SEQ ID NO: 317133 - RNA, 32 nt, Homo Sapiens
aacacuauauuuuuaugcuacuuuccuguuug

SEQ ID NO: 317134 - RNA, 32 nt, Homo Sapiens
auucuuuuuacaaaacuauuuacuguagugua

SEQ ID NO: 317135 - RNA, 32 nt, Homo Sapiens
aggucacgugcccugaccccgccccgcagacg

SEQ ID NO: 317136 - RNA, 32 nt, Homo Sapiens
caugucugagaagaagcagagaaaaaaggugg

SEQ ID NO: 317137 - RNA, 32 nt, Homo Sapiens
ggaccauacagccccaggccaccggacuuuug

SEQ ID NO: 317138 - RNA, 32 nt, Homo Sapiens
acagagccccccaacacccccgugcucugcac

SEQ ID NO: 317139 - RNA, 32 nt, Homo Sapiens
uuccugcuggaacuuuucauauuucuguauaa

SEQ ID NO: 317140 - RNA, 32 nt, Homo Sapiens
cuuuuccuuccccaccccccagccuuagaugc

SEQ ID NO: 317141 - RNA, 32 nt, Homo Sapiens
agugcuaugagcauaguguguggacagguauc

SEQ ID NO: 317142 - RNA, 32 nt, Homo Sapiens
cacccuucugcccacaccaguuuccagugcgg

SEQ ID NO: 317143 - RNA, 32 nt, Homo Sapiens
aaagaagaaaaaaccaagcuuaggguauuuuu

SEQ ID NO: 317144 - RNA, 32 nt, Homo Sapiens
uuuuuguuuuuucuucuggggagggucuagaa

SEQ ID NO: 317145 - RNA, 32 nt, Homo Sapiens
ggaacuaauauaaaugaugacagucauggcug

SEQ ID NO: 317146 - RNA, 32 nt, Homo Sapiens
ggugugaagcugggagcagaucauguauuucc

SEQ ID NO: 317147 - RNA, 32 nt, Homo Sapiens
agucuucaccuccacacccucaucaccagccu

SEQ ID NO: 317148 - RNA, 32 nt, Homo Sapiens
uugaaggagaaagaagcauuguggcuuuauau

SEQ ID NO: 317149 - RNA, 32 nt, Homo Sapiens
gcaggaaagggaggguggaaggauggguagca

SEQ ID NO: 317150 - RNA, 32 nt, Homo Sapiens
guaagaaacaauuauaauuucuuuacauacuc

SEQ ID NO: 317151 - RNA, 32 nt, Homo Sapiens
cccaaugguccauacccuuacacucugaaguu

SEQ ID NO: 317152 - RNA, 32 nt, Homo Sapiens
gaaccgugggugucccuggcgccccaaggugc

SEQ ID NO: 317153 - RNA, 32 nt, Homo Sapiens
uucuguguucuggccuguggcagggccgggaa

SEQ ID NO: 317154 - RNA, 32 nt, Homo Sapiens
uguuuacuggggugggguggcgagaugggcuu

SEQ ID NO: 317155 - RNA, 32 nt, Homo Sapiens
gguggguuagacaggaaguaacugauaucacu

SEQ ID NO: 317156 - RNA, 32 nt, Homo Sapiens
uuuagaaaaagccugaugugggucuuacauaa

SEQ ID NO: 317157 - RNA, 32 nt, Homo Sapiens
gauuucucagccaaaaaucaucuuagaaucuu

SEQ ID NO: 317158 - RNA, 32 nt, Homo Sapiens
uguaauucuagaagauguccugauugaagugu

SEQ ID NO: 317159 - RNA, 32 nt, Homo Sapiens
gagcgguuugcccuuccugcuaacuccauuuc

SEQ ID NO: 317160 - RNA, 32 nt, Homo Sapiens
aaaucacaaagucauugucauuagaguguacu

SEQ ID NO: 317161 - RNA, 32 nt, Homo Sapiens
gcucgauguucccuccagcugguuaacugggc

SEQ ID NO: 317162 - RNA, 32 nt, Homo Sapiens
acuuuucaggacuuaauuuguuuggguuugcu

SEQ ID NO: 317163 - RNA, 32 nt, Homo Sapiens
gcggcgcgggugcugcgccuagcugcgcacca

SEQ ID NO: 317164 - RNA, 32 nt, Homo Sapiens
aaguggaaccaccugucuuuugcauagucaag

SEQ ID NO: 317165 - RNA, 32 nt, Homo Sapiens
ugaauuuuucaaguauacuaagaguaaagcaa

SEQ ID NO: 317166 - RNA, 32 nt, Homo Sapiens
gggacccggccgccagugcccggggaguagcc

SEQ ID NO: 317167 - RNA, 32 nt, Homo Sapiens
gcacuuacaauuuuuaaaauaguuuaugucau

SEQ ID NO: 317168 - RNA, 32 nt, Homo Sapiens
uuuuguuuuuauuuuugaacauuuuucuaaug

SEQ ID NO: 317169 - RNA, 32 nt, Homo Sapiens
uuuucaggcuaucauauauacuguauccugaa

SEQ ID NO: 317170 - RNA, 32 nt, Homo Sapiens
cuuuccugaaagaauaucauggccauccccac

SEQ ID NO: 317171 - RNA, 32 nt, Homo Sapiens
uacauuauuucaagguuauuuauuucaauggc

SEQ ID NO: 317172 - RNA, 32 nt, Homo Sapiens
gcgguguuugguuuuuuguucuugcgauaguu

SEQ ID NO: 317173 - RNA, 32 nt, Homo Sapiens
aacaugagggagcaucagaacuacuugagggg

SEQ ID NO: 317174 - RNA, 32 nt, Homo Sapiens
aagaacccuaaaauguuuuccaaaguggugug

SEQ ID NO: 317175 - RNA, 32 nt, Homo Sapiens
gaaggccacucugggcguuugggugggccaug

SEQ ID NO: 317176 - RNA, 32 nt, Homo Sapiens
gccggcugcccccaaaggucucaacuccucau

SEQ ID NO: 317177 - RNA, 32 nt, Homo Sapiens
gcaauaaugggggugggaaccacgaaaaauau

SEQ ID NO: 317178 - RNA, 32 nt, Homo Sapiens
cucuaggcaaaggaggcuuguauuuugcacau

SEQ ID NO: 317179 - RNA, 32 nt, Homo Sapiens
uguagggucuucaugucuuuucucugacuuua

SEQ ID NO: 317180 - RNA, 32 nt, Homo Sapiens
aaaugccaaacaaaucaaaaaaugcacgacuc

SEQ ID NO: 317181 - RNA, 32 nt, Homo Sapiens
cuucgacuuaguuuuucuucucuucuuugaca

SEQ ID NO: 317182 - RNA, 32 nt, Homo Sapiens
uauguaaucauuuaacaguauuaauuuuucca

SEQ ID NO: 317183 - RNA, 32 nt, Homo Sapiens
uagucauccaacaagaagaaauaugaaauucc

SEQ ID NO: 317184 - RNA, 32 nt, Homo Sapiens
guuaugcacugccugccauguaguuggggcac

SEQ ID NO: 317185 - RNA, 32 nt, Homo Sapiens
cucccggagcagcauuccagagccuccugcag

SEQ ID NO: 317186 - RNA, 32 nt, Homo Sapiens
cuccuccccuccccacagccuuaggccaacac

SEQ ID NO: 317187 - RNA, 32 nt, Homo Sapiens
ugauccaagacuaguuuguuaucucaucugga

SEQ ID NO: 317188 - RNA, 32 nt, Homo Sapiens
guggcugagggagagcagcggcggcggggagc

SEQ ID NO: 317189 - RNA, 32 nt, Homo Sapiens
ucaguguggcaugaggcccacgccacccaaac

SEQ ID NO: 317190 - RNA, 32 nt, Homo Sapiens
gucauuuccccauuuuauauuuuagaugguga

SEQ ID NO: 317191 - RNA, 31 nt, Homo Sapiens
cgagcgccgcgcagccucccggaccgcccug

SEQ ID NO: 317192 - RNA, 32 nt, Homo Sapiens
gcaaggcuagauaaaaagauguuagaaugaaa

SEQ ID NO: 317193 - RNA, 32 nt, Homo Sapiens
aucauauaauauaaaaucaugacuuuggcgaa

SEQ ID NO: 317194 - RNA, 32 nt, Homo Sapiens
acgguuuaggggaggggaaaagguugauauaa

SEQ ID NO: 317195 - RNA, 32 nt, Homo Sapiens
uucccaccuguaaaaugggaguucaauuagau

SEQ ID NO: 317196 - RNA, 32 nt, Homo Sapiens
agagaaaaacaguaaagguuccugagaggguu

SEQ ID NO: 317197 - RNA, 32 nt, Homo Sapiens
ggaucagccugaccacgcuccauacugggaga

SEQ ID NO: 317198 - RNA, 32 nt, Homo Sapiens
acacacaaacuguguuuucucucaaacccaaa

SEQ ID NO: 317199 - RNA, 32 nt, Homo Sapiens
ccucgugauccuccugccucauccucccaaaa

SEQ ID NO: 317200 - RNA, 32 nt, Homo Sapiens
gcagcucagccggccucacgccgccguccgca

SEQ ID NO: 317201 - RNA, 32 nt, Homo Sapiens
acaauauacuauugggugacaguggacuaaca

SEQ ID NO: 317202 - RNA, 32 nt, Homo Sapiens
uucgccuuucugugguuccauccacuucuucc

SEQ ID NO: 317203 - RNA, 32 nt, Homo Sapiens
uuuuguggaaaacaauuuuuccaccaguggau

SEQ ID NO: 317204 - RNA, 32 nt, Homo Sapiens
guugaaacacuggacuuggauauggggugcug

SEQ ID NO: 317205 - RNA, 32 nt, Homo Sapiens
ggggugggcgacuucgcgggaccguggcgcau

SEQ ID NO: 317206 - RNA, 32 nt, Homo Sapiens
agacgcgcgugcgcgcgcacacacacagacac

SEQ ID NO: 317207 - RNA, 32 nt, Homo Sapiens
aaaauugcacaaaaauuaugugcuuuuuaaaa

SEQ ID NO: 317208 - RNA, 32 nt, Homo Sapiens
caucccaaaaugcccaggaucucauaggcauc

SEQ ID NO: 317209 - RNA, 32 nt, Homo Sapiens
uauucauaacugaguuauuuuccucuaauaaa

SEQ ID NO: 317210 - RNA, 32 nt, Homo Sapiens
gguggauucuugcucugucacccaggcuggag

SEQ ID NO: 317211 - RNA, 32 nt, Homo Sapiens
gcugugaaauaguaaaauuauaaucguuuaug

SEQ ID NO: 317212 - RNA, 32 nt, Homo Sapiens
ugaaaccaaauggucuuaauuauuuucuaaau

SEQ ID NO: 317213 - RNA, 32 nt, Homo Sapiens
auguuaaaaaccaacacugcuuuuaauccucu

SEQ ID NO: 317214 - RNA, 32 nt, Homo Sapiens
augcagccaguccuuacccuguagaagauggg

SEQ ID NO: 317215 - RNA, 32 nt, Homo Sapiens
guuaaaaacauuuuuuauaugcacuaauaauu

SEQ ID NO: 317216 - RNA, 32 nt, Homo Sapiens
gaaugcauuuuaaagcaaauaaaucuuuuuga

SEQ ID NO: 317217 - RNA, 32 nt, Homo Sapiens
ucuucaaaggcacgcaggguuuaaugguuccu

SEQ ID NO: 317218 - RNA, 32 nt, Homo Sapiens
ccuugugucugugaacuuucaaugaaauaccc

SEQ ID NO: 317219 - RNA, 32 nt, Homo Sapiens
gggacuggguggcacgugagagcggccaggga

SEQ ID NO: 317220 - RNA, 31 nt, Homo Sapiens
gagugaggcugcugccugcgcccugcuccca

SEQ ID NO: 317221 - RNA, 32 nt, Homo Sapiens
augcaugaauuuucuuguuuuuggaauuauuc

SEQ ID NO: 317222 - RNA, 32 nt, Homo Sapiens
gggacagagucuuucacgaguuguguaucguu

SEQ ID NO: 317223 - RNA, 30 nt, Homo Sapiens
ccucuugcugcuuugggggaaucuccuccc

SEQ ID NO: 317224 - RNA, 32 nt, Homo Sapiens
ccucccuuguguuugugcuuugugcagaguug

SEQ ID NO: 317225 - RNA, 32 nt, Homo Sapiens
aacuaaacagaaaacucccaauacaaagauga

SEQ ID NO: 317226 - RNA, 32 nt, Homo Sapiens
ucgguccucgacgcgccccgccccaccccugc

SEQ ID NO: 317227 - RNA, 32 nt, Homo Sapiens
caacagacuuuugugagggauuuuaaaaacaa

SEQ ID NO: 317228 - RNA, 32 nt, Homo Sapiens
aaaugccccaggaugccuuggcagugucuccc

SEQ ID NO: 317229 - RNA, 32 nt, Homo Sapiens
uucuaguucugauucugucacucauuggcuuu

SEQ ID NO: 317230 - RNA, 32 nt, Homo Sapiens
ugggucaggaggaauggagacuguaccuucca

SEQ ID NO: 317231 - RNA, 32 nt, Homo Sapiens
agauguaaauauuguuaacauaaaagaaucca

SEQ ID NO: 317232 - RNA, 32 nt, Homo Sapiens
ggagaccuuguugaccgcggcgcggaaaacgu

SEQ ID NO: 317233 - RNA, 30 nt, Homo Sapiens
guuuuacagaaaauaaaaaagcaaaauguc

SEQ ID NO: 317234 - RNA, 32 nt, Homo Sapiens
guuauaauggcagaccaaauguagaagggaaa

SEQ ID NO: 317235 - RNA, 32 nt, Homo Sapiens
ugauaaugucauugcuguuauuuagcauccuc

SEQ ID NO: 317236 - RNA, 32 nt, Homo Sapiens
gagaggaggaggagugcggcgcggcggccccg

SEQ ID NO: 317237 - RNA, 32 nt, Homo Sapiens
auuuauuaaguaccuacugugugcaauccuug

SEQ ID NO: 317238 - RNA, 32 nt, Homo Sapiens
cuuagaucuuguggccaagaguucagaccgug

SEQ ID NO: 317239 - RNA, 32 nt, Homo Sapiens
uggaauaccgacaguggcagggcaggcagacu

SEQ ID NO: 317240 - RNA, 32 nt, Homo Sapiens
auuuugcuugugcagaaaauaguuuccagcac

SEQ ID NO: 317241 - RNA, 32 nt, Homo Sapiens
ugaagaagagauucacaaaaacaaagaaucac

SEQ ID NO: 317242 - RNA, 32 nt, Homo Sapiens
agcaggacgucuuggggaccaagcuuccucaa

SEQ ID NO: 317243 - RNA, 32 nt, Homo Sapiens
uccugcuacuucuggggugccugucuccugga

SEQ ID NO: 317244 - RNA, 32 nt, Homo Sapiens
gcccccaaccccccucucccagcccugguagg

SEQ ID NO: 317245 - RNA, 32 nt, Homo Sapiens
aaacccaaauaaaaacaguauauguaaccaaa

SEQ ID NO: 317246 - RNA, 32 nt, Homo Sapiens
ucucucugacacaagcgcacacacacacacac

SEQ ID NO: 317247 - RNA, 32 nt, Homo Sapiens
augaauucagacauuuuuuccuguggauauuu

SEQ ID NO: 317248 - RNA, 32 nt, Homo Sapiens
guuugggacagaggggacaguugaggucauuc

SEQ ID NO: 317249 - RNA, 32 nt, Homo Sapiens
cuucuuuuuauguuuguaaucuguaaaugaac

SEQ ID NO: 317250 - RNA, 32 nt, Homo Sapiens
auuuucccacuacuccaaaggaauccaauaaa

SEQ ID NO: 317251 - RNA, 32 nt, Homo Sapiens
gaacagaauuuuuacuuguauagggugcuuac

SEQ ID NO: 317252 - RNA, 32 nt, Homo Sapiens
gggcuuggguggcaaccagaacuagggagcug

SEQ ID NO: 317253 - RNA, 32 nt, Homo Sapiens
uaucuguaaaaugagaccaucuuauugcugac

SEQ ID NO: 317254 - RNA, 32 nt, Homo Sapiens
auuucauggcuuugguccuuuaaauucuggca

SEQ ID NO: 317255 - RNA, 32 nt, Homo Sapiens
cucggcuccucgcggcucgcggcggccgacgg

SEQ ID NO: 317256 - RNA, 32 nt, Homo Sapiens
acuaauuaguguccaacuccaagugggucaau

SEQ ID NO: 317257 - RNA, 32 nt, Homo Sapiens
cggagcaggcaggcauccccgggaguugucuc

SEQ ID NO: 317258 - RNA, 32 nt, Homo Sapiens
acuuuuaaaaauuuguccuuaaaugaauaaau

SEQ ID NO: 317259 - RNA, 32 nt, Homo Sapiens
uuucuguccuuccccuuccugguccuucagcc

SEQ ID NO: 317260 - RNA, 32 nt, Homo Sapiens
uuuucauaugggcaaagggaaaaaaugauaaa

SEQ ID NO: 317261 - RNA, 32 nt, Homo Sapiens
agggacaaggagaggaggagacuggguuuggg

SEQ ID NO: 317262 - RNA, 32 nt, Homo Sapiens
gcuugucacguccucagccucccagcauucaa

SEQ ID NO: 317263 - RNA, 32 nt, Homo Sapiens
uaaauuuaaaauguguauuuagagcauggaga

SEQ ID NO: 317264 - RNA, 32 nt, Homo Sapiens
ugccaaagaguuuuuucuuccucauccaccgc

SEQ ID NO: 317265 - RNA, 32 nt, Homo Sapiens
uccagcugccuuaauagaaguacucaagucuu

SEQ ID NO: 317266 - RNA, 32 nt, Homo Sapiens
cugagaggugcgguccuggggguggaggccug

SEQ ID NO: 317267 - RNA, 32 nt, Homo Sapiens
ucugcucuuuuccagacacuguucuggacauu

SEQ ID NO: 317268 - RNA, 32 nt, Homo Sapiens
ugugacuguuaugauuaucagaauaugucuua

SEQ ID NO: 317269 - RNA, 32 nt, Homo Sapiens
cguucccccagccccaggggccaccgcggcuc

SEQ ID NO: 317270 - RNA, 32 nt, Homo Sapiens
cgccccgcacccccaaguugggacgccuuguu

SEQ ID NO: 317271 - RNA, 32 nt, Homo Sapiens
auuuugauguauuauuauauauguauaucugu

SEQ ID NO: 317272 - RNA, 28 nt, Homo Sapiens
ucuuuauuagauuaacuuuugggaaaca

SEQ ID NO: 317273 - RNA, 32 nt, Homo Sapiens
uccugucacagcuggguauccuuaccauguuc

SEQ ID NO: 317274 - RNA, 32 nt, Homo Sapiens
ucuuucggggaguccucuagcuccucaccucc

SEQ ID NO: 317275 - RNA, 32 nt, Homo Sapiens
cagccucggggagagggcgcgggggcgcuggg

SEQ ID NO: 317276 - RNA, 32 nt, Homo Sapiens
gaauauuaggcuugaugguuauagcggguggg

SEQ ID NO: 317277 - RNA, 32 nt, Homo Sapiens
gggaguauacggaaacaaaaaugauccucagu

SEQ ID NO: 317278 - RNA, 32 nt, Homo Sapiens
auauguuaaaaauuauuaaucuuaauauuuug

SEQ ID NO: 317279 - RNA, 32 nt, Homo Sapiens
cuauuuaaugccauuuguguuucaugccauuu

SEQ ID NO: 317280 - RNA, 32 nt, Homo Sapiens
ucugggaacagaugaaacuuuuugcaucgcuu

SEQ ID NO: 317281 - RNA, 32 nt, Homo Sapiens
ggagaucucggagcugcccgcguacagccugg

SEQ ID NO: 317282 - RNA, 32 nt, Homo Sapiens
auucggccaggccucgagccugcuccgccuuc

SEQ ID NO: 317283 - RNA, 32 nt, Homo Sapiens
gacaccacaaaacugcagcaucaccaagucau

SEQ ID NO: 317284 - RNA, 32 nt, Homo Sapiens
gaccccuggagcaggcuggcccggggugguga

SEQ ID NO: 317285 - RNA, 32 nt, Homo Sapiens
uucucuuugugcaggcuucuuaugccguuggu

SEQ ID NO: 317286 - RNA, 32 nt, Homo Sapiens
gaggaagccuaucuguggggcuggguacauuu

SEQ ID NO: 317287 - RNA, 32 nt, Homo Sapiens
accugugacaccuggccacacgaccuguggcc

SEQ ID NO: 317288 - RNA, 32 nt, Homo Sapiens
gaauaccccaagcaucaaggucuaaauaauuu

SEQ ID NO: 317289 - RNA, 32 nt, Homo Sapiens
ggccgcccaaaucuuuccuggcgaaggggagg

SEQ ID NO: 317290 - RNA, 32 nt, Homo Sapiens
gaggcaaggugguccggacaugugagcaacac

SEQ ID NO: 317291 - RNA, 32 nt, Homo Sapiens
uuaaccuagguguccaucaauagagaauuggg

SEQ ID NO: 317292 - RNA, 32 nt, Homo Sapiens
auauucagcaaaauucuagaaaaugcuggugu

SEQ ID NO: 317293 - RNA, 32 nt, Homo Sapiens
agacccgccccggcccgguccacauucucccc

SEQ ID NO: 317294 - RNA, 32 nt, Homo Sapiens
ccacagagcggaacaagggacugggcugucua

SEQ ID NO: 317295 - RNA, 32 nt, Homo Sapiens
cuguaaagaaaggauuaaaaauuuaagauguu

SEQ ID NO: 317296 - RNA, 32 nt, Homo Sapiens
caaccguuuuucccucauucacagcaaauccu

SEQ ID NO: 317297 - RNA, 32 nt, Homo Sapiens
auucuguauuuuguuuuugucuuaaaaagugg

SEQ ID NO: 317298 - RNA, 32 nt, Homo Sapiens
cucuuguguuuguuguucuguuugccccauuu

SEQ ID NO: 317299 - RNA, 32 nt, Homo Sapiens
uggggggacagaggggcagcaggaaccagaag

SEQ ID NO: 317300 - RNA, 32 nt, Homo Sapiens
cacuagauaugcagggcugcuaaucucaagga

SEQ ID NO: 317301 - RNA, 32 nt, Homo Sapiens
cuuccuaaguuauugaaaaaaugucuuuucau

SEQ ID NO: 317302 - RNA, 32 nt, Homo Sapiens
ccguuccugcuggccugccugcacgggggugc

SEQ ID NO: 317303 - RNA, 30 nt, Homo Sapiens
gccggcggagguggcggcggagacggccgg

SEQ ID NO: 317304 - RNA, 32 nt, Homo Sapiens
gggccuggggccaagaggaaaaacagggaaaa

SEQ ID NO: 317305 - RNA, 32 nt, Homo Sapiens
cuguuuccgcaugcggagccacagcuaccucc

SEQ ID NO: 317306 - RNA, 32 nt, Homo Sapiens
auuauaguuuuuauuuacccauuugauuugug

SEQ ID NO: 317307 - RNA, 32 nt, Homo Sapiens
acauugggggauccugagggagcccaucaccg

SEQ ID NO: 317308 - RNA, 32 nt, Homo Sapiens
cucuaagucugcuugauagaguggauaguaug

SEQ ID NO: 317309 - RNA, 32 nt, Homo Sapiens
uccagaugaggaaacggaggcuaagaaaggag

SEQ ID NO: 317310 - RNA, 32 nt, Homo Sapiens
ugagaaaauaaauuucucuuauuuaaaccacc

SEQ ID NO: 317311 - RNA, 32 nt, Homo Sapiens
auauaucugaagauaaugaugacuuuuuaaug

SEQ ID NO: 317312 - RNA, 32 nt, Homo Sapiens
uucuggauauuuuugccacauuucuuugcaaa

SEQ ID NO: 317313 - RNA, 32 nt, Homo Sapiens
ugcaggugggggugugcugacauguuugcucu

SEQ ID NO: 317314 - RNA, 32 nt, Homo Sapiens
uuuccuaauuucaaaucuuggauaauuuaacc

SEQ ID NO: 317315 - RNA, 32 nt, Homo Sapiens
guccuucuggacgugaagacgcagcuggagca

SEQ ID NO: 317316 - RNA, 32 nt, Homo Sapiens
aaagggacaguauucucagugcucuccuaccc

SEQ ID NO: 317317 - RNA, 32 nt, Homo Sapiens
ucagcccggcgugccacugcugcuacagaaac

SEQ ID NO: 317318 - RNA, 32 nt, Homo Sapiens
gccccuuccccaagcauagaauacagaggugc

SEQ ID NO: 317319 - RNA, 32 nt, Homo Sapiens
cuugguggcaacuccuuugcaaugcagcuggc

SEQ ID NO: 317320 - RNA, 32 nt, Homo Sapiens
agucagcucugcaacgugggagccuuggaggc

SEQ ID NO: 317321 - RNA, 32 nt, Homo Sapiens
uugaccugcaguggcuuaauuccgcuagcuau

SEQ ID NO: 317322 - RNA, 32 nt, Homo Sapiens
agaccaacuauauugcgagaaacagagaucau

SEQ ID NO: 317323 - RNA, 32 nt, Homo Sapiens
agggcuuggugcuggcgggguccagcugcucc

SEQ ID NO: 317324 - RNA, 32 nt, Homo Sapiens
gggccaggcugagccgaucuggucucguguuc

SEQ ID NO: 317325 - RNA, 32 nt, Homo Sapiens
gagaacaucagugacuuuaacuucugcagagu

SEQ ID NO: 317326 - RNA, 32 nt, Homo Sapiens
acccacagagcacccucagccaucgcgaguuu

SEQ ID NO: 317327 - RNA, 32 nt, Homo Sapiens
aacuauuaaaauuuaaguucauaccccagucu

SEQ ID NO: 317328 - RNA, 32 nt, Homo Sapiens
cguguuugaacacucuccuggccacgugggga

SEQ ID NO: 317329 - RNA, 32 nt, Homo Sapiens
ucacucgccagccccgcaccccaacagcuugc

SEQ ID NO: 317330 - RNA, 31 nt, Homo Sapiens
gcccaccugccgguggcuccugcucacaugu

SEQ ID NO: 317331 - RNA, 32 nt, Homo Sapiens
cacgaaccgugcgcgggagggcgugggcguug

SEQ ID NO: 317332 - RNA, 32 nt, Homo Sapiens
gccaccccggugcccuguggccgcugggcaaa

SEQ ID NO: 317333 - RNA, 32 nt, Homo Sapiens
guccugaccuggccuguaguccugcugucugg

SEQ ID NO: 317334 - RNA, 32 nt, Homo Sapiens
accaaacuuguucuccccguccugguccaggg

SEQ ID NO: 317335 - RNA, 32 nt, Homo Sapiens
augggucacagcggcagcagcugugaccacag

SEQ ID NO: 317336 - RNA, 32 nt, Homo Sapiens
ggacccgccccaccaagagcuccuggcccccu

SEQ ID NO: 317337 - RNA, 32 nt, Homo Sapiens
uuuagauauacuuuuuaggucauuuuguguaa

SEQ ID NO: 317338 - RNA, 32 nt, Homo Sapiens
ugggugggaguggggagggcgaggggccuaga

SEQ ID NO: 317339 - RNA, 32 nt, Homo Sapiens
uuugaacuuccucgucgucgccaccuucccuc

SEQ ID NO: 317340 - RNA, 32 nt, Homo Sapiens
gcaucaaaucugaagaaaaucuacacaguaca

SEQ ID NO: 317341 - RNA, 30 nt, Homo Sapiens
aacaagcaggguggcgcggguccgggcaug

SEQ ID NO: 317342 - RNA, 32 nt, Homo Sapiens
uguccaugucauuuuccuacugccauagauac

SEQ ID NO: 317343 - RNA, 32 nt, Homo Sapiens
aauuuuggaauaugccaggaauaguggaauuu

SEQ ID NO: 317344 - RNA, 32 nt, Homo Sapiens
cagguggcugcacugucgcccagcagcgagua

SEQ ID NO: 317345 - RNA, 30 nt, Homo Sapiens
uacaaaaugcaaauauguuuaagaguugcu

SEQ ID NO: 317346 - RNA, 32 nt, Homo Sapiens
uaggucuguauauuuaugggguacaugaggug

SEQ ID NO: 317347 - RNA, 32 nt, Homo Sapiens
uuuagcauuacguaucuguguguuacugcugu

SEQ ID NO: 317348 - RNA, 32 nt, Homo Sapiens
aaaacaucaggggcuuccuguaucuccuguca

SEQ ID NO: 317349 - RNA, 32 nt, Homo Sapiens
uccaugggaucuuuccucuucugggccucugc

SEQ ID NO: 317350 - RNA, 32 nt, Homo Sapiens
aggaaacggaagcugacauaauggggauuaau

SEQ ID NO: 317351 - RNA, 32 nt, Homo Sapiens
agggcuuuuuuuuuuucuuuuucuuguuuuaa

SEQ ID NO: 317352 - RNA, 32 nt, Homo Sapiens
cacgcgcccuccccugggcucgcguucaucgg

SEQ ID NO: 317353 - RNA, 32 nt, Homo Sapiens
ccgcaaguccccagccccucaacccuccguuc

SEQ ID NO: 317354 - RNA, 27 nt, Homo Sapiens
ugcagucuguguuucagcccuggaauu

SEQ ID NO: 317355 - RNA, 32 nt, Homo Sapiens
agaaagaugugacagugcuuugaaaacaccuc

SEQ ID NO: 317356 - RNA, 32 nt, Homo Sapiens
gcgccugucgcgcgccggcccgcgucugcuga

SEQ ID NO: 317357 - RNA, 32 nt, Homo Sapiens
ccccuuuggagggggaggcggcggcggcggcg

SEQ ID NO: 317358 - RNA, 32 nt, Homo Sapiens
agacagaaacauacccaccucugcccuccuca

SEQ ID NO: 317359 - RNA, 32 nt, Homo Sapiens
ccgcacaccguccgcgcacgccugaggcuggg

SEQ ID NO: 317360 - RNA, 32 nt, Homo Sapiens
aucucaaaauugaucagguucuggagaaucua

SEQ ID NO: 317361 - RNA, 32 nt, Homo Sapiens
gaccagcucugcggaaaccaacuuggaggccu

SEQ ID NO: 317362 - RNA, 32 nt, Homo Sapiens
gcaucaucaaggauaacugaaacugggucucc

SEQ ID NO: 317363 - RNA, 32 nt, Homo Sapiens
uccucaagacagguagcauggaccuuaaggcg

SEQ ID NO: 317364 - RNA, 32 nt, Homo Sapiens
uucccccgcuggaagcgccacaucucggagca

SEQ ID NO: 317365 - RNA, 32 nt, Homo Sapiens
gcaccccccaacacuggaugcaaugguguuac

SEQ ID NO: 317366 - RNA, 32 nt, Homo Sapiens
cuuaguuuuaucaauuuuucuaguuuuauuuu

SEQ ID NO: 317367 - RNA, 32 nt, Homo Sapiens
aggaguuggccauguuaaauuucccacaccac

SEQ ID NO: 317368 - RNA, 32 nt, Homo Sapiens
ggggacuguagcuggcugugggacucuaaggc

SEQ ID NO: 317369 - RNA, 32 nt, Homo Sapiens
agccugguggggcuacugcagugugcugccaa

SEQ ID NO: 317370 - RNA, 32 nt, Homo Sapiens
acuggcuuugaugaggcccacuucccagaggc

SEQ ID NO: 317371 - RNA, 32 nt, Homo Sapiens
gagcuggagccggaggagccgcgcucauggcg

SEQ ID NO: 317372 - RNA, 32 nt, Homo Sapiens
aucacuguauacgaauucaucugcuuauggau

SEQ ID NO: 317373 - RNA, 32 nt, Homo Sapiens
gugaaacacaaagcuuccaaucuuaaggaugu

SEQ ID NO: 317374 - RNA, 32 nt, Homo Sapiens
ucaagccccagcacugccgacuccaugugggu

SEQ ID NO: 317375 - RNA, 32 nt, Homo Sapiens
auauauuuuaaagauuugugccaagagaguau

SEQ ID NO: 317376 - RNA, 27 nt, Homo Sapiens
ugguuaauaaauaaaugaguuucugcu

SEQ ID NO: 317377 - RNA, 32 nt, Homo Sapiens
uggugcauuauuucagcuguggcuuucagaag

SEQ ID NO: 317378 - RNA, 32 nt, Homo Sapiens
ccagccuugagccugcugggcuauuuucagcu

SEQ ID NO: 317379 - RNA, 32 nt, Homo Sapiens
ugcauucagguggccaaguauuugcauuuccu

SEQ ID NO: 317380 - RNA, 32 nt, Homo Sapiens
accucugcccuuccuuuucucaucaaucacug

SEQ ID NO: 317381 - RNA, 32 nt, Homo Sapiens
gggaucuccgacgaggcccuggacccccgggc

SEQ ID NO: 317382 - RNA, 32 nt, Homo Sapiens
agagaauaaccugguguguucagguuauucuu

SEQ ID NO: 317383 - RNA, 32 nt, Homo Sapiens
ccauauuuugccuuugaauacguggguuuuag

SEQ ID NO: 317384 - RNA, 32 nt, Homo Sapiens
aauugaaaucauuuuucuucauuuuaaaaaaa

SEQ ID NO: 317385 - RNA, 32 nt, Homo Sapiens
ccacccacaacacaacccaaagccuucuagac

SEQ ID NO: 317386 - RNA, 32 nt, Homo Sapiens
aacuugucaacacugcuguaugaagcacaaaa

SEQ ID NO: 317387 - RNA, 32 nt, Homo Sapiens
guaccuacagcuuuuaacaaaauugaggacuu

SEQ ID NO: 317388 - RNA, 32 nt, Homo Sapiens
aauauacuguguaccauugaucuucuauugug

SEQ ID NO: 317389 - RNA, 32 nt, Homo Sapiens
ugcggcgcgcggugcgcggugcguagucugga

SEQ ID NO: 317390 - RNA, 32 nt, Homo Sapiens
agaggauucuccuggggugucuuagaggcagg

SEQ ID NO: 317391 - RNA, 32 nt, Homo Sapiens
gacaagaaggcacaguuagaugguagacccac

SEQ ID NO: 317392 - RNA, 32 nt, Homo Sapiens
aaacuagcugggugugguggcgcaugccugua

SEQ ID NO: 317393 - RNA, 32 nt, Homo Sapiens
ugcacuuggagggcugggaagacccaugcugu

SEQ ID NO: 317394 - RNA, 32 nt, Homo Sapiens
ggaaccucaccauuccucccccaauccacacc

SEQ ID NO: 317395 - RNA, 32 nt, Homo Sapiens
ucgcugcuacugggacauccacaggaccuaau

SEQ ID NO: 317396 - RNA, 32 nt, Homo Sapiens
aauacucauuucuccuugucagucuccuuguc

SEQ ID NO: 317397 - RNA, 31 nt, Homo Sapiens
aaucagugaaacauuuuuuaaagccaaguuu

SEQ ID NO: 317398 - RNA, 32 nt, Homo Sapiens
uuauuauaguucaaugaagccaaaaaacauau

SEQ ID NO: 317399 - RNA, 32 nt, Homo Sapiens
aagagggguugggacuuuuuacuucacuagga

SEQ ID NO: 317400 - RNA, 32 nt, Homo Sapiens
uauuauuuagacuuuuaacauauagagcuauu

SEQ ID NO: 317401 - RNA, 32 nt, Homo Sapiens
ggguggcggcggcggcagaggcggcgggagga

SEQ ID NO: 317402 - RNA, 32 nt, Homo Sapiens
uugggaggcugaggaaggcaaaucacaagguc

SEQ ID NO: 317403 - RNA, 32 nt, Homo Sapiens
caucugcgccagcaaacaucacugccguuggu

SEQ ID NO: 317404 - RNA, 32 nt, Homo Sapiens
uccauccguggcgccucgccagcugcaggacg

SEQ ID NO: 317405 - RNA, 32 nt, Homo Sapiens
guaacccagcacugggccguguagcaugaaau

SEQ ID NO: 317406 - RNA, 32 nt, Homo Sapiens
cgggauugacuucuaaagacucuugguaugug

SEQ ID NO: 317407 - RNA, 30 nt, Homo Sapiens
guggaugggcuuccucccgcccugaggcaa

SEQ ID NO: 317408 - RNA, 28 nt, Homo Sapiens
ucaaaaaguguguauauguguuugcauu

SEQ ID NO: 317409 - RNA, 32 nt, Homo Sapiens
gguggggaguggggccaggcgagggugcccug

SEQ ID NO: 317410 - RNA, 32 nt, Homo Sapiens
uggggcccggguugggccgcccggggacucug

SEQ ID NO: 317411 - RNA, 32 nt, Homo Sapiens
aagcauugaaauggcaagugcaaccaaaagua

SEQ ID NO: 317412 - RNA, 32 nt, Homo Sapiens
ggauauuauacagaggaaaguaguuauauuuu

SEQ ID NO: 317413 - RNA, 32 nt, Homo Sapiens
ggcgcccccuggagguauguaaugcacaacuu

SEQ ID NO: 317414 - RNA, 32 nt, Homo Sapiens
gaggguggcaggucuuugcagcucccggccag

SEQ ID NO: 317415 - RNA, 31 nt, Homo Sapiens
cuucagacuggguagggaauaugauauuuua

SEQ ID NO: 317416 - RNA, 30 nt, Homo Sapiens
acaguauaucaccauuggguagaguggacg

SEQ ID NO: 317417 - RNA, 32 nt, Homo Sapiens
ccuucucuaccuugugcugaccccgcuggggu

SEQ ID NO: 317418 - RNA, 32 nt, Homo Sapiens
ucaccccgcugccucuagguucugggaagaug

SEQ ID NO: 317419 - RNA, 32 nt, Homo Sapiens
agguacaugguuaaacaaaccauccauaacuu

SEQ ID NO: 317420 - RNA, 32 nt, Homo Sapiens
gcuguaguccgcagcccccggcggcuuugugg

SEQ ID NO: 317421 - RNA, 32 nt, Homo Sapiens
aaaaggaaaaggacuuuuuuuuuaaacuuuaa

SEQ ID NO: 317422 - RNA, 32 nt, Homo Sapiens
uggcgcaaucccagcccccuuccccgggccac

SEQ ID NO: 317423 - RNA, 32 nt, Homo Sapiens
cagaggccuuggugcugccggcguggggaucc

SEQ ID NO: 317424 - RNA, 32 nt, Homo Sapiens
cucagaggacugccuuucugaaggcuggggag

SEQ ID NO: 317425 - RNA, 32 nt, Homo Sapiens
aguggaugggcugggggaggggugcuguuuua

SEQ ID NO: 317426 - RNA, 32 nt, Homo Sapiens
cgucgcggcggccgaaggcagcuccugcugcg

SEQ ID NO: 317427 - RNA, 32 nt, Homo Sapiens
cuguacauuauguaucuccaguagcaauguug

SEQ ID NO: 317428 - RNA, 32 nt, Homo Sapiens
aaucaagauccgacccaaaccacaccaaaugu

SEQ ID NO: 317429 - RNA, 32 nt, Homo Sapiens
ccccgccaggacucggaaugccuugcuuuugg

SEQ ID NO: 317430 - RNA, 32 nt, Homo Sapiens
ugacaugcccccagccucccccagcucugcag

SEQ ID NO: 317431 - RNA, 32 nt, Homo Sapiens
caaagcuaaccacugaggcacuauuuaaccau

SEQ ID NO: 317432 - RNA, 32 nt, Homo Sapiens
ggggcacccaaguugggauuucauuucaggug

SEQ ID NO: 317433 - RNA, 32 nt, Homo Sapiens
caccucuaugucacccugaggaccaucccuca

SEQ ID NO: 317434 - RNA, 32 nt, Homo Sapiens
gcgcgcggguccggaggcgcgcccgaauuccc

SEQ ID NO: 317435 - RNA, 32 nt, Homo Sapiens
ccaggcccaagcuggggaauagcaacucaguc

SEQ ID NO: 317436 - RNA, 32 nt, Homo Sapiens
cuuccaggggccgaggugcugcuguccagaca

SEQ ID NO: 317437 - RNA, 32 nt, Homo Sapiens
acauacaucaauuaaacuuauguccuauuguu

SEQ ID NO: 317438 - RNA, 32 nt, Homo Sapiens
uuuccuguggcuuuugaucucacucagaugaa

SEQ ID NO: 317439 - RNA, 32 nt, Homo Sapiens
auaaauuguauuuuaagugaugucauagacag

SEQ ID NO: 317440 - RNA, 32 nt, Homo Sapiens
gguguccagguguggacagagccccggcucuc

SEQ ID NO: 317441 - RNA, 32 nt, Homo Sapiens
aaaagccacugacuguuauaaaguauaacaac

SEQ ID NO: 317442 - RNA, 32 nt, Homo Sapiens
caaggcuccaggcgccagcaaaagcucucuac

SEQ ID NO: 317443 - RNA, 32 nt, Homo Sapiens
ccgcgcccucggccggccccccgagcagccuu

SEQ ID NO: 317444 - RNA, 32 nt, Homo Sapiens
ugacuuauuaaacuauugaaggaaaaggacuc

SEQ ID NO: 317445 - RNA, 32 nt, Homo Sapiens
gucugaggcugggaguggcaucugaggccggg

SEQ ID NO: 317446 - RNA, 32 nt, Homo Sapiens
guugacaaauaccauucugaaggaauucaaau

SEQ ID NO: 317447 - RNA, 32 nt, Homo Sapiens
gccagaaggagaccgacugugaccucugucug

SEQ ID NO: 317448 - RNA, 32 nt, Homo Sapiens
gccggcuccgucugcuugcggggagguaugga

SEQ ID NO: 317449 - RNA, 32 nt, Homo Sapiens
agcaagucugucaaaucagugauuucuuuauu

SEQ ID NO: 317450 - RNA, 32 nt, Homo Sapiens
uuucauuuaugaacacauuuucauugguauau

SEQ ID NO: 317451 - RNA, 32 nt, Homo Sapiens
auacggaggauaaccacuauuuuugugcaaau

SEQ ID NO: 317452 - RNA, 32 nt, Homo Sapiens
ggccucauccccgaggccccaguuccuauauc

SEQ ID NO: 317453 - RNA, 32 nt, Homo Sapiens
aaauauaaaaauuuguuaaaggcacguauagu

SEQ ID NO: 317454 - RNA, 32 nt, Homo Sapiens
acuuuauaaaauuaaucagagaagaagagagg

SEQ ID NO: 317455 - RNA, 32 nt, Homo Sapiens
uuuggaggauggcuucugcugcuaaaaauaca

SEQ ID NO: 317456 - RNA, 32 nt, Homo Sapiens
gguuucgccauguuggucaggcuggucucaaa

SEQ ID NO: 317457 - RNA, 32 nt, Homo Sapiens
gauuuucaaucauagacuuugugacagcauuu

SEQ ID NO: 317458 - RNA, 32 nt, Homo Sapiens
acgaaagugucugugcacuuuuuauccuuuuu

SEQ ID NO: 317459 - RNA, 32 nt, Homo Sapiens
guuauggucaaucccaaaagucaccacuccau

SEQ ID NO: 317460 - RNA, 32 nt, Homo Sapiens
uaacacaaaaaagaagcuaccuaugauccugg

SEQ ID NO: 317461 - RNA, 32 nt, Homo Sapiens
augguguucagugaaagauguggguaguugag

SEQ ID NO: 317462 - RNA, 32 nt, Homo Sapiens
guggguugcccugcugugcagcagccagcucu

SEQ ID NO: 317463 - RNA, 32 nt, Homo Sapiens
gguucuugucuccuuauuuccucuuuaccauu

SEQ ID NO: 317464 - RNA, 32 nt, Homo Sapiens
gcagucauauagagacuugaaauaucauucaa

SEQ ID NO: 317465 - RNA, 32 nt, Homo Sapiens
gggcccggccccagccucagcccugagcgucu

SEQ ID NO: 317466 - RNA, 32 nt, Homo Sapiens
ggcggcggcugcgggcugagcggcgaguuucc

SEQ ID NO: 317467 - RNA, 32 nt, Homo Sapiens
uaaaaucagagaaaagcagaggcagaaacucc

SEQ ID NO: 317468 - RNA, 32 nt, Homo Sapiens
cacucuuauuucugaguucucuauucuguucc

SEQ ID NO: 317469 - RNA, 30 nt, Homo Sapiens
accgugccagguaggaccauauugcagucu

SEQ ID NO: 317470 - RNA, 32 nt, Homo Sapiens
auaucuguucccagccccuccucccucaggcc

SEQ ID NO: 317471 - RNA, 32 nt, Homo Sapiens
cgugagggagaugcuuagggaguucucgaagu

SEQ ID NO: 317472 - RNA, 32 nt, Homo Sapiens
gcccaguguuuccucagcucauccgcccucug

SEQ ID NO: 317473 - RNA, 32 nt, Homo Sapiens
aaauugcagagaaaacaaaaccaaagcugauu

SEQ ID NO: 317474 - RNA, 32 nt, Homo Sapiens
cugucaucaaugaaaaguuaaccuuuguagcu

SEQ ID NO: 317475 - RNA, 32 nt, Homo Sapiens
cugcgcgcccuggccugggccuugcccagccg

SEQ ID NO: 317476 - RNA, 32 nt, Homo Sapiens
uauuuuucagaauuugcacauggaacacuuag

SEQ ID NO: 317477 - RNA, 32 nt, Homo Sapiens
ccuacugcgaccacccaccucauccuggcuca

SEQ ID NO: 317478 - RNA, 32 nt, Homo Sapiens
uuuuccagagguuagaaaacuugcuugaaguu

SEQ ID NO: 317479 - RNA, 32 nt, Homo Sapiens
ccugaccuccaggaccccugggcccccagccu

SEQ ID NO: 317480 - RNA, 32 nt, Homo Sapiens
uggcucacaccuguaauuccagcacuuuggga

SEQ ID NO: 317481 - RNA, 32 nt, Homo Sapiens
ccugcuucacccaggcccuggugcuucuucaa

SEQ ID NO: 317482 - RNA, 32 nt, Homo Sapiens
guagcugacuugaaguaacucuaugucaaaua

SEQ ID NO: 317483 - RNA, 32 nt, Homo Sapiens
ggauuagugaaagaggaagaccucuuugcagu

SEQ ID NO: 317484 - RNA, 32 nt, Homo Sapiens
uguagacuuuuguguaacuauuuguaccguag

SEQ ID NO: 317485 - RNA, 32 nt, Homo Sapiens
caaggguagauggggagggucugugugaaggg

SEQ ID NO: 317486 - RNA, 32 nt, Homo Sapiens
acuggcgcugaggccugacgccgccugcgucc

SEQ ID NO: 317487 - RNA, 32 nt, Homo Sapiens
ccagcuucaccccucacccccagcggcucacc

SEQ ID NO: 317488 - RNA, 32 nt, Homo Sapiens
gccaggcagcggguccaggccucagccgcgcg

SEQ ID NO: 317489 - RNA, 32 nt, Homo Sapiens
cccggggugaccuggcggggcugucgccgggu

SEQ ID NO: 317490 - RNA, 32 nt, Homo Sapiens
aggaggaggaguggugcugcgaggggaaggaa

SEQ ID NO: 317491 - RNA, 32 nt, Homo Sapiens
cuuuuaauauuuugauuuguuuuccuuuaguu

SEQ ID NO: 317492 - RNA, 32 nt, Homo Sapiens
ccagacccaccucggcacggacaccccugucu

SEQ ID NO: 317493 - RNA, 30 nt, Homo Sapiens
uagucgguggcucgggcgccggcggggagc

SEQ ID NO: 317494 - RNA, 32 nt, Homo Sapiens
uuccucuguuucuccuucugaaaguuuucuau

SEQ ID NO: 317495 - RNA, 32 nt, Homo Sapiens
ggaguuuccuucccagccaggccggcccagaa

SEQ ID NO: 317496 - RNA, 32 nt, Homo Sapiens
gaccagaaaaauuugaagucugaucagagauu

SEQ ID NO: 317497 - RNA, 32 nt, Homo Sapiens
guaagugaagcaugcagagugcuguuucuuuu

SEQ ID NO: 317498 - RNA, 30 nt, Homo Sapiens
uuuuaaccacuugccucuuucuccagcagc

SEQ ID NO: 317499 - RNA, 32 nt, Homo Sapiens
guucacugccuuguccuuucucucccugcucc

SEQ ID NO: 317500 - RNA, 32 nt, Homo Sapiens
ucucuagcguccucuuuuuuggugcugcuggu

SEQ ID NO: 317501 - RNA, 32 nt, Homo Sapiens
cucacccaaaggaaccgcuccuugucccuccu

SEQ ID NO: 317502 - RNA, 32 nt, Homo Sapiens
agagggagggugggugggugggagggggccuu

SEQ ID NO: 317503 - RNA, 32 nt, Homo Sapiens
gguagcaaaauaauagugaagauggaauaugu

SEQ ID NO: 317504 - RNA, 29 nt, Homo Sapiens
gcaacuucguguuuuaggaaaaaagaaag

SEQ ID NO: 317505 - RNA, 32 nt, Homo Sapiens
caguuuauuucuacugugcuuuauugcuacug

SEQ ID NO: 317506 - RNA, 32 nt, Homo Sapiens
cuguaggguaugguggcucagcuccuuugucc

SEQ ID NO: 317507 - RNA, 32 nt, Homo Sapiens
cgccugcgcgccccucgggcugcaccggcacu

SEQ ID NO: 317508 - RNA, 32 nt, Homo Sapiens
gcuuugcucggggcucuugauuggagcuuccg

SEQ ID NO: 317509 - RNA, 32 nt, Homo Sapiens
gcagccgggaggagcggcgcgcgcucggaccu

SEQ ID NO: 317510 - RNA, 32 nt, Homo Sapiens
ggauuaccaccaucguagcuaccauuagauua

SEQ ID NO: 317511 - RNA, 32 nt, Homo Sapiens
ucagucagcuaggcacccagcccccagugcgc

SEQ ID NO: 317512 - RNA, 32 nt, Homo Sapiens
agccgccagggcgaggcgacccggugcggggg

SEQ ID NO: 317513 - RNA, 32 nt, Homo Sapiens
ucaguggugugauuuuaccagaugcucccuca

SEQ ID NO: 317514 - RNA, 32 nt, Homo Sapiens
guuuauuguauauagauuugcauugggcaaga

SEQ ID NO: 317515 - RNA, 32 nt, Homo Sapiens
caggcucaagugcaaaaacugcggggccuuug

SEQ ID NO: 317516 - RNA, 27 nt, Homo Sapiens
ugguguaauuuucauguuuuuaauuug

SEQ ID NO: 317517 - RNA, 32 nt, Homo Sapiens
gggggagcugagguacugcugcacagugcuca

SEQ ID NO: 317518 - RNA, 32 nt, Homo Sapiens
aaaaaugcaaacacccugaggauucagagaac

SEQ ID NO: 317519 - RNA, 32 nt, Homo Sapiens
agucgggccgcugagcccacggcagcggccgc

SEQ ID NO: 317520 - RNA, 32 nt, Homo Sapiens
agcagaaugggaagaagauuggaugggagaga

SEQ ID NO: 317521 - RNA, 32 nt, Homo Sapiens
cgggcgcucgggccucggccauggcucacagg

SEQ ID NO: 317522 - RNA, 32 nt, Homo Sapiens
ugggguguauacauuuaugucuuugugaaaua

SEQ ID NO: 317523 - RNA, 32 nt, Homo Sapiens
gguuuggccauguuggccaggcugguuucaaa

SEQ ID NO: 317524 - RNA, 32 nt, Homo Sapiens
uauuugaucuauucuuuuuuucuuagucuagc

SEQ ID NO: 317525 - RNA, 32 nt, Homo Sapiens
ccugcggaggccgggaggcggcugcaaggggc

SEQ ID NO: 317526 - RNA, 32 nt, Homo Sapiens
cugaucuucucccuccucccaaccuccacccu

SEQ ID NO: 317527 - RNA, 32 nt, Homo Sapiens
cugaucucaagcaguaaauccugguauauguu

SEQ ID NO: 317528 - RNA, 32 nt, Homo Sapiens
aggagggaacauguccuaauucuucuguccug

SEQ ID NO: 317529 - RNA, 32 nt, Homo Sapiens
uguaacgugacaggauuuugcauuuuaaacug

SEQ ID NO: 317530 - RNA, 32 nt, Homo Sapiens
uuguuuuauguauacgguaaagaaauuuaaag

SEQ ID NO: 317531 - RNA, 32 nt, Homo Sapiens
aacagcuaguauauaauauauacagucuguau

SEQ ID NO: 317532 - RNA, 32 nt, Homo Sapiens
agugcgcuggagccccggguccuggcugccca

SEQ ID NO: 317533 - RNA, 32 nt, Homo Sapiens
caauacuguauauaaggcaaauauggacaguu

SEQ ID NO: 317534 - RNA, 32 nt, Homo Sapiens
caacaaaugaauuggggugaggcaaggcacaa

SEQ ID NO: 317535 - RNA, 32 nt, Homo Sapiens
gagggcggagggauccggaggcggcggaggga

SEQ ID NO: 317536 - RNA, 32 nt, Homo Sapiens
gacacugccaucucuagagcagaguggaggcc

SEQ ID NO: 317537 - RNA, 32 nt, Homo Sapiens
aaccccgggaugcaagguagcauggguccaag

SEQ ID NO: 317538 - RNA, 32 nt, Homo Sapiens
agacguguaaaacacaguuccuacugcacaag

SEQ ID NO: 317539 - RNA, 32 nt, Homo Sapiens
aaacccuggggguggggccaagcaaucuguga

SEQ ID NO: 317540 - RNA, 32 nt, Homo Sapiens
acaacuggaagacaguuacgcuucguccucca

SEQ ID NO: 317541 - RNA, 32 nt, Homo Sapiens
cugggaugccacauaacccuggcggucaugaa

SEQ ID NO: 317542 - RNA, 32 nt, Homo Sapiens
ucuuccacguacuuaaauuuucugugugggua

SEQ ID NO: 317543 - RNA, 32 nt, Homo Sapiens
ucuuacuguuagugaacuuguuuuagucugaa

SEQ ID NO: 317544 - RNA, 32 nt, Homo Sapiens
ccuggcugccuggcccaggagcagugaggagc

SEQ ID NO: 317545 - RNA, 32 nt, Homo Sapiens
aucccccacugccacacccuccccauucagac

SEQ ID NO: 317546 - RNA, 32 nt, Homo Sapiens
acgaugggcccuacuccaaaggaggcaaggac

SEQ ID NO: 317547 - RNA, 32 nt, Homo Sapiens
cuuuuauggguauuuuuguaguuucuuuguag

SEQ ID NO: 317548 - RNA, 32 nt, Homo Sapiens
uuuauccagggagaaaaauaaaaggaagccau

SEQ ID NO: 317549 - RNA, 32 nt, Homo Sapiens
gugaaaacuaaccaaguggcaguugugacuga

SEQ ID NO: 317550 - RNA, 32 nt, Homo Sapiens
cccuagcuguguucccgccgccgccccggcua

SEQ ID NO: 317551 - RNA, 32 nt, Homo Sapiens
ccgcacagcuccgagguuuggccucuaucguu

SEQ ID NO: 317552 - RNA, 32 nt, Homo Sapiens
caucuuacugucgaaauuaaaugugugaucca

SEQ ID NO: 317553 - RNA, 32 nt, Homo Sapiens
cccagcucuggaugaaggcaaaaacuguacug

SEQ ID NO: 317554 - RNA, 32 nt, Homo Sapiens
auguguuuuuauucucuagaucuguuaccaau

SEQ ID NO: 317555 - RNA, 32 nt, Homo Sapiens
gggaccuaccugccugaguccuggagacagaa

SEQ ID NO: 317556 - RNA, 32 nt, Homo Sapiens
gaacugcggagcauuguaggcgccuggcuggc

SEQ ID NO: 317557 - RNA, 32 nt, Homo Sapiens
uucuuaaaaauauuuuuucuguaccuaacuug

SEQ ID NO: 317558 - RNA, 32 nt, Homo Sapiens
aagaaaaaccccaacuuuuagcacugauacua

SEQ ID NO: 317559 - RNA, 32 nt, Homo Sapiens
cugcuggccaagucguggguccuccucugucc

SEQ ID NO: 317560 - RNA, 32 nt, Homo Sapiens
uugauacauuuuuauuugauaaacauucagug

SEQ ID NO: 317561 - RNA, 32 nt, Homo Sapiens
gaguuuucacccguaggaccgaaguguuuugu

SEQ ID NO: 317562 - RNA, 32 nt, Homo Sapiens
uguaaucauggaagugacaucccgcggucuuu

SEQ ID NO: 317563 - RNA, 32 nt, Homo Sapiens
cgcuugcagcuggccgaguccgggccagcuga

SEQ ID NO: 317564 - RNA, 32 nt, Homo Sapiens
aaaaaccgggauuauuuacagcagccacuauu

SEQ ID NO: 317565 - RNA, 32 nt, Homo Sapiens
ugccgcagccgcugcgccgccgccuagacuac

SEQ ID NO: 317566 - RNA, 32 nt, Homo Sapiens
gaaagagggaaggagggaaaaugagcauuauc

SEQ ID NO: 317567 - RNA, 32 nt, Homo Sapiens
ugcaugaggagcugagucaggucugcaguccu

SEQ ID NO: 317568 - RNA, 32 nt, Homo Sapiens
ucaaaauguuccacuuuuuuuuccuucaugga

SEQ ID NO: 317569 - RNA, 32 nt, Homo Sapiens
uuaguaaauaaucauuuuaguuuuucuuuguu

SEQ ID NO: 317570 - RNA, 32 nt, Homo Sapiens
uauacacuacauuucuuuuuuauuauuaugaa

SEQ ID NO: 317571 - RNA, 32 nt, Homo Sapiens
gcacuaagggaaguguaacaguugauugauuu

SEQ ID NO: 317572 - RNA, 32 nt, Homo Sapiens
cucagaggucccugugggggcugggggagcug

SEQ ID NO: 317573 - RNA, 32 nt, Homo Sapiens
cccacagggcccagccccucuccccugcccaa

SEQ ID NO: 317574 - RNA, 32 nt, Homo Sapiens
uuugauugugaaguccgcaugaaacacugcac

SEQ ID NO: 317575 - RNA, 32 nt, Homo Sapiens
gaggcugcuggcgagggcaggggagagggggc

SEQ ID NO: 317576 - RNA, 32 nt, Homo Sapiens
uucuccucaggcugguagcaaguucuggaucu

SEQ ID NO: 317577 - RNA, 32 nt, Homo Sapiens
aaagaaaugcaaagagaaaaugauuaguguac

SEQ ID NO: 317578 - RNA, 32 nt, Homo Sapiens
cccccgcccccauuuuaaaggcuuauuguugu

SEQ ID NO: 317579 - RNA, 32 nt, Homo Sapiens
agagcggucuugugcggcaaugugcuaccuua

SEQ ID NO: 317580 - RNA, 32 nt, Homo Sapiens
caugaccucccucugcuuguuuugggaccaug

SEQ ID NO: 317581 - RNA, 32 nt, Homo Sapiens
guaucuaaauuuguuauuacuaguuaugggcc

SEQ ID NO: 317582 - RNA, 32 nt, Homo Sapiens
aaggcccgccuggcaguguccuggggcaggag

SEQ ID NO: 317583 - RNA, 32 nt, Homo Sapiens
aggaaagggggaggagggaccaggaccugagu

SEQ ID NO: 317584 - RNA, 28 nt, Homo Sapiens
uggauggggcggcuggccgggcagaggg

SEQ ID NO: 317585 - RNA, 32 nt, Homo Sapiens
gggugaacagugaagacgaugaaaauauuucu

SEQ ID NO: 317586 - RNA, 32 nt, Homo Sapiens
aaaaggcaggauguuauugacauuauacacug

SEQ ID NO: 317587 - RNA, 32 nt, Homo Sapiens
ccucugugguuaugcucuuggcaccaaugggg

SEQ ID NO: 317588 - RNA, 32 nt, Homo Sapiens
agcugggcgcgguggcucaagcccauaauccc

SEQ ID NO: 317589 - RNA, 32 nt, Homo Sapiens
cuauuauaaacuauuaaaaugauagauguugg

SEQ ID NO: 317590 - RNA, 32 nt, Homo Sapiens
agggcagcgacggaagacugccuauaggacau

SEQ ID NO: 317591 - RNA, 32 nt, Homo Sapiens
cgccaagcugucugaggucugucccagguggc

SEQ ID NO: 317592 - RNA, 28 nt, Homo Sapiens
gucaguguuacaggguaaagguggaguu

SEQ ID NO: 317593 - RNA, 32 nt, Homo Sapiens
acucuuaucguggcacuguugcagcuuccucu

SEQ ID NO: 317594 - RNA, 32 nt, Homo Sapiens
gcucagaagugccugcccccacugucuggccu

SEQ ID NO: 317595 - RNA, 32 nt, Homo Sapiens
aggaaaugguggcaugaagacccucucccuuc

SEQ ID NO: 317596 - RNA, 32 nt, Homo Sapiens
accugcugugcccguuccuuccuccguagaag

SEQ ID NO: 317597 - RNA, 32 nt, Homo Sapiens
cagacagaggauguguguccacaugaguguuu

SEQ ID NO: 317598 - RNA, 32 nt, Homo Sapiens
aaugcugucguggucagcaagauccgugauuu

SEQ ID NO: 317599 - RNA, 32 nt, Homo Sapiens
ugcacugcuuugcaggcaucucucgcagcacc

SEQ ID NO: 317600 - RNA, 32 nt, Homo Sapiens
gggccucggccucggcggcuccucacccucac

SEQ ID NO: 317601 - RNA, 32 nt, Homo Sapiens
cuugaugugguuuguaauaaucaaauauugac

SEQ ID NO: 317602 - RNA, 32 nt, Homo Sapiens
auuauuauuauuauuauuauuuugagacggag

SEQ ID NO: 317603 - RNA, 32 nt, Homo Sapiens
ggccucggcgacccucuccgacccggccgccg

SEQ ID NO: 317604 - RNA, 30 nt, Homo Sapiens
ucuccauggcagccuuccuaucugcuggcc

SEQ ID NO: 317605 - RNA, 32 nt, Homo Sapiens
gacgcucauguaaauuugguuuuggugcucaa

SEQ ID NO: 317606 - RNA, 32 nt, Homo Sapiens
auuuuuaaaauuuauuuuuuuacugauuucuu

SEQ ID NO: 317607 - RNA, 32 nt, Homo Sapiens
ucuggccugcuggccugggcgucagggcgcau

SEQ ID NO: 317608 - RNA, 32 nt, Homo Sapiens
uugaggcggggucucugucacccaggcuggag

SEQ ID NO: 317609 - RNA, 32 nt, Homo Sapiens
ugguuacacaaaucaauuuuauuaaaaaucca

SEQ ID NO: 317610 - RNA, 32 nt, Homo Sapiens
caauucccugucauuuucagugaccccacccc

SEQ ID NO: 317611 - RNA, 32 nt, Homo Sapiens
cccacucacggaagggagguagcucagggacc

SEQ ID NO: 317612 - RNA, 32 nt, Homo Sapiens
gggccugagcgggagaggaaagagacuuggcu

SEQ ID NO: 317613 - RNA, 32 nt, Homo Sapiens
acgccugcacccucaccucuccccucuccugc

SEQ ID NO: 317614 - RNA, 32 nt, Homo Sapiens
agcucguuuuucagcacccccacccaccucca

SEQ ID NO: 317615 - RNA, 31 nt, Homo Sapiens
augaagaaauaaagccagcauugaucacuua

SEQ ID NO: 317616 - RNA, 28 nt, Homo Sapiens
aggauguucccugcucaggaggaggccg

SEQ ID NO: 317617 - RNA, 32 nt, Homo Sapiens
uuucagaaagacuuuacccaauucaguuguca

SEQ ID NO: 317618 - RNA, 32 nt, Homo Sapiens
uguuccuguuucuccuggcccugggugggcua

SEQ ID NO: 317619 - RNA, 32 nt, Homo Sapiens
augaaaauaaaauaaauguaugaaacaguauu

SEQ ID NO: 317620 - RNA, 32 nt, Homo Sapiens
cuaucuauauauauuuuugauagguuguggaa

SEQ ID NO: 317621 - RNA, 32 nt, Homo Sapiens
gaaauuuuacaccuucuuucuguaucagggua

SEQ ID NO: 317622 - RNA, 29 nt, Homo Sapiens
ugccccucugccaauaaccacaaaaugau

SEQ ID NO: 317623 - RNA, 32 nt, Homo Sapiens
augaaaucugggguuuuauauuuugauuagcc

SEQ ID NO: 317624 - RNA, 32 nt, Homo Sapiens
uccuggauguacaaauggaacuguggugaggg

SEQ ID NO: 317625 - RNA, 32 nt, Homo Sapiens
gagacuuggcuuuggccgcggggucggaggau

SEQ ID NO: 317626 - RNA, 32 nt, Homo Sapiens
aaaauuuuacuuuuguucuguauuuucaugug

SEQ ID NO: 317627 - RNA, 32 nt, Homo Sapiens
ucgccaccguucucaccucuuuguccgcugcc

SEQ ID NO: 317628 - RNA, 32 nt, Homo Sapiens
ccucucaaaaauacauugugaaugacugcaua

SEQ ID NO: 317629 - RNA, 32 nt, Homo Sapiens
uaauuuuuaaaccaugcuuguuuaaccugcug

SEQ ID NO: 317630 - RNA, 32 nt, Homo Sapiens
gacccugacaauguagaugauggucuuuuuau

SEQ ID NO: 317631 - RNA, 32 nt, Homo Sapiens
cucaugcucugggucagcagcuccaugguuug

SEQ ID NO: 317632 - RNA, 32 nt, Homo Sapiens
guugccacguugauucccuagggccuggcuua

SEQ ID NO: 317633 - RNA, 32 nt, Homo Sapiens
gagcuuaccugacuccagagcuuucaggaggg

SEQ ID NO: 317634 - RNA, 31 nt, Homo Sapiens
ucccaggcggcgcuccggccccgcgcucccu

SEQ ID NO: 317635 - RNA, 32 nt, Homo Sapiens
guugaaacucacuaguaauguuaaacaccauu

SEQ ID NO: 317636 - RNA, 32 nt, Homo Sapiens
cccuugcagcacaggccgcgggugccccaggc

SEQ ID NO: 317637 - RNA, 32 nt, Homo Sapiens
guccaggaauggguguggcagcccagagcccu

SEQ ID NO: 317638 - RNA, 32 nt, Homo Sapiens
ccaaggugaagccacugcugcaggugacgcgg

SEQ ID NO: 317639 - RNA, 32 nt, Homo Sapiens
ucuuccugcaauuuuccaacuaaacucuccgg

SEQ ID NO: 317640 - RNA, 32 nt, Homo Sapiens
auugaaagauuuuaaaauucauuugaaagucu

SEQ ID NO: 317641 - RNA, 32 nt, Homo Sapiens
guucucucauuuccaaaccaucagcugcuuuu

SEQ ID NO: 317642 - RNA, 32 nt, Homo Sapiens
ccauguuucucgcacagcagaguucuuggaag

SEQ ID NO: 317643 - RNA, 32 nt, Homo Sapiens
cuuguggacuuccaauaucauccuauccaaca

SEQ ID NO: 317644 - RNA, 32 nt, Homo Sapiens
acaauuggaaauccauuuuuguuguaaagaca

SEQ ID NO: 317645 - RNA, 32 nt, Homo Sapiens
cuuuaaccuguauucucuuuccucccagaacu

SEQ ID NO: 317646 - RNA, 32 nt, Homo Sapiens
ugaacauuguuauuaaauauauuuucagcuaa

SEQ ID NO: 317647 - RNA, 32 nt, Homo Sapiens
uagaacagcuggagguggacggcagagugccg

SEQ ID NO: 317648 - RNA, 32 nt, Homo Sapiens
gaccgggguuccagcgcucgggccguagccuu

SEQ ID NO: 317649 - RNA, 32 nt, Homo Sapiens
cuguuccaggcgcuggucagugcguguucuuu

SEQ ID NO: 317650 - RNA, 32 nt, Homo Sapiens
cuacugccaugugccucccacugaauggcagu

SEQ ID NO: 317651 - RNA, 32 nt, Homo Sapiens
uccgggcugugggaccgcugggcccccagcga

SEQ ID NO: 317652 - RNA, 32 nt, Homo Sapiens
uuauuuucgcacaaugggaaucucuaauguga

SEQ ID NO: 317653 - RNA, 32 nt, Homo Sapiens
guaagcccaucccagcuacuuguaaccaucuc

SEQ ID NO: 317654 - RNA, 32 nt, Homo Sapiens
acccagagcaagaggacugggugcugggcugc

SEQ ID NO: 317655 - RNA, 32 nt, Homo Sapiens
cuuccacccuccccagcuccugcacuucuccc

SEQ ID NO: 317656 - RNA, 32 nt, Homo Sapiens
cucuacguauuucuuucuauucguuucuuuuc

SEQ ID NO: 317657 - RNA, 32 nt, Homo Sapiens
gcauuucagccucucuuccaauaaaaaauagu

SEQ ID NO: 317658 - RNA, 32 nt, Homo Sapiens
uguggaccaaaagauggaguugguuuuuauuu

SEQ ID NO: 317659 - RNA, 32 nt, Homo Sapiens
uuccacaggagucaaagaaacuucugaaacug

SEQ ID NO: 317660 - RNA, 32 nt, Homo Sapiens
cuucccuuguaaacagaagcaacagaagggac

SEQ ID NO: 317661 - RNA, 32 nt, Homo Sapiens
uuagauuggggauuugggaggcuuagcaggaa

SEQ ID NO: 317662 - RNA, 31 nt, Homo Sapiens
ugggccccacccucagaacgagcugcagcag

SEQ ID NO: 317663 - RNA, 32 nt, Homo Sapiens
uguacagggcugggaaaggcugugugagggga

SEQ ID NO: 317664 - RNA, 32 nt, Homo Sapiens
ugguggguuuccagagugaugugaaagccucu

SEQ ID NO: 317665 - RNA, 31 nt, Homo Sapiens
cacuggacaaagaaggaacgauaagggguca

SEQ ID NO: 317666 - RNA, 32 nt, Homo Sapiens
ggaaggggucccgcccucccgccagaggccug

SEQ ID NO: 317667 - RNA, 32 nt, Homo Sapiens
cuuugacauuggaagcagaaucugaaacuuuc

SEQ ID NO: 317668 - RNA, 32 nt, Homo Sapiens
gaaaaugaaaaauuauuuuuaaaagaaccaaa

SEQ ID NO: 317669 - RNA, 32 nt, Homo Sapiens
ccguccucucugccggccccgggcgucugagc

SEQ ID NO: 317670 - RNA, 32 nt, Homo Sapiens
ugcaggaaauauaagaauauuuuugaagaaua

SEQ ID NO: 317671 - RNA, 32 nt, Homo Sapiens
gcacgccuagcguugucccgcggccaggcccg

SEQ ID NO: 317672 - RNA, 32 nt, Homo Sapiens
caaaagauccaacuuuuucucuaugccuuugc

SEQ ID NO: 317673 - RNA, 32 nt, Homo Sapiens
uccccugcagccugggucuggaugggaggaga

SEQ ID NO: 317674 - RNA, 32 nt, Homo Sapiens
ggauucuggugcuuccccuguuugcguggcag

SEQ ID NO: 317675 - RNA, 32 nt, Homo Sapiens
gcagcuuucuucaagagacuugcauaaaagca

SEQ ID NO: 317676 - RNA, 32 nt, Homo Sapiens
gcugagccaaaauaagacuuugaugcagaacu

SEQ ID NO: 317677 - RNA, 32 nt, Homo Sapiens
gacuucgcucguucucgcgugccucgcuccgc

SEQ ID NO: 317678 - RNA, 32 nt, Homo Sapiens
aucuuuguguauuugcaccuauuuaauguuua

SEQ ID NO: 317679 - RNA, 32 nt, Homo Sapiens
acugcuguugaugaugugaauuuuggaaauau

SEQ ID NO: 317680 - RNA, 32 nt, Homo Sapiens
auaauuuggccaaaaauaagaaauuggaaaga

SEQ ID NO: 317681 - RNA, 32 nt, Homo Sapiens
gauuuauauggacaaaauuaagucuuuaaaau

SEQ ID NO: 317682 - RNA, 30 nt, Homo Sapiens
gccacagcaggcgccucgggucccagaugu

SEQ ID NO: 317683 - RNA, 32 nt, Homo Sapiens
uuccccuccccacuccucucccacagagugcu

SEQ ID NO: 317684 - RNA, 32 nt, Homo Sapiens
cugccaguuguauaaaaguacagcacauucag

SEQ ID NO: 317685 - RNA, 32 nt, Homo Sapiens
cuuuauuucuguaucugacauauuucauaagc

SEQ ID NO: 317686 - RNA, 32 nt, Homo Sapiens
cuuuaacuuggugugcaauuugaaaggaugug

SEQ ID NO: 317687 - RNA, 32 nt, Homo Sapiens
aggaccccgagggcugaggagcagccaggacc

SEQ ID NO: 317688 - RNA, 32 nt, Homo Sapiens
cacugcagcaguaaagaugacucugaagaaug

SEQ ID NO: 317689 - RNA, 31 nt, Homo Sapiens
aaacggcagcgcaaucuacuguuugugacug

SEQ ID NO: 317690 - RNA, 32 nt, Homo Sapiens
ucucucuaaaaauaaaaugauguaugauuugu

SEQ ID NO: 317691 - RNA, 32 nt, Homo Sapiens
agccaaaaacucuuguucuccucacauucucu

SEQ ID NO: 317692 - RNA, 32 nt, Homo Sapiens
uucuaagaugcauggaacuaaaauguggaaag

SEQ ID NO: 317693 - RNA, 32 nt, Homo Sapiens
agccuaugaagaugggggcaaggauacaucag

SEQ ID NO: 317694 - RNA, 32 nt, Homo Sapiens
gacaacacuguagaggaauuaccagcuggaaa

SEQ ID NO: 317695 - RNA, 32 nt, Homo Sapiens
gauuuugucauucuucaaauugcuuuuccuau

SEQ ID NO: 317696 - RNA, 32 nt, Homo Sapiens
ucccacuuuuuacuuuucguccaaauaaaaug

SEQ ID NO: 317697 - RNA, 27 nt, Homo Sapiens
ggaugguacuucuucagccucguuaga

SEQ ID NO: 317698 - RNA, 31 nt, Homo Sapiens
uuugcacuccccucagcuagacgcacagacu

SEQ ID NO: 317699 - RNA, 32 nt, Homo Sapiens
agaaucuccgcugccucuccagcccuuuugca

SEQ ID NO: 317700 - RNA, 32 nt, Homo Sapiens
augauaacagcccuuugccaaagcagaccucc

SEQ ID NO: 317701 - RNA, 32 nt, Homo Sapiens
gcauguacuuauuugcauuugcuggcaguuca

SEQ ID NO: 317702 - RNA, 32 nt, Homo Sapiens
aauucugucuuaauaaagaaagcuacuucuca

SEQ ID NO: 317703 - RNA, 32 nt, Homo Sapiens
ugggacagcaaccuguagaguggccagcgagg

SEQ ID NO: 317704 - RNA, 27 nt, Homo Sapiens
ccagccccuuucuucagggccccaagg

SEQ ID NO: 317705 - RNA, 32 nt, Homo Sapiens
ucuguaggggucagacccgagcagccuggacu

SEQ ID NO: 317706 - RNA, 32 nt, Homo Sapiens
cacacuccccccagccuucaccuggccaugaa

SEQ ID NO: 317707 - RNA, 32 nt, Homo Sapiens
cagguuggacauggcuuuugggccauaguugg

SEQ ID NO: 317708 - RNA, 32 nt, Homo Sapiens
cgcccaagggaagagggaggugaggacuugac

SEQ ID NO: 317709 - RNA, 32 nt, Homo Sapiens
gagcagcagaagugccccuucuccaggaucaa

SEQ ID NO: 317710 - RNA, 32 nt, Homo Sapiens
ucuuuucaguuauuaugaaugaugcuguucug

SEQ ID NO: 317711 - RNA, 32 nt, Homo Sapiens
ggcuggugggcgagcgagaggcggcggaaugg

SEQ ID NO: 317712 - RNA, 32 nt, Homo Sapiens
ccuccucccacucugcggcccgcggccccugg

SEQ ID NO: 317713 - RNA, 32 nt, Homo Sapiens
augacucacagcuacgacguggccugugcugc

SEQ ID NO: 317714 - RNA, 32 nt, Homo Sapiens
gggccggcgguucgacggcgggcccgggguuc

SEQ ID NO: 317715 - RNA, 29 nt, Homo Sapiens
gugcggaggggacagaggacccuggcacu

SEQ ID NO: 317716 - RNA, 32 nt, Homo Sapiens
uuggacagugaggccuggccuggggcacugga

SEQ ID NO: 317717 - RNA, 32 nt, Homo Sapiens
cugcuugcaugccuaugggcugcucucucacc

SEQ ID NO: 317718 - RNA, 32 nt, Homo Sapiens
uacucuguguauauauuauacauauauaaaua

SEQ ID NO: 317719 - RNA, 32 nt, Homo Sapiens
ccuuccaugaccuccccuccccagcccaaugc

SEQ ID NO: 317720 - RNA, 32 nt, Homo Sapiens
cuuuuuaucuggaggggagagaaggauucuag

SEQ ID NO: 317721 - RNA, 32 nt, Homo Sapiens
ucaugaguaugccgcugcacuccagccugggg

SEQ ID NO: 317722 - RNA, 32 nt, Homo Sapiens
acuuucauugaugaccauaucuccagggaugu

SEQ ID NO: 317723 - RNA, 32 nt, Homo Sapiens
cugaucgacguggugacgccccggggcgccua

SEQ ID NO: 317724 - RNA, 32 nt, Homo Sapiens
ggauaaccucgcagggugggccggagggcggg

SEQ ID NO: 317725 - RNA, 30 nt, Homo Sapiens
gacggagugaauggcggcggcggcugggau

SEQ ID NO: 317726 - RNA, 32 nt, Homo Sapiens
auguccgggaucuggaucagauucugggggcu

SEQ ID NO: 317727 - RNA, 32 nt, Homo Sapiens
uguuuaguuggaaaaaguugccuuaauguuug

SEQ ID NO: 317728 - RNA, 32 nt, Homo Sapiens
guguguugguggcugugcgcacgcacacaaga

SEQ ID NO: 317729 - RNA, 32 nt, Homo Sapiens
aaaccucccuuuuuaauugccuguagaaggca

SEQ ID NO: 317730 - RNA, 32 nt, Homo Sapiens
guuggucacagcaacucaccaugccagugcag

SEQ ID NO: 317731 - RNA, 32 nt, Homo Sapiens
ucacggaagacugaagcagaaacaguggauua

SEQ ID NO: 317732 - RNA, 32 nt, Homo Sapiens
ccuucugagccugugcagcugcuggagcacgg

SEQ ID NO: 317733 - RNA, 32 nt, Homo Sapiens
ccccuuucuaagccgauaucaacaagacugga

SEQ ID NO: 317734 - RNA, 32 nt, Homo Sapiens
uuccugaaggugccucuuggccuaaagaagcc

SEQ ID NO: 317735 - RNA, 32 nt, Homo Sapiens
uguuuaacuuaaacagaugcuuuauggcaccu

SEQ ID NO: 317736 - RNA, 32 nt, Homo Sapiens
uuuacagaaaaugauuuuuacaauuaaaguuc

SEQ ID NO: 317737 - RNA, 32 nt, Homo Sapiens
ucacacgccauccagcagcgcuaagguggaca

SEQ ID NO: 317738 - RNA, 32 nt, Homo Sapiens
caacucccucccaccagcugacgaauggugga

SEQ ID NO: 317739 - RNA, 32 nt, Homo Sapiens
uuauuuuuucuuuucuaugcaagauaagagau

SEQ ID NO: 317740 - RNA, 32 nt, Homo Sapiens
auagucugcuccaucuugauaguuaagugauu

SEQ ID NO: 317741 - RNA, 32 nt, Homo Sapiens
gauuggagggcuuaggucuggaggauucaaga

SEQ ID NO: 317742 - RNA, 32 nt, Homo Sapiens
aaaaaccuacagacaaguacuuugagagaauu

SEQ ID NO: 317743 - RNA, 32 nt, Homo Sapiens
ccgaguuugcgacucgcgggaccggcgucccc

SEQ ID NO: 317744 - RNA, 32 nt, Homo Sapiens
gcccgcuguccgccagcccgcgggagggagga

SEQ ID NO: 317745 - RNA, 32 nt, Homo Sapiens
uuuauaaaugacaagugcuuugaaaugcagaa

SEQ ID NO: 317746 - RNA, 32 nt, Homo Sapiens
gcuuggcggucccaggccuguguagugucucu

SEQ ID NO: 317747 - RNA, 32 nt, Homo Sapiens
gucauggaagagcuauacaauuuuccuaaaug

SEQ ID NO: 317748 - RNA, 32 nt, Homo Sapiens
caacagcgguacgagcccgggcggcggcagca

SEQ ID NO: 317749 - RNA, 30 nt, Homo Sapiens
uauauuaacuucuagggggaaaaauccauu

SEQ ID NO: 317750 - RNA, 32 nt, Homo Sapiens
uuaacaucaauggagcucuguaugugggugga

SEQ ID NO: 317751 - RNA, 32 nt, Homo Sapiens
guguuuuuaaggaaacaaaacuauuuuuuuaa

SEQ ID NO: 317752 - RNA, 32 nt, Homo Sapiens
aggcacgcucacccucacccucaugggcacug

SEQ ID NO: 317753 - RNA, 32 nt, Homo Sapiens
acaagugucauuuguggaaucccaaggcagcg

SEQ ID NO: 317754 - RNA, 32 nt, Homo Sapiens
uucaguugacauuaaaagaaaaucugguaguu

SEQ ID NO: 317755 - RNA, 32 nt, Homo Sapiens
cugggacuccggcggagaaucuaaacguaaag

SEQ ID NO: 317756 - RNA, 32 nt, Homo Sapiens
ccaaccugucuccaccccuguauuucaagauc

SEQ ID NO: 317757 - RNA, 32 nt, Homo Sapiens
uggcuuucaucgcuuuuucuacauguuuuuag

SEQ ID NO: 317758 - RNA, 32 nt, Homo Sapiens
ugguggccccagcucagaaucugcagaagugc

SEQ ID NO: 317759 - RNA, 32 nt, Homo Sapiens
gacuccccauucuccuacccccacuccccauc

SEQ ID NO: 317760 - RNA, 32 nt, Homo Sapiens
gaaccauaaaauguccaguaagaucacuguuu

SEQ ID NO: 317761 - RNA, 32 nt, Homo Sapiens
acggagcgcccgagaugauggugcuggacaag

SEQ ID NO: 317762 - RNA, 32 nt, Homo Sapiens
uuaagacuggagcaaagcuuuuccaaggugag

SEQ ID NO: 317763 - RNA, 32 nt, Homo Sapiens
ugccuacaaaaauacauguauauuuuauggug

SEQ ID NO: 317764 - RNA, 32 nt, Homo Sapiens
uacaguuuggaggugauggugcagcaguggaa

SEQ ID NO: 317765 - RNA, 32 nt, Homo Sapiens
cguaggaguucgccagggaagugggacacgac

SEQ ID NO: 317766 - RNA, 32 nt, Homo Sapiens
gccuagcaaaagaacagacucccuuuuucaaa

SEQ ID NO: 317767 - RNA, 32 nt, Homo Sapiens
agguccagccucugugggccugugaccugcag

SEQ ID NO: 317768 - RNA, 32 nt, Homo Sapiens
ccccagcuuccucuccucggaaggcaauugug

SEQ ID NO: 317769 - RNA, 30 nt, Homo Sapiens
uuuggggccaggcgcgguggcucacgccug

SEQ ID NO: 317770 - RNA, 32 nt, Homo Sapiens
cccagcuuccuccccgcaacccggugaaagcc

SEQ ID NO: 317771 - RNA, 28 nt, Homo Sapiens
uuauucagugugaccaggaugggcggga

SEQ ID NO: 317772 - RNA, 32 nt, Homo Sapiens
ccaggcuccuccuccgcccgggccgccucacc

SEQ ID NO: 317773 - RNA, 32 nt, Homo Sapiens
ugacucuggugccuuaucucgaagggaccaga

SEQ ID NO: 317774 - RNA, 32 nt, Homo Sapiens
cauacauuggcaagauaaauaguugucauauu

SEQ ID NO: 317775 - RNA, 32 nt, Homo Sapiens
acccugcaaagccccaggccaagggcaacuuc

SEQ ID NO: 317776 - RNA, 32 nt, Homo Sapiens
guagcugggguggccccuccagugcgcucccc

SEQ ID NO: 317777 - RNA, 32 nt, Homo Sapiens
ggcuuuauaaagaagaaggcgagaggagacac

SEQ ID NO: 317778 - RNA, 32 nt, Homo Sapiens
gaggaggacaaggcaagaagaugggucuucau

SEQ ID NO: 317779 - RNA, 32 nt, Homo Sapiens
ugggucaaugcucucuccuuggagcaagaagc

SEQ ID NO: 317780 - RNA, 32 nt, Homo Sapiens
cuccucgaagcuggugggagccaggaacgggg

SEQ ID NO: 317781 - RNA, 28 nt, Homo Sapiens
uuuguuuuucaaauuauguguuucucag

SEQ ID NO: 317782 - RNA, 32 nt, Homo Sapiens
acccacgguguugcucauucucucacguuauu

SEQ ID NO: 317783 - RNA, 30 nt, Homo Sapiens
cacgagggcaggcgucggcuagugucggga

SEQ ID NO: 317784 - RNA, 32 nt, Homo Sapiens
gagagcaagucgagggccguguaggaguugga

SEQ ID NO: 317785 - RNA, 32 nt, Homo Sapiens
accuuccucucuuaaaaacuuaguuuuccaaa

SEQ ID NO: 317786 - RNA, 32 nt, Homo Sapiens
ugugagccagagagaaaguaaaagcacuucac

SEQ ID NO: 317787 - RNA, 32 nt, Homo Sapiens
cagacagccugccuugugcugcauaccuggcu

SEQ ID NO: 317788 - RNA, 32 nt, Homo Sapiens
gcaaaugcagucaagucacuaccaccaccaca

SEQ ID NO: 317789 - RNA, 32 nt, Homo Sapiens
auaugacacaugcccaugaugagaagcagaac

SEQ ID NO: 317790 - RNA, 32 nt, Homo Sapiens
ccucagccccccaccccagaucuuagcuggca

SEQ ID NO: 317791 - RNA, 32 nt, Homo Sapiens
auguuuuguaaauacuggagaagcuuugacca

SEQ ID NO: 317792 - RNA, 32 nt, Homo Sapiens
cacuuauauuuuagccuuauuauuuucuguag

SEQ ID NO: 317793 - RNA, 32 nt, Homo Sapiens
uuuaguguugucugaaaugcaagagggaaggu

SEQ ID NO: 317794 - RNA, 32 nt, Homo Sapiens
gaaguuccucuccaaugacacggugcagcuga

SEQ ID NO: 317795 - RNA, 32 nt, Homo Sapiens
uaaugcuaaugagagguuuagcacuuaagauc

SEQ ID NO: 317796 - RNA, 32 nt, Homo Sapiens
ggaaagccacaggaaggaagcggcaccugaug

SEQ ID NO: 317797 - RNA, 32 nt, Homo Sapiens
cgacagcagcccuccgcccacucugcccccug

SEQ ID NO: 317798 - RNA, 32 nt, Homo Sapiens
auuaugcuaauccuucucaaauaaaaauaaag

SEQ ID NO: 317799 - RNA, 32 nt, Homo Sapiens
guaugcuucuuuuaacuccuggauaaacuuuu

SEQ ID NO: 317800 - RNA, 32 nt, Homo Sapiens
aucuuuuuuccacaguguuuaaucugucauua

SEQ ID NO: 317801 - RNA, 32 nt, Homo Sapiens
ggaagagcaggauucgcacccccgucaucgcu

SEQ ID NO: 317802 - RNA, 32 nt, Homo Sapiens
agcuucccgagcugaugcuaaagaagacagac

SEQ ID NO: 317803 - RNA, 32 nt, Homo Sapiens
cuuauuugagaaaaaauggauuucuuaaaaac

SEQ ID NO: 317804 - RNA, 32 nt, Homo Sapiens
gaucaucgccuggggggccuuugccaacgugg

SEQ ID NO: 317805 - RNA, 32 nt, Homo Sapiens
ugaagauaauucacaauucaaagaucacccaa

SEQ ID NO: 317806 - RNA, 32 nt, Homo Sapiens
aaggcaggaaaagggauggaauugauggugac

SEQ ID NO: 317807 - RNA, 32 nt, Homo Sapiens
gucccucacagcaccaaauguucccugguuau

SEQ ID NO: 317808 - RNA, 32 nt, Homo Sapiens
aagcauacaaccuagaaaauguuuaucacauc

SEQ ID NO: 317809 - RNA, 32 nt, Homo Sapiens
acccuuuccuugccggccggcacuucggcugc

SEQ ID NO: 317810 - RNA, 32 nt, Homo Sapiens
ccuccgcuucccuggguccaccgcggaucccu

SEQ ID NO: 317811 - RNA, 32 nt, Homo Sapiens
auguuguaaaauguagaucauaggauagcuga

SEQ ID NO: 317812 - RNA, 32 nt, Homo Sapiens
aaauaguuuccucuccugcucugugcaguagc

SEQ ID NO: 317813 - RNA, 32 nt, Homo Sapiens
uauacuuaauauguauugauuaaaagaaacau

SEQ ID NO: 317814 - RNA, 32 nt, Homo Sapiens
guuuacuuaggaccccauacaucuuagcccau

SEQ ID NO: 317815 - RNA, 32 nt, Homo Sapiens
cacaucacuccagccccauaaagagugucaug

SEQ ID NO: 317816 - RNA, 32 nt, Homo Sapiens
cgcaguagguucuagggggcggugcuggccgc

SEQ ID NO: 317817 - RNA, 32 nt, Homo Sapiens
aggugaggggguaggaggagggcccucagcug

SEQ ID NO: 317818 - RNA, 32 nt, Homo Sapiens
ucagggcccucccugcacuccccucuugcugc

SEQ ID NO: 317819 - RNA, 31 nt, Homo Sapiens
cucgugcggcacuugucugucugccacagag

SEQ ID NO: 317820 - RNA, 32 nt, Homo Sapiens
cuuggagaacacagcccuccagugucuccugc

SEQ ID NO: 317821 - RNA, 32 nt, Homo Sapiens
ugacuaaauaaaaaguacaaagggcacauaua

SEQ ID NO: 317822 - RNA, 32 nt, Homo Sapiens
cauugaagccccacaaagccagauugcaguuc

SEQ ID NO: 317823 - RNA, 32 nt, Homo Sapiens
ucuuccacggugugcugcuuucccuccgagcc

SEQ ID NO: 317824 - RNA, 32 nt, Homo Sapiens
ugcucaaucuaccugcagugacugaugcaaaa

SEQ ID NO: 317825 - RNA, 32 nt, Homo Sapiens
agaccccucacauccaauccuguccuguaaca

SEQ ID NO: 317826 - RNA, 32 nt, Homo Sapiens
auuggaucuucaguaaccuuuuuauuuccuag

SEQ ID NO: 317827 - RNA, 32 nt, Homo Sapiens
ccgcuggauuagcucccuggggcccccugcug

SEQ ID NO: 317828 - RNA, 32 nt, Homo Sapiens
aagagggcuuucuggaggagguggcagcugag

SEQ ID NO: 317829 - RNA, 32 nt, Homo Sapiens
aacguauagggucaggguugggggaaaaauac

SEQ ID NO: 317830 - RNA, 32 nt, Homo Sapiens
gcucaagaaaucauggacucacaggguccugu

SEQ ID NO: 317831 - RNA, 32 nt, Homo Sapiens
acagauggauggcgcgaagaccucugugucuc

SEQ ID NO: 317832 - RNA, 32 nt, Homo Sapiens
gcugcacuggcccugcggcgggccccagagcc

SEQ ID NO: 317833 - RNA, 32 nt, Homo Sapiens
auuuuacuauagauaauauauguuguuucugg

SEQ ID NO: 317834 - RNA, 32 nt, Homo Sapiens
ucaaagcucacaaauuccugcuguuggcugug

SEQ ID NO: 317835 - RNA, 32 nt, Homo Sapiens
uggcagcuauagaauacacuaugugcauuuau

SEQ ID NO: 317836 - RNA, 32 nt, Homo Sapiens
uaaggaauuaucuauuuugucauaguauuuaa

SEQ ID NO: 317837 - RNA, 32 nt, Homo Sapiens
acucuuguuguccagucuggagugcaauggca

SEQ ID NO: 317838 - RNA, 32 nt, Homo Sapiens
gcccuaacugaggaauuuaucuccaggccuga

SEQ ID NO: 317839 - RNA, 32 nt, Homo Sapiens
ugaauuacaaugaaacaugucuuauuacuaaa

SEQ ID NO: 317840 - RNA, 32 nt, Homo Sapiens
gaggcugggcagggccccggcgcuggagaggu

SEQ ID NO: 317841 - RNA, 32 nt, Homo Sapiens
uuaucaccaaaaugaauguuaaugaauuuaaa

SEQ ID NO: 317842 - RNA, 32 nt, Homo Sapiens
cuccuaaauauguuucugacugcagaccaaag

SEQ ID NO: 317843 - RNA, 32 nt, Homo Sapiens
cggugcggaggccggcucucgcgagaaagcau

SEQ ID NO: 317844 - RNA, 31 nt, Homo Sapiens
agucaagcagucugccugccucguucuccaa

SEQ ID NO: 317845 - RNA, 32 nt, Homo Sapiens
caccacccacugacguuauuuuuauacuagau

SEQ ID NO: 317846 - RNA, 32 nt, Homo Sapiens
aaaagcucagacaguuggcagacguccaguua

SEQ ID NO: 317847 - RNA, 32 nt, Homo Sapiens
ccacaccacccucucccgacagcccucaaaga

SEQ ID NO: 317848 - RNA, 32 nt, Homo Sapiens
ugaugaccuagcugcgugcggagccugcgcag

SEQ ID NO: 317849 - RNA, 32 nt, Homo Sapiens
cuuuuuacagaaaauaugacagaaaacaacua

SEQ ID NO: 317850 - RNA, 32 nt, Homo Sapiens
ucaccgcgcccgccucgccucccgcggcugcc

SEQ ID NO: 317851 - RNA, 32 nt, Homo Sapiens
aacuaucaacugaguaaacagacaacuuacag

SEQ ID NO: 317852 - RNA, 32 nt, Homo Sapiens
ccaaugauuguaagaaaacaaacaaauuuauc

SEQ ID NO: 317853 - RNA, 32 nt, Homo Sapiens
uuucuuuccuucccaauaggugaucuuaauua

SEQ ID NO: 317854 - RNA, 32 nt, Homo Sapiens
acccugggcgggggcgcgcgagaagcggugac

SEQ ID NO: 317855 - RNA, 32 nt, Homo Sapiens
uggcauccccuccccaggaucucgggcugcca

SEQ ID NO: 317856 - RNA, 32 nt, Homo Sapiens
caugugucugcccuucaggagcucgcagcugg

SEQ ID NO: 317857 - RNA, 29 nt, Homo Sapiens
cuacaugauguuauguaccauaugaucug

SEQ ID NO: 317858 - RNA, 32 nt, Homo Sapiens
gucagccucugcaccccacccacagccuccca

SEQ ID NO: 317859 - RNA, 32 nt, Homo Sapiens
auaacccucaguacugguguguagaagaugaa

SEQ ID NO: 317860 - RNA, 32 nt, Homo Sapiens
ucaagucagcuuaguggagauuuagcuaugcc

SEQ ID NO: 317861 - RNA, 32 nt, Homo Sapiens
gugaaggauuguagggagucagaaagacaagg

SEQ ID NO: 317862 - RNA, 32 nt, Homo Sapiens
cgcgcggcgccgggcgcugacugagggucgug

SEQ ID NO: 317863 - RNA, 32 nt, Homo Sapiens
cccuuucggccgugggggagggggcucguguc

SEQ ID NO: 317864 - RNA, 32 nt, Homo Sapiens
ucauuaguccacggucuggucuucagcuaccc

SEQ ID NO: 317865 - RNA, 29 nt, Homo Sapiens
ggggcugucacugagugaaagugacaucc

SEQ ID NO: 317866 - RNA, 32 nt, Homo Sapiens
cggaaggaagcagugcccggcgacacugcacc

SEQ ID NO: 317867 - RNA, 32 nt, Homo Sapiens
cauugugguuuuaauuucaaaauauuugucau

SEQ ID NO: 317868 - RNA, 32 nt, Homo Sapiens
caagcggcuuucugggucucagcccucucugc

SEQ ID NO: 317869 - RNA, 32 nt, Homo Sapiens
gcauccugucccagcuucagccccacacucau

SEQ ID NO: 317870 - RNA, 32 nt, Homo Sapiens
caguucccacuuuugcucucauuugccuucac

SEQ ID NO: 317871 - RNA, 32 nt, Homo Sapiens
uuccaggucuaaaauuccaugauuuuguauuu

SEQ ID NO: 317872 - RNA, 32 nt, Homo Sapiens
ccuugccugagccaugugcagagcuggggucc

SEQ ID NO: 317873 - RNA, 32 nt, Homo Sapiens
acaguuaaugaaacuaucuuuaaauguuauuc

SEQ ID NO: 317874 - RNA, 32 nt, Homo Sapiens
gauguagucaccuuaacuaucuuucaauucca

SEQ ID NO: 317875 - RNA, 32 nt, Homo Sapiens
gaucuuacaagauauugaugauaacacuuaaa

SEQ ID NO: 317876 - RNA, 32 nt, Homo Sapiens
cggaguggcguguuccuucucccuggguccga

SEQ ID NO: 317877 - RNA, 32 nt, Homo Sapiens
agcugagcgucauccagacaagacugaaccau

SEQ ID NO: 317878 - RNA, 32 nt, Homo Sapiens
gaauggaaguuccaucuucguuuucagaagac

SEQ ID NO: 317879 - RNA, 32 nt, Homo Sapiens
gccccaggacggugcugcaggugcggggcucu

SEQ ID NO: 317880 - RNA, 32 nt, Homo Sapiens
ugggugugguggcucaugcauguaaucccagc

SEQ ID NO: 317881 - RNA, 32 nt, Homo Sapiens
gauaaucagcccugcacggccauccucagcaa

SEQ ID NO: 317882 - RNA, 32 nt, Homo Sapiens
guuucaagcccuucuguaaaauaugaagaaaa

SEQ ID NO: 317883 - RNA, 30 nt, Homo Sapiens
acuucuuguuaggacucagaagcuuuauua

SEQ ID NO: 317884 - RNA, 32 nt, Homo Sapiens
caaaauaaauguuuuauguacuaauaucuuuc

SEQ ID NO: 317885 - RNA, 32 nt, Homo Sapiens
cugcuucgcucgcgcucuacgcgcucaguccc

SEQ ID NO: 317886 - RNA, 32 nt, Homo Sapiens
cuggccuuacuuugauuuuuaaaacaagagac

SEQ ID NO: 317887 - RNA, 32 nt, Homo Sapiens
uuuuacccuuuugucaaagagaauuaacuuug

SEQ ID NO: 317888 - RNA, 32 nt, Homo Sapiens
augauggaggauguaagcaaguaacacagcca

SEQ ID NO: 317889 - RNA, 32 nt, Homo Sapiens
acccugaaaacagcugcagaugaagauggcaa

SEQ ID NO: 317890 - RNA, 32 nt, Homo Sapiens
cuggccauacccugugaauccucgggcuguga

SEQ ID NO: 317891 - RNA, 32 nt, Homo Sapiens
aucgugugcuuuggaacagaguauuguugaag

SEQ ID NO: 317892 - RNA, 32 nt, Homo Sapiens
aauuggagaguaccuuguuauauauacagaua

SEQ ID NO: 317893 - RNA, 32 nt, Homo Sapiens
agaguucgaggaauuaccaacuguaguuuuag

SEQ ID NO: 317894 - RNA, 32 nt, Homo Sapiens
agaaccccagcccccaggaggccccugcugca

SEQ ID NO: 317895 - RNA, 32 nt, Homo Sapiens
uuugguuuaaaggagccuucucaucucuggcc

SEQ ID NO: 317896 - RNA, 32 nt, Homo Sapiens
gcuuuugggaccagcucugaugaaccugugua

SEQ ID NO: 317897 - RNA, 32 nt, Homo Sapiens
gaagggucugccccgagcuuucugguuggcag

SEQ ID NO: 317898 - RNA, 27 nt, Homo Sapiens
aggcaguccuucucuuuuagcaccuug

SEQ ID NO: 317899 - RNA, 32 nt, Homo Sapiens
aacccgaggccgccggcgcccggaccaugucg

SEQ ID NO: 317900 - RNA, 32 nt, Homo Sapiens
agaaagcuuccaguuguccccagcugccagga

SEQ ID NO: 317901 - RNA, 32 nt, Homo Sapiens
agcacagaaagauauugccauuuuacagcuua

SEQ ID NO: 317902 - RNA, 32 nt, Homo Sapiens
uaugggagggcagggguuugggugugggugca

SEQ ID NO: 317903 - RNA, 32 nt, Homo Sapiens
uauucucagaucugccaggucucagaagagug

SEQ ID NO: 317904 - RNA, 32 nt, Homo Sapiens
uuggcugugguaaugcucuacugggcccuuca

SEQ ID NO: 317905 - RNA, 32 nt, Homo Sapiens
ccucagaggagcugcaagcccguggccuggcc

SEQ ID NO: 317906 - RNA, 32 nt, Homo Sapiens
acagcaggucgugauccgggucgggacacugc

SEQ ID NO: 317907 - RNA, 32 nt, Homo Sapiens
cgaguuaagcuggggguguggagcagccaaga

SEQ ID NO: 317908 - RNA, 32 nt, Homo Sapiens
gaaaaacucaaaccucuguuauuugggagcuc

SEQ ID NO: 317909 - RNA, 32 nt, Homo Sapiens
caagcccgugugccagggaugugcugggggcg

SEQ ID NO: 317910 - RNA, 32 nt, Homo Sapiens
guccugagcggcucggccccagaucccgaucc

SEQ ID NO: 317911 - RNA, 32 nt, Homo Sapiens
cuauuuuuaaccaaauaagaauaacacucaag

SEQ ID NO: 317912 - RNA, 32 nt, Homo Sapiens
ucucagagguagggacaaaaccacaucagguu

SEQ ID NO: 317913 - RNA, 32 nt, Homo Sapiens
gagccuaaaggagauggcgcgcgggccuggcu

SEQ ID NO: 317914 - RNA, 32 nt, Homo Sapiens
ugcaugcgugcgcgcacacacacacacacaca

SEQ ID NO: 317915 - RNA, 32 nt, Homo Sapiens
agcuggagagagaucaggaaaacugagacaaa

SEQ ID NO: 317916 - RNA, 32 nt, Homo Sapiens
gggcacuugaguuuuggcaaggcugacagagc

SEQ ID NO: 317917 - RNA, 29 nt, Homo Sapiens
cuugggcauacuuugucuauagaaaaaua

SEQ ID NO: 317918 - RNA, 32 nt, Homo Sapiens
agucaccccugccuaaagauagaauggcuucu

SEQ ID NO: 317919 - RNA, 28 nt, Homo Sapiens
uguaagaugauaaagcauuugaauggua

SEQ ID NO: 317920 - RNA, 32 nt, Homo Sapiens
ccugagcaauggcaggaugugaacuuccccau

SEQ ID NO: 317921 - RNA, 32 nt, Homo Sapiens
uucugagaggggcuguuagcauugcgcagcau

SEQ ID NO: 317922 - RNA, 28 nt, Homo Sapiens
cauuugcuuuuguagauguguuuucaga

SEQ ID NO: 317923 - RNA, 32 nt, Homo Sapiens
augagaagaugaugaaguguucagaagggaga

SEQ ID NO: 317924 - RNA, 32 nt, Homo Sapiens
gcuccaggcuccugcugcagcuccugggccgc

SEQ ID NO: 317925 - RNA, 32 nt, Homo Sapiens
gcaccccagcacagcgcaggacaggcuauuca

SEQ ID NO: 317926 - RNA, 32 nt, Homo Sapiens
ugcgggauccugagaccgaaggguguuugguu

SEQ ID NO: 317927 - RNA, 32 nt, Homo Sapiens
cucucauuguagugacucccaaccuaccuaau

SEQ ID NO: 317928 - RNA, 32 nt, Homo Sapiens
cugaucuagggugauugugucuggagacccuu

SEQ ID NO: 317929 - RNA, 32 nt, Homo Sapiens
uggauaccaggaggcagcagugcucauccccu

SEQ ID NO: 317930 - RNA, 32 nt, Homo Sapiens
ucacuuuguacuauuuaaauuuauggaacuag

SEQ ID NO: 317931 - RNA, 32 nt, Homo Sapiens
caauugauauuugaaauugacuguagagcauu

SEQ ID NO: 317932 - RNA, 32 nt, Homo Sapiens
agcgggccgucucccuuggcccagagacggag

SEQ ID NO: 317933 - RNA, 32 nt, Homo Sapiens
caggagcugagccgcaagcagcaggagguggu

SEQ ID NO: 317934 - RNA, 32 nt, Homo Sapiens
aaaagaaaaauauuuuugagggaacuguuaua

SEQ ID NO: 317935 - RNA, 29 nt, Homo Sapiens
ggcucuuuguauaauuauggcaaaguaga

SEQ ID NO: 317936 - RNA, 32 nt, Homo Sapiens
gaccucuagagcaauucaguccuguuggaaau

SEQ ID NO: 317937 - RNA, 32 nt, Homo Sapiens
gcacucucaaggaaacaaaagggccuuuuauu

SEQ ID NO: 317938 - RNA, 32 nt, Homo Sapiens
uccuagggaagauaaaaucguauaugguaaag

SEQ ID NO: 317939 - RNA, 32 nt, Homo Sapiens
acuuuaccaaaggaaagcuauuuugcgaacua

SEQ ID NO: 317940 - RNA, 32 nt, Homo Sapiens
augugguuuaguuuuccaaacauguuaucuua

SEQ ID NO: 317941 - RNA, 32 nt, Homo Sapiens
uacucauacaaauacacacauaaaaauacauu

SEQ ID NO: 317942 - RNA, 32 nt, Homo Sapiens
gccuugugggccgcuucauucaucugcugcgc

SEQ ID NO: 317943 - RNA, 32 nt, Homo Sapiens
gccagcccucacccuuuccccagggauccugu

SEQ ID NO: 317944 - RNA, 32 nt, Homo Sapiens
cauugcacuccagccuaggcauggugagacuc

SEQ ID NO: 317945 - RNA, 32 nt, Homo Sapiens
ucauucugaaaauucuaccaccauuugcaucu

SEQ ID NO: 317946 - RNA, 32 nt, Homo Sapiens
aaguagcuugaacucgagccuguuuuaauuau

SEQ ID NO: 317947 - RNA, 32 nt, Homo Sapiens
aggguccuuuuggaaagaauaguugcaguguu

SEQ ID NO: 317948 - RNA, 32 nt, Homo Sapiens
gugggauaaaaugguuccugauagaucaaaga

SEQ ID NO: 317949 - RNA, 32 nt, Homo Sapiens
accuggcuggaugcuuccugucccuggaacuc

SEQ ID NO: 317950 - RNA, 32 nt, Homo Sapiens
caguuagaaauuacguuuuggauuguauauug

SEQ ID NO: 317951 - RNA, 32 nt, Homo Sapiens
cuucccgccgucgccucuugccugccaggggu

SEQ ID NO: 317952 - RNA, 32 nt, Homo Sapiens
ugggaauccuggacagcuccgcgcucggggcu

SEQ ID NO: 317953 - RNA, 32 nt, Homo Sapiens
gggaucacaagcaugaauuaaaaggaauuuau

SEQ ID NO: 317954 - RNA, 32 nt, Homo Sapiens
ccuggaagauagcaugcgugggaaguaacagu

SEQ ID NO: 317955 - RNA, 32 nt, Homo Sapiens
agagauuuguuaaaggauacaaaguuacagcu

SEQ ID NO: 317956 - RNA, 32 nt, Homo Sapiens
caccaggucugugccaagcacagggacuccag

SEQ ID NO: 317957 - RNA, 32 nt, Homo Sapiens
ucacuguuacaaucaucacaaccugcaccuga

SEQ ID NO: 317958 - RNA, 32 nt, Homo Sapiens
cccaaaugcagaacuuggucuuuucauguuaa

SEQ ID NO: 317959 - RNA, 32 nt, Homo Sapiens
uauugcugcauaacaaauuacuccaaaauuua

SEQ ID NO: 317960 - RNA, 32 nt, Homo Sapiens
aaaaugacuuucccucuuuuuuguaagcaaug

SEQ ID NO: 317961 - RNA, 32 nt, Homo Sapiens
acgcagggacgcccguuccuugcccucccgga

SEQ ID NO: 317962 - RNA, 32 nt, Homo Sapiens
cugucucuucucucucccaccaucacccucgg

SEQ ID NO: 317963 - RNA, 32 nt, Homo Sapiens
uuuucccacuuuccaauguacucaagaaaauu

SEQ ID NO: 317964 - RNA, 27 nt, Homo Sapiens
ucauguccgccagcgccgucuacgugc

SEQ ID NO: 317965 - RNA, 32 nt, Homo Sapiens
cagcugggcuccugggagauuccagaucacac

SEQ ID NO: 317966 - RNA, 32 nt, Homo Sapiens
gccucgagcccggcgcugcugcccgggggucu

SEQ ID NO: 317967 - RNA, 32 nt, Homo Sapiens
gcggacaggcaguccccacgcugcuggguggc

SEQ ID NO: 317968 - RNA, 32 nt, Homo Sapiens
ccugcauaauuuccucauuuacuagauugggu

SEQ ID NO: 317969 - RNA, 32 nt, Homo Sapiens
cagccacgagcucuucaacgaggcugacuuca

SEQ ID NO: 317970 - RNA, 32 nt, Homo Sapiens
ggccugcggcccagcccuugcgccgcucgucc

SEQ ID NO: 317971 - RNA, 32 nt, Homo Sapiens
cauaauuaaaaaguauuuuccagcaguccaaa

SEQ ID NO: 317972 - RNA, 32 nt, Homo Sapiens
gacuucuucauuuaaaaauauaucuuuuaaaa

SEQ ID NO: 317973 - RNA, 32 nt, Homo Sapiens
ggcguggggcugcggcagacagcaccgccgaa

SEQ ID NO: 317974 - RNA, 32 nt, Homo Sapiens
ugugucauucugaaguuuuuauuuggggcaga

SEQ ID NO: 317975 - RNA, 32 nt, Homo Sapiens
gagcucaggacccugggcaggguguggggcau

SEQ ID NO: 317976 - RNA, 32 nt, Homo Sapiens
gggacaguccugguggcugacaucagcgucca

SEQ ID NO: 317977 - RNA, 32 nt, Homo Sapiens
auucucgcugguuuuguuuuuauuuuaauuuu

SEQ ID NO: 317978 - RNA, 32 nt, Homo Sapiens
uauuacuaguguuugcagaauagguguaggac

SEQ ID NO: 317979 - RNA, 32 nt, Homo Sapiens
gugcugguggaaagauagaugcugcuacuucu

SEQ ID NO: 317980 - RNA, 32 nt, Homo Sapiens
cagaagaaacuuauguaaauuucaugaacuau

SEQ ID NO: 317981 - RNA, 32 nt, Homo Sapiens
aggcgggaaagcugcggcacagcccgcuuuaa

SEQ ID NO: 317982 - RNA, 32 nt, Homo Sapiens
gagcaggcagcgccuggaggccagaggccguu

SEQ ID NO: 317983 - RNA, 29 nt, Homo Sapiens
gcaugauauuguauguaccugggaaauuu

SEQ ID NO: 317984 - RNA, 32 nt, Homo Sapiens
cauagaaaccaccuucacucauauauaaaaau

SEQ ID NO: 317985 - RNA, 32 nt, Homo Sapiens
gugugcuaggcauuuucuuaauauuucaaugu

SEQ ID NO: 317986 - RNA, 32 nt, Homo Sapiens
ccaaucuggaugcauuacauucaccaggcuuu

SEQ ID NO: 317987 - RNA, 32 nt, Homo Sapiens
cgauuuauacuuuuauuuuuuaugauuauuug

SEQ ID NO: 317988 - RNA, 32 nt, Homo Sapiens
gagugagaccaacacccaucccugcccagcca

SEQ ID NO: 317989 - RNA, 32 nt, Homo Sapiens
gcaguccucuccccggcuggcccuccuuucuc

SEQ ID NO: 317990 - RNA, 32 nt, Homo Sapiens
guucagguuaccagaaccaguaccucaguauu

SEQ ID NO: 317991 - RNA, 32 nt, Homo Sapiens
aauucagucugcuuuuggauuuucauauauuu

SEQ ID NO: 317992 - RNA, 32 nt, Homo Sapiens
ucaaugcuggguggaggagggcagaaacgcag

SEQ ID NO: 317993 - RNA, 32 nt, Homo Sapiens
ugccagaacaugguaaauuugcagccauuuca

SEQ ID NO: 317994 - RNA, 32 nt, Homo Sapiens
ugauaaaaaugaauaaauuggggauauaucua

SEQ ID NO: 317995 - RNA, 32 nt, Homo Sapiens
auuccauuauauuuccuuuuguacaccuguga

SEQ ID NO: 317996 - RNA, 32 nt, Homo Sapiens
gccuccaggaugggcugcuccugggccuggug

SEQ ID NO: 317997 - RNA, 32 nt, Homo Sapiens
cuuuuagauauuaacuacauuuacaggcaaau

SEQ ID NO: 317998 - RNA, 32 nt, Homo Sapiens
guauacauaucaggggacccugagguggcacc

SEQ ID NO: 317999 - RNA, 32 nt, Homo Sapiens
gccccagugcccgugcccagcucgcggggcgg

SEQ ID NO: 318000 - RNA, 32 nt, Homo Sapiens
gccuauucaauacaauuuacugacaugacaac

SEQ ID NO: 318001 - RNA, 32 nt, Homo Sapiens
agagaaaaugacugucuccuuuuccuugaaau

SEQ ID NO: 318002 - RNA, 32 nt, Homo Sapiens
gucucccuuugugucucccccaucucauccuu

SEQ ID NO: 318003 - RNA, 32 nt, Homo Sapiens
acaucuaccuucugccuucucucuacccuuug

SEQ ID NO: 318004 - RNA, 32 nt, Homo Sapiens
uccuaucugcaugauucugaacaucuggaugc

SEQ ID NO: 318005 - RNA, 32 nt, Homo Sapiens
uuguuuuuacuuuauuauuuacgaugugagcu

SEQ ID NO: 318006 - RNA, 32 nt, Homo Sapiens
uuccggcccuccccaguagcuggcuggagaug

SEQ ID NO: 318007 - RNA, 27 nt, Homo Sapiens
ucuuuguucuucuucauauacuauagg

SEQ ID NO: 318008 - RNA, 32 nt, Homo Sapiens
caguaauuaguaaauuccaaauuuaagucagu

SEQ ID NO: 318009 - RNA, 32 nt, Homo Sapiens
guaagucguuugcgagaaugcagaccaccuca

SEQ ID NO: 318010 - RNA, 32 nt, Homo Sapiens
cagaacugucucccccuugucaccuaccucug

SEQ ID NO: 318011 - RNA, 32 nt, Homo Sapiens
aaaaguucacaaauaaaagaagacaaauaggu

SEQ ID NO: 318012 - RNA, 32 nt, Homo Sapiens
aguaaggaaaaaagaagaaauaacuguaauag

SEQ ID NO: 318013 - RNA, 32 nt, Homo Sapiens
cagggcuggaacugcugccugauuccugugug

SEQ ID NO: 318014 - RNA, 32 nt, Homo Sapiens
cuggauuguggaaacugcacccgccuucaggu

SEQ ID NO: 318015 - RNA, 32 nt, Homo Sapiens
accugggagacggagguugcagugagccauga

SEQ ID NO: 318016 - RNA, 32 nt, Homo Sapiens
acccaggaaugggaaucuggcuugguucgaga

SEQ ID NO: 318017 - RNA, 32 nt, Homo Sapiens
aaccccaucucuacuaaaaauacgaaauuagc

SEQ ID NO: 318018 - RNA, 32 nt, Homo Sapiens
ugguguggugaaugugugagaaaaacuaacuu

SEQ ID NO: 318019 - RNA, 32 nt, Homo Sapiens
acacuguggcuagauuauacuucuuugggugc

SEQ ID NO: 318020 - RNA, 32 nt, Homo Sapiens
cuuuuauuuaaauaaacuugugugguaaaagu

SEQ ID NO: 318021 - RNA, 32 nt, Homo Sapiens
ccaggcauuuuuguugccuuccugugagauag

SEQ ID NO: 318022 - RNA, 31 nt, Homo Sapiens
accacagcaagguccgcaaucuccugaggcu

SEQ ID NO: 318023 - RNA, 32 nt, Homo Sapiens
gcuuugaggacacggggaccacagccaugagc

SEQ ID NO: 318024 - RNA, 30 nt, Homo Sapiens
aucucagaauuccuuuucuaacucucccuu

SEQ ID NO: 318025 - RNA, 32 nt, Homo Sapiens
acugccuugaauuguuugaacccgaaauaagg

SEQ ID NO: 318026 - RNA, 32 nt, Homo Sapiens
ggcuccacuccagaucaccacaauaaugugaa

SEQ ID NO: 318027 - RNA, 32 nt, Homo Sapiens
uuguucuguguggggagggaggcagcgcggug

SEQ ID NO: 318028 - RNA, 32 nt, Homo Sapiens
acagcccagaaaguggauccauuugcaggaaa

SEQ ID NO: 318029 - RNA, 32 nt, Homo Sapiens
ugcaguggcccgagaccccaccauugcacucc

SEQ ID NO: 318030 - RNA, 32 nt, Homo Sapiens
cuggccucaccccggcuuuuuauuuaacagcu

SEQ ID NO: 318031 - RNA, 32 nt, Homo Sapiens
gugggugccccuucgcccaccuccgcccccgu

SEQ ID NO: 318032 - RNA, 32 nt, Homo Sapiens
ccucccuuuuuugauuuaguuggaugugcuuu

SEQ ID NO: 318033 - RNA, 32 nt, Homo Sapiens
gauuuuuagauauacagagauaaaaauagccc

SEQ ID NO: 318034 - RNA, 32 nt, Homo Sapiens
gccccucgccuggacuggacuggggagggaaa

SEQ ID NO: 318035 - RNA, 32 nt, Homo Sapiens
gugugugcuugcgugugugaaugugugugcga

SEQ ID NO: 318036 - RNA, 32 nt, Homo Sapiens
auuggauucauuuccucaaaauguggagagaa

SEQ ID NO: 318037 - RNA, 32 nt, Homo Sapiens
aagagggcucugccaggggcccugccucccaa

SEQ ID NO: 318038 - RNA, 30 nt, Homo Sapiens
ccgcagacuacugccacccacucaccauca

SEQ ID NO: 318039 - RNA, 32 nt, Homo Sapiens
uaaaguuguggaagagaguggggauaacugag

SEQ ID NO: 318040 - RNA, 32 nt, Homo Sapiens
gucccagcuacuuggggugcugaggcgggagg

SEQ ID NO: 318041 - RNA, 32 nt, Homo Sapiens
gggguaaauauuaaggagauggccucauggga

SEQ ID NO: 318042 - RNA, 32 nt, Homo Sapiens
ccgggcuauucuuggcaacucuaggcaguccc

SEQ ID NO: 318043 - RNA, 32 nt, Homo Sapiens
cagagccaaagcggagcugcugcugccgaacc

SEQ ID NO: 318044 - RNA, 32 nt, Homo Sapiens
guuucgcagccugaguccacgaccuaggcagu

SEQ ID NO: 318045 - RNA, 32 nt, Homo Sapiens
guguaaacaucauauaugauucuguguuccug

SEQ ID NO: 318046 - RNA, 32 nt, Homo Sapiens
gcaccucaacauugcauggugcuagugcccuc

SEQ ID NO: 318047 - RNA, 32 nt, Homo Sapiens
gguaaagcgcugggggaggaagcgacgccgag

SEQ ID NO: 318048 - RNA, 32 nt, Homo Sapiens
ggucucaaacuccugagcucaagcaauccucc

SEQ ID NO: 318049 - RNA, 32 nt, Homo Sapiens
cuuuucaugcuuccaagugucagggccuugcc

SEQ ID NO: 318050 - RNA, 32 nt, Homo Sapiens
guuagggaucggcagggaccacuuccugacua

SEQ ID NO: 318051 - RNA, 32 nt, Homo Sapiens
gcaaacugcuuucacuuguuugaaauggaaau

SEQ ID NO: 318052 - RNA, 32 nt, Homo Sapiens
gugcuagaacagagaauauucgcucuguggga

SEQ ID NO: 318053 - RNA, 32 nt, Homo Sapiens
gccagcugccagcacuggcccagcuggagaag

SEQ ID NO: 318054 - RNA, 29 nt, Homo Sapiens
ucgcauggucccuccuccaccaccacccc

SEQ ID NO: 318055 - RNA, 30 nt, Homo Sapiens
accacaugaaguucugcccaucuuccugac

SEQ ID NO: 318056 - RNA, 32 nt, Homo Sapiens
ccuggcuccuccucggccucagcccucuccua

SEQ ID NO: 318057 - RNA, 32 nt, Homo Sapiens
acagagaaaaaggaaaguaaaaauauggcaua

SEQ ID NO: 318058 - RNA, 32 nt, Homo Sapiens
cggcucccgccccgccccggcgcggcguggcu

SEQ ID NO: 318059 - RNA, 32 nt, Homo Sapiens
cugugguaacucguuucaucugcacagugacc

SEQ ID NO: 318060 - RNA, 32 nt, Homo Sapiens
uuuucaucaaggcaucuguagagaucagugag

SEQ ID NO: 318061 - RNA, 32 nt, Homo Sapiens
aggggaaaggggcaccucacuccaccucaaag

SEQ ID NO: 318062 - RNA, 32 nt, Homo Sapiens
ccucuguuuaaaaauaaacugaauauggaugu

SEQ ID NO: 318063 - RNA, 32 nt, Homo Sapiens
ucaugacucuaccuguggucuaucuuuaauuu

SEQ ID NO: 318064 - RNA, 32 nt, Homo Sapiens
cugagccugcacuguccucgccugcagccuca

SEQ ID NO: 318065 - RNA, 32 nt, Homo Sapiens
uacuguggagguacacucuuauagaaaguuca

SEQ ID NO: 318066 - RNA, 32 nt, Homo Sapiens
aaaggaggggggaagagggagaaggaucauuc

SEQ ID NO: 318067 - RNA, 32 nt, Homo Sapiens
uuuuuaagacucauggacauagcuuuaauuau

SEQ ID NO: 318068 - RNA, 32 nt, Homo Sapiens
uuagccgagucaggcaggagggggcggggaau

SEQ ID NO: 318069 - RNA, 32 nt, Homo Sapiens
cccagggccaugucuggguucuccaugcccau

SEQ ID NO: 318070 - RNA, 32 nt, Homo Sapiens
caggagcguguccuauccccggaccggacgca

SEQ ID NO: 318071 - RNA, 32 nt, Homo Sapiens
uacuaugcaauaauauaacuuagaguuccacg

SEQ ID NO: 318072 - RNA, 32 nt, Homo Sapiens
aucgcugccucccagcuguuuggaucacagag

SEQ ID NO: 318073 - RNA, 32 nt, Homo Sapiens
ucaaauggaagacacauugaaaguguuuuucc

SEQ ID NO: 318074 - RNA, 32 nt, Homo Sapiens
uauauucaugcaauauauggcauauuuugaua

SEQ ID NO: 318075 - RNA, 32 nt, Homo Sapiens
guguauaugaggguaucaaauaaaauugcuac

SEQ ID NO: 318076 - RNA, 32 nt, Homo Sapiens
gccaaauaucaacaaguucuuaaaacauuaca

SEQ ID NO: 318077 - RNA, 32 nt, Homo Sapiens
ccugccgccccucccuguggcagcagcaggac

SEQ ID NO: 318078 - RNA, 32 nt, Homo Sapiens
gaugagguggucgggcccguggacagcugaga

SEQ ID NO: 318079 - RNA, 32 nt, Homo Sapiens
augaaacuuuccaaaacaaagugccaggacca

SEQ ID NO: 318080 - RNA, 32 nt, Homo Sapiens
ggagcaggagcaagagcugaaaaacuaccuac

SEQ ID NO: 318081 - RNA, 32 nt, Homo Sapiens
uuacaccuauuauguucugagauucugagaac

SEQ ID NO: 318082 - RNA, 32 nt, Homo Sapiens
aagaaauguccacucaguggcucccaaccuau

SEQ ID NO: 318083 - RNA, 32 nt, Homo Sapiens
ucacacccgccuuucuugaauggcuucguguu

SEQ ID NO: 318084 - RNA, 32 nt, Homo Sapiens
ccgccugcucccugcucguccuccccucccca

SEQ ID NO: 318085 - RNA, 32 nt, Homo Sapiens
gagugcugccagcacgcugucucagacucucc

SEQ ID NO: 318086 - RNA, 32 nt, Homo Sapiens
cuacaccugaaucccugaaacaucugaacugu

SEQ ID NO: 318087 - RNA, 32 nt, Homo Sapiens
ggguagaauaaagauuugauguggucuggccc

SEQ ID NO: 318088 - RNA, 32 nt, Homo Sapiens
ggaaugucuguuucaacacgugucugcaguuc

SEQ ID NO: 318089 - RNA, 32 nt, Homo Sapiens
uaaggauacagcaggaagcaaagcagaggugg

SEQ ID NO: 318090 - RNA, 32 nt, Homo Sapiens
gcccacgagugaaccuggggccccacaggauu

SEQ ID NO: 318091 - RNA, 32 nt, Homo Sapiens
gcgcgcugagggcagcgccggggacgcggccu

SEQ ID NO: 318092 - RNA, 32 nt, Homo Sapiens
ucaccucaaaaauuuuggggcuuaacgcgauc

SEQ ID NO: 318093 - RNA, 32 nt, Homo Sapiens
uccgaccccccuccucagcccucccccaccca

SEQ ID NO: 318094 - RNA, 32 nt, Homo Sapiens
caucaucaaaggcauagccuuuccaagauggu

SEQ ID NO: 318095 - RNA, 32 nt, Homo Sapiens
gaggacagcuucagccaggaggcugugagcaa

SEQ ID NO: 318096 - RNA, 32 nt, Homo Sapiens
agcagcggucuaacccccggcgcgggagggac

SEQ ID NO: 318097 - RNA, 32 nt, Homo Sapiens
cagauucuuuuggaacaugcugcacugagaga

SEQ ID NO: 318098 - RNA, 32 nt, Homo Sapiens
ucugcccucccucuucacucugccuaccuuga

SEQ ID NO: 318099 - RNA, 32 nt, Homo Sapiens
ucacauuauaugcuggcaccugccuuuuuugc

SEQ ID NO: 318100 - RNA, 32 nt, Homo Sapiens
cuuucacaaaaaugauuucaaauuauccuaga

SEQ ID NO: 318101 - RNA, 32 nt, Homo Sapiens
gucuugccagugccggcccccggcccaguuca

SEQ ID NO: 318102 - RNA, 32 nt, Homo Sapiens
gugcacgucuucccuucucucccugcugcggc

SEQ ID NO: 318103 - RNA, 32 nt, Homo Sapiens
gcccagcuccagcccuccucucugcauccugg

SEQ ID NO: 318104 - RNA, 32 nt, Homo Sapiens
acacuacggaucuggaaaauacuggaaaaugu

SEQ ID NO: 318105 - RNA, 32 nt, Homo Sapiens
cugagauccaugggcuuuggcuccucauccca

SEQ ID NO: 318106 - RNA, 32 nt, Homo Sapiens
cuuccccauucggacuggguguguacaagcaa

SEQ ID NO: 318107 - RNA, 32 nt, Homo Sapiens
ugcagaaaguucccugugucugucuagaacgc

SEQ ID NO: 318108 - RNA, 31 nt, Homo Sapiens
aggaagggaaggcagaaccagggaugccuuu

SEQ ID NO: 318109 - RNA, 32 nt, Homo Sapiens
ugaggccccuacuccaccugggagcaggggaa

SEQ ID NO: 318110 - RNA, 32 nt, Homo Sapiens
uaguugauuuaaauccuuucugaauaaagauc

SEQ ID NO: 318111 - RNA, 32 nt, Homo Sapiens
ggcggguacacugagcagcugcauuggugcug

SEQ ID NO: 318112 - RNA, 32 nt, Homo Sapiens
uuucucccuaaaacuaugugcaucugccucuc

SEQ ID NO: 318113 - RNA, 32 nt, Homo Sapiens
ccucucaacccgcuccuaccccgcuggucccu

SEQ ID NO: 318114 - RNA, 32 nt, Homo Sapiens
uugcccauucggcuguggauagagaagcagga

SEQ ID NO: 318115 - RNA, 32 nt, Homo Sapiens
gggcccuccuucccuccugugccccagcugcc

SEQ ID NO: 318116 - RNA, 32 nt, Homo Sapiens
ucuuucaaccucagccuucacguuucaaguca

SEQ ID NO: 318117 - RNA, 32 nt, Homo Sapiens
gcuuuuugacugauaaaagugauuacagaugu

SEQ ID NO: 318118 - RNA, 32 nt, Homo Sapiens
ccugcggcgguggcagugguagcggccuuuga

SEQ ID NO: 318119 - RNA, 32 nt, Homo Sapiens
agcauccugugccucagcacggccccagaccu

SEQ ID NO: 318120 - RNA, 32 nt, Homo Sapiens
auacagaaaugaauugagugacaugagcagga

SEQ ID NO: 318121 - RNA, 32 nt, Homo Sapiens
gggcccgccaaugccgucaucaucaggauuuu

SEQ ID NO: 318122 - RNA, 32 nt, Homo Sapiens
cccaagcaccucaagggacuagaacugagugc

SEQ ID NO: 318123 - RNA, 32 nt, Homo Sapiens
gccccccaugcgccagacggcaggacggcggc

SEQ ID NO: 318124 - RNA, 32 nt, Homo Sapiens
gcccugagcaguaguggcauguguguagauca

SEQ ID NO: 318125 - RNA, 32 nt, Homo Sapiens
uuuucucaugaugagguuuucuuaacuuaaaa

SEQ ID NO: 318126 - RNA, 32 nt, Homo Sapiens
cuccuucccagcagcccucucaggcccguggc

SEQ ID NO: 318127 - RNA, 32 nt, Homo Sapiens
ggcguuucagguggcgcuuuucucaucaugau

SEQ ID NO: 318128 - RNA, 32 nt, Homo Sapiens
cccuagcucagguggcuucagggccuccggac

SEQ ID NO: 318129 - RNA, 32 nt, Homo Sapiens
aaagacaucacaucccucuccucuccuccucu

SEQ ID NO: 318130 - RNA, 32 nt, Homo Sapiens
ucaggugucccgagacuccgggcaagggaaga

SEQ ID NO: 318131 - RNA, 32 nt, Homo Sapiens
ucuccccgcgccccaaacuuugccucccgcgg

SEQ ID NO: 318132 - RNA, 32 nt, Homo Sapiens
ccuguucgcaucaguggcgaugacuuuauuug

SEQ ID NO: 318133 - RNA, 32 nt, Homo Sapiens
uauuauauuuaaccucuuuguucuccauuuuu

SEQ ID NO: 318134 - RNA, 32 nt, Homo Sapiens
ugaaagcccaaguuuagaugugcauuaaguau

SEQ ID NO: 318135 - RNA, 32 nt, Homo Sapiens
gaguauuguuaacagugccuuuucgauggaau

SEQ ID NO: 318136 - RNA, 32 nt, Homo Sapiens
gagagcaugguuucaugguuuuucucuaugaa

SEQ ID NO: 318137 - RNA, 32 nt, Homo Sapiens
gcaucuuuuuaaaaaguuauauuuucuaaagc

SEQ ID NO: 318138 - RNA, 32 nt, Homo Sapiens
gaaauuucuuuucuucuucucaucugcauggc

SEQ ID NO: 318139 - RNA, 32 nt, Homo Sapiens
uccuugaauuguaauaauccccaugugucagg

SEQ ID NO: 318140 - RNA, 32 nt, Homo Sapiens
uguaguaggcauuuuuaccaucacugaguuuu

SEQ ID NO: 318141 - RNA, 32 nt, Homo Sapiens
cugugccccauuuccacccccaaauaccuccc

SEQ ID NO: 318142 - RNA, 28 nt, Homo Sapiens
caaaguggaggagggccgaggugggcuu

SEQ ID NO: 318143 - RNA, 32 nt, Homo Sapiens
agugaggaagcagcagaaacagaagcagcaga

SEQ ID NO: 318144 - RNA, 32 nt, Homo Sapiens
aaauaaacuugaagagauacaaacgguaguga

SEQ ID NO: 318145 - RNA, 32 nt, Homo Sapiens
cagcagugaagauauuggaucauagguuauug

SEQ ID NO: 318146 - RNA, 32 nt, Homo Sapiens
cccuuuguaacucucuucuccucccuagugcg

SEQ ID NO: 318147 - RNA, 32 nt, Homo Sapiens
auucucucuuacugccuguucagggucagucc

SEQ ID NO: 318148 - RNA, 32 nt, Homo Sapiens
accuugcugguguaugugaugugcuucugugc

SEQ ID NO: 318149 - RNA, 32 nt, Homo Sapiens
aaagccuguuuaauaaagcugaauguuaaggu

SEQ ID NO: 318150 - RNA, 32 nt, Homo Sapiens
cagcugugugggcugcagauuuccuguguggg

SEQ ID NO: 318151 - RNA, 32 nt, Homo Sapiens
acuacaugucuaggaaacuguugagauucaaa

SEQ ID NO: 318152 - RNA, 32 nt, Homo Sapiens
ggcgucuucggaagaggaagccgggagugcaa

SEQ ID NO: 318153 - RNA, 32 nt, Homo Sapiens
uaaagucugaccagguaguccagguguucccu

SEQ ID NO: 318154 - RNA, 32 nt, Homo Sapiens
ucuguuuccuugauuucuccuccuuuggaugu

SEQ ID NO: 318155 - RNA, 32 nt, Homo Sapiens
gcgaccgccuuuucauuccccccgccaccugu

SEQ ID NO: 318156 - RNA, 32 nt, Homo Sapiens
caacacggguggcagcagauggcccagcccag

SEQ ID NO: 318157 - RNA, 32 nt, Homo Sapiens
aaaauagccaaccagcagcccucagggcugcu

SEQ ID NO: 318158 - RNA, 32 nt, Homo Sapiens
ucucucucuuuuuuuuuuuuuacuuaaucuag

SEQ ID NO: 318159 - RNA, 29 nt, Homo Sapiens
caggaugccccuccccagucacagccauu

SEQ ID NO: 318160 - RNA, 32 nt, Homo Sapiens
aucggcuggcuuugggacuauuccaccuccuu

SEQ ID NO: 318161 - RNA, 32 nt, Homo Sapiens
ugagggcagcggggagacaagacccggcgacc

SEQ ID NO: 318162 - RNA, 32 nt, Homo Sapiens
uacuaaagcuauauuucugauaaaaaauauuu

SEQ ID NO: 318163 - RNA, 32 nt, Homo Sapiens
acagaaauacucaagcagaaugagggugagau

SEQ ID NO: 318164 - RNA, 32 nt, Homo Sapiens
ucuacuaaaaauacgaaaauuagccuggcgug

SEQ ID NO: 318165 - RNA, 32 nt, Homo Sapiens
uccagucuguagcagagcaguccaacccagau

SEQ ID NO: 318166 - RNA, 32 nt, Homo Sapiens
cucagcugucuccuggcccugacuuuucuaag

SEQ ID NO: 318167 - RNA, 32 nt, Homo Sapiens
agaggaaacugggugcaggguauacaggaacu

SEQ ID NO: 318168 - RNA, 32 nt, Homo Sapiens
ugggagagccgccugcccuggcaugggaggga

SEQ ID NO: 318169 - RNA, 32 nt, Homo Sapiens
uuuugggggugccuggagaugaacuggauggg

SEQ ID NO: 318170 - RNA, 32 nt, Homo Sapiens
cuuugggaccugaagaugcucuauucauccau

SEQ ID NO: 318171 - RNA, 32 nt, Homo Sapiens
gaggcaacaguaggguccaggcggcggggcac

SEQ ID NO: 318172 - RNA, 32 nt, Homo Sapiens
uacguccaccuggaggcucaccacuuggagag

SEQ ID NO: 318173 - RNA, 32 nt, Homo Sapiens
cugcguuguuugucuucaucuaauccagcuuu

SEQ ID NO: 318174 - RNA, 32 nt, Homo Sapiens
aagguaauccggagugagcaauggaguggcug

SEQ ID NO: 318175 - RNA, 32 nt, Homo Sapiens
ccaugaggccaccuaugacuacagggacaucc

SEQ ID NO: 318176 - RNA, 32 nt, Homo Sapiens
uacauggguucaauuggacaauuauuuuugcu

SEQ ID NO: 318177 - RNA, 32 nt, Homo Sapiens
gauauuuuuacugucuuuuuuauuuuuugaga

SEQ ID NO: 318178 - RNA, 32 nt, Homo Sapiens
uccccagacaaaggcuuggccggcggccccgg

SEQ ID NO: 318179 - RNA, 32 nt, Homo Sapiens
uggcugccgggcggagaggcuccucacuucuc

SEQ ID NO: 318180 - RNA, 32 nt, Homo Sapiens
guucuucucuccucuaauccccgggggccaag

SEQ ID NO: 318181 - RNA, 32 nt, Homo Sapiens
acuguuaucucccaagauuaaccuucacuuuu

SEQ ID NO: 318182 - RNA, 32 nt, Homo Sapiens
cucuggagcucaucagucuugcuuuucuuugu

SEQ ID NO: 318183 - RNA, 32 nt, Homo Sapiens
ugagauuuuuauuugcauggcuuuuuuuuuuu

SEQ ID NO: 318184 - RNA, 32 nt, Homo Sapiens
gccaaagucacagauagucucugccacucccc

SEQ ID NO: 318185 - RNA, 32 nt, Homo Sapiens
aguucugcaaauaguucuuuuaacaauuugac

SEQ ID NO: 318186 - RNA, 32 nt, Homo Sapiens
augggcuggcccaagaguguucuuuuacuuag

SEQ ID NO: 318187 - RNA, 32 nt, Homo Sapiens
gcgaggugucugcccuuuauguuuccacaucu

SEQ ID NO: 318188 - RNA, 32 nt, Homo Sapiens
uaucacuggacaggccauggcuccacgguccc

SEQ ID NO: 318189 - RNA, 32 nt, Homo Sapiens
aaccaaaaccaucacauaugaaucaucacagg

SEQ ID NO: 318190 - RNA, 32 nt, Homo Sapiens
cugcugugcccaccugcccacccaggucccca

SEQ ID NO: 318191 - RNA, 32 nt, Homo Sapiens
auccccaccaagcuccucccccagaacccuga

SEQ ID NO: 318192 - RNA, 32 nt, Homo Sapiens
gcccggagcccaucucucccaacgacucacac

SEQ ID NO: 318193 - RNA, 32 nt, Homo Sapiens
uuauaccauucaucaauuuugacacuuuaaaa

SEQ ID NO: 318194 - RNA, 32 nt, Homo Sapiens
guauuuacugguuuuucuuguaucuggugcau

SEQ ID NO: 318195 - RNA, 32 nt, Homo Sapiens
ucccagacagcuuuugggaagggugacaggug

SEQ ID NO: 318196 - RNA, 29 nt, Homo Sapiens
uuugcccccugucucaaccacaaaccuug

SEQ ID NO: 318197 - RNA, 29 nt, Homo Sapiens
ugggaagggggacagagagggcccucccc

SEQ ID NO: 318198 - RNA, 30 nt, Homo Sapiens
ugggugugucucaugggggaaaaaaaacug

SEQ ID NO: 318199 - RNA, 32 nt, Homo Sapiens
uauuguguuacuauuaaauaugcugaaaacgc

SEQ ID NO: 318200 - RNA, 32 nt, Homo Sapiens
ugauuucauaccaagacuaggugaaguguuuc

SEQ ID NO: 318201 - RNA, 32 nt, Homo Sapiens
gggauuaucauucuucuggcuuucucucuguc

SEQ ID NO: 318202 - RNA, 32 nt, Homo Sapiens
cuuuuuaaaacgcagagaaaagcuccauucuu

SEQ ID NO: 318203 - RNA, 32 nt, Homo Sapiens
ucucagaacugugccaagcagacacugggaca

SEQ ID NO: 318204 - RNA, 29 nt, Homo Sapiens
augagauaaaguuguauacucuacuuuca

SEQ ID NO: 318205 - RNA, 32 nt, Homo Sapiens
uaggauuaaugagcaaaaguuaugauaauaga

SEQ ID NO: 318206 - RNA, 32 nt, Homo Sapiens
uucagggaagagacauaaccuuacuucaaaag

SEQ ID NO: 318207 - RNA, 32 nt, Homo Sapiens
caucgcggccuggccggggggcggugucugcu

SEQ ID NO: 318208 - RNA, 32 nt, Homo Sapiens
guuucuugcuucuccuuuuuaauuucuaaaaa

SEQ ID NO: 318209 - RNA, 32 nt, Homo Sapiens
ugcuccugauaaagcaaagggcugggaauaca

SEQ ID NO: 318210 - RNA, 32 nt, Homo Sapiens
ugaguugaguucugggaaauagacuugcaggu

SEQ ID NO: 318211 - RNA, 32 nt, Homo Sapiens
guccuaaauguucuucaccaacuuuuucuucc

SEQ ID NO: 318212 - RNA, 32 nt, Homo Sapiens
guugaaccaaaauaauaaaauaauuaauuuaa

SEQ ID NO: 318213 - RNA, 32 nt, Homo Sapiens
uugguuaucugcuacugcccguuagcugaaau

SEQ ID NO: 318214 - RNA, 32 nt, Homo Sapiens
augaagaaacuuucagaaggcuaaaugagugg

SEQ ID NO: 318215 - RNA, 29 nt, Homo Sapiens
uuaauaaaugaaauguucuugugaagcuu

SEQ ID NO: 318216 - RNA, 32 nt, Homo Sapiens
uggauaaaggauuaggcaaaaauaaaauguuu

SEQ ID NO: 318217 - RNA, 32 nt, Homo Sapiens
ggcauuuucaaucauucaaaauguggagaauu

SEQ ID NO: 318218 - RNA, 31 nt, Homo Sapiens
cuggccagggcggugcgacggggaagcagga

SEQ ID NO: 318219 - RNA, 32 nt, Homo Sapiens
gccuacaucuucucucuuccccaucuugcauu

SEQ ID NO: 318220 - RNA, 32 nt, Homo Sapiens
cagcuccggccgccgcgccgccuggcuuucgu

SEQ ID NO: 318221 - RNA, 32 nt, Homo Sapiens
ugccuuauuauggcugacguauuacuguggug

SEQ ID NO: 318222 - RNA, 32 nt, Homo Sapiens
ggacccacaggagaguggauuagagcacaagu

SEQ ID NO: 318223 - RNA, 32 nt, Homo Sapiens
ucacccacagcuuuugauaucuaggaggacuc

SEQ ID NO: 318224 - RNA, 32 nt, Homo Sapiens
aucgaugaagcacuuuuuuauuaauauuuucc

SEQ ID NO: 318225 - RNA, 32 nt, Homo Sapiens
gaaaacauugaauuuucuuuuuuguuguugag

SEQ ID NO: 318226 - RNA, 32 nt, Homo Sapiens
aaagcagaauauaaaaaguccaaagaugaaaa

SEQ ID NO: 318227 - RNA, 32 nt, Homo Sapiens
uacgcccucaaucccugaccguuccaggcacu

SEQ ID NO: 318228 - RNA, 32 nt, Homo Sapiens
ggucggcggggccagccccgaagugcucccug

SEQ ID NO: 318229 - RNA, 32 nt, Homo Sapiens
cuuaaucuuugccucauguuauguaaaauuag

SEQ ID NO: 318230 - RNA, 32 nt, Homo Sapiens
ugcaacccugucagcccucacucugaggcgag

SEQ ID NO: 318231 - RNA, 32 nt, Homo Sapiens
gcugcccgaggccccgcugucccggccggacc

SEQ ID NO: 318232 - RNA, 32 nt, Homo Sapiens
caugcaucauaaaauugcccagucuucagcgg

SEQ ID NO: 318233 - RNA, 32 nt, Homo Sapiens
ugcccaaaacaucccuccccacagucaagaag

SEQ ID NO: 318234 - RNA, 32 nt, Homo Sapiens
gaaacucgucuucgcguugcccccuuucuggc

SEQ ID NO: 318235 - RNA, 32 nt, Homo Sapiens
ggcugggccuggggaccccccggccuccgccu

SEQ ID NO: 318236 - RNA, 32 nt, Homo Sapiens
aaguuaacaaucacugaugugguuguuguauc

SEQ ID NO: 318237 - RNA, 32 nt, Homo Sapiens
ccuuaauuuguugacauauaaaugguaaauua

SEQ ID NO: 318238 - RNA, 32 nt, Homo Sapiens
aggccccgcuccccgaaacgugaccaugugga

SEQ ID NO: 318239 - RNA, 32 nt, Homo Sapiens
cagaggcacagaagcaauaaaaagauucuuuu

SEQ ID NO: 318240 - RNA, 32 nt, Homo Sapiens
ccccuucuagaaugacucuuuaggcaugcgug

SEQ ID NO: 318241 - RNA, 32 nt, Homo Sapiens
cacuguggaaauaaauaugaagauguggacau

SEQ ID NO: 318242 - RNA, 32 nt, Homo Sapiens
gggacguaggacacguguggaccgccaggccc

SEQ ID NO: 318243 - RNA, 32 nt, Homo Sapiens
agcauccuggggcucccuggcuccuggccguc

SEQ ID NO: 318244 - RNA, 32 nt, Homo Sapiens
gaacuccuaaccucagguuauccacccaccuu

SEQ ID NO: 318245 - RNA, 32 nt, Homo Sapiens
cuugcucacaugcugccaucaugucagguaaa

SEQ ID NO: 318246 - RNA, 32 nt, Homo Sapiens
cucagcccagggugcuggccuuucuccuucgc

SEQ ID NO: 318247 - RNA, 32 nt, Homo Sapiens
ccaggcuuacucuacaucagucagaacauccu

SEQ ID NO: 318248 - RNA, 32 nt, Homo Sapiens
aaugcuucagcaccggccauaauagcaagaua

SEQ ID NO: 318249 - RNA, 32 nt, Homo Sapiens
aagaguuucuaagcuauuugucuugauuauau

SEQ ID NO: 318250 - RNA, 32 nt, Homo Sapiens
gagauguugcuguuagucuaaccuguaccauu

SEQ ID NO: 318251 - RNA, 32 nt, Homo Sapiens
uggcacgugguggacacuaacacacaggcacu

SEQ ID NO: 318252 - RNA, 32 nt, Homo Sapiens
ccugggcagggccgcuagccucccugagcuuu

SEQ ID NO: 318253 - RNA, 32 nt, Homo Sapiens
aaucucuucuuugcugcagucaucuacuuuuu

SEQ ID NO: 318254 - RNA, 32 nt, Homo Sapiens
gcuuaagcccagucccuuacggcggcugggga

SEQ ID NO: 318255 - RNA, 32 nt, Homo Sapiens
cccagauaucaccccugaggacccaugcgcca

SEQ ID NO: 318256 - RNA, 32 nt, Homo Sapiens
cucgccucggccggcccgggaugcacucuuac

SEQ ID NO: 318257 - RNA, 32 nt, Homo Sapiens
acucuucccuggagaccccuucucucacacuu

SEQ ID NO: 318258 - RNA, 32 nt, Homo Sapiens
uuggcgcgccggggggacccugacacugaccg

SEQ ID NO: 318259 - RNA, 32 nt, Homo Sapiens
ucuaaaaacaaaacaaaacaaacaaacaaaaa

SEQ ID NO: 318260 - RNA, 30 nt, Homo Sapiens
cacaggagcggagacgcgggucccugcgcc

SEQ ID NO: 318261 - RNA, 32 nt, Homo Sapiens
cacccaauaggaccagcuuccuuaaaagaaaa

SEQ ID NO: 318262 - RNA, 32 nt, Homo Sapiens
ucuggccucugcccccuucucuagccacagcc

SEQ ID NO: 318263 - RNA, 32 nt, Homo Sapiens
agcgaucccuccccucagccuccugaguagcu

SEQ ID NO: 318264 - RNA, 29 nt, Homo Sapiens
gcugcauguaccaaauaccacagauggag

SEQ ID NO: 318265 - RNA, 32 nt, Homo Sapiens
agugggauuugaagauccacuccacuucugcu

SEQ ID NO: 318266 - RNA, 32 nt, Homo Sapiens
uguaugggcugagacucuaggguuccauuuuc

SEQ ID NO: 318267 - RNA, 32 nt, Homo Sapiens
aaagauagaaacaaaagcaaguucaccaugaa

SEQ ID NO: 318268 - RNA, 32 nt, Homo Sapiens
uguguggcguggcgugcccguccccagggcug

SEQ ID NO: 318269 - RNA, 32 nt, Homo Sapiens
ccggccucugggcaaggccccuggagcaucuc

SEQ ID NO: 318270 - RNA, 32 nt, Homo Sapiens
gcuggauuccuuugggagcaguguuccauucc

SEQ ID NO: 318271 - RNA, 32 nt, Homo Sapiens
acuuaucagaaauauuugaugugugcauuguu

SEQ ID NO: 318272 - RNA, 31 nt, Homo Sapiens
cagaguggguuccugcuggccagggugcagc

SEQ ID NO: 318273 - RNA, 32 nt, Homo Sapiens
caccaccggagcccuugagacauccuugagaa

SEQ ID NO: 318274 - RNA, 32 nt, Homo Sapiens
ugcggcuuuugcuucacuggcuuuuuuauuau

SEQ ID NO: 318275 - RNA, 32 nt, Homo Sapiens
gagucuugcucuguugccccagcuugagugca

SEQ ID NO: 318276 - RNA, 32 nt, Homo Sapiens
uccugagccaccuuuacucugcucuaugccag

SEQ ID NO: 318277 - RNA, 32 nt, Homo Sapiens
cucugcugccagagcaggcucggcgcuuccac

SEQ ID NO: 318278 - RNA, 32 nt, Homo Sapiens
uccagccccuccucucccuccuccucuaagaa

SEQ ID NO: 318279 - RNA, 32 nt, Homo Sapiens
gaggccccuugcugcuggcucccaucucccuc

SEQ ID NO: 318280 - RNA, 32 nt, Homo Sapiens
uaucaacugcccauggaggaggcucuugauga

SEQ ID NO: 318281 - RNA, 32 nt, Homo Sapiens
uuugggaaaaggaaagggagggaggccggcua

SEQ ID NO: 318282 - RNA, 32 nt, Homo Sapiens
cgcugguguucgcccaccccgggccgcgugag

SEQ ID NO: 318283 - RNA, 32 nt, Homo Sapiens
gugagcaucugggcgccgggacgcugcaguga

SEQ ID NO: 318284 - RNA, 32 nt, Homo Sapiens
uagaauuugaaaauaaaucacauuuugaucau

SEQ ID NO: 318285 - RNA, 32 nt, Homo Sapiens
aauuauaaaagcuguguuauuguuuucuauua

SEQ ID NO: 318286 - RNA, 32 nt, Homo Sapiens
acaaggaagaaccucuuaagaaguccucagaa

SEQ ID NO: 318287 - RNA, 32 nt, Homo Sapiens
aagcacugaaugggcuugaggacccugagggg

SEQ ID NO: 318288 - RNA, 32 nt, Homo Sapiens
caccaccgguccugaguccgcggacugccauu

SEQ ID NO: 318289 - RNA, 32 nt, Homo Sapiens
gcucuuuaaaauuuauuaggauuuuuaugagu

SEQ ID NO: 318290 - RNA, 32 nt, Homo Sapiens
gcugggcucccgcaguccugcagaccgcgccc

SEQ ID NO: 318291 - RNA, 32 nt, Homo Sapiens
ugcuccaagcuccccacccccaccuggaaccu

SEQ ID NO: 318292 - RNA, 32 nt, Homo Sapiens
ucucuaguugcaguauuggacaaagagcauag

SEQ ID NO: 318293 - RNA, 32 nt, Homo Sapiens
ggaauaaaaaauuuagauaguaugucaguagu

SEQ ID NO: 318294 - RNA, 32 nt, Homo Sapiens
ccucgugccugcccaaggaugcagacauaccc

SEQ ID NO: 318295 - RNA, 32 nt, Homo Sapiens
ucauaaccacaccgugaguuagugaccaaguc

SEQ ID NO: 318296 - RNA, 32 nt, Homo Sapiens
agcugcugcgcacggcggccuaccuccacacc

SEQ ID NO: 318297 - RNA, 32 nt, Homo Sapiens
agucgcagcuuucgucgccgccgauucgucaa

SEQ ID NO: 318298 - RNA, 32 nt, Homo Sapiens
ccaaacauaacaugcaugacaaacacagauug

SEQ ID NO: 318299 - RNA, 32 nt, Homo Sapiens
cagcagugcacuggggauggacaggccuggug

SEQ ID NO: 318300 - RNA, 32 nt, Homo Sapiens
cuguccccgcgugcagaccccgggcccggccc

SEQ ID NO: 318301 - RNA, 32 nt, Homo Sapiens
auuucacaagcacugacccccuggcaccaaca

SEQ ID NO: 318302 - RNA, 32 nt, Homo Sapiens
ggccugagggcuugagggaggcuggggaaaac

SEQ ID NO: 318303 - RNA, 32 nt, Homo Sapiens
gggugguuuggaagaauggcgaggggagagca

SEQ ID NO: 318304 - RNA, 27 nt, Homo Sapiens
guuugcucauucuucagaucuucucag

SEQ ID NO: 318305 - RNA, 32 nt, Homo Sapiens
ucuugguuaaggaaugaaucaacgaaugaaug

SEQ ID NO: 318306 - RNA, 32 nt, Homo Sapiens
uguguagaacagagacucccucucagaagcca

SEQ ID NO: 318307 - RNA, 32 nt, Homo Sapiens
acugugacggugacgaagacggcggcggcggc

SEQ ID NO: 318308 - RNA, 32 nt, Homo Sapiens
cucacaaauggcagaacaguauguaaagcugg

SEQ ID NO: 318309 - RNA, 29 nt, Homo Sapiens
cugcauucuauccugggcaacagauggag

SEQ ID NO: 318310 - RNA, 32 nt, Homo Sapiens
uugggcaaggaccugagacccuugugcuaagu

SEQ ID NO: 318311 - RNA, 32 nt, Homo Sapiens
agucaaaaaauauucuucucaagcuucaagau

SEQ ID NO: 318312 - RNA, 32 nt, Homo Sapiens
agucuauguggcggcgaggccgcggcgacaag

SEQ ID NO: 318313 - RNA, 32 nt, Homo Sapiens
uccuccugccccagcccucugguguccacacc

SEQ ID NO: 318314 - RNA, 32 nt, Homo Sapiens
gaaggacccaccccggucagcacagugccuuu

SEQ ID NO: 318315 - RNA, 32 nt, Homo Sapiens
ggcuaccugaagauccuccccauguucuucau

SEQ ID NO: 318316 - RNA, 32 nt, Homo Sapiens
ccucaaacaccgucagaugcauuagcagccca

SEQ ID NO: 318317 - RNA, 32 nt, Homo Sapiens
ggccagccaggugcccggggccuggccccagg

SEQ ID NO: 318318 - RNA, 32 nt, Homo Sapiens
agggaaagaagcugaagugcuacauaagaugc

SEQ ID NO: 318319 - RNA, 32 nt, Homo Sapiens
accaaggaggagaggguaaaaaauaaagaaua

SEQ ID NO: 318320 - RNA, 32 nt, Homo Sapiens
uguaaauguucccugacaauguuuguaauaug

SEQ ID NO: 318321 - RNA, 32 nt, Homo Sapiens
cgggcuguuggcggcgcacgccggggagguug

SEQ ID NO: 318322 - RNA, 32 nt, Homo Sapiens
aacccagaggggcugaggacuguggccuggcu

SEQ ID NO: 318323 - RNA, 28 nt, Homo Sapiens
accauggagagcgcgcuggcggugcccc

SEQ ID NO: 318324 - RNA, 32 nt, Homo Sapiens
ggagguugaagcugcggugggccauguuugca

SEQ ID NO: 318325 - RNA, 32 nt, Homo Sapiens
cuuaaaaaaaaauaaaggccuuauuuugcaau

SEQ ID NO: 318326 - RNA, 32 nt, Homo Sapiens
uaauuauuauaguuuguguguaucaucccuuu

SEQ ID NO: 318327 - RNA, 32 nt, Homo Sapiens
uaacagucucucuuuauauaaauacacagagu

SEQ ID NO: 318328 - RNA, 32 nt, Homo Sapiens
gcccucugugugccaucuccaaugagaaggaa

SEQ ID NO: 318329 - RNA, 32 nt, Homo Sapiens
uguccagaaucccacaucccaguugauaucag

SEQ ID NO: 318330 - RNA, 32 nt, Homo Sapiens
agcugagaucacaggaacagcaggugacaggc

SEQ ID NO: 318331 - RNA, 32 nt, Homo Sapiens
uugcaguguacaaaauuguguuuguauauaga

SEQ ID NO: 318332 - RNA, 32 nt, Homo Sapiens
agugcuggcucggcugcccugagggugcucaa

SEQ ID NO: 318333 - RNA, 29 nt, Homo Sapiens
cugacuuacugcuucagagggauuggccu

SEQ ID NO: 318334 - RNA, 32 nt, Homo Sapiens
ucgaauugguggcuuauauuuucagcaaagaa

SEQ ID NO: 318335 - RNA, 32 nt, Homo Sapiens
uccucugcagccugccggcgccucgaagcccg

SEQ ID NO: 318336 - RNA, 32 nt, Homo Sapiens
gugagacuacucccuccuguuccuccuucucc

SEQ ID NO: 318337 - RNA, 32 nt, Homo Sapiens
gaccagcccagcugcccccaaacccuaucccu

SEQ ID NO: 318338 - RNA, 32 nt, Homo Sapiens
gccagggagagccgucaaggucauggggcuug

SEQ ID NO: 318339 - RNA, 32 nt, Homo Sapiens
guuuagugucuuguauuucuauaauacuccaa

SEQ ID NO: 318340 - RNA, 32 nt, Homo Sapiens
ucugguucugggugagguuauuugcaggugga

SEQ ID NO: 318341 - RNA, 32 nt, Homo Sapiens
ccacagcugcgcacacagcugcuugcucaggg

SEQ ID NO: 318342 - RNA, 32 nt, Homo Sapiens
gcugugcccgggcuccucuccagcacuccgug

SEQ ID NO: 318343 - RNA, 32 nt, Homo Sapiens
ugauauauuaaaccuucagauuaaugacuggc

SEQ ID NO: 318344 - RNA, 32 nt, Homo Sapiens
cugcgcgcggaaggcgccggccuccagggcgc

SEQ ID NO: 318345 - RNA, 32 nt, Homo Sapiens
cucucagcuguccagauucagaacuggagccc

SEQ ID NO: 318346 - RNA, 32 nt, Homo Sapiens
agucuuugauucagucaguauuugguuuaugu

SEQ ID NO: 318347 - RNA, 32 nt, Homo Sapiens
ggcgcaguggcucccaccuguaaucucagccc

SEQ ID NO: 318348 - RNA, 32 nt, Homo Sapiens
auuuggauguuugggacaaagaagcaugcugc

SEQ ID NO: 318349 - RNA, 32 nt, Homo Sapiens
uuuuuuuuuuuuuuuuuuuuuagcaacacuuu

SEQ ID NO: 318350 - RNA, 32 nt, Homo Sapiens
cacgccugcagcuugcaucuuuguugcaaaac

SEQ ID NO: 318351 - RNA, 32 nt, Homo Sapiens
uggccauuggaucaugagacacucgaagucag

SEQ ID NO: 318352 - RNA, 32 nt, Homo Sapiens
agagagaaauaaaacuccuugaaaccagcuca

SEQ ID NO: 318353 - RNA, 32 nt, Homo Sapiens
gggcuaccucauccucgugcuguucuugugug

SEQ ID NO: 318354 - RNA, 32 nt, Homo Sapiens
ugucgcagcccuccagucccuacuucaggcug

SEQ ID NO: 318355 - RNA, 32 nt, Homo Sapiens
ggagccaccgacaggacauggccucagcuggg

SEQ ID NO: 318356 - RNA, 32 nt, Homo Sapiens
gacgccgagggcgggggagagcgcgccgcugc

SEQ ID NO: 318357 - RNA, 32 nt, Homo Sapiens
acugacuuuaugaagauaucucuuccagugcc

SEQ ID NO: 318358 - RNA, 32 nt, Homo Sapiens
gaaaagaugaaugucagacaugugaagaacua

SEQ ID NO: 318359 - RNA, 32 nt, Homo Sapiens
aaaagcagcaacacugauacuugugugcaccu

SEQ ID NO: 318360 - RNA, 32 nt, Homo Sapiens
ucagaauaaacuauuggggugaggauaagggg

SEQ ID NO: 318361 - RNA, 32 nt, Homo Sapiens
aaccaggagcggggcuguccuugccacgugcc

SEQ ID NO: 318362 - RNA, 32 nt, Homo Sapiens
cugguugcaagagcucauuuugcaggcuggaa

SEQ ID NO: 318363 - RNA, 32 nt, Homo Sapiens
uaugaguauuacuaguugauaaucaguuuugu

SEQ ID NO: 318364 - RNA, 32 nt, Homo Sapiens
aaagaaaguuaguggauugcaaaguugguugc

SEQ ID NO: 318365 - RNA, 32 nt, Homo Sapiens
aucugcaaggaacacuacaguuguguaaaguu

SEQ ID NO: 318366 - RNA, 32 nt, Homo Sapiens
agaggugugguagggcagugucugcauuccca

SEQ ID NO: 318367 - RNA, 32 nt, Homo Sapiens
gaggauggcgcgcgcggggcccgcacguggag

SEQ ID NO: 318368 - RNA, 32 nt, Homo Sapiens
cugggcggccccaccccugucugcaaggccac

SEQ ID NO: 318369 - RNA, 32 nt, Homo Sapiens
acucgauggccugagacacaccccuugagaag

SEQ ID NO: 318370 - RNA, 32 nt, Homo Sapiens
uuucucucucucucuuuuuuuuuguuuguuuc

SEQ ID NO: 318371 - RNA, 32 nt, Homo Sapiens
aguuuguugguaucgugccuuuccuuaucuac

SEQ ID NO: 318372 - RNA, 32 nt, Homo Sapiens
gccucccaccccaccccacccuucacaccugg

SEQ ID NO: 318373 - RNA, 32 nt, Homo Sapiens
agaaauuguucugguagauacauccugugaca

SEQ ID NO: 318374 - RNA, 32 nt, Homo Sapiens
cacguccccacccacgggggagacggagagau

SEQ ID NO: 318375 - RNA, 32 nt, Homo Sapiens
cuccucuacucuaauuugaccaaaaaauuguu

SEQ ID NO: 318376 - RNA, 32 nt, Homo Sapiens
uggaggcugccaggccugcugcuccugccgag

SEQ ID NO: 318377 - RNA, 32 nt, Homo Sapiens
cucuuaaacuaaaggauuggcgauuccugaag

SEQ ID NO: 318378 - RNA, 32 nt, Homo Sapiens
ugccaccccuccccagucaccaguucuccucu

SEQ ID NO: 318379 - RNA, 32 nt, Homo Sapiens
gauucagagacuuagaagcaucagaguugaua

SEQ ID NO: 318380 - RNA, 32 nt, Homo Sapiens
uaaauuaaaaauuuuuuacuuaaauuuaagaa

SEQ ID NO: 318381 - RNA, 32 nt, Homo Sapiens
gauauggcuuguagggugaggcgugggaucca

SEQ ID NO: 318382 - RNA, 30 nt, Homo Sapiens
aacgccccguccuuaccgccggcugcugug

SEQ ID NO: 318383 - RNA, 32 nt, Homo Sapiens
ggaaucgugcccgcgccgccccuggcccgcgc

SEQ ID NO: 318384 - RNA, 31 nt, Homo Sapiens
gugaagaugguguccuggaugaucuccagag

SEQ ID NO: 318385 - RNA, 32 nt, Homo Sapiens
ccuugcugucucccuucuuucuauuugaacgu

SEQ ID NO: 318386 - RNA, 32 nt, Homo Sapiens
cuccacucuuggguuuuuuuuauuuucuuuuc

SEQ ID NO: 318387 - RNA, 32 nt, Homo Sapiens
acacagguaaaaaugcaccuuuuaaagcacua

SEQ ID NO: 318388 - RNA, 32 nt, Homo Sapiens
cuggccuuggccuaguccccaggccagcccau

SEQ ID NO: 318389 - RNA, 32 nt, Homo Sapiens
ccucccaaguagcugggacuacccgugcauga

SEQ ID NO: 318390 - RNA, 32 nt, Homo Sapiens
augauuuugaagggaaaguacuauuuuguuuu

SEQ ID NO: 318391 - RNA, 32 nt, Homo Sapiens
aaaguauuuuuccccacuaaaaaacuuuaaaa

SEQ ID NO: 318392 - RNA, 32 nt, Homo Sapiens
gcauguuccagaaaggucucugaggacaaacu

SEQ ID NO: 318393 - RNA, 32 nt, Homo Sapiens
guuugucuagaauguagcaucuagugacuuuu

SEQ ID NO: 318394 - RNA, 32 nt, Homo Sapiens
gaggagaggcaagaagaagugccaaguucucu

SEQ ID NO: 318395 - RNA, 32 nt, Homo Sapiens
uaagacacucuugauaguucucuuccgauuca

SEQ ID NO: 318396 - RNA, 32 nt, Homo Sapiens
uaucuaguacugccucuguggacuuagguucc

SEQ ID NO: 318397 - RNA, 32 nt, Homo Sapiens
agcgccggggucgggggcggcuugugcgcggg

SEQ ID NO: 318398 - RNA, 32 nt, Homo Sapiens
gagcuggguuuaaugagcauuuaaucuaugcu

SEQ ID NO: 318399 - RNA, 32 nt, Homo Sapiens
gcuuuggaggcacaaacccaugcaagcguuag

SEQ ID NO: 318400 - RNA, 32 nt, Homo Sapiens
cacgucuucauucguccauccccuccugacau

SEQ ID NO: 318401 - RNA, 32 nt, Homo Sapiens
aaagcaagugauguaauuuaguuagaguuuuu

SEQ ID NO: 318402 - RNA, 32 nt, Homo Sapiens
aguggaccaaccccucugccuguccugccccc

SEQ ID NO: 318403 - RNA, 32 nt, Homo Sapiens
caggccggcgcgugcgcagaagccagcacagu

SEQ ID NO: 318404 - RNA, 32 nt, Homo Sapiens
cucugaccuccagcugaccaugcaugccacgu

SEQ ID NO: 318405 - RNA, 32 nt, Homo Sapiens
gggaggccaaggcaggcauaucaacuugaggc

SEQ ID NO: 318406 - RNA, 32 nt, Homo Sapiens
cgggagccaggugggagcugccuuccacugcc

SEQ ID NO: 318407 - RNA, 32 nt, Homo Sapiens
aaggugaacacgggcuuccucaugucguccua

SEQ ID NO: 318408 - RNA, 32 nt, Homo Sapiens
uccauucuucagaggcuucaucgccugcacag

SEQ ID NO: 318409 - RNA, 32 nt, Homo Sapiens
auguguauauuauuauuuuuuacaaucauuuc

SEQ ID NO: 318410 - RNA, 32 nt, Homo Sapiens
cuggaccgucuucggugaaaagcugcucccgu

SEQ ID NO: 318411 - RNA, 32 nt, Homo Sapiens
cagccuggguggcagagcaacacuucgucuca

SEQ ID NO: 318412 - RNA, 32 nt, Homo Sapiens
acacauuaauguuacuagcaucaggagcuuac

SEQ ID NO: 318413 - RNA, 32 nt, Homo Sapiens
cgaggcaagauggaguuagugcagguccugaa

SEQ ID NO: 318414 - RNA, 32 nt, Homo Sapiens
uagucuucaaccaucugacauaggaauuuacu

SEQ ID NO: 318415 - RNA, 32 nt, Homo Sapiens
gcacuuguccucaggauagggaagagcagggg

SEQ ID NO: 318416 - RNA, 32 nt, Homo Sapiens
cgucccgccccgagcacgccccucacuccgca

SEQ ID NO: 318417 - RNA, 32 nt, Homo Sapiens
uguacuaaugucaagcucucuaguucuuggcu

SEQ ID NO: 318418 - RNA, 32 nt, Homo Sapiens
ucccaauaaucucuuuuucucaucucuugcuu

SEQ ID NO: 318419 - RNA, 32 nt, Homo Sapiens
aucuaaaacaauuuauuuuucaucaauaacug

SEQ ID NO: 318420 - RNA, 32 nt, Homo Sapiens
ccccagccaggcuggccggagcuccuguuucc

SEQ ID NO: 318421 - RNA, 32 nt, Homo Sapiens
cugcugagcuuucuccuugguuauguuuuuuc

SEQ ID NO: 318422 - RNA, 32 nt, Homo Sapiens
uucacgaaauacccuuuggauagcuaaagugu

SEQ ID NO: 318423 - RNA, 32 nt, Homo Sapiens
uuacugauuuuuccuuuuggcugaggcugcaa

SEQ ID NO: 318424 - RNA, 32 nt, Homo Sapiens
uuuggagauuuuuguauuuuuaucuuguaucu

SEQ ID NO: 318425 - RNA, 32 nt, Homo Sapiens
cccaagggcucugacaaguagauucuucgacu

SEQ ID NO: 318426 - RNA, 32 nt, Homo Sapiens
agaaagaaaguuaagcaacuacaggaaauggc

SEQ ID NO: 318427 - RNA, 32 nt, Homo Sapiens
auuuucaugaaaauauacuaaaaauauuuuua

SEQ ID NO: 318428 - RNA, 32 nt, Homo Sapiens
uacuaaauauaaaauuccugucgucuucaguc

SEQ ID NO: 318429 - RNA, 32 nt, Homo Sapiens
gugaccugugcagcuaugagguuuuaaaucug

SEQ ID NO: 318430 - RNA, 32 nt, Homo Sapiens
uuuuauagaguauaugguauauugugucaauc

SEQ ID NO: 318431 - RNA, 32 nt, Homo Sapiens
ugucuggcucaauggucuacauucugaaguua

SEQ ID NO: 318432 - RNA, 32 nt, Homo Sapiens
cacccggccccagcuauauaagcugaccggug

SEQ ID NO: 318433 - RNA, 32 nt, Homo Sapiens
uuacaaacaacaaguuuuuguaugcaagcacc

SEQ ID NO: 318434 - RNA, 32 nt, Homo Sapiens
ggcucagcaaagccagcugugcucuuuuaggg

SEQ ID NO: 318435 - RNA, 32 nt, Homo Sapiens
auuuucuuuucugccuaucuuggaccuuuugu

SEQ ID NO: 318436 - RNA, 32 nt, Homo Sapiens
ccaccagcauccaggcggccagcaggcaccug

SEQ ID NO: 318437 - RNA, 32 nt, Homo Sapiens
uuacagaauccuagccugugguaaaugcuaaa

SEQ ID NO: 318438 - RNA, 32 nt, Homo Sapiens
uuuauuuaauaaauguaaccaaacugacacau

SEQ ID NO: 318439 - RNA, 32 nt, Homo Sapiens
ucugcuuccugcugccgcucugcagccuggac

SEQ ID NO: 318440 - RNA, 32 nt, Homo Sapiens
uauuuagcaauuuuuguuuuuguuauauuagg

SEQ ID NO: 318441 - RNA, 32 nt, Homo Sapiens
ccugggcucccucuaguagcuugcgccacccc

SEQ ID NO: 318442 - RNA, 32 nt, Homo Sapiens
cgucccgcaggcccaggaccgccccugucagu

SEQ ID NO: 318443 - RNA, 32 nt, Homo Sapiens
ccucagggccugccgccuccugcuucccucgc

SEQ ID NO: 318444 - RNA, 32 nt, Homo Sapiens
acagcauggaggaggagggaggcgcugcuggu

SEQ ID NO: 318445 - RNA, 32 nt, Homo Sapiens
ugguuuuuuucuucuuuucuuuuccauucuuc

SEQ ID NO: 318446 - RNA, 32 nt, Homo Sapiens
ggugggaggugauuggaucaugggggugguuu

SEQ ID NO: 318447 - RNA, 30 nt, Homo Sapiens
ugcgcgugcgcgcagggcagacgguagagc

SEQ ID NO: 318448 - RNA, 32 nt, Homo Sapiens
ugucugcagggaaacagcuucuccucugcccc

SEQ ID NO: 318449 - RNA, 32 nt, Homo Sapiens
agugggacucccggcccgggguucgccaaccc

SEQ ID NO: 318450 - RNA, 32 nt, Homo Sapiens
ucucagggaaaggggacuuuguacugagguac

SEQ ID NO: 318451 - RNA, 32 nt, Homo Sapiens
gagugagaacuuauggugcuuuuuucaggccc

SEQ ID NO: 318452 - RNA, 32 nt, Homo Sapiens
gcuggggcaugcccggccaucagggugaaagu

SEQ ID NO: 318453 - RNA, 32 nt, Homo Sapiens
uuuuuuuuucucucuuuuuuuuuuuuuuuucu

SEQ ID NO: 318454 - RNA, 32 nt, Homo Sapiens
ccaagaacccaccaauuccggacacgcuaauu

SEQ ID NO: 318455 - RNA, 32 nt, Homo Sapiens
uuggagguuuugugucagcugcaaauccuacc

SEQ ID NO: 318456 - RNA, 30 nt, Homo Sapiens
cuaagaggaggugggcguaggaagucucac

SEQ ID NO: 318457 - RNA, 32 nt, Homo Sapiens
acucaccugugcucagggcgaggagauggugc

SEQ ID NO: 318458 - RNA, 32 nt, Homo Sapiens
cuuacuuugugauuauacguuaucuccggcua

SEQ ID NO: 318459 - RNA, 31 nt, Homo Sapiens
cugggcagggcggugucuggcagcagcggca

SEQ ID NO: 318460 - RNA, 32 nt, Homo Sapiens
gccugccugccagccacuucuuaccuccucac

SEQ ID NO: 318461 - RNA, 32 nt, Homo Sapiens
cgaaugauggcuuuugaauuaaugaggcagug

SEQ ID NO: 318462 - RNA, 32 nt, Homo Sapiens
gcuggcauaccucagcagcaggagccgggaug

SEQ ID NO: 318463 - RNA, 32 nt, Homo Sapiens
uaauccuaaaauuuauuaggugaucugcaagu

SEQ ID NO: 318464 - RNA, 32 nt, Homo Sapiens
auuacaggggagagcugcugcgcccagcccag

SEQ ID NO: 318465 - RNA, 31 nt, Homo Sapiens
gaucaagauggugguuggacggccuuccuaa

SEQ ID NO: 318466 - RNA, 32 nt, Homo Sapiens
cuauuauuuauugguuaguuccaauuucccag

SEQ ID NO: 318467 - RNA, 32 nt, Homo Sapiens
ucugauguaaaauuauuuugaguuuuuaauau

SEQ ID NO: 318468 - RNA, 32 nt, Homo Sapiens
ucaucugcuugcacauugccugucccagagcc

SEQ ID NO: 318469 - RNA, 32 nt, Homo Sapiens
aaaucguaacaagcaauaaacaacuuucacuu

SEQ ID NO: 318470 - RNA, 32 nt, Homo Sapiens
gguuuuuaagugucuuuuuuuuuuuucuugga

SEQ ID NO: 318471 - RNA, 29 nt, Homo Sapiens
gaggcaggaggacagaggggcuggucuca

SEQ ID NO: 318472 - RNA, 32 nt, Homo Sapiens
acaguugggccuuccuuuuuuauccaguuaac

SEQ ID NO: 318473 - RNA, 32 nt, Homo Sapiens
cuuuugaagcuacuaauuuuaugucgagcuuu

SEQ ID NO: 318474 - RNA, 32 nt, Homo Sapiens
ugauauuuuggaaaacaagugauuccacccau

SEQ ID NO: 318475 - RNA, 32 nt, Homo Sapiens
aacaugcuuuugcugcagauaaucagccagag

SEQ ID NO: 318476 - RNA, 32 nt, Homo Sapiens
uuccuuggaggggggagccauauuuuauucuu

SEQ ID NO: 318477 - RNA, 32 nt, Homo Sapiens
gaccuggcugaggcugaugacgagggugagcc

SEQ ID NO: 318478 - RNA, 32 nt, Homo Sapiens
agcgcucccucagcucucuccucauccaucac

SEQ ID NO: 318479 - RNA, 32 nt, Homo Sapiens
uuauggaguggaagaagcguaauguuaauauc

SEQ ID NO: 318480 - RNA, 32 nt, Homo Sapiens
uggucucacagcaccgugcauucauccagcag

SEQ ID NO: 318481 - RNA, 32 nt, Homo Sapiens
aaaggguugagcggcaggcacccagaguagua

SEQ ID NO: 318482 - RNA, 32 nt, Homo Sapiens
aaaaacuuauuagagcuuucucaaccugcagc

SEQ ID NO: 318483 - RNA, 32 nt, Homo Sapiens
gugaaaaaugcagugaaaaauauugacgaaaa

SEQ ID NO: 318484 - RNA, 32 nt, Homo Sapiens
caaggcugccagcaucuuugcucuccaccucc

SEQ ID NO: 318485 - RNA, 32 nt, Homo Sapiens
acugucccacccagugcccuggcaccgaucgc

SEQ ID NO: 318486 - RNA, 32 nt, Homo Sapiens
acgccccaugucaucacagggccuucaugaca

SEQ ID NO: 318487 - RNA, 32 nt, Homo Sapiens
ugcuucaucuggagucccuccucccccacgcc

SEQ ID NO: 318488 - RNA, 32 nt, Homo Sapiens
cuggauuaagacaaaguuguugguuuggaaag

SEQ ID NO: 318489 - RNA, 32 nt, Homo Sapiens
gacacaguucauaauuauuauaagauaaggaa

SEQ ID NO: 318490 - RNA, 31 nt, Homo Sapiens
cucgcgcggggcagccaagagacgagcuaug

SEQ ID NO: 318491 - RNA, 32 nt, Homo Sapiens
gccccgcggagcaagcucugaggcuguguuac

SEQ ID NO: 318492 - RNA, 32 nt, Homo Sapiens
agguagagaaugugaauguccaucucaaggaa

SEQ ID NO: 318493 - RNA, 32 nt, Homo Sapiens
gaggucaggaugguggcgcccgcggcucgggu

SEQ ID NO: 318494 - RNA, 32 nt, Homo Sapiens
uucaaaggaaaacauuaaaaucccuuaggaau

SEQ ID NO: 318495 - RNA, 32 nt, Homo Sapiens
aggcuuucuuuuuuuucuuuuuuuagagaagu

SEQ ID NO: 318496 - RNA, 32 nt, Homo Sapiens
gucucggcucccuccggcacccgcccggcccg

SEQ ID NO: 318497 - RNA, 30 nt, Homo Sapiens
ugucagggaggugccaguuacagcagguga

SEQ ID NO: 318498 - RNA, 32 nt, Homo Sapiens
uuugaucuuuaaaaaauauugcauuaggaaau

SEQ ID NO: 318499 - RNA, 32 nt, Homo Sapiens
uccaagcucccucuuccucccgguguuugggg

SEQ ID NO: 318500 - RNA, 32 nt, Homo Sapiens
cuauaugguacacuuuuuuaaaagugugcuuu

SEQ ID NO: 318501 - RNA, 32 nt, Homo Sapiens
gguuuuugcccccaaaaagguaaauaugagca

SEQ ID NO: 318502 - RNA, 32 nt, Homo Sapiens
gguaugagacagauuccaaauaaaauaaccgg

SEQ ID NO: 318503 - RNA, 32 nt, Homo Sapiens
augugcauuuuuguagaaauuguuacuggacu

SEQ ID NO: 318504 - RNA, 32 nt, Homo Sapiens
auuauguuacugacaaggucauuuucuaccag

SEQ ID NO: 318505 - RNA, 32 nt, Homo Sapiens
cccagaaggaagcucugccauuggacagccgg

SEQ ID NO: 318506 - RNA, 32 nt, Homo Sapiens
uuccaccuguaauagcacuuuggaacuguggg

SEQ ID NO: 318507 - RNA, 32 nt, Homo Sapiens
cauggcuuuagaagcugguacauuuacugagc

SEQ ID NO: 318508 - RNA, 32 nt, Homo Sapiens
aaucuugccccagcacaguaauaaaaaucaag

SEQ ID NO: 318509 - RNA, 32 nt, Homo Sapiens
acccgcuccggcgacccuccccgcuccccugu

SEQ ID NO: 318510 - RNA, 32 nt, Homo Sapiens
cuuggacaaaaauaguuuauucuacauauagu

SEQ ID NO: 318511 - RNA, 32 nt, Homo Sapiens
aaaaugucgauaugucauuaugcacuuuacag

SEQ ID NO: 318512 - RNA, 32 nt, Homo Sapiens
ccucagcacuuuguugacgugguggugagagc

SEQ ID NO: 318513 - RNA, 32 nt, Homo Sapiens
uguggugaauauuuugaguccugacaguuuaa

SEQ ID NO: 318514 - RNA, 32 nt, Homo Sapiens
aauauacagugagggagggccaucucuuuacu

SEQ ID NO: 318515 - RNA, 32 nt, Homo Sapiens
cccgggacagcccgaggcgccgcgcccgccgc

SEQ ID NO: 318516 - RNA, 32 nt, Homo Sapiens
aaaacaauucauaaguuuuacauugugcacca

SEQ ID NO: 318517 - RNA, 32 nt, Homo Sapiens
uaagaugauuuaauguugauuuuaauccugua

SEQ ID NO: 318518 - RNA, 32 nt, Homo Sapiens
uuguuaccccuucuucaacugugguucaccug

SEQ ID NO: 318519 - RNA, 32 nt, Homo Sapiens
guucacucuuugaauuuccuggauaagaguuc

SEQ ID NO: 318520 - RNA, 32 nt, Homo Sapiens
gauuaucaaggaacuucagaucagggaaaucu

SEQ ID NO: 318521 - RNA, 32 nt, Homo Sapiens
aaaaaaauguuaaagcacuauggaauuaggua

SEQ ID NO: 318522 - RNA, 32 nt, Homo Sapiens
aggguguccggagagcggugggcugaccuguu

SEQ ID NO: 318523 - RNA, 32 nt, Homo Sapiens
uucagagucaugccuuguuuuauuuuauuuua

SEQ ID NO: 318524 - RNA, 31 nt, Homo Sapiens
augugggaguaaaaacaaaagcaucuccaga

SEQ ID NO: 318525 - RNA, 32 nt, Homo Sapiens
uaaaacauaugcauuuuuccuuccuuuuauca

SEQ ID NO: 318526 - RNA, 32 nt, Homo Sapiens
cucugccggccuggagggggagagggggagga

SEQ ID NO: 318527 - RNA, 32 nt, Homo Sapiens
aacaucaaauuugaacgucaaagaagacucua

SEQ ID NO: 318528 - RNA, 32 nt, Homo Sapiens
gagaauugcauucauggcuuucaauuguaaau

SEQ ID NO: 318529 - RNA, 32 nt, Homo Sapiens
augaauuuguaauugaaagacauauuauacaa

SEQ ID NO: 318530 - RNA, 32 nt, Homo Sapiens
uuauguuuucagugcugugucauuccaaauaa

SEQ ID NO: 318531 - RNA, 32 nt, Homo Sapiens
gagcagagggucugaaaccuuagugagcaaaa

SEQ ID NO: 318532 - RNA, 32 nt, Homo Sapiens
agacuuuuuaucaaccguauuuuucauaucag

SEQ ID NO: 318533 - RNA, 32 nt, Homo Sapiens
ccccagccccagcccagucccuuugguuuccu

SEQ ID NO: 318534 - RNA, 32 nt, Homo Sapiens
gaaauaguuccaguuauaaacaauuaaaagau

SEQ ID NO: 318535 - RNA, 32 nt, Homo Sapiens
ucauugugugacucagugcugcuguccauccc

SEQ ID NO: 318536 - RNA, 32 nt, Homo Sapiens
uuuagagguccuaucuccaguuccuugcacuc

SEQ ID NO: 318537 - RNA, 32 nt, Homo Sapiens
agccucggcaccccugucuccuccuggguggc

SEQ ID NO: 318538 - RNA, 32 nt, Homo Sapiens
gugaggggaaagggggugcuguccucccuccu

SEQ ID NO: 318539 - RNA, 32 nt, Homo Sapiens
aaaugggaagauuaaaaagcacagggggaaga

SEQ ID NO: 318540 - RNA, 32 nt, Homo Sapiens
uccggcccucgccuccucccucgguggcgcua

SEQ ID NO: 318541 - RNA, 32 nt, Homo Sapiens
aauggcuuuuugugguuuuucuuaaaaaaaaa

SEQ ID NO: 318542 - RNA, 32 nt, Homo Sapiens
aaaacucagcaucuucugaaccagaggcauuu

SEQ ID NO: 318543 - RNA, 32 nt, Homo Sapiens
cagagcacuguuugcauccccauccucaagac

SEQ ID NO: 318544 - RNA, 32 nt, Homo Sapiens
auagcuucuaccaugaguuauaugagucaaga

SEQ ID NO: 318545 - RNA, 32 nt, Homo Sapiens
ggcacagcggagccaugggggcugggaguccc

SEQ ID NO: 318546 - RNA, 32 nt, Homo Sapiens
uugauguuauuuacuuaaaauaauuauucuca

SEQ ID NO: 318547 - RNA, 29 nt, Homo Sapiens
auaugcauauguauguauagaaugguuuu

SEQ ID NO: 318548 - RNA, 32 nt, Homo Sapiens
ccauucaggauuuuaaaugauguguuuaauau

SEQ ID NO: 318549 - RNA, 32 nt, Homo Sapiens
cucaaccugccagguugaagugagccucccau

SEQ ID NO: 318550 - RNA, 32 nt, Homo Sapiens
cgucauggcagagcaguggugcagguccgcac

SEQ ID NO: 318551 - RNA, 32 nt, Homo Sapiens
aagauaguuggguuuggaggcggccgccaggc

SEQ ID NO: 318552 - RNA, 32 nt, Homo Sapiens
ccacagauuuuggaaacgaccuggacacacua

SEQ ID NO: 318553 - RNA, 32 nt, Homo Sapiens
ugugaaccaaggaaaggaggcacagcccagag

SEQ ID NO: 318554 - RNA, 32 nt, Homo Sapiens
ggggacagggcccagcagcaucucagccuccu

SEQ ID NO: 318555 - RNA, 32 nt, Homo Sapiens
guguucuccgcggcgccgagucccgggagcgc

SEQ ID NO: 318556 - RNA, 32 nt, Homo Sapiens
acccgauguuuuuccuuggggaugauggccuu

SEQ ID NO: 318557 - RNA, 27 nt, Homo Sapiens
ugucuccauuaucccugguauagggca

SEQ ID NO: 318558 - RNA, 32 nt, Homo Sapiens
caggcaggcaggaggaggcggaggcgggggua

SEQ ID NO: 318559 - RNA, 32 nt, Homo Sapiens
ccgagauaaagccuagccauggcugcuguuua

SEQ ID NO: 318560 - RNA, 32 nt, Homo Sapiens
gucuggaaauguuuagacaggauauuuucuug

SEQ ID NO: 318561 - RNA, 32 nt, Homo Sapiens
ucccacuugacuguuccaaagagcagcuucuc

SEQ ID NO: 318562 - RNA, 32 nt, Homo Sapiens
gaguauuuacaacuuauacauguaauugaauu

SEQ ID NO: 318563 - RNA, 32 nt, Homo Sapiens
cccuccccuacguccugcacuuucucggacca

SEQ ID NO: 318564 - RNA, 32 nt, Homo Sapiens
cacacccgugugggcucugggauccccucuuc

SEQ ID NO: 318565 - RNA, 32 nt, Homo Sapiens
ccaagcaagcuuuaucaaaauggcuuauuugc

SEQ ID NO: 318566 - RNA, 32 nt, Homo Sapiens
ugugaaccaaaauagagucagcugacccagca

SEQ ID NO: 318567 - RNA, 32 nt, Homo Sapiens
gcacggcccgcuuuccuucuccuccaugcugg

SEQ ID NO: 318568 - RNA, 32 nt, Homo Sapiens
gaacugcagacacagcuguucucucccucucu

SEQ ID NO: 318569 - RNA, 32 nt, Homo Sapiens
ugagaagauggacgagugugucugcagccgag

SEQ ID NO: 318570 - RNA, 32 nt, Homo Sapiens
ucuucugcucuuguuugugugacaugaaacaa

SEQ ID NO: 318571 - RNA, 32 nt, Homo Sapiens
ccggucggcugcuuggcaaggcuguucaggac

SEQ ID NO: 318572 - RNA, 32 nt, Homo Sapiens
uuaaaaauaauuaagaucaucaaaaaugcuau

SEQ ID NO: 318573 - RNA, 32 nt, Homo Sapiens
ucuaggccacuugugaagaauaugagucaguu

SEQ ID NO: 318574 - RNA, 32 nt, Homo Sapiens
gggcaucgcccgcagcggccaagcucauggcc

SEQ ID NO: 318575 - RNA, 32 nt, Homo Sapiens
uccuugcauacaccuugucuguguggauaagu

SEQ ID NO: 318576 - RNA, 32 nt, Homo Sapiens
uucaccccagauucaaguuuuccuccuuguag

SEQ ID NO: 318577 - RNA, 29 nt, Homo Sapiens
ucugauacacuauucaaccacaaagugua

SEQ ID NO: 318578 - RNA, 29 nt, Homo Sapiens
cugucugcaaacuaacaauguaaaacgua

SEQ ID NO: 318579 - RNA, 28 nt, Homo Sapiens
uauuuguuuguagagauguguuuuucca

SEQ ID NO: 318580 - RNA, 32 nt, Homo Sapiens
ccgccccgccgcgagcuggcgccggguccucu

SEQ ID NO: 318581 - RNA, 32 nt, Homo Sapiens
uguggcgcgggcccggggccacgcagcggagc

SEQ ID NO: 318582 - RNA, 32 nt, Homo Sapiens
gccucccacucccacacuucuuugccuauaaa

SEQ ID NO: 318583 - RNA, 32 nt, Homo Sapiens
ucaggaaaggacuuaggugaacugagguuuuu

SEQ ID NO: 318584 - RNA, 32 nt, Homo Sapiens
uuuaaaaaucagcaucugggccaggcaagaug

SEQ ID NO: 318585 - RNA, 32 nt, Homo Sapiens
gcaaagaggagcugcuccugccuccaugguug

SEQ ID NO: 318586 - RNA, 32 nt, Homo Sapiens
aggagagagacaaauuaaugggauuguuaaaa

SEQ ID NO: 318587 - RNA, 32 nt, Homo Sapiens
ccaggcccacccagagcgagcaaacgcugaga

SEQ ID NO: 318588 - RNA, 32 nt, Homo Sapiens
cuccagcaggcccuuacauaggcgcugugugu

SEQ ID NO: 318589 - RNA, 32 nt, Homo Sapiens
uuggcccuaccuugaucaucguccuuuuuagc

SEQ ID NO: 318590 - RNA, 32 nt, Homo Sapiens
acacuggagaagggcugccccuacuucaaggc

SEQ ID NO: 318591 - RNA, 32 nt, Homo Sapiens
ggagaaccuuuguguccacacucuguaucuag

SEQ ID NO: 318592 - RNA, 32 nt, Homo Sapiens
ucuaauuguuuuuguuuguuuguuuuugccuu

SEQ ID NO: 318593 - RNA, 32 nt, Homo Sapiens
uguggcaaauguuuaacaaaaacucguucaug

SEQ ID NO: 318594 - RNA, 32 nt, Homo Sapiens
uuacaaaguuaaaauuugggaguaguagaaaa

SEQ ID NO: 318595 - RNA, 32 nt, Homo Sapiens
gucugugugagugagcgcaugugcgcauuuau

SEQ ID NO: 318596 - RNA, 32 nt, Homo Sapiens
uuuggacaaauagcuuuuauauuuucauuaaa

SEQ ID NO: 318597 - RNA, 32 nt, Homo Sapiens
gcgcggccugugccggccgccccacccuccuu

SEQ ID NO: 318598 - RNA, 32 nt, Homo Sapiens
aagauuuguuuuacuauaaauaaguggauuau

SEQ ID NO: 318599 - RNA, 32 nt, Homo Sapiens
ugggccuccucggcugccuggggcuccagacu

SEQ ID NO: 318600 - RNA, 32 nt, Homo Sapiens
cucccgcccccgcacgcggaccgcccucgccu

SEQ ID NO: 318601 - RNA, 32 nt, Homo Sapiens
aacugugcguucugcauagaauucaaacgaga

SEQ ID NO: 318602 - RNA, 30 nt, Homo Sapiens
uccgaccaugcucgcguucuccgcggaguc

SEQ ID NO: 318603 - RNA, 32 nt, Homo Sapiens
uuugaauguuaggucaagaaauccauguacag

SEQ ID NO: 318604 - RNA, 32 nt, Homo Sapiens
gaguuaauuaaaccucuuuccuuuauaaauua

SEQ ID NO: 318605 - RNA, 32 nt, Homo Sapiens
gcaccuuaauauuauugggguugguuggggug

SEQ ID NO: 318606 - RNA, 32 nt, Homo Sapiens
agaguggcucauaagugguuucuucagagaaa

SEQ ID NO: 318607 - RNA, 32 nt, Homo Sapiens
cccgggccuuccagggccuccuggacaccuac

SEQ ID NO: 318608 - RNA, 32 nt, Homo Sapiens
ggugccgagcgcgacccugcaggugcuggacg

SEQ ID NO: 318609 - RNA, 32 nt, Homo Sapiens
ucagaugaagaaaugcacaagaggcuuccuuu

SEQ ID NO: 318610 - RNA, 32 nt, Homo Sapiens
cugacugcuccggcugcccgcccgcgcggcgc

SEQ ID NO: 318611 - RNA, 30 nt, Homo Sapiens
acaccauggcucugaagagaauccacaagg

SEQ ID NO: 318612 - RNA, 32 nt, Homo Sapiens
cgaagggagcggcuacucagccgagcccgcag

SEQ ID NO: 318613 - RNA, 32 nt, Homo Sapiens
uuccagucggaacgcaaccgauccuggggagg

SEQ ID NO: 318614 - RNA, 32 nt, Homo Sapiens
cuugcggguggccaaguugaaugugcugcccg

SEQ ID NO: 318615 - RNA, 32 nt, Homo Sapiens
gugauugauauaaccuaacaaaucugagccag

SEQ ID NO: 318616 - RNA, 32 nt, Homo Sapiens
ccacuccccccuuggcaaccacugaucuuguu

SEQ ID NO: 318617 - RNA, 32 nt, Homo Sapiens
aagaaagccagacuuuggaaaaggauaauugg

SEQ ID NO: 318618 - RNA, 32 nt, Homo Sapiens
agugagcucucaccccagucagccaaaugagc

SEQ ID NO: 318619 - RNA, 32 nt, Homo Sapiens
aucacaaugacacacacaucacacacacauca

SEQ ID NO: 318620 - RNA, 32 nt, Homo Sapiens
gacacuuccugccuaagggagagugguauuug

SEQ ID NO: 318621 - RNA, 32 nt, Homo Sapiens
cuuucaucaauguccuucucucuuguccuccc

SEQ ID NO: 318622 - RNA, 32 nt, Homo Sapiens
gcuugguggaggggcaggauuccgggcaggag

SEQ ID NO: 318623 - RNA, 32 nt, Homo Sapiens
aggauacauuuaauaaaacugcgaggacauca

SEQ ID NO: 318624 - RNA, 32 nt, Homo Sapiens
cccaagcccuccccuggugcagcuggcagcau

SEQ ID NO: 318625 - RNA, 32 nt, Homo Sapiens
cuuggcucucaauaaacuuuuaccacaaauug

SEQ ID NO: 318626 - RNA, 32 nt, Homo Sapiens
gccgcggcaccccguccgaggcgaaggaaccc

SEQ ID NO: 318627 - RNA, 32 nt, Homo Sapiens
auuucuuaauuuccuuuaugaugcaucacuua

SEQ ID NO: 318628 - RNA, 29 nt, Homo Sapiens
gaacauggcugcgcgcccugcugccaccc

SEQ ID NO: 318629 - RNA, 32 nt, Homo Sapiens
uagacaaucaguacacaugcugguguguuuuc

SEQ ID NO: 318630 - RNA, 32 nt, Homo Sapiens
uuuaucccucccuuuugguaacuuccaauccu

SEQ ID NO: 318631 - RNA, 32 nt, Homo Sapiens
agaagguggcucagcccucugguccacacuug

SEQ ID NO: 318632 - RNA, 32 nt, Homo Sapiens
cagagaagucaucaaagcccaggggcugcacg

SEQ ID NO: 318633 - RNA, 32 nt, Homo Sapiens
gggccccgcgcccccgccucuguacagcaggg

SEQ ID NO: 318634 - RNA, 32 nt, Homo Sapiens
ugcuaauuacaaucacaaaugaaacaagauuc

SEQ ID NO: 318635 - RNA, 32 nt, Homo Sapiens
cugugggaaucacauccauacuggagcccugg

SEQ ID NO: 318636 - RNA, 32 nt, Homo Sapiens
ggagaggacgugagggaccacccccacccaca

SEQ ID NO: 318637 - RNA, 31 nt, Homo Sapiens
ugagguuuugguaauuguagaccuguuucau

SEQ ID NO: 318638 - RNA, 32 nt, Homo Sapiens
uccuguuucaugaaacaaagcuguguuuuccu

SEQ ID NO: 318639 - RNA, 32 nt, Homo Sapiens
uuucuacuaaagaugcagaaauugaugaucuu

SEQ ID NO: 318640 - RNA, 32 nt, Homo Sapiens
cuccaguucccuggacccccagcccaagcucc

SEQ ID NO: 318641 - RNA, 32 nt, Homo Sapiens
ccuugccgucgcucgugccgugcucucuaccc

SEQ ID NO: 318642 - RNA, 32 nt, Homo Sapiens
uuccagcggucccaagaacaccuacuaauucc

SEQ ID NO: 318643 - RNA, 32 nt, Homo Sapiens
cauuaaaaaauggcccagggguuaugcagguu

SEQ ID NO: 318644 - RNA, 32 nt, Homo Sapiens
agaggaaauggcacaguuccacaaucucuucu

SEQ ID NO: 318645 - RNA, 32 nt, Homo Sapiens
cuuccaucauaucaagugaguugcuuucugga

SEQ ID NO: 318646 - RNA, 32 nt, Homo Sapiens
ggauguagcccuuauuuaauggcugucauuau

SEQ ID NO: 318647 - RNA, 32 nt, Homo Sapiens
aucacccaucugugugcuuccauccugcauua

SEQ ID NO: 318648 - RNA, 32 nt, Homo Sapiens
cacauguacagcccuugcccccggcccucuca

SEQ ID NO: 318649 - RNA, 32 nt, Homo Sapiens
ugaucacuucagugacaauacccauuaaugaa

SEQ ID NO: 318650 - RNA, 32 nt, Homo Sapiens
gccccccgccccacccucgcugaccuaauaag

SEQ ID NO: 318651 - RNA, 32 nt, Homo Sapiens
uccggucgcggcugacaccucccuucgugugu

SEQ ID NO: 318652 - RNA, 32 nt, Homo Sapiens
ucccgugagagagaggcggcggcggcgggcuc

SEQ ID NO: 318653 - RNA, 32 nt, Homo Sapiens
cuuccggcggcgugggggcaaagcaggcgguu

SEQ ID NO: 318654 - RNA, 31 nt, Homo Sapiens
caggcaccugccaccacccccaguuaauauu

SEQ ID NO: 318655 - RNA, 32 nt, Homo Sapiens
aguauuggaugaaggcgaaggcugggaguguc

SEQ ID NO: 318656 - RNA, 32 nt, Homo Sapiens
aguguuuucaacucuuucaaaggucggcauuc

SEQ ID NO: 318657 - RNA, 32 nt, Homo Sapiens
cagcagaacucacccuggggucggggcagugg

SEQ ID NO: 318658 - RNA, 32 nt, Homo Sapiens
aauguggauuuggggaccaaaggucagggaca

SEQ ID NO: 318659 - RNA, 32 nt, Homo Sapiens
uggggaaguugaggagugcccuucagagccag

SEQ ID NO: 318660 - RNA, 32 nt, Homo Sapiens
ccagcuugggcuucuuuuuguuuuuuucuguu

SEQ ID NO: 318661 - RNA, 32 nt, Homo Sapiens
uuuucauaguuuuauuugauaaaauuccaucu

SEQ ID NO: 318662 - RNA, 32 nt, Homo Sapiens
gcacaccuuugcaacagauguguucugauucu

SEQ ID NO: 318663 - RNA, 32 nt, Homo Sapiens
uaugggccuagauugcagcugcguggccaggu

SEQ ID NO: 318664 - RNA, 32 nt, Homo Sapiens
agggccuccgggaguuggaaaagccgaggaaa

SEQ ID NO: 318665 - RNA, 32 nt, Homo Sapiens
uuuuauuuuaaauuuuaacaauaauaaugcau

SEQ ID NO: 318666 - RNA, 32 nt, Homo Sapiens
gguuccggacccagcccuagcagccuucuccc

SEQ ID NO: 318667 - RNA, 32 nt, Homo Sapiens
gugacucuguuggcagaaggcaggcgaggaua

SEQ ID NO: 318668 - RNA, 32 nt, Homo Sapiens
caccauuccuuccuaacacagaguugcacccc

SEQ ID NO: 318669 - RNA, 32 nt, Homo Sapiens
auaauaugcuguuaaucaggacuuuauuaaau

SEQ ID NO: 318670 - RNA, 32 nt, Homo Sapiens
cauuacuccuuuucucggcccgcggcccgaac

SEQ ID NO: 318671 - RNA, 32 nt, Homo Sapiens
gggcugaagggagaggcgcaggagccugggga

SEQ ID NO: 318672 - RNA, 32 nt, Homo Sapiens
agagcccuccggaucccauccaggcgcaaaga

SEQ ID NO: 318673 - RNA, 32 nt, Homo Sapiens
cccgaccucaggugaucuacccgccucagccu

SEQ ID NO: 318674 - RNA, 32 nt, Homo Sapiens
agguccguguggaugcuccuagugcguucaaa

SEQ ID NO: 318675 - RNA, 32 nt, Homo Sapiens
ugcccugccgugguggcagcuggggcugugga

SEQ ID NO: 318676 - RNA, 32 nt, Homo Sapiens
gcauuccugcauuccugccgccgcccgggacc

SEQ ID NO: 318677 - RNA, 32 nt, Homo Sapiens
uuuaaaaaaaagauuugcuaagaucaaaggau

SEQ ID NO: 318678 - RNA, 32 nt, Homo Sapiens
gcuggccgccuggcacugagggucccuuugca

SEQ ID NO: 318679 - RNA, 32 nt, Homo Sapiens
uauuguagugauugcagugguguuuagcgagg

SEQ ID NO: 318680 - RNA, 32 nt, Homo Sapiens
ccgccucccagccccaggggugccuguggggg

SEQ ID NO: 318681 - RNA, 32 nt, Homo Sapiens
aaaauuauguuaugaagugcaggaacagcaca

SEQ ID NO: 318682 - RNA, 32 nt, Homo Sapiens
gguuggggauggguuuaggagcuccagguugg

SEQ ID NO: 318683 - RNA, 32 nt, Homo Sapiens
cagaacccagacccugaguccuugggccagcu

SEQ ID NO: 318684 - RNA, 32 nt, Homo Sapiens
gcuuguauauauauuuuuaaaaaucuaccugu

SEQ ID NO: 318685 - RNA, 32 nt, Homo Sapiens
uucugcggagagcgaugccgcuucccgacacc

SEQ ID NO: 318686 - RNA, 32 nt, Homo Sapiens
gggggaagauaaagguacauuauaaaacacac

SEQ ID NO: 318687 - RNA, 32 nt, Homo Sapiens
cauuuguuuguuaauguacugugccuuuaacu

SEQ ID NO: 318688 - RNA, 32 nt, Homo Sapiens
gacagaagaugauggaaaauauuuucaaagua

SEQ ID NO: 318689 - RNA, 32 nt, Homo Sapiens
uacagcuucagcgugccugcgauggcguucac

SEQ ID NO: 318690 - RNA, 32 nt, Homo Sapiens
gacuccagucaguaggaaagugccacaauugu

SEQ ID NO: 318691 - RNA, 32 nt, Homo Sapiens
ggccaggccagcugagaccuacaggaccgugg

SEQ ID NO: 318692 - RNA, 32 nt, Homo Sapiens
ugaaagagaaaagaaaacucagaaagggauga

SEQ ID NO: 318693 - RNA, 32 nt, Homo Sapiens
uacccuguuauccucagcaacaaaacccacau

SEQ ID NO: 318694 - RNA, 32 nt, Homo Sapiens
gucucuucagggauucuguuucuuucugguuc

SEQ ID NO: 318695 - RNA, 32 nt, Homo Sapiens
aauguuuggccccagggcagcaucuacugauc

SEQ ID NO: 318696 - RNA, 32 nt, Homo Sapiens
ugauggggucaucaaauuguuaaucugaaaau

SEQ ID NO: 318697 - RNA, 31 nt, Homo Sapiens
aucgcccugccggucgcuagcuccgagggcg

SEQ ID NO: 318698 - RNA, 32 nt, Homo Sapiens
aauaaccucauacaaccuucugucccaucucc

SEQ ID NO: 318699 - RNA, 32 nt, Homo Sapiens
gcgucucccucgcgcgagcagccauuguuuga

SEQ ID NO: 318700 - RNA, 32 nt, Homo Sapiens
guuagaggaagucuuugucagcccuuauagcu

SEQ ID NO: 318701 - RNA, 32 nt, Homo Sapiens
aggccgugugcaacuucgugugugacugcagg

SEQ ID NO: 318702 - RNA, 32 nt, Homo Sapiens
uacccacaugauacugcaaguugugucucucu

SEQ ID NO: 318703 - RNA, 32 nt, Homo Sapiens
cugggagcgaggggcgaaggcgcggagaagcc

SEQ ID NO: 318704 - RNA, 32 nt, Homo Sapiens
gcaugggagacaugugcugggucuguggggcc

SEQ ID NO: 318705 - RNA, 32 nt, Homo Sapiens
cacccuggcaccugggagcacagugaagaccc

SEQ ID NO: 318706 - RNA, 32 nt, Homo Sapiens
uaauuaaguaaccuaaaguaugcauuaggauu

SEQ ID NO: 318707 - RNA, 32 nt, Homo Sapiens
cgcccggguccucccacugauuccuuugacca

SEQ ID NO: 318708 - RNA, 32 nt, Homo Sapiens
caggaaguuaucuggaaagauaccuggauguu

SEQ ID NO: 318709 - RNA, 32 nt, Homo Sapiens
ggaauucagcauugccacucugauuggcugga

SEQ ID NO: 318710 - RNA, 32 nt, Homo Sapiens
gagugagugaguacagaagaaugcucaugaua

SEQ ID NO: 318711 - RNA, 32 nt, Homo Sapiens
gcguggcuccuccuccucccccacugccuggg

SEQ ID NO: 318712 - RNA, 32 nt, Homo Sapiens
uauaauauuuaacgaaucaugauucagguugu

SEQ ID NO: 318713 - RNA, 32 nt, Homo Sapiens
guggaucccuacugcugguuucugccuucucc

SEQ ID NO: 318714 - RNA, 32 nt, Homo Sapiens
auucuagaucacauucuucaaggucaaagucu

SEQ ID NO: 318715 - RNA, 32 nt, Homo Sapiens
guaguccuuucugccuccaggagcggcuccgu

SEQ ID NO: 318716 - RNA, 32 nt, Homo Sapiens
cggggaccccaggaugagucugccggcagcau

SEQ ID NO: 318717 - RNA, 32 nt, Homo Sapiens
augaaacccaccucacaggguuguugugagga

SEQ ID NO: 318718 - RNA, 32 nt, Homo Sapiens
guugauaaaccauaaaugaaucaucaaagcuc

SEQ ID NO: 318719 - RNA, 32 nt, Homo Sapiens
gagcgcggcagcggcggcgggaugcuggcgcu

SEQ ID NO: 318720 - RNA, 32 nt, Homo Sapiens
uggaaugaauauauuuuacaugugagaaggau

SEQ ID NO: 318721 - RNA, 32 nt, Homo Sapiens
gcuaggccggugcccggcccuggcagcaaggg

SEQ ID NO: 318722 - RNA, 32 nt, Homo Sapiens
ucugagcuuguuccgccucccucccccgggaa

SEQ ID NO: 318723 - RNA, 32 nt, Homo Sapiens
ucaauguaguguuuuaauaaaaaaggaaccua

SEQ ID NO: 318724 - RNA, 32 nt, Homo Sapiens
ugugcgggaaucagcucugcaguuguguccag

SEQ ID NO: 318725 - RNA, 32 nt, Homo Sapiens
gcgucuccacccugcgagagccgcccgccagc

SEQ ID NO: 318726 - RNA, 32 nt, Homo Sapiens
ccuggaggagggcucuggaagucacgucaggu

SEQ ID NO: 318727 - RNA, 32 nt, Homo Sapiens
gaaugaaacuguaaccaaaauuuuaaaauaaa

SEQ ID NO: 318728 - RNA, 32 nt, Homo Sapiens
agguuuucugaaaaauacuuuuaucuagaaau

SEQ ID NO: 318729 - RNA, 32 nt, Homo Sapiens
gucccgugugcccgagagcgccggcggcgggg

SEQ ID NO: 318730 - RNA, 32 nt, Homo Sapiens
ccacgcucgcccugauccacuccaccuuacac

SEQ ID NO: 318731 - RNA, 32 nt, Homo Sapiens
ucugggcauuccccgcuuuguugcagagaaau

SEQ ID NO: 318732 - RNA, 31 nt, Homo Sapiens
aggcggcggcacuggcuggacccacgcgcgc

SEQ ID NO: 318733 - RNA, 32 nt, Homo Sapiens
ccaucaucaucauugucaucgucaucauuaug

SEQ ID NO: 318734 - RNA, 32 nt, Homo Sapiens
cccggaccgggccgcgcacgccgccucaggaa

SEQ ID NO: 318735 - RNA, 32 nt, Homo Sapiens
auuuucucucgcucuuuuuuuuaauacuagca

SEQ ID NO: 318736 - RNA, 32 nt, Homo Sapiens
cuguccucucuuccucacuccucccuucagug

SEQ ID NO: 318737 - RNA, 32 nt, Homo Sapiens
uucaugacuccagccucagcaagaugggauca

SEQ ID NO: 318738 - RNA, 32 nt, Homo Sapiens
gagcuggcgcuuguaauguuuauccguuuaaa

SEQ ID NO: 318739 - RNA, 32 nt, Homo Sapiens
uuuugggagaggcccucucacccaggcccaag

SEQ ID NO: 318740 - RNA, 32 nt, Homo Sapiens
uguucuuaaagccccaggauuagauggaugcc

SEQ ID NO: 318741 - RNA, 32 nt, Homo Sapiens
agggggcgccugugucccacccgcucgcgggc

SEQ ID NO: 318742 - RNA, 32 nt, Homo Sapiens
cucaccacagcuugcuuagagcaagccuuuuc

SEQ ID NO: 318743 - RNA, 32 nt, Homo Sapiens
cugaaccguggcgguggcccuucccggcugcg

SEQ ID NO: 318744 - RNA, 32 nt, Homo Sapiens
uucaccuccuuuucuggacccgagggccuggc

SEQ ID NO: 318745 - RNA, 32 nt, Homo Sapiens
caugcagucauaggagacugcuccaucauucu

SEQ ID NO: 318746 - RNA, 32 nt, Homo Sapiens
ggaggagaggaugagauggcugggcauccaug

SEQ ID NO: 318747 - RNA, 32 nt, Homo Sapiens
gccugauaccacauaaaagaauguagaauggc

SEQ ID NO: 318748 - RNA, 32 nt, Homo Sapiens
ugggaccagccuccuccaacccugaggccuga

SEQ ID NO: 318749 - RNA, 32 nt, Homo Sapiens
uuccaaaugacuuuucccuucucuagauuuuu

SEQ ID NO: 318750 - RNA, 29 nt, Homo Sapiens
cuccauggggcugagggacuggcugagaa

SEQ ID NO: 318751 - RNA, 32 nt, Homo Sapiens
aggcagaagauaaugcaaccaacagucaacuu

SEQ ID NO: 318752 - RNA, 30 nt, Homo Sapiens
uguucauggaguuuuguguugaggacagca

SEQ ID NO: 318753 - RNA, 32 nt, Homo Sapiens
gccugggaacagagcccccacccucucucccu

SEQ ID NO: 318754 - RNA, 32 nt, Homo Sapiens
gaggccgugaagguggggacggugccugggcc

SEQ ID NO: 318755 - RNA, 32 nt, Homo Sapiens
cuccuggccagagcguuugaccgacagacaau

SEQ ID NO: 318756 - RNA, 32 nt, Homo Sapiens
acucuaugcaagagaagcaacguauggcagga

SEQ ID NO: 318757 - RNA, 32 nt, Homo Sapiens
cgagcacaggccgcuccgcgggcgcuucggau

SEQ ID NO: 318758 - RNA, 32 nt, Homo Sapiens
cugcccagcugcugcccuccccaggaggccuc

SEQ ID NO: 318759 - RNA, 32 nt, Homo Sapiens
cucccuucaccuuuccucuccuggcgggguuc

SEQ ID NO: 318760 - RNA, 32 nt, Homo Sapiens
gaauuacauuuuaguaauuguuuucaagacaa

SEQ ID NO: 318761 - RNA, 32 nt, Homo Sapiens
cuuugauauuucaggcgcacaaacaaggccuc

SEQ ID NO: 318762 - RNA, 32 nt, Homo Sapiens
gaagaagcaaacugcccguucuccuugaagau

SEQ ID NO: 318763 - RNA, 32 nt, Homo Sapiens
caaaauaaacacagccuuuauaaucaacuuga

SEQ ID NO: 318764 - RNA, 32 nt, Homo Sapiens
cucccagucauguugguacccuggacagugcc

SEQ ID NO: 318765 - RNA, 32 nt, Homo Sapiens
gguuacaguuugguuuuauauauauuagggag

SEQ ID NO: 318766 - RNA, 32 nt, Homo Sapiens
ggccacguuuccaaacggcagcuccacugggu

SEQ ID NO: 318767 - RNA, 32 nt, Homo Sapiens
aauacuguucuuccaacccuaucuucaaugac

SEQ ID NO: 318768 - RNA, 32 nt, Homo Sapiens
cucgcaggccucguacuaggaugggccuucau

SEQ ID NO: 318769 - RNA, 32 nt, Homo Sapiens
caguaaauauuuuuaagugguacuucuaaauc

SEQ ID NO: 318770 - RNA, 32 nt, Homo Sapiens
gaccuugugucccuuccacaccaguugccaga

SEQ ID NO: 318771 - RNA, 32 nt, Homo Sapiens
gaaguucuuucugcaccagugauggaaaacgc

SEQ ID NO: 318772 - RNA, 32 nt, Homo Sapiens
ggauguggacagaggggcagggggcugggaga

SEQ ID NO: 318773 - RNA, 32 nt, Homo Sapiens
gagauccucguaugaaggaacuguuuaguauc

SEQ ID NO: 318774 - RNA, 32 nt, Homo Sapiens
ggggcagccugcgacccuccccgcuugugucc

SEQ ID NO: 318775 - RNA, 32 nt, Homo Sapiens
aauaacucccaaaagcaacaaacaaaaauauu

SEQ ID NO: 318776 - RNA, 32 nt, Homo Sapiens
uuaacugauuucuggucuaucuccagagauaa

SEQ ID NO: 318777 - RNA, 32 nt, Homo Sapiens
cuaacuuaacuucuuaauguccuuccagaacu

SEQ ID NO: 318778 - RNA, 32 nt, Homo Sapiens
auagccauagcauuuaccauuuuauggcuuau

SEQ ID NO: 318779 - RNA, 30 nt, Homo Sapiens
gcccaggcgcccggccccgcaacgcgaaau

SEQ ID NO: 318780 - RNA, 32 nt, Homo Sapiens
accagaaagggagcugaaaaccacggagcucc

SEQ ID NO: 318781 - RNA, 32 nt, Homo Sapiens
cgaagugauuuuuuaaaauaugguaaaaaaga

SEQ ID NO: 318782 - RNA, 32 nt, Homo Sapiens
gagaugccuggauguggccccucccccuccuu

SEQ ID NO: 318783 - RNA, 32 nt, Homo Sapiens
caaauauguggacaccaauuugcagaaacagc

SEQ ID NO: 318784 - RNA, 32 nt, Homo Sapiens
cuaccuagcgaaaauugagaaacuauauacuu

SEQ ID NO: 318785 - RNA, 32 nt, Homo Sapiens
uuccacguguacgcgcacaccaacacgaaaug

SEQ ID NO: 318786 - RNA, 32 nt, Homo Sapiens
agcugcccagaccuggaaagccaggcugagca

SEQ ID NO: 318787 - RNA, 32 nt, Homo Sapiens
gaacuuguuaaaaaugcagauucuuggcccca

SEQ ID NO: 318788 - RNA, 32 nt, Homo Sapiens
ggcuggacgugguggcucacgccuguaauccc

SEQ ID NO: 318789 - RNA, 32 nt, Homo Sapiens
gcuccuccccaccuccccacuucugcuuguug

SEQ ID NO: 318790 - RNA, 32 nt, Homo Sapiens
gcgccgggcggcgggggcaucgcguaccuucc

SEQ ID NO: 318791 - RNA, 32 nt, Homo Sapiens
caccuccaccucuggaggguccccagagaccc

SEQ ID NO: 318792 - RNA, 32 nt, Homo Sapiens
ggaaucuccagaugaauccucauuuuacuccu

SEQ ID NO: 318793 - RNA, 32 nt, Homo Sapiens
ccagguccugcacuuucuauuuugagccucuu

SEQ ID NO: 318794 - RNA, 32 nt, Homo Sapiens
ucaccugcagauuuagcauuagacaucgggca

SEQ ID NO: 318795 - RNA, 32 nt, Homo Sapiens
ggggcgcugagguagccccccggagcggcacg

SEQ ID NO: 318796 - RNA, 32 nt, Homo Sapiens
cugggcucucccagccucccagcccucugccc

SEQ ID NO: 318797 - RNA, 32 nt, Homo Sapiens
acaggaugcagggccugcgggucucuacagug

SEQ ID NO: 318798 - RNA, 32 nt, Homo Sapiens
ccacugcauacuuccucauagagacauuguga

SEQ ID NO: 318799 - RNA, 32 nt, Homo Sapiens
aaaagguguauuuuuucuuuuagaauguaagc

SEQ ID NO: 318800 - RNA, 32 nt, Homo Sapiens
aaggccuucccuguuuuccccccaagggaggc

SEQ ID NO: 318801 - RNA, 32 nt, Homo Sapiens
auauacguguagcucauguauuucacaguuua

SEQ ID NO: 318802 - RNA, 32 nt, Homo Sapiens
gcacgcguugcugcuggacgcugcuggccagg

SEQ ID NO: 318803 - RNA, 32 nt, Homo Sapiens
uuugauuuuuaaaauuauucucuucuaaccaa

SEQ ID NO: 318804 - RNA, 32 nt, Homo Sapiens
caacgacucagaacacauaaugguguuuguag

SEQ ID NO: 318805 - RNA, 32 nt, Homo Sapiens
uaggcaacacagagccaaggcgggugcuggaa

SEQ ID NO: 318806 - RNA, 32 nt, Homo Sapiens
uguaauuccagaugagucacuguaacucuaga

SEQ ID NO: 318807 - RNA, 32 nt, Homo Sapiens
ugucucaaacuccugaccucaggcgauccacc

SEQ ID NO: 318808 - RNA, 32 nt, Homo Sapiens
gcagucuuucccuugaggcuccaagaccagca

SEQ ID NO: 318809 - RNA, 32 nt, Homo Sapiens
caugcuuaauaaaagugcugagacuguuacua

SEQ ID NO: 318810 - RNA, 32 nt, Homo Sapiens
cagaggcucguugacuggcuguguguugggau

SEQ ID NO: 318811 - RNA, 32 nt, Homo Sapiens
cagauuucagccagggcugaggucucaucuga

SEQ ID NO: 318812 - RNA, 32 nt, Homo Sapiens
aauuggucuugugaaguaaacuuuuuauauuu

SEQ ID NO: 318813 - RNA, 27 nt, Homo Sapiens
uggcuguuauucuucagucauggcauu

SEQ ID NO: 318814 - RNA, 32 nt, Homo Sapiens
agaacaagcccaacaguaaucugcaucauaag

SEQ ID NO: 318815 - RNA, 32 nt, Homo Sapiens
uucucuggaaaauuauuuugguuaauguaaua

SEQ ID NO: 318816 - RNA, 32 nt, Homo Sapiens
ggcuccccugcccuccuucuccuuaggagugg

SEQ ID NO: 318817 - RNA, 32 nt, Homo Sapiens
ccacuuuuaaacauuacugggugagcaaauuc

SEQ ID NO: 318818 - RNA, 32 nt, Homo Sapiens
aaaggcccugucauugcuugacacccugugaa

SEQ ID NO: 318819 - RNA, 32 nt, Homo Sapiens
uucaauucaaggaaucuaucuaagacaaauag

SEQ ID NO: 318820 - RNA, 31 nt, Homo Sapiens
acagggaagcacugcccagccccugccuggc

SEQ ID NO: 318821 - RNA, 32 nt, Homo Sapiens
cugcccuuuucucuggaauaucuaagauguga

SEQ ID NO: 318822 - RNA, 32 nt, Homo Sapiens
ccgaggaccugccggacaauaacugggcgacc

SEQ ID NO: 318823 - RNA, 32 nt, Homo Sapiens
accuuacccacagauaacacaugcuguuucua

SEQ ID NO: 318824 - RNA, 32 nt, Homo Sapiens
ggggcccccucgccacccccagccccuugggc

SEQ ID NO: 318825 - RNA, 32 nt, Homo Sapiens
auuuaaugggcuauuuaauuaagggguaggaa

SEQ ID NO: 318826 - RNA, 32 nt, Homo Sapiens
cuuguaauuuaccaaagaaaaauacauacauu

SEQ ID NO: 318827 - RNA, 30 nt, Homo Sapiens
cggccgcaccugccuccgccggcuccagug

SEQ ID NO: 318828 - RNA, 32 nt, Homo Sapiens
uugaaaucacucgggcaacaaacaaguagaac

SEQ ID NO: 318829 - RNA, 32 nt, Homo Sapiens
ucaaguugcuccauucuccgaugauggaaaua

SEQ ID NO: 318830 - RNA, 32 nt, Homo Sapiens
caucuucugugcuuuuuccccuaccugggaga

SEQ ID NO: 318831 - RNA, 32 nt, Homo Sapiens
gggcagagcccagucagaagagucauaucuuu

SEQ ID NO: 318832 - RNA, 32 nt, Homo Sapiens
ggucuuuacuccugggauggcuucaggggcag

SEQ ID NO: 318833 - RNA, 32 nt, Homo Sapiens
agccgcucgccccgacccagccgcccgauguc

SEQ ID NO: 318834 - RNA, 32 nt, Homo Sapiens
uacccccagguucuccuccccacagccagucc

SEQ ID NO: 318835 - RNA, 32 nt, Homo Sapiens
ggcuuggggcagcuggguuuguccuugaugua

SEQ ID NO: 318836 - RNA, 32 nt, Homo Sapiens
aucuggcuuccgcgggccgccgccggcccuga

SEQ ID NO: 318837 - RNA, 32 nt, Homo Sapiens
caucaucuuagacuuguaugaaauaaccacuc

SEQ ID NO: 318838 - RNA, 32 nt, Homo Sapiens
ccugguuugacuguccuuaccccggggaggca

SEQ ID NO: 318839 - RNA, 32 nt, Homo Sapiens
agauuccaacuuuaauagcaagccuguggagu

SEQ ID NO: 318840 - RNA, 32 nt, Homo Sapiens
caggccaugggcccucacggagaggaagggaa

SEQ ID NO: 318841 - RNA, 32 nt, Homo Sapiens
auuccacccagucucccucccccgucccugcc

SEQ ID NO: 318842 - RNA, 32 nt, Homo Sapiens
aggaauggaggaugccaggaugcaggucaagg

SEQ ID NO: 318843 - RNA, 28 nt, Homo Sapiens
uuuugugggcggccgcaugugcaccaca

SEQ ID NO: 318844 - RNA, 32 nt, Homo Sapiens
ggugcacuaucauaaucacaucaggucugcuu

SEQ ID NO: 318845 - RNA, 32 nt, Homo Sapiens
accacugagccguaagacaaauguauaggaag

SEQ ID NO: 318846 - RNA, 32 nt, Homo Sapiens
cugcaccagggugacaagggguccucgucugc

SEQ ID NO: 318847 - RNA, 32 nt, Homo Sapiens
aaaagacugcauuuaggagauagaaaauaguu

SEQ ID NO: 318848 - RNA, 29 nt, Homo Sapiens
cuauuuaaggugugcaauuuucuauaggu

SEQ ID NO: 318849 - RNA, 32 nt, Homo Sapiens
agcccagugucuggggcaaaguccucgagguu

SEQ ID NO: 318850 - RNA, 32 nt, Homo Sapiens
cugcauaaaaauaccaaacuucagcaacuguu

SEQ ID NO: 318851 - RNA, 32 nt, Homo Sapiens
ggucugcgcgcaccacgcggccggcagaaagg

SEQ ID NO: 318852 - RNA, 32 nt, Homo Sapiens
aaaagaaaaagggauaucuuuuuuauauuuuu

SEQ ID NO: 318853 - RNA, 32 nt, Homo Sapiens
auaggugcuggaaacaucaagcucugugccca

SEQ ID NO: 318854 - RNA, 32 nt, Homo Sapiens
uuggugggaaguaagcuggagauccaggcugc

SEQ ID NO: 318855 - RNA, 32 nt, Homo Sapiens
agcacuaaauauauuuguucccucuauaaacc

SEQ ID NO: 318856 - RNA, 32 nt, Homo Sapiens
auugaaacaagaaauauuaauaccacaugggg

SEQ ID NO: 318857 - RNA, 32 nt, Homo Sapiens
ggugaggguuugcggggaagauggaguauccc

SEQ ID NO: 318858 - RNA, 32 nt, Homo Sapiens
gugaagguggggggcgggcgcgcucagggaag

SEQ ID NO: 318859 - RNA, 32 nt, Homo Sapiens
aauagaaaacauuauuauuaccaguaaccuuu

SEQ ID NO: 318860 - RNA, 32 nt, Homo Sapiens
uuuacuaugacuuuuguuuaauuuggaaacau

SEQ ID NO: 318861 - RNA, 32 nt, Homo Sapiens
uuggaagugucuguggggucuccuccucccag

SEQ ID NO: 318862 - RNA, 32 nt, Homo Sapiens
guuaaacagucaaggaggguaaguauuaucuu

SEQ ID NO: 318863 - RNA, 32 nt, Homo Sapiens
gcugaggccaggaugccguccaggcggcgcgg

SEQ ID NO: 318864 - RNA, 32 nt, Homo Sapiens
uggccaagaaacaaaagcaaaaccaucccacu

SEQ ID NO: 318865 - RNA, 32 nt, Homo Sapiens
gagcccucuuugcaugggcagccagcuggacu

SEQ ID NO: 318866 - RNA, 32 nt, Homo Sapiens
uauuuguugugcuggcccaggcguggggcuac

SEQ ID NO: 318867 - RNA, 32 nt, Homo Sapiens
gggaaaacagaccgugaacacaaaacaucaag

SEQ ID NO: 318868 - RNA, 32 nt, Homo Sapiens
cgcaggcgcgcgagacuccugcuggcccucau

SEQ ID NO: 318869 - RNA, 32 nt, Homo Sapiens
uuucugguguacaaugcuaauaaaauggugac

SEQ ID NO: 318870 - RNA, 32 nt, Homo Sapiens
ggccgcggcagguaggccggccgcgggcugag

SEQ ID NO: 318871 - RNA, 32 nt, Homo Sapiens
aaucacuugaaccucggaggcugaaguugcag

SEQ ID NO: 318872 - RNA, 32 nt, Homo Sapiens
cgcggugccgugggggucagcagggcggagcg

SEQ ID NO: 318873 - RNA, 32 nt, Homo Sapiens
gagacagcgaacuagaagaaagggcaagaagg

SEQ ID NO: 318874 - RNA, 32 nt, Homo Sapiens
aucauaugggcacaacucugguguccuucuau

SEQ ID NO: 318875 - RNA, 32 nt, Homo Sapiens
ucauggaggagaaaggacgugagauccugcug

SEQ ID NO: 318876 - RNA, 32 nt, Homo Sapiens
cggcaguaaagacggacagucuacuuugcaaa

SEQ ID NO: 318877 - RNA, 32 nt, Homo Sapiens
uugaaaggauccuugggaccucaugcacauuu

SEQ ID NO: 318878 - RNA, 32 nt, Homo Sapiens
uuaauuuccagaugauuuuauuuggcauaaau

SEQ ID NO: 318879 - RNA, 32 nt, Homo Sapiens
uaucagcuuuuaacgccuggaaguagcugagu

SEQ ID NO: 318880 - RNA, 32 nt, Homo Sapiens
aaucuccuccaugccuuugcgcaaaggaccuc

SEQ ID NO: 318881 - RNA, 32 nt, Homo Sapiens
cccuuuacugucaaucuucugucccaguaguu

SEQ ID NO: 318882 - RNA, 32 nt, Homo Sapiens
gggaaaguaggucagcagcaccuaagaucaag

SEQ ID NO: 318883 - RNA, 32 nt, Homo Sapiens
gcuuggggauuugagcauccacugcucaaagu

SEQ ID NO: 318884 - RNA, 32 nt, Homo Sapiens
uuauuuuauuuuucucaugaugagguuuucuu

SEQ ID NO: 318885 - RNA, 32 nt, Homo Sapiens
uacacaugugccuacauagacacaccaagaag

SEQ ID NO: 318886 - RNA, 32 nt, Homo Sapiens
ccucggagcgcgcaggaugcgcugggcggccg

SEQ ID NO: 318887 - RNA, 32 nt, Homo Sapiens
ccgacccgccgugcguacuuucuggagggaag

SEQ ID NO: 318888 - RNA, 32 nt, Homo Sapiens
acaugccccucaccccacuuccccuaauguua

SEQ ID NO: 318889 - RNA, 32 nt, Homo Sapiens
cuacucaucuucuguccccuggguuucacuuc

SEQ ID NO: 318890 - RNA, 32 nt, Homo Sapiens
ccugggaggguggcagggaggaggggacagcu

SEQ ID NO: 318891 - RNA, 32 nt, Homo Sapiens
ucuccggccucggcacauuaaucuucagaccc

SEQ ID NO: 318892 - RNA, 32 nt, Homo Sapiens
gugacuuccccuagcccugacccaggcacuag

SEQ ID NO: 318893 - RNA, 32 nt, Homo Sapiens
ccaugacacacccccgauuccuggacaaccag

SEQ ID NO: 318894 - RNA, 32 nt, Homo Sapiens
aacaauauauguucuucauauuuagccaauau

SEQ ID NO: 318895 - RNA, 32 nt, Homo Sapiens
cccugacccgagucggagcugugugucgcagc

SEQ ID NO: 318896 - RNA, 32 nt, Homo Sapiens
gcugugguaggcauuggcuugcagcugguauc

SEQ ID NO: 318897 - RNA, 32 nt, Homo Sapiens
uuguaaagcucuacuguaaauaaaauauuuua

SEQ ID NO: 318898 - RNA, 32 nt, Homo Sapiens
cgucaacaugaguugggccuggggcagaugag

SEQ ID NO: 318899 - RNA, 32 nt, Homo Sapiens
agccccgccccuccacaacucccuuaaucugg

SEQ ID NO: 318900 - RNA, 32 nt, Homo Sapiens
aucuacagacauuaaacaauuguuguguucuu

SEQ ID NO: 318901 - RNA, 32 nt, Homo Sapiens
ucccuuuaacaaguauuugccuucugaacuac

SEQ ID NO: 318902 - RNA, 32 nt, Homo Sapiens
uaucaguuucaaauaauauuuucucuguagua

SEQ ID NO: 318903 - RNA, 32 nt, Homo Sapiens
aaugagacugugucugaagauuuuaaauucca

SEQ ID NO: 318904 - RNA, 32 nt, Homo Sapiens
gggugggcccaccaccgcccagcccuccuugg

SEQ ID NO: 318905 - RNA, 32 nt, Homo Sapiens
aguuuuaguuuuuuaagaaguacucaugcaga

SEQ ID NO: 318906 - RNA, 32 nt, Homo Sapiens
ccgcgccgcucccuggagcucggcggagcgcg

SEQ ID NO: 318907 - RNA, 32 nt, Homo Sapiens
ggggagagggcccacacagucuccucgccggc

SEQ ID NO: 318908 - RNA, 31 nt, Homo Sapiens
uucauccaagccacuggcugagguguuagga

SEQ ID NO: 318909 - RNA, 32 nt, Homo Sapiens
agagaagagauuauuaaaagugcaauagacca

SEQ ID NO: 318910 - RNA, 32 nt, Homo Sapiens
aggcugccucccagcccccaggcccucuccca

SEQ ID NO: 318911 - RNA, 32 nt, Homo Sapiens
uguauuuuggcaagcaaauacacacacacaca

SEQ ID NO: 318912 - RNA, 32 nt, Homo Sapiens
caggcggaucauuugagguuagagauucgaga

SEQ ID NO: 318913 - RNA, 32 nt, Homo Sapiens
uacacacauugcuauuugaacacucacagaaa

SEQ ID NO: 318914 - RNA, 32 nt, Homo Sapiens
acaggcguucaugccgauaacaaaaucgccuu

SEQ ID NO: 318915 - RNA, 29 nt, Homo Sapiens
cgucaugccggggauaguggagcugccca

SEQ ID NO: 318916 - RNA, 32 nt, Homo Sapiens
guggcacagguuggggcaauguucccuuguug

SEQ ID NO: 318917 - RNA, 32 nt, Homo Sapiens
guauauguuggaaaacauuuuuguaaaaugua

SEQ ID NO: 318918 - RNA, 32 nt, Homo Sapiens
caccccaccucgccgccaugcgccuccgccgc

SEQ ID NO: 318919 - RNA, 32 nt, Homo Sapiens
gggcgccguggccucucccaccccuccccuga

SEQ ID NO: 318920 - RNA, 32 nt, Homo Sapiens
gcacggacucugcggcugcgaacccaaacuug

SEQ ID NO: 318921 - RNA, 31 nt, Homo Sapiens
gcaggcugggcgguggcggccgagacuggcg

SEQ ID NO: 318922 - RNA, 32 nt, Homo Sapiens
cccuaugacaacacuuuguaaaagccgcgggg

SEQ ID NO: 318923 - RNA, 32 nt, Homo Sapiens
uuuccuuccugugcccucugaaagcuaagugu

SEQ ID NO: 318924 - RNA, 32 nt, Homo Sapiens
uugggaagucauuuugauaauuuugcuuaaac

SEQ ID NO: 318925 - RNA, 32 nt, Homo Sapiens
gcuuucaugggcagggaaucccagagauagca

SEQ ID NO: 318926 - RNA, 32 nt, Homo Sapiens
ucuacacauaucuuguuagauuuuuaacuauu

SEQ ID NO: 318927 - RNA, 32 nt, Homo Sapiens
ccuuuaaaaauacauagcauuaaaucccaaau

SEQ ID NO: 318928 - RNA, 32 nt, Homo Sapiens
ccucgccgccccaccggaccucguccuccccc

SEQ ID NO: 318929 - RNA, 32 nt, Homo Sapiens
cggcccccgccagaucgcccagcgccaguacu

SEQ ID NO: 318930 - RNA, 32 nt, Homo Sapiens
ggaggcuggcccggcuccuucgggcgucgcuu

SEQ ID NO: 318931 - RNA, 32 nt, Homo Sapiens
gcgcgcgcguuuuccuuguuccuggucaacaa

SEQ ID NO: 318932 - RNA, 32 nt, Homo Sapiens
gguacguuuaggaugcccacagaaugaauuuu

SEQ ID NO: 318933 - RNA, 32 nt, Homo Sapiens
ucggcuccgccccggcgcucucccagggcccc

SEQ ID NO: 318934 - RNA, 32 nt, Homo Sapiens
uaaaaaauacauuuagcacaugugcuaugaaa

SEQ ID NO: 318935 - RNA, 32 nt, Homo Sapiens
cagagcgagaccaugucucaaaaaauaaaaau

SEQ ID NO: 318936 - RNA, 32 nt, Homo Sapiens
aaaauggagaaagacaguguggcugccaccug

SEQ ID NO: 318937 - RNA, 32 nt, Homo Sapiens
ucugacauuuaaaaauaauuucuauucaaaau

SEQ ID NO: 318938 - RNA, 32 nt, Homo Sapiens
gauggcaggucugucggcaguuccucagucug

SEQ ID NO: 318939 - RNA, 32 nt, Homo Sapiens
cucccuuugcugcugaugggcaucauuguuua

SEQ ID NO: 318940 - RNA, 32 nt, Homo Sapiens
cuauuguuuugaucuucuuguuuucugacuug

SEQ ID NO: 318941 - RNA, 32 nt, Homo Sapiens
gaauguguaaaaacuaaugaaugcuuuaauuu

SEQ ID NO: 318942 - RNA, 32 nt, Homo Sapiens
cuuccuugcauucuucuaccuuuaaauagcaa

SEQ ID NO: 318943 - RNA, 32 nt, Homo Sapiens
ugaguuuuguguaauuuucaugugucaugaaa

SEQ ID NO: 318944 - RNA, 32 nt, Homo Sapiens
uagcagcuccuccuccucccucccaaggcccc

SEQ ID NO: 318945 - RNA, 32 nt, Homo Sapiens
aaguaaaauuguauuuuguccuucugaugcua

SEQ ID NO: 318946 - RNA, 32 nt, Homo Sapiens
cgaccucggcccggcccugcacuggccgcccg

SEQ ID NO: 318947 - RNA, 32 nt, Homo Sapiens
ugcuugaaacccagggcccuagcuguacaggc

SEQ ID NO: 318948 - RNA, 32 nt, Homo Sapiens
aauuccuaaucuguucauguccugcugaagga

SEQ ID NO: 318949 - RNA, 32 nt, Homo Sapiens
cagaucuuacggagccucccagagcacaacua

SEQ ID NO: 318950 - RNA, 32 nt, Homo Sapiens
acuauuuuauaugcauauauuaaaagaaaagc

SEQ ID NO: 318951 - RNA, 32 nt, Homo Sapiens
uuccaguguucaguaaauagcagcuaugugug

SEQ ID NO: 318952 - RNA, 32 nt, Homo Sapiens
accgcgggcuuggccagcggcgcgcgcucggc

SEQ ID NO: 318953 - RNA, 32 nt, Homo Sapiens
ugcgcgcacggcaagaagugucugggcuggga

SEQ ID NO: 318954 - RNA, 32 nt, Homo Sapiens
uuuaacaaacuaaggcagaaauacuaaaaaua

SEQ ID NO: 318955 - RNA, 32 nt, Homo Sapiens
gggugcuagacaagaaggaagcagguaaaggg

SEQ ID NO: 318956 - RNA, 32 nt, Homo Sapiens
uugugguaacaaggcauucuauuucuucaaaa

SEQ ID NO: 318957 - RNA, 32 nt, Homo Sapiens
uuuucuaccaacucuccagagcgugaguauag

SEQ ID NO: 318958 - RNA, 32 nt, Homo Sapiens
cuguuugacaccucuuuuuucguuuguuuguu

SEQ ID NO: 318959 - RNA, 32 nt, Homo Sapiens
gcugacgguuuaguccucuccucucucugggc

SEQ ID NO: 318960 - RNA, 32 nt, Homo Sapiens
augcuaaggcucagcaaagugacccuaaauga

SEQ ID NO: 318961 - RNA, 32 nt, Homo Sapiens
gguuggcuuugaugaacccucaugcugcaccu

SEQ ID NO: 318962 - RNA, 32 nt, Homo Sapiens
ucuuccaccacuacgagcugccugccauccug

SEQ ID NO: 318963 - RNA, 32 nt, Homo Sapiens
guagacugaugaugauauccauuuuguagacu

SEQ ID NO: 318964 - RNA, 32 nt, Homo Sapiens
gauaauauauuuuuuucuuucaauuuucuuaa

SEQ ID NO: 318965 - RNA, 31 nt, Homo Sapiens
uugucaaaacgaaaagggggauauguaggga

SEQ ID NO: 318966 - RNA, 32 nt, Homo Sapiens
guagguggaguuaguauauagguccaagcuuu

SEQ ID NO: 318967 - RNA, 32 nt, Homo Sapiens
cacagaggaaagggggaugcggcaccagcaga

SEQ ID NO: 318968 - RNA, 32 nt, Homo Sapiens
uauguuaaugaaagaaauuggccuguauuuuu

SEQ ID NO: 318969 - RNA, 32 nt, Homo Sapiens
uggcugcugcuuuggcugccaccacccccggg

SEQ ID NO: 318970 - RNA, 32 nt, Homo Sapiens
uggcuggacugccugcugcugcccaacuggcu

SEQ ID NO: 318971 - RNA, 32 nt, Homo Sapiens
ggaccagguuggccaaauaccauccacaguga

SEQ ID NO: 318972 - RNA, 32 nt, Homo Sapiens
cacgggaggcucccuggcaggguguggggcag

SEQ ID NO: 318973 - RNA, 32 nt, Homo Sapiens
aguauucaaguuauuuuuguauaauacuguuc

SEQ ID NO: 318974 - RNA, 32 nt, Homo Sapiens
cccugcucugggcacugggaaugcugggaaau

SEQ ID NO: 318975 - RNA, 32 nt, Homo Sapiens
ccccagcgauguuuucuuguuguacaagaacc

SEQ ID NO: 318976 - RNA, 32 nt, Homo Sapiens
aacaucauuauguggcacaugauuauaacaaa

SEQ ID NO: 318977 - RNA, 32 nt, Homo Sapiens
uauaaagaacagaaauugauuuuccacaguuc

SEQ ID NO: 318978 - RNA, 32 nt, Homo Sapiens
auuauacuuuaaguuuuaggguaaaugugcac

SEQ ID NO: 318979 - RNA, 32 nt, Homo Sapiens
caccagaugacuuuuacccagacccagugggc

SEQ ID NO: 318980 - RNA, 32 nt, Homo Sapiens
aauucacuggauaugaaaauaguuaaucauga

SEQ ID NO: 318981 - RNA, 32 nt, Homo Sapiens
ccgggaccgggcgggugcucggaguuucgggg

SEQ ID NO: 318982 - RNA, 32 nt, Homo Sapiens
guaaaacagggccacauagaugcugauggagc

SEQ ID NO: 318983 - RNA, 32 nt, Homo Sapiens
uggcagggacggguggagaggcgcagggaccc

SEQ ID NO: 318984 - RNA, 32 nt, Homo Sapiens
gugaacugaugaaaauuacaaaauguggaguu

SEQ ID NO: 318985 - RNA, 32 nt, Homo Sapiens
uugagcagaaaagagcacugagagcacuuggg

SEQ ID NO: 318986 - RNA, 32 nt, Homo Sapiens
acuaccaugcccagcuuucucaccccaggcuc

SEQ ID NO: 318987 - RNA, 32 nt, Homo Sapiens
ucugaggaaauugugucaguaguuuuauuuug

SEQ ID NO: 318988 - RNA, 32 nt, Homo Sapiens
gagacaaugcccuccauggcccaguuuccagg

SEQ ID NO: 318989 - RNA, 32 nt, Homo Sapiens
cggcuguguaguaaaucuccccggcccagcug

SEQ ID NO: 318990 - RNA, 32 nt, Homo Sapiens
aguuacugauauaaguuuuauauuuugugauu

SEQ ID NO: 318991 - RNA, 32 nt, Homo Sapiens
cccucgguggcuuuuccgacgggcgagccccg

SEQ ID NO: 318992 - RNA, 32 nt, Homo Sapiens
cagugcugucaucccuucuccuccccucuccc

SEQ ID NO: 318993 - RNA, 32 nt, Homo Sapiens
guggcccuuggaagcaggccgcagaguagaca

SEQ ID NO: 318994 - RNA, 32 nt, Homo Sapiens
gagcgggagcuggagcggggcccuccggggua

SEQ ID NO: 318995 - RNA, 32 nt, Homo Sapiens
agcccucuggggaugagcaaggccuuccagga

SEQ ID NO: 318996 - RNA, 32 nt, Homo Sapiens
gcaaguuagcuaaaccaaaccaacuccucugc

SEQ ID NO: 318997 - RNA, 32 nt, Homo Sapiens
ucaguugggcccccaucccuccccuugccaca

SEQ ID NO: 318998 - RNA, 32 nt, Homo Sapiens
acaggugaccccgguggacacacgcguuccca

SEQ ID NO: 318999 - RNA, 32 nt, Homo Sapiens
gaacagaucucccuuucccccucccccaucuc

SEQ ID NO: 319000 - RNA, 32 nt, Homo Sapiens
gacugaagccugaggccaucuguccgugcgcc

SEQ ID NO: 319001 - RNA, 32 nt, Homo Sapiens
gccucauaagaguuuugaggguccugguugcc

SEQ ID NO: 319002 - RNA, 32 nt, Homo Sapiens
gugagugcagcaugccaucggccuacacccag

SEQ ID NO: 319003 - RNA, 32 nt, Homo Sapiens
cggggccaagggugucccacauucccaacacc

SEQ ID NO: 319004 - RNA, 32 nt, Homo Sapiens
gacucaaaaucucaguugucuuugacaguuuu

SEQ ID NO: 319005 - RNA, 30 nt, Homo Sapiens
ggcugguccagcggcggcggaggcuggcgc

SEQ ID NO: 319006 - RNA, 32 nt, Homo Sapiens
aauaguuacuauuguuguugagguguuacuaa

SEQ ID NO: 319007 - RNA, 32 nt, Homo Sapiens
gagggggagggagaggccggacacaagcucaa

SEQ ID NO: 319008 - RNA, 32 nt, Homo Sapiens
cggagcccaggccgugccgcgcggcgccauga

SEQ ID NO: 319009 - RNA, 32 nt, Homo Sapiens
agguaggcgggagcuucccugcgugggccuca

SEQ ID NO: 319010 - RNA, 32 nt, Homo Sapiens
auaguauauuccaaaauauuuaugaaguagca

SEQ ID NO: 319011 - RNA, 32 nt, Homo Sapiens
cagaaaagaauaauuacaauauuuucaaaaug

SEQ ID NO: 319012 - RNA, 32 nt, Homo Sapiens
uagaggccuuggugggggccgggcaggccacc

SEQ ID NO: 319013 - RNA, 32 nt, Homo Sapiens
auguucggcccggcgcggugccucaugccugu

SEQ ID NO: 319014 - RNA, 32 nt, Homo Sapiens
uacagucccacccacaaugcaugagagugccu

SEQ ID NO: 319015 - RNA, 32 nt, Homo Sapiens
guacauggacauuuuuguaacucagcucauau

SEQ ID NO: 319016 - RNA, 32 nt, Homo Sapiens
agucuuuggcgugcucagacuccagcgcuccg

SEQ ID NO: 319017 - RNA, 32 nt, Homo Sapiens
aaauguacuggauuuuuuaaggugguaccaaa

SEQ ID NO: 319018 - RNA, 32 nt, Homo Sapiens
agaugacuaacuaaaaucauuuuuacagcaaa

SEQ ID NO: 319019 - RNA, 32 nt, Homo Sapiens
ucaauuuauuaagauuacguauugguccuuua

SEQ ID NO: 319020 - RNA, 32 nt, Homo Sapiens
uuugagucucuuaauagccauguaucauaauu

SEQ ID NO: 319021 - RNA, 32 nt, Homo Sapiens
ugucagcacaaaggaggcuuuuucugugcuuu

SEQ ID NO: 319022 - RNA, 32 nt, Homo Sapiens
ggggggauuucggcggcggaaacauggcgguc

SEQ ID NO: 319023 - RNA, 32 nt, Homo Sapiens
uaaacacuaguaauuaaaaugugccuuuugaa

SEQ ID NO: 319024 - RNA, 32 nt, Homo Sapiens
agagaaacccgcgcucuccggggugagaaggg

SEQ ID NO: 319025 - RNA, 32 nt, Homo Sapiens
uuaucuguaaaaaugguugucuuaacuucuua

SEQ ID NO: 319026 - RNA, 32 nt, Homo Sapiens
agagcgaagucuggccuuggguccuggggaaa

SEQ ID NO: 319027 - RNA, 32 nt, Homo Sapiens
gcacuuuggccauuguuuggucauugacagcc

SEQ ID NO: 319028 - RNA, 32 nt, Homo Sapiens
ggguucucagcauucuuagaauccaaauuaca

SEQ ID NO: 319029 - RNA, 32 nt, Homo Sapiens
agccggcggccgcgggagcugacccugcgggg

SEQ ID NO: 319030 - RNA, 32 nt, Homo Sapiens
ucuguuuucuucacuucccuuugcaucugaga

SEQ ID NO: 319031 - RNA, 32 nt, Homo Sapiens
accacuggaaguauuuucaggacguagaccug

SEQ ID NO: 319032 - RNA, 31 nt, Homo Sapiens
gacugagcgggcccuccaguguuguccaagg

SEQ ID NO: 319033 - RNA, 32 nt, Homo Sapiens
auucacccacccacccacccagagccgggacg

SEQ ID NO: 319034 - RNA, 32 nt, Homo Sapiens
cucaccucuacccaaacccuagguucccgguc

SEQ ID NO: 319035 - RNA, 32 nt, Homo Sapiens
cagucagaaaaaauaaacuagauguuuguguc

SEQ ID NO: 319036 - RNA, 32 nt, Homo Sapiens
gcuugcauuucccucccuguuucaguaaaaga

SEQ ID NO: 319037 - RNA, 32 nt, Homo Sapiens
gcaguuaguuuaucuuguaguauucaucuuug

SEQ ID NO: 319038 - RNA, 32 nt, Homo Sapiens
ccuuacccgagggggcggcaaccgggggcccc

SEQ ID NO: 319039 - RNA, 32 nt, Homo Sapiens
cuacuuuaacugugcucucaggugguuugcgc

SEQ ID NO: 319040 - RNA, 32 nt, Homo Sapiens
gagucuggggauuggaacagggaucuuagguc

SEQ ID NO: 319041 - RNA, 32 nt, Homo Sapiens
augaccucuuugauuugugcuguguacacaag

SEQ ID NO: 319042 - RNA, 32 nt, Homo Sapiens
aacuacugcccccaguguuuuccccacugguu

SEQ ID NO: 319043 - RNA, 32 nt, Homo Sapiens
caguuuuccuuccccacuccaagcccugucca

SEQ ID NO: 319044 - RNA, 32 nt, Homo Sapiens
aaccugagagggguguccccuugccccauccu

SEQ ID NO: 319045 - RNA, 32 nt, Homo Sapiens
ucuccaaaugauuguuuuagacuagccaaaaa

SEQ ID NO: 319046 - RNA, 32 nt, Homo Sapiens
ucccuccacccccacaccccagccgugucccu

SEQ ID NO: 319047 - RNA, 32 nt, Homo Sapiens
uaaaauaguuuaauguuuuauagucucauagu

SEQ ID NO: 319048 - RNA, 32 nt, Homo Sapiens
cgcgcgcacacacaccccgccgagguacccaa

SEQ ID NO: 319049 - RNA, 32 nt, Homo Sapiens
acuucuacagcuugaugccuccugcuuuuaua

SEQ ID NO: 319050 - RNA, 32 nt, Homo Sapiens
agaacauaacucauuauguuucagauaaggua

SEQ ID NO: 319051 - RNA, 29 nt, Homo Sapiens
uugcaugguggcccugucucaucuuggcu

SEQ ID NO: 319052 - RNA, 32 nt, Homo Sapiens
ccuccugcgucuggauuuuauucaucauauau

SEQ ID NO: 319053 - RNA, 32 nt, Homo Sapiens
gcacuuccggugucuguugccaggcgcgggcc

SEQ ID NO: 319054 - RNA, 32 nt, Homo Sapiens
uguggguagagcuuucaugcaucucuaguaau

SEQ ID NO: 319055 - RNA, 32 nt, Homo Sapiens
caaagauacgauuugaugaugacacuggcaca

SEQ ID NO: 319056 - RNA, 32 nt, Homo Sapiens
gaaacaaagaugccuccccagcccugauauuc

SEQ ID NO: 319057 - RNA, 32 nt, Homo Sapiens
uucuuaugaacaaaacaaaacaacaacaaaaa

SEQ ID NO: 319058 - RNA, 32 nt, Homo Sapiens
ccccccaacucccuggauuuuccuccucucuc

SEQ ID NO: 319059 - RNA, 32 nt, Homo Sapiens
gcgagacggagccagaauaagggaugcggacg

SEQ ID NO: 319060 - RNA, 32 nt, Homo Sapiens
uacagacgaaaauaauuuaauaaaauaggaua

SEQ ID NO: 319061 - RNA, 32 nt, Homo Sapiens
gcugcuauccccggcucggcccgggcagccgc

SEQ ID NO: 319062 - RNA, 32 nt, Homo Sapiens
ccccagcgccugguccggggcccggcacacag

SEQ ID NO: 319063 - RNA, 32 nt, Homo Sapiens
uuuaggaagaucugagcauuucuuucauuguu

SEQ ID NO: 319064 - RNA, 32 nt, Homo Sapiens
cguguuugcgcggccucagugcccucccuggu

SEQ ID NO: 319065 - RNA, 32 nt, Homo Sapiens
gacuacaaguuauaauguguguuaccuacacu

SEQ ID NO: 319066 - RNA, 32 nt, Homo Sapiens
gacccacagagugcucaggaugaugcuauugc

SEQ ID NO: 319067 - RNA, 32 nt, Homo Sapiens
gucccugucccgggccgcggcgcggucgucuu

SEQ ID NO: 319068 - RNA, 32 nt, Homo Sapiens
gucacagaguaauggcauuaauccccauaaua

SEQ ID NO: 319069 - RNA, 32 nt, Homo Sapiens
uggguacaucaccagcauaucuccagugccug

SEQ ID NO: 319070 - RNA, 32 nt, Homo Sapiens
aaagugagggauuuuuggccucguuucuccug

SEQ ID NO: 319071 - RNA, 32 nt, Homo Sapiens
ggucgggccggccuuccccagcccucuggggc

SEQ ID NO: 319072 - RNA, 32 nt, Homo Sapiens
gccacuugccaucaggcugucccuuuaggagu

SEQ ID NO: 319073 - RNA, 32 nt, Homo Sapiens
aggaccccaguccuuccacgcccuagaccaag

SEQ ID NO: 319074 - RNA, 32 nt, Homo Sapiens
cuucucugccuggccuguuuggacuuuggggc

SEQ ID NO: 319075 - RNA, 32 nt, Homo Sapiens
gaucagauagauguggauuaucaguauaaacu

SEQ ID NO: 319076 - RNA, 28 nt, Homo Sapiens
ugcggcuggcggccgagccgugugucuc

SEQ ID NO: 319077 - RNA, 32 nt, Homo Sapiens
aagaaaaaacgcaaaaagagaacacauguaga

SEQ ID NO: 319078 - RNA, 32 nt, Homo Sapiens
cgucuaugcgaagcugcuucaccgauauagac

SEQ ID NO: 319079 - RNA, 32 nt, Homo Sapiens
ucauuaccaaggaaacugccaaggccaggugc

SEQ ID NO: 319080 - RNA, 32 nt, Homo Sapiens
cuguccaggaagcagccuaaccagagagaggg

SEQ ID NO: 319081 - RNA, 32 nt, Homo Sapiens
uuugguggauguccugauuggcugggagauug

SEQ ID NO: 319082 - RNA, 32 nt, Homo Sapiens
cuugccuuuccacaagaucugucuccagccug

SEQ ID NO: 319083 - RNA, 32 nt, Homo Sapiens
ugcugcucagggcucgcccccggcgugggcug

SEQ ID NO: 319084 - RNA, 32 nt, Homo Sapiens
guaauugguuugaagaagucuugaauagcucu

SEQ ID NO: 319085 - RNA, 32 nt, Homo Sapiens
cuggcaaucccauguggacuucugguagaaug

SEQ ID NO: 319086 - RNA, 32 nt, Homo Sapiens
gcccgccagccacgcgugucagcccuccaguu

SEQ ID NO: 319087 - RNA, 32 nt, Homo Sapiens
uucacguuauuuaaauuagguggaaaaaucua

SEQ ID NO: 319088 - RNA, 32 nt, Homo Sapiens
cagcucugagcgugggggcauaggcaggaccc

SEQ ID NO: 319089 - RNA, 32 nt, Homo Sapiens
gugggcuuugggcugcagagccgccuggcauu

SEQ ID NO: 319090 - RNA, 32 nt, Homo Sapiens
cucagaaugcccugcacacaguagguuuccaa

SEQ ID NO: 319091 - RNA, 32 nt, Homo Sapiens
aggugagcgcagcggcaguucugccucggagc

SEQ ID NO: 319092 - RNA, 31 nt, Homo Sapiens
gggcccauggcgguggcugugcccccggguc

SEQ ID NO: 319093 - RNA, 32 nt, Homo Sapiens
agugugcaauagaguccauuauagaaauuaac

SEQ ID NO: 319094 - RNA, 32 nt, Homo Sapiens
ccuccucuccgcccgcuggccgggccaacucc

SEQ ID NO: 319095 - RNA, 32 nt, Homo Sapiens
guuuaaguuguccuuuuguuuguuucuauuuu

SEQ ID NO: 319096 - RNA, 32 nt, Homo Sapiens
cgucgcuuggcaacaggacgccgccgaguccc

SEQ ID NO: 319097 - RNA, 32 nt, Homo Sapiens
cgcuggccacacgcccuccgcuggcggcgacu

SEQ ID NO: 319098 - RNA, 32 nt, Homo Sapiens
uucccugagggguaaacaagccaacagaaauu

SEQ ID NO: 319099 - RNA, 32 nt, Homo Sapiens
guauuuucacuauaucccacucuuucuuugca

SEQ ID NO: 319100 - RNA, 32 nt, Homo Sapiens
ugccguuaccgccgcugcugccgccgcuugcg

SEQ ID NO: 319101 - RNA, 30 nt, Homo Sapiens
gaggagaucuucgugcuuggcagaguuuuc

SEQ ID NO: 319102 - RNA, 32 nt, Homo Sapiens
cagauacugucaacuuacaauaucuauauaga

SEQ ID NO: 319103 - RNA, 32 nt, Homo Sapiens
cucggguccagggaguggagggggcugccccu

SEQ ID NO: 319104 - RNA, 32 nt, Homo Sapiens
uaaagauuauuguuaaaaaauucagaagaaaa

SEQ ID NO: 319105 - RNA, 32 nt, Homo Sapiens
ggggaaaacacccgcccacgcgugccuucgcc

SEQ ID NO: 319106 - RNA, 32 nt, Homo Sapiens
ugagggcccuccccuccccucugccuguccgg

SEQ ID NO: 319107 - RNA, 32 nt, Homo Sapiens
uugagggguuuggccugggcaguggagcuugu

SEQ ID NO: 319108 - RNA, 32 nt, Homo Sapiens
uaaggaaaaugaaaagccacaaaugcaagacu

SEQ ID NO: 319109 - RNA, 28 nt, Homo Sapiens
uagggagggcaucuccugcuccccucaa

SEQ ID NO: 319110 - RNA, 32 nt, Homo Sapiens
cucuguuaauccuugaugcuguguguaucugu

SEQ ID NO: 319111 - RNA, 32 nt, Homo Sapiens
aguguugaaacaccaaauagauaucauguuau

SEQ ID NO: 319112 - RNA, 32 nt, Homo Sapiens
ggggcugucuaucccggcugaggacccgcggc

SEQ ID NO: 319113 - RNA, 32 nt, Homo Sapiens
acucuccuugaguguaugaguagccaggguaa

SEQ ID NO: 319114 - RNA, 32 nt, Homo Sapiens
ggauauauauuccagcagcaugaguauuuuag

SEQ ID NO: 319115 - RNA, 32 nt, Homo Sapiens
ucugcccaccucagccucccaaaguguugaga

SEQ ID NO: 319116 - RNA, 32 nt, Homo Sapiens
caaaaguggccuugcgccuccagcaaccccuc

SEQ ID NO: 319117 - RNA, 32 nt, Homo Sapiens
ugcaaaguugggaacgcggagccccggacccg

SEQ ID NO: 319118 - RNA, 32 nt, Homo Sapiens
ucuacccucacugccucccagucaggagagug

SEQ ID NO: 319119 - RNA, 32 nt, Homo Sapiens
guuauuugugagaauaaaugagcuaugugagu

SEQ ID NO: 319120 - RNA, 32 nt, Homo Sapiens
guaaggucacauuuaguaaaugcugaaauaaa

SEQ ID NO: 319121 - RNA, 32 nt, Homo Sapiens
caaaguucauugaugucgaaggauauauacag

SEQ ID NO: 319122 - RNA, 32 nt, Homo Sapiens
aaaacuaagacucaaaaccaaaaguugugauu

SEQ ID NO: 319123 - RNA, 32 nt, Homo Sapiens
gaggguggauggcucuguggacuucuaccggg

SEQ ID NO: 319124 - RNA, 32 nt, Homo Sapiens
cucagaggaaguggucugugucugcaugaacu

SEQ ID NO: 319125 - RNA, 32 nt, Homo Sapiens
agaaaacuuaggaaguugaaguuuggcauuaa

SEQ ID NO: 319126 - RNA, 32 nt, Homo Sapiens
auaauguuuguagaucagaaaagggagaucug

SEQ ID NO: 319127 - RNA, 32 nt, Homo Sapiens
agaagcugaaguuaaaguuguggaagagagug

SEQ ID NO: 319128 - RNA, 32 nt, Homo Sapiens
uugucacauacauuuuacaguuuggacuuuua

SEQ ID NO: 319129 - RNA, 32 nt, Homo Sapiens
cucggaggacgaaggcaccaucagaaggucga

SEQ ID NO: 319130 - RNA, 32 nt, Homo Sapiens
ugucacuugugauuugcccucuuauguauuuu

SEQ ID NO: 319131 - RNA, 32 nt, Homo Sapiens
cuaacccugcucaucaccacuccucgcuaaaa

SEQ ID NO: 319132 - RNA, 32 nt, Homo Sapiens
acggugcuguuggaccccggcgccgucuccgc

SEQ ID NO: 319133 - RNA, 32 nt, Homo Sapiens
gggguugauggggaccacgcggugccugcagg

SEQ ID NO: 319134 - RNA, 32 nt, Homo Sapiens
auaggaaucuccaaucaguuguuuuucucuuc

SEQ ID NO: 319135 - RNA, 32 nt, Homo Sapiens
augagguagaauaaaaaagaauacuuuguaau

SEQ ID NO: 319136 - RNA, 32 nt, Homo Sapiens
cagcuguggugugugauggacauggaagcagu

SEQ ID NO: 319137 - RNA, 32 nt, Homo Sapiens
cuccaggaccagcacucuucucccagcccuua

SEQ ID NO: 319138 - RNA, 32 nt, Homo Sapiens
caucuuuggaaaaaccaacaaacaauaguucu

SEQ ID NO: 319139 - RNA, 32 nt, Homo Sapiens
aagcaauaucuagcagcguuaguuccauauag

SEQ ID NO: 319140 - RNA, 32 nt, Homo Sapiens
cucugcugccagcucucccagccccucagcuu

SEQ ID NO: 319141 - RNA, 32 nt, Homo Sapiens
ccagcaacuucccggcauccgcgcucuagccu

SEQ ID NO: 319142 - RNA, 32 nt, Homo Sapiens
ugauccauuaucuauuuaaauauuuuuaaaau

SEQ ID NO: 319143 - RNA, 32 nt, Homo Sapiens
gggggaaagggagauuuaaagcuugggaagga

SEQ ID NO: 319144 - RNA, 32 nt, Homo Sapiens
aagauacaaaaaugaauggcuaugcauaauaa

SEQ ID NO: 319145 - RNA, 32 nt, Homo Sapiens
cccuccccacuuuccugguuguuucuccuacc

SEQ ID NO: 319146 - RNA, 32 nt, Homo Sapiens
ccagggagggcaggaggcucuugaccccaaac

SEQ ID NO: 319147 - RNA, 32 nt, Homo Sapiens
auucauggauggcucaagucugcacagagcaa

SEQ ID NO: 319148 - RNA, 32 nt, Homo Sapiens
ccauaacugaauuauuuuaucucuuauguuaa

SEQ ID NO: 319149 - RNA, 32 nt, Homo Sapiens
gcggugcuagucgguagcagcggccgccgcag

SEQ ID NO: 319150 - RNA, 32 nt, Homo Sapiens
augggacugagccuggcccauagaaacaugac

SEQ ID NO: 319151 - RNA, 32 nt, Homo Sapiens
cuuggacccacuuuuguuaacucuuaaacuuu

SEQ ID NO: 319152 - RNA, 32 nt, Homo Sapiens
uggggggcggcaguggcuccgcgcacucaccc

SEQ ID NO: 319153 - RNA, 32 nt, Homo Sapiens
acaaaaauaaauuuauaugaaaaccugaaaaa

SEQ ID NO: 319154 - RNA, 32 nt, Homo Sapiens
ccaauccgcaucucagcccucucaggagcagu

SEQ ID NO: 319155 - RNA, 32 nt, Homo Sapiens
uuaaccaaaguagaaaaauauaauacacaucc

SEQ ID NO: 319156 - RNA, 32 nt, Homo Sapiens
uugauugcuugcuaguaauuaagggguuugcc

SEQ ID NO: 319157 - RNA, 32 nt, Homo Sapiens
guuucagagaaaguuacguggagcgugggcgu

SEQ ID NO: 319158 - RNA, 32 nt, Homo Sapiens
uagucauccauuaucaacuauaucacauugcc

SEQ ID NO: 319159 - RNA, 32 nt, Homo Sapiens
acacuuauauauaaacacauguaauuuuacua

SEQ ID NO: 319160 - RNA, 32 nt, Homo Sapiens
aguugcauuucccucucgcacauucuacaccc

SEQ ID NO: 319161 - RNA, 32 nt, Homo Sapiens
ucgcuccccagcugcuggcucgcgguucugag

SEQ ID NO: 319162 - RNA, 32 nt, Homo Sapiens
ggaguucgugacaucuccggcgcggagggacu

SEQ ID NO: 319163 - RNA, 30 nt, Homo Sapiens
cugguccagcccgugcuggccggcaaaggu

SEQ ID NO: 319164 - RNA, 32 nt, Homo Sapiens
auuuauuaauacaauuuuuucuuaauuucuua

SEQ ID NO: 319165 - RNA, 32 nt, Homo Sapiens
gcacauugauaaaagcauuguuugugauauuu

SEQ ID NO: 319166 - RNA, 32 nt, Homo Sapiens
aguacuccgcaugcgcuccucuccuaagguac

SEQ ID NO: 319167 - RNA, 32 nt, Homo Sapiens
cagaguggcagccaggcccacaugucucucaa

SEQ ID NO: 319168 - RNA, 32 nt, Homo Sapiens
aaugaggauaucaucuuuucuaaucucuuuuu

SEQ ID NO: 319169 - RNA, 32 nt, Homo Sapiens
cagauguaaaagacaaaauugcacuuuaaugu

SEQ ID NO: 319170 - RNA, 32 nt, Homo Sapiens
ugaaccggaucuuggaagcaaucuaguacaaa

SEQ ID NO: 319171 - RNA, 32 nt, Homo Sapiens
aucugugugauauuagacaaaauauuugcuuc

SEQ ID NO: 319172 - RNA, 30 nt, Homo Sapiens
acagggugcuucggcgggaggugggggaac

SEQ ID NO: 319173 - RNA, 32 nt, Homo Sapiens
aagucccucccgcucccggcucucgccucacu

SEQ ID NO: 319174 - RNA, 32 nt, Homo Sapiens
cuagccuggcaggugacgucaggguccuucac

SEQ ID NO: 319175 - RNA, 32 nt, Homo Sapiens
caggcucugaccagcagccuaugaggggguuu

SEQ ID NO: 319176 - RNA, 32 nt, Homo Sapiens
gcuccugcucugcugggugcugccugugaggc

SEQ ID NO: 319177 - RNA, 32 nt, Homo Sapiens
gagaaccaaaagacaucaagaaaccgauuugc

SEQ ID NO: 319178 - RNA, 32 nt, Homo Sapiens
uaacccguggcaugcccggcccgguuuaccca

SEQ ID NO: 319179 - RNA, 32 nt, Homo Sapiens
cucagaccccuauccacccccaguccccaggg

SEQ ID NO: 319180 - RNA, 32 nt, Homo Sapiens
ggguuaggauuaaagccaaauucuuaggaaua

SEQ ID NO: 319181 - RNA, 32 nt, Homo Sapiens
cagaaaguucccugugucugucuagaacgcau

SEQ ID NO: 319182 - RNA, 32 nt, Homo Sapiens
gagcccuucuacagguuuguuagcgucccucu

SEQ ID NO: 319183 - RNA, 32 nt, Homo Sapiens
aaucccucccccuucgccccagccccccagca

SEQ ID NO: 319184 - RNA, 32 nt, Homo Sapiens
cuucucauauaaauaaacugcacgugaauaau

SEQ ID NO: 319185 - RNA, 32 nt, Homo Sapiens
agggaagcuuugcauguugcucuaagguacau

SEQ ID NO: 319186 - RNA, 32 nt, Homo Sapiens
acugcaucccccacccagcuuguucuggauuu

SEQ ID NO: 319187 - RNA, 32 nt, Homo Sapiens
cucagagacagaggaaggccaaggcgcucaag

SEQ ID NO: 319188 - RNA, 32 nt, Homo Sapiens
gaguccacagugcuugcgccucugccagacaa

SEQ ID NO: 319189 - RNA, 32 nt, Homo Sapiens
ggaagaauugucuugggucacacauaaaauac

SEQ ID NO: 319190 - RNA, 32 nt, Homo Sapiens
agagccuaugguguaucuuaaucgaaacccgu

SEQ ID NO: 319191 - RNA, 32 nt, Homo Sapiens
uguugagcaugagaauguucuagacucagagg

SEQ ID NO: 319192 - RNA, 32 nt, Homo Sapiens
gggucuccagaaggcugcuugcccccagagag

SEQ ID NO: 319193 - RNA, 32 nt, Homo Sapiens
aacagcagcugcugcgggcuuugucuguggaa

SEQ ID NO: 319194 - RNA, 32 nt, Homo Sapiens
agggaaggaagggacacacacacacacacaca

SEQ ID NO: 319195 - RNA, 32 nt, Homo Sapiens
ccuucacaagucugccuaaaguccucaaucag

SEQ ID NO: 319196 - RNA, 32 nt, Homo Sapiens
aauaacugcgccuuugccugaauaccacgucc

SEQ ID NO: 319197 - RNA, 32 nt, Homo Sapiens
gauggcagugcagucaucaucuucaggauguu

SEQ ID NO: 319198 - RNA, 32 nt, Homo Sapiens
aacgcgggggagagaagaggggagaaacucuc

SEQ ID NO: 319199 - RNA, 32 nt, Homo Sapiens
uaucgccuggccgugggugccggagcggccgg

SEQ ID NO: 319200 - RNA, 32 nt, Homo Sapiens
aagaggcucuauggcauuggcccgaggacagc

SEQ ID NO: 319201 - RNA, 32 nt, Homo Sapiens
gcacuuagcgauuucagauucagacauuuaca

SEQ ID NO: 319202 - RNA, 32 nt, Homo Sapiens
ugccucgggcucccaacaugcuggcauuacag

SEQ ID NO: 319203 - RNA, 32 nt, Homo Sapiens
ccaccacuguggggagcagcuacugauaauaa

SEQ ID NO: 319204 - RNA, 32 nt, Homo Sapiens
ccuuucuagccugcccucugcugccagccaau

SEQ ID NO: 319205 - RNA, 32 nt, Homo Sapiens
gcgcuacaaggagaagcagcgggagcuggccc

SEQ ID NO: 319206 - RNA, 32 nt, Homo Sapiens
gcacuacuggaaauguuuccggaaaucacugu

SEQ ID NO: 319207 - RNA, 32 nt, Homo Sapiens
cguagggacaguuuccucaacaacaaaggagg

SEQ ID NO: 319208 - RNA, 32 nt, Homo Sapiens
aguuagaacuagccaaaccaggacccugucca

SEQ ID NO: 319209 - RNA, 32 nt, Homo Sapiens
ggccaggaggaacacgagacugagagaugaau

SEQ ID NO: 319210 - RNA, 32 nt, Homo Sapiens
uggggagcaggccccaggcuggaccugcccug

SEQ ID NO: 319211 - RNA, 32 nt, Homo Sapiens
cuccuggguccucccgccaucuuccuuucuug

SEQ ID NO: 319212 - RNA, 32 nt, Homo Sapiens
uggacgccgcucuuccucuccccacaucuccu

SEQ ID NO: 319213 - RNA, 30 nt, Homo Sapiens
caagaggcuucccuaguuuacaagucagag

SEQ ID NO: 319214 - RNA, 32 nt, Homo Sapiens
ucuuugcaaaagacaugacaaugucaccaucc

SEQ ID NO: 319215 - RNA, 32 nt, Homo Sapiens
uagaaccuguagagcuagaacauggagagcua

SEQ ID NO: 319216 - RNA, 32 nt, Homo Sapiens
cacugcacuccagccugggugacagauccaga

SEQ ID NO: 319217 - RNA, 32 nt, Homo Sapiens
cgggccgcgcgggugucgcgggcccaacccca

SEQ ID NO: 319218 - RNA, 32 nt, Homo Sapiens
agguuccggccgcggccacccuccgccgucca

SEQ ID NO: 319219 - RNA, 32 nt, Homo Sapiens
gacauuucauggcagucuuguuuauuugauuu

SEQ ID NO: 319220 - RNA, 32 nt, Homo Sapiens
ccagguguccccagcccuacgcucugagacag

SEQ ID NO: 319221 - RNA, 32 nt, Homo Sapiens
cugcgggcggagacaccggacaugcuggccga

SEQ ID NO: 319222 - RNA, 32 nt, Homo Sapiens
uagagaaauggcaacccccaggaccaugcacg

SEQ ID NO: 319223 - RNA, 32 nt, Homo Sapiens
ugcuccugccucugccucccagccccucaccc

SEQ ID NO: 319224 - RNA, 32 nt, Homo Sapiens
cuguggccagggugcuggcaugguggcagcug

SEQ ID NO: 319225 - RNA, 32 nt, Homo Sapiens
gcugccaucggcccgcuuugcuucguccuggc

SEQ ID NO: 319226 - RNA, 32 nt, Homo Sapiens
gacuugagacaucagucaaaugcaaugaaaca

SEQ ID NO: 319227 - RNA, 32 nt, Homo Sapiens
cacagauagcuccuuccuccccgccccuuccu

SEQ ID NO: 319228 - RNA, 32 nt, Homo Sapiens
ucauaaaaaguaccuuugcacuuuaaauccua

SEQ ID NO: 319229 - RNA, 32 nt, Homo Sapiens
gcaucucucuuggccuggggaagugggaggga

SEQ ID NO: 319230 - RNA, 32 nt, Homo Sapiens
gcccaaauggcgggaccguccaggggcuccaa

SEQ ID NO: 319231 - RNA, 32 nt, Homo Sapiens
aagagguaccacauuuucaugacagauacauu

SEQ ID NO: 319232 - RNA, 32 nt, Homo Sapiens
gugccugugauuacacaccaccaccuauggag

SEQ ID NO: 319233 - RNA, 32 nt, Homo Sapiens
ccacagcccacacagcccugggacacugcccu

SEQ ID NO: 319234 - RNA, 32 nt, Homo Sapiens
gaucuaguaugaaaauagaugcuagaaaucac

SEQ ID NO: 319235 - RNA, 32 nt, Homo Sapiens
uuuauauggugagggggugcugccugguaaca

SEQ ID NO: 319236 - RNA, 32 nt, Homo Sapiens
gcuucaaaacaauauaaauggauaauaguugu

SEQ ID NO: 319237 - RNA, 32 nt, Homo Sapiens
gaauccaggaguugagucuuugaaagaauuaa

SEQ ID NO: 319238 - RNA, 32 nt, Homo Sapiens
gaaauuguucauuaaaucccauuugagguaua

SEQ ID NO: 319239 - RNA, 32 nt, Homo Sapiens
gcuaaagaugaccuuauuauacaacaaucuga

SEQ ID NO: 319240 - RNA, 32 nt, Homo Sapiens
aguuacucaugugacuauuugaggauuuugaa

SEQ ID NO: 319241 - RNA, 32 nt, Homo Sapiens
acugucgucaggaaacgccugcagguccuugc

SEQ ID NO: 319242 - RNA, 32 nt, Homo Sapiens
guacuaaggaacaacauucccuuugaaaggac

SEQ ID NO: 319243 - RNA, 32 nt, Homo Sapiens
cauuaaaaugucaaguucaagugauaugugcc

SEQ ID NO: 319244 - RNA, 32 nt, Homo Sapiens
acagacauccucuagaugggugugagacccug

SEQ ID NO: 319245 - RNA, 32 nt, Homo Sapiens
uguuccuggugccuucugauggggcuggaaua

SEQ ID NO: 319246 - RNA, 32 nt, Homo Sapiens
ugugcugcugauaaaguguauuagaguaucuc

SEQ ID NO: 319247 - RNA, 32 nt, Homo Sapiens
ccugguggguggcagucggggcugacggcggc

SEQ ID NO: 319248 - RNA, 32 nt, Homo Sapiens
uaucuuuuccuugguucuaaaucuucaguaau

SEQ ID NO: 319249 - RNA, 32 nt, Homo Sapiens
guuuacaagacuaaggcccacuucccugcagg

SEQ ID NO: 319250 - RNA, 32 nt, Homo Sapiens
uuaugcucauuucccagaggagggacuaaaag

SEQ ID NO: 319251 - RNA, 32 nt, Homo Sapiens
agaaucagaaaggaaacuuaugcagaguaaua

SEQ ID NO: 319252 - RNA, 32 nt, Homo Sapiens
gcuggucugauccaugcacaaggcggggcugc

SEQ ID NO: 319253 - RNA, 32 nt, Homo Sapiens
cagacggugcgcgacgcgcgccugcaggacgg

SEQ ID NO: 319254 - RNA, 32 nt, Homo Sapiens
cucucuccuguaaaauuaaaacauauacaugu

SEQ ID NO: 319255 - RNA, 32 nt, Homo Sapiens
gauucccgcucgcgcccucaggucucccuccc

SEQ ID NO: 319256 - RNA, 32 nt, Homo Sapiens
gcgagcugcugcuucacacugacuuacaccgu

SEQ ID NO: 319257 - RNA, 32 nt, Homo Sapiens
gguacggugccaaggccacaccacugagacag

SEQ ID NO: 319258 - RNA, 32 nt, Homo Sapiens
gggcuacagcguggaugaaccuugaggaccuc

SEQ ID NO: 319259 - RNA, 32 nt, Homo Sapiens
cacaacugccagcggaggugaacuugcaccug

SEQ ID NO: 319260 - RNA, 32 nt, Homo Sapiens
agcuucuuuaaucagacuuugugacuuaaaag

SEQ ID NO: 319261 - RNA, 32 nt, Homo Sapiens
auguggguggggggcggggggcagguggcugg

SEQ ID NO: 319262 - RNA, 32 nt, Homo Sapiens
gucagugaaacacuuagagcaguuucuggcac

SEQ ID NO: 319263 - RNA, 32 nt, Homo Sapiens
cccuucacuccagcccgccugccuucagccuu

SEQ ID NO: 319264 - RNA, 32 nt, Homo Sapiens
gaugggcagacacaugcccucucaauuccuga

SEQ ID NO: 319265 - RNA, 32 nt, Homo Sapiens
auaucauauuucugugugugucucucucagcc

SEQ ID NO: 319266 - RNA, 32 nt, Homo Sapiens
acgccugggcuccagcagcaucagcagccccc

SEQ ID NO: 319267 - RNA, 32 nt, Homo Sapiens
aaaauuguaaaaauuguugaguucuguuuaaa

SEQ ID NO: 319268 - RNA, 32 nt, Homo Sapiens
cuucagcccucccugucucccccacuuccugg

SEQ ID NO: 319269 - RNA, 32 nt, Homo Sapiens
gaagagccggcaggaaggggaccagucacagg

SEQ ID NO: 319270 - RNA, 32 nt, Homo Sapiens
guccgcuccccucccaaaccgcagagcggcag

SEQ ID NO: 319271 - RNA, 32 nt, Homo Sapiens
cccacucccauggccccuggaacugguggaaa

SEQ ID NO: 319272 - RNA, 32 nt, Homo Sapiens
uuggguugggucuggucacggcagagcuuuug

SEQ ID NO: 319273 - RNA, 32 nt, Homo Sapiens
uguggaugaacaggccuguucgcccugggguc

SEQ ID NO: 319274 - RNA, 32 nt, Homo Sapiens
uuauuuuucucugaccuuuccauccuugaaaa

SEQ ID NO: 319275 - RNA, 32 nt, Homo Sapiens
gcccgaggcaggaggugaggacuggugguucu

SEQ ID NO: 319276 - RNA, 32 nt, Homo Sapiens
ccagaguggguuccugcuggccagggugcagc

SEQ ID NO: 319277 - RNA, 32 nt, Homo Sapiens
gagcucucaucauggcgcgugcugcugcggca

SEQ ID NO: 319278 - RNA, 32 nt, Homo Sapiens
ccaaagaccugcccaccuccugggcucuccca

SEQ ID NO: 319279 - RNA, 32 nt, Homo Sapiens
cgcgccccaagcugcgcagcucugcaaaaguu

SEQ ID NO: 319280 - RNA, 32 nt, Homo Sapiens
uccugcacacagaaguuaccacaggggucagg

SEQ ID NO: 319281 - RNA, 32 nt, Homo Sapiens
uaccucgucugauguuacuauuagaguaucuc

SEQ ID NO: 319282 - RNA, 32 nt, Homo Sapiens
gaugccuugggguucgugcacaacauagcuuc

SEQ ID NO: 319283 - RNA, 32 nt, Homo Sapiens
uucccuccuaaccccaggaccaggggacccag

SEQ ID NO: 319284 - RNA, 32 nt, Homo Sapiens
augaaaacccgcgcuuuuauuaugggaagcuu

SEQ ID NO: 319285 - RNA, 32 nt, Homo Sapiens
gucucauuauuccuguuuuagcugaagaauug

SEQ ID NO: 319286 - RNA, 31 nt, Homo Sapiens
aucucucaguacacauugccaaauggaguag

SEQ ID NO: 319287 - RNA, 32 nt, Homo Sapiens
aaggaagagaagcuauaugcaaugcaaaauuu

SEQ ID NO: 319288 - RNA, 32 nt, Homo Sapiens
ugaaaggaggaagagugugcugauaaaccuac

SEQ ID NO: 319289 - RNA, 32 nt, Homo Sapiens
cuuuaauaaaaauaaaugacugucaaaaaaaa

SEQ ID NO: 319290 - RNA, 32 nt, Homo Sapiens
uauucugaauguuuuauaaaucuuuaauaauu

SEQ ID NO: 319291 - RNA, 32 nt, Homo Sapiens
cucggcucggcucggcugcgcggccgcugacg

SEQ ID NO: 319292 - RNA, 32 nt, Homo Sapiens
uuucggccgagcugagcuuucgugcacgcaac

SEQ ID NO: 319293 - RNA, 30 nt, Homo Sapiens
cgcucgccugcucgcuuuucgcucggcauu

SEQ ID NO: 319294 - RNA, 32 nt, Homo Sapiens
gggcaggguggagggcaaggcuggggggaggg

SEQ ID NO: 319295 - RNA, 32 nt, Homo Sapiens
ggacaauaaaaauaagacauugaaggaccaau

SEQ ID NO: 319296 - RNA, 32 nt, Homo Sapiens
uccgcaguaguucgggccauggaggcggagcc

SEQ ID NO: 319297 - RNA, 32 nt, Homo Sapiens
ucuacaugucauugugaauaguagguuauaua

SEQ ID NO: 319298 - RNA, 32 nt, Homo Sapiens
ccuucaggaaauggacaggucaguuuguugua

SEQ ID NO: 319299 - RNA, 30 nt, Homo Sapiens
aaauaggauaaaaagaaggucagcaccaug

SEQ ID NO: 319300 - RNA, 32 nt, Homo Sapiens
uguccuccuccacuucccaugccucuauguua

SEQ ID NO: 319301 - RNA, 32 nt, Homo Sapiens
gucugucuguuuuuuauauuggcugucuggau

SEQ ID NO: 319302 - RNA, 32 nt, Homo Sapiens
gcuugacucucauucuucuccuuccugccacc

SEQ ID NO: 319303 - RNA, 32 nt, Homo Sapiens
ggcccgcgcugagacgcgcccggcugcugccg

SEQ ID NO: 319304 - RNA, 32 nt, Homo Sapiens
cuuguggguucucugcugucuugaagccaucc

SEQ ID NO: 319305 - RNA, 29 nt, Homo Sapiens
acccaauauuuaccagaccacaaaacuuu

SEQ ID NO: 319306 - RNA, 32 nt, Homo Sapiens
acaauuuuauaaaaagaaaauuuucagcucug

SEQ ID NO: 319307 - RNA, 32 nt, Homo Sapiens
cuggcacccacccacaaagcaagaccuguauu

SEQ ID NO: 319308 - RNA, 32 nt, Homo Sapiens
uguugcccaggcuggaaugcaguggcgugauc

SEQ ID NO: 319309 - RNA, 32 nt, Homo Sapiens
gggcugucggccagaagcugggcuugggcaca

SEQ ID NO: 319310 - RNA, 32 nt, Homo Sapiens
ccaguagauccucaauaaaggucaugucacuu

SEQ ID NO: 319311 - RNA, 32 nt, Homo Sapiens
acaaauaugaauuuaaauuugugauagcgcuc

SEQ ID NO: 319312 - RNA, 32 nt, Homo Sapiens
ggcacucaauauaaaagugguggagucaaucu

SEQ ID NO: 319313 - RNA, 32 nt, Homo Sapiens
aggugucaagagagggugugggauugggaccc

SEQ ID NO: 319314 - RNA, 32 nt, Homo Sapiens
cgaagagugauaguuacgugcuccugacugau

SEQ ID NO: 319315 - RNA, 32 nt, Homo Sapiens
cugggaagugucuuaauacaugucugucgaga

SEQ ID NO: 319316 - RNA, 32 nt, Homo Sapiens
acgcccggcaggguccugggggcgcaggcaag

SEQ ID NO: 319317 - RNA, 32 nt, Homo Sapiens
cauacuuccuuccccacucccauccuaggaua

SEQ ID NO: 319318 - RNA, 32 nt, Homo Sapiens
gacacaagccagggcugggacaauggcagugc

SEQ ID NO: 319319 - RNA, 32 nt, Homo Sapiens
ugccucccaagacagggucuccagcccaaacu

SEQ ID NO: 319320 - RNA, 32 nt, Homo Sapiens
ugagaccaagaaccaaccaauucgggacacaa

SEQ ID NO: 319321 - RNA, 32 nt, Homo Sapiens
caaguuuagaaaauauauuggccauucagcuc

SEQ ID NO: 319322 - RNA, 32 nt, Homo Sapiens
uauaaaaacucuuaaugauaaaacauuuaaca

SEQ ID NO: 319323 - RNA, 32 nt, Homo Sapiens
aaaggguugcugucccagcaggccagguccag

SEQ ID NO: 319324 - RNA, 32 nt, Homo Sapiens
uguuuggguaguccuaggguaacacccugccc

SEQ ID NO: 319325 - RNA, 32 nt, Homo Sapiens
cacauuggagggcaguccacaauggaaggcuu

SEQ ID NO: 319326 - RNA, 32 nt, Homo Sapiens
gacagagacagagagagacaaugaggcacaga

SEQ ID NO: 319327 - RNA, 32 nt, Homo Sapiens
ggcuaugaggguacaccccuagcugaauguuc

SEQ ID NO: 319328 - RNA, 32 nt, Homo Sapiens
caagcauuuuuccuuugaauuacagauaaucc

SEQ ID NO: 319329 - RNA, 32 nt, Homo Sapiens
cgccucccagccgugcuuccuguuagccugug

SEQ ID NO: 319330 - RNA, 32 nt, Homo Sapiens
caccuccccuccccacagccuuccucacccuu

SEQ ID NO: 319331 - RNA, 32 nt, Homo Sapiens
agcuucauccuggaugugcaucuccuaaauuc

SEQ ID NO: 319332 - RNA, 32 nt, Homo Sapiens
acccaaagaucaugauauuccaaauggauugu

SEQ ID NO: 319333 - RNA, 32 nt, Homo Sapiens
aaguggaucgugcggcagagcaucacaccaug

SEQ ID NO: 319334 - RNA, 32 nt, Homo Sapiens
uagccugagugaccccaaaaagaugacacucu

SEQ ID NO: 319335 - RNA, 32 nt, Homo Sapiens
gggauuggccgacugugagcugcagauaaggc

SEQ ID NO: 319336 - RNA, 32 nt, Homo Sapiens
gcuaauuuuuuuuuuucuuuuuguuuuguuug

SEQ ID NO: 319337 - RNA, 32 nt, Homo Sapiens
uuaccucuaggaagaaaggagguggaagggaa

SEQ ID NO: 319338 - RNA, 32 nt, Homo Sapiens
cuaauuaacaaagaaauuaauuccuaggaaac

SEQ ID NO: 319339 - RNA, 32 nt, Homo Sapiens
auaggauagaaagcagcaaaccugaacuuuag

SEQ ID NO: 319340 - RNA, 27 nt, Homo Sapiens
ugggccuccuucuuccacuucuccaag

SEQ ID NO: 319341 - RNA, 32 nt, Homo Sapiens
aacuaauuuaauuauuugauuguuuuaauccu

SEQ ID NO: 319342 - RNA, 32 nt, Homo Sapiens
gagcaaaagacucaguggaugaacuggugcag

SEQ ID NO: 319343 - RNA, 32 nt, Homo Sapiens
gcauuuugcuaagggaaagaagccagacccaa

SEQ ID NO: 319344 - RNA, 32 nt, Homo Sapiens
ggccuggcgcgguggcucaugccuguaaucau

SEQ ID NO: 319345 - RNA, 32 nt, Homo Sapiens
uuacucggccccucccuccccagcagccccaa

SEQ ID NO: 319346 - RNA, 32 nt, Homo Sapiens
gcaggcggcggcgggcggcauggagagccugc

SEQ ID NO: 319347 - RNA, 32 nt, Homo Sapiens
agggcaaaaauauguuacuuuacgauuuaccu

SEQ ID NO: 319348 - RNA, 32 nt, Homo Sapiens
ucaaaguguacaaauuuauugauguugugaaa

SEQ ID NO: 319349 - RNA, 32 nt, Homo Sapiens
aaaaauggggaaaagaaaaaccacgagagagg

SEQ ID NO: 319350 - RNA, 32 nt, Homo Sapiens
agucaugagccaucgugucuggcccaaucucu

SEQ ID NO: 319351 - RNA, 27 nt, Homo Sapiens
aagcguuccuccuucagccuugacuug

SEQ ID NO: 319352 - RNA, 32 nt, Homo Sapiens
uccccagugggaaguuagggaagcucaggagc

SEQ ID NO: 319353 - RNA, 32 nt, Homo Sapiens
aaugggaaaacaacagaaggaggggaucaaag

SEQ ID NO: 319354 - RNA, 32 nt, Homo Sapiens
gguugauuuauuuuuuuuuuuaauuuauagag

SEQ ID NO: 319355 - RNA, 29 nt, Homo Sapiens
aggacgggacuaaagaggacgccguccuu

SEQ ID NO: 319356 - RNA, 32 nt, Homo Sapiens
gccuggaggaggaggccgcgcuggacgcgccg

SEQ ID NO: 319357 - RNA, 32 nt, Homo Sapiens
gaguguaugaauggaaugaugaucacugugcu

SEQ ID NO: 319358 - RNA, 32 nt, Homo Sapiens
gcacacuggcuccucagcuccagccacccuca

SEQ ID NO: 319359 - RNA, 32 nt, Homo Sapiens
aagcaaaggauacagagguauguucucucuua

SEQ ID NO: 319360 - RNA, 32 nt, Homo Sapiens
aguuugugugcucacaguauauauuauaguaa

SEQ ID NO: 319361 - RNA, 32 nt, Homo Sapiens
cacuccgccugccggcugggaaacuagggcac

SEQ ID NO: 319362 - RNA, 32 nt, Homo Sapiens
uaaagaauaugaucuugcuaaaaaauacauau

SEQ ID NO: 319363 - RNA, 32 nt, Homo Sapiens
agcucuuaaagguggcgugucuggagcugcug

SEQ ID NO: 319364 - RNA, 32 nt, Homo Sapiens
uagaaggaaaauugauagacgucacuaacaua

SEQ ID NO: 319365 - RNA, 32 nt, Homo Sapiens
aggauucaguauccagaguuuauuuuuaaucu

SEQ ID NO: 319366 - RNA, 32 nt, Homo Sapiens
cuuuacaugagauuuguuaacacacauuuucu

SEQ ID NO: 319367 - RNA, 32 nt, Homo Sapiens
ggccuggccucccugcccugauuggggacuca

SEQ ID NO: 319368 - RNA, 32 nt, Homo Sapiens
aggaagaguuguaggaccuuugauugacaacc

SEQ ID NO: 319369 - RNA, 32 nt, Homo Sapiens
auuucugcuugaauguuuguccugcuguguug

SEQ ID NO: 319370 - RNA, 32 nt, Homo Sapiens
guggagcugcggugcccuggccggcgaugggg

SEQ ID NO: 319371 - RNA, 32 nt, Homo Sapiens
cgcuccgguacacacaggaucccugcugggca

SEQ ID NO: 319372 - RNA, 32 nt, Homo Sapiens
aagccuggccuccaagccccagcccuccuucc

SEQ ID NO: 319373 - RNA, 32 nt, Homo Sapiens
gaccuaaggcacguaucuccauucacagggug

SEQ ID NO: 319374 - RNA, 32 nt, Homo Sapiens
aggacgaggaagaggacuuugggggacaggcu

SEQ ID NO: 319375 - RNA, 32 nt, Homo Sapiens
cagaugcuguugaaggggcacaagaaauugga

SEQ ID NO: 319376 - RNA, 32 nt, Homo Sapiens
aucaguugaguaucuacuaugugcuaggcacu

SEQ ID NO: 319377 - RNA, 32 nt, Homo Sapiens
aaaaugccuuucagcaucacuccaguuuuuac

SEQ ID NO: 319378 - RNA, 32 nt, Homo Sapiens
aggacuugcaagcguggacccaggcucggugc

SEQ ID NO: 319379 - RNA, 32 nt, Homo Sapiens
aauaaugccuucucggggguggccacguacac

SEQ ID NO: 319380 - RNA, 31 nt, Homo Sapiens
uuucuguguaacaugauuuguuuaguaauag

SEQ ID NO: 319381 - RNA, 32 nt, Homo Sapiens
acaugaucuucagaaucucuaguuuuuguucu

SEQ ID NO: 319382 - RNA, 32 nt, Homo Sapiens
cggggccaucgucuuuguuuucuuuuuugucu

SEQ ID NO: 319383 - RNA, 32 nt, Homo Sapiens
agacuaagaucuuugaggaaaagaacauuguc

SEQ ID NO: 319384 - RNA, 32 nt, Homo Sapiens
cuucgucuucauggauucccagcccagcugcg

SEQ ID NO: 319385 - RNA, 32 nt, Homo Sapiens
ccacugcagaccagucucggagguguccaccc

SEQ ID NO: 319386 - RNA, 32 nt, Homo Sapiens
ugcccaaggaccaguauuugucacuaccaaac

SEQ ID NO: 319387 - RNA, 32 nt, Homo Sapiens
uccuuuacccacguuggggcuggcauaagcug

SEQ ID NO: 319388 - RNA, 32 nt, Homo Sapiens
ccgugggcagugccacccgcagaugacacgcg

SEQ ID NO: 319389 - RNA, 30 nt, Homo Sapiens
ccaugucuggacucggcuggccguucccuc

SEQ ID NO: 319390 - RNA, 32 nt, Homo Sapiens
cuaaaaggaaaaaaccaaaauauugaugagaa

SEQ ID NO: 319391 - RNA, 32 nt, Homo Sapiens
ggccacggacgcucagcugagccccggucugc

SEQ ID NO: 319392 - RNA, 32 nt, Homo Sapiens
gugauuagcacuaaucucugggauuuuuaagg

SEQ ID NO: 319393 - RNA, 32 nt, Homo Sapiens
ggcgaggacgaagagggaagggguggagaccu

SEQ ID NO: 319394 - RNA, 32 nt, Homo Sapiens
uuuggcugcauaaaugcaugucaccuugagac

SEQ ID NO: 319395 - RNA, 32 nt, Homo Sapiens
aguuauaaaaauaaauuggacauuuaacuuga

SEQ ID NO: 319396 - RNA, 32 nt, Homo Sapiens
caaaaguuccucaggaacaacuuuaagauuua

SEQ ID NO: 319397 - RNA, 32 nt, Homo Sapiens
agccggcagggcggggacuacguggcccugca

SEQ ID NO: 319398 - RNA, 32 nt, Homo Sapiens
ccagcuguucuucucagccugagcccuguccc

SEQ ID NO: 319399 - RNA, 32 nt, Homo Sapiens
auuguuauaugauaguauuucagcuacacaau

SEQ ID NO: 319400 - RNA, 32 nt, Homo Sapiens
ccauaauuucuccuuucacugguguuggacuu

SEQ ID NO: 319401 - RNA, 32 nt, Homo Sapiens
ucuuuguagaaaacuggaaaaauacauauuca

SEQ ID NO: 319402 - RNA, 32 nt, Homo Sapiens
uaggagagggggccuuugggggugacuggguc

SEQ ID NO: 319403 - RNA, 32 nt, Homo Sapiens
ccaagggacucacagcuucuggcagcaagugu

SEQ ID NO: 319404 - RNA, 32 nt, Homo Sapiens
caguuggugucuucauuuuauguauauuuauc

SEQ ID NO: 319405 - RNA, 32 nt, Homo Sapiens
ugugcugagaacagagaggcccugcccucugu

SEQ ID NO: 319406 - RNA, 32 nt, Homo Sapiens
cgcagaccgccccacccuccccggcugggagg

SEQ ID NO: 319407 - RNA, 32 nt, Homo Sapiens
cuggccugcucccugcaguacggaguacgggg

SEQ ID NO: 319408 - RNA, 32 nt, Homo Sapiens
auuccaucagggaggagucagaggaauuugcc

SEQ ID NO: 319409 - RNA, 32 nt, Homo Sapiens
agagaacagaggaugccuguuuuugccccaaa

SEQ ID NO: 319410 - RNA, 32 nt, Homo Sapiens
cuccugaggagaaaguccuugcucuggugacc

SEQ ID NO: 319411 - RNA, 32 nt, Homo Sapiens
augaaacaaaaauggccaguuuuaagauugug

SEQ ID NO: 319412 - RNA, 29 nt, Homo Sapiens
ccucugauguguuucacaagcacguaguu

SEQ ID NO: 319413 - RNA, 32 nt, Homo Sapiens
uugggccuaggauacugccgggccccccaagg

SEQ ID NO: 319414 - RNA, 32 nt, Homo Sapiens
acgaaggauugccaauaaaaaauacuuuccug

SEQ ID NO: 319415 - RNA, 32 nt, Homo Sapiens
gauacuuuaagugaauugccauugauucuacg

SEQ ID NO: 319416 - RNA, 32 nt, Homo Sapiens
uaccucacauuaugaaaacacuauucuugauu

SEQ ID NO: 319417 - RNA, 32 nt, Homo Sapiens
auauuuuuauuuuuaacucuggauuuugaauu

SEQ ID NO: 319418 - RNA, 31 nt, Homo Sapiens
acguggcaggacucaccgccccgcgccgugu

SEQ ID NO: 319419 - RNA, 32 nt, Homo Sapiens
uuuguuucucagcucuguacaaacacaaauac

SEQ ID NO: 319420 - RNA, 32 nt, Homo Sapiens
gcccaccagccccagcacugaccuccaagcca

SEQ ID NO: 319421 - RNA, 32 nt, Homo Sapiens
cuugaaucauuucugaauaaguaaaucuaaau

SEQ ID NO: 319422 - RNA, 32 nt, Homo Sapiens
cgcccgucucgccgcgcacgccucggcgaccc

SEQ ID NO: 319423 - RNA, 32 nt, Homo Sapiens
gaggggcucucuaaucucccagccccgacucu

SEQ ID NO: 319424 - RNA, 32 nt, Homo Sapiens
cagccugguucagugacugagacaaacuggag

SEQ ID NO: 319425 - RNA, 30 nt, Homo Sapiens
agcuagcgcgacccugagccggcgcccgug

SEQ ID NO: 319426 - RNA, 32 nt, Homo Sapiens
uuuuaauuuuuuucuuuuuuuuuucuugcccu

SEQ ID NO: 319427 - RNA, 32 nt, Homo Sapiens
ugugucuauggauuugccuucucuaaacauuu

SEQ ID NO: 319428 - RNA, 32 nt, Homo Sapiens
ugccuagacaacaugagaaaucguggccaggg

SEQ ID NO: 319429 - RNA, 32 nt, Homo Sapiens
gugcagggcccauuuuagagauuaaguuaugu

SEQ ID NO: 319430 - RNA, 32 nt, Homo Sapiens
gcuuuuuaaaauguuuuaauaaaaagcagaau

SEQ ID NO: 319431 - RNA, 32 nt, Homo Sapiens
aaauuuagguaaauaaagcucaaggagguggg

SEQ ID NO: 319432 - RNA, 32 nt, Homo Sapiens
gagggaaaugcuuggaagcucucaagugcgga

SEQ ID NO: 319433 - RNA, 32 nt, Homo Sapiens
aaagggaggaggaggagcuagcagacacaucc

SEQ ID NO: 319434 - RNA, 32 nt, Homo Sapiens
aaaacgugccccaccgcaucccuaccuggaaa

SEQ ID NO: 319435 - RNA, 32 nt, Homo Sapiens
aucacucagagguagggaagggggcggcauua

SEQ ID NO: 319436 - RNA, 32 nt, Homo Sapiens
caaaagagcaauaaaaaguuuucagugaaaug

SEQ ID NO: 319437 - RNA, 32 nt, Homo Sapiens
gcgggcgggucgucguccgaggccagggaggg

SEQ ID NO: 319438 - RNA, 32 nt, Homo Sapiens
aucuggaaauguuuaaaacaauguuuguuagc

SEQ ID NO: 319439 - RNA, 32 nt, Homo Sapiens
cgcggagacuccggcgaacucagacacccaac

SEQ ID NO: 319440 - RNA, 32 nt, Homo Sapiens
agauagaagacacuuuuuucuccaaaaugaug

SEQ ID NO: 319441 - RNA, 32 nt, Homo Sapiens
aagauggccucgcgcugagcggguccccgcag

SEQ ID NO: 319442 - RNA, 32 nt, Homo Sapiens
cccgagcuugccucagggccaagccggcccaa

SEQ ID NO: 319443 - RNA, 32 nt, Homo Sapiens
auauauuguaaaugugucugguauuuacagca

SEQ ID NO: 319444 - RNA, 32 nt, Homo Sapiens
aauggggguuaugggguggggguggggacuca

SEQ ID NO: 319445 - RNA, 30 nt, Homo Sapiens
guuccagccaggcgcgguggcucacgccug

SEQ ID NO: 319446 - RNA, 32 nt, Homo Sapiens
gccaugccgucucugggcaaccaggccccaac

SEQ ID NO: 319447 - RNA, 32 nt, Homo Sapiens
ccuggaaagucccaggugggacucuucugggg

SEQ ID NO: 319448 - RNA, 32 nt, Homo Sapiens
aucccugcuccagcugcccccgggaagccagc

SEQ ID NO: 319449 - RNA, 32 nt, Homo Sapiens
cggcccugccccacccgaacuccugccucacg

SEQ ID NO: 319450 - RNA, 32 nt, Homo Sapiens
guucugcaggggcgugcuggggugguuuggga

SEQ ID NO: 319451 - RNA, 32 nt, Homo Sapiens
ggagaagaucugccuccacggagccgcugucc

SEQ ID NO: 319452 - RNA, 32 nt, Homo Sapiens
cagcuuuauacuuuuuacuuucaauugccuag

SEQ ID NO: 319453 - RNA, 32 nt, Homo Sapiens
ucuucacagaguaccagggucuguagagaugc

SEQ ID NO: 319454 - RNA, 32 nt, Homo Sapiens
aaaguuuccuuccuuucuucucuuucuucauu

SEQ ID NO: 319455 - RNA, 32 nt, Homo Sapiens
ggauucuaaagguguugucacuguauaaaaca

SEQ ID NO: 319456 - RNA, 32 nt, Homo Sapiens
cacagaacaaugaguaaagaugcugaauguga

SEQ ID NO: 319457 - RNA, 32 nt, Homo Sapiens
auucccucauugacagccucaccuggucaccu

SEQ ID NO: 319458 - RNA, 32 nt, Homo Sapiens
uagaaaggguaauauuuugaaauacuacaagg

SEQ ID NO: 319459 - RNA, 32 nt, Homo Sapiens
cugcccgucucggccucccaauguguugggau

SEQ ID NO: 319460 - RNA, 32 nt, Homo Sapiens
gcauggaugugcgggagcucuucugcuaggca

SEQ ID NO: 319461 - RNA, 32 nt, Homo Sapiens
aguuucgccauggcccggggccccaagaagca

SEQ ID NO: 319462 - RNA, 32 nt, Homo Sapiens
cacuuuuuaaagggugcauugauaaaaucuga

SEQ ID NO: 319463 - RNA, 32 nt, Homo Sapiens
cuguacacauaaaaaauacgguaaggauacuu

SEQ ID NO: 319464 - RNA, 31 nt, Homo Sapiens
auauuuucaaaauaaaauuccauuaagcucu

SEQ ID NO: 319465 - RNA, 32 nt, Homo Sapiens
ccgaccccgcggccuacgcgcagcugguguuc

SEQ ID NO: 319466 - RNA, 32 nt, Homo Sapiens
ugggagugauuugguucuuugcccuaauguuu

SEQ ID NO: 319467 - RNA, 32 nt, Homo Sapiens
uguucaaaugagaaacaaaacugugaagagaa

SEQ ID NO: 319468 - RNA, 32 nt, Homo Sapiens
cugggccccaaacaacccuggaauauuacaga

SEQ ID NO: 319469 - RNA, 32 nt, Homo Sapiens
cucagaaaaauaacuguaaaucuuucuggaca

SEQ ID NO: 319470 - RNA, 32 nt, Homo Sapiens
ggcuuauaagguggccuuaaaaccccauuuuc

SEQ ID NO: 319471 - RNA, 32 nt, Homo Sapiens
ugcauauguauaguucauuuuuccugugaaau

SEQ ID NO: 319472 - RNA, 32 nt, Homo Sapiens
acaugguagauggggcugucuuugaagaugaa

SEQ ID NO: 319473 - RNA, 32 nt, Homo Sapiens
acaaagcaaccucaaagggaaaaaucccauac

SEQ ID NO: 319474 - RNA, 32 nt, Homo Sapiens
uuuaaaagaggguggggguggggggugauugc

SEQ ID NO: 319475 - RNA, 32 nt, Homo Sapiens
gcucucuagccucuccuggccucaguauccuu

SEQ ID NO: 319476 - RNA, 32 nt, Homo Sapiens
cauccagaugaaauccacugacauacuguaua

SEQ ID NO: 319477 - RNA, 32 nt, Homo Sapiens
aauuagccgggcgugguggugggcgccuguaa

SEQ ID NO: 319478 - RNA, 32 nt, Homo Sapiens
acuaaggaauacaggguugaaaaaauauuaau

SEQ ID NO: 319479 - RNA, 32 nt, Homo Sapiens
gauuacucaauccuuggggcuguccaugucau

SEQ ID NO: 319480 - RNA, 32 nt, Homo Sapiens
gugaccaggcuuuaguggaagcccuuguuuac

SEQ ID NO: 319481 - RNA, 32 nt, Homo Sapiens
cuccacuggggaggaauccuggaccaagcaca

SEQ ID NO: 319482 - RNA, 32 nt, Homo Sapiens
uuaucaagauacuuucauauacaggauagccu

SEQ ID NO: 319483 - RNA, 32 nt, Homo Sapiens
cagcccccggcgggaucgauacccccaccccu

SEQ ID NO: 319484 - RNA, 32 nt, Homo Sapiens
uacucuaaaauuaauaauaaaacuacuuguaa

SEQ ID NO: 319485 - RNA, 32 nt, Homo Sapiens
guggacggcagagugccgcgacgacugccagg

SEQ ID NO: 319486 - RNA, 32 nt, Homo Sapiens
auggccgggcugacugccccccugccuugcuc

SEQ ID NO: 319487 - RNA, 32 nt, Homo Sapiens
ggccuccugcaguguucugcacagcaaaccgc

SEQ ID NO: 319488 - RNA, 32 nt, Homo Sapiens
ugaaauccgagccaggccugggcagucuccgc

SEQ ID NO: 319489 - RNA, 32 nt, Homo Sapiens
gacagcgacaccugguucuuaagcaaauucua

SEQ ID NO: 319490 - RNA, 27 nt, Homo Sapiens
ccaguccccauuuucugguaagguuuc

SEQ ID NO: 319491 - RNA, 32 nt, Homo Sapiens
cucucccugccuccacuccccccaccacccca

SEQ ID NO: 319492 - RNA, 32 nt, Homo Sapiens
cugaccgucuaccugcccuggggccgggagca

SEQ ID NO: 319493 - RNA, 32 nt, Homo Sapiens
cuugcucuagauuuucugaagaaaauggauug

SEQ ID NO: 319494 - RNA, 32 nt, Homo Sapiens
ccagggacccaguguacccagccucuggccuc

SEQ ID NO: 319495 - RNA, 32 nt, Homo Sapiens
uagugagugaggaguuugggguugccuagcac

SEQ ID NO: 319496 - RNA, 32 nt, Homo Sapiens
acacuguguuugugauugucugugugucuguc

SEQ ID NO: 319497 - RNA, 32 nt, Homo Sapiens
ggaggaaaggagaauaacucaguuuuaggguc

SEQ ID NO: 319498 - RNA, 31 nt, Homo Sapiens
gaauaauaaauaaaacagguuuuuguuaaaa

SEQ ID NO: 319499 - RNA, 32 nt, Homo Sapiens
uuuuguuuacaacacaguaguguucuguucac

SEQ ID NO: 319500 - RNA, 32 nt, Homo Sapiens
gucuccaagauggcggccgccuggccgucugg

SEQ ID NO: 319501 - RNA, 32 nt, Homo Sapiens
cuaccucggaggcagggcgcgcaggcgggcgg

SEQ ID NO: 319502 - RNA, 32 nt, Homo Sapiens
gccuccaggaagaccagacucccacccuucca

SEQ ID NO: 319503 - RNA, 32 nt, Homo Sapiens
augccauuucggugagccuguccccaaugggc

SEQ ID NO: 319504 - RNA, 32 nt, Homo Sapiens
cuucuuugguuauuauagguccaguuugaagc

SEQ ID NO: 319505 - RNA, 32 nt, Homo Sapiens
acgcugugggauguaaauuuguaggucgaguu

SEQ ID NO: 319506 - RNA, 32 nt, Homo Sapiens
uuuagcuacugcuaaugagacuugagucuauu

SEQ ID NO: 319507 - RNA, 32 nt, Homo Sapiens
gugaagucaagccucggacugcagagugugug

SEQ ID NO: 319508 - RNA, 32 nt, Homo Sapiens
cauguguucaaucccaccagucuucccuccca

SEQ ID NO: 319509 - RNA, 32 nt, Homo Sapiens
uaugaaaugugugcaacaccuauuaauuuuga

SEQ ID NO: 319510 - RNA, 32 nt, Homo Sapiens
aucuaaaggggcggggccguggucugguucug

SEQ ID NO: 319511 - RNA, 32 nt, Homo Sapiens
ggccuccgcaccgacgcggcccgggcuggagc

SEQ ID NO: 319512 - RNA, 32 nt, Homo Sapiens
aaaauuuuuuauugguagucuuuuuugcuagu

SEQ ID NO: 319513 - RNA, 32 nt, Homo Sapiens
aggaggcagcuaggcuguagauggaagauggu

SEQ ID NO: 319514 - RNA, 32 nt, Homo Sapiens
ggagggguauccuggggacacgacgggaugug

SEQ ID NO: 319515 - RNA, 32 nt, Homo Sapiens
ucccccaggcucuuucuccagcccugucucca

SEQ ID NO: 319516 - RNA, 32 nt, Homo Sapiens
cuccgcccaagcccuguccccucccccgcccc

SEQ ID NO: 319517 - RNA, 32 nt, Homo Sapiens
caccggggcaacugccugggggcggggauggg

SEQ ID NO: 319518 - RNA, 32 nt, Homo Sapiens
gacauuugauaaagggaaaaucauuucuuguc

SEQ ID NO: 319519 - RNA, 32 nt, Homo Sapiens
ccagagaauucgcuauguaaauaaaaauaaau

SEQ ID NO: 319520 - RNA, 32 nt, Homo Sapiens
uuuaggccaggaccagcucaugcguucucauu

SEQ ID NO: 319521 - RNA, 32 nt, Homo Sapiens
agcaagcaacaucagcagcagcagcagcagca

SEQ ID NO: 319522 - RNA, 31 nt, Homo Sapiens
augggcacagccagccaaccuaagacuaugu

SEQ ID NO: 319523 - RNA, 32 nt, Homo Sapiens
gagcuccuucuguguaagccugcccgcagccu

SEQ ID NO: 319524 - RNA, 32 nt, Homo Sapiens
ugcaccagacugcuccaaacucaccucacugg

SEQ ID NO: 319525 - RNA, 32 nt, Homo Sapiens
gauugugucaccucaaaggccuugaagaauau

SEQ ID NO: 319526 - RNA, 32 nt, Homo Sapiens
ucagggugacaggcauaaaaguaaauuacccu

SEQ ID NO: 319527 - RNA, 32 nt, Homo Sapiens
uuaaggugcagggacacuugauuuucuggaag

SEQ ID NO: 319528 - RNA, 32 nt, Homo Sapiens
gauguggggagccuggaaaaaccuggcccacg

SEQ ID NO: 319529 - RNA, 32 nt, Homo Sapiens
cuggccugggggagcuccagccaggcagcgag

SEQ ID NO: 319530 - RNA, 32 nt, Homo Sapiens
ugauuguaauuguuucuuucuggugaaauguu

SEQ ID NO: 319531 - RNA, 32 nt, Homo Sapiens
uucuauacaguuucuugggaugaugauaauaa

SEQ ID NO: 319532 - RNA, 32 nt, Homo Sapiens
agggccaccagccaagggcccuggccacgugu

SEQ ID NO: 319533 - RNA, 32 nt, Homo Sapiens
uggcucacaccuguaggacacacacacacaca

SEQ ID NO: 319534 - RNA, 32 nt, Homo Sapiens
uaaauauguuacuuaaauuuucuuuccuguaa

SEQ ID NO: 319535 - RNA, 32 nt, Homo Sapiens
agcagggccacucccggcacuccaugcuuagu

SEQ ID NO: 319536 - RNA, 32 nt, Homo Sapiens
acugaguugauuucuaucacaggcaguaagua

SEQ ID NO: 319537 - RNA, 32 nt, Homo Sapiens
uuaucuggccaaaaacaggagccagagaaaua

SEQ ID NO: 319538 - RNA, 32 nt, Homo Sapiens
ucucccagauccaaagucccgcagcagccggc

SEQ ID NO: 319539 - RNA, 32 nt, Homo Sapiens
caggccccugcagcugccucacaccgccccuu

SEQ ID NO: 319540 - RNA, 32 nt, Homo Sapiens
acuagccucccucuccucuguccccauagcug

SEQ ID NO: 319541 - RNA, 32 nt, Homo Sapiens
cugaccccacccacaagagcauucaggaucau

SEQ ID NO: 319542 - RNA, 30 nt, Homo Sapiens
ggggaagaggaugauuccuaacucuucugu

SEQ ID NO: 319543 - RNA, 32 nt, Homo Sapiens
ggcggccggccggcugcauggcgcgcugcgag

SEQ ID NO: 319544 - RNA, 32 nt, Homo Sapiens
aggcgcccugcagcugucuccucggccauccu

SEQ ID NO: 319545 - RNA, 32 nt, Homo Sapiens
uauugcaaggaccuucuuugcugccaguuauc

SEQ ID NO: 319546 - RNA, 32 nt, Homo Sapiens
agacguggagggcaucguggggcuggaacagg

SEQ ID NO: 319547 - RNA, 32 nt, Homo Sapiens
gacuuugcgagcucugugacugucccacgucc

SEQ ID NO: 319548 - RNA, 32 nt, Homo Sapiens
ggcuccgcgggccuggagcacggccgggucua

SEQ ID NO: 319549 - RNA, 32 nt, Homo Sapiens
auccaguacaagcuuuuacaaauguuauuagu

SEQ ID NO: 319550 - RNA, 32 nt, Homo Sapiens
aaaacagucucucccauucucuaguacugcuc

SEQ ID NO: 319551 - RNA, 32 nt, Homo Sapiens
uuaaccugacagucggguuguuuagucaguac

SEQ ID NO: 319552 - RNA, 32 nt, Homo Sapiens
gggcuacgucccggggaagaggaagcgaggau

SEQ ID NO: 319553 - RNA, 32 nt, Homo Sapiens
acgccuugcucccacaccccucuccucguccc

SEQ ID NO: 319554 - RNA, 29 nt, Homo Sapiens
ggaaaagaguaaugguauuuucuagacug

SEQ ID NO: 319555 - RNA, 32 nt, Homo Sapiens
acaaagggagccacuuccuuccucucugcaca

SEQ ID NO: 319556 - RNA, 32 nt, Homo Sapiens
auguucuuuagguagcuagacacaaucccuaa

SEQ ID NO: 319557 - RNA, 32 nt, Homo Sapiens
auaccaagaaugcuaucugggauacagccuuc

SEQ ID NO: 319558 - RNA, 32 nt, Homo Sapiens
uucaaucuucuuacacuucaguuucuucauuu

SEQ ID NO: 319559 - RNA, 32 nt, Homo Sapiens
gucauguauaaaauaugaauaaaauguccaca

SEQ ID NO: 319560 - RNA, 32 nt, Homo Sapiens
aaugacacugguuucauguaguuuucaagaaa

SEQ ID NO: 319561 - RNA, 32 nt, Homo Sapiens
aaugucauuuuucccacuauggacauaaaaau

SEQ ID NO: 319562 - RNA, 32 nt, Homo Sapiens
cuaguaacaucauuucuauggccuagccuagg

SEQ ID NO: 319563 - RNA, 32 nt, Homo Sapiens
agucguggaaucaaaucugugcucuuucauuu

SEQ ID NO: 319564 - RNA, 32 nt, Homo Sapiens
ccagguuugguuccucccggggcccccacugu

SEQ ID NO: 319565 - RNA, 32 nt, Homo Sapiens
gcccgccugcgccccaggcaggucccaggccu

SEQ ID NO: 319566 - RNA, 30 nt, Homo Sapiens
cugcucacuaucccugcgugucaacucuuu

SEQ ID NO: 319567 - RNA, 32 nt, Homo Sapiens
uaaaccaaaauauuuuuggugggucuuuuuau

SEQ ID NO: 319568 - RNA, 32 nt, Homo Sapiens
gcaaccuccgccuccuggguucaggcaauuuu

SEQ ID NO: 319569 - RNA, 32 nt, Homo Sapiens
cuauaacauucuauccucaucuguaaaacuuc

SEQ ID NO: 319570 - RNA, 32 nt, Homo Sapiens
auuccaguuggcaccagccugaaccauuuggu

SEQ ID NO: 319571 - RNA, 32 nt, Homo Sapiens
agggcccugguacagcuugggcugccacuuca

SEQ ID NO: 319572 - RNA, 32 nt, Homo Sapiens
ccgccgccgccgccggccgcuucaguaacacg

SEQ ID NO: 319573 - RNA, 32 nt, Homo Sapiens
caauagaaaacugugugugugaggaaaguaag

SEQ ID NO: 319574 - RNA, 32 nt, Homo Sapiens
caauggguagagauuugcuaaguaugaugugc

SEQ ID NO: 319575 - RNA, 32 nt, Homo Sapiens
uucuguuugcaucucccugucacugugacaca

SEQ ID NO: 319576 - RNA, 32 nt, Homo Sapiens
uguucugugacccugacugcuaguucugagga

SEQ ID NO: 319577 - RNA, 32 nt, Homo Sapiens
cugugcggguuaugugcaccucccucaauccu

SEQ ID NO: 319578 - RNA, 32 nt, Homo Sapiens
gaccaggcguccucugcccccagggagaggcu

SEQ ID NO: 319579 - RNA, 30 nt, Homo Sapiens
cauccagugcggggucugcaaaauaucuca

SEQ ID NO: 319580 - RNA, 32 nt, Homo Sapiens
cgugggucaggaggaauggagacuguaccuuc

SEQ ID NO: 319581 - RNA, 32 nt, Homo Sapiens
agccccuccuccccggcgcccucaggaccccc

SEQ ID NO: 319582 - RNA, 32 nt, Homo Sapiens
gcaaauaagcuuaugaaacuguccguccuacc

SEQ ID NO: 319583 - RNA, 32 nt, Homo Sapiens
uauacuccauucuccccugcgccuccuccucu

SEQ ID NO: 319584 - RNA, 32 nt, Homo Sapiens
cuggauucugucccuuucuccccacuucuucu

SEQ ID NO: 319585 - RNA, 32 nt, Homo Sapiens
ggacucaguggcuacugguauugucucuuccc

SEQ ID NO: 319586 - RNA, 32 nt, Homo Sapiens
ggcggcuucccgcucccaccagggcccggugg

SEQ ID NO: 319587 - RNA, 32 nt, Homo Sapiens
ggcggcuccggggaccggggccuuuuguuugg

SEQ ID NO: 319588 - RNA, 32 nt, Homo Sapiens
cuaucuuuucaucaugucuauaguuccugaga

SEQ ID NO: 319589 - RNA, 32 nt, Homo Sapiens
aguuauuuuaucagcacuuuaugcacguauua

SEQ ID NO: 319590 - RNA, 31 nt, Homo Sapiens
uggcugauguuuucuuguuucuguuucagcc

SEQ ID NO: 319591 - RNA, 32 nt, Homo Sapiens
gaaauguuuauugacaggucuuuucaaauaau

SEQ ID NO: 319592 - RNA, 32 nt, Homo Sapiens
agagaauggagagagccugugcaugaugggau

SEQ ID NO: 319593 - RNA, 32 nt, Homo Sapiens
gucaccagggccugggggaggggaggugggga

SEQ ID NO: 319594 - RNA, 32 nt, Homo Sapiens
guucauacugaauaagaaauuaacagaacauu

SEQ ID NO: 319595 - RNA, 32 nt, Homo Sapiens
acaaucaaacuuacuggaaauaaauuaccuau

SEQ ID NO: 319596 - RNA, 32 nt, Homo Sapiens
uuuuuguugcuucuuucagugagguguuucug

SEQ ID NO: 319597 - RNA, 32 nt, Homo Sapiens
gcuuguguuuuugucgguacaggagagucgcu

SEQ ID NO: 319598 - RNA, 32 nt, Homo Sapiens
acacucgagccaucgcgaguguccuugagccg

SEQ ID NO: 319599 - RNA, 32 nt, Homo Sapiens
gugccacauacuccgugggaauguagaaaacg

SEQ ID NO: 319600 - RNA, 32 nt, Homo Sapiens
ggaaauggaaugaaccacucccugcccauucc

SEQ ID NO: 319601 - RNA, 32 nt, Homo Sapiens
gccccacucccuugcuggccccagcccugcug

SEQ ID NO: 319602 - RNA, 32 nt, Homo Sapiens
auagguucaucuccccacggacaggcauaguc

SEQ ID NO: 319603 - RNA, 32 nt, Homo Sapiens
gauuggaguauuuguucuuaauaccuacggug

SEQ ID NO: 319604 - RNA, 32 nt, Homo Sapiens
gcgccgcccuccccgcucuccuuccugggcga

SEQ ID NO: 319605 - RNA, 32 nt, Homo Sapiens
cuuuaugaugcuaagcugauauuauuucuucu

SEQ ID NO: 319606 - RNA, 32 nt, Homo Sapiens
uguuugacauuuuuauugacuuucuacuguuu

SEQ ID NO: 319607 - RNA, 32 nt, Homo Sapiens
gugacucgguggccucaaguguguacaaaacu

SEQ ID NO: 319608 - RNA, 32 nt, Homo Sapiens
uuauagcgaccgcggggagccaggcgcugagg

SEQ ID NO: 319609 - RNA, 32 nt, Homo Sapiens
aaguccgccucccaggcgauucuccugccuca

SEQ ID NO: 319610 - RNA, 32 nt, Homo Sapiens
aguacgaguuagacauaugaaaugguuaugaa

SEQ ID NO: 319611 - RNA, 32 nt, Homo Sapiens
agccggggcucauucuccaugugccuuagccu

SEQ ID NO: 319612 - RNA, 32 nt, Homo Sapiens
gaguuauacccauuuuauuuauuuagaaaaau

SEQ ID NO: 319613 - RNA, 32 nt, Homo Sapiens
auguucagacuggagaacacugucccaaauuu

SEQ ID NO: 319614 - RNA, 32 nt, Homo Sapiens
ugcuuacccucccaccaagcugaaaggggccu

SEQ ID NO: 319615 - RNA, 32 nt, Homo Sapiens
aaaguuauauugcauuuacaaauguuuuacaa

SEQ ID NO: 319616 - RNA, 32 nt, Homo Sapiens
aaguagagaaaacacuugugucuucuuuaccc

SEQ ID NO: 319617 - RNA, 32 nt, Homo Sapiens
auugccugcaaaugaauaugcuauaugauuug

SEQ ID NO: 319618 - RNA, 32 nt, Homo Sapiens
uaugguggggcgcgggcggugucgcugugggg

SEQ ID NO: 319619 - RNA, 32 nt, Homo Sapiens
ccuucugaucuguuuaccaugucagcaagcag

SEQ ID NO: 319620 - RNA, 32 nt, Homo Sapiens
uaaauuucauauauuucugagaaagaacagcu

SEQ ID NO: 319621 - RNA, 32 nt, Homo Sapiens
ugguauuugugauuugguuaaucuguauaaaa

SEQ ID NO: 319622 - RNA, 32 nt, Homo Sapiens
agcaccgcugcagcugccgauguagccucggu

SEQ ID NO: 319623 - RNA, 30 nt, Homo Sapiens
gcugcccuggacugcucacucucuggucuc

SEQ ID NO: 319624 - RNA, 32 nt, Homo Sapiens
cuacucuacaagguggauaauauuuugguacc

SEQ ID NO: 319625 - RNA, 32 nt, Homo Sapiens
gcuuauaauuuucuuuuuuaauuuuugaagga

SEQ ID NO: 319626 - RNA, 32 nt, Homo Sapiens
uuccuccguccugauaagacguccacccccca

SEQ ID NO: 319627 - RNA, 32 nt, Homo Sapiens
acuuuaaaugucuuaaauuuguuuccuggugg

SEQ ID NO: 319628 - RNA, 30 nt, Homo Sapiens
acaggagagaagcugagacucucggcacau

SEQ ID NO: 319629 - RNA, 32 nt, Homo Sapiens
cuuaagucagagccuuccuccccaucuggaau

SEQ ID NO: 319630 - RNA, 32 nt, Homo Sapiens
ggucucaaacuccccagcuaaagcaguccucc

SEQ ID NO: 319631 - RNA, 32 nt, Homo Sapiens
uucauuuguuuacaaaguagauuaugccuaau

SEQ ID NO: 319632 - RNA, 29 nt, Homo Sapiens
gagcuucugggacagagacugcuuggcca

SEQ ID NO: 319633 - RNA, 32 nt, Homo Sapiens
ggccugcgugcggcccuggccuugagugugcu

SEQ ID NO: 319634 - RNA, 32 nt, Homo Sapiens
augugaagcauaaaauuaaauaaaauuuuucc

SEQ ID NO: 319635 - RNA, 32 nt, Homo Sapiens
ucaguacaccagcaaugcugaggaugccaacu

SEQ ID NO: 319636 - RNA, 32 nt, Homo Sapiens
cuguuuuauaaacugcugcuauuuggaaaccc

SEQ ID NO: 319637 - RNA, 32 nt, Homo Sapiens
cuccccaggccgcgagcgccccugccgcggug

SEQ ID NO: 319638 - RNA, 32 nt, Homo Sapiens
ggaucugagaaggagaaggaaaugugggguag

SEQ ID NO: 319639 - RNA, 32 nt, Homo Sapiens
agcccauaucuuuucuuuuuuaucuuccuuag

SEQ ID NO: 319640 - RNA, 32 nt, Homo Sapiens
cuuaauucugagccauuaauccugcuacacuu

SEQ ID NO: 319641 - RNA, 32 nt, Homo Sapiens
ggggggaccuggggcgggcgacaugaugugca

SEQ ID NO: 319642 - RNA, 32 nt, Homo Sapiens
auggucacuauuuuuacccaccugccuuuguu

SEQ ID NO: 319643 - RNA, 32 nt, Homo Sapiens
aagagaaaaguacaacucauauaauugacaac

SEQ ID NO: 319644 - RNA, 32 nt, Homo Sapiens
uggugcugacuuggacaauuccaggucaagag

SEQ ID NO: 319645 - RNA, 31 nt, Homo Sapiens
aguuaauaagagguuuguaucuggaaagaug

SEQ ID NO: 319646 - RNA, 32 nt, Homo Sapiens
guuccagaucucuuuuucagcauuuucaugga

SEQ ID NO: 319647 - RNA, 32 nt, Homo Sapiens
gaaauccagagguagacagagagaaacugagu

SEQ ID NO: 319648 - RNA, 32 nt, Homo Sapiens
uuuuccuugugcauuuaauaccucugggcaga

SEQ ID NO: 319649 - RNA, 32 nt, Homo Sapiens
caggauccagcauuaggauugagacugcccca

SEQ ID NO: 319650 - RNA, 32 nt, Homo Sapiens
gcucuuucuuccccggccccggggcucggcca

SEQ ID NO: 319651 - RNA, 32 nt, Homo Sapiens
ccccucggcuuugccuggacagcuccugccuc

SEQ ID NO: 319652 - RNA, 32 nt, Homo Sapiens
uuugggcugugugugcgacgcgggucggaggg

SEQ ID NO: 319653 - RNA, 30 nt, Homo Sapiens
auggcugucuguggguggaggacuccugcc

SEQ ID NO: 319654 - RNA, 32 nt, Homo Sapiens
gaaaacggacauucagacagcgcuuccuucug

SEQ ID NO: 319655 - RNA, 32 nt, Homo Sapiens
auaaaugaucucaguggaauguuucauauuac

SEQ ID NO: 319656 - RNA, 32 nt, Homo Sapiens
uguuagucugguuuuuguugcuuaucggguuu

SEQ ID NO: 319657 - RNA, 32 nt, Homo Sapiens
gaucaaggaccaaucaggucccucaacugguc

SEQ ID NO: 319658 - RNA, 32 nt, Homo Sapiens
aauuaauaugguguauuuuuccaaaugaaaaa

SEQ ID NO: 319659 - RNA, 32 nt, Homo Sapiens
uggggagggaaccucucgggucugcacaucuc

SEQ ID NO: 319660 - RNA, 32 nt, Homo Sapiens
gcgcccggcccguuaaaacgcugcuggcugga

SEQ ID NO: 319661 - RNA, 32 nt, Homo Sapiens
ugauauuuauuuucucugccaagcuguauagu

SEQ ID NO: 319662 - RNA, 32 nt, Homo Sapiens
aacuaguccauauaacccagcuucaguagcaa

SEQ ID NO: 319663 - RNA, 27 nt, Homo Sapiens
ccauguuccuucuucuggugcuucuca

SEQ ID NO: 319664 - RNA, 32 nt, Homo Sapiens
uugacaaaauuugaagaaauauuaaacaaaaa

SEQ ID NO: 319665 - RNA, 32 nt, Homo Sapiens
guggagccacggccucccgggacggacucccc

SEQ ID NO: 319666 - RNA, 32 nt, Homo Sapiens
accaaggaagauaggaaacaaaaaauagaagg

SEQ ID NO: 319667 - RNA, 32 nt, Homo Sapiens
aaucuuuuucccuguacuuugaaacagccauu

SEQ ID NO: 319668 - RNA, 32 nt, Homo Sapiens
cagccuuuuaucauugcuuagucuaauuuagc

SEQ ID NO: 319669 - RNA, 32 nt, Homo Sapiens
aggggcccccaaacccggggccgcagagcagu

SEQ ID NO: 319670 - RNA, 30 nt, Homo Sapiens
gcaccaugggcugcugcaccggacgcugcu

SEQ ID NO: 319671 - RNA, 32 nt, Homo Sapiens
cagcugcagcugcuggucgccaguauaaguau

SEQ ID NO: 319672 - RNA, 31 nt, Homo Sapiens
cgcuucucguuggguaccguggggggugaac

SEQ ID NO: 319673 - RNA, 32 nt, Homo Sapiens
gucuuggcauuaaaccacaucauggaccaaau

SEQ ID NO: 319674 - RNA, 32 nt, Homo Sapiens
ucccugccugccucccucccccugcuagaagu

SEQ ID NO: 319675 - RNA, 32 nt, Homo Sapiens
ggucccggagaauguugugagggguuuauuuu

SEQ ID NO: 319676 - RNA, 32 nt, Homo Sapiens
acuuaaucugcacuauagaaaaagugaaucua

SEQ ID NO: 319677 - RNA, 32 nt, Homo Sapiens
gugcgguggcuuuggcaacagaaaccaaagcc

SEQ ID NO: 319678 - RNA, 32 nt, Homo Sapiens
ucacaccacgaagcucuuggggccugauccuu

SEQ ID NO: 319679 - RNA, 32 nt, Homo Sapiens
uggccauugucccccaucggccccucagccuu

SEQ ID NO: 319680 - RNA, 32 nt, Homo Sapiens
cucuuuauacuuccagugauguuuuggcaucc

SEQ ID NO: 319681 - RNA, 32 nt, Homo Sapiens
auguacugcuaaggcguggagguugccguacu

SEQ ID NO: 319682 - RNA, 30 nt, Homo Sapiens
ggcacaggcaggcccuugggugcuaagggc

SEQ ID NO: 319683 - RNA, 32 nt, Homo Sapiens
gcagggccgaggggccugcggggcagccaugg

SEQ ID NO: 319684 - RNA, 32 nt, Homo Sapiens
uugcccaggcuugccuggaacuccuagccuca

SEQ ID NO: 319685 - RNA, 32 nt, Homo Sapiens
gcgaagaaaccuagcagacaccaccguaacca

SEQ ID NO: 319686 - RNA, 32 nt, Homo Sapiens
cccuuaaugguguuguuuucuauuuguucugg

SEQ ID NO: 319687 - RNA, 32 nt, Homo Sapiens
gucauuucaaagacauguguauggggauuaga

SEQ ID NO: 319688 - RNA, 32 nt, Homo Sapiens
auuccccaccugguccucccccuucccaugcu

SEQ ID NO: 319689 - RNA, 32 nt, Homo Sapiens
cuuccgaagugcucccggugcccgcaacuccu

SEQ ID NO: 319690 - RNA, 32 nt, Homo Sapiens
uuuguaagaggcuucaaaauguuuauacgugg

SEQ ID NO: 319691 - RNA, 32 nt, Homo Sapiens
aagagcagcaagucagccucuccgggcccagc

SEQ ID NO: 319692 - RNA, 32 nt, Homo Sapiens
gacgacugugacgaaacaggaauagaagaagc

SEQ ID NO: 319693 - RNA, 32 nt, Homo Sapiens
gacugaaauugcaaauuguccuuuuucuuggc

SEQ ID NO: 319694 - RNA, 32 nt, Homo Sapiens
uucuuuuucuugcuuuuuguuuuugccauugu

SEQ ID NO: 319695 - RNA, 32 nt, Homo Sapiens
auccugaagccagccucuccaaugccucagcc

SEQ ID NO: 319696 - RNA, 32 nt, Homo Sapiens
auucgcaacuaaaugguaguuguuuucaagca

SEQ ID NO: 319697 - RNA, 32 nt, Homo Sapiens
uagguauuauaauuccgauucuguaaaugagc

SEQ ID NO: 319698 - RNA, 32 nt, Homo Sapiens
cagaaaaaugacugcucauagcagcuuuauuc

SEQ ID NO: 319699 - RNA, 32 nt, Homo Sapiens
gaggagcggcggcgccugggcggcaugcgaug

SEQ ID NO: 319700 - RNA, 32 nt, Homo Sapiens
ucuguguguauguacauaguagacaugugugu

SEQ ID NO: 319701 - RNA, 32 nt, Homo Sapiens
acccacuucuauuuacuuugggaaauaucuug

SEQ ID NO: 319702 - RNA, 32 nt, Homo Sapiens
aggcccuacacccaccgaggcauggggcuccc

SEQ ID NO: 319703 - RNA, 32 nt, Homo Sapiens
ggcacucauuucaaaucaugaaaugcuacuuc

SEQ ID NO: 319704 - RNA, 32 nt, Homo Sapiens
agccggacucgagaccccgggcuucauccaca

SEQ ID NO: 319705 - RNA, 32 nt, Homo Sapiens
caccccggaaccggcgucgcuggcgcauccug

SEQ ID NO: 319706 - RNA, 32 nt, Homo Sapiens
aaaaaaauauauauauauacaaacacauauau

SEQ ID NO: 319707 - RNA, 32 nt, Homo Sapiens
caaccgcaccucugaagugcugcuugaaucug

SEQ ID NO: 319708 - RNA, 32 nt, Homo Sapiens
uuuugaauguuuguuccucuguuuccucaccc

SEQ ID NO: 319709 - RNA, 32 nt, Homo Sapiens
cuucgggccucggcagcgguagcggcucgcuc

SEQ ID NO: 319710 - RNA, 32 nt, Homo Sapiens
cgugucucguguccccggggccucaccgcccc

SEQ ID NO: 319711 - RNA, 32 nt, Homo Sapiens
gcagggggcuccuggggguggggaggugucac

SEQ ID NO: 319712 - RNA, 32 nt, Homo Sapiens
uccgcauccaguuaccaccuccugccucagag

SEQ ID NO: 319713 - RNA, 32 nt, Homo Sapiens
cacaaugcccauugugggcaguguccagacag

SEQ ID NO: 319714 - RNA, 32 nt, Homo Sapiens
gaguuuccuagugggcuucucaacuuuugauc

SEQ ID NO: 319715 - RNA, 32 nt, Homo Sapiens
cggcugccagcuuuucggggccccgagucgca

SEQ ID NO: 319716 - RNA, 32 nt, Homo Sapiens
cacacccacugcuuccucucggcgcaccccag

SEQ ID NO: 319717 - RNA, 32 nt, Homo Sapiens
aggauaaagugaaugaauacaugugaugugcu

SEQ ID NO: 319718 - RNA, 32 nt, Homo Sapiens
caaguucugugcuaacaugggaauaacauuag

SEQ ID NO: 319719 - RNA, 32 nt, Homo Sapiens
ugaguguugcuguuuauucacauuugucugcu

SEQ ID NO: 319720 - RNA, 32 nt, Homo Sapiens
cagugucugugcugccagguccuggugaagcc

SEQ ID NO: 319721 - RNA, 32 nt, Homo Sapiens
uucuguguccucauuacucugcucugugugag

SEQ ID NO: 319722 - RNA, 32 nt, Homo Sapiens
uacccggccccuguguucugccugccaggcca

SEQ ID NO: 319723 - RNA, 32 nt, Homo Sapiens
cguacucugccagccaaguggcaaacagacuu

SEQ ID NO: 319724 - RNA, 32 nt, Homo Sapiens
ugggccgaggugccuccuccucacuguccaga

SEQ ID NO: 319725 - RNA, 32 nt, Homo Sapiens
cuccauuccuuccggcgcccggagcugcuggc

SEQ ID NO: 319726 - RNA, 32 nt, Homo Sapiens
agauucuggggacagagcuguuaccugccacu

SEQ ID NO: 319727 - RNA, 32 nt, Homo Sapiens
agggcagagggguaggcagagccuuuggauga

SEQ ID NO: 319728 - RNA, 32 nt, Homo Sapiens
caagauggccccagccgcaggccucacauucu

SEQ ID NO: 319729 - RNA, 30 nt, Homo Sapiens
uuuugaauccccggcggcggcgcggggcgg

SEQ ID NO: 319730 - RNA, 32 nt, Homo Sapiens
ccccgcucuucuuccaacuccuccucgcacgc

SEQ ID NO: 319731 - RNA, 32 nt, Homo Sapiens
aaaccccaaacacuagccauaaugaaccuugu

SEQ ID NO: 319732 - RNA, 32 nt, Homo Sapiens
agcccagaacagaguuguuguucaguaaucgu

SEQ ID NO: 319733 - RNA, 32 nt, Homo Sapiens
cucagcccccuccagacuuugggcacugacga

SEQ ID NO: 319734 - RNA, 32 nt, Homo Sapiens
ugggagucaggagacaagacagcgcagagagg

SEQ ID NO: 319735 - RNA, 32 nt, Homo Sapiens
ggcacauuugaaaagauggaauugaagucguu

SEQ ID NO: 319736 - RNA, 32 nt, Homo Sapiens
ugccgcgucugcugcgggcgcuggacgcgcgg

SEQ ID NO: 319737 - RNA, 32 nt, Homo Sapiens
uacucuuucuaaaaauaauaauaauaaugcua

SEQ ID NO: 319738 - RNA, 32 nt, Homo Sapiens
uccuuggguuucccagcugcuuccugcucagc

SEQ ID NO: 319739 - RNA, 32 nt, Homo Sapiens
ccauggcagcuggucuuuauuccucccucaug

SEQ ID NO: 319740 - RNA, 31 nt, Homo Sapiens
uguucaagugaaaauaaauaauguacccugc

SEQ ID NO: 319741 - RNA, 32 nt, Homo Sapiens
gucuucaugcugcccugcugcugcuggaagga

SEQ ID NO: 319742 - RNA, 32 nt, Homo Sapiens
aaaauccauggcacagauuggaugcauaauac

SEQ ID NO: 319743 - RNA, 29 nt, Homo Sapiens
aauaaaagcaggucgucucguuccaaucu

SEQ ID NO: 319744 - RNA, 32 nt, Homo Sapiens
gguccaucuugcccuucccccauccaugguug

SEQ ID NO: 319745 - RNA, 32 nt, Homo Sapiens
augggauaggaaagaaagaaugaaacacaaau

SEQ ID NO: 319746 - RNA, 32 nt, Homo Sapiens
cuucccuggcuucuccuucagcccauccacuc

SEQ ID NO: 319747 - RNA, 32 nt, Homo Sapiens
caucuguaaucccagcacuuuggaaggcugag

SEQ ID NO: 319748 - RNA, 32 nt, Homo Sapiens
caucuguaaucccagcacuuugggaggcugaa

SEQ ID NO: 319749 - RNA, 32 nt, Homo Sapiens
accauuuauaauguuagaaauuuuacaauagg

SEQ ID NO: 319750 - RNA, 32 nt, Homo Sapiens
accaaaaacaacagugacaauagagucucagg

SEQ ID NO: 319751 - RNA, 32 nt, Homo Sapiens
cccacggccugugaccccggcgaccgcucccc

SEQ ID NO: 319752 - RNA, 32 nt, Homo Sapiens
aacccgcugccuccauuucucuagaucugugc

SEQ ID NO: 319753 - RNA, 32 nt, Homo Sapiens
gcucugaggaagagggucuguggguuccaaag

SEQ ID NO: 319754 - RNA, 32 nt, Homo Sapiens
ccccguccggcuuccuugguggaggccgucua

SEQ ID NO: 319755 - RNA, 32 nt, Homo Sapiens
agcucuccagagagacgcuuugaaaacaaaac

SEQ ID NO: 319756 - RNA, 32 nt, Homo Sapiens
auuagauagaagggauguuacugcacuuaugu

SEQ ID NO: 319757 - RNA, 32 nt, Homo Sapiens
uucuccagugcuuccuugggcagccaguaauu

SEQ ID NO: 319758 - RNA, 32 nt, Homo Sapiens
auccugagccaccuccucuccccgcuugccuc

SEQ ID NO: 319759 - RNA, 32 nt, Homo Sapiens
aagggccccaguguuaaugucuuagauuuuca

SEQ ID NO: 319760 - RNA, 32 nt, Homo Sapiens
gcccucccuccgcgcccucccucccccucgag

SEQ ID NO: 319761 - RNA, 32 nt, Homo Sapiens
ccaucuccugcaccaccagcaccaccuggagc

SEQ ID NO: 319762 - RNA, 32 nt, Homo Sapiens
ugcuacccuaaaaacuuuaccccaggcucugu

SEQ ID NO: 319763 - RNA, 32 nt, Homo Sapiens
gcgguggcucugcggccgcuggaguaaacacu

SEQ ID NO: 319764 - RNA, 32 nt, Homo Sapiens
aaaauacaaaaagccaggcgugguggcaaaug

SEQ ID NO: 319765 - RNA, 32 nt, Homo Sapiens
uguaguguuucauuggauuuauuuuaugcuag

SEQ ID NO: 319766 - RNA, 32 nt, Homo Sapiens
uuuuagggccaggcaggugccuggacauuugc

SEQ ID NO: 319767 - RNA, 32 nt, Homo Sapiens
ggcuagcaugcaauggugugaccucggcuuac

SEQ ID NO: 319768 - RNA, 32 nt, Homo Sapiens
cuauauguguguauauagugugugauguauau

SEQ ID NO: 319769 - RNA, 32 nt, Homo Sapiens
auagaccugcagcugcaguucuccauguccca

SEQ ID NO: 319770 - RNA, 32 nt, Homo Sapiens
agcagccccggcaacucuggcuccaggcagaa

SEQ ID NO: 319771 - RNA, 32 nt, Homo Sapiens
gcccuucgcuccuggguugguugugaggacag

SEQ ID NO: 319772 - RNA, 32 nt, Homo Sapiens
ccaggcccagcuccggccucacgguggccucu

SEQ ID NO: 319773 - RNA, 32 nt, Homo Sapiens
ugcaguugugagaucucggcucacugcaagcu

SEQ ID NO: 319774 - RNA, 32 nt, Homo Sapiens
uuacuaguacuaguacuaugacacuguuaaua

SEQ ID NO: 319775 - RNA, 32 nt, Homo Sapiens
guguguacaaauacauguguauauuccuuuua

SEQ ID NO: 319776 - RNA, 32 nt, Homo Sapiens
cucagcuuaggacccccagagccaagguggcu

SEQ ID NO: 319777 - RNA, 32 nt, Homo Sapiens
uaaggcucaucuaauaucuuuauuuuugauau

SEQ ID NO: 319778 - RNA, 32 nt, Homo Sapiens
cucugggagacccuggcuccaagccccggccu

SEQ ID NO: 319779 - RNA, 32 nt, Homo Sapiens
uucugggcagagcugagagacaaugguccuga

SEQ ID NO: 319780 - RNA, 32 nt, Homo Sapiens
ccguccacccucgguccucauggucccagagc

SEQ ID NO: 319781 - RNA, 32 nt, Homo Sapiens
caccuguaaucccagcacuuugggaggccgau

SEQ ID NO: 319782 - RNA, 32 nt, Homo Sapiens
acacacacgugcccaucugcugucccagaggg

SEQ ID NO: 319783 - RNA, 32 nt, Homo Sapiens
aacuauguugcugcuggagaucaaugaagccg

SEQ ID NO: 319784 - RNA, 32 nt, Homo Sapiens
gacccacaccgcccucacgugaagcugggcug

SEQ ID NO: 319785 - RNA, 32 nt, Homo Sapiens
cccucccuagcaucccaggugcccugacccag

SEQ ID NO: 319786 - RNA, 32 nt, Homo Sapiens
uuuggcagcauagaaaaguaacauauagagau

SEQ ID NO: 319787 - RNA, 32 nt, Homo Sapiens
ggcggcagaggcggcgggaggaugaccucuua

SEQ ID NO: 319788 - RNA, 32 nt, Homo Sapiens
uccacuucccagcagacaugcucuuugccgag

SEQ ID NO: 319789 - RNA, 32 nt, Homo Sapiens
uguuacauguugaacuuuguacacuuaugcau

SEQ ID NO: 319790 - RNA, 32 nt, Homo Sapiens
guugaaauuggaacugagaguuguuuauaucg

SEQ ID NO: 319791 - RNA, 32 nt, Homo Sapiens
uauuagaaaucugaaaguacugucaucuaaaa

SEQ ID NO: 319792 - RNA, 32 nt, Homo Sapiens
ucgauuuuuucugaaucauaauuaaacuuuau

SEQ ID NO: 319793 - RNA, 32 nt, Homo Sapiens
auccuggcuaacacagugaaaccccgucucua

SEQ ID NO: 319794 - RNA, 32 nt, Homo Sapiens
uuccuggcgggggugggccguggagucggagu

SEQ ID NO: 319795 - RNA, 32 nt, Homo Sapiens
accugagcauaaagccaauauuugagguaaaa

SEQ ID NO: 319796 - RNA, 32 nt, Homo Sapiens
aguuauuuaugaaaaacaaagaaaugucuauu

SEQ ID NO: 319797 - RNA, 32 nt, Homo Sapiens
ugguuacagcuauguaaccuguauuauucugg

SEQ ID NO: 319798 - RNA, 32 nt, Homo Sapiens
ugaccacggcuugcaagcugguggcuggcccc

SEQ ID NO: 319799 - RNA, 32 nt, Homo Sapiens
agucuuccacacacaaaaaauaccucacagag

SEQ ID NO: 319800 - RNA, 32 nt, Homo Sapiens
ucaaaaacacuacuccuuuuccucuacccuau

SEQ ID NO: 319801 - RNA, 32 nt, Homo Sapiens
auucaucauuacuguauagaaacacaagugau

SEQ ID NO: 319802 - RNA, 30 nt, Homo Sapiens
gaggcucuggacugcguccuaccaccaacu

SEQ ID NO: 319803 - RNA, 32 nt, Homo Sapiens
ucaaggcacuguaaaucuuauaauuuuaaaau

SEQ ID NO: 319804 - RNA, 32 nt, Homo Sapiens
uuggaagcagcagaaggccaugccaaagaagg

SEQ ID NO: 319805 - RNA, 32 nt, Homo Sapiens
uccaucggcagggacagcugguggucugucug

SEQ ID NO: 319806 - RNA, 32 nt, Homo Sapiens
cugggaugcacggugggcucucgucauccugu

SEQ ID NO: 319807 - RNA, 32 nt, Homo Sapiens
acagaucccuucugccccauauuccgucuugg

SEQ ID NO: 319808 - RNA, 32 nt, Homo Sapiens
gguuugaaacaaacagaagaggagcaggaaau

SEQ ID NO: 319809 - RNA, 32 nt, Homo Sapiens
acggcguggccgaggcgggcggcuccuucgac

SEQ ID NO: 319810 - RNA, 32 nt, Homo Sapiens
aagggaaggagugggcaaaacacauaaaauga

SEQ ID NO: 319811 - RNA, 31 nt, Homo Sapiens
ugcacacacugacaggaguccaagaaugugc

SEQ ID NO: 319812 - RNA, 32 nt, Homo Sapiens
acuccugucucuccaaaacaauaaaaaauaaa

SEQ ID NO: 319813 - RNA, 29 nt, Homo Sapiens
guuacauaaaguuguauguuuuaagugau

SEQ ID NO: 319814 - RNA, 32 nt, Homo Sapiens
uauuuaaaacaguuacacugcaggguuucgcc

SEQ ID NO: 319815 - RNA, 32 nt, Homo Sapiens
ugugcuccagcauuaaauuuggagaugaggaa

SEQ ID NO: 319816 - RNA, 32 nt, Homo Sapiens
gugguuuguauaacuuuguccuguccuccacc

SEQ ID NO: 319817 - RNA, 32 nt, Homo Sapiens
acaacauucuaaaaguacaauuauuucuuauu

SEQ ID NO: 319818 - RNA, 32 nt, Homo Sapiens
cgagcccucugcucagccgccugggacccacc

SEQ ID NO: 319819 - RNA, 32 nt, Homo Sapiens
ggccagaaccccagcccugugccuccuagccc

SEQ ID NO: 319820 - RNA, 32 nt, Homo Sapiens
gacagauuugauauuaaaaaauuaaagacuaa

SEQ ID NO: 319821 - RNA, 32 nt, Homo Sapiens
ugaggcccucuucaggcuuuggcagccacaga

SEQ ID NO: 319822 - RNA, 32 nt, Homo Sapiens
uauuccuuucauuauugcuuugaaagaagcug

SEQ ID NO: 319823 - RNA, 32 nt, Homo Sapiens
ccuccaccucgccgcugggggaccaacagguu

SEQ ID NO: 319824 - RNA, 32 nt, Homo Sapiens
gagcgcaauggcccugccgucuguggagccuc

SEQ ID NO: 319825 - RNA, 32 nt, Homo Sapiens
ccuugccugucugcaccuggggagaagccggc

SEQ ID NO: 319826 - RNA, 32 nt, Homo Sapiens
gggagccucagagcugagccccggccuggcug

SEQ ID NO: 319827 - RNA, 32 nt, Homo Sapiens
caaagaccucauaaaaucuaugcugaggaaug

SEQ ID NO: 319828 - RNA, 32 nt, Homo Sapiens
ccccacacacgccuaugcacaaacguggauua

SEQ ID NO: 319829 - RNA, 32 nt, Homo Sapiens
ugcaaucuccaccucccacagguucaggcgau

SEQ ID NO: 319830 - RNA, 32 nt, Homo Sapiens
ccaagcugagcugagggcccgcggcggccgcg

SEQ ID NO: 319831 - RNA, 32 nt, Homo Sapiens
caggcuggaaucaggugcuuggaccagugaag

SEQ ID NO: 319832 - RNA, 32 nt, Homo Sapiens
augccaagucacucuuuuuuaguugcaugaaa

SEQ ID NO: 319833 - RNA, 32 nt, Homo Sapiens
cuaaggggaaauuuuaucucuuucuuucuuuc

SEQ ID NO: 319834 - RNA, 32 nt, Homo Sapiens
ggaggcucccaggcgcccgcgccgcgcuucgg

SEQ ID NO: 319835 - RNA, 32 nt, Homo Sapiens
ugugcuucagccccggccccagcuucagcucu

SEQ ID NO: 319836 - RNA, 32 nt, Homo Sapiens
uauacagacuacugaggugucaaguccugccu

SEQ ID NO: 319837 - RNA, 32 nt, Homo Sapiens
ggcucuaucuucugcuguccucugcacaagug

SEQ ID NO: 319838 - RNA, 32 nt, Homo Sapiens
uuauuaaaaauauugagugaagcuaauuguca

SEQ ID NO: 319839 - RNA, 32 nt, Homo Sapiens
ugucccuugcuguaugcugaucaucgccagag

SEQ ID NO: 319840 - RNA, 32 nt, Homo Sapiens
gacuguaugaggucuuuuuuuaaaauaccacu

SEQ ID NO: 319841 - RNA, 32 nt, Homo Sapiens
aucucuaaacagagacuggcccugccacugac

SEQ ID NO: 319842 - RNA, 32 nt, Homo Sapiens
cccaacuccuccccgacucccagccucagugu

SEQ ID NO: 319843 - RNA, 32 nt, Homo Sapiens
cgcuccuggccgccuagagccggagcggcccg

SEQ ID NO: 319844 - RNA, 32 nt, Homo Sapiens
acuugaaaaauauuucuuaauuuuuguuuuug

SEQ ID NO: 319845 - RNA, 32 nt, Homo Sapiens
ugaaucuauuuuucuucagacugaggccuuuu

SEQ ID NO: 319846 - RNA, 32 nt, Homo Sapiens
acuuucuuccuuggacuuaccuggacaauucc

SEQ ID NO: 319847 - RNA, 32 nt, Homo Sapiens
uaggcggcccaggcggcggggaggaggagaag

SEQ ID NO: 319848 - RNA, 32 nt, Homo Sapiens
ggaucucuugagcccaggauuuugaauccauc

SEQ ID NO: 319849 - RNA, 32 nt, Homo Sapiens
uucuucuacagguauaauaauucaucaugcau

SEQ ID NO: 319850 - RNA, 32 nt, Homo Sapiens
ucuuucucagaauucaaaggagacgagucagc

SEQ ID NO: 319851 - RNA, 32 nt, Homo Sapiens
uaaaaaauccuguuuauauaaaaaaucaguag

SEQ ID NO: 319852 - RNA, 32 nt, Homo Sapiens
gaauuccuaaagacauguggaggaagucacug

SEQ ID NO: 319853 - RNA, 32 nt, Homo Sapiens
aguggaaaaaauuuguucuauuuuuacaucuu

SEQ ID NO: 319854 - RNA, 32 nt, Homo Sapiens
gugagguuaugaaacuuucauuggucccaucg

SEQ ID NO: 319855 - RNA, 32 nt, Homo Sapiens
gcugguaggagaggcuuuaaggugguaauuag

SEQ ID NO: 319856 - RNA, 32 nt, Homo Sapiens
ggggaagcagucccggcccccaccccuccgga

SEQ ID NO: 319857 - RNA, 32 nt, Homo Sapiens
aaaagccaguucuguggugaugaccuauggaa

SEQ ID NO: 319858 - RNA, 32 nt, Homo Sapiens
uugcuguaacacacuggaaaauuccugaacaa

SEQ ID NO: 319859 - RNA, 32 nt, Homo Sapiens
ucaagugggugacggcgcucuccggcagccgg

SEQ ID NO: 319860 - RNA, 32 nt, Homo Sapiens
gauucgccuggggacauccuccuguggaagga

SEQ ID NO: 319861 - RNA, 32 nt, Homo Sapiens
cuguuucuagagacccagcuuuauucaccuga

SEQ ID NO: 319862 - RNA, 32 nt, Homo Sapiens
cuucccucccagccuuccuugguuuggauguu

SEQ ID NO: 319863 - RNA, 32 nt, Homo Sapiens
uggggugggggaggagggcgcacgggcugagc

SEQ ID NO: 319864 - RNA, 32 nt, Homo Sapiens
uugauuauuuucugcuacagaccugguacacu

SEQ ID NO: 319865 - RNA, 32 nt, Homo Sapiens
cccuuccucuuuggccucuuccaggucauucu

SEQ ID NO: 319866 - RNA, 32 nt, Homo Sapiens
auacugaaucaaauggaaaaacaaaugaauac

SEQ ID NO: 319867 - RNA, 32 nt, Homo Sapiens
gacacggaagcaggcaaguaucaguguguggc

SEQ ID NO: 319868 - RNA, 32 nt, Homo Sapiens
gccaaugguggcaaauuuugugaauuguuuuu

SEQ ID NO: 319869 - RNA, 32 nt, Homo Sapiens
gaauacuuauauuuuuaauaaaaguugcaaag

SEQ ID NO: 319870 - RNA, 32 nt, Homo Sapiens
uagcucauguaaaaauaaaauaacauuauuac

SEQ ID NO: 319871 - RNA, 32 nt, Homo Sapiens
ccacauacagauggaugaaacuacuuacugau

SEQ ID NO: 319872 - RNA, 32 nt, Homo Sapiens
cguggguggcauuauuugacuucuuuuuaagu

SEQ ID NO: 319873 - RNA, 31 nt, Homo Sapiens
aaaaugacaaauugauauucugauauaaaac

SEQ ID NO: 319874 - RNA, 32 nt, Homo Sapiens
uguccaggggccgacccggcccguagugugga

SEQ ID NO: 319875 - RNA, 32 nt, Homo Sapiens
ugauggugaggaagaggaugcugaggccuucu

SEQ ID NO: 319876 - RNA, 32 nt, Homo Sapiens
ucuaagagacuucuaaagacgccacucaagcc

SEQ ID NO: 319877 - RNA, 32 nt, Homo Sapiens
cuuuauuccagaaugcuguacaucuauuuugg

SEQ ID NO: 319878 - RNA, 32 nt, Homo Sapiens
ccggguaccugagggacgcgcggccgcccgcg

SEQ ID NO: 319879 - RNA, 32 nt, Homo Sapiens
acagauuuguaaaaaauacauauuugaaguau

SEQ ID NO: 319880 - RNA, 32 nt, Homo Sapiens
ccgccgcccgccccgcuuggcuuugcggcauc

SEQ ID NO: 319881 - RNA, 32 nt, Homo Sapiens
caagucauuuauauaaaauauuacaguauuug

SEQ ID NO: 319882 - RNA, 32 nt, Homo Sapiens
agggcccugguugagggugggguguggggcga

SEQ ID NO: 319883 - RNA, 32 nt, Homo Sapiens
aggguggggagcaaacaggccagcgguggagg

SEQ ID NO: 319884 - RNA, 32 nt, Homo Sapiens
ugauuuucuuucuccucugauuucaguucacu

SEQ ID NO: 319885 - RNA, 32 nt, Homo Sapiens
cccaccuggcucaccuugugcuggggacaggu

SEQ ID NO: 319886 - RNA, 32 nt, Homo Sapiens
gaagucacuguacuccacagagccucacugca

SEQ ID NO: 319887 - RNA, 32 nt, Homo Sapiens
aacauauauaaaaguuuaaagaagaguaacac

SEQ ID NO: 319888 - RNA, 32 nt, Homo Sapiens
cugagucuuggccugaguaucugugcagguaa

SEQ ID NO: 319889 - RNA, 32 nt, Homo Sapiens
uuuuucugucccacugagacgcagcuguguga

SEQ ID NO: 319890 - RNA, 32 nt, Homo Sapiens
gcagggcagagacaauggcugcaggaaaucau

SEQ ID NO: 319891 - RNA, 32 nt, Homo Sapiens
cugaggucaccuauguucucugcacacagagu

SEQ ID NO: 319892 - RNA, 32 nt, Homo Sapiens
cugcugccagcacaguaggucccggccagcuc

SEQ ID NO: 319893 - RNA, 32 nt, Homo Sapiens
agaaagcaaccucacggauugccccgccucaa

SEQ ID NO: 319894 - RNA, 32 nt, Homo Sapiens
uuuguugacagcggugucuggauggaccagca

SEQ ID NO: 319895 - RNA, 32 nt, Homo Sapiens
uuccucaggaugugggggccuggcagagggcu

SEQ ID NO: 319896 - RNA, 32 nt, Homo Sapiens
uuccgucuuccuucuccuucugggccugccca

SEQ ID NO: 319897 - RNA, 32 nt, Homo Sapiens
ugacuuaacaauaaaaaggauguaugguuuuu

SEQ ID NO: 319898 - RNA, 32 nt, Homo Sapiens
aaguuugaaaauuuaaugcaggcaggugugua

SEQ ID NO: 319899 - RNA, 32 nt, Homo Sapiens
gguuuccucucccaggcucacccaggcucugc

SEQ ID NO: 319900 - RNA, 32 nt, Homo Sapiens
acgcgccccccgcucgagccucugugaugaag

SEQ ID NO: 319901 - RNA, 32 nt, Homo Sapiens
ggcugcugaacaggauguccucggacgacagg

SEQ ID NO: 319902 - RNA, 32 nt, Homo Sapiens
uccuuggcccuucuggccccagcugugaacuc

SEQ ID NO: 319903 - RNA, 32 nt, Homo Sapiens
uccgccgccggcggcccuuccuggcgcgaggc

SEQ ID NO: 319904 - RNA, 32 nt, Homo Sapiens
cauuucuguucccagaggagccaggccugcag

SEQ ID NO: 319905 - RNA, 32 nt, Homo Sapiens
ccgucccaaauaaauaaacauaaaaauaaagg

SEQ ID NO: 319906 - RNA, 32 nt, Homo Sapiens
ccuguccgccuggcgcugcucucgggccacua

SEQ ID NO: 319907 - RNA, 32 nt, Homo Sapiens
caaaaguagucguccgccccucacgcccucuc

SEQ ID NO: 319908 - RNA, 32 nt, Homo Sapiens
uggugagugcugccuccacaccuggcugcaug

SEQ ID NO: 319909 - RNA, 32 nt, Homo Sapiens
aggcugcugccuggcuggcccggaguccuccc

SEQ ID NO: 319910 - RNA, 32 nt, Homo Sapiens
uguggauaucugcuuaguguuaccacauggua

SEQ ID NO: 319911 - RNA, 32 nt, Homo Sapiens
uccgaucagaccccaaccaugcugcaugugua

SEQ ID NO: 319912 - RNA, 31 nt, Homo Sapiens
ucaauaaauguuucaccuuugugcauuugug

SEQ ID NO: 319913 - RNA, 31 nt, Homo Sapiens
uacucuaaauaaaaauaccacuguuacagau

SEQ ID NO: 319914 - RNA, 32 nt, Homo Sapiens
acugugagcugcuuguccccauccugcggccg

SEQ ID NO: 319915 - RNA, 32 nt, Homo Sapiens
acacccagcugccugagacccuccuucaaccu

SEQ ID NO: 319916 - RNA, 31 nt, Homo Sapiens
acguggcggcacugccccccauuauccacca

SEQ ID NO: 319917 - RNA, 32 nt, Homo Sapiens
gcucccauuaaaauauuauuuaaaauacaaua

SEQ ID NO: 319918 - RNA, 32 nt, Homo Sapiens
uccaauguuuuaaaugaauugcuuccuacuag

SEQ ID NO: 319919 - RNA, 32 nt, Homo Sapiens
cgccgcaggaggagcaggcgguaccuggacgg

SEQ ID NO: 319920 - RNA, 32 nt, Homo Sapiens
uucaccccacuuuaccuugagcuuggaaguag

SEQ ID NO: 319921 - RNA, 32 nt, Homo Sapiens
gcgggcacaggccaacuaagccaggcagggcu

SEQ ID NO: 319922 - RNA, 32 nt, Homo Sapiens
ggcacccacccccaccaagggaagacugcccc

SEQ ID NO: 319923 - RNA, 32 nt, Homo Sapiens
ccuggacuucauuugcagaaugaggucauagu

SEQ ID NO: 319924 - RNA, 32 nt, Homo Sapiens
augucucccugugcugauacaagcaugaacuu

SEQ ID NO: 319925 - RNA, 32 nt, Homo Sapiens
cccauuuaauaaaagaauauguaaacugaaca

SEQ ID NO: 319926 - RNA, 32 nt, Homo Sapiens
auguuuccauucuccugugaauuuuaacuuga

SEQ ID NO: 319927 - RNA, 32 nt, Homo Sapiens
aucaggcccuguauaagaucuauugaaucaga

SEQ ID NO: 319928 - RNA, 32 nt, Homo Sapiens
uaguuaaggaacagacaaaaccaucauuauau

SEQ ID NO: 319929 - RNA, 32 nt, Homo Sapiens
uguuugauccugagacaccuguagauugaguu

SEQ ID NO: 319930 - RNA, 32 nt, Homo Sapiens
ggggggggcuuuuuuucuuuuuccggaaaauc

SEQ ID NO: 319931 - RNA, 32 nt, Homo Sapiens
cgccuguaaucccagcacuuugggaggccagg

SEQ ID NO: 319932 - RNA, 32 nt, Homo Sapiens
acacacauggcugaugucacauugaaaaugug

SEQ ID NO: 319933 - RNA, 32 nt, Homo Sapiens
ccagacauguauuauguuuucuuucuguggga

SEQ ID NO: 319934 - RNA, 32 nt, Homo Sapiens
uuagaguacuuaugaucucaugugguacauuu

SEQ ID NO: 319935 - RNA, 32 nt, Homo Sapiens
caccagugccgcugcgcgggagcuagggcugu

SEQ ID NO: 319936 - RNA, 32 nt, Homo Sapiens
gauuggucgaggggcagcacaggguggugcag

SEQ ID NO: 319937 - RNA, 32 nt, Homo Sapiens
ucgaauaucugguuuuaaaugauagagguuuu

SEQ ID NO: 319938 - RNA, 32 nt, Homo Sapiens
uugacuuucgaaacaaacagacuugcuguugc

SEQ ID NO: 319939 - RNA, 32 nt, Homo Sapiens
ugguuucucucauagaggcauuaacuauacug

SEQ ID NO: 319940 - RNA, 32 nt, Homo Sapiens
auuuauuaauaaacugcaucugaaauaauuaa

SEQ ID NO: 319941 - RNA, 32 nt, Homo Sapiens
ucuauuugacauuuuccauuaaaaguuauaua

SEQ ID NO: 319942 - RNA, 32 nt, Homo Sapiens
ccgcuugcgcuuggccgaagcugcuggguccc

SEQ ID NO: 319943 - RNA, 32 nt, Homo Sapiens
uuauaauagauucuuuuuuuuaauuuugugag

SEQ ID NO: 319944 - RNA, 32 nt, Homo Sapiens
ggugccaucauucaagauaacaugcugaucac

SEQ ID NO: 319945 - RNA, 32 nt, Homo Sapiens
ucauaaaugucuggccuggagcuccaaaauca

SEQ ID NO: 319946 - RNA, 32 nt, Homo Sapiens
augguguauaauuugaagaguuugucauacaa

SEQ ID NO: 319947 - RNA, 32 nt, Homo Sapiens
agaauuaaaggaauggggaagaaggacuuggg

SEQ ID NO: 319948 - RNA, 32 nt, Homo Sapiens
gauuacagcuugaguucugucaccccaucccc

SEQ ID NO: 319949 - RNA, 32 nt, Homo Sapiens
agacuggguucucgcucuccccggcucugcug

SEQ ID NO: 319950 - RNA, 32 nt, Homo Sapiens
guuaauaaacauuguacuguucuuaaaaaaaa

SEQ ID NO: 319951 - RNA, 32 nt, Homo Sapiens
ugcuggugcagggcuggugggcggggccaggg

SEQ ID NO: 319952 - RNA, 32 nt, Homo Sapiens
uuguuucaacauuuuaaacaaacagugguuau

SEQ ID NO: 319953 - RNA, 32 nt, Homo Sapiens
gaugcuggacauuugaggagccgucuuucuug

SEQ ID NO: 319954 - RNA, 32 nt, Homo Sapiens
augucuuucccucucucugcauagccagauuu

SEQ ID NO: 319955 - RNA, 32 nt, Homo Sapiens
ccaugucugcggccaugagggagagguucgac

SEQ ID NO: 319956 - RNA, 32 nt, Homo Sapiens
ggugaggccccggccucgugccgucgcucuuc

SEQ ID NO: 319957 - RNA, 28 nt, Homo Sapiens
gcauugagggguuaacauuaggcuggga

SEQ ID NO: 319958 - RNA, 32 nt, Homo Sapiens
cagauuccggggugggggguggggggauggug

SEQ ID NO: 319959 - RNA, 32 nt, Homo Sapiens
gccauuccuuaucccacccccacccgaucaua

SEQ ID NO: 319960 - RNA, 32 nt, Homo Sapiens
ucuuccugcuggugcagguacacacacacaca

SEQ ID NO: 319961 - RNA, 32 nt, Homo Sapiens
ucaacgcaccgcgcgcccaagggcaccagcga

SEQ ID NO: 319962 - RNA, 32 nt, Homo Sapiens
agaacccaucccucugguggguaccucuggca

SEQ ID NO: 319963 - RNA, 32 nt, Homo Sapiens
cguggaaaguugcugggcccccgcccccggcu

SEQ ID NO: 319964 - RNA, 32 nt, Homo Sapiens
cgugagcucacugucagacaagauggaagaag

SEQ ID NO: 319965 - RNA, 32 nt, Homo Sapiens
ggcggugugggggcccgggcccugcccagcua

SEQ ID NO: 319966 - RNA, 32 nt, Homo Sapiens
cccagauguauauaaacgcauauacauacaua

SEQ ID NO: 319967 - RNA, 32 nt, Homo Sapiens
aagguggguggcccaggccagggugugaacuu

SEQ ID NO: 319968 - RNA, 32 nt, Homo Sapiens
caugcccgcccuccccagguacuggguccaug

SEQ ID NO: 319969 - RNA, 32 nt, Homo Sapiens
cucugccuccuggaagaccaauugcaguacaa

SEQ ID NO: 319970 - RNA, 32 nt, Homo Sapiens
aggucugcacagagcaggcguagacccggcuu

SEQ ID NO: 319971 - RNA, 32 nt, Homo Sapiens
gccggcuccgcggaagaugccggaccaagccc

SEQ ID NO: 319972 - RNA, 32 nt, Homo Sapiens
uccuuaggccccagccugggcccagacccauc

SEQ ID NO: 319973 - RNA, 32 nt, Homo Sapiens
gacuagaaggacaauugacaaaagaacuuuaa

SEQ ID NO: 319974 - RNA, 32 nt, Homo Sapiens
uuauucuucuaaagagauuagaguuuuacuga

SEQ ID NO: 319975 - RNA, 32 nt, Homo Sapiens
ugucuaugugccuauauaugcauguuuuuauu

SEQ ID NO: 319976 - RNA, 31 nt, Homo Sapiens
ugaaucccuuucucagcucagagcaguuuua

SEQ ID NO: 319977 - RNA, 32 nt, Homo Sapiens
aucuccccgcggccgccgccgcuaccuggugc

SEQ ID NO: 319978 - RNA, 32 nt, Homo Sapiens
ccugcccccguccauccaugagccagcauccg

SEQ ID NO: 319979 - RNA, 32 nt, Homo Sapiens
gaaaugggagcccacaguacugggaaagggga

SEQ ID NO: 319980 - RNA, 32 nt, Homo Sapiens
ugugcauggaggcccuccugugcugggggaau

SEQ ID NO: 319981 - RNA, 32 nt, Homo Sapiens
gagagccggugggagagaagggagcgcagccu

SEQ ID NO: 319982 - RNA, 32 nt, Homo Sapiens
agccguaugugcuagguaggaguggagggaga

SEQ ID NO: 319983 - RNA, 32 nt, Homo Sapiens
gaccuggcucagugcuggccccucagugccca

SEQ ID NO: 319984 - RNA, 32 nt, Homo Sapiens
cguagccuuacagcacgagagcacagcccuga

SEQ ID NO: 319985 - RNA, 32 nt, Homo Sapiens
aguguggaagcagcuucagguaggugagcucg

SEQ ID NO: 319986 - RNA, 32 nt, Homo Sapiens
aaaccccagugcuacaagauguccagugccaa

SEQ ID NO: 319987 - RNA, 32 nt, Homo Sapiens
ucgaauccauuagcuacagccaucccaugaga

SEQ ID NO: 319988 - RNA, 32 nt, Homo Sapiens
cccgcgggccgcggcugccgagacaagccggu

SEQ ID NO: 319989 - RNA, 32 nt, Homo Sapiens
uaggauuuuuucugcuaucagauguguuuuca

SEQ ID NO: 319990 - RNA, 32 nt, Homo Sapiens
ccgcaccgcccggugcuccccaucugccuggc

SEQ ID NO: 319991 - RNA, 32 nt, Homo Sapiens
uuuucaacccauuuauacaaauuguuaauguu

SEQ ID NO: 319992 - RNA, 32 nt, Homo Sapiens
aguuagaggagaaaaagcuuaaugauucugau

SEQ ID NO: 319993 - RNA, 32 nt, Homo Sapiens
cuguccacugcacuccucccaccucauuuuua

SEQ ID NO: 319994 - RNA, 32 nt, Homo Sapiens
gcucgacuucuggaaacagccaucugcacagg

SEQ ID NO: 319995 - RNA, 32 nt, Homo Sapiens
uacgcagcgggcgcggggcagcugcgggccgc

SEQ ID NO: 319996 - RNA, 32 nt, Homo Sapiens
uuuguccccaucccacuguuaaguaaggugug

SEQ ID NO: 319997 - RNA, 32 nt, Homo Sapiens
gccacugcucugugcugacgggcuccgucucg

SEQ ID NO: 319998 - RNA, 32 nt, Homo Sapiens
uauuucuggcugaauagcacagaaaaguauuu

SEQ ID NO: 319999 - RNA, 32 nt, Homo Sapiens
acuuugaacgagccaucuuugcaaugccaaaa

SEQ ID NO: 320000 - RNA, 32 nt, Homo Sapiens
gcugacggucucguacgaagccggcgaggggg

SEQ ID NO: 320001 - RNA, 32 nt, Homo Sapiens
aaacgcaguacagcagaagaguuaacauuuac

SEQ ID NO: 320002 - RNA, 32 nt, Homo Sapiens
ugaaaggauguugaauuuugucaaaugcuuuu

SEQ ID NO: 320003 - RNA, 32 nt, Homo Sapiens
caauucccacuuuggcauuuuccuaacuauuc

SEQ ID NO: 320004 - RNA, 31 nt, Homo Sapiens
augaugaacauauuguaaugaugcuucugug

SEQ ID NO: 320005 - RNA, 32 nt, Homo Sapiens
uugauuuaguguuuuuaccucugucuuggcuu

SEQ ID NO: 320006 - RNA, 32 nt, Homo Sapiens
uuugauuuucuuuuuccagguucaugguccuu

SEQ ID NO: 320007 - RNA, 32 nt, Homo Sapiens
ugccugagaaagugucaugaaaaaagagcaga

SEQ ID NO: 320008 - RNA, 32 nt, Homo Sapiens
ccguuuauugcccaacacguuauucuugcugu

SEQ ID NO: 320009 - RNA, 32 nt, Homo Sapiens
ggugagggaggggacauauccuaggguuuuca

SEQ ID NO: 320010 - RNA, 32 nt, Homo Sapiens
cugcucuccagacccaggaugccggggggcaa

SEQ ID NO: 320011 - RNA, 32 nt, Homo Sapiens
agaucuaaugaagagaaggugguauuguuuga

SEQ ID NO: 320012 - RNA, 32 nt, Homo Sapiens
auuaucaagcugguugucauucauucucucuc

SEQ ID NO: 320013 - RNA, 32 nt, Homo Sapiens
ccaagcacguggucucugcgccaggcagccag

SEQ ID NO: 320014 - RNA, 32 nt, Homo Sapiens
uauuuagguuuuuacucccaguagcaagggau

SEQ ID NO: 320015 - RNA, 32 nt, Homo Sapiens
gcucugagcugagaccucuccuugaagcucca

SEQ ID NO: 320016 - RNA, 32 nt, Homo Sapiens
uccuuuguaaaaaugaauaaauuucuuuuaga

SEQ ID NO: 320017 - RNA, 32 nt, Homo Sapiens
gaggguccugggccucccuacccaggcagaga

SEQ ID NO: 320018 - RNA, 32 nt, Homo Sapiens
uuucuucaacagcaccaggugauucagcauau

SEQ ID NO: 320019 - RNA, 32 nt, Homo Sapiens
uuaaauauuagaaauagcacaaagucauggag

SEQ ID NO: 320020 - RNA, 32 nt, Homo Sapiens
ggucacagcuggaucugcuuguugcauuucca

SEQ ID NO: 320021 - RNA, 32 nt, Homo Sapiens
ugcucgcugggucuuggaugucggguucgacc

SEQ ID NO: 320022 - RNA, 31 nt, Homo Sapiens
gaggcgaugcgccucauucagaacaugugca

SEQ ID NO: 320023 - RNA, 32 nt, Homo Sapiens
cagcauaccuuguccucuggaccuccugucuu

SEQ ID NO: 320024 - RNA, 32 nt, Homo Sapiens
ucaccagaugagaagaggcccugugcauuucu

SEQ ID NO: 320025 - RNA, 32 nt, Homo Sapiens
guggaacugcacccucagcacuggagagggcg

SEQ ID NO: 320026 - RNA, 32 nt, Homo Sapiens
ccucuuucccaguccuaucuccugcuuuucua

SEQ ID NO: 320027 - RNA, 32 nt, Homo Sapiens
acaaaaacguuuuuuaaauacacgccagcucu

SEQ ID NO: 320028 - RNA, 32 nt, Homo Sapiens
accuugccccaccugggaccaucacacgugaa

SEQ ID NO: 320029 - RNA, 32 nt, Homo Sapiens
ggcaggggccccuccucugugcucccucgguc

SEQ ID NO: 320030 - RNA, 32 nt, Homo Sapiens
gaauuccacagcuccuaccaagaccaugagga

SEQ ID NO: 320031 - RNA, 32 nt, Homo Sapiens
uuauuugggggaacacaaaaccaaacagcaga

SEQ ID NO: 320032 - RNA, 32 nt, Homo Sapiens
gauugaaaacuguguaucaucucccuaggaga

SEQ ID NO: 320033 - RNA, 32 nt, Homo Sapiens
ggcucaucucugaguucucaggacccuugccc

SEQ ID NO: 320034 - RNA, 32 nt, Homo Sapiens
caaacaaaaauauauguuuuuacuuuaaagug

SEQ ID NO: 320035 - RNA, 32 nt, Homo Sapiens
aaacagccucucucaugucuaaaaaggcacag

SEQ ID NO: 320036 - RNA, 32 nt, Homo Sapiens
ggcgccggguggccgcgccggaagugccuugc

SEQ ID NO: 320037 - RNA, 32 nt, Homo Sapiens
gcgggccgccccagccaccuccgagggccaga

SEQ ID NO: 320038 - RNA, 32 nt, Homo Sapiens
uguguggaguguuucagaaauuuugaucuuaa

SEQ ID NO: 320039 - RNA, 32 nt, Homo Sapiens
cuacuucagcuuuggaugugguuaccgaguau

SEQ ID NO: 320040 - RNA, 32 nt, Homo Sapiens
cccagccugagcgucccgggcgcggagcccau

SEQ ID NO: 320041 - RNA, 32 nt, Homo Sapiens
gaagacaauagcagcauagaaaccucaaauga

SEQ ID NO: 320042 - RNA, 32 nt, Homo Sapiens
gaaaugggagcacaguacugggaaaugguagc

SEQ ID NO: 320043 - RNA, 32 nt, Homo Sapiens
aggcagaguauuuucuaacacuguaauucaac

SEQ ID NO: 320044 - RNA, 32 nt, Homo Sapiens
ggaucgagcucaccgcgccgagcgcgccggca

SEQ ID NO: 320045 - RNA, 32 nt, Homo Sapiens
uagugugaaaauauaaugggcauucugaaaac

SEQ ID NO: 320046 - RNA, 32 nt, Homo Sapiens
uggggauggaugcucugaccacagcagcugug

SEQ ID NO: 320047 - RNA, 32 nt, Homo Sapiens
uuucuuugguauauuuaggacuuagugguccu

SEQ ID NO: 320048 - RNA, 32 nt, Homo Sapiens
caauagauagagaugacaucuugaugacucuu

SEQ ID NO: 320049 - RNA, 32 nt, Homo Sapiens
accuagccggggcagcccucccugccccggga

SEQ ID NO: 320050 - RNA, 32 nt, Homo Sapiens
gacugauggcgggaccgcgcugcccgagaaag

SEQ ID NO: 320051 - RNA, 32 nt, Homo Sapiens
gggcagauacuuccugucaauaaacagaucuu

SEQ ID NO: 320052 - RNA, 32 nt, Homo Sapiens
ucugugcuucugugaucucuaugacagagcca

SEQ ID NO: 320053 - RNA, 32 nt, Homo Sapiens
ccaggaggagaugaagaucaccacugaauugc

SEQ ID NO: 320054 - RNA, 32 nt, Homo Sapiens
ucugaaacauuuccucauauguuucuagcaac

SEQ ID NO: 320055 - RNA, 32 nt, Homo Sapiens
agcuggcugacauuuaaaaacaucuuuuaaau

SEQ ID NO: 320056 - RNA, 32 nt, Homo Sapiens
uuuuuugugucggacuauguaauuguaacuau

SEQ ID NO: 320057 - RNA, 32 nt, Homo Sapiens
cucugcggccccagcccagcucccagggccgu

SEQ ID NO: 320058 - RNA, 31 nt, Homo Sapiens
cgccagcgaguccagcagggaguccagcaac

SEQ ID NO: 320059 - RNA, 32 nt, Homo Sapiens
acaucagugucugccuuucuguuuggcuucag

SEQ ID NO: 320060 - RNA, 32 nt, Homo Sapiens
gauggucacauggggaaccuccccucaucggg

SEQ ID NO: 320061 - RNA, 32 nt, Homo Sapiens
ggguuaaggauucugcagcugcuucaggcuga

SEQ ID NO: 320062 - RNA, 32 nt, Homo Sapiens
aagugcuggagucuccugaggacacgcgcguc

SEQ ID NO: 320063 - RNA, 32 nt, Homo Sapiens
cuguuauaauuucuuuuagcagacaaguuaua

SEQ ID NO: 320064 - RNA, 32 nt, Homo Sapiens
caagcugcaguagcuuccugaugccucauuca

SEQ ID NO: 320065 - RNA, 32 nt, Homo Sapiens
acccagauucugacaucagcucugccacugag

SEQ ID NO: 320066 - RNA, 32 nt, Homo Sapiens
ugcugcggugagcgcggccgggacgccgcguc

SEQ ID NO: 320067 - RNA, 32 nt, Homo Sapiens
cggacgggaccgagaccccucguagcgcauug

SEQ ID NO: 320068 - RNA, 32 nt, Homo Sapiens
ccucuccccccgccugccaccuccccccacaa

SEQ ID NO: 320069 - RNA, 32 nt, Homo Sapiens
uacaacaguagagagggaaaauccuaagacag

SEQ ID NO: 320070 - RNA, 32 nt, Homo Sapiens
cacugaaggucuucuguaaaauauaaugaagc

SEQ ID NO: 320071 - RNA, 32 nt, Homo Sapiens
gggcgugaggaagagggaaaggggaaacucua

SEQ ID NO: 320072 - RNA, 32 nt, Homo Sapiens
auucugacagagauuucuuuuuguuuuguuau

SEQ ID NO: 320073 - RNA, 32 nt, Homo Sapiens
caacauccaaacauuucccagaacccaugugc

SEQ ID NO: 320074 - RNA, 32 nt, Homo Sapiens
gggccagaaggaguugcugagaaggagcugug

SEQ ID NO: 320075 - RNA, 32 nt, Homo Sapiens
ggcaagccuuugcaugccgucagucuggaguu

SEQ ID NO: 320076 - RNA, 32 nt, Homo Sapiens
uuguggccaaucuggaaaacuccugguuugag

SEQ ID NO: 320077 - RNA, 32 nt, Homo Sapiens
uucugaaggcuuucauaucuuuauuuugcauu

SEQ ID NO: 320078 - RNA, 32 nt, Homo Sapiens
cuuccugcaggcguggaaaccauggugcucac

SEQ ID NO: 320079 - RNA, 32 nt, Homo Sapiens
uuguuuuguuuuuguaauagcuuaacaaauaa

SEQ ID NO: 320080 - RNA, 32 nt, Homo Sapiens
aaugucacagagacuaguucagagcaauuagu

SEQ ID NO: 320081 - RNA, 32 nt, Homo Sapiens
auaauuucuuucguuugguguagguuuuagag

SEQ ID NO: 320082 - RNA, 32 nt, Homo Sapiens
uuuugaaguauuuugauuaucauccugguuaa

SEQ ID NO: 320083 - RNA, 32 nt, Homo Sapiens
acuauuuucacacacacacacacacacacaca

SEQ ID NO: 320084 - RNA, 32 nt, Homo Sapiens
uggagcugagccagcaagggggaucgugagga

SEQ ID NO: 320085 - RNA, 32 nt, Homo Sapiens
uuggggagggcuugacaggcuagggggcuggc

SEQ ID NO: 320086 - RNA, 32 nt, Homo Sapiens
agcuuuuuccuuaaccuuuaccagcuaacuca

SEQ ID NO: 320087 - RNA, 32 nt, Homo Sapiens
ccauuuguguaucuccuuuggagaggagucua

SEQ ID NO: 320088 - RNA, 32 nt, Homo Sapiens
agaugucagaaagcgcuuguauuuuaaacaac

SEQ ID NO: 320089 - RNA, 32 nt, Homo Sapiens
uucugccuuguccacugggggaccagcccugc

SEQ ID NO: 320090 - RNA, 32 nt, Homo Sapiens
ggaugcagggacgcgcgacgccggccccgguc

SEQ ID NO: 320091 - RNA, 32 nt, Homo Sapiens
auuggggucccugucgcccacccccggcaauc

SEQ ID NO: 320092 - RNA, 32 nt, Homo Sapiens
ggcagcaguuuuccuuuuuuuaaacuuaaaua

SEQ ID NO: 320093 - RNA, 32 nt, Homo Sapiens
uuuuaguagagaugggguuuugccauguugcc

SEQ ID NO: 320094 - RNA, 32 nt, Homo Sapiens
ggcuauuccugcuuauaaugaaauauuuacau

SEQ ID NO: 320095 - RNA, 32 nt, Homo Sapiens
cucguccccgccggcgucuguggccgccaagg

SEQ ID NO: 320096 - RNA, 32 nt, Homo Sapiens
aaauaucuagcuauuuuaauagauagauaccu

SEQ ID NO: 320097 - RNA, 32 nt, Homo Sapiens
cccaggaguuuaggcauucuaagucacaggau

SEQ ID NO: 320098 - RNA, 32 nt, Homo Sapiens
ggccagguuccuugcccuccccaccccauccc

SEQ ID NO: 320099 - RNA, 32 nt, Homo Sapiens
gagcaugagaagcucacgcagagaacauucug

SEQ ID NO: 320100 - RNA, 32 nt, Homo Sapiens
ggggcuuggaucugcuuugccauggugggugg

SEQ ID NO: 320101 - RNA, 32 nt, Homo Sapiens
cugaaauagucugccacguuauuguuaucucc

SEQ ID NO: 320102 - RNA, 32 nt, Homo Sapiens
ucuaggaugaguuugucucagauggaaaugag

SEQ ID NO: 320103 - RNA, 32 nt, Homo Sapiens
ugggugggguggcaaugggaggacaggucaga

SEQ ID NO: 320104 - RNA, 32 nt, Homo Sapiens
gaaagacuccaaagguggaacucugcuucucc

SEQ ID NO: 320105 - RNA, 32 nt, Homo Sapiens
ucaucacaaugaugauauagggauauucauau

SEQ ID NO: 320106 - RNA, 32 nt, Homo Sapiens
acaagaacugaugcuccuugggugcugcugcu

SEQ ID NO: 320107 - RNA, 32 nt, Homo Sapiens
ucacccagccugggucucuacugagcugccca

SEQ ID NO: 320108 - RNA, 32 nt, Homo Sapiens
cugcucuucucuccccagcccccucccaccgc

SEQ ID NO: 320109 - RNA, 32 nt, Homo Sapiens
auuguguacacaauaaaauuguagccacucau

SEQ ID NO: 320110 - RNA, 32 nt, Homo Sapiens
gcauagcuccagcuggaggguaccuuuuaagc

SEQ ID NO: 320111 - RNA, 32 nt, Homo Sapiens
caaagcauguuuuaagcugcaaugcaguaguc

SEQ ID NO: 320112 - RNA, 32 nt, Homo Sapiens
gaaaauaacucuauguuguuuauuuucaguga

SEQ ID NO: 320113 - RNA, 32 nt, Homo Sapiens
cgcacucgucaggcccucugcugcaagauguc

SEQ ID NO: 320114 - RNA, 32 nt, Homo Sapiens
ggcaguuccccauugcagcaucaccuacuugu

SEQ ID NO: 320115 - RNA, 32 nt, Homo Sapiens
guccgcuguccucauucugcggccucagcaaa

SEQ ID NO: 320116 - RNA, 32 nt, Homo Sapiens
guaggauaaucacacuuagaaaacaucugcuc

SEQ ID NO: 320117 - RNA, 32 nt, Homo Sapiens
gcuauauagagaaaaggaaaccacugaaucaa

SEQ ID NO: 320118 - RNA, 32 nt, Homo Sapiens
aagagaacguuccauauaaugcagcuaaccaa

SEQ ID NO: 320119 - RNA, 32 nt, Homo Sapiens
aacuacggcguagaaaacaugaauuuauauug

SEQ ID NO: 320120 - RNA, 32 nt, Homo Sapiens
aaaugaagaauauuuuauuaucuaggauuuua

SEQ ID NO: 320121 - RNA, 32 nt, Homo Sapiens
gucuuuucucucuguuaagaucuuguacuugu

SEQ ID NO: 320122 - RNA, 32 nt, Homo Sapiens
gccuugcuucuccagauuuacauccugcagag

SEQ ID NO: 320123 - RNA, 32 nt, Homo Sapiens
cagacuaauauauuaauauauaucugcugucc

SEQ ID NO: 320124 - RNA, 32 nt, Homo Sapiens
agcucuaagcaaauaaugauuguauacauauu

SEQ ID NO: 320125 - RNA, 32 nt, Homo Sapiens
uauaaauaaaaauuauauaaaaaugugaaaaa

SEQ ID NO: 320126 - RNA, 32 nt, Homo Sapiens
uauucagaaaaagaauugaaaacucuucuuau

SEQ ID NO: 320127 - RNA, 32 nt, Homo Sapiens
gcucucaugggccccaggaaguccagggacag

SEQ ID NO: 320128 - RNA, 32 nt, Homo Sapiens
auuuuaacaauuuuuaaguauacaguucagug

SEQ ID NO: 320129 - RNA, 32 nt, Homo Sapiens
aaguaguagugugacuaauuucuuauguuaua

SEQ ID NO: 320130 - RNA, 32 nt, Homo Sapiens
augggaagaaaacagucauaugcugaaucuuc

SEQ ID NO: 320131 - RNA, 32 nt, Homo Sapiens
guaggagucaaucccaccagcauugacucagu

SEQ ID NO: 320132 - RNA, 32 nt, Homo Sapiens
uuaaaaguaagccuuauuguuacaaugcacag

SEQ ID NO: 320133 - RNA, 32 nt, Homo Sapiens
guuauugcugaauauaaugugacacuaugguc

SEQ ID NO: 320134 - RNA, 32 nt, Homo Sapiens
gugucagagucuuuguagcuuugaaagucacc

SEQ ID NO: 320135 - RNA, 32 nt, Homo Sapiens
ucauggaagcuuguagggacuagccaugucag

SEQ ID NO: 320136 - RNA, 32 nt, Homo Sapiens
uucuguauaauuaacauagguugucucauggc

SEQ ID NO: 320137 - RNA, 32 nt, Homo Sapiens
cugcccacuuggcuauagggaaugucauaaug

SEQ ID NO: 320138 - RNA, 32 nt, Homo Sapiens
auuuuaauuuaaagaaagcaacugaaauugaa

SEQ ID NO: 320139 - RNA, 32 nt, Homo Sapiens
ccccugcgucccgcgcaccucggggccggucc

SEQ ID NO: 320140 - RNA, 32 nt, Homo Sapiens
uuccauccaugucguuuuaaugagauguuucc

SEQ ID NO: 320141 - RNA, 32 nt, Homo Sapiens
ugagugucucuagggugauacgugggugagaa

SEQ ID NO: 320142 - RNA, 32 nt, Homo Sapiens
ccugcagcccgguccagguccaggcgugugca

SEQ ID NO: 320143 - RNA, 32 nt, Homo Sapiens
ucccuggcgccccgccuugggcggcggcgagc

SEQ ID NO: 320144 - RNA, 32 nt, Homo Sapiens
cugcgcugugcacaccucgcccgggggaggac

SEQ ID NO: 320145 - RNA, 32 nt, Homo Sapiens
aggagcaagagguaaacacgaaaccugauuug

SEQ ID NO: 320146 - RNA, 32 nt, Homo Sapiens
aacagcccggaccugaugugaaaggaccacgg

SEQ ID NO: 320147 - RNA, 32 nt, Homo Sapiens
accuuguaauacuacuuuuauauuucagaggu

SEQ ID NO: 320148 - RNA, 32 nt, Homo Sapiens
guuuuaacugauagaagcugugcaggcagacu

SEQ ID NO: 320149 - RNA, 32 nt, Homo Sapiens
uggggugaaacacccacauggcagccugcuag

SEQ ID NO: 320150 - RNA, 32 nt, Homo Sapiens
gugugucuuuugcuaaauaugcccuuuuuaua

SEQ ID NO: 320151 - RNA, 32 nt, Homo Sapiens
aucauuucccaaaauucuaagagcagcagcau

SEQ ID NO: 320152 - RNA, 32 nt, Homo Sapiens
aaggcugccacuugggagcaucaggcuccuca

SEQ ID NO: 320153 - RNA, 31 nt, Homo Sapiens
ccgggagaggcggugugggggcccgggcccu

SEQ ID NO: 320154 - RNA, 32 nt, Homo Sapiens
uguuucugaagucuucaguuaaguuugaguuu

SEQ ID NO: 320155 - RNA, 32 nt, Homo Sapiens
ucugacagcucccagcugggagaaaccaacau

SEQ ID NO: 320156 - RNA, 32 nt, Homo Sapiens
gaagaugaugacugaagggacucgggacugaa

SEQ ID NO: 320157 - RNA, 31 nt, Homo Sapiens
aguggcccauggagaaagaggcucuuauuaa

SEQ ID NO: 320158 - RNA, 32 nt, Homo Sapiens
gggccccuccuccccugguccuccccccacga

SEQ ID NO: 320159 - RNA, 32 nt, Homo Sapiens
aagucugagauuuugcuacacucuucacccga

SEQ ID NO: 320160 - RNA, 32 nt, Homo Sapiens
agauuuucugcagucacccauacuuaacauuu

SEQ ID NO: 320161 - RNA, 32 nt, Homo Sapiens
augauuuucccuacacuucucccuggcccagg

SEQ ID NO: 320162 - RNA, 32 nt, Homo Sapiens
uacaaugcccccaaucacccgccccgccccga

SEQ ID NO: 320163 - RNA, 32 nt, Homo Sapiens
agucagagagcagcggcugggcagugcaacuc

SEQ ID NO: 320164 - RNA, 32 nt, Homo Sapiens
auuaguuuaucauuauauucuaaucuugaaua

SEQ ID NO: 320165 - RNA, 32 nt, Homo Sapiens
caucucuauuuaagaaagaaaaagaccacugg

SEQ ID NO: 320166 - RNA, 32 nt, Homo Sapiens
guuuaaagaagucauuuuggggccaggcacgg

SEQ ID NO: 320167 - RNA, 32 nt, Homo Sapiens
auguuaaaagguuaaacuuauggcuguuuuua

SEQ ID NO: 320168 - RNA, 32 nt, Homo Sapiens
auguuucuucauguuaaagguauaagccuuuc

SEQ ID NO: 320169 - RNA, 32 nt, Homo Sapiens
agccuguugguagaugcugggacagcauuaga

SEQ ID NO: 320170 - RNA, 32 nt, Homo Sapiens
cuccggggccgcguccuccucuccuccggaaa

SEQ ID NO: 320171 - RNA, 32 nt, Homo Sapiens
uggucagguuguuccuuggcuaagagggcagu

SEQ ID NO: 320172 - RNA, 32 nt, Homo Sapiens
gaggaggaggaagaggacuucucacagcagcc

SEQ ID NO: 320173 - RNA, 32 nt, Homo Sapiens
uauuuauccugaugcuuucccucccccugccc

SEQ ID NO: 320174 - RNA, 32 nt, Homo Sapiens
uggucagcucuuucagcauggugcaggugugg

SEQ ID NO: 320175 - RNA, 32 nt, Homo Sapiens
aaaacagccaaauuauuuuuauuauuuuuaca

SEQ ID NO: 320176 - RNA, 32 nt, Homo Sapiens
aaacaaagaaacaaaaguuuuuccuaaaaaua

SEQ ID NO: 320177 - RNA, 32 nt, Homo Sapiens
caaagguucaggaaugcccaaaucacaucccu

SEQ ID NO: 320178 - RNA, 32 nt, Homo Sapiens
agugaaggcuuuugagguuuauaaaaugguag

SEQ ID NO: 320179 - RNA, 32 nt, Homo Sapiens
gaauggccuugaugaagaugacaggcauggcc

SEQ ID NO: 320180 - RNA, 32 nt, Homo Sapiens
aggaaggugcguccucaccaugcuggauggug

SEQ ID NO: 320181 - RNA, 32 nt, Homo Sapiens
acugcggcugaauugcccagggaugaggcaga

SEQ ID NO: 320182 - RNA, 30 nt, Homo Sapiens
gaaccaugaaccccaacugcgcccggugcg

SEQ ID NO: 320183 - RNA, 32 nt, Homo Sapiens
uggcccuuucccugcucaacccuccauccuag

SEQ ID NO: 320184 - RNA, 32 nt, Homo Sapiens
caguuccgcaagaaccgugggcgacaguuaug

SEQ ID NO: 320185 - RNA, 32 nt, Homo Sapiens
ucaugggaaugggguuuggagcagcccugccc

SEQ ID NO: 320186 - RNA, 32 nt, Homo Sapiens
gggagccggccgccggcagggacgacgccugu

SEQ ID NO: 320187 - RNA, 32 nt, Homo Sapiens
gguuauuuauuaugaaaacaacaugcucuuaa

SEQ ID NO: 320188 - RNA, 32 nt, Homo Sapiens
uuagugaagcuacugccuuugccgccagcgca

SEQ ID NO: 320189 - RNA, 32 nt, Homo Sapiens
aauguaagagcauguagaagccaacauauaaa

SEQ ID NO: 320190 - RNA, 32 nt, Homo Sapiens
ugacacgagagaaaaguaagagcugguucuaa

SEQ ID NO: 320191 - RNA, 32 nt, Homo Sapiens
agggaaaaucauuggugcuuggagcauagaag

SEQ ID NO: 320192 - RNA, 32 nt, Homo Sapiens
cauuguagaagguauguaaaucaucaugguua

SEQ ID NO: 320193 - RNA, 32 nt, Homo Sapiens
gguaaccagagccacauccuuuaucgaggaag

SEQ ID NO: 320194 - RNA, 32 nt, Homo Sapiens
uugcagaauuuaauacagaucuuuucagcugu

SEQ ID NO: 320195 - RNA, 32 nt, Homo Sapiens
uaugcaguggaaaggcaaaaaauucaugugac

SEQ ID NO: 320196 - RNA, 32 nt, Homo Sapiens
uuugccaaaaaugaguguagcauuguuuaaac

SEQ ID NO: 320197 - RNA, 32 nt, Homo Sapiens
aaauaguuaguagaucacuaugguauuucaau

SEQ ID NO: 320198 - RNA, 32 nt, Homo Sapiens
ugucuagaguucccagcccgcuuaaggaagga

SEQ ID NO: 320199 - RNA, 32 nt, Homo Sapiens
cauuccggacuggcagaagcauugccuggacu

SEQ ID NO: 320200 - RNA, 32 nt, Homo Sapiens
cagccuguggccuuucuuccaaggcuggaguu

SEQ ID NO: 320201 - RNA, 32 nt, Homo Sapiens
agccacugcacccacccaagacaagugauuuu

SEQ ID NO: 320202 - RNA, 32 nt, Homo Sapiens
uaccccugccccaccgcacccuggacuacugc

SEQ ID NO: 320203 - RNA, 32 nt, Homo Sapiens
uucaccgcugcuggggcacacacacacacaug

SEQ ID NO: 320204 - RNA, 32 nt, Homo Sapiens
uuuaaacaaugccacagugucuggcagggagc

SEQ ID NO: 320205 - RNA, 32 nt, Homo Sapiens
uggcaugcuggugguggcgggugcugguggga

SEQ ID NO: 320206 - RNA, 32 nt, Homo Sapiens
aauagauauauucuaauaggauagaaaguuaa

SEQ ID NO: 320207 - RNA, 32 nt, Homo Sapiens
ucugcagcuccuuuugugccaagcccguuccc

SEQ ID NO: 320208 - RNA, 32 nt, Homo Sapiens
cucaacugguucaaaauugaaguugagcaagc

SEQ ID NO: 320209 - RNA, 32 nt, Homo Sapiens
ggaugcugcggugagcgcggccgggacgccgc

SEQ ID NO: 320210 - RNA, 31 nt, Homo Sapiens
ugccucacaaagaaggagauaaaugggucca

SEQ ID NO: 320211 - RNA, 32 nt, Homo Sapiens
cacucagggcuggcccggggaguccccgugug

SEQ ID NO: 320212 - RNA, 32 nt, Homo Sapiens
cgugggggccagucaggcugcagaggcaccuc

SEQ ID NO: 320213 - RNA, 32 nt, Homo Sapiens
gcaggaggaggacaucacaggaugggaaauua

SEQ ID NO: 320214 - RNA, 30 nt, Homo Sapiens
cccagggcgcccgggcucuggcuuccucau

SEQ ID NO: 320215 - RNA, 32 nt, Homo Sapiens
ggagaggucaacauggcaagcacuggaggugg

SEQ ID NO: 320216 - RNA, 32 nt, Homo Sapiens
cguaccuggcccggcgcggcgacugcucuccg

SEQ ID NO: 320217 - RNA, 32 nt, Homo Sapiens
aaagcacaccucauucagcaucagaggcccca

SEQ ID NO: 320218 - RNA, 32 nt, Homo Sapiens
ugugaucucuguuugcagaaaguggguacggc

SEQ ID NO: 320219 - RNA, 32 nt, Homo Sapiens
caucugaucccaguaauaacuaauggauguca

SEQ ID NO: 320220 - RNA, 32 nt, Homo Sapiens
uuaugucuuuugcuauggagcaaauccaggaa

SEQ ID NO: 320221 - RNA, 32 nt, Homo Sapiens
uguuaggacuccgaugaguuugggacuucagg

SEQ ID NO: 320222 - RNA, 32 nt, Homo Sapiens
accaugcuguguuuaaauguuacuuguuuuca

SEQ ID NO: 320223 - RNA, 32 nt, Homo Sapiens
ugugcuuuuuauuucuggcucuucggaugucu

SEQ ID NO: 320224 - RNA, 32 nt, Homo Sapiens
aaauccucagcccgggugcaucaggccagagc

SEQ ID NO: 320225 - RNA, 32 nt, Homo Sapiens
cuagaaccaagggagcucuuucagucuccgcu

SEQ ID NO: 320226 - RNA, 32 nt, Homo Sapiens
gucaaccuggccguccggggcccccaggcccc

SEQ ID NO: 320227 - RNA, 32 nt, Homo Sapiens
ggcccuuaaaaacauucucaccacccccauag

SEQ ID NO: 320228 - RNA, 32 nt, Homo Sapiens
uggagaaugaauuuggauacaagcugugcauc

SEQ ID NO: 320229 - RNA, 32 nt, Homo Sapiens
cugaagggcaguggagauuacugccaggcaca

SEQ ID NO: 320230 - RNA, 32 nt, Homo Sapiens
cuuggccaggagcagagcugccuguaaacacg

SEQ ID NO: 320231 - RNA, 32 nt, Homo Sapiens
aauaaaauauucaucauuuuuacaaaaaaaaa

SEQ ID NO: 320232 - RNA, 30 nt, Homo Sapiens
aaauaguggggcucugaugaguuaguaggg

SEQ ID NO: 320233 - RNA, 26 nt, Homo Sapiens
gauggaggcgcugcucuccaccccca

SEQ ID NO: 320234 - RNA, 32 nt, Homo Sapiens
agagaaaagaaaugguuucuuuuuguacuuuc

SEQ ID NO: 320235 - RNA, 32 nt, Homo Sapiens
aaacaauucuauuuacaauagcauccaaaaua

SEQ ID NO: 320236 - RNA, 32 nt, Homo Sapiens
cuggggcaaaaauaaaucugaaccaaacugac

SEQ ID NO: 320237 - RNA, 32 nt, Homo Sapiens
uucaggacuacacgaggcgcugcggcuccacc

SEQ ID NO: 320238 - RNA, 32 nt, Homo Sapiens
gccaccacgcccagcccaguccagcucuuaua

SEQ ID NO: 320239 - RNA, 32 nt, Homo Sapiens
acacugcagcagccacauccauacacacacgc

SEQ ID NO: 320240 - RNA, 32 nt, Homo Sapiens
gggcugggcggggcgccggugcuaguggaacg

SEQ ID NO: 320241 - RNA, 32 nt, Homo Sapiens
guuugauuuucuuguaucugguucuacuccca

SEQ ID NO: 320242 - RNA, 32 nt, Homo Sapiens
cgguugccgcggucgguggucguuauggauuc

SEQ ID NO: 320243 - RNA, 32 nt, Homo Sapiens
gggcuuguguggcucagggcugccggggagac

SEQ ID NO: 320244 - RNA, 32 nt, Homo Sapiens
uccauccauuuaacagauauuuauugagugcc

SEQ ID NO: 320245 - RNA, 29 nt, Homo Sapiens
gaaugucauuucugaugaaagcuggcaug

SEQ ID NO: 320246 - RNA, 32 nt, Homo Sapiens
agagucuggggcuccaguggggcccgccuaau

SEQ ID NO: 320247 - RNA, 32 nt, Homo Sapiens
ccugccauaaaugaaauugaaaugguagaaug

SEQ ID NO: 320248 - RNA, 32 nt, Homo Sapiens
gggacgauaagaggggcgggggcgggguccug

SEQ ID NO: 320249 - RNA, 32 nt, Homo Sapiens
aacucugaauuaacacaguauucauucaucug

SEQ ID NO: 320250 - RNA, 32 nt, Homo Sapiens
guugaaacacuauauuuaucuugucaguuuuu

SEQ ID NO: 320251 - RNA, 32 nt, Homo Sapiens
ugggaugcauaucaaauuuuuaaaagaaggcu

SEQ ID NO: 320252 - RNA, 32 nt, Homo Sapiens
accccgccccgccgcgcaacuaccuccucccu

SEQ ID NO: 320253 - RNA, 32 nt, Homo Sapiens
uauuucuaaaauagugauacagucagaggccu

SEQ ID NO: 320254 - RNA, 32 nt, Homo Sapiens
auaucgacaaugaagaugaucauauuucauuu

SEQ ID NO: 320255 - RNA, 32 nt, Homo Sapiens
uuuucagugugagaucucuggauucuuucaca

SEQ ID NO: 320256 - RNA, 32 nt, Homo Sapiens
cuaggccaacguggugaaaccccgucacuacu

SEQ ID NO: 320257 - RNA, 32 nt, Homo Sapiens
acucagugguggccuuccaagaggccaggcau

SEQ ID NO: 320258 - RNA, 32 nt, Homo Sapiens
cugccuggcucccacacagccaugcauuguca

SEQ ID NO: 320259 - RNA, 32 nt, Homo Sapiens
cuggagccacacagcuuggggggugucuccca

SEQ ID NO: 320260 - RNA, 32 nt, Homo Sapiens
agugguccaucaucgugcacucgucauacuca

SEQ ID NO: 320261 - RNA, 32 nt, Homo Sapiens
uuucucauuauguuuaucaaaaaacaacugua

SEQ ID NO: 320262 - RNA, 32 nt, Homo Sapiens
gacaguauuuuuccuauuaaguggugcagucu

SEQ ID NO: 320263 - RNA, 32 nt, Homo Sapiens
aaaaccagcuugccuccaggaccaccugcuug

SEQ ID NO: 320264 - RNA, 32 nt, Homo Sapiens
cuucccgcugcagugucuauggagcgaggcua

SEQ ID NO: 320265 - RNA, 32 nt, Homo Sapiens
uuagauaguaguagagacaguauccuguuaca

SEQ ID NO: 320266 - RNA, 32 nt, Homo Sapiens
caucgcccauucucucuccauaccacccccca

SEQ ID NO: 320267 - RNA, 32 nt, Homo Sapiens
agcugagacuccuggggaaugacguuggggug

SEQ ID NO: 320268 - RNA, 32 nt, Homo Sapiens
uauucaaauaggaaaaauuacuuuacagguug

SEQ ID NO: 320269 - RNA, 32 nt, Homo Sapiens
acagagugaugaugcgggugugcugguuggug

SEQ ID NO: 320270 - RNA, 32 nt, Homo Sapiens
aucacagacuggauaacuucuaaccaauaguu

SEQ ID NO: 320271 - RNA, 32 nt, Homo Sapiens
gugguccucggugguuaucugcagcuuguuaa

SEQ ID NO: 320272 - RNA, 32 nt, Homo Sapiens
cgcaggcccucccggguccugaccagccucug

SEQ ID NO: 320273 - RNA, 32 nt, Homo Sapiens
ucuaggcagagagagcaacaugugcaacacau

SEQ ID NO: 320274 - RNA, 31 nt, Homo Sapiens
cagccugggcgacagagcaagacucagucuc

SEQ ID NO: 320275 - RNA, 32 nt, Homo Sapiens
acuaugguuauuggcuagaaauccugaguuuu

SEQ ID NO: 320276 - RNA, 32 nt, Homo Sapiens
aaaguuuagaaugugugucaauuuauaaugau

SEQ ID NO: 320277 - RNA, 32 nt, Homo Sapiens
cagaauauguaacaagcagaggacaaauagac

SEQ ID NO: 320278 - RNA, 32 nt, Homo Sapiens
ggacagccuucagcugcaccccggacgggcgg

SEQ ID NO: 320279 - RNA, 32 nt, Homo Sapiens
aauuggagaauuuuaauguuuuucauuuauca

SEQ ID NO: 320280 - RNA, 32 nt, Homo Sapiens
uuagucauuguaaaaugccagccaguuuguuu

SEQ ID NO: 320281 - RNA, 32 nt, Homo Sapiens
cuggagaggaacucuauaguugugaagaaugu

SEQ ID NO: 320282 - RNA, 32 nt, Homo Sapiens
cagaauagaaaacucagacaugaagcugcaca

SEQ ID NO: 320283 - RNA, 32 nt, Homo Sapiens
caucgugugggaagaacggaguaacgagucuc

SEQ ID NO: 320284 - RNA, 32 nt, Homo Sapiens
acauaauucuaaaauaucccuuaggucaguca

SEQ ID NO: 320285 - RNA, 32 nt, Homo Sapiens
cucuugcagcuagaguugacucagaagccgaa

SEQ ID NO: 320286 - RNA, 32 nt, Homo Sapiens
uugaguuccuccaagucccagaaccccaagaa

SEQ ID NO: 320287 - RNA, 32 nt, Homo Sapiens
ccacuguccagaagcugccuuugagucaguuc

SEQ ID NO: 320288 - RNA, 32 nt, Homo Sapiens
aaccgcgggcuccguccaacccggcccgacau

SEQ ID NO: 320289 - RNA, 32 nt, Homo Sapiens
aauaaaaagugccagauucucuaguaaaacaa

SEQ ID NO: 320290 - RNA, 32 nt, Homo Sapiens
ccacuucaaggaucugaaaguauuuuacaguu

SEQ ID NO: 320291 - RNA, 32 nt, Homo Sapiens
ccaagguacuguguuauagcaucaggaacaua

SEQ ID NO: 320292 - RNA, 32 nt, Homo Sapiens
agaagcccuucccagacagacccucagucugg

SEQ ID NO: 320293 - RNA, 32 nt, Homo Sapiens
uccaucacagauaaaaucuuaggagauaaaca

SEQ ID NO: 320294 - RNA, 32 nt, Homo Sapiens
guucucuaccucggcccacgccgccugaguua

SEQ ID NO: 320295 - RNA, 32 nt, Homo Sapiens
auaaacaaaugcauuauguaaggucagucauu

SEQ ID NO: 320296 - RNA, 32 nt, Homo Sapiens
accuuuuguuguugaagaugugaaugaaguau

SEQ ID NO: 320297 - RNA, 32 nt, Homo Sapiens
acaguacgauaaauuauuuuugaggacuguau

SEQ ID NO: 320298 - RNA, 32 nt, Homo Sapiens
ugcguccagcgcgcccgggcugagcugcagac

SEQ ID NO: 320299 - RNA, 32 nt, Homo Sapiens
ccccaggccgcagguggagggugauaaaauau

SEQ ID NO: 320300 - RNA, 32 nt, Homo Sapiens
cuuugcagcugagacuggguggagggagaggc

SEQ ID NO: 320301 - RNA, 32 nt, Homo Sapiens
acaucguuucuggugccucaucuaaagguaaa

SEQ ID NO: 320302 - RNA, 32 nt, Homo Sapiens
ggggaccaaagccaccaagacaggcucggagc

SEQ ID NO: 320303 - RNA, 32 nt, Homo Sapiens
aacugccuagugccagcucugauuccagcaag

SEQ ID NO: 320304 - RNA, 32 nt, Homo Sapiens
gcgccgcggagcaggggaaccgggaggcuccg

SEQ ID NO: 320305 - RNA, 28 nt, Homo Sapiens
cggcaagcgcggccgcggaguggccuac

SEQ ID NO: 320306 - RNA, 28 nt, Homo Sapiens
uuaggaggugauaaacauuuguccaugu

SEQ ID NO: 320307 - RNA, 32 nt, Homo Sapiens
cuaccguggaucuccuucccuucucuuggggg

SEQ ID NO: 320308 - RNA, 32 nt, Homo Sapiens
cuccuuuuuaucaucaucccuuuaaacucagu

SEQ ID NO: 320309 - RNA, 32 nt, Homo Sapiens
ggaccucaaugagcuggaacgucugagcaauc

SEQ ID NO: 320310 - RNA, 32 nt, Homo Sapiens
caaacuuucagaugaaugcuuacugugguauu

SEQ ID NO: 320311 - RNA, 32 nt, Homo Sapiens
ggccccagcacccagagcuguucucuggccaa

SEQ ID NO: 320312 - RNA, 31 nt, Homo Sapiens
uccugcgaguaacagaaccagggagggaggu

SEQ ID NO: 320313 - RNA, 29 nt, Homo Sapiens
cugaccacgugccugagaggcaaggugga

SEQ ID NO: 320314 - RNA, 32 nt, Homo Sapiens
aagaauauaaugggaaguguacaggcuaggaa

SEQ ID NO: 320315 - RNA, 32 nt, Homo Sapiens
uuccuccauuuucuguguauuggugaugggag

SEQ ID NO: 320316 - RNA, 32 nt, Homo Sapiens
gggaaagcggccggugcagcgcggggacaggc

SEQ ID NO: 320317 - RNA, 32 nt, Homo Sapiens
aauacccagguggugacagagcagaagaaccg

SEQ ID NO: 320318 - RNA, 32 nt, Homo Sapiens
gugagcaagaaauaaacuuuuguuuuuuaauu

SEQ ID NO: 320319 - RNA, 32 nt, Homo Sapiens
ugagauuuuaaauguucucaccacaaaaugau

SEQ ID NO: 320320 - RNA, 32 nt, Homo Sapiens
gcugcccucggacggccgggcgcggagcccca

SEQ ID NO: 320321 - RNA, 32 nt, Homo Sapiens
gagcaaagaaucaacagcuguuauuauccuuc

SEQ ID NO: 320322 - RNA, 32 nt, Homo Sapiens
acucuuaaacacacuguaaaggaacaugaaug

SEQ ID NO: 320323 - RNA, 32 nt, Homo Sapiens
uuaauuccaugucuucaauugucacgcauuuc

SEQ ID NO: 320324 - RNA, 32 nt, Homo Sapiens
gaucauuaaaaauuauaaagaaaaaaaaaaaa

SEQ ID NO: 320325 - RNA, 32 nt, Homo Sapiens
guucugucgaggaagccacgcguagguaggug

SEQ ID NO: 320326 - RNA, 32 nt, Homo Sapiens
uauguaaauggaaaaagagaaaaaagacaauu

SEQ ID NO: 320327 - RNA, 32 nt, Homo Sapiens
acagggcagcuuccggccccacggccuuguuc

SEQ ID NO: 320328 - RNA, 32 nt, Homo Sapiens
gaaguaagcucaugguucaguacucugggggc

SEQ ID NO: 320329 - RNA, 32 nt, Homo Sapiens
caucuccuuuuccugcguucugugauaauuuu

SEQ ID NO: 320330 - RNA, 32 nt, Homo Sapiens
cuauagucaauaauaauguacuguauauuuaa

SEQ ID NO: 320331 - RNA, 31 nt, Homo Sapiens
cugugccaggcugaccugccccaugcccucu

SEQ ID NO: 320332 - RNA, 32 nt, Homo Sapiens
aacauuuaaaaauuaguuuauuaucagauauc

SEQ ID NO: 320333 - RNA, 32 nt, Homo Sapiens
uccccaucccugcucacacguuuaccugcugc

SEQ ID NO: 320334 - RNA, 32 nt, Homo Sapiens
ucauccccggacagcucugugagcccccaccc

SEQ ID NO: 320335 - RNA, 32 nt, Homo Sapiens
cuggucccugaaugaaugaacucugauaccca

SEQ ID NO: 320336 - RNA, 32 nt, Homo Sapiens
gagguucuaggugaugcugagaccuugguguc

SEQ ID NO: 320337 - RNA, 32 nt, Homo Sapiens
aggcgguuccacccucgugauuguauagggcu

SEQ ID NO: 320338 - RNA, 32 nt, Homo Sapiens
aggggccucagccccaggaggucccuucucug

SEQ ID NO: 320339 - RNA, 32 nt, Homo Sapiens
ccggagcaucggaaagggcggcuggaggcucc

SEQ ID NO: 320340 - RNA, 32 nt, Homo Sapiens
ccuccccauccuuccuucccagcccuuguggc

SEQ ID NO: 320341 - RNA, 32 nt, Homo Sapiens
gcgcugccgagaccccucgggggcugcacacc

SEQ ID NO: 320342 - RNA, 32 nt, Homo Sapiens
gcucuggccucccaggcccauccucaacagcu

SEQ ID NO: 320343 - RNA, 32 nt, Homo Sapiens
uguccgcaaccucaggggccugggauuccugu

SEQ ID NO: 320344 - RNA, 32 nt, Homo Sapiens
cccgcggagcggagccgaggcgaacagaggcu

SEQ ID NO: 320345 - RNA, 32 nt, Homo Sapiens
aagauuauaugauaaacuuucaguccugacau

SEQ ID NO: 320346 - RNA, 32 nt, Homo Sapiens
gcccugugguccagggugagagucacaccaca

SEQ ID NO: 320347 - RNA, 32 nt, Homo Sapiens
ugcagccuacuaauccuauccaaacaaggcuu

SEQ ID NO: 320348 - RNA, 32 nt, Homo Sapiens
gcagguaccguggcgccuccucgcguuggucu

SEQ ID NO: 320349 - RNA, 32 nt, Homo Sapiens
gcuauuuauuugucuucaguguucaaggcaug

SEQ ID NO: 320350 - RNA, 32 nt, Homo Sapiens
cucccuacccugcucccuggggugcugcuguc

SEQ ID NO: 320351 - RNA, 32 nt, Homo Sapiens
aagaacaguuuagaagcaucacuaaagcugaa

SEQ ID NO: 320352 - RNA, 32 nt, Homo Sapiens
uguccauggaauauuugacagaugaaguagga

SEQ ID NO: 320353 - RNA, 32 nt, Homo Sapiens
cugccuccuuuuucagcucgucuugcgacucc

SEQ ID NO: 320354 - RNA, 32 nt, Homo Sapiens
caggagcucuucugcccugaacgcuuccaacc

SEQ ID NO: 320355 - RNA, 27 nt, Homo Sapiens
cuacuuuccuucuuuagucccucucag

SEQ ID NO: 320356 - RNA, 32 nt, Homo Sapiens
uauagaaaaacaaaucuacauaaaauaaaucu

SEQ ID NO: 320357 - RNA, 32 nt, Homo Sapiens
auccaguuaagcagugagcacccauuguuuuc

SEQ ID NO: 320358 - RNA, 32 nt, Homo Sapiens
uuuuuuuuuuuuucuuuuuauucuacuugguc

SEQ ID NO: 320359 - RNA, 32 nt, Homo Sapiens
ugcuccagcuggacggcacuccgagggugugc

SEQ ID NO: 320360 - RNA, 32 nt, Homo Sapiens
auauuuugcauucauuuuccaacgccuacauu

SEQ ID NO: 320361 - RNA, 32 nt, Homo Sapiens
aucuuccaccugugcccucaccaccacacuac

SEQ ID NO: 320362 - RNA, 32 nt, Homo Sapiens
acauuuuauagauauuugauggcuuugcuuuu

SEQ ID NO: 320363 - RNA, 32 nt, Homo Sapiens
aaaugguuuuuuaaaaagucaaauacaauacu

SEQ ID NO: 320364 - RNA, 32 nt, Homo Sapiens
aggagccgcggacgcucuccccggugccgccg

SEQ ID NO: 320365 - RNA, 25 nt, Homo Sapiens
auggcuuugagcucagccuggcgcu

SEQ ID NO: 320366 - RNA, 32 nt, Homo Sapiens
acuaaaaaggcacaagauuacacugaacauau

SEQ ID NO: 320367 - RNA, 32 nt, Homo Sapiens
ccucuacccuggaugucucucacuaccccuuc

SEQ ID NO: 320368 - RNA, 32 nt, Homo Sapiens
ccuggcugcauaagucacuuuccauuuugaca

SEQ ID NO: 320369 - RNA, 32 nt, Homo Sapiens
cuugccaugcccacggccuccuccuguagccc

SEQ ID NO: 320370 - RNA, 32 nt, Homo Sapiens
cacagagggacccuggaauggcgauggcacuc

SEQ ID NO: 320371 - RNA, 32 nt, Homo Sapiens
aaauuacaaugaucuuuuaaaaagaugaugca

SEQ ID NO: 320372 - RNA, 32 nt, Homo Sapiens
ugcuuccccguccacguguaucucugcuguga

SEQ ID NO: 320373 - RNA, 32 nt, Homo Sapiens
uguauuugcauaauacuugucuuaaaauaaaa

SEQ ID NO: 320374 - RNA, 32 nt, Homo Sapiens
ugcugggccguuuucaccuccuccucccacau

SEQ ID NO: 320375 - RNA, 32 nt, Homo Sapiens
aacagcuggugcccugcuuucagauacuggau

SEQ ID NO: 320376 - RNA, 32 nt, Homo Sapiens
gcagaaagggcacgcucuugugggugacuaca

SEQ ID NO: 320377 - RNA, 32 nt, Homo Sapiens
cgcacuuaccgccgcguccgcucccggucccu

SEQ ID NO: 320378 - RNA, 32 nt, Homo Sapiens
ggcugaaacgucuuuggaaggaggaagggggu

SEQ ID NO: 320379 - RNA, 32 nt, Homo Sapiens
augacgcgagaccccgcccccgcagcgcccgc

SEQ ID NO: 320380 - RNA, 32 nt, Homo Sapiens
uaaggucagagguggcuuucugaggccuggaa

SEQ ID NO: 320381 - RNA, 32 nt, Homo Sapiens
cagauguggucccaauuuauagcaaucuucuc

SEQ ID NO: 320382 - RNA, 32 nt, Homo Sapiens
aucuaagaccgccggaagcgcuucuucucaau

SEQ ID NO: 320383 - RNA, 32 nt, Homo Sapiens
aguguaagaaaauuauagagugaguuugugug

SEQ ID NO: 320384 - RNA, 32 nt, Homo Sapiens
ugcgucgaauugcuuccaccauggccaaggau

SEQ ID NO: 320385 - RNA, 32 nt, Homo Sapiens
aacuuugcauauguaauuacuuaaggauauga

SEQ ID NO: 320386 - RNA, 32 nt, Homo Sapiens
gguuuuguguaaguauaaaaaguguguauugc

SEQ ID NO: 320387 - RNA, 32 nt, Homo Sapiens
uaugcuucauacagggaugguguucaaaaaac

SEQ ID NO: 320388 - RNA, 32 nt, Homo Sapiens
gugacuauuugaaucaaaaauguauugaauca

SEQ ID NO: 320389 - RNA, 32 nt, Homo Sapiens
cuagauggcuggaagaggcaucucacccuuca

SEQ ID NO: 320390 - RNA, 32 nt, Homo Sapiens
cuguggcucccucucuccuggacugguuaucu

SEQ ID NO: 320391 - RNA, 32 nt, Homo Sapiens
uuggccuuccgugggacggggaggggggcggg

SEQ ID NO: 320392 - RNA, 32 nt, Homo Sapiens
ggagaguuuuaucuccuucuaauccuguaucu

SEQ ID NO: 320393 - RNA, 28 nt, Homo Sapiens
gcuguuauuacaggagaagugacauacu

SEQ ID NO: 320394 - RNA, 32 nt, Homo Sapiens
uuggacauaggcaaaauaacuuggcaaacuua

SEQ ID NO: 320395 - RNA, 32 nt, Homo Sapiens
gacgauugcugcgucaguggcaaagggcugac

SEQ ID NO: 320396 - RNA, 32 nt, Homo Sapiens
acugaguaucuaggagagcaguaaguggaacu

SEQ ID NO: 320397 - RNA, 32 nt, Homo Sapiens
gaggaggcagaaaaagcugcagaugagaguga

SEQ ID NO: 320398 - RNA, 32 nt, Homo Sapiens
ggucuuugaugauggugaugauguacaggugg

SEQ ID NO: 320399 - RNA, 32 nt, Homo Sapiens
uuaugaggaaaugagaucacaucuuugucacu

SEQ ID NO: 320400 - RNA, 32 nt, Homo Sapiens
gcagcugcgggaggguuuggccgaugaaguac

SEQ ID NO: 320401 - RNA, 32 nt, Homo Sapiens
cggaggcgggugccggugccguugccgccgcu

SEQ ID NO: 320402 - RNA, 32 nt, Homo Sapiens
aaggaagaaccuucugccccagcuuugcaaga

SEQ ID NO: 320403 - RNA, 32 nt, Homo Sapiens
auaugggacaaaauuuaaaaauucaguaacau

SEQ ID NO: 320404 - RNA, 32 nt, Homo Sapiens
gucguucccgacucugccccagcccuggggau

SEQ ID NO: 320405 - RNA, 28 nt, Homo Sapiens
ggagggguggccccgccgaggcuucagg

SEQ ID NO: 320406 - RNA, 32 nt, Homo Sapiens
aggcccagcucuuccuccuggcgguguauaca

SEQ ID NO: 320407 - RNA, 32 nt, Homo Sapiens
cggcggcgguggccauauggcagacgcuccag

SEQ ID NO: 320408 - RNA, 32 nt, Homo Sapiens
ugagauuauaucauuucuuuuucaauuauacu

SEQ ID NO: 320409 - RNA, 32 nt, Homo Sapiens
uugaguauuuuuuuuucuuuguaugccuuugg

SEQ ID NO: 320410 - RNA, 32 nt, Homo Sapiens
uucccuccaugauuuuccuaugugcuuccucu

SEQ ID NO: 320411 - RNA, 32 nt, Homo Sapiens
aguuaacuuuuguggaauaugaaaccaaagga

SEQ ID NO: 320412 - RNA, 30 nt, Homo Sapiens
ggcccugccucugccuggccggcgccgcag

SEQ ID NO: 320413 - RNA, 32 nt, Homo Sapiens
guuuaaaaacaaaggaauaaaaccauccuguu

SEQ ID NO: 320414 - RNA, 32 nt, Homo Sapiens
accugugaauucaaaaauacaugauauuuuua

SEQ ID NO: 320415 - RNA, 32 nt, Homo Sapiens
gggaaaaugcuagcaacauuauagaaauuuug

SEQ ID NO: 320416 - RNA, 32 nt, Homo Sapiens
cgcuccucgggcugccccucgguugacaaugg

SEQ ID NO: 320417 - RNA, 32 nt, Homo Sapiens
ugaggcgcaucaccccacugugacucaccuuc

SEQ ID NO: 320418 - RNA, 32 nt, Homo Sapiens
uuguaacagauucccugaaacacugcuuuuuc

SEQ ID NO: 320419 - RNA, 32 nt, Homo Sapiens
cugagacaguggaaacaaugccagcucugugg

SEQ ID NO: 320420 - RNA, 32 nt, Homo Sapiens
caguguuggccaugguguuggugcuggcucug

SEQ ID NO: 320421 - RNA, 32 nt, Homo Sapiens
ugugggaggaugaaggagugcgugccugcuac

SEQ ID NO: 320422 - RNA, 32 nt, Homo Sapiens
ccucaaaugcugugugcugcaauuguccaggc

SEQ ID NO: 320423 - RNA, 32 nt, Homo Sapiens
ugcaguggcgcgaucucggcucacugcagccu

SEQ ID NO: 320424 - RNA, 32 nt, Homo Sapiens
ccuauauuaugaaaagagaccuggaagugagu

SEQ ID NO: 320425 - RNA, 32 nt, Homo Sapiens
ccuagcuauucaaggggcugaggugggaggau

SEQ ID NO: 320426 - RNA, 32 nt, Homo Sapiens
ugcuccuucuucugccgccacgcccagcuccc

SEQ ID NO: 320427 - RNA, 32 nt, Homo Sapiens
aggaccucgaucuccuucucccucauuuucuc

SEQ ID NO: 320428 - RNA, 32 nt, Homo Sapiens
gguuguuucuaccugcuuugucuaaauaccuu

SEQ ID NO: 320429 - RNA, 32 nt, Homo Sapiens
ggaauaugagcuccuggugcugcccgaggccu

SEQ ID NO: 320430 - RNA, 32 nt, Homo Sapiens
aguugugucuuaaaauugauuuccugucccuc

SEQ ID NO: 320431 - RNA, 32 nt, Homo Sapiens
cagccccgcucccccggacccaucggcgcgcu

SEQ ID NO: 320432 - RNA, 32 nt, Homo Sapiens
uuguauuguaaaacaauaauggugaaggaaau

SEQ ID NO: 320433 - RNA, 32 nt, Homo Sapiens
cagaaggagucuuucaucuucuggcagcagaa

SEQ ID NO: 320434 - RNA, 32 nt, Homo Sapiens
ccugcggauccgcacccuccccugggcccauc

SEQ ID NO: 320435 - RNA, 32 nt, Homo Sapiens
cagagaagggcuuggacucaagcaagauuuca

SEQ ID NO: 320436 - RNA, 32 nt, Homo Sapiens
gagucuauuuuugucuaauaauaaagaauuuc

SEQ ID NO: 320437 - RNA, 32 nt, Homo Sapiens
ugccaguggccccgagcgccccgggccacgcg

SEQ ID NO: 320438 - RNA, 32 nt, Homo Sapiens
cuccaggaaaaccucauuuagauggaaauuaa

SEQ ID NO: 320439 - RNA, 32 nt, Homo Sapiens
ccagcgcuuggcucauuuucugucccauuuuc

SEQ ID NO: 320440 - RNA, 32 nt, Homo Sapiens
aaugaaagacacgcccuccuccccucugguca

SEQ ID NO: 320441 - RNA, 32 nt, Homo Sapiens
cccaauuacauuuuugugaaauguuuauuugu

SEQ ID NO: 320442 - RNA, 32 nt, Homo Sapiens
caggagucaaggaagggaggcagcugacgaug

SEQ ID NO: 320443 - RNA, 32 nt, Homo Sapiens
acugaugauaagauuauuucaacucaacauac

SEQ ID NO: 320444 - RNA, 32 nt, Homo Sapiens
ugauacauaacacuaaccaucaugucuugcuu

SEQ ID NO: 320445 - RNA, 32 nt, Homo Sapiens
auaagcguccaggagccacgggcucccacccc

SEQ ID NO: 320446 - RNA, 32 nt, Homo Sapiens
uuucucuuguuuucuuuuuuuaauuaaguuua

SEQ ID NO: 320447 - RNA, 32 nt, Homo Sapiens
aaaauacuuugaaaaugaaaagucuugaugua

SEQ ID NO: 320448 - RNA, 32 nt, Homo Sapiens
gguguuuaucaugggcuacucggugguggcug

SEQ ID NO: 320449 - RNA, 32 nt, Homo Sapiens
gaaauguagaagggauaacaguucacagccag

SEQ ID NO: 320450 - RNA, 32 nt, Homo Sapiens
gaagacggaaaacaaucuaagggucucucauu

SEQ ID NO: 320451 - RNA, 32 nt, Homo Sapiens
aacauguugccguuucuuucugaagagguguc

SEQ ID NO: 320452 - RNA, 32 nt, Homo Sapiens
uggauuuuaaaauaaauguuguggaugaacac

SEQ ID NO: 320453 - RNA, 32 nt, Homo Sapiens
uugcuccugaucuuccacacucuuguuuuccg

SEQ ID NO: 320454 - RNA, 32 nt, Homo Sapiens
cuggaggaggggcuacugucccuuggcccuua

SEQ ID NO: 320455 - RNA, 28 nt, Homo Sapiens
ggccugaggcggccgggguggggcagac

SEQ ID NO: 320456 - RNA, 32 nt, Homo Sapiens
agguggcacaggacagggcaugugcugacucc

SEQ ID NO: 320457 - RNA, 32 nt, Homo Sapiens
ggagaccggcucuucucgcuuccccggcggcg

SEQ ID NO: 320458 - RNA, 32 nt, Homo Sapiens
cgugacaggcuguucuaacaugugucuaccug

SEQ ID NO: 320459 - RNA, 32 nt, Homo Sapiens
cagaaugcaauaaaagcggaagucacaguuug

SEQ ID NO: 320460 - RNA, 32 nt, Homo Sapiens
uucuuuuucuuuucuuuuuuuuuucagaaauu

SEQ ID NO: 320461 - RNA, 32 nt, Homo Sapiens
ugcucccuccgggucuuccuacucuucucucu

SEQ ID NO: 320462 - RNA, 32 nt, Homo Sapiens
uagauuauacuucuuugggugcugugcuaaga

SEQ ID NO: 320463 - RNA, 32 nt, Homo Sapiens
gcccaucggcccggcaguggacgcagagccuc

SEQ ID NO: 320464 - RNA, 32 nt, Homo Sapiens
aaucuguuaaaauaaaauuguacauuuggaga

SEQ ID NO: 320465 - RNA, 32 nt, Homo Sapiens
caucucaccccacccaggccuccugcucccug

SEQ ID NO: 320466 - RNA, 32 nt, Homo Sapiens
cugugggagcuggcacacacacugucacaaaa

SEQ ID NO: 320467 - RNA, 32 nt, Homo Sapiens
cggcaguggcggcggaggagggggcggcgugg

SEQ ID NO: 320468 - RNA, 32 nt, Homo Sapiens
gagauggcugaauuucuauucuuagcuuauug

SEQ ID NO: 320469 - RNA, 32 nt, Homo Sapiens
ggcgguagcucgcugaucccuccggcgaagcc

SEQ ID NO: 320470 - RNA, 32 nt, Homo Sapiens
gcagcccugccccacaccuccucucacucccc

SEQ ID NO: 320471 - RNA, 32 nt, Homo Sapiens
caugagugcucacuaaaacaacuuuuuccauu

SEQ ID NO: 320472 - RNA, 32 nt, Homo Sapiens
cccgaacccugccuaggagcccgccccacccu

SEQ ID NO: 320473 - RNA, 32 nt, Homo Sapiens
ugauugcuggugauguuuuuugagcaaacacu

SEQ ID NO: 320474 - RNA, 32 nt, Homo Sapiens
ugagggaaaugggaacauaccaggccgagcag

SEQ ID NO: 320475 - RNA, 32 nt, Homo Sapiens
cgacauaaaggaacaguugugcucugcccaca

SEQ ID NO: 320476 - RNA, 32 nt, Homo Sapiens
auauuaaagggagcagguggagagucauuuuc

SEQ ID NO: 320477 - RNA, 32 nt, Homo Sapiens
ucaaaaaaaaaauuagggugaaauuaaguagu

SEQ ID NO: 320478 - RNA, 32 nt, Homo Sapiens
gggaggccgggcggucacagcauggaggagga

SEQ ID NO: 320479 - RNA, 32 nt, Homo Sapiens
acugagagaccuuuauuauuauuuucaaauua

SEQ ID NO: 320480 - RNA, 30 nt, Homo Sapiens
cacuccccucgcgccgcgggucccgggaac

SEQ ID NO: 320481 - RNA, 32 nt, Homo Sapiens
gugcuccgccgggaagauggggaaagugaggg

SEQ ID NO: 320482 - RNA, 32 nt, Homo Sapiens
cuguucuaguuccucuccauccgccaccuccc

SEQ ID NO: 320483 - RNA, 32 nt, Homo Sapiens
ggaaguaaaugauaaacuuauauucuuuauua

SEQ ID NO: 320484 - RNA, 32 nt, Homo Sapiens
aguguggcccuccuuccugauuuaguucacau

SEQ ID NO: 320485 - RNA, 32 nt, Homo Sapiens
agcccagacaccugugcuccuggcacccuuga

SEQ ID NO: 320486 - RNA, 32 nt, Homo Sapiens
caugauuauaguguguucauuuagauaaaagu

SEQ ID NO: 320487 - RNA, 32 nt, Homo Sapiens
acagccugucgcggcccggccgccugcggcac

SEQ ID NO: 320488 - RNA, 32 nt, Homo Sapiens
ggaaagcacauccuguuugcggagcuuugaaa

SEQ ID NO: 320489 - RNA, 32 nt, Homo Sapiens
uguucaggggagaugggguacugugaggcucg

SEQ ID NO: 320490 - RNA, 32 nt, Homo Sapiens
ugcagagcggcugguccaugcuguugcccacc

SEQ ID NO: 320491 - RNA, 32 nt, Homo Sapiens
uauauuaggaaaauaaaaaauauuuuagagcc

SEQ ID NO: 320492 - RNA, 32 nt, Homo Sapiens
auuuuuacaguuugcauaguaaaauuacuaug

SEQ ID NO: 320493 - RNA, 32 nt, Homo Sapiens
gcagcgcuuuccuugcagaauucauggcaggg

SEQ ID NO: 320494 - RNA, 32 nt, Homo Sapiens
caggccauuuagaguuguaaauuuacaaagau

SEQ ID NO: 320495 - RNA, 32 nt, Homo Sapiens
uguccaaggcccggcgccggagucgcccccgc

SEQ ID NO: 320496 - RNA, 32 nt, Homo Sapiens
auaaaauguguucaccugaggagacugcuuuc

SEQ ID NO: 320497 - RNA, 32 nt, Homo Sapiens
ggaagcaguggugguagcuacacugggcagag

SEQ ID NO: 320498 - RNA, 32 nt, Homo Sapiens
acagcagccuggcgcucuggcaguuccguuca

SEQ ID NO: 320499 - RNA, 32 nt, Homo Sapiens
ggcuagucucgaacucaugaccucaagugauc

SEQ ID NO: 320500 - RNA, 32 nt, Homo Sapiens
uagucguggauauaauuaaaacgcugaagacc

SEQ ID NO: 320501 - RNA, 31 nt, Homo Sapiens
gaccucgugaucugccugccuuggccuuauu

SEQ ID NO: 320502 - RNA, 32 nt, Homo Sapiens
aagcacguuacauugaucgugcacuuuauuuc

SEQ ID NO: 320503 - RNA, 32 nt, Homo Sapiens
cugaaccccucuuccuucuccucugucuucac

SEQ ID NO: 320504 - RNA, 32 nt, Homo Sapiens
ccuuugagccccugggagcccaaauaccacuc

SEQ ID NO: 320505 - RNA, 32 nt, Homo Sapiens
accuaccuccaaguccucccugucgccacaga

SEQ ID NO: 320506 - RNA, 32 nt, Homo Sapiens
acccauuccuuccccugucucagccuucagcc

SEQ ID NO: 320507 - RNA, 32 nt, Homo Sapiens
ccuugagccgacuuccacggagggagguggag

SEQ ID NO: 320508 - RNA, 32 nt, Homo Sapiens
guaggauacuccaauuccagagucuuugcagg

SEQ ID NO: 320509 - RNA, 32 nt, Homo Sapiens
gcuuuuaaaaauucacaaugaaaagacgauuc

SEQ ID NO: 320510 - RNA, 32 nt, Homo Sapiens
gcgacgccaacaucagagcauccuagggaacg

SEQ ID NO: 320511 - RNA, 32 nt, Homo Sapiens
cuaccagcugugucaugagcugcagacaguuc

SEQ ID NO: 320512 - RNA, 32 nt, Homo Sapiens
uuauaacauucaacacaaaaucauggaggugc

SEQ ID NO: 320513 - RNA, 32 nt, Homo Sapiens
ucggcaaaguggagaagguggacuguaggcug

SEQ ID NO: 320514 - RNA, 32 nt, Homo Sapiens
caggaugcuuugcagcaacgcccuaggauuug

SEQ ID NO: 320515 - RNA, 32 nt, Homo Sapiens
ucgggucccagcgucccagccgcggcccgcgc

SEQ ID NO: 320516 - RNA, 32 nt, Homo Sapiens
accaaugcuucuuuaucuggugcucaguucuc

SEQ ID NO: 320517 - RNA, 32 nt, Homo Sapiens
gggcagguuagacgcuggggagccaguuggcu

SEQ ID NO: 320518 - RNA, 32 nt, Homo Sapiens
cuccuggagcugcagacgugggcccgcccuac

SEQ ID NO: 320519 - RNA, 32 nt, Homo Sapiens
acucgcggccccaggcccaggccccaccccgg

SEQ ID NO: 320520 - RNA, 32 nt, Homo Sapiens
gggugugucugugaggguguugucaaaagaga

SEQ ID NO: 320521 - RNA, 32 nt, Homo Sapiens
agaaggaugugacaugccugggccguggagca

SEQ ID NO: 320522 - RNA, 32 nt, Homo Sapiens
caauuugccucuuucuuugaauaaaaagcucu

SEQ ID NO: 320523 - RNA, 32 nt, Homo Sapiens
uaaaccuggagccugaugucccagguggacac

SEQ ID NO: 320524 - RNA, 32 nt, Homo Sapiens
aaggggaccugaggagugucagcauccucagu

SEQ ID NO: 320525 - RNA, 32 nt, Homo Sapiens
cggcugcagggagcuccggcccgcggccccuc

SEQ ID NO: 320526 - RNA, 32 nt, Homo Sapiens
uaauucugaaauaaaagacaucuccuaaaaaa

SEQ ID NO: 320527 - RNA, 32 nt, Homo Sapiens
aacuggcuggggucacacagcugcugggucag

SEQ ID NO: 320528 - RNA, 32 nt, Homo Sapiens
aaagaaauaaagggcugaguguggugcucacg

SEQ ID NO: 320529 - RNA, 32 nt, Homo Sapiens
ucagcccagaaaguaaagcugagcgugaggcc

SEQ ID NO: 320530 - RNA, 32 nt, Homo Sapiens
cauuuuguguggaauuagauccuccccuucaa

SEQ ID NO: 320531 - RNA, 32 nt, Homo Sapiens
ccaacaccaugaugaagcucuugcuuuuuaaa

SEQ ID NO: 320532 - RNA, 32 nt, Homo Sapiens
uuuuguaggacuuguucuaacauggaaaacaa

SEQ ID NO: 320533 - RNA, 32 nt, Homo Sapiens
ccgagccggggcuggagcgcgcggucugaccu

SEQ ID NO: 320534 - RNA, 32 nt, Homo Sapiens
aauacaaagauaaggauggucacagugauuuc

SEQ ID NO: 320535 - RNA, 31 nt, Homo Sapiens
cacgucacaagcaccugaggaguccggccgg

SEQ ID NO: 320536 - RNA, 32 nt, Homo Sapiens
gaauuucaccaucaggaauaaaacagaaaaac

SEQ ID NO: 320537 - RNA, 32 nt, Homo Sapiens
ccuucucuuucugcacaaggaaaaauuaaugc

SEQ ID NO: 320538 - RNA, 32 nt, Homo Sapiens
cauuaguauuuggugaugucacucuugcauuu

SEQ ID NO: 320539 - RNA, 32 nt, Homo Sapiens
aaaaaaaaaugguuaaauacaauggaguuuua

SEQ ID NO: 320540 - RNA, 32 nt, Homo Sapiens
uauggaagagccaagaggcaucucagauuugu

SEQ ID NO: 320541 - RNA, 32 nt, Homo Sapiens
uggcaucgccguccgcgccggccccggccaug

SEQ ID NO: 320542 - RNA, 32 nt, Homo Sapiens
gggcucagcaaggucagcacucccacugaaca

SEQ ID NO: 320543 - RNA, 32 nt, Homo Sapiens
cucuuuuaagugaguucuucagcuaagcauug

SEQ ID NO: 320544 - RNA, 32 nt, Homo Sapiens
uguguguacagcaggagguaauaugcuauaau

SEQ ID NO: 320545 - RNA, 32 nt, Homo Sapiens
ggaugaauacaugguggcaacaguccaugaca

SEQ ID NO: 320546 - RNA, 32 nt, Homo Sapiens
ccgaagaguccucccauccccucaucuucucc

SEQ ID NO: 320547 - RNA, 32 nt, Homo Sapiens
auucaauguuauucgaugcucuguucugguga

SEQ ID NO: 320548 - RNA, 32 nt, Homo Sapiens
ggcugcaacccugguccccaccccuaaccucc

SEQ ID NO: 320549 - RNA, 32 nt, Homo Sapiens
aaaucuccugggaguagcacaaagggcacacu

SEQ ID NO: 320550 - RNA, 32 nt, Homo Sapiens
ucucucugccuuggccgggacccgaaguccga

SEQ ID NO: 320551 - RNA, 32 nt, Homo Sapiens
cucggaugggagcacgggugggggguggguaa

SEQ ID NO: 320552 - RNA, 32 nt, Homo Sapiens
gcucagcacacaggacugacccacagcccagg

SEQ ID NO: 320553 - RNA, 32 nt, Homo Sapiens
uuaacacugaaauuauuuuuaaggauaaauuu

SEQ ID NO: 320554 - RNA, 32 nt, Homo Sapiens
uauucuguucaaauaaaugcauuugguauucu

SEQ ID NO: 320555 - RNA, 32 nt, Homo Sapiens
cuaacuuuauucuuuuucauguggauacccag

SEQ ID NO: 320556 - RNA, 31 nt, Homo Sapiens
auauuucaguugcuugcuccaaggagagaau

SEQ ID NO: 320557 - RNA, 32 nt, Homo Sapiens
cauccuccaucccagcaucccuccaucccugc

SEQ ID NO: 320558 - RNA, 32 nt, Homo Sapiens
cacuguuucugagagcagcuuuuguggcaucu

SEQ ID NO: 320559 - RNA, 32 nt, Homo Sapiens
ucacaacgcugcccccaauaccuuuggccaga

SEQ ID NO: 320560 - RNA, 32 nt, Homo Sapiens
ugcuuuuuucaucuuauuaaaugugaugugac

SEQ ID NO: 320561 - RNA, 32 nt, Homo Sapiens
agaaaucccagggcauuguaccaaggaccuag

SEQ ID NO: 320562 - RNA, 32 nt, Homo Sapiens
ggacggcgcuggcuucggcauugaccggccgg

SEQ ID NO: 320563 - RNA, 32 nt, Homo Sapiens
uuccaacugaaaucauuuuaguauuaacucuu

SEQ ID NO: 320564 - RNA, 32 nt, Homo Sapiens
uccaaacaucuuccaauuuauuuuguuuguuc

SEQ ID NO: 320565 - RNA, 32 nt, Homo Sapiens
ccacauuaugucagcuuucucauauugagagc

SEQ ID NO: 320566 - RNA, 32 nt, Homo Sapiens
uuaguaaccaggaaacaaaacacaugccaccu

SEQ ID NO: 320567 - RNA, 32 nt, Homo Sapiens
uuucucuggaggggaagguggaugcuggcggg

SEQ ID NO: 320568 - RNA, 32 nt, Homo Sapiens
gggucucuggccagcucugugugcccaauccc

SEQ ID NO: 320569 - RNA, 32 nt, Homo Sapiens
ggcaugaacccgggaggcggaacuugcgguga

SEQ ID NO: 320570 - RNA, 28 nt, Homo Sapiens
gcaccaagaugucaagaggugcuagacu

SEQ ID NO: 320571 - RNA, 32 nt, Homo Sapiens
cccuggugcagggcaagccgcagcgaccauuu

SEQ ID NO: 320572 - RNA, 32 nt, Homo Sapiens
cuccucaaauuccugcacggaccugggacuug

SEQ ID NO: 320573 - RNA, 32 nt, Homo Sapiens
uuaaagaaauguuuagcuaaacgcuguugaac

SEQ ID NO: 320574 - RNA, 32 nt, Homo Sapiens
ucagauccacggccuccacccgggacgccuuc

SEQ ID NO: 320575 - RNA, 32 nt, Homo Sapiens
aaagucucuugccccaggaaaccccaucaguc

SEQ ID NO: 320576 - RNA, 32 nt, Homo Sapiens
accagccucaaucccggcugcugcauuuaggu

SEQ ID NO: 320577 - RNA, 32 nt, Homo Sapiens
aguuuagcaaaauaacugauuguuuuggauaa

SEQ ID NO: 320578 - RNA, 32 nt, Homo Sapiens
gaagagggugguucccugggggucugugauca

SEQ ID NO: 320579 - RNA, 32 nt, Homo Sapiens
ugugcuccagcugggggcgccacagcacccac

SEQ ID NO: 320580 - RNA, 32 nt, Homo Sapiens
gacagaucccugaacuaauuauagugaaacau

SEQ ID NO: 320581 - RNA, 32 nt, Homo Sapiens
ggucccugagggugggaggccugcuugugcug

SEQ ID NO: 320582 - RNA, 32 nt, Homo Sapiens
gcugacaggaugccgccugagaugaacagggu

SEQ ID NO: 320583 - RNA, 32 nt, Homo Sapiens
ucccugggguccagucauugcugcugggcaca

SEQ ID NO: 320584 - RNA, 32 nt, Homo Sapiens
gcauuucucuguaugccugcuaucucgccuuu

SEQ ID NO: 320585 - RNA, 32 nt, Homo Sapiens
ugccuggccugaggacccggcgcugaguggcg

SEQ ID NO: 320586 - RNA, 32 nt, Homo Sapiens
gauuuuauuuuauaucugaugacuccgagugu

SEQ ID NO: 320587 - RNA, 32 nt, Homo Sapiens
ugggguugcuccuggaugcugucugggaggcu

SEQ ID NO: 320588 - RNA, 32 nt, Homo Sapiens
ugaauucagaagaagcuuggaacuuauagugu

SEQ ID NO: 320589 - RNA, 32 nt, Homo Sapiens
acucaggauuuaaaaacuggaacggugaaggu

SEQ ID NO: 320590 - RNA, 32 nt, Homo Sapiens
uauacucaggacuccagaggugucacacgugg

SEQ ID NO: 320591 - RNA, 32 nt, Homo Sapiens
gcuggagaggggccuguugugccacucaggga

SEQ ID NO: 320592 - RNA, 32 nt, Homo Sapiens
acuuccgcccggcgcgggcuuggauggaggcg

SEQ ID NO: 320593 - RNA, 32 nt, Homo Sapiens
auaauuauuaaguacuuucuuaaucucauuaa

SEQ ID NO: 320594 - RNA, 32 nt, Homo Sapiens
uugccaacacggccccggccugguaccagccc

SEQ ID NO: 320595 - RNA, 32 nt, Homo Sapiens
ugcugccugccagccuggggucccuggaggac

SEQ ID NO: 320596 - RNA, 32 nt, Homo Sapiens
ucauaauaaaaauuauauacgaguauaaauga

SEQ ID NO: 320597 - RNA, 32 nt, Homo Sapiens
cuauagcuauuuuuaaaguuucucuacuauuu

SEQ ID NO: 320598 - RNA, 32 nt, Homo Sapiens
uccuguuccaucaguugccauccacuaccccg

SEQ ID NO: 320599 - RNA, 32 nt, Homo Sapiens
accagccuggccaacauagugaaaccccgccu

SEQ ID NO: 320600 - RNA, 32 nt, Homo Sapiens
cacgauugacuuucuugauggguaauuuuuuu

SEQ ID NO: 320601 - RNA, 28 nt, Homo Sapiens
uggacggggcggcuggccgggcagaggu

SEQ ID NO: 320602 - RNA, 32 nt, Homo Sapiens
gaucacagaguuuuucuuuuuauccuuaucaa

SEQ ID NO: 320603 - RNA, 31 nt, Homo Sapiens
cacuccauggccgccucggcgccgcccccac

SEQ ID NO: 320604 - RNA, 32 nt, Homo Sapiens
uuuggggagggggacauuuuuuggggggcagg

SEQ ID NO: 320605 - RNA, 32 nt, Homo Sapiens
gacuguaaacuagugaagagugaauguaacuu

SEQ ID NO: 320606 - RNA, 32 nt, Homo Sapiens
cugucagugucugccugcgccaccuccgugcu

SEQ ID NO: 320607 - RNA, 32 nt, Homo Sapiens
gcgugacugugcuaaccuggguggggcagcau

SEQ ID NO: 320608 - RNA, 32 nt, Homo Sapiens
gagugacgccacagcccaucccggugacaugc

SEQ ID NO: 320609 - RNA, 32 nt, Homo Sapiens
cccagaguggcccaaagcuguugaagucagca

SEQ ID NO: 320610 - RNA, 32 nt, Homo Sapiens
uguuuaaacacagauagcacgggccuuucucu

SEQ ID NO: 320611 - RNA, 32 nt, Homo Sapiens
guagcaugcacaugacucugguaguaaccaac

SEQ ID NO: 320612 - RNA, 32 nt, Homo Sapiens
aagacagaaagaucaaaaucauaugaugaggg

SEQ ID NO: 320613 - RNA, 32 nt, Homo Sapiens
cacuacucccccugccuggcccugagagcggc

SEQ ID NO: 320614 - RNA, 32 nt, Homo Sapiens
acuucgaagauaagagugagcggcugccuccg

SEQ ID NO: 320615 - RNA, 30 nt, Homo Sapiens
uucaagcggagaaugggggagucucacuuc

SEQ ID NO: 320616 - RNA, 32 nt, Homo Sapiens
uugcuuuggccauagguucugagcuucugcuu

SEQ ID NO: 320617 - RNA, 32 nt, Homo Sapiens
cucaccacaaccuccgccucccagguucaauc

SEQ ID NO: 320618 - RNA, 28 nt, Homo Sapiens
augaaaauagcgaacauuuaaaagcuau

SEQ ID NO: 320619 - RNA, 32 nt, Homo Sapiens
uuggaugggacccagggcuccugacucugccc

SEQ ID NO: 320620 - RNA, 32 nt, Homo Sapiens
uugggggaaaggaaaaggcuuaccaggcugcu

SEQ ID NO: 320621 - RNA, 32 nt, Homo Sapiens
cccgagucaagcggccuuuucuguguugauuu

SEQ ID NO: 320622 - RNA, 32 nt, Homo Sapiens
uagcugaccccucuccugcguccuucugucag

SEQ ID NO: 320623 - RNA, 32 nt, Homo Sapiens
aagcauacuucauauauuuucuuaagauuaca

SEQ ID NO: 320624 - RNA, 32 nt, Homo Sapiens
gccuaguacuauacaagaagcucuacuuugau

SEQ ID NO: 320625 - RNA, 32 nt, Homo Sapiens
ccuuacucacucccucgcugucucucugaacc

SEQ ID NO: 320626 - RNA, 32 nt, Homo Sapiens
aauccagcuucccccacaccuucccaaaggcu

SEQ ID NO: 320627 - RNA, 32 nt, Homo Sapiens
gaaaagacguacuugaauaguuacagcauaug

SEQ ID NO: 320628 - RNA, 32 nt, Homo Sapiens
agcagccccucgcggcagccccgacagagugu

SEQ ID NO: 320629 - RNA, 32 nt, Homo Sapiens
cccucugcaaccaaaaauccuuggggucccag

SEQ ID NO: 320630 - RNA, 32 nt, Homo Sapiens
agauuccugggcuggaggaaaaccaugaucua

SEQ ID NO: 320631 - RNA, 32 nt, Homo Sapiens
cgugucuggguuugggggcgggagacaggcug

SEQ ID NO: 320632 - RNA, 32 nt, Homo Sapiens
uugaaagaaacacaauuagaaaugacaaaggg

SEQ ID NO: 320633 - RNA, 32 nt, Homo Sapiens
cggaagcucccucucagcuugucuggacagug

SEQ ID NO: 320634 - RNA, 32 nt, Homo Sapiens
acaacauggaggggagucauggccaucacacg

SEQ ID NO: 320635 - RNA, 32 nt, Homo Sapiens
cucuucuuuccagcccuucuccugugugccug

SEQ ID NO: 320636 - RNA, 32 nt, Homo Sapiens
guagacaacauuauauuuuauagaauuuguuu

SEQ ID NO: 320637 - RNA, 32 nt, Homo Sapiens
cuaccucugucaccacgaccgcugggacuaca

SEQ ID NO: 320638 - RNA, 32 nt, Homo Sapiens
cuucucuuuucucucuuguggaauugcauuca

SEQ ID NO: 320639 - RNA, 32 nt, Homo Sapiens
cucccgcuccccgaugguggcguggacauggu

SEQ ID NO: 320640 - RNA, 32 nt, Homo Sapiens
ccaacucaguugccuuuuuuuuuuuuucguac

SEQ ID NO: 320641 - RNA, 32 nt, Homo Sapiens
uuucacgugacucagcagugcccgccgccguc

SEQ ID NO: 320642 - RNA, 32 nt, Homo Sapiens
gaugcuccucuggugggagggugcuggcccug

SEQ ID NO: 320643 - RNA, 32 nt, Homo Sapiens
cgaggucgcagcggcccgcucucccgccagcg

SEQ ID NO: 320644 - RNA, 32 nt, Homo Sapiens
ugaaauccagcaucuauacguaauuuaaacaa

SEQ ID NO: 320645 - RNA, 32 nt, Homo Sapiens
gcgcgcuuugucagcagugcugugagaaguuc

SEQ ID NO: 320646 - RNA, 32 nt, Homo Sapiens
guaaaccucucgagggcagggaccacacccug

SEQ ID NO: 320647 - RNA, 32 nt, Homo Sapiens
ggggagggagggcuuuccugugcugacagcgc

SEQ ID NO: 320648 - RNA, 32 nt, Homo Sapiens
cccgcuaggguggaggagaggagugggguuug

SEQ ID NO: 320649 - RNA, 32 nt, Homo Sapiens
cugggccaugccagcccucugugccucgguuu

SEQ ID NO: 320650 - RNA, 32 nt, Homo Sapiens
agcuccuggcccuccuggaacccaggcucuaa

SEQ ID NO: 320651 - RNA, 32 nt, Homo Sapiens
ucgcucucccauuggcccccaacacuggccuc

SEQ ID NO: 320652 - RNA, 32 nt, Homo Sapiens
cugggcugggagcagagcugacugacaugggu

SEQ ID NO: 320653 - RNA, 32 nt, Homo Sapiens
ggguggccccccugcuuaaaagcauuagcugc

SEQ ID NO: 320654 - RNA, 32 nt, Homo Sapiens
gcugcagccuguuccuuccccagaggccuggg

SEQ ID NO: 320655 - RNA, 32 nt, Homo Sapiens
ccccgccccugccaccccugccgcccgguucc

SEQ ID NO: 320656 - RNA, 32 nt, Homo Sapiens
cccacagcaccaagcagacuggagggaaagag

SEQ ID NO: 320657 - RNA, 32 nt, Homo Sapiens
aacacuuaaaauuguaaccugcauuuuucacu

SEQ ID NO: 320658 - RNA, 32 nt, Homo Sapiens
ggaaaguacuuuggaaaauauacaaucaagau

SEQ ID NO: 320659 - RNA, 32 nt, Homo Sapiens
cauuuauuccuugcuggacaaacucuggaagc

SEQ ID NO: 320660 - RNA, 32 nt, Homo Sapiens
ccagacugcgcuccggccgcggcccucgcccc

SEQ ID NO: 320661 - RNA, 32 nt, Homo Sapiens
cuggcuucuggugguuuauaggugaucuuuga

SEQ ID NO: 320662 - RNA, 32 nt, Homo Sapiens
uaacucuaugcucugcuaucucuuccaucuaa

SEQ ID NO: 320663 - RNA, 32 nt, Homo Sapiens
gauuagcguggcaagguaugcaagcaagucac

SEQ ID NO: 320664 - RNA, 32 nt, Homo Sapiens
ggucagacacacaggaccuggugcuggauggg

SEQ ID NO: 320665 - RNA, 31 nt, Homo Sapiens
ggucagguucccccaaauuauuuugagguag

SEQ ID NO: 320666 - RNA, 32 nt, Homo Sapiens
cagaaauauauucaugucuauguguauauaga

SEQ ID NO: 320667 - RNA, 31 nt, Homo Sapiens
gccaaaacaaagaacuggguguugaguauuc

SEQ ID NO: 320668 - RNA, 32 nt, Homo Sapiens
guguaaauuuaaaaaggggaaauacuuuaauu

SEQ ID NO: 320669 - RNA, 32 nt, Homo Sapiens
uguagcaagugugaggauggacaggcucacac

SEQ ID NO: 320670 - RNA, 32 nt, Homo Sapiens
gaggagcugcgguggcucggcgaguuggaguu

SEQ ID NO: 320671 - RNA, 32 nt, Homo Sapiens
aacgucucacuuggcugcagaccgccaugggg

SEQ ID NO: 320672 - RNA, 32 nt, Homo Sapiens
caucagcuccaucuauuugaaaacagaggcug

SEQ ID NO: 320673 - RNA, 32 nt, Homo Sapiens
caaaagaggucuuacagcaacccaacgucuca

SEQ ID NO: 320674 - RNA, 32 nt, Homo Sapiens
gccuguggcuggcagagagccgggccaaggca

SEQ ID NO: 320675 - RNA, 32 nt, Homo Sapiens
gcaagagcacgcugagccccccggaggccagc

SEQ ID NO: 320676 - RNA, 32 nt, Homo Sapiens
gaaaacauucaucaaaagcaugcaucagccca

SEQ ID NO: 320677 - RNA, 32 nt, Homo Sapiens
gguuuuucuaugcuauaugaaaauagucuuca

SEQ ID NO: 320678 - RNA, 32 nt, Homo Sapiens
aagaacuuuauauaaaggcauuacauuggcaa

SEQ ID NO: 320679 - RNA, 32 nt, Homo Sapiens
uuuuguuuguuuugaggcacaaugaaacuuua

SEQ ID NO: 320680 - RNA, 32 nt, Homo Sapiens
uaacagaagauacucuuuuuuaugcuccuuac

SEQ ID NO: 320681 - RNA, 32 nt, Homo Sapiens
gagggugcagguacucuuggggccccagcggu

SEQ ID NO: 320682 - RNA, 32 nt, Homo Sapiens
gguugcugcuaauuugccuccauccuuuucuc

SEQ ID NO: 320683 - RNA, 32 nt, Homo Sapiens
guggcccgugggguuugcuccaugguggccug

SEQ ID NO: 320684 - RNA, 32 nt, Homo Sapiens
uuuuguucuugccuaggguuuuuaaaauaucu

SEQ ID NO: 320685 - RNA, 32 nt, Homo Sapiens
aauguuagugagaaaagauuugcacaaagaaa

SEQ ID NO: 320686 - RNA, 32 nt, Homo Sapiens
caccucgacugcgaauuacuguuuaugaggug

SEQ ID NO: 320687 - RNA, 32 nt, Homo Sapiens
uuuuaccaaaaauaaacucuugggggaagaaa

SEQ ID NO: 320688 - RNA, 32 nt, Homo Sapiens
auauucucaaauuaucaucccugguauuccag

SEQ ID NO: 320689 - RNA, 32 nt, Homo Sapiens
guaacgauggauauccauucaaauggagaccu

SEQ ID NO: 320690 - RNA, 32 nt, Homo Sapiens
ugacagaauauuaaaacauggaauauuuuugc

SEQ ID NO: 320691 - RNA, 32 nt, Homo Sapiens
guuagaaggaugggaagagaaaaggagcaguu

SEQ ID NO: 320692 - RNA, 32 nt, Homo Sapiens
ggccacagagccaacagcuuuagugucuucag

SEQ ID NO: 320693 - RNA, 32 nt, Homo Sapiens
augaacccaccaaagaaaacgaauggaaaaau

SEQ ID NO: 320694 - RNA, 32 nt, Homo Sapiens
uuuauuaagaaaguacaagggauugggcgcgg

SEQ ID NO: 320695 - RNA, 32 nt, Homo Sapiens
caucuugggugcgccuucccggcgucuagggg

SEQ ID NO: 320696 - RNA, 32 nt, Homo Sapiens
aucugccagcuucucucguuccgucgauuggg

SEQ ID NO: 320697 - RNA, 32 nt, Homo Sapiens
acugaggacaaaguggaggagggccgaggugg

SEQ ID NO: 320698 - RNA, 32 nt, Homo Sapiens
aucuucuuuucuucuuagaaauccuagaaaac

SEQ ID NO: 320699 - RNA, 32 nt, Homo Sapiens
cuuggaaaauacacaauaaaguauuuugaggu

SEQ ID NO: 320700 - RNA, 32 nt, Homo Sapiens
augucguguucgcaagcauccuagcagccuuc

SEQ ID NO: 320701 - RNA, 32 nt, Homo Sapiens
aggauuauuaaacugaucacugucugauaagg

SEQ ID NO: 320702 - RNA, 32 nt, Homo Sapiens
ggucucaaacuccugaccucaaaugauccacc

SEQ ID NO: 320703 - RNA, 32 nt, Homo Sapiens
aggagcaggcuuggagccagggaccagugggg

SEQ ID NO: 320704 - RNA, 32 nt, Homo Sapiens
ccuuuaugcaagcagcguaaaguuaucaguuu

SEQ ID NO: 320705 - RNA, 32 nt, Homo Sapiens
caggccucuggccacuuuaucaucuguggugg

SEQ ID NO: 320706 - RNA, 32 nt, Homo Sapiens
uugccccgccucccugcccccaccgggccggc

SEQ ID NO: 320707 - RNA, 31 nt, Homo Sapiens
uuguuccgagccugccugccugccgguucua

SEQ ID NO: 320708 - RNA, 32 nt, Homo Sapiens
aaucauagauguagaauaguauguaaauguua

SEQ ID NO: 320709 - RNA, 32 nt, Homo Sapiens
cucuuccuggagacaccgccauggccgggcua

SEQ ID NO: 320710 - RNA, 32 nt, Homo Sapiens
gucagcucugcucucccuguaaauguuaguug

SEQ ID NO: 320711 - RNA, 32 nt, Homo Sapiens
ugagcccgcucccgagcgcugcuuucccgccg

SEQ ID NO: 320712 - RNA, 32 nt, Homo Sapiens
cugccagcacgcugucucagacucuccagcau

SEQ ID NO: 320713 - RNA, 32 nt, Homo Sapiens
agcgagcgccgucgucugcccgggcccgccca

SEQ ID NO: 320714 - RNA, 32 nt, Homo Sapiens
uucuugaguguuaagucuuuuaccaaaagugu

SEQ ID NO: 320715 - RNA, 32 nt, Homo Sapiens
gcuguccuguuuuacuggaccccgccucccag

SEQ ID NO: 320716 - RNA, 32 nt, Homo Sapiens
cucuccucaucuuuuuugugugugagggcagg

SEQ ID NO: 320717 - RNA, 31 nt, Homo Sapiens
caccaguguguggcuuucagagccuccuuuc

SEQ ID NO: 320718 - RNA, 32 nt, Homo Sapiens
cccccgccuccuuguggcgaugagaaggagga

SEQ ID NO: 320719 - RNA, 32 nt, Homo Sapiens
ccugagcgccgacccacgcccugccugcucuu

SEQ ID NO: 320720 - RNA, 32 nt, Homo Sapiens
uuuagcugccagcccuggcccaucauguagcu

SEQ ID NO: 320721 - RNA, 32 nt, Homo Sapiens
aggcuaggaaggggcugcugaucccaggagug

SEQ ID NO: 320722 - RNA, 32 nt, Homo Sapiens
uaaaaagagauuaaaaagcaauauucguacau

SEQ ID NO: 320723 - RNA, 31 nt, Homo Sapiens
uggaaaauaauaaguggaauaugauacaauu

SEQ ID NO: 320724 - RNA, 32 nt, Homo Sapiens
gggugcauuucccccgcagugcauaccggacu

SEQ ID NO: 320725 - RNA, 32 nt, Homo Sapiens
uucgcgcucccgcuccugcucccgcccgcaca

SEQ ID NO: 320726 - RNA, 32 nt, Homo Sapiens
gacugauggaacagaauagagaauuuagaaau

SEQ ID NO: 320727 - RNA, 32 nt, Homo Sapiens
ccggccccaucccccacaccaaauggccgccu

SEQ ID NO: 320728 - RNA, 32 nt, Homo Sapiens
uuuauugcauuuuuuaaaaauuugcaucuucu

SEQ ID NO: 320729 - RNA, 31 nt, Homo Sapiens
ccaacucuuuguguuaaauagauuuaaguaa

SEQ ID NO: 320730 - RNA, 32 nt, Homo Sapiens
aucaugugauuaugcuuuaccgguauaagaga

SEQ ID NO: 320731 - RNA, 32 nt, Homo Sapiens
uccccggcacacgcgcagccccggccucucgg

SEQ ID NO: 320732 - RNA, 32 nt, Homo Sapiens
caacaugaaaauaagguugacagaaaauaaac

SEQ ID NO: 320733 - RNA, 32 nt, Homo Sapiens
gguuccggcuccucccucuccuugugccucag

SEQ ID NO: 320734 - RNA, 32 nt, Homo Sapiens
gcugcgugccggcggcuugguggaguuucguc

SEQ ID NO: 320735 - RNA, 32 nt, Homo Sapiens
agugugagcuuugaauagauggcauuaucacu

SEQ ID NO: 320736 - RNA, 32 nt, Homo Sapiens
uggggacuccguccugagggucacuuggcccu

SEQ ID NO: 320737 - RNA, 32 nt, Homo Sapiens
gcuuguguccuccucagucagaauagaaaagu

SEQ ID NO: 320738 - RNA, 32 nt, Homo Sapiens
ugcccacaguguugcagauugccuggcuggca

SEQ ID NO: 320739 - RNA, 32 nt, Homo Sapiens
cacaagacgcacucacaggguggcggaaucuu

SEQ ID NO: 320740 - RNA, 32 nt, Homo Sapiens
ccugugagcuggugaccugggguccugggcug

SEQ ID NO: 320741 - RNA, 32 nt, Homo Sapiens
aacuaaacacgugacacaaacacacacaaaag

SEQ ID NO: 320742 - RNA, 32 nt, Homo Sapiens
gccauccccccgcucugccccgucgcacauuc

SEQ ID NO: 320743 - RNA, 32 nt, Homo Sapiens
ccgcuuuccgccggggcgagacccccagguuc

SEQ ID NO: 320744 - RNA, 32 nt, Homo Sapiens
ggacgguugcuguccucauuugcauuccaaga

SEQ ID NO: 320745 - RNA, 32 nt, Homo Sapiens
auuucugaacaagguucagaaaacauuguuua

SEQ ID NO: 320746 - RNA, 32 nt, Homo Sapiens
augaauggggaacggggaacugucugaccuug

SEQ ID NO: 320747 - RNA, 31 nt, Homo Sapiens
uaagugccaaacacucuccuggacucuggca

SEQ ID NO: 320748 - RNA, 32 nt, Homo Sapiens
acaugcaaacuaaaaguccguuaguggaggca

SEQ ID NO: 320749 - RNA, 32 nt, Homo Sapiens
cugucaucaaggagaccucucacuggucaccg

SEQ ID NO: 320750 - RNA, 32 nt, Homo Sapiens
cgucugcucaaccucccucagcccugugaaca

SEQ ID NO: 320751 - RNA, 32 nt, Homo Sapiens
uugcugcagggccaagcccuuuuuagugcugu

SEQ ID NO: 320752 - RNA, 32 nt, Homo Sapiens
accuuuuaauuaaugaaauaucuguauuuaau

SEQ ID NO: 320753 - RNA, 32 nt, Homo Sapiens
aaaagucuaacuuuuuuguguguaagcauuua

SEQ ID NO: 320754 - RNA, 31 nt, Homo Sapiens
aggauacuuaaaagauaguccacuucucuuu

SEQ ID NO: 320755 - RNA, 32 nt, Homo Sapiens
ccauuaaaaaucaacaacauucuaaugauuag

SEQ ID NO: 320756 - RNA, 32 nt, Homo Sapiens
acuagaaaaaucacucauuuaaaguguacaau

SEQ ID NO: 320757 - RNA, 30 nt, Homo Sapiens
ugcacagagaagcuuucucaaucggaaaag

SEQ ID NO: 320758 - RNA, 32 nt, Homo Sapiens
gggacauccaaggcaucuccaauugcugucug

SEQ ID NO: 320759 - RNA, 32 nt, Homo Sapiens
cggcugagaaugagaacgcugaagaugaucca

SEQ ID NO: 320760 - RNA, 32 nt, Homo Sapiens
uaauguauuuaguaaagaucauaagacauccu

SEQ ID NO: 320761 - RNA, 32 nt, Homo Sapiens
aguuuucuauuuccuucaguaauguguccaca

SEQ ID NO: 320762 - RNA, 32 nt, Homo Sapiens
gacaaaaggaguguuauagcaugaucaucggu

SEQ ID NO: 320763 - RNA, 32 nt, Homo Sapiens
uuugguuccagaugacuguauuacuuaaguag

SEQ ID NO: 320764 - RNA, 27 nt, Homo Sapiens
aauuauuccuucuuguuccucuguauu

SEQ ID NO: 320765 - RNA, 32 nt, Homo Sapiens
uucagccguugggcccaggcuuccuccccucc

SEQ ID NO: 320766 - RNA, 32 nt, Homo Sapiens
uccccaucagcaaagucucaccacagccucca

SEQ ID NO: 320767 - RNA, 32 nt, Homo Sapiens
cucggacagcauccauaagacccgcguggaga

SEQ ID NO: 320768 - RNA, 32 nt, Homo Sapiens
ccgagggaacccugggucuugggaagaacaac

SEQ ID NO: 320769 - RNA, 28 nt, Homo Sapiens
gacauggcucggcgcggcuggcggcggg

SEQ ID NO: 320770 - RNA, 32 nt, Homo Sapiens
ccgaguguuccguauagcacaaagaguuuugc

SEQ ID NO: 320771 - RNA, 32 nt, Homo Sapiens
gcggcaaagggaggggaaguaaacugaacugg

SEQ ID NO: 320772 - RNA, 32 nt, Homo Sapiens
auaaauuggugaagguuaucagguaccaaaga

SEQ ID NO: 320773 - RNA, 32 nt, Homo Sapiens
aaucccuaagccuagcugggaaggugaccaca

SEQ ID NO: 320774 - RNA, 29 nt, Homo Sapiens
augcaccuggagguggccauuauuggcac

SEQ ID NO: 320775 - RNA, 31 nt, Homo Sapiens
cauuugaaauaaaagccccagucucaacuuc

SEQ ID NO: 320776 - RNA, 32 nt, Homo Sapiens
gcacuugucucauuuuaauguaaagauuugcu

SEQ ID NO: 320777 - RNA, 32 nt, Homo Sapiens
uuugauagcauuaguggauccauuggauuucu

SEQ ID NO: 320778 - RNA, 32 nt, Homo Sapiens
guugaaggaaacaaaucaucauaccuuuaaua

SEQ ID NO: 320779 - RNA, 32 nt, Homo Sapiens
ggcuuuggacaagcuauucaccgggaacccuc

SEQ ID NO: 320780 - RNA, 32 nt, Homo Sapiens
cuugggcagucugggcugggagcccacacccc

SEQ ID NO: 320781 - RNA, 32 nt, Homo Sapiens
ugaccgcaaacaaggagagccuacugagcagc

SEQ ID NO: 320782 - RNA, 32 nt, Homo Sapiens
cucaaauuacaauucuuucuuugcaaaugaaa

SEQ ID NO: 320783 - RNA, 32 nt, Homo Sapiens
auaagaaagagaaaagagaugccuuuuguguu

SEQ ID NO: 320784 - RNA, 32 nt, Homo Sapiens
ugcuugggcauuuugggggguuuccuuaugca

SEQ ID NO: 320785 - RNA, 32 nt, Homo Sapiens
auugugcaugcuaguguuguauuucuauacag

SEQ ID NO: 320786 - RNA, 31 nt, Homo Sapiens
uguuuccucaaugaggggaaggcugcugcac

SEQ ID NO: 320787 - RNA, 32 nt, Homo Sapiens
ggggacaucccucucuaggccuaggccauguc

SEQ ID NO: 320788 - RNA, 32 nt, Homo Sapiens
gguuuggagugagugccuggaacgugaauugg

SEQ ID NO: 320789 - RNA, 32 nt, Homo Sapiens
aaaaacccucuuuauuugauauuuaaacucua

SEQ ID NO: 320790 - RNA, 31 nt, Homo Sapiens
aacugaacaaauuaccuauaauggauuuggu

SEQ ID NO: 320791 - RNA, 32 nt, Homo Sapiens
ggucggggccgggcccgggaagcgcgaggagc

SEQ ID NO: 320792 - RNA, 32 nt, Homo Sapiens
uaaguuuccugaggccuccccagccaugugga

SEQ ID NO: 320793 - RNA, 32 nt, Homo Sapiens
gaacagauauuguugcauuuuccacaaugcug

SEQ ID NO: 320794 - RNA, 31 nt, Homo Sapiens
caugugaguggacccauucagaaacuuucug

SEQ ID NO: 320795 - RNA, 32 nt, Homo Sapiens
agcccagaggccgggcaccauggcguccaucc

SEQ ID NO: 320796 - RNA, 32 nt, Homo Sapiens
ucaucaauuuaaaaucauucaauaucugacag

SEQ ID NO: 320797 - RNA, 32 nt, Homo Sapiens
uacuguauuuaguuugugauaaauuuuucacu

SEQ ID NO: 320798 - RNA, 32 nt, Homo Sapiens
gaucacuugagccccagaggucaaggcugcag

SEQ ID NO: 320799 - RNA, 32 nt, Homo Sapiens
gaggccuggaagcugcggggcccccgcccagg

SEQ ID NO: 320800 - RNA, 32 nt, Homo Sapiens
ccgggugcccugcccccguccaggagcccuag

SEQ ID NO: 320801 - RNA, 32 nt, Homo Sapiens
cggaagcgaagcagugucaacagucccuggua

SEQ ID NO: 320802 - RNA, 32 nt, Homo Sapiens
cgaauggacaaauugcggagaaguugcuucug

SEQ ID NO: 320803 - RNA, 32 nt, Homo Sapiens
ccaggggucacacaaucaguacuugcacacau

SEQ ID NO: 320804 - RNA, 32 nt, Homo Sapiens
uccucucucgcacccacccacccccucacccc

SEQ ID NO: 320805 - RNA, 32 nt, Homo Sapiens
gcauggggcaggguggcccaccccagugggca

SEQ ID NO: 320806 - RNA, 32 nt, Homo Sapiens
ggagagcaguugcagggcuggccugggcugug

SEQ ID NO: 320807 - RNA, 32 nt, Homo Sapiens
uucagucaacugugugaggaaucacuuccccu

SEQ ID NO: 320808 - RNA, 32 nt, Homo Sapiens
gaaaacuacaacauauuuacuaacaugcauga

SEQ ID NO: 320809 - RNA, 30 nt, Homo Sapiens
gugugccaauaauaaacuguguuaaugacc

SEQ ID NO: 320810 - RNA, 32 nt, Homo Sapiens
ccaaagccuuuugucacccaggcuggagugcc

SEQ ID NO: 320811 - RNA, 32 nt, Homo Sapiens
uugaaaugaagaucaaaucaucaaguccuaua

SEQ ID NO: 320812 - RNA, 32 nt, Homo Sapiens
ccagccuucuucugaccagcuuccucuucuga

SEQ ID NO: 320813 - RNA, 32 nt, Homo Sapiens
cagggugggagcugggccgggcugggauguca

SEQ ID NO: 320814 - RNA, 32 nt, Homo Sapiens
uccccaauucugccugccuccucccucccagc

SEQ ID NO: 320815 - RNA, 30 nt, Homo Sapiens
aaguuaguggacugcagcccuggggguugc

SEQ ID NO: 320816 - RNA, 32 nt, Homo Sapiens
ccaggcuggucuccagcuccugagcucaggcc

SEQ ID NO: 320817 - RNA, 32 nt, Homo Sapiens
uuuuuuuuuuuuuuuccaacugccaucuauac

SEQ ID NO: 320818 - RNA, 32 nt, Homo Sapiens
gcaauaaaauuuauacucaaccauauaauaac

SEQ ID NO: 320819 - RNA, 32 nt, Homo Sapiens
uuggagggguucuggggugccugacaaaguuc

SEQ ID NO: 320820 - RNA, 32 nt, Homo Sapiens
ccuacauucccucuccugcccagaugcccuuu

SEQ ID NO: 320821 - RNA, 32 nt, Homo Sapiens
guauguuuuuaaaauuguuacaucuagacaac

SEQ ID NO: 320822 - RNA, 32 nt, Homo Sapiens
gaucucuacaaugaaaacuauaaaacaucgau

SEQ ID NO: 320823 - RNA, 32 nt, Homo Sapiens
cacucggccggcagcggagccgcagccaccag

SEQ ID NO: 320824 - RNA, 32 nt, Homo Sapiens
ucugaucuuuugcucuuccaaccagcauuuau

SEQ ID NO: 320825 - RNA, 32 nt, Homo Sapiens
acaggaaugucucauuuuaguuguggggcgag

SEQ ID NO: 320826 - RNA, 32 nt, Homo Sapiens
uaucuguacuuugcaguuaacagugauauuuu

SEQ ID NO: 320827 - RNA, 30 nt, Homo Sapiens
cuaugucuuuaauaaaagcaucugaggaau

SEQ ID NO: 320828 - RNA, 32 nt, Homo Sapiens
uaacagauauucuaauucuucuuaauauuccc

SEQ ID NO: 320829 - RNA, 32 nt, Homo Sapiens
ugucuguugucugcgagccucuccugccaucu

SEQ ID NO: 320830 - RNA, 32 nt, Homo Sapiens
cauagaugacaucaacaguggugcuguggaau

SEQ ID NO: 320831 - RNA, 31 nt, Homo Sapiens
uagcugugggcggugcagcucgcggccuccu

SEQ ID NO: 320832 - RNA, 32 nt, Homo Sapiens
gaauuuuaaaauguuaaacuguaauuuguauu

SEQ ID NO: 320833 - RNA, 32 nt, Homo Sapiens
ucguaaaacuggggggaaccuuaaagagaaag

SEQ ID NO: 320834 - RNA, 32 nt, Homo Sapiens
ucauucuuugugucuucaguguuggcuuguuu

SEQ ID NO: 320835 - RNA, 32 nt, Homo Sapiens
auuuaagcagugagaggcagggaccagguuaa

SEQ ID NO: 320836 - RNA, 32 nt, Homo Sapiens
ggccaucacacgagggugcaggcggcccaggu

SEQ ID NO: 320837 - RNA, 32 nt, Homo Sapiens
ucuaaauacucuauugucuuuaauaauugugc

SEQ ID NO: 320838 - RNA, 32 nt, Homo Sapiens
gguggcugccagcccacugccuccugccuggg

SEQ ID NO: 320839 - RNA, 30 nt, Homo Sapiens
uguaaccaaccugccacccacugauucaga

SEQ ID NO: 320840 - RNA, 32 nt, Homo Sapiens
cccaggcccaguccacagagccagcagcuugg

SEQ ID NO: 320841 - RNA, 32 nt, Homo Sapiens
ugaugacaacuucgguaacuacagugaugaca

SEQ ID NO: 320842 - RNA, 30 nt, Homo Sapiens
ggggagcgcgcgcggcgcgauggacggucg

SEQ ID NO: 320843 - RNA, 32 nt, Homo Sapiens
cggacgcccggcgaguggcggaaagcgagacc

SEQ ID NO: 320844 - RNA, 32 nt, Homo Sapiens
gccgcugggccggcugccucgcaucgcuaugu

SEQ ID NO: 320845 - RNA, 32 nt, Homo Sapiens
guuauuaaaaauuguaaaugguaucacauuua

SEQ ID NO: 320846 - RNA, 32 nt, Homo Sapiens
acaucgcucaaguuuaaguaacaucgcucaag

SEQ ID NO: 320847 - RNA, 32 nt, Homo Sapiens
ggguucccugggucuugaacuacuuuaauaau

SEQ ID NO: 320848 - RNA, 32 nt, Homo Sapiens
aagccgggggagaggggccaggagaggaagcu

SEQ ID NO: 320849 - RNA, 32 nt, Homo Sapiens
aagggguggggguggggucagagcuuacaggu

SEQ ID NO: 320850 - RNA, 32 nt, Homo Sapiens
aaagaaacaaaacauuucuauuauugaguuaa

SEQ ID NO: 320851 - RNA, 32 nt, Homo Sapiens
ccgaguccgcugcucgccggcggccgcccggu

SEQ ID NO: 320852 - RNA, 31 nt, Homo Sapiens
aacuaucuugguauauuaaaguauuaucuuu

SEQ ID NO: 320853 - RNA, 32 nt, Homo Sapiens
ggggacugaggauugcggugggggguggggug

SEQ ID NO: 320854 - RNA, 32 nt, Homo Sapiens
caaagaaaaugaaauacagaugaugaugauga

SEQ ID NO: 320855 - RNA, 32 nt, Homo Sapiens
auuaauuugcucucaucguauuguguauauuc

SEQ ID NO: 320856 - RNA, 32 nt, Homo Sapiens
caggcccuccuuccuuucccuuuggugcuccc

SEQ ID NO: 320857 - RNA, 32 nt, Homo Sapiens
aagaaaagaaacagaaauaaacuuaggacaca

SEQ ID NO: 320858 - RNA, 32 nt, Homo Sapiens
uugugaguggaagggaggucacgcuaucgucc

SEQ ID NO: 320859 - RNA, 32 nt, Homo Sapiens
uguuuaguuacuguucauuuuacuuuauaaaa

SEQ ID NO: 320860 - RNA, 32 nt, Homo Sapiens
uuccagagaaaguggugauaugcuucuuccuu

SEQ ID NO: 320861 - RNA, 32 nt, Homo Sapiens
cccuccacuccagauggauauccagugauucc

SEQ ID NO: 320862 - RNA, 32 nt, Homo Sapiens
ccucggcgccccagcggcugcccugggcccgu

SEQ ID NO: 320863 - RNA, 32 nt, Homo Sapiens
gagguccagugcugucaccauccacuaggauc

SEQ ID NO: 320864 - RNA, 32 nt, Homo Sapiens
cccugucucagagcugaugaccucaccguugu

SEQ ID NO: 320865 - RNA, 32 nt, Homo Sapiens
cucuggagaccaugccucuccuacagcaagcc

SEQ ID NO: 320866 - RNA, 32 nt, Homo Sapiens
acuuaaauauuuuuguuuacauuuccagaaua

SEQ ID NO: 320867 - RNA, 32 nt, Homo Sapiens
auacaaauugguugguuuugacuucagauuga

SEQ ID NO: 320868 - RNA, 32 nt, Homo Sapiens
acacccuucucgcagccugggccucucgcauc

SEQ ID NO: 320869 - RNA, 32 nt, Homo Sapiens
guauaaaaaugaaaauuucuucugaugaacug

SEQ ID NO: 320870 - RNA, 32 nt, Homo Sapiens
acaacucaagggcacauagaaaguaaauaaaa

SEQ ID NO: 320871 - RNA, 32 nt, Homo Sapiens
ggcucucugcggcuggugggaaaacacacccu

SEQ ID NO: 320872 - RNA, 32 nt, Homo Sapiens
gggaccccaccuacacaggggcauugacagac

SEQ ID NO: 320873 - RNA, 32 nt, Homo Sapiens
uugcaccuucuggaacuaugggcuugagaaaa

SEQ ID NO: 320874 - RNA, 32 nt, Homo Sapiens
ccuucugccucauuuugugaugugucacaggu

SEQ ID NO: 320875 - RNA, 32 nt, Homo Sapiens
gauggcugcuagcuguguuuugaaauauuucu

SEQ ID NO: 320876 - RNA, 32 nt, Homo Sapiens
acaggaaaaugaugaagucccaaaagaccaga

SEQ ID NO: 320877 - RNA, 32 nt, Homo Sapiens
uccagcugagguccaaggucuuuguccuagaa

SEQ ID NO: 320878 - RNA, 32 nt, Homo Sapiens
guguccaugggcccgucugccggcucugccug

SEQ ID NO: 320879 - RNA, 32 nt, Homo Sapiens
aauuaugaagaaauaauaauaauacauaaggg

SEQ ID NO: 320880 - RNA, 32 nt, Homo Sapiens
cacggggcgcgagugacacgcgggagggagag

SEQ ID NO: 320881 - RNA, 32 nt, Homo Sapiens
gaaaagugaaauugaaaauaccaaaagaugua

SEQ ID NO: 320882 - RNA, 32 nt, Homo Sapiens
cuccucaccucccagacggggucucggccggg

SEQ ID NO: 320883 - RNA, 32 nt, Homo Sapiens
gauaaagucaguuuuuaccacuaucuuaggcu

SEQ ID NO: 320884 - RNA, 32 nt, Homo Sapiens
aggucuaggaagagggucugcagagcagaaag

SEQ ID NO: 320885 - RNA, 32 nt, Homo Sapiens
aaucagggacaccucaagauccccucacacag

SEQ ID NO: 320886 - RNA, 32 nt, Homo Sapiens
guuuguuuacaugcuguuuacaauggcauaau

SEQ ID NO: 320887 - RNA, 32 nt, Homo Sapiens
agauaguuuucauuuuaacuggcaugucauuu

SEQ ID NO: 320888 - RNA, 29 nt, Homo Sapiens
caaggauguauucucaguuuacagaccac

SEQ ID NO: 320889 - RNA, 32 nt, Homo Sapiens
agcugcuggagaaggggucagagccauaucaa

SEQ ID NO: 320890 - RNA, 32 nt, Homo Sapiens
caagagccacagaccgucugcagacgccuguc

SEQ ID NO: 320891 - RNA, 28 nt, Homo Sapiens
cugccggggcggccccagaggcuguccc

SEQ ID NO: 320892 - RNA, 32 nt, Homo Sapiens
ggugagaacugggcaaaaguugugaagcagca

SEQ ID NO: 320893 - RNA, 32 nt, Homo Sapiens
uacuguuuucuuuuuucuuaaccuacuaauag

SEQ ID NO: 320894 - RNA, 32 nt, Homo Sapiens
gaaccuccugaacagcauccaguuugcuuuua

SEQ ID NO: 320895 - RNA, 32 nt, Homo Sapiens
agaauaauauuuuuauugcuacuuugaguuuu

SEQ ID NO: 320896 - RNA, 32 nt, Homo Sapiens
auuaccaaacucccaguaacccccucaaagaa

SEQ ID NO: 320897 - RNA, 32 nt, Homo Sapiens
gggaagccaaagggcuccucuccacccugacu

SEQ ID NO: 320898 - RNA, 32 nt, Homo Sapiens
aagggaagggaaggaaacuuagcagagugcua

SEQ ID NO: 320899 - RNA, 32 nt, Homo Sapiens
uuauuuuuggaauugaaauacuugcuuaaacc

SEQ ID NO: 320900 - RNA, 32 nt, Homo Sapiens
uuucuuuaauguguauuuuucuugguccacca

SEQ ID NO: 320901 - RNA, 32 nt, Homo Sapiens
gggggccgggcugaggcugugcacaugcaguc

SEQ ID NO: 320902 - RNA, 32 nt, Homo Sapiens
cuauagugucauuguaauguuucuuaauucuc

SEQ ID NO: 320903 - RNA, 32 nt, Homo Sapiens
guuuagaucaaaguuuuuucugauucuucugu

SEQ ID NO: 320904 - RNA, 32 nt, Homo Sapiens
auuuacccucagggucaauaccucugagaccg

SEQ ID NO: 320905 - RNA, 32 nt, Homo Sapiens
gcgcucauauccuccagucaugcccuagagac

SEQ ID NO: 320906 - RNA, 32 nt, Homo Sapiens
gagagggaaaauuugggcagauaaacccaaag

SEQ ID NO: 320907 - RNA, 32 nt, Homo Sapiens
uugguuuuguugaauaugacaaugaaaucugu

SEQ ID NO: 320908 - RNA, 32 nt, Homo Sapiens
ccguucauuuucugccccucuucgcaaagcac

SEQ ID NO: 320909 - RNA, 32 nt, Homo Sapiens
gacggggccagcuugccccaccccgccccucc

SEQ ID NO: 320910 - RNA, 32 nt, Homo Sapiens
uauaauccagucagaggucaaaaggaaggaag

SEQ ID NO: 320911 - RNA, 32 nt, Homo Sapiens
gugggaauggggugaagaugacaacucagcaa

SEQ ID NO: 320912 - RNA, 32 nt, Homo Sapiens
cacuagacaucaaaauguguaaacaucuuugu

SEQ ID NO: 320913 - RNA, 32 nt, Homo Sapiens
cagugcauuguaaaaaugaguuguaauacauu

SEQ ID NO: 320914 - RNA, 32 nt, Homo Sapiens
uggccuuccugguccggaaaaaauauaccugg

SEQ ID NO: 320915 - RNA, 32 nt, Homo Sapiens
gcagaggaacggagacagguccucggaagccu

SEQ ID NO: 320916 - RNA, 32 nt, Homo Sapiens
auuuggugggguagaaagaaggcuagaaccua

SEQ ID NO: 320917 - RNA, 32 nt, Homo Sapiens
aaaccguuuuguggauggaaaauauuuuuauu

SEQ ID NO: 320918 - RNA, 32 nt, Homo Sapiens
ugcugcuccuuauuuuaacuuugucuugcauu

SEQ ID NO: 320919 - RNA, 32 nt, Homo Sapiens
cuuggggcggccugggacgcuggcgggcugga

SEQ ID NO: 320920 - RNA, 32 nt, Homo Sapiens
guaaaaguuuaaugacccacuuuagaugcucc

SEQ ID NO: 320921 - RNA, 32 nt, Homo Sapiens
aaauccacaacuuuuuaccauugaauuuauaa

SEQ ID NO: 320922 - RNA, 32 nt, Homo Sapiens
guuacuugauucaauuuaguucauugguaggg

SEQ ID NO: 320923 - RNA, 32 nt, Homo Sapiens
ccuggccacgcgugcccgcccgcggaccugag

SEQ ID NO: 320924 - RNA, 32 nt, Homo Sapiens
cucauucaugaaacagaagaggcuguacaagu

SEQ ID NO: 320925 - RNA, 32 nt, Homo Sapiens
caccaaaaauacuauauuaaucuuauuuaacu

SEQ ID NO: 320926 - RNA, 32 nt, Homo Sapiens
aaaagcaacugaggucuuaacuuucagacgcu

SEQ ID NO: 320927 - RNA, 32 nt, Homo Sapiens
aaaaguauauaauguuggaacacauauuaaua

SEQ ID NO: 320928 - RNA, 32 nt, Homo Sapiens
caaguugccuacacccaauaccagggauuuca

SEQ ID NO: 320929 - RNA, 32 nt, Homo Sapiens
acucugaugguaguuucuuuugcguucucuuu

SEQ ID NO: 320930 - RNA, 32 nt, Homo Sapiens
uuacauucugcacuucauaguuggauucugag

SEQ ID NO: 320931 - RNA, 32 nt, Homo Sapiens
uuggaaggcaaauaaaacucuuacagugauua

SEQ ID NO: 320932 - RNA, 32 nt, Homo Sapiens
gucuuagauuuucaguauuugaacuuauuuuu

SEQ ID NO: 320933 - RNA, 29 nt, Homo Sapiens
cuguguaugaagauaugugcagggcacgg

SEQ ID NO: 320934 - RNA, 32 nt, Homo Sapiens
uaacagaagaucugugaagaggauggugguuu

SEQ ID NO: 320935 - RNA, 32 nt, Homo Sapiens
cccguguuuuuggcucaggcucccucagggca

SEQ ID NO: 320936 - RNA, 32 nt, Homo Sapiens
cugcugagaaggaaaagcccgcaacuacuuua

SEQ ID NO: 320937 - RNA, 32 nt, Homo Sapiens
aaaaaaucaagaacuuggcaaguuuucuccau

SEQ ID NO: 320938 - RNA, 29 nt, Homo Sapiens
acauuucggggacuacuggacacuggcuc

SEQ ID NO: 320939 - RNA, 32 nt, Homo Sapiens
ucaaccgguccucaugccuguaucccagcacu

SEQ ID NO: 320940 - RNA, 32 nt, Homo Sapiens
uauggaucuucuguuucuaugucuuuuuaaaa

SEQ ID NO: 320941 - RNA, 32 nt, Homo Sapiens
aggcagaucaccugaggccaggcuggucucga

SEQ ID NO: 320942 - RNA, 32 nt, Homo Sapiens
gggcgcgggaggaggaaguagagcccgggacc

SEQ ID NO: 320943 - RNA, 30 nt, Homo Sapiens
ggcgcgagcagaggcggcggcggguguacu

SEQ ID NO: 320944 - RNA, 32 nt, Homo Sapiens
ccugcccagcagggucugccccugcccaccuc

SEQ ID NO: 320945 - RNA, 32 nt, Homo Sapiens
uuuaugcuucacgguccauacagucucuguca

SEQ ID NO: 320946 - RNA, 32 nt, Homo Sapiens
aaggaagaagaaaaaaggauccuugauguuug

SEQ ID NO: 320947 - RNA, 32 nt, Homo Sapiens
gaguguuuugcaaaacauaagaaugaucaguu

SEQ ID NO: 320948 - RNA, 32 nt, Homo Sapiens
acaacaacaaaauaaacuacuguggcagcguu

SEQ ID NO: 320949 - RNA, 32 nt, Homo Sapiens
ccagauugguauuuuuaaaaaaggugucaggc

SEQ ID NO: 320950 - RNA, 32 nt, Homo Sapiens
uuccgggauguggcgggauuuguccgcuucuu

SEQ ID NO: 320951 - RNA, 32 nt, Homo Sapiens
ucaggggcagugggagccguggagaguggaau

SEQ ID NO: 320952 - RNA, 32 nt, Homo Sapiens
uguaugcaaagccccagugccauggcugacac

SEQ ID NO: 320953 - RNA, 32 nt, Homo Sapiens
ugggaguuugggagaagcuccguaagcuuagu

SEQ ID NO: 320954 - RNA, 32 nt, Homo Sapiens
gagauuuguuguaaaagcuuugaaauuuaauu

SEQ ID NO: 320955 - RNA, 32 nt, Homo Sapiens
ccggacauugguuuuuaaauuuuuugucaguu

SEQ ID NO: 320956 - RNA, 32 nt, Homo Sapiens
ucagcuuugacaccucuuuucugauuuaaaga

SEQ ID NO: 320957 - RNA, 32 nt, Homo Sapiens
ucuguuuuuuuuuuuucuuucuucuuccccac

SEQ ID NO: 320958 - RNA, 32 nt, Homo Sapiens
auauuauauaugcaaagcacaaaugagugaau

SEQ ID NO: 320959 - RNA, 32 nt, Homo Sapiens
uccgcacagaaauaauggagcagcuauggcaa

SEQ ID NO: 320960 - RNA, 32 nt, Homo Sapiens
ccagcauggaaauuggucuucacacauacugc

SEQ ID NO: 320961 - RNA, 31 nt, Homo Sapiens
ccaggcuggcgcagccaaggccgaagcucug

SEQ ID NO: 320962 - RNA, 32 nt, Homo Sapiens
gaagaccaugcucaaugaccuccugcgguucg

SEQ ID NO: 320963 - RNA, 32 nt, Homo Sapiens
uguuuaauagagaaaauguacacagacugauu

SEQ ID NO: 320964 - RNA, 32 nt, Homo Sapiens
ggccacggccuaugcccucccugggccccugu

SEQ ID NO: 320965 - RNA, 32 nt, Homo Sapiens
cucuccgggaccgcugcccucacgcgccgcag

SEQ ID NO: 320966 - RNA, 32 nt, Homo Sapiens
acugaguucuucauuaugucugauggagauua

SEQ ID NO: 320967 - RNA, 31 nt, Homo Sapiens
cuucagaugcacugccugcgggugccagucu

SEQ ID NO: 320968 - RNA, 32 nt, Homo Sapiens
ggugcauagcguaauguccauguuguucuaca

SEQ ID NO: 320969 - RNA, 32 nt, Homo Sapiens
ccuauuaaugugauuucugacucuucauacgu

SEQ ID NO: 320970 - RNA, 32 nt, Homo Sapiens
acuauaauuucuguaacacacuaacaaaagca

SEQ ID NO: 320971 - RNA, 32 nt, Homo Sapiens
uugauuuugauguuuauucuccagguuuuugg

SEQ ID NO: 320972 - RNA, 32 nt, Homo Sapiens
gagaggcaggggaaauggaaggugaugcaguc

SEQ ID NO: 320973 - RNA, 32 nt, Homo Sapiens
accugucucugucaaccuaagaauguuggccu

SEQ ID NO: 320974 - RNA, 31 nt, Homo Sapiens
ucuucaccugcccaccccugaguuagccugc

SEQ ID NO: 320975 - RNA, 32 nt, Homo Sapiens
gucuggaggcauggcuggggcuggcgggggcc

SEQ ID NO: 320976 - RNA, 32 nt, Homo Sapiens
ugguccugcuccaugauguccgugaugugagc

SEQ ID NO: 320977 - RNA, 32 nt, Homo Sapiens
guacuuguggcauuuuccuguauugucuugga

SEQ ID NO: 320978 - RNA, 32 nt, Homo Sapiens
uguagccagcaugugucuguaauuguaugauu

SEQ ID NO: 320979 - RNA, 32 nt, Homo Sapiens
aaaucucacuguaucuacauaucaggugaccu

SEQ ID NO: 320980 - RNA, 32 nt, Homo Sapiens
uggcauuuucugacuucuuccuccuccuccuu

SEQ ID NO: 320981 - RNA, 32 nt, Homo Sapiens
cacagcacugaucacacugagauggaagacuc

SEQ ID NO: 320982 - RNA, 32 nt, Homo Sapiens
guccuuccucaaaaaauuuucuuaugcuccau

SEQ ID NO: 320983 - RNA, 32 nt, Homo Sapiens
uuucugugguggcauauaucauguaagacacu

SEQ ID NO: 320984 - RNA, 32 nt, Homo Sapiens
ggacacagagauccccuaagguccuggcccag

SEQ ID NO: 320985 - RNA, 32 nt, Homo Sapiens
ucuacaagaaauuuaaaaacuagccaggcgug

SEQ ID NO: 320986 - RNA, 30 nt, Homo Sapiens
cccgggggcaggcgagggcgcccagucccu

SEQ ID NO: 320987 - RNA, 30 nt, Homo Sapiens
ugggggacugcaggcacgcaaaauaaaaua

SEQ ID NO: 320988 - RNA, 32 nt, Homo Sapiens
uugcagagcacuucccaccucucugaauagug

SEQ ID NO: 320989 - RNA, 32 nt, Homo Sapiens
uugcuaaaaucugccuaguaccccgcuacccu

SEQ ID NO: 320990 - RNA, 32 nt, Homo Sapiens
ugcucccaggcuggggcugugcugcaggcucc

SEQ ID NO: 320991 - RNA, 32 nt, Homo Sapiens
ucucagcagcuuccuugcagcagagcagggcu

SEQ ID NO: 320992 - RNA, 32 nt, Homo Sapiens
aggagcucauucuccccucacugcugaagucu

SEQ ID NO: 320993 - RNA, 32 nt, Homo Sapiens
guccugaacaccaaauguguauugcacggccc

SEQ ID NO: 320994 - RNA, 32 nt, Homo Sapiens
cgugcccccacuugccuacccucuguccugcc

SEQ ID NO: 320995 - RNA, 32 nt, Homo Sapiens
uuuucucauuuguggcuuucugcaucacccaa

SEQ ID NO: 320996 - RNA, 32 nt, Homo Sapiens
aagcugaacuaaaauaaaaaugaaaaggagag

SEQ ID NO: 320997 - RNA, 32 nt, Homo Sapiens
uaugcccugucaugguuucuguuuggccugug

SEQ ID NO: 320998 - RNA, 32 nt, Homo Sapiens
aacagguuuauauagggcuacauccuaagaaa

SEQ ID NO: 320999 - RNA, 32 nt, Homo Sapiens
gccaagcgcgcccccaccucuccugugguacu

SEQ ID NO: 321000 - RNA, 32 nt, Homo Sapiens
ucucacauguuguguugcacuccaggcaccug

SEQ ID NO: 321001 - RNA, 32 nt, Homo Sapiens
aggagcugguggaggugagggaggcgcugagc

SEQ ID NO: 321002 - RNA, 32 nt, Homo Sapiens
uccucaggccccaccucagaccuacugaauca

SEQ ID NO: 321003 - RNA, 32 nt, Homo Sapiens
uugguccuggggaccauucauacccacacacc

SEQ ID NO: 321004 - RNA, 32 nt, Homo Sapiens
aagaauuaucaaucaaugcuaaagcuaggggg

SEQ ID NO: 321005 - RNA, 32 nt, Homo Sapiens
gagaaccaugaacaagcgcaagggcaggggaa

SEQ ID NO: 321006 - RNA, 32 nt, Homo Sapiens
ugauggaaaauggcaugaaauaauugcuauua

SEQ ID NO: 321007 - RNA, 32 nt, Homo Sapiens
gguccccuggggaggugugaacucaagggccu

SEQ ID NO: 321008 - RNA, 32 nt, Homo Sapiens
aacuuugugaauauauuaaaaaccuguuaauu

SEQ ID NO: 321009 - RNA, 32 nt, Homo Sapiens
cccugacccucuauucugcacccugugagcca

SEQ ID NO: 321010 - RNA, 32 nt, Homo Sapiens
ggcuaagaauguuguuaccaucuucuuuguuu

SEQ ID NO: 321011 - RNA, 32 nt, Homo Sapiens
aagacuggaaaacaauagcauuugucuugagu

SEQ ID NO: 321012 - RNA, 32 nt, Homo Sapiens
ugaaauaaaaauuuaaauaauuuuuuuuaaaa

SEQ ID NO: 321013 - RNA, 25 nt, Homo Sapiens
auggcugcgcccgugggaccgguga

SEQ ID NO: 321014 - RNA, 32 nt, Homo Sapiens
cacccaaguccucuuuuucucacuaccaccug

SEQ ID NO: 321015 - RNA, 32 nt, Homo Sapiens
gguugagaugacuucagcucugauuuggaaga

SEQ ID NO: 321016 - RNA, 32 nt, Homo Sapiens
caggacuuggucugcuggccuggccucuucug

SEQ ID NO: 321017 - RNA, 32 nt, Homo Sapiens
ggcuuuugcugucgcaguggguuccggagagu

SEQ ID NO: 321018 - RNA, 32 nt, Homo Sapiens
uuggcauuuuuccgauucuguucagaugacag

SEQ ID NO: 321019 - RNA, 32 nt, Homo Sapiens
ucauucucagauucacaccccaucccaaauaa

SEQ ID NO: 321020 - RNA, 32 nt, Homo Sapiens
guggggcugugcuugguggcagugugggaaac

SEQ ID NO: 321021 - RNA, 32 nt, Homo Sapiens
gugcauggcuggggguucugauggagcugugg

SEQ ID NO: 321022 - RNA, 32 nt, Homo Sapiens
cagugcugguggaaaaccuagagaucaccaag

SEQ ID NO: 321023 - RNA, 32 nt, Homo Sapiens
uccucugagccaggaggccggugcugggccag

SEQ ID NO: 321024 - RNA, 32 nt, Homo Sapiens
ugaagauucacguauccaucuggagaccuaca

SEQ ID NO: 321025 - RNA, 32 nt, Homo Sapiens
cgcucccggaagcugcagcagcugguaacaaa

SEQ ID NO: 321026 - RNA, 32 nt, Homo Sapiens
guagcaaugcaaaaauauucugauuacuuuag

SEQ ID NO: 321027 - RNA, 32 nt, Homo Sapiens
uucccccucacaggaugagcaugcucaguugg

SEQ ID NO: 321028 - RNA, 32 nt, Homo Sapiens
acugagggaaucccugugcugaucguggggca

SEQ ID NO: 321029 - RNA, 32 nt, Homo Sapiens
agccucauuucuauuucuucuucauuaauucu

SEQ ID NO: 321030 - RNA, 32 nt, Homo Sapiens
agccgggaggcgggcccggcccgagcuugucc

SEQ ID NO: 321031 - RNA, 32 nt, Homo Sapiens
ucugagaaaccugaacggacuccauuuggcuc

SEQ ID NO: 321032 - RNA, 32 nt, Homo Sapiens
aucacguguccuuacagaaucauuccaagaac

SEQ ID NO: 321033 - RNA, 32 nt, Homo Sapiens
ggggcccagggucagggugagagagagcuggg

SEQ ID NO: 321034 - RNA, 32 nt, Homo Sapiens
gaauugaaaaagaaaauuuggcaauauuagag

SEQ ID NO: 321035 - RNA, 32 nt, Homo Sapiens
cagcauguggccucugguggggcuggguugga

SEQ ID NO: 321036 - RNA, 32 nt, Homo Sapiens
uggacgugucgcugcugcugcugcugcugccg

SEQ ID NO: 321037 - RNA, 32 nt, Homo Sapiens
gcugaggucgggagggugguguguacagagcu

SEQ ID NO: 321038 - RNA, 32 nt, Homo Sapiens
uaucaaacaaacaaacaaaaacuguuaauaua

SEQ ID NO: 321039 - RNA, 32 nt, Homo Sapiens
ugccgggcgugggcguggacucgggcgugggc

SEQ ID NO: 321040 - RNA, 29 nt, Homo Sapiens
ugacugacuauucaauaccauacugaaga

SEQ ID NO: 321041 - RNA, 32 nt, Homo Sapiens
ccuuagugccagcucugggggccuagcaggag

SEQ ID NO: 321042 - RNA, 32 nt, Homo Sapiens
aaaauacaaaaauuagccgggugugguggggu

SEQ ID NO: 321043 - RNA, 32 nt, Homo Sapiens
ugaugcugagauucuucaggcuuccugcaauu

SEQ ID NO: 321044 - RNA, 32 nt, Homo Sapiens
acccuuccuaggcacuguccccucccacagcc

SEQ ID NO: 321045 - RNA, 32 nt, Homo Sapiens
gaggucagagugaugcaauugcuggaggaaga

SEQ ID NO: 321046 - RNA, 32 nt, Homo Sapiens
aagccuuccagaagucaagucucuuaagcuau

SEQ ID NO: 321047 - RNA, 32 nt, Homo Sapiens
gccuucucuccaagcugggagcuccugggccc

SEQ ID NO: 321048 - RNA, 32 nt, Homo Sapiens
cuguucgggaggaaaaguuccucaccagacag

SEQ ID NO: 321049 - RNA, 32 nt, Homo Sapiens
uagcauaacauaagcaaaauagauaaguacaa

SEQ ID NO: 321050 - RNA, 32 nt, Homo Sapiens
aucccccagccccaagccugcgcgcaucuguc

SEQ ID NO: 321051 - RNA, 32 nt, Homo Sapiens
gcgccgcgccgcgccaugucggugaacaugga

SEQ ID NO: 321052 - RNA, 32 nt, Homo Sapiens
cuuugcauccuucaauccaaucaaguugacac

SEQ ID NO: 321053 - RNA, 31 nt, Homo Sapiens
uggauauggaauaagcagguauaaaaaauau

SEQ ID NO: 321054 - RNA, 32 nt, Homo Sapiens
uuguuuugucuccugagagccaauaaagcugu

SEQ ID NO: 321055 - RNA, 32 nt, Homo Sapiens
ggucauaaccucaccagccaccucugagguca

SEQ ID NO: 321056 - RNA, 32 nt, Homo Sapiens
cccagugcccgcccuggcccagccccgaucca

SEQ ID NO: 321057 - RNA, 32 nt, Homo Sapiens
gaggagcucugcaagucucagcuaggaauggg

SEQ ID NO: 321058 - RNA, 32 nt, Homo Sapiens
acaugcggccccacccaaggucaggcccugau

SEQ ID NO: 321059 - RNA, 32 nt, Homo Sapiens
gcuuaaguguaaaugaaguacaguaguuuccc

SEQ ID NO: 321060 - RNA, 32 nt, Homo Sapiens
uauuugcauguuuuuuguuaauuuagcuaaag

SEQ ID NO: 321061 - RNA, 32 nt, Homo Sapiens
gaccucuggccuggcccuccccaggggccucc

SEQ ID NO: 321062 - RNA, 32 nt, Homo Sapiens
aagcuacugccauccuggcccagggcaucugg

SEQ ID NO: 321063 - RNA, 32 nt, Homo Sapiens
ugaaagaauauuaaaucugauggauccagcca

SEQ ID NO: 321064 - RNA, 32 nt, Homo Sapiens
ccgucuuguaaauguuuggcacuuugcuacuu

SEQ ID NO: 321065 - RNA, 32 nt, Homo Sapiens
agugguuauuuuuauauugaauggcaagaaug

SEQ ID NO: 321066 - RNA, 32 nt, Homo Sapiens
acagucauuucaggccuguuucccuuuuucuc

SEQ ID NO: 321067 - RNA, 32 nt, Homo Sapiens
agcggcggucgccgccaccggcgccuccaccu

SEQ ID NO: 321068 - RNA, 32 nt, Homo Sapiens
agaguccuuagcagacaaaugguagauguauc

SEQ ID NO: 321069 - RNA, 32 nt, Homo Sapiens
uaugagacguaccaucuguguauugagcucug

SEQ ID NO: 321070 - RNA, 32 nt, Homo Sapiens
aaguguuuugaaaagucuaauggagauauaau

SEQ ID NO: 321071 - RNA, 32 nt, Homo Sapiens
ccccuucccuccccgccaagagcucugccagg

SEQ ID NO: 321072 - RNA, 32 nt, Homo Sapiens
uuuuuuacuguaaacaauaaggagacuuugcu

SEQ ID NO: 321073 - RNA, 32 nt, Homo Sapiens
gaguugcaggauaucuagcaauuuaagaaaau

SEQ ID NO: 321074 - RNA, 32 nt, Homo Sapiens
uggagacaagauauuguaaggaacgaacaagg

SEQ ID NO: 321075 - RNA, 32 nt, Homo Sapiens
cccuuauccgccaucggggauagaacagaaag

SEQ ID NO: 321076 - RNA, 32 nt, Homo Sapiens
gggaaagauggaucuugaagcuaauccugcag

SEQ ID NO: 321077 - RNA, 32 nt, Homo Sapiens
uggcucugaguguuccucucagcaccucugag

SEQ ID NO: 321078 - RNA, 32 nt, Homo Sapiens
gggaaaggcgcggcguggcuuggcucaggugc

SEQ ID NO: 321079 - RNA, 32 nt, Homo Sapiens
aaguaagcuaaaucaauuuaagccauuaauag

SEQ ID NO: 321080 - RNA, 32 nt, Homo Sapiens
acggagccucuccugaaacaagaggggccggu

SEQ ID NO: 321081 - RNA, 32 nt, Homo Sapiens
aagggcagcgccgaccgcguguccuuucacag

SEQ ID NO: 321082 - RNA, 31 nt, Homo Sapiens
gcccucccaucacugagcuccacuccuuccu

SEQ ID NO: 321083 - RNA, 32 nt, Homo Sapiens
acaaacugauuauuuuccucuuucuuugguaa

SEQ ID NO: 321084 - RNA, 32 nt, Homo Sapiens
augagcacaaaauuaugguaauuuuucaccug

SEQ ID NO: 321085 - RNA, 32 nt, Homo Sapiens
ggagagaaaccgcauucacaaaaaagaaaucc

SEQ ID NO: 321086 - RNA, 32 nt, Homo Sapiens
uugagugucaggcuuuauauauauucagcauu

SEQ ID NO: 321087 - RNA, 32 nt, Homo Sapiens
aauacaccaccacaauggaaaacaaguucaaa

SEQ ID NO: 321088 - RNA, 32 nt, Homo Sapiens
aucggccucccucccccacgacucagcaauac

SEQ ID NO: 321089 - RNA, 32 nt, Homo Sapiens
gauguggucagcaguccccaccagcuaucaga

SEQ ID NO: 321090 - RNA, 32 nt, Homo Sapiens
caccguacgcgaggucgcggcgcguccgugac

SEQ ID NO: 321091 - RNA, 32 nt, Homo Sapiens
cuccuauccugugcgcaacccuuucuacacca

SEQ ID NO: 321092 - RNA, 32 nt, Homo Sapiens
cgaaggcucucuccccgcagguagggcugugg

SEQ ID NO: 321093 - RNA, 32 nt, Homo Sapiens
agacuuggaaaauuauuuuaaauaaacaauua

SEQ ID NO: 321094 - RNA, 32 nt, Homo Sapiens
uccuggggcuccuggccucccgggcugugucc

SEQ ID NO: 321095 - RNA, 32 nt, Homo Sapiens
ugggcccacgcugugucccgggcccgccuccc

SEQ ID NO: 321096 - RNA, 32 nt, Homo Sapiens
acaaagggcaaagggauauggaauguuuacug

SEQ ID NO: 321097 - RNA, 32 nt, Homo Sapiens
uucaccccacccaagacuucaggaagugucau

SEQ ID NO: 321098 - RNA, 32 nt, Homo Sapiens
gaccuggacuuccagcagcuggucucggaagu

SEQ ID NO: 321099 - RNA, 32 nt, Homo Sapiens
gcucugcauaagauuauauacaaagcugucac

SEQ ID NO: 321100 - RNA, 32 nt, Homo Sapiens
ugaggaggccugcaucauccccugccccucag

SEQ ID NO: 321101 - RNA, 32 nt, Homo Sapiens
guugcaaaaagaaugaaaugagcugggcuguu

SEQ ID NO: 321102 - RNA, 32 nt, Homo Sapiens
ccuuauuugaaguggauaaaucuuguaacucg

SEQ ID NO: 321103 - RNA, 32 nt, Homo Sapiens
guuuggaaaauauuuuguucaagauaaaacug

SEQ ID NO: 321104 - RNA, 32 nt, Homo Sapiens
gaaaagacuccgccccucccccucccccucga

SEQ ID NO: 321105 - RNA, 32 nt, Homo Sapiens
gacccggagcagcauguggacucucgggcgcc

SEQ ID NO: 321106 - RNA, 32 nt, Homo Sapiens
aaggggugcaacuuauuaauucuugaacauac

SEQ ID NO: 321107 - RNA, 32 nt, Homo Sapiens
agacauauuuuggagguaacauugucaggacu

SEQ ID NO: 321108 - RNA, 32 nt, Homo Sapiens
ccauugguucuuccuuucccuggagcugaggu

SEQ ID NO: 321109 - RNA, 32 nt, Homo Sapiens
caucgaaguaacaugcaaccaugguacaaaga

SEQ ID NO: 321110 - RNA, 32 nt, Homo Sapiens
uguuguuugaucuucucaaacaucuaguuccc

SEQ ID NO: 321111 - RNA, 32 nt, Homo Sapiens
ugccgaagcccccucaggauccccucaacaag

SEQ ID NO: 321112 - RNA, 31 nt, Homo Sapiens
agaaggcggcacuucuggccaggucucugcc

SEQ ID NO: 321113 - RNA, 32 nt, Homo Sapiens
cacuuuauuuaaaaagaauggauaaaugcaau

SEQ ID NO: 321114 - RNA, 30 nt, Homo Sapiens
gcagauuguuagggcggcgggaagggagga

SEQ ID NO: 321115 - RNA, 32 nt, Homo Sapiens
ucugguuucagaguucucucuauauuggaggg

SEQ ID NO: 321116 - RNA, 30 nt, Homo Sapiens
aggagggugagccgcgcgggaggggcccgc

SEQ ID NO: 321117 - RNA, 32 nt, Homo Sapiens
cuggggaggauuuauucacaagcagaggccua

SEQ ID NO: 321118 - RNA, 32 nt, Homo Sapiens
ugcacccaugcugccuggagccaggcacaggg

SEQ ID NO: 321119 - RNA, 32 nt, Homo Sapiens
cuuucaaaguagcauuuuuuuaguuaguuuac

SEQ ID NO: 321120 - RNA, 32 nt, Homo Sapiens
ucuguguucaggugcccauuuccuuguguaca

SEQ ID NO: 321121 - RNA, 32 nt, Homo Sapiens
gauccuugccccaccccuugcuuccagaaagg

SEQ ID NO: 321122 - RNA, 32 nt, Homo Sapiens
ggcuuuugauaaaauucaacaucgcuucaugu

SEQ ID NO: 321123 - RNA, 32 nt, Homo Sapiens
acucauauguuauuuuuaaaugaaucuuuucu

SEQ ID NO: 321124 - RNA, 32 nt, Homo Sapiens
ggagaugccggggaccugggccgcgcugccag

SEQ ID NO: 321125 - RNA, 32 nt, Homo Sapiens
uucuuucaguuuuuaaugcuuaucuauugauc

SEQ ID NO: 321126 - RNA, 32 nt, Homo Sapiens
cacuugccuguuggugccacuccaucccgggc

SEQ ID NO: 321127 - RNA, 32 nt, Homo Sapiens
cgcucccuuucccggccucguuuuccggauaa

SEQ ID NO: 321128 - RNA, 32 nt, Homo Sapiens
gcguggucauauuuguuccugugaucuuauug

SEQ ID NO: 321129 - RNA, 32 nt, Homo Sapiens
gaucugggauuacaucgaaaacaaaauagagg

SEQ ID NO: 321130 - RNA, 32 nt, Homo Sapiens
agaaauaugaagaucuagaaacuaauaaaaua

SEQ ID NO: 321131 - RNA, 32 nt, Homo Sapiens
ggcugcagcggccggcaagacccuggaagaga

SEQ ID NO: 321132 - RNA, 32 nt, Homo Sapiens
cgucauuguaguaaaaguuuuagccagcgcuc

SEQ ID NO: 321133 - RNA, 32 nt, Homo Sapiens
gaaaugccauacacacacacaaacacacacau

SEQ ID NO: 321134 - RNA, 32 nt, Homo Sapiens
gaaccuaauauuugaaaugggucucagacaug

SEQ ID NO: 321135 - RNA, 32 nt, Homo Sapiens
ugacaaugucauuuuuaauguuccaucuucag

SEQ ID NO: 321136 - RNA, 32 nt, Homo Sapiens
guuaaacagcuauguauguaaaaguaaggcuu

SEQ ID NO: 321137 - RNA, 32 nt, Homo Sapiens
gucccgcuccacggagucuuccagaacaccuc

SEQ ID NO: 321138 - RNA, 32 nt, Homo Sapiens
cugcaagccacuuuuccaugccaagcauccac

SEQ ID NO: 321139 - RNA, 32 nt, Homo Sapiens
gcuccucggccgcgcaaugggcacccgcgacg

SEQ ID NO: 321140 - RNA, 32 nt, Homo Sapiens
ggcacacagauaacaggguaagaaauuggucu

SEQ ID NO: 321141 - RNA, 32 nt, Homo Sapiens
agugccaggaggaaggaaggcugguuuggugg

SEQ ID NO: 321142 - RNA, 32 nt, Homo Sapiens
cuugaugcacagagaagcuggggaggagcuuu

SEQ ID NO: 321143 - RNA, 32 nt, Homo Sapiens
cugaaggaacaaugagaaacggugaugaaagg

SEQ ID NO: 321144 - RNA, 32 nt, Homo Sapiens
acuggcccaucccuccccucuagugcuguccu

SEQ ID NO: 321145 - RNA, 32 nt, Homo Sapiens
ucuuaccccacugccacauaccucuguuuuaa

SEQ ID NO: 321146 - RNA, 32 nt, Homo Sapiens
ccacgggggcuguggcucugggugggcguggc

SEQ ID NO: 321147 - RNA, 32 nt, Homo Sapiens
auuguauuucugauucucccucucuucgaauu

SEQ ID NO: 321148 - RNA, 32 nt, Homo Sapiens
guuaaauaaccaagacuucacaggcaaagcca

SEQ ID NO: 321149 - RNA, 32 nt, Homo Sapiens
acagaaauauauauuuauaacugcauugauaa

SEQ ID NO: 321150 - RNA, 32 nt, Homo Sapiens
auugcuguggccauucaugaacagucagucag

SEQ ID NO: 321151 - RNA, 32 nt, Homo Sapiens
cgagaggcugaggcaagaagaucacuugagcc

SEQ ID NO: 321152 - RNA, 32 nt, Homo Sapiens
uucacagucuacugccuguuuccacugaaaac

SEQ ID NO: 321153 - RNA, 32 nt, Homo Sapiens
gcauggcauccaagacucuuuaugaucuggcc

SEQ ID NO: 321154 - RNA, 32 nt, Homo Sapiens
caaccacaaaucuuuccaacucuacggauuug

SEQ ID NO: 321155 - RNA, 32 nt, Homo Sapiens
uuccuaaaacuaaaacuccauucuagucuugg

SEQ ID NO: 321156 - RNA, 30 nt, Homo Sapiens
ccugcacugguugccaccaacauucucuug

SEQ ID NO: 321157 - RNA, 32 nt, Homo Sapiens
cgccugagaagccugcagcauccaggcagccg

SEQ ID NO: 321158 - RNA, 32 nt, Homo Sapiens
agaaauggaaaacaggagucgauuuuccgucu

SEQ ID NO: 321159 - RNA, 32 nt, Homo Sapiens
ugaguuuuacacaacaacaaaugaaaauaaau

SEQ ID NO: 321160 - RNA, 32 nt, Homo Sapiens
cguguuggguacauggauuugcugugaccuga

SEQ ID NO: 321161 - RNA, 32 nt, Homo Sapiens
caccccaggcagucugugugugaggcauagcc

SEQ ID NO: 321162 - RNA, 32 nt, Homo Sapiens
augaaugacucgaucaaucaacugauccauga

SEQ ID NO: 321163 - RNA, 31 nt, Homo Sapiens
aggacgucacggaggaggacugugcucuucg

SEQ ID NO: 321164 - RNA, 32 nt, Homo Sapiens
cuuagauugcuucauagauuuauuuaaguacu

SEQ ID NO: 321165 - RNA, 32 nt, Homo Sapiens
ugaaucaaaaauguauugaaucaucaaauaaa

SEQ ID NO: 321166 - RNA, 32 nt, Homo Sapiens
caaacaaagggucagagagaauugacaguaaa

SEQ ID NO: 321167 - RNA, 32 nt, Homo Sapiens
cuagccugugaccccucgggacugccuggugc

SEQ ID NO: 321168 - RNA, 32 nt, Homo Sapiens
aaugaaagauuaaguauauuaacacuuuucag

SEQ ID NO: 321169 - RNA, 32 nt, Homo Sapiens
aucauuucaaauuuauaccagccugaauagug

SEQ ID NO: 321170 - RNA, 32 nt, Homo Sapiens
ccuagguccuggggcagcgaugacucacugca

SEQ ID NO: 321171 - RNA, 32 nt, Homo Sapiens
aacaccuuucccuguuuuccauuuauacacau

SEQ ID NO: 321172 - RNA, 32 nt, Homo Sapiens
cugaucuauuggggaacagagaagagacaggc

SEQ ID NO: 321173 - RNA, 32 nt, Homo Sapiens
acugcuuccggccagaggucccgggcggagga

SEQ ID NO: 321174 - RNA, 32 nt, Homo Sapiens
gcuagguccucuaucauguuccugggucuucu

SEQ ID NO: 321175 - RNA, 32 nt, Homo Sapiens
uuuugaaauauuaaacccuggaucaguccuuu

SEQ ID NO: 321176 - RNA, 31 nt, Homo Sapiens
ugcuaggagccccagcuuccuguguuuuuaa

SEQ ID NO: 321177 - RNA, 32 nt, Homo Sapiens
cgucaggagagccuucugggcaguggcucuaa

SEQ ID NO: 321178 - RNA, 32 nt, Homo Sapiens
ggacgugugcgcgccgaccaauggcugcuuca

SEQ ID NO: 321179 - RNA, 32 nt, Homo Sapiens
ugcagucuauagggcagggcccugccccagcg

SEQ ID NO: 321180 - RNA, 32 nt, Homo Sapiens
guucgggagccacggaugcccuggacacucaa

SEQ ID NO: 321181 - RNA, 32 nt, Homo Sapiens
ucccccuugcuacuccaggugucugccccauc

SEQ ID NO: 321182 - RNA, 32 nt, Homo Sapiens
uaaacaaaaauauuguccgaagcucuaaauac

SEQ ID NO: 321183 - RNA, 31 nt, Homo Sapiens
auucaaaagguaacuugggugcuguuaaaag

SEQ ID NO: 321184 - RNA, 32 nt, Homo Sapiens
cuccagccagcuucuugagccuauuugguuua

SEQ ID NO: 321185 - RNA, 32 nt, Homo Sapiens
uaaacagaaaucaguacuccgcaugcgcuccu

SEQ ID NO: 321186 - RNA, 32 nt, Homo Sapiens
auaguguaaaaugucauuuuguuuggaauguu

SEQ ID NO: 321187 - RNA, 32 nt, Homo Sapiens
agaggagucucaugggcugggaugcuguugug

SEQ ID NO: 321188 - RNA, 32 nt, Homo Sapiens
acugugccgaggggcgggggcaggaggacggc

SEQ ID NO: 321189 - RNA, 32 nt, Homo Sapiens
uuuaacauuugugcuuaaauuguuacagaaau

SEQ ID NO: 321190 - RNA, 32 nt, Homo Sapiens
gucucugcgggccagcaacgugauucuccuug

SEQ ID NO: 321191 - RNA, 32 nt, Homo Sapiens
aacccuggauuuuuuuuuuuuauuuaacauug

SEQ ID NO: 321192 - RNA, 32 nt, Homo Sapiens
augaaauaaaacuacauggucaacaguaaaaa

SEQ ID NO: 321193 - RNA, 32 nt, Homo Sapiens
uauuuggucauucaauuuacuuguuuuuaaua

SEQ ID NO: 321194 - RNA, 32 nt, Homo Sapiens
gagaagcuggaaagugugaaugcugaacugaa

SEQ ID NO: 321195 - RNA, 32 nt, Homo Sapiens
acaggguuuuaacgugcucaacuuuaauuuuu

SEQ ID NO: 321196 - RNA, 32 nt, Homo Sapiens
ggagcgcagcgcggagcgcugagccaggcgcc

SEQ ID NO: 321197 - RNA, 32 nt, Homo Sapiens
ggcuucugacuucagggacaaaacucagugaa

SEQ ID NO: 321198 - RNA, 32 nt, Homo Sapiens
cccgccgugccccgcgguccccggccuuccca

SEQ ID NO: 321199 - RNA, 32 nt, Homo Sapiens
uagaucaaauacuauaugcaagaaaucauagc

SEQ ID NO: 321200 - RNA, 32 nt, Homo Sapiens
ugauuuugugucuggcaccauguuagacaguu

SEQ ID NO: 321201 - RNA, 32 nt, Homo Sapiens
gcaccccacccauucaaguccacauccccaga

SEQ ID NO: 321202 - RNA, 32 nt, Homo Sapiens
cucaccgcaaccuccgccuuccagguucaagc

SEQ ID NO: 321203 - RNA, 32 nt, Homo Sapiens
uuucuggugucugcucagcuguccccucauuc

SEQ ID NO: 321204 - RNA, 32 nt, Homo Sapiens
uuggugaggaagaguccuggaauggggcugga

SEQ ID NO: 321205 - RNA, 32 nt, Homo Sapiens
cuagagaaccuccuccucaaccagcuacguac

SEQ ID NO: 321206 - RNA, 32 nt, Homo Sapiens
uugccaggcagccccagcagcgccgccagcag

SEQ ID NO: 321207 - RNA, 32 nt, Homo Sapiens
aagugauguuguuuucuuucuguugcauccaa

SEQ ID NO: 321208 - RNA, 32 nt, Homo Sapiens
gagacagagucucacugucacccaggcugaac

SEQ ID NO: 321209 - RNA, 32 nt, Homo Sapiens
aucagauuuaaggauaauacuccaucauauaa

SEQ ID NO: 321210 - RNA, 31 nt, Homo Sapiens
uggacuguacagaacacuccaagggccaaug

SEQ ID NO: 321211 - RNA, 32 nt, Homo Sapiens
ugcuguaaauggaaauaaauauuguucuuuau

SEQ ID NO: 321212 - RNA, 32 nt, Homo Sapiens
guuaacugaugauugugggguuugucauaucu

SEQ ID NO: 321213 - RNA, 32 nt, Homo Sapiens
uuucuucagggccagacagcuuuuaauugaaa

SEQ ID NO: 321214 - RNA, 32 nt, Homo Sapiens
uggcagggagcugcggacugcagaccaggaaa

SEQ ID NO: 321215 - RNA, 32 nt, Homo Sapiens
aguucucacaguauagaagagaacuuaaagag

SEQ ID NO: 321216 - RNA, 32 nt, Homo Sapiens
cuccuacucccaucugaacaagagggggaucu

SEQ ID NO: 321217 - RNA, 32 nt, Homo Sapiens
uaguuuauauuggaaagaaaaacaauuacaac

SEQ ID NO: 321218 - RNA, 32 nt, Homo Sapiens
aauauugaagaaaaaaucgcaucuguaccaaa

SEQ ID NO: 321219 - RNA, 32 nt, Homo Sapiens
uuuacuguuucauuguaccaugaaaccauuug

SEQ ID NO: 321220 - RNA, 32 nt, Homo Sapiens
ccugcuuccgcaauggguggguugugagugcu

SEQ ID NO: 321221 - RNA, 32 nt, Homo Sapiens
ugucaagauggauuuuccccuuuuaucucugc

SEQ ID NO: 321222 - RNA, 32 nt, Homo Sapiens
gccuuuuuuuucugucacuauuuuaugucccu

SEQ ID NO: 321223 - RNA, 32 nt, Homo Sapiens
cugaguuuaccucggcggcgaugccuccgccu

SEQ ID NO: 321224 - RNA, 32 nt, Homo Sapiens
cguucuccgggcaccgcgcgcgggaagccaga

SEQ ID NO: 321225 - RNA, 32 nt, Homo Sapiens
ggcacagccuacugaccccaaggagccuggca

SEQ ID NO: 321226 - RNA, 32 nt, Homo Sapiens
augaggcagcggcggcggcggcggcggcggca

SEQ ID NO: 321227 - RNA, 32 nt, Homo Sapiens
gcccgggccuggcucucuagcggccgccuggc

SEQ ID NO: 321228 - RNA, 32 nt, Homo Sapiens
cuuucucauuuccaaugauguacccuguacac

SEQ ID NO: 321229 - RNA, 32 nt, Homo Sapiens
gaagaaccugcagauucuuccauccucagcug

SEQ ID NO: 321230 - RNA, 32 nt, Homo Sapiens
auuuuuuuuuucugauagcacuuugaggauau

SEQ ID NO: 321231 - RNA, 32 nt, Homo Sapiens
agucacugacaguuaacaaaccuuugcaaaca

SEQ ID NO: 321232 - RNA, 32 nt, Homo Sapiens
cagagaauuaaaccccugguggguuggugacu

SEQ ID NO: 321233 - RNA, 32 nt, Homo Sapiens
ccacaugccaggggccuuugggugcuguuuug

SEQ ID NO: 321234 - RNA, 32 nt, Homo Sapiens
uggugucuguccgugcgcacgcagugcggcgu

SEQ ID NO: 321235 - RNA, 32 nt, Homo Sapiens
ccagacuucggaacggguguccugcuacuccu

SEQ ID NO: 321236 - RNA, 32 nt, Homo Sapiens
cuguugguggcuaggggagcagacacaaacua

SEQ ID NO: 321237 - RNA, 32 nt, Homo Sapiens
aaguugaguucucauuuuuuuaaccuguuaua

SEQ ID NO: 321238 - RNA, 32 nt, Homo Sapiens
aagauaugaagaaaauggcacucauuguggcc

SEQ ID NO: 321239 - RNA, 32 nt, Homo Sapiens
uuuguaaggaaauaaugagcuagauaaaauau

SEQ ID NO: 321240 - RNA, 32 nt, Homo Sapiens
gcccugaaaaggaggaaugauuggggccagca

SEQ ID NO: 321241 - RNA, 32 nt, Homo Sapiens
ucaggauucaagcuagguagucaguaucucag

SEQ ID NO: 321242 - RNA, 32 nt, Homo Sapiens
auuuaucagauuaaucucuugcucuccugcau

SEQ ID NO: 321243 - RNA, 32 nt, Homo Sapiens
gggacaaugcaaacaggucacagugcauuccc

SEQ ID NO: 321244 - RNA, 32 nt, Homo Sapiens
gcuggcugcagccuccaccucccuggcucaag

SEQ ID NO: 321245 - RNA, 32 nt, Homo Sapiens
gaacagcuggagguggacggcagagugccgcg

SEQ ID NO: 321246 - RNA, 32 nt, Homo Sapiens
cuccccuggggagguccccaccccuccccucc

SEQ ID NO: 321247 - RNA, 32 nt, Homo Sapiens
cuuugcacauguccuuguuuguauuguuuaaa

SEQ ID NO: 321248 - RNA, 32 nt, Homo Sapiens
uaagaaucuauuuuaauuccuuauuucuucau

SEQ ID NO: 321249 - RNA, 32 nt, Homo Sapiens
cagcaugguuugcaugacuuuacacuauauaa

SEQ ID NO: 321250 - RNA, 32 nt, Homo Sapiens
aagugugaaauauuuagaugaaauuuucucuu

SEQ ID NO: 321251 - RNA, 32 nt, Homo Sapiens
acagagcccaacccagccgggaacagcugcga

SEQ ID NO: 321252 - RNA, 31 nt, Homo Sapiens
uuuucagaaauaucgaaggagccaaaaauau

SEQ ID NO: 321253 - RNA, 30 nt, Homo Sapiens
ugcucgugcgcgcagcgcgccccacugcau

SEQ ID NO: 321254 - RNA, 32 nt, Homo Sapiens
uuuacccuccagccuccagucuguaaaaugga

SEQ ID NO: 321255 - RNA, 32 nt, Homo Sapiens
gacccgccggcgacauggccagcuccggagag

SEQ ID NO: 321256 - RNA, 31 nt, Homo Sapiens
gacucuugccauggcccaggagucagguguu

SEQ ID NO: 321257 - RNA, 32 nt, Homo Sapiens
ccauuccccucagcuaaugacggagugcuccu

SEQ ID NO: 321258 - RNA, 32 nt, Homo Sapiens
gaccccuggcagcaauucauuaccaaaacaca

SEQ ID NO: 321259 - RNA, 31 nt, Homo Sapiens
agacagccacccaggggguccacuccaggac

SEQ ID NO: 321260 - RNA, 32 nt, Homo Sapiens
aucgacuucucgcacgggcuggcgcucuacga

SEQ ID NO: 321261 - RNA, 31 nt, Homo Sapiens
gcucugccgaguaauggcugaguuaaggugu

SEQ ID NO: 321262 - RNA, 32 nt, Homo Sapiens
uucuauacauucuauguugucuuuuaaaaagu

SEQ ID NO: 321263 - RNA, 32 nt, Homo Sapiens
uuccaaaaagauacacagaagaggaacuaaau

SEQ ID NO: 321264 - RNA, 32 nt, Homo Sapiens
caaagcuuugaaaaaacuuuaacaugaaaaaa

SEQ ID NO: 321265 - RNA, 32 nt, Homo Sapiens
ucguguccuugcugucuuuuuauuuuccuuuu

SEQ ID NO: 321266 - RNA, 31 nt, Homo Sapiens
cggacgugguggugccugccuguaauccagc

SEQ ID NO: 321267 - RNA, 32 nt, Homo Sapiens
ucuauguagagaaaaaauauuuucucucaugu

SEQ ID NO: 321268 - RNA, 32 nt, Homo Sapiens
agcggguuauuaaggauauauacaguuacacu

SEQ ID NO: 321269 - RNA, 32 nt, Homo Sapiens
gaugggagccccacagaggcagguccuggaac

SEQ ID NO: 321270 - RNA, 32 nt, Homo Sapiens
ucuucucaaauuauuacauauguauguauuau

SEQ ID NO: 321271 - RNA, 32 nt, Homo Sapiens
gcgccccuuccaccuuuccccgagaccgucgu

SEQ ID NO: 321272 - RNA, 32 nt, Homo Sapiens
ugagggucugguuuuuuauuuuucuuuugcug

SEQ ID NO: 321273 - RNA, 32 nt, Homo Sapiens
guuugccaccagagaugcaauauuuuaaauac

SEQ ID NO: 321274 - RNA, 31 nt, Homo Sapiens
acuucauaaaaugaguugggauauguuccuu

SEQ ID NO: 321275 - RNA, 32 nt, Homo Sapiens
ucugagucacugguuucucaccugcaaaagaa

SEQ ID NO: 321276 - RNA, 32 nt, Homo Sapiens
aaaugauuucuuugguaauugugugaaauaua

SEQ ID NO: 321277 - RNA, 32 nt, Homo Sapiens
acaacugcgucuccggaggcagaacgaagugg

SEQ ID NO: 321278 - RNA, 32 nt, Homo Sapiens
uaaaauagaaacaugaugugguuuagacucag

SEQ ID NO: 321279 - RNA, 32 nt, Homo Sapiens
uuaagacaugcuuuuugaacuaacauaugguc

SEQ ID NO: 321280 - RNA, 31 nt, Homo Sapiens
cccuuugcggggacuccaggagucugcccgc

SEQ ID NO: 321281 - RNA, 32 nt, Homo Sapiens
ugcggugcugcugacaggugaacucugguccu

SEQ ID NO: 321282 - RNA, 32 nt, Homo Sapiens
cgagaggacgcgggacccggcgcggugagccc

SEQ ID NO: 321283 - RNA, 32 nt, Homo Sapiens
aaaacugcuuugcauagguuuuuggggaaauu

SEQ ID NO: 321284 - RNA, 32 nt, Homo Sapiens
cacccaugcuaggcaagcccagggcacagaug

SEQ ID NO: 321285 - RNA, 32 nt, Homo Sapiens
cuccucuuucugccgacucucccgggcaaccg

SEQ ID NO: 321286 - RNA, 32 nt, Homo Sapiens
uucaacaaaaauuuauguguggaguuccuucu

SEQ ID NO: 321287 - RNA, 32 nt, Homo Sapiens
gcgggcgcgggaagauggcggcagcggcggcg

SEQ ID NO: 321288 - RNA, 32 nt, Homo Sapiens
cuagucugugguucuuugcaguuucuuguaaa

SEQ ID NO: 321289 - RNA, 32 nt, Homo Sapiens
guucauuuucaauaauguccaccauugcugug

SEQ ID NO: 321290 - RNA, 32 nt, Homo Sapiens
gaaauaacuuugugggaauguacaauuuucua

SEQ ID NO: 321291 - RNA, 32 nt, Homo Sapiens
gcuaccuggugcccccaccccgacccugccag

SEQ ID NO: 321292 - RNA, 32 nt, Homo Sapiens
cauauugagaaccuaaugcacucugggucugg

SEQ ID NO: 321293 - RNA, 32 nt, Homo Sapiens
gacuaccggcgcccaccaccacgccuggcuaa

SEQ ID NO: 321294 - RNA, 32 nt, Homo Sapiens
uauugauuucuacguuaugaaaacagaugccc

SEQ ID NO: 321295 - RNA, 32 nt, Homo Sapiens
gggcggcgaagaggacccgcaggcugcaagga

SEQ ID NO: 321296 - RNA, 32 nt, Homo Sapiens
gugcagccgccgggcgcaggaugggauccggc

SEQ ID NO: 321297 - RNA, 32 nt, Homo Sapiens
cagcaagcuggguagcaggcagauccaaagga

SEQ ID NO: 321298 - RNA, 32 nt, Homo Sapiens
cugagccugggacuuccaggaccuccccucag

SEQ ID NO: 321299 - RNA, 32 nt, Homo Sapiens
gcuuugaccaaugguuggaacccaacaccaga

SEQ ID NO: 321300 - RNA, 32 nt, Homo Sapiens
gagggagcaauaacuucaaccaauguaaucac

SEQ ID NO: 321301 - RNA, 32 nt, Homo Sapiens
aucaguagaugaaucuuuuauccaguucuugc

SEQ ID NO: 321302 - RNA, 32 nt, Homo Sapiens
caaguuauaaaauccaucaguuccucccuagg

SEQ ID NO: 321303 - RNA, 32 nt, Homo Sapiens
uugcccuccccucucuucuccucccaaccaaa

SEQ ID NO: 321304 - RNA, 32 nt, Homo Sapiens
gagaaugagaauuuauuuuuuaugaacucacu

SEQ ID NO: 321305 - RNA, 32 nt, Homo Sapiens
cugggaugcgcgcgcaccugcccucgccccgc

SEQ ID NO: 321306 - RNA, 32 nt, Homo Sapiens
guugguccuugacuguggcauugcacucugca

SEQ ID NO: 321307 - RNA, 27 nt, Homo Sapiens
gcccucccuucucccagcccccagagg

SEQ ID NO: 321308 - RNA, 32 nt, Homo Sapiens
uagauuuuauauaaugaaauaaagguguuguc

SEQ ID NO: 321309 - RNA, 32 nt, Homo Sapiens
guggccuggagcugucuaucuguccuuccagc

SEQ ID NO: 321310 - RNA, 32 nt, Homo Sapiens
gagcagagagcagacucugugcggugacuccg

SEQ ID NO: 321311 - RNA, 32 nt, Homo Sapiens
gguuuguugauaaaaugacaauuaaaaaaugg

SEQ ID NO: 321312 - RNA, 29 nt, Homo Sapiens
aagcaugaauguuggaugugacccucaag

SEQ ID NO: 321313 - RNA, 32 nt, Homo Sapiens
gcaggaggcagacagguuucugggcagaaggg

SEQ ID NO: 321314 - RNA, 32 nt, Homo Sapiens
guugauuucuucauuuuguuuucugguauaaa

SEQ ID NO: 321315 - RNA, 32 nt, Homo Sapiens
ggccaagaccacagcucugugauccuuccggu

SEQ ID NO: 321316 - RNA, 31 nt, Homo Sapiens
gccaggaugcugagccugcugcugcuggcgc

SEQ ID NO: 321317 - RNA, 32 nt, Homo Sapiens
cacagucgcucuuccugcaggucagaaucuuc

SEQ ID NO: 321318 - RNA, 32 nt, Homo Sapiens
gaucggggaccgagaaggggaaucgaugcaag

SEQ ID NO: 321319 - RNA, 32 nt, Homo Sapiens
aaauccacacugggaguggggccccagggguu

SEQ ID NO: 321320 - RNA, 32 nt, Homo Sapiens
cucacccugcccuccuccccagccuggaaucg

SEQ ID NO: 321321 - RNA, 32 nt, Homo Sapiens
ucagcuagacacacucaggaggacuacugagg

SEQ ID NO: 321322 - RNA, 32 nt, Homo Sapiens
aggacagcaacaaccaaucuaaugaugagaau

SEQ ID NO: 321323 - RNA, 32 nt, Homo Sapiens
auuuaaaauaguuuacagauauuuuugaccag

SEQ ID NO: 321324 - RNA, 31 nt, Homo Sapiens
cgugagccacugugccugccccaaucuugug

SEQ ID NO: 321325 - RNA, 32 nt, Homo Sapiens
agcagugcccucaccuacaaggugagcagcgg

SEQ ID NO: 321326 - RNA, 32 nt, Homo Sapiens
cuuuuguguguuuucuguguucuuaccuccac

SEQ ID NO: 321327 - RNA, 32 nt, Homo Sapiens
gaagacaaggaccaggucuggccugaucccau

SEQ ID NO: 321328 - RNA, 32 nt, Homo Sapiens
accccggacuuccuaucugagcuucaagggag

SEQ ID NO: 321329 - RNA, 32 nt, Homo Sapiens
cauauuacacaaaacauugugccuuaaaauga

SEQ ID NO: 321330 - RNA, 32 nt, Homo Sapiens
uauguccgggaucuggaucagauucugggggc

SEQ ID NO: 321331 - RNA, 32 nt, Homo Sapiens
ucgcggacccucguccuccccacaucggaccu

SEQ ID NO: 321332 - RNA, 32 nt, Homo Sapiens
gcagagacuggcagcaggaggggggaacaugg

SEQ ID NO: 321333 - RNA, 32 nt, Homo Sapiens
auuuuugaacauggaaauacaguggugaaacc

SEQ ID NO: 321334 - RNA, 32 nt, Homo Sapiens
ugaggcugucacugccacugcugcugcugcug

SEQ ID NO: 321335 - RNA, 32 nt, Homo Sapiens
ccugccgaagccucacccggguccugguggaa

SEQ ID NO: 321336 - RNA, 32 nt, Homo Sapiens
uaaguuccaguuccaaaccagaucuuugugaa

SEQ ID NO: 321337 - RNA, 32 nt, Homo Sapiens
gccacucucccagcuccuggcuccccgaaacc

SEQ ID NO: 321338 - RNA, 32 nt, Homo Sapiens
cauuuauaacucauaaucauuuagacauaaug

SEQ ID NO: 321339 - RNA, 32 nt, Homo Sapiens
gacaaaacaaaacaggacaauguuacaagagu

SEQ ID NO: 321340 - RNA, 32 nt, Homo Sapiens
acugguugaaugccucuggagaccuagaguuu

SEQ ID NO: 321341 - RNA, 32 nt, Homo Sapiens
gggggaaagcagcagcagcagcaggagcgacu

SEQ ID NO: 321342 - RNA, 32 nt, Homo Sapiens
auguauccuggaacuuaaaauaaaauaaaauu

SEQ ID NO: 321343 - RNA, 32 nt, Homo Sapiens
uuaaaugauguuucaguagauauauucuagca

SEQ ID NO: 321344 - RNA, 31 nt, Homo Sapiens
cauuccaggcaaugccugccucaggcuggau

SEQ ID NO: 321345 - RNA, 32 nt, Homo Sapiens
ugaaaacaccaauugcauaaguagagcuagga

SEQ ID NO: 321346 - RNA, 32 nt, Homo Sapiens
uucaagcauagguuaauaucagagaagcacau

SEQ ID NO: 321347 - RNA, 32 nt, Homo Sapiens
uaaaaaagcucuucuuucacauuuuaccuacc

SEQ ID NO: 321348 - RNA, 31 nt, Homo Sapiens
ucacagaaauaaacaaguagguuucaguugu

SEQ ID NO: 321349 - RNA, 32 nt, Homo Sapiens
ggguaguuaccaggacggucuccggaggccgg

SEQ ID NO: 321350 - RNA, 32 nt, Homo Sapiens
ugcacaaauaguaagacagucucgcaaccagc

SEQ ID NO: 321351 - RNA, 32 nt, Homo Sapiens
aagcucaaauaaaaauaaaauaauuuucauuc

SEQ ID NO: 321352 - RNA, 32 nt, Homo Sapiens
aguaugaggaccagcuuagcugcacaccccca

SEQ ID NO: 321353 - RNA, 28 nt, Homo Sapiens
cagaggcaggagaaucauuugaaccugg

SEQ ID NO: 321354 - RNA, 32 nt, Homo Sapiens
ggaaggcaaaaauaaagcuauuuaauauagaa

SEQ ID NO: 321355 - RNA, 32 nt, Homo Sapiens
ucuaauaaaaagacaagcggugggacagaggg

SEQ ID NO: 321356 - RNA, 32 nt, Homo Sapiens
ucgcugcacugaccgcaguacgcucucugcag

SEQ ID NO: 321357 - RNA, 32 nt, Homo Sapiens
ggauugaggagaguccuggggcaggcgagggg

SEQ ID NO: 321358 - RNA, 32 nt, Homo Sapiens
caccagcgcagcgcugccauggagcccagcag

SEQ ID NO: 321359 - RNA, 32 nt, Homo Sapiens
guuccaacuaaaaaacauuuuccuauuaaaau

SEQ ID NO: 321360 - RNA, 32 nt, Homo Sapiens
aguggcaguuuucugucgaugacuuuuucaag

SEQ ID NO: 321361 - RNA, 32 nt, Homo Sapiens
cggccugccguccuuccacgcggagagccaug

SEQ ID NO: 321362 - RNA, 32 nt, Homo Sapiens
cacugguggcucgcuuugaugcuggagaacua

SEQ ID NO: 321363 - RNA, 32 nt, Homo Sapiens
guuccucgagccugggggcgcucagauugcuu

SEQ ID NO: 321364 - RNA, 32 nt, Homo Sapiens
uggggugcagaaaaaagagaaggagacaguga

SEQ ID NO: 321365 - RNA, 32 nt, Homo Sapiens
acaagucaggugguggucauguuucccuucua

SEQ ID NO: 321366 - RNA, 32 nt, Homo Sapiens
cuuuaaauuuaaacaaauguuuuaugguuuuu

SEQ ID NO: 321367 - RNA, 32 nt, Homo Sapiens
cugaaggcugcugagaauaaacagagaguagc

SEQ ID NO: 321368 - RNA, 32 nt, Homo Sapiens
ccuuucuaaaagagcugcagggaagggacuuc

SEQ ID NO: 321369 - RNA, 32 nt, Homo Sapiens
acucugaagagauagaacacaaacauggccga

SEQ ID NO: 321370 - RNA, 32 nt, Homo Sapiens
cucuucauaguauguaaauguuagaacauuuu

SEQ ID NO: 321371 - RNA, 32 nt, Homo Sapiens
acaggcuggccccgacgaccccggccccgucc

SEQ ID NO: 321372 - RNA, 32 nt, Homo Sapiens
uuguauuugcauauguauuuuguauuugcaua

SEQ ID NO: 321373 - RNA, 32 nt, Homo Sapiens
cccaagagggcuuuauuacaccucagaaauug

SEQ ID NO: 321374 - RNA, 32 nt, Homo Sapiens
guuuucagaaaagaauaaagaaaggaagaacc

SEQ ID NO: 321375 - RNA, 32 nt, Homo Sapiens
uauuugugguggcacucguuuaauggauuaac

SEQ ID NO: 321376 - RNA, 32 nt, Homo Sapiens
gccgugggcucggcccggaccuggcauccgga

SEQ ID NO: 321377 - RNA, 32 nt, Homo Sapiens
aauguaagacauuugggaaagccuucacacag

SEQ ID NO: 321378 - RNA, 32 nt, Homo Sapiens
cagagacaaauauuucuagacacuuuuucuuu

SEQ ID NO: 321379 - RNA, 32 nt, Homo Sapiens
ucauuuugguaauaaacuggauuugaauugug

SEQ ID NO: 321380 - RNA, 32 nt, Homo Sapiens
uaaaaaacauauauauauauauauuuggaggu

SEQ ID NO: 321381 - RNA, 32 nt, Homo Sapiens
gaucugguggggggccggcggcagucugggag

SEQ ID NO: 321382 - RNA, 32 nt, Homo Sapiens
uucuuuaaaaauuguuguuauaugaauugugu

SEQ ID NO: 321383 - RNA, 32 nt, Homo Sapiens
cuuuagaagaugggauggggucgggugguaag

SEQ ID NO: 321384 - RNA, 32 nt, Homo Sapiens
cacagcuggcugccuucgugcugcugaucugg

SEQ ID NO: 321385 - RNA, 32 nt, Homo Sapiens
gaacguugccuuauacucucuacuucagauga

SEQ ID NO: 321386 - RNA, 32 nt, Homo Sapiens
gaaaaugccugccuugugguuuguuguaagga

SEQ ID NO: 321387 - RNA, 32 nt, Homo Sapiens
uaccuggaaauuccaugaccaauacaugugca

SEQ ID NO: 321388 - RNA, 32 nt, Homo Sapiens
ggacugcagggaagagggaagcacgcacagca

SEQ ID NO: 321389 - RNA, 32 nt, Homo Sapiens
guaccuuuuuugcugacagaaaaggaucagau

SEQ ID NO: 321390 - RNA, 28 nt, Homo Sapiens
ccaugggagcggccgccagggggaguug

SEQ ID NO: 321391 - RNA, 32 nt, Homo Sapiens
gcucugucaccaagcuggacugcaguggcaug

SEQ ID NO: 321392 - RNA, 32 nt, Homo Sapiens
agggaagaauaaaauuaacccacaguucuguc

SEQ ID NO: 321393 - RNA, 32 nt, Homo Sapiens
auagaaggugacauggaauggagaaaaccaag

SEQ ID NO: 321394 - RNA, 32 nt, Homo Sapiens
gauggaguccuguaguaguuucaguguuagau

SEQ ID NO: 321395 - RNA, 32 nt, Homo Sapiens
gaccugaggguggagaguggcaggaagcaagc

SEQ ID NO: 321396 - RNA, 32 nt, Homo Sapiens
uuauuuaaaaauuguguaucaguuuuaaauac

SEQ ID NO: 321397 - RNA, 32 nt, Homo Sapiens
gggagggaagggggcuguguguccuugcaugg

SEQ ID NO: 321398 - RNA, 32 nt, Homo Sapiens
uacguguagccaucugaccacuuuuuauuggg

SEQ ID NO: 321399 - RNA, 32 nt, Homo Sapiens
gagggagagcagagaccaugucugacauagaa

SEQ ID NO: 321400 - RNA, 32 nt, Homo Sapiens
cucucuaggcugccgggcgcuggucgucagcg

SEQ ID NO: 321401 - RNA, 32 nt, Homo Sapiens
uguugcccaggcuggaaugcaguggugugcuc

SEQ ID NO: 321402 - RNA, 32 nt, Homo Sapiens
ccuuucgugacaagugccaagauuguggacaa

SEQ ID NO: 321403 - RNA, 32 nt, Homo Sapiens
cuugugggugccuccucccccagccgcaacuc

SEQ ID NO: 321404 - RNA, 30 nt, Homo Sapiens
ucagagcccggcaccacccaucuugaguau

SEQ ID NO: 321405 - RNA, 32 nt, Homo Sapiens
aauuauuugucaacugagauuccauguguuuu

SEQ ID NO: 321406 - RNA, 32 nt, Homo Sapiens
gucugcagaaccauagcuuccacgcaccugaa

SEQ ID NO: 321407 - RNA, 32 nt, Homo Sapiens
ugagaggagaauccgugaccccugcccugggc

SEQ ID NO: 321408 - RNA, 32 nt, Homo Sapiens
uuucuuuccaacuggggcgcgccggcgcggug

SEQ ID NO: 321409 - RNA, 32 nt, Homo Sapiens
cuguaguaucuuaacucucaccagucgugugu

SEQ ID NO: 321410 - RNA, 32 nt, Homo Sapiens
gcagcacgccugugcucugugcuugccucacc

SEQ ID NO: 321411 - RNA, 32 nt, Homo Sapiens
ugucauuucauuccguuugaguuucuuguuuu

SEQ ID NO: 321412 - RNA, 32 nt, Homo Sapiens
cucacuucacugaguuuuuauuaaaacuagca

SEQ ID NO: 321413 - RNA, 32 nt, Homo Sapiens
guuuauauaaugguaugcuugcauauauuuca

SEQ ID NO: 321414 - RNA, 32 nt, Homo Sapiens
gaggcugugugauuucauauacaaacaaaaag

SEQ ID NO: 321415 - RNA, 32 nt, Homo Sapiens
acccggaccugcggccgcugcucccgguccgc

SEQ ID NO: 321416 - RNA, 32 nt, Homo Sapiens
aucuagcuuuaacggaagcaaauucauuauuu

SEQ ID NO: 321417 - RNA, 32 nt, Homo Sapiens
agagacugcuucuuguguuugugucauucugu

SEQ ID NO: 321418 - RNA, 32 nt, Homo Sapiens
uuccucaccacuuuucccuuaauucuaaguca

SEQ ID NO: 321419 - RNA, 32 nt, Homo Sapiens
ugaaccuugugcuuucuuuagcuguaaucugg

SEQ ID NO: 321420 - RNA, 32 nt, Homo Sapiens
gguuucauuuuucuguaaacaacugaaagaau

SEQ ID NO: 321421 - RNA, 32 nt, Homo Sapiens
auauuuucacaacuacuuucucucuccagagc

SEQ ID NO: 321422 - RNA, 32 nt, Homo Sapiens
guccagcuucugcuugaauacuuucagugccc

SEQ ID NO: 321423 - RNA, 32 nt, Homo Sapiens
uggcucacccaccugcuaauagcaccaucguc

SEQ ID NO: 321424 - RNA, 32 nt, Homo Sapiens
ugcaaagggccuggggcagagccuggcacaug

SEQ ID NO: 321425 - RNA, 32 nt, Homo Sapiens
ugguaaaacacacacacacacacacacacaca

SEQ ID NO: 321426 - RNA, 32 nt, Homo Sapiens
uucugcccuguucccccauccauccuacaagc

SEQ ID NO: 321427 - RNA, 32 nt, Homo Sapiens
gaccuccggcucuugucaggcucuugucuggu

SEQ ID NO: 321428 - RNA, 31 nt, Homo Sapiens
gguccgggcuguggcucuccaaggccccucu

SEQ ID NO: 321429 - RNA, 32 nt, Homo Sapiens
gcguggcaggcgccuggccuuggguccaucua

SEQ ID NO: 321430 - RNA, 32 nt, Homo Sapiens
ggccugcguggaggaggcgccccgcgcagcug

SEQ ID NO: 321431 - RNA, 32 nt, Homo Sapiens
aguaguuuuauaaagaaaagaagucugauauc

SEQ ID NO: 321432 - RNA, 32 nt, Homo Sapiens
acagugccagcuucuuugcagcuuccucuucu

SEQ ID NO: 321433 - RNA, 32 nt, Homo Sapiens
gacuauugagccauaaaauuuugguuuguagu

SEQ ID NO: 321434 - RNA, 32 nt, Homo Sapiens
gcuguucgcggccuuccuggugacggagcugc

SEQ ID NO: 321435 - RNA, 32 nt, Homo Sapiens
uaauaagcccucacuguacagaacagcccguu

SEQ ID NO: 321436 - RNA, 32 nt, Homo Sapiens
uggacacgucccguaguugggcauaugucuaa

SEQ ID NO: 321437 - RNA, 32 nt, Homo Sapiens
gagccucagccgggucaucucaucucagcugu

SEQ ID NO: 321438 - RNA, 32 nt, Homo Sapiens
guucuaggguacauguccacaaugcacauguc

SEQ ID NO: 321439 - RNA, 32 nt, Homo Sapiens
gacaaaguacaagauuugaaugagauccugaa

SEQ ID NO: 321440 - RNA, 32 nt, Homo Sapiens
ccgcgucgcucccgggcgggcgggcgggaaga

SEQ ID NO: 321441 - RNA, 32 nt, Homo Sapiens
cuuuuuuucuuuucuuuuuuuugagacaaagu

SEQ ID NO: 321442 - RNA, 32 nt, Homo Sapiens
gcaaggcccggcuccacacggcagcuuuggcc

SEQ ID NO: 321443 - RNA, 32 nt, Homo Sapiens
agugugcucagggcuugguacaaugagcugaa

SEQ ID NO: 321444 - RNA, 32 nt, Homo Sapiens
ugugcaagguaacucugcuagcuaagauucac

SEQ ID NO: 321445 - RNA, 32 nt, Homo Sapiens
agagcagaggacagugagugucugcacugaga

SEQ ID NO: 321446 - RNA, 32 nt, Homo Sapiens
cgucucuccugacuucggcagaggccccuggu

SEQ ID NO: 321447 - RNA, 32 nt, Homo Sapiens
uuccccaucugcaaaucagggucauuggcuca

SEQ ID NO: 321448 - RNA, 32 nt, Homo Sapiens
gggccccuuaccgagcucccagacuggucaua

SEQ ID NO: 321449 - RNA, 32 nt, Homo Sapiens
ccccgcccugcagcuaucuccgcggcccaccc

SEQ ID NO: 321450 - RNA, 32 nt, Homo Sapiens
augugccgacauguggcagacacacaguaaau

SEQ ID NO: 321451 - RNA, 32 nt, Homo Sapiens
cugcaaugcaagucacuagucauggucacaug

SEQ ID NO: 321452 - RNA, 32 nt, Homo Sapiens
ugccucugucuccccacaucgucccugacauc

SEQ ID NO: 321453 - RNA, 32 nt, Homo Sapiens
aaauugugauucaaaagcaguauuucaagagg

SEQ ID NO: 321454 - RNA, 32 nt, Homo Sapiens
cggcugaggaugcagggcucccgggcacggug

SEQ ID NO: 321455 - RNA, 32 nt, Homo Sapiens
ucaagaaacaaaugcuagcuucauauguaugg

SEQ ID NO: 321456 - RNA, 32 nt, Homo Sapiens
cauguggguuuuuguuguuuguguguucgauc

SEQ ID NO: 321457 - RNA, 32 nt, Homo Sapiens
cgacuggccggaggagucagaggcaggaggca

SEQ ID NO: 321458 - RNA, 32 nt, Homo Sapiens
cugcaagguauuuuguuuuuuauuaauucgcg

SEQ ID NO: 321459 - RNA, 32 nt, Homo Sapiens
augucagugauuaaugaauccauuccaguugc

SEQ ID NO: 321460 - RNA, 27 nt, Homo Sapiens
agcacucauuaauucuugguuaaggaa

SEQ ID NO: 321461 - RNA, 32 nt, Homo Sapiens
auaugucuugagaaacaaaaccacaggaggaa

SEQ ID NO: 321462 - RNA, 32 nt, Homo Sapiens
guguugugaagauaagaagcugcucuguaugc

SEQ ID NO: 321463 - RNA, 32 nt, Homo Sapiens
uugcuagcccuugcuggugggucuggaaauua

SEQ ID NO: 321464 - RNA, 32 nt, Homo Sapiens
gaauaaggggaagagugcucagaggagaaguc

SEQ ID NO: 321465 - RNA, 32 nt, Homo Sapiens
guacaaaauagucuauucaguucguucauuca

SEQ ID NO: 321466 - RNA, 32 nt, Homo Sapiens
uggaaucauguuucaucuccauuuucacugcu

SEQ ID NO: 321467 - RNA, 31 nt, Homo Sapiens
cugccugccagcggccugcccugcaccgcac

SEQ ID NO: 321468 - RNA, 32 nt, Homo Sapiens
uuaaaaauagacagcaguuguucuaauuagug

SEQ ID NO: 321469 - RNA, 32 nt, Homo Sapiens
acauugauuuaaaaagauuaugcuguuaaaua

SEQ ID NO: 321470 - RNA, 32 nt, Homo Sapiens
ucuaggcacuguaguucuaagacucaaauguu

SEQ ID NO: 321471 - RNA, 32 nt, Homo Sapiens
guucuucgucagaaaugugucaaagcauuguu

SEQ ID NO: 321472 - RNA, 32 nt, Homo Sapiens
uuacagacaauucugaugauuaugauuucauu

SEQ ID NO: 321473 - RNA, 32 nt, Homo Sapiens
uggccuauucuuuucuuuucagagacaagguc

SEQ ID NO: 321474 - RNA, 32 nt, Homo Sapiens
uuuuuaaaaaauuuaguuuaugacuuugcagu

SEQ ID NO: 321475 - RNA, 32 nt, Homo Sapiens
gcugcccguuuccucccauggcccaguaugag

SEQ ID NO: 321476 - RNA, 32 nt, Homo Sapiens
cccgcccgcccuguccucucgacgaggcggag

SEQ ID NO: 321477 - RNA, 32 nt, Homo Sapiens
ggaugggguucuucuguaaaacuguuugcaca

SEQ ID NO: 321478 - RNA, 32 nt, Homo Sapiens
gcucccaaacuuaaacagugaucucuucuaaa

SEQ ID NO: 321479 - RNA, 32 nt, Homo Sapiens
acccugaagacaccccugccccccuccagaga

SEQ ID NO: 321480 - RNA, 32 nt, Homo Sapiens
cggaugcccucccugcacccuuccauuucucc

SEQ ID NO: 321481 - RNA, 32 nt, Homo Sapiens
gcccaggcgucccugcagccccgggugcuccg

SEQ ID NO: 321482 - RNA, 32 nt, Homo Sapiens
cccuuuauauauaacaugcaucuuguuuugga

SEQ ID NO: 321483 - RNA, 32 nt, Homo Sapiens
agcugccuugagcuaaccccaaggcugccucu

SEQ ID NO: 321484 - RNA, 30 nt, Homo Sapiens
ccacuaccacuugacuaauuuuuauacuuu

SEQ ID NO: 321485 - RNA, 32 nt, Homo Sapiens
uuuucuuuucuuuuuaacuaagaauggggcug

SEQ ID NO: 321486 - RNA, 32 nt, Homo Sapiens
ggaguagaaaauuuuguguauaucagggcagu

SEQ ID NO: 321487 - RNA, 32 nt, Homo Sapiens
ggcccccaccccagccucgccuucccacccca

SEQ ID NO: 321488 - RNA, 32 nt, Homo Sapiens
cccagcccccacccccgucaccccgcucuucc

SEQ ID NO: 321489 - RNA, 32 nt, Homo Sapiens
ccguugggccccagccuucuuugcuugccucu

SEQ ID NO: 321490 - RNA, 32 nt, Homo Sapiens
ggacaggguggaagagggugguauauagggaa

SEQ ID NO: 321491 - RNA, 32 nt, Homo Sapiens
cauuuuuacauaucaagugguuucauguuaaa

SEQ ID NO: 321492 - RNA, 32 nt, Homo Sapiens
ucugaagguauuuuaugauguauaacaacuga

SEQ ID NO: 321493 - RNA, 32 nt, Homo Sapiens
ugacauuacagcacagaaaacuguuagugacu

SEQ ID NO: 321494 - RNA, 31 nt, Homo Sapiens
ugguagguucugucugugccaagggcagguu

SEQ ID NO: 321495 - RNA, 32 nt, Homo Sapiens
agcccccgagaacgcgcgaccaggcacccagu

SEQ ID NO: 321496 - RNA, 32 nt, Homo Sapiens
aauggugaugcuaaagaaaugucuguacaaaa

SEQ ID NO: 321497 - RNA, 32 nt, Homo Sapiens
ccagggaagauaacuuucaaucuauauaaaaa

SEQ ID NO: 321498 - RNA, 32 nt, Homo Sapiens
cccugccaggucacagcaaugcucuccuuguc

SEQ ID NO: 321499 - RNA, 32 nt, Homo Sapiens
cuacuacugguagaauaaauaauuauacucag

SEQ ID NO: 321500 - RNA, 32 nt, Homo Sapiens
ggguuuggggauuuuccuuuccuagccaaggg

SEQ ID NO: 321501 - RNA, 32 nt, Homo Sapiens
uuugcaugucucaugauaaccaaauguaagau

SEQ ID NO: 321502 - RNA, 31 nt, Homo Sapiens
guuaagggggcggugcagacgucuccccgcc

SEQ ID NO: 321503 - RNA, 32 nt, Homo Sapiens
auagggucauuccauaugauaaaacuaaagga

SEQ ID NO: 321504 - RNA, 32 nt, Homo Sapiens
gucggaggcccugccgggaacccaggcugcag

SEQ ID NO: 321505 - RNA, 32 nt, Homo Sapiens
aucuccauuggcacccucucccgccccacuuc

SEQ ID NO: 321506 - RNA, 32 nt, Homo Sapiens
ugaauugcagaaaucagauaaaaacuacuugg

SEQ ID NO: 321507 - RNA, 32 nt, Homo Sapiens
ggucuccgccgggaacccuggggcauggagag

SEQ ID NO: 321508 - RNA, 32 nt, Homo Sapiens
accagggcaggggacaggucucaaguccuucc

SEQ ID NO: 321509 - RNA, 32 nt, Homo Sapiens
cgcgccccgcaggcagacguggcugugggccg

SEQ ID NO: 321510 - RNA, 32 nt, Homo Sapiens
ccuggccuuucuguacugagcaccuggucagu

SEQ ID NO: 321511 - RNA, 32 nt, Homo Sapiens
gcacuuccggugugagccgcacuuccuguccu

SEQ ID NO: 321512 - RNA, 32 nt, Homo Sapiens
guuucuucaugcauuacuuacuguuaaaacug

SEQ ID NO: 321513 - RNA, 32 nt, Homo Sapiens
ggggcucccuucacccccgcagcccuccgccc

SEQ ID NO: 321514 - RNA, 32 nt, Homo Sapiens
cccgccucccuugacgccccgccccgccccuc

SEQ ID NO: 321515 - RNA, 32 nt, Homo Sapiens
ugaggaucgggguggggguggagugggggcuu

SEQ ID NO: 321516 - RNA, 32 nt, Homo Sapiens
ccccgucaggugccugcagauuacauucuccu

SEQ ID NO: 321517 - RNA, 32 nt, Homo Sapiens
uggugagcaucauggcaaccguuacagccaca

SEQ ID NO: 321518 - RNA, 32 nt, Homo Sapiens
agaacguuuauaaugguaaauuagauuauaug

SEQ ID NO: 321519 - RNA, 32 nt, Homo Sapiens
acagguccacccaagacugucaagggaugagc

SEQ ID NO: 321520 - RNA, 32 nt, Homo Sapiens
accccugggggcccagcccacccgcaugcaca

SEQ ID NO: 321521 - RNA, 32 nt, Homo Sapiens
cccuguaguuuaggacacaaaacagcuaccag

SEQ ID NO: 321522 - RNA, 32 nt, Homo Sapiens
ccaaaggugaccgcagggggccccagggcugg

SEQ ID NO: 321523 - RNA, 32 nt, Homo Sapiens
cacaaccugugacucuggcucccuuugggggu

SEQ ID NO: 321524 - RNA, 32 nt, Homo Sapiens
uauuaagaguuaaugauuuaaaaaauaaccua

SEQ ID NO: 321525 - RNA, 32 nt, Homo Sapiens
cucuuugcacaaaacuguucucgcugguuugg

SEQ ID NO: 321526 - RNA, 32 nt, Homo Sapiens
gaagggcugaggggagguuuguguacacccau

SEQ ID NO: 321527 - RNA, 32 nt, Homo Sapiens
cauaucaauuuuaauguauagauuuugcaaau

SEQ ID NO: 321528 - RNA, 32 nt, Homo Sapiens
uuuuucuauuuucucuugaaucugcuucuaua

SEQ ID NO: 321529 - RNA, 32 nt, Homo Sapiens
aaccuuuaagggugggcccaggcauugucugu

SEQ ID NO: 321530 - RNA, 32 nt, Homo Sapiens
uauuaauuuaugaaacuguuuuucucagcgca

SEQ ID NO: 321531 - RNA, 32 nt, Homo Sapiens
gcaggcccgcgcccgcgcccggacuuugccau

SEQ ID NO: 321532 - RNA, 32 nt, Homo Sapiens
aagaaaaaggauuuuucuucgaguuagcugcu

SEQ ID NO: 321533 - RNA, 32 nt, Homo Sapiens
aauagauaaaaauuauuuugugaucauaacuc

SEQ ID NO: 321534 - RNA, 32 nt, Homo Sapiens
ccaacaauaucagaauuagaaaacaguucaga

SEQ ID NO: 321535 - RNA, 28 nt, Homo Sapiens
gccaugcgggcaucgcugcugcugucgg

SEQ ID NO: 321536 - RNA, 32 nt, Homo Sapiens
caucaaaguacaaaaacgucuguggaguguca

SEQ ID NO: 321537 - RNA, 32 nt, Homo Sapiens
gaguuucgcucuuggugcccaggcuagagugc

SEQ ID NO: 321538 - RNA, 32 nt, Homo Sapiens
auuuauaaugaaaucaacuaaaacuauuuuug

SEQ ID NO: 321539 - RNA, 32 nt, Homo Sapiens
gcuguuucagagaaaaacuuaauuauacuuaa

SEQ ID NO: 321540 - RNA, 32 nt, Homo Sapiens
ccagauugaaggauuaaucaccagaagacaug

SEQ ID NO: 321541 - RNA, 31 nt, Homo Sapiens
uggugagccccuucgaaccagggcugauggg

SEQ ID NO: 321542 - RNA, 32 nt, Homo Sapiens
aggaaaugaaagggcuuuguauuaccuuuuca

SEQ ID NO: 321543 - RNA, 32 nt, Homo Sapiens
cccggacagacugaagccauggcgauucuuuu

SEQ ID NO: 321544 - RNA, 32 nt, Homo Sapiens
acacacuugguauauugcuuuaccaaaauaca

SEQ ID NO: 321545 - RNA, 32 nt, Homo Sapiens
cagccucucccacaauaagaguucuugcccuu

SEQ ID NO: 321546 - RNA, 32 nt, Homo Sapiens
gaaaacaguuccuccaggcaagaggggagaag

SEQ ID NO: 321547 - RNA, 32 nt, Homo Sapiens
cucaaaauauuuuugcucuuugcaauggucug

SEQ ID NO: 321548 - RNA, 32 nt, Homo Sapiens
gcaucuuccgccucccggguucaagcgauucu

SEQ ID NO: 321549 - RNA, 32 nt, Homo Sapiens
acugcugccuccugcuggccgcugccuccuua

SEQ ID NO: 321550 - RNA, 32 nt, Homo Sapiens
cuugggggagucggaggcuccccggcagacac

SEQ ID NO: 321551 - RNA, 32 nt, Homo Sapiens
ccuuguuugggguuguuccuguccuuguugag

SEQ ID NO: 321552 - RNA, 32 nt, Homo Sapiens
uuauuucucagggucauguugcaucuuggagc

SEQ ID NO: 321553 - RNA, 32 nt, Homo Sapiens
ggcugcccgcagcuaccacaagaggcuggugg

SEQ ID NO: 321554 - RNA, 32 nt, Homo Sapiens
aaaacuauuuuugaauuauccacaaccuguau

SEQ ID NO: 321555 - RNA, 32 nt, Homo Sapiens
caccccugccccaccccgucugcaugcucaca

SEQ ID NO: 321556 - RNA, 32 nt, Homo Sapiens
ucugggcgcuccugcuggcgcugcuggggacc

SEQ ID NO: 321557 - RNA, 32 nt, Homo Sapiens
cuaugauguacaaagccuguaucucugugaug

SEQ ID NO: 321558 - RNA, 32 nt, Homo Sapiens
ccucccagcggacgugagcuuccacugcggcu

SEQ ID NO: 321559 - RNA, 32 nt, Homo Sapiens
acgccuccuucauucagcggcggugcugggcc

SEQ ID NO: 321560 - RNA, 32 nt, Homo Sapiens
uuccuccaaacaaaaacaaaaugcaggccgag

SEQ ID NO: 321561 - RNA, 32 nt, Homo Sapiens
acgacuccgauucugagaccuacuggaggcug

SEQ ID NO: 321562 - RNA, 32 nt, Homo Sapiens
aacacaccuguuuuguuuuucuuaaguucaac

SEQ ID NO: 321563 - RNA, 32 nt, Homo Sapiens
cuuagcgugucagcgggcgccacagcggaauc

SEQ ID NO: 321564 - RNA, 32 nt, Homo Sapiens
uucuaggugcuguuccgguggauucugaaaug

SEQ ID NO: 321565 - RNA, 32 nt, Homo Sapiens
augguauuugaaagaauaagcauaugcuucug

SEQ ID NO: 321566 - RNA, 32 nt, Homo Sapiens
aagggugcauguccccugcuugaacccugaga

SEQ ID NO: 321567 - RNA, 29 nt, Homo Sapiens
guguucugaggacagagagagcuggaggg

SEQ ID NO: 321568 - RNA, 32 nt, Homo Sapiens
auauauauacacaacagaaaguuuauuggauu

SEQ ID NO: 321569 - RNA, 32 nt, Homo Sapiens
uacagccugcagagccgugagccaaguaaacc

SEQ ID NO: 321570 - RNA, 32 nt, Homo Sapiens
gggguggggggcuggggugcugcguacgcagu

SEQ ID NO: 321571 - RNA, 32 nt, Homo Sapiens
cacucccuggaaagaacccuucccugcaguuu

SEQ ID NO: 321572 - RNA, 31 nt, Homo Sapiens
uugggaaagggcagaagucaggcaagaccua

SEQ ID NO: 321573 - RNA, 32 nt, Homo Sapiens
aaggaaauuaacgaaacauccugugaaacauc

SEQ ID NO: 321574 - RNA, 32 nt, Homo Sapiens
ugagacuagucauacuaaccuaccuccucuga

SEQ ID NO: 321575 - RNA, 32 nt, Homo Sapiens
uugggguugccauggacacagaguucuuaauc

SEQ ID NO: 321576 - RNA, 32 nt, Homo Sapiens
ccauccaggaauagauuuuucuuacucuacau

SEQ ID NO: 321577 - RNA, 32 nt, Homo Sapiens
acauugcccuuuuauauagaaccaccaccuga

SEQ ID NO: 321578 - RNA, 32 nt, Homo Sapiens
cggcucugcgcucaccugcugccuaguguucc

SEQ ID NO: 321579 - RNA, 32 nt, Homo Sapiens
aguaaguaacaguaaauguaaaagauucauuu

SEQ ID NO: 321580 - RNA, 32 nt, Homo Sapiens
gcuuuuguuucauuugugaauacuucuugcug

SEQ ID NO: 321581 - RNA, 32 nt, Homo Sapiens
gagagagcgcgggcggccgccggggcuggucg

SEQ ID NO: 321582 - RNA, 32 nt, Homo Sapiens
uugggucucagcccuaggggaaugggaagcag

SEQ ID NO: 321583 - RNA, 32 nt, Homo Sapiens
uugccauagaaagaaaaauaaaguaccaauuc

SEQ ID NO: 321584 - RNA, 32 nt, Homo Sapiens
ccagguguuuuugucaccauacagaugaggaa

SEQ ID NO: 321585 - RNA, 32 nt, Homo Sapiens
ccccugccggccccuccucccgcggccgggaa

SEQ ID NO: 321586 - RNA, 32 nt, Homo Sapiens
accccgaaacaguaagaaauuggagugagaag

SEQ ID NO: 321587 - RNA, 32 nt, Homo Sapiens
augaagaaaugcuuucaaaaccucugaagaug

SEQ ID NO: 321588 - RNA, 32 nt, Homo Sapiens
ccagugcccuccuggagugagacaagggcucg

SEQ ID NO: 321589 - RNA, 32 nt, Homo Sapiens
uggauauaauuuccgagcgaagcugcccccag

SEQ ID NO: 321590 - RNA, 32 nt, Homo Sapiens
ugacucaggagcuccggugcugcagccgccac

SEQ ID NO: 321591 - RNA, 32 nt, Homo Sapiens
aaacgucgcgggugccggucccggggcccugc

SEQ ID NO: 321592 - RNA, 32 nt, Homo Sapiens
gaacaucauuaauaucaacuuauuuucuugga

SEQ ID NO: 321593 - RNA, 32 nt, Homo Sapiens
gaagaaaagacacugagcuaaaaaagacaugc

SEQ ID NO: 321594 - RNA, 32 nt, Homo Sapiens
guuucuucuggcuuagucuguuuucuaaagcc

SEQ ID NO: 321595 - RNA, 32 nt, Homo Sapiens
cagcucaggugacuggagcccgagggccugac

SEQ ID NO: 321596 - RNA, 32 nt, Homo Sapiens
aaaccaugacgguggaucacuccaccugccug

SEQ ID NO: 321597 - RNA, 31 nt, Homo Sapiens
cucuguauauggaaggcuccaagggcagcag

SEQ ID NO: 321598 - RNA, 32 nt, Homo Sapiens
ccuuagaagucacacaguauuacuucugcuac

SEQ ID NO: 321599 - RNA, 32 nt, Homo Sapiens
cgcugauuucauaggaucuggugcuguauaua

SEQ ID NO: 321600 - RNA, 32 nt, Homo Sapiens
cucccugcuuugcauuaacucaucagcaagcu

SEQ ID NO: 321601 - RNA, 32 nt, Homo Sapiens
uggaaggcuucgcuagugauggacccauacau

SEQ ID NO: 321602 - RNA, 30 nt, Homo Sapiens
cccaaccugccggccacccauucaggagca

SEQ ID NO: 321603 - RNA, 32 nt, Homo Sapiens
cgcuucuucaaucccucugcuccuaccagugu

SEQ ID NO: 321604 - RNA, 32 nt, Homo Sapiens
uucugucacgugaaauauuuaaguauauagua

SEQ ID NO: 321605 - RNA, 32 nt, Homo Sapiens
gcacugcguggccuugccccucucccgcuggc

SEQ ID NO: 321606 - RNA, 32 nt, Homo Sapiens
cacccucugccgacuccaagacgcugccucuu

SEQ ID NO: 321607 - RNA, 32 nt, Homo Sapiens
uggcuaauggauuugacaaugugcaguuuaug

SEQ ID NO: 321608 - RNA, 32 nt, Homo Sapiens
cauauuuuugucuuguucuuccaauugguaua

SEQ ID NO: 321609 - RNA, 32 nt, Homo Sapiens
aaauugauaaaacuuuauuuccauuauauuca

SEQ ID NO: 321610 - RNA, 32 nt, Homo Sapiens
ggcugagccccuguccuccccucugucccccc

SEQ ID NO: 321611 - RNA, 32 nt, Homo Sapiens
cuggagaaaaagaacacuuuugaacuauguaa

SEQ ID NO: 321612 - RNA, 32 nt, Homo Sapiens
uccauuugacuucucuacucggugucucagac

SEQ ID NO: 321613 - RNA, 32 nt, Homo Sapiens
aaggucagcucuucuaguaucgugcagugcuu

SEQ ID NO: 321614 - RNA, 32 nt, Homo Sapiens
ugaaggaaagacuguggccauguauaugccag

SEQ ID NO: 321615 - RNA, 32 nt, Homo Sapiens
ccagaguuuauaguauaguagaauauauuuua

SEQ ID NO: 321616 - RNA, 32 nt, Homo Sapiens
gcaaaaagaacaaagcugaaggcaucacguua

SEQ ID NO: 321617 - RNA, 32 nt, Homo Sapiens
cacugccuccucuucagacucuuugcauuuca

SEQ ID NO: 321618 - RNA, 32 nt, Homo Sapiens
gcgccugccuuuagccugggggcccccaccuc

SEQ ID NO: 321619 - RNA, 32 nt, Homo Sapiens
ggucugcaaccuggugcgagcagcccgggcua

SEQ ID NO: 321620 - RNA, 32 nt, Homo Sapiens
aauugugaacucuguuggcucucuuuggaucc

SEQ ID NO: 321621 - RNA, 31 nt, Homo Sapiens
auacgcuaaugauucaaccaagauugcuugc

SEQ ID NO: 321622 - RNA, 32 nt, Homo Sapiens
ucucacagcucuuauuugauaagaaacccaug

SEQ ID NO: 321623 - RNA, 32 nt, Homo Sapiens
uuuguagccagccuacugugggacuucgccuu

SEQ ID NO: 321624 - RNA, 32 nt, Homo Sapiens
ggagaaaguguagguuuagaucagcuggcaga

SEQ ID NO: 321625 - RNA, 30 nt, Homo Sapiens
gauccugcccccgugcccgccagggcucag

SEQ ID NO: 321626 - RNA, 32 nt, Homo Sapiens
cacgcccacaccuacgcccuccccuccccggc

SEQ ID NO: 321627 - RNA, 32 nt, Homo Sapiens
aagcaauagucaaaaucagaugaccuguccau

SEQ ID NO: 321628 - RNA, 32 nt, Homo Sapiens
ggagaaugagagacaauuauugaggaggaggu

SEQ ID NO: 321629 - RNA, 32 nt, Homo Sapiens
uuucugugggcaugugcugaccaucacgcaga

SEQ ID NO: 321630 - RNA, 32 nt, Homo Sapiens
ugauaaaggcuuuauuagguauaucugaggaa

SEQ ID NO: 321631 - RNA, 31 nt, Homo Sapiens
aguggugcaguuucgcucagagcuugucucc

SEQ ID NO: 321632 - RNA, 32 nt, Homo Sapiens
cacuccaucagcaaaauguauuugagcacaca

SEQ ID NO: 321633 - RNA, 32 nt, Homo Sapiens
uccccgcaacuuccugccucugagagaccugc

SEQ ID NO: 321634 - RNA, 32 nt, Homo Sapiens
guacacccuuuguuguucucauauacuguuua

SEQ ID NO: 321635 - RNA, 30 nt, Homo Sapiens
accccucccgcgcagcgccacccggccugg

SEQ ID NO: 321636 - RNA, 32 nt, Homo Sapiens
uuuaagaugaaggaggaacauaaaggguuuca

SEQ ID NO: 321637 - RNA, 32 nt, Homo Sapiens
uuuucagacaaugaaacuuauuagucuguguc

SEQ ID NO: 321638 - RNA, 32 nt, Homo Sapiens
ccguuacauuuuauguaauuauguguuuggac

SEQ ID NO: 321639 - RNA, 32 nt, Homo Sapiens
ugauccugccagcagcccuacagcuccacacc

SEQ ID NO: 321640 - RNA, 32 nt, Homo Sapiens
cgggcguuggguuuggggggacggugccccca

SEQ ID NO: 321641 - RNA, 32 nt, Homo Sapiens
ggggaacauaugagaccccugccaucucaaaa

SEQ ID NO: 321642 - RNA, 32 nt, Homo Sapiens
aaaacgauggcaggcauuccucugaguuuaca

SEQ ID NO: 321643 - RNA, 32 nt, Homo Sapiens
ucugagagggacagagaaagaauagaaaugug

SEQ ID NO: 321644 - RNA, 32 nt, Homo Sapiens
ugaaagaaguuuuuuccaguuugucagugucu

SEQ ID NO: 321645 - RNA, 32 nt, Homo Sapiens
uucuggccuuguuauuugauguauaucuuuua

SEQ ID NO: 321646 - RNA, 32 nt, Homo Sapiens
guguuuccucucugcuggcucguagccggaag

SEQ ID NO: 321647 - RNA, 32 nt, Homo Sapiens
cacucuguuucacguauguggaugccaguuaa

SEQ ID NO: 321648 - RNA, 32 nt, Homo Sapiens
cuuugccccaaagugaggggcuccacaccaac

SEQ ID NO: 321649 - RNA, 32 nt, Homo Sapiens
uagauauagauauugugaaaauaggcuguuua

SEQ ID NO: 321650 - RNA, 32 nt, Homo Sapiens
uugcacuauaaaauuauaaggucauaaauguu

SEQ ID NO: 321651 - RNA, 32 nt, Homo Sapiens
guuuacaugauuuuuaaauuugcaaugauguu

SEQ ID NO: 321652 - RNA, 32 nt, Homo Sapiens
cugcauaauuuuuuuucuuuuuuuauauggag

SEQ ID NO: 321653 - RNA, 32 nt, Homo Sapiens
uuuugacaggccgucccgguggcugccaugcg

SEQ ID NO: 321654 - RNA, 32 nt, Homo Sapiens
cucucucucucuuuuuuuuuuaaauaacucuu

SEQ ID NO: 321655 - RNA, 32 nt, Homo Sapiens
cucucuuuacacauugucagacuuucgaggcc

SEQ ID NO: 321656 - RNA, 32 nt, Homo Sapiens
uggcccaaucucugugucaucauugucauaug

SEQ ID NO: 321657 - RNA, 30 nt, Homo Sapiens
ggaacaggaguuccgaucgacccgguacca

SEQ ID NO: 321658 - RNA, 32 nt, Homo Sapiens
auuucaaaacaaaagcaagcaaacaugccggg

SEQ ID NO: 321659 - RNA, 32 nt, Homo Sapiens
uuuucaaacuguucuuugaggaccccugagag

SEQ ID NO: 321660 - RNA, 32 nt, Homo Sapiens
uguagagggcggugaccgcgcuccagacacag

SEQ ID NO: 321661 - RNA, 31 nt, Homo Sapiens
aguaccuguagcacgccagugcuguuucccg

SEQ ID NO: 321662 - RNA, 32 nt, Homo Sapiens
ccggcgacagcguccacgucgcgcucauggcu

SEQ ID NO: 321663 - RNA, 32 nt, Homo Sapiens
uaauaauacaguguuuauaugugugugagaga

SEQ ID NO: 321664 - RNA, 32 nt, Homo Sapiens
cuuuuguuuuuccucuucugucaauggucuac

SEQ ID NO: 321665 - RNA, 32 nt, Homo Sapiens
agcaccaaggaaaaagcagagaaugacagcaa

SEQ ID NO: 321666 - RNA, 32 nt, Homo Sapiens
gucuuuauagugaaacaaagccagagcaucuu

SEQ ID NO: 321667 - RNA, 32 nt, Homo Sapiens
ccucuucuucccccauaucccaacauggaauu

SEQ ID NO: 321668 - RNA, 32 nt, Homo Sapiens
cccaaggaugccaggaagacguccaccauuag

SEQ ID NO: 321669 - RNA, 32 nt, Homo Sapiens
uccaaggcgggaggagagaagggacagcucug

SEQ ID NO: 321670 - RNA, 32 nt, Homo Sapiens
cccucaccuccaccggccccaucccccacacc

SEQ ID NO: 321671 - RNA, 32 nt, Homo Sapiens
cgccaccgugcugggauaauuuuuguauuuuu

SEQ ID NO: 321672 - RNA, 32 nt, Homo Sapiens
acagaaacguugagauacagaguaaacgauac

SEQ ID NO: 321673 - RNA, 32 nt, Homo Sapiens
agccuuugugaucucaccuguuggaaugcacu

SEQ ID NO: 321674 - RNA, 32 nt, Homo Sapiens
auucacuguagaucucuuauugaaaugcguau

SEQ ID NO: 321675 - RNA, 32 nt, Homo Sapiens
aaaguucuugucugcuggagguggcauuaccu

SEQ ID NO: 321676 - RNA, 32 nt, Homo Sapiens
ggagcacauacagggaugcgacacccacuuaa

SEQ ID NO: 321677 - RNA, 32 nt, Homo Sapiens
ugaaaagcacuuucuccauacauaauucugga

SEQ ID NO: 321678 - RNA, 32 nt, Homo Sapiens
uugcagcaguugcugccgcugcgccgcgccug

SEQ ID NO: 321679 - RNA, 32 nt, Homo Sapiens
uaagaaauguagaacuuuaacuucugcaaaga

SEQ ID NO: 321680 - RNA, 32 nt, Homo Sapiens
uucuaauauauccauaugugggacagugauuu

SEQ ID NO: 321681 - RNA, 32 nt, Homo Sapiens
ugccuaccugaguagaaucuuauuuaugaacu

SEQ ID NO: 321682 - RNA, 32 nt, Homo Sapiens
uuuuuucuuuaacguuauaguuccuuauuaca

SEQ ID NO: 321683 - RNA, 32 nt, Homo Sapiens
uuggauccacuuuaucuugauuagucugcauu

SEQ ID NO: 321684 - RNA, 32 nt, Homo Sapiens
uuugcuccaggguuauucuccuccucgaguca

SEQ ID NO: 321685 - RNA, 32 nt, Homo Sapiens
uuucguuuucacuugcuucucaaccuagucua

SEQ ID NO: 321686 - RNA, 32 nt, Homo Sapiens
ugaagaugaugaugaugaagaagaugggaauu

SEQ ID NO: 321687 - RNA, 32 nt, Homo Sapiens
cagaaccucucgucuugggaucucccacacuc

SEQ ID NO: 321688 - RNA, 32 nt, Homo Sapiens
agauuaccuucagauacuugacauuaaccuca

SEQ ID NO: 321689 - RNA, 32 nt, Homo Sapiens
aucugcccaugcuuugggcaugagaugcucag

SEQ ID NO: 321690 - RNA, 32 nt, Homo Sapiens
gaaugaugccuaaaauacaauaagaucucaag

SEQ ID NO: 321691 - RNA, 32 nt, Homo Sapiens
guccaaaacaguguugugucacugguggucau

SEQ ID NO: 321692 - RNA, 32 nt, Homo Sapiens
guaaauuuacuuugaauuguaaauaacaugaa

SEQ ID NO: 321693 - RNA, 32 nt, Homo Sapiens
ccaagucuuaaaccucuggggcugaagcacug

SEQ ID NO: 321694 - RNA, 32 nt, Homo Sapiens
uaugccccaagcccugguggucuggcccuuuc

SEQ ID NO: 321695 - RNA, 32 nt, Homo Sapiens
gccaugauguucuugugggcauguuauucuug

SEQ ID NO: 321696 - RNA, 32 nt, Homo Sapiens
aguguggagauaaguuugccauuacauuagca

SEQ ID NO: 321697 - RNA, 32 nt, Homo Sapiens
uguuaucuccacccacccacacacauacauac

SEQ ID NO: 321698 - RNA, 32 nt, Homo Sapiens
gaagucuggcaaaaacagaaacagaacaucag

SEQ ID NO: 321699 - RNA, 32 nt, Homo Sapiens
acaacgagguuuauugaaaauuuugccuaaug

SEQ ID NO: 321700 - RNA, 32 nt, Homo Sapiens
cagacggaggcgggugcgcggaggcggcagug

SEQ ID NO: 321701 - RNA, 32 nt, Homo Sapiens
caaacccuucuuguucucuccuccaaaaguag

SEQ ID NO: 321702 - RNA, 32 nt, Homo Sapiens
auguuacugcugggcacagcucugcguugcuc

SEQ ID NO: 321703 - RNA, 32 nt, Homo Sapiens
cucacuccggcgggcacagcuggcuggggcug

SEQ ID NO: 321704 - RNA, 32 nt, Homo Sapiens
ucuguucaaauauuaguaaaaauugaaaauaa

SEQ ID NO: 321705 - RNA, 31 nt, Homo Sapiens
caaggucaagccacuccugaauguggcucgg

SEQ ID NO: 321706 - RNA, 32 nt, Homo Sapiens
auuguaauauauuuuauuauauuagccaccau

SEQ ID NO: 321707 - RNA, 32 nt, Homo Sapiens
guggggucgggcucacgucgcggccgccuuug

SEQ ID NO: 321708 - RNA, 32 nt, Homo Sapiens
acuuguacauuuccaccucucuaggccucugc

SEQ ID NO: 321709 - RNA, 32 nt, Homo Sapiens
cugcacagugguccaggguccagcccuccgcc

SEQ ID NO: 321710 - RNA, 32 nt, Homo Sapiens
ggagaugcugugguucauggaaucucuuccag

SEQ ID NO: 321711 - RNA, 32 nt, Homo Sapiens
cugaccucuguuguccuccccuugggcggcug

SEQ ID NO: 321712 - RNA, 32 nt, Homo Sapiens
auucuuggauuugguaagaggugagcaagaca

SEQ ID NO: 321713 - RNA, 32 nt, Homo Sapiens
ugcuuaaaaaaaaaaaucauguggcucuuuca

SEQ ID NO: 321714 - RNA, 32 nt, Homo Sapiens
uuuaaggaaaggaaaagcuugucacaaucuaa

SEQ ID NO: 321715 - RNA, 32 nt, Homo Sapiens
gugcauucauuuccauucacugaugacuaaua

SEQ ID NO: 321716 - RNA, 32 nt, Homo Sapiens
gcaguggccccggcucgccgcgccauggagcg

SEQ ID NO: 321717 - RNA, 32 nt, Homo Sapiens
gcccccguccccagcgcccccgggcgacuucg

SEQ ID NO: 321718 - RNA, 32 nt, Homo Sapiens
acagauuugaggccaggugcggugccucacau

SEQ ID NO: 321719 - RNA, 32 nt, Homo Sapiens
guaagagucugcuuuauaugaauauaauaugg

SEQ ID NO: 321720 - RNA, 32 nt, Homo Sapiens
cggaaaagcaguuuuuacaaaguauuuaaaag

SEQ ID NO: 321721 - RNA, 32 nt, Homo Sapiens
agaacauaaugguuaacaaauaucacagcauc

SEQ ID NO: 321722 - RNA, 31 nt, Homo Sapiens
gugaaggcgagggacugcagagccuggaaau

SEQ ID NO: 321723 - RNA, 31 nt, Homo Sapiens
gggucuuugugcuuccauugcugugugccac

SEQ ID NO: 321724 - RNA, 32 nt, Homo Sapiens
ggaaggcaaaucuauuucuaauuauacauaua

SEQ ID NO: 321725 - RNA, 32 nt, Homo Sapiens
uaaaugcagugaaaggaacuauauuauuaaau

SEQ ID NO: 321726 - RNA, 32 nt, Homo Sapiens
ugaggccuguuugcagucacaccuggacacca

SEQ ID NO: 321727 - RNA, 32 nt, Homo Sapiens
agaaaaucuaauggaugaagaugagaaagaca

SEQ ID NO: 321728 - RNA, 32 nt, Homo Sapiens
cuccccaguguggauacuaauaaaccucuugg

SEQ ID NO: 321729 - RNA, 32 nt, Homo Sapiens
gggcgcagugacucacgccuguaaucccagca

SEQ ID NO: 321730 - RNA, 32 nt, Homo Sapiens
aaugugaagcagaucaaggaaacuucuguuga

SEQ ID NO: 321731 - RNA, 32 nt, Homo Sapiens
caaaggauauuguauguucagguccaaacgcu

SEQ ID NO: 321732 - RNA, 32 nt, Homo Sapiens
uucaguggccuuuuuuuuuuuaaggaaaaaaa

SEQ ID NO: 321733 - RNA, 32 nt, Homo Sapiens
augucccugcacgaggccuacaucaccccucg

SEQ ID NO: 321734 - RNA, 32 nt, Homo Sapiens
ucagaccugccagcucucggaguccuuggugg

SEQ ID NO: 321735 - RNA, 32 nt, Homo Sapiens
cugggacaauaugggaggaaaagugaagauug

SEQ ID NO: 321736 - RNA, 32 nt, Homo Sapiens
ggccuuacccccagcccuggcucagcaucuag

SEQ ID NO: 321737 - RNA, 32 nt, Homo Sapiens
gcccuucugggccccagggcaagccagacacu

SEQ ID NO: 321738 - RNA, 32 nt, Homo Sapiens
gcauaacguauaaaagccuguuuaagagacag

SEQ ID NO: 321739 - RNA, 32 nt, Homo Sapiens
cccugaccucaucaccugugcagccauggaga

SEQ ID NO: 321740 - RNA, 32 nt, Homo Sapiens
uguccauccaaaugugaucaccacgauucaac

SEQ ID NO: 321741 - RNA, 30 nt, Homo Sapiens
aaauuauguccuccugccuacuuuuaauug

SEQ ID NO: 321742 - RNA, 31 nt, Homo Sapiens
ucucugcugagggugacuccaaggcagcuga

SEQ ID NO: 321743 - RNA, 32 nt, Homo Sapiens
auggcagaaauucugaguuuucugccuuauuu

SEQ ID NO: 321744 - RNA, 32 nt, Homo Sapiens
uuuuguuugggguuuuaccauuguugggauuu

SEQ ID NO: 321745 - RNA, 32 nt, Homo Sapiens
ccucagccccacuagcuggcaccaacuuaauu

SEQ ID NO: 321746 - RNA, 30 nt, Homo Sapiens
cuuggaggcaggcagugaggugcuccuuuc

SEQ ID NO: 321747 - RNA, 32 nt, Homo Sapiens
cgcugacugccagcuccagccuggccccgggg

SEQ ID NO: 321748 - RNA, 32 nt, Homo Sapiens
gcaagggcucagccuggcaggcuuuguggggg

SEQ ID NO: 321749 - RNA, 32 nt, Homo Sapiens
cucuacgccaaugaggccucaucugugcucuc

SEQ ID NO: 321750 - RNA, 32 nt, Homo Sapiens
auuucaagugaauuauuuuaaucuuuuucucu

SEQ ID NO: 321751 - RNA, 32 nt, Homo Sapiens
uucaguugcuauaucauaagcauuuuuaaagu

SEQ ID NO: 321752 - RNA, 32 nt, Homo Sapiens
aauggcuuuucccaacccccagcccccacccg

SEQ ID NO: 321753 - RNA, 32 nt, Homo Sapiens
agggcacuaagugcugagacugcacaaagcag

SEQ ID NO: 321754 - RNA, 32 nt, Homo Sapiens
ucaggacaccccaagagauguccuuuagucuc

SEQ ID NO: 321755 - RNA, 32 nt, Homo Sapiens
ggagucauaggugugugugacaucaguggugg

SEQ ID NO: 321756 - RNA, 32 nt, Homo Sapiens
cugccuaaaauagaaaucauggaucuuaggag

SEQ ID NO: 321757 - RNA, 32 nt, Homo Sapiens
caagaccccuccccaguaccuacccuuccagg

SEQ ID NO: 321758 - RNA, 32 nt, Homo Sapiens
aauuacuaugccaugugcuauuuuaguguuug

SEQ ID NO: 321759 - RNA, 32 nt, Homo Sapiens
ccccuggcagugccaccaugaggagugcaacc

SEQ ID NO: 321760 - RNA, 32 nt, Homo Sapiens
ccaaaaagccccagaaagaguaugccuucagc

SEQ ID NO: 321761 - RNA, 32 nt, Homo Sapiens
gcucuccuugcagcugcuuagacgcuggauuu

SEQ ID NO: 321762 - RNA, 32 nt, Homo Sapiens
ccccuccacacacacacacacacacacacaca

SEQ ID NO: 321763 - RNA, 32 nt, Homo Sapiens
aggaaacaugaauagcaggaaaacacugaauu

SEQ ID NO: 321764 - RNA, 32 nt, Homo Sapiens
uucauagaugacugucacauuuuaaaauguuc

SEQ ID NO: 321765 - RNA, 32 nt, Homo Sapiens
guauauacaauaucaggcaugcauguggcuug

SEQ ID NO: 321766 - RNA, 30 nt, Homo Sapiens
cggccucuggacugccaggcuggguugggg

SEQ ID NO: 321767 - RNA, 32 nt, Homo Sapiens
auucacagacgcuacaggauggagcggggcgc

SEQ ID NO: 321768 - RNA, 32 nt, Homo Sapiens
uuggaaaucuguggcccuggaggaggaacagg

SEQ ID NO: 321769 - RNA, 32 nt, Homo Sapiens
ugggcacuaaagaacacugaaaauauggagug

SEQ ID NO: 321770 - RNA, 32 nt, Homo Sapiens
ccgcugcaggccagcucugcuguucacuggcc

SEQ ID NO: 321771 - RNA, 32 nt, Homo Sapiens
uuauauggaaaaccguuauagacccaauaaca

SEQ ID NO: 321772 - RNA, 32 nt, Homo Sapiens
uuuucuaucuucugcucuuugccaccugugag

SEQ ID NO: 321773 - RNA, 32 nt, Homo Sapiens
agcgacuugguccgccgcaagcuccgccgcag

SEQ ID NO: 321774 - RNA, 32 nt, Homo Sapiens
cgcgcucaguccccggcgguagcaggagccug

SEQ ID NO: 321775 - RNA, 32 nt, Homo Sapiens
ucugaacucgguuuuucuugacauaccugaau

SEQ ID NO: 321776 - RNA, 32 nt, Homo Sapiens
cuccugggccuccagggcugggccugcucugc

SEQ ID NO: 321777 - RNA, 32 nt, Homo Sapiens
agucugaaggacccuaguuccuagaggcaucu

SEQ ID NO: 321778 - RNA, 31 nt, Homo Sapiens
agugagcaagagguuucuggugaaaacaugg

SEQ ID NO: 321779 - RNA, 32 nt, Homo Sapiens
uaaccauuaugaaaaggaaaauuuguccugua

SEQ ID NO: 321780 - RNA, 32 nt, Homo Sapiens
cuagagcgcucgccucgccccuccgcgagcag

SEQ ID NO: 321781 - RNA, 32 nt, Homo Sapiens
gccuggauggguggaggcuuagguagccggac

SEQ ID NO: 321782 - RNA, 32 nt, Homo Sapiens
cucuggauugcacauggaugaugaaggaacuc

SEQ ID NO: 321783 - RNA, 31 nt, Homo Sapiens
acccugugauuguugucagugcuguuauucc

SEQ ID NO: 321784 - RNA, 32 nt, Homo Sapiens
guuaaaauuuaaaaaggugcuuuaaaauaaaa

SEQ ID NO: 321785 - RNA, 32 nt, Homo Sapiens
uuucugggugcucccuggccccaggguggcgu

SEQ ID NO: 321786 - RNA, 32 nt, Homo Sapiens
ugauggcucaugccuguaaucucagcacugua

SEQ ID NO: 321787 - RNA, 32 nt, Homo Sapiens
aaaacacccagcugggugcaguggcucgcacc

SEQ ID NO: 321788 - RNA, 32 nt, Homo Sapiens
agugccccagacugagcucuccaggccaggug

SEQ ID NO: 321789 - RNA, 32 nt, Homo Sapiens
ucugugaagaacagaaaugaucauauucuuau

SEQ ID NO: 321790 - RNA, 32 nt, Homo Sapiens
ggggacugccuugugaagccgcccucgccauc

SEQ ID NO: 321791 - RNA, 32 nt, Homo Sapiens
cucgccaagcagcuggcucuauucauuuagca

SEQ ID NO: 321792 - RNA, 32 nt, Homo Sapiens
cuuacaucuuuguuuaccauuaaaaaguugga

SEQ ID NO: 321793 - RNA, 32 nt, Homo Sapiens
ucuggucggcugugaugugcuccagcuuucca

SEQ ID NO: 321794 - RNA, 32 nt, Homo Sapiens
uggagcgggcugccuccgcccucucgugccag

SEQ ID NO: 321795 - RNA, 32 nt, Homo Sapiens
ggugagugaaauggagaaggcuaaacuuuuuc

SEQ ID NO: 321796 - RNA, 30 nt, Homo Sapiens
guaagcgaggccgggccgccggcguuugac

SEQ ID NO: 321797 - RNA, 32 nt, Homo Sapiens
caguaaagggcucccaucguccuucuguccca

SEQ ID NO: 321798 - RNA, 32 nt, Homo Sapiens
ggagaggccaccuucuuaggugccuguaguga

SEQ ID NO: 321799 - RNA, 32 nt, Homo Sapiens
caucguacuugcuacacccccauccugcagcu

SEQ ID NO: 321800 - RNA, 32 nt, Homo Sapiens
uccuuuuaguuacuguaaguuccuccucugcc

SEQ ID NO: 321801 - RNA, 32 nt, Homo Sapiens
auuaaaccaauauugaucacacauaugacaca

SEQ ID NO: 321802 - RNA, 32 nt, Homo Sapiens
ugggaugagccgcagcccuuuccugggacaug

SEQ ID NO: 321803 - RNA, 32 nt, Homo Sapiens
gcgaauggugcggccccuccccucucaccgug

SEQ ID NO: 321804 - RNA, 32 nt, Homo Sapiens
uguggggagcuugcagggacuggcuguggaca

SEQ ID NO: 321805 - RNA, 32 nt, Homo Sapiens
cgcacccguggccgccucccagcccucuuugc

SEQ ID NO: 321806 - RNA, 32 nt, Homo Sapiens
ugcagagaaaucaagugucugcaagggagccg

SEQ ID NO: 321807 - RNA, 32 nt, Homo Sapiens
cuugguugggguucuuuggguaaagcuaaauc

SEQ ID NO: 321808 - RNA, 32 nt, Homo Sapiens
cccaccgcuuucucagcgucagagccccuagc

SEQ ID NO: 321809 - RNA, 32 nt, Homo Sapiens
cguaaugggcccgccuggcccugggcgccgcg

SEQ ID NO: 321810 - RNA, 32 nt, Homo Sapiens
aaaaauccuguuauccuguguauuuacuaguc

SEQ ID NO: 321811 - RNA, 32 nt, Homo Sapiens
gagaagcuccguuguguacugaggauauccau

SEQ ID NO: 321812 - RNA, 32 nt, Homo Sapiens
gccgccccaaggagcccuccccaagccugacc

SEQ ID NO: 321813 - RNA, 32 nt, Homo Sapiens
acaacuuucuacuauuuuuuuauuauuauuuu

SEQ ID NO: 321814 - RNA, 30 nt, Homo Sapiens
ggacugaaucgccacuacagccugggugca

SEQ ID NO: 321815 - RNA, 32 nt, Homo Sapiens
cggcgaguccacgugcuccccgcggccgguug

SEQ ID NO: 321816 - RNA, 31 nt, Homo Sapiens
uggagcugcuggcagggccaggcaaggccag

SEQ ID NO: 321817 - RNA, 32 nt, Homo Sapiens
cuccgaggcuccuggauuucucccuucgcaaa

SEQ ID NO: 321818 - RNA, 32 nt, Homo Sapiens
cugcagaacugcccggcccgggccccucagga

SEQ ID NO: 321819 - RNA, 32 nt, Homo Sapiens
cuguggugaaacaaaauaucuuuaaaaguuaa

SEQ ID NO: 321820 - RNA, 32 nt, Homo Sapiens
aguucuugagggauuggauuaugcccagccac

SEQ ID NO: 321821 - RNA, 32 nt, Homo Sapiens
uuguauauuuuuguuucaucaacuaagaugca

SEQ ID NO: 321822 - RNA, 32 nt, Homo Sapiens
gaugugcuaaaauauauagaucuaucauauuu

SEQ ID NO: 321823 - RNA, 32 nt, Homo Sapiens
uuuucuuucuagagacuccauuuccuugcuua

SEQ ID NO: 321824 - RNA, 32 nt, Homo Sapiens
ucagaauguuucuuauucucuggaagcaucag

SEQ ID NO: 321825 - RNA, 32 nt, Homo Sapiens
aucagauugugcaaguuugaacgcuuguuucc

SEQ ID NO: 321826 - RNA, 32 nt, Homo Sapiens
augcuucucugguuggagauccuguuauuauu

SEQ ID NO: 321827 - RNA, 32 nt, Homo Sapiens
cagccuuuccaagacccugcccggcccugccc

SEQ ID NO: 321828 - RNA, 32 nt, Homo Sapiens
ugcaaacgaaaacaauuucuacgagguuauau

SEQ ID NO: 321829 - RNA, 32 nt, Homo Sapiens
ucauuaucaguuccuucauuguugaauacugc

SEQ ID NO: 321830 - RNA, 32 nt, Homo Sapiens
uugcucccauucuucuuccacagggccuuagu

SEQ ID NO: 321831 - RNA, 32 nt, Homo Sapiens
uuuuucaaaaauuuuuuguaugaucaguuuuu

SEQ ID NO: 321832 - RNA, 32 nt, Homo Sapiens
ccagcccggagcagccauccccugccaggucu

SEQ ID NO: 321833 - RNA, 32 nt, Homo Sapiens
aaccuuuuaacagggucuaacaugagaguugg

SEQ ID NO: 321834 - RNA, 32 nt, Homo Sapiens
cuguucccaucccaugucccuguggguaguga

SEQ ID NO: 321835 - RNA, 32 nt, Homo Sapiens
agauuuaaauguuaaaauucgauuuuguuaca

SEQ ID NO: 321836 - RNA, 32 nt, Homo Sapiens
ugcagucuaugaugagaaacaaugaaauuaug

SEQ ID NO: 321837 - RNA, 32 nt, Homo Sapiens
auugacaaugguggcugucaagaucgaugcug

SEQ ID NO: 321838 - RNA, 32 nt, Homo Sapiens
acucuguucuuuuuggucaccuguggaaugaa

SEQ ID NO: 321839 - RNA, 32 nt, Homo Sapiens
auuuaguuauuuaagaagaaugagaaggccaa

SEQ ID NO: 321840 - RNA, 32 nt, Homo Sapiens
ggggugaaaaggaaauuuuuaauccaucucaa

SEQ ID NO: 321841 - RNA, 30 nt, Homo Sapiens
cggcgggcgcccgguaccucugcccgcggu

SEQ ID NO: 321842 - RNA, 32 nt, Homo Sapiens
ggcugcugaggcggccgagaugcucgugcgcg

SEQ ID NO: 321843 - RNA, 32 nt, Homo Sapiens
cuuuuaaaacaauuaauuaauaacgagcacug

SEQ ID NO: 321844 - RNA, 27 nt, Homo Sapiens
aacugaggcuucuucaguccugcagga

SEQ ID NO: 321845 - RNA, 32 nt, Homo Sapiens
gaaaacucauuuucuucagaaguuauuucaag

SEQ ID NO: 321846 - RNA, 32 nt, Homo Sapiens
ggaaauggcugaacuagaagcuguguuagaac

SEQ ID NO: 321847 - RNA, 32 nt, Homo Sapiens
cuagcgcagccagcccgagggccgccgccgcc

SEQ ID NO: 321848 - RNA, 32 nt, Homo Sapiens
auagugugaagauuguacacuauauuacauga

SEQ ID NO: 321849 - RNA, 32 nt, Homo Sapiens
cauuuccucuucuccuuacuaagguaaaaaga

SEQ ID NO: 321850 - RNA, 32 nt, Homo Sapiens
gggucugguccacacucugugcucccagccuu

SEQ ID NO: 321851 - RNA, 32 nt, Homo Sapiens
gccccagaauccuggaggagcaggagguagca

SEQ ID NO: 321852 - RNA, 32 nt, Homo Sapiens
cagcuuuugauuaaacaaaauuaccaacaaau

SEQ ID NO: 321853 - RNA, 32 nt, Homo Sapiens
auuccugcuguaaaauaauuuuuaaaaccuug

SEQ ID NO: 321854 - RNA, 32 nt, Homo Sapiens
ggauauguaaauuaugguuuggucuaaaggaa

SEQ ID NO: 321855 - RNA, 32 nt, Homo Sapiens
auauuuauaccuguuuucauucuaggagaaaa

SEQ ID NO: 321856 - RNA, 32 nt, Homo Sapiens
gccucccgucuuccgggacccggcacuucggg

SEQ ID NO: 321857 - RNA, 32 nt, Homo Sapiens
ggaggagaccauuuccacggacccuccgacuc

SEQ ID NO: 321858 - RNA, 32 nt, Homo Sapiens
uagccaaaggucgcuccaagcguacaggagau

SEQ ID NO: 321859 - RNA, 32 nt, Homo Sapiens
uccauuugauaaagacuuuacccauuugcucc

SEQ ID NO: 321860 - RNA, 32 nt, Homo Sapiens
ugggagaaaaggaggagggaaggagccgguca

SEQ ID NO: 321861 - RNA, 32 nt, Homo Sapiens
ucacugacaugaauuugaagauauaucuaucu

SEQ ID NO: 321862 - RNA, 32 nt, Homo Sapiens
uuaguggacucuaugugauguacuaaauguau

SEQ ID NO: 321863 - RNA, 32 nt, Homo Sapiens
auagguuucuguuuuuaauuucaauguuaaau

SEQ ID NO: 321864 - RNA, 32 nt, Homo Sapiens
uuauccuugcugugauuuuaagagucagacaa

SEQ ID NO: 321865 - RNA, 32 nt, Homo Sapiens
guggugauagaaaugaauaaacccauggaaac

SEQ ID NO: 321866 - RNA, 32 nt, Homo Sapiens
cccaaaauaucuaaaauggggguaaagauaua

SEQ ID NO: 321867 - RNA, 27 nt, Homo Sapiens
ccauggucgacaucccaccuccuuucg

SEQ ID NO: 321868 - RNA, 32 nt, Homo Sapiens
uagaaaugcauucaaauuuguuuuuucugugu

SEQ ID NO: 321869 - RNA, 32 nt, Homo Sapiens
cauucuuugucaauucauuuuuucccaugaga

SEQ ID NO: 321870 - RNA, 32 nt, Homo Sapiens
agccccuggcccacccacuaauacuacugcac

SEQ ID NO: 321871 - RNA, 32 nt, Homo Sapiens
aaagugugcuguugguuaaaaaaaaaaaaaaa

SEQ ID NO: 321872 - RNA, 32 nt, Homo Sapiens
aagacgcagaugggaagaagcguuagagcgag

SEQ ID NO: 321873 - RNA, 32 nt, Homo Sapiens
cacuggccuaacacugacaccaugggcuggac

SEQ ID NO: 321874 - RNA, 32 nt, Homo Sapiens
uuucagcaggcgacuuucuuccaaugcugggc

SEQ ID NO: 321875 - RNA, 32 nt, Homo Sapiens
aagcuucuguuguguucagaugggcaggcacu

SEQ ID NO: 321876 - RNA, 32 nt, Homo Sapiens
augccgcggccccucuguuguuucagacugac

SEQ ID NO: 321877 - RNA, 32 nt, Homo Sapiens
acacaccaaggcuugccaucacguucuuuuca

SEQ ID NO: 321878 - RNA, 32 nt, Homo Sapiens
aauuuacagaccugacucuccucaccuucccc

SEQ ID NO: 321879 - RNA, 32 nt, Homo Sapiens
gugaugggccuugcccucccccucccagccca

SEQ ID NO: 321880 - RNA, 32 nt, Homo Sapiens
agcggcugcagcggcggagccggcgccucagc

SEQ ID NO: 321881 - RNA, 32 nt, Homo Sapiens
gagaguaaagcuucuaggcaucugaaacuuuu

SEQ ID NO: 321882 - RNA, 32 nt, Homo Sapiens
gguccuggauagugaggccuggucacuggggu

SEQ ID NO: 321883 - RNA, 31 nt, Homo Sapiens
gaaaaggcacaacugcugccccgcccagugc

SEQ ID NO: 321884 - RNA, 32 nt, Homo Sapiens
auaguuuucuaaaaagccuuucuucuaaaaac

SEQ ID NO: 321885 - RNA, 32 nt, Homo Sapiens
gaccgggagcuuugggugaccagccacucaaa

SEQ ID NO: 321886 - RNA, 32 nt, Homo Sapiens
ggccagagccugggucgucuccagccucacuc

SEQ ID NO: 321887 - RNA, 32 nt, Homo Sapiens
guuacuuacuugccccuuuuuaucuuucccuc

SEQ ID NO: 321888 - RNA, 32 nt, Homo Sapiens
cucgccguucgcggagcgcagccgagccggcc

SEQ ID NO: 321889 - RNA, 32 nt, Homo Sapiens
ugcagcggccccaggcucaccccccgcaugca

SEQ ID NO: 321890 - RNA, 32 nt, Homo Sapiens
gccugccugcuccuuccacuccuaccaccugc

SEQ ID NO: 321891 - RNA, 32 nt, Homo Sapiens
aauacuuuacguauggaaaaagaauauuugua

SEQ ID NO: 321892 - RNA, 32 nt, Homo Sapiens
ccucuugcaaggcguaccuccaaacauaauug

SEQ ID NO: 321893 - RNA, 32 nt, Homo Sapiens
aauucauacuuauaagcagcuaguaaauugua

SEQ ID NO: 321894 - RNA, 32 nt, Homo Sapiens
ugauauuuucuuuaauuuuuagauccagauau

SEQ ID NO: 321895 - RNA, 32 nt, Homo Sapiens
cccugucuagcauuggaaccacuucuaggaac

SEQ ID NO: 321896 - RNA, 32 nt, Homo Sapiens
ggucagauucgagguugcucccugcccagaac

SEQ ID NO: 321897 - RNA, 32 nt, Homo Sapiens
agugucacaacacaaaauacgauguuggguuu

SEQ ID NO: 321898 - RNA, 32 nt, Homo Sapiens
gguccuugccccaccccagccucuuccuaauc

SEQ ID NO: 321899 - RNA, 32 nt, Homo Sapiens
gggggguuccgggucuccagaaggacauggug

SEQ ID NO: 321900 - RNA, 32 nt, Homo Sapiens
cuguccugggugaaaauggcugucuagacuaa

SEQ ID NO: 321901 - RNA, 32 nt, Homo Sapiens
uucuccugccucagccucccccgcagcuagga

SEQ ID NO: 321902 - RNA, 32 nt, Homo Sapiens
gacugcgggaccauuccuuccauccucuuuau

SEQ ID NO: 321903 - RNA, 32 nt, Homo Sapiens
agaggcuugaaccuggcaccacaggggucugg

SEQ ID NO: 321904 - RNA, 32 nt, Homo Sapiens
auuauuucuacaacuauauguaaaucuacauu

SEQ ID NO: 321905 - RNA, 32 nt, Homo Sapiens
ccaugaucugacaugcagaaauccagccuugu

SEQ ID NO: 321906 - RNA, 32 nt, Homo Sapiens
cgcgacuucauugaugcacccauuccaguggu

SEQ ID NO: 321907 - RNA, 32 nt, Homo Sapiens
gcuucccgccucccacuccccagcgcccccgg

SEQ ID NO: 321908 - RNA, 32 nt, Homo Sapiens
aaggccuguucugguggggagacgccagagga

SEQ ID NO: 321909 - RNA, 32 nt, Homo Sapiens
ucuacagauggcaacagcuccauagggacagc

SEQ ID NO: 321910 - RNA, 32 nt, Homo Sapiens
ccgguccauggcggccccucggacccugcgcu

SEQ ID NO: 321911 - RNA, 32 nt, Homo Sapiens
uucagacccucagaccugccccggggccaggu

SEQ ID NO: 321912 - RNA, 32 nt, Homo Sapiens
ccaaccgccaaggccugaggaccgccgagggc

SEQ ID NO: 321913 - RNA, 32 nt, Homo Sapiens
aaaccauugcauaaaugcuauaguguaaaaaa

SEQ ID NO: 321914 - RNA, 32 nt, Homo Sapiens
gguguggaaugugcccggcagccuucauagca

SEQ ID NO: 321915 - RNA, 29 nt, Homo Sapiens
uagcuuccagacaaucaugucaaaauuua

SEQ ID NO: 321916 - RNA, 32 nt, Homo Sapiens
uggggcuggggugggcgggggaggcugggccc

SEQ ID NO: 321917 - RNA, 32 nt, Homo Sapiens
caugcuugccuuuccuggcccccaggcccagc

SEQ ID NO: 321918 - RNA, 32 nt, Homo Sapiens
gcauauacccaguggaauguaaaucauccugc

SEQ ID NO: 321919 - RNA, 32 nt, Homo Sapiens
gcccuuugcacuggcuguuuccucugccugga

SEQ ID NO: 321920 - RNA, 32 nt, Homo Sapiens
ucuguucuuuaccucccuuuauuuggugcaga

SEQ ID NO: 321921 - RNA, 32 nt, Homo Sapiens
gguugagcuucuuggcaggacaucaguaccaa

SEQ ID NO: 321922 - RNA, 32 nt, Homo Sapiens
gucuggugccagcacugggagcugcuccgccc

SEQ ID NO: 321923 - RNA, 32 nt, Homo Sapiens
uccccacccaguggggcccccaucuaauauuc

SEQ ID NO: 321924 - RNA, 32 nt, Homo Sapiens
auuaauucuggcuaaucagagagauuccauua

SEQ ID NO: 321925 - RNA, 32 nt, Homo Sapiens
acaugguuuuuuuuuucuuuuuugaggggcau

SEQ ID NO: 321926 - RNA, 32 nt, Homo Sapiens
uggaggcagggcccaggcagcacugcccucca

SEQ ID NO: 321927 - RNA, 32 nt, Homo Sapiens
gggggccaugcuggagcuggggaccagcuuag

SEQ ID NO: 321928 - RNA, 32 nt, Homo Sapiens
auucugagcacgggcaaagaaaacacacaaaa

SEQ ID NO: 321929 - RNA, 32 nt, Homo Sapiens
uuucagaagcaauugcugucuuucucacugug

SEQ ID NO: 321930 - RNA, 32 nt, Homo Sapiens
ccuuacauuuuuccuggaacaagggagggaau

SEQ ID NO: 321931 - RNA, 32 nt, Homo Sapiens
gggcgagggucucgccggggcgguggcgggga

SEQ ID NO: 321932 - RNA, 32 nt, Homo Sapiens
gcuggcuucucgcaguggcccuuggcauaggu

SEQ ID NO: 321933 - RNA, 32 nt, Homo Sapiens
ucaggggcucgcuuggcgggugacggggccgc

SEQ ID NO: 321934 - RNA, 32 nt, Homo Sapiens
ucucuuggcaguuuuucuaaaguuucuggaug

SEQ ID NO: 321935 - RNA, 32 nt, Homo Sapiens
uuugccugaugacuaaccuggugcugggauuc

SEQ ID NO: 321936 - RNA, 32 nt, Homo Sapiens
cuacucuugacaauugguaguuguugcuguua

SEQ ID NO: 321937 - RNA, 32 nt, Homo Sapiens
ccuguuucuaguugguccaggauuagggaugu

SEQ ID NO: 321938 - RNA, 32 nt, Homo Sapiens
ccaugggccaccugcucugugcccgcuccuga

SEQ ID NO: 321939 - RNA, 32 nt, Homo Sapiens
uuauccagucccagaaagaaucucuaaccgug

SEQ ID NO: 321940 - RNA, 32 nt, Homo Sapiens
caacaaagccccaaacgcaggugcacugagua

SEQ ID NO: 321941 - RNA, 32 nt, Homo Sapiens
uuaccccaacuuuaugaguaaugcuuggaaua

SEQ ID NO: 321942 - RNA, 32 nt, Homo Sapiens
acuuggcuuaggcccugcugggacaucccacg

SEQ ID NO: 321943 - RNA, 32 nt, Homo Sapiens
cuuuugcuggcaggccgagauuagggcaggag

SEQ ID NO: 321944 - RNA, 32 nt, Homo Sapiens
aaaauacuugggguuuuccaauaaagauuguu

SEQ ID NO: 321945 - RNA, 32 nt, Homo Sapiens
auagcuaugauuacaggcacccgccaccacgc

SEQ ID NO: 321946 - RNA, 32 nt, Homo Sapiens
uuaaguaaauaaauaaguaaauaaccaaccaa

SEQ ID NO: 321947 - RNA, 32 nt, Homo Sapiens
agccgccgcgccccgggccggcggguuucucu

SEQ ID NO: 321948 - RNA, 32 nt, Homo Sapiens
ccaggccuaaccccuggcugcacuaaauuccu

SEQ ID NO: 321949 - RNA, 32 nt, Homo Sapiens
cagcccacuccagugugaucugcacccuggca

SEQ ID NO: 321950 - RNA, 32 nt, Homo Sapiens
gagggccacuuuccucuucuaguagcuguugu

SEQ ID NO: 321951 - RNA, 32 nt, Homo Sapiens
auuggugccucccagagguuucuugggcugcu

SEQ ID NO: 321952 - RNA, 32 nt, Homo Sapiens
augaaucucucacuaacagaaaccuccagaca

SEQ ID NO: 321953 - RNA, 32 nt, Homo Sapiens
aggaaccgccauacuguuuucuuaguugcugu

SEQ ID NO: 321954 - RNA, 32 nt, Homo Sapiens
uucuuuggacaguacguuuuuaucuauuuccc

SEQ ID NO: 321955 - RNA, 32 nt, Homo Sapiens
auuuuuaauauuugaauuauuacuuagcacau

SEQ ID NO: 321956 - RNA, 32 nt, Homo Sapiens
cucugguggucucuuccacaucugugagauac

SEQ ID NO: 321957 - RNA, 32 nt, Homo Sapiens
ccagccugcugagacuccuccugcaguuccuc

SEQ ID NO: 321958 - RNA, 32 nt, Homo Sapiens
cccaugcuugggagaauggggcugggacaugc

SEQ ID NO: 321959 - RNA, 32 nt, Homo Sapiens
aaaauaaauauuugaagauccuuaucuauauu

SEQ ID NO: 321960 - RNA, 32 nt, Homo Sapiens
gugucuuucuaaaaauauguucuguuuauuua

SEQ ID NO: 321961 - RNA, 32 nt, Homo Sapiens
ggucauuuacaauugggagauuucagaaacau

SEQ ID NO: 321962 - RNA, 32 nt, Homo Sapiens
ccgaugccuguggaagacaugccgacgucucc

SEQ ID NO: 321963 - RNA, 32 nt, Homo Sapiens
gcaauauuccugguauuauuuacaaugcagaa

SEQ ID NO: 321964 - RNA, 32 nt, Homo Sapiens
uuuagcugguaugcaagauuugcuaagcaaua

SEQ ID NO: 321965 - RNA, 32 nt, Homo Sapiens
gggcaggagacggguugcaccgcauguacccu

SEQ ID NO: 321966 - RNA, 32 nt, Homo Sapiens
ggagucgggcuucggucgcaccagagacagcg

SEQ ID NO: 321967 - RNA, 32 nt, Homo Sapiens
ccgaguagcuggaauugcagacacccaucacc

SEQ ID NO: 321968 - RNA, 32 nt, Homo Sapiens
cugccccuuacgacggcgcccgggccaggaau

SEQ ID NO: 321969 - RNA, 32 nt, Homo Sapiens
augcugcauugagacuuacggcaagaaggcau

SEQ ID NO: 321970 - RNA, 32 nt, Homo Sapiens
ggccguuggcccagcccgccggccccugagcu

SEQ ID NO: 321971 - RNA, 32 nt, Homo Sapiens
ugucugcucucuauuggugccuugcauuucaa

SEQ ID NO: 321972 - RNA, 32 nt, Homo Sapiens
uggcaccuccgcccacuuuucccacaacgccu

SEQ ID NO: 321973 - RNA, 32 nt, Homo Sapiens
cucuccgggcccagcucuuccucccggcugcg

SEQ ID NO: 321974 - RNA, 32 nt, Homo Sapiens
uccccucacuccacuuuuuaacucguuugcug

SEQ ID NO: 321975 - RNA, 32 nt, Homo Sapiens
caguccuugugguugaauaaaaaggauggucc

SEQ ID NO: 321976 - RNA, 32 nt, Homo Sapiens
uucuuuuugcguacaaaugaucuuacauaaau

SEQ ID NO: 321977 - RNA, 32 nt, Homo Sapiens
cacaggaggaggaggaggacaugggguuugau

SEQ ID NO: 321978 - RNA, 32 nt, Homo Sapiens
ucgucucuaacuggcagaguggucaaugaaaa

SEQ ID NO: 321979 - RNA, 32 nt, Homo Sapiens
uuuaaaagugugugguggcugcggcggcggcu

SEQ ID NO: 321980 - RNA, 32 nt, Homo Sapiens
auacagcaauaaaggcagaagaauuaagauuu

SEQ ID NO: 321981 - RNA, 32 nt, Homo Sapiens
ucccagcgccgcgccucgggcguaaagagcgc

SEQ ID NO: 321982 - RNA, 32 nt, Homo Sapiens
uuuuaaaucauucauucaauagauaccaccgu

SEQ ID NO: 321983 - RNA, 32 nt, Homo Sapiens
cacagaggagagucgccgcagaugaccuagcu

SEQ ID NO: 321984 - RNA, 32 nt, Homo Sapiens
cgacaaccgcaaucacauccacgacggugauc

SEQ ID NO: 321985 - RNA, 32 nt, Homo Sapiens
ccuugucggugauuggcaaggccugguccuuc

SEQ ID NO: 321986 - RNA, 32 nt, Homo Sapiens
gguggggcgagggucuuauuucuguagaaauc

SEQ ID NO: 321987 - RNA, 32 nt, Homo Sapiens
cuauuuacagugaaauaaaauuccuauuuucu

SEQ ID NO: 321988 - RNA, 25 nt, Homo Sapiens
auggcggccggccccauuagggugg

SEQ ID NO: 321989 - RNA, 32 nt, Homo Sapiens
acugcccuuguccccaggaagcucgccagugc

SEQ ID NO: 321990 - RNA, 32 nt, Homo Sapiens
uaggaccuaagaauagagagaugaacgcgaua

SEQ ID NO: 321991 - RNA, 32 nt, Homo Sapiens
aaucuugaguacguggaccauugcuugcaugu

SEQ ID NO: 321992 - RNA, 32 nt, Homo Sapiens
agcucuuuggagaacuagguguuguaauucag

SEQ ID NO: 321993 - RNA, 32 nt, Homo Sapiens
caggugaucugccugccuuggcaucccaaagu

SEQ ID NO: 321994 - RNA, 32 nt, Homo Sapiens
cuguaaauauauugucauacaauguuaaauaa

SEQ ID NO: 321995 - RNA, 32 nt, Homo Sapiens
gaagggucccccagccccgaggaggaggagga

SEQ ID NO: 321996 - RNA, 32 nt, Homo Sapiens
cccuugcugucaugacaacccucuggcuuccu

SEQ ID NO: 321997 - RNA, 32 nt, Homo Sapiens
accauuucaaggaacuguguguuuccaacauc

SEQ ID NO: 321998 - RNA, 32 nt, Homo Sapiens
uguuacaggucacggucauauuugagcaugag

SEQ ID NO: 321999 - RNA, 32 nt, Homo Sapiens
cacugcccuaucuccuucuuuccucacgcccu

SEQ ID NO: 322000 - RNA, 32 nt, Homo Sapiens
aagcauauuaaccaaagaguugugcuuaaucc

SEQ ID NO: 322001 - RNA, 32 nt, Homo Sapiens
gggcagaccugcccgcuacgccuuguuggggu

SEQ ID NO: 322002 - RNA, 32 nt, Homo Sapiens
uuuguaguuucuucuguaaauauguauuuuuc

SEQ ID NO: 322003 - RNA, 32 nt, Homo Sapiens
ccccuuugccuggccagaggaaaaccuggggg

SEQ ID NO: 322004 - RNA, 32 nt, Homo Sapiens
gcuaagaaggacaaauaagauagcagagugaa

SEQ ID NO: 322005 - RNA, 32 nt, Homo Sapiens
agugcccugugacuucucuccuccccuuugcu

SEQ ID NO: 322006 - RNA, 32 nt, Homo Sapiens
ggacgggagaaccugcccaugguggacugucg

SEQ ID NO: 322007 - RNA, 32 nt, Homo Sapiens
acagguaaugguuuuuggauagaugauugacu

SEQ ID NO: 322008 - RNA, 32 nt, Homo Sapiens
cuuugugguaagucuuuuuucuuagauugcgc

SEQ ID NO: 322009 - RNA, 32 nt, Homo Sapiens
aggggaugggugucccuggcucccaggccagg

SEQ ID NO: 322010 - RNA, 32 nt, Homo Sapiens
uccuggucaagcgguucugcucuggccccaga

SEQ ID NO: 322011 - RNA, 32 nt, Homo Sapiens
uccucgggcaugaacgcgagcccaaagugcca

SEQ ID NO: 322012 - RNA, 32 nt, Homo Sapiens
agaagaucuuauaaguuugggucaagauccug

SEQ ID NO: 322013 - RNA, 32 nt, Homo Sapiens
cuccuugcgccggcaccacgagcuguggccag

SEQ ID NO: 322014 - RNA, 32 nt, Homo Sapiens
uccacccgccccacaccacaaucgcugguuuu

SEQ ID NO: 322015 - RNA, 32 nt, Homo Sapiens
acuaggaagagauagcucuuuaagucacgagg

SEQ ID NO: 322016 - RNA, 32 nt, Homo Sapiens
gcagcucuacagcugccuggaccugcaggccc

SEQ ID NO: 322017 - RNA, 32 nt, Homo Sapiens
aggaauaauuuucuaguaugucuugaaacaug

SEQ ID NO: 322018 - RNA, 31 nt, Homo Sapiens
ugagccaagcgcagccugccaggccaagugg

SEQ ID NO: 322019 - RNA, 32 nt, Homo Sapiens
cugaggaggggggauuuuuaugcugaagaccu

SEQ ID NO: 322020 - RNA, 32 nt, Homo Sapiens
ucguggauuuguaugacugaauguguuucaaa

SEQ ID NO: 322021 - RNA, 32 nt, Homo Sapiens
cacuuugaacguguuuuggaagaauauucaca

SEQ ID NO: 322022 - RNA, 32 nt, Homo Sapiens
ggucuacguguacgguguggacagguucaaua

SEQ ID NO: 322023 - RNA, 32 nt, Homo Sapiens
caacauauauccucgaccagaugcagugcuau

SEQ ID NO: 322024 - RNA, 32 nt, Homo Sapiens
accuccugcauuaucugaaucaacgaauaaau

SEQ ID NO: 322025 - RNA, 32 nt, Homo Sapiens
ggcagacgaggccggcuucuccgcggacagcu

SEQ ID NO: 322026 - RNA, 32 nt, Homo Sapiens
caugucaugauguaauuuuucuuucuucuuuc

SEQ ID NO: 322027 - RNA, 32 nt, Homo Sapiens
cucuuccauguuucacauuucuaaauuuaaca

SEQ ID NO: 322028 - RNA, 32 nt, Homo Sapiens
uguguguaucugugggucuccauccuccaugg

SEQ ID NO: 322029 - RNA, 32 nt, Homo Sapiens
gcaaaauauuuuuacaucacaccuggaaucug

SEQ ID NO: 322030 - RNA, 32 nt, Homo Sapiens
agccuuauuuaaauccuauuaaagaacauacc

SEQ ID NO: 322031 - RNA, 32 nt, Homo Sapiens
aaaccaaaugauaucuaaguaguucucagcaa

SEQ ID NO: 322032 - RNA, 32 nt, Homo Sapiens
cccauagggaaacagauggcuuccucaaauua

SEQ ID NO: 322033 - RNA, 32 nt, Homo Sapiens
aaaaaggacccauagacuuguggcucgcgucg

SEQ ID NO: 322034 - RNA, 32 nt, Homo Sapiens
aaucacauuuuuuauucaguacucccccuacu

SEQ ID NO: 322035 - RNA, 32 nt, Homo Sapiens
gugaagcagcuauacguggcauacauguauuu

SEQ ID NO: 322036 - RNA, 32 nt, Homo Sapiens
gccuuugucacuuuuccaccacagaaaggcuc

SEQ ID NO: 322037 - RNA, 32 nt, Homo Sapiens
cgucccucugccuugcacaaaaagcacaagca

SEQ ID NO: 322038 - RNA, 32 nt, Homo Sapiens
ugcaggagaagcuaggcaaggagcgccuggaa

SEQ ID NO: 322039 - RNA, 32 nt, Homo Sapiens
agauuauucuaaaauauaaacuuauuugcaua

SEQ ID NO: 322040 - RNA, 32 nt, Homo Sapiens
ugugaagguccugcgaucgccauaccguucac

SEQ ID NO: 322041 - RNA, 32 nt, Homo Sapiens
uuuuugcugaaauaaugaaaaucauaaucaau

SEQ ID NO: 322042 - RNA, 32 nt, Homo Sapiens
cuggagugcaggggcgcaaucucggcucauag

SEQ ID NO: 322043 - RNA, 32 nt, Homo Sapiens
aauauauguuuuccuuguuuuuuauugcuauu

SEQ ID NO: 322044 - RNA, 32 nt, Homo Sapiens
gagacagggucucgcugcgguggcacgaucgc

SEQ ID NO: 322045 - RNA, 32 nt, Homo Sapiens
gagcgcggguggccgcgguguccgugggccac

SEQ ID NO: 322046 - RNA, 32 nt, Homo Sapiens
cuuaccgccuggaggcaggcccgggaaggcug

SEQ ID NO: 322047 - RNA, 32 nt, Homo Sapiens
aacccaacuccucuccuccccccaagcucagu

SEQ ID NO: 322048 - RNA, 32 nt, Homo Sapiens
augggguaucacggugauggucccauuaaacu

SEQ ID NO: 322049 - RNA, 32 nt, Homo Sapiens
cucucucucucuaaguuuuuuaaaaauaaacu

SEQ ID NO: 322050 - RNA, 32 nt, Homo Sapiens
ugucaucguggucuuuggucuuggauaacuaa

SEQ ID NO: 322051 - RNA, 32 nt, Homo Sapiens
uugguuucugaauaaauugaacuaaauccaaa

SEQ ID NO: 322052 - RNA, 32 nt, Homo Sapiens
acagcagucgcagucuccguggagcgggcgga

SEQ ID NO: 322053 - RNA, 32 nt, Homo Sapiens
aaccagcugcaccugcuguucucuuguuaugc

SEQ ID NO: 322054 - RNA, 32 nt, Homo Sapiens
ggacucaagugauccgcccaccucggcccccc

SEQ ID NO: 322055 - RNA, 32 nt, Homo Sapiens
cuuaaucccuucccccgccgccgccccgcgcg

SEQ ID NO: 322056 - RNA, 32 nt, Homo Sapiens
aaaagaggaaacaaaagugucucccuguggaa

SEQ ID NO: 322057 - RNA, 32 nt, Homo Sapiens
uagacuugucugaccuagaagccgagaaacug

SEQ ID NO: 322058 - RNA, 32 nt, Homo Sapiens
cccugaugccagcagggggcgcccgcccucuu

SEQ ID NO: 322059 - RNA, 32 nt, Homo Sapiens
accuucccugccccagccccagcagccauggg

SEQ ID NO: 322060 - RNA, 32 nt, Homo Sapiens
cucuauuuaguaugccauuaugucacugcaga

SEQ ID NO: 322061 - RNA, 32 nt, Homo Sapiens
gaagauggcuucuaagaaaacaagaugcacag

SEQ ID NO: 322062 - RNA, 32 nt, Homo Sapiens
aacccagagugauaaaagagagacuucucaca

SEQ ID NO: 322063 - RNA, 27 nt, Homo Sapiens
ucagaguccuucuugauuucugagcug

SEQ ID NO: 322064 - RNA, 32 nt, Homo Sapiens
aaaacaagagaucauaauaaaaaccuaaaaga

SEQ ID NO: 322065 - RNA, 32 nt, Homo Sapiens
caagccagcugccccaggguucuuccccuggu

SEQ ID NO: 322066 - RNA, 32 nt, Homo Sapiens
uccgauuccccucuaucagucacugacaguua

SEQ ID NO: 322067 - RNA, 32 nt, Homo Sapiens
cccugccugccagcaccuaggacuucgaguug

SEQ ID NO: 322068 - RNA, 32 nt, Homo Sapiens
cugcgcgcaccucguccggcgccguccggcgc

SEQ ID NO: 322069 - RNA, 32 nt, Homo Sapiens
cuccucaccacccaccuucccaagacccagga

SEQ ID NO: 322070 - RNA, 32 nt, Homo Sapiens
aggcugcugagccccaggccaugguccccucu

SEQ ID NO: 322071 - RNA, 32 nt, Homo Sapiens
gugagauauauucaguauuguagauacuacac

SEQ ID NO: 322072 - RNA, 32 nt, Homo Sapiens
accggugggccuuggguccaaaacuguggcuc

SEQ ID NO: 322073 - RNA, 32 nt, Homo Sapiens
aacggugacuaaaagccccugaaagugcucac

SEQ ID NO: 322074 - RNA, 32 nt, Homo Sapiens
uccagguauacuuauaaauaccugcagggauu

SEQ ID NO: 322075 - RNA, 32 nt, Homo Sapiens
ccuagacagccacagacagaaaacacgcuuag

SEQ ID NO: 322076 - RNA, 32 nt, Homo Sapiens
ugagacauuaaugaggagaauaaaauguuugc

SEQ ID NO: 322077 - RNA, 32 nt, Homo Sapiens
ugggcccccuugcuccuccauccucauucucu

SEQ ID NO: 322078 - RNA, 32 nt, Homo Sapiens
ucuucauuaaaauaaaccuaauacuucacuug

SEQ ID NO: 322079 - RNA, 32 nt, Homo Sapiens
gugaaaaauggguuaaauuugcuagcuuaauu

SEQ ID NO: 322080 - RNA, 32 nt, Homo Sapiens
gagaagaacuauuuauacaaacauggggacug

SEQ ID NO: 322081 - RNA, 32 nt, Homo Sapiens
aauuaggagggauggggcaggggacuguuagg

SEQ ID NO: 322082 - RNA, 32 nt, Homo Sapiens
aguuucugucaacaucuucucauuuuucccua

SEQ ID NO: 322083 - RNA, 29 nt, Homo Sapiens
ccauguaauuguuuauauuuucaguuuua

SEQ ID NO: 322084 - RNA, 32 nt, Homo Sapiens
ccaauuccggcccacaccuauggcucaggccg

SEQ ID NO: 322085 - RNA, 32 nt, Homo Sapiens
ucuggauauauucuggauacaugguuugcaaa

SEQ ID NO: 322086 - RNA, 32 nt, Homo Sapiens
ggcccaaaaggcaaaaguuugcagcacccucu

SEQ ID NO: 322087 - RNA, 32 nt, Homo Sapiens
aucuaucuuuugcccuacagugucccggcaca

SEQ ID NO: 322088 - RNA, 32 nt, Homo Sapiens
acuuuuacuuuuuugcagaaaaauuauuuuug

SEQ ID NO: 322089 - RNA, 32 nt, Homo Sapiens
guauauaggcaacaacagaacagcaauauauu

SEQ ID NO: 322090 - RNA, 32 nt, Homo Sapiens
uauagucaaucuauuucuuaauaauacugcaa

SEQ ID NO: 322091 - RNA, 32 nt, Homo Sapiens
caguuucaaaauuuauauuaaauuauauaaua

SEQ ID NO: 322092 - RNA, 32 nt, Homo Sapiens
guuaccaguugguauuucuacaaguucagaau

SEQ ID NO: 322093 - RNA, 32 nt, Homo Sapiens
cggagccccagcugcgguuguccgcucugggg

SEQ ID NO: 322094 - RNA, 32 nt, Homo Sapiens
agcggcacacaacuggcaaggcuuaucaaaag

SEQ ID NO: 322095 - RNA, 32 nt, Homo Sapiens
cucccacugggccagaggggagcccacugccc

SEQ ID NO: 322096 - RNA, 32 nt, Homo Sapiens
auagcuuagaaccuggggcugggaguuuugug

SEQ ID NO: 322097 - RNA, 32 nt, Homo Sapiens
uaguucuaauuugcauuucucuaaugacuaac

SEQ ID NO: 322098 - RNA, 31 nt, Homo Sapiens
acgaaauggaccuaacagguaucuacagagc

SEQ ID NO: 322099 - RNA, 32 nt, Homo Sapiens
agugugugguggcaugcagguaacauaugggg

SEQ ID NO: 322100 - RNA, 32 nt, Homo Sapiens
caggcgaguucgcagcugcgcgccggguccug

SEQ ID NO: 322101 - RNA, 32 nt, Homo Sapiens
aauucuuacuucauuaugaauguauuuaaaaa

SEQ ID NO: 322102 - RNA, 32 nt, Homo Sapiens
gaggaggcuccgugagaugggguccagcccau

SEQ ID NO: 322103 - RNA, 32 nt, Homo Sapiens
ugucuguagagggacagguguccguccugggc

SEQ ID NO: 322104 - RNA, 32 nt, Homo Sapiens
auacugacauuucuuuugauaaaaccuccagc

SEQ ID NO: 322105 - RNA, 32 nt, Homo Sapiens
cucagcgagcgcggggggcgagccccgagucc

SEQ ID NO: 322106 - RNA, 31 nt, Homo Sapiens
augucuguacaaaauaaagugcaagcagugu

SEQ ID NO: 322107 - RNA, 32 nt, Homo Sapiens
uccuuucuguuaaguagcuacaugaggcaggg

SEQ ID NO: 322108 - RNA, 32 nt, Homo Sapiens
uacaccaggugcugugaugaaacuaugcugag

SEQ ID NO: 322109 - RNA, 32 nt, Homo Sapiens
aagccaaaggagacacggaauuuuggacuuua

SEQ ID NO: 322110 - RNA, 32 nt, Homo Sapiens
guuugguuuugcuccgcccggccgagcugcag

SEQ ID NO: 322111 - RNA, 32 nt, Homo Sapiens
gcugaugccuucugcguggaugugcgcgggcg

SEQ ID NO: 322112 - RNA, 31 nt, Homo Sapiens
gagggggugggccccauucugggcccuguga

SEQ ID NO: 322113 - RNA, 32 nt, Homo Sapiens
uucucuggacauuuggggaugugaguguuaga

SEQ ID NO: 322114 - RNA, 32 nt, Homo Sapiens
ugcagccgguggcggcagcggcggcgcaggga

SEQ ID NO: 322115 - RNA, 32 nt, Homo Sapiens
gacugcuggcccggccucccuuccguccaggc

SEQ ID NO: 322116 - RNA, 32 nt, Homo Sapiens
ucacucugaagaagugcaggugugaacgucau

SEQ ID NO: 322117 - RNA, 32 nt, Homo Sapiens
gcccauacaccugucuccuucuuccugccugc

SEQ ID NO: 322118 - RNA, 32 nt, Homo Sapiens
cuaguagcugaauuuuagacuugaugcuaugu

SEQ ID NO: 322119 - RNA, 32 nt, Homo Sapiens
uuuuaccagguauugcgcuuaagggacaugau

SEQ ID NO: 322120 - RNA, 32 nt, Homo Sapiens
uguagauugagccauacucuggcugccucuuu

SEQ ID NO: 322121 - RNA, 32 nt, Homo Sapiens
cccaggcaucuuggcccccagccccucgucgc

SEQ ID NO: 322122 - RNA, 32 nt, Homo Sapiens
caccggggcuuuucgugagcucgucucugauc

SEQ ID NO: 322123 - RNA, 32 nt, Homo Sapiens
gccaucuuguucucucuccugaauuuuuuaug

SEQ ID NO: 322124 - RNA, 32 nt, Homo Sapiens
gagugucaggggagccgcguucccucccaggg

SEQ ID NO: 322125 - RNA, 32 nt, Homo Sapiens
gccacgugugcugggccuggcucccuggcugg

SEQ ID NO: 322126 - RNA, 30 nt, Homo Sapiens
acguccugcgcgcagcugcaggcgacuccg

SEQ ID NO: 322127 - RNA, 32 nt, Homo Sapiens
ucaccuggccccagcuccugccccccggaauu

SEQ ID NO: 322128 - RNA, 32 nt, Homo Sapiens
cuauaguguaaauugaaauaagaauagaucau

SEQ ID NO: 322129 - RNA, 32 nt, Homo Sapiens
gagaaggccgccgggcccgggcaugguggucu

SEQ ID NO: 322130 - RNA, 32 nt, Homo Sapiens
uacagucaugagccaccacucccggccuuauu

SEQ ID NO: 322131 - RNA, 32 nt, Homo Sapiens
gaauuaaaauuuguguagcuugcaagggaggg

SEQ ID NO: 322132 - RNA, 32 nt, Homo Sapiens
ccaauucccaaguuugugaaauggcaacaaua

SEQ ID NO: 322133 - RNA, 32 nt, Homo Sapiens
ucucaugucucaauucuuuguauaugcauucu

SEQ ID NO: 322134 - RNA, 32 nt, Homo Sapiens
ucuaacucugauguaaaugaaguaacuugucu

SEQ ID NO: 322135 - RNA, 32 nt, Homo Sapiens
aggaggggccccagcagcccccgaaggcccua

SEQ ID NO: 322136 - RNA, 32 nt, Homo Sapiens
uguuucuaacaguugcuguuauggaaaucucu

SEQ ID NO: 322137 - RNA, 32 nt, Homo Sapiens
gcugguacugucacuuauauucuuuuggguag

SEQ ID NO: 322138 - RNA, 32 nt, Homo Sapiens
cgcgcgcuggccugggcucuagccgaggagag

SEQ ID NO: 322139 - RNA, 32 nt, Homo Sapiens
ucccagcacuauuuguuguauaggguguacuu

SEQ ID NO: 322140 - RNA, 32 nt, Homo Sapiens
uacaaaauaugucaugcauucuuucuuaugaa

SEQ ID NO: 322141 - RNA, 28 nt, Homo Sapiens
cuccagccugggcuacagauccugucuc

SEQ ID NO: 322142 - RNA, 31 nt, Homo Sapiens
uauauacucuacugaauucuaacugaucucc

SEQ ID NO: 322143 - RNA, 32 nt, Homo Sapiens
aaaggagggcauguggagucagggcuauguug

SEQ ID NO: 322144 - RNA, 32 nt, Homo Sapiens
acaugcgacccucuccccuccucccugacuuu

SEQ ID NO: 322145 - RNA, 32 nt, Homo Sapiens
uaagauguaucaauaaugcuuugccauaugag

SEQ ID NO: 322146 - RNA, 32 nt, Homo Sapiens
ucugcagcgcccugcgccccacccagcaacag

SEQ ID NO: 322147 - RNA, 32 nt, Homo Sapiens
aauucacugauugcacaugacaauguugggac

SEQ ID NO: 322148 - RNA, 32 nt, Homo Sapiens
uucuuuuccaacaaaauagcaaucccuuuuau

SEQ ID NO: 322149 - RNA, 32 nt, Homo Sapiens
auaguuggugccugucuuagucuguuuguguu

SEQ ID NO: 322150 - RNA, 32 nt, Homo Sapiens
aaauaaguaaacaaaaugaagauugccugcuc

SEQ ID NO: 322151 - RNA, 32 nt, Homo Sapiens
gcgcccgcaccucgcgguccuugaggcccagc

SEQ ID NO: 322152 - RNA, 32 nt, Homo Sapiens
uuacaggugugagccaccaugcccagccugaa

SEQ ID NO: 322153 - RNA, 32 nt, Homo Sapiens
ccaggcuggacucgggcugugcaggggcgagg

SEQ ID NO: 322154 - RNA, 32 nt, Homo Sapiens
agagacgugauccucguaaaucuuuaugggag

SEQ ID NO: 322155 - RNA, 32 nt, Homo Sapiens
uauagaauuaucucucuaauuaucauaauugg

SEQ ID NO: 322156 - RNA, 31 nt, Homo Sapiens
cuguccuuacccucagauggagccaggaagc

SEQ ID NO: 322157 - RNA, 32 nt, Homo Sapiens
ccauguuuucuuuucuagcugaauaaaccaca

SEQ ID NO: 322158 - RNA, 32 nt, Homo Sapiens
caaacgaggacacgacggccaagguggcaguu

SEQ ID NO: 322159 - RNA, 32 nt, Homo Sapiens
gcgcgcccggcggcgcuccaggugcugacagc

SEQ ID NO: 322160 - RNA, 32 nt, Homo Sapiens
cgcgccuccgcaccgcggcgacaccuccgcgg

SEQ ID NO: 322161 - RNA, 32 nt, Homo Sapiens
uggaucuucacuuguagcacaaauugucacaa

SEQ ID NO: 322162 - RNA, 32 nt, Homo Sapiens
accacauguacaauauuccugcuacuucaaac

SEQ ID NO: 322163 - RNA, 30 nt, Homo Sapiens
auccacggcgcccgcgcgggcuccggcuuc

SEQ ID NO: 322164 - RNA, 32 nt, Homo Sapiens
guggggccacuacucaccaccgaugggagaaa

SEQ ID NO: 322165 - RNA, 32 nt, Homo Sapiens
cucuucaguccugcccuccccuccucaguccu

SEQ ID NO: 322166 - RNA, 32 nt, Homo Sapiens
auucaggacacacacacacacacacacacaca

SEQ ID NO: 322167 - RNA, 32 nt, Homo Sapiens
gggugccuuccccuccucccaacccagacaua

SEQ ID NO: 322168 - RNA, 32 nt, Homo Sapiens
acggcaacacugguccuugggccuaugaugac

SEQ ID NO: 322169 - RNA, 32 nt, Homo Sapiens
uuuuuuucuuuuucuuuuucuuuuucuguuuc

SEQ ID NO: 322170 - RNA, 32 nt, Homo Sapiens
gccaagccuuucaaaucagaaaauggacagcg

SEQ ID NO: 322171 - RNA, 32 nt, Homo Sapiens
ccgcugccauggcggcagcuccgccgcuuucc

SEQ ID NO: 322172 - RNA, 32 nt, Homo Sapiens
cgcggcagcgccucugucucgcuuuuucuuau

SEQ ID NO: 322173 - RNA, 32 nt, Homo Sapiens
ggucaucccucccgaaguuuugcgguacgaug

SEQ ID NO: 322174 - RNA, 32 nt, Homo Sapiens
acccuccgcgaaucucggccuccggagaccgu

SEQ ID NO: 322175 - RNA, 32 nt, Homo Sapiens
guguccuacuccucccuauuaagggccggcac

SEQ ID NO: 322176 - RNA, 32 nt, Homo Sapiens
agaauuuguaaggaaggaagggggguggcaug

SEQ ID NO: 322177 - RNA, 32 nt, Homo Sapiens
ugaauggcagagaugccuggggagugcccuga

SEQ ID NO: 322178 - RNA, 32 nt, Homo Sapiens
ggacugcaggacgaggugaccccccgccccgc

SEQ ID NO: 322179 - RNA, 32 nt, Homo Sapiens
cacaaacugacuucagauuauaaggcuauaau

SEQ ID NO: 322180 - RNA, 32 nt, Homo Sapiens
aucaagacuacgaaccugaagccuagaaauau

SEQ ID NO: 322181 - RNA, 32 nt, Homo Sapiens
uuggggugucaccaagacuucuacacaaccca

SEQ ID NO: 322182 - RNA, 32 nt, Homo Sapiens
ugcuugccaaccccaguaaugcgcuguccugg

SEQ ID NO: 322183 - RNA, 32 nt, Homo Sapiens
gcggacgccccgaggugcccgggcaggcagug

SEQ ID NO: 322184 - RNA, 32 nt, Homo Sapiens
aaaaauaggucuuuuuuuuauauuuuggaaaa

SEQ ID NO: 322185 - RNA, 32 nt, Homo Sapiens
gcgauaaaaaugucuauucuuaagucaaucua

SEQ ID NO: 322186 - RNA, 32 nt, Homo Sapiens
cgccaaguuuguccgcgccgccugggcugccg

SEQ ID NO: 322187 - RNA, 32 nt, Homo Sapiens
ugagagcaguaguguuguuugcucuuauuuuc

SEQ ID NO: 322188 - RNA, 32 nt, Homo Sapiens
acgugcacacacauacacacacauccauuaau

SEQ ID NO: 322189 - RNA, 32 nt, Homo Sapiens
uaacaucacccagauuucuucaguuauaaaua

SEQ ID NO: 322190 - RNA, 32 nt, Homo Sapiens
cuuggccucccaaagcacuuggauuacagaug

SEQ ID NO: 322191 - RNA, 32 nt, Homo Sapiens
ucaagugugcuaaaguuugucaauuuaagcug

SEQ ID NO: 322192 - RNA, 32 nt, Homo Sapiens
agguaaaaugcuuuuucuuauuaauauaauua

SEQ ID NO: 322193 - RNA, 32 nt, Homo Sapiens
cagagcugggcgcugcagcugcacugccgauc

SEQ ID NO: 322194 - RNA, 32 nt, Homo Sapiens
cugagacaaaggcgaggcuagcaauagagaga

SEQ ID NO: 322195 - RNA, 32 nt, Homo Sapiens
cggcucacucugcggcgccgugcucccgcugc

SEQ ID NO: 322196 - RNA, 32 nt, Homo Sapiens
aaguuccucuuucagcugcacccaggguucuu

SEQ ID NO: 322197 - RNA, 32 nt, Homo Sapiens
gaggcacgucaucgggcagccuucccugugug

SEQ ID NO: 322198 - RNA, 32 nt, Homo Sapiens
gggacccgccgcggcugcugccaccgccgcca

SEQ ID NO: 322199 - RNA, 32 nt, Homo Sapiens
gacuccguugugugcagauucugcuguauuag

SEQ ID NO: 322200 - RNA, 32 nt, Homo Sapiens
guguaucaacugaaacaaaaucuaugaaauau

SEQ ID NO: 322201 - RNA, 32 nt, Homo Sapiens
uuaauggcuauauaggaagaaauaucacucac

SEQ ID NO: 322202 - RNA, 32 nt, Homo Sapiens
gcccugcgcgcccugcgcucgccauggcgguu

SEQ ID NO: 322203 - RNA, 32 nt, Homo Sapiens
accuuaagccaucuugguggguucuggguggu

SEQ ID NO: 322204 - RNA, 32 nt, Homo Sapiens
uauucuggcucuacucuggccuuuuuucuggu

SEQ ID NO: 322205 - RNA, 32 nt, Homo Sapiens
cugugaggcccggaccugccccggggcgaagg

SEQ ID NO: 322206 - RNA, 32 nt, Homo Sapiens
gccuaacccuggaagccuggaaaguugcccac

SEQ ID NO: 322207 - RNA, 32 nt, Homo Sapiens
gagagcaacuguaaugagaucguugauaacuu

SEQ ID NO: 322208 - RNA, 32 nt, Homo Sapiens
cuaccagacggaggaagcauaaaccagguccu

SEQ ID NO: 322209 - RNA, 32 nt, Homo Sapiens
cagaacugcucuagugcccggguguggucugg

SEQ ID NO: 322210 - RNA, 32 nt, Homo Sapiens
cugcuuccuccagccacaccuuggggacggag

SEQ ID NO: 322211 - RNA, 32 nt, Homo Sapiens
uggcggcagcuaggggaggauggcggagucuu

SEQ ID NO: 322212 - RNA, 32 nt, Homo Sapiens
auuggaaaugagauucuuaagagagguugcaa

SEQ ID NO: 322213 - RNA, 32 nt, Homo Sapiens
gggcccagcccgaggaggcacucaggguuagg

SEQ ID NO: 322214 - RNA, 32 nt, Homo Sapiens
ccgggcugcgcggcgucugcaggcgccaccgc

SEQ ID NO: 322215 - RNA, 32 nt, Homo Sapiens
gccagauccaacagaaaugugauugauaacag

SEQ ID NO: 322216 - RNA, 32 nt, Homo Sapiens
uugaggcuuucagugauaucuuucucauuacc

SEQ ID NO: 322217 - RNA, 32 nt, Homo Sapiens
ugcuucguggccccggcuggcuccacaccagc

SEQ ID NO: 322218 - RNA, 30 nt, Homo Sapiens
cccggguggggcgagggccagucauggcgg

SEQ ID NO: 322219 - RNA, 32 nt, Homo Sapiens
ugccaugcuaugagcaggccuauaaagagacu

SEQ ID NO: 322220 - RNA, 32 nt, Homo Sapiens
ucgccaugagagaucaaaugaaaccugagacc

SEQ ID NO: 322221 - RNA, 32 nt, Homo Sapiens
acacuuuggugucccacuggccucgguccagu

SEQ ID NO: 322222 - RNA, 32 nt, Homo Sapiens
aaagggucguggccagcccugcagcuucagca

SEQ ID NO: 322223 - RNA, 32 nt, Homo Sapiens
uacauuaucccaugcauaaaauguccuauuuu

SEQ ID NO: 322224 - RNA, 32 nt, Homo Sapiens
gggagggccucgcgcccauucguguuguaucc

SEQ ID NO: 322225 - RNA, 31 nt, Homo Sapiens
gaggagcaugucugcaacucgagccaagaaa

SEQ ID NO: 322226 - RNA, 32 nt, Homo Sapiens
aaauguccccccacccgccaucugcagccagg

SEQ ID NO: 322227 - RNA, 32 nt, Homo Sapiens
cuuuggcauuggcacacuggggucauaucuuu

SEQ ID NO: 322228 - RNA, 32 nt, Homo Sapiens
aaagagaaaaagauggaauaucuuaaagagaa

SEQ ID NO: 322229 - RNA, 32 nt, Homo Sapiens
uaauacuaagcaucucacuagaucuagcuugu

SEQ ID NO: 322230 - RNA, 32 nt, Homo Sapiens
gacgcagcgcgccgggagacugagagaggaaa

SEQ ID NO: 322231 - RNA, 32 nt, Homo Sapiens
cuccccgccugcaugccgccucaugggggucc

SEQ ID NO: 322232 - RNA, 32 nt, Homo Sapiens
ggaagguggcagugaccagcgcccuggaccau

SEQ ID NO: 322233 - RNA, 32 nt, Homo Sapiens
caacaucaacauuuugcuaaucuuauuuuaau

SEQ ID NO: 322234 - RNA, 32 nt, Homo Sapiens
uuacaaguuuuguuuugagaauuaaaaucaua

SEQ ID NO: 322235 - RNA, 32 nt, Homo Sapiens
cccuagggaaaggcugcucuugcucucccucc

SEQ ID NO: 322236 - RNA, 32 nt, Homo Sapiens
aggccccagugcagagaugccauccaccccca

SEQ ID NO: 322237 - RNA, 32 nt, Homo Sapiens
cacccgcagggccugagguaggcuucauagag

SEQ ID NO: 322238 - RNA, 32 nt, Homo Sapiens
aggagcccacugaugaggggcgcucucccaua

SEQ ID NO: 322239 - RNA, 32 nt, Homo Sapiens
guagagccuugacaauguuguccuccuguuca

SEQ ID NO: 322240 - RNA, 32 nt, Homo Sapiens
aaccuggcucugccccacagagcagcgaugca

SEQ ID NO: 322241 - RNA, 32 nt, Homo Sapiens
ugugauuuccuggguucucacugucuuugcac

SEQ ID NO: 322242 - RNA, 32 nt, Homo Sapiens
ccaggagcaggacggcggccgcggcauccccc

SEQ ID NO: 322243 - RNA, 32 nt, Homo Sapiens
ccagcuucccucugcacccccagccuauccca

SEQ ID NO: 322244 - RNA, 32 nt, Homo Sapiens
gauuucugacuugaggcccaucucuccagcca

SEQ ID NO: 322245 - RNA, 32 nt, Homo Sapiens
cggggagcagccgggaggagggggccgcaguc

SEQ ID NO: 322246 - RNA, 32 nt, Homo Sapiens
guaagggagggugugacacagguguaagcugc

SEQ ID NO: 322247 - RNA, 32 nt, Homo Sapiens
ccaaguaggaccuccuucuccucccccucccc

SEQ ID NO: 322248 - RNA, 32 nt, Homo Sapiens
agaauuccugauuucuccauggagcauguaca

SEQ ID NO: 322249 - RNA, 32 nt, Homo Sapiens
cugaaggcggccggugagcggggcggguucug

SEQ ID NO: 322250 - RNA, 32 nt, Homo Sapiens
aauucaugaaaaauuuuacaaauauaagaugc

SEQ ID NO: 322251 - RNA, 32 nt, Homo Sapiens
gcccggcuuccgaggggagaggacgggcuggc

SEQ ID NO: 322252 - RNA, 30 nt, Homo Sapiens
aagagccauguccaaacccaucuucaugga

SEQ ID NO: 322253 - RNA, 32 nt, Homo Sapiens
ccuuuuuggucaguaaaacuuaaugaaaaaag

SEQ ID NO: 322254 - RNA, 32 nt, Homo Sapiens
auuugccuuuuugugccuggaucuugcaacuc

SEQ ID NO: 322255 - RNA, 31 nt, Homo Sapiens
ccgagccccuccggcaccccaagggcggucc

SEQ ID NO: 322256 - RNA, 28 nt, Homo Sapiens
gagcagccgcggccgccgcugcuguggc

SEQ ID NO: 322257 - RNA, 32 nt, Homo Sapiens
cugcaggugggcugggcccacccagggagcug

SEQ ID NO: 322258 - RNA, 32 nt, Homo Sapiens
cccugaaugaauugcuaaauuucaaaggaaau

SEQ ID NO: 322259 - RNA, 32 nt, Homo Sapiens
ccaaauucucccuggaccccauucugagcucc

SEQ ID NO: 322260 - RNA, 32 nt, Homo Sapiens
uucucugaaacacuugagauguuugagcuacc

SEQ ID NO: 322261 - RNA, 32 nt, Homo Sapiens
ccagccuuauccuguauccuagcuguucuuaa

SEQ ID NO: 322262 - RNA, 32 nt, Homo Sapiens
ggcuccugucuccuuguuaaucaaauugcaau

SEQ ID NO: 322263 - RNA, 32 nt, Homo Sapiens
gcuuguucauuaaauaacaaauuaaaaucagg

SEQ ID NO: 322264 - RNA, 32 nt, Homo Sapiens
cuuguucuauuuuucaaucaucaaaaaguaau

SEQ ID NO: 322265 - RNA, 32 nt, Homo Sapiens
cccuuggcgggggcaugcgugcgacauggccu

SEQ ID NO: 322266 - RNA, 32 nt, Homo Sapiens
uggagaaaacagugauguggaucuuaucaaau

SEQ ID NO: 322267 - RNA, 32 nt, Homo Sapiens
uaaaagccuuugauuuuuauaaugggugggac

SEQ ID NO: 322268 - RNA, 32 nt, Homo Sapiens
auggauccauguucauucccacuucacaccuu

SEQ ID NO: 322269 - RNA, 32 nt, Homo Sapiens
uccagcagcaucggaaguacuaucaagacaag

SEQ ID NO: 322270 - RNA, 32 nt, Homo Sapiens
ccaguugaugggggaagaaaggaagucagagg

SEQ ID NO: 322271 - RNA, 32 nt, Homo Sapiens
ucccuucacagcauuaaccuuccagucugggu

SEQ ID NO: 322272 - RNA, 32 nt, Homo Sapiens
aaauuauccaaauaaauaauuugacauuucaa

SEQ ID NO: 322273 - RNA, 30 nt, Homo Sapiens
cuuucuuuucaagugggggaaagugggaga

SEQ ID NO: 322274 - RNA, 32 nt, Homo Sapiens
aucacuugaaagauucacuguacuaacuacuu

SEQ ID NO: 322275 - RNA, 32 nt, Homo Sapiens
aacauuucuuaaaauguuucauuuucauuaaa

SEQ ID NO: 322276 - RNA, 32 nt, Homo Sapiens
uggcgaacuuggggcagccccuggaagucuug

SEQ ID NO: 322277 - RNA, 32 nt, Homo Sapiens
cacagcacagaaaaugacucaccaacaaaugu

SEQ ID NO: 322278 - RNA, 32 nt, Homo Sapiens
guauaauuugcacuuuugagacugguagcuaa

SEQ ID NO: 322279 - RNA, 32 nt, Homo Sapiens
gggcuucccucauguuuaacauucugguuucc

SEQ ID NO: 322280 - RNA, 32 nt, Homo Sapiens
cuggaaccggucacaggaacgcacagaucaug

SEQ ID NO: 322281 - RNA, 32 nt, Homo Sapiens
gcuucauuguuaugaaacugucauacuauaau

SEQ ID NO: 322282 - RNA, 32 nt, Homo Sapiens
ugucucuugcuucaacaguguuuggacggaac

SEQ ID NO: 322283 - RNA, 32 nt, Homo Sapiens
uagaaggugggcagggcgggggaggcagggac

SEQ ID NO: 322284 - RNA, 32 nt, Homo Sapiens
ugcaguggugagcugggauguucuggaggaug

SEQ ID NO: 322285 - RNA, 32 nt, Homo Sapiens
gugcagcgguggcggcggcugguugcgggccg

SEQ ID NO: 322286 - RNA, 32 nt, Homo Sapiens
gaaucaucaaaauuauuuguuguugaagcagu

SEQ ID NO: 322287 - RNA, 32 nt, Homo Sapiens
gugugagaccuugucucaaaaaaauaauaaua

SEQ ID NO: 322288 - RNA, 32 nt, Homo Sapiens
aagcuucggccgcgccacccgggcaagggucc

SEQ ID NO: 322289 - RNA, 32 nt, Homo Sapiens
gccagaaaauacugauguucacuuaaagauau

SEQ ID NO: 322290 - RNA, 32 nt, Homo Sapiens
gguucggcggccuggugcagcuccggaggggc

SEQ ID NO: 322291 - RNA, 32 nt, Homo Sapiens
gagcaggacagccagcagcaggaugggcugag

SEQ ID NO: 322292 - RNA, 32 nt, Homo Sapiens
cuuuugccuuuuguuuccugugcaaacaagug

SEQ ID NO: 322293 - RNA, 32 nt, Homo Sapiens
uccugauaaguuucaugguuaugaagaaccau

SEQ ID NO: 322294 - RNA, 32 nt, Homo Sapiens
aaaugggaaaauuuggaaagugauaucauagc

SEQ ID NO: 322295 - RNA, 32 nt, Homo Sapiens
caggagauguaaaauuccuuucugaagugucu

SEQ ID NO: 322296 - RNA, 32 nt, Homo Sapiens
aaacagcccugccagccccggcggucacuucu

SEQ ID NO: 322297 - RNA, 32 nt, Homo Sapiens
ccuucuagaauuugccucuuugggacugaagu

SEQ ID NO: 322298 - RNA, 32 nt, Homo Sapiens
gugagcauuuuucucucuaaugcaacagaacu

SEQ ID NO: 322299 - RNA, 32 nt, Homo Sapiens
aauauuuugcuuuauguauauuacaguucuuu

SEQ ID NO: 322300 - RNA, 32 nt, Homo Sapiens
auaguuauacauuuuggugacuucugacucuc

SEQ ID NO: 322301 - RNA, 32 nt, Homo Sapiens
uacucaagaacaaaccaagaaaugagcacauc

SEQ ID NO: 322302 - RNA, 32 nt, Homo Sapiens
aagcauuuuuauucuguuuaucuuuccuuuua

SEQ ID NO: 322303 - RNA, 32 nt, Homo Sapiens
aagagacagaagcugucgggguccuggaagac

SEQ ID NO: 322304 - RNA, 32 nt, Homo Sapiens
cauugcuuccucuccuuccuuccugcaugugu

SEQ ID NO: 322305 - RNA, 32 nt, Homo Sapiens
cacugucaauauuuuuauuuuuaacucuggau

SEQ ID NO: 322306 - RNA, 32 nt, Homo Sapiens
acugcacaccuucuaguaacacugcgacccug

SEQ ID NO: 322307 - RNA, 32 nt, Homo Sapiens
aaguauagagggcuacuguauuugcagagcua

SEQ ID NO: 322308 - RNA, 32 nt, Homo Sapiens
guucucccacugaccacgcuuucuuuagugac

SEQ ID NO: 322309 - RNA, 32 nt, Homo Sapiens
uaaaggucaaggaaggaaaauacuaccugucc

SEQ ID NO: 322310 - RNA, 32 nt, Homo Sapiens
cccuuuuccccagcugaugaggagccggcccc

SEQ ID NO: 322311 - RNA, 32 nt, Homo Sapiens
uuaacuuguggcugcuuuugcugcugcugcuc

SEQ ID NO: 322312 - RNA, 32 nt, Homo Sapiens
ucccugcuagagaaagcagagagcgggacugg

SEQ ID NO: 322313 - RNA, 32 nt, Homo Sapiens
uuucuccaaacacaauuagcuggcuaacggau

SEQ ID NO: 322314 - RNA, 32 nt, Homo Sapiens
uggcgcucugagucccugguuccuggccuccu

SEQ ID NO: 322315 - RNA, 32 nt, Homo Sapiens
gugcuggaucaccccaucaaggccaucagccu

SEQ ID NO: 322316 - RNA, 32 nt, Homo Sapiens
ucaccacagucccagugggccugucacggggu

SEQ ID NO: 322317 - RNA, 32 nt, Homo Sapiens
ugcugagucacccacccagccuuggagcugga

SEQ ID NO: 322318 - RNA, 32 nt, Homo Sapiens
uuuugguggggcggggggcggugauagggucu

SEQ ID NO: 322319 - RNA, 32 nt, Homo Sapiens
uugugggggcccugcagggacaucagcuccug

SEQ ID NO: 322320 - RNA, 32 nt, Homo Sapiens
ucagagcuagggugggggugcccgauucgggu

SEQ ID NO: 322321 - RNA, 32 nt, Homo Sapiens
cacucuuucuaaaaugaaucuucuaggcuggg

SEQ ID NO: 322322 - RNA, 32 nt, Homo Sapiens
ugaagcugcagaggccaaaaaacacgccgagc

SEQ ID NO: 322323 - RNA, 32 nt, Homo Sapiens
uugaucuuuuucugccaugaaguuuaaagauu

SEQ ID NO: 322324 - RNA, 32 nt, Homo Sapiens
guaauuaauugggugguugagaugcaugccug

SEQ ID NO: 322325 - RNA, 32 nt, Homo Sapiens
gcagccacgaacguccacggagccugccggca

SEQ ID NO: 322326 - RNA, 31 nt, Homo Sapiens
cgugggggcggugccggucggagggcuccua

SEQ ID NO: 322327 - RNA, 32 nt, Homo Sapiens
ugagcaggucugaccucaggggaagggugggu

SEQ ID NO: 322328 - RNA, 32 nt, Homo Sapiens
gaaagaaucccccaagcuccauuucaugagua

SEQ ID NO: 322329 - RNA, 32 nt, Homo Sapiens
caugccucagugggaugaauccauuacaucuc

SEQ ID NO: 322330 - RNA, 32 nt, Homo Sapiens
ugcucagguucccccuguggguuccgguccuc

SEQ ID NO: 322331 - RNA, 32 nt, Homo Sapiens
uugaaguacauuuuuuccuguuuucacaauua

SEQ ID NO: 322332 - RNA, 32 nt, Homo Sapiens
cguagggacauaaguauauacauguuauccaa

SEQ ID NO: 322333 - RNA, 32 nt, Homo Sapiens
aaucuuaaacagaugcaaauccaauuaggcgg

SEQ ID NO: 322334 - RNA, 32 nt, Homo Sapiens
caucaaggagaacgguacauguugauuggaaa

SEQ ID NO: 322335 - RNA, 32 nt, Homo Sapiens
aaaaugauguaaaauucuguuuuguggaucuc

SEQ ID NO: 322336 - RNA, 32 nt, Homo Sapiens
uaccaucaagauacaugaaaaaggaaacacca

SEQ ID NO: 322337 - RNA, 32 nt, Homo Sapiens
guggaccucugagugcagcaaaaggugggcua

SEQ ID NO: 322338 - RNA, 32 nt, Homo Sapiens
augauuguuacucccccucccuuuucaaauuc

SEQ ID NO: 322339 - RNA, 32 nt, Homo Sapiens
ggacccccgccuucucacccuucgugcgggug

SEQ ID NO: 322340 - RNA, 32 nt, Homo Sapiens
caggcuaccacagugaauaaauagaaauguaa

SEQ ID NO: 322341 - RNA, 32 nt, Homo Sapiens
gaaaguuuccccuguuugacuccaccuuuaaa

SEQ ID NO: 322342 - RNA, 32 nt, Homo Sapiens
ugcaaaagugauuagaacuaagaugcagggga

SEQ ID NO: 322343 - RNA, 32 nt, Homo Sapiens
uguucucugguuuuguuuuaugcugaaaguag

SEQ ID NO: 322344 - RNA, 32 nt, Homo Sapiens
uagagaugaccgaugacaagcugugcuccagc

SEQ ID NO: 322345 - RNA, 32 nt, Homo Sapiens
gcaaaacacuucauuucuuuuucaauuuaaaa

SEQ ID NO: 322346 - RNA, 32 nt, Homo Sapiens
ucaacucccgguuuccgugccucuccaccgcu

SEQ ID NO: 322347 - RNA, 32 nt, Homo Sapiens
aaggggaagacuuuaaaguauaaaguaaaaug

SEQ ID NO: 322348 - RNA, 32 nt, Homo Sapiens
agaauuuguauuucuuuuuuuaaaauacaauu

SEQ ID NO: 322349 - RNA, 32 nt, Homo Sapiens
gccacuccgcggcugugcacucguuugcuuuc

SEQ ID NO: 322350 - RNA, 32 nt, Homo Sapiens
aggugcauggcuaagcaguucuuuccuucgga

SEQ ID NO: 322351 - RNA, 32 nt, Homo Sapiens
uguagacuaugaagagauauuuuauuuguuug

SEQ ID NO: 322352 - RNA, 32 nt, Homo Sapiens
uugcccgccucagccucccaaauugcugggau

SEQ ID NO: 322353 - RNA, 32 nt, Homo Sapiens
uggauuucaaggaaacacacuggauacugccu

SEQ ID NO: 322354 - RNA, 32 nt, Homo Sapiens
auaagugagagaaaugaaguuuauauuaucaa

SEQ ID NO: 322355 - RNA, 32 nt, Homo Sapiens
cgacuguuuuuaaaaugacacuuauaaauccu

SEQ ID NO: 322356 - RNA, 32 nt, Homo Sapiens
acaugacugugggaacagccuccagcuaucug

SEQ ID NO: 322357 - RNA, 32 nt, Homo Sapiens
aaccccacuucugccaccuaccagcuauaugg

SEQ ID NO: 322358 - RNA, 32 nt, Homo Sapiens
uggcuuugucaucucagcauugaccacuccug

SEQ ID NO: 322359 - RNA, 32 nt, Homo Sapiens
guacccagguaugccgcagagccaggcacgcc

SEQ ID NO: 322360 - RNA, 32 nt, Homo Sapiens
ugagacuuuuuuuuuuuuuuuaguucaucagc

SEQ ID NO: 322361 - RNA, 32 nt, Homo Sapiens
uuguuagauaaaaccuaugguugauugugugc

SEQ ID NO: 322362 - RNA, 32 nt, Homo Sapiens
auauguagucaauugaaauccuugacuuuaaa

SEQ ID NO: 322363 - RNA, 32 nt, Homo Sapiens
uaucugucccaggugcucuccacacauaggau

SEQ ID NO: 322364 - RNA, 32 nt, Homo Sapiens
agugcugcaguaaaccaaaaaauaaauauaau

SEQ ID NO: 322365 - RNA, 30 nt, Homo Sapiens
gucuuuccuaccuugggggaaccuggaacu

SEQ ID NO: 322366 - RNA, 32 nt, Homo Sapiens
agggcucucuugaccaguagugucacaguuug

SEQ ID NO: 322367 - RNA, 32 nt, Homo Sapiens
aagagggagcuaggcaaagcugaagaccgcag

SEQ ID NO: 322368 - RNA, 32 nt, Homo Sapiens
uguuuagcagugccucuguuuacaccauaaga

SEQ ID NO: 322369 - RNA, 32 nt, Homo Sapiens
gggauucuugucagcgggaggcgucacuggcc

SEQ ID NO: 322370 - RNA, 32 nt, Homo Sapiens
cuuugucgugguucuuaaauguuuauacugua

SEQ ID NO: 322371 - RNA, 32 nt, Homo Sapiens
auauuuuuaagguagucaaugaguauuuuuga

SEQ ID NO: 322372 - RNA, 32 nt, Homo Sapiens
uucucccccuccccaguguccucuccucucag

SEQ ID NO: 322373 - RNA, 29 nt, Homo Sapiens
uuaaauauaguuguauauuuuucuuacuc

SEQ ID NO: 322374 - RNA, 32 nt, Homo Sapiens
cuucccgacuggcuucccguaguaccagcaac

SEQ ID NO: 322375 - RNA, 32 nt, Homo Sapiens
aacuggcaggagcugccaccacguucccugcg

SEQ ID NO: 322376 - RNA, 32 nt, Homo Sapiens
ucagacagguaaccacugcugcuacuguuuuu

SEQ ID NO: 322377 - RNA, 32 nt, Homo Sapiens
cagcuagacaugccauaagcaagggaaagaau

SEQ ID NO: 322378 - RNA, 32 nt, Homo Sapiens
ggcgcggaggagggggcaagcgugugugagau

SEQ ID NO: 322379 - RNA, 32 nt, Homo Sapiens
ucgaagaugauuaaagcauucaguccuguccu

SEQ ID NO: 322380 - RNA, 32 nt, Homo Sapiens
cgcagagccccggccgggcccagcccucggag

SEQ ID NO: 322381 - RNA, 32 nt, Homo Sapiens
uucuuuucuuacccuuuccuccccaaagaaaa

SEQ ID NO: 322382 - RNA, 32 nt, Homo Sapiens
gcagggcaggcgcaagugcagagccuucguuu

SEQ ID NO: 322383 - RNA, 28 nt, Homo Sapiens
auuaagaaagauuguguaugagagccua

SEQ ID NO: 322384 - RNA, 32 nt, Homo Sapiens
ggugacgcgggccggcgcucacgagaggcccg

SEQ ID NO: 322385 - RNA, 32 nt, Homo Sapiens
aagacaagcaggaaggaauugaguagggccag

SEQ ID NO: 322386 - RNA, 32 nt, Homo Sapiens
uaacugaacuaaaauaaauacaugcuuaaucc

SEQ ID NO: 322387 - RNA, 32 nt, Homo Sapiens
cuccugggcagcugcgcggagaacuggggcuc

SEQ ID NO: 322388 - RNA, 30 nt, Homo Sapiens
accagugucuguguuguuagaacucagagg

SEQ ID NO: 322389 - RNA, 32 nt, Homo Sapiens
aguuaguuuaucuuguaguauucaucuuugua

SEQ ID NO: 322390 - RNA, 32 nt, Homo Sapiens
cugagcagaaccagcucccccaacuccagcag

SEQ ID NO: 322391 - RNA, 32 nt, Homo Sapiens
uuuuacuuauauauuuguuuauugcuuguuuu

SEQ ID NO: 322392 - RNA, 32 nt, Homo Sapiens
gcccuggauguagcugagaggcugggagaaga

SEQ ID NO: 322393 - RNA, 32 nt, Homo Sapiens
guuuggaagcugaagaguaaagaaauuucuag

SEQ ID NO: 322394 - RNA, 32 nt, Homo Sapiens
accccgcucccucccacucucccugccccucg

SEQ ID NO: 322395 - RNA, 32 nt, Homo Sapiens
uugugguguagugugcaaauguuagcaugugc

SEQ ID NO: 322396 - RNA, 32 nt, Homo Sapiens
agagcacccccuccacccccaccuugggugug

SEQ ID NO: 322397 - RNA, 32 nt, Homo Sapiens
ggcuggucucaaacugcugaccucaagugauc

SEQ ID NO: 322398 - RNA, 32 nt, Homo Sapiens
caggcucagucuggacucuacuuacacucauu

SEQ ID NO: 322399 - RNA, 32 nt, Homo Sapiens
cuuguuauuguaaaaugugauuugucauugag

SEQ ID NO: 322400 - RNA, 32 nt, Homo Sapiens
uauuguauuuaauuuucuuuuccuuuucaaca

SEQ ID NO: 322401 - RNA, 32 nt, Homo Sapiens
ucagagucggagcuacagucagugccuucagc

SEQ ID NO: 322402 - RNA, 32 nt, Homo Sapiens
ggggcggcggccgcgaggagggggccuccaug

SEQ ID NO: 322403 - RNA, 32 nt, Homo Sapiens
uuucuccaggacaagagaaaaagagaauccug

SEQ ID NO: 322404 - RNA, 32 nt, Homo Sapiens
ucccccggucugagagaggggaggccgagcag

SEQ ID NO: 322405 - RNA, 32 nt, Homo Sapiens
ucuuugaugggagguuucaauaaacagcgaua

SEQ ID NO: 322406 - RNA, 28 nt, Homo Sapiens
agaucagaguauggacauuugaaauauu

SEQ ID NO: 322407 - RNA, 32 nt, Homo Sapiens
gaccccgauaucuacauagaugcuaucggggu

SEQ ID NO: 322408 - RNA, 32 nt, Homo Sapiens
ccaguugacaccuuucccccagcuccucggug

SEQ ID NO: 322409 - RNA, 32 nt, Homo Sapiens
agcuccccaccuuuccuuccagcccuuggaau

SEQ ID NO: 322410 - RNA, 32 nt, Homo Sapiens
auauguguauauuugcauugauuaaauuauug

SEQ ID NO: 322411 - RNA, 32 nt, Homo Sapiens
uauuauguauaaaauguaacacugaugauagg

SEQ ID NO: 322412 - RNA, 32 nt, Homo Sapiens
acucccuccuuggccuggcaguggugguggca

SEQ ID NO: 322413 - RNA, 32 nt, Homo Sapiens
ucagaagaaaccggaaccuccagaagacagau

SEQ ID NO: 322414 - RNA, 32 nt, Homo Sapiens
cgagaagacgagccacguaugggugccugccc

SEQ ID NO: 322415 - RNA, 32 nt, Homo Sapiens
acugagggacgccacguccuuggccagcuuaa

SEQ ID NO: 322416 - RNA, 32 nt, Homo Sapiens
ugccugggagcugaggcacccgugccaguggc

SEQ ID NO: 322417 - RNA, 32 nt, Homo Sapiens
aauuacaugucuuuuuguaaauggcuugccau

SEQ ID NO: 322418 - RNA, 32 nt, Homo Sapiens
aauuauaaauuaauguuuucguggcauguaaa

SEQ ID NO: 322419 - RNA, 32 nt, Homo Sapiens
cggacccgcagccccagacgccgggcuugggg

SEQ ID NO: 322420 - RNA, 32 nt, Homo Sapiens
uuugaguaacagaauaaauauuauauauauca

SEQ ID NO: 322421 - RNA, 32 nt, Homo Sapiens
cuguggugggggcuugccauuguuuacucucu

SEQ ID NO: 322422 - RNA, 32 nt, Homo Sapiens
accuuuaagacaaacaaacaaacacacacaca

SEQ ID NO: 322423 - RNA, 31 nt, Homo Sapiens
ugaggucccugaggaugucuaacugauucug

SEQ ID NO: 322424 - RNA, 31 nt, Homo Sapiens
ucaaagaaauaaacaggaguucagcggagua

SEQ ID NO: 322425 - RNA, 32 nt, Homo Sapiens
agggagcugagcgcagcauggcuggucuggca

SEQ ID NO: 322426 - RNA, 32 nt, Homo Sapiens
accucggcaugccuucuguuucuccuucaaug

SEQ ID NO: 322427 - RNA, 32 nt, Homo Sapiens
gaggaggaacagagaagccugggcugcuggga

SEQ ID NO: 322428 - RNA, 32 nt, Homo Sapiens
cccggggagagccggaggaugaauugaaccuc

SEQ ID NO: 322429 - RNA, 32 nt, Homo Sapiens
cacucuuacaccuguuauggaaaaugucaacc

SEQ ID NO: 322430 - RNA, 32 nt, Homo Sapiens
ugcucgcugugaccgaacaaagccccuaagag

SEQ ID NO: 322431 - RNA, 30 nt, Homo Sapiens
uucgccguggacgccgaccguccgggacga

SEQ ID NO: 322432 - RNA, 32 nt, Homo Sapiens
gaggacugcggggcucuugaggccagcugcag

SEQ ID NO: 322433 - RNA, 32 nt, Homo Sapiens
gcaggucuuuuaucagaaaucaccgauccaga

SEQ ID NO: 322434 - RNA, 32 nt, Homo Sapiens
auaaguaauuguugcaugaacacacacacaaa

SEQ ID NO: 322435 - RNA, 32 nt, Homo Sapiens
aucguugugggaaccauuaaaagaacucaggg

SEQ ID NO: 322436 - RNA, 32 nt, Homo Sapiens
gaggcaaaaauauuguuaaaaacuagacucua

SEQ ID NO: 322437 - RNA, 32 nt, Homo Sapiens
uacaauaaaaauucaauaaagauuuagugguu

SEQ ID NO: 322438 - RNA, 32 nt, Homo Sapiens
ggcuggagaaaguugcgugucucaggcuaagc

SEQ ID NO: 322439 - RNA, 32 nt, Homo Sapiens
aggcugcugcccgugccuugggugcuggaguu

SEQ ID NO: 322440 - RNA, 32 nt, Homo Sapiens
uuaugugcucacugcuggcucaggccccaacc

SEQ ID NO: 322441 - RNA, 32 nt, Homo Sapiens
gaagugcugucuuuuuacauuuuacucugucc

SEQ ID NO: 322442 - RNA, 32 nt, Homo Sapiens
guacgaaguauuuaauagaucuaaucaaauau

SEQ ID NO: 322443 - RNA, 32 nt, Homo Sapiens
cacacacacacacacauacacacacacacaca

SEQ ID NO: 322444 - RNA, 32 nt, Homo Sapiens
uacacacacacacacacacacacacacacaca

SEQ ID NO: 322445 - RNA, 32 nt, Homo Sapiens
aacuuaccagguuuuucuuuuaauuuaaucag

SEQ ID NO: 322446 - RNA, 32 nt, Homo Sapiens
gggcuaauauccagaaucuacaaagaacucaa

SEQ ID NO: 322447 - RNA, 32 nt, Homo Sapiens
aggccuccgagccacccaggguuguacggccg

SEQ ID NO: 322448 - RNA, 32 nt, Homo Sapiens
aacguggacacccuacaccuccccucagaacu

SEQ ID NO: 322449 - RNA, 32 nt, Homo Sapiens
aaagugcagcagagaccucaaggccccccacg

SEQ ID NO: 322450 - RNA, 32 nt, Homo Sapiens
augguuguuuaaaagagucugagaccucuccc

SEQ ID NO: 322451 - RNA, 32 nt, Homo Sapiens
auggcucuuuugcaggaggagcuccuaaaaaa

SEQ ID NO: 322452 - RNA, 32 nt, Homo Sapiens
aauuauaaaaauucggaggcaaauugaaaacu

SEQ ID NO: 322453 - RNA, 32 nt, Homo Sapiens
agccagcuugcaccacccaccugggaggccga

SEQ ID NO: 322454 - RNA, 32 nt, Homo Sapiens
uagauccuaugugaaaagaaaagugaagcaac

SEQ ID NO: 322455 - RNA, 32 nt, Homo Sapiens
aauuaauguuuuacuuaauuuauauugaacug

SEQ ID NO: 322456 - RNA, 32 nt, Homo Sapiens
ugcuuuuguuuccucauuuguaaaaugagaau

SEQ ID NO: 322457 - RNA, 32 nt, Homo Sapiens
ugccuacccugccuaugugaauggaguucagg

SEQ ID NO: 322458 - RNA, 32 nt, Homo Sapiens
auuuuaaaaauucuuaggcacuuuuugaccuu

SEQ ID NO: 322459 - RNA, 32 nt, Homo Sapiens
ccgagcccaagccccuccccuccacuccccuu

SEQ ID NO: 322460 - RNA, 32 nt, Homo Sapiens
agaugaagacacugaggcucaggagguggcgu

SEQ ID NO: 322461 - RNA, 32 nt, Homo Sapiens
uggugcccggggauuggauuggagccaggacc

SEQ ID NO: 322462 - RNA, 32 nt, Homo Sapiens
agcuuaauuuuucucuuuuacuccauaggaac

SEQ ID NO: 322463 - RNA, 30 nt, Homo Sapiens
aagccauaaauuugaaaauaugcugaguaa

SEQ ID NO: 322464 - RNA, 32 nt, Homo Sapiens
uacuuuacuuuaauguguaauacucaacucac

SEQ ID NO: 322465 - RNA, 32 nt, Homo Sapiens
auuagauugucaacagauugggccauccuuac

SEQ ID NO: 322466 - RNA, 32 nt, Homo Sapiens
agaaaucuggaaguauagaaguauuagaagau

SEQ ID NO: 322467 - RNA, 32 nt, Homo Sapiens
ucagaaugaagauauagagaaacaagaaagaa

SEQ ID NO: 322468 - RNA, 32 nt, Homo Sapiens
auauuaaaccaucaauaaaguuucacaagauu

SEQ ID NO: 322469 - RNA, 32 nt, Homo Sapiens
ucaugucauagcauuuauguuauuuucagaug

SEQ ID NO: 322470 - RNA, 32 nt, Homo Sapiens
cuaaucauuaggaaucuguauuagaguucugu

SEQ ID NO: 322471 - RNA, 32 nt, Homo Sapiens
aacagcagccucagcuucugaagugcaugaaa

SEQ ID NO: 322472 - RNA, 32 nt, Homo Sapiens
uggauauaucuaguaccuuuauuuggaaugug

SEQ ID NO: 322473 - RNA, 32 nt, Homo Sapiens
acucaauuuguuuuuucuuauagagaaaauga

SEQ ID NO: 322474 - RNA, 32 nt, Homo Sapiens
accccagacaccugugguagcccagagaugaa

SEQ ID NO: 322475 - RNA, 32 nt, Homo Sapiens
uuauggagaauggguuccuguggagaaaaaug

SEQ ID NO: 322476 - RNA, 32 nt, Homo Sapiens
uuauuuuagcuaaagcauucuuuucuacugac

SEQ ID NO: 322477 - RNA, 32 nt, Homo Sapiens
caagcguuucauguugaacacagcucucucca

SEQ ID NO: 322478 - RNA, 32 nt, Homo Sapiens
agcugaguucuggaagcugcgucaagagaggc

SEQ ID NO: 322479 - RNA, 32 nt, Homo Sapiens
uuuuauuuaggaguuugaauucuuacucucau

SEQ ID NO: 322480 - RNA, 32 nt, Homo Sapiens
caauaagaccucucuggaauggaggucuuaug

SEQ ID NO: 322481 - RNA, 32 nt, Homo Sapiens
cagcagugggagcugggacaugugacaggcug

SEQ ID NO: 322482 - RNA, 32 nt, Homo Sapiens
uggagugaugagccucgcuugucuagauuguc

SEQ ID NO: 322483 - RNA, 32 nt, Homo Sapiens
aaucccagcuacugaggagacuugagguagga

SEQ ID NO: 322484 - RNA, 32 nt, Homo Sapiens
gcagugccaguguucggggggugucugggcca

SEQ ID NO: 322485 - RNA, 32 nt, Homo Sapiens
ugccuguguacuuuugcuuaguauuacuuuga

SEQ ID NO: 322486 - RNA, 32 nt, Homo Sapiens
acccauggccaccgucacccacaggggccgug

SEQ ID NO: 322487 - RNA, 32 nt, Homo Sapiens
uuucacugucauuguucagcgcuuugccugaa

SEQ ID NO: 322488 - RNA, 32 nt, Homo Sapiens
acgugugugcacguacacacacauacacacac

SEQ ID NO: 322489 - RNA, 32 nt, Homo Sapiens
ugugagccaccgugcccaacccuaacaauuau

SEQ ID NO: 322490 - RNA, 32 nt, Homo Sapiens
cugcuuugccuggccgggcgcgguggcucacg

SEQ ID NO: 322491 - RNA, 32 nt, Homo Sapiens
aagaggaggcggaggcggcggccgggugggag

SEQ ID NO: 322492 - RNA, 32 nt, Homo Sapiens
gaucaaaagggagugccacuuuuggggaaaug

SEQ ID NO: 322493 - RNA, 32 nt, Homo Sapiens
uacuuaaagcaucuggaaauaggaagacagag

SEQ ID NO: 322494 - RNA, 32 nt, Homo Sapiens
ugcaaugaguccuguuagaucuccaggaguug

SEQ ID NO: 322495 - RNA, 32 nt, Homo Sapiens
guggacaugcaaaccaaaauuggggauuggag

SEQ ID NO: 322496 - RNA, 32 nt, Homo Sapiens
agcucagagcugccccgugucugagggcgcgg

SEQ ID NO: 322497 - RNA, 32 nt, Homo Sapiens
aggcugcggggacgggaggggacgugggggcc

SEQ ID NO: 322498 - RNA, 32 nt, Homo Sapiens
cagcgucgccaaaacuaguguucuuuauuagu

SEQ ID NO: 322499 - RNA, 32 nt, Homo Sapiens
uugaggucaagaguuugagaccagccuggcca

SEQ ID NO: 322500 - RNA, 32 nt, Homo Sapiens
uauaaccuauuauucugauuuuuaucucuuau

SEQ ID NO: 322501 - RNA, 32 nt, Homo Sapiens
guggaggaggggcgauguggcuggggagcuag

SEQ ID NO: 322502 - RNA, 28 nt, Homo Sapiens
gaggaagcauagggggaaacuccauugg

SEQ ID NO: 322503 - RNA, 32 nt, Homo Sapiens
gcgguuggagcggcugucgccauguugucggu

SEQ ID NO: 322504 - RNA, 32 nt, Homo Sapiens
augagugacaacagauaaugccaauugcccag

SEQ ID NO: 322505 - RNA, 32 nt, Homo Sapiens
uuccaugggccauagccgguaugcccccagcc

SEQ ID NO: 322506 - RNA, 32 nt, Homo Sapiens
auauucaggagccucacacuguucagacguug

SEQ ID NO: 322507 - RNA, 32 nt, Homo Sapiens
agaguucugaaucucaaaacacucuacucugg

SEQ ID NO: 322508 - RNA, 32 nt, Homo Sapiens
ucugagccgucuuucuucuccucccuauuucg

SEQ ID NO: 322509 - RNA, 32 nt, Homo Sapiens
gaggguacagaaaaagcacacagauggcuugu

SEQ ID NO: 322510 - RNA, 32 nt, Homo Sapiens
uccucaauuuucuccuucauccccaccacaga

SEQ ID NO: 322511 - RNA, 32 nt, Homo Sapiens
uuuauacuuuaaauaaaauuuuuagaucucac

SEQ ID NO: 322512 - RNA, 32 nt, Homo Sapiens
uuucuuuucuuuuguuuuuuuaagacaggguc

SEQ ID NO: 322513 - RNA, 32 nt, Homo Sapiens
guaaguggggacgggggcugcuucuccaccuc

SEQ ID NO: 322514 - RNA, 32 nt, Homo Sapiens
uggggucgcugguugguggggaagugacaggc

SEQ ID NO: 322515 - RNA, 32 nt, Homo Sapiens
cuagauguuucccccuuggaguuuugucaguu

SEQ ID NO: 322516 - RNA, 32 nt, Homo Sapiens
ugacaccauugauuuugaaacuacugaagaaa

SEQ ID NO: 322517 - RNA, 32 nt, Homo Sapiens
uggccagcaaaugaaauucugccuagaaauua

SEQ ID NO: 322518 - RNA, 32 nt, Homo Sapiens
gacccaucccgcgggugaccggugccuguucu

SEQ ID NO: 322519 - RNA, 32 nt, Homo Sapiens
uugagauucugauucuuuuccaaacagucccc

SEQ ID NO: 322520 - RNA, 32 nt, Homo Sapiens
gauuguacuuauuugacacauacuccccgucg

SEQ ID NO: 322521 - RNA, 32 nt, Homo Sapiens
uuuguuaaagauuguuuauaugcuuacaaaga

SEQ ID NO: 322522 - RNA, 32 nt, Homo Sapiens
ugccuaccuccgagacagucuuucucaucuug

SEQ ID NO: 322523 - RNA, 32 nt, Homo Sapiens
aaaaucugcgggcuucaaaaaauauaaguagg

SEQ ID NO: 322524 - RNA, 32 nt, Homo Sapiens
gaggggucuaagccuucccuccugggcuaggg

SEQ ID NO: 322525 - RNA, 32 nt, Homo Sapiens
cuugaaaacaaaaaacaguuacuuauagucaa

SEQ ID NO: 322526 - RNA, 32 nt, Homo Sapiens
ggucugggcucauuuuuauguuuauuuuagaa

SEQ ID NO: 322527 - RNA, 32 nt, Homo Sapiens
cagugcuuugguacuuuugauuaccuguguuu

SEQ ID NO: 322528 - RNA, 31 nt, Homo Sapiens
ucuagcaaggggagauggauaugauagauua

SEQ ID NO: 322529 - RNA, 32 nt, Homo Sapiens
gguggcugcccccugcguuccuccauccaacc

SEQ ID NO: 322530 - RNA, 30 nt, Homo Sapiens
auaucaccacuugcucagucaccaucucaa

SEQ ID NO: 322531 - RNA, 32 nt, Homo Sapiens
uguaugucuucugcauaagaaaaagaagagac

SEQ ID NO: 322532 - RNA, 32 nt, Homo Sapiens
aaguauaaaccuuaugaacuacaguggagcua

SEQ ID NO: 322533 - RNA, 32 nt, Homo Sapiens
cccccuccacacuggguuggaugauaccuuaa

SEQ ID NO: 322534 - RNA, 32 nt, Homo Sapiens
cugcccaucuuccauguuguaaaggaacagcc

SEQ ID NO: 322535 - RNA, 32 nt, Homo Sapiens
uggaaccuaggcggcgggagcccggggcgccu

SEQ ID NO: 322536 - RNA, 32 nt, Homo Sapiens
cucuucauuuugcugauguucuaaucauguca

SEQ ID NO: 322537 - RNA, 32 nt, Homo Sapiens
uuacccuccaguuccucacaacguaugccuau

SEQ ID NO: 322538 - RNA, 32 nt, Homo Sapiens
caucaguucaccuuuaaagacacacauuccuu

SEQ ID NO: 322539 - RNA, 32 nt, Homo Sapiens
ggaaaccugugcuccauuaccacaugggugca

SEQ ID NO: 322540 - RNA, 32 nt, Homo Sapiens
agccccagucucuggagaaaagagagaaaggg

SEQ ID NO: 322541 - RNA, 32 nt, Homo Sapiens
agcccggggaacaggccugucuggcccugagg

SEQ ID NO: 322542 - RNA, 32 nt, Homo Sapiens
aaaagaggaauccauggauggauucagaauuu

SEQ ID NO: 322543 - RNA, 32 nt, Homo Sapiens
ugccguugacauucuucauagaauuagaaaaa

SEQ ID NO: 322544 - RNA, 32 nt, Homo Sapiens
uccagaagagucauauauauuuuuauaaucua

SEQ ID NO: 322545 - RNA, 32 nt, Homo Sapiens
aaucauucaaggauucagaauuuugcagucac

SEQ ID NO: 322546 - RNA, 32 nt, Homo Sapiens
uuuuguauuuuuaguagagauagggucucacc

SEQ ID NO: 322547 - RNA, 32 nt, Homo Sapiens
ggacaguguguauucuuccuccagacacucuc

SEQ ID NO: 322548 - RNA, 32 nt, Homo Sapiens
aaaauaaacucuucuuuuuuucuuuaaaguau

SEQ ID NO: 322549 - RNA, 32 nt, Homo Sapiens
uuuugccuuucuguucaucugugaacuguuuu

SEQ ID NO: 322550 - RNA, 32 nt, Homo Sapiens
cccaaguaggaagccagacgagcuguaaaaca

SEQ ID NO: 322551 - RNA, 32 nt, Homo Sapiens
gagcaacuuaccccggccagccagcccucuca

SEQ ID NO: 322552 - RNA, 28 nt, Homo Sapiens
cuguuaggggcuaccaugggaccagcuc

SEQ ID NO: 322553 - RNA, 32 nt, Homo Sapiens
gaaucuauauccucaggaaaugguccuuuuuu

SEQ ID NO: 322554 - RNA, 32 nt, Homo Sapiens
gccagagacuucaguuucugcucugcauggug

SEQ ID NO: 322555 - RNA, 32 nt, Homo Sapiens
gccccgguuccuccccgcugcaggccagggua

SEQ ID NO: 322556 - RNA, 32 nt, Homo Sapiens
gguccuuggaucaacagcccgccagcugauug

SEQ ID NO: 322557 - RNA, 32 nt, Homo Sapiens
ccacuguuaucuccagaagcaaaugcccaagc

SEQ ID NO: 322558 - RNA, 32 nt, Homo Sapiens
caucuccccuggaguguucacuugcaagcugc

SEQ ID NO: 322559 - RNA, 32 nt, Homo Sapiens
gcuagggcugggaggguuuugcucuccuaugc

SEQ ID NO: 322560 - RNA, 32 nt, Homo Sapiens
aacuuuuggcguauacugauuccuccaacucu

SEQ ID NO: 322561 - RNA, 32 nt, Homo Sapiens
gguugcugcucucuccuucagaaccccgcucu

SEQ ID NO: 322562 - RNA, 32 nt, Homo Sapiens
cucccacgccccagccccucccuccuuggucu

SEQ ID NO: 322563 - RNA, 32 nt, Homo Sapiens
aucacuuaauaaauggugcuaaacucaaaaaa

SEQ ID NO: 322564 - RNA, 32 nt, Homo Sapiens
uauucuuguuuuucuuuuuucaaaaguguggc

SEQ ID NO: 322565 - RNA, 32 nt, Homo Sapiens
agcgaggagcuuuugcggcaggcagagacaau

SEQ ID NO: 322566 - RNA, 32 nt, Homo Sapiens
ggaugggagcccagcuccuucgcuucuccaga

SEQ ID NO: 322567 - RNA, 32 nt, Homo Sapiens
aaaaggaaaugaauggauucgaaugaaauugu

SEQ ID NO: 322568 - RNA, 32 nt, Homo Sapiens
gauguggucugcuuaaaaaaugaauauaucag

SEQ ID NO: 322569 - RNA, 32 nt, Homo Sapiens
aaaaggaaguaaaaauuuuacaauuaggagau

SEQ ID NO: 322570 - RNA, 32 nt, Homo Sapiens
ucugcgccccuacuccaugcugcugaucccca

SEQ ID NO: 322571 - RNA, 32 nt, Homo Sapiens
ggcggacggaacagguauuuuagugagacacu

SEQ ID NO: 322572 - RNA, 32 nt, Homo Sapiens
cugaguauuuccuaauuguauagaaucuuaca

SEQ ID NO: 322573 - RNA, 32 nt, Homo Sapiens
gcucuggagcccucacuccauccacacaccau

SEQ ID NO: 322574 - RNA, 32 nt, Homo Sapiens
gucauaugugccuuaccuccagaagucuuuuu

SEQ ID NO: 322575 - RNA, 32 nt, Homo Sapiens
cuaaggcggauuugaaucucuuucucucccuu

SEQ ID NO: 322576 - RNA, 32 nt, Homo Sapiens
gccuuccuauuaucaagguaucugaaaagcaa

SEQ ID NO: 322577 - RNA, 32 nt, Homo Sapiens
gaagagguggaggugugguugugguggagagc

SEQ ID NO: 322578 - RNA, 32 nt, Homo Sapiens
ucauuccagccauuccaaucucuucuucuuua

SEQ ID NO: 322579 - RNA, 32 nt, Homo Sapiens
cucucugcuccuacgcauccuguccuggcggg

SEQ ID NO: 322580 - RNA, 32 nt, Homo Sapiens
aacggggggucucgugcccagaugaaaccauu

SEQ ID NO: 322581 - RNA, 32 nt, Homo Sapiens
ccgaaagucugggaccagguccaggugggcau

SEQ ID NO: 322582 - RNA, 32 nt, Homo Sapiens
gugauuuaaaagacagcaugguacuuucacuc

SEQ ID NO: 322583 - RNA, 32 nt, Homo Sapiens
ucuauugacauugguagcuucagcggcagcag

SEQ ID NO: 322584 - RNA, 29 nt, Homo Sapiens
agcuggggugcucucaguuuccgucggca

SEQ ID NO: 322585 - RNA, 32 nt, Homo Sapiens
auauuuaugcaaauaaaaucuuuaaaugggaa

SEQ ID NO: 322586 - RNA, 32 nt, Homo Sapiens
uuuaagcuaaggaaaccuuuuagugacuuagc

SEQ ID NO: 322587 - RNA, 31 nt, Homo Sapiens
acugauagacacugccucagcuccgugcagg

SEQ ID NO: 322588 - RNA, 32 nt, Homo Sapiens
uuauaaaaacaaaaaauaauuuuaugccuaga

SEQ ID NO: 322589 - RNA, 32 nt, Homo Sapiens
cggccuccgcgguggacguguucuuuucuaag

SEQ ID NO: 322590 - RNA, 32 nt, Homo Sapiens
gauccucaaacauugcacuggaugggcugcag

SEQ ID NO: 322591 - RNA, 32 nt, Homo Sapiens
aucaacggaucauuuuaacccugacuuccccu

SEQ ID NO: 322592 - RNA, 32 nt, Homo Sapiens
gaagucaaggccagucacggucgccuagcgcu

SEQ ID NO: 322593 - RNA, 32 nt, Homo Sapiens
auuugaaaauugugguugcauuuuaaagugug

SEQ ID NO: 322594 - RNA, 32 nt, Homo Sapiens
cgauggaccccgcggcauccccggcuccccgc

SEQ ID NO: 322595 - RNA, 32 nt, Homo Sapiens
acugcucauaucaggacauccuguggacucuu

SEQ ID NO: 322596 - RNA, 32 nt, Homo Sapiens
agaaagaucugggacuccaugucacccacuaa

SEQ ID NO: 322597 - RNA, 32 nt, Homo Sapiens
aacacuguguccugggggggcugggaaguccc

SEQ ID NO: 322598 - RNA, 32 nt, Homo Sapiens
agcuauuuaagugauacauaccucuaguuuuu

SEQ ID NO: 322599 - RNA, 32 nt, Homo Sapiens
gagcccgcggugcagcuccagccccgggaagc

SEQ ID NO: 322600 - RNA, 32 nt, Homo Sapiens
uuuggaagcuggaagcgaugguguuuggugcc

SEQ ID NO: 322601 - RNA, 31 nt, Homo Sapiens
auguggaaauaaaacaaaacaccuguauggc

SEQ ID NO: 322602 - RNA, 32 nt, Homo Sapiens
aagcaauagagagcuucaugacugaguaagag

SEQ ID NO: 322603 - RNA, 32 nt, Homo Sapiens
uugugccacuuuuuuucuuuuguuuuuuuuuu

SEQ ID NO: 322604 - RNA, 32 nt, Homo Sapiens
agaaacugaggcccagcagagauugguaacuu

SEQ ID NO: 322605 - RNA, 32 nt, Homo Sapiens
aagauaucuagcagaaacuauagcugaggacu

SEQ ID NO: 322606 - RNA, 32 nt, Homo Sapiens
ugaaaacuuuuguguuuaauacauauuuuuua

SEQ ID NO: 322607 - RNA, 32 nt, Homo Sapiens
cucccaccuguguccuucucuuugcaggagaa

SEQ ID NO: 322608 - RNA, 32 nt, Homo Sapiens
cccaguuuuuauuucuaccuuucugcauucua

SEQ ID NO: 322609 - RNA, 32 nt, Homo Sapiens
aaccuuguuguaaaugugagaaacguuauuua

SEQ ID NO: 322610 - RNA, 32 nt, Homo Sapiens
ucucaucucuacagcauccaccucucuuggcu

SEQ ID NO: 322611 - RNA, 32 nt, Homo Sapiens
guccagcuuuaaaucaagguucauagaaaaga

SEQ ID NO: 322612 - RNA, 32 nt, Homo Sapiens
uuaagaaguuaaguugauauaauagcaaaauu

SEQ ID NO: 322613 - RNA, 32 nt, Homo Sapiens
uguuuaacagcugggagcacuccugcuuccuu

SEQ ID NO: 322614 - RNA, 32 nt, Homo Sapiens
guugcaugcucacaacucugcugacauuggga

SEQ ID NO: 322615 - RNA, 32 nt, Homo Sapiens
gucccagccccgagggcaagcacugaucccuc

SEQ ID NO: 322616 - RNA, 32 nt, Homo Sapiens
agacaguguuuuaugaauuauguaucauguug

SEQ ID NO: 322617 - RNA, 32 nt, Homo Sapiens
accagccugggcaacauagugagaucccaucu

SEQ ID NO: 322618 - RNA, 32 nt, Homo Sapiens
auuuuaugauaaaagauucacgcaccagaagg

SEQ ID NO: 322619 - RNA, 32 nt, Homo Sapiens
cuuuugaucauuauuucuguuuauugguaaua

SEQ ID NO: 322620 - RNA, 32 nt, Homo Sapiens
aaacaagauucuuuuucuuuuuuuuuuuuuuu

SEQ ID NO: 322621 - RNA, 32 nt, Homo Sapiens
gaugaacuuuuguuugaaaggcauaaggagug

SEQ ID NO: 322622 - RNA, 32 nt, Homo Sapiens
cugacagcauucuggcugaggcuggucgguag

SEQ ID NO: 322623 - RNA, 32 nt, Homo Sapiens
cugcccaaggaccugggagcucugcuccccac

SEQ ID NO: 322624 - RNA, 32 nt, Homo Sapiens
aaugaagaugcauuaaagaugauauuuauggc

SEQ ID NO: 322625 - RNA, 32 nt, Homo Sapiens
cuuccuucgucuucugacguggccuauggccc

SEQ ID NO: 322626 - RNA, 32 nt, Homo Sapiens
augcugaaguuaaugucuuauuucauagaauu

SEQ ID NO: 322627 - RNA, 32 nt, Homo Sapiens
gcugucugccgaggagcgccaagaagauguca

SEQ ID NO: 322628 - RNA, 32 nt, Homo Sapiens
ggacuggaacccagauucugugguugcgagcu

SEQ ID NO: 322629 - RNA, 32 nt, Homo Sapiens
aucuguaaauauugcaguuuuuaugauuuugu

SEQ ID NO: 322630 - RNA, 32 nt, Homo Sapiens
gaaucucaugauuugucucuagaugugggagg

SEQ ID NO: 322631 - RNA, 32 nt, Homo Sapiens
gcucucaggggaaccauugugcucucgcuauc

SEQ ID NO: 322632 - RNA, 32 nt, Homo Sapiens
caucaugcuacccaacuucaaacuauacuaca

SEQ ID NO: 322633 - RNA, 32 nt, Homo Sapiens
cuuauguggccaucuacagcacuuaaauaaaa

SEQ ID NO: 322634 - RNA, 32 nt, Homo Sapiens
gagaacagaaauauuuucaaaccuuaggucau

SEQ ID NO: 322635 - RNA, 32 nt, Homo Sapiens
ucggugcgcguggacagcggcugcugggugcu

SEQ ID NO: 322636 - RNA, 32 nt, Homo Sapiens
cuuuuguauaauucaauacaugaucaucaagu

SEQ ID NO: 322637 - RNA, 32 nt, Homo Sapiens
uguuuaauuuauuuauuuacuaacauggccau

SEQ ID NO: 322638 - RNA, 32 nt, Homo Sapiens
cuuuguuuuuauucuguuaaugcauucuuucu

SEQ ID NO: 322639 - RNA, 32 nt, Homo Sapiens
guccuggagugacauacacauccaccauggaa

SEQ ID NO: 322640 - RNA, 32 nt, Homo Sapiens
cuaaagucuuggaauauaucaacaacugauuu

SEQ ID NO: 322641 - RNA, 32 nt, Homo Sapiens
uggcggggagacccgggcgugcgcuccggguc

SEQ ID NO: 322642 - RNA, 32 nt, Homo Sapiens
aacuagagaacuagagcaaacaaaauccaaag

SEQ ID NO: 322643 - RNA, 32 nt, Homo Sapiens
uccugcuggagguuuuaaccuagacaaggauu

SEQ ID NO: 322644 - RNA, 32 nt, Homo Sapiens
agagaacacacacagggaaaacccuaugaaug

SEQ ID NO: 322645 - RNA, 32 nt, Homo Sapiens
augaauacauuuucuucauaacccauuuggaa

SEQ ID NO: 322646 - RNA, 32 nt, Homo Sapiens
aaggccugagcagugcucucggcaucggacca

SEQ ID NO: 322647 - RNA, 30 nt, Homo Sapiens
cuucccacagcauuccuccaucuuagauag

SEQ ID NO: 322648 - RNA, 32 nt, Homo Sapiens
caccugucagggcaggaugguuuugcucaugu

SEQ ID NO: 322649 - RNA, 32 nt, Homo Sapiens
gggccuggggugcauccuccucagcccccagg

SEQ ID NO: 322650 - RNA, 32 nt, Homo Sapiens
caggagccaccucuccuuuauuuauuucuuca

SEQ ID NO: 322651 - RNA, 32 nt, Homo Sapiens
cuggucugccuugcccguuugccuguuccuau

SEQ ID NO: 322652 - RNA, 32 nt, Homo Sapiens
cuuuugcagucuuuuuguuauuaucccaacau

SEQ ID NO: 322653 - RNA, 32 nt, Homo Sapiens
gguagacaagcuccagcagagaguggccagau

SEQ ID NO: 322654 - RNA, 32 nt, Homo Sapiens
cucacagaggagaaacagaaauauaaaauaaa

SEQ ID NO: 322655 - RNA, 32 nt, Homo Sapiens
agacuggccagcccaccucucccggccucugc

SEQ ID NO: 322656 - RNA, 32 nt, Homo Sapiens
ccucacuccugggccugcugggcuuguggcug

SEQ ID NO: 322657 - RNA, 32 nt, Homo Sapiens
caacaguuuuguucuaauuucauuucauuugg

SEQ ID NO: 322658 - RNA, 32 nt, Homo Sapiens
uuucagugcccuggcccuggggugggggacaa

SEQ ID NO: 322659 - RNA, 32 nt, Homo Sapiens
ggucuuugggaggugauguggucaugaaggcu

SEQ ID NO: 322660 - RNA, 32 nt, Homo Sapiens
cuucuugucuccccggcccaggucccucccgc

SEQ ID NO: 322661 - RNA, 32 nt, Homo Sapiens
cugcuacauuuccauuuucauuuucgagccau

SEQ ID NO: 322662 - RNA, 32 nt, Homo Sapiens
auguaaaaugaaauuucauuuguaauuggaaa

SEQ ID NO: 322663 - RNA, 32 nt, Homo Sapiens
ugcccagauuuugguuuccaauaaaaggaacc

SEQ ID NO: 322664 - RNA, 32 nt, Homo Sapiens
cggccaccaaccccauugaaagacuccgacug

SEQ ID NO: 322665 - RNA, 32 nt, Homo Sapiens
ucauuuuuaaacaaacaaaaguauuuaguuau

SEQ ID NO: 322666 - RNA, 32 nt, Homo Sapiens
cuuagguaaaaagcagagguaggggcacagag

SEQ ID NO: 322667 - RNA, 32 nt, Homo Sapiens
accaccuacuucagagaaaggcacuggggacc

SEQ ID NO: 322668 - RNA, 32 nt, Homo Sapiens
acucgggauucuaggaaccucucagucagguc

SEQ ID NO: 322669 - RNA, 32 nt, Homo Sapiens
accucaaguuggauuuuauauuuuaauaagga

SEQ ID NO: 322670 - RNA, 32 nt, Homo Sapiens
uggacgggggccgggggcggggguucgguuug

SEQ ID NO: 322671 - RNA, 32 nt, Homo Sapiens
uugcuacuucaacaucgucuuccaugucuggc

SEQ ID NO: 322672 - RNA, 32 nt, Homo Sapiens
guuuccucugcagcugcuaaaacuacaugugg

SEQ ID NO: 322673 - RNA, 32 nt, Homo Sapiens
gaugaagaucuugauacagacucauuggacug

SEQ ID NO: 322674 - RNA, 32 nt, Homo Sapiens
ccuaccuugggggaaccuggaacuuggaaagg

SEQ ID NO: 322675 - RNA, 32 nt, Homo Sapiens
acacgggaaggggcgcgcgcugcccaaccgcg

SEQ ID NO: 322676 - RNA, 32 nt, Homo Sapiens
ccccauuguauauaaaguaccgcuuaaaauug

SEQ ID NO: 322677 - RNA, 32 nt, Homo Sapiens
ucugucaugugccaccugagccuccaguaaaa

SEQ ID NO: 322678 - RNA, 32 nt, Homo Sapiens
ggagagccagcucucucuacccggcccagaga

SEQ ID NO: 322679 - RNA, 32 nt, Homo Sapiens
ccgcugccuuuugcugcugcugcugcggcgac

SEQ ID NO: 322680 - RNA, 32 nt, Homo Sapiens
acgguaauuucuucauaguuuauuuucauuac

SEQ ID NO: 322681 - RNA, 32 nt, Homo Sapiens
caucauugucgucgucaucaucuugcugagug

SEQ ID NO: 322682 - RNA, 32 nt, Homo Sapiens
ucuucccucccucucgugcugcucaguuuguc

SEQ ID NO: 322683 - RNA, 32 nt, Homo Sapiens
ucacuucauacacacauagauacaacagccac

SEQ ID NO: 322684 - RNA, 32 nt, Homo Sapiens
cauugcagccugguguuuuaccuccuucacuc

SEQ ID NO: 322685 - RNA, 32 nt, Homo Sapiens
ugcaguuuucuuuuuagaguuuauauagggca

SEQ ID NO: 322686 - RNA, 32 nt, Homo Sapiens
aggauucacaugccacugaagcccacucagug

SEQ ID NO: 322687 - RNA, 32 nt, Homo Sapiens
gcauuugcaggcacgcucucgcguaguuaccu

SEQ ID NO: 322688 - RNA, 32 nt, Homo Sapiens
gugaaguuuuguuuuuaaugucuugaguauga

SEQ ID NO: 322689 - RNA, 32 nt, Homo Sapiens
uagcaccuccucccuuuccccaagguagcaca

SEQ ID NO: 322690 - RNA, 32 nt, Homo Sapiens
uagaaaaaaaagacaaaaaaguaaaaauaaaa

SEQ ID NO: 322691 - RNA, 32 nt, Homo Sapiens
cagggcugauauauauuggaaauaucaccccu

SEQ ID NO: 322692 - RNA, 32 nt, Homo Sapiens
cuucaggcaagaaaccacagugauaaccacag

SEQ ID NO: 322693 - RNA, 32 nt, Homo Sapiens
agugccuccagccacacccccugccuucccca

SEQ ID NO: 322694 - RNA, 32 nt, Homo Sapiens
gaagauaaagugaauaaaaguacuuugaaaaa

SEQ ID NO: 322695 - RNA, 32 nt, Homo Sapiens
aggcaaagggaagccggaagagacuggaacag

SEQ ID NO: 322696 - RNA, 31 nt, Homo Sapiens
uccuggaaauaaaaaguugggauauuaacuu

SEQ ID NO: 322697 - RNA, 32 nt, Homo Sapiens
uccccgucuucuccagaacuugugucuccaga

SEQ ID NO: 322698 - RNA, 32 nt, Homo Sapiens
auacaaacaaaguaaaucauaguugguguaaa

SEQ ID NO: 322699 - RNA, 32 nt, Homo Sapiens
aagucccgcuguaaagaucauguuguuuuguu

SEQ ID NO: 322700 - RNA, 32 nt, Homo Sapiens
aaaaaaaauuguaagcacuuuuuuuguaaaac

SEQ ID NO: 322701 - RNA, 32 nt, Homo Sapiens
ggcuguucuugaaauccugaccucaagugauc

SEQ ID NO: 322702 - RNA, 32 nt, Homo Sapiens
gggucagcagcagccaggcgucguggggaggc

SEQ ID NO: 322703 - RNA, 32 nt, Homo Sapiens
gcagagcuuccagaucuuucagacucaacugc

SEQ ID NO: 322704 - RNA, 32 nt, Homo Sapiens
agucacuuucccucuccaggccuccaggccuc

SEQ ID NO: 322705 - RNA, 32 nt, Homo Sapiens
cugaccuuaagugauccacccaccuuggccuc

SEQ ID NO: 322706 - RNA, 32 nt, Homo Sapiens
gggaugucgccuagagccccccggccggccca

SEQ ID NO: 322707 - RNA, 32 nt, Homo Sapiens
cucaauuucagcaaguaccugucaugaagggu

SEQ ID NO: 322708 - RNA, 32 nt, Homo Sapiens
gaugaaauucagaauaauuuuauucaggaccu

SEQ ID NO: 322709 - RNA, 32 nt, Homo Sapiens
uacccgguauuuuaaauguucuguaaauuauu

SEQ ID NO: 322710 - RNA, 32 nt, Homo Sapiens
cuuuugucauuugggugcaggcugugaauuug

SEQ ID NO: 322711 - RNA, 32 nt, Homo Sapiens
uaaggcuauuuuaaaauauguacaauacuauu

SEQ ID NO: 322712 - RNA, 32 nt, Homo Sapiens
ggaagacugauuuuuugagaccaucccugugu

SEQ ID NO: 322713 - RNA, 32 nt, Homo Sapiens
ccaggccucacaggugcucugcucguggcccc

SEQ ID NO: 322714 - RNA, 32 nt, Homo Sapiens
ggucaucagaacuuuaaaaugguagccuacag

SEQ ID NO: 322715 - RNA, 32 nt, Homo Sapiens
uaacggcaggcauggcggccccugaaagacaa

SEQ ID NO: 322716 - RNA, 32 nt, Homo Sapiens
guacucugguggccacuggaucuuugggauua

SEQ ID NO: 322717 - RNA, 32 nt, Homo Sapiens
uucaacucuucccugaacuuccugcuuccuca

SEQ ID NO: 322718 - RNA, 32 nt, Homo Sapiens
guuccagcacaccugcaaagauaaagugugcc

SEQ ID NO: 322719 - RNA, 32 nt, Homo Sapiens
acuugcacacauuuuggagauuguauuuucua

SEQ ID NO: 322720 - RNA, 32 nt, Homo Sapiens
ggcacgggggccgcgccgcgccuugcugcagg

SEQ ID NO: 322721 - RNA, 32 nt, Homo Sapiens
agcggacgguuccuacugcggcugggcaccgg

SEQ ID NO: 322722 - RNA, 27 nt, Homo Sapiens
ggagagcccuucuucccuucuccaccu

SEQ ID NO: 322723 - RNA, 32 nt, Homo Sapiens
uuugcuuuucuuuaaauaaaacguauguauaa

SEQ ID NO: 322724 - RNA, 32 nt, Homo Sapiens
gacaucucuuugaugucauauggaagaguuaa

SEQ ID NO: 322725 - RNA, 32 nt, Homo Sapiens
gauauacaauuagagauauuuuuauauagacc

SEQ ID NO: 322726 - RNA, 32 nt, Homo Sapiens
gucaaggcccgcccggcuaggcgcagagaggc

SEQ ID NO: 322727 - RNA, 32 nt, Homo Sapiens
cgucuccgcaugcacggcugccucuccagcca

SEQ ID NO: 322728 - RNA, 32 nt, Homo Sapiens
cggcagcugcagcagcagcagccccggcggcg

SEQ ID NO: 322729 - RNA, 32 nt, Homo Sapiens
gauggcgcggcacgggccgugcggcuagacgg

SEQ ID NO: 322730 - RNA, 32 nt, Homo Sapiens
cuguuaccggcgggucuuuguucuuagaccug

SEQ ID NO: 322731 - RNA, 32 nt, Homo Sapiens
cugucgguccccagcccugcccggcgggcccg

SEQ ID NO: 322732 - RNA, 32 nt, Homo Sapiens
gggaggaggagcuuaaugccgugcagguugaa

SEQ ID NO: 322733 - RNA, 32 nt, Homo Sapiens
ucgugcuuugcuggccccugcccgcuacuccc

SEQ ID NO: 322734 - RNA, 32 nt, Homo Sapiens
aaagagaaaaaccccugaaaucuuauuucaau

SEQ ID NO: 322735 - RNA, 32 nt, Homo Sapiens
gcggggcggggcccggccaagcggcugccuuu

SEQ ID NO: 322736 - RNA, 32 nt, Homo Sapiens
agccaagauugugccacugcacuccagccuga

SEQ ID NO: 322737 - RNA, 28 nt, Homo Sapiens
ucaaaaguauucaugaugacucuauuug

SEQ ID NO: 322738 - RNA, 32 nt, Homo Sapiens
acucaagauaaaauucuugacuauugaaaugc

SEQ ID NO: 322739 - RNA, 32 nt, Homo Sapiens
ggaaccuugccaaaagaaauggucaaugcaug

SEQ ID NO: 322740 - RNA, 32 nt, Homo Sapiens
aguucucugaugcagaaauuauugggcucuuu

SEQ ID NO: 322741 - RNA, 32 nt, Homo Sapiens
uucucaggccccagcccuuccgaauccgcuac

SEQ ID NO: 322742 - RNA, 32 nt, Homo Sapiens
ucuguacauuaaaauaccugguaaaugaaaau

SEQ ID NO: 322743 - RNA, 32 nt, Homo Sapiens
cacaucccgggcaccucuggcugcugcaggcc

SEQ ID NO: 322744 - RNA, 32 nt, Homo Sapiens
ugucaagcuuuguuacuuuuguuuccuuguuc

SEQ ID NO: 322745 - RNA, 32 nt, Homo Sapiens
cuuagccgggcaucguggugcgugccuguaau

SEQ ID NO: 322746 - RNA, 32 nt, Homo Sapiens
caccuguaauccaagcacuuugggaggccgag

SEQ ID NO: 322747 - RNA, 32 nt, Homo Sapiens
gggaggcacagcucgugggccugggcggaagg

SEQ ID NO: 322748 - RNA, 32 nt, Homo Sapiens
agccccgcugcgccgcgcccuguccccugccc

SEQ ID NO: 322749 - RNA, 32 nt, Homo Sapiens
cgcgcauccucccgccagccugcccgccugcu

SEQ ID NO: 322750 - RNA, 32 nt, Homo Sapiens
aucaaucucuacuagguuauaaguaguauaca

SEQ ID NO: 322751 - RNA, 32 nt, Homo Sapiens
uggucugcuguugagauguuugguaaaugcca

SEQ ID NO: 322752 - RNA, 32 nt, Homo Sapiens
cccucagacauuccaggcauggggcccagcag

SEQ ID NO: 322753 - RNA, 32 nt, Homo Sapiens
accuuuggaagacaugacaaagcugccuggac

SEQ ID NO: 322754 - RNA, 32 nt, Homo Sapiens
aauaaccaccaccagcagcagcagcaauagca

SEQ ID NO: 322755 - RNA, 32 nt, Homo Sapiens
gcagcuccaggcgcgguuccccggcccgcgcc

SEQ ID NO: 322756 - RNA, 32 nt, Homo Sapiens
auaucauagaaaaaauauaagugguugugauu

SEQ ID NO: 322757 - RNA, 32 nt, Homo Sapiens
aagaaaaaauuccacaaugaaagaauguauuu

SEQ ID NO: 322758 - RNA, 32 nt, Homo Sapiens
ggaguguucuuugcuggguccucauguggcag

SEQ ID NO: 322759 - RNA, 32 nt, Homo Sapiens
uccuccugcgcgaggcggccaaggccugcugg

SEQ ID NO: 322760 - RNA, 32 nt, Homo Sapiens
caaagugcauuacugguggaguuuuacagucu

SEQ ID NO: 322761 - RNA, 32 nt, Homo Sapiens
acuccagagggagagaggaagcgcugcaggcc

SEQ ID NO: 322762 - RNA, 32 nt, Homo Sapiens
ccccuuuuaacaaaagagaagaacgaauucca

SEQ ID NO: 322763 - RNA, 32 nt, Homo Sapiens
ucaguccggaggcugcggcugcagaaguaccg

SEQ ID NO: 322764 - RNA, 32 nt, Homo Sapiens
guuuaguguggauuucagcaaaaccugaucau

SEQ ID NO: 322765 - RNA, 32 nt, Homo Sapiens
gaauuugaagaaaaaaugaaugagaacuggaa

SEQ ID NO: 322766 - RNA, 32 nt, Homo Sapiens
gguggagucuugcucugucacccaggcuggag

SEQ ID NO: 322767 - RNA, 32 nt, Homo Sapiens
gcgaucauuucccaagauugguuucccuugag

SEQ ID NO: 322768 - RNA, 32 nt, Homo Sapiens
ggcggagucucgcucugucacccaggcuggag

SEQ ID NO: 322769 - RNA, 32 nt, Homo Sapiens
aguagcuugcugucaaagaaacaccugagaug

SEQ ID NO: 322770 - RNA, 32 nt, Homo Sapiens
cuaggaccggugccagcccugacuccgccgcc

SEQ ID NO: 322771 - RNA, 32 nt, Homo Sapiens
uugcucuggauggaccugcugauucaagugac

SEQ ID NO: 322772 - RNA, 32 nt, Homo Sapiens
ucagcaccaagcauguccaggcacuguacuaa

SEQ ID NO: 322773 - RNA, 32 nt, Homo Sapiens
cauccugaguggcaccugagguucuuugagcu

SEQ ID NO: 322774 - RNA, 32 nt, Homo Sapiens
ggcggggggagggcgcgaggcuuuuggagcgg

SEQ ID NO: 322775 - RNA, 32 nt, Homo Sapiens
uucagagguaguaacugucauucuucaaucag

SEQ ID NO: 322776 - RNA, 32 nt, Homo Sapiens
uucuuagaaacgcagugaaagggaggaacuug

SEQ ID NO: 322777 - RNA, 32 nt, Homo Sapiens
ucuuggaaaugaauaagcuuugauaauauuug

SEQ ID NO: 322778 - RNA, 32 nt, Homo Sapiens
accaauacugaaugauacuuaaccguaaaacu

SEQ ID NO: 322779 - RNA, 32 nt, Homo Sapiens
uaugaagguugacggugaaauauuuuauuuuc

SEQ ID NO: 322780 - RNA, 32 nt, Homo Sapiens
gagccagccagacuccucggaggagaagucag

SEQ ID NO: 322781 - RNA, 32 nt, Homo Sapiens
acugaggugucugaugaggauguacuuuggug

SEQ ID NO: 322782 - RNA, 32 nt, Homo Sapiens
cugaagucaggaguucgagacuagccuggcca

SEQ ID NO: 322783 - RNA, 32 nt, Homo Sapiens
aacugugcaucagaaaacacacaggggagaag

SEQ ID NO: 322784 - RNA, 32 nt, Homo Sapiens
gccagccccggcaugcucugcggccgcccgcg

SEQ ID NO: 322785 - RNA, 32 nt, Homo Sapiens
uuugacucaauccuuuucuggaccauuuuugu

SEQ ID NO: 322786 - RNA, 32 nt, Homo Sapiens
gagggcgucuucacgcaggcaccgagaagcuc

SEQ ID NO: 322787 - RNA, 32 nt, Homo Sapiens
ccaucagcuccugaaucagggauuuucagcac

SEQ ID NO: 322788 - RNA, 32 nt, Homo Sapiens
auacuuguacuccuuaaauuuauauaaaaaua

SEQ ID NO: 322789 - RNA, 32 nt, Homo Sapiens
cuggggucggggggcuuuugcagcucugguga

SEQ ID NO: 322790 - RNA, 32 nt, Homo Sapiens
cgccccucgccuaaccucccgccgggccgcgc

SEQ ID NO: 322791 - RNA, 32 nt, Homo Sapiens
gauauuuaaacuaagaaaaauguuuagucuga

SEQ ID NO: 322792 - RNA, 32 nt, Homo Sapiens
acccgacuccucaaaagcaaaugagaucccgc

SEQ ID NO: 322793 - RNA, 32 nt, Homo Sapiens
ccuccaaaacauccuuuagaugcaaaauaaua

SEQ ID NO: 322794 - RNA, 31 nt, Homo Sapiens
ggucuguuccagucgauucaagaugaacugg

SEQ ID NO: 322795 - RNA, 32 nt, Homo Sapiens
gcaagagaaaucacagugccuucuacagaauu

SEQ ID NO: 322796 - RNA, 32 nt, Homo Sapiens
aauuaaacucagauaucagcucugcuauuuuc

SEQ ID NO: 322797 - RNA, 32 nt, Homo Sapiens
ugcgguggaggcuggcgcuaggcggccucagc

SEQ ID NO: 322798 - RNA, 32 nt, Homo Sapiens
auuguucuaaaauuauauaaaacuauuuguua

SEQ ID NO: 322799 - RNA, 32 nt, Homo Sapiens
aacggaaggguucagcugcugcucccaauacc

SEQ ID NO: 322800 - RNA, 32 nt, Homo Sapiens
uguuacuguuucugccuguuaaugcugggaac

SEQ ID NO: 322801 - RNA, 32 nt, Homo Sapiens
uuaagacucuguuuuuucuacugcuucacauu

SEQ ID NO: 322802 - RNA, 32 nt, Homo Sapiens
gugcuccauuggcugcggcugcaggaggaaga

SEQ ID NO: 322803 - RNA, 30 nt, Homo Sapiens
gugccccaggcgcagcacaggucuccagag

SEQ ID NO: 322804 - RNA, 32 nt, Homo Sapiens
agacauggagguguucaagagcagccaggagg

SEQ ID NO: 322805 - RNA, 32 nt, Homo Sapiens
ggaaacggcagugauugggguggugguggugc

SEQ ID NO: 322806 - RNA, 32 nt, Homo Sapiens
cucgggcccgccacgcgccgccacgagugagc

SEQ ID NO: 322807 - RNA, 32 nt, Homo Sapiens
ucuuagcauggaaauaaauaaaccugaaugua

SEQ ID NO: 322808 - RNA, 32 nt, Homo Sapiens
uuugacuauagagauuauuucuguaaaugaaa

SEQ ID NO: 322809 - RNA, 32 nt, Homo Sapiens
uaucaguggggggacuuaauucuaaucucauu

SEQ ID NO: 322810 - RNA, 32 nt, Homo Sapiens
aaguguaggaggaaggaagagauacaaacaag

SEQ ID NO: 322811 - RNA, 32 nt, Homo Sapiens
uguguucugccagcccgaugucacuucuucau

SEQ ID NO: 322812 - RNA, 32 nt, Homo Sapiens
uccuuaaaucuucuccucuccagauauuuaug

SEQ ID NO: 322813 - RNA, 32 nt, Homo Sapiens
cuuuucuuucuuucuuuuuuucuuuuuuaaag

SEQ ID NO: 322814 - RNA, 32 nt, Homo Sapiens
ccuugugugucuguuacuucugagugcauuuc

SEQ ID NO: 322815 - RNA, 32 nt, Homo Sapiens
uuggugacuuuugucaccuggacacacucauu

SEQ ID NO: 322816 - RNA, 32 nt, Homo Sapiens
acacaaauaugauauuaguugcuuuuaaggag

SEQ ID NO: 322817 - RNA, 28 nt, Homo Sapiens
ccuggaacuucuaccaggacgacgauuu

SEQ ID NO: 322818 - RNA, 32 nt, Homo Sapiens
aguagaagaacaaucuaaaaaccaaaagaaca

SEQ ID NO: 322819 - RNA, 32 nt, Homo Sapiens
auuguaguaaaugugaaaagaguuuuauccaa

SEQ ID NO: 322820 - RNA, 32 nt, Homo Sapiens
uagcuuuaauagacagaaugggagaugccaaa

SEQ ID NO: 322821 - RNA, 32 nt, Homo Sapiens
gacaacugaaguucuuaguuauuuguuaguau

SEQ ID NO: 322822 - RNA, 29 nt, Homo Sapiens
gcauucaccaaauaaacuugcucucuggg

SEQ ID NO: 322823 - RNA, 32 nt, Homo Sapiens
ggcugaagaaggagcuucuucuccggagugcg

SEQ ID NO: 322824 - RNA, 32 nt, Homo Sapiens
aguagaggaaauggacaaggucaguuugaaua

SEQ ID NO: 322825 - RNA, 28 nt, Homo Sapiens
aucugaaagaaauaacauuuuuuaaggc

SEQ ID NO: 322826 - RNA, 32 nt, Homo Sapiens
agggcuguuuugaggucaucuccagcuccauu

SEQ ID NO: 322827 - RNA, 32 nt, Homo Sapiens
gcagagccaaucuugcaaacuggccauggaug

SEQ ID NO: 322828 - RNA, 32 nt, Homo Sapiens
caggacagcuucagacccccacacccucuccu

SEQ ID NO: 322829 - RNA, 32 nt, Homo Sapiens
uuuccuauauauauguauauguuuuauauaug

SEQ ID NO: 322830 - RNA, 32 nt, Homo Sapiens
ccuuccgagcgcgggcgcuggacgccgccaag

SEQ ID NO: 322831 - RNA, 32 nt, Homo Sapiens
uauuuuuuuaagucaguauggucuaacacugg

SEQ ID NO: 322832 - RNA, 32 nt, Homo Sapiens
cagacggcagucgggccccagagcaagaaggc

SEQ ID NO: 322833 - RNA, 32 nt, Homo Sapiens
gaguuacacguacucauuacauuuucagugcu

SEQ ID NO: 322834 - RNA, 32 nt, Homo Sapiens
ucaaaagaauauuauuugauuuauggaaucac

SEQ ID NO: 322835 - RNA, 32 nt, Homo Sapiens
aggaagcaccucugugucagggcucaccuggg

SEQ ID NO: 322836 - RNA, 32 nt, Homo Sapiens
cauucaugaugcaaaaucaguggcaaggugcc

SEQ ID NO: 322837 - RNA, 32 nt, Homo Sapiens
uugaauaggggcuggggugcugucuuccacug

SEQ ID NO: 322838 - RNA, 32 nt, Homo Sapiens
uguuccuuuuauuuaacauuguaaucuaaguu

SEQ ID NO: 322839 - RNA, 32 nt, Homo Sapiens
gugugucuugguuuuucuuggcuacagaaaaa

SEQ ID NO: 322840 - RNA, 32 nt, Homo Sapiens
agcuggucuggccccugaaagccuucaccuga

SEQ ID NO: 322841 - RNA, 27 nt, Homo Sapiens
ccagugaccucccucagcccccagggg

SEQ ID NO: 322842 - RNA, 32 nt, Homo Sapiens
agaagacagcagagaccaugggaccccccuca

SEQ ID NO: 322843 - RNA, 32 nt, Homo Sapiens
gacccaugcugccacagccugauauuccagaa

SEQ ID NO: 322844 - RNA, 32 nt, Homo Sapiens
cugcggaauggcaaggaaucagcucuccauuu

SEQ ID NO: 322845 - RNA, 32 nt, Homo Sapiens
auagccaaaaaguggaaacaacccaaaugucu

SEQ ID NO: 322846 - RNA, 32 nt, Homo Sapiens
cuguccagccccaccccuaagccgucuuuccc

SEQ ID NO: 322847 - RNA, 32 nt, Homo Sapiens
cccacuccacuuuccuccacagaugccucuuc

SEQ ID NO: 322848 - RNA, 32 nt, Homo Sapiens
aauuaaaaaaacaaaaauguacaugugauguu

SEQ ID NO: 322849 - RNA, 32 nt, Homo Sapiens
ucagucacucuguaaauauacauauuguuuuc

SEQ ID NO: 322850 - RNA, 32 nt, Homo Sapiens
aauauggacaugagaauuuacaauuaagaaaa

SEQ ID NO: 322851 - RNA, 32 nt, Homo Sapiens
agcacuggacuccauucaugcaugagcauuuu

SEQ ID NO: 322852 - RNA, 32 nt, Homo Sapiens
aggagugggggacagggcuagaagcugcauua

SEQ ID NO: 322853 - RNA, 32 nt, Homo Sapiens
ggcuggucucaaacuccugaccucaagugagc

SEQ ID NO: 322854 - RNA, 32 nt, Homo Sapiens
uucuaggguaugaagaucuuucuaaauauugu

SEQ ID NO: 322855 - RNA, 32 nt, Homo Sapiens
acuguauuagacaguaaccucuaaccucaccu

SEQ ID NO: 322856 - RNA, 32 nt, Homo Sapiens
auaaaacaaaaauuucuagguauuugcuuuau

SEQ ID NO: 322857 - RNA, 32 nt, Homo Sapiens
gcggguccggcgcgcgggaggcgaugacggcc

SEQ ID NO: 322858 - RNA, 32 nt, Homo Sapiens
cuaguuuuauucugauucuccucauucccuag

SEQ ID NO: 322859 - RNA, 32 nt, Homo Sapiens
uuuaacacaauuuucuuuaaaguuuucuacau

SEQ ID NO: 322860 - RNA, 32 nt, Homo Sapiens
accuccguuuucuccgucagacuucucucccu

SEQ ID NO: 322861 - RNA, 32 nt, Homo Sapiens
uuuaaacgaagagacagaacuguccacaucug

SEQ ID NO: 322862 - RNA, 32 nt, Homo Sapiens
agcggcggggcucugggcgcgcggcuggaugc

SEQ ID NO: 322863 - RNA, 32 nt, Homo Sapiens
ggcccuccucugcuccuccccacacccugcag

SEQ ID NO: 322864 - RNA, 32 nt, Homo Sapiens
cucuauucccccagccccucacugccuggggg

SEQ ID NO: 322865 - RNA, 32 nt, Homo Sapiens
guuaaaaauggcaagacaguuuauuuaagagc

SEQ ID NO: 322866 - RNA, 32 nt, Homo Sapiens
accauugcacuccagccugggcgacaggguga

SEQ ID NO: 322867 - RNA, 32 nt, Homo Sapiens
gcugagagugccagcaagauguacuucauuau

SEQ ID NO: 322868 - RNA, 32 nt, Homo Sapiens
aacaucaaauggaagucaaauuccuaaugcau

SEQ ID NO: 322869 - RNA, 32 nt, Homo Sapiens
caccaguguuggagaauggggccuguuaggaa

SEQ ID NO: 322870 - RNA, 32 nt, Homo Sapiens
uguguguacauaucuaggcaucuauuuaugua

SEQ ID NO: 322871 - RNA, 32 nt, Homo Sapiens
gccggccggccagucaccggagggaucccgcc

SEQ ID NO: 322872 - RNA, 30 nt, Homo Sapiens
aaggcgauuggaugcggcggcggcggcgga

SEQ ID NO: 322873 - RNA, 32 nt, Homo Sapiens
uaaggaagcuccugggggcuugaggggguggc

SEQ ID NO: 322874 - RNA, 29 nt, Homo Sapiens
uacaccucuauccaccacagacacucuua

SEQ ID NO: 322875 - RNA, 32 nt, Homo Sapiens
uaaauaggaucuuuaagaaauuuuuugaaagu

SEQ ID NO: 322876 - RNA, 32 nt, Homo Sapiens
cgcgggggcugggauucacgcccagaaguuca

SEQ ID NO: 322877 - RNA, 32 nt, Homo Sapiens
aagacagcccaguggaaugagaaacuaaugag

SEQ ID NO: 322878 - RNA, 32 nt, Homo Sapiens
uuucuuuauuuuguauaugaucaauaaaccuu

SEQ ID NO: 322879 - RNA, 32 nt, Homo Sapiens
ccgccgcggcccggcagacugccucugucacc

SEQ ID NO: 322880 - RNA, 32 nt, Homo Sapiens
aggacuaggaggaggaggaggagccgucgcag

SEQ ID NO: 322881 - RNA, 32 nt, Homo Sapiens
acgagaagagcuaggguagagaaggacgcaaa

SEQ ID NO: 322882 - RNA, 32 nt, Homo Sapiens
ggcagacccagcugagucacugucacugccua

SEQ ID NO: 322883 - RNA, 32 nt, Homo Sapiens
uucacugccccucucccucaagccuaagacac

SEQ ID NO: 322884 - RNA, 32 nt, Homo Sapiens
gacuuguucucuauucccccagccccucacug

SEQ ID NO: 322885 - RNA, 32 nt, Homo Sapiens
guggcuucaggaagaggagggcaaggugucug

SEQ ID NO: 322886 - RNA, 32 nt, Homo Sapiens
cccaugggaauccuguccugccucgaaggagc

SEQ ID NO: 322887 - RNA, 32 nt, Homo Sapiens
ucuaauuuuuauuuuuuauuuuuccguucuag

SEQ ID NO: 322888 - RNA, 32 nt, Homo Sapiens
cagcagaaaucgaagcaaacaugucuggagaa

SEQ ID NO: 322889 - RNA, 32 nt, Homo Sapiens
cacuuugagaucugggcaccugcuggaaccug

SEQ ID NO: 322890 - RNA, 32 nt, Homo Sapiens
ccuccgagucucucauggcaucuccagcuccu

SEQ ID NO: 322891 - RNA, 32 nt, Homo Sapiens
caccacgcgggccagccucucucuuuugcccu

SEQ ID NO: 322892 - RNA, 32 nt, Homo Sapiens
uuacugcaacuuccagcuccuggguucgaacg

SEQ ID NO: 322893 - RNA, 32 nt, Homo Sapiens
ggaguccgccgcggcucgcucugucgccggcg

SEQ ID NO: 322894 - RNA, 32 nt, Homo Sapiens
uucucaacauggcccaggauuacgcagccaug

SEQ ID NO: 322895 - RNA, 30 nt, Homo Sapiens
ggaauggauuccccugccuggagccuccaa

SEQ ID NO: 322896 - RNA, 31 nt, Homo Sapiens
aagcguuaguuccaaaguucaguguguaccc

SEQ ID NO: 322897 - RNA, 32 nt, Homo Sapiens
ugcauuugugaagaacgcuugucccuccagac

SEQ ID NO: 322898 - RNA, 32 nt, Homo Sapiens
ugaaaauuggaaagaugguauacuguuuuuag

SEQ ID NO: 322899 - RNA, 32 nt, Homo Sapiens
ggcuccagcuccugcggcuccuccuccuuauu

SEQ ID NO: 322900 - RNA, 32 nt, Homo Sapiens
cucggcuucccccggcaccccucccccucggg

SEQ ID NO: 322901 - RNA, 32 nt, Homo Sapiens
ccccacgccaaugaguuccuggacgggccgga

SEQ ID NO: 322902 - RNA, 32 nt, Homo Sapiens
ucgccaccuggacagcgugaccucagggguug

SEQ ID NO: 322903 - RNA, 32 nt, Homo Sapiens
gcuaauuucuuacacaucuuuuuucuccuuag

SEQ ID NO: 322904 - RNA, 32 nt, Homo Sapiens
ucuaaagaaauuacaggugggauaugcuagaa

SEQ ID NO: 322905 - RNA, 31 nt, Homo Sapiens
ccagacaugcugcugcugcugcugcugcugc

SEQ ID NO: 322906 - RNA, 32 nt, Homo Sapiens
guucucacucacgcccugcccgggcagacaug

SEQ ID NO: 322907 - RNA, 32 nt, Homo Sapiens
gccagcgggggaagaggggcuggcucucaguc

SEQ ID NO: 322908 - RNA, 32 nt, Homo Sapiens
ugaguagagagaaauaggaauugucuuuggau

SEQ ID NO: 322909 - RNA, 32 nt, Homo Sapiens
gucagagaaaaaagccauucacagguauauag

SEQ ID NO: 322910 - RNA, 32 nt, Homo Sapiens
gcaauaaaaaaauuacccugaucugauagaaa

SEQ ID NO: 322911 - RNA, 32 nt, Homo Sapiens
ggugacugguuggagccuggaauuggaagcag

SEQ ID NO: 322912 - RNA, 32 nt, Homo Sapiens
agcaccucagucucugacuccagccgcacacc

SEQ ID NO: 322913 - RNA, 32 nt, Homo Sapiens
ugugacagcucuuguccacgugcguucucacu

SEQ ID NO: 322914 - RNA, 28 nt, Homo Sapiens
caccagauggcuaccaaaugauaagaac

SEQ ID NO: 322915 - RNA, 32 nt, Homo Sapiens
ugguuacgguuacagaggggcugggguguuua

SEQ ID NO: 322916 - RNA, 32 nt, Homo Sapiens
gcucccucccauuuccucuuuuccgcucgggc

SEQ ID NO: 322917 - RNA, 32 nt, Homo Sapiens
gccgcgcgcuggcgcugcuggaagacgaggag

SEQ ID NO: 322918 - RNA, 32 nt, Homo Sapiens
gaggcaggcagggacccugggguccagcgcug

SEQ ID NO: 322919 - RNA, 32 nt, Homo Sapiens
cugcccaaggccagccagccugagcucuccug

SEQ ID NO: 322920 - RNA, 32 nt, Homo Sapiens
agguggcuggagccccggcacagagacugaac

SEQ ID NO: 322921 - RNA, 32 nt, Homo Sapiens
caucuucuacccccaucacuguauagugaaaa

SEQ ID NO: 322922 - RNA, 32 nt, Homo Sapiens
gagcacaauuuccauauucauagacuacagcc

SEQ ID NO: 322923 - RNA, 32 nt, Homo Sapiens
uagcugcccuuaaagaguuguuagcagagaga

SEQ ID NO: 322924 - RNA, 32 nt, Homo Sapiens
ugacuguguuugugcacucuuauuucugaguu

SEQ ID NO: 322925 - RNA, 32 nt, Homo Sapiens
cuucacccaagccucacugucccucuccggcu

SEQ ID NO: 322926 - RNA, 32 nt, Homo Sapiens
agggggcaggcugagggucgugggaaagggga

SEQ ID NO: 322927 - RNA, 32 nt, Homo Sapiens
auugcauuuuuggucagacgcugucauugaug

SEQ ID NO: 322928 - RNA, 32 nt, Homo Sapiens
aggcaguuaaauaauaauaguuaaugaaggug

SEQ ID NO: 322929 - RNA, 32 nt, Homo Sapiens
ccaccauuggccacuugauguacacccggugc

SEQ ID NO: 322930 - RNA, 32 nt, Homo Sapiens
gcucacuguggaguauccauggagauguggag

SEQ ID NO: 322931 - RNA, 32 nt, Homo Sapiens
gccgagacaaaccggacccgcaaccaccauga

SEQ ID NO: 322932 - RNA, 32 nt, Homo Sapiens
gcagagaagaacauaagaagaaaaacccagaa

SEQ ID NO: 322933 - RNA, 32 nt, Homo Sapiens
uaacgaugaugaugauaauagcuauacaugaa

SEQ ID NO: 322934 - RNA, 32 nt, Homo Sapiens
ucuuuuguuuauuuauuuuucuuuguucacuc

SEQ ID NO: 322935 - RNA, 32 nt, Homo Sapiens
ggaagugacaacaugacgagggguggugcugg

SEQ ID NO: 322936 - RNA, 32 nt, Homo Sapiens
caucagggaggauguccaccuugcuugguggc

SEQ ID NO: 322937 - RNA, 32 nt, Homo Sapiens
uugcuacaaaaauauuaauauauuucauuacu

SEQ ID NO: 322938 - RNA, 32 nt, Homo Sapiens
gcuguggcuggguagcugcagcagugccucgg

SEQ ID NO: 322939 - RNA, 32 nt, Homo Sapiens
cugguuacgacgggacucgauccagaggcuuc

SEQ ID NO: 322940 - RNA, 32 nt, Homo Sapiens
ccgggccgcgcgccgccaugcugggccuggac

SEQ ID NO: 322941 - RNA, 32 nt, Homo Sapiens
cagcaagcgccgggcugcgggguggugagcag

SEQ ID NO: 322942 - RNA, 32 nt, Homo Sapiens
ccugcugucuacucagacgcuugccuacugaa

SEQ ID NO: 322943 - RNA, 32 nt, Homo Sapiens
cccccuccgcggugggggcuuggaggugggcg

SEQ ID NO: 322944 - RNA, 32 nt, Homo Sapiens
uuuuguuaauguaauauuuuaauagcaaagau

SEQ ID NO: 322945 - RNA, 32 nt, Homo Sapiens
cgggcacgcccggcaggguccugggggcgcag

SEQ ID NO: 322946 - RNA, 32 nt, Homo Sapiens
ccgggaacgccgcgacccggggccggugcugc

SEQ ID NO: 322947 - RNA, 31 nt, Homo Sapiens
aguaggaaauaaaaauggaagcuauuaugac

SEQ ID NO: 322948 - RNA, 32 nt, Homo Sapiens
guggcgaugugguggcccaggaggcggcagga

SEQ ID NO: 322949 - RNA, 32 nt, Homo Sapiens
ccaauugauaaaaugaauauaaaguauuucau

SEQ ID NO: 322950 - RNA, 32 nt, Homo Sapiens
agugucugcuucauccguggaacuugaggcuc

SEQ ID NO: 322951 - RNA, 32 nt, Homo Sapiens
agccgggcagugcccuccccgucccaugcucg

SEQ ID NO: 322952 - RNA, 32 nt, Homo Sapiens
uaauuaucugaucgggauaacaaaaucacaag

SEQ ID NO: 322953 - RNA, 32 nt, Homo Sapiens
aaaucagucaacaugcaaaagucagaagcauu

SEQ ID NO: 322954 - RNA, 32 nt, Homo Sapiens
gccguccuugcccccaggacucggccccaugg

SEQ ID NO: 322955 - RNA, 32 nt, Homo Sapiens
auuauuugagacagaguuuugcucuuauugcc

SEQ ID NO: 322956 - RNA, 32 nt, Homo Sapiens
uagguauguuugcaggagaaaaguaucaagac

SEQ ID NO: 322957 - RNA, 32 nt, Homo Sapiens
uggcacacaccuguagucccagcugcuccuga

SEQ ID NO: 322958 - RNA, 32 nt, Homo Sapiens
cucugccuuggaccagacaauuccuggacaga

SEQ ID NO: 322959 - RNA, 32 nt, Homo Sapiens
augcagggggagagcacaggacuggcccugcu

SEQ ID NO: 322960 - RNA, 32 nt, Homo Sapiens
caugucuuaagucuuuuuguuuuguuuuguuu

SEQ ID NO: 322961 - RNA, 32 nt, Homo Sapiens
ugauggagggaaaaagggcauguaucucauuc

SEQ ID NO: 322962 - RNA, 32 nt, Homo Sapiens
ucuacacuggaagccaacuugcuggcaccccc

SEQ ID NO: 322963 - RNA, 32 nt, Homo Sapiens
cugggucaugccauccuacaccaaauuccugu

SEQ ID NO: 322964 - RNA, 32 nt, Homo Sapiens
aacgaguucgccuucucgcccgauggccggca

SEQ ID NO: 322965 - RNA, 32 nt, Homo Sapiens
aaucauguguucaguagccguccucugagcag

SEQ ID NO: 322966 - RNA, 32 nt, Homo Sapiens
ggcccucucccuccccggcggugguuggaaca

SEQ ID NO: 322967 - RNA, 32 nt, Homo Sapiens
guuaggucuuuauuuuuccccagugcucugaa

SEQ ID NO: 322968 - RNA, 32 nt, Homo Sapiens
acaucucuaaguuuuaucuuugcaauacucaa

SEQ ID NO: 322969 - RNA, 32 nt, Homo Sapiens
acccccuucccuccccggguuugcaaauagag

SEQ ID NO: 322970 - RNA, 32 nt, Homo Sapiens
auuuguagugauugcaugcuuacguaacuucc

SEQ ID NO: 322971 - RNA, 31 nt, Homo Sapiens
ccaagcccgccuccagcaccaagggcgggca

SEQ ID NO: 322972 - RNA, 32 nt, Homo Sapiens
ggccagugcaccuuccggggccccaucccuua

SEQ ID NO: 322973 - RNA, 32 nt, Homo Sapiens
ugcauaauuuugcugcuucucaauaucauaga

SEQ ID NO: 322974 - RNA, 32 nt, Homo Sapiens
gcgcccgcgggcccggccgagcaggagcagcu

SEQ ID NO: 322975 - RNA, 32 nt, Homo Sapiens
cgugggggcguggucaggccgaggcugcuacc

SEQ ID NO: 322976 - RNA, 32 nt, Homo Sapiens
gcauguggacauuuuuauaauguaauuacaau

SEQ ID NO: 322977 - RNA, 32 nt, Homo Sapiens
gggggugaagugcacuccugcugcaugagugg

SEQ ID NO: 322978 - RNA, 32 nt, Homo Sapiens
ccuggcuuuaaagauuggagaagagcuucugg

SEQ ID NO: 322979 - RNA, 32 nt, Homo Sapiens
gcaagcagcaagcagccagaaguuuaggcggu

SEQ ID NO: 322980 - RNA, 32 nt, Homo Sapiens
ccagggaugggucuucucugacccagccagca

SEQ ID NO: 322981 - RNA, 32 nt, Homo Sapiens
ugguccugauucuuggccuccucccaccagaa

SEQ ID NO: 322982 - RNA, 32 nt, Homo Sapiens
aauguuacuaaguuuaaugccuggccauuuuc

SEQ ID NO: 322983 - RNA, 32 nt, Homo Sapiens
cugucagugucucauugagugucgcacaauau

SEQ ID NO: 322984 - RNA, 32 nt, Homo Sapiens
cccagccgccccagccucacgcugucugaucc

SEQ ID NO: 322985 - RNA, 32 nt, Homo Sapiens
cauaacaccaaucagaccguguggauuuuucu

SEQ ID NO: 322986 - RNA, 32 nt, Homo Sapiens
agaguagaacuaauuuuagauuuuucaaauug

SEQ ID NO: 322987 - RNA, 32 nt, Homo Sapiens
ucuauauacacauuuuaaacauuauucuucau

SEQ ID NO: 322988 - RNA, 32 nt, Homo Sapiens
caaauccaagggaccauagccuuuuuaugaga

SEQ ID NO: 322989 - RNA, 32 nt, Homo Sapiens
ccuggaaagggagguggcauccagauuugggc

SEQ ID NO: 322990 - RNA, 32 nt, Homo Sapiens
aucucuuauuaaaacuaacaugaaauaugugu

SEQ ID NO: 322991 - RNA, 32 nt, Homo Sapiens
acgaggucaggagaucgagaccagccugacca

SEQ ID NO: 322992 - RNA, 32 nt, Homo Sapiens
ccaaaugaguacuuauauauggaucucuguag

SEQ ID NO: 322993 - RNA, 32 nt, Homo Sapiens
accauugcuccacgcccucccaccuuuucuuu

SEQ ID NO: 322994 - RNA, 32 nt, Homo Sapiens
gccccucugcccggcagcgccgcgcaccaugg

SEQ ID NO: 322995 - RNA, 32 nt, Homo Sapiens
uuuaaauguuaaaauucgauuuuguuacacag

SEQ ID NO: 322996 - RNA, 26 nt, Homo Sapiens
uaugcuuccagaaaaaucucaaggaa

SEQ ID NO: 322997 - RNA, 32 nt, Homo Sapiens
guauuuauaaagauuauauauguaguuuccaa

SEQ ID NO: 322998 - RNA, 32 nt, Homo Sapiens
uugugaagugucauaacaggcauaacauauuu

SEQ ID NO: 322999 - RNA, 32 nt, Homo Sapiens
guuggcaguuuaggaccugcugucauaaaugu

SEQ ID NO: 323000 - RNA, 32 nt, Homo Sapiens
agugggcggggccaggggaggggcgggcaggu

SEQ ID NO: 323001 - RNA, 32 nt, Homo Sapiens
guuguagauaaaaugucaugucucaugugucc

SEQ ID NO: 323002 - RNA, 32 nt, Homo Sapiens
accuccgccucccggcuucaagugauucuccu

SEQ ID NO: 323003 - RNA, 32 nt, Homo Sapiens
auacaaucuuuacagccuauggauagacccuc

SEQ ID NO: 323004 - RNA, 32 nt, Homo Sapiens
acguuaccaauuuucauacuuacuaaagggau

SEQ ID NO: 323005 - RNA, 32 nt, Homo Sapiens
auucuuuuaaaauaaaauuaauauuuauaaug

SEQ ID NO: 323006 - RNA, 32 nt, Homo Sapiens
gaccaggaccugguggcccccgggcgguggca

SEQ ID NO: 323007 - RNA, 32 nt, Homo Sapiens
gcuuccauauauauuuucuuaccuaagagaau

SEQ ID NO: 323008 - RNA, 32 nt, Homo Sapiens
caucucugcagaccccucuccuccuccuuccu

SEQ ID NO: 323009 - RNA, 31 nt, Homo Sapiens
cugugcuuuccacaaauaaaguuccugacac

SEQ ID NO: 323010 - RNA, 32 nt, Homo Sapiens
gaccgaagggguaggaggagccugcggcggcg

SEQ ID NO: 323011 - RNA, 32 nt, Homo Sapiens
aaaauacaaaaaugaguuuugcaaauguaaua

SEQ ID NO: 323012 - RNA, 32 nt, Homo Sapiens
cuggcugagaaggggaggauccuguccuggcu

SEQ ID NO: 323013 - RNA, 32 nt, Homo Sapiens
agaaugaaauugcugaaagaucuuucaggacu

SEQ ID NO: 323014 - RNA, 32 nt, Homo Sapiens
cccaggucccaugggggcagcuccaucccaga

SEQ ID NO: 323015 - RNA, 32 nt, Homo Sapiens
aguggcaauuuaauaguuauucauguuugagu

SEQ ID NO: 323016 - RNA, 32 nt, Homo Sapiens
cuaaaagaugacuuagaaaucaaacuauaaga

SEQ ID NO: 323017 - RNA, 32 nt, Homo Sapiens
cuuagguaaaagucuugggaaauauuugggca

SEQ ID NO: 323018 - RNA, 32 nt, Homo Sapiens
cuguggacaauaacugaugaauauagggccca

SEQ ID NO: 323019 - RNA, 32 nt, Homo Sapiens
ucugagaaucacauuuucagugcauugaauau

SEQ ID NO: 323020 - RNA, 32 nt, Homo Sapiens
agaacgggacaaaggaggggcagcagggugug

SEQ ID NO: 323021 - RNA, 32 nt, Homo Sapiens
aggcugaggcggaggcaggauugcuugauaug

SEQ ID NO: 323022 - RNA, 32 nt, Homo Sapiens
acgguggacagagggugacaucauaggagcag

SEQ ID NO: 323023 - RNA, 32 nt, Homo Sapiens
uguuuucuuggugccauuuucauuuuauuuua

SEQ ID NO: 323024 - RNA, 32 nt, Homo Sapiens
uauaaugguuaugcuagguuuaucucuccucu

SEQ ID NO: 323025 - RNA, 32 nt, Homo Sapiens
caggcccagaacugccucacuaagcuauacaa

SEQ ID NO: 323026 - RNA, 32 nt, Homo Sapiens
ccuggagaguccggccaaccugucccagccaa

SEQ ID NO: 323027 - RNA, 32 nt, Homo Sapiens
ccccuuccugucauccucuaugucccacuguc

SEQ ID NO: 323028 - RNA, 32 nt, Homo Sapiens
cagcuccaugcauacccagagcccggagagau

SEQ ID NO: 323029 - RNA, 32 nt, Homo Sapiens
agagagagaccacugcccuuugugguuggaca

SEQ ID NO: 323030 - RNA, 32 nt, Homo Sapiens
uuuauuacuggaggaagugugaagauaacuuu

SEQ ID NO: 323031 - RNA, 32 nt, Homo Sapiens
agacgccgccugccuggcaccuaggagcgcag

SEQ ID NO: 323032 - RNA, 32 nt, Homo Sapiens
gaaauauuccuccauagaaauauuucaauucc

SEQ ID NO: 323033 - RNA, 32 nt, Homo Sapiens
uuuuaggggcagcaaugcugaaggacacagca

SEQ ID NO: 323034 - RNA, 32 nt, Homo Sapiens
gcccaucgccacgauagcggcuccacggcggg

SEQ ID NO: 323035 - RNA, 32 nt, Homo Sapiens
aacccauugucagaucagcaucaggcuguuau

SEQ ID NO: 323036 - RNA, 32 nt, Homo Sapiens
aaacauaguuuauguuuuuggccaccccgacc

SEQ ID NO: 323037 - RNA, 32 nt, Homo Sapiens
cuuguucagguagucgcccuucugguuuguuc

SEQ ID NO: 323038 - RNA, 32 nt, Homo Sapiens
uugccuuccagaaaacaaaacugcauuucacu

SEQ ID NO: 323039 - RNA, 32 nt, Homo Sapiens
uugauucuguuuucauggauagauucaacuaa

SEQ ID NO: 323040 - RNA, 32 nt, Homo Sapiens
uguccuuuugagugacucaaccugcaaaccuu

SEQ ID NO: 323041 - RNA, 32 nt, Homo Sapiens
auuuuuaaaaauuuacaucaagagaggcaguc

SEQ ID NO: 323042 - RNA, 30 nt, Homo Sapiens
gaagacguuuucuuuaucgcccugagaaga

SEQ ID NO: 323043 - RNA, 32 nt, Homo Sapiens
agccugcauugaggagcagcugugcuacagcu

SEQ ID NO: 323044 - RNA, 32 nt, Homo Sapiens
caaauguaacaauuauuuuugugaaugagagu

SEQ ID NO: 323045 - RNA, 32 nt, Homo Sapiens
cacccagccgccucuuccuccucccuucgcug

SEQ ID NO: 323046 - RNA, 32 nt, Homo Sapiens
uauagacccacuuuuuaaaaaauuaucaauga

SEQ ID NO: 323047 - RNA, 32 nt, Homo Sapiens
gaaucuccauugcguuucucuuucuccuucuc

SEQ ID NO: 323048 - RNA, 32 nt, Homo Sapiens
uuuacucguuuguaaauuauuguacaguuuua

SEQ ID NO: 323049 - RNA, 32 nt, Homo Sapiens
cugcccaucuucugcuagcugauccugagaau

SEQ ID NO: 323050 - RNA, 32 nt, Homo Sapiens
aauuagccgggcgugguggcgggcgccuguaa

SEQ ID NO: 323051 - RNA, 32 nt, Homo Sapiens
uucagucgagaccggccuggccaacgugguga

SEQ ID NO: 323052 - RNA, 32 nt, Homo Sapiens
aaguugacaaauuuauccuuacacaaauuugu

SEQ ID NO: 323053 - RNA, 32 nt, Homo Sapiens
ccacuccaugccaccuuucucagcaucaggac

SEQ ID NO: 323054 - RNA, 32 nt, Homo Sapiens
agccgggugcgguggcucaggccuguaauccc

SEQ ID NO: 323055 - RNA, 32 nt, Homo Sapiens
aaagguggagcucagggaaaauggggguccuu

SEQ ID NO: 323056 - RNA, 32 nt, Homo Sapiens
ugugaaaaacaaaacaaaaccacaugugaagu

SEQ ID NO: 323057 - RNA, 32 nt, Homo Sapiens
aagauggaauaauuuuaauacauauuuuguuu

SEQ ID NO: 323058 - RNA, 27 nt, Homo Sapiens
ggacauugcuuucucagccccaccccc

SEQ ID NO: 323059 - RNA, 32 nt, Homo Sapiens
uucagaacauacagccucgaagggcagagcuc

SEQ ID NO: 323060 - RNA, 32 nt, Homo Sapiens
ccagcccccugggaccucccccauccuuuuug

SEQ ID NO: 323061 - RNA, 32 nt, Homo Sapiens
ccugcauacuucauuuccugugagcuugaaca

SEQ ID NO: 323062 - RNA, 32 nt, Homo Sapiens
caguccaaagaaugcagucacuuuuuaucaug

SEQ ID NO: 323063 - RNA, 32 nt, Homo Sapiens
ugaaccccuaccaggagcugccccuguauggg

SEQ ID NO: 323064 - RNA, 32 nt, Homo Sapiens
acaaaacaaaacaaaacaaaugacaguaaccc

SEQ ID NO: 323065 - RNA, 32 nt, Homo Sapiens
ccaauauagaaagcagaagugaaacgcauagu

SEQ ID NO: 323066 - RNA, 32 nt, Homo Sapiens
cggggcgcccccagccgaucccuccacccucu

SEQ ID NO: 323067 - RNA, 32 nt, Homo Sapiens
cuguuugccugccugaggaguuacaguuuugu

SEQ ID NO: 323068 - RNA, 32 nt, Homo Sapiens
ccguuacagucuuuuucucaggagcuacaaag

SEQ ID NO: 323069 - RNA, 32 nt, Homo Sapiens
gugugcagacucaggauuggggcuugcuuuga

SEQ ID NO: 323070 - RNA, 32 nt, Homo Sapiens
guaagaauuaucacucuuuuuaucuuuuauuc

SEQ ID NO: 323071 - RNA, 32 nt, Homo Sapiens
ggcacuccuccuuguuagugucuuuccuugaa

SEQ ID NO: 323072 - RNA, 32 nt, Homo Sapiens
uuuuaucgguaauuauuuuaauguugugauuu

SEQ ID NO: 323073 - RNA, 32 nt, Homo Sapiens
augugccugauauaaaugugugucuuucauuu

SEQ ID NO: 323074 - RNA, 32 nt, Homo Sapiens
cacuuccacagcagagaaaaacaaagaggaaa

SEQ ID NO: 323075 - RNA, 32 nt, Homo Sapiens
cagggaggguggcuggggccaagccccgaggg

SEQ ID NO: 323076 - RNA, 32 nt, Homo Sapiens
cuguggucacccaugcaucuuccacuggaacg

SEQ ID NO: 323077 - RNA, 27 nt, Homo Sapiens
gccaguugcuucuucagcugaccgggc

SEQ ID NO: 323078 - RNA, 32 nt, Homo Sapiens
aaaaccugcaguuaacaggauauuagacauca

SEQ ID NO: 323079 - RNA, 32 nt, Homo Sapiens
uuuuuagauugugacauaaaucuuguaaaaac

SEQ ID NO: 323080 - RNA, 32 nt, Homo Sapiens
aaccuguccuuguuaaguuacuugcuucuugg

SEQ ID NO: 323081 - RNA, 32 nt, Homo Sapiens
ugcaggucgaagaggccgggcuacgucgugcc

SEQ ID NO: 323082 - RNA, 32 nt, Homo Sapiens
agaaccccaaccaaagaaaucugaaauauaaa

SEQ ID NO: 323083 - RNA, 32 nt, Homo Sapiens
guuccugacagcucagcccugguguagggugg

SEQ ID NO: 323084 - RNA, 32 nt, Homo Sapiens
agaggucuuuccccuuuccuaucauggcagcu

SEQ ID NO: 323085 - RNA, 32 nt, Homo Sapiens
uauaugaauuguaaaacuagaaucaucaaaau

SEQ ID NO: 323086 - RNA, 32 nt, Homo Sapiens
ccgcuucacacagccgcagugcccugugugug

SEQ ID NO: 323087 - RNA, 32 nt, Homo Sapiens
augauaaacucagaaaauaaacacagagaagg

SEQ ID NO: 323088 - RNA, 32 nt, Homo Sapiens
uuguuauagaaaguaauccauaaaauuucagu

SEQ ID NO: 323089 - RNA, 32 nt, Homo Sapiens
ugaaaagauaucacuaggaaaagagagcacgc

SEQ ID NO: 323090 - RNA, 32 nt, Homo Sapiens
cggacgcgccccagcucgcgccccuucccaua

SEQ ID NO: 323091 - RNA, 32 nt, Homo Sapiens
uggacgggggccuggggcugugggaagaugaa

SEQ ID NO: 323092 - RNA, 32 nt, Homo Sapiens
aggcggggccgagcgccgcgcgucccgagcau

SEQ ID NO: 323093 - RNA, 32 nt, Homo Sapiens
ggccugccauuugccucuccccggagacagcc

SEQ ID NO: 323094 - RNA, 32 nt, Homo Sapiens
gguccugcuugcagaagcugcccuuucaccca

SEQ ID NO: 323095 - RNA, 28 nt, Homo Sapiens
gugauggcugucgucccggcgucucucu

SEQ ID NO: 323096 - RNA, 32 nt, Homo Sapiens
agagauuaauuuguguagauuguguaaauucc

SEQ ID NO: 323097 - RNA, 32 nt, Homo Sapiens
cugggcccuucucuccuuuaggccagcuuacc

SEQ ID NO: 323098 - RNA, 32 nt, Homo Sapiens
ucggggaaguuagcauucuuguucaagaagcu

SEQ ID NO: 323099 - RNA, 32 nt, Homo Sapiens
acaaggaggaggaggguuagcaggcguucacc

SEQ ID NO: 323100 - RNA, 32 nt, Homo Sapiens
ucaguaaucaguucaagaaguucccucagaug

SEQ ID NO: 323101 - RNA, 32 nt, Homo Sapiens
gaacuccgagggggcgcggggagagcugggcg

SEQ ID NO: 323102 - RNA, 32 nt, Homo Sapiens
auuccaaaauauauauugagauaaaugaacug

SEQ ID NO: 323103 - RNA, 32 nt, Homo Sapiens
gcacgaggcagacgucccugcgcgucguccuc

SEQ ID NO: 323104 - RNA, 32 nt, Homo Sapiens
ccuuacuggggauuucagggcuggggguucag

SEQ ID NO: 323105 - RNA, 32 nt, Homo Sapiens
ugaauuuugacaaaugcaugguuuuguaacca

SEQ ID NO: 323106 - RNA, 32 nt, Homo Sapiens
gggugcgggggaggaggaggaggacgccgcgg

SEQ ID NO: 323107 - RNA, 32 nt, Homo Sapiens
ugagccccaagcaauggaaagcugcacacgaa

SEQ ID NO: 323108 - RNA, 30 nt, Homo Sapiens
gugcccgcgcccguggcgcuauggaggcgg

SEQ ID NO: 323109 - RNA, 32 nt, Homo Sapiens
cccuccuugcugucacaggugcagccuguccu

SEQ ID NO: 323110 - RNA, 32 nt, Homo Sapiens
cacagccgcaucuugucaggcuuucucaagcc

SEQ ID NO: 323111 - RNA, 32 nt, Homo Sapiens
uugaggucaggaguucgagaucagccuggcca

SEQ ID NO: 323112 - RNA, 32 nt, Homo Sapiens
ccuggagcgcgaguacagcugcaccgugcggc

SEQ ID NO: 323113 - RNA, 32 nt, Homo Sapiens
acaacagccagacaugagacaccuccuagagc

SEQ ID NO: 323114 - RNA, 32 nt, Homo Sapiens
ccucaucugcugcagaaccacauccugaggag

SEQ ID NO: 323115 - RNA, 32 nt, Homo Sapiens
acaaaucugaaucuauuuguuauucuuagcgu

SEQ ID NO: 323116 - RNA, 32 nt, Homo Sapiens
aauucauuuuuccuccaggccgacaaggaguu

SEQ ID NO: 323117 - RNA, 32 nt, Homo Sapiens
ccccggcagcggcggcagcagcggcaaugacc

SEQ ID NO: 323118 - RNA, 32 nt, Homo Sapiens
cucaggucugggaugagaagggcacugcccuc

SEQ ID NO: 323119 - RNA, 32 nt, Homo Sapiens
uguuucuugggcugggggagggguggggggaa

SEQ ID NO: 323120 - RNA, 32 nt, Homo Sapiens
gacgcgagcgcggggcggguggagagcgucuc

SEQ ID NO: 323121 - RNA, 32 nt, Homo Sapiens
gaaaucacaaaaccuggaagacuuggcuuuac

SEQ ID NO: 323122 - RNA, 32 nt, Homo Sapiens
agaauuacagcuuuauuuauagagagugaauu

SEQ ID NO: 323123 - RNA, 32 nt, Homo Sapiens
cugacucguucagcugcccccaagcugggcug

SEQ ID NO: 323124 - RNA, 32 nt, Homo Sapiens
aggaauacaaugguuguuuuuaucauagugua

SEQ ID NO: 323125 - RNA, 32 nt, Homo Sapiens
ucucuuggccauuugcaguucuuccuugaaaa

SEQ ID NO: 323126 - RNA, 32 nt, Homo Sapiens
uggugagcauuuccucuuucccugcccagcuc

SEQ ID NO: 323127 - RNA, 32 nt, Homo Sapiens
uugacaaaucaugcugcuguuauuuucuacau

SEQ ID NO: 323128 - RNA, 32 nt, Homo Sapiens
gguguucaccccagaagcuagcuggcuagagg

SEQ ID NO: 323129 - RNA, 32 nt, Homo Sapiens
cccuccgugacccccgcggcccgggccgcucu

SEQ ID NO: 323130 - RNA, 32 nt, Homo Sapiens
ggagagcagcgcccgcgccucgccgugcggag

SEQ ID NO: 323131 - RNA, 32 nt, Homo Sapiens
cacuggaggcggcggcggcccgagggcgacuu

SEQ ID NO: 323132 - RNA, 32 nt, Homo Sapiens
ugaugcucugucugcugguuugcauuguuucu

SEQ ID NO: 323133 - RNA, 32 nt, Homo Sapiens
accccggaagcagucgcugcaacuuccgggag

SEQ ID NO: 323134 - RNA, 32 nt, Homo Sapiens
aaaaucaguagagauauaauagauaacuuuuu

SEQ ID NO: 323135 - RNA, 32 nt, Homo Sapiens
gcuggucauugacuucgggcuggaccguugcc

SEQ ID NO: 323136 - RNA, 32 nt, Homo Sapiens
guugggcucccgcuccaccccgguccccggcg

SEQ ID NO: 323137 - RNA, 32 nt, Homo Sapiens
guugugaggacugagaagaacaaugucaaaug

SEQ ID NO: 323138 - RNA, 32 nt, Homo Sapiens
gagagcgggcucuguggaagggggcgaggcua

SEQ ID NO: 323139 - RNA, 32 nt, Homo Sapiens
gugggagguaccauagguagauaccuccaaag

SEQ ID NO: 323140 - RNA, 32 nt, Homo Sapiens
uauaauuauuauuugcacuaaucuuugccauu

SEQ ID NO: 323141 - RNA, 32 nt, Homo Sapiens
aguugagacaccuaguguauggcucaugccca

SEQ ID NO: 323142 - RNA, 32 nt, Homo Sapiens
ggggcucugauccauccacacgcugcgcuuug

SEQ ID NO: 323143 - RNA, 32 nt, Homo Sapiens
agcugacccuccccaaccugccggccacccau

SEQ ID NO: 323144 - RNA, 32 nt, Homo Sapiens
acaaggacugagcuaugggcuccagcuagcau

SEQ ID NO: 323145 - RNA, 32 nt, Homo Sapiens
auuccuucuaguuuuucuuguucucauuugaa

SEQ ID NO: 323146 - RNA, 32 nt, Homo Sapiens
ccggggacgcuugcucccucccugcccccuac

SEQ ID NO: 323147 - RNA, 32 nt, Homo Sapiens
guaacuucugaacauuggucucugagagaaaa

SEQ ID NO: 323148 - RNA, 30 nt, Homo Sapiens
gcgcaggcacccgugccuccccucugccag

SEQ ID NO: 323149 - RNA, 32 nt, Homo Sapiens
aacugagaagcaugcacugugaccugcacacc

SEQ ID NO: 323150 - RNA, 32 nt, Homo Sapiens
ucuuuuauggggcuccuggcggugcuauucau

SEQ ID NO: 323151 - RNA, 32 nt, Homo Sapiens
aaaaauugaaaaccucuuuccaaaggcuguuu

SEQ ID NO: 323152 - RNA, 32 nt, Homo Sapiens
agaguagagaaauuauuugauuggcaaaaaug

SEQ ID NO: 323153 - RNA, 32 nt, Homo Sapiens
uugauggcugaauucuuguggauucauaagag

SEQ ID NO: 323154 - RNA, 32 nt, Homo Sapiens
gaaggucugggcaggggaagggcgucuucuga

SEQ ID NO: 323155 - RNA, 32 nt, Homo Sapiens
auucaaaccagauuucuuaauaccuggucuuc

SEQ ID NO: 323156 - RNA, 32 nt, Homo Sapiens
gcgccagaugaccaggagcuccucaagggcug

SEQ ID NO: 323157 - RNA, 32 nt, Homo Sapiens
auuuaaaaaaucaacccuucacguagaaagca

SEQ ID NO: 323158 - RNA, 32 nt, Homo Sapiens
ccucccccaagccaggccccuguccccacccc

SEQ ID NO: 323159 - RNA, 32 nt, Homo Sapiens
uuggaauucauuugccauccacagccuuacac

SEQ ID NO: 323160 - RNA, 32 nt, Homo Sapiens
acagggcccagccccucuccccugcccaaguc

SEQ ID NO: 323161 - RNA, 32 nt, Homo Sapiens
ccuugucugccuuuacagauguuuccucuuuc

SEQ ID NO: 323162 - RNA, 32 nt, Homo Sapiens
agcagguuaaauguuuuguaaacuuugaaaua

SEQ ID NO: 323163 - RNA, 29 nt, Homo Sapiens
ucaaggagauucugggcaccggcgcuugu

SEQ ID NO: 323164 - RNA, 32 nt, Homo Sapiens
agcaaaucucaaagagcuggcgucuuagaacu

SEQ ID NO: 323165 - RNA, 32 nt, Homo Sapiens
ugaagucaccuggccuggaguguguugggcag

SEQ ID NO: 323166 - RNA, 32 nt, Homo Sapiens
ucgacuaaaaauacaaaaaauuaauugggcgu

SEQ ID NO: 323167 - RNA, 32 nt, Homo Sapiens
uccaucucccaccaccucccccugcagauacg

SEQ ID NO: 323168 - RNA, 32 nt, Homo Sapiens
aaguuuuaaaacuuaaccuguuuaccuacuua

SEQ ID NO: 323169 - RNA, 32 nt, Homo Sapiens
aguguucuuucaucucaccacagcugccuccu

SEQ ID NO: 323170 - RNA, 32 nt, Homo Sapiens
gaaaaaugcuuauuuaaaucuuugcaugauuu

SEQ ID NO: 323171 - RNA, 32 nt, Homo Sapiens
cgccaccucgcgggcgaccccgcggccaaggc

SEQ ID NO: 323172 - RNA, 32 nt, Homo Sapiens
cuauuuuuuaccaguggacuacaggauuacuu

SEQ ID NO: 323173 - RNA, 32 nt, Homo Sapiens
ccggucaacaaacccacuuuuaugacaguuuu

SEQ ID NO: 323174 - RNA, 32 nt, Homo Sapiens
ucuuccaaacaaaugaggcaucagucugaaag

SEQ ID NO: 323175 - RNA, 32 nt, Homo Sapiens
augcaacagucuuuucacugcagcugaaugag

SEQ ID NO: 323176 - RNA, 32 nt, Homo Sapiens
uugguuuuguuccuuucauccugucuguguua

SEQ ID NO: 323177 - RNA, 32 nt, Homo Sapiens
caacaugccaucucugagauacugaugacguu

SEQ ID NO: 323178 - RNA, 32 nt, Homo Sapiens
acucccugcuuaggauucuguucccugggcug

SEQ ID NO: 323179 - RNA, 32 nt, Homo Sapiens
augaagggucuguaaugaaaucucuaaauaau

SEQ ID NO: 323180 - RNA, 29 nt, Homo Sapiens
aauugauaaaguucagcuuucaacacucc

SEQ ID NO: 323181 - RNA, 32 nt, Homo Sapiens
uuaacaagaaaacauuucuuccugauugacaa

SEQ ID NO: 323182 - RNA, 32 nt, Homo Sapiens
ccgcagcagccccaugccuccuggacgcccuc

SEQ ID NO: 323183 - RNA, 32 nt, Homo Sapiens
agacugcuggaacagccaaggacugucaggcu

SEQ ID NO: 323184 - RNA, 32 nt, Homo Sapiens
uccgcgcgcgcccccggggcuugcgucagcgg

SEQ ID NO: 323185 - RNA, 32 nt, Homo Sapiens
uguaggccuggcccacgccgccgcccccgcug

SEQ ID NO: 323186 - RNA, 32 nt, Homo Sapiens
caagaucggggacuucgggaugacucgggacg

SEQ ID NO: 323187 - RNA, 32 nt, Homo Sapiens
auuuucagaggggaaaauggggccuagaaguu

SEQ ID NO: 323188 - RNA, 32 nt, Homo Sapiens
agcaggcagugggugcugaugugugugcauga

SEQ ID NO: 323189 - RNA, 32 nt, Homo Sapiens
cauuugcacugacuuuauccagaccaaagagc

SEQ ID NO: 323190 - RNA, 32 nt, Homo Sapiens
gagaagauuugccuccucuccccugcuaagcu

SEQ ID NO: 323191 - RNA, 32 nt, Homo Sapiens
gugagaucccugcagggacucccuggagauuc

SEQ ID NO: 323192 - RNA, 32 nt, Homo Sapiens
uuucucuggguguuccucucccccaucccuua

SEQ ID NO: 323193 - RNA, 32 nt, Homo Sapiens
uauuggcuaccuugauuugaaaugcuuuguga

SEQ ID NO: 323194 - RNA, 32 nt, Homo Sapiens
gcuugauccuuaucguguuuuuguaggguugu

SEQ ID NO: 323195 - RNA, 32 nt, Homo Sapiens
caacacacauaaauuggagacuauguauucau

SEQ ID NO: 323196 - RNA, 32 nt, Homo Sapiens
caaaagagaaggaaaaaucuccagcuggauac

SEQ ID NO: 323197 - RNA, 29 nt, Homo Sapiens
aaucacauagugaaaguuuauaagaggau

SEQ ID NO: 323198 - RNA, 32 nt, Homo Sapiens
uggccaaaucaggccaacuuuuagucaaguag

SEQ ID NO: 323199 - RNA, 32 nt, Homo Sapiens
acgucgaguucuccuuucccaaguucucccgc

SEQ ID NO: 323200 - RNA, 32 nt, Homo Sapiens
gggcugccugugacgcgcggcgcggucggucc

SEQ ID NO: 323201 - RNA, 32 nt, Homo Sapiens
caacccugaauuaauuuuuucuuuguuuauaa

SEQ ID NO: 323202 - RNA, 32 nt, Homo Sapiens
cccauuaacccccacacccccauuccgcgcaa

SEQ ID NO: 323203 - RNA, 32 nt, Homo Sapiens
cagcaaguguucaacaaauaguagcucccuuu

SEQ ID NO: 323204 - RNA, 32 nt, Homo Sapiens
ugugccaggccccagcggggcccaugggggag

SEQ ID NO: 323205 - RNA, 32 nt, Homo Sapiens
cggcgcucggcauggcucuccuggugcucggu

SEQ ID NO: 323206 - RNA, 32 nt, Homo Sapiens
gcuccagcuuuuauccugaauugggaaguuac

SEQ ID NO: 323207 - RNA, 31 nt, Homo Sapiens
cggcagcugggccgccauggaguccacgcug

SEQ ID NO: 323208 - RNA, 32 nt, Homo Sapiens
cagucaaauggggagggguauucuucaugcag

SEQ ID NO: 323209 - RNA, 32 nt, Homo Sapiens
cauuauguauaaagaacuuagagcaacauccu

SEQ ID NO: 323210 - RNA, 32 nt, Homo Sapiens
cuggacaauugcuucaagcauucuucaaccag

SEQ ID NO: 323211 - RNA, 32 nt, Homo Sapiens
aggggcgacaagagcugagcggcggccgccga

SEQ ID NO: 323212 - RNA, 32 nt, Homo Sapiens
agcccacgcgacccucucgcgcgcggaggggc

SEQ ID NO: 323213 - RNA, 32 nt, Homo Sapiens
guguuaucacucugccuguguauagucagaua

SEQ ID NO: 323214 - RNA, 32 nt, Homo Sapiens
uacucacaggcuccgauggcggcggccgcccu

SEQ ID NO: 323215 - RNA, 32 nt, Homo Sapiens
aaggaaggacagcucauuccucaugggcgauc

SEQ ID NO: 323216 - RNA, 32 nt, Homo Sapiens
agcagacagugguguggcccuugucuaggucu

SEQ ID NO: 323217 - RNA, 32 nt, Homo Sapiens
ccugugggccucugcccaggauguguggaaca

SEQ ID NO: 323218 - RNA, 32 nt, Homo Sapiens
acuucgccgcacgcugcagaaccucgcccagc

SEQ ID NO: 323219 - RNA, 32 nt, Homo Sapiens
auuuugucugcacuugaguucacuugaguuua

SEQ ID NO: 323220 - RNA, 32 nt, Homo Sapiens
agccaaaggaaucuguggaauuuuggagaguu

SEQ ID NO: 323221 - RNA, 32 nt, Homo Sapiens
aagaaaucuuaaguagaauucucuaaaagguu

SEQ ID NO: 323222 - RNA, 32 nt, Homo Sapiens
ggacaggaugucuuccuggggguugggaugga

SEQ ID NO: 323223 - RNA, 32 nt, Homo Sapiens
gugguggccugagaggccccaggcuccccucc

SEQ ID NO: 323224 - RNA, 32 nt, Homo Sapiens
ggauggagcugcuccccucacggcagcaccac

SEQ ID NO: 323225 - RNA, 32 nt, Homo Sapiens
accgagagacgcggcuguucggcggcccucgc

SEQ ID NO: 323226 - RNA, 28 nt, Homo Sapiens
gguauggagggagaggcgugugcgggaa

SEQ ID NO: 323227 - RNA, 32 nt, Homo Sapiens
aauuuccuauuuucuuuuuguuauuuuuauug

SEQ ID NO: 323228 - RNA, 32 nt, Homo Sapiens
ggccgcucagucccguugggguuguccugagu

SEQ ID NO: 323229 - RNA, 32 nt, Homo Sapiens
ggaagccgcggugucggcgccauggcggagcu

SEQ ID NO: 323230 - RNA, 32 nt, Homo Sapiens
auguggucaggagauagagaccauccuggcua

SEQ ID NO: 323231 - RNA, 32 nt, Homo Sapiens
ugggggcugugcuaugugggauggauguguga

SEQ ID NO: 323232 - RNA, 32 nt, Homo Sapiens
gcaccuccggcugccuagcccuccccccagcu

SEQ ID NO: 323233 - RNA, 32 nt, Homo Sapiens
cccucacccaccagcugccccaucccugaggc

SEQ ID NO: 323234 - RNA, 32 nt, Homo Sapiens
gagcugguauuugggcggcugguggcggcugg

SEQ ID NO: 323235 - RNA, 32 nt, Homo Sapiens
gcuacaccccuacaggugcauacuguucugcu

SEQ ID NO: 323236 - RNA, 32 nt, Homo Sapiens
auuacuucuuugcauuugcuguuccaguugca

SEQ ID NO: 323237 - RNA, 32 nt, Homo Sapiens
cacacauugauauuauaucauggcauuuuauu

SEQ ID NO: 323238 - RNA, 32 nt, Homo Sapiens
uuggguaugugugacuucuacuggccaugaaa

SEQ ID NO: 323239 - RNA, 32 nt, Homo Sapiens
guuuguaauuucucuuuuuuuccuuuuuuauu

SEQ ID NO: 323240 - RNA, 32 nt, Homo Sapiens
agccgaguuggggcagcgguggagcggggacu

SEQ ID NO: 323241 - RNA, 32 nt, Homo Sapiens
gcggcugccugauucccggcgccgcgaaaugc

SEQ ID NO: 323242 - RNA, 32 nt, Homo Sapiens
aaauucuggcaagggagguggaaaugcugaca

SEQ ID NO: 323243 - RNA, 32 nt, Homo Sapiens
uguugcuuucagaauuuuuaggcuguaaaauu

SEQ ID NO: 323244 - RNA, 32 nt, Homo Sapiens
acgugguuuacucucccggacgcguccuggga

SEQ ID NO: 323245 - RNA, 32 nt, Homo Sapiens
ccgccgccgccgccgcgcgaggagccaggaug

SEQ ID NO: 323246 - RNA, 32 nt, Homo Sapiens
gcucucuaccuucuggcccccaucccggaaca

SEQ ID NO: 323247 - RNA, 32 nt, Homo Sapiens
aagggcagauaauacacauagauaacucuuug

SEQ ID NO: 323248 - RNA, 32 nt, Homo Sapiens
uggcucacaccuguaaucccagcacuauggga

SEQ ID NO: 323249 - RNA, 32 nt, Homo Sapiens
gugccuuugccagcuccucggacggcggcaug

SEQ ID NO: 323250 - RNA, 32 nt, Homo Sapiens
gaauauaaugaaaauggcaauaaaauaauauu

SEQ ID NO: 323251 - RNA, 32 nt, Homo Sapiens
aagaaauguuuaacaagcagucuucuuuaagu

SEQ ID NO: 323252 - RNA, 32 nt, Homo Sapiens
gaggacacucccgugugcaggccgaaucagac

SEQ ID NO: 323253 - RNA, 32 nt, Homo Sapiens
ccacaggacaguccugccaaggaggcaagcgg

SEQ ID NO: 323254 - RNA, 32 nt, Homo Sapiens
ccacauacauuuuuacauuguaccuuaggacu

SEQ ID NO: 323255 - RNA, 32 nt, Homo Sapiens
ucgagcagugaugaggauaaagaauaacauga

SEQ ID NO: 323256 - RNA, 32 nt, Homo Sapiens
caaaagggcuccugagggucugggcaagggac

SEQ ID NO: 323257 - RNA, 32 nt, Homo Sapiens
ucccagcucacccucaccccagccucuucccc

SEQ ID NO: 323258 - RNA, 32 nt, Homo Sapiens
uugcuuauagaagagaaagauauaccuuccga

SEQ ID NO: 323259 - RNA, 32 nt, Homo Sapiens
gcaggaaggcccaagaccuggugcuggauacu

SEQ ID NO: 323260 - RNA, 32 nt, Homo Sapiens
ucaguccaggacuaauuucaagguuuacaaca

SEQ ID NO: 323261 - RNA, 32 nt, Homo Sapiens
cucuucgugcaugcaacccuguccuugggaua

SEQ ID NO: 323262 - RNA, 32 nt, Homo Sapiens
auguagggaaaagaaagagagaucagacuguc

SEQ ID NO: 323263 - RNA, 32 nt, Homo Sapiens
aaacaugucauucauuaaauguuguuuuuauu

SEQ ID NO: 323264 - RNA, 32 nt, Homo Sapiens
uacguguuacuguaguuuauuggaaucuguua

SEQ ID NO: 323265 - RNA, 32 nt, Homo Sapiens
ccaggccuugucacugcagagccccuggcaag

SEQ ID NO: 323266 - RNA, 32 nt, Homo Sapiens
aaugaaacuauauuuccucaugugcugauuug

SEQ ID NO: 323267 - RNA, 32 nt, Homo Sapiens
ggaucuucugcauuuaaaauagaagaggcauc

SEQ ID NO: 323268 - RNA, 32 nt, Homo Sapiens
ugagucucauguucaagcagucuugugaguaa

SEQ ID NO: 323269 - RNA, 32 nt, Homo Sapiens
cuggaggagacgggaaggagucgauucuuaaa

SEQ ID NO: 323270 - RNA, 32 nt, Homo Sapiens
gucggcgccaccccggcccccgagcccgcaga

SEQ ID NO: 323271 - RNA, 32 nt, Homo Sapiens
uugcuaggcuccggccgcgcgccccgcccuug

SEQ ID NO: 323272 - RNA, 32 nt, Homo Sapiens
ugucaaguacacuuuacccugaccuuaugagu

SEQ ID NO: 323273 - RNA, 32 nt, Homo Sapiens
gacccggccccggggggugcgggccccaugga

SEQ ID NO: 323274 - RNA, 32 nt, Homo Sapiens
aaacuaaaaaauuaaacuuauuuacaaauagg

SEQ ID NO: 323275 - RNA, 32 nt, Homo Sapiens
cgagcccugagugcugugcugcugcuggucuc

SEQ ID NO: 323276 - RNA, 32 nt, Homo Sapiens
aaaccaagugggaaaaaguaaagauuaaucug

SEQ ID NO: 323277 - RNA, 32 nt, Homo Sapiens
uacaggggaaaagaaaauaugggauauauaag

SEQ ID NO: 323278 - RNA, 32 nt, Homo Sapiens
uuuggggugaauuguaaaaaugaagaacuaua

SEQ ID NO: 323279 - RNA, 32 nt, Homo Sapiens
acagccccaagccacuuccuuuaggcuaacac

SEQ ID NO: 323280 - RNA, 31 nt, Homo Sapiens
gacgucagguccagccugccccggcagcccg

SEQ ID NO: 323281 - RNA, 32 nt, Homo Sapiens
accacccaugugggcucugcucccucccaaca

SEQ ID NO: 323282 - RNA, 32 nt, Homo Sapiens
aaacuaggugcugcagccugggaccaggcacc

SEQ ID NO: 323283 - RNA, 32 nt, Homo Sapiens
gcaauauguauuauauacucagagaacagaag

SEQ ID NO: 323284 - RNA, 32 nt, Homo Sapiens
aguggagaaguuuggaccuugccuccuuuagg

SEQ ID NO: 323285 - RNA, 32 nt, Homo Sapiens
acuauuuuuguaaagcucuacuguaaauaaaa

SEQ ID NO: 323286 - RNA, 32 nt, Homo Sapiens
cuggaauauaaaaagacaugagaugguagcca

SEQ ID NO: 323287 - RNA, 32 nt, Homo Sapiens
agccucuccgaacccccgccagcccuugccga

SEQ ID NO: 323288 - RNA, 32 nt, Homo Sapiens
cugcccucuacuuugcagauauuaaagaggag

SEQ ID NO: 323289 - RNA, 32 nt, Homo Sapiens
uugagaucccuguuugugaaagagggaacuga

SEQ ID NO: 323290 - RNA, 32 nt, Homo Sapiens
cagaucagcaaccaggaagaagcugagagaca

SEQ ID NO: 323291 - RNA, 32 nt, Homo Sapiens
ucgaaaauuaaaccucuuuuauaauuacccag

SEQ ID NO: 323292 - RNA, 32 nt, Homo Sapiens
caucaagaucacacaacuucaguguggagaaa

SEQ ID NO: 323293 - RNA, 32 nt, Homo Sapiens
uuuauuuaaugaucuggaaaauucugcucuuu

SEQ ID NO: 323294 - RNA, 32 nt, Homo Sapiens
uccuccuaaaagcauuucuacugcggggaagg

SEQ ID NO: 323295 - RNA, 32 nt, Homo Sapiens
ucggcaguauggggggcagcugucccaguguc

SEQ ID NO: 323296 - RNA, 32 nt, Homo Sapiens
guaggaggauggggagaggaaaaaagagcuug

SEQ ID NO: 323297 - RNA, 31 nt, Homo Sapiens
ggggcaugacggagaaugcccuccacccauu

SEQ ID NO: 323298 - RNA, 32 nt, Homo Sapiens
cacugcacuccagcuugggugacaaaguaaga

SEQ ID NO: 323299 - RNA, 32 nt, Homo Sapiens
cauagauagauauguauaggaaaaaacauugu

SEQ ID NO: 323300 - RNA, 32 nt, Homo Sapiens
gcggggaauggcggcucugggcccucaagggg

SEQ ID NO: 323301 - RNA, 32 nt, Homo Sapiens
ucaggacggcgccgccggggccccgcgauucc

SEQ ID NO: 323302 - RNA, 32 nt, Homo Sapiens
gagaagggaaaggcugucccgggaccccgagg

SEQ ID NO: 323303 - RNA, 32 nt, Homo Sapiens
cagcggggcccgcauugagcaugggcgcggcg

SEQ ID NO: 323304 - RNA, 30 nt, Homo Sapiens
cacuggggcaggcggagggcccugcgugcu

SEQ ID NO: 323305 - RNA, 32 nt, Homo Sapiens
gcggagcggggcggggcugaguggguggcgac

SEQ ID NO: 323306 - RNA, 32 nt, Homo Sapiens
uauucagggaaggggagagagaaggaaugggg

SEQ ID NO: 323307 - RNA, 32 nt, Homo Sapiens
cugcaacggugcgcggagacuccggcgaacuc

SEQ ID NO: 323308 - RNA, 32 nt, Homo Sapiens
uuccgcauagacgaaaaucaacucuagaugga

SEQ ID NO: 323309 - RNA, 32 nt, Homo Sapiens
agcucuuucucuuuguauuucaucucuuucua

SEQ ID NO: 323310 - RNA, 32 nt, Homo Sapiens
cucaagaaaaggaaaagacuugcaucucucaa

SEQ ID NO: 323311 - RNA, 32 nt, Homo Sapiens
caugaggaagcagguagaucccagaacagaca

SEQ ID NO: 323312 - RNA, 32 nt, Homo Sapiens
aggcaacccccgcuccugccgcccccaaucuc

SEQ ID NO: 323313 - RNA, 32 nt, Homo Sapiens
cuaaaguuauuuauuauugaugcuuauaccau

SEQ ID NO: 323314 - RNA, 32 nt, Homo Sapiens
aaagguagaagagaaaggaauauuuuaaaccu

SEQ ID NO: 323315 - RNA, 32 nt, Homo Sapiens
uaccaguggagagggagcaaaaaggaaaauac

SEQ ID NO: 323316 - RNA, 32 nt, Homo Sapiens
cgcccucccgccccggcccugccucaaccuuc

SEQ ID NO: 323317 - RNA, 32 nt, Homo Sapiens
acugcagccucugccuucugggcucacgugau

SEQ ID NO: 323318 - RNA, 32 nt, Homo Sapiens
cggcgaaggcguggcgggagugugcggcgccg

SEQ ID NO: 323319 - RNA, 32 nt, Homo Sapiens
aggagauggaguguauuuuaugggauauaagc

SEQ ID NO: 323320 - RNA, 32 nt, Homo Sapiens
uguauuuuuuauuucuuucuaacuuaaaauac

SEQ ID NO: 323321 - RNA, 32 nt, Homo Sapiens
uauacccagaaguggaauuacuggaucauaug

SEQ ID NO: 323322 - RNA, 32 nt, Homo Sapiens
uggcguuucuauuuuuuuaagauaauuuagua

SEQ ID NO: 323323 - RNA, 32 nt, Homo Sapiens
aaaugagugcacgguccuaccuagucuuuccu

SEQ ID NO: 323324 - RNA, 32 nt, Homo Sapiens
uuaagaauuauccuuucaaaauaaaaauguua

SEQ ID NO: 323325 - RNA, 32 nt, Homo Sapiens
uuucaaaguggaaugcaacaguagucaagacu

SEQ ID NO: 323326 - RNA, 32 nt, Homo Sapiens
cacacaggccgcggcggcuggcucgggccccu

SEQ ID NO: 323327 - RNA, 32 nt, Homo Sapiens
gugggcugggcaggcucuggaagcccaaguca

SEQ ID NO: 323328 - RNA, 32 nt, Homo Sapiens
gcucuccagucccaggaugcgcugagccgccg

SEQ ID NO: 323329 - RNA, 32 nt, Homo Sapiens
cgugcuuaaccaaagaagcuguacuccggggg

SEQ ID NO: 323330 - RNA, 32 nt, Homo Sapiens
ggugaaggaagggcaccugagccccacugccu

SEQ ID NO: 323331 - RNA, 32 nt, Homo Sapiens
aggcaggagcaguggaauagcuacuauggcuu

SEQ ID NO: 323332 - RNA, 32 nt, Homo Sapiens
uguauuauuuucaauaaaucuggcacaacagc

SEQ ID NO: 323333 - RNA, 32 nt, Homo Sapiens
cacgaugccgugggcacagacucagucaucgg

SEQ ID NO: 323334 - RNA, 32 nt, Homo Sapiens
gggggacgaugggaaaucauggacuuguaagu

SEQ ID NO: 323335 - RNA, 32 nt, Homo Sapiens
cuugaguuuugcaugcucuccucccucccacu

SEQ ID NO: 323336 - RNA, 32 nt, Homo Sapiens
uggcagcuuuaaagguaggguccagaagaguc

SEQ ID NO: 323337 - RNA, 32 nt, Homo Sapiens
agaaucacaccucccggcugcugcugagagca

SEQ ID NO: 323338 - RNA, 32 nt, Homo Sapiens
uuuuucuaacaugccuuaaaaauauuaugguu

SEQ ID NO: 323339 - RNA, 32 nt, Homo Sapiens
guccucacaccugugcgcagcccgacccuccg

SEQ ID NO: 323340 - RNA, 32 nt, Homo Sapiens
uaauguucuuacugccugugacgaugcagcua

SEQ ID NO: 323341 - RNA, 32 nt, Homo Sapiens
uuuuacauuuaaauucccacagcaaauagaaa

SEQ ID NO: 323342 - RNA, 32 nt, Homo Sapiens
ugaacaucucuuaugugcauagugggagcuua

SEQ ID NO: 323343 - RNA, 32 nt, Homo Sapiens
cugcuucuucuauaugauacaauauuuuuuuu

SEQ ID NO: 323344 - RNA, 32 nt, Homo Sapiens
gggguucgguugcagggcugcagcccgccuug

SEQ ID NO: 323345 - RNA, 32 nt, Homo Sapiens
gcuuaaacagcuuuaccuuuccccucagcacc

SEQ ID NO: 323346 - RNA, 32 nt, Homo Sapiens
agccucagcuccguccccugccccacaagauu

SEQ ID NO: 323347 - RNA, 32 nt, Homo Sapiens
uaaaugaaaaggauagagguaguuuuuucaaa

SEQ ID NO: 323348 - RNA, 32 nt, Homo Sapiens
aaggugcggauggacaaggagaaggauggcau

SEQ ID NO: 323349 - RNA, 32 nt, Homo Sapiens
ugggacugguagaggaagccggcccugacgga

SEQ ID NO: 323350 - RNA, 32 nt, Homo Sapiens
gucccuucgcucccagacccaggcuagccgcu

SEQ ID NO: 323351 - RNA, 32 nt, Homo Sapiens
ggacccagggccagcugaaggugcuggguacc

SEQ ID NO: 323352 - RNA, 32 nt, Homo Sapiens
ucccaccuccaagucuccgggccaccuucucc

SEQ ID NO: 323353 - RNA, 32 nt, Homo Sapiens
uacgauuuuuaugauuugaugaguuucuugua

SEQ ID NO: 323354 - RNA, 32 nt, Homo Sapiens
aauacauuuuuuauuauacaaacuacagaaug

SEQ ID NO: 323355 - RNA, 32 nt, Homo Sapiens
cuggguucauggucggugaaacaaagacaguc

SEQ ID NO: 323356 - RNA, 32 nt, Homo Sapiens
aguaugacuagaaaaaucauuccuuuauaauu

SEQ ID NO: 323357 - RNA, 32 nt, Homo Sapiens
ucacgcgggugguucugcccaucgcggcugcg

SEQ ID NO: 323358 - RNA, 27 nt, Homo Sapiens
cagguccauuaauaugcuuauaacacu

SEQ ID NO: 323359 - RNA, 32 nt, Homo Sapiens
agccagaguuggugacgaccacuuccucgacg

SEQ ID NO: 323360 - RNA, 32 nt, Homo Sapiens
aagcggauaaaacuuucauuggacuggaaugu

SEQ ID NO: 323361 - RNA, 32 nt, Homo Sapiens
cugaccuugggucacaccccuucaccucccau

SEQ ID NO: 323362 - RNA, 32 nt, Homo Sapiens
gcuuuaagcaaucacucauuaccaccaaucug

SEQ ID NO: 323363 - RNA, 32 nt, Homo Sapiens
agccuuucagggucugucuauauuuucagucu

SEQ ID NO: 323364 - RNA, 32 nt, Homo Sapiens
uccgugcucccacccccaccccggccucuggg

SEQ ID NO: 323365 - RNA, 32 nt, Homo Sapiens
ucuuggguucaaccgauucuccugccucaacc

SEQ ID NO: 323366 - RNA, 32 nt, Homo Sapiens
gaaugcccauuacuuuuuuaacuaguaaaagc

SEQ ID NO: 323367 - RNA, 32 nt, Homo Sapiens
uggacacagggaggagaacaacacacacuggg

SEQ ID NO: 323368 - RNA, 32 nt, Homo Sapiens
cacugaacugucugccgagagcagcuggagga

SEQ ID NO: 323369 - RNA, 32 nt, Homo Sapiens
gcuucauagacaccccucccugucccuggauc

SEQ ID NO: 323370 - RNA, 32 nt, Homo Sapiens
agaaaccuacuacauucauuaagggaaugauu

SEQ ID NO: 323371 - RNA, 32 nt, Homo Sapiens
gaccaugccucccagagcuuguugucuccacu

SEQ ID NO: 323372 - RNA, 32 nt, Homo Sapiens
caaagcccaggaucuggcuuugccagagguug

SEQ ID NO: 323373 - RNA, 32 nt, Homo Sapiens
ucccuucuccucacuacccacccacgcaugua

SEQ ID NO: 323374 - RNA, 32 nt, Homo Sapiens
gucgaggaugauggucuugggguccuugggcu

SEQ ID NO: 323375 - RNA, 32 nt, Homo Sapiens
gccagccgccggguggagggucccggccggga

SEQ ID NO: 323376 - RNA, 32 nt, Homo Sapiens
aagagaggcggccgggccccgcgcuccgcccc

SEQ ID NO: 323377 - RNA, 32 nt, Homo Sapiens
cugcggcugucauggacgccuggguccgcuuc

SEQ ID NO: 323378 - RNA, 32 nt, Homo Sapiens
agggagguuggggugggucagagccgaguuaa

SEQ ID NO: 323379 - RNA, 32 nt, Homo Sapiens
cuguuuuucuucccuuugucagucuucgcauc

SEQ ID NO: 323380 - RNA, 32 nt, Homo Sapiens
acgcuaugcacacagcgcgagcccaugagagg

SEQ ID NO: 323381 - RNA, 32 nt, Homo Sapiens
gaugggcacaggcugccccaccccuccaugau

SEQ ID NO: 323382 - RNA, 32 nt, Homo Sapiens
cagagcugccgccaggccuccucauggugaug

SEQ ID NO: 323383 - RNA, 32 nt, Homo Sapiens
aaaaucauuuuuaaguaaauguuagugaaauu

SEQ ID NO: 323384 - RNA, 29 nt, Homo Sapiens
agugaauaaaguuguguuuucuggaaaaa

SEQ ID NO: 323385 - RNA, 32 nt, Homo Sapiens
cucgucuaccucuggauggagcggcagaaguc

SEQ ID NO: 323386 - RNA, 32 nt, Homo Sapiens
cccauuuacugcuuuauccucaucuccugccc

SEQ ID NO: 323387 - RNA, 32 nt, Homo Sapiens
ugguccuacuuccugccccucuccaggcccag

SEQ ID NO: 323388 - RNA, 32 nt, Homo Sapiens
uugccuggcacggaagaggccauguuugcacu

SEQ ID NO: 323389 - RNA, 32 nt, Homo Sapiens
aauuuucuucuccauugcuucaccuuaagggu

SEQ ID NO: 323390 - RNA, 31 nt, Homo Sapiens
ccggugagggcgggccccacaggccaccucc

SEQ ID NO: 323391 - RNA, 31 nt, Homo Sapiens
gagcucacagagcccucaugaguuaagaucc

SEQ ID NO: 323392 - RNA, 32 nt, Homo Sapiens
cuucgguuccggucucugcagcagccgugauc

SEQ ID NO: 323393 - RNA, 32 nt, Homo Sapiens
aucagcccugcagcuguaguacagugcugugc

SEQ ID NO: 323394 - RNA, 32 nt, Homo Sapiens
auaaaacaucuauuuugaaucuguaaauauuu

SEQ ID NO: 323395 - RNA, 32 nt, Homo Sapiens
guuccacaaaaauuaugcugaaauggaccuga

SEQ ID NO: 323396 - RNA, 32 nt, Homo Sapiens
guccuggcggggagcguccggcgcgaugggag

SEQ ID NO: 323397 - RNA, 32 nt, Homo Sapiens
ccuucucuagaaucugaaggccaggcuuaccu

SEQ ID NO: 323398 - RNA, 32 nt, Homo Sapiens
uaucuuugcuucugccgguccucagucuggcg

SEQ ID NO: 323399 - RNA, 32 nt, Homo Sapiens
ugagaguuuuuacagcucaucauucaaauaac

SEQ ID NO: 323400 - RNA, 32 nt, Homo Sapiens
aaucaaaaaugaaaauucaaagaaugagauac

SEQ ID NO: 323401 - RNA, 32 nt, Homo Sapiens
acauuaauagcuacagauaauuucauaaacau

SEQ ID NO: 323402 - RNA, 32 nt, Homo Sapiens
aagcugccaagagcugucauaugcugggucug

SEQ ID NO: 323403 - RNA, 32 nt, Homo Sapiens
ucaguuaccucuacuuuuuuuaucguaacacc

SEQ ID NO: 323404 - RNA, 32 nt, Homo Sapiens
aaaaugaacugggauugacccaucaagaugcu

SEQ ID NO: 323405 - RNA, 32 nt, Homo Sapiens
ggugugggagugccagccuggcugggaagcag

SEQ ID NO: 323406 - RNA, 32 nt, Homo Sapiens
agaggagagauuaugucauaugcaacugcucu

SEQ ID NO: 323407 - RNA, 32 nt, Homo Sapiens
gaucugcuugacagacgugggaucucaguaug

SEQ ID NO: 323408 - RNA, 32 nt, Homo Sapiens
cagugacugcuucggagcugccuggcucaugg

SEQ ID NO: 323409 - RNA, 32 nt, Homo Sapiens
agauugggaggguggggggauuuguagcauaa

SEQ ID NO: 323410 - RNA, 32 nt, Homo Sapiens
uuucuucauuuuguucugaaauuaaaguaugc

SEQ ID NO: 323411 - RNA, 31 nt, Homo Sapiens
uggagaucaaagaaagaauagaacgaguuaa

SEQ ID NO: 323412 - RNA, 32 nt, Homo Sapiens
ucaaauucauauucacagggucguuggcugug

SEQ ID NO: 323413 - RNA, 32 nt, Homo Sapiens
gcaggcgccuucuucagcuguggguccuaaag

SEQ ID NO: 323414 - RNA, 32 nt, Homo Sapiens
cugucucugcuauuuccauccuccccauaggg

SEQ ID NO: 323415 - RNA, 32 nt, Homo Sapiens
ugccgggcagcaugugugggcggggauggcuc

SEQ ID NO: 323416 - RNA, 32 nt, Homo Sapiens
ccacgcagcagagguuccacugagaggaagcc

SEQ ID NO: 323417 - RNA, 32 nt, Homo Sapiens
caaccaccugcccagagcugcagcccccugua

SEQ ID NO: 323418 - RNA, 32 nt, Homo Sapiens
uuuuuuauuccacgcugugcuguuuggauggg

SEQ ID NO: 323419 - RNA, 32 nt, Homo Sapiens
ccuggggcugaagagcuggcugugguggcacc

SEQ ID NO: 323420 - RNA, 32 nt, Homo Sapiens
caaacagugaaauuauuacaaaauguauuauu

SEQ ID NO: 323421 - RNA, 32 nt, Homo Sapiens
uguguacagccgcuccucccuuucagcgccau

SEQ ID NO: 323422 - RNA, 32 nt, Homo Sapiens
gucagauuccucccaaccaggcuaauaaccua

SEQ ID NO: 323423 - RNA, 32 nt, Homo Sapiens
cgagcccuucccggcccuccccagggcccccc

SEQ ID NO: 323424 - RNA, 32 nt, Homo Sapiens
ccggcccugggccuuaggcaccucaaggacuu

SEQ ID NO: 323425 - RNA, 32 nt, Homo Sapiens
agaauuuaucaucaaguuauuacacaaacuuc

SEQ ID NO: 323426 - RNA, 32 nt, Homo Sapiens
ccgcauuucuucugcacuuccugucucauccu

SEQ ID NO: 323427 - RNA, 32 nt, Homo Sapiens
accgugaggggaggaggccgaggaggacgcgg

SEQ ID NO: 323428 - RNA, 32 nt, Homo Sapiens
ggguguguaaaaagguuaaguuuuuguuucuc

SEQ ID NO: 323429 - RNA, 32 nt, Homo Sapiens
aaauaaguucuucccacuuuuaagcugaugaa

SEQ ID NO: 323430 - RNA, 32 nt, Homo Sapiens
ggcaccaaggcacagcuuagaguagacccgag

SEQ ID NO: 323431 - RNA, 32 nt, Homo Sapiens
ugaaguccugugugaagugcugguguggccac

SEQ ID NO: 323432 - RNA, 32 nt, Homo Sapiens
agcgaggcgggugcgccaaagggcgccaguuc

SEQ ID NO: 323433 - RNA, 32 nt, Homo Sapiens
gugcaguuccguucucgggggaaagcccaucc

SEQ ID NO: 323434 - RNA, 32 nt, Homo Sapiens
cuuguguuuuaucuuaaccaccaggucauucc

SEQ ID NO: 323435 - RNA, 32 nt, Homo Sapiens
uggcgaggggagaggagcugaaggggccgugg

SEQ ID NO: 323436 - RNA, 32 nt, Homo Sapiens
gacagaguugcaggucaccuccccuaccugcu

SEQ ID NO: 323437 - RNA, 32 nt, Homo Sapiens
uuuaugugcacugccugcaugagcuggcaacc

SEQ ID NO: 323438 - RNA, 32 nt, Homo Sapiens
cuaugcccgcggcauggcccggcgcugcggcc

SEQ ID NO: 323439 - RNA, 32 nt, Homo Sapiens
agcucuggaggguggccuggggccuguggaua

SEQ ID NO: 323440 - RNA, 32 nt, Homo Sapiens
ggcccugcucacucccggggccaccaaacggg

SEQ ID NO: 323441 - RNA, 32 nt, Homo Sapiens
ccggcaaauacuucaugagcuuagcagccugg

SEQ ID NO: 323442 - RNA, 32 nt, Homo Sapiens
gguuuguuuuguaugugcguguguuauacagu

SEQ ID NO: 323443 - RNA, 32 nt, Homo Sapiens
ggcggcggcggcgggcucggaggcagcgguug

SEQ ID NO: 323444 - RNA, 32 nt, Homo Sapiens
gcccugugggugccagcacgggccaccugcgg

SEQ ID NO: 323445 - RNA, 32 nt, Homo Sapiens
guccucugaacccacccuccccaggguucagg

SEQ ID NO: 323446 - RNA, 32 nt, Homo Sapiens
gacaaauccgccagcuccaaaguggccggccc

SEQ ID NO: 323447 - RNA, 32 nt, Homo Sapiens
uuaaaauccggguguuuucauuuuggguuugu

SEQ ID NO: 323448 - RNA, 32 nt, Homo Sapiens
uucccuuuuuaaaaguauuggacucuacaaau

SEQ ID NO: 323449 - RNA, 32 nt, Homo Sapiens
cacauauaccuauguaacaaaacuacacauuc

SEQ ID NO: 323450 - RNA, 32 nt, Homo Sapiens
uguggcauuauguucuggugcucauguuuccu

SEQ ID NO: 323451 - RNA, 32 nt, Homo Sapiens
ggggagauccugacccuacccuugugagaguc

SEQ ID NO: 323452 - RNA, 32 nt, Homo Sapiens
auuugugaagguuuuucuuugccuuguuuuga

SEQ ID NO: 323453 - RNA, 32 nt, Homo Sapiens
gcaggccagaagguucucucugcacagcugcc

SEQ ID NO: 323454 - RNA, 28 nt, Homo Sapiens
cauuucacuacaggaccaaauggaaacc

SEQ ID NO: 323455 - RNA, 32 nt, Homo Sapiens
ucucucccugguccccucccccauccccacca

SEQ ID NO: 323456 - RNA, 32 nt, Homo Sapiens
ccucucuuaagucagaacucugucccaaaaau

SEQ ID NO: 323457 - RNA, 32 nt, Homo Sapiens
uuuccugauuuaauaacaaacagcauuuuccu

SEQ ID NO: 323458 - RNA, 32 nt, Homo Sapiens
gacagggagagcccugucauccacaguggagg

SEQ ID NO: 323459 - RNA, 32 nt, Homo Sapiens
uggcucucaguuaaaaugugaggaagaacuac

SEQ ID NO: 323460 - RNA, 32 nt, Homo Sapiens
cagccuccggugcuguaaaacgcaggcgcugg

SEQ ID NO: 323461 - RNA, 32 nt, Homo Sapiens
ugucauugcaccuagguccucuccauggucag

SEQ ID NO: 323462 - RNA, 32 nt, Homo Sapiens
guggcauuuuauucauuuccugugcuuuaaau

SEQ ID NO: 323463 - RNA, 29 nt, Homo Sapiens
uacuuuuucauguauauccaggcuauaaa

SEQ ID NO: 323464 - RNA, 32 nt, Homo Sapiens
agcacauguuucccugacauuuucaauagagg

SEQ ID NO: 323465 - RNA, 32 nt, Homo Sapiens
ugugcugucgauaaguccccaaggcugcaugu

SEQ ID NO: 323466 - RNA, 32 nt, Homo Sapiens
ccaaaucucaacuugaacuguaucucccagaa

SEQ ID NO: 323467 - RNA, 32 nt, Homo Sapiens
cuggaagcugucaggcugggacaggcuuugau

SEQ ID NO: 323468 - RNA, 32 nt, Homo Sapiens
gcccaaggccuggccugccugccgguugucgg

SEQ ID NO: 323469 - RNA, 32 nt, Homo Sapiens
ugugcuuuuuaaaaacaguauuuuguuauaau

SEQ ID NO: 323470 - RNA, 32 nt, Homo Sapiens
aggaacaaacuccggacacgccaccuuuaaga

SEQ ID NO: 323471 - RNA, 32 nt, Homo Sapiens
ccacaucccucuaucugcccacccuggacaac

SEQ ID NO: 323472 - RNA, 32 nt, Homo Sapiens
uuuagcuuuauuugcuguaucaucaucaucag

SEQ ID NO: 323473 - RNA, 32 nt, Homo Sapiens
auuccagggacgauauggaugaaaagacaacc

SEQ ID NO: 323474 - RNA, 32 nt, Homo Sapiens
auuuggccuugaaaucgucucuguuaauccuu

SEQ ID NO: 323475 - RNA, 32 nt, Homo Sapiens
accauugcacuccagccugggcgacagagcaa

SEQ ID NO: 323476 - RNA, 32 nt, Homo Sapiens
gccagccgugcagcugcccaggcgcuauggcg

SEQ ID NO: 323477 - RNA, 32 nt, Homo Sapiens
gagguggcucugccugcagcugggccucugcc

SEQ ID NO: 323478 - RNA, 32 nt, Homo Sapiens
cuucucaccaaaagugccacuacacaggcugu

SEQ ID NO: 323479 - RNA, 32 nt, Homo Sapiens
guauacauacccagcaacuuuuauaaaugugu

SEQ ID NO: 323480 - RNA, 32 nt, Homo Sapiens
uugaucuuauuaccuagauugagauuuuuuaa

SEQ ID NO: 323481 - RNA, 32 nt, Homo Sapiens
cgaguauuaaauacagauguacuguaugcaua

SEQ ID NO: 323482 - RNA, 32 nt, Homo Sapiens
agccagguacuaccuacuggcuugcuuuuucc

SEQ ID NO: 323483 - RNA, 32 nt, Homo Sapiens
uuguuauugauuuuuggcaauuuuacauuugg

SEQ ID NO: 323484 - RNA, 32 nt, Homo Sapiens
auaaggaaaggauccuacaauauuuuauucua

SEQ ID NO: 323485 - RNA, 32 nt, Homo Sapiens
cgucuaccagcaugcagacugugaagaugcag

SEQ ID NO: 323486 - RNA, 32 nt, Homo Sapiens
augcuuucaaggguaaccagauuuagaaucuu

SEQ ID NO: 323487 - RNA, 32 nt, Homo Sapiens
auucugucuaucaaauaguacuucuaccacug

SEQ ID NO: 323488 - RNA, 32 nt, Homo Sapiens
ucucuuuacuuacugcuuaggcacauagucac

SEQ ID NO: 323489 - RNA, 32 nt, Homo Sapiens
cucaauguaaauuguuuugaaauaagaucuua

SEQ ID NO: 323490 - RNA, 32 nt, Homo Sapiens
caaggccccccucccucuccagguccccccac

SEQ ID NO: 323491 - RNA, 32 nt, Homo Sapiens
ggagaaagggaaguggaaggcagugaacacac

SEQ ID NO: 323492 - RNA, 32 nt, Homo Sapiens
ucgcgcggccuucuccuuccccacgcccccag

SEQ ID NO: 323493 - RNA, 32 nt, Homo Sapiens
gggcccagccuggacugacuguacuuccuguc

SEQ ID NO: 323494 - RNA, 32 nt, Homo Sapiens
guucauagacauugggguuguuuccaacucuc

SEQ ID NO: 323495 - RNA, 32 nt, Homo Sapiens
cucccuuucagcgccaugugugcugaggccac

SEQ ID NO: 323496 - RNA, 32 nt, Homo Sapiens
ucccgucugcucucagccuccuccuccugcag

SEQ ID NO: 323497 - RNA, 32 nt, Homo Sapiens
ccggucccguccugucccggcgcgccgcggcc

SEQ ID NO: 323498 - RNA, 32 nt, Homo Sapiens
uauguauuuuuaaagaguugguaaaucuuacc

SEQ ID NO: 323499 - RNA, 32 nt, Homo Sapiens
uggauuauauugcuugacuucuaccucagaau

SEQ ID NO: 323500 - RNA, 32 nt, Homo Sapiens
ccccugcggccgggcgcgaaaauggcggcggc

SEQ ID NO: 323501 - RNA, 32 nt, Homo Sapiens
gcggcuucgguaguggccgccguggugccaca

SEQ ID NO: 323502 - RNA, 32 nt, Homo Sapiens
gaagcagaguuguuaaagaguacuggaauagg

SEQ ID NO: 323503 - RNA, 30 nt, Homo Sapiens
uuguccuggacuuuccucuaacucuuugga

SEQ ID NO: 323504 - RNA, 32 nt, Homo Sapiens
gagccggcgccaccgcgcccccggccauggcu

SEQ ID NO: 323505 - RNA, 32 nt, Homo Sapiens
uaacaacaguaauucagcaaaugacguugauu

SEQ ID NO: 323506 - RNA, 32 nt, Homo Sapiens
uccuccuuccacguugucuccuccaccuagca

SEQ ID NO: 323507 - RNA, 32 nt, Homo Sapiens
cuugcccuucaauagacuugcccuuguuacug

SEQ ID NO: 323508 - RNA, 32 nt, Homo Sapiens
gauaauuuuuauuuucuuugaaucuuucugug

SEQ ID NO: 323509 - RNA, 32 nt, Homo Sapiens
gcauugauugaacauuuuuuacuaguagucuu

SEQ ID NO: 323510 - RNA, 32 nt, Homo Sapiens
gacccuccagacucagauggugucucacugug

SEQ ID NO: 323511 - RNA, 32 nt, Homo Sapiens
cugaaacaaacuugacaaagcaaguagagaag

SEQ ID NO: 323512 - RNA, 32 nt, Homo Sapiens
uuuuuuuguuuuauuuuguuuuugauuuuuuu

SEQ ID NO: 323513 - RNA, 32 nt, Homo Sapiens
ugggugacagagugagacgcugucucaaauug

SEQ ID NO: 323514 - RNA, 32 nt, Homo Sapiens
auagaaaaacaaacagaaauaauauguugggc

SEQ ID NO: 323515 - RNA, 32 nt, Homo Sapiens
cacccggcgaagugcacacacccagaagcuau

SEQ ID NO: 323516 - RNA, 32 nt, Homo Sapiens
uuuuuaguguacuagauccagaaacuuagugu

SEQ ID NO: 323517 - RNA, 32 nt, Homo Sapiens
uucuuugagaaugaaauugaauuaaauaugaa

SEQ ID NO: 323518 - RNA, 32 nt, Homo Sapiens
uaucauaauuaaaagcaaaaccaucuggauca

SEQ ID NO: 323519 - RNA, 32 nt, Homo Sapiens
gucauuuuuuuuucuuuuuguaauuauuuuau

SEQ ID NO: 323520 - RNA, 32 nt, Homo Sapiens
agacgcccgcgccccagccccaggcgccuccu

SEQ ID NO: 323521 - RNA, 32 nt, Homo Sapiens
ccuuauugauucauuguaauauguaaauuaaa

SEQ ID NO: 323522 - RNA, 32 nt, Homo Sapiens
gugaugucccccggcccggguucuggggcccc

SEQ ID NO: 323523 - RNA, 30 nt, Homo Sapiens
uucaaaagugaaauaaaaauuuuaucaguu

SEQ ID NO: 323524 - RNA, 32 nt, Homo Sapiens
cccgcccguuugccagcgcucaggcaggagcu

SEQ ID NO: 323525 - RNA, 32 nt, Homo Sapiens
auaagaggaaugaacgugucugcaacuaaugg

SEQ ID NO: 323526 - RNA, 32 nt, Homo Sapiens
uagcacccagagccuccaccaaacccucucca

SEQ ID NO: 323527 - RNA, 32 nt, Homo Sapiens
agugccuaaaauuguaugaaaauccuuuuaac

SEQ ID NO: 323528 - RNA, 32 nt, Homo Sapiens
gagcaaagggaaggacugacgagagauguaua

SEQ ID NO: 323529 - RNA, 32 nt, Homo Sapiens
cacacacaaucucagcugcgccauucugugca

SEQ ID NO: 323530 - RNA, 32 nt, Homo Sapiens
caugugcguggaaguguuccugucucaauagc

SEQ ID NO: 323531 - RNA, 31 nt, Homo Sapiens
uaaggacaugagguuuucuuucuugguuuuu

SEQ ID NO: 323532 - RNA, 32 nt, Homo Sapiens
ccauuaagaauauauuucaaaggcaagcuaac

SEQ ID NO: 323533 - RNA, 32 nt, Homo Sapiens
cuuuauuuuuauugucaguuucacuuuuguuu

SEQ ID NO: 323534 - RNA, 32 nt, Homo Sapiens
gagcccaccccucccaggacaccuggcugagc

SEQ ID NO: 323535 - RNA, 32 nt, Homo Sapiens
caaaggccaaacugcuggacgucuuucuuuuu

SEQ ID NO: 323536 - RNA, 31 nt, Homo Sapiens
gugucuauguguggcgguggaguccaugccu

SEQ ID NO: 323537 - RNA, 32 nt, Homo Sapiens
ccccaagccagacuugcgguuggagucuguau

SEQ ID NO: 323538 - RNA, 32 nt, Homo Sapiens
agugaugguacauuuguccauguaacagaaca

SEQ ID NO: 323539 - RNA, 32 nt, Homo Sapiens
ucaaaaagcauuuuaaugauauuggaggaaua

SEQ ID NO: 323540 - RNA, 32 nt, Homo Sapiens
auuuggauuauauucacauucuaauaaacagu

SEQ ID NO: 323541 - RNA, 32 nt, Homo Sapiens
cuccccuuauaaaauugauguugucuuuacca

SEQ ID NO: 323542 - RNA, 32 nt, Homo Sapiens
cucaggagccuucugcuggggguggggcuuca

SEQ ID NO: 323543 - RNA, 32 nt, Homo Sapiens
uugaauccggugcaugccuugguuuuggugcu

SEQ ID NO: 323544 - RNA, 32 nt, Homo Sapiens
ccuuaggccuggcaaggcgccacgacccgccc

SEQ ID NO: 323545 - RNA, 32 nt, Homo Sapiens
ccaagcccaucccgacucccggggcccucaga

SEQ ID NO: 323546 - RNA, 32 nt, Homo Sapiens
uucauauuuuuccuuauagggaaaaaugcaaa

SEQ ID NO: 323547 - RNA, 32 nt, Homo Sapiens
ugaugagaauuuccucuuuuaauaauguuauu

SEQ ID NO: 323548 - RNA, 32 nt, Homo Sapiens
auuuuguucauuuucugaaagcuaauuucaaa

SEQ ID NO: 323549 - RNA, 32 nt, Homo Sapiens
ccaauagccgccgcccgcugccugcacucuaa

SEQ ID NO: 323550 - RNA, 32 nt, Homo Sapiens
uccucacugcccuuccuccccagcccagccug

SEQ ID NO: 323551 - RNA, 32 nt, Homo Sapiens
guuuugacaccgugauuggcuuuguuuggguc

SEQ ID NO: 323552 - RNA, 32 nt, Homo Sapiens
aacgguggcuuuuuuagaaacuaccuaggagg

SEQ ID NO: 323553 - RNA, 32 nt, Homo Sapiens
uccuuuuuccuuucuuuuuuuuuucgaaauca

SEQ ID NO: 323554 - RNA, 32 nt, Homo Sapiens
gguccucccuccccagccgccccuaccaccuu

SEQ ID NO: 323555 - RNA, 32 nt, Homo Sapiens
aauccauucaagagcuaggagaucugagggca

SEQ ID NO: 323556 - RNA, 32 nt, Homo Sapiens
caacuaaaagaacuagagaaccaagagcaaac

SEQ ID NO: 323557 - RNA, 32 nt, Homo Sapiens
ggaauaaaaaagucccaaggguguuuuguuac

SEQ ID NO: 323558 - RNA, 32 nt, Homo Sapiens
gauaacccugucaucaagguccugugagaacg

SEQ ID NO: 323559 - RNA, 30 nt, Homo Sapiens
ggugccuguaucccugucuucuuuuccauc

SEQ ID NO: 323560 - RNA, 32 nt, Homo Sapiens
caggcugauccuuuauucagaauaccacaaag

SEQ ID NO: 323561 - RNA, 32 nt, Homo Sapiens
gcucucccuccuuuccucucccuugagcuugg

SEQ ID NO: 323562 - RNA, 32 nt, Homo Sapiens
agcugcucaaggagcugcagugcccugcuccc

SEQ ID NO: 323563 - RNA, 32 nt, Homo Sapiens
ucuggacuuuguaccacugaguucccaucacc

SEQ ID NO: 323564 - RNA, 32 nt, Homo Sapiens
cugcgcgugcgcgcagggcagacgguagagcg

SEQ ID NO: 323565 - RNA, 32 nt, Homo Sapiens
cccgugcugcagccauccauccccucacccgc

SEQ ID NO: 323566 - RNA, 32 nt, Homo Sapiens
cuaagggcacggcaggaaggaggugucguccu

SEQ ID NO: 323567 - RNA, 32 nt, Homo Sapiens
gaaaugagauauuuggggcagaauccacuggg

SEQ ID NO: 323568 - RNA, 32 nt, Homo Sapiens
ggagccuccagucuagcugccucuugugcugc

SEQ ID NO: 323569 - RNA, 32 nt, Homo Sapiens
gguuuggugucugaucuugagagguugaugua

SEQ ID NO: 323570 - RNA, 32 nt, Homo Sapiens
agacaguggguucccuauuucaggagaagaaa

SEQ ID NO: 323571 - RNA, 32 nt, Homo Sapiens
caaacaucuucagauguuucuguaaccauuau

SEQ ID NO: 323572 - RNA, 32 nt, Homo Sapiens
ugcuaagacuaacucaagauaauccuagaguc

SEQ ID NO: 323573 - RNA, 32 nt, Homo Sapiens
uauuuauaaaguuauuugggguugucugggau

SEQ ID NO: 323574 - RNA, 32 nt, Homo Sapiens
uuaagcagugcaauucuucccaguuauuugag

SEQ ID NO: 323575 - RNA, 32 nt, Homo Sapiens
caccucuaaucccugcacuuugggaggccgag

SEQ ID NO: 323576 - RNA, 32 nt, Homo Sapiens
ucuuuauguacaaaaacuaaaauaaagucaau

SEQ ID NO: 323577 - RNA, 32 nt, Homo Sapiens
ugucucacaccuguaaucccagcacuuuggga

SEQ ID NO: 323578 - RNA, 32 nt, Homo Sapiens
uuucuaauuauucaucauuacuguauagaaac

SEQ ID NO: 323579 - RNA, 32 nt, Homo Sapiens
ugagaugaucauauagauuuuguccuucauuc

SEQ ID NO: 323580 - RNA, 32 nt, Homo Sapiens
cucugccuugcuugcuugagcuucagcggaau

SEQ ID NO: 323581 - RNA, 32 nt, Homo Sapiens
gcuguucaugaaagauucaaugccccugaauu

SEQ ID NO: 323582 - RNA, 32 nt, Homo Sapiens
ucuauuaaaaauuuuacaaaaauuagcugcgu

SEQ ID NO: 323583 - RNA, 32 nt, Homo Sapiens
guaaaagaucacugaaacaucacgucaaguug

SEQ ID NO: 323584 - RNA, 32 nt, Homo Sapiens
aacacugaaucuccuuuuguaacugguguuca

SEQ ID NO: 323585 - RNA, 32 nt, Homo Sapiens
aaguuucaguuauuggauuaaacuacuuuaga

SEQ ID NO: 323586 - RNA, 32 nt, Homo Sapiens
cagguggcuccggccagcccagccccagcaug

SEQ ID NO: 323587 - RNA, 32 nt, Homo Sapiens
ucaccaugaccccacucuuaccauaguggcua

SEQ ID NO: 323588 - RNA, 32 nt, Homo Sapiens
gaagagcccaggaugccucaggccuggcaacu

SEQ ID NO: 323589 - RNA, 32 nt, Homo Sapiens
uggucuggaagagcccagguccagcaccccuu

SEQ ID NO: 323590 - RNA, 32 nt, Homo Sapiens
auuuugguauuugguuacauuaucauauuuac

SEQ ID NO: 323591 - RNA, 32 nt, Homo Sapiens
gggcaguggucacuccacgccauucccucugg

SEQ ID NO: 323592 - RNA, 32 nt, Homo Sapiens
ugccucugcccaccucuucucuucugcuucca

SEQ ID NO: 323593 - RNA, 32 nt, Homo Sapiens
cuucugugccgaccaggccaccagccagcguu

SEQ ID NO: 323594 - RNA, 32 nt, Homo Sapiens
cugaguuccagaaugaauuuaguuuaauugcu

SEQ ID NO: 323595 - RNA, 32 nt, Homo Sapiens
aggguggcagugcccaucauguggcuagaaca

SEQ ID NO: 323596 - RNA, 32 nt, Homo Sapiens
aucauuugauuuauuuuaauauuauauccuua

SEQ ID NO: 323597 - RNA, 32 nt, Homo Sapiens
guggguggguggcaggcugggccuagcacuug

SEQ ID NO: 323598 - RNA, 32 nt, Homo Sapiens
ccagccccugucagggccucugccaaggaaau

SEQ ID NO: 323599 - RNA, 32 nt, Homo Sapiens
cuuguagcaaaagaagcagaaguuagauccca

SEQ ID NO: 323600 - RNA, 32 nt, Homo Sapiens
cauaccugcucugcacgcuugcuggaggcuga

SEQ ID NO: 323601 - RNA, 32 nt, Homo Sapiens
ccuggcagaaaagaaguuuugauaggggcaga

SEQ ID NO: 323602 - RNA, 32 nt, Homo Sapiens
aucuagaagaucugggagauuguggacgggcu

SEQ ID NO: 323603 - RNA, 32 nt, Homo Sapiens
ucaguuuggugcccagguccccaaaggaagug

SEQ ID NO: 323604 - RNA, 32 nt, Homo Sapiens
ggcccuccaagcccaagccuccugcuccgggg

SEQ ID NO: 323605 - RNA, 32 nt, Homo Sapiens
uuucuuugauucuagaagcuguuuaauaucac

SEQ ID NO: 323606 - RNA, 32 nt, Homo Sapiens
gagaaccaggacaucagaggaagaaaaucagc

SEQ ID NO: 323607 - RNA, 32 nt, Homo Sapiens
ccuauaaauuuguuucuuccaagcuuagcucu

SEQ ID NO: 323608 - RNA, 32 nt, Homo Sapiens
gguuucaaggcacaaugagacucacuggcccu

SEQ ID NO: 323609 - RNA, 32 nt, Homo Sapiens
auuuagccgggcgugguggugcaggccuguaa

SEQ ID NO: 323610 - RNA, 32 nt, Homo Sapiens
ucgaggcguggccguggauuccagaaagcccc

SEQ ID NO: 323611 - RNA, 32 nt, Homo Sapiens
uuaagacucccacuagcuucguguccuuuggc

SEQ ID NO: 323612 - RNA, 32 nt, Homo Sapiens
uccaaccaccaccaccugacaacccugcaugg

SEQ ID NO: 323613 - RNA, 32 nt, Homo Sapiens
uuauugcuauaagaggaaauucauacuguuaa

SEQ ID NO: 323614 - RNA, 32 nt, Homo Sapiens
guuuuuuggguccacauuucaaggcugaagug

SEQ ID NO: 323615 - RNA, 31 nt, Homo Sapiens
ucggcgggaggcguccugccccgcgagcgcc

SEQ ID NO: 323616 - RNA, 32 nt, Homo Sapiens
cagccgggcccgaucacccgccgcccggugcc

SEQ ID NO: 323617 - RNA, 32 nt, Homo Sapiens
ugacauuuuaagucucucuggugcuaagaauu

SEQ ID NO: 323618 - RNA, 32 nt, Homo Sapiens
ccuaugggagcuggggaucuggauuccugguu

SEQ ID NO: 323619 - RNA, 32 nt, Homo Sapiens
cauaaagaauacuugaaaaauuaauuguauga

SEQ ID NO: 323620 - RNA, 32 nt, Homo Sapiens
agagcagcaaaccgcgcgccagccucaaaccc

SEQ ID NO: 323621 - RNA, 28 nt, Homo Sapiens
ggagggggaggagcgccgaggcagugac

SEQ ID NO: 323622 - RNA, 32 nt, Homo Sapiens
agaguaaaaguguauuuguaaacuguauggga

SEQ ID NO: 323623 - RNA, 32 nt, Homo Sapiens
uggacucccucauggcugccucucucuccagg

SEQ ID NO: 323624 - RNA, 32 nt, Homo Sapiens
cugcccgccucggccucccaaaauugcuggga

SEQ ID NO: 323625 - RNA, 32 nt, Homo Sapiens
gauccagcgccaagccgggccuucccugccug

SEQ ID NO: 323626 - RNA, 32 nt, Homo Sapiens
aagggcucgcgccggugccgccgcccuucuca

SEQ ID NO: 323627 - RNA, 32 nt, Homo Sapiens
auugauuuuuaaaguguauuuuuccguauucu

SEQ ID NO: 323628 - RNA, 32 nt, Homo Sapiens
uaaaccuaaaagcauuugaacaugacaccaga

SEQ ID NO: 323629 - RNA, 32 nt, Homo Sapiens
accuagcgcuggccccaugcagccucccuggg

SEQ ID NO: 323630 - RNA, 32 nt, Homo Sapiens
uuuuuucuuuuguauuuugauaaacacugaag

SEQ ID NO: 323631 - RNA, 32 nt, Homo Sapiens
gacauaauuauauaaaaacuacguggauguac

SEQ ID NO: 323632 - RNA, 32 nt, Homo Sapiens
accaggaagauaaaacaacagccacaaaagag

SEQ ID NO: 323633 - RNA, 32 nt, Homo Sapiens
ccugaaagacaauuuggccauuuuggaaaagc

SEQ ID NO: 323634 - RNA, 32 nt, Homo Sapiens
ugaagggggaggaggcuguggcaggcaggggu

SEQ ID NO: 323635 - RNA, 32 nt, Homo Sapiens
aggccggcuuccugggguagcgguacaggcgg

SEQ ID NO: 323636 - RNA, 32 nt, Homo Sapiens
cacugcaaagccuaagagucugcacaccguug

SEQ ID NO: 323637 - RNA, 32 nt, Homo Sapiens
acagaaaaccccgaaauucacagguaaaucau

SEQ ID NO: 323638 - RNA, 32 nt, Homo Sapiens
ucugcaggcugugucuggcccgugggcuuugg

SEQ ID NO: 323639 - RNA, 32 nt, Homo Sapiens
ugcuguaguucuaucuuugcaaugugucauaa

SEQ ID NO: 323640 - RNA, 32 nt, Homo Sapiens
ugauuacauauccuucacucucuucucuucau

SEQ ID NO: 323641 - RNA, 32 nt, Homo Sapiens
aggcauggggcccuugaccucuaggccccagu

SEQ ID NO: 323642 - RNA, 32 nt, Homo Sapiens
aucccggcagacgccaguggcuuuggcucugc

SEQ ID NO: 323643 - RNA, 32 nt, Homo Sapiens
gcccccuauuuuauuucuuccaugucugcaaa

SEQ ID NO: 323644 - RNA, 32 nt, Homo Sapiens
auuuauucaaauaguuuucugcucauucuguu

SEQ ID NO: 323645 - RNA, 32 nt, Homo Sapiens
ccuuugguggauguuauggggcaaaguuauga

SEQ ID NO: 323646 - RNA, 32 nt, Homo Sapiens
cuggagucaacagaucaucuuuuccccaaacc

SEQ ID NO: 323647 - RNA, 32 nt, Homo Sapiens
cugggagugcucugaggccucugggggagaag

SEQ ID NO: 323648 - RNA, 32 nt, Homo Sapiens
aguugacaucagguuggaagcagugaguucug

SEQ ID NO: 323649 - RNA, 32 nt, Homo Sapiens
cuugggagaaugagcugcagaagaugacccgg

SEQ ID NO: 323650 - RNA, 28 nt, Homo Sapiens
acgagggggcggccgacgacguucguca

SEQ ID NO: 323651 - RNA, 31 nt, Homo Sapiens
gaggcggagccccuuggccaccagagugcuc

SEQ ID NO: 323652 - RNA, 32 nt, Homo Sapiens
agauaccuauaaaagaaacauaaaaguauguu

SEQ ID NO: 323653 - RNA, 32 nt, Homo Sapiens
cgguggagccgagcggggagccaggaaagaag

SEQ ID NO: 323654 - RNA, 32 nt, Homo Sapiens
cuuugugaguuuuccaggauguguguaaacua

SEQ ID NO: 323655 - RNA, 32 nt, Homo Sapiens
gcuauguuacgcuaagcuacugucccaucucu

SEQ ID NO: 323656 - RNA, 31 nt, Homo Sapiens
cguuucuacugcagccaaaccagauaggcua

SEQ ID NO: 323657 - RNA, 32 nt, Homo Sapiens
uaagaaauaaaauaaacagaagucugacugcc

SEQ ID NO: 323658 - RNA, 32 nt, Homo Sapiens
ggagccugagaaggcccccgggccccagcaug

SEQ ID NO: 323659 - RNA, 29 nt, Homo Sapiens
gaacaugauguggcccaugcacaccccac

SEQ ID NO: 323660 - RNA, 32 nt, Homo Sapiens
uaaggccuagagggggugauguguggcacaug

SEQ ID NO: 323661 - RNA, 32 nt, Homo Sapiens
gaggagaggagaaauguggacagagggcuuga

SEQ ID NO: 323662 - RNA, 32 nt, Homo Sapiens
uauuggcgguauacaaaguaaaauguuauaaa

SEQ ID NO: 323663 - RNA, 32 nt, Homo Sapiens
caauuaauuaaaugaacuuauguacagaaaac

SEQ ID NO: 323664 - RNA, 32 nt, Homo Sapiens
gugugagaaaaaaguuuguuuacaggagcaga

SEQ ID NO: 323665 - RNA, 32 nt, Homo Sapiens
gucgacagcaaccacauggaauaaugacucau

SEQ ID NO: 323666 - RNA, 32 nt, Homo Sapiens
aggauggcgggggcagggggccggggcggugc

SEQ ID NO: 323667 - RNA, 32 nt, Homo Sapiens
aauguaacaauaaaguuccucaaaauaagauc

SEQ ID NO: 323668 - RNA, 32 nt, Homo Sapiens
cuaagcugguuuccuccuccccaggguuuugc

SEQ ID NO: 323669 - RNA, 32 nt, Homo Sapiens
cauuucuuuuaaaaauauaaauuauacuguac

SEQ ID NO: 323670 - RNA, 32 nt, Homo Sapiens
cgggcgaggaggaggggucgccgcgagccgaa

SEQ ID NO: 323671 - RNA, 32 nt, Homo Sapiens
uucuagaugauacaacucuuauuucaguucaa

SEQ ID NO: 323672 - RNA, 32 nt, Homo Sapiens
agcuccugccagcccaucccucugcagaaugu

SEQ ID NO: 323673 - RNA, 32 nt, Homo Sapiens
caucccagaagcugcuguuagcucgccggucc

SEQ ID NO: 323674 - RNA, 32 nt, Homo Sapiens
uccagauugggucuuccugcacaggaagacuc

SEQ ID NO: 323675 - RNA, 31 nt, Homo Sapiens
caggcucggcacugucugcucacuggagccg

SEQ ID NO: 323676 - RNA, 32 nt, Homo Sapiens
acagaaggaaucaacauuuacccacuuuguga

SEQ ID NO: 323677 - RNA, 32 nt, Homo Sapiens
ugcccgcguuugcgcagccccgggccaugucc

SEQ ID NO: 323678 - RNA, 32 nt, Homo Sapiens
ccacaccccucgcgguuccagggggcggcggc

SEQ ID NO: 323679 - RNA, 32 nt, Homo Sapiens
cagcgggcccuggggcagcugcugugccaggc

SEQ ID NO: 323680 - RNA, 32 nt, Homo Sapiens
gcgaaguaaguacuucuguuuucucuaaguag

SEQ ID NO: 323681 - RNA, 32 nt, Homo Sapiens
gcacuggguaaaccacguucauggucauggaa

SEQ ID NO: 323682 - RNA, 32 nt, Homo Sapiens
acccggaauuguacuugucaagcaaaaucuau

SEQ ID NO: 323683 - RNA, 32 nt, Homo Sapiens
gcugcgggccgcgccgcgccgccugaaccugg

SEQ ID NO: 323684 - RNA, 32 nt, Homo Sapiens
acagccgcgggaaggugucggauggcgguucc

SEQ ID NO: 323685 - RNA, 32 nt, Homo Sapiens
cgccgccggccgccgcuggcgcauggcgggua

SEQ ID NO: 323686 - RNA, 30 nt, Homo Sapiens
agaugcaagauuaugggggaaauccuauau

SEQ ID NO: 323687 - RNA, 32 nt, Homo Sapiens
ccugaaauguguaucuauguaacaucacuuaa

SEQ ID NO: 323688 - RNA, 32 nt, Homo Sapiens
acugcgagccagcagaggccuccacccagugc

SEQ ID NO: 323689 - RNA, 32 nt, Homo Sapiens
ucccaugaaauauuuggaacguaagaguagua

SEQ ID NO: 323690 - RNA, 32 nt, Homo Sapiens
gccugugcacucucuuccuuggguguuuggug

SEQ ID NO: 323691 - RNA, 29 nt, Homo Sapiens
gaacaaaagguuuuggauuuucuaaagau

SEQ ID NO: 323692 - RNA, 32 nt, Homo Sapiens
cccgccuagcccgaacuccgcggcggcggcug

SEQ ID NO: 323693 - RNA, 32 nt, Homo Sapiens
uuaaaguggcagcuucacucgacauuugguga

SEQ ID NO: 323694 - RNA, 32 nt, Homo Sapiens
ucgguccacacuccccgcccccggccucuggu

SEQ ID NO: 323695 - RNA, 32 nt, Homo Sapiens
uucuucaacaggaaacagauauuggaauagug

SEQ ID NO: 323696 - RNA, 32 nt, Homo Sapiens
gaaaugcaaaaauacuaauuagagaauaaugu

SEQ ID NO: 323697 - RNA, 32 nt, Homo Sapiens
uauaugaagauaaguguauuuuucaauaaagc

SEQ ID NO: 323698 - RNA, 32 nt, Homo Sapiens
ggggguuuuaggggccugggcuggggggaugg

SEQ ID NO: 323699 - RNA, 32 nt, Homo Sapiens
uucuuuuuggcuuuuuugccuccaccuuuuag

SEQ ID NO: 323700 - RNA, 32 nt, Homo Sapiens
cggcaccaugauggaggagaucgaccgguucc

SEQ ID NO: 323701 - RNA, 32 nt, Homo Sapiens
caccaauugaccaggagcucuaucuguuugau

SEQ ID NO: 323702 - RNA, 32 nt, Homo Sapiens
gggcagggccuggccugguccaggcuugggcu

SEQ ID NO: 323703 - RNA, 32 nt, Homo Sapiens
aaagauuuuaccaugccuggaaauuuuacagg

SEQ ID NO: 323704 - RNA, 32 nt, Homo Sapiens
caacuggguaacugucccacuccucuggggcc

SEQ ID NO: 323705 - RNA, 32 nt, Homo Sapiens
uuuauauuuuacaaagcuucuaccacucugaa

SEQ ID NO: 323706 - RNA, 32 nt, Homo Sapiens
ccguauuuaguuccucuuucuguaugaucaau

SEQ ID NO: 323707 - RNA, 32 nt, Homo Sapiens
uguguaucccuacaauaaaacucagugggaca

SEQ ID NO: 323708 - RNA, 32 nt, Homo Sapiens
cauucaguaaagugucaagugauuaagugugu

SEQ ID NO: 323709 - RNA, 32 nt, Homo Sapiens
acacuaauuauuuuaaauguguuaauacugug

SEQ ID NO: 323710 - RNA, 32 nt, Homo Sapiens
cugaaugaagucauacccuauuagauagcucc

SEQ ID NO: 323711 - RNA, 32 nt, Homo Sapiens
uucuuaacugacccacuccucccguuggcaga

SEQ ID NO: 323712 - RNA, 32 nt, Homo Sapiens
gaacuuaaugaaauaaucaugauuguauuaua

SEQ ID NO: 323713 - RNA, 32 nt, Homo Sapiens
cccaacccauuaccauguugucuaaauaaacu

SEQ ID NO: 323714 - RNA, 32 nt, Homo Sapiens
cugccugguuucugccaagggcugcugcuucu

SEQ ID NO: 323715 - RNA, 32 nt, Homo Sapiens
cuacauggugaaucgagaauccauuucacaau

SEQ ID NO: 323716 - RNA, 32 nt, Homo Sapiens
gcugaggagccuucgccgcagcccuuccgagc

SEQ ID NO: 323717 - RNA, 32 nt, Homo Sapiens
agccgcuuccccagcucagagccccgccccac

SEQ ID NO: 323718 - RNA, 31 nt, Homo Sapiens
acgggggagcccccugugcuggggagcggca

SEQ ID NO: 323719 - RNA, 32 nt, Homo Sapiens
uucccuggucuggcucugcuggagcggguggg

SEQ ID NO: 323720 - RNA, 32 nt, Homo Sapiens
gagcugggccccagcccagugacuggcucauu

SEQ ID NO: 323721 - RNA, 32 nt, Homo Sapiens
uggucucagcagcgaccaccccugccuccacc

SEQ ID NO: 323722 - RNA, 32 nt, Homo Sapiens
ugcaucuugagaaguuguauguuuccuaggua

SEQ ID NO: 323723 - RNA, 32 nt, Homo Sapiens
cuagcuuugucuaguuuauagcaccuuaacuu

SEQ ID NO: 323724 - RNA, 32 nt, Homo Sapiens
ucuuucagucauugucuuaguuuggguacaaa

SEQ ID NO: 323725 - RNA, 32 nt, Homo Sapiens
augagacggcccuugggaagagguauuagcca

SEQ ID NO: 323726 - RNA, 32 nt, Homo Sapiens
cuagcccaucuucaaugaccccuuaaucugca

SEQ ID NO: 323727 - RNA, 32 nt, Homo Sapiens
ugcugcccgggguggggugcacucgccauuuc

SEQ ID NO: 323728 - RNA, 32 nt, Homo Sapiens
cuggggaggggaggggaggggcgggauguuca

SEQ ID NO: 323729 - RNA, 32 nt, Homo Sapiens
uaacaacugugggaccaucaccucaaggacua

SEQ ID NO: 323730 - RNA, 32 nt, Homo Sapiens
ccccgccguggcuuauggggaggaaugcauca

SEQ ID NO: 323731 - RNA, 32 nt, Homo Sapiens
ggagacuccgcggcaggaaaggcaggugggcu

SEQ ID NO: 323732 - RNA, 32 nt, Homo Sapiens
uccccauugccugcccgaggugcaaggugggg

SEQ ID NO: 323733 - RNA, 32 nt, Homo Sapiens
ccccggccccgggaccccggagcggagauuga

SEQ ID NO: 323734 - RNA, 32 nt, Homo Sapiens
ggaaggcgagaagagggaggagacacuggugu

SEQ ID NO: 323735 - RNA, 32 nt, Homo Sapiens
accaggaaggcacugaucugccuuauaagcac

SEQ ID NO: 323736 - RNA, 32 nt, Homo Sapiens
cuucuaauggcaccaaugccucccaucaagcc

SEQ ID NO: 323737 - RNA, 32 nt, Homo Sapiens
guggcucccugggggcggccagcccucccagc

SEQ ID NO: 323738 - RNA, 32 nt, Homo Sapiens
cuugugauucuacugcuucuuauucacacuau

SEQ ID NO: 323739 - RNA, 27 nt, Homo Sapiens
ccggggcucuucuucaucaccucacgg

SEQ ID NO: 323740 - RNA, 32 nt, Homo Sapiens
uaaacauuucuuuucaguucauguaguucuuu

SEQ ID NO: 323741 - RNA, 32 nt, Homo Sapiens
cgugacuuuccgguugcccuggaucucagaau

SEQ ID NO: 323742 - RNA, 32 nt, Homo Sapiens
caggccccacagugcagcuucuccagggccga

SEQ ID NO: 323743 - RNA, 32 nt, Homo Sapiens
gggagcuuccuuccuuccuuccuggacagguc

SEQ ID NO: 323744 - RNA, 32 nt, Homo Sapiens
cuagacauuaaacuguacuuugaaaauaaaaa

SEQ ID NO: 323745 - RNA, 32 nt, Homo Sapiens
uaaguaauaugccaaaucauggcagcaaaaau

SEQ ID NO: 323746 - RNA, 32 nt, Homo Sapiens
uuacaggugauagagauagauacauguaugug

SEQ ID NO: 323747 - RNA, 32 nt, Homo Sapiens
gggccuucaaagcucagagacugguuugaaug

SEQ ID NO: 323748 - RNA, 32 nt, Homo Sapiens
ugacuccuguugccugagcacaaaaaugggca

SEQ ID NO: 323749 - RNA, 32 nt, Homo Sapiens
uaauguagcugcauuucuuuaguuauuuugaa

SEQ ID NO: 323750 - RNA, 32 nt, Homo Sapiens
aauauacuuuugugguauaaucugaaauuuuu

SEQ ID NO: 323751 - RNA, 32 nt, Homo Sapiens
caaaaaugggcuagaaugaaaaggggaugccu

SEQ ID NO: 323752 - RNA, 32 nt, Homo Sapiens
cccaggccaggcagaagcugugcucugaagcu

SEQ ID NO: 323753 - RNA, 32 nt, Homo Sapiens
guuuauauccuacuugugcagauaguauuucu

SEQ ID NO: 323754 - RNA, 32 nt, Homo Sapiens
aaaauuauauguugauuuuucuuucucucuga

SEQ ID NO: 323755 - RNA, 32 nt, Homo Sapiens
ggcuccuugguucuugaggggaccaggagugg

SEQ ID NO: 323756 - RNA, 31 nt, Homo Sapiens
gcagagcugccggcugugcggggccgcgcuc

SEQ ID NO: 323757 - RNA, 28 nt, Homo Sapiens
agcgcagggcggccgcugcagguccccg

SEQ ID NO: 323758 - RNA, 32 nt, Homo Sapiens
ccccaggaucacucaagacccugugcuugugg

SEQ ID NO: 323759 - RNA, 32 nt, Homo Sapiens
cccaggagaggaagguuaagagaugucggcag

SEQ ID NO: 323760 - RNA, 32 nt, Homo Sapiens
ucauuaccagugcagcgacugccgucccaggg

SEQ ID NO: 323761 - RNA, 32 nt, Homo Sapiens
accacuggggacgugcugugcccugcacgugc

SEQ ID NO: 323762 - RNA, 32 nt, Homo Sapiens
cugccccccagcguuggcgugguugacaagaa

SEQ ID NO: 323763 - RNA, 31 nt, Homo Sapiens
aaguuagcaauuauguacggauauuauacag

SEQ ID NO: 323764 - RNA, 32 nt, Homo Sapiens
aggauugaaacauguuggaauuuucguggcuc

SEQ ID NO: 323765 - RNA, 32 nt, Homo Sapiens
guacuccuacuggccugaccagggcugacugg

SEQ ID NO: 323766 - RNA, 32 nt, Homo Sapiens
cccuccagcccauuuucugccgugaaacccca

SEQ ID NO: 323767 - RNA, 32 nt, Homo Sapiens
ccggagaccgcggcggccucagcgaggacccu

SEQ ID NO: 323768 - RNA, 32 nt, Homo Sapiens
ggcugcaccaccccggcccgcugcugugccuc

SEQ ID NO: 323769 - RNA, 32 nt, Homo Sapiens
gugaauugaccaaggaaccuuuuccuugggau

SEQ ID NO: 323770 - RNA, 32 nt, Homo Sapiens
gagggacuggaguccggcucccggugaccccg

SEQ ID NO: 323771 - RNA, 32 nt, Homo Sapiens
ggccuugcccucccccucccagcccagggucc

SEQ ID NO: 323772 - RNA, 32 nt, Homo Sapiens
auuauuuauaguuaggaauuuacuacauuuug

SEQ ID NO: 323773 - RNA, 32 nt, Homo Sapiens
gucuaagggauuuuaagggauuuuaaaucuuc

SEQ ID NO: 323774 - RNA, 32 nt, Homo Sapiens
agacaaggguagcugacucagcccuuaguguc

SEQ ID NO: 323775 - RNA, 32 nt, Homo Sapiens
caguuauugcaagaaaaugaaacuacagaaau

SEQ ID NO: 323776 - RNA, 32 nt, Homo Sapiens
cccgcggugcagcuccagccccgggaagcccc

SEQ ID NO: 323777 - RNA, 32 nt, Homo Sapiens
ggcuugacaccagagcagcccccgcgugaaau

SEQ ID NO: 323778 - RNA, 32 nt, Homo Sapiens
aaugugagauugaguauaucagagcaguaauu

SEQ ID NO: 323779 - RNA, 32 nt, Homo Sapiens
guugcuaaaugugaaucacgcgggagugagug

SEQ ID NO: 323780 - RNA, 32 nt, Homo Sapiens
ggcgggugugucugaaggagaaugggaucccg

SEQ ID NO: 323781 - RNA, 32 nt, Homo Sapiens
acugaagaaacuucaaaacucuauucaagaaa

SEQ ID NO: 323782 - RNA, 32 nt, Homo Sapiens
uauuugugaacuugucugaugaucucuuccca

SEQ ID NO: 323783 - RNA, 32 nt, Homo Sapiens
cuauuaauacaccgauaaccacaggggaaggg

SEQ ID NO: 323784 - RNA, 32 nt, Homo Sapiens
uuaguguguaaguugaguuugucauuaaaauc

SEQ ID NO: 323785 - RNA, 32 nt, Homo Sapiens
caugacaggaaaaugaaagaaacuuccuuuac

SEQ ID NO: 323786 - RNA, 32 nt, Homo Sapiens
uuugauuaacuguguugccuauuuaugcaggg

SEQ ID NO: 323787 - RNA, 32 nt, Homo Sapiens
uuuuuguuaaacuuaugagaauguguuaagaa

SEQ ID NO: 323788 - RNA, 32 nt, Homo Sapiens
aguaucucauuucucaaagcuaaagagauaua

SEQ ID NO: 323789 - RNA, 32 nt, Homo Sapiens
uguuuaauaacuuuuguauaaucuucauugcu

SEQ ID NO: 323790 - RNA, 32 nt, Homo Sapiens
aggcccugagccccaugcccagcccugccuug

SEQ ID NO: 323791 - RNA, 32 nt, Homo Sapiens
ggugguacaccuguagucucagcuacuuagga

SEQ ID NO: 323792 - RNA, 32 nt, Homo Sapiens
cacagcgguguaaagaaagccaaaucaaggac

SEQ ID NO: 323793 - RNA, 32 nt, Homo Sapiens
aagacugaaucuaccugccuaagggacuuaac

SEQ ID NO: 323794 - RNA, 32 nt, Homo Sapiens
ggcagaggggaaggcggccggcuggggauggg

SEQ ID NO: 323795 - RNA, 32 nt, Homo Sapiens
ucacucgccggggcacggggcgucggcugcug

SEQ ID NO: 323796 - RNA, 32 nt, Homo Sapiens
cugugagaaagcccuuucccagcccuccacca

SEQ ID NO: 323797 - RNA, 32 nt, Homo Sapiens
uucugggcucgcgcuuccacuccgccgcgccu

SEQ ID NO: 323798 - RNA, 32 nt, Homo Sapiens
ugcuuggaggucgagagacggauacguaagug

SEQ ID NO: 323799 - RNA, 32 nt, Homo Sapiens
cccagccgccccaggaccucccagcuccuucc

SEQ ID NO: 323800 - RNA, 32 nt, Homo Sapiens
aacuuuuacauaucaagacacacugucccauu

SEQ ID NO: 323801 - RNA, 32 nt, Homo Sapiens
ucuguggcggggcuggagggcuggggugcacu

SEQ ID NO: 323802 - RNA, 30 nt, Homo Sapiens
cagcaacuggacuggcacugccaggacgug

SEQ ID NO: 323803 - RNA, 32 nt, Homo Sapiens
ccuggugugucuguucucuccucugucccagg

SEQ ID NO: 323804 - RNA, 32 nt, Homo Sapiens
gagugugcugcccccacccccacccccgcacc

SEQ ID NO: 323805 - RNA, 32 nt, Homo Sapiens
caggagugcgucgagguuguuccgcggcaauu

SEQ ID NO: 323806 - RNA, 29 nt, Homo Sapiens
uguaagaugaagauaaggaugauacaguc

SEQ ID NO: 323807 - RNA, 32 nt, Homo Sapiens
ucagguagagauuggggcugcuauggggacug

SEQ ID NO: 323808 - RNA, 32 nt, Homo Sapiens
cuuuucuaucacucccaccucccccagaguca

SEQ ID NO: 323809 - RNA, 32 nt, Homo Sapiens
ugccaccuugggaaacaagagugaggaagaaa

SEQ ID NO: 323810 - RNA, 32 nt, Homo Sapiens
agcugcugccuccuuacuccuggcccucuaca

SEQ ID NO: 323811 - RNA, 32 nt, Homo Sapiens
gcuucaaauaccaucuaguuuauaguuuauuu

SEQ ID NO: 323812 - RNA, 32 nt, Homo Sapiens
gccccaccaugccccaggcugcagccucuguc

SEQ ID NO: 323813 - RNA, 32 nt, Homo Sapiens
uuaagacagaguauccuggggguggugguggg

SEQ ID NO: 323814 - RNA, 32 nt, Homo Sapiens
cugaugaaauuucuaacaaucaucaguuagga

SEQ ID NO: 323815 - RNA, 32 nt, Homo Sapiens
gcuggccagugaggcucggcccggggaaagug

SEQ ID NO: 323816 - RNA, 32 nt, Homo Sapiens
gaucucacccucacuccaaggcacauagcagg

SEQ ID NO: 323817 - RNA, 32 nt, Homo Sapiens
uacagaaaggcaccauuauguuagaauaaauu

SEQ ID NO: 323818 - RNA, 32 nt, Homo Sapiens
agaaaagucugugagaccccuacaucauucug

SEQ ID NO: 323819 - RNA, 32 nt, Homo Sapiens
cagauccaguggccaugcccccugcuucccau

SEQ ID NO: 323820 - RNA, 32 nt, Homo Sapiens
caugugagcgacacgcagacauccgcgagggc

SEQ ID NO: 323821 - RNA, 32 nt, Homo Sapiens
aacuucauuagcagauuugugcucuuccauac

SEQ ID NO: 323822 - RNA, 32 nt, Homo Sapiens
cugaacucuucccugaauuaaucguuuucagu

SEQ ID NO: 323823 - RNA, 32 nt, Homo Sapiens
acggaaacaacaauuauauaaugaagaaauga

SEQ ID NO: 323824 - RNA, 32 nt, Homo Sapiens
agacugcauggcucaggcguuaauaauggaca

SEQ ID NO: 323825 - RNA, 32 nt, Homo Sapiens
uuuagaaaaaucacuucugaccuugaaauaaa

SEQ ID NO: 323826 - RNA, 32 nt, Homo Sapiens
cgagcugagcuggcagagucccguugcugaga

SEQ ID NO: 323827 - RNA, 29 nt, Homo Sapiens
aacaauguguggcauuuguuguucuguaa

SEQ ID NO: 323828 - RNA, 27 nt, Homo Sapiens
uaggugacccuggucagccccucgggc

SEQ ID NO: 323829 - RNA, 30 nt, Homo Sapiens
agagccaccgcggagcgcgcgcgggguugg

SEQ ID NO: 323830 - RNA, 32 nt, Homo Sapiens
ccacauuccugcugcugcgggcgugggcuccc

SEQ ID NO: 323831 - RNA, 32 nt, Homo Sapiens
guggaacccagcuacuucucaccugcuccagc

SEQ ID NO: 323832 - RNA, 32 nt, Homo Sapiens
gcuuuagcuccgccucucuccuccuuugcuca

SEQ ID NO: 323833 - RNA, 32 nt, Homo Sapiens
uccaagaacauaaaguuaaaauauaugaauuu

SEQ ID NO: 323834 - RNA, 32 nt, Homo Sapiens
uguuaaucuaaugaaguaaaaaacuccugugu

SEQ ID NO: 323835 - RNA, 32 nt, Homo Sapiens
augaaguguauagggaaggacacacacauugg

SEQ ID NO: 323836 - RNA, 32 nt, Homo Sapiens
gauacagggucucauucuguugccuaggcuug

SEQ ID NO: 323837 - RNA, 32 nt, Homo Sapiens
cccgcgcaccccgcacggcccgggcccacgua

SEQ ID NO: 323838 - RNA, 32 nt, Homo Sapiens
gaggccaaggcgaguggauugcuugagcccag

SEQ ID NO: 323839 - RNA, 32 nt, Homo Sapiens
ggcgagcagcuggcagagagcccagugccggc

SEQ ID NO: 323840 - RNA, 32 nt, Homo Sapiens
uuaccuuacucuguuuagaaaaguauacaagc

SEQ ID NO: 323841 - RNA, 32 nt, Homo Sapiens
guacuguuuuuggucagaauagauaaccucaa

SEQ ID NO: 323842 - RNA, 32 nt, Homo Sapiens
uucaaagugucugccuguguacauguacuugu

SEQ ID NO: 323843 - RNA, 32 nt, Homo Sapiens
gauuuacugccuguuuuuacacugccauuacc

SEQ ID NO: 323844 - RNA, 32 nt, Homo Sapiens
gccuauaaccauucuuuuuuuagggaggugug

SEQ ID NO: 323845 - RNA, 32 nt, Homo Sapiens
uacccgggaggcugaggccugagacucgcuug

SEQ ID NO: 323846 - RNA, 32 nt, Homo Sapiens
uuauauuuguauagugaauuguguacaauuuu

SEQ ID NO: 323847 - RNA, 32 nt, Homo Sapiens
ccugggcucggccgaccuguugccucauauug

SEQ ID NO: 323848 - RNA, 32 nt, Homo Sapiens
acaugagcauucccuauagauuaggguucuuc

SEQ ID NO: 323849 - RNA, 32 nt, Homo Sapiens
aaacaugcuuccuuuucaaagaauagacuuca

SEQ ID NO: 323850 - RNA, 32 nt, Homo Sapiens
ccgcagccugcgcgggaggccacagcccgugc

SEQ ID NO: 323851 - RNA, 32 nt, Homo Sapiens
uaacagcuauuaugaacaaaauuuuuccuguu

SEQ ID NO: 323852 - RNA, 29 nt, Homo Sapiens
cgggaugggcccggccaccccggagcaga

SEQ ID NO: 323853 - RNA, 32 nt, Homo Sapiens
cccacuuacacgcuuuuaugucagccgcgauc

SEQ ID NO: 323854 - RNA, 32 nt, Homo Sapiens
acugccaggcugccuccugcccuuacagcccu

SEQ ID NO: 323855 - RNA, 32 nt, Homo Sapiens
uuuaaaaccuuuauaugugaauuaccaucuug

SEQ ID NO: 323856 - RNA, 29 nt, Homo Sapiens
gccgggaagagcacagggacgaggggguc

SEQ ID NO: 323857 - RNA, 32 nt, Homo Sapiens
uuuucuuaauauuuuuaacauugugucuuuua

SEQ ID NO: 323858 - RNA, 32 nt, Homo Sapiens
gauucggaccggcucuguguucacuacacuca

SEQ ID NO: 323859 - RNA, 32 nt, Homo Sapiens
acuugaugaaacaaaacuauaccucugaauau

SEQ ID NO: 323860 - RNA, 32 nt, Homo Sapiens
aaucucuguaccuuccucuccauuuugcugug

SEQ ID NO: 323861 - RNA, 32 nt, Homo Sapiens
acuuuaaaaaauaccagcacugcuauuccaau

SEQ ID NO: 323862 - RNA, 32 nt, Homo Sapiens
cgagauacagcuuuuugcaguaugguggguug

SEQ ID NO: 323863 - RNA, 32 nt, Homo Sapiens
uguggauggagcuugcauggggccuagggagu

SEQ ID NO: 323864 - RNA, 32 nt, Homo Sapiens
gcuaguccugcauauuuuuucuuaaauauuuc

SEQ ID NO: 323865 - RNA, 32 nt, Homo Sapiens
ugcgaggagacgggaccagugagacaggcagg

SEQ ID NO: 323866 - RNA, 32 nt, Homo Sapiens
caggaguuugcagccagggcgccggguuugug

SEQ ID NO: 323867 - RNA, 32 nt, Homo Sapiens
accucuaaaacacuuaaauugccaaauuuggc

SEQ ID NO: 323868 - RNA, 32 nt, Homo Sapiens
guugaguaaugcagucagaaaguaguuuguaa

SEQ ID NO: 323869 - RNA, 32 nt, Homo Sapiens
auaagugggagcaaaauguaugcaaauuuauc

SEQ ID NO: 323870 - RNA, 32 nt, Homo Sapiens
gacaggcgagcuauuugcauuccccggcaguc

SEQ ID NO: 323871 - RNA, 32 nt, Homo Sapiens
gggcaucagaaagcacuguggacgcacagacg

SEQ ID NO: 323872 - RNA, 32 nt, Homo Sapiens
acacacucccaagggaacuggugcuugcuggg

SEQ ID NO: 323873 - RNA, 32 nt, Homo Sapiens
ucuucccgccgcccagcccaccccauggccgg

SEQ ID NO: 323874 - RNA, 32 nt, Homo Sapiens
uuugcaugauuagucuuguguaucaugauguu

SEQ ID NO: 323875 - RNA, 32 nt, Homo Sapiens
cauauuguaaaaauuccgcuuugugccacagg

SEQ ID NO: 323876 - RNA, 32 nt, Homo Sapiens
cagcccacagcuucgcucuacugcucggcagg

SEQ ID NO: 323877 - RNA, 32 nt, Homo Sapiens
ccaggaggucccuucucugugcccucaccagc

SEQ ID NO: 323878 - RNA, 32 nt, Homo Sapiens
ccugagggccuggccuggcagcucugcuguua

SEQ ID NO: 323879 - RNA, 32 nt, Homo Sapiens
uuuggauaaagaacuuuuuaaauucaguacug

SEQ ID NO: 323880 - RNA, 32 nt, Homo Sapiens
cuggucuggggaucaccucaggcgcuguccuu

SEQ ID NO: 323881 - RNA, 32 nt, Homo Sapiens
ccggaaaggaaagggcagucagacagcagcca

SEQ ID NO: 323882 - RNA, 32 nt, Homo Sapiens
ucgugccuuaugaaaucugacuucuacuucca

SEQ ID NO: 323883 - RNA, 32 nt, Homo Sapiens
augccucucuauccucucuccucccccagcag

SEQ ID NO: 323884 - RNA, 32 nt, Homo Sapiens
uccaauuggccauuucauacccaaugcaugug

SEQ ID NO: 323885 - RNA, 32 nt, Homo Sapiens
gguuaugaauaaaagugacaauaaaacaugag

SEQ ID NO: 323886 - RNA, 32 nt, Homo Sapiens
uuucaugaaaagacaauaaaacaaaauggaau

SEQ ID NO: 323887 - RNA, 32 nt, Homo Sapiens
ccucacagcccacuaggcccccucccaacccc

SEQ ID NO: 323888 - RNA, 32 nt, Homo Sapiens
ggaggaugagagaccacguggaggagagcuga

SEQ ID NO: 323889 - RNA, 32 nt, Homo Sapiens
cguuggcggccugguccgcagcgcccugcgcc

SEQ ID NO: 323890 - RNA, 32 nt, Homo Sapiens
aaugggacugacucaccugugugcagcuggga

SEQ ID NO: 323891 - RNA, 32 nt, Homo Sapiens
ucuuccggccacucagcaugcaguguuuccag

SEQ ID NO: 323892 - RNA, 32 nt, Homo Sapiens
uuuugaggcaaaggggaguaguucuugguagg

SEQ ID NO: 323893 - RNA, 32 nt, Homo Sapiens
caggucugcaggcuccugcgggcucaccaggc

SEQ ID NO: 323894 - RNA, 32 nt, Homo Sapiens
uggggguggcggggcgccaggucgccgacccg

SEQ ID NO: 323895 - RNA, 32 nt, Homo Sapiens
aauuguuacugaucaugaauguuaguuagaaa

SEQ ID NO: 323896 - RNA, 32 nt, Homo Sapiens
aaaaugugaaauucaaucaacauaauucacca

SEQ ID NO: 323897 - RNA, 32 nt, Homo Sapiens
cagggcuuuuucuggcaccgcaguuuuguuuu

SEQ ID NO: 323898 - RNA, 32 nt, Homo Sapiens
aaaagaaaaaauuuaaaaaauuuuaaaaauau

SEQ ID NO: 323899 - RNA, 32 nt, Homo Sapiens
ggacccccggagccccgcgaaaacaucugccu

SEQ ID NO: 323900 - RNA, 32 nt, Homo Sapiens
uguggcggccccaccccaacuaccaccucuuu

SEQ ID NO: 323901 - RNA, 28 nt, Homo Sapiens
cagggaauggcgaguauuugucacauug

SEQ ID NO: 323902 - RNA, 32 nt, Homo Sapiens
gguccagggcggaccuggggccccgaccacca

SEQ ID NO: 323903 - RNA, 32 nt, Homo Sapiens
uagagccagcacuuuaccccgggccuugcgug

SEQ ID NO: 323904 - RNA, 32 nt, Homo Sapiens
ccuggcccaucccaugccggggggccagugga

SEQ ID NO: 323905 - RNA, 32 nt, Homo Sapiens
aauuaagcugacaaaaugaaaaugacuuaauu

SEQ ID NO: 323906 - RNA, 32 nt, Homo Sapiens
aaauggugaugggaaaaccggcuagccauaug

SEQ ID NO: 323907 - RNA, 32 nt, Homo Sapiens
cagagccugagaucgccuggcuggggugcagg

SEQ ID NO: 323908 - RNA, 31 nt, Homo Sapiens
aagcaucagcaaaauuguggauauguguucc

SEQ ID NO: 323909 - RNA, 32 nt, Homo Sapiens
uuuuagucaggagagugcagaucugugcucau

SEQ ID NO: 323910 - RNA, 32 nt, Homo Sapiens
uauauauuuuaaaagcacuuucuauuuuuaaa

SEQ ID NO: 323911 - RNA, 32 nt, Homo Sapiens
gcagucauuuuucuaaauaaaaaggaaguacu

SEQ ID NO: 323912 - RNA, 32 nt, Homo Sapiens
cuuuauuuucuuuuauauuucuauauguugcc

SEQ ID NO: 323913 - RNA, 32 nt, Homo Sapiens
cucugacuucugacuuguuuuuguuuucugga

SEQ ID NO: 323914 - RNA, 32 nt, Homo Sapiens
gggccugccucgcggaccuggacucgggacuc

SEQ ID NO: 323915 - RNA, 32 nt, Homo Sapiens
aauuuuucucccugggcugggaaaacccuaau

SEQ ID NO: 323916 - RNA, 32 nt, Homo Sapiens
auuuuuaaaaauuuagaguuuagucauuagaa

SEQ ID NO: 323917 - RNA, 32 nt, Homo Sapiens
auguuugggcacucagaugcuaucuuggugca

SEQ ID NO: 323918 - RNA, 32 nt, Homo Sapiens
uuaugguugccuuaaaggcaagagggaagguc

SEQ ID NO: 323919 - RNA, 32 nt, Homo Sapiens
uccuucccacccagaggacccugcacugccuu

SEQ ID NO: 323920 - RNA, 32 nt, Homo Sapiens
cuuggaagccagcagggccuugccagcaaagc

SEQ ID NO: 323921 - RNA, 31 nt, Homo Sapiens
guaaagaaauaaaaauauugaacucauagca

SEQ ID NO: 323922 - RNA, 32 nt, Homo Sapiens
aacucccuggaaaucuguugucccaagccaac

SEQ ID NO: 323923 - RNA, 32 nt, Homo Sapiens
gagagcgggagugugcgccgcgcgagaguggg

SEQ ID NO: 323924 - RNA, 32 nt, Homo Sapiens
auccccuugcgcuggguuuucuuuccugaagg

SEQ ID NO: 323925 - RNA, 32 nt, Homo Sapiens
gguuccugcagccccagccagccagccagcca

SEQ ID NO: 323926 - RNA, 32 nt, Homo Sapiens
cggcucuggugccccuccucccagcaugcucu

SEQ ID NO: 323927 - RNA, 32 nt, Homo Sapiens
ucaaaaagggccggugugccgcagugagugcc

SEQ ID NO: 323928 - RNA, 32 nt, Homo Sapiens
guugccuuggggugugguguguuucugugcca

SEQ ID NO: 323929 - RNA, 32 nt, Homo Sapiens
gaaaccacaacagugauucuaauagcaugaau

SEQ ID NO: 323930 - RNA, 32 nt, Homo Sapiens
gguugaggccccaggcuuggccucaccacaau

SEQ ID NO: 323931 - RNA, 32 nt, Homo Sapiens
ggcaagacaguuccccuucucugggcgucacu

SEQ ID NO: 323932 - RNA, 32 nt, Homo Sapiens
cacaggcccaugacccuccaucggagucaccg

SEQ ID NO: 323933 - RNA, 32 nt, Homo Sapiens
gggagggagaaggaaaagugugagauuucuac

SEQ ID NO: 323934 - RNA, 32 nt, Homo Sapiens
ccaggaccgacgcgcgcaccagcuccggagcc

SEQ ID NO: 323935 - RNA, 32 nt, Homo Sapiens
gggcccacagacagaucccauccaucagcucc

SEQ ID NO: 323936 - RNA, 32 nt, Homo Sapiens
ugagaacucugucaugagacugcacuaggggg

SEQ ID NO: 323937 - RNA, 32 nt, Homo Sapiens
gcugaugaaaacugaggcagcagccugguugu

SEQ ID NO: 323938 - RNA, 32 nt, Homo Sapiens
aucagggauggauaaagaauguuaucaagaug

SEQ ID NO: 323939 - RNA, 32 nt, Homo Sapiens
gaaagaacauauauuauauucuuaauucugua

SEQ ID NO: 323940 - RNA, 32 nt, Homo Sapiens
auccauccacacuuccugcagagcggcccaag

SEQ ID NO: 323941 - RNA, 32 nt, Homo Sapiens
agcgcggggccgcguuggcgcgcacgcgccug

SEQ ID NO: 323942 - RNA, 32 nt, Homo Sapiens
aaaagaaauaguuuuaaguaacuuuuuauagc

SEQ ID NO: 323943 - RNA, 32 nt, Homo Sapiens
aguaauugauucaggucauucuaauuuuguga

SEQ ID NO: 323944 - RNA, 32 nt, Homo Sapiens
gguggggcgggccaaggccugugcaguacgug

SEQ ID NO: 323945 - RNA, 32 nt, Homo Sapiens
agaucuugacuucuugaauauaucuggacugg

SEQ ID NO: 323946 - RNA, 32 nt, Homo Sapiens
aacaguugguuuuaguguguuguauaacuuug

SEQ ID NO: 323947 - RNA, 29 nt, Homo Sapiens
auauuuauauguauguuuuaaguaguccu

SEQ ID NO: 323948 - RNA, 32 nt, Homo Sapiens
cuuuccaucaggguaaauaagaugcacaagaa

SEQ ID NO: 323949 - RNA, 32 nt, Homo Sapiens
cugcuucauuuuuauauaugggcgcugguccc

SEQ ID NO: 323950 - RNA, 32 nt, Homo Sapiens
cucagagcugaaguacagcauggagcuagaug

SEQ ID NO: 323951 - RNA, 32 nt, Homo Sapiens
gccugcugcccccagcuuucuacagacaccag

SEQ ID NO: 323952 - RNA, 32 nt, Homo Sapiens
cgggcucuggcaccaccaggugcccaagacac

SEQ ID NO: 323953 - RNA, 32 nt, Homo Sapiens
accugccgcgucugcugcgggcgcuggacgcg

SEQ ID NO: 323954 - RNA, 32 nt, Homo Sapiens
ccucccggccugggcuucugggcugggacgug

SEQ ID NO: 323955 - RNA, 32 nt, Homo Sapiens
acuaaagugucuauuaguuuucuuuguaaagg

SEQ ID NO: 323956 - RNA, 32 nt, Homo Sapiens
ugaacuuaauaaacugaccuuaaaauuucaaa

SEQ ID NO: 323957 - RNA, 32 nt, Homo Sapiens
caaaaauuuauauacugcacaaacuggugauc

SEQ ID NO: 323958 - RNA, 32 nt, Homo Sapiens
aaaaaaaaaaaaagacucuacuucgugcagca

SEQ ID NO: 323959 - RNA, 32 nt, Homo Sapiens
ccgcccucagcugcaacuccaauggcuacacc

SEQ ID NO: 323960 - RNA, 32 nt, Homo Sapiens
auuuaaauauuuuuaucggcucuagaaaaugc

SEQ ID NO: 323961 - RNA, 32 nt, Homo Sapiens
caagccuggggcgggggccacagcgccgggga

SEQ ID NO: 323962 - RNA, 32 nt, Homo Sapiens
caaaggcuuuccuaggaaauguguuauaaugc

SEQ ID NO: 323963 - RNA, 32 nt, Homo Sapiens
cucggccugcggugggggcgcuuccuguggac

SEQ ID NO: 323964 - RNA, 32 nt, Homo Sapiens
ugcccuuucccuuccaguggguuccucuggug

SEQ ID NO: 323965 - RNA, 32 nt, Homo Sapiens
uggugaaggggagcggggaggggcagaggagu

SEQ ID NO: 323966 - RNA, 32 nt, Homo Sapiens
auguucauuuuucucuauaaaggagaaaguga

SEQ ID NO: 323967 - RNA, 31 nt, Homo Sapiens
aucaacuuaaagaaaaauauuaucucuucuc

SEQ ID NO: 323968 - RNA, 32 nt, Homo Sapiens
ugaguaaaaugagacauugcaaauaacacaua

SEQ ID NO: 323969 - RNA, 32 nt, Homo Sapiens
aaacucgcaauccuaguuugcacaaaugaaua

SEQ ID NO: 323970 - RNA, 32 nt, Homo Sapiens
gacuccaugcucuuggcauugcagcuuucuau

SEQ ID NO: 323971 - RNA, 32 nt, Homo Sapiens
cucggacuccccagccuuuccgcagccgcauc

SEQ ID NO: 323972 - RNA, 32 nt, Homo Sapiens
gcccaccugaguggaugcaugugugugauguc

SEQ ID NO: 323973 - RNA, 32 nt, Homo Sapiens
ggagcccagucccagcucuaugcugaauucag

SEQ ID NO: 323974 - RNA, 27 nt, Homo Sapiens
cggccgcccuuccucagcccccggcuc

SEQ ID NO: 323975 - RNA, 32 nt, Homo Sapiens
gaaguucugccucugccuggggucuuggccac

SEQ ID NO: 323976 - RNA, 32 nt, Homo Sapiens
aaagacuaaaaggcguuugcucugagacugac

SEQ ID NO: 323977 - RNA, 32 nt, Homo Sapiens
uguguguccucucuuccacaccauagcccccu

SEQ ID NO: 323978 - RNA, 32 nt, Homo Sapiens
uuaacuuccagaaaucauguaauuuuuaagaa

SEQ ID NO: 323979 - RNA, 32 nt, Homo Sapiens
guacuggccgcggcgcgguggcggcggcuggg

SEQ ID NO: 323980 - RNA, 32 nt, Homo Sapiens
ccagcagccgcgggucccgggaucggcuaaga

SEQ ID NO: 323981 - RNA, 32 nt, Homo Sapiens
uugagcaaguuggaaguuuaauuagcuuucca

SEQ ID NO: 323982 - RNA, 32 nt, Homo Sapiens
cucaggugcuggccagccuccggagcguccgu

SEQ ID NO: 323983 - RNA, 32 nt, Homo Sapiens
cccuuccucccucccccuucauaaaggccucc

SEQ ID NO: 323984 - RNA, 32 nt, Homo Sapiens
uucuuuugauaaaggaucgaaccagcaaaucc

SEQ ID NO: 323985 - RNA, 32 nt, Homo Sapiens
aauuuuaaaaauuugcuuaugaaaauauaacc

SEQ ID NO: 323986 - RNA, 32 nt, Homo Sapiens
cccuuuaggauagccacugcaacaucaugacc

SEQ ID NO: 323987 - RNA, 32 nt, Homo Sapiens
aagaaacaugauuuuucuuccuuaaacuugaa

SEQ ID NO: 323988 - RNA, 32 nt, Homo Sapiens
uuucugauuuauauuucaugauauuucacauu

SEQ ID NO: 323989 - RNA, 32 nt, Homo Sapiens
uccuuuuaggcgaugccugacuuuccuuccau

SEQ ID NO: 323990 - RNA, 32 nt, Homo Sapiens
agcagagggaugcgggugggcugggcuugucu

SEQ ID NO: 323991 - RNA, 32 nt, Homo Sapiens
aaaaagguuuaugaaaagaaaauauaacuaac

SEQ ID NO: 323992 - RNA, 32 nt, Homo Sapiens
acaaacauuuuucuuuaucugaguaugggaga

SEQ ID NO: 323993 - RNA, 32 nt, Homo Sapiens
ggcgccggacccggcugcgcgcggaccguuag

SEQ ID NO: 323994 - RNA, 32 nt, Homo Sapiens
agugugguccggagaaagaaggcguggagaag

SEQ ID NO: 323995 - RNA, 32 nt, Homo Sapiens
gugcccuccuggcuccucccacaguuucccag

SEQ ID NO: 323996 - RNA, 32 nt, Homo Sapiens
gccucagccagggcagggagggggacuccgag

SEQ ID NO: 323997 - RNA, 32 nt, Homo Sapiens
ccgacgcugaccccggccucagucacggcucu

SEQ ID NO: 323998 - RNA, 32 nt, Homo Sapiens
cugucuuugaguuccaucaaguagauagagaa

SEQ ID NO: 323999 - RNA, 32 nt, Homo Sapiens
auuugccccuccccaucacaguccugcccuuc

SEQ ID NO: 324000 - RNA, 32 nt, Homo Sapiens
cuuaauaguuuaugcgugauuuucucaaaaua

SEQ ID NO: 324001 - RNA, 32 nt, Homo Sapiens
uuuguuuguuguucuuuuuuuuuucuuuuuac

SEQ ID NO: 324002 - RNA, 32 nt, Homo Sapiens
aaauagaaaaagaaucucaaaacuacuguuuu

SEQ ID NO: 324003 - RNA, 32 nt, Homo Sapiens
guauuggcaaauauuucugugcucuuggagga

SEQ ID NO: 324004 - RNA, 31 nt, Homo Sapiens
uaggggaaauaaaacuacuaaaauaugaaaa

SEQ ID NO: 324005 - RNA, 32 nt, Homo Sapiens
uuuguagcagcauucagcacaggugccaaaau

SEQ ID NO: 324006 - RNA, 32 nt, Homo Sapiens
cgccaaguuccgacuccgguuuucgccuuugc

SEQ ID NO: 324007 - RNA, 32 nt, Homo Sapiens
auggucuggugguggcaugaguccucagaagg

SEQ ID NO: 324008 - RNA, 32 nt, Homo Sapiens
gagcccccauacgcccgagccacgagcucgcg

SEQ ID NO: 324009 - RNA, 32 nt, Homo Sapiens
gagaacaaugagcugaaauuguaccaacuccu

SEQ ID NO: 324010 - RNA, 32 nt, Homo Sapiens
aauaacgugucugaggcagggaugcuacccuc

SEQ ID NO: 324011 - RNA, 32 nt, Homo Sapiens
uggcaaguauuucuugaagugcccuaacccuc

SEQ ID NO: 324012 - RNA, 32 nt, Homo Sapiens
gucagcuccuccugcccuccccccaacgcccc

SEQ ID NO: 324013 - RNA, 32 nt, Homo Sapiens
uaucccuuaagugaaaagaaucugaaauacac

SEQ ID NO: 324014 - RNA, 32 nt, Homo Sapiens
uagauaaaccucugcccuccacuccuugcuug

SEQ ID NO: 324015 - RNA, 32 nt, Homo Sapiens
ugugacaccagggcccuggugcuuuaacuagg

SEQ ID NO: 324016 - RNA, 32 nt, Homo Sapiens
uauuuauauggggaauauauuuuuagacucau

SEQ ID NO: 324017 - RNA, 32 nt, Homo Sapiens
ucuaagacaaugaguaaauguuauuaguugaa

SEQ ID NO: 324018 - RNA, 32 nt, Homo Sapiens
cccagaaaugucaugagauugcuguguguugc

SEQ ID NO: 324019 - RNA, 32 nt, Homo Sapiens
cgaggggggccauggggcagguccugccgguc

SEQ ID NO: 324020 - RNA, 31 nt, Homo Sapiens
gguauuuauugagcuuugugggacuggugga

SEQ ID NO: 324021 - RNA, 32 nt, Homo Sapiens
gaggcugccugccuggaggggacaucagggaa

SEQ ID NO: 324022 - RNA, 32 nt, Homo Sapiens
agggcgcagggccagaacggcuccuuaaggca

SEQ ID NO: 324023 - RNA, 32 nt, Homo Sapiens
aaaaccaugccugagaggucccggcugggagu

SEQ ID NO: 324024 - RNA, 32 nt, Homo Sapiens
gcgggaaagcgcgggggcuuugcggggccuug

SEQ ID NO: 324025 - RNA, 32 nt, Homo Sapiens
cugagugcaggcacaggaauugguguuucauc

SEQ ID NO: 324026 - RNA, 32 nt, Homo Sapiens
gauaaagaauacuauuuccaaacucauauuac

SEQ ID NO: 324027 - RNA, 32 nt, Homo Sapiens
cauugcacuccagccugggugacagagcaaga

SEQ ID NO: 324028 - RNA, 32 nt, Homo Sapiens
uuaugggggcuauuuuccccauacugcacuga

SEQ ID NO: 324029 - RNA, 32 nt, Homo Sapiens
caguucagcuuucaaaaagagugcugcccaua

SEQ ID NO: 324030 - RNA, 32 nt, Homo Sapiens
ugauuuaauuguaaaaguagucuuauguggug

SEQ ID NO: 324031 - RNA, 32 nt, Homo Sapiens
gggaaccugucggcgagcugcgggagcgcgcu

SEQ ID NO: 324032 - RNA, 32 nt, Homo Sapiens
gacucaggucuggagcccaaaaucacagccag

SEQ ID NO: 324033 - RNA, 32 nt, Homo Sapiens
cugggcugcaagauaucaauaagccuugccuc

SEQ ID NO: 324034 - RNA, 31 nt, Homo Sapiens
gagaagugaauguaacagguauaaauaacau

SEQ ID NO: 324035 - RNA, 32 nt, Homo Sapiens
cauguuaauaaaugucuuuuucugguauaaag

SEQ ID NO: 324036 - RNA, 32 nt, Homo Sapiens
aaaugaccuuccaaguaagcagaugggaacug

SEQ ID NO: 324037 - RNA, 32 nt, Homo Sapiens
cugcuuuccagcugaacccaaacuacaagugg

SEQ ID NO: 324038 - RNA, 32 nt, Homo Sapiens
uuuaaaacuuuucuuauuaaaaacguuacaaa

SEQ ID NO: 324039 - RNA, 32 nt, Homo Sapiens
ucccucccuuucugggguggggccagccaauc

SEQ ID NO: 324040 - RNA, 32 nt, Homo Sapiens
gccacagccagcauguucacacacaaaagggc

SEQ ID NO: 324041 - RNA, 31 nt, Homo Sapiens
acuucccaggacagccaaccauggagcccgu

SEQ ID NO: 324042 - RNA, 32 nt, Homo Sapiens
gcuucaugggauugugagcugcacugcuugug

SEQ ID NO: 324043 - RNA, 32 nt, Homo Sapiens
uuagaaaaacaaaaauaugaagagaauauaaa

SEQ ID NO: 324044 - RNA, 32 nt, Homo Sapiens
uauuucacuauaagaguacuuuauuuuaaaug

SEQ ID NO: 324045 - RNA, 32 nt, Homo Sapiens
caagccguguggaccucucugcuuccaaaccu

SEQ ID NO: 324046 - RNA, 32 nt, Homo Sapiens
cugcugaauuuauguuguaagcauuacuuaac

SEQ ID NO: 324047 - RNA, 32 nt, Homo Sapiens
uccucuggcugcuaggagagaagugcugaaug

SEQ ID NO: 324048 - RNA, 32 nt, Homo Sapiens
ccuuagcauguucaugggugcuggggaugccc

SEQ ID NO: 324049 - RNA, 32 nt, Homo Sapiens
accacaaacuguaauacaaugauccuguauuc

SEQ ID NO: 324050 - RNA, 32 nt, Homo Sapiens
uuccgaaaaaggaaaacuugcguuugagccgu

SEQ ID NO: 324051 - RNA, 32 nt, Homo Sapiens
aaaaggagaaaauaauuaaacagucuucauuu

SEQ ID NO: 324052 - RNA, 32 nt, Homo Sapiens
uaaaauaaaaauuuggagaaagcaaaaaaaaa

SEQ ID NO: 324053 - RNA, 32 nt, Homo Sapiens
gugggacccacccacccccauccaggaaccgu

SEQ ID NO: 324054 - RNA, 27 nt, Homo Sapiens
cauagaugcuucuucagcucccuccuc

SEQ ID NO: 324055 - RNA, 32 nt, Homo Sapiens
ugugacuguccuguuuccagcccagguggucu

SEQ ID NO: 324056 - RNA, 32 nt, Homo Sapiens
agcugcaauauuuuaguaauaccuucgggauc

SEQ ID NO: 324057 - RNA, 32 nt, Homo Sapiens
ucauucauaggacuaauguauuucaugaucua

SEQ ID NO: 324058 - RNA, 27 nt, Homo Sapiens
guauggggcucccgcgcgggucguucu

SEQ ID NO: 324059 - RNA, 32 nt, Homo Sapiens
accuguagucccagcuacucggcaggcugagg

SEQ ID NO: 324060 - RNA, 32 nt, Homo Sapiens
cuugccaggaaugggaggagcaggcuugaggc

SEQ ID NO: 324061 - RNA, 27 nt, Homo Sapiens
uuccuguccuucucucaccuccuaaag

SEQ ID NO: 324062 - RNA, 32 nt, Homo Sapiens
gucauauucagguuuaaauucugucauucagc

SEQ ID NO: 324063 - RNA, 32 nt, Homo Sapiens
cucacucgcucugggggaagcuagcugccaug

SEQ ID NO: 324064 - RNA, 32 nt, Homo Sapiens
ugcugccccccucucacugaccagggguggac

SEQ ID NO: 324065 - RNA, 32 nt, Homo Sapiens
ucuaggauguuaauuuauaugaaaauaaaaug

SEQ ID NO: 324066 - RNA, 32 nt, Homo Sapiens
ggaugaaaguuccagagcauuauuugaauucu

SEQ ID NO: 324067 - RNA, 32 nt, Homo Sapiens
aauagaagauucagcugguaguucuuguuaag

SEQ ID NO: 324068 - RNA, 32 nt, Homo Sapiens
aaaugaagcucccccacccccacucccggccc

SEQ ID NO: 324069 - RNA, 32 nt, Homo Sapiens
caaguuuugagaugcagagcuuuuauuccucu

SEQ ID NO: 324070 - RNA, 32 nt, Homo Sapiens
caagaugcuaaauugcaauggaagcuuaacuu

SEQ ID NO: 324071 - RNA, 32 nt, Homo Sapiens
caggacccggaguucucggaccucaacucggc

SEQ ID NO: 324072 - RNA, 32 nt, Homo Sapiens
gauaccaacgacccauuacugagagguacaga

SEQ ID NO: 324073 - RNA, 32 nt, Homo Sapiens
ggucuucuugggcuugcugugagcucuggaaa

SEQ ID NO: 324074 - RNA, 32 nt, Homo Sapiens
aaguccaccaaaaguggacccucuauauuucc

SEQ ID NO: 324075 - RNA, 32 nt, Homo Sapiens
uaggauggaggcuuaaauuuaauggcgacuug

SEQ ID NO: 324076 - RNA, 32 nt, Homo Sapiens
gaguccugcagcacccuccccccaccccucau

SEQ ID NO: 324077 - RNA, 32 nt, Homo Sapiens
ucauguuggucugacaucaaggucuuuggucu

SEQ ID NO: 324078 - RNA, 32 nt, Homo Sapiens
uacggagucucacucuguuacccaggcuagag

SEQ ID NO: 324079 - RNA, 32 nt, Homo Sapiens
uccuaggcagagcuauccaagucauuuuucca

SEQ ID NO: 324080 - RNA, 32 nt, Homo Sapiens
ccuacaaggagauaagaaagcaggugcaacac

SEQ ID NO: 324081 - RNA, 32 nt, Homo Sapiens
uugguguggugguaugguacguagcuauuuuc

SEQ ID NO: 324082 - RNA, 32 nt, Homo Sapiens
gggaaaggauuacuuuuugucugugucuggga

SEQ ID NO: 324083 - RNA, 32 nt, Homo Sapiens
uggcucgcagccucccccggcugcuggugcag

SEQ ID NO: 324084 - RNA, 32 nt, Homo Sapiens
ugaaacuccaugacgaacacguugaacuaaac

SEQ ID NO: 324085 - RNA, 32 nt, Homo Sapiens
uacggauugacugguuggaauuaaacugcaag

SEQ ID NO: 324086 - RNA, 32 nt, Homo Sapiens
caggaggguggaugccaggucccacucaggca

SEQ ID NO: 324087 - RNA, 32 nt, Homo Sapiens
uacuguuauuugagaguaguaaaauuaauuuu

SEQ ID NO: 324088 - RNA, 28 nt, Homo Sapiens
uccuuuauuagauaacauuugaaguaau

SEQ ID NO: 324089 - RNA, 32 nt, Homo Sapiens
uccgcaucccccaacacccccaccuccggccu

SEQ ID NO: 324090 - RNA, 32 nt, Homo Sapiens
caagaaagggcaccaggacugcucuccaagga

SEQ ID NO: 324091 - RNA, 32 nt, Homo Sapiens
agguggccugagccugcccacccaaggacagg

SEQ ID NO: 324092 - RNA, 32 nt, Homo Sapiens
ggaccacaaggaagaagagaagagacuugcag

SEQ ID NO: 324093 - RNA, 32 nt, Homo Sapiens
gggcguuuucagucgaauaaacuugcgaccgc

SEQ ID NO: 324094 - RNA, 32 nt, Homo Sapiens
gcgggacgaagaauaaucaugggccagacugg

SEQ ID NO: 324095 - RNA, 32 nt, Homo Sapiens
aacacagaacgacuuuagacaagcacauguua

SEQ ID NO: 324096 - RNA, 32 nt, Homo Sapiens
acaagaaccacaaaaacuugaaaaaucugaaa

SEQ ID NO: 324097 - RNA, 32 nt, Homo Sapiens
ccuuuaaaaauauauauugugauuuaugcuuu

SEQ ID NO: 324098 - RNA, 32 nt, Homo Sapiens
cucuuugugaauggaaccaaugugcaagauac

SEQ ID NO: 324099 - RNA, 32 nt, Homo Sapiens
agucgaagcagagaggcgacggagccgcucaa

SEQ ID NO: 324100 - RNA, 32 nt, Homo Sapiens
uuauuuuuacaguuuucaguacaaaaguguuu

SEQ ID NO: 324101 - RNA, 32 nt, Homo Sapiens
gcggccccgccuuguucugaucugugugugag

SEQ ID NO: 324102 - RNA, 32 nt, Homo Sapiens
ugguuaaugcaaagggugagaauuuucuauau

SEQ ID NO: 324103 - RNA, 32 nt, Homo Sapiens
ccagcucagggugaugccugcugccuuugauc

SEQ ID NO: 324104 - RNA, 32 nt, Homo Sapiens
cggccccacucugggaagguggccggcuaugu

SEQ ID NO: 324105 - RNA, 32 nt, Homo Sapiens
ugaacaagccagugaggagauuuugaaaguag

SEQ ID NO: 324106 - RNA, 32 nt, Homo Sapiens
augcuucauuccacauuguacuugcuuugcuc

SEQ ID NO: 324107 - RNA, 32 nt, Homo Sapiens
aaagugagggcuugucauuaccagacgguuca

SEQ ID NO: 324108 - RNA, 32 nt, Homo Sapiens
uuccacucuuucugcccucaccugggcaacgu

SEQ ID NO: 324109 - RNA, 31 nt, Homo Sapiens
gaauaaauauauuguaaccaauguuauguaa

SEQ ID NO: 324110 - RNA, 30 nt, Homo Sapiens
uacggccgucgugccgcucgugucagucaa

SEQ ID NO: 324111 - RNA, 32 nt, Homo Sapiens
uuugaaaaugucaagcugauuuacuuuauuca

SEQ ID NO: 324112 - RNA, 32 nt, Homo Sapiens
uauggaaaaguacccaugaucacacugcugau

SEQ ID NO: 324113 - RNA, 32 nt, Homo Sapiens
agaggugcagcccuuccgcugugccccgcccu

SEQ ID NO: 324114 - RNA, 32 nt, Homo Sapiens
ugacugugggucuggaauggcugguguacuug

SEQ ID NO: 324115 - RNA, 32 nt, Homo Sapiens
caacccgcaccgugagucuggcucagcagccc

SEQ ID NO: 324116 - RNA, 32 nt, Homo Sapiens
acccgcggcuccgaccucugaccucuaacccc

SEQ ID NO: 324117 - RNA, 31 nt, Homo Sapiens
cggcagcccccaagccugccccgcuacccaa

SEQ ID NO: 324118 - RNA, 32 nt, Homo Sapiens
aaaauaauaaacgaugcuauuuuaauauuuuc

SEQ ID NO: 324119 - RNA, 32 nt, Homo Sapiens
ccuucuauuuugcugagauaauuucacuugcu

SEQ ID NO: 324120 - RNA, 32 nt, Homo Sapiens
gacuagccugaggccuugucuagacagggcug

SEQ ID NO: 324121 - RNA, 30 nt, Homo Sapiens
ccuacaguuuuuccacacgcccugacaccg

SEQ ID NO: 324122 - RNA, 32 nt, Homo Sapiens
caaggcaucaccuuccuucucuacccaacaac

SEQ ID NO: 324123 - RNA, 32 nt, Homo Sapiens
ugagaggaaggggcaagugauguguaacugcu

SEQ ID NO: 324124 - RNA, 32 nt, Homo Sapiens
ccccagggcuagcggcuuuguggagggaacac

SEQ ID NO: 324125 - RNA, 32 nt, Homo Sapiens
acugccugcccggcccugggccaggcccucaa

SEQ ID NO: 324126 - RNA, 32 nt, Homo Sapiens
agcucgcgcgggccugcgagccgcccgccugc

SEQ ID NO: 324127 - RNA, 32 nt, Homo Sapiens
uucguccccucaggccagcagggcaaggcagc

SEQ ID NO: 324128 - RNA, 32 nt, Homo Sapiens
auauguaaagagacuuuaggcuaaacuuaaca

SEQ ID NO: 324129 - RNA, 32 nt, Homo Sapiens
gacacugagagcucgucggucuccgaggaugg

SEQ ID NO: 324130 - RNA, 32 nt, Homo Sapiens
gucccugaaugggaaacugcugcagccaaaga

SEQ ID NO: 324131 - RNA, 32 nt, Homo Sapiens
ugaugaagauaaaggauauaagagaacuucaa

SEQ ID NO: 324132 - RNA, 32 nt, Homo Sapiens
agacuacagguguucuuaggaggcugcuggag

SEQ ID NO: 324133 - RNA, 32 nt, Homo Sapiens
auuuuggaccucuggaugugcagcaaguuuuu

SEQ ID NO: 324134 - RNA, 32 nt, Homo Sapiens
augccacaggguuccgggaccucgaucaugac

SEQ ID NO: 324135 - RNA, 32 nt, Homo Sapiens
uagcaucauuauuuuuagccuuuccuguuaau

SEQ ID NO: 324136 - RNA, 32 nt, Homo Sapiens
aaacagcaaacagcggggugaucugcagccca

SEQ ID NO: 324137 - RNA, 32 nt, Homo Sapiens
aagguagaguucauuaagaugaacucccuauu

SEQ ID NO: 324138 - RNA, 32 nt, Homo Sapiens
uugcaaaugaacuucagacggaccucagggua

SEQ ID NO: 324139 - RNA, 32 nt, Homo Sapiens
ugcaguggugggaucucggcucacugcaagcu

SEQ ID NO: 324140 - RNA, 32 nt, Homo Sapiens
uuugagaaaaagaaacaaaaggaaguaguuaa

SEQ ID NO: 324141 - RNA, 32 nt, Homo Sapiens
aggcucaagagcaaaaucuggaaacaccuggc

SEQ ID NO: 324142 - RNA, 32 nt, Homo Sapiens
ggcuucuguuucugccgagagaucuguuuucc

SEQ ID NO: 324143 - RNA, 32 nt, Homo Sapiens
gacuugaccccggcccccacuaggcugcacac

SEQ ID NO: 324144 - RNA, 32 nt, Homo Sapiens
cccccagaugcuuuauauaaaaaagaucagua

SEQ ID NO: 324145 - RNA, 32 nt, Homo Sapiens
aucuuuuccuuccacuucacagccaacggcua

SEQ ID NO: 324146 - RNA, 32 nt, Homo Sapiens
cucagucaguuaucaaaguaaaauauuuuuua

SEQ ID NO: 324147 - RNA, 32 nt, Homo Sapiens
ccacccccucaagccccagcagcccucaacag

SEQ ID NO: 324148 - RNA, 32 nt, Homo Sapiens
ccucagauccugauacucaccaugaaacucua

SEQ ID NO: 324149 - RNA, 32 nt, Homo Sapiens
aagaggggcccccuuccugcucccuauggccc

SEQ ID NO: 324150 - RNA, 25 nt, Homo Sapiens
aguugcuggucugaccacaccacag

SEQ ID NO: 324151 - RNA, 32 nt, Homo Sapiens
aaacggcagaaaugcaauaaaaacuauauuuc

SEQ ID NO: 324152 - RNA, 32 nt, Homo Sapiens
gaauccaaaugugaaagaugcauguuacugcc

SEQ ID NO: 324153 - RNA, 32 nt, Homo Sapiens
cccucccaauucccccauuauggaguaaccag

SEQ ID NO: 324154 - RNA, 32 nt, Homo Sapiens
cgcgggcccaaccccaggaugcuccccugcgc

SEQ ID NO: 324155 - RNA, 32 nt, Homo Sapiens
uccagaaguggcucagcgugcaugaggaccau

SEQ ID NO: 324156 - RNA, 32 nt, Homo Sapiens
auuuugugcuuugucuguguuacaaugcuaug

SEQ ID NO: 324157 - RNA, 32 nt, Homo Sapiens
accaccccaagccccauuugugcccugccgca

SEQ ID NO: 324158 - RNA, 32 nt, Homo Sapiens
uucuuuuguggggcugccccccaagugucguu

SEQ ID NO: 324159 - RNA, 25 nt, Homo Sapiens
gguaccagguuugaccucaaggcau

SEQ ID NO: 324160 - RNA, 32 nt, Homo Sapiens
caggggcuggccugggaugcgcgcgcaccugc

SEQ ID NO: 324161 - RNA, 32 nt, Homo Sapiens
cgccccuagccccaucuguuucuccggcgggg

SEQ ID NO: 324162 - RNA, 32 nt, Homo Sapiens
ugaggcggaaagggcgcuggggauaaccagaa

SEQ ID NO: 324163 - RNA, 32 nt, Homo Sapiens
ccgagggcaagcggcggguccugcaggaguac

SEQ ID NO: 324164 - RNA, 32 nt, Homo Sapiens
ggaggaggcagacacucaggccuacccacugc

SEQ ID NO: 324165 - RNA, 28 nt, Homo Sapiens
ccccuagcuuagaggaugacucuugcaa

SEQ ID NO: 324166 - RNA, 32 nt, Homo Sapiens
ccuuaaaguuuuccuuuuuuuaauaauuauuu

SEQ ID NO: 324167 - RNA, 32 nt, Homo Sapiens
acugaaaaucaagagggaagaggugaggaagg

SEQ ID NO: 324168 - RNA, 31 nt, Homo Sapiens
agcaccgaccccaccaccugguuccggcucu

SEQ ID NO: 324169 - RNA, 32 nt, Homo Sapiens
gccuauggacucaaugagaagaauaauuagug

SEQ ID NO: 324170 - RNA, 32 nt, Homo Sapiens
cccuuuucagaauaaacuauuggggugaggau

SEQ ID NO: 324171 - RNA, 32 nt, Homo Sapiens
uaaaacaaaaauuuauggucaaaauuucuaac

SEQ ID NO: 324172 - RNA, 32 nt, Homo Sapiens
aucuugaauuacugugauacaucuuugcaauu

SEQ ID NO: 324173 - RNA, 32 nt, Homo Sapiens
cggaaaaugaauuuucuuucugaaagggaagu

SEQ ID NO: 324174 - RNA, 32 nt, Homo Sapiens
uuuucaaguggaauuaguugguuauccauuug

SEQ ID NO: 324175 - RNA, 32 nt, Homo Sapiens
cgcaccgcgcgcccaagggcaccagcgaguga

SEQ ID NO: 324176 - RNA, 26 nt, Homo Sapiens
aaucuauacucccaacaccacaaagu

SEQ ID NO: 324177 - RNA, 32 nt, Homo Sapiens
cccgcuccaccagcuuccugggcggcaugggg

SEQ ID NO: 324178 - RNA, 32 nt, Homo Sapiens
cguccagggcuagagcaagcgcggccccgcgg

SEQ ID NO: 324179 - RNA, 32 nt, Homo Sapiens
uccacagacagagggcacaaggugcagcgucg

SEQ ID NO: 324180 - RNA, 32 nt, Homo Sapiens
cauggcuauacuuggaaguucuccuuguuggc

SEQ ID NO: 324181 - RNA, 32 nt, Homo Sapiens
uuugcacuguuuucugucguguguguugggau

SEQ ID NO: 324182 - RNA, 32 nt, Homo Sapiens
gcaccaacaaacaaaacugugauauuggaaau

SEQ ID NO: 324183 - RNA, 32 nt, Homo Sapiens
gaugacaaaaggaaaaaugggagcuagagggu

SEQ ID NO: 324184 - RNA, 32 nt, Homo Sapiens
ccuguuagaacaaaaauucuaauuaaaauagu

SEQ ID NO: 324185 - RNA, 32 nt, Homo Sapiens
cuggcucccccuccccaggcuggagacccccc

SEQ ID NO: 324186 - RNA, 32 nt, Homo Sapiens
gaagauuuauuuaauuugauauguucuuguac

SEQ ID NO: 324187 - RNA, 32 nt, Homo Sapiens
cgagcggagagugcggagcggcuucugggcca

SEQ ID NO: 324188 - RNA, 32 nt, Homo Sapiens
uggagccccguccuguggucugccucaguuuc

SEQ ID NO: 324189 - RNA, 32 nt, Homo Sapiens
cggugcgguguugacugagcuacgagccuggc

SEQ ID NO: 324190 - RNA, 32 nt, Homo Sapiens
uggacauuuuucccuacagaucuggaaagcac

SEQ ID NO: 324191 - RNA, 32 nt, Homo Sapiens
aaguggguaacagcccagcaucagggucacug

SEQ ID NO: 324192 - RNA, 32 nt, Homo Sapiens
acugucaggaggagccagagguuggcuuucug

SEQ ID NO: 324193 - RNA, 32 nt, Homo Sapiens
cuacccaucaucaaaaaucacaucagauaagu

SEQ ID NO: 324194 - RNA, 32 nt, Homo Sapiens
ugagaaagggaagggaaauagggcaccauggu

SEQ ID NO: 324195 - RNA, 32 nt, Homo Sapiens
cuuuuuugagacggagucucgcucugucgucc

SEQ ID NO: 324196 - RNA, 32 nt, Homo Sapiens
gcggugcugucagcgcacagacccaugcgcau

SEQ ID NO: 324197 - RNA, 32 nt, Homo Sapiens
ucggacccgcagccccagacgccgggcuuggg

SEQ ID NO: 324198 - RNA, 32 nt, Homo Sapiens
uagucugauguguccuucccaaggccacgaaa

SEQ ID NO: 324199 - RNA, 32 nt, Homo Sapiens
uccagaagcauuaagguaacccauugccaagu

SEQ ID NO: 324200 - RNA, 32 nt, Homo Sapiens
uuccaccugccagcagaggcucuuccuguuca

SEQ ID NO: 324201 - RNA, 32 nt, Homo Sapiens
cccacccuccacguuggaaugagauuccaguu

SEQ ID NO: 324202 - RNA, 32 nt, Homo Sapiens
caacuacacaucuauuucuaaagaauaaaaca

SEQ ID NO: 324203 - RNA, 32 nt, Homo Sapiens
gcucaaccuuggcugcuggugagauccagggc

SEQ ID NO: 324204 - RNA, 32 nt, Homo Sapiens
ggggaaccgagaccagcaccccgcacgucagc

SEQ ID NO: 324205 - RNA, 32 nt, Homo Sapiens
gagucaucuaaugccagggacauagguggacc

SEQ ID NO: 324206 - RNA, 32 nt, Homo Sapiens
cacagacacacacauugauccuccuccucagc

SEQ ID NO: 324207 - RNA, 32 nt, Homo Sapiens
uggugucuuuugcguguaccuguuuccccuuu

SEQ ID NO: 324208 - RNA, 31 nt, Homo Sapiens
gaaaauuugaaacauauucaagauugaagag

SEQ ID NO: 324209 - RNA, 32 nt, Homo Sapiens
agaaaauaaaaauaaaaauaaacuggccaggu

SEQ ID NO: 324210 - RNA, 32 nt, Homo Sapiens
gcccagcccucccuggccucuccacugucucc

SEQ ID NO: 324211 - RNA, 32 nt, Homo Sapiens
ucuuagauaugacaccaaacacacaaggaaua

SEQ ID NO: 324212 - RNA, 32 nt, Homo Sapiens
agaacgaaaaggaaggaacuucagucaacaua

SEQ ID NO: 324213 - RNA, 32 nt, Homo Sapiens
uggaggcggggagagggaaggaccgcacggag

SEQ ID NO: 324214 - RNA, 32 nt, Homo Sapiens
cgccucgcgccgcgcgcacgugacugcgcccc

SEQ ID NO: 324215 - RNA, 32 nt, Homo Sapiens
cggaacaggccgccgcgcgcugcgcgccggac

SEQ ID NO: 324216 - RNA, 32 nt, Homo Sapiens
ugcaguguguggaagcugcaaacaaguaggcc

SEQ ID NO: 324217 - RNA, 32 nt, Homo Sapiens
guggugagauuacaauaagguaggcauguaaa

SEQ ID NO: 324218 - RNA, 32 nt, Homo Sapiens
gggcagcccuggcccucccuccccucugcugg

SEQ ID NO: 324219 - RNA, 32 nt, Homo Sapiens
gggcccuccagaccugcucgggugcuggggcc

SEQ ID NO: 324220 - RNA, 32 nt, Homo Sapiens
aggaugcgcuccccggcgcccagcagcagagg

SEQ ID NO: 324221 - RNA, 32 nt, Homo Sapiens
uccugguguucgccccggacaagcgguuaagc

SEQ ID NO: 324222 - RNA, 32 nt, Homo Sapiens
cguguucuccuuuuccucucucccggagguug

SEQ ID NO: 324223 - RNA, 32 nt, Homo Sapiens
agaaacaaaggcuggaauaucugcccaugcuu

SEQ ID NO: 324224 - RNA, 32 nt, Homo Sapiens
uaacacuggugccuguaucccugucuucuuuu

SEQ ID NO: 324225 - RNA, 32 nt, Homo Sapiens
uccaagagaaaguuuguaaaauuccuuacacu

SEQ ID NO: 324226 - RNA, 32 nt, Homo Sapiens
ggugcagcacgcagccgcuccgggagccaggg

SEQ ID NO: 324227 - RNA, 32 nt, Homo Sapiens
uccgagaucccggacaagaccgccacccuugu

SEQ ID NO: 324228 - RNA, 31 nt, Homo Sapiens
ugaacacaggaggaagcaggaguccaugcuc

SEQ ID NO: 324229 - RNA, 29 nt, Homo Sapiens
ccuaauaaauauguauauuuuuugagaug

SEQ ID NO: 324230 - RNA, 32 nt, Homo Sapiens
cugcaccccucccagauuucuuuuacauuaac

SEQ ID NO: 324231 - RNA, 32 nt, Homo Sapiens
cucugugucucaaugccugggacuggagguug

SEQ ID NO: 324232 - RNA, 32 nt, Homo Sapiens
uuggccaaaaauuuuuaaaaaauaaauuacaa

SEQ ID NO: 324233 - RNA, 32 nt, Homo Sapiens
gugcaguuugaggguguuuugguuuuugauuc

SEQ ID NO: 324234 - RNA, 32 nt, Homo Sapiens
cgacgcccgcggcugcgagcagcucuauaucc

SEQ ID NO: 324235 - RNA, 32 nt, Homo Sapiens
aagaaaguggcugaggguagugcuggccgucu

SEQ ID NO: 324236 - RNA, 32 nt, Homo Sapiens
ccugugcagacacaccaggcccucagccgcag

SEQ ID NO: 324237 - RNA, 32 nt, Homo Sapiens
uuauaguaauauaaaaagucuuuucagugugu

SEQ ID NO: 324238 - RNA, 32 nt, Homo Sapiens
ccugcuguacuggcagaguaguuugcauugac

SEQ ID NO: 324239 - RNA, 32 nt, Homo Sapiens
uccugauaaacuaauugccucacauugucacu

SEQ ID NO: 324240 - RNA, 32 nt, Homo Sapiens
cuccacccaagccccugcuggccuccugcccc

SEQ ID NO: 324241 - RNA, 32 nt, Homo Sapiens
cuggcccccuggaucugcacaucugccucgcu

SEQ ID NO: 324242 - RNA, 32 nt, Homo Sapiens
aggaccccugcagcugcagacaucugcuucac

SEQ ID NO: 324243 - RNA, 32 nt, Homo Sapiens
gagagccaugcaguccacgcgggauugugagc

SEQ ID NO: 324244 - RNA, 32 nt, Homo Sapiens
agagaacuguaucucagcacuagggaagauuu

SEQ ID NO: 324245 - RNA, 32 nt, Homo Sapiens
acuguugcuguaaaagugaauuuggaaauaaa

SEQ ID NO: 324246 - RNA, 32 nt, Homo Sapiens
cguuagcagcuggcucuguuuccaagccuggg

SEQ ID NO: 324247 - RNA, 32 nt, Homo Sapiens
aauucugcuauaagucuugaucuucaaugaac

SEQ ID NO: 324248 - RNA, 32 nt, Homo Sapiens
aagccgggugccauagugaggacccucguccu

SEQ ID NO: 324249 - RNA, 32 nt, Homo Sapiens
ccaggcuaugugggagucagugugguaggacu

SEQ ID NO: 324250 - RNA, 32 nt, Homo Sapiens
uccauccuucucuguggguccccuguaccuuu

SEQ ID NO: 324251 - RNA, 32 nt, Homo Sapiens
ugucuuaaaaauuuauacaccagcaauuuaga

SEQ ID NO: 324252 - RNA, 32 nt, Homo Sapiens
cagaaaacagaaaaguuucaagaagcaggaag

SEQ ID NO: 324253 - RNA, 32 nt, Homo Sapiens
cgagaacuuuguucuuuuugucccgcccccug

SEQ ID NO: 324254 - RNA, 32 nt, Homo Sapiens
cuaggaggccccgugugggccgcggcccggcc

SEQ ID NO: 324255 - RNA, 32 nt, Homo Sapiens
ggccaggcgugguggcucauguauguaauccu

SEQ ID NO: 324256 - RNA, 32 nt, Homo Sapiens
aacagcaaaacauguucaggaauuuuauaaac

SEQ ID NO: 324257 - RNA, 32 nt, Homo Sapiens
gcagcaggccugccgccuucauguccacucuc

SEQ ID NO: 324258 - RNA, 32 nt, Homo Sapiens
gcccgguucaagcugaaaauguuacacaggaa

SEQ ID NO: 324259 - RNA, 32 nt, Homo Sapiens
aauuuagaaagauguaaguuaugguaauaucc

SEQ ID NO: 324260 - RNA, 32 nt, Homo Sapiens
ugcacuauuauguauugauucuccaugagaca

SEQ ID NO: 324261 - RNA, 32 nt, Homo Sapiens
guuaaguagggagaaggcaggggagguggcug

SEQ ID NO: 324262 - RNA, 32 nt, Homo Sapiens
gacgcgagcgggcggcggggcuggccgugaga

SEQ ID NO: 324263 - RNA, 32 nt, Homo Sapiens
cugcaccugcagcgcgcacacgcacgcacaca

SEQ ID NO: 324264 - RNA, 32 nt, Homo Sapiens
ugggcauggggaauccucaucauccagggcag

SEQ ID NO: 324265 - RNA, 32 nt, Homo Sapiens
aagguacaacagaauaaugcaugaugaacuca

SEQ ID NO: 324266 - RNA, 32 nt, Homo Sapiens
uguuacuggauguuuuacugguugacgagaaa

SEQ ID NO: 324267 - RNA, 32 nt, Homo Sapiens
agccugaccaacguuaaguaaccccgucuuua

SEQ ID NO: 324268 - RNA, 32 nt, Homo Sapiens
ugacgggagugacugagggagcuccuggugaa

SEQ ID NO: 324269 - RNA, 31 nt, Homo Sapiens
gcagcggccaggcgccugcccccugcgccga

SEQ ID NO: 324270 - RNA, 32 nt, Homo Sapiens
caaugcuucuaaauguuacugguuucugcuuu

SEQ ID NO: 324271 - RNA, 32 nt, Homo Sapiens
ggccacacauaaaauacgcuaacaguaacaau

SEQ ID NO: 324272 - RNA, 32 nt, Homo Sapiens
ugcaaagcgcucucggggucuuuccucagccu

SEQ ID NO: 324273 - RNA, 32 nt, Homo Sapiens
ucguauuucugaguuuuuguccuucccgaggg

SEQ ID NO: 324274 - RNA, 31 nt, Homo Sapiens
gguuuuauguggaucucggcccuuagaaaac

SEQ ID NO: 324275 - RNA, 32 nt, Homo Sapiens
uugcagacagaaaaaguaaacugucaaggaau

SEQ ID NO: 324276 - RNA, 32 nt, Homo Sapiens
caacugugaugcugaugaugcuaauggagaug

SEQ ID NO: 324277 - RNA, 32 nt, Homo Sapiens
ccgcucccuccacuggcccuccaggucgauuc

SEQ ID NO: 324278 - RNA, 32 nt, Homo Sapiens
aucuugcaguccuaacucaggcaaauugugca

SEQ ID NO: 324279 - RNA, 32 nt, Homo Sapiens
uuauuccucuacagauugucauuuuuuaaacc

SEQ ID NO: 324280 - RNA, 32 nt, Homo Sapiens
gcggaauuggccacauuuccaguguaugugcc

SEQ ID NO: 324281 - RNA, 32 nt, Homo Sapiens
accuguaguccgggggcgcggcggagcuggga

SEQ ID NO: 324282 - RNA, 32 nt, Homo Sapiens
cucaaggccugccuaacuggcugggucguuuc

SEQ ID NO: 324283 - RNA, 32 nt, Homo Sapiens
uucuacucauuuccuaaauuaaaacaugcagc

SEQ ID NO: 324284 - RNA, 32 nt, Homo Sapiens
aaggcgauguccagacacagacuuuaugauua

SEQ ID NO: 324285 - RNA, 32 nt, Homo Sapiens
cauuaggaaauguaaaugcauaugaguaagug

SEQ ID NO: 324286 - RNA, 32 nt, Homo Sapiens
ugcucuggacuugcccucucccuuccuggcac

SEQ ID NO: 324287 - RNA, 32 nt, Homo Sapiens
gggcgggccgggccagaggagcucccggcaug

SEQ ID NO: 324288 - RNA, 32 nt, Homo Sapiens
ccugccccaucccaucccccucucccgagcua

SEQ ID NO: 324289 - RNA, 32 nt, Homo Sapiens
cucgggcugcaagcacugcugcugggaugcag

SEQ ID NO: 324290 - RNA, 32 nt, Homo Sapiens
cuucuccgcucuccgagaccgaagagguggac

SEQ ID NO: 324291 - RNA, 32 nt, Homo Sapiens
uggugaagaacacacaucgauucugcaccugg

SEQ ID NO: 324292 - RNA, 32 nt, Homo Sapiens
cucgcucgccugggucagggggugcgcgucgg

SEQ ID NO: 324293 - RNA, 32 nt, Homo Sapiens
ccgcuguucgccucuccucccgggagucuucu

SEQ ID NO: 324294 - RNA, 32 nt, Homo Sapiens
cuuauuuugguucuuuuuuuuauuuccacaac

SEQ ID NO: 324295 - RNA, 32 nt, Homo Sapiens
gaacuucacagagacucuguccuuccaugcaa

SEQ ID NO: 324296 - RNA, 32 nt, Homo Sapiens
ugguauacaacaauuuuuauucuuaugugugc

SEQ ID NO: 324297 - RNA, 32 nt, Homo Sapiens
uaaucaaauuuauuguacuaugacuaaaugaa

SEQ ID NO: 324298 - RNA, 32 nt, Homo Sapiens
ccccuggagaccugacuggucugugguuccca

SEQ ID NO: 324299 - RNA, 32 nt, Homo Sapiens
augaccagaaccuacugguacuuuauagcauu

SEQ ID NO: 324300 - RNA, 32 nt, Homo Sapiens
uccaccagccuggucugaggcgugcucugucc

SEQ ID NO: 324301 - RNA, 32 nt, Homo Sapiens
cggagaaacugggcuaaugugacagacagcaa

SEQ ID NO: 324302 - RNA, 32 nt, Homo Sapiens
uacccaggggaagagcugaaaaguacaaggaa

SEQ ID NO: 324303 - RNA, 32 nt, Homo Sapiens
ccuagccagaagcucaccggaauacccagcca

SEQ ID NO: 324304 - RNA, 32 nt, Homo Sapiens
cuaagaggaucuuuaggccugaguugugaagc

SEQ ID NO: 324305 - RNA, 32 nt, Homo Sapiens
cgggcgagaagcugccgccgaacgacaggacg

SEQ ID NO: 324306 - RNA, 32 nt, Homo Sapiens
ugaacuaauuuaauuauuugauuguuuuaauc

SEQ ID NO: 324307 - RNA, 32 nt, Homo Sapiens
gagggggcugagagguuucuacacucgaggag

SEQ ID NO: 324308 - RNA, 32 nt, Homo Sapiens
ccaggggaaggcggccgagcgcggcccccucu

SEQ ID NO: 324309 - RNA, 32 nt, Homo Sapiens
ccgccgccccucugccagcagcuccggcgcca

SEQ ID NO: 324310 - RNA, 32 nt, Homo Sapiens
ccugcugcccccuccacccccaacccaguccu

SEQ ID NO: 324311 - RNA, 30 nt, Homo Sapiens
gcaccuuuaauugccaccuugucuucuucu

SEQ ID NO: 324312 - RNA, 32 nt, Homo Sapiens
acuuaugucaccgggaggaaaagagagagauc

SEQ ID NO: 324313 - RNA, 32 nt, Homo Sapiens
ccgguccuggucuggccgcugcggcugcuagc

SEQ ID NO: 324314 - RNA, 32 nt, Homo Sapiens
aauauauccauauucauaugcauuuuauaaaa

SEQ ID NO: 324315 - RNA, 32 nt, Homo Sapiens
ucugaaagucagggucggcuugugaaaaguug

SEQ ID NO: 324316 - RNA, 32 nt, Homo Sapiens
gaauggagcaggaggaaaagcagaguuggucu

SEQ ID NO: 324317 - RNA, 32 nt, Homo Sapiens
agggcuuuauagaaccaaauaaaccuaccauu

SEQ ID NO: 324318 - RNA, 32 nt, Homo Sapiens
cacuucacuccagccugggugacaaagugaga

SEQ ID NO: 324319 - RNA, 32 nt, Homo Sapiens
ccaauuugaagaaccuggaauuaguagaauuc

SEQ ID NO: 324320 - RNA, 32 nt, Homo Sapiens
uuguagcugaccaacagccugcucuccccaac

SEQ ID NO: 324321 - RNA, 32 nt, Homo Sapiens
ucucagccucccugcuggcugauacccaggag

SEQ ID NO: 324322 - RNA, 32 nt, Homo Sapiens
caggagggucuccuccggaguuccacagaugg

SEQ ID NO: 324323 - RNA, 32 nt, Homo Sapiens
gggaaaggauaguuaaauuuguaaguuucaug

SEQ ID NO: 324324 - RNA, 32 nt, Homo Sapiens
cccuggugcagggcccugcccgauggaagaug

SEQ ID NO: 324325 - RNA, 32 nt, Homo Sapiens
gcgacucucucccuuccucauccaccucuuug

SEQ ID NO: 324326 - RNA, 32 nt, Homo Sapiens
ggcaggccgcgguggggggcggcaguggcucc

SEQ ID NO: 324327 - RNA, 32 nt, Homo Sapiens
aggagaccagugcugguccaguggcugugaug

SEQ ID NO: 324328 - RNA, 32 nt, Homo Sapiens
cugggggguagcaguggaggcugggguuaacc

SEQ ID NO: 324329 - RNA, 32 nt, Homo Sapiens
uguguaccuggcgcuguguuccugcuuguuug

SEQ ID NO: 324330 - RNA, 32 nt, Homo Sapiens
gaguggcaggggagcucugucuguggaggggu

SEQ ID NO: 324331 - RNA, 32 nt, Homo Sapiens
caucugucugcaggcugucucuccaggcacgg

SEQ ID NO: 324332 - RNA, 32 nt, Homo Sapiens
uguaucuugcguuuuaaauucuuaauaagguc

SEQ ID NO: 324333 - RNA, 32 nt, Homo Sapiens
uuagugagagacuguaguuaaaaggaaggcuu

SEQ ID NO: 324334 - RNA, 32 nt, Homo Sapiens
gagaaacucuugaaccuaggagguggagguug

SEQ ID NO: 324335 - RNA, 32 nt, Homo Sapiens
auuuuccugcuucuuuggguugccaaucaaga

SEQ ID NO: 324336 - RNA, 32 nt, Homo Sapiens
aaauugucuuauaauacuagcuaacggcaaag

SEQ ID NO: 324337 - RNA, 32 nt, Homo Sapiens
cagaaguugucuuuuuaaaaguguuuauuuuu

SEQ ID NO: 324338 - RNA, 32 nt, Homo Sapiens
gcuuuguucuuucgcucuuuugcaauaaaucu

SEQ ID NO: 324339 - RNA, 32 nt, Homo Sapiens
aacaaauccagcauuucaagugccagaaguau

SEQ ID NO: 324340 - RNA, 32 nt, Homo Sapiens
agaugucauuucccaguuucuugcuuauuuua

SEQ ID NO: 324341 - RNA, 32 nt, Homo Sapiens
ucccuccugggcggggcggcuggccgggcaga

SEQ ID NO: 324342 - RNA, 32 nt, Homo Sapiens
agggagaaugggguggggaggggguucuugcc

SEQ ID NO: 324343 - RNA, 32 nt, Homo Sapiens
ugccuguaaucccagcacuuugagaggcugaa

SEQ ID NO: 324344 - RNA, 31 nt, Homo Sapiens
ccgcgcucacacaaccgguccacuccugccu

SEQ ID NO: 324345 - RNA, 32 nt, Homo Sapiens
cgggcgccauugugcggcgcgcgccgggacuc

SEQ ID NO: 324346 - RNA, 32 nt, Homo Sapiens
ggccucccggccgggggcgccaacggggagag

SEQ ID NO: 324347 - RNA, 32 nt, Homo Sapiens
ugagucucaauccggccggguagcacgggaug

SEQ ID NO: 324348 - RNA, 32 nt, Homo Sapiens
gcgcagccgccggcugccccucgcucccaggc

SEQ ID NO: 324349 - RNA, 32 nt, Homo Sapiens
aaucuauugucuuuauuucucauuuaagggca

SEQ ID NO: 324350 - RNA, 32 nt, Homo Sapiens
ugucggggcugaugcagaugcugcugcugaag

SEQ ID NO: 324351 - RNA, 31 nt, Homo Sapiens
gugcccaggcagcuccugcccccgccuuccc

SEQ ID NO: 324352 - RNA, 32 nt, Homo Sapiens
auguuuugaaagauaaucgauacguauauuuc

SEQ ID NO: 324353 - RNA, 32 nt, Homo Sapiens
gccuaucuuaagcguucccuggaagaaugggg

SEQ ID NO: 324354 - RNA, 32 nt, Homo Sapiens
ucccaaugcaguuacaggauccugggaagcag

SEQ ID NO: 324355 - RNA, 32 nt, Homo Sapiens
uaucucugcaauuuuagaaaaugacaaguaga

SEQ ID NO: 324356 - RNA, 32 nt, Homo Sapiens
gucauccccacuuuacuuuuuaaaaaaauaac

SEQ ID NO: 324357 - RNA, 32 nt, Homo Sapiens
auccuccccagggccagcccagcccuguccgg

SEQ ID NO: 324358 - RNA, 32 nt, Homo Sapiens
auccuauuacuuaugauuuaugguaguaauau

SEQ ID NO: 324359 - RNA, 32 nt, Homo Sapiens
aaauauggaucagaaaucaugcaaguucggac

SEQ ID NO: 324360 - RNA, 32 nt, Homo Sapiens
gguguuuuugagucugugggugucacagagag

SEQ ID NO: 324361 - RNA, 32 nt, Homo Sapiens
ucaucuuucauuguuuuccccagagcagaaau

SEQ ID NO: 324362 - RNA, 32 nt, Homo Sapiens
ugcucugcuuucuuuacaaaugacucagagug

SEQ ID NO: 324363 - RNA, 32 nt, Homo Sapiens
ggccggcguccacgcauugccauggugacugu

SEQ ID NO: 324364 - RNA, 32 nt, Homo Sapiens
caaagagccuccccgcgcucccgcucuccgcu

SEQ ID NO: 324365 - RNA, 32 nt, Homo Sapiens
ucagugcuuuaaugguuuuguuuucuaaugca

SEQ ID NO: 324366 - RNA, 32 nt, Homo Sapiens
ucugcccgagcccgcggccucacgcgcgcccu

SEQ ID NO: 324367 - RNA, 32 nt, Homo Sapiens
gcccuaggacccucggaaccaagccccugaca

SEQ ID NO: 324368 - RNA, 32 nt, Homo Sapiens
ggggaaggucagagagccauggagagggccua

SEQ ID NO: 324369 - RNA, 32 nt, Homo Sapiens
cauaaaaguguuuguuucuguuauguuaccau

SEQ ID NO: 324370 - RNA, 32 nt, Homo Sapiens
agagcaaaucauauuacauaauuacauuuuaa

SEQ ID NO: 324371 - RNA, 32 nt, Homo Sapiens
uuacauuuucuaaagcguacucugccagccaa

SEQ ID NO: 324372 - RNA, 32 nt, Homo Sapiens
agugcccaccguuauuuguaacuauuaaacca

SEQ ID NO: 324373 - RNA, 32 nt, Homo Sapiens
ccuccuugacauuuauuuguuaaucauaugau

SEQ ID NO: 324374 - RNA, 32 nt, Homo Sapiens
gacacgcuaaacaauuuacuuuggacuguccu

SEQ ID NO: 324375 - RNA, 32 nt, Homo Sapiens
agauacaaacaaaguaaaucauaguuggugua

SEQ ID NO: 324376 - RNA, 32 nt, Homo Sapiens
ccaacuggccccaguacauucauucucucagg

SEQ ID NO: 324377 - RNA, 32 nt, Homo Sapiens
aaauuaagaugaugaaaucaacuuuauaaagg

SEQ ID NO: 324378 - RNA, 32 nt, Homo Sapiens
guauuuuguaaauaauaaaauaguaucuguua

SEQ ID NO: 324379 - RNA, 32 nt, Homo Sapiens
aucuucagcuccguguggacaucucccuguac

SEQ ID NO: 324380 - RNA, 32 nt, Homo Sapiens
gaaaguucucaauaaaguucacgguuucauua

SEQ ID NO: 324381 - RNA, 32 nt, Homo Sapiens
auaagcagacgauaguuaucuguucuuuugac

SEQ ID NO: 324382 - RNA, 32 nt, Homo Sapiens
auauuuaauuuuuauuugauugauaaugaccu

SEQ ID NO: 324383 - RNA, 32 nt, Homo Sapiens
cggcacgagcgccgccgaggauucagcagccu

SEQ ID NO: 324384 - RNA, 32 nt, Homo Sapiens
uccauagaauuuaguuauuuuaucuuucagcc

SEQ ID NO: 324385 - RNA, 32 nt, Homo Sapiens
uguccacccaacaaauaaauuccuacuaagug

SEQ ID NO: 324386 - RNA, 32 nt, Homo Sapiens
uuuggagguggugaaggcagcgaaggggguug

SEQ ID NO: 324387 - RNA, 32 nt, Homo Sapiens
ccugcaggccccagugugugccucaacugauu

SEQ ID NO: 324388 - RNA, 32 nt, Homo Sapiens
aauuugagucaauuccaagaaauaucuguuga

SEQ ID NO: 324389 - RNA, 32 nt, Homo Sapiens
ggaggcugaggugggcagaucgcuugagccca

SEQ ID NO: 324390 - RNA, 32 nt, Homo Sapiens
uccccuuggugccccccucugcucagaaucug

SEQ ID NO: 324391 - RNA, 32 nt, Homo Sapiens
uuacuaaauaaaugacuggggcaagcaaaauu

SEQ ID NO: 324392 - RNA, 32 nt, Homo Sapiens
aggcucccgaggugggggccggggcgggaugg

SEQ ID NO: 324393 - RNA, 32 nt, Homo Sapiens
gacuucugguuguauuucuauauuuauuuuca

SEQ ID NO: 324394 - RNA, 32 nt, Homo Sapiens
ucgcggggccuggcccaaggucuccagcagag

SEQ ID NO: 324395 - RNA, 32 nt, Homo Sapiens
gagcucuauguguauuugaugacauugucagc

SEQ ID NO: 324396 - RNA, 32 nt, Homo Sapiens
uuuggaagugucaugggugucuguggguuauu

SEQ ID NO: 324397 - RNA, 32 nt, Homo Sapiens
auuuuuaacuaaacgcaaaucuguagauucuc

SEQ ID NO: 324398 - RNA, 32 nt, Homo Sapiens
aggcacccuucuuuccucuuccccuugcccuu

SEQ ID NO: 324399 - RNA, 32 nt, Homo Sapiens
uaggcucuaguccaacaguuguuuacauuuua

SEQ ID NO: 324400 - RNA, 32 nt, Homo Sapiens
aguuccuauuuucagcuaguugaaaacagaga

SEQ ID NO: 324401 - RNA, 32 nt, Homo Sapiens
guggccaaacaaagcaagucgagaaggcagcu

SEQ ID NO: 324402 - RNA, 32 nt, Homo Sapiens
guuuauuggggacgguacuguggguugggggc

SEQ ID NO: 324403 - RNA, 32 nt, Homo Sapiens
cagaccccugcccugagucucaucucagcaau

SEQ ID NO: 324404 - RNA, 32 nt, Homo Sapiens
aaaacagacuaauugcaauaggagcuuggaug

SEQ ID NO: 324405 - RNA, 28 nt, Homo Sapiens
cuaucaguggcuacaguggaaggaccug

SEQ ID NO: 324406 - RNA, 32 nt, Homo Sapiens
aaagaagauuguguuuucuccacugauuuagc

SEQ ID NO: 324407 - RNA, 32 nt, Homo Sapiens
cuggacugucuccuaucaugauucccgggaaa

SEQ ID NO: 324408 - RNA, 32 nt, Homo Sapiens
cccugagaucugccggucaucuccauggacuu

SEQ ID NO: 324409 - RNA, 32 nt, Homo Sapiens
auucucuuggucugagcuuugugcagucuuac

SEQ ID NO: 324410 - RNA, 32 nt, Homo Sapiens
auuuuauucuaccuguugugugaguuuaguau

SEQ ID NO: 324411 - RNA, 32 nt, Homo Sapiens
acuuucuagcuuugcaugacaccuggagcaau

SEQ ID NO: 324412 - RNA, 32 nt, Homo Sapiens
gggugagauugaacagaagagggaguuggugu

SEQ ID NO: 324413 - RNA, 32 nt, Homo Sapiens
ucauuaagaguuuuauacugugaagauuuuau

SEQ ID NO: 324414 - RNA, 32 nt, Homo Sapiens
uuuuauugcauaauucuuguauacaauaaaca

SEQ ID NO: 324415 - RNA, 32 nt, Homo Sapiens
cuauuaguugacaugagguggcugcuuaaggg

SEQ ID NO: 324416 - RNA, 32 nt, Homo Sapiens
cucgggaccugcagcccuccaugccugacccu

SEQ ID NO: 324417 - RNA, 32 nt, Homo Sapiens
guguacauauaaauaaccacaacuuuauaugg

SEQ ID NO: 324418 - RNA, 32 nt, Homo Sapiens
ucuacguuuaacuucuugaaaaucuuaguacu

SEQ ID NO: 324419 - RNA, 32 nt, Homo Sapiens
caguuuccucacucccauuuugcuuuaauuuc

SEQ ID NO: 324420 - RNA, 32 nt, Homo Sapiens
aauggcgagccccacgcgccgcgcuccgcccg

SEQ ID NO: 324421 - RNA, 32 nt, Homo Sapiens
ugcccuagaggaaagaggcggguguggggucg

SEQ ID NO: 324422 - RNA, 30 nt, Homo Sapiens
agaagccuggggagaggugagucuggaauu

SEQ ID NO: 324423 - RNA, 32 nt, Homo Sapiens
accauuuccagaaagcugcaaagaucuucccu

SEQ ID NO: 324424 - RNA, 32 nt, Homo Sapiens
cgucagcggccugguccuuucaccggcagcuc

SEQ ID NO: 324425 - RNA, 32 nt, Homo Sapiens
cacaggugugagccaccacaccuggcuaauuu

SEQ ID NO: 324426 - RNA, 32 nt, Homo Sapiens
ggcuccgacgcccucgcccagcccagcucucc

SEQ ID NO: 324427 - RNA, 32 nt, Homo Sapiens
aagcaaauaaaauuauugaaaauaauuuuaaa

SEQ ID NO: 324428 - RNA, 32 nt, Homo Sapiens
gggguaauauaaaaaugugcucguguguuuag

SEQ ID NO: 324429 - RNA, 32 nt, Homo Sapiens
ugcugcggccccacccccgggcggucacggug

SEQ ID NO: 324430 - RNA, 32 nt, Homo Sapiens
caugcaaaucaucaagcaauugcuucaaagga

SEQ ID NO: 324431 - RNA, 32 nt, Homo Sapiens
uaauauacagucaguucucauuauucacagua

SEQ ID NO: 324432 - RNA, 32 nt, Homo Sapiens
agagucucacucugucacccaggcugcaguuc

SEQ ID NO: 324433 - RNA, 32 nt, Homo Sapiens
cuuuuaagugaagaaaaugauacugcuagcag

SEQ ID NO: 324434 - RNA, 32 nt, Homo Sapiens
ucuggcccugaacucauauuccuuucuaauau

SEQ ID NO: 324435 - RNA, 31 nt, Homo Sapiens
gcagcgcagcgcagccgcgggcgcucuccgg

SEQ ID NO: 324436 - RNA, 30 nt, Homo Sapiens
uggacuauucuugccaccccuauccauggc

SEQ ID NO: 324437 - RNA, 32 nt, Homo Sapiens
uuuguuugcuuauaaauuuuuuaccacuccca

SEQ ID NO: 324438 - RNA, 32 nt, Homo Sapiens
gcucugaggggagggggaaagugccauguaga

SEQ ID NO: 324439 - RNA, 32 nt, Homo Sapiens
caccuccugaccaaccuuucccagggcggcac

SEQ ID NO: 324440 - RNA, 32 nt, Homo Sapiens
acaccagcgcuggcuucccgggcccgcgggcc

SEQ ID NO: 324441 - RNA, 32 nt, Homo Sapiens
ugcaccuccagcguccauaagaacguagcccg

SEQ ID NO: 324442 - RNA, 32 nt, Homo Sapiens
cgccagaggaggaggccggggaauggccgcgg

SEQ ID NO: 324443 - RNA, 32 nt, Homo Sapiens
gucgguacggcgcagacucaacaucaaccucu

SEQ ID NO: 324444 - RNA, 32 nt, Homo Sapiens
cagcauggccccagcacaacuccguagggagc

SEQ ID NO: 324445 - RNA, 27 nt, Homo Sapiens
ucuucagccuucuucagcccucuucua

SEQ ID NO: 324446 - RNA, 32 nt, Homo Sapiens
ggccgcugcacugcgaggccgacgcagcugga

SEQ ID NO: 324447 - RNA, 32 nt, Homo Sapiens
auauauagucucacauugauaauugaaacuag

SEQ ID NO: 324448 - RNA, 32 nt, Homo Sapiens
gcuaccgagaaccugcucgggggacgcguccg

SEQ ID NO: 324449 - RNA, 32 nt, Homo Sapiens
cagggaucuuucuggaggaaaagcuggggcca

SEQ ID NO: 324450 - RNA, 32 nt, Homo Sapiens
acucagcugucaucugcagccucugccuccag

SEQ ID NO: 324451 - RNA, 32 nt, Homo Sapiens
cugguaguccagagaccccaacucugcccugg

SEQ ID NO: 324452 - RNA, 32 nt, Homo Sapiens
uccaaaauacucaaugggaaaugacuaguaau

SEQ ID NO: 324453 - RNA, 32 nt, Homo Sapiens
caaaggggcaauggggugccuacuaugugcga

SEQ ID NO: 324454 - RNA, 32 nt, Homo Sapiens
uguaucuacguaggucauguaagcaaaggcuu

SEQ ID NO: 324455 - RNA, 32 nt, Homo Sapiens
uuccuguggcccagcccgccccauucaccugu

SEQ ID NO: 324456 - RNA, 32 nt, Homo Sapiens
ucuuagaaauaaaacuuugauggacuuucaaa

SEQ ID NO: 324457 - RNA, 32 nt, Homo Sapiens
caguauaauuuucccugauaugaaaaaaugug

SEQ ID NO: 324458 - RNA, 32 nt, Homo Sapiens
cacuucccaagccuuacccuggcaucuuucuu

SEQ ID NO: 324459 - RNA, 32 nt, Homo Sapiens
agaagcagaaguaaaaugaaaacugaaaaucu

SEQ ID NO: 324460 - RNA, 31 nt, Homo Sapiens
ugugaacucugcagaaagucucuucuucauc

SEQ ID NO: 324461 - RNA, 32 nt, Homo Sapiens
uuuugcguguggaccguaggccucuuucuagu

SEQ ID NO: 324462 - RNA, 32 nt, Homo Sapiens
cgucuucccgucugcccuuuuauuugucagcg

SEQ ID NO: 324463 - RNA, 29 nt, Homo Sapiens
uucaugcuauguauguaccauaaccaacc

SEQ ID NO: 324464 - RNA, 32 nt, Homo Sapiens
cagaaggauguugcuuuuuuaagggagggcca

SEQ ID NO: 324465 - RNA, 32 nt, Homo Sapiens
agcaugcuuccccauuucgccauggugggaaa

SEQ ID NO: 324466 - RNA, 32 nt, Homo Sapiens
uaucccugagaagagggaaaagaacuauucca

SEQ ID NO: 324467 - RNA, 32 nt, Homo Sapiens
gcugaccugggcugcugguuccguugacuagg

SEQ ID NO: 324468 - RNA, 32 nt, Homo Sapiens
uagggagugcccggggccgccgccuccgcccg

SEQ ID NO: 324469 - RNA, 32 nt, Homo Sapiens
agcagucaccuacccccaccugucccacccca

SEQ ID NO: 324470 - RNA, 32 nt, Homo Sapiens
aggugcacauauuugggggaggcucauggaca

SEQ ID NO: 324471 - RNA, 32 nt, Homo Sapiens
gacucgaggaccagagcucucgggccuccuga

SEQ ID NO: 324472 - RNA, 32 nt, Homo Sapiens
guguuugaaaauaauguugcuaucaccuauuu

SEQ ID NO: 324473 - RNA, 32 nt, Homo Sapiens
uccaggaaagacugagaaaaagagcguugaau

SEQ ID NO: 324474 - RNA, 32 nt, Homo Sapiens
cuagucgccgcggcggggucgagcgggggcgg

SEQ ID NO: 324475 - RNA, 32 nt, Homo Sapiens
uaugauguuuuaagugugcaaacaaguuagag

SEQ ID NO: 324476 - RNA, 32 nt, Homo Sapiens
gcuguggcaccaugcauaagauuucuucagaa

SEQ ID NO: 324477 - RNA, 32 nt, Homo Sapiens
cccugguagggaggggugccgcagccacuaac

SEQ ID NO: 324478 - RNA, 32 nt, Homo Sapiens
uugcccucacccaaagguucuggcucuucccu

SEQ ID NO: 324479 - RNA, 32 nt, Homo Sapiens
cggcucaggguggcgcggcugcugcucacugu

SEQ ID NO: 324480 - RNA, 32 nt, Homo Sapiens
gccccuaaccucagcccgagggucuccaggau

SEQ ID NO: 324481 - RNA, 32 nt, Homo Sapiens
ccacgcuggucuugaacuccugggcucaagcg

SEQ ID NO: 324482 - RNA, 32 nt, Homo Sapiens
uccacccgcgcgcacgggccguccucuccgcg

SEQ ID NO: 324483 - RNA, 32 nt, Homo Sapiens
cggcugcauuggauuguacaacuguuuuguga

SEQ ID NO: 324484 - RNA, 32 nt, Homo Sapiens
uuuucccaaagaaaauaacauagcacagaagg

SEQ ID NO: 324485 - RNA, 32 nt, Homo Sapiens
ugucauguguaucuaucccucaauguuuuuaa

SEQ ID NO: 324486 - RNA, 32 nt, Homo Sapiens
gcggcaacgccuccuuggugucguccgcuucc

SEQ ID NO: 324487 - RNA, 32 nt, Homo Sapiens
cugcuucucccucuaggagccuaaagaacccu

SEQ ID NO: 324488 - RNA, 32 nt, Homo Sapiens
accaacucaguuccaucauggugauguucaag

SEQ ID NO: 324489 - RNA, 32 nt, Homo Sapiens
uauacuguccagagcccucccucccagcgcua

SEQ ID NO: 324490 - RNA, 32 nt, Homo Sapiens
uuuaaaaugcccuugugucucccagugaggag

SEQ ID NO: 324491 - RNA, 30 nt, Homo Sapiens
cagggauggagaccaaaggcuaccacaguc

SEQ ID NO: 324492 - RNA, 32 nt, Homo Sapiens
uauuaaagguugggauugguccugucaugugg

SEQ ID NO: 324493 - RNA, 32 nt, Homo Sapiens
agcaaaaaaaaauuauuuaaaaaucauuuuua

SEQ ID NO: 324494 - RNA, 32 nt, Homo Sapiens
auggcagcucacguucugccuugucagcuacu

SEQ ID NO: 324495 - RNA, 32 nt, Homo Sapiens
ugagcuugucuaacuuaccauguuggaaacac

SEQ ID NO: 324496 - RNA, 32 nt, Homo Sapiens
uggugagaaugggaagcauccauucauugcga

SEQ ID NO: 324497 - RNA, 32 nt, Homo Sapiens
cacgcgugcaggguguguguccacgagcgacg

SEQ ID NO: 324498 - RNA, 32 nt, Homo Sapiens
aaucuugauuuaacucacuaaauauuuauaua

SEQ ID NO: 324499 - RNA, 32 nt, Homo Sapiens
gccacaugcugguccgcagagcccuccuccca

SEQ ID NO: 324500 - RNA, 32 nt, Homo Sapiens
ugcugcaggcgcugcgcguggccaggaugccc

SEQ ID NO: 324501 - RNA, 32 nt, Homo Sapiens
gaaaaacaaaaauaugaagagaauauaaagag

SEQ ID NO: 324502 - RNA, 32 nt, Homo Sapiens
aggcuuggggcccccgucugcugcuggacagu

SEQ ID NO: 324503 - RNA, 32 nt, Homo Sapiens
ugguucagacauuuggggcaaaugguucacau

SEQ ID NO: 324504 - RNA, 32 nt, Homo Sapiens
aaaauuuuacaccuaucuggcaucauaggauu

SEQ ID NO: 324505 - RNA, 32 nt, Homo Sapiens
ucccgccagucccagcugcgcgcgccccccag

SEQ ID NO: 324506 - RNA, 32 nt, Homo Sapiens
aggaauugaagacuuugcuacucucugguaag

SEQ ID NO: 324507 - RNA, 32 nt, Homo Sapiens
uguggcuuucauuuuguuguuuuguugcaagc

SEQ ID NO: 324508 - RNA, 32 nt, Homo Sapiens
cuacuguauuuuucuuuuuaauaucuacuuga

SEQ ID NO: 324509 - RNA, 32 nt, Homo Sapiens
uucaccugccaccacacacacacacacacaca

SEQ ID NO: 324510 - RNA, 32 nt, Homo Sapiens
gaaagucuucagugauggccuacgccaaagca

SEQ ID NO: 324511 - RNA, 32 nt, Homo Sapiens
aggugggcccuggcauccccagccuccucuaa

SEQ ID NO: 324512 - RNA, 32 nt, Homo Sapiens
cguugacacucucuccuuccuuccuuccccaa

SEQ ID NO: 324513 - RNA, 32 nt, Homo Sapiens
ucuugugauuugguugcacuuuagacauuuuu

SEQ ID NO: 324514 - RNA, 32 nt, Homo Sapiens
gcuugacuuugaggagaggcugugauguuuau

SEQ ID NO: 324515 - RNA, 32 nt, Homo Sapiens
cagccuucugaugaucccacuccaccccaccu

SEQ ID NO: 324516 - RNA, 27 nt, Homo Sapiens
cccugcacuucuuccagccccccaaau

SEQ ID NO: 324517 - RNA, 32 nt, Homo Sapiens
acugcagcagcaauuaaaguugugaaagaaaa

SEQ ID NO: 324518 - RNA, 32 nt, Homo Sapiens
ggcgacuguagucccagcuacucgcgagacug

SEQ ID NO: 324519 - RNA, 32 nt, Homo Sapiens
cuggaggagaggaaacagugacuaaaagcugg

SEQ ID NO: 324520 - RNA, 32 nt, Homo Sapiens
cuucuuuaccucaggagccaggagcagacagc

SEQ ID NO: 324521 - RNA, 32 nt, Homo Sapiens
uuauagaggaauuuuuucacuaugcauucagu

SEQ ID NO: 324522 - RNA, 32 nt, Homo Sapiens
ccgcggggcgaggucgccgccauggcccgcug

SEQ ID NO: 324523 - RNA, 32 nt, Homo Sapiens
uuugaaugaucuuaauuuuucuuucaugacaa

SEQ ID NO: 324524 - RNA, 32 nt, Homo Sapiens
caaccugcagcguauagcugcccagcuaugcc

SEQ ID NO: 324525 - RNA, 32 nt, Homo Sapiens
aggaaacggucuacccuucuuugcaaaacaca

SEQ ID NO: 324526 - RNA, 32 nt, Homo Sapiens
cguugccucggagcucgcugcccgcggggcgc

SEQ ID NO: 324527 - RNA, 32 nt, Homo Sapiens
gcucccagcuuggaagaccaggguggguacau

SEQ ID NO: 324528 - RNA, 32 nt, Homo Sapiens
uacaacuguuuucucuuuuuuacaguacaugu

SEQ ID NO: 324529 - RNA, 32 nt, Homo Sapiens
aggagguuagacaaaagugauucuuuugccaa

SEQ ID NO: 324530 - RNA, 32 nt, Homo Sapiens
acccaucugcaccccccugggcugagagaacc

SEQ ID NO: 324531 - RNA, 32 nt, Homo Sapiens
aaucuuuggucccagcauuuucccacuccagu

SEQ ID NO: 324532 - RNA, 32 nt, Homo Sapiens
caaaugccugaagggaagcucaauguagaugg

SEQ ID NO: 324533 - RNA, 32 nt, Homo Sapiens
agaaaaucuaaaaagguaauacggguauuuca

SEQ ID NO: 324534 - RNA, 32 nt, Homo Sapiens
uuugcuuuguguauacugaauuuuugcagcaa

SEQ ID NO: 324535 - RNA, 32 nt, Homo Sapiens
cagggcaggaccagcccacgcugacuacaggg

SEQ ID NO: 324536 - RNA, 32 nt, Homo Sapiens
ucacucugccuguuagguggguuuucaaaccc

SEQ ID NO: 324537 - RNA, 32 nt, Homo Sapiens
gccuugacuccagcugcgcccacaggaagucc

SEQ ID NO: 324538 - RNA, 32 nt, Homo Sapiens
ugcacaagaauggaucacaagauggaauuuag

SEQ ID NO: 324539 - RNA, 32 nt, Homo Sapiens
uuacuaaaaugaaugaaugauugagaaauacg

SEQ ID NO: 324540 - RNA, 32 nt, Homo Sapiens
accagcagguggcgcucuggcuuugcacugca

SEQ ID NO: 324541 - RNA, 32 nt, Homo Sapiens
auuccgugccugccgccgcagcgccgccgaca

SEQ ID NO: 324542 - RNA, 32 nt, Homo Sapiens
gcgagccagggccgggcgcccgggccuuugcu

SEQ ID NO: 324543 - RNA, 32 nt, Homo Sapiens
cuaaaaauaccauuaaguaauaguauuagcuu

SEQ ID NO: 324544 - RNA, 32 nt, Homo Sapiens
ggcuguuggguggcagugucagcacagggagg

SEQ ID NO: 324545 - RNA, 32 nt, Homo Sapiens
cccuccccgcggcgcagcacggagucucggcg

SEQ ID NO: 324546 - RNA, 32 nt, Homo Sapiens
agaaaacuggaagaagauuugcugguagaagu

SEQ ID NO: 324547 - RNA, 32 nt, Homo Sapiens
cuuccugggacuucggguacccacccgcuguu

SEQ ID NO: 324548 - RNA, 32 nt, Homo Sapiens
uaaaaagaacagagauggggucuugcuuuguu

SEQ ID NO: 324549 - RNA, 32 nt, Homo Sapiens
ccuggucuuuuguccuuuuuuauuuuggucuc

SEQ ID NO: 324550 - RNA, 32 nt, Homo Sapiens
ucucuucuuaccaagcuagacuggguugccuu

SEQ ID NO: 324551 - RNA, 32 nt, Homo Sapiens
ggaggggcuccucgcggugcugcgcgccgggc

SEQ ID NO: 324552 - RNA, 32 nt, Homo Sapiens
ugagaauucuacaaacuauaaaacauuaauuu

SEQ ID NO: 324553 - RNA, 32 nt, Homo Sapiens
gccuaaagugcuucuuuucuaacccaaaacag

SEQ ID NO: 324554 - RNA, 32 nt, Homo Sapiens
aaacuuugugauuuaaauuuacugaauuuaau

SEQ ID NO: 324555 - RNA, 32 nt, Homo Sapiens
cugcgacaguuccagaauuugcucucccacuc

SEQ ID NO: 324556 - RNA, 32 nt, Homo Sapiens
ggcgcgggccgaguacugagcgcacggucggg

SEQ ID NO: 324557 - RNA, 32 nt, Homo Sapiens
uaauucuugcuuaaagacuacaauuuuaguau

SEQ ID NO: 324558 - RNA, 32 nt, Homo Sapiens
gagcccgccucccaggcaggggucagcauggc

SEQ ID NO: 324559 - RNA, 32 nt, Homo Sapiens
ggggcuggagagcggcgaccacugcggaucuc

SEQ ID NO: 324560 - RNA, 32 nt, Homo Sapiens
uuagaauauagucugagcacaaaccugaaaaa

SEQ ID NO: 324561 - RNA, 32 nt, Homo Sapiens
ucugacauuuccccugcuugcacucccuucau

SEQ ID NO: 324562 - RNA, 32 nt, Homo Sapiens
ggccgccgcaacgacccuuggggccggcaaag

SEQ ID NO: 324563 - RNA, 32 nt, Homo Sapiens
uacagagaucgaccgcccugcugccuacugug

SEQ ID NO: 324564 - RNA, 32 nt, Homo Sapiens
ucccauuuuacagauagguaacugaggcacac

SEQ ID NO: 324565 - RNA, 32 nt, Homo Sapiens
uaagucucaguuccaauaccuauaaagugagu

SEQ ID NO: 324566 - RNA, 32 nt, Homo Sapiens
aacugguugguggaacgcuggcacuuuaucau

SEQ ID NO: 324567 - RNA, 32 nt, Homo Sapiens
gcccgcagguggaagcgcacccgggaggcggg

SEQ ID NO: 324568 - RNA, 32 nt, Homo Sapiens
ugcugugccugccuguguccugaggaagaagc

SEQ ID NO: 324569 - RNA, 32 nt, Homo Sapiens
ugccucacuuauuaaagcacaaaauguuuuac

SEQ ID NO: 324570 - RNA, 32 nt, Homo Sapiens
auuucuggagucugggucuuccgaggccagga

SEQ ID NO: 324571 - RNA, 32 nt, Homo Sapiens
aagauuuguuuauauuguuaaucuuagggaaa

SEQ ID NO: 324572 - RNA, 32 nt, Homo Sapiens
agucccucgagccgcgagccuucgcugaagug

SEQ ID NO: 324573 - RNA, 32 nt, Homo Sapiens
cugccgccuggggcuccggugcggugcauggu

SEQ ID NO: 324574 - RNA, 32 nt, Homo Sapiens
cgugccccccgggccuccccagcccugccacu

SEQ ID NO: 324575 - RNA, 32 nt, Homo Sapiens
gggggaugaugucauggggaccccaagccccu

SEQ ID NO: 324576 - RNA, 32 nt, Homo Sapiens
agacuuuacuugcuuuuucauuguuuuucucu

SEQ ID NO: 324577 - RNA, 32 nt, Homo Sapiens
agaauauuguacaccugaucaauguguguuca

SEQ ID NO: 324578 - RNA, 32 nt, Homo Sapiens
gcggagggcccgcgggacucggcguuggcgga

SEQ ID NO: 324579 - RNA, 27 nt, Homo Sapiens
caauggcugugcaccaguggcuggaua

SEQ ID NO: 324580 - RNA, 32 nt, Homo Sapiens
ggccggagggcgcgcgcacugcuaggaagugc

SEQ ID NO: 324581 - RNA, 32 nt, Homo Sapiens
uaacuuggaugagagcaaaaaccugggagaau

SEQ ID NO: 324582 - RNA, 32 nt, Homo Sapiens
gacccagcugccacccaccuccuccaucacug

SEQ ID NO: 324583 - RNA, 32 nt, Homo Sapiens
auuucacaauuuccaaaaagcaaaauaaacau

SEQ ID NO: 324584 - RNA, 32 nt, Homo Sapiens
ccagcagcccacuggaggcauucuucaggcuc

SEQ ID NO: 324585 - RNA, 32 nt, Homo Sapiens
gagugggaauacugagauguguggguuuuugc

SEQ ID NO: 324586 - RNA, 32 nt, Homo Sapiens
gggcccuggauggcacaugacucccagugagg

SEQ ID NO: 324587 - RNA, 32 nt, Homo Sapiens
uauccagacagaggcaaaucauuuuguuuaac

SEQ ID NO: 324588 - RNA, 32 nt, Homo Sapiens
uagagagacucugcggcccagauucuucagga

SEQ ID NO: 324589 - RNA, 32 nt, Homo Sapiens
uagucuaaaaaguaaaaggggcgaucaggucc

SEQ ID NO: 324590 - RNA, 32 nt, Homo Sapiens
ggguggggaaugcacagauguugaccaaaggg

SEQ ID NO: 324591 - RNA, 32 nt, Homo Sapiens
uauucaagugaaagaaagagaagggaauugcu

SEQ ID NO: 324592 - RNA, 32 nt, Homo Sapiens
ccucacacagaaaaguaccucgaaggaagcaa

SEQ ID NO: 324593 - RNA, 32 nt, Homo Sapiens
auaauguauauuuuaaauuggaccucacaaau

SEQ ID NO: 324594 - RNA, 32 nt, Homo Sapiens
cguguccaaaauaaaaugucucaucuucucau

SEQ ID NO: 324595 - RNA, 32 nt, Homo Sapiens
gaugaggugugcucuguucucaaggauuguug

SEQ ID NO: 324596 - RNA, 32 nt, Homo Sapiens
agaggucaaaauuuaugaaaaacaaaaugcug

SEQ ID NO: 324597 - RNA, 32 nt, Homo Sapiens
gcgugggaugcacacggaugacagaaucaagg

SEQ ID NO: 324598 - RNA, 32 nt, Homo Sapiens
ucuagaucuucuugaauguugauaaaaaugaa

SEQ ID NO: 324599 - RNA, 32 nt, Homo Sapiens
ucuuacagaaauuuuucaaaggaaucaauuua

SEQ ID NO: 324600 - RNA, 32 nt, Homo Sapiens
ugaaaaguguaauaaacuucaugcucaccuau

SEQ ID NO: 324601 - RNA, 32 nt, Homo Sapiens
ucucugccuggccgugucuaauaaaaaguauu

SEQ ID NO: 324602 - RNA, 32 nt, Homo Sapiens
aggaccacacuugggggaccaaucauguccuu

SEQ ID NO: 324603 - RNA, 32 nt, Homo Sapiens
auccucccaucccaguaaacccugccaaauug

SEQ ID NO: 324604 - RNA, 32 nt, Homo Sapiens
gucacugcaaccuccgccucccggguucaagu

SEQ ID NO: 324605 - RNA, 32 nt, Homo Sapiens
gaagggggucaguguguguaugugucauggag

SEQ ID NO: 324606 - RNA, 32 nt, Homo Sapiens
ggccaccuuucccuggggacccuaacaggccc

SEQ ID NO: 324607 - RNA, 32 nt, Homo Sapiens
cuuauuuggggaggaaugggugggcacagugg

SEQ ID NO: 324608 - RNA, 32 nt, Homo Sapiens
augugacagaugaguagaaaaaugcagacacu

SEQ ID NO: 324609 - RNA, 32 nt, Homo Sapiens
gcaagguagcauaugauacaugcuauucugaa

SEQ ID NO: 324610 - RNA, 32 nt, Homo Sapiens
aagauuaugcuagcuuuagaacacaugcaaac

SEQ ID NO: 324611 - RNA, 32 nt, Homo Sapiens
cuagaugccucggagagcaucauucucugccu

SEQ ID NO: 324612 - RNA, 32 nt, Homo Sapiens
ugggagaggggaggugucacacaacuuggagg

SEQ ID NO: 324613 - RNA, 32 nt, Homo Sapiens
cggguagaaucaaggagugugcucucaaauga

SEQ ID NO: 324614 - RNA, 32 nt, Homo Sapiens
gcgggaugcugcauuguuaccccgcccucccc

SEQ ID NO: 324615 - RNA, 32 nt, Homo Sapiens
cugugacuuaauuuuucuuaaugucuccaagu

SEQ ID NO: 324616 - RNA, 31 nt, Homo Sapiens
acgcagaauaccucgaaccaggcgggcugug

SEQ ID NO: 324617 - RNA, 32 nt, Homo Sapiens
ggauacgaaaacaguguguuugaaaacaaauu

SEQ ID NO: 324618 - RNA, 32 nt, Homo Sapiens
uggccauccucuaaacuggguaccucacugca

SEQ ID NO: 324619 - RNA, 32 nt, Homo Sapiens
ucgagccagaaaggggcaugagggcucuugcg

SEQ ID NO: 324620 - RNA, 32 nt, Homo Sapiens
ccgccgggcggcccgcgcggagucugagggag

SEQ ID NO: 324621 - RNA, 32 nt, Homo Sapiens
aggccauuuaaauauaauaggaaccuacugac

SEQ ID NO: 324622 - RNA, 32 nt, Homo Sapiens
guaaucggcaaggcagaagaguauacucuuug

SEQ ID NO: 324623 - RNA, 32 nt, Homo Sapiens
cccgcauggccccuccggccagccaggccccc

SEQ ID NO: 324624 - RNA, 30 nt, Homo Sapiens
uggucaggcaggccuccugguuucgccacu

SEQ ID NO: 324625 - RNA, 32 nt, Homo Sapiens
gggaguccgaaagcggagaguguaugacauca

SEQ ID NO: 324626 - RNA, 32 nt, Homo Sapiens
acaaaggaaugaagaacauacacuggggaaaa

SEQ ID NO: 324627 - RNA, 32 nt, Homo Sapiens
gcuggucggucccaggucccggccuccguaau

SEQ ID NO: 324628 - RNA, 31 nt, Homo Sapiens
ucuacaggguucccuaggccagguggagaug

SEQ ID NO: 324629 - RNA, 32 nt, Homo Sapiens
uaugcugguauaaaaauaaaauuuugggguau

SEQ ID NO: 324630 - RNA, 32 nt, Homo Sapiens
cuccugccuccaugguugcuggccacucccac

SEQ ID NO: 324631 - RNA, 32 nt, Homo Sapiens
guuuucauagaaaauaaggaacaaagagaaac

SEQ ID NO: 324632 - RNA, 32 nt, Homo Sapiens
cgagcaggcuacugucagcuccccucggagaa

SEQ ID NO: 324633 - RNA, 32 nt, Homo Sapiens
aauccauagauauagacauuccuaaaagaaaa

SEQ ID NO: 324634 - RNA, 30 nt, Homo Sapiens
gagaagcuggacugcagcugguuucaggaa

SEQ ID NO: 324635 - RNA, 32 nt, Homo Sapiens
ugaagugaucucuaggccccagccccaaaucc

SEQ ID NO: 324636 - RNA, 32 nt, Homo Sapiens
aagcugaaauauauuucugcaagaaccuuucu

SEQ ID NO: 324637 - RNA, 32 nt, Homo Sapiens
ggggccaggcuggacgcuuccugugggagucc

SEQ ID NO: 324638 - RNA, 32 nt, Homo Sapiens
uucccuugcaaauuauuuuuaaaauucuaucu

SEQ ID NO: 324639 - RNA, 32 nt, Homo Sapiens
ccguucccugucagcauuauccccuggucacu

SEQ ID NO: 324640 - RNA, 32 nt, Homo Sapiens
aggugcugcagcugcuccugcucucugaucuu

SEQ ID NO: 324641 - RNA, 32 nt, Homo Sapiens
uccaauggugccuugcuuggugcucuccuggu

SEQ ID NO: 324642 - RNA, 32 nt, Homo Sapiens
gcuguccaugcugggagaucagagcaacagcu

SEQ ID NO: 324643 - RNA, 32 nt, Homo Sapiens
ucccccugccuggcccugagagcggcucugcu

SEQ ID NO: 324644 - RNA, 32 nt, Homo Sapiens
ugcccgggugagggcucugccuguuccucuga

SEQ ID NO: 324645 - RNA, 32 nt, Homo Sapiens
agaggggcgcccgaccccggggagggcggcag

SEQ ID NO: 324646 - RNA, 32 nt, Homo Sapiens
ccgggaagggugagggggucagacacaggccc

SEQ ID NO: 324647 - RNA, 32 nt, Homo Sapiens
auucaacaucagacaauucagacucuggggca

SEQ ID NO: 324648 - RNA, 32 nt, Homo Sapiens
auuacaggcgugagccaccacccccggccugu

SEQ ID NO: 324649 - RNA, 32 nt, Homo Sapiens
uaugaggagggggaaauuuguauauuagaaac

SEQ ID NO: 324650 - RNA, 32 nt, Homo Sapiens
ggccgcuuuagagugggugggcccguaggcca

SEQ ID NO: 324651 - RNA, 29 nt, Homo Sapiens
agccaugaagguaacaggcaucuuucuuc

SEQ ID NO: 324652 - RNA, 32 nt, Homo Sapiens
ccuucgucuccauuguuccgugcauuuccaaa

SEQ ID NO: 324653 - RNA, 32 nt, Homo Sapiens
uaauuccaauguauuugauacaugaacaauca

SEQ ID NO: 324654 - RNA, 32 nt, Homo Sapiens
augcucuggggaggcggcucuggcucuugccu

SEQ ID NO: 324655 - RNA, 32 nt, Homo Sapiens
ucaggucaccgagguaggacagcaaauuaaaa

SEQ ID NO: 324656 - RNA, 32 nt, Homo Sapiens
cugaggugugaggugacagcagguaaagagug

SEQ ID NO: 324657 - RNA, 32 nt, Homo Sapiens
accggggaggcggaggguguggugagccggga

SEQ ID NO: 324658 - RNA, 32 nt, Homo Sapiens
ugcaguuuugggguucauuaaaagcacaaaua

SEQ ID NO: 324659 - RNA, 32 nt, Homo Sapiens
gcugcacuggggcacugcccguggccugggua

SEQ ID NO: 324660 - RNA, 32 nt, Homo Sapiens
agcugaacuuucccuuuuccccaguucuuacg

SEQ ID NO: 324661 - RNA, 32 nt, Homo Sapiens
uguccgaauugcuuuuauuuucuuauacuuuc

SEQ ID NO: 324662 - RNA, 32 nt, Homo Sapiens
cuagaaggaugagaaggaaauaaaauguuaua

SEQ ID NO: 324663 - RNA, 32 nt, Homo Sapiens
aguacaugucuauuuaacagcaccgauuccaa

SEQ ID NO: 324664 - RNA, 32 nt, Homo Sapiens
gauggagauugggaaacuuaaccguuacccag

SEQ ID NO: 324665 - RNA, 32 nt, Homo Sapiens
augccaaggguggacaggcgcuguggcucacg

SEQ ID NO: 324666 - RNA, 32 nt, Homo Sapiens
uagaaagguugagauauaucaacacuuggaau

SEQ ID NO: 324667 - RNA, 32 nt, Homo Sapiens
gucugagugauuuuaauuuguauuucccuggu

SEQ ID NO: 324668 - RNA, 32 nt, Homo Sapiens
uuaaaagccaauucuuuuuuaucccuuuuaga

SEQ ID NO: 324669 - RNA, 32 nt, Homo Sapiens
agacauuuuuaaaaauacuuguauugacuaug

SEQ ID NO: 324670 - RNA, 32 nt, Homo Sapiens
agcuacacaaacacuuuuucugucccaaccgu

SEQ ID NO: 324671 - RNA, 32 nt, Homo Sapiens
uguuauuuauagaacaacauuaauccauuaaa

SEQ ID NO: 324672 - RNA, 32 nt, Homo Sapiens
gugaaggucgguggguuaacugugugccuacu

SEQ ID NO: 324673 - RNA, 32 nt, Homo Sapiens
gcagcccgcgcgcggcccacacucgccucccc

SEQ ID NO: 324674 - RNA, 32 nt, Homo Sapiens
ggccaggccuccuccugggagcuccaggacca

SEQ ID NO: 324675 - RNA, 32 nt, Homo Sapiens
cuuuuuaggagucugccuggaaacuuugacau

SEQ ID NO: 324676 - RNA, 32 nt, Homo Sapiens
gccucuucauucuccccugcuccaucuguaaa

SEQ ID NO: 324677 - RNA, 32 nt, Homo Sapiens
aagcaccaugugcagugggaguacaaggaaga

SEQ ID NO: 324678 - RNA, 32 nt, Homo Sapiens
cccagggggcuuugaggacaggacucagccug

SEQ ID NO: 324679 - RNA, 32 nt, Homo Sapiens
ugcccuccgccccguccccccaucccguuucc

SEQ ID NO: 324680 - RNA, 32 nt, Homo Sapiens
auccuucauguaguccaacaaacaccuauucu

SEQ ID NO: 324681 - RNA, 32 nt, Homo Sapiens
gaacacaaguuuccaaucagaagacuugaagc

SEQ ID NO: 324682 - RNA, 32 nt, Homo Sapiens
uuuagcuuuugucuaaaauauuauuuuaguua

SEQ ID NO: 324683 - RNA, 32 nt, Homo Sapiens
ggagcugcaaccgccagugcugcagggggugc

SEQ ID NO: 324684 - RNA, 32 nt, Homo Sapiens
ccgcuuccauggcgccagcggggccucgacgg

SEQ ID NO: 324685 - RNA, 32 nt, Homo Sapiens
gaggcccagcucuacuuuucgccccgcgucuc

SEQ ID NO: 324686 - RNA, 32 nt, Homo Sapiens
gucauuguuucccaucacuguauccauucuac

SEQ ID NO: 324687 - RNA, 32 nt, Homo Sapiens
gaaagaucagauuguuacugugucuguguaga

SEQ ID NO: 324688 - RNA, 32 nt, Homo Sapiens
gugcaacuuccuagggaaucugcaucaggaga

SEQ ID NO: 324689 - RNA, 28 nt, Homo Sapiens
ugucugguaucaggaccaaagcauuuua

SEQ ID NO: 324690 - RNA, 32 nt, Homo Sapiens
auuuguugaaaaauaaggauccuuuuuaauac

SEQ ID NO: 324691 - RNA, 32 nt, Homo Sapiens
cagcuuccagcccuccuccccuaagccgccgc

SEQ ID NO: 324692 - RNA, 32 nt, Homo Sapiens
aaacuugguuaggacucuggcuugccuucccc

SEQ ID NO: 324693 - RNA, 32 nt, Homo Sapiens
uucuuggggaucuggaaaggaucaguauagca

SEQ ID NO: 324694 - RNA, 32 nt, Homo Sapiens
aaaauuuaaguucagaaaaaugcacuaugacc

SEQ ID NO: 324695 - RNA, 32 nt, Homo Sapiens
acccucgccauggguccacgggccuagagugg

SEQ ID NO: 324696 - RNA, 32 nt, Homo Sapiens
aauuagauaaaaacagaaaacaaaucacuuca

SEQ ID NO: 324697 - RNA, 32 nt, Homo Sapiens
guugaaauauugaaacauauuaaauugugcaa

SEQ ID NO: 324698 - RNA, 32 nt, Homo Sapiens
uaucuuuucaguaagcacuucugaaaacagca

SEQ ID NO: 324699 - RNA, 32 nt, Homo Sapiens
accuccuggccaacgagagcauggacgaguuc

SEQ ID NO: 324700 - RNA, 32 nt, Homo Sapiens
gcugguugugguguuuuccagcgagggaagaa

SEQ ID NO: 324701 - RNA, 32 nt, Homo Sapiens
cucaugugacauaggcugggaacuuguuuccc

SEQ ID NO: 324702 - RNA, 32 nt, Homo Sapiens
acaagaggaagcugggggcguccgugguaaag

SEQ ID NO: 324703 - RNA, 32 nt, Homo Sapiens
gggaacgagcgcggaagcaagugggcggcgag

SEQ ID NO: 324704 - RNA, 32 nt, Homo Sapiens
ucauucuguucccucucauuguagauugaacu

SEQ ID NO: 324705 - RNA, 32 nt, Homo Sapiens
uaaauugaaaacaauuuuuuuaugaucacaug

SEQ ID NO: 324706 - RNA, 32 nt, Homo Sapiens
gaaaaaucccccagcccagcccagcccagccc

SEQ ID NO: 324707 - RNA, 32 nt, Homo Sapiens
aacaucaacaugggcuuuuaaaugugggccgg

SEQ ID NO: 324708 - RNA, 29 nt, Homo Sapiens
cuuccaaauaaaguauauuuuguucugaa

SEQ ID NO: 324709 - RNA, 32 nt, Homo Sapiens
gucugagacucucuuaggagcagagcucugcc

SEQ ID NO: 324710 - RNA, 32 nt, Homo Sapiens
aacuagucucgaggucgacgcggccgcgaauu

SEQ ID NO: 324711 - RNA, 30 nt, Homo Sapiens
cgcccggcgcccgagaccggcagcugcgug

SEQ ID NO: 324712 - RNA, 32 nt, Homo Sapiens
gucgcgcacugacuuguucucgucacccugug

SEQ ID NO: 324713 - RNA, 32 nt, Homo Sapiens
agauccaggaccauacaguguuuaccauuuug

SEQ ID NO: 324714 - RNA, 32 nt, Homo Sapiens
ugucccuuuucuucuucaguacuugccuccuu

SEQ ID NO: 324715 - RNA, 32 nt, Homo Sapiens
agaggggccuguugugccacucagggaaggcc

SEQ ID NO: 324716 - RNA, 32 nt, Homo Sapiens
aaugcugugaauuacucuuccuccccuucucu

SEQ ID NO: 324717 - RNA, 32 nt, Homo Sapiens
cuccgcgagugcggggggaggggcggcccccu

SEQ ID NO: 324718 - RNA, 30 nt, Homo Sapiens
uuuuguacacaccacuagagggugcuacag

SEQ ID NO: 324719 - RNA, 32 nt, Homo Sapiens
aaagucacuaauauuucuuuuauccaucauuc

SEQ ID NO: 324720 - RNA, 32 nt, Homo Sapiens
gagggucuuauuucuguagaaaucgugugacu

SEQ ID NO: 324721 - RNA, 32 nt, Homo Sapiens
aaauuguagaaaccucuucugauugauuggau

SEQ ID NO: 324722 - RNA, 32 nt, Homo Sapiens
cuagccagugauugaucugcuaaugcuuucuu

SEQ ID NO: 324723 - RNA, 32 nt, Homo Sapiens
uuaugcuggaauuuuuugggcuuucagauuuc

SEQ ID NO: 324724 - RNA, 32 nt, Homo Sapiens
agggagcgacaccccccaccaagccccccagu

SEQ ID NO: 324725 - RNA, 32 nt, Homo Sapiens
ucagaagauuuuucuaacuuagggucugucuu

SEQ ID NO: 324726 - RNA, 32 nt, Homo Sapiens
cuuguaaauaaaauaaaucccucuuuguuuaa

SEQ ID NO: 324727 - RNA, 32 nt, Homo Sapiens
ccaccgaggguggguggcccugagaugguggg

SEQ ID NO: 324728 - RNA, 32 nt, Homo Sapiens
uuuuaaaaaaugccucauuguuagaacuacua

SEQ ID NO: 324729 - RNA, 32 nt, Homo Sapiens
cccugcccgagcuaaacaccgagaagacggca

SEQ ID NO: 324730 - RNA, 32 nt, Homo Sapiens
ucccugccauuuugccucuccugucucccacc

SEQ ID NO: 324731 - RNA, 32 nt, Homo Sapiens
ggguuguugguaauaaauguaugauguacacu

SEQ ID NO: 324732 - RNA, 32 nt, Homo Sapiens
gggauccgcgcgcaguucagucgcuacggccg

SEQ ID NO: 324733 - RNA, 32 nt, Homo Sapiens
gacaugguauuuguucagcagacgccgaccac

SEQ ID NO: 324734 - RNA, 32 nt, Homo Sapiens
ucagcagagccucguuucugcuuucagcacuc

SEQ ID NO: 324735 - RNA, 32 nt, Homo Sapiens
ugccuuguuuuccuuggaaauuuugcaaaaug

SEQ ID NO: 324736 - RNA, 32 nt, Homo Sapiens
guucgcugccuccucagcuccaggaugaucgg

SEQ ID NO: 324737 - RNA, 32 nt, Homo Sapiens
uggguugcccuuggcuucuccucccucuacuc

SEQ ID NO: 324738 - RNA, 32 nt, Homo Sapiens
cacaccuugcuucagauucagaggaugagccc

SEQ ID NO: 324739 - RNA, 32 nt, Homo Sapiens
uuguaaaaaugguuuccugugucaaguauuug

SEQ ID NO: 324740 - RNA, 32 nt, Homo Sapiens
ucacccaccugagggucugcucugccuugacc

SEQ ID NO: 324741 - RNA, 32 nt, Homo Sapiens
cccaucccaucccccucucccgagcuauuuuc

SEQ ID NO: 324742 - RNA, 32 nt, Homo Sapiens
cccagacucggccuucaccucccuucuccucc

SEQ ID NO: 324743 - RNA, 32 nt, Homo Sapiens
agguuacccgcggaaauuuaugcuguccgguc

SEQ ID NO: 324744 - RNA, 32 nt, Homo Sapiens
gaacucaugccaacagucuuuaugaugggauu

SEQ ID NO: 324745 - RNA, 32 nt, Homo Sapiens
acaggggucuggcaugagacaggucaguuucc

SEQ ID NO: 324746 - RNA, 32 nt, Homo Sapiens
uggcugggugacuaaagggcuugucuuggugg

SEQ ID NO: 324747 - RNA, 32 nt, Homo Sapiens
aauuaaaaacaaaaagggcaaaccuaggaagc

SEQ ID NO: 324748 - RNA, 32 nt, Homo Sapiens
uucugagcgauagggucucaccauguugccca

SEQ ID NO: 324749 - RNA, 32 nt, Homo Sapiens
cagaggaagaucgaugaguucuggugucgggc

SEQ ID NO: 324750 - RNA, 32 nt, Homo Sapiens
uguguccaucuuccucuccucauugcucugca

SEQ ID NO: 324751 - RNA, 32 nt, Homo Sapiens
guuaguaagccuaaguuuuuacauaauugcau

SEQ ID NO: 324752 - RNA, 32 nt, Homo Sapiens
cgcgccggccccaggagcucccggcuucggga

SEQ ID NO: 324753 - RNA, 32 nt, Homo Sapiens
uccugugggaaagaaacaaaacaucauucuau

SEQ ID NO: 324754 - RNA, 32 nt, Homo Sapiens
cccucccucccaccuucucccgccaugagcca

SEQ ID NO: 324755 - RNA, 32 nt, Homo Sapiens
ugccgggcgcugugccugucacgccggggucu

SEQ ID NO: 324756 - RNA, 32 nt, Homo Sapiens
aucaggagauaaagggcaagaagaucucacaa

SEQ ID NO: 324757 - RNA, 29 nt, Homo Sapiens
ccagguauauguggcugaaagcuggugcu

SEQ ID NO: 324758 - RNA, 32 nt, Homo Sapiens
gaagagaaagcagaggccgagcugaagagaug

SEQ ID NO: 324759 - RNA, 28 nt, Homo Sapiens
uucaccauguuagccaggaugaucucga

SEQ ID NO: 324760 - RNA, 32 nt, Homo Sapiens
ccaaccccaagccagcccggccgcuccaccag

SEQ ID NO: 324761 - RNA, 32 nt, Homo Sapiens
ugauuaucuuauuauuauguuacuguuuuugu

SEQ ID NO: 324762 - RNA, 32 nt, Homo Sapiens
cucuguagcguccccauggccgcggccggcug

SEQ ID NO: 324763 - RNA, 32 nt, Homo Sapiens
caagagaguuaauuuuuuauuuuuguuuuacu

SEQ ID NO: 324764 - RNA, 32 nt, Homo Sapiens
ccuacccggccgcuccccgaggcgcgggcucu

SEQ ID NO: 324765 - RNA, 32 nt, Homo Sapiens
ucuaguccugaagauacagugauaaauaagau

SEQ ID NO: 324766 - RNA, 32 nt, Homo Sapiens
uacagaagcugauuaugaagaugauucuaaaa

SEQ ID NO: 324767 - RNA, 32 nt, Homo Sapiens
cuacucccaagccuagggaugaagaugcugua

SEQ ID NO: 324768 - RNA, 32 nt, Homo Sapiens
uuaaagaacugggaccagaccaaguagaggcc

SEQ ID NO: 324769 - RNA, 32 nt, Homo Sapiens
ccucugggcucccugaaguccuggggagccgu

SEQ ID NO: 324770 - RNA, 32 nt, Homo Sapiens
uguccuuaacucagcaucuccaggacgagcuc

SEQ ID NO: 324771 - RNA, 32 nt, Homo Sapiens
cacugugccuaccucuagccaagaucacagca

SEQ ID NO: 324772 - RNA, 32 nt, Homo Sapiens
gugugcugcuaagguaugcuuauuugaguuua

SEQ ID NO: 324773 - RNA, 32 nt, Homo Sapiens
gccaccuccacauagcucucccugcccucuuu

SEQ ID NO: 324774 - RNA, 32 nt, Homo Sapiens
ccccagaccugccggcuaccucgggagggccc

SEQ ID NO: 324775 - RNA, 32 nt, Homo Sapiens
caccuuaacaaaggggaaaaagaauauguaaa

SEQ ID NO: 324776 - RNA, 32 nt, Homo Sapiens
caaauggagaguaacagaagagugucuuuucu

SEQ ID NO: 324777 - RNA, 32 nt, Homo Sapiens
ggaagagagaauaguguuuucuucauuugaug

SEQ ID NO: 324778 - RNA, 32 nt, Homo Sapiens
cuguuuucaauauaugcauacagccuacauaa

SEQ ID NO: 324779 - RNA, 32 nt, Homo Sapiens
ccgcucccaccucacaccccucagccacaagc

SEQ ID NO: 324780 - RNA, 32 nt, Homo Sapiens
agaauucauucacuauuguauagaagaugcug

SEQ ID NO: 324781 - RNA, 32 nt, Homo Sapiens
cacugcaacuucugccuccuagguucaagcag

SEQ ID NO: 324782 - RNA, 32 nt, Homo Sapiens
aagcuucgaugaugaagaaucaguggauggaa

SEQ ID NO: 324783 - RNA, 32 nt, Homo Sapiens
cauacuauuaaaccauaguuuguggcacccgc

SEQ ID NO: 324784 - RNA, 32 nt, Homo Sapiens
aacgcucaccuggccuggcagcgagcggcgga

SEQ ID NO: 324785 - RNA, 32 nt, Homo Sapiens
cauaagccggggugggggaugccuaggcguau

SEQ ID NO: 324786 - RNA, 32 nt, Homo Sapiens
gagucuuagauauacaaaagauaaauggauau

SEQ ID NO: 324787 - RNA, 32 nt, Homo Sapiens
aagauaaucaaaagugauacaaucaucacaau

SEQ ID NO: 324788 - RNA, 32 nt, Homo Sapiens
ccccaaaggagcaaagaaugcagggagggcgg

SEQ ID NO: 324789 - RNA, 32 nt, Homo Sapiens
cacucccugccacuguucugcgcuuuaauugu

SEQ ID NO: 324790 - RNA, 32 nt, Homo Sapiens
gccccaggggagaggacccgugggauggugcc

SEQ ID NO: 324791 - RNA, 32 nt, Homo Sapiens
gagacaaccugugccaucuggagagugggaag

SEQ ID NO: 324792 - RNA, 32 nt, Homo Sapiens
ggaagggaccgcggccugaccuggcuggggcc

SEQ ID NO: 324793 - RNA, 32 nt, Homo Sapiens
ccccuugcccagccaauggacacaguagggcu

SEQ ID NO: 324794 - RNA, 32 nt, Homo Sapiens
uaacacuguggaaauaaauaugaagaugugga

SEQ ID NO: 324795 - RNA, 32 nt, Homo Sapiens
guuucaccauguuggccagggcuggucucgaa

SEQ ID NO: 324796 - RNA, 32 nt, Homo Sapiens
uuaaccaagcaguguuagacaagcauguucuc

SEQ ID NO: 324797 - RNA, 31 nt, Homo Sapiens
agagcgaaauaaauguugaauauauggacuu

SEQ ID NO: 324798 - RNA, 32 nt, Homo Sapiens
cuucgacccucagcccucuggugccgcucugc

SEQ ID NO: 324799 - RNA, 32 nt, Homo Sapiens
auucuucacagcaccugccacugucucccugg

SEQ ID NO: 324800 - RNA, 32 nt, Homo Sapiens
uugucuauguauauuucuagauauugauuagu

SEQ ID NO: 324801 - RNA, 32 nt, Homo Sapiens
acauaauaaaagacauuguugcauggcuugua

SEQ ID NO: 324802 - RNA, 32 nt, Homo Sapiens
uaauaagaaacacuuuacaaccugcucucucu

SEQ ID NO: 324803 - RNA, 32 nt, Homo Sapiens
guuugguuacugucaagaaaucaauaaaugug

SEQ ID NO: 324804 - RNA, 32 nt, Homo Sapiens
uaccuuccaaaguuuuuaaaagauguuaacca

SEQ ID NO: 324805 - RNA, 32 nt, Homo Sapiens
uccugaccucgcgauccgcccgccucggccuc

SEQ ID NO: 324806 - RNA, 32 nt, Homo Sapiens
augugggguucaguagugccagcaaguggggg

SEQ ID NO: 324807 - RNA, 30 nt, Homo Sapiens
gcgguggagaagcugagccgggcugaagcg

SEQ ID NO: 324808 - RNA, 31 nt, Homo Sapiens
ucaggggcaaggucucggggguccggaaggg

SEQ ID NO: 324809 - RNA, 32 nt, Homo Sapiens
cuucuuggugccugcugucuuucuacuuuuua

SEQ ID NO: 324810 - RNA, 32 nt, Homo Sapiens
aggcgcgauggcaaguugauaaaaugugacuu

SEQ ID NO: 324811 - RNA, 32 nt, Homo Sapiens
cacgagcucccucugcuugcuuuccaggucuu

SEQ ID NO: 324812 - RNA, 32 nt, Homo Sapiens
cugcuaccuuugucucacaugauuccagugca

SEQ ID NO: 324813 - RNA, 32 nt, Homo Sapiens
aucacagcauaaccccacccuuuacauuuugu

SEQ ID NO: 324814 - RNA, 32 nt, Homo Sapiens
ugcagcaugaaggcccuugccagaugccagug

SEQ ID NO: 324815 - RNA, 31 nt, Homo Sapiens
uggagcaaauaaaaggccuguguuauuucuu

SEQ ID NO: 324816 - RNA, 32 nt, Homo Sapiens
uccuucucaccucggucuccuagccccugaca

SEQ ID NO: 324817 - RNA, 32 nt, Homo Sapiens
gggcuccagaacuuaaauugcuugguccgugg

SEQ ID NO: 324818 - RNA, 32 nt, Homo Sapiens
uuucaaaaauuagucaauaaaaauugauguca

SEQ ID NO: 324819 - RNA, 32 nt, Homo Sapiens
auggcaguauggaaacagaauaaaaugaggca

SEQ ID NO: 324820 - RNA, 32 nt, Homo Sapiens
ccuaaccuccucuggagguccucccaguccuc

SEQ ID NO: 324821 - RNA, 32 nt, Homo Sapiens
aaaucuuacaaguauugauccauuucaacaaa

SEQ ID NO: 324822 - RNA, 32 nt, Homo Sapiens
auuuuucccucauucauucagcaaaucucuau

SEQ ID NO: 324823 - RNA, 32 nt, Homo Sapiens
cucaguuccuucccuuccacaaaaugcaagag

SEQ ID NO: 324824 - RNA, 32 nt, Homo Sapiens
guuuugauaaaauuauuuuuuuaacauaggau

SEQ ID NO: 324825 - RNA, 32 nt, Homo Sapiens
uguguguugauggguaaguacacucaaacacu

SEQ ID NO: 324826 - RNA, 32 nt, Homo Sapiens
gaagacagguuuucuuccaucuaggccaggcc

SEQ ID NO: 324827 - RNA, 32 nt, Homo Sapiens
cugcucuucgugguuaaggauaaaaccaagaa

SEQ ID NO: 324828 - RNA, 32 nt, Homo Sapiens
uucauauguuaaaagaccauuuccuguaaaac

SEQ ID NO: 324829 - RNA, 32 nt, Homo Sapiens
gagaaaugggagcacaguacugggaaauggga

SEQ ID NO: 324830 - RNA, 32 nt, Homo Sapiens
ugaccaugggcugcaugugcugccggauggag

SEQ ID NO: 324831 - RNA, 32 nt, Homo Sapiens
gggucugaaaggaaaagucuuugcuauccgac

SEQ ID NO: 324832 - RNA, 32 nt, Homo Sapiens
cuccuggauccgcuccugccugcgcccgcagc

SEQ ID NO: 324833 - RNA, 32 nt, Homo Sapiens
agcuucauuauggcugcuggggugcugcugac

SEQ ID NO: 324834 - RNA, 32 nt, Homo Sapiens
aaagcaaaacgaauuccuccccgaacacuaag

SEQ ID NO: 324835 - RNA, 32 nt, Homo Sapiens
ucuacaccagugcugcuuccugaauguuugug

SEQ ID NO: 324836 - RNA, 32 nt, Homo Sapiens
cggcaggaagggggccgacuccacgcuguccu

SEQ ID NO: 324837 - RNA, 31 nt, Homo Sapiens
cuugggaggcaucgugccagagccuggggca

SEQ ID NO: 324838 - RNA, 32 nt, Homo Sapiens
ucccugggggaguccugggcacagcaggggga

SEQ ID NO: 324839 - RNA, 32 nt, Homo Sapiens
uucuguugggguaaguuuuauuaucugugaua

SEQ ID NO: 324840 - RNA, 32 nt, Homo Sapiens
gcccugccgcguggggcgcgugggcacggagc

SEQ ID NO: 324841 - RNA, 32 nt, Homo Sapiens
ucauccucuucacaggguucugcaucuuagcc

SEQ ID NO: 324842 - RNA, 32 nt, Homo Sapiens
gcuuucuagggucagaaucguggagagaauac

SEQ ID NO: 324843 - RNA, 32 nt, Homo Sapiens
acucaaacuauagugauauaucaguguuuggg

SEQ ID NO: 324844 - RNA, 32 nt, Homo Sapiens
gccgcgcccggcagcgugagcgcagagccggc

SEQ ID NO: 324845 - RNA, 32 nt, Homo Sapiens
guugaguuauuuagaauuuuaucucaagugaa

SEQ ID NO: 324846 - RNA, 32 nt, Homo Sapiens
acagcauggcggcaucugggccccacaguaac

SEQ ID NO: 324847 - RNA, 32 nt, Homo Sapiens
ucccucccaagccccucccucuggccuucugu

SEQ ID NO: 324848 - RNA, 32 nt, Homo Sapiens
auugcuuuaagcaaucacucauuaccaccaau

SEQ ID NO: 324849 - RNA, 32 nt, Homo Sapiens
ggacgcggcccggcuggcuggcucuggcggcg

SEQ ID NO: 324850 - RNA, 32 nt, Homo Sapiens
ugagggaaauuauccauauacauaucacuaau

SEQ ID NO: 324851 - RNA, 32 nt, Homo Sapiens
gcuucucagcugccaucuccagugccccagaa

SEQ ID NO: 324852 - RNA, 32 nt, Homo Sapiens
ugaguucauacuaugauuuagaaagugguucg

SEQ ID NO: 324853 - RNA, 32 nt, Homo Sapiens
auuuuuauguagaugguauaacauuugaaaau

SEQ ID NO: 324854 - RNA, 32 nt, Homo Sapiens
auuagcucuuggauugucuaagaucaaccuga

SEQ ID NO: 324855 - RNA, 32 nt, Homo Sapiens
uggagaggcggcggccgcggcugcugaggcgg

SEQ ID NO: 324856 - RNA, 32 nt, Homo Sapiens
gcucccaucgccagugcugggaugcgcccgug

SEQ ID NO: 324857 - RNA, 32 nt, Homo Sapiens
uuugcaauucuaugaauauuucagggucagca

SEQ ID NO: 324858 - RNA, 32 nt, Homo Sapiens
gauucugguuacguucaguuaagcaggacacu

SEQ ID NO: 324859 - RNA, 32 nt, Homo Sapiens
gucauuaucacauuuuaacgcugaaaaaguaa

SEQ ID NO: 324860 - RNA, 32 nt, Homo Sapiens
cuuugaaauaccaccuagaggaagggguaaua

SEQ ID NO: 324861 - RNA, 32 nt, Homo Sapiens
gugacguugguuucauguugacaacuuugaag

SEQ ID NO: 324862 - RNA, 32 nt, Homo Sapiens
cauaggaauaagccucuugcugauuaauggaa

SEQ ID NO: 324863 - RNA, 32 nt, Homo Sapiens
agcucguccuccccgccccgcaccggccuuca

SEQ ID NO: 324864 - RNA, 32 nt, Homo Sapiens
ucucugcccgguuggaccuccucccuuuguug

SEQ ID NO: 324865 - RNA, 32 nt, Homo Sapiens
uugugggugugagccaccgcgcucagucuugu

SEQ ID NO: 324866 - RNA, 32 nt, Homo Sapiens
uccagugaauggauugaggccuuuuaaagguc

SEQ ID NO: 324867 - RNA, 30 nt, Homo Sapiens
aggacuccagccuggccgccggcgcccgca

SEQ ID NO: 324868 - RNA, 32 nt, Homo Sapiens
gggaccuggcgcucuugcagggacgccccccg

SEQ ID NO: 324869 - RNA, 32 nt, Homo Sapiens
uaauggcaaaagacaguguuauuaaaauguuu

SEQ ID NO: 324870 - RNA, 32 nt, Homo Sapiens
agcaaaccaaucgcaagccucguugaguggaa

SEQ ID NO: 324871 - RNA, 32 nt, Homo Sapiens
ucccagcgcuggccgccuggcacugagggucc

SEQ ID NO: 324872 - RNA, 32 nt, Homo Sapiens
gcccgccuuugggaaccccuugcugugaacuc

SEQ ID NO: 324873 - RNA, 32 nt, Homo Sapiens
ccaaccuuauuuuucuuuucuauaaaauagga

SEQ ID NO: 324874 - RNA, 32 nt, Homo Sapiens
ugugggucccuguguccuuuuccaggggucca

SEQ ID NO: 324875 - RNA, 32 nt, Homo Sapiens
cauauuuaaaaauuauuuucacucuauucuug

SEQ ID NO: 324876 - RNA, 32 nt, Homo Sapiens
cucggcugccucuuggagggugggcagaagau

SEQ ID NO: 324877 - RNA, 32 nt, Homo Sapiens
augaaaugugcagcucagagugucauuucuga

SEQ ID NO: 324878 - RNA, 32 nt, Homo Sapiens
ugccuugacuucccccaccuccuccucaaaca

SEQ ID NO: 324879 - RNA, 32 nt, Homo Sapiens
uauaaaucauauccuuuauauuuuagaauauc

SEQ ID NO: 324880 - RNA, 32 nt, Homo Sapiens
gaagagagcugcuuaugauuuugaagggguca

SEQ ID NO: 324881 - RNA, 32 nt, Homo Sapiens
cuuacuuaucccauugaggacugccuuucucu

SEQ ID NO: 324882 - RNA, 32 nt, Homo Sapiens
gggcucggggaaggcgcgcucccgcgucccgc

SEQ ID NO: 324883 - RNA, 32 nt, Homo Sapiens
augcugcugcagccuuuaaaguauugaaguaa

SEQ ID NO: 324884 - RNA, 31 nt, Homo Sapiens
gggcagcugccggccgcuggggacugggccc

SEQ ID NO: 324885 - RNA, 32 nt, Homo Sapiens
caacugucuccauggagaagaacuaggaauca

SEQ ID NO: 324886 - RNA, 32 nt, Homo Sapiens
gguggccgccggggcagccucgucuagcgcgc

SEQ ID NO: 324887 - RNA, 32 nt, Homo Sapiens
ugcuguccggagaggagggagccugaagucaa

SEQ ID NO: 324888 - RNA, 32 nt, Homo Sapiens
cgggagacgccagcgagcuggugauuggagcc

SEQ ID NO: 324889 - RNA, 32 nt, Homo Sapiens
ccaacaaacuauaucuuaauuguuaacuguua

SEQ ID NO: 324890 - RNA, 32 nt, Homo Sapiens
ccauagugacugcaugagccaucugaaccugc

SEQ ID NO: 324891 - RNA, 32 nt, Homo Sapiens
ugaagguaaaauugauauaccaauuuuaacua

SEQ ID NO: 324892 - RNA, 32 nt, Homo Sapiens
ugccuccccgguucgagcgguucuccugccac

SEQ ID NO: 324893 - RNA, 32 nt, Homo Sapiens
gaaagaaggacgaggaagccguggggcagccu

SEQ ID NO: 324894 - RNA, 32 nt, Homo Sapiens
ugagcugacaacacuuuuccaugaccauaggu

SEQ ID NO: 324895 - RNA, 32 nt, Homo Sapiens
uucaguauuaaacucuccuuugauauuaugug

SEQ ID NO: 324896 - RNA, 32 nt, Homo Sapiens
ccagggucagcaaacauuuucuguaaagggcc

SEQ ID NO: 324897 - RNA, 32 nt, Homo Sapiens
gugagugaguaaggaaaccuggcugcccucuc

SEQ ID NO: 324898 - RNA, 32 nt, Homo Sapiens
cugccccaggccagccagccugccugccugcc

SEQ ID NO: 324899 - RNA, 32 nt, Homo Sapiens
gcccgccgguccacgccgcgcaccgcuccgag

SEQ ID NO: 324900 - RNA, 32 nt, Homo Sapiens
aucauucugcauagauaauuggguaauuguuc

SEQ ID NO: 324901 - RNA, 32 nt, Homo Sapiens
agcugugaacccgcuccacaccggccacccug

SEQ ID NO: 324902 - RNA, 32 nt, Homo Sapiens
cucagaucagacagcaaagaaucuacccagau

SEQ ID NO: 324903 - RNA, 32 nt, Homo Sapiens
aucccauccagcugcuccuggaccugguauug

SEQ ID NO: 324904 - RNA, 30 nt, Homo Sapiens
uccccugucuguggcaccagacacucccga

SEQ ID NO: 324905 - RNA, 32 nt, Homo Sapiens
agaguugagaaaccaaggaaccacuggauguu

SEQ ID NO: 324906 - RNA, 32 nt, Homo Sapiens
acaaguuuuuaaauguuucuuugggucuucau

SEQ ID NO: 324907 - RNA, 32 nt, Homo Sapiens
acuugccggcgucaccgccgcggacuucgcuu

SEQ ID NO: 324908 - RNA, 32 nt, Homo Sapiens
uggcaaaugagacagcagcagagcaucuccuc

SEQ ID NO: 324909 - RNA, 32 nt, Homo Sapiens
cacggagaagggaaucaguacauuucugcagc

SEQ ID NO: 324910 - RNA, 32 nt, Homo Sapiens
ugcuccguuuucaaauccaggaaaugcagaag

SEQ ID NO: 324911 - RNA, 32 nt, Homo Sapiens
auuuuuuuuuuuuuuuuuuuuaccauuuauga

SEQ ID NO: 324912 - RNA, 32 nt, Homo Sapiens
guaaccguuucccccgucaaccaaaaucagug

SEQ ID NO: 324913 - RNA, 32 nt, Homo Sapiens
auccuagucauucuucccuaaucuuccacuug

SEQ ID NO: 324914 - RNA, 32 nt, Homo Sapiens
accuucuggcccgccccuccccugucacuugu

SEQ ID NO: 324915 - RNA, 32 nt, Homo Sapiens
cuccauuugucaagcugcugcugucuucaaga

SEQ ID NO: 324916 - RNA, 32 nt, Homo Sapiens
acaacuaauguacaauaagguguacauauuua

SEQ ID NO: 324917 - RNA, 32 nt, Homo Sapiens
uuaaacccauuuccaguccaaaccaaugaaaa

SEQ ID NO: 324918 - RNA, 32 nt, Homo Sapiens
guacaugcugagcgcgcacacguaguacaccg

SEQ ID NO: 324919 - RNA, 32 nt, Homo Sapiens
uaaggcugagaccaccucucccugcccuugag

SEQ ID NO: 324920 - RNA, 32 nt, Homo Sapiens
agagaguuuagcauugugucacuacaagggua

SEQ ID NO: 324921 - RNA, 32 nt, Homo Sapiens
aagucacauuuuauagauauuugauggcuuug

SEQ ID NO: 324922 - RNA, 32 nt, Homo Sapiens
augcuuuuuaugguugcuguugccauauuuac

SEQ ID NO: 324923 - RNA, 32 nt, Homo Sapiens
agccccgcggagugggggcagcggcuacuucu

SEQ ID NO: 324924 - RNA, 32 nt, Homo Sapiens
cuaugaacccaccugaugccgguacgcagggu

SEQ ID NO: 324925 - RNA, 32 nt, Homo Sapiens
ucuuuaaauguggacauuuaagcaaaaguuga

SEQ ID NO: 324926 - RNA, 32 nt, Homo Sapiens
ccuggaggccgagaccacgccacgcacuuggc

SEQ ID NO: 324927 - RNA, 32 nt, Homo Sapiens
ccccaacuuuuuuuuuuuuuuauggcaggguc

SEQ ID NO: 324928 - RNA, 32 nt, Homo Sapiens
guuaauacugaagugguuaacuuugcaacugg

SEQ ID NO: 324929 - RNA, 32 nt, Homo Sapiens
gccggagaaggccgccgggcccgggcauggug

SEQ ID NO: 324930 - RNA, 32 nt, Homo Sapiens
uacuugagggaucggaauggauggggcggagu

SEQ ID NO: 324931 - RNA, 32 nt, Homo Sapiens
uucagguugcgggugagcugcccucuccaaau

SEQ ID NO: 324932 - RNA, 32 nt, Homo Sapiens
uucugagcauuuguagcaaaaucgcugggauc

SEQ ID NO: 324933 - RNA, 32 nt, Homo Sapiens
ugcagaaucagaacagaaguauaccaaucaau

SEQ ID NO: 324934 - RNA, 32 nt, Homo Sapiens
ggcuggaugucagaaccgcauaauuauucauu

SEQ ID NO: 324935 - RNA, 32 nt, Homo Sapiens
uuuggaagcaaauuugcaaacaauugagaguc

SEQ ID NO: 324936 - RNA, 32 nt, Homo Sapiens
ggcuacccaagccccuccaggugagcugggcc

SEQ ID NO: 324937 - RNA, 32 nt, Homo Sapiens
aggggaacaggggacauagcugugcuaugagg

SEQ ID NO: 324938 - RNA, 32 nt, Homo Sapiens
uuuuggaacauggaaugccuuuccaggaaaac

SEQ ID NO: 324939 - RNA, 32 nt, Homo Sapiens
acacgcuccccucccagggauguguccgccag

SEQ ID NO: 324940 - RNA, 32 nt, Homo Sapiens
aauuuuggcaucuaaaaguaauugucacuugc

SEQ ID NO: 324941 - RNA, 32 nt, Homo Sapiens
uuugacuuucccuguccugaggcuugccucca

SEQ ID NO: 324942 - RNA, 32 nt, Homo Sapiens
gugacuuuuauaaaacaagugauucauugugu

SEQ ID NO: 324943 - RNA, 32 nt, Homo Sapiens
gcccucaggucgcucccgggcgcggacacgga

SEQ ID NO: 324944 - RNA, 28 nt, Homo Sapiens
ccggggucacggugaccaagcaggcagg

SEQ ID NO: 324945 - RNA, 32 nt, Homo Sapiens
cuguuacuuuucugccuagagggugugucugu

SEQ ID NO: 324946 - RNA, 32 nt, Homo Sapiens
uccagggacaaagaggagcugcugugggccug

SEQ ID NO: 324947 - RNA, 32 nt, Homo Sapiens
cucuacauugcgauugugacaacauagcuuau

SEQ ID NO: 324948 - RNA, 32 nt, Homo Sapiens
uauaggaaauacaugaagaaacaaaguaaaau

SEQ ID NO: 324949 - RNA, 32 nt, Homo Sapiens
cagcugugauggguuauaucauaaaugcagcu

SEQ ID NO: 324950 - RNA, 32 nt, Homo Sapiens
acuagaauuuaaaaguaaguuuagcaacugug

SEQ ID NO: 324951 - RNA, 32 nt, Homo Sapiens
cgagcggagcggaucccggggcugggauugcg

SEQ ID NO: 324952 - RNA, 32 nt, Homo Sapiens
ugaaagcugugaagcacagacaucaguuuaga

SEQ ID NO: 324953 - RNA, 32 nt, Homo Sapiens
acauaucauuuuucuuuuuuguaaauccagug

SEQ ID NO: 324954 - RNA, 32 nt, Homo Sapiens
uuuucaguacaguacaucauuccuccucacua

SEQ ID NO: 324955 - RNA, 32 nt, Homo Sapiens
cauugauggagcagcuggugcugcugggaggc

SEQ ID NO: 324956 - RNA, 32 nt, Homo Sapiens
cuuuggguuugauuuuugaauuuaaugugaaa

SEQ ID NO: 324957 - RNA, 32 nt, Homo Sapiens
gaaauaguuguuuuuucuuaagguaacuauca

SEQ ID NO: 324958 - RNA, 31 nt, Homo Sapiens
ccuaugaaauaaaacugaugauguuuggaag

SEQ ID NO: 324959 - RNA, 32 nt, Homo Sapiens
uguguggaguuggggucccuucaucuagguug

SEQ ID NO: 324960 - RNA, 32 nt, Homo Sapiens
uuuuuuuuaaacugaggccuugcgauauuuug

SEQ ID NO: 324961 - RNA, 32 nt, Homo Sapiens
accgacuuucuagaggaaauuuagcgugcggg

SEQ ID NO: 324962 - RNA, 32 nt, Homo Sapiens
uauuuacuaguugaaguuauuaucaguuuuua

SEQ ID NO: 324963 - RNA, 32 nt, Homo Sapiens
ugccgucgcguuugcaccucgcugcuccagcc

SEQ ID NO: 324964 - RNA, 32 nt, Homo Sapiens
ugguggugaaaaguacuuuuucaacuagauau

SEQ ID NO: 324965 - RNA, 32 nt, Homo Sapiens
acuaaacuaugcuauuugauuuuucuucuuga

SEQ ID NO: 324966 - RNA, 32 nt, Homo Sapiens
cggagaggccuggcgggccgcugcugcgggcc

SEQ ID NO: 324967 - RNA, 32 nt, Homo Sapiens
caaggcgacggccgccgcccgcccgccccuuc

SEQ ID NO: 324968 - RNA, 32 nt, Homo Sapiens
ccagccccuaaaaugauagccacaagcagauu

SEQ ID NO: 324969 - RNA, 32 nt, Homo Sapiens
gaaacuuauaauuuaaauuaaauuggaaauua

SEQ ID NO: 324970 - RNA, 32 nt, Homo Sapiens
gggcuguggccauaaugacacuucauccuaga

SEQ ID NO: 324971 - RNA, 32 nt, Homo Sapiens
cuuaucugauguugguuugauacuguuaacac

SEQ ID NO: 324972 - RNA, 32 nt, Homo Sapiens
auuugcuugucaucagggggcuuaccaaugcc

SEQ ID NO: 324973 - RNA, 32 nt, Homo Sapiens
cccgccgccccgcucccugcuuugcuacacaa

SEQ ID NO: 324974 - RNA, 32 nt, Homo Sapiens
acacucucuccugcugaacaggaggcacugua

SEQ ID NO: 324975 - RNA, 32 nt, Homo Sapiens
gcccgccauggccaccaaggcucggguuaugu

SEQ ID NO: 324976 - RNA, 32 nt, Homo Sapiens
auguugacccucuggaggagagcgcuguggag

SEQ ID NO: 324977 - RNA, 32 nt, Homo Sapiens
aguugagagucuuuagaccugugcacagcccc

SEQ ID NO: 324978 - RNA, 30 nt, Homo Sapiens
cauggacagcccgugccagccgcagccccu

SEQ ID NO: 324979 - RNA, 32 nt, Homo Sapiens
cccccgcccccggccuccgcagcucggcaugg

SEQ ID NO: 324980 - RNA, 32 nt, Homo Sapiens
cccuuccucccuccccaggcaccacuggacca

SEQ ID NO: 324981 - RNA, 32 nt, Homo Sapiens
uggaacugcuggcuggguugcugcuggucaug

SEQ ID NO: 324982 - RNA, 32 nt, Homo Sapiens
acugucagaaccauucugcaacugaguaugaa

SEQ ID NO: 324983 - RNA, 32 nt, Homo Sapiens
uguacacacacacacacacacacacacacaca

SEQ ID NO: 324984 - RNA, 32 nt, Homo Sapiens
aucagcucugaaccuagcuuuauuuaaacuga

SEQ ID NO: 324985 - RNA, 32 nt, Homo Sapiens
acagaaaaggauuuuuaaaauuagauuaguau

SEQ ID NO: 324986 - RNA, 32 nt, Homo Sapiens
uagccgccucugccgccgcggacuucccgaac

SEQ ID NO: 324987 - RNA, 32 nt, Homo Sapiens
gcaggucccugaaagcaccuuccuggaggaug

SEQ ID NO: 324988 - RNA, 32 nt, Homo Sapiens
gaugaggcacuaggccgggaggaagagaccca

SEQ ID NO: 324989 - RNA, 32 nt, Homo Sapiens
cguugugccccgagaugagauccggaagcuga

SEQ ID NO: 324990 - RNA, 32 nt, Homo Sapiens
cuucauauuuuuccaucauuagacaaauacaa

SEQ ID NO: 324991 - RNA, 32 nt, Homo Sapiens
agcuucuguccugcccccaaggaggcagccug

SEQ ID NO: 324992 - RNA, 32 nt, Homo Sapiens
cagcgcuacguccgccacugucucugcagcaa

SEQ ID NO: 324993 - RNA, 32 nt, Homo Sapiens
gaggacacgcgggugaugugucuugggucaca

SEQ ID NO: 324994 - RNA, 32 nt, Homo Sapiens
ugugcaggcugcacucaaugaccucaacccaa

SEQ ID NO: 324995 - RNA, 32 nt, Homo Sapiens
auuggcauagaaaaaaguagcaaauguuuacu

SEQ ID NO: 324996 - RNA, 32 nt, Homo Sapiens
ggccugcugcuccccaguuccacacgggccca

SEQ ID NO: 324997 - RNA, 32 nt, Homo Sapiens
uugaccaucacccuauggauauuggcuaguuu

SEQ ID NO: 324998 - RNA, 32 nt, Homo Sapiens
uguuuugauauuacagagaguuauaaaaucag

SEQ ID NO: 324999 - RNA, 32 nt, Homo Sapiens
cagggaggccucggugauuuugccagagccuc

SEQ ID NO: 325000 - RNA, 32 nt, Homo Sapiens
auuuuuuauuuuuauuuuuuccuugguagagu

SEQ ID NO: 325001 - RNA, 32 nt, Homo Sapiens
ugaaaagaaagauucaacucugugagaugaau

SEQ ID NO: 325002 - RNA, 32 nt, Homo Sapiens
auguaccucuucugccccuuuuaugacaccuu

SEQ ID NO: 325003 - RNA, 32 nt, Homo Sapiens
ucaguaucucaaccucucuugcccuuucaauc

SEQ ID NO: 325004 - RNA, 32 nt, Homo Sapiens
uuguguugaaucugaaucacauuggcuuauau

SEQ ID NO: 325005 - RNA, 32 nt, Homo Sapiens
uauaacagaaaacugacagagaaguaauaaac

SEQ ID NO: 325006 - RNA, 32 nt, Homo Sapiens
ugcuguguucuuccucagucuggcugugggca

SEQ ID NO: 325007 - RNA, 32 nt, Homo Sapiens
aaccguccuugacagggagucuuaacuagaga

SEQ ID NO: 325008 - RNA, 32 nt, Homo Sapiens
gguaaaauuggaacucuccagaugaacaaaga

SEQ ID NO: 325009 - RNA, 32 nt, Homo Sapiens
gaauuaguagacaaggauauuaaaagagcuau

SEQ ID NO: 325010 - RNA, 32 nt, Homo Sapiens
gcaagaggaucagaugaagaaaaggagaggua

SEQ ID NO: 325011 - RNA, 32 nt, Homo Sapiens
gugaggggggaggcgguggcggcggccauuuu

SEQ ID NO: 325012 - RNA, 32 nt, Homo Sapiens
agucagguggagguugcugcuaauuugccucc

SEQ ID NO: 325013 - RNA, 32 nt, Homo Sapiens
aggaagaggaggaggcccguuggcgucggacc

SEQ ID NO: 325014 - RNA, 32 nt, Homo Sapiens
aguugaacuuagguggaccauuaaacaugcau

SEQ ID NO: 325015 - RNA, 32 nt, Homo Sapiens
gagaaagacagagcagggaaacgugcagagga

SEQ ID NO: 325016 - RNA, 32 nt, Homo Sapiens
gcgcccggccccacucuccggaucuggacgau

SEQ ID NO: 325017 - RNA, 32 nt, Homo Sapiens
aaaaugcacuguaaauaugcuuuaguuuuaau

SEQ ID NO: 325018 - RNA, 32 nt, Homo Sapiens
gugaggggggcagagggaaacagggccgucag

SEQ ID NO: 325019 - RNA, 29 nt, Homo Sapiens
gugaagugugaaguauauuuucuauugua

SEQ ID NO: 325020 - RNA, 32 nt, Homo Sapiens
gggcuggggaccgcgggucggguccgguuucc

SEQ ID NO: 325021 - RNA, 32 nt, Homo Sapiens
ucauucuccuuguccuucucuuuugaacucuc

SEQ ID NO: 325022 - RNA, 32 nt, Homo Sapiens
agcauuuuaauguggguagaaacucuacacca

SEQ ID NO: 325023 - RNA, 32 nt, Homo Sapiens
uuaacacauuguaucauuaaaucuucaaaaca

SEQ ID NO: 325024 - RNA, 32 nt, Homo Sapiens
auucuccacauuucuuuuuuauuagcuucaug

SEQ ID NO: 325025 - RNA, 32 nt, Homo Sapiens
ccugaccugccucccccuccccgcccgacccg

SEQ ID NO: 325026 - RNA, 32 nt, Homo Sapiens
ggucagcuuuucagauacaaauccacugagcc

SEQ ID NO: 325027 - RNA, 32 nt, Homo Sapiens
ucagcguuaugcuaagaggaaaucacugaggc

SEQ ID NO: 325028 - RNA, 32 nt, Homo Sapiens
uuuuuguuugaagcaugaaaaagggaaauuca

SEQ ID NO: 325029 - RNA, 32 nt, Homo Sapiens
uuccccuugaauuuauagugugaugccaaaua

SEQ ID NO: 325030 - RNA, 32 nt, Homo Sapiens
cggccucucuucccuuugguagcggcuaccgg

SEQ ID NO: 325031 - RNA, 32 nt, Homo Sapiens
gaccccacauucugcccuucccucuuucucac

SEQ ID NO: 325032 - RNA, 32 nt, Homo Sapiens
acuucucuccccaccccuuuccugauuguuuu

SEQ ID NO: 325033 - RNA, 32 nt, Homo Sapiens
uguucuauuuauucugucuuucuccucccaca

SEQ ID NO: 325034 - RNA, 32 nt, Homo Sapiens
cccugcccccagagcaauaaagucagcuggcu

SEQ ID NO: 325035 - RNA, 32 nt, Homo Sapiens
cacuggggacccugcacagucuggccauguga

SEQ ID NO: 325036 - RNA, 32 nt, Homo Sapiens
uuccgaaaccuuacuaugauauuguuaaguca

SEQ ID NO: 325037 - RNA, 32 nt, Homo Sapiens
augcccgcaggagagagcaacggggucugaua

SEQ ID NO: 325038 - RNA, 32 nt, Homo Sapiens
ccccugccaugcaaccagaugugugugaaugg

SEQ ID NO: 325039 - RNA, 30 nt, Homo Sapiens
aucauguaaaccugagccuaacucuuguuc

SEQ ID NO: 325040 - RNA, 32 nt, Homo Sapiens
ggacgggggccgggggcggggguucgguuuga

SEQ ID NO: 325041 - RNA, 32 nt, Homo Sapiens
gcaccuuugugaacucaggaaugugcgccagu

SEQ ID NO: 325042 - RNA, 32 nt, Homo Sapiens
aggagaggugcagcugcagcaguguucuaccg

SEQ ID NO: 325043 - RNA, 32 nt, Homo Sapiens
aaaaguugagaagccagaugcuaaagagaaga

SEQ ID NO: 325044 - RNA, 32 nt, Homo Sapiens
aggguuggcuagaggaggaagacggcgaggac

SEQ ID NO: 325045 - RNA, 32 nt, Homo Sapiens
agccugggcccggcccacucagcggcccacau

SEQ ID NO: 325046 - RNA, 32 nt, Homo Sapiens
uacgaccagccuugcagccuccagguccggug

SEQ ID NO: 325047 - RNA, 32 nt, Homo Sapiens
guacucggagcccuuccacuccucccagguca

SEQ ID NO: 325048 - RNA, 31 nt, Homo Sapiens
cagccgagucacugccugaccggcuccaugg

SEQ ID NO: 325049 - RNA, 32 nt, Homo Sapiens
guuguaguuaaaaaugauuaugcuguggagag

SEQ ID NO: 325050 - RNA, 32 nt, Homo Sapiens
cacuaaacuauaauauaaaggaaaugaagcca

SEQ ID NO: 325051 - RNA, 32 nt, Homo Sapiens
uccgcuccucuccccgcgccgccccgcccucc

SEQ ID NO: 325052 - RNA, 32 nt, Homo Sapiens
cuugcccugugccaugacguggggacucgccc

SEQ ID NO: 325053 - RNA, 32 nt, Homo Sapiens
cuacauuuauuuacaaaugaguuuaugcauuu

SEQ ID NO: 325054 - RNA, 32 nt, Homo Sapiens
ggaguggguggccuccucuccauccccugaag

SEQ ID NO: 325055 - RNA, 32 nt, Homo Sapiens
ucuuggagaagcuacagccugugcucaguuga

SEQ ID NO: 325056 - RNA, 32 nt, Homo Sapiens
aggggcgcgggaaggcggggcucggaugcaau

SEQ ID NO: 325057 - RNA, 32 nt, Homo Sapiens
aggaguucaacgccagccuggccaacauggug

SEQ ID NO: 325058 - RNA, 32 nt, Homo Sapiens
gggguaugauaacuaaaugaacaucucuggaa

SEQ ID NO: 325059 - RNA, 32 nt, Homo Sapiens
aaggguuauuccaggggcuacugaagaucuaa

SEQ ID NO: 325060 - RNA, 30 nt, Homo Sapiens
uccuggcugauucuggucgcccuggacacu

SEQ ID NO: 325061 - RNA, 32 nt, Homo Sapiens
caggaaagaaugcuucugcugcuucaaacaug

SEQ ID NO: 325062 - RNA, 32 nt, Homo Sapiens
cgcaguggccgaggcuggagcggcaggcggau

SEQ ID NO: 325063 - RNA, 32 nt, Homo Sapiens
gagucugaauccccggccucugucaccugaga

SEQ ID NO: 325064 - RNA, 32 nt, Homo Sapiens
ugggacuugcugucaaacccuaggauagucuc

SEQ ID NO: 325065 - RNA, 32 nt, Homo Sapiens
aaaauuguauuuauuuuauacagauggguuuu

SEQ ID NO: 325066 - RNA, 32 nt, Homo Sapiens
uggcaggggaaagccagcgguuccugggaacg

SEQ ID NO: 325067 - RNA, 32 nt, Homo Sapiens
augcugacugaguuccugcuguguguuggaca

SEQ ID NO: 325068 - RNA, 32 nt, Homo Sapiens
ugacuuaucuucugguuuccuaauccuaucuu

SEQ ID NO: 325069 - RNA, 32 nt, Homo Sapiens
uaaucuugacauuuuguuugccuguucuagac

SEQ ID NO: 325070 - RNA, 32 nt, Homo Sapiens
ugucacaaucaguuagugacugagagggauug

SEQ ID NO: 325071 - RNA, 32 nt, Homo Sapiens
cucaaagggaugcaggccauauugccagcaag

SEQ ID NO: 325072 - RNA, 32 nt, Homo Sapiens
cccaagcucaagggugaauccccaauacuuua

SEQ ID NO: 325073 - RNA, 32 nt, Homo Sapiens
gaauuuggggguaccauuggugguauuucagg

SEQ ID NO: 325074 - RNA, 32 nt, Homo Sapiens
augacucuucaaccccgaggucccuguuguca

SEQ ID NO: 325075 - RNA, 32 nt, Homo Sapiens
cauggaaagugauaagaaaugaacuucuaggc

SEQ ID NO: 325076 - RNA, 32 nt, Homo Sapiens
uuuuucagauaucuuggacaaaucacauauuu

SEQ ID NO: 325077 - RNA, 32 nt, Homo Sapiens
uuauuuuauuuuugcacuucgucaugacagua

SEQ ID NO: 325078 - RNA, 32 nt, Homo Sapiens
aaccuuuuauuuccaacaaacgugugccgaga

SEQ ID NO: 325079 - RNA, 32 nt, Homo Sapiens
agaaacugaacaaaaugagaugaaagccgagc

SEQ ID NO: 325080 - RNA, 32 nt, Homo Sapiens
uuuaaacaucugguuugggagagaccaucgac

SEQ ID NO: 325081 - RNA, 32 nt, Homo Sapiens
uuaaaacagacacacacacacacacacacaca

SEQ ID NO: 325082 - RNA, 32 nt, Homo Sapiens
ggauggagggagagguugugcugaccaccacc

SEQ ID NO: 325083 - RNA, 32 nt, Homo Sapiens
auugcaugccgggugcagcaucuggaagagcu

SEQ ID NO: 325084 - RNA, 32 nt, Homo Sapiens
guucuccgcugaaagaggcucagagagacacu

SEQ ID NO: 325085 - RNA, 32 nt, Homo Sapiens
cuugaugaaacugaguacuaagauuugguaca

SEQ ID NO: 325086 - RNA, 30 nt, Homo Sapiens
cuccgauguggacgucacgcaggacagaua

SEQ ID NO: 325087 - RNA, 32 nt, Homo Sapiens
uccuagcuccccgcccuaaaaggaggcaguga

SEQ ID NO: 325088 - RNA, 32 nt, Homo Sapiens
cucaaguagugugcccaaaucaucacaaaaug

SEQ ID NO: 325089 - RNA, 32 nt, Homo Sapiens
uugacacaccaaaaacaaaacuucuguuucaa

SEQ ID NO: 325090 - RNA, 30 nt, Homo Sapiens
acaagucuguggcuuggugagucugugugg

SEQ ID NO: 325091 - RNA, 32 nt, Homo Sapiens
cuggggaggaagacugcugaggaacuggaagu

SEQ ID NO: 325092 - RNA, 32 nt, Homo Sapiens
cacagugaaguaggaaacaauauuuugaaaau

SEQ ID NO: 325093 - RNA, 32 nt, Homo Sapiens
ggugucccggagcccuggaccgugcuggcagc

SEQ ID NO: 325094 - RNA, 32 nt, Homo Sapiens
uucauuugauaaaaagaaucuucugcuuaaaa

SEQ ID NO: 325095 - RNA, 32 nt, Homo Sapiens
uugcuacaugguaauuaaauaauuacuaggaa

SEQ ID NO: 325096 - RNA, 32 nt, Homo Sapiens
ccgccccagaccugcuuucucuuuugagaauu

SEQ ID NO: 325097 - RNA, 32 nt, Homo Sapiens
cccggccgcugcaaggcucuggcgguccgagc

SEQ ID NO: 325098 - RNA, 32 nt, Homo Sapiens
gaugaaauagaagcauuaaauauuuuuaucua

SEQ ID NO: 325099 - RNA, 32 nt, Homo Sapiens
gggagucgggagaggacggggcgugccccgcg

SEQ ID NO: 325100 - RNA, 32 nt, Homo Sapiens
cagcaguuuuaaaggaugaacauuggauuuca

SEQ ID NO: 325101 - RNA, 32 nt, Homo Sapiens
ccaagaggauucauccugggagagggggcaag

SEQ ID NO: 325102 - RNA, 32 nt, Homo Sapiens
acuauuagaaacaaaauugagcaaguuaaguu

SEQ ID NO: 325103 - RNA, 30 nt, Homo Sapiens
cuccagacuugugcugcgugcggcuccgga

SEQ ID NO: 325104 - RNA, 32 nt, Homo Sapiens
uggaaggcucuuagccacccugccuggcccga

SEQ ID NO: 325105 - RNA, 32 nt, Homo Sapiens
agcaucuggugcccuccccuccacccucacaa

SEQ ID NO: 325106 - RNA, 32 nt, Homo Sapiens
cuugccugccccccaggcugugugcguccagg

SEQ ID NO: 325107 - RNA, 32 nt, Homo Sapiens
gggcagagcuguccucagcugcacugcggccu

SEQ ID NO: 325108 - RNA, 32 nt, Homo Sapiens
gguuggaaauaccaucagccuuccuugcucgg

SEQ ID NO: 325109 - RNA, 32 nt, Homo Sapiens
gagcaucgccugggagcccugaaggaugaaua

SEQ ID NO: 325110 - RNA, 32 nt, Homo Sapiens
ccagauuuuaucaugaccaucuccuucuugcc

SEQ ID NO: 325111 - RNA, 32 nt, Homo Sapiens
caccgccguagcgcccgagugucggggggcgc

SEQ ID NO: 325112 - RNA, 32 nt, Homo Sapiens
ugaacuuuagaaccagaugaucccgguuggaa

SEQ ID NO: 325113 - RNA, 32 nt, Homo Sapiens
aaaaauuaugguugguuuuucuuaauacauuc

SEQ ID NO: 325114 - RNA, 32 nt, Homo Sapiens
ccaagucacacgcuuuugaauuaugcuuugua

SEQ ID NO: 325115 - RNA, 32 nt, Homo Sapiens
ucuucagguggcggccccucggaggacaagcg

SEQ ID NO: 325116 - RNA, 32 nt, Homo Sapiens
ugccuuuuuuaaaaauauauuugacagaaacc

SEQ ID NO: 325117 - RNA, 32 nt, Homo Sapiens
ugagaccacuugggcucuguuuucucagcucc

SEQ ID NO: 325118 - RNA, 32 nt, Homo Sapiens
uccagcaaggaccaugagggcgcuggaggggc

SEQ ID NO: 325119 - RNA, 32 nt, Homo Sapiens
cugacucccgcacucccuggcauuuuuugcag

SEQ ID NO: 325120 - RNA, 32 nt, Homo Sapiens
cguggggccccggcucccaccggugccaaacc

SEQ ID NO: 325121 - RNA, 32 nt, Homo Sapiens
aacaucaauguuuauuaguucuguauacagua

SEQ ID NO: 325122 - RNA, 32 nt, Homo Sapiens
cggcagugcgcccgccaccaccacgcagccgc

SEQ ID NO: 325123 - RNA, 32 nt, Homo Sapiens
auagcuuauaucuauuuuaaauaacuuaaagc

SEQ ID NO: 325124 - RNA, 32 nt, Homo Sapiens
cuuagccucugucuccuucccugggacccucu

SEQ ID NO: 325125 - RNA, 32 nt, Homo Sapiens
cacauucuggggauuccugguggcaccuuccu

SEQ ID NO: 325126 - RNA, 32 nt, Homo Sapiens
gcuucugggaugccuuccauggagcggcucgg

SEQ ID NO: 325127 - RNA, 32 nt, Homo Sapiens
agccucucagaauuuggcagugcaaggaaggg

SEQ ID NO: 325128 - RNA, 32 nt, Homo Sapiens
aucuagaggagcuuuggcuccggcugugacgg

SEQ ID NO: 325129 - RNA, 32 nt, Homo Sapiens
ggaggguaaugagaagcuuugguucugccauc

SEQ ID NO: 325130 - RNA, 32 nt, Homo Sapiens
ugaaauguuacccaauuaggcuugucagguua

SEQ ID NO: 325131 - RNA, 32 nt, Homo Sapiens
cucaguucccacuugcuuggguuccugggggu

SEQ ID NO: 325132 - RNA, 32 nt, Homo Sapiens
cgcugccgcgcgcucgucugccuggacuguug

SEQ ID NO: 325133 - RNA, 32 nt, Homo Sapiens
cgccgccaugagggcgcacgcagccgcacugg

SEQ ID NO: 325134 - RNA, 32 nt, Homo Sapiens
ccauguuuuuggcuauaucucauccaaacuga

SEQ ID NO: 325135 - RNA, 32 nt, Homo Sapiens
cccucauccaccugcguaagugccacccugaa

SEQ ID NO: 325136 - RNA, 32 nt, Homo Sapiens
acacaaaacugggagugagagggguauuuaau

SEQ ID NO: 325137 - RNA, 32 nt, Homo Sapiens
gaagcuggaagccaggaaaaggcgcuuugcag

SEQ ID NO: 325138 - RNA, 32 nt, Homo Sapiens
ucagaaaauauuaaaugcauguauuuuucaaa

SEQ ID NO: 325139 - RNA, 32 nt, Homo Sapiens
ucaagguagggagaggucagaugcccaagccu

SEQ ID NO: 325140 - RNA, 32 nt, Homo Sapiens
uauuuauuuauuuauugagacggagucuugcu

SEQ ID NO: 325141 - RNA, 32 nt, Homo Sapiens
uuuauuuauuuauuuagagacggagucuugcu

SEQ ID NO: 325142 - RNA, 32 nt, Homo Sapiens
uguucuucuuugccugugauguuuccuaaucu

SEQ ID NO: 325143 - RNA, 32 nt, Homo Sapiens
aacuuacacuuuuauguuaauuuuauauuuug

SEQ ID NO: 325144 - RNA, 32 nt, Homo Sapiens
agauuucgcucuugucgcccaggcuggagugc

SEQ ID NO: 325145 - RNA, 32 nt, Homo Sapiens
uuguaguuuguucauucauccauccaccuguu

SEQ ID NO: 325146 - RNA, 32 nt, Homo Sapiens
gguggcugccucggcccucccagcucuuacac

SEQ ID NO: 325147 - RNA, 32 nt, Homo Sapiens
ccagacacaggcucgcugcugcuggaaggcgg

SEQ ID NO: 325148 - RNA, 32 nt, Homo Sapiens
ugacaaaaaugguuuugaauagaucuuuauaa

SEQ ID NO: 325149 - RNA, 32 nt, Homo Sapiens
uuagguauuuccccuaauguuaucccuccccu

SEQ ID NO: 325150 - RNA, 32 nt, Homo Sapiens
aaaggugguuuucgcccuuccucucccacauu

SEQ ID NO: 325151 - RNA, 32 nt, Homo Sapiens
uuccugacgacccccgccccguguguuuguuu

SEQ ID NO: 325152 - RNA, 32 nt, Homo Sapiens
ggaguauggguccugcccugcccucccaggag

SEQ ID NO: 325153 - RNA, 32 nt, Homo Sapiens
aggcccccaagcccagcuccccuaucuaggug

SEQ ID NO: 325154 - RNA, 32 nt, Homo Sapiens
ggacccaugggauauauccagaggcaaacuuu

SEQ ID NO: 325155 - RNA, 32 nt, Homo Sapiens
ggauagacucacauuuacaaguagugaagguc

SEQ ID NO: 325156 - RNA, 32 nt, Homo Sapiens
gagcaugccagacuguaaucccagguauucac

SEQ ID NO: 325157 - RNA, 32 nt, Homo Sapiens
agaccaccagguuacucucagcuccucauacu

SEQ ID NO: 325158 - RNA, 32 nt, Homo Sapiens
gaaggucagcagacaaacaagugaacaaaggu

SEQ ID NO: 325159 - RNA, 28 nt, Homo Sapiens
gacagagccagacucuugucucgagggg

SEQ ID NO: 325160 - RNA, 32 nt, Homo Sapiens
guugagugaacuaauaacuguauuauagaaag

SEQ ID NO: 325161 - RNA, 32 nt, Homo Sapiens
ucagaaggaagcagcccuccgcgcacuggucc

SEQ ID NO: 325162 - RNA, 32 nt, Homo Sapiens
gauguucauucagguguccccccgcugcuccc

SEQ ID NO: 325163 - RNA, 32 nt, Homo Sapiens
ggggcuccaccgaugcucuucauacaaagauc

SEQ ID NO: 325164 - RNA, 32 nt, Homo Sapiens
uuaaacauuuuucacuuaaguugagauuuuug

SEQ ID NO: 325165 - RNA, 32 nt, Homo Sapiens
ugccuggcuccuggaugguccuggaggggccu

SEQ ID NO: 325166 - RNA, 32 nt, Homo Sapiens
ugacuucuggucuaagaugugagagcaccugg

SEQ ID NO: 325167 - RNA, 31 nt, Homo Sapiens
uugucaucuguauaauugccaaaugauuaua

SEQ ID NO: 325168 - RNA, 32 nt, Homo Sapiens
gugacuagaaggcgaggcgccgcgggaccaug

SEQ ID NO: 325169 - RNA, 32 nt, Homo Sapiens
ccagugacaaucagaggccuauuucuuucaug

SEQ ID NO: 325170 - RNA, 32 nt, Homo Sapiens
cguaaacuccgccuccacggaacgucucgccu

SEQ ID NO: 325171 - RNA, 32 nt, Homo Sapiens
aaaauaguuauggcgacuuucagaaacaauca

SEQ ID NO: 325172 - RNA, 32 nt, Homo Sapiens
aguguugugaaugagaccugagugcugacccc

SEQ ID NO: 325173 - RNA, 32 nt, Homo Sapiens
uuaauuaugugcauauuaaaacaauggccugg

SEQ ID NO: 325174 - RNA, 32 nt, Homo Sapiens
ucuguuuuuuaaaaccugcgacagcuugugau

SEQ ID NO: 325175 - RNA, 32 nt, Homo Sapiens
ccucuuugcaauaccacugaacuucuguugca

SEQ ID NO: 325176 - RNA, 32 nt, Homo Sapiens
aacccuaccccuuccaugcucaucucacugcc

SEQ ID NO: 325177 - RNA, 32 nt, Homo Sapiens
cauaucuaacuuccuccuuaaaacagagaagg

SEQ ID NO: 325178 - RNA, 31 nt, Homo Sapiens
ggccggggccacugccuccucagcaugcagg

SEQ ID NO: 325179 - RNA, 32 nt, Homo Sapiens
uaaagaacagaaaaagaugaaugaaagaacca

SEQ ID NO: 325180 - RNA, 32 nt, Homo Sapiens
caccgaggaccggcugccccgccuggaggaga

SEQ ID NO: 325181 - RNA, 32 nt, Homo Sapiens
uauaaaugccuauuuuaacaucauuuaugguu

SEQ ID NO: 325182 - RNA, 32 nt, Homo Sapiens
cucuucguguuucccaccugcccucggcacga

SEQ ID NO: 325183 - RNA, 32 nt, Homo Sapiens
aaucccacagcagggcuugcaggccgcccugc

SEQ ID NO: 325184 - RNA, 32 nt, Homo Sapiens
aggggccggcgcccuggggggcugucugugac

SEQ ID NO: 325185 - RNA, 32 nt, Homo Sapiens
uggugaugaugaugaugauaaugaugaugaug

SEQ ID NO: 325186 - RNA, 32 nt, Homo Sapiens
aacuuuucuuaaaaauacuuucaguugccuuu

SEQ ID NO: 325187 - RNA, 32 nt, Homo Sapiens
uucagcagaaccagagcuacuccccuggaauc

SEQ ID NO: 325188 - RNA, 32 nt, Homo Sapiens
cgucuggcggccucgggcauuccagugaugca

SEQ ID NO: 325189 - RNA, 32 nt, Homo Sapiens
guuuccugaggccucccagucaugcuucuuau

SEQ ID NO: 325190 - RNA, 32 nt, Homo Sapiens
aaggguuuucuuuuuuaaauguuucuugguag

SEQ ID NO: 325191 - RNA, 32 nt, Homo Sapiens
agaugagggaacugaggcucagugaagucaac

SEQ ID NO: 325192 - RNA, 32 nt, Homo Sapiens
gugucucuuuggguucuuucuguuugaaacgg

SEQ ID NO: 325193 - RNA, 32 nt, Homo Sapiens
ucaucagcagggcacaccccuuccuagugguc

SEQ ID NO: 325194 - RNA, 32 nt, Homo Sapiens
gaucuggagagccgcgaagggccugccuucac

SEQ ID NO: 325195 - RNA, 32 nt, Homo Sapiens
gacagggcagaaggaguuucuccggagaugag

SEQ ID NO: 325196 - RNA, 32 nt, Homo Sapiens
uguauuucuuuuccaauagcaaaaaguuacau

SEQ ID NO: 325197 - RNA, 32 nt, Homo Sapiens
aagaguuuuggaaggggaggaaaauggcaagu

SEQ ID NO: 325198 - RNA, 32 nt, Homo Sapiens
cuggaggagcccaggauggauuauugagagca

SEQ ID NO: 325199 - RNA, 32 nt, Homo Sapiens
ggugggaucugugcccagagaugggacuggga

SEQ ID NO: 325200 - RNA, 32 nt, Homo Sapiens
uaaaggcuaccuugauguauguuuaaagugua

SEQ ID NO: 325201 - RNA, 32 nt, Homo Sapiens
gcggcccauguccggcgcgggcgaagcccucg

SEQ ID NO: 325202 - RNA, 32 nt, Homo Sapiens
uucuucucauugacaaugccaggauggcagug

SEQ ID NO: 325203 - RNA, 32 nt, Homo Sapiens
uaaaucagaguuacagcagggauuuaacaaac

SEQ ID NO: 325204 - RNA, 32 nt, Homo Sapiens
cgauuagccuuuucucugccuugcuugcuuga

SEQ ID NO: 325205 - RNA, 32 nt, Homo Sapiens
uaguugaaagaaaaagugauccugucauagca

SEQ ID NO: 325206 - RNA, 32 nt, Homo Sapiens
cuuuuucuguuaaaauaacauaacauuucaau

SEQ ID NO: 325207 - RNA, 32 nt, Homo Sapiens
aguucucuuaggacccagagccagggcccuca

SEQ ID NO: 325208 - RNA, 32 nt, Homo Sapiens
cuuucccuccccacggccccaacuccagggca

SEQ ID NO: 325209 - RNA, 32 nt, Homo Sapiens
gugaugggagaacagaggacaguuccaggaua

SEQ ID NO: 325210 - RNA, 32 nt, Homo Sapiens
augauaccaaacaaaauauuuucauauuuauu

SEQ ID NO: 325211 - RNA, 32 nt, Homo Sapiens
cacacccuucacgguugcuacccaggcggcca

SEQ ID NO: 325212 - RNA, 32 nt, Homo Sapiens
guagguguugugagcuuuugcuguaagaaaaa

SEQ ID NO: 325213 - RNA, 32 nt, Homo Sapiens
guuaaauguauacuuguaaauaaaauagcugc

SEQ ID NO: 325214 - RNA, 32 nt, Homo Sapiens
uacaagaaaaggaaaggagauuaacagcuagu

SEQ ID NO: 325215 - RNA, 32 nt, Homo Sapiens
cagggccgcacgagcuggcuggcugcuugcac

SEQ ID NO: 325216 - RNA, 32 nt, Homo Sapiens
acggcgccgggcgaggcugugcgcgcccuccc

SEQ ID NO: 325217 - RNA, 32 nt, Homo Sapiens
ggcauuucuuugcauuuauaacauggauguuc

SEQ ID NO: 325218 - RNA, 32 nt, Homo Sapiens
gggaagcaggggcugcggcagacgccucucgg

SEQ ID NO: 325219 - RNA, 32 nt, Homo Sapiens
ggccugugccauggggcugaauguuuguagcc

SEQ ID NO: 325220 - RNA, 32 nt, Homo Sapiens
aauucugccgugggcuaaggcacgcuaaccag

SEQ ID NO: 325221 - RNA, 32 nt, Homo Sapiens
acccugcugugacggaggcuaguguggaagag

SEQ ID NO: 325222 - RNA, 32 nt, Homo Sapiens
gaggcucuauaaauauauaugcauuuauauaa

SEQ ID NO: 325223 - RNA, 32 nt, Homo Sapiens
ccacccacccagcgacuccccagccgcugccc

SEQ ID NO: 325224 - RNA, 32 nt, Homo Sapiens
ucaccaggcagacagucugccuaggacccagu

SEQ ID NO: 325225 - RNA, 32 nt, Homo Sapiens
ccuaagcauuuuuuuucuuaauuaacaaccau

SEQ ID NO: 325226 - RNA, 32 nt, Homo Sapiens
aaaagcaaggaaagcgaguuagucuuuucagu

SEQ ID NO: 325227 - RNA, 32 nt, Homo Sapiens
aagaaacacagggccuggccugggguccuggg

SEQ ID NO: 325228 - RNA, 32 nt, Homo Sapiens
uuggugauuucuuuuuuaucuauuuguuguuu

SEQ ID NO: 325229 - RNA, 32 nt, Homo Sapiens
auuuuuccaaaauaauuuuaagaaaucaaaga

SEQ ID NO: 325230 - RNA, 32 nt, Homo Sapiens
aaccuugucuccaugaauucaauaguuuaaua

SEQ ID NO: 325231 - RNA, 32 nt, Homo Sapiens
cggguccuggauguugauguccugcaucuaac

SEQ ID NO: 325232 - RNA, 32 nt, Homo Sapiens
uuauuuuauuuuuauucuuuugagauggaguu

SEQ ID NO: 325233 - RNA, 32 nt, Homo Sapiens
cgcuaggagaguccucuucuaagcaaagugcc

SEQ ID NO: 325234 - RNA, 32 nt, Homo Sapiens
uuuggucuuaguuuucuagaaaaaaggaguag

SEQ ID NO: 325235 - RNA, 32 nt, Homo Sapiens
agcggacggcgggggcggccggagccucucuc

SEQ ID NO: 325236 - RNA, 32 nt, Homo Sapiens
acguccccccgccgcgggguccugucagcccg

SEQ ID NO: 325237 - RNA, 32 nt, Homo Sapiens
uggaaggccaaggcaagaagagcacaugagcc

SEQ ID NO: 325238 - RNA, 32 nt, Homo Sapiens
cauucaaacuaaagccaagccugaagauaacu

SEQ ID NO: 325239 - RNA, 32 nt, Homo Sapiens
agcuggcagcaggcgccuccucccccaacgca

SEQ ID NO: 325240 - RNA, 32 nt, Homo Sapiens
aaaaugacuuugaacugaaacuuuucuaaagu

SEQ ID NO: 325241 - RNA, 32 nt, Homo Sapiens
aagauguguuggguguuagaucugcaauacuc

SEQ ID NO: 325242 - RNA, 32 nt, Homo Sapiens
ugaugauucuaccugucgccuuguuucgggga

SEQ ID NO: 325243 - RNA, 32 nt, Homo Sapiens
acacacaccucgcucugggaguagcagccugc

SEQ ID NO: 325244 - RNA, 32 nt, Homo Sapiens
aauauuacauuuuuuucuuuuaggaaauauca

SEQ ID NO: 325245 - RNA, 32 nt, Homo Sapiens
uggccgagcuccuggggagcuccugggacccu

SEQ ID NO: 325246 - RNA, 32 nt, Homo Sapiens
ccccccaugaguggauuccuccaggucagggg

SEQ ID NO: 325247 - RNA, 32 nt, Homo Sapiens
aagaauugauucauuuucaaaauuauuccaua

SEQ ID NO: 325248 - RNA, 32 nt, Homo Sapiens
uugcaccaauuaugugcagagccuugguguaa

SEQ ID NO: 325249 - RNA, 32 nt, Homo Sapiens
gagaaaccauugccaucauuguagcaagugcu

SEQ ID NO: 325250 - RNA, 32 nt, Homo Sapiens
guauauauucaucaaaaugaugaacuauuuau

SEQ ID NO: 325251 - RNA, 32 nt, Homo Sapiens
uaagacaggggagaaaaaggcuuuucgagugu

SEQ ID NO: 325252 - RNA, 32 nt, Homo Sapiens
ggucuuaccuugugacaucuguuuaaagagag

SEQ ID NO: 325253 - RNA, 32 nt, Homo Sapiens
uguuuuguugagcuuauacuguucaagguuaa

SEQ ID NO: 325254 - RNA, 32 nt, Homo Sapiens
uuguauucugauugcccuucaucccaaguguu

SEQ ID NO: 325255 - RNA, 32 nt, Homo Sapiens
ugugucuacccauuuuaaaauauauauauuuu

SEQ ID NO: 325256 - RNA, 32 nt, Homo Sapiens
gcccugagggucgggccggagccaggguccaa

SEQ ID NO: 325257 - RNA, 32 nt, Homo Sapiens
accucuuggcaggaccugucugaguacuuugg

SEQ ID NO: 325258 - RNA, 32 nt, Homo Sapiens
uucugaauauuuuaaaucuuaacaucauauaa

SEQ ID NO: 325259 - RNA, 32 nt, Homo Sapiens
ucucagacuaauggggugugaugugacuaguc

SEQ ID NO: 325260 - RNA, 32 nt, Homo Sapiens
uucagguaaaaugugguucaaauaugggaagg

SEQ ID NO: 325261 - RNA, 27 nt, Homo Sapiens
ucauguuaauuucucagcccccaaaga

SEQ ID NO: 325262 - RNA, 32 nt, Homo Sapiens
uagcucaucacccccaggauugggccucugga

SEQ ID NO: 325263 - RNA, 32 nt, Homo Sapiens
acuuguggcugcuuuugcugcugcugcuccuc

SEQ ID NO: 325264 - RNA, 32 nt, Homo Sapiens
ccaguuuuacacaacacugugaauguaaugaa

SEQ ID NO: 325265 - RNA, 32 nt, Homo Sapiens
aauuaucuuaugucuaguaauaauucugauaa

SEQ ID NO: 325266 - RNA, 32 nt, Homo Sapiens
cugcgagcugucuggccucaaaccucagggcg

SEQ ID NO: 325267 - RNA, 32 nt, Homo Sapiens
ggguggggagggcgcugagggucacgcgaaca

SEQ ID NO: 325268 - RNA, 32 nt, Homo Sapiens
caggcucugugcuccuugaagcaagcgcucca

SEQ ID NO: 325269 - RNA, 32 nt, Homo Sapiens
ccucuucuuccacuccguccccacucagcucu

SEQ ID NO: 325270 - RNA, 32 nt, Homo Sapiens
cgccgcgagcuucuccucuccucacgaccgag

SEQ ID NO: 325271 - RNA, 32 nt, Homo Sapiens
gcgcaccggaggagaggcucucuagucugaag

SEQ ID NO: 325272 - RNA, 32 nt, Homo Sapiens
aaaggaauaaagaugaauggacaacuccaaaa

SEQ ID NO: 325273 - RNA, 32 nt, Homo Sapiens
accuggcucaggugagcugccccgcccccgcc

SEQ ID NO: 325274 - RNA, 32 nt, Homo Sapiens
uuccuucacuucccuuuuaaccccuagucaga

SEQ ID NO: 325275 - RNA, 32 nt, Homo Sapiens
agauuugugcccauuccuaauauuuuguucug

SEQ ID NO: 325276 - RNA, 32 nt, Homo Sapiens
aguuuaaaaaagcaacucuacugaaauacuaa

SEQ ID NO: 325277 - RNA, 32 nt, Homo Sapiens
uucuuuuucuaaaaguuguuacugauaugcuu

SEQ ID NO: 325278 - RNA, 32 nt, Homo Sapiens
cuuugcucugucugcuguccgccacggcccug

SEQ ID NO: 325279 - RNA, 32 nt, Homo Sapiens
aagcggaggucggcggggggcugcugggaggc

SEQ ID NO: 325280 - RNA, 32 nt, Homo Sapiens
agucaggcuucugguugugaaaucacauugua

SEQ ID NO: 325281 - RNA, 32 nt, Homo Sapiens
gccauuuuugagguguacaaaggucaggccgu

SEQ ID NO: 325282 - RNA, 32 nt, Homo Sapiens
uguggugugugcccucauagauggggguggga

SEQ ID NO: 325283 - RNA, 32 nt, Homo Sapiens
cuucuaggaacaguugacuucccagaaugcag

SEQ ID NO: 325284 - RNA, 32 nt, Homo Sapiens
uuuguucugugcauagagaccuuuaagcaaac

SEQ ID NO: 325285 - RNA, 32 nt, Homo Sapiens
ucuagaguccaggagcuuccccugccacugcc

SEQ ID NO: 325286 - RNA, 32 nt, Homo Sapiens
cucaagcaaucagcccaccucugccucccaaa

SEQ ID NO: 325287 - RNA, 32 nt, Homo Sapiens
gaggaaauaagaaaaaucauguuugcucuccc

SEQ ID NO: 325288 - RNA, 31 nt, Homo Sapiens
ucucugcugccggugaugggaggccuuucua

SEQ ID NO: 325289 - RNA, 32 nt, Homo Sapiens
gcgcccgcggagaggccggggcucugacgccc

SEQ ID NO: 325290 - RNA, 32 nt, Homo Sapiens
ugguaaauuaguaccaguagaauggggugcug

SEQ ID NO: 325291 - RNA, 32 nt, Homo Sapiens
uuuacagucaguacuuuuauauuaucuuggug

SEQ ID NO: 325292 - RNA, 32 nt, Homo Sapiens
gaggacaucaccuggggugcugccucucacac

SEQ ID NO: 325293 - RNA, 32 nt, Homo Sapiens
cagccccagcaucuuccaccugcugaggacca

SEQ ID NO: 325294 - RNA, 32 nt, Homo Sapiens
agaagagauccaauagcaaggaccucagucac

SEQ ID NO: 325295 - RNA, 32 nt, Homo Sapiens
cagaaaccaaccccugacccagcgguaccggc

SEQ ID NO: 325296 - RNA, 32 nt, Homo Sapiens
auucaugccuucuuggagggugaggguggcuu

SEQ ID NO: 325297 - RNA, 32 nt, Homo Sapiens
augcaccgcgcgcccccgcgcccucaccgacg

SEQ ID NO: 325298 - RNA, 28 nt, Homo Sapiens
gcuaaaguuguguauauguguguguaua

SEQ ID NO: 325299 - RNA, 32 nt, Homo Sapiens
uuuuaaguacuggagcuuuacuguaugucuug

SEQ ID NO: 325300 - RNA, 32 nt, Homo Sapiens
gccgagguggacauccugggcguggaugggau

SEQ ID NO: 325301 - RNA, 32 nt, Homo Sapiens
cucuuccuggcuggggcuggggugaacuggag

SEQ ID NO: 325302 - RNA, 32 nt, Homo Sapiens
cagaaaaggaugccucuguuuaaaaacaaauu

SEQ ID NO: 325303 - RNA, 32 nt, Homo Sapiens
ugcaguaguccaagcuacaccaaacauuaaca

SEQ ID NO: 325304 - RNA, 32 nt, Homo Sapiens
accaugccuuccucaguauccacacauaaacg

SEQ ID NO: 325305 - RNA, 29 nt, Homo Sapiens
cuguaaaguuuuguauauuuuguaaacuu

SEQ ID NO: 325306 - RNA, 32 nt, Homo Sapiens
auuuguaaaaaguuguugaggauauucagccc

SEQ ID NO: 325307 - RNA, 32 nt, Homo Sapiens
uugaucucuucccccaacuuccuaacacuuau

SEQ ID NO: 325308 - RNA, 32 nt, Homo Sapiens
guguuaaaacaaaaacaaacaaacacguuugu

SEQ ID NO: 325309 - RNA, 32 nt, Homo Sapiens
agauuggaauaauuaacuggagauaauaucca

SEQ ID NO: 325310 - RNA, 32 nt, Homo Sapiens
uuagacuggcggcuaccccgccacuggccugu

SEQ ID NO: 325311 - RNA, 32 nt, Homo Sapiens
ccuguguccccgcagacccccaucaugggcaa

SEQ ID NO: 325312 - RNA, 32 nt, Homo Sapiens
agugggagggguggagcaggacccggacccug

SEQ ID NO: 325313 - RNA, 32 nt, Homo Sapiens
ccugcacaaacaccccaccuuccacucggcuc

SEQ ID NO: 325314 - RNA, 32 nt, Homo Sapiens
aaaauacaaaaauuagccaggugugguggugc

SEQ ID NO: 325315 - RNA, 32 nt, Homo Sapiens
guuugccuugaaagaaucaacuucuaaccuca

SEQ ID NO: 325316 - RNA, 32 nt, Homo Sapiens
uuacaggugcgagcuacugcucccagcaagag

SEQ ID NO: 325317 - RNA, 32 nt, Homo Sapiens
caucagcgcgucgggaggcccggcugcuggcc

SEQ ID NO: 325318 - RNA, 32 nt, Homo Sapiens
uucuucucuggcuuccucuccuucugguccua

SEQ ID NO: 325319 - RNA, 30 nt, Homo Sapiens
agccccugcgcgcagcccgggccgaguagg

SEQ ID NO: 325320 - RNA, 32 nt, Homo Sapiens
acagcugugaaaauccaaaaaauauucuuaaa

SEQ ID NO: 325321 - RNA, 32 nt, Homo Sapiens
ccugucuuuuguuuggaugccggcgcugcugc

SEQ ID NO: 325322 - RNA, 32 nt, Homo Sapiens
gaacagauuuuguaggaaggcauacugaauuc

SEQ ID NO: 325323 - RNA, 30 nt, Homo Sapiens
caagcauguugcucuuauucaguguaaucc

SEQ ID NO: 325324 - RNA, 32 nt, Homo Sapiens
auacuucgcuacuuggcuagaguugcaacuac

SEQ ID NO: 325325 - RNA, 30 nt, Homo Sapiens
ggcaguaaugucccugccucuucucccaau

SEQ ID NO: 325326 - RNA, 31 nt, Homo Sapiens
cauuacuuguuuuagaucagaaacuugcuau

SEQ ID NO: 325327 - RNA, 32 nt, Homo Sapiens
ucgccccuucaggccuggcaagcugggggccc

SEQ ID NO: 325328 - RNA, 32 nt, Homo Sapiens
augauaaccuaagaggccggcgcgggcgggcg

SEQ ID NO: 325329 - RNA, 32 nt, Homo Sapiens
cgcgccccacguccgcgccgggauggugaacc

SEQ ID NO: 325330 - RNA, 32 nt, Homo Sapiens
aggaucccuccauggcgauggccguggagaga

SEQ ID NO: 325331 - RNA, 32 nt, Homo Sapiens
acuguucuacauuuggccugugcccacggccg

SEQ ID NO: 325332 - RNA, 32 nt, Homo Sapiens
gaaggacugacggaucccugaggugggccacu

SEQ ID NO: 325333 - RNA, 32 nt, Homo Sapiens
cucuccuagagcauuuccauucccugugccac

SEQ ID NO: 325334 - RNA, 32 nt, Homo Sapiens
ucuccggcggaacccaggcuggaccgcgggcc

SEQ ID NO: 325335 - RNA, 32 nt, Homo Sapiens
aggugucugcaccucacacuggacccaccugg

SEQ ID NO: 325336 - RNA, 32 nt, Homo Sapiens
ggcuggggauccaggaggagcaggggccagca

SEQ ID NO: 325337 - RNA, 32 nt, Homo Sapiens
ugguacagguccguauuuaguuccucuuucug

SEQ ID NO: 325338 - RNA, 32 nt, Homo Sapiens
uagcaccuuacaccccaucuuugacucaguuc

SEQ ID NO: 325339 - RNA, 32 nt, Homo Sapiens
cccuguccacagagacacagccuugccccagu

SEQ ID NO: 325340 - RNA, 32 nt, Homo Sapiens
uguagguugcuguaguuacagcgccuccgucu

SEQ ID NO: 325341 - RNA, 32 nt, Homo Sapiens
gacaaagcccaggccugucaagagacgcagag

SEQ ID NO: 325342 - RNA, 32 nt, Homo Sapiens
ugugaagaacagagguaccugaauucuguguc

SEQ ID NO: 325343 - RNA, 32 nt, Homo Sapiens
cagggaccuuugccgcgccuuccacgcgccgu

SEQ ID NO: 325344 - RNA, 32 nt, Homo Sapiens
gucaaggggcuuugcauucaaacugcuuuucc

SEQ ID NO: 325345 - RNA, 32 nt, Homo Sapiens
gguggcacgcucuguaaucccaaauacgcggu

SEQ ID NO: 325346 - RNA, 31 nt, Homo Sapiens
ucugugccaggaggcaccugaguucucugcu

SEQ ID NO: 325347 - RNA, 32 nt, Homo Sapiens
cacaaguucacagauuuacaugaacuugaucu

SEQ ID NO: 325348 - RNA, 32 nt, Homo Sapiens
agcauacuuaaaauaucucuaaaauagguaaa

SEQ ID NO: 325349 - RNA, 32 nt, Homo Sapiens
aaaguggcaguugauuaacauggaaggggaaa

SEQ ID NO: 325350 - RNA, 32 nt, Homo Sapiens
aguuauaaacaauuaaaagauacauaucaugu

SEQ ID NO: 325351 - RNA, 32 nt, Homo Sapiens
cucuuccagaaguucaagcagcagaaggagcu

SEQ ID NO: 325352 - RNA, 32 nt, Homo Sapiens
auguuuguuaaaaauaaaucccauggaauauu

SEQ ID NO: 325353 - RNA, 32 nt, Homo Sapiens
ccgggcagcuggacgugguggugcaggucugc

SEQ ID NO: 325354 - RNA, 32 nt, Homo Sapiens
cuccaauccagacggagaugccaggcacagcc

SEQ ID NO: 325355 - RNA, 32 nt, Homo Sapiens
gaggccgggagcgaauggaaaagcugaggcuu

SEQ ID NO: 325356 - RNA, 32 nt, Homo Sapiens
agagcgggcagcuucuuccagggcagcugugg

SEQ ID NO: 325357 - RNA, 32 nt, Homo Sapiens
ggagcugagaacucgcuugcuaccucacaucc

SEQ ID NO: 325358 - RNA, 32 nt, Homo Sapiens
cagugugcaugagcgugucugaagaugggggg

SEQ ID NO: 325359 - RNA, 32 nt, Homo Sapiens
ucuuuuuagggucaaaguuuaggguacaguug

SEQ ID NO: 325360 - RNA, 32 nt, Homo Sapiens
gauaucaggaccauccugcucucuauccagug

SEQ ID NO: 325361 - RNA, 32 nt, Homo Sapiens
ccugggaucugccccaccugacccguucuccc

SEQ ID NO: 325362 - RNA, 32 nt, Homo Sapiens
aaaucagcuggccaagugacuccauuugacuu

SEQ ID NO: 325363 - RNA, 32 nt, Homo Sapiens
gugguggcgggugccuguagucccagcugcuc

SEQ ID NO: 325364 - RNA, 32 nt, Homo Sapiens
cacacaaauacauauauagacacacauguaca

SEQ ID NO: 325365 - RNA, 27 nt, Homo Sapiens
cgauggggacaaaggcgcaagucgaga

SEQ ID NO: 325366 - RNA, 32 nt, Homo Sapiens
uuauaacuuccauuuuauuacuaauagcuuga

SEQ ID NO: 325367 - RNA, 32 nt, Homo Sapiens
ugccauucaagacuggagacaccugggaaaua

SEQ ID NO: 325368 - RNA, 32 nt, Homo Sapiens
ucuagcaaacguauuguuuccuuuaaaagcca

SEQ ID NO: 325369 - RNA, 32 nt, Homo Sapiens
acaucuaugcuugcguuugaaacuacaacuug

SEQ ID NO: 325370 - RNA, 32 nt, Homo Sapiens
gcccagggccgcguggugaaaucuggcagugg

SEQ ID NO: 325371 - RNA, 32 nt, Homo Sapiens
ggcagcgcccuuccucuccacccucccagacc

SEQ ID NO: 325372 - RNA, 32 nt, Homo Sapiens
caucaggagaaagaagcggcuaggacacacag

SEQ ID NO: 325373 - RNA, 32 nt, Homo Sapiens
uguucgcuucgccuccggccaagucgacagcc

SEQ ID NO: 325374 - RNA, 32 nt, Homo Sapiens
ggugggaucccacgcccccucccggccccucc

SEQ ID NO: 325375 - RNA, 30 nt, Homo Sapiens
uucucccaaauuggugcccaucuugucucu

SEQ ID NO: 325376 - RNA, 32 nt, Homo Sapiens
ugggcggccggcagccggcguuucuggugaug

SEQ ID NO: 325377 - RNA, 32 nt, Homo Sapiens
cugaggaggaaaccccacccuuuucuccucac

SEQ ID NO: 325378 - RNA, 32 nt, Homo Sapiens
caaucucauguuuguguuuucuuaguacuguc

SEQ ID NO: 325379 - RNA, 32 nt, Homo Sapiens
aucugagguggcauaauuuaaaaauauuuagc

SEQ ID NO: 325380 - RNA, 32 nt, Homo Sapiens
gcuguagaacacaacuaaaaacucaugucuuu

SEQ ID NO: 325381 - RNA, 32 nt, Homo Sapiens
gugcccagccuuuuuuuuuuuaauagaaaaaa

SEQ ID NO: 325382 - RNA, 32 nt, Homo Sapiens
ugaaauuagggugugucuuuuaaucaguugau

SEQ ID NO: 325383 - RNA, 32 nt, Homo Sapiens
uuucccggccuccagacacaaggcucgagguu

SEQ ID NO: 325384 - RNA, 32 nt, Homo Sapiens
auaaauacuauagaaaauuuagcaaugcagaa

SEQ ID NO: 325385 - RNA, 32 nt, Homo Sapiens
gccucucucccucucccuguccccaccccagc

SEQ ID NO: 325386 - RNA, 32 nt, Homo Sapiens
uuuccaguauaccucuucuggaugccauucuc

SEQ ID NO: 325387 - RNA, 32 nt, Homo Sapiens
gaacuuugauaaaugaagccauaucugagaau

SEQ ID NO: 325388 - RNA, 32 nt, Homo Sapiens
uauaucccauauauuuaauaugucaaaaaggg

SEQ ID NO: 325389 - RNA, 32 nt, Homo Sapiens
cccucaucccuaaaaaaguaaaacagacaagg

SEQ ID NO: 325390 - RNA, 32 nt, Homo Sapiens
uuuaucuuuucaauguuuuuuauucauagaug

SEQ ID NO: 325391 - RNA, 29 nt, Homo Sapiens
cagugcugggggauggggacgaggaugaa

SEQ ID NO: 325392 - RNA, 32 nt, Homo Sapiens
cugucaggccucaccccuccccugggacuuuc

SEQ ID NO: 325393 - RNA, 32 nt, Homo Sapiens
gcgcugaggcgggccgcguggagacgugaggc

SEQ ID NO: 325394 - RNA, 32 nt, Homo Sapiens
uuuaauuuggguugucugucuugucuucucau

SEQ ID NO: 325395 - RNA, 31 nt, Homo Sapiens
gccugaaggagcacacgucaggcaagacacg

SEQ ID NO: 325396 - RNA, 32 nt, Homo Sapiens
ggcuucgccccgaggagagcugacugcccugg

SEQ ID NO: 325397 - RNA, 32 nt, Homo Sapiens
gguccaggccgggguggggacguggguggguc

SEQ ID NO: 325398 - RNA, 32 nt, Homo Sapiens
aagccgaggaagagcguuuuggggacgggggc

SEQ ID NO: 325399 - RNA, 32 nt, Homo Sapiens
cgcugccccagcaccuucuccuccccagguua

SEQ ID NO: 325400 - RNA, 32 nt, Homo Sapiens
aagacacaaaaauuagacagguguggcacacg

SEQ ID NO: 325401 - RNA, 31 nt, Homo Sapiens
cuggcccuagccucuggcagagccuguuccu

SEQ ID NO: 325402 - RNA, 32 nt, Homo Sapiens
gauagguuaucuaacuaacacaaucauuuuuu

SEQ ID NO: 325403 - RNA, 32 nt, Homo Sapiens
guccccacccgcugcccuccccggccuuccaa

SEQ ID NO: 325404 - RNA, 32 nt, Homo Sapiens
guauuuccugaaacagaagaaaaugacaaagg

SEQ ID NO: 325405 - RNA, 32 nt, Homo Sapiens
cagucgccuagcaacagcgggacgcggagcga

SEQ ID NO: 325406 - RNA, 32 nt, Homo Sapiens
agccauuugaaugacuuguccauuccagugga

SEQ ID NO: 325407 - RNA, 32 nt, Homo Sapiens
ugcuccauuggcucucagcugcacucacagca

SEQ ID NO: 325408 - RNA, 32 nt, Homo Sapiens
cacccaccuuggucccggggcccuguaagccu

SEQ ID NO: 325409 - RNA, 32 nt, Homo Sapiens
aggucuucucugcaccaaccacucucugcaga

SEQ ID NO: 325410 - RNA, 32 nt, Homo Sapiens
uagcuuaacuuuuuuaguugacuugcauuugu

SEQ ID NO: 325411 - RNA, 32 nt, Homo Sapiens
gacuccugcacacgcuccuuccucugaggcug

SEQ ID NO: 325412 - RNA, 32 nt, Homo Sapiens
uccgcgccgcuaggaggacgcugugccuggcc

SEQ ID NO: 325413 - RNA, 32 nt, Homo Sapiens
gcacagcguggccacacccauauuuggcaacg

SEQ ID NO: 325414 - RNA, 32 nt, Homo Sapiens
aagaacaaaauguuucuuaauuuuauugugga

SEQ ID NO: 325415 - RNA, 31 nt, Homo Sapiens
ucauugaugcaaucacuagaugaugcuacua

SEQ ID NO: 325416 - RNA, 32 nt, Homo Sapiens
ucaacucugguuagaaacagguccucaggagu

SEQ ID NO: 325417 - RNA, 32 nt, Homo Sapiens
ucaugauuaguaccaaaccacuguacaaagaa

SEQ ID NO: 325418 - RNA, 32 nt, Homo Sapiens
gguuuuauccuuuccuuuaaaaacaguguuug

SEQ ID NO: 325419 - RNA, 32 nt, Homo Sapiens
cuucaguuuuguauguaguuggguuuuuugga

SEQ ID NO: 325420 - RNA, 32 nt, Homo Sapiens
auauaaaauggcaacugauagucaauuuugau

SEQ ID NO: 325421 - RNA, 32 nt, Homo Sapiens
gccaccagaggguggugccaagugccacaucc

SEQ ID NO: 325422 - RNA, 32 nt, Homo Sapiens
caucucaugccagaggguggagggauuuccgc

SEQ ID NO: 325423 - RNA, 32 nt, Homo Sapiens
agccugggccggcuccggagaaguuagacccu

SEQ ID NO: 325424 - RNA, 32 nt, Homo Sapiens
aucaucuugggaaagaaaaacagacuucauau

SEQ ID NO: 325425 - RNA, 32 nt, Homo Sapiens
aaaagaagaacaaaaaccauuuuuggaaauuu

SEQ ID NO: 325426 - RNA, 32 nt, Homo Sapiens
aucuuccuuggcuuuaagaaugugccauggaa

SEQ ID NO: 325427 - RNA, 32 nt, Homo Sapiens
uucaagugaaagauucuuccaggguuuuauuu

SEQ ID NO: 325428 - RNA, 32 nt, Homo Sapiens
cacaagucgcccuugacugcggcggccgcgag

SEQ ID NO: 325429 - RNA, 32 nt, Homo Sapiens
uauauaugcaguaccuuuuauacacagaaaua

SEQ ID NO: 325430 - RNA, 32 nt, Homo Sapiens
ccaucgauaaauggaagcugguuuugguuuuu

SEQ ID NO: 325431 - RNA, 32 nt, Homo Sapiens
cacacaggcccggcugcggagcgcagucgccc

SEQ ID NO: 325432 - RNA, 29 nt, Homo Sapiens
cuauagcggggacagcagcaugucaccac

SEQ ID NO: 325433 - RNA, 32 nt, Homo Sapiens
gauucaguucccuccuucuuacagaaguauuu

SEQ ID NO: 325434 - RNA, 32 nt, Homo Sapiens
cuggucagcugcgcccugcgggucgagaaugu

SEQ ID NO: 325435 - RNA, 29 nt, Homo Sapiens
acugacucauuggacugaaagcugaagua

SEQ ID NO: 325436 - RNA, 32 nt, Homo Sapiens
auauuagcuuugauggcagcauacaguguucu

SEQ ID NO: 325437 - RNA, 32 nt, Homo Sapiens
guucccugccuuguuuggauuggcacuguuug

SEQ ID NO: 325438 - RNA, 32 nt, Homo Sapiens
cuggagggaaaggguagcugagccugcucagg

SEQ ID NO: 325439 - RNA, 32 nt, Homo Sapiens
gaaaugaaaauauuuuaggauuuauucaaaaa

SEQ ID NO: 325440 - RNA, 32 nt, Homo Sapiens
aauacaaauacagcacuauauuugaguguaua

SEQ ID NO: 325441 - RNA, 32 nt, Homo Sapiens
ucacauugaagaaaaggguaggcacuaaaggg

SEQ ID NO: 325442 - RNA, 32 nt, Homo Sapiens
ugccccgagugcggcgaggccuucagccucag

SEQ ID NO: 325443 - RNA, 32 nt, Homo Sapiens
ggggcuugccagcagauacuucaucgucauca

SEQ ID NO: 325444 - RNA, 32 nt, Homo Sapiens
ucuucuuuauaaauuacccaguccugaguauu

SEQ ID NO: 325445 - RNA, 32 nt, Homo Sapiens
uggcgggagcccugggguagugucagagcggg

SEQ ID NO: 325446 - RNA, 27 nt, Homo Sapiens
gucaucuauggguucugguaguccugg

SEQ ID NO: 325447 - RNA, 32 nt, Homo Sapiens
cauacuaauguuuguuucuauaaaucaaauac

SEQ ID NO: 325448 - RNA, 32 nt, Homo Sapiens
ugcuuugagguuaaaggcuggcaccugugacc

SEQ ID NO: 325449 - RNA, 32 nt, Homo Sapiens
ggcccugccgugggcgcccccaaguauguccc

SEQ ID NO: 325450 - RNA, 31 nt, Homo Sapiens
uugaagcgugacugccugucugcagggagaa

SEQ ID NO: 325451 - RNA, 32 nt, Homo Sapiens
gagucugcagugagccgagaucaugccacugc

SEQ ID NO: 325452 - RNA, 32 nt, Homo Sapiens
aggcccugcuacauggcaacugcuacaacagg

SEQ ID NO: 325453 - RNA, 29 nt, Homo Sapiens
caucgaucuuccucacaccacaaaucuga

SEQ ID NO: 325454 - RNA, 32 nt, Homo Sapiens
uauguccuaucaucuguaaauauuccuauuac

SEQ ID NO: 325455 - RNA, 32 nt, Homo Sapiens
guguacacuguuacucagaucuacacaauugc

SEQ ID NO: 325456 - RNA, 32 nt, Homo Sapiens
agaagacuauguuuccucccuccuuuccuguc

SEQ ID NO: 325457 - RNA, 31 nt, Homo Sapiens
gaugggcccaagcguaaccaggcucuucuga

SEQ ID NO: 325458 - RNA, 32 nt, Homo Sapiens
cugcugccucuaccgcugcggcuaccgcggcg

SEQ ID NO: 325459 - RNA, 32 nt, Homo Sapiens
ugcggcucuccgccguccccagcccugccucu

SEQ ID NO: 325460 - RNA, 32 nt, Homo Sapiens
ggccugcuuggccugcccaucucggaucucuc

SEQ ID NO: 325461 - RNA, 32 nt, Homo Sapiens
ugucuccaacucccucacgagguggggcucag

SEQ ID NO: 325462 - RNA, 32 nt, Homo Sapiens
aagguccugggccugcccuuggguccugggga

SEQ ID NO: 325463 - RNA, 32 nt, Homo Sapiens
uugagggccuacugugugcaaaguguuucaug

SEQ ID NO: 325464 - RNA, 32 nt, Homo Sapiens
auuuuacaggcacaauuuucuggcuguagucc

SEQ ID NO: 325465 - RNA, 32 nt, Homo Sapiens
uaaaauugaagagauuucaacauaucauuuuu

SEQ ID NO: 325466 - RNA, 32 nt, Homo Sapiens
aacuccgccucccggguucaagcgauucucgu

SEQ ID NO: 325467 - RNA, 32 nt, Homo Sapiens
aaaugugaguaauuuuuaaaaauacaaucucc

SEQ ID NO: 325468 - RNA, 32 nt, Homo Sapiens
gggaggcagcuagcugcccagaggcaugcccc

SEQ ID NO: 325469 - RNA, 32 nt, Homo Sapiens
aggacgcggaaggcccugggggugcaguggag

SEQ ID NO: 325470 - RNA, 32 nt, Homo Sapiens
ccggcacuucuguggaccccuucuuaguucac

SEQ ID NO: 325471 - RNA, 32 nt, Homo Sapiens
uuaccaaaaaauuuucagaucacucauuuuca

SEQ ID NO: 325472 - RNA, 32 nt, Homo Sapiens
uguggcuuggacuuaaaauuuccuuuuaagcu

SEQ ID NO: 325473 - RNA, 32 nt, Homo Sapiens
guagaaaaaugcacuuacuaagaacaugaaaa

SEQ ID NO: 325474 - RNA, 32 nt, Homo Sapiens
uuucuuaaauauacuuuuuuuuuguucuagga

SEQ ID NO: 325475 - RNA, 31 nt, Homo Sapiens
agggcucauuugauguucuggaaauuugcca

SEQ ID NO: 325476 - RNA, 32 nt, Homo Sapiens
ccacguugcccaggcuggucuccagcuccuga

SEQ ID NO: 325477 - RNA, 32 nt, Homo Sapiens
ccauaagaugacuucagaaauccuacuucaga

SEQ ID NO: 325478 - RNA, 32 nt, Homo Sapiens
gggucacgaucaagagcagccuggcagcuagc

SEQ ID NO: 325479 - RNA, 32 nt, Homo Sapiens
auuacacacacacacacacacacacacacaca

SEQ ID NO: 325480 - RNA, 32 nt, Homo Sapiens
cuuaaaaaaaaauaaaaacauaaaaaaaaaaa

SEQ ID NO: 325481 - RNA, 32 nt, Homo Sapiens
cuuaggucaggaguuugagaccagccugacca

SEQ ID NO: 325482 - RNA, 32 nt, Homo Sapiens
uuggccuccccccaagaacuucccaugguaga

SEQ ID NO: 325483 - RNA, 32 nt, Homo Sapiens
ggugcgcccggcggagcgcgcgugcguggcca

SEQ ID NO: 325484 - RNA, 32 nt, Homo Sapiens
ugccuuucgugaacacauucuugguaaagaac

SEQ ID NO: 325485 - RNA, 32 nt, Homo Sapiens
cuuaaaaaaaaaaaaaucauggggguggggug

SEQ ID NO: 325486 - RNA, 32 nt, Homo Sapiens
augaauaaauguuauacauuguuauguccagu

SEQ ID NO: 325487 - RNA, 32 nt, Homo Sapiens
ccaaaauaccaugggauuuaugcuguauugac

SEQ ID NO: 325488 - RNA, 32 nt, Homo Sapiens
ggagacuggaggaagcgcuuccgggcggggaa

SEQ ID NO: 325489 - RNA, 32 nt, Homo Sapiens
ucggcuucaaggcgcugcugcugcucgggguc

SEQ ID NO: 325490 - RNA, 32 nt, Homo Sapiens
gcuccagccucgcccccuccccacgugcacca

SEQ ID NO: 325491 - RNA, 32 nt, Homo Sapiens
gagaagcccagagcuuccagcccccacuucga

SEQ ID NO: 325492 - RNA, 32 nt, Homo Sapiens
guuuaguguugcacuuuagacuggugucuguu

SEQ ID NO: 325493 - RNA, 32 nt, Homo Sapiens
ccacagcucuucucuccuucucucuucucuuc

SEQ ID NO: 325494 - RNA, 32 nt, Homo Sapiens
uugcaggcgugagccaccacgcccggccucca

SEQ ID NO: 325495 - RNA, 32 nt, Homo Sapiens
cugccagaccugcucuugcugcugcucaggua

SEQ ID NO: 325496 - RNA, 32 nt, Homo Sapiens
gucucagagaagaaacaaaaauuacuauuacc

SEQ ID NO: 325497 - RNA, 32 nt, Homo Sapiens
uuuauuuaauaaauuaaaaaguauuugaagcc

SEQ ID NO: 325498 - RNA, 32 nt, Homo Sapiens
ccuucagacuugcugcagaaucauuuuguauc

SEQ ID NO: 325499 - RNA, 32 nt, Homo Sapiens
cauguaaaauaguuaaugauuaucauuuacuu

SEQ ID NO: 325500 - RNA, 32 nt, Homo Sapiens
accuuguauguggcuggaggccucaggcuuag

SEQ ID NO: 325501 - RNA, 32 nt, Homo Sapiens
uucaggcuaauagagagguccagaugucacau

SEQ ID NO: 325502 - RNA, 32 nt, Homo Sapiens
guuguugcuuuuaacuccauggagagaccgaa

SEQ ID NO: 325503 - RNA, 32 nt, Homo Sapiens
aaccugugagaaaauauauggauauuauuuua

SEQ ID NO: 325504 - RNA, 31 nt, Homo Sapiens
uccaugguuccccagcuaucauuuuacuuua

SEQ ID NO: 325505 - RNA, 32 nt, Homo Sapiens
uucgccccacugacaagcacugcagaccucac

SEQ ID NO: 325506 - RNA, 32 nt, Homo Sapiens
ugggguugacauuuagaacuuuaagucucacc

SEQ ID NO: 325507 - RNA, 32 nt, Homo Sapiens
uuuacauguauuauuucauuauguaaaauguu

SEQ ID NO: 325508 - RNA, 32 nt, Homo Sapiens
cccuugggaacaacaugcuaaaugguauccag

SEQ ID NO: 325509 - RNA, 32 nt, Homo Sapiens
aaagaaauguaccaaucuccaaugacagaaua

SEQ ID NO: 325510 - RNA, 32 nt, Homo Sapiens
uauaucaucagcauaccuuuauugugaucuau

SEQ ID NO: 325511 - RNA, 32 nt, Homo Sapiens
caucuuucuccccgcuuccccagucuuuaaac

SEQ ID NO: 325512 - RNA, 31 nt, Homo Sapiens
caggguggcucugccaguccccgcgcgccug

SEQ ID NO: 325513 - RNA, 32 nt, Homo Sapiens
cuaaaagugucugauguuuuuacucaagaggg

SEQ ID NO: 325514 - RNA, 32 nt, Homo Sapiens
uccuagaagaucaacaccccaucagucuuagg

SEQ ID NO: 325515 - RNA, 32 nt, Homo Sapiens
ugcaggaaaugggaucucacuccaucacucag

SEQ ID NO: 325516 - RNA, 32 nt, Homo Sapiens
ugcuggagugauuuauacugugaaaugaguug

SEQ ID NO: 325517 - RNA, 32 nt, Homo Sapiens
aaaguagagggcuuguuaaagcacgggaugcu

SEQ ID NO: 325518 - RNA, 32 nt, Homo Sapiens
ccccucgccuucccuguucccaggcaagcucc

SEQ ID NO: 325519 - RNA, 32 nt, Homo Sapiens
gguaaauuugaaaaauaaaaaugacuuggcac

SEQ ID NO: 325520 - RNA, 32 nt, Homo Sapiens
ccgcggaguucgcggaggcaaggcccaggaua

SEQ ID NO: 325521 - RNA, 32 nt, Homo Sapiens
uuuaauauucuacucgagcuuuauggaagcca

SEQ ID NO: 325522 - RNA, 32 nt, Homo Sapiens
uccaucauucagaacagaggcuuuucccagau

SEQ ID NO: 325523 - RNA, 32 nt, Homo Sapiens
guagaaggagaugccuccugcuucauagucca

SEQ ID NO: 325524 - RNA, 32 nt, Homo Sapiens
ccccuucacaguguugauugcuauuagcauga

SEQ ID NO: 325525 - RNA, 32 nt, Homo Sapiens
uguauguccguagggcuuuguacaucacucuu

SEQ ID NO: 325526 - RNA, 32 nt, Homo Sapiens
agaaaccccuuauugauguauuucauggcacu

SEQ ID NO: 325527 - RNA, 32 nt, Homo Sapiens
uaguguaaacacaagccuaggacauggacuag

SEQ ID NO: 325528 - RNA, 32 nt, Homo Sapiens
ccucgccaacggccgcacggugacguugccgu

SEQ ID NO: 325529 - RNA, 32 nt, Homo Sapiens
acugucagcacucuccagcaucaucuggcugu

SEQ ID NO: 325530 - RNA, 32 nt, Homo Sapiens
aagugucugucaacaaauacaccaaaaccauu

SEQ ID NO: 325531 - RNA, 32 nt, Homo Sapiens
agcuuuucuuugauugucucugcuuuagcguc

SEQ ID NO: 325532 - RNA, 32 nt, Homo Sapiens
aaugugccacgagcuccaacacgaccaucgua

SEQ ID NO: 325533 - RNA, 32 nt, Homo Sapiens
cauuugguucauuaauucuauaaggccauaaa

SEQ ID NO: 325534 - RNA, 32 nt, Homo Sapiens
cuaaguaauuauaucugucauuauugcccuga

SEQ ID NO: 325535 - RNA, 32 nt, Homo Sapiens
ugggaccuguuggcagaagggaaugucacucc

SEQ ID NO: 325536 - RNA, 32 nt, Homo Sapiens
cuguaaugccuucucaccucuucccaaucaag

SEQ ID NO: 325537 - RNA, 32 nt, Homo Sapiens
ucuaauuucuauuuuccagaaauuucucaaaa

SEQ ID NO: 325538 - RNA, 32 nt, Homo Sapiens
ucuuaagauauauuuuuuaaacuuuuuauacc

SEQ ID NO: 325539 - RNA, 32 nt, Homo Sapiens
uuuggaaauuuaucuuccuuugauuuuauuua

SEQ ID NO: 325540 - RNA, 32 nt, Homo Sapiens
guaaguuaaaagauuaugauaaacucagaaaa

SEQ ID NO: 325541 - RNA, 32 nt, Homo Sapiens
ggcuuagucaacaugggucgcucgggaaaguu

SEQ ID NO: 325542 - RNA, 32 nt, Homo Sapiens
gcuggacugagccccucacgccgcccugcagc

SEQ ID NO: 325543 - RNA, 32 nt, Homo Sapiens
agggggaaaugggaaacccgggccagagcagc

SEQ ID NO: 325544 - RNA, 32 nt, Homo Sapiens
gcucaggccccggugcauuggagccuuccgca

SEQ ID NO: 325545 - RNA, 32 nt, Homo Sapiens
guguuuucuggggauguuaacaugggauucag

SEQ ID NO: 325546 - RNA, 32 nt, Homo Sapiens
guaaauauugacuuuuucucuuuuuuauuugg

SEQ ID NO: 325547 - RNA, 32 nt, Homo Sapiens
ugugcgcagggcccggcaccggacugggaccc

SEQ ID NO: 325548 - RNA, 32 nt, Homo Sapiens
caaggcagagagccagcagagaggggugaaug

SEQ ID NO: 325549 - RNA, 32 nt, Homo Sapiens
ugaauguaggauggguucaacugcacaaaagg

SEQ ID NO: 325550 - RNA, 32 nt, Homo Sapiens
guccauccuggagacccugaggucuaagcuac

SEQ ID NO: 325551 - RNA, 32 nt, Homo Sapiens
gaauuuggaaaacugcaaugaguuuuuuacuu

SEQ ID NO: 325552 - RNA, 32 nt, Homo Sapiens
ugaagcucugccucuggcuuuccggucauggg

SEQ ID NO: 325553 - RNA, 32 nt, Homo Sapiens
agaaggugaauuccaauaccaaaagauuuuua

SEQ ID NO: 325554 - RNA, 32 nt, Homo Sapiens
uggugucuggaaggcuuagaugcauuggcucc

SEQ ID NO: 325555 - RNA, 32 nt, Homo Sapiens
gggggcgcuucccuuccagcaucaccugcagc

SEQ ID NO: 325556 - RNA, 32 nt, Homo Sapiens
gguggggaacacgaggccugggccucugggag

SEQ ID NO: 325557 - RNA, 32 nt, Homo Sapiens
acuacgcauuauauauuuaaauccauugcuuu

SEQ ID NO: 325558 - RNA, 32 nt, Homo Sapiens
guuccagcccaccugcccuccccuuuuucggg

SEQ ID NO: 325559 - RNA, 32 nt, Homo Sapiens
uagaaaugauaacuaagaucacaaugacugug

SEQ ID NO: 325560 - RNA, 32 nt, Homo Sapiens
uugagaaaauuugaaucucaaaacaaaaauuu

SEQ ID NO: 325561 - RNA, 32 nt, Homo Sapiens
aaucgcucggccucccccaucccccggguaac

SEQ ID NO: 325562 - RNA, 32 nt, Homo Sapiens
gaauaucagcaauuagaagacgauaaacuuuc

SEQ ID NO: 325563 - RNA, 32 nt, Homo Sapiens
uugaugcuaccucacaacacaaacagguaguu

SEQ ID NO: 325564 - RNA, 32 nt, Homo Sapiens
caacucccuaucccauccccagccuccacccc

SEQ ID NO: 325565 - RNA, 32 nt, Homo Sapiens
uuccuggggcgcuugcucugugcccggccagg

SEQ ID NO: 325566 - RNA, 32 nt, Homo Sapiens
auuauugaguuaacauuugauuauacaaacua

SEQ ID NO: 325567 - RNA, 32 nt, Homo Sapiens
ggagucccagacucauaggucccggcccagcc

SEQ ID NO: 325568 - RNA, 32 nt, Homo Sapiens
aagcagcgccugccuccucccuccugggucuu

SEQ ID NO: 325569 - RNA, 32 nt, Homo Sapiens
cugugcuaggggcgggaguucuuccagacucu

SEQ ID NO: 325570 - RNA, 32 nt, Homo Sapiens
cuuaucucugcugucacccccaacauggccac

SEQ ID NO: 325571 - RNA, 32 nt, Homo Sapiens
uccccagcccgcccgggagcugcgagccgcga

SEQ ID NO: 325572 - RNA, 32 nt, Homo Sapiens
ggcgggaggaggagaggccuguagcacccauu

SEQ ID NO: 325573 - RNA, 32 nt, Homo Sapiens
aauggauguuuccuuucuaauccacauuuauu

SEQ ID NO: 325574 - RNA, 32 nt, Homo Sapiens
uuaucagaauguuuuucuuaaccucagcguau

SEQ ID NO: 325575 - RNA, 32 nt, Homo Sapiens
uccuggcccuguucuccuccccaagucggcac

SEQ ID NO: 325576 - RNA, 32 nt, Homo Sapiens
uucuucugcuagaaccucauaccuguucuagu

SEQ ID NO: 325577 - RNA, 32 nt, Homo Sapiens
cuccuuuaaaaaaacaaacaaacaaaaaaaac

SEQ ID NO: 325578 - RNA, 32 nt, Homo Sapiens
uguaguacaacagugacaguuaugacaggcuu

SEQ ID NO: 325579 - RNA, 32 nt, Homo Sapiens
aucccucggggcggggguguguggucaggcug

SEQ ID NO: 325580 - RNA, 32 nt, Homo Sapiens
ucuuaagugauaucuucugauuuuuuaaauga

SEQ ID NO: 325581 - RNA, 32 nt, Homo Sapiens
uuauguuggaauaauuuuuaaauaauguuuac

SEQ ID NO: 325582 - RNA, 32 nt, Homo Sapiens
gugggagcugccuguucagcuccagcucacca

SEQ ID NO: 325583 - RNA, 32 nt, Homo Sapiens
cccaugcccucccugcugccaggcucccacug

SEQ ID NO: 325584 - RNA, 32 nt, Homo Sapiens
uggcccagacgaacagcuugugcgagacucug

SEQ ID NO: 325585 - RNA, 32 nt, Homo Sapiens
ugaucguguauuuauuuuuuuacuuccucagc

SEQ ID NO: 325586 - RNA, 32 nt, Homo Sapiens
uguuuugcuguuauucacuaguucuuaacauu

SEQ ID NO: 325587 - RNA, 32 nt, Homo Sapiens
gacgauucugggcagugucguccccagagguc

SEQ ID NO: 325588 - RNA, 32 nt, Homo Sapiens
gggcaucuguuuaggucccaauaaggaagguc

SEQ ID NO: 325589 - RNA, 32 nt, Homo Sapiens
gucucaaauguggagaagcauuuuggagaacu

SEQ ID NO: 325590 - RNA, 32 nt, Homo Sapiens
uggcagaagcgagaaaacuuuguuuauugaaa

SEQ ID NO: 325591 - RNA, 32 nt, Homo Sapiens
ugccauccagacaugguuuuucccuccagggg

SEQ ID NO: 325592 - RNA, 32 nt, Homo Sapiens
auccgagcgacggcuccuccccgauccccgac

SEQ ID NO: 325593 - RNA, 32 nt, Homo Sapiens
cuucugaccuccagugccgccggccucaagau

SEQ ID NO: 325594 - RNA, 32 nt, Homo Sapiens
ugauaugaaaauaucuggguuuuucuuuugau

SEQ ID NO: 325595 - RNA, 32 nt, Homo Sapiens
uccccucugaccuccagaccagauggggcaug

SEQ ID NO: 325596 - RNA, 32 nt, Homo Sapiens
auuccucaaguuaugaaauacuuuuguacuua

SEQ ID NO: 325597 - RNA, 32 nt, Homo Sapiens
aaaucaacacauuuuucuuucucgucuugaga

SEQ ID NO: 325598 - RNA, 32 nt, Homo Sapiens
agccccagucccacccagcacaccugggcgag

SEQ ID NO: 325599 - RNA, 32 nt, Homo Sapiens
gguucaagaaauucuccugccuuagccuccca

SEQ ID NO: 325600 - RNA, 32 nt, Homo Sapiens
uuuccuacauucaaaauaguaguaacaaauau

SEQ ID NO: 325601 - RNA, 32 nt, Homo Sapiens
uuuuauuguuuaaaaaucacagucaaagcuuc

SEQ ID NO: 325602 - RNA, 32 nt, Homo Sapiens
uacaaacagcuucacacacacacacacacaca

SEQ ID NO: 325603 - RNA, 32 nt, Homo Sapiens
gggaugugcuuugagaucccuccccggaggcu

SEQ ID NO: 325604 - RNA, 32 nt, Homo Sapiens
ggugccgaguguuugggugcagacacaggcag

SEQ ID NO: 325605 - RNA, 32 nt, Homo Sapiens
aaggcgcggaggaggggcccuggccgugggga

SEQ ID NO: 325606 - RNA, 29 nt, Homo Sapiens
aguguguaaaguuuuuauauuuucacaau

SEQ ID NO: 325607 - RNA, 32 nt, Homo Sapiens
gugcucccugcagcugccaucggcccgcuuug

SEQ ID NO: 325608 - RNA, 30 nt, Homo Sapiens
ucugaguuggugaugggggagcuccacgcu

SEQ ID NO: 325609 - RNA, 32 nt, Homo Sapiens
uugggagucagagagauaacaaugaaaucccc

SEQ ID NO: 325610 - RNA, 32 nt, Homo Sapiens
cgcgcagcccucggggcaucucagugccucac

SEQ ID NO: 325611 - RNA, 32 nt, Homo Sapiens
gguuaacccaccccccagcaagggacuggacg

SEQ ID NO: 325612 - RNA, 32 nt, Homo Sapiens
ucucccugcccccgcgacuucgcgcaagaucc

SEQ ID NO: 325613 - RNA, 32 nt, Homo Sapiens
agccaggugcgguggcucacgucuguaauccc

SEQ ID NO: 325614 - RNA, 32 nt, Homo Sapiens
cagaaaacuguaauuccuggaaccugcugcgu

SEQ ID NO: 325615 - RNA, 31 nt, Homo Sapiens
ggcuccugaagcuagaaccagguuuggauaa

SEQ ID NO: 325616 - RNA, 32 nt, Homo Sapiens
acuacagccucccaacucccaggcucaaauga

SEQ ID NO: 325617 - RNA, 32 nt, Homo Sapiens
ccauguccacugacugcaucgaucgcugguua

SEQ ID NO: 325618 - RNA, 32 nt, Homo Sapiens
ucaucugauacggacuuaauaaagguugauuu

SEQ ID NO: 325619 - RNA, 32 nt, Homo Sapiens
auucucugugguuuuuuuugaauccaaaucug

SEQ ID NO: 325620 - RNA, 32 nt, Homo Sapiens
aagaaguuaaauuuauuucagggcaucaaauu

SEQ ID NO: 325621 - RNA, 32 nt, Homo Sapiens
aaaaaaauuauucuccaguccccucccacuuu

SEQ ID NO: 325622 - RNA, 32 nt, Homo Sapiens
gcaggagccgagggacccgcgcggcugcggcc

SEQ ID NO: 325623 - RNA, 32 nt, Homo Sapiens
cucgcugggucuggcgagccaagccccucggg

SEQ ID NO: 325624 - RNA, 32 nt, Homo Sapiens
uagcagucauuucccaaauuuaggagacaaug

SEQ ID NO: 325625 - RNA, 32 nt, Homo Sapiens
uuucuucuuuugccugcgcuguucuauuucuc

SEQ ID NO: 325626 - RNA, 30 nt, Homo Sapiens
gugcugcugccgcugccgccggggaggagg

SEQ ID NO: 325627 - RNA, 32 nt, Homo Sapiens
agaagaaccugauguuuccugacugcuuucuc

SEQ ID NO: 325628 - RNA, 32 nt, Homo Sapiens
ggcuuucgcaucggagacgugucuuuaggaag

SEQ ID NO: 325629 - RNA, 32 nt, Homo Sapiens
gugggagccuaggucaggccccugcccacugc

SEQ ID NO: 325630 - RNA, 32 nt, Homo Sapiens
uuauuacaguguaaguuuuucaaguggaaucu

SEQ ID NO: 325631 - RNA, 32 nt, Homo Sapiens
uccguaaaugucauuugugauuuugacuuauu

SEQ ID NO: 325632 - RNA, 32 nt, Homo Sapiens
cgauacuggcagccauugcagcuccaaacugc

SEQ ID NO: 325633 - RNA, 32 nt, Homo Sapiens
ucucagggaagccuugaaaaccacggaggugg

SEQ ID NO: 325634 - RNA, 32 nt, Homo Sapiens
ggguuggagcagcuguccaaggcccggcgccg

SEQ ID NO: 325635 - RNA, 32 nt, Homo Sapiens
gcaaaguuguguuugaaagauacucuauuaaa

SEQ ID NO: 325636 - RNA, 32 nt, Homo Sapiens
ccugcuccaucccaccuuccuuucugcugccu

SEQ ID NO: 325637 - RNA, 32 nt, Homo Sapiens
agggacauuguguaccucaguugugucacaug

SEQ ID NO: 325638 - RNA, 32 nt, Homo Sapiens
uuaacagaagucuuauaaaaauuuaaaaagac

SEQ ID NO: 325639 - RNA, 32 nt, Homo Sapiens
ucaacguggggauaugucaucugugaaccaug

SEQ ID NO: 325640 - RNA, 32 nt, Homo Sapiens
cugccuggggcccuggcuagccugcagauaac

SEQ ID NO: 325641 - RNA, 32 nt, Homo Sapiens
acugcucucugcaaguaguuaaacuagaaacu

SEQ ID NO: 325642 - RNA, 32 nt, Homo Sapiens
aacacugaagggcaaggaggcuaaacaaaguu

SEQ ID NO: 325643 - RNA, 32 nt, Homo Sapiens
uucucuagggagaaaaauuaauuuacuagaaa

SEQ ID NO: 325644 - RNA, 30 nt, Homo Sapiens
ggcgcuaaucccggcgcggguuccgcugac

SEQ ID NO: 325645 - RNA, 32 nt, Homo Sapiens
gaucagcaguggcauuagauucuuauagaagc

SEQ ID NO: 325646 - RNA, 32 nt, Homo Sapiens
uucugagguucagagaggguaaguaacuuccu

SEQ ID NO: 325647 - RNA, 32 nt, Homo Sapiens
caccaugugaaugccaacauggccaggucauu

SEQ ID NO: 325648 - RNA, 32 nt, Homo Sapiens
gggucuggaccgccuccuccgugguggacgaa

SEQ ID NO: 325649 - RNA, 32 nt, Homo Sapiens
cuugucugaauacaauccuacagcagcaggag

SEQ ID NO: 325650 - RNA, 32 nt, Homo Sapiens
accugggccccgagaaacaaaagcgaagauga

SEQ ID NO: 325651 - RNA, 32 nt, Homo Sapiens
cggaagggcuuugguuccuucucugggucuga

SEQ ID NO: 325652 - RNA, 32 nt, Homo Sapiens
aguuacugagcuuccuuauguuucacacauug

SEQ ID NO: 325653 - RNA, 32 nt, Homo Sapiens
agaagcugaagcacaagaauugcuugaacccu

SEQ ID NO: 325654 - RNA, 32 nt, Homo Sapiens
ggugaagacaggguucgugggaggcggcccaa

SEQ ID NO: 325655 - RNA, 32 nt, Homo Sapiens
aggcccagggcaggggugggcguguuguuugc

SEQ ID NO: 325656 - RNA, 32 nt, Homo Sapiens
uacuugguggguuuuucuccguaugcacauug

SEQ ID NO: 325657 - RNA, 32 nt, Homo Sapiens
ccuccguuccuccucagccucccuuugccagc

SEQ ID NO: 325658 - RNA, 32 nt, Homo Sapiens
cuuuggguccccaagaguuggcucuuggaugu

SEQ ID NO: 325659 - RNA, 32 nt, Homo Sapiens
cuggacauauccuggaccaggcuuuucugcug

SEQ ID NO: 325660 - RNA, 32 nt, Homo Sapiens
aauucauccugcuccuucuaauaaaaauggau

SEQ ID NO: 325661 - RNA, 32 nt, Homo Sapiens
uguuaagguucaagaaucaauacuuucaaccc

SEQ ID NO: 325662 - RNA, 32 nt, Homo Sapiens
acuuguuuaaacauucacaucugaauuucucu

SEQ ID NO: 325663 - RNA, 32 nt, Homo Sapiens
ugguacaucuaaacucccuccauccugacuca

SEQ ID NO: 325664 - RNA, 32 nt, Homo Sapiens
cuggcgucagcuacuucuuuccuuaauguuuu

SEQ ID NO: 325665 - RNA, 32 nt, Homo Sapiens
caggcacgcgccauccuaccuugcuuggaaga

SEQ ID NO: 325666 - RNA, 32 nt, Homo Sapiens
ccacagccugcgccccgugagccgaggcgggu

SEQ ID NO: 325667 - RNA, 32 nt, Homo Sapiens
auccucccaagcagagaccuugcugaagcucc

SEQ ID NO: 325668 - RNA, 32 nt, Homo Sapiens
ucaguuggaaaaccuuuucaggcccucagucu

SEQ ID NO: 325669 - RNA, 32 nt, Homo Sapiens
uuuucugcagcuuuuaguuuggaaaaaauauu

SEQ ID NO: 325670 - RNA, 32 nt, Homo Sapiens
ugagcucugggccaugagaggguagguccaga

SEQ ID NO: 325671 - RNA, 32 nt, Homo Sapiens
gggagcccaagccuccgcaccggauuccggag

SEQ ID NO: 325672 - RNA, 32 nt, Homo Sapiens
aguguacacagaaagauauuuuuuacaguacc

SEQ ID NO: 325673 - RNA, 32 nt, Homo Sapiens
cucccuccgagcgcuccgccguugcccgccug

SEQ ID NO: 325674 - RNA, 32 nt, Homo Sapiens
ccuuuuuguaggagguaggauauuuuauauuc

SEQ ID NO: 325675 - RNA, 32 nt, Homo Sapiens
caggagagggaagaugggagccagggcaagau

SEQ ID NO: 325676 - RNA, 32 nt, Homo Sapiens
cgaaagccaugucugccgccagcccugcugug

SEQ ID NO: 325677 - RNA, 32 nt, Homo Sapiens
auccuggacugcuugugucagauucacacagg

SEQ ID NO: 325678 - RNA, 32 nt, Homo Sapiens
cuuguccacagauaauguaaacaaaggaggga

SEQ ID NO: 325679 - RNA, 32 nt, Homo Sapiens
auuuucuacuucugcaauuaaauauucuuuag

SEQ ID NO: 325680 - RNA, 32 nt, Homo Sapiens
uagcuggggcuacagcuaugcgccaccaugcc

SEQ ID NO: 325681 - RNA, 32 nt, Homo Sapiens
gcuucuaauaaguguuuuuucuuucuuuuuug

SEQ ID NO: 325682 - RNA, 32 nt, Homo Sapiens
agcuuuuggggucccgccccacagcagugucu

SEQ ID NO: 325683 - RNA, 32 nt, Homo Sapiens
cacauuccgucgccuugccgccgcccggcccc

SEQ ID NO: 325684 - RNA, 32 nt, Homo Sapiens
cuccugagcaccccuccaagggccuaaaauca

SEQ ID NO: 325685 - RNA, 32 nt, Homo Sapiens
gcuuaugccuucuuugggcagacgugcagaga

SEQ ID NO: 325686 - RNA, 32 nt, Homo Sapiens
uaaacaaaacaaaucaacggaacacuaucuca

SEQ ID NO: 325687 - RNA, 32 nt, Homo Sapiens
cuacagucaauccugcucuguuugccucauuu

SEQ ID NO: 325688 - RNA, 32 nt, Homo Sapiens
auccggagugagcaauggaguggcugccaugg

SEQ ID NO: 325689 - RNA, 32 nt, Homo Sapiens
uuuugagauuauauuugaauguaaucuugcag

SEQ ID NO: 325690 - RNA, 32 nt, Homo Sapiens
acucgacccagaauggagccugcucuccgcgc

SEQ ID NO: 325691 - RNA, 32 nt, Homo Sapiens
gcguccgcgcgccucucuccgcgcgcaccccc

SEQ ID NO: 325692 - RNA, 32 nt, Homo Sapiens
aagcaacccagcgcgccgcccgcuccucacgu

SEQ ID NO: 325693 - RNA, 32 nt, Homo Sapiens
ucagugagauuaaguauaaacaguuuuuggca

SEQ ID NO: 325694 - RNA, 32 nt, Homo Sapiens
ucccuccugacucagacucaccgcgaugcauu

SEQ ID NO: 325695 - RNA, 32 nt, Homo Sapiens
uucuauuucuucaaaaagacuguaugccugug

SEQ ID NO: 325696 - RNA, 32 nt, Homo Sapiens
uccgaggggcccccggguccccggcaccaugg

SEQ ID NO: 325697 - RNA, 32 nt, Homo Sapiens
aagucacgaggcugggggcggccggcggcgaa

SEQ ID NO: 325698 - RNA, 32 nt, Homo Sapiens
ugcgcucuggccgcucaggccgugcggcuggg

SEQ ID NO: 325699 - RNA, 32 nt, Homo Sapiens
gcccugccgggcggcgagcuaggcggcagcgg

SEQ ID NO: 325700 - RNA, 32 nt, Homo Sapiens
ugaccuagacgaguggugggcgcagcaguucc

SEQ ID NO: 325701 - RNA, 32 nt, Homo Sapiens
ccccgacggccgcggucagccggcauuccgga

SEQ ID NO: 325702 - RNA, 32 nt, Homo Sapiens
uuuaauuuacuuuuuuauuugucauuuucuuc

SEQ ID NO: 325703 - RNA, 32 nt, Homo Sapiens
agagaugucauggguuuugaggaggccacaga

SEQ ID NO: 325704 - RNA, 32 nt, Homo Sapiens
gucccguuuucccgucgcacgugguggccacu

SEQ ID NO: 325705 - RNA, 32 nt, Homo Sapiens
uugugggggaaaauaugcaucuguaaagaauc

SEQ ID NO: 325706 - RNA, 32 nt, Homo Sapiens
gcucccugcccccugucaacacauggaacgga

SEQ ID NO: 325707 - RNA, 32 nt, Homo Sapiens
uagggacaagauacucacuaggaccaggaagg

SEQ ID NO: 325708 - RNA, 32 nt, Homo Sapiens
gaauuacuuuugcucuucucacgaucccauau

SEQ ID NO: 325709 - RNA, 32 nt, Homo Sapiens
gucuaguggugaugaaguccaggugcuguuag

SEQ ID NO: 325710 - RNA, 32 nt, Homo Sapiens
aauguguguuccugcuuuucuaauggauauuu

SEQ ID NO: 325711 - RNA, 32 nt, Homo Sapiens
cagguauaugaggccuguggccccacgugucc

SEQ ID NO: 325712 - RNA, 30 nt, Homo Sapiens
ccccaauguuugucaugggugugaaccaug

SEQ ID NO: 325713 - RNA, 32 nt, Homo Sapiens
acuguguguccuuguguaaauaaacuuguuuc

SEQ ID NO: 325714 - RNA, 32 nt, Homo Sapiens
uuaguagccuuacugugaaggaauaauuaaga

SEQ ID NO: 325715 - RNA, 32 nt, Homo Sapiens
uuacaggcuggguauauuugcuucaauaugua

SEQ ID NO: 325716 - RNA, 32 nt, Homo Sapiens
uguuugaugaaucuuuuaaaaaacagaggagg

SEQ ID NO: 325717 - RNA, 32 nt, Homo Sapiens
ccccagccccacucauuuaaauaauacaauca

SEQ ID NO: 325718 - RNA, 32 nt, Homo Sapiens
guguuagguccuuggcacuuuccuucuuuucc

SEQ ID NO: 325719 - RNA, 32 nt, Homo Sapiens
ucuggaugaucuuuauacuaauugcagcuuuc

SEQ ID NO: 325720 - RNA, 32 nt, Homo Sapiens
cgaguucguggucacugcacuccagccuggcu

SEQ ID NO: 325721 - RNA, 32 nt, Homo Sapiens
cugccuaccugggccuggccagcaggcagggc

SEQ ID NO: 325722 - RNA, 30 nt, Homo Sapiens
ccagcucguuuccagcaccaugucggugcg

SEQ ID NO: 325723 - RNA, 32 nt, Homo Sapiens
cgcuuccucaggugcccuaucccgcgcagaag

SEQ ID NO: 325724 - RNA, 32 nt, Homo Sapiens
aagcccgcguuaaaggggcaaccgggacccug

SEQ ID NO: 325725 - RNA, 32 nt, Homo Sapiens
cauacugacuguagaauuaaaaaacaaagcua

SEQ ID NO: 325726 - RNA, 32 nt, Homo Sapiens
ugcacacacccuccccaccaguggggaccuga

SEQ ID NO: 325727 - RNA, 32 nt, Homo Sapiens
ugcccaaaaauauaauauagaacuaauugcua

SEQ ID NO: 325728 - RNA, 32 nt, Homo Sapiens
uuaggaacuuuuuuguuugaaugaaugucaca

SEQ ID NO: 325729 - RNA, 32 nt, Homo Sapiens
uuuaucauauucucuuuuuuucuuauugcuua

SEQ ID NO: 325730 - RNA, 32 nt, Homo Sapiens
gucuucaaguaaguaaaacauacaucguagcu

SEQ ID NO: 325731 - RNA, 32 nt, Homo Sapiens
gcaagguagugggccuaagggguuuugguugu

SEQ ID NO: 325732 - RNA, 32 nt, Homo Sapiens
gaagaacaaaacaaaauaaaaacagagcccua

SEQ ID NO: 325733 - RNA, 32 nt, Homo Sapiens
uauuccgucaauaaaaaagacuugcuuccagg

SEQ ID NO: 325734 - RNA, 32 nt, Homo Sapiens
auaagauucuuacuuaaacuuggucuucuuuc

SEQ ID NO: 325735 - RNA, 32 nt, Homo Sapiens
auuugucuauuuucaaauuugcuggaguguuc

SEQ ID NO: 325736 - RNA, 32 nt, Homo Sapiens
ggagugcuagcugagggugguugcuggggugg

SEQ ID NO: 325737 - RNA, 32 nt, Homo Sapiens
cagauccucacagguguugugacuuauucguc

SEQ ID NO: 325738 - RNA, 32 nt, Homo Sapiens
gucaaaaaaugaaguuucgguaaugcauagua

SEQ ID NO: 325739 - RNA, 32 nt, Homo Sapiens
cggcuggccgggcggaggggcuccucacuucc

SEQ ID NO: 325740 - RNA, 32 nt, Homo Sapiens
ugaggccgcugccgcugcugcaggggcaccca

SEQ ID NO: 325741 - RNA, 32 nt, Homo Sapiens
guuacacaaagcaguaaaguuuuugagaacua

SEQ ID NO: 325742 - RNA, 32 nt, Homo Sapiens
auacccccauucuuccauuuuuacucagucuc

SEQ ID NO: 325743 - RNA, 32 nt, Homo Sapiens
uuuaauugaaaagaaguagugucuggaucagu

SEQ ID NO: 325744 - RNA, 32 nt, Homo Sapiens
ccucuggaaagcauuccccauccaucacuccc

SEQ ID NO: 325745 - RNA, 32 nt, Homo Sapiens
gucccgcucucaucaaauguagcuuuaaaaga

SEQ ID NO: 325746 - RNA, 32 nt, Homo Sapiens
cgcuggggugcggccuggcugugggcaaagga

SEQ ID NO: 325747 - RNA, 32 nt, Homo Sapiens
ccccagacugguugcagcugggcuugaggggc

SEQ ID NO: 325748 - RNA, 31 nt, Homo Sapiens
auaguauggugcuaccucugaguuaauuaag

SEQ ID NO: 325749 - RNA, 32 nt, Homo Sapiens
uaggaauaucuucuacuaauucuuaaaacugg

SEQ ID NO: 325750 - RNA, 32 nt, Homo Sapiens
auauuuuagucauuuguaaaucucuucauaca

SEQ ID NO: 325751 - RNA, 32 nt, Homo Sapiens
gccuugugcauguccauagugaggcuacagau

SEQ ID NO: 325752 - RNA, 32 nt, Homo Sapiens
ucgaaacgcacgggcagggacacacacgacac

SEQ ID NO: 325753 - RNA, 32 nt, Homo Sapiens
gucauuuucuuuucuuuuuuugguacaauuac

SEQ ID NO: 325754 - RNA, 32 nt, Homo Sapiens
uuguuuugauuuucauuuuuuauuaagaaaaa

SEQ ID NO: 325755 - RNA, 32 nt, Homo Sapiens
acuuuaaaaauauuuuaaauggacuuugggga

SEQ ID NO: 325756 - RNA, 32 nt, Homo Sapiens
ugcaccccaaggaaagaaaaugagggguugca

SEQ ID NO: 325757 - RNA, 32 nt, Homo Sapiens
cagaaucaugagaaaaacguaguuuggggcug

SEQ ID NO: 325758 - RNA, 30 nt, Homo Sapiens
cucguuugcaaaaugggggcgauaacagag

SEQ ID NO: 325759 - RNA, 32 nt, Homo Sapiens
gagaacacauauuuucuguuuccucccuugcc

SEQ ID NO: 325760 - RNA, 32 nt, Homo Sapiens
guguuucccuccagcccuggccuccugcccuu

SEQ ID NO: 325761 - RNA, 32 nt, Homo Sapiens
agauugugaaagcucacagggguguuuuuugg

SEQ ID NO: 325762 - RNA, 32 nt, Homo Sapiens
cauuguucgccgccgccgccgccgcgcggggc

SEQ ID NO: 325763 - RNA, 32 nt, Homo Sapiens
cucuacaggcaaauggaauugcuuuuccauaa

SEQ ID NO: 325764 - RNA, 32 nt, Homo Sapiens
aauaacauuaacacuucaauagcaaucacauc

SEQ ID NO: 325765 - RNA, 32 nt, Homo Sapiens
cuggcccauuacauugaugacauuaugcugau

SEQ ID NO: 325766 - RNA, 32 nt, Homo Sapiens
uuuuucuguuuuuacaguggaaucuaggaggc

SEQ ID NO: 325767 - RNA, 32 nt, Homo Sapiens
ggccugaaagcaauuuauaacauaugagucuu

SEQ ID NO: 325768 - RNA, 32 nt, Homo Sapiens
aaaaaggccccucuccaucccucuuuucuuuu

SEQ ID NO: 325769 - RNA, 32 nt, Homo Sapiens
gaauguugcacaaggguugugaaugugaaagg

SEQ ID NO: 325770 - RNA, 32 nt, Homo Sapiens
aucuggcagccccaggccugguccugggugca

SEQ ID NO: 325771 - RNA, 32 nt, Homo Sapiens
gugaggcaggccuagcaguucccuuaccugaa

SEQ ID NO: 325772 - RNA, 32 nt, Homo Sapiens
agugagauacucagggcguuguuaacagggag

SEQ ID NO: 325773 - RNA, 32 nt, Homo Sapiens
cuguuuccggagguccgcuucccggcccccag

SEQ ID NO: 325774 - RNA, 32 nt, Homo Sapiens
cggcccgcaccgccauggaggugcuggagagc

SEQ ID NO: 325775 - RNA, 32 nt, Homo Sapiens
gcccaguugaaagaacucuuugaaacgugaua

SEQ ID NO: 325776 - RNA, 32 nt, Homo Sapiens
cggacucccuccccucugcuucuacuccuccu

SEQ ID NO: 325777 - RNA, 32 nt, Homo Sapiens
uucaaauucuacuaaugcuuugaaauuucaaa

SEQ ID NO: 325778 - RNA, 32 nt, Homo Sapiens
cacucaaggcagggagccccaggccuccaucu

SEQ ID NO: 325779 - RNA, 32 nt, Homo Sapiens
acaguuuuuacaaaauacacuuacacaccauc

SEQ ID NO: 325780 - RNA, 32 nt, Homo Sapiens
ugcgguccuacuggcggaacuacuuugagagc

SEQ ID NO: 325781 - RNA, 32 nt, Homo Sapiens
gaaggauaaauagaaaaaugucauuaguacca

SEQ ID NO: 325782 - RNA, 32 nt, Homo Sapiens
guuuggggaaaggacugauggcuuugagucua

SEQ ID NO: 325783 - RNA, 32 nt, Homo Sapiens
acuuuuacaaguaacaaaaauaaaaacucuua

SEQ ID NO: 325784 - RNA, 32 nt, Homo Sapiens
guuuuuguaugugugggugaauguguguucau

SEQ ID NO: 325785 - RNA, 32 nt, Homo Sapiens
ccacugggccccaguccccagcuugcguggua

SEQ ID NO: 325786 - RNA, 31 nt, Homo Sapiens
aaaaccgagccccagaggccaguaaaggagg

SEQ ID NO: 325787 - RNA, 32 nt, Homo Sapiens
caggcucggcuccccagccccaucccaaaccc

SEQ ID NO: 325788 - RNA, 32 nt, Homo Sapiens
uggggcccuccuccuucaccgcccccuuagcc

SEQ ID NO: 325789 - RNA, 32 nt, Homo Sapiens
agcccuaaaaugugacaagagaauugguuugg

SEQ ID NO: 325790 - RNA, 30 nt, Homo Sapiens
cagggaucugccugcauccugacggggugc

SEQ ID NO: 325791 - RNA, 32 nt, Homo Sapiens
auuuggcaauaaaaaauauuaaaacugaguuu

SEQ ID NO: 325792 - RNA, 32 nt, Homo Sapiens
ccggcgggccgcggggagagagcgucccaucu

SEQ ID NO: 325793 - RNA, 32 nt, Homo Sapiens
agaaccagcuaugucggccuacggcaugccca

SEQ ID NO: 325794 - RNA, 32 nt, Homo Sapiens
cguuucucuggugaguacaagguauuacuagg

SEQ ID NO: 325795 - RNA, 32 nt, Homo Sapiens
gcaaaggaaauuacuauguaauacuaauuauu

SEQ ID NO: 325796 - RNA, 32 nt, Homo Sapiens
uccccaggcaggaagcacuugauggagagcug

SEQ ID NO: 325797 - RNA, 32 nt, Homo Sapiens
aaaaugcguuguucuuuuuucuuuuggaggga

SEQ ID NO: 325798 - RNA, 32 nt, Homo Sapiens
gagacccugcccccggcccaggugucucggag

SEQ ID NO: 325799 - RNA, 32 nt, Homo Sapiens
uaauuuuucuauuuuuaguagagacaggguuu

SEQ ID NO: 325800 - RNA, 32 nt, Homo Sapiens
auuuguucaucaaauuacaucauguaauuugg

SEQ ID NO: 325801 - RNA, 32 nt, Homo Sapiens
gcggggaccugccuaugagaaaagggccagga

SEQ ID NO: 325802 - RNA, 32 nt, Homo Sapiens
ugaauggaaaucaacuguaaguauuaggacuu

SEQ ID NO: 325803 - RNA, 32 nt, Homo Sapiens
cagccgcccucgccgccgcggugcgcuggcug

SEQ ID NO: 325804 - RNA, 32 nt, Homo Sapiens
cucugccguccucaguuuccuuucaugaggcu

SEQ ID NO: 325805 - RNA, 32 nt, Homo Sapiens
caguagucauugaaaguuauguuucuuuguuu

SEQ ID NO: 325806 - RNA, 32 nt, Homo Sapiens
ucauuuuugcccucugccuguuuuccagacau

SEQ ID NO: 325807 - RNA, 32 nt, Homo Sapiens
auaauagacuuuuuucucccccucuguuuuuu

SEQ ID NO: 325808 - RNA, 32 nt, Homo Sapiens
cucaccgccucccgggccugcugucagcuugc

SEQ ID NO: 325809 - RNA, 32 nt, Homo Sapiens
ugcaaggacuagucgaagacucggaggggcca

SEQ ID NO: 325810 - RNA, 32 nt, Homo Sapiens
cauuauguagcuaaguuuuuuuuuuuuagcau

SEQ ID NO: 325811 - RNA, 32 nt, Homo Sapiens
uuccaacuugauuuuccaacucuaauaaaggu

SEQ ID NO: 325812 - RNA, 30 nt, Homo Sapiens
gaguggggcaggcggggucuuuguucucgg

SEQ ID NO: 325813 - RNA, 32 nt, Homo Sapiens
gggcugcagggccagagcuagucugaccauua

SEQ ID NO: 325814 - RNA, 32 nt, Homo Sapiens
gcuuuuggcaggcagaucuuacuaguauuuac

SEQ ID NO: 325815 - RNA, 32 nt, Homo Sapiens
gcacugagagagccccgauucaucuggauaag

SEQ ID NO: 325816 - RNA, 32 nt, Homo Sapiens
guaucauuugaaaaauaccauaauggcauuug

SEQ ID NO: 325817 - RNA, 32 nt, Homo Sapiens
aaaaacauuuuccuaucuuuuacaagagguau

SEQ ID NO: 325818 - RNA, 32 nt, Homo Sapiens
acgcugccggucgggcugggcugagaggggag

SEQ ID NO: 325819 - RNA, 32 nt, Homo Sapiens
ugccugcgacccuggaggacagccugacuccc

SEQ ID NO: 325820 - RNA, 32 nt, Homo Sapiens
accugcucuggccacaccuccucugcaggccc

SEQ ID NO: 325821 - RNA, 32 nt, Homo Sapiens
gaagcacagagacgugggguucaucccagacu

SEQ ID NO: 325822 - RNA, 32 nt, Homo Sapiens
agcauugucuguguagaggugugcuaguaagu

SEQ ID NO: 325823 - RNA, 32 nt, Homo Sapiens
ugauuugugucuuuauaaaaaagggaaauuug

SEQ ID NO: 325824 - RNA, 32 nt, Homo Sapiens
uuguuuucauacuucauagaaaucaaagucug

SEQ ID NO: 325825 - RNA, 32 nt, Homo Sapiens
uucuccaaauguuuccagugauauguuuuccu

SEQ ID NO: 325826 - RNA, 32 nt, Homo Sapiens
ugugccuaaggguggcugaaauacuaaaacac

SEQ ID NO: 325827 - RNA, 32 nt, Homo Sapiens
aggagaugggggccggcuuugcuggccaacac

SEQ ID NO: 325828 - RNA, 32 nt, Homo Sapiens
gguggugcucacgguaaugcaccgacaaugag

SEQ ID NO: 325829 - RNA, 32 nt, Homo Sapiens
gagcaggagcaucuugaccgcauugugaagga

SEQ ID NO: 325830 - RNA, 32 nt, Homo Sapiens
uaagcauuuuacucacacccacagcagcaaga

SEQ ID NO: 325831 - RNA, 32 nt, Homo Sapiens
cucccgggagucaucaagcuuugguguaugug

SEQ ID NO: 325832 - RNA, 32 nt, Homo Sapiens
agccgggcaugguggcgggcgccuguaguucc

SEQ ID NO: 325833 - RNA, 32 nt, Homo Sapiens
ucucgucugccaguuugauuuggaccuguuuu

SEQ ID NO: 325834 - RNA, 32 nt, Homo Sapiens
gcacgcgugucuguguaugugugcacgcgugu

SEQ ID NO: 325835 - RNA, 32 nt, Homo Sapiens
ggggccgguguuggggggccguggucaggugu

SEQ ID NO: 325836 - RNA, 32 nt, Homo Sapiens
gagaaccuuugcacgcgcacaaacuacgggga

SEQ ID NO: 325837 - RNA, 32 nt, Homo Sapiens
aggccaauuucucguguuggaaagucagaaga

SEQ ID NO: 325838 - RNA, 32 nt, Homo Sapiens
aaguggccaggcauucucucccugcccucucu

SEQ ID NO: 325839 - RNA, 32 nt, Homo Sapiens
caagcggccucccagcucccugguaccucgag

SEQ ID NO: 325840 - RNA, 32 nt, Homo Sapiens
aucagauucgguuccaguuuuauucuuguuga

SEQ ID NO: 325841 - RNA, 32 nt, Homo Sapiens
uguuggcccagcuggucucaaacuccugaccu

SEQ ID NO: 325842 - RNA, 32 nt, Homo Sapiens
uauauauguauauaaaauauauauugcauagg

SEQ ID NO: 325843 - RNA, 32 nt, Homo Sapiens
uuggcccugggcccaacaguuuguacuucaug

SEQ ID NO: 325844 - RNA, 31 nt, Homo Sapiens
uacccuggccucugccugccucccgccugug

SEQ ID NO: 325845 - RNA, 32 nt, Homo Sapiens
ucugacgagcgaggcgucgccgucgucgccgg

SEQ ID NO: 325846 - RNA, 32 nt, Homo Sapiens
aaucuuacuguaaagaguguucugugacucgc

SEQ ID NO: 325847 - RNA, 32 nt, Homo Sapiens
uaaagaggaggaaaaggaagauacagaaaucg

SEQ ID NO: 325848 - RNA, 32 nt, Homo Sapiens
ugaggucugcccggcgcgccgcuugcagagca

SEQ ID NO: 325849 - RNA, 32 nt, Homo Sapiens
cagacuccucauuauucaguacauuucccaau

SEQ ID NO: 325850 - RNA, 32 nt, Homo Sapiens
ccuaggcaucauucaaggucuuuuaugaagac

SEQ ID NO: 325851 - RNA, 32 nt, Homo Sapiens
cuggauucaagcgauucuccugucccagccuc

SEQ ID NO: 325852 - RNA, 32 nt, Homo Sapiens
cugagcagcaggaggaggagccgugacccugu

SEQ ID NO: 325853 - RNA, 32 nt, Homo Sapiens
caaggagacggggaagagcagcuccaggaguc

SEQ ID NO: 325854 - RNA, 32 nt, Homo Sapiens
gacugcacccucaguuacaagguauuuggaug

SEQ ID NO: 325855 - RNA, 32 nt, Homo Sapiens
gaugggggucaaaccacugccuuggccccagg

SEQ ID NO: 325856 - RNA, 32 nt, Homo Sapiens
ggcuugccugaagcgaggggugagugacccac

SEQ ID NO: 325857 - RNA, 32 nt, Homo Sapiens
cgaauagccccggcugccaccucgcaggaccc

SEQ ID NO: 325858 - RNA, 32 nt, Homo Sapiens
gagcugcugucauggcggccgcucuguggggc

SEQ ID NO: 325859 - RNA, 32 nt, Homo Sapiens
aacaaggagagccuacugagcagccugagugg

SEQ ID NO: 325860 - RNA, 32 nt, Homo Sapiens
aggagugcuagugauuuuugcauauugauuuu

SEQ ID NO: 325861 - RNA, 32 nt, Homo Sapiens
aguauguuggaguuggugguggcuuaaguuuu

SEQ ID NO: 325862 - RNA, 32 nt, Homo Sapiens
gggcggggucuuugggcgucgacgaggccugg

SEQ ID NO: 325863 - RNA, 32 nt, Homo Sapiens
aagccagaaugacacaaagcaaugcaaagaca

SEQ ID NO: 325864 - RNA, 31 nt, Homo Sapiens
cuacaggaauccaagaaccagugcucuggcc

SEQ ID NO: 325865 - RNA, 32 nt, Homo Sapiens
aaucuggggaugaagggucugaagaugaagcc

SEQ ID NO: 325866 - RNA, 32 nt, Homo Sapiens
aaguuugcuuugcauucaguagaugugagaua

SEQ ID NO: 325867 - RNA, 32 nt, Homo Sapiens
uuaugcuauaauuauuaccauuuuuaaugaug

SEQ ID NO: 325868 - RNA, 32 nt, Homo Sapiens
gaugcaacagcgaaacaaagaacccauuuccu

SEQ ID NO: 325869 - RNA, 32 nt, Homo Sapiens
uaauuucuaaucugccgaggccuauagccuga

SEQ ID NO: 325870 - RNA, 32 nt, Homo Sapiens
augguuauuguccgccauuuuguuguauauug

SEQ ID NO: 325871 - RNA, 32 nt, Homo Sapiens
ccuggaucugagcucugugcccccagccgggu

SEQ ID NO: 325872 - RNA, 32 nt, Homo Sapiens
guuuuucuuucucauucacauuuguagauauu

SEQ ID NO: 325873 - RNA, 32 nt, Homo Sapiens
uauuuauagaaaggaaacagaaaagcaaacuu

SEQ ID NO: 325874 - RNA, 32 nt, Homo Sapiens
aguuaauuugaaaacuuuggaugcugaaccuu

SEQ ID NO: 325875 - RNA, 32 nt, Homo Sapiens
caagacuuuaccauucugaucuagagacaaag

SEQ ID NO: 325876 - RNA, 32 nt, Homo Sapiens
agcaggccucgguccaggauccaagcccccuu

SEQ ID NO: 325877 - RNA, 32 nt, Homo Sapiens
gccgucuucugcuacaucaaugcagcaaaaac

SEQ ID NO: 325878 - RNA, 32 nt, Homo Sapiens
agaaguuaaugauuaaccuugagcuucaagag

SEQ ID NO: 325879 - RNA, 32 nt, Homo Sapiens
agugugaaaaacaguaaaguugggagaggagc

SEQ ID NO: 325880 - RNA, 32 nt, Homo Sapiens
gcuguuaucucacauuauaaauuucuaaaucc

SEQ ID NO: 325881 - RNA, 32 nt, Homo Sapiens
agacuuguuaaguagaaaaauuuuaaaaauuu

SEQ ID NO: 325882 - RNA, 32 nt, Homo Sapiens
gaagaauauucuucuuuuucucauguugaaac

SEQ ID NO: 325883 - RNA, 31 nt, Homo Sapiens
ucuagccaagccaucaagugucugaaauuca

SEQ ID NO: 325884 - RNA, 32 nt, Homo Sapiens
ugcugggcggagucagagcaguucuugagguu

SEQ ID NO: 325885 - RNA, 32 nt, Homo Sapiens
aguccugauuuuacugcaaagguguucauguu

SEQ ID NO: 325886 - RNA, 32 nt, Homo Sapiens
ccacgggugagccuccaucuccccucauucac

SEQ ID NO: 325887 - RNA, 32 nt, Homo Sapiens
acggaggaggggcuggacggcgcugcgaaguc

SEQ ID NO: 325888 - RNA, 32 nt, Homo Sapiens
gagguuguagaaagcucuguagguucucucug

SEQ ID NO: 325889 - RNA, 32 nt, Homo Sapiens
caaagucagcggugccuacagucagcaccaug

SEQ ID NO: 325890 - RNA, 30 nt, Homo Sapiens
ucuggugcugaauaaacccuucugaucugg

SEQ ID NO: 325891 - RNA, 32 nt, Homo Sapiens
guaaagcuguagucagcguuauguaugccauu

SEQ ID NO: 325892 - RNA, 32 nt, Homo Sapiens
acucuguuuaugacaacuguuuuuauuacuaa

SEQ ID NO: 325893 - RNA, 32 nt, Homo Sapiens
uggggagagacuuuugcggggagggaaggcgg

SEQ ID NO: 325894 - RNA, 32 nt, Homo Sapiens
cccgcgcggccgcgcucugacucgcugugcgc

SEQ ID NO: 325895 - RNA, 32 nt, Homo Sapiens
aaaguuauuagauaggaucaaguuuuguuugu

SEQ ID NO: 325896 - RNA, 32 nt, Homo Sapiens
aauacccaucaguauuugaugauaaaaaugaa

SEQ ID NO: 325897 - RNA, 32 nt, Homo Sapiens
uugaugcguggcuccuccuccucccccacugc

SEQ ID NO: 325898 - RNA, 32 nt, Homo Sapiens
ccauuucccagcgcuccuggggcucagugcug

SEQ ID NO: 325899 - RNA, 32 nt, Homo Sapiens
uguugggaaaauugacaaauaauaaaacuaga

SEQ ID NO: 325900 - RNA, 32 nt, Homo Sapiens
agucucguuccgaacuuguuggcugcggugcc

SEQ ID NO: 325901 - RNA, 32 nt, Homo Sapiens
cauaauaaaaauuauacagaaaaauaaauaaa

SEQ ID NO: 325902 - RNA, 32 nt, Homo Sapiens
uuuuuagaaaccgacguuucagggaagagggg

SEQ ID NO: 325903 - RNA, 32 nt, Homo Sapiens
uguaagguuugugacaaggcauucggguguga

SEQ ID NO: 325904 - RNA, 32 nt, Homo Sapiens
gcagagcucgagaggcggcugccgggcugcgg

SEQ ID NO: 325905 - RNA, 32 nt, Homo Sapiens
ccagagggccuggccaggggccugggcagccg

SEQ ID NO: 325906 - RNA, 32 nt, Homo Sapiens
auacaugggggaagaauggaauacagaaaaag

SEQ ID NO: 325907 - RNA, 32 nt, Homo Sapiens
uacaaauuaguuacaaauaauuuuauuggaug

SEQ ID NO: 325908 - RNA, 32 nt, Homo Sapiens
ggagcaucggccgcuuguuccauccugugcuu

SEQ ID NO: 325909 - RNA, 32 nt, Homo Sapiens
ccauggaaaugaauuuuuccaguacacagccc

SEQ ID NO: 325910 - RNA, 32 nt, Homo Sapiens
aggacuggauugcagaagacucggggacaaca

SEQ ID NO: 325911 - RNA, 32 nt, Homo Sapiens
uaaaauaauuuucuaaauucuguauuuggaua

SEQ ID NO: 325912 - RNA, 32 nt, Homo Sapiens
cggagccccucgcccuuggcagccugucaccg

SEQ ID NO: 325913 - RNA, 32 nt, Homo Sapiens
gacacaugaaaauuauucaaauguuagugccg

SEQ ID NO: 325914 - RNA, 32 nt, Homo Sapiens
uuuuuuauuauuucauaagaaaacuacguuaa

SEQ ID NO: 325915 - RNA, 32 nt, Homo Sapiens
aggaacugaaguuuguuuuuuauuaucauccu

SEQ ID NO: 325916 - RNA, 32 nt, Homo Sapiens
aggcgcuccagccccagagccagcgucuucau

SEQ ID NO: 325917 - RNA, 32 nt, Homo Sapiens
guggcuuuccuaggaaugggucguacaaagcu

SEQ ID NO: 325918 - RNA, 32 nt, Homo Sapiens
gcuggucugugcuaacaucuucagauaccaau

SEQ ID NO: 325919 - RNA, 32 nt, Homo Sapiens
aaaauugagcgcuauguugcaagauguaauuu

SEQ ID NO: 325920 - RNA, 32 nt, Homo Sapiens
ggucugggcugugcgugcuucagguaaccucc

SEQ ID NO: 325921 - RNA, 32 nt, Homo Sapiens
gugugagcuugagagccgcgcgcuagagcgac

SEQ ID NO: 325922 - RNA, 32 nt, Homo Sapiens
ucugcccuggggaaggcacaggcucaggaggg

SEQ ID NO: 325923 - RNA, 32 nt, Homo Sapiens
uuuguggcugcugauuaaaucuccaggucuca

SEQ ID NO: 325924 - RNA, 32 nt, Homo Sapiens
aauguauauuccagcacccacuuguaaacgau

SEQ ID NO: 325925 - RNA, 32 nt, Homo Sapiens
ggguccagucuucuaguggguuuaauguuuag

SEQ ID NO: 325926 - RNA, 32 nt, Homo Sapiens
uagcucucugcucgccgccgccgcugucgccg

SEQ ID NO: 325927 - RNA, 32 nt, Homo Sapiens
auuaaaaaaaauuuuuuuuuacauacacauuu

SEQ ID NO: 325928 - RNA, 32 nt, Homo Sapiens
accucccggacgggacggggcgccuggccggg

SEQ ID NO: 325929 - RNA, 32 nt, Homo Sapiens
uuggcaugucagcgucaccccaaacaugcgca

SEQ ID NO: 325930 - RNA, 32 nt, Homo Sapiens
cuucuauaaaagacauauaaauuauaaaaaac

SEQ ID NO: 325931 - RNA, 32 nt, Homo Sapiens
uaaaaaaccuaugcuauguuaagggauuuaga

SEQ ID NO: 325932 - RNA, 30 nt, Homo Sapiens
agagggcggcugggcggcggcggggcucac

SEQ ID NO: 325933 - RNA, 32 nt, Homo Sapiens
caccccuggauccaugggacacacucacagga

SEQ ID NO: 325934 - RNA, 32 nt, Homo Sapiens
uaugaaaauaguugaaguugugcuuauugcac

SEQ ID NO: 325935 - RNA, 32 nt, Homo Sapiens
gguggggucugggcaguggggaggcaggagcc

SEQ ID NO: 325936 - RNA, 30 nt, Homo Sapiens
ucugggcgcaggcgccuggcuguagcgacu

SEQ ID NO: 325937 - RNA, 32 nt, Homo Sapiens
ugacugaagucgugcuuuuccugugugugcug

SEQ ID NO: 325938 - RNA, 32 nt, Homo Sapiens
cuuacagggagaaggcgucacucgcgguuaca

SEQ ID NO: 325939 - RNA, 32 nt, Homo Sapiens
guuaucagaauuaauucuuuuauaugaguuua

SEQ ID NO: 325940 - RNA, 32 nt, Homo Sapiens
ggccugcagcauacaguaagaugggucccugu

SEQ ID NO: 325941 - RNA, 32 nt, Homo Sapiens
aagaucuccaucgguugcccaaggcuguaagu

SEQ ID NO: 325942 - RNA, 32 nt, Homo Sapiens
uccaagguccuggccuuuccugaacugggguu

SEQ ID NO: 325943 - RNA, 32 nt, Homo Sapiens
cucaagcuuuugcucauuugucauuuacccug

SEQ ID NO: 325944 - RNA, 32 nt, Homo Sapiens
auggaccuuuuauaaccuuguucucugcuuga

SEQ ID NO: 325945 - RNA, 31 nt, Homo Sapiens
cucgacuuugccagguccccaagggcagcgg

SEQ ID NO: 325946 - RNA, 32 nt, Homo Sapiens
agacucagaggcaaugacccagggugcucagg

SEQ ID NO: 325947 - RNA, 32 nt, Homo Sapiens
ccgccugccccgaggccccgauccugcugcac

SEQ ID NO: 325948 - RNA, 32 nt, Homo Sapiens
aauugaagcugcuuaucuccaaagcagcauaa

SEQ ID NO: 325949 - RNA, 32 nt, Homo Sapiens
ggcuagagccacagagacuguuguggagguga

SEQ ID NO: 325950 - RNA, 28 nt, Homo Sapiens
auggaaguuacaggguagcaugauuaaa

SEQ ID NO: 325951 - RNA, 32 nt, Homo Sapiens
acauuucaugucuucaguuuuauuuuuauuua

SEQ ID NO: 325952 - RNA, 32 nt, Homo Sapiens
agggcugaggggaggcagggaugugugcuguc

SEQ ID NO: 325953 - RNA, 32 nt, Homo Sapiens
ccugguuuaaaaugggacagcagggcacagga

SEQ ID NO: 325954 - RNA, 32 nt, Homo Sapiens
ucuccugcccgccgguguuuguguguuuauaa

SEQ ID NO: 325955 - RNA, 32 nt, Homo Sapiens
ugggagcaaaauggcugcuugagcuacucugu

SEQ ID NO: 325956 - RNA, 32 nt, Homo Sapiens
cugaaggugccaaauuccauuuaacuuuuuua

SEQ ID NO: 325957 - RNA, 32 nt, Homo Sapiens
ggaggcaguugugacaauccccagugcuucug

SEQ ID NO: 325958 - RNA, 32 nt, Homo Sapiens
acauaaagucaucaaagugggguacaguaaag

SEQ ID NO: 325959 - RNA, 32 nt, Homo Sapiens
cgaguucauccugcagcccauccacaaccugc

SEQ ID NO: 325960 - RNA, 32 nt, Homo Sapiens
aaaaguaaauuaaacauucuuaucaccuuccu

SEQ ID NO: 325961 - RNA, 32 nt, Homo Sapiens
aagaguauguuaccaaagaugaguuugagguu

SEQ ID NO: 325962 - RNA, 32 nt, Homo Sapiens
cagccagaggccgcacgcugcacugucgcgac

SEQ ID NO: 325963 - RNA, 32 nt, Homo Sapiens
uuaugaaaauuuuuauacugggaaugaugcuc

SEQ ID NO: 325964 - RNA, 32 nt, Homo Sapiens
gauuguguuaauagcuccuuucugggauaucu

SEQ ID NO: 325965 - RNA, 32 nt, Homo Sapiens
ggguuuuauaaugguugauuuacucaggggcc

SEQ ID NO: 325966 - RNA, 32 nt, Homo Sapiens
gcauugaaagcacuugacaaaggguauuugug

SEQ ID NO: 325967 - RNA, 32 nt, Homo Sapiens
uuggucuaucuaaaauguucguuagcuuaacu

SEQ ID NO: 325968 - RNA, 32 nt, Homo Sapiens
ggcauuggucugacuugcugugaagaccuuaa

SEQ ID NO: 325969 - RNA, 32 nt, Homo Sapiens
accggagggcuccgcacagucguucugguuuc

SEQ ID NO: 325970 - RNA, 32 nt, Homo Sapiens
cccuuacacacacacacacacacacacacaca

SEQ ID NO: 325971 - RNA, 32 nt, Homo Sapiens
aaaauauaauuucaaagguucagcugucuauu

SEQ ID NO: 325972 - RNA, 32 nt, Homo Sapiens
ugccuuauaauguagaugagcaacucuccugg

SEQ ID NO: 325973 - RNA, 32 nt, Homo Sapiens
uguuuguaaaacuacacaucccuaaugugugc

SEQ ID NO: 325974 - RNA, 32 nt, Homo Sapiens
accaggagaaagucaggaucccuaagagucuu

SEQ ID NO: 325975 - RNA, 32 nt, Homo Sapiens
cccggccccugcccggccccguccuccaaccu

SEQ ID NO: 325976 - RNA, 31 nt, Homo Sapiens
uuucuuggagguaaggagguauauacuagaa

SEQ ID NO: 325977 - RNA, 32 nt, Homo Sapiens
cucuuaaacaacacugaacaaauauuucaguc

SEQ ID NO: 325978 - RNA, 32 nt, Homo Sapiens
aauggguacuuugugcaauucguuaaaagaag

SEQ ID NO: 325979 - RNA, 31 nt, Homo Sapiens
cguuuucauuugaaguuuugccauuuguguu

SEQ ID NO: 325980 - RNA, 32 nt, Homo Sapiens
uccuaaauuuuuuauauuuaaucuuuuuuucc

SEQ ID NO: 325981 - RNA, 32 nt, Homo Sapiens
cuccgagcuggguugccccacugugcuuguau

SEQ ID NO: 325982 - RNA, 32 nt, Homo Sapiens
cucuucauuuuuauuucuuuauucagcaagua

SEQ ID NO: 325983 - RNA, 32 nt, Homo Sapiens
gcugaucucuuuuacuuaauucuucuaaaauc

SEQ ID NO: 325984 - RNA, 32 nt, Homo Sapiens
acuguaugagauguuaaauacuuuuuaauauu

SEQ ID NO: 325985 - RNA, 32 nt, Homo Sapiens
accugcuagucuuuuuauuuuggcuugcauga

SEQ ID NO: 325986 - RNA, 32 nt, Homo Sapiens
uccgccgcgggccucacuccacucgugucugc

SEQ ID NO: 325987 - RNA, 30 nt, Homo Sapiens
cggggguuucaccauguuagccaggcuggu

SEQ ID NO: 325988 - RNA, 32 nt, Homo Sapiens
accaccuucuggcuccucuccucuuuggggau

SEQ ID NO: 325989 - RNA, 32 nt, Homo Sapiens
gucugcuuuucuaugugagccuuuaaacuuca

SEQ ID NO: 325990 - RNA, 32 nt, Homo Sapiens
ucucccggccccagccugccucccuccugccc

SEQ ID NO: 325991 - RNA, 32 nt, Homo Sapiens
cagcagcagcagcagcagcagcagcagcaacu

SEQ ID NO: 325992 - RNA, 32 nt, Homo Sapiens
gacaguggaucaugaaaagugcuguuuugucc

SEQ ID NO: 325993 - RNA, 32 nt, Homo Sapiens
gcagcgguggccucuuuucagaucauggcauc

SEQ ID NO: 325994 - RNA, 31 nt, Homo Sapiens
cggccacggcgcagccgcugccauggcccag

SEQ ID NO: 325995 - RNA, 32 nt, Homo Sapiens
gaauuagcugggugugguggugugcaccugug

SEQ ID NO: 325996 - RNA, 27 nt, Homo Sapiens
auaauauuuuucuucagaucuuugaaa

SEQ ID NO: 325997 - RNA, 32 nt, Homo Sapiens
agcccacucugcaaggcugcggugaggggcug

SEQ ID NO: 325998 - RNA, 32 nt, Homo Sapiens
cugcuguccuccuggacccaucugagaugugc

SEQ ID NO: 325999 - RNA, 32 nt, Homo Sapiens
cguuuccuuucugugagagaaggcuuuugucu

SEQ ID NO: 326000 - RNA, 32 nt, Homo Sapiens
ccgagaagaagcugcgggaaggacagcagggg

SEQ ID NO: 326001 - RNA, 32 nt, Homo Sapiens
acacagcagaggaaauacaucuguggaaaugu

SEQ ID NO: 326002 - RNA, 32 nt, Homo Sapiens
cucacccggccgccagacugccugggccugcc

SEQ ID NO: 326003 - RNA, 32 nt, Homo Sapiens
uucauugcuaggauuucuuuuaaaaaaauuaa

SEQ ID NO: 326004 - RNA, 32 nt, Homo Sapiens
ugugugaauuauauuucuacuaaauguuuuug

SEQ ID NO: 326005 - RNA, 32 nt, Homo Sapiens
gaagcaaaagcuaugaugcauuaggguuaaaa

SEQ ID NO: 326006 - RNA, 32 nt, Homo Sapiens
ugagacucacggucaagcuacggcgaggagug

SEQ ID NO: 326007 - RNA, 32 nt, Homo Sapiens
aaacauauguauauauucuuuuaucacacaca

SEQ ID NO: 326008 - RNA, 32 nt, Homo Sapiens
cucgggaggccuaccugcuggagcacagccac

SEQ ID NO: 326009 - RNA, 32 nt, Homo Sapiens
gacugaggaacggugccuggaaaagggcaaga

SEQ ID NO: 326010 - RNA, 32 nt, Homo Sapiens
cagcccuggaggagggggcgggucgaggcugc

SEQ ID NO: 326011 - RNA, 32 nt, Homo Sapiens
caaacaacacuguccacccaucuaccugucca

SEQ ID NO: 326012 - RNA, 32 nt, Homo Sapiens
augcccggcuaauuuuuuguauuuucaguaga

SEQ ID NO: 326013 - RNA, 32 nt, Homo Sapiens
ugaaaauucacuuuucauagucaaguaacuca

SEQ ID NO: 326014 - RNA, 32 nt, Homo Sapiens
aaaaauugucuccuagaacuaauucuauguuu

SEQ ID NO: 326015 - RNA, 32 nt, Homo Sapiens
ucguggccacgcugcugaucguccugcugcug

SEQ ID NO: 326016 - RNA, 32 nt, Homo Sapiens
gauccuuugggaagaaguuucugggagaugcc

SEQ ID NO: 326017 - RNA, 32 nt, Homo Sapiens
uacuguuucuugugaccuggaacuaacgucaa

SEQ ID NO: 326018 - RNA, 32 nt, Homo Sapiens
auugggggaaaugauccaaauggcuggugaga

SEQ ID NO: 326019 - RNA, 29 nt, Homo Sapiens
ccugugagcccuuuccugccaaggugcag

SEQ ID NO: 326020 - RNA, 30 nt, Homo Sapiens
agagauaaagucccugccugcaugcauucu

SEQ ID NO: 326021 - RNA, 32 nt, Homo Sapiens
ucauuaaauauguagaacaauuugagccugag

SEQ ID NO: 326022 - RNA, 32 nt, Homo Sapiens
aaccaaacgcagcaucuucccauccucccaga

SEQ ID NO: 326023 - RNA, 32 nt, Homo Sapiens
caagcagagaaaagcaucagccuuccagaguu

SEQ ID NO: 326024 - RNA, 32 nt, Homo Sapiens
ggcuagccaccuguacuacggugccgaccgca

SEQ ID NO: 326025 - RNA, 32 nt, Homo Sapiens
ugcagagugguucugcaaaugguuagaggaag

SEQ ID NO: 326026 - RNA, 32 nt, Homo Sapiens
uucugauuauuuuuauuaccuuuguucuuuuu

SEQ ID NO: 326027 - RNA, 32 nt, Homo Sapiens
guuugccacugacuucaaaaugaggucacuug

SEQ ID NO: 326028 - RNA, 32 nt, Homo Sapiens
gccgucuuguggaugcuggccauggugggcag

SEQ ID NO: 326029 - RNA, 32 nt, Homo Sapiens
ugauguuucuuacuuaucaucccuaacuauug

SEQ ID NO: 326030 - RNA, 32 nt, Homo Sapiens
agccugaaaauaugacuucaacuuuuccauca

SEQ ID NO: 326031 - RNA, 32 nt, Homo Sapiens
gggagcagcacaaggacccagccuuuguucug

SEQ ID NO: 326032 - RNA, 32 nt, Homo Sapiens
ggcuugccguucguucguuuccagccucagga

SEQ ID NO: 326033 - RNA, 32 nt, Homo Sapiens
auaacucuuccugcuauucagaauaaguagga

SEQ ID NO: 326034 - RNA, 32 nt, Homo Sapiens
ugaaagcaucgcuccgagccucaugggaggaa

SEQ ID NO: 326035 - RNA, 32 nt, Homo Sapiens
aggccagggauugcgggaaaagggucuuuuuu

SEQ ID NO: 326036 - RNA, 32 nt, Homo Sapiens
guuuggugaugaaaauguuuugaaagauaauc

SEQ ID NO: 326037 - RNA, 32 nt, Homo Sapiens
aacaacaucuucuuugaguucuuuauucaaaa

SEQ ID NO: 326038 - RNA, 32 nt, Homo Sapiens
uucuuagaagcagucuuugggcaacaacuuga

SEQ ID NO: 326039 - RNA, 32 nt, Homo Sapiens
ucacgcaccaacauggagaaaccccgucucua

SEQ ID NO: 326040 - RNA, 32 nt, Homo Sapiens
uaacugugcuccucacuuccucuucuucauug

SEQ ID NO: 326041 - RNA, 32 nt, Homo Sapiens
aaaauauuuggaaaacaaaaaggguaguugca

SEQ ID NO: 326042 - RNA, 32 nt, Homo Sapiens
aagaagucucuuaauucugaugcuagguuguu

SEQ ID NO: 326043 - RNA, 32 nt, Homo Sapiens
cggucguguuuguagaaaauucauaacauaua

SEQ ID NO: 326044 - RNA, 28 nt, Homo Sapiens
aucaauaaauguuaaugguaaaacacuc

SEQ ID NO: 326045 - RNA, 32 nt, Homo Sapiens
ugagguuaaaaauaaugugguuuuauauagca

SEQ ID NO: 326046 - RNA, 32 nt, Homo Sapiens
guuguucuaauuuuugcaaagauaguuucaau

SEQ ID NO: 326047 - RNA, 32 nt, Homo Sapiens
cuaguuguuaaaacguggacgugcaucuguag

SEQ ID NO: 326048 - RNA, 32 nt, Homo Sapiens
ugagggggagggggcugcuaagauggcgucgg

SEQ ID NO: 326049 - RNA, 32 nt, Homo Sapiens
auuugcucuguggccaucaucuccggcgggca

SEQ ID NO: 326050 - RNA, 32 nt, Homo Sapiens
ggguccccgggcgggcuuggcacggaggcggu

SEQ ID NO: 326051 - RNA, 32 nt, Homo Sapiens
gggcugucccuaauggccccagucgccuuacc

SEQ ID NO: 326052 - RNA, 32 nt, Homo Sapiens
auucuguaaggacacaucaaagcuggccaaaa

SEQ ID NO: 326053 - RNA, 30 nt, Homo Sapiens
accaagugcaggcgcgacgggucagggacc

SEQ ID NO: 326054 - RNA, 32 nt, Homo Sapiens
caauacgaaaagacaauguaaacuuugaaaag

SEQ ID NO: 326055 - RNA, 32 nt, Homo Sapiens
cagugaguggguauagauagggaccguggacu

SEQ ID NO: 326056 - RNA, 30 nt, Homo Sapiens
cuugcagucugugcugugaguggggucggc

SEQ ID NO: 326057 - RNA, 32 nt, Homo Sapiens
ggcgacugggggcccuggcccggcacuguccu

SEQ ID NO: 326058 - RNA, 32 nt, Homo Sapiens
caucauguaccccuuacccaggccucugaggg

SEQ ID NO: 326059 - RNA, 29 nt, Homo Sapiens
auaaaucuuuuccggguagggucaagggc

SEQ ID NO: 326060 - RNA, 32 nt, Homo Sapiens
cgcucccgaccguccggguccgcggccagccc

SEQ ID NO: 326061 - RNA, 32 nt, Homo Sapiens
uaauagggccugugaaaacagaggcuuuugca

SEQ ID NO: 326062 - RNA, 32 nt, Homo Sapiens
cuaacugcccuucucuccucccucucauccca

SEQ ID NO: 326063 - RNA, 32 nt, Homo Sapiens
ugacucacaccuguaaucccagcacuuuggga

SEQ ID NO: 326064 - RNA, 32 nt, Homo Sapiens
ugaaaaagaaucagaauuuauauuuuacaaag

SEQ ID NO: 326065 - RNA, 32 nt, Homo Sapiens
ccaaagcuggaacgcuagcugccugcucuucc

SEQ ID NO: 326066 - RNA, 32 nt, Homo Sapiens
ugcaugugaacacacacacacacacacacaca

SEQ ID NO: 326067 - RNA, 32 nt, Homo Sapiens
ucauagaaguuuuuaauaugacugcuacuaca

SEQ ID NO: 326068 - RNA, 32 nt, Homo Sapiens
gaguagugauuagcauuuagauaauguaacag

SEQ ID NO: 326069 - RNA, 32 nt, Homo Sapiens
ucauccacagaaagggaggaugggcgaugaca

SEQ ID NO: 326070 - RNA, 32 nt, Homo Sapiens
uaaauuucccaguuaaagauuauugugacuuc

SEQ ID NO: 326071 - RNA, 32 nt, Homo Sapiens
ccaucaccgaacuuccccuccuccccuauuua

SEQ ID NO: 326072 - RNA, 32 nt, Homo Sapiens
aggccgaaugacccgggcgcacgcggcggagc

SEQ ID NO: 326073 - RNA, 32 nt, Homo Sapiens
uaaaccucaguuuucacauuuguccaauggga

SEQ ID NO: 326074 - RNA, 32 nt, Homo Sapiens
gccauuuccuuccccaucuucauguuacaaac

SEQ ID NO: 326075 - RNA, 32 nt, Homo Sapiens
guuauaugcugauguuucuuaaaauaacuaaa

SEQ ID NO: 326076 - RNA, 32 nt, Homo Sapiens
ccugcaacuguaaaagugcuguuuggacugug

SEQ ID NO: 326077 - RNA, 30 nt, Homo Sapiens
gcaaagagugagaccuuuuucuuaaaaaaa

SEQ ID NO: 326078 - RNA, 32 nt, Homo Sapiens
uuuuuaaaauuccugugacaauuaauaauaaa

SEQ ID NO: 326079 - RNA, 32 nt, Homo Sapiens
gggcuuggggguaaauccugaggcuuuggugc

SEQ ID NO: 326080 - RNA, 32 nt, Homo Sapiens
cuaugagagaauaauguaaugaauguaggaaa

SEQ ID NO: 326081 - RNA, 32 nt, Homo Sapiens
gccugccugggccagccugccuccuggccuca

SEQ ID NO: 326082 - RNA, 32 nt, Homo Sapiens
aggaaaaauuugggguggugauaauauggcuu

SEQ ID NO: 326083 - RNA, 32 nt, Homo Sapiens
cagcccaggggaggggaugaggcauugucacc

SEQ ID NO: 326084 - RNA, 32 nt, Homo Sapiens
ugugcuguuauuuggaauuuugaaagacaggg

SEQ ID NO: 326085 - RNA, 32 nt, Homo Sapiens
gagccccuuugaugauuaauucaccuuccagu

SEQ ID NO: 326086 - RNA, 32 nt, Homo Sapiens
uccuuuuguacccuuguucugaugccaauuca

SEQ ID NO: 326087 - RNA, 32 nt, Homo Sapiens
gaggccggggacgacaccaucuccggccuuug

SEQ ID NO: 326088 - RNA, 32 nt, Homo Sapiens
gccaagucauuuccucaauccaggaaggacau

SEQ ID NO: 326089 - RNA, 32 nt, Homo Sapiens
agcuugguuuuauuugucaucuagucucaagu

SEQ ID NO: 326090 - RNA, 32 nt, Homo Sapiens
uuccucgcagguggcaccugguaaaugguuag

SEQ ID NO: 326091 - RNA, 32 nt, Homo Sapiens
uggagcugaaaacagagcuguuaaacaugauu

SEQ ID NO: 326092 - RNA, 31 nt, Homo Sapiens
uguacuuauugagcuaaacaagucuugguga

SEQ ID NO: 326093 - RNA, 32 nt, Homo Sapiens
cagugcuuccuuguccuucucuuaacuucuca

SEQ ID NO: 326094 - RNA, 32 nt, Homo Sapiens
aaaugcacaaaguauaaaguguagccaugucu

SEQ ID NO: 326095 - RNA, 32 nt, Homo Sapiens
cuuaaggcucuuuuguaagguuuuuguaguga

SEQ ID NO: 326096 - RNA, 32 nt, Homo Sapiens
acauugcucagguaccugaauauuggcuuugu

SEQ ID NO: 326097 - RNA, 32 nt, Homo Sapiens
uuuucucauuuucuuuucacuucgggcugugu

SEQ ID NO: 326098 - RNA, 32 nt, Homo Sapiens
ugacugggaaaggaggaccugcaaccaucuga

SEQ ID NO: 326099 - RNA, 32 nt, Homo Sapiens
agcggccgccgcgcccgagcacauggcgucca

SEQ ID NO: 326100 - RNA, 32 nt, Homo Sapiens
uccgagauacccacccagcuuugucaaucacc

SEQ ID NO: 326101 - RNA, 32 nt, Homo Sapiens
ucuuuuucuucuucuuuuuuuuuuuuuuuuua

SEQ ID NO: 326102 - RNA, 32 nt, Homo Sapiens
aggaggcggcgguggcucccggggcguuugag

SEQ ID NO: 326103 - RNA, 31 nt, Homo Sapiens
cagccuugcuggagaaagcccaugcccaggc

SEQ ID NO: 326104 - RNA, 32 nt, Homo Sapiens
gccucggucccggcccccauccuccccgcccc

SEQ ID NO: 326105 - RNA, 32 nt, Homo Sapiens
cacucugugacaacucuaccaaaaaccaacaa

SEQ ID NO: 326106 - RNA, 32 nt, Homo Sapiens
gcuguguaugaucaguuaucuaccucagaguc

SEQ ID NO: 326107 - RNA, 32 nt, Homo Sapiens
gugggguguauaguuauggccuuaauuugcau

SEQ ID NO: 326108 - RNA, 32 nt, Homo Sapiens
gcccuuucugugcggcgcccgggcgcaacgca

SEQ ID NO: 326109 - RNA, 32 nt, Homo Sapiens
cggguuuaccuuaagcuucucuagugaggcau

SEQ ID NO: 326110 - RNA, 32 nt, Homo Sapiens
accccuggccccagagcccccagcagggcccu

SEQ ID NO: 326111 - RNA, 32 nt, Homo Sapiens
gggccugcaaauuuauaucagacaacuucgcu

SEQ ID NO: 326112 - RNA, 32 nt, Homo Sapiens
ggggaugggggcgggcaggggcguggggaggg

SEQ ID NO: 326113 - RNA, 32 nt, Homo Sapiens
caccaguggcucccccuccacccagcggccag

SEQ ID NO: 326114 - RNA, 32 nt, Homo Sapiens
uaaguacagaacuuuuaaaccuugcuuuguau

SEQ ID NO: 326115 - RNA, 32 nt, Homo Sapiens
gggggcuccuucccugccugacccacuguugc

SEQ ID NO: 326116 - RNA, 32 nt, Homo Sapiens
ugguugguucauaugauguaggcacuugcugu

SEQ ID NO: 326117 - RNA, 32 nt, Homo Sapiens
gaucuggccugccuuucuuuggucagucccug

SEQ ID NO: 326118 - RNA, 32 nt, Homo Sapiens
acuugguagugucagcgggcaccuuuuacacc

SEQ ID NO: 326119 - RNA, 32 nt, Homo Sapiens
cggcaggucccagcccggggcuagagaccgag

SEQ ID NO: 326120 - RNA, 32 nt, Homo Sapiens
aacaaaggguuuucuuuuuuaaauguuucuug

SEQ ID NO: 326121 - RNA, 32 nt, Homo Sapiens
caaccccugugcucagccgaccuugcgaaguu

SEQ ID NO: 326122 - RNA, 32 nt, Homo Sapiens
ggccucuccaacaauuuaaaccucaugaccua

SEQ ID NO: 326123 - RNA, 32 nt, Homo Sapiens
ccaccucauggagacccccgcggccgccgccc

SEQ ID NO: 326124 - RNA, 32 nt, Homo Sapiens
aaacucuugugugugcgcgucucgauagcccc

SEQ ID NO: 326125 - RNA, 32 nt, Homo Sapiens
ggacaccucccuuucuccugcagccauggaug

SEQ ID NO: 326126 - RNA, 32 nt, Homo Sapiens
uugucucagaagcuccaccuccuccuggggca

SEQ ID NO: 326127 - RNA, 32 nt, Homo Sapiens
aucauuuccaugaaaauuucuaagaaaacucc

SEQ ID NO: 326128 - RNA, 32 nt, Homo Sapiens
auugggggugggaacuccccuugcccugugcg

SEQ ID NO: 326129 - RNA, 32 nt, Homo Sapiens
uuuggcuuuauaaacaaacaaacauuguuuua

SEQ ID NO: 326130 - RNA, 32 nt, Homo Sapiens
ucauucauguuuucuuuugucuuuuagcuaaa

SEQ ID NO: 326131 - RNA, 32 nt, Homo Sapiens
cuagggggaaaaaaccaggucuacagugauag

SEQ ID NO: 326132 - RNA, 31 nt, Homo Sapiens
cagccugggcgacagagcuagacuccgucuc

SEQ ID NO: 326133 - RNA, 32 nt, Homo Sapiens
acauguuuuggaugcugucagugaugaauggu

SEQ ID NO: 326134 - RNA, 32 nt, Homo Sapiens
gaggccagccuggaucugucucucccuucccc

SEQ ID NO: 326135 - RNA, 32 nt, Homo Sapiens
gauaagugaagagcagggaaagagaccuuuaa

SEQ ID NO: 326136 - RNA, 32 nt, Homo Sapiens
ggacccagggccucucuuggggucuaaaacuu

SEQ ID NO: 326137 - RNA, 32 nt, Homo Sapiens
uugugggcuucggagccugaugacucagcugu

SEQ ID NO: 326138 - RNA, 32 nt, Homo Sapiens
caagccucauguuuuccaacagaacacaaaug

SEQ ID NO: 326139 - RNA, 32 nt, Homo Sapiens
aggaauauauucuuuaaaaagcaagcgaauau

SEQ ID NO: 326140 - RNA, 32 nt, Homo Sapiens
aaggagagguucuguagaauccaagcccacau

SEQ ID NO: 326141 - RNA, 32 nt, Homo Sapiens
gggaggcugaggcagagcugcuugaacccugg

SEQ ID NO: 326142 - RNA, 32 nt, Homo Sapiens
uucuccagauuggcagaaaguuguauaggugg

SEQ ID NO: 326143 - RNA, 32 nt, Homo Sapiens
aaggucauuguggcucuggggaugccagggca

SEQ ID NO: 326144 - RNA, 32 nt, Homo Sapiens
augauuuucuaguacacagucuaugcauuauu

SEQ ID NO: 326145 - RNA, 32 nt, Homo Sapiens
cgaggcgggaugcaaaccaucccguccugagc

SEQ ID NO: 326146 - RNA, 32 nt, Homo Sapiens
ucugaccuucuuucccaggaugagguggggcc

SEQ ID NO: 326147 - RNA, 32 nt, Homo Sapiens
uuuaaaaagagaaugucuguuguuuuauaaaa

SEQ ID NO: 326148 - RNA, 32 nt, Homo Sapiens
gaagccacacuggcagagcggccagcacaggu

SEQ ID NO: 326149 - RNA, 32 nt, Homo Sapiens
acuagugccaaggaggcguauucuucaauauu

SEQ ID NO: 326150 - RNA, 32 nt, Homo Sapiens
gcccaggaccagccucaguuucucaccaaagu

SEQ ID NO: 326151 - RNA, 32 nt, Homo Sapiens
aaauaaaaacaaauacuguguuucagaagcgc

SEQ ID NO: 326152 - RNA, 32 nt, Homo Sapiens
ucgccuccagcaugaaagucucugccgcccuu

SEQ ID NO: 326153 - RNA, 32 nt, Homo Sapiens
gccuucuggguugucucgaucuguguuucaau

SEQ ID NO: 326154 - RNA, 32 nt, Homo Sapiens
uacaucaccugaccugaucuccagguuccagg

SEQ ID NO: 326155 - RNA, 32 nt, Homo Sapiens
aucguugcgucauggggcaggcguggggagcu

SEQ ID NO: 326156 - RNA, 32 nt, Homo Sapiens
cuucgccgugcagccgagggagucccgcacca

SEQ ID NO: 326157 - RNA, 32 nt, Homo Sapiens
ccgcggggugcccccgcccacacgcuaugccu

SEQ ID NO: 326158 - RNA, 32 nt, Homo Sapiens
ccgacagccugggcaggcucggugccugcggg

SEQ ID NO: 326159 - RNA, 32 nt, Homo Sapiens
agacacgccaugcccggcucauuuucaaauuu

SEQ ID NO: 326160 - RNA, 32 nt, Homo Sapiens
guucaaaaugcagcugcaucugugcagaaacc

SEQ ID NO: 326161 - RNA, 32 nt, Homo Sapiens
cagcagcugcgcaccauccgcgaauggcuggu

SEQ ID NO: 326162 - RNA, 32 nt, Homo Sapiens
agugccaugggccgcccuccccuccugcucuc

SEQ ID NO: 326163 - RNA, 32 nt, Homo Sapiens
gaguccuccucguuccucuccccaccgccugg

SEQ ID NO: 326164 - RNA, 32 nt, Homo Sapiens
cugagggccaggucgggggcaggcauggaggg

SEQ ID NO: 326165 - RNA, 32 nt, Homo Sapiens
ggggcacagccucagcugccugcauuggccaa

SEQ ID NO: 326166 - RNA, 32 nt, Homo Sapiens
accccgcagcuaggcgcgcaggaagggcugca

SEQ ID NO: 326167 - RNA, 32 nt, Homo Sapiens
uucucuuuucuccucauuuccaaagaaacagg

SEQ ID NO: 326168 - RNA, 32 nt, Homo Sapiens
cccacagagacugagaguuggugcuggugguu

SEQ ID NO: 326169 - RNA, 32 nt, Homo Sapiens
gcgcccagccgggaaugcaugcuuuuaggaga

SEQ ID NO: 326170 - RNA, 31 nt, Homo Sapiens
ugccugagcagaggugggggaguccacccuc

SEQ ID NO: 326171 - RNA, 32 nt, Homo Sapiens
caaaaucuugucucuuuuuuuugguauuaaaa

SEQ ID NO: 326172 - RNA, 32 nt, Homo Sapiens
agcaauaaacucccaaaguuuuauggggucau

SEQ ID NO: 326173 - RNA, 32 nt, Homo Sapiens
gcaggcugaggcugggggaggggcucaaggga

SEQ ID NO: 326174 - RNA, 32 nt, Homo Sapiens
agcuuguuuuauuuguaaagcuuucagugaaa

SEQ ID NO: 326175 - RNA, 32 nt, Homo Sapiens
cauccagaacugccuccuugccgcugccucca

SEQ ID NO: 326176 - RNA, 32 nt, Homo Sapiens
agacuguggugauaagaugcuuuccucagcag

SEQ ID NO: 326177 - RNA, 32 nt, Homo Sapiens
ugucaauaaaaagccggaggaugagggaaaua

SEQ ID NO: 326178 - RNA, 32 nt, Homo Sapiens
uagcagguuuguuuuuccugcuguugauuguu

SEQ ID NO: 326179 - RNA, 32 nt, Homo Sapiens
uuuuuuccuuauaaguuuauaaguuugauuuc

SEQ ID NO: 326180 - RNA, 32 nt, Homo Sapiens
gaggcuugagaaaaguggggcuggggagaagc

SEQ ID NO: 326181 - RNA, 32 nt, Homo Sapiens
aaucccuuaggacuggaacacuucaagcucaa

SEQ ID NO: 326182 - RNA, 30 nt, Homo Sapiens
gagccaugaggguggcauuaggcaugcucu

SEQ ID NO: 326183 - RNA, 32 nt, Homo Sapiens
ugcaacuucauuuuguuuuuuauaaauguuau

SEQ ID NO: 326184 - RNA, 32 nt, Homo Sapiens
guuuuuuggacuaguaguauccaggucccuac

SEQ ID NO: 326185 - RNA, 32 nt, Homo Sapiens
agaccacccugauggcauccacagugauguca

SEQ ID NO: 326186 - RNA, 32 nt, Homo Sapiens
uucuccagcagggcuuccugucccgaugcuuc

SEQ ID NO: 326187 - RNA, 31 nt, Homo Sapiens
ccauggagcaggagccugcccugugcgcccc

SEQ ID NO: 326188 - RNA, 29 nt, Homo Sapiens
acuaguggcgggcugaggacgccguaccc

SEQ ID NO: 326189 - RNA, 32 nt, Homo Sapiens
ugggagauugccacagccugcugcugaguuga

SEQ ID NO: 326190 - RNA, 32 nt, Homo Sapiens
ggagggcguuguguguggggcuggacucugag

SEQ ID NO: 326191 - RNA, 32 nt, Homo Sapiens
agucaugugcugcugcuucaucuagcagaggu

SEQ ID NO: 326192 - RNA, 32 nt, Homo Sapiens
gagagaaucagagggaaugcaggacguggucu

SEQ ID NO: 326193 - RNA, 32 nt, Homo Sapiens
uuccuccaucaguagcccuuuauuugauauuc

SEQ ID NO: 326194 - RNA, 32 nt, Homo Sapiens
auauggaaggcacauuuuugcacuauauuagu

SEQ ID NO: 326195 - RNA, 32 nt, Homo Sapiens
ccgcgccaucaaucgccgccgccucgucccgc

SEQ ID NO: 326196 - RNA, 32 nt, Homo Sapiens
cgacccugccagcuuagagggaccccaccccg

SEQ ID NO: 326197 - RNA, 32 nt, Homo Sapiens
gaggagcggcuccggccgccgcgccugacccu

SEQ ID NO: 326198 - RNA, 32 nt, Homo Sapiens
cacaggagaaaguaaaggagcuagaggccucu

SEQ ID NO: 326199 - RNA, 30 nt, Homo Sapiens
uccagaggcaggccuggggccacccgggag

SEQ ID NO: 326200 - RNA, 32 nt, Homo Sapiens
caaugauggugauagaugaaaauuaauguucu

SEQ ID NO: 326201 - RNA, 32 nt, Homo Sapiens
aguguggcagugagaagaagcaucgagggcga

SEQ ID NO: 326202 - RNA, 32 nt, Homo Sapiens
auuagguucaacaugaccuaauauuagagaac

SEQ ID NO: 326203 - RNA, 32 nt, Homo Sapiens
gauauauaugugcucuuaauuuuaagugugua

SEQ ID NO: 326204 - RNA, 32 nt, Homo Sapiens
gagagacgagucaguaagcauucauucauuag

SEQ ID NO: 326205 - RNA, 32 nt, Homo Sapiens
gugugugagggagagggacgcagggagggaaa

SEQ ID NO: 326206 - RNA, 32 nt, Homo Sapiens
aaaacuccauugaucgccugaccuccauaagc

SEQ ID NO: 326207 - RNA, 32 nt, Homo Sapiens
aauuagccgggcgugguggccugcgccuguaa

SEQ ID NO: 326208 - RNA, 32 nt, Homo Sapiens
agucagugguggccacgaugcgguacagggca

SEQ ID NO: 326209 - RNA, 32 nt, Homo Sapiens
uauauguguuuauagagauacacacacauaua

SEQ ID NO: 326210 - RNA, 32 nt, Homo Sapiens
guggcgcaaccucggcucacugcaaccuccgc

SEQ ID NO: 326211 - RNA, 30 nt, Homo Sapiens
cuuuguaaaacagacaagauaugcacuuga

SEQ ID NO: 326212 - RNA, 32 nt, Homo Sapiens
gcuccuguuccuccuuuucucuagcuggcagg

SEQ ID NO: 326213 - RNA, 32 nt, Homo Sapiens
cugccuguuuuacucacccaccagcuuccgcc

SEQ ID NO: 326214 - RNA, 32 nt, Homo Sapiens
cuuguguugcugucagugccaguagggcaggc

SEQ ID NO: 326215 - RNA, 32 nt, Homo Sapiens
ggccaaggcaucugccacugcugcugacugcc

SEQ ID NO: 326216 - RNA, 32 nt, Homo Sapiens
cuugagcagcgggcugagcaggcggcagagga

SEQ ID NO: 326217 - RNA, 32 nt, Homo Sapiens
cauauguugauaacaguacugaagaugcauaa

SEQ ID NO: 326218 - RNA, 32 nt, Homo Sapiens
gacaguugccuuaaugugaagacuccuauagu

SEQ ID NO: 326219 - RNA, 32 nt, Homo Sapiens
uccaucucaccucggggggcugcccucaaugu

SEQ ID NO: 326220 - RNA, 32 nt, Homo Sapiens
cgucgcccgcggcaccguguccccaaggccca

SEQ ID NO: 326221 - RNA, 32 nt, Homo Sapiens
agcuuucucacggagggcacugguugcagagg

SEQ ID NO: 326222 - RNA, 32 nt, Homo Sapiens
ugacaaucuacacccuuuaucuaaauaaauau

SEQ ID NO: 326223 - RNA, 32 nt, Homo Sapiens
uccaggaggaggaggagagaccuguagaaguu

SEQ ID NO: 326224 - RNA, 32 nt, Homo Sapiens
acagagacagcacuggggggaccucacagugc

SEQ ID NO: 326225 - RNA, 31 nt, Homo Sapiens
uguuaacaccuuaagggucuaacuuguaaug

SEQ ID NO: 326226 - RNA, 32 nt, Homo Sapiens
uugcacuccuucccuaacucaacuguugccgu

SEQ ID NO: 326227 - RNA, 32 nt, Homo Sapiens
guuaggcucgcgccggcgcagugucggcugcc

SEQ ID NO: 326228 - RNA, 32 nt, Homo Sapiens
cgggaggggagccacuccuucucccccaacuc

SEQ ID NO: 326229 - RNA, 32 nt, Homo Sapiens
caucuuccaggagagagacggucucgggucca

SEQ ID NO: 326230 - RNA, 32 nt, Homo Sapiens
aaccauucacagacaccaaaucucuaggagaa

SEQ ID NO: 326231 - RNA, 32 nt, Homo Sapiens
uauuuuuauaagcagagaauuuuuuaugucuu

SEQ ID NO: 326232 - RNA, 32 nt, Homo Sapiens
aguggaccugcgccuggauuaucgggccaguc

SEQ ID NO: 326233 - RNA, 32 nt, Homo Sapiens
auacucuccuuucauuuccccauuagcuaaac

SEQ ID NO: 326234 - RNA, 32 nt, Homo Sapiens
gggcauugcccucuccauggcucuggucaccc

SEQ ID NO: 326235 - RNA, 32 nt, Homo Sapiens
gacacccccuccccgccccuguggcccuggcc

SEQ ID NO: 326236 - RNA, 32 nt, Homo Sapiens
gagugagagcccagggacaggucccuggaaac

SEQ ID NO: 326237 - RNA, 32 nt, Homo Sapiens
uguuuaaaaauauuuuauuguaacuuugacaa

SEQ ID NO: 326238 - RNA, 32 nt, Homo Sapiens
ucuagaggagcauugaccccccugaaucagcu

SEQ ID NO: 326239 - RNA, 32 nt, Homo Sapiens
ucaagggcucugcacggcuguggggcccugug

SEQ ID NO: 326240 - RNA, 32 nt, Homo Sapiens
aagagauuuguucaggucaaaaguugcaaaac

SEQ ID NO: 326241 - RNA, 32 nt, Homo Sapiens
acuuguccuacauucauucuccugcuuguaau

SEQ ID NO: 326242 - RNA, 32 nt, Homo Sapiens
guaguuccucgguuguuuuucuuuaaaugcuu

SEQ ID NO: 326243 - RNA, 32 nt, Homo Sapiens
cgucgccccgugcccucacgccgccgggcucu

SEQ ID NO: 326244 - RNA, 32 nt, Homo Sapiens
cccgggcucccaacagauuuccacucucacac

SEQ ID NO: 326245 - RNA, 32 nt, Homo Sapiens
gccuagccggugccgguccgggcacagacccc

SEQ ID NO: 326246 - RNA, 32 nt, Homo Sapiens
uggugagguauaaguuacuugcucuuagcauu

SEQ ID NO: 326247 - RNA, 32 nt, Homo Sapiens
auauccuagagaaaaagacuaaugguauuuca

SEQ ID NO: 326248 - RNA, 32 nt, Homo Sapiens
cauuuauccagcagugaacuguccuagcgcaa

SEQ ID NO: 326249 - RNA, 32 nt, Homo Sapiens
uugcauuuuuccuguuuuaacaacggcugugc

SEQ ID NO: 326250 - RNA, 31 nt, Homo Sapiens
ccggggcgguguggcgcuagagccugggcgg

SEQ ID NO: 326251 - RNA, 32 nt, Homo Sapiens
gcgcacgccggccgcgcccacgugaccggucc

SEQ ID NO: 326252 - RNA, 31 nt, Homo Sapiens
gcaggcagauacugccugacccguucccggg

SEQ ID NO: 326253 - RNA, 32 nt, Homo Sapiens
gcaccauuauucccauuuuaaugaugaggaaa

SEQ ID NO: 326254 - RNA, 32 nt, Homo Sapiens
agccaauauaaaaugugacaugaggccggaca

SEQ ID NO: 326255 - RNA, 29 nt, Homo Sapiens
ccugaauaaaguuuuguggguuuucuucu

SEQ ID NO: 326256 - RNA, 32 nt, Homo Sapiens
gggcccaaggagcaggggcuguugacaaaggc

SEQ ID NO: 326257 - RNA, 32 nt, Homo Sapiens
gccacacccugggccuggcccugcgggagcac

SEQ ID NO: 326258 - RNA, 32 nt, Homo Sapiens
uauauauauuuuaauuugauaguauugugcau

SEQ ID NO: 326259 - RNA, 32 nt, Homo Sapiens
gguggcagaggugggcgugggugcugguggua

SEQ ID NO: 326260 - RNA, 32 nt, Homo Sapiens
aucaaggagaagaaaagagugacuagaagacu

SEQ ID NO: 326261 - RNA, 32 nt, Homo Sapiens
agaaaggguggggaugauaagaaaugcuaaua

SEQ ID NO: 326262 - RNA, 32 nt, Homo Sapiens
ugaaccaaagccucuucaaaaagcagagugga

SEQ ID NO: 326263 - RNA, 32 nt, Homo Sapiens
ucggccgccucuucuuccuucacucacugccc

SEQ ID NO: 326264 - RNA, 32 nt, Homo Sapiens
uguuauguauuuccuggauguuuggaaacauu

SEQ ID NO: 326265 - RNA, 32 nt, Homo Sapiens
gcacggcccagacccaggauuccaaacuugug

SEQ ID NO: 326266 - RNA, 32 nt, Homo Sapiens
ucccuugccuucucccacuuggaccugcucag

SEQ ID NO: 326267 - RNA, 32 nt, Homo Sapiens
aggcauccauauuggauucagaaaagaaaaag

SEQ ID NO: 326268 - RNA, 32 nt, Homo Sapiens
cuaccaggugaccccugcccucagcucucacc

SEQ ID NO: 326269 - RNA, 32 nt, Homo Sapiens
cgcgccugcugcucugccccaacgcgaccgcu

SEQ ID NO: 326270 - RNA, 32 nt, Homo Sapiens
ggcuccucgcagucagguggguucugggggug

SEQ ID NO: 326271 - RNA, 32 nt, Homo Sapiens
ugcaggaguugggaacggggcuuuuguuuccg

SEQ ID NO: 326272 - RNA, 32 nt, Homo Sapiens
auuuucuuuuaaaauuguuuauuguuacaaac

SEQ ID NO: 326273 - RNA, 32 nt, Homo Sapiens
gcaaaaaguuucuaccucucaagcugcaauug

SEQ ID NO: 326274 - RNA, 32 nt, Homo Sapiens
accacuaguucugcuucacucuauuuaucucu

SEQ ID NO: 326275 - RNA, 32 nt, Homo Sapiens
aucccagggugcgggcgggcggagcgaggagg

SEQ ID NO: 326276 - RNA, 32 nt, Homo Sapiens
caacgcccccugaggaauucucuuccugguac

SEQ ID NO: 326277 - RNA, 32 nt, Homo Sapiens
ucaaccucaauccuaaacaagcagcaaggaag

SEQ ID NO: 326278 - RNA, 32 nt, Homo Sapiens
augcuggauaucugcgguaccaaacuauggag

SEQ ID NO: 326279 - RNA, 32 nt, Homo Sapiens
ccacuaaaacuguguucaucauuacaucuaau

SEQ ID NO: 326280 - RNA, 32 nt, Homo Sapiens
gacagggaagaagaggcucucccgcgggagcc

SEQ ID NO: 326281 - RNA, 32 nt, Homo Sapiens
gguugucaggcucaauccuugagccucaacca

SEQ ID NO: 326282 - RNA, 32 nt, Homo Sapiens
uuuaguggccccaggcccacuccucaugcagc

SEQ ID NO: 326283 - RNA, 32 nt, Homo Sapiens
gggaggcugaggcgggcagaucaugaggucag

SEQ ID NO: 326284 - RNA, 32 nt, Homo Sapiens
uggcugcuccgacaggggagacuugucucccu

SEQ ID NO: 326285 - RNA, 32 nt, Homo Sapiens
uaaaguuuagcuucuuuuuacuauucaauauu

SEQ ID NO: 326286 - RNA, 32 nt, Homo Sapiens
gcagcugugguacaaaugugauaauauauugc

SEQ ID NO: 326287 - RNA, 32 nt, Homo Sapiens
gagggcuggccaggccacucccugcccgcuuu

SEQ ID NO: 326288 - RNA, 32 nt, Homo Sapiens
cccaugggaagacgaggcccucgggcccagcc

SEQ ID NO: 326289 - RNA, 32 nt, Homo Sapiens
uuauaagaaagccugaguacuccacacugcac

SEQ ID NO: 326290 - RNA, 32 nt, Homo Sapiens
aaauagguagcuuaaacuuaugucaaaauguc

SEQ ID NO: 326291 - RNA, 32 nt, Homo Sapiens
cccuccucuggcagccucuccugccucugcug

SEQ ID NO: 326292 - RNA, 27 nt, Homo Sapiens
gaaaaugguuaauucugggugugcacc

SEQ ID NO: 326293 - RNA, 32 nt, Homo Sapiens
gucuuuuaaacauuauuuuuuauuucugauuu

SEQ ID NO: 326294 - RNA, 32 nt, Homo Sapiens
cguccccgccgacgccggcuccccgcggcucg

SEQ ID NO: 326295 - RNA, 32 nt, Homo Sapiens
gcgccacagguaucagcgucuggaucgccacu

SEQ ID NO: 326296 - RNA, 32 nt, Homo Sapiens
aguuacacuagaucuucuuucaguuauauuuu

SEQ ID NO: 326297 - RNA, 32 nt, Homo Sapiens
gaacuugcauucuagaggaaaagacagacaau

SEQ ID NO: 326298 - RNA, 32 nt, Homo Sapiens
ccccuccccacuuucauucugugcugcuccaa

SEQ ID NO: 326299 - RNA, 32 nt, Homo Sapiens
ggcuucugucacaggagggaacagcgcugaca

SEQ ID NO: 326300 - RNA, 32 nt, Homo Sapiens
aggcagauauuguaaacuacaaccaggaaccu

SEQ ID NO: 326301 - RNA, 32 nt, Homo Sapiens
guccaacucuagcccacgggucuaaugcagcc

SEQ ID NO: 326302 - RNA, 32 nt, Homo Sapiens
uuccugccccuuccccggccaagcccaacucc

SEQ ID NO: 326303 - RNA, 32 nt, Homo Sapiens
augaauucuacauccuucucaucaccugguuu

SEQ ID NO: 326304 - RNA, 32 nt, Homo Sapiens
ccaaguacgcagagacccccucgacauccugg

SEQ ID NO: 326305 - RNA, 32 nt, Homo Sapiens
gaggggaagugaauucaccccagaccugaguu

SEQ ID NO: 326306 - RNA, 32 nt, Homo Sapiens
gcuuggccauuucuccaugaugagaaggacug

SEQ ID NO: 326307 - RNA, 32 nt, Homo Sapiens
aaugacauuuuacuguauuuaauaaagcucug

SEQ ID NO: 326308 - RNA, 32 nt, Homo Sapiens
ucugcuccgcucaggacccccggagccccgcg

SEQ ID NO: 326309 - RNA, 32 nt, Homo Sapiens
gccgugaagaaccugguggacagcagcgucua

SEQ ID NO: 326310 - RNA, 32 nt, Homo Sapiens
cagcgaccccuucucagacuccaguugggccg

SEQ ID NO: 326311 - RNA, 30 nt, Homo Sapiens
uuuuaauaacauuuuucccaucuuguaaua

SEQ ID NO: 326312 - RNA, 32 nt, Homo Sapiens
gacggagucucacucuguuacccaggcuggaa

SEQ ID NO: 326313 - RNA, 32 nt, Homo Sapiens
gauggagucucacucugucacccaggcuggaa

SEQ ID NO: 326314 - RNA, 32 nt, Homo Sapiens
gaugguuugcugaaagccaaguaucuuuauac

SEQ ID NO: 326315 - RNA, 32 nt, Homo Sapiens
acaugaacucauucuuuuuuauggcugcauag

SEQ ID NO: 326316 - RNA, 32 nt, Homo Sapiens
gaggcggcaguggcgagcuggggggagggggg

SEQ ID NO: 326317 - RNA, 32 nt, Homo Sapiens
agaagagcgaugggagggggugacguggcagu

SEQ ID NO: 326318 - RNA, 32 nt, Homo Sapiens
gcgcggaugggauccagcuguuagucggguag

SEQ ID NO: 326319 - RNA, 32 nt, Homo Sapiens
caccaaccugucauccagcauuagguauaucu

SEQ ID NO: 326320 - RNA, 32 nt, Homo Sapiens
ccugccccaggccuuuucccagaugggugagc

SEQ ID NO: 326321 - RNA, 32 nt, Homo Sapiens
cuggcugggugccacucugugcuaccuccaug

SEQ ID NO: 326322 - RNA, 32 nt, Homo Sapiens
gggcggggaggcgacaguccccggcuccgccg

SEQ ID NO: 326323 - RNA, 32 nt, Homo Sapiens
uuaagugaaaaacauggggaaggggaaagggg

SEQ ID NO: 326324 - RNA, 32 nt, Homo Sapiens
ucccauccccucccagccuccuccuccggcag

SEQ ID NO: 326325 - RNA, 32 nt, Homo Sapiens
gcucguggaccagcugcagcaccagagaaaag

SEQ ID NO: 326326 - RNA, 32 nt, Homo Sapiens
agcgcaggccccccggcccgguugcuuccuca

SEQ ID NO: 326327 - RNA, 28 nt, Homo Sapiens
gcggugucucguagcgggcggcagcgcc

SEQ ID NO: 326328 - RNA, 28 nt, Homo Sapiens
ggacagaggcuucugaggaugacauggg

SEQ ID NO: 326329 - RNA, 32 nt, Homo Sapiens
cacagugugaggggcauggggaggcaggagua

SEQ ID NO: 326330 - RNA, 32 nt, Homo Sapiens
acuuaacccucuuuuguauaaaacaugugcuu

SEQ ID NO: 326331 - RNA, 32 nt, Homo Sapiens
gguggugacuucuggugacauaguaauaaagu

SEQ ID NO: 326332 - RNA, 32 nt, Homo Sapiens
aggucggauuguagaagcugggguggccggca

SEQ ID NO: 326333 - RNA, 32 nt, Homo Sapiens
ucucaguucauaaaguuuuuuacaauucaaaa

SEQ ID NO: 326334 - RNA, 32 nt, Homo Sapiens
agaagaguauauaaauacuuuaccaagaagag

SEQ ID NO: 326335 - RNA, 31 nt, Homo Sapiens
ucugugagggcggggaguaugagccugaugu

SEQ ID NO: 326336 - RNA, 32 nt, Homo Sapiens
guguuuacuguaaaauauaaucuguuuaucuc

SEQ ID NO: 326337 - RNA, 32 nt, Homo Sapiens
gaaccgugguggccuagaccagucaggggaca

SEQ ID NO: 326338 - RNA, 32 nt, Homo Sapiens
uaugcauucuucaugaauacuuuuguauugcu

SEQ ID NO: 326339 - RNA, 32 nt, Homo Sapiens
agauaucguguacauaggaacugguguagaua

SEQ ID NO: 326340 - RNA, 32 nt, Homo Sapiens
auaggagaguggaugauagaugcaaaauaaua

SEQ ID NO: 326341 - RNA, 32 nt, Homo Sapiens
cgugcauggcagccuucccuggacgagcgcuc

SEQ ID NO: 326342 - RNA, 32 nt, Homo Sapiens
ugugagccaaggaggcaaacugcacaagcuug

SEQ ID NO: 326343 - RNA, 32 nt, Homo Sapiens
uccugcucagguguuagguacaguguguuuga

SEQ ID NO: 326344 - RNA, 32 nt, Homo Sapiens
cccccggccccgcuccugcccauuccucuguc

SEQ ID NO: 326345 - RNA, 32 nt, Homo Sapiens
cccagaggaaccugaggccugaaggaggugag

SEQ ID NO: 326346 - RNA, 32 nt, Homo Sapiens
accccacugaccaauuuuccacugaccugguc

SEQ ID NO: 326347 - RNA, 32 nt, Homo Sapiens
ucccgaagguggcgauggcgccagggacacca

SEQ ID NO: 326348 - RNA, 32 nt, Homo Sapiens
accauucaguaggagcucuacaacuuguugaa

SEQ ID NO: 326349 - RNA, 32 nt, Homo Sapiens
gauauuaaagcuggguacuaagaaaugucauu

SEQ ID NO: 326350 - RNA, 32 nt, Homo Sapiens
ccagccagacugccucuugaaagauggcuugu

SEQ ID NO: 326351 - RNA, 29 nt, Homo Sapiens
ggauuuuaaaguuuacuuucuacaaacuc

SEQ ID NO: 326352 - RNA, 32 nt, Homo Sapiens
cugcaggaaauauaaacuuaaaauaaaauuau

SEQ ID NO: 326353 - RNA, 27 nt, Homo Sapiens
ccccgacccuucuucgcccccaaaaug

SEQ ID NO: 326354 - RNA, 32 nt, Homo Sapiens
aucuacaggaggaggagaagaaucauccacac

SEQ ID NO: 326355 - RNA, 32 nt, Homo Sapiens
ggaucaagugaaaaggaggaccaagaggcaac

SEQ ID NO: 326356 - RNA, 32 nt, Homo Sapiens
agcggcgcggcagcggcaggaccgccguggcg

SEQ ID NO: 326357 - RNA, 32 nt, Homo Sapiens
cuguuuuucuucauugcuuacugagaggguuu

SEQ ID NO: 326358 - RNA, 32 nt, Homo Sapiens
ucucuccaaugauuuaugucuuucuuuccuau

SEQ ID NO: 326359 - RNA, 29 nt, Homo Sapiens
aagaaacuuaacaaucauggcagaaggac

SEQ ID NO: 326360 - RNA, 32 nt, Homo Sapiens
ggagacguaguggccugggcugagcugggugg

SEQ ID NO: 326361 - RNA, 32 nt, Homo Sapiens
augagggagcagcuuggauucuucucaguugu

SEQ ID NO: 326362 - RNA, 32 nt, Homo Sapiens
aggcucgccccgagaacaagcagcacaaacag

SEQ ID NO: 326363 - RNA, 32 nt, Homo Sapiens
cggugggcgggggaguggggggccgguaaucu

SEQ ID NO: 326364 - RNA, 32 nt, Homo Sapiens
ggccaagcacugucaggcuggugccccugcug

SEQ ID NO: 326365 - RNA, 32 nt, Homo Sapiens
ucuuaacaugguuccaaggccuugcuugaucc

SEQ ID NO: 326366 - RNA, 32 nt, Homo Sapiens
auaaauaaacugugucugucuuugaaaaaaaa

SEQ ID NO: 326367 - RNA, 32 nt, Homo Sapiens
ucaaguuaauugguaaauuuuuauugaaauuu

SEQ ID NO: 326368 - RNA, 32 nt, Homo Sapiens
accugagcuccguagaagcuaagcuccugaga

SEQ ID NO: 326369 - RNA, 32 nt, Homo Sapiens
ggcgagaugagcugcgcagccccgcccuccau

SEQ ID NO: 326370 - RNA, 32 nt, Homo Sapiens
aauugugcuucucaugcccugaaacugcugga

SEQ ID NO: 326371 - RNA, 32 nt, Homo Sapiens
uauaccaaauuaaccaacuauauuauaggaaa

SEQ ID NO: 326372 - RNA, 32 nt, Homo Sapiens
gugggcgccguuccugaauccggagcguuucc

SEQ ID NO: 326373 - RNA, 32 nt, Homo Sapiens
cuaacuccugucccccuucucuacuccuuugc

SEQ ID NO: 326374 - RNA, 28 nt, Homo Sapiens
ggaggguugucuauuguguguggcugua

SEQ ID NO: 326375 - RNA, 32 nt, Homo Sapiens
aaauauuaacaaguaagauucaugucucuaua

SEQ ID NO: 326376 - RNA, 32 nt, Homo Sapiens
cucuggucauuucagacucucaucucucuauu

SEQ ID NO: 326377 - RNA, 32 nt, Homo Sapiens
gacccggccaccagcucuggcucgucuugccc

SEQ ID NO: 326378 - RNA, 32 nt, Homo Sapiens
gccggcuccgcuccggccccggacgaugcggc

SEQ ID NO: 326379 - RNA, 32 nt, Homo Sapiens
ccuucccucuucuccuuacauauuauaggugg

SEQ ID NO: 326380 - RNA, 32 nt, Homo Sapiens
ccgucaccaagcccucucccgacccaggcuuu

SEQ ID NO: 326381 - RNA, 32 nt, Homo Sapiens
gcugucgccgaggcgaggcugcggagacguuc

SEQ ID NO: 326382 - RNA, 32 nt, Homo Sapiens
uccuuguccugaggggccccagcuugcucggg

SEQ ID NO: 326383 - RNA, 32 nt, Homo Sapiens
ucuguguacacgcucugcccguggagcugccu

SEQ ID NO: 326384 - RNA, 32 nt, Homo Sapiens
gacagacagacacacacacacacacacacaca

SEQ ID NO: 326385 - RNA, 32 nt, Homo Sapiens
cuacuguucaauguaauuaauaaaauauuaau

SEQ ID NO: 326386 - RNA, 32 nt, Homo Sapiens
cacacacacacacacacacacacacacagaca

SEQ ID NO: 326387 - RNA, 32 nt, Homo Sapiens
cacagacacacacacacacacacacacacaca

SEQ ID NO: 326388 - RNA, 32 nt, Homo Sapiens
ucuuuuacaaauaucuauagacaugguaaacu

SEQ ID NO: 326389 - RNA, 27 nt, Homo Sapiens
guuguuuucuucuucaccugcuccuau

SEQ ID NO: 326390 - RNA, 32 nt, Homo Sapiens
accacugcugucagcaagcacaucagacucua

SEQ ID NO: 326391 - RNA, 32 nt, Homo Sapiens
uggauuugcauucagguuccagcccugcguuu

SEQ ID NO: 326392 - RNA, 32 nt, Homo Sapiens
ccuguccaaaugcgcgcaccaggaccgagggg

SEQ ID NO: 326393 - RNA, 32 nt, Homo Sapiens
gccaaauauaacagaggguaugugcuacagag

SEQ ID NO: 326394 - RNA, 32 nt, Homo Sapiens
agcugaucauauugaucaguagauaaacguaa

SEQ ID NO: 326395 - RNA, 32 nt, Homo Sapiens
gcacuagcggggaggagcuucccgcggccugc

SEQ ID NO: 326396 - RNA, 32 nt, Homo Sapiens
cgccgccaacccuggcuuugccucaggcaccg

SEQ ID NO: 326397 - RNA, 32 nt, Homo Sapiens
aagaauccaaaaagcaauauuuuucaucacau

SEQ ID NO: 326398 - RNA, 32 nt, Homo Sapiens
caaagaggaggaaauuuggaaauacagugaau

SEQ ID NO: 326399 - RNA, 32 nt, Homo Sapiens
ccuuccuucccucuccuugucucauguugacc

SEQ ID NO: 326400 - RNA, 32 nt, Homo Sapiens
aacaugacuugaagcucuaguuuucuagaucu

SEQ ID NO: 326401 - RNA, 32 nt, Homo Sapiens
uguuguucagguuuuuuuuuuaaauacugaua

SEQ ID NO: 326402 - RNA, 32 nt, Homo Sapiens
aauuuuggagggcauggggacuguggacccau

SEQ ID NO: 326403 - RNA, 32 nt, Homo Sapiens
ccagucccugucaucacccaguuuuucccucu

SEQ ID NO: 326404 - RNA, 32 nt, Homo Sapiens
aaaauuaaaaauacgugagaagcacccacuug

SEQ ID NO: 326405 - RNA, 32 nt, Homo Sapiens
uuaauuuggcaaguguugcucuucuuaaaaca

SEQ ID NO: 326406 - RNA, 32 nt, Homo Sapiens
guguuuggaaagauuuuuuacuuuuuaaaugc

SEQ ID NO: 326407 - RNA, 32 nt, Homo Sapiens
acaauuuuggaaacaucuccacgacuuauucg

SEQ ID NO: 326408 - RNA, 32 nt, Homo Sapiens
ugggaagaaauacauuuccuaauguauuuaua

SEQ ID NO: 326409 - RNA, 32 nt, Homo Sapiens
uaaguguucauuuggagcaucuugaaaagcug

SEQ ID NO: 326410 - RNA, 32 nt, Homo Sapiens
cucugcaacacuuugaggacauuuaugauugu

SEQ ID NO: 326411 - RNA, 32 nt, Homo Sapiens
gaggaacccuaagggcucauugagaucaugga

SEQ ID NO: 326412 - RNA, 32 nt, Homo Sapiens
acccugagcccggaccgcuaggcgaggaggau

SEQ ID NO: 326413 - RNA, 32 nt, Homo Sapiens
aucucaucuguaauuguaauccucauaauccc

SEQ ID NO: 326414 - RNA, 32 nt, Homo Sapiens
guucauagaaaagacauaaaugaggaaacucc

SEQ ID NO: 326415 - RNA, 32 nt, Homo Sapiens
gcagguuugguuuuuauuaaaaugauguguuu

SEQ ID NO: 326416 - RNA, 32 nt, Homo Sapiens
guuucaaaaggaucuuccauuauuuugcaaaa

SEQ ID NO: 326417 - RNA, 32 nt, Homo Sapiens
cucuguguauaaacuguacagaccguggccgc

SEQ ID NO: 326418 - RNA, 32 nt, Homo Sapiens
uguugggacaggagguacaaaggggaguggug

SEQ ID NO: 326419 - RNA, 32 nt, Homo Sapiens
guaccccacagcuagacagugucagcacucau

SEQ ID NO: 326420 - RNA, 32 nt, Homo Sapiens
acagaccccccgacccucccccacaagccuuu

SEQ ID NO: 326421 - RNA, 32 nt, Homo Sapiens
cucgguggcuuugggacagacacgcgaggcgc

SEQ ID NO: 326422 - RNA, 32 nt, Homo Sapiens
aguucugcucuuguugcccagguuggagugua

SEQ ID NO: 326423 - RNA, 32 nt, Homo Sapiens
cgggggccuuaccccacccuggcaccggcagg

SEQ ID NO: 326424 - RNA, 32 nt, Homo Sapiens
cagaucccgggcucuccgaacgcaacuucgcc

SEQ ID NO: 326425 - RNA, 32 nt, Homo Sapiens
guagcccugugcugccuccagugaagagucuc

SEQ ID NO: 326426 - RNA, 32 nt, Homo Sapiens
uaauaaaaaugaaagauugaauguucaugugu

SEQ ID NO: 326427 - RNA, 32 nt, Homo Sapiens
gaaauugccgaacgcgaugcccgagggcgcug

SEQ ID NO: 326428 - RNA, 32 nt, Homo Sapiens
aauuuuacaauacacugaauuuuuugguggug

SEQ ID NO: 326429 - RNA, 32 nt, Homo Sapiens
guggcuucucuuuuccacuuuggacuucucag

SEQ ID NO: 326430 - RNA, 32 nt, Homo Sapiens
cgccgacucccugagucuggaccuccaucccu

SEQ ID NO: 326431 - RNA, 32 nt, Homo Sapiens
ccuuccccuuggcggcucuccucccccaaccc

SEQ ID NO: 326432 - RNA, 32 nt, Homo Sapiens
gaacaaaaccccuuuuugauaaaugcauuugg

SEQ ID NO: 326433 - RNA, 32 nt, Homo Sapiens
uuauuaaugaacuucuaaauuucuaauuucuc

SEQ ID NO: 326434 - RNA, 32 nt, Homo Sapiens
uaaaugaacuaaaagccagcauccugccgggc

SEQ ID NO: 326435 - RNA, 32 nt, Homo Sapiens
gugagcugagauuguaccaugcacuccagccu

SEQ ID NO: 326436 - RNA, 32 nt, Homo Sapiens
cuggccccggcccuucccucacuuccauccau

SEQ ID NO: 326437 - RNA, 32 nt, Homo Sapiens
aggcgucgcgcgcgccuguagcucgcgggccu

SEQ ID NO: 326438 - RNA, 32 nt, Homo Sapiens
ccuuggcaagacccuucuccccggaaagccuc

SEQ ID NO: 326439 - RNA, 30 nt, Homo Sapiens
cacgcgcccuggcagcaccaugagccgcca

SEQ ID NO: 326440 - RNA, 32 nt, Homo Sapiens
cccuuccuuguacuaucccuaugaggcauaau

SEQ ID NO: 326441 - RNA, 32 nt, Homo Sapiens
acucuucaggaagaaaggagucugcacaugca

SEQ ID NO: 326442 - RNA, 32 nt, Homo Sapiens
caccacccauucucccaauggucuuuagaaau

SEQ ID NO: 326443 - RNA, 32 nt, Homo Sapiens
cgggagugguggcgcgcgccuguaaucccagc

SEQ ID NO: 326444 - RNA, 32 nt, Homo Sapiens
uguucugcuguuguuugaucuaaucuuaauca

SEQ ID NO: 326445 - RNA, 32 nt, Homo Sapiens
caaugggccaugaucacgauccugcacuccag

SEQ ID NO: 326446 - RNA, 32 nt, Homo Sapiens
gccagucgugauuaaagugauaaaaccccaua

SEQ ID NO: 326447 - RNA, 32 nt, Homo Sapiens
gucacaugaaaaaaaaucauuuuauccgucuu

SEQ ID NO: 326448 - RNA, 32 nt, Homo Sapiens
guguuauaaaaaguuaaaugaagaauaaacgc

SEQ ID NO: 326449 - RNA, 32 nt, Homo Sapiens
uuucagcguccgcggcugggaaaucggccauc

SEQ ID NO: 326450 - RNA, 32 nt, Homo Sapiens
cuccucgccggggaaggccggaugcuggcccg

SEQ ID NO: 326451 - RNA, 32 nt, Homo Sapiens
cugucuucgcugggcucuggacucacugcuca

SEQ ID NO: 326452 - RNA, 32 nt, Homo Sapiens
agcagucggaccgcgccgcccgccuccccucu

SEQ ID NO: 326453 - RNA, 32 nt, Homo Sapiens
uuguggugagaggcuaccccccuguggccccg

SEQ ID NO: 326454 - RNA, 32 nt, Homo Sapiens
cccucacagucuuauagcacaauauacccaaa

SEQ ID NO: 326455 - RNA, 32 nt, Homo Sapiens
ggccaggccagacggacuguggaugucugaug

SEQ ID NO: 326456 - RNA, 32 nt, Homo Sapiens
uuacugaaugaucuauuccccaucccaaggca

SEQ ID NO: 326457 - RNA, 32 nt, Homo Sapiens
ucagauaauguuuuacuacuaggaauuacaaa

SEQ ID NO: 326458 - RNA, 31 nt, Homo Sapiens
gagccgagggcgggcguggacgggaccgacg

SEQ ID NO: 326459 - RNA, 32 nt, Homo Sapiens
ccugggucccgggaugccccugcccgagccca

SEQ ID NO: 326460 - RNA, 32 nt, Homo Sapiens
gugccuggcuuucuggccugagguggaagcag

SEQ ID NO: 326461 - RNA, 32 nt, Homo Sapiens
aucccuccaagugauucuuuuacaucccagcu

SEQ ID NO: 326462 - RNA, 32 nt, Homo Sapiens
gauugcauuucccacuccccucuuccacaagu

SEQ ID NO: 326463 - RNA, 32 nt, Homo Sapiens
augguaauagugguucuuucuggauugaagac

SEQ ID NO: 326464 - RNA, 32 nt, Homo Sapiens
uaugaauuaagugacagauuuguuauccuuua

SEQ ID NO: 326465 - RNA, 32 nt, Homo Sapiens
uaguuccauuuucucccaguuccuucucgucu

SEQ ID NO: 326466 - RNA, 32 nt, Homo Sapiens
gguaugaaugaaggugugagugccuguuuuga

SEQ ID NO: 326467 - RNA, 32 nt, Homo Sapiens
auaaaaacuugaaaauauaugauggcucgugg

SEQ ID NO: 326468 - RNA, 32 nt, Homo Sapiens
cccuggacucauuugagaagacuugagaaaug

SEQ ID NO: 326469 - RNA, 32 nt, Homo Sapiens
ucauccuuaaauuccuucucacaacaguguca

SEQ ID NO: 326470 - RNA, 32 nt, Homo Sapiens
aaaauuuguaaauuucuaaauccaaucaugua

SEQ ID NO: 326471 - RNA, 32 nt, Homo Sapiens
gagaacccccggggcucugaaagcuugcccug

SEQ ID NO: 326472 - RNA, 32 nt, Homo Sapiens
cucacacagcacccggccccagcugccuuuuu

SEQ ID NO: 326473 - RNA, 32 nt, Homo Sapiens
augcgcauugaaaauaaacauaaaauguuacc

SEQ ID NO: 326474 - RNA, 32 nt, Homo Sapiens
aaaaauuagucucagaaagagcuuuuagucug

SEQ ID NO: 326475 - RNA, 32 nt, Homo Sapiens
uaucuaauuuuuuguuuuuguuuuuggacagu

SEQ ID NO: 326476 - RNA, 32 nt, Homo Sapiens
gaugccauaccauuuuaaaaguaguaagaguu

SEQ ID NO: 326477 - RNA, 32 nt, Homo Sapiens
cuggugauauaaaaaucaaaucuuggagggga

SEQ ID NO: 326478 - RNA, 32 nt, Homo Sapiens
uccagcacuguggaaggccgagguggguggau

SEQ ID NO: 326479 - RNA, 32 nt, Homo Sapiens
uuuucccggggaaagggaaaagggaccauagg

SEQ ID NO: 326480 - RNA, 32 nt, Homo Sapiens
auuuggauauguccuucauauuugauuggauu

SEQ ID NO: 326481 - RNA, 32 nt, Homo Sapiens
uucuggccuuuucauuuuuagaggcugaccgu

SEQ ID NO: 326482 - RNA, 32 nt, Homo Sapiens
agaaagggugacugaggggauggaauuauaga

SEQ ID NO: 326483 - RNA, 32 nt, Homo Sapiens
aauuagccgggcgugguggcgugugccacugu

SEQ ID NO: 326484 - RNA, 32 nt, Homo Sapiens
gcacuguggcuuuggcagcuguucuacaggac

SEQ ID NO: 326485 - RNA, 32 nt, Homo Sapiens
aauaaaaaaaaauuaucacaaacgaaaaugga

SEQ ID NO: 326486 - RNA, 30 nt, Homo Sapiens
uggugauuguugcugccgccgccaccgccc

SEQ ID NO: 326487 - RNA, 32 nt, Homo Sapiens
cuuccuuccccucccuugcaugauggaaacac

SEQ ID NO: 326488 - RNA, 32 nt, Homo Sapiens
uuuuucuauuuaauuuuugucuaauaucuuag

SEQ ID NO: 326489 - RNA, 32 nt, Homo Sapiens
ugacacggugcagcugaacgugaagcgugagu

SEQ ID NO: 326490 - RNA, 32 nt, Homo Sapiens
agcucuuguuucucaggcugccugcagaagaa

SEQ ID NO: 326491 - RNA, 32 nt, Homo Sapiens
agcuuacuuuuguauggauucagaauauacua

SEQ ID NO: 326492 - RNA, 32 nt, Homo Sapiens
cuuguaaaguacaaaaucauuucuggaaauga

SEQ ID NO: 326493 - RNA, 32 nt, Homo Sapiens
cacucggacguccccggaccagcccucagucu

SEQ ID NO: 326494 - RNA, 32 nt, Homo Sapiens
uacaaucuuggaaucccugucuucuuaauuuu

SEQ ID NO: 326495 - RNA, 32 nt, Homo Sapiens
ucgcuaaacgcccccaguuccacaccaugggu

SEQ ID NO: 326496 - RNA, 32 nt, Homo Sapiens
ucacugaaguacacagggacuaaccaaggaga

SEQ ID NO: 326497 - RNA, 32 nt, Homo Sapiens
aggagcucauuucagauuccuaaagaaauaga

SEQ ID NO: 326498 - RNA, 32 nt, Homo Sapiens
ccuccucagcuggccuguguuuggggcaugaa

SEQ ID NO: 326499 - RNA, 32 nt, Homo Sapiens
gagagagaggaugugccaucaugauuaaugaa

SEQ ID NO: 326500 - RNA, 32 nt, Homo Sapiens
uuuaaacgauaauaagaaaaagggcaacucca

SEQ ID NO: 326501 - RNA, 32 nt, Homo Sapiens
aguuacuuauucucaaagaaaaucuuugaaag

SEQ ID NO: 326502 - RNA, 32 nt, Homo Sapiens
auacauagcuuugauuuaauuuuuuaguuuau

SEQ ID NO: 326503 - RNA, 32 nt, Homo Sapiens
gggaaggcuggagaggcagacggugggaccca

SEQ ID NO: 326504 - RNA, 32 nt, Homo Sapiens
aaaucaaguuaauguacuuucauucccuuuca

SEQ ID NO: 326505 - RNA, 32 nt, Homo Sapiens
auaacuacacaaaacugaccaaucuggguugc

SEQ ID NO: 326506 - RNA, 32 nt, Homo Sapiens
gucaagggcuucuuggacaguuuggacguuac

SEQ ID NO: 326507 - RNA, 32 nt, Homo Sapiens
aaguuuacugggcgguuuccauuugaaugcug

SEQ ID NO: 326508 - RNA, 32 nt, Homo Sapiens
augagagacggcggcggccgcggcccggagcc

SEQ ID NO: 326509 - RNA, 30 nt, Homo Sapiens
ccuuuggaugccccugccugcucugucucu

SEQ ID NO: 326510 - RNA, 32 nt, Homo Sapiens
acacuggaguuguaaaaguacagaccaaccca

SEQ ID NO: 326511 - RNA, 32 nt, Homo Sapiens
ucacauccuggacaggccacuugcuugcugug

SEQ ID NO: 326512 - RNA, 32 nt, Homo Sapiens
uguuggggccccagccguaguggcuuagaggc

SEQ ID NO: 326513 - RNA, 32 nt, Homo Sapiens
uagaccuagaaaagaaucgugacgggcaggaa

SEQ ID NO: 326514 - RNA, 32 nt, Homo Sapiens
auauagucaaugcacuaacaauuauguauauu

SEQ ID NO: 326515 - RNA, 32 nt, Homo Sapiens
gagucacgguuggggacgggcgcgccucggag

SEQ ID NO: 326516 - RNA, 32 nt, Homo Sapiens
gcccagauugccagcucuggguugacugugga

SEQ ID NO: 326517 - RNA, 31 nt, Homo Sapiens
acccggucacggaggccggccaccugcagag

SEQ ID NO: 326518 - RNA, 32 nt, Homo Sapiens
ugaacuaggcaagcagaagagugugagcucau

SEQ ID NO: 326519 - RNA, 32 nt, Homo Sapiens
aagacacacacccaggcaaccccugggcugug

SEQ ID NO: 326520 - RNA, 32 nt, Homo Sapiens
caccaggacagagcugccaacugcacauggag

SEQ ID NO: 326521 - RNA, 32 nt, Homo Sapiens
cccaagucaauacauauuugccucuauuuuua

SEQ ID NO: 326522 - RNA, 29 nt, Homo Sapiens
ggaucuguguguauguacauaguagacau

SEQ ID NO: 326523 - RNA, 32 nt, Homo Sapiens
cgcggcucggggcuggggcgccagaaguggga

SEQ ID NO: 326524 - RNA, 32 nt, Homo Sapiens
ccgacacacaaaagccgcuuucuccgcgccgc

SEQ ID NO: 326525 - RNA, 32 nt, Homo Sapiens
auuguugcacaaaaaucucacuacucucuucc

SEQ ID NO: 326526 - RNA, 32 nt, Homo Sapiens
agguuuuacuggucaaaaugacugcugaaaau

SEQ ID NO: 326527 - RNA, 32 nt, Homo Sapiens
agagggaaaauugcauagcuuuuuguaacauu

SEQ ID NO: 326528 - RNA, 32 nt, Homo Sapiens
cuauaaagaaaagagggagagaugaguggguu

SEQ ID NO: 326529 - RNA, 32 nt, Homo Sapiens
uuauuucugggcacuugacucuauuccauuga

SEQ ID NO: 326530 - RNA, 32 nt, Homo Sapiens
ggccauauuuucuuccaguuuauuuuccuucc

SEQ ID NO: 326531 - RNA, 32 nt, Homo Sapiens
uuuucauuuuugguagagacaggguuuugccg

SEQ ID NO: 326532 - RNA, 32 nt, Homo Sapiens
uugaugagaaaacuuaaaauauuguuuuuggu

SEQ ID NO: 326533 - RNA, 32 nt, Homo Sapiens
gaugacauaauuuuuguguaguuuauuuaucu

SEQ ID NO: 326534 - RNA, 32 nt, Homo Sapiens
aucagugucuuacugugaagaaaauacugguc

SEQ ID NO: 326535 - RNA, 32 nt, Homo Sapiens
gccaggacagcugguccaaguggccacaguga

SEQ ID NO: 326536 - RNA, 32 nt, Homo Sapiens
auguggucugcuguggggcacagagacaugag

SEQ ID NO: 326537 - RNA, 32 nt, Homo Sapiens
guggacuggcucaccgagaagaugcaugcucg

SEQ ID NO: 326538 - RNA, 32 nt, Homo Sapiens
ggguauaaugaaaaucuuacugaaaguuaauu

SEQ ID NO: 326539 - RNA, 32 nt, Homo Sapiens
cuggugcggcagcggcggccaaaucuuccguc

SEQ ID NO: 326540 - RNA, 32 nt, Homo Sapiens
uucucagcuucugcgaucagauuaucaucacc

SEQ ID NO: 326541 - RNA, 32 nt, Homo Sapiens
uccuccccauccccaggcaccucugagccagu

SEQ ID NO: 326542 - RNA, 32 nt, Homo Sapiens
ugcuaagauaaaauugcuuuuccaggucaaaa

SEQ ID NO: 326543 - RNA, 32 nt, Homo Sapiens
cugaguaaacacagacuacaaauguuccucaa

SEQ ID NO: 326544 - RNA, 32 nt, Homo Sapiens
gaaaaugaucacugauaaauaucuucauggug

SEQ ID NO: 326545 - RNA, 32 nt, Homo Sapiens
aaccuggugucuauccggcagagggaggaagg

SEQ ID NO: 326546 - RNA, 32 nt, Homo Sapiens
gccucucugcgggggaggaaaagcucaagguu

SEQ ID NO: 326547 - RNA, 32 nt, Homo Sapiens
uguuugcaaaaauauggcacauguauacauuu

SEQ ID NO: 326548 - RNA, 32 nt, Homo Sapiens
cgaaccucacuucuaacuuucacggugggacg

SEQ ID NO: 326549 - RNA, 32 nt, Homo Sapiens
uaaugaugcaagauguuaauaauuggggagcc

SEQ ID NO: 326550 - RNA, 32 nt, Homo Sapiens
uccuuugagaauugugcgacuucacaaaaugc

SEQ ID NO: 326551 - RNA, 32 nt, Homo Sapiens
cacaauuaggagaaauaugugcauggggauuu

SEQ ID NO: 326552 - RNA, 32 nt, Homo Sapiens
uguguccucccggccccgccggaucccugccu

SEQ ID NO: 326553 - RNA, 32 nt, Homo Sapiens
ggcccaggggaggugagucagagcuggcagag

SEQ ID NO: 326554 - RNA, 32 nt, Homo Sapiens
auuuucauacccauuaagccaaugugacaagc

SEQ ID NO: 326555 - RNA, 32 nt, Homo Sapiens
ugggucccagacggaggcccucgcccgcuuuu

SEQ ID NO: 326556 - RNA, 32 nt, Homo Sapiens
ccgauccgcccgccggcucccccucccccgau

SEQ ID NO: 326557 - RNA, 32 nt, Homo Sapiens
guggggauaugcaaggggcucuggccaggcca

SEQ ID NO: 326558 - RNA, 32 nt, Homo Sapiens
cugaguggggauuacaggccacagcaaacaca

SEQ ID NO: 326559 - RNA, 32 nt, Homo Sapiens
gguauguuguuugguagagagaucuugauuuu

SEQ ID NO: 326560 - RNA, 32 nt, Homo Sapiens
uugggguguaauuguucagugguuuuugcuca

SEQ ID NO: 326561 - RNA, 32 nt, Homo Sapiens
uccacuauuggcuuauguuuuaucuuacucua

SEQ ID NO: 326562 - RNA, 32 nt, Homo Sapiens
gggauugguccguguggugaugugucucaucu

SEQ ID NO: 326563 - RNA, 32 nt, Homo Sapiens
gggaacugcagcugcgaccccccgcguccugu

SEQ ID NO: 326564 - RNA, 32 nt, Homo Sapiens
agaguggucacauuacagauggucaagaaggc

SEQ ID NO: 326565 - RNA, 32 nt, Homo Sapiens
ccauaaauauuuuaaauaauauuucuuaagag

SEQ ID NO: 326566 - RNA, 32 nt, Homo Sapiens
aucuuacucugcaacacuacgguccuaguuaa

SEQ ID NO: 326567 - RNA, 32 nt, Homo Sapiens
uuucaugacaacacauuccaaaaugaaucaug

SEQ ID NO: 326568 - RNA, 32 nt, Homo Sapiens
uaaauuuuggaaagauaacucucguucuacaa

SEQ ID NO: 326569 - RNA, 32 nt, Homo Sapiens
cggaguggggagaggcugagccgggccaccgu

SEQ ID NO: 326570 - RNA, 32 nt, Homo Sapiens
ggagguuuuauucaagagcagauccaggagcu

SEQ ID NO: 326571 - RNA, 32 nt, Homo Sapiens
uuuugcaacuauuuccaccuccucccacaacc

SEQ ID NO: 326572 - RNA, 32 nt, Homo Sapiens
uagugucacccccuccucccugaucugucagg

SEQ ID NO: 326573 - RNA, 32 nt, Homo Sapiens
uaauguuuuaaaccucuuuuauaaaauucaau

SEQ ID NO: 326574 - RNA, 32 nt, Homo Sapiens
gagguggcggccugggggucccgggaggcggg

SEQ ID NO: 326575 - RNA, 32 nt, Homo Sapiens
ggugcugaccagcagagucacuaguggaugcu

SEQ ID NO: 326576 - RNA, 32 nt, Homo Sapiens
caacaaggaacaaaacaaagcuuugaaaaaac

SEQ ID NO: 326577 - RNA, 32 nt, Homo Sapiens
ccaguucgagcagcuguucccggagccggagc

SEQ ID NO: 326578 - RNA, 32 nt, Homo Sapiens
uuuguagaugcuauucuuucugaugucuucuu

SEQ ID NO: 326579 - RNA, 32 nt, Homo Sapiens
ugaugacuuugaugaaacacaacugaaaacau

SEQ ID NO: 326580 - RNA, 32 nt, Homo Sapiens
uuucuuguauaacuuuuuguuuucagcaacau

SEQ ID NO: 326581 - RNA, 32 nt, Homo Sapiens
acacugguugaguugguacagaugcauucagu

SEQ ID NO: 326582 - RNA, 32 nt, Homo Sapiens
guagcacuauguuaauuaauuauauuaaaugu

SEQ ID NO: 326583 - RNA, 32 nt, Homo Sapiens
gcuccuggcugauguuguuucuuuauuccuau

SEQ ID NO: 326584 - RNA, 32 nt, Homo Sapiens
aagcccuauaagucagaguuggacaacucaau

SEQ ID NO: 326585 - RNA, 32 nt, Homo Sapiens
ccacaucucugucaagggucuccaggaugagu

SEQ ID NO: 326586 - RNA, 32 nt, Homo Sapiens
aaggauggcauggcccgggagugccccaccac

SEQ ID NO: 326587 - RNA, 32 nt, Homo Sapiens
uccccuggggccgguucuuacccagguccaga

SEQ ID NO: 326588 - RNA, 32 nt, Homo Sapiens
uuucccucucgccuccuuccgccccgccccca

SEQ ID NO: 326589 - RNA, 32 nt, Homo Sapiens
cuauuucugaagaggcuucugucuuauuugaa

SEQ ID NO: 326590 - RNA, 32 nt, Homo Sapiens
ccugagaauuuauguugaacagcacuaauuuu

SEQ ID NO: 326591 - RNA, 32 nt, Homo Sapiens
augcccaggaccgaagacauguucaaggacag

SEQ ID NO: 326592 - RNA, 32 nt, Homo Sapiens
caccaccguccuccucgcugugccaccacccc

SEQ ID NO: 326593 - RNA, 32 nt, Homo Sapiens
auacccacaugggaaaaaucccaggggauguu

SEQ ID NO: 326594 - RNA, 32 nt, Homo Sapiens
ucugaucuuuacguauucuggaugcuaaaucu

SEQ ID NO: 326595 - RNA, 32 nt, Homo Sapiens
uuauuagggggagaggugaagggaaauccagg

SEQ ID NO: 326596 - RNA, 32 nt, Homo Sapiens
uucugcuaccagcagagauucuuagcuauaug

SEQ ID NO: 326597 - RNA, 32 nt, Homo Sapiens
ugaaaagaugaauaagugauggucaugguuau

SEQ ID NO: 326598 - RNA, 32 nt, Homo Sapiens
auaggcaagaggaguucuaacacauuucguac

SEQ ID NO: 326599 - RNA, 32 nt, Homo Sapiens
acaugaaagcaucacuucuuuuuuauguugug

SEQ ID NO: 326600 - RNA, 32 nt, Homo Sapiens
cggugggugcagaggucacuucccuagccuca

SEQ ID NO: 326601 - RNA, 32 nt, Homo Sapiens
ugagagguggucugggucugcuuccagaaacc

SEQ ID NO: 326602 - RNA, 32 nt, Homo Sapiens
uuugugcuguggcuuagccggaggggacgugg

SEQ ID NO: 326603 - RNA, 32 nt, Homo Sapiens
aaaaugcccuuaaaucauaggaaaguauuuuu

SEQ ID NO: 326604 - RNA, 32 nt, Homo Sapiens
uuacaaaguaaaaauauaugaguguauugaaa

SEQ ID NO: 326605 - RNA, 29 nt, Homo Sapiens
aguuaugacaaugaauguucuggaggcug

SEQ ID NO: 326606 - RNA, 32 nt, Homo Sapiens
auugagcggaguccgcuggcugacccgagcgc

SEQ ID NO: 326607 - RNA, 32 nt, Homo Sapiens
aucaugauuugaacuagucccuugcuuuuuaa

SEQ ID NO: 326608 - RNA, 32 nt, Homo Sapiens
cggcuucucagccccaggccccaaggccacgu

SEQ ID NO: 326609 - RNA, 32 nt, Homo Sapiens
ucucacugugaugccuucaguggagcaugaga

SEQ ID NO: 326610 - RNA, 32 nt, Homo Sapiens
caguuuuuuacuaccaaauuuaccauucccau

SEQ ID NO: 326611 - RNA, 32 nt, Homo Sapiens
cucgaggccuccugccguggcuggggucaugg

SEQ ID NO: 326612 - RNA, 32 nt, Homo Sapiens
ccacucugcuggccaccuccagugggugcuga

SEQ ID NO: 326613 - RNA, 32 nt, Homo Sapiens
ggcucuacugaauccuaugcaaccucagaaga

SEQ ID NO: 326614 - RNA, 32 nt, Homo Sapiens
accaaccuggcuaacacagugaaaccccgucu

SEQ ID NO: 326615 - RNA, 32 nt, Homo Sapiens
ggucacauggugagggugggggugagggggcc

SEQ ID NO: 326616 - RNA, 32 nt, Homo Sapiens
cccaaaaguuucacauagggccaggcagccuc

SEQ ID NO: 326617 - RNA, 32 nt, Homo Sapiens
caucucaugcuuugcccuucuuagggcucagg

SEQ ID NO: 326618 - RNA, 32 nt, Homo Sapiens
gagaggaggcggcgagggucccggggcgcgag

SEQ ID NO: 326619 - RNA, 32 nt, Homo Sapiens
auaucaucuuauaaucuuacagaguuaaccua

SEQ ID NO: 326620 - RNA, 32 nt, Homo Sapiens
ggcgggggcgcggggcccggcgcggccgucuc

SEQ ID NO: 326621 - RNA, 32 nt, Homo Sapiens
cccuagagccucuggagggaguggagcccugc

SEQ ID NO: 326622 - RNA, 32 nt, Homo Sapiens
cuagagcgggccuggccggccggccagcccuc

SEQ ID NO: 326623 - RNA, 32 nt, Homo Sapiens
ccaacaaguauuuauagagcaaccgucaagug

SEQ ID NO: 326624 - RNA, 32 nt, Homo Sapiens
aguggggccccgggguggggccugggccucug

SEQ ID NO: 326625 - RNA, 31 nt, Homo Sapiens
aucaguuugugcuuuauucuguauuugucuc

SEQ ID NO: 326626 - RNA, 32 nt, Homo Sapiens
gaugaauuacacaacaguuuguuaauucuuca

SEQ ID NO: 326627 - RNA, 32 nt, Homo Sapiens
uuuuggacauauauuuaucacuuugucauuuu

SEQ ID NO: 326628 - RNA, 32 nt, Homo Sapiens
ccuuuugagaugaauuaauguaagaauauuuu

SEQ ID NO: 326629 - RNA, 32 nt, Homo Sapiens
aguuguaaacacaaaaacaaaaauauacuuua

SEQ ID NO: 326630 - RNA, 32 nt, Homo Sapiens
uuuaauccaauauaguugauaauuaaagugua

SEQ ID NO: 326631 - RNA, 32 nt, Homo Sapiens
cccggcuccaucugcugggucccuccacauug

SEQ ID NO: 326632 - RNA, 29 nt, Homo Sapiens
agggcgggaggaagagggacgccgcugag

SEQ ID NO: 326633 - RNA, 32 nt, Homo Sapiens
acaccacacagcugcgggcggcccuggagcag

SEQ ID NO: 326634 - RNA, 32 nt, Homo Sapiens
uaaagcugaacugguguugugaaacagagaaa

SEQ ID NO: 326635 - RNA, 32 nt, Homo Sapiens
uguucaccccaacaccucaccucccccaggac

SEQ ID NO: 326636 - RNA, 29 nt, Homo Sapiens
aggccaugucgggugaggacgcugagguc

SEQ ID NO: 326637 - RNA, 32 nt, Homo Sapiens
agacaaugucgagggacaaaagauagaagaug

SEQ ID NO: 326638 - RNA, 32 nt, Homo Sapiens
gguguugcacuaguuugugcucaggguauucu

SEQ ID NO: 326639 - RNA, 32 nt, Homo Sapiens
ccaaauucuaacuauuucuuuuguuucuuaca

SEQ ID NO: 326640 - RNA, 32 nt, Homo Sapiens
ucaguacagauacucagugucugguuucuggc

SEQ ID NO: 326641 - RNA, 32 nt, Homo Sapiens
gugugauccaguuugauauuuuuagguuguug

SEQ ID NO: 326642 - RNA, 32 nt, Homo Sapiens
ugugggccuuuauauuuuuucuuauuuaauuu

SEQ ID NO: 326643 - RNA, 30 nt, Homo Sapiens
uggccccaagguccgaucgcccaggggagg

SEQ ID NO: 326644 - RNA, 32 nt, Homo Sapiens
ugucacaaagugguaagacagcaagaauuggu

SEQ ID NO: 326645 - RNA, 32 nt, Homo Sapiens
ggucuggcgggugggcggcggccacgcacugg

SEQ ID NO: 326646 - RNA, 32 nt, Homo Sapiens
cacuguauuuuugucuuguuaagaaaauuuag

SEQ ID NO: 326647 - RNA, 32 nt, Homo Sapiens
ucagcuuccagaagcugucacugaccaucccg

SEQ ID NO: 326648 - RNA, 32 nt, Homo Sapiens
cagucgccgcgggccuggcucugugguggcaa

SEQ ID NO: 326649 - RNA, 32 nt, Homo Sapiens
cuuggcugauaaaaccucuauagugaauacuc

SEQ ID NO: 326650 - RNA, 32 nt, Homo Sapiens
ggggcggaggcgaaggguguuggugccagaag

SEQ ID NO: 326651 - RNA, 32 nt, Homo Sapiens
aaaagguuaaaucguagaagcuaguauauuuu

SEQ ID NO: 326652 - RNA, 32 nt, Homo Sapiens
aauaacugaagaaggagcaagugugaacaguu

SEQ ID NO: 326653 - RNA, 32 nt, Homo Sapiens
aaagcauuuaacuggccaguuuugauugcaaa

SEQ ID NO: 326654 - RNA, 32 nt, Homo Sapiens
uugagagccacugcuuuggagaguagaaaugc

SEQ ID NO: 326655 - RNA, 32 nt, Homo Sapiens
acugggaaggguggagaucaggucccggccug

SEQ ID NO: 326656 - RNA, 29 nt, Homo Sapiens
uuugaauacgucuugucuauaaaagaaau

SEQ ID NO: 326657 - RNA, 32 nt, Homo Sapiens
uauucucuuuaacuuacagaauguuaguuuaa

SEQ ID NO: 326658 - RNA, 32 nt, Homo Sapiens
gcuuucugccuccgagauguggcaccauagug

SEQ ID NO: 326659 - RNA, 31 nt, Homo Sapiens
cagggcauggggccaggcuccacucccaaau

SEQ ID NO: 326660 - RNA, 32 nt, Homo Sapiens
ugacuaggaaauggagagacaacucuuugguu

SEQ ID NO: 326661 - RNA, 32 nt, Homo Sapiens
gaguccaggcccgacgcggggcgggccagcgg

SEQ ID NO: 326662 - RNA, 32 nt, Homo Sapiens
cuugauggggccuggguuuguuccuggggcug

SEQ ID NO: 326663 - RNA, 32 nt, Homo Sapiens
gcuaccccaaggagccagcagccuuguguccu

SEQ ID NO: 326664 - RNA, 32 nt, Homo Sapiens
acugaucuuguacagauauuaguguuaccagc

SEQ ID NO: 326665 - RNA, 32 nt, Homo Sapiens
acggggaguugguggcuugguguucauggugg

SEQ ID NO: 326666 - RNA, 32 nt, Homo Sapiens
auuauguagcuuuuauuuuuuauguuuuauaa

SEQ ID NO: 326667 - RNA, 32 nt, Homo Sapiens
gcugcuuuuuauucuccuaacccuuucaagug

SEQ ID NO: 326668 - RNA, 32 nt, Homo Sapiens
agagcccaaugagaaguaaucucugaagccca

SEQ ID NO: 326669 - RNA, 32 nt, Homo Sapiens
aagaucugcgcucaaaucuccucccaccucuc

SEQ ID NO: 326670 - RNA, 32 nt, Homo Sapiens
uucauuuuuuagcuugaauuuguuagcaaaua

SEQ ID NO: 326671 - RNA, 32 nt, Homo Sapiens
uucguccgugcagacaagugccugccagagcc

SEQ ID NO: 326672 - RNA, 32 nt, Homo Sapiens
gcuacuacuguaaggagggaaauggaugaauc

SEQ ID NO: 326673 - RNA, 32 nt, Homo Sapiens
guugccaggcuggucucaaacuucuggacuca

SEQ ID NO: 326674 - RNA, 32 nt, Homo Sapiens
cgcgcaaccagggugguggcggagugcgcaug

SEQ ID NO: 326675 - RNA, 32 nt, Homo Sapiens
cugagggauguacuuccaaaagaaaugugacu

SEQ ID NO: 326676 - RNA, 32 nt, Homo Sapiens
aaaucacuuucuguguuguauauccuaagcca

SEQ ID NO: 326677 - RNA, 32 nt, Homo Sapiens
cuccccugcccaggcagcugguggugggcgcu

SEQ ID NO: 326678 - RNA, 32 nt, Homo Sapiens
gaggcugcagugagccgagaucgugccaccua

SEQ ID NO: 326679 - RNA, 32 nt, Homo Sapiens
cugaggucgggaguuugagaccagccuggcca

SEQ ID NO: 326680 - RNA, 32 nt, Homo Sapiens
uauagaagagaaaaaauccagggaauuuaagu

SEQ ID NO: 326681 - RNA, 32 nt, Homo Sapiens
cugcaaacagguuuuucucagcuucaggcaga

SEQ ID NO: 326682 - RNA, 32 nt, Homo Sapiens
cagaguacucugcuuuucuccuccucagcauu

SEQ ID NO: 326683 - RNA, 32 nt, Homo Sapiens
uugggguguggggccuccccagccucccucaa

SEQ ID NO: 326684 - RNA, 32 nt, Homo Sapiens
aucaacacaaaguggaagaaccuuaagcugaa

SEQ ID NO: 326685 - RNA, 32 nt, Homo Sapiens
cuuugcuuccaagauuuggguugggggcacua

SEQ ID NO: 326686 - RNA, 32 nt, Homo Sapiens
cggacggccccgaggccguggcgcaggacacg

SEQ ID NO: 326687 - RNA, 32 nt, Homo Sapiens
gaacaggaccguaagaugauguuuccuucacc

SEQ ID NO: 326688 - RNA, 32 nt, Homo Sapiens
ggcuugagacucucuuguaauggagguaaugg

SEQ ID NO: 326689 - RNA, 32 nt, Homo Sapiens
agcacccagugccccaggccuugcacugugcu

SEQ ID NO: 326690 - RNA, 32 nt, Homo Sapiens
gcgcuggggaaggggaggagcggcccggacgc

SEQ ID NO: 326691 - RNA, 32 nt, Homo Sapiens
aggagagacaccuggguucuaguucaagucgg

SEQ ID NO: 326692 - RNA, 32 nt, Homo Sapiens
gaagcugucgacuucaugacaagcauuuugug

SEQ ID NO: 326693 - RNA, 32 nt, Homo Sapiens
gcuauuguucuuccacuucguuuucugcuguc

SEQ ID NO: 326694 - RNA, 32 nt, Homo Sapiens
gccacuccaaaggaucuccuguucuugcuuug

SEQ ID NO: 326695 - RNA, 30 nt, Homo Sapiens
uggacaccacuuguuguuauuuucuuguuu

SEQ ID NO: 326696 - RNA, 32 nt, Homo Sapiens
ggaaauauuccaucaaaguucacugagagaag

SEQ ID NO: 326697 - RNA, 32 nt, Homo Sapiens
cagguggcacucaugggcccccugccccaugu

SEQ ID NO: 326698 - RNA, 32 nt, Homo Sapiens
uauccccacuugucccccuccucccccuaguu

SEQ ID NO: 326699 - RNA, 32 nt, Homo Sapiens
aucgcgacgcagucggcgggacccucauggaa

SEQ ID NO: 326700 - RNA, 32 nt, Homo Sapiens
uguugugaauuuuuccuacagcacuguuuuua

SEQ ID NO: 326701 - RNA, 32 nt, Homo Sapiens
aacauggaaaauacaauuuauaaagaagaaaa

SEQ ID NO: 326702 - RNA, 32 nt, Homo Sapiens
gugggaguguaaauuaguuuagucauugugga

SEQ ID NO: 326703 - RNA, 32 nt, Homo Sapiens
aagcccaguucaucaccauuuccuccuuuacc

SEQ ID NO: 326704 - RNA, 32 nt, Homo Sapiens
cagaagaguccucuggggaggaccccaagggc

SEQ ID NO: 326705 - RNA, 32 nt, Homo Sapiens
ccuggaagagacccgggucgccuccggagcuu

SEQ ID NO: 326706 - RNA, 32 nt, Homo Sapiens
ccccagguugcaaguuacauacccugggcaug

SEQ ID NO: 326707 - RNA, 32 nt, Homo Sapiens
cuggcaggagcgagggcggggcgccgcgcucu

SEQ ID NO: 326708 - RNA, 32 nt, Homo Sapiens
cuuggcagagaaaauaaauaucaucaaauaag

SEQ ID NO: 326709 - RNA, 32 nt, Homo Sapiens
gaaagggcaaauuauuuuaauauuuuguauuu

SEQ ID NO: 326710 - RNA, 32 nt, Homo Sapiens
gaaaaucuguaaaaaagaaaaacaaguuugcu

SEQ ID NO: 326711 - RNA, 32 nt, Homo Sapiens
cucagagaccucccuuuccaagccugccuggg

SEQ ID NO: 326712 - RNA, 32 nt, Homo Sapiens
uaaccucccagggccucagcuuccagaguagu

SEQ ID NO: 326713 - RNA, 32 nt, Homo Sapiens
cuauuccugucauggucuagugccugggaggg

SEQ ID NO: 326714 - RNA, 32 nt, Homo Sapiens
auuaaauaaugauccccaaaugcugaaaaagu

SEQ ID NO: 326715 - RNA, 32 nt, Homo Sapiens
agaugcucuguagacaaguagaauuaaaccug

SEQ ID NO: 326716 - RNA, 32 nt, Homo Sapiens
acauccucacaccaauaucuuccacuguuacu

SEQ ID NO: 326717 - RNA, 32 nt, Homo Sapiens
gcagagucaggagagguggucuuugaaguaag

SEQ ID NO: 326718 - RNA, 32 nt, Homo Sapiens
cgccaugguugagaggcaaaggugauccccua

SEQ ID NO: 326719 - RNA, 32 nt, Homo Sapiens
auuuaggugucuauauucuauauuuugaucua

SEQ ID NO: 326720 - RNA, 32 nt, Homo Sapiens
ccuuccuguucagcucccugugcgacccucca

SEQ ID NO: 326721 - RNA, 32 nt, Homo Sapiens
gaggaggcgacagagggaaaaagggccgagcu

SEQ ID NO: 326722 - RNA, 32 nt, Homo Sapiens
gaaacaaaauuuaugaaacugagcucucuucc

SEQ ID NO: 326723 - RNA, 32 nt, Homo Sapiens
uuuguacuuuugugggggauucguggaucuuu

SEQ ID NO: 326724 - RNA, 32 nt, Homo Sapiens
gacccgggcccggcccaccggcccccuggcuu

SEQ ID NO: 326725 - RNA, 32 nt, Homo Sapiens
cugcaagcaagggggaggggagcccacaggcc

SEQ ID NO: 326726 - RNA, 30 nt, Homo Sapiens
uucauaccacuugauaagcaucuugaaaca

SEQ ID NO: 326727 - RNA, 32 nt, Homo Sapiens
uugguggccucgccgcggcucugcugggagac

SEQ ID NO: 326728 - RNA, 32 nt, Homo Sapiens
ccgaaagcggcaucggugggcugggacccccu

SEQ ID NO: 326729 - RNA, 32 nt, Homo Sapiens
ucaggcagcuaagggaggacgccugcccacgc

SEQ ID NO: 326730 - RNA, 32 nt, Homo Sapiens
caguaauuugaaaaugagauauuaggaaaaac

SEQ ID NO: 326731 - RNA, 32 nt, Homo Sapiens
ccacuugagugucaagcugaccuugcugaugg

SEQ ID NO: 326732 - RNA, 32 nt, Homo Sapiens
uuugugucuggagucuccccccggggagagga

SEQ ID NO: 326733 - RNA, 32 nt, Homo Sapiens
ugagaaagacauuugagagaaagccaacugcu

SEQ ID NO: 326734 - RNA, 32 nt, Homo Sapiens
uaguagcaucauaaguuuuuuugagagaagca

SEQ ID NO: 326735 - RNA, 32 nt, Homo Sapiens
ggagagagugcuggaggcucuggggcgauggc

SEQ ID NO: 326736 - RNA, 32 nt, Homo Sapiens
ccagaauggugaacacagaaaucgaggugcaa

SEQ ID NO: 326737 - RNA, 31 nt, Homo Sapiens
uccaaaauuaaugaucgccugauugauuuau

SEQ ID NO: 326738 - RNA, 32 nt, Homo Sapiens
uuuuuaaaugucauauugugauaaugcucugc

SEQ ID NO: 326739 - RNA, 32 nt, Homo Sapiens
gggcuuggguaacagcugccuuccucagggcu

SEQ ID NO: 326740 - RNA, 32 nt, Homo Sapiens
uguuaaccaaaggaggcauugauuucaguuuu

SEQ ID NO: 326741 - RNA, 32 nt, Homo Sapiens
uccucugucauacuguaucuggaaugcuuugu

SEQ ID NO: 326742 - RNA, 32 nt, Homo Sapiens
guccagagaaagugcucagugaugcuuguugg

SEQ ID NO: 326743 - RNA, 32 nt, Homo Sapiens
ucgccuggguuucuaggcugcagacgugguau

SEQ ID NO: 326744 - RNA, 32 nt, Homo Sapiens
gguggggcggggguagggguggauaauaaagc

SEQ ID NO: 326745 - RNA, 32 nt, Homo Sapiens
guugcuaaaaauuuaauuaguugauagaacca

SEQ ID NO: 326746 - RNA, 32 nt, Homo Sapiens
acagagaggccaacuuccucccugcccagccu

SEQ ID NO: 326747 - RNA, 32 nt, Homo Sapiens
gcgccccaccugcgcgcacaguggaccggcgc

SEQ ID NO: 326748 - RNA, 32 nt, Homo Sapiens
caagcccagagccccagccucuccccacaguc

SEQ ID NO: 326749 - RNA, 32 nt, Homo Sapiens
gauuagauuaggggagacuggagcacguuugu

SEQ ID NO: 326750 - RNA, 32 nt, Homo Sapiens
agaccugcccuucuaccuuccucgccuccccu

SEQ ID NO: 326751 - RNA, 32 nt, Homo Sapiens
cagaacugccccaccggcaccuggagcgcacu

SEQ ID NO: 326752 - RNA, 31 nt, Homo Sapiens
guaguucuugguaggugcaggaauaguagug

SEQ ID NO: 326753 - RNA, 32 nt, Homo Sapiens
uuaaacugaauuuugcaucuguguacaugaag

SEQ ID NO: 326754 - RNA, 32 nt, Homo Sapiens
aguacuagaagaaaacuaccaagaacugcagc

SEQ ID NO: 326755 - RNA, 32 nt, Homo Sapiens
uuaaugguauauaaaauugcagugcauuucac

SEQ ID NO: 326756 - RNA, 32 nt, Homo Sapiens
uuaguuuugucuuacuuucagauuucucuaca

SEQ ID NO: 326757 - RNA, 32 nt, Homo Sapiens
gaagguggguggcaagaacucaggacacuuac

SEQ ID NO: 326758 - RNA, 32 nt, Homo Sapiens
acauuauguauaauaaaaccauaaagggucca

SEQ ID NO: 326759 - RNA, 32 nt, Homo Sapiens
auuucuguauauauaauuuaauaacagaagcc

SEQ ID NO: 326760 - RNA, 32 nt, Homo Sapiens
ugagauguaugaugaaaaucuaagugaagaga

SEQ ID NO: 326761 - RNA, 32 nt, Homo Sapiens
aguggaggguggccgggcagguccugccggcg

SEQ ID NO: 326762 - RNA, 32 nt, Homo Sapiens
agggggcugcgguggacaccacuucuuaaugu

SEQ ID NO: 326763 - RNA, 32 nt, Homo Sapiens
auuuuacaaggugcccagaucccaguuauccu

SEQ ID NO: 326764 - RNA, 32 nt, Homo Sapiens
gcgcgugugugagcgcaugugugugcaccagu

SEQ ID NO: 326765 - RNA, 32 nt, Homo Sapiens
uuuugauauucaucagaaauaccuccagaaga

SEQ ID NO: 326766 - RNA, 32 nt, Homo Sapiens
auacgaucuauuuuuauagguucuuuuucaga

SEQ ID NO: 326767 - RNA, 32 nt, Homo Sapiens
gcuucauaguacagggggaaacaaaggcccag

SEQ ID NO: 326768 - RNA, 32 nt, Homo Sapiens
cuggauaucacaauuuuuuuuaauuuuauaaa

SEQ ID NO: 326769 - RNA, 32 nt, Homo Sapiens
ggugcuggccgagggggcgccggcugccggag

SEQ ID NO: 326770 - RNA, 32 nt, Homo Sapiens
acagcugaaaaagaugaauuguaauuauacuc

SEQ ID NO: 326771 - RNA, 32 nt, Homo Sapiens
cuaauauuuuuagaucuuuuuacuucaccuca

SEQ ID NO: 326772 - RNA, 32 nt, Homo Sapiens
guuauuaacuguaagacuguuugaauugucag

SEQ ID NO: 326773 - RNA, 32 nt, Homo Sapiens
aagcuuuuuuucuguugaauuuuuucguuuuu

SEQ ID NO: 326774 - RNA, 32 nt, Homo Sapiens
ugaccagaaaggauggaauggcuuaaguaaac

SEQ ID NO: 326775 - RNA, 32 nt, Homo Sapiens
ggaguagcggguggaaagcuggacuggaguuc

SEQ ID NO: 326776 - RNA, 32 nt, Homo Sapiens
gaguaggcacuagucaccuaagauaaggagcu

SEQ ID NO: 326777 - RNA, 32 nt, Homo Sapiens
guaccucagucacacacccccaaccccaggca

SEQ ID NO: 326778 - RNA, 32 nt, Homo Sapiens
cucugggcuguggcugggcagcacggaagggg

SEQ ID NO: 326779 - RNA, 32 nt, Homo Sapiens
gggggcuggucccagcggagccgcacucuucg

SEQ ID NO: 326780 - RNA, 29 nt, Homo Sapiens
aaccauaaaaguuuaaguuuuuuggggaa

SEQ ID NO: 326781 - RNA, 32 nt, Homo Sapiens
guguguucggacggcacuggcuccuuuccgaa

SEQ ID NO: 326782 - RNA, 32 nt, Homo Sapiens
cugagucucccggcugcaggcggauuggaugg

SEQ ID NO: 326783 - RNA, 32 nt, Homo Sapiens
aauuuaaugauguguucaacuccaccagaaau

SEQ ID NO: 326784 - RNA, 32 nt, Homo Sapiens
cccuaccgccccacgcgcgacccggggauggc

SEQ ID NO: 326785 - RNA, 32 nt, Homo Sapiens
uaacucaaguggaacuuuuaacucguuugacc

SEQ ID NO: 326786 - RNA, 32 nt, Homo Sapiens
uugugaaauuuauuuaccugcuuguggcuuca

SEQ ID NO: 326787 - RNA, 32 nt, Homo Sapiens
gucucuaggaacccccagguccuggugcugca

SEQ ID NO: 326788 - RNA, 32 nt, Homo Sapiens
uauaucugcuauucuccauacucuguaucacu

SEQ ID NO: 326789 - RNA, 32 nt, Homo Sapiens
cagucccccugcgacucccuguuuccugggcu

SEQ ID NO: 326790 - RNA, 32 nt, Homo Sapiens
uggcacuaggaauaauaacuuucuaagauacu

SEQ ID NO: 326791 - RNA, 32 nt, Homo Sapiens
agagacucuucugauccaaccccuagaaccgc

SEQ ID NO: 326792 - RNA, 32 nt, Homo Sapiens
caucucuagguccggaaauaaacgaacaucuc

SEQ ID NO: 326793 - RNA, 32 nt, Homo Sapiens
uccaacacuuguuucuauuaaaacagacuauu

SEQ ID NO: 326794 - RNA, 32 nt, Homo Sapiens
aaggaggaggcaggugggcugcugcagugccc

SEQ ID NO: 326795 - RNA, 32 nt, Homo Sapiens
cuuaaaauauacaaguaaaauaauaaaagcca

SEQ ID NO: 326796 - RNA, 32 nt, Homo Sapiens
uauuuauuuauugucuuccuguaagaccuucg

SEQ ID NO: 326797 - RNA, 32 nt, Homo Sapiens
ggcugggcgcgagcagggacugucccgagcug

SEQ ID NO: 326798 - RNA, 32 nt, Homo Sapiens
ugguuguccaagcccaggucccggcccugggu

SEQ ID NO: 326799 - RNA, 32 nt, Homo Sapiens
gagcagaggagaagguggugacccugaucguc

SEQ ID NO: 326800 - RNA, 32 nt, Homo Sapiens
cauaccccagguuuccuggugaguuccaagcc

SEQ ID NO: 326801 - RNA, 32 nt, Homo Sapiens
auugcauuuaaugugggauauaggugcguuuu

SEQ ID NO: 326802 - RNA, 32 nt, Homo Sapiens
guguagauugaaauaauaguacacuucugaau

SEQ ID NO: 326803 - RNA, 32 nt, Homo Sapiens
aaagcuucaggagagaauaaagcugaaggcag

SEQ ID NO: 326804 - RNA, 30 nt, Homo Sapiens
gaggcacuuaauaugcaaaauaggcuccuu

SEQ ID NO: 326805 - RNA, 32 nt, Homo Sapiens
ggguuuugagggugucccauucucaacucuaa

SEQ ID NO: 326806 - RNA, 32 nt, Homo Sapiens
aaggccaggcccugugcugggcacauagcugu

SEQ ID NO: 326807 - RNA, 32 nt, Homo Sapiens
ccuagagaagauuauccuguccugcaaacugc

SEQ ID NO: 326808 - RNA, 32 nt, Homo Sapiens
gaggaggcuuugguugcacuucuuuggcuggu

SEQ ID NO: 326809 - RNA, 32 nt, Homo Sapiens
cauugguugacgaugccuggaaucccaccauc

SEQ ID NO: 326810 - RNA, 32 nt, Homo Sapiens
gaguaacugaagaucugaaaaucauuaacaag

SEQ ID NO: 326811 - RNA, 32 nt, Homo Sapiens
ggagucuuucugggggcggaggggggaggggg

SEQ ID NO: 326812 - RNA, 32 nt, Homo Sapiens
uuuuaaaagggagagagaaucuauuuaaagcu

SEQ ID NO: 326813 - RNA, 32 nt, Homo Sapiens
ggagggggagaggaggccgagcagaauacacc

SEQ ID NO: 326814 - RNA, 32 nt, Homo Sapiens
gaugcccuggacagcagcaacuccaugcaaac

SEQ ID NO: 326815 - RNA, 32 nt, Homo Sapiens
aacucccugugcucccuucucuuugggcagag

SEQ ID NO: 326816 - RNA, 32 nt, Homo Sapiens
accgugcuccugguggggcccgugccaggggg

SEQ ID NO: 326817 - RNA, 32 nt, Homo Sapiens
cugagcagaaaacaggaagaaccaggcucggu

SEQ ID NO: 326818 - RNA, 32 nt, Homo Sapiens
cgcggccaagucccggggccgagacauagugu

SEQ ID NO: 326819 - RNA, 32 nt, Homo Sapiens
caccuuguagaacucauuuugcuggcugaaag

SEQ ID NO: 326820 - RNA, 32 nt, Homo Sapiens
gaacuacgagaccucaucuccaaaaaagaaaa

SEQ ID NO: 326821 - RNA, 32 nt, Homo Sapiens
ccaccauugucucagagcugcccacuuugugu

SEQ ID NO: 326822 - RNA, 32 nt, Homo Sapiens
caaccgccacgccuccucaccccucccuccgg

SEQ ID NO: 326823 - RNA, 32 nt, Homo Sapiens
aauaaugauaauuuauauucaggucguaggua

SEQ ID NO: 326824 - RNA, 32 nt, Homo Sapiens
uguaacagauaaaaaauguaucugcagcaacu

SEQ ID NO: 326825 - RNA, 32 nt, Homo Sapiens
uaguucuggaaauuauuugugguaaggaaaua

SEQ ID NO: 326826 - RNA, 32 nt, Homo Sapiens
cagcaggacacacacacagacacacacacaca

SEQ ID NO: 326827 - RNA, 32 nt, Homo Sapiens
auauuuaauucucagaacaauguaaugagggu

SEQ ID NO: 326828 - RNA, 32 nt, Homo Sapiens
gucaagaucccccgcgagccgggccgcccagg

SEQ ID NO: 326829 - RNA, 32 nt, Homo Sapiens
uggaccuuggucuccccgccggacuucgaggg

SEQ ID NO: 326830 - RNA, 32 nt, Homo Sapiens
cuuugcccgcggcagccgcgucccugaaccgc

SEQ ID NO: 326831 - RNA, 32 nt, Homo Sapiens
gccgagcggcuggcggugccugggccagaugg

SEQ ID NO: 326832 - RNA, 32 nt, Homo Sapiens
ggaaggcuggcggcggcggccgggccauggcc

SEQ ID NO: 326833 - RNA, 32 nt, Homo Sapiens
uuaaucccuuaaucccucucagaugggccuug

SEQ ID NO: 326834 - RNA, 32 nt, Homo Sapiens
gauuuauuuggcucaugguucugcaggcugua

SEQ ID NO: 326835 - RNA, 32 nt, Homo Sapiens
aguuaccucacagagaacagauacauggaagu

SEQ ID NO: 326836 - RNA, 32 nt, Homo Sapiens
uaacggcugccggcgccggcucuucaaguccc

SEQ ID NO: 326837 - RNA, 32 nt, Homo Sapiens
uuuuccuguuuuuauggaaacucugagaagcu

SEQ ID NO: 326838 - RNA, 32 nt, Homo Sapiens
uuucugcuuuaaaggcauguguguuuuuaaaa

SEQ ID NO: 326839 - RNA, 32 nt, Homo Sapiens
gacuuauagaaaguuagagaagaccuuguuga

SEQ ID NO: 326840 - RNA, 32 nt, Homo Sapiens
ugaaugugucugcuuaccuuguuuccuuuuaa

SEQ ID NO: 326841 - RNA, 32 nt, Homo Sapiens
cgccucucccaccggcccgaugagcugcagcg

SEQ ID NO: 326842 - RNA, 32 nt, Homo Sapiens
auaacaaaugcaaaugaagagaaaucaggggu

SEQ ID NO: 326843 - RNA, 32 nt, Homo Sapiens
cucugauauuuagguaucugcuauuuuauuau

SEQ ID NO: 326844 - RNA, 32 nt, Homo Sapiens
caagccuucaugaacggaagugacacacucug

SEQ ID NO: 326845 - RNA, 32 nt, Homo Sapiens
gagugcagugguggcgaucuuggcucacugca

SEQ ID NO: 326846 - RNA, 32 nt, Homo Sapiens
guucauuuuuaaaguggggcuguguaucuuuu

SEQ ID NO: 326847 - RNA, 32 nt, Homo Sapiens
uuguaauaaaaugaaguuacgaugagaaaaaa

SEQ ID NO: 326848 - RNA, 32 nt, Homo Sapiens
cgccaccucccucugucucuggagugcccuac

SEQ ID NO: 326849 - RNA, 32 nt, Homo Sapiens
ggacaaaaaugaacaugaauggaguggcauuu

SEQ ID NO: 326850 - RNA, 32 nt, Homo Sapiens
guccugugaaaagaauagcaggacuuuuagau

SEQ ID NO: 326851 - RNA, 32 nt, Homo Sapiens
cuacuccauggccucucugcucccagcugugg

SEQ ID NO: 326852 - RNA, 32 nt, Homo Sapiens
gcagcccccucuaacauguccccuccugagcu

SEQ ID NO: 326853 - RNA, 32 nt, Homo Sapiens
uugacaacuauaagucuggagcugccaacugg

SEQ ID NO: 326854 - RNA, 32 nt, Homo Sapiens
uuaaucauaaaaagggauuaauccaaccauuu

SEQ ID NO: 326855 - RNA, 32 nt, Homo Sapiens
uuuauuacaucaucucuuucucaauggaucua

SEQ ID NO: 326856 - RNA, 32 nt, Homo Sapiens
gaauaauacuucauuguauagauagaccacau

SEQ ID NO: 326857 - RNA, 32 nt, Homo Sapiens
aguuaaauauaaaucucaggcucuuuaaaggu

SEQ ID NO: 326858 - RNA, 32 nt, Homo Sapiens
cgcuccacagagcuuacgaauuucuaccagau

SEQ ID NO: 326859 - RNA, 32 nt, Homo Sapiens
uuccuacgcucgccggcggagcagcuaguggc

SEQ ID NO: 326860 - RNA, 32 nt, Homo Sapiens
cuucgggcggcggcugaggcggcggccgagga

SEQ ID NO: 326861 - RNA, 32 nt, Homo Sapiens
uguuagcauugaaaucgagacuauuuauuugg

SEQ ID NO: 326862 - RNA, 32 nt, Homo Sapiens
aaauuuuaucuuuguuuuauccaaauaguaaa

SEQ ID NO: 326863 - RNA, 32 nt, Homo Sapiens
uuaccaauccggagguuuccuuccuugaaugu

SEQ ID NO: 326864 - RNA, 32 nt, Homo Sapiens
uccgcucugcccgcggugcugcccuccaccca

SEQ ID NO: 326865 - RNA, 32 nt, Homo Sapiens
aaguggaaaaggacauuucuguaguagcuguu

SEQ ID NO: 326866 - RNA, 32 nt, Homo Sapiens
uucugcacauaaauaaaggaaaggaaccggca

SEQ ID NO: 326867 - RNA, 32 nt, Homo Sapiens
uccuugccccucaggacugcuggaaaauaaau

SEQ ID NO: 326868 - RNA, 32 nt, Homo Sapiens
cccacgccugcgcccaucuuucacacacauuc

SEQ ID NO: 326869 - RNA, 32 nt, Homo Sapiens
acguugagaagcugcagggagcagggcaccaa

SEQ ID NO: 326870 - RNA, 32 nt, Homo Sapiens
aaugcaggauauuuuuaacacaacaaucugug

SEQ ID NO: 326871 - RNA, 32 nt, Homo Sapiens
ccacccucugauugauaagacauaucauuuug

SEQ ID NO: 326872 - RNA, 32 nt, Homo Sapiens
cugcccccgcauggcaguuccuagguugcagu

SEQ ID NO: 326873 - RNA, 32 nt, Homo Sapiens
cgggggagcaggcaguggggcuggaagcagaa

SEQ ID NO: 326874 - RNA, 32 nt, Homo Sapiens
cccuaugaauggauuuaguucugaggaauuac

SEQ ID NO: 326875 - RNA, 32 nt, Homo Sapiens
uuuggcucccuuucccuucucucucugguagc

SEQ ID NO: 326876 - RNA, 32 nt, Homo Sapiens
cugucccucucugagccuucacuuccucaucu

SEQ ID NO: 326877 - RNA, 31 nt, Homo Sapiens
gcgggacaugcuggccugcccuccaccucaa

SEQ ID NO: 326878 - RNA, 32 nt, Homo Sapiens
guuagggacagaggcaaagaagggcaggacgg

SEQ ID NO: 326879 - RNA, 32 nt, Homo Sapiens
ggacuugaacccagcucuguuugauuccaaaa

SEQ ID NO: 326880 - RNA, 32 nt, Homo Sapiens
aaugcugccaucuggugacagcauguagauuu

SEQ ID NO: 326881 - RNA, 32 nt, Homo Sapiens
uaccaugaaaaagauguacuugugaaacuguu

SEQ ID NO: 326882 - RNA, 32 nt, Homo Sapiens
aaagcuugcuuaaagaaaaucccucuuggccg

SEQ ID NO: 326883 - RNA, 32 nt, Homo Sapiens
gaauggccaaagugguauauacuguagucaca

SEQ ID NO: 326884 - RNA, 32 nt, Homo Sapiens
gaugagcagagccauggcccucuucuuuguuc

SEQ ID NO: 326885 - RNA, 32 nt, Homo Sapiens
cugcucuggccaaaccuucucucugcugacug

SEQ ID NO: 326886 - RNA, 30 nt, Homo Sapiens
agugacuauguugccaccaucuuggagcuc

SEQ ID NO: 326887 - RNA, 32 nt, Homo Sapiens
ucgauauuaacaaggauggcggcggccgcagc

SEQ ID NO: 326888 - RNA, 32 nt, Homo Sapiens
aggacuccccccaccccuacccucucccugug

SEQ ID NO: 326889 - RNA, 32 nt, Homo Sapiens
uuggguuuuguuuuuucuuuaagaaaaagaaa

SEQ ID NO: 326890 - RNA, 32 nt, Homo Sapiens
cagaagaaaaagaaaaaggagacuuuauuggu

SEQ ID NO: 326891 - RNA, 32 nt, Homo Sapiens
aagcagcuuucacuuacaaaguuucguguaaa

SEQ ID NO: 326892 - RNA, 32 nt, Homo Sapiens
agccugggcuaagcuccugggcugugcgucca

SEQ ID NO: 326893 - RNA, 32 nt, Homo Sapiens
ccaugaucuucagaaaguaccauaaugucauc

SEQ ID NO: 326894 - RNA, 32 nt, Homo Sapiens
uauauuuccuguuuuucccuuugcccacccug

SEQ ID NO: 326895 - RNA, 32 nt, Homo Sapiens
acaccccgacagagacagagacacagccaucc

SEQ ID NO: 326896 - RNA, 32 nt, Homo Sapiens
gaaaauacagaaaauauagggaagaauaaaau

SEQ ID NO: 326897 - RNA, 32 nt, Homo Sapiens
ccaggugagaugugcaagaggcgugggcuugc

SEQ ID NO: 326898 - RNA, 32 nt, Homo Sapiens
cagcugucgguccccagcccugcccggcgggc

SEQ ID NO: 326899 - RNA, 32 nt, Homo Sapiens
gagcacuuuuauucucuuuuucuuaaucucug

SEQ ID NO: 326900 - RNA, 32 nt, Homo Sapiens
uaccagauucacacuguuccagugucuauaaa

SEQ ID NO: 326901 - RNA, 32 nt, Homo Sapiens
caggcugggcgaagaacacugacgcccagagc

SEQ ID NO: 326902 - RNA, 32 nt, Homo Sapiens
gcagaaguugaaacuguaaauuuaaaccuuuu

SEQ ID NO: 326903 - RNA, 32 nt, Homo Sapiens
uguguauaaaagacgugaugugcaccaccucg

SEQ ID NO: 326904 - RNA, 32 nt, Homo Sapiens
accucacgaggcccuguucauucuucgucgcu

SEQ ID NO: 326905 - RNA, 32 nt, Homo Sapiens
gagggcagagcuggugcggcuggccauggaga

SEQ ID NO: 326906 - RNA, 32 nt, Homo Sapiens
aagcaccuucuuggaguuuacaugcugguaau

SEQ ID NO: 326907 - RNA, 32 nt, Homo Sapiens
agcuggcccgcggcggacugccccaggacugc

SEQ ID NO: 326908 - RNA, 32 nt, Homo Sapiens
gugcccugacccggggaccacagggacacccu

SEQ ID NO: 326909 - RNA, 32 nt, Homo Sapiens
ggugagggaaaaaacccacagggaccagaaug

SEQ ID NO: 326910 - RNA, 32 nt, Homo Sapiens
agccccgcgggccggccgcaccgcacguguca

SEQ ID NO: 326911 - RNA, 32 nt, Homo Sapiens
ccgcccgcauccccgcgccgccgcaucuccuc

SEQ ID NO: 326912 - RNA, 32 nt, Homo Sapiens
gguccaggaaaugugcacaaaauucgaccuga

SEQ ID NO: 326913 - RNA, 32 nt, Homo Sapiens
cagagaggggaagagaaaacagggacggugac

SEQ ID NO: 326914 - RNA, 32 nt, Homo Sapiens
gccccgcaagccgcgccccuggcgggcuaagu

SEQ ID NO: 326915 - RNA, 32 nt, Homo Sapiens
auaaagcaaauggaaaaguaaucagauggaca

SEQ ID NO: 326916 - RNA, 32 nt, Homo Sapiens
aggacugugcuaaucaguaucaaaccaaagau

SEQ ID NO: 326917 - RNA, 32 nt, Homo Sapiens
auauuugauccaagacaguccauuccaguccg

SEQ ID NO: 326918 - RNA, 32 nt, Homo Sapiens
guugugcagcucacgcauggagggaucaggau

SEQ ID NO: 326919 - RNA, 32 nt, Homo Sapiens
uuaaacuguuuuuaacuguaccagaaaugaag

SEQ ID NO: 326920 - RNA, 32 nt, Homo Sapiens
ggaauaguauccuugacuuuggcagucaccuu

SEQ ID NO: 326921 - RNA, 30 nt, Homo Sapiens
ucaucugaggacugcaucgguggacacugg

SEQ ID NO: 326922 - RNA, 32 nt, Homo Sapiens
gucgauguggaaaaauauauggugugacuccc

SEQ ID NO: 326923 - RNA, 32 nt, Homo Sapiens
gccucacaaucccacaggcccacccccagugg

SEQ ID NO: 326924 - RNA, 32 nt, Homo Sapiens
gcuccggagagccugagagcacgguggggcgg

SEQ ID NO: 326925 - RNA, 32 nt, Homo Sapiens
uuauacauuuuuaugaaaaauuucauuuucag

SEQ ID NO: 326926 - RNA, 32 nt, Homo Sapiens
aucguuugaggcuagugagcugugauuguacc

SEQ ID NO: 326927 - RNA, 32 nt, Homo Sapiens
ggucaggcccgggaaccccgagaggagagccc

SEQ ID NO: 326928 - RNA, 32 nt, Homo Sapiens
aagugcauugugcaugcugauuaguccauggg

SEQ ID NO: 326929 - RNA, 32 nt, Homo Sapiens
auauuuggaguuuuucugaaaaauggagcagu

SEQ ID NO: 326930 - RNA, 32 nt, Homo Sapiens
ccauuuuagccauuuuaaagucuuaaugccag

SEQ ID NO: 326931 - RNA, 32 nt, Homo Sapiens
ucacgaaggaaauaguaauaugcugaauaaua

SEQ ID NO: 326932 - RNA, 32 nt, Homo Sapiens
gcugcagugucuauggagcgaggcuacguuuc

SEQ ID NO: 326933 - RNA, 32 nt, Homo Sapiens
ggccccaucuggauguucugcagauccccaca

SEQ ID NO: 326934 - RNA, 32 nt, Homo Sapiens
agcagcuccccuuccaccccccggggaacuga

SEQ ID NO: 326935 - RNA, 32 nt, Homo Sapiens
agcauaaccuguuugugaaacugcaaaaaggu

SEQ ID NO: 326936 - RNA, 32 nt, Homo Sapiens
cugaucagcacuaccacauccaaacauaaguc

SEQ ID NO: 326937 - RNA, 32 nt, Homo Sapiens
agguggagaucuuuaagcaagaaguuaaagag

SEQ ID NO: 326938 - RNA, 32 nt, Homo Sapiens
auucuaaacugcuggaugaaucugaaaagaca

SEQ ID NO: 326939 - RNA, 32 nt, Homo Sapiens
auugggcucccucccucuugcuguguggggaa

SEQ ID NO: 326940 - RNA, 32 nt, Homo Sapiens
gccuugcugucugcaccuguacagccaccuca

SEQ ID NO: 326941 - RNA, 32 nt, Homo Sapiens
gagcuggguuaggaaagaagugagggcccauu

SEQ ID NO: 326942 - RNA, 32 nt, Homo Sapiens
agugacguuuuuccucacaagcagaagguaac

SEQ ID NO: 326943 - RNA, 32 nt, Homo Sapiens
ccauacuccuaagaaagccauuuuugaaaaau

SEQ ID NO: 326944 - RNA, 32 nt, Homo Sapiens
augacaaaaaauauuuuacauaauuacucauu

SEQ ID NO: 326945 - RNA, 32 nt, Homo Sapiens
gucuggauaauauauucuggauaauauauaau

SEQ ID NO: 326946 - RNA, 32 nt, Homo Sapiens
cgccuuuggcaguauucaugugacauuaauga

SEQ ID NO: 326947 - RNA, 32 nt, Homo Sapiens
aaauggacaaguauuuucaaugacugaaauau

SEQ ID NO: 326948 - RNA, 32 nt, Homo Sapiens
aucuuuuaaaaauuacaaaaauuuguauaggc

SEQ ID NO: 326949 - RNA, 32 nt, Homo Sapiens
uggagggcgggacagaggggcugggcccaggc

SEQ ID NO: 326950 - RNA, 32 nt, Homo Sapiens
caggugugagccacuacgccccggcccaacug

SEQ ID NO: 326951 - RNA, 32 nt, Homo Sapiens
gauucuggaggcccccugguguguguggugca

SEQ ID NO: 326952 - RNA, 32 nt, Homo Sapiens
gcucaguaagaggcucaagacaugcugauuug

SEQ ID NO: 326953 - RNA, 32 nt, Homo Sapiens
aggcgaggccgcgucgcucaguucuggccguc

SEQ ID NO: 326954 - RNA, 32 nt, Homo Sapiens
cgggacuggggccaccugagccgcccgccucg

SEQ ID NO: 326955 - RNA, 32 nt, Homo Sapiens
gcacgugguugaguggggggaacgcccacuuc

SEQ ID NO: 326956 - RNA, 32 nt, Homo Sapiens
cuucugucaaauaguuuggcuuuucugcaggg

SEQ ID NO: 326957 - RNA, 32 nt, Homo Sapiens
gcccgagggggagugcugggggucucagcugg

SEQ ID NO: 326958 - RNA, 32 nt, Homo Sapiens
acuuaaaugauuguuucauauuaaaacuauuu

SEQ ID NO: 326959 - RNA, 32 nt, Homo Sapiens
uucaaaaacugaggugggguguguguuacgaa

SEQ ID NO: 326960 - RNA, 32 nt, Homo Sapiens
acucuucuguuucuccaaauauaaggaaaaaa

SEQ ID NO: 326961 - RNA, 32 nt, Homo Sapiens
acgucacgaacgcugugaccugucccucugca

SEQ ID NO: 326962 - RNA, 32 nt, Homo Sapiens
ugaggaaugcggccuuuuugcauaagaaaggc

SEQ ID NO: 326963 - RNA, 32 nt, Homo Sapiens
gggggucuggucuagcgugggcaaagacuugg

SEQ ID NO: 326964 - RNA, 32 nt, Homo Sapiens
acgaguuccagggagcucuguccuggugaccg

SEQ ID NO: 326965 - RNA, 32 nt, Homo Sapiens
auuuaaagcuguuuauacucaauuugaaauau

SEQ ID NO: 326966 - RNA, 32 nt, Homo Sapiens
gguguggcuucuguggcuuucauuugaguauc

SEQ ID NO: 326967 - RNA, 32 nt, Homo Sapiens
uguucuucaauaaauauuaucuuaauaucagu

SEQ ID NO: 326968 - RNA, 32 nt, Homo Sapiens
gaggaggccaggagggcugcuggggcuaaggg

SEQ ID NO: 326969 - RNA, 30 nt, Homo Sapiens
gaaggugucaguggcggcggcagcgauggc

SEQ ID NO: 326970 - RNA, 32 nt, Homo Sapiens
ucuaacuucaagaucaucaggauacuugccaa

SEQ ID NO: 326971 - RNA, 32 nt, Homo Sapiens
aauucguccgcggugguggcggugcaagagag

SEQ ID NO: 326972 - RNA, 32 nt, Homo Sapiens
ggggagggcugggcagcaagccaggcacagug

SEQ ID NO: 326973 - RNA, 32 nt, Homo Sapiens
ucuugcagccagaaggcagagaaagugaagac

SEQ ID NO: 326974 - RNA, 32 nt, Homo Sapiens
agccgggugugguggcgggcgccuguaguucc

SEQ ID NO: 326975 - RNA, 31 nt, Homo Sapiens
caucaaguggucugccugccugagccuccca

SEQ ID NO: 326976 - RNA, 32 nt, Homo Sapiens
uuaguuauaauuuuuguaucuuacaacaguau

SEQ ID NO: 326977 - RNA, 31 nt, Homo Sapiens
aucagcacaaagacuugauauuguggaauga

SEQ ID NO: 326978 - RNA, 32 nt, Homo Sapiens
aagacaauauagucuggaguauaagugggaaa

SEQ ID NO: 326979 - RNA, 32 nt, Homo Sapiens
gacggcaggaggagaggggagcccccucuggc

SEQ ID NO: 326980 - RNA, 32 nt, Homo Sapiens
agaauuuaucuaaauguguuucaaggaaacac

SEQ ID NO: 326981 - RNA, 32 nt, Homo Sapiens
ccucccuaggccagcucuggggucucggcagg

SEQ ID NO: 326982 - RNA, 32 nt, Homo Sapiens
guagcucuuggaguacagcuaugaaaauuaac

SEQ ID NO: 326983 - RNA, 32 nt, Homo Sapiens
agccuagggggccccaggggucugcuuuucua

SEQ ID NO: 326984 - RNA, 32 nt, Homo Sapiens
guugcaaaguuccauaaagaauggcccuugug

SEQ ID NO: 326985 - RNA, 32 nt, Homo Sapiens
cuugcuaggacucaugggggagcccccagcuc

SEQ ID NO: 326986 - RNA, 32 nt, Homo Sapiens
aaguguucucagauuugccuuuucucagggca

SEQ ID NO: 326987 - RNA, 32 nt, Homo Sapiens
gucacaaccucccaggcuccucauuugcuagu

SEQ ID NO: 326988 - RNA, 32 nt, Homo Sapiens
uuuuagaggucuuacugcaauaagaaguaaug

SEQ ID NO: 326989 - RNA, 30 nt, Homo Sapiens
gcccugggagguggcagacagaagcacccc

SEQ ID NO: 326990 - RNA, 32 nt, Homo Sapiens
aauauguugaaucaaagugaaauauuuauuuu

SEQ ID NO: 326991 - RNA, 32 nt, Homo Sapiens
uaucagacuaagccagcaccggaccagccugg

SEQ ID NO: 326992 - RNA, 32 nt, Homo Sapiens
cagggguucuugacgucccgucucucccaggg

SEQ ID NO: 326993 - RNA, 32 nt, Homo Sapiens
ggcagggggcgaugauaauuuacuuaaugggu

SEQ ID NO: 326994 - RNA, 32 nt, Homo Sapiens
cuucaggugcuaaacacuugguauaccaagca

SEQ ID NO: 326995 - RNA, 32 nt, Homo Sapiens
cgucacugcauuccagccugggugacagagcg

SEQ ID NO: 326996 - RNA, 32 nt, Homo Sapiens
ucucuucuuccuucuuuuaaauuucauauccu

SEQ ID NO: 326997 - RNA, 32 nt, Homo Sapiens
uuggcaggcugcugcgggaggcggcggcggua

SEQ ID NO: 326998 - RNA, 32 nt, Homo Sapiens
ucucuaagagguaacuuuuucuuuuuaaaaaa

SEQ ID NO: 326999 - RNA, 32 nt, Homo Sapiens
cacugagcacaccacauucuucaugauccauu

SEQ ID NO: 327000 - RNA, 32 nt, Homo Sapiens
ugcccagccagccaucggaagagagggcugag

SEQ ID NO: 327001 - RNA, 32 nt, Homo Sapiens
gacuuuccaaaaaacacauaauuugaaucaac

SEQ ID NO: 327002 - RNA, 31 nt, Homo Sapiens
aagaagauuccucugaaccaggaagaacugu

SEQ ID NO: 327003 - RNA, 32 nt, Homo Sapiens
ugcccuucugguaucaucugccaagaccaggg

SEQ ID NO: 327004 - RNA, 32 nt, Homo Sapiens
gggcagccucugggugaacagcagcguguccg

SEQ ID NO: 327005 - RNA, 32 nt, Homo Sapiens
ggacucagcacccacaccuccuccaacaagcu

SEQ ID NO: 327006 - RNA, 32 nt, Homo Sapiens
ccaaaccaacugaggucuuaaaguccagggaa

SEQ ID NO: 327007 - RNA, 30 nt, Homo Sapiens
cgaguucucacggucccgccggcgccacca

SEQ ID NO: 327008 - RNA, 32 nt, Homo Sapiens
acgacucgccccacagggcccucagaccccuu

SEQ ID NO: 327009 - RNA, 32 nt, Homo Sapiens
gcugugcugggugugcgacgccggccccgagc

SEQ ID NO: 327010 - RNA, 32 nt, Homo Sapiens
augcccugggccgcgugccgggcccccaccgc

SEQ ID NO: 327011 - RNA, 32 nt, Homo Sapiens
cccuccuccgcggucgucucucaggccuaggc

SEQ ID NO: 327012 - RNA, 32 nt, Homo Sapiens
ucagaaugucuccuggcauccuaaccauguaa

SEQ ID NO: 327013 - RNA, 32 nt, Homo Sapiens
aauugcauacggaugccuggcaaccuugccuu

SEQ ID NO: 327014 - RNA, 32 nt, Homo Sapiens
uauugauccuggaugugucugugaggguguug

SEQ ID NO: 327015 - RNA, 32 nt, Homo Sapiens
gcugcaaugagaaauaaaugaauguauguauu

SEQ ID NO: 327016 - RNA, 32 nt, Homo Sapiens
agagcuuccucuaucugauucucuaacaacug

SEQ ID NO: 327017 - RNA, 32 nt, Homo Sapiens
gccuuauuaguauacauacuuaagaaaugguu

SEQ ID NO: 327018 - RNA, 32 nt, Homo Sapiens
aacauaucuuguuagaauaaauuaaaaccuuu

SEQ ID NO: 327019 - RNA, 32 nt, Homo Sapiens
ggcucccagacaccucaagcccuauucacagg

SEQ ID NO: 327020 - RNA, 32 nt, Homo Sapiens
aaacacccaaaggauauuuuguuuuguugguu

SEQ ID NO: 327021 - RNA, 32 nt, Homo Sapiens
aaacuaaagggugagaauuugcuuagcgccuu

SEQ ID NO: 327022 - RNA, 32 nt, Homo Sapiens
aaaaacaacaaauaaacucuguacauguaaaa

SEQ ID NO: 327023 - RNA, 32 nt, Homo Sapiens
ggagcugccacggcuccuggcuugugcccggc

SEQ ID NO: 327024 - RNA, 32 nt, Homo Sapiens
acagaggcucuuaaagugugagauggagagcu

SEQ ID NO: 327025 - RNA, 32 nt, Homo Sapiens
ucugagguucuuuuccagugaaguguuuagua

SEQ ID NO: 327026 - RNA, 32 nt, Homo Sapiens
aggccggacgcagcgcggcgccgccccacucg

SEQ ID NO: 327027 - RNA, 32 nt, Homo Sapiens
acaguauaaacacaacuggcaucagauaauac

SEQ ID NO: 327028 - RNA, 32 nt, Homo Sapiens
gaauucggcacgaggcgcccggccccuggccc

SEQ ID NO: 327029 - RNA, 32 nt, Homo Sapiens
ugacacuugaguuuuccuaggagggacaucaa

SEQ ID NO: 327030 - RNA, 32 nt, Homo Sapiens
gacaccccugaagaauuagaaggugguuauga

SEQ ID NO: 327031 - RNA, 32 nt, Homo Sapiens
gccacagcucccccggccuucagggcucccca

SEQ ID NO: 327032 - RNA, 32 nt, Homo Sapiens
uuaagugacuugguaugcuuuauuuaauugua

SEQ ID NO: 327033 - RNA, 32 nt, Homo Sapiens
ucugcgacgagcccauugcuauggaaaccaaa

SEQ ID NO: 327034 - RNA, 32 nt, Homo Sapiens
uagcacuauaauaugcagaaaucuacaaauuc

SEQ ID NO: 327035 - RNA, 32 nt, Homo Sapiens
ugccgaaugaauggaaugcaugcgacugauuu

SEQ ID NO: 327036 - RNA, 32 nt, Homo Sapiens
gaucguauacccauggaguguuguaggggccc

SEQ ID NO: 327037 - RNA, 32 nt, Homo Sapiens
cggggggaaggggaagggagcuugcaugccuc

SEQ ID NO: 327038 - RNA, 32 nt, Homo Sapiens
uccccaugagagaaucagagggaaugcaggac

SEQ ID NO: 327039 - RNA, 32 nt, Homo Sapiens
cauuggaaaugaaacugcugugaauguggauu

SEQ ID NO: 327040 - RNA, 32 nt, Homo Sapiens
cauugacauuuuauuuuuguuaucucucuucu

SEQ ID NO: 327041 - RNA, 32 nt, Homo Sapiens
ugaggugaacauaguagccaucuucagcaucc

SEQ ID NO: 327042 - RNA, 32 nt, Homo Sapiens
cuccucccagucaucacccguagcauccgguu

SEQ ID NO: 327043 - RNA, 32 nt, Homo Sapiens
agaaaagagaauaaagcauccauguguaucuc

SEQ ID NO: 327044 - RNA, 32 nt, Homo Sapiens
gcggcaggaagggggccgacuccacgcugucc

SEQ ID NO: 327045 - RNA, 32 nt, Homo Sapiens
agguggcagccugcacaggcucgggggcagga

SEQ ID NO: 327046 - RNA, 32 nt, Homo Sapiens
uucuaccgaugugaaugauacggaugccggca

SEQ ID NO: 327047 - RNA, 32 nt, Homo Sapiens
gcacagcccagauccacccccaucaucccucu

SEQ ID NO: 327048 - RNA, 32 nt, Homo Sapiens
uguguugaaacaccccauccccucacguucuc

SEQ ID NO: 327049 - RNA, 32 nt, Homo Sapiens
gcaggccggugcccuuuuugggaggcaccagg

SEQ ID NO: 327050 - RNA, 32 nt, Homo Sapiens
gcagcuuguggcggcgaagccaucgguguucg

SEQ ID NO: 327051 - RNA, 32 nt, Homo Sapiens
cgcacucgcacgagcgcgugcacagacuugga

SEQ ID NO: 327052 - RNA, 32 nt, Homo Sapiens
ccagggccagccccgccuccuccccgggcgga

SEQ ID NO: 327053 - RNA, 32 nt, Homo Sapiens
gccgugucucaaagaaagguucuuggucuaug

SEQ ID NO: 327054 - RNA, 32 nt, Homo Sapiens
gggugaugcugugccaaguucugggagcuggc

SEQ ID NO: 327055 - RNA, 32 nt, Homo Sapiens
ugcacauaucagugcgcaaagcacuaaaauuc

SEQ ID NO: 327056 - RNA, 32 nt, Homo Sapiens
cuaaggcaaagaugagcagagccauggcccuc

SEQ ID NO: 327057 - RNA, 32 nt, Homo Sapiens
ucuuaucccauuauuucuuuaccuaggcgcuu

SEQ ID NO: 327058 - RNA, 32 nt, Homo Sapiens
uuacaccagaagacuccaguaucccucauucc

SEQ ID NO: 327059 - RNA, 32 nt, Homo Sapiens
gagaccacgagccccagaagaacgaacaacuc

SEQ ID NO: 327060 - RNA, 32 nt, Homo Sapiens
agccacuuccaagcgcagggaccgccggccuc

SEQ ID NO: 327061 - RNA, 32 nt, Homo Sapiens
uaggugaauugauuuauuauuaucauauugau

SEQ ID NO: 327062 - RNA, 32 nt, Homo Sapiens
cucacucccaaaacagacccaggcagccccac

SEQ ID NO: 327063 - RNA, 32 nt, Homo Sapiens
gaguuggguauuuuauguucauugguuuuucu

SEQ ID NO: 327064 - RNA, 32 nt, Homo Sapiens
uuucuaaugacaaaggaaguggugaucagucu

SEQ ID NO: 327065 - RNA, 32 nt, Homo Sapiens
cucucuugcaguuuccucucccagcgccucgg

SEQ ID NO: 327066 - RNA, 32 nt, Homo Sapiens
cggcggcccucgcgcgcuggccaucaggugcu

SEQ ID NO: 327067 - RNA, 32 nt, Homo Sapiens
ucccucaucucacccuuacuauugcucuugcu

SEQ ID NO: 327068 - RNA, 32 nt, Homo Sapiens
gacuacgagauaaguugauaaguucaauugau

SEQ ID NO: 327069 - RNA, 32 nt, Homo Sapiens
agacggugaugaugucacacacagacacagug

SEQ ID NO: 327070 - RNA, 32 nt, Homo Sapiens
ggaggccgacggcacccggccccgagcgccuc

SEQ ID NO: 327071 - RNA, 32 nt, Homo Sapiens
aaaaaauguuuuguucagccuaacauacugag

SEQ ID NO: 327072 - RNA, 32 nt, Homo Sapiens
aguccagagccccagcagcaagagcaacgaca

SEQ ID NO: 327073 - RNA, 32 nt, Homo Sapiens
gccugccccucgccucgacucccuuucaccaa

SEQ ID NO: 327074 - RNA, 32 nt, Homo Sapiens
aauugaaacaaguuguauauggucaucaguuu

SEQ ID NO: 327075 - RNA, 32 nt, Homo Sapiens
uugaaauuaguucauggcgacccaggcacaca

SEQ ID NO: 327076 - RNA, 32 nt, Homo Sapiens
auauuuugguaaauugaacuugguuuuucuuu

SEQ ID NO: 327077 - RNA, 32 nt, Homo Sapiens
uggaauuuuaucaaguccuuguauucuaaaau

SEQ ID NO: 327078 - RNA, 32 nt, Homo Sapiens
ggaggccccugaggugcucuccagggaagagg

SEQ ID NO: 327079 - RNA, 32 nt, Homo Sapiens
ccugccugaggcacagcuggcuccucauccug

SEQ ID NO: 327080 - RNA, 32 nt, Homo Sapiens
uccccuccagccagagauauuccaacucugca

SEQ ID NO: 327081 - RNA, 32 nt, Homo Sapiens
aaaguaaaauguucccugugcauaaagcauug

SEQ ID NO: 327082 - RNA, 32 nt, Homo Sapiens
gggccaauauucaauauucuuaaagaaaagaa

SEQ ID NO: 327083 - RNA, 32 nt, Homo Sapiens
cagauacacaguguucugcauuccacauguaa

SEQ ID NO: 327084 - RNA, 32 nt, Homo Sapiens
uccucaaaaugaggcauaaucuuauccccaga

SEQ ID NO: 327085 - RNA, 32 nt, Homo Sapiens
auuucucagagguacgucaugcguucuagaga

SEQ ID NO: 327086 - RNA, 32 nt, Homo Sapiens
auacauggcguuugcaucacaguuggagucag

SEQ ID NO: 327087 - RNA, 32 nt, Homo Sapiens
auccacagugucugcuggucguggucagaagg

SEQ ID NO: 327088 - RNA, 32 nt, Homo Sapiens
acuaguucucaauaaaauuuuauuaggacuau

SEQ ID NO: 327089 - RNA, 30 nt, Homo Sapiens
aaagcagagaagccugcuguguggcugugg

SEQ ID NO: 327090 - RNA, 32 nt, Homo Sapiens
uuacuccaucuuccagaccccuggcgaccacc

SEQ ID NO: 327091 - RNA, 32 nt, Homo Sapiens
aaagagaaaaagaccacggagugcugagcuug

SEQ ID NO: 327092 - RNA, 32 nt, Homo Sapiens
acugccuuuucucggugugguauuugacaaga

SEQ ID NO: 327093 - RNA, 32 nt, Homo Sapiens
acaugcugguggccccggcggagcggagaggg

SEQ ID NO: 327094 - RNA, 32 nt, Homo Sapiens
ugugggaguacauugaggacuggaauggcccu

SEQ ID NO: 327095 - RNA, 32 nt, Homo Sapiens
uaaaggaacuuacuaagccagcccuuugggau

SEQ ID NO: 327096 - RNA, 32 nt, Homo Sapiens
gauguuucugcccacgguuuuguuugugcaau

SEQ ID NO: 327097 - RNA, 32 nt, Homo Sapiens
gucacaucacugaguuuauccaccgccaucca

SEQ ID NO: 327098 - RNA, 32 nt, Homo Sapiens
cuuuuacccuccccacccgucccugggcucca

SEQ ID NO: 327099 - RNA, 32 nt, Homo Sapiens
uggaauuaugagugaggaagaguguuuacuaa

SEQ ID NO: 327100 - RNA, 32 nt, Homo Sapiens
ccuacacaaaacucuguaaaucauuauagcuu

SEQ ID NO: 327101 - RNA, 32 nt, Homo Sapiens
aagggagaagaaaauucauaaaaaauaaagcu

SEQ ID NO: 327102 - RNA, 32 nt, Homo Sapiens
ggauucuuuguacaggaaauauugcccaauga

SEQ ID NO: 327103 - RNA, 32 nt, Homo Sapiens
cugcacuccccugcggccugcugcuggaugag

SEQ ID NO: 327104 - RNA, 32 nt, Homo Sapiens
augaaaauacaaccucuuauuguauaguuugc

SEQ ID NO: 327105 - RNA, 32 nt, Homo Sapiens
gcauagaaaaggaaauguuuuuaccuuaucuc

SEQ ID NO: 327106 - RNA, 32 nt, Homo Sapiens
ugugcuggcccagcggcuggcauuacucuacc

SEQ ID NO: 327107 - RNA, 32 nt, Homo Sapiens
ggaaaaacuagauccuguugguuauagcauuu

SEQ ID NO: 327108 - RNA, 32 nt, Homo Sapiens
aaaugaugagagagauucgagaggucuuugau

SEQ ID NO: 327109 - RNA, 32 nt, Homo Sapiens
gcugcauugacucugaagacguuugaggaaca

SEQ ID NO: 327110 - RNA, 32 nt, Homo Sapiens
agccucucauuuuccaugaauucauaucugaa

SEQ ID NO: 327111 - RNA, 32 nt, Homo Sapiens
aacuaucuuccuuuaccaccguggugacaccu

SEQ ID NO: 327112 - RNA, 32 nt, Homo Sapiens
uugagccuaaccacaagaggcuggugcuuagu

SEQ ID NO: 327113 - RNA, 32 nt, Homo Sapiens
uuagaguuaacguccuccaucccggccccgcu

SEQ ID NO: 327114 - RNA, 32 nt, Homo Sapiens
aaacuccaaugagagaacguuuuaggaaucua

SEQ ID NO: 327115 - RNA, 32 nt, Homo Sapiens
uuuagaagaauacaaaucauggcugaaaauag

SEQ ID NO: 327116 - RNA, 32 nt, Homo Sapiens
caaacggauuggccuaucaagaaguucaaccu

SEQ ID NO: 327117 - RNA, 32 nt, Homo Sapiens
cucagcuucuuccuagguccaagccccccaca

SEQ ID NO: 327118 - RNA, 32 nt, Homo Sapiens
cugugauuccauuuagcuuccaaaugugucuc

SEQ ID NO: 327119 - RNA, 32 nt, Homo Sapiens
ugauucccacuuugcacuuuauuucugugugu

SEQ ID NO: 327120 - RNA, 32 nt, Homo Sapiens
ucaacccucagccccagagccgguuccgccgc

SEQ ID NO: 327121 - RNA, 32 nt, Homo Sapiens
aaacuggucuccacccacccccggcccguccu

SEQ ID NO: 327122 - RNA, 32 nt, Homo Sapiens
uacagugguuggaagauagcaguauuauuagc

SEQ ID NO: 327123 - RNA, 32 nt, Homo Sapiens
uuuuucaggaguguagaaaucuauguauuggu

SEQ ID NO: 327124 - RNA, 32 nt, Homo Sapiens
ggcucaccaacccugcaggccucaucuuuccc

SEQ ID NO: 327125 - RNA, 32 nt, Homo Sapiens
uaacuuguagauggccaccucccuccacgugg

SEQ ID NO: 327126 - RNA, 32 nt, Homo Sapiens
ccugagaagccccuuccacucucccacccacc

SEQ ID NO: 327127 - RNA, 29 nt, Homo Sapiens
gacaaggcugaccaacauggcaaaacccc

SEQ ID NO: 327128 - RNA, 32 nt, Homo Sapiens
uguugaaauuuacacugcuuugaaagaaagaa

SEQ ID NO: 327129 - RNA, 32 nt, Homo Sapiens
uuuuguauaaaauuauuuuauucuaaaacugg

SEQ ID NO: 327130 - RNA, 32 nt, Homo Sapiens
acugguggguugcaggaacagcacccaggacu

SEQ ID NO: 327131 - RNA, 32 nt, Homo Sapiens
cccucgcgcaccccggccccgccucacacgcg

SEQ ID NO: 327132 - RNA, 32 nt, Homo Sapiens
augggaggccucucuguuacagcccuccccau

SEQ ID NO: 327133 - RNA, 32 nt, Homo Sapiens
ugcuggcccggcgcgcggcgucgccaggccag

SEQ ID NO: 327134 - RNA, 32 nt, Homo Sapiens
aaacaagauaaaggaaauauaaagcauuacug

SEQ ID NO: 327135 - RNA, 32 nt, Homo Sapiens
ugaaagccccacucuccuccaguggucacagu

SEQ ID NO: 327136 - RNA, 32 nt, Homo Sapiens
gggcagaaaaagagaaaacagaaaugcucugc

SEQ ID NO: 327137 - RNA, 32 nt, Homo Sapiens
gucauucagggccugggucuccagcucuguaa

SEQ ID NO: 327138 - RNA, 32 nt, Homo Sapiens
ccagagaagaacuugaggccagggaccaggcc

SEQ ID NO: 327139 - RNA, 32 nt, Homo Sapiens
guggcaucgcagucucuuagaauuuguuucau

SEQ ID NO: 327140 - RNA, 32 nt, Homo Sapiens
uucagaaaaaauauaauugcaaguagguagga

SEQ ID NO: 327141 - RNA, 32 nt, Homo Sapiens
ccagagcuggaacacaauaauguguccuucua

SEQ ID NO: 327142 - RNA, 32 nt, Homo Sapiens
cacaccugccagcaaaucgcgacugcucccac

SEQ ID NO: 327143 - RNA, 32 nt, Homo Sapiens
agcacauuuuuccucaaagaaccaaacauacc

SEQ ID NO: 327144 - RNA, 32 nt, Homo Sapiens
ggauugguucacggucaaaacuuucaaaagac

SEQ ID NO: 327145 - RNA, 32 nt, Homo Sapiens
aaggaaguucccuuguauuccuagguuugcua

SEQ ID NO: 327146 - RNA, 32 nt, Homo Sapiens
gacaguaagugguggcucugcagauggccccu

SEQ ID NO: 327147 - RNA, 32 nt, Homo Sapiens
auccacuccugaugggggucuacauuaaucuu

SEQ ID NO: 327148 - RNA, 32 nt, Homo Sapiens
cggacuccuccgcauccuccuccugcuuccuc

SEQ ID NO: 327149 - RNA, 32 nt, Homo Sapiens
acacucuuggaaguccauguaguucucuacag

SEQ ID NO: 327150 - RNA, 32 nt, Homo Sapiens
gagaggagagcggugcggaggacuggaagagc

SEQ ID NO: 327151 - RNA, 32 nt, Homo Sapiens
cuggaacugcuuggcucagaucagcugcuccu

SEQ ID NO: 327152 - RNA, 30 nt, Homo Sapiens
uuggacugacuugccacacaucuggagccc

SEQ ID NO: 327153 - RNA, 32 nt, Homo Sapiens
ugggccuggaaccuggccccaguucuucucug

SEQ ID NO: 327154 - RNA, 32 nt, Homo Sapiens
gccaggccagccacugccaguaccuccuggga

SEQ ID NO: 327155 - RNA, 32 nt, Homo Sapiens
ugccaugcuccucaagccgauuuuuucuugua

SEQ ID NO: 327156 - RNA, 32 nt, Homo Sapiens
agcacuuggauuacagauucuggcugugacuc

SEQ ID NO: 327157 - RNA, 32 nt, Homo Sapiens
cagcugugccaucgcgccucggucacccugca

SEQ ID NO: 327158 - RNA, 32 nt, Homo Sapiens
gguggcaugcguguauaguccaagcuacucag

SEQ ID NO: 327159 - RNA, 32 nt, Homo Sapiens
ucuagcaguucuaaaaucauggcucgugauuu

SEQ ID NO: 327160 - RNA, 32 nt, Homo Sapiens
ggcaucggcgcggccguggcccgggcccuggu

SEQ ID NO: 327161 - RNA, 32 nt, Homo Sapiens
uccaggauggagcaggcggggagcucgcaccg

SEQ ID NO: 327162 - RNA, 32 nt, Homo Sapiens
cgagggggaugagaccuggcaacauccaugcc

SEQ ID NO: 327163 - RNA, 32 nt, Homo Sapiens
gucgaucugugguuuuucuacuugaaggacac

SEQ ID NO: 327164 - RNA, 32 nt, Homo Sapiens
agacucaucuacaaccacgaucaauaaccccg

SEQ ID NO: 327165 - RNA, 32 nt, Homo Sapiens
guguggcccucccuuucugggccuccccaggu

SEQ ID NO: 327166 - RNA, 32 nt, Homo Sapiens
ggugaggccugagggagggaggcgcauggaag

SEQ ID NO: 327167 - RNA, 32 nt, Homo Sapiens
aaauauauuucugaauagcuaaaugaagaaau

SEQ ID NO: 327168 - RNA, 32 nt, Homo Sapiens
aauuuuuaaaaauuauuuugguuuggaaaaaa

SEQ ID NO: 327169 - RNA, 32 nt, Homo Sapiens
agagcaauugaguuuuugaauuuuugacccuc

SEQ ID NO: 327170 - RNA, 32 nt, Homo Sapiens
uacaaagaggauggugaagcuuuauuaauuuu

SEQ ID NO: 327171 - RNA, 32 nt, Homo Sapiens
ccagcacgucugguuaauuuauuuuuauauua

SEQ ID NO: 327172 - RNA, 32 nt, Homo Sapiens
auguuuaguuuucucuguccacugcaugcuug

SEQ ID NO: 327173 - RNA, 32 nt, Homo Sapiens
uguucaccuaacgauuuauacuguguaucugu

SEQ ID NO: 327174 - RNA, 32 nt, Homo Sapiens
uucgcugugaugcaugagcucccucgcuguau

SEQ ID NO: 327175 - RNA, 32 nt, Homo Sapiens
uuugggaaaaggaaaaacgaguaaaaauaaua

SEQ ID NO: 327176 - RNA, 32 nt, Homo Sapiens
guagggcuuugaaaacaccuucauccaggcug

SEQ ID NO: 327177 - RNA, 32 nt, Homo Sapiens
uugugcucucuuuguuuuuucuuauuucccuc

SEQ ID NO: 327178 - RNA, 32 nt, Homo Sapiens
gcaaugcucccuccuucucaggguccacgggc

SEQ ID NO: 327179 - RNA, 32 nt, Homo Sapiens
aaagugccaaauuuuaauuugcuaguauuaau

SEQ ID NO: 327180 - RNA, 32 nt, Homo Sapiens
gcccagcccucccgcugaucccccagccagcg

SEQ ID NO: 327181 - RNA, 27 nt, Homo Sapiens
gcaaguucauucuucagaucuucaggg

SEQ ID NO: 327182 - RNA, 32 nt, Homo Sapiens
ggcugccuccgccgcgccgccggcccggauug

SEQ ID NO: 327183 - RNA, 32 nt, Homo Sapiens
cuccugggccccacagaguccuugugcugagu

SEQ ID NO: 327184 - RNA, 32 nt, Homo Sapiens
acugugaagacgguuucaaauuccuaaagccc

SEQ ID NO: 327185 - RNA, 32 nt, Homo Sapiens
aaaagagagagcuuccuaggccugggcucuua

SEQ ID NO: 327186 - RNA, 32 nt, Homo Sapiens
aagugugagaaaagguuauaauagauucuuuu

SEQ ID NO: 327187 - RNA, 32 nt, Homo Sapiens
uggggaauccaggauaagaacccauuauacag

SEQ ID NO: 327188 - RNA, 32 nt, Homo Sapiens
cugguacaugggagccagcgccggcagccacc

SEQ ID NO: 327189 - RNA, 32 nt, Homo Sapiens
ugaugugcaugucuguaucauguguuuacgug

SEQ ID NO: 327190 - RNA, 32 nt, Homo Sapiens
guauauaacuaaugguugaaaauacauauauu

SEQ ID NO: 327191 - RNA, 32 nt, Homo Sapiens
uuuaagcagacucagcugcuauacuuaucaca

SEQ ID NO: 327192 - RNA, 32 nt, Homo Sapiens
ccugcgcucggggaaggcuggcggcggcggcc

SEQ ID NO: 327193 - RNA, 32 nt, Homo Sapiens
auuaggacguggcaaugagaccuggcagggca

SEQ ID NO: 327194 - RNA, 32 nt, Homo Sapiens
ggaagcagucaccugggguuucugggggugga

SEQ ID NO: 327195 - RNA, 32 nt, Homo Sapiens
uuuguauaaaauguuauuuugccacaugagac

SEQ ID NO: 327196 - RNA, 32 nt, Homo Sapiens
acaauugguuccaauucacuuuuccagugacu

SEQ ID NO: 327197 - RNA, 32 nt, Homo Sapiens
aggggcaagaccagcuucagcccuucuugcuc

SEQ ID NO: 327198 - RNA, 32 nt, Homo Sapiens
cgccagguuaugcuggggcugcaccacccggc

SEQ ID NO: 327199 - RNA, 32 nt, Homo Sapiens
cugugaugaugauaauggaaggauggaggggg

SEQ ID NO: 327200 - RNA, 32 nt, Homo Sapiens
ggccgcgugugagcgcgcuuugcaccuccuau

SEQ ID NO: 327201 - RNA, 32 nt, Homo Sapiens
ggaacagaaagugcuuccugucccggccugag

SEQ ID NO: 327202 - RNA, 32 nt, Homo Sapiens
uuguagacuaacaaagauacuccaaaauacaa

SEQ ID NO: 327203 - RNA, 32 nt, Homo Sapiens
ugcaguggggguggauuucagagccucucaug

SEQ ID NO: 327204 - RNA, 32 nt, Homo Sapiens
gaguguuuguagcuuaucugguaaaggaaauu

SEQ ID NO: 327205 - RNA, 32 nt, Homo Sapiens
agaugaauggauaaagaauaugugcuacauac

SEQ ID NO: 327206 - RNA, 32 nt, Homo Sapiens
gauggugucuugcucugucacccaggcuggag

SEQ ID NO: 327207 - RNA, 32 nt, Homo Sapiens
uuacaggugugagccaccacagccagccagua

SEQ ID NO: 327208 - RNA, 32 nt, Homo Sapiens
cuaucuuggaaugggaaaccaugaaauuuguc

SEQ ID NO: 327209 - RNA, 32 nt, Homo Sapiens
acgccuguauuccagcacuuugggaggccgag

SEQ ID NO: 327210 - RNA, 32 nt, Homo Sapiens
uaacuauaucuuccugcguguguauuuauuuu

SEQ ID NO: 327211 - RNA, 32 nt, Homo Sapiens
ugccuuuucuggaguuuguaaaauuguuccug

SEQ ID NO: 327212 - RNA, 32 nt, Homo Sapiens
aucaauaaauguugcaaugcaugauacuaucu

SEQ ID NO: 327213 - RNA, 32 nt, Homo Sapiens
aguuuuccuucuccuaccccagccucguguac

SEQ ID NO: 327214 - RNA, 32 nt, Homo Sapiens
agaccccugguucuguucugccuccaacaugu

SEQ ID NO: 327215 - RNA, 32 nt, Homo Sapiens
cuugguggggcaauugggacgugggugugagg

SEQ ID NO: 327216 - RNA, 32 nt, Homo Sapiens
auggucuugccagcuaccaggagccacuuaag

SEQ ID NO: 327217 - RNA, 32 nt, Homo Sapiens
uaaguuaaugaaauaaaauuugaaacugaaaa

SEQ ID NO: 327218 - RNA, 32 nt, Homo Sapiens
gaaauaauagauggcagacaugucugaaugaa

SEQ ID NO: 327219 - RNA, 32 nt, Homo Sapiens
ucucauggccucuugauguggaaagaaguuga

SEQ ID NO: 327220 - RNA, 32 nt, Homo Sapiens
ccuuggaggaggaggaacauguucaggggauc

SEQ ID NO: 327221 - RNA, 32 nt, Homo Sapiens
ucacacaaagaggcaacugaaaggaugaaauc

SEQ ID NO: 327222 - RNA, 32 nt, Homo Sapiens
uuaucugugucacugucacuuuagcaaaaaua

SEQ ID NO: 327223 - RNA, 32 nt, Homo Sapiens
cgcacggaggggcuccugggggucuggaauaa

SEQ ID NO: 327224 - RNA, 32 nt, Homo Sapiens
cgguguccuccucugccacgccgcccccuuca

SEQ ID NO: 327225 - RNA, 32 nt, Homo Sapiens
gagcccgcgcucggcccgcaggacguggagac

SEQ ID NO: 327226 - RNA, 26 nt, Homo Sapiens
caccaaugaaaacaccauuccacgug

SEQ ID NO: 327227 - RNA, 32 nt, Homo Sapiens
ccuccauccugacuccacguauugcccccuug

SEQ ID NO: 327228 - RNA, 29 nt, Homo Sapiens
ccaguguuagaugagugaccuaaauauac

SEQ ID NO: 327229 - RNA, 32 nt, Homo Sapiens
gcgaccgcuuggagcauagaaaaugcagacau

SEQ ID NO: 327230 - RNA, 32 nt, Homo Sapiens
uuuguuuaacugugaguggcugcacaggcacu

SEQ ID NO: 327231 - RNA, 32 nt, Homo Sapiens
auuuggaaguaacuucacauauggaaaaguua

SEQ ID NO: 327232 - RNA, 32 nt, Homo Sapiens
uggauccagcagacuacucuggccccagcaug

SEQ ID NO: 327233 - RNA, 32 nt, Homo Sapiens
ccacaggauaccucagauggcccucuugccag

SEQ ID NO: 327234 - RNA, 32 nt, Homo Sapiens
cucccucaacugcagucuucuuucucuauaac

SEQ ID NO: 327235 - RNA, 32 nt, Homo Sapiens
gcucagguaaagaagcugggaguuccagacuu

SEQ ID NO: 327236 - RNA, 32 nt, Homo Sapiens
cacgggaggagccgcagcugccgcagccggcc

SEQ ID NO: 327237 - RNA, 32 nt, Homo Sapiens
ucaguuacugguuuauaguuacuuuauuuuca

SEQ ID NO: 327238 - RNA, 32 nt, Homo Sapiens
auuuuguuauaugcugagguguaaccauuugu

SEQ ID NO: 327239 - RNA, 32 nt, Homo Sapiens
agccccauccccagccccagccccagcccagu

SEQ ID NO: 327240 - RNA, 32 nt, Homo Sapiens
cccuuccgcucgccuuuuucgucagcuggcug

SEQ ID NO: 327241 - RNA, 32 nt, Homo Sapiens
aagugguuuuaaaggggucuaaaaagauuuug

SEQ ID NO: 327242 - RNA, 32 nt, Homo Sapiens
cugucccccuccccucccaguccuccagacca

SEQ ID NO: 327243 - RNA, 32 nt, Homo Sapiens
aagaguuauuuuguauuuuguuuucuauuaaa

SEQ ID NO: 327244 - RNA, 32 nt, Homo Sapiens
cgggcucgguagcggcagcuucagggcgcgag

SEQ ID NO: 327245 - RNA, 32 nt, Homo Sapiens
cagaaucuugccugcccuauuccuccucccaa

SEQ ID NO: 327246 - RNA, 29 nt, Homo Sapiens
cagccacaugggaagugaaagcugagaag

SEQ ID NO: 327247 - RNA, 32 nt, Homo Sapiens
cacagugucuagaaauacuugaucguggcuca

SEQ ID NO: 327248 - RNA, 32 nt, Homo Sapiens
ugccugaauugcagacuugugaauauaauaaa

SEQ ID NO: 327249 - RNA, 32 nt, Homo Sapiens
ucuuaccuaugucaaugaaaugcuagggggcc

SEQ ID NO: 327250 - RNA, 32 nt, Homo Sapiens
agaccuuccgucacaauucagcccuugaaauu

SEQ ID NO: 327251 - RNA, 32 nt, Homo Sapiens
guuuguucauucuaguuuauauuuucauuuaa

SEQ ID NO: 327252 - RNA, 32 nt, Homo Sapiens
uaaagagggauuuuuuuuuuuaaguccugaau

SEQ ID NO: 327253 - RNA, 32 nt, Homo Sapiens
aauguaaugcauggucaaaaaauauguaauuc

SEQ ID NO: 327254 - RNA, 32 nt, Homo Sapiens
uagaauacagauaacauaaaaucuaacaucuu

SEQ ID NO: 327255 - RNA, 32 nt, Homo Sapiens
aaaauuggucucucuuuuuuuaauagcuauuu

SEQ ID NO: 327256 - RNA, 32 nt, Homo Sapiens
ugucauauguggaauuuaaauauaccaucauc

SEQ ID NO: 327257 - RNA, 32 nt, Homo Sapiens
gauauucauuugauuauacgggggagggucag

SEQ ID NO: 327258 - RNA, 32 nt, Homo Sapiens
cgugggggcugcugggucaccagcagcgggua

SEQ ID NO: 327259 - RNA, 32 nt, Homo Sapiens
gagaacacacaagcagcagagaccauggggcc

SEQ ID NO: 327260 - RNA, 32 nt, Homo Sapiens
cugccaaaauuugaaguauuagaagaaagugu

SEQ ID NO: 327261 - RNA, 32 nt, Homo Sapiens
aagaagcuaguuauuucucacccaggagugga

SEQ ID NO: 327262 - RNA, 32 nt, Homo Sapiens
uuuccccucugaauggcagacaucaguaauca

SEQ ID NO: 327263 - RNA, 32 nt, Homo Sapiens
gauuaaggcuuguuugagcaaaaaagugaguu

SEQ ID NO: 327264 - RNA, 32 nt, Homo Sapiens
uguacaagaaaguugagccagcacuuuuauaa

SEQ ID NO: 327265 - RNA, 32 nt, Homo Sapiens
agcuccacuccagcugcucuacccaacgcaua

SEQ ID NO: 327266 - RNA, 32 nt, Homo Sapiens
ucauuaaaccauuuuaauauauguuaacuacu

SEQ ID NO: 327267 - RNA, 32 nt, Homo Sapiens
gacuuucucaaauaaacugcucaaaagaaggu

SEQ ID NO: 327268 - RNA, 32 nt, Homo Sapiens
uggagcugcuggcgccgcgcagguugcuguac

SEQ ID NO: 327269 - RNA, 32 nt, Homo Sapiens
auuguccgaaaauuaugaaaugaaaguugcau

SEQ ID NO: 327270 - RNA, 32 nt, Homo Sapiens
cccacagggauguuuuucaaucagaguuauac

SEQ ID NO: 327271 - RNA, 32 nt, Homo Sapiens
uggccauuaaggaaaccuugccuucgaaacug

SEQ ID NO: 327272 - RNA, 32 nt, Homo Sapiens
uggugacuauccuguugagaagcaaaagauac

SEQ ID NO: 327273 - RNA, 32 nt, Homo Sapiens
aagcaguagaguaccuggcacaaagcaaacaa

SEQ ID NO: 327274 - RNA, 32 nt, Homo Sapiens
agcugggugugguggcgggcgccuguaguccc

SEQ ID NO: 327275 - RNA, 32 nt, Homo Sapiens
cuuucuuucgcauuaguauuaauuuugaagua

SEQ ID NO: 327276 - RNA, 32 nt, Homo Sapiens
ucccucuggaauucuugggggguguuggggag

SEQ ID NO: 327277 - RNA, 32 nt, Homo Sapiens
cuggggugcugcugcugcacucacgcggcugg

SEQ ID NO: 327278 - RNA, 32 nt, Homo Sapiens
aacguuaaaagcugugaugugugcguagaaua

SEQ ID NO: 327279 - RNA, 32 nt, Homo Sapiens
uggaccuggugcccuggcugccuuccugugcc

SEQ ID NO: 327280 - RNA, 32 nt, Homo Sapiens
uacaguaagcuaugaucucaccacuguacucc

SEQ ID NO: 327281 - RNA, 32 nt, Homo Sapiens
uggucuucuaucaguaccugagugggucugag

SEQ ID NO: 327282 - RNA, 32 nt, Homo Sapiens
ggacccugcuuucccuaaggacuuccacuuug

SEQ ID NO: 327283 - RNA, 32 nt, Homo Sapiens
ccgugaguguaugcguugcugcugccccagcc

SEQ ID NO: 327284 - RNA, 32 nt, Homo Sapiens
cagaccaaguagccuucccuggagagcgcccc

SEQ ID NO: 327285 - RNA, 32 nt, Homo Sapiens
gugucuguuggaaucuugauagcugauuaauu

SEQ ID NO: 327286 - RNA, 32 nt, Homo Sapiens
cugcuagaagcacuuuauguuuccuuuuuggg

SEQ ID NO: 327287 - RNA, 32 nt, Homo Sapiens
acaaacaaacaaacagaagagaagaucauuaa

SEQ ID NO: 327288 - RNA, 32 nt, Homo Sapiens
gagcuuggguuauggcggcgccgggcgcgcug

SEQ ID NO: 327289 - RNA, 32 nt, Homo Sapiens
gcagaugccccggccccagggcuucccccagg

SEQ ID NO: 327290 - RNA, 32 nt, Homo Sapiens
ggaauaucaauaauuaaagucuguggguacca

SEQ ID NO: 327291 - RNA, 29 nt, Homo Sapiens
uuaauauaaaguuugaagcuucauccacc

SEQ ID NO: 327292 - RNA, 32 nt, Homo Sapiens
gccccggcgggggcggguccagcuuuggaagc

SEQ ID NO: 327293 - RNA, 30 nt, Homo Sapiens
cugcagcacagaccagagggucccggggcu

SEQ ID NO: 327294 - RNA, 32 nt, Homo Sapiens
uuauguacuggggacagguuuuugucgcuuua

SEQ ID NO: 327295 - RNA, 32 nt, Homo Sapiens
aacauaagacaauauaaucaugugcuuuuaac

SEQ ID NO: 327296 - RNA, 32 nt, Homo Sapiens
guuuggcugcccaggcucgccuugacuccaaa

SEQ ID NO: 327297 - RNA, 32 nt, Homo Sapiens
gugcugacaagauggcggcuggcggcaugguc

SEQ ID NO: 327298 - RNA, 32 nt, Homo Sapiens
cuguccaguugcuccuucuucuauugacccuu

SEQ ID NO: 327299 - RNA, 29 nt, Homo Sapiens
cauaauggcagugggugagccccuggugc

SEQ ID NO: 327300 - RNA, 32 nt, Homo Sapiens
cucaacgccgucccuuucgccaccgccuuuuc

SEQ ID NO: 327301 - RNA, 30 nt, Homo Sapiens
gaccacaaccuugccacaccucuuggcaug

SEQ ID NO: 327302 - RNA, 32 nt, Homo Sapiens
ugacaagauaguacacauuacuauaagggcua

SEQ ID NO: 327303 - RNA, 32 nt, Homo Sapiens
ccuccugcagcagugagaagaucugcaccguc

SEQ ID NO: 327304 - RNA, 32 nt, Homo Sapiens
cccugggcaccucggccuggucccagcaggua

SEQ ID NO: 327305 - RNA, 32 nt, Homo Sapiens
cuacuaaaaaauacaaaaaagcuggguguggu

SEQ ID NO: 327306 - RNA, 32 nt, Homo Sapiens
uaaucucauauuauuugggaaauauuuggauu

SEQ ID NO: 327307 - RNA, 32 nt, Homo Sapiens
ccuuccuucccauuuacccauuuccuuccagu

SEQ ID NO: 327308 - RNA, 32 nt, Homo Sapiens
caguuagcacuuucuucagaugcugacgcucg

SEQ ID NO: 327309 - RNA, 32 nt, Homo Sapiens
uaaaaauauuugcucuucugucuugggagcca

SEQ ID NO: 327310 - RNA, 32 nt, Homo Sapiens
uaaaagaagcaucucugaccagaagacaaagg

SEQ ID NO: 327311 - RNA, 32 nt, Homo Sapiens
ggaagucuucgucuucacucacauaagagucu

SEQ ID NO: 327312 - RNA, 32 nt, Homo Sapiens
cgggaggcugggagcccugcccugcccauccc

SEQ ID NO: 327313 - RNA, 32 nt, Homo Sapiens
cuuccugcuggacucaggccuccagcucccug

SEQ ID NO: 327314 - RNA, 32 nt, Homo Sapiens
cauguuaucuauuuguauuaucauguuuaugu

SEQ ID NO: 327315 - RNA, 32 nt, Homo Sapiens
uguguucgcacuuagccaugggcugggcucaa

SEQ ID NO: 327316 - RNA, 32 nt, Homo Sapiens
cgauuuuuuuugcauguuucuuuuugaaaugg

SEQ ID NO: 327317 - RNA, 32 nt, Homo Sapiens
aucuugccuggggaaaguggggugcagaaggc

SEQ ID NO: 327318 - RNA, 32 nt, Homo Sapiens
gggcuggggggcggggcuggaggggaaggagu

SEQ ID NO: 327319 - RNA, 32 nt, Homo Sapiens
uacuggucugaucuguucuacauauuaaaguu

SEQ ID NO: 327320 - RNA, 32 nt, Homo Sapiens
ugccucugucuccugccacaauccugcuggga

SEQ ID NO: 327321 - RNA, 32 nt, Homo Sapiens
caccacuuccccacccacacacaguacccugg

SEQ ID NO: 327322 - RNA, 32 nt, Homo Sapiens
cauggagcacgcugcccagcccuggcgauggc

SEQ ID NO: 327323 - RNA, 32 nt, Homo Sapiens
aucaucuaaaauuuaaauuuguccuacauuug

SEQ ID NO: 327324 - RNA, 32 nt, Homo Sapiens
uuucuauuaggaguuugguaaaauauuguaaa

SEQ ID NO: 327325 - RNA, 32 nt, Homo Sapiens
ggcuacucuccggcccgggguacuggcauuuc

SEQ ID NO: 327326 - RNA, 32 nt, Homo Sapiens
aagggggcugguguagccggacaggcggaggg

SEQ ID NO: 327327 - RNA, 32 nt, Homo Sapiens
cacagaacuagugagcgcccccugccccaauc

SEQ ID NO: 327328 - RNA, 32 nt, Homo Sapiens
ccuagcuucccauuuucaaaugggacaucacu

SEQ ID NO: 327329 - RNA, 32 nt, Homo Sapiens
ggggacuggaugcuagccaucuccaggagaca

SEQ ID NO: 327330 - RNA, 32 nt, Homo Sapiens
ggcaauuguuuauagugaaacuuuuuaaauua

SEQ ID NO: 327331 - RNA, 32 nt, Homo Sapiens
uaugagaucuagccugcuuucagccaucaccu

SEQ ID NO: 327332 - RNA, 32 nt, Homo Sapiens
ggucccuaccugcgccuccgcccgccagcggc

SEQ ID NO: 327333 - RNA, 32 nt, Homo Sapiens
auccuguuggugugcccuggggugccauggcu

SEQ ID NO: 327334 - RNA, 32 nt, Homo Sapiens
aggccuccacccuagcacaucugggcucuacc

SEQ ID NO: 327335 - RNA, 32 nt, Homo Sapiens
auuuucaauagaggauacaacaucacagaauc

SEQ ID NO: 327336 - RNA, 32 nt, Homo Sapiens
aguggcauauuuuuauaugaaucaucuccucu

SEQ ID NO: 327337 - RNA, 32 nt, Homo Sapiens
gaacauucagucuagaaagaaaacauuggaau

SEQ ID NO: 327338 - RNA, 32 nt, Homo Sapiens
cacccugggccucuagguuagacucagcccag

SEQ ID NO: 327339 - RNA, 32 nt, Homo Sapiens
cugccucgccuccccccacgccugcagcuucu

SEQ ID NO: 327340 - RNA, 32 nt, Homo Sapiens
gaucuugaauuuccuuucuaacacugugcccg

SEQ ID NO: 327341 - RNA, 32 nt, Homo Sapiens
uguauguccaaguauuguuauuucauaauaag

SEQ ID NO: 327342 - RNA, 31 nt, Homo Sapiens
aagcccgagagagaccaguccacuccugagu

SEQ ID NO: 327343 - RNA, 32 nt, Homo Sapiens
aagcacuccaggccgcuagcagaugggacugg

SEQ ID NO: 327344 - RNA, 32 nt, Homo Sapiens
aaggcuggaagcagggucugugcccugagaca

SEQ ID NO: 327345 - RNA, 32 nt, Homo Sapiens
caaaauuauugugauucucaccucccucccca

SEQ ID NO: 327346 - RNA, 32 nt, Homo Sapiens
aaggggugguggcaugguugcggggcuccucc

SEQ ID NO: 327347 - RNA, 32 nt, Homo Sapiens
cacuaguagagcuuuuccuagugucugcacag

SEQ ID NO: 327348 - RNA, 32 nt, Homo Sapiens
cugggcugcgacgcgccgcugcccuacuggac

SEQ ID NO: 327349 - RNA, 32 nt, Homo Sapiens
auauucccuaccuggcccccuccaccucccua

SEQ ID NO: 327350 - RNA, 32 nt, Homo Sapiens
cuugugcugaccaaguaucuuagaggcuuauu

SEQ ID NO: 327351 - RNA, 32 nt, Homo Sapiens
guguacucugucaucacuuaauaaugcuugaa

SEQ ID NO: 327352 - RNA, 32 nt, Homo Sapiens
cgccaaguaggggauugcguucccuccagucg

SEQ ID NO: 327353 - RNA, 32 nt, Homo Sapiens
gacggaguuucgcucuugaugcccagcaggcu

SEQ ID NO: 327354 - RNA, 32 nt, Homo Sapiens
aagugaauaaacuguuacacuaaucagugaaa

SEQ ID NO: 327355 - RNA, 32 nt, Homo Sapiens
ggggagagcugcugcgcccagcccagucuacu

SEQ ID NO: 327356 - RNA, 32 nt, Homo Sapiens
uggcuucacuucucugaccccagccucggccg

SEQ ID NO: 327357 - RNA, 32 nt, Homo Sapiens
uuagaggcacugaugcucugggugugguguga

SEQ ID NO: 327358 - RNA, 32 nt, Homo Sapiens
ucuagaucuaaugcuauggaaaagugccuuuu

SEQ ID NO: 327359 - RNA, 32 nt, Homo Sapiens
uaguuuauucagaauauuucucuguucguauc

SEQ ID NO: 327360 - RNA, 32 nt, Homo Sapiens
aacugaguagucugaaccucuaauggaaaaag

SEQ ID NO: 327361 - RNA, 32 nt, Homo Sapiens
gagggcgcaugcgcauguggcuccugggacug

SEQ ID NO: 327362 - RNA, 32 nt, Homo Sapiens
agcucccgcgcgcuagagccgccugcuggucu

SEQ ID NO: 327363 - RNA, 32 nt, Homo Sapiens
guguucccuggcccacucuccucucuccuucu

SEQ ID NO: 327364 - RNA, 32 nt, Homo Sapiens
ucaucggaaaagauccaaagugcaaggauuug

SEQ ID NO: 327365 - RNA, 32 nt, Homo Sapiens
uuauucccaagccuccuuggccccaguauaag

SEQ ID NO: 327366 - RNA, 27 nt, Homo Sapiens
uuuauugguaaauucugguauacauug

SEQ ID NO: 327367 - RNA, 32 nt, Homo Sapiens
gagcugccccauggacagggccccacagagac

SEQ ID NO: 327368 - RNA, 28 nt, Homo Sapiens
caggggcuggaugguauguguuucugcu

SEQ ID NO: 327369 - RNA, 32 nt, Homo Sapiens
ugcgggggccuuggagaccuccaggucugaaa

SEQ ID NO: 327370 - RNA, 32 nt, Homo Sapiens
guaggugcugcuaguguuuagcgcuggucuuu

SEQ ID NO: 327371 - RNA, 32 nt, Homo Sapiens
accgcuccaguucucaucaucucccaggcaga

SEQ ID NO: 327372 - RNA, 32 nt, Homo Sapiens
ugacugaccacgguaccacgggcugccacagc

SEQ ID NO: 327373 - RNA, 30 nt, Homo Sapiens
guuuuauuuaaauaaaguaguuuauguaac

SEQ ID NO: 327374 - RNA, 32 nt, Homo Sapiens
augagaggagagagggaaggcaggucagggcc

SEQ ID NO: 327375 - RNA, 32 nt, Homo Sapiens
aggaucuucuauuugaauaucuuuccuguucu

SEQ ID NO: 327376 - RNA, 32 nt, Homo Sapiens
uggggagguggcugcgcaggguggagggagug

SEQ ID NO: 327377 - RNA, 32 nt, Homo Sapiens
cgcccuuccgcggagacucccaggaacacccg

SEQ ID NO: 327378 - RNA, 32 nt, Homo Sapiens
agcuguuggcggugcagggaggaggacgccgg

SEQ ID NO: 327379 - RNA, 32 nt, Homo Sapiens
ugcauuuuuggcucagauaaacacauagaggc

SEQ ID NO: 327380 - RNA, 32 nt, Homo Sapiens
uuucaaguuggugguugggauaucugcucucu

SEQ ID NO: 327381 - RNA, 32 nt, Homo Sapiens
aguggaucagcuggguuuuggccaggaaguug

SEQ ID NO: 327382 - RNA, 32 nt, Homo Sapiens
ucaguugcaauaaacucagucaaauguaccca

SEQ ID NO: 327383 - RNA, 32 nt, Homo Sapiens
caucugcuguuccuuggucucuaaucaccuga

SEQ ID NO: 327384 - RNA, 32 nt, Homo Sapiens
cagggucugagugggccaaccuugacuacccc

SEQ ID NO: 327385 - RNA, 32 nt, Homo Sapiens
ggucacugcucugcugcccccugcaaccuccu

SEQ ID NO: 327386 - RNA, 32 nt, Homo Sapiens
ggacaggaagguggcauuucuuauuuauuaac

SEQ ID NO: 327387 - RNA, 32 nt, Homo Sapiens
uauauacacauauacacaucuauguauggaua

SEQ ID NO: 327388 - RNA, 32 nt, Homo Sapiens
ggcaaaaauaucuuuuucaaggcaucagcucu

SEQ ID NO: 327389 - RNA, 32 nt, Homo Sapiens
agauggggaaacugaggcccagaauugcuaag

SEQ ID NO: 327390 - RNA, 32 nt, Homo Sapiens
aaaccacuggaacauggccgucgcuguggggg

SEQ ID NO: 327391 - RNA, 32 nt, Homo Sapiens
gccucggccgcugcagcuccgccggcagcaug

SEQ ID NO: 327392 - RNA, 32 nt, Homo Sapiens
caccagcgccccagccccgaggcucagaagcg

SEQ ID NO: 327393 - RNA, 32 nt, Homo Sapiens
aaaggaggaaauguuuucccacaguucuaggg

SEQ ID NO: 327394 - RNA, 32 nt, Homo Sapiens
acaaauuaauacugucaaucuuucucccagcc

SEQ ID NO: 327395 - RNA, 32 nt, Homo Sapiens
gggacagcagugccaugugccuucacuguguc

SEQ ID NO: 327396 - RNA, 32 nt, Homo Sapiens
agcgcagcagggcuacagugcuuacaacaccc

SEQ ID NO: 327397 - RNA, 32 nt, Homo Sapiens
uuuaauccauucuuuguuuguuuaccugugcu

SEQ ID NO: 327398 - RNA, 32 nt, Homo Sapiens
cgcuucccggugcacccuccccgggagacacc

SEQ ID NO: 327399 - RNA, 32 nt, Homo Sapiens
gggauuaaaaaaaaaacuuaugcagcuuuuca

SEQ ID NO: 327400 - RNA, 32 nt, Homo Sapiens
cgaggcugcagugugcugugauugugacacug

SEQ ID NO: 327401 - RNA, 32 nt, Homo Sapiens
aggacuuaaccucauuggaggaucucacuuaa

SEQ ID NO: 327402 - RNA, 32 nt, Homo Sapiens
acagcuuaucccaggcacccuggcagguucuc

SEQ ID NO: 327403 - RNA, 32 nt, Homo Sapiens
ccugccugcccccagcaucuggacaagcuaau

SEQ ID NO: 327404 - RNA, 32 nt, Homo Sapiens
agcgguauucaggaucucaucaccuuugcccg

SEQ ID NO: 327405 - RNA, 32 nt, Homo Sapiens
gcucucugacuucucaggacacaggucaugga

SEQ ID NO: 327406 - RNA, 32 nt, Homo Sapiens
uguuccucuuagaagucagaucaucugauuua

SEQ ID NO: 327407 - RNA, 32 nt, Homo Sapiens
ccucucugugcagcugugugaccucagcagau

SEQ ID NO: 327408 - RNA, 28 nt, Homo Sapiens
cuguauuuuuuguaaauguguuuacucu

SEQ ID NO: 327409 - RNA, 32 nt, Homo Sapiens
acucauauuuaaaauaauaucuaaaaagagua

SEQ ID NO: 327410 - RNA, 32 nt, Homo Sapiens
uuuuacucaauccauucuucacaagucuuggu

SEQ ID NO: 327411 - RNA, 32 nt, Homo Sapiens
cuccaggcggguggggagaucugcaggguccc

SEQ ID NO: 327412 - RNA, 32 nt, Homo Sapiens
cuaggaaagaugugucccaaagcuccgcaagc

SEQ ID NO: 327413 - RNA, 32 nt, Homo Sapiens
cuucuagggaccagcaauacagugcucgccac

SEQ ID NO: 327414 - RNA, 32 nt, Homo Sapiens
gccucuggggacgggcgacgcugcugugugug

SEQ ID NO: 327415 - RNA, 32 nt, Homo Sapiens
gguggugguggccguggaugacggagacucuc

SEQ ID NO: 327416 - RNA, 32 nt, Homo Sapiens
gcuacugcacuccagccugggcgacagaguga

SEQ ID NO: 327417 - RNA, 32 nt, Homo Sapiens
ggcaguggagcuggcccggcgccugggcgcgc

SEQ ID NO: 327418 - RNA, 32 nt, Homo Sapiens
agucgggcuggaugcucuguggccuuucuugg

SEQ ID NO: 327419 - RNA, 32 nt, Homo Sapiens
cacuagcagccugguccagucacccuuuguca

SEQ ID NO: 327420 - RNA, 32 nt, Homo Sapiens
uaccgcucacucucaugcccacagcagggcug

SEQ ID NO: 327421 - RNA, 32 nt, Homo Sapiens
ugccucuucagcugucaguccauccuccuuua

SEQ ID NO: 327422 - RNA, 32 nt, Homo Sapiens
augcaacggagggggcgcuaggggcaucuuuc

SEQ ID NO: 327423 - RNA, 32 nt, Homo Sapiens
aguucgacucugugcuggccagcgagcgccca

SEQ ID NO: 327424 - RNA, 32 nt, Homo Sapiens
guccgggaggucuuugggcaucgcggucuggg

SEQ ID NO: 327425 - RNA, 32 nt, Homo Sapiens
gccccuugaggcucagccauaagagcuucacu

SEQ ID NO: 327426 - RNA, 31 nt, Homo Sapiens
ccgcagcugcgcagccugcccuucgggacgc

SEQ ID NO: 327427 - RNA, 32 nt, Homo Sapiens
uagcuuaaaaauuuaaucacgagauugcgcca

SEQ ID NO: 327428 - RNA, 32 nt, Homo Sapiens
cucggucgugcagcggcggcgagcgcucgcga

SEQ ID NO: 327429 - RNA, 32 nt, Homo Sapiens
ccugguggggaugccugggcucccuccugcag

SEQ ID NO: 327430 - RNA, 32 nt, Homo Sapiens
cuggauaggaagggauaggaagagacuacuug

SEQ ID NO: 327431 - RNA, 32 nt, Homo Sapiens
guagggguggguagucuguguucuaguuccua

SEQ ID NO: 327432 - RNA, 32 nt, Homo Sapiens
cacgcccagugugggagagauguauggucuug

SEQ ID NO: 327433 - RNA, 32 nt, Homo Sapiens
gcccacaauggccaguuuacuaccagaaaggg

SEQ ID NO: 327434 - RNA, 32 nt, Homo Sapiens
uuuuuguguaaaagccaaaacuuuuuauguug

SEQ ID NO: 327435 - RNA, 32 nt, Homo Sapiens
cguggagacggggcagggagggggguuauuag

SEQ ID NO: 327436 - RNA, 32 nt, Homo Sapiens
aaauaaaaauaucugugugacaauauaugcug

SEQ ID NO: 327437 - RNA, 32 nt, Homo Sapiens
gccugcaggcagggaugcugcaggacucccug

SEQ ID NO: 327438 - RNA, 32 nt, Homo Sapiens
cuauuucuuucaucagaaaaaguccgaaaagc

SEQ ID NO: 327439 - RNA, 32 nt, Homo Sapiens
uuaauuuugaguuuucugacagaagaaaagau

SEQ ID NO: 327440 - RNA, 32 nt, Homo Sapiens
agucaugugucuuuuuagucauagguuagcuu

SEQ ID NO: 327441 - RNA, 32 nt, Homo Sapiens
uaggcuaaagaagucaaggaaauguugcuuuc

SEQ ID NO: 327442 - RNA, 32 nt, Homo Sapiens
cuccucucgcaugguguggagggcgccaucua

SEQ ID NO: 327443 - RNA, 31 nt, Homo Sapiens
cgcugccucaaugcuccugauucagcucuuc

SEQ ID NO: 327444 - RNA, 32 nt, Homo Sapiens
aggcugucaccaugguccgccugccuggcucc

SEQ ID NO: 327445 - RNA, 32 nt, Homo Sapiens
aggugcaggucuuugccgguuaaguaagggag

SEQ ID NO: 327446 - RNA, 32 nt, Homo Sapiens
ugagagucaaugucuucaugguaaauuucucc

SEQ ID NO: 327447 - RNA, 32 nt, Homo Sapiens
aaacucuucuaaaaccauguuuauaugcauca

SEQ ID NO: 327448 - RNA, 32 nt, Homo Sapiens
aucgagcaugagauuuuuugcaugacgugcaa

SEQ ID NO: 327449 - RNA, 32 nt, Homo Sapiens
uuagacuguauccagagggauguugaacuuua

SEQ ID NO: 327450 - RNA, 32 nt, Homo Sapiens
guugagaagaacucaaaagcaagugaagauua

SEQ ID NO: 327451 - RNA, 32 nt, Homo Sapiens
aaaauaaauuauguucuuaaugccucuuaaac

SEQ ID NO: 327452 - RNA, 32 nt, Homo Sapiens
gaaugugcgaggggagggaggcgucccggcgg

SEQ ID NO: 327453 - RNA, 32 nt, Homo Sapiens
aaggcacggucaacuaucaagcaagcguggug

SEQ ID NO: 327454 - RNA, 32 nt, Homo Sapiens
uguaaagaaaaauaaaacuguuuaugauacuu

SEQ ID NO: 327455 - RNA, 32 nt, Homo Sapiens
guuuacaucauuuuuguaucuacaucuuuuuu

SEQ ID NO: 327456 - RNA, 32 nt, Homo Sapiens
uucuuuauagcuacaaagucagggcguucaua

SEQ ID NO: 327457 - RNA, 32 nt, Homo Sapiens
ggaauauccaagaagcuguuguccucucucga

SEQ ID NO: 327458 - RNA, 32 nt, Homo Sapiens
gauucuuuuuauucuuucauuucacuucuauc

SEQ ID NO: 327459 - RNA, 32 nt, Homo Sapiens
gcugagcgcucgccgagacggcgaccggacug

SEQ ID NO: 327460 - RNA, 32 nt, Homo Sapiens
gcggugucugccugcuggcaauggucaaaguu

SEQ ID NO: 327461 - RNA, 32 nt, Homo Sapiens
caaucccaccgccggcugcgcgucgcucgcca

SEQ ID NO: 327462 - RNA, 32 nt, Homo Sapiens
cuaaaaggccuuuuagaauauuucauaaaggg

SEQ ID NO: 327463 - RNA, 32 nt, Homo Sapiens
uaaaguugauucaacaaugcuauaaucuguua

SEQ ID NO: 327464 - RNA, 32 nt, Homo Sapiens
acacaaaugugauuuuuguaauaugucucaac

SEQ ID NO: 327465 - RNA, 32 nt, Homo Sapiens
guaugucauuuccuucaaggcaucaugcagag

SEQ ID NO: 327466 - RNA, 32 nt, Homo Sapiens
ucaguguugacuuuuucuuucuuagaucuagu

SEQ ID NO: 327467 - RNA, 32 nt, Homo Sapiens
aagaguggccccaccuggcccucucugaagga

SEQ ID NO: 327468 - RNA, 32 nt, Homo Sapiens
cacagcaggcugccucuugguccugacaggaa

SEQ ID NO: 327469 - RNA, 32 nt, Homo Sapiens
cugggagcacugcugggcuccuggacugagaa

SEQ ID NO: 327470 - RNA, 32 nt, Homo Sapiens
acaggagccagacaugacagggacuuggcccu

SEQ ID NO: 327471 - RNA, 32 nt, Homo Sapiens
gaaguggccucuccccgcugaaaccugggguc

SEQ ID NO: 327472 - RNA, 32 nt, Homo Sapiens
cccucccccuccccaacucagaucuggccccg

SEQ ID NO: 327473 - RNA, 32 nt, Homo Sapiens
cuccaggagcagccacauuccugaugcuucuu

SEQ ID NO: 327474 - RNA, 32 nt, Homo Sapiens
cggcggcggcggugggaggaggauggccgggg

SEQ ID NO: 327475 - RNA, 32 nt, Homo Sapiens
gucccuuagggcuuaucacaccguucucccca

SEQ ID NO: 327476 - RNA, 32 nt, Homo Sapiens
auauagacaaaauaaaauauuucuuuaauggc

SEQ ID NO: 327477 - RNA, 32 nt, Homo Sapiens
augccucucccuccgcaucucaucuuucucuu

SEQ ID NO: 327478 - RNA, 32 nt, Homo Sapiens
cagaaggcggcugauuguugguaagucagugc

SEQ ID NO: 327479 - RNA, 32 nt, Homo Sapiens
auuuguuugacuugguuauacugcauggaguc

SEQ ID NO: 327480 - RNA, 32 nt, Homo Sapiens
auguugauuaauaugugaaaagaaauuguacc

SEQ ID NO: 327481 - RNA, 32 nt, Homo Sapiens
aaaagauuuaugaauacaaaccauuuaugguu

SEQ ID NO: 327482 - RNA, 32 nt, Homo Sapiens
gugcagcugcgcacguguuucagccggcagcg

SEQ ID NO: 327483 - RNA, 32 nt, Homo Sapiens
uggcggcgccuggcaggcuccgccagcccccu

SEQ ID NO: 327484 - RNA, 32 nt, Homo Sapiens
cauaacccuuugugcuggccugcggccaggca

SEQ ID NO: 327485 - RNA, 32 nt, Homo Sapiens
ccaggaggaaucuggaacaauuuuuugaacuc

SEQ ID NO: 327486 - RNA, 32 nt, Homo Sapiens
gaaacccuuuuggaauacauguguuauuguug

SEQ ID NO: 327487 - RNA, 32 nt, Homo Sapiens
uuccuccccgcucguccuccccgggcccagag

SEQ ID NO: 327488 - RNA, 32 nt, Homo Sapiens
ccugugcccaggugaaugggcgcaggguccuc

SEQ ID NO: 327489 - RNA, 32 nt, Homo Sapiens
uucgucuucgguuuuucucuuccuucgcuaac

SEQ ID NO: 327490 - RNA, 32 nt, Homo Sapiens
acuuuaagaagcuacuaagugcuguuccgaag

SEQ ID NO: 327491 - RNA, 32 nt, Homo Sapiens
aaccugggggauuugaggccagggggagagcc

SEQ ID NO: 327492 - RNA, 30 nt, Homo Sapiens
cggaggauggcgcgcgcggggcccgcacgu

SEQ ID NO: 327493 - RNA, 32 nt, Homo Sapiens
ccaucugagauuuuaauaaaucccucaaacaa

SEQ ID NO: 327494 - RNA, 32 nt, Homo Sapiens
cgugcaccaccugccgcuuagcacugagaagg

SEQ ID NO: 327495 - RNA, 32 nt, Homo Sapiens
uuuuuguuuuguuuuucuuuuuuuucuuucuu

SEQ ID NO: 327496 - RNA, 32 nt, Homo Sapiens
aauguauaagcauuucuguuuaccaauagcuc

SEQ ID NO: 327497 - RNA, 32 nt, Homo Sapiens
acauguagaacagauuuaaaaauacacaguac

SEQ ID NO: 327498 - RNA, 32 nt, Homo Sapiens
ucucuucauguucuaauaaacuucuacauuau

SEQ ID NO: 327499 - RNA, 32 nt, Homo Sapiens
cacuuuuaucucuuuccaaucacuuguucaua

SEQ ID NO: 327500 - RNA, 32 nt, Homo Sapiens
gucaacaucuucucauuuuucccuacaaaaac

SEQ ID NO: 327501 - RNA, 32 nt, Homo Sapiens
gccugcaggucaaugucuugcugcuccugucc

SEQ ID NO: 327502 - RNA, 32 nt, Homo Sapiens
cauuuuccaaauaugugugaaaucuguuucug

SEQ ID NO: 327503 - RNA, 32 nt, Homo Sapiens
ccugaggaaaaguuaaaguguagaaaauauug

SEQ ID NO: 327504 - RNA, 32 nt, Homo Sapiens
uuguccuguaucuguaaacacuuuuuguucuu

SEQ ID NO: 327505 - RNA, 32 nt, Homo Sapiens
gacgugcagucuccagcuuguaccucauauca

SEQ ID NO: 327506 - RNA, 32 nt, Homo Sapiens
cagguuuucuucaccccucccugugucccucu

SEQ ID NO: 327507 - RNA, 32 nt, Homo Sapiens
uuuaggugugcagcauccuagagugcuccagg

SEQ ID NO: 327508 - RNA, 32 nt, Homo Sapiens
auuuuguguuugucauuugucuauuauaguuu

SEQ ID NO: 327509 - RNA, 32 nt, Homo Sapiens
cagaaaguucucauugccccagcugccuagua

SEQ ID NO: 327510 - RNA, 32 nt, Homo Sapiens
uccuuucugagggaggcuggugccgcucugca

SEQ ID NO: 327511 - RNA, 32 nt, Homo Sapiens
uccaagacgcguuucagagagccccucuucuu

SEQ ID NO: 327512 - RNA, 32 nt, Homo Sapiens
gcaguuuuuggaaaaauaggugggaaaaguua

SEQ ID NO: 327513 - RNA, 32 nt, Homo Sapiens
agcagggcagccucuuguuuguguggaucccu

SEQ ID NO: 327514 - RNA, 32 nt, Homo Sapiens
gaguggauucagccccaccuccugcucacaga

SEQ ID NO: 327515 - RNA, 32 nt, Homo Sapiens
uaaccagaggggcuuccuuuguauguuacaug

SEQ ID NO: 327516 - RNA, 32 nt, Homo Sapiens
guguauauaugauuucuauauccuuguuuuuc

SEQ ID NO: 327517 - RNA, 32 nt, Homo Sapiens
agagguggaugauaaacccugucauaguggag

SEQ ID NO: 327518 - RNA, 32 nt, Homo Sapiens
ccccaagagaagccuuccuuauuuuggaguaa

SEQ ID NO: 327519 - RNA, 32 nt, Homo Sapiens
gcugaggaaggagagccugugaguuugaggcu

SEQ ID NO: 327520 - RNA, 32 nt, Homo Sapiens
cugcuccgccgcgccccgcccgggcuggggua

SEQ ID NO: 327521 - RNA, 32 nt, Homo Sapiens
guuagcgcugcuccgccgcggcgcccgcccag

SEQ ID NO: 327522 - RNA, 32 nt, Homo Sapiens
cuggaauaagguggucccacuugacuguucca

SEQ ID NO: 327523 - RNA, 32 nt, Homo Sapiens
ugaagugcagcuauguuuccaguguucucugg

SEQ ID NO: 327524 - RNA, 32 nt, Homo Sapiens
cgcuuaagccacugauggcugcgagcuugaag

SEQ ID NO: 327525 - RNA, 32 nt, Homo Sapiens
cugggcugcagagccauggcccggggcuacgg

SEQ ID NO: 327526 - RNA, 32 nt, Homo Sapiens
cuugucucuacuauuauaaccaaaaaauauuu

SEQ ID NO: 327527 - RNA, 32 nt, Homo Sapiens
gccuuugacaaugacuuccucaaacugacacc

SEQ ID NO: 327528 - RNA, 32 nt, Homo Sapiens
accgggaauucauugcccuuucuguugggaaa

SEQ ID NO: 327529 - RNA, 32 nt, Homo Sapiens
cucauucugggccagcucuaugcaaagggaaa

SEQ ID NO: 327530 - RNA, 32 nt, Homo Sapiens
gccaaagaucauaauuuggacauggcagaaac

SEQ ID NO: 327531 - RNA, 32 nt, Homo Sapiens
acgaguuaggggaacuccugcugccugaacac

SEQ ID NO: 327532 - RNA, 32 nt, Homo Sapiens
gcacaccaggacaucagagacugggaagggcc

SEQ ID NO: 327533 - RNA, 32 nt, Homo Sapiens
aggggaugucauuugccugguaagaacugggu

SEQ ID NO: 327534 - RNA, 32 nt, Homo Sapiens
ccaauuugucccuccggccugggcggccccug

SEQ ID NO: 327535 - RNA, 32 nt, Homo Sapiens
cuauuuauauauuugaaagguauaaaagguag

SEQ ID NO: 327536 - RNA, 32 nt, Homo Sapiens
gaguguuucuucaaggcaggcaucugcuuaug

SEQ ID NO: 327537 - RNA, 32 nt, Homo Sapiens
aggugccccccucaccuugaugggugcguucc

SEQ ID NO: 327538 - RNA, 32 nt, Homo Sapiens
cuggcuauugggacccuuuggccaggaaaaau

SEQ ID NO: 327539 - RNA, 32 nt, Homo Sapiens
auguaggcgaauaacaugaacauugcuucauc

SEQ ID NO: 327540 - RNA, 32 nt, Homo Sapiens
aggagauuguuucaaaauauuuuugcaaauug

SEQ ID NO: 327541 - RNA, 32 nt, Homo Sapiens
cugcgguccaacugcgcugcugccggagcgcu

SEQ ID NO: 327542 - RNA, 32 nt, Homo Sapiens
auagcagagaauaaaugguugcuguaacuuau

SEQ ID NO: 327543 - RNA, 32 nt, Homo Sapiens
gauuacuuuuggguuuugucuaccucaugugg

SEQ ID NO: 327544 - RNA, 32 nt, Homo Sapiens
cccgcccagcuuucccaggggcacagcucuag

SEQ ID NO: 327545 - RNA, 32 nt, Homo Sapiens
gacuuccucccuccccacaucaugaaggcaga

SEQ ID NO: 327546 - RNA, 32 nt, Homo Sapiens
acugggugaagccacacacacccaaugaacau

SEQ ID NO: 327547 - RNA, 32 nt, Homo Sapiens
gggauucaugggaaaugucguauuuuagaguc

SEQ ID NO: 327548 - RNA, 32 nt, Homo Sapiens
uagagcuggcuaauguaacacugacuaugagu

SEQ ID NO: 327549 - RNA, 32 nt, Homo Sapiens
uuuucccccacguugagauugugcaguaguuc

SEQ ID NO: 327550 - RNA, 32 nt, Homo Sapiens
agcuggcgggcuggccuucuggacccuggcuu

SEQ ID NO: 327551 - RNA, 32 nt, Homo Sapiens
gaaucgaagaucucuagcggucuucuacucag

SEQ ID NO: 327552 - RNA, 32 nt, Homo Sapiens
gacuuggggcacuuguggguacucauucucug

SEQ ID NO: 327553 - RNA, 32 nt, Homo Sapiens
cugugguugggaauuuguauuuucucaggaug

SEQ ID NO: 327554 - RNA, 32 nt, Homo Sapiens
uugggagccauuagccuugcucuggucugcug

SEQ ID NO: 327555 - RNA, 32 nt, Homo Sapiens
uuggcaaagaaagcugcagauuaaacuucucg

SEQ ID NO: 327556 - RNA, 32 nt, Homo Sapiens
aacuuuuuucuuuguuucaucuuuuaagugua

SEQ ID NO: 327557 - RNA, 32 nt, Homo Sapiens
gauuucuguuguuguugaucccauuucuaacu

SEQ ID NO: 327558 - RNA, 32 nt, Homo Sapiens
ucauagguuauuauuaucuaaauagaacauac

SEQ ID NO: 327559 - RNA, 32 nt, Homo Sapiens
cccauucccccacuccuccccacuugcuaacc

SEQ ID NO: 327560 - RNA, 32 nt, Homo Sapiens
gaggguuuacugugaagugcugaggacagugu

SEQ ID NO: 327561 - RNA, 32 nt, Homo Sapiens
gugccucuugucacacugauggauacuuuucc

SEQ ID NO: 327562 - RNA, 32 nt, Homo Sapiens
gccacuggccccaguucucagugucccuuggg

SEQ ID NO: 327563 - RNA, 32 nt, Homo Sapiens
uuuuguuuuguuuuuucuucuucuucuucuuc

SEQ ID NO: 327564 - RNA, 32 nt, Homo Sapiens
guccgcuggucacagcacacacacgcuccugg

SEQ ID NO: 327565 - RNA, 32 nt, Homo Sapiens
ugugcacaaacacaauguaugaccagagccuu

SEQ ID NO: 327566 - RNA, 32 nt, Homo Sapiens
cagaggagcccgaggagggacaucagggggag

SEQ ID NO: 327567 - RNA, 32 nt, Homo Sapiens
ccaaccccgaggggcuugcagggacaaggcga

SEQ ID NO: 327568 - RNA, 32 nt, Homo Sapiens
gcaucagagugaacaggcaaccuacagaaugg

SEQ ID NO: 327569 - RNA, 32 nt, Homo Sapiens
accucuauauguugcugaaacacacaggccau

SEQ ID NO: 327570 - RNA, 32 nt, Homo Sapiens
aacuuggcgagauugaagggcuuuuguuauug

SEQ ID NO: 327571 - RNA, 32 nt, Homo Sapiens
ccugugcccccuccccacuccagaggccaccc

SEQ ID NO: 327572 - RNA, 32 nt, Homo Sapiens
ggcggcgcuguguggaggcccgcgagcugaaa

SEQ ID NO: 327573 - RNA, 32 nt, Homo Sapiens
gaagcugaagaggaauacuaaguccaugugag

SEQ ID NO: 327574 - RNA, 32 nt, Homo Sapiens
ugagauuuccacacaagagaaaagcacacgca

SEQ ID NO: 327575 - RNA, 32 nt, Homo Sapiens
cugcugucuccaucccugagccgccugccacc

SEQ ID NO: 327576 - RNA, 32 nt, Homo Sapiens
cggcagagccccacugagggcacuccuccuug

SEQ ID NO: 327577 - RNA, 32 nt, Homo Sapiens
cuggacuugaguuaacugaaggagagccucaa

SEQ ID NO: 327578 - RNA, 28 nt, Homo Sapiens
cugacuauggcuaccaaaaagacucuac

SEQ ID NO: 327579 - RNA, 32 nt, Homo Sapiens
gaauaagacauuagaaaauuuggauuuguguu

SEQ ID NO: 327580 - RNA, 32 nt, Homo Sapiens
ccaccacauccuccguccagccgccauugcca

SEQ ID NO: 327581 - RNA, 32 nt, Homo Sapiens
uccaugaacaggugguuggauugguaucuguc

SEQ ID NO: 327582 - RNA, 32 nt, Homo Sapiens
agcuggaguggcuggauguggagcaccgcacc

SEQ ID NO: 327583 - RNA, 31 nt, Homo Sapiens
aaauggugacucacucucaagucagcuacug

SEQ ID NO: 327584 - RNA, 32 nt, Homo Sapiens
ucucuggccucaaaguccauggagucuuuucu

SEQ ID NO: 327585 - RNA, 32 nt, Homo Sapiens
gaacauaaaugaucugauggagcugaaaaaca

SEQ ID NO: 327586 - RNA, 32 nt, Homo Sapiens
gugcagugaacagcaguggucacaccaggugg

SEQ ID NO: 327587 - RNA, 32 nt, Homo Sapiens
ccucaccucucuucggccuuuggacacuggag

SEQ ID NO: 327588 - RNA, 32 nt, Homo Sapiens
aaaaaauguacacacacuuuuacaaagaauau

SEQ ID NO: 327589 - RNA, 32 nt, Homo Sapiens
gguuccaaauauauuucaguuccgauucaggc

SEQ ID NO: 327590 - RNA, 32 nt, Homo Sapiens
auuugccccucgcagcaacccugucuuggagg

SEQ ID NO: 327591 - RNA, 32 nt, Homo Sapiens
cuuuugggauuacuccacaucuuuguuuauuu

SEQ ID NO: 327592 - RNA, 32 nt, Homo Sapiens
caaagaaugacaaaggaggcacucguucucuu

SEQ ID NO: 327593 - RNA, 32 nt, Homo Sapiens
aguaacauuagaaaacuucaaaaacugauuua

SEQ ID NO: 327594 - RNA, 32 nt, Homo Sapiens
cuugagugaugaagaggaccagaagccagugc

SEQ ID NO: 327595 - RNA, 32 nt, Homo Sapiens
gggauugagacugugguuuagagccuuugauu

SEQ ID NO: 327596 - RNA, 32 nt, Homo Sapiens
gaccagagaucuuuuuaaaucccugcuacugu

SEQ ID NO: 327597 - RNA, 32 nt, Homo Sapiens
ugguugcugcauuugaagcauggcauuaauuu

SEQ ID NO: 327598 - RNA, 32 nt, Homo Sapiens
augaacaugcuguuuguauuguuuuaggaaac

SEQ ID NO: 327599 - RNA, 32 nt, Homo Sapiens
cuguucccuucugcuucuuaccucuguagaua

SEQ ID NO: 327600 - RNA, 32 nt, Homo Sapiens
caauggcagccugaccucggcccgcauagcuc

SEQ ID NO: 327601 - RNA, 32 nt, Homo Sapiens
gccaccggccucauccaaggccccacaguuug

SEQ ID NO: 327602 - RNA, 32 nt, Homo Sapiens
ccacuuguccacucuggggagcugugcuuugg

SEQ ID NO: 327603 - RNA, 32 nt, Homo Sapiens
ucuuugagguuguuuaucaagcuggggaacuc

SEQ ID NO: 327604 - RNA, 32 nt, Homo Sapiens
auguucaaaaagaggcugugucuguauggugg

SEQ ID NO: 327605 - RNA, 32 nt, Homo Sapiens
accccucugccagccgggccccggcugcagaa

SEQ ID NO: 327606 - RNA, 32 nt, Homo Sapiens
gagcccugccuggccuaacgauuagaggguua

SEQ ID NO: 327607 - RNA, 32 nt, Homo Sapiens
uauuggaugaaugacuuauuaauggauuauac

SEQ ID NO: 327608 - RNA, 32 nt, Homo Sapiens
cugaaaucaaggaucuuuggaacuauuugaaa

SEQ ID NO: 327609 - RNA, 32 nt, Homo Sapiens
gagauacucugcacagguuuuggaagugcucc

SEQ ID NO: 327610 - RNA, 31 nt, Homo Sapiens
ggagagcguccggggaacucgaguggccgcg

SEQ ID NO: 327611 - RNA, 32 nt, Homo Sapiens
gacugccaguguugucuguauuggaugauagc

SEQ ID NO: 327612 - RNA, 32 nt, Homo Sapiens
cgagccuccaugaagugaagugacucacccac

SEQ ID NO: 327613 - RNA, 32 nt, Homo Sapiens
cacccuuggggaugaaauaauggaagcugguu

SEQ ID NO: 327614 - RNA, 32 nt, Homo Sapiens
gcucuccaaacacagccagagaacugugaccc

SEQ ID NO: 327615 - RNA, 32 nt, Homo Sapiens
uuagcaugaugauggauggauggacuggagcu

SEQ ID NO: 327616 - RNA, 32 nt, Homo Sapiens
ugacucacagaaaaugaauguuugcaaagauu

SEQ ID NO: 327617 - RNA, 32 nt, Homo Sapiens
aacacuuaucacuuauacuaccaauaacuugu

SEQ ID NO: 327618 - RNA, 32 nt, Homo Sapiens
caucaauauggguuauaucuuuauauauguuu

SEQ ID NO: 327619 - RNA, 32 nt, Homo Sapiens
cuguagaauacucacaaguccaaauaugcuaa

SEQ ID NO: 327620 - RNA, 32 nt, Homo Sapiens
ucucuuuaauaaacucaguuugguacuugaua

SEQ ID NO: 327621 - RNA, 31 nt, Homo Sapiens
uaaacagaugaauaaacugaauuuguacuuu

SEQ ID NO: 327622 - RNA, 32 nt, Homo Sapiens
ucauuuucauuuccauuaaccuggaagcuuuc

SEQ ID NO: 327623 - RNA, 32 nt, Homo Sapiens
gggucaguagcagaagcagagggaggccucuu

SEQ ID NO: 327624 - RNA, 32 nt, Homo Sapiens
cuagaacaucguuuuuccuuaauagcauaccc

SEQ ID NO: 327625 - RNA, 32 nt, Homo Sapiens
ugaaugucaauuuuccaaacuguccccauaaa

SEQ ID NO: 327626 - RNA, 32 nt, Homo Sapiens
auucugccugaagggucuugauaccuacucag

SEQ ID NO: 327627 - RNA, 32 nt, Homo Sapiens
gugaacaucuguuugcagaaucugauucauga

SEQ ID NO: 327628 - RNA, 32 nt, Homo Sapiens
uuucccuuuuccauuuaccccguaaugugucu

SEQ ID NO: 327629 - RNA, 32 nt, Homo Sapiens
cggccucccccgacuccugggugugggagcag

SEQ ID NO: 327630 - RNA, 32 nt, Homo Sapiens
uccaugggaaagguagaaugagacuugccacc

SEQ ID NO: 327631 - RNA, 32 nt, Homo Sapiens
cagcuguguggccuugggcaagucugccagcg

SEQ ID NO: 327632 - RNA, 32 nt, Homo Sapiens
auugagaaaaggaugguuugcuuauuucaagg

SEQ ID NO: 327633 - RNA, 32 nt, Homo Sapiens
cuugccugcauaaagcacucagaaggguuagc

SEQ ID NO: 327634 - RNA, 32 nt, Homo Sapiens
uaugaggcgcccaccauggugcgaugcgaccg

SEQ ID NO: 327635 - RNA, 32 nt, Homo Sapiens
agcgcgcagcuagggcacuggcgaaaccccgg

SEQ ID NO: 327636 - RNA, 32 nt, Homo Sapiens
aaaagugaugucaucuuuuucuuuuaaagaau

SEQ ID NO: 327637 - RNA, 28 nt, Homo Sapiens
cugauggaagcagaaacagggagcagcg

SEQ ID NO: 327638 - RNA, 32 nt, Homo Sapiens
uugguguguauuaacucuuaaucuucacaaua

SEQ ID NO: 327639 - RNA, 32 nt, Homo Sapiens
aaucugcuguucuacccaugugucucacauuc

SEQ ID NO: 327640 - RNA, 32 nt, Homo Sapiens
ucucuuuuccacaauuccauuuucuuuggcau

SEQ ID NO: 327641 - RNA, 32 nt, Homo Sapiens
uuuggcuauuacuuggucaucuaggcccugau

SEQ ID NO: 327642 - RNA, 29 nt, Homo Sapiens
gauccuugucaguuuuauuuucuauuuga

SEQ ID NO: 327643 - RNA, 32 nt, Homo Sapiens
accuuugaacaaaggucugugugguugucuuc

SEQ ID NO: 327644 - RNA, 32 nt, Homo Sapiens
agguuaugguucuuuauuugguaaaugaauga

SEQ ID NO: 327645 - RNA, 32 nt, Homo Sapiens
aauaaacuugauuuuucuuuacauuccuuuua

SEQ ID NO: 327646 - RNA, 32 nt, Homo Sapiens
uggcucgcaccuguaaucccagcacuuugggg

SEQ ID NO: 327647 - RNA, 30 nt, Homo Sapiens
cgacuucuggacucaucuuucaagaggacu

SEQ ID NO: 327648 - RNA, 32 nt, Homo Sapiens
ucaagccuugucccuuccuccucccagcaaca

SEQ ID NO: 327649 - RNA, 32 nt, Homo Sapiens
caggcuccgggauucacgcagaggugaugcuc

SEQ ID NO: 327650 - RNA, 28 nt, Homo Sapiens
uuuuggaaagauuauccuguuacugaau

SEQ ID NO: 327651 - RNA, 32 nt, Homo Sapiens
aacauccugcaaugcaugggacaggcccugcc

SEQ ID NO: 327652 - RNA, 32 nt, Homo Sapiens
caccuggcuggguauccccuauggggcacggg

SEQ ID NO: 327653 - RNA, 32 nt, Homo Sapiens
uaaguggggagcucuuagccugccugguaaua

SEQ ID NO: 327654 - RNA, 32 nt, Homo Sapiens
cacaggacaagaaguggguaagggcaggaagg

SEQ ID NO: 327655 - RNA, 32 nt, Homo Sapiens
cagcgugggaggucuaucugcgugccuuccac

SEQ ID NO: 327656 - RNA, 32 nt, Homo Sapiens
aguguccuggaaagucugcugcuucuccaagc

SEQ ID NO: 327657 - RNA, 29 nt, Homo Sapiens
aucccucaguguuucagaguaaagauauu

SEQ ID NO: 327658 - RNA, 32 nt, Homo Sapiens
uguacagcccuaggcgggaggggguggcgcuu

SEQ ID NO: 327659 - RNA, 32 nt, Homo Sapiens
gaagagacuggugcugccuuucuggggagggc

SEQ ID NO: 327660 - RNA, 32 nt, Homo Sapiens
auccauauugcacaacucuacuguugcaaagc

SEQ ID NO: 327661 - RNA, 32 nt, Homo Sapiens
cuugcuaugcucucuguuguacauugcaacuc

SEQ ID NO: 327662 - RNA, 32 nt, Homo Sapiens
cccacgcgcggcccgcgucucugucucgugcu

SEQ ID NO: 327663 - RNA, 32 nt, Homo Sapiens
cggggcgagcgcggcggcgcggaaccaugaca

SEQ ID NO: 327664 - RNA, 32 nt, Homo Sapiens
uaacauuuuuaaaaauacauauuugggacucu

SEQ ID NO: 327665 - RNA, 32 nt, Homo Sapiens
uuuccuuuccuuccgacccauccccaagccuc

SEQ ID NO: 327666 - RNA, 32 nt, Homo Sapiens
cauggcccgcggcgaacgcggggccagagcug

SEQ ID NO: 327667 - RNA, 32 nt, Homo Sapiens
agccccugugacugcgaucuggagucagccag

SEQ ID NO: 327668 - RNA, 32 nt, Homo Sapiens
ccgaggcuuggggaggacccaggacugugugg

SEQ ID NO: 327669 - RNA, 32 nt, Homo Sapiens
ggggucagggguuguuucuaccugcuuugucu

SEQ ID NO: 327670 - RNA, 32 nt, Homo Sapiens
gauuucaucauguuggccaggcuggucucgaa

SEQ ID NO: 327671 - RNA, 32 nt, Homo Sapiens
ugacuguuguaugcccacuccuccuucucuca

SEQ ID NO: 327672 - RNA, 32 nt, Homo Sapiens
cugugugccugucagcaguucuccaagcaggg

SEQ ID NO: 327673 - RNA, 30 nt, Homo Sapiens
gcccgggcgcccgaggcuucccggugcgcu

SEQ ID NO: 327674 - RNA, 30 nt, Homo Sapiens
augagggcaccccugaggccggcgcuccga

SEQ ID NO: 327675 - RNA, 32 nt, Homo Sapiens
gugggucccaugccacagugucugaggagaag

SEQ ID NO: 327676 - RNA, 32 nt, Homo Sapiens
aucugucuauaucauucauuacguguaaguau

SEQ ID NO: 327677 - RNA, 32 nt, Homo Sapiens
cucuuuauuaaaccucuaacuuacugauaaga

SEQ ID NO: 327678 - RNA, 32 nt, Homo Sapiens
cugaacuuuuaaaagaggucucuaacugaaga

SEQ ID NO: 327679 - RNA, 32 nt, Homo Sapiens
uaauucuugccgcuccccccagcccaucguuc

SEQ ID NO: 327680 - RNA, 32 nt, Homo Sapiens
aggggaaaagacuguagucagcccuuagugga

SEQ ID NO: 327681 - RNA, 32 nt, Homo Sapiens
ccuguccccaaguuccaaaagcacagacucaa

SEQ ID NO: 327682 - RNA, 32 nt, Homo Sapiens
acugcggaggccggggcgguggcgugcagggu

SEQ ID NO: 327683 - RNA, 32 nt, Homo Sapiens
ugcuaaggaaauuaguuuuucuuuuucuucuu

SEQ ID NO: 327684 - RNA, 32 nt, Homo Sapiens
caucucuguucagguaaguuuacuucagugaa

SEQ ID NO: 327685 - RNA, 32 nt, Homo Sapiens
cuuuaggguucgggggaucuccuccuuccaca

SEQ ID NO: 327686 - RNA, 32 nt, Homo Sapiens
aaaugauuuuuaaaguuguuggagacgccaau

SEQ ID NO: 327687 - RNA, 32 nt, Homo Sapiens
uuuccuugauucacaggcugguucuucagagg

SEQ ID NO: 327688 - RNA, 32 nt, Homo Sapiens
gcagccccacccagccccgcagucagccucgg

SEQ ID NO: 327689 - RNA, 32 nt, Homo Sapiens
caacuccuucuccuccucccacuucccagccg

SEQ ID NO: 327690 - RNA, 32 nt, Homo Sapiens
uuaggcaaguuuucuuuuuucuucuuaaauug

SEQ ID NO: 327691 - RNA, 32 nt, Homo Sapiens
agcgaggcucucagucccacuuccccuuggca

SEQ ID NO: 327692 - RNA, 32 nt, Homo Sapiens
cgggcccugcggcuacagcgcuucuuccagca

SEQ ID NO: 327693 - RNA, 32 nt, Homo Sapiens
cacaugcacauaggcccacacacacacgugga

SEQ ID NO: 327694 - RNA, 32 nt, Homo Sapiens
guggagcuggcggagagcgggaggcggcugcg

SEQ ID NO: 327695 - RNA, 32 nt, Homo Sapiens
ccgggccgccagacgcucggagggagcccggc

SEQ ID NO: 327696 - RNA, 32 nt, Homo Sapiens
ccuaaucucauccuaaugaccuacaggaauuu

SEQ ID NO: 327697 - RNA, 32 nt, Homo Sapiens
ggcuggcccuacccaggcgccaccuucggucu

SEQ ID NO: 327698 - RNA, 32 nt, Homo Sapiens
cucacacccagcucccugcacacccaggccag

SEQ ID NO: 327699 - RNA, 32 nt, Homo Sapiens
gcgaggccugcgccgcgauggcagagaugggc

SEQ ID NO: 327700 - RNA, 32 nt, Homo Sapiens
ccgacuucuccccuuuccccagccucgugccu

SEQ ID NO: 327701 - RNA, 32 nt, Homo Sapiens
acgccacgcaggcggcggggcgcuggggaauc

SEQ ID NO: 327702 - RNA, 32 nt, Homo Sapiens
aagagggugucugcccuucacaaacaccucuc

SEQ ID NO: 327703 - RNA, 32 nt, Homo Sapiens
gucucaguauaccuaaagguugggguggggcg

SEQ ID NO: 327704 - RNA, 32 nt, Homo Sapiens
acagaaaaaugaacgcacuggcaaacauccca

SEQ ID NO: 327705 - RNA, 32 nt, Homo Sapiens
uaauuucuugauaucuuaagcauuucacuuau

SEQ ID NO: 327706 - RNA, 32 nt, Homo Sapiens
ccccccaccccucgcaccccuuguguuuuccc

SEQ ID NO: 327707 - RNA, 32 nt, Homo Sapiens
ggcugggugcgguggcucacgcuuguaauccc

SEQ ID NO: 327708 - RNA, 32 nt, Homo Sapiens
ggcacggccccuuuccucuucagcccuggggu

SEQ ID NO: 327709 - RNA, 30 nt, Homo Sapiens
gacgggguuucaccuguuagccaggauggu

SEQ ID NO: 327710 - RNA, 32 nt, Homo Sapiens
uaacuuaaauauauuuuguuuaauaggaaaua

SEQ ID NO: 327711 - RNA, 32 nt, Homo Sapiens
ccgaggaagaggggcugcugccaucugcccca

SEQ ID NO: 327712 - RNA, 32 nt, Homo Sapiens
gguaaugcuucuuuuuugcagaugugguccca

SEQ ID NO: 327713 - RNA, 32 nt, Homo Sapiens
cuggagucggcccccaaaaguuucacauaggg

SEQ ID NO: 327714 - RNA, 32 nt, Homo Sapiens
uucuuccccuucccugacugcagggguuaugu

SEQ ID NO: 327715 - RNA, 32 nt, Homo Sapiens
guucuuaacgguuuuucucugaucauuuccuc

SEQ ID NO: 327716 - RNA, 32 nt, Homo Sapiens
uagauuguuuucaugauucagguguguaguug

SEQ ID NO: 327717 - RNA, 32 nt, Homo Sapiens
acuuagaauggcaacauuaacuuuguguacca

SEQ ID NO: 327718 - RNA, 30 nt, Homo Sapiens
aaccacggagguggaugccaggaaagggcc

SEQ ID NO: 327719 - RNA, 32 nt, Homo Sapiens
auccgcugcucgcacgggagccagcugggugu

SEQ ID NO: 327720 - RNA, 32 nt, Homo Sapiens
ccgagcgaagguacggaauagauggagcaccu

SEQ ID NO: 327721 - RNA, 32 nt, Homo Sapiens
gugugagaccaccgugaauccuggggcagggc

SEQ ID NO: 327722 - RNA, 30 nt, Homo Sapiens
gccgggagugccugagcgccggcggcgacg

SEQ ID NO: 327723 - RNA, 32 nt, Homo Sapiens
uccaaagccgacgguggcgccggcuggagaau

SEQ ID NO: 327724 - RNA, 32 nt, Homo Sapiens
agaaaucaugcaaguucggacucuggccuuag

SEQ ID NO: 327725 - RNA, 32 nt, Homo Sapiens
ggggaccccuccccagggccuuuuccuccucu

SEQ ID NO: 327726 - RNA, 32 nt, Homo Sapiens
gccccacauuccuccuucucagugagggugag

SEQ ID NO: 327727 - RNA, 32 nt, Homo Sapiens
cacccuuagugucagccaugcuagucuccugc

SEQ ID NO: 327728 - RNA, 32 nt, Homo Sapiens
auuucagcaagcuuccacggagcuuccacgga

SEQ ID NO: 327729 - RNA, 32 nt, Homo Sapiens
ccugucucuuggaguucuccugcuguccugug

SEQ ID NO: 327730 - RNA, 32 nt, Homo Sapiens
aaaugacaaggggacggggucugugagaguca

SEQ ID NO: 327731 - RNA, 32 nt, Homo Sapiens
cagacccugccccaagcaccauauggaaauaa

SEQ ID NO: 327732 - RNA, 32 nt, Homo Sapiens
gacucagaaagggaagcagaacugagggcugg

SEQ ID NO: 327733 - RNA, 32 nt, Homo Sapiens
cauaaaacaaaguuuuaagaauguuuacagua

SEQ ID NO: 327734 - RNA, 32 nt, Homo Sapiens
cucuaucggcugaugcagcgcugcugggcccu

SEQ ID NO: 327735 - RNA, 32 nt, Homo Sapiens
ggccgcugcgcgcgcucguugcccaacccggu

SEQ ID NO: 327736 - RNA, 32 nt, Homo Sapiens
caaagcauuuuuccuguagcaauuaagugugc

SEQ ID NO: 327737 - RNA, 32 nt, Homo Sapiens
ugcuguggcuugguugguuaccgguuaugugu

SEQ ID NO: 327738 - RNA, 32 nt, Homo Sapiens
acucccuguuggaauuccuaccccggcuuccu

SEQ ID NO: 327739 - RNA, 32 nt, Homo Sapiens
auaaacccagcaugacauaacagugcagggca

SEQ ID NO: 327740 - RNA, 32 nt, Homo Sapiens
cugcuccgcgcgcugcccgggggaggcuggcg

SEQ ID NO: 327741 - RNA, 32 nt, Homo Sapiens
uuaauaaggaaguuaagaccuucauuuaagag

SEQ ID NO: 327742 - RNA, 32 nt, Homo Sapiens
acucugguuucucauucuuguuuucuuucuuu

SEQ ID NO: 327743 - RNA, 32 nt, Homo Sapiens
cuuucuauucugccagaugucuugaccuugag

SEQ ID NO: 327744 - RNA, 32 nt, Homo Sapiens
aacaacuggcagcacacaggcauuuuuuggca

SEQ ID NO: 327745 - RNA, 32 nt, Homo Sapiens
uagccgacugccggcuccauggaggggccugu

SEQ ID NO: 327746 - RNA, 32 nt, Homo Sapiens
uuauaaucuauuuuccuauugaacuuucagca

SEQ ID NO: 327747 - RNA, 32 nt, Homo Sapiens
uuuguguaaaaagcaaagguuacaugugagua

SEQ ID NO: 327748 - RNA, 32 nt, Homo Sapiens
cccagcagcgcuccgccuccaacgugacauca

SEQ ID NO: 327749 - RNA, 32 nt, Homo Sapiens
uuuuguugacccccauugccacccacagacaa

SEQ ID NO: 327750 - RNA, 32 nt, Homo Sapiens
cccaucagacgcugcuuucuccucccagagac

SEQ ID NO: 327751 - RNA, 32 nt, Homo Sapiens
cuucaucgcucuuaagaaucaacagguuaaaa

SEQ ID NO: 327752 - RNA, 32 nt, Homo Sapiens
ccaccagggucugaggcccaaauccuuccuca

SEQ ID NO: 327753 - RNA, 32 nt, Homo Sapiens
cuguggucuccauggcaauggguguccauggu

SEQ ID NO: 327754 - RNA, 32 nt, Homo Sapiens
cacaugggaaggucguuagcugcuacaccgug

SEQ ID NO: 327755 - RNA, 32 nt, Homo Sapiens
caaagaacauaaauaucaguggauuuucucug

SEQ ID NO: 327756 - RNA, 32 nt, Homo Sapiens
ggucauucuccugugacacguguacugcagag

SEQ ID NO: 327757 - RNA, 32 nt, Homo Sapiens
ugucaaggacgaagaggaguuuuuccagacaa

SEQ ID NO: 327758 - RNA, 32 nt, Homo Sapiens
acuuguuccuaauuuuccaaguauuucucuug

SEQ ID NO: 327759 - RNA, 32 nt, Homo Sapiens
aauccagccaguccugccccagcccaccccca

SEQ ID NO: 327760 - RNA, 32 nt, Homo Sapiens
aagcaguccuuucaaccuugucaaccugucgg

SEQ ID NO: 327761 - RNA, 32 nt, Homo Sapiens
gggaagcuacugaauuauaacacguaagaaaa

SEQ ID NO: 327762 - RNA, 32 nt, Homo Sapiens
gauguaggcaccuuuacccccagagccaguuc

SEQ ID NO: 327763 - RNA, 32 nt, Homo Sapiens
cugcgcgugcgcgagccgcugucaaacgcgcu

SEQ ID NO: 327764 - RNA, 32 nt, Homo Sapiens
gagaggcacacaugugcugcagccgugugugu

SEQ ID NO: 327765 - RNA, 32 nt, Homo Sapiens
uugggucuggcuggcuccugcccgugacgccu

SEQ ID NO: 327766 - RNA, 32 nt, Homo Sapiens
gcaggccagcucugcuggacagugacccucuu

SEQ ID NO: 327767 - RNA, 32 nt, Homo Sapiens
uaaauaaugcugugaugaauaucuuuaaaauc

SEQ ID NO: 327768 - RNA, 32 nt, Homo Sapiens
gccacaggagaauggggguggggggaccgaag

SEQ ID NO: 327769 - RNA, 32 nt, Homo Sapiens
ucagaaaauaucuuuuuuuuuacuuugaaguu

SEQ ID NO: 327770 - RNA, 32 nt, Homo Sapiens
gugggcgggaccucgggcgugaucgucgagga

SEQ ID NO: 327771 - RNA, 32 nt, Homo Sapiens
gagaggcagaaucuugagcuugaggcaccuug

SEQ ID NO: 327772 - RNA, 32 nt, Homo Sapiens
gcacgagcucccagaaggguguugcucaucgu

SEQ ID NO: 327773 - RNA, 32 nt, Homo Sapiens
ucaagggacuuccuggagaguagcgccaacua

SEQ ID NO: 327774 - RNA, 32 nt, Homo Sapiens
gcuuugcucccucugcuucaggcgcugucccc

SEQ ID NO: 327775 - RNA, 32 nt, Homo Sapiens
uguuuuuugaaauuccaugugauucaaacugu

SEQ ID NO: 327776 - RNA, 32 nt, Homo Sapiens
guugccuguccucuccuggccuccagucuccc

SEQ ID NO: 327777 - RNA, 32 nt, Homo Sapiens
augaccugguuauagccuuugcugguguuuuu

SEQ ID NO: 327778 - RNA, 32 nt, Homo Sapiens
ccaagugugaaaccucuggauccuauggauuu

SEQ ID NO: 327779 - RNA, 32 nt, Homo Sapiens
aauggucugcaaacagagcaggaauugcacaa

SEQ ID NO: 327780 - RNA, 32 nt, Homo Sapiens
guacggcugccccgguuuggccuggugcgggc

SEQ ID NO: 327781 - RNA, 32 nt, Homo Sapiens
auaaaauaaacuugagguuaaauaauggguag

SEQ ID NO: 327782 - RNA, 32 nt, Homo Sapiens
uagaacugcuaagaucuggaaguaccaccugg

SEQ ID NO: 327783 - RNA, 32 nt, Homo Sapiens
ugcaggcuguagcuugccaaucagugacuuaa

SEQ ID NO: 327784 - RNA, 32 nt, Homo Sapiens
uuacuggaucuucuuuccugggacaugguguc

SEQ ID NO: 327785 - RNA, 32 nt, Homo Sapiens
uuuuuguguuuaggggaaaaaauucugcugca

SEQ ID NO: 327786 - RNA, 32 nt, Homo Sapiens
auccaccccgcccuucacccgccauucaaaca

SEQ ID NO: 327787 - RNA, 32 nt, Homo Sapiens
gaaaugacaauggccacacacacacacacaca

SEQ ID NO: 327788 - RNA, 32 nt, Homo Sapiens
ccaucuugggcaggaauggguggcauaugcug

SEQ ID NO: 327789 - RNA, 32 nt, Homo Sapiens
ugggucuccgccuccaggguucugcucuucca

SEQ ID NO: 327790 - RNA, 32 nt, Homo Sapiens
aagcacucuguauauuugauugaauaaugcca

SEQ ID NO: 327791 - RNA, 32 nt, Homo Sapiens
uggcccaucuucugugggccccuucccagaca

SEQ ID NO: 327792 - RNA, 32 nt, Homo Sapiens
auuuuaauuaacaacuaaauaaacagacguug

SEQ ID NO: 327793 - RNA, 32 nt, Homo Sapiens
uaacucccagaauuggaucaucuccuaagaug

SEQ ID NO: 327794 - RNA, 32 nt, Homo Sapiens
acaaaucauuucuaaacaguuauuuuccauua

SEQ ID NO: 327795 - RNA, 32 nt, Homo Sapiens
uagauuuugccuucaaggguuccuguggaucu

SEQ ID NO: 327796 - RNA, 32 nt, Homo Sapiens
ccaacgggcaugucuccaccgaauccauuuag

SEQ ID NO: 327797 - RNA, 32 nt, Homo Sapiens
agagaguucaaguggauggccuugaggacuug

SEQ ID NO: 327798 - RNA, 32 nt, Homo Sapiens
cccauguggauuuugggggucccuuuuguguc

SEQ ID NO: 327799 - RNA, 32 nt, Homo Sapiens
uugauguauauuauuaugacuuucucacggua

SEQ ID NO: 327800 - RNA, 32 nt, Homo Sapiens
ugucgugucucccucccuccauggcccgggag

SEQ ID NO: 327801 - RNA, 32 nt, Homo Sapiens
ucuuugcaaaagacauaauacccauaauuuga

SEQ ID NO: 327802 - RNA, 32 nt, Homo Sapiens
uuuaacuugcuuucuuuuuuuuuuuuugagac

SEQ ID NO: 327803 - RNA, 32 nt, Homo Sapiens
ucuugauugaggaaacaaguucugaaauaaua

SEQ ID NO: 327804 - RNA, 32 nt, Homo Sapiens
gaauucugguaacggauaucgcguuccagggu

SEQ ID NO: 327805 - RNA, 32 nt, Homo Sapiens
cauggccugugagcaccggagcgccuggcugc

SEQ ID NO: 327806 - RNA, 32 nt, Homo Sapiens
aaagcggauaaaacuuucauuguacuggaaug

SEQ ID NO: 327807 - RNA, 32 nt, Homo Sapiens
aacuguaaccucaagcacuuugggaggccgag

SEQ ID NO: 327808 - RNA, 32 nt, Homo Sapiens
gggaaguucugugcaugcguggcaccauuucc

SEQ ID NO: 327809 - RNA, 32 nt, Homo Sapiens
ggcugcccugcgccuggucaguccggagcccg

SEQ ID NO: 327810 - RNA, 32 nt, Homo Sapiens
cuuucacccugcaacagucacgcuggaguacu

SEQ ID NO: 327811 - RNA, 32 nt, Homo Sapiens
caggaagacaccuuuaccaaaguggcagaaca

SEQ ID NO: 327812 - RNA, 32 nt, Homo Sapiens
cagagcucuaauugauaacucuguaguucaaa

SEQ ID NO: 327813 - RNA, 28 nt, Homo Sapiens
gggcagcagcagcuuccgagguggccug

SEQ ID NO: 327814 - RNA, 32 nt, Homo Sapiens
ggucgggcaccauaccuccuccccuccacccc

SEQ ID NO: 327815 - RNA, 32 nt, Homo Sapiens
aagauuccuccgcuccucugagugcacgugug

SEQ ID NO: 327816 - RNA, 32 nt, Homo Sapiens
gccucacugcgccagccuccccgcccgcucuc

SEQ ID NO: 327817 - RNA, 32 nt, Homo Sapiens
cugccaccgagaccaucucgcugcuggugggc

SEQ ID NO: 327818 - RNA, 32 nt, Homo Sapiens
cacccucuucuugguuuuuaccagagaggcuu

SEQ ID NO: 327819 - RNA, 32 nt, Homo Sapiens
agcagccccuacgugcgccccggcggauucgc

SEQ ID NO: 327820 - RNA, 32 nt, Homo Sapiens
ugccaaguccgccccagggccuggggcuguug

SEQ ID NO: 327821 - RNA, 32 nt, Homo Sapiens
cuuucuaguauuuacauacuuaaaaguaguaa

SEQ ID NO: 327822 - RNA, 32 nt, Homo Sapiens
cccagaaguggaagaaacugaaaguggagucc

SEQ ID NO: 327823 - RNA, 32 nt, Homo Sapiens
gggcuccucagccccaggggaaagccgaagcc

SEQ ID NO: 327824 - RNA, 32 nt, Homo Sapiens
acucuuaagaguccaguuuguuuaauguuaug

SEQ ID NO: 327825 - RNA, 32 nt, Homo Sapiens
caaaugacgggugaauacauguguguggccag

SEQ ID NO: 327826 - RNA, 32 nt, Homo Sapiens
gggacagcugucaaucacaagcccuuaaauaa

SEQ ID NO: 327827 - RNA, 32 nt, Homo Sapiens
aauccauccuucccccagcugcuuccucgggg

SEQ ID NO: 327828 - RNA, 31 nt, Homo Sapiens
ucuaaaauauauugucauauguuuucugugc

SEQ ID NO: 327829 - RNA, 32 nt, Homo Sapiens
cccccaaacaccugccucccccuccagccuuc

SEQ ID NO: 327830 - RNA, 32 nt, Homo Sapiens
aagaccccacagaaguaaaggcaauaauccua

SEQ ID NO: 327831 - RNA, 32 nt, Homo Sapiens
caggaaggacgaagaaccacccuugagagaag

SEQ ID NO: 327832 - RNA, 32 nt, Homo Sapiens
gaaggaccaauauagucagaccauuuucuuaa

SEQ ID NO: 327833 - RNA, 32 nt, Homo Sapiens
ucauuugugaccucagacacucucuggcuaau

SEQ ID NO: 327834 - RNA, 32 nt, Homo Sapiens
uaucaucuaccuaucaucugucuauuuuucug

SEQ ID NO: 327835 - RNA, 32 nt, Homo Sapiens
ggcgacgcugcuguguguggucucagagccuc

SEQ ID NO: 327836 - RNA, 32 nt, Homo Sapiens
gggcucaguggucuugacuuccgcggcccucu

SEQ ID NO: 327837 - RNA, 32 nt, Homo Sapiens
aaaggaaauggaaauuauaaaaaauauagagc

SEQ ID NO: 327838 - RNA, 32 nt, Homo Sapiens
gccucacccccacuggguccccggcccauccg

SEQ ID NO: 327839 - RNA, 32 nt, Homo Sapiens
gaaacaguacuauucauagaaaacauuaguuu

SEQ ID NO: 327840 - RNA, 32 nt, Homo Sapiens
ucagaggcccagcaagccccccugccccgcag

SEQ ID NO: 327841 - RNA, 32 nt, Homo Sapiens
uuccgucccuccccuucagcccuuuaacgcac

SEQ ID NO: 327842 - RNA, 32 nt, Homo Sapiens
aauacuagcaacuuucauccuuugaaacgugu

SEQ ID NO: 327843 - RNA, 32 nt, Homo Sapiens
gaacaucagacuccaaguucuucaguuuuggg

SEQ ID NO: 327844 - RNA, 32 nt, Homo Sapiens
gaacaucagacuccagguucuucaguuuugga

SEQ ID NO: 327845 - RNA, 32 nt, Homo Sapiens
uccccaggggagagggucuggagaagcaguga

SEQ ID NO: 327846 - RNA, 32 nt, Homo Sapiens
ggccgaaaauguuuuuaaaguauguguuugag

SEQ ID NO: 327847 - RNA, 32 nt, Homo Sapiens
aagaacagacccaacagccagcccuucauccu

SEQ ID NO: 327848 - RNA, 32 nt, Homo Sapiens
aauaaaugauuucaugggccuggggacacaca

SEQ ID NO: 327849 - RNA, 32 nt, Homo Sapiens
gcccuagcugacuggggacuaguguuuauaug

SEQ ID NO: 327850 - RNA, 32 nt, Homo Sapiens
cccuugcuuuuggggguucagaggaguaugua

SEQ ID NO: 327851 - RNA, 32 nt, Homo Sapiens
aacaagcaguggaugccuccucgaagcaaccg

SEQ ID NO: 327852 - RNA, 32 nt, Homo Sapiens
guaucacugaauuucuuaguuuucuagugggg

SEQ ID NO: 327853 - RNA, 31 nt, Homo Sapiens
gcuuugaaauaaaauaacaaugucuucuuga

SEQ ID NO: 327854 - RNA, 32 nt, Homo Sapiens
cauaagguuguaauaauugguugugccaaugu

SEQ ID NO: 327855 - RNA, 32 nt, Homo Sapiens
uguccagccaagggcugaguguccagcacacc

SEQ ID NO: 327856 - RNA, 32 nt, Homo Sapiens
aaaaaaacaaacaaaaaccuguuguguacaca

SEQ ID NO: 327857 - RNA, 32 nt, Homo Sapiens
cgcagaugggggaauuuugccucgauggcacu

SEQ ID NO: 327858 - RNA, 32 nt, Homo Sapiens
uaguacugcuuuugcuguaucccauagguuuu

SEQ ID NO: 327859 - RNA, 32 nt, Homo Sapiens
cgccgagaugucccggcgaaagcaaagcaaac

SEQ ID NO: 327860 - RNA, 32 nt, Homo Sapiens
uacugguuuuaccaugacucaaaucuuaagau

SEQ ID NO: 327861 - RNA, 32 nt, Homo Sapiens
gcgaggaaacgaaaucacguuacuucuuccag

SEQ ID NO: 327862 - RNA, 32 nt, Homo Sapiens
gagguguggacuuuuauauauagaucuacaua

SEQ ID NO: 327863 - RNA, 32 nt, Homo Sapiens
agaaaaugucuuuccuuucacuugcuucuggg

SEQ ID NO: 327864 - RNA, 32 nt, Homo Sapiens
gcggcaagaggcggcgggagccgguggcggcu

SEQ ID NO: 327865 - RNA, 32 nt, Homo Sapiens
cccagcaccgacaggcccccacgauggagaga

SEQ ID NO: 327866 - RNA, 32 nt, Homo Sapiens
uuuuucucucuccucuuuuccuccucaaaaug

SEQ ID NO: 327867 - RNA, 32 nt, Homo Sapiens
agaguuuuuguauagacuucuuugguagucug

SEQ ID NO: 327868 - RNA, 32 nt, Homo Sapiens
uugucugaaauugggacaaaacaccuucaugu

SEQ ID NO: 327869 - RNA, 32 nt, Homo Sapiens
cuacccgccuuggccucccaaagugcugagau

SEQ ID NO: 327870 - RNA, 32 nt, Homo Sapiens
ugggagaugaggaaacagcaacccagagagga

SEQ ID NO: 327871 - RNA, 32 nt, Homo Sapiens
agagucuauuucuuguaaccauuuguuaaacu

SEQ ID NO: 327872 - RNA, 32 nt, Homo Sapiens
gcuccuguacgaaccccuccccuccccccugu

SEQ ID NO: 327873 - RNA, 32 nt, Homo Sapiens
auuaccuuuuggaaaaccugaguuuuaccaca

SEQ ID NO: 327874 - RNA, 32 nt, Homo Sapiens
ucccccugucuccucuccugauuuccuccaau

SEQ ID NO: 327875 - RNA, 31 nt, Homo Sapiens
cccugguggccaagccugccccggccacucu

SEQ ID NO: 327876 - RNA, 32 nt, Homo Sapiens
uauauuguuguaauaagaaagcugagaaugug

SEQ ID NO: 327877 - RNA, 32 nt, Homo Sapiens
uagcaaggaaauguacaauuuuaucuucuggc

SEQ ID NO: 327878 - RNA, 32 nt, Homo Sapiens
uaaaaauucuaaacagaagagaagaaugaacu

SEQ ID NO: 327879 - RNA, 32 nt, Homo Sapiens
caccugccgggcggagcgcacgggccaugggc

SEQ ID NO: 327880 - RNA, 32 nt, Homo Sapiens
uuuuuucuuuugcugguugucaccuuauuccu

SEQ ID NO: 327881 - RNA, 32 nt, Homo Sapiens
aaccgcacugacaauacccuccccucccuugg

SEQ ID NO: 327882 - RNA, 32 nt, Homo Sapiens
aucacuucacccaaauauauaaccgugauggu

SEQ ID NO: 327883 - RNA, 32 nt, Homo Sapiens
caaagagaagcacaaaguuugagccuugauuc

SEQ ID NO: 327884 - RNA, 32 nt, Homo Sapiens
cuccugcucccucugaaaccuuuucuagguac

SEQ ID NO: 327885 - RNA, 32 nt, Homo Sapiens
cucuaggggcuuuggccccaaggcgugaaggg

SEQ ID NO: 327886 - RNA, 32 nt, Homo Sapiens
uggcccagcuccgagagugauauuugcucugg

SEQ ID NO: 327887 - RNA, 32 nt, Homo Sapiens
aucagccugggaaacauagugagaccccgucu

SEQ ID NO: 327888 - RNA, 32 nt, Homo Sapiens
uauauguaucuuccucaauuuccgcauaaaug

SEQ ID NO: 327889 - RNA, 32 nt, Homo Sapiens
cagcaucugucuuuucccgcagcgugcagcgc

SEQ ID NO: 327890 - RNA, 32 nt, Homo Sapiens
ugugcggugaauauguaugauacuuguuuucu

SEQ ID NO: 327891 - RNA, 32 nt, Homo Sapiens
agcacggcggguggugaggcagcacgggggua

SEQ ID NO: 327892 - RNA, 32 nt, Homo Sapiens
cucaucucagcuguaugugacucucaacuuac

SEQ ID NO: 327893 - RNA, 32 nt, Homo Sapiens
ccguucuuccccagccuccccacugcucccuc

SEQ ID NO: 327894 - RNA, 32 nt, Homo Sapiens
cucuuccauugagcuuccugccugacccuaga

SEQ ID NO: 327895 - RNA, 32 nt, Homo Sapiens
cuuuuaucgguucugaaaaauucuuagauauu

SEQ ID NO: 327896 - RNA, 32 nt, Homo Sapiens
uggcccugcuccuuccuccucuaggcccaggc

SEQ ID NO: 327897 - RNA, 32 nt, Homo Sapiens
aaugugagaguauucugguacucuguguucca

SEQ ID NO: 327898 - RNA, 32 nt, Homo Sapiens
agaauuguugggaucucauagauggaauggga

SEQ ID NO: 327899 - RNA, 32 nt, Homo Sapiens
cugcugcuccagcucauaaagcuuccuugaaa

SEQ ID NO: 327900 - RNA, 32 nt, Homo Sapiens
ugcugguguugcugguggauagaagaggggcc

SEQ ID NO: 327901 - RNA, 32 nt, Homo Sapiens
aaagcaagguauuuuuucaccucagauucuaa

SEQ ID NO: 327902 - RNA, 32 nt, Homo Sapiens
uacaauugauaaaugaauaaguauucgucaca

SEQ ID NO: 327903 - RNA, 32 nt, Homo Sapiens
cucaaccucucccacccuccccugugaguccc

SEQ ID NO: 327904 - RNA, 32 nt, Homo Sapiens
gaggagguuaggaugccgugcaugugugaaag

SEQ ID NO: 327905 - RNA, 32 nt, Homo Sapiens
gaggcuccuccccuccucccccggguaacaag

SEQ ID NO: 327906 - RNA, 32 nt, Homo Sapiens
augacuuugugacuugaguccugggcaucuuc

SEQ ID NO: 327907 - RNA, 32 nt, Homo Sapiens
gagcccaggugggacgugggacaggcuuaggg

SEQ ID NO: 327908 - RNA, 32 nt, Homo Sapiens
gcuuucccaccucgaggccgcggccucccccc

SEQ ID NO: 327909 - RNA, 32 nt, Homo Sapiens
cucccuggggcagagcuguuucccagacgggu

SEQ ID NO: 327910 - RNA, 32 nt, Homo Sapiens
ccuguuugcugggaaccccaggucacccccuu

SEQ ID NO: 327911 - RNA, 32 nt, Homo Sapiens
ugcccccgccagaucccguggugcuggggaug

SEQ ID NO: 327912 - RNA, 32 nt, Homo Sapiens
cguuuguuucuucgugccuguuuuaugugcac

SEQ ID NO: 327913 - RNA, 32 nt, Homo Sapiens
ucauaaaugaaccugaugugguguucaugacc

SEQ ID NO: 327914 - RNA, 32 nt, Homo Sapiens
ugucaccaauuuuauugugucauuccacgaau

SEQ ID NO: 327915 - RNA, 32 nt, Homo Sapiens
cuaaagauaucuuuuuagaugauaaaauguac

SEQ ID NO: 327916 - RNA, 32 nt, Homo Sapiens
ccacacaaucaaaggacuguauggaaaaugag

SEQ ID NO: 327917 - RNA, 32 nt, Homo Sapiens
ugguaucuuauuaaugaguuuuaaagauguaa

SEQ ID NO: 327918 - RNA, 32 nt, Homo Sapiens
caggaauugggugaagaugcuucucaccaaca

SEQ ID NO: 327919 - RNA, 32 nt, Homo Sapiens
augcaguggcggcuacugggcccugcccagcc

SEQ ID NO: 327920 - RNA, 32 nt, Homo Sapiens
caguuucccucuauaagugaauccaaaauuca

SEQ ID NO: 327921 - RNA, 32 nt, Homo Sapiens
auaacauauuuggggguggggugggguguuac

SEQ ID NO: 327922 - RNA, 32 nt, Homo Sapiens
aucuuugugugacaugugagcauaaaauuaug

SEQ ID NO: 327923 - RNA, 32 nt, Homo Sapiens
gugacuacuaagcagccgcagcgacucggggu

SEQ ID NO: 327924 - RNA, 32 nt, Homo Sapiens
cuuucuuuauguuuuccaaagcugaauuguag

SEQ ID NO: 327925 - RNA, 32 nt, Homo Sapiens
aauacaggagaaugcuuggugaauuggauguc

SEQ ID NO: 327926 - RNA, 32 nt, Homo Sapiens
cucuaaccaaaauuaagauauguuuggaccau

SEQ ID NO: 327927 - RNA, 32 nt, Homo Sapiens
acccagauauuuucuucaagucuuugcgcauu

SEQ ID NO: 327928 - RNA, 32 nt, Homo Sapiens
cuagcaugucucugaugcuuuuguucauuucu

SEQ ID NO: 327929 - RNA, 32 nt, Homo Sapiens
uccuugggcugccauaacaaaauacauagacu

SEQ ID NO: 327930 - RNA, 32 nt, Homo Sapiens
uggcggcggccgcggugaugggcccggcgcag

SEQ ID NO: 327931 - RNA, 32 nt, Homo Sapiens
aucuuuuaagcccaucaauuauagaaagccaa

SEQ ID NO: 327932 - RNA, 32 nt, Homo Sapiens
uauuuuauaugauuuuugagguccugucuaaa

SEQ ID NO: 327933 - RNA, 32 nt, Homo Sapiens
aacaucugaggccucccggccccgggggaccc

SEQ ID NO: 327934 - RNA, 32 nt, Homo Sapiens
uuuugacuuuaaugugccaauguaacuuccuu

SEQ ID NO: 327935 - RNA, 32 nt, Homo Sapiens
gcccuccugaagagagcgucaggccaucagcu

SEQ ID NO: 327936 - RNA, 32 nt, Homo Sapiens
gagccucgccuggguucuggaggcugcggggc

SEQ ID NO: 327937 - RNA, 32 nt, Homo Sapiens
agcagggucugcccuggcaugagcagagccca

SEQ ID NO: 327938 - RNA, 32 nt, Homo Sapiens
ugaggcccccucuggaguuucuggccauucac

SEQ ID NO: 327939 - RNA, 32 nt, Homo Sapiens
uuccauugcuaucuauugauaauuuagacauu

SEQ ID NO: 327940 - RNA, 32 nt, Homo Sapiens
cucauuuccuucaaccuugccuccucauacac

SEQ ID NO: 327941 - RNA, 32 nt, Homo Sapiens
cugccugccugccuguguggucugccucucaa

SEQ ID NO: 327942 - RNA, 32 nt, Homo Sapiens
gguuggaaauaauucgaugauugcuuaguccu

SEQ ID NO: 327943 - RNA, 30 nt, Homo Sapiens
ugcugugcacccgugccacgcgcucugcau

SEQ ID NO: 327944 - RNA, 32 nt, Homo Sapiens
gggccacaguucuugauuauuccucuuguggu

SEQ ID NO: 327945 - RNA, 32 nt, Homo Sapiens
ucaaaaggcucuuguacaaaauguagauuaaa

SEQ ID NO: 327946 - RNA, 32 nt, Homo Sapiens
ggcauuacaaauaauauuacucuaugaugauu

SEQ ID NO: 327947 - RNA, 32 nt, Homo Sapiens
uaacagccgcguggugcugccaggacugcccu

SEQ ID NO: 327948 - RNA, 32 nt, Homo Sapiens
gccgcccaccgcccgccccgucucaccuucuu

SEQ ID NO: 327949 - RNA, 32 nt, Homo Sapiens
ggggacugcuccaacaggaaagagccccuccc

SEQ ID NO: 327950 - RNA, 32 nt, Homo Sapiens
ugucuggguguggccuggggcucccucugcag

SEQ ID NO: 327951 - RNA, 32 nt, Homo Sapiens
gauguucuagcccucccuggcaugucagagcc

SEQ ID NO: 327952 - RNA, 32 nt, Homo Sapiens
uaguaggggcgggcuacgugauugacacuucu

SEQ ID NO: 327953 - RNA, 32 nt, Homo Sapiens
ucuuggagcuggcuaggugccuuuuucuuucu

SEQ ID NO: 327954 - RNA, 32 nt, Homo Sapiens
uucucaaaaaacuacauuaaauuaauauaugu

SEQ ID NO: 327955 - RNA, 32 nt, Homo Sapiens
uucccucuauaaguguuauugauuauuuuaaa

SEQ ID NO: 327956 - RNA, 32 nt, Homo Sapiens
agguacaaaugggaacaccuccccucgggaag

SEQ ID NO: 327957 - RNA, 30 nt, Homo Sapiens
agagcccgcggcuuaaagcgcgucgccugg

SEQ ID NO: 327958 - RNA, 32 nt, Homo Sapiens
auauaacugaugaucacauaaaacagauuugc

SEQ ID NO: 327959 - RNA, 32 nt, Homo Sapiens
agcacugggugcccguuuccuguguuucgaau

SEQ ID NO: 327960 - RNA, 32 nt, Homo Sapiens
ucuggcagugaggguuucugugcugucagacu

SEQ ID NO: 327961 - RNA, 32 nt, Homo Sapiens
gauguguuugggggacuuugccugcugcacag

SEQ ID NO: 327962 - RNA, 32 nt, Homo Sapiens
accccuacccccacccccuuugauccuuucua

SEQ ID NO: 327963 - RNA, 32 nt, Homo Sapiens
gaggagccgcugccuucaccgccccgacgccu

SEQ ID NO: 327964 - RNA, 32 nt, Homo Sapiens
gagagaguuaaagguccuaugcagcuugacaa

SEQ ID NO: 327965 - RNA, 32 nt, Homo Sapiens
agcgguaaaacuggguacaugggacccugaac

SEQ ID NO: 327966 - RNA, 32 nt, Homo Sapiens
ccuggguggccaggcucugugcucacagucca

SEQ ID NO: 327967 - RNA, 32 nt, Homo Sapiens
auuuucuuuacuaccaugcuccuuccuucauc

SEQ ID NO: 327968 - RNA, 32 nt, Homo Sapiens
cuugaggcuuccacuuuuuuuuuuuuuagaca

SEQ ID NO: 327969 - RNA, 32 nt, Homo Sapiens
auaaaaaauauuaaaacugaguuuugcagaga

SEQ ID NO: 327970 - RNA, 32 nt, Homo Sapiens
ugaaauaaaagcuauucuggucuccucugugu

SEQ ID NO: 327971 - RNA, 27 nt, Homo Sapiens
ccaccacgcuucuucaaucccucugcu

SEQ ID NO: 327972 - RNA, 32 nt, Homo Sapiens
aagcuauccuggguguaccccaggaacuuaaa

SEQ ID NO: 327973 - RNA, 32 nt, Homo Sapiens
ugcagggcccagucuucaguccuguggucccu

SEQ ID NO: 327974 - RNA, 31 nt, Homo Sapiens
aagcugcucaaugaccgccaggaacugaccu

SEQ ID NO: 327975 - RNA, 32 nt, Homo Sapiens
ucuacugaagugguuuaaaaugaugcuuugua

SEQ ID NO: 327976 - RNA, 32 nt, Homo Sapiens
acuaguggcaggguggugguguccuggugucc

SEQ ID NO: 327977 - RNA, 32 nt, Homo Sapiens
ugugucccccccagccccuccccuccccauac

SEQ ID NO: 327978 - RNA, 32 nt, Homo Sapiens
aaaaaccacucccaguccccagcccuucacau

SEQ ID NO: 327979 - RNA, 32 nt, Homo Sapiens
uggcaucugaccaauuuuaagggaauccagga

SEQ ID NO: 327980 - RNA, 32 nt, Homo Sapiens
caccuguggcgacgugcacgcugcuuccgaag

SEQ ID NO: 327981 - RNA, 32 nt, Homo Sapiens
aacaaacaaagcuugcaaaauauuuuaugguu

SEQ ID NO: 327982 - RNA, 32 nt, Homo Sapiens
cuguacuuagaguaagagauaugacggaaguu

SEQ ID NO: 327983 - RNA, 32 nt, Homo Sapiens
gauauuauuauuauuugagacagaguuuugcu

SEQ ID NO: 327984 - RNA, 31 nt, Homo Sapiens
gaaauggcagucugccugccucggggacacu

SEQ ID NO: 327985 - RNA, 32 nt, Homo Sapiens
gagccugcucugcggggggcccagcucauggg

SEQ ID NO: 327986 - RNA, 32 nt, Homo Sapiens
ucuacgccccccuggccauccacuacccacgg

SEQ ID NO: 327987 - RNA, 32 nt, Homo Sapiens
ccaacaacaacaaaaacaaaaaugugcuguuc

SEQ ID NO: 327988 - RNA, 32 nt, Homo Sapiens
cccuccccaucccacccccgccgccuggcccc

SEQ ID NO: 327989 - RNA, 32 nt, Homo Sapiens
gaagugaaugccugucacggagggauugaucu

SEQ ID NO: 327990 - RNA, 32 nt, Homo Sapiens
gguuguggggccuggggccccuggagcccaug

SEQ ID NO: 327991 - RNA, 32 nt, Homo Sapiens
uuacugccccgcgggucugcauuuucacagcg

SEQ ID NO: 327992 - RNA, 32 nt, Homo Sapiens
ucugcagccaauugccuguugcagcuguggcc

SEQ ID NO: 327993 - RNA, 32 nt, Homo Sapiens
uugcuacugauuagguccauggagggaagccc

SEQ ID NO: 327994 - RNA, 32 nt, Homo Sapiens
aauauuuucaauauauauaccuggaacagauu

SEQ ID NO: 327995 - RNA, 32 nt, Homo Sapiens
caucuuugcugggcaggcccagcccuccacug

SEQ ID NO: 327996 - RNA, 32 nt, Homo Sapiens
caagugagccaggccccggcccggggugcugg

SEQ ID NO: 327997 - RNA, 32 nt, Homo Sapiens
gauggagaauuugaaguuaaaugcauuagaaa

SEQ ID NO: 327998 - RNA, 32 nt, Homo Sapiens
gaaguccagaccggagacgucgcugcaggucc

SEQ ID NO: 327999 - RNA, 32 nt, Homo Sapiens
caguaucugcaauguucuagaauagaaguugg

SEQ ID NO: 328000 - RNA, 32 nt, Homo Sapiens
agcuucugcuuuauuuaacaguuguugaguau

SEQ ID NO: 328001 - RNA, 32 nt, Homo Sapiens
aguaggucugcgccuggugucugccucgccau

SEQ ID NO: 328002 - RNA, 32 nt, Homo Sapiens
agggugccguagcugaggaagaagggaggcuu

SEQ ID NO: 328003 - RNA, 32 nt, Homo Sapiens
gugguacuauagcagcucuacucugugcacca

SEQ ID NO: 328004 - RNA, 32 nt, Homo Sapiens
cauugcccaaacauuucuuugagaucuauauu

SEQ ID NO: 328005 - RNA, 32 nt, Homo Sapiens
agaaauuggucccaagacaugaagacaucuua

SEQ ID NO: 328006 - RNA, 32 nt, Homo Sapiens
ccuucggcagacacggagccugccggggccug

SEQ ID NO: 328007 - RNA, 32 nt, Homo Sapiens
gcccaauaccaaaccuagucuuucuccaggcc

SEQ ID NO: 328008 - RNA, 32 nt, Homo Sapiens
gaacuuuuuucuaggacuuugguuacuauaca

SEQ ID NO: 328009 - RNA, 30 nt, Homo Sapiens
ccgccgucguaccugccgccgccgccaccg

SEQ ID NO: 328010 - RNA, 32 nt, Homo Sapiens
uaagucuguuguucugauuaaucugcauucau

SEQ ID NO: 328011 - RNA, 32 nt, Homo Sapiens
gccagcccaaaggacucucuauccaggaugua

SEQ ID NO: 328012 - RNA, 32 nt, Homo Sapiens
agaggggaacggacagcaaacaauagacacaa

SEQ ID NO: 328013 - RNA, 32 nt, Homo Sapiens
gucgccgcgggaaggaggauggcccguugagg

SEQ ID NO: 328014 - RNA, 32 nt, Homo Sapiens
agaagaaaaaguuuugccacguagcuaugugc

SEQ ID NO: 328015 - RNA, 32 nt, Homo Sapiens
cugaauugcaucagaucauggaugcauuuuua

SEQ ID NO: 328016 - RNA, 32 nt, Homo Sapiens
gguguggaaaccgaggcccaggaaguuuguga

SEQ ID NO: 328017 - RNA, 32 nt, Homo Sapiens
aacacuguugugccauguggaacugagaagaa

SEQ ID NO: 328018 - RNA, 32 nt, Homo Sapiens
cauaaaagccauuucccuuccaaauacucgac

SEQ ID NO: 328019 - RNA, 32 nt, Homo Sapiens
ccaagcuuucccugucaggauaccuuccacag

SEQ ID NO: 328020 - RNA, 32 nt, Homo Sapiens
cacccucugaucgccgaucaccucugagaccc

SEQ ID NO: 328021 - RNA, 32 nt, Homo Sapiens
acucugaggguggagccaggaagcuguguuug

SEQ ID NO: 328022 - RNA, 32 nt, Homo Sapiens
gcuuguuugucaaaauauuaucuuuuauaaaa

SEQ ID NO: 328023 - RNA, 32 nt, Homo Sapiens
gucuuuuggcuuucuuuuuuguagauauuuaa

SEQ ID NO: 328024 - RNA, 32 nt, Homo Sapiens
ucucggagaaaguguguguauuccuuucuuaa

SEQ ID NO: 328025 - RNA, 32 nt, Homo Sapiens
cccacuuucuuuuuaaugggguugcuuguuuu

SEQ ID NO: 328026 - RNA, 32 nt, Homo Sapiens
uccaguuugacuaggaaagguuagagaacaug

SEQ ID NO: 328027 - RNA, 32 nt, Homo Sapiens
gcagagcugggauuacgucuaagauuugucca

SEQ ID NO: 328028 - RNA, 32 nt, Homo Sapiens
cagugauugugauacauacuaaaguuugagaa

SEQ ID NO: 328029 - RNA, 32 nt, Homo Sapiens
acauuuccuggaguugguuuuguccuugauuc

SEQ ID NO: 328030 - RNA, 32 nt, Homo Sapiens
ugggucucaauccuuaacauauuugcacaauu

SEQ ID NO: 328031 - RNA, 32 nt, Homo Sapiens
uggcugaggcggagguuguugcggaugcuucu

SEQ ID NO: 328032 - RNA, 32 nt, Homo Sapiens
gagugacuugggaguucaucugugugagauuu

SEQ ID NO: 328033 - RNA, 32 nt, Homo Sapiens
cagaauuucauuuaaugauagacggaaaaugu

SEQ ID NO: 328034 - RNA, 32 nt, Homo Sapiens
ggagaaaaacaucccaaggccugcaaauugcu

SEQ ID NO: 328035 - RNA, 32 nt, Homo Sapiens
ggguuuuucccuagucaagcauuuggagacac

SEQ ID NO: 328036 - RNA, 32 nt, Homo Sapiens
ggagccuggaggaggaaugaggucauguuugu

SEQ ID NO: 328037 - RNA, 32 nt, Homo Sapiens
cauggcuugaaaccucugccugauguggcucc

SEQ ID NO: 328038 - RNA, 32 nt, Homo Sapiens
ugccugucaucccagcacuuugggaggccaag

SEQ ID NO: 328039 - RNA, 32 nt, Homo Sapiens
ccucuuaggaguuggagcagggggauggguaa

SEQ ID NO: 328040 - RNA, 32 nt, Homo Sapiens
gaagacuaauuagaaaaaguacaauaaaauua

SEQ ID NO: 328041 - RNA, 32 nt, Homo Sapiens
aagcuucauaaaaccaucagugccaagaaauu

SEQ ID NO: 328042 - RNA, 32 nt, Homo Sapiens
aucugggguugcuggacuuggugcgugggugg

SEQ ID NO: 328043 - RNA, 32 nt, Homo Sapiens
ugugagcccucccgguucucaccucgccuggc

SEQ ID NO: 328044 - RNA, 32 nt, Homo Sapiens
agaccucagugcccaccacgggcuguggcgga

SEQ ID NO: 328045 - RNA, 32 nt, Homo Sapiens
acugaagauaaaguaagugcuguuugggcuaa

SEQ ID NO: 328046 - RNA, 32 nt, Homo Sapiens
accaaggucacucccccuccaucugaauccca

SEQ ID NO: 328047 - RNA, 32 nt, Homo Sapiens
auuugaaauggcaaaggaugugcuucauccuc

SEQ ID NO: 328048 - RNA, 32 nt, Homo Sapiens
gugcaggcguggucaugagggcagauggacac

SEQ ID NO: 328049 - RNA, 32 nt, Homo Sapiens
gcggcguccgcggagacacccauccgugaacc

SEQ ID NO: 328050 - RNA, 32 nt, Homo Sapiens
ugaccugugggguggggggcccugggacguuu

SEQ ID NO: 328051 - RNA, 32 nt, Homo Sapiens
aacuuucugcugagaaggacauuuugaagguu

SEQ ID NO: 328052 - RNA, 32 nt, Homo Sapiens
uguguccuaaaauuuuccaacauagaugugau

SEQ ID NO: 328053 - RNA, 32 nt, Homo Sapiens
cgaaggccucugcggagcugccagucgucuug

SEQ ID NO: 328054 - RNA, 32 nt, Homo Sapiens
cucgaguggacagccagaggcugcagcuggag

SEQ ID NO: 328055 - RNA, 32 nt, Homo Sapiens
accugccacccacugauucagaaauggaaauc

SEQ ID NO: 328056 - RNA, 32 nt, Homo Sapiens
uguaaaugggucugaugugauaugacaagacc

SEQ ID NO: 328057 - RNA, 30 nt, Homo Sapiens
gggcccugcgguggcaugaagcaucccuuc

SEQ ID NO: 328058 - RNA, 32 nt, Homo Sapiens
uucuccuccaugauggaagcccagugauuguu

SEQ ID NO: 328059 - RNA, 32 nt, Homo Sapiens
cugaggucaggaguucgagaucagccuggcca

SEQ ID NO: 328060 - RNA, 32 nt, Homo Sapiens
ggggccugcccccugggcacccauccacaagc

SEQ ID NO: 328061 - RNA, 32 nt, Homo Sapiens
ugaagaggaaauguuuaauuaaugcuuuuuag

SEQ ID NO: 328062 - RNA, 32 nt, Homo Sapiens
agacuagagcaaaauaaugcaaugcaggagaa

SEQ ID NO: 328063 - RNA, 32 nt, Homo Sapiens
auaugaucaauucuguugguauuuucaguauc

SEQ ID NO: 328064 - RNA, 32 nt, Homo Sapiens
cgaggcguccgcccugcaaaucugccagcccc

SEQ ID NO: 328065 - RNA, 32 nt, Homo Sapiens
ccuuuagaguucagcucuaaccagaaaucuug

SEQ ID NO: 328066 - RNA, 30 nt, Homo Sapiens
cucugugucugugccaagaaacgcaggcuc

SEQ ID NO: 328067 - RNA, 32 nt, Homo Sapiens
aacagcuguaacauuugccacccucagaagcu

SEQ ID NO: 328068 - RNA, 32 nt, Homo Sapiens
gcuguaaacaauugaaauauuuugucuuaaau

SEQ ID NO: 328069 - RNA, 30 nt, Homo Sapiens
uggauaugugggggacacgcagcaggugag

SEQ ID NO: 328070 - RNA, 31 nt, Homo Sapiens
gagggucccgggccugagccccgcgccaugg

SEQ ID NO: 328071 - RNA, 32 nt, Homo Sapiens
uggaugaagaccacuaacggcuuuuguuuccu

SEQ ID NO: 328072 - RNA, 32 nt, Homo Sapiens
agggcuggucucuguuccccagcccaccuggc

SEQ ID NO: 328073 - RNA, 32 nt, Homo Sapiens
ccccucaaacgucuaaauauauuguugagaaa

SEQ ID NO: 328074 - RNA, 32 nt, Homo Sapiens
gccaggacgcagaguguggccgugcugugggu

SEQ ID NO: 328075 - RNA, 30 nt, Homo Sapiens
cuuugcugucuccgaacuucucuguugcaa

SEQ ID NO: 328076 - RNA, 32 nt, Homo Sapiens
auuuucaaacugugucuacuggcacccuuccc

SEQ ID NO: 328077 - RNA, 32 nt, Homo Sapiens
uagacuaauuuucgguuuucuuucuugaaaua

SEQ ID NO: 328078 - RNA, 32 nt, Homo Sapiens
accucugagcccgccaagcgcggccgcacggc

SEQ ID NO: 328079 - RNA, 32 nt, Homo Sapiens
gauguagauauuucucuuauuguuuucaugua

SEQ ID NO: 328080 - RNA, 32 nt, Homo Sapiens
cccuggaagugagauugaggcugggguacugc

SEQ ID NO: 328081 - RNA, 32 nt, Homo Sapiens
gggcucccuuagagccgagaacagugagcugg

SEQ ID NO: 328082 - RNA, 32 nt, Homo Sapiens
aaaaugaaaaaauaaacuaugcaaaggcaaaa

SEQ ID NO: 328083 - RNA, 32 nt, Homo Sapiens
uuugugaauaaauguguaggugcuguauuugc

SEQ ID NO: 328084 - RNA, 32 nt, Homo Sapiens
aggucgaaguccugcuuucucauuucuggaag

SEQ ID NO: 328085 - RNA, 32 nt, Homo Sapiens
caucugcauuuucuuacuguugauguuuccug

SEQ ID NO: 328086 - RNA, 32 nt, Homo Sapiens
ggucaaaaacaaaacaaaacagugacacucac

SEQ ID NO: 328087 - RNA, 32 nt, Homo Sapiens
cucgggaugccgcguuauggggugcccggccg

SEQ ID NO: 328088 - RNA, 32 nt, Homo Sapiens
guaagaugaagauaaggaugauacagucucca

SEQ ID NO: 328089 - RNA, 32 nt, Homo Sapiens
ugcugugcucucugcagcuacaaaacaucuug

SEQ ID NO: 328090 - RNA, 30 nt, Homo Sapiens
gucucgggugccauuugcuaacucuguucu

SEQ ID NO: 328091 - RNA, 32 nt, Homo Sapiens
gcccacauccucaccaagagauugugugggac

SEQ ID NO: 328092 - RNA, 32 nt, Homo Sapiens
auuugaagaagcugaaggaauaccuucagauc

SEQ ID NO: 328093 - RNA, 32 nt, Homo Sapiens
gaacccgggaggcggagguugcgacccaaagc

SEQ ID NO: 328094 - RNA, 32 nt, Homo Sapiens
uaugcucuuugagauuuuuacaguguugaaac

SEQ ID NO: 328095 - RNA, 32 nt, Homo Sapiens
caggugaucugccugccuuggccucccagauu

SEQ ID NO: 328096 - RNA, 32 nt, Homo Sapiens
agaaauuauaaugucauuguuuuauuaagcau

SEQ ID NO: 328097 - RNA, 32 nt, Homo Sapiens
agacaucccucaucuagucuugaccucuccag

SEQ ID NO: 328098 - RNA, 32 nt, Homo Sapiens
agagagauguucuuguuucugguguugucacg

SEQ ID NO: 328099 - RNA, 32 nt, Homo Sapiens
uacauuuccuuccugugcucuggacugcugcc

SEQ ID NO: 328100 - RNA, 32 nt, Homo Sapiens
gucaccuggugccuacuguccgacaggaugcc

SEQ ID NO: 328101 - RNA, 32 nt, Homo Sapiens
ccgaccucuccagcuuuccccacugccccuca

SEQ ID NO: 328102 - RNA, 32 nt, Homo Sapiens
ucaggcuuaucuccagagggaggugcccugga

SEQ ID NO: 328103 - RNA, 28 nt, Homo Sapiens
guggguugcagugucaggaugaccugcc

SEQ ID NO: 328104 - RNA, 32 nt, Homo Sapiens
gaucuuagcucacuacaacuucugccucccag

SEQ ID NO: 328105 - RNA, 32 nt, Homo Sapiens
gaucucagcucacugcaacuucugccuccugg

SEQ ID NO: 328106 - RNA, 32 nt, Homo Sapiens
aacaccaaccagaugaacaacacacacgcugc

SEQ ID NO: 328107 - RNA, 32 nt, Homo Sapiens
cuggauuuuuaaaaugucaauaauuuauucug

SEQ ID NO: 328108 - RNA, 32 nt, Homo Sapiens
acagagcugaucuucuugggggugggaaaauc

SEQ ID NO: 328109 - RNA, 32 nt, Homo Sapiens
cugucucugccccccuuccccagccagcaucc

SEQ ID NO: 328110 - RNA, 32 nt, Homo Sapiens
uguggcugagagcgcacagagcgcacgugcac

SEQ ID NO: 328111 - RNA, 32 nt, Homo Sapiens
cgcuggaccccauaggggcagaggucguggcu

SEQ ID NO: 328112 - RNA, 32 nt, Homo Sapiens
auuuuuaaauuaaauguuuuacauucacaagu

SEQ ID NO: 328113 - RNA, 28 nt, Homo Sapiens
guccugggcuggccgccgggauguugcc

SEQ ID NO: 328114 - RNA, 30 nt, Homo Sapiens
cccagcagcaggcgcgcccuuccggccgcg

SEQ ID NO: 328115 - RNA, 32 nt, Homo Sapiens
uguauucugaaucagcaauuauauucccugug

SEQ ID NO: 328116 - RNA, 32 nt, Homo Sapiens
ccaacaugaugauggugugaagggcaggaaac

SEQ ID NO: 328117 - RNA, 30 nt, Homo Sapiens
gagccgcgcgcgccgcaugcuggccggcuc

SEQ ID NO: 328118 - RNA, 32 nt, Homo Sapiens
gcuuugcggcugucgucggagaggcaucuggg

SEQ ID NO: 328119 - RNA, 32 nt, Homo Sapiens
agauggaugccgacggcgccacguaccuccca

SEQ ID NO: 328120 - RNA, 32 nt, Homo Sapiens
aucccucacuuggaccuggggguguggacagu

SEQ ID NO: 328121 - RNA, 32 nt, Homo Sapiens
ugcccuccaugcugggccccagcccaggucug

SEQ ID NO: 328122 - RNA, 32 nt, Homo Sapiens
cuguauuucuguucuaaaacuacuuuaagccc

SEQ ID NO: 328123 - RNA, 31 nt, Homo Sapiens
gccgugaacauauuuuuuggguugcuggagu

SEQ ID NO: 328124 - RNA, 32 nt, Homo Sapiens
uggauucuccacucaguugcaacuuggacuug

SEQ ID NO: 328125 - RNA, 32 nt, Homo Sapiens
guuaaugcugcgugcugcugaacucuguuggg

SEQ ID NO: 328126 - RNA, 32 nt, Homo Sapiens
auaaaacaauuuaaucucuuugaaauaaagua

SEQ ID NO: 328127 - RNA, 32 nt, Homo Sapiens
cagccaggacaaaguaugcggcccauccuggu

SEQ ID NO: 328128 - RNA, 32 nt, Homo Sapiens
uaauucacuucauacauccaucuaaauggaua

SEQ ID NO: 328129 - RNA, 32 nt, Homo Sapiens
acccucuguauauaaaaucugccccagccucc

SEQ ID NO: 328130 - RNA, 32 nt, Homo Sapiens
auggggaggaggagcagagagguaugggaagc

SEQ ID NO: 328131 - RNA, 30 nt, Homo Sapiens
augggguuucacccuguuagccaggaaguu

SEQ ID NO: 328132 - RNA, 30 nt, Homo Sapiens
aauugaagaaauaaaaucauacagagucuu

SEQ ID NO: 328133 - RNA, 30 nt, Homo Sapiens
cuaauguucugugcuguauguuuuuaauga

SEQ ID NO: 328134 - RNA, 32 nt, Homo Sapiens
gcggcgucgguggcgucucggcguggaacgca

SEQ ID NO: 328135 - RNA, 32 nt, Homo Sapiens
cacaugcagacccugccuggagccugcccuag

SEQ ID NO: 328136 - RNA, 32 nt, Homo Sapiens
gaguugcagacccuacucucuauuuugcagug

SEQ ID NO: 328137 - RNA, 32 nt, Homo Sapiens
cacuuguuaucccacacuaucucuuguuuugu

SEQ ID NO: 328138 - RNA, 32 nt, Homo Sapiens
gaugaauaauucaaaucccguguugcacccug

SEQ ID NO: 328139 - RNA, 32 nt, Homo Sapiens
cugaaacucaacaugagggcaacuuacuucaa

SEQ ID NO: 328140 - RNA, 32 nt, Homo Sapiens
agugaauguuccucuuuuuucuuuuuugguuu

SEQ ID NO: 328141 - RNA, 32 nt, Homo Sapiens
cagguccugcauacugaugaaacuacugaugu

SEQ ID NO: 328142 - RNA, 32 nt, Homo Sapiens
cucugugcucuugaguuuuuuauucauucaag

SEQ ID NO: 328143 - RNA, 32 nt, Homo Sapiens
gccgcugugucuaugaacuagagacucuguga

SEQ ID NO: 328144 - RNA, 32 nt, Homo Sapiens
acuccuuaacuccuuaguauuucauagaaaaa

SEQ ID NO: 328145 - RNA, 32 nt, Homo Sapiens
ucuugacauuuuauuucaguuuuuauuauaua

SEQ ID NO: 328146 - RNA, 32 nt, Homo Sapiens
gagccagcagugcuguuuucucaagcacagcg

SEQ ID NO: 328147 - RNA, 25 nt, Homo Sapiens
ccgaguagaacaaaauaaaaaauuc

SEQ ID NO: 328148 - RNA, 32 nt, Homo Sapiens
gacggggugggguggggagaugggcauuugga

SEQ ID NO: 328149 - RNA, 32 nt, Homo Sapiens
guggagagaagcucugaggcacgucaugcagg

SEQ ID NO: 328150 - RNA, 32 nt, Homo Sapiens
ugaggcggccgaccuccggcccgaggcaccgg

SEQ ID NO: 328151 - RNA, 32 nt, Homo Sapiens
accggcgggcggggcggcugguacggccgauc

SEQ ID NO: 328152 - RNA, 32 nt, Homo Sapiens
uuuuuaaaaucagaugucaaaacagagaauag

SEQ ID NO: 328153 - RNA, 32 nt, Homo Sapiens
gaguuucuggauggaaaugcaaaugaaccaug

SEQ ID NO: 328154 - RNA, 31 nt, Homo Sapiens
aaaauaaaauauuucuuuaauggcauccaaa

SEQ ID NO: 328155 - RNA, 32 nt, Homo Sapiens
uaguucauucccuccccagccaggugcaggcg

SEQ ID NO: 328156 - RNA, 32 nt, Homo Sapiens
uaccauugaugauucuucuuccauucagugac

SEQ ID NO: 328157 - RNA, 32 nt, Homo Sapiens
uuguugaaaaauuuggccaaauaccuauuguc

SEQ ID NO: 328158 - RNA, 32 nt, Homo Sapiens
caugggaugcuguuagaacaauuguuagccgg

SEQ ID NO: 328159 - RNA, 32 nt, Homo Sapiens
gcugucgcgacuccgcgccgugugucgccggg

SEQ ID NO: 328160 - RNA, 32 nt, Homo Sapiens
ugagugggaaccgcgcggugucugaggaggca

SEQ ID NO: 328161 - RNA, 32 nt, Homo Sapiens
ugcacuguugggagaaagaaaaggcucaggca

SEQ ID NO: 328162 - RNA, 32 nt, Homo Sapiens
ggcagggaaagggaaacgcuuccccagcccag

SEQ ID NO: 328163 - RNA, 32 nt, Homo Sapiens
cuggugacuccauucugaggugucacaagcaa

SEQ ID NO: 328164 - RNA, 32 nt, Homo Sapiens
gaguagcaaaaauaauauggcaaguauuucuu

SEQ ID NO: 328165 - RNA, 32 nt, Homo Sapiens
gguccucaucguauggccuuuuucuuacaagc

SEQ ID NO: 328166 - RNA, 32 nt, Homo Sapiens
gggcuacggccgcggccagacggcgggagagg

SEQ ID NO: 328167 - RNA, 32 nt, Homo Sapiens
cccucagaagcauggcggccacguagcccggc

SEQ ID NO: 328168 - RNA, 32 nt, Homo Sapiens
cuguugggagacggguguccuuuacccgcggg

SEQ ID NO: 328169 - RNA, 32 nt, Homo Sapiens
guggggaggaaaccuuauaaauuaaacacaug

SEQ ID NO: 328170 - RNA, 32 nt, Homo Sapiens
ggagcgccagcggcugcagguacgcugcgcac

SEQ ID NO: 328171 - RNA, 32 nt, Homo Sapiens
uugguguauuguccccuuaguacaccaguacu

SEQ ID NO: 328172 - RNA, 32 nt, Homo Sapiens
cugcagggccgcggccuggucuucugugcuuc

SEQ ID NO: 328173 - RNA, 32 nt, Homo Sapiens
ggcgcgugcgcagaucagggaucgcgauugcg

SEQ ID NO: 328174 - RNA, 32 nt, Homo Sapiens
gccuagcgcuggcagggccgcugaccgaccga

SEQ ID NO: 328175 - RNA, 32 nt, Homo Sapiens
ggaaguacuguaaugucagugacauaugaagc

SEQ ID NO: 328176 - RNA, 32 nt, Homo Sapiens
caucauucugaaaucauucugaaacagcuagg

SEQ ID NO: 328177 - RNA, 32 nt, Homo Sapiens
cugcauaguccauuauaucacucuguaugccu

SEQ ID NO: 328178 - RNA, 32 nt, Homo Sapiens
cacucccgccccacacgcgcccugguggcucc

SEQ ID NO: 328179 - RNA, 32 nt, Homo Sapiens
gccccaggaaugcagugcuuggagccccugcu

SEQ ID NO: 328180 - RNA, 32 nt, Homo Sapiens
cacaaaccuuaccccacccccaccuccgaguc

SEQ ID NO: 328181 - RNA, 32 nt, Homo Sapiens
uucggggcgcaguccucuccccggcuggcccu

SEQ ID NO: 328182 - RNA, 32 nt, Homo Sapiens
cgacccgcgggccggcgggcgaucgagccagc

SEQ ID NO: 328183 - RNA, 32 nt, Homo Sapiens
agucguucgaucugugaggcugcgagcacuuc

SEQ ID NO: 328184 - RNA, 32 nt, Homo Sapiens
gauccuuucuuauauaaaaucccuuuauuugu

SEQ ID NO: 328185 - RNA, 32 nt, Homo Sapiens
uguucucgugaccaucacuguggugcccacug

SEQ ID NO: 328186 - RNA, 32 nt, Homo Sapiens
cacuugaaaaucuggaauaauuagaaggggaa

SEQ ID NO: 328187 - RNA, 32 nt, Homo Sapiens
auguguguacacaacuguauaugcagcagcca

SEQ ID NO: 328188 - RNA, 32 nt, Homo Sapiens
cguggcugcgugccccugcugcugucaccucu

SEQ ID NO: 328189 - RNA, 32 nt, Homo Sapiens
gcagccacugugggcgcaaauuccucucguuc

SEQ ID NO: 328190 - RNA, 32 nt, Homo Sapiens
gcgaagucaggagugggggaaaugaggugcaa

SEQ ID NO: 328191 - RNA, 32 nt, Homo Sapiens
aaaaaucaguauuuccauuaugcauucugugu

SEQ ID NO: 328192 - RNA, 32 nt, Homo Sapiens
agggcaaacucgaaaacagcccugcccugugg

SEQ ID NO: 328193 - RNA, 32 nt, Homo Sapiens
aaagacacccucagaggcacaagauucucucg

SEQ ID NO: 328194 - RNA, 32 nt, Homo Sapiens
gggguggggccuggcagggcuugcuugagcca

SEQ ID NO: 328195 - RNA, 32 nt, Homo Sapiens
gcguagcggcccagcccuccuggggagacgug

SEQ ID NO: 328196 - RNA, 32 nt, Homo Sapiens
agugugaaagacugcucaguggcuggggugag

SEQ ID NO: 328197 - RNA, 32 nt, Homo Sapiens
auaagucccucuaucacccuuauuaccaagcc

SEQ ID NO: 328198 - RNA, 32 nt, Homo Sapiens
cauguacccacccaaaaugauuauuuuuggag

SEQ ID NO: 328199 - RNA, 32 nt, Homo Sapiens
accaagacauaguagaaaggagugugcaauua

SEQ ID NO: 328200 - RNA, 32 nt, Homo Sapiens
gcaccggcucugcuuaccuguccgcccaccug

SEQ ID NO: 328201 - RNA, 32 nt, Homo Sapiens
cugucuuguagggccuggccuugugggcaggg

SEQ ID NO: 328202 - RNA, 32 nt, Homo Sapiens
ugcauauguguaugaaguguugggggauguag

SEQ ID NO: 328203 - RNA, 32 nt, Homo Sapiens
ccauguuuauuucacuuuuucauuugcauaca

SEQ ID NO: 328204 - RNA, 32 nt, Homo Sapiens
caaggcaccaacaaacaaaacugugauauugg

SEQ ID NO: 328205 - RNA, 32 nt, Homo Sapiens
gagcgcguccccagccuuccgcgcacagagcc

SEQ ID NO: 328206 - RNA, 32 nt, Homo Sapiens
gcacaaggcgaagcugccuggguguggccgcc

SEQ ID NO: 328207 - RNA, 32 nt, Homo Sapiens
uuaagcaugacgggaaaaccaaacacguuccc

SEQ ID NO: 328208 - RNA, 32 nt, Homo Sapiens
uggcaucacuuagcgccgagaagugcagaagu

SEQ ID NO: 328209 - RNA, 32 nt, Homo Sapiens
ucagcaucaagcaaagauuaaucucaagacuu

SEQ ID NO: 328210 - RNA, 32 nt, Homo Sapiens
gcccggggcucccacaccaccgcccaaucgcu

SEQ ID NO: 328211 - RNA, 31 nt, Homo Sapiens
ccccuuuugugcuuuucacuggauucgagcc

SEQ ID NO: 328212 - RNA, 32 nt, Homo Sapiens
ccaauaaugaaauggacagauucauggaacuu

SEQ ID NO: 328213 - RNA, 32 nt, Homo Sapiens
gaugggcggagcaaagcagcggugcugugggg

SEQ ID NO: 328214 - RNA, 32 nt, Homo Sapiens
uggauaucuuugaacagcggcuggagcagguu

SEQ ID NO: 328215 - RNA, 32 nt, Homo Sapiens
aguuuaguguucuagaaagagcuauuacugug

SEQ ID NO: 328216 - RNA, 32 nt, Homo Sapiens
ggcgugguggugggugacucuaaucccaggua

SEQ ID NO: 328217 - RNA, 32 nt, Homo Sapiens
ggcacugaagaaaggcaagggccgugcugcug

SEQ ID NO: 328218 - RNA, 32 nt, Homo Sapiens
aauaggcaaaacauaccaaauuucgauucaca

SEQ ID NO: 328219 - RNA, 32 nt, Homo Sapiens
uuuauaaucuacuagaugaagcaagugcguag

SEQ ID NO: 328220 - RNA, 32 nt, Homo Sapiens
aagaggggggccugggagauccagguuggaag

SEQ ID NO: 328221 - RNA, 32 nt, Homo Sapiens
gggaccgugcgcggccuccgcuccugcgugcg

SEQ ID NO: 328222 - RNA, 32 nt, Homo Sapiens
ucucucucacugucuguugugaggauacgcug

SEQ ID NO: 328223 - RNA, 32 nt, Homo Sapiens
cccgccaccccucaccaagagagauggccaug

SEQ ID NO: 328224 - RNA, 32 nt, Homo Sapiens
uauccuuuucuuugccccuucucaaaugaguc

SEQ ID NO: 328225 - RNA, 32 nt, Homo Sapiens
ggggccaggauggcguguccccugccugugag

SEQ ID NO: 328226 - RNA, 30 nt, Homo Sapiens
ggugaagucugugcaucagaugccagaguc

SEQ ID NO: 328227 - RNA, 32 nt, Homo Sapiens
aggagggugugggccgaggcgcggcggcggcu

SEQ ID NO: 328228 - RNA, 32 nt, Homo Sapiens
cagcgcugcgggggaggcgcccgcgccgacgc

SEQ ID NO: 328229 - RNA, 32 nt, Homo Sapiens
aggcagcucgggcucugcugccggcucuccgg

SEQ ID NO: 328230 - RNA, 32 nt, Homo Sapiens
ggaucccagggugaaccugccugugaacucug

SEQ ID NO: 328231 - RNA, 28 nt, Homo Sapiens
caguaggggcggccaggcagaggcaccc

SEQ ID NO: 328232 - RNA, 32 nt, Homo Sapiens
gcauugcuuccucuccuuccuuccugcaugug

SEQ ID NO: 328233 - RNA, 32 nt, Homo Sapiens
uugcggugauccagcgcagagccccguccuga

SEQ ID NO: 328234 - RNA, 31 nt, Homo Sapiens
aaggcagagccccagaaaaaucagagccaaa

SEQ ID NO: 328235 - RNA, 32 nt, Homo Sapiens
uggccagaaucgucugauuccuguuucugauu

SEQ ID NO: 328236 - RNA, 30 nt, Homo Sapiens
gcuuucauccuugccacugucuugcuuuua

SEQ ID NO: 328237 - RNA, 26 nt, Homo Sapiens
aauggaugaagaugagaaagacagag

SEQ ID NO: 328238 - RNA, 32 nt, Homo Sapiens
agcgaaaucgggcuuccacggcagcaucuuca

SEQ ID NO: 328239 - RNA, 32 nt, Homo Sapiens
gcuuacucccggugccagguucuuggagcugu

SEQ ID NO: 328240 - RNA, 29 nt, Homo Sapiens
uugauuuaagcuuuccuguugaaugacaa

SEQ ID NO: 328241 - RNA, 32 nt, Homo Sapiens
gggugguaaauauacauaacauaaaauucacc

SEQ ID NO: 328242 - RNA, 32 nt, Homo Sapiens
gaccaccugucguuuacccagcccuagacaug

SEQ ID NO: 328243 - RNA, 32 nt, Homo Sapiens
ccacacagagcccguggugcugccggucaucc

SEQ ID NO: 328244 - RNA, 32 nt, Homo Sapiens
acuugcagcuggaagcauuuguuuuugaaguu

SEQ ID NO: 328245 - RNA, 32 nt, Homo Sapiens
ccccucagacugcugcucagccaggcaccaac

SEQ ID NO: 328246 - RNA, 32 nt, Homo Sapiens
uauuguugagaaagaacaaaaagggaauuucc

SEQ ID NO: 328247 - RNA, 32 nt, Homo Sapiens
cuaacuuuguuuuuuuuuuuuagaaauuaaac

SEQ ID NO: 328248 - RNA, 32 nt, Homo Sapiens
gaccagcacggcaccuguggggaugggcuccu

SEQ ID NO: 328249 - RNA, 32 nt, Homo Sapiens
uuguaaauauuuuuguaccuuucuccuuuuaa

SEQ ID NO: 328250 - RNA, 32 nt, Homo Sapiens
cccggcgcacagugacucacgccuguaauccc

SEQ ID NO: 328251 - RNA, 32 nt, Homo Sapiens
gcgagccgccggucuuuggagagaggcgauug

SEQ ID NO: 328252 - RNA, 32 nt, Homo Sapiens
cagcugucaccuccccauuccuggacaggaag

SEQ ID NO: 328253 - RNA, 32 nt, Homo Sapiens
acacaucucuggcuggaagagaauccacugcc

SEQ ID NO: 328254 - RNA, 32 nt, Homo Sapiens
uugucaucaucccuauccucgucagccccacc

SEQ ID NO: 328255 - RNA, 32 nt, Homo Sapiens
ugcaguauucagggucugggaauauggaacua

SEQ ID NO: 328256 - RNA, 32 nt, Homo Sapiens
gggagcgggcgaguaggagggggcgccgggcu

SEQ ID NO: 328257 - RNA, 32 nt, Homo Sapiens
cuauuggaaaagaucugggacuaucugaaacu

SEQ ID NO: 328258 - RNA, 32 nt, Homo Sapiens
uuuuccucagguagauuucuuccacugauaac

SEQ ID NO: 328259 - RNA, 32 nt, Homo Sapiens
cuucaaaggaccccaccucacccaggucucag

SEQ ID NO: 328260 - RNA, 32 nt, Homo Sapiens
aggggcuaucgcuccucgagacucgcagucgc

SEQ ID NO: 328261 - RNA, 31 nt, Homo Sapiens
cuguuucauuugagccuccaaacuacauauu

SEQ ID NO: 328262 - RNA, 32 nt, Homo Sapiens
ugaucuguuuuaaaugugaggcgauuauuuua

SEQ ID NO: 328263 - RNA, 32 nt, Homo Sapiens
ggaugccguggcgucuccucccaggagccaga

SEQ ID NO: 328264 - RNA, 32 nt, Homo Sapiens
agucucagcaguguuaaagcuguuacuuucac

SEQ ID NO: 328265 - RNA, 32 nt, Homo Sapiens
uuauuucuuuauuuuaaugauguaucauuguu

SEQ ID NO: 328266 - RNA, 32 nt, Homo Sapiens
aauuuucuucuauuuuaugccuuuaaaccuuu

SEQ ID NO: 328267 - RNA, 32 nt, Homo Sapiens
auaaggagcaggucccacccccugcuguggaa

SEQ ID NO: 328268 - RNA, 32 nt, Homo Sapiens
gcauguguggacauccacacacagcgcugguu

SEQ ID NO: 328269 - RNA, 32 nt, Homo Sapiens
ugagcgaggccagcugagcccagcacugcggc

SEQ ID NO: 328270 - RNA, 30 nt, Homo Sapiens
uuucuccgugcucgcugaaguggggaaaug

SEQ ID NO: 328271 - RNA, 32 nt, Homo Sapiens
cccauuuauccuguuugugcauaggguuuuua

SEQ ID NO: 328272 - RNA, 32 nt, Homo Sapiens
gagggcacagggacccggggccccgcggggcu

SEQ ID NO: 328273 - RNA, 32 nt, Homo Sapiens
cugaugaugcauuugauaaauguaucuguaug

SEQ ID NO: 328274 - RNA, 32 nt, Homo Sapiens
cggguggcaacgcacgcgccuccugcgccccu

SEQ ID NO: 328275 - RNA, 32 nt, Homo Sapiens
uguuucuugugcuauuuuaucacgugaccugu

SEQ ID NO: 328276 - RNA, 32 nt, Homo Sapiens
ugcuccuggaugucuucaacuccaccgagcau

SEQ ID NO: 328277 - RNA, 32 nt, Homo Sapiens
ccggcugauuuuauuuuuuuuauuuuuauuuu

SEQ ID NO: 328278 - RNA, 32 nt, Homo Sapiens
ggaaaaauacuuucuuuuucuauuggaaaugg

SEQ ID NO: 328279 - RNA, 32 nt, Homo Sapiens
guuacccagauccccuggaaaagcacacuacc

SEQ ID NO: 328280 - RNA, 32 nt, Homo Sapiens
ucuccggagcagagccgaagcucgccggagaa

SEQ ID NO: 328281 - RNA, 32 nt, Homo Sapiens
ccugggaggagcggcugcuucgguucuucucc

SEQ ID NO: 328282 - RNA, 32 nt, Homo Sapiens
uguaauguuuuaaaaguuuauugucuuuguau

SEQ ID NO: 328283 - RNA, 32 nt, Homo Sapiens
guuagaucucaucucugcccccggggagccuc

SEQ ID NO: 328284 - RNA, 32 nt, Homo Sapiens
auaacuuauuuuugguuugacuuaauguauaa

SEQ ID NO: 328285 - RNA, 32 nt, Homo Sapiens
aaauuauacuaaacauugauguccuugaucau

SEQ ID NO: 328286 - RNA, 32 nt, Homo Sapiens
ucuucgaaacugggcagagaaaaaauaaagug

SEQ ID NO: 328287 - RNA, 32 nt, Homo Sapiens
gcuuuuguauucugagauucaacagcagcagu

SEQ ID NO: 328288 - RNA, 32 nt, Homo Sapiens
uuucuuugaaagauaaggauguaaugauuuag

SEQ ID NO: 328289 - RNA, 32 nt, Homo Sapiens
cuauauagggccagcucugaucugcaguuugg

SEQ ID NO: 328290 - RNA, 32 nt, Homo Sapiens
gaguucuggagauggcagcuuauuggacacau

SEQ ID NO: 328291 - RNA, 32 nt, Homo Sapiens
cgugucuucuaaauuugaaauauaauucuguu

SEQ ID NO: 328292 - RNA, 32 nt, Homo Sapiens
gcuccaggcuggggcucuggcugcuggagcau

SEQ ID NO: 328293 - RNA, 32 nt, Homo Sapiens
aggaguggggucuacgugaccuuuaguccucu

SEQ ID NO: 328294 - RNA, 32 nt, Homo Sapiens
cuucucuuucccuucaaaaugcuuuucauagg

SEQ ID NO: 328295 - RNA, 26 nt, Homo Sapiens
gaugccugucuccuauggaccuaugg

SEQ ID NO: 328296 - RNA, 32 nt, Homo Sapiens
accacuucaguuuauaccuugccuguagucca

SEQ ID NO: 328297 - RNA, 32 nt, Homo Sapiens
ggauccuuagagaugccugggaggcuacaugg

SEQ ID NO: 328298 - RNA, 32 nt, Homo Sapiens
uaacuguuuuccaggagguauaaaccagugga

SEQ ID NO: 328299 - RNA, 32 nt, Homo Sapiens
gagaugcaaaaauuacuucaagaugaguuuau

SEQ ID NO: 328300 - RNA, 32 nt, Homo Sapiens
ucacuauuugaaaauucaugcugaaaaacuga

SEQ ID NO: 328301 - RNA, 32 nt, Homo Sapiens
aacugguuucuuucuuuuuuugagauggaguc

SEQ ID NO: 328302 - RNA, 28 nt, Homo Sapiens
ccgcggucucguagcgcaugggccuccu

SEQ ID NO: 328303 - RNA, 32 nt, Homo Sapiens
gugcccauuuuuacuguaaauuaugauuccgu

SEQ ID NO: 328304 - RNA, 27 nt, Homo Sapiens
uauuuaacuggcuucagccuccccacc

SEQ ID NO: 328305 - RNA, 32 nt, Homo Sapiens
uucauuccagcagcugcaccccagcgucaggc

SEQ ID NO: 328306 - RNA, 32 nt, Homo Sapiens
aguucuucaucccacuccaacucuucccccuc

SEQ ID NO: 328307 - RNA, 32 nt, Homo Sapiens
gcugaccccauccuccucucccuccaggagcc

SEQ ID NO: 328308 - RNA, 32 nt, Homo Sapiens
gggugguggugucugucagacacacacagguc

SEQ ID NO: 328309 - RNA, 32 nt, Homo Sapiens
cuggagaaauaccaccuuuccugcucaaaaac

SEQ ID NO: 328310 - RNA, 32 nt, Homo Sapiens
gucucugaggggugggggugccgcugucugag

SEQ ID NO: 328311 - RNA, 32 nt, Homo Sapiens
gagaaaacuccagccauccuggaguugauauu

SEQ ID NO: 328312 - RNA, 32 nt, Homo Sapiens
guuaaguuugaagaggggggaagaggggaaca

SEQ ID NO: 328313 - RNA, 32 nt, Homo Sapiens
uuuuuaaaaaauaugucguagaauuccuucga

SEQ ID NO: 328314 - RNA, 32 nt, Homo Sapiens
uaagaaguaagagcuuuccgggaggccaauuu

SEQ ID NO: 328315 - RNA, 32 nt, Homo Sapiens
aucagugcaguccgaugcugcagaagacagac

SEQ ID NO: 328316 - RNA, 32 nt, Homo Sapiens
uuucaggauuauuuuaauuaauuuuuuucaua

SEQ ID NO: 328317 - RNA, 32 nt, Homo Sapiens
agccgugccagaggcccggcccgccauuccca

SEQ ID NO: 328318 - RNA, 32 nt, Homo Sapiens
aaggcuucuaauugguuagaugagauaagcua

SEQ ID NO: 328319 - RNA, 32 nt, Homo Sapiens
cucaaguugcugucaccuugauaacucuugua

SEQ ID NO: 328320 - RNA, 32 nt, Homo Sapiens
guguggggagacgggugccgugguugggagcu

SEQ ID NO: 328321 - RNA, 32 nt, Homo Sapiens
uaugcccaccuguaugucacagaugugguccc

SEQ ID NO: 328322 - RNA, 32 nt, Homo Sapiens
gcggcgggcuggggagggagcggcgccagcac

SEQ ID NO: 328323 - RNA, 32 nt, Homo Sapiens
aacaagcgugacuuugcucauucugucaucac

SEQ ID NO: 328324 - RNA, 32 nt, Homo Sapiens
gaggugauuccugaagacccagcccacagagg

SEQ ID NO: 328325 - RNA, 32 nt, Homo Sapiens
ggccagaagagagggucuggggccuggucacu

SEQ ID NO: 328326 - RNA, 32 nt, Homo Sapiens
ucaggucacacuaggaaccuccccucacuccc

SEQ ID NO: 328327 - RNA, 32 nt, Homo Sapiens
gccuagaucagagcccagagggcccccucagu

SEQ ID NO: 328328 - RNA, 32 nt, Homo Sapiens
aauccucuuaggaugugugcugcccuuuagua

SEQ ID NO: 328329 - RNA, 32 nt, Homo Sapiens
gauagauguaauauuucuuacagaugcuggca

SEQ ID NO: 328330 - RNA, 32 nt, Homo Sapiens
uauccugucuuuucuuuuuuauaagcaaccac

SEQ ID NO: 328331 - RNA, 32 nt, Homo Sapiens
ucagagaaggcagaggaagauacauugccuug

SEQ ID NO: 328332 - RNA, 32 nt, Homo Sapiens
cccaccgaggaagacaugugguuugacgacgu

SEQ ID NO: 328333 - RNA, 32 nt, Homo Sapiens
aagagaaagcacagagcagagaagcagagaug

SEQ ID NO: 328334 - RNA, 30 nt, Homo Sapiens
uuugcugucuguguguauaaguacauccuu

SEQ ID NO: 328335 - RNA, 32 nt, Homo Sapiens
gguacccacucccacuuggaccucugagaccu

SEQ ID NO: 328336 - RNA, 32 nt, Homo Sapiens
uuuacauuuuuuuuuucuucagaaguaacgcu

SEQ ID NO: 328337 - RNA, 32 nt, Homo Sapiens
agggaacuugggggcaaggggaggcaggcugg

SEQ ID NO: 328338 - RNA, 32 nt, Homo Sapiens
gagacccgccccagcugccacccguggccuca

SEQ ID NO: 328339 - RNA, 32 nt, Homo Sapiens
aaguccuaggcgggcucuggcaccaccaggug

SEQ ID NO: 328340 - RNA, 32 nt, Homo Sapiens
ugccagauguuggcagaagggcuaauauugac

SEQ ID NO: 328341 - RNA, 32 nt, Homo Sapiens
ccaguagcugccggucucuggugggucucaca

SEQ ID NO: 328342 - RNA, 32 nt, Homo Sapiens
ggacacugccagcggcugcagccgacuuggaa

SEQ ID NO: 328343 - RNA, 32 nt, Homo Sapiens
acaaaaaguuuccauauguuaugucaacagau

SEQ ID NO: 328344 - RNA, 32 nt, Homo Sapiens
acauggacggagcugccggggcggcggcgccg

SEQ ID NO: 328345 - RNA, 32 nt, Homo Sapiens
cucuaugugaccaauuuuacuggaugcaauug

SEQ ID NO: 328346 - RNA, 32 nt, Homo Sapiens
gugagacuaaaauugcuguaaaaaauaaaguu

SEQ ID NO: 328347 - RNA, 32 nt, Homo Sapiens
ccuccugccuccugggguccagugacugggac

SEQ ID NO: 328348 - RNA, 32 nt, Homo Sapiens
gguggacggcgcgaccccgacagagggcgacg

SEQ ID NO: 328349 - RNA, 32 nt, Homo Sapiens
gccggucggcaggggucacgcggccgggugug

SEQ ID NO: 328350 - RNA, 32 nt, Homo Sapiens
acggagggcggcgcggaguccuggacgcucuu

SEQ ID NO: 328351 - RNA, 32 nt, Homo Sapiens
cagugcaggggauggcccugcugcugcuuccg

SEQ ID NO: 328352 - RNA, 32 nt, Homo Sapiens
gguaaaggcugggauugggaagaugauuacuc

SEQ ID NO: 328353 - RNA, 32 nt, Homo Sapiens
cuggugcaugggaggggagccgggccaggagu

SEQ ID NO: 328354 - RNA, 32 nt, Homo Sapiens
guacugcccaaguuaaauauugauagccuaaa

SEQ ID NO: 328355 - RNA, 32 nt, Homo Sapiens
cauaagaugcacauuuuucugcucuggagccg

SEQ ID NO: 328356 - RNA, 32 nt, Homo Sapiens
uucccagguucaagcaauuuuccugcuucagc

SEQ ID NO: 328357 - RNA, 32 nt, Homo Sapiens
gugcuugaaaaguuuaauauuugaauauugug

SEQ ID NO: 328358 - RNA, 32 nt, Homo Sapiens
auguuucucgcacgcucacccgcuucagugcg

SEQ ID NO: 328359 - RNA, 32 nt, Homo Sapiens
uucuuuaguuuuauuuuauuuuauuuuauuuu

SEQ ID NO: 328360 - RNA, 32 nt, Homo Sapiens
uagauguacagcuugcaaguagaagucucagg

SEQ ID NO: 328361 - RNA, 32 nt, Homo Sapiens
aggcgggcgggugccgggggccagcaggaugg

SEQ ID NO: 328362 - RNA, 32 nt, Homo Sapiens
aacacaccauuguagaagaaaaacaacagaag

SEQ ID NO: 328363 - RNA, 32 nt, Homo Sapiens
cucuccgggcccagcucuucuuccugguuggg

SEQ ID NO: 328364 - RNA, 32 nt, Homo Sapiens
guuugaagacuuccuagcuuguccuauggacc

SEQ ID NO: 328365 - RNA, 32 nt, Homo Sapiens
caauguggaaaacccaguguccaucuuuccac

SEQ ID NO: 328366 - RNA, 32 nt, Homo Sapiens
caguggugugcgcucucggcgcguggcgcuag

SEQ ID NO: 328367 - RNA, 32 nt, Homo Sapiens
aggacccugugcccagcuuccaugcugacuga

SEQ ID NO: 328368 - RNA, 32 nt, Homo Sapiens
agagccugaaccccaacccaacccuaacucua

SEQ ID NO: 328369 - RNA, 32 nt, Homo Sapiens
gucgauuuucccuauguguagauaguauacuu

SEQ ID NO: 328370 - RNA, 32 nt, Homo Sapiens
aaauaauguccacuucucccuuucaugcugca

SEQ ID NO: 328371 - RNA, 32 nt, Homo Sapiens
gauguaaagaauggaaguagcuguaugagcag

SEQ ID NO: 328372 - RNA, 32 nt, Homo Sapiens
gcuuuacacaaucuguucuauaagguucaggu

SEQ ID NO: 328373 - RNA, 32 nt, Homo Sapiens
acgcagguggacguggugacugagaugacauc

SEQ ID NO: 328374 - RNA, 32 nt, Homo Sapiens
aaaggggcuggggaggcaggccugcugccugc

SEQ ID NO: 328375 - RNA, 32 nt, Homo Sapiens
uaaauagaccucuuguacugaaaacauauuug

SEQ ID NO: 328376 - RNA, 32 nt, Homo Sapiens
ugccgucaccgccuccugggucguccgccacg

SEQ ID NO: 328377 - RNA, 32 nt, Homo Sapiens
ccuuuuguuuuggauccuggggauggugagaa

SEQ ID NO: 328378 - RNA, 32 nt, Homo Sapiens
cugaugguggugcuguccauuaacagcuguga

SEQ ID NO: 328379 - RNA, 32 nt, Homo Sapiens
cauuuucaguaauuccuacaaacaaaaaucuu

SEQ ID NO: 328380 - RNA, 28 nt, Homo Sapiens
gaacguguuuauagaauguguuuuauac

SEQ ID NO: 328381 - RNA, 32 nt, Homo Sapiens
ggcuuugacuuuucuuuuugggguuuuaguag

SEQ ID NO: 328382 - RNA, 32 nt, Homo Sapiens
gggccccgacggcgcgcucccccgucagccac

SEQ ID NO: 328383 - RNA, 32 nt, Homo Sapiens
cccaggcccugcccuccuacccggaggggcuc

SEQ ID NO: 328384 - RNA, 32 nt, Homo Sapiens
gaagaaagaguuugcuggccugugcuucgaag

SEQ ID NO: 328385 - RNA, 32 nt, Homo Sapiens
ggacaaaaacaucaagcaaucaaaagaaaccc

SEQ ID NO: 328386 - RNA, 32 nt, Homo Sapiens
ccagugccguguguugucaugucacucacccc

SEQ ID NO: 328387 - RNA, 32 nt, Homo Sapiens
gggcuguucccucuccugcccggacuguggcc

SEQ ID NO: 328388 - RNA, 29 nt, Homo Sapiens
caagaugauuugaugucuuauaaaacucu

SEQ ID NO: 328389 - RNA, 32 nt, Homo Sapiens
ugggaggaggggauuucccagcuccucaucuc

SEQ ID NO: 328390 - RNA, 32 nt, Homo Sapiens
gaauuagcugagccaacagaccauguggacag

SEQ ID NO: 328391 - RNA, 32 nt, Homo Sapiens
gucaguggaaagauuacagaugaggaaagggg

SEQ ID NO: 328392 - RNA, 32 nt, Homo Sapiens
ccaggcauuguaucuucaguugucaucaaguu

SEQ ID NO: 328393 - RNA, 31 nt, Homo Sapiens
auauauauaaucaauuaucuaacugacauuu

SEQ ID NO: 328394 - RNA, 32 nt, Homo Sapiens
gccaaaacagucagacaguguuguguaaaaau

SEQ ID NO: 328395 - RNA, 32 nt, Homo Sapiens
cuguuuggggcccucgucuaagucuuuguccc

SEQ ID NO: 328396 - RNA, 32 nt, Homo Sapiens
cugcccgccaccauugcccccggcccgcagcc

SEQ ID NO: 328397 - RNA, 32 nt, Homo Sapiens
aaacucccagugaugaucugacauuuacaauu

SEQ ID NO: 328398 - RNA, 32 nt, Homo Sapiens
augcccacugcccuccucccucuccuggccca

SEQ ID NO: 328399 - RNA, 32 nt, Homo Sapiens
ugcaauaugcccccugggucccaggagggucu

SEQ ID NO: 328400 - RNA, 32 nt, Homo Sapiens
cccauuuccggagcugcaggauagagcuuccu

SEQ ID NO: 328401 - RNA, 32 nt, Homo Sapiens
uuuagaaaaauauugaagacauuguauuacca

SEQ ID NO: 328402 - RNA, 32 nt, Homo Sapiens
gacggcccuggcagaggucgggccccucgggc

SEQ ID NO: 328403 - RNA, 32 nt, Homo Sapiens
gaagcuucccugccugagacacguauggaagc

SEQ ID NO: 328404 - RNA, 32 nt, Homo Sapiens
cccugaaggagcuucuuuuccucuggggagaa

SEQ ID NO: 328405 - RNA, 32 nt, Homo Sapiens
uauuuaucacacauauuggaacaaagaacauc

SEQ ID NO: 328406 - RNA, 31 nt, Homo Sapiens
ggccgggcugcguucgcuccagccgcggcuc

SEQ ID NO: 328407 - RNA, 32 nt, Homo Sapiens
cgaccgcccccuccucuagcugugggggugag

SEQ ID NO: 328408 - RNA, 32 nt, Homo Sapiens
caaauaaguauuuauaauagcaacuuuugugu

SEQ ID NO: 328409 - RNA, 32 nt, Homo Sapiens
gugucagagugacggaagaaaauguauguaac

SEQ ID NO: 328410 - RNA, 32 nt, Homo Sapiens
ugugaggagagucugaauauuuucagugaucu

SEQ ID NO: 328411 - RNA, 32 nt, Homo Sapiens
ccggggcgggguggagcugaucagaauaaugu

SEQ ID NO: 328412 - RNA, 32 nt, Homo Sapiens
uacuuucccugccugccucccucccccugcua

SEQ ID NO: 328413 - RNA, 32 nt, Homo Sapiens
ucaagcccggaccaauccccacguuccgggcc

SEQ ID NO: 328414 - RNA, 32 nt, Homo Sapiens
aauaagaagugggauuagaagacaucccagug

SEQ ID NO: 328415 - RNA, 32 nt, Homo Sapiens
uguuucgugcauuauuucuacuaugguugauu

SEQ ID NO: 328416 - RNA, 32 nt, Homo Sapiens
uaguuuacuuggaaaccaugaacaaacucaca

SEQ ID NO: 328417 - RNA, 32 nt, Homo Sapiens
caucuugcugaccuaauucagaaaagaagugc

SEQ ID NO: 328418 - RNA, 32 nt, Homo Sapiens
auaucaucuauuauacaguccauauuuaaauu

SEQ ID NO: 328419 - RNA, 32 nt, Homo Sapiens
ugcccuccagggacacgucuccaugguuuuuc

SEQ ID NO: 328420 - RNA, 32 nt, Homo Sapiens
cagaaaaguauuuuaaccuaccuguagagauc

SEQ ID NO: 328421 - RNA, 32 nt, Homo Sapiens
cuuccuaguuuauuuggauuuaaguugacaaa

SEQ ID NO: 328422 - RNA, 31 nt, Homo Sapiens
auguuggggugcagccaagcaggaggccaag

SEQ ID NO: 328423 - RNA, 32 nt, Homo Sapiens
aagcugucccugaaaauagaaauguguacuua

SEQ ID NO: 328424 - RNA, 32 nt, Homo Sapiens
gagagaaacaccgaaauucagauagcucaggg

SEQ ID NO: 328425 - RNA, 32 nt, Homo Sapiens
acaccucugcaccuuugcacgugcuguuugcu

SEQ ID NO: 328426 - RNA, 32 nt, Homo Sapiens
gcaguaagaagcugcuggcaugcacgggaaca

SEQ ID NO: 328427 - RNA, 32 nt, Homo Sapiens
uagcagagaaaguggagaagguagaggaugga

SEQ ID NO: 328428 - RNA, 32 nt, Homo Sapiens
auucgcggccgcgucgaccuggacuucucugg

SEQ ID NO: 328429 - RNA, 32 nt, Homo Sapiens
uuguacacauauauuuauauaaucacugauug

SEQ ID NO: 328430 - RNA, 32 nt, Homo Sapiens
cacccuugcauuccagccugugaaauaaagga

SEQ ID NO: 328431 - RNA, 32 nt, Homo Sapiens
uuauauuaaaagacaaguuauuaaaaaggaaa

SEQ ID NO: 328432 - RNA, 32 nt, Homo Sapiens
aauguucacacagaaggaguugguuuucaugu

SEQ ID NO: 328433 - RNA, 32 nt, Homo Sapiens
uuuuuccaggacaagugaagagaaaauauuaa

SEQ ID NO: 328434 - RNA, 32 nt, Homo Sapiens
ggcugggaggucgcguccgcacacuucuggaa

SEQ ID NO: 328435 - RNA, 32 nt, Homo Sapiens
ccgugcugccaucccgugccugucguguuggu

SEQ ID NO: 328436 - RNA, 32 nt, Homo Sapiens
acugcccccagccccagcuugaucuugaaccu

SEQ ID NO: 328437 - RNA, 32 nt, Homo Sapiens
cacgcggaagcgcucauccuccccgccugccc

SEQ ID NO: 328438 - RNA, 32 nt, Homo Sapiens
ugugcagcuaggguuggaaaccacugcuccag

SEQ ID NO: 328439 - RNA, 32 nt, Homo Sapiens
gcgaguucucacggucccgccggcgccaccac

SEQ ID NO: 328440 - RNA, 32 nt, Homo Sapiens
gcauugugguuauauguaagacuuuauguuua

SEQ ID NO: 328441 - RNA, 32 nt, Homo Sapiens
uaccuuguuuuaaccugaagugacucuuccuu

SEQ ID NO: 328442 - RNA, 32 nt, Homo Sapiens
auugagggcaggggcggagggcuggucuggga

SEQ ID NO: 328443 - RNA, 32 nt, Homo Sapiens
guacauuuguaucaaaaauaaagaagugacca

SEQ ID NO: 328444 - RNA, 32 nt, Homo Sapiens
cauguuacaaaacaguaucaugaauggccucc

SEQ ID NO: 328445 - RNA, 32 nt, Homo Sapiens
uugcuagcacuuuuuuuuuuuaagcaauuacu

SEQ ID NO: 328446 - RNA, 29 nt, Homo Sapiens
aaaaauaaaacacuuaaaguugaguuuca

SEQ ID NO: 328447 - RNA, 32 nt, Homo Sapiens
accccauucuucugaagugcugguuauguuca

SEQ ID NO: 328448 - RNA, 32 nt, Homo Sapiens
agcucuguucuucuaccaacccagucucaaca

SEQ ID NO: 328449 - RNA, 32 nt, Homo Sapiens
uugcuaagcuaauauauagaauuucaaaacca

SEQ ID NO: 328450 - RNA, 32 nt, Homo Sapiens
ccaaaaauaaaacuuuucauguauuaccuggu

SEQ ID NO: 328451 - RNA, 32 nt, Homo Sapiens
ccucgucgagaaaacuuuuccugccgacucag

SEQ ID NO: 328452 - RNA, 32 nt, Homo Sapiens
gcucuacccggccgcacaccacguccugcucu

SEQ ID NO: 328453 - RNA, 32 nt, Homo Sapiens
ucuagccaaguuuugagauaucacaaagcuac

SEQ ID NO: 328454 - RNA, 32 nt, Homo Sapiens
ugaagggcugccggcuuccuucugggaucuag

SEQ ID NO: 328455 - RNA, 32 nt, Homo Sapiens
guuuuauauauuagccaaagguuuuguucugg

SEQ ID NO: 328456 - RNA, 32 nt, Homo Sapiens
cagucuccccaagucagcaaucucuuucucuc

SEQ ID NO: 328457 - RNA, 32 nt, Homo Sapiens
gaaggugucaauggggagugucacggacagga

SEQ ID NO: 328458 - RNA, 32 nt, Homo Sapiens
agauggggaggagccuacacccgccucccgag

SEQ ID NO: 328459 - RNA, 32 nt, Homo Sapiens
agugagagguuuucuuuuucuuaucagugucc

SEQ ID NO: 328460 - RNA, 32 nt, Homo Sapiens
cauuucagucacccccgcccagcccuccugau

SEQ ID NO: 328461 - RNA, 32 nt, Homo Sapiens
cggagcggugaccgcccggcccgccguucuuc

SEQ ID NO: 328462 - RNA, 32 nt, Homo Sapiens
gucccccaccccaccccccagaauaacgcuga

SEQ ID NO: 328463 - RNA, 32 nt, Homo Sapiens
augaauacagcagaacauuugcuggcgagagu

SEQ ID NO: 328464 - RNA, 32 nt, Homo Sapiens
auucacacaugaaagauuaaucugaaagauca

SEQ ID NO: 328465 - RNA, 32 nt, Homo Sapiens
guaagguacagcagcuccgguuucuauuaugg

SEQ ID NO: 328466 - RNA, 32 nt, Homo Sapiens
uacccgaacugacuucagcagcuaccccaaac

SEQ ID NO: 328467 - RNA, 32 nt, Homo Sapiens
gucgggccgccagccgccgcagcccucggccu

SEQ ID NO: 328468 - RNA, 32 nt, Homo Sapiens
auagcuuugacauuugcaauuguugcauagag

SEQ ID NO: 328469 - RNA, 32 nt, Homo Sapiens
gugacuuccacagacuggucuucuaugugaac

SEQ ID NO: 328470 - RNA, 32 nt, Homo Sapiens
cugccaucauuaauaagauguacaagguguac

SEQ ID NO: 328471 - RNA, 32 nt, Homo Sapiens
ccaauucgaaaacaaccguccugcugucccug

SEQ ID NO: 328472 - RNA, 32 nt, Homo Sapiens
agccccgggaugcugagaguugguggaggggc

SEQ ID NO: 328473 - RNA, 32 nt, Homo Sapiens
aggggcggggcuugugggaggggcggggcuaa

SEQ ID NO: 328474 - RNA, 32 nt, Homo Sapiens
uaaaaagagaauauaacauuuuaugucacuau

SEQ ID NO: 328475 - RNA, 32 nt, Homo Sapiens
gagcggagcgcccgcucgggaccgcagccgcc

SEQ ID NO: 328476 - RNA, 32 nt, Homo Sapiens
gcuuuugagaaugugaaauagcaccaucaaaa

SEQ ID NO: 328477 - RNA, 32 nt, Homo Sapiens
aaaguucucgauugucuuuuuuauugagggac

SEQ ID NO: 328478 - RNA, 32 nt, Homo Sapiens
cugggaacagagccacggguccuggguccuag

SEQ ID NO: 328479 - RNA, 32 nt, Homo Sapiens
cgauuguguacuuuuccuuugcuaguuguuug

SEQ ID NO: 328480 - RNA, 32 nt, Homo Sapiens
uacacauuguagaacaaaugcaagcccaaaug

SEQ ID NO: 328481 - RNA, 32 nt, Homo Sapiens
guggcaguauuuuuauuuuuggcauuucccag

SEQ ID NO: 328482 - RNA, 32 nt, Homo Sapiens
gccccgggcuucccuucuccccagccagaggu

SEQ ID NO: 328483 - RNA, 32 nt, Homo Sapiens
cgagcccucaaggggaagcauuuucuccugga

SEQ ID NO: 328484 - RNA, 32 nt, Homo Sapiens
guguggagaucagggucggggaggucaugagg

SEQ ID NO: 328485 - RNA, 32 nt, Homo Sapiens
uuguuucgucgggguagugucgaccugucuua

SEQ ID NO: 328486 - RNA, 32 nt, Homo Sapiens
gcagauccacagagaauaugcauggaugugug

SEQ ID NO: 328487 - RNA, 32 nt, Homo Sapiens
uaaaccaaaaauuuuaaugagguuaauuuuaa

SEQ ID NO: 328488 - RNA, 32 nt, Homo Sapiens
ggaaaugauggcuugugaaacuaaccguugua

SEQ ID NO: 328489 - RNA, 32 nt, Homo Sapiens
gacacggagcccagcccuccccauggagccag

SEQ ID NO: 328490 - RNA, 32 nt, Homo Sapiens
cgagcccgccgcuggggugcagaacggggccc

SEQ ID NO: 328491 - RNA, 32 nt, Homo Sapiens
uuauuuggaagauagacaucuauuugcaacug

SEQ ID NO: 328492 - RNA, 32 nt, Homo Sapiens
auuuaauuuaggaccuaaaaugucuagauuag

SEQ ID NO: 328493 - RNA, 32 nt, Homo Sapiens
uugauaguacuauauuauucuacaauaaaugg

SEQ ID NO: 328494 - RNA, 32 nt, Homo Sapiens
cuugguaguuuauuuguggauggcaguuuucu

SEQ ID NO: 328495 - RNA, 32 nt, Homo Sapiens
uugcugggccaagcugcagcggcgcugucuug

SEQ ID NO: 328496 - RNA, 32 nt, Homo Sapiens
uccaggcucaaggcggaugcacuuccugcacc

SEQ ID NO: 328497 - RNA, 32 nt, Homo Sapiens
gaacacaaaacauuuaaauaaaacuuuccaaa

SEQ ID NO: 328498 - RNA, 32 nt, Homo Sapiens
ugugugggacgccggccaucaccgcauuuccg

SEQ ID NO: 328499 - RNA, 32 nt, Homo Sapiens
ugacacugccccaccccagccaccuccacuug

SEQ ID NO: 328500 - RNA, 32 nt, Homo Sapiens
aucuggaagcuguaucucuggucaugcaccau

SEQ ID NO: 328501 - RNA, 32 nt, Homo Sapiens
uuccucaagugccgacaccucccucaucucuc

SEQ ID NO: 328502 - RNA, 32 nt, Homo Sapiens
aacaugauuuccccagggcuuagcccagugcc

SEQ ID NO: 328503 - RNA, 32 nt, Homo Sapiens
gagucuugcucugucgcccacccaggcuggag

SEQ ID NO: 328504 - RNA, 32 nt, Homo Sapiens
cggcggcggcgauccacagugauucggccgcg

SEQ ID NO: 328505 - RNA, 32 nt, Homo Sapiens
ccacagccaacaaacauagaaacgacaaauca

SEQ ID NO: 328506 - RNA, 32 nt, Homo Sapiens
ucuuucuagaggacaacaagugccagggcugc

SEQ ID NO: 328507 - RNA, 32 nt, Homo Sapiens
ugaagauaaaaagccagauuguacaaaaguca

SEQ ID NO: 328508 - RNA, 32 nt, Homo Sapiens
aaguucauuauguaaaacuaauuauaaacagg

SEQ ID NO: 328509 - RNA, 31 nt, Homo Sapiens
cgcggcuggcaugcucugccccgaacuggca

SEQ ID NO: 328510 - RNA, 32 nt, Homo Sapiens
ucaugauugucugcccauguccugccugaaau

SEQ ID NO: 328511 - RNA, 32 nt, Homo Sapiens
aggccucccucccccggggucuccaccucagg

SEQ ID NO: 328512 - RNA, 32 nt, Homo Sapiens
uugaggugucgguucgugcugcugagcugccc

SEQ ID NO: 328513 - RNA, 32 nt, Homo Sapiens
gccucaggcagccacagugugcaugcuugucu

SEQ ID NO: 328514 - RNA, 32 nt, Homo Sapiens
ccgagcugcugcugguugcaguucuuucuggu

SEQ ID NO: 328515 - RNA, 32 nt, Homo Sapiens
aaaacaggccaguauggacuagugguggaggg

SEQ ID NO: 328516 - RNA, 32 nt, Homo Sapiens
ugcauuuaucuccaagcugagguuugccuaag

SEQ ID NO: 328517 - RNA, 32 nt, Homo Sapiens
ucaaugaauuucugccuaugaggcaucuggcc

SEQ ID NO: 328518 - RNA, 31 nt, Homo Sapiens
aguagcagcuagaguaaucaggcaagaggaa

SEQ ID NO: 328519 - RNA, 32 nt, Homo Sapiens
uggaguguggaggggucgaugacuugugcagg

SEQ ID NO: 328520 - RNA, 32 nt, Homo Sapiens
acaaaaaucuucaugagcaauauuucuuucuu

SEQ ID NO: 328521 - RNA, 32 nt, Homo Sapiens
uugagcggagagcgacgcgguuguuguagcug

SEQ ID NO: 328522 - RNA, 32 nt, Homo Sapiens
ggaagucccagggccgcgaagcuacgacggag

SEQ ID NO: 328523 - RNA, 32 nt, Homo Sapiens
aagggggagcccaauuccuuucucacccccuc

SEQ ID NO: 328524 - RNA, 32 nt, Homo Sapiens
ucacgguuggggacgggcgcgccucggagcgc

SEQ ID NO: 328525 - RNA, 32 nt, Homo Sapiens
ccuuuauuuuuuagagcugcugauugugaauc

SEQ ID NO: 328526 - RNA, 32 nt, Homo Sapiens
uguguuuuucuuuauacugcaaauuaauaaug

SEQ ID NO: 328527 - RNA, 32 nt, Homo Sapiens
cucaccccaaaacccagugccuccucaacucc

SEQ ID NO: 328528 - RNA, 32 nt, Homo Sapiens
guguccccaucucggccggcccggagcucgcc

SEQ ID NO: 328529 - RNA, 32 nt, Homo Sapiens
aagacacaguguuuaacuaucaacgaaagaac

SEQ ID NO: 328530 - RNA, 32 nt, Homo Sapiens
gcuuacauaauaaaaacaaaaacaagugucug

SEQ ID NO: 328531 - RNA, 32 nt, Homo Sapiens
ccaugucuacuuaacauucaguuuuuaggauu

SEQ ID NO: 328532 - RNA, 32 nt, Homo Sapiens
ugcagcacgcuggacagcacucugccauccug

SEQ ID NO: 328533 - RNA, 32 nt, Homo Sapiens
acuugguggugcauaacggauauuuuuuaacu

SEQ ID NO: 328534 - RNA, 32 nt, Homo Sapiens
gcaugagacaccugugaccauucgaagucuga

SEQ ID NO: 328535 - RNA, 32 nt, Homo Sapiens
aagcucagaggaaauggcacaguuccacaauc

SEQ ID NO: 328536 - RNA, 32 nt, Homo Sapiens
gauccuaacauaucaggccauggacucaggac

SEQ ID NO: 328537 - RNA, 32 nt, Homo Sapiens
ucaccccucauuuuccucuggggaccccaggc

SEQ ID NO: 328538 - RNA, 32 nt, Homo Sapiens
gacaggacggguggagccgcggggcgggaccc

SEQ ID NO: 328539 - RNA, 32 nt, Homo Sapiens
cacagggccccucuccugccuggacagcucug

SEQ ID NO: 328540 - RNA, 32 nt, Homo Sapiens
caacauucaaagcagggauagcuaaacauccc

SEQ ID NO: 328541 - RNA, 32 nt, Homo Sapiens
aucagcagaggagagcauuugauaacuaagag

SEQ ID NO: 328542 - RNA, 32 nt, Homo Sapiens
uuuuuuauuguccggcuucucaucuguuuccc

SEQ ID NO: 328543 - RNA, 32 nt, Homo Sapiens
ggugccuucuauuaauacaucauuccagucuu

SEQ ID NO: 328544 - RNA, 32 nt, Homo Sapiens
guuagcugccagcauuagaaccuuccaggaag

SEQ ID NO: 328545 - RNA, 32 nt, Homo Sapiens
acgguaaauggcauccccuuaggcgccucuuu

SEQ ID NO: 328546 - RNA, 32 nt, Homo Sapiens
cucgcguguuugcggagugcgccuggaggggg

SEQ ID NO: 328547 - RNA, 32 nt, Homo Sapiens
guguggaaauuccaugcuuguggaauuuggca

SEQ ID NO: 328548 - RNA, 32 nt, Homo Sapiens
aauccuggaggcuggaacagcuggcucuuuua

SEQ ID NO: 328549 - RNA, 32 nt, Homo Sapiens
agacuauaaaaccuuugccccauccucacuug

SEQ ID NO: 328550 - RNA, 32 nt, Homo Sapiens
uccacauaauuuccucaggggcccuggcuggc

SEQ ID NO: 328551 - RNA, 32 nt, Homo Sapiens
acugucacucauuucugaaaguuucuucagcc

SEQ ID NO: 328552 - RNA, 32 nt, Homo Sapiens
agcugacgccucugcuuuccuccaccugaaga

SEQ ID NO: 328553 - RNA, 30 nt, Homo Sapiens
cgccucccuccugugccgccggcagcaugg

SEQ ID NO: 328554 - RNA, 32 nt, Homo Sapiens
ccaggguagcagcuggugggacacugaucugu

SEQ ID NO: 328555 - RNA, 32 nt, Homo Sapiens
cucccaggccauucugacguguaccgcauaua

SEQ ID NO: 328556 - RNA, 32 nt, Homo Sapiens
uccuuguccaucacccaauaccaccccaaaca

SEQ ID NO: 328557 - RNA, 32 nt, Homo Sapiens
cauccaguauugggagaugauaugauagggca

SEQ ID NO: 328558 - RNA, 32 nt, Homo Sapiens
cgaaggggaaaggguugugagacccaaccaga

SEQ ID NO: 328559 - RNA, 32 nt, Homo Sapiens
gggcuggagcagccugguuauuuccuaucugu

SEQ ID NO: 328560 - RNA, 32 nt, Homo Sapiens
ccuccccugcugcuccuccugagccucgggga

SEQ ID NO: 328561 - RNA, 32 nt, Homo Sapiens
uggcauggcucuugacaagguuuucuauaggg

SEQ ID NO: 328562 - RNA, 32 nt, Homo Sapiens
ggacccucuguagggccuggaaacugcaggau

SEQ ID NO: 328563 - RNA, 32 nt, Homo Sapiens
aaguuaucaaggacaaugccaaggguggggca

SEQ ID NO: 328564 - RNA, 32 nt, Homo Sapiens
guauauagaaugcucaaaaauaaaauucuuaa

SEQ ID NO: 328565 - RNA, 32 nt, Homo Sapiens
gugaugauacucaaaaguuuuucacugaagag

SEQ ID NO: 328566 - RNA, 32 nt, Homo Sapiens
aucucccaggaaauguccuucucuggcgucug

SEQ ID NO: 328567 - RNA, 32 nt, Homo Sapiens
cgccccgagggaguggcggugcgaccccaggg

SEQ ID NO: 328568 - RNA, 32 nt, Homo Sapiens
acggaaucggaacacgcuggcuccauaucgug

SEQ ID NO: 328569 - RNA, 32 nt, Homo Sapiens
agagucuaaaagacaaguagugacacuguuuc

SEQ ID NO: 328570 - RNA, 32 nt, Homo Sapiens
gaauuuuuagugauaaaauacauuuguaagug

SEQ ID NO: 328571 - RNA, 32 nt, Homo Sapiens
ggcugaucuggaacuucugaccucaggugauc

SEQ ID NO: 328572 - RNA, 32 nt, Homo Sapiens
uuguugugguuuuugacuaagguguauguuag

SEQ ID NO: 328573 - RNA, 32 nt, Homo Sapiens
cuucugucagggucuuggcagcagccggcucu

SEQ ID NO: 328574 - RNA, 32 nt, Homo Sapiens
acaaagucccuggggccaguguguguggcggg

SEQ ID NO: 328575 - RNA, 32 nt, Homo Sapiens
agccaaaaggauuuaaaaccgcugcucuaaag

SEQ ID NO: 328576 - RNA, 32 nt, Homo Sapiens
uaugaguaaauacaugcauugucauaauaaaa

SEQ ID NO: 328577 - RNA, 32 nt, Homo Sapiens
ccaaagugcugggauucccggcgugagccacc

SEQ ID NO: 328578 - RNA, 29 nt, Homo Sapiens
uuacaauaaaguuugauuucugaaacuuc

SEQ ID NO: 328579 - RNA, 32 nt, Homo Sapiens
uugauguuucauuuucuguugaggaaccauaa

SEQ ID NO: 328580 - RNA, 32 nt, Homo Sapiens
cccgagaccucgcgcgccgccgcugccacgcg

SEQ ID NO: 328581 - RNA, 32 nt, Homo Sapiens
uaccaccuuuucugcucaggcccagggcuuua

SEQ ID NO: 328582 - RNA, 32 nt, Homo Sapiens
aaacugagacgggcggaugcaguguugugcac

SEQ ID NO: 328583 - RNA, 32 nt, Homo Sapiens
ucguagccuguggcuuggggucgggagugcag

SEQ ID NO: 328584 - RNA, 29 nt, Homo Sapiens
cuuuauucuaaaugacugaagacuucugu

SEQ ID NO: 328585 - RNA, 32 nt, Homo Sapiens
cuggaaccccuguggucuucucuucaucuaau

SEQ ID NO: 328586 - RNA, 32 nt, Homo Sapiens
ccggccugcuccaagggccagaagcagaacag

SEQ ID NO: 328587 - RNA, 32 nt, Homo Sapiens
ugcgcaauacucauuugcugugugauuacugu

SEQ ID NO: 328588 - RNA, 32 nt, Homo Sapiens
gaaacgccaucucuacuaaaaauagaaaaauu

SEQ ID NO: 328589 - RNA, 32 nt, Homo Sapiens
gcugccggccacguccccgcgccgggccucag

SEQ ID NO: 328590 - RNA, 32 nt, Homo Sapiens
cuugaacuuauucgugauacagauuccuuugc

SEQ ID NO: 328591 - RNA, 32 nt, Homo Sapiens
cccauuuccuggaaaugcaaucucccaaacag

SEQ ID NO: 328592 - RNA, 32 nt, Homo Sapiens
uauccugcccgggaggaacgccggcguccagc

SEQ ID NO: 328593 - RNA, 32 nt, Homo Sapiens
aaauucaauauaacuuuuaacacacacugugg

SEQ ID NO: 328594 - RNA, 32 nt, Homo Sapiens
cgcauucugcuccucccugacccauuugccgg

SEQ ID NO: 328595 - RNA, 32 nt, Homo Sapiens
cgcucuuccccucuccucggccacuccccaga

SEQ ID NO: 328596 - RNA, 32 nt, Homo Sapiens
auacagagggugggucaccagcagaagaagcc

SEQ ID NO: 328597 - RNA, 32 nt, Homo Sapiens
guugcaggcaauauccugugcacauccacgcc

SEQ ID NO: 328598 - RNA, 32 nt, Homo Sapiens
uucaagccauucuccugucucagccucccgag

SEQ ID NO: 328599 - RNA, 32 nt, Homo Sapiens
gucagcugcuccaccggguuagggucaggaga

SEQ ID NO: 328600 - RNA, 32 nt, Homo Sapiens
ugaguggccagagaggaggagaaggaggguga

SEQ ID NO: 328601 - RNA, 31 nt, Homo Sapiens
ggcugccucaauggaggagucgcugggggca

SEQ ID NO: 328602 - RNA, 32 nt, Homo Sapiens
agauggcugcggagccgagcaccgggcagugg

SEQ ID NO: 328603 - RNA, 32 nt, Homo Sapiens
ugaaaugaguugaucuuucaccagcuggacua

SEQ ID NO: 328604 - RNA, 32 nt, Homo Sapiens
cgcgcaaauuuaugguuagauuugucucaagu

SEQ ID NO: 328605 - RNA, 32 nt, Homo Sapiens
cgcguucgcggauccaggccgaggaccgaaag

SEQ ID NO: 328606 - RNA, 32 nt, Homo Sapiens
cuaaaaacuaaaaauaauagcuacuuauuggc

SEQ ID NO: 328607 - RNA, 32 nt, Homo Sapiens
gucuucgugcuucagauuuguuuaccuacaaa

SEQ ID NO: 328608 - RNA, 32 nt, Homo Sapiens
cacagucucucagauagcucaugaagacaauc

SEQ ID NO: 328609 - RNA, 32 nt, Homo Sapiens
aaaggaaaaaugguuaacauguuuacacaaga

SEQ ID NO: 328610 - RNA, 32 nt, Homo Sapiens
cgcugagcagugccuccucccgauucagcacg

SEQ ID NO: 328611 - RNA, 32 nt, Homo Sapiens
aagucuuuuucguugugugucuaucuuucuca

SEQ ID NO: 328612 - RNA, 32 nt, Homo Sapiens
caccccuggugccaaucuucuccuucggggag

SEQ ID NO: 328613 - RNA, 32 nt, Homo Sapiens
cauagccaauacuaguuuagguucacauguau

SEQ ID NO: 328614 - RNA, 32 nt, Homo Sapiens
ugaaaguggcuucguacaaaucugccacucaa

SEQ ID NO: 328615 - RNA, 32 nt, Homo Sapiens
ugguaucguggugauauaauguggugcaguua

SEQ ID NO: 328616 - RNA, 32 nt, Homo Sapiens
gggguauguuugucucccagucugggcaaagg

SEQ ID NO: 328617 - RNA, 32 nt, Homo Sapiens
uggacguuucguuaucuucugauccuugcacc

SEQ ID NO: 328618 - RNA, 32 nt, Homo Sapiens
ucucauauuuccuaagcaaggauucucacuua

SEQ ID NO: 328619 - RNA, 32 nt, Homo Sapiens
auugcuuuuuaugaaauaaauuuuacauaaag

SEQ ID NO: 328620 - RNA, 32 nt, Homo Sapiens
caacuuuuaauagcaaaaagugccaaaguccu

SEQ ID NO: 328621 - RNA, 32 nt, Homo Sapiens
uaauaccucuuacuuugcuugagaauccucuc

SEQ ID NO: 328622 - RNA, 32 nt, Homo Sapiens
guuuugagaaagucagccgaagcuuuagcaaa

SEQ ID NO: 328623 - RNA, 32 nt, Homo Sapiens
ucucuauaaaaauuauuuguguucuauauagu

SEQ ID NO: 328624 - RNA, 32 nt, Homo Sapiens
uauuguaaaaguggggucccugucccagcugc

SEQ ID NO: 328625 - RNA, 32 nt, Homo Sapiens
gacuucagggagaaacaaacuugcaaaaaaaa

SEQ ID NO: 328626 - RNA, 32 nt, Homo Sapiens
aggaauuuggaccagggcugcuuuguuucagg

SEQ ID NO: 328627 - RNA, 32 nt, Homo Sapiens
acuuugccuggucccucuagcugcuggugguu

SEQ ID NO: 328628 - RNA, 32 nt, Homo Sapiens
ugccuaugggguucuagagaguguugagugug

SEQ ID NO: 328629 - RNA, 32 nt, Homo Sapiens
agugcugagauuacaggcauaagccaccgcgc

SEQ ID NO: 328630 - RNA, 32 nt, Homo Sapiens
acauggggcagcugaggccuuuuguauaccag

SEQ ID NO: 328631 - RNA, 32 nt, Homo Sapiens
uuuguuuuuuaaaagguuggggguguucagcc

SEQ ID NO: 328632 - RNA, 32 nt, Homo Sapiens
guaauuuguacaucuuuuuucaaucuguacau

SEQ ID NO: 328633 - RNA, 32 nt, Homo Sapiens
gccuucuccucgagacacuuccgagagccggg

SEQ ID NO: 328634 - RNA, 32 nt, Homo Sapiens
ucaacgggagggaggaggagcagacggcagag

SEQ ID NO: 328635 - RNA, 32 nt, Homo Sapiens
ggaccaccccgucaggcuccccggcccucugg

SEQ ID NO: 328636 - RNA, 32 nt, Homo Sapiens
acagacacuggagucuguaaccccaaguguaa

SEQ ID NO: 328637 - RNA, 32 nt, Homo Sapiens
acgcgcaugcuaaugcguggaguguaugcgca

SEQ ID NO: 328638 - RNA, 32 nt, Homo Sapiens
cucagaauauuucucuuagaagaugcauccau

SEQ ID NO: 328639 - RNA, 32 nt, Homo Sapiens
accaugucagauaggacaacacugcuggguuu

SEQ ID NO: 328640 - RNA, 32 nt, Homo Sapiens
auugccccugggccugcccccggccccauuug

SEQ ID NO: 328641 - RNA, 32 nt, Homo Sapiens
gaacugcugucccauuuuccacagcagcuaca

SEQ ID NO: 328642 - RNA, 32 nt, Homo Sapiens
uggaacauucuucugcauugggcucacuacau

SEQ ID NO: 328643 - RNA, 32 nt, Homo Sapiens
cagcgucuuccgugggacuguccccaaggcug

SEQ ID NO: 328644 - RNA, 32 nt, Homo Sapiens
uucaucugucugugggaauuguaagcaagauu

SEQ ID NO: 328645 - RNA, 32 nt, Homo Sapiens
guuuagaugacaaaaacaccagauugaaggau

SEQ ID NO: 328646 - RNA, 32 nt, Homo Sapiens
gcauucucuccgggcccagcucuucuuccugg

SEQ ID NO: 328647 - RNA, 32 nt, Homo Sapiens
agucagcuagaggagggaauguugacaguagu

SEQ ID NO: 328648 - RNA, 32 nt, Homo Sapiens
agaccaucauuuuuagaggaaauacucccucu

SEQ ID NO: 328649 - RNA, 32 nt, Homo Sapiens
auacuuuguuugucaucgaauauuuguugaau

SEQ ID NO: 328650 - RNA, 32 nt, Homo Sapiens
ggcacgaggcgucccggcgccacucggcccag

SEQ ID NO: 328651 - RNA, 32 nt, Homo Sapiens
auaagugaaucuaauaaaauggcuauuccucu

SEQ ID NO: 328652 - RNA, 32 nt, Homo Sapiens
uugcagccgccggcagcuacugcaaggcaaaa

SEQ ID NO: 328653 - RNA, 32 nt, Homo Sapiens
aagaaaagauauuuggggacguagccuaacau

SEQ ID NO: 328654 - RNA, 32 nt, Homo Sapiens
ccauuguugcagagagaacugagcgcagacug

SEQ ID NO: 328655 - RNA, 32 nt, Homo Sapiens
ccugagucaggaguucgagaccagccuggcca

SEQ ID NO: 328656 - RNA, 32 nt, Homo Sapiens
uccuacuugugcuuguucuauuuggaauagag

SEQ ID NO: 328657 - RNA, 32 nt, Homo Sapiens
ccagucaccacauccuucugccuggguggccu

SEQ ID NO: 328658 - RNA, 32 nt, Homo Sapiens
aucgcucccccuccccaccccgcgcaggccac

SEQ ID NO: 328659 - RNA, 32 nt, Homo Sapiens
uguuuuggaaagggcugcuauugucuuuguuu

SEQ ID NO: 328660 - RNA, 32 nt, Homo Sapiens
uuuuucuccccuccccacccccagaaaaauaa

SEQ ID NO: 328661 - RNA, 32 nt, Homo Sapiens
aauagaaaccauggggcguggagcaugaguug

SEQ ID NO: 328662 - RNA, 32 nt, Homo Sapiens
auuuaaguuauuuuaauuuauuguggaucaga

SEQ ID NO: 328663 - RNA, 32 nt, Homo Sapiens
acaaaguuauuuaaaagaugcccuagcagcaa

SEQ ID NO: 328664 - RNA, 32 nt, Homo Sapiens
cccaggcucccucuguccuagcucaggucugg

SEQ ID NO: 328665 - RNA, 32 nt, Homo Sapiens
cuuugaacaaagugugugcauaaccagucaug

SEQ ID NO: 328666 - RNA, 32 nt, Homo Sapiens
auucggagcgcggaagagccagagcugcgagc

SEQ ID NO: 328667 - RNA, 32 nt, Homo Sapiens
gaaguuucuuugaacgaacuaaauauacucau

SEQ ID NO: 328668 - RNA, 32 nt, Homo Sapiens
ugaugacccacccaccaaggaagaaagcagaa

SEQ ID NO: 328669 - RNA, 32 nt, Homo Sapiens
uguaggggcagaagcuugacuccagacccuuc

SEQ ID NO: 328670 - RNA, 32 nt, Homo Sapiens
acaccaugagcuuccugccccgcuggcgaggg

SEQ ID NO: 328671 - RNA, 32 nt, Homo Sapiens
gguauggaagaagguauggaaauacuuuguau

SEQ ID NO: 328672 - RNA, 32 nt, Homo Sapiens
gagguagcugggcacaguggcucacaccuacg

SEQ ID NO: 328673 - RNA, 32 nt, Homo Sapiens
cgacccggccccacgcccgcccgccacccgcg

SEQ ID NO: 328674 - RNA, 32 nt, Homo Sapiens
acuaaacauccauuuuaaucaauauuuggcaa

SEQ ID NO: 328675 - RNA, 32 nt, Homo Sapiens
auuuguuuuaaaacaaagcuuuauuaugaaca

SEQ ID NO: 328676 - RNA, 32 nt, Homo Sapiens
ucagccaaguccuuccuuacaaugaauugucc

SEQ ID NO: 328677 - RNA, 32 nt, Homo Sapiens
ucuuccagccucagccuccccaguagcugaga

SEQ ID NO: 328678 - RNA, 32 nt, Homo Sapiens
aguguuguccauaagagcaguucguggaauuu

SEQ ID NO: 328679 - RNA, 32 nt, Homo Sapiens
cugcuacugggcuuuacauggugacagacauu

SEQ ID NO: 328680 - RNA, 32 nt, Homo Sapiens
aaccugggcauaugucccacgccguccgucuu

SEQ ID NO: 328681 - RNA, 32 nt, Homo Sapiens
ccaucguguugccuggaucugcuggagcauga

SEQ ID NO: 328682 - RNA, 32 nt, Homo Sapiens
ugaauugcuuaaacuuugaacaaccucaauuu

SEQ ID NO: 328683 - RNA, 32 nt, Homo Sapiens
cugggcgcccccggcggcgugugaauggcggc

SEQ ID NO: 328684 - RNA, 32 nt, Homo Sapiens
gggucuaggaggagagaagggagcaggaaucc

SEQ ID NO: 328685 - RNA, 32 nt, Homo Sapiens
ccgggccccaagccgugccgcuccgcucgccc

SEQ ID NO: 328686 - RNA, 32 nt, Homo Sapiens
cuuaaccuccagcagacuccugcucucuaucc

SEQ ID NO: 328687 - RNA, 32 nt, Homo Sapiens
gcccccaggauucucccggcgccccaccucug

SEQ ID NO: 328688 - RNA, 32 nt, Homo Sapiens
acucggggguggaggaggaagaaggggcacag

SEQ ID NO: 328689 - RNA, 30 nt, Homo Sapiens
ucauucaggccugcugcaggagcucugaga

SEQ ID NO: 328690 - RNA, 32 nt, Homo Sapiens
ccaguuaauauucuuguuuuuauuuucuucaa

SEQ ID NO: 328691 - RNA, 32 nt, Homo Sapiens
ccagaccuagacaaugaagaaaacacauacug

SEQ ID NO: 328692 - RNA, 32 nt, Homo Sapiens
agaauuuguaaauauuuuuguagaauaucaua

SEQ ID NO: 328693 - RNA, 32 nt, Homo Sapiens
ccagccccaacccccagcccucacccccuagc

SEQ ID NO: 328694 - RNA, 32 nt, Homo Sapiens
caccugugcagagagggaaggaaaagugccau

SEQ ID NO: 328695 - RNA, 32 nt, Homo Sapiens
guaccuuccuuccuuaaaauaucuagcuuccu

SEQ ID NO: 328696 - RNA, 30 nt, Homo Sapiens
ccuuguugaaagaaugaagugucaaaaggu

SEQ ID NO: 328697 - RNA, 32 nt, Homo Sapiens
ccaggguucucaaaaaggcauucuaggaaguc

SEQ ID NO: 328698 - RNA, 32 nt, Homo Sapiens
aaguuguuugaaaagguguuuuuauuagugca

SEQ ID NO: 328699 - RNA, 32 nt, Homo Sapiens
uggaguuuuaauuuugacaauaccuucugugu

SEQ ID NO: 328700 - RNA, 28 nt, Homo Sapiens
aguuagguggcuaccagucggggauauc

SEQ ID NO: 328701 - RNA, 32 nt, Homo Sapiens
cagggccgaggugggcaguccaggccgagagc

SEQ ID NO: 328702 - RNA, 32 nt, Homo Sapiens
augaauaccucguguuccuccucccucuauua

SEQ ID NO: 328703 - RNA, 32 nt, Homo Sapiens
cccuacgcauuggggccugcuuccuucgccac

SEQ ID NO: 328704 - RNA, 32 nt, Homo Sapiens
uggagaagugguggcggcgggcggcgggcggc

SEQ ID NO: 328705 - RNA, 32 nt, Homo Sapiens
gcccugagaagcugcuccaggccugcagcagg

SEQ ID NO: 328706 - RNA, 32 nt, Homo Sapiens
uuacugcauauuguuuaucugcucugccagag

SEQ ID NO: 328707 - RNA, 32 nt, Homo Sapiens
ugaacccugccagccacgcguggggcgggccc

SEQ ID NO: 328708 - RNA, 32 nt, Homo Sapiens
guuuugguuuuugccccuuccuguggagccua

SEQ ID NO: 328709 - RNA, 32 nt, Homo Sapiens
ggcccuccucaauguggggcccaguguggcca

SEQ ID NO: 328710 - RNA, 32 nt, Homo Sapiens
uccccagaggggccggcgggggcuggggaggg

SEQ ID NO: 328711 - RNA, 32 nt, Homo Sapiens
uaccuuuggugcccggcccucuggccgcucuc

SEQ ID NO: 328712 - RNA, 32 nt, Homo Sapiens
uacaguaauggagaagcaggcauagacagauu

SEQ ID NO: 328713 - RNA, 32 nt, Homo Sapiens
accauaaacaauuuuauacugaaaugaaguuu

SEQ ID NO: 328714 - RNA, 32 nt, Homo Sapiens
cuccuuagaaaagaaaaaaugguaaaggaugg

SEQ ID NO: 328715 - RNA, 32 nt, Homo Sapiens
cggacacucaacaugggggugggugcacuccu

SEQ ID NO: 328716 - RNA, 32 nt, Homo Sapiens
ggccagugcggcagcgagagcagccuccgacc

SEQ ID NO: 328717 - RNA, 32 nt, Homo Sapiens
ccccuccggccgcgagucccacgcgccacccc

SEQ ID NO: 328718 - RNA, 32 nt, Homo Sapiens
gucaucacaguuuuuaaaaaucuuauauaugu

SEQ ID NO: 328719 - RNA, 32 nt, Homo Sapiens
gugcaguggugcggucucggcucacugcaacc

SEQ ID NO: 328720 - RNA, 32 nt, Homo Sapiens
gugcaguggugcagucucggcucacugcgacc

SEQ ID NO: 328721 - RNA, 32 nt, Homo Sapiens
gcaaacauggagggcauuuggccacagauagg

SEQ ID NO: 328722 - RNA, 32 nt, Homo Sapiens
aauaguugccagcagauaaaagaaugagcaaa

SEQ ID NO: 328723 - RNA, 32 nt, Homo Sapiens
gaaggaaguuucgucuccuacccagugcauca

SEQ ID NO: 328724 - RNA, 32 nt, Homo Sapiens
ucuacuuuugaaguaauuaaaugucaguacau

SEQ ID NO: 328725 - RNA, 32 nt, Homo Sapiens
aaagacccaagcauacaauuugagcaugcugu

SEQ ID NO: 328726 - RNA, 32 nt, Homo Sapiens
aggcagagaaggcagcagcaggcaggaccgcc

SEQ ID NO: 328727 - RNA, 32 nt, Homo Sapiens
aauauauuucacaucuuuauuauugcaguuuu

SEQ ID NO: 328728 - RNA, 32 nt, Homo Sapiens
ggaacccagacaccaccuccaacucugagccu

SEQ ID NO: 328729 - RNA, 32 nt, Homo Sapiens
auuugcacuuugagauccguucaacugccaug

SEQ ID NO: 328730 - RNA, 28 nt, Homo Sapiens
cgcaugccaggcggggguccucagggcg

SEQ ID NO: 328731 - RNA, 32 nt, Homo Sapiens
cccuggcccuccccccaccccucugcugcagg

SEQ ID NO: 328732 - RNA, 32 nt, Homo Sapiens
agcgcgcccggcucccgcgccauggggcggcu

SEQ ID NO: 328733 - RNA, 32 nt, Homo Sapiens
ggcugcguggaugcgcaacacacccccuccuu

SEQ ID NO: 328734 - RNA, 32 nt, Homo Sapiens
aggacaggccccagccgguuccuucaagaaac

SEQ ID NO: 328735 - RNA, 32 nt, Homo Sapiens
ucuuggaagcgaaggugucggcuaugagccgg

SEQ ID NO: 328736 - RNA, 32 nt, Homo Sapiens
cuuccuaugcucacccagagaacucucugaug

SEQ ID NO: 328737 - RNA, 32 nt, Homo Sapiens
uggaggaggagcugcggucccucuggugucug

SEQ ID NO: 328738 - RNA, 32 nt, Homo Sapiens
cacuuuuagugucagugaaccaaauucuggaa

SEQ ID NO: 328739 - RNA, 31 nt, Homo Sapiens
aggcauuguguguugaaaguguauguuuaua

SEQ ID NO: 328740 - RNA, 32 nt, Homo Sapiens
uuccauguuucugaaucuucuuuguuucaaau

SEQ ID NO: 328741 - RNA, 32 nt, Homo Sapiens
aauaaaaaauuugcacagguaaauucucucac

SEQ ID NO: 328742 - RNA, 32 nt, Homo Sapiens
ccugaucucuccaaaaauaagcuggagucggc

SEQ ID NO: 328743 - RNA, 32 nt, Homo Sapiens
cuuauaugugguuuuuuuuuuuugguuaugaa

SEQ ID NO: 328744 - RNA, 32 nt, Homo Sapiens
uauuuuaacucucagugugcugucuuuauauu

SEQ ID NO: 328745 - RNA, 31 nt, Homo Sapiens
guccggauggaggacucggacucggcggcaa

SEQ ID NO: 328746 - RNA, 32 nt, Homo Sapiens
guguaguuguccuggggugaucgcugacucug

SEQ ID NO: 328747 - RNA, 32 nt, Homo Sapiens
ggaaacccauguuauuucuugaauucagacac

SEQ ID NO: 328748 - RNA, 32 nt, Homo Sapiens
augaccuggugccuggcccagcggcaauaaag

SEQ ID NO: 328749 - RNA, 32 nt, Homo Sapiens
uaguauguaggucccaugagauuaaggcaagg

SEQ ID NO: 328750 - RNA, 32 nt, Homo Sapiens
ucaagauagaaaagagcagagaaugacgugga

SEQ ID NO: 328751 - RNA, 32 nt, Homo Sapiens
ccgaaccgccgcucccacugacgcugcuuucg

SEQ ID NO: 328752 - RNA, 32 nt, Homo Sapiens
uuuuacuucuaaauaaaugaauuacucaaucu

SEQ ID NO: 328753 - RNA, 32 nt, Homo Sapiens
agucuuuauuaaaacaaacaaacaugaguagu

SEQ ID NO: 328754 - RNA, 32 nt, Homo Sapiens
cuccccagcccgcucccccucucugugcccug

SEQ ID NO: 328755 - RNA, 32 nt, Homo Sapiens
uaaccaggguuuugaggauaaagaacuguauu

SEQ ID NO: 328756 - RNA, 32 nt, Homo Sapiens
auguagcaagcacuuauuguugcccacaugug

SEQ ID NO: 328757 - RNA, 32 nt, Homo Sapiens
cgcgcgcccgcggcccuagcaguggaucucgu

SEQ ID NO: 328758 - RNA, 32 nt, Homo Sapiens
ccgccucggcaggaaccgggaccgccagcgca

SEQ ID NO: 328759 - RNA, 31 nt, Homo Sapiens
aggcccgcggggcucgcgggaguccaggggc

SEQ ID NO: 328760 - RNA, 32 nt, Homo Sapiens
auucgugagcacacucuggugucaggaucuag

SEQ ID NO: 328761 - RNA, 32 nt, Homo Sapiens
auuuggaauggaaguuaugaccaagggaauua

SEQ ID NO: 328762 - RNA, 32 nt, Homo Sapiens
cgugaaauuuguuaucuuuguaaaaugacaau

SEQ ID NO: 328763 - RNA, 32 nt, Homo Sapiens
caaaaaauguuugccugauucuaaucaugaaa

SEQ ID NO: 328764 - RNA, 32 nt, Homo Sapiens
cuccagccccacuucuuagcauucuuacuccu

SEQ ID NO: 328765 - RNA, 32 nt, Homo Sapiens
gaggacucaggccccgaagcugucccagggag

SEQ ID NO: 328766 - RNA, 32 nt, Homo Sapiens
uuggggguggggggcggggguugcauacucag

SEQ ID NO: 328767 - RNA, 32 nt, Homo Sapiens
gccgccgucggggucuccauggcccacuucuc

SEQ ID NO: 328768 - RNA, 32 nt, Homo Sapiens
uuucuaggggcaaugcaaguggcauguauucc

SEQ ID NO: 328769 - RNA, 31 nt, Homo Sapiens
ucucugugaggauuccacagagccugaagcc

SEQ ID NO: 328770 - RNA, 32 nt, Homo Sapiens
aacaaaaguguaccuguaaauguccugaaucc

SEQ ID NO: 328771 - RNA, 32 nt, Homo Sapiens
auauuuaaugaaauuggugguuuuaggaaguc

SEQ ID NO: 328772 - RNA, 31 nt, Homo Sapiens
ccacccccauucucagcuccuccuucgcggc

SEQ ID NO: 328773 - RNA, 32 nt, Homo Sapiens
gcggugaccugcggccucgaggcuggagcagc

SEQ ID NO: 328774 - RNA, 32 nt, Homo Sapiens
acacgaagaccauccauccucccuucguccac

SEQ ID NO: 328775 - RNA, 32 nt, Homo Sapiens
agccaugcacgcugggggcucuguuuuccugc

SEQ ID NO: 328776 - RNA, 32 nt, Homo Sapiens
gggauaccaaaaucugcaggugcucaagucau

SEQ ID NO: 328777 - RNA, 32 nt, Homo Sapiens
aaggcuccagcauguuuguggagaggcaugcg

SEQ ID NO: 328778 - RNA, 32 nt, Homo Sapiens
ggguguccagguucuuggcauuuuggacaaau

SEQ ID NO: 328779 - RNA, 32 nt, Homo Sapiens
uguggcaccgaaucuucuccaaugcacuucca

SEQ ID NO: 328780 - RNA, 32 nt, Homo Sapiens
agaacuuauuuuuucauuuugucacaauaggu

SEQ ID NO: 328781 - RNA, 32 nt, Homo Sapiens
uaauguaaguuaaaugugucuaugauauaacu

SEQ ID NO: 328782 - RNA, 32 nt, Homo Sapiens
accauuuguaaaaucugugaugcugaagcaga

SEQ ID NO: 328783 - RNA, 32 nt, Homo Sapiens
guagcaagcaagaaagcagaaacuacuguucc

SEQ ID NO: 328784 - RNA, 32 nt, Homo Sapiens
acuucagccugggcaacauagcaagauuuugu

SEQ ID NO: 328785 - RNA, 32 nt, Homo Sapiens
uccccagaucuuaauuaaaccagauuuugcaa

SEQ ID NO: 328786 - RNA, 32 nt, Homo Sapiens
agucguuuaaaaguaccacaaaaacugggugg

SEQ ID NO: 328787 - RNA, 32 nt, Homo Sapiens
gaggucgccucccaggaaguccugagcugaga

SEQ ID NO: 328788 - RNA, 32 nt, Homo Sapiens
uuuguacauggaucucauuuuacaagagaauc

SEQ ID NO: 328789 - RNA, 30 nt, Homo Sapiens
caaaguagcuggcacuacaaguguacaccc

SEQ ID NO: 328790 - RNA, 30 nt, Homo Sapiens
cccggggccaggcgcgcucugcccagccca

SEQ ID NO: 328791 - RNA, 32 nt, Homo Sapiens
gccauuuuugaaaauuaauugggaagguacug

SEQ ID NO: 328792 - RNA, 32 nt, Homo Sapiens
guuguucguugguuauacaaguucuugguccc

SEQ ID NO: 328793 - RNA, 32 nt, Homo Sapiens
guuugcuuucuggguuucagacuuguuuggga

SEQ ID NO: 328794 - RNA, 32 nt, Homo Sapiens
gaggggcgcuggccacaugucacugaugguca

SEQ ID NO: 328795 - RNA, 32 nt, Homo Sapiens
auuauuuuugacuaauggauagccgaaggcca

SEQ ID NO: 328796 - RNA, 32 nt, Homo Sapiens
acaugggugaacaugaggagaaccagcaaaau

SEQ ID NO: 328797 - RNA, 32 nt, Homo Sapiens
ugagggaaaaaaccaugaccaaguaaaggaua

SEQ ID NO: 328798 - RNA, 32 nt, Homo Sapiens
caacgccggggcgcccgaggucuggaaggcgc

SEQ ID NO: 328799 - RNA, 31 nt, Homo Sapiens
cauucuucagccagaaagucaccucugagag

SEQ ID NO: 328800 - RNA, 32 nt, Homo Sapiens
uucagauguacaaguugcacuuguacuuuuau

SEQ ID NO: 328801 - RNA, 32 nt, Homo Sapiens
uuagcuuuauaaaaucauccacuugucccgaa

SEQ ID NO: 328802 - RNA, 32 nt, Homo Sapiens
cuguuuagucaucaauuaggagcccaugggag

SEQ ID NO: 328803 - RNA, 32 nt, Homo Sapiens
uaaugaugaugaugaugaugaaaacuaaggau

SEQ ID NO: 328804 - RNA, 32 nt, Homo Sapiens
auuggacuaaucagaugagaguguuuuguuau

SEQ ID NO: 328805 - RNA, 32 nt, Homo Sapiens
ccagucaacucauaucuuccugucuuuccuuc

SEQ ID NO: 328806 - RNA, 32 nt, Homo Sapiens
agucuuaaggauuuuuccacuuuugucaguaa

SEQ ID NO: 328807 - RNA, 32 nt, Homo Sapiens
uaaacccuuucaucuuuuuuuuuuuccuuuaa

SEQ ID NO: 328808 - RNA, 32 nt, Homo Sapiens
agcuucagggcuugguugggguucccuuuuca

SEQ ID NO: 328809 - RNA, 32 nt, Homo Sapiens
gcgccucgucggggcccggccaggcaccuugg

SEQ ID NO: 328810 - RNA, 32 nt, Homo Sapiens
gucacuuucccucuccaggccuccaggccucc

SEQ ID NO: 328811 - RNA, 32 nt, Homo Sapiens
auuuuuuaaaagacaaacuucauauuauccug

SEQ ID NO: 328812 - RNA, 32 nt, Homo Sapiens
ccuuuuguguagaagauagugaaaauaguugu

SEQ ID NO: 328813 - RNA, 32 nt, Homo Sapiens
accaagaggcccagcccuccaaacccuggauu

SEQ ID NO: 328814 - RNA, 32 nt, Homo Sapiens
uucccgggcggcggcuccugcuggaugcagcu

SEQ ID NO: 328815 - RNA, 32 nt, Homo Sapiens
gacaguacaaaaacaaagcugcucuuguuagc

SEQ ID NO: 328816 - RNA, 32 nt, Homo Sapiens
uucuuccagccgguggcaagguguuaaccuca

SEQ ID NO: 328817 - RNA, 32 nt, Homo Sapiens
aaacauuuguugauuuugugugaauguuuaua

SEQ ID NO: 328818 - RNA, 32 nt, Homo Sapiens
gcccggggaacaggccugucuggcccugaggg

SEQ ID NO: 328819 - RNA, 32 nt, Homo Sapiens
cagccuuccuggcuaugagccaucgccugccc

SEQ ID NO: 328820 - RNA, 32 nt, Homo Sapiens
uuuuaggcccccuccagggacaucagauucca

SEQ ID NO: 328821 - RNA, 29 nt, Homo Sapiens
aguguuaguauccaaugacaagagagcac

SEQ ID NO: 328822 - RNA, 32 nt, Homo Sapiens
uauauguacuguacuauaguaggacuuuaugu

SEQ ID NO: 328823 - RNA, 32 nt, Homo Sapiens
cauggauuuauuuuuucuuaacuauuuggauu

SEQ ID NO: 328824 - RNA, 29 nt, Homo Sapiens
aaagugagcaucugggcauugggcauuca

SEQ ID NO: 328825 - RNA, 32 nt, Homo Sapiens
ucauagcuuuuugguuuaauuguacauuauug

SEQ ID NO: 328826 - RNA, 32 nt, Homo Sapiens
guggagauauauuauuuauuuaugcacuguac

SEQ ID NO: 328827 - RNA, 32 nt, Homo Sapiens
guccuggcggccuggcccaggcugccgcugua

SEQ ID NO: 328828 - RNA, 32 nt, Homo Sapiens
auguaugagaauuuaaagcaaauguuucuaaa

SEQ ID NO: 328829 - RNA, 32 nt, Homo Sapiens
guguuuuaugacuuaaauaucuuuacgugugu

SEQ ID NO: 328830 - RNA, 32 nt, Homo Sapiens
caaagcugcagcaugcacagcacaggcaggca

SEQ ID NO: 328831 - RNA, 32 nt, Homo Sapiens
cugagaacuguaucuuugugggacagugagaa

SEQ ID NO: 328832 - RNA, 32 nt, Homo Sapiens
auggaaagaacaaggcaaggaaggaaaauuaa

SEQ ID NO: 328833 - RNA, 32 nt, Homo Sapiens
ucaccaggccuggccucugggcaguguggccu

SEQ ID NO: 328834 - RNA, 32 nt, Homo Sapiens
cguccuuucuuugcugucaugcuggcuugccu

SEQ ID NO: 328835 - RNA, 32 nt, Homo Sapiens
uuguggcagguggagacagcuuauuaggcagc

SEQ ID NO: 328836 - RNA, 32 nt, Homo Sapiens
gcuuccagaaaaguuuggagaaagagaauuug

SEQ ID NO: 328837 - RNA, 32 nt, Homo Sapiens
ucagccgccucccccacgcucuucaccacguu

SEQ ID NO: 328838 - RNA, 32 nt, Homo Sapiens
ggcagccccagcaaacaaaaacuggcuccaug

SEQ ID NO: 328839 - RNA, 29 nt, Homo Sapiens
guguguggggcacagaggacgugcaccuc

SEQ ID NO: 328840 - RNA, 32 nt, Homo Sapiens
cgagugagcgagcggaggagcagcgacacggg

SEQ ID NO: 328841 - RNA, 32 nt, Homo Sapiens
cagcaaugcucucuccucugcccaucaccucc

SEQ ID NO: 328842 - RNA, 28 nt, Homo Sapiens
caccauguuggaaacauguguuuuccua

SEQ ID NO: 328843 - RNA, 32 nt, Homo Sapiens
gcugcagccggggcagccuccgcugcugucgc

SEQ ID NO: 328844 - RNA, 32 nt, Homo Sapiens
cccuggucugccaccaggaucccaggggccca

SEQ ID NO: 328845 - RNA, 32 nt, Homo Sapiens
uuuccuauuuccccuuaucuuucuaaaacugc

SEQ ID NO: 328846 - RNA, 32 nt, Homo Sapiens
gaaaauauaguaacacaugaaaaaaugcuacu

SEQ ID NO: 328847 - RNA, 32 nt, Homo Sapiens
ucggaccgaggguggagccgcugagcacagaa

SEQ ID NO: 328848 - RNA, 32 nt, Homo Sapiens
ugcagaggggguaggggcagagucaggggcug

SEQ ID NO: 328849 - RNA, 31 nt, Homo Sapiens
auauucucacggagagaagccccagcgagau

SEQ ID NO: 328850 - RNA, 32 nt, Homo Sapiens
guaccagcguggccuggcacccugggcuucau

SEQ ID NO: 328851 - RNA, 32 nt, Homo Sapiens
cggugaaagagaucuaacuuaaccaacgcuag

SEQ ID NO: 328852 - RNA, 32 nt, Homo Sapiens
uccaccaugauuguaaauuugcugaggccucc

SEQ ID NO: 328853 - RNA, 32 nt, Homo Sapiens
cccaggcccugccugcuuggcuggggcugggg

SEQ ID NO: 328854 - RNA, 32 nt, Homo Sapiens
cccagggaagacuguauucuuuaaagacagua

SEQ ID NO: 328855 - RNA, 32 nt, Homo Sapiens
uuuacaacaucuuccaguucaagccccuagga

SEQ ID NO: 328856 - RNA, 32 nt, Homo Sapiens
gcuuucccuacuccugccccaacugcaguagg

SEQ ID NO: 328857 - RNA, 32 nt, Homo Sapiens
ugcuuuuccaugaaaugaaauaguggcuaaag

SEQ ID NO: 328858 - RNA, 32 nt, Homo Sapiens
caaagccagaugcucugucuucauauuugcag

SEQ ID NO: 328859 - RNA, 32 nt, Homo Sapiens
gcucucaagaacuuuggaaauauuuuauauau

SEQ ID NO: 328860 - RNA, 32 nt, Homo Sapiens
cgaggauuuuccagcccuuccuuuucuuucua

SEQ ID NO: 328861 - RNA, 32 nt, Homo Sapiens
gagcgcggggcucccccuccccuucgguccuu

SEQ ID NO: 328862 - RNA, 32 nt, Homo Sapiens
auuuaggcugggugcaguggcucacgccugua

SEQ ID NO: 328863 - RNA, 32 nt, Homo Sapiens
gagcucgccuccccggugcucccccgcccucc

SEQ ID NO: 328864 - RNA, 32 nt, Homo Sapiens
agaggcaugcuuccuuagaccaggcaacauuu

SEQ ID NO: 328865 - RNA, 32 nt, Homo Sapiens
gccugugccgggguguccuggaaucugugcca

SEQ ID NO: 328866 - RNA, 32 nt, Homo Sapiens
ccagucaacgcgaggguggugcagguggcccc

SEQ ID NO: 328867 - RNA, 32 nt, Homo Sapiens
ucgagcaaauggaaugugacuuugaaaaccac

SEQ ID NO: 328868 - RNA, 32 nt, Homo Sapiens
aauggccuuguacaacuuauccagaaugucua

SEQ ID NO: 328869 - RNA, 32 nt, Homo Sapiens
gcgugacuuccacuguucaucaaagaaaaagg

SEQ ID NO: 328870 - RNA, 32 nt, Homo Sapiens
agcuccgccucccagguucacgccauucuccu

SEQ ID NO: 328871 - RNA, 32 nt, Homo Sapiens
auuuuaucaguuccucugucuuucuuuauacc

SEQ ID NO: 328872 - RNA, 32 nt, Homo Sapiens
aaaauauauuguauuucuuuugauguuucaaa

SEQ ID NO: 328873 - RNA, 32 nt, Homo Sapiens
aaaaggcuaagcagaaaguaaauuucaauaug

SEQ ID NO: 328874 - RNA, 32 nt, Homo Sapiens
cucugaugucauucuucaacguuuguuccugu

SEQ ID NO: 328875 - RNA, 32 nt, Homo Sapiens
uaccuccgcugcucgggaagcugcuggccugg

SEQ ID NO: 328876 - RNA, 32 nt, Homo Sapiens
ggacaauggaaaucuacauuuucuuuucccuu

SEQ ID NO: 328877 - RNA, 32 nt, Homo Sapiens
uccaagguuucuucaugagucauuccaaguuu

SEQ ID NO: 328878 - RNA, 32 nt, Homo Sapiens
uagucaacugucauuugauaaaaacaauuaag

SEQ ID NO: 328879 - RNA, 32 nt, Homo Sapiens
caucuguuccuauccuucgucaauguuccucu

SEQ ID NO: 328880 - RNA, 32 nt, Homo Sapiens
ugcacuccuagagaaagguacacaguugcccg

SEQ ID NO: 328881 - RNA, 32 nt, Homo Sapiens
ggguccauguaccaccaugugcuggagcaucu

SEQ ID NO: 328882 - RNA, 32 nt, Homo Sapiens
gugggcagaaaguugaggaagaaagaacucaa

SEQ ID NO: 328883 - RNA, 32 nt, Homo Sapiens
gggagagggagacaaugaccuggagggugggg

SEQ ID NO: 328884 - RNA, 32 nt, Homo Sapiens
gaaggauggaauuuuuccccaauuagcaucgg

SEQ ID NO: 328885 - RNA, 32 nt, Homo Sapiens
uugacuuauuuuuaaagcuguguuggagcuca

SEQ ID NO: 328886 - RNA, 32 nt, Homo Sapiens
uggaaugguagcaaaagccuuuccuggcugag

SEQ ID NO: 328887 - RNA, 32 nt, Homo Sapiens
ggugugaaaaagacagcaugaacuuuacccca

SEQ ID NO: 328888 - RNA, 32 nt, Homo Sapiens
uaaugcuaggauagucuaaaucuucaaggugg

SEQ ID NO: 328889 - RNA, 32 nt, Homo Sapiens
agaggagcagaggccaggcugcugcucuggga

SEQ ID NO: 328890 - RNA, 32 nt, Homo Sapiens
ggcgccgauaggaucuggcccgagggcgcgag

SEQ ID NO: 328891 - RNA, 32 nt, Homo Sapiens
cugcguggcauuaagguucuggcacagagaaa

SEQ ID NO: 328892 - RNA, 32 nt, Homo Sapiens
ccagagcaacuuccagcaaggcuggucugggu

SEQ ID NO: 328893 - RNA, 32 nt, Homo Sapiens
ccagucccaggaaagcacuucucaacucacca

SEQ ID NO: 328894 - RNA, 32 nt, Homo Sapiens
ccgcgcacccgcgcgccggacgccagugaccg

SEQ ID NO: 328895 - RNA, 32 nt, Homo Sapiens
cauccuggcccggcccccaccucaggaagccu

SEQ ID NO: 328896 - RNA, 32 nt, Homo Sapiens
gcccagagaaacuuaugacagcuguacacaaa

SEQ ID NO: 328897 - RNA, 32 nt, Homo Sapiens
acgcacuuauuucccuccuguccuagaauuug

SEQ ID NO: 328898 - RNA, 32 nt, Homo Sapiens
ugacgaggaaccgaaaaaucgcgaguguuucg

SEQ ID NO: 328899 - RNA, 32 nt, Homo Sapiens
aguacaugguugguuuuuccuguguccagguc

SEQ ID NO: 328900 - RNA, 32 nt, Homo Sapiens
auguuucuguuucaggcuucccuugcugggag

SEQ ID NO: 328901 - RNA, 29 nt, Homo Sapiens
gggcaaaaaaguuuaucuucuggaugcca

SEQ ID NO: 328902 - RNA, 32 nt, Homo Sapiens
ggucugucaccauagaaugucuuccucuacug

SEQ ID NO: 328903 - RNA, 32 nt, Homo Sapiens
ucgcugcugucaugguuaguuugcuaaacugc

SEQ ID NO: 328904 - RNA, 32 nt, Homo Sapiens
auugcuaucuuuccucugcucauggcauauaa

SEQ ID NO: 328905 - RNA, 32 nt, Homo Sapiens
ccaucaccucaguuguuuuuuauuuuucuaau

SEQ ID NO: 328906 - RNA, 32 nt, Homo Sapiens
auugguaagcucucaugguuuacaggaaggcu

SEQ ID NO: 328907 - RNA, 32 nt, Homo Sapiens
gacaguguggccuggggguuugggggugccag

SEQ ID NO: 328908 - RNA, 32 nt, Homo Sapiens
aaacagaagacaugaaaagagaauuaaaaaua

SEQ ID NO: 328909 - RNA, 32 nt, Homo Sapiens
uguccccaagaguuccugcugcugcugggggc

SEQ ID NO: 328910 - RNA, 32 nt, Homo Sapiens
auuuuagaucaagagagcuaccacugagaaaa

SEQ ID NO: 328911 - RNA, 32 nt, Homo Sapiens
ggaauaaagauaagguacaaagggagacaaua

SEQ ID NO: 328912 - RNA, 32 nt, Homo Sapiens
gggaugaagggucaggcagaaagcgugauaga

SEQ ID NO: 328913 - RNA, 32 nt, Homo Sapiens
ucacuaugugaacuucuguguuucuaaaguau

SEQ ID NO: 328914 - RNA, 32 nt, Homo Sapiens
auacaacaaaagacaaagcaaaaaauaaaccu

SEQ ID NO: 328915 - RNA, 32 nt, Homo Sapiens
agucaaggguuucuuccuguucugggaaucaa

SEQ ID NO: 328916 - RNA, 32 nt, Homo Sapiens
gaauaaaaacugacuagaaauaccgucaaaac

SEQ ID NO: 328917 - RNA, 32 nt, Homo Sapiens
accccugcgugcccuccugccacagcccccgg

SEQ ID NO: 328918 - RNA, 30 nt, Homo Sapiens
aagucauauuuguggggggaaauggcauac

SEQ ID NO: 328919 - RNA, 32 nt, Homo Sapiens
uauaaauguuuccuuauaaauaucucaccauu

SEQ ID NO: 328920 - RNA, 32 nt, Homo Sapiens
uaaauaaauguuaauaugauggacuaacacgc

SEQ ID NO: 328921 - RNA, 32 nt, Homo Sapiens
aagaaguauuacuguuuguaaagcugcuguuu

SEQ ID NO: 328922 - RNA, 32 nt, Homo Sapiens
ccucucccacugaccucuuucucguuugugga

SEQ ID NO: 328923 - RNA, 32 nt, Homo Sapiens
auuugauacuaaaaaggccaccuagcuuuuug

SEQ ID NO: 328924 - RNA, 32 nt, Homo Sapiens
auaaaucuuaacaaagaauaacuucucaagau

SEQ ID NO: 328925 - RNA, 32 nt, Homo Sapiens
gaggcccgggcgggcgggagcaacggcuacag

SEQ ID NO: 328926 - RNA, 32 nt, Homo Sapiens
aaaaauaccaaaacagaaagaggguuuaaaaa

SEQ ID NO: 328927 - RNA, 32 nt, Homo Sapiens
gauguacuguggauuguacauuuaacuuugga

SEQ ID NO: 328928 - RNA, 32 nt, Homo Sapiens
gagccgagcggagccgcgagaagugcuagcuc

SEQ ID NO: 328929 - RNA, 32 nt, Homo Sapiens
auuauuuaaggguggaguuuuaauuuugacaa

SEQ ID NO: 328930 - RNA, 32 nt, Homo Sapiens
caucuccuagagcugggaaugugucccuaaca

SEQ ID NO: 328931 - RNA, 32 nt, Homo Sapiens
ggcgcaggguggccggggaggggugagcaggg

SEQ ID NO: 328932 - RNA, 32 nt, Homo Sapiens
gugggaguucugugccaggagcucccagagca

SEQ ID NO: 328933 - RNA, 32 nt, Homo Sapiens
ggggcuaguugugccauuugccugcacaggaa

SEQ ID NO: 328934 - RNA, 32 nt, Homo Sapiens
gguuaggaguccagguuaagaguuucgcggug

SEQ ID NO: 328935 - RNA, 32 nt, Homo Sapiens
aaauccuuuauuuauugugcugugaucucucu

SEQ ID NO: 328936 - RNA, 32 nt, Homo Sapiens
aaaauauuguuuucuguccacaaauuuuguga

SEQ ID NO: 328937 - RNA, 32 nt, Homo Sapiens
uuaaaaacaaaguguccaagcugucaguggug

SEQ ID NO: 328938 - RNA, 32 nt, Homo Sapiens
ggagggggcugagguggcagggggcuggcaug

SEQ ID NO: 328939 - RNA, 32 nt, Homo Sapiens
uuaaguugagccauauguaaucacuguguuug

SEQ ID NO: 328940 - RNA, 32 nt, Homo Sapiens
acuaaaaagggagaacggggcaagggaccuca

SEQ ID NO: 328941 - RNA, 32 nt, Homo Sapiens
cacauuuuuaucauguuuuuaugacuguuuua

SEQ ID NO: 328942 - RNA, 32 nt, Homo Sapiens
uggccuccgugagcuggugcugccccaggcuc

SEQ ID NO: 328943 - RNA, 32 nt, Homo Sapiens
caacuguuggcagcucuuuguauuucaggugu

SEQ ID NO: 328944 - RNA, 32 nt, Homo Sapiens
auauuuuuauuaccauuuugaaauggagaagc

SEQ ID NO: 328945 - RNA, 32 nt, Homo Sapiens
auucuaggcucacugcaacuucugccucccau

SEQ ID NO: 328946 - RNA, 31 nt, Homo Sapiens
cuuuguggaacuuugaacucgagagagauaa

SEQ ID NO: 328947 - RNA, 32 nt, Homo Sapiens
ggagaugcucaaggccagcaagccccucaggc

SEQ ID NO: 328948 - RNA, 32 nt, Homo Sapiens
uuaauaagcacuuuaaaaguggaacuacaaaa

SEQ ID NO: 328949 - RNA, 32 nt, Homo Sapiens
cucaagccugacgggcccaaaccucccuggag

SEQ ID NO: 328950 - RNA, 32 nt, Homo Sapiens
guucugaaguaaauacagaagaggcuccaaaa

SEQ ID NO: 328951 - RNA, 32 nt, Homo Sapiens
gaagcagccaagagacccaagccugccuugcu

SEQ ID NO: 328952 - RNA, 32 nt, Homo Sapiens
cagccucucuacauacaucucucagguggugc

SEQ ID NO: 328953 - RNA, 32 nt, Homo Sapiens
cagcacugucccggugagcgcugcuggcucgg

SEQ ID NO: 328954 - RNA, 32 nt, Homo Sapiens
cugucuauaaaauggauauuagaagaccugcu

SEQ ID NO: 328955 - RNA, 32 nt, Homo Sapiens
gcauugaaauaaugugguauaacuucucugga

SEQ ID NO: 328956 - RNA, 32 nt, Homo Sapiens
cucuugcccucccagccuucugacuuugcagg

SEQ ID NO: 328957 - RNA, 32 nt, Homo Sapiens
uuaaaacaucuauauuuaaauguuaaaacacu

SEQ ID NO: 328958 - RNA, 32 nt, Homo Sapiens
cuucagcugucaacacagcauccgccuugugg

SEQ ID NO: 328959 - RNA, 32 nt, Homo Sapiens
gcugccagguuccucaggcagccccgguggga

SEQ ID NO: 328960 - RNA, 32 nt, Homo Sapiens
agcacccaggacuuccauuugcuuugucccgg

SEQ ID NO: 328961 - RNA, 32 nt, Homo Sapiens
gacagguuugguuuuuuaaaaaucucaugugu

SEQ ID NO: 328962 - RNA, 32 nt, Homo Sapiens
gucaccucuggaaaauacauucugcuacucuu

SEQ ID NO: 328963 - RNA, 32 nt, Homo Sapiens
acaauagaauacuguuaccaaauucuuccuaa

SEQ ID NO: 328964 - RNA, 32 nt, Homo Sapiens
gccaccugguuuuaggacuggcacucuauaaa

SEQ ID NO: 328965 - RNA, 32 nt, Homo Sapiens
gagauccaggccucccaccucagacucauaag

SEQ ID NO: 328966 - RNA, 32 nt, Homo Sapiens
uggggugguggcggccccugaggcagaccagg

SEQ ID NO: 328967 - RNA, 32 nt, Homo Sapiens
ugaaggguugagaacagacagcuguaacuuug

SEQ ID NO: 328968 - RNA, 32 nt, Homo Sapiens
ccaccacccagauguugaaaagaaaccuuucu

SEQ ID NO: 328969 - RNA, 32 nt, Homo Sapiens
uuuggcccgguucuuucaguguuccguuuacc

SEQ ID NO: 328970 - RNA, 32 nt, Homo Sapiens
gagacuccgggcuugagcccaggccucccgca

SEQ ID NO: 328971 - RNA, 32 nt, Homo Sapiens
aggugaggcaggucuggugagcacggagaggc

SEQ ID NO: 328972 - RNA, 32 nt, Homo Sapiens
ugaggccccagguguccucccucccccacugu

SEQ ID NO: 328973 - RNA, 32 nt, Homo Sapiens
uuugccucaaguaaucuuuacaguguuacaaa

SEQ ID NO: 328974 - RNA, 32 nt, Homo Sapiens
agccgaggcuacugccaaucacgcggcucccu

SEQ ID NO: 328975 - RNA, 32 nt, Homo Sapiens
caggaaguggugagacaaagggcgcuggcugg

SEQ ID NO: 328976 - RNA, 32 nt, Homo Sapiens
accaaaggagaaggguaggcgagggguucgga

SEQ ID NO: 328977 - RNA, 32 nt, Homo Sapiens
gaguuaagaacaaacgcaaggaaauaauuuuu

SEQ ID NO: 328978 - RNA, 32 nt, Homo Sapiens
agaguccagggagagugcgcgggcggccgccg

SEQ ID NO: 328979 - RNA, 32 nt, Homo Sapiens
agugucuacuuugagcuagauaaauaaaggcc

SEQ ID NO: 328980 - RNA, 32 nt, Homo Sapiens
auuauuuuuguuucucuuugcagagagccaaa

SEQ ID NO: 328981 - RNA, 32 nt, Homo Sapiens
gcgcgccgcggagggggugcugggccgcgcug

SEQ ID NO: 328982 - RNA, 32 nt, Homo Sapiens
cggagccggccgcggacggggcccggagcuug

SEQ ID NO: 328983 - RNA, 32 nt, Homo Sapiens
cuccguccgcaccgaaggcgggcccggagugg

SEQ ID NO: 328984 - RNA, 32 nt, Homo Sapiens
gguagccuggcuuuucuggcuggggauggccg

SEQ ID NO: 328985 - RNA, 32 nt, Homo Sapiens
acaaaacaaaacaaaauuagcugagcauggug

SEQ ID NO: 328986 - RNA, 32 nt, Homo Sapiens
ccccugacuucugcccgggguguugaccucgc

SEQ ID NO: 328987 - RNA, 32 nt, Homo Sapiens
ggugggaaaagguaugguccaauauaaaaguu

SEQ ID NO: 328988 - RNA, 32 nt, Homo Sapiens
uuaaaaaugguuagaaccuuauagaaauuacu

SEQ ID NO: 328989 - RNA, 32 nt, Homo Sapiens
aaaaaagaauaaaaaguagcaguaaaauuaua

SEQ ID NO: 328990 - RNA, 32 nt, Homo Sapiens
ccugugcagcugaagcgcuuuguguguagcgg

SEQ ID NO: 328991 - RNA, 32 nt, Homo Sapiens
aaguauacaguuuuugucauuguuuaagaaag

SEQ ID NO: 328992 - RNA, 32 nt, Homo Sapiens
gagggccuuguaccgggaugugauguuggaga

SEQ ID NO: 328993 - RNA, 32 nt, Homo Sapiens
ccuugcaccuccucgggccucgccugccaguu

SEQ ID NO: 328994 - RNA, 32 nt, Homo Sapiens
uuuucuuuucuuucaacuugcauccaacucca

SEQ ID NO: 328995 - RNA, 32 nt, Homo Sapiens
uggguuggaaagggcuucuuugcagucuacga

SEQ ID NO: 328996 - RNA, 32 nt, Homo Sapiens
ugccuuguugucugcuggggggccauagcugg

SEQ ID NO: 328997 - RNA, 32 nt, Homo Sapiens
uaggccaucucuagguuacaagaugauaggag

SEQ ID NO: 328998 - RNA, 32 nt, Homo Sapiens
ccagagcccuagagaccccucaccaacuacuu

SEQ ID NO: 328999 - RNA, 32 nt, Homo Sapiens
uguggcccaagcaggugacaggaagagauggg

SEQ ID NO: 329000 - RNA, 32 nt, Homo Sapiens
gguaauuccuaagaaggaaaacaaagauggac

SEQ ID NO: 329001 - RNA, 32 nt, Homo Sapiens
gauuaauccacuauuauauaaacaauaguggg

SEQ ID NO: 329002 - RNA, 32 nt, Homo Sapiens
augaaaauauaaaauuaaucauuucucaccaa

SEQ ID NO: 329003 - RNA, 30 nt, Homo Sapiens
guagccccugcucgcuguccuugcucucag

SEQ ID NO: 329004 - RNA, 32 nt, Homo Sapiens
agccuccccucccccagggccccacccagugu

SEQ ID NO: 329005 - RNA, 32 nt, Homo Sapiens
cucccuguugaguauggaaugucccaguuuaa

SEQ ID NO: 329006 - RNA, 32 nt, Homo Sapiens
auuugacauaucuuccauuucaaauucuucca

SEQ ID NO: 329007 - RNA, 32 nt, Homo Sapiens
gaauaguugcuuaauuuugauuuuuaauggaa

SEQ ID NO: 329008 - RNA, 32 nt, Homo Sapiens
agggaaaauaaggccagaaacuucugagcaga

SEQ ID NO: 329009 - RNA, 32 nt, Homo Sapiens
gggggcgccgugugagcgcccccucccacggc

SEQ ID NO: 329010 - RNA, 32 nt, Homo Sapiens
ggauugugaagguguggaaauaaaccuacuga

SEQ ID NO: 329011 - RNA, 32 nt, Homo Sapiens
ugguagagaagauggcacaggauggaggcgcc

SEQ ID NO: 329012 - RNA, 32 nt, Homo Sapiens
ucccacucccccuugaccccaggccccugcuu

SEQ ID NO: 329013 - RNA, 31 nt, Homo Sapiens
agcaccauggacccccgcuuguccacugucc

SEQ ID NO: 329014 - RNA, 32 nt, Homo Sapiens
gagcgcgagcccgcggguggcgcgcggcgcau

SEQ ID NO: 329015 - RNA, 29 nt, Homo Sapiens
guauuauaaaguuugagauguugaucuaa

SEQ ID NO: 329016 - RNA, 32 nt, Homo Sapiens
ccuggacucgccucuacccagcagacccugac

SEQ ID NO: 329017 - RNA, 32 nt, Homo Sapiens
guacagagaaggaaugucuuugguccucucgc

SEQ ID NO: 329018 - RNA, 32 nt, Homo Sapiens
uaucugcccagagcuucccuggacugcaggaa

SEQ ID NO: 329019 - RNA, 32 nt, Homo Sapiens
uuguuaaggaauggcugaugacugcuacacgu

SEQ ID NO: 329020 - RNA, 32 nt, Homo Sapiens
cugccaccaauauguaucuucauacacguuug

SEQ ID NO: 329021 - RNA, 32 nt, Homo Sapiens
gcgccaacaccugucaacucugcgcgcuccca

SEQ ID NO: 329022 - RNA, 32 nt, Homo Sapiens
aauacauucagauuugaaauggucaauuguuc

SEQ ID NO: 329023 - RNA, 32 nt, Homo Sapiens
ccugcuccuaugcgguacuugaaggauggcga

SEQ ID NO: 329024 - RNA, 32 nt, Homo Sapiens
uuuguggacagaggcaggaucaugcuggcuag

SEQ ID NO: 329025 - RNA, 32 nt, Homo Sapiens
aauacaaaaaucagccgggucucauggcaggc

SEQ ID NO: 329026 - RNA, 32 nt, Homo Sapiens
acaguagacaaaugcagcagcaagucaauugu

SEQ ID NO: 329027 - RNA, 32 nt, Homo Sapiens
gcgcuacuccgccgugcuggaugccgugaucu

SEQ ID NO: 329028 - RNA, 32 nt, Homo Sapiens
ccugugaagucaauacagagaccuccaggcga

SEQ ID NO: 329029 - RNA, 32 nt, Homo Sapiens
gcuggaacagaggggauucaaccacaggaauu

SEQ ID NO: 329030 - RNA, 32 nt, Homo Sapiens
guaaauauuuugauacaaauguuuauaacucu

SEQ ID NO: 329031 - RNA, 32 nt, Homo Sapiens
gcuggcggcggcagcggcggugacggcugcgg

SEQ ID NO: 329032 - RNA, 32 nt, Homo Sapiens
caaagaguggaguauggaaagggaaacauagu

SEQ ID NO: 329033 - RNA, 32 nt, Homo Sapiens
gguuccggggacccggccgccagugcccgggg

SEQ ID NO: 329034 - RNA, 32 nt, Homo Sapiens
acauugguuuugagaggugaugcaaaaaguau

SEQ ID NO: 329035 - RNA, 32 nt, Homo Sapiens
cggggucaccagcagagugcccgcuggcaggu

SEQ ID NO: 329036 - RNA, 32 nt, Homo Sapiens
aggcugaucuucugccauaaucucaaacagcc

SEQ ID NO: 329037 - RNA, 32 nt, Homo Sapiens
cacuuuacagaagagggacugaggcucugagg

SEQ ID NO: 329038 - RNA, 32 nt, Homo Sapiens
augaccuugcagaaccaccgcauuccacccug

SEQ ID NO: 329039 - RNA, 32 nt, Homo Sapiens
aggggugagaagcauaaaugugcguguguuuc

SEQ ID NO: 329040 - RNA, 32 nt, Homo Sapiens
gcuauuuuugucuuguacuacuuugacccacc

SEQ ID NO: 329041 - RNA, 32 nt, Homo Sapiens
ccgaagccccgggaaccauccgcccucgggag

SEQ ID NO: 329042 - RNA, 32 nt, Homo Sapiens
uccuggaacacuuuagaggcuugugauucuac

SEQ ID NO: 329043 - RNA, 32 nt, Homo Sapiens
ggacccuuggcugaggucauagguggggacuc

SEQ ID NO: 329044 - RNA, 32 nt, Homo Sapiens
ggacccuaccccacccucuuugaaaagacaaa

SEQ ID NO: 329045 - RNA, 32 nt, Homo Sapiens
uuacuucuaccuuuaaaauuuaccacagacua

SEQ ID NO: 329046 - RNA, 32 nt, Homo Sapiens
caaggguuauuagaaagugcugaauuuacagu

SEQ ID NO: 329047 - RNA, 29 nt, Homo Sapiens
agguggucgguccggcagcagcccggccc

SEQ ID NO: 329048 - RNA, 32 nt, Homo Sapiens
aacacuaauauacguauuuagcaccucugagg

SEQ ID NO: 329049 - RNA, 32 nt, Homo Sapiens
aggggaacaccaagcagagcucuggccgagag

SEQ ID NO: 329050 - RNA, 32 nt, Homo Sapiens
gagacauuugaaaauauccauuaaugugaaua

SEQ ID NO: 329051 - RNA, 32 nt, Homo Sapiens
cccaagaacaggagagccauggccggccuccg

SEQ ID NO: 329052 - RNA, 32 nt, Homo Sapiens
ccagaggaaugggcuggaaccggaucuguuuc

SEQ ID NO: 329053 - RNA, 32 nt, Homo Sapiens
gaguguggggguggaggugaugggacaaagau

SEQ ID NO: 329054 - RNA, 32 nt, Homo Sapiens
agguucuuggagagauucugggagccaaacac

SEQ ID NO: 329055 - RNA, 32 nt, Homo Sapiens
cuggguucugccuccgccucgcccuuccagcc

SEQ ID NO: 329056 - RNA, 32 nt, Homo Sapiens
ugcagugguuccucccucuccugaauccuuuu

SEQ ID NO: 329057 - RNA, 32 nt, Homo Sapiens
gacagagauggguggaggggcuggggaaaggc

SEQ ID NO: 329058 - RNA, 32 nt, Homo Sapiens
cugggcguaguggcgcacaccugcaaucccaa

SEQ ID NO: 329059 - RNA, 32 nt, Homo Sapiens
gacagaaggguucauauaaacaguauccugac

SEQ ID NO: 329060 - RNA, 32 nt, Homo Sapiens
ggguuuucuuugcaugagaguuguauguaacc

SEQ ID NO: 329061 - RNA, 32 nt, Homo Sapiens
ugagcugcucccccugaccccuggcaggagcc

SEQ ID NO: 329062 - RNA, 32 nt, Homo Sapiens
gcccccucggaaccaggcucugcuccgagcag

SEQ ID NO: 329063 - RNA, 32 nt, Homo Sapiens
uauaaagaaugugacaaagcuuuuuaaggaag

SEQ ID NO: 329064 - RNA, 30 nt, Homo Sapiens
uuugcugucugugugcugaagcucgucccg

SEQ ID NO: 329065 - RNA, 32 nt, Homo Sapiens
auacuagagauuaggccaggcacagugacuca

SEQ ID NO: 329066 - RNA, 32 nt, Homo Sapiens
ggacuugaaugggacuuggcuggccucaggau

SEQ ID NO: 329067 - RNA, 32 nt, Homo Sapiens
ccagggagggugggaaacuggggugaugugag

SEQ ID NO: 329068 - RNA, 32 nt, Homo Sapiens
caaaaauauguuccgagugcaaugcccacuga

SEQ ID NO: 329069 - RNA, 32 nt, Homo Sapiens
uguugcuuuuaaaauguggaguagcuguaauc

SEQ ID NO: 329070 - RNA, 29 nt, Homo Sapiens
cuauuuauuguuccaaaccacaaauauga

SEQ ID NO: 329071 - RNA, 32 nt, Homo Sapiens
gggaaggagcagggccugcugcuucccuggcg

SEQ ID NO: 329072 - RNA, 32 nt, Homo Sapiens
uuuuccccaaaguacaggacugucccagagua

SEQ ID NO: 329073 - RNA, 32 nt, Homo Sapiens
ccugggguggcucagggcuggaacugcugccu

SEQ ID NO: 329074 - RNA, 32 nt, Homo Sapiens
gaaugcaucauguaguaaaggcaaauacuguu

SEQ ID NO: 329075 - RNA, 32 nt, Homo Sapiens
agauggagaagcugaaacuggggagcugcacc

SEQ ID NO: 329076 - RNA, 32 nt, Homo Sapiens
cuuccccaacuucucucgggcucuuugcucau

SEQ ID NO: 329077 - RNA, 32 nt, Homo Sapiens
auucacaugauuucuauguuucuuaaugauau

SEQ ID NO: 329078 - RNA, 32 nt, Homo Sapiens
cuaauacuaggauucuugcuuaaguaugugaa

SEQ ID NO: 329079 - RNA, 32 nt, Homo Sapiens
caaaacugucaagguaggccgagaaaaguaaa

SEQ ID NO: 329080 - RNA, 32 nt, Homo Sapiens
ugcaaaagcacguaucucucagaucucccuuc

SEQ ID NO: 329081 - RNA, 32 nt, Homo Sapiens
gaguucuauccccaagcuggccacuaucacau

SEQ ID NO: 329082 - RNA, 32 nt, Homo Sapiens
acguaccccucgcgggcccagccgagcaacgu

SEQ ID NO: 329083 - RNA, 32 nt, Homo Sapiens
uaggauuuuuaaaugcuggugaucacuuaaaa

SEQ ID NO: 329084 - RNA, 32 nt, Homo Sapiens
guguucauuuuucuuuugauuuaaaggauuag

SEQ ID NO: 329085 - RNA, 32 nt, Homo Sapiens
aagaauguggggccuuuuuuaugauuuuguaa

SEQ ID NO: 329086 - RNA, 32 nt, Homo Sapiens
augaaaggaugcaugucuccacuuccugaccc

SEQ ID NO: 329087 - RNA, 32 nt, Homo Sapiens
ucagaccugcuccucaguaauaauacuagcua

SEQ ID NO: 329088 - RNA, 31 nt, Homo Sapiens
uuucucucacggaaggugauacuccuuugca

SEQ ID NO: 329089 - RNA, 31 nt, Homo Sapiens
agaagcauccaggcugcaggaguacaggucg

SEQ ID NO: 329090 - RNA, 32 nt, Homo Sapiens
uucauggccuugaguucaccuuggcuguccua

SEQ ID NO: 329091 - RNA, 32 nt, Homo Sapiens
ugaagggauuuuagucacacguggucuuucuu

SEQ ID NO: 329092 - RNA, 32 nt, Homo Sapiens
aacugcuaaaagacaaaaaagaccucacccuu

SEQ ID NO: 329093 - RNA, 32 nt, Homo Sapiens
acauauuguucccuccaugggcuuaagagaag

SEQ ID NO: 329094 - RNA, 32 nt, Homo Sapiens
ccagcccgagacgggcgggcgcgcgggccaau

SEQ ID NO: 329095 - RNA, 32 nt, Homo Sapiens
agcggggcacugggcugcaaugggccuaggcc

SEQ ID NO: 329096 - RNA, 32 nt, Homo Sapiens
gggccgcgucucuggagcagcagacccguguc

SEQ ID NO: 329097 - RNA, 32 nt, Homo Sapiens
uuucggaucugugguuccuuugaaagccagaa

SEQ ID NO: 329098 - RNA, 32 nt, Homo Sapiens
ggguaggugggggccgggagggacccaggugu

SEQ ID NO: 329099 - RNA, 32 nt, Homo Sapiens
uauuauauauauggcacauugccguuacuuuu

SEQ ID NO: 329100 - RNA, 32 nt, Homo Sapiens
ugucugccacuccagagcugggggcuaaaagg

SEQ ID NO: 329101 - RNA, 32 nt, Homo Sapiens
gucguggguccuccucugucccuucauugcau

SEQ ID NO: 329102 - RNA, 32 nt, Homo Sapiens
cuccuucccccgcucccccaaaaauuugaauu

SEQ ID NO: 329103 - RNA, 32 nt, Homo Sapiens
ccggccgcggcgugaugcgcgcggaccagccc

SEQ ID NO: 329104 - RNA, 32 nt, Homo Sapiens
uauaccacaguuuauuucucccuucauccuuu

SEQ ID NO: 329105 - RNA, 32 nt, Homo Sapiens
uuccugaggaagaaauggggcaaugugggagg

SEQ ID NO: 329106 - RNA, 32 nt, Homo Sapiens
uaauuuacagcuuucaugauuagcaaguuaca

SEQ ID NO: 329107 - RNA, 32 nt, Homo Sapiens
cacaagucucaucagagaaaccccguucacca

SEQ ID NO: 329108 - RNA, 28 nt, Homo Sapiens
ugaccuuugucuaauaggaguuuuaagu

SEQ ID NO: 329109 - RNA, 32 nt, Homo Sapiens
agcaaugcagugccugcugcccgugugcauga

SEQ ID NO: 329110 - RNA, 32 nt, Homo Sapiens
ugcuguugaagaaauaaaugguauguugcugc

SEQ ID NO: 329111 - RNA, 32 nt, Homo Sapiens
gaaucagaauuugaaaaaagaagaaaaacaaa

SEQ ID NO: 329112 - RNA, 32 nt, Homo Sapiens
uguugaaagucguauauuuuuaucugugcggu

SEQ ID NO: 329113 - RNA, 32 nt, Homo Sapiens
guagauggaaaacaauuuaaccuauuuugaag

SEQ ID NO: 329114 - RNA, 32 nt, Homo Sapiens
cacacauauacacaaaaucaacauggggaugg

SEQ ID NO: 329115 - RNA, 32 nt, Homo Sapiens
aacauuccacaugccaagaggaugcaggauuu

SEQ ID NO: 329116 - RNA, 32 nt, Homo Sapiens
guguaaagaaggauugaaaauaaaauugcacu

SEQ ID NO: 329117 - RNA, 32 nt, Homo Sapiens
uguucauauaaaacacuaguaaaauaggcuuc

SEQ ID NO: 329118 - RNA, 32 nt, Homo Sapiens
ucacuagucuuacuucugcuuaauuuuaugag

SEQ ID NO: 329119 - RNA, 32 nt, Homo Sapiens
gaaccuggggucugaagaucacgaaaacagcg

SEQ ID NO: 329120 - RNA, 32 nt, Homo Sapiens
gcugcgcaggguggagggaguggccagcggcc

SEQ ID NO: 329121 - RNA, 32 nt, Homo Sapiens
agugaaauccggagaggagcaacgccagccug

SEQ ID NO: 329122 - RNA, 32 nt, Homo Sapiens
cgaaugugcuuugcuuuuuuugauuaaaaaga

SEQ ID NO: 329123 - RNA, 32 nt, Homo Sapiens
cugcugucaaacaaacaaaaccuugcaaagcg

SEQ ID NO: 329124 - RNA, 32 nt, Homo Sapiens
ggcucacagaccccggccucggagcccgucug

SEQ ID NO: 329125 - RNA, 32 nt, Homo Sapiens
uggucagggaggugacccguggucagcagggu

SEQ ID NO: 329126 - RNA, 32 nt, Homo Sapiens
ugggggucaggaacacuacacugcacaggaag

SEQ ID NO: 329127 - RNA, 32 nt, Homo Sapiens
aaacuccugagcucaggccaucugcccgccuc

SEQ ID NO: 329128 - RNA, 32 nt, Homo Sapiens
uugaggucagggguuugagaccagccugacca

SEQ ID NO: 329129 - RNA, 32 nt, Homo Sapiens
gugacuuugucaugggggugccccuguuacac

SEQ ID NO: 329130 - RNA, 32 nt, Homo Sapiens
caucucccauucuccaucccccacgaccuaua

SEQ ID NO: 329131 - RNA, 32 nt, Homo Sapiens
gaucuuccaguuugaagucuuccuccucugug

SEQ ID NO: 329132 - RNA, 32 nt, Homo Sapiens
aagcacacggagcccaauaagaugcugaaaag

SEQ ID NO: 329133 - RNA, 32 nt, Homo Sapiens
uccggauauguccccaccugacccgguggcaa

SEQ ID NO: 329134 - RNA, 32 nt, Homo Sapiens
ucaccucacugacuguugggaaaagcuaagcu

SEQ ID NO: 329135 - RNA, 32 nt, Homo Sapiens
cuucccaucccugcugccuggaugcuccugau

SEQ ID NO: 329136 - RNA, 32 nt, Homo Sapiens
gcccuccugugcucagcccugaggacagaugc

SEQ ID NO: 329137 - RNA, 32 nt, Homo Sapiens
aaacuauuuggcaaagauuuguuuuuaaaaau

SEQ ID NO: 329138 - RNA, 28 nt, Homo Sapiens
cuggcuguggcuaccagcauccuggccc

SEQ ID NO: 329139 - RNA, 32 nt, Homo Sapiens
gugccaucuucagcuccaguggcuuuagcagu

SEQ ID NO: 329140 - RNA, 32 nt, Homo Sapiens
cguguccgccgggaauuguuggcuguugggga

SEQ ID NO: 329141 - RNA, 32 nt, Homo Sapiens
aaggccucucgaacagagagccgggagucggu

SEQ ID NO: 329142 - RNA, 32 nt, Homo Sapiens
ucauguaauagugucuuggagaaugaggacuu

SEQ ID NO: 329143 - RNA, 32 nt, Homo Sapiens
caaaaccacaacuguguauauuuuaaagcaca

SEQ ID NO: 329144 - RNA, 32 nt, Homo Sapiens
uucaaauauuugugacugaauguacggugaaa

SEQ ID NO: 329145 - RNA, 32 nt, Homo Sapiens
agaguguccaggggcuuggagagaccugcgcc

SEQ ID NO: 329146 - RNA, 32 nt, Homo Sapiens
guucuuaaagggccagccgccggcugccgcgc

SEQ ID NO: 329147 - RNA, 32 nt, Homo Sapiens
cauggauggauuacaaaagacagcaauaggaa

SEQ ID NO: 329148 - RNA, 32 nt, Homo Sapiens
cuugugaauacgaauaaaugggauaaagaaaa

SEQ ID NO: 329149 - RNA, 32 nt, Homo Sapiens
uuaccaacuaagcagcuuuugcucuuaguacu

SEQ ID NO: 329150 - RNA, 32 nt, Homo Sapiens
cagguagaacagaacucacaaaauagcagggg

SEQ ID NO: 329151 - RNA, 32 nt, Homo Sapiens
cccugcacgccacccacuaucccggcacgcuc

SEQ ID NO: 329152 - RNA, 32 nt, Homo Sapiens
uaaguuucaaggagacuaucaggauuauuauu

SEQ ID NO: 329153 - RNA, 32 nt, Homo Sapiens
gaaaacagcuuauaaauccaaauaucaauuua

SEQ ID NO: 329154 - RNA, 32 nt, Homo Sapiens
cucuacugcuuaugaagauuaaggguaguauu

SEQ ID NO: 329155 - RNA, 32 nt, Homo Sapiens
aguugaucucuccaugucaccaaaucaaaaca

SEQ ID NO: 329156 - RNA, 32 nt, Homo Sapiens
cagagauuuacccaucggguaagaugcuccug

SEQ ID NO: 329157 - RNA, 32 nt, Homo Sapiens
ccuuuggccccauugggcccucgucugccucu

SEQ ID NO: 329158 - RNA, 28 nt, Homo Sapiens
guuggggaagggaaacauuuggguugau

SEQ ID NO: 329159 - RNA, 32 nt, Homo Sapiens
gcuuugaagucucuuuggccaaugaaaaugcc

SEQ ID NO: 329160 - RNA, 32 nt, Homo Sapiens
gccccgacccccaccccaagccucuccacuag

SEQ ID NO: 329161 - RNA, 32 nt, Homo Sapiens
aacagacaccgggcuauagacacucauccuuu

SEQ ID NO: 329162 - RNA, 32 nt, Homo Sapiens
gacagcuagcuaaauguagagcaccauuuuuc

SEQ ID NO: 329163 - RNA, 32 nt, Homo Sapiens
uuuuagcucagguccgacuuacagugggucca

SEQ ID NO: 329164 - RNA, 32 nt, Homo Sapiens
agcggccccuccccuccccuccccccucccac

SEQ ID NO: 329165 - RNA, 32 nt, Homo Sapiens
gucagggguucgagaccagucuggccaacauc

SEQ ID NO: 329166 - RNA, 32 nt, Homo Sapiens
ucuugaggaugucaccaauuaaccagaaaucc

SEQ ID NO: 329167 - RNA, 32 nt, Homo Sapiens
uugaggagcauuaagguauuucgaaacugcca

SEQ ID NO: 329168 - RNA, 32 nt, Homo Sapiens
guauuuauugaaaaaaggaaauuaaaucagua

SEQ ID NO: 329169 - RNA, 32 nt, Homo Sapiens
ccagaauuaggguaauggaagauggaaagaag

SEQ ID NO: 329170 - RNA, 32 nt, Homo Sapiens
aagacacaaggugauuucagacugcagagggg

SEQ ID NO: 329171 - RNA, 32 nt, Homo Sapiens
aaaaguuagccgggcgugguggcaugcgugua

SEQ ID NO: 329172 - RNA, 32 nt, Homo Sapiens
cagaugaguaguaaauguugauauauccugua

SEQ ID NO: 329173 - RNA, 32 nt, Homo Sapiens
aauacaaaaaucacccgggugugguggcaggc

SEQ ID NO: 329174 - RNA, 32 nt, Homo Sapiens
gaagaggcacuagccauuuuaaggagaggaaa

SEQ ID NO: 329175 - RNA, 32 nt, Homo Sapiens
gaggccacaguuguagcaggcgcuaggcccgg

SEQ ID NO: 329176 - RNA, 32 nt, Homo Sapiens
uuuuaccuggaaauuuguggugugguuuaaaa

SEQ ID NO: 329177 - RNA, 32 nt, Homo Sapiens
cuuuccugucauuucuaacuuaccacaugcuu

SEQ ID NO: 329178 - RNA, 32 nt, Homo Sapiens
uaaaauagaucaaugaauauaauucagucuuu

SEQ ID NO: 329179 - RNA, 32 nt, Homo Sapiens
ugugccuggagcaucauguccaccccugcaga

SEQ ID NO: 329180 - RNA, 31 nt, Homo Sapiens
ggcccagcaacuggagaaggaguccauggug

SEQ ID NO: 329181 - RNA, 32 nt, Homo Sapiens
agacccagcgccccuccucccugagggagcau

SEQ ID NO: 329182 - RNA, 32 nt, Homo Sapiens
cucuggccagugcaugcugagcacgugaccua

SEQ ID NO: 329183 - RNA, 32 nt, Homo Sapiens
uuauuuccaaauagaauggacuuggucuguua

SEQ ID NO: 329184 - RNA, 32 nt, Homo Sapiens
cgcccccagagccuguccccagcccuucggaa

SEQ ID NO: 329185 - RNA, 32 nt, Homo Sapiens
auguacagauuuaaaaacaaaucuuguugcug

SEQ ID NO: 329186 - RNA, 32 nt, Homo Sapiens
uuuuuuuuucuuucuuuuuugggcccucauaa

SEQ ID NO: 329187 - RNA, 32 nt, Homo Sapiens
gaguccaccaaaagcccagucuuuacaaguga

SEQ ID NO: 329188 - RNA, 32 nt, Homo Sapiens
cauuaauguccucauucaauuggcagaccuag

SEQ ID NO: 329189 - RNA, 32 nt, Homo Sapiens
cugcaaaaccucagcccugcaaagcaugcccc

SEQ ID NO: 329190 - RNA, 32 nt, Homo Sapiens
cagccgcucccucgcucugcuggggccuccgg

SEQ ID NO: 329191 - RNA, 32 nt, Homo Sapiens
cuccccagaugcccggcccacgagaggccaau

SEQ ID NO: 329192 - RNA, 32 nt, Homo Sapiens
cacuuuuauuuuuucuaaauguagugaaaugu

SEQ ID NO: 329193 - RNA, 32 nt, Homo Sapiens
ucagcuguauaaauacagaauguauugauaua

SEQ ID NO: 329194 - RNA, 32 nt, Homo Sapiens
cugguuagggcaggugguccuagacagcaguu

SEQ ID NO: 329195 - RNA, 32 nt, Homo Sapiens
cccucccccuccccccgcgcucccaacgugug

SEQ ID NO: 329196 - RNA, 32 nt, Homo Sapiens
guauucugauaaaaucucuugaaaauacugaa

SEQ ID NO: 329197 - RNA, 32 nt, Homo Sapiens
ggagggcguggcacggcugcugcgcggguaag

SEQ ID NO: 329198 - RNA, 32 nt, Homo Sapiens
ugccacugccuugcucugggccuguggugcuc

SEQ ID NO: 329199 - RNA, 32 nt, Homo Sapiens
cacagcggccucagccacuucuagcacaacca

SEQ ID NO: 329200 - RNA, 32 nt, Homo Sapiens
gcuacugaguuuaguucucaguuuggcaccuu

SEQ ID NO: 329201 - RNA, 32 nt, Homo Sapiens
gcuaccccgagacccaggaggcgcucugcccg

SEQ ID NO: 329202 - RNA, 31 nt, Homo Sapiens
augauagugccagcucucagagcuguugucu

SEQ ID NO: 329203 - RNA, 32 nt, Homo Sapiens
uaagugguacuauuuccauuuagccuuugagc

SEQ ID NO: 329204 - RNA, 32 nt, Homo Sapiens
gagugcauugcuuuaguacccgggccaguuga

SEQ ID NO: 329205 - RNA, 32 nt, Homo Sapiens
uccuccaggguugcaccagguuuaccuaaagc

SEQ ID NO: 329206 - RNA, 32 nt, Homo Sapiens
uuagcauugaguuuugaaagaugaguaggagu

SEQ ID NO: 329207 - RNA, 32 nt, Homo Sapiens
acccagguuccacuuauuacuuugccacguac

SEQ ID NO: 329208 - RNA, 32 nt, Homo Sapiens
ucaaagaaaaggaaaucuacuggacaaauagc

SEQ ID NO: 329209 - RNA, 32 nt, Homo Sapiens
uagcaauaaaaauuauucuguuucuuuaaaaa

SEQ ID NO: 329210 - RNA, 32 nt, Homo Sapiens
ggagcagcgcagcgcgcgacugacacccaccu

SEQ ID NO: 329211 - RNA, 32 nt, Homo Sapiens
cucuguaggccuccucccuccuccccacgccu

SEQ ID NO: 329212 - RNA, 32 nt, Homo Sapiens
acgaggcggaggaggcgaggagcgccggguac

SEQ ID NO: 329213 - RNA, 32 nt, Homo Sapiens
aauuccagauuuuuuucuuuuuuacuuuuuuu

SEQ ID NO: 329214 - RNA, 32 nt, Homo Sapiens
cggccgccgcggcaccauggcuguguuugucg

SEQ ID NO: 329215 - RNA, 32 nt, Homo Sapiens
uccccuuuguguuuagaaaugaguuaaccagg

SEQ ID NO: 329216 - RNA, 32 nt, Homo Sapiens
cgugaucucugccgucaccgaucgcgauuccu

SEQ ID NO: 329217 - RNA, 32 nt, Homo Sapiens
ccuuccagcaggggggccccaggccgaagccu

SEQ ID NO: 329218 - RNA, 32 nt, Homo Sapiens
ucuuuucuggcuuguguuuuucugggacaguu

SEQ ID NO: 329219 - RNA, 32 nt, Homo Sapiens
caagcauggcgaugguaguuugaaagaauucu

SEQ ID NO: 329220 - RNA, 32 nt, Homo Sapiens
gggugcugcucccagacugugagcucguggcc

SEQ ID NO: 329221 - RNA, 32 nt, Homo Sapiens
auucauggaucaggcagcuccaaacuaaaagu

SEQ ID NO: 329222 - RNA, 32 nt, Homo Sapiens
auguacauuucccaacaaucuuuuuaaggcaa

SEQ ID NO: 329223 - RNA, 32 nt, Homo Sapiens
gcguuucgcucuuguugcccaggcuggagugc

SEQ ID NO: 329224 - RNA, 32 nt, Homo Sapiens
gguucaauuuaaaagaaaaauuaucuaagaag

SEQ ID NO: 329225 - RNA, 32 nt, Homo Sapiens
cauuuuauauuaaagaaauugagcuauccaua

SEQ ID NO: 329226 - RNA, 32 nt, Homo Sapiens
ucacaccuuugaaaaacaaauaaaaauguaaa

SEQ ID NO: 329227 - RNA, 32 nt, Homo Sapiens
aaagcuuauuuuuauucuugcacuggaagaau

SEQ ID NO: 329228 - RNA, 32 nt, Homo Sapiens
gaccugcggacuagcgaacccggagcacgaca

SEQ ID NO: 329229 - RNA, 32 nt, Homo Sapiens
cuuugugggugggugccagaguccucaugugg

SEQ ID NO: 329230 - RNA, 32 nt, Homo Sapiens
ugagucccccacacccaccccauccucggucu

SEQ ID NO: 329231 - RNA, 32 nt, Homo Sapiens
agcuugcgggcaaaauacgugcucuccucucu

SEQ ID NO: 329232 - RNA, 32 nt, Homo Sapiens
ugagaagcugaaugauacaugcaggggauauu

SEQ ID NO: 329233 - RNA, 32 nt, Homo Sapiens
gagaggugucauuuggaugugaggauaguuau

SEQ ID NO: 329234 - RNA, 32 nt, Homo Sapiens
gagccgcgucccgcacccggacggucccgagc

SEQ ID NO: 329235 - RNA, 32 nt, Homo Sapiens
ccaaggaagucuuuuaacuuuaauuuccauuu

SEQ ID NO: 329236 - RNA, 32 nt, Homo Sapiens
ucucuucuugcuuggcagcuggaccaagggag

SEQ ID NO: 329237 - RNA, 32 nt, Homo Sapiens
acccgcaccuguggcugugcaggugcguccgg

SEQ ID NO: 329238 - RNA, 32 nt, Homo Sapiens
acaagccgcauuccaagaaguaucugucgcgg

SEQ ID NO: 329239 - RNA, 32 nt, Homo Sapiens
aggcagacgcgccggaaccgggacgcgauaaa

SEQ ID NO: 329240 - RNA, 32 nt, Homo Sapiens
cuguagauaaucuugcguuuuucgucaucuua

SEQ ID NO: 329241 - RNA, 32 nt, Homo Sapiens
augcugccugaggguuuucagaauaggaggcu

SEQ ID NO: 329242 - RNA, 32 nt, Homo Sapiens
ggagccggagcugccgccagccgcccgccuca

SEQ ID NO: 329243 - RNA, 32 nt, Homo Sapiens
aaguuuaauguuucuaguucacauuuuguacu

SEQ ID NO: 329244 - RNA, 32 nt, Homo Sapiens
gggggacagacgggaaagggucugaaugcucu

SEQ ID NO: 329245 - RNA, 32 nt, Homo Sapiens
uucauugguuuauuuuucaaugcaucuuuaau

SEQ ID NO: 329246 - RNA, 32 nt, Homo Sapiens
gacagaaaauucccugacaggugggcaaguau

SEQ ID NO: 329247 - RNA, 32 nt, Homo Sapiens
ugcgccuccggcccggcccagcgaccuccucu

SEQ ID NO: 329248 - RNA, 32 nt, Homo Sapiens
gacaaauguuuaggacuucaagaucacacuug

SEQ ID NO: 329249 - RNA, 32 nt, Homo Sapiens
gauaugaaaugguguuugauacuguuugagac

SEQ ID NO: 329250 - RNA, 32 nt, Homo Sapiens
acagaugugagccaccacacacaccaucugau

SEQ ID NO: 329251 - RNA, 32 nt, Homo Sapiens
ggggcucugguguagaccauggaccaaaagaa

SEQ ID NO: 329252 - RNA, 32 nt, Homo Sapiens
caugcuagauuaucuuaacugggcuuuguaca

SEQ ID NO: 329253 - RNA, 32 nt, Homo Sapiens
gugcaauuguguauuucuuccuuaaaauguau

SEQ ID NO: 329254 - RNA, 32 nt, Homo Sapiens
auguuuggaugguuuguuguucugccuggaga

SEQ ID NO: 329255 - RNA, 32 nt, Homo Sapiens
auauaguaggcacaauuuuuuuuguaauucuc

SEQ ID NO: 329256 - RNA, 32 nt, Homo Sapiens
ccagagagggcuugaccaaaucaaauugaggu

SEQ ID NO: 329257 - RNA, 32 nt, Homo Sapiens
aguagacaagcuucauauaucuguaaagugaa

SEQ ID NO: 329258 - RNA, 32 nt, Homo Sapiens
cuguuuaacggcacacuugacaauggcuucag

SEQ ID NO: 329259 - RNA, 30 nt, Homo Sapiens
ggcaagggagguggaaaugcugacaaugag

SEQ ID NO: 329260 - RNA, 31 nt, Homo Sapiens
augaaagcauugagccaacccaugauauuuu

SEQ ID NO: 329261 - RNA, 32 nt, Homo Sapiens
ccagguaugugcucugcugccccccaccccca

SEQ ID NO: 329262 - RNA, 32 nt, Homo Sapiens
cuuuuucugggucccuucccacuuccuuccag

SEQ ID NO: 329263 - RNA, 32 nt, Homo Sapiens
auuuuuguuucaucaacuaagaugcacuguaa

SEQ ID NO: 329264 - RNA, 32 nt, Homo Sapiens
uaauaaggugaugucggaaacacgcaaaacaa

SEQ ID NO: 329265 - RNA, 32 nt, Homo Sapiens
cccgggccugggauuggcuggcgucguccgac

SEQ ID NO: 329266 - RNA, 32 nt, Homo Sapiens
cugcugggcuggcggggcgcaggccgcgggac

SEQ ID NO: 329267 - RNA, 32 nt, Homo Sapiens
cgcccaagggagccgggcugcagagcuggaga

SEQ ID NO: 329268 - RNA, 32 nt, Homo Sapiens
ggcgagcucaggugaugccggccaccagcaau

SEQ ID NO: 329269 - RNA, 32 nt, Homo Sapiens
cucuucucgcuccgcuuucgccccgcaucuuc

SEQ ID NO: 329270 - RNA, 32 nt, Homo Sapiens
ggaauauagaaagaacucuggauguggagaaa

SEQ ID NO: 329271 - RNA, 32 nt, Homo Sapiens
ggaguggaaaauugaaggacgguugccagucg

SEQ ID NO: 329272 - RNA, 32 nt, Homo Sapiens
uuggugggguggcaccuguuucccgggcaauu

SEQ ID NO: 329273 - RNA, 32 nt, Homo Sapiens
aggaggccgggcgagcccgguguucugaagac

SEQ ID NO: 329274 - RNA, 32 nt, Homo Sapiens
gauagggaggucggguagaggcucccgggacc

SEQ ID NO: 329275 - RNA, 32 nt, Homo Sapiens
caguggcuuccacuucugucuuauaguucugg

SEQ ID NO: 329276 - RNA, 32 nt, Homo Sapiens
gcuauauuuauuuuugauucauuugaauuacu

SEQ ID NO: 329277 - RNA, 32 nt, Homo Sapiens
uugaggcaagcuaaaaacuuaauuauacaugg

SEQ ID NO: 329278 - RNA, 32 nt, Homo Sapiens
acaccaaaguugucauggaugaacuuggccag

SEQ ID NO: 329279 - RNA, 32 nt, Homo Sapiens
augaacuugaagaguaagaauaaaaacuacca

SEQ ID NO: 329280 - RNA, 32 nt, Homo Sapiens
caacagccaaacugcuggggcugcaagcugcu

SEQ ID NO: 329281 - RNA, 32 nt, Homo Sapiens
cggugcugcugccgcugccgccggggaggagg

SEQ ID NO: 329282 - RNA, 32 nt, Homo Sapiens
uuuacauguguauacauacaaauguacacagu

SEQ ID NO: 329283 - RNA, 32 nt, Homo Sapiens
cugaggcggccgaccuucggcccgaggcaccg

SEQ ID NO: 329284 - RNA, 32 nt, Homo Sapiens
cugcacucugccguguccacacugccccacag

SEQ ID NO: 329285 - RNA, 32 nt, Homo Sapiens
cccucaguucccugccccuuucuuggaaaacu

SEQ ID NO: 329286 - RNA, 32 nt, Homo Sapiens
guaugugugaagaucccuggugcguggccuuc

SEQ ID NO: 329287 - RNA, 32 nt, Homo Sapiens
uccagcuaucaugggagaaccagguguagcuc

SEQ ID NO: 329288 - RNA, 32 nt, Homo Sapiens
uccugccaacugggaugacuggggagggccac

SEQ ID NO: 329289 - RNA, 32 nt, Homo Sapiens
ggccaggguaggugggggccgggagggaccca

SEQ ID NO: 329290 - RNA, 32 nt, Homo Sapiens
aaagaacauuagaguauagaucaugugaaaug

SEQ ID NO: 329291 - RNA, 32 nt, Homo Sapiens
uuucuuuaaaagacauaugggugggaugagaa

SEQ ID NO: 329292 - RNA, 32 nt, Homo Sapiens
accauuuuauuuuauuuuuuuauuuauuuauu

SEQ ID NO: 329293 - RNA, 32 nt, Homo Sapiens
gcuccugcagcagucccgugccccacacucug

SEQ ID NO: 329294 - RNA, 32 nt, Homo Sapiens
ugagggaaggagggacggcuccuccuugggug

SEQ ID NO: 329295 - RNA, 32 nt, Homo Sapiens
auaguggcaaaauaagauuuaguuguguuuuc

SEQ ID NO: 329296 - RNA, 32 nt, Homo Sapiens
aaauggcuuaauguaauauuggaaauagaucu

SEQ ID NO: 329297 - RNA, 32 nt, Homo Sapiens
guucagcugagaugcaaaaaagaaauuaagca

SEQ ID NO: 329298 - RNA, 32 nt, Homo Sapiens
gacuuguucuauuuauaaguauuuauuucuaa

SEQ ID NO: 329299 - RNA, 32 nt, Homo Sapiens
cgcggaaaggcagccagacuccuccuuaucuc

SEQ ID NO: 329300 - RNA, 32 nt, Homo Sapiens
auauuucucaucugcacuauguuuccauuugu

SEQ ID NO: 329301 - RNA, 32 nt, Homo Sapiens
cacagaggagaaugccggcaggggugggcagc

SEQ ID NO: 329302 - RNA, 31 nt, Homo Sapiens
cuuuuugaaagguuuuuuuuuauuguaacuu

SEQ ID NO: 329303 - RNA, 32 nt, Homo Sapiens
agguauccaccuuucugaaucagacacaagcu

SEQ ID NO: 329304 - RNA, 32 nt, Homo Sapiens
caucgagaucuggcagcccuggcaccggguac

SEQ ID NO: 329305 - RNA, 32 nt, Homo Sapiens
cacagaguuuuccugagaugacuguaacuuau

SEQ ID NO: 329306 - RNA, 32 nt, Homo Sapiens
uauguuucuacacauugcuaccucagugcucc

SEQ ID NO: 329307 - RNA, 32 nt, Homo Sapiens
ucgggacaagggggcgcaauaaagggaauggc

SEQ ID NO: 329308 - RNA, 32 nt, Homo Sapiens
auuuguuuuuguuauaagccauuugaauuuuu

SEQ ID NO: 329309 - RNA, 32 nt, Homo Sapiens
gcccacuccagaugaggugcuccguggaacac

SEQ ID NO: 329310 - RNA, 32 nt, Homo Sapiens
uauacuauuuuugguuuuuugugagaucuaau

SEQ ID NO: 329311 - RNA, 32 nt, Homo Sapiens
ugcccucuuuguagcagucaggcgcugaccca

SEQ ID NO: 329312 - RNA, 32 nt, Homo Sapiens
cggccuccgcggcgcgcagcuguuuucaaguc

SEQ ID NO: 329313 - RNA, 32 nt, Homo Sapiens
gugugucagggaugaguugaggugauauuuuu

SEQ ID NO: 329314 - RNA, 32 nt, Homo Sapiens
ugucaaagccaugcgaauaccaucuguucagu

SEQ ID NO: 329315 - RNA, 32 nt, Homo Sapiens
cuccagccucucagcccugugcuccuguaucc

SEQ ID NO: 329316 - RNA, 32 nt, Homo Sapiens
acgcugacuccgagcgcaccccgggccuuccc

SEQ ID NO: 329317 - RNA, 32 nt, Homo Sapiens
ugccgguaaucucagcacuuugggaggcucag

SEQ ID NO: 329318 - RNA, 32 nt, Homo Sapiens
aaugggugacgggccuuuuaaucuuucaggaa

SEQ ID NO: 329319 - RNA, 32 nt, Homo Sapiens
gcccaagaacuaagagcaccauugucagagag

SEQ ID NO: 329320 - RNA, 32 nt, Homo Sapiens
auagauuaaaaauuaaauuagcccauugaaau

SEQ ID NO: 329321 - RNA, 32 nt, Homo Sapiens
caaaaauggaauugauaaaccauuuuuuacaa

SEQ ID NO: 329322 - RNA, 32 nt, Homo Sapiens
uacucagaaguguauaggacuaugauacauug

SEQ ID NO: 329323 - RNA, 32 nt, Homo Sapiens
ggucuguguggcggcaugccccuggguugggg

SEQ ID NO: 329324 - RNA, 32 nt, Homo Sapiens
gcgcugcaaggcggcgaggcccgggccuggcg

SEQ ID NO: 329325 - RNA, 32 nt, Homo Sapiens
ccugcagccuccagccagagugcccucaugcc

SEQ ID NO: 329326 - RNA, 32 nt, Homo Sapiens
uaguuaaaugaaaucugcauauucuggaucau

SEQ ID NO: 329327 - RNA, 32 nt, Homo Sapiens
accauggaacgggagaccggagggauccaugg

SEQ ID NO: 329328 - RNA, 32 nt, Homo Sapiens
uaaaagaacuacaugcacuaaugaaagaagac

SEQ ID NO: 329329 - RNA, 32 nt, Homo Sapiens
agauuguccguuuauguuuauuuaaaugguuu

SEQ ID NO: 329330 - RNA, 32 nt, Homo Sapiens
aacacuauuuuuacauaacaguuucuuaaccu

SEQ ID NO: 329331 - RNA, 32 nt, Homo Sapiens
uuuugccuuuuaucuuuuuuuuuucuuucuuu

SEQ ID NO: 329332 - RNA, 32 nt, Homo Sapiens
cugccaggcagcugcuguggcuccaggaugau

SEQ ID NO: 329333 - RNA, 32 nt, Homo Sapiens
ggggagacucgcguccaaggccgcacgggaac

SEQ ID NO: 329334 - RNA, 32 nt, Homo Sapiens
gguauuuucaauagccacuaaccuugcuuggu

SEQ ID NO: 329335 - RNA, 32 nt, Homo Sapiens
acuugaauuugacacaagagaaaagcaggagg

SEQ ID NO: 329336 - RNA, 32 nt, Homo Sapiens
uguaguguaaagaaugaucacuuucuguaaca

SEQ ID NO: 329337 - RNA, 32 nt, Homo Sapiens
uaauagaaaauuauauuagaaaaacuauugug

SEQ ID NO: 329338 - RNA, 32 nt, Homo Sapiens
acauuuguagauuggauagcauuuuuaugauu

SEQ ID NO: 329339 - RNA, 32 nt, Homo Sapiens
cggcgagcgagcaccuucgacgcgguccgggg

SEQ ID NO: 329340 - RNA, 32 nt, Homo Sapiens
uuuaagaaaaaauaacacacauauaaacauca

SEQ ID NO: 329341 - RNA, 32 nt, Homo Sapiens
ggaauugaggacacugauaugggucuugauaa

SEQ ID NO: 329342 - RNA, 32 nt, Homo Sapiens
uuacuaaagggaggggaagaggccaggugggc

SEQ ID NO: 329343 - RNA, 32 nt, Homo Sapiens
ugauugcuauacauacucauuuuuaaauaauu

SEQ ID NO: 329344 - RNA, 32 nt, Homo Sapiens
cagcagcagaugcagcagcauguucagcucuu

SEQ ID NO: 329345 - RNA, 32 nt, Homo Sapiens
ugccuuuuuuuuucuuuuuuuacaucugauuu

SEQ ID NO: 329346 - RNA, 32 nt, Homo Sapiens
ggccuuaaaauauucuuucacaguagcuuucu

SEQ ID NO: 329347 - RNA, 32 nt, Homo Sapiens
gaucugagguucuauuugauuacuaagcaaaa

SEQ ID NO: 329348 - RNA, 32 nt, Homo Sapiens
ccucucugagccucaguuuccacacuucuaaa

SEQ ID NO: 329349 - RNA, 32 nt, Homo Sapiens
cgugcgcgcgucugcugggccagucgggacag

SEQ ID NO: 329350 - RNA, 32 nt, Homo Sapiens
aaaugcuucuauuuauagaaaucccaaagacc

SEQ ID NO: 329351 - RNA, 32 nt, Homo Sapiens
caauuuuuauuuugguuauauuacaaaaaugu

SEQ ID NO: 329352 - RNA, 32 nt, Homo Sapiens
gaaaaguacugaauagauuaauccaaaacacu

SEQ ID NO: 329353 - RNA, 32 nt, Homo Sapiens
gaugucacugucuggguuccagcccucccuca

SEQ ID NO: 329354 - RNA, 32 nt, Homo Sapiens
gauggcagcugcuaucugcagcuccuaggugc

SEQ ID NO: 329355 - RNA, 32 nt, Homo Sapiens
ccgggagacaauuuagggcugauguuaucugg

SEQ ID NO: 329356 - RNA, 32 nt, Homo Sapiens
uguggaccaaaggcuagguuguaaucuugaua

SEQ ID NO: 329357 - RNA, 32 nt, Homo Sapiens
gcucauccccauguguaaauguguccacacaa

SEQ ID NO: 329358 - RNA, 32 nt, Homo Sapiens
uuauauugauucaguccucugcauuccuuugu

SEQ ID NO: 329359 - RNA, 32 nt, Homo Sapiens
cacccagaguuagacauuguuuuuguagaaaa

SEQ ID NO: 329360 - RNA, 32 nt, Homo Sapiens
cgcucccgagcgcugcuuucccgccgcgggug

SEQ ID NO: 329361 - RNA, 32 nt, Homo Sapiens
guguucucugugucucucuuugugccucugga

SEQ ID NO: 329362 - RNA, 32 nt, Homo Sapiens
uuugugaaaaucaauugacccuaugauuuugg

SEQ ID NO: 329363 - RNA, 32 nt, Homo Sapiens
agacacgaaguggcuuagcugcucuugaaagc

SEQ ID NO: 329364 - RNA, 32 nt, Homo Sapiens
ccaaaaggaaacaaaauaaaaaugacccuuuu

SEQ ID NO: 329365 - RNA, 32 nt, Homo Sapiens
uuccaaacgugucaccccggcgccgacggccc

SEQ ID NO: 329366 - RNA, 32 nt, Homo Sapiens
uuuccgguauaucaccauuuauauaguccgag

SEQ ID NO: 329367 - RNA, 32 nt, Homo Sapiens
cccgagccugcugcgcgcccccucccagagcu

SEQ ID NO: 329368 - RNA, 32 nt, Homo Sapiens
aucuggacacugggagauucggagcgcaggga

SEQ ID NO: 329369 - RNA, 32 nt, Homo Sapiens
gcuccuggagggcaggagcuguguccuucuau

SEQ ID NO: 329370 - RNA, 32 nt, Homo Sapiens
cccuuugaaccaaguaucuagauccccugagg

SEQ ID NO: 329371 - RNA, 32 nt, Homo Sapiens
uccgggggaucgucgccuuggucccccgaccc

SEQ ID NO: 329372 - RNA, 32 nt, Homo Sapiens
gcuuagauuuuaggauccucccucucaaauac

SEQ ID NO: 329373 - RNA, 32 nt, Homo Sapiens
cgugccagcuccguggguguccucccagggag

SEQ ID NO: 329374 - RNA, 32 nt, Homo Sapiens
agcuagugauuucaaaagguuucacaauuccc

SEQ ID NO: 329375 - RNA, 32 nt, Homo Sapiens
auaaaacaaaacaaaauccuuacaucaagaau

SEQ ID NO: 329376 - RNA, 32 nt, Homo Sapiens
cagcagggguuauuauuaagcauucucuggau

SEQ ID NO: 329377 - RNA, 32 nt, Homo Sapiens
gagcggaacgaaacagaacagaggagacgcgg

SEQ ID NO: 329378 - RNA, 32 nt, Homo Sapiens
uuuauaaaugacucaacccuuuuccccacccc

SEQ ID NO: 329379 - RNA, 32 nt, Homo Sapiens
gcccucgaggccccggagggcugggguccgac

SEQ ID NO: 329380 - RNA, 32 nt, Homo Sapiens
ggagaugggggcgggggugguggugaagagag

SEQ ID NO: 329381 - RNA, 32 nt, Homo Sapiens
acuaaaaaggcacaagauuacacugaacauua

SEQ ID NO: 329382 - RNA, 32 nt, Homo Sapiens
cuaggcggcggcggccgggcgucccgggaugg

SEQ ID NO: 329383 - RNA, 32 nt, Homo Sapiens
gggcguggcagggcuguggcugacagggugcu

SEQ ID NO: 329384 - RNA, 32 nt, Homo Sapiens
acuucuauauauacaaugaguaaaaucacaga

SEQ ID NO: 329385 - RNA, 32 nt, Homo Sapiens
acgacagcaguggugaggaggaggaagaugcc

SEQ ID NO: 329386 - RNA, 32 nt, Homo Sapiens
ucuuuacggucgcauaguauaaaauuauaccc

SEQ ID NO: 329387 - RNA, 32 nt, Homo Sapiens
gcaucugaaaauaagugcuuggaguguucgua

SEQ ID NO: 329388 - RNA, 32 nt, Homo Sapiens
caggugagacggguucccccagcccagcccug

SEQ ID NO: 329389 - RNA, 32 nt, Homo Sapiens
caggaggaaugguuguggcccagcggucagug

SEQ ID NO: 329390 - RNA, 32 nt, Homo Sapiens
auaaaagaaaauaauucuuacaucaucuuuug

SEQ ID NO: 329391 - RNA, 32 nt, Homo Sapiens
acaggaacucugcagggcucucccagagggaa

SEQ ID NO: 329392 - RNA, 32 nt, Homo Sapiens
gcagaccugaggcgaggccaccccccuccauc

SEQ ID NO: 329393 - RNA, 32 nt, Homo Sapiens
agacuggcggggguggacgcccgggccgggcu

SEQ ID NO: 329394 - RNA, 32 nt, Homo Sapiens
uagcuuggguggcaaagcaaaacucuaucaaa

SEQ ID NO: 329395 - RNA, 32 nt, Homo Sapiens
caugguagaacuuuuucuucuuacaacuuuuu

SEQ ID NO: 329396 - RNA, 32 nt, Homo Sapiens
auggagucuuugcagcauggcgcuagcagcca

SEQ ID NO: 329397 - RNA, 32 nt, Homo Sapiens
gcgcucggcgcccaccaggcggacgcccagga

SEQ ID NO: 329398 - RNA, 30 nt, Homo Sapiens
cccuauauuauauuucccuaacucugaaga

SEQ ID NO: 329399 - RNA, 32 nt, Homo Sapiens
uccuuccagggguccuacacggcgucuguaaa

SEQ ID NO: 329400 - RNA, 32 nt, Homo Sapiens
auuguaugagaauaaacuuguuauuauggaaa

SEQ ID NO: 329401 - RNA, 31 nt, Homo Sapiens
augcccccacccuccccucacacacaaauug

SEQ ID NO: 329402 - RNA, 32 nt, Homo Sapiens
gaaauuuaaauuugauacauaugcuuuguaua

SEQ ID NO: 329403 - RNA, 32 nt, Homo Sapiens
gccucucugguccaaugggacugacacuguug

SEQ ID NO: 329404 - RNA, 32 nt, Homo Sapiens
uacuguuuauuacuuccaugaauuuuaaaauc

SEQ ID NO: 329405 - RNA, 32 nt, Homo Sapiens
cugaggccccgacgaggagggguaugcaggcu

SEQ ID NO: 329406 - RNA, 32 nt, Homo Sapiens
caucacgauagaaaacaaaacuggaaugggag

SEQ ID NO: 329407 - RNA, 32 nt, Homo Sapiens
acaggaaacaagagguaccaaaaaagaaaguu

SEQ ID NO: 329408 - RNA, 32 nt, Homo Sapiens
cgcaagucuccaugcgucucccgggagccugg

SEQ ID NO: 329409 - RNA, 32 nt, Homo Sapiens
aaauguucucacuuggcagugucuagucaagg

SEQ ID NO: 329410 - RNA, 28 nt, Homo Sapiens
acccagaggguguuuccgaggugcucga

SEQ ID NO: 329411 - RNA, 32 nt, Homo Sapiens
guuguuucaaccauaguuagagacaaauucuc

SEQ ID NO: 329412 - RNA, 32 nt, Homo Sapiens
aaauguugcccauuuuaugaguuaugaucaau

SEQ ID NO: 329413 - RNA, 32 nt, Homo Sapiens
caguagaaaaggaaauugcaacccucagcucu

SEQ ID NO: 329414 - RNA, 32 nt, Homo Sapiens
acaauaaccacacuuccuuuaagggacuguau

SEQ ID NO: 329415 - RNA, 32 nt, Homo Sapiens
uuuuacuuauaacuuugccaggaaauuucaac

SEQ ID NO: 329416 - RNA, 32 nt, Homo Sapiens
gggcacagccucaggucuaccuggacacucau

SEQ ID NO: 329417 - RNA, 32 nt, Homo Sapiens
agacuaguuuggauaagaacuuugaaauguuc

SEQ ID NO: 329418 - RNA, 32 nt, Homo Sapiens
gaauuaaauguguuuggaaccacaugcacauc

SEQ ID NO: 329419 - RNA, 32 nt, Homo Sapiens
ccagggaagaagaucaacgccucacugaaaca

SEQ ID NO: 329420 - RNA, 32 nt, Homo Sapiens
ucagggccuuaguuggccccaguaauucuccu

SEQ ID NO: 329421 - RNA, 32 nt, Homo Sapiens
uuuaaaacugcuuuuccaaauaugagacuaug

SEQ ID NO: 329422 - RNA, 32 nt, Homo Sapiens
guauaaguggguguaaucauggcugaaauaac

SEQ ID NO: 329423 - RNA, 32 nt, Homo Sapiens
uguagaauuugagugaucuaugcugaauaaac

SEQ ID NO: 329424 - RNA, 32 nt, Homo Sapiens
uuauacauuuuucugcagcuguaggcauaccc

SEQ ID NO: 329425 - RNA, 32 nt, Homo Sapiens
gaucugccgauaugggggauaugaagaccccu

SEQ ID NO: 329426 - RNA, 32 nt, Homo Sapiens
gugaaucugggagugugaguguguguaugagc

SEQ ID NO: 329427 - RNA, 32 nt, Homo Sapiens
auaugacuguccuguuucccccaggccacuuu

SEQ ID NO: 329428 - RNA, 32 nt, Homo Sapiens
guuuucacuuggauaggcucaaccuaccuggc

SEQ ID NO: 329429 - RNA, 32 nt, Homo Sapiens
gaauuugggcagcuaccacgggucugccaugc

SEQ ID NO: 329430 - RNA, 32 nt, Homo Sapiens
agagaacguaggaagcgcugcucggcacgacc

SEQ ID NO: 329431 - RNA, 32 nt, Homo Sapiens
ucaucugaguuaguuucuccuccaucaccuca

SEQ ID NO: 329432 - RNA, 32 nt, Homo Sapiens
gcgagccccuccccggcuccagcccgguccgg

SEQ ID NO: 329433 - RNA, 32 nt, Homo Sapiens
uuucuaugaauauauaauauauacuucacauu

SEQ ID NO: 329434 - RNA, 32 nt, Homo Sapiens
gcuuuaauauuuuucauauuuaacuugucuaa

SEQ ID NO: 329435 - RNA, 32 nt, Homo Sapiens
gggaggacacggggcuuuuggccaccacacac

SEQ ID NO: 329436 - RNA, 32 nt, Homo Sapiens
guuguauauaaaaauaaaaggauagcauuuuu

SEQ ID NO: 329437 - RNA, 32 nt, Homo Sapiens
ccaacaaaaguucuaagauuuuuuaccucugc

SEQ ID NO: 329438 - RNA, 32 nt, Homo Sapiens
ucgcccgaggcgaggaggagcgcuggcgagac

SEQ ID NO: 329439 - RNA, 32 nt, Homo Sapiens
uuccagaaagagaauagccauauaaauuauuu

SEQ ID NO: 329440 - RNA, 32 nt, Homo Sapiens
gggaauugggacucaggccuagcgugugucag

SEQ ID NO: 329441 - RNA, 32 nt, Homo Sapiens
ggcccugguucccaggguggcguccacucggc

SEQ ID NO: 329442 - RNA, 32 nt, Homo Sapiens
uguuucuuaaguugguagcugaggguaucagg

SEQ ID NO: 329443 - RNA, 32 nt, Homo Sapiens
uaaucaaaaaauauauuuuuugagauaucguc

SEQ ID NO: 329444 - RNA, 32 nt, Homo Sapiens
uuguucuuuuauucugcuuuuuaacuguaauc

SEQ ID NO: 329445 - RNA, 32 nt, Homo Sapiens
guagccuccucccaggcaccugucugcauccc

SEQ ID NO: 329446 - RNA, 32 nt, Homo Sapiens
cucgccccaucccugcuugcccgcucccacag

SEQ ID NO: 329447 - RNA, 32 nt, Homo Sapiens
gagccauggugucgagugaagaguaguucuug

SEQ ID NO: 329448 - RNA, 32 nt, Homo Sapiens
ggggcuggugcucauccccacccccagcgacu

SEQ ID NO: 329449 - RNA, 32 nt, Homo Sapiens
gagccaggcagaggcuuuuggccgcaaagcca

SEQ ID NO: 329450 - RNA, 32 nt, Homo Sapiens
aauuagccgggcgugguggcgcacgccuguag

SEQ ID NO: 329451 - RNA, 32 nt, Homo Sapiens
aaucauuuggguuaauauggcucuucauaauu

SEQ ID NO: 329452 - RNA, 32 nt, Homo Sapiens
cagacgccagugagaucagggagagaaggccc

SEQ ID NO: 329453 - RNA, 32 nt, Homo Sapiens
aaaucuauuauguaccuaauauugugccuaau

SEQ ID NO: 329454 - RNA, 32 nt, Homo Sapiens
cagcggggccgcgcugcacgugcucuuguccc

SEQ ID NO: 329455 - RNA, 32 nt, Homo Sapiens
gggcacugcuccaagggacaggugggccuggc

SEQ ID NO: 329456 - RNA, 32 nt, Homo Sapiens
ugagucccgcccggcgugcgcggagcggggca

SEQ ID NO: 329457 - RNA, 31 nt, Homo Sapiens
aaaaggccuggccccauucuggaaaaggcaa

SEQ ID NO: 329458 - RNA, 32 nt, Homo Sapiens
aggaaaaacuggggcucagaaagauaccaugg

SEQ ID NO: 329459 - RNA, 32 nt, Homo Sapiens
ugacauucaggacacacacacacacacacaca

SEQ ID NO: 329460 - RNA, 32 nt, Homo Sapiens
aggcaaauuuaaaaggcaauaauuuaaacauu

SEQ ID NO: 329461 - RNA, 32 nt, Homo Sapiens
aagugcccaggaagaggagaaccggcagcugc

SEQ ID NO: 329462 - RNA, 32 nt, Homo Sapiens
augagaaaaaaguuuuuuaaaaaagugugccu

SEQ ID NO: 329463 - RNA, 32 nt, Homo Sapiens
ggaggcaaauauauuucuaaaaauacauguac

SEQ ID NO: 329464 - RNA, 32 nt, Homo Sapiens
gagcgaguucccucugacaccagcagaucccc

SEQ ID NO: 329465 - RNA, 31 nt, Homo Sapiens
cucugggagccccagcacaagcacagcccag

SEQ ID NO: 329466 - RNA, 32 nt, Homo Sapiens
ccccacccaccccacaccugcagugccagcuc

SEQ ID NO: 329467 - RNA, 32 nt, Homo Sapiens
uguuuucuuaagcauauuaauuauagacauuc

SEQ ID NO: 329468 - RNA, 32 nt, Homo Sapiens
agagauuuuaagugguauauuaaccaauaaua

SEQ ID NO: 329469 - RNA, 32 nt, Homo Sapiens
ccggggccuacgacgcgccaccccccguacga

SEQ ID NO: 329470 - RNA, 32 nt, Homo Sapiens
aauuaaaagauauuuaauucuugcuuauacuc

SEQ ID NO: 329471 - RNA, 32 nt, Homo Sapiens
cagaggacacacagcucuggauuucuaccccc

SEQ ID NO: 329472 - RNA, 32 nt, Homo Sapiens
gacccuggaugucagaguugaucuaagacguu

SEQ ID NO: 329473 - RNA, 32 nt, Homo Sapiens
cacuuagguuagcaugagaaaaggggaaaaac

SEQ ID NO: 329474 - RNA, 32 nt, Homo Sapiens
auuaagacaacagauuugagcaaauacaauua

SEQ ID NO: 329475 - RNA, 32 nt, Homo Sapiens
cugcucugggucugcacccaccccugcccuga

SEQ ID NO: 329476 - RNA, 32 nt, Homo Sapiens
aacaucuccagaugagaauuugaaacaagaaa

SEQ ID NO: 329477 - RNA, 32 nt, Homo Sapiens
uuucuggggaggaggacgguugacggcccugc

SEQ ID NO: 329478 - RNA, 32 nt, Homo Sapiens
cucucucccccuucuuuuuugucucaagauua

SEQ ID NO: 329479 - RNA, 32 nt, Homo Sapiens
gugcgaucggguugugcuuagcuuggggucuc

SEQ ID NO: 329480 - RNA, 32 nt, Homo Sapiens
aggggaauuuuaagaaagagagggaagaucau

SEQ ID NO: 329481 - RNA, 32 nt, Homo Sapiens
cgccccguguccccccaggugcuggaggcaga

SEQ ID NO: 329482 - RNA, 32 nt, Homo Sapiens
agggaugagaagcuacugcuaucugcugcucu

SEQ ID NO: 329483 - RNA, 32 nt, Homo Sapiens
cugauacauuuuaucuuacugaauaugaauug

SEQ ID NO: 329484 - RNA, 32 nt, Homo Sapiens
gagacgccucugcggcagcugguggcgcaggu

SEQ ID NO: 329485 - RNA, 32 nt, Homo Sapiens
uucuaaacaacacuuagacuggggucuaacgu

SEQ ID NO: 329486 - RNA, 32 nt, Homo Sapiens
ggaauauugcuuaaauguuuugauuuuaugau

SEQ ID NO: 329487 - RNA, 32 nt, Homo Sapiens
auuuagaaauuacauauaaaucuuugcaguua

SEQ ID NO: 329488 - RNA, 27 nt, Homo Sapiens
agugauuccuucuugcucagucccucu

SEQ ID NO: 329489 - RNA, 32 nt, Homo Sapiens
uuuaucagacaaaugcuuuuauuuucauucua

SEQ ID NO: 329490 - RNA, 32 nt, Homo Sapiens
aaaauaguuccagauaaaaacaauauauguaa

SEQ ID NO: 329491 - RNA, 32 nt, Homo Sapiens
uggcacauuuuucagacuuuguuuaauaauuu

SEQ ID NO: 329492 - RNA, 32 nt, Homo Sapiens
aaugaaugcucugggcuagauacagcuuggag

SEQ ID NO: 329493 - RNA, 32 nt, Homo Sapiens
gccuccucuugcugcuggcccacugcccuggc

SEQ ID NO: 329494 - RNA, 32 nt, Homo Sapiens
cagcgcuggcugaaggccggcccgaagcaccc

SEQ ID NO: 329495 - RNA, 31 nt, Homo Sapiens
cgcgccuccgccugagucccccgcgccuugg

SEQ ID NO: 329496 - RNA, 32 nt, Homo Sapiens
gaaauauccaagauguucuguaucuauguaaa

SEQ ID NO: 329497 - RNA, 29 nt, Homo Sapiens
ucaauuuuguaguauucuauaaaagaaaa

SEQ ID NO: 329498 - RNA, 32 nt, Homo Sapiens
ugcaaucucagguguucagaucaagggaaacu

SEQ ID NO: 329499 - RNA, 32 nt, Homo Sapiens
acaagaaaacauugcaccagcguucuaagccu

SEQ ID NO: 329500 - RNA, 32 nt, Homo Sapiens
auaaugaugauuauggaaugaauuuuaauguc

SEQ ID NO: 329501 - RNA, 32 nt, Homo Sapiens
gaggagaagguaggaguguagcuagcagcgug

SEQ ID NO: 329502 - RNA, 32 nt, Homo Sapiens
aggcaaaucaguauucccaaggauggcgacaa

SEQ ID NO: 329503 - RNA, 32 nt, Homo Sapiens
agggcagagggcagcgggcagcuccaggaaca

SEQ ID NO: 329504 - RNA, 32 nt, Homo Sapiens
cagcgucuugagcccucgaucagacgccuccc

SEQ ID NO: 329505 - RNA, 32 nt, Homo Sapiens
cccugggcacugggcugcagguuggagaggca

SEQ ID NO: 329506 - RNA, 32 nt, Homo Sapiens
aggccaagggaagagaaaagucugcguuaguc

SEQ ID NO: 329507 - RNA, 32 nt, Homo Sapiens
uggccucuagaaugguccagaggggcuggcug

SEQ ID NO: 329508 - RNA, 32 nt, Homo Sapiens
uagaggugaugaagacacagaacaggcucagu

SEQ ID NO: 329509 - RNA, 32 nt, Homo Sapiens
uguuacauuucccccaagaaguucaauaaacc

SEQ ID NO: 329510 - RNA, 32 nt, Homo Sapiens
agagacagaacugguccaucauguuugagucg

SEQ ID NO: 329511 - RNA, 32 nt, Homo Sapiens
ugguggcugggcggggccggcaggcacaggga

SEQ ID NO: 329512 - RNA, 32 nt, Homo Sapiens
aauacauguauucauacauacucugugguaau

SEQ ID NO: 329513 - RNA, 32 nt, Homo Sapiens
ugcuccucuccaugcaccccagccccucccag

SEQ ID NO: 329514 - RNA, 32 nt, Homo Sapiens
gccaccagcccaccccacccugcccccacccu

SEQ ID NO: 329515 - RNA, 32 nt, Homo Sapiens
cgcccugugcguggcgaccauccuccucagcc

SEQ ID NO: 329516 - RNA, 32 nt, Homo Sapiens
cuuuaaauuacauuaggggaaacuacuuaccu

SEQ ID NO: 329517 - RNA, 32 nt, Homo Sapiens
cccuugucccaaguuccacugcugccucuuga

SEQ ID NO: 329518 - RNA, 32 nt, Homo Sapiens
ugcugacuuuuccuaaugcuuaccugaaggaa

SEQ ID NO: 329519 - RNA, 32 nt, Homo Sapiens
aaauccucccccuuccucccccgccccguucc

SEQ ID NO: 329520 - RNA, 32 nt, Homo Sapiens
uaaaggauuggugucuuaguacacuugugguc

SEQ ID NO: 329521 - RNA, 32 nt, Homo Sapiens
caggcuggggcagcugccaagguccccgcgcc

SEQ ID NO: 329522 - RNA, 32 nt, Homo Sapiens
cugaaggggugcggcagcaggggggugguaag

SEQ ID NO: 329523 - RNA, 32 nt, Homo Sapiens
uagggaagaggccugauguggacuguccgaac

SEQ ID NO: 329524 - RNA, 32 nt, Homo Sapiens
cccagcacuuccucagacacaacuucuuccug

SEQ ID NO: 329525 - RNA, 32 nt, Homo Sapiens
guaucucuccagagccauauuuucucaguccg

SEQ ID NO: 329526 - RNA, 32 nt, Homo Sapiens
gccugcccaucccaccccagcauccaucuuca

SEQ ID NO: 329527 - RNA, 32 nt, Homo Sapiens
cgcgucugccagccuggcuggcaguccgucug

SEQ ID NO: 329528 - RNA, 32 nt, Homo Sapiens
gcagcccaaagcugcgugcuccccgugcaggc

SEQ ID NO: 329529 - RNA, 32 nt, Homo Sapiens
cugugacgauggacagaagaaaauugugaaag

SEQ ID NO: 329530 - RNA, 32 nt, Homo Sapiens
ugcagagaucacauggugagagaggaagcaac

SEQ ID NO: 329531 - RNA, 32 nt, Homo Sapiens
acaccagaggggcuuauauccuguucuaucag

SEQ ID NO: 329532 - RNA, 32 nt, Homo Sapiens
uucagagccuccacaccaugaccuccaagaag

SEQ ID NO: 329533 - RNA, 32 nt, Homo Sapiens
gugauccaccuuccuugugcucccaaagugcu

SEQ ID NO: 329534 - RNA, 32 nt, Homo Sapiens
cguuuucuugagcguuuugauuuuuuacuuuu

SEQ ID NO: 329535 - RNA, 32 nt, Homo Sapiens
uauaucuuagaauggguauccuugaacuauau

SEQ ID NO: 329536 - RNA, 30 nt, Homo Sapiens
gcuccucauugguccggcggcaggggaggg

SEQ ID NO: 329537 - RNA, 32 nt, Homo Sapiens
uagaacacugaagauuugaauuugauauuuaa

SEQ ID NO: 329538 - RNA, 32 nt, Homo Sapiens
cauggcuggcuucaggaaggaccagugcccuc

SEQ ID NO: 329539 - RNA, 32 nt, Homo Sapiens
ccggcuccgcuccagauccccccagcucucgg

SEQ ID NO: 329540 - RNA, 32 nt, Homo Sapiens
ugauuuauugagaauaaaaauccauuuugaaa

SEQ ID NO: 329541 - RNA, 32 nt, Homo Sapiens
uguguggccuccugccucggcccugacaaacg

SEQ ID NO: 329542 - RNA, 32 nt, Homo Sapiens
uucuuacacacauacacacacacacacacaca

SEQ ID NO: 329543 - RNA, 32 nt, Homo Sapiens
uguauguuuaaauuaacuuuuuauugaaugua

SEQ ID NO: 329544 - RNA, 32 nt, Homo Sapiens
ggcugaggcagaacccaggagcuccaagaaag

SEQ ID NO: 329545 - RNA, 32 nt, Homo Sapiens
ugugccuucccuuugugccucuucccacacgu

SEQ ID NO: 329546 - RNA, 32 nt, Homo Sapiens
aaguaagggggacggcccgagacggagaaggg

SEQ ID NO: 329547 - RNA, 32 nt, Homo Sapiens
ugaagaaaacaucuagaugcagcgaucggcua

SEQ ID NO: 329548 - RNA, 32 nt, Homo Sapiens
aaaaaugugguuuaguuuuccaaacauguuau

SEQ ID NO: 329549 - RNA, 32 nt, Homo Sapiens
uaaagauaaggguauccaaaauagucuacggc

SEQ ID NO: 329550 - RNA, 32 nt, Homo Sapiens
ccagcccugagccccacagaccaccugagaca

SEQ ID NO: 329551 - RNA, 32 nt, Homo Sapiens
gauugugcuggauuauuaagcacccuaaaugc

SEQ ID NO: 329552 - RNA, 32 nt, Homo Sapiens
caaaguguuuauuuuacaaaagaguagguacu

SEQ ID NO: 329553 - RNA, 32 nt, Homo Sapiens
cccugguauugucagacacacccaggcuugau

SEQ ID NO: 329554 - RNA, 32 nt, Homo Sapiens
gcauucuccagauggaguguuucccuccgcag

SEQ ID NO: 329555 - RNA, 32 nt, Homo Sapiens
gacaucaccgggcagggaggggugcugguggu

SEQ ID NO: 329556 - RNA, 32 nt, Homo Sapiens
gugccgcuaugggagucccggcguucuuccgc

SEQ ID NO: 329557 - RNA, 32 nt, Homo Sapiens
agcuauuuuuuacuuuugcuuagcuuauagau

SEQ ID NO: 329558 - RNA, 32 nt, Homo Sapiens
aucuucaccguggcugcagagcugccugaugg

SEQ ID NO: 329559 - RNA, 29 nt, Homo Sapiens
ucuucucggggacacaggccagcuccaca

SEQ ID NO: 329560 - RNA, 32 nt, Homo Sapiens
auuauugaaauuguaagugaaguaaaacuuaa

SEQ ID NO: 329561 - RNA, 32 nt, Homo Sapiens
gacgggcuauggccaccacgacuuccggguuc

SEQ ID NO: 329562 - RNA, 32 nt, Homo Sapiens
aggguuuacauuguguugcaucuuauaacuug

SEQ ID NO: 329563 - RNA, 32 nt, Homo Sapiens
ucguggcaucucacuucugagaacgaaaucuc

SEQ ID NO: 329564 - RNA, 28 nt, Homo Sapiens
uugguggcgagggagaugacuccuugua

SEQ ID NO: 329565 - RNA, 32 nt, Homo Sapiens
cuugaaugcgcggcggcugagcuaccgcgggu

SEQ ID NO: 329566 - RNA, 32 nt, Homo Sapiens
agacacccuaaaaaggcuucuacucaagaagu

SEQ ID NO: 329567 - RNA, 32 nt, Homo Sapiens
agugaguuaugacagcaccacugcacagagcu

SEQ ID NO: 329568 - RNA, 32 nt, Homo Sapiens
ggcggggcgucccgggcacccgggauuggggc

SEQ ID NO: 329569 - RNA, 32 nt, Homo Sapiens
gacuccuccgcggaagauggaccccccggagg

SEQ ID NO: 329570 - RNA, 32 nt, Homo Sapiens
gccucggcugccuggggucucaccugccuggg

SEQ ID NO: 329571 - RNA, 32 nt, Homo Sapiens
uguuugauuuccucugggugaccuuauugucu

SEQ ID NO: 329572 - RNA, 32 nt, Homo Sapiens
cagcaccaugcucugcgccggguaccuggcgg

SEQ ID NO: 329573 - RNA, 31 nt, Homo Sapiens
acuuucacaaagauuauaaauguaguuaguu

SEQ ID NO: 329574 - RNA, 32 nt, Homo Sapiens
uauuauaagaaacucaguguugcugcaaugua

SEQ ID NO: 329575 - RNA, 32 nt, Homo Sapiens
ggguaggguggcggcuggcccagccgggcccc

SEQ ID NO: 329576 - RNA, 32 nt, Homo Sapiens
agggggucuuaccacacaaagggagagugggc

SEQ ID NO: 329577 - RNA, 32 nt, Homo Sapiens
auguucuaguuauuuuuuuuuauauauauuuu

SEQ ID NO: 329578 - RNA, 32 nt, Homo Sapiens
ccgcacguggagagggcaggcauaaagcaccu

SEQ ID NO: 329579 - RNA, 32 nt, Homo Sapiens
uuaauaaaguguguauuuuugcaucaguuaag

SEQ ID NO: 329580 - RNA, 32 nt, Homo Sapiens
uuuuguuuucuuucuaaucgaggugugaaaaa

SEQ ID NO: 329581 - RNA, 32 nt, Homo Sapiens
cuccuucuggaaugccagggcucuuccucugc

SEQ ID NO: 329582 - RNA, 32 nt, Homo Sapiens
gcaccagaucucggggaguccccgagacaccc

SEQ ID NO: 329583 - RNA, 32 nt, Homo Sapiens
ccauuucuagaauagccugugcucuuccacac

SEQ ID NO: 329584 - RNA, 32 nt, Homo Sapiens
uucugacuaugaaaaaugucucuuucaguuug

SEQ ID NO: 329585 - RNA, 32 nt, Homo Sapiens
ugaaagagggguacacagggacccagcccuuc

SEQ ID NO: 329586 - RNA, 32 nt, Homo Sapiens
gggucugugucuuuuggcuccgagggcagucg

SEQ ID NO: 329587 - RNA, 32 nt, Homo Sapiens
ccuuuuuggacaauuuuuaaaauuuguaucuu

SEQ ID NO: 329588 - RNA, 32 nt, Homo Sapiens
aauaaauauaaaaugaaauguuuauguugaca

SEQ ID NO: 329589 - RNA, 32 nt, Homo Sapiens
gaccacacagaaacuaaaaauacuuggaagag

SEQ ID NO: 329590 - RNA, 32 nt, Homo Sapiens
gugacuguuccuuuugccccagcccucucaga

SEQ ID NO: 329591 - RNA, 32 nt, Homo Sapiens
cugcucagauaauugaauaguuugccaucgag

SEQ ID NO: 329592 - RNA, 32 nt, Homo Sapiens
guagcugcgacucggcggagucccggcggcgc

SEQ ID NO: 329593 - RNA, 32 nt, Homo Sapiens
ggcggugggaagaucccgggggcggcuuugga

SEQ ID NO: 329594 - RNA, 31 nt, Homo Sapiens
uuucgugagccccaucuucacccaggccuau

SEQ ID NO: 329595 - RNA, 32 nt, Homo Sapiens
cgcacggcgcggagccggccggagcucgaggc

SEQ ID NO: 329596 - RNA, 30 nt, Homo Sapiens
ccgagggggugugucgggccggcgcaggcc

SEQ ID NO: 329597 - RNA, 32 nt, Homo Sapiens
ugggauugcucucaagaauacccauuacuggc

SEQ ID NO: 329598 - RNA, 31 nt, Homo Sapiens
ccgggagcggccugccugccucccugcgcac

SEQ ID NO: 329599 - RNA, 32 nt, Homo Sapiens
aaguagaaauggugagauuguuuucuuuuucu

SEQ ID NO: 329600 - RNA, 32 nt, Homo Sapiens
agggcacagucugcgaggccguccugggcaga

SEQ ID NO: 329601 - RNA, 32 nt, Homo Sapiens
cuaauuuuacuuugcaugauaugccuuaauau

SEQ ID NO: 329602 - RNA, 32 nt, Homo Sapiens
gaggggcugucaucugggagccugugccccug

SEQ ID NO: 329603 - RNA, 32 nt, Homo Sapiens
cgcgcgccccuuuuucagcaguguggcggggu

SEQ ID NO: 329604 - RNA, 32 nt, Homo Sapiens
uuuuuaaagagauuauuuguuuagauguaggc

SEQ ID NO: 329605 - RNA, 32 nt, Homo Sapiens
cgcacugaaugcgaggcccccacccacuccac

SEQ ID NO: 329606 - RNA, 32 nt, Homo Sapiens
gaaaaugaaaauaaucuggcaucaguuucauu

SEQ ID NO: 329607 - RNA, 32 nt, Homo Sapiens
cagggcagucgggagcugcugcuggcucuguc

SEQ ID NO: 329608 - RNA, 32 nt, Homo Sapiens
uauuagcaauacuggaauauaggcacauuacc

SEQ ID NO: 329609 - RNA, 32 nt, Homo Sapiens
auucagcuccuugcccuucucugugaccccgg

SEQ ID NO: 329610 - RNA, 32 nt, Homo Sapiens
gccagcuaaaauugugugccauuuaaaaacug

SEQ ID NO: 329611 - RNA, 32 nt, Homo Sapiens
ugugacggcugccugaaguucuccucgauccc

SEQ ID NO: 329612 - RNA, 32 nt, Homo Sapiens
agacaccuuaccauugcuuauuugguuuuaug

SEQ ID NO: 329613 - RNA, 32 nt, Homo Sapiens
uacccuagauaaaacguuucaauggcuuccca

SEQ ID NO: 329614 - RNA, 32 nt, Homo Sapiens
uugacagcacaccagagaaauccagggaccug

SEQ ID NO: 329615 - RNA, 32 nt, Homo Sapiens
guaaagggacagaugcaccaucuuuauuucaa

SEQ ID NO: 329616 - RNA, 32 nt, Homo Sapiens
ucaauaguuuguuuuucuuuuuuaaaaaagaa

SEQ ID NO: 329617 - RNA, 32 nt, Homo Sapiens
agccaaagaugacagcagaacaacauaauuua

SEQ ID NO: 329618 - RNA, 32 nt, Homo Sapiens
uaccgacugacugcugcagaccaccgccaacu

SEQ ID NO: 329619 - RNA, 32 nt, Homo Sapiens
guacacagucauauaugacuagugguacaugg

SEQ ID NO: 329620 - RNA, 32 nt, Homo Sapiens
auuagaauuuaaaagacauaagacuaaauuac

SEQ ID NO: 329621 - RNA, 32 nt, Homo Sapiens
aacaagcccucucccggcaccugcagaaaaag

SEQ ID NO: 329622 - RNA, 32 nt, Homo Sapiens
uagcugguuucuauuaauuauauagacaguaa

SEQ ID NO: 329623 - RNA, 32 nt, Homo Sapiens
gaagaggauucuuugaaaagguccugcagaga

SEQ ID NO: 329624 - RNA, 32 nt, Homo Sapiens
auuauaucuucaggacuauuucacuaauaaac

SEQ ID NO: 329625 - RNA, 32 nt, Homo Sapiens
gagugguuguguggucgcgucucggaaaccgg

SEQ ID NO: 329626 - RNA, 32 nt, Homo Sapiens
ggagccucugcgaagaggcauuccuggcagag

SEQ ID NO: 329627 - RNA, 31 nt, Homo Sapiens
acgacuucaucagcuggcugaguuaaggcag

SEQ ID NO: 329628 - RNA, 32 nt, Homo Sapiens
gacguuauaugauugguuaaacucuguaagcc

SEQ ID NO: 329629 - RNA, 32 nt, Homo Sapiens
ggaagacgggagaggacaaaagcaugucuucc

SEQ ID NO: 329630 - RNA, 32 nt, Homo Sapiens
cgccuguuaucccagcacuuugggaggccuag

SEQ ID NO: 329631 - RNA, 32 nt, Homo Sapiens
uagaccaccacauggcaugcuugacuauuucu

SEQ ID NO: 329632 - RNA, 32 nt, Homo Sapiens
uucacuugcuggagugccaaguagaucuccuc

SEQ ID NO: 329633 - RNA, 32 nt, Homo Sapiens
ccgccgccggcgaguugacucuuucccuaugu

SEQ ID NO: 329634 - RNA, 32 nt, Homo Sapiens
accccgcccagcugugcacuuugcucacucgc

SEQ ID NO: 329635 - RNA, 32 nt, Homo Sapiens
agugauccaucccaccucuaauauuuugugaa

SEQ ID NO: 329636 - RNA, 32 nt, Homo Sapiens
ugcagagccuugccuuuccccucugccuguuu

SEQ ID NO: 329637 - RNA, 32 nt, Homo Sapiens
cucuggauccuccguggaccgaaccguccccc

SEQ ID NO: 329638 - RNA, 32 nt, Homo Sapiens
aaaccugagaagugcuccuaauaaaaaaguaa

SEQ ID NO: 329639 - RNA, 32 nt, Homo Sapiens
gggagaauggugcugaaugggguucggcagga

SEQ ID NO: 329640 - RNA, 32 nt, Homo Sapiens
gaaccaauccugagcgcgacccgggcacuggg

SEQ ID NO: 329641 - RNA, 32 nt, Homo Sapiens
guccgcgccugccugcccagcccgcggaaccc

SEQ ID NO: 329642 - RNA, 32 nt, Homo Sapiens
acaucagugagcaagcuguguacacuggaaaa

SEQ ID NO: 329643 - RNA, 31 nt, Homo Sapiens
gccagugcugccucugcuccaagcugccccu

SEQ ID NO: 329644 - RNA, 32 nt, Homo Sapiens
gacuggcacuauuuuucuuaguguauauaauu

SEQ ID NO: 329645 - RNA, 32 nt, Homo Sapiens
guucccacccagcagagcucgccucuguggcu

SEQ ID NO: 329646 - RNA, 32 nt, Homo Sapiens
guuguagagaaaacuagggagaacuuuauuuu

SEQ ID NO: 329647 - RNA, 32 nt, Homo Sapiens
uuugaccuguucaugauucagaagaaaaacaa

SEQ ID NO: 329648 - RNA, 32 nt, Homo Sapiens
uacccuccaccccagcugccaagcccugggcc

SEQ ID NO: 329649 - RNA, 32 nt, Homo Sapiens
gcaaguacuggcucuacagagcccugaucucc

SEQ ID NO: 329650 - RNA, 32 nt, Homo Sapiens
cgggagaagaggcgagugaagaugcaaaacag

SEQ ID NO: 329651 - RNA, 32 nt, Homo Sapiens
uaucgcgugcuuuuaaauccgaaaggacaguc

SEQ ID NO: 329652 - RNA, 32 nt, Homo Sapiens
aaaaauaugcuguuuacauuguuuacuuacaa

SEQ ID NO: 329653 - RNA, 32 nt, Homo Sapiens
gguacccgcccgguaccgcgcgagccagugcc

SEQ ID NO: 329654 - RNA, 32 nt, Homo Sapiens
caccaccgucugugucgggaaagcagaauaac

SEQ ID NO: 329655 - RNA, 32 nt, Homo Sapiens
aagaaauguauauacaguugccuuauaaaaca

SEQ ID NO: 329656 - RNA, 32 nt, Homo Sapiens
gcccugugcuccucccucccccaacacucccu

SEQ ID NO: 329657 - RNA, 32 nt, Homo Sapiens
gucugcagcccucagcagcugcagaccgcccc

SEQ ID NO: 329658 - RNA, 32 nt, Homo Sapiens
cucuccgggcggcaaugggggcuugagagccg

SEQ ID NO: 329659 - RNA, 32 nt, Homo Sapiens
acggaacaucaugucguccgcggccgagccuc

SEQ ID NO: 329660 - RNA, 32 nt, Homo Sapiens
gaugaacaaagugaggcagagaagggccucaa

SEQ ID NO: 329661 - RNA, 32 nt, Homo Sapiens
uuguggaccacuuugguuuucuuuuuugcaug

SEQ ID NO: 329662 - RNA, 32 nt, Homo Sapiens
gcagccggggagcggcuccgggcgcgaggucu

SEQ ID NO: 329663 - RNA, 31 nt, Homo Sapiens
agaggaccgaagcagagggugcuguuucaac

SEQ ID NO: 329664 - RNA, 32 nt, Homo Sapiens
ggaugaacuaaauccaaaacaugacacuguag

SEQ ID NO: 329665 - RNA, 32 nt, Homo Sapiens
ggugugaaggcacaacucuaauugcuauuagu

SEQ ID NO: 329666 - RNA, 32 nt, Homo Sapiens
ggaaugggaaaggcuuggugcuuccucccugu

SEQ ID NO: 329667 - RNA, 32 nt, Homo Sapiens
gugcuuccgucuccggaauccuuggggagcac

SEQ ID NO: 329668 - RNA, 32 nt, Homo Sapiens
guuguguccggaaaugguggguucuuggucuc

SEQ ID NO: 329669 - RNA, 32 nt, Homo Sapiens
auguucagcagcagauuuguaagugaguagaa

SEQ ID NO: 329670 - RNA, 32 nt, Homo Sapiens
ucuuuggacucccagggcugagugggcuggga

SEQ ID NO: 329671 - RNA, 32 nt, Homo Sapiens
ucugcauggccaggagcuuaugcuuaacuguu

SEQ ID NO: 329672 - RNA, 32 nt, Homo Sapiens
cacaaaaaaugaaauucauauaaugacuuaaa

SEQ ID NO: 329673 - RNA, 32 nt, Homo Sapiens
uuuaccaaucugggggcuuguuuuucuuuucu

SEQ ID NO: 329674 - RNA, 32 nt, Homo Sapiens
ucucuggccaccacuccaccagaugggcagag

SEQ ID NO: 329675 - RNA, 32 nt, Homo Sapiens
guuacccuagcuuuuuaccagugacuuggucu

SEQ ID NO: 329676 - RNA, 32 nt, Homo Sapiens
ggcaggacaccugugucugcaugcugaagaag

SEQ ID NO: 329677 - RNA, 32 nt, Homo Sapiens
aagcccagcccuccagagccagcccuccuggg

SEQ ID NO: 329678 - RNA, 32 nt, Homo Sapiens
ucaggguggucccaggccuggcaccuacucuu

SEQ ID NO: 329679 - RNA, 32 nt, Homo Sapiens
uucuucuugucaggaucauguacaacagcaug

SEQ ID NO: 329680 - RNA, 32 nt, Homo Sapiens
caccgguggcagcagcagcaucaccagcaaca

SEQ ID NO: 329681 - RNA, 32 nt, Homo Sapiens
ugggcuauaauccagcacuuuaggaggccgag

SEQ ID NO: 329682 - RNA, 32 nt, Homo Sapiens
ggccgcggacauuuuggugccaagccgaaccg

SEQ ID NO: 329683 - RNA, 32 nt, Homo Sapiens
guguguucucuggaaacccauccauaugguug

SEQ ID NO: 329684 - RNA, 32 nt, Homo Sapiens
acuaaaagagcugccaucauggcccagggagg

SEQ ID NO: 329685 - RNA, 32 nt, Homo Sapiens
ccagcuuuuguaugaggacuauagggugaauu

SEQ ID NO: 329686 - RNA, 32 nt, Homo Sapiens
ugauuccccccuccccuuuuaguagguuuucc

SEQ ID NO: 329687 - RNA, 32 nt, Homo Sapiens
gggcaccgacugugaagcuggggcaucgauga

SEQ ID NO: 329688 - RNA, 27 nt, Homo Sapiens
ccugcucucuucagcuccugugguaug

SEQ ID NO: 329689 - RNA, 32 nt, Homo Sapiens
cggcugggccaggauugcuugcguacucgcug

SEQ ID NO: 329690 - RNA, 32 nt, Homo Sapiens
aaccaagguucagagaaacuagagcacuugcc

SEQ ID NO: 329691 - RNA, 32 nt, Homo Sapiens
ugugcagcuugggaaggaaaagagcuaaucac

SEQ ID NO: 329692 - RNA, 32 nt, Homo Sapiens
agauuaaaaaucaaccucuuuuuugugcuuua

SEQ ID NO: 329693 - RNA, 32 nt, Homo Sapiens
uguagaacucccauaaacaucaccuuacuaau

SEQ ID NO: 329694 - RNA, 32 nt, Homo Sapiens
ggcugagggcccuguccccacccccgcccuug

SEQ ID NO: 329695 - RNA, 32 nt, Homo Sapiens
gucgacguggcggccggcggcggcugcgggcu

SEQ ID NO: 329696 - RNA, 32 nt, Homo Sapiens
uguuuuuuguuucuaacaauuuucagaccugu

SEQ ID NO: 329697 - RNA, 32 nt, Homo Sapiens
uaaagagauaagcauuaaaccuauugugcugu

SEQ ID NO: 329698 - RNA, 32 nt, Homo Sapiens
cauaaggagcccaauguuucuguucaugaaau

SEQ ID NO: 329699 - RNA, 28 nt, Homo Sapiens
caauaaaaaguacuuuuaaacuuuguaa

SEQ ID NO: 329700 - RNA, 32 nt, Homo Sapiens
agauugcuucccuuuccuuuguauuuucauuu

SEQ ID NO: 329701 - RNA, 32 nt, Homo Sapiens
ccuucccugaggagcugggacaugcugggcag

SEQ ID NO: 329702 - RNA, 32 nt, Homo Sapiens
ccaggcagggcucuguguuuugucuguuacaa

SEQ ID NO: 329703 - RNA, 32 nt, Homo Sapiens
ugcagagacagagaggacgugggcggcagaga

SEQ ID NO: 329704 - RNA, 32 nt, Homo Sapiens
ccuucuucaccucgggguccgagaaccuacac

SEQ ID NO: 329705 - RNA, 32 nt, Homo Sapiens
agaagaugcagcuugaugcagcuccucaaaca

SEQ ID NO: 329706 - RNA, 32 nt, Homo Sapiens
uugugaaaaaauuuacuuuaaacuacauuagg

SEQ ID NO: 329707 - RNA, 32 nt, Homo Sapiens
gagaggcggguuccggagaucccggccucacu

SEQ ID NO: 329708 - RNA, 32 nt, Homo Sapiens
uuccagcaccaggggagaaggggcgucuucag

SEQ ID NO: 329709 - RNA, 32 nt, Homo Sapiens
ugagaaccaaaaucaagaggaacagaaaucuu

SEQ ID NO: 329710 - RNA, 32 nt, Homo Sapiens
gggaagcucugccgcgcccccaucccacccua

SEQ ID NO: 329711 - RNA, 32 nt, Homo Sapiens
acguucauugugauugauauucuuauugacau

SEQ ID NO: 329712 - RNA, 32 nt, Homo Sapiens
auauuuccauuuugaaacuauuucuuguucca

SEQ ID NO: 329713 - RNA, 32 nt, Homo Sapiens
cccgcuucucccuggccuucaucccgaguugc

SEQ ID NO: 329714 - RNA, 32 nt, Homo Sapiens
ggggaggcgaggagggggcugugaguccucag

SEQ ID NO: 329715 - RNA, 31 nt, Homo Sapiens
cacgaaggagucgcuaccgugauuuggugac

SEQ ID NO: 329716 - RNA, 32 nt, Homo Sapiens
gcaagcuggacgcagcaugaugcgcgcagugu

SEQ ID NO: 329717 - RNA, 32 nt, Homo Sapiens
ugaggaaaaugaauuagcuccagugcuggaac

SEQ ID NO: 329718 - RNA, 32 nt, Homo Sapiens
gaagagagcgacuaaauucaucugaaaauggu

SEQ ID NO: 329719 - RNA, 32 nt, Homo Sapiens
aaagcccagaagaugauguuuacuucucucuc

SEQ ID NO: 329720 - RNA, 31 nt, Homo Sapiens
ugccagacacacacugccugaguugaagaga

SEQ ID NO: 329721 - RNA, 32 nt, Homo Sapiens
gcgggucagucuccgugcaggaugugagcagc

SEQ ID NO: 329722 - RNA, 32 nt, Homo Sapiens
gagcccaagucccugugcuccuccucggggug

SEQ ID NO: 329723 - RNA, 28 nt, Homo Sapiens
gcugaugaaaguuaacauuuuauaauac

SEQ ID NO: 329724 - RNA, 31 nt, Homo Sapiens
gaaacugcaugacgcgcaggagucagacuuc

SEQ ID NO: 329725 - RNA, 32 nt, Homo Sapiens
agagguugaaagauuauuaaauaacuuaucag

SEQ ID NO: 329726 - RNA, 32 nt, Homo Sapiens
gugccccacagcucggagccuugaggacaagg

SEQ ID NO: 329727 - RNA, 32 nt, Homo Sapiens
uggaaggaggaagaggcucuccacuguccacc

SEQ ID NO: 329728 - RNA, 32 nt, Homo Sapiens
ucuguugugagaucuucagcuaccucauggug

SEQ ID NO: 329729 - RNA, 32 nt, Homo Sapiens
aaucauuccauccaaugaucgccuuugcuuua

SEQ ID NO: 329730 - RNA, 32 nt, Homo Sapiens
ccagucauuuauuugcaugaaucugcuuaaau

SEQ ID NO: 329731 - RNA, 32 nt, Homo Sapiens
auugaaaauuuaugcauuuauuuacugauugu

SEQ ID NO: 329732 - RNA, 32 nt, Homo Sapiens
ugauuuauuguggugcucugacccucacuccu

SEQ ID NO: 329733 - RNA, 32 nt, Homo Sapiens
aaaugcuagucuuuuuuuuuuuuuuuuccaau

SEQ ID NO: 329734 - RNA, 32 nt, Homo Sapiens
cuccucuccagguggagcugccgccgugagac

SEQ ID NO: 329735 - RNA, 32 nt, Homo Sapiens
caaacaccuagugcacccauggccgugcgucc

SEQ ID NO: 329736 - RNA, 32 nt, Homo Sapiens
agaccaguaacgcuccucuacucuuugagaca

SEQ ID NO: 329737 - RNA, 32 nt, Homo Sapiens
caaaccuuuugaugaagaacuguuguuuuguu

SEQ ID NO: 329738 - RNA, 32 nt, Homo Sapiens
uuuaaucuuuugccccagccauccaguauugu

SEQ ID NO: 329739 - RNA, 32 nt, Homo Sapiens
uugcugcccgucugcugaugugaccaguggca

SEQ ID NO: 329740 - RNA, 31 nt, Homo Sapiens
uccagaaaacuccaccacugaguuaaaagcu

SEQ ID NO: 329741 - RNA, 30 nt, Homo Sapiens
acccggagcaagucccaugagucucagcug

SEQ ID NO: 329742 - RNA, 32 nt, Homo Sapiens
gauggaaucuucaucucaccccauuuucuuuu

SEQ ID NO: 329743 - RNA, 32 nt, Homo Sapiens
cugaauuuaagugacccauuaaaaucuagcac

SEQ ID NO: 329744 - RNA, 32 nt, Homo Sapiens
uuaaagaaaaggacagaaguuuaguacuagug

SEQ ID NO: 329745 - RNA, 32 nt, Homo Sapiens
caguucguugugauaaaguaucagucacuuca

SEQ ID NO: 329746 - RNA, 32 nt, Homo Sapiens
cggaugcaacagaaagaaaaagaaaaagaccc

SEQ ID NO: 329747 - RNA, 32 nt, Homo Sapiens
uuggggccgacagugccccaauaaagggucag

SEQ ID NO: 329748 - RNA, 32 nt, Homo Sapiens
guaggguucuucugccgaaacgaggaaagagu

SEQ ID NO: 329749 - RNA, 32 nt, Homo Sapiens
gaccugcagcaacucuggaaaccuggccugac

SEQ ID NO: 329750 - RNA, 32 nt, Homo Sapiens
uuuuaaaagcuuaucuaacaaauuauuaaagg

SEQ ID NO: 329751 - RNA, 32 nt, Homo Sapiens
aggcucuuccuucaacauuuuccuuagagauu

SEQ ID NO: 329752 - RNA, 32 nt, Homo Sapiens
ugaagcagcuggaaguccuggauaguucccac

SEQ ID NO: 329753 - RNA, 32 nt, Homo Sapiens
cccgcugccgccacccaccucuccugcaggcu

SEQ ID NO: 329754 - RNA, 32 nt, Homo Sapiens
cuucaacucaaucccagguuuucucuucuucc

SEQ ID NO: 329755 - RNA, 32 nt, Homo Sapiens
agauugcuguuuuuccacaucauuucagagcc

SEQ ID NO: 329756 - RNA, 32 nt, Homo Sapiens
cguaaguuaugaaauaaggaagugagagaccu

SEQ ID NO: 329757 - RNA, 32 nt, Homo Sapiens
caccgugacuucugcuaaaaugcaaaaugaga

SEQ ID NO: 329758 - RNA, 32 nt, Homo Sapiens
ggaaggacgaggggcaggacgugugggcagga

SEQ ID NO: 329759 - RNA, 32 nt, Homo Sapiens
agcccuccuggagaagaaucugcacagacaug

SEQ ID NO: 329760 - RNA, 32 nt, Homo Sapiens
uauauagguaccaugaaaaagauguacuugug

SEQ ID NO: 329761 - RNA, 30 nt, Homo Sapiens
gggcggugucugagccugccggcgccaccu

SEQ ID NO: 329762 - RNA, 32 nt, Homo Sapiens
auuguauuuguuugaaacuaagcuguccucag

SEQ ID NO: 329763 - RNA, 32 nt, Homo Sapiens
uuuuaaauaacauuacauuuuacaaucugaca

SEQ ID NO: 329764 - RNA, 31 nt, Homo Sapiens
uuuccccuugguaacuguuggguugguuucu

SEQ ID NO: 329765 - RNA, 31 nt, Homo Sapiens
acacggaugaaagcagaaaacagccacaaug

SEQ ID NO: 329766 - RNA, 32 nt, Homo Sapiens
cagcaauguguuccgcuuuguccugcugaccc

SEQ ID NO: 329767 - RNA, 32 nt, Homo Sapiens
aaucuaauuguaauuucuuuaacgauucauga

SEQ ID NO: 329768 - RNA, 32 nt, Homo Sapiens
aaagagucaucuuuucugcuguguuuaggaca

SEQ ID NO: 329769 - RNA, 32 nt, Homo Sapiens
auccugaaccagaaaaaguaaaaaauaaaaaa

SEQ ID NO: 329770 - RNA, 32 nt, Homo Sapiens
cuagaaacuggucuuuguuuuguuuuuguuuu

SEQ ID NO: 329771 - RNA, 32 nt, Homo Sapiens
ggucuucaggacuugggagauggggcgcuugg

SEQ ID NO: 329772 - RNA, 32 nt, Homo Sapiens
ccugaaagaggcugaggccuggacuuuccugc

SEQ ID NO: 329773 - RNA, 32 nt, Homo Sapiens
ugccuccugcccacagacccaggccugccggc

SEQ ID NO: 329774 - RNA, 31 nt, Homo Sapiens
acauuggaauaaaaaagauauuuuuguuaca

SEQ ID NO: 329775 - RNA, 32 nt, Homo Sapiens
uggcucuggaggcugcugcugccuggauccug

SEQ ID NO: 329776 - RNA, 32 nt, Homo Sapiens
cuacuaaaaaaguacaacuguauuugaacuuu

SEQ ID NO: 329777 - RNA, 32 nt, Homo Sapiens
gagcggcugggcggggagagccgacggccgcg

SEQ ID NO: 329778 - RNA, 32 nt, Homo Sapiens
ccaagugggaggcacagcgcagccgggaguug

SEQ ID NO: 329779 - RNA, 32 nt, Homo Sapiens
auuaacagagcugggccaaacacauauuuuaa

SEQ ID NO: 329780 - RNA, 32 nt, Homo Sapiens
gucauccucggggccuaugagcuccguaccag

SEQ ID NO: 329781 - RNA, 32 nt, Homo Sapiens
cauagaucauucaucuuaauuuugguaccagu

SEQ ID NO: 329782 - RNA, 32 nt, Homo Sapiens
aaucuuaauuuucaaccuuucuggauaccuua

SEQ ID NO: 329783 - RNA, 31 nt, Homo Sapiens
ugggauuacagcugccugccaccgugcccag

SEQ ID NO: 329784 - RNA, 32 nt, Homo Sapiens
aaaacugcugaggaaggcacgggaggguggcu

SEQ ID NO: 329785 - RNA, 32 nt, Homo Sapiens
aaggccagugaagaagcaaaggaagacaugaa

SEQ ID NO: 329786 - RNA, 32 nt, Homo Sapiens
auagauuugucaacauagauaaaucucaaaaa

SEQ ID NO: 329787 - RNA, 32 nt, Homo Sapiens
auauuuuauggacuuaggaaugauccuuacag

SEQ ID NO: 329788 - RNA, 32 nt, Homo Sapiens
cuggcccaguucugagccaaccuuccuuaacc

SEQ ID NO: 329789 - RNA, 32 nt, Homo Sapiens
acucuggggggcggcgggagcugagcgaguug

SEQ ID NO: 329790 - RNA, 32 nt, Homo Sapiens
uauaguuacucagucucacauacucuaguuac

SEQ ID NO: 329791 - RNA, 32 nt, Homo Sapiens
uaagaauguacaauguauuuguguaauuuaua

SEQ ID NO: 329792 - RNA, 32 nt, Homo Sapiens
aauuaaggaaaugagaauaugauccccucuuc

SEQ ID NO: 329793 - RNA, 32 nt, Homo Sapiens
ccggagcuccccgcgccgcggagcagcuggcc

SEQ ID NO: 329794 - RNA, 32 nt, Homo Sapiens
cacuguacacacaaacucuacuggaauuccug

SEQ ID NO: 329795 - RNA, 31 nt, Homo Sapiens
ggaggccuacccucagggacacauucucuuu

SEQ ID NO: 329796 - RNA, 29 nt, Homo Sapiens
ggcaggggacguccccauuuugauguccc

SEQ ID NO: 329797 - RNA, 32 nt, Homo Sapiens
ccuuuugaaaucuguaaacauaaaauuccucu

SEQ ID NO: 329798 - RNA, 32 nt, Homo Sapiens
aucuacaugguuuucuuuuucuuaguauggga

SEQ ID NO: 329799 - RNA, 32 nt, Homo Sapiens
gccccgcgccccagccgugcugccugcccuca

SEQ ID NO: 329800 - RNA, 32 nt, Homo Sapiens
caaacuccccaaaaccacuuacccaccagcug

SEQ ID NO: 329801 - RNA, 32 nt, Homo Sapiens
uaugugugaauguguggcaucauuucacuuca

SEQ ID NO: 329802 - RNA, 32 nt, Homo Sapiens
uaggcauucacuccacaaagggcucacuggca

SEQ ID NO: 329803 - RNA, 31 nt, Homo Sapiens
aagaagagggcggcgccugcugcugucucgu

SEQ ID NO: 329804 - RNA, 32 nt, Homo Sapiens
auucaggaagcaguugaagauaaagggguuua

SEQ ID NO: 329805 - RNA, 32 nt, Homo Sapiens
cugagugaagccugaagaccaagcccccuccu

SEQ ID NO: 329806 - RNA, 32 nt, Homo Sapiens
gcaauuugucuccuugcaccguacauccacga

SEQ ID NO: 329807 - RNA, 32 nt, Homo Sapiens
agggaacaaaaguggaaacauggcuacuuuug

SEQ ID NO: 329808 - RNA, 32 nt, Homo Sapiens
cagugggagggugccccgucugacaccccugg

SEQ ID NO: 329809 - RNA, 32 nt, Homo Sapiens
ugaaugcuugacuucaacuuuuuaguugacca

SEQ ID NO: 329810 - RNA, 32 nt, Homo Sapiens
acuggcacuggugguuuagauuggcagggaaa

SEQ ID NO: 329811 - RNA, 32 nt, Homo Sapiens
gcccuccacauccuccucccugucuggugucu

SEQ ID NO: 329812 - RNA, 32 nt, Homo Sapiens
uucccauugcuucugcucuccucagagguccc

SEQ ID NO: 329813 - RNA, 32 nt, Homo Sapiens
acuaccucguucuugucuugaugugucaccgg

SEQ ID NO: 329814 - RNA, 32 nt, Homo Sapiens
cucccccgccccaccccgugcuucagccuugc

SEQ ID NO: 329815 - RNA, 31 nt, Homo Sapiens
uuuagagaaaauggcagacgauauugauauu

SEQ ID NO: 329816 - RNA, 32 nt, Homo Sapiens
ccccggagcccagcggcuguggauggcagaag

SEQ ID NO: 329817 - RNA, 32 nt, Homo Sapiens
ccuucacaucaccagcaagcagcuuccaccuu

SEQ ID NO: 329818 - RNA, 32 nt, Homo Sapiens
ccaggaugcaaugauccaaaagauggagcaug

SEQ ID NO: 329819 - RNA, 31 nt, Homo Sapiens
agagggcagcgcagggugccggggaagcucg

SEQ ID NO: 329820 - RNA, 32 nt, Homo Sapiens
auaaaauuuacagauuuaugccaauuauuugu

SEQ ID NO: 329821 - RNA, 32 nt, Homo Sapiens
guaagugccuuacugcagcgugucuccuggca

SEQ ID NO: 329822 - RNA, 32 nt, Homo Sapiens
gacacugagagcugguggugccugcuguccca

SEQ ID NO: 329823 - RNA, 32 nt, Homo Sapiens
auauuugauauuuggaccucuguuucuuuauu

SEQ ID NO: 329824 - RNA, 32 nt, Homo Sapiens
cugagcugauccaaguuuuaugcugauuuuuc

SEQ ID NO: 329825 - RNA, 32 nt, Homo Sapiens
aggagcgcgggccggcgaugcggcugccggcg

SEQ ID NO: 329826 - RNA, 32 nt, Homo Sapiens
uggcagagcuagagcuaggcccugcccuuacc

SEQ ID NO: 329827 - RNA, 32 nt, Homo Sapiens
ucaccuucccaacaccucccccagagcucaga

SEQ ID NO: 329828 - RNA, 32 nt, Homo Sapiens
ccauuagacauuauuacaugcucugucuuggg

SEQ ID NO: 329829 - RNA, 32 nt, Homo Sapiens
cuucccugagggccggccggcaccacaacggg

SEQ ID NO: 329830 - RNA, 32 nt, Homo Sapiens
acaacaggaccagcgauggcucucccugcugg

SEQ ID NO: 329831 - RNA, 32 nt, Homo Sapiens
uaaauuuuggacuuauacaguaagggcuucaa

SEQ ID NO: 329832 - RNA, 32 nt, Homo Sapiens
gagcccaaagcucccccagaucuuuaggaagc

SEQ ID NO: 329833 - RNA, 32 nt, Homo Sapiens
uuuccuugauugcauuuuuguucuuuuagcag

SEQ ID NO: 329834 - RNA, 32 nt, Homo Sapiens
agcuggauuccaaugauucagaaaucgaagua

SEQ ID NO: 329835 - RNA, 32 nt, Homo Sapiens
gagaccuguccucauggcugugacugagaagg

SEQ ID NO: 329836 - RNA, 32 nt, Homo Sapiens
ccggcugcggcuccagcuccgcgcuccgcucu

SEQ ID NO: 329837 - RNA, 30 nt, Homo Sapiens
gcuucggggcccuggccgccggccucccag

SEQ ID NO: 329838 - RNA, 32 nt, Homo Sapiens
ccggcucggcccggcccaugcccagggccgcu

SEQ ID NO: 329839 - RNA, 32 nt, Homo Sapiens
aauaugugggucugauauaaugucagaaaugc

SEQ ID NO: 329840 - RNA, 32 nt, Homo Sapiens
aagagagucaggcuugguggcugggguggcuu

SEQ ID NO: 329841 - RNA, 32 nt, Homo Sapiens
gaaauaaucauuucuauuuucuggcuuacccc

SEQ ID NO: 329842 - RNA, 32 nt, Homo Sapiens
uuguguacaucugugaugauaauuaucagcga

SEQ ID NO: 329843 - RNA, 32 nt, Homo Sapiens
uuguaaggcauacugccuuguuuaaugguagu

SEQ ID NO: 329844 - RNA, 32 nt, Homo Sapiens
aaagaggggaagagggcaugcagucuuaggcu

SEQ ID NO: 329845 - RNA, 32 nt, Homo Sapiens
cagccgcguuugcgggacgugucugcgcggca

SEQ ID NO: 329846 - RNA, 32 nt, Homo Sapiens
acuuuuuugcccauuuacucacugagucccau

SEQ ID NO: 329847 - RNA, 30 nt, Homo Sapiens
ggaaagggagguggcauccagauuugggcc

SEQ ID NO: 329848 - RNA, 32 nt, Homo Sapiens
caucucugccuggcugcccaucaucugggaug

SEQ ID NO: 329849 - RNA, 32 nt, Homo Sapiens
aagaccccgcggcggcggcggcgccaccuccg

SEQ ID NO: 329850 - RNA, 32 nt, Homo Sapiens
ccuaagauugucugagcuuccaucuuucucau

SEQ ID NO: 329851 - RNA, 32 nt, Homo Sapiens
uaaaauaaguaaauuucuuuuggaauauuuuu

SEQ ID NO: 329852 - RNA, 32 nt, Homo Sapiens
ugaggaugaagauaaggaagauacguuaccau

SEQ ID NO: 329853 - RNA, 32 nt, Homo Sapiens
ggacccgugagcucaggagccucagacgccuc

SEQ ID NO: 329854 - RNA, 32 nt, Homo Sapiens
ccgccuggcgcucccgccgcccggcccgacau

SEQ ID NO: 329855 - RNA, 32 nt, Homo Sapiens
uggcacauuggaaagcacacucagaaggcuuc

SEQ ID NO: 329856 - RNA, 32 nt, Homo Sapiens
guuaugcccacuuuucuuauucuuacucagcc

SEQ ID NO: 329857 - RNA, 32 nt, Homo Sapiens
uagacaaauuccucuagguuucagugucuagg

SEQ ID NO: 329858 - RNA, 32 nt, Homo Sapiens
uacagcucaugggaaauguuuugacuuuacaa

SEQ ID NO: 329859 - RNA, 32 nt, Homo Sapiens
agaaugggacguugcuguggacacccaagucg

SEQ ID NO: 329860 - RNA, 32 nt, Homo Sapiens
auagguaaauuuucuuuuucaaauccaauuua

SEQ ID NO: 329861 - RNA, 32 nt, Homo Sapiens
guuugguucccauagcugaggcaaaugcccuu

SEQ ID NO: 329862 - RNA, 32 nt, Homo Sapiens
uccacugcacuccagccugggcgacagaauga

SEQ ID NO: 329863 - RNA, 32 nt, Homo Sapiens
gaucucugcggccuccugggaauccgucugcc

SEQ ID NO: 329864 - RNA, 32 nt, Homo Sapiens
cugcuuccuugggcugccuuucugggggcaug

SEQ ID NO: 329865 - RNA, 32 nt, Homo Sapiens
gucacagacaaaagcauacaguauaaaaauuu

SEQ ID NO: 329866 - RNA, 32 nt, Homo Sapiens
cagccaccgcgcgcccggucgugcuaaucacu

SEQ ID NO: 329867 - RNA, 32 nt, Homo Sapiens
uugugugucuauauacacacgugggaauuaca

SEQ ID NO: 329868 - RNA, 32 nt, Homo Sapiens
uucaaguaggccauggcuaggcagacaguggg

SEQ ID NO: 329869 - RNA, 32 nt, Homo Sapiens
cuagccuggcgcgcgugcacacacacacacac

SEQ ID NO: 329870 - RNA, 32 nt, Homo Sapiens
auaguuuggcugauguaacauaaacaucuucu

SEQ ID NO: 329871 - RNA, 32 nt, Homo Sapiens
aauccggaguggcaauggaguggcugccaugg

SEQ ID NO: 329872 - RNA, 32 nt, Homo Sapiens
uuguuguuuuaaaauauuaugauuuggcuaca

SEQ ID NO: 329873 - RNA, 32 nt, Homo Sapiens
uggagucuugcucugucgcccaggcuguagug

SEQ ID NO: 329874 - RNA, 32 nt, Homo Sapiens
ccggcaguguuacaagcuccgcagccaaaggc

SEQ ID NO: 329875 - RNA, 32 nt, Homo Sapiens
agcaaaaaagaguagagguauuuuauauuagc

SEQ ID NO: 329876 - RNA, 32 nt, Homo Sapiens
uauuugucaaauaaaaucaugaucuuauuguu

SEQ ID NO: 329877 - RNA, 32 nt, Homo Sapiens
ggggacggagaaugacucaggcagggccccag

SEQ ID NO: 329878 - RNA, 32 nt, Homo Sapiens
cgguaccugauccauagaacagcagagaauuu

SEQ ID NO: 329879 - RNA, 32 nt, Homo Sapiens
uaauguuauuuauuuuauuucauuuuccuucc

SEQ ID NO: 329880 - RNA, 32 nt, Homo Sapiens
agaagcccuucuccccgcugggcugacagacu

SEQ ID NO: 329881 - RNA, 32 nt, Homo Sapiens
agagucagaaggugaaguuuguuaguccaugg

SEQ ID NO: 329882 - RNA, 32 nt, Homo Sapiens
ccuacaauacugagagcaccaaggcugugggg

SEQ ID NO: 329883 - RNA, 32 nt, Homo Sapiens
gaguaucuggguuuacagguguguaccgccac

SEQ ID NO: 329884 - RNA, 32 nt, Homo Sapiens
cccuggcccgggagacgcggcccgccagaagg

SEQ ID NO: 329885 - RNA, 32 nt, Homo Sapiens
aucuuuacugaauaaaugcaagucucacuggc

SEQ ID NO: 329886 - RNA, 32 nt, Homo Sapiens
gaugcaguggggcuggccgagccccgguuuuc

SEQ ID NO: 329887 - RNA, 32 nt, Homo Sapiens
uaacaugagugauuuuuguuuuuguuuuuguu

SEQ ID NO: 329888 - RNA, 32 nt, Homo Sapiens
ugcaagccucuggcgggaacugcuaccaaccu

SEQ ID NO: 329889 - RNA, 32 nt, Homo Sapiens
cagauaguaugagaaauaucuuugaaagaaau

SEQ ID NO: 329890 - RNA, 32 nt, Homo Sapiens
augauggugcucacaaucauauacagggaacc

SEQ ID NO: 329891 - RNA, 32 nt, Homo Sapiens
aauuguccucaggucagccucuccagggccaa

SEQ ID NO: 329892 - RNA, 30 nt, Homo Sapiens
ucugcguggggcggacaucagccagacaug

SEQ ID NO: 329893 - RNA, 32 nt, Homo Sapiens
uacauuuugaugguugucuauacucaacugga

SEQ ID NO: 329894 - RNA, 32 nt, Homo Sapiens
ucucugccugucuccuuccaccuccuucccag

SEQ ID NO: 329895 - RNA, 32 nt, Homo Sapiens
augagauuacuuaaugauuuccaauuaaguug

SEQ ID NO: 329896 - RNA, 32 nt, Homo Sapiens
ggcuggggacccuuuccgacccugcccugugc

SEQ ID NO: 329897 - RNA, 32 nt, Homo Sapiens
ggggaagagcaaacaggaaggagagcuaccuc

SEQ ID NO: 329898 - RNA, 32 nt, Homo Sapiens
uggagaggcuggggaggcaggggcccagcauc

SEQ ID NO: 329899 - RNA, 32 nt, Homo Sapiens
cccagggaguccggggcgcacggcaccgagga

SEQ ID NO: 329900 - RNA, 32 nt, Homo Sapiens
cuguucugccccagcuguuccuccuccccugg

SEQ ID NO: 329901 - RNA, 32 nt, Homo Sapiens
uguaucauucuaucaugauuuuauggugcucu

SEQ ID NO: 329902 - RNA, 32 nt, Homo Sapiens
cucugagcagccuccuaccuccccugccugag

SEQ ID NO: 329903 - RNA, 32 nt, Homo Sapiens
gggaugggcugagacccucagagcagccugca

SEQ ID NO: 329904 - RNA, 32 nt, Homo Sapiens
uuuucuuuguucccauuuauccaaauaacuug

SEQ ID NO: 329905 - RNA, 32 nt, Homo Sapiens
cugccauucaccaaauaaagcagcuuugucuu

SEQ ID NO: 329906 - RNA, 32 nt, Homo Sapiens
ggaccaggggucgggcgggccugccuacggaa

SEQ ID NO: 329907 - RNA, 32 nt, Homo Sapiens
uugucuugaguuuggcuaguaaaggcuagcaa

SEQ ID NO: 329908 - RNA, 32 nt, Homo Sapiens
uggaaauguaaauuaauuuacuguauauaaua

SEQ ID NO: 329909 - RNA, 32 nt, Homo Sapiens
ggcuuuggcagguggcuccuaugguaggaagg

SEQ ID NO: 329910 - RNA, 32 nt, Homo Sapiens
uccacuuauccauaggguuggugcugaaaugu

SEQ ID NO: 329911 - RNA, 32 nt, Homo Sapiens
ugauaagacagaggcaaccacaaagcuucaug

SEQ ID NO: 329912 - RNA, 32 nt, Homo Sapiens
uugcccugaaauuauuuuguuuacuuuuuugc

SEQ ID NO: 329913 - RNA, 29 nt, Homo Sapiens
uccaucauauguaucacuaucugaaacua

SEQ ID NO: 329914 - RNA, 32 nt, Homo Sapiens
cucuuccaagguggggacaguggcccaagcaa

SEQ ID NO: 329915 - RNA, 32 nt, Homo Sapiens
agauguuugacugugucaaaagcugugagcag

SEQ ID NO: 329916 - RNA, 32 nt, Homo Sapiens
cugugaugacaaagccuugguuuaacugaggu

SEQ ID NO: 329917 - RNA, 32 nt, Homo Sapiens
gcuuagagacuugcagaccuggcacucgcccu

SEQ ID NO: 329918 - RNA, 28 nt, Homo Sapiens
acaauggacuucuggcuuuggccacuuu

SEQ ID NO: 329919 - RNA, 32 nt, Homo Sapiens
uccagcuucugcacucaccaccaugugggcug

SEQ ID NO: 329920 - RNA, 32 nt, Homo Sapiens
uacaugcaggggauauuuuuugagaugauuua

SEQ ID NO: 329921 - RNA, 32 nt, Homo Sapiens
uuccuuuucaucuauuuaauuauugcccaugu

SEQ ID NO: 329922 - RNA, 32 nt, Homo Sapiens
acaggaaguuggcagcucugcuccaucccugg

SEQ ID NO: 329923 - RNA, 32 nt, Homo Sapiens
uaguuugcauguccagcuaauuuguuucuaua

SEQ ID NO: 329924 - RNA, 32 nt, Homo Sapiens
gacugggagccgaggcaguggugcuggcccaa

SEQ ID NO: 329925 - RNA, 32 nt, Homo Sapiens
uuuucuuccuucccagcucuucaggcagugcg

SEQ ID NO: 329926 - RNA, 32 nt, Homo Sapiens
gggugagcuggggcccacguggcaucgauccu

SEQ ID NO: 329927 - RNA, 32 nt, Homo Sapiens
gcacugccugcccuucuagugaaaaggcuugg

SEQ ID NO: 329928 - RNA, 32 nt, Homo Sapiens
aaagaccacagcacucuaugucuacuucuauu

SEQ ID NO: 329929 - RNA, 32 nt, Homo Sapiens
cuggagcucucgucuggugggaccaugaacug

SEQ ID NO: 329930 - RNA, 32 nt, Homo Sapiens
ugcagcuacauauggaaaauucucaugacuca

SEQ ID NO: 329931 - RNA, 32 nt, Homo Sapiens
auauugaaugcuuucuaacaaaacagaauauu

SEQ ID NO: 329932 - RNA, 32 nt, Homo Sapiens
ccaugcccaagcccaaagccugcacacauucu

SEQ ID NO: 329933 - RNA, 32 nt, Homo Sapiens
uggcggcggcguggaauccggcgugggcuggg

SEQ ID NO: 329934 - RNA, 32 nt, Homo Sapiens
auuaagcacccacugcaugucauugugucuag

SEQ ID NO: 329935 - RNA, 32 nt, Homo Sapiens
acguuugaauacauucucccaagacugagguu

SEQ ID NO: 329936 - RNA, 32 nt, Homo Sapiens
gcgcgagcacgcgaggcucgggggcggcacgg

SEQ ID NO: 329937 - RNA, 32 nt, Homo Sapiens
gguaauaaauguuuuauuuuuuguucauuuuc

SEQ ID NO: 329938 - RNA, 32 nt, Homo Sapiens
uucaggauauuguagaugcacagaugguaggu

SEQ ID NO: 329939 - RNA, 32 nt, Homo Sapiens
aucugggaagcacuucuguaaucacugccugg

SEQ ID NO: 329940 - RNA, 32 nt, Homo Sapiens
cugcucgcgggucguguccgcgggacuguguu

SEQ ID NO: 329941 - RNA, 32 nt, Homo Sapiens
uccaggagcugauguugccaagggaucccauc

SEQ ID NO: 329942 - RNA, 32 nt, Homo Sapiens
acuuuauaaccgcgugaguuaagauuuaauuc

SEQ ID NO: 329943 - RNA, 32 nt, Homo Sapiens
gaaugccaacaguuuaaaaaacagauaaagaa

SEQ ID NO: 329944 - RNA, 32 nt, Homo Sapiens
gguaugaauugauaagaaaugccugcaccuuc

SEQ ID NO: 329945 - RNA, 32 nt, Homo Sapiens
cgggaccccuagcuaccacugccuccaggcua

SEQ ID NO: 329946 - RNA, 32 nt, Homo Sapiens
ggagaggaucuagugcauggaccuccuuguug

SEQ ID NO: 329947 - RNA, 32 nt, Homo Sapiens
uagggagcgagaaggagaaggaggggagcgcu

SEQ ID NO: 329948 - RNA, 32 nt, Homo Sapiens
gcuuuaucccuacaauguacugacaguucuua

SEQ ID NO: 329949 - RNA, 32 nt, Homo Sapiens
ccaggguaucuauauaaagaggguuaaauuuu

SEQ ID NO: 329950 - RNA, 32 nt, Homo Sapiens
uuuuaaaauugaauucauucugaugcuugacc

SEQ ID NO: 329951 - RNA, 32 nt, Homo Sapiens
gucuaacuuuugugaagaacuauuuuauucua

SEQ ID NO: 329952 - RNA, 32 nt, Homo Sapiens
auaagacuuccacucgaugaugcuucuauaau

SEQ ID NO: 329953 - RNA, 32 nt, Homo Sapiens
ucuccgcuacugagacacggcggacacacaca

SEQ ID NO: 329954 - RNA, 32 nt, Homo Sapiens
ucccuucgccccaccguucuucucugcugcau

SEQ ID NO: 329955 - RNA, 32 nt, Homo Sapiens
cggacgcauuuuacuuaguugcuaaguggugg

SEQ ID NO: 329956 - RNA, 31 nt, Homo Sapiens
cagcuagcagucucuuugccaaauaauuaua

SEQ ID NO: 329957 - RNA, 32 nt, Homo Sapiens
gucgccauaguuguguuguuuacaauacucua

SEQ ID NO: 329958 - RNA, 32 nt, Homo Sapiens
ucagagcuguuuuccacagagguagugaaaag

SEQ ID NO: 329959 - RNA, 32 nt, Homo Sapiens
guuaauauuaaauaauaggccuuuuucuagga

SEQ ID NO: 329960 - RNA, 32 nt, Homo Sapiens
uggacagggaaccugaugccagcaacaaucug

SEQ ID NO: 329961 - RNA, 32 nt, Homo Sapiens
gcaauauaggguaaauaaaaccaccugauucu

SEQ ID NO: 329962 - RNA, 32 nt, Homo Sapiens
uaaaaccucuuaauaaacuucuucugaaauau

SEQ ID NO: 329963 - RNA, 32 nt, Homo Sapiens
ggcauuuauaaacugcuugauugugugccuca

SEQ ID NO: 329964 - RNA, 32 nt, Homo Sapiens
acguuccccucauagcagugucacucccaacc

SEQ ID NO: 329965 - RNA, 32 nt, Homo Sapiens
acccauccugccacuucuaugucucuggacca

SEQ ID NO: 329966 - RNA, 32 nt, Homo Sapiens
gucucccugccagcugcccuauguagcuccua

SEQ ID NO: 329967 - RNA, 32 nt, Homo Sapiens
cuggaaaguccuccuccagcuccaccucccuc

SEQ ID NO: 329968 - RNA, 32 nt, Homo Sapiens
ucugcugagaauuaaauaaacaucucuaaagc

SEQ ID NO: 329969 - RNA, 32 nt, Homo Sapiens
caauaguuugggaauugaaagauucuuguuau

SEQ ID NO: 329970 - RNA, 32 nt, Homo Sapiens
aaagacuagacaauuacuauguggucauucuc

SEQ ID NO: 329971 - RNA, 32 nt, Homo Sapiens
uuuuuaaaauuuguguguuuuaucaggggucu

SEQ ID NO: 329972 - RNA, 32 nt, Homo Sapiens
auuaucccaucccuuugagccauucaggggua

SEQ ID NO: 329973 - RNA, 32 nt, Homo Sapiens
ugaauuagagaacaaggcauuauucuuuuagg

SEQ ID NO: 329974 - RNA, 32 nt, Homo Sapiens
agaaauuaagguguacuugaaaacgaauaucu

SEQ ID NO: 329975 - RNA, 32 nt, Homo Sapiens
ccuggaaggacagcaaggcagcuccccagccu

SEQ ID NO: 329976 - RNA, 32 nt, Homo Sapiens
uaguuuuccuuccucaagccccucugugcccc

SEQ ID NO: 329977 - RNA, 32 nt, Homo Sapiens
aaagguuuuucccuccucccccggccgagggc

SEQ ID NO: 329978 - RNA, 32 nt, Homo Sapiens
uucagguuuucuaacaugcuuaccacugggcu

SEQ ID NO: 329979 - RNA, 32 nt, Homo Sapiens
aaaugucaguggaagaagcagaugagaaacuc

SEQ ID NO: 329980 - RNA, 32 nt, Homo Sapiens
cuuguuccuuguuuccucuggguuuuauagug

SEQ ID NO: 329981 - RNA, 32 nt, Homo Sapiens
ucaaagcacuugacaucagggacccugaaccc

SEQ ID NO: 329982 - RNA, 32 nt, Homo Sapiens
gccagugagcaggcggcaagggggcggcaagg

SEQ ID NO: 329983 - RNA, 32 nt, Homo Sapiens
ggagagaaagacauagcagagauggauguuug

SEQ ID NO: 329984 - RNA, 31 nt, Homo Sapiens
caaacuugccgcacccugccccacccccgcc

SEQ ID NO: 329985 - RNA, 32 nt, Homo Sapiens
cccggcccgagcuuguccuugucgcgcaggua

SEQ ID NO: 329986 - RNA, 32 nt, Homo Sapiens
cccuuuuaaaaauuauuauuugaaguaauuua

SEQ ID NO: 329987 - RNA, 32 nt, Homo Sapiens
cauggaagggaagguggggugauagggagggc

SEQ ID NO: 329988 - RNA, 32 nt, Homo Sapiens
uaauuauuacacaacuauaacacaacacaaac

SEQ ID NO: 329989 - RNA, 32 nt, Homo Sapiens
gccccacagccaggcaucuccuccuggccuga

SEQ ID NO: 329990 - RNA, 32 nt, Homo Sapiens
ugaaccaaucugaauguaaaauccaaaagcua

SEQ ID NO: 329991 - RNA, 32 nt, Homo Sapiens
ggcccaucagaugcccucuggcccauggcaca

SEQ ID NO: 329992 - RNA, 32 nt, Homo Sapiens
auaugaagaacuuuaugacuuauguuugccuu

SEQ ID NO: 329993 - RNA, 32 nt, Homo Sapiens
gggcuuccuuuggggccgggaacuugcggguu

SEQ ID NO: 329994 - RNA, 32 nt, Homo Sapiens
uuguuuuuacacaugaaagaaaaagguauaug

SEQ ID NO: 329995 - RNA, 32 nt, Homo Sapiens
caucacagcagugggauaucagagccccagac

SEQ ID NO: 329996 - RNA, 32 nt, Homo Sapiens
acgguuguuuuaacccaaaucauuaccagagu

SEQ ID NO: 329997 - RNA, 32 nt, Homo Sapiens
auguuagacauuaccguaaaauuaaaacgcac

SEQ ID NO: 329998 - RNA, 32 nt, Homo Sapiens
ucaccagccucccaacacacgaguguucaccc

SEQ ID NO: 329999 - RNA, 32 nt, Homo Sapiens
agggugcugaagauguucccacuaauuuccag

SEQ ID NO: 330000 - RNA, 32 nt, Homo Sapiens
uguguuugacauuccuaauuugggaguccuuc

SEQ ID NO: 330001 - RNA, 32 nt, Homo Sapiens
aaaguugcuucaugaagacaagaggagagacu

SEQ ID NO: 330002 - RNA, 32 nt, Homo Sapiens
gcagcagccaucuuguggauaugagggaagag

SEQ ID NO: 330003 - RNA, 32 nt, Homo Sapiens
gcuacuuccaggaucaccaaaaauuacaugua

SEQ ID NO: 330004 - RNA, 32 nt, Homo Sapiens
gcaguguaugugcuuugaaacuugugaaugau

SEQ ID NO: 330005 - RNA, 32 nt, Homo Sapiens
ggggaggugggaagaggaugaggagcaaaguu

SEQ ID NO: 330006 - RNA, 32 nt, Homo Sapiens
cauauucugaagucucaccacacauaauaacc

SEQ ID NO: 330007 - RNA, 32 nt, Homo Sapiens
uaauuugucauuuuuauuuauugggugauguc

SEQ ID NO: 330008 - RNA, 32 nt, Homo Sapiens
guguguggccaggcugcagagcugcgugccgu

SEQ ID NO: 330009 - RNA, 32 nt, Homo Sapiens
uucuucucccccagugcugaucuugcugggcc

SEQ ID NO: 330010 - RNA, 32 nt, Homo Sapiens
agcuuccuccaaggagaugaccuuucugcccc

SEQ ID NO: 330011 - RNA, 31 nt, Homo Sapiens
ccaugguuugugucauuaggaguccacaucc

SEQ ID NO: 330012 - RNA, 32 nt, Homo Sapiens
gaaggcuccagugcggcagagccucgugcaag

SEQ ID NO: 330013 - RNA, 32 nt, Homo Sapiens
uucuccauagaauaaucauuuauuuuugcaga

SEQ ID NO: 330014 - RNA, 32 nt, Homo Sapiens
ccgccucucuccuccgcccacagggguucgug

SEQ ID NO: 330015 - RNA, 32 nt, Homo Sapiens
gaucaguguggugcugcguucuggccaguaaa

SEQ ID NO: 330016 - RNA, 32 nt, Homo Sapiens
uauuuacauaaguuauaucacaauuaaaaugu

SEQ ID NO: 330017 - RNA, 32 nt, Homo Sapiens
guccucuucagcgucuuuuccuagagcugguc

SEQ ID NO: 330018 - RNA, 32 nt, Homo Sapiens
caacugaaaaauacaaucuguggauuaugacu

SEQ ID NO: 330019 - RNA, 32 nt, Homo Sapiens
aauuaccaguucccuuucuugcagucagcuuc

SEQ ID NO: 330020 - RNA, 31 nt, Homo Sapiens
ggaaggauggagcuggccgccggaagcuucu

SEQ ID NO: 330021 - RNA, 32 nt, Homo Sapiens
uaaaagauaaaguggagacaccaaacuuaaaa

SEQ ID NO: 330022 - RNA, 32 nt, Homo Sapiens
ggugaggcaguguggaauaugacccuaccaga

SEQ ID NO: 330023 - RNA, 32 nt, Homo Sapiens
ggaacccacuggaagcgugagcuagcggggac

SEQ ID NO: 330024 - RNA, 32 nt, Homo Sapiens
uuuauuuuuaauccuagagcuucuuauugaug

SEQ ID NO: 330025 - RNA, 32 nt, Homo Sapiens
accccaccuaugagccgcucuccucucggagg

SEQ ID NO: 330026 - RNA, 32 nt, Homo Sapiens
cuccuccgcccgggccgcucggccgguccagc

SEQ ID NO: 330027 - RNA, 32 nt, Homo Sapiens
aagcuggagagagccccaacccugcccgcugg

SEQ ID NO: 330028 - RNA, 31 nt, Homo Sapiens
aaagauuuugauccccauugaguuaaugcuc

SEQ ID NO: 330029 - RNA, 32 nt, Homo Sapiens
cguccccacccccgcgccccagcccuggcagc

SEQ ID NO: 330030 - RNA, 32 nt, Homo Sapiens
gggucucguucaggcuuggggucuccucaccc

SEQ ID NO: 330031 - RNA, 32 nt, Homo Sapiens
acugcagguucucuaggaggcauuccagaaua

SEQ ID NO: 330032 - RNA, 32 nt, Homo Sapiens
ccuggucuggaaagagcugggaggcuucacag

SEQ ID NO: 330033 - RNA, 32 nt, Homo Sapiens
acucgcucccucccccggaucccgacugggaa

SEQ ID NO: 330034 - RNA, 32 nt, Homo Sapiens
gacugggccaggugcuuccugccagcaaagau

SEQ ID NO: 330035 - RNA, 31 nt, Homo Sapiens
ccuggagggccuggucugccccgcgccgccc

SEQ ID NO: 330036 - RNA, 32 nt, Homo Sapiens
uuugauacaauuuuuugaaaguucuuagguga

SEQ ID NO: 330037 - RNA, 32 nt, Homo Sapiens
uacuucuggaaguagaauaaaaaggaggugua

SEQ ID NO: 330038 - RNA, 32 nt, Homo Sapiens
uuuuuguagugggcuggguuuuaaguuauaaa

SEQ ID NO: 330039 - RNA, 32 nt, Homo Sapiens
cacaguucucccuggugccgucuccggcuugg

SEQ ID NO: 330040 - RNA, 32 nt, Homo Sapiens
cccacuugguggccuauaaaggaagccuguga

SEQ ID NO: 330041 - RNA, 32 nt, Homo Sapiens
acugugaggagcuugugccugccugugcagag

SEQ ID NO: 330042 - RNA, 32 nt, Homo Sapiens
gcaccucaucugcugcagaaccacauccugag

SEQ ID NO: 330043 - RNA, 32 nt, Homo Sapiens
cugccuuuacuuugggacuacuuuuaugcuga

SEQ ID NO: 330044 - RNA, 32 nt, Homo Sapiens
gaacucaugguacuucuaaugaaaauggggau

SEQ ID NO: 330045 - RNA, 32 nt, Homo Sapiens
ugcacgcucgggagaagugccacgcgcgucug

SEQ ID NO: 330046 - RNA, 32 nt, Homo Sapiens
aaucggaggccgggcgcugcguguggggugug

SEQ ID NO: 330047 - RNA, 31 nt, Homo Sapiens
uuuaauuuuacauaaggcaguuacuuaaugu

SEQ ID NO: 330048 - RNA, 32 nt, Homo Sapiens
uaacugcccucccguucugcccccaagacgaa

SEQ ID NO: 330049 - RNA, 32 nt, Homo Sapiens
ccgcgccuaccccaucaccgcggccggcgccg

SEQ ID NO: 330050 - RNA, 32 nt, Homo Sapiens
agaucaggacgaaggaccaccgucgguccuca

SEQ ID NO: 330051 - RNA, 32 nt, Homo Sapiens
ucacaaagccaaccaugcccagcccuucccag

SEQ ID NO: 330052 - RNA, 32 nt, Homo Sapiens
gccuggcuaauuuuuguauuuuuuauaaagac

SEQ ID NO: 330053 - RNA, 32 nt, Homo Sapiens
agcccggaccugccuccgccucuuccuccagc

SEQ ID NO: 330054 - RNA, 32 nt, Homo Sapiens
agaaagggcugagacuucugugaugggggcgc

SEQ ID NO: 330055 - RNA, 32 nt, Homo Sapiens
gaggcgcuguagcgagggcugcggcgccgguc

SEQ ID NO: 330056 - RNA, 32 nt, Homo Sapiens
aaaacguucauuuaauuauguauuugaauuau

SEQ ID NO: 330057 - RNA, 31 nt, Homo Sapiens
gcauacccacccucaguuacgugccagaccu

SEQ ID NO: 330058 - RNA, 32 nt, Homo Sapiens
uuggcuggugccuuuccggagugguugcuaac

SEQ ID NO: 330059 - RNA, 32 nt, Homo Sapiens
ggaggcuggagccccaggugcaguggcucuug

SEQ ID NO: 330060 - RNA, 32 nt, Homo Sapiens
agugucucuaauaaacuuucucuucuuucucu

SEQ ID NO: 330061 - RNA, 32 nt, Homo Sapiens
uccagcuuuuuugagguauauuuuaaauguuu

SEQ ID NO: 330062 - RNA, 32 nt, Homo Sapiens
ggccacagugugugauaaauucuucauuaaga

SEQ ID NO: 330063 - RNA, 32 nt, Homo Sapiens
cuguuccacugcccacgggggcgugggagcca

SEQ ID NO: 330064 - RNA, 32 nt, Homo Sapiens
cccccucccuccccgcccgcacggccaccaac

SEQ ID NO: 330065 - RNA, 32 nt, Homo Sapiens
uauuaaaaugguauuauuaauaccauaauacu

SEQ ID NO: 330066 - RNA, 32 nt, Homo Sapiens
ggaggaagggagcuggaaagggggcggaaacc

SEQ ID NO: 330067 - RNA, 32 nt, Homo Sapiens
cuccucgcgggcccggcagcagcuccggcggc

SEQ ID NO: 330068 - RNA, 32 nt, Homo Sapiens
ggcagcccaucccucuucucccuccuggggau

SEQ ID NO: 330069 - RNA, 32 nt, Homo Sapiens
gcgacauggcgcccaaugccacaggguuccgg

SEQ ID NO: 330070 - RNA, 32 nt, Homo Sapiens
cagggugccggggaagcucgggaauggaggug

SEQ ID NO: 330071 - RNA, 32 nt, Homo Sapiens
ugaucauugggaauuuauuuugaaagugagua

SEQ ID NO: 330072 - RNA, 32 nt, Homo Sapiens
ucuuucucaauuaugucagacacacccaaguc

SEQ ID NO: 330073 - RNA, 32 nt, Homo Sapiens
ggggguggugggagaaggaggaggcggcgaau

SEQ ID NO: 330074 - RNA, 32 nt, Homo Sapiens
cggcauacaaauaauaccuauaucuuaauugu

SEQ ID NO: 330075 - RNA, 32 nt, Homo Sapiens
gauucucuuacuuuccucugccugccucaguu

SEQ ID NO: 330076 - RNA, 32 nt, Homo Sapiens
guguuugcuuccuucuugcccagcgcuggguu

SEQ ID NO: 330077 - RNA, 32 nt, Homo Sapiens
aaauagucaacagauguuuccaagaacauaug

SEQ ID NO: 330078 - RNA, 32 nt, Homo Sapiens
auaugcaaaccccccuacuacugcacacccgg

SEQ ID NO: 330079 - RNA, 31 nt, Homo Sapiens
ugagucaucaacacuuugccaauuagcucau

SEQ ID NO: 330080 - RNA, 30 nt, Homo Sapiens
cggagaugcaucugcaucagguccucaccg

SEQ ID NO: 330081 - RNA, 32 nt, Homo Sapiens
agaguuggugaauauuuuagggaaauauuagc

SEQ ID NO: 330082 - RNA, 32 nt, Homo Sapiens
ggcaccccagcugcccugacagaugggucccc

SEQ ID NO: 330083 - RNA, 32 nt, Homo Sapiens
uucggccuccucgcccgccgcgggaacccgag

SEQ ID NO: 330084 - RNA, 32 nt, Homo Sapiens
uuauauacagggucuuuuuucuuuaccgaugu

SEQ ID NO: 330085 - RNA, 32 nt, Homo Sapiens
cucuuuuguucuauucaggccuucaacugauu

SEQ ID NO: 330086 - RNA, 32 nt, Homo Sapiens
guuucugaucuuguuuucccuguggauauugg

SEQ ID NO: 330087 - RNA, 32 nt, Homo Sapiens
aaggcagaggguggguguggggccugaggcuu

SEQ ID NO: 330088 - RNA, 32 nt, Homo Sapiens
ugugggaucuauagaagguuaaguaccacauu

SEQ ID NO: 330089 - RNA, 32 nt, Homo Sapiens
ggcuaugugggagagucagcuaucuugucugg

SEQ ID NO: 330090 - RNA, 31 nt, Homo Sapiens
aauuacagggauguuuuuaaucccacuaugg

SEQ ID NO: 330091 - RNA, 32 nt, Homo Sapiens
cauucucuuccauuuuaaaaugauaaaccugg

SEQ ID NO: 330092 - RNA, 32 nt, Homo Sapiens
aacaugaacaaaugucucugugucauaaacaa

SEQ ID NO: 330093 - RNA, 32 nt, Homo Sapiens
agauugcacuguauuuuccuuagacauuucaa

SEQ ID NO: 330094 - RNA, 32 nt, Homo Sapiens
cagguuacuuuaccucucuggaucuauauuug

SEQ ID NO: 330095 - RNA, 32 nt, Homo Sapiens
uagagaccgccgggucucggcccgcaccagga

SEQ ID NO: 330096 - RNA, 32 nt, Homo Sapiens
uuucauuuuaacuggcaugucauuugcacaca

SEQ ID NO: 330097 - RNA, 31 nt, Homo Sapiens
acugugacagccacucucagcaucacccuga

SEQ ID NO: 330098 - RNA, 32 nt, Homo Sapiens
gugggggcuggugggaggggccccacuagcug

SEQ ID NO: 330099 - RNA, 32 nt, Homo Sapiens
ggccccagcucgggucccacucaucccauggc

SEQ ID NO: 330100 - RNA, 32 nt, Homo Sapiens
uucuuuguucuggucaagguuaacucaauauc

SEQ ID NO: 330101 - RNA, 32 nt, Homo Sapiens
ccaaugucuguuucgcaucacaacacaguauc

SEQ ID NO: 330102 - RNA, 32 nt, Homo Sapiens
ccccacccaggccacucagaaaacaccuguga

SEQ ID NO: 330103 - RNA, 32 nt, Homo Sapiens
uauagguguacaugugcaugaguuguguacau

SEQ ID NO: 330104 - RNA, 28 nt, Homo Sapiens
cggaccuggugcugcaggaugacuggag

SEQ ID NO: 330105 - RNA, 32 nt, Homo Sapiens
gacuggaguguuuuuucuuuuuaauaaaaaga

SEQ ID NO: 330106 - RNA, 32 nt, Homo Sapiens
aggcgcgcuuguuuuucuccugcucuccccca

SEQ ID NO: 330107 - RNA, 32 nt, Homo Sapiens
ugcucuuacauauauugaugguccucaugcaa

SEQ ID NO: 330108 - RNA, 32 nt, Homo Sapiens
auaaugcuuuuguauggcacuuuauaguuuuc

SEQ ID NO: 330109 - RNA, 32 nt, Homo Sapiens
uguaugcaacagagaugcugcagcugaugccu

SEQ ID NO: 330110 - RNA, 32 nt, Homo Sapiens
agaacaaaaugaaaauucucccauguguacuu

SEQ ID NO: 330111 - RNA, 32 nt, Homo Sapiens
aacgguuaaugacuuuugggguuguuuugcuu

SEQ ID NO: 330112 - RNA, 32 nt, Homo Sapiens
ggcccggaaugggaaaaucuauuccaaagaga

SEQ ID NO: 330113 - RNA, 32 nt, Homo Sapiens
gccgggaguguugagugaagggaccaggugga

SEQ ID NO: 330114 - RNA, 32 nt, Homo Sapiens
guggggaggaggaggcacaguuaauggaucug

SEQ ID NO: 330115 - RNA, 32 nt, Homo Sapiens
uuuacaccaagaacuucucaauaaaagaaaau

SEQ ID NO: 330116 - RNA, 32 nt, Homo Sapiens
ccacugauuucagaguagaaaaaaugcuuauu

SEQ ID NO: 330117 - RNA, 32 nt, Homo Sapiens
cacaugcauuggccuggcaucuagacccuggc

SEQ ID NO: 330118 - RNA, 32 nt, Homo Sapiens
ucugagcucugaggagaguccuguggggaugg

SEQ ID NO: 330119 - RNA, 32 nt, Homo Sapiens
uauacuaugaggcccuaucuuuugcauccuac

SEQ ID NO: 330120 - RNA, 32 nt, Homo Sapiens
uggagucuuguacacuuaagcagagcagaagu

SEQ ID NO: 330121 - RNA, 32 nt, Homo Sapiens
cauguucuuuuuccugcaauuaauaaucagac

SEQ ID NO: 330122 - RNA, 32 nt, Homo Sapiens
guugggaccgcgcacagaccgccccugcaguc

SEQ ID NO: 330123 - RNA, 32 nt, Homo Sapiens
ccuaauugaagaguggcagaggcuacuacaaa

SEQ ID NO: 330124 - RNA, 32 nt, Homo Sapiens
acugaaccaggagaucuggcuggggcuaagaa

SEQ ID NO: 330125 - RNA, 32 nt, Homo Sapiens
uucaugggccaagucuagggccccacugcucu

SEQ ID NO: 330126 - RNA, 32 nt, Homo Sapiens
cgacuggaaagauaauuuaucguguuaggaga

SEQ ID NO: 330127 - RNA, 32 nt, Homo Sapiens
ugaugucgaguaugagcuccggugccuccuca

SEQ ID NO: 330128 - RNA, 32 nt, Homo Sapiens
uuuguuuucccuaacaauuuggacacuacaau

SEQ ID NO: 330129 - RNA, 32 nt, Homo Sapiens
cguugguccccacagcagcagugccucgguuc

SEQ ID NO: 330130 - RNA, 32 nt, Homo Sapiens
guuugggucuccuaggcccacccuuucuagga

SEQ ID NO: 330131 - RNA, 32 nt, Homo Sapiens
guggaggcggccacaccacgaguggaugcugu

SEQ ID NO: 330132 - RNA, 32 nt, Homo Sapiens
guugaaaaugguuagaauaaaaaccuaugacu

SEQ ID NO: 330133 - RNA, 32 nt, Homo Sapiens
aaaugcauuaauaucuaacauaaaauuguuaa

SEQ ID NO: 330134 - RNA, 32 nt, Homo Sapiens
auggaggugaggauuuucacuucuuuucucua

SEQ ID NO: 330135 - RNA, 32 nt, Homo Sapiens
auuuaaaaaaauuuuuauuaauguauuuuuaa

SEQ ID NO: 330136 - RNA, 32 nt, Homo Sapiens
ucugaccugaugcagacgcaaggggguuaaua

SEQ ID NO: 330137 - RNA, 32 nt, Homo Sapiens
agccaccaguguuggccuugaagcagagggca

SEQ ID NO: 330138 - RNA, 32 nt, Homo Sapiens
ggagagaauaaauaccgguuuggggauucuca

SEQ ID NO: 330139 - RNA, 32 nt, Homo Sapiens
uuugaaaaaaagacaaaauaucuaaaaaaugu

SEQ ID NO: 330140 - RNA, 32 nt, Homo Sapiens
gccguccccgcacccgcaccgcggcuacuggc

SEQ ID NO: 330141 - RNA, 32 nt, Homo Sapiens
acccucuuuguccuugcccuuuccugcucucu

SEQ ID NO: 330142 - RNA, 32 nt, Homo Sapiens
ccuaucaaaaacgaugaggaaaaaagauugca

SEQ ID NO: 330143 - RNA, 29 nt, Homo Sapiens
gacugcuguugccaauaccucagacucca

SEQ ID NO: 330144 - RNA, 32 nt, Homo Sapiens
gcgcgggccagacggcgcccggaggcuccgca

SEQ ID NO: 330145 - RNA, 32 nt, Homo Sapiens
cuuugacaaagcaaacaaaacauaaagugggg

SEQ ID NO: 330146 - RNA, 32 nt, Homo Sapiens
aaaagggacuguuuuucuauggacuaaguaga

SEQ ID NO: 330147 - RNA, 32 nt, Homo Sapiens
gcaggacugaagaugggcaaauuguaggcauu

SEQ ID NO: 330148 - RNA, 32 nt, Homo Sapiens
ccugcgcccuccccgccuccgagugcagaguu

SEQ ID NO: 330149 - RNA, 32 nt, Homo Sapiens
aagagcuuagaggcaaguuacacaauguuuuc

SEQ ID NO: 330150 - RNA, 32 nt, Homo Sapiens
gcuuuucuaaucugcaguggcucuuacaaaac

SEQ ID NO: 330151 - RNA, 32 nt, Homo Sapiens
ggggaugaugauccuaucucacugcuuuugug

SEQ ID NO: 330152 - RNA, 32 nt, Homo Sapiens
caggagaaagauggauuuuaacccaaaauuau

SEQ ID NO: 330153 - RNA, 32 nt, Homo Sapiens
cugccccugccagcaggugccagggcugguga

SEQ ID NO: 330154 - RNA, 32 nt, Homo Sapiens
aguagucuccauggugggccugucccagcccu

SEQ ID NO: 330155 - RNA, 32 nt, Homo Sapiens
ccaggaggagccugaggcccagggaucgggac

SEQ ID NO: 330156 - RNA, 32 nt, Homo Sapiens
ugaauaaguauggcuguauuccaauaaaguuu

SEQ ID NO: 330157 - RNA, 32 nt, Homo Sapiens
uccgcucccccuccuucccuccagccggggcc

SEQ ID NO: 330158 - RNA, 32 nt, Homo Sapiens
ugcgggaaaaggagagguaaacaguggaggua

SEQ ID NO: 330159 - RNA, 32 nt, Homo Sapiens
ucugcgcgguccggcccggcgggcgguagcuc

SEQ ID NO: 330160 - RNA, 31 nt, Homo Sapiens
ugaaaucugccgguacucgcucugcgggcug

SEQ ID NO: 330161 - RNA, 32 nt, Homo Sapiens
auagcucacugcagcaucaaauuccuaggcuc

SEQ ID NO: 330162 - RNA, 32 nt, Homo Sapiens
gacacugcccccacccuugaccucaacagggu

SEQ ID NO: 330163 - RNA, 32 nt, Homo Sapiens
gccugauggacgccugguguggacgaugaggg

SEQ ID NO: 330164 - RNA, 32 nt, Homo Sapiens
uuuuugcugugccgcuuuuuuagggcucacac

SEQ ID NO: 330165 - RNA, 32 nt, Homo Sapiens
accuccaggaggaagaaggcgaagggccacgu

SEQ ID NO: 330166 - RNA, 32 nt, Homo Sapiens
acuuacacuacuuuuuaccauguuucaucuug

SEQ ID NO: 330167 - RNA, 32 nt, Homo Sapiens
gaaguucguucuugcgcaaagcccaaaggcug

SEQ ID NO: 330168 - RNA, 32 nt, Homo Sapiens
uaauaaggagcagcuuuuuuuuuuuuuucuua

SEQ ID NO: 330169 - RNA, 32 nt, Homo Sapiens
gguuuccguucaagggcaaggaucacagcugc

SEQ ID NO: 330170 - RNA, 32 nt, Homo Sapiens
cacugcacuccagcuuaggugacagagugaga

SEQ ID NO: 330171 - RNA, 31 nt, Homo Sapiens
augggagcugccugccugcugcugcugcugc

SEQ ID NO: 330172 - RNA, 32 nt, Homo Sapiens
caaaccaacaggcuaccaacuuguauccaggc

SEQ ID NO: 330173 - RNA, 32 nt, Homo Sapiens
guaugcuuguuuuaaacaaacacucaacguac

SEQ ID NO: 330174 - RNA, 32 nt, Homo Sapiens
gucggcugggugccugcguccaggcgaggaca

SEQ ID NO: 330175 - RNA, 32 nt, Homo Sapiens
acaggaaaagauuguguuuuauaucaucccua

SEQ ID NO: 330176 - RNA, 32 nt, Homo Sapiens
cuguccugggguggcuaggagcugggucugac

SEQ ID NO: 330177 - RNA, 32 nt, Homo Sapiens
uucccggccggacugagaaggggagcgcgcug

SEQ ID NO: 330178 - RNA, 32 nt, Homo Sapiens
cccgacuccuccccgcgcuccacggcucuucc

SEQ ID NO: 330179 - RNA, 32 nt, Homo Sapiens
uuccuggcagcacuggcccagggugcgcugga

SEQ ID NO: 330180 - RNA, 32 nt, Homo Sapiens
cucggaacacgccauucuccgcgccgcuucca

SEQ ID NO: 330181 - RNA, 32 nt, Homo Sapiens
uguagcagccuuagucgccgccgccgcggggc

SEQ ID NO: 330182 - RNA, 32 nt, Homo Sapiens
ccauguucugaacugcagcuuuacaguugaau

SEQ ID NO: 330183 - RNA, 32 nt, Homo Sapiens
uuccuuuuuaucaaaguguacacuacugaugc

SEQ ID NO: 330184 - RNA, 32 nt, Homo Sapiens
ugagcccugaguaugccuggacauugaugcua

SEQ ID NO: 330185 - RNA, 32 nt, Homo Sapiens
gccacagucggagcagaggaggucuuggcaga

SEQ ID NO: 330186 - RNA, 32 nt, Homo Sapiens
uuugaggaccucugcagaccaucagaucaaag

SEQ ID NO: 330187 - RNA, 32 nt, Homo Sapiens
ccauuaucuuauccgucucuucccgucccuga

SEQ ID NO: 330188 - RNA, 32 nt, Homo Sapiens
uuccuuuugucaauaauuaaucaccggaauua

SEQ ID NO: 330189 - RNA, 32 nt, Homo Sapiens
cuaccuggaccaauucugucugauggggugug

SEQ ID NO: 330190 - RNA, 32 nt, Homo Sapiens
agccagagccuccauaugcuugaagugcugau

SEQ ID NO: 330191 - RNA, 32 nt, Homo Sapiens
agcuggcccgcgucauuguccuggacacggau

SEQ ID NO: 330192 - RNA, 32 nt, Homo Sapiens
uucagauggaaauggggaaagaauaauauuaa

SEQ ID NO: 330193 - RNA, 30 nt, Homo Sapiens
ccugcccuguggagcauccgugaggggaac

SEQ ID NO: 330194 - RNA, 32 nt, Homo Sapiens
uccuugccgcccgccccggcccagccgcgucc

SEQ ID NO: 330195 - RNA, 32 nt, Homo Sapiens
uucuucuucuuuuuuuuuuuuaaacugaggau

SEQ ID NO: 330196 - RNA, 32 nt, Homo Sapiens
gcugugaaaaggagagggcagguuuuggagcc

SEQ ID NO: 330197 - RNA, 32 nt, Homo Sapiens
gcgcucguuccuggagucggcggccgcugcgc

SEQ ID NO: 330198 - RNA, 32 nt, Homo Sapiens
ucugaaccuucaagaauauaaaacuaaaguau

SEQ ID NO: 330199 - RNA, 32 nt, Homo Sapiens
cuugcuuugucucuccuuuccgagucaauggu

SEQ ID NO: 330200 - RNA, 32 nt, Homo Sapiens
cacauucccaaguuuaggugcacugagccaua

SEQ ID NO: 330201 - RNA, 32 nt, Homo Sapiens
ugccacugagugagcuccagaucgacgcugag

SEQ ID NO: 330202 - RNA, 32 nt, Homo Sapiens
aggagagcggccgggcgucagcuccucgaccc

SEQ ID NO: 330203 - RNA, 32 nt, Homo Sapiens
acucccagaaagaaaggcuggugccuggucuc

SEQ ID NO: 330204 - RNA, 32 nt, Homo Sapiens
gcuggagaauugaagggggcggaccccggauu

SEQ ID NO: 330205 - RNA, 32 nt, Homo Sapiens
ccacauucugaccaugagacacggcuugcagu

SEQ ID NO: 330206 - RNA, 30 nt, Homo Sapiens
uggcaguccugcucacaguguucugugccu

SEQ ID NO: 330207 - RNA, 32 nt, Homo Sapiens
gaagucaggaggaagggaagaugugagugugc

SEQ ID NO: 330208 - RNA, 32 nt, Homo Sapiens
auuugaauaauaagcguuuaaaugcuauuugu

SEQ ID NO: 330209 - RNA, 32 nt, Homo Sapiens
gacacuuccuuccuucccucauugagcacucc

SEQ ID NO: 330210 - RNA, 32 nt, Homo Sapiens
uuuuauacauaaaucucuugguagauuuucag

SEQ ID NO: 330211 - RNA, 32 nt, Homo Sapiens
uugggggcgggggaggguggcagugggagggg

SEQ ID NO: 330212 - RNA, 32 nt, Homo Sapiens
cacccuggggcagugaagugccacugguuuac

SEQ ID NO: 330213 - RNA, 28 nt, Homo Sapiens
cgcaaagggccgaccaggaugacgaaac

SEQ ID NO: 330214 - RNA, 32 nt, Homo Sapiens
cuacuauauuccagacuggaaauguaugaaug

SEQ ID NO: 330215 - RNA, 32 nt, Homo Sapiens
gggguggauugaacuuugcauaaaccucuuua

SEQ ID NO: 330216 - RNA, 32 nt, Homo Sapiens
cuagugcucgggccgcgccugccagccgcggg

SEQ ID NO: 330217 - RNA, 32 nt, Homo Sapiens
agcuuuuuggguuuggaauggaguaaaaaaug

SEQ ID NO: 330218 - RNA, 32 nt, Homo Sapiens
uauauucuuuaaccuugcugagcuaguauuga

SEQ ID NO: 330219 - RNA, 32 nt, Homo Sapiens
cuaugggcaacacaaucaugcaauuauaauuu

SEQ ID NO: 330220 - RNA, 32 nt, Homo Sapiens
cauaguaggccaggugugaauuacuuauguuu

SEQ ID NO: 330221 - RNA, 32 nt, Homo Sapiens
ucugucuauaucuaucuaacauuuaucuauca

SEQ ID NO: 330222 - RNA, 32 nt, Homo Sapiens
aacugaacaauggagccagacaucauucgaau

SEQ ID NO: 330223 - RNA, 32 nt, Homo Sapiens
uccgcgcccggccggacccgggcccgagauca

SEQ ID NO: 330224 - RNA, 32 nt, Homo Sapiens
cuucggguugacaugagaaaggucuuuagcaa

SEQ ID NO: 330225 - RNA, 32 nt, Homo Sapiens
ggagauagagaccaucauugcuaacaugguga

SEQ ID NO: 330226 - RNA, 32 nt, Homo Sapiens
auuggggugcuuugggauaaaagauuuaugag

SEQ ID NO: 330227 - RNA, 32 nt, Homo Sapiens
cucugaucauguuugguuuucuucuuccuuau

SEQ ID NO: 330228 - RNA, 32 nt, Homo Sapiens
ugaauuuacuggacauaacauuuucagaauag

SEQ ID NO: 330229 - RNA, 32 nt, Homo Sapiens
uccuucauuucuaucagccuuuauugaaagca

SEQ ID NO: 330230 - RNA, 32 nt, Homo Sapiens
aaagcugacaucagaggaagagucacaaaggu

SEQ ID NO: 330231 - RNA, 32 nt, Homo Sapiens
accuggucuccaucaacagagccauguaaccg

SEQ ID NO: 330232 - RNA, 32 nt, Homo Sapiens
uuuuuucuuuugcacauuuuucuuguauuaag

SEQ ID NO: 330233 - RNA, 32 nt, Homo Sapiens
agaguccaggaugacgggaucccgcacaagcu

SEQ ID NO: 330234 - RNA, 32 nt, Homo Sapiens
ugcuuuuacuuccaucucuccccucuugaccu

SEQ ID NO: 330235 - RNA, 32 nt, Homo Sapiens
uuuagaaauaccagcauaauaaguaguaugac

SEQ ID NO: 330236 - RNA, 32 nt, Homo Sapiens
guaauaauauguaauauaaauaaaacuauggu

SEQ ID NO: 330237 - RNA, 32 nt, Homo Sapiens
ggaucccagucaccugugugcaugucaagugg

SEQ ID NO: 330238 - RNA, 32 nt, Homo Sapiens
ugcucuccaagcgcaggacggcaccgaggugg

SEQ ID NO: 330239 - RNA, 32 nt, Homo Sapiens
ugugcuccagcaggccagagccagacacgacc

SEQ ID NO: 330240 - RNA, 32 nt, Homo Sapiens
ccauagcacuguagaauacguguuucuauaau

SEQ ID NO: 330241 - RNA, 32 nt, Homo Sapiens
uagacuggucgggauuaaguaaaagacggcua

SEQ ID NO: 330242 - RNA, 32 nt, Homo Sapiens
ugccccucggccccccaguccugcagccucgc

SEQ ID NO: 330243 - RNA, 32 nt, Homo Sapiens
guggugggagcagaggguacccugccccacca

SEQ ID NO: 330244 - RNA, 32 nt, Homo Sapiens
ccacugguucccuccagccgccgccguccagc

SEQ ID NO: 330245 - RNA, 32 nt, Homo Sapiens
uuuccccgcuucagcccucaacugccucgagu

SEQ ID NO: 330246 - RNA, 32 nt, Homo Sapiens
ugagucaccaagaaguaacacuuuuuaaacuu

SEQ ID NO: 330247 - RNA, 32 nt, Homo Sapiens
aguaccuacugccgagauguccugccagcaga

SEQ ID NO: 330248 - RNA, 32 nt, Homo Sapiens
gccguggagcccaggcuuugaugucuuucaaa

SEQ ID NO: 330249 - RNA, 32 nt, Homo Sapiens
cuaggacuugccuuuguuaucuguaaauuaga

SEQ ID NO: 330250 - RNA, 32 nt, Homo Sapiens
aguaaagaaaaauaacaaaaguuguaaaaugu

SEQ ID NO: 330251 - RNA, 32 nt, Homo Sapiens
ccuaaucaagauuguuugaacacauguauuua

SEQ ID NO: 330252 - RNA, 32 nt, Homo Sapiens
gccguucugcaggacaaaucucucaccaggac

SEQ ID NO: 330253 - RNA, 32 nt, Homo Sapiens
cauuuguccacccacccuccaauaagcuggag

SEQ ID NO: 330254 - RNA, 32 nt, Homo Sapiens
agcgguuaucuuucuuuuuuacuuugcacauc

SEQ ID NO: 330255 - RNA, 32 nt, Homo Sapiens
aggugagucccgagaccaguuggguaccucuc

SEQ ID NO: 330256 - RNA, 30 nt, Homo Sapiens
aggucgggcaggcgggucgcagguuguaaa

SEQ ID NO: 330257 - RNA, 32 nt, Homo Sapiens
gacccaagguaguccuggcacugcccugugga

SEQ ID NO: 330258 - RNA, 32 nt, Homo Sapiens
caugcaugucccagccccugggcccuagcccu

SEQ ID NO: 330259 - RNA, 32 nt, Homo Sapiens
auuuaaauccagcugaggcucccuuuguuuuc

SEQ ID NO: 330260 - RNA, 32 nt, Homo Sapiens
ugaccagcagagagacuugaggcuacuuuaag

SEQ ID NO: 330261 - RNA, 32 nt, Homo Sapiens
cuuguugccuagccagauuuccccucagcuua

SEQ ID NO: 330262 - RNA, 32 nt, Homo Sapiens
uguuggcgggcuccggacccuguugccccugg

SEQ ID NO: 330263 - RNA, 32 nt, Homo Sapiens
ggaagcgguuagugcuuagaguagcaaagcuu

SEQ ID NO: 330264 - RNA, 32 nt, Homo Sapiens
aggagcccaagcacaagagcacuuaggagaag

SEQ ID NO: 330265 - RNA, 32 nt, Homo Sapiens
cucaggaaggucggagggugggggcacugucu

SEQ ID NO: 330266 - RNA, 32 nt, Homo Sapiens
ucagaguugacucccugaaaagugcagccggu

SEQ ID NO: 330267 - RNA, 32 nt, Homo Sapiens
aaugaguguaggaaggaagagaaaugaugcua

SEQ ID NO: 330268 - RNA, 32 nt, Homo Sapiens
ggccugaagaucugugagugggacugcuuggg

SEQ ID NO: 330269 - RNA, 32 nt, Homo Sapiens
ccuacuuggagcagcaaaguaugccaaguccc

SEQ ID NO: 330270 - RNA, 32 nt, Homo Sapiens
guuucggguggaauggcuaaaccuggcgccca

SEQ ID NO: 330271 - RNA, 32 nt, Homo Sapiens
ccggauccuggcggccugggcggccgcaccau

SEQ ID NO: 330272 - RNA, 32 nt, Homo Sapiens
ugaucaggaugcugccuauuggaauguuuauc

SEQ ID NO: 330273 - RNA, 32 nt, Homo Sapiens
agcacccauaguccaggcguggggaccucaac

SEQ ID NO: 330274 - RNA, 32 nt, Homo Sapiens
ccauauucauugcaugcaaaucuuauuguuag

SEQ ID NO: 330275 - RNA, 32 nt, Homo Sapiens
uggugcauuccugaagucucuaaugugacugu

SEQ ID NO: 330276 - RNA, 32 nt, Homo Sapiens
uuucuuggccccagcugcccagcaggugccuc

SEQ ID NO: 330277 - RNA, 27 nt, Homo Sapiens
uuuucucauuaauuuuggucuaaaaca

SEQ ID NO: 330278 - RNA, 32 nt, Homo Sapiens
uauuuucuguaauucuucuccuuugucaaaug

SEQ ID NO: 330279 - RNA, 32 nt, Homo Sapiens
gcgccccccgggggcgggaagcugccucacag

SEQ ID NO: 330280 - RNA, 32 nt, Homo Sapiens
cuuccuuuuuuuucuuuuuuccuuucuuuccu

SEQ ID NO: 330281 - RNA, 32 nt, Homo Sapiens
ccugcgggagcuggaggcggccucggccugcc

SEQ ID NO: 330282 - RNA, 32 nt, Homo Sapiens
uuuugaaaucgaguuucuuuuguauugaguca

SEQ ID NO: 330283 - RNA, 32 nt, Homo Sapiens
auguuuuccuuuucaacuuuucaguguugacu

SEQ ID NO: 330284 - RNA, 32 nt, Homo Sapiens
aggcucugguuucuccuuccccaugucugaaa

SEQ ID NO: 330285 - RNA, 31 nt, Homo Sapiens
uuaccaagaaagaaaauguuaucgauacuaa

SEQ ID NO: 330286 - RNA, 32 nt, Homo Sapiens
aauauaaaaacaaauuaauguuuuauagaccc

SEQ ID NO: 330287 - RNA, 32 nt, Homo Sapiens
cugaguaaggauccuugguacuugguggcauc

SEQ ID NO: 330288 - RNA, 32 nt, Homo Sapiens
gccaugggggagcucacccaccccacaauucc

SEQ ID NO: 330289 - RNA, 32 nt, Homo Sapiens
cacagcugugccagacagugaaugggaagggg

SEQ ID NO: 330290 - RNA, 32 nt, Homo Sapiens
guccagagccgccccacccccauccugccgcu

SEQ ID NO: 330291 - RNA, 32 nt, Homo Sapiens
ucuucuuuuguuuucuuuuaaauuaaaaauga

SEQ ID NO: 330292 - RNA, 31 nt, Homo Sapiens
gccucuggauccaagaaccaggggccugagg

SEQ ID NO: 330293 - RNA, 32 nt, Homo Sapiens
gcgagcggcgaagcggcuggagggcggcgaga

SEQ ID NO: 330294 - RNA, 32 nt, Homo Sapiens
agcccaugccagcccaugccagcuccuggguc

SEQ ID NO: 330295 - RNA, 32 nt, Homo Sapiens
ccuccuuuccagugaaacuacaccugaagccc

SEQ ID NO: 330296 - RNA, 31 nt, Homo Sapiens
gagaaagagccccagaaaaaugaguccagca

SEQ ID NO: 330297 - RNA, 32 nt, Homo Sapiens
ccucugcauauucucauguuccccucacccau

SEQ ID NO: 330298 - RNA, 32 nt, Homo Sapiens
ucaauggagacaauaaaguguugucuuuuucu

SEQ ID NO: 330299 - RNA, 32 nt, Homo Sapiens
gugggaugagagacugagaaaagaaauaagac

SEQ ID NO: 330300 - RNA, 32 nt, Homo Sapiens
uacacacacacauagauacacacacacacacc

SEQ ID NO: 330301 - RNA, 32 nt, Homo Sapiens
ugccuguaaucccagcacuuugggauucugag

SEQ ID NO: 330302 - RNA, 32 nt, Homo Sapiens
cacauuagaaucacguaggagcuuaaaaagua

SEQ ID NO: 330303 - RNA, 32 nt, Homo Sapiens
cggcacacugucaguacaucaggcacaugggc

SEQ ID NO: 330304 - RNA, 32 nt, Homo Sapiens
gauggauguuugagcgacacacacguguaaca

SEQ ID NO: 330305 - RNA, 32 nt, Homo Sapiens
ggcagcucgccucggaaugaccucugacggaa

SEQ ID NO: 330306 - RNA, 32 nt, Homo Sapiens
cuguuucugcgggcacagcugcagcaauuacc

SEQ ID NO: 330307 - RNA, 32 nt, Homo Sapiens
cucuucugugccuugucugagguccuugucca

SEQ ID NO: 330308 - RNA, 32 nt, Homo Sapiens
cugcuguucgaaucaagcaggaaccccuggac

SEQ ID NO: 330309 - RNA, 32 nt, Homo Sapiens
ggucucucacuuucagcacuauugacauuugg

SEQ ID NO: 330310 - RNA, 32 nt, Homo Sapiens
ggcagaucuugugacugagacccucugacuga

SEQ ID NO: 330311 - RNA, 32 nt, Homo Sapiens
cuguuaaagcuacuaauugucucaguguaagu

SEQ ID NO: 330312 - RNA, 32 nt, Homo Sapiens
accagccuggccaacauagugaaaacugucuc

SEQ ID NO: 330313 - RNA, 32 nt, Homo Sapiens
accaagggaaagcaaaaagagaaggcagauga

SEQ ID NO: 330314 - RNA, 32 nt, Homo Sapiens
caguuugaucugaaagaaauaaaggcauuuaa

SEQ ID NO: 330315 - RNA, 32 nt, Homo Sapiens
ccucauagaauccuaauuguuucuguaugugu

SEQ ID NO: 330316 - RNA, 32 nt, Homo Sapiens
gggaaguugggcgggggugcagccgagggcgu

SEQ ID NO: 330317 - RNA, 29 nt, Homo Sapiens
ggcaacuuauguuucaggguugugggugg

SEQ ID NO: 330318 - RNA, 32 nt, Homo Sapiens
agaucaucacuaucgaguaaauuuaugucagu

SEQ ID NO: 330319 - RNA, 32 nt, Homo Sapiens
aggaacccgcgccccggcuccucggcgaucca

SEQ ID NO: 330320 - RNA, 32 nt, Homo Sapiens
gugucuaugauaugugauacaaagcaaauauu

SEQ ID NO: 330321 - RNA, 27 nt, Homo Sapiens
uccccagcccucuucagcccuccccag

SEQ ID NO: 330322 - RNA, 32 nt, Homo Sapiens
cucaugggcaggacagcuucgggaguugagug

SEQ ID NO: 330323 - RNA, 32 nt, Homo Sapiens
cugacagaugcagggauggccgaggcagcccu

SEQ ID NO: 330324 - RNA, 32 nt, Homo Sapiens
uuuaauaaaugauccauauaaaaauagagaaa

SEQ ID NO: 330325 - RNA, 32 nt, Homo Sapiens
gcuaccagcagcaauacaauggcuggccgccu

SEQ ID NO: 330326 - RNA, 32 nt, Homo Sapiens
caggagaagacggaagcuggaguuggacaugg

SEQ ID NO: 330327 - RNA, 32 nt, Homo Sapiens
aggagccccccuccacagauguccccccaucc

SEQ ID NO: 330328 - RNA, 32 nt, Homo Sapiens
auggccagcuggaggcaggggcuuccuggugc

SEQ ID NO: 330329 - RNA, 32 nt, Homo Sapiens
ccccgacaccgggucuccuagcuugaguuccc

SEQ ID NO: 330330 - RNA, 23 nt, Homo Sapiens
ggccaauaaaaaguucagagguu

SEQ ID NO: 330331 - RNA, 32 nt, Homo Sapiens
ggaaaccaguaauuauuuuguuucuguagauu

SEQ ID NO: 330332 - RNA, 32 nt, Homo Sapiens
ugccaucccgucugccugccaugggacggcuc

SEQ ID NO: 330333 - RNA, 32 nt, Homo Sapiens
ucugccccacccagauaaucgcugcugccccu

SEQ ID NO: 330334 - RNA, 32 nt, Homo Sapiens
ugggaaagacaccaaaucaugggcucacuuua

SEQ ID NO: 330335 - RNA, 32 nt, Homo Sapiens
gaggaaaaguccacaagaacaauucaagaaac

SEQ ID NO: 330336 - RNA, 32 nt, Homo Sapiens
cuuugucagaacuuguacaaucuucuuuugau

SEQ ID NO: 330337 - RNA, 32 nt, Homo Sapiens
cucuuuguucuucuugcccgaguuuucuuuau

SEQ ID NO: 330338 - RNA, 32 nt, Homo Sapiens
gagccaaggacaggugaaguugccagagagca

SEQ ID NO: 330339 - RNA, 32 nt, Homo Sapiens
gaucgcuugagcucaggaguuagagaccagcc

SEQ ID NO: 330340 - RNA, 32 nt, Homo Sapiens
cugaucccucugggggcucuggccaagggcca

SEQ ID NO: 330341 - RNA, 32 nt, Homo Sapiens
uguggugaccauuccgcuccucucccacuacc

SEQ ID NO: 330342 - RNA, 32 nt, Homo Sapiens
gcgauaggggccaugggagccggcgccaagua

SEQ ID NO: 330343 - RNA, 32 nt, Homo Sapiens
ccacagccaccucugcaucuucgaacucagcc

SEQ ID NO: 330344 - RNA, 32 nt, Homo Sapiens
gaucuguugaguuucuuuguugaagaagccag

SEQ ID NO: 330345 - RNA, 32 nt, Homo Sapiens
guucucugcugcucagcccuacuggggagcau

SEQ ID NO: 330346 - RNA, 32 nt, Homo Sapiens
uggacgggcuccugguggcugugcugcugcug

SEQ ID NO: 330347 - RNA, 32 nt, Homo Sapiens
agaggcucuaguuuuggggaagagggaaacac

SEQ ID NO: 330348 - RNA, 32 nt, Homo Sapiens
auccccuccagucucugccuaauuuuuagugu

SEQ ID NO: 330349 - RNA, 32 nt, Homo Sapiens
auuguuguuuuugcuggucucaucuuugguaa

SEQ ID NO: 330350 - RNA, 32 nt, Homo Sapiens
cggccggggggcgggggccgaggcagguauaa

SEQ ID NO: 330351 - RNA, 32 nt, Homo Sapiens
uggcagguucucuggagcccacacaggccagg

SEQ ID NO: 330352 - RNA, 32 nt, Homo Sapiens
aagaaggaaaaaacuuuuuggugcuccagugu

SEQ ID NO: 330353 - RNA, 32 nt, Homo Sapiens
ccaauuaaaccucuuucuuuuguaaauugaaa

SEQ ID NO: 330354 - RNA, 32 nt, Homo Sapiens
gacaaccuccuaugugcaugucuaaauaguca

SEQ ID NO: 330355 - RNA, 32 nt, Homo Sapiens
cagaaggugcuuuggaacaguccggugcuucu

SEQ ID NO: 330356 - RNA, 32 nt, Homo Sapiens
uggaaucuccagccuuccagauuuucugggac

SEQ ID NO: 330357 - RNA, 32 nt, Homo Sapiens
acggaaagaauaugcauagaauaaugcauucu

SEQ ID NO: 330358 - RNA, 32 nt, Homo Sapiens
gggugugugggaagaauggagaaauucaggcu

SEQ ID NO: 330359 - RNA, 32 nt, Homo Sapiens
cugugugcccgggucugugucuauauauaugc

SEQ ID NO: 330360 - RNA, 32 nt, Homo Sapiens
cgcagagcgguccaaggccccggcgcccuggu

SEQ ID NO: 330361 - RNA, 32 nt, Homo Sapiens
acugguguaguguauccuuuuacuguuucaau

SEQ ID NO: 330362 - RNA, 30 nt, Homo Sapiens
gaugcuggaugugcugcaggagcuccgagg

SEQ ID NO: 330363 - RNA, 32 nt, Homo Sapiens
gcacccucccaggacucuggcuucugaggaag

SEQ ID NO: 330364 - RNA, 32 nt, Homo Sapiens
cuuuuuuaucugcgcaugcgagaacaucaccu

SEQ ID NO: 330365 - RNA, 32 nt, Homo Sapiens
gcggcucucaggugaggggcgcgcgagcggcu

SEQ ID NO: 330366 - RNA, 32 nt, Homo Sapiens
aagacacaucuucuaggucucguggucauuug

SEQ ID NO: 330367 - RNA, 32 nt, Homo Sapiens
auugaacuauauaguuuguaugucaucuuuuu

SEQ ID NO: 330368 - RNA, 32 nt, Homo Sapiens
cugaggcucuuugcaagagaugagauuaaguu

SEQ ID NO: 330369 - RNA, 32 nt, Homo Sapiens
caaauauucuaaucuuuuuucauuuauaugca

SEQ ID NO: 330370 - RNA, 32 nt, Homo Sapiens
augguagaacauucucaaaaaucuuguggguc

SEQ ID NO: 330371 - RNA, 32 nt, Homo Sapiens
guagaaguaguuuuaauucaacaucaaaacuu

SEQ ID NO: 330372 - RNA, 32 nt, Homo Sapiens
aggugcuuggaggggagagaaaagcaccacag

SEQ ID NO: 330373 - RNA, 32 nt, Homo Sapiens
ugcaacauucuauucuaauuauuugacaggua

SEQ ID NO: 330374 - RNA, 32 nt, Homo Sapiens
gcggcggcggcaccucccgcuccuggagcggg

SEQ ID NO: 330375 - RNA, 32 nt, Homo Sapiens
acacuugacaccuugaggguagaauuuagcgu

SEQ ID NO: 330376 - RNA, 32 nt, Homo Sapiens
ggcauucacccccaggcucugacuuucagcau

SEQ ID NO: 330377 - RNA, 32 nt, Homo Sapiens
cuucucugacuucagggugagucgugagguag

SEQ ID NO: 330378 - RNA, 32 nt, Homo Sapiens
aauaaacuugcauuuuaaggguuguauuggca

SEQ ID NO: 330379 - RNA, 32 nt, Homo Sapiens
ucggcaccuaauagaguuuucuuagugaaggg

SEQ ID NO: 330380 - RNA, 32 nt, Homo Sapiens
acuguugcuucuuauaaagguguguuccagag

SEQ ID NO: 330381 - RNA, 32 nt, Homo Sapiens
aguuagauuuuauccauuuuuaucuuaacuau

SEQ ID NO: 330382 - RNA, 30 nt, Homo Sapiens
cugagcccugucccugcccuucucugccug

SEQ ID NO: 330383 - RNA, 32 nt, Homo Sapiens
ggaaucuuucccuuuacaguaaggcuuugcag

SEQ ID NO: 330384 - RNA, 32 nt, Homo Sapiens
ugggggcaaauguguagauauuuuuaaacauu

SEQ ID NO: 330385 - RNA, 32 nt, Homo Sapiens
cuggccauuuuggugggaccaguucagccuga

SEQ ID NO: 330386 - RNA, 32 nt, Homo Sapiens
auaugucaguuaugaaauuauuauaauucagc

SEQ ID NO: 330387 - RNA, 32 nt, Homo Sapiens
cagcggcguggccuucagagucucugcauuug

SEQ ID NO: 330388 - RNA, 32 nt, Homo Sapiens
ugggggccugaagggggcugagggguugaugu

SEQ ID NO: 330389 - RNA, 32 nt, Homo Sapiens
uugugagaauugucaguguaacuauuaccuac

SEQ ID NO: 330390 - RNA, 32 nt, Homo Sapiens
uggcagcguggggugccgcccagcgugcuggg

SEQ ID NO: 330391 - RNA, 32 nt, Homo Sapiens
aacacugcacuccagccugggcgacagaguga

SEQ ID NO: 330392 - RNA, 32 nt, Homo Sapiens
aggaagaggagcuuguggcuauuguuagagca

SEQ ID NO: 330393 - RNA, 32 nt, Homo Sapiens
uauuauaaccaccuauguaaucucauguuguu

SEQ ID NO: 330394 - RNA, 32 nt, Homo Sapiens
gaggagcugugagaagcagcagaggggacucc

SEQ ID NO: 330395 - RNA, 32 nt, Homo Sapiens
gcgccgcugcuguugucccgggugcugaaaag

SEQ ID NO: 330396 - RNA, 32 nt, Homo Sapiens
aaaacauacacaauuuguuauuuuaguaaaua

SEQ ID NO: 330397 - RNA, 29 nt, Homo Sapiens
aagagccaaaaauaaaaaaucugaauucc

SEQ ID NO: 330398 - RNA, 32 nt, Homo Sapiens
uauaaauuuuugguuuuuuauuuugagcacua

SEQ ID NO: 330399 - RNA, 32 nt, Homo Sapiens
augguguucugacuucaagggcuggcagccag

SEQ ID NO: 330400 - RNA, 32 nt, Homo Sapiens
cagucucagauuuugcucuucaauguugccug

SEQ ID NO: 330401 - RNA, 32 nt, Homo Sapiens
ccgccuggccccagccgacccgucccuucguc

SEQ ID NO: 330402 - RNA, 32 nt, Homo Sapiens
uucuuccugcugcagggugcugccugaggggu

SEQ ID NO: 330403 - RNA, 32 nt, Homo Sapiens
uaaacuccacacugggugacaucuaccuagaa

SEQ ID NO: 330404 - RNA, 32 nt, Homo Sapiens
gucccucccuuggccuggcuucccggcgcacc

SEQ ID NO: 330405 - RNA, 32 nt, Homo Sapiens
aagguggagacaggggcggggguccgcgcaga

SEQ ID NO: 330406 - RNA, 32 nt, Homo Sapiens
auguuguaugacucuauuuuuaugauauccag

SEQ ID NO: 330407 - RNA, 32 nt, Homo Sapiens
cggaggaggcagagccggucgcacgccugggu

SEQ ID NO: 330408 - RNA, 32 nt, Homo Sapiens
cguugggccggcgggcgggggcugaggggcug

SEQ ID NO: 330409 - RNA, 32 nt, Homo Sapiens
ucaaaaguaguuacuguaaauuuuacuccugu

SEQ ID NO: 330410 - RNA, 31 nt, Homo Sapiens
gaaaacagaaagaaaaaauguaucaucuaaa

SEQ ID NO: 330411 - RNA, 32 nt, Homo Sapiens
ugaggguucaccagcccuccccuccccagggu

SEQ ID NO: 330412 - RNA, 32 nt, Homo Sapiens
ucuuccucuucccccagggcuucccaagcucu

SEQ ID NO: 330413 - RNA, 32 nt, Homo Sapiens
ggaucuacugaauaaucauuuuaacucaacua

SEQ ID NO: 330414 - RNA, 32 nt, Homo Sapiens
guuccgcgcgcccuucauugaagcggcggugg

SEQ ID NO: 330415 - RNA, 32 nt, Homo Sapiens
auagguguuucauuauaggagcgcaucuuuaa

SEQ ID NO: 330416 - RNA, 32 nt, Homo Sapiens
gagggccaaacacugaugauuuguggaaaaga

SEQ ID NO: 330417 - RNA, 32 nt, Homo Sapiens
cccaugaagcagguccagaacuaagugggagu

SEQ ID NO: 330418 - RNA, 32 nt, Homo Sapiens
uggugggcucugcgggagaagacacuaagggc

SEQ ID NO: 330419 - RNA, 32 nt, Homo Sapiens
aggaaagcuuccagcccuccucccuucacccu

SEQ ID NO: 330420 - RNA, 32 nt, Homo Sapiens
acagcugcuuugccucaggcauaaaucagaag

SEQ ID NO: 330421 - RNA, 32 nt, Homo Sapiens
aaaauuguauagaccuaaaauaaaaugaagug

SEQ ID NO: 330422 - RNA, 32 nt, Homo Sapiens
uuucuacccucaguuucuaaauguagacuauu

SEQ ID NO: 330423 - RNA, 32 nt, Homo Sapiens
ggggcucuggguuugacugggauugugguccc

SEQ ID NO: 330424 - RNA, 32 nt, Homo Sapiens
uaaggcaacauaacauaaaugucaguuucuuc

SEQ ID NO: 330425 - RNA, 32 nt, Homo Sapiens
agggguguuucaugggaaaaucuacacaaacu

SEQ ID NO: 330426 - RNA, 32 nt, Homo Sapiens
gagaugcaaauaaaguaagagaauguuuuccu

SEQ ID NO: 330427 - RNA, 32 nt, Homo Sapiens
ugcucugggucauuggugagacuuggaagggg

SEQ ID NO: 330428 - RNA, 32 nt, Homo Sapiens
gacacagggugcagggagcaguucuuguuuua

SEQ ID NO: 330429 - RNA, 32 nt, Homo Sapiens
ccacucuuugggaguauauucccuuuauauau

SEQ ID NO: 330430 - RNA, 32 nt, Homo Sapiens
gauguacagggcugcucugugagaucaagggu

SEQ ID NO: 330431 - RNA, 32 nt, Homo Sapiens
uaaauguaucaagucuuaauuguauuuuaaau

SEQ ID NO: 330432 - RNA, 32 nt, Homo Sapiens
auauuuccuuucuacaguuaccucugauucuc

SEQ ID NO: 330433 - RNA, 32 nt, Homo Sapiens
ccgagccccccgcccuccagcccaggggggac

SEQ ID NO: 330434 - RNA, 32 nt, Homo Sapiens
agaguugugucugaggaaugugccuaauuuaa

SEQ ID NO: 330435 - RNA, 32 nt, Homo Sapiens
uugaauguauauauuucuaagaagaauuuguu

SEQ ID NO: 330436 - RNA, 27 nt, Homo Sapiens
gcugccauucucuucagcccucgcucu

SEQ ID NO: 330437 - RNA, 32 nt, Homo Sapiens
ccuggacccagcuuguuagucacccacuauaa

SEQ ID NO: 330438 - RNA, 32 nt, Homo Sapiens
gugcugccgcggcuggcgcugccuguggggca

SEQ ID NO: 330439 - RNA, 32 nt, Homo Sapiens
aaaauauguaaauucuaguaccugaaauccuu

SEQ ID NO: 330440 - RNA, 32 nt, Homo Sapiens
aaccaagccgcggcgguguccgcggcccugcc

SEQ ID NO: 330441 - RNA, 32 nt, Homo Sapiens
agaauaacaaaauaaaaugcaggaucuuugua

SEQ ID NO: 330442 - RNA, 32 nt, Homo Sapiens
cccaaggcaggagagccaaagcuggagucaga

SEQ ID NO: 330443 - RNA, 32 nt, Homo Sapiens
aagagcugccucccgagggugucuacauggug

SEQ ID NO: 330444 - RNA, 32 nt, Homo Sapiens
aacgaaaagcaucuaaagaaagaugauucuga

SEQ ID NO: 330445 - RNA, 31 nt, Homo Sapiens
cagaccagcugcuuccaucagaauuccaggg

SEQ ID NO: 330446 - RNA, 32 nt, Homo Sapiens
gaagcuuuucuuaauugugucuuuuaaaaaug

SEQ ID NO: 330447 - RNA, 32 nt, Homo Sapiens
ccugaucaccccccgucccagcccuugaguga

SEQ ID NO: 330448 - RNA, 32 nt, Homo Sapiens
uaguagaaaaggaaacuaguagggccaaaaaa

SEQ ID NO: 330449 - RNA, 32 nt, Homo Sapiens
auuccugacaagacuuggaaaagcaggagaga

SEQ ID NO: 330450 - RNA, 32 nt, Homo Sapiens
gaaggcacugcaccaaugaggaagguagcacu

SEQ ID NO: 330451 - RNA, 32 nt, Homo Sapiens
guaccuuccugcccuuucccauugcuacugau

SEQ ID NO: 330452 - RNA, 32 nt, Homo Sapiens
acccugugcuccccgccccccauccugacauc

SEQ ID NO: 330453 - RNA, 32 nt, Homo Sapiens
ucucuuccaaauuuccucuucaugcucagcug

SEQ ID NO: 330454 - RNA, 32 nt, Homo Sapiens
gaauagauacucaauaugugaauaugugucua

SEQ ID NO: 330455 - RNA, 32 nt, Homo Sapiens
augcagccgggaggugaacagcagagagaaga

SEQ ID NO: 330456 - RNA, 32 nt, Homo Sapiens
gagcaccacucugcugccccaccacgcggccu

SEQ ID NO: 330457 - RNA, 32 nt, Homo Sapiens
gccucugccucagagaugcugcugccccugcu

SEQ ID NO: 330458 - RNA, 32 nt, Homo Sapiens
cgucaaccaaaaucaguguuuauagagugaac

SEQ ID NO: 330459 - RNA, 32 nt, Homo Sapiens
aaauacaaaccuuuauacuaauggauuaaguu

SEQ ID NO: 330460 - RNA, 32 nt, Homo Sapiens
ccgagccuuucuggggaagaacuccaggcgug

SEQ ID NO: 330461 - RNA, 32 nt, Homo Sapiens
gguucugacaaugacuggaagugguagaaaag

SEQ ID NO: 330462 - RNA, 32 nt, Homo Sapiens
agaagcggccccaacaccugccacgcugcggc

SEQ ID NO: 330463 - RNA, 32 nt, Homo Sapiens
cagccccggccgccaggccuuagcccgccccg

SEQ ID NO: 330464 - RNA, 32 nt, Homo Sapiens
cuucaagucucagcuuccaagaaccuaucgau

SEQ ID NO: 330465 - RNA, 32 nt, Homo Sapiens
gaagauaauguuuacauccuuuuaaacauuuu

SEQ ID NO: 330466 - RNA, 32 nt, Homo Sapiens
uuguuucuagcuagagggacugguguccuucc

SEQ ID NO: 330467 - RNA, 32 nt, Homo Sapiens
aagaaagagaccgaaaucccuugcgcaagugg

SEQ ID NO: 330468 - RNA, 32 nt, Homo Sapiens
uccgcgccgccgcugccuccgcgccauggccg

SEQ ID NO: 330469 - RNA, 32 nt, Homo Sapiens
ugggagaggggccagaggagcggcuauggcau

SEQ ID NO: 330470 - RNA, 32 nt, Homo Sapiens
agccagugcagggacucuccucagcacaacau

SEQ ID NO: 330471 - RNA, 32 nt, Homo Sapiens
gaugugugccuggcuguguacgugggugugca

SEQ ID NO: 330472 - RNA, 32 nt, Homo Sapiens
agacucccacugaaaugaauguucuaaauauu

SEQ ID NO: 330473 - RNA, 32 nt, Homo Sapiens
uggagcccugucauucauucauucauucaucc

SEQ ID NO: 330474 - RNA, 32 nt, Homo Sapiens
aagagauaauaaaacagaaauaaaaugcauau

SEQ ID NO: 330475 - RNA, 32 nt, Homo Sapiens
uucagaguucaguccgcccagcguucuuguuu

SEQ ID NO: 330476 - RNA, 32 nt, Homo Sapiens
gcauuugaagcugccuaaaugccaccugcaau

SEQ ID NO: 330477 - RNA, 32 nt, Homo Sapiens
uauaaacuccaauuuuaaaucuuaaaauugcu

SEQ ID NO: 330478 - RNA, 32 nt, Homo Sapiens
auauauugcaauuuauuuuaauuaaaagauac

SEQ ID NO: 330479 - RNA, 32 nt, Homo Sapiens
gccagcugcccccagagccacaguuccccuau

SEQ ID NO: 330480 - RNA, 32 nt, Homo Sapiens
uccaagaaugccaucugauaaaaaagaauaga

SEQ ID NO: 330481 - RNA, 32 nt, Homo Sapiens
ugguccaauuuaauauaguuuagaagcuauuu

SEQ ID NO: 330482 - RNA, 32 nt, Homo Sapiens
aaggaagaguagcuccuucuucuucuucuuuu

SEQ ID NO: 330483 - RNA, 32 nt, Homo Sapiens
aaauaaaaugucaacuaugguaaguguagaga

SEQ ID NO: 330484 - RNA, 32 nt, Homo Sapiens
aauuaaauauuucuuaaguauaaaccuuauga

SEQ ID NO: 330485 - RNA, 32 nt, Homo Sapiens
cuuucuaugcuguuuguagugaaauaauagaa

SEQ ID NO: 330486 - RNA, 32 nt, Homo Sapiens
gauuccacgucuuggaggcuguguucaccacu

SEQ ID NO: 330487 - RNA, 32 nt, Homo Sapiens
gguuuuggcaccccuuugucaggaauucagcu

SEQ ID NO: 330488 - RNA, 32 nt, Homo Sapiens
ccuggagaacuuccaguguccuggauggaaug

SEQ ID NO: 330489 - RNA, 32 nt, Homo Sapiens
guacuacaauguaaucuguuucccagggaaau

SEQ ID NO: 330490 - RNA, 32 nt, Homo Sapiens
gcccaccccagagcuucccccagugaggcucc

SEQ ID NO: 330491 - RNA, 32 nt, Homo Sapiens
ucugaacaucuuccuauauuguuauuguggaa

SEQ ID NO: 330492 - RNA, 32 nt, Homo Sapiens
caggacaucacucccaugccagcccucccugg

SEQ ID NO: 330493 - RNA, 32 nt, Homo Sapiens
uuaaauguuggcauauuuuggccauguuucuc

SEQ ID NO: 330494 - RNA, 32 nt, Homo Sapiens
auauuguugcacugaggauuaagcuucaacau

SEQ ID NO: 330495 - RNA, 32 nt, Homo Sapiens
aagggauguuuuguaagaacuaccaacaguuu

SEQ ID NO: 330496 - RNA, 32 nt, Homo Sapiens
uccugaacuccccccucccacccaggccggga

SEQ ID NO: 330497 - RNA, 32 nt, Homo Sapiens
uucuguacuuaccaaaaaucuaccacuucaau

SEQ ID NO: 330498 - RNA, 29 nt, Homo Sapiens
uuccagcgacaacaucuacacaauguuaa

SEQ ID NO: 330499 - RNA, 32 nt, Homo Sapiens
ugucagauauuguugagggagguaauuuuaua

SEQ ID NO: 330500 - RNA, 32 nt, Homo Sapiens
cguuuguacuugccucccccaacagugggccu

SEQ ID NO: 330501 - RNA, 32 nt, Homo Sapiens
gagaaauugaagcucaaauaaaagaccuuggg

SEQ ID NO: 330502 - RNA, 32 nt, Homo Sapiens
uugccucugguccaguuucucaucucuggacu

SEQ ID NO: 330503 - RNA, 32 nt, Homo Sapiens
aaaacuuccaugaagagguuauugagucgaca

SEQ ID NO: 330504 - RNA, 32 nt, Homo Sapiens
aaguaagguaauuauauacuacucucauucag

SEQ ID NO: 330505 - RNA, 32 nt, Homo Sapiens
aggaaagcugaauccauauguagacuucaugg

SEQ ID NO: 330506 - RNA, 32 nt, Homo Sapiens
uaucaugcagauaacauacaaaaucuuuuugu

SEQ ID NO: 330507 - RNA, 32 nt, Homo Sapiens
aacaaucauacuuaacaaaacuacugaugguu

SEQ ID NO: 330508 - RNA, 31 nt, Homo Sapiens
ucagagaaauaaaugcuuuguguaacaucug

SEQ ID NO: 330509 - RNA, 32 nt, Homo Sapiens
aaucaguuauucaaauuguuaggaauuuuacc

SEQ ID NO: 330510 - RNA, 32 nt, Homo Sapiens
aaagcccugaccaaggcccuaaccuaagacug

SEQ ID NO: 330511 - RNA, 32 nt, Homo Sapiens
ugcuauagcgccuccccucuccccucagaggg

SEQ ID NO: 330512 - RNA, 32 nt, Homo Sapiens
aguagcugcgggaugaauaaacuuuuucacuu

SEQ ID NO: 330513 - RNA, 32 nt, Homo Sapiens
uugcggugggaccccugaaacuggaccugcau

SEQ ID NO: 330514 - RNA, 32 nt, Homo Sapiens
gagcgucggaagaugccggccguguccaaggg

SEQ ID NO: 330515 - RNA, 32 nt, Homo Sapiens
gagcagcacaccuggugcguggggaugccugg

SEQ ID NO: 330516 - RNA, 32 nt, Homo Sapiens
uuuucccaguggggccugcugcugagggggag

SEQ ID NO: 330517 - RNA, 32 nt, Homo Sapiens
cuccccaaccaccucaugguauauuuaagagu

SEQ ID NO: 330518 - RNA, 32 nt, Homo Sapiens
cugauuucagugcugcugaacuaauuucugug

SEQ ID NO: 330519 - RNA, 32 nt, Homo Sapiens
agcccgagugacccuccgguggacaugggugg

SEQ ID NO: 330520 - RNA, 32 nt, Homo Sapiens
aaguauggaggguaggagugcaacccaggagc

SEQ ID NO: 330521 - RNA, 32 nt, Homo Sapiens
gcagcagaagcagaaggcagcgccaggggccg

SEQ ID NO: 330522 - RNA, 32 nt, Homo Sapiens
aggaaagaaaggaaaaagggauuaguuaaauc

SEQ ID NO: 330523 - RNA, 32 nt, Homo Sapiens
aggaauuuucuuuucucaguggauaauacaac

SEQ ID NO: 330524 - RNA, 32 nt, Homo Sapiens
ggggguguuucuaucucuuucuuucucuuucu

SEQ ID NO: 330525 - RNA, 32 nt, Homo Sapiens
ggagaaggggagaagcaagggucauucuguuc

SEQ ID NO: 330526 - RNA, 32 nt, Homo Sapiens
ugggacuuuggggcagccgugugugcaggugu

SEQ ID NO: 330527 - RNA, 32 nt, Homo Sapiens
ccagguccuaaaacuauaucaucagaaugacc

SEQ ID NO: 330528 - RNA, 32 nt, Homo Sapiens
ugccuccgagccggagccccagcccuaggccc

SEQ ID NO: 330529 - RNA, 32 nt, Homo Sapiens
aacucaacagagccaacauuucauagcaccau

SEQ ID NO: 330530 - RNA, 32 nt, Homo Sapiens
gugugcguuuauuuauaaauauauuauucuga

SEQ ID NO: 330531 - RNA, 32 nt, Homo Sapiens
cuggagaauugcauuucuuucacugugcuacu

SEQ ID NO: 330532 - RNA, 32 nt, Homo Sapiens
uuaaaaaaaaacaaaaacagggcagucuugua

SEQ ID NO: 330533 - RNA, 32 nt, Homo Sapiens
uugcccaggcugguugcaaacuucuggccuag

SEQ ID NO: 330534 - RNA, 32 nt, Homo Sapiens
agaugauguucccuauaaauccauucuccucu

SEQ ID NO: 330535 - RNA, 32 nt, Homo Sapiens
auauaacuccugucuuaaaaucugcagaauau

SEQ ID NO: 330536 - RNA, 32 nt, Homo Sapiens
ccucugcuuccucaggccccaggcaucucaug

SEQ ID NO: 330537 - RNA, 32 nt, Homo Sapiens
aaaaacaguaacuauuuuauauggaaaugugu

SEQ ID NO: 330538 - RNA, 32 nt, Homo Sapiens
agaaagcagaauaaugagcagauggaaucuuc

SEQ ID NO: 330539 - RNA, 32 nt, Homo Sapiens
ugggagguuguaucuggucauaagguaaacau

SEQ ID NO: 330540 - RNA, 32 nt, Homo Sapiens
gcuuacgugggaagagccaggcauggcauaga

SEQ ID NO: 330541 - RNA, 32 nt, Homo Sapiens
uguaaggaauauauuuuuuaaaauuuuucuuu

SEQ ID NO: 330542 - RNA, 32 nt, Homo Sapiens
cucagagggacagagggaagcagaccacccuu

SEQ ID NO: 330543 - RNA, 32 nt, Homo Sapiens
uauuuuacccccgcaaaccaaauacuuugaga

SEQ ID NO: 330544 - RNA, 32 nt, Homo Sapiens
cuucccucggggauugcucauggcaugggccu

SEQ ID NO: 330545 - RNA, 32 nt, Homo Sapiens
ugauuucuguuguuucugcugacugugugggu

SEQ ID NO: 330546 - RNA, 32 nt, Homo Sapiens
agcaugcccucccuguccauuugucuuauaac

SEQ ID NO: 330547 - RNA, 32 nt, Homo Sapiens
uggaagcaagaccaaaaggaaaucaacugagu

SEQ ID NO: 330548 - RNA, 32 nt, Homo Sapiens
gacccuagaaggcggcauguccugcccucaac

SEQ ID NO: 330549 - RNA, 32 nt, Homo Sapiens
ccuaagacagugcuggaaauugccauauguug

SEQ ID NO: 330550 - RNA, 32 nt, Homo Sapiens
gcucuaaggcaaaaguuugcuugcuugccaac

SEQ ID NO: 330551 - RNA, 32 nt, Homo Sapiens
agagugaaggcuuuuuccccuaauccuggcag

SEQ ID NO: 330552 - RNA, 32 nt, Homo Sapiens
gggcaaugcuccuggggagucuguggggaaga

SEQ ID NO: 330553 - RNA, 29 nt, Homo Sapiens
aauaacccugccgccuggacuccgccugu

SEQ ID NO: 330554 - RNA, 32 nt, Homo Sapiens
uuuuaugugcacuuaaauuuggggacaauuuu

SEQ ID NO: 330555 - RNA, 32 nt, Homo Sapiens
aaagcagccccucccaguauagccaguagggc

SEQ ID NO: 330556 - RNA, 32 nt, Homo Sapiens
acaggaaaaaucaacaagauagugaucucucu

SEQ ID NO: 330557 - RNA, 32 nt, Homo Sapiens
auacauuacugauauuucauuauaauuaguuc

SEQ ID NO: 330558 - RNA, 32 nt, Homo Sapiens
guuuaugguuuuguuucacuuuucuuaauuug

SEQ ID NO: 330559 - RNA, 32 nt, Homo Sapiens
acgcuguggaggaggguggggguggggggaag

SEQ ID NO: 330560 - RNA, 32 nt, Homo Sapiens
ugcagcggccccagugcccuugaccaggaaca

SEQ ID NO: 330561 - RNA, 32 nt, Homo Sapiens
aaaaggcgauuugaacgcgauugcaaagaggc

SEQ ID NO: 330562 - RNA, 32 nt, Homo Sapiens
ccccgugcccagcgggcucccggagcagcauu

SEQ ID NO: 330563 - RNA, 32 nt, Homo Sapiens
guuaucauauuguaaaacagcuuuaaaaauau

SEQ ID NO: 330564 - RNA, 32 nt, Homo Sapiens
aaagacuagacaguuaaguaaaagguggcugg

SEQ ID NO: 330565 - RNA, 32 nt, Homo Sapiens
cuggaucccagcgccccgaucccggcgcccca

SEQ ID NO: 330566 - RNA, 32 nt, Homo Sapiens
aaaauguguaauuguuccagcauuccaauggu

SEQ ID NO: 330567 - RNA, 32 nt, Homo Sapiens
aaggauuuucuuuguugaaauuucaguguggg

SEQ ID NO: 330568 - RNA, 32 nt, Homo Sapiens
auaggcggcgaagcugcgcccggcgcccgaga

SEQ ID NO: 330569 - RNA, 32 nt, Homo Sapiens
acauugcuguaucaaaguuguaaaauuaagca

SEQ ID NO: 330570 - RNA, 32 nt, Homo Sapiens
aggaggaguccuggaggcugguccuggguccu

SEQ ID NO: 330571 - RNA, 31 nt, Homo Sapiens
agaggacggaagcagagggugcuguuucaac

SEQ ID NO: 330572 - RNA, 32 nt, Homo Sapiens
gcuguuugggaagaguguaagugacuacagua

SEQ ID NO: 330573 - RNA, 32 nt, Homo Sapiens
aguugaguuauuuagaauuuuaucucaaguga

SEQ ID NO: 330574 - RNA, 32 nt, Homo Sapiens
uauaaagauaaaaauuuaucaacauuccuuaa

SEQ ID NO: 330575 - RNA, 32 nt, Homo Sapiens
agccgggugugguggcacacaccaguaauccc

SEQ ID NO: 330576 - RNA, 32 nt, Homo Sapiens
aggaggagguggagacuaucagugcacggccc

SEQ ID NO: 330577 - RNA, 32 nt, Homo Sapiens
cgucgacacgucucgucuccugucccaauuca

SEQ ID NO: 330578 - RNA, 32 nt, Homo Sapiens
agucgguucccgugacgcggcgcgccccaagg

SEQ ID NO: 330579 - RNA, 32 nt, Homo Sapiens
gccccgcgcugggaauuugcggcggccuccgc

SEQ ID NO: 330580 - RNA, 32 nt, Homo Sapiens
auuguuuuuaguaaguuuucuuuuuccuuuuu

SEQ ID NO: 330581 - RNA, 32 nt, Homo Sapiens
ugagucuucuaaagcugcaggccauacuaccc

SEQ ID NO: 330582 - RNA, 32 nt, Homo Sapiens
acauuuuucuuaguuucccugggaagcuuuuc

SEQ ID NO: 330583 - RNA, 32 nt, Homo Sapiens
ucuaaguuaguagagacuguuuuuguaguuuu

SEQ ID NO: 330584 - RNA, 32 nt, Homo Sapiens
cauuuuucuaauaaguuuuuagugagugucca

SEQ ID NO: 330585 - RNA, 32 nt, Homo Sapiens
cccaggggagccgagagaagggacuuugcugu

SEQ ID NO: 330586 - RNA, 32 nt, Homo Sapiens
agcugccacugcaacagugggcuuaagggugu

SEQ ID NO: 330587 - RNA, 32 nt, Homo Sapiens
caaacauuauguggccucugguaguuuuuuuc

SEQ ID NO: 330588 - RNA, 32 nt, Homo Sapiens
acuauaugcauuucuuuuucuauauccuuugg

SEQ ID NO: 330589 - RNA, 32 nt, Homo Sapiens
caagugucccaaaucaggguagcaaucuuguu

SEQ ID NO: 330590 - RNA, 32 nt, Homo Sapiens
caacugcaacgcgcagcgugccagugcccaac

SEQ ID NO: 330591 - RNA, 32 nt, Homo Sapiens
ggauauugagaccauccuggcuaacaugguga

SEQ ID NO: 330592 - RNA, 32 nt, Homo Sapiens
uuguccaacaacugucagaauaaagaacauuc

SEQ ID NO: 330593 - RNA, 32 nt, Homo Sapiens
ugcuggauucagauauaaauguuuaauuuugc

SEQ ID NO: 330594 - RNA, 32 nt, Homo Sapiens
guucguggccacgcugcugaucguccugcugc

SEQ ID NO: 330595 - RNA, 32 nt, Homo Sapiens
ccggggcgggcgacgggcgggcugggaagguc

SEQ ID NO: 330596 - RNA, 32 nt, Homo Sapiens
cacugcugucaaacagaagguaaacagucuua

SEQ ID NO: 330597 - RNA, 32 nt, Homo Sapiens
uaaauauacaaaacuacgguugugaaauaaaa

SEQ ID NO: 330598 - RNA, 32 nt, Homo Sapiens
auggguuuccacucacacgguagguggcugug

SEQ ID NO: 330599 - RNA, 32 nt, Homo Sapiens
cuuauccugccuuuuugcaucgcugccagauu

SEQ ID NO: 330600 - RNA, 32 nt, Homo Sapiens
cuggacuguuuacacuucaaggcgguggauuu

SEQ ID NO: 330601 - RNA, 32 nt, Homo Sapiens
ccucccagugccagucuccauccaccccagag

SEQ ID NO: 330602 - RNA, 32 nt, Homo Sapiens
augccaaagcuacuaucauucagugcuacaug

SEQ ID NO: 330603 - RNA, 32 nt, Homo Sapiens
uagaggggauccacgcccacaagugcuaugga

SEQ ID NO: 330604 - RNA, 32 nt, Homo Sapiens
gcaauuagaauggaguuagggaaagaacauau

SEQ ID NO: 330605 - RNA, 32 nt, Homo Sapiens
ggcugggcaugguggcucaugccuauaguagu

SEQ ID NO: 330606 - RNA, 32 nt, Homo Sapiens
aacugucccuccccagcccgcucccccucucu

SEQ ID NO: 330607 - RNA, 32 nt, Homo Sapiens
uggagguuguaaugacucauggauuggccuua

SEQ ID NO: 330608 - RNA, 32 nt, Homo Sapiens
gcccccacccucaauggcagcuggaagaaugg

SEQ ID NO: 330609 - RNA, 32 nt, Homo Sapiens
aggccggaggggggcgggggucaccaaaggcg

SEQ ID NO: 330610 - RNA, 32 nt, Homo Sapiens
gguuuuaccauguuggccaggcuggucacaaa

SEQ ID NO: 330611 - RNA, 32 nt, Homo Sapiens
gagccaaauaaaccucuuuucuuucuaaaaaa

SEQ ID NO: 330612 - RNA, 32 nt, Homo Sapiens
acucccaaacucccaguccugugcaccaauga

SEQ ID NO: 330613 - RNA, 32 nt, Homo Sapiens
ucuagagaucugggugugaauccuuuuuugcc

SEQ ID NO: 330614 - RNA, 32 nt, Homo Sapiens
gguagagaagcaguuaguaacagcaggauggg

SEQ ID NO: 330615 - RNA, 28 nt, Homo Sapiens
ggagggcggcggccgccauggaggugag

SEQ ID NO: 330616 - RNA, 28 nt, Homo Sapiens
ggcugggggcggccgugcaaggcagggc

SEQ ID NO: 330617 - RNA, 32 nt, Homo Sapiens
auuuguaaacacacaagaaaccaucucugauc

SEQ ID NO: 330618 - RNA, 32 nt, Homo Sapiens
cucgcgcgccgcgguucgccccgcagccucgc

SEQ ID NO: 330619 - RNA, 32 nt, Homo Sapiens
cagcucccgcaugcgcagugcgcucgguguca

SEQ ID NO: 330620 - RNA, 32 nt, Homo Sapiens
cgaaggauugccaauaaaaaauacuuuccugg

SEQ ID NO: 330621 - RNA, 32 nt, Homo Sapiens
ucaucgugccuguacuguacuccagccuggga

SEQ ID NO: 330622 - RNA, 32 nt, Homo Sapiens
ccugggggguggcacucagacccagccaaccc

SEQ ID NO: 330623 - RNA, 32 nt, Homo Sapiens
uuaaugagaguuaaaaaacuaguauguggaaa

SEQ ID NO: 330624 - RNA, 32 nt, Homo Sapiens
cagcaggguugugacaauauagaaauaccacu

SEQ ID NO: 330625 - RNA, 32 nt, Homo Sapiens
aaguuugagccauucucuucuaccccuucagu

SEQ ID NO: 330626 - RNA, 32 nt, Homo Sapiens
gacugggugugguggcucacgccucuaaucgc

SEQ ID NO: 330627 - RNA, 32 nt, Homo Sapiens
ucaguuaaauuuccucaccuucacuauugauc

SEQ ID NO: 330628 - RNA, 32 nt, Homo Sapiens
gcuuaaugauacagcaggauccuggcuuccag

SEQ ID NO: 330629 - RNA, 32 nt, Homo Sapiens
gacccgcucccggccccggccgucgcugcgcu

SEQ ID NO: 330630 - RNA, 32 nt, Homo Sapiens
cuuccggucggaucucucuccucucugaccug

SEQ ID NO: 330631 - RNA, 32 nt, Homo Sapiens
aaaccugcgucauguaaauaucugcaaaucau

SEQ ID NO: 330632 - RNA, 32 nt, Homo Sapiens
auaaauuacucuaaaacaaaaaagaauccuag

SEQ ID NO: 330633 - RNA, 32 nt, Homo Sapiens
cucucagaacccccgcccagcgcacggcgacc

SEQ ID NO: 330634 - RNA, 32 nt, Homo Sapiens
ucaaauacagaacaugaucuuccuccugcuaa

SEQ ID NO: 330635 - RNA, 32 nt, Homo Sapiens
agaccagggccgaucuggguguccugacccuc

SEQ ID NO: 330636 - RNA, 32 nt, Homo Sapiens
gagcggggcagcaccgccccucacgccgccgc

SEQ ID NO: 330637 - RNA, 32 nt, Homo Sapiens
auucuagaaagauucugugucugggaaugagc

SEQ ID NO: 330638 - RNA, 32 nt, Homo Sapiens
ggguagcgguacaggcgggcgcuuacucugug

SEQ ID NO: 330639 - RNA, 32 nt, Homo Sapiens
gcacuauaucaaaacuuaaaauguaagcccag

SEQ ID NO: 330640 - RNA, 32 nt, Homo Sapiens
caaaucaaaggaacgcuuuaaaaaauaggacc

SEQ ID NO: 330641 - RNA, 32 nt, Homo Sapiens
ggcagggagagcaccgcccacccugccccuca

SEQ ID NO: 330642 - RNA, 32 nt, Homo Sapiens
gcucaaagauaacagugaucacauucauucca

SEQ ID NO: 330643 - RNA, 32 nt, Homo Sapiens
aacaauuaaggugagcaaauaguuuuaacuuu

SEQ ID NO: 330644 - RNA, 32 nt, Homo Sapiens
aaccucccaagcaguugggacuacaggcguga

SEQ ID NO: 330645 - RNA, 32 nt, Homo Sapiens
gcccaucucucucagcugaauacuaagcucau

SEQ ID NO: 330646 - RNA, 32 nt, Homo Sapiens
aaaccccggacugggaucauggcagccgagac

SEQ ID NO: 330647 - RNA, 32 nt, Homo Sapiens
uuuuuuuguaauuuuuuaaaucuuaucagcua

SEQ ID NO: 330648 - RNA, 32 nt, Homo Sapiens
ccacagccccccagccccucagcccucccagc

SEQ ID NO: 330649 - RNA, 32 nt, Homo Sapiens
cucccacucagacaaugaccccuugcuuugcc

SEQ ID NO: 330650 - RNA, 32 nt, Homo Sapiens
agcccuucuggccacggcuguuucuucuuugu

SEQ ID NO: 330651 - RNA, 31 nt, Homo Sapiens
uccccuccaccccacaccugaguucuugccu

SEQ ID NO: 330652 - RNA, 32 nt, Homo Sapiens
uacuccuccugucccuccaaggaggcagggau

SEQ ID NO: 330653 - RNA, 32 nt, Homo Sapiens
cugagaccucucuggagacccagauccccuag

SEQ ID NO: 330654 - RNA, 32 nt, Homo Sapiens
aaccugacaucuuaaacuguuuuauuagucuu

SEQ ID NO: 330655 - RNA, 32 nt, Homo Sapiens
gggacuacgaacaucauuuacauuuaggaaag

SEQ ID NO: 330656 - RNA, 32 nt, Homo Sapiens
ccuaucugcuuugaccaugugaaaaagugaua

SEQ ID NO: 330657 - RNA, 32 nt, Homo Sapiens
aguagcucugggugagacacaggccgcccugc

SEQ ID NO: 330658 - RNA, 32 nt, Homo Sapiens
cuccagccaagcccaggcaucaggaggcuguu

SEQ ID NO: 330659 - RNA, 30 nt, Homo Sapiens
acuucaucuggccgcgcggggaccggccac

SEQ ID NO: 330660 - RNA, 32 nt, Homo Sapiens
agcaguugcugagugucagcuagacagcagcg

SEQ ID NO: 330661 - RNA, 29 nt, Homo Sapiens
aagcaugcuggccgucggcugcgcgcugc

SEQ ID NO: 330662 - RNA, 31 nt, Homo Sapiens
gaguuuagaagaaaaguaggaguccaaagga

SEQ ID NO: 330663 - RNA, 32 nt, Homo Sapiens
gcgugguauuccaggcuaaagguaauuaacug

SEQ ID NO: 330664 - RNA, 32 nt, Homo Sapiens
caggagcuuuuauauauaagguacauauuuua

SEQ ID NO: 330665 - RNA, 32 nt, Homo Sapiens
gauauuuuaucuuauucauucauuucauacuc

SEQ ID NO: 330666 - RNA, 32 nt, Homo Sapiens
cuggaaugcucauccauaugcauuccaaccug

SEQ ID NO: 330667 - RNA, 32 nt, Homo Sapiens
cugcugcgugcccgcgcgccugucgcccaucu

SEQ ID NO: 330668 - RNA, 32 nt, Homo Sapiens
uuguagaaaugaauuguugagugcaacuuuca

SEQ ID NO: 330669 - RNA, 32 nt, Homo Sapiens
guccuuuuuccacuaacaguuaucuuugacuc

SEQ ID NO: 330670 - RNA, 32 nt, Homo Sapiens
cauaaacagcgcagagaaugggaccagcgcac

SEQ ID NO: 330671 - RNA, 32 nt, Homo Sapiens
agaacagcguugugucccagugcacaugcucg

SEQ ID NO: 330672 - RNA, 32 nt, Homo Sapiens
cucuuagaccauuuggggaugaagccaucuua

SEQ ID NO: 330673 - RNA, 32 nt, Homo Sapiens
cuuggagccgccccagccgccacgcgggcucc

SEQ ID NO: 330674 - RNA, 32 nt, Homo Sapiens
ucaguuaagggagagguagagaggggcccgug

SEQ ID NO: 330675 - RNA, 32 nt, Homo Sapiens
gagaccuggauuagccauucaauugucuuuua

SEQ ID NO: 330676 - RNA, 32 nt, Homo Sapiens
cuaauauguguguuuucuuuucuuuuguuuuu

SEQ ID NO: 330677 - RNA, 32 nt, Homo Sapiens
uucucuaacgcagaaacccgggaguaggagac

SEQ ID NO: 330678 - RNA, 32 nt, Homo Sapiens
aguggugugacucuuaaggagcaugcugccuu

SEQ ID NO: 330679 - RNA, 32 nt, Homo Sapiens
uuaaaaauauauuuuucuugaguuuaggcuuu

SEQ ID NO: 330680 - RNA, 32 nt, Homo Sapiens
agaaguaauuuuccaaccuuuggaagucauga

SEQ ID NO: 330681 - RNA, 32 nt, Homo Sapiens
cagcggacaccgugcguaccggccugcggcgc

SEQ ID NO: 330682 - RNA, 32 nt, Homo Sapiens
uaaccgcgcagcagggcccaaccgggaccuug

SEQ ID NO: 330683 - RNA, 32 nt, Homo Sapiens
gagcgagagguggaucggggcgguguguggcc

SEQ ID NO: 330684 - RNA, 32 nt, Homo Sapiens
aauccuguuucauuggugacuuggauaaagac

SEQ ID NO: 330685 - RNA, 32 nt, Homo Sapiens
cuccauccuccauggccagcuaagccaacacc

SEQ ID NO: 330686 - RNA, 32 nt, Homo Sapiens
agugcuccgggaacugggccugcagccuuccu

SEQ ID NO: 330687 - RNA, 32 nt, Homo Sapiens
cucauucuccucuggccucuaauagucaauga

SEQ ID NO: 330688 - RNA, 32 nt, Homo Sapiens
guggcccugcugucgggccccaggccguuguc

SEQ ID NO: 330689 - RNA, 32 nt, Homo Sapiens
uacauguacauuuuucuguucuaaucauagca

SEQ ID NO: 330690 - RNA, 32 nt, Homo Sapiens
cuguccugcgggacuucucagagccuuuaaga

SEQ ID NO: 330691 - RNA, 29 nt, Homo Sapiens
agaaauaaaauauuuucuucacacuuuug

SEQ ID NO: 330692 - RNA, 32 nt, Homo Sapiens
cuucucuccuuccccccugccgcacuccgccg

SEQ ID NO: 330693 - RNA, 32 nt, Homo Sapiens
aacauuccaguccaaugaaaguuuuauccgcu

SEQ ID NO: 330694 - RNA, 32 nt, Homo Sapiens
uauuuguauaaaauauagacaaagaucauauu

SEQ ID NO: 330695 - RNA, 32 nt, Homo Sapiens
cacuaauaucuccauguggccaauuccucaca

SEQ ID NO: 330696 - RNA, 32 nt, Homo Sapiens
uccaucuauuauugcuucuccauccuggaucc

SEQ ID NO: 330697 - RNA, 32 nt, Homo Sapiens
ggaggagccggggccaccauaggguucugucc

SEQ ID NO: 330698 - RNA, 32 nt, Homo Sapiens
gggaaaagcaaccuggcugguggugacagaac

SEQ ID NO: 330699 - RNA, 32 nt, Homo Sapiens
uguguucucccucucauuuuagucugacuuga

SEQ ID NO: 330700 - RNA, 32 nt, Homo Sapiens
acaaagaagagaauaagaaaauaaucaucugg

SEQ ID NO: 330701 - RNA, 32 nt, Homo Sapiens
uccggugagcgacagaggcagcuccccagggc

SEQ ID NO: 330702 - RNA, 32 nt, Homo Sapiens
cuguaauaaauggaucucugguguagaaaaaa

SEQ ID NO: 330703 - RNA, 32 nt, Homo Sapiens
cucaacccagugggccccacuccagaccaaga

SEQ ID NO: 330704 - RNA, 32 nt, Homo Sapiens
gcaagagcguugucuaccuucuuucuuuguau

SEQ ID NO: 330705 - RNA, 32 nt, Homo Sapiens
ugugagugcccccaacuuucccacacauauuc

SEQ ID NO: 330706 - RNA, 32 nt, Homo Sapiens
cuuguaguauuuuuaguugacauuguuuucug

SEQ ID NO: 330707 - RNA, 32 nt, Homo Sapiens
ccccaguucuuuuauuucuuuguuuuuuauuu

SEQ ID NO: 330708 - RNA, 32 nt, Homo Sapiens
aguaaagaugauaucccauuuauuauacuuuc

SEQ ID NO: 330709 - RNA, 32 nt, Homo Sapiens
uugcgagagauguguguugauacuguugcacg

SEQ ID NO: 330710 - RNA, 32 nt, Homo Sapiens
gucaugugcauacauagaaucagugauggagg

SEQ ID NO: 330711 - RNA, 32 nt, Homo Sapiens
auuaaaacacaaguucacagauuuacaugaac

SEQ ID NO: 330712 - RNA, 32 nt, Homo Sapiens
ccgcugcagcugucacaucccuggacacacuc

SEQ ID NO: 330713 - RNA, 32 nt, Homo Sapiens
uaugauauauauuuauacuaaaacuauauaau

SEQ ID NO: 330714 - RNA, 32 nt, Homo Sapiens
uugaggccauggcucguccccggaguuggggg

SEQ ID NO: 330715 - RNA, 32 nt, Homo Sapiens
aauuacagauuccuuagucgaccuccagaauu

SEQ ID NO: 330716 - RNA, 32 nt, Homo Sapiens
ugcucucagcaggcagugagugucacacaccu

SEQ ID NO: 330717 - RNA, 32 nt, Homo Sapiens
uugaggagucgucuugcucuaucaccaggugg

SEQ ID NO: 330718 - RNA, 32 nt, Homo Sapiens
cuaacugcaaccuccgccucccagguucaagu

SEQ ID NO: 330719 - RNA, 32 nt, Homo Sapiens
gaaagcucuauaccaagaaguccaaacccagc

SEQ ID NO: 330720 - RNA, 32 nt, Homo Sapiens
uaaaaucuuguuccaugccuccagguuuaucu

SEQ ID NO: 330721 - RNA, 32 nt, Homo Sapiens
ggcguggagcugccuccugccggcgggccggg

SEQ ID NO: 330722 - RNA, 29 nt, Homo Sapiens
guguacauauguauagucauguauuccug

SEQ ID NO: 330723 - RNA, 32 nt, Homo Sapiens
acagaugggcaaacccuggugcuuuccuucau

SEQ ID NO: 330724 - RNA, 32 nt, Homo Sapiens
uuucacuugcauugugcaauaagcaaagaagg

SEQ ID NO: 330725 - RNA, 32 nt, Homo Sapiens
accaccaucauuguuuuccccauccucuuccu

SEQ ID NO: 330726 - RNA, 32 nt, Homo Sapiens
cgggcggcggagagggcgcggcuggugagccc

SEQ ID NO: 330727 - RNA, 32 nt, Homo Sapiens
auuugugaggauaauaaauggaaugccauuag

SEQ ID NO: 330728 - RNA, 32 nt, Homo Sapiens
aggugucggguggcuuccuguugaggauauau

SEQ ID NO: 330729 - RNA, 32 nt, Homo Sapiens
acauggcucccucgccugcccugggagcaccg

SEQ ID NO: 330730 - RNA, 32 nt, Homo Sapiens
gaaaaauguaaaaauucccauuuguauccccu

SEQ ID NO: 330731 - RNA, 32 nt, Homo Sapiens
aagguagacauuacuacuuguaacuuuuuucc

SEQ ID NO: 330732 - RNA, 32 nt, Homo Sapiens
guuaaaggcaguuccaaugccugaugguuccc

SEQ ID NO: 330733 - RNA, 32 nt, Homo Sapiens
ccuuccagccuccacagcugaccuccaagucg

SEQ ID NO: 330734 - RNA, 32 nt, Homo Sapiens
aggaggggacuucuggcccaccuugccuucag

SEQ ID NO: 330735 - RNA, 32 nt, Homo Sapiens
aguccugcagcuuuuuggaguuugugaaguca

SEQ ID NO: 330736 - RNA, 32 nt, Homo Sapiens
gccaugacgaccgcggcuaggucgcggcagac

SEQ ID NO: 330737 - RNA, 32 nt, Homo Sapiens
gcgcgugcgcgaguacugucucaagguacugg

SEQ ID NO: 330738 - RNA, 32 nt, Homo Sapiens
ucauggcaccucagccagggguguagccaagu

SEQ ID NO: 330739 - RNA, 32 nt, Homo Sapiens
gugggaauggggcucucugugcuccuaccuuu

SEQ ID NO: 330740 - RNA, 32 nt, Homo Sapiens
ggggugccgcucuaaauuggcuccauaucauu

SEQ ID NO: 330741 - RNA, 32 nt, Homo Sapiens
agcuagcgggagccgggacgccggugcagccg

SEQ ID NO: 330742 - RNA, 30 nt, Homo Sapiens
acucgggcgcccggccgggccuggcaggga

SEQ ID NO: 330743 - RNA, 32 nt, Homo Sapiens
uuuugacgaacucugcaaacaucuuuuuguug

SEQ ID NO: 330744 - RNA, 32 nt, Homo Sapiens
ccagagcccccgcggcucuccucuucuucauc

SEQ ID NO: 330745 - RNA, 32 nt, Homo Sapiens
ccaccacaugcccaaguguacacacacagagc

SEQ ID NO: 330746 - RNA, 32 nt, Homo Sapiens
guuuucaucaggaaggaaaugacaccaaauau

SEQ ID NO: 330747 - RNA, 32 nt, Homo Sapiens
ucuccaaaaagagcuuccuuucgugacgagac

SEQ ID NO: 330748 - RNA, 32 nt, Homo Sapiens
agccgcuauuaucugcguucucugccaaagac

SEQ ID NO: 330749 - RNA, 32 nt, Homo Sapiens
cauucucuguuguucaacucugcgaucaaucu

SEQ ID NO: 330750 - RNA, 32 nt, Homo Sapiens
cgcucgggcacagucaccccccugcucgggga

SEQ ID NO: 330751 - RNA, 32 nt, Homo Sapiens
uaaagauagggucuuucuauguugcccaggcu

SEQ ID NO: 330752 - RNA, 32 nt, Homo Sapiens
uaaaggaguacuuuaagaagagaucuuuaucc

SEQ ID NO: 330753 - RNA, 32 nt, Homo Sapiens
uuguuugucuuacucucauuuccguaauagaa

SEQ ID NO: 330754 - RNA, 32 nt, Homo Sapiens
agucugccccacugggucuggcagcccucccg

SEQ ID NO: 330755 - RNA, 32 nt, Homo Sapiens
cccaugucaugcugccagcaucacugaaugca

SEQ ID NO: 330756 - RNA, 32 nt, Homo Sapiens
uccugggagacccuaaaacauauuuaguuuua

SEQ ID NO: 330757 - RNA, 32 nt, Homo Sapiens
gauaaaccaaaauaugaaaaugggaaauguuu

SEQ ID NO: 330758 - RNA, 32 nt, Homo Sapiens
uuagccugugcccuuccccaccuuugcccucc

SEQ ID NO: 330759 - RNA, 32 nt, Homo Sapiens
uugaggcuuaaugcuaaauaugugcuaaauac

SEQ ID NO: 330760 - RNA, 32 nt, Homo Sapiens
uauauauucuauuuguauggaauucuuauuca

SEQ ID NO: 330761 - RNA, 32 nt, Homo Sapiens
auaaucaagauuaaauguaaauaaucagggca

SEQ ID NO: 330762 - RNA, 32 nt, Homo Sapiens
gauaacagaaaagacugagagaggacagaggg

SEQ ID NO: 330763 - RNA, 32 nt, Homo Sapiens
cucccuguuuaguuauggcagagaacgaugug

SEQ ID NO: 330764 - RNA, 32 nt, Homo Sapiens
cgggcggagcgcgucccgcagccggcuggucc

SEQ ID NO: 330765 - RNA, 32 nt, Homo Sapiens
aguguuagacuaguaaauuguccgcuaaauuc

SEQ ID NO: 330766 - RNA, 32 nt, Homo Sapiens
auuagccuuuugaaauccaacuucugugcaaa

SEQ ID NO: 330767 - RNA, 32 nt, Homo Sapiens
aaagcacuuaaauaaugacuauguguaaaagc

SEQ ID NO: 330768 - RNA, 32 nt, Homo Sapiens
ccaccugcauuaccaauucuguaaauuucaau

SEQ ID NO: 330769 - RNA, 32 nt, Homo Sapiens
cugugcgccaugggguuuuucuguaggaaaau

SEQ ID NO: 330770 - RNA, 29 nt, Homo Sapiens
ucuacaagugugaugucuccaugaagaag

SEQ ID NO: 330771 - RNA, 32 nt, Homo Sapiens
auucaugucguucuuugacaguucuuucucuu

SEQ ID NO: 330772 - RNA, 32 nt, Homo Sapiens
ccccauccccaucgcauccccauccccauccc

SEQ ID NO: 330773 - RNA, 32 nt, Homo Sapiens
uugugccuggaaauagccugagguggcucagg

SEQ ID NO: 330774 - RNA, 32 nt, Homo Sapiens
cugggccgugggcuccggacgccgggccagga

SEQ ID NO: 330775 - RNA, 32 nt, Homo Sapiens
gucauugucacagauaguaaauacuaaaaauu

SEQ ID NO: 330776 - RNA, 32 nt, Homo Sapiens
cucuucucaaccccaaaacccagcuucugauc

SEQ ID NO: 330777 - RNA, 32 nt, Homo Sapiens
auagaacuuccaaaugcugagcccagauccaa

SEQ ID NO: 330778 - RNA, 32 nt, Homo Sapiens
ucggguccaugacacaauacuuugagaaguca

SEQ ID NO: 330779 - RNA, 32 nt, Homo Sapiens
guuuaagauuugcaacuagcaaugcaauuuuu

SEQ ID NO: 330780 - RNA, 32 nt, Homo Sapiens
augccaaaugucacaguucccugugacaagaa

SEQ ID NO: 330781 - RNA, 32 nt, Homo Sapiens
gucagucugauccacgagauaucucaggcugg

SEQ ID NO: 330782 - RNA, 32 nt, Homo Sapiens
aaaacaagggaaggacacaaaauggaaugacu

SEQ ID NO: 330783 - RNA, 32 nt, Homo Sapiens
acuuuugucuuauuuucuuuuaagguguauug

SEQ ID NO: 330784 - RNA, 32 nt, Homo Sapiens
aaagguaaaucccacaucccaguuucucagaa

SEQ ID NO: 330785 - RNA, 32 nt, Homo Sapiens
cccccauuaaccugcuccugguaaauacugau

SEQ ID NO: 330786 - RNA, 32 nt, Homo Sapiens
gaaugauaaagcugcgaaccguggcacacgcu

SEQ ID NO: 330787 - RNA, 32 nt, Homo Sapiens
ucccgcccaagcaccggugcagccaggaccac

SEQ ID NO: 330788 - RNA, 32 nt, Homo Sapiens
auuggaaaaaucacaauuuuuaauggcagcag

SEQ ID NO: 330789 - RNA, 32 nt, Homo Sapiens
uagccucaagacagaugcacaauuauagguug

SEQ ID NO: 330790 - RNA, 28 nt, Homo Sapiens
ccagcugagcggccgccgagcgggugcg

SEQ ID NO: 330791 - RNA, 32 nt, Homo Sapiens
aagauauaauugaaacaaaauaguguaaucau

SEQ ID NO: 330792 - RNA, 32 nt, Homo Sapiens
uuuauucuuucuauuacugaauuaaaaaauca

SEQ ID NO: 330793 - RNA, 32 nt, Homo Sapiens
aggcuuacgaaaaugaucuuuacaauguaucc

SEQ ID NO: 330794 - RNA, 32 nt, Homo Sapiens
aacuucuucuauuuagaaggugaccuccugac

SEQ ID NO: 330795 - RNA, 32 nt, Homo Sapiens
ugauuacugcucuggagggagugagcaggaug

SEQ ID NO: 330796 - RNA, 32 nt, Homo Sapiens
cgacauuccuucccuaccaaggccacuucuau

SEQ ID NO: 330797 - RNA, 32 nt, Homo Sapiens
agggaauuagccauuuuuuuuauuguaauaaa

SEQ ID NO: 330798 - RNA, 32 nt, Homo Sapiens
auaagggaacucaagggaaaaggaaacacacg

SEQ ID NO: 330799 - RNA, 32 nt, Homo Sapiens
agaccaaccuuccauucacaccagcuaaggag

SEQ ID NO: 330800 - RNA, 32 nt, Homo Sapiens
auaccuguuucaucuucacugguuauuuccau

SEQ ID NO: 330801 - RNA, 32 nt, Homo Sapiens
auaaaaccgccggcgccggcgccgccaguccc

SEQ ID NO: 330802 - RNA, 32 nt, Homo Sapiens
ucucucucucucucuuuuuuuuuucuuuuucc

SEQ ID NO: 330803 - RNA, 32 nt, Homo Sapiens
cauauuguccaaaguucauauuguucaaagcu

SEQ ID NO: 330804 - RNA, 32 nt, Homo Sapiens
gcacugcuuuggauuggggucaauugcagucc

SEQ ID NO: 330805 - RNA, 32 nt, Homo Sapiens
gguuucugaagccccaugucccuggugaagga

SEQ ID NO: 330806 - RNA, 32 nt, Homo Sapiens
uuuuuuaagaguuggguuuucuuuuuuaauua

SEQ ID NO: 330807 - RNA, 32 nt, Homo Sapiens
caaagacaauuacuuaguagggccuaaaccac

SEQ ID NO: 330808 - RNA, 32 nt, Homo Sapiens
gggcguaucaaaaccaagaauaugaguggcuc

SEQ ID NO: 330809 - RNA, 32 nt, Homo Sapiens
cugaaacaaaugcuccuccuccaugcucccuu

SEQ ID NO: 330810 - RNA, 32 nt, Homo Sapiens
ucugcuuaggagagauaacacuuuuugucccu

SEQ ID NO: 330811 - RNA, 32 nt, Homo Sapiens
ucccuucuccaaagacccaaauccccacagaa

SEQ ID NO: 330812 - RNA, 32 nt, Homo Sapiens
aucaaagaugaccuuauaauauguacccgaau

SEQ ID NO: 330813 - RNA, 32 nt, Homo Sapiens
cucacugugaccucagaaaaaugccuuuauua

SEQ ID NO: 330814 - RNA, 32 nt, Homo Sapiens
guaagaaacuaaaguauaaucaaaguaaauuc

SEQ ID NO: 330815 - RNA, 32 nt, Homo Sapiens
cucaguuucccucccuucucccuccauccgca

SEQ ID NO: 330816 - RNA, 32 nt, Homo Sapiens
ugggcgugguggcacaugccaguaauuccauc

SEQ ID NO: 330817 - RNA, 30 nt, Homo Sapiens
acuggggguggcaaugaagacacucugucu

SEQ ID NO: 330818 - RNA, 32 nt, Homo Sapiens
gcugcauaaauuuguaauauauccuguuugua

SEQ ID NO: 330819 - RNA, 32 nt, Homo Sapiens
ugaagugauaucuggucucagggauugcuccu

SEQ ID NO: 330820 - RNA, 32 nt, Homo Sapiens
uucccuuuuccuuucuauucucuuucaaguca

SEQ ID NO: 330821 - RNA, 32 nt, Homo Sapiens
aaaugaggcuaguucuggaugagcuagcuggu

SEQ ID NO: 330822 - RNA, 32 nt, Homo Sapiens
aagaauuuauucuccuccccuucuugucuccc

SEQ ID NO: 330823 - RNA, 32 nt, Homo Sapiens
aucaggaauagguguugaauauuuucaaaugc

SEQ ID NO: 330824 - RNA, 32 nt, Homo Sapiens
cucucuuccuacccuccuuccacauguacaua

SEQ ID NO: 330825 - RNA, 32 nt, Homo Sapiens
uauuauuguguuuucuucaguguaauuguucu

SEQ ID NO: 330826 - RNA, 32 nt, Homo Sapiens
augcugcuuucugcgaugugcgugucuguuag

SEQ ID NO: 330827 - RNA, 32 nt, Homo Sapiens
uuggcgccgcggcccgggcgcuucagguagcc

SEQ ID NO: 330828 - RNA, 28 nt, Homo Sapiens
gggcagcgucgccuuccgaggugucuug

SEQ ID NO: 330829 - RNA, 32 nt, Homo Sapiens
gaggucggaagcucugaggcccggggcuuccg

SEQ ID NO: 330830 - RNA, 32 nt, Homo Sapiens
cuguggugaccuagagaaaaaauagacuuguu

SEQ ID NO: 330831 - RNA, 31 nt, Homo Sapiens
gggaagaaauaaaagccuacguguugguaaa

SEQ ID NO: 330832 - RNA, 32 nt, Homo Sapiens
cuguaagaccucuguagggcaaugugaaaauc

SEQ ID NO: 330833 - RNA, 32 nt, Homo Sapiens
aaauaauaaaagaccauaaauaagggcgaaaa

SEQ ID NO: 330834 - RNA, 32 nt, Homo Sapiens
gagggcacuucagguccgugggccguaucugu

SEQ ID NO: 330835 - RNA, 32 nt, Homo Sapiens
aaggcauuucuuuucugcaugaucuaaauaaa

SEQ ID NO: 330836 - RNA, 32 nt, Homo Sapiens
ucugcccggccgcugugcaaccuuccacgugu

SEQ ID NO: 330837 - RNA, 32 nt, Homo Sapiens
gucugcagcagcagccagaccauuaccugggu

SEQ ID NO: 330838 - RNA, 32 nt, Homo Sapiens
ggccccuccgcgggaaagggcuucucugucgu

SEQ ID NO: 330839 - RNA, 32 nt, Homo Sapiens
uugcugauacugaguuuuuauacagcuuuccu

SEQ ID NO: 330840 - RNA, 32 nt, Homo Sapiens
caaucugggugucuucgggggcccgucuggaa

SEQ ID NO: 330841 - RNA, 32 nt, Homo Sapiens
aauuaaauuacauguaauauuauaguucgucu

SEQ ID NO: 330842 - RNA, 32 nt, Homo Sapiens
acccccaucuuccuccucccgacaucgcaaac

SEQ ID NO: 330843 - RNA, 32 nt, Homo Sapiens
gagagggcagugcaaugggaaguaaagagaua

SEQ ID NO: 330844 - RNA, 32 nt, Homo Sapiens
ccccauuccguucuucuucauguaauaaaugu

SEQ ID NO: 330845 - RNA, 32 nt, Homo Sapiens
agccccgucugcccaccauucccggccgugga

SEQ ID NO: 330846 - RNA, 28 nt, Homo Sapiens
gcgaugauucccccacaggaggcauccg

SEQ ID NO: 330847 - RNA, 32 nt, Homo Sapiens
agaacuuuauuacaggacugaauguggaaaag

SEQ ID NO: 330848 - RNA, 32 nt, Homo Sapiens
augaaggagcuuugggccacuaauuauaagcc

SEQ ID NO: 330849 - RNA, 32 nt, Homo Sapiens
guugcucucgcaguuuggacugagacauggaa

SEQ ID NO: 330850 - RNA, 32 nt, Homo Sapiens
cugugaagguccagucauuccaaaugaagaga

SEQ ID NO: 330851 - RNA, 32 nt, Homo Sapiens
auauuuuaaauuugggaucaucgccuguucug

SEQ ID NO: 330852 - RNA, 32 nt, Homo Sapiens
ucgaaaccagaugcuggggacacacauucugc

SEQ ID NO: 330853 - RNA, 32 nt, Homo Sapiens
ggagugacccugcugcugcugcuguauaugug

SEQ ID NO: 330854 - RNA, 32 nt, Homo Sapiens
caucaauaagucuugcaaagaaugggauuguc

SEQ ID NO: 330855 - RNA, 32 nt, Homo Sapiens
agcagcagcaggaggaggagcccgguggcggc

SEQ ID NO: 330856 - RNA, 32 nt, Homo Sapiens
acccugagcagcuucuugggcccugguacgug

SEQ ID NO: 330857 - RNA, 32 nt, Homo Sapiens
gaaaagggaacaaaaguggaaacauggcuacu

SEQ ID NO: 330858 - RNA, 32 nt, Homo Sapiens
gugugugccuguggucccagcuccucaggagg

SEQ ID NO: 330859 - RNA, 32 nt, Homo Sapiens
augucaaaaaagugagacagggaugaaaacuc

SEQ ID NO: 330860 - RNA, 32 nt, Homo Sapiens
cagcagcuccacccucccaagugacaggccau

SEQ ID NO: 330861 - RNA, 32 nt, Homo Sapiens
aucaugauaaccugacaugccauucucaaaau

SEQ ID NO: 330862 - RNA, 32 nt, Homo Sapiens
gcagggugccaggcggggagggggcgagaggc

SEQ ID NO: 330863 - RNA, 32 nt, Homo Sapiens
agguuaaaaacaaaaaguacgugaccagucug

SEQ ID NO: 330864 - RNA, 32 nt, Homo Sapiens
ugagcugcagggcuuggguuuccccagaggag

SEQ ID NO: 330865 - RNA, 27 nt, Homo Sapiens
guguuuaguuaauucuuguauaaauua

SEQ ID NO: 330866 - RNA, 30 nt, Homo Sapiens
caccuggccucugugccgccugcucccugc

SEQ ID NO: 330867 - RNA, 32 nt, Homo Sapiens
uugcuuauauuuuuaacauuucuuuuucaaaa

SEQ ID NO: 330868 - RNA, 32 nt, Homo Sapiens
uuauugguucuuaugaaggugcuuuuuuaaug

SEQ ID NO: 330869 - RNA, 32 nt, Homo Sapiens
uuuaaaaaauucaauuaauaaaagcaacuuca

SEQ ID NO: 330870 - RNA, 32 nt, Homo Sapiens
cagcuccgacgcccucccgcggggaaggagcc

SEQ ID NO: 330871 - RNA, 32 nt, Homo Sapiens
gcugcccuggccucccguccccuucccaggcc

SEQ ID NO: 330872 - RNA, 32 nt, Homo Sapiens
guggggggcauggccauccuccaggucacugc

SEQ ID NO: 330873 - RNA, 32 nt, Homo Sapiens
gcucacaccccauugguggacuacgcgggacg

SEQ ID NO: 330874 - RNA, 32 nt, Homo Sapiens
cagaaaaauuaguaggaaccaauucccaguaa

SEQ ID NO: 330875 - RNA, 32 nt, Homo Sapiens
ugcauguccacuaauuuuuuuauuuugauauu

SEQ ID NO: 330876 - RNA, 32 nt, Homo Sapiens
augcuucuuaaguggaauaacuauacuccguu

SEQ ID NO: 330877 - RNA, 32 nt, Homo Sapiens
ucuucacagucaaagcauuuauauuauugggg

SEQ ID NO: 330878 - RNA, 32 nt, Homo Sapiens
aauagaucauuggucguggcugaaacaucugu

SEQ ID NO: 330879 - RNA, 32 nt, Homo Sapiens
uauuugggcggcugguggcggcugggacgguu

SEQ ID NO: 330880 - RNA, 32 nt, Homo Sapiens
gagauuugcuugaaccugggagguggagguug

SEQ ID NO: 330881 - RNA, 32 nt, Homo Sapiens
gguuccacagaggacacagagaagguuugggu

SEQ ID NO: 330882 - RNA, 32 nt, Homo Sapiens
ugugagcaugcgccugugugugaaucugggag

SEQ ID NO: 330883 - RNA, 32 nt, Homo Sapiens
gacggcagcggcggcccagcgggcucgguggu

SEQ ID NO: 330884 - RNA, 32 nt, Homo Sapiens
cagcagaagguuagagaaaaagagauugcaua

SEQ ID NO: 330885 - RNA, 32 nt, Homo Sapiens
cuuuacuguuccucgaauaaucuccugacuaa

SEQ ID NO: 330886 - RNA, 32 nt, Homo Sapiens
uccaaggccagacguccccaaguugggggagc

SEQ ID NO: 330887 - RNA, 32 nt, Homo Sapiens
ucuucuccuuggcggugcugucagcgcacaga

SEQ ID NO: 330888 - RNA, 32 nt, Homo Sapiens
gggccucucuccguugccccagcuucacucuc

SEQ ID NO: 330889 - RNA, 32 nt, Homo Sapiens
uggguucugugaccacugcuggaccaaggacg

SEQ ID NO: 330890 - RNA, 32 nt, Homo Sapiens
gugccucgggggugguuguucuucaagcaagu

SEQ ID NO: 330891 - RNA, 32 nt, Homo Sapiens
cauguuuucauugccuucuccuuucaaagugu

SEQ ID NO: 330892 - RNA, 32 nt, Homo Sapiens
gaagggggaggucggaggagcgggcaccgcgg

SEQ ID NO: 330893 - RNA, 32 nt, Homo Sapiens
gucagccaccucaguaaauuggagaggauucu

SEQ ID NO: 330894 - RNA, 32 nt, Homo Sapiens
uuuccccaggccugaaacaaccagagagcuac

SEQ ID NO: 330895 - RNA, 32 nt, Homo Sapiens
uuacuuuuuuauuugucauuuucuucaaagga

SEQ ID NO: 330896 - RNA, 32 nt, Homo Sapiens
caagggguugagugguagaaccacugagaaua

SEQ ID NO: 330897 - RNA, 32 nt, Homo Sapiens
aggaggggcgggacgccguggagcacggcgac

SEQ ID NO: 330898 - RNA, 32 nt, Homo Sapiens
uuuuuaaaagguccuuugucaaggaaaaaaau

SEQ ID NO: 330899 - RNA, 32 nt, Homo Sapiens
cgacuucagaauuuauacaaauaaaugcaaug

SEQ ID NO: 330900 - RNA, 31 nt, Homo Sapiens
ccucugagcccucagaaccagccucuucugc

SEQ ID NO: 330901 - RNA, 32 nt, Homo Sapiens
uuaagagguugauuauaaaguuuucuaaauuu

SEQ ID NO: 330902 - RNA, 32 nt, Homo Sapiens
ugcgcccagcgcgggcacggagccucccaccg

SEQ ID NO: 330903 - RNA, 32 nt, Homo Sapiens
ccccaagccagcggcaggaagucucaggaacu

SEQ ID NO: 330904 - RNA, 32 nt, Homo Sapiens
ugauuugccuucuucaugcaugugauuaccuu

SEQ ID NO: 330905 - RNA, 32 nt, Homo Sapiens
ggcuaccucccuucgccuccccgcgccucccc

SEQ ID NO: 330906 - RNA, 32 nt, Homo Sapiens
cucuaguuucucucacaucccuuuuuuuuuuu

SEQ ID NO: 330907 - RNA, 32 nt, Homo Sapiens
gaauuuuuaagugacuaucauucaucguguuu

SEQ ID NO: 330908 - RNA, 32 nt, Homo Sapiens
ugggaccauaaguuuacugaaucuucaagacc

SEQ ID NO: 330909 - RNA, 32 nt, Homo Sapiens
agccggggccauggccggcgcggcggcggagu

SEQ ID NO: 330910 - RNA, 32 nt, Homo Sapiens
uauaauuucacagauaauuuacuuauuuaaaa

SEQ ID NO: 330911 - RNA, 32 nt, Homo Sapiens
uuugcgaaaaagacagggagacaguacuguca

SEQ ID NO: 330912 - RNA, 32 nt, Homo Sapiens
uuuuaaaauaaacauuugauauaauuaucaau

SEQ ID NO: 330913 - RNA, 32 nt, Homo Sapiens
cuuuuaagcuuuuuaaauuauuuucagaaaaa

SEQ ID NO: 330914 - RNA, 32 nt, Homo Sapiens
ccuaaacugugauccauucuuaaaagggguaa

SEQ ID NO: 330915 - RNA, 32 nt, Homo Sapiens
ugccagaucucuuuuuaacaucaugugcgucu

SEQ ID NO: 330916 - RNA, 32 nt, Homo Sapiens
cgccuagugccccacccccacccacagugcug

SEQ ID NO: 330917 - RNA, 32 nt, Homo Sapiens
cacccuaacauucuucuuccuguguggaugcu

SEQ ID NO: 330918 - RNA, 32 nt, Homo Sapiens
gggcuuccuguccccacccccaccccagcagu

SEQ ID NO: 330919 - RNA, 32 nt, Homo Sapiens
uaucugaacaaaugagauuuugugguguuuuc

SEQ ID NO: 330920 - RNA, 32 nt, Homo Sapiens
gggggcagggccagcucuacgguuacaugccu

SEQ ID NO: 330921 - RNA, 32 nt, Homo Sapiens
caugagauggauugauuaaauaaauagauuug

SEQ ID NO: 330922 - RNA, 32 nt, Homo Sapiens
acuggaacccuccuuucuccgugugaccuaaa

SEQ ID NO: 330923 - RNA, 32 nt, Homo Sapiens
cguucccucacagcaaagcaacaauacaggcu

SEQ ID NO: 330924 - RNA, 32 nt, Homo Sapiens
cauuagucgaagacagacgucucguccauagg

SEQ ID NO: 330925 - RNA, 32 nt, Homo Sapiens
gaaauacuauuuuuuaucaaguuuuauaaaga

SEQ ID NO: 330926 - RNA, 32 nt, Homo Sapiens
ccagggagccccacccuaccccugugggacau

SEQ ID NO: 330927 - RNA, 32 nt, Homo Sapiens
cauaccaaauggaaaaguggccauccuuuucc

SEQ ID NO: 330928 - RNA, 32 nt, Homo Sapiens
gcuuauuauuaugauauaaucuguaauacacu

SEQ ID NO: 330929 - RNA, 32 nt, Homo Sapiens
auuauauuaaaagaagcagaguaugagagaca

SEQ ID NO: 330930 - RNA, 32 nt, Homo Sapiens
aagaauuuauuacaaaucagaacuuuggaggc

SEQ ID NO: 330931 - RNA, 32 nt, Homo Sapiens
agcuggugcugcugcugccugauucccgccga

SEQ ID NO: 330932 - RNA, 32 nt, Homo Sapiens
gcagccugcccggcuccucccgccgccggcuc

SEQ ID NO: 330933 - RNA, 32 nt, Homo Sapiens
ucccacaaaagaaaacagaaaggagcagcagu

SEQ ID NO: 330934 - RNA, 32 nt, Homo Sapiens
cuccgcgcuuuccucgugcgccugcagcccuu

SEQ ID NO: 330935 - RNA, 32 nt, Homo Sapiens
auguuuuccuacugcauuggggacuucuagau

SEQ ID NO: 330936 - RNA, 32 nt, Homo Sapiens
gaaacaaaaaagugaaggaaauauuuucagga

SEQ ID NO: 330937 - RNA, 32 nt, Homo Sapiens
ccuuuaugguuguaucugaagaauaauaugac

SEQ ID NO: 330938 - RNA, 32 nt, Homo Sapiens
gcgggaagucugaagccgguaaacauggccgu

SEQ ID NO: 330939 - RNA, 32 nt, Homo Sapiens
auguauagccccacaugguggaaguaucacgg

SEQ ID NO: 330940 - RNA, 32 nt, Homo Sapiens
ccagggacugugcagccuggaaccuccaguca

SEQ ID NO: 330941 - RNA, 32 nt, Homo Sapiens
ggcagggagacggggcuccuggggugguuaag

SEQ ID NO: 330942 - RNA, 32 nt, Homo Sapiens
ugucaccuccagcccagaggugguuccuuagg

SEQ ID NO: 330943 - RNA, 32 nt, Homo Sapiens
gugcucuucuugccccuggagcgcugggggca

SEQ ID NO: 330944 - RNA, 32 nt, Homo Sapiens
cucuggagcaccgcggacggccagugcugcgc

SEQ ID NO: 330945 - RNA, 32 nt, Homo Sapiens
ugguggacgcuggccugggaugagagggccca

SEQ ID NO: 330946 - RNA, 32 nt, Homo Sapiens
ccucgcggcucgcggcggccgacgguuccugg

SEQ ID NO: 330947 - RNA, 32 nt, Homo Sapiens
ccggggauccucugcugggcuucgcucagccc

SEQ ID NO: 330948 - RNA, 32 nt, Homo Sapiens
aaagaauugcuguuccucuuuggaaucuccuu

SEQ ID NO: 330949 - RNA, 32 nt, Homo Sapiens
auggagucaaggaaaaagagugugaaguaguu

SEQ ID NO: 330950 - RNA, 32 nt, Homo Sapiens
auguguaauuuucauauggagauugaacaaaa

SEQ ID NO: 330951 - RNA, 28 nt, Homo Sapiens
aggaugcugaaucugcugcugcuggcgc

SEQ ID NO: 330952 - RNA, 32 nt, Homo Sapiens
aaagcagcucucacuaucagaaaacccaacua

SEQ ID NO: 330953 - RNA, 32 nt, Homo Sapiens
ggguagcagccgccgccuccaggugcagguuc

SEQ ID NO: 330954 - RNA, 32 nt, Homo Sapiens
caagcuguagggccagggcugcugccugccag

SEQ ID NO: 330955 - RNA, 32 nt, Homo Sapiens
ggcgcacaggccucuucuccccggcacuuccg

SEQ ID NO: 330956 - RNA, 32 nt, Homo Sapiens
ucuggugcugaagcagccaagagacccaaguc

SEQ ID NO: 330957 - RNA, 32 nt, Homo Sapiens
accugcacagcuuuugggaaccccaagcccau

SEQ ID NO: 330958 - RNA, 32 nt, Homo Sapiens
cuggaguaaugcaguauaaauuggccaucagu

SEQ ID NO: 330959 - RNA, 32 nt, Homo Sapiens
gguagcuugugaucaaaggcauauacuuccuu

SEQ ID NO: 330960 - RNA, 32 nt, Homo Sapiens
acucccagccccacugaguaaccuccagggca

SEQ ID NO: 330961 - RNA, 32 nt, Homo Sapiens
auggugaaaccucaacucuacuaaaaauacaa

SEQ ID NO: 330962 - RNA, 32 nt, Homo Sapiens
uggaagguagacagcaacaagauuuuaaucac

SEQ ID NO: 330963 - RNA, 32 nt, Homo Sapiens
ccaggccugccaggggugugguggaggggaag

SEQ ID NO: 330964 - RNA, 32 nt, Homo Sapiens
uagauuaaguuggugggacuggaauaauccuu

SEQ ID NO: 330965 - RNA, 32 nt, Homo Sapiens
gugggugauuauuuuuuauacuguaugugcca

SEQ ID NO: 330966 - RNA, 32 nt, Homo Sapiens
auggcagaacagagcuucacgauccccauccc

SEQ ID NO: 330967 - RNA, 32 nt, Homo Sapiens
ugaggaaaaggcugccugaggacaauuuaaga

SEQ ID NO: 330968 - RNA, 32 nt, Homo Sapiens
ccaucggcagcgggaagagacccggagagaug

SEQ ID NO: 330969 - RNA, 32 nt, Homo Sapiens
ucaggagguuugggggacuugguuuuaaugag

SEQ ID NO: 330970 - RNA, 32 nt, Homo Sapiens
uggacaagaaggcacaguuagaugguagaccc

SEQ ID NO: 330971 - RNA, 32 nt, Homo Sapiens
gagccaccgugcccggcccuuuaauccucuuu

SEQ ID NO: 330972 - RNA, 32 nt, Homo Sapiens
uguuggcugggauggucuugaucucuugaccu

SEQ ID NO: 330973 - RNA, 32 nt, Homo Sapiens
aaucccacagaaauacaaacuaccaucagaga

SEQ ID NO: 330974 - RNA, 32 nt, Homo Sapiens
acauugaaaaggaagguguugccugcugcuuc

SEQ ID NO: 330975 - RNA, 32 nt, Homo Sapiens
aguguuuacccaugcgguacuacuuauuaucc

SEQ ID NO: 330976 - RNA, 29 nt, Homo Sapiens
aggaggagggcgaggacgaggcuuaaaac

SEQ ID NO: 330977 - RNA, 32 nt, Homo Sapiens
accccccaguugucggcaguacucaguggaag

SEQ ID NO: 330978 - RNA, 32 nt, Homo Sapiens
uucuuuuucugcaguguugauuaaugauuuuu

SEQ ID NO: 330979 - RNA, 32 nt, Homo Sapiens
ccaccaggccucgggccccagaggucccgcuc

SEQ ID NO: 330980 - RNA, 32 nt, Homo Sapiens
gcuuucaaaaauaaaccagaaaaccuauaucc

SEQ ID NO: 330981 - RNA, 32 nt, Homo Sapiens
gugguaauaagaagauuauuaaaagccauccc

SEQ ID NO: 330982 - RNA, 32 nt, Homo Sapiens
aggucuuccccacccacccccagcccccuagu

SEQ ID NO: 330983 - RNA, 32 nt, Homo Sapiens
aaccuuuauuaagcagaaauuaauguuaauug

SEQ ID NO: 330984 - RNA, 32 nt, Homo Sapiens
gagugggacccagcccucaccucccccagagc

SEQ ID NO: 330985 - RNA, 32 nt, Homo Sapiens
cccgggcugccgccagcucugaagccucggcc

SEQ ID NO: 330986 - RNA, 32 nt, Homo Sapiens
ugucugcauuuuucucaccaggguagacaauu

SEQ ID NO: 330987 - RNA, 32 nt, Homo Sapiens
aucuauccuauuaguucugucccuuuagagaa

SEQ ID NO: 330988 - RNA, 32 nt, Homo Sapiens
gaaggaagaagaggacgccgggcgcgcacucg

SEQ ID NO: 330989 - RNA, 32 nt, Homo Sapiens
ccgugguagaauuuggggagcucucauaggca

SEQ ID NO: 330990 - RNA, 32 nt, Homo Sapiens
cauccggggaggaaacacuggcuguuuguguc

SEQ ID NO: 330991 - RNA, 32 nt, Homo Sapiens
aggcauccccguagccacgugccugguacauc

SEQ ID NO: 330992 - RNA, 32 nt, Homo Sapiens
auuccuagacucugcucucauguguuauuccu

SEQ ID NO: 330993 - RNA, 32 nt, Homo Sapiens
ucucuuuagucuuuuccaccuuucacauccaa

SEQ ID NO: 330994 - RNA, 32 nt, Homo Sapiens
gaagugcucgggcucucgcucagacuuaggga

SEQ ID NO: 330995 - RNA, 32 nt, Homo Sapiens
aggagaaucguuugaacucaggaggcagaggu

SEQ ID NO: 330996 - RNA, 32 nt, Homo Sapiens
cugcaccgcuccuggccccgggcccccuggau

SEQ ID NO: 330997 - RNA, 32 nt, Homo Sapiens
aguauggaagcagaggcagggcaacauuaagu

SEQ ID NO: 330998 - RNA, 32 nt, Homo Sapiens
aaggagaucuacagugagaacucuguauccau

SEQ ID NO: 330999 - RNA, 32 nt, Homo Sapiens
uucagcaaaguuauguuaaauuaggggccuuu

SEQ ID NO: 331000 - RNA, 32 nt, Homo Sapiens
aggaugcggcccggggcggcccgggagcugag

SEQ ID NO: 331001 - RNA, 32 nt, Homo Sapiens
cugucaaauaggaaacaucacaaaacugagca

SEQ ID NO: 331002 - RNA, 32 nt, Homo Sapiens
uacccgucucaaaguagagccauaggaugcug

SEQ ID NO: 331003 - RNA, 32 nt, Homo Sapiens
caugacucaucagggcacuuugugaagaguga

SEQ ID NO: 331004 - RNA, 32 nt, Homo Sapiens
gcccagaccucuucuagguagagacgauacaa

SEQ ID NO: 331005 - RNA, 32 nt, Homo Sapiens
gacccgggacgccgccguccgcugagcagccg

SEQ ID NO: 331006 - RNA, 32 nt, Homo Sapiens
ggaccugucaggcuuugucauuucccaguuug

SEQ ID NO: 331007 - RNA, 32 nt, Homo Sapiens
uaaggaaauacuuauaccaaaaauagaggugc

SEQ ID NO: 331008 - RNA, 32 nt, Homo Sapiens
acuggugcccccagccucuccaacccccaaac

SEQ ID NO: 331009 - RNA, 32 nt, Homo Sapiens
uucugcuuuugcccuuuguccuguucccucag

SEQ ID NO: 331010 - RNA, 32 nt, Homo Sapiens
agggguaccucucuucccugcugcuggccugg

SEQ ID NO: 331011 - RNA, 32 nt, Homo Sapiens
ccaggugugaagaguugcagguccuccgagga

SEQ ID NO: 331012 - RNA, 32 nt, Homo Sapiens
agccgggcguggugacacgugccuguaguccc

SEQ ID NO: 331013 - RNA, 32 nt, Homo Sapiens
caggcucgccuggucauguguccuuuacucuc

SEQ ID NO: 331014 - RNA, 32 nt, Homo Sapiens
uccugugugcuucugugacuguuccuggcagg

SEQ ID NO: 331015 - RNA, 27 nt, Homo Sapiens
uuaagguccuucuuuccagcacauuuu

SEQ ID NO: 331016 - RNA, 32 nt, Homo Sapiens
cggugaugacgacugggugaacagccaucacu

SEQ ID NO: 331017 - RNA, 32 nt, Homo Sapiens
gggaggagggggugggugagggggcacaucac

SEQ ID NO: 331018 - RNA, 32 nt, Homo Sapiens
uggugccaggccugaggccucgcggugacccc

SEQ ID NO: 331019 - RNA, 32 nt, Homo Sapiens
gcugagaucgcaccacugcacuccagcacucc

SEQ ID NO: 331020 - RNA, 29 nt, Homo Sapiens
guccaauaaaguuuaauuuuacuuucugu

SEQ ID NO: 331021 - RNA, 32 nt, Homo Sapiens
ugccccauuggaagaagaaccaggcauggaaa

SEQ ID NO: 331022 - RNA, 32 nt, Homo Sapiens
cugcagccucugcggguccagcuccugcuugc

SEQ ID NO: 331023 - RNA, 32 nt, Homo Sapiens
ugccaggcagugcccuucccggagcgugcccu

SEQ ID NO: 331024 - RNA, 32 nt, Homo Sapiens
auguaguaaaauguaugacuuuguauggguuu

SEQ ID NO: 331025 - RNA, 32 nt, Homo Sapiens
guagauguggguuuaugacugccaaguuugcc

SEQ ID NO: 331026 - RNA, 30 nt, Homo Sapiens
cacuuguucuguuugggggaaaagugucug

SEQ ID NO: 331027 - RNA, 32 nt, Homo Sapiens
cgacccugcaggugcuggacgcggugcagcag

SEQ ID NO: 331028 - RNA, 32 nt, Homo Sapiens
ucggggcccaccacccccucaagccccagcag

SEQ ID NO: 331029 - RNA, 32 nt, Homo Sapiens
aacaggagggaagagaaagagaaaacuuucuu

SEQ ID NO: 331030 - RNA, 28 nt, Homo Sapiens
uaacauuguauguauauguguuugcuuu

SEQ ID NO: 331031 - RNA, 32 nt, Homo Sapiens
ggaaggguagagaggcgcggagugaaccccac

SEQ ID NO: 331032 - RNA, 32 nt, Homo Sapiens
aagagaaaauuuuuauacuaaaaucuauaauu

SEQ ID NO: 331033 - RNA, 32 nt, Homo Sapiens
ccugucauuuuuguccugaugauguuucuucu

SEQ ID NO: 331034 - RNA, 32 nt, Homo Sapiens
ccaggcccucucccacccccgccccgcccaug

SEQ ID NO: 331035 - RNA, 32 nt, Homo Sapiens
cuacauucucugauguaguuaaguauuuacag

SEQ ID NO: 331036 - RNA, 32 nt, Homo Sapiens
uuggacuguguccucagcuccuuccagaugac

SEQ ID NO: 331037 - RNA, 32 nt, Homo Sapiens
cuuuugugccugcagcagagccugcagaagcu

SEQ ID NO: 331038 - RNA, 32 nt, Homo Sapiens
cuugccugacccccaugucgccucuguaggua

SEQ ID NO: 331039 - RNA, 32 nt, Homo Sapiens
cgcgcgguuccggcugcuccggcgaggcgacc

SEQ ID NO: 331040 - RNA, 32 nt, Homo Sapiens
ggaaaaaucaguaagcauaggagucaggaaau

SEQ ID NO: 331041 - RNA, 32 nt, Homo Sapiens
aucuggauucucccacuucucuacuccauuau

SEQ ID NO: 331042 - RNA, 32 nt, Homo Sapiens
uugcgacggacggguaggggaggcgaccccgg

SEQ ID NO: 331043 - RNA, 32 nt, Homo Sapiens
accccaacucccucaaaaccccuuuguacuuc

SEQ ID NO: 331044 - RNA, 32 nt, Homo Sapiens
aaccccaucuauauuucuaggacaugaugaua

SEQ ID NO: 331045 - RNA, 32 nt, Homo Sapiens
caucgcccaagagcucugagcaaggaggcugu

SEQ ID NO: 331046 - RNA, 32 nt, Homo Sapiens
gccacagaccccaagaaugagcuuacaaagug

SEQ ID NO: 331047 - RNA, 32 nt, Homo Sapiens
ucuuaagucuuugugucugcaaugaaauugua

SEQ ID NO: 331048 - RNA, 32 nt, Homo Sapiens
uaguguaaguagaagauaaacuuuuuauucau

SEQ ID NO: 331049 - RNA, 32 nt, Homo Sapiens
cugggagcucugcggaaucugagccagcaccc

SEQ ID NO: 331050 - RNA, 32 nt, Homo Sapiens
ccacuggcucugcgccccagcccggcucugcu

SEQ ID NO: 331051 - RNA, 32 nt, Homo Sapiens
uaagcgucuggugcugcagauccagugggguc

SEQ ID NO: 331052 - RNA, 32 nt, Homo Sapiens
cugaguccauucaaauguguuuuuuuaaaugu

SEQ ID NO: 331053 - RNA, 32 nt, Homo Sapiens
guuguaaauggcagccacugccucuauaggaa

SEQ ID NO: 331054 - RNA, 32 nt, Homo Sapiens
aauaagcauuuccuccaccacccagaagcauc

SEQ ID NO: 331055 - RNA, 32 nt, Homo Sapiens
aaggcgaugcgcgcagggggucgggcagcugg

SEQ ID NO: 331056 - RNA, 32 nt, Homo Sapiens
cacacuaaggugggcuucagugcucacucaau

SEQ ID NO: 331057 - RNA, 32 nt, Homo Sapiens
aacccuuuuucuccccgcuguggccucugcug

SEQ ID NO: 331058 - RNA, 32 nt, Homo Sapiens
aaagaaccaaauuuugucugcuauuuuguaaa

SEQ ID NO: 331059 - RNA, 32 nt, Homo Sapiens
accagaaugaauugagggguaucaagaaccag

SEQ ID NO: 331060 - RNA, 32 nt, Homo Sapiens
cccacguugcuuauauuaagccuuugugugug

SEQ ID NO: 331061 - RNA, 32 nt, Homo Sapiens
cuuuauguagcauugaaugaucaaauauugga

SEQ ID NO: 331062 - RNA, 31 nt, Homo Sapiens
gucaccauggugccggcucggcugggcccgg

SEQ ID NO: 331063 - RNA, 32 nt, Homo Sapiens
auauucacaaagagaaaacaaaaggaacuuuu

SEQ ID NO: 331064 - RNA, 32 nt, Homo Sapiens
cugcgcggugcggaccccggcgcgcgguccgg

SEQ ID NO: 331065 - RNA, 32 nt, Homo Sapiens
guggaaauugaggaagggcggcuggagaugau

SEQ ID NO: 331066 - RNA, 32 nt, Homo Sapiens
ggcggcuguggcggccggaaccgcgaccuugg

SEQ ID NO: 331067 - RNA, 32 nt, Homo Sapiens
ucacugauauauuaauuuuuguguaaugaaug

SEQ ID NO: 331068 - RNA, 32 nt, Homo Sapiens
uaaguuugucauuguucuucaguucuuugggu

SEQ ID NO: 331069 - RNA, 32 nt, Homo Sapiens
gucaccacaguuccucauucacugagaaagug

SEQ ID NO: 331070 - RNA, 32 nt, Homo Sapiens
uucccuucuagcuccuucuguucucauuuauc

SEQ ID NO: 331071 - RNA, 32 nt, Homo Sapiens
uuuuccuaaaagacucuaaaagaaaaagauuc

SEQ ID NO: 331072 - RNA, 32 nt, Homo Sapiens
uggucgggccggccuuccccagcccucugggg

SEQ ID NO: 331073 - RNA, 32 nt, Homo Sapiens
gugacccccgcggcccgggccgcucuuugcau

SEQ ID NO: 331074 - RNA, 32 nt, Homo Sapiens
ggccugcguggaagcagguccaggcguuucua

SEQ ID NO: 331075 - RNA, 32 nt, Homo Sapiens
agguuuggugaacacuggggcccacauuccug

SEQ ID NO: 331076 - RNA, 32 nt, Homo Sapiens
cauauuuuuuaaaauauugugcuuaaagaugg

SEQ ID NO: 331077 - RNA, 32 nt, Homo Sapiens
cgggucgcccagcccacgcgcgcacggccgag

SEQ ID NO: 331078 - RNA, 32 nt, Homo Sapiens
ccaguguagagcuccuucaaguuuccuuagag

SEQ ID NO: 331079 - RNA, 32 nt, Homo Sapiens
caauacuagcauacguuuuucuuaguuguuau

SEQ ID NO: 331080 - RNA, 32 nt, Homo Sapiens
gcagcaaaacaaaggcaguuuuauaugaaaga

SEQ ID NO: 331081 - RNA, 32 nt, Homo Sapiens
augggguugcugugauuuuccauuaacucuaa

SEQ ID NO: 331082 - RNA, 32 nt, Homo Sapiens
aaggccucugguuuuuuguaaucucaguuuac

SEQ ID NO: 331083 - RNA, 32 nt, Homo Sapiens
ccaaauccaucguggacuaacucuguggguag

SEQ ID NO: 331084 - RNA, 32 nt, Homo Sapiens
cugcagggccaaggucugggggugcuggaggc

SEQ ID NO: 331085 - RNA, 32 nt, Homo Sapiens
uccauuggggggugggggugccaggugaggug

SEQ ID NO: 331086 - RNA, 32 nt, Homo Sapiens
cugggcucccuggucugaggcaacuacggacu

SEQ ID NO: 331087 - RNA, 32 nt, Homo Sapiens
acuagagaugaugaucgacuuauuuaauauga

SEQ ID NO: 331088 - RNA, 25 nt, Homo Sapiens
gaaaauaaauuucuguuuuuaauuc

SEQ ID NO: 331089 - RNA, 32 nt, Homo Sapiens
uuuuucaagaaagaaaaggagaaggaagagga

SEQ ID NO: 331090 - RNA, 32 nt, Homo Sapiens
ugggccuggugucauuuggagagaaugcgggg

SEQ ID NO: 331091 - RNA, 32 nt, Homo Sapiens
agcaccgucugcccgggcccaagcccugcccc

SEQ ID NO: 331092 - RNA, 32 nt, Homo Sapiens
uucucuaagguucuuuuuuuuauucaaacugu

SEQ ID NO: 331093 - RNA, 32 nt, Homo Sapiens
gacggauucgauucaacgggguuccggaccgc

SEQ ID NO: 331094 - RNA, 32 nt, Homo Sapiens
ugcaagcccccuccacacuggguuggaugaua

SEQ ID NO: 331095 - RNA, 32 nt, Homo Sapiens
cuggucaaugauuuccuccuccgggugugcga

SEQ ID NO: 331096 - RNA, 32 nt, Homo Sapiens
aauuuguauggacuaaauaaaaacuuuauuau

SEQ ID NO: 331097 - RNA, 32 nt, Homo Sapiens
aauacaagagucuuagaggcagcaaauuaaaa

SEQ ID NO: 331098 - RNA, 32 nt, Homo Sapiens
acaagguauuugcaugagucacaauuacaaag

SEQ ID NO: 331099 - RNA, 32 nt, Homo Sapiens
ucucagggggacgaggaacaccaccaugcccc

SEQ ID NO: 331100 - RNA, 32 nt, Homo Sapiens
gcagggacuaaucccggaugagccucguguaa

SEQ ID NO: 331101 - RNA, 31 nt, Homo Sapiens
ugugugaaauaaauauguagauagucacaua

SEQ ID NO: 331102 - RNA, 32 nt, Homo Sapiens
gggcucugugccagcccugcucucucagaugc

SEQ ID NO: 331103 - RNA, 32 nt, Homo Sapiens
caugucagaauauuuuugguuuuaaacuuucu

SEQ ID NO: 331104 - RNA, 32 nt, Homo Sapiens
aaagucuucccuuuuuuauugcaugugugccu

SEQ ID NO: 331105 - RNA, 32 nt, Homo Sapiens
gggcaguuugcccccaucccucccagugcugg

SEQ ID NO: 331106 - RNA, 32 nt, Homo Sapiens
cgcagcgcggccugggcucccgcguguuuaaa

SEQ ID NO: 331107 - RNA, 32 nt, Homo Sapiens
cacaugcgggcucgcccauacccaugacagug

SEQ ID NO: 331108 - RNA, 32 nt, Homo Sapiens
aggccuacuuggcccuggauagaaauuguuuu

SEQ ID NO: 331109 - RNA, 32 nt, Homo Sapiens
gaugaacuauacauauuuguauuucuacuuuu

SEQ ID NO: 331110 - RNA, 32 nt, Homo Sapiens
caaagaucuuucguugguuguuucucugagcu

SEQ ID NO: 331111 - RNA, 32 nt, Homo Sapiens
acguugccuggugguuccuaccuucuguaaaa

SEQ ID NO: 331112 - RNA, 32 nt, Homo Sapiens
caguugugguuuuaaguuggguggugggaacc

SEQ ID NO: 331113 - RNA, 31 nt, Homo Sapiens
gcuuuucaaguaccuggaugaguuaauguuu

SEQ ID NO: 331114 - RNA, 32 nt, Homo Sapiens
uagauauguacuucaugguuaaauucuaaauc

SEQ ID NO: 331115 - RNA, 32 nt, Homo Sapiens
cggcuucgcagggccacguccgagggcgagag

SEQ ID NO: 331116 - RNA, 32 nt, Homo Sapiens
aaaagaucgcaguggacugugugauugaccug

SEQ ID NO: 331117 - RNA, 32 nt, Homo Sapiens
gagagagaggaggacaggcugcgaccccgggc

SEQ ID NO: 331118 - RNA, 32 nt, Homo Sapiens
uuuagaggagagaggaggaggaggaggcugag

SEQ ID NO: 331119 - RNA, 32 nt, Homo Sapiens
ccucaaagauaaaucuuuugauuuaucuuuau

SEQ ID NO: 331120 - RNA, 32 nt, Homo Sapiens
aaaauauuagccauuugagaugagaugagacu

SEQ ID NO: 331121 - RNA, 32 nt, Homo Sapiens
ucacauaaacacauuuugacucgacacacuga

SEQ ID NO: 331122 - RNA, 32 nt, Homo Sapiens
uaacuaaagcuaccaaaauguacacauucaua

SEQ ID NO: 331123 - RNA, 32 nt, Homo Sapiens
cauccccuaccuuuuggcuucugucuaccccu

SEQ ID NO: 331124 - RNA, 30 nt, Homo Sapiens
caugcugugcuaaugaaagggaucauauca

SEQ ID NO: 331125 - RNA, 32 nt, Homo Sapiens
guaucuuguaaaaauaaauccaacuuuguguc

SEQ ID NO: 331126 - RNA, 32 nt, Homo Sapiens
ccagaaacaacacaauccguugcaaacccaaa

SEQ ID NO: 331127 - RNA, 32 nt, Homo Sapiens
gguucugaguuauagugucuuauuuagaugcu

SEQ ID NO: 331128 - RNA, 32 nt, Homo Sapiens
uguaguuucauuagagggagcucuccaaacug

SEQ ID NO: 331129 - RNA, 32 nt, Homo Sapiens
uaucagaaucuaaaugaaaauagcgaacauuu

SEQ ID NO: 331130 - RNA, 32 nt, Homo Sapiens
accuuaaucucguuucuccuuaccacaaucuu

SEQ ID NO: 331131 - RNA, 32 nt, Homo Sapiens
ccggagccccgccuccaccgccggcgacaggg

SEQ ID NO: 331132 - RNA, 32 nt, Homo Sapiens
acaguacaucuauauugauagagguucauguu

SEQ ID NO: 331133 - RNA, 32 nt, Homo Sapiens
cgcccucccguggucacuggcuccgcccccag

SEQ ID NO: 331134 - RNA, 32 nt, Homo Sapiens
cggaggcccagggaggcugugcagcgcgccgg

SEQ ID NO: 331135 - RNA, 32 nt, Homo Sapiens
ggggcggcagaggcaacuucagugucccuguu

SEQ ID NO: 331136 - RNA, 32 nt, Homo Sapiens
gggagggaggggccggguccgcggccggcgaa

SEQ ID NO: 331137 - RNA, 32 nt, Homo Sapiens
ccagcugccuguagccacguggcauccugccu

SEQ ID NO: 331138 - RNA, 32 nt, Homo Sapiens
uauuuuaauguucaaaaaguaaacacuuuaag

SEQ ID NO: 331139 - RNA, 32 nt, Homo Sapiens
gaugugaccuccccggcgcucacccugggccu

SEQ ID NO: 331140 - RNA, 32 nt, Homo Sapiens
ggaagcaccauuagaacaacuccaucagaaca

SEQ ID NO: 331141 - RNA, 32 nt, Homo Sapiens
uggucaaggagggaugugagggaaauagggac

SEQ ID NO: 331142 - RNA, 32 nt, Homo Sapiens
ugcagcucuucagagccacagaccucagggug

SEQ ID NO: 331143 - RNA, 32 nt, Homo Sapiens
agaaacagguacuggacuuuucccuccugcau

SEQ ID NO: 331144 - RNA, 31 nt, Homo Sapiens
aucuaagugcagaugaaaguguguuauauau

SEQ ID NO: 331145 - RNA, 32 nt, Homo Sapiens
aagcuggaccuggccuggacucugcgccuucc

SEQ ID NO: 331146 - RNA, 32 nt, Homo Sapiens
caccugauuggcccagguaucuguggaagguu

SEQ ID NO: 331147 - RNA, 32 nt, Homo Sapiens
cucggcgguggcggcggccguagguguggggc

SEQ ID NO: 331148 - RNA, 32 nt, Homo Sapiens
ccacucuuugcuacaauaaaugcugaaugaau

SEQ ID NO: 331149 - RNA, 32 nt, Homo Sapiens
gggaagauaguuuucuucaggugucaauggcg

SEQ ID NO: 331150 - RNA, 32 nt, Homo Sapiens
cccuuucuguuguuugcacaugccccucuuac

SEQ ID NO: 331151 - RNA, 32 nt, Homo Sapiens
uugagaugggagucucgaucuguuacccaggc

SEQ ID NO: 331152 - RNA, 31 nt, Homo Sapiens
gggcuguggacgcuccugccccacacgacca

SEQ ID NO: 331153 - RNA, 32 nt, Homo Sapiens
augccauacacacacacaaacacacacauuua

SEQ ID NO: 331154 - RNA, 32 nt, Homo Sapiens
auuaaacuaaaauaaaauagaaugaaacacaa

SEQ ID NO: 331155 - RNA, 32 nt, Homo Sapiens
uagaagaaaaaguuuauuaccaaacaagagua

SEQ ID NO: 331156 - RNA, 32 nt, Homo Sapiens
gaauguucugccuucccuuccaucucuucacc

SEQ ID NO: 331157 - RNA, 32 nt, Homo Sapiens
caguaugcauuacauuuaaauuauucucuauu

SEQ ID NO: 331158 - RNA, 32 nt, Homo Sapiens
gugugugugaauguguguauaugagucuuuga

SEQ ID NO: 331159 - RNA, 32 nt, Homo Sapiens
ucugguauuuccccugucaguuuccccucucg

SEQ ID NO: 331160 - RNA, 32 nt, Homo Sapiens
acccagcaucagccccgcauggagcagcuagu

SEQ ID NO: 331161 - RNA, 32 nt, Homo Sapiens
auggugcuuuggauuguguggaaacuaugcau

SEQ ID NO: 331162 - RNA, 32 nt, Homo Sapiens
aguuaaccaaaaaauugcaauuuguuuaauuc

SEQ ID NO: 331163 - RNA, 32 nt, Homo Sapiens
cgaccugcucagcaugaagcuccugccccaac

SEQ ID NO: 331164 - RNA, 32 nt, Homo Sapiens
cggcgucgucgcgggccgggccccagcaaucc

SEQ ID NO: 331165 - RNA, 32 nt, Homo Sapiens
ggccacagccccgaugauucguaacaccaccu

SEQ ID NO: 331166 - RNA, 32 nt, Homo Sapiens
auggaagaaguaccaagaggcgaugaagacau

SEQ ID NO: 331167 - RNA, 32 nt, Homo Sapiens
gaaauguucuuuauauggauacauucccuuau

SEQ ID NO: 331168 - RNA, 32 nt, Homo Sapiens
cugauacccaccccaaaccuugcuguucacag

SEQ ID NO: 331169 - RNA, 31 nt, Homo Sapiens
cuggcagcgggccgggccaugcagggagcgc

SEQ ID NO: 331170 - RNA, 32 nt, Homo Sapiens
accccuuuagugaccgcccccaucccggcuuu

SEQ ID NO: 331171 - RNA, 32 nt, Homo Sapiens
aaauuucuucaauaauaagcuauuaaauaaca

SEQ ID NO: 331172 - RNA, 32 nt, Homo Sapiens
guauuuugauucauccaaggguuuccaaacuu

SEQ ID NO: 331173 - RNA, 29 nt, Homo Sapiens
acaggcuggggacagagguggcccugguu

SEQ ID NO: 331174 - RNA, 32 nt, Homo Sapiens
guugaugacuuauggauucugucaguucauca

SEQ ID NO: 331175 - RNA, 32 nt, Homo Sapiens
gaaaaucuggaaccuuacuucucugggaaucu

SEQ ID NO: 331176 - RNA, 32 nt, Homo Sapiens
caagcccucugaaaguuacucccuuacaaccu

SEQ ID NO: 331177 - RNA, 32 nt, Homo Sapiens
cucugccccaaggcugcccggcggccgggauc

SEQ ID NO: 331178 - RNA, 29 nt, Homo Sapiens
agcuugggaguuccagugggggugguggg

SEQ ID NO: 331179 - RNA, 32 nt, Homo Sapiens
aggaauuuuguacagucuuugugaaauaaaau

SEQ ID NO: 331180 - RNA, 32 nt, Homo Sapiens
ggucccugacaggcacugcugccaugcugccu

SEQ ID NO: 331181 - RNA, 32 nt, Homo Sapiens
uaaggcugaaccaaauauaaucccaaguaucc

SEQ ID NO: 331182 - RNA, 32 nt, Homo Sapiens
cugagacgccgcccucccgggguuggggacag

SEQ ID NO: 331183 - RNA, 32 nt, Homo Sapiens
gggcuggggagggagcggcgccagcacgaggu

SEQ ID NO: 331184 - RNA, 32 nt, Homo Sapiens
uucccuguaucguauuugguccaggucauccc

SEQ ID NO: 331185 - RNA, 32 nt, Homo Sapiens
auuacaagggcagaguugaguaguuaugacag

SEQ ID NO: 331186 - RNA, 32 nt, Homo Sapiens
uauugcuucuucaagaucgacuugcuuauucu

SEQ ID NO: 331187 - RNA, 32 nt, Homo Sapiens
uaguuugucuagauuucuuuugccucucucac

SEQ ID NO: 331188 - RNA, 32 nt, Homo Sapiens
uguacauauuccacauauguauuuaguauaau

SEQ ID NO: 331189 - RNA, 32 nt, Homo Sapiens
aagacugcugacucuuugaaaaucugagguau

SEQ ID NO: 331190 - RNA, 32 nt, Homo Sapiens
gaaaaauacuaaaaauugacuugaguuauuuc

SEQ ID NO: 331191 - RNA, 32 nt, Homo Sapiens
gggcccuggcgccacccccaccccuucccacc

SEQ ID NO: 331192 - RNA, 32 nt, Homo Sapiens
gaaauuucgcaauuaagauuuaccaagcaaac

SEQ ID NO: 331193 - RNA, 32 nt, Homo Sapiens
cugguggccccggcuuuagacuggaccccaca

SEQ ID NO: 331194 - RNA, 32 nt, Homo Sapiens
gcauuuuauuuuccuuuagaaauggacaucag

SEQ ID NO: 331195 - RNA, 32 nt, Homo Sapiens
gucuccaaauaccaucccauuggggguugggg

SEQ ID NO: 331196 - RNA, 32 nt, Homo Sapiens
cucuucuauccugcaauuucucccgaauccug

SEQ ID NO: 331197 - RNA, 32 nt, Homo Sapiens
cauuagcugcacugcguggcugcagccaaaac

SEQ ID NO: 331198 - RNA, 32 nt, Homo Sapiens
cacaaauuggugacagaauuucaauuacguga

SEQ ID NO: 331199 - RNA, 32 nt, Homo Sapiens
gacagugggagagagcacguugugaagcaucc

SEQ ID NO: 331200 - RNA, 32 nt, Homo Sapiens
aggaggaaaaucaagccuaaaugagcacaucg

SEQ ID NO: 331201 - RNA, 32 nt, Homo Sapiens
guggcaggagacaaaagcacaggguacuaucu

SEQ ID NO: 331202 - RNA, 32 nt, Homo Sapiens
ugcucuccuguuucacagcuaagggaccucgg

SEQ ID NO: 331203 - RNA, 32 nt, Homo Sapiens
aaaguucgcaggaggcgagagaugcugccgca

SEQ ID NO: 331204 - RNA, 31 nt, Homo Sapiens
uauccggcaagguccaggcuguccagcuccc

SEQ ID NO: 331205 - RNA, 32 nt, Homo Sapiens
ucagaggaaggggcgguuggugcggccuccau

SEQ ID NO: 331206 - RNA, 32 nt, Homo Sapiens
cgcggcgggucuggagcccccauccuccugcg

SEQ ID NO: 331207 - RNA, 32 nt, Homo Sapiens
ccagucaguggccccaggauacucuggcaaga

SEQ ID NO: 331208 - RNA, 32 nt, Homo Sapiens
agauuuauaaucauaauguuuacaaugcagcc

SEQ ID NO: 331209 - RNA, 32 nt, Homo Sapiens
gccaaccguggcgcaggcggcgcggggaggcg

SEQ ID NO: 331210 - RNA, 32 nt, Homo Sapiens
agagcgccugacgccgacccgcaggcgcagcc

SEQ ID NO: 331211 - RNA, 32 nt, Homo Sapiens
aggaugggcaggagagcagagccgcggagucu

SEQ ID NO: 331212 - RNA, 32 nt, Homo Sapiens
cuaaguaaaggcaaugaauucuccauuuccua

SEQ ID NO: 331213 - RNA, 32 nt, Homo Sapiens
ccacuagacaagcagaauuauuaauguaggua

SEQ ID NO: 331214 - RNA, 32 nt, Homo Sapiens
agucagcugcaggcgggaagccaggcgggugg

SEQ ID NO: 331215 - RNA, 32 nt, Homo Sapiens
uccaguccaguuacggacuucccggccgccac

SEQ ID NO: 331216 - RNA, 32 nt, Homo Sapiens
agucacaaacuuauaagcaaugaacuuaccug

SEQ ID NO: 331217 - RNA, 32 nt, Homo Sapiens
ggcuggucacgacuucuucggagguggcagcc

SEQ ID NO: 331218 - RNA, 32 nt, Homo Sapiens
ucuacaaaaaauuuaaaaauuagccaaguaug

SEQ ID NO: 331219 - RNA, 32 nt, Homo Sapiens
ucauuuuuauagaacuuuugcauacuauauug

SEQ ID NO: 331220 - RNA, 32 nt, Homo Sapiens
gguccaggcagacauguggacucuggggaggu

SEQ ID NO: 331221 - RNA, 32 nt, Homo Sapiens
aagcaggugacaggaagagauggggggccuca

SEQ ID NO: 331222 - RNA, 32 nt, Homo Sapiens
uucccucagaucugcccuaaucccgggcauuu

SEQ ID NO: 331223 - RNA, 32 nt, Homo Sapiens
aaaauaagcucuuuuuaaugaugucacuguuu

SEQ ID NO: 331224 - RNA, 32 nt, Homo Sapiens
ccaaccuuugccuuuuucuuugcugcggccaa

SEQ ID NO: 331225 - RNA, 32 nt, Homo Sapiens
gggaguuggcgugguugcuuuaacucaauagc

SEQ ID NO: 331226 - RNA, 32 nt, Homo Sapiens
aagaguccauuauuugguguucaccaacgugg

SEQ ID NO: 331227 - RNA, 31 nt, Homo Sapiens
ugaaagaaauaaaaaccacugugugcaaugc

SEQ ID NO: 331228 - RNA, 32 nt, Homo Sapiens
auucuguguucuauguuauauucagaauggga

SEQ ID NO: 331229 - RNA, 32 nt, Homo Sapiens
acaguguuaacugccauauauguaauauacac

SEQ ID NO: 331230 - RNA, 32 nt, Homo Sapiens
aucuuugcagggagcauagaacugucugguuu

SEQ ID NO: 331231 - RNA, 32 nt, Homo Sapiens
aagggccuggugccggccugcugccccggccg

SEQ ID NO: 331232 - RNA, 32 nt, Homo Sapiens
gcuagaaaaaucaaauugaauuagugauacaa

SEQ ID NO: 331233 - RNA, 32 nt, Homo Sapiens
uuuaaggccuauaaucaugaaauaucacuagu

SEQ ID NO: 331234 - RNA, 32 nt, Homo Sapiens
cucggguuuggcccuggcaugugugggagcag

SEQ ID NO: 331235 - RNA, 32 nt, Homo Sapiens
aaaugaagaaaagacacagagaaggaugugac

SEQ ID NO: 331236 - RNA, 32 nt, Homo Sapiens
uauuaaacuauauugaaaaauaaagaugucaa

SEQ ID NO: 331237 - RNA, 32 nt, Homo Sapiens
gggcagcguaugggggcagagcccgguucugg

SEQ ID NO: 331238 - RNA, 32 nt, Homo Sapiens
ugcugcauuuuaaagcacuuuuauagugugca

SEQ ID NO: 331239 - RNA, 32 nt, Homo Sapiens
agacuuggggcugcacaguggagcaggugggu

SEQ ID NO: 331240 - RNA, 32 nt, Homo Sapiens
agaagaaaaugacuuuuaaaaaaccuaucuga

SEQ ID NO: 331241 - RNA, 32 nt, Homo Sapiens
aaagucauuguuacaacagggaucuacagaac

SEQ ID NO: 331242 - RNA, 32 nt, Homo Sapiens
uacugcugcuaaguggcugaaggcauacuaac

SEQ ID NO: 331243 - RNA, 32 nt, Homo Sapiens
cacugcacuccagccugggugacggagcgaga

SEQ ID NO: 331244 - RNA, 32 nt, Homo Sapiens
cacugcacuccagccugggugacagagcgagg

SEQ ID NO: 331245 - RNA, 32 nt, Homo Sapiens
auuuggaugauuaauguuaugcuguucuuuca

SEQ ID NO: 331246 - RNA, 32 nt, Homo Sapiens
uugggaggagacugaggagacccugcugcuuu

SEQ ID NO: 331247 - RNA, 32 nt, Homo Sapiens
ccccucgcccuccugcucgcgccccgccgcca

SEQ ID NO: 331248 - RNA, 32 nt, Homo Sapiens
gccugugcccggugcugucugccuaugcgcgu

SEQ ID NO: 331249 - RNA, 32 nt, Homo Sapiens
gccaggguacccuccgcggagcccgggggugg

SEQ ID NO: 331250 - RNA, 32 nt, Homo Sapiens
cucuggaggcccccacaccucccaucaccacc

SEQ ID NO: 331251 - RNA, 32 nt, Homo Sapiens
aaugauuuagugaucaaauugugcaguacuuu

SEQ ID NO: 331252 - RNA, 32 nt, Homo Sapiens
aacagauguauuauggcaaauuagcaguagag

SEQ ID NO: 331253 - RNA, 32 nt, Homo Sapiens
gcagcacaugcgcgugcuguggcaggaggacg

SEQ ID NO: 331254 - RNA, 32 nt, Homo Sapiens
agagcucaacugaauauuuccuuuuuuguuuu

SEQ ID NO: 331255 - RNA, 32 nt, Homo Sapiens
gacacccaccgccaccccggcugggucugcgu

SEQ ID NO: 331256 - RNA, 32 nt, Homo Sapiens
cuguuccccaggccccaccucuuccagaaccu

SEQ ID NO: 331257 - RNA, 32 nt, Homo Sapiens
ccaguggggggccuguggccccggcucuucac

SEQ ID NO: 331258 - RNA, 32 nt, Homo Sapiens
acccaaggccccagccagcgcucauacccugu

SEQ ID NO: 331259 - RNA, 32 nt, Homo Sapiens
gucgccccauccccgaccccaccucacucuuu

SEQ ID NO: 331260 - RNA, 32 nt, Homo Sapiens
guccuccccuccccucauuuucaguggcaaua

SEQ ID NO: 331261 - RNA, 32 nt, Homo Sapiens
acuuucugccagcaucugcagccacuuucugc

SEQ ID NO: 331262 - RNA, 32 nt, Homo Sapiens
gccgagauccagaacggcugcaagcgcaacuu

SEQ ID NO: 331263 - RNA, 32 nt, Homo Sapiens
gaaaugggagcacacaguacugugaaauggga

SEQ ID NO: 331264 - RNA, 32 nt, Homo Sapiens
aguggccgauguagcuaugagcuccgggcucc

SEQ ID NO: 331265 - RNA, 32 nt, Homo Sapiens
gagcaggacagaggggcaaaggcuaaagauga

SEQ ID NO: 331266 - RNA, 32 nt, Homo Sapiens
uaacacaaugguuuuuucuaaugaaaaacuac

SEQ ID NO: 331267 - RNA, 32 nt, Homo Sapiens
ggaaaggagcgggacuccggaccuccaggagu

SEQ ID NO: 331268 - RNA, 32 nt, Homo Sapiens
aggacuaucuccaccacccccaguuagcacca

SEQ ID NO: 331269 - RNA, 32 nt, Homo Sapiens
acaggccacaggccaagggcagcagucaggcc

SEQ ID NO: 331270 - RNA, 32 nt, Homo Sapiens
gaaaaggcaaggaaacagauucuccauuagag

SEQ ID NO: 331271 - RNA, 32 nt, Homo Sapiens
cuaaagguuaaaccuuagcccugugggauagg

SEQ ID NO: 331272 - RNA, 26 nt, Homo Sapiens
caugcaaggggaggacgccagauacc

SEQ ID NO: 331273 - RNA, 32 nt, Homo Sapiens
gagacuguucugcgaugaccacagcaagguac

SEQ ID NO: 331274 - RNA, 32 nt, Homo Sapiens
guccaaacuccagcuucuuccccugggaaaaa

SEQ ID NO: 331275 - RNA, 29 nt, Homo Sapiens
gaacaauaaaguugaaauuuuccaaagug

SEQ ID NO: 331276 - RNA, 32 nt, Homo Sapiens
aaacaggaauaaaaucaguuccuuucucuguu

SEQ ID NO: 331277 - RNA, 32 nt, Homo Sapiens
auacgcgcucccucccucccccuucucugucc

SEQ ID NO: 331278 - RNA, 32 nt, Homo Sapiens
uuugcacagacaccucuaccuucagcacuaug

SEQ ID NO: 331279 - RNA, 32 nt, Homo Sapiens
gggggcggggagaggcagcagaaggggcuggg

SEQ ID NO: 331280 - RNA, 32 nt, Homo Sapiens
acccuuucccuccuuuggaaugcuguauuaau

SEQ ID NO: 331281 - RNA, 32 nt, Homo Sapiens
aaggauuuucuuuuuaacuuuaccaaaugaaa

SEQ ID NO: 331282 - RNA, 32 nt, Homo Sapiens
cucagucucuucuccuuccccugccugcaaca

SEQ ID NO: 331283 - RNA, 32 nt, Homo Sapiens
uccuguauaagaaagacaacuacuuuugaagg

SEQ ID NO: 331284 - RNA, 32 nt, Homo Sapiens
cgugggccgggcgagguccccagcccaccggg

SEQ ID NO: 331285 - RNA, 32 nt, Homo Sapiens
cccaguggccgagccugcugcugcuccugcug

SEQ ID NO: 331286 - RNA, 32 nt, Homo Sapiens
cccugaacucacugcgcagaagcccccaggga

SEQ ID NO: 331287 - RNA, 32 nt, Homo Sapiens
agcgauucaauccugaucaagacaccaaagcu

SEQ ID NO: 331288 - RNA, 32 nt, Homo Sapiens
aagccaaucacgucgccgcgguccugguucua

SEQ ID NO: 331289 - RNA, 32 nt, Homo Sapiens
cagcagcacuguauauaccugucucuaaguaa

SEQ ID NO: 331290 - RNA, 32 nt, Homo Sapiens
cagagagcuggguguugcauccugggcgccac

SEQ ID NO: 331291 - RNA, 32 nt, Homo Sapiens
aggccgccucguggaggccccggagcggcauc

SEQ ID NO: 331292 - RNA, 32 nt, Homo Sapiens
cuaaacuaacagugauagcugaaaauaugugg

SEQ ID NO: 331293 - RNA, 31 nt, Homo Sapiens
ccagagcugccggacgcucgcgggucucgga

SEQ ID NO: 331294 - RNA, 32 nt, Homo Sapiens
aagaguuuuggauuucuuucugccguguauag

SEQ ID NO: 331295 - RNA, 32 nt, Homo Sapiens
uaaaacuaauuuccaaaauauaagcuguuuuc

SEQ ID NO: 331296 - RNA, 32 nt, Homo Sapiens
guagcugggauuacaggcacccgccgcugcua

SEQ ID NO: 331297 - RNA, 32 nt, Homo Sapiens
auccuuguuuuguguuuuauuaacuugguguu

SEQ ID NO: 331298 - RNA, 32 nt, Homo Sapiens
cucccggucggacgcucgcagcugcguucccg

SEQ ID NO: 331299 - RNA, 32 nt, Homo Sapiens
cauaaaaauaaauuauacuaaugugaaacccu

SEQ ID NO: 331300 - RNA, 32 nt, Homo Sapiens
ccgccggagccugucgccguccuguccccagc

SEQ ID NO: 331301 - RNA, 32 nt, Homo Sapiens
ucccucugccccacccuccuucccauuggcuu

SEQ ID NO: 331302 - RNA, 32 nt, Homo Sapiens
cuaucaagaacaauggcaaacugaacagaggc

SEQ ID NO: 331303 - RNA, 32 nt, Homo Sapiens
gcuucagacgcugcagcgaugccucgcccacg

SEQ ID NO: 331304 - RNA, 32 nt, Homo Sapiens
ccucccgcaccgcgccccucuccggcugcccu

SEQ ID NO: 331305 - RNA, 32 nt, Homo Sapiens
gggccgggcgccccagcagagccacggguacg

SEQ ID NO: 331306 - RNA, 32 nt, Homo Sapiens
uuuuucggggagagcagcugaggccgugugga

SEQ ID NO: 331307 - RNA, 32 nt, Homo Sapiens
gcugagaacucuguaagucccuuuaaaaauua

SEQ ID NO: 331308 - RNA, 32 nt, Homo Sapiens
ccccggggacuaggggaaacaguuggagguuc

SEQ ID NO: 331309 - RNA, 32 nt, Homo Sapiens
ucuuugauuuaaaauaaaauagcuaaaggcua

SEQ ID NO: 331310 - RNA, 32 nt, Homo Sapiens
ucuuccauauccugguccuuggcaucugggcu

SEQ ID NO: 331311 - RNA, 32 nt, Homo Sapiens
gcuguuaucucgcagagcuucuccaagaaaaa

SEQ ID NO: 331312 - RNA, 32 nt, Homo Sapiens
gcaagggaaugauuugucaaaggucagagcaa

SEQ ID NO: 331313 - RNA, 32 nt, Homo Sapiens
gcgcucucucgccccaggugcccgcgcgcgug

SEQ ID NO: 331314 - RNA, 32 nt, Homo Sapiens
aguagaagugaccagcagugccuggcugucuc

SEQ ID NO: 331315 - RNA, 32 nt, Homo Sapiens
cugaauucucuuaaauucuuugagauccaaag

SEQ ID NO: 331316 - RNA, 32 nt, Homo Sapiens
acacaggagacuuuaagcaaguuccagugugu

SEQ ID NO: 331317 - RNA, 32 nt, Homo Sapiens
cacagugugcuggaaugguuaucacaagaagg

SEQ ID NO: 331318 - RNA, 32 nt, Homo Sapiens
guggggagggcuugaacacaggaggaagcagg

SEQ ID NO: 331319 - RNA, 32 nt, Homo Sapiens
uccauuaggagacaaugaggaaggaggaugga

SEQ ID NO: 331320 - RNA, 32 nt, Homo Sapiens
ggcucuaaguucuggcucuucuuucuuugggg

SEQ ID NO: 331321 - RNA, 32 nt, Homo Sapiens
cuuagucauagucucgacuccgccauugccuu

SEQ ID NO: 331322 - RNA, 32 nt, Homo Sapiens
cugcugcaaacacagcauggaggacacagaug

SEQ ID NO: 331323 - RNA, 32 nt, Homo Sapiens
gcuuugcggcgccccccaccccagcgcugucu

SEQ ID NO: 331324 - RNA, 32 nt, Homo Sapiens
uaggagaauaguugugguauggugacuucugu

SEQ ID NO: 331325 - RNA, 32 nt, Homo Sapiens
ugucuggggagacagacaggauguuguggagc

SEQ ID NO: 331326 - RNA, 32 nt, Homo Sapiens
gacugcuggcggggcggggccuggggcucaga

SEQ ID NO: 331327 - RNA, 32 nt, Homo Sapiens
cacaggagccauucugguuucuggccaaacac

SEQ ID NO: 331328 - RNA, 32 nt, Homo Sapiens
gauguuuuucuuuacuaaggauacuauucaaa

SEQ ID NO: 331329 - RNA, 32 nt, Homo Sapiens
cauguucuugcuuaagccauuaaagucagaga

SEQ ID NO: 331330 - RNA, 32 nt, Homo Sapiens
aagccacaggagcagagcugcccaagaccaug

SEQ ID NO: 331331 - RNA, 32 nt, Homo Sapiens
guccgcgcgugcccgcgccgagcugccugcuc

SEQ ID NO: 331332 - RNA, 32 nt, Homo Sapiens
gcagcgcgcuuggcgcuucuccccuccccccg

SEQ ID NO: 331333 - RNA, 32 nt, Homo Sapiens
uaugcaagaagaauauaaauaaauaaaauauc

SEQ ID NO: 331334 - RNA, 32 nt, Homo Sapiens
uugucacuuuaaaagaacuguuuguuuagcaa

SEQ ID NO: 331335 - RNA, 32 nt, Homo Sapiens
cucacucagggcucugggagccaggccuagcu

SEQ ID NO: 331336 - RNA, 32 nt, Homo Sapiens
cgaauagcaucacagaauauaaacacauggug

SEQ ID NO: 331337 - RNA, 32 nt, Homo Sapiens
gggaugugugcuuuugaugucugggccaguga

SEQ ID NO: 331338 - RNA, 32 nt, Homo Sapiens
gugcucacaccuguaaucccagcacuuuggga

SEQ ID NO: 331339 - RNA, 32 nt, Homo Sapiens
cucaccuaaacagugccgugcugcugcuggga

SEQ ID NO: 331340 - RNA, 32 nt, Homo Sapiens
gcaggauggggaggagggcgagagucacaggg

SEQ ID NO: 331341 - RNA, 32 nt, Homo Sapiens
acucugugggaaucacauccauacuggagccc

SEQ ID NO: 331342 - RNA, 32 nt, Homo Sapiens
gugacuccucuggccuguuuguuggcucuuuc

SEQ ID NO: 331343 - RNA, 32 nt, Homo Sapiens
gaaggaggcguggccuggcgcugggauuggcg

SEQ ID NO: 331344 - RNA, 32 nt, Homo Sapiens
ccucagaagaccuggaacaagauucugcuucu

SEQ ID NO: 331345 - RNA, 32 nt, Homo Sapiens
ggcagaggagugacagccgcagacacacgaca

SEQ ID NO: 331346 - RNA, 32 nt, Homo Sapiens
uuccucauuucuaucaauggaaccacaguguu

SEQ ID NO: 331347 - RNA, 32 nt, Homo Sapiens
agcugccaccaccaccugagccuccgggcuau

SEQ ID NO: 331348 - RNA, 32 nt, Homo Sapiens
cccucugagccauugggccuaguggugucaug

SEQ ID NO: 331349 - RNA, 32 nt, Homo Sapiens
uaaucuuaaaaauuaaauuuuuaaacuaugug

SEQ ID NO: 331350 - RNA, 32 nt, Homo Sapiens
agggggcagccaagaagccggagcuggcagca

SEQ ID NO: 331351 - RNA, 32 nt, Homo Sapiens
gugcccuaucccgcaaaaugggcuuccugccu

SEQ ID NO: 331352 - RNA, 28 nt, Homo Sapiens
ggaggaaggcggccgcuggggcuccugg

SEQ ID NO: 331353 - RNA, 32 nt, Homo Sapiens
aaucuccccguccaaggagcuuguggaacuug

SEQ ID NO: 331354 - RNA, 32 nt, Homo Sapiens
ccaugugaaggggaguggggcugggcuugucu

SEQ ID NO: 331355 - RNA, 32 nt, Homo Sapiens
ugcuauuuuaucauauuaaggcucuagaaaga

SEQ ID NO: 331356 - RNA, 32 nt, Homo Sapiens
ccacuugagguucaugagaauguaucuuuuuu

SEQ ID NO: 331357 - RNA, 32 nt, Homo Sapiens
cccucuguccaccuguuucucuuucuuccagc

SEQ ID NO: 331358 - RNA, 32 nt, Homo Sapiens
ggguggccgggcgggauguaaccggcugcuga

SEQ ID NO: 331359 - RNA, 32 nt, Homo Sapiens
agugggcaaccuggaauugggugccaguccuc

SEQ ID NO: 331360 - RNA, 32 nt, Homo Sapiens
caugguggcagagcgagacuccgucucaaaaa

SEQ ID NO: 331361 - RNA, 32 nt, Homo Sapiens
uuuuauuuuuuuucuuuuuugcuuuuauugua

SEQ ID NO: 331362 - RNA, 32 nt, Homo Sapiens
aauacuagggguuuuuguuguauuuuuaacaa

SEQ ID NO: 331363 - RNA, 32 nt, Homo Sapiens
aggcacuggccacuucuguguccuccggaugc

SEQ ID NO: 331364 - RNA, 32 nt, Homo Sapiens
gaaugaucucuguuccucucuuucacuaaguu

SEQ ID NO: 331365 - RNA, 32 nt, Homo Sapiens
uugucuaucuucauuugguuuuaauuuuuaaa

SEQ ID NO: 331366 - RNA, 32 nt, Homo Sapiens
ucucucuucaguagcugcuuugaaagcuccca

SEQ ID NO: 331367 - RNA, 32 nt, Homo Sapiens
aguguuuucaucuaauucucuuaaaguugaua

SEQ ID NO: 331368 - RNA, 32 nt, Homo Sapiens
cuguuaggcgagaggaggaggcagccagaacc

SEQ ID NO: 331369 - RNA, 27 nt, Homo Sapiens
guaccauguccuuucagcccucaacgc

SEQ ID NO: 331370 - RNA, 32 nt, Homo Sapiens
caaguuacacuuucuuaaaauuugauuuguca

SEQ ID NO: 331371 - RNA, 32 nt, Homo Sapiens
ugcuguuucuucugccccauacuuuguuaacu

SEQ ID NO: 331372 - RNA, 32 nt, Homo Sapiens
ucaggccgcagacagcccccagcccuucuccg

SEQ ID NO: 331373 - RNA, 32 nt, Homo Sapiens
auucugagccuuccucuggacccaggcaggag

SEQ ID NO: 331374 - RNA, 32 nt, Homo Sapiens
uuauuaaucucaccauccuccagacuucccuc

SEQ ID NO: 331375 - RNA, 32 nt, Homo Sapiens
auaucaggaaccgaaauggccaagcauaucca

SEQ ID NO: 331376 - RNA, 32 nt, Homo Sapiens
accgcgccuggccaaaaggcauuucauucuuu

SEQ ID NO: 331377 - RNA, 32 nt, Homo Sapiens
agccaaaucacuuuuccaucucuaaaguuuca

SEQ ID NO: 331378 - RNA, 32 nt, Homo Sapiens
gucccggccugggcugcccccgcuccagucaa

SEQ ID NO: 331379 - RNA, 32 nt, Homo Sapiens
uaaucaauaugaaauagcauucaguaacuccu

SEQ ID NO: 331380 - RNA, 32 nt, Homo Sapiens
ggggacccuggguggggccuccaggugcagcu

SEQ ID NO: 331381 - RNA, 32 nt, Homo Sapiens
gccguagcagcgucccgcgcgcggcgggcagc

SEQ ID NO: 331382 - RNA, 32 nt, Homo Sapiens
ugcaggugugaagcuccacaccugccuccaua

SEQ ID NO: 331383 - RNA, 32 nt, Homo Sapiens
ggaauuaaggguuaccccacccugcccacucc

SEQ ID NO: 331384 - RNA, 32 nt, Homo Sapiens
agaagaagauaaaaacaaaauauuuuggagug

SEQ ID NO: 331385 - RNA, 32 nt, Homo Sapiens
aagaucuggacuuaauaugaugacuuauaagg

SEQ ID NO: 331386 - RNA, 31 nt, Homo Sapiens
cuucagcagcacugccacugccuuuggccac

SEQ ID NO: 331387 - RNA, 32 nt, Homo Sapiens
uucuguguuuugcuguaccagcccagauguuu

SEQ ID NO: 331388 - RNA, 32 nt, Homo Sapiens
cagccuuuugagcagaaaugccaggcaggacc

SEQ ID NO: 331389 - RNA, 32 nt, Homo Sapiens
gguucuuauggagagugagaaagggaagggaa

SEQ ID NO: 331390 - RNA, 32 nt, Homo Sapiens
uuuuccccuaaaaggaccuuuaguaagcaaau

SEQ ID NO: 331391 - RNA, 32 nt, Homo Sapiens
uccccguuacucaaauccuuggcacuacuaca

SEQ ID NO: 331392 - RNA, 32 nt, Homo Sapiens
guugguagauucuaauggcuuuauugcagcga

SEQ ID NO: 331393 - RNA, 32 nt, Homo Sapiens
uguucacucaucuuuaaauccucauagugaaa

SEQ ID NO: 331394 - RNA, 32 nt, Homo Sapiens
uuuugaguuguuuuuucuuaauguaagaaaaa

SEQ ID NO: 331395 - RNA, 32 nt, Homo Sapiens
aaauguaaaaauuaauuucagcuucauuucgu

SEQ ID NO: 331396 - RNA, 32 nt, Homo Sapiens
gagaaaaggcuccacuucccagcccuuccuug

SEQ ID NO: 331397 - RNA, 32 nt, Homo Sapiens
aaguuucagagcugaggauuuagacuuagagc

SEQ ID NO: 331398 - RNA, 32 nt, Homo Sapiens
ugcuggcaaguguggcagcugccucugggcug

SEQ ID NO: 331399 - RNA, 32 nt, Homo Sapiens
caaggcauugaagaauggcagaugaacggaaa

SEQ ID NO: 331400 - RNA, 32 nt, Homo Sapiens
ccaggggcagugccucucugcgggggaggaaa

SEQ ID NO: 331401 - RNA, 32 nt, Homo Sapiens
ggccuccuguacguaggcugcagacgugaaag

SEQ ID NO: 331402 - RNA, 32 nt, Homo Sapiens
uccuggccggccgggcggagaagagcgacacc

SEQ ID NO: 331403 - RNA, 32 nt, Homo Sapiens
cgcgaaccacacgucguccacgggcacgcggc

SEQ ID NO: 331404 - RNA, 32 nt, Homo Sapiens
aguuuuuguaaauaaauuaccauccuuccaca

SEQ ID NO: 331405 - RNA, 32 nt, Homo Sapiens
caaagaauaauacaccaacauaaaguccgggu

SEQ ID NO: 331406 - RNA, 32 nt, Homo Sapiens
uuucugucuugccucuccuucagugccuuuua

SEQ ID NO: 331407 - RNA, 32 nt, Homo Sapiens
gaggguggugauuacgguggcgccagcccuag

SEQ ID NO: 331408 - RNA, 32 nt, Homo Sapiens
acggaugccgacggccgggccccuccccgaca

SEQ ID NO: 331409 - RNA, 32 nt, Homo Sapiens
ggucaccgaggggugcggggcuccggagaggg

SEQ ID NO: 331410 - RNA, 32 nt, Homo Sapiens
ccucgucucucagaaaauaaacaucuucccag

SEQ ID NO: 331411 - RNA, 32 nt, Homo Sapiens
ggcgcuccugcuuucggugcugcguguacugc

SEQ ID NO: 331412 - RNA, 29 nt, Homo Sapiens
gacuuaaaauaaaauuuuuuugaaagagg

SEQ ID NO: 331413 - RNA, 31 nt, Homo Sapiens
cugcagaagacugaacagguaucagcacauc

SEQ ID NO: 331414 - RNA, 27 nt, Homo Sapiens
aagggcucugacuucagcccaccagca

SEQ ID NO: 331415 - RNA, 32 nt, Homo Sapiens
cuguuuguaaaaauaucgguuuuauuuucaga

SEQ ID NO: 331416 - RNA, 32 nt, Homo Sapiens
auuugguuuuaaaaauauuaagcuuuuugcuc

SEQ ID NO: 331417 - RNA, 32 nt, Homo Sapiens
gaucucaaacuggauguaaaauuuuaaauuau

SEQ ID NO: 331418 - RNA, 32 nt, Homo Sapiens
ccugaauccuuaaauugggaguaccucaggcg

SEQ ID NO: 331419 - RNA, 32 nt, Homo Sapiens
ccacaccguccucuugcccccgucacuugggu

SEQ ID NO: 331420 - RNA, 32 nt, Homo Sapiens
auauaaucuugcauugaaauaguuuucaccau

SEQ ID NO: 331421 - RNA, 32 nt, Homo Sapiens
ggagagagaugguguacgcaucgcgggagucc

SEQ ID NO: 331422 - RNA, 32 nt, Homo Sapiens
cagggagccaacugucccuccuccccuguccc

SEQ ID NO: 331423 - RNA, 32 nt, Homo Sapiens
ccucuccugccucauuccuuguuggcagcucc

SEQ ID NO: 331424 - RNA, 30 nt, Homo Sapiens
cccacgggugucccugcccacucguguggc

SEQ ID NO: 331425 - RNA, 32 nt, Homo Sapiens
aagaggaguacacggugcggauccagcugcaa

SEQ ID NO: 331426 - RNA, 32 nt, Homo Sapiens
uguaggcgccuggcuggcucaggccaaugcag

SEQ ID NO: 331427 - RNA, 32 nt, Homo Sapiens
gugagggugucuuuaagaugcccaccgugaca

SEQ ID NO: 331428 - RNA, 32 nt, Homo Sapiens
uuccauaguuuagguacucaaacuccauucuc

SEQ ID NO: 331429 - RNA, 32 nt, Homo Sapiens
ugcuguugcauucuuuuaagcgccggaguauc

SEQ ID NO: 331430 - RNA, 32 nt, Homo Sapiens
gcucccaaucccuauuugagaaacacugcccc

SEQ ID NO: 331431 - RNA, 32 nt, Homo Sapiens
uuccuacaaguaccuaaaaaccacugaaaaug

SEQ ID NO: 331432 - RNA, 32 nt, Homo Sapiens
cggcagcagcagcagcagcaucaggaaggcuc

SEQ ID NO: 331433 - RNA, 32 nt, Homo Sapiens
acugagaagggaggcaugaggcgugaggcugg

SEQ ID NO: 331434 - RNA, 32 nt, Homo Sapiens
ggucggucuccauggcugcaagaccugaagac

SEQ ID NO: 331435 - RNA, 32 nt, Homo Sapiens
acccuggagguagaggcugcagugagccaaga

SEQ ID NO: 331436 - RNA, 32 nt, Homo Sapiens
gccacugugcuaauggaagcaccacggcagcu

SEQ ID NO: 331437 - RNA, 32 nt, Homo Sapiens
agggucccauggaccuggccggcggccuucau

SEQ ID NO: 331438 - RNA, 32 nt, Homo Sapiens
uggaacauucuucugcauugggcucacugcgu

SEQ ID NO: 331439 - RNA, 32 nt, Homo Sapiens
cugugcacccagcccuccaugcuuggggacaa

SEQ ID NO: 331440 - RNA, 32 nt, Homo Sapiens
gccgugugcgugagaccagagcccaggacuga

SEQ ID NO: 331441 - RNA, 32 nt, Homo Sapiens
aagaugaacaaaugacauuguguuugaaagcc

SEQ ID NO: 331442 - RNA, 32 nt, Homo Sapiens
auaaagauaaugaaagaaaacauaagagaacu

SEQ ID NO: 331443 - RNA, 32 nt, Homo Sapiens
aagaccaauuauuaucuuagcauguuucagua

SEQ ID NO: 331444 - RNA, 32 nt, Homo Sapiens
ucuccuaauggacaccucuccucugcugccau

SEQ ID NO: 331445 - RNA, 32 nt, Homo Sapiens
ccuccuuuuuaaaugcccuugaaucuagcuuu

SEQ ID NO: 331446 - RNA, 32 nt, Homo Sapiens
cugggggaaggggucaugcagcaccaggggau

SEQ ID NO: 331447 - RNA, 32 nt, Homo Sapiens
aagagcucagccacacagcccgggccacuguc

SEQ ID NO: 331448 - RNA, 32 nt, Homo Sapiens
agcauguucuuugguuuaguuugggguugggg

SEQ ID NO: 331449 - RNA, 32 nt, Homo Sapiens
acguauuaguuguucuuaauuuuuuucccagu

SEQ ID NO: 331450 - RNA, 32 nt, Homo Sapiens
accugcggcgagaggaggccguccagcagaug

SEQ ID NO: 331451 - RNA, 32 nt, Homo Sapiens
ccaggccugcccggagccccagccccagggga

SEQ ID NO: 331452 - RNA, 32 nt, Homo Sapiens
gaaugccccugccccaggaacauggcagaagc

SEQ ID NO: 331453 - RNA, 32 nt, Homo Sapiens
acagcgaggagcucugcggcgagcgcgugauc

SEQ ID NO: 331454 - RNA, 32 nt, Homo Sapiens
agcaaggggcgcgggcuccgccggcaccaugg

SEQ ID NO: 331455 - RNA, 32 nt, Homo Sapiens
auuguauaguauuuauuugaucuuauuuacuu

SEQ ID NO: 331456 - RNA, 32 nt, Homo Sapiens
uggaaaccuugguuaaaaauguaggugccugg

SEQ ID NO: 331457 - RNA, 32 nt, Homo Sapiens
ccagaaucgguugcagaagaucaugggcaucu

SEQ ID NO: 331458 - RNA, 32 nt, Homo Sapiens
cuaaaaauacucaugaaaagagccuacccuuc

SEQ ID NO: 331459 - RNA, 32 nt, Homo Sapiens
caguuucucacgggaaccaugcugcuugggaa

SEQ ID NO: 331460 - RNA, 32 nt, Homo Sapiens
uaccugcuuguuuggggagauauguuugauua

SEQ ID NO: 331461 - RNA, 32 nt, Homo Sapiens
cccaccggcuccgcgcugcugccgccgccacc

SEQ ID NO: 331462 - RNA, 32 nt, Homo Sapiens
ugucuggcucaauggucuacauucugaaguug

SEQ ID NO: 331463 - RNA, 32 nt, Homo Sapiens
gagaauuuccuuguucauaaauguagagcagu

SEQ ID NO: 331464 - RNA, 32 nt, Homo Sapiens
auucaaaugaauuugcacuaauaaaguccuuu

SEQ ID NO: 331465 - RNA, 32 nt, Homo Sapiens
cguuaucagcggcgcguccgcgcgccagcccc

SEQ ID NO: 331466 - RNA, 31 nt, Homo Sapiens
uagauaaucucuguucuucuaacugaucuag

SEQ ID NO: 331467 - RNA, 32 nt, Homo Sapiens
agaguaggagucaaaaagccuuuucugugaag

SEQ ID NO: 331468 - RNA, 32 nt, Homo Sapiens
gaaauucacagcaucaauaucaccauugaggu

SEQ ID NO: 331469 - RNA, 32 nt, Homo Sapiens
uuauauguuuugcaugcauauauucacuaaau

SEQ ID NO: 331470 - RNA, 32 nt, Homo Sapiens
gagggaggagguccuuacuuuuuuguuuuccu

SEQ ID NO: 331471 - RNA, 32 nt, Homo Sapiens
uaaaaaugcuucugcccuggaaucucaaccau

SEQ ID NO: 331472 - RNA, 32 nt, Homo Sapiens
aagccaagaaugcccaagggcagccugccaag

SEQ ID NO: 331473 - RNA, 32 nt, Homo Sapiens
gcgucuucagcuguuucgcauccaccgccacc

SEQ ID NO: 331474 - RNA, 32 nt, Homo Sapiens
cagcgggaagggggcuggcaucgccacggacc

SEQ ID NO: 331475 - RNA, 32 nt, Homo Sapiens
ggggcuucggugccgcgugggcaguacgcagg

SEQ ID NO: 331476 - RNA, 32 nt, Homo Sapiens
gcaauuuaauaaucguuugcaaaaaccauugu

SEQ ID NO: 331477 - RNA, 32 nt, Homo Sapiens
ggauucacauaaaagcaacaauaacgaaucuc

SEQ ID NO: 331478 - RNA, 32 nt, Homo Sapiens
cauaaauuacacaauaaagcaguccuguucaa

SEQ ID NO: 331479 - RNA, 32 nt, Homo Sapiens
ccaguuccacuuuaacuuuguuuuugcauuug

SEQ ID NO: 331480 - RNA, 32 nt, Homo Sapiens
cucaucucgauauauuugauauuucucugucu

SEQ ID NO: 331481 - RNA, 32 nt, Homo Sapiens
gauaaacaaaaaugaagcuaaaaugaaucaac

SEQ ID NO: 331482 - RNA, 32 nt, Homo Sapiens
ucuaagaaacaaggcagcuguuagugugacau

SEQ ID NO: 331483 - RNA, 32 nt, Homo Sapiens
gcuuucaggcguuugggggaagcccugcgugg

SEQ ID NO: 331484 - RNA, 32 nt, Homo Sapiens
cgcauucuuuuacuguaaacaaacaaugccuu

SEQ ID NO: 331485 - RNA, 32 nt, Homo Sapiens
cccuuguccccucaggaguccuccccaccccg

SEQ ID NO: 331486 - RNA, 32 nt, Homo Sapiens
caagaauaaaaugucuagcagcaagaagagca

SEQ ID NO: 331487 - RNA, 32 nt, Homo Sapiens
uuguuaucuuauaguuuguuauuugcuccaau

SEQ ID NO: 331488 - RNA, 32 nt, Homo Sapiens
ugccagccaggcuugcagcugcuccauccucc

SEQ ID NO: 331489 - RNA, 32 nt, Homo Sapiens
ucuuggaaauuacugcucaccugguaucugua

SEQ ID NO: 331490 - RNA, 32 nt, Homo Sapiens
uacugguuuuaaauuucuuuuuacauuguuuc

SEQ ID NO: 331491 - RNA, 32 nt, Homo Sapiens
cccaccauucaugaccucuguauucucuaguu

SEQ ID NO: 331492 - RNA, 32 nt, Homo Sapiens
gaggaagagcaaucaaguuuguggccacagag

SEQ ID NO: 331493 - RNA, 32 nt, Homo Sapiens
accagggccaaugguagucagagccugugcag

SEQ ID NO: 331494 - RNA, 32 nt, Homo Sapiens
ucuuuuauucauagaaaugaaaaggaaaauaa

SEQ ID NO: 331495 - RNA, 32 nt, Homo Sapiens
gccaugcuagagugccaggugaccggccugcc

SEQ ID NO: 331496 - RNA, 32 nt, Homo Sapiens
agcaaaucaggcauacggagaggcugugagcu

SEQ ID NO: 331497 - RNA, 32 nt, Homo Sapiens
uugacacaaggugacccaauccgcaucaggca

SEQ ID NO: 331498 - RNA, 32 nt, Homo Sapiens
agaacgcgccgcccgcgccggccucccaauag

SEQ ID NO: 331499 - RNA, 32 nt, Homo Sapiens
cuaaauugaccaugcauauaauauucuuuguu

SEQ ID NO: 331500 - RNA, 32 nt, Homo Sapiens
cauuuuuucuuacauaauuuuuuauucaaguu

SEQ ID NO: 331501 - RNA, 32 nt, Homo Sapiens
gcaguggcacgaucuuggcuuacuacaaccuc

SEQ ID NO: 331502 - RNA, 32 nt, Homo Sapiens
auacagaagccuuggucuaaacaccgagacuu

SEQ ID NO: 331503 - RNA, 32 nt, Homo Sapiens
ucauguuggcuccuaaggaacugcuguuguaa

SEQ ID NO: 331504 - RNA, 32 nt, Homo Sapiens
ggagcacgaggggcacugcacccacggugacc

SEQ ID NO: 331505 - RNA, 32 nt, Homo Sapiens
aaaugaugcuauaaaugugagagugcugauau

SEQ ID NO: 331506 - RNA, 32 nt, Homo Sapiens
ucucggagcaucccggaggaaaucugcagagg

SEQ ID NO: 331507 - RNA, 32 nt, Homo Sapiens
uucauccccuuucucuccuuccauggauuaug

SEQ ID NO: 331508 - RNA, 32 nt, Homo Sapiens
gugcuggacaucuaaauaugcauguuaacugu

SEQ ID NO: 331509 - RNA, 31 nt, Homo Sapiens
aguuugggcagagggaaccaggcacguuaaa

SEQ ID NO: 331510 - RNA, 32 nt, Homo Sapiens
caggggaaggaaaagcagagcuuauuuuucac

SEQ ID NO: 331511 - RNA, 32 nt, Homo Sapiens
aggcuuagaguacccaaaggcuaagaaauucu

SEQ ID NO: 331512 - RNA, 32 nt, Homo Sapiens
ccuucacaacugaguucaaauuagguuccgcc

SEQ ID NO: 331513 - RNA, 32 nt, Homo Sapiens
ggcccuggguucagggacuggcacucuacuca

SEQ ID NO: 331514 - RNA, 32 nt, Homo Sapiens
guaaugcagauggacagauaaaaaagauuuua

SEQ ID NO: 331515 - RNA, 32 nt, Homo Sapiens
ggcagggugcgguggcucaugccuauaauccu

SEQ ID NO: 331516 - RNA, 32 nt, Homo Sapiens
aacauguguugccugaaagcacauguguguau

SEQ ID NO: 331517 - RNA, 32 nt, Homo Sapiens
cagaagcaucgcuccucuccagcccugcagcu

SEQ ID NO: 331518 - RNA, 32 nt, Homo Sapiens
agaacauuuuuccucuuaccaagaaguaaaau

SEQ ID NO: 331519 - RNA, 32 nt, Homo Sapiens
agccugcugguucagagguccacacaugaagu

SEQ ID NO: 331520 - RNA, 32 nt, Homo Sapiens
ccgauucugauuccggcaaggauccaagcaug

SEQ ID NO: 331521 - RNA, 32 nt, Homo Sapiens
accccucccuccccugguccucauaagauccu

SEQ ID NO: 331522 - RNA, 32 nt, Homo Sapiens
cgcgaguccccgggaggcgccgcgcgcuugga

SEQ ID NO: 331523 - RNA, 32 nt, Homo Sapiens
gggcgggcgggcaccagcucggucaggggcug

SEQ ID NO: 331524 - RNA, 32 nt, Homo Sapiens
auacugugauggugccucuuccauucacaagg

SEQ ID NO: 331525 - RNA, 32 nt, Homo Sapiens
ugacugggauucaugauguggaggcccccaac

SEQ ID NO: 331526 - RNA, 32 nt, Homo Sapiens
ccccaagaaacccugaugucuggcugaaagcc

SEQ ID NO: 331527 - RNA, 32 nt, Homo Sapiens
ugcccugacgccgcccucagggagcuggcucc

SEQ ID NO: 331528 - RNA, 32 nt, Homo Sapiens
augcuauuuuuggagccagaauuuucaugucu

SEQ ID NO: 331529 - RNA, 32 nt, Homo Sapiens
gaggaagccuugcaaaccugcagacugcuuuu

SEQ ID NO: 331530 - RNA, 32 nt, Homo Sapiens
cucuuauggaaauaauuuuuuaacaucuuaau

SEQ ID NO: 331531 - RNA, 32 nt, Homo Sapiens
ccugcugaagagaaugcucaccaccagcucuc

SEQ ID NO: 331532 - RNA, 32 nt, Homo Sapiens
ugcaaaauuuguaguuaaauuugaccucagug

SEQ ID NO: 331533 - RNA, 32 nt, Homo Sapiens
cccaggguucccucucauuucucucggcugcc

SEQ ID NO: 331534 - RNA, 32 nt, Homo Sapiens
ccuccuaucucaccuuccugaggcugaguuua

SEQ ID NO: 331535 - RNA, 32 nt, Homo Sapiens
acaguaugugaccauuugauaccuacuguuuu

SEQ ID NO: 331536 - RNA, 32 nt, Homo Sapiens
auaugauagggcauuaugaauuccuaugggua

SEQ ID NO: 331537 - RNA, 32 nt, Homo Sapiens
auucauuuucugcaccucccccauaggcuugu

SEQ ID NO: 331538 - RNA, 32 nt, Homo Sapiens
acucuauagucuucugugaagaauagagaucu

SEQ ID NO: 331539 - RNA, 32 nt, Homo Sapiens
aggacuugaagcccgguaaaccccguccuuac

SEQ ID NO: 331540 - RNA, 32 nt, Homo Sapiens
uauuuuuuucuuucaauuuucuuaaugggacc

SEQ ID NO: 331541 - RNA, 32 nt, Homo Sapiens
caaucuuaaaccacauaaccaagcauugugaa

SEQ ID NO: 331542 - RNA, 32 nt, Homo Sapiens
ugcuacucugcuguaugaaucuccaggcagga

SEQ ID NO: 331543 - RNA, 32 nt, Homo Sapiens
gaauauuaaagucuuguaauguuugcuaauau

SEQ ID NO: 331544 - RNA, 32 nt, Homo Sapiens
ugcuauucccugucugcugugaaacagaccac

SEQ ID NO: 331545 - RNA, 32 nt, Homo Sapiens
uuuaguuguuuaguuuguuucuuaagcagugc

SEQ ID NO: 331546 - RNA, 32 nt, Homo Sapiens
ccgcccccugagcagccccgcguacuguggau

SEQ ID NO: 331547 - RNA, 30 nt, Homo Sapiens
gggagcagcuagggcgcgggucucccuccu

SEQ ID NO: 331548 - RNA, 32 nt, Homo Sapiens
guuaaaacccaccuagaugugaggugaggaug

SEQ ID NO: 331549 - RNA, 32 nt, Homo Sapiens
gauggggucccugagccaggccccacccauca

SEQ ID NO: 331550 - RNA, 32 nt, Homo Sapiens
uucuauuuuuaaaacucaaaaucauuaguugg

SEQ ID NO: 331551 - RNA, 32 nt, Homo Sapiens
uuguuucccccgcuaacuucagccucucaucu

SEQ ID NO: 331552 - RNA, 32 nt, Homo Sapiens
uacacacgcaucagaguuaacuuugcagugag

SEQ ID NO: 331553 - RNA, 32 nt, Homo Sapiens
gccauucacagaagcucucaauuucagaugau

SEQ ID NO: 331554 - RNA, 32 nt, Homo Sapiens
uaaucacucuguucauuccuccagguauucgu

SEQ ID NO: 331555 - RNA, 32 nt, Homo Sapiens
aaguuaggaauaugaagaaccacaaaggauuu

SEQ ID NO: 331556 - RNA, 32 nt, Homo Sapiens
uagaaacacaucaaauaucuaucagcugauga

SEQ ID NO: 331557 - RNA, 32 nt, Homo Sapiens
gggcccugcggaagaggaggugcggcccaggg

SEQ ID NO: 331558 - RNA, 32 nt, Homo Sapiens
gggcagcagggccagacacugucucuauaaaa

SEQ ID NO: 331559 - RNA, 32 nt, Homo Sapiens
agaggcugccuccuccuucugauuacccccca

SEQ ID NO: 331560 - RNA, 32 nt, Homo Sapiens
ucagcaaccucugguccacuacacaacacagg

SEQ ID NO: 331561 - RNA, 32 nt, Homo Sapiens
ugggguuuguuuuuuuuuuuuauauuuugaga

SEQ ID NO: 331562 - RNA, 32 nt, Homo Sapiens
cuagggagccgcggccgcgggucacccggcgg

SEQ ID NO: 331563 - RNA, 32 nt, Homo Sapiens
aguuaaucaccuuuuaccuuuauuuucucaug

SEQ ID NO: 331564 - RNA, 32 nt, Homo Sapiens
ggagacaggaggaacuucuccuccuccuccuc

SEQ ID NO: 331565 - RNA, 32 nt, Homo Sapiens
gaacugugaaaacuuuuauuccuucaugauca

SEQ ID NO: 331566 - RNA, 32 nt, Homo Sapiens
ggagguggccccaggagucauauggccauacu

SEQ ID NO: 331567 - RNA, 32 nt, Homo Sapiens
gcuggcgauagcggcgggagcggagccggcgg

SEQ ID NO: 331568 - RNA, 32 nt, Homo Sapiens
cauaauccagcgaugcugcagcuguaaaagca

SEQ ID NO: 331569 - RNA, 31 nt, Homo Sapiens
cugcucagaauaaagcauguccugcugccgg

SEQ ID NO: 331570 - RNA, 32 nt, Homo Sapiens
ucccaaaggguggggggcgcuguuggcaggaa

SEQ ID NO: 331571 - RNA, 32 nt, Homo Sapiens
guuucuaauuacauuucuuuuauuccuguaau

SEQ ID NO: 331572 - RNA, 32 nt, Homo Sapiens
auucccauauucaccagcuccuccuuagcuac

SEQ ID NO: 331573 - RNA, 32 nt, Homo Sapiens
uggcuucccaggggaaauucaagggcaccugu

SEQ ID NO: 331574 - RNA, 32 nt, Homo Sapiens
ugacugaccccaucauacccaaagugcaaucu

SEQ ID NO: 331575 - RNA, 32 nt, Homo Sapiens
agccgagucaggcuuccaugucagacugcgug

SEQ ID NO: 331576 - RNA, 32 nt, Homo Sapiens
gcaaguuaguaggaccaccugauuccagcauu

SEQ ID NO: 331577 - RNA, 32 nt, Homo Sapiens
uuuccccaaaaauugacuuagauauuaaaauu

SEQ ID NO: 331578 - RNA, 32 nt, Homo Sapiens
gagcacguuggcuccgcccccuggcggcugcc

SEQ ID NO: 331579 - RNA, 32 nt, Homo Sapiens
ccacgcaaucgauggauuguguccuaggaaga

SEQ ID NO: 331580 - RNA, 32 nt, Homo Sapiens
gaaggaaauaaaauauaaauauaagauuaaca

SEQ ID NO: 331581 - RNA, 32 nt, Homo Sapiens
aauuagggaaaacaacugugauccugggagcu

SEQ ID NO: 331582 - RNA, 32 nt, Homo Sapiens
ggcuucuccuuguaugccccagcagcagggag

SEQ ID NO: 331583 - RNA, 32 nt, Homo Sapiens
uuccuuucugcagcugagaugcacgcagaccc

SEQ ID NO: 331584 - RNA, 32 nt, Homo Sapiens
ugugguucugggccuuccuguggagcugagcu

SEQ ID NO: 331585 - RNA, 32 nt, Homo Sapiens
uaggcgccggagccggccgcgccugggcugga

SEQ ID NO: 331586 - RNA, 32 nt, Homo Sapiens
agccagccagcccuuccuccuucccucaccac

SEQ ID NO: 331587 - RNA, 32 nt, Homo Sapiens
auuucguuauuuuuauuuuaccuuuuucauuu

SEQ ID NO: 331588 - RNA, 32 nt, Homo Sapiens
uugaaucuccuggugagauuauacaggagauu

SEQ ID NO: 331589 - RNA, 32 nt, Homo Sapiens
uggccuuugggguucaagaucacugggaccag

SEQ ID NO: 331590 - RNA, 32 nt, Homo Sapiens
ccaugcuccucucagggcaggcacauguacgg

SEQ ID NO: 331591 - RNA, 32 nt, Homo Sapiens
uaaacuugaaacaaaaauggacaaauauuuaa

SEQ ID NO: 331592 - RNA, 32 nt, Homo Sapiens
ggaaccccacugacaacuugaaucucaaccuc

SEQ ID NO: 331593 - RNA, 32 nt, Homo Sapiens
ccuccuaaagacacucuaggaaaaccauguca

SEQ ID NO: 331594 - RNA, 32 nt, Homo Sapiens
caauuugucuagcaugcugagucaugucuuuc

SEQ ID NO: 331595 - RNA, 31 nt, Homo Sapiens
ugugguucuagccuugggcagaauuauaucc

SEQ ID NO: 331596 - RNA, 32 nt, Homo Sapiens
uauguagcagcauuuacagaaaugccaaaaau

SEQ ID NO: 331597 - RNA, 32 nt, Homo Sapiens
cacgcuccugcccgcccgcugcaccgcaccuc

SEQ ID NO: 331598 - RNA, 32 nt, Homo Sapiens
cuuaagaauaacaaaaucacuguaccuuccuc

SEQ ID NO: 331599 - RNA, 32 nt, Homo Sapiens
aauucgccagcggcgcgguggacagucauggc

SEQ ID NO: 331600 - RNA, 32 nt, Homo Sapiens
caagccuggugccuuuccaaaggacuagcagg

SEQ ID NO: 331601 - RNA, 32 nt, Homo Sapiens
ccugcuacgugguggggggcugaggcaggaga

SEQ ID NO: 331602 - RNA, 32 nt, Homo Sapiens
acauuggcggguggggugcagggagggagagg

SEQ ID NO: 331603 - RNA, 32 nt, Homo Sapiens
ugguugggagcggggaggucgcggcggcugcg

SEQ ID NO: 331604 - RNA, 32 nt, Homo Sapiens
cgugggccucgcgaggcagacgccgucgggcg

SEQ ID NO: 331605 - RNA, 32 nt, Homo Sapiens
gagccagguuacucuggguccuggaccugacu

SEQ ID NO: 331606 - RNA, 32 nt, Homo Sapiens
ggacugacccgccuucgggaccccgcucccag

SEQ ID NO: 331607 - RNA, 32 nt, Homo Sapiens
caucccuucuucguucccaucauggcagugua

SEQ ID NO: 331608 - RNA, 32 nt, Homo Sapiens
ugcugcgcgaccgcggcuuggcggccaagcgc

SEQ ID NO: 331609 - RNA, 31 nt, Homo Sapiens
acuagucauuugacuggaaaaaaauaaaaua

SEQ ID NO: 331610 - RNA, 32 nt, Homo Sapiens
ucaaauucagggcauccaacauggugaagccc

SEQ ID NO: 331611 - RNA, 32 nt, Homo Sapiens
acuuauuucugcacuguuuuguugaacuuugu

SEQ ID NO: 331612 - RNA, 32 nt, Homo Sapiens
uauguagcugcuauaaaguuaagugucccuca

SEQ ID NO: 331613 - RNA, 32 nt, Homo Sapiens
accucccgcugcugcugcugcugcugggggcc

SEQ ID NO: 331614 - RNA, 32 nt, Homo Sapiens
caucuuucuuccggacaaugaaauaaagaguu

SEQ ID NO: 331615 - RNA, 32 nt, Homo Sapiens
cuucuaccaaaaugcuuuaaguucuauggaaa

SEQ ID NO: 331616 - RNA, 32 nt, Homo Sapiens
cccgccuccuccucuugcuccuccucggcgua

SEQ ID NO: 331617 - RNA, 32 nt, Homo Sapiens
aagaguacugcauuaauuuaauuuaauuuaaa

SEQ ID NO: 331618 - RNA, 32 nt, Homo Sapiens
gugugaguggcacgcuucccugugaacccguc

SEQ ID NO: 331619 - RNA, 32 nt, Homo Sapiens
ggccccccaagcccgagcaccggaccacguug

SEQ ID NO: 331620 - RNA, 32 nt, Homo Sapiens
cagcauuuugagugaaaccaauaaaaucuaag

SEQ ID NO: 331621 - RNA, 32 nt, Homo Sapiens
gagccuuugcgugaaacagcucugccaggccg

SEQ ID NO: 331622 - RNA, 32 nt, Homo Sapiens
aauaauuugacugucuugauaauugguuccuc

SEQ ID NO: 331623 - RNA, 32 nt, Homo Sapiens
ccucagcaggaccugggcuggccucuccaccu

SEQ ID NO: 331624 - RNA, 32 nt, Homo Sapiens
uacauagcauucacuauagugaauagaaaaac

SEQ ID NO: 331625 - RNA, 32 nt, Homo Sapiens
uaacauaauaauauguugcaugcaguuauauu

SEQ ID NO: 331626 - RNA, 32 nt, Homo Sapiens
acccaucugguuuuugaguuuggacaagcucc

SEQ ID NO: 331627 - RNA, 32 nt, Homo Sapiens
ccagcacugcccagugcaaggugcccaggaca

SEQ ID NO: 331628 - RNA, 32 nt, Homo Sapiens
uuuguuucagaggaugagaaauacuacuuacg

SEQ ID NO: 331629 - RNA, 32 nt, Homo Sapiens
accacaggccaucaaaauauaaguuuccaggc

SEQ ID NO: 331630 - RNA, 32 nt, Homo Sapiens
guacuuuuuaaagauucuuaagugauuccagu

SEQ ID NO: 331631 - RNA, 32 nt, Homo Sapiens
agugguaucugaacuagauuugaaagggugag

SEQ ID NO: 331632 - RNA, 32 nt, Homo Sapiens
cucacugccaccuagaggagccaugguggaaa

SEQ ID NO: 331633 - RNA, 32 nt, Homo Sapiens
uuucucuggcaucuauaaaaguaaauucuagu

SEQ ID NO: 331634 - RNA, 32 nt, Homo Sapiens
acuucagcccaccagcagcauguggacuuaua

SEQ ID NO: 331635 - RNA, 32 nt, Homo Sapiens
acuugugacuaacgaagcugguugcugcuggc

SEQ ID NO: 331636 - RNA, 32 nt, Homo Sapiens
cuaggcaucugcguagcagcgccggggagagc

SEQ ID NO: 331637 - RNA, 32 nt, Homo Sapiens
uucuguggauugcauggcgugugauuaaaagc

SEQ ID NO: 331638 - RNA, 32 nt, Homo Sapiens
ugaguguaaaauguuuucaccaugaagccauu

SEQ ID NO: 331639 - RNA, 32 nt, Homo Sapiens
gagcuccgggugccgccgcguccccagcgccc

SEQ ID NO: 331640 - RNA, 32 nt, Homo Sapiens
uucauuuuuggacaacuacuguaaucauuuuu

SEQ ID NO: 331641 - RNA, 32 nt, Homo Sapiens
uaaugauaaaaauaaugcauuuguauuguuca

SEQ ID NO: 331642 - RNA, 32 nt, Homo Sapiens
agaagaugaugaugaugaugaagaggaggaag

SEQ ID NO: 331643 - RNA, 32 nt, Homo Sapiens
gccuguccaccucccacccccaacccuccacc

SEQ ID NO: 331644 - RNA, 32 nt, Homo Sapiens
aaaaaaaaaaaauuaguauaagccuuuuguuu

SEQ ID NO: 331645 - RNA, 28 nt, Homo Sapiens
gagagauggcggccgccgcagguagauc

SEQ ID NO: 331646 - RNA, 32 nt, Homo Sapiens
cccaaagaaaagauuauucaauaaaguuuccu

SEQ ID NO: 331647 - RNA, 32 nt, Homo Sapiens
ccgccgccggugcgcaggccggcuggggacuc

SEQ ID NO: 331648 - RNA, 32 nt, Homo Sapiens
ccgccaugauucugaggccuccccagccaugu

SEQ ID NO: 331649 - RNA, 31 nt, Homo Sapiens
aguuugacaaagaaaagaaaaucaauguuaa

SEQ ID NO: 331650 - RNA, 32 nt, Homo Sapiens
aaaaccacagagagaaguugggugugguggcc

SEQ ID NO: 331651 - RNA, 32 nt, Homo Sapiens
ugagaaccugguaccaaaccucuucuuggagc

SEQ ID NO: 331652 - RNA, 32 nt, Homo Sapiens
aagaaacagcaugggaccgugugauugggucc

SEQ ID NO: 331653 - RNA, 32 nt, Homo Sapiens
gaucgggucauaagcaaucccaaacuaccaac

SEQ ID NO: 331654 - RNA, 32 nt, Homo Sapiens
gacuauaagcacauuguguacacaauaaaauu

SEQ ID NO: 331655 - RNA, 32 nt, Homo Sapiens
gcugcccuugaaaagaugauagcuuuaguugc

SEQ ID NO: 331656 - RNA, 32 nt, Homo Sapiens
aauugggagagaaagcuuuauauuuguaagaa

SEQ ID NO: 331657 - RNA, 32 nt, Homo Sapiens
uggggcuccuucuccaccccagcccccaaagc

SEQ ID NO: 331658 - RNA, 32 nt, Homo Sapiens
uguuuccacugaagcugaaccucugccuuuag

SEQ ID NO: 331659 - RNA, 32 nt, Homo Sapiens
auucacagcaaccuggcagaagagaaugugaa

SEQ ID NO: 331660 - RNA, 32 nt, Homo Sapiens
auguuguagaugaguugcccuccaccuggcug

SEQ ID NO: 331661 - RNA, 32 nt, Homo Sapiens
uggagaggcucagcugccugcuucucgccugc

SEQ ID NO: 331662 - RNA, 32 nt, Homo Sapiens
uugaguugggagaggagcagggcggccuugua

SEQ ID NO: 331663 - RNA, 32 nt, Homo Sapiens
acaucacguuuuccuuguucccgcauguucag

SEQ ID NO: 331664 - RNA, 32 nt, Homo Sapiens
cccagggagagccggcgcuaccauggaggagu

SEQ ID NO: 331665 - RNA, 32 nt, Homo Sapiens
agucuugcaccucguggugugaagucguuuaa

SEQ ID NO: 331666 - RNA, 32 nt, Homo Sapiens
ucccucuccgcgggagaccccuuguugcacug

SEQ ID NO: 331667 - RNA, 32 nt, Homo Sapiens
guacauuuuaucauuuauuagcgcugaagagc

SEQ ID NO: 331668 - RNA, 32 nt, Homo Sapiens
cugcaagagggaccagaugcuuccaucaucag

SEQ ID NO: 331669 - RNA, 32 nt, Homo Sapiens
uccaguuaccggcaggcugugcaggaggguua

SEQ ID NO: 331670 - RNA, 32 nt, Homo Sapiens
auauuuaaauaucaauaaaaucaaacucuuug

SEQ ID NO: 331671 - RNA, 32 nt, Homo Sapiens
gagguugcagugagccgagauggcgccacugc

SEQ ID NO: 331672 - RNA, 32 nt, Homo Sapiens
auggcaguucccuucauccccuuuuccugccu

SEQ ID NO: 331673 - RNA, 32 nt, Homo Sapiens
gcaucaucgaaagcagaaaaccacuuuugcau

SEQ ID NO: 331674 - RNA, 32 nt, Homo Sapiens
uguacauuuuaaaauccugugcguuuaucuuc

SEQ ID NO: 331675 - RNA, 32 nt, Homo Sapiens
ugauaagaccaucaaaggaggguggacacaga

SEQ ID NO: 331676 - RNA, 32 nt, Homo Sapiens
aacaacaaacaaaacgcaaaacccaguauaug

SEQ ID NO: 331677 - RNA, 32 nt, Homo Sapiens
cuucuucccucgcuccuccuggucauguccag

SEQ ID NO: 331678 - RNA, 32 nt, Homo Sapiens
guauuuucguuagagacagggauucaccaugu

SEQ ID NO: 331679 - RNA, 32 nt, Homo Sapiens
ucaaagggcauuuagaggaagaaggcugaaau

SEQ ID NO: 331680 - RNA, 32 nt, Homo Sapiens
ccagggcucgggugcucuggcuccugccuuga

SEQ ID NO: 331681 - RNA, 32 nt, Homo Sapiens
gaagaauuaaggaaacgacaaggagacgcucg

SEQ ID NO: 331682 - RNA, 32 nt, Homo Sapiens
uaggauuuuuaaauaauguaguaacacuccug

SEQ ID NO: 331683 - RNA, 32 nt, Homo Sapiens
ucuggaggcccccacaccucccaucaccacca

SEQ ID NO: 331684 - RNA, 32 nt, Homo Sapiens
ggcggagaccagaaggcggaauccacagcugg

SEQ ID NO: 331685 - RNA, 32 nt, Homo Sapiens
ccaccucugcuaggcagcccaggccuggucug

SEQ ID NO: 331686 - RNA, 32 nt, Homo Sapiens
cuuuugccucuuugcccuuccaccuucuguga

SEQ ID NO: 331687 - RNA, 32 nt, Homo Sapiens
cccagggacaaagggugcuccugcaccgggcc

SEQ ID NO: 331688 - RNA, 32 nt, Homo Sapiens
acgggcgccauugugcggcgcgcgccgggacu

SEQ ID NO: 331689 - RNA, 32 nt, Homo Sapiens
accuaccacucgugccgccgccggcgcugggc

SEQ ID NO: 331690 - RNA, 32 nt, Homo Sapiens
aaauguaaauaugauaguaauaaaauagagca

SEQ ID NO: 331691 - RNA, 32 nt, Homo Sapiens
gguuaggggcagaucagaagggcugcguguag

SEQ ID NO: 331692 - RNA, 32 nt, Homo Sapiens
cuuuguaugugcuuuagggaaggggugggugg

SEQ ID NO: 331693 - RNA, 32 nt, Homo Sapiens
gagcccugcugcccuccagccgggcuucucca

SEQ ID NO: 331694 - RNA, 32 nt, Homo Sapiens
ugucucuacuaaaaauacaaaaaaucagccug

SEQ ID NO: 331695 - RNA, 32 nt, Homo Sapiens
ugaccaaauuuaugugguuguuacacuuccau

SEQ ID NO: 331696 - RNA, 32 nt, Homo Sapiens
gcuuugcuucuuuuuauugacaugauagauac

SEQ ID NO: 331697 - RNA, 32 nt, Homo Sapiens
aaggcucucgggugggggagccaggagaccug

SEQ ID NO: 331698 - RNA, 32 nt, Homo Sapiens
gaaugaagaggaucuuauugauaccucccucu

SEQ ID NO: 331699 - RNA, 32 nt, Homo Sapiens
gaagacacugaaaaauaagugauuucaguaac

SEQ ID NO: 331700 - RNA, 32 nt, Homo Sapiens
guaccccuaaaagaagagcuggaguaaggacc

SEQ ID NO: 331701 - RNA, 32 nt, Homo Sapiens
ccugggagcaggccuuccucccucccaccccc

SEQ ID NO: 331702 - RNA, 32 nt, Homo Sapiens
cagcaauauccuuuccucugcuccugcccacu

SEQ ID NO: 331703 - RNA, 32 nt, Homo Sapiens
ugggugugcccuggggaccccugacccauccc

SEQ ID NO: 331704 - RNA, 32 nt, Homo Sapiens
aaccaagcuauuccuuucccuuccucuucggc

SEQ ID NO: 331705 - RNA, 31 nt, Homo Sapiens
uguaaucccagcuacucaggagucugaggca

SEQ ID NO: 331706 - RNA, 32 nt, Homo Sapiens
ugcccagaaugggaggcacggaagccccuccc

SEQ ID NO: 331707 - RNA, 32 nt, Homo Sapiens
ugcucuuuuccaucaugccucuaaucacagcu

SEQ ID NO: 331708 - RNA, 32 nt, Homo Sapiens
gacugauguagauguucugugcuguccuggac

SEQ ID NO: 331709 - RNA, 32 nt, Homo Sapiens
uaagugaggagcuuccauuggaaugcuuuucc

SEQ ID NO: 331710 - RNA, 32 nt, Homo Sapiens
gaucuguuuccucuccucgggccuccuucucc

SEQ ID NO: 331711 - RNA, 32 nt, Homo Sapiens
cucagugcugguuuuucuugacuacacugagc

SEQ ID NO: 331712 - RNA, 30 nt, Homo Sapiens
ucgccgggcacuccacggggucccgcccuu

SEQ ID NO: 331713 - RNA, 32 nt, Homo Sapiens
auucuuugcaggccuccaagugccaggugcug

SEQ ID NO: 331714 - RNA, 32 nt, Homo Sapiens
gauauuuucuucaagucuuugcgcauuuuuag

SEQ ID NO: 331715 - RNA, 32 nt, Homo Sapiens
acauaacuuuuaaaagcuuucauaaauaccag

SEQ ID NO: 331716 - RNA, 32 nt, Homo Sapiens
cauucuaucuauuccugguagaauagauaucc

SEQ ID NO: 331717 - RNA, 29 nt, Homo Sapiens
cuggcacugugauuccugccccaugagug

SEQ ID NO: 331718 - RNA, 32 nt, Homo Sapiens
agcugcugcgcggaagucggccauggacugga

SEQ ID NO: 331719 - RNA, 32 nt, Homo Sapiens
gugacuccucccugcuggggccccacagguga

SEQ ID NO: 331720 - RNA, 32 nt, Homo Sapiens
uguuugcauagcaaaauauuucugcuucaagc

SEQ ID NO: 331721 - RNA, 32 nt, Homo Sapiens
ccaugcauuguuaaucauccaucacuucccau

SEQ ID NO: 331722 - RNA, 32 nt, Homo Sapiens
gccuggaaaacgcagacaggagaggaaucggc

SEQ ID NO: 331723 - RNA, 32 nt, Homo Sapiens
ccaacacucccucuucccagauucucugcuuu

SEQ ID NO: 331724 - RNA, 32 nt, Homo Sapiens
ccuucucuggaaugccacaucuccucccacca

SEQ ID NO: 331725 - RNA, 32 nt, Homo Sapiens
acuacagugggauucauuuacuuuuuaaaaua

SEQ ID NO: 331726 - RNA, 32 nt, Homo Sapiens
uuagggaccugccacuuuugacuguggaucag

SEQ ID NO: 331727 - RNA, 32 nt, Homo Sapiens
auuuuuggauaaaagaugauguuuuaaguucc

SEQ ID NO: 331728 - RNA, 32 nt, Homo Sapiens
augcaaaugaaugcgacuauguugacaaugug

SEQ ID NO: 331729 - RNA, 32 nt, Homo Sapiens
agugaagcucuggagauggaucuuugggagga

SEQ ID NO: 331730 - RNA, 32 nt, Homo Sapiens
aaaucugaagauuguuuaucuagauguaaauu

SEQ ID NO: 331731 - RNA, 32 nt, Homo Sapiens
aauagaucaccuuuuacagaugcugaaauguu

SEQ ID NO: 331732 - RNA, 32 nt, Homo Sapiens
ucuccccgcccggucgccgcccgccagcccuu

SEQ ID NO: 331733 - RNA, 32 nt, Homo Sapiens
uucagcccacuuuuaucgccuuaaccuaguua

SEQ ID NO: 331734 - RNA, 30 nt, Homo Sapiens
caggcuaccaggcgcgggggauuccugcag

SEQ ID NO: 331735 - RNA, 32 nt, Homo Sapiens
gcucgcccgccagcccgcccgugguccguggc

SEQ ID NO: 331736 - RNA, 32 nt, Homo Sapiens
gccccaaggcccagcucugcccuucaucccuu

SEQ ID NO: 331737 - RNA, 32 nt, Homo Sapiens
uaaauguucaugucacauccuaauagaaagaa

SEQ ID NO: 331738 - RNA, 32 nt, Homo Sapiens
uaguuaguugguuaaugccagucuuccucccc

SEQ ID NO: 331739 - RNA, 32 nt, Homo Sapiens
uuuuuaaaauauauuuuaauuacauuuaaaaa

SEQ ID NO: 331740 - RNA, 32 nt, Homo Sapiens
cuugaggcugcagucgcagaaauaauuaauga

SEQ ID NO: 331741 - RNA, 32 nt, Homo Sapiens
gucuggguuugugaugaugaugagcauggugg

SEQ ID NO: 331742 - RNA, 32 nt, Homo Sapiens
uccuggcccacgcuacuaugcuuucaggcuac

SEQ ID NO: 331743 - RNA, 32 nt, Homo Sapiens
ucgaggccggguuggcgccggagccggggccg

SEQ ID NO: 331744 - RNA, 32 nt, Homo Sapiens
gccgcggugaugggcccggcgcagauccucug

SEQ ID NO: 331745 - RNA, 32 nt, Homo Sapiens
cggaggggaaggaggaggagcuuaaaagaggc

SEQ ID NO: 331746 - RNA, 32 nt, Homo Sapiens
gcccacuccacucccggcacgcccggugccgc

SEQ ID NO: 331747 - RNA, 32 nt, Homo Sapiens
auucugcuggaacauggcaccaguccaaacau

SEQ ID NO: 331748 - RNA, 32 nt, Homo Sapiens
cuuccuuccaucuuccucucuuagaucagcug

SEQ ID NO: 331749 - RNA, 32 nt, Homo Sapiens
aagcagcuccuguccggcccagcccugccuca

SEQ ID NO: 331750 - RNA, 32 nt, Homo Sapiens
uccggcagcagcccggcccccggacgcaggac

SEQ ID NO: 331751 - RNA, 32 nt, Homo Sapiens
uaguuacccaccccaaacuugauccuacagcc

SEQ ID NO: 331752 - RNA, 30 nt, Homo Sapiens
ccguggacuucugugccgccccguccacac

SEQ ID NO: 331753 - RNA, 32 nt, Homo Sapiens
ccauuugugggagggagggcucauccacauca

SEQ ID NO: 331754 - RNA, 32 nt, Homo Sapiens
uccaucucgcaaaaaaaacaaacaaaaaccug

SEQ ID NO: 331755 - RNA, 32 nt, Homo Sapiens
ggccuugccaaggggaccugucgcaccccacc

SEQ ID NO: 331756 - RNA, 32 nt, Homo Sapiens
cuuuuuuuuuuuuuuucuuuuugaaacagucu

SEQ ID NO: 331757 - RNA, 32 nt, Homo Sapiens
augaaucgacacucacugacaacaucaaaaag

SEQ ID NO: 331758 - RNA, 32 nt, Homo Sapiens
agacaggggacuugccugaauggcauccgcca

SEQ ID NO: 331759 - RNA, 32 nt, Homo Sapiens
gcuuuccuguuucuaucuuucauuaaaaagaa

SEQ ID NO: 331760 - RNA, 32 nt, Homo Sapiens
agccggggauugccggcgccaggugcuggggg

SEQ ID NO: 331761 - RNA, 32 nt, Homo Sapiens
cugccuucccuauccccuguaccugacaaucu

SEQ ID NO: 331762 - RNA, 32 nt, Homo Sapiens
gaaagauauaauuucuugaaaaucuuaucaga

SEQ ID NO: 331763 - RNA, 32 nt, Homo Sapiens
ggaugugggaaacagaagaaaaguugaggaaa

SEQ ID NO: 331764 - RNA, 32 nt, Homo Sapiens
cuucuaguccuugagacuuuguagcucuaacu

SEQ ID NO: 331765 - RNA, 32 nt, Homo Sapiens
gucauuccugacauccuccccagcucaagucu

SEQ ID NO: 331766 - RNA, 32 nt, Homo Sapiens
gcccuucccacccauggcacccgcacucuugc

SEQ ID NO: 331767 - RNA, 32 nt, Homo Sapiens
gaagaaggggguaaaaguuugcuuuggugagu

SEQ ID NO: 331768 - RNA, 30 nt, Homo Sapiens
gaugaagagaagcugagaagaagcugagga

SEQ ID NO: 331769 - RNA, 32 nt, Homo Sapiens
ucaggugauucuuccaccccagccucccaagu

SEQ ID NO: 331770 - RNA, 32 nt, Homo Sapiens
ccugugcauaugaaguuguucuucccccaacu

SEQ ID NO: 331771 - RNA, 32 nt, Homo Sapiens
gucucagugcugaggaaccucaucagagaagc

SEQ ID NO: 331772 - RNA, 32 nt, Homo Sapiens
cuuccccaaaauuuagagccaagaaaaaucca

SEQ ID NO: 331773 - RNA, 32 nt, Homo Sapiens
acgugauccuucccuggcucucaccugcuccu

SEQ ID NO: 331774 - RNA, 32 nt, Homo Sapiens
cugggaagagagaauaguguuuucuucauuug

SEQ ID NO: 331775 - RNA, 32 nt, Homo Sapiens
caggucgggcggugggggcgagcggaggggcu

SEQ ID NO: 331776 - RNA, 32 nt, Homo Sapiens
acagcccagcauuggguuucccucccaaggcc

SEQ ID NO: 331777 - RNA, 32 nt, Homo Sapiens
guggguggagaggugcagcucaugcucugacc

SEQ ID NO: 331778 - RNA, 32 nt, Homo Sapiens
cggaugcugccuuguuagcagcuuacauccuu

SEQ ID NO: 331779 - RNA, 32 nt, Homo Sapiens
guaucugccguggcuucucuuuggcucccaaa

SEQ ID NO: 331780 - RNA, 32 nt, Homo Sapiens
caugggagcuccuggugccgccucggccccag

SEQ ID NO: 331781 - RNA, 32 nt, Homo Sapiens
cauaugaaugaaaaaauaaacgagugaauguu

SEQ ID NO: 331782 - RNA, 32 nt, Homo Sapiens
aggagcacaggcagggguguugguguuggggc

SEQ ID NO: 331783 - RNA, 32 nt, Homo Sapiens
gccccuugcuccaugaggaguugcaggguguu

SEQ ID NO: 331784 - RNA, 32 nt, Homo Sapiens
agauucccaagcacaaggaaggaugggcauuu

SEQ ID NO: 331785 - RNA, 30 nt, Homo Sapiens
gguccucaccacugcaaaggaagaguggaa

SEQ ID NO: 331786 - RNA, 32 nt, Homo Sapiens
ggcaggggggcugagccaggaugugcaauaga

SEQ ID NO: 331787 - RNA, 32 nt, Homo Sapiens
caugguagacagagcugaugugaaaaguggcc

SEQ ID NO: 331788 - RNA, 32 nt, Homo Sapiens
guggaacucccgugcgaggcccggggcguucc

SEQ ID NO: 331789 - RNA, 32 nt, Homo Sapiens
uugugaaaaucgucauguauuuagacuuggug

SEQ ID NO: 331790 - RNA, 32 nt, Homo Sapiens
gagggcugucgagugagcugccccagcccccu

SEQ ID NO: 331791 - RNA, 32 nt, Homo Sapiens
gcaggggcgcggugugccuggcagccaaauug

SEQ ID NO: 331792 - RNA, 32 nt, Homo Sapiens
aggaaccaggcuccaggcgccggcgccggggc

SEQ ID NO: 331793 - RNA, 32 nt, Homo Sapiens
ggagcuggcagagagggugugugagcgacaug

SEQ ID NO: 331794 - RNA, 32 nt, Homo Sapiens
uuacauuuugaaaggauguauguuagauauau

SEQ ID NO: 331795 - RNA, 32 nt, Homo Sapiens
aauuauccagucgugguggugcaugccuguag

SEQ ID NO: 331796 - RNA, 32 nt, Homo Sapiens
cuuuuucuaaucuuuuccuuaaaauuaauaga

SEQ ID NO: 331797 - RNA, 32 nt, Homo Sapiens
cugcggggaauauauacaagacuuuauuuagu

SEQ ID NO: 331798 - RNA, 32 nt, Homo Sapiens
aggaauggcugguccagaggcuuuuguccacu

SEQ ID NO: 331799 - RNA, 31 nt, Homo Sapiens
caggcggcccccucccugccccucagcucag

SEQ ID NO: 331800 - RNA, 32 nt, Homo Sapiens
cuaagagggcaggagggaaacccuacagcucc

SEQ ID NO: 331801 - RNA, 32 nt, Homo Sapiens
augaggauuaaaggaaaugaaaaaaugcuuau

SEQ ID NO: 331802 - RNA, 32 nt, Homo Sapiens
ggugccaguccucccuuuucuaaguguaaugc

SEQ ID NO: 331803 - RNA, 32 nt, Homo Sapiens
uggcuuccuauccuccuucuugcuggagccau

SEQ ID NO: 331804 - RNA, 32 nt, Homo Sapiens
ggacaaagggacggaggcauuuuaccggagag

SEQ ID NO: 331805 - RNA, 32 nt, Homo Sapiens
cuuccuaauccuguuuucacacaggaaguuuc

SEQ ID NO: 331806 - RNA, 32 nt, Homo Sapiens
cucccuggcuucuggaggaaagagaaggaggg

SEQ ID NO: 331807 - RNA, 32 nt, Homo Sapiens
gccucagaaugaauuguacucugagucucacc

SEQ ID NO: 331808 - RNA, 32 nt, Homo Sapiens
cuuguccacucuggggagcugugcuuuggcuu

SEQ ID NO: 331809 - RNA, 32 nt, Homo Sapiens
uuugggugaaaaauaaggaacuuagucuuuga

SEQ ID NO: 331810 - RNA, 32 nt, Homo Sapiens
uguacaugucugucugucugguuuuuuaucuu

SEQ ID NO: 331811 - RNA, 32 nt, Homo Sapiens
auaauguaauuucccuaaaugaaguugucucu

SEQ ID NO: 331812 - RNA, 32 nt, Homo Sapiens
ccagaucugcaccgccggccagcugggaucug

SEQ ID NO: 331813 - RNA, 29 nt, Homo Sapiens
guucacauauguaaaugccuuggaaaaua

SEQ ID NO: 331814 - RNA, 32 nt, Homo Sapiens
ccauggagccccagcccccuuugggcccaggg

SEQ ID NO: 331815 - RNA, 32 nt, Homo Sapiens
auuuaaaaucagaaaaucaugucagugaguga

SEQ ID NO: 331816 - RNA, 31 nt, Homo Sapiens
caucuuuggcacugcccccuggcuguguucu

SEQ ID NO: 331817 - RNA, 32 nt, Homo Sapiens
gaauggagaaagucgucgaugccugcacuggu

SEQ ID NO: 331818 - RNA, 32 nt, Homo Sapiens
ccucuccugcaccucccuggcccugccggcca

SEQ ID NO: 331819 - RNA, 32 nt, Homo Sapiens
cugccuugguguucugguuucagacucccgac

SEQ ID NO: 331820 - RNA, 32 nt, Homo Sapiens
cuggucuguccuaggagcuguauaaagaagcc

SEQ ID NO: 331821 - RNA, 32 nt, Homo Sapiens
ccaagaacuuuacuuuuauuaagguacugcuc

SEQ ID NO: 331822 - RNA, 32 nt, Homo Sapiens
cucuaauugcaucaggacuuuaccagauaaug

SEQ ID NO: 331823 - RNA, 32 nt, Homo Sapiens
gaguagcuggaacuacagguggugccaccaua

SEQ ID NO: 331824 - RNA, 30 nt, Homo Sapiens
auugucuguggcaaugcagaagcugauagc

SEQ ID NO: 331825 - RNA, 32 nt, Homo Sapiens
uugagaugcauggcaagaccagcaacuugacc

SEQ ID NO: 331826 - RNA, 32 nt, Homo Sapiens
uuucuuuucaauguucuuauaagcaaaguuca

SEQ ID NO: 331827 - RNA, 32 nt, Homo Sapiens
gcuuucugcucgcgccagcagagcacuaccug

SEQ ID NO: 331828 - RNA, 32 nt, Homo Sapiens
cuggaauacacgcuuccauuccugcccuugga

SEQ ID NO: 331829 - RNA, 32 nt, Homo Sapiens
gagaccccgcgggaaccuugagcuuggaacaa

SEQ ID NO: 331830 - RNA, 32 nt, Homo Sapiens
ccguguggauggacgaugugggguguggagga

SEQ ID NO: 331831 - RNA, 32 nt, Homo Sapiens
cuugcuguggcaccaugcauaagauuucuuca

SEQ ID NO: 331832 - RNA, 32 nt, Homo Sapiens
auaaaagguaguguuuaugucugagcuuauug

SEQ ID NO: 331833 - RNA, 32 nt, Homo Sapiens
uuaucaacugcggacauaauucuuuuauuaua

SEQ ID NO: 331834 - RNA, 31 nt, Homo Sapiens
cgcgccaugggcagcgcccacccucgccccu

SEQ ID NO: 331835 - RNA, 32 nt, Homo Sapiens
caaaagaaagcagcuuguuuugaaagaagaaa

SEQ ID NO: 331836 - RNA, 32 nt, Homo Sapiens
acuaaggcucugccacaagcgcaucccaguga

SEQ ID NO: 331837 - RNA, 32 nt, Homo Sapiens
gaauacuugagcccgggaggucaagguugcag

SEQ ID NO: 331838 - RNA, 31 nt, Homo Sapiens
cagugucaccugugccaaccauggggugucc

SEQ ID NO: 331839 - RNA, 32 nt, Homo Sapiens
uuccauuccauaucagguacaggauuugaugu

SEQ ID NO: 331840 - RNA, 32 nt, Homo Sapiens
cgcucucgcuucagucagucgggccgcgccgc

SEQ ID NO: 331841 - RNA, 32 nt, Homo Sapiens
cuggcucccuccccaucagcucccagcuguca

SEQ ID NO: 331842 - RNA, 32 nt, Homo Sapiens
auuaucuagcuaagcggaacaugugcuuuauc

SEQ ID NO: 331843 - RNA, 32 nt, Homo Sapiens
ggaguugaaaagacaugucagagacuucaauc

SEQ ID NO: 331844 - RNA, 32 nt, Homo Sapiens
ugcugaauguuuaacaaccaucuuucaugaaa

SEQ ID NO: 331845 - RNA, 32 nt, Homo Sapiens
cacaugggguacuguugaauggagcacacuga

SEQ ID NO: 331846 - RNA, 32 nt, Homo Sapiens
guucuuccuuuccuaacccgggccccugccca

SEQ ID NO: 331847 - RNA, 32 nt, Homo Sapiens
cuaugaauaagaagcgcacuugaaagaacagc

SEQ ID NO: 331848 - RNA, 32 nt, Homo Sapiens
guuguugcuucuuaauucaguucuguaugugu

SEQ ID NO: 331849 - RNA, 32 nt, Homo Sapiens
uuuuuggacacuucuguaaaugugauuggauu

SEQ ID NO: 331850 - RNA, 32 nt, Homo Sapiens
guuuuuauuaaaccccuuucccuccccgauaa

SEQ ID NO: 331851 - RNA, 32 nt, Homo Sapiens
cccucgggacuguccucgggcggcaaggagga

SEQ ID NO: 331852 - RNA, 32 nt, Homo Sapiens
acggcagaugaaacagaaaggcuaaagagggc

SEQ ID NO: 331853 - RNA, 32 nt, Homo Sapiens
ugauagaaaaggaaaaggggcccaagcuaagc

SEQ ID NO: 331854 - RNA, 32 nt, Homo Sapiens
uauagccacaguguuguacagcaaaucucucu

SEQ ID NO: 331855 - RNA, 32 nt, Homo Sapiens
uauagaaaauuuagacaauauaaaaaaguaca

SEQ ID NO: 331856 - RNA, 32 nt, Homo Sapiens
accaugcccagugggguauucucuuucaauaa

SEQ ID NO: 331857 - RNA, 32 nt, Homo Sapiens
ugcgggcccugcagccaccuggaccggcauuc

SEQ ID NO: 331858 - RNA, 32 nt, Homo Sapiens
cgugccuuguuaccaaauauuuggaagcagua

SEQ ID NO: 331859 - RNA, 31 nt, Homo Sapiens
uugaugucaagguccccaaagaccagguuaa

SEQ ID NO: 331860 - RNA, 31 nt, Homo Sapiens
cgggaagagcgcagccagccgggugcgaugg

SEQ ID NO: 331861 - RNA, 32 nt, Homo Sapiens
uuacaaaauaguuuuuaaauauugucugagaa

SEQ ID NO: 331862 - RNA, 32 nt, Homo Sapiens
gaaaagagcugcaaaugcauuuuuguaucuuu

SEQ ID NO: 331863 - RNA, 32 nt, Homo Sapiens
cccccaauaaaauuauuuaauugaaaaaaaaa

SEQ ID NO: 331864 - RNA, 32 nt, Homo Sapiens
uuuugggugagacagagggaaagggaaaaaac

SEQ ID NO: 331865 - RNA, 32 nt, Homo Sapiens
agcccaggcagacgggagcagguucuuggcca

SEQ ID NO: 331866 - RNA, 32 nt, Homo Sapiens
gguucugggucccagggagccuuggaaccugg

SEQ ID NO: 331867 - RNA, 32 nt, Homo Sapiens
uguaauggcggcagccggcagcucccugcucu

SEQ ID NO: 331868 - RNA, 32 nt, Homo Sapiens
ccccagcccucccccgccaacccaccagcagu

SEQ ID NO: 331869 - RNA, 32 nt, Homo Sapiens
agcgcucagugccgccgcugccgcccgugccc

SEQ ID NO: 331870 - RNA, 32 nt, Homo Sapiens
cuccaucagaucugggaugauggcucagaaca

SEQ ID NO: 331871 - RNA, 32 nt, Homo Sapiens
agaaugucuucagaucaaagaaaauuuaucuc

SEQ ID NO: 331872 - RNA, 32 nt, Homo Sapiens
auaaacacugguuuccuagcuauccucugaaa

SEQ ID NO: 331873 - RNA, 32 nt, Homo Sapiens
accugcucucccucagugaguccucaaccacc

SEQ ID NO: 331874 - RNA, 28 nt, Homo Sapiens
gguccgguggauaccaggaggcagcagu

SEQ ID NO: 331875 - RNA, 32 nt, Homo Sapiens
ugggggagggagagggagcuuuguguaaagug

SEQ ID NO: 331876 - RNA, 32 nt, Homo Sapiens
ugugguugaugaugaggauggcaugacugcag

SEQ ID NO: 331877 - RNA, 32 nt, Homo Sapiens
ggccaacuccuucuccucuuccugacccuccc

SEQ ID NO: 331878 - RNA, 32 nt, Homo Sapiens
caaaacgagauaagcaaguguuagaauugccu

SEQ ID NO: 331879 - RNA, 32 nt, Homo Sapiens
ucugaacgccacgccuggcccggucagugcug

SEQ ID NO: 331880 - RNA, 32 nt, Homo Sapiens
uauggcuugugauucauuuucuuaauccaaau

SEQ ID NO: 331881 - RNA, 32 nt, Homo Sapiens
uggccacagacuuuuccagggugguccuuggc

SEQ ID NO: 331882 - RNA, 32 nt, Homo Sapiens
ucuaucuauauauaaacuguguauacauucuu

SEQ ID NO: 331883 - RNA, 32 nt, Homo Sapiens
cuacuguguccauggacgucagggccauuuau

SEQ ID NO: 331884 - RNA, 32 nt, Homo Sapiens
gcggcuccgguggagccgugcccgccccgccu

SEQ ID NO: 331885 - RNA, 32 nt, Homo Sapiens
accugguaaagugcaacgugccaugugcaugc

SEQ ID NO: 331886 - RNA, 32 nt, Homo Sapiens
ugguuaaaaugguuauauguuaugugcauucu

SEQ ID NO: 331887 - RNA, 32 nt, Homo Sapiens
ggccuuaaauuaaauuauucaaguauuuuuaa

SEQ ID NO: 331888 - RNA, 32 nt, Homo Sapiens
cgcccgcaagguggacugagccucacuuccac

SEQ ID NO: 331889 - RNA, 32 nt, Homo Sapiens
ccuaaaguauaacaugucgauguucgaugcug

SEQ ID NO: 331890 - RNA, 29 nt, Homo Sapiens
acuuuccaugcugagugaaaacuaaccaa

SEQ ID NO: 331891 - RNA, 32 nt, Homo Sapiens
gugaaagaaaauaauggagaaucacuuuucua

SEQ ID NO: 331892 - RNA, 32 nt, Homo Sapiens
acacggaccauucucugaccgcccccgccaaa

SEQ ID NO: 331893 - RNA, 32 nt, Homo Sapiens
aacucacaacuuccuuguuuuguuaucuggaa

SEQ ID NO: 331894 - RNA, 32 nt, Homo Sapiens
cucauuccacuccuacaaauucccuaugggau

SEQ ID NO: 331895 - RNA, 32 nt, Homo Sapiens
uccuccgacccgcuccgcuccgcuccgcucgg

SEQ ID NO: 331896 - RNA, 32 nt, Homo Sapiens
agaaaagagggagagaugaguggguuagcuac

SEQ ID NO: 331897 - RNA, 32 nt, Homo Sapiens
cuaacacacacccccugccccaucccaucccc

SEQ ID NO: 331898 - RNA, 32 nt, Homo Sapiens
ggccgggcgugguggcucacgcugaggucagg

SEQ ID NO: 331899 - RNA, 32 nt, Homo Sapiens
ugcagcugaggaaaaugaaauguucauuuuau

SEQ ID NO: 331900 - RNA, 32 nt, Homo Sapiens
cugcuuaagaugaaaagcauugguuuuuuaaa

SEQ ID NO: 331901 - RNA, 30 nt, Homo Sapiens
uacuuucuucuugccaccuuuuuguggcaa

SEQ ID NO: 331902 - RNA, 32 nt, Homo Sapiens
gaucaaguccuuugugaauauuuucaacuaug

SEQ ID NO: 331903 - RNA, 32 nt, Homo Sapiens
ccugaguaggaauauuacauaauuuugauugc

SEQ ID NO: 331904 - RNA, 32 nt, Homo Sapiens
cgcccgccugcucacccgccccggcccgggaa

SEQ ID NO: 331905 - RNA, 32 nt, Homo Sapiens
augucccuggagggcucuggccugccucaaaa

SEQ ID NO: 331906 - RNA, 32 nt, Homo Sapiens
gauaaacuuuucccacaaauuuucaacaauca

SEQ ID NO: 331907 - RNA, 32 nt, Homo Sapiens
gguucgggccgcguaggggcgcuuuguuuugu

SEQ ID NO: 331908 - RNA, 32 nt, Homo Sapiens
uuauuuaaguuuaacuuuuuuaugugaauuca

SEQ ID NO: 331909 - RNA, 32 nt, Homo Sapiens
acaaaacgcaaggagaggagggcgcgcggccu

SEQ ID NO: 331910 - RNA, 32 nt, Homo Sapiens
ccggccggcccggccccagccccauggaccuc

SEQ ID NO: 331911 - RNA, 32 nt, Homo Sapiens
aaauugauucagaauggucugauacuauucca

SEQ ID NO: 331912 - RNA, 32 nt, Homo Sapiens
ugacaagauaaaacugggcacagcucuuaaau

SEQ ID NO: 331913 - RNA, 32 nt, Homo Sapiens
cugguuggagugcguguuuucuuuuuugauag

SEQ ID NO: 331914 - RNA, 31 nt, Homo Sapiens
ugcagagugggcucccugccccucucugccu

SEQ ID NO: 331915 - RNA, 32 nt, Homo Sapiens
ggcggcggaucgagauauucaaggcugaagca

SEQ ID NO: 331916 - RNA, 32 nt, Homo Sapiens
ucuccucccccuccuccuaccugacagacgcu

SEQ ID NO: 331917 - RNA, 32 nt, Homo Sapiens
auuuauucagaauugaagauggugaccuauuc

SEQ ID NO: 331918 - RNA, 32 nt, Homo Sapiens
caccucugcucccuccucccuccccugagagu

SEQ ID NO: 331919 - RNA, 32 nt, Homo Sapiens
cccuaccgcccccaauuccgcccugcccccgc

SEQ ID NO: 331920 - RNA, 32 nt, Homo Sapiens
cguguuaguuucugcccaguucuacccccuca

SEQ ID NO: 331921 - RNA, 32 nt, Homo Sapiens
cgcccccuuucuguggcuggauggggagacag

SEQ ID NO: 331922 - RNA, 32 nt, Homo Sapiens
ccaugggcgggaagaacaagcagcgaacuaaa

SEQ ID NO: 331923 - RNA, 32 nt, Homo Sapiens
guugcaacuguaaauugaauuauuuggcauuu

SEQ ID NO: 331924 - RNA, 32 nt, Homo Sapiens
cugcccaaagauugauuuguguguuugugugu

SEQ ID NO: 331925 - RNA, 32 nt, Homo Sapiens
cccuccgccgccccuuccccagcccugccccc

SEQ ID NO: 331926 - RNA, 32 nt, Homo Sapiens
ccagacauggagaggauauggagcccaaugug

SEQ ID NO: 331927 - RNA, 32 nt, Homo Sapiens
caguuccucacagucggcggaagugcugggcg

SEQ ID NO: 331928 - RNA, 32 nt, Homo Sapiens
caggcggcucugcaggaccagccagcagccuc

SEQ ID NO: 331929 - RNA, 32 nt, Homo Sapiens
ggaggaccgggauccaugugucuuuccuggug

SEQ ID NO: 331930 - RNA, 32 nt, Homo Sapiens
agauggagucucacuauguugcucaggcuggc

SEQ ID NO: 331931 - RNA, 32 nt, Homo Sapiens
aaugccuccugccugccucuuucaagauggag

SEQ ID NO: 331932 - RNA, 32 nt, Homo Sapiens
cagaaagcuaaugauuguuaacuuuuugaaau

SEQ ID NO: 331933 - RNA, 32 nt, Homo Sapiens
cauguggagcauauaaugauaugugcaagauu

SEQ ID NO: 331934 - RNA, 32 nt, Homo Sapiens
ucuguccuccguuuagucuccuccucggcggg

SEQ ID NO: 331935 - RNA, 32 nt, Homo Sapiens
gaaaggcagccccagaggaucccgcccuccag

SEQ ID NO: 331936 - RNA, 32 nt, Homo Sapiens
guccagucacugguucucuccucauguccucu

SEQ ID NO: 331937 - RNA, 31 nt, Homo Sapiens
gcucaguggcacugcugagcugcagcagucc

SEQ ID NO: 331938 - RNA, 32 nt, Homo Sapiens
ggauccugccagcccugccagcuuucccagag

SEQ ID NO: 331939 - RNA, 32 nt, Homo Sapiens
acugugcagcauuuuuaguuaugugguguuug

SEQ ID NO: 331940 - RNA, 32 nt, Homo Sapiens
guauuguuuuguucaugucuaugugggacaca

SEQ ID NO: 331941 - RNA, 32 nt, Homo Sapiens
cuuccgagcugugcccagucccgggaauuccg

SEQ ID NO: 331942 - RNA, 32 nt, Homo Sapiens
augcaugacugggacaagaaaaggugagacuc

SEQ ID NO: 331943 - RNA, 32 nt, Homo Sapiens
gucgacaucaccauguguuacuggccuggaaa

SEQ ID NO: 331944 - RNA, 32 nt, Homo Sapiens
agagggcagagggguaggcagagccuuuggau

SEQ ID NO: 331945 - RNA, 32 nt, Homo Sapiens
auuuuuauuuaguuguguacuuauuuguuaau

SEQ ID NO: 331946 - RNA, 32 nt, Homo Sapiens
gggaauguuaguuaguagguagacuuagaucc

SEQ ID NO: 331947 - RNA, 32 nt, Homo Sapiens
uuuuccucccccauccuucuccuagcuccgcg

SEQ ID NO: 331948 - RNA, 32 nt, Homo Sapiens
cuugcuugauguuuucuggaaguguguguggg

SEQ ID NO: 331949 - RNA, 32 nt, Homo Sapiens
gcaccacccggggcuuccagcggguccaugug

SEQ ID NO: 331950 - RNA, 32 nt, Homo Sapiens
guccucggccgcggcccgggucccucgcaaag

SEQ ID NO: 331951 - RNA, 32 nt, Homo Sapiens
cuccucuuccccaucuaugucccuuuagucac

SEQ ID NO: 331952 - RNA, 32 nt, Homo Sapiens
ucacugggaguccaaggcucuccuggaggaau

SEQ ID NO: 331953 - RNA, 32 nt, Homo Sapiens
uaggaaagauugaauaaaaucuguuuacuuaa

SEQ ID NO: 331954 - RNA, 32 nt, Homo Sapiens
cggacgcagagggcaaggaacuggauugcgau

SEQ ID NO: 331955 - RNA, 32 nt, Homo Sapiens
uuuguggcagcuuuucuguuaagggagcuuuc

SEQ ID NO: 331956 - RNA, 32 nt, Homo Sapiens
uccacaagugcagcuguagaaaagugcuuguc

SEQ ID NO: 331957 - RNA, 32 nt, Homo Sapiens
gguucugcguaccccucuccagugucaaccug

SEQ ID NO: 331958 - RNA, 32 nt, Homo Sapiens
guuuuccaguguuacuugcggcugggcguggg

SEQ ID NO: 331959 - RNA, 32 nt, Homo Sapiens
ugguugauauuuuucuucuuccuaucuuccug

SEQ ID NO: 331960 - RNA, 32 nt, Homo Sapiens
uccaaagugaaacuuuuucucuuuccugucuc

SEQ ID NO: 331961 - RNA, 32 nt, Homo Sapiens
ggucucacuauguggcccaggcuggucucgaa

SEQ ID NO: 331962 - RNA, 32 nt, Homo Sapiens
cgggcggggggcugaccccccugccucccucc

SEQ ID NO: 331963 - RNA, 32 nt, Homo Sapiens
ugguuucgaagagaaucauggugcuggagcug

SEQ ID NO: 331964 - RNA, 32 nt, Homo Sapiens
ugcgcuccuaggggcggagaagggugcgggcu

SEQ ID NO: 331965 - RNA, 32 nt, Homo Sapiens
agcuuccuuuucugcacuccacagcaggaaga

SEQ ID NO: 331966 - RNA, 32 nt, Homo Sapiens
ccucaccagaagcagacgcuggcaccgugcug

SEQ ID NO: 331967 - RNA, 32 nt, Homo Sapiens
aggugagcaucaugcauaaggccuccauucug

SEQ ID NO: 331968 - RNA, 32 nt, Homo Sapiens
uggccuggucugauagauggggaacggcaucu

SEQ ID NO: 331969 - RNA, 32 nt, Homo Sapiens
cagggaggcugauguuuuucuuucuuauuuua

SEQ ID NO: 331970 - RNA, 32 nt, Homo Sapiens
acagaugauaagcucaagucugaugguuuaau

SEQ ID NO: 331971 - RNA, 32 nt, Homo Sapiens
caagcucgaacuccggccgccucgcccuuccc

SEQ ID NO: 331972 - RNA, 32 nt, Homo Sapiens
ugagauggacuagccccugcuccagcccaguu

SEQ ID NO: 331973 - RNA, 31 nt, Homo Sapiens
gccacacagccccagacccguuuaggaccgg

SEQ ID NO: 331974 - RNA, 32 nt, Homo Sapiens
aaugaaaugagaaguguguaugcugaccaaac

SEQ ID NO: 331975 - RNA, 32 nt, Homo Sapiens
aauuuuagcauuauuguuuaucacuuccuuuu

SEQ ID NO: 331976 - RNA, 27 nt, Homo Sapiens
ccaugcccagcuguguccccagcccuc

SEQ ID NO: 331977 - RNA, 32 nt, Homo Sapiens
agggcucaggacccggaggcgccggcggagga

SEQ ID NO: 331978 - RNA, 32 nt, Homo Sapiens
guuaauccagcuugggccugucugcacugcga

SEQ ID NO: 331979 - RNA, 32 nt, Homo Sapiens
auuuuagcauauguaauuauuugaagccuuau

SEQ ID NO: 331980 - RNA, 32 nt, Homo Sapiens
uacaagagaacaaauuaaaauugaaaaauuga

SEQ ID NO: 331981 - RNA, 32 nt, Homo Sapiens
cacugcuccuccggcucccgggaagccgcgag

SEQ ID NO: 331982 - RNA, 32 nt, Homo Sapiens
aaaaacuuuacuaagaugacauugcuaagaug

SEQ ID NO: 331983 - RNA, 32 nt, Homo Sapiens
ugagcgcccgcggcugccuggccucagaagcg

SEQ ID NO: 331984 - RNA, 32 nt, Homo Sapiens
uucauucacuuccugcaccauccacucaucca

SEQ ID NO: 331985 - RNA, 32 nt, Homo Sapiens
gcgcggcccgggaacgcgggauccuggggaga

SEQ ID NO: 331986 - RNA, 32 nt, Homo Sapiens
ccccgcugccccagcugauccccacucauucc

SEQ ID NO: 331987 - RNA, 31 nt, Homo Sapiens
ggcggcgcguccuuguccgugagaugggugc

SEQ ID NO: 331988 - RNA, 32 nt, Homo Sapiens
ccuuugcauaaguguuugauaaaaaugaacug

SEQ ID NO: 331989 - RNA, 32 nt, Homo Sapiens
caacacugugaauucaaucuucaacugaaggc

SEQ ID NO: 331990 - RNA, 32 nt, Homo Sapiens
ccaccaaaaaauaccaaaauuagcugggugug

SEQ ID NO: 331991 - RNA, 32 nt, Homo Sapiens
gggaacguguaggccacggcucugccaccacu

SEQ ID NO: 331992 - RNA, 32 nt, Homo Sapiens
acgaguggcucggcugccuuccuggggucccg

SEQ ID NO: 331993 - RNA, 32 nt, Homo Sapiens
gggcuguuugaaacucaaauggcuggagaagc

SEQ ID NO: 331994 - RNA, 32 nt, Homo Sapiens
gggcagagacuuauuaauuaauuuugcauuua

SEQ ID NO: 331995 - RNA, 32 nt, Homo Sapiens
cacuguacuccagccugggugacaaagugaga

SEQ ID NO: 331996 - RNA, 32 nt, Homo Sapiens
gcugcccgacgccggaagugcccgccuggaac

SEQ ID NO: 331997 - RNA, 29 nt, Homo Sapiens
uuuaaugugacuuuccugaguuaacacug

SEQ ID NO: 331998 - RNA, 32 nt, Homo Sapiens
ggguugaagguucauaaaggccucugggauua

SEQ ID NO: 331999 - RNA, 32 nt, Homo Sapiens
gaaacuguuaaaccuaacuguccgaauugaca

SEQ ID NO: 332000 - RNA, 32 nt, Homo Sapiens
ucuuccuuaaagacauuuaagcuaaaggcaac

SEQ ID NO: 332001 - RNA, 32 nt, Homo Sapiens
ggguuugaacugagucccacuaccucggggga

SEQ ID NO: 332002 - RNA, 32 nt, Homo Sapiens
gcgcagcggggucgcagggcgcggcggguucc

SEQ ID NO: 332003 - RNA, 32 nt, Homo Sapiens
acggugcagcuuguggcuaaagugacaggaag

SEQ ID NO: 332004 - RNA, 32 nt, Homo Sapiens
cuguccaucuucuccccaccaccgccccggug

SEQ ID NO: 332005 - RNA, 29 nt, Homo Sapiens
uuaggcauauguaguaauauuagaaacau

SEQ ID NO: 332006 - RNA, 32 nt, Homo Sapiens
gaaggugcucccuucacacacccaggcuggag

SEQ ID NO: 332007 - RNA, 32 nt, Homo Sapiens
uguccugauugcaucuagguggagcggaugga

SEQ ID NO: 332008 - RNA, 32 nt, Homo Sapiens
gaaacggcggcugccgccggugacucagggag

SEQ ID NO: 332009 - RNA, 32 nt, Homo Sapiens
ccccaggcuggaacuuagcaucugaaguugcc

SEQ ID NO: 332010 - RNA, 32 nt, Homo Sapiens
uaaaauaauguuuccacauuauauuauguuau

SEQ ID NO: 332011 - RNA, 32 nt, Homo Sapiens
agacccccucaccaugcuccccggggagcacu

SEQ ID NO: 332012 - RNA, 32 nt, Homo Sapiens
cacauaggugucugauaaaaguuuagaaagua

SEQ ID NO: 332013 - RNA, 32 nt, Homo Sapiens
guagcucuccgggucuuggcgcggcgggggcg

SEQ ID NO: 332014 - RNA, 30 nt, Homo Sapiens
cccccagccguucucaugcaaaauaccugu

SEQ ID NO: 332015 - RNA, 32 nt, Homo Sapiens
cacacacaucccagcccuccggccgaucccuc

SEQ ID NO: 332016 - RNA, 32 nt, Homo Sapiens
uuccuguuuuguaaccucuuuguacuuuguuc

SEQ ID NO: 332017 - RNA, 32 nt, Homo Sapiens
cacuuugugaaugggcugccugcccuguaguu

SEQ ID NO: 332018 - RNA, 30 nt, Homo Sapiens
ucaaucagugcucgcugaguacgaagagag

SEQ ID NO: 332019 - RNA, 32 nt, Homo Sapiens
ugagccaccgcgccuggcccaagcccuccaca

SEQ ID NO: 332020 - RNA, 32 nt, Homo Sapiens
aauuucugguguucaaccuuggucucaaauag

SEQ ID NO: 332021 - RNA, 32 nt, Homo Sapiens
ucaggaaaauaacuuggccuagcucaaacaau

SEQ ID NO: 332022 - RNA, 32 nt, Homo Sapiens
uuaaugcggugauuuauucaaacauuuauucu

SEQ ID NO: 332023 - RNA, 32 nt, Homo Sapiens
uccccuuccgccaugauuguguuuccugagac

SEQ ID NO: 332024 - RNA, 32 nt, Homo Sapiens
aaaauuugaaagaauuccaucaaauacuugcu

SEQ ID NO: 332025 - RNA, 32 nt, Homo Sapiens
cagucuucauguacagugacgaaacuguguag

SEQ ID NO: 332026 - RNA, 32 nt, Homo Sapiens
cuaaaauuuuaauuuuuuuucuuaaaaaaugc

SEQ ID NO: 332027 - RNA, 32 nt, Homo Sapiens
aacaaagaaucagaauuugaaaaaagaagaaa

SEQ ID NO: 332028 - RNA, 30 nt, Homo Sapiens
auccugacgcccgugcgccugcgcugggcc

SEQ ID NO: 332029 - RNA, 32 nt, Homo Sapiens
acacaaagaaacgacacauauuugaggugaug

SEQ ID NO: 332030 - RNA, 32 nt, Homo Sapiens
agaaagauaagguaaacaagauauacuuagcg

SEQ ID NO: 332031 - RNA, 32 nt, Homo Sapiens
gacaucacagcggcugucucaugauuaaggcu

SEQ ID NO: 332032 - RNA, 32 nt, Homo Sapiens
aacuggguucuccaauaauguccaaauuguaa

SEQ ID NO: 332033 - RNA, 32 nt, Homo Sapiens
agucugcaggcggcuccugugcuuuuuauuuc

SEQ ID NO: 332034 - RNA, 32 nt, Homo Sapiens
uacugcggggcuuuuccgcggaggagcgcccg

SEQ ID NO: 332035 - RNA, 32 nt, Homo Sapiens
uuaccugguacgcuggcugcuaccucccucac

SEQ ID NO: 332036 - RNA, 32 nt, Homo Sapiens
uuauaaauguucagaaguuagacggccacaaa

SEQ ID NO: 332037 - RNA, 32 nt, Homo Sapiens
cagcauggcaucacuuuuuuuuauaacucauu

SEQ ID NO: 332038 - RNA, 32 nt, Homo Sapiens
aaauacuuucuccucaaauuauuuuucucugu

SEQ ID NO: 332039 - RNA, 32 nt, Homo Sapiens
uguuggggcuggaagaacuugguggccugggu

SEQ ID NO: 332040 - RNA, 32 nt, Homo Sapiens
aauuaaugcuuucucuuuauugaaauaaauug

SEQ ID NO: 332041 - RNA, 32 nt, Homo Sapiens
ggugcagcaaaccaccauggcacauguuuacc

SEQ ID NO: 332042 - RNA, 32 nt, Homo Sapiens
agcgggggguucccggccggacaggcggggcg

SEQ ID NO: 332043 - RNA, 29 nt, Homo Sapiens
acuacugugacuuugucugcagaagagcu

SEQ ID NO: 332044 - RNA, 32 nt, Homo Sapiens
gggaggccaaggugggcggaucaugaggucag

SEQ ID NO: 332045 - RNA, 32 nt, Homo Sapiens
gggaggccagggugggcagaucaugaggucag

SEQ ID NO: 332046 - RNA, 32 nt, Homo Sapiens
cuuuccccagccuucagccugagucuagcaug

SEQ ID NO: 332047 - RNA, 32 nt, Homo Sapiens
auuuuauacguuuucuuuuuuauuuuugucuu

SEQ ID NO: 332048 - RNA, 32 nt, Homo Sapiens
caacuauagaagacauuaaaagaaauuguauu

SEQ ID NO: 332049 - RNA, 32 nt, Homo Sapiens
uccccgguuuaucugaucuacucggggccuca

SEQ ID NO: 332050 - RNA, 32 nt, Homo Sapiens
guauuuuaaaaugucagugcaaaaaauauaug

SEQ ID NO: 332051 - RNA, 32 nt, Homo Sapiens
uuguauuauaugcuuuuuccuauuaauacuac

SEQ ID NO: 332052 - RNA, 32 nt, Homo Sapiens
gugcaccuggugccgguggcuggagaccuggg

SEQ ID NO: 332053 - RNA, 32 nt, Homo Sapiens
uauuuuguaccauuuucuuguuuaacuuuagc

SEQ ID NO: 332054 - RNA, 32 nt, Homo Sapiens
cccgacagcacaaagaaguaagggcaguuauu

SEQ ID NO: 332055 - RNA, 32 nt, Homo Sapiens
aauugaccuuggagagagaauggaggucacug

SEQ ID NO: 332056 - RNA, 32 nt, Homo Sapiens
uguggacccuccccggcucuggggccagucga

SEQ ID NO: 332057 - RNA, 32 nt, Homo Sapiens
cuccacggcgucugcauggcucuggccgugag

SEQ ID NO: 332058 - RNA, 32 nt, Homo Sapiens
ucccccucaccagcugacuggcuuuccggagg

SEQ ID NO: 332059 - RNA, 32 nt, Homo Sapiens
gccccaaggugagagggaacggugcugcuuua

SEQ ID NO: 332060 - RNA, 32 nt, Homo Sapiens
cguucugaauaaacagaauggaccauugaacc

SEQ ID NO: 332061 - RNA, 32 nt, Homo Sapiens
cugacucagggguggaggagccuaggaaugcc

SEQ ID NO: 332062 - RNA, 32 nt, Homo Sapiens
gcgcugcggagcagggcagggaagccgggagg

SEQ ID NO: 332063 - RNA, 32 nt, Homo Sapiens
aacaagaauguaacuccagauagagaaauagu

SEQ ID NO: 332064 - RNA, 32 nt, Homo Sapiens
ugagguaccacuuuuuaaagcuagcugugucg

SEQ ID NO: 332065 - RNA, 32 nt, Homo Sapiens
acccaguuugcacuaacaugggccauuuguag

SEQ ID NO: 332066 - RNA, 32 nt, Homo Sapiens
acccgccugugucgcuuuugcacgggaaguga

SEQ ID NO: 332067 - RNA, 29 nt, Homo Sapiens
ugagauaaucuuuuugauuuucuaacaag

SEQ ID NO: 332068 - RNA, 32 nt, Homo Sapiens
uccaggaaguaauucagaaaugacuguucaaa

SEQ ID NO: 332069 - RNA, 32 nt, Homo Sapiens
uuugggggaacaggcuuuuggcccucuaauag

SEQ ID NO: 332070 - RNA, 32 nt, Homo Sapiens
uguccuaaugcucucccuccccuuucccccac

SEQ ID NO: 332071 - RNA, 32 nt, Homo Sapiens
agggcccugaacccauuuuccuccccuguccc

SEQ ID NO: 332072 - RNA, 32 nt, Homo Sapiens
ugaaauguuuuuauuuuauuuugcuuauuuuu

SEQ ID NO: 332073 - RNA, 32 nt, Homo Sapiens
agcugcuugucuuuguauggcuugucagcuaa

SEQ ID NO: 332074 - RNA, 32 nt, Homo Sapiens
ccacaggcuagaccagagaugccaagucccaa

SEQ ID NO: 332075 - RNA, 32 nt, Homo Sapiens
aucaguagggagaaacaaaaauacaagucccg

SEQ ID NO: 332076 - RNA, 32 nt, Homo Sapiens
gggcgugaggccucccagcagugccgcagcgu

SEQ ID NO: 332077 - RNA, 32 nt, Homo Sapiens
uuagugaucaaauugugcaguacuuugugcau

SEQ ID NO: 332078 - RNA, 32 nt, Homo Sapiens
uugcucuuggguacaagagaaacugucggucu

SEQ ID NO: 332079 - RNA, 32 nt, Homo Sapiens
ugaaaccuguguauuucuuuuucgggguuucu

SEQ ID NO: 332080 - RNA, 32 nt, Homo Sapiens
cuucucccacccaggacugccccgcggagcug

SEQ ID NO: 332081 - RNA, 32 nt, Homo Sapiens
ccuaacuccugccuaugacacagaagccccac

SEQ ID NO: 332082 - RNA, 32 nt, Homo Sapiens
agcaggugauggucuuuuuuuauaacaucguu

SEQ ID NO: 332083 - RNA, 32 nt, Homo Sapiens
ugccugacauccuggugacuggcaccuaugac

SEQ ID NO: 332084 - RNA, 32 nt, Homo Sapiens
gggaaauguauuacuucuguacacaguggacu

SEQ ID NO: 332085 - RNA, 32 nt, Homo Sapiens
uuguagggaaaagccaacgguugagauggagg

SEQ ID NO: 332086 - RNA, 32 nt, Homo Sapiens
aucacuguggaaaaucuucccaguuauuucag

SEQ ID NO: 332087 - RNA, 32 nt, Homo Sapiens
cacaggagguauuucuuuuuuauguugguccu

SEQ ID NO: 332088 - RNA, 32 nt, Homo Sapiens
uuccccucccccaccggagagccccgggaugg

SEQ ID NO: 332089 - RNA, 30 nt, Homo Sapiens
gaggaggcguagucgccgccggcugugccc

SEQ ID NO: 332090 - RNA, 32 nt, Homo Sapiens
cagggcccacccagaugccucugggguuaccc

SEQ ID NO: 332091 - RNA, 32 nt, Homo Sapiens
uauuuuuguaaaaaugcucaugccuaugggug

SEQ ID NO: 332092 - RNA, 32 nt, Homo Sapiens
gcuucagggccucugcauuugcuguucucuca

SEQ ID NO: 332093 - RNA, 32 nt, Homo Sapiens
ucacgagucauuucugccugacugcuccagcu

SEQ ID NO: 332094 - RNA, 32 nt, Homo Sapiens
cucuguauuuaguuaaguucggacuuuucugu

SEQ ID NO: 332095 - RNA, 32 nt, Homo Sapiens
ccccuccccccucccggaggccaggaccccgu

SEQ ID NO: 332096 - RNA, 32 nt, Homo Sapiens
cagccucccuguagccaucuccagggugacgg

SEQ ID NO: 332097 - RNA, 32 nt, Homo Sapiens
uagcauuugugauugucgugaacacuuuaggc

SEQ ID NO: 332098 - RNA, 32 nt, Homo Sapiens
caacaaucuggccaugagaacgaggggaucug

SEQ ID NO: 332099 - RNA, 32 nt, Homo Sapiens
caaccagcuguggcuuccugugccuagacugg

SEQ ID NO: 332100 - RNA, 32 nt, Homo Sapiens
gguaucccacugaaauguucuguguugcagac

SEQ ID NO: 332101 - RNA, 32 nt, Homo Sapiens
cuuagggcagccacaaucuuaucaggagcuuc

SEQ ID NO: 332102 - RNA, 32 nt, Homo Sapiens
ucagagccccuacagcauuguuaagaaaguau

SEQ ID NO: 332103 - RNA, 32 nt, Homo Sapiens
caaggccaacuguuggccccaacaugcaacag

SEQ ID NO: 332104 - RNA, 32 nt, Homo Sapiens
ccuucucacauugugaaguguuuaccugaguc

SEQ ID NO: 332105 - RNA, 32 nt, Homo Sapiens
aggaucuugugaucuaauccacuccuuccaca

SEQ ID NO: 332106 - RNA, 32 nt, Homo Sapiens
aucaggucgauuugugguaacuguagucaucu

SEQ ID NO: 332107 - RNA, 32 nt, Homo Sapiens
cacugcacuccagccucggugacagagcaaga

SEQ ID NO: 332108 - RNA, 32 nt, Homo Sapiens
gacugcacuccagccugggugacagagcaaga

SEQ ID NO: 332109 - RNA, 32 nt, Homo Sapiens
cacugcacuccagccugggcaacacagugaga

SEQ ID NO: 332110 - RNA, 32 nt, Homo Sapiens
cagguaagcuaaucauuauuuuguaaaaauaa

SEQ ID NO: 332111 - RNA, 32 nt, Homo Sapiens
aucuuaaugaaaauagauauggucacaaguac

SEQ ID NO: 332112 - RNA, 32 nt, Homo Sapiens
uuuauguuaguagagcuguuuucaacccaaaa

SEQ ID NO: 332113 - RNA, 32 nt, Homo Sapiens
gcaccaaucugugagggaaguuaggaacccau

SEQ ID NO: 332114 - RNA, 31 nt, Homo Sapiens
agauggcggcacucccagggcccaucgucag

SEQ ID NO: 332115 - RNA, 32 nt, Homo Sapiens
uucacaguguugggcagggugguuucaaacuu

SEQ ID NO: 332116 - RNA, 32 nt, Homo Sapiens
uauuugaaaaaguuaucucuggguauugcaua

SEQ ID NO: 332117 - RNA, 32 nt, Homo Sapiens
ucaugccauuuuauuucuuuuugauuuuuaaa

SEQ ID NO: 332118 - RNA, 32 nt, Homo Sapiens
gugaccagugcagcuacagcugcaagcgcaag

SEQ ID NO: 332119 - RNA, 32 nt, Homo Sapiens
cuucuauaagacugaagugcugguuaccaacu

SEQ ID NO: 332120 - RNA, 32 nt, Homo Sapiens
ccuggagcccuccccaggaugugagccagucc

SEQ ID NO: 332121 - RNA, 32 nt, Homo Sapiens
ggaucuagggaaaggaggagcuaucgaaguac

SEQ ID NO: 332122 - RNA, 32 nt, Homo Sapiens
auuuaaugacggucauggcaacuuuuuggcac

SEQ ID NO: 332123 - RNA, 32 nt, Homo Sapiens
cuaauauguuaaaauaugguaauuccuuuuuu

SEQ ID NO: 332124 - RNA, 32 nt, Homo Sapiens
accagaauugguuagugugacccccucaagua

SEQ ID NO: 332125 - RNA, 29 nt, Homo Sapiens
cuucagaugaagaauguggacuugaaaau

SEQ ID NO: 332126 - RNA, 32 nt, Homo Sapiens
gguuauuuuggggggacagugccaaguccauc

SEQ ID NO: 332127 - RNA, 29 nt, Homo Sapiens
uugaauuuucaggucagaggcaagaaaaa

SEQ ID NO: 332128 - RNA, 32 nt, Homo Sapiens
cuagcucuuucccuccucccauuuccuuuagu

SEQ ID NO: 332129 - RNA, 32 nt, Homo Sapiens
aaauguggcuccuggggguucuuucuuccucu

SEQ ID NO: 332130 - RNA, 32 nt, Homo Sapiens
aaaccaagauagaguaucuauuagaguuuuac

SEQ ID NO: 332131 - RNA, 32 nt, Homo Sapiens
uccuucuuuuucugcuuucauuuuaauuuugg

SEQ ID NO: 332132 - RNA, 32 nt, Homo Sapiens
gaaacagaaaaggagauuacagagagaucaga

SEQ ID NO: 332133 - RNA, 32 nt, Homo Sapiens
cagauaacauaaauaaaaauucaaccacagau

SEQ ID NO: 332134 - RNA, 32 nt, Homo Sapiens
ucucuugcauccauucucuagacggccguguc

SEQ ID NO: 332135 - RNA, 30 nt, Homo Sapiens
ugcuccuggugccgccaccguccgccggug

SEQ ID NO: 332136 - RNA, 32 nt, Homo Sapiens
auguaaaacauggagcagauuuuuuacuuguu

SEQ ID NO: 332137 - RNA, 32 nt, Homo Sapiens
caccacacaccgcagagcuguccaggcacagc

SEQ ID NO: 332138 - RNA, 32 nt, Homo Sapiens
acaugaugacugugucugccuguccccaaaca

SEQ ID NO: 332139 - RNA, 32 nt, Homo Sapiens
caccgugcacugggcacucuuggaucuggagc

SEQ ID NO: 332140 - RNA, 32 nt, Homo Sapiens
uagugcccugagugggaaccacuucacugggc

SEQ ID NO: 332141 - RNA, 32 nt, Homo Sapiens
ugagcaccaacuuguuuccuccccucaaaguu

SEQ ID NO: 332142 - RNA, 28 nt, Homo Sapiens
gcgagauggcggccgccgggaccuuccu

SEQ ID NO: 332143 - RNA, 32 nt, Homo Sapiens
ccggagagggagaggcggggucggcuguauca

SEQ ID NO: 332144 - RNA, 28 nt, Homo Sapiens
acaaugaugccgaacauuaggaauuguu

SEQ ID NO: 332145 - RNA, 32 nt, Homo Sapiens
acggaggccagagguaggaaaagcaagagaaa

SEQ ID NO: 332146 - RNA, 32 nt, Homo Sapiens
uucgcuguguuugaggagacgucuggagaagg

SEQ ID NO: 332147 - RNA, 32 nt, Homo Sapiens
gaauucuccaaguuugaauauuugggcagggu

SEQ ID NO: 332148 - RNA, 32 nt, Homo Sapiens
cggcgggagcagccgcccugacucgcggagca

SEQ ID NO: 332149 - RNA, 32 nt, Homo Sapiens
uggcagcugcucuguggaggaccuccaggacu

SEQ ID NO: 332150 - RNA, 32 nt, Homo Sapiens
caugcuucaaacuuaaggacugaccaucaccu

SEQ ID NO: 332151 - RNA, 32 nt, Homo Sapiens
ugagcaguaugcuugcaucaccuagugcauga

SEQ ID NO: 332152 - RNA, 32 nt, Homo Sapiens
gacuuuaucuaugaaugugacucauuguuugu

SEQ ID NO: 332153 - RNA, 32 nt, Homo Sapiens
aagccggugggguguggagcgaggggcuggca

SEQ ID NO: 332154 - RNA, 32 nt, Homo Sapiens
ugacuuggaauauagaacacaaacaaaugugu

SEQ ID NO: 332155 - RNA, 32 nt, Homo Sapiens
agggggugagagagggcaggcggggacugcaa

SEQ ID NO: 332156 - RNA, 32 nt, Homo Sapiens
aacccccaacccaaaaccaagcauuuuggaau

SEQ ID NO: 332157 - RNA, 32 nt, Homo Sapiens
gggcugccgucucuccgacaucccgggacgga

SEQ ID NO: 332158 - RNA, 32 nt, Homo Sapiens
cucccaccucccaccuucuccucucauuaaga

SEQ ID NO: 332159 - RNA, 27 nt, Homo Sapiens
agauggcggcggccgacggcgacgacu

SEQ ID NO: 332160 - RNA, 29 nt, Homo Sapiens
gaggauggaagguguggaacuuaaagaag

SEQ ID NO: 332161 - RNA, 32 nt, Homo Sapiens
gugugaauugguaggggcuucaugcucacaac

SEQ ID NO: 332162 - RNA, 28 nt, Homo Sapiens
acuuaauugugacacauuauaagauauc

SEQ ID NO: 332163 - RNA, 32 nt, Homo Sapiens
guauauguauacauacgugaacacaugccugu

SEQ ID NO: 332164 - RNA, 32 nt, Homo Sapiens
guaaacaguaagugcaauuguauuuuaauuuc

SEQ ID NO: 332165 - RNA, 32 nt, Homo Sapiens
gagcagguguugccaaugcugcgguucgugca

SEQ ID NO: 332166 - RNA, 32 nt, Homo Sapiens
ccuuuauaaauggcagaagagugacaaaauuc

SEQ ID NO: 332167 - RNA, 32 nt, Homo Sapiens
ucuuucucuccuccccgucagucugucuuuac

SEQ ID NO: 332168 - RNA, 32 nt, Homo Sapiens
ggacgugaggaccagcccucuccggggacccc

SEQ ID NO: 332169 - RNA, 32 nt, Homo Sapiens
acuguuuucuuuauuucuuuaaaaaaaaaaaa

SEQ ID NO: 332170 - RNA, 32 nt, Homo Sapiens
aacacugauggaaauguauagaauaauauuua

SEQ ID NO: 332171 - RNA, 32 nt, Homo Sapiens
uuuuuguucuuuuuuuuuuuuauuauggaaug

SEQ ID NO: 332172 - RNA, 32 nt, Homo Sapiens
agaaggccagaccacagcucugcagccuguuu

SEQ ID NO: 332173 - RNA, 32 nt, Homo Sapiens
gaaaaacaggccgagugaaggugcuggaaagg

SEQ ID NO: 332174 - RNA, 32 nt, Homo Sapiens
gacuuccucuugcugcaggacccggcuuccac

SEQ ID NO: 332175 - RNA, 32 nt, Homo Sapiens
aaucaauuaaauaaauagaaccacugagacaa

SEQ ID NO: 332176 - RNA, 32 nt, Homo Sapiens
cugggggaagcgcccgcgaaaaccguggagag

SEQ ID NO: 332177 - RNA, 32 nt, Homo Sapiens
cccugggauagcggcugcagccaggcauggcc

SEQ ID NO: 332178 - RNA, 32 nt, Homo Sapiens
aaccagaugcugucugguggguuagggccaga

SEQ ID NO: 332179 - RNA, 29 nt, Homo Sapiens
uaaacucagggacagagccaugcugggaa

SEQ ID NO: 332180 - RNA, 32 nt, Homo Sapiens
guagcggcugccuguugagggaggaagaggug

SEQ ID NO: 332181 - RNA, 32 nt, Homo Sapiens
cugagguugggagaggugcacuuggggcacag

SEQ ID NO: 332182 - RNA, 32 nt, Homo Sapiens
gaaauucaagaaauuucuuuagcauuaagaag

SEQ ID NO: 332183 - RNA, 32 nt, Homo Sapiens
acugucgcgcggccgcgccggcggugagggag

SEQ ID NO: 332184 - RNA, 32 nt, Homo Sapiens
uggcagccacugccucuauaggaaacccaaag

SEQ ID NO: 332185 - RNA, 32 nt, Homo Sapiens
gagggcacaucuugcccuuccccucucagaca

SEQ ID NO: 332186 - RNA, 32 nt, Homo Sapiens
uuuucuaaugaaaauaauguucagaacauuug

SEQ ID NO: 332187 - RNA, 32 nt, Homo Sapiens
ggugugcccggccucauuucugauagaucccg

SEQ ID NO: 332188 - RNA, 32 nt, Homo Sapiens
gugcgacccaacuucauuuguuuacuugaaaa

SEQ ID NO: 332189 - RNA, 32 nt, Homo Sapiens
ucugcgaagaaccuugugugacaaaugagaaa

SEQ ID NO: 332190 - RNA, 30 nt, Homo Sapiens
uugcugggcaggcguugggcgccggcgguc

SEQ ID NO: 332191 - RNA, 32 nt, Homo Sapiens
ucaucuaaaagcuuuuagagauuugaacauaa

SEQ ID NO: 332192 - RNA, 32 nt, Homo Sapiens
gccccugccugggggcuugucaccucccccac

SEQ ID NO: 332193 - RNA, 32 nt, Homo Sapiens
gcuuugcccgucuccucuggguggccccagug

SEQ ID NO: 332194 - RNA, 32 nt, Homo Sapiens
ugcuuaccuaauuauuauaaucauuucauuug

SEQ ID NO: 332195 - RNA, 32 nt, Homo Sapiens
ucaacagcacaucacagggcaagccccaaucc

SEQ ID NO: 332196 - RNA, 32 nt, Homo Sapiens
guuagcugauaaggaaacuuuauuuaaaugca

SEQ ID NO: 332197 - RNA, 32 nt, Homo Sapiens
agauuguucagauacuuuauuuucucauuuau

SEQ ID NO: 332198 - RNA, 32 nt, Homo Sapiens
ccugagcccacuuuccccaucucaucaccagu

SEQ ID NO: 332199 - RNA, 32 nt, Homo Sapiens
aaccuggaaagaaaauacaauaaagagaucag

SEQ ID NO: 332200 - RNA, 32 nt, Homo Sapiens
uggugcggaggcaagcaggcuaacuaggaguu

SEQ ID NO: 332201 - RNA, 32 nt, Homo Sapiens
ccuccuucacauuuccuccccagcuuuugcgg

SEQ ID NO: 332202 - RNA, 32 nt, Homo Sapiens
cucucagcggcugcgaagucuguaaaccuggu

SEQ ID NO: 332203 - RNA, 32 nt, Homo Sapiens
augaggcauaaaaaugcaauaaacuguuacag

SEQ ID NO: 332204 - RNA, 32 nt, Homo Sapiens
gccuuguuuccugagucugaucuguuuggcgg

SEQ ID NO: 332205 - RNA, 32 nt, Homo Sapiens
cauggccgcagaccagcgcccgaaggccgaca

SEQ ID NO: 332206 - RNA, 32 nt, Homo Sapiens
gacccucagcccggcggggaggccauggcaug

SEQ ID NO: 332207 - RNA, 32 nt, Homo Sapiens
uuaccuugaggggagugagaaaaggagaagua

SEQ ID NO: 332208 - RNA, 32 nt, Homo Sapiens
caggaaagaacaaacuucaauuaaauguauaa

SEQ ID NO: 332209 - RNA, 32 nt, Homo Sapiens
caggcagcugaggguccugggggagcugaggc

SEQ ID NO: 332210 - RNA, 32 nt, Homo Sapiens
gcccgcaggcggggcggggcgaagcaggugau

SEQ ID NO: 332211 - RNA, 32 nt, Homo Sapiens
aggagugccccugcccaccacccagaucacac

SEQ ID NO: 332212 - RNA, 32 nt, Homo Sapiens
caccccaccuccccgcgcggucccggccccug

SEQ ID NO: 332213 - RNA, 32 nt, Homo Sapiens
gauuccggccuggagcucccagggccgagguc

SEQ ID NO: 332214 - RNA, 32 nt, Homo Sapiens
ggccgccgcccggcaggcccagaccaugcagg

SEQ ID NO: 332215 - RNA, 32 nt, Homo Sapiens
cugagacccuccccaacccacccagguuccca

SEQ ID NO: 332216 - RNA, 32 nt, Homo Sapiens
cccacaagccucuggguuuucccuuuaccagu

SEQ ID NO: 332217 - RNA, 32 nt, Homo Sapiens
agaagagacacuuuaaguuuguaguaaaagug

SEQ ID NO: 332218 - RNA, 29 nt, Homo Sapiens
agccugugacuuuccucccuggacaaagg

SEQ ID NO: 332219 - RNA, 32 nt, Homo Sapiens
ccuggcuucaggaccguguuucccugcaccag

SEQ ID NO: 332220 - RNA, 32 nt, Homo Sapiens
acagacuucccucuccugcuucauuaagggcu

SEQ ID NO: 332221 - RNA, 32 nt, Homo Sapiens
uuuccuacacaagcucauucagaggaggauga

SEQ ID NO: 332222 - RNA, 32 nt, Homo Sapiens
ucagaagcccggaggagcugguggugggagaa

SEQ ID NO: 332223 - RNA, 32 nt, Homo Sapiens
aaagccaaacuuuuaaauuuuuugguuuuuuu

SEQ ID NO: 332224 - RNA, 32 nt, Homo Sapiens
aauuauacauucaagguaguggccaaauguaa

SEQ ID NO: 332225 - RNA, 32 nt, Homo Sapiens
caagaaucagugcaaagauuugcuuuaauugu

SEQ ID NO: 332226 - RNA, 32 nt, Homo Sapiens
ggagcgcggagcccggcccggaagcuagguga

SEQ ID NO: 332227 - RNA, 32 nt, Homo Sapiens
gggguucagggaggaguggauggcacagugcu

SEQ ID NO: 332228 - RNA, 32 nt, Homo Sapiens
cuugaagaagugugauuccagcaccguuucua

SEQ ID NO: 332229 - RNA, 32 nt, Homo Sapiens
gccagccugcuguccggcugccgcccgccgug

SEQ ID NO: 332230 - RNA, 32 nt, Homo Sapiens
cuccuuuccuuccccaccaaaauugggauugu

SEQ ID NO: 332231 - RNA, 32 nt, Homo Sapiens
caaugggcagugcccaccccgcccacuggcgu

SEQ ID NO: 332232 - RNA, 32 nt, Homo Sapiens
ugccugccccacugugcuggcaggagcugacu

SEQ ID NO: 332233 - RNA, 32 nt, Homo Sapiens
uauucaauucagcuacaaaacaaaauacugga

SEQ ID NO: 332234 - RNA, 32 nt, Homo Sapiens
ucaguuuugugauuugcaaguauuuucuucca

SEQ ID NO: 332235 - RNA, 32 nt, Homo Sapiens
uuggaacuucguuuucauccacaguaaacuuu

SEQ ID NO: 332236 - RNA, 32 nt, Homo Sapiens
aaggcucccucaugcugcccuuuggcccuagu

SEQ ID NO: 332237 - RNA, 32 nt, Homo Sapiens
cuauuguuguacaugagaaauucagcauuaaa

SEQ ID NO: 332238 - RNA, 25 nt, Homo Sapiens
auggacggguccggggagcagccca

SEQ ID NO: 332239 - RNA, 32 nt, Homo Sapiens
ucuguccccuccccucucgcucccuuuuaaaa

SEQ ID NO: 332240 - RNA, 32 nt, Homo Sapiens
aauaggugacauucaaugauagaucucuggcu

SEQ ID NO: 332241 - RNA, 32 nt, Homo Sapiens
gcggcugggcagguggcugaaugcgggcugga

SEQ ID NO: 332242 - RNA, 32 nt, Homo Sapiens
gggcgcccgacggccaggaucucgcuguaggu

SEQ ID NO: 332243 - RNA, 30 nt, Homo Sapiens
ggaugugugggcggcggcggcggcagcggg

SEQ ID NO: 332244 - RNA, 32 nt, Homo Sapiens
ugcauugugugcggccgccgcgcuccgagguc

SEQ ID NO: 332245 - RNA, 32 nt, Homo Sapiens
uccuccuggugcccugaaggcugcgauggccc

SEQ ID NO: 332246 - RNA, 32 nt, Homo Sapiens
gacuuuuucugcauuuauuuugauuuuuaacg

SEQ ID NO: 332247 - RNA, 32 nt, Homo Sapiens
guguggggccgcggcuggcaggcggaggaggg

SEQ ID NO: 332248 - RNA, 32 nt, Homo Sapiens
uaucuuuuauuaugauauuugugguuuagaag

SEQ ID NO: 332249 - RNA, 32 nt, Homo Sapiens
ggggccucuacccacaccuggaccuccgugcc

SEQ ID NO: 332250 - RNA, 32 nt, Homo Sapiens
ugauggguucugcagcccagggcccccgaugc

SEQ ID NO: 332251 - RNA, 32 nt, Homo Sapiens
gaccagccccaggcuccugugcuggcgguucu

SEQ ID NO: 332252 - RNA, 32 nt, Homo Sapiens
uaacauuugccuuuuuauugcagguuuuccuu

SEQ ID NO: 332253 - RNA, 32 nt, Homo Sapiens
augcuacaacacgaaugaacuuugaaacguug

SEQ ID NO: 332254 - RNA, 32 nt, Homo Sapiens
cuuggcaaaauauuucuauauuauuaauagua

SEQ ID NO: 332255 - RNA, 32 nt, Homo Sapiens
aguucuuacagaauaagaaaacaaaaaacaag

SEQ ID NO: 332256 - RNA, 32 nt, Homo Sapiens
gguggacuuuuguuaaguuagcccuuaccauu

SEQ ID NO: 332257 - RNA, 32 nt, Homo Sapiens
ggauaauuaugaaaagcaguucuggauggugu

SEQ ID NO: 332258 - RNA, 29 nt, Homo Sapiens
guuccaaugaagauucugcugguguucua

SEQ ID NO: 332259 - RNA, 32 nt, Homo Sapiens
gaaaaugaggaucacacagaccaagaguaucu

SEQ ID NO: 332260 - RNA, 32 nt, Homo Sapiens
aaagguuuucuuuuucuuuuuuaaacuguaug

SEQ ID NO: 332261 - RNA, 32 nt, Homo Sapiens
cucaacccuucaccuuuccccgaggagugugu

SEQ ID NO: 332262 - RNA, 29 nt, Homo Sapiens
uaaaaauaaaguuaguggacuuugucucc

SEQ ID NO: 332263 - RNA, 32 nt, Homo Sapiens
uuccuucugauccacagccucaucaguauuug

SEQ ID NO: 332264 - RNA, 32 nt, Homo Sapiens
gagcacucacugugucuuugucaagugucugc

SEQ ID NO: 332265 - RNA, 32 nt, Homo Sapiens
ggacggaggagggggcggggcucucgggagcc

SEQ ID NO: 332266 - RNA, 32 nt, Homo Sapiens
cacaagguugcuaagcaucuucugccagaauu

SEQ ID NO: 332267 - RNA, 32 nt, Homo Sapiens
aggccuuuucuuugaggacguaccucauuucc

SEQ ID NO: 332268 - RNA, 32 nt, Homo Sapiens
cuuccgcaaguguaggcagagcccccggagcc

SEQ ID NO: 332269 - RNA, 32 nt, Homo Sapiens
augauggcaaaaucuuaaaaugugcuacauuu

SEQ ID NO: 332270 - RNA, 32 nt, Homo Sapiens
cacaaauucauuugccuauucauuggcaccac

SEQ ID NO: 332271 - RNA, 30 nt, Homo Sapiens
uuuuugggagguggggcaugggaggaccag

SEQ ID NO: 332272 - RNA, 32 nt, Homo Sapiens
cgguaggcuggguucauuccccggcccuccga

SEQ ID NO: 332273 - RNA, 32 nt, Homo Sapiens
ccucugccgcugcuucucggcgcgguuccuac

SEQ ID NO: 332274 - RNA, 32 nt, Homo Sapiens
auccucguuuuauuuuugguuaaacuuaugaa

SEQ ID NO: 332275 - RNA, 32 nt, Homo Sapiens
ucuccucguugacuucacagugucagugcagu

SEQ ID NO: 332276 - RNA, 32 nt, Homo Sapiens
cguggccgaauucgaguuuggugcuggggcca

SEQ ID NO: 332277 - RNA, 32 nt, Homo Sapiens
cccuggaaguguguacucagugcugugggggu

SEQ ID NO: 332278 - RNA, 27 nt, Homo Sapiens
gucaacaacuucuucaccccccuccgc

SEQ ID NO: 332279 - RNA, 32 nt, Homo Sapiens
cuggguuacaagcagcaagugcgcgguugggg

SEQ ID NO: 332280 - RNA, 32 nt, Homo Sapiens
gaagugaggcgugaugggcagcuccagaggau

SEQ ID NO: 332281 - RNA, 32 nt, Homo Sapiens
agauagaguaucuauuagaguuuuacauuguu

SEQ ID NO: 332282 - RNA, 32 nt, Homo Sapiens
ccagccucagccccagccccagccccaguggg

SEQ ID NO: 332283 - RNA, 32 nt, Homo Sapiens
uuuuaaccucuguucaggaaguccuuaucuag

SEQ ID NO: 332284 - RNA, 31 nt, Homo Sapiens
guuuagaacauaugaacugaaugaaauggac

SEQ ID NO: 332285 - RNA, 29 nt, Homo Sapiens
cagcacauauguacuuuacaguagauaaa

SEQ ID NO: 332286 - RNA, 32 nt, Homo Sapiens
uuuuuauguugaggcuuuuucgacgugaaacu

SEQ ID NO: 332287 - RNA, 32 nt, Homo Sapiens
ccauacaggcaaaacaaagccaaacagaugcc

SEQ ID NO: 332288 - RNA, 32 nt, Homo Sapiens
uccccuugagaaaucugccgggaguuguaguu

SEQ ID NO: 332289 - RNA, 32 nt, Homo Sapiens
caucacugucauugucauuaucacucucacac

SEQ ID NO: 332290 - RNA, 32 nt, Homo Sapiens
uacauuucuugcugcuccuggcguggaaacuu

SEQ ID NO: 332291 - RNA, 32 nt, Homo Sapiens
uauaauuugucuuuuuaagaucacuggaaauu

SEQ ID NO: 332292 - RNA, 32 nt, Homo Sapiens
cacuuuauuuauuugcagucuguuuucuaggc

SEQ ID NO: 332293 - RNA, 32 nt, Homo Sapiens
ugaaauaauuuuugugauacagagcaaaauaa

SEQ ID NO: 332294 - RNA, 32 nt, Homo Sapiens
gagaauuuucuuuuguaaaagaaaaauauuuu

SEQ ID NO: 332295 - RNA, 32 nt, Homo Sapiens
uguguucggcugcggcacgcugcuaaguuuua

SEQ ID NO: 332296 - RNA, 32 nt, Homo Sapiens
guucccagguaaugcuuaugcugcuggccuag

SEQ ID NO: 332297 - RNA, 32 nt, Homo Sapiens
cagacaaacagagagccaaaucaugagugacc

SEQ ID NO: 332298 - RNA, 32 nt, Homo Sapiens
cucuugaaggcaccuauggggcacaagccuaa

SEQ ID NO: 332299 - RNA, 32 nt, Homo Sapiens
aauagcgugugaacaaaguaaagaacaggauu

SEQ ID NO: 332300 - RNA, 32 nt, Homo Sapiens
cugagccccagucucugcucugcacaguggaa

SEQ ID NO: 332301 - RNA, 32 nt, Homo Sapiens
uauuuuucauuuaaaugaaaacguaugccuuu

SEQ ID NO: 332302 - RNA, 32 nt, Homo Sapiens
cccacccgagggugggucaccauggcuuugga

SEQ ID NO: 332303 - RNA, 30 nt, Homo Sapiens
ccuguggauaaaaugauaauaucaagguca

SEQ ID NO: 332304 - RNA, 32 nt, Homo Sapiens
caaaaagaauaaagcuaaucauguauuacaaa

SEQ ID NO: 332305 - RNA, 30 nt, Homo Sapiens
agauggagagguggcucugagauuagcauc

SEQ ID NO: 332306 - RNA, 32 nt, Homo Sapiens
cccgagcucaggugaucugcccgccucggacu

SEQ ID NO: 332307 - RNA, 32 nt, Homo Sapiens
aagaaaauauauauguauguauguguguauac

SEQ ID NO: 332308 - RNA, 32 nt, Homo Sapiens
uccggcccgguuucccucggugugcuacugug

SEQ ID NO: 332309 - RNA, 32 nt, Homo Sapiens
cgcgcggcacgggugagugcccagggacuuca

SEQ ID NO: 332310 - RNA, 32 nt, Homo Sapiens
ucgcccugcacccaagcgggacuugcaccaca

SEQ ID NO: 332311 - RNA, 32 nt, Homo Sapiens
uguuugacuuuaagagaccaucugaaaagagu

SEQ ID NO: 332312 - RNA, 32 nt, Homo Sapiens
ugcugcaggugucaaggaaauuguaggagaug

SEQ ID NO: 332313 - RNA, 32 nt, Homo Sapiens
ccugggcucagagaagagccugcuggaccugg

SEQ ID NO: 332314 - RNA, 32 nt, Homo Sapiens
ggggaauuaguauggggaaaaaucacuacaca

SEQ ID NO: 332315 - RNA, 32 nt, Homo Sapiens
acaucaagaaaacggcuuggucuuugaggacu

SEQ ID NO: 332316 - RNA, 32 nt, Homo Sapiens
auuuguaagaucuggugacuggcuuuucguuc

SEQ ID NO: 332317 - RNA, 32 nt, Homo Sapiens
caauauacuguaaucauaaaaguuaugugaau

SEQ ID NO: 332318 - RNA, 32 nt, Homo Sapiens
uauuauuuuccacaacugccuuuacacuugcu

SEQ ID NO: 332319 - RNA, 32 nt, Homo Sapiens
ggugcuggucugagcagacgccuccuuucucu

SEQ ID NO: 332320 - RNA, 32 nt, Homo Sapiens
auuugugccauaggagcugugcaugcaugaug

SEQ ID NO: 332321 - RNA, 32 nt, Homo Sapiens
auaccacagcuauuuagaagcaucaucacgac

SEQ ID NO: 332322 - RNA, 32 nt, Homo Sapiens
guaccuaacuaguaaggggauuuuaaguuugg

SEQ ID NO: 332323 - RNA, 31 nt, Homo Sapiens
uugcuccaaaagacccucugaguuaacguuu

SEQ ID NO: 332324 - RNA, 31 nt, Homo Sapiens
acauacaacauaucaacucacagccaauggg

SEQ ID NO: 332325 - RNA, 32 nt, Homo Sapiens
uuuuaaguucuaugauucauguuuuaaagaug

SEQ ID NO: 332326 - RNA, 32 nt, Homo Sapiens
acugaacuuuauaauguaauguuuauuaagca

SEQ ID NO: 332327 - RNA, 32 nt, Homo Sapiens
aagaggagggauccaucuggguuggucugugg

SEQ ID NO: 332328 - RNA, 32 nt, Homo Sapiens
gggugccaaaaauucuuauaaaugcuuuacau

SEQ ID NO: 332329 - RNA, 32 nt, Homo Sapiens
auggaccaaaacuugaaucacugcaaaaugaa

SEQ ID NO: 332330 - RNA, 32 nt, Homo Sapiens
uccucguccccacccacccccacauuugcaca

SEQ ID NO: 332331 - RNA, 32 nt, Homo Sapiens
aggggcugagauuggauucaccgagccuggug

SEQ ID NO: 332332 - RNA, 32 nt, Homo Sapiens
aaaggcauuucuuuucugcaugaucuaaauaa

SEQ ID NO: 332333 - RNA, 32 nt, Homo Sapiens
cugagauugugcugcugcacuccagccuggga

SEQ ID NO: 332334 - RNA, 32 nt, Homo Sapiens
gcgcgcaccacucuccagccgccccgcgccau

SEQ ID NO: 332335 - RNA, 32 nt, Homo Sapiens
uuuuggaacacuuuuacaauuaaaaauaaagu

SEQ ID NO: 332336 - RNA, 32 nt, Homo Sapiens
cuaauuuuuguauuuuuuuuuaguagagacgg

SEQ ID NO: 332337 - RNA, 32 nt, Homo Sapiens
acuuguuugcuacuuuuauuucuguugauuuu

SEQ ID NO: 332338 - RNA, 32 nt, Homo Sapiens
aaugaggggccucagguuugccugagggcgag

SEQ ID NO: 332339 - RNA, 32 nt, Homo Sapiens
uuuaaaacauucguaugaaaacauuguacaau

SEQ ID NO: 332340 - RNA, 32 nt, Homo Sapiens
cucagagccaggugcuggccagaugccuugau

SEQ ID NO: 332341 - RNA, 32 nt, Homo Sapiens
ccuccaccaaccccgcggcccagacccagccc

SEQ ID NO: 332342 - RNA, 32 nt, Homo Sapiens
uguaguuaggccacgcuucucuguucaguagc

SEQ ID NO: 332343 - RNA, 32 nt, Homo Sapiens
uuaaauuuucccuuccuucugcauuuugaauu

SEQ ID NO: 332344 - RNA, 32 nt, Homo Sapiens
gaggaccauggcguccccggcgcuggcggcgg

SEQ ID NO: 332345 - RNA, 32 nt, Homo Sapiens
cgcuacagagccuggcugaacacgcgucaucu

SEQ ID NO: 332346 - RNA, 32 nt, Homo Sapiens
cuuucccuuuccugcucuggccuccuugaaag

SEQ ID NO: 332347 - RNA, 32 nt, Homo Sapiens
uauaguuuuuaacuuuuuuuuauuuuaauaac

SEQ ID NO: 332348 - RNA, 32 nt, Homo Sapiens
cgggccugggucucgcgcgcguauugcugggu

SEQ ID NO: 332349 - RNA, 32 nt, Homo Sapiens
ucaaaguuuuucucuuuccccaaaagugauga

SEQ ID NO: 332350 - RNA, 32 nt, Homo Sapiens
ccuggcccuggguuaaaauaaaagcuuucugg

SEQ ID NO: 332351 - RNA, 32 nt, Homo Sapiens
uuguagaugugcuuggggagaaugggggccuc

SEQ ID NO: 332352 - RNA, 32 nt, Homo Sapiens
ccaucuuggucccagcucuccacgucuccaac

SEQ ID NO: 332353 - RNA, 32 nt, Homo Sapiens
cauauuaaagugucucuuucugugggugguuu

SEQ ID NO: 332354 - RNA, 32 nt, Homo Sapiens
cuggaggcugaggcuguuuucuuuucuuuguu

SEQ ID NO: 332355 - RNA, 32 nt, Homo Sapiens
ucccgggcagauaacauagaucaucaguagaa

SEQ ID NO: 332356 - RNA, 32 nt, Homo Sapiens
accccagaggcagguccuggccugcugcuuag

SEQ ID NO: 332357 - RNA, 32 nt, Homo Sapiens
cucugaaaucaucuccuauuaagggauagaaa

SEQ ID NO: 332358 - RNA, 32 nt, Homo Sapiens
cauguggaccagaguguuaaugagauguuauu

SEQ ID NO: 332359 - RNA, 32 nt, Homo Sapiens
auuuuaguuucaugagucuuuauuuuuuguua

SEQ ID NO: 332360 - RNA, 32 nt, Homo Sapiens
gucaaagccggcggccucggcuccucagcucc

SEQ ID NO: 332361 - RNA, 32 nt, Homo Sapiens
gagaguugaucuuauucauucuggauacggau

SEQ ID NO: 332362 - RNA, 30 nt, Homo Sapiens
ugauuaccacuugcuccucaauucuguaug

SEQ ID NO: 332363 - RNA, 32 nt, Homo Sapiens
auauuagaaaauguauauuauagaacaugaua

SEQ ID NO: 332364 - RNA, 32 nt, Homo Sapiens
ccugggcucugugggcucccccugcuccacag

SEQ ID NO: 332365 - RNA, 32 nt, Homo Sapiens
accacgcccuccccgcgcgccggcucaggggc

SEQ ID NO: 332366 - RNA, 32 nt, Homo Sapiens
agauaugaaaugguguuugauacuguuugaga

SEQ ID NO: 332367 - RNA, 32 nt, Homo Sapiens
aguuggcauaauucaacuuaugguauaacugg

SEQ ID NO: 332368 - RNA, 32 nt, Homo Sapiens
uuauuuugauucagcaaauuugucaacuaaau

SEQ ID NO: 332369 - RNA, 32 nt, Homo Sapiens
ccuuugugggcgugcugucaggaagaugacag

SEQ ID NO: 332370 - RNA, 32 nt, Homo Sapiens
cuccggcgggugacagcuccgggaucagcaac

SEQ ID NO: 332371 - RNA, 32 nt, Homo Sapiens
uaaucugcugaagaaagaagaauagaagaaaa

SEQ ID NO: 332372 - RNA, 32 nt, Homo Sapiens
agccacuuccguguggccggggccccaggggc

SEQ ID NO: 332373 - RNA, 32 nt, Homo Sapiens
ucuuaccaguaggaaaccggaacuugcuagga

SEQ ID NO: 332374 - RNA, 32 nt, Homo Sapiens
gcccgcuggcagagccgcggguugacgacggu

SEQ ID NO: 332375 - RNA, 32 nt, Homo Sapiens
uccgcgaggugcuggcgccggagcacgcuggg

SEQ ID NO: 332376 - RNA, 31 nt, Homo Sapiens
cagauaaaagugcugugaccauagauaaacu

SEQ ID NO: 332377 - RNA, 32 nt, Homo Sapiens
caggguuguugagggaggggggucuccagguc

SEQ ID NO: 332378 - RNA, 32 nt, Homo Sapiens
aguucugcgcaugcguggcaccauuuccugcg

SEQ ID NO: 332379 - RNA, 32 nt, Homo Sapiens
uugguuuuuuuuuuuuuuuuuaagguaaaaaa

SEQ ID NO: 332380 - RNA, 32 nt, Homo Sapiens
accucuugccagcaguagcagggcugcccacg

SEQ ID NO: 332381 - RNA, 32 nt, Homo Sapiens
ccugaaagccccaugagaaaaauaaaacaccu

SEQ ID NO: 332382 - RNA, 32 nt, Homo Sapiens
aucauguucuguacaaauuccauccuucgaga

SEQ ID NO: 332383 - RNA, 32 nt, Homo Sapiens
ggccggagugcaguggcaugaucaugguucac

SEQ ID NO: 332384 - RNA, 32 nt, Homo Sapiens
uaguggagcgcugagggcuugguggcgugggg

SEQ ID NO: 332385 - RNA, 32 nt, Homo Sapiens
cgggucuccgaguucgacgucuacuucgaggg

SEQ ID NO: 332386 - RNA, 32 nt, Homo Sapiens
ggcuggagugcaguggcaugaucauggcucac

SEQ ID NO: 332387 - RNA, 32 nt, Homo Sapiens
ccccugcuuucugcagugccccacgcgguuuu

SEQ ID NO: 332388 - RNA, 32 nt, Homo Sapiens
uggguugcugucuucuggccuccagcugcaug

SEQ ID NO: 332389 - RNA, 32 nt, Homo Sapiens
gcucucccuggcuagauccucaucucaauagc

SEQ ID NO: 332390 - RNA, 32 nt, Homo Sapiens
aaaauacaauuuauuuugcuuaccauacaccc

SEQ ID NO: 332391 - RNA, 32 nt, Homo Sapiens
ugguguacuguaaugugaaucuaugcugguga

SEQ ID NO: 332392 - RNA, 32 nt, Homo Sapiens
guuaauuucugggcugcugagguucuagaaua

SEQ ID NO: 332393 - RNA, 32 nt, Homo Sapiens
caccugaccccuucucaacucuguacauggac

SEQ ID NO: 332394 - RNA, 32 nt, Homo Sapiens
uguuaaagaagagcuugaugugguagaagaau

SEQ ID NO: 332395 - RNA, 32 nt, Homo Sapiens
ccuggcgggcuagcuuggguguccugccagug

SEQ ID NO: 332396 - RNA, 30 nt, Homo Sapiens
caggccugcaggcgcguccccgcuccucag

SEQ ID NO: 332397 - RNA, 32 nt, Homo Sapiens
ccgccccaccgcauccuucucggagcuggugc

SEQ ID NO: 332398 - RNA, 32 nt, Homo Sapiens
cucuaaccccggacgcacuuugauuucgccgg

SEQ ID NO: 332399 - RNA, 32 nt, Homo Sapiens
gaaggacgaggcagagcuccgcgcugacgaaa

SEQ ID NO: 332400 - RNA, 32 nt, Homo Sapiens
guaauaagaguaccuuaaauuuaauauuaagg

SEQ ID NO: 332401 - RNA, 32 nt, Homo Sapiens
uggggagggcccauuccauccaucuuaggccc

SEQ ID NO: 332402 - RNA, 32 nt, Homo Sapiens
caaaccaaccuugagcugggagguacgugcuc

SEQ ID NO: 332403 - RNA, 32 nt, Homo Sapiens
uguucgugaacagcuguuuggcccauagcuua

SEQ ID NO: 332404 - RNA, 32 nt, Homo Sapiens
gcugggcgcgguggugcacaccuauagucuca

SEQ ID NO: 332405 - RNA, 32 nt, Homo Sapiens
gaaggggaaggggauuucucacuucaauuaua

SEQ ID NO: 332406 - RNA, 32 nt, Homo Sapiens
ggcuagaagguucagccuuuauucugaugaug

SEQ ID NO: 332407 - RNA, 32 nt, Homo Sapiens
agucuccuaccucccccaacccugcccgcccc

SEQ ID NO: 332408 - RNA, 32 nt, Homo Sapiens
aauguuucuuuuucuuuuuugagugugcaaua

SEQ ID NO: 332409 - RNA, 32 nt, Homo Sapiens
gggcccagccaucccccuccccccagcaccca

SEQ ID NO: 332410 - RNA, 32 nt, Homo Sapiens
caaauaaaacaucacucagcacgugggaaaaa

SEQ ID NO: 332411 - RNA, 32 nt, Homo Sapiens
ggcugaggcagacaauggcuugaaccugggag

SEQ ID NO: 332412 - RNA, 32 nt, Homo Sapiens
aggggaaugaccaggcagccacagggaggaca

SEQ ID NO: 332413 - RNA, 32 nt, Homo Sapiens
uccaugagcuucugcuggacucacagccuuga

SEQ ID NO: 332414 - RNA, 32 nt, Homo Sapiens
ggucaugcugucaaaaucauggacaaaggcug

SEQ ID NO: 332415 - RNA, 32 nt, Homo Sapiens
agaagaucuauuuuaaacagucuaaauauuuu

SEQ ID NO: 332416 - RNA, 27 nt, Homo Sapiens
cuaugaauaaaacuauuuuaucuucug

SEQ ID NO: 332417 - RNA, 32 nt, Homo Sapiens
gccauuguacuccagccugggcgacagagcaa

SEQ ID NO: 332418 - RNA, 32 nt, Homo Sapiens
gguccucuggggucagaccccugcacgggaca

SEQ ID NO: 332419 - RNA, 32 nt, Homo Sapiens
gaaugaauuuucuauuuguaaauauacucugu

SEQ ID NO: 332420 - RNA, 32 nt, Homo Sapiens
accuggaggagccuaccuggggccugccccug

SEQ ID NO: 332421 - RNA, 32 nt, Homo Sapiens
cagccauguaggcaggccugcagaccuuggcc

SEQ ID NO: 332422 - RNA, 32 nt, Homo Sapiens
uauuuauugcaagaccaccagcuccuggaagc

SEQ ID NO: 332423 - RNA, 32 nt, Homo Sapiens
uagguguucugaagauaaaugccaaaaauuuc

SEQ ID NO: 332424 - RNA, 32 nt, Homo Sapiens
aucccuuugccaaaugcaugaguugcagacuu

SEQ ID NO: 332425 - RNA, 32 nt, Homo Sapiens
caagagcuccgucuccgucucgcccuccucga

SEQ ID NO: 332426 - RNA, 32 nt, Homo Sapiens
aaucauaguauccuaagcaucuguaaaugcua

SEQ ID NO: 332427 - RNA, 31 nt, Homo Sapiens
acucugggucuaacggaguccacuccugggc

SEQ ID NO: 332428 - RNA, 32 nt, Homo Sapiens
ugagagagaacaaauggcuguggguacauggg

SEQ ID NO: 332429 - RNA, 32 nt, Homo Sapiens
acucggcccagcuggguaaccugcucaaguuc

SEQ ID NO: 332430 - RNA, 32 nt, Homo Sapiens
aacuugggauguuuucugagggaugcugaaua

SEQ ID NO: 332431 - RNA, 32 nt, Homo Sapiens
uuuuuacuguauauugcuuuuacaauaaauau

SEQ ID NO: 332432 - RNA, 32 nt, Homo Sapiens
ggggauucguggggcucacuucaucagaguuu

SEQ ID NO: 332433 - RNA, 32 nt, Homo Sapiens
auuaaaauuagugcuguaaaucagggugggca

SEQ ID NO: 332434 - RNA, 32 nt, Homo Sapiens
augcugguucguagauugauacguguuagucc

SEQ ID NO: 332435 - RNA, 32 nt, Homo Sapiens
aauuugguuuucacauuggaaacaagucaguc

SEQ ID NO: 332436 - RNA, 32 nt, Homo Sapiens
agucuuuugucaucaaggaggcaaauugucuc

SEQ ID NO: 332437 - RNA, 32 nt, Homo Sapiens
accuugcuaucugcaccaggaggcucuccacc

SEQ ID NO: 332438 - RNA, 32 nt, Homo Sapiens
acacuguccacaauucaaaucuguauucaaaa

SEQ ID NO: 332439 - RNA, 32 nt, Homo Sapiens
ggcuauugcacauagugaaucuguaagagaau

SEQ ID NO: 332440 - RNA, 32 nt, Homo Sapiens
acaucugggguggaaguuuuguagccacacac

SEQ ID NO: 332441 - RNA, 32 nt, Homo Sapiens
acugucauccccaccccaccccuaccucacgc

SEQ ID NO: 332442 - RNA, 32 nt, Homo Sapiens
ccuucccuccgcaggacgagauugaggagcug

SEQ ID NO: 332443 - RNA, 32 nt, Homo Sapiens
ccacacagugugauuucuuuagcagagaaagu

SEQ ID NO: 332444 - RNA, 32 nt, Homo Sapiens
cgagcuccccccaccccaagcucugcuggagc

SEQ ID NO: 332445 - RNA, 32 nt, Homo Sapiens
ggcuggucucaaaauccugaccucaagucauc

SEQ ID NO: 332446 - RNA, 32 nt, Homo Sapiens
uuugacuuuuucuggacccuggugucuacgau

SEQ ID NO: 332447 - RNA, 32 nt, Homo Sapiens
guauucaggacacuaaggcaggaggaccacau

SEQ ID NO: 332448 - RNA, 32 nt, Homo Sapiens
aguaucuguauauaaguugcugugugucuguc

SEQ ID NO: 332449 - RNA, 32 nt, Homo Sapiens
aggccaaggacacguggaaagaggcucaauuu

SEQ ID NO: 332450 - RNA, 32 nt, Homo Sapiens
agccagucagaggaggaggagaaggagccccu

SEQ ID NO: 332451 - RNA, 32 nt, Homo Sapiens
auaaguacaacacuccauuuaguguuuugcca

SEQ ID NO: 332452 - RNA, 32 nt, Homo Sapiens
gucagcgccgcgccgcgccacccggcugaguc

SEQ ID NO: 332453 - RNA, 32 nt, Homo Sapiens
cggaaccuagagaggcuggggguggggagccg

SEQ ID NO: 332454 - RNA, 32 nt, Homo Sapiens
caaaggggagucugggggagaaugguaguauu

SEQ ID NO: 332455 - RNA, 30 nt, Homo Sapiens
auaggaacggcccagaucgcccucaugagu

SEQ ID NO: 332456 - RNA, 32 nt, Homo Sapiens
augggaggcuccugggauguuuggaagaagaa

SEQ ID NO: 332457 - RNA, 32 nt, Homo Sapiens
agucacaauuuaacuagguuuuguguugaaaa

SEQ ID NO: 332458 - RNA, 32 nt, Homo Sapiens
agggggagggagaggccggacacaagcucaag

SEQ ID NO: 332459 - RNA, 32 nt, Homo Sapiens
uuuccaggacccccucggggcccugagccggg

SEQ ID NO: 332460 - RNA, 32 nt, Homo Sapiens
aaagauuuaaacaguucccaccucucuccacc

SEQ ID NO: 332461 - RNA, 32 nt, Homo Sapiens
uguucccccuccccaguuuuccaaagugucug

SEQ ID NO: 332462 - RNA, 32 nt, Homo Sapiens
aggucacuguccccgcuucggccugaaggaaa

SEQ ID NO: 332463 - RNA, 32 nt, Homo Sapiens
cccugccagaauccggcccccacagcucucac

SEQ ID NO: 332464 - RNA, 32 nt, Homo Sapiens
cacuagaaagagacuauauuugcuuuaaaauu

SEQ ID NO: 332465 - RNA, 32 nt, Homo Sapiens
accucccuuggagguagagaucaugaacccau

SEQ ID NO: 332466 - RNA, 32 nt, Homo Sapiens
ugcugcucucccagggacugcccgcccagccc

SEQ ID NO: 332467 - RNA, 32 nt, Homo Sapiens
cgaccgcuuuccccuaccucccggcccccgcu

SEQ ID NO: 332468 - RNA, 32 nt, Homo Sapiens
guuuuguuuuguuuuucuugaugguuucccuc

SEQ ID NO: 332469 - RNA, 32 nt, Homo Sapiens
agcaaaucccccgaggggagaaguccaggcug

SEQ ID NO: 332470 - RNA, 32 nt, Homo Sapiens
cacuuguauguggccaugaggugaagcaaagg

SEQ ID NO: 332471 - RNA, 32 nt, Homo Sapiens
aguuaauagauauuuuaguggauaaucuguca

SEQ ID NO: 332472 - RNA, 32 nt, Homo Sapiens
gccugguggaggaggagacguaguggccuggg

SEQ ID NO: 332473 - RNA, 32 nt, Homo Sapiens
guccacuuucugguuucuuuuauugugggaag

SEQ ID NO: 332474 - RNA, 32 nt, Homo Sapiens
gcgugacgcucccggacgcgagugggugugga

SEQ ID NO: 332475 - RNA, 32 nt, Homo Sapiens
aaagaggugggaaggcagagcaucaggaggga

SEQ ID NO: 332476 - RNA, 32 nt, Homo Sapiens
ucgccuuguucccucuucucucucuucaugaa

SEQ ID NO: 332477 - RNA, 32 nt, Homo Sapiens
gggcacuuuccaccaacacucuaaacucuacu

SEQ ID NO: 332478 - RNA, 32 nt, Homo Sapiens
ucaugauacuguucuccucaucuacugcuuau

SEQ ID NO: 332479 - RNA, 32 nt, Homo Sapiens
ugucaccccauccccaggaaacuguagcuucu

SEQ ID NO: 332480 - RNA, 32 nt, Homo Sapiens
uugaggucaggaguuugagaccagccuggaca

SEQ ID NO: 332481 - RNA, 32 nt, Homo Sapiens
auguuauaguuucuuucuuucuuucuuucuuu

SEQ ID NO: 332482 - RNA, 32 nt, Homo Sapiens
aauggacauuuuuucuuaauuuauguauaaau

SEQ ID NO: 332483 - RNA, 32 nt, Homo Sapiens
gcggcggaggauggaggaaggaggcggcggcg

SEQ ID NO: 332484 - RNA, 32 nt, Homo Sapiens
uguaaucagggggaauuaaagagccuuccugg

SEQ ID NO: 332485 - RNA, 32 nt, Homo Sapiens
cugcuuuugcugcugcugcuccuccguaucug

SEQ ID NO: 332486 - RNA, 32 nt, Homo Sapiens
gaauuuguuggacuuuuaaaaaaccaguugga

SEQ ID NO: 332487 - RNA, 32 nt, Homo Sapiens
gccacugcauuccagcuugggcgacagagcga

SEQ ID NO: 332488 - RNA, 32 nt, Homo Sapiens
ucaagcuaauuuucuuuuucugaagccucuaa

SEQ ID NO: 332489 - RNA, 31 nt, Homo Sapiens
uaaaaugcaaggucucuggaccucagggcag

SEQ ID NO: 332490 - RNA, 32 nt, Homo Sapiens
uucugcacaggucugcaaaaacaaaaauuaua

SEQ ID NO: 332491 - RNA, 32 nt, Homo Sapiens
cagcagcagacagggucuccagagcacacgac

SEQ ID NO: 332492 - RNA, 32 nt, Homo Sapiens
ccuuugcgccgccccaggugcccgccccuagc

SEQ ID NO: 332493 - RNA, 32 nt, Homo Sapiens
guguaacuaaagcacuaacaaaaacaugaaua

SEQ ID NO: 332494 - RNA, 32 nt, Homo Sapiens
uggcacaaggaucagaauaaaggugaauugcu

SEQ ID NO: 332495 - RNA, 32 nt, Homo Sapiens
ggaauaacuuuuugguugcaaaacagagacau

SEQ ID NO: 332496 - RNA, 32 nt, Homo Sapiens
aaaccuguggggggcguuccaguguucucuga

SEQ ID NO: 332497 - RNA, 32 nt, Homo Sapiens
auguuuuguaguuuucuggauagagguguuac

SEQ ID NO: 332498 - RNA, 32 nt, Homo Sapiens
uuacuguuucaccagagcugucuuagcucaaa

SEQ ID NO: 332499 - RNA, 32 nt, Homo Sapiens
augcccggugugaugcuuuacacucuacaaag

SEQ ID NO: 332500 - RNA, 32 nt, Homo Sapiens
augcacuacuaauaauacauggcuuauuccaa

SEQ ID NO: 332501 - RNA, 32 nt, Homo Sapiens
ugccgccgggaaagauggucguggcgcugcgg

SEQ ID NO: 332502 - RNA, 32 nt, Homo Sapiens
ccccgagcccucgcggcaggcccgagcaggcg

SEQ ID NO: 332503 - RNA, 32 nt, Homo Sapiens
gaaggucagcagauaaacaagugaacaaaggu

SEQ ID NO: 332504 - RNA, 32 nt, Homo Sapiens
auauggaguaauuuaaacaguaaauaaacauu

SEQ ID NO: 332505 - RNA, 32 nt, Homo Sapiens
caacuccagacaccauacaaagggagaugaug

SEQ ID NO: 332506 - RNA, 28 nt, Homo Sapiens
cuauuaguuacaguggcaagauuauuua

SEQ ID NO: 332507 - RNA, 32 nt, Homo Sapiens
cagcuuguucuucuucagucaguccggccuca

SEQ ID NO: 332508 - RNA, 32 nt, Homo Sapiens
uuaagcuggcggugcugcuggugacgcuggug

SEQ ID NO: 332509 - RNA, 32 nt, Homo Sapiens
gaccagagcagccagcagauguuuucaauuuu

SEQ ID NO: 332510 - RNA, 32 nt, Homo Sapiens
gguggccuccauguccacgcgccgggcccggg

SEQ ID NO: 332511 - RNA, 32 nt, Homo Sapiens
cuccagccguggccgauggccgugccgggggc

SEQ ID NO: 332512 - RNA, 32 nt, Homo Sapiens
cauagcccugguacaugguacacacaccccca

SEQ ID NO: 332513 - RNA, 32 nt, Homo Sapiens
caggcuggagagcgguggcgcgaucucggcuc

SEQ ID NO: 332514 - RNA, 32 nt, Homo Sapiens
uaaaacuguucuaaaauagaaagucugugaaa

SEQ ID NO: 332515 - RNA, 32 nt, Homo Sapiens
gagcaaagcugaugacaacuucccagugaauu

SEQ ID NO: 332516 - RNA, 32 nt, Homo Sapiens
ucugcccugcugcacugccuccccuaaccaaa

SEQ ID NO: 332517 - RNA, 32 nt, Homo Sapiens
gacagcugcccccaacagguucuagaaacacg

SEQ ID NO: 332518 - RNA, 32 nt, Homo Sapiens
cucucggguagaaccuagugaaacgccagaau

SEQ ID NO: 332519 - RNA, 32 nt, Homo Sapiens
uucuuuggugauuucuuuuuuaucuauuuguu

SEQ ID NO: 332520 - RNA, 32 nt, Homo Sapiens
agcuggucuugaacucuugaccucaagugauc

SEQ ID NO: 332521 - RNA, 32 nt, Homo Sapiens
auuacaguuguauaaagaaauaaaauuuugua

SEQ ID NO: 332522 - RNA, 32 nt, Homo Sapiens
ugggucaucagacaguaggaaauauuuguaau

SEQ ID NO: 332523 - RNA, 32 nt, Homo Sapiens
gacaacucacucaggcaucuucuuucucuaaa

SEQ ID NO: 332524 - RNA, 32 nt, Homo Sapiens
cagguuucaauccucccaauaccacaagacag

SEQ ID NO: 332525 - RNA, 32 nt, Homo Sapiens
agggugugaaccucaccuccuggggcuuccga

SEQ ID NO: 332526 - RNA, 32 nt, Homo Sapiens
acugccccucagagccgaugugagcaccccac

SEQ ID NO: 332527 - RNA, 32 nt, Homo Sapiens
cuggauuguacuuugugcugggguuaucugaa

SEQ ID NO: 332528 - RNA, 32 nt, Homo Sapiens
uguccggcggccccagcuccagcccagccagc

SEQ ID NO: 332529 - RNA, 32 nt, Homo Sapiens
ggcaggugguggccauuggucacuuaguuugg

SEQ ID NO: 332530 - RNA, 32 nt, Homo Sapiens
aagaaaaaaguaaaccacaaggagaugacuua

SEQ ID NO: 332531 - RNA, 32 nt, Homo Sapiens
guugauaauaauaaaaucacuuacuugguuga

SEQ ID NO: 332532 - RNA, 32 nt, Homo Sapiens
gugccagaguguauauaugaaauaaccuuaua

SEQ ID NO: 332533 - RNA, 32 nt, Homo Sapiens
aauguaaacaauuaaauguuuauagcagcugc

SEQ ID NO: 332534 - RNA, 30 nt, Homo Sapiens
agcaagcgggagugccaccagucaggcccc

SEQ ID NO: 332535 - RNA, 32 nt, Homo Sapiens
gggugccaagccagagaaggagggauugauuc

SEQ ID NO: 332536 - RNA, 32 nt, Homo Sapiens
ggaaauccagcaugugugccaucugcaagguu

SEQ ID NO: 332537 - RNA, 32 nt, Homo Sapiens
gucaaggcagggcacaguggcucauaccugua

SEQ ID NO: 332538 - RNA, 32 nt, Homo Sapiens
aaggcaggcagacagaaauaaugauguuuucu

SEQ ID NO: 332539 - RNA, 32 nt, Homo Sapiens
gacuccaccaucucccuucucaucuagaauaa

SEQ ID NO: 332540 - RNA, 31 nt, Homo Sapiens
aguauuuuuuggccauugucaguguacaagu

SEQ ID NO: 332541 - RNA, 32 nt, Homo Sapiens
cuuggguugaguaugacaaacauaaucacauu

SEQ ID NO: 332542 - RNA, 32 nt, Homo Sapiens
ugcucuugacuucugagcagggcuuagagagc

SEQ ID NO: 332543 - RNA, 32 nt, Homo Sapiens
ccgcgcggcccggguccguaggcggcggggcg

SEQ ID NO: 332544 - RNA, 32 nt, Homo Sapiens
cacaggaagcgagagagcugcugccacugcug

SEQ ID NO: 332545 - RNA, 32 nt, Homo Sapiens
gcacuucugucccaccagcaucagaccaggcc

SEQ ID NO: 332546 - RNA, 32 nt, Homo Sapiens
aagccgcgcggccggccggccgacuaggguuu

SEQ ID NO: 332547 - RNA, 32 nt, Homo Sapiens
gaguccaguuccuaaaagauuauuucagaguc

SEQ ID NO: 332548 - RNA, 32 nt, Homo Sapiens
gugauaucuguaucuuuucucuaaucagagau

SEQ ID NO: 332549 - RNA, 32 nt, Homo Sapiens
aaauguuauuaaggaaguaauauauucacuau

SEQ ID NO: 332550 - RNA, 32 nt, Homo Sapiens
ucagauugaagauaagccaaguucaucacuga

SEQ ID NO: 332551 - RNA, 32 nt, Homo Sapiens
guuacaugggccuguuaacauggcagcuuugu

SEQ ID NO: 332552 - RNA, 32 nt, Homo Sapiens
guccacagaccacugcauggugcuucgucacc

SEQ ID NO: 332553 - RNA, 32 nt, Homo Sapiens
ccagcagcccgugggcaggcgcggcggagcga

SEQ ID NO: 332554 - RNA, 32 nt, Homo Sapiens
ccuuguuuuuauuacguuuccuuuuucaaacu

SEQ ID NO: 332555 - RNA, 32 nt, Homo Sapiens
uaguuacaaaaauaauuuaaggugaaaucucu

SEQ ID NO: 332556 - RNA, 32 nt, Homo Sapiens
aagcauuuuuucaacuaaccaugaauuaagau

SEQ ID NO: 332557 - RNA, 32 nt, Homo Sapiens
ugccauuuuauuucuuuuugauuuuuaaauca

SEQ ID NO: 332558 - RNA, 32 nt, Homo Sapiens
ugcuaggggcaggcccuuggauggugccugug

SEQ ID NO: 332559 - RNA, 32 nt, Homo Sapiens
gagcugugugccuccacuccaaggcugccugc

SEQ ID NO: 332560 - RNA, 32 nt, Homo Sapiens
cccgcuucccauuucucaaaccccgcucugcc

SEQ ID NO: 332561 - RNA, 30 nt, Homo Sapiens
ugcuuccauuuaauggggugcaccugucca

SEQ ID NO: 332562 - RNA, 30 nt, Homo Sapiens
aggcuggcgcccgauucuucugcacugcgg

SEQ ID NO: 332563 - RNA, 32 nt, Homo Sapiens
aaaaugucuaaccuguugucuuucuguuacuu

SEQ ID NO: 332564 - RNA, 30 nt, Homo Sapiens
ucugcaguuuauuacuacaagcaguggcag

SEQ ID NO: 332565 - RNA, 32 nt, Homo Sapiens
gccgcuacaaaaagguaaaacuuuuuauauuu

SEQ ID NO: 332566 - RNA, 32 nt, Homo Sapiens
uccuaaaaaugaauaaaauuuaugaauaugac

SEQ ID NO: 332567 - RNA, 32 nt, Homo Sapiens
gcgcaaggacaaucucaaccugcacaagaagc

SEQ ID NO: 332568 - RNA, 32 nt, Homo Sapiens
agcaguuaaauaacaauaaauaugacguuaau

SEQ ID NO: 332569 - RNA, 32 nt, Homo Sapiens
acugagaguccuccauugcaucuuccagcugc

SEQ ID NO: 332570 - RNA, 32 nt, Homo Sapiens
acucaggcauuugacugaagaugcagcucacu

SEQ ID NO: 332571 - RNA, 32 nt, Homo Sapiens
uaguaccaucucccccgccaauaaaaaagaga

SEQ ID NO: 332572 - RNA, 32 nt, Homo Sapiens
cucucucugcugucaccgccacacagaagaag

SEQ ID NO: 332573 - RNA, 32 nt, Homo Sapiens
ggcgcgcggcgagcugaggguggcggcggucg

SEQ ID NO: 332574 - RNA, 32 nt, Homo Sapiens
auauuuagacuuuuuguuguuguuguuguuuu

SEQ ID NO: 332575 - RNA, 32 nt, Homo Sapiens
augucccuuccccucccuccccuggucccaca

SEQ ID NO: 332576 - RNA, 32 nt, Homo Sapiens
gugggggcaaggaaauuagcugagauucaucu

SEQ ID NO: 332577 - RNA, 32 nt, Homo Sapiens
ugggauguggccugggacugcugcucugcugg

SEQ ID NO: 332578 - RNA, 32 nt, Homo Sapiens
ucuauuuuuuaaaauacaagaauuagccgcag

SEQ ID NO: 332579 - RNA, 32 nt, Homo Sapiens
gaaaaagacacuguauuauuuaccaaaggggu

SEQ ID NO: 332580 - RNA, 32 nt, Homo Sapiens
aaaggaaaaucgugguugaguuucacugcagc

SEQ ID NO: 332581 - RNA, 32 nt, Homo Sapiens
gagcggcuugaggacgaggcggcggccgcggg

SEQ ID NO: 332582 - RNA, 32 nt, Homo Sapiens
aaaagcccuggccggucauuccaggucagcag

SEQ ID NO: 332583 - RNA, 32 nt, Homo Sapiens
gaguuucuuaacccuuuccagaguccuccuuu

SEQ ID NO: 332584 - RNA, 32 nt, Homo Sapiens
caugcagagaaggauggugauauuuuaggcca

SEQ ID NO: 332585 - RNA, 32 nt, Homo Sapiens
gagagagcgucccaucuguccuggaaagccug

SEQ ID NO: 332586 - RNA, 32 nt, Homo Sapiens
ccugcagcccccagcccuccccacccagguuu

SEQ ID NO: 332587 - RNA, 32 nt, Homo Sapiens
cacugggugagaguggggagggggcauuggcc

SEQ ID NO: 332588 - RNA, 32 nt, Homo Sapiens
gggucgcgcgcccacgaugcugcagggcccug

SEQ ID NO: 332589 - RNA, 32 nt, Homo Sapiens
guacugagaugaaucuaauuuuuagauugccc

SEQ ID NO: 332590 - RNA, 32 nt, Homo Sapiens
uaagucugucuccuuacagagguuaaagucua

SEQ ID NO: 332591 - RNA, 32 nt, Homo Sapiens
auacucuaagcaauagagagcuucaugacuga

SEQ ID NO: 332592 - RNA, 30 nt, Homo Sapiens
augaauugcugugcugcaaagccaaacagc

SEQ ID NO: 332593 - RNA, 32 nt, Homo Sapiens
aggccagagucccagcuguccuggacucugcu

SEQ ID NO: 332594 - RNA, 32 nt, Homo Sapiens
agaaaaaaaaagacauuaagucucauacaguu

SEQ ID NO: 332595 - RNA, 32 nt, Homo Sapiens
cauccuguucucggggacccugcgcaugaacc

SEQ ID NO: 332596 - RNA, 29 nt, Homo Sapiens
cuguauauguguauguauuuuguggagaa

SEQ ID NO: 332597 - RNA, 32 nt, Homo Sapiens
agccgagccggggcucccguugcgcugcaccg

SEQ ID NO: 332598 - RNA, 32 nt, Homo Sapiens
ugaaugugugccccgcugcugucuggggggau

SEQ ID NO: 332599 - RNA, 32 nt, Homo Sapiens
agagacguguuccauuauucugcuggaacaug

SEQ ID NO: 332600 - RNA, 32 nt, Homo Sapiens
aagacaguuugcaagagaagugguguacagga

SEQ ID NO: 332601 - RNA, 32 nt, Homo Sapiens
aacgaugugacugccaucaucuucgugguggc

SEQ ID NO: 332602 - RNA, 32 nt, Homo Sapiens
uaauuaaaaaauauacgaaacuuugcuugggg

SEQ ID NO: 332603 - RNA, 32 nt, Homo Sapiens
caauggcuccagcuggaacaagagguggugug

SEQ ID NO: 332604 - RNA, 32 nt, Homo Sapiens
ccguuggcgaggggcggggcagauggcgaggg

SEQ ID NO: 332605 - RNA, 32 nt, Homo Sapiens
ugacacugggucccugucaucuccaugggaac

SEQ ID NO: 332606 - RNA, 32 nt, Homo Sapiens
gagagcucuaaagcagaguaagauuacguucu

SEQ ID NO: 332607 - RNA, 32 nt, Homo Sapiens
gaaugagaugcauuaauaagaaccugagcaug

SEQ ID NO: 332608 - RNA, 32 nt, Homo Sapiens
ucccguauuuuguaguggaguucauaucacau

SEQ ID NO: 332609 - RNA, 32 nt, Homo Sapiens
caggagacccaacccuuagauuucauaaguac

SEQ ID NO: 332610 - RNA, 32 nt, Homo Sapiens
aaaacugugaauggggaaugcugacugacaaa

SEQ ID NO: 332611 - RNA, 32 nt, Homo Sapiens
cuaaaugacugcgggccaugggcucacccuuu

SEQ ID NO: 332612 - RNA, 32 nt, Homo Sapiens
agcacucuugucacuguguuacacuuaugcau

SEQ ID NO: 332613 - RNA, 32 nt, Homo Sapiens
aaaauacaaaaauuaacugggcguggugguag

SEQ ID NO: 332614 - RNA, 32 nt, Homo Sapiens
uuuccaugcugagugaaaacuaaccaaguggc

SEQ ID NO: 332615 - RNA, 32 nt, Homo Sapiens
caaaucagagauguuauuuuagaaucgauucc

SEQ ID NO: 332616 - RNA, 32 nt, Homo Sapiens
ucucguccaaguacacauuuuggaacuuuaua

SEQ ID NO: 332617 - RNA, 32 nt, Homo Sapiens
uguugggagacggguguccuuuacccgcggga

SEQ ID NO: 332618 - RNA, 32 nt, Homo Sapiens
accuuuggccuggggcagcugcaggagcgcug

SEQ ID NO: 332619 - RNA, 32 nt, Homo Sapiens
aaagaaagggaaguagaaguaggauuuaacaa

SEQ ID NO: 332620 - RNA, 32 nt, Homo Sapiens
guggggugcugcgccucugcgggaguacuggg

SEQ ID NO: 332621 - RNA, 32 nt, Homo Sapiens
aaauugucuagaauucaggugcaggucuuugc

SEQ ID NO: 332622 - RNA, 32 nt, Homo Sapiens
ggcuccagggcuggcucugguguuuacaagcu

SEQ ID NO: 332623 - RNA, 32 nt, Homo Sapiens
caccucccgggugugggcagggggcggaggcu

SEQ ID NO: 332624 - RNA, 32 nt, Homo Sapiens
gcccuccaacaugguccauauguuaaaauaca

SEQ ID NO: 332625 - RNA, 32 nt, Homo Sapiens
ucagauucccccaaauacagcaccuucuccug

SEQ ID NO: 332626 - RNA, 28 nt, Homo Sapiens
agggaggaaauuuaacauuuccuuuguc

SEQ ID NO: 332627 - RNA, 32 nt, Homo Sapiens
uuucaggcagccagcucuuccucacccacuac

SEQ ID NO: 332628 - RNA, 32 nt, Homo Sapiens
ccccgcgcgcgucccucuuccuccucauacuu

SEQ ID NO: 332629 - RNA, 32 nt, Homo Sapiens
cugauaaacaaauggaagugugcaauuaaaaa

SEQ ID NO: 332630 - RNA, 32 nt, Homo Sapiens
gggaaggggaggggcgcggcgcggcgacucgg

SEQ ID NO: 332631 - RNA, 32 nt, Homo Sapiens
agaauggggugagcagccaccauuccaccagc

SEQ ID NO: 332632 - RNA, 32 nt, Homo Sapiens
gguaaauaagauguuuuuuacaccuacugcca

SEQ ID NO: 332633 - RNA, 30 nt, Homo Sapiens
gaucccgccgcgcagcauccguggggacca

SEQ ID NO: 332634 - RNA, 32 nt, Homo Sapiens
gauaucucauuucuacgugaaaagaaguuaua

SEQ ID NO: 332635 - RNA, 32 nt, Homo Sapiens
gacaugcagacaccccagcuuuugagggugcu

SEQ ID NO: 332636 - RNA, 32 nt, Homo Sapiens
cguccgcgccgggauggugaaccuggcggcca

SEQ ID NO: 332637 - RNA, 32 nt, Homo Sapiens
uuuuuuacuuuuuucuucuuggcuaauucuug

SEQ ID NO: 332638 - RNA, 32 nt, Homo Sapiens
uugguaagcuguguuagucauguaucaguuca

SEQ ID NO: 332639 - RNA, 32 nt, Homo Sapiens
auagcuauugccaaagugaagguguagauaau

SEQ ID NO: 332640 - RNA, 32 nt, Homo Sapiens
gcaggcgccccgggcagauccgggccacaugu

SEQ ID NO: 332641 - RNA, 32 nt, Homo Sapiens
guggccucccaacucaccccagccccaaaacu

SEQ ID NO: 332642 - RNA, 32 nt, Homo Sapiens
gucucugagcccuguuaucccucccccaugac

SEQ ID NO: 332643 - RNA, 32 nt, Homo Sapiens
ccgaggucaggagaucgagaccauccuggcua

SEQ ID NO: 332644 - RNA, 32 nt, Homo Sapiens
ugucagcagacaccaaaccaucugaggcuucc

SEQ ID NO: 332645 - RNA, 32 nt, Homo Sapiens
aagaagcgccaucucccgccuccaccauggag

SEQ ID NO: 332646 - RNA, 32 nt, Homo Sapiens
ugugugugugugugucucacacacacagcgcg

SEQ ID NO: 332647 - RNA, 32 nt, Homo Sapiens
acaggugcggccuggcccggccuccuaaaggc

SEQ ID NO: 332648 - RNA, 32 nt, Homo Sapiens
ggauaaucugucaucugacauccaguauaagu

SEQ ID NO: 332649 - RNA, 32 nt, Homo Sapiens
gagccaccaaagucacauccacaacuaaugag

SEQ ID NO: 332650 - RNA, 32 nt, Homo Sapiens
uagucauuugguuuuucuuaaaaaguugagau

SEQ ID NO: 332651 - RNA, 32 nt, Homo Sapiens
ggcggcggccauggcccggcuggcugacuacu

SEQ ID NO: 332652 - RNA, 32 nt, Homo Sapiens
gaauuauuacuuugauuugggcauuuccugau

SEQ ID NO: 332653 - RNA, 32 nt, Homo Sapiens
uuuuaaauaaagaaacaaaugcaccugcaaaa

SEQ ID NO: 332654 - RNA, 32 nt, Homo Sapiens
gacacuuuucuuucccagccgaaaagccuauu

SEQ ID NO: 332655 - RNA, 32 nt, Homo Sapiens
uauuguauaguauuuaaccgcugaaguuccua

SEQ ID NO: 332656 - RNA, 32 nt, Homo Sapiens
agugaguucuuuguagaucuuauacaugcaca

SEQ ID NO: 332657 - RNA, 32 nt, Homo Sapiens
cauucuaacagcagcaccuugucggaccgaag

SEQ ID NO: 332658 - RNA, 31 nt, Homo Sapiens
ggaaugcugugcauucucagagcucuguuag

SEQ ID NO: 332659 - RNA, 32 nt, Homo Sapiens
aaaccccgucucuaccaaaaauaaaaauaaaa

SEQ ID NO: 332660 - RNA, 32 nt, Homo Sapiens
gccauccuggcggagcccugcugcaggggagc

SEQ ID NO: 332661 - RNA, 32 nt, Homo Sapiens
gacccauccccucccccuucucgcaccccugg

SEQ ID NO: 332662 - RNA, 32 nt, Homo Sapiens
ccagaugccacucugcagguugcaauaacuac

SEQ ID NO: 332663 - RNA, 32 nt, Homo Sapiens
uggugacccuccccucuguagucuuuguuuuu

SEQ ID NO: 332664 - RNA, 32 nt, Homo Sapiens
cucccuguuuugcugaggccuggagcccccau

SEQ ID NO: 332665 - RNA, 32 nt, Homo Sapiens
gcugaaaauuuuccuuuaaaauagaaucauua

SEQ ID NO: 332666 - RNA, 32 nt, Homo Sapiens
aaggcucucaacaugaagguuaacacagucaa

SEQ ID NO: 332667 - RNA, 32 nt, Homo Sapiens
ugaaggaaaaauacaaccugugaaaauugugg

SEQ ID NO: 332668 - RNA, 32 nt, Homo Sapiens
auguucggaaaacagauacagauccucugcug

SEQ ID NO: 332669 - RNA, 32 nt, Homo Sapiens
cccaaaagaagcugccagugagacgaccaccg

SEQ ID NO: 332670 - RNA, 32 nt, Homo Sapiens
gccuccgcccacaccuuugccccuccccaccg

SEQ ID NO: 332671 - RNA, 32 nt, Homo Sapiens
cuuuuuuauguuaaaaagaaauccaguuugug

SEQ ID NO: 332672 - RNA, 32 nt, Homo Sapiens
gggagggcgcgaggcuuuuggagcggcugugg

SEQ ID NO: 332673 - RNA, 32 nt, Homo Sapiens
cacugcaacuucugccucccaugcuuacguga

SEQ ID NO: 332674 - RNA, 32 nt, Homo Sapiens
uaaaugcacauuagcaaaucuaugucuugucc

SEQ ID NO: 332675 - RNA, 32 nt, Homo Sapiens
aguaauuuaugcauuuggauaauuaauauauu

SEQ ID NO: 332676 - RNA, 32 nt, Homo Sapiens
uagaaaccagccuggccaacguggugaaaccc

SEQ ID NO: 332677 - RNA, 32 nt, Homo Sapiens
accaguuaaagccacagauggcuuucagggca

SEQ ID NO: 332678 - RNA, 28 nt, Homo Sapiens
aacucaguaacaggacccagaggaccau

SEQ ID NO: 332679 - RNA, 32 nt, Homo Sapiens
gaacugcgugugccccugggccugcaggcccc

SEQ ID NO: 332680 - RNA, 32 nt, Homo Sapiens
ccuggccccgcggagcgaugcugcugcuggcu

SEQ ID NO: 332681 - RNA, 32 nt, Homo Sapiens
gacgucacucgagggggcucuguuaaaaauaa

SEQ ID NO: 332682 - RNA, 32 nt, Homo Sapiens
ugcauagucucucuugucaagucagaacagcc

SEQ ID NO: 332683 - RNA, 32 nt, Homo Sapiens
aguaaagcgcuuuggucaaacacacaaaaaua

SEQ ID NO: 332684 - RNA, 32 nt, Homo Sapiens
aagacgccuuccugggguacugagccgcugcu

SEQ ID NO: 332685 - RNA, 32 nt, Homo Sapiens
gugccuuggggccuccagcagcagccaagaua

SEQ ID NO: 332686 - RNA, 32 nt, Homo Sapiens
ugaugaugaugaugaugaugaugauaauaaua

SEQ ID NO: 332687 - RNA, 32 nt, Homo Sapiens
agggucggagaacaggcaaacucggagcagua

SEQ ID NO: 332688 - RNA, 32 nt, Homo Sapiens
cacagaggugaauauacugaauguauaacacu

SEQ ID NO: 332689 - RNA, 32 nt, Homo Sapiens
cuccauuuacuucuucccauccugggaccugc

SEQ ID NO: 332690 - RNA, 32 nt, Homo Sapiens
gggguggggaauacuggaaauaaucagggcaa

SEQ ID NO: 332691 - RNA, 32 nt, Homo Sapiens
gcccaggggcgcccagcacugguucagugaac

SEQ ID NO: 332692 - RNA, 32 nt, Homo Sapiens
ccuacacuccacgaccugggggcucacagcac

SEQ ID NO: 332693 - RNA, 31 nt, Homo Sapiens
ugucauuauuugacuguuaaaccaaaauauu

SEQ ID NO: 332694 - RNA, 32 nt, Homo Sapiens
accucaguuuuuugauuuuuuauuuggguagg

SEQ ID NO: 332695 - RNA, 32 nt, Homo Sapiens
gccuuucuucugucuuuuuuuuuuuuuuuuuu

SEQ ID NO: 332696 - RNA, 32 nt, Homo Sapiens
ccagagcucccaagccccugcccgccacaucu

SEQ ID NO: 332697 - RNA, 32 nt, Homo Sapiens
augaagcaacgauaaaauuacaaaagagcagc

SEQ ID NO: 332698 - RNA, 32 nt, Homo Sapiens
augcaucccaagauuauauuauuguuuucuac

SEQ ID NO: 332699 - RNA, 32 nt, Homo Sapiens
cccuucaccgacaguggccuuaggccuggcaa

SEQ ID NO: 332700 - RNA, 32 nt, Homo Sapiens
ccuuaaggacagagacuacaccuuguacuuuu

SEQ ID NO: 332701 - RNA, 32 nt, Homo Sapiens
caccacaaucacuucuggauuauuuucaucac

SEQ ID NO: 332702 - RNA, 32 nt, Homo Sapiens
ccuuucuuauugucuugcccugcaucuggggg

SEQ ID NO: 332703 - RNA, 32 nt, Homo Sapiens
cggcacacuauaagugaccagucccugcccau

SEQ ID NO: 332704 - RNA, 32 nt, Homo Sapiens
gagaacuuagugugaacaggaacuugaugcgu

SEQ ID NO: 332705 - RNA, 32 nt, Homo Sapiens
uucagguuugaaaagaaauaacugaacauauu

SEQ ID NO: 332706 - RNA, 32 nt, Homo Sapiens
ugcuuucccacccaccaagaaauuuguaaguc

SEQ ID NO: 332707 - RNA, 32 nt, Homo Sapiens
ccaacuaauauuuggaauuuuccuauacgugg

SEQ ID NO: 332708 - RNA, 32 nt, Homo Sapiens
uauuuuaaaauuuaggcaaaagucacuaucaa

SEQ ID NO: 332709 - RNA, 32 nt, Homo Sapiens
guuguaggcauggaagagagccaggcagcccc

SEQ ID NO: 332710 - RNA, 32 nt, Homo Sapiens
ccgccuccucuauaagcaccgccccagcucug

SEQ ID NO: 332711 - RNA, 32 nt, Homo Sapiens
ccugagggucccagccccgcgcuccgcguccc

SEQ ID NO: 332712 - RNA, 32 nt, Homo Sapiens
gucauagccauggagacaugggcuuccucaga

SEQ ID NO: 332713 - RNA, 32 nt, Homo Sapiens
agauuggaagagagaagaaaagagcugcuaca

SEQ ID NO: 332714 - RNA, 32 nt, Homo Sapiens
ggaauauggggguuccaggcuccagcccuccc

SEQ ID NO: 332715 - RNA, 32 nt, Homo Sapiens
auaagccucaucugauggaagagaggaauaaa

SEQ ID NO: 332716 - RNA, 32 nt, Homo Sapiens
ucaacucuuucugcuugacaauguagcaaccc

SEQ ID NO: 332717 - RNA, 32 nt, Homo Sapiens
cugcccccgcccuuccuccccuuauuuguuaa

SEQ ID NO: 332718 - RNA, 32 nt, Homo Sapiens
uaaacacauuauuaggccuuugccagauaccu

SEQ ID NO: 332719 - RNA, 30 nt, Homo Sapiens
cacguauguucccuuuugccuuacuauaug

SEQ ID NO: 332720 - RNA, 32 nt, Homo Sapiens
uacauugauggaauuuuucucuuuuaaucuau

SEQ ID NO: 332721 - RNA, 29 nt, Homo Sapiens
ugcccugugacuucugugaaaucuuuguu

SEQ ID NO: 332722 - RNA, 32 nt, Homo Sapiens
aaggaaacugguuuuucuuaguugacuggugg

SEQ ID NO: 332723 - RNA, 32 nt, Homo Sapiens
cauauauuggggaaaaucauaguuuguaggua

SEQ ID NO: 332724 - RNA, 31 nt, Homo Sapiens
caaugacaagagguuucauggucuuaaaaag

SEQ ID NO: 332725 - RNA, 32 nt, Homo Sapiens
cugagccugcccacccaaggacagggacauaa

SEQ ID NO: 332726 - RNA, 32 nt, Homo Sapiens
auaagcuagaaccaggaugcuuccuuauugga

SEQ ID NO: 332727 - RNA, 32 nt, Homo Sapiens
uauuaggcuauuucaaagccacagcauaagaa

SEQ ID NO: 332728 - RNA, 32 nt, Homo Sapiens
cuaguuuuggguaggagaacugggaaguuguu

SEQ ID NO: 332729 - RNA, 32 nt, Homo Sapiens
aagauuacauaaaugccuggcacauaccaagg

SEQ ID NO: 332730 - RNA, 32 nt, Homo Sapiens
aaauggcauaccugucuuucucccagauacac

SEQ ID NO: 332731 - RNA, 32 nt, Homo Sapiens
gugggagagggaggagaggggaucacaggggu

SEQ ID NO: 332732 - RNA, 32 nt, Homo Sapiens
uuucuguaaaucuauuucauaucugacccacc

SEQ ID NO: 332733 - RNA, 32 nt, Homo Sapiens
ucccagcccagucccucucccggagccuuggc

SEQ ID NO: 332734 - RNA, 32 nt, Homo Sapiens
gaaagguucagauugcagaaacccagcccugc

SEQ ID NO: 332735 - RNA, 32 nt, Homo Sapiens
cccauauagaugcccuucuacauccuggagcc

SEQ ID NO: 332736 - RNA, 32 nt, Homo Sapiens
ggucuauuugauuguauaugguugccuuggau

SEQ ID NO: 332737 - RNA, 32 nt, Homo Sapiens
uaucauggccucucucauaagaaugauuuuaa

SEQ ID NO: 332738 - RNA, 32 nt, Homo Sapiens
uagugccuucuccaagcccuggauggaggagg

SEQ ID NO: 332739 - RNA, 32 nt, Homo Sapiens
caggaguauggcugaggccuugcccacccacc

SEQ ID NO: 332740 - RNA, 32 nt, Homo Sapiens
ugaugaaacuaaaaaggcaauuuuggaaaaag

SEQ ID NO: 332741 - RNA, 32 nt, Homo Sapiens
ggacuggcccuaggaaacuugaauuaaauaag

SEQ ID NO: 332742 - RNA, 32 nt, Homo Sapiens
gagcucuuuuucugugagcuggguugcacagg

SEQ ID NO: 332743 - RNA, 32 nt, Homo Sapiens
cccagugauaggaaacaagacaacucaaggcu

SEQ ID NO: 332744 - RNA, 32 nt, Homo Sapiens
auuuauuuuacuuguuugagagguggagucuu

SEQ ID NO: 332745 - RNA, 32 nt, Homo Sapiens
gugcucuucuuugccauuugcaucuacagcau

SEQ ID NO: 332746 - RNA, 32 nt, Homo Sapiens
auagcuacaggagcuacugagggaaaucagug

SEQ ID NO: 332747 - RNA, 32 nt, Homo Sapiens
ggcuccugcugcugcgcacgcuuccugccaac

SEQ ID NO: 332748 - RNA, 32 nt, Homo Sapiens
uuccuccuuguucauuugucccuguucucugu

SEQ ID NO: 332749 - RNA, 32 nt, Homo Sapiens
agacaagugggaagaggcacguucaucaaacc

SEQ ID NO: 332750 - RNA, 32 nt, Homo Sapiens
ugcauucccccgcucuuucggaucgcuaagca

SEQ ID NO: 332751 - RNA, 32 nt, Homo Sapiens
gagagggcaauagagggaagacugaggcugaa

SEQ ID NO: 332752 - RNA, 32 nt, Homo Sapiens
uccgcccacugccgcuggcccugggcaggucu

SEQ ID NO: 332753 - RNA, 27 nt, Homo Sapiens
ugaucuucccacuucagccucccaaag

SEQ ID NO: 332754 - RNA, 32 nt, Homo Sapiens
aaaauauuuaaaacuuuuucaugauuucugug

SEQ ID NO: 332755 - RNA, 32 nt, Homo Sapiens
cacugggaaauacuagggagccccuccccacc

SEQ ID NO: 332756 - RNA, 32 nt, Homo Sapiens
ccucuggagugggaagacagugccgcuguuga

SEQ ID NO: 332757 - RNA, 32 nt, Homo Sapiens
aggacugccccugacccaggcgcgcccgcugc

SEQ ID NO: 332758 - RNA, 32 nt, Homo Sapiens
aggcucccugaacguguggcuagcugaguuug

SEQ ID NO: 332759 - RNA, 32 nt, Homo Sapiens
gaaugcguacccucaccuccacgucuacaaga

SEQ ID NO: 332760 - RNA, 32 nt, Homo Sapiens
agcagccuguuuacaucugccgcggccacacg

SEQ ID NO: 332761 - RNA, 32 nt, Homo Sapiens
cggaggggcuccugggggucuggaauaacaau

SEQ ID NO: 332762 - RNA, 32 nt, Homo Sapiens
gugcggguggcggccggcgcgcgguggggcau

SEQ ID NO: 332763 - RNA, 32 nt, Homo Sapiens
auaguauaauuuacauucaaguuuaauugugc

SEQ ID NO: 332764 - RNA, 32 nt, Homo Sapiens
gaguccugagcuagucgugucccggccuccag

SEQ ID NO: 332765 - RNA, 32 nt, Homo Sapiens
cuccugcucauggguacccccauccugagaga

SEQ ID NO: 332766 - RNA, 32 nt, Homo Sapiens
guugucauguuaaagugcuuauagggaaagaa

SEQ ID NO: 332767 - RNA, 28 nt, Homo Sapiens
acacugaaagauucuuacuuugaccccc

SEQ ID NO: 332768 - RNA, 32 nt, Homo Sapiens
cguccuuuggcuuacucaaacucugacagugu

SEQ ID NO: 332769 - RNA, 32 nt, Homo Sapiens
aaugcauaaaagacaagcacuuuggaagaauu

SEQ ID NO: 332770 - RNA, 32 nt, Homo Sapiens
uaccagggaaagggcuuaagguuagcagggcc

SEQ ID NO: 332771 - RNA, 32 nt, Homo Sapiens
aggccaucaugaugaagcccuggcuguggcag

SEQ ID NO: 332772 - RNA, 32 nt, Homo Sapiens
gcugaacuuuggcgaguuuacagcccagccca

SEQ ID NO: 332773 - RNA, 32 nt, Homo Sapiens
cacccaggccaggaguggagccaggucgcccc

SEQ ID NO: 332774 - RNA, 32 nt, Homo Sapiens
gggguggggagcuucuguucuggugaagggac

SEQ ID NO: 332775 - RNA, 32 nt, Homo Sapiens
guuccauggagauaagaugccugccuacauau

SEQ ID NO: 332776 - RNA, 32 nt, Homo Sapiens
uucauucccgucuguggcucucauuccuuccc

SEQ ID NO: 332777 - RNA, 32 nt, Homo Sapiens
caucauaucugauugcagaaauuaaagcacaa

SEQ ID NO: 332778 - RNA, 32 nt, Homo Sapiens
gagccagacugcauccgccgcggcgucuccau

SEQ ID NO: 332779 - RNA, 32 nt, Homo Sapiens
cucucccuuagcugagagggccaggcagacuc

SEQ ID NO: 332780 - RNA, 32 nt, Homo Sapiens
auacaaaaaugaacaggcugggagugguggcu

SEQ ID NO: 332781 - RNA, 32 nt, Homo Sapiens
uugcauacuuacaaaucagucaacguguauuc

SEQ ID NO: 332782 - RNA, 32 nt, Homo Sapiens
cagaaaugaaguauaugguucauuagcuuaaa

SEQ ID NO: 332783 - RNA, 32 nt, Homo Sapiens
uccuacugccgccggcgccgcggccgucaugg

SEQ ID NO: 332784 - RNA, 32 nt, Homo Sapiens
aacuauuuuuaaaauuuaugucaggguauucu

SEQ ID NO: 332785 - RNA, 32 nt, Homo Sapiens
ggguucccauucugcuucugccacuuccagcu

SEQ ID NO: 332786 - RNA, 32 nt, Homo Sapiens
uaagacugccggaguccucaccacuucuccag

SEQ ID NO: 332787 - RNA, 32 nt, Homo Sapiens
cagaggggaaggggcugcugcuugcaucagcc

SEQ ID NO: 332788 - RNA, 32 nt, Homo Sapiens
gucuccucucugcggcccgcaccccaagcucc

SEQ ID NO: 332789 - RNA, 32 nt, Homo Sapiens
cuuuaggucugcuugaaaggugaggacgugac

SEQ ID NO: 332790 - RNA, 32 nt, Homo Sapiens
guaacaaaaggguucauagaaacuucaugguu

SEQ ID NO: 332791 - RNA, 32 nt, Homo Sapiens
cuaagaaaguucccuccaacaggaacucucug

SEQ ID NO: 332792 - RNA, 32 nt, Homo Sapiens
agccgggccugccucugaguggugccucuccu

SEQ ID NO: 332793 - RNA, 32 nt, Homo Sapiens
uuucccuuaaauaacacuuagauuuauuggac

SEQ ID NO: 332794 - RNA, 32 nt, Homo Sapiens
guguugccagugcuaagcugcccugaggguuu

SEQ ID NO: 332795 - RNA, 32 nt, Homo Sapiens
cugcggcugugacugucccuuuucggucuguc

SEQ ID NO: 332796 - RNA, 32 nt, Homo Sapiens
gaggguggggucccgggggcggggcugucggc

SEQ ID NO: 332797 - RNA, 32 nt, Homo Sapiens
uuccuggacuucauuuucaaugaugaaccaaa

SEQ ID NO: 332798 - RNA, 32 nt, Homo Sapiens
aucuuauguaaauuauuuuuagaacacaaguu

SEQ ID NO: 332799 - RNA, 32 nt, Homo Sapiens
uguuacaaaagauuuuuuccuguuuuaucuga

SEQ ID NO: 332800 - RNA, 32 nt, Homo Sapiens
gaccauugaacaggauuugacucauuggauau

SEQ ID NO: 332801 - RNA, 32 nt, Homo Sapiens
aagaccagccugagaaauaaggugaaacccug

SEQ ID NO: 332802 - RNA, 32 nt, Homo Sapiens
gcaaaguuaguagaggaggcagcuaggcgugg

SEQ ID NO: 332803 - RNA, 32 nt, Homo Sapiens
gaaucacuuggcaaauaaccagcaggugggca

SEQ ID NO: 332804 - RNA, 32 nt, Homo Sapiens
cacggacgccgggaagaaggggguggggccac

SEQ ID NO: 332805 - RNA, 32 nt, Homo Sapiens
cagaucgguguuugaaaauuugccauuucagg

SEQ ID NO: 332806 - RNA, 32 nt, Homo Sapiens
aaugcuagggcuucaucagaccacugacuuga

SEQ ID NO: 332807 - RNA, 31 nt, Homo Sapiens
uauuuacacaugaaaaaacugaaauuagaaa

SEQ ID NO: 332808 - RNA, 32 nt, Homo Sapiens
uauuuuuauuagaaguuuuucugcucuuucuu

SEQ ID NO: 332809 - RNA, 32 nt, Homo Sapiens
aguuguuuguuuuuuucuuuuuuuauaaauaa

SEQ ID NO: 332810 - RNA, 32 nt, Homo Sapiens
cauucagucaccauagcaacacucugagaugg

SEQ ID NO: 332811 - RNA, 32 nt, Homo Sapiens
accaaccugaagacauauagaggcagaaggac

SEQ ID NO: 332812 - RNA, 32 nt, Homo Sapiens
gggacagcgucuucgcugcugcuggauagucg

SEQ ID NO: 332813 - RNA, 32 nt, Homo Sapiens
agauggcugcuggccuggccuccaagaguucu

SEQ ID NO: 332814 - RNA, 32 nt, Homo Sapiens
uggggcagggacugugcugagugucugaggcc

SEQ ID NO: 332815 - RNA, 32 nt, Homo Sapiens
gccgccugcccccucuuccuaugcagcuuuaa

SEQ ID NO: 332816 - RNA, 32 nt, Homo Sapiens
gugaacauccucugcuggagcuuggggccugg

SEQ ID NO: 332817 - RNA, 32 nt, Homo Sapiens
agaacggggcaggcaaacuacauccugcaggc

SEQ ID NO: 332818 - RNA, 32 nt, Homo Sapiens
aucgcccgccugaggugauccuugagcugggc

SEQ ID NO: 332819 - RNA, 32 nt, Homo Sapiens
aaaggguaaagggucagaggcugaagaguacu

SEQ ID NO: 332820 - RNA, 32 nt, Homo Sapiens
acgugcuggucugcacacaccugcacacaccu

SEQ ID NO: 332821 - RNA, 32 nt, Homo Sapiens
ccuggagauggggggccuggcucccacccaga

SEQ ID NO: 332822 - RNA, 32 nt, Homo Sapiens
guuugggaagcagcaaagagcaaguccccugc

SEQ ID NO: 332823 - RNA, 32 nt, Homo Sapiens
gaagcgccugccuguuuuccccggggagaagg

SEQ ID NO: 332824 - RNA, 31 nt, Homo Sapiens
gcugaggggguucagaaccagccuggccaaa

SEQ ID NO: 332825 - RNA, 32 nt, Homo Sapiens
aaaauauuaaauauauuuuaauuuugugcccu

SEQ ID NO: 332826 - RNA, 32 nt, Homo Sapiens
uuucuucacaacuuuuagcaucagcucagacc

SEQ ID NO: 332827 - RNA, 32 nt, Homo Sapiens
ccaccagcccggcuccugccucacgcuggccc

SEQ ID NO: 332828 - RNA, 32 nt, Homo Sapiens
ugacaaggcggaaacuuccaugugucuccugc

SEQ ID NO: 332829 - RNA, 32 nt, Homo Sapiens
aacgggcccacccacacguuguauauucagag

SEQ ID NO: 332830 - RNA, 32 nt, Homo Sapiens
uaaauugaaagauaaaauguuuuaccucacug

SEQ ID NO: 332831 - RNA, 32 nt, Homo Sapiens
aagagcaguguggcugccccuuuaaggaggcg

SEQ ID NO: 332832 - RNA, 30 nt, Homo Sapiens
gcauuuaaauuugauuuccaucuuaauguu

SEQ ID NO: 332833 - RNA, 32 nt, Homo Sapiens
cuuguugcuuuagcgcuuacgccccgccucug

SEQ ID NO: 332834 - RNA, 32 nt, Homo Sapiens
ugcgcagcccucgggcgcgagggucggcggcg

SEQ ID NO: 332835 - RNA, 32 nt, Homo Sapiens
gagaaaggacccugcccucccuguuccacguc

SEQ ID NO: 332836 - RNA, 32 nt, Homo Sapiens
uacucauuugacuggauaaacuuuacauaaaa

SEQ ID NO: 332837 - RNA, 32 nt, Homo Sapiens
gaaaucucauuucuuguuccaacaaaacuuag

SEQ ID NO: 332838 - RNA, 32 nt, Homo Sapiens
aaccuccgcucccgguuugagugauucucaug

SEQ ID NO: 332839 - RNA, 32 nt, Homo Sapiens
cgccgcuugcccgugacacgcagcgcguuggu

SEQ ID NO: 332840 - RNA, 32 nt, Homo Sapiens
acugacggcacuggagcagagaggcugacugc

SEQ ID NO: 332841 - RNA, 32 nt, Homo Sapiens
auaccagcucucaugcucucggaacaucaccu

SEQ ID NO: 332842 - RNA, 32 nt, Homo Sapiens
uggcugaggagcugagggugucugccaaucac

SEQ ID NO: 332843 - RNA, 32 nt, Homo Sapiens
cggggugcuccugugggagaucuucacucugg

SEQ ID NO: 332844 - RNA, 32 nt, Homo Sapiens
ccaggaaggggaggagagugagggccaagaac

SEQ ID NO: 332845 - RNA, 31 nt, Homo Sapiens
ggaggcggccgcugccugccgggcccucucu

SEQ ID NO: 332846 - RNA, 32 nt, Homo Sapiens
ucucagcauuccccucaaguucaaggacaagc

SEQ ID NO: 332847 - RNA, 32 nt, Homo Sapiens
cgagccaguccgcgcgcaccgcgucugcgucc

SEQ ID NO: 332848 - RNA, 29 nt, Homo Sapiens
agccuuccagcugagugaagcuaggcaaa

SEQ ID NO: 332849 - RNA, 32 nt, Homo Sapiens
ugugaagggcagauaucuauuaccaaaccaca

SEQ ID NO: 332850 - RNA, 32 nt, Homo Sapiens
augaaacaaagagcuugauaugucaagaggag

SEQ ID NO: 332851 - RNA, 32 nt, Homo Sapiens
ugguuucuaggagcuugaaauuccuggaaaga

SEQ ID NO: 332852 - RNA, 32 nt, Homo Sapiens
auuuguaaaaaauuaguuuguuauaguugaag

SEQ ID NO: 332853 - RNA, 32 nt, Homo Sapiens
ccgcgcccgccgccgcgcccugagcgccuuug

SEQ ID NO: 332854 - RNA, 32 nt, Homo Sapiens
ugauuaagcugaugacuagaccuacaauuaau

SEQ ID NO: 332855 - RNA, 32 nt, Homo Sapiens
cgucacuguaaccaaaguauaugcaccagccc

SEQ ID NO: 332856 - RNA, 32 nt, Homo Sapiens
ucuggaggaaaaaaccuuuggugcaaaugaug

SEQ ID NO: 332857 - RNA, 32 nt, Homo Sapiens
acuggagcacgcuggcagauuuggcaugcccg

SEQ ID NO: 332858 - RNA, 32 nt, Homo Sapiens
accaagcuggauggcaagcugcggcccacaaa

SEQ ID NO: 332859 - RNA, 32 nt, Homo Sapiens
gccugggaggucggccugugugcccagcucag

SEQ ID NO: 332860 - RNA, 32 nt, Homo Sapiens
acagggagacccgcuuugugucugcaugugug

SEQ ID NO: 332861 - RNA, 32 nt, Homo Sapiens
cacagaccaucucagcucacuccacccucacu

SEQ ID NO: 332862 - RNA, 32 nt, Homo Sapiens
ugcugcggcccuagcccuccaugcagcccauc

SEQ ID NO: 332863 - RNA, 32 nt, Homo Sapiens
auuuuucuuguuaaaauguaguuuuucauuuc

SEQ ID NO: 332864 - RNA, 32 nt, Homo Sapiens
uucgggagcuggaaaugugagcgggaaucucu

SEQ ID NO: 332865 - RNA, 32 nt, Homo Sapiens
cucacaccuucugccuuuguccugcucccuuu

SEQ ID NO: 332866 - RNA, 32 nt, Homo Sapiens
cugugccagaacccaucccaauaaagagaccg

SEQ ID NO: 332867 - RNA, 32 nt, Homo Sapiens
cgucagagcgcgcgcaugcuccuagcucggag

SEQ ID NO: 332868 - RNA, 32 nt, Homo Sapiens
gcaccuccaagcggcccggaacccgcggcuuc

SEQ ID NO: 332869 - RNA, 32 nt, Homo Sapiens
ggauaaaguauuuacaaaacagugacauuuga

SEQ ID NO: 332870 - RNA, 30 nt, Homo Sapiens
ggggccugagccucuccgccggcgcaggcu

SEQ ID NO: 332871 - RNA, 32 nt, Homo Sapiens
cucacuuccguccaauucccauccccacacca

SEQ ID NO: 332872 - RNA, 32 nt, Homo Sapiens
aagggcggcgcggagcagcugcgcucccgaga

SEQ ID NO: 332873 - RNA, 32 nt, Homo Sapiens
ggcgagggccgaugaaggggcugggccugguc

SEQ ID NO: 332874 - RNA, 31 nt, Homo Sapiens
uguaaucccaacacuuuaggaguccaaggcg

SEQ ID NO: 332875 - RNA, 32 nt, Homo Sapiens
guggauugaauauauauguacauauauaugaa

SEQ ID NO: 332876 - RNA, 32 nt, Homo Sapiens
guuuuguaaacuauaaaguacguggcaugugu

SEQ ID NO: 332877 - RNA, 32 nt, Homo Sapiens
aacuugucuuaaguucuauuaaggcaguuaga

SEQ ID NO: 332878 - RNA, 32 nt, Homo Sapiens
uucauuucuuaguuaugcaucucauaaucaga

SEQ ID NO: 332879 - RNA, 32 nt, Homo Sapiens
aagaagucaggagcccagugggggcugcaggu

SEQ ID NO: 332880 - RNA, 32 nt, Homo Sapiens
ucaucuuuaaacuugggcacuggccagccacg

SEQ ID NO: 332881 - RNA, 32 nt, Homo Sapiens
cgucccuucccuccccgacaggucacauaaca

SEQ ID NO: 332882 - RNA, 32 nt, Homo Sapiens
cccccgccccgggugcuuucugcacaaagccu

SEQ ID NO: 332883 - RNA, 32 nt, Homo Sapiens
aaaaggaaaucaauauucaacagcucaccaac

SEQ ID NO: 332884 - RNA, 32 nt, Homo Sapiens
gcaaaugcugguuuccuccuucucgccagcua

SEQ ID NO: 332885 - RNA, 32 nt, Homo Sapiens
cacucccgaucgcuccucccuggacacccggu

SEQ ID NO: 332886 - RNA, 32 nt, Homo Sapiens
gcgcugcucuugccgggugcuggugcagcagc

SEQ ID NO: 332887 - RNA, 32 nt, Homo Sapiens
agagaugcaccugaccaggggcccgucguggc

SEQ ID NO: 332888 - RNA, 32 nt, Homo Sapiens
cccaucaucugggaguccccaaggcccagagg

SEQ ID NO: 332889 - RNA, 32 nt, Homo Sapiens
accucugguuacaccacugguauuaucauaca

SEQ ID NO: 332890 - RNA, 32 nt, Homo Sapiens
uuuacagacaauuuaaaaguucaagucuguac

SEQ ID NO: 332891 - RNA, 32 nt, Homo Sapiens
caggagccugucauccccagaucuaaauccug

SEQ ID NO: 332892 - RNA, 32 nt, Homo Sapiens
acuguuauuuuuguagcugagaacguggaauc

SEQ ID NO: 332893 - RNA, 32 nt, Homo Sapiens
gaugggugaagagagaccaguguuaugguuau

SEQ ID NO: 332894 - RNA, 29 nt, Homo Sapiens
caggauuggggacagcauguucugucugg

SEQ ID NO: 332895 - RNA, 32 nt, Homo Sapiens
ggcuuccugaggugggggccgggccaggaugg

SEQ ID NO: 332896 - RNA, 32 nt, Homo Sapiens
guauuuucaacuugucuucccugguauaucau

SEQ ID NO: 332897 - RNA, 32 nt, Homo Sapiens
gcuuccuaauuccacauaguauuugcauuguu

SEQ ID NO: 332898 - RNA, 32 nt, Homo Sapiens
ugccugccgccggcccugcucugcgaugggca

SEQ ID NO: 332899 - RNA, 32 nt, Homo Sapiens
auguagggaccagugucuugugagauuaaccu

SEQ ID NO: 332900 - RNA, 32 nt, Homo Sapiens
cuauuuuguaaauaaauaaaaccauagauuua

SEQ ID NO: 332901 - RNA, 32 nt, Homo Sapiens
ugggaggagguaggaggccaggggcucagccg

SEQ ID NO: 332902 - RNA, 32 nt, Homo Sapiens
cccugcuccguuucccuucucuccugggagau

SEQ ID NO: 332903 - RNA, 32 nt, Homo Sapiens
cugcuguugcggccagcguugccggggcaucc

SEQ ID NO: 332904 - RNA, 32 nt, Homo Sapiens
uuaaguucuuugauuuguaccauuccuucaca

SEQ ID NO: 332905 - RNA, 32 nt, Homo Sapiens
gaauugcuaugugugguugaucuucagguaaa

SEQ ID NO: 332906 - RNA, 32 nt, Homo Sapiens
gcugggagaacuucucucccagcccugcaacu

SEQ ID NO: 332907 - RNA, 32 nt, Homo Sapiens
gcgagcgcggguggggcgggguuaggcggcgc

SEQ ID NO: 332908 - RNA, 32 nt, Homo Sapiens
gaauguuccuuaaagguuuaagaagcaguaag

SEQ ID NO: 332909 - RNA, 32 nt, Homo Sapiens
ucuuuaacaacguuaacuuauguaaucagaga

SEQ ID NO: 332910 - RNA, 32 nt, Homo Sapiens
ggcguagacgcgguggcagagcccgcgcggcg

SEQ ID NO: 332911 - RNA, 29 nt, Homo Sapiens
gaggcucggggacagcaggagcacgggcu

SEQ ID NO: 332912 - RNA, 32 nt, Homo Sapiens
caucugccuguuuuuucuugauacuuacugaa

SEQ ID NO: 332913 - RNA, 32 nt, Homo Sapiens
cugugccuguguauguuggagagagaaggagc

SEQ ID NO: 332914 - RNA, 32 nt, Homo Sapiens
acaucauuuguacugagagacaaaaggaaauc

SEQ ID NO: 332915 - RNA, 32 nt, Homo Sapiens
aaagaugggacaaaacccacuaauacuguggg

SEQ ID NO: 332916 - RNA, 32 nt, Homo Sapiens
agagcccggccgcgugugcacucgaguaacga

SEQ ID NO: 332917 - RNA, 32 nt, Homo Sapiens
agacacgccccaguguguccacaugugugugc

SEQ ID NO: 332918 - RNA, 32 nt, Homo Sapiens
agggaugcacacaacuaugaacauuucugaag

SEQ ID NO: 332919 - RNA, 32 nt, Homo Sapiens
aaguuaaugcaaaugacugucaguugccaaau

SEQ ID NO: 332920 - RNA, 32 nt, Homo Sapiens
caguguguacuucuucauccauagacacagua

SEQ ID NO: 332921 - RNA, 32 nt, Homo Sapiens
ggcuaggacauaucaucuuuccaugugcugag

SEQ ID NO: 332922 - RNA, 32 nt, Homo Sapiens
gagccccuccuccgcggucgucucucaggccu

SEQ ID NO: 332923 - RNA, 32 nt, Homo Sapiens
aauggguguacaaugcccuguuuguacuuacu

SEQ ID NO: 332924 - RNA, 32 nt, Homo Sapiens
ggcccgagcugcccccacccccggccucagcc

SEQ ID NO: 332925 - RNA, 32 nt, Homo Sapiens
accccucugccagccgggcuccggcugcagaa

SEQ ID NO: 332926 - RNA, 32 nt, Homo Sapiens
uacaaagucaacaaaaacaagugauggggaaa

SEQ ID NO: 332927 - RNA, 32 nt, Homo Sapiens
aaggucaaagagcaugaaguauuuuauagcuc

SEQ ID NO: 332928 - RNA, 32 nt, Homo Sapiens
ccccagcccugccugauguggcucugggaauu

SEQ ID NO: 332929 - RNA, 32 nt, Homo Sapiens
gggcccaggaggagccucaggagccggacugc

SEQ ID NO: 332930 - RNA, 32 nt, Homo Sapiens
caggaaguugugggguuggggaggccuagggu

SEQ ID NO: 332931 - RNA, 32 nt, Homo Sapiens
aaaaaauuuuuuuuuuaauuagccaggcguga

SEQ ID NO: 332932 - RNA, 32 nt, Homo Sapiens
aaacacuugaaaggggaccccagggccagcug

SEQ ID NO: 332933 - RNA, 32 nt, Homo Sapiens
cuccugcgccccgaccccgccauggccccccg

SEQ ID NO: 332934 - RNA, 32 nt, Homo Sapiens
ccaacacaugcacauguguguacacaacugua

SEQ ID NO: 332935 - RNA, 32 nt, Homo Sapiens
agaggaggaggaggcaugagugaggcgggcga

SEQ ID NO: 332936 - RNA, 32 nt, Homo Sapiens
uccccacugccccuaaagccacagcagaagag

SEQ ID NO: 332937 - RNA, 32 nt, Homo Sapiens
ccaggaucccugaaaggagaccauauacugua

SEQ ID NO: 332938 - RNA, 32 nt, Homo Sapiens
cucccgauuccuuccuucucccuggagcggcc

SEQ ID NO: 332939 - RNA, 32 nt, Homo Sapiens
cgaccagucccaugugucugguaaguaaguaa

SEQ ID NO: 332940 - RNA, 32 nt, Homo Sapiens
ucucucccuuuuuuuuuuuuuauuauuuuaau

SEQ ID NO: 332941 - RNA, 32 nt, Homo Sapiens
uuugucaaccaucaaaguggggaaagggucuc

SEQ ID NO: 332942 - RNA, 32 nt, Homo Sapiens
uucccagccccagccaagcaguguuucuccag

SEQ ID NO: 332943 - RNA, 32 nt, Homo Sapiens
acagcugguguuuaugaagagaucagcgaccc

SEQ ID NO: 332944 - RNA, 32 nt, Homo Sapiens
guccccuuuuuacaguucugcaacauaucuga

SEQ ID NO: 332945 - RNA, 32 nt, Homo Sapiens
guaauggaauccaagcuaaggugucugacuuc

SEQ ID NO: 332946 - RNA, 32 nt, Homo Sapiens
uaaggcugauguaucuggaggaacuuugguug

SEQ ID NO: 332947 - RNA, 32 nt, Homo Sapiens
ggaagcaguucgcucgcgccuagguuggcgcg

SEQ ID NO: 332948 - RNA, 32 nt, Homo Sapiens
uuuucuuaagauagugccuaaaacacuaaauu

SEQ ID NO: 332949 - RNA, 32 nt, Homo Sapiens
uggcgccggugcggacggcggugcugguggcg

SEQ ID NO: 332950 - RNA, 32 nt, Homo Sapiens
accccaugcccccagccuccuagccauaaccc

SEQ ID NO: 332951 - RNA, 32 nt, Homo Sapiens
auugccccucaccuccccuguguccuguccag

SEQ ID NO: 332952 - RNA, 32 nt, Homo Sapiens
gccgccuccacaccccucccccaggggcuugg

SEQ ID NO: 332953 - RNA, 32 nt, Homo Sapiens
cuuccucacccccuggcuucugcaucucccua

SEQ ID NO: 332954 - RNA, 32 nt, Homo Sapiens
agccccuucaucugccgaggcauacccuugcu

SEQ ID NO: 332955 - RNA, 32 nt, Homo Sapiens
augcuucgcuggcaucaaguagacucaccuug

SEQ ID NO: 332956 - RNA, 32 nt, Homo Sapiens
ucgugccuauggugaagcaugcacuuuaauau

SEQ ID NO: 332957 - RNA, 32 nt, Homo Sapiens
ucagcuaaccuuugaauaucugcacacaaauu

SEQ ID NO: 332958 - RNA, 32 nt, Homo Sapiens
cacacacacacacacacgcacacacacauauc

SEQ ID NO: 332959 - RNA, 32 nt, Homo Sapiens
aaaaaugaaauagauuuuaacucuucauccag

SEQ ID NO: 332960 - RNA, 32 nt, Homo Sapiens
aggacggcucggugcugcugcucgucagcgac

SEQ ID NO: 332961 - RNA, 31 nt, Homo Sapiens
cguccgccugccugccugcgcuuccauccau

SEQ ID NO: 332962 - RNA, 32 nt, Homo Sapiens
augcguguuguacauacagagguaacuaucaa

SEQ ID NO: 332963 - RNA, 32 nt, Homo Sapiens
guuugguggucucuucacacggacgcacauga

SEQ ID NO: 332964 - RNA, 32 nt, Homo Sapiens
ggaaagccuucagaucugccucacaccuucaa

SEQ ID NO: 332965 - RNA, 32 nt, Homo Sapiens
ugaggagugucugcuaagaacuacugagaaaa

SEQ ID NO: 332966 - RNA, 32 nt, Homo Sapiens
aaagaagaagaaaaaaccagagguguuuaacu

SEQ ID NO: 332967 - RNA, 32 nt, Homo Sapiens
gaacucuucuaaaauaguucugugucucuuag

SEQ ID NO: 332968 - RNA, 32 nt, Homo Sapiens
acuaaguccuucucaaucuauauccugagcuc

SEQ ID NO: 332969 - RNA, 32 nt, Homo Sapiens
uucauuuugacacuauuaaacaauccagagaa

SEQ ID NO: 332970 - RNA, 32 nt, Homo Sapiens
auugcccaguuagauuugaauuucagauaaac

SEQ ID NO: 332971 - RNA, 32 nt, Homo Sapiens
gggcaucugggaggcucuggcugccuucugca

SEQ ID NO: 332972 - RNA, 32 nt, Homo Sapiens
ggcucgcugcagagccgggcccagcgcgcccu

SEQ ID NO: 332973 - RNA, 32 nt, Homo Sapiens
cuuaaaaauaauccaugcagaauuuguaucag

SEQ ID NO: 332974 - RNA, 32 nt, Homo Sapiens
gauuaugugacugaaaaacauaaaggaagaga

SEQ ID NO: 332975 - RNA, 32 nt, Homo Sapiens
aacgaaguauuguagagaauaaaucauaaugg

SEQ ID NO: 332976 - RNA, 32 nt, Homo Sapiens
ugcccccagauggcuccuggaacuagucguaa

SEQ ID NO: 332977 - RNA, 32 nt, Homo Sapiens
auccccagccccagccagaagcugugaaaccu

SEQ ID NO: 332978 - RNA, 32 nt, Homo Sapiens
aggcaggcgaggauaagcuaacgaugcugcug

SEQ ID NO: 332979 - RNA, 32 nt, Homo Sapiens
agggguuaguugugguugugauaaauaauuac

SEQ ID NO: 332980 - RNA, 32 nt, Homo Sapiens
guaaacagauggaacaagguguguacgagaag

SEQ ID NO: 332981 - RNA, 32 nt, Homo Sapiens
aaguccauuaaaccucuuucuuuuguaaauuu

SEQ ID NO: 332982 - RNA, 32 nt, Homo Sapiens
caaauaugaagauaugcuaauguguuaauagc

SEQ ID NO: 332983 - RNA, 32 nt, Homo Sapiens
acuaaauccugcccuuuuugugugguuuccuu

SEQ ID NO: 332984 - RNA, 32 nt, Homo Sapiens
ggagagggggaagccgagagggggcugggcca

SEQ ID NO: 332985 - RNA, 32 nt, Homo Sapiens
cuuuuuuccuucuccuucuauuaaugaacaga

SEQ ID NO: 332986 - RNA, 32 nt, Homo Sapiens
cuuaugcaaaaauuaacucaagauggauuaaa

SEQ ID NO: 332987 - RNA, 29 nt, Homo Sapiens
augcugaggaucugggcaucuggaguggu

SEQ ID NO: 332988 - RNA, 32 nt, Homo Sapiens
uggacggcuggagaggccacagauggggugga

SEQ ID NO: 332989 - RNA, 32 nt, Homo Sapiens
aaaugauauuggcugagcuggugcguugguuu

SEQ ID NO: 332990 - RNA, 32 nt, Homo Sapiens
guuacaaauaauaacaucucuauucuuacagc

SEQ ID NO: 332991 - RNA, 32 nt, Homo Sapiens
guuguagagauuaagguuuugucaugccgaug

SEQ ID NO: 332992 - RNA, 32 nt, Homo Sapiens
ccccuccccucccgaacacugagaaauagugc

SEQ ID NO: 332993 - RNA, 29 nt, Homo Sapiens
cucgggagcuccgggagcggcccgcgcag

SEQ ID NO: 332994 - RNA, 32 nt, Homo Sapiens
acccuuauuaucuauguuacaaacccaaccau

SEQ ID NO: 332995 - RNA, 32 nt, Homo Sapiens
uucaaugcauuacuaaaugacauuuguaguuc

SEQ ID NO: 332996 - RNA, 31 nt, Homo Sapiens
ugggcccggccucgccugcccuccugggcca

SEQ ID NO: 332997 - RNA, 32 nt, Homo Sapiens
ucccacagggacccgggcgccagcuucugaaa

SEQ ID NO: 332998 - RNA, 32 nt, Homo Sapiens
caacuccaaguuccuuucccccagaaagcggg

SEQ ID NO: 332999 - RNA, 32 nt, Homo Sapiens
gaucuuaaaguccuuucagucuuauugaauau

SEQ ID NO: 333000 - RNA, 32 nt, Homo Sapiens
ccgcgagcaccguuggaccccuccgcgagccu

SEQ ID NO: 333001 - RNA, 32 nt, Homo Sapiens
cugcagcuccgcggccccggcgcagggagagg

SEQ ID NO: 333002 - RNA, 32 nt, Homo Sapiens
caaaaauaccuguuuucuuaguuuuacaggau

SEQ ID NO: 333003 - RNA, 32 nt, Homo Sapiens
uucaaaucauauccucagauauauuuuuagcc

SEQ ID NO: 333004 - RNA, 32 nt, Homo Sapiens
agagaaacccaacaacuucauuccuagccaug

SEQ ID NO: 333005 - RNA, 32 nt, Homo Sapiens
ugcgcugcgacggccguggcgaaagugcgguu

SEQ ID NO: 333006 - RNA, 32 nt, Homo Sapiens
uaagggaaaaggguguccagaacuacgaccgg

SEQ ID NO: 333007 - RNA, 32 nt, Homo Sapiens
auccaguguacuuugcauuuuauacauuguag

SEQ ID NO: 333008 - RNA, 32 nt, Homo Sapiens
caguuagggauuucacauccacauguaaucau

SEQ ID NO: 333009 - RNA, 32 nt, Homo Sapiens
cuugauauacuucauuccuacacuuggcaaac

SEQ ID NO: 333010 - RNA, 32 nt, Homo Sapiens
uguuuaaauuauaaguuuuuuuguuuuguuuu

SEQ ID NO: 333011 - RNA, 32 nt, Homo Sapiens
agaauggcaugugugaaggugugugucauaca

SEQ ID NO: 333012 - RNA, 32 nt, Homo Sapiens
aagcuugugggguuuaaauuuaguguacaaau

SEQ ID NO: 333013 - RNA, 32 nt, Homo Sapiens
gggcguccggcagcggcuguaucucggcauga

SEQ ID NO: 333014 - RNA, 32 nt, Homo Sapiens
ccugcuccugacucaccgcuguucgcucucgc

SEQ ID NO: 333015 - RNA, 32 nt, Homo Sapiens
gagguggccccaaaaggcaaaagcagggugaa

SEQ ID NO: 333016 - RNA, 32 nt, Homo Sapiens
aaaccuugggaacaugaugaaugugaggaaag

SEQ ID NO: 333017 - RNA, 32 nt, Homo Sapiens
aggaccucuauccgagaugcuuuuucccugcc

SEQ ID NO: 333018 - RNA, 32 nt, Homo Sapiens
caaaaugugaaugggaaaagagauggccugag

SEQ ID NO: 333019 - RNA, 32 nt, Homo Sapiens
guguauucuguugaggacccaggcccauccag

SEQ ID NO: 333020 - RNA, 32 nt, Homo Sapiens
gauugcuugagcucaggaguuugagaccaacc

SEQ ID NO: 333021 - RNA, 32 nt, Homo Sapiens
cuuccugccccucuccaggcccagcuccccuc

SEQ ID NO: 333022 - RNA, 32 nt, Homo Sapiens
gucagggcucugcuucacugcuuggcuuccgg

SEQ ID NO: 333023 - RNA, 32 nt, Homo Sapiens
uugcagcuucugugcuuuuucuuuuuugagac

SEQ ID NO: 333024 - RNA, 32 nt, Homo Sapiens
ccacugcccuccccagcuacacuaugccugca

SEQ ID NO: 333025 - RNA, 32 nt, Homo Sapiens
uuuacauauauucccauguaauguguacaguc

SEQ ID NO: 333026 - RNA, 32 nt, Homo Sapiens
cagaaauggaaauauguguaacuuguuaguau

SEQ ID NO: 333027 - RNA, 32 nt, Homo Sapiens
agucuguucuuacuccuuugucgcuuauccag

SEQ ID NO: 333028 - RNA, 32 nt, Homo Sapiens
uaacaggaugaaaauacaagagacaggaacac

SEQ ID NO: 333029 - RNA, 30 nt, Homo Sapiens
uggaaggucguccgucggccggcgcguccu

SEQ ID NO: 333030 - RNA, 32 nt, Homo Sapiens
uuacuuuuuuaaaaauauuggucaauuccuga

SEQ ID NO: 333031 - RNA, 32 nt, Homo Sapiens
aacccuguccucugcugggcccccagcaaacu

SEQ ID NO: 333032 - RNA, 32 nt, Homo Sapiens
ugccacuggcucugcgccccagcccggcucug

SEQ ID NO: 333033 - RNA, 32 nt, Homo Sapiens
ccgccgguaacaggggccgccggccaaaggcc

SEQ ID NO: 333034 - RNA, 32 nt, Homo Sapiens
ccauuuuaaucaugcauaaaaugaauuagaug

SEQ ID NO: 333035 - RNA, 32 nt, Homo Sapiens
agugcagcuacagcugcaagcgcaaggacaau

SEQ ID NO: 333036 - RNA, 32 nt, Homo Sapiens
augggagggaaguuggggugucugcuuuggga

SEQ ID NO: 333037 - RNA, 32 nt, Homo Sapiens
acacagcucaaacaccagggauuuacuggauc

SEQ ID NO: 333038 - RNA, 32 nt, Homo Sapiens
gccgccguucggcgcgcacgaguuccgggccg

SEQ ID NO: 333039 - RNA, 32 nt, Homo Sapiens
gccggacaggaagccucacagaugaaccugca

SEQ ID NO: 333040 - RNA, 32 nt, Homo Sapiens
acuccagcacucuagccugggcgacagaguga

SEQ ID NO: 333041 - RNA, 32 nt, Homo Sapiens
gcucaccucucccaggccccaggccgcggagc

SEQ ID NO: 333042 - RNA, 32 nt, Homo Sapiens
uguggcgggaggcgagacauguuggcaguaau

SEQ ID NO: 333043 - RNA, 32 nt, Homo Sapiens
uuuccccucuucugcuaauaccucuuacuuug

SEQ ID NO: 333044 - RNA, 32 nt, Homo Sapiens
uugcacacucugggggcgccgcaguguucgug

SEQ ID NO: 333045 - RNA, 31 nt, Homo Sapiens
uuuaauguuguauauuaucuaacuggucuaa

SEQ ID NO: 333046 - RNA, 32 nt, Homo Sapiens
gugcaagcucauucuucaguggauccuucagu

SEQ ID NO: 333047 - RNA, 32 nt, Homo Sapiens
auagcuaauaauaaaugcauagagcaauuaaa

SEQ ID NO: 333048 - RNA, 32 nt, Homo Sapiens
cccagcgagcgcgcgucccuucgugccuaggc

SEQ ID NO: 333049 - RNA, 32 nt, Homo Sapiens
agccugcggggguggggguguccaaaagcacc

SEQ ID NO: 333050 - RNA, 32 nt, Homo Sapiens
uugcaauucucccaggguggcauccucuacgg

SEQ ID NO: 333051 - RNA, 32 nt, Homo Sapiens
guugaaugucuccucucucuuuccacucuggg

SEQ ID NO: 333052 - RNA, 32 nt, Homo Sapiens
cagauggggucacaaugcugcagaaaagugaa

SEQ ID NO: 333053 - RNA, 32 nt, Homo Sapiens
uguugugaccaggaaagcugcccccaucugca

SEQ ID NO: 333054 - RNA, 32 nt, Homo Sapiens
gucaaggcuucucagcuggagaaccggggagc

SEQ ID NO: 333055 - RNA, 32 nt, Homo Sapiens
uucaucucgcccagagugucaaggcugguaug

SEQ ID NO: 333056 - RNA, 32 nt, Homo Sapiens
aagggccccucgcucuugcuggcagggcagca

SEQ ID NO: 333057 - RNA, 32 nt, Homo Sapiens
uaguuauacgauuguguauuaagggucguuuu

SEQ ID NO: 333058 - RNA, 32 nt, Homo Sapiens
uuuuggguggugauagugaugugcuggugguc

SEQ ID NO: 333059 - RNA, 32 nt, Homo Sapiens
gauaucuaaaagucuguaauaagcuuagaagu

SEQ ID NO: 333060 - RNA, 32 nt, Homo Sapiens
acuggagccccagacgcgggcgccacaugccc

SEQ ID NO: 333061 - RNA, 32 nt, Homo Sapiens
ggcgcugcgggcgcugcacgccgccagggaaa

SEQ ID NO: 333062 - RNA, 32 nt, Homo Sapiens
ugugcucuuuuguaagaggaauuucauaccuu

SEQ ID NO: 333063 - RNA, 31 nt, Homo Sapiens
gaucauggcgcucucugucagaauugugugu

SEQ ID NO: 333064 - RNA, 32 nt, Homo Sapiens
cagauuugggguauaggucucaucucuucagg

SEQ ID NO: 333065 - RNA, 32 nt, Homo Sapiens
ggcaucagaggaccccagaaaacuacccaaau

SEQ ID NO: 333066 - RNA, 30 nt, Homo Sapiens
cacgccugggucucucuccguccggguccc

SEQ ID NO: 333067 - RNA, 32 nt, Homo Sapiens
gguggaagacacgcccuccuccccucugguca

SEQ ID NO: 333068 - RNA, 32 nt, Homo Sapiens
cuaaauaaagugacuagaauuuuuguguacua

SEQ ID NO: 333069 - RNA, 32 nt, Homo Sapiens
ccccuugccucccagaaccccagcccagaacu

SEQ ID NO: 333070 - RNA, 32 nt, Homo Sapiens
cccacucugcuucgauucuccuccuguggaag

SEQ ID NO: 333071 - RNA, 32 nt, Homo Sapiens
aauugagauaaaaguguuuuaaaauucuguuu

SEQ ID NO: 333072 - RNA, 30 nt, Homo Sapiens
aagcugaguaacugcaucugucuucuaagc

SEQ ID NO: 333073 - RNA, 32 nt, Homo Sapiens
uucuuuuauuugcaugagagagccacuaccaa

SEQ ID NO: 333074 - RNA, 32 nt, Homo Sapiens
guugcugugcccacccaguacagcuuccuccu

SEQ ID NO: 333075 - RNA, 32 nt, Homo Sapiens
uguucauacuaguagugacuguauucuugauu

SEQ ID NO: 333076 - RNA, 32 nt, Homo Sapiens
cuggcagccaaggaaacaguagugccuguuug

SEQ ID NO: 333077 - RNA, 30 nt, Homo Sapiens
cuggaagucugugcuccugaacaucaaguc

SEQ ID NO: 333078 - RNA, 31 nt, Homo Sapiens
gagaccugaauuuuuggaagagccuguacua

SEQ ID NO: 333079 - RNA, 32 nt, Homo Sapiens
cgggcgcgucaucggagcaccauggcggagcu

SEQ ID NO: 333080 - RNA, 32 nt, Homo Sapiens
gcuccgcaccccacccacuuccugugcucgcc

SEQ ID NO: 333081 - RNA, 32 nt, Homo Sapiens
aauugcuugaguucagaaguuugagaucuggg

SEQ ID NO: 333082 - RNA, 32 nt, Homo Sapiens
gaaucuuagaucuggaauuaaagaauucaagc

SEQ ID NO: 333083 - RNA, 32 nt, Homo Sapiens
gaggccaggaagaucagaggggcuggguuccg

SEQ ID NO: 333084 - RNA, 30 nt, Homo Sapiens
cauauauaaggcagggacuauaggaaauga

SEQ ID NO: 333085 - RNA, 32 nt, Homo Sapiens
caacugcuccacgugggccacugcugccauca

SEQ ID NO: 333086 - RNA, 32 nt, Homo Sapiens
cugucuccaaaauaaauaaaauuauguacaua

SEQ ID NO: 333087 - RNA, 32 nt, Homo Sapiens
gcgcgguccuucccauucacccuagucuggcg

SEQ ID NO: 333088 - RNA, 32 nt, Homo Sapiens
ccuggucuucccagcccuacugcggugcccga

SEQ ID NO: 333089 - RNA, 32 nt, Homo Sapiens
caggauuuuaagauuauacaagugaagcauua

SEQ ID NO: 333090 - RNA, 32 nt, Homo Sapiens
ugaugcuccgacugccuacucagagcucuauc

SEQ ID NO: 333091 - RNA, 32 nt, Homo Sapiens
gaaaauggauccauugaacagcucuuccauug

SEQ ID NO: 333092 - RNA, 32 nt, Homo Sapiens
auugucugcaaacccagaacuguccuuggcug

SEQ ID NO: 333093 - RNA, 32 nt, Homo Sapiens
aacuaggcaaaaauuuaagaaaacauucuagu

SEQ ID NO: 333094 - RNA, 32 nt, Homo Sapiens
uuuugguacuguaucuugaaacuugugaaaua

SEQ ID NO: 333095 - RNA, 32 nt, Homo Sapiens
gggugggggaaagcggccggugcagcgcgggg

SEQ ID NO: 333096 - RNA, 32 nt, Homo Sapiens
aaccgcccaagcagugugcccuagcagaggaa

SEQ ID NO: 333097 - RNA, 32 nt, Homo Sapiens
cagcauaggugaaaaucauauuugggcuauug

SEQ ID NO: 333098 - RNA, 32 nt, Homo Sapiens
caauugcggcuugccauuuucuuaguguuuuu

SEQ ID NO: 333099 - RNA, 32 nt, Homo Sapiens
gcgcccaccaccaaaaauuagcccagcuaauu

SEQ ID NO: 333100 - RNA, 32 nt, Homo Sapiens
gcauuuuucauuaguagcaacaauagcaauuu

SEQ ID NO: 333101 - RNA, 32 nt, Homo Sapiens
uuaauuuauuuuuuaaguuuauuuauggcucu

SEQ ID NO: 333102 - RNA, 32 nt, Homo Sapiens
agcccccucacaguauugcucacccagugccc

SEQ ID NO: 333103 - RNA, 32 nt, Homo Sapiens
ggucucaagaucugcgagaaguuugggcccaa

SEQ ID NO: 333104 - RNA, 32 nt, Homo Sapiens
ggggaugugaaugaggacaagcugauagacgu

SEQ ID NO: 333105 - RNA, 32 nt, Homo Sapiens
ucuucuuuccaccaaugaccccucgcgcugcu

SEQ ID NO: 333106 - RNA, 32 nt, Homo Sapiens
agccacuaaagccagaaaguugaaagaccucu

SEQ ID NO: 333107 - RNA, 32 nt, Homo Sapiens
uggaacugccagcuagacugcucaccaaaaug

SEQ ID NO: 333108 - RNA, 32 nt, Homo Sapiens
ggggaggcccugcggcauguaguggggacgga

SEQ ID NO: 333109 - RNA, 32 nt, Homo Sapiens
agagagggacagaggcuggagaaggauguaug

SEQ ID NO: 333110 - RNA, 32 nt, Homo Sapiens
cuuccaaauuggcccuguaggcaaauucacuu

SEQ ID NO: 333111 - RNA, 32 nt, Homo Sapiens
ucauuuauguuugaacaacauguucguggugc

SEQ ID NO: 333112 - RNA, 32 nt, Homo Sapiens
uaugauugaauuuuauuuauuaauacuucccu

SEQ ID NO: 333113 - RNA, 32 nt, Homo Sapiens
ucuuccccgcgcccaaucauuuguucccacuc

SEQ ID NO: 333114 - RNA, 32 nt, Homo Sapiens
cucgcgaucuuguuccuuuccccuccgcuucu

SEQ ID NO: 333115 - RNA, 32 nt, Homo Sapiens
caaaaauuauuccauuuaaugaaggguuuguu

SEQ ID NO: 333116 - RNA, 32 nt, Homo Sapiens
cucguaguggccugucaaccacuuucggagaa

SEQ ID NO: 333117 - RNA, 32 nt, Homo Sapiens
aggagaagagggugguguuuucacgcgggcaa

SEQ ID NO: 333118 - RNA, 32 nt, Homo Sapiens
ucuuugcucuaaaugauaucugaguaaauaga

SEQ ID NO: 333119 - RNA, 32 nt, Homo Sapiens
uccgguguggaggcuauguagcuggugcgcug

SEQ ID NO: 333120 - RNA, 32 nt, Homo Sapiens
ucaguacuccuacaauucacggacaaaccuac

SEQ ID NO: 333121 - RNA, 32 nt, Homo Sapiens
agacaaaaaauauuaccauauaauuuaagaaa

SEQ ID NO: 333122 - RNA, 32 nt, Homo Sapiens
cgggagccgcgccgcgcgcagugucugcagug

SEQ ID NO: 333123 - RNA, 32 nt, Homo Sapiens
gcugugcccggcccgcgaggucuaaggcaugg

SEQ ID NO: 333124 - RNA, 32 nt, Homo Sapiens
aucacagaggggcugggcauucucuggagcag

SEQ ID NO: 333125 - RNA, 32 nt, Homo Sapiens
cuggggaggcccagcuggagcggcgggcagug

SEQ ID NO: 333126 - RNA, 32 nt, Homo Sapiens
gugccaugagagaaaaacuuaaggaguuuuga

SEQ ID NO: 333127 - RNA, 32 nt, Homo Sapiens
gugggggcgggggagggaaagcauuaggagau

SEQ ID NO: 333128 - RNA, 32 nt, Homo Sapiens
cuucaaauacucacacgugaaauuucaaaaaa

SEQ ID NO: 333129 - RNA, 32 nt, Homo Sapiens
uccggacccgggccgcgagaccccgcucgccc

SEQ ID NO: 333130 - RNA, 32 nt, Homo Sapiens
cuugauauaacuccuaguuauaauuuugaugc

SEQ ID NO: 333131 - RNA, 32 nt, Homo Sapiens
ccauaucccagccccaggcggaccagaggugg

SEQ ID NO: 333132 - RNA, 32 nt, Homo Sapiens
uaagcuuuuuaaaauccaauauauucugccaa

SEQ ID NO: 333133 - RNA, 32 nt, Homo Sapiens
ccucucugccagccgcuggugcccaccagcug

SEQ ID NO: 333134 - RNA, 32 nt, Homo Sapiens
gagauuguuucugaaacucugauugcuuuuau

SEQ ID NO: 333135 - RNA, 32 nt, Homo Sapiens
gaaucaggguccucgggcaugaacgcgagccc

SEQ ID NO: 333136 - RNA, 29 nt, Homo Sapiens
acaucgcggggacagggguggccauggcg

SEQ ID NO: 333137 - RNA, 32 nt, Homo Sapiens
guuaacuacuguacaacccgacuucauaaugg

SEQ ID NO: 333138 - RNA, 32 nt, Homo Sapiens
cacauaauuuaaaaaugaaauugcuguuugcc

SEQ ID NO: 333139 - RNA, 29 nt, Homo Sapiens
cagagccggggacagagagagucugagcu

SEQ ID NO: 333140 - RNA, 32 nt, Homo Sapiens
ggaugguuagucugcugggaugggcccuccaa

SEQ ID NO: 333141 - RNA, 32 nt, Homo Sapiens
gcgcccgccggugccaccgccggccgugcuug

SEQ ID NO: 333142 - RNA, 32 nt, Homo Sapiens
ggaaggccagugcgacggcaaaucucgugaac

SEQ ID NO: 333143 - RNA, 32 nt, Homo Sapiens
gacggccaccacggcgccggcgcgcagcucgg

SEQ ID NO: 333144 - RNA, 32 nt, Homo Sapiens
guauugcguuugcgaaugugcgugaacacacg

SEQ ID NO: 333145 - RNA, 32 nt, Homo Sapiens
agagaggauccuucaugaauggcucagcacca

SEQ ID NO: 333146 - RNA, 32 nt, Homo Sapiens
gugagcgcaccucgcggggcccucggggcagg

SEQ ID NO: 333147 - RNA, 32 nt, Homo Sapiens
uacaggaucacucccucugugccaggugccac

SEQ ID NO: 333148 - RNA, 32 nt, Homo Sapiens
gagggacgcagggagggaaaagcguugggagg

SEQ ID NO: 333149 - RNA, 32 nt, Homo Sapiens
uugaacaacaauagauaaauaguuuucuuugu

SEQ ID NO: 333150 - RNA, 32 nt, Homo Sapiens
ccaaaacuaaaaugaagauuucaacuccccaa

SEQ ID NO: 333151 - RNA, 32 nt, Homo Sapiens
agagaccuugucucuaaaaacaaaacaaaaca

SEQ ID NO: 333152 - RNA, 32 nt, Homo Sapiens
gacccuggacgcgcgggcgcgcgcggaaggua

SEQ ID NO: 333153 - RNA, 32 nt, Homo Sapiens
ugagagggaggcuaugccugcugcuuggauuc

SEQ ID NO: 333154 - RNA, 32 nt, Homo Sapiens
aagcugggaucuuuuucuuuuuuuuuaagucu

SEQ ID NO: 333155 - RNA, 32 nt, Homo Sapiens
gugggggcaucucacagccugacuucccuucc

SEQ ID NO: 333156 - RNA, 32 nt, Homo Sapiens
uuauuuacaacacugcugcccccuuuccuccc

SEQ ID NO: 333157 - RNA, 32 nt, Homo Sapiens
ggccgggaggccggagcugcgggcguagggac

SEQ ID NO: 333158 - RNA, 32 nt, Homo Sapiens
caaagaaaaaagugcuuaauaaaaaugauggg

SEQ ID NO: 333159 - RNA, 32 nt, Homo Sapiens
acacccuccuccccgggacgccgcagcuuucu

SEQ ID NO: 333160 - RNA, 32 nt, Homo Sapiens
gugagguauauuuuaauacugaucaaugugaa

SEQ ID NO: 333161 - RNA, 32 nt, Homo Sapiens
ccugugcucugcccgugaccgccccccgcccc

SEQ ID NO: 333162 - RNA, 32 nt, Homo Sapiens
guucucaagauaaggagauaacauccagcuuu

SEQ ID NO: 333163 - RNA, 32 nt, Homo Sapiens
guaggugacacaugugccuugagguaugugag

SEQ ID NO: 333164 - RNA, 32 nt, Homo Sapiens
gguuccugagcccccacccccaaucccagugc

SEQ ID NO: 333165 - RNA, 32 nt, Homo Sapiens
guugcuauuuaaaaaaauuuuacaauucuuac

SEQ ID NO: 333166 - RNA, 32 nt, Homo Sapiens
aauuaagcugaauguagacaaauaaagaaaaa

SEQ ID NO: 333167 - RNA, 32 nt, Homo Sapiens
aaaaaagaugcuaauauauuuaucucauuguu

SEQ ID NO: 333168 - RNA, 32 nt, Homo Sapiens
aucaaaccaaaaugacaacugcucacuuuuac

SEQ ID NO: 333169 - RNA, 32 nt, Homo Sapiens
ggcacgagggagcggugcggaggcucugcucg

SEQ ID NO: 333170 - RNA, 32 nt, Homo Sapiens
agagggcuccugugacggcggcgaggcuuggg

SEQ ID NO: 333171 - RNA, 32 nt, Homo Sapiens
ccuguuauuugcuucuaaauuagcagcucucu

SEQ ID NO: 333172 - RNA, 32 nt, Homo Sapiens
aaccaugcuguaaaugcuuauuuuauuacaaa

SEQ ID NO: 333173 - RNA, 31 nt, Homo Sapiens
agagugagacuccaucucagagaaaaauaaa

SEQ ID NO: 333174 - RNA, 32 nt, Homo Sapiens
ccgcuugccugccccagggucaggcugggcaa

SEQ ID NO: 333175 - RNA, 32 nt, Homo Sapiens
uguguaagugacucaucuuccuguuguuccaa

SEQ ID NO: 333176 - RNA, 32 nt, Homo Sapiens
acuuccgcacgcuuccaccuccuucgaccucc

SEQ ID NO: 333177 - RNA, 32 nt, Homo Sapiens
agcacuucccccuccuugaggcaggaauacug

SEQ ID NO: 333178 - RNA, 32 nt, Homo Sapiens
accugaaggacauggaggaaagaccggcagag

SEQ ID NO: 333179 - RNA, 32 nt, Homo Sapiens
ucacccaggaggagaggcguggcugagggccc

SEQ ID NO: 333180 - RNA, 32 nt, Homo Sapiens
ccagccggagccaccuccuucccggccgcccc

SEQ ID NO: 333181 - RNA, 32 nt, Homo Sapiens
aguuauuucuucaagagcugcaccucuccucc

SEQ ID NO: 333182 - RNA, 32 nt, Homo Sapiens
aucuugacuuuagucugucuuaauuuucauga

SEQ ID NO: 333183 - RNA, 32 nt, Homo Sapiens
gagggccccucccccauccccaccucagugcc

SEQ ID NO: 333184 - RNA, 32 nt, Homo Sapiens
cgugaaaaacuguguccgagaacacucgggag

SEQ ID NO: 333185 - RNA, 32 nt, Homo Sapiens
cacgcacauauacacacacacacacacacaca

SEQ ID NO: 333186 - RNA, 32 nt, Homo Sapiens
aagggagguuaaaggagggaacacaacuuuuu

SEQ ID NO: 333187 - RNA, 32 nt, Homo Sapiens
augauccaguguuccuggauggcgaccuccug

SEQ ID NO: 333188 - RNA, 32 nt, Homo Sapiens
gagguaugucugcagaggcccgggccugggca

SEQ ID NO: 333189 - RNA, 32 nt, Homo Sapiens
auugaauuacucaaggcugccucucugcaaag

SEQ ID NO: 333190 - RNA, 32 nt, Homo Sapiens
ucgagcagcugagacagcagcugaagccaggu

SEQ ID NO: 333191 - RNA, 32 nt, Homo Sapiens
caccuggccauggaggacccaggcucagccca

SEQ ID NO: 333192 - RNA, 32 nt, Homo Sapiens
cuccgcucggccccgcgccgcccgucaacaug

SEQ ID NO: 333193 - RNA, 32 nt, Homo Sapiens
ggaguauaugugugucuauacacacacauaca

SEQ ID NO: 333194 - RNA, 32 nt, Homo Sapiens
gugucaccccgagcagcucauccaccauggag

SEQ ID NO: 333195 - RNA, 32 nt, Homo Sapiens
augacacugcuguuccuucucuuucuccuucu

SEQ ID NO: 333196 - RNA, 32 nt, Homo Sapiens
cggauaauuuuuuguauuuuucgccauguugg

SEQ ID NO: 333197 - RNA, 32 nt, Homo Sapiens
cuggcucaggguggucuuccagccguggccca

SEQ ID NO: 333198 - RNA, 32 nt, Homo Sapiens
gcauggcuuguaucugcaguguccuugcugug

SEQ ID NO: 333199 - RNA, 32 nt, Homo Sapiens
gccucagccccgcgcgccuccuggacucaggg

SEQ ID NO: 333200 - RNA, 32 nt, Homo Sapiens
ucuacuaaaaaauuauuuuaaaaggcuggagg

SEQ ID NO: 333201 - RNA, 32 nt, Homo Sapiens
ucauauuggauuggggcccacccuagugaccu

SEQ ID NO: 333202 - RNA, 30 nt, Homo Sapiens
gccaaccaugcucagcuaauuuuucuauuu

SEQ ID NO: 333203 - RNA, 32 nt, Homo Sapiens
agcaucugacuauaugugugucuauccugaaa

SEQ ID NO: 333204 - RNA, 32 nt, Homo Sapiens
gauugccugagcucaggaguuugagaccaacc

SEQ ID NO: 333205 - RNA, 32 nt, Homo Sapiens
cuccuuucagaaugcuaggguggcucucacca

SEQ ID NO: 333206 - RNA, 32 nt, Homo Sapiens
ggcuguuggggguggggagacgcgcggcgagg

SEQ ID NO: 333207 - RNA, 32 nt, Homo Sapiens
ccaaaaccuggugugucacgugaggucaggag

SEQ ID NO: 333208 - RNA, 32 nt, Homo Sapiens
ggugaaggauccuaaagugcuguggggaguga

SEQ ID NO: 333209 - RNA, 32 nt, Homo Sapiens
aucuccaaggaaaaacucuacagagcaucuuu

SEQ ID NO: 333210 - RNA, 32 nt, Homo Sapiens
cgggcugcuggcgcagcuggcgcggagcuucg

SEQ ID NO: 333211 - RNA, 32 nt, Homo Sapiens
auggccacccucaagaggcgagaugagcccac

SEQ ID NO: 333212 - RNA, 32 nt, Homo Sapiens
uuuuucuccucccgaaggaacagcugauucau

SEQ ID NO: 333213 - RNA, 32 nt, Homo Sapiens
auagcaaugcuguguuauuacuugaauauaga

SEQ ID NO: 333214 - RNA, 32 nt, Homo Sapiens
uaagugguauuauauuuuacauuuucaaguau

SEQ ID NO: 333215 - RNA, 32 nt, Homo Sapiens
gcagagaugccguccacccccaucuaggugag

SEQ ID NO: 333216 - RNA, 32 nt, Homo Sapiens
cuccagggcuccugggcugccagggaccuuca

SEQ ID NO: 333217 - RNA, 32 nt, Homo Sapiens
cugggaaggggaggagagcaaugaaaggcgcg

SEQ ID NO: 333218 - RNA, 32 nt, Homo Sapiens
auaccauuccuugaaacagaggugaugaauag

SEQ ID NO: 333219 - RNA, 32 nt, Homo Sapiens
aaaagaagaaggcccugcuguuguggccaugu

SEQ ID NO: 333220 - RNA, 32 nt, Homo Sapiens
ugaccagccgugguggugguuacuccaucugu

SEQ ID NO: 333221 - RNA, 32 nt, Homo Sapiens
uacaggccaaccccaggggccucucacagggc

SEQ ID NO: 333222 - RNA, 32 nt, Homo Sapiens
ugaaaacuauuuuuauaucauuggcuuucuuu

SEQ ID NO: 333223 - RNA, 32 nt, Homo Sapiens
ggcccaccuuggcugagcuugcucuggugcua

SEQ ID NO: 333224 - RNA, 32 nt, Homo Sapiens
auaucucaggcugcuggucccuccucaaucaa

SEQ ID NO: 333225 - RNA, 32 nt, Homo Sapiens
acuucuggaaaccucccugcacucuggaaacc

SEQ ID NO: 333226 - RNA, 32 nt, Homo Sapiens
cccccucuggaaugccaaaggcaagguacuag

SEQ ID NO: 333227 - RNA, 32 nt, Homo Sapiens
uguaguuggagcaucaguagucucuuggaauu

SEQ ID NO: 333228 - RNA, 32 nt, Homo Sapiens
gcagaggaggggcugccuggagcuucccaccc

SEQ ID NO: 333229 - RNA, 32 nt, Homo Sapiens
uauuuuacaacuuucuuuauuaagcauuuuua

SEQ ID NO: 333230 - RNA, 28 nt, Homo Sapiens
ccacagauagauuaaccuaagaauccug

SEQ ID NO: 333231 - RNA, 32 nt, Homo Sapiens
cggagcaagcgccgcacaggugguggcugaga

SEQ ID NO: 333232 - RNA, 32 nt, Homo Sapiens
cccucuuuuucucgcuuguggacuccgauaua

SEQ ID NO: 333233 - RNA, 32 nt, Homo Sapiens
cuuuuuaaaacaaacaaacaaacaaaacaaaa

SEQ ID NO: 333234 - RNA, 29 nt, Homo Sapiens
cucaaaauauguaugaaccaaaggauaua

SEQ ID NO: 333235 - RNA, 32 nt, Homo Sapiens
ugccaaaguuuccaccugaggacgguguuucg

SEQ ID NO: 333236 - RNA, 32 nt, Homo Sapiens
agguaggagggucagaaaggaggcugacagca

SEQ ID NO: 333237 - RNA, 32 nt, Homo Sapiens
aacuagugcaggguauguggguggcacugacc

SEQ ID NO: 333238 - RNA, 32 nt, Homo Sapiens
gcuaaauuagaacggcuucauuauuacuguga

SEQ ID NO: 333239 - RNA, 27 nt, Homo Sapiens
acaugaagugcuuuuucccggugcuga

SEQ ID NO: 333240 - RNA, 32 nt, Homo Sapiens
uuguguggcuggaaucucuggguaaggaacuu

SEQ ID NO: 333241 - RNA, 32 nt, Homo Sapiens
uauuuauuucuuucuauucuuggaaccacgaa

SEQ ID NO: 333242 - RNA, 28 nt, Homo Sapiens
ugaauggcucugcugaagauggccggaa

SEQ ID NO: 333243 - RNA, 32 nt, Homo Sapiens
gaaguccaguguucuggacuugggguaagcag

SEQ ID NO: 333244 - RNA, 32 nt, Homo Sapiens
gccaugaguuucugccggggcuagcccuagag

SEQ ID NO: 333245 - RNA, 32 nt, Homo Sapiens
agaaagacaauuuuaauguuuacaacaauaaa

SEQ ID NO: 333246 - RNA, 32 nt, Homo Sapiens
cucugacucgcugugcgccccgcggccggcgg

SEQ ID NO: 333247 - RNA, 32 nt, Homo Sapiens
gugggugugaauguguauacaugcccaucagc

SEQ ID NO: 333248 - RNA, 31 nt, Homo Sapiens
uuggucccccacaaccugccccggccaggcc

SEQ ID NO: 333249 - RNA, 32 nt, Homo Sapiens
aaagaaaagcagaaggaacaucugaaggaaca

SEQ ID NO: 333250 - RNA, 32 nt, Homo Sapiens
ucccaggggacagguuucaagcccuuagggau

SEQ ID NO: 333251 - RNA, 32 nt, Homo Sapiens
uucacaguagccaaaagagaagcaauccaugc

SEQ ID NO: 333252 - RNA, 32 nt, Homo Sapiens
gaaauuuaggauuuuucucuuaaagcaaauac

SEQ ID NO: 333253 - RNA, 32 nt, Homo Sapiens
ugucgggccccggcccucuggagcuucaggag

SEQ ID NO: 333254 - RNA, 32 nt, Homo Sapiens
caaaaguuuaacaagcgagguacgcuguuaag

SEQ ID NO: 333255 - RNA, 32 nt, Homo Sapiens
cgcagagcuuggcugcgccggggguuccucgu

SEQ ID NO: 333256 - RNA, 32 nt, Homo Sapiens
aaacucucggagaaauaaaaucaauaaaaagc

SEQ ID NO: 333257 - RNA, 32 nt, Homo Sapiens
caucauggucugcagcucugggcccccagccc

SEQ ID NO: 333258 - RNA, 32 nt, Homo Sapiens
augaaguuuuugcuggaguuaccacacaccag

SEQ ID NO: 333259 - RNA, 32 nt, Homo Sapiens
aguaaccagaaucucagggcuuauccuagaag

SEQ ID NO: 333260 - RNA, 29 nt, Homo Sapiens
gaauacuaaaguuuguagcuccugacauu

SEQ ID NO: 333261 - RNA, 32 nt, Homo Sapiens
gcagggucaggaggggagggguucuguucuga

SEQ ID NO: 333262 - RNA, 32 nt, Homo Sapiens
aaggcgcccgcugcucgcucuuucucucggag

SEQ ID NO: 333263 - RNA, 32 nt, Homo Sapiens
ucugagcggccccugauguuccuguuggacac

SEQ ID NO: 333264 - RNA, 32 nt, Homo Sapiens
acuuggguagaagaggagcaaaaauaccucug

SEQ ID NO: 333265 - RNA, 32 nt, Homo Sapiens
gaaccccucacaguugcugugggcaacuccag

SEQ ID NO: 333266 - RNA, 32 nt, Homo Sapiens
uccccugcuagagaacccuuaauuauaggcau

SEQ ID NO: 333267 - RNA, 32 nt, Homo Sapiens
gggccauccuuuagaaaccugucuaguuguuu

SEQ ID NO: 333268 - RNA, 32 nt, Homo Sapiens
gauggggaauaucuuggaaauaaucgccucaa

SEQ ID NO: 333269 - RNA, 32 nt, Homo Sapiens
ugcccucacacucugcgccuccucucccggga

SEQ ID NO: 333270 - RNA, 32 nt, Homo Sapiens
uaccaaaaucaucacauuuuacucuguaaucu

SEQ ID NO: 333271 - RNA, 32 nt, Homo Sapiens
agcggagcggcuggggcugcgcggcguggcgg

SEQ ID NO: 333272 - RNA, 32 nt, Homo Sapiens
cccuugugugacucauacuuguuuuguuuaau

SEQ ID NO: 333273 - RNA, 32 nt, Homo Sapiens
gcugucccagguggcuuacagaugaacccaac

SEQ ID NO: 333274 - RNA, 32 nt, Homo Sapiens
uggggcccaagcccccgugaagaugguguccu

SEQ ID NO: 333275 - RNA, 32 nt, Homo Sapiens
gcaaaaauuaaaagaacuuaugaaaacaaaug

SEQ ID NO: 333276 - RNA, 31 nt, Homo Sapiens
cauucauaagggacuuugcaagguggcaaca

SEQ ID NO: 333277 - RNA, 32 nt, Homo Sapiens
gauucaaagaagaaagcagaguggggcacuca

SEQ ID NO: 333278 - RNA, 32 nt, Homo Sapiens
cugacagcugucuuccacagccucugaugugg

SEQ ID NO: 333279 - RNA, 32 nt, Homo Sapiens
cugaccugccuuggccgcacagagggacccaa

SEQ ID NO: 333280 - RNA, 32 nt, Homo Sapiens
uuggauuucacgaagucaaaucuugcaaaggc

SEQ ID NO: 333281 - RNA, 30 nt, Homo Sapiens
auacuuugucuuucugcagaaaauucuacc

SEQ ID NO: 333282 - RNA, 32 nt, Homo Sapiens
cauuaacuuuggaaacaaaaauguacaauuaa

SEQ ID NO: 333283 - RNA, 32 nt, Homo Sapiens
caugcccgugcagcucgcacauauguggggca

SEQ ID NO: 333284 - RNA, 32 nt, Homo Sapiens
cuugauguauguucugauacaaguuguucagc

SEQ ID NO: 333285 - RNA, 32 nt, Homo Sapiens
ccggugucaagccccggcgcaggcuugcucuu

SEQ ID NO: 333286 - RNA, 32 nt, Homo Sapiens
ucgggcgauccgggaauaaagaauguccgccu

SEQ ID NO: 333287 - RNA, 32 nt, Homo Sapiens
cuagauaugacuccaggacccuugaguguaau

SEQ ID NO: 333288 - RNA, 32 nt, Homo Sapiens
uucgcaccguaaugcccggccguuggggccgu

SEQ ID NO: 333289 - RNA, 32 nt, Homo Sapiens
auucaugucucuauccccaggaauagaauuua

SEQ ID NO: 333290 - RNA, 32 nt, Homo Sapiens
uuuuauuuguaagaguuuuucuuuauuuaaaa

SEQ ID NO: 333291 - RNA, 32 nt, Homo Sapiens
cacucugagcggccggccggccccgccagccu

SEQ ID NO: 333292 - RNA, 32 nt, Homo Sapiens
ggggagucucgcuugcuucucuucagaugcaa

SEQ ID NO: 333293 - RNA, 32 nt, Homo Sapiens
agcaucaggccaccuccaccccaaugccagga

SEQ ID NO: 333294 - RNA, 32 nt, Homo Sapiens
gcuggcggcagcggcgggagggagccgagaga

SEQ ID NO: 333295 - RNA, 32 nt, Homo Sapiens
gcuuggucgcagugacugugguguccuugaga

SEQ ID NO: 333296 - RNA, 32 nt, Homo Sapiens
ucuuguacuucggagaucugaagccgagcaac

SEQ ID NO: 333297 - RNA, 32 nt, Homo Sapiens
uaccugagcaggagccagcgccugcuggagcu

SEQ ID NO: 333298 - RNA, 32 nt, Homo Sapiens
aggacguuucagcccucagcccgggguggcug

SEQ ID NO: 333299 - RNA, 32 nt, Homo Sapiens
uccuccuucuccuccucucacccaggaucacu

SEQ ID NO: 333300 - RNA, 32 nt, Homo Sapiens
aauacauuguuucauuuaauucuucuaacaag

SEQ ID NO: 333301 - RNA, 32 nt, Homo Sapiens
uagccccagacaagcugcugacacggcagcca

SEQ ID NO: 333302 - RNA, 32 nt, Homo Sapiens
gcgacugccgaucgccccggcgcggcaccgcu

SEQ ID NO: 333303 - RNA, 32 nt, Homo Sapiens
cugaggaagcaucugaaugcaggaggcucugu

SEQ ID NO: 333304 - RNA, 32 nt, Homo Sapiens
uuuucuagaaaacguuaaugggucuugaagau

SEQ ID NO: 333305 - RNA, 32 nt, Homo Sapiens
uacuuugacauaaaguugauaaagauuuuuua

SEQ ID NO: 333306 - RNA, 32 nt, Homo Sapiens
gcccaaagaacaauaauucggagaaggaaaac

SEQ ID NO: 333307 - RNA, 32 nt, Homo Sapiens
ccuugaugacacugaggccuacgucgagauag

SEQ ID NO: 333308 - RNA, 32 nt, Homo Sapiens
aaggcuugccccagccuguaccccagccccug

SEQ ID NO: 333309 - RNA, 32 nt, Homo Sapiens
uauguuuaguuucaaaauauauuacuuuccug

SEQ ID NO: 333310 - RNA, 32 nt, Homo Sapiens
ugugagcuggggacuccugggcccugugagcc

SEQ ID NO: 333311 - RNA, 31 nt, Homo Sapiens
gccgcggccgugagccugcccccaacucgcc

SEQ ID NO: 333312 - RNA, 32 nt, Homo Sapiens
ccacagcugcggccacugcagcagccaugaag

SEQ ID NO: 333313 - RNA, 32 nt, Homo Sapiens
uggaggugaaauaaagagaaaagggaaccuug

SEQ ID NO: 333314 - RNA, 32 nt, Homo Sapiens
ucgccaccgcucccggccgccgcgcuccggua

SEQ ID NO: 333315 - RNA, 32 nt, Homo Sapiens
ugaccagggaagaucugggcuucaugaggccc

SEQ ID NO: 333316 - RNA, 32 nt, Homo Sapiens
acagugcggauaaaggugcggaugcugcuggc

SEQ ID NO: 333317 - RNA, 32 nt, Homo Sapiens
aauauagaaaaguauacaaaacaaaacaguaa

SEQ ID NO: 333318 - RNA, 32 nt, Homo Sapiens
cuguuguucauacuuuuuccuuccugacauuu

SEQ ID NO: 333319 - RNA, 32 nt, Homo Sapiens
gcugccccgagauuccugcgacgcugucuguu

SEQ ID NO: 333320 - RNA, 32 nt, Homo Sapiens
caaguggaacaucagcuggaagaagaaaagaa

SEQ ID NO: 333321 - RNA, 32 nt, Homo Sapiens
agagaagcugggagagcagagaaaaggggcca

SEQ ID NO: 333322 - RNA, 32 nt, Homo Sapiens
gcucuccucggccuggggcucuggccaaggau

SEQ ID NO: 333323 - RNA, 32 nt, Homo Sapiens
aagcgagagggagagcgagcaaaaggcgcgau

SEQ ID NO: 333324 - RNA, 32 nt, Homo Sapiens
uuuuuauugguagucuuuuuugcuaguuuuua

SEQ ID NO: 333325 - RNA, 32 nt, Homo Sapiens
aaagaagagaaccguucguuugcaaucuacag

SEQ ID NO: 333326 - RNA, 32 nt, Homo Sapiens
uaaauauuaaacuaaacuguauuguuauuagu

SEQ ID NO: 333327 - RNA, 32 nt, Homo Sapiens
gguuuggaggaaguggagccuccacgaacucu

SEQ ID NO: 333328 - RNA, 32 nt, Homo Sapiens
aucuggggcucuucuuccuuucuuccccccgu

SEQ ID NO: 333329 - RNA, 32 nt, Homo Sapiens
ugagaagugucuguucauguccuucgcccacu

SEQ ID NO: 333330 - RNA, 32 nt, Homo Sapiens
uguucuuugaaagguuuuuuuauuuuuguuuu

SEQ ID NO: 333331 - RNA, 32 nt, Homo Sapiens
caagggggagacgggugggggucgcugacuau

SEQ ID NO: 333332 - RNA, 32 nt, Homo Sapiens
ccaccuugccugcgcccgcccggagccagcgg

SEQ ID NO: 333333 - RNA, 32 nt, Homo Sapiens
uggaagcgcaggagcgcacgcgggaggcuaug

SEQ ID NO: 333334 - RNA, 32 nt, Homo Sapiens
ggacacguggggugccugggacgcugcuugcc

SEQ ID NO: 333335 - RNA, 32 nt, Homo Sapiens
uggccagaaugaauucuucgaaaaauauaggu

SEQ ID NO: 333336 - RNA, 32 nt, Homo Sapiens
gguauucuauuauaaauguuuauuuuuuaaag

SEQ ID NO: 333337 - RNA, 32 nt, Homo Sapiens
guuuuacauuuuaugaaguaaagauguaaaug

SEQ ID NO: 333338 - RNA, 30 nt, Homo Sapiens
gaaugugucugugguuaggauagcacaagc

SEQ ID NO: 333339 - RNA, 32 nt, Homo Sapiens
uuaagcagcgagggcgcgaccgcggguacucu

SEQ ID NO: 333340 - RNA, 32 nt, Homo Sapiens
ugccccgcccuggugcucuccccaggcucccu

SEQ ID NO: 333341 - RNA, 32 nt, Homo Sapiens
cauucuugaguuauggaugacaaggcuucugu

SEQ ID NO: 333342 - RNA, 32 nt, Homo Sapiens
cugcauauuauuuucccauauuugagcaccac

SEQ ID NO: 333343 - RNA, 32 nt, Homo Sapiens
uggaagugggaagcuagagagaauugagugug

SEQ ID NO: 333344 - RNA, 32 nt, Homo Sapiens
agacuuggcugauguuuucuuguuucuguuuc

SEQ ID NO: 333345 - RNA, 32 nt, Homo Sapiens
cuccucucuaaaggguugaggcugagcuauaa

SEQ ID NO: 333346 - RNA, 32 nt, Homo Sapiens
gcgcugacgcugcagcccuggaccugcugggg

SEQ ID NO: 333347 - RNA, 32 nt, Homo Sapiens
uuuucuggggaguggaaggcguccuugaucac

SEQ ID NO: 333348 - RNA, 32 nt, Homo Sapiens
ccgugacccccuccucaccugcugguuggggg

SEQ ID NO: 333349 - RNA, 32 nt, Homo Sapiens
uugggaagacaagaauuuuucuuaauaacaaa

SEQ ID NO: 333350 - RNA, 32 nt, Homo Sapiens
ggaugauaguuguccuuuguauggaggcugga

SEQ ID NO: 333351 - RNA, 32 nt, Homo Sapiens
cuauuuggcuaccuacuucucuacauuaugcc

SEQ ID NO: 333352 - RNA, 32 nt, Homo Sapiens
ggugcgccucgggccgcgggacucgcagccgc

SEQ ID NO: 333353 - RNA, 32 nt, Homo Sapiens
guggcucguccgcgcgcagcucccucagcuuc

SEQ ID NO: 333354 - RNA, 32 nt, Homo Sapiens
cuagcgggcguccgcgccauggagcgcuacgc

SEQ ID NO: 333355 - RNA, 32 nt, Homo Sapiens
agguauguuugugaaagacauguaacuugggg

SEQ ID NO: 333356 - RNA, 31 nt, Homo Sapiens
ugagaaaguuugacuuuguuaaauauuuuga

SEQ ID NO: 333357 - RNA, 32 nt, Homo Sapiens
cacgcgggaggagacucgggacacccacucgc

SEQ ID NO: 333358 - RNA, 32 nt, Homo Sapiens
aguucagagcagccuggccaccauagugagau

SEQ ID NO: 333359 - RNA, 32 nt, Homo Sapiens
cgcgagcgggcggacuggcggcggcggcagcu

SEQ ID NO: 333360 - RNA, 32 nt, Homo Sapiens
ggcuggccgccgcuccuccuaccugcuggcca

SEQ ID NO: 333361 - RNA, 32 nt, Homo Sapiens
uaaacagucauugcuuucaagaucauccuaaa

SEQ ID NO: 333362 - RNA, 32 nt, Homo Sapiens
aaauuaucauguguuauaacauguggagaugu

SEQ ID NO: 333363 - RNA, 32 nt, Homo Sapiens
acagucuguauauuuuaauaaugcagagcuau

SEQ ID NO: 333364 - RNA, 31 nt, Homo Sapiens
ugagcauuagcuacuuuucagaauugaagga

SEQ ID NO: 333365 - RNA, 32 nt, Homo Sapiens
gcaaugagaaagauuuugggaaugugaucauu

SEQ ID NO: 333366 - RNA, 32 nt, Homo Sapiens
cauaaacuguuuucuuuuucuuucuuaaaaaa

SEQ ID NO: 333367 - RNA, 32 nt, Homo Sapiens
gaaugaaaugcugcagaagagaagugaagagc

SEQ ID NO: 333368 - RNA, 32 nt, Homo Sapiens
cccgcgcuguaaccgcggcugccgcugcugcu

SEQ ID NO: 333369 - RNA, 32 nt, Homo Sapiens
aaaagacaaaaaugaaauauauaacaacaaug

SEQ ID NO: 333370 - RNA, 32 nt, Homo Sapiens
aaaguucaagaaugauguccacugcuuucuaa

SEQ ID NO: 333371 - RNA, 32 nt, Homo Sapiens
gauacgaaacaacuuacuuuaagggacagggu

SEQ ID NO: 333372 - RNA, 32 nt, Homo Sapiens
cccauuucguuuugcuuuugguugccugaaug

SEQ ID NO: 333373 - RNA, 32 nt, Homo Sapiens
uuaaucuauauugguugacaaacaagccacca

SEQ ID NO: 333374 - RNA, 32 nt, Homo Sapiens
gucccacuugguuguuuaguugaggcacuuua

SEQ ID NO: 333375 - RNA, 32 nt, Homo Sapiens
gcgcggcggccgccgccucucucaacaccggc

SEQ ID NO: 333376 - RNA, 32 nt, Homo Sapiens
ccaucuuggugugugcaugaguauugucucuu

SEQ ID NO: 333377 - RNA, 31 nt, Homo Sapiens
caauggcuccacagccugcccugcagcuguc

SEQ ID NO: 333378 - RNA, 32 nt, Homo Sapiens
gcggccaagauggcagaacagagcuucacgau

SEQ ID NO: 333379 - RNA, 32 nt, Homo Sapiens
uaccuguaaaaugguguauauauguauaaaua

SEQ ID NO: 333380 - RNA, 32 nt, Homo Sapiens
gacuauauuaagguuguguuuauauuagguga

SEQ ID NO: 333381 - RNA, 32 nt, Homo Sapiens
guucccaucuucucucaccccuuucaucucug

SEQ ID NO: 333382 - RNA, 32 nt, Homo Sapiens
gugucggccucugggcggauguugacauugug

SEQ ID NO: 333383 - RNA, 32 nt, Homo Sapiens
aaauuagcuggguguggcggugcacgccugug

SEQ ID NO: 333384 - RNA, 32 nt, Homo Sapiens
cacuuguccacgucuuuucucauaucauggua

SEQ ID NO: 333385 - RNA, 32 nt, Homo Sapiens
ggauccuccagauggcauucaugucuuacuca

SEQ ID NO: 333386 - RNA, 32 nt, Homo Sapiens
uaugcaacaaauccagaauccaagcaaauagu

SEQ ID NO: 333387 - RNA, 32 nt, Homo Sapiens
auuuuguauuuuuuaguagagauggggucucu

SEQ ID NO: 333388 - RNA, 32 nt, Homo Sapiens
aauuuugaagccauaugaguuuauauugauuu

SEQ ID NO: 333389 - RNA, 32 nt, Homo Sapiens
aggaacgucaaggucaugggaaauaaaggcag

SEQ ID NO: 333390 - RNA, 32 nt, Homo Sapiens
ucucccgaaaaggaugaaaagccuccuccuuu

SEQ ID NO: 333391 - RNA, 32 nt, Homo Sapiens
ucuagggcugugcaggacgugccuuguuuaca

SEQ ID NO: 333392 - RNA, 32 nt, Homo Sapiens
agcauuggaaacaacaacaacaacaaaaccca

SEQ ID NO: 333393 - RNA, 32 nt, Homo Sapiens
cuucauaucccaugcuguuuaacuaucucuuc

SEQ ID NO: 333394 - RNA, 32 nt, Homo Sapiens
cagagugggugcuaggagcucuggccaaagcg

SEQ ID NO: 333395 - RNA, 32 nt, Homo Sapiens
auugauuuuuauuuuaguuaccucccucuagu

SEQ ID NO: 333396 - RNA, 32 nt, Homo Sapiens
ucaagaaaauuuguuguuagauauauuuuggc

SEQ ID NO: 333397 - RNA, 32 nt, Homo Sapiens
auguucugucuccuuccauaaauuuuucaaaa

SEQ ID NO: 333398 - RNA, 32 nt, Homo Sapiens
gauauuacaaauaauaucacaggguguacgcc

SEQ ID NO: 333399 - RNA, 32 nt, Homo Sapiens
caagagauagucucagaaaaaagucauuggcu

SEQ ID NO: 333400 - RNA, 32 nt, Homo Sapiens
aaugaaguauaagaauaucagauccaguuagc

SEQ ID NO: 333401 - RNA, 32 nt, Homo Sapiens
uuugucugucagagagcaaauugccaaaaaaa

SEQ ID NO: 333402 - RNA, 32 nt, Homo Sapiens
ggucuucggaagcgaagcagugucaacagucc

SEQ ID NO: 333403 - RNA, 32 nt, Homo Sapiens
auuucaugauaguuuuugcagaugaaaaucac

SEQ ID NO: 333404 - RNA, 32 nt, Homo Sapiens
cauggccaucuucuccacgggcgucuggguga

SEQ ID NO: 333405 - RNA, 32 nt, Homo Sapiens
uuuuugcuuagacagcucucuaucucauccau

SEQ ID NO: 333406 - RNA, 32 nt, Homo Sapiens
ggcggcgccccgcgcacaucacuuccucggcg

SEQ ID NO: 333407 - RNA, 32 nt, Homo Sapiens
ugcuuuggauacuuaucuacuguccgaaggcc

SEQ ID NO: 333408 - RNA, 32 nt, Homo Sapiens
uuuuaagaucuaagaaguugugaauguuguua

SEQ ID NO: 333409 - RNA, 30 nt, Homo Sapiens
ccguugguguccgugccguucaguugcccg

SEQ ID NO: 333410 - RNA, 31 nt, Homo Sapiens
ugauugaggcacugcuuccuccacgccgacg

SEQ ID NO: 333411 - RNA, 32 nt, Homo Sapiens
aagguucccccgcugagaucuuuccuccuggu

SEQ ID NO: 333412 - RNA, 32 nt, Homo Sapiens
gggccuaggggcggggccugcuguggugcgcu

SEQ ID NO: 333413 - RNA, 32 nt, Homo Sapiens
guuaaaacagaaaaaaggaagauggcaagaau

SEQ ID NO: 333414 - RNA, 32 nt, Homo Sapiens
cuuuaaaauaaauuuuaagauguaucagauac

SEQ ID NO: 333415 - RNA, 30 nt, Homo Sapiens
cugagccaugcucgcgaacugugggucugu

SEQ ID NO: 333416 - RNA, 32 nt, Homo Sapiens
caaaaggugucugcauucugagccucuuuucg

SEQ ID NO: 333417 - RNA, 32 nt, Homo Sapiens
gccucaggccugcuggccuccugcugugaaca

SEQ ID NO: 333418 - RNA, 32 nt, Homo Sapiens
ugacaugugacugauuaggaaauauuuuaugg

SEQ ID NO: 333419 - RNA, 32 nt, Homo Sapiens
augggcgagguccgccccuauuauucauuguc

SEQ ID NO: 333420 - RNA, 32 nt, Homo Sapiens
ucaggugguauauugcagaaacaucaggauaa

SEQ ID NO: 333421 - RNA, 30 nt, Homo Sapiens
aaccugggagguggagcuugcagugagccg

SEQ ID NO: 333422 - RNA, 32 nt, Homo Sapiens
cuuugccucgggucuccccauucuccaggucc

SEQ ID NO: 333423 - RNA, 32 nt, Homo Sapiens
aauuucacaauuuguggucaugucaacaaauc

SEQ ID NO: 333424 - RNA, 32 nt, Homo Sapiens
uauauuuugucauauugaacaccagucucuua

SEQ ID NO: 333425 - RNA, 29 nt, Homo Sapiens
auccacauauguaguucccuagguccugc

SEQ ID NO: 333426 - RNA, 32 nt, Homo Sapiens
agaaauauaauagcugccuuagacauuaugag

SEQ ID NO: 333427 - RNA, 32 nt, Homo Sapiens
caaaauguauaaauguuauguuugcuaaaacu

SEQ ID NO: 333428 - RNA, 32 nt, Homo Sapiens
uaucuccagggccaguucuuuucucucccuuc

SEQ ID NO: 333429 - RNA, 32 nt, Homo Sapiens
cccaggggcuccuccggguugucucaggauuc

SEQ ID NO: 333430 - RNA, 32 nt, Homo Sapiens
gaaagcucugauguaauuuaggaaaugaaauc

SEQ ID NO: 333431 - RNA, 32 nt, Homo Sapiens
ggaggcgagagaugcugccgcagcaagucggc

SEQ ID NO: 333432 - RNA, 32 nt, Homo Sapiens
agguggaggcagaguuugagcugcugacugug

SEQ ID NO: 333433 - RNA, 32 nt, Homo Sapiens
uaucugaaaaauuuuaagggccaauucuacag

SEQ ID NO: 333434 - RNA, 32 nt, Homo Sapiens
gcuaagagggucauguggcaugauuggagaac

SEQ ID NO: 333435 - RNA, 32 nt, Homo Sapiens
cuggguuggugcauguugaugugcuggcugca

SEQ ID NO: 333436 - RNA, 32 nt, Homo Sapiens
cugcgucccccgcugcuugccgccccccaccc

SEQ ID NO: 333437 - RNA, 32 nt, Homo Sapiens
gguccgggagguggucgcgcgacugcuggagc

SEQ ID NO: 333438 - RNA, 32 nt, Homo Sapiens
aaagcuguugagugacucaucgccaagauuug

SEQ ID NO: 333439 - RNA, 32 nt, Homo Sapiens
uuuacuguuuuaauuguaguucuguguacuuu

SEQ ID NO: 333440 - RNA, 32 nt, Homo Sapiens
caccagggcugcaaagaccuacaggacguccu

SEQ ID NO: 333441 - RNA, 32 nt, Homo Sapiens
aaaauaaauggcaacuuggcacaccuaggcug

SEQ ID NO: 333442 - RNA, 32 nt, Homo Sapiens
cagaaguggaagacccaccucccuaucucaug

SEQ ID NO: 333443 - RNA, 32 nt, Homo Sapiens
uuagaagcaaaguuaagagacucaucagauuc

SEQ ID NO: 333444 - RNA, 32 nt, Homo Sapiens
gaguaaggacauuaaaaugcaugaugaaaauc

SEQ ID NO: 333445 - RNA, 32 nt, Homo Sapiens
agcuuccagcacaaccgcaggcucuacgucua

SEQ ID NO: 333446 - RNA, 32 nt, Homo Sapiens
ugccaggaagacugugaaaucuucaugcccaa

SEQ ID NO: 333447 - RNA, 32 nt, Homo Sapiens
ccgggaccuccgccggagccgcgcucgcugca

SEQ ID NO: 333448 - RNA, 32 nt, Homo Sapiens
guuacaaaaaauacaaauaaaaacaaugcuga

SEQ ID NO: 333449 - RNA, 32 nt, Homo Sapiens
gaauuaaacaacaaacaaaacgcaaaacccag

SEQ ID NO: 333450 - RNA, 32 nt, Homo Sapiens
gccgccgggcuguggaggcagcagcccagacg

SEQ ID NO: 333451 - RNA, 32 nt, Homo Sapiens
ggccgccggcgccucagcgauguuuuacucag

SEQ ID NO: 333452 - RNA, 32 nt, Homo Sapiens
gucaaaguucacaaagaugaagaaucagggua

SEQ ID NO: 333453 - RNA, 32 nt, Homo Sapiens
cucaguuucuacucaugauauucauuagaaga

SEQ ID NO: 333454 - RNA, 32 nt, Homo Sapiens
uggggccugaccucaccucauuguacuggccc

SEQ ID NO: 333455 - RNA, 32 nt, Homo Sapiens
cacccagaguuuccucuuggucccugucuacu

SEQ ID NO: 333456 - RNA, 32 nt, Homo Sapiens
agcucagcauauauuuugguaaaauuauguug

SEQ ID NO: 333457 - RNA, 32 nt, Homo Sapiens
gauccagguuggaaggaucuuguuucgcucuc

SEQ ID NO: 333458 - RNA, 32 nt, Homo Sapiens
gguuuuacccuuagucccuauaagguggauuu

SEQ ID NO: 333459 - RNA, 32 nt, Homo Sapiens
uugggauuugguuuuuugggucuuuuuuuuuu

SEQ ID NO: 333460 - RNA, 32 nt, Homo Sapiens
gugaggcggaagcuguguauggcgggaggcug

SEQ ID NO: 333461 - RNA, 32 nt, Homo Sapiens
cccacggagucuuucaaaaaucucuguagagu

SEQ ID NO: 333462 - RNA, 32 nt, Homo Sapiens
uuuugaguuucaucaaaugaauguccuucaca

SEQ ID NO: 333463 - RNA, 32 nt, Homo Sapiens
ccggcuccgcggaaaguuugcggccgccccug

SEQ ID NO: 333464 - RNA, 32 nt, Homo Sapiens
gggcuggugggcgggcgggcaggcgugcugac

SEQ ID NO: 333465 - RNA, 32 nt, Homo Sapiens
ggcagcaggggaggcgcgugacagagcaaccc

SEQ ID NO: 333466 - RNA, 32 nt, Homo Sapiens
gacugacugcaccuucugugccucagccguuc

SEQ ID NO: 333467 - RNA, 32 nt, Homo Sapiens
ccuccagggcccgaggugaucccggugguggg

SEQ ID NO: 333468 - RNA, 32 nt, Homo Sapiens
ugccuguaaucccagcacuuugggagguggga

SEQ ID NO: 333469 - RNA, 32 nt, Homo Sapiens
caauuuucaucccacaauugaaauuuuuaaau

SEQ ID NO: 333470 - RNA, 32 nt, Homo Sapiens
gcauuauuuuauauauuuuuuauuaauauuug

SEQ ID NO: 333471 - RNA, 32 nt, Homo Sapiens
gcgcggcuaccauggcggcggcauuugaagcc

SEQ ID NO: 333472 - RNA, 32 nt, Homo Sapiens
auggaagcuuuuaauuuuaauuucuuuuuucu

SEQ ID NO: 333473 - RNA, 32 nt, Homo Sapiens
gaaaacaaaaauucccucaggcuauagaauua

SEQ ID NO: 333474 - RNA, 32 nt, Homo Sapiens
gacaagggaaggaagggacacacacacacaca

SEQ ID NO: 333475 - RNA, 32 nt, Homo Sapiens
uguuauaugugcuuggcugggccauggguccc

SEQ ID NO: 333476 - RNA, 32 nt, Homo Sapiens
aaguuguaauaggaggacugcccgccgcugga

SEQ ID NO: 333477 - RNA, 32 nt, Homo Sapiens
acuuggcacauuccuccuuuccuuccaauucc

SEQ ID NO: 333478 - RNA, 31 nt, Homo Sapiens
cuauuaaacuuaaaacugccaaaugauuuuu

SEQ ID NO: 333479 - RNA, 32 nt, Homo Sapiens
uagaaucccaacuuauacgagaccuuugccag

SEQ ID NO: 333480 - RNA, 32 nt, Homo Sapiens
uaaguacuguaauaauaccucaauguuugagg

SEQ ID NO: 333481 - RNA, 32 nt, Homo Sapiens
acaggcuccgcgggagcucagagcugccccgu

SEQ ID NO: 333482 - RNA, 32 nt, Homo Sapiens
ccgaggugguggcccuuaguaagagaagucag

SEQ ID NO: 333483 - RNA, 32 nt, Homo Sapiens
accccucagcaagaacagccugccugguggcc

SEQ ID NO: 333484 - RNA, 32 nt, Homo Sapiens
augcguuauuuucucaucagcuggcucugauc

SEQ ID NO: 333485 - RNA, 32 nt, Homo Sapiens
uucuagcaugaaugaaggaugccaagaaugag

SEQ ID NO: 333486 - RNA, 32 nt, Homo Sapiens
ucugcccccucccccuggagcucccgcuccuc

SEQ ID NO: 333487 - RNA, 32 nt, Homo Sapiens
gcaauucucugagcccacccagcccucugaac

SEQ ID NO: 333488 - RNA, 32 nt, Homo Sapiens
guguuaaaaaauaaguccuuaaaguuacuguu

SEQ ID NO: 333489 - RNA, 32 nt, Homo Sapiens
cagguuuuucuuuuccuuuuuaauuuuucuuc

SEQ ID NO: 333490 - RNA, 32 nt, Homo Sapiens
agaugggaaaauuucuuguucaguccggggaa

SEQ ID NO: 333491 - RNA, 32 nt, Homo Sapiens
uaccuaucaaggaaagugaugacugcagaaac

SEQ ID NO: 333492 - RNA, 32 nt, Homo Sapiens
ugccgugauucacaaagacaagagguaauuuu

SEQ ID NO: 333493 - RNA, 32 nt, Homo Sapiens
aguugaguuugagaggcgacacggcggcggcg

SEQ ID NO: 333494 - RNA, 32 nt, Homo Sapiens
gggugugcaccaagguucaguagaguccacuu

SEQ ID NO: 333495 - RNA, 32 nt, Homo Sapiens
ucucacugcauaaugacuuucuauuuguuugg

SEQ ID NO: 333496 - RNA, 32 nt, Homo Sapiens
cgcgcguccgccgcgcgccggccguuaauagg

SEQ ID NO: 333497 - RNA, 32 nt, Homo Sapiens
caggccgaggcccuucuggggguuucuaucuu

SEQ ID NO: 333498 - RNA, 32 nt, Homo Sapiens
uugguguuaagcaugaaacaaacagcagcugu

SEQ ID NO: 333499 - RNA, 32 nt, Homo Sapiens
cagcccgcacugggagugggcuccucgggguc

SEQ ID NO: 333500 - RNA, 32 nt, Homo Sapiens
ugcgcggcgggaagcggcggcggcggcuccag

SEQ ID NO: 333501 - RNA, 32 nt, Homo Sapiens
gcaacuuccgccucccggguucaagcgauucu

SEQ ID NO: 333502 - RNA, 32 nt, Homo Sapiens
cuggaggguucagucggaagcagaagccggga

SEQ ID NO: 333503 - RNA, 32 nt, Homo Sapiens
uucuaggacaaagggagucauuuugguugaac

SEQ ID NO: 333504 - RNA, 32 nt, Homo Sapiens
ucugagacucuggcuuauuccagguuggcuga

SEQ ID NO: 333505 - RNA, 32 nt, Homo Sapiens
ccuuuuccaggaugccagggaggugaggcagg

SEQ ID NO: 333506 - RNA, 32 nt, Homo Sapiens
gccuuugccgcccgcgcagcccggggccgagg

SEQ ID NO: 333507 - RNA, 32 nt, Homo Sapiens
cucauggcaucuccagcuccugcccuaguucc

SEQ ID NO: 333508 - RNA, 32 nt, Homo Sapiens
ucaggcacacaacuucuguuuccuucucuugu

SEQ ID NO: 333509 - RNA, 32 nt, Homo Sapiens
gcccgcagcccgagcaggaagcgccggcguag

SEQ ID NO: 333510 - RNA, 32 nt, Homo Sapiens
aucacaucaaggaaaagggacaggagccauug

SEQ ID NO: 333511 - RNA, 32 nt, Homo Sapiens
caaagcauuguggguaauuggugcuggcuaac

SEQ ID NO: 333512 - RNA, 32 nt, Homo Sapiens
gcugagaaggagccagucccaguuccagucca

SEQ ID NO: 333513 - RNA, 32 nt, Homo Sapiens
uauauguugaccauuccaaaguucuuaucucu

SEQ ID NO: 333514 - RNA, 32 nt, Homo Sapiens
cuucuuccuguguggaugcuuauuugucaauc

SEQ ID NO: 333515 - RNA, 32 nt, Homo Sapiens
gcgcacaugccuagguucgacgcccuccuccc

SEQ ID NO: 333516 - RNA, 32 nt, Homo Sapiens
uucccugacucgcuccuccuccaaccuugguu

SEQ ID NO: 333517 - RNA, 32 nt, Homo Sapiens
accuugauuucuccuacaaggaccacacugcc

SEQ ID NO: 333518 - RNA, 32 nt, Homo Sapiens
ccgcgcuccccgcgcgccuccucgggcuccac

SEQ ID NO: 333519 - RNA, 32 nt, Homo Sapiens
acccugaguaccacaagauaugaccuuaguug

SEQ ID NO: 333520 - RNA, 32 nt, Homo Sapiens
ggaugcccacuucucuucucuuucucuugguc

SEQ ID NO: 333521 - RNA, 32 nt, Homo Sapiens
gucaaugccacauaucucuggagucgccccca

SEQ ID NO: 333522 - RNA, 32 nt, Homo Sapiens
ucagacaaggcccacagaauaagauuuuccau

SEQ ID NO: 333523 - RNA, 32 nt, Homo Sapiens
acaacugucuaaugccagguccccacuuagug

SEQ ID NO: 333524 - RNA, 32 nt, Homo Sapiens
caagcaggauggccaguaaaccuucaggcagg

SEQ ID NO: 333525 - RNA, 32 nt, Homo Sapiens
cuuccaaacaaaugaggcaucagucugaaagc

SEQ ID NO: 333526 - RNA, 32 nt, Homo Sapiens
aggcuaacaccuguagcccacgugcuuuggga

SEQ ID NO: 333527 - RNA, 32 nt, Homo Sapiens
caaccaggacuuucuucuuaaugcucucgaca

SEQ ID NO: 333528 - RNA, 32 nt, Homo Sapiens
cccagcucauuuucuccuuucauuuuacaaaa

SEQ ID NO: 333529 - RNA, 32 nt, Homo Sapiens
ggaaggucgaggagggaggacuuaagcccaag

SEQ ID NO: 333530 - RNA, 32 nt, Homo Sapiens
guuacagaacaucagcugcccgcaaaaagcau

SEQ ID NO: 333531 - RNA, 32 nt, Homo Sapiens
ccagaacugugagaaagaaaucucuauggugu

SEQ ID NO: 333532 - RNA, 32 nt, Homo Sapiens
uacaaugauuuucaguaggcuucuggaauaga

SEQ ID NO: 333533 - RNA, 32 nt, Homo Sapiens
cgcagcugggcuggcgggaggcauggaggcug

SEQ ID NO: 333534 - RNA, 32 nt, Homo Sapiens
cugcagaguucacuaagcuguugaauauuuuu

SEQ ID NO: 333535 - RNA, 32 nt, Homo Sapiens
gaaacucccucauguuguuggcaacaggugaa

SEQ ID NO: 333536 - RNA, 32 nt, Homo Sapiens
gguguaagcaugggggcguggggaagagggca

SEQ ID NO: 333537 - RNA, 32 nt, Homo Sapiens
gaacugauaaaauuauuugaacugauauguaa

SEQ ID NO: 333538 - RNA, 32 nt, Homo Sapiens
cacacacaugcgcgugcgcacacacacaaaca

SEQ ID NO: 333539 - RNA, 31 nt, Homo Sapiens
uuggugguuaacaugaaauguuaccuuuuaa

SEQ ID NO: 333540 - RNA, 32 nt, Homo Sapiens
agcccugggcuucuguuagggguugauuaugu

SEQ ID NO: 333541 - RNA, 32 nt, Homo Sapiens
cgucggucugcacguaaccgugaagacgugug

SEQ ID NO: 333542 - RNA, 32 nt, Homo Sapiens
ugcacgcauuggcaugaugcgaacugccaagg

SEQ ID NO: 333543 - RNA, 32 nt, Homo Sapiens
augggccccguggaaccccgaagccuggcggg

SEQ ID NO: 333544 - RNA, 32 nt, Homo Sapiens
gagcagaagggagguaggaaaccuggacaugg

SEQ ID NO: 333545 - RNA, 32 nt, Homo Sapiens
cugaaugcuauaaucaaaucuauugacaguau

SEQ ID NO: 333546 - RNA, 32 nt, Homo Sapiens
acuaauguaacggugaaagagaaucccuguug

SEQ ID NO: 333547 - RNA, 32 nt, Homo Sapiens
uaaugucucgagcuuuuugauucuggaaauaa

SEQ ID NO: 333548 - RNA, 32 nt, Homo Sapiens
agcgggaggaggaggaggagcggcggcgccug

SEQ ID NO: 333549 - RNA, 32 nt, Homo Sapiens
acaaaacacacaacauguaagcauguaagagu

SEQ ID NO: 333550 - RNA, 32 nt, Homo Sapiens
gacauuaaaggagcaucagagaagaggcagcc

SEQ ID NO: 333551 - RNA, 29 nt, Homo Sapiens
uuggauuaaaucugauauuuucuaauacu

SEQ ID NO: 333552 - RNA, 32 nt, Homo Sapiens
ggccuccgagggugagucgcucugcuaagcaa

SEQ ID NO: 333553 - RNA, 32 nt, Homo Sapiens
ucuggugugggucuggggaaaaggguagaucc

SEQ ID NO: 333554 - RNA, 31 nt, Homo Sapiens
ucacauacaaagaaaaguagugguauuuugg

SEQ ID NO: 333555 - RNA, 32 nt, Homo Sapiens
gacagagucuugcucugucacccaggcuagag

SEQ ID NO: 333556 - RNA, 32 nt, Homo Sapiens
cacauacacgucauagaagaaaauaguggugc

SEQ ID NO: 333557 - RNA, 32 nt, Homo Sapiens
uccucaccuuggcuagcuccaccugcucuuug

SEQ ID NO: 333558 - RNA, 32 nt, Homo Sapiens
aagugggccugugacgucacaccgcccggccc

SEQ ID NO: 333559 - RNA, 27 nt, Homo Sapiens
cccaagucucucaucagcccccaaucc

SEQ ID NO: 333560 - RNA, 32 nt, Homo Sapiens
uuucuaaaauuccagaaagcaaaauugauaag

SEQ ID NO: 333561 - RNA, 32 nt, Homo Sapiens
cuggaaaguccuccuauuccaguguccauguu

SEQ ID NO: 333562 - RNA, 32 nt, Homo Sapiens
uaaguccauuuucuuccgugaaagggacagga

SEQ ID NO: 333563 - RNA, 32 nt, Homo Sapiens
cuagccaggcgucaagaugcgcugcuuucccu

SEQ ID NO: 333564 - RNA, 30 nt, Homo Sapiens
gcgugaaagaagcuugugauccugccccca

SEQ ID NO: 333565 - RNA, 32 nt, Homo Sapiens
caccccuucuuugcugcacagcaagaaacagu

SEQ ID NO: 333566 - RNA, 32 nt, Homo Sapiens
aucaccccagagaguucacuccugcuaccuuc

SEQ ID NO: 333567 - RNA, 32 nt, Homo Sapiens
caaaauucuucuagucucuacccauuauccaa

SEQ ID NO: 333568 - RNA, 32 nt, Homo Sapiens
uaagcucuauuauguuauucuaacaaguagca

SEQ ID NO: 333569 - RNA, 32 nt, Homo Sapiens
cgcgaccccgucccggcgcggcccccagcagu

SEQ ID NO: 333570 - RNA, 32 nt, Homo Sapiens
uuauacuuggcguuuuuugaauaaaaaccuuu

SEQ ID NO: 333571 - RNA, 29 nt, Homo Sapiens
uuccgaacuaguuuauauuuucuauccca

SEQ ID NO: 333572 - RNA, 32 nt, Homo Sapiens
gguuuccuuuacaugagaucccauuucucacc

SEQ ID NO: 333573 - RNA, 30 nt, Homo Sapiens
cggagcagcggcggcggcgcucggacuguc

SEQ ID NO: 333574 - RNA, 32 nt, Homo Sapiens
agaacguagcaaucuggcuauuuuggacaaag

SEQ ID NO: 333575 - RNA, 32 nt, Homo Sapiens
gcucugcccucccugaggcccaggacuaugcc

SEQ ID NO: 333576 - RNA, 32 nt, Homo Sapiens
cauauccccugcgcacuguccggagcacuccu

SEQ ID NO: 333577 - RNA, 32 nt, Homo Sapiens
uucucugccccauugccucccaaauaugcuau

SEQ ID NO: 333578 - RNA, 32 nt, Homo Sapiens
aucuauuuuaaacacagauguuuacaaaauaa

SEQ ID NO: 333579 - RNA, 32 nt, Homo Sapiens
ugagccuguccugcuuugcauucuucaaaacc

SEQ ID NO: 333580 - RNA, 32 nt, Homo Sapiens
acgccuguguugauuuccauuuggaagauccu

SEQ ID NO: 333581 - RNA, 28 nt, Homo Sapiens
gccacggggcggcuagcugaguuaaugu

SEQ ID NO: 333582 - RNA, 32 nt, Homo Sapiens
agccguuccagcuggugacugugguggcucca

SEQ ID NO: 333583 - RNA, 32 nt, Homo Sapiens
guaucaaagcuacuaaaccacuguuaauggag

SEQ ID NO: 333584 - RNA, 32 nt, Homo Sapiens
agggugcacagucucuccugcugggggcuuuc

SEQ ID NO: 333585 - RNA, 32 nt, Homo Sapiens
gauggguguaccaccucaccagugucuggaug

SEQ ID NO: 333586 - RNA, 32 nt, Homo Sapiens
ucugggagaacauaaggccaauaaucaugacc

SEQ ID NO: 333587 - RNA, 32 nt, Homo Sapiens
auuuuguucuuugugcuuguguaugaguaagu

SEQ ID NO: 333588 - RNA, 32 nt, Homo Sapiens
gacgacugugguguccucuccacaaaacccuc

SEQ ID NO: 333589 - RNA, 32 nt, Homo Sapiens
gacugcaucuucuuggcacauuuauuauacuc

SEQ ID NO: 333590 - RNA, 32 nt, Homo Sapiens
ccaguauuacuaagguaagggauugaggauca

SEQ ID NO: 333591 - RNA, 32 nt, Homo Sapiens
aaggacugggacguacguggaggcugcuggac

SEQ ID NO: 333592 - RNA, 32 nt, Homo Sapiens
ucugcaggcuccugcgggcucaccaggcugcu

SEQ ID NO: 333593 - RNA, 32 nt, Homo Sapiens
aaauccacuuuuucuuuuucuuuuuuuuuuuu

SEQ ID NO: 333594 - RNA, 32 nt, Homo Sapiens
uuuaaagcugccccuauuuuuaucauuaauug

SEQ ID NO: 333595 - RNA, 32 nt, Homo Sapiens
gacaguuggucuuuuuaucuuuucuuucuuuu

SEQ ID NO: 333596 - RNA, 32 nt, Homo Sapiens
cgagagccagccggccggcgcacuccgacucc

SEQ ID NO: 333597 - RNA, 32 nt, Homo Sapiens
uucagcccacgacagccaccccggccguuuuc

SEQ ID NO: 333598 - RNA, 32 nt, Homo Sapiens
gacuucaaccaucuucuuucugaaagaccaaa

SEQ ID NO: 333599 - RNA, 32 nt, Homo Sapiens
ugcgcacaccaucguuacugucgggcaguaac

SEQ ID NO: 333600 - RNA, 32 nt, Homo Sapiens
augauguauauucuuuucuacucuucauguau

SEQ ID NO: 333601 - RNA, 32 nt, Homo Sapiens
ccuuaagaacugugucuggcguucucaagaau

SEQ ID NO: 333602 - RNA, 32 nt, Homo Sapiens
cgcagcagcuuggggugcaaggcggccugggg

SEQ ID NO: 333603 - RNA, 32 nt, Homo Sapiens
agagcaggccccugaggccuggguauccaacg

SEQ ID NO: 333604 - RNA, 32 nt, Homo Sapiens
ucagcccuuagugucacccauagguguccagg

SEQ ID NO: 333605 - RNA, 32 nt, Homo Sapiens
ccagcggccccggccccucgucuccccgcacc

SEQ ID NO: 333606 - RNA, 32 nt, Homo Sapiens
ggguguagaaaagaagaaaauugaacagaugg

SEQ ID NO: 333607 - RNA, 30 nt, Homo Sapiens
ccaucacgcagaacuuugggucccgccucg

SEQ ID NO: 333608 - RNA, 32 nt, Homo Sapiens
uuuuauccuuuuuuuuuuuuuauuuuugagau

SEQ ID NO: 333609 - RNA, 32 nt, Homo Sapiens
uggguucagggcgggggcggagggauccuuga

SEQ ID NO: 333610 - RNA, 32 nt, Homo Sapiens
gcuucgccccucgcccucccccucgcggccau

SEQ ID NO: 333611 - RNA, 32 nt, Homo Sapiens
uaagaccauaauguaguuauaaauggaaaugu

SEQ ID NO: 333612 - RNA, 32 nt, Homo Sapiens
aacggcuuggagugucuuucuggaagaaauug

SEQ ID NO: 333613 - RNA, 32 nt, Homo Sapiens
cuuuguaacuuuucuguaaaucuaaaauauuc

SEQ ID NO: 333614 - RNA, 32 nt, Homo Sapiens
gaugguugagcaguuucugaaauacacauuua

SEQ ID NO: 333615 - RNA, 32 nt, Homo Sapiens
cgcuacgcaggacgccgccucacgcaagccgg

SEQ ID NO: 333616 - RNA, 31 nt, Homo Sapiens
ggguagggggcgguggccccggguucuagcc

SEQ ID NO: 333617 - RNA, 32 nt, Homo Sapiens
cucuguggaaaacuacuuugggauucuucagu

SEQ ID NO: 333618 - RNA, 32 nt, Homo Sapiens
agcuccugcccccaagccggcccccaccugag

SEQ ID NO: 333619 - RNA, 32 nt, Homo Sapiens
uggacccggccgcagaccguucugggcagcuc

SEQ ID NO: 333620 - RNA, 32 nt, Homo Sapiens
cggccgccuucacuucccucccggcuuuuccu

SEQ ID NO: 333621 - RNA, 32 nt, Homo Sapiens
caccuccccauggcagaaguugcuucacagag

SEQ ID NO: 333622 - RNA, 32 nt, Homo Sapiens
uacaaacaggugguaaaaauucuuucuggccc

SEQ ID NO: 333623 - RNA, 32 nt, Homo Sapiens
aauuacacaaaacuagaauagugcauugguac

SEQ ID NO: 333624 - RNA, 32 nt, Homo Sapiens
auagaacauucauggugaaauuccuaugguaa

SEQ ID NO: 333625 - RNA, 32 nt, Homo Sapiens
acguuggagauuaccaaagccgaacagucaau

SEQ ID NO: 333626 - RNA, 32 nt, Homo Sapiens
aagggaacagagcuaggaaggaacuccugggu

SEQ ID NO: 333627 - RNA, 30 nt, Homo Sapiens
uuggcgggcaggcggguggggcaggcuggg

SEQ ID NO: 333628 - RNA, 32 nt, Homo Sapiens
ggcugcacuuggaugggagcaccuggugccuc

SEQ ID NO: 333629 - RNA, 32 nt, Homo Sapiens
gggaaggauaccuuuacuggaucagcagccuu

SEQ ID NO: 333630 - RNA, 32 nt, Homo Sapiens
ccuggacuccugaguguagagcucagcccagg

SEQ ID NO: 333631 - RNA, 32 nt, Homo Sapiens
gaacaucagacuccaaguucuucagcuuuuuu

SEQ ID NO: 333632 - RNA, 32 nt, Homo Sapiens
ucauuaggucaguuaagggaaauauuuguacc

SEQ ID NO: 333633 - RNA, 32 nt, Homo Sapiens
uuaauggauaauuuauagacaguuaaauuuau

SEQ ID NO: 333634 - RNA, 32 nt, Homo Sapiens
gguauuuuugauguggaaaagggaacaaaagu

SEQ ID NO: 333635 - RNA, 32 nt, Homo Sapiens
aucacguaaaauuuuuuccaaaggguuacuuu

SEQ ID NO: 333636 - RNA, 32 nt, Homo Sapiens
uguuugaucacugugaaccaacccccaucucc

SEQ ID NO: 333637 - RNA, 32 nt, Homo Sapiens
gagagcccaagccaauugcucuaggccccgug

SEQ ID NO: 333638 - RNA, 32 nt, Homo Sapiens
aaauagcgacucaguaucauggccagcagccu

SEQ ID NO: 333639 - RNA, 32 nt, Homo Sapiens
agaucuaaaauugacaccauaacaucacaauu

SEQ ID NO: 333640 - RNA, 32 nt, Homo Sapiens
aggcucugccagcccuggcugccuugcugggc

SEQ ID NO: 333641 - RNA, 32 nt, Homo Sapiens
gaaagagaucuuucuuuuuuaaugaaaacauu

SEQ ID NO: 333642 - RNA, 32 nt, Homo Sapiens
gacuagauuggaagaauaaaauucaagaaugu

SEQ ID NO: 333643 - RNA, 32 nt, Homo Sapiens
gcccgggucuggcccuggccuacgggcuaagc

SEQ ID NO: 333644 - RNA, 32 nt, Homo Sapiens
agguuuaugacaguaauuguguuuacauuuua

SEQ ID NO: 333645 - RNA, 32 nt, Homo Sapiens
uguuuugggcauuuuuaaauaaacaaucugag

SEQ ID NO: 333646 - RNA, 32 nt, Homo Sapiens
gccacagcucagccgccuccucugccaccagc

SEQ ID NO: 333647 - RNA, 32 nt, Homo Sapiens
auggggagaacaugugauggugugugaauauc

SEQ ID NO: 333648 - RNA, 32 nt, Homo Sapiens
cugggccggcccugcucugggcccgugaccug

SEQ ID NO: 333649 - RNA, 32 nt, Homo Sapiens
ucgcuccggaccagcucagccucugauaagcu

SEQ ID NO: 333650 - RNA, 30 nt, Homo Sapiens
ggugaggauaaaagucuaugcauggaggaa

SEQ ID NO: 333651 - RNA, 32 nt, Homo Sapiens
ccaucacucacugccaccugggccaucaacug

SEQ ID NO: 333652 - RNA, 32 nt, Homo Sapiens
uuuuaaacuaaauaaaauguauguuggagaua

SEQ ID NO: 333653 - RNA, 32 nt, Homo Sapiens
augaucacagaaagaugggggaaggaggauac

SEQ ID NO: 333654 - RNA, 32 nt, Homo Sapiens
ucugaucagcucuggagcagaggcagggaguu

SEQ ID NO: 333655 - RNA, 32 nt, Homo Sapiens
auuguuuuaaauacuugagccuuuuucucggu

SEQ ID NO: 333656 - RNA, 32 nt, Homo Sapiens
aaagucugagccccgcuccgcugaugccuguc

SEQ ID NO: 333657 - RNA, 32 nt, Homo Sapiens
aaguaauacuugaaauguguugcaaguacaug

SEQ ID NO: 333658 - RNA, 32 nt, Homo Sapiens
ggaugacugugggccuccaccaggcgcaggug

SEQ ID NO: 333659 - RNA, 32 nt, Homo Sapiens
ggggccugucuggauaccuccucccucaauug

SEQ ID NO: 333660 - RNA, 32 nt, Homo Sapiens
cugauuguugcugcugguguuggugaauuuga

SEQ ID NO: 333661 - RNA, 32 nt, Homo Sapiens
uucuaggacucuuggccaugcugcuggcagug

SEQ ID NO: 333662 - RNA, 32 nt, Homo Sapiens
aacccugguuccagucuggcaagcauuguaga

SEQ ID NO: 333663 - RNA, 32 nt, Homo Sapiens
uuuucugucaggcugcugugguaugcuggggg

SEQ ID NO: 333664 - RNA, 32 nt, Homo Sapiens
acuguccugcuccuucccccagccccacgccc

SEQ ID NO: 333665 - RNA, 32 nt, Homo Sapiens
uucuaagaggagugggggaccacaaaggccag

SEQ ID NO: 333666 - RNA, 32 nt, Homo Sapiens
cuuccggacaacugccaaaucuauguaauuuu

SEQ ID NO: 333667 - RNA, 32 nt, Homo Sapiens
caaaaagcaaaauaaacauauucugaauauuu

SEQ ID NO: 333668 - RNA, 32 nt, Homo Sapiens
uuuuucaguauuauuuguauguauuaaacuuu

SEQ ID NO: 333669 - RNA, 32 nt, Homo Sapiens
agcuuaccaagauuauuaauagcaauguaugu

SEQ ID NO: 333670 - RNA, 32 nt, Homo Sapiens
cuuugaacaaaggaaaaucucuuuagaacaga

SEQ ID NO: 333671 - RNA, 32 nt, Homo Sapiens
ugaauggagaucuggaagggaaauggaaagca

SEQ ID NO: 333672 - RNA, 32 nt, Homo Sapiens
uguggaguuggauuuucuuaagguuuaaaaag

SEQ ID NO: 333673 - RNA, 32 nt, Homo Sapiens
ggacucgcgcagcccgcagcgcuccggcuccu

SEQ ID NO: 333674 - RNA, 32 nt, Homo Sapiens
ggcggauaaaaagccgucgcgcugcgggagug

SEQ ID NO: 333675 - RNA, 32 nt, Homo Sapiens
agaccccugugugccugugaccucaauuaaag

SEQ ID NO: 333676 - RNA, 32 nt, Homo Sapiens
uuuggggcucacggcacccccaugcuacgaac

SEQ ID NO: 333677 - RNA, 32 nt, Homo Sapiens
ggauuuugcaucugccauuauccuuucucccu

SEQ ID NO: 333678 - RNA, 32 nt, Homo Sapiens
aauauuugcauaucagauacuucaaaauauga

SEQ ID NO: 333679 - RNA, 32 nt, Homo Sapiens
ucugcaaugcaaauaaagaggguacuuuuucu

SEQ ID NO: 333680 - RNA, 32 nt, Homo Sapiens
agucaccaggguucuccauuccaagugucugc

SEQ ID NO: 333681 - RNA, 32 nt, Homo Sapiens
guguccuacauagcuucugacucucaauuuuu

SEQ ID NO: 333682 - RNA, 32 nt, Homo Sapiens
cgggcccagcccagcccuuccugaagccagaa

SEQ ID NO: 333683 - RNA, 32 nt, Homo Sapiens
ucuucuuuacacacauauacacacagacauca

SEQ ID NO: 333684 - RNA, 30 nt, Homo Sapiens
agaucaugccacugcacccaucuugggcaa

SEQ ID NO: 333685 - RNA, 32 nt, Homo Sapiens
cuuagaggagauggagguggccuuugagccag

SEQ ID NO: 333686 - RNA, 32 nt, Homo Sapiens
ggccacgcagcgaggaggcaggcggcccagga

SEQ ID NO: 333687 - RNA, 32 nt, Homo Sapiens
uguuguguaaguuauaugucaaaucuuugaau

SEQ ID NO: 333688 - RNA, 32 nt, Homo Sapiens
gggccaggugcgccugagcuccuggaguagua

SEQ ID NO: 333689 - RNA, 32 nt, Homo Sapiens
uacgccuuucccucagaauucagggaagagac

SEQ ID NO: 333690 - RNA, 32 nt, Homo Sapiens
gccccuuauuuuucauauuuugaaagaucucc

SEQ ID NO: 333691 - RNA, 32 nt, Homo Sapiens
ugugggcggaugucuuggauagaucacgggcu

SEQ ID NO: 333692 - RNA, 32 nt, Homo Sapiens
ggauucgccauguuggccaggcuggucucgaa

SEQ ID NO: 333693 - RNA, 32 nt, Homo Sapiens
uggcagauccuuguagggaaggagagagucuu

SEQ ID NO: 333694 - RNA, 32 nt, Homo Sapiens
accacucguaggugcuggguaugagcaugauc

SEQ ID NO: 333695 - RNA, 32 nt, Homo Sapiens
uggccugaccgggcuuccugucagccaggcug

SEQ ID NO: 333696 - RNA, 32 nt, Homo Sapiens
cugcagaagggagaggcaaugaagacaggugc

SEQ ID NO: 333697 - RNA, 27 nt, Homo Sapiens
caauccucccaccucagcccccaggua

SEQ ID NO: 333698 - RNA, 32 nt, Homo Sapiens
agcaguuucucuuggcagcaucagcugggcug

SEQ ID NO: 333699 - RNA, 32 nt, Homo Sapiens
acgcucagccucggggccucucuccaacucug

SEQ ID NO: 333700 - RNA, 32 nt, Homo Sapiens
agaugaagccacccucagguccagggaagguu

SEQ ID NO: 333701 - RNA, 32 nt, Homo Sapiens
uauuaaaauauuuucuuaauuaugguaccucu

SEQ ID NO: 333702 - RNA, 32 nt, Homo Sapiens
agcagccccucccagaggugugaucagcagga

SEQ ID NO: 333703 - RNA, 32 nt, Homo Sapiens
ugugaagaaggaagaggcuggggaugcagcua

SEQ ID NO: 333704 - RNA, 32 nt, Homo Sapiens
gacguggcuggcccagaauggccuguugccau

SEQ ID NO: 333705 - RNA, 32 nt, Homo Sapiens
uaccguacaaauauccuggugcgaugaugggc

SEQ ID NO: 333706 - RNA, 32 nt, Homo Sapiens
ugguccacagacggagcugggccagguuuaaa

SEQ ID NO: 333707 - RNA, 31 nt, Homo Sapiens
ugguguuugagcagccaaccuggaugaguga

SEQ ID NO: 333708 - RNA, 30 nt, Homo Sapiens
uauuugaaauaaaauuguucggucauuguu

SEQ ID NO: 333709 - RNA, 32 nt, Homo Sapiens
ggccaggugugguggcucacgucuguaauccc

SEQ ID NO: 333710 - RNA, 32 nt, Homo Sapiens
ggagagguauuuuuauuaauugcuuuaccuua

SEQ ID NO: 333711 - RNA, 32 nt, Homo Sapiens
auauauauauucaaauuccauguauccaaaca

SEQ ID NO: 333712 - RNA, 32 nt, Homo Sapiens
uagacauauugaacacauuuaagauuugaggg

SEQ ID NO: 333713 - RNA, 32 nt, Homo Sapiens
cagguggaaagaaaggggaagaauuaauuuuc

SEQ ID NO: 333714 - RNA, 32 nt, Homo Sapiens
ccgauuggaucgagaagaagcuuucuaucaau

SEQ ID NO: 333715 - RNA, 32 nt, Homo Sapiens
ugagagcagccugggcaacguggugaacccug

SEQ ID NO: 333716 - RNA, 32 nt, Homo Sapiens
cccuccgcgcguugcuacgugcggggaugaca

SEQ ID NO: 333717 - RNA, 32 nt, Homo Sapiens
gagucuguuauuauuuacacagauguuauuau

SEQ ID NO: 333718 - RNA, 32 nt, Homo Sapiens
accaauaaacauuuauacuagauuuuuuauuu

SEQ ID NO: 333719 - RNA, 32 nt, Homo Sapiens
uuugcuaauaaggcccugccaggcugggaggg

SEQ ID NO: 333720 - RNA, 32 nt, Homo Sapiens
gaagauguacuauuccaggaaacgauucuacu

SEQ ID NO: 333721 - RNA, 32 nt, Homo Sapiens
uuucuucccacuuucaucuaccuuuucuggca

SEQ ID NO: 333722 - RNA, 32 nt, Homo Sapiens
aaauaagucauaccuucuuaaaacagaaaauu

SEQ ID NO: 333723 - RNA, 32 nt, Homo Sapiens
aacugaauuuguauuucauuuuauugucagau

SEQ ID NO: 333724 - RNA, 32 nt, Homo Sapiens
uuuauaaauauauuuaagauaauuauaauaua

SEQ ID NO: 333725 - RNA, 32 nt, Homo Sapiens
acuccuuccacuuuuucugggcccuuuuuucc

SEQ ID NO: 333726 - RNA, 30 nt, Homo Sapiens
aacuugggaagggcugaugaguuuggggca

SEQ ID NO: 333727 - RNA, 31 nt, Homo Sapiens
ucaggaaccucgaguacugugggcaauuuag

SEQ ID NO: 333728 - RNA, 32 nt, Homo Sapiens
aaaagagcuccauggcggcggcggccaagccc

SEQ ID NO: 333729 - RNA, 32 nt, Homo Sapiens
ggggaauuggagcaucagaaucaugagcuuuc

SEQ ID NO: 333730 - RNA, 32 nt, Homo Sapiens
cggaaggugggaggaggcagacacccugcgug

SEQ ID NO: 333731 - RNA, 32 nt, Homo Sapiens
aaaggagacucgagcagauauuaagcaagcau

SEQ ID NO: 333732 - RNA, 32 nt, Homo Sapiens
gugggaggucagaggagauggaggcuggcucu

SEQ ID NO: 333733 - RNA, 32 nt, Homo Sapiens
auccuccgccuggcgccuccgggccccgugcc

SEQ ID NO: 333734 - RNA, 29 nt, Homo Sapiens
cagggcuggggacagagggugucaaacau

SEQ ID NO: 333735 - RNA, 32 nt, Homo Sapiens
uugagguguuugucaguuuuggcuuuuuucuc

SEQ ID NO: 333736 - RNA, 29 nt, Homo Sapiens
aaauauauauguauauauugcauauucac

SEQ ID NO: 333737 - RNA, 32 nt, Homo Sapiens
uguguucccucuauccagccaaugccuguuua

SEQ ID NO: 333738 - RNA, 32 nt, Homo Sapiens
ucucacaagaacuucacucaaccccgugccag

SEQ ID NO: 333739 - RNA, 32 nt, Homo Sapiens
ucccucucgcuccuuccuuuccgggagagggg

SEQ ID NO: 333740 - RNA, 32 nt, Homo Sapiens
guuuaaugaagauacuaaaaauaaugcacugg

SEQ ID NO: 333741 - RNA, 32 nt, Homo Sapiens
gaggcgcccuccccuguccauuuugcccagcu

SEQ ID NO: 333742 - RNA, 32 nt, Homo Sapiens
cucgcgcuuccacuccgccgcgccuuccuccc

SEQ ID NO: 333743 - RNA, 32 nt, Homo Sapiens
uuaccagucauuucuauuggaauuuguuuuuu

SEQ ID NO: 333744 - RNA, 32 nt, Homo Sapiens
gaaauuauauuccaaggcaaaucuaaaugggu

SEQ ID NO: 333745 - RNA, 32 nt, Homo Sapiens
uuaaguuuucuuuuccucuccagaggggccga

SEQ ID NO: 333746 - RNA, 32 nt, Homo Sapiens
cuccggccccacuuuccaccaaugcuuccuca

SEQ ID NO: 333747 - RNA, 32 nt, Homo Sapiens
aagcacuguggguuuuaauauuuuuaaaucaa

SEQ ID NO: 333748 - RNA, 32 nt, Homo Sapiens
acccgcgcugugcgguacgguaagacccggcg

SEQ ID NO: 333749 - RNA, 32 nt, Homo Sapiens
uucuaaauaguaaaguuucaaaauauucucuc

SEQ ID NO: 333750 - RNA, 32 nt, Homo Sapiens
ucccuuuuuuacuccauucaagagcagcauuc

SEQ ID NO: 333751 - RNA, 32 nt, Homo Sapiens
auuuguuaaaaauaaacucuguacuuaacuuu

SEQ ID NO: 333752 - RNA, 32 nt, Homo Sapiens
auacccuucacauggaagauuaaugagggaaa

SEQ ID NO: 333753 - RNA, 32 nt, Homo Sapiens
gccggggcaggggccucuggcucccgacacug

SEQ ID NO: 333754 - RNA, 32 nt, Homo Sapiens
agauccaauauuugaagauuggccuucauuuc

SEQ ID NO: 333755 - RNA, 32 nt, Homo Sapiens
cggccaccuccuuuccucucgccaccuuccac

SEQ ID NO: 333756 - RNA, 32 nt, Homo Sapiens
ccccaccuuucuggacggaaccacguacuuuu

SEQ ID NO: 333757 - RNA, 32 nt, Homo Sapiens
gcucaagcaugucauaagcuucaccaaucaag

SEQ ID NO: 333758 - RNA, 32 nt, Homo Sapiens
gggcggcguucccacccacaccuucgacgcga

SEQ ID NO: 333759 - RNA, 32 nt, Homo Sapiens
caaauguuaacuauuguuaaaaacuuuacagg

SEQ ID NO: 333760 - RNA, 32 nt, Homo Sapiens
cacuggaagugugacauagauguaucaaaggg

SEQ ID NO: 333761 - RNA, 32 nt, Homo Sapiens
aaacuacuaugaaagugaauucguguuccucu

SEQ ID NO: 333762 - RNA, 31 nt, Homo Sapiens
gggcacagcggcugccugcgccugagcagug

SEQ ID NO: 333763 - RNA, 32 nt, Homo Sapiens
gaagaaaaagggaaacaaaacuagagaaaagg

SEQ ID NO: 333764 - RNA, 32 nt, Homo Sapiens
ucaaaauaacauuuggauuuagguuccuucac

SEQ ID NO: 333765 - RNA, 32 nt, Homo Sapiens
augauaugugauacaaagcaaauauuuucuaa

SEQ ID NO: 333766 - RNA, 32 nt, Homo Sapiens
acuggaaaaucagccaaucuuaacccaaagau

SEQ ID NO: 333767 - RNA, 32 nt, Homo Sapiens
guuguuggauguuuccucuuccucccuuaugu

SEQ ID NO: 333768 - RNA, 32 nt, Homo Sapiens
cccgccaccagcugggccucagcccucacggc

SEQ ID NO: 333769 - RNA, 32 nt, Homo Sapiens
uuguaaaguauuuagaauguauugaauaggcu

SEQ ID NO: 333770 - RNA, 32 nt, Homo Sapiens
ccuagcgcuggccgcgaccccggcgccuuuga

SEQ ID NO: 333771 - RNA, 30 nt, Homo Sapiens
acuguacauaaaagauauauguagagagag

SEQ ID NO: 333772 - RNA, 32 nt, Homo Sapiens
ggagugucugggauugguagcucucuccaacu

SEQ ID NO: 333773 - RNA, 32 nt, Homo Sapiens
uugguggaacuagaaagagaauccacauauuc

SEQ ID NO: 333774 - RNA, 32 nt, Homo Sapiens
cgcaucaauguauuuuaucuuauuuucucaau

SEQ ID NO: 333775 - RNA, 32 nt, Homo Sapiens
uauauuguaacguuaaaugaaaaaagaacccc

SEQ ID NO: 333776 - RNA, 32 nt, Homo Sapiens
uguaugacccuaugcaaguccuccucccucau

SEQ ID NO: 333777 - RNA, 32 nt, Homo Sapiens
aacaugguaacacuuaaaaugguacucgggga

SEQ ID NO: 333778 - RNA, 32 nt, Homo Sapiens
ugaaaccucccucuccaccuccccgcccccga

SEQ ID NO: 333779 - RNA, 32 nt, Homo Sapiens
ucugugccccacuucuccauggcagcaccccg

SEQ ID NO: 333780 - RNA, 32 nt, Homo Sapiens
uuuuauuguucuaauggauuucaucagaaaug

SEQ ID NO: 333781 - RNA, 32 nt, Homo Sapiens
ugcgauacaaccuggcucugccccacagagca

SEQ ID NO: 333782 - RNA, 32 nt, Homo Sapiens
caacaaagccccaaacacaggugcacugagua

SEQ ID NO: 333783 - RNA, 32 nt, Homo Sapiens
guaggcaccccggcccagcagcccagcagccc

SEQ ID NO: 333784 - RNA, 32 nt, Homo Sapiens
aaaguuuggcuuugcuguaauguaauagacau

SEQ ID NO: 333785 - RNA, 32 nt, Homo Sapiens
uccaguuugcuuuuaacgaaaaucacaacuuc

SEQ ID NO: 333786 - RNA, 32 nt, Homo Sapiens
ggagcugcgaccccggcccuagggcaguccag

SEQ ID NO: 333787 - RNA, 32 nt, Homo Sapiens
uaaaacuucaaaaacuaaaaucauugucaaaa

SEQ ID NO: 333788 - RNA, 32 nt, Homo Sapiens
gugaucuuggcugacugcaacuucugccuccu

SEQ ID NO: 333789 - RNA, 32 nt, Homo Sapiens
cuguccuggaauuauuuuaguaguguuucagu

SEQ ID NO: 333790 - RNA, 32 nt, Homo Sapiens
uauugcugcagaaaacaaaagccuggcugagu

SEQ ID NO: 333791 - RNA, 32 nt, Homo Sapiens
uucgccucuccaugaacccgugagccuggggg

SEQ ID NO: 333792 - RNA, 30 nt, Homo Sapiens
ucuuauuuacacaaaaaaaaaaaaaaaaaa

SEQ ID NO: 333793 - RNA, 32 nt, Homo Sapiens
cuuauaaguauuugaugggguggauucguggu

SEQ ID NO: 333794 - RNA, 32 nt, Homo Sapiens
gguucuguaggaccucuuuuguugcuuaagau

SEQ ID NO: 333795 - RNA, 32 nt, Homo Sapiens
guggugauaaccuugaagcuauucuccccuaa

SEQ ID NO: 333796 - RNA, 32 nt, Homo Sapiens
gucggcuggcggcgaaggaaggcgcucucggg

SEQ ID NO: 333797 - RNA, 32 nt, Homo Sapiens
uggguccucagagagagugucuggcgcauccu

SEQ ID NO: 333798 - RNA, 32 nt, Homo Sapiens
cuagagcccagcaccuagagccaggcugccca

SEQ ID NO: 333799 - RNA, 32 nt, Homo Sapiens
cugaagggcuccucaagugccgccaaaguggg

SEQ ID NO: 333800 - RNA, 32 nt, Homo Sapiens
cuuucucgcccagcgcccccaggccgcucccg

SEQ ID NO: 333801 - RNA, 32 nt, Homo Sapiens
ggcaguguauuuacauggaaauuggaucgagg

SEQ ID NO: 333802 - RNA, 32 nt, Homo Sapiens
aggcugugacgagaagacaaggcacagugcag

SEQ ID NO: 333803 - RNA, 32 nt, Homo Sapiens
agaagguggagacccuagagguccuggauucu

SEQ ID NO: 333804 - RNA, 29 nt, Homo Sapiens
caguccaugaagauguagaggagaaacug

SEQ ID NO: 333805 - RNA, 32 nt, Homo Sapiens
guuuuaauuuaaaggaaagauucacuauuacu

SEQ ID NO: 333806 - RNA, 32 nt, Homo Sapiens
uaaauuaaauuaaaauaaaacaugcgcugggu

SEQ ID NO: 333807 - RNA, 32 nt, Homo Sapiens
aacuccagauaccauugauaagaaauuuugca

SEQ ID NO: 333808 - RNA, 32 nt, Homo Sapiens
uaaacaaacucuguagccuuugaaaguggaac

SEQ ID NO: 333809 - RNA, 32 nt, Homo Sapiens
ccggaaaauggccgccgccgccgccgccgcgc

SEQ ID NO: 333810 - RNA, 32 nt, Homo Sapiens
aagauuugccuggccuuccugggggagcagua

SEQ ID NO: 333811 - RNA, 32 nt, Homo Sapiens
gggcugcucuucugaggccacaucucagagcu

SEQ ID NO: 333812 - RNA, 32 nt, Homo Sapiens
ccuguguuugucauauuuuucuucauuucaca

SEQ ID NO: 333813 - RNA, 32 nt, Homo Sapiens
gauuggcagaaagaagccagggugugcaaguc

SEQ ID NO: 333814 - RNA, 32 nt, Homo Sapiens
gauuauaaaugaaugaucaccucgaagucacu

SEQ ID NO: 333815 - RNA, 32 nt, Homo Sapiens
agaugccuuuuggagagacuguagcucagggc

SEQ ID NO: 333816 - RNA, 32 nt, Homo Sapiens
uaaguaaauuuauuuauugagucaauuuguuc

SEQ ID NO: 333817 - RNA, 32 nt, Homo Sapiens
ccuggccaggcuccacggaucccgccagaaac

SEQ ID NO: 333818 - RNA, 32 nt, Homo Sapiens
ccuguggacgccgacccgggaccgccgcuggc

SEQ ID NO: 333819 - RNA, 32 nt, Homo Sapiens
gcguuucuuuugcaugacuguggccuguugcu

SEQ ID NO: 333820 - RNA, 32 nt, Homo Sapiens
uugguuugaugucauagaaugauccaaggaga

SEQ ID NO: 333821 - RNA, 32 nt, Homo Sapiens
caagugguccccccggccuuaagcggcauaga

SEQ ID NO: 333822 - RNA, 32 nt, Homo Sapiens
ccaugagcuguaucuugaucugucugacuguc

SEQ ID NO: 333823 - RNA, 32 nt, Homo Sapiens
caaauauuaggauuacaagcugucucucugac

SEQ ID NO: 333824 - RNA, 32 nt, Homo Sapiens
cccuuacacuuuaaaggguaagacaaaggcuu

SEQ ID NO: 333825 - RNA, 32 nt, Homo Sapiens
cugugguucuuugcaguuucuuguaaauuuau

SEQ ID NO: 333826 - RNA, 32 nt, Homo Sapiens
uguaagcucugcguucccgggcguggaagaga

SEQ ID NO: 333827 - RNA, 32 nt, Homo Sapiens
gccacucagugaaaauaauaacauuauuauga

SEQ ID NO: 333828 - RNA, 32 nt, Homo Sapiens
ccuuggaagaucugguaccuggugcagcgagg

SEQ ID NO: 333829 - RNA, 32 nt, Homo Sapiens
acgaggucaggaguucgagccagccugaccaa

SEQ ID NO: 333830 - RNA, 32 nt, Homo Sapiens
ggggcaaauguuuuuacugucaauguauauug

SEQ ID NO: 333831 - RNA, 32 nt, Homo Sapiens
cccaccucaucccacuuuuuaaguguaaaugc

SEQ ID NO: 333832 - RNA, 32 nt, Homo Sapiens
uugauuuauguaucucuuucucugggcaucuc

SEQ ID NO: 333833 - RNA, 32 nt, Homo Sapiens
gcgucggaacagggcgggaggcggcggcgcgu

SEQ ID NO: 333834 - RNA, 32 nt, Homo Sapiens
ccgagggcuuggcaucugugagcccacauccu

SEQ ID NO: 333835 - RNA, 32 nt, Homo Sapiens
cgagcuggccuucucucgucugaucguggagc

SEQ ID NO: 333836 - RNA, 32 nt, Homo Sapiens
gucuaccuaggaccaggccucccuucccauga

SEQ ID NO: 333837 - RNA, 32 nt, Homo Sapiens
uauauguacagaucuucagggauuuagcaaau

SEQ ID NO: 333838 - RNA, 32 nt, Homo Sapiens
cgcagcagcgcccuugcguagcagccgcuugc

SEQ ID NO: 333839 - RNA, 32 nt, Homo Sapiens
cggccgggcuccucgggucggggcgcuggcug

SEQ ID NO: 333840 - RNA, 32 nt, Homo Sapiens
cucagaaaugucacugucaugaaaaauaggua

SEQ ID NO: 333841 - RNA, 32 nt, Homo Sapiens
gagguggcguuugguaacuuguagacccuagc

SEQ ID NO: 333842 - RNA, 32 nt, Homo Sapiens
acuguggagcucuggaaggcuuggugggagug

SEQ ID NO: 333843 - RNA, 32 nt, Homo Sapiens
cagcucacuauaagcuccaccucccagguuca

SEQ ID NO: 333844 - RNA, 32 nt, Homo Sapiens
gucaugacggaccuuccccagcccugaccacc

SEQ ID NO: 333845 - RNA, 32 nt, Homo Sapiens
cagcacccaggagcuugucuccaggaaggcgg

SEQ ID NO: 333846 - RNA, 32 nt, Homo Sapiens
aauucagauaaaaugugcuuauguucugcuau

SEQ ID NO: 333847 - RNA, 32 nt, Homo Sapiens
aagguuuuuaaauuauuuuugauagugugugu

SEQ ID NO: 333848 - RNA, 32 nt, Homo Sapiens
cagucuggaaagauuucccaauggaggaagca

SEQ ID NO: 333849 - RNA, 32 nt, Homo Sapiens
gauuauuuguuuuguucauuauuuaguuccua

SEQ ID NO: 333850 - RNA, 32 nt, Homo Sapiens
uauucaauucaccugugguccaaauaagucuc

SEQ ID NO: 333851 - RNA, 32 nt, Homo Sapiens
gaaauuuguauauaugaugguucuuagaacuu

SEQ ID NO: 333852 - RNA, 32 nt, Homo Sapiens
ccuugucccucucacuccccagccccaccccu

SEQ ID NO: 333853 - RNA, 32 nt, Homo Sapiens
ugcccucucccucucccugcucccaguugucu

SEQ ID NO: 333854 - RNA, 32 nt, Homo Sapiens
auugccuuuuucuguugagaaauugccucuga

SEQ ID NO: 333855 - RNA, 32 nt, Homo Sapiens
aaggcggaagcagcuaugaggaugcagcagcc

SEQ ID NO: 333856 - RNA, 32 nt, Homo Sapiens
uagcacaccagagaacucacacaggggagaag

SEQ ID NO: 333857 - RNA, 32 nt, Homo Sapiens
gaggagcuggcgccagcguggacggcggcagc

SEQ ID NO: 333858 - RNA, 32 nt, Homo Sapiens
ggauuuaacuuaugaaaauccaaaugcaggau

SEQ ID NO: 333859 - RNA, 32 nt, Homo Sapiens
cgcagcagacugcguccgcagggcagggcuga

SEQ ID NO: 333860 - RNA, 32 nt, Homo Sapiens
ugagcagacaaaugcaaugaauaugcuaugaa

SEQ ID NO: 333861 - RNA, 32 nt, Homo Sapiens
ggugcuuugcauauguccaaauccaugcaagu

SEQ ID NO: 333862 - RNA, 32 nt, Homo Sapiens
gcgcggagaggagaggccucgggaugucucug

SEQ ID NO: 333863 - RNA, 32 nt, Homo Sapiens
uucugcucuucaccgauuuucucagggaaaga

SEQ ID NO: 333864 - RNA, 32 nt, Homo Sapiens
ucucuccauuucuaccuccccaucccagugcu

SEQ ID NO: 333865 - RNA, 32 nt, Homo Sapiens
cauggggaaggggauuuguggagcaggggccu

SEQ ID NO: 333866 - RNA, 32 nt, Homo Sapiens
aaugggaugcuguuuguaaauuuucuaugcau

SEQ ID NO: 333867 - RNA, 32 nt, Homo Sapiens
cugggaaagagguagucacagagaaaggguaa

SEQ ID NO: 333868 - RNA, 32 nt, Homo Sapiens
aggcugggagagggagcagggcggcggcccgg

SEQ ID NO: 333869 - RNA, 32 nt, Homo Sapiens
gaaauaugccgagaacgcugcccgccacagcc

SEQ ID NO: 333870 - RNA, 32 nt, Homo Sapiens
ggcccauugaggauggccgagcaggggcgggc

SEQ ID NO: 333871 - RNA, 28 nt, Homo Sapiens
ugcaacuguuuagucauguguuuucauc

SEQ ID NO: 333872 - RNA, 31 nt, Homo Sapiens
uaccagacacugcugcugccccgucggcaug

SEQ ID NO: 333873 - RNA, 32 nt, Homo Sapiens
ugguuggccugggggaaggcagagcacguauu

SEQ ID NO: 333874 - RNA, 32 nt, Homo Sapiens
aaugaaggaggaauucuuaaauuagcuguaau

SEQ ID NO: 333875 - RNA, 32 nt, Homo Sapiens
aucccacugagcaucugaacuguccucaggga

SEQ ID NO: 333876 - RNA, 32 nt, Homo Sapiens
gugcaaccucugcggcagccgacugcaugaac

SEQ ID NO: 333877 - RNA, 32 nt, Homo Sapiens
aaauacagucaauaaaagguuuuuguauaaaa

SEQ ID NO: 333878 - RNA, 32 nt, Homo Sapiens
uaccuggcggggggcguugacucgugccaggg

SEQ ID NO: 333879 - RNA, 32 nt, Homo Sapiens
gacagaugagaaacuguauauuaaacaccuuu

SEQ ID NO: 333880 - RNA, 32 nt, Homo Sapiens
agggcgcgccuucuaccuccagcccugcaaaa

SEQ ID NO: 333881 - RNA, 32 nt, Homo Sapiens
agauuugaguaugauaugauaaaggcuuucua

SEQ ID NO: 333882 - RNA, 32 nt, Homo Sapiens
cccugccaucagucaaggccgcccgcccacgu

SEQ ID NO: 333883 - RNA, 32 nt, Homo Sapiens
aacuaucaaaaauggagcuguagaagaggcau

SEQ ID NO: 333884 - RNA, 30 nt, Homo Sapiens
uucacacgcuccgugccgcugccgcgaagc

SEQ ID NO: 333885 - RNA, 32 nt, Homo Sapiens
caagcccaggugggacuuccucccagcccucu

SEQ ID NO: 333886 - RNA, 32 nt, Homo Sapiens
ugagcaagggaagugacaggaaauggagcugg

SEQ ID NO: 333887 - RNA, 32 nt, Homo Sapiens
gaagagacccuuccugcuuuccuuccacugau

SEQ ID NO: 333888 - RNA, 32 nt, Homo Sapiens
aggugggauugugaagauuuacugacaucaaa

SEQ ID NO: 333889 - RNA, 32 nt, Homo Sapiens
ccaagaugaugauaauggggaagugggggauu

SEQ ID NO: 333890 - RNA, 32 nt, Homo Sapiens
ugagaagguacuaaaacuuaauacuaaaacau

SEQ ID NO: 333891 - RNA, 32 nt, Homo Sapiens
cggcgccaugacgcgcugggugcccaccaagc

SEQ ID NO: 333892 - RNA, 32 nt, Homo Sapiens
gggcugcggaccagcgccguccccucacggag

SEQ ID NO: 333893 - RNA, 32 nt, Homo Sapiens
agaugugggugcaggcaugcacacacacgaug

SEQ ID NO: 333894 - RNA, 28 nt, Homo Sapiens
ucaaggacagauuaacuggaaaacauau

SEQ ID NO: 333895 - RNA, 32 nt, Homo Sapiens
ccgggggcgaggggcagcucgggagagcggga

SEQ ID NO: 333896 - RNA, 32 nt, Homo Sapiens
gccuacuaggacaguucugugcuucaccauga

SEQ ID NO: 333897 - RNA, 32 nt, Homo Sapiens
gccaaggauaccuucccagccaaacaugccaa

SEQ ID NO: 333898 - RNA, 32 nt, Homo Sapiens
gaaggcaugguaguuuguuuguuuguuuguuu

SEQ ID NO: 333899 - RNA, 32 nt, Homo Sapiens
gugggccucacagcuggccuugaguuuuuacu

SEQ ID NO: 333900 - RNA, 32 nt, Homo Sapiens
guaaauauauuuuaccuuauuaaaugugugug

SEQ ID NO: 333901 - RNA, 32 nt, Homo Sapiens
gcaaagcaggaugaggcugaucaacagcacuu

SEQ ID NO: 333902 - RNA, 32 nt, Homo Sapiens
gcgaaaagauaaaccuggagauauuauaaggg

SEQ ID NO: 333903 - RNA, 32 nt, Homo Sapiens
guggaaaugcaaaaggaacaauuauauauaug

SEQ ID NO: 333904 - RNA, 32 nt, Homo Sapiens
acccgcggucgcccagcacgccgggacgcgcg

SEQ ID NO: 333905 - RNA, 32 nt, Homo Sapiens
ucaauuucaaaauaaagguuuucagggguuca

SEQ ID NO: 333906 - RNA, 31 nt, Homo Sapiens
uggaggacaaagaaaaggguuguuauuuuug

SEQ ID NO: 333907 - RNA, 32 nt, Homo Sapiens
cuacugcucccuccaggucugggggcuuuuau

SEQ ID NO: 333908 - RNA, 32 nt, Homo Sapiens
gcgcccggccgcggcgcgacucggcugcacuc

SEQ ID NO: 333909 - RNA, 32 nt, Homo Sapiens
gguuaaacugcaccaaggguguuuccuguugg

SEQ ID NO: 333910 - RNA, 32 nt, Homo Sapiens
gcacagcugcaugcacuucaagggcagccuuu

SEQ ID NO: 333911 - RNA, 32 nt, Homo Sapiens
gccggggauuacccuaaaugcuuuaucuuuuu

SEQ ID NO: 333912 - RNA, 32 nt, Homo Sapiens
cgcggaacugcggaagauccacagggcggccc

SEQ ID NO: 333913 - RNA, 32 nt, Homo Sapiens
gugcuguguggccuucuguaagucccugcccu

SEQ ID NO: 333914 - RNA, 32 nt, Homo Sapiens
acuauauccuggcuuugugaccucagccaagu

SEQ ID NO: 333915 - RNA, 32 nt, Homo Sapiens
aaagauuguaaauacaccaaucagcacucugu

SEQ ID NO: 333916 - RNA, 32 nt, Homo Sapiens
aauuauugucugauuauaugaagauaaaugac

SEQ ID NO: 333917 - RNA, 32 nt, Homo Sapiens
auuguauccuuaguaaucauggggcaugauua

SEQ ID NO: 333918 - RNA, 32 nt, Homo Sapiens
ccuuuuacuuuuuuaaaaaauguuacauauug

SEQ ID NO: 333919 - RNA, 32 nt, Homo Sapiens
cucuuuccaaaagucacuuugauucaacuucg

SEQ ID NO: 333920 - RNA, 32 nt, Homo Sapiens
ugguuucuggagauaacccaucaauaaaagcu

SEQ ID NO: 333921 - RNA, 32 nt, Homo Sapiens
cuguaacugacugggaagcuuaaaauaacaga

SEQ ID NO: 333922 - RNA, 32 nt, Homo Sapiens
aaggggcugggcggccggcaggggcguguguc

SEQ ID NO: 333923 - RNA, 32 nt, Homo Sapiens
uuaaaccuugagcucuagccgaugcauuuguc

SEQ ID NO: 333924 - RNA, 32 nt, Homo Sapiens
gaggaaugaauaacuccagacacgccaccuuu

SEQ ID NO: 333925 - RNA, 32 nt, Homo Sapiens
ugagcccacucuacugccccagcuccguuucu

SEQ ID NO: 333926 - RNA, 32 nt, Homo Sapiens
cagauuaaauuaacagaagcauuucacauaaa

SEQ ID NO: 333927 - RNA, 32 nt, Homo Sapiens
gauuuuuagacuaggcucuaguguucagaauu

SEQ ID NO: 333928 - RNA, 32 nt, Homo Sapiens
cagaauaugcuucaagaugugggcaggucagu

SEQ ID NO: 333929 - RNA, 32 nt, Homo Sapiens
gggaggggcggcgggggcgcacugaacauuua

SEQ ID NO: 333930 - RNA, 31 nt, Homo Sapiens
uuugggcuugaauaaagaaguauuucugguu

SEQ ID NO: 333931 - RNA, 32 nt, Homo Sapiens
cugcuaguucuaucuuuaguauuaucuaugca

SEQ ID NO: 333932 - RNA, 32 nt, Homo Sapiens
acuccaccaaagggcacaucuugcuuugaaca

SEQ ID NO: 333933 - RNA, 32 nt, Homo Sapiens
agggugcaggaggacagcagcuaacaaggcca

SEQ ID NO: 333934 - RNA, 32 nt, Homo Sapiens
cuuuggagcacuuuucucuacugcagaucuau

SEQ ID NO: 333935 - RNA, 32 nt, Homo Sapiens
auguaccauguuuucacacgugucucuucucu

SEQ ID NO: 333936 - RNA, 32 nt, Homo Sapiens
cgggguuuugucucuaucaucucaggcgucaa

SEQ ID NO: 333937 - RNA, 32 nt, Homo Sapiens
uugggcauuauaaguuuauauuuauuaacucu

SEQ ID NO: 333938 - RNA, 32 nt, Homo Sapiens
caaacaggugguccgcugguaauccccaucga

SEQ ID NO: 333939 - RNA, 32 nt, Homo Sapiens
uucgggcggccgccaggcuucccggcccgcca

SEQ ID NO: 333940 - RNA, 28 nt, Homo Sapiens
cauccagaggggcccaggaugaccccga

SEQ ID NO: 333941 - RNA, 32 nt, Homo Sapiens
uuucacccaauguucacaucugcacucaaggu

SEQ ID NO: 333942 - RNA, 32 nt, Homo Sapiens
aacccguguuccaggugcacauccucccaagg

SEQ ID NO: 333943 - RNA, 32 nt, Homo Sapiens
gggcugcggaggggcgcgcuggggcuucgacc

SEQ ID NO: 333944 - RNA, 32 nt, Homo Sapiens
uuuagaaaauacaagguuacaaagggcuucca

SEQ ID NO: 333945 - RNA, 32 nt, Homo Sapiens
aaaguuccucgagucagccucuccaggcccag

SEQ ID NO: 333946 - RNA, 32 nt, Homo Sapiens
cacuucgcuucucugcuccagguucacuuugg

SEQ ID NO: 333947 - RNA, 32 nt, Homo Sapiens
auuagcuuuuaguuaugaacuacuuccuucca

SEQ ID NO: 333948 - RNA, 32 nt, Homo Sapiens
ucagcuuaauacacagaagagguuucuguuuu

SEQ ID NO: 333949 - RNA, 32 nt, Homo Sapiens
uuacacccaaaauaaggcuuuaacugcaccag

SEQ ID NO: 333950 - RNA, 32 nt, Homo Sapiens
ccuagucugccagcuuuugcuggcacguaggc

SEQ ID NO: 333951 - RNA, 32 nt, Homo Sapiens
ugcaaggugagcagaggcaggcguggggacac

SEQ ID NO: 333952 - RNA, 32 nt, Homo Sapiens
cuggccguuaagugagucuagagcagugguuc

SEQ ID NO: 333953 - RNA, 32 nt, Homo Sapiens
uggauguuugucacagaacuuuccaaauaaag

SEQ ID NO: 333954 - RNA, 32 nt, Homo Sapiens
ccuugccucaccccggccccucccacgcugag

SEQ ID NO: 333955 - RNA, 32 nt, Homo Sapiens
uuaauaacaugcaguauauaaaugugcagauu

SEQ ID NO: 333956 - RNA, 32 nt, Homo Sapiens
aacagaccugccauaacacuaauggaagguaa

SEQ ID NO: 333957 - RNA, 32 nt, Homo Sapiens
cuggagugcgagugggaaucagagccuccuga

SEQ ID NO: 333958 - RNA, 32 nt, Homo Sapiens
caccgccccguccgccccgcucugggaacgcc

SEQ ID NO: 333959 - RNA, 32 nt, Homo Sapiens
uaagagggagggagggcuccagacacaugucc

SEQ ID NO: 333960 - RNA, 32 nt, Homo Sapiens
gugggcagugugggacugggggugugggaguu

SEQ ID NO: 333961 - RNA, 32 nt, Homo Sapiens
gccucaggacaaaugucguugagguuacagag

SEQ ID NO: 333962 - RNA, 32 nt, Homo Sapiens
agccuuggcaaaaucaccuucccuuuaccagg

SEQ ID NO: 333963 - RNA, 32 nt, Homo Sapiens
aguaccgagcgcggguggccgcgguguccgug

SEQ ID NO: 333964 - RNA, 32 nt, Homo Sapiens
aauaauggaacuauuuuuuuuaaguggaggua

SEQ ID NO: 333965 - RNA, 32 nt, Homo Sapiens
gcgggccuuuuggcguccacugcgcggcugca

SEQ ID NO: 333966 - RNA, 32 nt, Homo Sapiens
guaaagaaaagacuuccugcucucaugcaguc

SEQ ID NO: 333967 - RNA, 32 nt, Homo Sapiens
cucucgucaagcucauccucccgggaacgucu

SEQ ID NO: 333968 - RNA, 32 nt, Homo Sapiens
guccugacugucuucuuuuuuaugauuuuacu

SEQ ID NO: 333969 - RNA, 32 nt, Homo Sapiens
aacgcgcuguccaugucgcgggccucgcuggg

SEQ ID NO: 333970 - RNA, 32 nt, Homo Sapiens
uuaaaacucaacuggugacuugugauugugaa

SEQ ID NO: 333971 - RNA, 32 nt, Homo Sapiens
uauucauauaucuauauacauauucaguugau

SEQ ID NO: 333972 - RNA, 32 nt, Homo Sapiens
ucucacugagggugggcaggucaaucagcacu

SEQ ID NO: 333973 - RNA, 30 nt, Homo Sapiens
cacauacuuauggugggggaaaucagauaa

SEQ ID NO: 333974 - RNA, 32 nt, Homo Sapiens
ugguuaggacaaaguggauggaugccgggaag

SEQ ID NO: 333975 - RNA, 32 nt, Homo Sapiens
uuaaguggaaaauuauguauuuuaaagugugu

SEQ ID NO: 333976 - RNA, 32 nt, Homo Sapiens
acauguucuuccaucuccccagccaccugaga

SEQ ID NO: 333977 - RNA, 32 nt, Homo Sapiens
aaacaugcagcuucccucuccccuuuuuuauu

SEQ ID NO: 333978 - RNA, 32 nt, Homo Sapiens
auuagcagaaaauggaauauaagacuuaaccu

SEQ ID NO: 333979 - RNA, 32 nt, Homo Sapiens
uuuaucagaaacuuaaaauauuucauaccguu

SEQ ID NO: 333980 - RNA, 32 nt, Homo Sapiens
gugucuuccuccccggcgggagcccacauguu

SEQ ID NO: 333981 - RNA, 32 nt, Homo Sapiens
cuuugguagcggcuaccggagcgcugcagggg

SEQ ID NO: 333982 - RNA, 32 nt, Homo Sapiens
uugcagccuuggaagcugggaggcuggaccug

SEQ ID NO: 333983 - RNA, 32 nt, Homo Sapiens
caguauuucucccuucccacucugccucaagu

SEQ ID NO: 333984 - RNA, 32 nt, Homo Sapiens
ucuggccucacaggaggaguuggcggggagcc

SEQ ID NO: 333985 - RNA, 32 nt, Homo Sapiens
ugugcuacaaauuccauuucauuuucaugaac

SEQ ID NO: 333986 - RNA, 32 nt, Homo Sapiens
caggugugguggcucaugccuguaaucccgac

SEQ ID NO: 333987 - RNA, 32 nt, Homo Sapiens
ucuaugucagccugucaguccacugccccauu

SEQ ID NO: 333988 - RNA, 31 nt, Homo Sapiens
ggccggagggcgggcgagggcgucacgugcg

SEQ ID NO: 333989 - RNA, 32 nt, Homo Sapiens
ggucguuccuacuguuuuacaacagcaugucu

SEQ ID NO: 333990 - RNA, 32 nt, Homo Sapiens
agcgaggggguugggguuggggccugaggcaa

SEQ ID NO: 333991 - RNA, 32 nt, Homo Sapiens
gcuucucagaucuaagugacuguacucaauaa

SEQ ID NO: 333992 - RNA, 32 nt, Homo Sapiens
caacuuaaguguaucugcagcucuacauuaaa

SEQ ID NO: 333993 - RNA, 32 nt, Homo Sapiens
uggggccgcgaccggcgaccccgguaacagaa

SEQ ID NO: 333994 - RNA, 32 nt, Homo Sapiens
guaauuggggugcaugagcuauggagucagau

SEQ ID NO: 333995 - RNA, 29 nt, Homo Sapiens
aagcuuaaauacaccuuuuauguaagagu

SEQ ID NO: 333996 - RNA, 32 nt, Homo Sapiens
acaucuuuggcuuauuucugguaagguuuuua

SEQ ID NO: 333997 - RNA, 32 nt, Homo Sapiens
uaccagacaugggagcagcauguaggauacaa

SEQ ID NO: 333998 - RNA, 32 nt, Homo Sapiens
ugccuguucaccccucucugguacuuguggcu

SEQ ID NO: 333999 - RNA, 32 nt, Homo Sapiens
cuuccgucgaagaggagggggcugcgguggcc

SEQ ID NO: 334000 - RNA, 28 nt, Homo Sapiens
uaaaauauuaaacuguugugaugucaag

SEQ ID NO: 334001 - RNA, 32 nt, Homo Sapiens
ugucuguacauaucugucugguccaucaaauu

SEQ ID NO: 334002 - RNA, 32 nt, Homo Sapiens
aauacagguaucuuggauuucagacacauucu

SEQ ID NO: 334003 - RNA, 32 nt, Homo Sapiens
cucugggaaggaagaaacaggagcuaggcaga

SEQ ID NO: 334004 - RNA, 32 nt, Homo Sapiens
ccccucugccagccgggcuccggcugcagaag

SEQ ID NO: 334005 - RNA, 31 nt, Homo Sapiens
augcccaucaaugauagacuggauaaagaaa

SEQ ID NO: 334006 - RNA, 32 nt, Homo Sapiens
ggccgggauccggccccuccccucgccuccuc

SEQ ID NO: 334007 - RNA, 32 nt, Homo Sapiens
augccaaacugcaggaccuuguuuccugagca

SEQ ID NO: 334008 - RNA, 32 nt, Homo Sapiens
acaacgauuucuccauuaaacuucuacugagc

SEQ ID NO: 334009 - RNA, 32 nt, Homo Sapiens
uggcugauauuugguagagauggggucucacu

SEQ ID NO: 334010 - RNA, 32 nt, Homo Sapiens
acuaaaugauuguaugcuuaugcugaacaccu

SEQ ID NO: 334011 - RNA, 32 nt, Homo Sapiens
ggcucgcguucggcggcccgggcccggccaag

SEQ ID NO: 334012 - RNA, 32 nt, Homo Sapiens
aaauccccuuugaaacagaaacuaaaauaaug

SEQ ID NO: 334013 - RNA, 32 nt, Homo Sapiens
cgccgccccccgugaggcgccgcgaccccggc

SEQ ID NO: 334014 - RNA, 32 nt, Homo Sapiens
uggcuguggggcuguuuacugauaagggaaaa

SEQ ID NO: 334015 - RNA, 30 nt, Homo Sapiens
aguugccacugagcugcagagcuccccagg

SEQ ID NO: 334016 - RNA, 32 nt, Homo Sapiens
aguauuccauugcaugacuguccugugcucug

SEQ ID NO: 334017 - RNA, 32 nt, Homo Sapiens
aagggcuacuuucucucauuuguguucaugga

SEQ ID NO: 334018 - RNA, 32 nt, Homo Sapiens
uaugaauuuuuagggccagcugugguggguca

SEQ ID NO: 334019 - RNA, 32 nt, Homo Sapiens
aaguuuuuauauauuuuuugaagugggcaugg

SEQ ID NO: 334020 - RNA, 32 nt, Homo Sapiens
uaacauacaauuuuuaagagcuuauauggcag

SEQ ID NO: 334021 - RNA, 32 nt, Homo Sapiens
agagucucacucuugucgagacugggguguag

SEQ ID NO: 334022 - RNA, 32 nt, Homo Sapiens
gucuacuccugucccugagccccgcccugugg

SEQ ID NO: 334023 - RNA, 32 nt, Homo Sapiens
aaagggccaaacuuucugaucuaugaacuucu

SEQ ID NO: 334024 - RNA, 32 nt, Homo Sapiens
uccacagaggcccccaggagcacugccuuuca

SEQ ID NO: 334025 - RNA, 32 nt, Homo Sapiens
uucaggaaagccagggcucccgagggcagcuc

SEQ ID NO: 334026 - RNA, 32 nt, Homo Sapiens
agcagcagggcccuccucccccaccagcucuc

SEQ ID NO: 334027 - RNA, 32 nt, Homo Sapiens
agcacagacuaaggcuggaacaguccauccuu

SEQ ID NO: 334028 - RNA, 32 nt, Homo Sapiens
ugcugaaguggccuugcugcucucaggcccgg

SEQ ID NO: 334029 - RNA, 32 nt, Homo Sapiens
gacacgggcaugggcugcuggaugcagggcuc

SEQ ID NO: 334030 - RNA, 32 nt, Homo Sapiens
gagaggcaugagcgcgcgcccgggccagugaa

SEQ ID NO: 334031 - RNA, 32 nt, Homo Sapiens
gaggcgcgccgcgccaugguguccugcgcggg

SEQ ID NO: 334032 - RNA, 32 nt, Homo Sapiens
ucaggggaaggguggggagucagccaagugcc

SEQ ID NO: 334033 - RNA, 32 nt, Homo Sapiens
aauaaaauuauugaaaauaauuuuaaaguggc

SEQ ID NO: 334034 - RNA, 32 nt, Homo Sapiens
cauuguuuucuuuccuucucaaagguugaaaa

SEQ ID NO: 334035 - RNA, 32 nt, Homo Sapiens
gccccaugccugcuuugguucccagugagcau

SEQ ID NO: 334036 - RNA, 32 nt, Homo Sapiens
uuugaagaauaaagccucauauccaggaaaaa

SEQ ID NO: 334037 - RNA, 32 nt, Homo Sapiens
ggacgucugggguccuguggggcccccacaau

SEQ ID NO: 334038 - RNA, 32 nt, Homo Sapiens
uggucgcgcuggcgucagggagucggagcugc

SEQ ID NO: 334039 - RNA, 32 nt, Homo Sapiens
cagagguguucccuuccgccuggacucauuuu

SEQ ID NO: 334040 - RNA, 32 nt, Homo Sapiens
uuguaaauauauuugguuuauuacaguaaagg

SEQ ID NO: 334041 - RNA, 32 nt, Homo Sapiens
agaaggaguacauugaagggagauuggcaccu

SEQ ID NO: 334042 - RNA, 32 nt, Homo Sapiens
uggguccccagcuccuucucacucucuucccu

SEQ ID NO: 334043 - RNA, 32 nt, Homo Sapiens
cgccgucacccgcgggaccccgggagcacaga

SEQ ID NO: 334044 - RNA, 32 nt, Homo Sapiens
gcauaguccuggaaacaaacagcacaauuccu

SEQ ID NO: 334045 - RNA, 30 nt, Homo Sapiens
gagaggagcuagcgcgcgggccccggcgcc

SEQ ID NO: 334046 - RNA, 29 nt, Homo Sapiens
gaacucauauguaugugaaugaacugaua

SEQ ID NO: 334047 - RNA, 32 nt, Homo Sapiens
cagugaggaugaugagaucaucaacccagagg

SEQ ID NO: 334048 - RNA, 31 nt, Homo Sapiens
gagucgagcaaugccuacccccgcgcucccg

SEQ ID NO: 334049 - RNA, 32 nt, Homo Sapiens
uuuacauaugaaguacagagagauuagauaac

SEQ ID NO: 334050 - RNA, 32 nt, Homo Sapiens
agaccugccccucccacccccacccugccacu

SEQ ID NO: 334051 - RNA, 32 nt, Homo Sapiens
uacaauuucagaaugcaauuuucauuauaaug

SEQ ID NO: 334052 - RNA, 32 nt, Homo Sapiens
uuggcggaggccgggcugggucgcugcgcguc

SEQ ID NO: 334053 - RNA, 32 nt, Homo Sapiens
caacccucucucuuaccugggaccucacacgc

SEQ ID NO: 334054 - RNA, 32 nt, Homo Sapiens
gcccagcuaauuuuuguauuuucaguagaaac

SEQ ID NO: 334055 - RNA, 32 nt, Homo Sapiens
uuucagaagaucucaguccacgucccgagugg

SEQ ID NO: 334056 - RNA, 32 nt, Homo Sapiens
gccucagacucuucuuuuauuguuuuucuuuu

SEQ ID NO: 334057 - RNA, 31 nt, Homo Sapiens
uagggcagacaguugaagccauagacauuug

SEQ ID NO: 334058 - RNA, 32 nt, Homo Sapiens
agccggguagacucgguggguggcgagaccca

SEQ ID NO: 334059 - RNA, 32 nt, Homo Sapiens
gcugaucccccucccccaacacacaugcuuuu

SEQ ID NO: 334060 - RNA, 32 nt, Homo Sapiens
auuuccuagccagcugggggacacuggaaauu

SEQ ID NO: 334061 - RNA, 32 nt, Homo Sapiens
cccagccgaaaacaaccaagaauuuuuuaaca

SEQ ID NO: 334062 - RNA, 32 nt, Homo Sapiens
caagggagccauguuauauucaaguuacccaa

SEQ ID NO: 334063 - RNA, 32 nt, Homo Sapiens
gcaacugcugguucuaucacaaugaaacggcu

SEQ ID NO: 334064 - RNA, 32 nt, Homo Sapiens
ucaccuccaggcugcgcagcugaguucuggaa

SEQ ID NO: 334065 - RNA, 32 nt, Homo Sapiens
acaauucucuaauuucucugguaaaauguagg

SEQ ID NO: 334066 - RNA, 32 nt, Homo Sapiens
ccgagggcuggccgggacugcugcucucccaa

SEQ ID NO: 334067 - RNA, 32 nt, Homo Sapiens
acugcacccagcugggggagcagugcuggacc

SEQ ID NO: 334068 - RNA, 32 nt, Homo Sapiens
uuagaaaacaguuuaaacaauuuguuaaaaaa

SEQ ID NO: 334069 - RNA, 32 nt, Homo Sapiens
ggccuacacugccuccucccacgccgugcuua

SEQ ID NO: 334070 - RNA, 32 nt, Homo Sapiens
aauuaucuuuaucauaaacauuuuacaugcag

SEQ ID NO: 334071 - RNA, 32 nt, Homo Sapiens
ccacaccugugcuacacuuggaauucugugcu

SEQ ID NO: 334072 - RNA, 32 nt, Homo Sapiens
cuggccacaccugugcaggcagcugagaggca

SEQ ID NO: 334073 - RNA, 32 nt, Homo Sapiens
uggcugggacaaaguuagaauugccugaagau

SEQ ID NO: 334074 - RNA, 32 nt, Homo Sapiens
uguuagccagcacuucugcucugucgucucuc

SEQ ID NO: 334075 - RNA, 32 nt, Homo Sapiens
agguagagugcuguugaaaaaauugcaguguu

SEQ ID NO: 334076 - RNA, 32 nt, Homo Sapiens
cacacuccuauagucccacuuacucaaggagg

SEQ ID NO: 334077 - RNA, 32 nt, Homo Sapiens
uacugagcuugcacaugauacaugauagcugu

SEQ ID NO: 334078 - RNA, 32 nt, Homo Sapiens
aaggcagcucacggggccuuccauuuccagcc

SEQ ID NO: 334079 - RNA, 32 nt, Homo Sapiens
ugacacauagcugggggguggugcuggagguu

SEQ ID NO: 334080 - RNA, 32 nt, Homo Sapiens
gccgccggccaggacgcccccgaggguguaga

SEQ ID NO: 334081 - RNA, 32 nt, Homo Sapiens
ugagucuggcagcccgaagccuggacaccuuu

SEQ ID NO: 334082 - RNA, 32 nt, Homo Sapiens
auuuacugaaugcaacauuacugcacaccaag

SEQ ID NO: 334083 - RNA, 32 nt, Homo Sapiens
acuaauacucuuuuugucgcauuuuauaccca

SEQ ID NO: 334084 - RNA, 32 nt, Homo Sapiens
ucucgccugugcuggaagaggagcaaacacug

SEQ ID NO: 334085 - RNA, 32 nt, Homo Sapiens
cucugccauguggcagaagugcucuuuguggc

SEQ ID NO: 334086 - RNA, 32 nt, Homo Sapiens
ucucuaugagucacccucgaggccccggguaa

SEQ ID NO: 334087 - RNA, 32 nt, Homo Sapiens
cgggccaggcgguggcucacgcuuguaaucgc

SEQ ID NO: 334088 - RNA, 32 nt, Homo Sapiens
gaggccagcuccgcugcgcuugucuccagcuu

SEQ ID NO: 334089 - RNA, 32 nt, Homo Sapiens
gcccgccccgcaggagcccgcgaagaugcccc

SEQ ID NO: 334090 - RNA, 32 nt, Homo Sapiens
cuugaagugugaaagaaaaguuuuccuuugaa

SEQ ID NO: 334091 - RNA, 32 nt, Homo Sapiens
cggggucagggcgggguucgcggaagaggcgg

SEQ ID NO: 334092 - RNA, 32 nt, Homo Sapiens
guuggauugguacauucacugcugccagguac

SEQ ID NO: 334093 - RNA, 32 nt, Homo Sapiens
ggagcccuguuuggucgcuauaguguauggcc

SEQ ID NO: 334094 - RNA, 32 nt, Homo Sapiens
gcggagcggcggggcgagacacuugcucgccu

SEQ ID NO: 334095 - RNA, 32 nt, Homo Sapiens
aggggcuccccaauguaauaccucucgaugca

SEQ ID NO: 334096 - RNA, 32 nt, Homo Sapiens
cgcguccgccgggccuggcugaggcggagguu

SEQ ID NO: 334097 - RNA, 32 nt, Homo Sapiens
guaagucaauuagggguugucuggagcugggg

SEQ ID NO: 334098 - RNA, 32 nt, Homo Sapiens
ugcucgcgccugccgcccgccggccucaggaa

SEQ ID NO: 334099 - RNA, 32 nt, Homo Sapiens
uaggucauacuggcuagaaugcagcuuuucuc

SEQ ID NO: 334100 - RNA, 32 nt, Homo Sapiens
guucggucagcccuucccuaauuacaccuauc

SEQ ID NO: 334101 - RNA, 32 nt, Homo Sapiens
gucgccgcguccuuggcuggcgucagaaaaau

SEQ ID NO: 334102 - RNA, 32 nt, Homo Sapiens
cuggccuguggccucccugcccauguucaccu

SEQ ID NO: 334103 - RNA, 32 nt, Homo Sapiens
cucccuagcaggcgccagcgguggaggcugag

SEQ ID NO: 334104 - RNA, 32 nt, Homo Sapiens
auccuuugaucauuuuucccaaggaaaccaau

SEQ ID NO: 334105 - RNA, 32 nt, Homo Sapiens
gcgcacuugucggagugacgggcccugcggaa

SEQ ID NO: 334106 - RNA, 32 nt, Homo Sapiens
cccccugcaggaaggagcugccuggacccguu

SEQ ID NO: 334107 - RNA, 32 nt, Homo Sapiens
auccgcccacccacccaucagccuagaggccc

SEQ ID NO: 334108 - RNA, 32 nt, Homo Sapiens
gcgagagcgggcgcggagcggcugaucagcuc

SEQ ID NO: 334109 - RNA, 32 nt, Homo Sapiens
uuaauuauuuucacauuuucucucugcaaaac

SEQ ID NO: 334110 - RNA, 32 nt, Homo Sapiens
uacugcacuccagucugggugacagagugaga

SEQ ID NO: 334111 - RNA, 32 nt, Homo Sapiens
cugcagcaguugccccaggcaccuguucgaca

SEQ ID NO: 334112 - RNA, 32 nt, Homo Sapiens
aaagguguuugaaaggaugcuaucaggcgaag

SEQ ID NO: 334113 - RNA, 32 nt, Homo Sapiens
ccaagccagcguugcgcagaugcacggccagc

SEQ ID NO: 334114 - RNA, 32 nt, Homo Sapiens
gcuauuucuauuuccuucucauauugauuauu

SEQ ID NO: 334115 - RNA, 32 nt, Homo Sapiens
cuccacccaucccaaccccauugcuaacaaca

SEQ ID NO: 334116 - RNA, 32 nt, Homo Sapiens
agacucauuaugucugugauuguagcuauuga

SEQ ID NO: 334117 - RNA, 32 nt, Homo Sapiens
ccgcgugcguagcagugucugugccucuccug

SEQ ID NO: 334118 - RNA, 32 nt, Homo Sapiens
ccccuggaaucccagcacuuugggaggcggcg

SEQ ID NO: 334119 - RNA, 32 nt, Homo Sapiens
ugcucugccggggucaucuccugggucaucgg

SEQ ID NO: 334120 - RNA, 32 nt, Homo Sapiens
gcaagaggaggaggugaugcaggugccaccuc

SEQ ID NO: 334121 - RNA, 32 nt, Homo Sapiens
aaugcuauuuuugguucuagaugcuuugccuc

SEQ ID NO: 334122 - RNA, 32 nt, Homo Sapiens
caacagccagcucagugcugcagagucagcaa

SEQ ID NO: 334123 - RNA, 32 nt, Homo Sapiens
guucaaccugucccuuucccugccagcaaacc

SEQ ID NO: 334124 - RNA, 29 nt, Homo Sapiens
cugggaaagaagguggcuuaucaaguggg

SEQ ID NO: 334125 - RNA, 32 nt, Homo Sapiens
auucguugugcagcugucaaugcagauggaau

SEQ ID NO: 334126 - RNA, 32 nt, Homo Sapiens
gcagccugcaccuggugggugguguccugaag

SEQ ID NO: 334127 - RNA, 32 nt, Homo Sapiens
uccugacaacaugaaauuguugggguuuucug

SEQ ID NO: 334128 - RNA, 32 nt, Homo Sapiens
ugaaauaauuuaauuuuugacauguacaucga

SEQ ID NO: 334129 - RNA, 32 nt, Homo Sapiens
uauacuuucucuccuucuaucuccagggcccc

SEQ ID NO: 334130 - RNA, 32 nt, Homo Sapiens
ugccccgccccgacugcggacggaguggaugg

SEQ ID NO: 334131 - RNA, 32 nt, Homo Sapiens
acucccggcaguguuagacgcguugugggucg

SEQ ID NO: 334132 - RNA, 32 nt, Homo Sapiens
ugauuaaauauaucuagaacuaucauuuuuac

SEQ ID NO: 334133 - RNA, 32 nt, Homo Sapiens
uuuuacaguuuagcauauauaaacaaacauga

SEQ ID NO: 334134 - RNA, 32 nt, Homo Sapiens
gcagaggagcagcugggauucccgaccaaagc

SEQ ID NO: 334135 - RNA, 32 nt, Homo Sapiens
uccagcugcuccaaucccuccuccucugcucu

SEQ ID NO: 334136 - RNA, 32 nt, Homo Sapiens
gaaugauggaaauugaucauuuucaguuguuc

SEQ ID NO: 334137 - RNA, 32 nt, Homo Sapiens
ucccggcuaguggagcccggcgcggggcccgc

SEQ ID NO: 334138 - RNA, 32 nt, Homo Sapiens
uuuucuguuguucuagagccacagcagucuaa

SEQ ID NO: 334139 - RNA, 32 nt, Homo Sapiens
auuagaaggacagagccaaauaugagucauuu

SEQ ID NO: 334140 - RNA, 32 nt, Homo Sapiens
aaggggaaaaggacaguuugauuggcaggagg

SEQ ID NO: 334141 - RNA, 32 nt, Homo Sapiens
gcacaccagagacaagcagaguaacaggauca

SEQ ID NO: 334142 - RNA, 32 nt, Homo Sapiens
uguuauaaugaaauaguuuauguguaacuggc

SEQ ID NO: 334143 - RNA, 32 nt, Homo Sapiens
cuuccuuuucaagcauaaguccaaauagacuc

SEQ ID NO: 334144 - RNA, 32 nt, Homo Sapiens
aaaucgauacugcuggccaaucagugucaucu

SEQ ID NO: 334145 - RNA, 32 nt, Homo Sapiens
uacuauaaauucagauuauccaaauauuuucc

SEQ ID NO: 334146 - RNA, 32 nt, Homo Sapiens
gaggcucgcgcgcuuuuuggaauucaguuauc

SEQ ID NO: 334147 - RNA, 32 nt, Homo Sapiens
ggucugcaguaagccaagaaacaaaggugggg

SEQ ID NO: 334148 - RNA, 32 nt, Homo Sapiens
guaguugauauuaaguugaugacuuguuuccc

SEQ ID NO: 334149 - RNA, 32 nt, Homo Sapiens
cuucagcuucuguuauuaauucuuaugacgaa

SEQ ID NO: 334150 - RNA, 32 nt, Homo Sapiens
accaccaucuucuggagugacucaaaugcaga

SEQ ID NO: 334151 - RNA, 32 nt, Homo Sapiens
agggggaggaggaggaggaucaugaaggccgg

SEQ ID NO: 334152 - RNA, 32 nt, Homo Sapiens
uugguuuucaauuugcucacuggccagagaca

SEQ ID NO: 334153 - RNA, 32 nt, Homo Sapiens
aggagguaaaugcucucugugcucucagggac

SEQ ID NO: 334154 - RNA, 32 nt, Homo Sapiens
cagcuaucagguauuaagucccgggcagcgau

SEQ ID NO: 334155 - RNA, 29 nt, Homo Sapiens
aagcccccgaagauucugacuaguuuggc

SEQ ID NO: 334156 - RNA, 32 nt, Homo Sapiens
ugcauucaacugagaucauaccacuucauucc

SEQ ID NO: 334157 - RNA, 32 nt, Homo Sapiens
guccucaucugagacugaaauguggggaucca

SEQ ID NO: 334158 - RNA, 32 nt, Homo Sapiens
gcuucaaagaugaaacaaacauugagccuuua

SEQ ID NO: 334159 - RNA, 32 nt, Homo Sapiens
uuuguuuaauguaucccuguucuguuuuuaau

SEQ ID NO: 334160 - RNA, 32 nt, Homo Sapiens
gaaaaagcaugaauaauuaaauauacauguga

SEQ ID NO: 334161 - RNA, 32 nt, Homo Sapiens
augauuagauugaaacgcauguuguauguuuu

SEQ ID NO: 334162 - RNA, 32 nt, Homo Sapiens
cgcagcgcgccgggagacugagagaggaaagg

SEQ ID NO: 334163 - RNA, 32 nt, Homo Sapiens
ggcugugggcacacuugcucauuuuuacuuca

SEQ ID NO: 334164 - RNA, 32 nt, Homo Sapiens
uacgacuugcagugagcgucaggagcacgucc

SEQ ID NO: 334165 - RNA, 32 nt, Homo Sapiens
ucgauucacguguaagccucuaccuccugcac

SEQ ID NO: 334166 - RNA, 32 nt, Homo Sapiens
ccucaguucuauuugggucaucuguuuccaga

SEQ ID NO: 334167 - RNA, 32 nt, Homo Sapiens
gcuagcucuugucgcggccgcggcgaguuaac

SEQ ID NO: 334168 - RNA, 32 nt, Homo Sapiens
gcauuuaucaaaucuuuuuuuuucuucauugu

SEQ ID NO: 334169 - RNA, 32 nt, Homo Sapiens
ucuuuauugucuuuuuuuuuuccccaucccug

SEQ ID NO: 334170 - RNA, 30 nt, Homo Sapiens
ggccaagagaagccucauugguucacaguc

SEQ ID NO: 334171 - RNA, 32 nt, Homo Sapiens
agauuuuugucaagagcgagacuccaucagcc

SEQ ID NO: 334172 - RNA, 32 nt, Homo Sapiens
ugagcaggcucuggugucuccuccucuucuua

SEQ ID NO: 334173 - RNA, 32 nt, Homo Sapiens
ucauuuccacagccucaaccacugccuaccug

SEQ ID NO: 334174 - RNA, 32 nt, Homo Sapiens
gacgccggcuccuggaggagagccgguaggag

SEQ ID NO: 334175 - RNA, 32 nt, Homo Sapiens
ucucucuccugcugccuauuuauagauuacac

SEQ ID NO: 334176 - RNA, 32 nt, Homo Sapiens
cuuagccaggauggaggcuguugugaacuugu

SEQ ID NO: 334177 - RNA, 32 nt, Homo Sapiens
cugaccuccucccaggcacucuuacuucuagc

SEQ ID NO: 334178 - RNA, 32 nt, Homo Sapiens
gcagaugauauuacagaagugaugucuguagg

SEQ ID NO: 334179 - RNA, 32 nt, Homo Sapiens
ucuggggcguugggaaacccaggcccgccggc

SEQ ID NO: 334180 - RNA, 32 nt, Homo Sapiens
uguaggaagcuguggcucuacuguccccucca

SEQ ID NO: 334181 - RNA, 32 nt, Homo Sapiens
gccacccucccgccugucggcccguagauuua

SEQ ID NO: 334182 - RNA, 30 nt, Homo Sapiens
uuuggccuauguagcuauucucugauaacu

SEQ ID NO: 334183 - RNA, 32 nt, Homo Sapiens
cccacccccaaccuuggcccagcccugagccc

SEQ ID NO: 334184 - RNA, 32 nt, Homo Sapiens
aauaccaaagugaguucuuuuuauguugagac

SEQ ID NO: 334185 - RNA, 32 nt, Homo Sapiens
aguuauuuaaacaaacuggggggagaagaaca

SEQ ID NO: 334186 - RNA, 31 nt, Homo Sapiens
guccuggcucgagaagaaggcagcacaggau

SEQ ID NO: 334187 - RNA, 32 nt, Homo Sapiens
cucaggacacugucugucucaggaacucaugg

SEQ ID NO: 334188 - RNA, 32 nt, Homo Sapiens
uuucuuuguucuagaucaaauguuuauuuuua

SEQ ID NO: 334189 - RNA, 32 nt, Homo Sapiens
cauucagucuuguuaagauugggaugauucug

SEQ ID NO: 334190 - RNA, 32 nt, Homo Sapiens
cuugccucggcgccuggguggcuugccgccca

SEQ ID NO: 334191 - RNA, 32 nt, Homo Sapiens
aagcuuuuugcaaagcacaucugcgauacacu

SEQ ID NO: 334192 - RNA, 32 nt, Homo Sapiens
gcugccuucagccccccucccccagacuaaca

SEQ ID NO: 334193 - RNA, 32 nt, Homo Sapiens
uuaaaaucuaaugggaaguaaaauauauuuug

SEQ ID NO: 334194 - RNA, 32 nt, Homo Sapiens
cacaacagacagcugcaucuccagugugaugu

SEQ ID NO: 334195 - RNA, 32 nt, Homo Sapiens
gucacaugagcuuuaguuuguuuucugguuua

SEQ ID NO: 334196 - RNA, 32 nt, Homo Sapiens
cagacacacacacacacaaacacacacacaca

SEQ ID NO: 334197 - RNA, 30 nt, Homo Sapiens
ggccagggcaggcggugcggcauccuccuc

SEQ ID NO: 334198 - RNA, 32 nt, Homo Sapiens
aaacccgccucccagguuuaagcgauucucau

SEQ ID NO: 334199 - RNA, 32 nt, Homo Sapiens
guggguaaauuaacugaacuuaaucaugucgu

SEQ ID NO: 334200 - RNA, 32 nt, Homo Sapiens
aggaguccggcacccccuccccggccauuugu

SEQ ID NO: 334201 - RNA, 32 nt, Homo Sapiens
uggugcaccagcugcuggaagcgcugcuuuug

SEQ ID NO: 334202 - RNA, 32 nt, Homo Sapiens
ggaauguuccagugacuggacaagcugaggaa

SEQ ID NO: 334203 - RNA, 32 nt, Homo Sapiens
cgguucuuccugccgcccuggaugcggugacc

SEQ ID NO: 334204 - RNA, 32 nt, Homo Sapiens
uuuuauuuuuaaaacuggaucugggguauauu

SEQ ID NO: 334205 - RNA, 32 nt, Homo Sapiens
caagaggggucuuugccgugggcccccucgcc

SEQ ID NO: 334206 - RNA, 32 nt, Homo Sapiens
ggaaguggcgaccgugaccugagaaggaaaga

SEQ ID NO: 334207 - RNA, 32 nt, Homo Sapiens
uugagaugcuaaggagcugaugccaccucuuu

SEQ ID NO: 334208 - RNA, 32 nt, Homo Sapiens
ggacggggguggggggugguaguggugggagg

SEQ ID NO: 334209 - RNA, 32 nt, Homo Sapiens
caucucggcaccuaguaaugguaaauuaguca

SEQ ID NO: 334210 - RNA, 32 nt, Homo Sapiens
gggagguggguuaaaaaacuaccuauggggua

SEQ ID NO: 334211 - RNA, 32 nt, Homo Sapiens
aagagugauauuaacuuggauuuauuuuucaa

SEQ ID NO: 334212 - RNA, 32 nt, Homo Sapiens
uccuauuucccccuccucccagcuccuggaaa

SEQ ID NO: 334213 - RNA, 32 nt, Homo Sapiens
uuguuugguuaacgugauacauucuguaugaa

SEQ ID NO: 334214 - RNA, 32 nt, Homo Sapiens
cgcaacccauacagugaauccauuuaagauac

SEQ ID NO: 334215 - RNA, 32 nt, Homo Sapiens
uucaucuagcuaaauuauauuucuuuauagag

SEQ ID NO: 334216 - RNA, 32 nt, Homo Sapiens
guagcucuguuguuucuccaagcugaguucua

SEQ ID NO: 334217 - RNA, 32 nt, Homo Sapiens
agcccaccugcugucccggcugcggccagcca

SEQ ID NO: 334218 - RNA, 32 nt, Homo Sapiens
gaagaguugggcuugcugcugcugucuucagc

SEQ ID NO: 334219 - RNA, 32 nt, Homo Sapiens
aaguccccuccuggggccccagacgcccccuc

SEQ ID NO: 334220 - RNA, 32 nt, Homo Sapiens
accaggcauuuaggaaaggaacacgaaaccua

SEQ ID NO: 334221 - RNA, 32 nt, Homo Sapiens
agggcacgguggauggucagcaugucaggaau

SEQ ID NO: 334222 - RNA, 32 nt, Homo Sapiens
cuaccagagacaauuagaggacugguacuuuu

SEQ ID NO: 334223 - RNA, 32 nt, Homo Sapiens
ggugauucuuaccugcuugaucuucaggaacu

SEQ ID NO: 334224 - RNA, 32 nt, Homo Sapiens
aauucaguuuaaugaugacaaacucugcuuuu

SEQ ID NO: 334225 - RNA, 32 nt, Homo Sapiens
cuuguaaaguauuuuucuacaucggguuuucu

SEQ ID NO: 334226 - RNA, 32 nt, Homo Sapiens
aaagcugccagcuggagcuggccuaccuugga

SEQ ID NO: 334227 - RNA, 32 nt, Homo Sapiens
ugggaggugguggggaaaauggucaguaggac

SEQ ID NO: 334228 - RNA, 32 nt, Homo Sapiens
ccuccauugaccaagucccacugaucaagucc

SEQ ID NO: 334229 - RNA, 32 nt, Homo Sapiens
ccaaauagcugagacuacaggcaccugccacc

SEQ ID NO: 334230 - RNA, 32 nt, Homo Sapiens
caguugauucagaaaucugcauuuuuuauucu

SEQ ID NO: 334231 - RNA, 32 nt, Homo Sapiens
ugaaacauaauggacuuacauuccuagucaga

SEQ ID NO: 334232 - RNA, 32 nt, Homo Sapiens
cggggccgccgggaugcucaggguuccggagc

SEQ ID NO: 334233 - RNA, 32 nt, Homo Sapiens
ugcugcuauaucuauccauuuuuuaauaaaga

SEQ ID NO: 334234 - RNA, 32 nt, Homo Sapiens
aaccagcaggaugcggcuguggaaggcggugg

SEQ ID NO: 334235 - RNA, 32 nt, Homo Sapiens
uaacuaaugcccucuccagggucacccuaggg

SEQ ID NO: 334236 - RNA, 32 nt, Homo Sapiens
ggcucugacuugggcuuuuggcugcagugggg

SEQ ID NO: 334237 - RNA, 32 nt, Homo Sapiens
ucaccaaaacaauggagauacggucagagagg

SEQ ID NO: 334238 - RNA, 32 nt, Homo Sapiens
caaaaaaaggcacaucaacugcgaaguuaucc

SEQ ID NO: 334239 - RNA, 32 nt, Homo Sapiens
gugauagaacuaaaaugcucucuguacucuag

SEQ ID NO: 334240 - RNA, 32 nt, Homo Sapiens
cgagacuggaggaaacaacaccaaauagggau

SEQ ID NO: 334241 - RNA, 32 nt, Homo Sapiens
auuuccauuuuaauguaguugguauggagcuc

SEQ ID NO: 334242 - RNA, 32 nt, Homo Sapiens
aaguauuuugccaaccuucugguugagcugca

SEQ ID NO: 334243 - RNA, 32 nt, Homo Sapiens
agagagcugggucugcccuugucccuuuuggg

SEQ ID NO: 334244 - RNA, 32 nt, Homo Sapiens
uuccuaaaugaaauuauauuauuucaacuacu

SEQ ID NO: 334245 - RNA, 32 nt, Homo Sapiens
gggcccgccccgagggggcagcgagaggagcu

SEQ ID NO: 334246 - RNA, 29 nt, Homo Sapiens
guguuauaaaguuugugucaauauucugg

SEQ ID NO: 334247 - RNA, 32 nt, Homo Sapiens
cacagggagcugcaugcaccacaggggcaaug

SEQ ID NO: 334248 - RNA, 32 nt, Homo Sapiens
gcuagcagggagaggggcggagaggcagcgaa

SEQ ID NO: 334249 - RNA, 32 nt, Homo Sapiens
ccaugccuggccggcccggcccaugccuguuc

SEQ ID NO: 334250 - RNA, 32 nt, Homo Sapiens
aaagaauucuaaaauaucuuacuuuugcaaac

SEQ ID NO: 334251 - RNA, 32 nt, Homo Sapiens
uguuuuugacuucaguacuucagauugcugug

SEQ ID NO: 334252 - RNA, 32 nt, Homo Sapiens
cuuucagaaggcaauuaaagaaauccacucag

SEQ ID NO: 334253 - RNA, 32 nt, Homo Sapiens
gggucguggaggggagggaggggcuuggcccc

SEQ ID NO: 334254 - RNA, 30 nt, Homo Sapiens
caucccagagggggcaugcacggcucuuca

SEQ ID NO: 334255 - RNA, 32 nt, Homo Sapiens
gcaggccggcccggcggccgugacaaugucgc

SEQ ID NO: 334256 - RNA, 30 nt, Homo Sapiens
ccguaguacauccacuacagagaagauuuc

SEQ ID NO: 334257 - RNA, 32 nt, Homo Sapiens
aaaaauagauuggucaauaaaauauuugagau

SEQ ID NO: 334258 - RNA, 32 nt, Homo Sapiens
gucaugucagagaauaaauaaauauucuaagu

SEQ ID NO: 334259 - RNA, 32 nt, Homo Sapiens
ucuguggccaccaccuccugcuccugaccucc

SEQ ID NO: 334260 - RNA, 32 nt, Homo Sapiens
gcaccucagccuggcacccccacuccccugca

SEQ ID NO: 334261 - RNA, 32 nt, Homo Sapiens
uaguuaucuuucuccuuuuucuccuggaacug

SEQ ID NO: 334262 - RNA, 32 nt, Homo Sapiens
ugucuuuguaaaaguauuauugaauuuucaau

SEQ ID NO: 334263 - RNA, 31 nt, Homo Sapiens
aaaaguggggcgguggggauguucucauaac

SEQ ID NO: 334264 - RNA, 32 nt, Homo Sapiens
ggugccccaggagagcgagaggcgccugggau

SEQ ID NO: 334265 - RNA, 32 nt, Homo Sapiens
gccggggggcagguggggaggggggugggaag

SEQ ID NO: 334266 - RNA, 32 nt, Homo Sapiens
uucagaaaaaauauaauugcaaauagguagga

SEQ ID NO: 334267 - RNA, 32 nt, Homo Sapiens
ccuuuacccucccaggccccaacggcagcacu

SEQ ID NO: 334268 - RNA, 32 nt, Homo Sapiens
auuaauggcaugauuuuuuuuaugcaaaaaga

SEQ ID NO: 334269 - RNA, 32 nt, Homo Sapiens
uauggugagcuggagcggcagcugcuucaggc

SEQ ID NO: 334270 - RNA, 32 nt, Homo Sapiens
aauauuugugauccauaacucuacacagccuu

SEQ ID NO: 334271 - RNA, 32 nt, Homo Sapiens
cuucaauaaaaacugagcuucccgcggccaaa

SEQ ID NO: 334272 - RNA, 32 nt, Homo Sapiens
gaggaguuugcaugucucaugauaaccaaaug

SEQ ID NO: 334273 - RNA, 32 nt, Homo Sapiens
cgggacgagcgcgggagccgggaccggguagc

SEQ ID NO: 334274 - RNA, 32 nt, Homo Sapiens
agugaaacaucuuuuuauucuugcagguucuu

SEQ ID NO: 334275 - RNA, 32 nt, Homo Sapiens
ggccgcggccccagcgugcgucucuuugcccu

SEQ ID NO: 334276 - RNA, 32 nt, Homo Sapiens
cuggcagggcucagugcagggaggcggaggcc

SEQ ID NO: 334277 - RNA, 32 nt, Homo Sapiens
ccuggucucacggggcuaguuuugacccccac

SEQ ID NO: 334278 - RNA, 32 nt, Homo Sapiens
ggcggacccugcagcccucgccugggacagcg

SEQ ID NO: 334279 - RNA, 32 nt, Homo Sapiens
acaugccuucugcugcagaaguggacgcccgu

SEQ ID NO: 334280 - RNA, 32 nt, Homo Sapiens
gccccuggccucgcgggccgugucuccggcau

SEQ ID NO: 334281 - RNA, 32 nt, Homo Sapiens
ucugacccaggacugauguggaccaggaagga

SEQ ID NO: 334282 - RNA, 32 nt, Homo Sapiens
uauugaagaagccacagaggcugaaauucaau

SEQ ID NO: 334283 - RNA, 32 nt, Homo Sapiens
aucugaaggugcccugguccuggaggaguucc

SEQ ID NO: 334284 - RNA, 30 nt, Homo Sapiens
uaaguguaucaccaugcagauguagaagag

SEQ ID NO: 334285 - RNA, 32 nt, Homo Sapiens
uuuaauugaggguggggggaggagggagugcg

SEQ ID NO: 334286 - RNA, 32 nt, Homo Sapiens
guccugauuauggcaagcugccccacaaaggg

SEQ ID NO: 334287 - RNA, 32 nt, Homo Sapiens
ugucaugugggauuuggaugguccugggggcu

SEQ ID NO: 334288 - RNA, 32 nt, Homo Sapiens
aggaaucagguuauauauggucucucgguuug

SEQ ID NO: 334289 - RNA, 32 nt, Homo Sapiens
uggccccgcaggcuccuccacuucccgcucug

SEQ ID NO: 334290 - RNA, 32 nt, Homo Sapiens
aacucccaggacuuguccuugauccuuccaga

SEQ ID NO: 334291 - RNA, 32 nt, Homo Sapiens
cggggcuucucgccccggauccccaccgcugg

SEQ ID NO: 334292 - RNA, 32 nt, Homo Sapiens
uaccagaaaaaauuaucauuucacugaguaua

SEQ ID NO: 334293 - RNA, 32 nt, Homo Sapiens
accagcugaccagcugaccaggucuguguguu

SEQ ID NO: 334294 - RNA, 32 nt, Homo Sapiens
uguugcaaucugguuccuaaggaggaagagga

SEQ ID NO: 334295 - RNA, 32 nt, Homo Sapiens
cccgaggcugcgggaccugagcgcgaggagcc

SEQ ID NO: 334296 - RNA, 32 nt, Homo Sapiens
ucaguuuuucuuuuucugaaaaagguaagucc

SEQ ID NO: 334297 - RNA, 32 nt, Homo Sapiens
cgccuguaaucccagcacuuuuggaggccaag

SEQ ID NO: 334298 - RNA, 32 nt, Homo Sapiens
caccuuuaaucccagcacuuugggaagccaag

SEQ ID NO: 334299 - RNA, 32 nt, Homo Sapiens
gggaaggcgcgcgucccgcccugacccgccgg

SEQ ID NO: 334300 - RNA, 32 nt, Homo Sapiens
ggaccggcgggcggggcggggagaggauccuc

SEQ ID NO: 334301 - RNA, 28 nt, Homo Sapiens
gcugagcuaacaggaccaauggauuaaa

SEQ ID NO: 334302 - RNA, 32 nt, Homo Sapiens
aaaugaggaaagggccaaggggccccggggcu

SEQ ID NO: 334303 - RNA, 32 nt, Homo Sapiens
uuuuuacugaccaaguucuuucugugcugaag

SEQ ID NO: 334304 - RNA, 32 nt, Homo Sapiens
caauuuccaaaaaugaaacccauucaucguaa

SEQ ID NO: 334305 - RNA, 32 nt, Homo Sapiens
ccggcgcgucgugcggggcugcggcggagccu

SEQ ID NO: 334306 - RNA, 32 nt, Homo Sapiens
acacuaaaggacuucauugauuuuuucagaga

SEQ ID NO: 334307 - RNA, 32 nt, Homo Sapiens
acgccugcccccagcccccgcagcccucuggc

SEQ ID NO: 334308 - RNA, 32 nt, Homo Sapiens
gggcaagugggcgaagggaggggggacgacgg

SEQ ID NO: 334309 - RNA, 32 nt, Homo Sapiens
ggcacuagggcccugcgagcggcgucuuaacc

SEQ ID NO: 334310 - RNA, 32 nt, Homo Sapiens
accguggccugggcuuggcccgcggccugcac

SEQ ID NO: 334311 - RNA, 32 nt, Homo Sapiens
auguaaguuuaaaauugaggcuaagguaacau

SEQ ID NO: 334312 - RNA, 32 nt, Homo Sapiens
uuucaagccaaguuugcauaaccuacuuucaa

SEQ ID NO: 334313 - RNA, 32 nt, Homo Sapiens
auuaugguuucuaaaucaguuauuuucuucag

SEQ ID NO: 334314 - RNA, 32 nt, Homo Sapiens
accuuuccucuucuggugcccgagggaaacgc

SEQ ID NO: 334315 - RNA, 32 nt, Homo Sapiens
aacaguguuaugcucugccaccuaccaaacuc

SEQ ID NO: 334316 - RNA, 32 nt, Homo Sapiens
cugcccacaagcaaacacaccacacauguucg

SEQ ID NO: 334317 - RNA, 32 nt, Homo Sapiens
gggacggagcugacuuuuaacuacaaccucga

SEQ ID NO: 334318 - RNA, 32 nt, Homo Sapiens
aucugagcucacgcuggcucacacagcucuag

SEQ ID NO: 334319 - RNA, 32 nt, Homo Sapiens
uguucagccaaggggacggucuggacaggcag

SEQ ID NO: 334320 - RNA, 32 nt, Homo Sapiens
aauuguuuugaaaaacaguugugugaauauuu

SEQ ID NO: 334321 - RNA, 32 nt, Homo Sapiens
auccaggaacacccucccagcaggggauggga

SEQ ID NO: 334322 - RNA, 32 nt, Homo Sapiens
auucuuccacaagagagggcuuucucaggacc

SEQ ID NO: 334323 - RNA, 31 nt, Homo Sapiens
cugcuguugcugcugacuccaaggagcacau

SEQ ID NO: 334324 - RNA, 32 nt, Homo Sapiens
uucuacuccgagucgagucuguaaagagcagg

SEQ ID NO: 334325 - RNA, 32 nt, Homo Sapiens
cuugacaaaaugguugacugagaaaacacaga

SEQ ID NO: 334326 - RNA, 32 nt, Homo Sapiens
uuccuguaaaaugguuaaaauauuaaauauuu

SEQ ID NO: 334327 - RNA, 32 nt, Homo Sapiens
uggccucuggagccccggcacguggugggcca

SEQ ID NO: 334328 - RNA, 32 nt, Homo Sapiens
acguuauuucuuccuuuuauuaagaaggaagc

SEQ ID NO: 334329 - RNA, 31 nt, Homo Sapiens
caugugcugccggauggaggcagggccaugc

SEQ ID NO: 334330 - RNA, 32 nt, Homo Sapiens
ccuucaguucuguuccuauuaaaggaccuucu

SEQ ID NO: 334331 - RNA, 30 nt, Homo Sapiens
aagcaggcgcccgcgcgcuagccguggcag

SEQ ID NO: 334332 - RNA, 32 nt, Homo Sapiens
gcacggcacagcacgcucgacuucaugcucag

SEQ ID NO: 334333 - RNA, 32 nt, Homo Sapiens
augcgccuaaaaugcggguagggucagagaca

SEQ ID NO: 334334 - RNA, 32 nt, Homo Sapiens
guauuagauauaaauuuuuuugaaagguuagu

SEQ ID NO: 334335 - RNA, 32 nt, Homo Sapiens
accuuugguucgcagggcuggagcuaagucuc

SEQ ID NO: 334336 - RNA, 32 nt, Homo Sapiens
caaaguuuucuuuuccuccaccauacaugucu

SEQ ID NO: 334337 - RNA, 32 nt, Homo Sapiens
cgggaucgagcaaaugggucuggccauggagc

SEQ ID NO: 334338 - RNA, 32 nt, Homo Sapiens
augcaaacaaaaaacuauuauauuuaagaacu

SEQ ID NO: 334339 - RNA, 32 nt, Homo Sapiens
uacaggcaucagaaaauaaguaaucaaauuag

SEQ ID NO: 334340 - RNA, 32 nt, Homo Sapiens
uaauuuugauacuuuccucaauauuuuaaaac

SEQ ID NO: 334341 - RNA, 32 nt, Homo Sapiens
aauucucucugauagacuuaguuuucagaccu

SEQ ID NO: 334342 - RNA, 32 nt, Homo Sapiens
ccugugcuuggagagaaaggggccggugcugg

SEQ ID NO: 334343 - RNA, 32 nt, Homo Sapiens
gcccaugccuccugccucuccccucccucgau

SEQ ID NO: 334344 - RNA, 32 nt, Homo Sapiens
accuggaaacugucauccaggucugcugggaa

SEQ ID NO: 334345 - RNA, 32 nt, Homo Sapiens
gaagggauucuugagacagacacgccacagag

SEQ ID NO: 334346 - RNA, 32 nt, Homo Sapiens
uguuuuaaagcacugggauagucuaauucuaa

SEQ ID NO: 334347 - RNA, 32 nt, Homo Sapiens
uauuggcauagaaaaaaguagcaaauguuuac

SEQ ID NO: 334348 - RNA, 32 nt, Homo Sapiens
uggaacagguaggggauaauauuucuuacuuu

SEQ ID NO: 334349 - RNA, 32 nt, Homo Sapiens
acaagcaugcguugcacuucuuuuuugggaga

SEQ ID NO: 334350 - RNA, 32 nt, Homo Sapiens
ucuaauguggaggugggaacauuauuguggug

SEQ ID NO: 334351 - RNA, 32 nt, Homo Sapiens
uaaccagagcaagcuuuuuuauuuuuuauaca

SEQ ID NO: 334352 - RNA, 32 nt, Homo Sapiens
uacagauucaaacagcauuuuaacucauguug

SEQ ID NO: 334353 - RNA, 32 nt, Homo Sapiens
ggcuggucuugaacuccugaccucaagugagc

SEQ ID NO: 334354 - RNA, 32 nt, Homo Sapiens
gagucacagaucugucagccugggaaccggcc

SEQ ID NO: 334355 - RNA, 32 nt, Homo Sapiens
cuaacugggacuaaaacagcuccaucacccag

SEQ ID NO: 334356 - RNA, 32 nt, Homo Sapiens
uauuuuauguaacugugauaaauaaugaaacu

SEQ ID NO: 334357 - RNA, 32 nt, Homo Sapiens
gccgccguccucuggagggcagcgcgauuggg

SEQ ID NO: 334358 - RNA, 32 nt, Homo Sapiens
auggcaaaucaucaacuaaaagcacuuguuuc

SEQ ID NO: 334359 - RNA, 32 nt, Homo Sapiens
gaggcucccagcugugggccucgcuggcccgg

SEQ ID NO: 334360 - RNA, 32 nt, Homo Sapiens
gaaacaaaaauuaagauuaucaaagcauuuug

SEQ ID NO: 334361 - RNA, 32 nt, Homo Sapiens
cccugagcccguuagguuuucuuuucuuggug

SEQ ID NO: 334362 - RNA, 32 nt, Homo Sapiens
cauaagaaaaucaacagcaaucuuaaaguguu

SEQ ID NO: 334363 - RNA, 32 nt, Homo Sapiens
acaauccucuuucucucucuuaaugcaugaua

SEQ ID NO: 334364 - RNA, 32 nt, Homo Sapiens
agcgaaccccaaccuuucgucccggcccuuuc

SEQ ID NO: 334365 - RNA, 32 nt, Homo Sapiens
aagaaaugccagaauacaaauaugaaagcucu

SEQ ID NO: 334366 - RNA, 32 nt, Homo Sapiens
uuaggagcugggugcggaugcagccugcaauc

SEQ ID NO: 334367 - RNA, 31 nt, Homo Sapiens
aggaaaccaaaauaaauauuucugcauuucg

SEQ ID NO: 334368 - RNA, 32 nt, Homo Sapiens
acccucccccuccccacccccacccccgugga

SEQ ID NO: 334369 - RNA, 32 nt, Homo Sapiens
agcgggccgcgcucgggcucgagcuccgcgca

SEQ ID NO: 334370 - RNA, 32 nt, Homo Sapiens
gaaaacuagcaaacagaaagcaauaacaucaa

SEQ ID NO: 334371 - RNA, 32 nt, Homo Sapiens
acaauuuaaauuuuauagaugcacuaagaauu

SEQ ID NO: 334372 - RNA, 32 nt, Homo Sapiens
acuggagaauuacagagauguacaaaugccag

SEQ ID NO: 334373 - RNA, 32 nt, Homo Sapiens
ugaaagacugguugguacuuaccuugcagagc

SEQ ID NO: 334374 - RNA, 32 nt, Homo Sapiens
ggcugaaacuauaaaugaaauuuuucauaaaa

SEQ ID NO: 334375 - RNA, 32 nt, Homo Sapiens
aacagaaucggacaguuaucugauggcuuucc

SEQ ID NO: 334376 - RNA, 32 nt, Homo Sapiens
gggcaggagggccgcucugugcgcgcccgcuc

SEQ ID NO: 334377 - RNA, 31 nt, Homo Sapiens
ucuuuacaaaaauaaauuuuuauucuaaucu

SEQ ID NO: 334378 - RNA, 32 nt, Homo Sapiens
cagccaugcaggauccagaaguuauggcagcc

SEQ ID NO: 334379 - RNA, 32 nt, Homo Sapiens
gguuauaaaaauuuaaauuuaaacaaaauuau

SEQ ID NO: 334380 - RNA, 32 nt, Homo Sapiens
uuuuuaaaauuccaacacaauaaauacaauaa

SEQ ID NO: 334381 - RNA, 32 nt, Homo Sapiens
uggaauacuccagccccuuggaaauucccggg

SEQ ID NO: 334382 - RNA, 32 nt, Homo Sapiens
uuucuaaaauguucaucuuuuaaaagaucuuc

SEQ ID NO: 334383 - RNA, 32 nt, Homo Sapiens
gcguuucuuacuguucuccaugugucggcaug

SEQ ID NO: 334384 - RNA, 32 nt, Homo Sapiens
gcaggcaguggacagggugcccgccccacagu

SEQ ID NO: 334385 - RNA, 32 nt, Homo Sapiens
uuuaaguguagagcuuccaggagaugggagga

SEQ ID NO: 334386 - RNA, 32 nt, Homo Sapiens
aggacaaaaaugaauaaauaaaaaauaguaac

SEQ ID NO: 334387 - RNA, 32 nt, Homo Sapiens
gaaaaggaggaucaggccaaccccaaagaaga

SEQ ID NO: 334388 - RNA, 32 nt, Homo Sapiens
uugcauguuguccccagaacacugccaccuug

SEQ ID NO: 334389 - RNA, 32 nt, Homo Sapiens
ugcccaaacagccgcacagguguccugugcuu

SEQ ID NO: 334390 - RNA, 32 nt, Homo Sapiens
guguaugucuauuugcacaagauugucuuuuc

SEQ ID NO: 334391 - RNA, 32 nt, Homo Sapiens
cacgugggaccgccccuuugccugggcggccu

SEQ ID NO: 334392 - RNA, 32 nt, Homo Sapiens
uacaauguauaggcccaaaagacaacuuaaga

SEQ ID NO: 334393 - RNA, 32 nt, Homo Sapiens
uucuuuuaaaauuggaaugcaacuguagguuu

SEQ ID NO: 334394 - RNA, 32 nt, Homo Sapiens
uggcaaaagcuacauuuuuacuguccuuacca

SEQ ID NO: 334395 - RNA, 32 nt, Homo Sapiens
accuucacuaaaaucuguacugauggauuuuc

SEQ ID NO: 334396 - RNA, 32 nt, Homo Sapiens
cuucaugaaggauguagaagcuuagcugccuc

SEQ ID NO: 334397 - RNA, 32 nt, Homo Sapiens
cauuuguuggggaaacaagaccggaauugacc

SEQ ID NO: 334398 - RNA, 32 nt, Homo Sapiens
guauugauauauucuucagugugauuuaggug

SEQ ID NO: 334399 - RNA, 32 nt, Homo Sapiens
aauggcuaaagcucuuuuuuuuccacaaucgu

SEQ ID NO: 334400 - RNA, 32 nt, Homo Sapiens
aggugaagagagggcaggggagcccacaucug

SEQ ID NO: 334401 - RNA, 32 nt, Homo Sapiens
gacugugccacuguccccccagccauucacuc

SEQ ID NO: 334402 - RNA, 32 nt, Homo Sapiens
ugccacugccccacccugccccacugcugucu

SEQ ID NO: 334403 - RNA, 32 nt, Homo Sapiens
auaauauucagauauaaaacaguuuugucagu

SEQ ID NO: 334404 - RNA, 32 nt, Homo Sapiens
uuguaaagaagacaccaauguuugucagagaa

SEQ ID NO: 334405 - RNA, 32 nt, Homo Sapiens
ggaauucugugcucugacucugcaggguagga

SEQ ID NO: 334406 - RNA, 32 nt, Homo Sapiens
caacaaacgagauggagguaaaaugaauccca

SEQ ID NO: 334407 - RNA, 32 nt, Homo Sapiens
ugucucuagcagcugguuggggacuauauucu

SEQ ID NO: 334408 - RNA, 32 nt, Homo Sapiens
ccaaacaaaacacuucugagcuuuucuugcca

SEQ ID NO: 334409 - RNA, 32 nt, Homo Sapiens
ccacagcaggccugucaguucucucuuaccuu

SEQ ID NO: 334410 - RNA, 32 nt, Homo Sapiens
acucacggauacaauuaacauggauuucaucu

SEQ ID NO: 334411 - RNA, 32 nt, Homo Sapiens
ugucucacucccuguagccccgucacguucuc

SEQ ID NO: 334412 - RNA, 32 nt, Homo Sapiens
ggauuuauaauggcauuuuauauuuggcaggc

SEQ ID NO: 334413 - RNA, 32 nt, Homo Sapiens
aaacaaagacaauccuuaaagcuuugcuccuc

SEQ ID NO: 334414 - RNA, 32 nt, Homo Sapiens
gccucuccagcugcgacacagauggcgcgcgg

SEQ ID NO: 334415 - RNA, 32 nt, Homo Sapiens
uuuucccaaaguaugucacuguuggaaauaaa

SEQ ID NO: 334416 - RNA, 32 nt, Homo Sapiens
ccuaccaggacacggcgcuggugcuguggaag

SEQ ID NO: 334417 - RNA, 32 nt, Homo Sapiens
ggagcaccuuccggccucuacaugcuguacgu

SEQ ID NO: 334418 - RNA, 32 nt, Homo Sapiens
agcaaaagagaucgguaguguuguguguaggc

SEQ ID NO: 334419 - RNA, 32 nt, Homo Sapiens
ucuacuguuucaucaaacucccuucuuaacua

SEQ ID NO: 334420 - RNA, 32 nt, Homo Sapiens
cuuuggguuauuacugucuuuacuucuaaaga

SEQ ID NO: 334421 - RNA, 32 nt, Homo Sapiens
ucagaauaucuaguuaagauaaauuaggccuu

SEQ ID NO: 334422 - RNA, 32 nt, Homo Sapiens
gagcucccaagccgcaggguggacgcuggaga

SEQ ID NO: 334423 - RNA, 32 nt, Homo Sapiens
gugccgaggggcgggggcaggaggacggcaag

SEQ ID NO: 334424 - RNA, 32 nt, Homo Sapiens
cagggugggaggggaggcucucuggcuuuagu

SEQ ID NO: 334425 - RNA, 32 nt, Homo Sapiens
cggcgugggcgguggccgcgcagcagcugaug

SEQ ID NO: 334426 - RNA, 32 nt, Homo Sapiens
cuauauucauacauauuauacucuugugugua

SEQ ID NO: 334427 - RNA, 32 nt, Homo Sapiens
acuucucccccuccccucaaaaagccaacagg

SEQ ID NO: 334428 - RNA, 32 nt, Homo Sapiens
aagaaaggguaucagcaauggcagaugaaaug

SEQ ID NO: 334429 - RNA, 32 nt, Homo Sapiens
cacaguguauggugaauauauuauuaaauaau

SEQ ID NO: 334430 - RNA, 32 nt, Homo Sapiens
augcacccacauuugccuguguccuugauuua

SEQ ID NO: 334431 - RNA, 32 nt, Homo Sapiens
ggcccgcaccccggugcucuguguagccguca

SEQ ID NO: 334432 - RNA, 32 nt, Homo Sapiens
cgauggcagccaucgaauauuccucugggcuc

SEQ ID NO: 334433 - RNA, 32 nt, Homo Sapiens
gacguggugacgccccggggcgccuagagcgc

SEQ ID NO: 334434 - RNA, 32 nt, Homo Sapiens
cucaguuauuuaacuguguuuagcucauuuaa

SEQ ID NO: 334435 - RNA, 32 nt, Homo Sapiens
guggauuuggcaaagaaaguugcuguaagugg

SEQ ID NO: 334436 - RNA, 32 nt, Homo Sapiens
uucagaauauuucaaauuuagcaauaaacaau

SEQ ID NO: 334437 - RNA, 32 nt, Homo Sapiens
aagggcgaugguggggagacucggugggugaa

SEQ ID NO: 334438 - RNA, 32 nt, Homo Sapiens
gcgcgucugcaccucucggccugccaguguac

SEQ ID NO: 334439 - RNA, 32 nt, Homo Sapiens
aguagcuugggaacugguuuguccacauaaac

SEQ ID NO: 334440 - RNA, 32 nt, Homo Sapiens
caggucgacccacgcguccgcggacgcguggg

SEQ ID NO: 334441 - RNA, 32 nt, Homo Sapiens
ugugaucugcacccucugaccccugacauuga

SEQ ID NO: 334442 - RNA, 32 nt, Homo Sapiens
ggcuggaggggagggcaguggcagaggagaug

SEQ ID NO: 334443 - RNA, 32 nt, Homo Sapiens
ugccccaggugucccagcuccacagccccugg

SEQ ID NO: 334444 - RNA, 32 nt, Homo Sapiens
cccaaguuggacgugcucggagggaaagauuu

SEQ ID NO: 334445 - RNA, 32 nt, Homo Sapiens
ugagaacucacacuagcuuguuuacaagauga

SEQ ID NO: 334446 - RNA, 32 nt, Homo Sapiens
uggccagaaauauuugggugcaugcuuuuugu

SEQ ID NO: 334447 - RNA, 32 nt, Homo Sapiens
uuacugaagcuuugauaagacaguccagcagu

SEQ ID NO: 334448 - RNA, 32 nt, Homo Sapiens
gucucaagccccacccccagacccucugaauc

SEQ ID NO: 334449 - RNA, 32 nt, Homo Sapiens
ucagugcugcugucaguguagcaaauaaaguc

SEQ ID NO: 334450 - RNA, 32 nt, Homo Sapiens
gcuuuugagagauaaaucccuuaugaaucccu

SEQ ID NO: 334451 - RNA, 32 nt, Homo Sapiens
cugccccuccccagcccuuugcaggcccagca

SEQ ID NO: 334452 - RNA, 32 nt, Homo Sapiens
acguuguagggccugcccauggagcggacccu

SEQ ID NO: 334453 - RNA, 32 nt, Homo Sapiens
auugcugaaaagacaaagaauuugagccuugg

SEQ ID NO: 334454 - RNA, 32 nt, Homo Sapiens
auaacguggcuaaauuguuuucaguuuuugaa

SEQ ID NO: 334455 - RNA, 32 nt, Homo Sapiens
ucauuugcaaguucuuccugugacugaacucc

SEQ ID NO: 334456 - RNA, 32 nt, Homo Sapiens
guagaaugucauuguuuuuaaaacuguuuuau

SEQ ID NO: 334457 - RNA, 30 nt, Homo Sapiens
ccugccgcucucccgccgccgguccgggca

SEQ ID NO: 334458 - RNA, 32 nt, Homo Sapiens
guuuucaucggugaucaugcacagcaaugcca

SEQ ID NO: 334459 - RNA, 32 nt, Homo Sapiens
gccgccccgcgagccuccagccccucgccugu

SEQ ID NO: 334460 - RNA, 32 nt, Homo Sapiens
ucaaguugaaagauuuugugcaaaauuaaaua

SEQ ID NO: 334461 - RNA, 32 nt, Homo Sapiens
uccuuccucugugccaggaaacgggagggggc

SEQ ID NO: 334462 - RNA, 32 nt, Homo Sapiens
cccaacucgccggccuggccacgggauggccc

SEQ ID NO: 334463 - RNA, 32 nt, Homo Sapiens
gggugugagucuuuucagcaacccgguccagu

SEQ ID NO: 334464 - RNA, 32 nt, Homo Sapiens
ugauuuugucugccaaaagaaaauagcucucu

SEQ ID NO: 334465 - RNA, 32 nt, Homo Sapiens
acccgggagguagaggcugcagugagccgaga

SEQ ID NO: 334466 - RNA, 32 nt, Homo Sapiens
acagaccucacuucccuucucuggaguuuugg

SEQ ID NO: 334467 - RNA, 32 nt, Homo Sapiens
uuacagauuuaaaagagcuuaagaucuggugu

SEQ ID NO: 334468 - RNA, 32 nt, Homo Sapiens
caguagauauccacaagcaauauuagcagggc

SEQ ID NO: 334469 - RNA, 32 nt, Homo Sapiens
cugcgcaccuucccggcccagccggcgauuca

SEQ ID NO: 334470 - RNA, 28 nt, Homo Sapiens
augccuggcccagccaggaugaccacag

SEQ ID NO: 334471 - RNA, 32 nt, Homo Sapiens
augugcacugugaugccuggaaccuuccucug

SEQ ID NO: 334472 - RNA, 32 nt, Homo Sapiens
uuuccuuguaaauguaaucagaugccauuuua

SEQ ID NO: 334473 - RNA, 32 nt, Homo Sapiens
cagagucucuugugaggagaauccacauccua

SEQ ID NO: 334474 - RNA, 32 nt, Homo Sapiens
gcguuagggcugcuuaggucucauggaccagu

SEQ ID NO: 334475 - RNA, 32 nt, Homo Sapiens
gucauuuuacuuuuagaaacauacaauugggc

SEQ ID NO: 334476 - RNA, 32 nt, Homo Sapiens
agguucucugugcuccuccuacccuuccagug

SEQ ID NO: 334477 - RNA, 32 nt, Homo Sapiens
ugguuucuuuagaggcacuuugagugguggga

SEQ ID NO: 334478 - RNA, 32 nt, Homo Sapiens
ggucugcggaaacgccagaaaagucgggucaa

SEQ ID NO: 334479 - RNA, 32 nt, Homo Sapiens
cgcgcuccgggcccgcggagccgcggugcuga

SEQ ID NO: 334480 - RNA, 32 nt, Homo Sapiens
gaagcaaaggagagcuuggggguggggagaaa

SEQ ID NO: 334481 - RNA, 32 nt, Homo Sapiens
gaccuggccuggcacuggcuuauuuaccugag

SEQ ID NO: 334482 - RNA, 32 nt, Homo Sapiens
acuuucauucucauuccaguuuauugaccuca

SEQ ID NO: 334483 - RNA, 32 nt, Homo Sapiens
caaaacaaaaacaaaaucuauuguaguuauau

SEQ ID NO: 334484 - RNA, 32 nt, Homo Sapiens
cgaagggguugucgguguugguguacccaugu

SEQ ID NO: 334485 - RNA, 31 nt, Homo Sapiens
uuuauguuaggguauugauagauuagagcag

SEQ ID NO: 334486 - RNA, 32 nt, Homo Sapiens
uugcaaauacaaaauauaauucuuuacaaaaa

SEQ ID NO: 334487 - RNA, 32 nt, Homo Sapiens
agauacauacacauacaccccauccucagugu

SEQ ID NO: 334488 - RNA, 32 nt, Homo Sapiens
uccacugccucccagcaccugugcugccccuc

SEQ ID NO: 334489 - RNA, 32 nt, Homo Sapiens
uacuucuucagaaaaaaggauuauauauuauu

SEQ ID NO: 334490 - RNA, 32 nt, Homo Sapiens
uuuuaaauggcauauugaaaacaucauuauua

SEQ ID NO: 334491 - RNA, 32 nt, Homo Sapiens
aagauuugacauucaacuguaguauccauaug

SEQ ID NO: 334492 - RNA, 32 nt, Homo Sapiens
gccucgggucugugugaggccauggcuccugg

SEQ ID NO: 334493 - RNA, 32 nt, Homo Sapiens
agaccagccugggcaacauagcaagaccccgu

SEQ ID NO: 334494 - RNA, 32 nt, Homo Sapiens
ccuagagaccccucaccaacuacuuuauugag

SEQ ID NO: 334495 - RNA, 32 nt, Homo Sapiens
uguuuuuccaggcuuccauuuagcaaauguuu

SEQ ID NO: 334496 - RNA, 32 nt, Homo Sapiens
uuguuuuaucuuucuuguuuuauaauuccuau

SEQ ID NO: 334497 - RNA, 32 nt, Homo Sapiens
agaaucuguauaucuguauauauuggcuagca

SEQ ID NO: 334498 - RNA, 32 nt, Homo Sapiens
caccgcgcaccucuuaggccccgcccgccagc

SEQ ID NO: 334499 - RNA, 32 nt, Homo Sapiens
gcucuugcugugccaugaugguguagaguggc

SEQ ID NO: 334500 - RNA, 32 nt, Homo Sapiens
ggaaacagggguuagggaaaaaugacuucauu

SEQ ID NO: 334501 - RNA, 32 nt, Homo Sapiens
ugauucucaguccaagucugugcccaaagcuu

SEQ ID NO: 334502 - RNA, 32 nt, Homo Sapiens
gccccaagagccaaaaauaaaugggaauugaa

SEQ ID NO: 334503 - RNA, 32 nt, Homo Sapiens
acuaugaacggcauggaaaccaauugaggacu

SEQ ID NO: 334504 - RNA, 32 nt, Homo Sapiens
ggguuggugucauggcagcugcggggagccgc

SEQ ID NO: 334505 - RNA, 30 nt, Homo Sapiens
uccccggccuucggcggagguggaguaagc

SEQ ID NO: 334506 - RNA, 32 nt, Homo Sapiens
gaaaagcugcgcauuuacccggcgcauucuaa

SEQ ID NO: 334507 - RNA, 32 nt, Homo Sapiens
ggcaggccuagugccaaucaauaaaaguaaca

SEQ ID NO: 334508 - RNA, 32 nt, Homo Sapiens
agagcuuuauauuugcacuaggauuuuuuuuu

SEQ ID NO: 334509 - RNA, 32 nt, Homo Sapiens
gggcgggcaggccggcgggcggugauguggca

SEQ ID NO: 334510 - RNA, 32 nt, Homo Sapiens
gacguauauccaaauuuguccuguaguaauag

SEQ ID NO: 334511 - RNA, 32 nt, Homo Sapiens
gaagguuuuuaucuguguagaauggguguuug

SEQ ID NO: 334512 - RNA, 32 nt, Homo Sapiens
cuggaaggaaugguuccaaacaacaccaccga

SEQ ID NO: 334513 - RNA, 32 nt, Homo Sapiens
aacugcauaugcugcccuuuaggcucacaaaa

SEQ ID NO: 334514 - RNA, 32 nt, Homo Sapiens
uaaguaaucauuuaauauuauuauauugguaa

SEQ ID NO: 334515 - RNA, 32 nt, Homo Sapiens
cucccagccauggcuucgcgcugcuggcgcug

SEQ ID NO: 334516 - RNA, 32 nt, Homo Sapiens
ucuggguacaagcaggaacagagcucggcaga

SEQ ID NO: 334517 - RNA, 32 nt, Homo Sapiens
uaugacuguucuacuuuucaguuuucuuuuuu

SEQ ID NO: 334518 - RNA, 32 nt, Homo Sapiens
caaaccgcagagcggcaggcgcggccgcuggu

SEQ ID NO: 334519 - RNA, 32 nt, Homo Sapiens
gguugguguuaguuauagcagugauuucauua

SEQ ID NO: 334520 - RNA, 32 nt, Homo Sapiens
guuccucggaagccguuugcugcugcagaguu

SEQ ID NO: 334521 - RNA, 32 nt, Homo Sapiens
guacaaaacuguagcucagcucugcccagcag

SEQ ID NO: 334522 - RNA, 32 nt, Homo Sapiens
ucugcugcauaagacagccaaaagcaccucug

SEQ ID NO: 334523 - RNA, 32 nt, Homo Sapiens
gaggaagccgcggaacccccagcguccgucca

SEQ ID NO: 334524 - RNA, 32 nt, Homo Sapiens
ccgagcgcuccggccuggcccggugccccgga

SEQ ID NO: 334525 - RNA, 32 nt, Homo Sapiens
cauucauggcugcuugcggugucacugggcua

SEQ ID NO: 334526 - RNA, 32 nt, Homo Sapiens
cacgcucgcccggcucguccgacgcgcccucc

SEQ ID NO: 334527 - RNA, 32 nt, Homo Sapiens
uccacagaugcauaaguaggaauuuauuacuu

SEQ ID NO: 334528 - RNA, 30 nt, Homo Sapiens
cagcggcggcagcagcaccaggcucugcag

SEQ ID NO: 334529 - RNA, 32 nt, Homo Sapiens
cccaccagauuauuuuucaaagucuuagguuu

SEQ ID NO: 334530 - RNA, 32 nt, Homo Sapiens
ugagcaauaaaguggaaacaauaaaaccuggg

SEQ ID NO: 334531 - RNA, 32 nt, Homo Sapiens
aggagcugggauugcaggcgcccgccaccaca

SEQ ID NO: 334532 - RNA, 32 nt, Homo Sapiens
guccucaucgcucccccuccccaccccgcgca

SEQ ID NO: 334533 - RNA, 32 nt, Homo Sapiens
ccccggacaccuggucuacagccauugaucug

SEQ ID NO: 334534 - RNA, 32 nt, Homo Sapiens
uuuuuguuuucucuggaguacuuggacagaug

SEQ ID NO: 334535 - RNA, 32 nt, Homo Sapiens
augagaugaaacaaaaaggccaaaagguagcc

SEQ ID NO: 334536 - RNA, 32 nt, Homo Sapiens
ggugccgcgccuguagcacucccggaacugga

SEQ ID NO: 334537 - RNA, 32 nt, Homo Sapiens
uggagaaggggagagcaucuaggcaggcaaac

SEQ ID NO: 334538 - RNA, 32 nt, Homo Sapiens
cugccuggagggcauggggcuguuguagaacc

SEQ ID NO: 334539 - RNA, 32 nt, Homo Sapiens
acuuguggcaauauggcaccgauggcuggcgu

SEQ ID NO: 334540 - RNA, 32 nt, Homo Sapiens
gcccggccaccgguuggccccgggccagggca

SEQ ID NO: 334541 - RNA, 32 nt, Homo Sapiens
gcgccggcggcgggaccgcggaccguuuuagu

SEQ ID NO: 334542 - RNA, 32 nt, Homo Sapiens
cguugaugggcugcuggccggaggugagaagg

SEQ ID NO: 334543 - RNA, 32 nt, Homo Sapiens
acaaauguacaaauauaaagaaaguaaaaaag

SEQ ID NO: 334544 - RNA, 32 nt, Homo Sapiens
ugaugcaugugagcgucucuggcacacacacu

SEQ ID NO: 334545 - RNA, 32 nt, Homo Sapiens
ggaugggccgccagccaccuccuccaacucaa

SEQ ID NO: 334546 - RNA, 32 nt, Homo Sapiens
gccaccaccacacaugccuuucuggggugaag

SEQ ID NO: 334547 - RNA, 32 nt, Homo Sapiens
uuaaaaaucaaaugauccuuuaucuuuucaga

SEQ ID NO: 334548 - RNA, 32 nt, Homo Sapiens
aaaagaauauuaccaauaauuaaaggugccag

SEQ ID NO: 334549 - RNA, 32 nt, Homo Sapiens
auguuuuuaaggaugguugugaaucccccugg

SEQ ID NO: 334550 - RNA, 32 nt, Homo Sapiens
gccccccucccucuccagguccccccacagca

SEQ ID NO: 334551 - RNA, 32 nt, Homo Sapiens
cagauucugucguuuuuuuuuauuugugugag

SEQ ID NO: 334552 - RNA, 32 nt, Homo Sapiens
cacugaacaaagugcaauuaacuguagaacag

SEQ ID NO: 334553 - RNA, 32 nt, Homo Sapiens
uaacauugacauuuaaguggaaaaccaaguua

SEQ ID NO: 334554 - RNA, 32 nt, Homo Sapiens
gggaggcauccugaccacggacauccauaaca

SEQ ID NO: 334555 - RNA, 32 nt, Homo Sapiens
ucucuccaaauauuauguccugagccagucag

SEQ ID NO: 334556 - RNA, 32 nt, Homo Sapiens
cccucccgggagaggagaucagggcgaccugc

SEQ ID NO: 334557 - RNA, 32 nt, Homo Sapiens
aaaggagacauaucacugcugcugggacuuga

SEQ ID NO: 334558 - RNA, 32 nt, Homo Sapiens
uugguuuuguguuuuuaucacuugcuuccaac

SEQ ID NO: 334559 - RNA, 32 nt, Homo Sapiens
caucuccugaagaacacagacucauuccucga

SEQ ID NO: 334560 - RNA, 32 nt, Homo Sapiens
uucuuuucuuggauuaccaauuuaugaauguu

SEQ ID NO: 334561 - RNA, 32 nt, Homo Sapiens
ccuuccaggccugguccaugagacacuccagg

SEQ ID NO: 334562 - RNA, 32 nt, Homo Sapiens
ucggagggaggugccggucgggcgcgccccgu

SEQ ID NO: 334563 - RNA, 27 nt, Homo Sapiens
ggaugcccagcuccgcgccgcgcggac

SEQ ID NO: 334564 - RNA, 32 nt, Homo Sapiens
ucccucagcgcgccgcgccacccggaacagac

SEQ ID NO: 334565 - RNA, 32 nt, Homo Sapiens
uaaaagcuaaaauaaacagcaugcuauauugu

SEQ ID NO: 334566 - RNA, 32 nt, Homo Sapiens
aauuuugucugacuggaaauaaaugcauuuug

SEQ ID NO: 334567 - RNA, 32 nt, Homo Sapiens
cuuuauuccuucccucccuaaggaggcaaaga

SEQ ID NO: 334568 - RNA, 32 nt, Homo Sapiens
gcuggaucauugaucuguuugaggaagugucu

SEQ ID NO: 334569 - RNA, 32 nt, Homo Sapiens
cuuaauuucuuacuguauucgaugcugauaaa

SEQ ID NO: 334570 - RNA, 32 nt, Homo Sapiens
gcauguaaucaguuuuauccacagaaacauuu

SEQ ID NO: 334571 - RNA, 32 nt, Homo Sapiens
agucaggagcaaggaacguccagggaguggga

SEQ ID NO: 334572 - RNA, 32 nt, Homo Sapiens
cagcggccaccaggcucugugcugggggacga

SEQ ID NO: 334573 - RNA, 32 nt, Homo Sapiens
ucaguauugggagccgguggcggugugaagca

SEQ ID NO: 334574 - RNA, 32 nt, Homo Sapiens
cuuuuaaauuucauuuaacauaaagcugaaaa

SEQ ID NO: 334575 - RNA, 32 nt, Homo Sapiens
cacuccccagcauggaggaagguggugauuuu

SEQ ID NO: 334576 - RNA, 32 nt, Homo Sapiens
uuuuuccuauacauuuuauauguagaaaugua

SEQ ID NO: 334577 - RNA, 32 nt, Homo Sapiens
ccugcggggaccugguguggguggagugggga

SEQ ID NO: 334578 - RNA, 32 nt, Homo Sapiens
uuugagaaaaacuaaaucaugcuccugaaccu

SEQ ID NO: 334579 - RNA, 32 nt, Homo Sapiens
cccggcugaggcgccaguacccggcccggucc

SEQ ID NO: 334580 - RNA, 32 nt, Homo Sapiens
ccggauccccgcucucuccccggaguggcgcg

SEQ ID NO: 334581 - RNA, 27 nt, Homo Sapiens
uggaugauggucuucagccucuuucug

SEQ ID NO: 334582 - RNA, 32 nt, Homo Sapiens
gccugugccgcugaggaccuucaucagggcuc

SEQ ID NO: 334583 - RNA, 32 nt, Homo Sapiens
aagcccauuuucaacugcuuugaaacuugccu

SEQ ID NO: 334584 - RNA, 32 nt, Homo Sapiens
cgggacccccagucccaccucggccgcgcugu

SEQ ID NO: 334585 - RNA, 32 nt, Homo Sapiens
gccacuuucuuguaguacugguaaaagauaua

SEQ ID NO: 334586 - RNA, 32 nt, Homo Sapiens
caggcagaaucguguucgugucuguuuugcuc

SEQ ID NO: 334587 - RNA, 32 nt, Homo Sapiens
aguagauucaucucaaccaacagcaauaaaag

SEQ ID NO: 334588 - RNA, 32 nt, Homo Sapiens
uauauguuacacauuucuuuugauuuauuauu

SEQ ID NO: 334589 - RNA, 32 nt, Homo Sapiens
aguaagauacuguuuuucgucauuccagagcu

SEQ ID NO: 334590 - RNA, 32 nt, Homo Sapiens
agagggggaaaggggcccccggccaccugucc

SEQ ID NO: 334591 - RNA, 30 nt, Homo Sapiens
guugcaccacuuguacucaauucuaauugc

SEQ ID NO: 334592 - RNA, 32 nt, Homo Sapiens
cuuucacgcugucgcugcccguaggugguugu

SEQ ID NO: 334593 - RNA, 32 nt, Homo Sapiens
ggaagagaaaugaggauuugcuaugcagacag

SEQ ID NO: 334594 - RNA, 29 nt, Homo Sapiens
guggagguagaaauguaccaugggggacg

SEQ ID NO: 334595 - RNA, 32 nt, Homo Sapiens
cagcgucagacagcaaggaacugucaccagcc

SEQ ID NO: 334596 - RNA, 32 nt, Homo Sapiens
uucccaggggcccgggaguccaaauacuggaa

SEQ ID NO: 334597 - RNA, 31 nt, Homo Sapiens
acuaagaacauauauuauucagaucaguuuc

SEQ ID NO: 334598 - RNA, 32 nt, Homo Sapiens
cuggggcccuccccugccgcauucccucacug

SEQ ID NO: 334599 - RNA, 32 nt, Homo Sapiens
ugcagagaaaaguuuuugacuggaaauacacu

SEQ ID NO: 334600 - RNA, 32 nt, Homo Sapiens
uucaaguguuuaaagaaagauggcuagacuaa

SEQ ID NO: 334601 - RNA, 29 nt, Homo Sapiens
auuuugugugauuuccugcccuuugcguu

SEQ ID NO: 334602 - RNA, 32 nt, Homo Sapiens
acucuugccugccuaacaaaauauugaaaggc

SEQ ID NO: 334603 - RNA, 32 nt, Homo Sapiens
cuagacuauaucuauguaaaguuauuagaaug

SEQ ID NO: 334604 - RNA, 32 nt, Homo Sapiens
uccuuaugaugauugugugcaaguuaguuaac

SEQ ID NO: 334605 - RNA, 29 nt, Homo Sapiens
caacaugcuggacaccaaauggaagggca

SEQ ID NO: 334606 - RNA, 32 nt, Homo Sapiens
guacggaauauauuuuuaaaaauuuuuguuug

SEQ ID NO: 334607 - RNA, 32 nt, Homo Sapiens
auuuauugaagaccuacuuuguccucuacaua

SEQ ID NO: 334608 - RNA, 32 nt, Homo Sapiens
cucucggcgccgaacggacccgggccggugca

SEQ ID NO: 334609 - RNA, 32 nt, Homo Sapiens
ccauuuuucucuaaauacaaagcgaucugugu

SEQ ID NO: 334610 - RNA, 32 nt, Homo Sapiens
gcacuuuaaaucacacuguccuauuaaugcga

SEQ ID NO: 334611 - RNA, 32 nt, Homo Sapiens
ggguuggacuaaaauauaauaaaucuguaccu

SEQ ID NO: 334612 - RNA, 32 nt, Homo Sapiens
ucccaagucauuucuuuuuucaucucuauuua

SEQ ID NO: 334613 - RNA, 32 nt, Homo Sapiens
ccgaggagaccgugaggcucuggccugcagcu

SEQ ID NO: 334614 - RNA, 32 nt, Homo Sapiens
gaaccggcgggggaagggugcgggggcgcaug

SEQ ID NO: 334615 - RNA, 32 nt, Homo Sapiens
gcucugaucuccaucagcaucagggcccauag

SEQ ID NO: 334616 - RNA, 32 nt, Homo Sapiens
uuuaaggugugcaaguuguagugauguuuuuc

SEQ ID NO: 334617 - RNA, 32 nt, Homo Sapiens
gguuccaaguaauaacucuacaguacaaagag

SEQ ID NO: 334618 - RNA, 32 nt, Homo Sapiens
guccaaacaacuguagcagcacaucuguguau

SEQ ID NO: 334619 - RNA, 32 nt, Homo Sapiens
cuccgagcacguggccgagaucgugggcaggc

SEQ ID NO: 334620 - RNA, 32 nt, Homo Sapiens
gcggugccgggcggggguugucgggugucaug

SEQ ID NO: 334621 - RNA, 32 nt, Homo Sapiens
gucauuaccuggggagggguuccugaaaccuu

SEQ ID NO: 334622 - RNA, 32 nt, Homo Sapiens
aagaaucugaauuuaaagauugugugcauuua

SEQ ID NO: 334623 - RNA, 32 nt, Homo Sapiens
gauuguuuuuagagacacggcagcugcaaaga

SEQ ID NO: 334624 - RNA, 32 nt, Homo Sapiens
aauugauauuuaauggaaaucaugcccaugaa

SEQ ID NO: 334625 - RNA, 32 nt, Homo Sapiens
agaaugcuggaacaucucagggcacaaagaug

SEQ ID NO: 334626 - RNA, 32 nt, Homo Sapiens
acaaggaaaugcuggaggacaagccugaagac

SEQ ID NO: 334627 - RNA, 32 nt, Homo Sapiens
aagguucugugcuacaaauugauguuuagaua

SEQ ID NO: 334628 - RNA, 32 nt, Homo Sapiens
cuguucuggugggggccaccucccucagaggc

SEQ ID NO: 334629 - RNA, 32 nt, Homo Sapiens
aaccauauauaugucacccuuuccuguuuuug

SEQ ID NO: 334630 - RNA, 32 nt, Homo Sapiens
gccuccaugguggcccaaaagagacaaguaac

SEQ ID NO: 334631 - RNA, 32 nt, Homo Sapiens
auacugaagggagagccacauguugaugccca

SEQ ID NO: 334632 - RNA, 32 nt, Homo Sapiens
guguaaacauucaauguauauuguauagucag

SEQ ID NO: 334633 - RNA, 32 nt, Homo Sapiens
uugucacuuuauuuuucugucuguaaauaugc

SEQ ID NO: 334634 - RNA, 32 nt, Homo Sapiens
ggggugucugcaccaccugggaagauagcaca

SEQ ID NO: 334635 - RNA, 32 nt, Homo Sapiens
ccggaccguuauccgcgccgggcgcccgccag

SEQ ID NO: 334636 - RNA, 32 nt, Homo Sapiens
auucagugacaacaggaccaaccugcgcugcc

SEQ ID NO: 334637 - RNA, 32 nt, Homo Sapiens
cuccgccgcgcgcuccuccucgucccagcgcu

SEQ ID NO: 334638 - RNA, 32 nt, Homo Sapiens
guucugugccaggagcucccagagcagcuuca

SEQ ID NO: 334639 - RNA, 32 nt, Homo Sapiens
cuuaaagcagagagggagggcaggcgggaggg

SEQ ID NO: 334640 - RNA, 32 nt, Homo Sapiens
ugcaggcaggcggcuccuccucacccaccucu

SEQ ID NO: 334641 - RNA, 32 nt, Homo Sapiens
uggucuugaucuauuucuucuguuuugagagc

SEQ ID NO: 334642 - RNA, 32 nt, Homo Sapiens
guuagacaacugcauuucauucaccaauagug

SEQ ID NO: 334643 - RNA, 32 nt, Homo Sapiens
uucuccuaguucucagaguuugccaugucagg

SEQ ID NO: 334644 - RNA, 32 nt, Homo Sapiens
gugcgaaggaaaaucauuucagaugcaguguu

SEQ ID NO: 334645 - RNA, 32 nt, Homo Sapiens
agugauugucaguguaaggccuuuuaaaacaa

SEQ ID NO: 334646 - RNA, 32 nt, Homo Sapiens
aagcuugagagaaaccaaaauuaaagagagaa

SEQ ID NO: 334647 - RNA, 32 nt, Homo Sapiens
agcuggcaacaauuugggcaaggaaaaugugu

SEQ ID NO: 334648 - RNA, 32 nt, Homo Sapiens
aaauaccgugugcucuuccccagcugcaaaga

SEQ ID NO: 334649 - RNA, 32 nt, Homo Sapiens
uacauaauauauauuuacaaaauaauauaauu

SEQ ID NO: 334650 - RNA, 32 nt, Homo Sapiens
uacguucugguugucauguuucccuguauuug

SEQ ID NO: 334651 - RNA, 32 nt, Homo Sapiens
cacaagaaauuugauucuguaaagaauccucu

SEQ ID NO: 334652 - RNA, 32 nt, Homo Sapiens
cuuuuacuguguaauugccaaauacacuuuuc

SEQ ID NO: 334653 - RNA, 28 nt, Homo Sapiens
agcaugcuucgccgaggcuauaaggccu

SEQ ID NO: 334654 - RNA, 29 nt, Homo Sapiens
gucagaggugaucuuuauuuucuaaauau

SEQ ID NO: 334655 - RNA, 32 nt, Homo Sapiens
guugcacaggagugggauggggugugguagca

SEQ ID NO: 334656 - RNA, 32 nt, Homo Sapiens
gaaauauguuuuguauaaauuugucauguuga

SEQ ID NO: 334657 - RNA, 25 nt, Homo Sapiens
auggagcagcggccgcggggcugcg

SEQ ID NO: 334658 - RNA, 32 nt, Homo Sapiens
acgccccgcccggccuuaccucggcuccgccu

SEQ ID NO: 334659 - RNA, 32 nt, Homo Sapiens
guaacacccacuuuucuuucuuuuuucuuggg

SEQ ID NO: 334660 - RNA, 32 nt, Homo Sapiens
ucuaucaaaauggggagauugcagaaaaggcu

SEQ ID NO: 334661 - RNA, 32 nt, Homo Sapiens
agagauuggccgggcgugguggcaugcgccug

SEQ ID NO: 334662 - RNA, 32 nt, Homo Sapiens
agcucugccucccagguucacgccauucuccu

SEQ ID NO: 334663 - RNA, 32 nt, Homo Sapiens
gggagccuuugguguuugggguuuccugaagu

SEQ ID NO: 334664 - RNA, 32 nt, Homo Sapiens
cauuaaaucucuguuuucucaucuggagauug

SEQ ID NO: 334665 - RNA, 32 nt, Homo Sapiens
ccuuauggauaccaaucugugcuccccauaaa

SEQ ID NO: 334666 - RNA, 32 nt, Homo Sapiens
aguuagagauaaaagagaaaaccauucacugu

SEQ ID NO: 334667 - RNA, 32 nt, Homo Sapiens
cccgggacuccagccgcgcccgugagaagagg

SEQ ID NO: 334668 - RNA, 32 nt, Homo Sapiens
uuguuuuuuaucacuuacuuaauguuauaucu

SEQ ID NO: 334669 - RNA, 32 nt, Homo Sapiens
ucgucucguaguccgacgccuggggcgaugga

SEQ ID NO: 334670 - RNA, 32 nt, Homo Sapiens
accucagcccacugaguaggagucacagcacg

SEQ ID NO: 334671 - RNA, 32 nt, Homo Sapiens
uaauuccagaaauaagugaaaacauguuacuu

SEQ ID NO: 334672 - RNA, 32 nt, Homo Sapiens
cuccauccaggccccaggcaagcagcaccucc

SEQ ID NO: 334673 - RNA, 32 nt, Homo Sapiens
agaccagccugggcagcauagcaagaccccau

SEQ ID NO: 334674 - RNA, 31 nt, Homo Sapiens
gucacuggggcgguggggacgauacuucuca

SEQ ID NO: 334675 - RNA, 32 nt, Homo Sapiens
uuaaaacugugauuuccauauacaaguauguu

SEQ ID NO: 334676 - RNA, 30 nt, Homo Sapiens
cgguggagucucggcggccggggacaaggg

SEQ ID NO: 334677 - RNA, 32 nt, Homo Sapiens
uguaaucuagcauuuuaauacaguguuuauuu

SEQ ID NO: 334678 - RNA, 32 nt, Homo Sapiens
cccgugcccaaucuccucucccucuguuguuu

SEQ ID NO: 334679 - RNA, 32 nt, Homo Sapiens
uaacaaauaugaauuuaaauuugugauagcgc

SEQ ID NO: 334680 - RNA, 32 nt, Homo Sapiens
caggaaacugguuuauuccuauacucuuguuu

SEQ ID NO: 334681 - RNA, 32 nt, Homo Sapiens
uuugucuucaacaaagugauacuuacuuuuuu

SEQ ID NO: 334682 - RNA, 32 nt, Homo Sapiens
ccccucccugucaucacccucuccugguguag

SEQ ID NO: 334683 - RNA, 32 nt, Homo Sapiens
ugguauugauuuaaauauauuuuauuuaaccc

SEQ ID NO: 334684 - RNA, 32 nt, Homo Sapiens
cguaaauuucauuugcagugguuagucaucag

SEQ ID NO: 334685 - RNA, 32 nt, Homo Sapiens
agugaauauuuucccuucucccuuuacccuuc

SEQ ID NO: 334686 - RNA, 32 nt, Homo Sapiens
gcugcggauccuucagcgucugcaucucggcg

SEQ ID NO: 334687 - RNA, 32 nt, Homo Sapiens
gcuauaaggggcuccaggugggugcugcuguu

SEQ ID NO: 334688 - RNA, 30 nt, Homo Sapiens
ccucgcgugcccgugcgaggccgggggcuu

SEQ ID NO: 334689 - RNA, 32 nt, Homo Sapiens
aacucaacgauuugccaaaaccaccugucgcu

SEQ ID NO: 334690 - RNA, 29 nt, Homo Sapiens
ugguagaaagauuuauauuucucugagua

SEQ ID NO: 334691 - RNA, 32 nt, Homo Sapiens
ugaacaauucauaacauguaaauaauguggga

SEQ ID NO: 334692 - RNA, 32 nt, Homo Sapiens
cuggcaggaccucagcgcccagcccuuccguc

SEQ ID NO: 334693 - RNA, 32 nt, Homo Sapiens
aaccuauuuauuauuuauguauuuauuuaagc

SEQ ID NO: 334694 - RNA, 30 nt, Homo Sapiens
agcucggcgcccgcccuuccgcucgccuuu

SEQ ID NO: 334695 - RNA, 32 nt, Homo Sapiens
ucccugggccuggccccacugcccugugagga

SEQ ID NO: 334696 - RNA, 32 nt, Homo Sapiens
ccugccccugacgcccauuuccccccuuagag

SEQ ID NO: 334697 - RNA, 32 nt, Homo Sapiens
ucuaugggcuuuaccccucccccggaaccucc

SEQ ID NO: 334698 - RNA, 32 nt, Homo Sapiens
uuuuguuuacacaauacuugaaaaauaaaaau

SEQ ID NO: 334699 - RNA, 32 nt, Homo Sapiens
uuuaaaauguaaaauaaagauguaugcugccu

SEQ ID NO: 334700 - RNA, 32 nt, Homo Sapiens
uaaauacauguauucauacauacucuguggua

SEQ ID NO: 334701 - RNA, 32 nt, Homo Sapiens
ucaaccagauccugcaggcaaauuauccugga

SEQ ID NO: 334702 - RNA, 32 nt, Homo Sapiens
acaacaacaacaauaauaaagaugugaaaacu

SEQ ID NO: 334703 - RNA, 32 nt, Homo Sapiens
gcggacguuccagccggcauggcugggaacug

SEQ ID NO: 334704 - RNA, 32 nt, Homo Sapiens
ucuucgcccucccacucccacccccagccaag

SEQ ID NO: 334705 - RNA, 32 nt, Homo Sapiens
ggaagggcauggaaguuuuuuuaaauaauuaa

SEQ ID NO: 334706 - RNA, 32 nt, Homo Sapiens
ggggacaaagccgggggcgugaggggcgguuc

SEQ ID NO: 334707 - RNA, 32 nt, Homo Sapiens
aguuagccgcgugacggacauccaggcguggg

SEQ ID NO: 334708 - RNA, 32 nt, Homo Sapiens
uaguuuuguaaaaacugaagaauuuugaguga

SEQ ID NO: 334709 - RNA, 32 nt, Homo Sapiens
acugaagacccagaguauacuuuuucuuucca

SEQ ID NO: 334710 - RNA, 32 nt, Homo Sapiens
gugaugaugcuguugauaaggaugaugucgau

SEQ ID NO: 334711 - RNA, 32 nt, Homo Sapiens
ugcagacucacagauaauaaagcucagagcag

SEQ ID NO: 334712 - RNA, 32 nt, Homo Sapiens
cacgauuccggguguuucuccaggcgcugagu

SEQ ID NO: 334713 - RNA, 32 nt, Homo Sapiens
ccgccugggagcucagcuuuccucagaaccac

SEQ ID NO: 334714 - RNA, 32 nt, Homo Sapiens
aagcagacggccugguuccagcccugcuuuag

SEQ ID NO: 334715 - RNA, 32 nt, Homo Sapiens
agguauguguguauauaguaugaaugcagugg

SEQ ID NO: 334716 - RNA, 32 nt, Homo Sapiens
aaggcccaggacuuucagauuaacugagagga

SEQ ID NO: 334717 - RNA, 32 nt, Homo Sapiens
cuauccuugugggccgcgugggcccccagggc

SEQ ID NO: 334718 - RNA, 32 nt, Homo Sapiens
cagccuccggugcgccagcgcucgccuuccuc

SEQ ID NO: 334719 - RNA, 32 nt, Homo Sapiens
gaaugucaggguguucucuggugucuguugug

SEQ ID NO: 334720 - RNA, 32 nt, Homo Sapiens
ggcaggugguuuugugcagugugugccuggga

SEQ ID NO: 334721 - RNA, 32 nt, Homo Sapiens
uggggccuggagagacccucccacccagcaga

SEQ ID NO: 334722 - RNA, 32 nt, Homo Sapiens
auagcgaagauaauucuguagaaacagaccgu

SEQ ID NO: 334723 - RNA, 32 nt, Homo Sapiens
gcucuugaccuuguagagaacacgcguauuua

SEQ ID NO: 334724 - RNA, 32 nt, Homo Sapiens
guccugggcacgccugcggggucgcucaagga

SEQ ID NO: 334725 - RNA, 32 nt, Homo Sapiens
guugcggcgcggcucuggcccgggcgcacgcg

SEQ ID NO: 334726 - RNA, 32 nt, Homo Sapiens
ugcuucuguacuuacauuuuuaucucaaccuu

SEQ ID NO: 334727 - RNA, 32 nt, Homo Sapiens
guuugugcaauaaguggaagggaugucauccu

SEQ ID NO: 334728 - RNA, 32 nt, Homo Sapiens
agguacccacuuuaccccgugcccaccuucua

SEQ ID NO: 334729 - RNA, 32 nt, Homo Sapiens
ccugccuugggccuugcugcugcugcacccaa

SEQ ID NO: 334730 - RNA, 32 nt, Homo Sapiens
acggacccuuuggcucucccccuuccccuucc

SEQ ID NO: 334731 - RNA, 32 nt, Homo Sapiens
cagcccgccagcucgcgcucgccccgccggcg

SEQ ID NO: 334732 - RNA, 32 nt, Homo Sapiens
agccacgcggucuuccgggcccgggucggggc

SEQ ID NO: 334733 - RNA, 32 nt, Homo Sapiens
ccuguuccugggugaggaugggcuucugccug

SEQ ID NO: 334734 - RNA, 32 nt, Homo Sapiens
gucccuucccaccacaccccacuucccucucc

SEQ ID NO: 334735 - RNA, 32 nt, Homo Sapiens
auacuucaaaugaauaguauuaacuuacaaaa

SEQ ID NO: 334736 - RNA, 32 nt, Homo Sapiens
uuggccaucaguugagauaagauggaagacuc

SEQ ID NO: 334737 - RNA, 32 nt, Homo Sapiens
ucuacaagaauuuuaaauauuuucuguauaua

SEQ ID NO: 334738 - RNA, 31 nt, Homo Sapiens
accgcggaauaucggcuuagagccugccaug

SEQ ID NO: 334739 - RNA, 32 nt, Homo Sapiens
ucucuggaucaguaggcugugcaggcugcgag

SEQ ID NO: 334740 - RNA, 32 nt, Homo Sapiens
uuugccacauauacauuuuuaaggaaaaaaga

SEQ ID NO: 334741 - RNA, 32 nt, Homo Sapiens
cccgccuagugccccacccccacccacagugc

SEQ ID NO: 334742 - RNA, 32 nt, Homo Sapiens
cagcgauguccucagauguccuggacagccac

SEQ ID NO: 334743 - RNA, 32 nt, Homo Sapiens
ucaggaucuaguaaggaaaugggcuugagcag

SEQ ID NO: 334744 - RNA, 32 nt, Homo Sapiens
acugggccccaccagcaggucaagucagcuuc

SEQ ID NO: 334745 - RNA, 32 nt, Homo Sapiens
ccagcucggagcaaaggcggacauggacaucc

SEQ ID NO: 334746 - RNA, 32 nt, Homo Sapiens
gagcacaggcaacauuacaaacaaaggauuug

SEQ ID NO: 334747 - RNA, 32 nt, Homo Sapiens
uuugcguggaggguggggggagcucaguggca

SEQ ID NO: 334748 - RNA, 32 nt, Homo Sapiens
auguuuguccucacaggcaugccacguggccu

SEQ ID NO: 334749 - RNA, 32 nt, Homo Sapiens
uuuuaguugcaaacaggaguggaauugaaaug

SEQ ID NO: 334750 - RNA, 32 nt, Homo Sapiens
gaccaguuggggugcuugggugaucucugcuu

SEQ ID NO: 334751 - RNA, 32 nt, Homo Sapiens
auuuauauuuaguuaagggucauggggucgug

SEQ ID NO: 334752 - RNA, 32 nt, Homo Sapiens
cccgcugggugcaggugauggugcugagccgu

SEQ ID NO: 334753 - RNA, 32 nt, Homo Sapiens
cccucccuucccuccccccucagggguugggg

SEQ ID NO: 334754 - RNA, 32 nt, Homo Sapiens
cagucgcuccgagcggccgcgagcagagccgc

SEQ ID NO: 334755 - RNA, 32 nt, Homo Sapiens
agaaguucccucucugacccaggcugagucca

SEQ ID NO: 334756 - RNA, 32 nt, Homo Sapiens
gcagugcuuccacuguguuuucugcauguaau

SEQ ID NO: 334757 - RNA, 32 nt, Homo Sapiens
caaggacauuuuugggaagcaaugcugggcag

SEQ ID NO: 334758 - RNA, 32 nt, Homo Sapiens
gccagaaguacaaaacaaaaaaaaccaaugga

SEQ ID NO: 334759 - RNA, 32 nt, Homo Sapiens
ugcuuuacuguaaagaagaggccccuggcacc

SEQ ID NO: 334760 - RNA, 32 nt, Homo Sapiens
uuagaaucugguuuuucugugcuuugucauuu

SEQ ID NO: 334761 - RNA, 32 nt, Homo Sapiens
cacugagcaagaucuugucuccacuaaaugag

SEQ ID NO: 334762 - RNA, 32 nt, Homo Sapiens
uucagaaccacgauaaagauucugucgaugcc

SEQ ID NO: 334763 - RNA, 29 nt, Homo Sapiens
ggaauuuuguguuucaguguuugaaccua

SEQ ID NO: 334764 - RNA, 32 nt, Homo Sapiens
ggaugguauggaauuuuguuuguuaaggcuag

SEQ ID NO: 334765 - RNA, 32 nt, Homo Sapiens
ggggaagaggggcuggcucugguagauugcaa

SEQ ID NO: 334766 - RNA, 32 nt, Homo Sapiens
ucucugcucgguuucccgccccaccuuucccc

SEQ ID NO: 334767 - RNA, 32 nt, Homo Sapiens
uuaccuuuucaguguucaguacaaguuuaagu

SEQ ID NO: 334768 - RNA, 32 nt, Homo Sapiens
gggugugugggaagcaagggagggaggacaug

SEQ ID NO: 334769 - RNA, 32 nt, Homo Sapiens
aacccaggaaaugucccuaggguucauuugag

SEQ ID NO: 334770 - RNA, 32 nt, Homo Sapiens
uuuuuuuguuuuuuuucuuuuuuuccaguacu

SEQ ID NO: 334771 - RNA, 32 nt, Homo Sapiens
augcggcccacuuuccugagcugucgcugccu

SEQ ID NO: 334772 - RNA, 32 nt, Homo Sapiens
aguaauuucggaugcccagccgcggccgccuu

SEQ ID NO: 334773 - RNA, 32 nt, Homo Sapiens
uagcaugcuuugcuuuguguauacugaauuuu

SEQ ID NO: 334774 - RNA, 32 nt, Homo Sapiens
cacacgcagcuuuguucucaccucuaccuguc

SEQ ID NO: 334775 - RNA, 32 nt, Homo Sapiens
ucucagcaagcccagaaguaucugcaauaucu

SEQ ID NO: 334776 - RNA, 32 nt, Homo Sapiens
agguuguguggacuuuacaugggacccugcua

SEQ ID NO: 334777 - RNA, 32 nt, Homo Sapiens
cuuuuugaacugaaagugacucucgaagccuu

SEQ ID NO: 334778 - RNA, 32 nt, Homo Sapiens
gggcccugggacccagugugccccacagcccu

SEQ ID NO: 334779 - RNA, 32 nt, Homo Sapiens
aaauuaauacuagcauauuaaguguacaaaua

SEQ ID NO: 334780 - RNA, 32 nt, Homo Sapiens
gaguuuaaacauuaggcuucaugcuggaauua

SEQ ID NO: 334781 - RNA, 32 nt, Homo Sapiens
gaugagguauuuuaugaguauuuucagacaau

SEQ ID NO: 334782 - RNA, 32 nt, Homo Sapiens
ggcagagacauaaggaggaaaagucagcaaga

SEQ ID NO: 334783 - RNA, 32 nt, Homo Sapiens
uguccccaucucggccggcccggagcucgccc

SEQ ID NO: 334784 - RNA, 32 nt, Homo Sapiens
aacaaacaaacaaacaaacaaacaaauaaaga

SEQ ID NO: 334785 - RNA, 32 nt, Homo Sapiens
uccauuucaguauuacauuuuaccaagaaguc

SEQ ID NO: 334786 - RNA, 32 nt, Homo Sapiens
gucuuucaguguucagcugaggagaugaacuu

SEQ ID NO: 334787 - RNA, 32 nt, Homo Sapiens
caccuccuccaaagcacugagguccuggcagg

SEQ ID NO: 334788 - RNA, 32 nt, Homo Sapiens
agcuggaccugccuuccuuaccugggagcaau

SEQ ID NO: 334789 - RNA, 32 nt, Homo Sapiens
gcagaggggagucucaguguccugcuagccag

SEQ ID NO: 334790 - RNA, 32 nt, Homo Sapiens
uaauaauacugaccuaccucacagggguguug

SEQ ID NO: 334791 - RNA, 32 nt, Homo Sapiens
ccugccucuguuucaugaugcaugggucauuu

SEQ ID NO: 334792 - RNA, 32 nt, Homo Sapiens
uaugggagaauuaaucaauuugaaagugcuuu

SEQ ID NO: 334793 - RNA, 32 nt, Homo Sapiens
ugugcuggugaagcuccuggaagugauggaag

SEQ ID NO: 334794 - RNA, 32 nt, Homo Sapiens
gcagaucggcgcccagcaaucacagaagccga

SEQ ID NO: 334795 - RNA, 32 nt, Homo Sapiens
gggcgcucagacggcuucuccuccuccucuug

SEQ ID NO: 334796 - RNA, 32 nt, Homo Sapiens
ggcgagaggggcaaccggcagaggaucuacuc

SEQ ID NO: 334797 - RNA, 32 nt, Homo Sapiens
ugcugaggagccggaccgcgcgcagccugagg

SEQ ID NO: 334798 - RNA, 32 nt, Homo Sapiens
gaguaguaccugagccgcucuggccgagcaag

SEQ ID NO: 334799 - RNA, 32 nt, Homo Sapiens
ucauuguuuccugaauuauucgcauugguaga

SEQ ID NO: 334800 - RNA, 32 nt, Homo Sapiens
auccuauaucuguuuguuuucuguuucuucca

SEQ ID NO: 334801 - RNA, 32 nt, Homo Sapiens
gaggcugggaaagaagcagaaagaggacugug

SEQ ID NO: 334802 - RNA, 32 nt, Homo Sapiens
agaagaguaacaaacugaaaucuuugagauca

SEQ ID NO: 334803 - RNA, 32 nt, Homo Sapiens
gguuguuuagaaacagaaauagacuuaauaaa

SEQ ID NO: 334804 - RNA, 32 nt, Homo Sapiens
aacucagauaaaaauauuuucauacguucuau

SEQ ID NO: 334805 - RNA, 32 nt, Homo Sapiens
uccuggcguagguuuacagacucucaagguac

SEQ ID NO: 334806 - RNA, 32 nt, Homo Sapiens
uggccuccaggguccauuaaggugagaauaag

SEQ ID NO: 334807 - RNA, 32 nt, Homo Sapiens
aagcuuuuaccaggcauucucuagccuuggua

SEQ ID NO: 334808 - RNA, 32 nt, Homo Sapiens
ccuuuaagcuagucuucaguauauauuuuucu

SEQ ID NO: 334809 - RNA, 32 nt, Homo Sapiens
auuuuuacuugcauugaauauauuauaaucuu

SEQ ID NO: 334810 - RNA, 32 nt, Homo Sapiens
uugugugacuugaauuuuuaaucuuucuguaa

SEQ ID NO: 334811 - RNA, 32 nt, Homo Sapiens
uugaggucaggaguuugagaccacccuggcca

SEQ ID NO: 334812 - RNA, 32 nt, Homo Sapiens
cggcgugcccccaggaccgguaaaguuccucu

SEQ ID NO: 334813 - RNA, 32 nt, Homo Sapiens
guuguugugauagguuagaaguucuuacuugu

SEQ ID NO: 334814 - RNA, 32 nt, Homo Sapiens
uggcuuuuucccagcccuuuccagggcauaaa

SEQ ID NO: 334815 - RNA, 32 nt, Homo Sapiens
ugggauagcgcgaguguccgcggccgagcagc

SEQ ID NO: 334816 - RNA, 32 nt, Homo Sapiens
ccucauccucaccgccucccccuuccagaaaa

SEQ ID NO: 334817 - RNA, 32 nt, Homo Sapiens
cgccgcgcuccaaccgccuccuccuccucagu

SEQ ID NO: 334818 - RNA, 32 nt, Homo Sapiens
cagccacugccaccugggcccggagccuccac

SEQ ID NO: 334819 - RNA, 32 nt, Homo Sapiens
cauacgccccagagccgccgggacggaggggc

SEQ ID NO: 334820 - RNA, 32 nt, Homo Sapiens
gcucaugugugggcacacacgcacaaacacac

SEQ ID NO: 334821 - RNA, 32 nt, Homo Sapiens
aggccugucagcugcguugacugacugcagca

SEQ ID NO: 334822 - RNA, 32 nt, Homo Sapiens
accaccaggguagagggaaggucggcuucccg

SEQ ID NO: 334823 - RNA, 32 nt, Homo Sapiens
caggugugccuggccuggguccagccuguggg

SEQ ID NO: 334824 - RNA, 32 nt, Homo Sapiens
accccugaagaggaggcccaucugaaaaagaa

SEQ ID NO: 334825 - RNA, 32 nt, Homo Sapiens
guaucucaaguacccucuugagguaggaaaug

SEQ ID NO: 334826 - RNA, 32 nt, Homo Sapiens
ccuuucugagcuccuguuuccuccucaguaag

SEQ ID NO: 334827 - RNA, 32 nt, Homo Sapiens
acauugccugugaccauucagaauagaaaaag

SEQ ID NO: 334828 - RNA, 32 nt, Homo Sapiens
cuccagggccgcgcagccaccgccgccgccuc

SEQ ID NO: 334829 - RNA, 32 nt, Homo Sapiens
gacuuuggcgaaugcagaaagguugcuaucaa

SEQ ID NO: 334830 - RNA, 32 nt, Homo Sapiens
gccuuuguggaggugcugguagagccacauca

SEQ ID NO: 334831 - RNA, 32 nt, Homo Sapiens
gccaucuguucccucccugucaucuccucucu

SEQ ID NO: 334832 - RNA, 32 nt, Homo Sapiens
ugggcuccuuucagcagcccuccagcuacuuc

SEQ ID NO: 334833 - RNA, 32 nt, Homo Sapiens
ccgccccggcgcccagcgcgggccuuugagga

SEQ ID NO: 334834 - RNA, 32 nt, Homo Sapiens
cuucccgcaacccaucucgaggggcggaggag

SEQ ID NO: 334835 - RNA, 31 nt, Homo Sapiens
ccucaccagcgucaccaaccauggcuaccgc

SEQ ID NO: 334836 - RNA, 32 nt, Homo Sapiens
uugagaccaagaucugucaagaguagaggcaa

SEQ ID NO: 334837 - RNA, 32 nt, Homo Sapiens
gcucaggacgagggacggggcggcaaauuguc

SEQ ID NO: 334838 - RNA, 32 nt, Homo Sapiens
gccccuuggugcccucccugagggcccugcau

SEQ ID NO: 334839 - RNA, 32 nt, Homo Sapiens
acguguuuuuaaaauuuguguuuucuaucugu

SEQ ID NO: 334840 - RNA, 32 nt, Homo Sapiens
agaaggcggggccagcgccgcugccgggugcu

SEQ ID NO: 334841 - RNA, 32 nt, Homo Sapiens
cuacgguucgcgccagcggccggcgcuauggg

SEQ ID NO: 334842 - RNA, 32 nt, Homo Sapiens
agaauagauaaaaauuauuuugugaucauaac

SEQ ID NO: 334843 - RNA, 32 nt, Homo Sapiens
cucuauggcaaggcccugcuacauggcaacug

SEQ ID NO: 334844 - RNA, 32 nt, Homo Sapiens
ggcuggaggaacagugcagacacacaccaggg

SEQ ID NO: 334845 - RNA, 32 nt, Homo Sapiens
cuggguuuuguuucuauuuguaguuucuugag

SEQ ID NO: 334846 - RNA, 32 nt, Homo Sapiens
aaacaaacaaacaaaaaaagggugggggaggg

SEQ ID NO: 334847 - RNA, 32 nt, Homo Sapiens
ucacaguguagacgggaaaaaauguauaaaca

SEQ ID NO: 334848 - RNA, 32 nt, Homo Sapiens
gauaugacugauuaacaauccaauuaacacuc

SEQ ID NO: 334849 - RNA, 32 nt, Homo Sapiens
ggaagacuccucuugggaccuuuggaguaggu

SEQ ID NO: 334850 - RNA, 32 nt, Homo Sapiens
agcagaauaaaauuaagauguuagaacaaagg

SEQ ID NO: 334851 - RNA, 32 nt, Homo Sapiens
cuuuuguuuuuuauuuugaacagacguuuuaa

SEQ ID NO: 334852 - RNA, 32 nt, Homo Sapiens
uucccugaugaaaugucuggauuuggacuaaa

SEQ ID NO: 334853 - RNA, 32 nt, Homo Sapiens
ucagauuauguucauggguuuguguguauacg

SEQ ID NO: 334854 - RNA, 32 nt, Homo Sapiens
uguaauugaauauaaauguuuuacucagagga

SEQ ID NO: 334855 - RNA, 32 nt, Homo Sapiens
caucccugacuucuggauaaacuucuuugcag

SEQ ID NO: 334856 - RNA, 32 nt, Homo Sapiens
cacuaagagagaaugagagacacacugaagaa

SEQ ID NO: 334857 - RNA, 32 nt, Homo Sapiens
accgaggccgcuuuuuuaggccuaguugaaag

SEQ ID NO: 334858 - RNA, 32 nt, Homo Sapiens
gguugauccacuuaaccuuguuauuguaauuu

SEQ ID NO: 334859 - RNA, 32 nt, Homo Sapiens
gguagcauuuuccagcacuuugcaaggaaugu

SEQ ID NO: 334860 - RNA, 32 nt, Homo Sapiens
cgcccagcccggcccgggcccgcgguucucca

SEQ ID NO: 334861 - RNA, 32 nt, Homo Sapiens
agagaagauauauuuaugauauuucugcagac

SEQ ID NO: 334862 - RNA, 32 nt, Homo Sapiens
uugaagggagaccuggccggccugagggcugg

SEQ ID NO: 334863 - RNA, 32 nt, Homo Sapiens
uuccauggugcccagcugaggaccaggugucu

SEQ ID NO: 334864 - RNA, 32 nt, Homo Sapiens
ccaguagcaggaagggccucgggaguugcgag

SEQ ID NO: 334865 - RNA, 32 nt, Homo Sapiens
ggucaaaauuugcaaaauaaaguacuguuuug

SEQ ID NO: 334866 - RNA, 32 nt, Homo Sapiens
aaaacuggguugccagcuccaauguaccagca

SEQ ID NO: 334867 - RNA, 32 nt, Homo Sapiens
gccuggguuuguccuuuuagguagagugccug

SEQ ID NO: 334868 - RNA, 32 nt, Homo Sapiens
cuuaugaugagaggagucaaacaucauaaccu

SEQ ID NO: 334869 - RNA, 32 nt, Homo Sapiens
ucaauuuauuggcaugaggauuaugucaucgg

SEQ ID NO: 334870 - RNA, 31 nt, Homo Sapiens
ccuuacagcuacaugacagugcuguuuuauu

SEQ ID NO: 334871 - RNA, 32 nt, Homo Sapiens
auaauaagaucagaggcagagaacuuugacaa

SEQ ID NO: 334872 - RNA, 32 nt, Homo Sapiens
caaaugucuauuucuacugaguucuggaagaa

SEQ ID NO: 334873 - RNA, 32 nt, Homo Sapiens
gucgucgccucccaggcccuuggccuggccuc

SEQ ID NO: 334874 - RNA, 32 nt, Homo Sapiens
cccugcccugaacaugccccagggcacugagg

SEQ ID NO: 334875 - RNA, 32 nt, Homo Sapiens
aauuggcauacuugauaggaggauaaagcuuu

SEQ ID NO: 334876 - RNA, 32 nt, Homo Sapiens
uggaaaaugaccucgcugcuguucccuggcau

SEQ ID NO: 334877 - RNA, 32 nt, Homo Sapiens
aaugugaauuuggaaucagaugucuccauuac

SEQ ID NO: 334878 - RNA, 32 nt, Homo Sapiens
ggggcuuuaaauaguuuccuaugcaacguguc

SEQ ID NO: 334879 - RNA, 32 nt, Homo Sapiens
ugcucggggaggaggcagugacggccggugag

SEQ ID NO: 334880 - RNA, 32 nt, Homo Sapiens
gcgucuauguuucuuuccuucuguauugguca

SEQ ID NO: 334881 - RNA, 32 nt, Homo Sapiens
ugaccuagugcuaggcguggacgggcgcaccu

SEQ ID NO: 334882 - RNA, 32 nt, Homo Sapiens
uuguuucccacuuuuuuccuaugcuggucugc

SEQ ID NO: 334883 - RNA, 32 nt, Homo Sapiens
aacaccaucauucuaugggaaagaugguucuu

SEQ ID NO: 334884 - RNA, 32 nt, Homo Sapiens
cuggggucauuuccaaagcaguccaggggaau

SEQ ID NO: 334885 - RNA, 32 nt, Homo Sapiens
cgccgccgcccggccccuccagcuucccggac

SEQ ID NO: 334886 - RNA, 32 nt, Homo Sapiens
agagcuuacagcucgagucaccuuuuagcuau

SEQ ID NO: 334887 - RNA, 32 nt, Homo Sapiens
cccggguucaagccauucuccucccucagacu

SEQ ID NO: 334888 - RNA, 32 nt, Homo Sapiens
cuggaucccagggcuugaacuaggauuugagg

SEQ ID NO: 334889 - RNA, 32 nt, Homo Sapiens
ugcugagggucacauugagcugcagguugaau

SEQ ID NO: 334890 - RNA, 32 nt, Homo Sapiens
ucagcccggcugugaacguccaggccccgguc

SEQ ID NO: 334891 - RNA, 32 nt, Homo Sapiens
aguggaagaagcugcagugggagacaaagccu

SEQ ID NO: 334892 - RNA, 32 nt, Homo Sapiens
ggaugaccuggcaaauaagaucuugaauaggc

SEQ ID NO: 334893 - RNA, 32 nt, Homo Sapiens
ggagcucuccccggucugacagccacuccaga

SEQ ID NO: 334894 - RNA, 32 nt, Homo Sapiens
gaaauauaaacugugagauaaauaucauuaua

SEQ ID NO: 334895 - RNA, 32 nt, Homo Sapiens
gcggagggcacuggggguggcggcacgguccg

SEQ ID NO: 334896 - RNA, 30 nt, Homo Sapiens
cuccaaggcaggcgcugucagcccgggagg

SEQ ID NO: 334897 - RNA, 32 nt, Homo Sapiens
accugaggggguaguggaaaucgccaaauuug

SEQ ID NO: 334898 - RNA, 32 nt, Homo Sapiens
gcaaauggggugcaugauaagagcaucucuua

SEQ ID NO: 334899 - RNA, 32 nt, Homo Sapiens
cucccuggacuucugcuuugcacugcccugca

SEQ ID NO: 334900 - RNA, 32 nt, Homo Sapiens
ugauaaucaaaccaugucaagauuauuaguuc

SEQ ID NO: 334901 - RNA, 32 nt, Homo Sapiens
cuguuccugggcggcccggcuagcucugccua

SEQ ID NO: 334902 - RNA, 32 nt, Homo Sapiens
accgacucaucuuuccuucucuaagcacaaag

SEQ ID NO: 334903 - RNA, 32 nt, Homo Sapiens
aagguuuaagacuguucaaguagcauuccaau

SEQ ID NO: 334904 - RNA, 32 nt, Homo Sapiens
acuuuccugauauuuauguacauauuaagaua

SEQ ID NO: 334905 - RNA, 32 nt, Homo Sapiens
auaauuuaaagaugucuucugaagauguaaag

SEQ ID NO: 334906 - RNA, 32 nt, Homo Sapiens
uuuuauaauaaaugcuaguuuuuucugaucug

SEQ ID NO: 334907 - RNA, 32 nt, Homo Sapiens
augaaaugcuguauauuugguuuugaaaaaau

SEQ ID NO: 334908 - RNA, 32 nt, Homo Sapiens
acuggcucuaaggaugaugaguacacuuggaa

SEQ ID NO: 334909 - RNA, 32 nt, Homo Sapiens
aggaaacggcccggaucccggcagcggccuga

SEQ ID NO: 334910 - RNA, 32 nt, Homo Sapiens
cgguggcaucugcggccauggcggcgacuacu

SEQ ID NO: 334911 - RNA, 32 nt, Homo Sapiens
cucauuaauucagaucuguaccucauugcugc

SEQ ID NO: 334912 - RNA, 31 nt, Homo Sapiens
acuucagucgccucugcgccaagggcgacau

SEQ ID NO: 334913 - RNA, 32 nt, Homo Sapiens
ccagacugucuucucuucagacuuuuauaauc

SEQ ID NO: 334914 - RNA, 32 nt, Homo Sapiens
auguguguuuagcucaauuuugaaaugguuca

SEQ ID NO: 334915 - RNA, 32 nt, Homo Sapiens
cccauugacaaugaauaagaguuccuguagcu

SEQ ID NO: 334916 - RNA, 32 nt, Homo Sapiens
uaacaaacuaggaagaugaaaagggaaauugu

SEQ ID NO: 334917 - RNA, 32 nt, Homo Sapiens
guugucugggucaauacugccuuaaugagaac

SEQ ID NO: 334918 - RNA, 32 nt, Homo Sapiens
cugagacugggguugaggggacugacgggggc

SEQ ID NO: 334919 - RNA, 32 nt, Homo Sapiens
guugaaauuggaaaggacuuuguguuauuuag

SEQ ID NO: 334920 - RNA, 32 nt, Homo Sapiens
aaacacaguauuucuuuuuaacuuuuuuauuu

SEQ ID NO: 334921 - RNA, 32 nt, Homo Sapiens
cgagggggcgcggcugccguccggacgagaca

SEQ ID NO: 334922 - RNA, 32 nt, Homo Sapiens
gaagaagaacagaacuuuguguguuuauuuca

SEQ ID NO: 334923 - RNA, 32 nt, Homo Sapiens
caauugaggcgauuuaauuaaauggcugugau

SEQ ID NO: 334924 - RNA, 32 nt, Homo Sapiens
acaucccucaucaguucccccuggaucccagc

SEQ ID NO: 334925 - RNA, 32 nt, Homo Sapiens
uccucuccuggcgggguucggcggcgggcgag

SEQ ID NO: 334926 - RNA, 32 nt, Homo Sapiens
uuuucagaagggcuacuguuaauugcacauaa

SEQ ID NO: 334927 - RNA, 32 nt, Homo Sapiens
aucagccgcgacacggcgggacccgccagcuu

SEQ ID NO: 334928 - RNA, 29 nt, Homo Sapiens
cgccgcgcgguccgggcucuguucauuca

SEQ ID NO: 334929 - RNA, 32 nt, Homo Sapiens
cacuugugauauugugaaguuuucauacagca

SEQ ID NO: 334930 - RNA, 32 nt, Homo Sapiens
gggaaggaagaugauacuucuuucucaagaaa

SEQ ID NO: 334931 - RNA, 32 nt, Homo Sapiens
ugcugccgcgguuggugggguugggugagagg

SEQ ID NO: 334932 - RNA, 30 nt, Homo Sapiens
ugguuggcagguggcagcaggauggugggu

SEQ ID NO: 334933 - RNA, 32 nt, Homo Sapiens
ucagauucuggguggggccacaggcaaaucuc

SEQ ID NO: 334934 - RNA, 32 nt, Homo Sapiens
aaaauacaaaaauuagcuggaugugaugccuc

SEQ ID NO: 334935 - RNA, 32 nt, Homo Sapiens
cagucacaaggaaaaacuuauuaaacauuaua

SEQ ID NO: 334936 - RNA, 32 nt, Homo Sapiens
uucuuuuguacaaaaaagaacuacuuguauuc

SEQ ID NO: 334937 - RNA, 32 nt, Homo Sapiens
cacacuggagaaaugcaguguugugugaaauc

SEQ ID NO: 334938 - RNA, 32 nt, Homo Sapiens
ggcacguggauaaaaccuaaaagggaauauua

SEQ ID NO: 334939 - RNA, 32 nt, Homo Sapiens
cacauuuaaaaauuuucaguacuauuacucau

SEQ ID NO: 334940 - RNA, 32 nt, Homo Sapiens
gucccugggcuccaggccgccgcccccuccuc

SEQ ID NO: 334941 - RNA, 32 nt, Homo Sapiens
gccacagaaaagacaguuaaagcaaagaagag

SEQ ID NO: 334942 - RNA, 32 nt, Homo Sapiens
ugccuccccucuauguguuuagcauauguuau

SEQ ID NO: 334943 - RNA, 32 nt, Homo Sapiens
ggguccuggccuccccgcagugaaucccagag

SEQ ID NO: 334944 - RNA, 32 nt, Homo Sapiens
aauuuaacuuugacauccagcuauagacagaa

SEQ ID NO: 334945 - RNA, 32 nt, Homo Sapiens
cagcguguuuaugcaagcaguuuguggaauuu

SEQ ID NO: 334946 - RNA, 32 nt, Homo Sapiens
ccuuuuggagaggauaauuucucuaaguuaac

SEQ ID NO: 334947 - RNA, 32 nt, Homo Sapiens
aaguuuaaaaaauaaaguucuugcugggcaca

SEQ ID NO: 334948 - RNA, 32 nt, Homo Sapiens
ugccucacacuggccuguugaggcccagcuca

SEQ ID NO: 334949 - RNA, 32 nt, Homo Sapiens
uucaagaguguucuauacuaagagagugcugu

SEQ ID NO: 334950 - RNA, 32 nt, Homo Sapiens
gcgaggccgagacccagcagccgcccgccgcu

SEQ ID NO: 334951 - RNA, 32 nt, Homo Sapiens
ucuugacuaauagaagcacuuugcagaugaua

SEQ ID NO: 334952 - RNA, 32 nt, Homo Sapiens
auuuuuacauuuuuuucuuuuacagaacuauu

SEQ ID NO: 334953 - RNA, 32 nt, Homo Sapiens
ucaauggggagcuucauguguauaugucugaa

SEQ ID NO: 334954 - RNA, 32 nt, Homo Sapiens
ugggccacgagggcaguguggaugcaccagca

SEQ ID NO: 334955 - RNA, 32 nt, Homo Sapiens
ugcgaggggaggaggcccaggggggcggggug

SEQ ID NO: 334956 - RNA, 32 nt, Homo Sapiens
aaaauguuuuaacugguuuacaaaauccauca

SEQ ID NO: 334957 - RNA, 32 nt, Homo Sapiens
auguguuuucuuuuucuaaaucaugauaaugu

SEQ ID NO: 334958 - RNA, 32 nt, Homo Sapiens
uuuugauaaaauguaaguuuguugaacccugc

SEQ ID NO: 334959 - RNA, 32 nt, Homo Sapiens
uaagacuuuacuaugcuuccuucacagauuug

SEQ ID NO: 334960 - RNA, 32 nt, Homo Sapiens
cagaccuucuauuuuauagccacccagguagg

SEQ ID NO: 334961 - RNA, 32 nt, Homo Sapiens
uucccuggugccugcggauguccgaggccucg

SEQ ID NO: 334962 - RNA, 32 nt, Homo Sapiens
agcagguugcgcgcuuccgggagcagcugcga

SEQ ID NO: 334963 - RNA, 32 nt, Homo Sapiens
augucaagcaaaaugcacaauuccuacagaag

SEQ ID NO: 334964 - RNA, 32 nt, Homo Sapiens
ccugaagcaaaccagcagcccagccuugccuc

SEQ ID NO: 334965 - RNA, 32 nt, Homo Sapiens
ggagcacagcacagccagaaaggggcugcauu

SEQ ID NO: 334966 - RNA, 32 nt, Homo Sapiens
caagauucuuuuuauucuuucauuucacuucu

SEQ ID NO: 334967 - RNA, 32 nt, Homo Sapiens
gcccuucugcccgggcccuggccacaaugacc

SEQ ID NO: 334968 - RNA, 32 nt, Homo Sapiens
ggcugcgugugagcgcgcuuugcaccuccuau

SEQ ID NO: 334969 - RNA, 32 nt, Homo Sapiens
cuaagugacacggaagaagaugacaaaugcua

SEQ ID NO: 334970 - RNA, 32 nt, Homo Sapiens
guccagaggcggcggcagcuggcagugcccuc

SEQ ID NO: 334971 - RNA, 32 nt, Homo Sapiens
guaccucagcacuacuauucucucuuaaaaga

SEQ ID NO: 334972 - RNA, 32 nt, Homo Sapiens
agccucugggucuggggguugcaaaaggagaa

SEQ ID NO: 334973 - RNA, 32 nt, Homo Sapiens
gguuuuacauauauucucuugucagauuugug

SEQ ID NO: 334974 - RNA, 32 nt, Homo Sapiens
ucacugguugccuacgucuuuggcucugcugu

SEQ ID NO: 334975 - RNA, 32 nt, Homo Sapiens
uuaaauaaaaauucuuuaaggcaaaaaaaaaa

SEQ ID NO: 334976 - RNA, 32 nt, Homo Sapiens
uggaaucauuuucuuucucucugccagggaca

SEQ ID NO: 334977 - RNA, 32 nt, Homo Sapiens
ggggggcuguuaccauugagugaccagaaagg

SEQ ID NO: 334978 - RNA, 32 nt, Homo Sapiens
uauuuuccuugaccuacaaaggaucuguuuug

SEQ ID NO: 334979 - RNA, 32 nt, Homo Sapiens
ggcgcgacagagcuguccucgcaccuggaugg

SEQ ID NO: 334980 - RNA, 32 nt, Homo Sapiens
gcagacuccacggugagaaagagacccgaucu

SEQ ID NO: 334981 - RNA, 32 nt, Homo Sapiens
uaucugugcaauggaauauaaauaucacaaag

SEQ ID NO: 334982 - RNA, 32 nt, Homo Sapiens
cuuccuuaauuuugcccuaaaagcagauuuua

SEQ ID NO: 334983 - RNA, 32 nt, Homo Sapiens
caugggaagcagccuucagugccuucaugaau

SEQ ID NO: 334984 - RNA, 32 nt, Homo Sapiens
gggguguuugggggcgcgcgugcgagugccag

SEQ ID NO: 334985 - RNA, 32 nt, Homo Sapiens
cacagcaggggagggguuaaugcagauggcag

SEQ ID NO: 334986 - RNA, 32 nt, Homo Sapiens
aucacuguuuuaaacuugacuguuuuauauua

SEQ ID NO: 334987 - RNA, 32 nt, Homo Sapiens
caccccgcgggccucccguugucaugccuuac

SEQ ID NO: 334988 - RNA, 32 nt, Homo Sapiens
ccgggccaugagccgcgccgggagcugggaca

SEQ ID NO: 334989 - RNA, 32 nt, Homo Sapiens
uuagaugauguucucuauaaauccauucuccu

SEQ ID NO: 334990 - RNA, 32 nt, Homo Sapiens
ggcaagcccuuguaguccugugcgauggcguc

SEQ ID NO: 334991 - RNA, 32 nt, Homo Sapiens
agagaggagucagauuaucuacuuagauuugg

SEQ ID NO: 334992 - RNA, 32 nt, Homo Sapiens
uuugcccuggccagacaggcuaauguuccuca

SEQ ID NO: 334993 - RNA, 32 nt, Homo Sapiens
gagauauuuuuagauuguaugccacuuuuguu

SEQ ID NO: 334994 - RNA, 32 nt, Homo Sapiens
ccuuuuuuuuuuuuuuaaccguaagugcacga

SEQ ID NO: 334995 - RNA, 32 nt, Homo Sapiens
guauuuaauggucacucaauagcuuucaaaau

SEQ ID NO: 334996 - RNA, 32 nt, Homo Sapiens
agucaacugaugauaacugugauccuuaaaga

SEQ ID NO: 334997 - RNA, 32 nt, Homo Sapiens
uuaugcaacuugucuauguaaauaauguacac

SEQ ID NO: 334998 - RNA, 32 nt, Homo Sapiens
uucccaggccccagccucucuggccucccugc

SEQ ID NO: 334999 - RNA, 32 nt, Homo Sapiens
gccucugccucccagguucaagcgauucucau

SEQ ID NO: 335000 - RNA, 32 nt, Homo Sapiens
cgcuuacagaaugguuuuaucuaauuuguagc

SEQ ID NO: 335001 - RNA, 32 nt, Homo Sapiens
aaucuggcccugagagacccccggccuccucu

SEQ ID NO: 335002 - RNA, 31 nt, Homo Sapiens
gcgaggcggggcauguaaccauagcgugcgg

SEQ ID NO: 335003 - RNA, 32 nt, Homo Sapiens
uggggguagaaauagagagacacaauauuauu

SEQ ID NO: 335004 - RNA, 32 nt, Homo Sapiens
guauauuacaggaaacaagauacuuuguaaaa

SEQ ID NO: 335005 - RNA, 32 nt, Homo Sapiens
gcuucuccucugaguucuaacaaaauggugcu

SEQ ID NO: 335006 - RNA, 32 nt, Homo Sapiens
ugugcuuuguaucagucagugcuggagaaauc

SEQ ID NO: 335007 - RNA, 32 nt, Homo Sapiens
ggagucguggcugagcagaacacgccacacgc

SEQ ID NO: 335008 - RNA, 32 nt, Homo Sapiens
cccagccagggcggggcggcgcagcccgagcu

SEQ ID NO: 335009 - RNA, 32 nt, Homo Sapiens
gguguguguggcucagcuuccacggcguguuu

SEQ ID NO: 335010 - RNA, 32 nt, Homo Sapiens
gcuagacuucgggcuccuugaggauauucagu

SEQ ID NO: 335011 - RNA, 32 nt, Homo Sapiens
ccuaauuugggguuccugguccugcuccagga

SEQ ID NO: 335012 - RNA, 29 nt, Homo Sapiens
cagaauaaauaaagauauuuucuuaauga

SEQ ID NO: 335013 - RNA, 32 nt, Homo Sapiens
ugcuguauaaauaacaacuugaacaugaaaug

SEQ ID NO: 335014 - RNA, 32 nt, Homo Sapiens
acggaaaaggaauacucguguauuuuaagaua

SEQ ID NO: 335015 - RNA, 32 nt, Homo Sapiens
acuuagcaggguaucacuggacaggccauggc

SEQ ID NO: 335016 - RNA, 32 nt, Homo Sapiens
uguuuucuauucauuucuuuaaaaugaaaaag

SEQ ID NO: 335017 - RNA, 32 nt, Homo Sapiens
uuuacuuucccaucucaaaaacgugugcaggg

SEQ ID NO: 335018 - RNA, 29 nt, Homo Sapiens
gcuuacaauaaacauuugauaauuggaaa

SEQ ID NO: 335019 - RNA, 32 nt, Homo Sapiens
uaccugccgacagcauaaugugaggcaagguc

SEQ ID NO: 335020 - RNA, 32 nt, Homo Sapiens
cugucaggcccagcugacaagcguggggcugg

SEQ ID NO: 335021 - RNA, 32 nt, Homo Sapiens
ggguuuucaccauccucuugcucucugucuga

SEQ ID NO: 335022 - RNA, 32 nt, Homo Sapiens
uggcuuuggaaugugacacagccuuuuugauc

SEQ ID NO: 335023 - RNA, 30 nt, Homo Sapiens
cguucuguuuuggcugcagagagugguuca

SEQ ID NO: 335024 - RNA, 32 nt, Homo Sapiens
uugugugaugaaugaaucacauguucguuguu

SEQ ID NO: 335025 - RNA, 32 nt, Homo Sapiens
agacuagaaaauuagacugugauucagaaaau

SEQ ID NO: 335026 - RNA, 32 nt, Homo Sapiens
auaaauugcaacuggugacaguucuuaacuga

SEQ ID NO: 335027 - RNA, 32 nt, Homo Sapiens
caagccccauucucuccacgccgcucaucaac

SEQ ID NO: 335028 - RNA, 32 nt, Homo Sapiens
cauuacaaacuccaaauucaaacgcaugcucc

SEQ ID NO: 335029 - RNA, 32 nt, Homo Sapiens
ccuucuuuuuaaaauacguccaguucuuaccc

SEQ ID NO: 335030 - RNA, 32 nt, Homo Sapiens
cucucccgccccacacccacccuccuggcucu

SEQ ID NO: 335031 - RNA, 31 nt, Homo Sapiens
uugaguuuucucugugaccuaacugaaagua

SEQ ID NO: 335032 - RNA, 32 nt, Homo Sapiens
uggaaagcacucggagagaagucuagauguuu

SEQ ID NO: 335033 - RNA, 32 nt, Homo Sapiens
caaauaauuuggaaacaagccagauggugacc

SEQ ID NO: 335034 - RNA, 32 nt, Homo Sapiens
uuuugcaggaggaaggacagcacagcugacca

SEQ ID NO: 335035 - RNA, 32 nt, Homo Sapiens
auacgacacaugcccaugaugagaagcagaau

SEQ ID NO: 335036 - RNA, 32 nt, Homo Sapiens
uguacuguauggauuucagggaucuuaacugu

SEQ ID NO: 335037 - RNA, 32 nt, Homo Sapiens
aauccucaguauaaaaaagcaauauugacacu

SEQ ID NO: 335038 - RNA, 32 nt, Homo Sapiens
gaaaauuuuauuaaaaaacaaacaaacaaaca

SEQ ID NO: 335039 - RNA, 32 nt, Homo Sapiens
aaccacaaugaucugauuuucuuucuucuuuc

SEQ ID NO: 335040 - RNA, 32 nt, Homo Sapiens
gcacuugaaaggaaacaaaacucccuuucaca

SEQ ID NO: 335041 - RNA, 32 nt, Homo Sapiens
aacaacauggauauauacuuuauauuauuuaa

SEQ ID NO: 335042 - RNA, 32 nt, Homo Sapiens
ugaaaaauagugucuuugugauuugaguaaag

SEQ ID NO: 335043 - RNA, 32 nt, Homo Sapiens
guaaaugaaaauagguuuuuaucuuuaaaaug

SEQ ID NO: 335044 - RNA, 32 nt, Homo Sapiens
auuaucuuaucuguuuuuauuaauccgucuua

SEQ ID NO: 335045 - RNA, 30 nt, Homo Sapiens
accuccucggcaggcggcggcggggccugc

SEQ ID NO: 335046 - RNA, 32 nt, Homo Sapiens
cacugaauguacaggcagugggcuugcagcac

SEQ ID NO: 335047 - RNA, 32 nt, Homo Sapiens
uccgccggcgaccgcugacgggcgcugggcuc

SEQ ID NO: 335048 - RNA, 32 nt, Homo Sapiens
ggcugcagcaggugcugggcuggacuggccau

SEQ ID NO: 335049 - RNA, 32 nt, Homo Sapiens
ugauuuugguuucccuucuccucccauaauuu

SEQ ID NO: 335050 - RNA, 32 nt, Homo Sapiens
ggaugagugagugccaggggcuggggaggggg

SEQ ID NO: 335051 - RNA, 32 nt, Homo Sapiens
aaagaaauuaauaugaaagaucacaucaagga

SEQ ID NO: 335052 - RNA, 32 nt, Homo Sapiens
ccuucaccaugggcuuccugggugcgcgggcc

SEQ ID NO: 335053 - RNA, 32 nt, Homo Sapiens
caggagcagcacaugcaccaggagcaucugag

SEQ ID NO: 335054 - RNA, 32 nt, Homo Sapiens
auuuauuuaagggggaaaaagugucaacucuu

SEQ ID NO: 335055 - RNA, 28 nt, Homo Sapiens
agcggaguuccuaacaggaugaaaguuc

SEQ ID NO: 335056 - RNA, 32 nt, Homo Sapiens
uguaguacagaaaagaauguacauuuagacau

SEQ ID NO: 335057 - RNA, 32 nt, Homo Sapiens
cagcauagacuaugcugucugauaaaucuaau

SEQ ID NO: 335058 - RNA, 32 nt, Homo Sapiens
ggaaaccugccggggagcgggcggcggcugcg

SEQ ID NO: 335059 - RNA, 32 nt, Homo Sapiens
gccagccauacggacuugaggaccuugagaga

SEQ ID NO: 335060 - RNA, 32 nt, Homo Sapiens
ccacccgagugagcgcugcccccucacagaga

SEQ ID NO: 335061 - RNA, 32 nt, Homo Sapiens
uauuuuccugugacuguuuuuguuuuguuuuu

SEQ ID NO: 335062 - RNA, 32 nt, Homo Sapiens
uguaaagaauuggucuuaauguugaauguauu

SEQ ID NO: 335063 - RNA, 32 nt, Homo Sapiens
caccuuuagcccugcucuggcuucugcagcag

SEQ ID NO: 335064 - RNA, 32 nt, Homo Sapiens
caccccuguccauacagccucauucacagcag

SEQ ID NO: 335065 - RNA, 32 nt, Homo Sapiens
aagggauccaacagacagaaauucacccucau

SEQ ID NO: 335066 - RNA, 32 nt, Homo Sapiens
ucgccucgaccccgcgccgggcaccuguggcu

SEQ ID NO: 335067 - RNA, 32 nt, Homo Sapiens
aggggguggagcaaaagguugggaccauguga

SEQ ID NO: 335068 - RNA, 32 nt, Homo Sapiens
ugaccuauuugcugacuuucugauugaaauac

SEQ ID NO: 335069 - RNA, 32 nt, Homo Sapiens
aggaccgguguugguaggugccuacagagacu

SEQ ID NO: 335070 - RNA, 32 nt, Homo Sapiens
acuggggggcuuuggccugugagccauugucc

SEQ ID NO: 335071 - RNA, 32 nt, Homo Sapiens
cccagcuuucuuuuuaauacaaauguuauuua

SEQ ID NO: 335072 - RNA, 32 nt, Homo Sapiens
ugcacgggccuggccuuggccuuggccucaca

SEQ ID NO: 335073 - RNA, 32 nt, Homo Sapiens
accuuuuuauuacuaacuucauuucagaaauu

SEQ ID NO: 335074 - RNA, 32 nt, Homo Sapiens
acccucugcugcuucagcaucuccgccuggag

SEQ ID NO: 335075 - RNA, 29 nt, Homo Sapiens
augauaaaguuccauaaaugaauacaggu

SEQ ID NO: 335076 - RNA, 32 nt, Homo Sapiens
cugacauauggaaccaggcagcuccauguugg

SEQ ID NO: 335077 - RNA, 32 nt, Homo Sapiens
uguaagacaacacucauucuaggugauucugu

SEQ ID NO: 335078 - RNA, 32 nt, Homo Sapiens
cuugcuuuaacuucuuuuuuuuuugagacgga

SEQ ID NO: 335079 - RNA, 32 nt, Homo Sapiens
aagccagccaugggcgccgccggcuccuccgc

SEQ ID NO: 335080 - RNA, 32 nt, Homo Sapiens
gaccccggcccacccgcgggacuccaggcacc

SEQ ID NO: 335081 - RNA, 32 nt, Homo Sapiens
cccugaaaauuugaucacuggccagaguaacg

SEQ ID NO: 335082 - RNA, 32 nt, Homo Sapiens
aaaagaacccucagcagaauagcaaaaacuuu

SEQ ID NO: 335083 - RNA, 32 nt, Homo Sapiens
guauauguaauuguaauuuugcccauguuagg

SEQ ID NO: 335084 - RNA, 32 nt, Homo Sapiens
ggcuccucggaacguccggcucugcgccccga

SEQ ID NO: 335085 - RNA, 32 nt, Homo Sapiens
cacugguauuugugaucucaccauuaugacau

SEQ ID NO: 335086 - RNA, 32 nt, Homo Sapiens
aaaucaguaagcauaggagucaggaaauucca

SEQ ID NO: 335087 - RNA, 32 nt, Homo Sapiens
ucacaaaguauuuuguagaaggcccaaaucac

SEQ ID NO: 335088 - RNA, 26 nt, Homo Sapiens
cccauaauuaaaccugauucugaguu

SEQ ID NO: 335089 - RNA, 32 nt, Homo Sapiens
auuguaauuuaauuuuauuuuacaagcgguag

SEQ ID NO: 335090 - RNA, 32 nt, Homo Sapiens
uccgaggacgcgagacugcagagcuuuguagg

SEQ ID NO: 335091 - RNA, 32 nt, Homo Sapiens
agcaguauguugaguagaaagggugugggcgg

SEQ ID NO: 335092 - RNA, 32 nt, Homo Sapiens
uuuugaccuguccugcccuucuuagcuugaag

SEQ ID NO: 335093 - RNA, 32 nt, Homo Sapiens
gcuuacaaaaauuuaccuagggacggauuggc

SEQ ID NO: 335094 - RNA, 32 nt, Homo Sapiens
agccauccagcaugcugcggggagaaggggca

SEQ ID NO: 335095 - RNA, 32 nt, Homo Sapiens
cccacgcguccgcccacgcguccgagccugcg

SEQ ID NO: 335096 - RNA, 32 nt, Homo Sapiens
caucaccuagugcaugaggcacagggcagagu

SEQ ID NO: 335097 - RNA, 32 nt, Homo Sapiens
ccguccgcgggccccgccugagcugcggucuc

SEQ ID NO: 335098 - RNA, 32 nt, Homo Sapiens
ucccucuuccaugcccugcugcccaggaguug

SEQ ID NO: 335099 - RNA, 32 nt, Homo Sapiens
gcagccccuuggcgaaccacacgacgcugcgg

SEQ ID NO: 335100 - RNA, 32 nt, Homo Sapiens
ggccgagacuaugugcagaaagcccagacuaa

SEQ ID NO: 335101 - RNA, 32 nt, Homo Sapiens
ucucccuccuucccuuccuuguagccuuuuga

SEQ ID NO: 335102 - RNA, 32 nt, Homo Sapiens
gacaugaaauacuuuaaaaugcacacguagcc

SEQ ID NO: 335103 - RNA, 32 nt, Homo Sapiens
cagccucugaagagccauagggcccccaccuu

SEQ ID NO: 335104 - RNA, 32 nt, Homo Sapiens
gaccccacucccugcucuaacaccugccuagg

SEQ ID NO: 335105 - RNA, 32 nt, Homo Sapiens
gaguuuugaagaaggggcuguguuugggccac

SEQ ID NO: 335106 - RNA, 32 nt, Homo Sapiens
auguccuuuuagguagcaaggcauuuugacau

SEQ ID NO: 335107 - RNA, 32 nt, Homo Sapiens
agggcuacagcuguuggggcucugccaggucc

SEQ ID NO: 335108 - RNA, 32 nt, Homo Sapiens
gccaggacccacggugcuauccauucagucuc

SEQ ID NO: 335109 - RNA, 32 nt, Homo Sapiens
uagaucuucacuuguagcacaaauugucacaa

SEQ ID NO: 335110 - RNA, 32 nt, Homo Sapiens
uaaaaugaaugugaaugccaucuuuuaugacu

SEQ ID NO: 335111 - RNA, 32 nt, Homo Sapiens
acccuuguuuuacuccacuccucccuuuuuua

SEQ ID NO: 335112 - RNA, 28 nt, Homo Sapiens
ggcugggggcggccacagacggccucga

SEQ ID NO: 335113 - RNA, 32 nt, Homo Sapiens
ugcuuauacuaaaaguuaucuaucuuuaguug

SEQ ID NO: 335114 - RNA, 32 nt, Homo Sapiens
guuguaaggaagugagaccagaaggacaagcu

SEQ ID NO: 335115 - RNA, 32 nt, Homo Sapiens
gcuacauuugcagaagcagcagcagcagaaga

SEQ ID NO: 335116 - RNA, 32 nt, Homo Sapiens
agcuuuaagaaauuauucugcaucuacaacuc

SEQ ID NO: 335117 - RNA, 30 nt, Homo Sapiens
ucgacguggggcgggcggacgggaagccug

SEQ ID NO: 335118 - RNA, 32 nt, Homo Sapiens
agaguaagaacaaauaaaguacaccguaauau

SEQ ID NO: 335119 - RNA, 32 nt, Homo Sapiens
uccuagaggcacgggccgguguguacgagcug

SEQ ID NO: 335120 - RNA, 32 nt, Homo Sapiens
cauccagguccucccguuccuccuugcuaugc

SEQ ID NO: 335121 - RNA, 32 nt, Homo Sapiens
gggccaggcgcgcggcggccccgggcuuugug

SEQ ID NO: 335122 - RNA, 32 nt, Homo Sapiens
cccaggaagaucuggccucuguccugugccca

SEQ ID NO: 335123 - RNA, 32 nt, Homo Sapiens
gccaccguacucuagccugggcgacagagcaa

SEQ ID NO: 335124 - RNA, 32 nt, Homo Sapiens
ggaagaagcccuggccggggccaucugcggac

SEQ ID NO: 335125 - RNA, 32 nt, Homo Sapiens
uggguuuuucuuuuauuuucuaagaagguuga

SEQ ID NO: 335126 - RNA, 32 nt, Homo Sapiens
cccuccuggugccaccucagaccccgggguga

SEQ ID NO: 335127 - RNA, 32 nt, Homo Sapiens
uccagguaccggaauaaaaauauggagacaag

SEQ ID NO: 335128 - RNA, 32 nt, Homo Sapiens
aaauacacagaaaagggaaagaagccggaguc

SEQ ID NO: 335129 - RNA, 32 nt, Homo Sapiens
ggggcugcccgcgcgcuccacggugcagagcu

SEQ ID NO: 335130 - RNA, 32 nt, Homo Sapiens
gcgugauuugccuucagagagccccggggagg

SEQ ID NO: 335131 - RNA, 32 nt, Homo Sapiens
caucgcacuccagacuacagccugggugacag

SEQ ID NO: 335132 - RNA, 32 nt, Homo Sapiens
guguauuuguacaaaauccagguuccgggagc

SEQ ID NO: 335133 - RNA, 32 nt, Homo Sapiens
ucggccggcuccgcccggcugccgccuaggau

SEQ ID NO: 335134 - RNA, 32 nt, Homo Sapiens
uuauguuguuggagagaaugauguguguucca

SEQ ID NO: 335135 - RNA, 32 nt, Homo Sapiens
uccucugcgucccagguuuggacgucuagggu

SEQ ID NO: 335136 - RNA, 32 nt, Homo Sapiens
cugggcgggcguguuuauuuguccuuggguac

SEQ ID NO: 335137 - RNA, 32 nt, Homo Sapiens
uugcgaaaauaccaguuuugcucucuguggga

SEQ ID NO: 335138 - RNA, 32 nt, Homo Sapiens
ccuggagguggcggccugcugcuguuaucuuu

SEQ ID NO: 335139 - RNA, 32 nt, Homo Sapiens
cuuuuaccaaaggauguuugcuucugaggaag

SEQ ID NO: 335140 - RNA, 32 nt, Homo Sapiens
gggccugcaggcugcccggccagcggagccca

SEQ ID NO: 335141 - RNA, 32 nt, Homo Sapiens
caaauuugacauuauuuuagaucccagagaaa

SEQ ID NO: 335142 - RNA, 32 nt, Homo Sapiens
cugcauuccuucccuucuuugaaggacagcug

SEQ ID NO: 335143 - RNA, 32 nt, Homo Sapiens
gcucauucacgugggacccgcuccaucuuccg

SEQ ID NO: 335144 - RNA, 32 nt, Homo Sapiens
gcaagacuccgucucaaaaaagauggccaugc

SEQ ID NO: 335145 - RNA, 32 nt, Homo Sapiens
uuucuuacacuugaaaaucaagggaaagagua

SEQ ID NO: 335146 - RNA, 32 nt, Homo Sapiens
ccuggcuggggugcaggcaagcaggaacccag

SEQ ID NO: 335147 - RNA, 32 nt, Homo Sapiens
cagcacccagaacuaaauuugcccacuuacaa

SEQ ID NO: 335148 - RNA, 32 nt, Homo Sapiens
ggcgcugugcuaggggcgggaguucuuccaga

SEQ ID NO: 335149 - RNA, 32 nt, Homo Sapiens
cggcuaggggcuccgagagcggcggccccggc

SEQ ID NO: 335150 - RNA, 32 nt, Homo Sapiens
gcggggcaaccucagggcuaccagcgaucccc

SEQ ID NO: 335151 - RNA, 32 nt, Homo Sapiens
agcagguguggaggagugucagcaugaugaaa

SEQ ID NO: 335152 - RNA, 32 nt, Homo Sapiens
guucacacaucuugcccuuccaugaaugaccc

SEQ ID NO: 335153 - RNA, 32 nt, Homo Sapiens
cgccacucagccauuucccccuccucagaugg

SEQ ID NO: 335154 - RNA, 28 nt, Homo Sapiens
gaaucugugucuaauauccuguuuuuaa

SEQ ID NO: 335155 - RNA, 32 nt, Homo Sapiens
ucauuucagaucugaacauuagcagugaucua

SEQ ID NO: 335156 - RNA, 32 nt, Homo Sapiens
gucacaaguccucuagugcucuuguugguuug

SEQ ID NO: 335157 - RNA, 32 nt, Homo Sapiens
acuguauucuguugagcuuucacauguuugag

SEQ ID NO: 335158 - RNA, 32 nt, Homo Sapiens
uguuaaugagauguauuuucuuauagagauau

SEQ ID NO: 335159 - RNA, 32 nt, Homo Sapiens
gcccgcaugcagcuucaccuccccuuuccagg

SEQ ID NO: 335160 - RNA, 32 nt, Homo Sapiens
aaaucgauguuaccugucaaguaaauaaauaa

SEQ ID NO: 335161 - RNA, 32 nt, Homo Sapiens
caaguaaaaaaaaauuaagagaauuucauauu

SEQ ID NO: 335162 - RNA, 32 nt, Homo Sapiens
gaguggccuuggcaggguguuggagcccucgg

SEQ ID NO: 335163 - RNA, 32 nt, Homo Sapiens
cagcagcccagccccagccuuccuccgccucc

SEQ ID NO: 335164 - RNA, 32 nt, Homo Sapiens
caccaucaccacugcuuucucuuccaacagug

SEQ ID NO: 335165 - RNA, 32 nt, Homo Sapiens
uuucucccauucugccaauuaccuuuugaauu

SEQ ID NO: 335166 - RNA, 32 nt, Homo Sapiens
ggcaucacgcaccucccucugggcuauggcau

SEQ ID NO: 335167 - RNA, 32 nt, Homo Sapiens
cucuucuggccaugggcccccggagccgugag

SEQ ID NO: 335168 - RNA, 32 nt, Homo Sapiens
cuaucuccuucucggcuccccagcccagucuu

SEQ ID NO: 335169 - RNA, 30 nt, Homo Sapiens
ggugcagccguucccaccgcccugcugcug

SEQ ID NO: 335170 - RNA, 32 nt, Homo Sapiens
gcgggcgcgcgaggcuguugugcucccggcuc

SEQ ID NO: 335171 - RNA, 32 nt, Homo Sapiens
gaugggaccugccuucuccacuaguagcuggg

SEQ ID NO: 335172 - RNA, 32 nt, Homo Sapiens
uagcaagcugucugcccuuggguucaagaacc

SEQ ID NO: 335173 - RNA, 32 nt, Homo Sapiens
caauaucugaccaagauucgccaaucucauac

SEQ ID NO: 335174 - RNA, 32 nt, Homo Sapiens
guuauccuauuauauuguaaacuaauacauug

SEQ ID NO: 335175 - RNA, 32 nt, Homo Sapiens
augacaccacaguccuggucuuucucguccca

SEQ ID NO: 335176 - RNA, 32 nt, Homo Sapiens
cagcaggaaaccgaagacaugaacaaggucuu

SEQ ID NO: 335177 - RNA, 32 nt, Homo Sapiens
ggucccugcggccaccaccuccuccuccuccu

SEQ ID NO: 335178 - RNA, 32 nt, Homo Sapiens
gcagggcugcuggcguugcugcuguugagagg

SEQ ID NO: 335179 - RNA, 32 nt, Homo Sapiens
gaaaaaccaacauauuucaugaaauuagaugc

SEQ ID NO: 335180 - RNA, 32 nt, Homo Sapiens
aucaugcuugacaaugcuauguuuucucuucc

SEQ ID NO: 335181 - RNA, 32 nt, Homo Sapiens
cccauacuugcucuuuuugucuucuucagacu

SEQ ID NO: 335182 - RNA, 32 nt, Homo Sapiens
gaacuuaggucauuuucuuaaucuugagagcu

SEQ ID NO: 335183 - RNA, 32 nt, Homo Sapiens
cggcggggaaggaggaggagggggagagucgc

SEQ ID NO: 335184 - RNA, 32 nt, Homo Sapiens
auccaaagaaaauuauaguuuaaauucaauua

SEQ ID NO: 335185 - RNA, 32 nt, Homo Sapiens
cuuucuuucccuauguuuauuugaaauuucau

SEQ ID NO: 335186 - RNA, 32 nt, Homo Sapiens
acuuaaucaguucuucuucccugucaguggug

SEQ ID NO: 335187 - RNA, 32 nt, Homo Sapiens
cucgcuucuggcacccagcaguggguugcaga

SEQ ID NO: 335188 - RNA, 32 nt, Homo Sapiens
auuauuucaaggaauagaguuuuccucacuac

SEQ ID NO: 335189 - RNA, 32 nt, Homo Sapiens
cgaggguuagucgucgccgucugagguguucc

SEQ ID NO: 335190 - RNA, 32 nt, Homo Sapiens
ggccugaggguggguggggaggggcaguuccu

SEQ ID NO: 335191 - RNA, 32 nt, Homo Sapiens
uugccccucaguuugcagacagccuauugugg

SEQ ID NO: 335192 - RNA, 32 nt, Homo Sapiens
gccccgcccuccagcgccuccucccagggugg

SEQ ID NO: 335193 - RNA, 32 nt, Homo Sapiens
cagcuagaguugcugggaauccaugaaucaaa

SEQ ID NO: 335194 - RNA, 32 nt, Homo Sapiens
gugccacguguaugugcugugguguguccccc

SEQ ID NO: 335195 - RNA, 32 nt, Homo Sapiens
acagaggugcggugacuugcccgggguuccag

SEQ ID NO: 335196 - RNA, 32 nt, Homo Sapiens
cugacagacuuggccaguccccugccugugcu

SEQ ID NO: 335197 - RNA, 32 nt, Homo Sapiens
gccaggcccuucccugugccccacccugcaga

SEQ ID NO: 335198 - RNA, 32 nt, Homo Sapiens
agacgccccggcggccccggguccuggagucc

SEQ ID NO: 335199 - RNA, 32 nt, Homo Sapiens
gucuaugguacaaaaaucacaaggcauucaag

SEQ ID NO: 335200 - RNA, 32 nt, Homo Sapiens
ucuagauauuuuccucuuuuucugaagcuacu

SEQ ID NO: 335201 - RNA, 32 nt, Homo Sapiens
cugucccuugccccccuggccucccccacuuu

SEQ ID NO: 335202 - RNA, 32 nt, Homo Sapiens
cuccgccaguguccggccgcgggccggccuua

SEQ ID NO: 335203 - RNA, 32 nt, Homo Sapiens
uaaguaaggacaaagaaggaaauaucaucgua

SEQ ID NO: 335204 - RNA, 32 nt, Homo Sapiens
auaugagugucugcuaugggccauucauugug

SEQ ID NO: 335205 - RNA, 32 nt, Homo Sapiens
ggcuccgaucgggcuaggccggcggccucgcu

SEQ ID NO: 335206 - RNA, 32 nt, Homo Sapiens
uaaaagagcagguuaagaacuuuucacaagga

SEQ ID NO: 335207 - RNA, 32 nt, Homo Sapiens
ggggguaauaaaccuccuucgggacacaaaaa

SEQ ID NO: 335208 - RNA, 32 nt, Homo Sapiens
gggguuuuauaaugauguuuuacaauguuuau

SEQ ID NO: 335209 - RNA, 32 nt, Homo Sapiens
ggcuuacuuggucccuggcacaaagcagccau

SEQ ID NO: 335210 - RNA, 32 nt, Homo Sapiens
aucucagaugguuguuuaacugcgaguuuaaa

SEQ ID NO: 335211 - RNA, 32 nt, Homo Sapiens
gggcugaugcagaugcugcugcugaagguguc

SEQ ID NO: 335212 - RNA, 32 nt, Homo Sapiens
ggagagcaaggaugcacagaaaacacacugac

SEQ ID NO: 335213 - RNA, 27 nt, Homo Sapiens
aucaaauguuccuucagcccugcaguu

SEQ ID NO: 335214 - RNA, 31 nt, Homo Sapiens
gaccagcaggagguuuucuccucagcccacu

SEQ ID NO: 335215 - RNA, 32 nt, Homo Sapiens
uuuaaguacuaauuuucuuuuuaucaaguaga

SEQ ID NO: 335216 - RNA, 32 nt, Homo Sapiens
gguggcugccuugggagggaggcuguccgaug

SEQ ID NO: 335217 - RNA, 32 nt, Homo Sapiens
guggcggcggaggcgaaggggcggcgggacgc

SEQ ID NO: 335218 - RNA, 32 nt, Homo Sapiens
ucuuguggcugucgcuaggaaggaugcagagg

SEQ ID NO: 335219 - RNA, 32 nt, Homo Sapiens
agggagacacuuaagggaaauuaaacugcaga

SEQ ID NO: 335220 - RNA, 30 nt, Homo Sapiens
uuucuagaugucgaaggcggcaguaggaag

SEQ ID NO: 335221 - RNA, 32 nt, Homo Sapiens
ucacucuggguaccaaauuuaagcaagauauu

SEQ ID NO: 335222 - RNA, 32 nt, Homo Sapiens
uucaguuaaauacagacuuguuuggacgcaag

SEQ ID NO: 335223 - RNA, 31 nt, Homo Sapiens
guccauggccacucccugcccccagccuggc

SEQ ID NO: 335224 - RNA, 32 nt, Homo Sapiens
caguccguccccagguuuguguuuccuggagu

SEQ ID NO: 335225 - RNA, 32 nt, Homo Sapiens
gaauugagagauuuuucuuaguaaauagauua

SEQ ID NO: 335226 - RNA, 32 nt, Homo Sapiens
ugcauucagugggacagcuuugcuggguucca

SEQ ID NO: 335227 - RNA, 32 nt, Homo Sapiens
ugcaagagcuccugggcaggggugccugggcc

SEQ ID NO: 335228 - RNA, 32 nt, Homo Sapiens
ccggcucacgcgcgcuccgacacacacgcuca

SEQ ID NO: 335229 - RNA, 32 nt, Homo Sapiens
ugguggaggcggcggaggcggcggcggaggcg

SEQ ID NO: 335230 - RNA, 32 nt, Homo Sapiens
uauuaggcaucaggcuuuuggccaaaucacuc

SEQ ID NO: 335231 - RNA, 32 nt, Homo Sapiens
acgcaguguaaacccaguggcuucucugaccu

SEQ ID NO: 335232 - RNA, 32 nt, Homo Sapiens
cucugagggguuccgccuccuccgcuuggggg

SEQ ID NO: 335233 - RNA, 32 nt, Homo Sapiens
uuuucaucuaaugugaaguagaauccuaaaua

SEQ ID NO: 335234 - RNA, 32 nt, Homo Sapiens
ccuuuuguuauauaaacaguauuauauacaca

SEQ ID NO: 335235 - RNA, 32 nt, Homo Sapiens
cagcauugaaauuuaggaaaagaauauuaaau

SEQ ID NO: 335236 - RNA, 30 nt, Homo Sapiens
acuaauauuuuaauggggagugacugcuua

SEQ ID NO: 335237 - RNA, 32 nt, Homo Sapiens
uauuuuucagaauuaaauuugaaaacuugcac

SEQ ID NO: 335238 - RNA, 32 nt, Homo Sapiens
uuguaaaaaugaacaaacaugagacuguaaga

SEQ ID NO: 335239 - RNA, 32 nt, Homo Sapiens
ucuuuucuaaucacaguguugcauaugagccu

SEQ ID NO: 335240 - RNA, 32 nt, Homo Sapiens
ccaggagcgccuggcccaggcacgggaggccc

SEQ ID NO: 335241 - RNA, 32 nt, Homo Sapiens
accuaaauaaacaaaaaugugcccuauguaag

SEQ ID NO: 335242 - RNA, 32 nt, Homo Sapiens
gaccccggcucgccgaccccgcucgcccucaa

SEQ ID NO: 335243 - RNA, 32 nt, Homo Sapiens
auuuaauccacauuugguguugcagaugaguu

SEQ ID NO: 335244 - RNA, 32 nt, Homo Sapiens
ccaacuacugccagggucagugcgcgcugccc

SEQ ID NO: 335245 - RNA, 32 nt, Homo Sapiens
augggggagaaguucaaggaauuucugcucgg

SEQ ID NO: 335246 - RNA, 32 nt, Homo Sapiens
ucccgggaggagcguggagcgcggcggcggcg

SEQ ID NO: 335247 - RNA, 32 nt, Homo Sapiens
auucuugaaaugacagaauuauagaaaggaga

SEQ ID NO: 335248 - RNA, 32 nt, Homo Sapiens
cauugucgcauccgcaucccuccggaguugag

SEQ ID NO: 335249 - RNA, 32 nt, Homo Sapiens
uucuauuuuuggccaaaugagaauuaagccag

SEQ ID NO: 335250 - RNA, 32 nt, Homo Sapiens
cugagugccuucuguggggacuccggcugugc

SEQ ID NO: 335251 - RNA, 32 nt, Homo Sapiens
acgaagcacaagucucaggggaccauucccac

SEQ ID NO: 335252 - RNA, 32 nt, Homo Sapiens
gagcuugggccagcggcggcggcggccuggga

SEQ ID NO: 335253 - RNA, 32 nt, Homo Sapiens
cgccgacugccccucuggacgccgggcggcgg

SEQ ID NO: 335254 - RNA, 32 nt, Homo Sapiens
gggagagcauauaaaugacaucaagggguaug

SEQ ID NO: 335255 - RNA, 32 nt, Homo Sapiens
agagauauguaucauaaaaauaaaaucuguaa

SEQ ID NO: 335256 - RNA, 32 nt, Homo Sapiens
gugacgaugaguuccugaaacuuggaggggca

SEQ ID NO: 335257 - RNA, 32 nt, Homo Sapiens
ugagcuugcgcucagggcuggcugaucaaacu

SEQ ID NO: 335258 - RNA, 32 nt, Homo Sapiens
acaagaagccugagaagcugcuggaggagaug

SEQ ID NO: 335259 - RNA, 32 nt, Homo Sapiens
uuccagaagaaagaugauccaauauaauacuc

SEQ ID NO: 335260 - RNA, 32 nt, Homo Sapiens
uguucuguugccgggcgacgcgacuucuaaac

SEQ ID NO: 335261 - RNA, 32 nt, Homo Sapiens
gguuucuggagguuuagccugauuuugaagag

SEQ ID NO: 335262 - RNA, 32 nt, Homo Sapiens
aagcacgugggcaggggccgcagcccccgcga

SEQ ID NO: 335263 - RNA, 32 nt, Homo Sapiens
caguucuuaggaccucauggggcugugucauc

SEQ ID NO: 335264 - RNA, 32 nt, Homo Sapiens
guagaauauaaaauaaagggacuuuuauuucu

SEQ ID NO: 335265 - RNA, 32 nt, Homo Sapiens
ggaauauguacaagaaacaauuacuguaugca

SEQ ID NO: 335266 - RNA, 32 nt, Homo Sapiens
cucugaggggagacugaggaagggcagagcca

SEQ ID NO: 335267 - RNA, 32 nt, Homo Sapiens
gaguuccaauacuuuugggauguuacccucac

SEQ ID NO: 335268 - RNA, 32 nt, Homo Sapiens
uaauguuuucuuugcaaaguauuguaaauuau

SEQ ID NO: 335269 - RNA, 32 nt, Homo Sapiens
agaggacgggcuuugaauaaaaaacaggaaua

SEQ ID NO: 335270 - RNA, 32 nt, Homo Sapiens
uugcggcggaccgaggcccaccugccucccug

SEQ ID NO: 335271 - RNA, 32 nt, Homo Sapiens
aaaaacacagaguauuauaacacuguaauugu

SEQ ID NO: 335272 - RNA, 32 nt, Homo Sapiens
caaacgcgcgccccuccgccccucccuuggcc

SEQ ID NO: 335273 - RNA, 32 nt, Homo Sapiens
gggaaggagggagggagggcggugacuugggg

SEQ ID NO: 335274 - RNA, 32 nt, Homo Sapiens
cuacaaccacaaacaccacaacggccgccacu

SEQ ID NO: 335275 - RNA, 32 nt, Homo Sapiens
ucugcugcuccugccgccgccggggcacuugg

SEQ ID NO: 335276 - RNA, 32 nt, Homo Sapiens
cugucaacuuuuauuuaaaucagugaauaugu

SEQ ID NO: 335277 - RNA, 32 nt, Homo Sapiens
aauuauuuuaucauaucugcuucuguuuuucc

SEQ ID NO: 335278 - RNA, 32 nt, Homo Sapiens
acugauacaaagugggaacaaacuccgcuucc

SEQ ID NO: 335279 - RNA, 32 nt, Homo Sapiens
cccagaagcacugggccuuggccacagcaaca

SEQ ID NO: 335280 - RNA, 32 nt, Homo Sapiens
agacagccaccagcggcugcucauggggcuga

SEQ ID NO: 335281 - RNA, 32 nt, Homo Sapiens
ucucuacuaaaaguacaaaaaauuagcugggu

SEQ ID NO: 335282 - RNA, 32 nt, Homo Sapiens
gucuacgacaaggaugaagucuuucauuuuuu

SEQ ID NO: 335283 - RNA, 32 nt, Homo Sapiens
acuuugauguggacaugaagugagagcagaaa

SEQ ID NO: 335284 - RNA, 32 nt, Homo Sapiens
ugaucgacgaggaggagugcauggcgagaauc

SEQ ID NO: 335285 - RNA, 32 nt, Homo Sapiens
auguuagaauaaauuuccagaacuuaguggga

SEQ ID NO: 335286 - RNA, 32 nt, Homo Sapiens
gaugcuugacccccauacucccaaccuugucc

SEQ ID NO: 335287 - RNA, 32 nt, Homo Sapiens
augcccccuucgcuccuccucucaucauuugc

SEQ ID NO: 335288 - RNA, 32 nt, Homo Sapiens
cagccgagggaccgauggacgaggggacaggc

SEQ ID NO: 335289 - RNA, 32 nt, Homo Sapiens
gaaggcagcggcagcuccacucagccaguacc

SEQ ID NO: 335290 - RNA, 32 nt, Homo Sapiens
uacaauuaauaaaugaucaaaaaauuugcauu

SEQ ID NO: 335291 - RNA, 32 nt, Homo Sapiens
uggccaugaaaaccucuuuguagugcuuggcu

SEQ ID NO: 335292 - RNA, 32 nt, Homo Sapiens
ggucuggagcgcgcgcuugaggaggcggccaa

SEQ ID NO: 335293 - RNA, 32 nt, Homo Sapiens
gcgcggccgggcgggagggaggucgaggaggc

SEQ ID NO: 335294 - RNA, 32 nt, Homo Sapiens
auauggcuuaguguuaacggggacuuaaauau

SEQ ID NO: 335295 - RNA, 32 nt, Homo Sapiens
cugcccagcgugaccaguggccaccucugcag

SEQ ID NO: 335296 - RNA, 32 nt, Homo Sapiens
gucggcggguccucggcgagacccggccccca

SEQ ID NO: 335297 - RNA, 32 nt, Homo Sapiens
caggcgugguggcgcauacuuguaaucccagc

SEQ ID NO: 335298 - RNA, 32 nt, Homo Sapiens
agcagcccucauugguccacgugcguccccac

SEQ ID NO: 335299 - RNA, 32 nt, Homo Sapiens
cgggcucccugcgucccgcuggugaccugccc

SEQ ID NO: 335300 - RNA, 32 nt, Homo Sapiens
aauccuaacaauagagauugcuuuggugacca

SEQ ID NO: 335301 - RNA, 32 nt, Homo Sapiens
cuacguguacagcucuggcccgugggccccgc

SEQ ID NO: 335302 - RNA, 28 nt, Homo Sapiens
caucauuaugugaacauuauagagugua

SEQ ID NO: 335303 - RNA, 32 nt, Homo Sapiens
ccuugauaaaauguacaaagcuaggguaggaa

SEQ ID NO: 335304 - RNA, 32 nt, Homo Sapiens
aaguuaaggggaggggguguaagagccagcga

SEQ ID NO: 335305 - RNA, 32 nt, Homo Sapiens
cucgacccucucccggccccuccccuucuuug

SEQ ID NO: 335306 - RNA, 32 nt, Homo Sapiens
aagguggcgggugguaagggggaugguggggc

SEQ ID NO: 335307 - RNA, 31 nt, Homo Sapiens
gagauuuuucuuaguaaauagauuauuguua

SEQ ID NO: 335308 - RNA, 32 nt, Homo Sapiens
auuggaauaagaagcaauuaaacaaguuugua

SEQ ID NO: 335309 - RNA, 32 nt, Homo Sapiens
uacauuucaacaccacccagccacacagccgc

SEQ ID NO: 335310 - RNA, 30 nt, Homo Sapiens
gcucaggcgcccgcagucgaugucaaacua

SEQ ID NO: 335311 - RNA, 32 nt, Homo Sapiens
uacauuucaaaccaauuucaaauuauuuugca

SEQ ID NO: 335312 - RNA, 32 nt, Homo Sapiens
ucucuguaucccccacccacuaucccauuugc

SEQ ID NO: 335313 - RNA, 32 nt, Homo Sapiens
caggcagcacgcugaggcccugcaggcccuga

SEQ ID NO: 335314 - RNA, 32 nt, Homo Sapiens
cccccaccaagccccccagucgcuguccaugc

SEQ ID NO: 335315 - RNA, 32 nt, Homo Sapiens
aaguccugcauaauagauaccucauuggaacu

SEQ ID NO: 335316 - RNA, 32 nt, Homo Sapiens
ggcaugguuggccucgcccagcuccuguaccc

SEQ ID NO: 335317 - RNA, 32 nt, Homo Sapiens
cuguccugccagcucugcugccaccucugaca

SEQ ID NO: 335318 - RNA, 32 nt, Homo Sapiens
ugucccgggucccagagugcacucugccccgc

SEQ ID NO: 335319 - RNA, 32 nt, Homo Sapiens
gaaucuauguuuuacauaaauagaauccaaau

SEQ ID NO: 335320 - RNA, 32 nt, Homo Sapiens
ccccucucccugguccucuccuacccacccau

SEQ ID NO: 335321 - RNA, 32 nt, Homo Sapiens
uagaggucuuuuugccucuuuuccccuuaaca

SEQ ID NO: 335322 - RNA, 32 nt, Homo Sapiens
gaguauguuauuucucuggggucugugauggg

SEQ ID NO: 335323 - RNA, 32 nt, Homo Sapiens
cacuacacaacacaggcgcugucccuacuucg

SEQ ID NO: 335324 - RNA, 32 nt, Homo Sapiens
uucuguaaaaggaagccauuuuaucugccuac

SEQ ID NO: 335325 - RNA, 32 nt, Homo Sapiens
ucauacaaacugcucagucauuuuggagaaau

SEQ ID NO: 335326 - RNA, 32 nt, Homo Sapiens
ccuccuccaccuccaccucucuucccagagac

SEQ ID NO: 335327 - RNA, 32 nt, Homo Sapiens
aaggaagaaaaaccgaucaauaccgucugugc

SEQ ID NO: 335328 - RNA, 32 nt, Homo Sapiens
aaaaaggaaauauuuuucaacuucuucuauau

SEQ ID NO: 335329 - RNA, 32 nt, Homo Sapiens
agcgagugcgaagcagacugcucgacaaacac

SEQ ID NO: 335330 - RNA, 32 nt, Homo Sapiens
ggaccgagccagggauggcgccagggcggugg

SEQ ID NO: 335331 - RNA, 32 nt, Homo Sapiens
uacuucuagaagaaagcagagugccagggagu

SEQ ID NO: 335332 - RNA, 32 nt, Homo Sapiens
ggccaggaaaaauuaugcuuagaaucuauuau

SEQ ID NO: 335333 - RNA, 32 nt, Homo Sapiens
gauccuuuuccagauagcuccagaguaugaug

SEQ ID NO: 335334 - RNA, 32 nt, Homo Sapiens
gcacccggggccugggugagacugcggcggcg

SEQ ID NO: 335335 - RNA, 32 nt, Homo Sapiens
aagcugucggugcugcugcugcugcugggccg

SEQ ID NO: 335336 - RNA, 28 nt, Homo Sapiens
ccccagguucuagucauguguuuuuuag

SEQ ID NO: 335337 - RNA, 32 nt, Homo Sapiens
gacaggccgagcgcggggcgccggaggcaggu

SEQ ID NO: 335338 - RNA, 32 nt, Homo Sapiens
ugaucaccucuuggggacccugccuaucccac

SEQ ID NO: 335339 - RNA, 32 nt, Homo Sapiens
ccagaaaaacaaaagacagcagaaaauaacca

SEQ ID NO: 335340 - RNA, 32 nt, Homo Sapiens
caaugugugcugaugcaagccuuuuucaguuc

SEQ ID NO: 335341 - RNA, 32 nt, Homo Sapiens
guuuccuggcccagcuucuccuucucccucug

SEQ ID NO: 335342 - RNA, 32 nt, Homo Sapiens
cauaggaaagaaaaaaguuauucaaaguauuu

SEQ ID NO: 335343 - RNA, 32 nt, Homo Sapiens
ccgucucaaaaaaaaaucauucaaguuucacu

SEQ ID NO: 335344 - RNA, 32 nt, Homo Sapiens
cugcucuguuuucucugugacaugaagcaaca

SEQ ID NO: 335345 - RNA, 32 nt, Homo Sapiens
gguuugguggggguagggaggggagaguuaac

SEQ ID NO: 335346 - RNA, 32 nt, Homo Sapiens
aagugaggucuggguaggaaaagagaagggaa

SEQ ID NO: 335347 - RNA, 32 nt, Homo Sapiens
gaaagauggugugagccauacacacagcagga

SEQ ID NO: 335348 - RNA, 32 nt, Homo Sapiens
auuuauuuucaaagcgagaauucuaucuacau

SEQ ID NO: 335349 - RNA, 28 nt, Homo Sapiens
gguaugggcucauuauauauguuuguuc

SEQ ID NO: 335350 - RNA, 32 nt, Homo Sapiens
acaguuuuuacaaaauacacuuacacaccguc

SEQ ID NO: 335351 - RNA, 32 nt, Homo Sapiens
uggauacgaacuagcaguacuuccuuccugac

SEQ ID NO: 335352 - RNA, 32 nt, Homo Sapiens
gcagaggcccucccaacgaacagcucucucag

SEQ ID NO: 335353 - RNA, 32 nt, Homo Sapiens
cagcaagacccaucucuacaagaaauuuaaaa

SEQ ID NO: 335354 - RNA, 32 nt, Homo Sapiens
gcuuucuuuguaauaaguauuuugccacaccu

SEQ ID NO: 335355 - RNA, 32 nt, Homo Sapiens
cagcaucauggaugaggcgccacucacggacg

SEQ ID NO: 335356 - RNA, 32 nt, Homo Sapiens
uggagcucuggaaggcuuggugggagugaauu

SEQ ID NO: 335357 - RNA, 32 nt, Homo Sapiens
uauugcuguugucauacucuuaggugccaaac

SEQ ID NO: 335358 - RNA, 32 nt, Homo Sapiens
cuggacucggcacugcuuugcccagggcacau

SEQ ID NO: 335359 - RNA, 32 nt, Homo Sapiens
ugccuggaaggcugcuggccaugugccucugc

SEQ ID NO: 335360 - RNA, 32 nt, Homo Sapiens
uucuuucaugauuuugcaguuuagacuugaua

SEQ ID NO: 335361 - RNA, 32 nt, Homo Sapiens
ucaugcaauaauuauucauauuugguaaguuu

SEQ ID NO: 335362 - RNA, 32 nt, Homo Sapiens
guauuuucacuaaaccacugccaguauaaaag

SEQ ID NO: 335363 - RNA, 32 nt, Homo Sapiens
agccuaggugggcuaccaugaccccgaggaag

SEQ ID NO: 335364 - RNA, 32 nt, Homo Sapiens
aaggaucaccccagcccccacagcccuggaau

SEQ ID NO: 335365 - RNA, 32 nt, Homo Sapiens
cggugggaaguagccuggggccccgcgacuga

SEQ ID NO: 335366 - RNA, 32 nt, Homo Sapiens
ucucccgggacuuuaacaccacgcucuccucc

SEQ ID NO: 335367 - RNA, 32 nt, Homo Sapiens
aaaaggaggaaugugaccuugaagauuuccaa

SEQ ID NO: 335368 - RNA, 32 nt, Homo Sapiens
cauggacagcuguuguuagaguagcagauuca

SEQ ID NO: 335369 - RNA, 28 nt, Homo Sapiens
guauguguggcuaccgcggguaugcgag

SEQ ID NO: 335370 - RNA, 32 nt, Homo Sapiens
uauuuguauccaacagaagauguuuauuauuu

SEQ ID NO: 335371 - RNA, 32 nt, Homo Sapiens
uccguagcguggguccaagaaacuauggaucc

SEQ ID NO: 335372 - RNA, 32 nt, Homo Sapiens
cucggaggggucugagcagcaagacacuccgg

SEQ ID NO: 335373 - RNA, 32 nt, Homo Sapiens
cgcuggagugcaguggugugaucauagcucac

SEQ ID NO: 335374 - RNA, 32 nt, Homo Sapiens
ugcuggagugcaguggcgugaucauagcucac

SEQ ID NO: 335375 - RNA, 32 nt, Homo Sapiens
cuucuugucauucuucauugcuuguuuguggu

SEQ ID NO: 335376 - RNA, 32 nt, Homo Sapiens
uaguuucagugugauuucuagagcuaauucaa

SEQ ID NO: 335377 - RNA, 32 nt, Homo Sapiens
auaccuuuggauuuaguguuucaucagcuguu

SEQ ID NO: 335378 - RNA, 32 nt, Homo Sapiens
guucuaccuuagggaaaagaaagggaaguaaa

SEQ ID NO: 335379 - RNA, 32 nt, Homo Sapiens
aaccauuaaaaugaaaaaugcauuagccaggu

SEQ ID NO: 335380 - RNA, 32 nt, Homo Sapiens
agcguucugugccaugcuagagcuugagcugu

SEQ ID NO: 335381 - RNA, 32 nt, Homo Sapiens
aagaggggagacgucagucuuuuuccuguggu

SEQ ID NO: 335382 - RNA, 32 nt, Homo Sapiens
gcuggaaaacuaaaggaaaaauacaaauguuu

SEQ ID NO: 335383 - RNA, 32 nt, Homo Sapiens
ggaacuacuauauauaugcaucuacccaagaa

SEQ ID NO: 335384 - RNA, 32 nt, Homo Sapiens
uuuggugucauucagcggcuggccagaggaug

SEQ ID NO: 335385 - RNA, 32 nt, Homo Sapiens
augugcuggucucauccuccccaguuuauauu

SEQ ID NO: 335386 - RNA, 32 nt, Homo Sapiens
gccucagaauaccaaaacaacaaaauuauaaa

SEQ ID NO: 335387 - RNA, 32 nt, Homo Sapiens
acacaagugcacagagcacacugcacacaugc

SEQ ID NO: 335388 - RNA, 32 nt, Homo Sapiens
agacuuaaaaauaaauacuauguguccauuga

SEQ ID NO: 335389 - RNA, 32 nt, Homo Sapiens
aguuggccaaacuuuuugauuuucauaaguuu

SEQ ID NO: 335390 - RNA, 32 nt, Homo Sapiens
aucuguccgacccacugggggugcucugcccu

SEQ ID NO: 335391 - RNA, 32 nt, Homo Sapiens
ucuucauacuuugaauggcaaacgcuauuuau

SEQ ID NO: 335392 - RNA, 32 nt, Homo Sapiens
ggcauugaggggauagaugaauacuaaauggu

SEQ ID NO: 335393 - RNA, 32 nt, Homo Sapiens
cuccaggcucugcucuguagcacacccuuggg

SEQ ID NO: 335394 - RNA, 32 nt, Homo Sapiens
acagcugaagugaccuagcagaccagagauuu

SEQ ID NO: 335395 - RNA, 32 nt, Homo Sapiens
cagagccagcucagcucugagccauucacaca

SEQ ID NO: 335396 - RNA, 32 nt, Homo Sapiens
caugcggaagcacgugggggaccugugccugc

SEQ ID NO: 335397 - RNA, 29 nt, Homo Sapiens
caguauguauguauguauguauggagaca

SEQ ID NO: 335398 - RNA, 32 nt, Homo Sapiens
cuucaccaggggcucccaguccuuccaucugg

SEQ ID NO: 335399 - RNA, 32 nt, Homo Sapiens
uaugcaauguuuuuauuacauacuucuacugg

SEQ ID NO: 335400 - RNA, 32 nt, Homo Sapiens
aguuugcuuggagcuccuggggccuaacaaaa

SEQ ID NO: 335401 - RNA, 32 nt, Homo Sapiens
aggaggcggcgcggcgggaggaguaggcggcg

SEQ ID NO: 335402 - RNA, 32 nt, Homo Sapiens
caaggaucaaaauaaaauucuuuagcaauaga

SEQ ID NO: 335403 - RNA, 32 nt, Homo Sapiens
gggcauuucugcauuugugccagcuaacacua

SEQ ID NO: 335404 - RNA, 28 nt, Homo Sapiens
uguuugaaagucaaacauuugaacauca

SEQ ID NO: 335405 - RNA, 32 nt, Homo Sapiens
agccagaggaagagggcggcgacggugguggu

SEQ ID NO: 335406 - RNA, 32 nt, Homo Sapiens
aaauauaacuuaaaaagugaaacuauaaaaag

SEQ ID NO: 335407 - RNA, 32 nt, Homo Sapiens
ugaccucaaggcaugguugcuauacauuuuuu

SEQ ID NO: 335408 - RNA, 32 nt, Homo Sapiens
gggaaaugcagcuuuaaaauggcuaaccacag

SEQ ID NO: 335409 - RNA, 32 nt, Homo Sapiens
accggacacucgucaccccagcccucgggucc

SEQ ID NO: 335410 - RNA, 32 nt, Homo Sapiens
cucuaccauccccggggcuggccccgcucucc

SEQ ID NO: 335411 - RNA, 32 nt, Homo Sapiens
gggguccccggggagaggaagagacagccccu

SEQ ID NO: 335412 - RNA, 32 nt, Homo Sapiens
gcuccugcugugucuuccgcuccagcuucgcc

SEQ ID NO: 335413 - RNA, 32 nt, Homo Sapiens
guaaaaaggaaguuggaaugggaguuggcggg

SEQ ID NO: 335414 - RNA, 32 nt, Homo Sapiens
cugagggcucccucagcccugggaagacacau

SEQ ID NO: 335415 - RNA, 32 nt, Homo Sapiens
gauaugaucccauuggagguaaauuguagcuu

SEQ ID NO: 335416 - RNA, 32 nt, Homo Sapiens
agguggaggaggagggucugccaagcuacugc

SEQ ID NO: 335417 - RNA, 32 nt, Homo Sapiens
uggaggcggcguggcguccgcucuggcuccga

SEQ ID NO: 335418 - RNA, 30 nt, Homo Sapiens
gacguaggagguggagguuguggaauucgc

SEQ ID NO: 335419 - RNA, 32 nt, Homo Sapiens
aauguuuucuucauuuuuaggaucuaucuagc

SEQ ID NO: 335420 - RNA, 32 nt, Homo Sapiens
gaagcagcgagggggcccagcuggcgagacug

SEQ ID NO: 335421 - RNA, 32 nt, Homo Sapiens
uuaaggucccauguuauauguacuucauacau

SEQ ID NO: 335422 - RNA, 32 nt, Homo Sapiens
ugccgagaagcccgugcccccgggagggcugc

SEQ ID NO: 335423 - RNA, 30 nt, Homo Sapiens
ccaaagccacuugccaugccgaccgucauu

SEQ ID NO: 335424 - RNA, 32 nt, Homo Sapiens
ugugugguggccugggacaagccuggacuucu

SEQ ID NO: 335425 - RNA, 32 nt, Homo Sapiens
guuucugugucugaugaguaucucucugcagc

SEQ ID NO: 335426 - RNA, 32 nt, Homo Sapiens
cugcaucaggggcuaggcucuggcugggcccg

SEQ ID NO: 335427 - RNA, 32 nt, Homo Sapiens
cauuuuuccuuugcuuucucuuuacuuuagac

SEQ ID NO: 335428 - RNA, 32 nt, Homo Sapiens
uuaaguucucagagacccaccgcgucugccuc

SEQ ID NO: 335429 - RNA, 32 nt, Homo Sapiens
ggguuggggguuggguggggcuggacggggac

SEQ ID NO: 335430 - RNA, 32 nt, Homo Sapiens
ucaccgccgggcccguggcccugcgcggagcu

SEQ ID NO: 335431 - RNA, 32 nt, Homo Sapiens
ggcacuacagaauccuucucuuucuuaaggca

SEQ ID NO: 335432 - RNA, 32 nt, Homo Sapiens
uggucuugcgggaggcgugggcugggauugcg

SEQ ID NO: 335433 - RNA, 32 nt, Homo Sapiens
gccgcccgcgcccuccgcaccacuagccucuc

SEQ ID NO: 335434 - RNA, 32 nt, Homo Sapiens
uguuuccuucuauuucaguaugguuuuaauaa

SEQ ID NO: 335435 - RNA, 32 nt, Homo Sapiens
aagucuguauaaacuuguuuugaaauacaguc

SEQ ID NO: 335436 - RNA, 30 nt, Homo Sapiens
ccucucucuucugucucagaagcucugugu

SEQ ID NO: 335437 - RNA, 32 nt, Homo Sapiens
gaggucgugggucuucugagcccagcugauac

SEQ ID NO: 335438 - RNA, 32 nt, Homo Sapiens
gccugucgcucuucccuucucucugaccagca

SEQ ID NO: 335439 - RNA, 32 nt, Homo Sapiens
cuguuugcaguuuuuagccugauuuugggguc

SEQ ID NO: 335440 - RNA, 32 nt, Homo Sapiens
ugcccaccgucccuguccacgccccgcccuuc

SEQ ID NO: 335441 - RNA, 32 nt, Homo Sapiens
uauuuccgacgaugccugauugagaucuuugg

SEQ ID NO: 335442 - RNA, 32 nt, Homo Sapiens
ugggcuggguuugguuuuugcugcugguagaa

SEQ ID NO: 335443 - RNA, 32 nt, Homo Sapiens
ucauaggacuaucuccaccacccccaguuagc

SEQ ID NO: 335444 - RNA, 32 nt, Homo Sapiens
agcagaaccccacugucccuccccuuggugcu

SEQ ID NO: 335445 - RNA, 32 nt, Homo Sapiens
ugcgcaggacggcacgaggccaguucaugaug

SEQ ID NO: 335446 - RNA, 32 nt, Homo Sapiens
ucucugacccucucugugcccucccccgcccc

SEQ ID NO: 335447 - RNA, 31 nt, Homo Sapiens
ucuccuuguaagccuugaagaaguaugugag

SEQ ID NO: 335448 - RNA, 32 nt, Homo Sapiens
uuggcucacagcaaggccuuuucacagaggau

SEQ ID NO: 335449 - RNA, 32 nt, Homo Sapiens
ugcccccacugacuccucuccucucccuuuga

SEQ ID NO: 335450 - RNA, 32 nt, Homo Sapiens
gucugggugucugaguuccaaaaaaugugugu

SEQ ID NO: 335451 - RNA, 32 nt, Homo Sapiens
cucgugaucugccugccuuggccuuauuauuu

SEQ ID NO: 335452 - RNA, 32 nt, Homo Sapiens
auacagcauaagugaaucaugggcauuucccu

SEQ ID NO: 335453 - RNA, 32 nt, Homo Sapiens
gugacagacaccucggcucuccuugaauaaga

SEQ ID NO: 335454 - RNA, 32 nt, Homo Sapiens
aaagacacagaaauauagugcagagugggaau

SEQ ID NO: 335455 - RNA, 32 nt, Homo Sapiens
aaaugugcauuccucuuuuagaguagcuguau

SEQ ID NO: 335456 - RNA, 32 nt, Homo Sapiens
auaaaguaugaucuuuaugauuuuuucccucu

SEQ ID NO: 335457 - RNA, 32 nt, Homo Sapiens
guaauguggcagcugggaccauggccagcuuc

SEQ ID NO: 335458 - RNA, 32 nt, Homo Sapiens
aaggggcugcggggaggccgcagcaccuucug

SEQ ID NO: 335459 - RNA, 32 nt, Homo Sapiens
cugucccuacuaaagauacaaacaauuagccg

SEQ ID NO: 335460 - RNA, 32 nt, Homo Sapiens
uucaaaugcugccuuugacaguucuuggaauu

SEQ ID NO: 335461 - RNA, 32 nt, Homo Sapiens
caauucaguuucagcucuggauuacuucaguu

SEQ ID NO: 335462 - RNA, 30 nt, Homo Sapiens
acaucaggagguggccuugagaagcugagc

SEQ ID NO: 335463 - RNA, 32 nt, Homo Sapiens
gccaaccccucuacucuccaccucagccccca

SEQ ID NO: 335464 - RNA, 32 nt, Homo Sapiens
gcuggauuuucaucaucagaaauuuccaacuc

SEQ ID NO: 335465 - RNA, 32 nt, Homo Sapiens
cuacaauaagcacuuguguuuuaugacaugau

SEQ ID NO: 335466 - RNA, 32 nt, Homo Sapiens
aaaauacucaauuuaauaaccaaaaguaucua

SEQ ID NO: 335467 - RNA, 32 nt, Homo Sapiens
uugagccuuucugucucauuuggaaccagggg

SEQ ID NO: 335468 - RNA, 32 nt, Homo Sapiens
aauauuguugacuuuuaaaacaucugcuggau

SEQ ID NO: 335469 - RNA, 32 nt, Homo Sapiens
ugcagcagccucugguaccaccucugagucaa

SEQ ID NO: 335470 - RNA, 32 nt, Homo Sapiens
aaacacggggaagccaggacuggccgucacgu

SEQ ID NO: 335471 - RNA, 32 nt, Homo Sapiens
gaccucauaguuacaggucauuauaucuacua

SEQ ID NO: 335472 - RNA, 32 nt, Homo Sapiens
agccucuccccgcucuggauccugcacucuaa

SEQ ID NO: 335473 - RNA, 32 nt, Homo Sapiens
gcuaaagaauaaauaaaucugacaaaaugggu

SEQ ID NO: 335474 - RNA, 32 nt, Homo Sapiens
ucacuucccaggagggcggcggggcagaggcg

SEQ ID NO: 335475 - RNA, 32 nt, Homo Sapiens
agcucagaacuaacugugagauguaccaugaa

SEQ ID NO: 335476 - RNA, 32 nt, Homo Sapiens
ccagcuccugccacccaauggcucuuuaggcc

SEQ ID NO: 335477 - RNA, 32 nt, Homo Sapiens
ccaucucuacuaaaauacaaaaaauuagcugg

SEQ ID NO: 335478 - RNA, 32 nt, Homo Sapiens
ugaagccgccccagccuuaguccccagggcca

SEQ ID NO: 335479 - RNA, 32 nt, Homo Sapiens
agccuaugucuggcagaugagggcuggcugcc

SEQ ID NO: 335480 - RNA, 32 nt, Homo Sapiens
auccaugccagggagcucuuugacucucgugg

SEQ ID NO: 335481 - RNA, 32 nt, Homo Sapiens
ccuccaggaaaagaagcaaaaagaaguucaga

SEQ ID NO: 335482 - RNA, 32 nt, Homo Sapiens
cccucuguucuuccugccuccagccgcccgcg

SEQ ID NO: 335483 - RNA, 32 nt, Homo Sapiens
acagacauuuaccaccuggggacccaaaagag

SEQ ID NO: 335484 - RNA, 32 nt, Homo Sapiens
gugauucuuuuguaacgagucuuucaugaugu

SEQ ID NO: 335485 - RNA, 32 nt, Homo Sapiens
uccaucucugucaucaucuucaucacacccaa

SEQ ID NO: 335486 - RNA, 32 nt, Homo Sapiens
aagaagcccaaccuucuggccugggcugugcu

SEQ ID NO: 335487 - RNA, 32 nt, Homo Sapiens
gauguuuaccccaaaacaagugucaauuaaga

SEQ ID NO: 335488 - RNA, 32 nt, Homo Sapiens
cuucuguccuguggaguucccuggacaccuug

SEQ ID NO: 335489 - RNA, 32 nt, Homo Sapiens
acuagugccuaaauguaguaaaggcugcuuaa

SEQ ID NO: 335490 - RNA, 32 nt, Homo Sapiens
aaagcuggagaagaagcagcagaaggagcagg

SEQ ID NO: 335491 - RNA, 32 nt, Homo Sapiens
accccaaaucucuuccccagaguuucaggauc

SEQ ID NO: 335492 - RNA, 32 nt, Homo Sapiens
uccuuucugaucuucacuaagaacaaaagaag

SEQ ID NO: 335493 - RNA, 32 nt, Homo Sapiens
uagcugggauuacaggcaugcgccaccaugcc

SEQ ID NO: 335494 - RNA, 32 nt, Homo Sapiens
augcagccccugauguucuguuccaccguagu

SEQ ID NO: 335495 - RNA, 32 nt, Homo Sapiens
cagcugggauuacagguaugcgccaccaugcc

SEQ ID NO: 335496 - RNA, 32 nt, Homo Sapiens
ucccucgggucucaggucauggcggucgcggg

SEQ ID NO: 335497 - RNA, 32 nt, Homo Sapiens
uguuaaauuuuuugcugcaaaauguauuucuu

SEQ ID NO: 335498 - RNA, 32 nt, Homo Sapiens
cagacuuucugcauuugagaaacaugacaaag

SEQ ID NO: 335499 - RNA, 32 nt, Homo Sapiens
ggaccccggcuccacacccacauccagccugc

SEQ ID NO: 335500 - RNA, 31 nt, Homo Sapiens
aaaaccauugccugcaccccaagggccccau

SEQ ID NO: 335501 - RNA, 32 nt, Homo Sapiens
gguuuacggaacaacucuuacuuuuaaaaauu

SEQ ID NO: 335502 - RNA, 32 nt, Homo Sapiens
ucagccccagguagcagaacucacguucccac

SEQ ID NO: 335503 - RNA, 32 nt, Homo Sapiens
cuuuguaaauuaauaugaagaagauauauccc

SEQ ID NO: 335504 - RNA, 32 nt, Homo Sapiens
ucggggcagaggaucucgggcuaggcuugagg

SEQ ID NO: 335505 - RNA, 32 nt, Homo Sapiens
cacaagcgccgccuggaggaggaggccgcgcu

SEQ ID NO: 335506 - RNA, 32 nt, Homo Sapiens
uuuaacuuuuuguggaggaauuuuacauggag

SEQ ID NO: 335507 - RNA, 32 nt, Homo Sapiens
aaccagggguguguaugaaggggggugacaag

SEQ ID NO: 335508 - RNA, 32 nt, Homo Sapiens
uugcuaggagcauuugcuuccacauauauuua

SEQ ID NO: 335509 - RNA, 32 nt, Homo Sapiens
uucugaguauaauguuauuacaugguccuaaa

SEQ ID NO: 335510 - RNA, 32 nt, Homo Sapiens
ucaagugguggaacauggugcccuggacagcu

SEQ ID NO: 335511 - RNA, 32 nt, Homo Sapiens
caaggccuuccacuguccccaggccuuccaaa

SEQ ID NO: 335512 - RNA, 28 nt, Homo Sapiens
cacaugcagggucagggugcuuugaaag

SEQ ID NO: 335513 - RNA, 32 nt, Homo Sapiens
cucggcgaagcacuuccgucagccucgggcgg

SEQ ID NO: 335514 - RNA, 32 nt, Homo Sapiens
uccugguucagcagggaagauucucuuggacc

SEQ ID NO: 335515 - RNA, 32 nt, Homo Sapiens
cggccaggccccuccgccccuaacacccgcgc

SEQ ID NO: 335516 - RNA, 32 nt, Homo Sapiens
agcuuccaacuccaccugacagucccgagcag

SEQ ID NO: 335517 - RNA, 32 nt, Homo Sapiens
uccauaaauuaucauugaauuuuuuguuuauu

SEQ ID NO: 335518 - RNA, 32 nt, Homo Sapiens
gaacgggcuugggaacagggucgggaacaggc

SEQ ID NO: 335519 - RNA, 32 nt, Homo Sapiens
cuuuccggaaacaaaauccuuuucuucauuug

SEQ ID NO: 335520 - RNA, 32 nt, Homo Sapiens
gggcucgauggccccaccuggacccuagacaa

SEQ ID NO: 335521 - RNA, 32 nt, Homo Sapiens
gagcaucaacaaguacaaaauucuugucuuaa

SEQ ID NO: 335522 - RNA, 32 nt, Homo Sapiens
ugugugcccaaaagcugucaaguggccaagac

SEQ ID NO: 335523 - RNA, 32 nt, Homo Sapiens
ggcaccacacugggcuuuggagacacugcggg

SEQ ID NO: 335524 - RNA, 32 nt, Homo Sapiens
augaagccagcugccaauuacauccucccaac

SEQ ID NO: 335525 - RNA, 32 nt, Homo Sapiens
gccccucggcucugacaggccgcggccuucug

SEQ ID NO: 335526 - RNA, 32 nt, Homo Sapiens
gcucuucgugauugggggcgccaggcagggcg

SEQ ID NO: 335527 - RNA, 32 nt, Homo Sapiens
gccuacggcccggcccccacgcgcccugcucu

SEQ ID NO: 335528 - RNA, 32 nt, Homo Sapiens
uuacaggugugagccaccacauccagccuaac

SEQ ID NO: 335529 - RNA, 32 nt, Homo Sapiens
cccuaagcaguuuccagccugaguuuuccuuu

SEQ ID NO: 335530 - RNA, 32 nt, Homo Sapiens
aguuaugcacagacugauaauaaaccucuaaa

SEQ ID NO: 335531 - RNA, 32 nt, Homo Sapiens
agcagagcagcagcccugcugcugaaggcccu

SEQ ID NO: 335532 - RNA, 32 nt, Homo Sapiens
uacugaauuccauaauacauaacauucaauuu

SEQ ID NO: 335533 - RNA, 32 nt, Homo Sapiens
gacucucccuuuguccuccccauagagcuggg

SEQ ID NO: 335534 - RNA, 32 nt, Homo Sapiens
auucuccuugcacuuuaccuguucuuuuccag

SEQ ID NO: 335535 - RNA, 32 nt, Homo Sapiens
aucucugccuggugagcgcccgccggcccaca

SEQ ID NO: 335536 - RNA, 32 nt, Homo Sapiens
ccuuguugauuuaucaucuauuauuugaauuc

SEQ ID NO: 335537 - RNA, 32 nt, Homo Sapiens
cuuauucuuccacuuggccugaguuuuuauaa

SEQ ID NO: 335538 - RNA, 32 nt, Homo Sapiens
uguuucuccagucuuggcuacaugacaaagga

SEQ ID NO: 335539 - RNA, 32 nt, Homo Sapiens
uaacccugacuucuaagccaucaauuucaugu

SEQ ID NO: 335540 - RNA, 32 nt, Homo Sapiens
cauggugggacgucgcccgcggcuucggggac

SEQ ID NO: 335541 - RNA, 32 nt, Homo Sapiens
gaugcagaugugaccuaggaugauggaccgcc

SEQ ID NO: 335542 - RNA, 32 nt, Homo Sapiens
ccauggcuuacagcuucuacccggccccaagg

SEQ ID NO: 335543 - RNA, 32 nt, Homo Sapiens
aaauguaaacacauuauuagcauggacuuuua

SEQ ID NO: 335544 - RNA, 32 nt, Homo Sapiens
aaaaugcuauaagugagaugguaugaaauaaa

SEQ ID NO: 335545 - RNA, 32 nt, Homo Sapiens
uucuaacugccuucuuuuuucucacagaggug

SEQ ID NO: 335546 - RNA, 32 nt, Homo Sapiens
cgucuagggccggcucgugaacagccacauau

SEQ ID NO: 335547 - RNA, 32 nt, Homo Sapiens
acgugaugccgcgccugccguguaagaaggug

SEQ ID NO: 335548 - RNA, 32 nt, Homo Sapiens
aacagcaugcauggagucgagccugcuggcuc

SEQ ID NO: 335549 - RNA, 32 nt, Homo Sapiens
aagggacuuaacaacuaaagggcaacauauag

SEQ ID NO: 335550 - RNA, 32 nt, Homo Sapiens
cgcaggcgcacgguacccgugcugcagucggg

SEQ ID NO: 335551 - RNA, 32 nt, Homo Sapiens
gccagccagccugucccaccacagcgggcucc

SEQ ID NO: 335552 - RNA, 32 nt, Homo Sapiens
uauuaaacaucauacucugacaucuaaucuga

SEQ ID NO: 335553 - RNA, 32 nt, Homo Sapiens
ucaaggaacuguguguuuccaacaucauggua

SEQ ID NO: 335554 - RNA, 32 nt, Homo Sapiens
ccccgaugcuggcuggagaaauccgguguaug

SEQ ID NO: 335555 - RNA, 32 nt, Homo Sapiens
gaggcggacgcggcccgggccccguggggaug

SEQ ID NO: 335556 - RNA, 32 nt, Homo Sapiens
gcaggcggagagcuuuccugcgaggcugugga

SEQ ID NO: 335557 - RNA, 32 nt, Homo Sapiens
uugaugaaacacaacugaaaacaugagggacu

SEQ ID NO: 335558 - RNA, 32 nt, Homo Sapiens
acacugaguuuagaaaaauguaagaaaaucau

SEQ ID NO: 335559 - RNA, 32 nt, Homo Sapiens
augcugaagaucucugcucugcuuaugggacc

SEQ ID NO: 335560 - RNA, 32 nt, Homo Sapiens
auuaaauaaauauuuuuacuuuggacccgauu

SEQ ID NO: 335561 - RNA, 32 nt, Homo Sapiens
uuuauagugucugccaugccauguggaaauac

SEQ ID NO: 335562 - RNA, 32 nt, Homo Sapiens
ccaguacuuuacccuuaauacacauaagauaa

SEQ ID NO: 335563 - RNA, 32 nt, Homo Sapiens
accagccugggcaacauagugagacugucucu

SEQ ID NO: 335564 - RNA, 32 nt, Homo Sapiens
uuuuguuuuuaaaacuuauuccaauugcuaaa

SEQ ID NO: 335565 - RNA, 32 nt, Homo Sapiens
uuccgggccccggagauggcgccuccaccggg

SEQ ID NO: 335566 - RNA, 32 nt, Homo Sapiens
ccuugcuggcugugucccaagcuagguggcau

SEQ ID NO: 335567 - RNA, 32 nt, Homo Sapiens
aguucuuaguauuuuauaucagcaaaauaacu

SEQ ID NO: 335568 - RNA, 32 nt, Homo Sapiens
uuccaggcaugugacuugagccagggacaggc

SEQ ID NO: 335569 - RNA, 32 nt, Homo Sapiens
cucucugccacugaacauuuugaaauauuuuu

SEQ ID NO: 335570 - RNA, 32 nt, Homo Sapiens
uggaccccaucccaggaccucccuaucagcug

SEQ ID NO: 335571 - RNA, 31 nt, Homo Sapiens
aacucaacaaauuugguguauuguccccuua

SEQ ID NO: 335572 - RNA, 32 nt, Homo Sapiens
gaaacgcagcgccagcagcaucucaucuaccc

SEQ ID NO: 335573 - RNA, 29 nt, Homo Sapiens
cuacuucggggacugaggugggaggauca

SEQ ID NO: 335574 - RNA, 32 nt, Homo Sapiens
gauggaaagcuacugauuguacugaagcucgc

SEQ ID NO: 335575 - RNA, 32 nt, Homo Sapiens
caggggugcgccuccucugcccugcccaccag

SEQ ID NO: 335576 - RNA, 32 nt, Homo Sapiens
cucagguuaauuuuugucugaucuuacgaugc

SEQ ID NO: 335577 - RNA, 32 nt, Homo Sapiens
uuaugcuauuauucuguaaacauuuuaauuuu

SEQ ID NO: 335578 - RNA, 32 nt, Homo Sapiens
gucucuccagcaucaauuccaucagcacaaag

SEQ ID NO: 335579 - RNA, 32 nt, Homo Sapiens
ucaacuuuguguuuuuaaauguuuugacgauu

SEQ ID NO: 335580 - RNA, 32 nt, Homo Sapiens
gcaguaugaagauaaaauuacauaguauuacc

SEQ ID NO: 335581 - RNA, 32 nt, Homo Sapiens
gaugaagaacagagccuguuucuuucucagug

SEQ ID NO: 335582 - RNA, 32 nt, Homo Sapiens
guuaugucucuuucggguuuugguaucaggau

SEQ ID NO: 335583 - RNA, 32 nt, Homo Sapiens
ugucuuuucuaccucuuucucuugcagugaua

SEQ ID NO: 335584 - RNA, 32 nt, Homo Sapiens
aagcaagaaaccgacagauguugaggagaaug

SEQ ID NO: 335585 - RNA, 32 nt, Homo Sapiens
cgcauacccacccgccgccacggccacaagcc

SEQ ID NO: 335586 - RNA, 32 nt, Homo Sapiens
aggagaaugggauauuaacauaaaauuauauu

SEQ ID NO: 335587 - RNA, 32 nt, Homo Sapiens
gguuuuucuccaucuuuuuuucgucuuuacaa

SEQ ID NO: 335588 - RNA, 29 nt, Homo Sapiens
uggggauggggacagaggacauaggggac

SEQ ID NO: 335589 - RNA, 32 nt, Homo Sapiens
ccaggccuggggaccgguaagauccaugucac

SEQ ID NO: 335590 - RNA, 32 nt, Homo Sapiens
gugccugugggguggggaggcguaggggucua

SEQ ID NO: 335591 - RNA, 32 nt, Homo Sapiens
gggugaagggauuaaucuuuuaaaaauaaaug

SEQ ID NO: 335592 - RNA, 32 nt, Homo Sapiens
aaaaguacgacuggaaugacuuugaaagggaa

SEQ ID NO: 335593 - RNA, 32 nt, Homo Sapiens
ggccaucggggagccgggaggggggacugcga

SEQ ID NO: 335594 - RNA, 29 nt, Homo Sapiens
gagaaauaaaguuaguuucuauuuuaugu

SEQ ID NO: 335595 - RNA, 32 nt, Homo Sapiens
guuccucaauuucaaagacucacuucuauaac

SEQ ID NO: 335596 - RNA, 32 nt, Homo Sapiens
agggcugcaccagcugcauggaugccacaccg

SEQ ID NO: 335597 - RNA, 32 nt, Homo Sapiens
cacagcagucugccuccccuaugggacucccu

SEQ ID NO: 335598 - RNA, 32 nt, Homo Sapiens
auaagaauuuggcauuuuggaacuuuguccca

SEQ ID NO: 335599 - RNA, 32 nt, Homo Sapiens
aaaagauguacaauccugcauccuugcuuauu

SEQ ID NO: 335600 - RNA, 32 nt, Homo Sapiens
aaauccaauagucugccacaagggcaguggaa

SEQ ID NO: 335601 - RNA, 32 nt, Homo Sapiens
uuucuuucgccagccuuacgggcccgaacccu

SEQ ID NO: 335602 - RNA, 32 nt, Homo Sapiens
cguggcagggcccucucugugccucuccuccu

SEQ ID NO: 335603 - RNA, 31 nt, Homo Sapiens
uuauuauuaugauaguugccaaauguggguu

SEQ ID NO: 335604 - RNA, 32 nt, Homo Sapiens
acccacuccucccagaauaugcuuagaggugc

SEQ ID NO: 335605 - RNA, 32 nt, Homo Sapiens
cucuugguaucugugaaucuuuccaagcacca

SEQ ID NO: 335606 - RNA, 32 nt, Homo Sapiens
cugcaugugucugauaauaaagacccugugcu

SEQ ID NO: 335607 - RNA, 32 nt, Homo Sapiens
caagaaaaaugcugaggccucgggucaagauu

SEQ ID NO: 335608 - RNA, 32 nt, Homo Sapiens
uucugcuaaaauugguuaauugguuccuuugc

SEQ ID NO: 335609 - RNA, 32 nt, Homo Sapiens
ucccccaggaaagauuucaaaggcaagcgcca

SEQ ID NO: 335610 - RNA, 32 nt, Homo Sapiens
cccgagugugcagcugccgccacugccgggaa

SEQ ID NO: 335611 - RNA, 32 nt, Homo Sapiens
aggcaggaaccccgcuggcagaugaccaggac

SEQ ID NO: 335612 - RNA, 32 nt, Homo Sapiens
cugacaggcucaccggcauugcagcuccguca

SEQ ID NO: 335613 - RNA, 32 nt, Homo Sapiens
auucaaacugguuuuucccuuuccuguauuau

SEQ ID NO: 335614 - RNA, 32 nt, Homo Sapiens
caguggugcaaucuuggugcaaucuuggcuca

SEQ ID NO: 335615 - RNA, 32 nt, Homo Sapiens
uugaaagugucugaacuuuaaaaaguuuacau

SEQ ID NO: 335616 - RNA, 32 nt, Homo Sapiens
gacacauaaaaacucugggaaaugacuaggau

SEQ ID NO: 335617 - RNA, 32 nt, Homo Sapiens
cucuauuauuaacaaaacuaaguuuuaaaaau

SEQ ID NO: 335618 - RNA, 32 nt, Homo Sapiens
ugccagcagcugucggugccgcgcucgacacc

SEQ ID NO: 335619 - RNA, 32 nt, Homo Sapiens
gcggccgcuccuucccacccgcuuggcagccg

SEQ ID NO: 335620 - RNA, 32 nt, Homo Sapiens
ugcuccuggagugccuggcccggagugccugc

SEQ ID NO: 335621 - RNA, 32 nt, Homo Sapiens
cuccugccaugucaaggccccccaaagagccu

SEQ ID NO: 335622 - RNA, 32 nt, Homo Sapiens
gagcaauaaaaaguuuucagugaaaugugcaa

SEQ ID NO: 335623 - RNA, 32 nt, Homo Sapiens
cgccgggacaccagggcuccgcgcuccgcacu

SEQ ID NO: 335624 - RNA, 32 nt, Homo Sapiens
cccacgcuggguuuuggccaccuccacaaugc

SEQ ID NO: 335625 - RNA, 32 nt, Homo Sapiens
uaacaucucagaaaacucugguaaaugaucac

SEQ ID NO: 335626 - RNA, 32 nt, Homo Sapiens
cugugguccuuuucuuccccaacaacagauag

SEQ ID NO: 335627 - RNA, 32 nt, Homo Sapiens
uucugucugaccagagccucagggaaaucccc

SEQ ID NO: 335628 - RNA, 32 nt, Homo Sapiens
auuauugaagagguggcgcccgacgguagagu

SEQ ID NO: 335629 - RNA, 32 nt, Homo Sapiens
uagcugaagccgaaguaugaacaguccauuuu

SEQ ID NO: 335630 - RNA, 32 nt, Homo Sapiens
agagcuggcuuccaggcaaggcugggugggga

SEQ ID NO: 335631 - RNA, 32 nt, Homo Sapiens
auagaaggggggcuauuuuaaaugucaagguc

SEQ ID NO: 335632 - RNA, 32 nt, Homo Sapiens
gggaaacucacagaugagcugaucuguaaguc

SEQ ID NO: 335633 - RNA, 32 nt, Homo Sapiens
cuguagcuauguggaagguaaaaauaguggug

SEQ ID NO: 335634 - RNA, 31 nt, Homo Sapiens
cagcuauggcauaacaccgugagauguugca

SEQ ID NO: 335635 - RNA, 32 nt, Homo Sapiens
ggcccaggaaugggggcgcugguugggcuugg

SEQ ID NO: 335636 - RNA, 32 nt, Homo Sapiens
ucuuccucucagccuuccgcccggugaggaag

SEQ ID NO: 335637 - RNA, 32 nt, Homo Sapiens
cccuucuuggcaucaaggaacaccagcuacaa

SEQ ID NO: 335638 - RNA, 32 nt, Homo Sapiens
uuugcgcccggggccaugcccgggcugugcaa

SEQ ID NO: 335639 - RNA, 32 nt, Homo Sapiens
acugcgcagcgggaccgugcgcggccuccgcu

SEQ ID NO: 335640 - RNA, 32 nt, Homo Sapiens
ucacuucucccugggcucccaggcccuccugc

SEQ ID NO: 335641 - RNA, 32 nt, Homo Sapiens
ccacggagcuuugugugagggaucucaucgcu

SEQ ID NO: 335642 - RNA, 32 nt, Homo Sapiens
cuuguugcuuuacaauaaaacaugagaaccug

SEQ ID NO: 335643 - RNA, 32 nt, Homo Sapiens
gaugacaaucauuguggaagcagaagguuguc

SEQ ID NO: 335644 - RNA, 32 nt, Homo Sapiens
uugacaacgaagaugaaaaugaguaguguaaa

SEQ ID NO: 335645 - RNA, 32 nt, Homo Sapiens
cuuccugcgcuugcaagcgccacgcugcccac

SEQ ID NO: 335646 - RNA, 32 nt, Homo Sapiens
acuaaacauaucugcuuauaucaaagaguaac

SEQ ID NO: 335647 - RNA, 32 nt, Homo Sapiens
aggaucggcccgagacccaggccaugcccacu

SEQ ID NO: 335648 - RNA, 32 nt, Homo Sapiens
augcugggcaucuaugcagagccaccuuuugg

SEQ ID NO: 335649 - RNA, 32 nt, Homo Sapiens
gggaucuuugcagaucuugcuccuuucauucu

SEQ ID NO: 335650 - RNA, 32 nt, Homo Sapiens
cauccagaguagagaccccuguuagccagccc

SEQ ID NO: 335651 - RNA, 32 nt, Homo Sapiens
aacugaaaaaucagauuguuuugcaguccuuc

SEQ ID NO: 335652 - RNA, 32 nt, Homo Sapiens
uucaaaggaguaccuuuacuuacaugugcuuu

SEQ ID NO: 335653 - RNA, 32 nt, Homo Sapiens
cacagucuggauguguuuacugaaacauuuua

SEQ ID NO: 335654 - RNA, 32 nt, Homo Sapiens
ugagagagauuauaagaagaagggcagauaau

SEQ ID NO: 335655 - RNA, 32 nt, Homo Sapiens
uuuggaauauaaauuccccaugcuaguauagu

SEQ ID NO: 335656 - RNA, 32 nt, Homo Sapiens
uuuuuaaagauaauuugcacaaacacguuugu

SEQ ID NO: 335657 - RNA, 32 nt, Homo Sapiens
agguggguagagagagcaaggagggcaggaca

SEQ ID NO: 335658 - RNA, 32 nt, Homo Sapiens
cuauuuuugacuguagccacagcugcuguucu

SEQ ID NO: 335659 - RNA, 32 nt, Homo Sapiens
ccuauaugucuguucagagaugggaucucaag

SEQ ID NO: 335660 - RNA, 32 nt, Homo Sapiens
gccaaccuaagagcuucaaaaucgggauuccu

SEQ ID NO: 335661 - RNA, 32 nt, Homo Sapiens
cagugcacagagcccucuccagcccugcuagu

SEQ ID NO: 335662 - RNA, 32 nt, Homo Sapiens
acaccuggggcugcaucuccgggacaccuggg

SEQ ID NO: 335663 - RNA, 32 nt, Homo Sapiens
uagaauuaagauaacuuugauuuuauagcuuu

SEQ ID NO: 335664 - RNA, 32 nt, Homo Sapiens
guaucugucaggcugucaggcugucagguugu

SEQ ID NO: 335665 - RNA, 32 nt, Homo Sapiens
ucaugaauaauaauguaagaaaacauuuguca

SEQ ID NO: 335666 - RNA, 32 nt, Homo Sapiens
cucuucuccgugaccuuucucuagccagggag

SEQ ID NO: 335667 - RNA, 32 nt, Homo Sapiens
auaugagaauauaccuuauuuauuuuugugua

SEQ ID NO: 335668 - RNA, 32 nt, Homo Sapiens
ucauccaaacuccaagaccugccucaccucac

SEQ ID NO: 335669 - RNA, 32 nt, Homo Sapiens
gaaaucauccguugcccuuccggaucuauccc

SEQ ID NO: 335670 - RNA, 32 nt, Homo Sapiens
cuuugcacugaagagaaucuaggguguuugau

SEQ ID NO: 335671 - RNA, 30 nt, Homo Sapiens
gauggagcauugaugggggagaucagaggg

SEQ ID NO: 335672 - RNA, 31 nt, Homo Sapiens
ccuuaguaaaguccuugacuaacugaacuag

SEQ ID NO: 335673 - RNA, 32 nt, Homo Sapiens
cagaaauggaaaucauuggucaguuuaaccug

SEQ ID NO: 335674 - RNA, 32 nt, Homo Sapiens
ucagcuuguauauagagauuguacauuuauuu

SEQ ID NO: 335675 - RNA, 32 nt, Homo Sapiens
aguuuuauaacucaaucaugaaugaaccaugu

SEQ ID NO: 335676 - RNA, 32 nt, Homo Sapiens
gagaggcccggcuccccucccggcgcccucug

SEQ ID NO: 335677 - RNA, 32 nt, Homo Sapiens
uaaugugcauaaauuuauggcaaaaacuuaaa

SEQ ID NO: 335678 - RNA, 32 nt, Homo Sapiens
ucagccauuuccccagguuguuacuuucuuag

SEQ ID NO: 335679 - RNA, 32 nt, Homo Sapiens
gucaaugcgcaaaaugcagcuugugugcaaaa

SEQ ID NO: 335680 - RNA, 32 nt, Homo Sapiens
ugggaaguuguugcuuaaaauuuuauaucacc

SEQ ID NO: 335681 - RNA, 32 nt, Homo Sapiens
gacaguuguauuuauuuuuuuaaguuacaaua

SEQ ID NO: 335682 - RNA, 32 nt, Homo Sapiens
ucauuuuaucuaauugugagucuucacagaga

SEQ ID NO: 335683 - RNA, 32 nt, Homo Sapiens
cgggagcggcggggcgugccuggccugcggga

SEQ ID NO: 335684 - RNA, 32 nt, Homo Sapiens
uuggacauuuauugguaaagcuuauuuauaaa

SEQ ID NO: 335685 - RNA, 32 nt, Homo Sapiens
guggagcgcguguggggcgcguguggggcgcg

SEQ ID NO: 335686 - RNA, 32 nt, Homo Sapiens
ggacagccaggggcuccucgggcccugugcuc

SEQ ID NO: 335687 - RNA, 32 nt, Homo Sapiens
cuguucccagaggagccaggccugcagcuggc

SEQ ID NO: 335688 - RNA, 32 nt, Homo Sapiens
uauuaauuuauuuuccaauaggauuuaaauag

SEQ ID NO: 335689 - RNA, 32 nt, Homo Sapiens
ugggcccgugcagggcucagcucggcagcagc

SEQ ID NO: 335690 - RNA, 32 nt, Homo Sapiens
uauaguugcccucuccauuccucuauuugccu

SEQ ID NO: 335691 - RNA, 32 nt, Homo Sapiens
uuaagcccaagccccuuggacacugcagcucu

SEQ ID NO: 335692 - RNA, 32 nt, Homo Sapiens
gguuuucaggaaaauguuccugucccugaccc

SEQ ID NO: 335693 - RNA, 32 nt, Homo Sapiens
ucgcacuccgcucggaccccaggccgccggug

SEQ ID NO: 335694 - RNA, 32 nt, Homo Sapiens
gggaacuucuauuugaccugcaaccuucuacu

SEQ ID NO: 335695 - RNA, 32 nt, Homo Sapiens
acguuaagaguuuuaaacaguuaagauuguac

SEQ ID NO: 335696 - RNA, 32 nt, Homo Sapiens
uuugcaccuuuccauccuccagguuucaaaau

SEQ ID NO: 335697 - RNA, 32 nt, Homo Sapiens
uuuuuauguaguguaugcguagccucuaucuc

SEQ ID NO: 335698 - RNA, 32 nt, Homo Sapiens
aaaaguagaagaaagacagaaaaaauaacuga

SEQ ID NO: 335699 - RNA, 32 nt, Homo Sapiens
cucugcgggaccccggccgggccggacccugg

SEQ ID NO: 335700 - RNA, 32 nt, Homo Sapiens
acacaggugcaacagacuugaaugcuaguuau

SEQ ID NO: 335701 - RNA, 32 nt, Homo Sapiens
cauaaacuaaauuuagaaauuuuuuagauuca

SEQ ID NO: 335702 - RNA, 32 nt, Homo Sapiens
ugcagccucucucggggccucaucucagauca

SEQ ID NO: 335703 - RNA, 32 nt, Homo Sapiens
gguggcugcuccaugagggugggggugauacu

SEQ ID NO: 335704 - RNA, 32 nt, Homo Sapiens
cgcccgcaguucccggccccgcuggccccagu

SEQ ID NO: 335705 - RNA, 32 nt, Homo Sapiens
uaaaauuguuaagcuauuuuauuguuauuuuc

SEQ ID NO: 335706 - RNA, 32 nt, Homo Sapiens
caagacaugauuuuuucuuauuguauuuucug

SEQ ID NO: 335707 - RNA, 32 nt, Homo Sapiens
acaaacacauuuaaaauugguuuaccucagga

SEQ ID NO: 335708 - RNA, 32 nt, Homo Sapiens
uggaggggccgugucuggcugcugcccgggua

SEQ ID NO: 335709 - RNA, 32 nt, Homo Sapiens
acugggucuggcagcccucccgggaugggccc

SEQ ID NO: 335710 - RNA, 32 nt, Homo Sapiens
gauggaggugccauaucacguacaccauaugc

SEQ ID NO: 335711 - RNA, 32 nt, Homo Sapiens
gacaugacacugggcaggucaugggucggggg

SEQ ID NO: 335712 - RNA, 32 nt, Homo Sapiens
ucagauuaaauccgaggggaaaacacuuuaug

SEQ ID NO: 335713 - RNA, 32 nt, Homo Sapiens
uccugcacacuugguccauccauuuccaaacc

SEQ ID NO: 335714 - RNA, 32 nt, Homo Sapiens
aaccuguuaacuuuuuuccacaaacucauuau

SEQ ID NO: 335715 - RNA, 32 nt, Homo Sapiens
cucucgucggacccuccgcccagcggcccugc

SEQ ID NO: 335716 - RNA, 32 nt, Homo Sapiens
accaucaagugcaaucuguaaaauugugaagu

SEQ ID NO: 335717 - RNA, 32 nt, Homo Sapiens
aggcggccaaagaaggaugcggagcccagcac

SEQ ID NO: 335718 - RNA, 32 nt, Homo Sapiens
cacaauaaauaggaaauguagaaaccaagcaa

SEQ ID NO: 335719 - RNA, 32 nt, Homo Sapiens
ucuacagcauuaacuuuagaaacucgaugcaa

SEQ ID NO: 335720 - RNA, 32 nt, Homo Sapiens
ccuuauuuguauguuuaccauauacuuugaua

SEQ ID NO: 335721 - RNA, 32 nt, Homo Sapiens
cuaucuauauauauuuauugaauugaaauggg

SEQ ID NO: 335722 - RNA, 32 nt, Homo Sapiens
gaagugcagggcgaguucugccgugcccucug

SEQ ID NO: 335723 - RNA, 32 nt, Homo Sapiens
aaaguacugucugcuagacccuugccuuugag

SEQ ID NO: 335724 - RNA, 32 nt, Homo Sapiens
ugcccagugucugcucgucaucuguggcugca

SEQ ID NO: 335725 - RNA, 32 nt, Homo Sapiens
gggcugggguggcaauggcgguuuggucccuc

SEQ ID NO: 335726 - RNA, 32 nt, Homo Sapiens
ccgcgcugacgcgaguccccggcagcgggggc

SEQ ID NO: 335727 - RNA, 32 nt, Homo Sapiens
uggaauaaauauauuuuuccuucccuuguagu

SEQ ID NO: 335728 - RNA, 32 nt, Homo Sapiens
ugaacggaguaauuauucuacucuucuuuuua

SEQ ID NO: 335729 - RNA, 32 nt, Homo Sapiens
agcuguaacagcggcagggugucccaggagcc

SEQ ID NO: 335730 - RNA, 32 nt, Homo Sapiens
auuuugguaccuuauuugauguuuacauuaaa

SEQ ID NO: 335731 - RNA, 32 nt, Homo Sapiens
gcacggaccccaugggagcugcgaguggguca

SEQ ID NO: 335732 - RNA, 32 nt, Homo Sapiens
cgucuguaaucccagcacuuugggaggccaag

SEQ ID NO: 335733 - RNA, 32 nt, Homo Sapiens
uauaaauugauuauuuuuuuuauuuaaaggga

SEQ ID NO: 335734 - RNA, 32 nt, Homo Sapiens
ugugaguguucccucuggcuuucugaagggca

SEQ ID NO: 335735 - RNA, 32 nt, Homo Sapiens
gcaccgucaccccagcagcauccgccgccugc

SEQ ID NO: 335736 - RNA, 32 nt, Homo Sapiens
cagccaggccccaagauggacacuucugggca

SEQ ID NO: 335737 - RNA, 32 nt, Homo Sapiens
uccaagagaaggaaacgggaguggagaggugu

SEQ ID NO: 335738 - RNA, 32 nt, Homo Sapiens
cugaggcgguugcggugcucggucgccgccua

SEQ ID NO: 335739 - RNA, 32 nt, Homo Sapiens
guccagcgcgcccgggcugagcugcagacucg

SEQ ID NO: 335740 - RNA, 32 nt, Homo Sapiens
ggaacuugaggguggggggagggcaccggagc

SEQ ID NO: 335741 - RNA, 32 nt, Homo Sapiens
uuccuuuuguuuccucugaggggcuguucgcc

SEQ ID NO: 335742 - RNA, 32 nt, Homo Sapiens
cugacuaagauguuuuaauauguaucaaaaau

SEQ ID NO: 335743 - RNA, 32 nt, Homo Sapiens
guuuguuuguuuugcuuaauccacagagucag

SEQ ID NO: 335744 - RNA, 32 nt, Homo Sapiens
cagagucccaggacauuaaacucuguaggaga

SEQ ID NO: 335745 - RNA, 31 nt, Homo Sapiens
uguguguuuugcaugaaaguguuuggagagg

SEQ ID NO: 335746 - RNA, 32 nt, Homo Sapiens
aagcuggagaggggcgugcugcggggcccuga

SEQ ID NO: 335747 - RNA, 32 nt, Homo Sapiens
ggccucgaggggccucccggggcccaggacuc

SEQ ID NO: 335748 - RNA, 29 nt, Homo Sapiens
ggaagugagcuguucagaggcaggagggu

SEQ ID NO: 335749 - RNA, 32 nt, Homo Sapiens
acccggaggaggaggagcggccgagcaucucu

SEQ ID NO: 335750 - RNA, 32 nt, Homo Sapiens
cccccacucccccuccccggcgcggcggcggc

SEQ ID NO: 335751 - RNA, 32 nt, Homo Sapiens
uuaaauguugacugcuaauguuuucugaagug

SEQ ID NO: 335752 - RNA, 32 nt, Homo Sapiens
uuuccagccaucucgcccugccagcccagcac

SEQ ID NO: 335753 - RNA, 32 nt, Homo Sapiens
uauuuugugaguuuguuucuuugaauuuucau

SEQ ID NO: 335754 - RNA, 32 nt, Homo Sapiens
ucuauuucagcaugcauaagacuuuucacuag

SEQ ID NO: 335755 - RNA, 32 nt, Homo Sapiens
uuccccugcaaccagacagucuacaacugccc

SEQ ID NO: 335756 - RNA, 32 nt, Homo Sapiens
caauccugaaugugccccuggaccuucuggac

SEQ ID NO: 335757 - RNA, 32 nt, Homo Sapiens
auccacauacccauagaguucauggauucuag

SEQ ID NO: 335758 - RNA, 32 nt, Homo Sapiens
cuagucaagcuccuccucccugcaucugacca

SEQ ID NO: 335759 - RNA, 32 nt, Homo Sapiens
ccaguggucagaguccucauagcaauagacag

SEQ ID NO: 335760 - RNA, 32 nt, Homo Sapiens
uuuccucccauccaccucccccgcacacacac

SEQ ID NO: 335761 - RNA, 32 nt, Homo Sapiens
cucuggugacuucugaugucuuagaaaggaag

SEQ ID NO: 335762 - RNA, 32 nt, Homo Sapiens
guuaaggaauggcugaugacugcuacacgugu

SEQ ID NO: 335763 - RNA, 32 nt, Homo Sapiens
guuuaucauuugucuuuuaaauuuauucaugg

SEQ ID NO: 335764 - RNA, 32 nt, Homo Sapiens
aggaggaggaggagaugguggccgaggaaagc

SEQ ID NO: 335765 - RNA, 31 nt, Homo Sapiens
guaccgcgcggaccccugcccccuguggcac

SEQ ID NO: 335766 - RNA, 32 nt, Homo Sapiens
cggggccgggauaauaaggucugugggugucu

SEQ ID NO: 335767 - RNA, 32 nt, Homo Sapiens
gaugaggcgcugaggcggcugccggcgcugcg

SEQ ID NO: 335768 - RNA, 32 nt, Homo Sapiens
ccugcugccacggccccuggcuccgcagucac

SEQ ID NO: 335769 - RNA, 32 nt, Homo Sapiens
uuguaaguuacuuuguuauagaugguauccuu

SEQ ID NO: 335770 - RNA, 30 nt, Homo Sapiens
gcccaccguggccagcaccaggaugcggaa

SEQ ID NO: 335771 - RNA, 32 nt, Homo Sapiens
acagcuuaagggcucuuaauucugugaguuga

SEQ ID NO: 335772 - RNA, 32 nt, Homo Sapiens
agccccagaggccagcaccuauccccgaggcu

SEQ ID NO: 335773 - RNA, 32 nt, Homo Sapiens
uggucagccuucccuguucuccagccuaggug

SEQ ID NO: 335774 - RNA, 32 nt, Homo Sapiens
ccacccucuccguaggguucuuucucgaggac

SEQ ID NO: 335775 - RNA, 32 nt, Homo Sapiens
guugaguguugcaucuuugccuuucuugucgu

SEQ ID NO: 335776 - RNA, 32 nt, Homo Sapiens
aagccaggcagucuggccccagccucuguggg

SEQ ID NO: 335777 - RNA, 32 nt, Homo Sapiens
agguuugugaagaguauuugcauugugucuuc

SEQ ID NO: 335778 - RNA, 32 nt, Homo Sapiens
agaaaagaucuuaagucauacauuuuaauugu

SEQ ID NO: 335779 - RNA, 32 nt, Homo Sapiens
gcggaggaccggcacggcuacaucugggaccg

SEQ ID NO: 335780 - RNA, 32 nt, Homo Sapiens
aaaauauaaaaauuagcugggugugguggcgg

SEQ ID NO: 335781 - RNA, 32 nt, Homo Sapiens
aacacaagaaaaagauaagaaauacuagagua

SEQ ID NO: 335782 - RNA, 32 nt, Homo Sapiens
caggcccccuccccgggcacccgcguucaugc

SEQ ID NO: 335783 - RNA, 31 nt, Homo Sapiens
gccugacacugcgcucuaccccgcgcgccgu

SEQ ID NO: 335784 - RNA, 32 nt, Homo Sapiens
acauguacuaguggucucaucuccagcuagcc

SEQ ID NO: 335785 - RNA, 32 nt, Homo Sapiens
gaggaggagcuggagggggcgcggcuuccucu

SEQ ID NO: 335786 - RNA, 32 nt, Homo Sapiens
auuucaaguauuuuauacuugcaauuguuaag

SEQ ID NO: 335787 - RNA, 32 nt, Homo Sapiens
cucagguuaauaauagagagcuauggagucaa

SEQ ID NO: 335788 - RNA, 32 nt, Homo Sapiens
augaaucugugacucauguuucccuguuucaa

SEQ ID NO: 335789 - RNA, 32 nt, Homo Sapiens
aagcaggaacugaguucauuacaucuuuaauu

SEQ ID NO: 335790 - RNA, 32 nt, Homo Sapiens
gcuucgcggagaucauggcggaggcgggagca

SEQ ID NO: 335791 - RNA, 32 nt, Homo Sapiens
cagauuaauuauauuucucucacuuucuuagc

SEQ ID NO: 335792 - RNA, 32 nt, Homo Sapiens
aacuaggggcccaauuagcaucaucuagggga

SEQ ID NO: 335793 - RNA, 32 nt, Homo Sapiens
uuuuaauaaaucuauuuggauuuucugcaaau

SEQ ID NO: 335794 - RNA, 32 nt, Homo Sapiens
ggaggagaaggaggagggcagcuccuuagcuc

SEQ ID NO: 335795 - RNA, 32 nt, Homo Sapiens
guggggauaggacuauuuuaucagugcauuuu

SEQ ID NO: 335796 - RNA, 32 nt, Homo Sapiens
cuagcgccauggcccggcaccugcuccucccc

SEQ ID NO: 335797 - RNA, 32 nt, Homo Sapiens
accacauacacuguugggauguacauugauac

SEQ ID NO: 335798 - RNA, 32 nt, Homo Sapiens
cuuguuuccaggagcauagaagccacaucguu

SEQ ID NO: 335799 - RNA, 32 nt, Homo Sapiens
uugguagcagagcagcagcaccuucaaauucu

SEQ ID NO: 335800 - RNA, 32 nt, Homo Sapiens
ugacugacaguacuccacaagcuugccugcca

SEQ ID NO: 335801 - RNA, 32 nt, Homo Sapiens
cacucaucugucuacccuaguguccaucaugc

SEQ ID NO: 335802 - RNA, 32 nt, Homo Sapiens
caggcuauuuuguagaaaucgagaagcugauc

SEQ ID NO: 335803 - RNA, 32 nt, Homo Sapiens
agaaguuaaugguaaaaaccuucuugcucuuu

SEQ ID NO: 335804 - RNA, 32 nt, Homo Sapiens
uguuugcuauaggagaaauuguaacacaagaa

SEQ ID NO: 335805 - RNA, 32 nt, Homo Sapiens
ggagaucaagacaagcaagugggauuugccca

SEQ ID NO: 335806 - RNA, 32 nt, Homo Sapiens
guggaguagguauuuuugcuacuuuuucauuu

SEQ ID NO: 335807 - RNA, 32 nt, Homo Sapiens
ucccuauuuuuuucuuuuuuuccuuuauuuuu

SEQ ID NO: 335808 - RNA, 32 nt, Homo Sapiens
aaaaaauugcaguacauaaaauuucuggacua

SEQ ID NO: 335809 - RNA, 32 nt, Homo Sapiens
uuaaggggauugcuaauuuguauuuuuaaaga

SEQ ID NO: 335810 - RNA, 32 nt, Homo Sapiens
auuaaaaagaaaggcaugcuggucaucauucc

SEQ ID NO: 335811 - RNA, 32 nt, Homo Sapiens
caugcuggcuacgggcacggcgcggauggcgu

SEQ ID NO: 335812 - RNA, 32 nt, Homo Sapiens
uuugacuuuccaccgaaagucccagccuccug

SEQ ID NO: 335813 - RNA, 32 nt, Homo Sapiens
uauccagggcuucucccagaaagcagaacuug

SEQ ID NO: 335814 - RNA, 32 nt, Homo Sapiens
uuguuuuaaaagagcaauaaaaaugaauuaug

SEQ ID NO: 335815 - RNA, 32 nt, Homo Sapiens
ggucacgugaggucacugacuccagcucaaaa

SEQ ID NO: 335816 - RNA, 32 nt, Homo Sapiens
cugccgcaccggcuucuucgcgcacgcugguu

SEQ ID NO: 335817 - RNA, 32 nt, Homo Sapiens
ccuggguuacuugcaaaaauuacuaaugcuuc

SEQ ID NO: 335818 - RNA, 32 nt, Homo Sapiens
ugugcuggcugcgccugagcuccgagacagcu

SEQ ID NO: 335819 - RNA, 32 nt, Homo Sapiens
aaugggauuguguuaaaucaguggguuaauuu

SEQ ID NO: 335820 - RNA, 32 nt, Homo Sapiens
augcgcucgccccucuacuccuccacgccccg

SEQ ID NO: 335821 - RNA, 32 nt, Homo Sapiens
cuggaacaaauuauuuuuggugugugugacaa

SEQ ID NO: 335822 - RNA, 32 nt, Homo Sapiens
cugaguccccugggagagagcccagcacccaa

SEQ ID NO: 335823 - RNA, 32 nt, Homo Sapiens
aucuauuuuggccacaaacaaacauauucaac

SEQ ID NO: 335824 - RNA, 32 nt, Homo Sapiens
ugagcgcuagagccggacagccaggcgcgaca

SEQ ID NO: 335825 - RNA, 32 nt, Homo Sapiens
auauuagacauucuuaacagggcggcagucua

SEQ ID NO: 335826 - RNA, 32 nt, Homo Sapiens
uuccucuguacuuuccuuucgcuauucaucaa

SEQ ID NO: 335827 - RNA, 32 nt, Homo Sapiens
gcuucccucugccugaccccaggccaccuguc

SEQ ID NO: 335828 - RNA, 32 nt, Homo Sapiens
aaugcucuguaggugcuuccucugccaaaaag

SEQ ID NO: 335829 - RNA, 32 nt, Homo Sapiens
cugugccuggaaggcgagccuugauugucuga

SEQ ID NO: 335830 - RNA, 32 nt, Homo Sapiens
auaaauaauuugucuguaaaauggaugaaaug

SEQ ID NO: 335831 - RNA, 32 nt, Homo Sapiens
guggguccuuuggcaggccucccuuuggggag

SEQ ID NO: 335832 - RNA, 32 nt, Homo Sapiens
auuucucaggucuccucuggcuucuaaguccu

SEQ ID NO: 335833 - RNA, 32 nt, Homo Sapiens
ggugacccaagccuccgggguucagggugacc

SEQ ID NO: 335834 - RNA, 32 nt, Homo Sapiens
ucaccaguguggagagaaaggugcuggcauag

SEQ ID NO: 335835 - RNA, 32 nt, Homo Sapiens
acuguguguuugugugcuuucaaagauguugg

SEQ ID NO: 335836 - RNA, 30 nt, Homo Sapiens
uuuucagcgcuccgaaagccggcgcuugag

SEQ ID NO: 335837 - RNA, 32 nt, Homo Sapiens
aaaucaagaaaaacagaagggaugugcagggu

SEQ ID NO: 335838 - RNA, 32 nt, Homo Sapiens
ccugggacccagugagacggagucacgugccu

SEQ ID NO: 335839 - RNA, 32 nt, Homo Sapiens
aauuacugaagagggagggagggaggagugcu

SEQ ID NO: 335840 - RNA, 32 nt, Homo Sapiens
uggucuggcauaaggagaggugcaggcgccug

SEQ ID NO: 335841 - RNA, 32 nt, Homo Sapiens
gccccugccguggcaggacucacagccccacc

SEQ ID NO: 335842 - RNA, 32 nt, Homo Sapiens
cucugaggucauaauuuccucggagaccuguu

SEQ ID NO: 335843 - RNA, 32 nt, Homo Sapiens
ucucagggacagucguagcaugugcuggauua

SEQ ID NO: 335844 - RNA, 32 nt, Homo Sapiens
cccgggcucggcgggggagcgacucauggagc

SEQ ID NO: 335845 - RNA, 32 nt, Homo Sapiens
uugcccauauauacccuguguaucuauacuug

SEQ ID NO: 335846 - RNA, 32 nt, Homo Sapiens
gaguggugucgggucccagagagggagcccac

SEQ ID NO: 335847 - RNA, 32 nt, Homo Sapiens
gugugagaaaccgaugacuggugggaggagca

SEQ ID NO: 335848 - RNA, 32 nt, Homo Sapiens
gggugaccgcggcuucccgggagcagaccucu

SEQ ID NO: 335849 - RNA, 32 nt, Homo Sapiens
ccggggcagcgguggugagagccccgacuccc

SEQ ID NO: 335850 - RNA, 32 nt, Homo Sapiens
aacaaucuggauaauuccauuucuuuuuuccc

SEQ ID NO: 335851 - RNA, 32 nt, Homo Sapiens
ucuuauccaaauaguaauguucuaauugauca

SEQ ID NO: 335852 - RNA, 32 nt, Homo Sapiens
uuggaggaggcacaacccuguccacaccuugg

SEQ ID NO: 335853 - RNA, 32 nt, Homo Sapiens
ucggcagcucacacagcaccccuuucaaguug

SEQ ID NO: 335854 - RNA, 32 nt, Homo Sapiens
uuggcauuuaacagagcaaaauguaaguggaa

SEQ ID NO: 335855 - RNA, 32 nt, Homo Sapiens
cugucagcccaacacgcuccccucccagggau

SEQ ID NO: 335856 - RNA, 32 nt, Homo Sapiens
gacaccaguaugagucaacuuuccuguaaagc

SEQ ID NO: 335857 - RNA, 32 nt, Homo Sapiens
gauggcagaaucacugaugggaauccagcuuu

SEQ ID NO: 335858 - RNA, 32 nt, Homo Sapiens
ggagaaggguucugccucccauccccucuacc

SEQ ID NO: 335859 - RNA, 32 nt, Homo Sapiens
uuugugauggaagaagggggcugggggucgag

SEQ ID NO: 335860 - RNA, 32 nt, Homo Sapiens
gaggccuuaaccccgccgggcggccgcgcccu

SEQ ID NO: 335861 - RNA, 32 nt, Homo Sapiens
ugaaaauaaccaaauacauuggggaaaguacc

SEQ ID NO: 335862 - RNA, 32 nt, Homo Sapiens
ggccgggcgugguggcucacgccuguaauccc

SEQ ID NO: 335863 - RNA, 32 nt, Homo Sapiens
ggcugggcgugguggcucaugccuguaauccc

SEQ ID NO: 335864 - RNA, 32 nt, Homo Sapiens
auuucucuuucuaugucuggcuuauuucccuu

SEQ ID NO: 335865 - RNA, 31 nt, Homo Sapiens
accgaggagccccagccccgucccagaggcc

SEQ ID NO: 335866 - RNA, 32 nt, Homo Sapiens
ugcugggugacaaaggaaauccucuucaauug

SEQ ID NO: 335867 - RNA, 32 nt, Homo Sapiens
gcguuuaacccguggcaugcccggcccgguuu

SEQ ID NO: 335868 - RNA, 32 nt, Homo Sapiens
agccugacuguggaaggccagggcaggugggc

SEQ ID NO: 335869 - RNA, 32 nt, Homo Sapiens
aucaauguaaaggaugaucaaacacuggaaua

SEQ ID NO: 335870 - RNA, 32 nt, Homo Sapiens
aaacuagagaauagcauguucguauuacaaga

SEQ ID NO: 335871 - RNA, 32 nt, Homo Sapiens
cuugcuuugcuuuaucaguucauuccagcucc

SEQ ID NO: 335872 - RNA, 32 nt, Homo Sapiens
augggggagccccauccagggagugaugggcc

SEQ ID NO: 335873 - RNA, 32 nt, Homo Sapiens
agauggcugcgcgcuuugucagcagugcugug

SEQ ID NO: 335874 - RNA, 32 nt, Homo Sapiens
ucccucuuggugaauuauuacacuguaagaaa

SEQ ID NO: 335875 - RNA, 32 nt, Homo Sapiens
ccugcgcaggcgggacuaucaggaguccacug

SEQ ID NO: 335876 - RNA, 32 nt, Homo Sapiens
gggccuuccuuccuggccucagccaccuggcu

SEQ ID NO: 335877 - RNA, 32 nt, Homo Sapiens
cacugucucuccgacgcaagauucuccuggcc

SEQ ID NO: 335878 - RNA, 32 nt, Homo Sapiens
ggagcccagaggaggaggggcccgccuuagcc

SEQ ID NO: 335879 - RNA, 32 nt, Homo Sapiens
ccgcccugaagcucucugggcuccucagcaau

SEQ ID NO: 335880 - RNA, 32 nt, Homo Sapiens
aucuacccaaauaccguggcacugcuugcgcu

SEQ ID NO: 335881 - RNA, 32 nt, Homo Sapiens
gaacccuugugcuacgccaggcaguuaccgag

SEQ ID NO: 335882 - RNA, 32 nt, Homo Sapiens
cucaggaaacuuacaaucauggcagaagguga

SEQ ID NO: 335883 - RNA, 32 nt, Homo Sapiens
ggaacccccucaccaccugcccggcccaggag

SEQ ID NO: 335884 - RNA, 32 nt, Homo Sapiens
uuuucaaacuuaacauuuaaugugugucacuc

SEQ ID NO: 335885 - RNA, 32 nt, Homo Sapiens
ggaaccuacuuuuuuauauuaaaaggauucaa

SEQ ID NO: 335886 - RNA, 32 nt, Homo Sapiens
cuccggcgggacaaagagcuccuguggggcuc

SEQ ID NO: 335887 - RNA, 32 nt, Homo Sapiens
cugggcuguuuccucagccuuucuuuuuugcc

SEQ ID NO: 335888 - RNA, 32 nt, Homo Sapiens
aguacuugauaaaucagaaaguuauaugugca

SEQ ID NO: 335889 - RNA, 32 nt, Homo Sapiens
uuguguuuucuuuauguuaauuuaaacuuaca

SEQ ID NO: 335890 - RNA, 32 nt, Homo Sapiens
cacucucaccucaaaagaagaaaucaagacca

SEQ ID NO: 335891 - RNA, 32 nt, Homo Sapiens
cauccuaagccuaugcagaaauguagaaacac

SEQ ID NO: 335892 - RNA, 32 nt, Homo Sapiens
uuccuucuguggucauuuuucuugcugccuuu

SEQ ID NO: 335893 - RNA, 32 nt, Homo Sapiens
cgccgggucucuggagcgcccuggguugcccg

SEQ ID NO: 335894 - RNA, 32 nt, Homo Sapiens
ugauuuuuuuuuucuuuuuguacuuuggaacg

SEQ ID NO: 335895 - RNA, 32 nt, Homo Sapiens
ucugaggagggaggaggcuccaauacgacuac

SEQ ID NO: 335896 - RNA, 32 nt, Homo Sapiens
guccaaaugaauauuuucaaguaaauguuaaa

SEQ ID NO: 335897 - RNA, 32 nt, Homo Sapiens
cuccugggucucgggcugcccuggacaagacu

SEQ ID NO: 335898 - RNA, 32 nt, Homo Sapiens
guggaccuccaggaaugccucccuuugcaucu

SEQ ID NO: 335899 - RNA, 32 nt, Homo Sapiens
aauacagcugaaacccagcgggcccuuagcac

SEQ ID NO: 335900 - RNA, 32 nt, Homo Sapiens
cuuuuaucucaaauuuuuauauguaaaacaaa

SEQ ID NO: 335901 - RNA, 32 nt, Homo Sapiens
gucagaaacuaaaacaaauacugaaauauuag

SEQ ID NO: 335902 - RNA, 32 nt, Homo Sapiens
gcgccuccuucuaccacuggggugcugcugua

SEQ ID NO: 335903 - RNA, 32 nt, Homo Sapiens
aaugacucacccccuccuuccuccuccugauc

SEQ ID NO: 335904 - RNA, 32 nt, Homo Sapiens
uauccggcccagucacauccaucgccguaaau

SEQ ID NO: 335905 - RNA, 32 nt, Homo Sapiens
aggcuggacaccccuccaccuggcgguccaga

SEQ ID NO: 335906 - RNA, 32 nt, Homo Sapiens
auuauuaaaaauugauagaauuuuagcuccug

SEQ ID NO: 335907 - RNA, 32 nt, Homo Sapiens
aaagggcagccgcgccggcgccccacagcucu

SEQ ID NO: 335908 - RNA, 32 nt, Homo Sapiens
caggugcuagguagcagccucccggcccucgg

SEQ ID NO: 335909 - RNA, 32 nt, Homo Sapiens
cuggaggcgaggggagggagggggcgauggcu

SEQ ID NO: 335910 - RNA, 32 nt, Homo Sapiens
uuaaacauuuuuguguuuuuaggagauggucu

SEQ ID NO: 335911 - RNA, 32 nt, Homo Sapiens
uugcggcugcaucgccuucuccccuccaucca

SEQ ID NO: 335912 - RNA, 32 nt, Homo Sapiens
cauggucaacauuuuuauuauuaaaucaacuc

SEQ ID NO: 335913 - RNA, 32 nt, Homo Sapiens
gaagauugggcgccggccgggggucucucgcu

SEQ ID NO: 335914 - RNA, 32 nt, Homo Sapiens
aucaugguuguggcugagcugcugcugcugug

SEQ ID NO: 335915 - RNA, 32 nt, Homo Sapiens
gccguuucacccagccagcgggcccagcccgc

SEQ ID NO: 335916 - RNA, 32 nt, Homo Sapiens
aaagauggugcgagucacggaucugcgcagga

SEQ ID NO: 335917 - RNA, 32 nt, Homo Sapiens
gguaggagggcuuaucaucaacacugauuuua

SEQ ID NO: 335918 - RNA, 32 nt, Homo Sapiens
uguagcauugcaucuguguccuguugucauuu

SEQ ID NO: 335919 - RNA, 32 nt, Homo Sapiens
cgggacgccacaggcgcagcucugccccccag

SEQ ID NO: 335920 - RNA, 32 nt, Homo Sapiens
gugagguucuuauuuucauacauauugguaug

SEQ ID NO: 335921 - RNA, 32 nt, Homo Sapiens
aagacuauuuaguuggaauauaugcaacagug

SEQ ID NO: 335922 - RNA, 32 nt, Homo Sapiens
agcggcggcagaggcucccuacacaaaagcau

SEQ ID NO: 335923 - RNA, 32 nt, Homo Sapiens
ugagggauuggcugaggauguauaaagcaaag

SEQ ID NO: 335924 - RNA, 32 nt, Homo Sapiens
cucuuuugcaggggccguuccucggggcauga

SEQ ID NO: 335925 - RNA, 32 nt, Homo Sapiens
ggacgcgugaucgggcgggcggccgggcgcaa

SEQ ID NO: 335926 - RNA, 32 nt, Homo Sapiens
uggcugcugugaaaaugcuguggaugguguga

SEQ ID NO: 335927 - RNA, 32 nt, Homo Sapiens
gucaccuucccaaagaaauuuuauuuucacgu

SEQ ID NO: 335928 - RNA, 32 nt, Homo Sapiens
uucguaaagacugaggcaagcaagugcuguga

SEQ ID NO: 335929 - RNA, 32 nt, Homo Sapiens
augaaauacaggccuccaccaaauugguggug

SEQ ID NO: 335930 - RNA, 32 nt, Homo Sapiens
agguugugcugccuguggugagguccuguccu

SEQ ID NO: 335931 - RNA, 32 nt, Homo Sapiens
cuccagcucccucucggccuggaggccuucgu

SEQ ID NO: 335932 - RNA, 32 nt, Homo Sapiens
cuauaaaguguguguuacauagguuuugugua

SEQ ID NO: 335933 - RNA, 32 nt, Homo Sapiens
aauccaaaggaauggaaacguauuuuacaacu

SEQ ID NO: 335934 - RNA, 32 nt, Homo Sapiens
agguguugggcaggaauuggugagauuccuga

SEQ ID NO: 335935 - RNA, 32 nt, Homo Sapiens
gccuaggggaagcuaggcugggcauugaacac

SEQ ID NO: 335936 - RNA, 32 nt, Homo Sapiens
ucuggucuuuugccaugaggguaaccagcucu

SEQ ID NO: 335937 - RNA, 32 nt, Homo Sapiens
aauauuuucuuaaauucauggggagacagugg

SEQ ID NO: 335938 - RNA, 32 nt, Homo Sapiens
uuaacuacccuaacuugacaaaacagaauucu

SEQ ID NO: 335939 - RNA, 32 nt, Homo Sapiens
gccgcaccucauccgugcacgcgucggagcac

SEQ ID NO: 335940 - RNA, 32 nt, Homo Sapiens
cguuuuuaaaguuauuaaaauuuuaacaguag

SEQ ID NO: 335941 - RNA, 32 nt, Homo Sapiens
caagcaccugucuuccccuccucccauccagg

SEQ ID NO: 335942 - RNA, 32 nt, Homo Sapiens
cgcagaccugcguggccguccagggcgucgcc

SEQ ID NO: 335943 - RNA, 32 nt, Homo Sapiens
gcaaccuccgccuccuggguucgggugauucu

SEQ ID NO: 335944 - RNA, 32 nt, Homo Sapiens
acuuugaagaucucaacugcuucuguguuaga

SEQ ID NO: 335945 - RNA, 32 nt, Homo Sapiens
uuucauuccuauugccccaaguauugucaaac

SEQ ID NO: 335946 - RNA, 32 nt, Homo Sapiens
uaccaagaaaauaaauguuaugauguuucagu

SEQ ID NO: 335947 - RNA, 32 nt, Homo Sapiens
ggagagauagggugggaggcagggcaaugcag

SEQ ID NO: 335948 - RNA, 32 nt, Homo Sapiens
gagccgcccacuuuuguccucaauaaaguuuc

SEQ ID NO: 335949 - RNA, 32 nt, Homo Sapiens
agaauauuaauuuugcagaaaugaaggaaaau

SEQ ID NO: 335950 - RNA, 32 nt, Homo Sapiens
cuuccccccuccuggggugcaguggugagucu

SEQ ID NO: 335951 - RNA, 27 nt, Homo Sapiens
ccauguuguuggauuggaaugacucca

SEQ ID NO: 335952 - RNA, 28 nt, Homo Sapiens
caugagguggucaccaggauugagcuuc

SEQ ID NO: 335953 - RNA, 32 nt, Homo Sapiens
ucuaagcugauccaucaugauguaaaaguuca

SEQ ID NO: 335954 - RNA, 32 nt, Homo Sapiens
ccagggccuugagugccuggaggugcuuggcc

SEQ ID NO: 335955 - RNA, 32 nt, Homo Sapiens
guaaacacaauguccaaauuuauuuuuaaagc

SEQ ID NO: 335956 - RNA, 32 nt, Homo Sapiens
gggaccaucuucuccugcaguccccugggccc

SEQ ID NO: 335957 - RNA, 32 nt, Homo Sapiens
cagucucgcguuuguuccccagcccucggcug

SEQ ID NO: 335958 - RNA, 32 nt, Homo Sapiens
accagugucaauccgcagacccucugugaagc

SEQ ID NO: 335959 - RNA, 32 nt, Homo Sapiens
cugcucgccuggugucgccgcagccgcggccu

SEQ ID NO: 335960 - RNA, 32 nt, Homo Sapiens
cugucaucagauccagaagaaauauccugguu

SEQ ID NO: 335961 - RNA, 32 nt, Homo Sapiens
cuugcccgugcugccgugcaguucuugccucc

SEQ ID NO: 335962 - RNA, 32 nt, Homo Sapiens
cuacuguggcucauuuaaaucuguguucagcu

SEQ ID NO: 335963 - RNA, 32 nt, Homo Sapiens
uuuuuuggggggauccuuugcugcugagcuuc

SEQ ID NO: 335964 - RNA, 32 nt, Homo Sapiens
cggagcucagagcgcgcagagcccggccgcug

SEQ ID NO: 335965 - RNA, 32 nt, Homo Sapiens
gaggguugggcgugcuaccugcaccgccccuu

SEQ ID NO: 335966 - RNA, 32 nt, Homo Sapiens
uaacuuuguuuuaugcaaaaaaguaucuuacg

SEQ ID NO: 335967 - RNA, 32 nt, Homo Sapiens
uugauuuugcuucuuucuuucuguggaggaua

SEQ ID NO: 335968 - RNA, 32 nt, Homo Sapiens
cacugcacuccagccugggcaacguggugaga

SEQ ID NO: 335969 - RNA, 32 nt, Homo Sapiens
aaugaguuucuuagcuuuuauagugcgccaug

SEQ ID NO: 335970 - RNA, 32 nt, Homo Sapiens
augggcgugacugcgagcgcaaggcuggaccc

SEQ ID NO: 335971 - RNA, 32 nt, Homo Sapiens
augaggucaggagaucgagaccauucuggcua

SEQ ID NO: 335972 - RNA, 32 nt, Homo Sapiens
uguguauggguuuuuuuuuuuauuuugacucu

SEQ ID NO: 335973 - RNA, 32 nt, Homo Sapiens
ggauaaggcagcccuccucccugguggggauc

SEQ ID NO: 335974 - RNA, 32 nt, Homo Sapiens
cggagggagauaaugaaucagaggaauuucuc

SEQ ID NO: 335975 - RNA, 32 nt, Homo Sapiens
uauucuuccuugcugcacguccaucucuuuuc

SEQ ID NO: 335976 - RNA, 32 nt, Homo Sapiens
gucuugacagagugugucugguaaauugaaaa

SEQ ID NO: 335977 - RNA, 32 nt, Homo Sapiens
cuggguguguggucugucuuggucacucucuc

SEQ ID NO: 335978 - RNA, 32 nt, Homo Sapiens
caagcaccaaccccacaaagugacacuguaca

SEQ ID NO: 335979 - RNA, 32 nt, Homo Sapiens
ugacggggaaccccggccuccaucugaggaua

SEQ ID NO: 335980 - RNA, 32 nt, Homo Sapiens
uaucauuauaaauaaacuuauuuauaaaucaa

SEQ ID NO: 335981 - RNA, 32 nt, Homo Sapiens
gcaucuagggcucuccuuuccugccuccggcc

SEQ ID NO: 335982 - RNA, 32 nt, Homo Sapiens
gggaucgugacaugucacuggauucaucaccu

SEQ ID NO: 335983 - RNA, 32 nt, Homo Sapiens
ccagcaguggccagacaacacucacugcaggc

SEQ ID NO: 335984 - RNA, 32 nt, Homo Sapiens
ugcuguuagcccaaggggaagagcuaauagau

SEQ ID NO: 335985 - RNA, 32 nt, Homo Sapiens
gcggagccgagcgggcguccgucgccggagcu

SEQ ID NO: 335986 - RNA, 32 nt, Homo Sapiens
auaaacgguauauaaagguuuuacggauuuug

SEQ ID NO: 335987 - RNA, 32 nt, Homo Sapiens
ucagauguuuauuugcaacuaauuucuugugc

SEQ ID NO: 335988 - RNA, 32 nt, Homo Sapiens
cugucuucccccuggggcucgaugguuaccac

SEQ ID NO: 335989 - RNA, 32 nt, Homo Sapiens
acgcgagccaucuugccagaauucugacagug

SEQ ID NO: 335990 - RNA, 32 nt, Homo Sapiens
ugccggccccccaaugccccagcucccucuug

SEQ ID NO: 335991 - RNA, 32 nt, Homo Sapiens
cagcuuacauuuccauuccauuauuacaagug

SEQ ID NO: 335992 - RNA, 32 nt, Homo Sapiens
uagcuuaauuuucgguuuaaauauguuuguaa

SEQ ID NO: 335993 - RNA, 32 nt, Homo Sapiens
cugagcuguagcugcgugaguaccuccuugau

SEQ ID NO: 335994 - RNA, 29 nt, Homo Sapiens
aagcugugauaugaguaaguucuacagau

SEQ ID NO: 335995 - RNA, 32 nt, Homo Sapiens
cugacucuuccuuccuccuccuccccaguacc

SEQ ID NO: 335996 - RNA, 32 nt, Homo Sapiens
uauuaguagguagucauuaacauguuuaagag

SEQ ID NO: 335997 - RNA, 32 nt, Homo Sapiens
guuucucagaauaaaaguuugguuuguaaguu

SEQ ID NO: 335998 - RNA, 32 nt, Homo Sapiens
cugggucucugcgccgcagccgcccgcccgcc

SEQ ID NO: 335999 - RNA, 32 nt, Homo Sapiens
caaguaauuuaaaaguaauauguuaccuaugu

SEQ ID NO: 336000 - RNA, 32 nt, Homo Sapiens
ucaaucuuugggaagcuccacaaauucauuug

SEQ ID NO: 336001 - RNA, 32 nt, Homo Sapiens
cccucccggccucgcuccccccggaguggggg

SEQ ID NO: 336002 - RNA, 32 nt, Homo Sapiens
ucaucaaagaaccuguuugggauauaaaacuc

SEQ ID NO: 336003 - RNA, 32 nt, Homo Sapiens
ggacgcucugccccggccauggcgucgcugcu

SEQ ID NO: 336004 - RNA, 32 nt, Homo Sapiens
cgcggguucuccugggcuggcccgggcugccc

SEQ ID NO: 336005 - RNA, 32 nt, Homo Sapiens
gaggcuugcugcggacucaggcuggcgaauag

SEQ ID NO: 336006 - RNA, 32 nt, Homo Sapiens
aaaaaaaaauuaaaaaaacaaacaagaaaagc

SEQ ID NO: 336007 - RNA, 32 nt, Homo Sapiens
uucugggccccggucagcccugccggccccag

SEQ ID NO: 336008 - RNA, 32 nt, Homo Sapiens
ucccauuuacuuuauuauuguacacauuuaac

SEQ ID NO: 336009 - RNA, 32 nt, Homo Sapiens
cuuccugagucuuuucauugcuaccucuaaua

SEQ ID NO: 336010 - RNA, 32 nt, Homo Sapiens
gaaaucagaaggcagggaaaccaagagcauaa

SEQ ID NO: 336011 - RNA, 32 nt, Homo Sapiens
gauugucuugcaacuucaguuuuauuuuugcc

SEQ ID NO: 336012 - RNA, 32 nt, Homo Sapiens
acaaugccgauucauuccacgcagcaguauug

SEQ ID NO: 336013 - RNA, 32 nt, Homo Sapiens
aaaaaacaacaacaacaaaacaacacauuggu

SEQ ID NO: 336014 - RNA, 32 nt, Homo Sapiens
aaacaucauuuaaaauauauaugguaucugag

SEQ ID NO: 336015 - RNA, 32 nt, Homo Sapiens
ccgccuccagcuccgcgcugcccggcagccgg

SEQ ID NO: 336016 - RNA, 28 nt, Homo Sapiens
cagcucugggcugccaggaugguggaug

SEQ ID NO: 336017 - RNA, 32 nt, Homo Sapiens
ccucugcccugccccacccccaccaccugucc

SEQ ID NO: 336018 - RNA, 32 nt, Homo Sapiens
cggacauucucugcgaucuauauacauugccu

SEQ ID NO: 336019 - RNA, 32 nt, Homo Sapiens
auuuaaauucaugggaaaucacuuccugcccc

SEQ ID NO: 336020 - RNA, 32 nt, Homo Sapiens
uuagggugagacaaaaucggucugguaaaagg

SEQ ID NO: 336021 - RNA, 31 nt, Homo Sapiens
gugggucucgccucagcucagaacacacccu

SEQ ID NO: 336022 - RNA, 32 nt, Homo Sapiens
aaacuggacuagaagaggcaucuucaagguuc

SEQ ID NO: 336023 - RNA, 32 nt, Homo Sapiens
gcccggggcaugaacggcuacggcucccccua

SEQ ID NO: 336024 - RNA, 32 nt, Homo Sapiens
ccuaaauuugaaauagugauaagcauaaugaa

SEQ ID NO: 336025 - RNA, 32 nt, Homo Sapiens
ugcucacagugauucuugcuucucugagaccu

SEQ ID NO: 336026 - RNA, 32 nt, Homo Sapiens
caaaccuuucuaacccggggccuccaaaccuc

SEQ ID NO: 336027 - RNA, 32 nt, Homo Sapiens
uauuguuuugacuuggggggaggggcuauaac

SEQ ID NO: 336028 - RNA, 32 nt, Homo Sapiens
accaucguguucauacuggagagaaacccuau

SEQ ID NO: 336029 - RNA, 32 nt, Homo Sapiens
ugaguggauugcuuauggcuaugagauagguu

SEQ ID NO: 336030 - RNA, 32 nt, Homo Sapiens
ccccgugcacagggagaagagaagcagacggg

SEQ ID NO: 336031 - RNA, 32 nt, Homo Sapiens
auguuguguuuguuuuuacauuuuugcauuaa

SEQ ID NO: 336032 - RNA, 32 nt, Homo Sapiens
ugaugugcaauaaaucaauaauucaccagcaa

SEQ ID NO: 336033 - RNA, 30 nt, Homo Sapiens
aacagagaagaaauauuugagucuggaaua

SEQ ID NO: 336034 - RNA, 32 nt, Homo Sapiens
gggccgugggaggcuuccugaggugggggccg

SEQ ID NO: 336035 - RNA, 32 nt, Homo Sapiens
ugaaccgaggcaagggggcgcggcgcacgcag

SEQ ID NO: 336036 - RNA, 32 nt, Homo Sapiens
ccacuccaagcaagccagagccaggugcugcc

SEQ ID NO: 336037 - RNA, 32 nt, Homo Sapiens
cgugguaagacagugccugaccucaagaagcu

SEQ ID NO: 336038 - RNA, 32 nt, Homo Sapiens
caauagcauuaugucuaacaaauguacaaacc

SEQ ID NO: 336039 - RNA, 32 nt, Homo Sapiens
uuccuggagagccuuccagagccugucaucug

SEQ ID NO: 336040 - RNA, 32 nt, Homo Sapiens
uccagcgagggguggggcagaggacauguggc

SEQ ID NO: 336041 - RNA, 32 nt, Homo Sapiens
gcccugggcaaggggauggggcugugggggcg

SEQ ID NO: 336042 - RNA, 32 nt, Homo Sapiens
gcucucauguuccuggcgugagaugaaaggau

SEQ ID NO: 336043 - RNA, 32 nt, Homo Sapiens
ucuucuuugaaacuuuuuguuuugacuuguau

SEQ ID NO: 336044 - RNA, 32 nt, Homo Sapiens
gggucuggaagugugugugacgcccauugagc

SEQ ID NO: 336045 - RNA, 32 nt, Homo Sapiens
cugcuuccucucggcgcaccccaggggagugu

SEQ ID NO: 336046 - RNA, 32 nt, Homo Sapiens
acaguuugagaggagagccuccagcuguccuu

SEQ ID NO: 336047 - RNA, 32 nt, Homo Sapiens
gccacccaggacucacccaugccugguguucc

SEQ ID NO: 336048 - RNA, 32 nt, Homo Sapiens
aacccuaauuuucagcucuggcugaucccuag

SEQ ID NO: 336049 - RNA, 32 nt, Homo Sapiens
uuuuuaguagagaugggguuugccauguaggc

SEQ ID NO: 336050 - RNA, 32 nt, Homo Sapiens
uuaacgcacccccaccuucucuccucgcuucu

SEQ ID NO: 336051 - RNA, 32 nt, Homo Sapiens
gcuucuauauugcauuuaacuuguuuuuguaa

SEQ ID NO: 336052 - RNA, 32 nt, Homo Sapiens
uuuucuaaaaauuauauuuaaaauuguaauca

SEQ ID NO: 336053 - RNA, 32 nt, Homo Sapiens
agaaaagaacagaauucuugugccuaccuaag

SEQ ID NO: 336054 - RNA, 32 nt, Homo Sapiens
cgcgcgggggccugcgaagcgcugcucggggc

SEQ ID NO: 336055 - RNA, 32 nt, Homo Sapiens
gggagcugccagcccagggcucagcuucccau

SEQ ID NO: 336056 - RNA, 32 nt, Homo Sapiens
uuaccaucagagcagugcagugcucuuccgag

SEQ ID NO: 336057 - RNA, 32 nt, Homo Sapiens
gcagcccacacacccccaccagcccuaaugau

SEQ ID NO: 336058 - RNA, 32 nt, Homo Sapiens
uaaaugauugguuaagugaaaaccagaacuca

SEQ ID NO: 336059 - RNA, 29 nt, Homo Sapiens
ucauaggugacuuucugaugacugaaugu

SEQ ID NO: 336060 - RNA, 32 nt, Homo Sapiens
acugcuagaaguuguuaguuuacuggagcagg

SEQ ID NO: 336061 - RNA, 32 nt, Homo Sapiens
agaucuuuuccaaaguuuuucuuagaaccaac

SEQ ID NO: 336062 - RNA, 32 nt, Homo Sapiens
ggaaggaaggacccgcuuccuguugucggugc

SEQ ID NO: 336063 - RNA, 32 nt, Homo Sapiens
cugagccgccggaggaggagccgcgggcaacg

SEQ ID NO: 336064 - RNA, 32 nt, Homo Sapiens
cuccccaccucccacgccccagccccucccuc

SEQ ID NO: 336065 - RNA, 32 nt, Homo Sapiens
ccagaggacauaaguaucaugucuccuuuaac

SEQ ID NO: 336066 - RNA, 32 nt, Homo Sapiens
uuggaaauggugcuagucagaggugaauaaaa

SEQ ID NO: 336067 - RNA, 32 nt, Homo Sapiens
agccgcuugaagccaagaacucuucaaugcca

SEQ ID NO: 336068 - RNA, 32 nt, Homo Sapiens
gacaaauuucauacaugaacaauauaaauugu

SEQ ID NO: 336069 - RNA, 32 nt, Homo Sapiens
gucggggagcagccagacgucacccacgaccc

SEQ ID NO: 336070 - RNA, 32 nt, Homo Sapiens
uaugggggaaggugaaacuuuacuucugugcc

SEQ ID NO: 336071 - RNA, 32 nt, Homo Sapiens
ucaggugacgcaggaacacugggggagucuga

SEQ ID NO: 336072 - RNA, 32 nt, Homo Sapiens
uuuuaauuuuuccgcaccuuaucaauugcaaa

SEQ ID NO: 336073 - RNA, 32 nt, Homo Sapiens
gcuuccaagaucugguuguauuaaacacgaga

SEQ ID NO: 336074 - RNA, 32 nt, Homo Sapiens
ccagagcauaucuauuauagcaaaacaagaaa

SEQ ID NO: 336075 - RNA, 32 nt, Homo Sapiens
ugccgguguucgcgccucuagccgccgcugcc

SEQ ID NO: 336076 - RNA, 32 nt, Homo Sapiens
cuagccuggcuuucuuauuuuaccaaggcaua

SEQ ID NO: 336077 - RNA, 30 nt, Homo Sapiens
guccccuagaaguuugaugaguggaagaua

SEQ ID NO: 336078 - RNA, 31 nt, Homo Sapiens
aguguuuucaagaugugucuaacugaguagu

SEQ ID NO: 336079 - RNA, 32 nt, Homo Sapiens
agucaaaauaugaaccauuaugauucaaguua

SEQ ID NO: 336080 - RNA, 32 nt, Homo Sapiens
cuucuuccaauguuccuccccucucuguauga

SEQ ID NO: 336081 - RNA, 32 nt, Homo Sapiens
cacggcagccucagccacccagauguaagcga

SEQ ID NO: 336082 - RNA, 32 nt, Homo Sapiens
agugggcuggcagcuuccugcugcucccuguc

SEQ ID NO: 336083 - RNA, 32 nt, Homo Sapiens
gaaauaccauugcacacccccacuccccuagg

SEQ ID NO: 336084 - RNA, 32 nt, Homo Sapiens
cugggcaggucugagaguuagggaaaguccgu

SEQ ID NO: 336085 - RNA, 32 nt, Homo Sapiens
gaaacagaaacaaaaaauaggcaaguuggacu

SEQ ID NO: 336086 - RNA, 32 nt, Homo Sapiens
agaccccaccugagcagauacaugguauugcu

SEQ ID NO: 336087 - RNA, 32 nt, Homo Sapiens
uggaggaggggaggucugagcagagggcgggg

SEQ ID NO: 336088 - RNA, 32 nt, Homo Sapiens
gcuggcgcccccacccuacgcugcugccuucu

SEQ ID NO: 336089 - RNA, 32 nt, Homo Sapiens
ccucauaaaauauuauguaugcagcaauauuu

SEQ ID NO: 336090 - RNA, 32 nt, Homo Sapiens
aauugaacauacucuagugaaugugccuuaaa

SEQ ID NO: 336091 - RNA, 32 nt, Homo Sapiens
uuuuguacauaguggcaguauuguagcugauc

SEQ ID NO: 336092 - RNA, 32 nt, Homo Sapiens
uccagccuccaagucaccaccuaguaacuggc

SEQ ID NO: 336093 - RNA, 32 nt, Homo Sapiens
ccuuggcuaugaaaaugagcccuggcucccac

SEQ ID NO: 336094 - RNA, 32 nt, Homo Sapiens
cccuauguucagcagcacaaagggaagaagcc

SEQ ID NO: 336095 - RNA, 32 nt, Homo Sapiens
cucuacaaaaaauuaaaaagagaacauacaaa

SEQ ID NO: 336096 - RNA, 32 nt, Homo Sapiens
gggggcuguaugaauauuauuuaaaacuaaua

SEQ ID NO: 336097 - RNA, 32 nt, Homo Sapiens
agaugaaaauguucaguuuguacccauuuuuc

SEQ ID NO: 336098 - RNA, 32 nt, Homo Sapiens
uugcuucuccuucuccuucugccaugauugug

SEQ ID NO: 336099 - RNA, 32 nt, Homo Sapiens
cagggccaagaagacagcacaaaguauggguu

SEQ ID NO: 336100 - RNA, 32 nt, Homo Sapiens
ccaggcugcccgcgggugcacccaggcugcag

SEQ ID NO: 336101 - RNA, 32 nt, Homo Sapiens
aagggauucuuggcucucugguaaccauggau

SEQ ID NO: 336102 - RNA, 32 nt, Homo Sapiens
agaauguugcuuaagaaagaacaucaccauug

SEQ ID NO: 336103 - RNA, 32 nt, Homo Sapiens
uuuuugccagucucauggguagauaguggugc

SEQ ID NO: 336104 - RNA, 32 nt, Homo Sapiens
uaguacugccaacuucaagugauuuagauauc

SEQ ID NO: 336105 - RNA, 32 nt, Homo Sapiens
uugcugagcuccugggaaggaggcgugcccuc

SEQ ID NO: 336106 - RNA, 32 nt, Homo Sapiens
gacucugugugagcguguccacagaguuugag

SEQ ID NO: 336107 - RNA, 32 nt, Homo Sapiens
cguuacccuuuuucuucuuccucccccaaaaa

SEQ ID NO: 336108 - RNA, 31 nt, Homo Sapiens
ccugggcugccggucagucagugaaggucag

SEQ ID NO: 336109 - RNA, 32 nt, Homo Sapiens
gcuaaguugggucacugccacauggagucuug

SEQ ID NO: 336110 - RNA, 32 nt, Homo Sapiens
uaauaugcugcaacaaaauguagaauauucag

SEQ ID NO: 336111 - RNA, 32 nt, Homo Sapiens
gggauuacaggugcccaccagcacgcccagcu

SEQ ID NO: 336112 - RNA, 32 nt, Homo Sapiens
ucaugaacgacacagccaaacagcaggccggu

SEQ ID NO: 336113 - RNA, 31 nt, Homo Sapiens
aaaaguuugugcuuauuuucuuguaaauuug

SEQ ID NO: 336114 - RNA, 31 nt, Homo Sapiens
uccugccaagccaccuuccagugagcucugg

SEQ ID NO: 336115 - RNA, 32 nt, Homo Sapiens
cgcgccucccggucgccgcggguucaccgcuc

SEQ ID NO: 336116 - RNA, 32 nt, Homo Sapiens
gacucuaaagaaacagaagauuacaaaagcaa

SEQ ID NO: 336117 - RNA, 32 nt, Homo Sapiens
auaggcaucucagggauuucagagcagguaac

SEQ ID NO: 336118 - RNA, 32 nt, Homo Sapiens
accccagaugaccugcagaaacagaacuguuu

SEQ ID NO: 336119 - RNA, 30 nt, Homo Sapiens
ccaugagaucaagggaacaagaguguuugc

SEQ ID NO: 336120 - RNA, 28 nt, Homo Sapiens
aaacaauaaaguugacauuugaguaccu

SEQ ID NO: 336121 - RNA, 32 nt, Homo Sapiens
ugccuuuuugcaagacuuguaauuuacuuauu

SEQ ID NO: 336122 - RNA, 32 nt, Homo Sapiens
acaacacuaaaauaaagcauugcuucuuggga

SEQ ID NO: 336123 - RNA, 32 nt, Homo Sapiens
augcuggaugugcugcaggagcuccgaggcac

SEQ ID NO: 336124 - RNA, 32 nt, Homo Sapiens
cgcggccccaagcccggcccagcccccgaugc

SEQ ID NO: 336125 - RNA, 32 nt, Homo Sapiens
guccagguagcccacuugcaucagggcugcug

SEQ ID NO: 336126 - RNA, 32 nt, Homo Sapiens
gcccuccccacccagaguuuuuccuccaaugg

SEQ ID NO: 336127 - RNA, 32 nt, Homo Sapiens
agacggaguuucgaaauugaauggcagggugg

SEQ ID NO: 336128 - RNA, 32 nt, Homo Sapiens
agccucccaagcagcugggaagauaggcacgu

SEQ ID NO: 336129 - RNA, 32 nt, Homo Sapiens
uuuuacagaaaaggaaucagagaaucuacaac

SEQ ID NO: 336130 - RNA, 32 nt, Homo Sapiens
ggucacgcuccgcagccucaggucuuggcucu

SEQ ID NO: 336131 - RNA, 32 nt, Homo Sapiens
gcgccuccagcgggcaggccgggaguguacug

SEQ ID NO: 336132 - RNA, 32 nt, Homo Sapiens
uugaagucaccauggcgagguccccaccagcc

SEQ ID NO: 336133 - RNA, 32 nt, Homo Sapiens
gugcccugcccugcccugcagugucugcucag

SEQ ID NO: 336134 - RNA, 32 nt, Homo Sapiens
uuaaguguugcuauuucuuaauuaaauugauu

SEQ ID NO: 336135 - RNA, 32 nt, Homo Sapiens
ucaacaagaaugccuucugauucugaugauuc

SEQ ID NO: 336136 - RNA, 32 nt, Homo Sapiens
uuccaugccugcggcucccccugugcugggcu

SEQ ID NO: 336137 - RNA, 32 nt, Homo Sapiens
gggggaccgcacaggcaaccacaccucgcgug

SEQ ID NO: 336138 - RNA, 32 nt, Homo Sapiens
ccuccccagccacguggaacugaggcagcugu

SEQ ID NO: 336139 - RNA, 30 nt, Homo Sapiens
ucaggggaggggcgcgcgguagcgucccgg

SEQ ID NO: 336140 - RNA, 32 nt, Homo Sapiens
gcccccugccagcauggccagcgaguucaaga

SEQ ID NO: 336141 - RNA, 32 nt, Homo Sapiens
uauagugugaaguuuucccaauuuuucauugu

SEQ ID NO: 336142 - RNA, 32 nt, Homo Sapiens
gaaauggccuguacaaguuuaacuaagacaac

SEQ ID NO: 336143 - RNA, 32 nt, Homo Sapiens
cgcggcggcgggggcgggcgugcggaacaaag

SEQ ID NO: 336144 - RNA, 32 nt, Homo Sapiens
gcuguucacacgcucagccugucugggggagc

SEQ ID NO: 336145 - RNA, 32 nt, Homo Sapiens
ugcauuuugauccauagaacauaggaggaugu

SEQ ID NO: 336146 - RNA, 32 nt, Homo Sapiens
uuauggugaucuaugaucagugaucuuugaug

SEQ ID NO: 336147 - RNA, 32 nt, Homo Sapiens
uggcgcucccugcagcagcugcuucugcucug

SEQ ID NO: 336148 - RNA, 32 nt, Homo Sapiens
gcgugaccuuccgaccccgcuguccucaccgc

SEQ ID NO: 336149 - RNA, 32 nt, Homo Sapiens
ggcccuaaggagccgccucuccgugaggccca

SEQ ID NO: 336150 - RNA, 32 nt, Homo Sapiens
cuacuggugcccccuccuccccggccaaggcg

SEQ ID NO: 336151 - RNA, 32 nt, Homo Sapiens
gugcuucguuuuugaaguguugaagcugugcu

SEQ ID NO: 336152 - RNA, 32 nt, Homo Sapiens
acgccuggcguguggccgcgggcaggcggcuc

SEQ ID NO: 336153 - RNA, 32 nt, Homo Sapiens
uuguugcaaaggaggaggaaaagggaggacuu

SEQ ID NO: 336154 - RNA, 32 nt, Homo Sapiens
gggcugcacgcacuucucccgcggcccagaau

SEQ ID NO: 336155 - RNA, 32 nt, Homo Sapiens
ucaauauuacaauagagaaaauacaguacuua

SEQ ID NO: 336156 - RNA, 32 nt, Homo Sapiens
ugaaugcacuccucccucuccuuccuuuguuu

SEQ ID NO: 336157 - RNA, 32 nt, Homo Sapiens
aguguauauuauaagcuauaugcugaaaaugg

SEQ ID NO: 336158 - RNA, 32 nt, Homo Sapiens
uucggcgggggcgggaggagcugcccgaggcu

SEQ ID NO: 336159 - RNA, 32 nt, Homo Sapiens
cuauccccggacgcaugcagggcccccacagg

SEQ ID NO: 336160 - RNA, 32 nt, Homo Sapiens
aguuuaaauuuauucuuacacuacuuaagaaa

SEQ ID NO: 336161 - RNA, 32 nt, Homo Sapiens
ugugaggucugugccacaaggugagucugaac

SEQ ID NO: 336162 - RNA, 32 nt, Homo Sapiens
gugagcagggguuccagcagguccuccggcuc

SEQ ID NO: 336163 - RNA, 32 nt, Homo Sapiens
accugguucucuuuccucucacuccauuuugu

SEQ ID NO: 336164 - RNA, 32 nt, Homo Sapiens
aaugaaaacgccgccgggcgcuucuagucgga

SEQ ID NO: 336165 - RNA, 32 nt, Homo Sapiens
aaaaacgauuuaauguaaaaaguguuuccuga

SEQ ID NO: 336166 - RNA, 31 nt, Homo Sapiens
cuucauuuugugacuuuguaaauaaagcgac

SEQ ID NO: 336167 - RNA, 32 nt, Homo Sapiens
ccugccacuuuuccuguccguccuccucccca

SEQ ID NO: 336168 - RNA, 32 nt, Homo Sapiens
aacugauugaugaaagggcauauuuaggucaa

SEQ ID NO: 336169 - RNA, 32 nt, Homo Sapiens
gagaauaauggcccgguuggcccgggacgagu

SEQ ID NO: 336170 - RNA, 32 nt, Homo Sapiens
auugcuccuaacugacgucacucccggucugu

SEQ ID NO: 336171 - RNA, 32 nt, Homo Sapiens
uccucucacugcagccucccaacaggcuggua

SEQ ID NO: 336172 - RNA, 32 nt, Homo Sapiens
ugaugaaucuuaugagcuucugauugaucucg

SEQ ID NO: 336173 - RNA, 32 nt, Homo Sapiens
gcuguggacaaaggugggucagcuggcaugag

SEQ ID NO: 336174 - RNA, 32 nt, Homo Sapiens
gaccuuuucuucauuuugguuuauuuuuguaa

SEQ ID NO: 336175 - RNA, 32 nt, Homo Sapiens
acuauuucuuuuuauaggggcuuugcugaauu

SEQ ID NO: 336176 - RNA, 32 nt, Homo Sapiens
uucccgagugagggauuucgccgcccgcuuuc

SEQ ID NO: 336177 - RNA, 32 nt, Homo Sapiens
uaaacacguguaaggcacuuuggaaaaauacc

SEQ ID NO: 336178 - RNA, 32 nt, Homo Sapiens
ccauaaguguggagugccacuccagcuuucuu

SEQ ID NO: 336179 - RNA, 32 nt, Homo Sapiens
uugcugcccccuccccgcccacugucuggggc

SEQ ID NO: 336180 - RNA, 32 nt, Homo Sapiens
cgcuccuucccgcucggccgcggccucaggga

SEQ ID NO: 336181 - RNA, 32 nt, Homo Sapiens
cuguugggcuccuggcugcgcaggcacagcag

SEQ ID NO: 336182 - RNA, 32 nt, Homo Sapiens
auccuuaauugcuccuucucaccuccucucua

SEQ ID NO: 336183 - RNA, 32 nt, Homo Sapiens
gcuccucgccuggcucuugauguccaaggauu

SEQ ID NO: 336184 - RNA, 32 nt, Homo Sapiens
auccuacuuauagaaaaggagaaaauaauuaa

SEQ ID NO: 336185 - RNA, 32 nt, Homo Sapiens
gucugcuccuccucucucuccucaucacaguu

SEQ ID NO: 336186 - RNA, 32 nt, Homo Sapiens
aaugaaauucuauucacauuacuguguaauaa

SEQ ID NO: 336187 - RNA, 32 nt, Homo Sapiens
auacauguguuauuuucaaaaauguaaaugga

SEQ ID NO: 336188 - RNA, 32 nt, Homo Sapiens
gucuccacugugcuuauuuagagcagagcaca

SEQ ID NO: 336189 - RNA, 32 nt, Homo Sapiens
ggccuaguucagugucugccucaugggaagcu

SEQ ID NO: 336190 - RNA, 32 nt, Homo Sapiens
cgucgcccuuggcgggcuuccccaaccgccaa

SEQ ID NO: 336191 - RNA, 29 nt, Homo Sapiens
ggaagaggcggaagguggacgaggcaccg

SEQ ID NO: 336192 - RNA, 32 nt, Homo Sapiens
gguuuuagcauuaacuuuaugcaaagugcaca

SEQ ID NO: 336193 - RNA, 32 nt, Homo Sapiens
ugccuggcaucagagggaagggaggcuggggc

SEQ ID NO: 336194 - RNA, 32 nt, Homo Sapiens
aacucaagauaaaaacagaaaagucccagugu

SEQ ID NO: 336195 - RNA, 32 nt, Homo Sapiens
aaucacaauauuuggaauaccaaaagaugacu

SEQ ID NO: 336196 - RNA, 32 nt, Homo Sapiens
caaacaccaggguuuuuggaaccaucaccugg

SEQ ID NO: 336197 - RNA, 32 nt, Homo Sapiens
uggagguagugggaggggaagauggguucugc

SEQ ID NO: 336198 - RNA, 32 nt, Homo Sapiens
gggauguaguggggcugggcagggaugggggc

SEQ ID NO: 336199 - RNA, 32 nt, Homo Sapiens
cagagaguuugacaaguuuguguuaugauguu

SEQ ID NO: 336200 - RNA, 32 nt, Homo Sapiens
uggggauuuggagagagaugggcuugcucucu

SEQ ID NO: 336201 - RNA, 32 nt, Homo Sapiens
agcucccggagccgcccggccagcguccggcc

SEQ ID NO: 336202 - RNA, 32 nt, Homo Sapiens
caggcauuuccauacauccucugaaucuuaag

SEQ ID NO: 336203 - RNA, 32 nt, Homo Sapiens
uuguaugcaauaaauaucagugcacccagccu

SEQ ID NO: 336204 - RNA, 32 nt, Homo Sapiens
aaucauacuuuuugaucagugccguuuuugaa

SEQ ID NO: 336205 - RNA, 32 nt, Homo Sapiens
uuccuggcuccauguuaacugcggcugucuaa

SEQ ID NO: 336206 - RNA, 32 nt, Homo Sapiens
ucuaggcucagguacugcuccuccaugcccau

SEQ ID NO: 336207 - RNA, 32 nt, Homo Sapiens
gccacaaauuuguauggauauuucaugauaca

SEQ ID NO: 336208 - RNA, 32 nt, Homo Sapiens
aucugccuucggagauuacaaaugaaaugguu

SEQ ID NO: 336209 - RNA, 32 nt, Homo Sapiens
uccccguucuucaagcuucucugcucaguguc

SEQ ID NO: 336210 - RNA, 32 nt, Homo Sapiens
uagcagaaauaggcccuuuuauguguugcuuc

SEQ ID NO: 336211 - RNA, 32 nt, Homo Sapiens
ucaguucgccuggccuccaagucgugaggaaa

SEQ ID NO: 336212 - RNA, 32 nt, Homo Sapiens
cuaacccuaaaguuuaaaaauuucugccuccu

SEQ ID NO: 336213 - RNA, 32 nt, Homo Sapiens
cgaccugggcaaccuggaggagcccagggaau

SEQ ID NO: 336214 - RNA, 32 nt, Homo Sapiens
cagacagagacuacugcagagaaguugccaga

SEQ ID NO: 336215 - RNA, 32 nt, Homo Sapiens
gcagggcauauuaagaucaucccagagguuca

SEQ ID NO: 336216 - RNA, 32 nt, Homo Sapiens
uacuucggagaauggggugugagccagggagg

SEQ ID NO: 336217 - RNA, 32 nt, Homo Sapiens
aggccaaguucagagcucucugucucccccag

SEQ ID NO: 336218 - RNA, 32 nt, Homo Sapiens
agacuuccaaaaagaugauuucaaggggaugu

SEQ ID NO: 336219 - RNA, 32 nt, Homo Sapiens
cucauucuggcgguugugggcuucggagccug

SEQ ID NO: 336220 - RNA, 32 nt, Homo Sapiens
ggcggcuccccgcuccuaggugcgagcugagu

SEQ ID NO: 336221 - RNA, 32 nt, Homo Sapiens
agcgacccgggcggccucguagcggggccccg

SEQ ID NO: 336222 - RNA, 32 nt, Homo Sapiens
cccaagccugccccgcuacccaagcagccccg

SEQ ID NO: 336223 - RNA, 32 nt, Homo Sapiens
cagucauuaaaggagcuguuuccuggguaaau

SEQ ID NO: 336224 - RNA, 32 nt, Homo Sapiens
acacuccauguuugucccacacucacucacuu

SEQ ID NO: 336225 - RNA, 32 nt, Homo Sapiens
uauguugagagaaugaaacuguuaacucuuuu

SEQ ID NO: 336226 - RNA, 32 nt, Homo Sapiens
ccaaaagucacuuuuccaacuuaugugauggg

SEQ ID NO: 336227 - RNA, 32 nt, Homo Sapiens
cagccccgucuuccaggagccacaacucagaa

SEQ ID NO: 336228 - RNA, 30 nt, Homo Sapiens
cagcucgcgcucgccccgccggcgucccca

SEQ ID NO: 336229 - RNA, 32 nt, Homo Sapiens
cacaggcaucagaaaucaaucaacuugcuaau

SEQ ID NO: 336230 - RNA, 32 nt, Homo Sapiens
gucucagauaagacuuuggucuguggauuuuu

SEQ ID NO: 336231 - RNA, 32 nt, Homo Sapiens
gaggcacugcccaucucuucuccaccuucucu

SEQ ID NO: 336232 - RNA, 32 nt, Homo Sapiens
auguuuuugucaaauauauucacaacuugacc

SEQ ID NO: 336233 - RNA, 32 nt, Homo Sapiens
auaaauaaaaacaucuuggaguucugagauuu

SEQ ID NO: 336234 - RNA, 32 nt, Homo Sapiens
auugcuaguuuauauuuuagauauaaacauca

SEQ ID NO: 336235 - RNA, 32 nt, Homo Sapiens
ccugaccucaggugaucuacccgccuccaccu

SEQ ID NO: 336236 - RNA, 32 nt, Homo Sapiens
aacgcggccccggcagccccuacuaggcgccc

SEQ ID NO: 336237 - RNA, 32 nt, Homo Sapiens
guggggguauauaaaaauuccuuguaaugguc

SEQ ID NO: 336238 - RNA, 32 nt, Homo Sapiens
guucucacugucaguguaaucuccaagguccu

SEQ ID NO: 336239 - RNA, 31 nt, Homo Sapiens
acaguguacgagguuaagauaugauaaagug

SEQ ID NO: 336240 - RNA, 32 nt, Homo Sapiens
aggaccugcucugcccucuccccaccccuucc

SEQ ID NO: 336241 - RNA, 32 nt, Homo Sapiens
agccgcccucagcacaucugcaugaagauaga

SEQ ID NO: 336242 - RNA, 31 nt, Homo Sapiens
guggcccucguuccccugccccucgucacca

SEQ ID NO: 336243 - RNA, 32 nt, Homo Sapiens
aaucgacaucuucuugguauugguuuucgcuu

SEQ ID NO: 336244 - RNA, 32 nt, Homo Sapiens
ugugguuaaaacuggauuuuaaauuuaaaaau

SEQ ID NO: 336245 - RNA, 32 nt, Homo Sapiens
uagaguauaacucaucguuuacaguauguuuu

SEQ ID NO: 336246 - RNA, 32 nt, Homo Sapiens
acucucuccagcaauagcugcccagcuuugcc

SEQ ID NO: 336247 - RNA, 32 nt, Homo Sapiens
ggucgggcagcugggcucgggcggcgggagua

SEQ ID NO: 336248 - RNA, 32 nt, Homo Sapiens
aaaguguucuccuggguuugugcccaccaugg

SEQ ID NO: 336249 - RNA, 32 nt, Homo Sapiens
aggcccgcucucuggagggaaggacauuacug

SEQ ID NO: 336250 - RNA, 32 nt, Homo Sapiens
cagugacaucguucagguuucuuucuuggcca

SEQ ID NO: 336251 - RNA, 31 nt, Homo Sapiens
agcaggagggcggggcaagggucucccagcg

SEQ ID NO: 336252 - RNA, 32 nt, Homo Sapiens
ucugaaggucaacugagaagucuugugggaca

SEQ ID NO: 336253 - RNA, 32 nt, Homo Sapiens
gggaaggucaagcaaagaacuguaaccgaaag

SEQ ID NO: 336254 - RNA, 32 nt, Homo Sapiens
gcuuccucaccucggccgggcguccguggcag

SEQ ID NO: 336255 - RNA, 32 nt, Homo Sapiens
cgcuggcggccgcgggcccaggccucaccuuc

SEQ ID NO: 336256 - RNA, 32 nt, Homo Sapiens
ggggagcagacaccaccgcaugaacccauuug

SEQ ID NO: 336257 - RNA, 32 nt, Homo Sapiens
ggaggugccggcugcgcgggccccagugagac

SEQ ID NO: 336258 - RNA, 32 nt, Homo Sapiens
aaauuaauuaaaguagaagagaaggguucugu

SEQ ID NO: 336259 - RNA, 32 nt, Homo Sapiens
gaauccagcccgcuccuucggcccugccauca

SEQ ID NO: 336260 - RNA, 32 nt, Homo Sapiens
ugacugcacuguagcugcaaggcguguucuug

SEQ ID NO: 336261 - RNA, 32 nt, Homo Sapiens
auuuugaauucagucuacuuugaaaguauaug

SEQ ID NO: 336262 - RNA, 32 nt, Homo Sapiens
uauuucuacugaugaagugcuucagguagggg

SEQ ID NO: 336263 - RNA, 32 nt, Homo Sapiens
agcuucccucacuguguacagaacgcaagaag

SEQ ID NO: 336264 - RNA, 32 nt, Homo Sapiens
cauucaugaagcggagugguaguuauccuucu

SEQ ID NO: 336265 - RNA, 32 nt, Homo Sapiens
gaaggagcagugccccucgagcagccaggaag

SEQ ID NO: 336266 - RNA, 32 nt, Homo Sapiens
gucuuuuuguuacuuuuuuguccguguccucu

SEQ ID NO: 336267 - RNA, 32 nt, Homo Sapiens
gcguccgugcgcgaggacacugagccgggcug

SEQ ID NO: 336268 - RNA, 32 nt, Homo Sapiens
acucugcaccuccccacucucuucccauucaa

SEQ ID NO: 336269 - RNA, 32 nt, Homo Sapiens
ggcagcggcagcgggcagcagcuccagcagcg

SEQ ID NO: 336270 - RNA, 32 nt, Homo Sapiens
aggugaucuuggcaucaaggaagggaugcaca

SEQ ID NO: 336271 - RNA, 32 nt, Homo Sapiens
gucucaccucaucuuuuccugcucuuuggccc

SEQ ID NO: 336272 - RNA, 32 nt, Homo Sapiens
caauguaucugcuaggagacacccggacagug

SEQ ID NO: 336273 - RNA, 32 nt, Homo Sapiens
cuaguucauucacaagcauaugcugagaauaa

SEQ ID NO: 336274 - RNA, 32 nt, Homo Sapiens
agguauuuucaauuguuuuucuuuauuuucuu

SEQ ID NO: 336275 - RNA, 32 nt, Homo Sapiens
aaucaaugcuguaauauaauuugcaccuggaa

SEQ ID NO: 336276 - RNA, 32 nt, Homo Sapiens
uggugugagcgcgggggcugccagaagcggga

SEQ ID NO: 336277 - RNA, 32 nt, Homo Sapiens
guagguauuacaucccuggugucguauuuugc

SEQ ID NO: 336278 - RNA, 32 nt, Homo Sapiens
ggccugcccuuggguccuggggagccacggaa

SEQ ID NO: 336279 - RNA, 32 nt, Homo Sapiens
agguauauaagccccagcagcuuucugcagcc

SEQ ID NO: 336280 - RNA, 32 nt, Homo Sapiens
cuaggcagcuggaagagaaagaccgagugcua

SEQ ID NO: 336281 - RNA, 32 nt, Homo Sapiens
aaugggaggguggacaggcggguaggagcgga

SEQ ID NO: 336282 - RNA, 32 nt, Homo Sapiens
cauuucuggaccgcaagagacuuggacgucgg

SEQ ID NO: 336283 - RNA, 32 nt, Homo Sapiens
uugagggguguuggagaggggacucccccacu

SEQ ID NO: 336284 - RNA, 32 nt, Homo Sapiens
auguaugcaucuuuaauuucuaaacuaaugua

SEQ ID NO: 336285 - RNA, 32 nt, Homo Sapiens
ugcuugcuuugcuucccuagacuugcagcuua

SEQ ID NO: 336286 - RNA, 32 nt, Homo Sapiens
guuauaucuauuuuuauguaaacucuauuuug

SEQ ID NO: 336287 - RNA, 32 nt, Homo Sapiens
ugugaagaggaugccucugaagaaauuuuaaa

SEQ ID NO: 336288 - RNA, 32 nt, Homo Sapiens
aggaacuccgucguccuccgcgcgcgccugcc

SEQ ID NO: 336289 - RNA, 32 nt, Homo Sapiens
agccacggccccaacgaugcuuccggcucuca

SEQ ID NO: 336290 - RNA, 32 nt, Homo Sapiens
caaaacauauuuauaauaauauuuucucauug

SEQ ID NO: 336291 - RNA, 32 nt, Homo Sapiens
gaguuuugaagugccuaagaugaccuauuugu

SEQ ID NO: 336292 - RNA, 32 nt, Homo Sapiens
auccucauugucuauuugagaaugguuuucug

SEQ ID NO: 336293 - RNA, 32 nt, Homo Sapiens
uagcagccgggcgccgcgggccgggggccuga

SEQ ID NO: 336294 - RNA, 32 nt, Homo Sapiens
uaaauaaauguuuaaaugauaauuugcuuaug

SEQ ID NO: 336295 - RNA, 32 nt, Homo Sapiens
aagccccguggagcaacagccagagcaacagc

SEQ ID NO: 336296 - RNA, 32 nt, Homo Sapiens
cugcgggaggcauggcgggagcuccggacgag

SEQ ID NO: 336297 - RNA, 32 nt, Homo Sapiens
aucuugaggagaagaauuuucggagugaagac

SEQ ID NO: 336298 - RNA, 32 nt, Homo Sapiens
gggccagggaagggugugcaaaaacuaacacu

SEQ ID NO: 336299 - RNA, 32 nt, Homo Sapiens
uagccgggagguuggaggagcugaaaacgccg

SEQ ID NO: 336300 - RNA, 32 nt, Homo Sapiens
cggcuccuggaaagauggaggcagcggagaca

SEQ ID NO: 336301 - RNA, 32 nt, Homo Sapiens
cuaauuggggcauugaggaaaugaagacugga

SEQ ID NO: 336302 - RNA, 32 nt, Homo Sapiens
uuuaguccacgaggcugucaccacccugguag

SEQ ID NO: 336303 - RNA, 31 nt, Homo Sapiens
cuggugcggaccugccugccgcccggagcgc

SEQ ID NO: 336304 - RNA, 32 nt, Homo Sapiens
uccauauugcuauaguacuucuguaaagagaa

SEQ ID NO: 336305 - RNA, 32 nt, Homo Sapiens
ucacuuagcucuucgcugguugucacacgucc

SEQ ID NO: 336306 - RNA, 32 nt, Homo Sapiens
agagcuggaugacagcagcagugaguccagug

SEQ ID NO: 336307 - RNA, 32 nt, Homo Sapiens
cccaccacacaccagcagccacaaccucacca

SEQ ID NO: 336308 - RNA, 32 nt, Homo Sapiens
agcuccgcgagcucagccgcucagcgaguggg

SEQ ID NO: 336309 - RNA, 32 nt, Homo Sapiens
agcugcacagggaaagaagagaauugagcucu

SEQ ID NO: 336310 - RNA, 32 nt, Homo Sapiens
ccacugcgcccggccccuggagcaaguuauuu

SEQ ID NO: 336311 - RNA, 32 nt, Homo Sapiens
augucuuuaaaacagacauuuuucucaccaaa

SEQ ID NO: 336312 - RNA, 32 nt, Homo Sapiens
acuaagggccccacaggcuuguuucauggugu

SEQ ID NO: 336313 - RNA, 32 nt, Homo Sapiens
ucacaucuaaaauggguuugaagaaacgcaac

SEQ ID NO: 336314 - RNA, 32 nt, Homo Sapiens
aaguauuaucccacgcaguacaccccaaucuc

SEQ ID NO: 336315 - RNA, 32 nt, Homo Sapiens
cccaccccaagccucuccacuaggccucugcc

SEQ ID NO: 336316 - RNA, 32 nt, Homo Sapiens
ucuaauguggucgaacuauugcuggagcaacu

SEQ ID NO: 336317 - RNA, 32 nt, Homo Sapiens
uuuugucugguagagaaaauagaaaggccaga

SEQ ID NO: 336318 - RNA, 32 nt, Homo Sapiens
cacagugagggaagggcuucagggccaucugc

SEQ ID NO: 336319 - RNA, 32 nt, Homo Sapiens
uuugaaauuuugcaugaaaaggaugcaaugaa

SEQ ID NO: 336320 - RNA, 32 nt, Homo Sapiens
cuuuucauugagaagaaaaucagucucaccug

SEQ ID NO: 336321 - RNA, 32 nt, Homo Sapiens
cuuguagccccucaccuucucuccccaaugca

SEQ ID NO: 336322 - RNA, 32 nt, Homo Sapiens
aaggggcagccccuggaggacaucagugcuuc

SEQ ID NO: 336323 - RNA, 32 nt, Homo Sapiens
gggcauacauaaaucgacacaugccaaguccu

SEQ ID NO: 336324 - RNA, 32 nt, Homo Sapiens
gcgaggccgggcgccgcagcgcgcauaggcgg

SEQ ID NO: 336325 - RNA, 32 nt, Homo Sapiens
gaucgcuuuugccugggaccacuuccucccug

SEQ ID NO: 336326 - RNA, 32 nt, Homo Sapiens
ucaugauggaacaaagacagauaccuucagag

SEQ ID NO: 336327 - RNA, 32 nt, Homo Sapiens
acccagcugucaaugaagacuccaucauuggu

SEQ ID NO: 336328 - RNA, 32 nt, Homo Sapiens
caccgguggccauggggcuggaggcggcgcgc

SEQ ID NO: 336329 - RNA, 32 nt, Homo Sapiens
guuuuagcugucuugugugcauccacagucug

SEQ ID NO: 336330 - RNA, 32 nt, Homo Sapiens
cccccacaguggccauacgggcacaggagacc

SEQ ID NO: 336331 - RNA, 32 nt, Homo Sapiens
agcuggagaggaugcuggagcuggggugggaa

SEQ ID NO: 336332 - RNA, 32 nt, Homo Sapiens
agaggaggccccacagcuugcccuuugcccuc

SEQ ID NO: 336333 - RNA, 32 nt, Homo Sapiens
uacauguguggggaaaggagaugugugagcaa

SEQ ID NO: 336334 - RNA, 32 nt, Homo Sapiens
gucucacucucuugucccacccuucuucucuu

SEQ ID NO: 336335 - RNA, 32 nt, Homo Sapiens
ccgcaggcugcccggccucccucccccugcag

SEQ ID NO: 336336 - RNA, 32 nt, Homo Sapiens
ccugccugugucugcugccgagaagcccgugc

SEQ ID NO: 336337 - RNA, 32 nt, Homo Sapiens
ugaccugaggccagugugaugugguuggaucu

SEQ ID NO: 336338 - RNA, 32 nt, Homo Sapiens
uggcugguccugccggacucuccggagcuggg

SEQ ID NO: 336339 - RNA, 32 nt, Homo Sapiens
gaggguggagaauggaaacugagucaccugua

SEQ ID NO: 336340 - RNA, 32 nt, Homo Sapiens
ggauaaaccucagcuauauaauagauaugagg

SEQ ID NO: 336341 - RNA, 32 nt, Homo Sapiens
aagaacccauagaugaagaugaagauauucaa

SEQ ID NO: 336342 - RNA, 32 nt, Homo Sapiens
ucacauuccagaaaagugucugaaggcccggg

SEQ ID NO: 336343 - RNA, 32 nt, Homo Sapiens
auugaaugggaacuagaaaaccacuggaaacu

SEQ ID NO: 336344 - RNA, 32 nt, Homo Sapiens
ggugagagggaagaaggggagguuggggggcu

SEQ ID NO: 336345 - RNA, 29 nt, Homo Sapiens
ggccuugguggacagaggauggggaaagg

SEQ ID NO: 336346 - RNA, 32 nt, Homo Sapiens
gugagagagaaaaugauuuagaucuuggugcu

SEQ ID NO: 336347 - RNA, 32 nt, Homo Sapiens
ucacacuucaaggaggcagcucucuagacagg

SEQ ID NO: 336348 - RNA, 32 nt, Homo Sapiens
agcuagaucugugugcauguguguguuugugu

SEQ ID NO: 336349 - RNA, 32 nt, Homo Sapiens
uacucccugauauuauuuucuaguuguguauc

SEQ ID NO: 336350 - RNA, 32 nt, Homo Sapiens
aauguaugugauagucaaaaaaucacaguuuu

SEQ ID NO: 336351 - RNA, 32 nt, Homo Sapiens
agaacacagaucuauuugagaugauugagaag

SEQ ID NO: 336352 - RNA, 32 nt, Homo Sapiens
ucucaacaccucggggaccccugcugcuccug

SEQ ID NO: 336353 - RNA, 32 nt, Homo Sapiens
cuggaggaaucggagccggcccugcccucucg

SEQ ID NO: 336354 - RNA, 32 nt, Homo Sapiens
auguuucuauaagauauggugcccuguguauc

SEQ ID NO: 336355 - RNA, 32 nt, Homo Sapiens
cugagcugguggcacccuccccugggccggaa

SEQ ID NO: 336356 - RNA, 32 nt, Homo Sapiens
ugguacccccuucucuccccagccccaugugg

SEQ ID NO: 336357 - RNA, 32 nt, Homo Sapiens
gaagcauuuggguaaacaguccaggcaccuga

SEQ ID NO: 336358 - RNA, 32 nt, Homo Sapiens
uguuucaucuucuucuuuacuuuuagcuucua

SEQ ID NO: 336359 - RNA, 32 nt, Homo Sapiens
ccauaauuuaguguuauuuuuacuuuauuuag

SEQ ID NO: 336360 - RNA, 32 nt, Homo Sapiens
uccucuccucaccuggccccagcuccugcccc

SEQ ID NO: 336361 - RNA, 32 nt, Homo Sapiens
ccugagacgaaaguccugggggucuggucuag

SEQ ID NO: 336362 - RNA, 32 nt, Homo Sapiens
uaguagaggcggaguuucaccauguuggccag

SEQ ID NO: 336363 - RNA, 31 nt, Homo Sapiens
cuguguggggcggugagcgccggcccagccu

SEQ ID NO: 336364 - RNA, 32 nt, Homo Sapiens
uggaugaguugcaccuugcaucuugagcaugc

SEQ ID NO: 336365 - RNA, 32 nt, Homo Sapiens
gcuuucagcccagacuccaagcagcugcuauc

SEQ ID NO: 336366 - RNA, 32 nt, Homo Sapiens
gugagagcggcuuuccaggacggugcgaugug

SEQ ID NO: 336367 - RNA, 32 nt, Homo Sapiens
ccuuucuucaugcccuguugaacucuccuacc

SEQ ID NO: 336368 - RNA, 28 nt, Homo Sapiens
agaaugaggccggcguucgcccugugcc

SEQ ID NO: 336369 - RNA, 29 nt, Homo Sapiens
caacauggcagcgguuggggcuggugguu

SEQ ID NO: 336370 - RNA, 32 nt, Homo Sapiens
agugcuugggugggagacaaauuuuaccuggc

SEQ ID NO: 336371 - RNA, 32 nt, Homo Sapiens
gggcaccgcaggagcuccgcgcggcugcagcg

SEQ ID NO: 336372 - RNA, 32 nt, Homo Sapiens
agcuauuauuuucucccaccauauuuuuuaau

SEQ ID NO: 336373 - RNA, 32 nt, Homo Sapiens
uugcauagaauccucacgcaaguagauacaug

SEQ ID NO: 336374 - RNA, 32 nt, Homo Sapiens
gcgaccacuuguuuuucuuuuugucauaauac

SEQ ID NO: 336375 - RNA, 32 nt, Homo Sapiens
aucccgcggccgcgguucggacccgccggcga

SEQ ID NO: 336376 - RNA, 32 nt, Homo Sapiens
gguaaugaaacaccucagcugggcucuuggga

SEQ ID NO: 336377 - RNA, 32 nt, Homo Sapiens
ucccugagggaagaggcccuugagucacagac

SEQ ID NO: 336378 - RNA, 32 nt, Homo Sapiens
ucccacccaacccccaggaccucaggcugcug

SEQ ID NO: 336379 - RNA, 32 nt, Homo Sapiens
ggagaggcggcuguccuuggagggauccuuuc

SEQ ID NO: 336380 - RNA, 32 nt, Homo Sapiens
ggugcagguaacaacgcccauaaacagagaug

SEQ ID NO: 336381 - RNA, 32 nt, Homo Sapiens
acuccacaaaaauuuagauuguaacugagcuu

SEQ ID NO: 336382 - RNA, 32 nt, Homo Sapiens
gcguccccgccuuccucccgcgcucagccacg

SEQ ID NO: 336383 - RNA, 32 nt, Homo Sapiens
ggaagggggccuggagaggggaggcaggggcc

SEQ ID NO: 336384 - RNA, 32 nt, Homo Sapiens
cuucaagagagaaaauucauauugugugguug

SEQ ID NO: 336385 - RNA, 32 nt, Homo Sapiens
caacacauuuuuccccaugaacggugcuguuc

SEQ ID NO: 336386 - RNA, 32 nt, Homo Sapiens
gcgggccccaaccggccggaccucagcaauaa

SEQ ID NO: 336387 - RNA, 32 nt, Homo Sapiens
ccaaauauuaaacaugugggugauaugaggca

SEQ ID NO: 336388 - RNA, 32 nt, Homo Sapiens
cuaaugugguggccugcaagccaggccauccc

SEQ ID NO: 336389 - RNA, 30 nt, Homo Sapiens
gaccgcuugaaagugggggaaagugccggc

SEQ ID NO: 336390 - RNA, 31 nt, Homo Sapiens
ugcagggagaaccagaaccacagcagcucua

SEQ ID NO: 336391 - RNA, 32 nt, Homo Sapiens
acuuggccuaugugcuggccgcaccugaacau

SEQ ID NO: 336392 - RNA, 32 nt, Homo Sapiens
auugcgagaaacagagaucauaaagagcacgu

SEQ ID NO: 336393 - RNA, 32 nt, Homo Sapiens
cgccacugccgccgccauuuugugucugugga

SEQ ID NO: 336394 - RNA, 31 nt, Homo Sapiens
gugaacucagccuguuucagagccuccacac

SEQ ID NO: 336395 - RNA, 32 nt, Homo Sapiens
agaacuuccacugaauacacuagaaaauacag

SEQ ID NO: 336396 - RNA, 32 nt, Homo Sapiens
agagcugccugcuuuucuuaaugucagagugc

SEQ ID NO: 336397 - RNA, 32 nt, Homo Sapiens
auuuggaugaacuagaagaagaauuaaauacc

SEQ ID NO: 336398 - RNA, 32 nt, Homo Sapiens
ccacugcccuccccuggcccucaugucccccc

SEQ ID NO: 336399 - RNA, 32 nt, Homo Sapiens
ucgggaagggcugcaucuccgagccgaaguca

SEQ ID NO: 336400 - RNA, 32 nt, Homo Sapiens
accaucagcgaguucacacuggagaaagaccu

SEQ ID NO: 336401 - RNA, 32 nt, Homo Sapiens
auaagaaaaugaaauagaaggauacugcaucu

SEQ ID NO: 336402 - RNA, 32 nt, Homo Sapiens
ucauccuuggcccuuccgcuccaccagccugg

SEQ ID NO: 336403 - RNA, 32 nt, Homo Sapiens
gaauuuuaccaggucgugcacacacacaagcc

SEQ ID NO: 336404 - RNA, 32 nt, Homo Sapiens
ugagcaaggguucacaugcauucuuuuauacu

SEQ ID NO: 336405 - RNA, 32 nt, Homo Sapiens
ggggcggcgcagcgggcggaggcggccguggg

SEQ ID NO: 336406 - RNA, 32 nt, Homo Sapiens
cggcagcguggcccugagcauggcaagggggu

SEQ ID NO: 336407 - RNA, 32 nt, Homo Sapiens
cuccggaugccaggaccugaaaugggccgacc

SEQ ID NO: 336408 - RNA, 32 nt, Homo Sapiens
cuccggacgccaggaccugaaaugggccgacu

SEQ ID NO: 336409 - RNA, 32 nt, Homo Sapiens
caugccuguaaucccaguacuuuggaaagccg

SEQ ID NO: 336410 - RNA, 32 nt, Homo Sapiens
aagcauacagaaaaguagagaggacgaaccuc

SEQ ID NO: 336411 - RNA, 32 nt, Homo Sapiens
ggucaggcugggguaagccgggguuccacagg

SEQ ID NO: 336412 - RNA, 32 nt, Homo Sapiens
cccaggaaugaucauuugcugaagaugguguc

SEQ ID NO: 336413 - RNA, 32 nt, Homo Sapiens
ggauuuugaagagguuaacuaauuacaggcua

SEQ ID NO: 336414 - RNA, 32 nt, Homo Sapiens
ugccugggugucgggccaccagaaggcucugc

SEQ ID NO: 336415 - RNA, 32 nt, Homo Sapiens
agaggccgcgacggagcucccagaccggccau

SEQ ID NO: 336416 - RNA, 32 nt, Homo Sapiens
acacgguucgccccgccugcaguauuggggcg

SEQ ID NO: 336417 - RNA, 32 nt, Homo Sapiens
cggacgccggcggcguuuuccagcucgagugc

SEQ ID NO: 336418 - RNA, 32 nt, Homo Sapiens
acuuaaaaaacaagcauacaaacaaacauaag

SEQ ID NO: 336419 - RNA, 32 nt, Homo Sapiens
uuuuucccacuaaauuuuuucuuaaauuaccc

SEQ ID NO: 336420 - RNA, 32 nt, Homo Sapiens
guccugcucagguguuagguacaguguguuug

SEQ ID NO: 336421 - RNA, 32 nt, Homo Sapiens
uuuuguuuguuuugauuucauuuacguuuuuc

SEQ ID NO: 336422 - RNA, 32 nt, Homo Sapiens
cggggaccuggauaguuaagggcuuuuccaaa

SEQ ID NO: 336423 - RNA, 32 nt, Homo Sapiens
gcacgggguugcggaucccgcggccgcgguuc

SEQ ID NO: 336424 - RNA, 32 nt, Homo Sapiens
gaccuuugaagagcuucauuuugagaucaagc

SEQ ID NO: 336425 - RNA, 32 nt, Homo Sapiens
gugggguuaagugagguggggaccaaaggaaa

SEQ ID NO: 336426 - RNA, 32 nt, Homo Sapiens
ggauaagucaguuguuuguaaacucuagguag

SEQ ID NO: 336427 - RNA, 32 nt, Homo Sapiens
aggccacgugcagcuggcggacggcucugacc

SEQ ID NO: 336428 - RNA, 32 nt, Homo Sapiens
gcuuucuacauaucuguuuuagauaaaaauuc

SEQ ID NO: 336429 - RNA, 32 nt, Homo Sapiens
ccaaguggugcuuucuuccaaaugccuugagg

SEQ ID NO: 336430 - RNA, 32 nt, Homo Sapiens
uccuuucucuuccuccucucuguaaugguaug

SEQ ID NO: 336431 - RNA, 32 nt, Homo Sapiens
cucucuagaaaugucaugauugagcuucagag

SEQ ID NO: 336432 - RNA, 32 nt, Homo Sapiens
ugaacagggaaugaacaugaguuuuuguaacg

SEQ ID NO: 336433 - RNA, 32 nt, Homo Sapiens
ccacagugagaagccagacuuuggcgacggga

SEQ ID NO: 336434 - RNA, 32 nt, Homo Sapiens
auauucuuguggccaugccgaagcccaccucu

SEQ ID NO: 336435 - RNA, 32 nt, Homo Sapiens
uugugaugagggugagaaaaagaauccucagu

SEQ ID NO: 336436 - RNA, 31 nt, Homo Sapiens
ggagccuggggcugccugcaugcgcgcaaag

SEQ ID NO: 336437 - RNA, 32 nt, Homo Sapiens
ugcugcugcuacugccgccgccgcagcggcug

SEQ ID NO: 336438 - RNA, 32 nt, Homo Sapiens
ucuuaaaucuucuguuccuccuuuuuccaagg

SEQ ID NO: 336439 - RNA, 32 nt, Homo Sapiens
cggcuccgcuccgcacugcccggcgccgccuc

SEQ ID NO: 336440 - RNA, 32 nt, Homo Sapiens
ccucuguacacacacacacacacacacacaua

SEQ ID NO: 336441 - RNA, 32 nt, Homo Sapiens
gagaguucagagacuaccacaaacacuacaac

SEQ ID NO: 336442 - RNA, 32 nt, Homo Sapiens
acugcagcccgugcugaugacuguggcuguga

SEQ ID NO: 336443 - RNA, 32 nt, Homo Sapiens
agccaggacuugugugaugaucuuacagagca

SEQ ID NO: 336444 - RNA, 32 nt, Homo Sapiens
uaccgcaaggaccuggagauugugcucugcag

SEQ ID NO: 336445 - RNA, 32 nt, Homo Sapiens
ccgaaaccagcggcagccgcacggccacuuga

SEQ ID NO: 336446 - RNA, 32 nt, Homo Sapiens
aauccaguuacugaaggaauuaaugaaaacgu

SEQ ID NO: 336447 - RNA, 32 nt, Homo Sapiens
uucuuggaagaaaguauaaaauugaccggcau

SEQ ID NO: 336448 - RNA, 32 nt, Homo Sapiens
ucuuuccucccuccccugcaugaggcagaggc

SEQ ID NO: 336449 - RNA, 32 nt, Homo Sapiens
guuuuaaguccuccacccuguuauaagagacu

SEQ ID NO: 336450 - RNA, 32 nt, Homo Sapiens
gcccugcagcagauuucuuugauaauuuagcu

SEQ ID NO: 336451 - RNA, 32 nt, Homo Sapiens
uuggagagcacagcugccggcccgcgagccag

SEQ ID NO: 336452 - RNA, 32 nt, Homo Sapiens
ucucuucucuuucucuccccgcugugugcaua

SEQ ID NO: 336453 - RNA, 32 nt, Homo Sapiens
cuaguaacaucaugcuuccaauaguuugccuc

SEQ ID NO: 336454 - RNA, 32 nt, Homo Sapiens
ccaggguggaaauuauuuuaccugucccuuuu

SEQ ID NO: 336455 - RNA, 32 nt, Homo Sapiens
agcccuucuuugcaugaagcaguguugugacu

SEQ ID NO: 336456 - RNA, 32 nt, Homo Sapiens
ggcugggugggaagagggguggccgccucggc

SEQ ID NO: 336457 - RNA, 32 nt, Homo Sapiens
aagccccggccgcgcagggcgccgcgcgcagu

SEQ ID NO: 336458 - RNA, 32 nt, Homo Sapiens
ccaaguggcagccccaggggccugcccugcag

SEQ ID NO: 336459 - RNA, 32 nt, Homo Sapiens
accuguauauauauuuuuuaaucgacgugaaa

SEQ ID NO: 336460 - RNA, 30 nt, Homo Sapiens
gcuucccuggacugcaggaacccguccuau

SEQ ID NO: 336461 - RNA, 32 nt, Homo Sapiens
ggccuuuccuuccaucggaaccguucucccgg

SEQ ID NO: 336462 - RNA, 32 nt, Homo Sapiens
uggaaagcaaugggacagcaaagggaaacaca

SEQ ID NO: 336463 - RNA, 32 nt, Homo Sapiens
cuacuaaaaaauacaaaaaauuagcugggugu

SEQ ID NO: 336464 - RNA, 32 nt, Homo Sapiens
uccccgccgccgccgcgcggaugccaagcacc

SEQ ID NO: 336465 - RNA, 32 nt, Homo Sapiens
aaccucauugaauugaauacccacagucagaa

SEQ ID NO: 336466 - RNA, 32 nt, Homo Sapiens
augucugaggcacaaguuggcuguucaucuuu

SEQ ID NO: 336467 - RNA, 32 nt, Homo Sapiens
ugcccugauugccugcccugggggagagaagu

SEQ ID NO: 336468 - RNA, 32 nt, Homo Sapiens
augauuuauuaagagccaucugugauuugaga

SEQ ID NO: 336469 - RNA, 32 nt, Homo Sapiens
uuuccuuauuugacauuuuagagaguuuccuu

SEQ ID NO: 336470 - RNA, 32 nt, Homo Sapiens
uuggcaagaaugccuguacaugcccaagaagc

SEQ ID NO: 336471 - RNA, 32 nt, Homo Sapiens
gaggccugaguaauggaauuucaauuagcuuc

SEQ ID NO: 336472 - RNA, 32 nt, Homo Sapiens
caucccccaaaauauuuuauugaacuagguuc

SEQ ID NO: 336473 - RNA, 32 nt, Homo Sapiens
cugucuuacugauuuuuguauucuuagcacug

SEQ ID NO: 336474 - RNA, 32 nt, Homo Sapiens
agcuauuuuuaaaguuugugaauggaguguua

SEQ ID NO: 336475 - RNA, 32 nt, Homo Sapiens
uuccccucacuuuuagaaguuaauugauggcu

SEQ ID NO: 336476 - RNA, 32 nt, Homo Sapiens
uggcucucagcauccaucaucaucgucgucug

SEQ ID NO: 336477 - RNA, 32 nt, Homo Sapiens
ccgcgguaggugccaggacgccaaggccggga

SEQ ID NO: 336478 - RNA, 32 nt, Homo Sapiens
ugaaaaguuacucuagaggaaaaaugucuaaa

SEQ ID NO: 336479 - RNA, 32 nt, Homo Sapiens
cgcuguccuccgccggcccgcgugggaggacg

SEQ ID NO: 336480 - RNA, 32 nt, Homo Sapiens
cauuaucaggccagcugcagccucuugccuug

SEQ ID NO: 336481 - RNA, 32 nt, Homo Sapiens
cugcgcucggcggaagacgcggcagcccugcg

SEQ ID NO: 336482 - RNA, 32 nt, Homo Sapiens
gaaaggcaagguccggcccauccccaggcacc

SEQ ID NO: 336483 - RNA, 32 nt, Homo Sapiens
cgggacgggcaggggcugaggaccccgcgcca

SEQ ID NO: 336484 - RNA, 31 nt, Homo Sapiens
caucugucauggaaaaacgugagacguuugu

SEQ ID NO: 336485 - RNA, 32 nt, Homo Sapiens
agaaacauaaaaaguaugacuggccauaaugg

SEQ ID NO: 336486 - RNA, 29 nt, Homo Sapiens
aagcauagacgucucagguuauucguuac

SEQ ID NO: 336487 - RNA, 32 nt, Homo Sapiens
gggccucacagcacagagugaccgcugccugg

SEQ ID NO: 336488 - RNA, 32 nt, Homo Sapiens
gagaagauauaaaaagacauauuuuuaaaacu

SEQ ID NO: 336489 - RNA, 32 nt, Homo Sapiens
gucaggagaucaagacuguccuggacaacaug

SEQ ID NO: 336490 - RNA, 32 nt, Homo Sapiens
augaagagauaaaauuauaaaaaugauacauc

SEQ ID NO: 336491 - RNA, 32 nt, Homo Sapiens
cagggaaggagcuucggggccggggguugggc

SEQ ID NO: 336492 - RNA, 32 nt, Homo Sapiens
uguauguaaguuugucuuguggcauuaagacu

SEQ ID NO: 336493 - RNA, 32 nt, Homo Sapiens
acuguugucucuucuuuuuuucauccaaaauu

SEQ ID NO: 336494 - RNA, 32 nt, Homo Sapiens
uaaaaaucugcacuuugugaguugagcccccu

SEQ ID NO: 336495 - RNA, 32 nt, Homo Sapiens
cuuuugaggaacacaugucaagcaggaaccuu

SEQ ID NO: 336496 - RNA, 30 nt, Homo Sapiens
uucuucaucugcuggggggaaaaaguaaau

SEQ ID NO: 336497 - RNA, 32 nt, Homo Sapiens
uaacccuuccuuguaucugucuucccaggaga

SEQ ID NO: 336498 - RNA, 32 nt, Homo Sapiens
ucuaauuauagcaagaucauauuaaggaaugc

SEQ ID NO: 336499 - RNA, 32 nt, Homo Sapiens
guugagugauagcugggaaaguuuuacauugu

SEQ ID NO: 336500 - RNA, 32 nt, Homo Sapiens
agaaaugccagcugcuguagaccccaugagaa

SEQ ID NO: 336501 - RNA, 32 nt, Homo Sapiens
cuauagaaaggcauucuuaaaaguuaaagaau

SEQ ID NO: 336502 - RNA, 32 nt, Homo Sapiens
uucuguaauguuucauuuuuuaaaucugacaa

SEQ ID NO: 336503 - RNA, 32 nt, Homo Sapiens
ggaaaucaccaguuuuaacaugcaugcauuuu

SEQ ID NO: 336504 - RNA, 32 nt, Homo Sapiens
ucuccuucuccccuccuucuuuuucagacuga

SEQ ID NO: 336505 - RNA, 32 nt, Homo Sapiens
agcgaccuggccucaccgcugccgccucuucc

SEQ ID NO: 336506 - RNA, 32 nt, Homo Sapiens
ucuggaugcuccaugggugggggucgggagug

SEQ ID NO: 336507 - RNA, 32 nt, Homo Sapiens
uauacacaauagauuuuccauccaguugucuc

SEQ ID NO: 336508 - RNA, 32 nt, Homo Sapiens
cccuccccuccucauucgggcagagggaaaua

SEQ ID NO: 336509 - RNA, 32 nt, Homo Sapiens
guugcucuauauguuguuuuuaauuuuaaaaa

SEQ ID NO: 336510 - RNA, 32 nt, Homo Sapiens
uaccaguuugauuuauuggacaagauacuaag

SEQ ID NO: 336511 - RNA, 32 nt, Homo Sapiens
uucucuuucaccguuuaaccgguacagaauaa

SEQ ID NO: 336512 - RNA, 29 nt, Homo Sapiens
gagcugucauaugugaauguuuuacaguc

SEQ ID NO: 336513 - RNA, 32 nt, Homo Sapiens
aauaaauaguugccuccacuaaaucaggaaaa

SEQ ID NO: 336514 - RNA, 32 nt, Homo Sapiens
cgucgccgggacccucgcgcgcgaccagccga

SEQ ID NO: 336515 - RNA, 32 nt, Homo Sapiens
cucccccucuguuuuuugcugugucaucucug

SEQ ID NO: 336516 - RNA, 32 nt, Homo Sapiens
uucccacucccucucuugccgacaagggcaac

SEQ ID NO: 336517 - RNA, 32 nt, Homo Sapiens
agaaccuuggggugguugugccagccugccuu

SEQ ID NO: 336518 - RNA, 32 nt, Homo Sapiens
gguuucacaguagauacaccagcaaaagcaag

SEQ ID NO: 336519 - RNA, 32 nt, Homo Sapiens
ugcugcugcugcugggccgccggcgcguggac

SEQ ID NO: 336520 - RNA, 32 nt, Homo Sapiens
ucgccgcugugacccuguuaccugcaagaacu

SEQ ID NO: 336521 - RNA, 32 nt, Homo Sapiens
uucuucuccaugaccuugugcgagaugccaua

SEQ ID NO: 336522 - RNA, 31 nt, Homo Sapiens
acaagucauuugaccuuucagaauuuuauuu

SEQ ID NO: 336523 - RNA, 32 nt, Homo Sapiens
guuaaccucuuauacauuauagauaauucuaa

SEQ ID NO: 336524 - RNA, 32 nt, Homo Sapiens
gagcgcggacggcugggcugcugcugggcggc

SEQ ID NO: 336525 - RNA, 32 nt, Homo Sapiens
acacuuacugguuuaauuugcacuuauuaacc

SEQ ID NO: 336526 - RNA, 32 nt, Homo Sapiens
cggacagaggggcuggcuguugagaugggugg

SEQ ID NO: 336527 - RNA, 32 nt, Homo Sapiens
ggccuguguuuccccuggcccaggccucagcc

SEQ ID NO: 336528 - RNA, 32 nt, Homo Sapiens
cacaccguacuccagccugggcgacaucuaga

SEQ ID NO: 336529 - RNA, 32 nt, Homo Sapiens
agaaauguuuuaguuauugaaacuacaguuga

SEQ ID NO: 336530 - RNA, 32 nt, Homo Sapiens
auuuccacaaauuuauacaauguauauugagc

SEQ ID NO: 336531 - RNA, 32 nt, Homo Sapiens
uccaguccucgcguccccgccguggucccggu

SEQ ID NO: 336532 - RNA, 32 nt, Homo Sapiens
ugguucccuugaugaagaaguugauaugccuu

SEQ ID NO: 336533 - RNA, 32 nt, Homo Sapiens
caugcagacaggaggaagcugagcucgacauu

SEQ ID NO: 336534 - RNA, 32 nt, Homo Sapiens
gguucugcuaacucuuuuuuuucucuugguua

SEQ ID NO: 336535 - RNA, 32 nt, Homo Sapiens
ccuccucagcucuuggaauugcuggcaagggg

SEQ ID NO: 336536 - RNA, 32 nt, Homo Sapiens
ccauuuguucuucaugugcagugucgacaauu

SEQ ID NO: 336537 - RNA, 32 nt, Homo Sapiens
cucgucgagaaaacuuuuccugccgacucagu

SEQ ID NO: 336538 - RNA, 32 nt, Homo Sapiens
aaagugcuagaguacaugguccguguguggcc

SEQ ID NO: 336539 - RNA, 32 nt, Homo Sapiens
ccggcuccgccugcggccgccauuuuguacca

SEQ ID NO: 336540 - RNA, 32 nt, Homo Sapiens
cggcgccgcagcuggacgccccucccgggcuc

SEQ ID NO: 336541 - RNA, 32 nt, Homo Sapiens
auacucuucucuauuuuuuuuauaaauuuuua

SEQ ID NO: 336542 - RNA, 32 nt, Homo Sapiens
uuaagauuaaacaaaaacauuuuucaagucuc

SEQ ID NO: 336543 - RNA, 32 nt, Homo Sapiens
ccccugcgccuggccuccgagggcuuuccugu

SEQ ID NO: 336544 - RNA, 32 nt, Homo Sapiens
aaaacuagcauaacauaaguacucauuuguaa

SEQ ID NO: 336545 - RNA, 32 nt, Homo Sapiens
ggcacugugcucggggacccagagaugccugu

SEQ ID NO: 336546 - RNA, 32 nt, Homo Sapiens
agcugagguuagugcuggccuggucagcaugg

SEQ ID NO: 336547 - RNA, 32 nt, Homo Sapiens
gcucggccgcguggaggugaccgggcggaacu

SEQ ID NO: 336548 - RNA, 32 nt, Homo Sapiens
uaaaaguaagggugucgugcugauggcccugu

SEQ ID NO: 336549 - RNA, 32 nt, Homo Sapiens
accuggcccacuuuaacuauuuuaaaggguac

SEQ ID NO: 336550 - RNA, 32 nt, Homo Sapiens
gcaucucuguuguaggcccagccaccggcaca

SEQ ID NO: 336551 - RNA, 32 nt, Homo Sapiens
gaaauauacauuuaugucuuuauauuguaaua

SEQ ID NO: 336552 - RNA, 32 nt, Homo Sapiens
ugaccuugauuuucccaaacgcugccucuugg

SEQ ID NO: 336553 - RNA, 32 nt, Homo Sapiens
caaagagauaaaacuuuaugcccagauucccc

SEQ ID NO: 336554 - RNA, 27 nt, Homo Sapiens
ccaugcuuccuccugccauucauuucu

SEQ ID NO: 336555 - RNA, 32 nt, Homo Sapiens
caugacaauuacuacuguuuccacauuuacaa

SEQ ID NO: 336556 - RNA, 32 nt, Homo Sapiens
gccccggaggacaggcaagggccugagaccac

SEQ ID NO: 336557 - RNA, 32 nt, Homo Sapiens
cuggcccagcaucuccaccucccccaugcaac

SEQ ID NO: 336558 - RNA, 32 nt, Homo Sapiens
cuugcuuccguggucugccuccuaguugaauc

SEQ ID NO: 336559 - RNA, 32 nt, Homo Sapiens
auugcucuuuugacuauucaguuuuuuaauug

SEQ ID NO: 336560 - RNA, 32 nt, Homo Sapiens
ucagagcgggggugcuggagcgcgugcagaca

SEQ ID NO: 336561 - RNA, 32 nt, Homo Sapiens
cagguggagagccgcaugucacugucagagau

SEQ ID NO: 336562 - RNA, 32 nt, Homo Sapiens
gcugccaccugcaugcggugccggcgagugcu

SEQ ID NO: 336563 - RNA, 32 nt, Homo Sapiens
uaggcggcugcggcugcuacggcggcgcaugc

SEQ ID NO: 336564 - RNA, 32 nt, Homo Sapiens
ccugguaauguuugugguuauaucauuuacac

SEQ ID NO: 336565 - RNA, 32 nt, Homo Sapiens
cuuccuguucccgaauccucucuucuugucgc

SEQ ID NO: 336566 - RNA, 32 nt, Homo Sapiens
cgcccagccccauuuuauuuuuuacuuuaaau

SEQ ID NO: 336567 - RNA, 32 nt, Homo Sapiens
ucaucaucaucauugucgucgucaucaucuug

SEQ ID NO: 336568 - RNA, 32 nt, Homo Sapiens
aggguacgcugguuccccucuccagcuggagg

SEQ ID NO: 336569 - RNA, 32 nt, Homo Sapiens
acuauuacaaaaccagacacuuuuacauucau

SEQ ID NO: 336570 - RNA, 32 nt, Homo Sapiens
gaaacgauauuuaaucagaacaaaauacugug

SEQ ID NO: 336571 - RNA, 32 nt, Homo Sapiens
aaaucugucuuugcggggccugucucagugau

SEQ ID NO: 336572 - RNA, 32 nt, Homo Sapiens
agggcgagagcucgcgucgccggaaaggaaga

SEQ ID NO: 336573 - RNA, 28 nt, Homo Sapiens
aguggagggcggccgaugaggacgguuc

SEQ ID NO: 336574 - RNA, 32 nt, Homo Sapiens
gaaucgcugccuccuuuccccagccccaccuu

SEQ ID NO: 336575 - RNA, 32 nt, Homo Sapiens
cacacuacagaaaaauauuaagaagaaaaaca

SEQ ID NO: 336576 - RNA, 32 nt, Homo Sapiens
cucaaaaccuagacuuuauaaaacugacuuuu

SEQ ID NO: 336577 - RNA, 32 nt, Homo Sapiens
uagguagaaaagacaaaacccaaacaccuagu

SEQ ID NO: 336578 - RNA, 32 nt, Homo Sapiens
ggagacagccagcagaggccuaucagaguuag

SEQ ID NO: 336579 - RNA, 32 nt, Homo Sapiens
cacaucugggccaaccacaccacucaaggcca

SEQ ID NO: 336580 - RNA, 32 nt, Homo Sapiens
cucuaaugcuaagagugcuaaaaacuauuuca

SEQ ID NO: 336581 - RNA, 32 nt, Homo Sapiens
gaagguggggagagcccagaaggacauugcag

SEQ ID NO: 336582 - RNA, 32 nt, Homo Sapiens
aacaauuggucugcauaccauguggaacgagc

SEQ ID NO: 336583 - RNA, 32 nt, Homo Sapiens
gugcuuuuuggaaagaugauggacugggacuc

SEQ ID NO: 336584 - RNA, 32 nt, Homo Sapiens
acucugccaccucauuucacaagcauuuaugg

SEQ ID NO: 336585 - RNA, 32 nt, Homo Sapiens
gaggaugggguggaaucugaggggugagccuu

SEQ ID NO: 336586 - RNA, 32 nt, Homo Sapiens
ggccagggagggccaugauuucccucccgggg

SEQ ID NO: 336587 - RNA, 32 nt, Homo Sapiens
gagcacaaggacccagcaggguagaagaggcu

SEQ ID NO: 336588 - RNA, 32 nt, Homo Sapiens
agaagggaaggggaguguccccagccaacccc

SEQ ID NO: 336589 - RNA, 32 nt, Homo Sapiens
agaaaauuaaaauaggcauauuacuaggugac

SEQ ID NO: 336590 - RNA, 32 nt, Homo Sapiens
cuauucucccagccccgcacugccugggggcu

SEQ ID NO: 336591 - RNA, 32 nt, Homo Sapiens
uuuguguguguugggggguacuuuuaaaggug

SEQ ID NO: 336592 - RNA, 32 nt, Homo Sapiens
auugugaagauaaaugaaaguuuuaauucuag

SEQ ID NO: 336593 - RNA, 32 nt, Homo Sapiens
uaaacugcgaccccaacaucacuuccuucaug

SEQ ID NO: 336594 - RNA, 32 nt, Homo Sapiens
ccgagugcagcuggagcgccgacgucgccgag

SEQ ID NO: 336595 - RNA, 32 nt, Homo Sapiens
cggcugcgguuccuggugcugcucggcgcgcg

SEQ ID NO: 336596 - RNA, 32 nt, Homo Sapiens
cuguguccuggagccgagcgacgcugccuccu

SEQ ID NO: 336597 - RNA, 32 nt, Homo Sapiens
agauuugacuaccccacaggauuucagacuug

SEQ ID NO: 336598 - RNA, 32 nt, Homo Sapiens
auuauaacuaaaucacuguguuuucagaauga

SEQ ID NO: 336599 - RNA, 32 nt, Homo Sapiens
ugguccuuucuuuugugccaguauucaagugg

SEQ ID NO: 336600 - RNA, 32 nt, Homo Sapiens
uguuacaaaucccaguucuauuucauaacagc

SEQ ID NO: 336601 - RNA, 32 nt, Homo Sapiens
aggaggcgugugucuggccgggcccccucucc

SEQ ID NO: 336602 - RNA, 32 nt, Homo Sapiens
cacuguaaauguuugcaaguggcuguguuuua

SEQ ID NO: 336603 - RNA, 32 nt, Homo Sapiens
ccgucuguccacuccaugccaccuuucucagc

SEQ ID NO: 336604 - RNA, 32 nt, Homo Sapiens
gcccgcaaggacaaugaauccacucacauugc

SEQ ID NO: 336605 - RNA, 32 nt, Homo Sapiens
ggggggcguggcugcccuuccacauguggccu

SEQ ID NO: 336606 - RNA, 32 nt, Homo Sapiens
ugggggagagcaggcuggcagcucuccaguca

SEQ ID NO: 336607 - RNA, 32 nt, Homo Sapiens
ucuugacugggaggcccggcgcgaggcucugc

SEQ ID NO: 336608 - RNA, 31 nt, Homo Sapiens
ucuugcugcugcugccugccugcccacccgc

SEQ ID NO: 336609 - RNA, 32 nt, Homo Sapiens
caaguaaacggagucuuggagagauugaauug

SEQ ID NO: 336610 - RNA, 32 nt, Homo Sapiens
ggggcagccucuaugggacaagagugacacag

SEQ ID NO: 336611 - RNA, 32 nt, Homo Sapiens
gucagucggcggccggcgcccggcuugugcuc

SEQ ID NO: 336612 - RNA, 32 nt, Homo Sapiens
uucaguauacacgccuuuucauuuucaguccc

SEQ ID NO: 336613 - RNA, 32 nt, Homo Sapiens
uucagucaacaaguauuuuaacucucagucca

SEQ ID NO: 336614 - RNA, 32 nt, Homo Sapiens
cuaacaucucuggucguucucaucuguaaaau

SEQ ID NO: 336615 - RNA, 32 nt, Homo Sapiens
ccccaggcucugugggcccagcccuaccccug

SEQ ID NO: 336616 - RNA, 32 nt, Homo Sapiens
gucuacaugaggucugcgggguccuggccggg

SEQ ID NO: 336617 - RNA, 32 nt, Homo Sapiens
cccugcgcugcuccugcccccgagucgacacu

SEQ ID NO: 336618 - RNA, 32 nt, Homo Sapiens
gugccaaaaauaucauaccuaauuuuuauagu

SEQ ID NO: 336619 - RNA, 32 nt, Homo Sapiens
gaggcugccgguuucguaaccgucgcuccucc

SEQ ID NO: 336620 - RNA, 32 nt, Homo Sapiens
uuguuugugagcuaugauaaucaaaagucauu

SEQ ID NO: 336621 - RNA, 32 nt, Homo Sapiens
aaaaguagaaauuuuuugcaguuauugcauuc

SEQ ID NO: 336622 - RNA, 32 nt, Homo Sapiens
cucccgcccucccucuccaggucgcccucccg

SEQ ID NO: 336623 - RNA, 32 nt, Homo Sapiens
gaagccugccccaccuccuguauaggaagagg

SEQ ID NO: 336624 - RNA, 32 nt, Homo Sapiens
gcagcggaugggcagcaguucggcgagauaaa

SEQ ID NO: 336625 - RNA, 32 nt, Homo Sapiens
aauuuuuguggaucuccagagaggcccuucuu

SEQ ID NO: 336626 - RNA, 32 nt, Homo Sapiens
gcggcggcggcgauguucucgguccucucgua

SEQ ID NO: 336627 - RNA, 32 nt, Homo Sapiens
ucuggauucccuacagaugcuucuucaccugu

SEQ ID NO: 336628 - RNA, 32 nt, Homo Sapiens
ccuccuggcucggcugcccagaggagggcgca

SEQ ID NO: 336629 - RNA, 32 nt, Homo Sapiens
cuuuaaaaauacacuaauaaagauuauuguuc

SEQ ID NO: 336630 - RNA, 32 nt, Homo Sapiens
uauaucugcuaugauuuuuuuauuugaaauag

SEQ ID NO: 336631 - RNA, 32 nt, Homo Sapiens
ggccucuagggucugggauaagagguuaauga

SEQ ID NO: 336632 - RNA, 32 nt, Homo Sapiens
ucugggugggugaggggcgcgcggauccggag

SEQ ID NO: 336633 - RNA, 32 nt, Homo Sapiens
ucccuuucacuguuuucuuauucuguaauugu

SEQ ID NO: 336634 - RNA, 32 nt, Homo Sapiens
cauuuuugaaagauuaguaauaaaacaugcca

SEQ ID NO: 336635 - RNA, 32 nt, Homo Sapiens
cugccgcuacuucaccugagggccgugaggag

SEQ ID NO: 336636 - RNA, 32 nt, Homo Sapiens
ccucaccccacaauuucuuuaaaaaagaaauu

SEQ ID NO: 336637 - RNA, 32 nt, Homo Sapiens
guuugucaguguuauuuugucaauguugaagu

SEQ ID NO: 336638 - RNA, 32 nt, Homo Sapiens
cuaaauuuaccaccagauacaaacacuacuuc

SEQ ID NO: 336639 - RNA, 32 nt, Homo Sapiens
uguggauacaaauuauuugacauucuucucau

SEQ ID NO: 336640 - RNA, 32 nt, Homo Sapiens
aggggccucaucuguccuguuccuccuguggc

SEQ ID NO: 336641 - RNA, 32 nt, Homo Sapiens
uuaggaaguguuagaaaguugcuggagugaga

SEQ ID NO: 336642 - RNA, 32 nt, Homo Sapiens
ugaggcagcucuuuugcccagagcguucccug

SEQ ID NO: 336643 - RNA, 32 nt, Homo Sapiens
cugccaaggaagugcaauugcauaaaaacaga

SEQ ID NO: 336644 - RNA, 30 nt, Homo Sapiens
gacccaacagguggcaggcaguggacaggg

SEQ ID NO: 336645 - RNA, 32 nt, Homo Sapiens
aaauucuuuuaaaaaauucuuguauuucuagc

SEQ ID NO: 336646 - RNA, 32 nt, Homo Sapiens
ccuugggacgacccggccccagcgcagcuaug

SEQ ID NO: 336647 - RNA, 32 nt, Homo Sapiens
guuuguuuucaauuuuauuaguuucuuuucug

SEQ ID NO: 336648 - RNA, 32 nt, Homo Sapiens
cagcggggaaacugaggcucgggguggagcgc

SEQ ID NO: 336649 - RNA, 32 nt, Homo Sapiens
gggucuggugccucugugguuccagcuccuca

SEQ ID NO: 336650 - RNA, 32 nt, Homo Sapiens
ugcuauuuuuauuauuguuuuccucuuguuga

SEQ ID NO: 336651 - RNA, 32 nt, Homo Sapiens
uuucauuuguuauauauuacaaaccaucacac

SEQ ID NO: 336652 - RNA, 32 nt, Homo Sapiens
auauuuucugcuuguuguuagaauagaaacag

SEQ ID NO: 336653 - RNA, 32 nt, Homo Sapiens
cucaguucacucuuuccuuguuuauuaaauau

SEQ ID NO: 336654 - RNA, 32 nt, Homo Sapiens
ucuaaaucaaaccaggugcaauuauuucuuua

SEQ ID NO: 336655 - RNA, 32 nt, Homo Sapiens
accuaaucugguuuuuuauaacuucuguaaga

SEQ ID NO: 336656 - RNA, 32 nt, Homo Sapiens
gugcuaauauaaaauauuuuuaacacuugaga

SEQ ID NO: 336657 - RNA, 32 nt, Homo Sapiens
augugauucuggaaguccuggaugccagagac

SEQ ID NO: 336658 - RNA, 32 nt, Homo Sapiens
cucuuugauuucacagaauauucauucagaag

SEQ ID NO: 336659 - RNA, 32 nt, Homo Sapiens
acuugcgggaugcaguuuugccauugcagcaa

SEQ ID NO: 336660 - RNA, 32 nt, Homo Sapiens
uuucaauuuccacuuaaauuuuuuaaagcuuu

SEQ ID NO: 336661 - RNA, 32 nt, Homo Sapiens
auuuucuuggaaaaaaugaaaugaauauuuug

SEQ ID NO: 336662 - RNA, 32 nt, Homo Sapiens
agagccugaggagccauuaugaguguggggaa

SEQ ID NO: 336663 - RNA, 32 nt, Homo Sapiens
gugugcuuuucccaaaugaugugugugguguu

SEQ ID NO: 336664 - RNA, 32 nt, Homo Sapiens
gagaucugcugacaccaaauuuuaagcauaca

SEQ ID NO: 336665 - RNA, 32 nt, Homo Sapiens
ugacugcaaaauauuuuguaaauacacuuuuu

SEQ ID NO: 336666 - RNA, 32 nt, Homo Sapiens
auacacagcgccuccagugggagugcaguugg

SEQ ID NO: 336667 - RNA, 32 nt, Homo Sapiens
gaacuaaaauguggaaagaaaagaaugcgaaa

SEQ ID NO: 336668 - RNA, 32 nt, Homo Sapiens
ggucugucaggagacagaggcuuuuuugaauu

SEQ ID NO: 336669 - RNA, 32 nt, Homo Sapiens
gcaggagaagcuguguuuuuuaucuccacacg

SEQ ID NO: 336670 - RNA, 32 nt, Homo Sapiens
ucaggucagcugccuugauuucccucucccag

SEQ ID NO: 336671 - RNA, 32 nt, Homo Sapiens
acaguaugaaugaaaauaauuauaugaaugau

SEQ ID NO: 336672 - RNA, 32 nt, Homo Sapiens
gaauauauauaaauaugugcauguauauaugu

SEQ ID NO: 336673 - RNA, 32 nt, Homo Sapiens
caucagauuuaucgccuauuaugcaguaacag

SEQ ID NO: 336674 - RNA, 32 nt, Homo Sapiens
acugugaaguuggccucaucgguuggcauggg

SEQ ID NO: 336675 - RNA, 32 nt, Homo Sapiens
gugacaagauggcugcagcagcuccagcaacc

SEQ ID NO: 336676 - RNA, 32 nt, Homo Sapiens
uugcggccgccaacgccgcccggacuggagcc

SEQ ID NO: 336677 - RNA, 32 nt, Homo Sapiens
ucacagagauuguuuuucaaaaauaucaaauc

SEQ ID NO: 336678 - RNA, 32 nt, Homo Sapiens
ggcggccacccgagacgcggcgcgcacgcucc

SEQ ID NO: 336679 - RNA, 32 nt, Homo Sapiens
aacugcgucccucuugggcagcagccacacuu

SEQ ID NO: 336680 - RNA, 32 nt, Homo Sapiens
auagagaaaaggaaaccacugaaucaaagaga

SEQ ID NO: 336681 - RNA, 32 nt, Homo Sapiens
gguccaguuccacaggaugcagcugcugcucc

SEQ ID NO: 336682 - RNA, 32 nt, Homo Sapiens
guacuucccuugugucugucuuucuccuaucc

SEQ ID NO: 336683 - RNA, 32 nt, Homo Sapiens
ggugaagcaguccaggcccggcuggucaccag

SEQ ID NO: 336684 - RNA, 32 nt, Homo Sapiens
cuuucuggcuggaagcucugggcauagccugg

SEQ ID NO: 336685 - RNA, 32 nt, Homo Sapiens
ggggucugcuaaggggaaauccaaguccagac

SEQ ID NO: 336686 - RNA, 32 nt, Homo Sapiens
uccccacucugaccucaguuucccuaucuguu

SEQ ID NO: 336687 - RNA, 32 nt, Homo Sapiens
ucuccucgacagcugcuuugccucaggcauaa

SEQ ID NO: 336688 - RNA, 32 nt, Homo Sapiens
cacagauucuuuuuuucaguacuauuuaugau

SEQ ID NO: 336689 - RNA, 32 nt, Homo Sapiens
ucaacugcucuguuuuugaauucuauuugaau

SEQ ID NO: 336690 - RNA, 32 nt, Homo Sapiens
uauucagcagaaaacuuuuuauacucuaauuc

SEQ ID NO: 336691 - RNA, 32 nt, Homo Sapiens
ucgagcccgcaugcgugccugcuggggagggg

SEQ ID NO: 336692 - RNA, 32 nt, Homo Sapiens
uaacugaguaauaaugguuacaucucagguag

SEQ ID NO: 336693 - RNA, 32 nt, Homo Sapiens
cuucucuguaaaucuaguaucauuccaaaaua

SEQ ID NO: 336694 - RNA, 32 nt, Homo Sapiens
aucugcaccccccuccucccucuaccucacuu

SEQ ID NO: 336695 - RNA, 32 nt, Homo Sapiens
ccccuccgcacuguuacccaguguguauauaa

SEQ ID NO: 336696 - RNA, 32 nt, Homo Sapiens
gcuccuauaccuuguccuuccugcuugccuag

SEQ ID NO: 336697 - RNA, 32 nt, Homo Sapiens
ggcugggagcuucucuugggccugcugggucu

SEQ ID NO: 336698 - RNA, 32 nt, Homo Sapiens
auguucaacaccacucggaucccgggcaagga

SEQ ID NO: 336699 - RNA, 32 nt, Homo Sapiens
aagcauguuucauguuuugugacuauauagag

SEQ ID NO: 336700 - RNA, 32 nt, Homo Sapiens
acauacggaauaauccacaaagggcagaagcc

SEQ ID NO: 336701 - RNA, 32 nt, Homo Sapiens
cuuccgcagauaaauguagaaauacacgauuc

SEQ ID NO: 336702 - RNA, 32 nt, Homo Sapiens
ggcaggacuggaagccucaguacucuggggcc

SEQ ID NO: 336703 - RNA, 32 nt, Homo Sapiens
auaacuaguagcugguacauaaucacugagga

SEQ ID NO: 336704 - RNA, 32 nt, Homo Sapiens
caggucggcuccugggcuguggccguggagag

SEQ ID NO: 336705 - RNA, 32 nt, Homo Sapiens
ggaggcaagagugaagcagaggagagcaagcg

SEQ ID NO: 336706 - RNA, 32 nt, Homo Sapiens
ugagcgcccugccugccuaugcauuuugggaa

SEQ ID NO: 336707 - RNA, 32 nt, Homo Sapiens
cccagggucuagcuuuccuucuuccugcugca

SEQ ID NO: 336708 - RNA, 32 nt, Homo Sapiens
acuucuuugagaucuaugaugagcugggagug

SEQ ID NO: 336709 - RNA, 32 nt, Homo Sapiens
agggugggaccaagggugcugcuggaccaagg

SEQ ID NO: 336710 - RNA, 32 nt, Homo Sapiens
uuccuguuccugggugcgccuccaccucccuu

SEQ ID NO: 336711 - RNA, 32 nt, Homo Sapiens
cacccauggacagaagaccuccccucaucuga

SEQ ID NO: 336712 - RNA, 32 nt, Homo Sapiens
ucaccgcccccuaucccgguucugggagagca

SEQ ID NO: 336713 - RNA, 32 nt, Homo Sapiens
uugucaagggaagcuuccugugaaccaaaguu

SEQ ID NO: 336714 - RNA, 32 nt, Homo Sapiens
aagagaagcuggaaguuuuugugaucauuggc

SEQ ID NO: 336715 - RNA, 32 nt, Homo Sapiens
ggagggagaaacaugaguauagaggaggcacc

SEQ ID NO: 336716 - RNA, 32 nt, Homo Sapiens
gguuuaccuauaaaguucagaugagaauacgu

SEQ ID NO: 336717 - RNA, 32 nt, Homo Sapiens
cccuuuuuguaugacacuucucuuccacccug

SEQ ID NO: 336718 - RNA, 32 nt, Homo Sapiens
aauauaauuucaucuguaaauauuucugugau

SEQ ID NO: 336719 - RNA, 32 nt, Homo Sapiens
ggcacggggcugcugagggucuguggaacucc

SEQ ID NO: 336720 - RNA, 32 nt, Homo Sapiens
cgcugcguucccuccgacgguacccacugccg

SEQ ID NO: 336721 - RNA, 32 nt, Homo Sapiens
acauauaaagcucuuauuuacuguauauuuau

SEQ ID NO: 336722 - RNA, 32 nt, Homo Sapiens
auagaguuacauuaaccuuguuguuuaccuuu

SEQ ID NO: 336723 - RNA, 32 nt, Homo Sapiens
uaaaucauaugauagaucuuuacuaaaaaugg

SEQ ID NO: 336724 - RNA, 32 nt, Homo Sapiens
gcagacagcccauuuuuucuuaugauaaagac

SEQ ID NO: 336725 - RNA, 32 nt, Homo Sapiens
aacuccaggcucugagcccggcgugggcaggc

SEQ ID NO: 336726 - RNA, 32 nt, Homo Sapiens
aagaaauagugcucccuucagaauggaagaau

SEQ ID NO: 336727 - RNA, 32 nt, Homo Sapiens
uggcaaagacauacaguugcuaaucucauuaa

SEQ ID NO: 336728 - RNA, 32 nt, Homo Sapiens
ggcgggguggagcugggauguucucaccacug

SEQ ID NO: 336729 - RNA, 31 nt, Homo Sapiens
ggucuaugcugcugccugccgccgugacugc

SEQ ID NO: 336730 - RNA, 29 nt, Homo Sapiens
auaccaagaaguuuauuuucuauauuaua

SEQ ID NO: 336731 - RNA, 32 nt, Homo Sapiens
uucauuucaucuaucucaauucuuauaaucau

SEQ ID NO: 336732 - RNA, 32 nt, Homo Sapiens
ccuuagggaucuagaaacuucuacuaaacaga

SEQ ID NO: 336733 - RNA, 32 nt, Homo Sapiens
cucccucucuggcuccuccaguccgauugcuc

SEQ ID NO: 336734 - RNA, 32 nt, Homo Sapiens
caguccaauuugcaguaguaaucuucaauaga

SEQ ID NO: 336735 - RNA, 32 nt, Homo Sapiens
cauagucugaauagaaaacuuucagggaagaa

SEQ ID NO: 336736 - RNA, 32 nt, Homo Sapiens
ccguccgcuaggagucugcgugcgaggauuau

SEQ ID NO: 336737 - RNA, 32 nt, Homo Sapiens
ucggcaucugaggagcagcugcagcaaaaucu

SEQ ID NO: 336738 - RNA, 32 nt, Homo Sapiens
ucaugaucugcccgucucggccucccaaagug

SEQ ID NO: 336739 - RNA, 32 nt, Homo Sapiens
agcuaaaacuaaaauggauuagagauacaaga

SEQ ID NO: 336740 - RNA, 32 nt, Homo Sapiens
ccuuccacaucccaccugucucucuagcuugc

SEQ ID NO: 336741 - RNA, 32 nt, Homo Sapiens
ucaggcccugucacaggagaacaaagaaggaa

SEQ ID NO: 336742 - RNA, 32 nt, Homo Sapiens
auuuuucucuacaacuuuaugaguuuaucuag

SEQ ID NO: 336743 - RNA, 32 nt, Homo Sapiens
ccaagaaaauuuuuccucuuuuccccugaaaa

SEQ ID NO: 336744 - RNA, 32 nt, Homo Sapiens
uggcccacuauggucuuaaugcuaaaugcuca

SEQ ID NO: 336745 - RNA, 32 nt, Homo Sapiens
uucaagacaaauugaaucuuauuuuauaauac

SEQ ID NO: 336746 - RNA, 32 nt, Homo Sapiens
caugugcagaaucgugccuggagagagagguu

SEQ ID NO: 336747 - RNA, 32 nt, Homo Sapiens
aggaagaggaugaagaugaagaauaauggcua

SEQ ID NO: 336748 - RNA, 32 nt, Homo Sapiens
cccaccaggacacgugccaauggccccauuca

SEQ ID NO: 336749 - RNA, 32 nt, Homo Sapiens
acuccaugccuggcuccuggaugguccuggag

SEQ ID NO: 336750 - RNA, 32 nt, Homo Sapiens
cugucuuuguuguacuacuaagaguaguggau

SEQ ID NO: 336751 - RNA, 32 nt, Homo Sapiens
augaaaaggaaccagaauaaaaggauuucgaa

SEQ ID NO: 336752 - RNA, 32 nt, Homo Sapiens
gcuguaucuggauucuggcaauaaaaguacuc

SEQ ID NO: 336753 - RNA, 32 nt, Homo Sapiens
gaauucccgcggccuccaccugcuugcuaggg

SEQ ID NO: 336754 - RNA, 32 nt, Homo Sapiens
gcacuuugggaggccgaggcaguuggaucacc

SEQ ID NO: 336755 - RNA, 32 nt, Homo Sapiens
cuguaccauuuuguaucagggaauugagcauc

SEQ ID NO: 336756 - RNA, 32 nt, Homo Sapiens
gugauaguuuuuucuucaguuuucucuuggga

SEQ ID NO: 336757 - RNA, 32 nt, Homo Sapiens
uaaguuaucucuucuuuuggacccuuauuuua

SEQ ID NO: 336758 - RNA, 32 nt, Homo Sapiens
acaggccuggcagguggaccggagccgugggg

SEQ ID NO: 336759 - RNA, 32 nt, Homo Sapiens
cgggaagccauggagccgcgggcgcucgucac

SEQ ID NO: 336760 - RNA, 32 nt, Homo Sapiens
aagguacuaagccccaggaccaaugguagaca

SEQ ID NO: 336761 - RNA, 32 nt, Homo Sapiens
guaucuaugcucucaugacuaugcaguuucua

SEQ ID NO: 336762 - RNA, 32 nt, Homo Sapiens
agggagaggguggcugaauggggagggcagga

SEQ ID NO: 336763 - RNA, 32 nt, Homo Sapiens
ugugguugaauuugcuguguuguuaugaaguc

SEQ ID NO: 336764 - RNA, 32 nt, Homo Sapiens
ugcgggucuggaccgccuccuccgugguggac

SEQ ID NO: 336765 - RNA, 32 nt, Homo Sapiens
guguuaacauucagaaaauccaaauauuccga

SEQ ID NO: 336766 - RNA, 32 nt, Homo Sapiens
cugcugccgaccaggagcugcccagccugugg

SEQ ID NO: 336767 - RNA, 29 nt, Homo Sapiens
cgaguuccugguuucagagaagaugaccg

SEQ ID NO: 336768 - RNA, 32 nt, Homo Sapiens
gaggugacccccaggccuccccggccuuguac

SEQ ID NO: 336769 - RNA, 32 nt, Homo Sapiens
aaauuuugacuucugggaacuugguucagaug

SEQ ID NO: 336770 - RNA, 32 nt, Homo Sapiens
cuuuggucucguguccuucggcaccccguaac

SEQ ID NO: 336771 - RNA, 32 nt, Homo Sapiens
gcagcuuugacuguuggcauagccauuuguua

SEQ ID NO: 336772 - RNA, 32 nt, Homo Sapiens
gugguguugaagcucuggggcggcgagacugg

SEQ ID NO: 336773 - RNA, 32 nt, Homo Sapiens
auaaacaaaaauaaauuaccaucuacucaugg

SEQ ID NO: 336774 - RNA, 32 nt, Homo Sapiens
aauuugcacuaauaauacuuaccaacccacuu

SEQ ID NO: 336775 - RNA, 32 nt, Homo Sapiens
ccuuucugcacaaaaccagcaauuguaaauac

SEQ ID NO: 336776 - RNA, 32 nt, Homo Sapiens
caugaccccacugcucuuuccuccuccccagc

SEQ ID NO: 336777 - RNA, 32 nt, Homo Sapiens
ugcacuggcgcgaucucggcucacuguaagcu

SEQ ID NO: 336778 - RNA, 32 nt, Homo Sapiens
cugaugugaacaugagcaagcacaugugagug

SEQ ID NO: 336779 - RNA, 32 nt, Homo Sapiens
uugcccuugugaccacaaauggcugcuuggug

SEQ ID NO: 336780 - RNA, 32 nt, Homo Sapiens
caacauggaaaacagccccaacucacccauga

SEQ ID NO: 336781 - RNA, 32 nt, Homo Sapiens
agguacaugcuggaaacgugugaauguuguua

SEQ ID NO: 336782 - RNA, 32 nt, Homo Sapiens
acuaaucaacacaacuagugugccuggugcua

SEQ ID NO: 336783 - RNA, 32 nt, Homo Sapiens
cuuuccccacccccauuuugcauauguaugua

SEQ ID NO: 336784 - RNA, 32 nt, Homo Sapiens
guaagaagcacuuuucccaaauaaaacaauua

SEQ ID NO: 336785 - RNA, 32 nt, Homo Sapiens
aucgccccugucacucaggaaauuaccagcgu

SEQ ID NO: 336786 - RNA, 32 nt, Homo Sapiens
auuauagacauuagccaccaugccuggccaaa

SEQ ID NO: 336787 - RNA, 32 nt, Homo Sapiens
aaggugcugagcucacauccacaccccuugca

SEQ ID NO: 336788 - RNA, 32 nt, Homo Sapiens
ucauauugucucugagguucuuuuccagugaa

SEQ ID NO: 336789 - RNA, 32 nt, Homo Sapiens
uaagauaugucuugaaugauaauuaggacauu

SEQ ID NO: 336790 - RNA, 32 nt, Homo Sapiens
ugucuuuuacuuuucuacauaaacauaaacuu

SEQ ID NO: 336791 - RNA, 32 nt, Homo Sapiens
aguguuucucaccagcagauuugaguuuuaaa

SEQ ID NO: 336792 - RNA, 32 nt, Homo Sapiens
cuuagcauccugccuuagagccaggcacacac

SEQ ID NO: 336793 - RNA, 32 nt, Homo Sapiens
cagcucucugacaucacccccuaccagccggg

SEQ ID NO: 336794 - RNA, 32 nt, Homo Sapiens
gaggcucugcggccgcgccgcgcgucccuacc

SEQ ID NO: 336795 - RNA, 32 nt, Homo Sapiens
ccacugugugaaccacuguguacuggagccug

SEQ ID NO: 336796 - RNA, 32 nt, Homo Sapiens
gucgaagcggcuggguugggcgguaaacaggc

SEQ ID NO: 336797 - RNA, 32 nt, Homo Sapiens
cagugaaaaugaacuaucaaggauuggccuuu

SEQ ID NO: 336798 - RNA, 32 nt, Homo Sapiens
auggugcuuuguccaagaaaacguaugaguuu

SEQ ID NO: 336799 - RNA, 32 nt, Homo Sapiens
guagccaccagccccuugcugcucucccuuua

SEQ ID NO: 336800 - RNA, 32 nt, Homo Sapiens
auuuacacauaucaauuucuuaaagaacacaa

SEQ ID NO: 336801 - RNA, 32 nt, Homo Sapiens
ccagccuggguucuuccacacaaaccacuugc

SEQ ID NO: 336802 - RNA, 32 nt, Homo Sapiens
uguacgaaaaagagcauauacugguuauugac

SEQ ID NO: 336803 - RNA, 31 nt, Homo Sapiens
aaguuucugaggagaaagcuagcucuagcau

SEQ ID NO: 336804 - RNA, 32 nt, Homo Sapiens
uaagaguccagaugguggagccaggcugucug

SEQ ID NO: 336805 - RNA, 32 nt, Homo Sapiens
aaggauacccgguggcuucuggcacuggcggg

SEQ ID NO: 336806 - RNA, 32 nt, Homo Sapiens
ggcuggucucgaacuccugaccucaagcgauc

SEQ ID NO: 336807 - RNA, 32 nt, Homo Sapiens
cuaauuacugucaugucauuuacccacuggau

SEQ ID NO: 336808 - RNA, 32 nt, Homo Sapiens
auguccggccgcggcucgggacguguccagug

SEQ ID NO: 336809 - RNA, 32 nt, Homo Sapiens
uguuuuagcaauuuaauauuuugcacaguuag

SEQ ID NO: 336810 - RNA, 32 nt, Homo Sapiens
cuauggaggucuuuuuuuuuuuauuuaacaug

SEQ ID NO: 336811 - RNA, 32 nt, Homo Sapiens
ucauuggauugugccaguuaucaguggcucuu

SEQ ID NO: 336812 - RNA, 32 nt, Homo Sapiens
gauaucuggauucuaaaaauccacaacuagac

SEQ ID NO: 336813 - RNA, 30 nt, Homo Sapiens
gcuccacuaucuacaccccaucuugaggcg

SEQ ID NO: 336814 - RNA, 32 nt, Homo Sapiens
aguuggacuauaucaaacuaaaaacaaacaag

SEQ ID NO: 336815 - RNA, 32 nt, Homo Sapiens
gcuguaaauggcagcaaggcuguuuuuggaga

SEQ ID NO: 336816 - RNA, 32 nt, Homo Sapiens
aaaggcuuauaaauguuugaaauaucacacaa

SEQ ID NO: 336817 - RNA, 32 nt, Homo Sapiens
gaaggagaggagaggaacagguuuugaugauc

SEQ ID NO: 336818 - RNA, 32 nt, Homo Sapiens
cagcaggcccuggagcaguucgccgccgcugc

SEQ ID NO: 336819 - RNA, 32 nt, Homo Sapiens
ggcuucugguucggcccaccucugaagguucc

SEQ ID NO: 336820 - RNA, 32 nt, Homo Sapiens
cccucccucccucuucugccaguggccugggg

SEQ ID NO: 336821 - RNA, 32 nt, Homo Sapiens
guaucagcaucauuuuaauggcuaucugaugc

SEQ ID NO: 336822 - RNA, 32 nt, Homo Sapiens
auccuuguaacuuuuuucuggauuucuuagag

SEQ ID NO: 336823 - RNA, 32 nt, Homo Sapiens
gaaaucuagacuguaaaguaaaacaggaagau

SEQ ID NO: 336824 - RNA, 32 nt, Homo Sapiens
uacuuuuuuuuuucuuuuuucuuuuuuuuuaa

SEQ ID NO: 336825 - RNA, 32 nt, Homo Sapiens
gccgcccgucguuccccggccccgaggggucc

SEQ ID NO: 336826 - RNA, 32 nt, Homo Sapiens
guccuacagguuccuugucuuccccuuccagu

SEQ ID NO: 336827 - RNA, 32 nt, Homo Sapiens
ucccaggacaaaggggccuuguguggcugaau

SEQ ID NO: 336828 - RNA, 32 nt, Homo Sapiens
gugacuuccucuauccuccacugcuguccagg

SEQ ID NO: 336829 - RNA, 32 nt, Homo Sapiens
aggcugggccgggaagggcguggguugaggag

SEQ ID NO: 336830 - RNA, 32 nt, Homo Sapiens
aaugucagcugaugguucuuauuuaagguuuu

SEQ ID NO: 336831 - RNA, 32 nt, Homo Sapiens
gccagggauagggacuggaggggguguggggu

SEQ ID NO: 336832 - RNA, 32 nt, Homo Sapiens
acccuuagacacaguacacagcccuuccuagc

SEQ ID NO: 336833 - RNA, 32 nt, Homo Sapiens
cguucagccugagaggcugcugcuagccugcu

SEQ ID NO: 336834 - RNA, 32 nt, Homo Sapiens
ggaccuuuagccuuuuucuuccuuugcaaagg

SEQ ID NO: 336835 - RNA, 29 nt, Homo Sapiens
gcugagccauaauuacuaaagagaaugua

SEQ ID NO: 336836 - RNA, 32 nt, Homo Sapiens
gaacucuggagguggguucuggucaucugagg

SEQ ID NO: 336837 - RNA, 32 nt, Homo Sapiens
gaaugggagguagggaugucauucuccaccaa

SEQ ID NO: 336838 - RNA, 32 nt, Homo Sapiens
ugguggggagugugcgggaggggguagaguug

SEQ ID NO: 336839 - RNA, 32 nt, Homo Sapiens
ccuauugcucaugcuccuggugcugcugggac

SEQ ID NO: 336840 - RNA, 32 nt, Homo Sapiens
gcccucucccaccaccucccccuucccaccgc

SEQ ID NO: 336841 - RNA, 32 nt, Homo Sapiens
cgacgguaguggguagcgggucucggguugcg

SEQ ID NO: 336842 - RNA, 32 nt, Homo Sapiens
caggacccgcucccggccccggccgucgcugc

SEQ ID NO: 336843 - RNA, 32 nt, Homo Sapiens
gugcccugggacaaagaucuaauuuccccacc

SEQ ID NO: 336844 - RNA, 32 nt, Homo Sapiens
auggagacuauaacaaaugugaagauauucca

SEQ ID NO: 336845 - RNA, 32 nt, Homo Sapiens
aagccauuuuucugccucagcuuuucgaguag

SEQ ID NO: 336846 - RNA, 32 nt, Homo Sapiens
ugaguaucuagagaaaaauuaaaaugcaauga

SEQ ID NO: 336847 - RNA, 32 nt, Homo Sapiens
caaugaucuugcaaaacagggauuaucauccc

SEQ ID NO: 336848 - RNA, 32 nt, Homo Sapiens
gagcaagcccucggagugaccgugggugacag

SEQ ID NO: 336849 - RNA, 32 nt, Homo Sapiens
uccaucaguucauacugcaauuuuaugugaaa

SEQ ID NO: 336850 - RNA, 32 nt, Homo Sapiens
aggaggcacagacuucggguuggauuugucag

SEQ ID NO: 336851 - RNA, 32 nt, Homo Sapiens
gccaucaccaaaaggaaaggacaaagccacac

SEQ ID NO: 336852 - RNA, 32 nt, Homo Sapiens
aggcacaaggcacaacaggcugcucugggauu

SEQ ID NO: 336853 - RNA, 32 nt, Homo Sapiens
cagaaggcugucuggcacccaguguccuagcc

SEQ ID NO: 336854 - RNA, 32 nt, Homo Sapiens
caccaagguugaagaaaggaaacggggaaaau

SEQ ID NO: 336855 - RNA, 32 nt, Homo Sapiens
guuuaaaggggucgcagccugacugccaggag

SEQ ID NO: 336856 - RNA, 32 nt, Homo Sapiens
ucuccucggccgccucuggcgccggcugcacg

SEQ ID NO: 336857 - RNA, 32 nt, Homo Sapiens
ccugcuuuagagagggggcugggcccugggac

SEQ ID NO: 336858 - RNA, 29 nt, Homo Sapiens
aggaaauaaagucaauugauaauugccuc

SEQ ID NO: 336859 - RNA, 32 nt, Homo Sapiens
ccccaggaaguaccuucgcaguguaggagaug

SEQ ID NO: 336860 - RNA, 32 nt, Homo Sapiens
gccugcugcucucuagacaacuccauguacuu

SEQ ID NO: 336861 - RNA, 32 nt, Homo Sapiens
auguggcuggaacccugcaccaaggcgaccgc

SEQ ID NO: 336862 - RNA, 32 nt, Homo Sapiens
auguuuguugaauaaauugauuuuaaagugac

SEQ ID NO: 336863 - RNA, 32 nt, Homo Sapiens
cauuaucagcaaggggacacugucccagagac

SEQ ID NO: 336864 - RNA, 32 nt, Homo Sapiens
gccugaagacauuuccucuccuccccucugga

SEQ ID NO: 336865 - RNA, 32 nt, Homo Sapiens
cuauuuuguuucugcccugaugucccuugggu

SEQ ID NO: 336866 - RNA, 32 nt, Homo Sapiens
gccccugcacacucacauauguggcaacccuc

SEQ ID NO: 336867 - RNA, 32 nt, Homo Sapiens
ucuugcaggaacuggcagcgaugguccaggcc

SEQ ID NO: 336868 - RNA, 32 nt, Homo Sapiens
uguccacaugcgcugggcgucugggaccuuga

SEQ ID NO: 336869 - RNA, 32 nt, Homo Sapiens
uugguagguggggcuccaucagggcuguuugg

SEQ ID NO: 336870 - RNA, 32 nt, Homo Sapiens
caaccugguguuggguccgauaaccccaacau

SEQ ID NO: 336871 - RNA, 32 nt, Homo Sapiens
caucucucaggagucgaaagugagaaagcaag

SEQ ID NO: 336872 - RNA, 32 nt, Homo Sapiens
augcauaccuuaccacauaacacauagugcag

SEQ ID NO: 336873 - RNA, 32 nt, Homo Sapiens
uagcacauaucuaucguaauauauguaauaua

SEQ ID NO: 336874 - RNA, 32 nt, Homo Sapiens
aguuauuuuaaugugguuuaggggcaaaaugu

SEQ ID NO: 336875 - RNA, 32 nt, Homo Sapiens
ggauuacccuaauaccaaagccaggcaaaaac

SEQ ID NO: 336876 - RNA, 32 nt, Homo Sapiens
agccaggauuccucucugaacucugcaguuag

SEQ ID NO: 336877 - RNA, 32 nt, Homo Sapiens
ucccccaaggcucccugccccuccucaugccc

SEQ ID NO: 336878 - RNA, 32 nt, Homo Sapiens
cauacuuuaggagugugagggaugcugaaucu

SEQ ID NO: 336879 - RNA, 32 nt, Homo Sapiens
uuuauugcugcauuuuaagcauaauuaauuug

SEQ ID NO: 336880 - RNA, 32 nt, Homo Sapiens
auucccugaacugauguaaaucuucauagugu

SEQ ID NO: 336881 - RNA, 32 nt, Homo Sapiens
gccaagauuauuuaaagcaaaggucuuccuua

SEQ ID NO: 336882 - RNA, 32 nt, Homo Sapiens
gcagcccgcccggcgcccccggugaccgugac

SEQ ID NO: 336883 - RNA, 32 nt, Homo Sapiens
agucugucgugcaccgauggaacucuccuuau

SEQ ID NO: 336884 - RNA, 32 nt, Homo Sapiens
gcggucgaggcuuuugcggcuccggcgugccg

SEQ ID NO: 336885 - RNA, 32 nt, Homo Sapiens
auuauauucuuucagacauuuauuuuaguccu

SEQ ID NO: 336886 - RNA, 32 nt, Homo Sapiens
ugagcccaccgcaccaggggccccagcaccac

SEQ ID NO: 336887 - RNA, 32 nt, Homo Sapiens
gggugcugagcaugcaucugaaguucaagggc

SEQ ID NO: 336888 - RNA, 32 nt, Homo Sapiens
acuuuauucuguagagcagccugccaagaauu

SEQ ID NO: 336889 - RNA, 32 nt, Homo Sapiens
uuugauaguauuucuaacuuucauuucuuuac

SEQ ID NO: 336890 - RNA, 32 nt, Homo Sapiens
auugguuaucuucuuguaaaucuucugucuuu

SEQ ID NO: 336891 - RNA, 29 nt, Homo Sapiens
ucuaaguggggacagaagggguccucucg

SEQ ID NO: 336892 - RNA, 32 nt, Homo Sapiens
ggugugccgagacccaccacccagcgagcccc

SEQ ID NO: 336893 - RNA, 32 nt, Homo Sapiens
cuauuaaucuugucagaaaacugucaccaaaa

SEQ ID NO: 336894 - RNA, 32 nt, Homo Sapiens
uucaguguguauuuuucuuuuucuauaauacc

SEQ ID NO: 336895 - RNA, 32 nt, Homo Sapiens
ccuggaccucagaggugacacccauugggccc

SEQ ID NO: 336896 - RNA, 32 nt, Homo Sapiens
ggaguuccagaccaggcuggccgacaugguga

SEQ ID NO: 336897 - RNA, 32 nt, Homo Sapiens
ccggggcagcggcggcagcucagugcugggca

SEQ ID NO: 336898 - RNA, 32 nt, Homo Sapiens
uuaugagacaacacagaagagaguuuguuuuc

SEQ ID NO: 336899 - RNA, 32 nt, Homo Sapiens
caggggguuucucacacacacacacacacaca

SEQ ID NO: 336900 - RNA, 32 nt, Homo Sapiens
ccucagggacucucuuccuuuggaugaggggg

SEQ ID NO: 336901 - RNA, 32 nt, Homo Sapiens
aacaaaggaacacuaggagaaaaaauggaaaa

SEQ ID NO: 336902 - RNA, 32 nt, Homo Sapiens
agagugugggucuugcauuacaucaaacagag

SEQ ID NO: 336903 - RNA, 32 nt, Homo Sapiens
gcgagggccccggcggggcuguuagaggcucg

SEQ ID NO: 336904 - RNA, 32 nt, Homo Sapiens
aaaucgccauauuuaaaaauuauuuucacucu

SEQ ID NO: 336905 - RNA, 32 nt, Homo Sapiens
uccccuugcccccaaccucccaacaggcaccg

SEQ ID NO: 336906 - RNA, 32 nt, Homo Sapiens
uaucuucacuguauuuuaacacauuaucuaau

SEQ ID NO: 336907 - RNA, 32 nt, Homo Sapiens
uugggucugauccuagagacagaaaguugacu

SEQ ID NO: 336908 - RNA, 32 nt, Homo Sapiens
uguuaaaucuucauggcaugcuuuucauuuau

SEQ ID NO: 336909 - RNA, 32 nt, Homo Sapiens
cgguacuuggccguggcgcgccggcggcggcg

SEQ ID NO: 336910 - RNA, 32 nt, Homo Sapiens
cggucugccgucugcgcgccucacgcuccuca

SEQ ID NO: 336911 - RNA, 32 nt, Homo Sapiens
uaccaguaauuagauguagaaucuuguuugua

SEQ ID NO: 336912 - RNA, 32 nt, Homo Sapiens
ugcucagagucuucccuuuuccugugacccca

SEQ ID NO: 336913 - RNA, 32 nt, Homo Sapiens
gggggugguccagcccucgcccggcccccacc

SEQ ID NO: 336914 - RNA, 32 nt, Homo Sapiens
uggccccugugaugcucccccauccccaccca

SEQ ID NO: 336915 - RNA, 32 nt, Homo Sapiens
aaauugggcaauaacauagaacaucuaggcag

SEQ ID NO: 336916 - RNA, 32 nt, Homo Sapiens
agcuccggucuuggaaaacauggccucuccuc

SEQ ID NO: 336917 - RNA, 32 nt, Homo Sapiens
cuggugggaggagcgacugcccugcccaaaug

SEQ ID NO: 336918 - RNA, 27 nt, Homo Sapiens
cccuccaucuuugucagcccccuguuu

SEQ ID NO: 336919 - RNA, 32 nt, Homo Sapiens
ugugaaguuaugcacagaacuguaacacuuuc

SEQ ID NO: 336920 - RNA, 32 nt, Homo Sapiens
guugagacagaguuucacucuuguugcccagg

SEQ ID NO: 336921 - RNA, 32 nt, Homo Sapiens
agcugagugugaugaagguguauguugggagg

SEQ ID NO: 336922 - RNA, 32 nt, Homo Sapiens
ucuauuuuuaccauuuuggguaaacgucagga

SEQ ID NO: 336923 - RNA, 31 nt, Homo Sapiens
uagaaaagcagucccauucauauuaaaacag

SEQ ID NO: 336924 - RNA, 32 nt, Homo Sapiens
augaucgcaacgaacgaaauaaaccagaacau

SEQ ID NO: 336925 - RNA, 32 nt, Homo Sapiens
guucucucagauguuugaguuccacuaaguag

SEQ ID NO: 336926 - RNA, 32 nt, Homo Sapiens
ccacaccucucaccucacaggcacaucaggcu

SEQ ID NO: 336927 - RNA, 32 nt, Homo Sapiens
ugggaggcgagcaaaggaagcagcugagacug

SEQ ID NO: 336928 - RNA, 32 nt, Homo Sapiens
ggcgccgcuucccuuccagcgugccgaccggc

SEQ ID NO: 336929 - RNA, 32 nt, Homo Sapiens
cacaggguuggaaagaacuuugaaaggucauu

SEQ ID NO: 336930 - RNA, 32 nt, Homo Sapiens
cuuuucucaucaaucacugaugcugaagcugc

SEQ ID NO: 336931 - RNA, 30 nt, Homo Sapiens
guucuccgcgcgcaaaucccggcgacgcgg

SEQ ID NO: 336932 - RNA, 32 nt, Homo Sapiens
ccagaaaccgccuugccggacggccgcggggg

SEQ ID NO: 336933 - RNA, 32 nt, Homo Sapiens
agaaauucgagcucaacugguagaacaacaaa

SEQ ID NO: 336934 - RNA, 32 nt, Homo Sapiens
uuuuuaaugcccaguguucccuuuuucccgca

SEQ ID NO: 336935 - RNA, 32 nt, Homo Sapiens
guaaccaaccucauuggaacaaguauuaacau

SEQ ID NO: 336936 - RNA, 32 nt, Homo Sapiens
auugcaggcauguguuucaucaucauccagag

SEQ ID NO: 336937 - RNA, 32 nt, Homo Sapiens
caggacccugccugcuggccacguaccuagac

SEQ ID NO: 336938 - RNA, 32 nt, Homo Sapiens
ugccucuaaucccagcacuuugggaggcugag

SEQ ID NO: 336939 - RNA, 32 nt, Homo Sapiens
aacagagccgcuccccucuccucgccccgcca

SEQ ID NO: 336940 - RNA, 32 nt, Homo Sapiens
ugucuuuguaagucaguguugagauggggaua

SEQ ID NO: 336941 - RNA, 32 nt, Homo Sapiens
ggagugcgccgguggcagcgccugcagaccua

SEQ ID NO: 336942 - RNA, 32 nt, Homo Sapiens
agccugccacuaccccgagucucuccagguca

SEQ ID NO: 336943 - RNA, 32 nt, Homo Sapiens
uuuuacuacagugacaaauuguaacuacacua

SEQ ID NO: 336944 - RNA, 32 nt, Homo Sapiens
ucuuugccucucugggucucuaucuccuccuc

SEQ ID NO: 336945 - RNA, 32 nt, Homo Sapiens
agguaacguuggaucuuaauucaaggcuuucu

SEQ ID NO: 336946 - RNA, 32 nt, Homo Sapiens
cgugaaaaaaauuuuuuaguaugugcaauuua

SEQ ID NO: 336947 - RNA, 32 nt, Homo Sapiens
gacgugcacacacacacacacacacacaaaau

SEQ ID NO: 336948 - RNA, 32 nt, Homo Sapiens
gaucuaacaaaauaagguuauaugaguagaua

SEQ ID NO: 336949 - RNA, 28 nt, Homo Sapiens
gccauggugucauggaucaucuccaggc

SEQ ID NO: 336950 - RNA, 32 nt, Homo Sapiens
gggcccuguggcagccggcugcuugagacgug

SEQ ID NO: 336951 - RNA, 32 nt, Homo Sapiens
ggcagccuuccuccaugggaaccuggcaaggc

SEQ ID NO: 336952 - RNA, 32 nt, Homo Sapiens
auggccccgggcggugacucgguccggagccc

SEQ ID NO: 336953 - RNA, 32 nt, Homo Sapiens
aucaaguacaagcaccuaaacaaacagccauc

SEQ ID NO: 336954 - RNA, 32 nt, Homo Sapiens
auuuacuauuguuuuauuaaucaaugugggug

SEQ ID NO: 336955 - RNA, 32 nt, Homo Sapiens
uuucuugaaguccacaggaggcacaugguccu

SEQ ID NO: 336956 - RNA, 32 nt, Homo Sapiens
gauccaaagacaccccaagcaucccccucucu

SEQ ID NO: 336957 - RNA, 32 nt, Homo Sapiens
auagaaagcugaugcuugaucuugcacaauuu

SEQ ID NO: 336958 - RNA, 32 nt, Homo Sapiens
ugucuuauggucaucauugucuucuuagauuu

SEQ ID NO: 336959 - RNA, 32 nt, Homo Sapiens
augggaaccaaccaccagacaagcagcugcag

SEQ ID NO: 336960 - RNA, 32 nt, Homo Sapiens
uucacagagacugguuacaaccagaggcaucu

SEQ ID NO: 336961 - RNA, 32 nt, Homo Sapiens
agggggccgaccccuuuccccaggcacagccc

SEQ ID NO: 336962 - RNA, 32 nt, Homo Sapiens
ggcagccccgcgccgcgccggacccgagcaua

SEQ ID NO: 336963 - RNA, 32 nt, Homo Sapiens
acuuuccuagauaacacugcuuucucauaaua

SEQ ID NO: 336964 - RNA, 32 nt, Homo Sapiens
uuuauguuauacauuaaauguaaagacuugug

SEQ ID NO: 336965 - RNA, 32 nt, Homo Sapiens
acagccuguucucuccucucuccuccccagag

SEQ ID NO: 336966 - RNA, 32 nt, Homo Sapiens
uguacggggcaaucugcccacccucacccagu

SEQ ID NO: 336967 - RNA, 32 nt, Homo Sapiens
ggcagggcaucuaccuuccuccccucaggguu

SEQ ID NO: 336968 - RNA, 32 nt, Homo Sapiens
acacauuacugauagaggaagucauuagaauc

SEQ ID NO: 336969 - RNA, 32 nt, Homo Sapiens
gacugcuguguauuuuaacuaccagauuuuua

SEQ ID NO: 336970 - RNA, 32 nt, Homo Sapiens
aaauucugcuuuggcccggcacaguggcucau

SEQ ID NO: 336971 - RNA, 32 nt, Homo Sapiens
caccugcccucccagucucccaccccggcccc

SEQ ID NO: 336972 - RNA, 32 nt, Homo Sapiens
gcugaguaagggcuccuggggguuggcuggag

SEQ ID NO: 336973 - RNA, 32 nt, Homo Sapiens
gcuucuucuagaagcugacauggagcugacca

SEQ ID NO: 336974 - RNA, 32 nt, Homo Sapiens
ccucacccacccacccaguuuaauugugcuua

SEQ ID NO: 336975 - RNA, 32 nt, Homo Sapiens
cucccgcccuguagccgcgaagacugcuucag

SEQ ID NO: 336976 - RNA, 32 nt, Homo Sapiens
ccuaacuauccugugugagaaugggaauuuca

SEQ ID NO: 336977 - RNA, 32 nt, Homo Sapiens
cuucucaugcuaauaaagauauacccaagacu

SEQ ID NO: 336978 - RNA, 32 nt, Homo Sapiens
uaccacucugaaucaacaaaaucaggaaugga

SEQ ID NO: 336979 - RNA, 32 nt, Homo Sapiens
cggguucgccgggaggagcguguggcgggggu

SEQ ID NO: 336980 - RNA, 32 nt, Homo Sapiens
gccuugaggacaaggaccggcugggguucugg

SEQ ID NO: 336981 - RNA, 32 nt, Homo Sapiens
acagguuauauuguacaggaucaauauuuugc

SEQ ID NO: 336982 - RNA, 32 nt, Homo Sapiens
ggacaccccuggaugccccuaaccacuagacc

SEQ ID NO: 336983 - RNA, 32 nt, Homo Sapiens
ccuugaucaccuugccccuccucccugucuuc

SEQ ID NO: 336984 - RNA, 32 nt, Homo Sapiens
uccuuccgccggggccgccgggccucauggaa

SEQ ID NO: 336985 - RNA, 32 nt, Homo Sapiens
ugcaacgucuuacugauugggacaguugccag

SEQ ID NO: 336986 - RNA, 32 nt, Homo Sapiens
cacaagccuuggcaucacuguguauuagccac

SEQ ID NO: 336987 - RNA, 32 nt, Homo Sapiens
gcucucgccucccgcacacggcucuccugauc

SEQ ID NO: 336988 - RNA, 32 nt, Homo Sapiens
uuuuccugaaaguuuuuaauugaaaguauuau

SEQ ID NO: 336989 - RNA, 32 nt, Homo Sapiens
agccucucccugccuccacuugcuccacgucc

SEQ ID NO: 336990 - RNA, 32 nt, Homo Sapiens
uuuaugaaucucuugaugaaguuacuauaaaa

SEQ ID NO: 336991 - RNA, 32 nt, Homo Sapiens
ggcugcuccacgcuuuugccggagacagagac

SEQ ID NO: 336992 - RNA, 32 nt, Homo Sapiens
caggcaaauuggaugggcgucuggccgccgug

SEQ ID NO: 336993 - RNA, 32 nt, Homo Sapiens
cgccguggugaccccugcuuugccccacuggg

SEQ ID NO: 336994 - RNA, 32 nt, Homo Sapiens
agcguccgacccgaaguccacgcgccggaacu

SEQ ID NO: 336995 - RNA, 32 nt, Homo Sapiens
ugugccuggaggguagcacaucuuuccagccu

SEQ ID NO: 336996 - RNA, 32 nt, Homo Sapiens
ggacuuucugaacaucugauucuguaucuuca

SEQ ID NO: 336997 - RNA, 32 nt, Homo Sapiens
gugagugacgaugauguacagauucuuucagu

SEQ ID NO: 336998 - RNA, 32 nt, Homo Sapiens
aaauuaaaaaauuuaagagagagaagaggaga

SEQ ID NO: 336999 - RNA, 32 nt, Homo Sapiens
agagacuuggcccagaugggccccacagccac

SEQ ID NO: 337000 - RNA, 32 nt, Homo Sapiens
aaaaguaaccacgaucguuaugcugaguaugu

SEQ ID NO: 337001 - RNA, 32 nt, Homo Sapiens
uuuauaaacuuuaccuuuuuuauacauaaaca

SEQ ID NO: 337002 - RNA, 27 nt, Homo Sapiens
ucuucagccuucuucagccuucuucag

SEQ ID NO: 337003 - RNA, 32 nt, Homo Sapiens
cagcucucuccaccacccagcucuucccugac

SEQ ID NO: 337004 - RNA, 32 nt, Homo Sapiens
gucuuucgcuuucggcuggggcguggaggccg

SEQ ID NO: 337005 - RNA, 32 nt, Homo Sapiens
aagaacaacgaucuaaauuugcauagcaagug

SEQ ID NO: 337006 - RNA, 32 nt, Homo Sapiens
ucuccugccagacagcccacgaccgggucgac

SEQ ID NO: 337007 - RNA, 32 nt, Homo Sapiens
acgcuucgccccacgcugcuccgacuggcugc

SEQ ID NO: 337008 - RNA, 32 nt, Homo Sapiens
cugccaggagaagcaagggucucucucagugc

SEQ ID NO: 337009 - RNA, 32 nt, Homo Sapiens
ugauaaauuacaagcagacaaucuuauuuugu

SEQ ID NO: 337010 - RNA, 32 nt, Homo Sapiens
acuccuaaauaaaaaguaaacaugacaccucu

SEQ ID NO: 337011 - RNA, 32 nt, Homo Sapiens
gcagucccuaggaugauguagauucuucucca

SEQ ID NO: 337012 - RNA, 32 nt, Homo Sapiens
ccuccuguaggccucugacuccccuccacuuu

SEQ ID NO: 337013 - RNA, 32 nt, Homo Sapiens
aaugacaacaaggcccuuuaacuugucuucua

SEQ ID NO: 337014 - RNA, 32 nt, Homo Sapiens
guucauuccuucccugaccucaguacccaucc

SEQ ID NO: 337015 - RNA, 32 nt, Homo Sapiens
auaguagacaugaaaacuacuuugaaauuccu

SEQ ID NO: 337016 - RNA, 32 nt, Homo Sapiens
uuuuauuaagauauuucuauuagaacacauuu

SEQ ID NO: 337017 - RNA, 32 nt, Homo Sapiens
aagaggagugagaggaaggcggggggcgcagc

SEQ ID NO: 337018 - RNA, 32 nt, Homo Sapiens
guguagucgaggggccgggagggaggagggga

SEQ ID NO: 337019 - RNA, 32 nt, Homo Sapiens
guccccggcaccagcaggccuuggggcucacu

SEQ ID NO: 337020 - RNA, 32 nt, Homo Sapiens
cugcccuacccucuccucugaccuccacucac

SEQ ID NO: 337021 - RNA, 32 nt, Homo Sapiens
uauaaugugucuuuuuauuaaccauuuguaca

SEQ ID NO: 337022 - RNA, 32 nt, Homo Sapiens
uguggauaauguuuaguucugugacacuguuu

SEQ ID NO: 337023 - RNA, 32 nt, Homo Sapiens
cagaucucaugggauagcacguggagcucuug

SEQ ID NO: 337024 - RNA, 32 nt, Homo Sapiens
ccuccuguucccaucccccagcccuggcuccu

SEQ ID NO: 337025 - RNA, 32 nt, Homo Sapiens
cggguaacccagguagcacagauuuuuaauga

SEQ ID NO: 337026 - RNA, 32 nt, Homo Sapiens
cucacgagccagguccuggggguaugggggcu

SEQ ID NO: 337027 - RNA, 32 nt, Homo Sapiens
ugcauauagucauuugaccccuuccaaauacu

SEQ ID NO: 337028 - RNA, 32 nt, Homo Sapiens
gcugaggguccggcccggggucaucuggcagg

SEQ ID NO: 337029 - RNA, 32 nt, Homo Sapiens
auguuuacuuuuuaaaaugauuuagaccgauu

SEQ ID NO: 337030 - RNA, 32 nt, Homo Sapiens
agggcagccaguagccucggaggcuuggaugc

SEQ ID NO: 337031 - RNA, 32 nt, Homo Sapiens
auaucccccguccccagccccucuucucuuua

SEQ ID NO: 337032 - RNA, 32 nt, Homo Sapiens
ugcauagggacccaccagugagauggacgcug

SEQ ID NO: 337033 - RNA, 32 nt, Homo Sapiens
uucuuaaucaaaugauuguaaauuauauuuac

SEQ ID NO: 337034 - RNA, 32 nt, Homo Sapiens
caaaauauacucguauuuuuuauauuucuucc

SEQ ID NO: 337035 - RNA, 32 nt, Homo Sapiens
gacucugaggacaggaggaaaggccgggagag

SEQ ID NO: 337036 - RNA, 32 nt, Homo Sapiens
cggauuguacuguagcacauguuggcaucaac

SEQ ID NO: 337037 - RNA, 32 nt, Homo Sapiens
uguauguaguaugccaaguacauggaaaacca

SEQ ID NO: 337038 - RNA, 32 nt, Homo Sapiens
gguuauaauuuuccuuuuagacuugcaaauau

SEQ ID NO: 337039 - RNA, 32 nt, Homo Sapiens
ggcugaccuuucuaucuucucuaggcucaggu

SEQ ID NO: 337040 - RNA, 32 nt, Homo Sapiens
cauggacccagcugagcagagcagacgcuuug

SEQ ID NO: 337041 - RNA, 32 nt, Homo Sapiens
gucagaggaaagggcggggucccagcagggca

SEQ ID NO: 337042 - RNA, 32 nt, Homo Sapiens
agaggcagcugugugggcugcagauuuccugu

SEQ ID NO: 337043 - RNA, 32 nt, Homo Sapiens
ccuucaucagaaacuucuauguucugugcaug

SEQ ID NO: 337044 - RNA, 32 nt, Homo Sapiens
gaccagagccccacacggaggcaucugcaccc

SEQ ID NO: 337045 - RNA, 32 nt, Homo Sapiens
cagcaaagugcuccaaaugccuuuuucagaaa

SEQ ID NO: 337046 - RNA, 32 nt, Homo Sapiens
cgaccugucuguucuuuuuuuggguggauuac

SEQ ID NO: 337047 - RNA, 32 nt, Homo Sapiens
gccuuguauagucguuugaaagaauaugugau

SEQ ID NO: 337048 - RNA, 32 nt, Homo Sapiens
uguuaacugucaacaugaaguauuuucacuuc

SEQ ID NO: 337049 - RNA, 32 nt, Homo Sapiens
ccucgcgucgcuccccauccccgccccucccg

SEQ ID NO: 337050 - RNA, 30 nt, Homo Sapiens
cauuucaagcuuaugggggagaagacacug

SEQ ID NO: 337051 - RNA, 32 nt, Homo Sapiens
ggaggcgucggcccggcagcggcagcggcagc

SEQ ID NO: 337052 - RNA, 32 nt, Homo Sapiens
ccucgccucgggcugccuuaaagcaccgcuaa

SEQ ID NO: 337053 - RNA, 32 nt, Homo Sapiens
ugcucguuguacaucaugaugacugauggucu

SEQ ID NO: 337054 - RNA, 32 nt, Homo Sapiens
caccugucuuaauaaacuggaguuuugcugcu

SEQ ID NO: 337055 - RNA, 32 nt, Homo Sapiens
ccacuggccuucccgagaaguacugcauugaa

SEQ ID NO: 337056 - RNA, 32 nt, Homo Sapiens
agccccuggauggucccagacucucaggacau

SEQ ID NO: 337057 - RNA, 32 nt, Homo Sapiens
augcacacacagccuagcugcccccagggagc

SEQ ID NO: 337058 - RNA, 32 nt, Homo Sapiens
cugguccgggaccacgugcaccgcgauguacu

SEQ ID NO: 337059 - RNA, 32 nt, Homo Sapiens
agggcuugugguccuggcaucugcuguacaug

SEQ ID NO: 337060 - RNA, 32 nt, Homo Sapiens
caccauauuacagaaauauuuacuacauauuu

SEQ ID NO: 337061 - RNA, 32 nt, Homo Sapiens
uauuucaaggucaugaauuugcuuucuaccaa

SEQ ID NO: 337062 - RNA, 32 nt, Homo Sapiens
aaaucuaguuuccuauggaaaagaagauggca

SEQ ID NO: 337063 - RNA, 32 nt, Homo Sapiens
gcuuagagagaagcggugggucugcaccugga

SEQ ID NO: 337064 - RNA, 32 nt, Homo Sapiens
ggagcugaggggcuggggcugggguguugaag

SEQ ID NO: 337065 - RNA, 32 nt, Homo Sapiens
aauaaccaaauggucucauacacguacaauag

SEQ ID NO: 337066 - RNA, 32 nt, Homo Sapiens
cagggugagcuuuggcugggguugcccuugug

SEQ ID NO: 337067 - RNA, 32 nt, Homo Sapiens
cagagaugacuuccuuuucuucugcccacuga

SEQ ID NO: 337068 - RNA, 32 nt, Homo Sapiens
agccgagcggccuguccuucgaguauccgcgg

SEQ ID NO: 337069 - RNA, 32 nt, Homo Sapiens
agaagagcaaaguuaaggcuugauaccaaucg

SEQ ID NO: 337070 - RNA, 32 nt, Homo Sapiens
uuugaggaacugccaaauuguuuuccacaggg

SEQ ID NO: 337071 - RNA, 32 nt, Homo Sapiens
uucaagcucuauuucuguggcacaugucuuuu

SEQ ID NO: 337072 - RNA, 32 nt, Homo Sapiens
gcccacagcuggagcagcuggacagagguuuc

SEQ ID NO: 337073 - RNA, 32 nt, Homo Sapiens
gcuuuucccugccuaggccucgugggcugugc

SEQ ID NO: 337074 - RNA, 32 nt, Homo Sapiens
aacccccaugugcagcagcacugucuggacuc

SEQ ID NO: 337075 - RNA, 32 nt, Homo Sapiens
auaaaaagcgucugucccacucugcuaagccu

SEQ ID NO: 337076 - RNA, 32 nt, Homo Sapiens
agcggcggcaccggcgucagcgaugaccgugc

SEQ ID NO: 337077 - RNA, 32 nt, Homo Sapiens
caugagagaaaaccuuccaugggucucacucu

SEQ ID NO: 337078 - RNA, 31 nt, Homo Sapiens
cuucaaaugcucugccugccucggccucccu

SEQ ID NO: 337079 - RNA, 32 nt, Homo Sapiens
acccgggcgggcuccgggagggggcccuggag

SEQ ID NO: 337080 - RNA, 32 nt, Homo Sapiens
ucccggagcgccccgagcuggcgcgggcaugg

SEQ ID NO: 337081 - RNA, 32 nt, Homo Sapiens
acuccuuguaggauuggugaaaccguaaugaa

SEQ ID NO: 337082 - RNA, 32 nt, Homo Sapiens
agaguugguaguguuaaauccaucugcuauga

SEQ ID NO: 337083 - RNA, 32 nt, Homo Sapiens
agaaacccaauuaauuugauaagcuuggggac

SEQ ID NO: 337084 - RNA, 32 nt, Homo Sapiens
agaaucuaugcgugucauuuaaagaaaaguug

SEQ ID NO: 337085 - RNA, 32 nt, Homo Sapiens
cagaguuaagcaggaaacaacaacaacaucau

SEQ ID NO: 337086 - RNA, 28 nt, Homo Sapiens
aaguaauaaauuccucuugccaaggugg

SEQ ID NO: 337087 - RNA, 32 nt, Homo Sapiens
aucucccaacuuuccguuccaguaugacagca

SEQ ID NO: 337088 - RNA, 32 nt, Homo Sapiens
agccaggcgugguggcgggcgccuguaguccc

SEQ ID NO: 337089 - RNA, 32 nt, Homo Sapiens
caguguuaacugugccuucucccuuaagcuga

SEQ ID NO: 337090 - RNA, 32 nt, Homo Sapiens
agaccagcacagagaccuguccuugugcaguc

SEQ ID NO: 337091 - RNA, 32 nt, Homo Sapiens
agcuguaugaacugcuuuaccaaauaucacua

SEQ ID NO: 337092 - RNA, 32 nt, Homo Sapiens
ggguucucaagccccuggcccuggcccagaga

SEQ ID NO: 337093 - RNA, 32 nt, Homo Sapiens
agccugccuacugcccgcugcccgccugcccg

SEQ ID NO: 337094 - RNA, 32 nt, Homo Sapiens
gggcgcggugacucacgccugucauccuagca

SEQ ID NO: 337095 - RNA, 32 nt, Homo Sapiens
uguggugguuggaaagggccggguuucagcuc

SEQ ID NO: 337096 - RNA, 32 nt, Homo Sapiens
ccaucuacaugguuuucuuuuucuuaguaugg

SEQ ID NO: 337097 - RNA, 32 nt, Homo Sapiens
auauuuauuucuguuuugcucuauucaaagaa

SEQ ID NO: 337098 - RNA, 28 nt, Homo Sapiens
caugggaggauagcacauuugacaguuu

SEQ ID NO: 337099 - RNA, 32 nt, Homo Sapiens
ggugcugucucacugccuuaaaacagauuucu

SEQ ID NO: 337100 - RNA, 32 nt, Homo Sapiens
ccucacccacagcaggggaggcguggguccuc

SEQ ID NO: 337101 - RNA, 32 nt, Homo Sapiens
uguauggaguguaggaaagccuucacuucacg

SEQ ID NO: 337102 - RNA, 32 nt, Homo Sapiens
uacugccugugcugcuacuuuaagagcugaga

SEQ ID NO: 337103 - RNA, 32 nt, Homo Sapiens
ccaaaccucucuuuuuucuccucuuuuguuua

SEQ ID NO: 337104 - RNA, 32 nt, Homo Sapiens
gauuguaaaauauauuuuuacuuuuuagucuu

SEQ ID NO: 337105 - RNA, 32 nt, Homo Sapiens
ucaggagccggggcaccuugcuguucgcugcu

SEQ ID NO: 337106 - RNA, 32 nt, Homo Sapiens
aagagagaacaaaagccaagacuuuccaggua

SEQ ID NO: 337107 - RNA, 32 nt, Homo Sapiens
aggacgcagaggaggaggcgcccgccaugccc

SEQ ID NO: 337108 - RNA, 31 nt, Homo Sapiens
cucagauuacccugccugcucugugcuuugc

SEQ ID NO: 337109 - RNA, 32 nt, Homo Sapiens
ugucauguacagugaaaguacacgucacguuu

SEQ ID NO: 337110 - RNA, 32 nt, Homo Sapiens
ggaggcaaguccuugagcuacacacacuggcu

SEQ ID NO: 337111 - RNA, 32 nt, Homo Sapiens
uugucuuaggccacacauaaaauacacuaaug

SEQ ID NO: 337112 - RNA, 32 nt, Homo Sapiens
ggauuagcugaaauuauaguuuucucagucca

SEQ ID NO: 337113 - RNA, 32 nt, Homo Sapiens
uugguuucuucuauuucuuuuuuuuuuuuuuu

SEQ ID NO: 337114 - RNA, 32 nt, Homo Sapiens
cagagguggggagucugggcagucggcgaccc

SEQ ID NO: 337115 - RNA, 32 nt, Homo Sapiens
accucaugccccacaggagccccaguggugac

SEQ ID NO: 337116 - RNA, 30 nt, Homo Sapiens
aucaaguggggcgaugcuggugcugaguac

SEQ ID NO: 337117 - RNA, 32 nt, Homo Sapiens
uggggcaggggagagggaaaggaaggccccac

SEQ ID NO: 337118 - RNA, 32 nt, Homo Sapiens
ccucacagggaacacgggacagacgccggcga

SEQ ID NO: 337119 - RNA, 32 nt, Homo Sapiens
gucacauugucuaucccaguguguacucuguc

SEQ ID NO: 337120 - RNA, 32 nt, Homo Sapiens
uucuugauggaauguagcaguaaacauaugaa

SEQ ID NO: 337121 - RNA, 32 nt, Homo Sapiens
ggcugucuugugugcagccugagugggguggu

SEQ ID NO: 337122 - RNA, 32 nt, Homo Sapiens
acacaacaaaaccugauuugggagacgguguc

SEQ ID NO: 337123 - RNA, 32 nt, Homo Sapiens
ggccaggugcgguggcucaugccugcaauucc

SEQ ID NO: 337124 - RNA, 32 nt, Homo Sapiens
uggcucugugggucccugggcucuggacaagc

SEQ ID NO: 337125 - RNA, 32 nt, Homo Sapiens
ccuccugccucaacagccugugugguggcaaa

SEQ ID NO: 337126 - RNA, 32 nt, Homo Sapiens
ucagugcauugugccuguuguacaccccugga

SEQ ID NO: 337127 - RNA, 32 nt, Homo Sapiens
agcaacucccagccccaauaccucggaggcau

SEQ ID NO: 337128 - RNA, 32 nt, Homo Sapiens
caggcugccccacuccacguuccccagcacau

SEQ ID NO: 337129 - RNA, 32 nt, Homo Sapiens
aguagcaaaaaaguacaaaguuggcuuagaua

SEQ ID NO: 337130 - RNA, 32 nt, Homo Sapiens
uagggcaggggacaccuuggcuccucagcagc

SEQ ID NO: 337131 - RNA, 32 nt, Homo Sapiens
ccccaagugaagacgaggccaaggcugaaacc

SEQ ID NO: 337132 - RNA, 32 nt, Homo Sapiens
ucuggucuaucuccagagauaaaauaccauuc

SEQ ID NO: 337133 - RNA, 32 nt, Homo Sapiens
aaacaucugaagacccuugugcauuguguguu

SEQ ID NO: 337134 - RNA, 32 nt, Homo Sapiens
caccccugccgugaagccccaggcccacuucc

SEQ ID NO: 337135 - RNA, 32 nt, Homo Sapiens
uuucuugccugccuuuugggaagaaaugaaaa

SEQ ID NO: 337136 - RNA, 32 nt, Homo Sapiens
ccuguagaucugcuguagggcuugucaccauu

SEQ ID NO: 337137 - RNA, 32 nt, Homo Sapiens
aaagucccuccagcuuaucucccacaacaacc

SEQ ID NO: 337138 - RNA, 32 nt, Homo Sapiens
ccccaagacuugguguccuuucccuccacuuc

SEQ ID NO: 337139 - RNA, 32 nt, Homo Sapiens
aauuaaaaugguuuuuguuuuuugguuuuuuu

SEQ ID NO: 337140 - RNA, 32 nt, Homo Sapiens
cucuuugaaauauuuuacuuuaauaccagugc

SEQ ID NO: 337141 - RNA, 32 nt, Homo Sapiens
uguaaccuaccuuaucauguggcuuuuaauug

SEQ ID NO: 337142 - RNA, 32 nt, Homo Sapiens
acaguacuauacaaauagaaugcaagcuguaa

SEQ ID NO: 337143 - RNA, 32 nt, Homo Sapiens
cagcugcaccgcugggaccccugcgugcccuc

SEQ ID NO: 337144 - RNA, 32 nt, Homo Sapiens
uugcacauagaccaaccagagaaggccugaga

SEQ ID NO: 337145 - RNA, 32 nt, Homo Sapiens
accucuccuucccgcuuccccagcugguagag

SEQ ID NO: 337146 - RNA, 32 nt, Homo Sapiens
cucaggcccgcacccaguugucagccucugac

SEQ ID NO: 337147 - RNA, 32 nt, Homo Sapiens
aucuggaccccaucugugaauaagccauucug

SEQ ID NO: 337148 - RNA, 32 nt, Homo Sapiens
cacuaacaagcugcgugaucuucggaaaaaag

SEQ ID NO: 337149 - RNA, 32 nt, Homo Sapiens
gaaccuucaccauccaccacucuauucaggua

SEQ ID NO: 337150 - RNA, 32 nt, Homo Sapiens
auccacucggccugggagguucuggauuuugg

SEQ ID NO: 337151 - RNA, 32 nt, Homo Sapiens
acacgcucccgccccccuacccggcccgggcg

SEQ ID NO: 337152 - RNA, 32 nt, Homo Sapiens
gcacuggaugaagcugcugcugcacugacacg

SEQ ID NO: 337153 - RNA, 32 nt, Homo Sapiens
gaaugagaggguccaggcaggguguaggggaa

SEQ ID NO: 337154 - RNA, 32 nt, Homo Sapiens
uauggcagugacucaccugguuuuaauaaaac

SEQ ID NO: 337155 - RNA, 32 nt, Homo Sapiens
cucucaugauuuccuccaaguauuuucuccuu

SEQ ID NO: 337156 - RNA, 32 nt, Homo Sapiens
cucuggggaccccaggccccagcuccugucug

SEQ ID NO: 337157 - RNA, 32 nt, Homo Sapiens
ggggcagcuccuuuuccaugccuccccccacc

SEQ ID NO: 337158 - RNA, 32 nt, Homo Sapiens
agccacgugcagagaccuagccugucccccaa

SEQ ID NO: 337159 - RNA, 32 nt, Homo Sapiens
uccuuuccagaaguuccuggggcuccguguug

SEQ ID NO: 337160 - RNA, 32 nt, Homo Sapiens
auacgauguuggguuuucgaaauauuuucaaa

SEQ ID NO: 337161 - RNA, 32 nt, Homo Sapiens
aggaccucauuuccaggagcucugagaggugg

SEQ ID NO: 337162 - RNA, 32 nt, Homo Sapiens
ccccucccuggccuguucuguuuugccugaag

SEQ ID NO: 337163 - RNA, 32 nt, Homo Sapiens
gcugggugcaggggucacugcuugucagcuca

SEQ ID NO: 337164 - RNA, 32 nt, Homo Sapiens
gauagucaaauuauguauugguggggcugggu

SEQ ID NO: 337165 - RNA, 32 nt, Homo Sapiens
cccuggcccagcugccucagagccuguccugc

SEQ ID NO: 337166 - RNA, 32 nt, Homo Sapiens
ucaguuaaaaagacaaaccucuagauguguaa

SEQ ID NO: 337167 - RNA, 32 nt, Homo Sapiens
gggaagcaggaaccccaccgugugcccccugc

SEQ ID NO: 337168 - RNA, 32 nt, Homo Sapiens
ggggucagcagcaggagaagcguguugaacac

SEQ ID NO: 337169 - RNA, 32 nt, Homo Sapiens
gagauuguuugcagcauagaagcuccgcggac

SEQ ID NO: 337170 - RNA, 32 nt, Homo Sapiens
ugugggcccugccgggggcgcuuggccucagc

SEQ ID NO: 337171 - RNA, 32 nt, Homo Sapiens
cucgccuggggccagcgggagucccgggccug

SEQ ID NO: 337172 - RNA, 32 nt, Homo Sapiens
ccaagaaaauuuggaggugcagagaacaugcu

SEQ ID NO: 337173 - RNA, 32 nt, Homo Sapiens
aaaaaauuugaaaguaacuuaaucuaacauuu

SEQ ID NO: 337174 - RNA, 32 nt, Homo Sapiens
ccgaagggcuccugacaguggccagggacccc

SEQ ID NO: 337175 - RNA, 32 nt, Homo Sapiens
cacccacagcaucacgagccacuuccacuccu

SEQ ID NO: 337176 - RNA, 32 nt, Homo Sapiens
ccagccugggaggcacagcaaacuguccccca

SEQ ID NO: 337177 - RNA, 32 nt, Homo Sapiens
uggcagcggacggggcgcgccccucggccagu

SEQ ID NO: 337178 - RNA, 32 nt, Homo Sapiens
cagaaaggcuuagggcccagggggcggggaag

SEQ ID NO: 337179 - RNA, 29 nt, Homo Sapiens
cuaacucagggacagaagccccugucugu

SEQ ID NO: 337180 - RNA, 32 nt, Homo Sapiens
uuguuuacaucaugcaacuaaucuaagccuca

SEQ ID NO: 337181 - RNA, 32 nt, Homo Sapiens
cuccccugggcccuggacucggacuggggccu

SEQ ID NO: 337182 - RNA, 32 nt, Homo Sapiens
gucuguaaaaauuucccuaauugauuauauag

SEQ ID NO: 337183 - RNA, 32 nt, Homo Sapiens
gcgcagaggcuuuggaggcugcagugucuccg

SEQ ID NO: 337184 - RNA, 32 nt, Homo Sapiens
cuuauuugacauuuuagagaguuuccuucuuc

SEQ ID NO: 337185 - RNA, 32 nt, Homo Sapiens
agaacuuacugauuauuuucuucauccaacuu

SEQ ID NO: 337186 - RNA, 32 nt, Homo Sapiens
gcugugugaggggagagaagggagaggguggg

SEQ ID NO: 337187 - RNA, 32 nt, Homo Sapiens
auuguacuucagaacaucagauuuuauucaca

SEQ ID NO: 337188 - RNA, 32 nt, Homo Sapiens
uuuacauggugauucuuaccugcuugaucuuc

SEQ ID NO: 337189 - RNA, 32 nt, Homo Sapiens
caucugacucccucuucaguguucuucccccu

SEQ ID NO: 337190 - RNA, 32 nt, Homo Sapiens
caagccaaacgcaucugccggaggaagcgucu

SEQ ID NO: 337191 - RNA, 32 nt, Homo Sapiens
gaauaagaauacugauuauucugaacaguuua

SEQ ID NO: 337192 - RNA, 32 nt, Homo Sapiens
uaaaucagaguuuacaaugcacaggggaucau

SEQ ID NO: 337193 - RNA, 32 nt, Homo Sapiens
guuucaaaaaggaaacaaauuuuguguuugcu

SEQ ID NO: 337194 - RNA, 32 nt, Homo Sapiens
gcggaaccugcggggcagaggcggcggccgca

SEQ ID NO: 337195 - RNA, 32 nt, Homo Sapiens
uuaacaccgcauucuuucccacuuccucucaa

SEQ ID NO: 337196 - RNA, 29 nt, Homo Sapiens
uuaagaugauguuuauauuucuccacugu

SEQ ID NO: 337197 - RNA, 32 nt, Homo Sapiens
uuaaagugcuucugcccuuccacgaacuccuc

SEQ ID NO: 337198 - RNA, 32 nt, Homo Sapiens
gacccauacuaaaauauaauacuaaauauuug

SEQ ID NO: 337199 - RNA, 32 nt, Homo Sapiens
cuucugcccagguucgacuaugcugacaggau

SEQ ID NO: 337200 - RNA, 32 nt, Homo Sapiens
auguacauuagauauauuuauagaaucaauuu

SEQ ID NO: 337201 - RNA, 32 nt, Homo Sapiens
uccggccaucguccccaccuccaccugggccg

SEQ ID NO: 337202 - RNA, 32 nt, Homo Sapiens
gggaagcugccgcccacgggcucugccccuuc

SEQ ID NO: 337203 - RNA, 32 nt, Homo Sapiens
auguucuuucauuaaaagaccaaaaagaaguu

SEQ ID NO: 337204 - RNA, 32 nt, Homo Sapiens
gcucacccacauccucccuccacagcccccca

SEQ ID NO: 337205 - RNA, 32 nt, Homo Sapiens
ugcuccucccccuugugaugcuugucaucagu

SEQ ID NO: 337206 - RNA, 32 nt, Homo Sapiens
cggacaggaaaugaucaacagcuucuccucuc

SEQ ID NO: 337207 - RNA, 32 nt, Homo Sapiens
uacaguuggcaaaagcucucucccuuaaaacu

SEQ ID NO: 337208 - RNA, 32 nt, Homo Sapiens
ggugcuuuuuaaaaauccaauagauacaagag

SEQ ID NO: 337209 - RNA, 32 nt, Homo Sapiens
ucuagagauuuugauuuuuuuauaauguuucu

SEQ ID NO: 337210 - RNA, 32 nt, Homo Sapiens
agggaguucaggugccggucggcguagccagg

SEQ ID NO: 337211 - RNA, 32 nt, Homo Sapiens
cuaagguaaaugccuugccaucuuauuucauu

SEQ ID NO: 337212 - RNA, 32 nt, Homo Sapiens
gaggagaauccggaguaugaggacuuggugga

SEQ ID NO: 337213 - RNA, 32 nt, Homo Sapiens
auuagggacccacucuacuacugcaggaugac

SEQ ID NO: 337214 - RNA, 32 nt, Homo Sapiens
ucuggauuaccgaugcugagaugugugcagga

SEQ ID NO: 337215 - RNA, 32 nt, Homo Sapiens
ugccaaaauauuucuaugcuuguuucuuggca

SEQ ID NO: 337216 - RNA, 32 nt, Homo Sapiens
gaacagaggagaaaugagauugccagaaagug

SEQ ID NO: 337217 - RNA, 32 nt, Homo Sapiens
agaguauacuaaagugaauuauuuguuacaaa

SEQ ID NO: 337218 - RNA, 32 nt, Homo Sapiens
gaaccucauucaguuucacuuccacauguaug

SEQ ID NO: 337219 - RNA, 30 nt, Homo Sapiens
gcccuaggcaggccgccgucuccccacuca

SEQ ID NO: 337220 - RNA, 32 nt, Homo Sapiens
ggaaauugauaaaaacaucccagagauaucca

SEQ ID NO: 337221 - RNA, 29 nt, Homo Sapiens
aauuacaugaagauuugguuuuugucuug

SEQ ID NO: 337222 - RNA, 32 nt, Homo Sapiens
uccacuucugugacaaaucaacgggaaacagc

SEQ ID NO: 337223 - RNA, 32 nt, Homo Sapiens
uugcagggagggacgggguggggggugggggg

SEQ ID NO: 337224 - RNA, 32 nt, Homo Sapiens
gcuggggcggcgugggucccggcgucucagcc

SEQ ID NO: 337225 - RNA, 32 nt, Homo Sapiens
gaggaaggccagcccuccuccuccucggaauc

SEQ ID NO: 337226 - RNA, 32 nt, Homo Sapiens
gccgcacauugugggggcgcacgccgggaggc

SEQ ID NO: 337227 - RNA, 32 nt, Homo Sapiens
ccaggccccagccacggcugcagagccugggc

SEQ ID NO: 337228 - RNA, 32 nt, Homo Sapiens
aagacugcccgucccucccccauccccccucc

SEQ ID NO: 337229 - RNA, 32 nt, Homo Sapiens
guuuaacgcugugugaauauaaagaguaguuu

SEQ ID NO: 337230 - RNA, 32 nt, Homo Sapiens
auuauuauuauuauacuuuaaguuuuagggua

SEQ ID NO: 337231 - RNA, 32 nt, Homo Sapiens
agaggauucaguggucaaauacguguugggaa

SEQ ID NO: 337232 - RNA, 31 nt, Homo Sapiens
ggccgguaacggagaaaguuuacgccgacac

SEQ ID NO: 337233 - RNA, 28 nt, Homo Sapiens
ugaugaguguuccccaggaugcacauug

SEQ ID NO: 337234 - RNA, 32 nt, Homo Sapiens
auggagcagggccgccggcugcuccuguccua

SEQ ID NO: 337235 - RNA, 32 nt, Homo Sapiens
aggacaaugaaaauauaaugaaauaaauauuu

SEQ ID NO: 337236 - RNA, 32 nt, Homo Sapiens
auaacaaugguguaacuuguaaacuaaauauu

SEQ ID NO: 337237 - RNA, 32 nt, Homo Sapiens
cagcaaaggagucugaggcugauuccaguaga

SEQ ID NO: 337238 - RNA, 32 nt, Homo Sapiens
gcaaugggauguaguuuuuacccagguucuau

SEQ ID NO: 337239 - RNA, 31 nt, Homo Sapiens
uuacaugugaggauagcaggaguugaagaug

SEQ ID NO: 337240 - RNA, 32 nt, Homo Sapiens
gaggugucuguaguccauguggcaccuuugug

SEQ ID NO: 337241 - RNA, 32 nt, Homo Sapiens
cucagugcacuucuuuucuguuggccucagua

SEQ ID NO: 337242 - RNA, 32 nt, Homo Sapiens
uuccaggcauauaaugugcugauuuuaacaau

SEQ ID NO: 337243 - RNA, 32 nt, Homo Sapiens
ccaaggaucguucgcuaaagcuaaggugaaaa

SEQ ID NO: 337244 - RNA, 32 nt, Homo Sapiens
cagccgccucaccauccucuaccuguucaaca

SEQ ID NO: 337245 - RNA, 32 nt, Homo Sapiens
aaaagcuguaugaacugcuuuaccaaauauca

SEQ ID NO: 337246 - RNA, 32 nt, Homo Sapiens
uuuuucuuuccacauuggcacauucacuucuc

SEQ ID NO: 337247 - RNA, 32 nt, Homo Sapiens
aauaaauuuaagaguuuuuucuuaaaaaaaaa

SEQ ID NO: 337248 - RNA, 32 nt, Homo Sapiens
uuuucaagagugagaauaaaaagggaggaugu

SEQ ID NO: 337249 - RNA, 32 nt, Homo Sapiens
agcgcuggugaccccugggguauccgggagga

SEQ ID NO: 337250 - RNA, 32 nt, Homo Sapiens
gaguucugacccgcucccuuucugaccugggc

SEQ ID NO: 337251 - RNA, 32 nt, Homo Sapiens
cagccccaccgccuacccgacucgguuucugg

SEQ ID NO: 337252 - RNA, 32 nt, Homo Sapiens
ggggaggcaggggccccugugcucucugaaca

SEQ ID NO: 337253 - RNA, 32 nt, Homo Sapiens
guggauuuguaagguguuuuucuuuuuuacgc

SEQ ID NO: 337254 - RNA, 32 nt, Homo Sapiens
acuuuauaaaauuuauguauuaguuuuugcau

SEQ ID NO: 337255 - RNA, 32 nt, Homo Sapiens
uguauaaacaaaugcagcuggaaucgcucaag

SEQ ID NO: 337256 - RNA, 32 nt, Homo Sapiens
gaaugagugcagagaggucaagugccaggcca

SEQ ID NO: 337257 - RNA, 32 nt, Homo Sapiens
cuugcaagccaccucccugcucuguugcuggc

SEQ ID NO: 337258 - RNA, 32 nt, Homo Sapiens
ccaccuugccagcaggcucugugcuccuugaa

SEQ ID NO: 337259 - RNA, 32 nt, Homo Sapiens
aagcuccuagaaaaaauggguggcucagcacc

SEQ ID NO: 337260 - RNA, 32 nt, Homo Sapiens
gaaguccaccuagcggcuguuugccugucggg

SEQ ID NO: 337261 - RNA, 32 nt, Homo Sapiens
ucaaugacacauuaacaucacaauggcgaaug

SEQ ID NO: 337262 - RNA, 32 nt, Homo Sapiens
caaugaacuuuggagcuuguaugugagucaga

SEQ ID NO: 337263 - RNA, 32 nt, Homo Sapiens
cggggucucgggucuacauuuaguugcaaggc

SEQ ID NO: 337264 - RNA, 32 nt, Homo Sapiens
ccugugccacuacauccuggaguuuggcucua

SEQ ID NO: 337265 - RNA, 32 nt, Homo Sapiens
uggucccagcuacuuugggagguugaggcagg

SEQ ID NO: 337266 - RNA, 32 nt, Homo Sapiens
agagccggcaccccagcuccuuccuccagcuc

SEQ ID NO: 337267 - RNA, 32 nt, Homo Sapiens
gcgcuccaccgccgcuauggucuccgugccua

SEQ ID NO: 337268 - RNA, 32 nt, Homo Sapiens
acaaacaaacaaaaaacaaauugaccaagguu

SEQ ID NO: 337269 - RNA, 32 nt, Homo Sapiens
cucacgcgcucucgccgggaccccgcuuccgc

SEQ ID NO: 337270 - RNA, 32 nt, Homo Sapiens
accgauguugagcauccuuucauaugcuuucu

SEQ ID NO: 337271 - RNA, 32 nt, Homo Sapiens
aucacacagacacccccaccuuccuccagccu

SEQ ID NO: 337272 - RNA, 32 nt, Homo Sapiens
ggagugcagaaaaaagugaaaacugaaacaac

SEQ ID NO: 337273 - RNA, 32 nt, Homo Sapiens
uuuagauaaaaauuauguaaaauaugugccau

SEQ ID NO: 337274 - RNA, 32 nt, Homo Sapiens
agauuacaggugugagccacccugcccagccg

SEQ ID NO: 337275 - RNA, 32 nt, Homo Sapiens
ccacaguuuauuucuauucuugaguucuuaag

SEQ ID NO: 337276 - RNA, 32 nt, Homo Sapiens
ugauggaggaugugcuaauuguaaugucauag

SEQ ID NO: 337277 - RNA, 32 nt, Homo Sapiens
uucagucuuuguacuggccccauccucuccuc

SEQ ID NO: 337278 - RNA, 32 nt, Homo Sapiens
ggaaacgucuuacagauuguggagagcugcag

SEQ ID NO: 337279 - RNA, 32 nt, Homo Sapiens
gcuguugugcugauuccaaugcuuucacguug

SEQ ID NO: 337280 - RNA, 32 nt, Homo Sapiens
uauccauguuuuuauccauucaacuguauuaa

SEQ ID NO: 337281 - RNA, 32 nt, Homo Sapiens
uuaccaugaugaauucuagugaaaugaccccu

SEQ ID NO: 337282 - RNA, 32 nt, Homo Sapiens
aaagcacauuuuauuuccauuuguuuggauuc

SEQ ID NO: 337283 - RNA, 32 nt, Homo Sapiens
cuuggguuagccccggucccagcccaaacuca

SEQ ID NO: 337284 - RNA, 32 nt, Homo Sapiens
ggaggccaagguggacaggucacuuaaggucg

SEQ ID NO: 337285 - RNA, 32 nt, Homo Sapiens
uguuuuguugguuuuuaaagauuuuuguuugu

SEQ ID NO: 337286 - RNA, 32 nt, Homo Sapiens
ucugccugcugucgggggcgggcuggccaggc

SEQ ID NO: 337287 - RNA, 32 nt, Homo Sapiens
uucagcucuugccuugccaugcagucaccucc

SEQ ID NO: 337288 - RNA, 32 nt, Homo Sapiens
aaguguguuuaaaaguaaaugauuugggaacu

SEQ ID NO: 337289 - RNA, 32 nt, Homo Sapiens
uugucucucugggucuuagucccacuuagcac

SEQ ID NO: 337290 - RNA, 32 nt, Homo Sapiens
ccuucucguauaaauagagugacuauccacag

SEQ ID NO: 337291 - RNA, 32 nt, Homo Sapiens
aaaugauacucaucaugguuuugauuugcaau

SEQ ID NO: 337292 - RNA, 32 nt, Homo Sapiens
cacuauucugaugucuaucaccauagauuugu

SEQ ID NO: 337293 - RNA, 32 nt, Homo Sapiens
gucgaagaggccgggcuacgucgugcccugcg

SEQ ID NO: 337294 - RNA, 32 nt, Homo Sapiens
cacagugcccgcaggcuccacccagcugccuc

SEQ ID NO: 337295 - RNA, 32 nt, Homo Sapiens
uguggggccuccgcgccgcggccguuagucau

SEQ ID NO: 337296 - RNA, 32 nt, Homo Sapiens
gcgguucugagagcuucagagagcgauggaaa

SEQ ID NO: 337297 - RNA, 32 nt, Homo Sapiens
gccgaggcggguggaucaugaggucaggagau

SEQ ID NO: 337298 - RNA, 32 nt, Homo Sapiens
gcugaggcggguggaucacgaggucaggagau

SEQ ID NO: 337299 - RNA, 32 nt, Homo Sapiens
ugacaccaaacacaguguuuuugagcucggua

SEQ ID NO: 337300 - RNA, 32 nt, Homo Sapiens
cggggcgcggcggggcugucggucacgccccu

SEQ ID NO: 337301 - RNA, 32 nt, Homo Sapiens
gcaucuguuauuuuuccaauacauguaaacag

SEQ ID NO: 337302 - RNA, 32 nt, Homo Sapiens
caagaggaauggguguucuguggccucgaguc

SEQ ID NO: 337303 - RNA, 32 nt, Homo Sapiens
aaauguacaccuguggucccagcuacucugga

SEQ ID NO: 337304 - RNA, 32 nt, Homo Sapiens
gaccccaccucuugggugggcuccuccuuucc

SEQ ID NO: 337305 - RNA, 32 nt, Homo Sapiens
auucauguaccugugauccagcaagaagggag

SEQ ID NO: 337306 - RNA, 32 nt, Homo Sapiens
aagaugguaacaaaaccucauauugucuuuac

SEQ ID NO: 337307 - RNA, 32 nt, Homo Sapiens
uuaauuuggcaucugaaggguauaaaggccug

SEQ ID NO: 337308 - RNA, 32 nt, Homo Sapiens
ccuguuccagagcuagccuguuccuggguagc

SEQ ID NO: 337309 - RNA, 32 nt, Homo Sapiens
ccgccccacccccuccuccccagaacacucag

SEQ ID NO: 337310 - RNA, 32 nt, Homo Sapiens
ccaccccuuccuuccaggcacaucucacauug

SEQ ID NO: 337311 - RNA, 32 nt, Homo Sapiens
gcuggaugggccugcagaaacaacacucacca

SEQ ID NO: 337312 - RNA, 32 nt, Homo Sapiens
ucccggggucgggaccggagcggcgggcgcga

SEQ ID NO: 337313 - RNA, 32 nt, Homo Sapiens
uaguuuucaugucaggaacggcucuuaguuca

SEQ ID NO: 337314 - RNA, 32 nt, Homo Sapiens
gcgccgaucccggcugaggcgcagcggcgaga

SEQ ID NO: 337315 - RNA, 32 nt, Homo Sapiens
aggugggcagaucaccugaggucaggaguuug

SEQ ID NO: 337316 - RNA, 32 nt, Homo Sapiens
gaggauacugauccaagauacauggcacacaa

SEQ ID NO: 337317 - RNA, 32 nt, Homo Sapiens
gggcuggcgagggcugcgaggccagggaagcc

SEQ ID NO: 337318 - RNA, 32 nt, Homo Sapiens
cgggcggcacuuuuuccagguuguuaauccag

SEQ ID NO: 337319 - RNA, 32 nt, Homo Sapiens
aauauguauacuuuggggggaucuauuuaugu

SEQ ID NO: 337320 - RNA, 32 nt, Homo Sapiens
cccaggccccacuugcuuccugcgggugggaa

SEQ ID NO: 337321 - RNA, 32 nt, Homo Sapiens
uuccugccacaucagagcugcacccggugcuu

SEQ ID NO: 337322 - RNA, 32 nt, Homo Sapiens
caugagaauguugaacgcuuguuaaauaccuu

SEQ ID NO: 337323 - RNA, 32 nt, Homo Sapiens
ccgagcaggaggaggaacccgagaaauuccga

SEQ ID NO: 337324 - RNA, 32 nt, Homo Sapiens
agcauggucgagcucuaggagcuaugaaauau

SEQ ID NO: 337325 - RNA, 32 nt, Homo Sapiens
acagagccgcggcuugcuuucaggacacgggu

SEQ ID NO: 337326 - RNA, 30 nt, Homo Sapiens
uaaauuucuguaucugucgcccugagcuga

SEQ ID NO: 337327 - RNA, 32 nt, Homo Sapiens
cggcagguccuguguccccugcaccuggagga

SEQ ID NO: 337328 - RNA, 32 nt, Homo Sapiens
auuuguaugaacugcuuugggccaggaccugu

SEQ ID NO: 337329 - RNA, 32 nt, Homo Sapiens
uuggggguucccucagccccccaccccagauc

SEQ ID NO: 337330 - RNA, 32 nt, Homo Sapiens
ccuuuuacagcagugccacggcaccaagcgag

SEQ ID NO: 337331 - RNA, 32 nt, Homo Sapiens
aacuuaugagagaggaagacucgggaaagcac

SEQ ID NO: 337332 - RNA, 32 nt, Homo Sapiens
uggcggaccccggcccagaucccgaaucugag

SEQ ID NO: 337333 - RNA, 32 nt, Homo Sapiens
uaguugagcauagagaacaaaguaaaaguagu

SEQ ID NO: 337334 - RNA, 32 nt, Homo Sapiens
ucggcugcacccagccccagccccauccccag

SEQ ID NO: 337335 - RNA, 32 nt, Homo Sapiens
uaaaaaaguuuacacuucuauguaucucacaa

SEQ ID NO: 337336 - RNA, 32 nt, Homo Sapiens
cgggagggaaagcacccaggaugccugugauu

SEQ ID NO: 337337 - RNA, 32 nt, Homo Sapiens
ccuggacaacuuccccaggaaccccguaccag

SEQ ID NO: 337338 - RNA, 32 nt, Homo Sapiens
uacgacuccaugagcagcgccagcccagcucu

SEQ ID NO: 337339 - RNA, 32 nt, Homo Sapiens
ugcaacgccuccgaccccgcggccuacgcgca

SEQ ID NO: 337340 - RNA, 32 nt, Homo Sapiens
agcgugcagcagcugggagccgccguucucag

SEQ ID NO: 337341 - RNA, 32 nt, Homo Sapiens
accaauuguguuucccaagaugauguagagaa

SEQ ID NO: 337342 - RNA, 32 nt, Homo Sapiens
uaugccgcucucucccggcgcggccgccgccg

SEQ ID NO: 337343 - RNA, 32 nt, Homo Sapiens
ucauauuuuaaaauauccuuggaggcuaucuc

SEQ ID NO: 337344 - RNA, 32 nt, Homo Sapiens
ggcaugcgggcuccaggguuccaguggggagc

SEQ ID NO: 337345 - RNA, 32 nt, Homo Sapiens
ccuuccucuccccuccucccaucccucauagg

SEQ ID NO: 337346 - RNA, 32 nt, Homo Sapiens
uccacggugcgcgguuccccagcccucgcggc

SEQ ID NO: 337347 - RNA, 32 nt, Homo Sapiens
ucuggcuaauuuucuuuuuuuuuuuuuuuuuu

SEQ ID NO: 337348 - RNA, 32 nt, Homo Sapiens
uuggcggcgcaccagcagugugaccuggaauc

SEQ ID NO: 337349 - RNA, 32 nt, Homo Sapiens
auccaagguguaggcccggcgcggggcgcgga

SEQ ID NO: 337350 - RNA, 32 nt, Homo Sapiens
gagcccagccacgccuuggagggaggggcuug

SEQ ID NO: 337351 - RNA, 32 nt, Homo Sapiens
uugagcucuccagcuuggaccacacauugccc

SEQ ID NO: 337352 - RNA, 30 nt, Homo Sapiens
ggggugggggcggguguccguccggaaaug

SEQ ID NO: 337353 - RNA, 32 nt, Homo Sapiens
caaaucacacccaaaacauacuggggugaaac

SEQ ID NO: 337354 - RNA, 32 nt, Homo Sapiens
ucuuuuacuucauaccuugucucagaucucuc

SEQ ID NO: 337355 - RNA, 32 nt, Homo Sapiens
aacuucaaugaaaauauaugaguagagcauau

SEQ ID NO: 337356 - RNA, 32 nt, Homo Sapiens
caaaggucccaguuccuucucggagccggcug

SEQ ID NO: 337357 - RNA, 32 nt, Homo Sapiens
auguggagcaguguucugaggacucuucuauc

SEQ ID NO: 337358 - RNA, 32 nt, Homo Sapiens
ugguggaaaaguuaugcuaaaauauggauugc

SEQ ID NO: 337359 - RNA, 32 nt, Homo Sapiens
agccucguauguuugucaguucaugccgagau

SEQ ID NO: 337360 - RNA, 32 nt, Homo Sapiens
uuuccacuuccacggccucuccaggcacugag

SEQ ID NO: 337361 - RNA, 32 nt, Homo Sapiens
auuacacauaaugguaggaguuuucuaccaua

SEQ ID NO: 337362 - RNA, 32 nt, Homo Sapiens
guuaucucaagccagucaccacagagggucuc

SEQ ID NO: 337363 - RNA, 32 nt, Homo Sapiens
ccaugaagcaaggcuuuguuaauccuauuuua

SEQ ID NO: 337364 - RNA, 32 nt, Homo Sapiens
gaaaaccaaaaauaaaaaauacggaaaacuaa

SEQ ID NO: 337365 - RNA, 32 nt, Homo Sapiens
aguccgaguucagauuucaccaauugucccaa

SEQ ID NO: 337366 - RNA, 32 nt, Homo Sapiens
guggacaacuuucauauuacuaaucucuuuuc

SEQ ID NO: 337367 - RNA, 32 nt, Homo Sapiens
aggauauguuugggacuuuucuuuguuuauua

SEQ ID NO: 337368 - RNA, 32 nt, Homo Sapiens
guuugacuucuucuuuaccaauuuggaugccc

SEQ ID NO: 337369 - RNA, 32 nt, Homo Sapiens
ugcucagggcagcuccuaggccuggacugagc

SEQ ID NO: 337370 - RNA, 32 nt, Homo Sapiens
agugcaguucacuuacguguugauguaguuua

SEQ ID NO: 337371 - RNA, 32 nt, Homo Sapiens
cuacuaaaaaauauuaaaaaauuagcugggcg

SEQ ID NO: 337372 - RNA, 32 nt, Homo Sapiens
aagcagaaggcacagugccucugaccagcauc

SEQ ID NO: 337373 - RNA, 32 nt, Homo Sapiens
gagcugagaaggaagcgcugaucuucuauuua

SEQ ID NO: 337374 - RNA, 32 nt, Homo Sapiens
gcaucuuccuuacuuuguccauccuccggacu

SEQ ID NO: 337375 - RNA, 32 nt, Homo Sapiens
uccugauacuaacaguuuuacgauuuaaaacu

SEQ ID NO: 337376 - RNA, 32 nt, Homo Sapiens
agcaguuuuuaaauaaauuacuugaauuuucu

SEQ ID NO: 337377 - RNA, 32 nt, Homo Sapiens
agccucuaaaagaccucgggcaagucucacag

SEQ ID NO: 337378 - RNA, 32 nt, Homo Sapiens
ccagugggcaguagccuggccuuuuucugugu

SEQ ID NO: 337379 - RNA, 32 nt, Homo Sapiens
uaugcucucgcacuuuuaggauacaacuuuug

SEQ ID NO: 337380 - RNA, 32 nt, Homo Sapiens
aaaagaaucaacaaaauaaugcucuugaagca

SEQ ID NO: 337381 - RNA, 32 nt, Homo Sapiens
gauccaauuauuaauuauguuuaggguuuaaa

SEQ ID NO: 337382 - RNA, 32 nt, Homo Sapiens
caccuucaucuucagcugggccacaagaaacu

SEQ ID NO: 337383 - RNA, 32 nt, Homo Sapiens
auuaaacaaauuuaauugcauuuuaaagcauu

SEQ ID NO: 337384 - RNA, 32 nt, Homo Sapiens
cagcccagcuccgugagcugccucggcgcagc

SEQ ID NO: 337385 - RNA, 32 nt, Homo Sapiens
gccccgcggugugaccccggccggugccuugg

SEQ ID NO: 337386 - RNA, 32 nt, Homo Sapiens
gaccugcccccuccucaggcaucugggaaggg

SEQ ID NO: 337387 - RNA, 32 nt, Homo Sapiens
gccuuuugcugcgucaggcugggcggauauuu

SEQ ID NO: 337388 - RNA, 32 nt, Homo Sapiens
gcccccucaccuccccgaagugugauggagga

SEQ ID NO: 337389 - RNA, 32 nt, Homo Sapiens
uggaccucccccacccaccuccgcugacuccu

SEQ ID NO: 337390 - RNA, 32 nt, Homo Sapiens
acggggucaggagaucgagaccauccuggcca

SEQ ID NO: 337391 - RNA, 32 nt, Homo Sapiens
aaaauucaagcacuucuucccuccacccucac

SEQ ID NO: 337392 - RNA, 32 nt, Homo Sapiens
auggguugcucauuugguuagaggaacucuca

SEQ ID NO: 337393 - RNA, 32 nt, Homo Sapiens
ucugcgccuuugcaugagacuuuacgguaagc

SEQ ID NO: 337394 - RNA, 29 nt, Homo Sapiens
uuuggugugacuucccucuguauugaggc

SEQ ID NO: 337395 - RNA, 32 nt, Homo Sapiens
ggggcugaggcacgugguagcccucuuucugu

SEQ ID NO: 337396 - RNA, 32 nt, Homo Sapiens
cuguaggggacugagagcugggcuugcugggc

SEQ ID NO: 337397 - RNA, 32 nt, Homo Sapiens
acaaggaagaaauuauuuaucuugagcuuuuu

SEQ ID NO: 337398 - RNA, 32 nt, Homo Sapiens
guuguaccuggaucugucuaguucuuagggga

SEQ ID NO: 337399 - RNA, 32 nt, Homo Sapiens
ugugagaugcuuguauauuuugaaaauaugau

SEQ ID NO: 337400 - RNA, 30 nt, Homo Sapiens
cuucuucuggacuccauaaguuacaggacc

SEQ ID NO: 337401 - RNA, 32 nt, Homo Sapiens
acccuaacaaaguaggaugggguugggggcua

SEQ ID NO: 337402 - RNA, 32 nt, Homo Sapiens
gacauuugagaaguaggggaaagggaaucaug

SEQ ID NO: 337403 - RNA, 32 nt, Homo Sapiens
aucuuggugcuaagcagaaaagaaauuuggac

SEQ ID NO: 337404 - RNA, 29 nt, Homo Sapiens
uacaucauauguauaccaucagauaaaag

SEQ ID NO: 337405 - RNA, 29 nt, Homo Sapiens
uuaguuuggggugucaauuuucuaucaac

SEQ ID NO: 337406 - RNA, 32 nt, Homo Sapiens
cuguuuucauaauaaacuuuauugugacaggc

SEQ ID NO: 337407 - RNA, 32 nt, Homo Sapiens
gacuguccaaugcagagcuggcgggacagaga

SEQ ID NO: 337408 - RNA, 32 nt, Homo Sapiens
cgacgcgcgggaacaacgcgagucggcgcgcg

SEQ ID NO: 337409 - RNA, 31 nt, Homo Sapiens
aaggagugaaacaaucuugucuauuugucau

SEQ ID NO: 337410 - RNA, 32 nt, Homo Sapiens
aaagacaauaugggauggucggaggcagaggu

SEQ ID NO: 337411 - RNA, 32 nt, Homo Sapiens
ggguggaaggguggagguaggaacaaaauugc

SEQ ID NO: 337412 - RNA, 32 nt, Homo Sapiens
gaugaugaaaauaagacuauuaaugaagcagu

SEQ ID NO: 337413 - RNA, 32 nt, Homo Sapiens
uucucaguguaauaaaaagagcucccaaacuu

SEQ ID NO: 337414 - RNA, 32 nt, Homo Sapiens
aggggccuggcacagcuggccuuggggacgag

SEQ ID NO: 337415 - RNA, 32 nt, Homo Sapiens
ugaauaaauaaaugggaaauaaaggugcaaau

SEQ ID NO: 337416 - RNA, 32 nt, Homo Sapiens
gaagauacugucaugaguguuucuagggcagu

SEQ ID NO: 337417 - RNA, 32 nt, Homo Sapiens
gaaugcaaacuuaaguaagauacaguucccac

SEQ ID NO: 337418 - RNA, 32 nt, Homo Sapiens
uauguugccaaguugucuuugcucuuaggugg

SEQ ID NO: 337419 - RNA, 32 nt, Homo Sapiens
cagagccccgguuccaguuucuuccuguaguu

SEQ ID NO: 337420 - RNA, 32 nt, Homo Sapiens
acuuugccguccugggguggcugcaguuaugu

SEQ ID NO: 337421 - RNA, 32 nt, Homo Sapiens
uauguuauauguugucuuacaaaccauacuga

SEQ ID NO: 337422 - RNA, 32 nt, Homo Sapiens
cauuaaaugcaaccaccagagagcaguucacu

SEQ ID NO: 337423 - RNA, 32 nt, Homo Sapiens
caaucacaugcagcugacucggacacuggccu

SEQ ID NO: 337424 - RNA, 32 nt, Homo Sapiens
cuuauaaguaguaggcguaaauaaucaggagu

SEQ ID NO: 337425 - RNA, 32 nt, Homo Sapiens
ggguuggcccacacacagaaaaacagacacau

SEQ ID NO: 337426 - RNA, 32 nt, Homo Sapiens
cuaccccuuucacccugucccuccucagagua

SEQ ID NO: 337427 - RNA, 32 nt, Homo Sapiens
aaguaugaagauuguuugcuguggcauuauua

SEQ ID NO: 337428 - RNA, 32 nt, Homo Sapiens
uccagcccuaaaagauaacagcaaguuuucag

SEQ ID NO: 337429 - RNA, 32 nt, Homo Sapiens
cuaacaaaaugguacuuaguuuguuggucuuu

SEQ ID NO: 337430 - RNA, 32 nt, Homo Sapiens
gcgcggagggagaggaaaugagugcggcggcc

SEQ ID NO: 337431 - RNA, 32 nt, Homo Sapiens
accggcagcugcucauccccugugcauacagu

SEQ ID NO: 337432 - RNA, 32 nt, Homo Sapiens
uuucucccucagauccuccccacagcucagcg

SEQ ID NO: 337433 - RNA, 32 nt, Homo Sapiens
auuauuaccaccuccccaacccuacacgcacg

SEQ ID NO: 337434 - RNA, 30 nt, Homo Sapiens
uucuguggagguggggugggggaguggugg

SEQ ID NO: 337435 - RNA, 32 nt, Homo Sapiens
gcacacggaccuccagagucccugccccugca

SEQ ID NO: 337436 - RNA, 32 nt, Homo Sapiens
aaaaauaauggaaacagaaauaggcguacuuu

SEQ ID NO: 337437 - RNA, 32 nt, Homo Sapiens
ggauuccacuuauauauaauauauauaaggua

SEQ ID NO: 337438 - RNA, 32 nt, Homo Sapiens
acgcgcccgcggcccgcgcgccgagauguucu

SEQ ID NO: 337439 - RNA, 32 nt, Homo Sapiens
aacaaacaaacaaaaaagauauugcaguugug

SEQ ID NO: 337440 - RNA, 32 nt, Homo Sapiens
cuucaguuuucagauauauggaucuagauccc

SEQ ID NO: 337441 - RNA, 32 nt, Homo Sapiens
uuccucuucccgcagcacgcccggcccggccc

SEQ ID NO: 337442 - RNA, 32 nt, Homo Sapiens
acuucuagcaaccuaaguaaagacauuccccu

SEQ ID NO: 337443 - RNA, 32 nt, Homo Sapiens
aagaagagagagaacuugaugccaaguccacg

SEQ ID NO: 337444 - RNA, 31 nt, Homo Sapiens
uugcugugaaacacuugacagcagagcuuuc

SEQ ID NO: 337445 - RNA, 32 nt, Homo Sapiens
uugcccauggcuaugaugucagacaguggaug

SEQ ID NO: 337446 - RNA, 32 nt, Homo Sapiens
gaauaguccuggggcucuggggccugcgggua

SEQ ID NO: 337447 - RNA, 32 nt, Homo Sapiens
augccgcagaggaugcgccuagcugggcuggg

SEQ ID NO: 337448 - RNA, 32 nt, Homo Sapiens
ccccugugauacuguucuuaauauucagggag

SEQ ID NO: 337449 - RNA, 32 nt, Homo Sapiens
ggugaaaacacguaucuacuaaaaauacaaaa

SEQ ID NO: 337450 - RNA, 32 nt, Homo Sapiens
cugcccuuggggaagagggaaugccgugacgg

SEQ ID NO: 337451 - RNA, 32 nt, Homo Sapiens
aggggaccccuccuugcccagcagccgagggg

SEQ ID NO: 337452 - RNA, 32 nt, Homo Sapiens
gccgccuggaggaggaggccgcgcuggacgcg

SEQ ID NO: 337453 - RNA, 32 nt, Homo Sapiens
gcccgagccgcggugagcgucguguugcauga

SEQ ID NO: 337454 - RNA, 32 nt, Homo Sapiens
auuuaaaaaaucauccugauuaugaagaauac

SEQ ID NO: 337455 - RNA, 32 nt, Homo Sapiens
ccccaagcucacccacuguuggggagauuauc

SEQ ID NO: 337456 - RNA, 32 nt, Homo Sapiens
auuuuucacaguguagaaugacauuuuguuug

SEQ ID NO: 337457 - RNA, 32 nt, Homo Sapiens
augggugugcuaaaugguauaugaauuauuuc

SEQ ID NO: 337458 - RNA, 30 nt, Homo Sapiens
agccugggaggugguagggugucugaaaug

SEQ ID NO: 337459 - RNA, 32 nt, Homo Sapiens
uuaaauaucacaauagcaucccagagagacag

SEQ ID NO: 337460 - RNA, 32 nt, Homo Sapiens
uacaguauauucucuuuuuuucuuuauuucug

SEQ ID NO: 337461 - RNA, 29 nt, Homo Sapiens
caggcuuuuaagguauauuuuguagcaug

SEQ ID NO: 337462 - RNA, 32 nt, Homo Sapiens
gucgagcgcacacggcgggcgccccuggcaag

SEQ ID NO: 337463 - RNA, 32 nt, Homo Sapiens
caggaaauucagcacaucugagucaucuaugu

SEQ ID NO: 337464 - RNA, 32 nt, Homo Sapiens
ugggguuuguauuuugguuaaucuucaugaau

SEQ ID NO: 337465 - RNA, 32 nt, Homo Sapiens
ucccacgaccagcugcccuucuggccgcccug

SEQ ID NO: 337466 - RNA, 31 nt, Homo Sapiens
ucccuagaauugaagaaccagggagaaccag

SEQ ID NO: 337467 - RNA, 32 nt, Homo Sapiens
uagguguugcuuaaaaauaauucuugguuuuu

SEQ ID NO: 337468 - RNA, 32 nt, Homo Sapiens
aggugugucuuccgcagaaaaaugugcauguu

SEQ ID NO: 337469 - RNA, 32 nt, Homo Sapiens
caagccaguuauuacugaaaaaucauugaaau

SEQ ID NO: 337470 - RNA, 32 nt, Homo Sapiens
ggucucuucuccccggcugaucccagcacucu

SEQ ID NO: 337471 - RNA, 32 nt, Homo Sapiens
uuagcucaaaccaaauaccaagaaguuaugcu

SEQ ID NO: 337472 - RNA, 32 nt, Homo Sapiens
aaaaagagacccuggggcugggugugguggcu

SEQ ID NO: 337473 - RNA, 31 nt, Homo Sapiens
auaugaaauuuuauuaaaaugcugcuauauu

SEQ ID NO: 337474 - RNA, 32 nt, Homo Sapiens
uccagcuaaaagcuccucaguacucuaccaau

SEQ ID NO: 337475 - RNA, 32 nt, Homo Sapiens
ugcuccuugaguuuucaagaugaaauaaggag

SEQ ID NO: 337476 - RNA, 30 nt, Homo Sapiens
cccuuugucugugccauaagugcuugaaaa

SEQ ID NO: 337477 - RNA, 32 nt, Homo Sapiens
gacauuuuacacaacaauaauggaccugugua

SEQ ID NO: 337478 - RNA, 32 nt, Homo Sapiens
uugucaugaaaacacuugccuuacaaggcucu

SEQ ID NO: 337479 - RNA, 32 nt, Homo Sapiens
cccaaaagacgaaagcacauggagaaaaggca

SEQ ID NO: 337480 - RNA, 32 nt, Homo Sapiens
caagucugggaaauccuggggugaguggaguc

SEQ ID NO: 337481 - RNA, 32 nt, Homo Sapiens
agaaguauguaaauaaaaagcccaagauaaag

SEQ ID NO: 337482 - RNA, 32 nt, Homo Sapiens
ggaccaggcagacaaacauucagaguugcugg

SEQ ID NO: 337483 - RNA, 32 nt, Homo Sapiens
uauggucagacaggccuggaaaacacugaggu

SEQ ID NO: 337484 - RNA, 28 nt, Homo Sapiens
accauguccgcagccuggaucccggcuc

SEQ ID NO: 337485 - RNA, 32 nt, Homo Sapiens
caucccccagggugggguuucugaugcaucca

SEQ ID NO: 337486 - RNA, 32 nt, Homo Sapiens
gcagagucaugaccucuuuccgcuuggcccuc

SEQ ID NO: 337487 - RNA, 32 nt, Homo Sapiens
ggggggagaugagaggccugagcggcuuccca

SEQ ID NO: 337488 - RNA, 32 nt, Homo Sapiens
ggaggccugagccccaggggccuagaccugug

SEQ ID NO: 337489 - RNA, 32 nt, Homo Sapiens
acuugugaauggauauaaguuacuuuuaacaa

SEQ ID NO: 337490 - RNA, 32 nt, Homo Sapiens
gucggggagcagccugguguccugccccaggu

SEQ ID NO: 337491 - RNA, 32 nt, Homo Sapiens
cguuacagacugcucgccugggauggaacggu

SEQ ID NO: 337492 - RNA, 32 nt, Homo Sapiens
ccuacugcgcccgagucccgcggccccagugg

SEQ ID NO: 337493 - RNA, 32 nt, Homo Sapiens
uugacaccuuuaguuaagaugauccuuuccca

SEQ ID NO: 337494 - RNA, 28 nt, Homo Sapiens
uccuggcugcuggccaggaugucgccag

SEQ ID NO: 337495 - RNA, 32 nt, Homo Sapiens
guagaguccaaguuuguuuucacaguuauuuu

SEQ ID NO: 337496 - RNA, 32 nt, Homo Sapiens
cucugggaagcccuaaaccaacccccugccua

SEQ ID NO: 337497 - RNA, 32 nt, Homo Sapiens
ccggggucgcggaucugcccgccccgcucucc

SEQ ID NO: 337498 - RNA, 32 nt, Homo Sapiens
aagaucuaagugaggaggggcugggguuugga

SEQ ID NO: 337499 - RNA, 32 nt, Homo Sapiens
ugggggaacaagaaaaauauaaaaagugaucu

SEQ ID NO: 337500 - RNA, 32 nt, Homo Sapiens
aggcggccguggccuuggcccgaggagacuaa

SEQ ID NO: 337501 - RNA, 32 nt, Homo Sapiens
uaacaugauggcucaaauaacuguagccuuau

SEQ ID NO: 337502 - RNA, 32 nt, Homo Sapiens
cgacagcuccagcucgugccaucuucccaaug

SEQ ID NO: 337503 - RNA, 32 nt, Homo Sapiens
gccucucugcccaggcucuccuccucccucca

SEQ ID NO: 337504 - RNA, 32 nt, Homo Sapiens
cgcgcgcgcucacacacacacacacacacaca

SEQ ID NO: 337505 - RNA, 32 nt, Homo Sapiens
ggguuucgaccccagaggugaauguauuguua

SEQ ID NO: 337506 - RNA, 32 nt, Homo Sapiens
cuugcgagcugauguuuuuuaagaucugaagu

SEQ ID NO: 337507 - RNA, 32 nt, Homo Sapiens
ucacagcccuccccaccccacauccaggacaa

SEQ ID NO: 337508 - RNA, 32 nt, Homo Sapiens
ggagucccagcuuuugggcagaccagaggccc

SEQ ID NO: 337509 - RNA, 32 nt, Homo Sapiens
ugagugcaaugucuuggauaugcaaaaaagaa

SEQ ID NO: 337510 - RNA, 32 nt, Homo Sapiens
uuuacaugauuuaaggaaagacuuuuauguca

SEQ ID NO: 337511 - RNA, 32 nt, Homo Sapiens
cguagccccgccccggccacggccccgugucu

SEQ ID NO: 337512 - RNA, 32 nt, Homo Sapiens
gaaucacgggcacuucuguggcccaucaccaa

SEQ ID NO: 337513 - RNA, 32 nt, Homo Sapiens
ccuacuauucugaaucucugggaauagggcca

SEQ ID NO: 337514 - RNA, 32 nt, Homo Sapiens
gguucccgaccucaggcugcugcucguugcgg

SEQ ID NO: 337515 - RNA, 32 nt, Homo Sapiens
agcggcgggcaguggcucuaggccgcaggcua

SEQ ID NO: 337516 - RNA, 32 nt, Homo Sapiens
guccccuggugccguuuuuccuuagaaaucag

SEQ ID NO: 337517 - RNA, 31 nt, Homo Sapiens
uccaacaugucagccgaggugcggcugaggc

SEQ ID NO: 337518 - RNA, 32 nt, Homo Sapiens
ccaucauugaagcuggcgucaucggagucugu

SEQ ID NO: 337519 - RNA, 32 nt, Homo Sapiens
ucccugaauuuucuccucuccucucaggucag

SEQ ID NO: 337520 - RNA, 32 nt, Homo Sapiens
uauuuggccaucuccugguuauauacaaaugu

SEQ ID NO: 337521 - RNA, 32 nt, Homo Sapiens
cugaggaaugguccggccgggccuagcgagga

SEQ ID NO: 337522 - RNA, 32 nt, Homo Sapiens
cgcagagucugcggacccggcgccgaggcggc

SEQ ID NO: 337523 - RNA, 32 nt, Homo Sapiens
cacacguguagcucacacacaguauacacaua

SEQ ID NO: 337524 - RNA, 32 nt, Homo Sapiens
gcggugggagggggugcuuguauuuaucuuau

SEQ ID NO: 337525 - RNA, 32 nt, Homo Sapiens
cugcuuuuccucucucucccaaggccugacaa

SEQ ID NO: 337526 - RNA, 32 nt, Homo Sapiens
gagaaacuguuuucgcagcagugcgccucccu

SEQ ID NO: 337527 - RNA, 32 nt, Homo Sapiens
ggaagcccgagaguuggugccuacugauccag

SEQ ID NO: 337528 - RNA, 31 nt, Homo Sapiens
gcgggcugcaggcaccucagagcccgggaca

SEQ ID NO: 337529 - RNA, 32 nt, Homo Sapiens
aucuguauauugcuuuuuaaaaguuaagucca

SEQ ID NO: 337530 - RNA, 32 nt, Homo Sapiens
gcugaggggagggccauuggcuggggccugcg

SEQ ID NO: 337531 - RNA, 32 nt, Homo Sapiens
ccgcuagcccgcccugguccccggcucgcucg

SEQ ID NO: 337532 - RNA, 32 nt, Homo Sapiens
ccucagccucugagcugaggccccacaccaga

SEQ ID NO: 337533 - RNA, 32 nt, Homo Sapiens
ucacuccacccagaguagagccaggugcuuag

SEQ ID NO: 337534 - RNA, 32 nt, Homo Sapiens
uguuacugugucuguguagaaaaggaagacau

SEQ ID NO: 337535 - RNA, 32 nt, Homo Sapiens
uuagucacaauuaaugaaauaauuacauuuua

SEQ ID NO: 337536 - RNA, 32 nt, Homo Sapiens
cuuucucagaggugacagagaugauggaugag

SEQ ID NO: 337537 - RNA, 32 nt, Homo Sapiens
uagccggacgcccuaggcuuccgcgagaucuu

SEQ ID NO: 337538 - RNA, 32 nt, Homo Sapiens
agcaaacaguagcagcagcaugcaccaaaaga

SEQ ID NO: 337539 - RNA, 28 nt, Homo Sapiens
gacucaggggcgaggaggaugacugggu

SEQ ID NO: 337540 - RNA, 32 nt, Homo Sapiens
auuccaggaagcguuugcacauccuggcccca

SEQ ID NO: 337541 - RNA, 32 nt, Homo Sapiens
ccuggcccaucccugcccuauccuggaagaug

SEQ ID NO: 337542 - RNA, 32 nt, Homo Sapiens
cuccgaaaacaucagcgaguggaagugcaugg

SEQ ID NO: 337543 - RNA, 27 nt, Homo Sapiens
cucagcuauuaauucuaaguguuuuuu

SEQ ID NO: 337544 - RNA, 32 nt, Homo Sapiens
uuacuuguauuaauuuauuuuaucuuccccaa

SEQ ID NO: 337545 - RNA, 32 nt, Homo Sapiens
uacugucuuugguuugagagccauggcaaaaa

SEQ ID NO: 337546 - RNA, 32 nt, Homo Sapiens
gaacuauaaauggagcuccauguauuuaugca

SEQ ID NO: 337547 - RNA, 32 nt, Homo Sapiens
cugaauguaucccuccccucaguuuuaaccug

SEQ ID NO: 337548 - RNA, 32 nt, Homo Sapiens
uggaggcagaacuaugaccuccccuuaagucc

SEQ ID NO: 337549 - RNA, 32 nt, Homo Sapiens
cucaacagcugcuuauucccgaugggauggcc

SEQ ID NO: 337550 - RNA, 32 nt, Homo Sapiens
cucucucucucuuuuuaaccaaaaagagauga

SEQ ID NO: 337551 - RNA, 32 nt, Homo Sapiens
gggacaugcacggccuguggacagccagcccc

SEQ ID NO: 337552 - RNA, 32 nt, Homo Sapiens
uccgagggaugaggguggggggugugggaagg

SEQ ID NO: 337553 - RNA, 32 nt, Homo Sapiens
agaggauacacagauagcggauaagcacauga

SEQ ID NO: 337554 - RNA, 32 nt, Homo Sapiens
guggggggacauuuuuguuccugguguuugug

SEQ ID NO: 337555 - RNA, 32 nt, Homo Sapiens
uagaacuguggaagcuucuacuccugcaguaa

SEQ ID NO: 337556 - RNA, 32 nt, Homo Sapiens
caaccccaagacugugaaagacuaacauccau

SEQ ID NO: 337557 - RNA, 32 nt, Homo Sapiens
uugacauuacagccaagauggugcugucccag

SEQ ID NO: 337558 - RNA, 32 nt, Homo Sapiens
agaugucccccuccccaagaugguagcagaaa

SEQ ID NO: 337559 - RNA, 32 nt, Homo Sapiens
accucaugaugauggaguuaaaaguaaaccgu

SEQ ID NO: 337560 - RNA, 32 nt, Homo Sapiens
cucuugauuuucaacaguucuaaacagcaaca

SEQ ID NO: 337561 - RNA, 32 nt, Homo Sapiens
gcuguaagcugccugccgggccugaggagcuc

SEQ ID NO: 337562 - RNA, 32 nt, Homo Sapiens
ggccuccucccggccccgggcauucgcggaga

SEQ ID NO: 337563 - RNA, 32 nt, Homo Sapiens
aacggcagccucccaaccacacaacacaucaa

SEQ ID NO: 337564 - RNA, 32 nt, Homo Sapiens
agacuccgccgacgcccggugccgugggccug

SEQ ID NO: 337565 - RNA, 32 nt, Homo Sapiens
aguggcuuccucuggggugucaccaagcaagg

SEQ ID NO: 337566 - RNA, 26 nt, Homo Sapiens
gaugcugaguccggagcgccuagccc

SEQ ID NO: 337567 - RNA, 32 nt, Homo Sapiens
cauguuacuuuaaauauaucuauauuauugua

SEQ ID NO: 337568 - RNA, 32 nt, Homo Sapiens
acugcaaaucgacaccuauuaaugggucucac

SEQ ID NO: 337569 - RNA, 32 nt, Homo Sapiens
uagaauugcuaagggaaacaggucuuacacaa

SEQ ID NO: 337570 - RNA, 32 nt, Homo Sapiens
guggacguccggucuccuuugugggaugagaa

SEQ ID NO: 337571 - RNA, 32 nt, Homo Sapiens
acuuuuucacugaguuuuuauuccugaaauuc

SEQ ID NO: 337572 - RNA, 32 nt, Homo Sapiens
ggaaauuucccucucaccuacuucucuggccc

SEQ ID NO: 337573 - RNA, 32 nt, Homo Sapiens
uuauuuucccuguugcguugcuauagaugaag

SEQ ID NO: 337574 - RNA, 32 nt, Homo Sapiens
cuuaagccauuuuuuucuuaacaucgguggcu

SEQ ID NO: 337575 - RNA, 32 nt, Homo Sapiens
gucaugcccaacaaaccauaaauucucaucag

SEQ ID NO: 337576 - RNA, 31 nt, Homo Sapiens
ggacccggggggcuccuccccgcucugcacc

SEQ ID NO: 337577 - RNA, 32 nt, Homo Sapiens
gccagugggaggaggggcagggcagggcugua

SEQ ID NO: 337578 - RNA, 28 nt, Homo Sapiens
agcauguacggcaaaggcaagaguaaca

SEQ ID NO: 337579 - RNA, 32 nt, Homo Sapiens
acuggcacuccagggagcucugguaccuggcc

SEQ ID NO: 337580 - RNA, 32 nt, Homo Sapiens
uuggacucauugauggaguccuguaguaguuu

SEQ ID NO: 337581 - RNA, 32 nt, Homo Sapiens
aagcauggcugccuaugcuuggagucauaagu

SEQ ID NO: 337582 - RNA, 32 nt, Homo Sapiens
ccagccccugcuccuccucccagggagccaac

SEQ ID NO: 337583 - RNA, 32 nt, Homo Sapiens
gaagccuggcucccuuggucgcagcagccccu

SEQ ID NO: 337584 - RNA, 30 nt, Homo Sapiens
ggaagaggcaggcgaugagucuaguagcac

SEQ ID NO: 337585 - RNA, 32 nt, Homo Sapiens
gauaccuugugauuuccaagaacuacgugaag

SEQ ID NO: 337586 - RNA, 32 nt, Homo Sapiens
aaagauuaauuacucuaacaaacaagagaagc

SEQ ID NO: 337587 - RNA, 32 nt, Homo Sapiens
cuguguugcgugucguggguguguguagccaa

SEQ ID NO: 337588 - RNA, 32 nt, Homo Sapiens
aacacccuuguacauauaucuuuagagagaag

SEQ ID NO: 337589 - RNA, 32 nt, Homo Sapiens
uuuuguuguuugggguguguguguguguuugu

SEQ ID NO: 337590 - RNA, 32 nt, Homo Sapiens
ugcugaaauaguaauuuuaaugucuuuauauu

SEQ ID NO: 337591 - RNA, 32 nt, Homo Sapiens
cacuuuuguaaauaugagcacuaugaucaguc

SEQ ID NO: 337592 - RNA, 32 nt, Homo Sapiens
gccagguaaaacugaggccaccugguucaaca

SEQ ID NO: 337593 - RNA, 32 nt, Homo Sapiens
auuccuggaaucaaaugagauaccauauccug

SEQ ID NO: 337594 - RNA, 30 nt, Homo Sapiens
ggcaagaucugugcugugcagauccuuugg

SEQ ID NO: 337595 - RNA, 32 nt, Homo Sapiens
cagugaaggagauaaacacuucuacaacuuaa

SEQ ID NO: 337596 - RNA, 32 nt, Homo Sapiens
ccuuguugccaucccagugucuccagggagua

SEQ ID NO: 337597 - RNA, 32 nt, Homo Sapiens
gugucauuuaaaaauaguuggugaaugucaca

SEQ ID NO: 337598 - RNA, 32 nt, Homo Sapiens
gugaaguaggcgccgccggccguccgccuccc

SEQ ID NO: 337599 - RNA, 32 nt, Homo Sapiens
agccucacuguccagagcuguuggucaucaga

SEQ ID NO: 337600 - RNA, 32 nt, Homo Sapiens
ugcauuuugaaaacagaaaacaaauugcguug

SEQ ID NO: 337601 - RNA, 32 nt, Homo Sapiens
cagcuccguaaggcugcagagcaagggcagca

SEQ ID NO: 337602 - RNA, 32 nt, Homo Sapiens
agcaauuggggauccaggugucagagguaggg

SEQ ID NO: 337603 - RNA, 32 nt, Homo Sapiens
auauuuacauuuuuaauuuaguuuacagaaug

SEQ ID NO: 337604 - RNA, 30 nt, Homo Sapiens
gggaggggagguggcaggcgcguuugcagg

SEQ ID NO: 337605 - RNA, 32 nt, Homo Sapiens
auuagccaggauggucucaaucuccugaccuc

SEQ ID NO: 337606 - RNA, 32 nt, Homo Sapiens
cgcccucuguugcucccuagcauuccaggagc

SEQ ID NO: 337607 - RNA, 32 nt, Homo Sapiens
gcagggcuaggcgagagccugggguggggcgg

SEQ ID NO: 337608 - RNA, 32 nt, Homo Sapiens
ccgugggucccggcccuacccacccuagcuca

SEQ ID NO: 337609 - RNA, 32 nt, Homo Sapiens
gagagguggucgaugcuggucaugcugugaag

SEQ ID NO: 337610 - RNA, 32 nt, Homo Sapiens
gccugggaggugcgucagauccgagcucgcca

SEQ ID NO: 337611 - RNA, 32 nt, Homo Sapiens
cgaggcugugcggcagggcgcacgggaccugu

SEQ ID NO: 337612 - RNA, 32 nt, Homo Sapiens
uacaagugacugaaauaauauuugagucuuuc

SEQ ID NO: 337613 - RNA, 32 nt, Homo Sapiens
gccgcgugacgcauuuucaaaucuucaaccgc

SEQ ID NO: 337614 - RNA, 32 nt, Homo Sapiens
agaucaaagcacucuuccacuuuacgugauua

SEQ ID NO: 337615 - RNA, 32 nt, Homo Sapiens
cuugagauaauggauauuugcuaugcagcacc

SEQ ID NO: 337616 - RNA, 32 nt, Homo Sapiens
aaugcauucauuuaaacaugcuuugcuuuaug

SEQ ID NO: 337617 - RNA, 32 nt, Homo Sapiens
gaaacuaccucuggcuuaauucuuuuaagcca

SEQ ID NO: 337618 - RNA, 32 nt, Homo Sapiens
cccgcucguccuccccgggcccagaggcaccu

SEQ ID NO: 337619 - RNA, 32 nt, Homo Sapiens
aggugcccugccuggccccacccaugcucagg

SEQ ID NO: 337620 - RNA, 31 nt, Homo Sapiens
acuguguuuugagccacagaagguugugugu

SEQ ID NO: 337621 - RNA, 32 nt, Homo Sapiens
acaggaauccucggggggugaacagccauucc

SEQ ID NO: 337622 - RNA, 32 nt, Homo Sapiens
cacaggauccugagcugcacuuaccugugaga

SEQ ID NO: 337623 - RNA, 32 nt, Homo Sapiens
uuuuucuguaauuuccaaauuuuccacauuuu

SEQ ID NO: 337624 - RNA, 32 nt, Homo Sapiens
gaccuuauaacccucugcaccuucaaaaagau

SEQ ID NO: 337625 - RNA, 32 nt, Homo Sapiens
gugcugcuauaaauaugcauuuacaaguuuuu

SEQ ID NO: 337626 - RNA, 32 nt, Homo Sapiens
acgcgcacgcgaccccgcucuccgcaccguac

SEQ ID NO: 337627 - RNA, 32 nt, Homo Sapiens
acccuucgcuggcgggagcgcgguucggggcc

SEQ ID NO: 337628 - RNA, 32 nt, Homo Sapiens
uauuucuacauagucagcuacuucugaaacug

SEQ ID NO: 337629 - RNA, 32 nt, Homo Sapiens
acuguuaccaugaacaaacauugccagaauua

SEQ ID NO: 337630 - RNA, 32 nt, Homo Sapiens
caccucagcaaccucugaguguggacaauagc

SEQ ID NO: 337631 - RNA, 32 nt, Homo Sapiens
acagagacaaaaaugaggaaaacuaggggacc

SEQ ID NO: 337632 - RNA, 32 nt, Homo Sapiens
cugugagaauuugucuuccucaccagccaggu

SEQ ID NO: 337633 - RNA, 32 nt, Homo Sapiens
agggaaagacugggcggagagaaggagagccg

SEQ ID NO: 337634 - RNA, 32 nt, Homo Sapiens
guauggugaccucuauuuuucuuuauauugac

SEQ ID NO: 337635 - RNA, 32 nt, Homo Sapiens
acccuggcaauguaaauugauagcuuaucuuc

SEQ ID NO: 337636 - RNA, 32 nt, Homo Sapiens
aacccgggagguggagauugcagugagcccag

SEQ ID NO: 337637 - RNA, 32 nt, Homo Sapiens
gguggcgcgagcuucugaaacuaggcggcaga

SEQ ID NO: 337638 - RNA, 32 nt, Homo Sapiens
uauuugccaguguuagucaguguucugcuggc

SEQ ID NO: 337639 - RNA, 32 nt, Homo Sapiens
aaauauuuacuuaaauuuugguuugaauugaa

SEQ ID NO: 337640 - RNA, 32 nt, Homo Sapiens
guuguuaugcacuuugggauaguggugaucug

SEQ ID NO: 337641 - RNA, 32 nt, Homo Sapiens
gaguccuuuuuucucuaaacaacuaugcaaac

SEQ ID NO: 337642 - RNA, 32 nt, Homo Sapiens
gugcagucaaugacuuggcccuuuuucuacag

SEQ ID NO: 337643 - RNA, 32 nt, Homo Sapiens
cucagccccuccccugacagcugucccucacc

SEQ ID NO: 337644 - RNA, 32 nt, Homo Sapiens
aguugagcacuggccucuggcuuccauucugg

SEQ ID NO: 337645 - RNA, 32 nt, Homo Sapiens
uaaggagaaugaauuccaaucugugauuaaaa

SEQ ID NO: 337646 - RNA, 32 nt, Homo Sapiens
cccccuaaaaacagagugaccuggaaguagau

SEQ ID NO: 337647 - RNA, 32 nt, Homo Sapiens
ugcagagcucuuccccggagaccuccacacac

SEQ ID NO: 337648 - RNA, 31 nt, Homo Sapiens
acuuagcggaaacuucucagagaaugcucca

SEQ ID NO: 337649 - RNA, 32 nt, Homo Sapiens
gcccacagccgcuccgccucccggcccgcaga

SEQ ID NO: 337650 - RNA, 32 nt, Homo Sapiens
ugguuugaaucugaauuauauuuuauaagggu

SEQ ID NO: 337651 - RNA, 32 nt, Homo Sapiens
cuuucaaauuaaaauuauaccugaaugaaguu

SEQ ID NO: 337652 - RNA, 32 nt, Homo Sapiens
uuagcuguucuucuacaucacauuguuacucu

SEQ ID NO: 337653 - RNA, 32 nt, Homo Sapiens
ggcacagcucacgaggcuggguuugggggcca

SEQ ID NO: 337654 - RNA, 32 nt, Homo Sapiens
gguugccgcuuucuccucuccuaaccguuaag

SEQ ID NO: 337655 - RNA, 32 nt, Homo Sapiens
aaagucauggggaaacaaacauuauuuuguuu

SEQ ID NO: 337656 - RNA, 32 nt, Homo Sapiens
cugccucugugccucuccccaggaagcaucca

SEQ ID NO: 337657 - RNA, 32 nt, Homo Sapiens
gcuggucagggccaguucugcucccuggcucc

SEQ ID NO: 337658 - RNA, 32 nt, Homo Sapiens
uggugauuuuagauuucuuugauugugaaaca

SEQ ID NO: 337659 - RNA, 32 nt, Homo Sapiens
gagccgcggccgcgggucacccggcggguagc

SEQ ID NO: 337660 - RNA, 32 nt, Homo Sapiens
cugguguuuaugagccugagacuuggcagggc

SEQ ID NO: 337661 - RNA, 32 nt, Homo Sapiens
gaguggaggaggaggcggcggcugcgggacgg

SEQ ID NO: 337662 - RNA, 32 nt, Homo Sapiens
guaaaggcaagaauucuuaccagcauuaguca

SEQ ID NO: 337663 - RNA, 32 nt, Homo Sapiens
ucaguuugauuuauuuuguuacagagcaauaa

SEQ ID NO: 337664 - RNA, 32 nt, Homo Sapiens
ccaggcugugccgguccggcccgcccagcccg

SEQ ID NO: 337665 - RNA, 32 nt, Homo Sapiens
cuaaugaagaaaguucuucaccauaguguuug

SEQ ID NO: 337666 - RNA, 32 nt, Homo Sapiens
aauuuuaguuuauugugaguacucaaguugcu

SEQ ID NO: 337667 - RNA, 32 nt, Homo Sapiens
accggggacugggauagaggaagggugagcuc

SEQ ID NO: 337668 - RNA, 32 nt, Homo Sapiens
gcagucucauggggagaggcuucuuucguuuc

SEQ ID NO: 337669 - RNA, 32 nt, Homo Sapiens
uccccagcccaccgugcucaagaguagcggac

SEQ ID NO: 337670 - RNA, 32 nt, Homo Sapiens
gagaagaggagguggagaaggcuugggcucgc

SEQ ID NO: 337671 - RNA, 32 nt, Homo Sapiens
ggagcaggcagggacuccauuuuacagaauua

SEQ ID NO: 337672 - RNA, 32 nt, Homo Sapiens
ccaugcccggcaaauuuuuguaguuuuaguag

SEQ ID NO: 337673 - RNA, 32 nt, Homo Sapiens
ugauuuucaaggaaacuagguuccugccaaau

SEQ ID NO: 337674 - RNA, 32 nt, Homo Sapiens
acucggugcagggaccauggcuuggcguggcc

SEQ ID NO: 337675 - RNA, 32 nt, Homo Sapiens
ccugaccggcaugguuucuacuuccugucagc

SEQ ID NO: 337676 - RNA, 32 nt, Homo Sapiens
guugaugugggagggaacuggguguggcugua

SEQ ID NO: 337677 - RNA, 32 nt, Homo Sapiens
cuguguccagucagccacagggcccgccuccc

SEQ ID NO: 337678 - RNA, 32 nt, Homo Sapiens
cugccgccgccgccgcgcagccccacaucaac

SEQ ID NO: 337679 - RNA, 31 nt, Homo Sapiens
acccgggcgggcccccggcauugacuggcau

SEQ ID NO: 337680 - RNA, 32 nt, Homo Sapiens
uuaggaguccagccagacauuccuccccaguu

SEQ ID NO: 337681 - RNA, 32 nt, Homo Sapiens
gcagcuaaaguauuuucuccaauggccacgag

SEQ ID NO: 337682 - RNA, 32 nt, Homo Sapiens
agcuguucacaugcagaaaugcucucuucaca

SEQ ID NO: 337683 - RNA, 32 nt, Homo Sapiens
uugguuguuuugguuguuuucuuaaaaaacaa

SEQ ID NO: 337684 - RNA, 31 nt, Homo Sapiens
ucuggguuaauguuugaaugaguuaauacuu

SEQ ID NO: 337685 - RNA, 32 nt, Homo Sapiens
gauaugagaaaauaaauuccuucuaaaccaca

SEQ ID NO: 337686 - RNA, 32 nt, Homo Sapiens
gagggaguggaggagccggggaggggcuccuu

SEQ ID NO: 337687 - RNA, 32 nt, Homo Sapiens
aggcugaaaucuggcaucaucucagguucccu

SEQ ID NO: 337688 - RNA, 32 nt, Homo Sapiens
uuaguuugggggugggggcuccugcacuuugc

SEQ ID NO: 337689 - RNA, 32 nt, Homo Sapiens
cagcaggcccccuacagccucagguucugccu

SEQ ID NO: 337690 - RNA, 32 nt, Homo Sapiens
ugcugugcuuccuguaccaucuacuggaccgu

SEQ ID NO: 337691 - RNA, 32 nt, Homo Sapiens
uuaauaagcugagagucucuuguuugucuguc

SEQ ID NO: 337692 - RNA, 32 nt, Homo Sapiens
ugcgaccuccgucucccgggcucacgccauuc

SEQ ID NO: 337693 - RNA, 32 nt, Homo Sapiens
uugaaaaccaccaaaaaucaagggaacuuuua

SEQ ID NO: 337694 - RNA, 32 nt, Homo Sapiens
aggcaagugcaaaauacucuauggaaaucaua

SEQ ID NO: 337695 - RNA, 32 nt, Homo Sapiens
gcucaggcaugugacuggccuaacugcaugcc

SEQ ID NO: 337696 - RNA, 32 nt, Homo Sapiens
aaagagcuaacguucuuauuaaggcuuugugg

SEQ ID NO: 337697 - RNA, 32 nt, Homo Sapiens
uuaagaaaaauauuuaugaagcaucucaacuu

SEQ ID NO: 337698 - RNA, 32 nt, Homo Sapiens
guaggcuaggaagccagagcuggggcgaggug

SEQ ID NO: 337699 - RNA, 32 nt, Homo Sapiens
cuggugugaacagcccauccuggccaccuucc

SEQ ID NO: 337700 - RNA, 32 nt, Homo Sapiens
uucucccccucccccaucuccagucuccuagg

SEQ ID NO: 337701 - RNA, 32 nt, Homo Sapiens
uguuguguuuccauuuuugucucaagauccuu

SEQ ID NO: 337702 - RNA, 32 nt, Homo Sapiens
uccaaagaaagauaaaauguuauucuacaaaa

SEQ ID NO: 337703 - RNA, 32 nt, Homo Sapiens
cgccgccgccggguagccgggcaguggagguc

SEQ ID NO: 337704 - RNA, 32 nt, Homo Sapiens
cuuuaugaaaaaugggugcuagugguaauugc

SEQ ID NO: 337705 - RNA, 32 nt, Homo Sapiens
ggccgccucuggggagcuccgcggcgggacgg

SEQ ID NO: 337706 - RNA, 32 nt, Homo Sapiens
aaaacuucuguauggaggaaaagacaguaaac

SEQ ID NO: 337707 - RNA, 32 nt, Homo Sapiens
cuuuaaaaaaagacaggaaaaaaaggaguaag

SEQ ID NO: 337708 - RNA, 32 nt, Homo Sapiens
ccaccggccccggccgccccagcgaccucccu

SEQ ID NO: 337709 - RNA, 32 nt, Homo Sapiens
aguugcgccgccgcucgggcgccgggcuccgu

SEQ ID NO: 337710 - RNA, 29 nt, Homo Sapiens
uguggcagaaguuuauuuauuuuuaucca

SEQ ID NO: 337711 - RNA, 32 nt, Homo Sapiens
uugaccacacaccacccuuccggagcagcuca

SEQ ID NO: 337712 - RNA, 32 nt, Homo Sapiens
uagaaacgccacgugggacccuggacccugca

SEQ ID NO: 337713 - RNA, 32 nt, Homo Sapiens
guccccacccacgggggagacggagagauaua

SEQ ID NO: 337714 - RNA, 32 nt, Homo Sapiens
gcugcagagcagccuuaggacccugggaccaa

SEQ ID NO: 337715 - RNA, 32 nt, Homo Sapiens
gcauccucaagcucuggacacccacuugagcc

SEQ ID NO: 337716 - RNA, 32 nt, Homo Sapiens
guaaggaggacuuccuggagggggugacuguc

SEQ ID NO: 337717 - RNA, 32 nt, Homo Sapiens
caugccuggucacugaaucaugcaaaacuggc

SEQ ID NO: 337718 - RNA, 32 nt, Homo Sapiens
acaaauauauuuucauuucuuaaaagaucacu

SEQ ID NO: 337719 - RNA, 32 nt, Homo Sapiens
accucuggcucuuucacuuccuccccaccugc

SEQ ID NO: 337720 - RNA, 32 nt, Homo Sapiens
gaaguuuaaaucuuuguuaaaauauaguguug

SEQ ID NO: 337721 - RNA, 30 nt, Homo Sapiens
ucaggauguaaggcugcagagagcuuugau

SEQ ID NO: 337722 - RNA, 32 nt, Homo Sapiens
cggugaggaucuccuuuagaagaggagaagcc

SEQ ID NO: 337723 - RNA, 32 nt, Homo Sapiens
gggccuucacgucugcccuuugugaacggacg

SEQ ID NO: 337724 - RNA, 32 nt, Homo Sapiens
cuccgacagcauuaccucacccggccccaucu

SEQ ID NO: 337725 - RNA, 32 nt, Homo Sapiens
ccgcugcagccgggcgccggaguaauaugcuc

SEQ ID NO: 337726 - RNA, 32 nt, Homo Sapiens
uuguugcauuacuguguugugaagauaagaag

SEQ ID NO: 337727 - RNA, 32 nt, Homo Sapiens
gcuccacugcaacaucacguuuuccuuguucc

SEQ ID NO: 337728 - RNA, 32 nt, Homo Sapiens
cgcuugagucaggaguuugagagcagccugag

SEQ ID NO: 337729 - RNA, 32 nt, Homo Sapiens
ggaaucugccuugcagcucuacucugccccag

SEQ ID NO: 337730 - RNA, 32 nt, Homo Sapiens
cuuuuggauuauuggaauauuuuuuaguguuc

SEQ ID NO: 337731 - RNA, 32 nt, Homo Sapiens
ggcuccuuuuucuccaccggcuucagggcagc

SEQ ID NO: 337732 - RNA, 32 nt, Homo Sapiens
uaggcuccaaaauaaacacaucugaauucaug

SEQ ID NO: 337733 - RNA, 32 nt, Homo Sapiens
guugggguuugguggccauguuuucuacccag

SEQ ID NO: 337734 - RNA, 32 nt, Homo Sapiens
uuaauggauguuauaccaacuauucagaggaa

SEQ ID NO: 337735 - RNA, 32 nt, Homo Sapiens
cacacugaacaaaguuggagguuggggugggu

SEQ ID NO: 337736 - RNA, 32 nt, Homo Sapiens
ccugucacaacaccaacagaaguagcagccuc

SEQ ID NO: 337737 - RNA, 32 nt, Homo Sapiens
uucccagaauuggcccggggccuucaauuuac

SEQ ID NO: 337738 - RNA, 32 nt, Homo Sapiens
gcaacuugcuccugccucccagccccacuggc

SEQ ID NO: 337739 - RNA, 32 nt, Homo Sapiens
gagaggggacgccagacacacggccugagcag

SEQ ID NO: 337740 - RNA, 32 nt, Homo Sapiens
cccacccuccaccucucacgggcccugcccca

SEQ ID NO: 337741 - RNA, 32 nt, Homo Sapiens
cucuggcugcuaaagcggcugccaccugcugc

SEQ ID NO: 337742 - RNA, 32 nt, Homo Sapiens
caaguucuugacuauuauucucuuauaaguag

SEQ ID NO: 337743 - RNA, 32 nt, Homo Sapiens
guaacaucuuacgagcauuuuggugugaaagu

SEQ ID NO: 337744 - RNA, 32 nt, Homo Sapiens
ucucaaaugcugucaauauuuuacuguaauuu

SEQ ID NO: 337745 - RNA, 32 nt, Homo Sapiens
cacaggggcccuuuccaugcaguguccugugc

SEQ ID NO: 337746 - RNA, 32 nt, Homo Sapiens
aaaucagugucuaugggacacucuggcugugc

SEQ ID NO: 337747 - RNA, 32 nt, Homo Sapiens
agugucuguggaaaauguuuuguccuucaccu

SEQ ID NO: 337748 - RNA, 32 nt, Homo Sapiens
ugcucagcccuuuccucacaagagggagggcc

SEQ ID NO: 337749 - RNA, 32 nt, Homo Sapiens
gucucuggacauuuggcauggccagacucuga

SEQ ID NO: 337750 - RNA, 32 nt, Homo Sapiens
aacugugugagagaagaagagaaagcagcaga

SEQ ID NO: 337751 - RNA, 31 nt, Homo Sapiens
gcucccgagucgcccaccugacgcuagaaga

SEQ ID NO: 337752 - RNA, 32 nt, Homo Sapiens
aaggaaacauaguagcaauggauacuuuuuug

SEQ ID NO: 337753 - RNA, 32 nt, Homo Sapiens
gcucccuguugcccuccuuuucccguuuaguc

SEQ ID NO: 337754 - RNA, 32 nt, Homo Sapiens
ugcccucauuaaucugugacuccaccucuugc

SEQ ID NO: 337755 - RNA, 32 nt, Homo Sapiens
uccaugugaaauaaauauggcucucucguguc

SEQ ID NO: 337756 - RNA, 32 nt, Homo Sapiens
uucugagggucucaguacaagggcccugggau

SEQ ID NO: 337757 - RNA, 32 nt, Homo Sapiens
cuuacauguagugaaauagaauuuguauuauu

SEQ ID NO: 337758 - RNA, 32 nt, Homo Sapiens
gcacuuucccaaugccauuccuccucacuggg

SEQ ID NO: 337759 - RNA, 32 nt, Homo Sapiens
uaagaagguucuuuuuaauucuccccacccuu

SEQ ID NO: 337760 - RNA, 32 nt, Homo Sapiens
gcagccagagggccaagugaccaagaggaugg

SEQ ID NO: 337761 - RNA, 32 nt, Homo Sapiens
ugcauguuugggaacuggcauuacuggaacua

SEQ ID NO: 337762 - RNA, 31 nt, Homo Sapiens
cugccaggccacugccugucucugcuuccga

SEQ ID NO: 337763 - RNA, 32 nt, Homo Sapiens
ucaucguuuccuggcuaguucauuucauuaag

SEQ ID NO: 337764 - RNA, 32 nt, Homo Sapiens
gccacgaggugguccaagccuucagggugggc

SEQ ID NO: 337765 - RNA, 32 nt, Homo Sapiens
cugcuuaggcccucagaauauuuucaacccca

SEQ ID NO: 337766 - RNA, 32 nt, Homo Sapiens
uuugccaacgcuuguuauuuuccaguuguuug

SEQ ID NO: 337767 - RNA, 32 nt, Homo Sapiens
agacgccuuucuccuccaacccaaccucaucc

SEQ ID NO: 337768 - RNA, 32 nt, Homo Sapiens
aaguuaaaacaaaauaucuuucaauaaaacau

SEQ ID NO: 337769 - RNA, 32 nt, Homo Sapiens
cucagcuccgcggaaguugcgagacgggguuu

SEQ ID NO: 337770 - RNA, 32 nt, Homo Sapiens
uccaggauccucgggcucugguccuggcuggg

SEQ ID NO: 337771 - RNA, 32 nt, Homo Sapiens
aaguuccauuuuugccauuauuggcaaaucuu

SEQ ID NO: 337772 - RNA, 29 nt, Homo Sapiens
cgcgauggcgggggcggcgggacucacgg

SEQ ID NO: 337773 - RNA, 32 nt, Homo Sapiens
gguuagagugaguaguaagagaugcaacagug

SEQ ID NO: 337774 - RNA, 32 nt, Homo Sapiens
ccucucugucuccauggcagccuuccuaucug

SEQ ID NO: 337775 - RNA, 32 nt, Homo Sapiens
ugcagugggucucuagauguccaugcccugcc

SEQ ID NO: 337776 - RNA, 32 nt, Homo Sapiens
caccacugccagaagagcugccagaauguuuu

SEQ ID NO: 337777 - RNA, 31 nt, Homo Sapiens
ucacgguacagaggccugcccugccuggccg

SEQ ID NO: 337778 - RNA, 32 nt, Homo Sapiens
uauggguguuucuauaggaagaaacagguuuu

SEQ ID NO: 337779 - RNA, 32 nt, Homo Sapiens
ucgcuccgggcucagggcugcgcggcucuucc

SEQ ID NO: 337780 - RNA, 32 nt, Homo Sapiens
ccuucauucaacaucaaagaauucauacugga

SEQ ID NO: 337781 - RNA, 32 nt, Homo Sapiens
ccaccaauaauacuuaucagcaucauaaagua

SEQ ID NO: 337782 - RNA, 32 nt, Homo Sapiens
ggagaacuaaucuucuaucaguugcccuuucu

SEQ ID NO: 337783 - RNA, 32 nt, Homo Sapiens
uuccguugcugucgcacacacacacacacaca

SEQ ID NO: 337784 - RNA, 32 nt, Homo Sapiens
ggugggcuggccuggguguggagugaaagagu

SEQ ID NO: 337785 - RNA, 32 nt, Homo Sapiens
uugacuauacccauguuuugcaugcaaugacu

SEQ ID NO: 337786 - RNA, 32 nt, Homo Sapiens
cuccccauccuacuccaaggaugccggcauca

SEQ ID NO: 337787 - RNA, 32 nt, Homo Sapiens
ggucucaaacuccuggguucaagcaauccucc

SEQ ID NO: 337788 - RNA, 32 nt, Homo Sapiens
aggaaaggggaguaaaacuuggauugggagau

SEQ ID NO: 337789 - RNA, 32 nt, Homo Sapiens
gggggcaagaaagagggagggaaaucuuucaa

SEQ ID NO: 337790 - RNA, 32 nt, Homo Sapiens
aaaacuggcuuagguauucauggaccuugauu

SEQ ID NO: 337791 - RNA, 32 nt, Homo Sapiens
cggcacccugagaggagaagcgcagcgcagug

SEQ ID NO: 337792 - RNA, 32 nt, Homo Sapiens
gcccuguugcugucggagucacaggauggcgg

SEQ ID NO: 337793 - RNA, 32 nt, Homo Sapiens
aauuuaugacaccaaaaucaauggagaguaag

SEQ ID NO: 337794 - RNA, 32 nt, Homo Sapiens
acccugcccucccuguuccacgucuguggggg

SEQ ID NO: 337795 - RNA, 32 nt, Homo Sapiens
guggauuucccgggccccucagcccucuggag

SEQ ID NO: 337796 - RNA, 32 nt, Homo Sapiens
uucgacuugacuuuuuaacuuaacucaugaau

SEQ ID NO: 337797 - RNA, 32 nt, Homo Sapiens
caguuuugagaaucugaugaccuccgagggga

SEQ ID NO: 337798 - RNA, 32 nt, Homo Sapiens
ugaggaggcggcggucccggccucgcgucccg

SEQ ID NO: 337799 - RNA, 32 nt, Homo Sapiens
gucuacugcuuggauccauacaaaacuaucgg

SEQ ID NO: 337800 - RNA, 32 nt, Homo Sapiens
cuccuacccccuccccauccaggggcugugua

SEQ ID NO: 337801 - RNA, 32 nt, Homo Sapiens
aauacuugaaauauauuuugcauuaaaugcau

SEQ ID NO: 337802 - RNA, 32 nt, Homo Sapiens
ccggugcgcgcccaucccugcccgcagccccg

SEQ ID NO: 337803 - RNA, 32 nt, Homo Sapiens
gacuuuccucucagccaggaaggauuuugaua

SEQ ID NO: 337804 - RNA, 32 nt, Homo Sapiens
uucagucaaugagagaagaguuugaauaugaa

SEQ ID NO: 337805 - RNA, 32 nt, Homo Sapiens
ccuaauucaguacuuuaaucuuccguugagcu

SEQ ID NO: 337806 - RNA, 32 nt, Homo Sapiens
ucuauuuuauaaguuguaugcauaaacauaag

SEQ ID NO: 337807 - RNA, 32 nt, Homo Sapiens
aucaccugucuccucagcugcucaccaccacc

SEQ ID NO: 337808 - RNA, 32 nt, Homo Sapiens
ucucucuuaggacugcugacuugguuaugcag

SEQ ID NO: 337809 - RNA, 32 nt, Homo Sapiens
cucucagcucuuuucuaaucuuguaacuuagu

SEQ ID NO: 337810 - RNA, 32 nt, Homo Sapiens
ugauuuccaagcccagagugcugggcagccuu

SEQ ID NO: 337811 - RNA, 32 nt, Homo Sapiens
uaggcagugcuaguaauuuccucguaaugauu

SEQ ID NO: 337812 - RNA, 32 nt, Homo Sapiens
gaggaauggcagcggcagcagcauccccgcca

SEQ ID NO: 337813 - RNA, 32 nt, Homo Sapiens
aggacuucaggaacuuccuguaaaaagccccc

SEQ ID NO: 337814 - RNA, 32 nt, Homo Sapiens
uuugguggcagcucuugguccuauugcugugg

SEQ ID NO: 337815 - RNA, 32 nt, Homo Sapiens
uuuggcuuuuauuuuucuuuuuguauuauuuu

SEQ ID NO: 337816 - RNA, 32 nt, Homo Sapiens
gucauuuugagcucagccuaaucaaagacuga

SEQ ID NO: 337817 - RNA, 32 nt, Homo Sapiens
uaaaaaguuaaagauuugaaagagaaucucau

SEQ ID NO: 337818 - RNA, 32 nt, Homo Sapiens
cucuguaacuuaacagaugacaauuaggcuuu

SEQ ID NO: 337819 - RNA, 32 nt, Homo Sapiens
gaagcaacaaccucuccucuucgucuccgcca

SEQ ID NO: 337820 - RNA, 32 nt, Homo Sapiens
accaaaugcaagaagaauaaacauggauuuuc

SEQ ID NO: 337821 - RNA, 32 nt, Homo Sapiens
aaaggaugggucugguuugcagagcuugaaca

SEQ ID NO: 337822 - RNA, 32 nt, Homo Sapiens
gcaggccccgcgcgccaggcaggcuucgcggc

SEQ ID NO: 337823 - RNA, 32 nt, Homo Sapiens
uaugagaugucugcgaucacaucacgguaaag

SEQ ID NO: 337824 - RNA, 32 nt, Homo Sapiens
gugguguguauggugucugaaauugaauaugc

SEQ ID NO: 337825 - RNA, 32 nt, Homo Sapiens
aggaggcagggcggggagggcagaggggucag

SEQ ID NO: 337826 - RNA, 32 nt, Homo Sapiens
caaagccuggggaacgguuagggagcucugcc

SEQ ID NO: 337827 - RNA, 32 nt, Homo Sapiens
ccaauaauuuaaaauuaugugaaauguuuuaa

SEQ ID NO: 337828 - RNA, 32 nt, Homo Sapiens
uuggccucugguggagagagggaccucuucag

SEQ ID NO: 337829 - RNA, 32 nt, Homo Sapiens
aggcacccaugccccaggugaaguccagcuga

SEQ ID NO: 337830 - RNA, 32 nt, Homo Sapiens
ggcuuagcgcacuggaggagcggcgggcuuca

SEQ ID NO: 337831 - RNA, 31 nt, Homo Sapiens
uuggcuuugugcuuggggcuauuugugugua

SEQ ID NO: 337832 - RNA, 32 nt, Homo Sapiens
ggaccgugccuucuccaccuuccccuccuuug

SEQ ID NO: 337833 - RNA, 32 nt, Homo Sapiens
acacuguuugccuggauauccccagcagaggc

SEQ ID NO: 337834 - RNA, 32 nt, Homo Sapiens
gucccaggggagaaggagaggcgucugcaggg

SEQ ID NO: 337835 - RNA, 32 nt, Homo Sapiens
uauacuaucuugguucaauaauaaaaagagaa

SEQ ID NO: 337836 - RNA, 32 nt, Homo Sapiens
auauauuuuuuacaagccccagcuccucuucu

SEQ ID NO: 337837 - RNA, 32 nt, Homo Sapiens
caaucuuacugggauuacagaacaaagagccu

SEQ ID NO: 337838 - RNA, 32 nt, Homo Sapiens
caauuuugauaaaaauuuagaacagcauuguc

SEQ ID NO: 337839 - RNA, 32 nt, Homo Sapiens
gcugaccugacaaguacuaugugugugcaugu

SEQ ID NO: 337840 - RNA, 32 nt, Homo Sapiens
uuuccuuucuuuucuuuuuuuuuuagauggag

SEQ ID NO: 337841 - RNA, 32 nt, Homo Sapiens
ccuugguguacuuaauuucgagauugggcgug

SEQ ID NO: 337842 - RNA, 32 nt, Homo Sapiens
caaaaugaaaugugaauuguaaaacuuggccu

SEQ ID NO: 337843 - RNA, 32 nt, Homo Sapiens
aggcaugacuuccuggcaccacagggaaaauc

SEQ ID NO: 337844 - RNA, 32 nt, Homo Sapiens
aauguugcuuggaguggaccgaggcucugcag

SEQ ID NO: 337845 - RNA, 32 nt, Homo Sapiens
aauaauauuaaccccugaccaaaacuaccugu

SEQ ID NO: 337846 - RNA, 32 nt, Homo Sapiens
ccuuucgccucccaccaugauucugagaccuc

SEQ ID NO: 337847 - RNA, 30 nt, Homo Sapiens
aauagagaaauccuagaugagucauuaagg

SEQ ID NO: 337848 - RNA, 32 nt, Homo Sapiens
gccucacaaagauggaaacauuccaaaaacgu

SEQ ID NO: 337849 - RNA, 32 nt, Homo Sapiens
uagcccaacuccucccucuccuugcuccuccu

SEQ ID NO: 337850 - RNA, 32 nt, Homo Sapiens
aaaaugaggcucaagaggcugcuucguagaau

SEQ ID NO: 337851 - RNA, 32 nt, Homo Sapiens
gcccacauaauuuuuguauuuuuauuagagau

SEQ ID NO: 337852 - RNA, 32 nt, Homo Sapiens
acaguuuacccauaaaacaucacagucuuauc

SEQ ID NO: 337853 - RNA, 32 nt, Homo Sapiens
aagcuauauuuguaugcaacacuaaccuuuug

SEQ ID NO: 337854 - RNA, 32 nt, Homo Sapiens
auuaguagcaugaguauaaacaguacaccuga

SEQ ID NO: 337855 - RNA, 32 nt, Homo Sapiens
agcacgaaguuuggaggcaaccugugaaaagc

SEQ ID NO: 337856 - RNA, 30 nt, Homo Sapiens
cgagucuucugugcucagguccucacgcug

SEQ ID NO: 337857 - RNA, 32 nt, Homo Sapiens
gagaggugcaggggugacuuuguuggcagcag

SEQ ID NO: 337858 - RNA, 32 nt, Homo Sapiens
auguagacugguuuuuguuguugcuauguaca

SEQ ID NO: 337859 - RNA, 32 nt, Homo Sapiens
ugcuuaauauuuuggauacuauuuguuuuucu

SEQ ID NO: 337860 - RNA, 32 nt, Homo Sapiens
ggagacauuuuucuaacacuugaaaauucuau

SEQ ID NO: 337861 - RNA, 32 nt, Homo Sapiens
ggccagggugagaggagagaugaugaguugcu

SEQ ID NO: 337862 - RNA, 32 nt, Homo Sapiens
aaaggcucaaagacauucuguuauacugcaug

SEQ ID NO: 337863 - RNA, 32 nt, Homo Sapiens
uagugauccaagagaggaccaauacagaggcc

SEQ ID NO: 337864 - RNA, 32 nt, Homo Sapiens
cccagacacaggugugccucaauauaaaagca

SEQ ID NO: 337865 - RNA, 32 nt, Homo Sapiens
gagcccgggagccaggcguggagcgcgagagc

SEQ ID NO: 337866 - RNA, 32 nt, Homo Sapiens
ucagugccuuuggauucaucucuuccgggaga

SEQ ID NO: 337867 - RNA, 32 nt, Homo Sapiens
cgggacgcgacgggacgcgcugggaccggcgu

SEQ ID NO: 337868 - RNA, 32 nt, Homo Sapiens
cuccauccgggagcuuccagacucccagaagc

SEQ ID NO: 337869 - RNA, 32 nt, Homo Sapiens
aaaugcgccaagaugggcacaugcuugcuuca

SEQ ID NO: 337870 - RNA, 32 nt, Homo Sapiens
guuuagagaaggaaaaggaaauggguucaugu

SEQ ID NO: 337871 - RNA, 32 nt, Homo Sapiens
ccucgcucaccgucacgcugccgcccgagcug

SEQ ID NO: 337872 - RNA, 32 nt, Homo Sapiens
guugggucuguuuacagccuggucuacugagu

SEQ ID NO: 337873 - RNA, 32 nt, Homo Sapiens
caugaagcugacgugcagcaugugcucgcugc

SEQ ID NO: 337874 - RNA, 32 nt, Homo Sapiens
aaauaauaaaauuuaucuaauuuaaaguugau

SEQ ID NO: 337875 - RNA, 30 nt, Homo Sapiens
ugcaaggucugcgguccagaagcuugcggu

SEQ ID NO: 337876 - RNA, 32 nt, Homo Sapiens
caauacaaacuaguuggaacaguuggaacuua

SEQ ID NO: 337877 - RNA, 32 nt, Homo Sapiens
cucccacugcuaaaguuuuuugugagauguug

SEQ ID NO: 337878 - RNA, 32 nt, Homo Sapiens
cgccgcugaugacaugcaggaccgccucucac

SEQ ID NO: 337879 - RNA, 32 nt, Homo Sapiens
ggauuagugcuuuauaaggagagacaccagag

SEQ ID NO: 337880 - RNA, 32 nt, Homo Sapiens
uuuaaguuuagcauuguuaacauuuaaaugac

SEQ ID NO: 337881 - RNA, 30 nt, Homo Sapiens
uaacacugcaaauaaacuugguagcaaaca

SEQ ID NO: 337882 - RNA, 28 nt, Homo Sapiens
ccaaggauaacuggacauuugaggaaag

SEQ ID NO: 337883 - RNA, 32 nt, Homo Sapiens
uguaucugugguuuuuuuuuuuuuuuuuuuug

SEQ ID NO: 337884 - RNA, 32 nt, Homo Sapiens
uugcgccgcgggagcggacggcggcggaggag

SEQ ID NO: 337885 - RNA, 32 nt, Homo Sapiens
cacacacaccccaacacacacacacacacccc

SEQ ID NO: 337886 - RNA, 32 nt, Homo Sapiens
ugugugugugcuucuuuuucucuccuaaaaau

SEQ ID NO: 337887 - RNA, 32 nt, Homo Sapiens
aaaacacacacacacacacacacacacacaaa

SEQ ID NO: 337888 - RNA, 32 nt, Homo Sapiens
uuuagccauuuucuuccauugugagaccacug

SEQ ID NO: 337889 - RNA, 32 nt, Homo Sapiens
cucacaguuugaauagaagaauccaaagcuac

SEQ ID NO: 337890 - RNA, 32 nt, Homo Sapiens
uuccucauuaccauccugaagucacuacccca

SEQ ID NO: 337891 - RNA, 32 nt, Homo Sapiens
cccuccccuccccaccucccccacugcgcguu

SEQ ID NO: 337892 - RNA, 32 nt, Homo Sapiens
uucaauuugauguggugaaaagcagguugaua

SEQ ID NO: 337893 - RNA, 28 nt, Homo Sapiens
guaaugaaggcugaaaggaugacuuucg

SEQ ID NO: 337894 - RNA, 32 nt, Homo Sapiens
gagcacggaguauuucugucccucgugaaguc

SEQ ID NO: 337895 - RNA, 32 nt, Homo Sapiens
guccucuguuccuagaggccaagccacugugg

SEQ ID NO: 337896 - RNA, 32 nt, Homo Sapiens
uuucauacaucauuuguugaaaugcccuuuaa

SEQ ID NO: 337897 - RNA, 32 nt, Homo Sapiens
ugaauauuggccaaggaaaggcacaugucacc

SEQ ID NO: 337898 - RNA, 32 nt, Homo Sapiens
gccggaaguucucggcgguggaggagccccgc

SEQ ID NO: 337899 - RNA, 32 nt, Homo Sapiens
uugguuacaauuaguucucaucucccugucgu

SEQ ID NO: 337900 - RNA, 32 nt, Homo Sapiens
agcugauuugaaaaggaauguuugaauuuaua

SEQ ID NO: 337901 - RNA, 32 nt, Homo Sapiens
ccgguuuuuauauccuucuccaucaugcaucg

SEQ ID NO: 337902 - RNA, 32 nt, Homo Sapiens
ugguugggggagcaugggagggggcacuucac

SEQ ID NO: 337903 - RNA, 32 nt, Homo Sapiens
ugaaaaucuauuacucauggaagacuuuuaaa

SEQ ID NO: 337904 - RNA, 32 nt, Homo Sapiens
ccucaguugcagugaauugugagcaaaagauc

SEQ ID NO: 337905 - RNA, 28 nt, Homo Sapiens
aacauggcagcgggguucgggcgaugcu

SEQ ID NO: 337906 - RNA, 32 nt, Homo Sapiens
ggccuccccugcuaucccuccucccauccugu

SEQ ID NO: 337907 - RNA, 32 nt, Homo Sapiens
gaaagagaaaaugaauaaaaaugaugacauca

SEQ ID NO: 337908 - RNA, 32 nt, Homo Sapiens
ucccacuugacacagcacccgacucccaguuu

SEQ ID NO: 337909 - RNA, 32 nt, Homo Sapiens
ugaaaugccccuccccucccccagguaaaggc

SEQ ID NO: 337910 - RNA, 32 nt, Homo Sapiens
cuccagcuccugcuccuccuccgcuccccaua

SEQ ID NO: 337911 - RNA, 32 nt, Homo Sapiens
ugcugggaggggcuggugaggcugcagcagag

SEQ ID NO: 337912 - RNA, 32 nt, Homo Sapiens
cugccaugucugcacgcgggcggagagcagac

SEQ ID NO: 337913 - RNA, 32 nt, Homo Sapiens
cgcacccggagcgggggacgcggccgcuuuaa

SEQ ID NO: 337914 - RNA, 32 nt, Homo Sapiens
gagaaaagcacauuaaaaagauaccaacauuc

SEQ ID NO: 337915 - RNA, 32 nt, Homo Sapiens
aaccaugcaguauucagggucugggaauaugg

SEQ ID NO: 337916 - RNA, 32 nt, Homo Sapiens
cgcagggaccucugcccuugaaagcaggguau

SEQ ID NO: 337917 - RNA, 32 nt, Homo Sapiens
uucaugauauuuaacauagauacauugcuguu

SEQ ID NO: 337918 - RNA, 32 nt, Homo Sapiens
guauuuauuuucuucugggucuaggccauggu

SEQ ID NO: 337919 - RNA, 32 nt, Homo Sapiens
ugguuuuugagccaugcguggguggggaggga

SEQ ID NO: 337920 - RNA, 32 nt, Homo Sapiens
uuucuacaauccugguggaaaagccacagaac

SEQ ID NO: 337921 - RNA, 32 nt, Homo Sapiens
ugauggggagcuuuggggggagugcauuagga

SEQ ID NO: 337922 - RNA, 32 nt, Homo Sapiens
uuuucucauuaagcgcuccccauccaagucug

SEQ ID NO: 337923 - RNA, 32 nt, Homo Sapiens
ggagccuccugccugcacccuccaccucuucu

SEQ ID NO: 337924 - RNA, 32 nt, Homo Sapiens
ugccuccuuugcuuggcccuuuauugagauaa

SEQ ID NO: 337925 - RNA, 28 nt, Homo Sapiens
cucguuccagcaggaccaagggagccag

SEQ ID NO: 337926 - RNA, 32 nt, Homo Sapiens
ccuuuuucuuaguuuuucaguauuucuaagcu

SEQ ID NO: 337927 - RNA, 32 nt, Homo Sapiens
ugccucgcgccuugcgcccccggcaccgcuuc

SEQ ID NO: 337928 - RNA, 32 nt, Homo Sapiens
aauuauuugccuacuguaaauuuucuaaggau

SEQ ID NO: 337929 - RNA, 32 nt, Homo Sapiens
ccaacuccuccucgcacgcccgagggccggcc

SEQ ID NO: 337930 - RNA, 32 nt, Homo Sapiens
agcugggaagcagugcagagaggagagcggag

SEQ ID NO: 337931 - RNA, 32 nt, Homo Sapiens
ccgagggcgaggagauggaggcggcggcgugg

SEQ ID NO: 337932 - RNA, 32 nt, Homo Sapiens
cacccgagaaagagacccaggccccuggcgag

SEQ ID NO: 337933 - RNA, 32 nt, Homo Sapiens
auauuuuguuuugaaaaugaugucuaacaacc

SEQ ID NO: 337934 - RNA, 32 nt, Homo Sapiens
cccucgggcuguaggccugguccgccauucag

SEQ ID NO: 337935 - RNA, 32 nt, Homo Sapiens
acuuaggagagucuagucacugagagacagag

SEQ ID NO: 337936 - RNA, 32 nt, Homo Sapiens
cuuggaggagcgagaagacauguauuuucagc

SEQ ID NO: 337937 - RNA, 32 nt, Homo Sapiens
gaucaugaaaccugagaaaugcuaauggagau

SEQ ID NO: 337938 - RNA, 32 nt, Homo Sapiens
cuguuagaaagaaacuaacaaaagagaaccca

SEQ ID NO: 337939 - RNA, 32 nt, Homo Sapiens
cuuccauuaagguaaacagggcaaaauaagac

SEQ ID NO: 337940 - RNA, 32 nt, Homo Sapiens
ggcuggagugcaguggugugaucauagcucac

SEQ ID NO: 337941 - RNA, 32 nt, Homo Sapiens
gugaaguggggaugucaaaauaccaaaaauua

SEQ ID NO: 337942 - RNA, 32 nt, Homo Sapiens
ucugggaugauuauggggccuccuuagccaug

SEQ ID NO: 337943 - RNA, 32 nt, Homo Sapiens
auagaaggaagaggagcgaacauggcagcgcg

SEQ ID NO: 337944 - RNA, 32 nt, Homo Sapiens
guuuaaaggugcaugaacauuuaggcucacua

SEQ ID NO: 337945 - RNA, 32 nt, Homo Sapiens
uaaggcuguauauauuuguuuauuuaagguga

SEQ ID NO: 337946 - RNA, 32 nt, Homo Sapiens
cgcccaccacuucacgacaccggagcgaaccg

SEQ ID NO: 337947 - RNA, 32 nt, Homo Sapiens
gagcgcuggaauggaauaaaaugauggcagaa

SEQ ID NO: 337948 - RNA, 32 nt, Homo Sapiens
accaauuuucccuuuuuauuuuucagcaucaa

SEQ ID NO: 337949 - RNA, 32 nt, Homo Sapiens
gaggcgauaaagacagauguuuccguauuacc

SEQ ID NO: 337950 - RNA, 32 nt, Homo Sapiens
aaacuuuuucuuuucuuucaauaauggcuagg

SEQ ID NO: 337951 - RNA, 32 nt, Homo Sapiens
gcaucuguagcuaagaaagaaauacacugacc

SEQ ID NO: 337952 - RNA, 29 nt, Homo Sapiens
cuaaagguaauaaaaaucauugucuuaag

SEQ ID NO: 337953 - RNA, 32 nt, Homo Sapiens
cagacuguccugccauggaaccuucccucccg

SEQ ID NO: 337954 - RNA, 30 nt, Homo Sapiens
cccccgccgcagcagcaccggcgacagauu

SEQ ID NO: 337955 - RNA, 32 nt, Homo Sapiens
cggugcagccuggcaccccauaaacucugucc

SEQ ID NO: 337956 - RNA, 32 nt, Homo Sapiens
cugggccaacgcgccguaauuagacgccgcuc

SEQ ID NO: 337957 - RNA, 32 nt, Homo Sapiens
cgagcuguggagcugggagggccauucagagc

SEQ ID NO: 337958 - RNA, 32 nt, Homo Sapiens
acgaggucaggagaucgagaccauggugaaac

SEQ ID NO: 337959 - RNA, 32 nt, Homo Sapiens
gaaggcaaagauuggucucuuguguucacugc

SEQ ID NO: 337960 - RNA, 32 nt, Homo Sapiens
uugaaaaagaaauuauuuugaaaaaaaaaaaa

SEQ ID NO: 337961 - RNA, 32 nt, Homo Sapiens
cucucugaaccucagcuucucauccacaaaau

SEQ ID NO: 337962 - RNA, 32 nt, Homo Sapiens
gagcuggcggagagcgggaggcggcugcgacu

SEQ ID NO: 337963 - RNA, 32 nt, Homo Sapiens
acuguuucucuucugcagaaaaagaggcucuu

SEQ ID NO: 337964 - RNA, 32 nt, Homo Sapiens
uauauuggaagacauggaucuugcugccaacg

SEQ ID NO: 337965 - RNA, 32 nt, Homo Sapiens
ggagacugcggguugcagacaccagcagcccc

SEQ ID NO: 337966 - RNA, 32 nt, Homo Sapiens
guuaaaugaaacaaaguuuauaggugaccuuu

SEQ ID NO: 337967 - RNA, 32 nt, Homo Sapiens
aaggcagccucggucucugggcggcggcggcg

SEQ ID NO: 337968 - RNA, 32 nt, Homo Sapiens
caaugagcugaauauaugguuuuacaaaguag

SEQ ID NO: 337969 - RNA, 31 nt, Homo Sapiens
ugcucagcgggcccuguacagggaugugaug

SEQ ID NO: 337970 - RNA, 32 nt, Homo Sapiens
ucuucugauccuugcaccuucuuuuggggaaa

SEQ ID NO: 337971 - RNA, 32 nt, Homo Sapiens
cugaaggacaccuugacuuccagcuuuuacga

SEQ ID NO: 337972 - RNA, 32 nt, Homo Sapiens
gccccccgccccacccuccacucccuuccuug

SEQ ID NO: 337973 - RNA, 27 nt, Homo Sapiens
aacuucuuuuucuucagcucacaguaa

SEQ ID NO: 337974 - RNA, 32 nt, Homo Sapiens
acuucacuuccacuucagaccaacuucauacu

SEQ ID NO: 337975 - RNA, 32 nt, Homo Sapiens
accucucaggcaaucagcacaaaaauuauuua

SEQ ID NO: 337976 - RNA, 32 nt, Homo Sapiens
cuguaaaucaauguaauuucuuucuccagccc

SEQ ID NO: 337977 - RNA, 32 nt, Homo Sapiens
uuaccaaaacaaaggaggauuacguauauguu

SEQ ID NO: 337978 - RNA, 32 nt, Homo Sapiens
ucucaggcauuguggccagcucugccucucua

SEQ ID NO: 337979 - RNA, 30 nt, Homo Sapiens
cuuaguucuucuccugccuaauuuugaacu

SEQ ID NO: 337980 - RNA, 32 nt, Homo Sapiens
acacauuccacagcugugacugagaaaccguc

SEQ ID NO: 337981 - RNA, 32 nt, Homo Sapiens
gggagaaagcaaaaacauuuuguuggagcaac

SEQ ID NO: 337982 - RNA, 32 nt, Homo Sapiens
gcuccucuucucacagggcuggcacucccaga

SEQ ID NO: 337983 - RNA, 32 nt, Homo Sapiens
auacuaacuauauguauuuuaacuuaguuuua

SEQ ID NO: 337984 - RNA, 32 nt, Homo Sapiens
gccgggcaggguggagaccggcacccagacag

SEQ ID NO: 337985 - RNA, 32 nt, Homo Sapiens
cgccuguaaucccagcacuuuguggggcugag

SEQ ID NO: 337986 - RNA, 32 nt, Homo Sapiens
ugcccccggggagaggggcagcuugggcugga

SEQ ID NO: 337987 - RNA, 32 nt, Homo Sapiens
ugaagaguaaugggcaaacuguagccacauaa

SEQ ID NO: 337988 - RNA, 32 nt, Homo Sapiens
guuaccggcagcugaacccacccggcgccacg

SEQ ID NO: 337989 - RNA, 32 nt, Homo Sapiens
gccagcaagcuguggagcugccuccucuccag

SEQ ID NO: 337990 - RNA, 32 nt, Homo Sapiens
aacaugucauuauaaauuguuuuauauggugc

SEQ ID NO: 337991 - RNA, 32 nt, Homo Sapiens
gcgcaggcaucggcccggccacuccaagccuu

SEQ ID NO: 337992 - RNA, 32 nt, Homo Sapiens
gcaacaccaaccccaguuuuguccgcugcauu

SEQ ID NO: 337993 - RNA, 32 nt, Homo Sapiens
cuaauuaauaaauuauuuauuauuaagaauag

SEQ ID NO: 337994 - RNA, 32 nt, Homo Sapiens
gaguuucaguccucgggaucagcccucuccgc

SEQ ID NO: 337995 - RNA, 29 nt, Homo Sapiens
agcgaugugacuuuuuucagaauauuucu

SEQ ID NO: 337996 - RNA, 32 nt, Homo Sapiens
cccugagaucuucaggacuuuggcgaaaaguc

SEQ ID NO: 337997 - RNA, 32 nt, Homo Sapiens
caaugaaaacauuuggggcaauuagaccuaca

SEQ ID NO: 337998 - RNA, 32 nt, Homo Sapiens
uaauauuuuuugcugggaccaucuaccugccu

SEQ ID NO: 337999 - RNA, 32 nt, Homo Sapiens
gagcaacgcucaagguggccgagaugcaggga

SEQ ID NO: 338000 - RNA, 32 nt, Homo Sapiens
gagaaggcugguuuuucuacuccugguaugcu

SEQ ID NO: 338001 - RNA, 32 nt, Homo Sapiens
gcgcccagcaucacugugccccgguggagggg

SEQ ID NO: 338002 - RNA, 32 nt, Homo Sapiens
aaaaauuguauauauauuuauuguguacaaug

SEQ ID NO: 338003 - RNA, 32 nt, Homo Sapiens
uguuuugcuucuuuauauuuaugucuagcuuu

SEQ ID NO: 338004 - RNA, 32 nt, Homo Sapiens
caggcaacaaaauaauuucuaaaauggauaua

SEQ ID NO: 338005 - RNA, 32 nt, Homo Sapiens
ugauguucuaacuguaguuuuauagaaaguau

SEQ ID NO: 338006 - RNA, 32 nt, Homo Sapiens
gcuguaagguuuuucuuccagugggguuugca

SEQ ID NO: 338007 - RNA, 32 nt, Homo Sapiens
gggagguggcguccuccucccuggugauaccu

SEQ ID NO: 338008 - RNA, 32 nt, Homo Sapiens
ugacacuuuucauuugcuccugugauacuaac

SEQ ID NO: 338009 - RNA, 32 nt, Homo Sapiens
cuuugggcaagucacccgcacucccugggccu

SEQ ID NO: 338010 - RNA, 32 nt, Homo Sapiens
uccacugccaugaccaggccgaaggcagggaa

SEQ ID NO: 338011 - RNA, 32 nt, Homo Sapiens
gcgagggugccuggacucccucauggcugccu

SEQ ID NO: 338012 - RNA, 32 nt, Homo Sapiens
auacucaggaccaucucaggcauccaggcaug

SEQ ID NO: 338013 - RNA, 32 nt, Homo Sapiens
guccccaaaguccauuauauuauucuucuuca

SEQ ID NO: 338014 - RNA, 32 nt, Homo Sapiens
cacaacuaaacacuaagugcccuuucuuauuu

SEQ ID NO: 338015 - RNA, 32 nt, Homo Sapiens
ggcaaggauacaaaaugaccagugaucacuac

SEQ ID NO: 338016 - RNA, 32 nt, Homo Sapiens
gcggaggcaccaagcccuguuuucuuggugua

SEQ ID NO: 338017 - RNA, 32 nt, Homo Sapiens
auuauuucaaaauaaauuuuuaaaaggacugg

SEQ ID NO: 338018 - RNA, 32 nt, Homo Sapiens
aggccagaauaaagaauagaguguagagguca

SEQ ID NO: 338019 - RNA, 32 nt, Homo Sapiens
ucgucugcugaauaaccgucacucaggcagca

SEQ ID NO: 338020 - RNA, 32 nt, Homo Sapiens
ucauugggccccaacgggcaugucuccaccga

SEQ ID NO: 338021 - RNA, 32 nt, Homo Sapiens
ggagggaaaagucccacggaggaggcagaaug

SEQ ID NO: 338022 - RNA, 32 nt, Homo Sapiens
acuacugagaauaucuaacauguuguuacuaa

SEQ ID NO: 338023 - RNA, 32 nt, Homo Sapiens
uuggcggggggacaagacaaagcucccgaugc

SEQ ID NO: 338024 - RNA, 32 nt, Homo Sapiens
cccagggagaagggacaaggcuuuuaaaagac

SEQ ID NO: 338025 - RNA, 32 nt, Homo Sapiens
ccggccugacuucuccacgggguccacaggag

SEQ ID NO: 338026 - RNA, 32 nt, Homo Sapiens
aaaggcuauuccagggggcucgggccagggcu

SEQ ID NO: 338027 - RNA, 32 nt, Homo Sapiens
cucacacuucggguuccucggggaggaggggc

SEQ ID NO: 338028 - RNA, 32 nt, Homo Sapiens
uugccuuccuuccucccacuucuuucuccagg

SEQ ID NO: 338029 - RNA, 32 nt, Homo Sapiens
cuccggagagacgggggagcgcggcggcgccg

SEQ ID NO: 338030 - RNA, 32 nt, Homo Sapiens
uugcccauucccuccacccccaagccccuggc

SEQ ID NO: 338031 - RNA, 32 nt, Homo Sapiens
gauacaugguuuuuauuuguuuuguuuuugcu

SEQ ID NO: 338032 - RNA, 32 nt, Homo Sapiens
guagaaagggaagacaugagacuccauuuuga

SEQ ID NO: 338033 - RNA, 32 nt, Homo Sapiens
aaaagcuucuaagggagggagcuuaaaggcug

SEQ ID NO: 338034 - RNA, 32 nt, Homo Sapiens
agaccacaguuuccucugggguguuuauggag

SEQ ID NO: 338035 - RNA, 32 nt, Homo Sapiens
agucugaggcaaguggaaaugaggaacggaaa

SEQ ID NO: 338036 - RNA, 32 nt, Homo Sapiens
uugcugccucccugugccuucuccaggcccag

SEQ ID NO: 338037 - RNA, 32 nt, Homo Sapiens
ugcccgcggcgcccgcgcgaccaugcaauggc

SEQ ID NO: 338038 - RNA, 32 nt, Homo Sapiens
uuuuuaaaaaaauuaaaucuaguucaccuugc

SEQ ID NO: 338039 - RNA, 32 nt, Homo Sapiens
gaugaccaggauaaaacugagaaggauuuaca

SEQ ID NO: 338040 - RNA, 32 nt, Homo Sapiens
cugcagaccugucuacauccacaggagaaguc

SEQ ID NO: 338041 - RNA, 32 nt, Homo Sapiens
ugucagcuauacauuuaucuuuaugaacucau

SEQ ID NO: 338042 - RNA, 32 nt, Homo Sapiens
ccaccccgccccaccccuccagaacacggcuc

SEQ ID NO: 338043 - RNA, 32 nt, Homo Sapiens
ggcugggcacgguggcucacgccuguaauccc

SEQ ID NO: 338044 - RNA, 32 nt, Homo Sapiens
agccgggcgcgguggcucaugccuguaauccc

SEQ ID NO: 338045 - RNA, 32 nt, Homo Sapiens
auccuauuuauggacauguaggucuaguugca

SEQ ID NO: 338046 - RNA, 32 nt, Homo Sapiens
uucuauuaaacaccccacuuccuuugaaaaaa

SEQ ID NO: 338047 - RNA, 31 nt, Homo Sapiens
gcaguguauuuuuucaaggugcuguuaaaag

SEQ ID NO: 338048 - RNA, 30 nt, Homo Sapiens
augggcuuccuaauggguuaaauccuuuaa

SEQ ID NO: 338049 - RNA, 32 nt, Homo Sapiens
aagucaacuauuauuagauauuaacuuauuuu

SEQ ID NO: 338050 - RNA, 32 nt, Homo Sapiens
ccucucguuuuuccuucaaucuaccuagcaug

SEQ ID NO: 338051 - RNA, 32 nt, Homo Sapiens
aaaauuguggaaauuuguuugcucuuacgcca

SEQ ID NO: 338052 - RNA, 32 nt, Homo Sapiens
gcaagcgacucccaagcccagcccuguggugg

SEQ ID NO: 338053 - RNA, 32 nt, Homo Sapiens
cagccagaggcacuucugcccgggcugccucu

SEQ ID NO: 338054 - RNA, 32 nt, Homo Sapiens
aggagccaguguugcaugaugaaaagauggua

SEQ ID NO: 338055 - RNA, 32 nt, Homo Sapiens
uguuugaaggacccagaggggcccagcugacc

SEQ ID NO: 338056 - RNA, 32 nt, Homo Sapiens
uccagucaagaaaagaaccuaauagcaccaau

SEQ ID NO: 338057 - RNA, 32 nt, Homo Sapiens
gcgaaugaagugaauaauuucuuaccaaauaa

SEQ ID NO: 338058 - RNA, 32 nt, Homo Sapiens
cagagccgcccgugauguuccucccccguccc

SEQ ID NO: 338059 - RNA, 32 nt, Homo Sapiens
cgaugugagcagcagcagcaagcaucacuuug

SEQ ID NO: 338060 - RNA, 32 nt, Homo Sapiens
cuucagacagcccgagccuucccggccuggcg

SEQ ID NO: 338061 - RNA, 32 nt, Homo Sapiens
cuccacuuguguuuguauaaaauguauuuauu

SEQ ID NO: 338062 - RNA, 32 nt, Homo Sapiens
gcuucccccggcaccccucccccucgggcgcc

SEQ ID NO: 338063 - RNA, 32 nt, Homo Sapiens
agcauccccaaccgugcaacguguaacuugug

SEQ ID NO: 338064 - RNA, 32 nt, Homo Sapiens
ucccuuugcccucccccagugggagagggggu

SEQ ID NO: 338065 - RNA, 32 nt, Homo Sapiens
cuucauguaucaccuucacugacuccauugag

SEQ ID NO: 338066 - RNA, 31 nt, Homo Sapiens
cagcauaaauaaaaacauuuuuauuaagaug

SEQ ID NO: 338067 - RNA, 32 nt, Homo Sapiens
cauuguaauauguaaauuaaaauauuucuaca

SEQ ID NO: 338068 - RNA, 32 nt, Homo Sapiens
accccacccuccccaauuccagcccuuugccc

SEQ ID NO: 338069 - RNA, 32 nt, Homo Sapiens
aauuaacagucaaggauaaaacaagcacgcgc

SEQ ID NO: 338070 - RNA, 32 nt, Homo Sapiens
cugcucugggcggaagagcuuugcugccagcc

SEQ ID NO: 338071 - RNA, 32 nt, Homo Sapiens
uggugugguguugggaagggguccugcagggg

SEQ ID NO: 338072 - RNA, 32 nt, Homo Sapiens
uucuucuuuuccaaauacaaauaagauuauac

SEQ ID NO: 338073 - RNA, 32 nt, Homo Sapiens
uccaaagcuagaacucucaggaccccaaacuc

SEQ ID NO: 338074 - RNA, 32 nt, Homo Sapiens
uuacagggugaagagggaacagaaaucuuugc

SEQ ID NO: 338075 - RNA, 32 nt, Homo Sapiens
auuucaguuuauagacuuguuuuauuagauuu

SEQ ID NO: 338076 - RNA, 32 nt, Homo Sapiens
ucauauacugaauucuuaacucccaaugugac

SEQ ID NO: 338077 - RNA, 29 nt, Homo Sapiens
aagaagaugaagauaaggaaaagaaaagg

SEQ ID NO: 338078 - RNA, 32 nt, Homo Sapiens
gggcugggaaaaacuuuggaaccagacucuug

SEQ ID NO: 338079 - RNA, 32 nt, Homo Sapiens
cugggccacagugcaagacuccaucucaaaaa

SEQ ID NO: 338080 - RNA, 32 nt, Homo Sapiens
cucugaauuuaaagcagacuucuaagacagag

SEQ ID NO: 338081 - RNA, 32 nt, Homo Sapiens
gucagaggaggcauaauauuaauagcgccacc

SEQ ID NO: 338082 - RNA, 32 nt, Homo Sapiens
cuaccaaaacaaaaagacugaacuuuuguaau

SEQ ID NO: 338083 - RNA, 29 nt, Homo Sapiens
ugauguucuauccaauggccgaagauagc

SEQ ID NO: 338084 - RNA, 32 nt, Homo Sapiens
cagaaucccacuuuucuaaauccaccuguugu

SEQ ID NO: 338085 - RNA, 32 nt, Homo Sapiens
cugcccucccgucauuugcccugggucucccc

SEQ ID NO: 338086 - RNA, 32 nt, Homo Sapiens
agcggagggggagggcuugguggggaggggga

SEQ ID NO: 338087 - RNA, 32 nt, Homo Sapiens
cauauccaguguuguguaaagagacuggccaa

SEQ ID NO: 338088 - RNA, 32 nt, Homo Sapiens
cuucccuggugauucuuuccauuuuaaggguu

SEQ ID NO: 338089 - RNA, 32 nt, Homo Sapiens
aggaccuaagacaaaugggacuaauaucaucu

SEQ ID NO: 338090 - RNA, 32 nt, Homo Sapiens
uuaugacuauagaauauaauuuggcauaugau

SEQ ID NO: 338091 - RNA, 32 nt, Homo Sapiens
aggauuguuuauuugauuuuuauccucauccc

SEQ ID NO: 338092 - RNA, 32 nt, Homo Sapiens
ucaauucuauuaugcaauggaaagcagugucc

SEQ ID NO: 338093 - RNA, 32 nt, Homo Sapiens
cacguguuucccuuucagcauuuauacccagg

SEQ ID NO: 338094 - RNA, 32 nt, Homo Sapiens
agcugagcgguaugacagcugauuccagaaag

SEQ ID NO: 338095 - RNA, 32 nt, Homo Sapiens
gugagugaaugugaaggccuaggacauuacug

SEQ ID NO: 338096 - RNA, 31 nt, Homo Sapiens
cgccugcagcgcagcuuccccgggcgcugcc

SEQ ID NO: 338097 - RNA, 32 nt, Homo Sapiens
uggggguagugaaaaauagaaguguggacggg

SEQ ID NO: 338098 - RNA, 32 nt, Homo Sapiens
uaugugcgggcgagaagauggcggcggcgggg

SEQ ID NO: 338099 - RNA, 32 nt, Homo Sapiens
gaagaaaacauugaagcagaaagagcagcgca

SEQ ID NO: 338100 - RNA, 32 nt, Homo Sapiens
gcaaaucagaaggagccagagaagcaggcagu

SEQ ID NO: 338101 - RNA, 32 nt, Homo Sapiens
caauuucaguucuaauaauguccuuaaauuuu

SEQ ID NO: 338102 - RNA, 32 nt, Homo Sapiens
ccaccuccucccccaccuccccgagucuuggg

SEQ ID NO: 338103 - RNA, 32 nt, Homo Sapiens
ggaaaauaagaggaagugcugcuguaauuggg

SEQ ID NO: 338104 - RNA, 32 nt, Homo Sapiens
acccaggagacggugguugcagugagccaaga

SEQ ID NO: 338105 - RNA, 32 nt, Homo Sapiens
ucucucgcauggauccccacagaugguacgga

SEQ ID NO: 338106 - RNA, 32 nt, Homo Sapiens
ugaaagccuuccccggcuccgggcauuauuug

SEQ ID NO: 338107 - RNA, 32 nt, Homo Sapiens
gugagccgaggcguugaggcgcggcgcccacg

SEQ ID NO: 338108 - RNA, 32 nt, Homo Sapiens
aguggccguuugcugccacugacaaggauuuc

SEQ ID NO: 338109 - RNA, 32 nt, Homo Sapiens
ccggcuuccuggaaaaccuccagguuucgcau

SEQ ID NO: 338110 - RNA, 32 nt, Homo Sapiens
ucccccaaccccagccgcucggaggccccaaa

SEQ ID NO: 338111 - RNA, 32 nt, Homo Sapiens
uuauauauaguuugaacuauuuuucgugugcu

SEQ ID NO: 338112 - RNA, 32 nt, Homo Sapiens
uccuucaugaaaacagaaaguugaaaacccca

SEQ ID NO: 338113 - RNA, 32 nt, Homo Sapiens
aggguuuuuuaaaacucucuguuguuuguaau

SEQ ID NO: 338114 - RNA, 32 nt, Homo Sapiens
aauauauauuuauguuuucacagucaccaagu

SEQ ID NO: 338115 - RNA, 32 nt, Homo Sapiens
ccaagaucaugcuacugcacuccagccugggu

SEQ ID NO: 338116 - RNA, 32 nt, Homo Sapiens
uaaaauguugggaugccugaggaccaggagcc

SEQ ID NO: 338117 - RNA, 32 nt, Homo Sapiens
gauggggggaggaggaggaggaggaguucgug

SEQ ID NO: 338118 - RNA, 32 nt, Homo Sapiens
cgcucgcgcgcccgccaccugucugcccacuc

SEQ ID NO: 338119 - RNA, 32 nt, Homo Sapiens
agcagccuuaaggaugcuagacacucauuuag

SEQ ID NO: 338120 - RNA, 32 nt, Homo Sapiens
aacccucauauuuuaaugguguuacagcauuu

SEQ ID NO: 338121 - RNA, 32 nt, Homo Sapiens
uauaauauuuuuccuauuggacaauggacuug

SEQ ID NO: 338122 - RNA, 32 nt, Homo Sapiens
uauggauuuuggaguugugagugauaggaucc

SEQ ID NO: 338123 - RNA, 32 nt, Homo Sapiens
cauuugucugcauuagaaacuacugaagaaau

SEQ ID NO: 338124 - RNA, 32 nt, Homo Sapiens
acuuucagugauuuggggccauauccuacuua

SEQ ID NO: 338125 - RNA, 32 nt, Homo Sapiens
acacaaaaaggggcuuuuccuguugcauuauu

SEQ ID NO: 338126 - RNA, 32 nt, Homo Sapiens
auucuaucgcccaggcuggagugcaauggcac

SEQ ID NO: 338127 - RNA, 32 nt, Homo Sapiens
gcugugcggcccggcucuccggcggcagcgag

SEQ ID NO: 338128 - RNA, 32 nt, Homo Sapiens
caaagaaaaagcucuuuuuuuuccuaaaauaa

SEQ ID NO: 338129 - RNA, 32 nt, Homo Sapiens
acagcccuccugugucuccgggcucaucgcca

SEQ ID NO: 338130 - RNA, 32 nt, Homo Sapiens
ugaugcuggccaaauggugcucagcaggugag

SEQ ID NO: 338131 - RNA, 32 nt, Homo Sapiens
acgggcuggaucgagaugguccaguuaugccc

SEQ ID NO: 338132 - RNA, 32 nt, Homo Sapiens
auauaugaaaagccaagaaguaucugaaagau

SEQ ID NO: 338133 - RNA, 32 nt, Homo Sapiens
aggagagaguagaggccagagcccaggcagga

SEQ ID NO: 338134 - RNA, 32 nt, Homo Sapiens
gacgucgccccggcguccggauuuaacacgga

SEQ ID NO: 338135 - RNA, 32 nt, Homo Sapiens
aaaagggucuugcucuaccacccaggcuggag

SEQ ID NO: 338136 - RNA, 32 nt, Homo Sapiens
gauuggauaauuaguaaggucuuuuuguuauu

SEQ ID NO: 338137 - RNA, 32 nt, Homo Sapiens
gaccacggaugggugcugaaccagagggauuc

SEQ ID NO: 338138 - RNA, 32 nt, Homo Sapiens
ucuaggcuggccugggcucuuaaagggaggau

SEQ ID NO: 338139 - RNA, 29 nt, Homo Sapiens
gcagauauauguauauaucuauauagagg

SEQ ID NO: 338140 - RNA, 32 nt, Homo Sapiens
cucaacuguauacaacucaaaauacaccagcu

SEQ ID NO: 338141 - RNA, 32 nt, Homo Sapiens
guuuuagugccccccgcccccaucccuauaau

SEQ ID NO: 338142 - RNA, 32 nt, Homo Sapiens
ccauggggucccauucucaccuucuggauaca

SEQ ID NO: 338143 - RNA, 32 nt, Homo Sapiens
cacccagacagagggaugaccuucaaccucau

SEQ ID NO: 338144 - RNA, 32 nt, Homo Sapiens
cauaacaggaccauguuuuuaaccuaccauca

SEQ ID NO: 338145 - RNA, 32 nt, Homo Sapiens
ucacugcccucccuggagagucccuuguaagu

SEQ ID NO: 338146 - RNA, 32 nt, Homo Sapiens
uggcguaggucgucguccuggaugcuggcgag

SEQ ID NO: 338147 - RNA, 32 nt, Homo Sapiens
uuuugaucaagaauagaauacuauucauuaac

SEQ ID NO: 338148 - RNA, 32 nt, Homo Sapiens
uugucugugagaauguugaacuguaguaccuu

SEQ ID NO: 338149 - RNA, 32 nt, Homo Sapiens
auuauuucuaguuuuuggcuacgaugaauaaa

SEQ ID NO: 338150 - RNA, 32 nt, Homo Sapiens
cggcuggauccgggucagccccggggagcucc

SEQ ID NO: 338151 - RNA, 32 nt, Homo Sapiens
uccucuacucugaccuggggccccagcauccu

SEQ ID NO: 338152 - RNA, 31 nt, Homo Sapiens
auuuugcuugggcaccaacagaauuaaaaac

SEQ ID NO: 338153 - RNA, 32 nt, Homo Sapiens
gaaaauuacucaaacagcuuugaaauuucugg

SEQ ID NO: 338154 - RNA, 32 nt, Homo Sapiens
caguguugaagaauuugcagauguauacaaua

SEQ ID NO: 338155 - RNA, 32 nt, Homo Sapiens
uuuccauaggggugacuggugcccacccaaga

SEQ ID NO: 338156 - RNA, 31 nt, Homo Sapiens
accauucuugguauaauacaguguagcuuag

SEQ ID NO: 338157 - RNA, 32 nt, Homo Sapiens
uuagauuuucuuuuucaaguuuggguuguggc

SEQ ID NO: 338158 - RNA, 32 nt, Homo Sapiens
ugagcaaugauuauacugcuuuaccuuguguc

SEQ ID NO: 338159 - RNA, 32 nt, Homo Sapiens
accuaggauuuuuacauuuuccaauuaagugc

SEQ ID NO: 338160 - RNA, 32 nt, Homo Sapiens
caagugcgcggcagccgggacgcagacggcgg

SEQ ID NO: 338161 - RNA, 32 nt, Homo Sapiens
uugggcccucgucugccucuccaggauuguau

SEQ ID NO: 338162 - RNA, 30 nt, Homo Sapiens
caaacaacugacugcauuuguccaugauca

SEQ ID NO: 338163 - RNA, 32 nt, Homo Sapiens
cagagcccaucucuccuuuuccaggcugcuga

SEQ ID NO: 338164 - RNA, 32 nt, Homo Sapiens
cugcccccacccagaaccuuccgguuugcccu

SEQ ID NO: 338165 - RNA, 32 nt, Homo Sapiens
ccucccagccccagcgccucagccccagcccc

SEQ ID NO: 338166 - RNA, 32 nt, Homo Sapiens
cgucgcccggcggguagaggcgcuccuggccg

SEQ ID NO: 338167 - RNA, 32 nt, Homo Sapiens
aagccaugaccgaccaauauguugacauacug

SEQ ID NO: 338168 - RNA, 32 nt, Homo Sapiens
gcccauggcuggaaggccgggcuggaggccca

SEQ ID NO: 338169 - RNA, 32 nt, Homo Sapiens
cuccaaacaaaguguaaggaucagaguucugu

SEQ ID NO: 338170 - RNA, 32 nt, Homo Sapiens
aguguugggugucuuccuggggaccuguccuc

SEQ ID NO: 338171 - RNA, 32 nt, Homo Sapiens
caugacaauguaauuuguguaacuguugaauc

SEQ ID NO: 338172 - RNA, 32 nt, Homo Sapiens
augggugauuucuuucuguucauuucauaguu

SEQ ID NO: 338173 - RNA, 32 nt, Homo Sapiens
cagcagugucauuguauuuauauacagagcuu

SEQ ID NO: 338174 - RNA, 32 nt, Homo Sapiens
gccccaggcuccccgcagcugcccggaccucc

SEQ ID NO: 338175 - RNA, 32 nt, Homo Sapiens
accaugaaaaggaggcaguugugacaaucccc

SEQ ID NO: 338176 - RNA, 32 nt, Homo Sapiens
acaguguggaugaugauaugcuuuugugagca

SEQ ID NO: 338177 - RNA, 32 nt, Homo Sapiens
ucugguagcucuuuucuugcuuuguuuuuucu

SEQ ID NO: 338178 - RNA, 32 nt, Homo Sapiens
cgagcaaaaaaauuaaauuuuaaccaugaggg

SEQ ID NO: 338179 - RNA, 32 nt, Homo Sapiens
ggugcuugcuaaggaacagaaugacccagagu

SEQ ID NO: 338180 - RNA, 32 nt, Homo Sapiens
cucaaaauauuuuuagaagucuuuuuguaaac

SEQ ID NO: 338181 - RNA, 32 nt, Homo Sapiens
ggagguggagcuucaagaugccugcuguguuc

SEQ ID NO: 338182 - RNA, 32 nt, Homo Sapiens
gcaggaugggccgcgccgccguggcccgcugu

SEQ ID NO: 338183 - RNA, 32 nt, Homo Sapiens
aaaauuagcugggcaugguggagcaugccugu

SEQ ID NO: 338184 - RNA, 32 nt, Homo Sapiens
uuccauggccuuuauuucuccucuuccagugg

SEQ ID NO: 338185 - RNA, 32 nt, Homo Sapiens
uucacccuggagcuccucccgggaccuugcaa

SEQ ID NO: 338186 - RNA, 32 nt, Homo Sapiens
acaauuuguuacuucacugaauuucuucaaaa

SEQ ID NO: 338187 - RNA, 32 nt, Homo Sapiens
cgucuccaugggcguucaggaacuugcccagg

SEQ ID NO: 338188 - RNA, 32 nt, Homo Sapiens
gaggagggccacugaggaauaaagcuucucuc

SEQ ID NO: 338189 - RNA, 32 nt, Homo Sapiens
ccugaaccaaacauuuauaaagucccuuccuc

SEQ ID NO: 338190 - RNA, 32 nt, Homo Sapiens
guauauauuuagugcugcaucuuauagcacuu

SEQ ID NO: 338191 - RNA, 32 nt, Homo Sapiens
ccagacgugaggugcccccucccgcggggggu

SEQ ID NO: 338192 - RNA, 32 nt, Homo Sapiens
aaaaaauguuuuuuguuugccgaggacucagg

SEQ ID NO: 338193 - RNA, 32 nt, Homo Sapiens
augaauaaauauacuggcucuuucucaaggcc

SEQ ID NO: 338194 - RNA, 32 nt, Homo Sapiens
cucaccaccccauaaacuuaaaacagaccaaa

SEQ ID NO: 338195 - RNA, 32 nt, Homo Sapiens
uguacuuuugaugaaucagggaauuuuuuuaa

SEQ ID NO: 338196 - RNA, 32 nt, Homo Sapiens
cccuuccauugguggcagcaguguuggcaagg

SEQ ID NO: 338197 - RNA, 32 nt, Homo Sapiens
uaaccagguaguccugguacuccuuuaguuuu

SEQ ID NO: 338198 - RNA, 32 nt, Homo Sapiens
ggcugggugcgguggcucaugccuguaaucca

SEQ ID NO: 338199 - RNA, 32 nt, Homo Sapiens
gcagucggugggcgcggcggcugcuggaggcu

SEQ ID NO: 338200 - RNA, 32 nt, Homo Sapiens
ccaugcugccguagcaggccagaccacagcau

SEQ ID NO: 338201 - RNA, 32 nt, Homo Sapiens
gccacuuugugaccaugauguugcaaguugcc

SEQ ID NO: 338202 - RNA, 32 nt, Homo Sapiens
uguugccaccuuguuuguaacagugaaaaauu

SEQ ID NO: 338203 - RNA, 32 nt, Homo Sapiens
gugucaccgcuuucgcuucugcuugaguaauc

SEQ ID NO: 338204 - RNA, 32 nt, Homo Sapiens
auccucaucccucucuucacagauguggggcc

SEQ ID NO: 338205 - RNA, 32 nt, Homo Sapiens
agcaaccaggacuuuugaaauaaguugcaucu

SEQ ID NO: 338206 - RNA, 30 nt, Homo Sapiens
cccgaggcugcgcagcacugaggugagcuu

SEQ ID NO: 338207 - RNA, 32 nt, Homo Sapiens
cauacuaaugggggucuuucugugaugugaug

SEQ ID NO: 338208 - RNA, 32 nt, Homo Sapiens
aggacagugccucagagcugcuccgccacacu

SEQ ID NO: 338209 - RNA, 32 nt, Homo Sapiens
cugucccauaugcuaucgcauugggcagcaaa

SEQ ID NO: 338210 - RNA, 29 nt, Homo Sapiens
uuuacuauguguauguauauagaugugca

SEQ ID NO: 338211 - RNA, 32 nt, Homo Sapiens
cagggguccuguccuccacuccaggucauucc

SEQ ID NO: 338212 - RNA, 32 nt, Homo Sapiens
uugaauuauuuuuuccucuccaugguaucagu

SEQ ID NO: 338213 - RNA, 31 nt, Homo Sapiens
auacaguguaacaugucacuugugcuuuaaa

SEQ ID NO: 338214 - RNA, 32 nt, Homo Sapiens
ucacaagaccuggccugguacaggcuacagca

SEQ ID NO: 338215 - RNA, 32 nt, Homo Sapiens
ccuaccauguguacaaaaucuacuucauaaga

SEQ ID NO: 338216 - RNA, 32 nt, Homo Sapiens
ggaccauuaagaacuccaucaaguaagggagg

SEQ ID NO: 338217 - RNA, 32 nt, Homo Sapiens
ccuuucuacaguaagcacuuggaagauuguuu

SEQ ID NO: 338218 - RNA, 32 nt, Homo Sapiens
guuauuuuuuauuugcauugauuugccauaag

SEQ ID NO: 338219 - RNA, 32 nt, Homo Sapiens
uccuccccagccccuucacuuccauuaauuag

SEQ ID NO: 338220 - RNA, 32 nt, Homo Sapiens
gcaggauggaucugucaaaccacaauauauac

SEQ ID NO: 338221 - RNA, 32 nt, Homo Sapiens
ccccagauacacgggcccugucgcgcucccgc

SEQ ID NO: 338222 - RNA, 32 nt, Homo Sapiens
aaauaaaguggaauauuaaguaaaaguugggc

SEQ ID NO: 338223 - RNA, 32 nt, Homo Sapiens
aucaguagacuucuuuccuaggauuucuuuaa

SEQ ID NO: 338224 - RNA, 32 nt, Homo Sapiens
aacauucuggcugagggagaggucuugggguu

SEQ ID NO: 338225 - RNA, 32 nt, Homo Sapiens
gcauggguaaaacuuaugaaaauuuccucaug

SEQ ID NO: 338226 - RNA, 32 nt, Homo Sapiens
ccucaucucgaguucccaaaccaucuauguug

SEQ ID NO: 338227 - RNA, 32 nt, Homo Sapiens
gcuggaggggaaggaguguccacgcaucaaua

SEQ ID NO: 338228 - RNA, 32 nt, Homo Sapiens
gguucacuuaggaagccacgugccaauaccug

SEQ ID NO: 338229 - RNA, 28 nt, Homo Sapiens
aaaaaucgucaaguuauguguuuaaaac

SEQ ID NO: 338230 - RNA, 32 nt, Homo Sapiens
caucucugggcuggaugagcucccacaagccu

SEQ ID NO: 338231 - RNA, 32 nt, Homo Sapiens
agagcaguuucaucugguugugacucuaagcu

SEQ ID NO: 338232 - RNA, 32 nt, Homo Sapiens
ucucuaauccaccccaauccucccagaaagca

SEQ ID NO: 338233 - RNA, 32 nt, Homo Sapiens
uuuauuuuauuuuguuuucauagugcauguuc

SEQ ID NO: 338234 - RNA, 32 nt, Homo Sapiens
uaauucucagaauaacaagugagauagauaua

SEQ ID NO: 338235 - RNA, 32 nt, Homo Sapiens
gcaccaggcacagggagaagccaggcaguggg

SEQ ID NO: 338236 - RNA, 32 nt, Homo Sapiens
accacccagaguuuccucuuggucccugucua

SEQ ID NO: 338237 - RNA, 32 nt, Homo Sapiens
gcaguaauaucguaucucugccauguguguuc

SEQ ID NO: 338238 - RNA, 32 nt, Homo Sapiens
auggcaccucuccuuucgggcaggguaugguc

SEQ ID NO: 338239 - RNA, 32 nt, Homo Sapiens
aauuacauuuuccaacagaccaaaaaauguuu

SEQ ID NO: 338240 - RNA, 32 nt, Homo Sapiens
ugagccccgccuuuuacuucggcccgcuucuu

SEQ ID NO: 338241 - RNA, 32 nt, Homo Sapiens
ucuauugugggaggagagaccgaaauucucag

SEQ ID NO: 338242 - RNA, 32 nt, Homo Sapiens
gaacucguuauucuauuuuucuuagaauuaaa

SEQ ID NO: 338243 - RNA, 31 nt, Homo Sapiens
uagauggcaagguccaggggacuagcacagg

SEQ ID NO: 338244 - RNA, 32 nt, Homo Sapiens
aagcguuuuucuuuuucuuuuuuuuuuuugag

SEQ ID NO: 338245 - RNA, 32 nt, Homo Sapiens
ccuggcccugcccugggugcugcugacccugc

SEQ ID NO: 338246 - RNA, 32 nt, Homo Sapiens
ucacuucugucagaugcucccauccacuauua

SEQ ID NO: 338247 - RNA, 32 nt, Homo Sapiens
ccauggagaagcugguggggaccagacccagc

SEQ ID NO: 338248 - RNA, 32 nt, Homo Sapiens
gggggccaaagggaagugcugcgagguuuaca

SEQ ID NO: 338249 - RNA, 32 nt, Homo Sapiens
uagcugaaaaacaggguugugagaacagcuuc

SEQ ID NO: 338250 - RNA, 32 nt, Homo Sapiens
guagagucccagaaacaaaacuaugcugacaa

SEQ ID NO: 338251 - RNA, 32 nt, Homo Sapiens
accauuuuauuuaccagauuacuaaguucaca

SEQ ID NO: 338252 - RNA, 32 nt, Homo Sapiens
ucuaauaagccccacccuccccgccugggcuc

SEQ ID NO: 338253 - RNA, 32 nt, Homo Sapiens
agcaggcgcaggcuccgugaggaggcaagaau

SEQ ID NO: 338254 - RNA, 32 nt, Homo Sapiens
uuguuaagugaucaaaaguaaauguucucuuu

SEQ ID NO: 338255 - RNA, 32 nt, Homo Sapiens
cuugcaguuguucuuuaaucuccuuuacuaga

SEQ ID NO: 338256 - RNA, 32 nt, Homo Sapiens
ggcgguucgggcgaagagcggcuuagggccuc

SEQ ID NO: 338257 - RNA, 32 nt, Homo Sapiens
cgcacgucuggcucccccuuccccucaugacc

SEQ ID NO: 338258 - RNA, 32 nt, Homo Sapiens
uuuauucaguaccaccucauggagcuucaaug

SEQ ID NO: 338259 - RNA, 32 nt, Homo Sapiens
cuuacuuccuaacaucuuucugauaacauuau

SEQ ID NO: 338260 - RNA, 32 nt, Homo Sapiens
ugagaaugagcagcugcaggagcacugcgcca

SEQ ID NO: 338261 - RNA, 32 nt, Homo Sapiens
aaggaaaagggacccaaggaaaugggcuuuau

SEQ ID NO: 338262 - RNA, 32 nt, Homo Sapiens
auauuuggauuugaccugcauuuuggaauuua

SEQ ID NO: 338263 - RNA, 32 nt, Homo Sapiens
uuacaggugugagccacugcgcccagucaugc

SEQ ID NO: 338264 - RNA, 26 nt, Homo Sapiens
gauggccguggcgccucugcgggggg

SEQ ID NO: 338265 - RNA, 32 nt, Homo Sapiens
gcguguguguggauuuuuaaagaaauucuuua

SEQ ID NO: 338266 - RNA, 32 nt, Homo Sapiens
cugacauucagaugugagcuguuuugggaguc

SEQ ID NO: 338267 - RNA, 32 nt, Homo Sapiens
auuaauuucaaagcuuccucuggccagguaga

SEQ ID NO: 338268 - RNA, 32 nt, Homo Sapiens
agaacgucccugccuucacuccugcuuuuagu

SEQ ID NO: 338269 - RNA, 32 nt, Homo Sapiens
ccagcccugaagcuggucuacaucucagucuc

SEQ ID NO: 338270 - RNA, 32 nt, Homo Sapiens
ugacuuacaaggaaagcacgaggcccuugagg

SEQ ID NO: 338271 - RNA, 32 nt, Homo Sapiens
aggaaaccuuggcuucagacuuuaggggcgag

SEQ ID NO: 338272 - RNA, 32 nt, Homo Sapiens
ccccuccuccaagucuucuguucccuuugggc

SEQ ID NO: 338273 - RNA, 32 nt, Homo Sapiens
aaaggcaauuauaaauaaaaagccugauuauu

SEQ ID NO: 338274 - RNA, 32 nt, Homo Sapiens
agcauucguuuuuaaauaaguucugaguaaac

SEQ ID NO: 338275 - RNA, 32 nt, Homo Sapiens
guuuagcuccucaguuacccaggcugcaggcc

SEQ ID NO: 338276 - RNA, 32 nt, Homo Sapiens
aagaucuagaaggcccuuucugaugccaaugu

SEQ ID NO: 338277 - RNA, 32 nt, Homo Sapiens
guggggaaagcaagcaccuacaugacaauggc

SEQ ID NO: 338278 - RNA, 32 nt, Homo Sapiens
caaugaacgcuugaaggaaaugucuacuuagc

SEQ ID NO: 338279 - RNA, 32 nt, Homo Sapiens
gugcuuguuuuggcagcucauuuuggcuguau

SEQ ID NO: 338280 - RNA, 32 nt, Homo Sapiens
uuauuugcauuacaaauaggauacaaaaauag

SEQ ID NO: 338281 - RNA, 32 nt, Homo Sapiens
gccaggcccugcagucucuccucucagcuggu

SEQ ID NO: 338282 - RNA, 32 nt, Homo Sapiens
cuuugccuuuugcugacacagcuccauaaaga

SEQ ID NO: 338283 - RNA, 32 nt, Homo Sapiens
ccacacucaaggugcuggagcucuacggcaau

SEQ ID NO: 338284 - RNA, 32 nt, Homo Sapiens
guuuaacaaaaauuguuuauaucuuggaaaaa

SEQ ID NO: 338285 - RNA, 32 nt, Homo Sapiens
aaguggaucucaguaaaggaucuuuggagcca

SEQ ID NO: 338286 - RNA, 32 nt, Homo Sapiens
auaauaaaggacuguaaucuuauuuaggaagu

SEQ ID NO: 338287 - RNA, 32 nt, Homo Sapiens
ugcucauguaucuauugauguuuuucauuaua

SEQ ID NO: 338288 - RNA, 32 nt, Homo Sapiens
gacagagcuggaaaugcauugcacuuugacua

SEQ ID NO: 338289 - RNA, 32 nt, Homo Sapiens
ccugggucuuccaagaggauucuuaagguacc

SEQ ID NO: 338290 - RNA, 32 nt, Homo Sapiens
aauccugaccucaagugauccacacaugucua

SEQ ID NO: 338291 - RNA, 32 nt, Homo Sapiens
gcuauguggagcaaaggccgacagaggggaag

SEQ ID NO: 338292 - RNA, 32 nt, Homo Sapiens
aaaaaucuugucagaagaucccagaaaaguuc

SEQ ID NO: 338293 - RNA, 32 nt, Homo Sapiens
ccacacgugucuuuuuuuuuucuuuguuaagg

SEQ ID NO: 338294 - RNA, 32 nt, Homo Sapiens
uuugaauucaggacaaaagaaaaaaugaagcu

SEQ ID NO: 338295 - RNA, 32 nt, Homo Sapiens
ugugugcauguauauauagacauacaugccua

SEQ ID NO: 338296 - RNA, 32 nt, Homo Sapiens
uuagggcccuccccacccacacccacaggucg

SEQ ID NO: 338297 - RNA, 32 nt, Homo Sapiens
aggucccagccccuccucccucagacccagcg

SEQ ID NO: 338298 - RNA, 32 nt, Homo Sapiens
acagggaaauaccuuuccugggcuuguuuucu

SEQ ID NO: 338299 - RNA, 32 nt, Homo Sapiens
uuuuauacuguguuuugauaugucuagcaaua

SEQ ID NO: 338300 - RNA, 32 nt, Homo Sapiens
cgcuaggaacagagaugcccuuagggagcccc

SEQ ID NO: 338301 - RNA, 32 nt, Homo Sapiens
acaugcccaucucagcugaggucagugccaca

SEQ ID NO: 338302 - RNA, 32 nt, Homo Sapiens
gaauuuaaaaauuucauacaucaaaucuauga

SEQ ID NO: 338303 - RNA, 32 nt, Homo Sapiens
ggagucuaaucccagcacuuugggaggccgag

SEQ ID NO: 338304 - RNA, 32 nt, Homo Sapiens
ggcacucuguuguauuuucuuacugaaguuca

SEQ ID NO: 338305 - RNA, 32 nt, Homo Sapiens
aacauuuuauauauuuuauuguacaguuauaa

SEQ ID NO: 338306 - RNA, 32 nt, Homo Sapiens
ucuuuguagcuacuuguguuuuauugguauua

SEQ ID NO: 338307 - RNA, 32 nt, Homo Sapiens
uacugauuuuuccuguugauucaaauagacua

SEQ ID NO: 338308 - RNA, 32 nt, Homo Sapiens
ccauccuggaauuauuucacuuuuaagauaaa

SEQ ID NO: 338309 - RNA, 32 nt, Homo Sapiens
uuaucuuugacuguuauuuuaugcagucgcuc

SEQ ID NO: 338310 - RNA, 32 nt, Homo Sapiens
acaaaaccaauaugcaaggcauguguuugucc

SEQ ID NO: 338311 - RNA, 32 nt, Homo Sapiens
ccuggggcacucacacggccaagcuucugcca

SEQ ID NO: 338312 - RNA, 32 nt, Homo Sapiens
gggccgcccccucuccuccgagauccaacgcc

SEQ ID NO: 338313 - RNA, 32 nt, Homo Sapiens
guuaauaagccuaccuuugguuauuacccugg

SEQ ID NO: 338314 - RNA, 32 nt, Homo Sapiens
accuuaggaggagugagucacaacaacuccau

SEQ ID NO: 338315 - RNA, 32 nt, Homo Sapiens
aggaaagcaauaauggcaguaguucucaaaug

SEQ ID NO: 338316 - RNA, 32 nt, Homo Sapiens
auccagguuuuagugcagcuucugccguuaac

SEQ ID NO: 338317 - RNA, 32 nt, Homo Sapiens
cccucugccaaccucccugcuggcccagguga

SEQ ID NO: 338318 - RNA, 32 nt, Homo Sapiens
gcgggcgccgacgccagcgguccggguagcag

SEQ ID NO: 338319 - RNA, 32 nt, Homo Sapiens
ugauaaggauaaaggagaaaauggguacauca

SEQ ID NO: 338320 - RNA, 32 nt, Homo Sapiens
ggaaguugauuguccuccacuccagcuguuuc

SEQ ID NO: 338321 - RNA, 32 nt, Homo Sapiens
agaagguugcuuagaccaugcucugagccccg

SEQ ID NO: 338322 - RNA, 32 nt, Homo Sapiens
cuuuucuuagauuccagggacucauuuauaaa

SEQ ID NO: 338323 - RNA, 32 nt, Homo Sapiens
auuguuucaaggaagugacaguucuacuuuag

SEQ ID NO: 338324 - RNA, 32 nt, Homo Sapiens
uuauggaauuuaauguuuaucagcucuaugua

SEQ ID NO: 338325 - RNA, 32 nt, Homo Sapiens
aggcccuccccucccaugcaggccgaugacaa

SEQ ID NO: 338326 - RNA, 32 nt, Homo Sapiens
cacuuaccauguuccuggcacacuggaccuca

SEQ ID NO: 338327 - RNA, 32 nt, Homo Sapiens
acccccgcgcgcaggcaugagccccgcccccc

SEQ ID NO: 338328 - RNA, 32 nt, Homo Sapiens
ccaccuuucggggguagccgcacccccagcac

SEQ ID NO: 338329 - RNA, 32 nt, Homo Sapiens
aucuccucgguauaaaucauguuuauaaguua

SEQ ID NO: 338330 - RNA, 32 nt, Homo Sapiens
uggcauccuucuuuuucuuuuuccauuggucu

SEQ ID NO: 338331 - RNA, 32 nt, Homo Sapiens
cuuauaaugcuguuuaguuuuguacuauuggu

SEQ ID NO: 338332 - RNA, 32 nt, Homo Sapiens
ggggguggagucggagcggcgcggcggcgguc

SEQ ID NO: 338333 - RNA, 32 nt, Homo Sapiens
aauguaaacaauauaagccuagauaaagcuuc

SEQ ID NO: 338334 - RNA, 32 nt, Homo Sapiens
auuuaaaggagauuguuucaaaauauuuuugc

SEQ ID NO: 338335 - RNA, 32 nt, Homo Sapiens
gacuggacagaaaaccacugcaagccccaagg

SEQ ID NO: 338336 - RNA, 32 nt, Homo Sapiens
agaacaguucagcacagcaucauuacauccgu

SEQ ID NO: 338337 - RNA, 32 nt, Homo Sapiens
uggauaucaguucugccucacauuucccacuu

SEQ ID NO: 338338 - RNA, 32 nt, Homo Sapiens
gaccggcucucuucaugcccagcccccggaga

SEQ ID NO: 338339 - RNA, 32 nt, Homo Sapiens
ccaugggaauaauucaugaaaauccaaucuac

SEQ ID NO: 338340 - RNA, 32 nt, Homo Sapiens
ccuccugcccuucucuccugucugacccccac

SEQ ID NO: 338341 - RNA, 32 nt, Homo Sapiens
uuuacagcagcaccccacucuacugguaucaa

SEQ ID NO: 338342 - RNA, 32 nt, Homo Sapiens
uugaggauaagcugcggaugagcgauauuguc

SEQ ID NO: 338343 - RNA, 32 nt, Homo Sapiens
gucagugauuuuauuguuuacauccugagacu

SEQ ID NO: 338344 - RNA, 32 nt, Homo Sapiens
ccaggggugguggaaggagcacugggcuaggg

SEQ ID NO: 338345 - RNA, 28 nt, Homo Sapiens
agcgaggagggaccgccgaggcugcccc

SEQ ID NO: 338346 - RNA, 32 nt, Homo Sapiens
gcucagaggcggagaagccugccuggugccca

SEQ ID NO: 338347 - RNA, 32 nt, Homo Sapiens
cccaggccccuuugggucccugagccucagcu

SEQ ID NO: 338348 - RNA, 32 nt, Homo Sapiens
ccaccccccagcccccaccucugccuccaggu

SEQ ID NO: 338349 - RNA, 32 nt, Homo Sapiens
uccauugcuggcuuugcagacacaucacccag

SEQ ID NO: 338350 - RNA, 32 nt, Homo Sapiens
augccucucuacagucucgucucuuuuacccu

SEQ ID NO: 338351 - RNA, 32 nt, Homo Sapiens
gacccaggaucuucuccuuucugggcaucccu

SEQ ID NO: 338352 - RNA, 32 nt, Homo Sapiens
gaaguguaucuaggcgcggccagggccccaca

SEQ ID NO: 338353 - RNA, 32 nt, Homo Sapiens
cuguuugucuacauaugaucugucuguggcaa

SEQ ID NO: 338354 - RNA, 32 nt, Homo Sapiens
gucccagcgucgcuccggacgcugccaaccug

SEQ ID NO: 338355 - RNA, 32 nt, Homo Sapiens
cagcugcuuaagaugggugcuuccuuguaccc

SEQ ID NO: 338356 - RNA, 32 nt, Homo Sapiens
gccauugggaaguuaagagaggcucucaaacu

SEQ ID NO: 338357 - RNA, 32 nt, Homo Sapiens
cacauacaccaauuuuaccacucaaaccagga

SEQ ID NO: 338358 - RNA, 32 nt, Homo Sapiens
cugcaauauccuugaaauccaaaagaggucca

SEQ ID NO: 338359 - RNA, 32 nt, Homo Sapiens
aggcuuccaaaaagaguauaauuguuucagaa

SEQ ID NO: 338360 - RNA, 32 nt, Homo Sapiens
uccagaccuaagucaguguuagucuaccacug

SEQ ID NO: 338361 - RNA, 32 nt, Homo Sapiens
cuuuugcucugggucuccaguggauaggagag

SEQ ID NO: 338362 - RNA, 32 nt, Homo Sapiens
gcaagaagucgagaaggacacgucuccaagau

SEQ ID NO: 338363 - RNA, 32 nt, Homo Sapiens
ccaagcagcaguggcgguuucuccucgcaucu

SEQ ID NO: 338364 - RNA, 32 nt, Homo Sapiens
cccccaccccaucuccucuccgccaguccccg

SEQ ID NO: 338365 - RNA, 32 nt, Homo Sapiens
ccucggaggggaggguucggaaguggaaugcg

SEQ ID NO: 338366 - RNA, 32 nt, Homo Sapiens
gggcguggccgcgggcgaguggggccaaggag

SEQ ID NO: 338367 - RNA, 29 nt, Homo Sapiens
aaccuaugaaguuuauuuucuauuuuagu

SEQ ID NO: 338368 - RNA, 29 nt, Homo Sapiens
ccgccagccugccggguacggccuuuucc

SEQ ID NO: 338369 - RNA, 32 nt, Homo Sapiens
uguugaaauguccaccuucuuaaauuuuuaag

SEQ ID NO: 338370 - RNA, 32 nt, Homo Sapiens
gguggcagacagaagcacccccugccccggca

SEQ ID NO: 338371 - RNA, 32 nt, Homo Sapiens
aguaaugauaaccauaucauggcccuugaagg

SEQ ID NO: 338372 - RNA, 32 nt, Homo Sapiens
aaaaugaaaauauuuacuuuguagaauaugac

SEQ ID NO: 338373 - RNA, 32 nt, Homo Sapiens
gaccgugggggauaucucaguggcggacgagg

SEQ ID NO: 338374 - RNA, 32 nt, Homo Sapiens
ugcagaugccuggcccagcucuggccccggug

SEQ ID NO: 338375 - RNA, 32 nt, Homo Sapiens
auauguacauucuugcucugcacuguaugugu

SEQ ID NO: 338376 - RNA, 32 nt, Homo Sapiens
uaaccguauuuuucacagggugacaaauuggg

SEQ ID NO: 338377 - RNA, 32 nt, Homo Sapiens
gccagggcacagguaccgcggcugggaggguc

SEQ ID NO: 338378 - RNA, 32 nt, Homo Sapiens
ccgcgcgggucgucgcagcugcgggugaacgc

SEQ ID NO: 338379 - RNA, 32 nt, Homo Sapiens
gacccgcgcugcgcuccgccgcugacaugugu

SEQ ID NO: 338380 - RNA, 32 nt, Homo Sapiens
cgcugcagggacuuccugaggacuugguuugg

SEQ ID NO: 338381 - RNA, 32 nt, Homo Sapiens
ggguuccuugaaaagaaaacagguaguuaacc

SEQ ID NO: 338382 - RNA, 32 nt, Homo Sapiens
uauuagguuuuuuuuuuuuuuaacauguauac

SEQ ID NO: 338383 - RNA, 27 nt, Homo Sapiens
gccucguccuucucuuaccgccaucuu

SEQ ID NO: 338384 - RNA, 32 nt, Homo Sapiens
gcaagucucgugaccucuggcucuuucacuuc

SEQ ID NO: 338385 - RNA, 32 nt, Homo Sapiens
ucuguaauuuuguuuacuaguucuuaggggaa

SEQ ID NO: 338386 - RNA, 31 nt, Homo Sapiens
ggaucucauuugacuuuguuuugaugagggu

SEQ ID NO: 338387 - RNA, 32 nt, Homo Sapiens
agagugggggagagcaggcuggcagcucucca

SEQ ID NO: 338388 - RNA, 32 nt, Homo Sapiens
caugauaugguuuuuaaucaugaugaauugcc

SEQ ID NO: 338389 - RNA, 32 nt, Homo Sapiens
ucuccccagugccccacaucuuucucugggag

SEQ ID NO: 338390 - RNA, 32 nt, Homo Sapiens
aguaaacaucuuuuagcaaggcuuuuauuuuc

SEQ ID NO: 338391 - RNA, 32 nt, Homo Sapiens
cuuucugacauaaucaagcaauuuagacuuaa

SEQ ID NO: 338392 - RNA, 32 nt, Homo Sapiens
aguguucucaucugaagaauagagugggcaag

SEQ ID NO: 338393 - RNA, 32 nt, Homo Sapiens
gaauugagacugcaaaggaagaauaaugacuc

SEQ ID NO: 338394 - RNA, 32 nt, Homo Sapiens
gagugggugcccauucugaaaaacgaggcauu

SEQ ID NO: 338395 - RNA, 32 nt, Homo Sapiens
aaaagccucacagauuugaagaacuggacccc

SEQ ID NO: 338396 - RNA, 29 nt, Homo Sapiens
acugcauuuauccguaaccacaaaaaguu

SEQ ID NO: 338397 - RNA, 32 nt, Homo Sapiens
uagcaucguguuggggguuuuccuucaaacac

SEQ ID NO: 338398 - RNA, 28 nt, Homo Sapiens
uaauauauguugcaaauguguuucucag

SEQ ID NO: 338399 - RNA, 32 nt, Homo Sapiens
aaccccuuugaaaagaaauggacuuaaaguau

SEQ ID NO: 338400 - RNA, 32 nt, Homo Sapiens
guccuucagagcguguggaaagaaauaaguaa

SEQ ID NO: 338401 - RNA, 32 nt, Homo Sapiens
accuuaggccuggcccuggucuccgagcgcgg

SEQ ID NO: 338402 - RNA, 32 nt, Homo Sapiens
cacuccaguagcgagagacggcacccagaauc

SEQ ID NO: 338403 - RNA, 32 nt, Homo Sapiens
cgccuacggcccggcccccacgcgcccugcuc

SEQ ID NO: 338404 - RNA, 30 nt, Homo Sapiens
uaccugcguggcggcggcgggagcagucgg

SEQ ID NO: 338405 - RNA, 32 nt, Homo Sapiens
cugagaucaaaguuaagauuauauccuguuug

SEQ ID NO: 338406 - RNA, 32 nt, Homo Sapiens
cgagagugagcgggucugggcggcugcuggca

SEQ ID NO: 338407 - RNA, 32 nt, Homo Sapiens
augaaugcaagauacuuucaauaaaaaguaag

SEQ ID NO: 338408 - RNA, 32 nt, Homo Sapiens
ugagcaccaagggcuuccccuuuuguugccaa

SEQ ID NO: 338409 - RNA, 32 nt, Homo Sapiens
agugcccuuuugugaccucucauuccaagauu

SEQ ID NO: 338410 - RNA, 32 nt, Homo Sapiens
gcauuuuuccucucuucagucacugauggaga

SEQ ID NO: 338411 - RNA, 32 nt, Homo Sapiens
ggggcaggcgcuggaaacaaaagggagagaca

SEQ ID NO: 338412 - RNA, 32 nt, Homo Sapiens
cugcugggagacggcgggaucucuuucgccau

SEQ ID NO: 338413 - RNA, 32 nt, Homo Sapiens
ucuuccacauguguuauucuuaauuuuugcuu

SEQ ID NO: 338414 - RNA, 32 nt, Homo Sapiens
cgcgcucucugaggcgucggcggggcgccccc

SEQ ID NO: 338415 - RNA, 32 nt, Homo Sapiens
ggcugggggagacggcaccgcgugcccacggg

SEQ ID NO: 338416 - RNA, 32 nt, Homo Sapiens
ggcacgaggggccaccgaggcgcugucccuga

SEQ ID NO: 338417 - RNA, 32 nt, Homo Sapiens
ccggccuccccucuccuucugggccgcagagc

SEQ ID NO: 338418 - RNA, 32 nt, Homo Sapiens
gagacaggggagacuggggaggccagggcgga

SEQ ID NO: 338419 - RNA, 32 nt, Homo Sapiens
uagccucagaagcagagcuguuuggcagacug

SEQ ID NO: 338420 - RNA, 29 nt, Homo Sapiens
uggagccgccgggaguggacgccgccgag

SEQ ID NO: 338421 - RNA, 32 nt, Homo Sapiens
uaauuccugaaagauauauuaaguauaucagu

SEQ ID NO: 338422 - RNA, 32 nt, Homo Sapiens
guccugaagagccaccucuaggaggcagcccc

SEQ ID NO: 338423 - RNA, 32 nt, Homo Sapiens
uggaguaauacugugccauacuggucuuugcu

SEQ ID NO: 338424 - RNA, 32 nt, Homo Sapiens
ggggaucaaaaauaugugaccuuaaugagauu

SEQ ID NO: 338425 - RNA, 32 nt, Homo Sapiens
uuacuuuaaaaugagaaucugguguuacugua

SEQ ID NO: 338426 - RNA, 32 nt, Homo Sapiens
ugcacuaauaaagcuuuuuuuauaauccugaa

SEQ ID NO: 338427 - RNA, 32 nt, Homo Sapiens
aaucacagaguaaaacuagagaaggucuguug

SEQ ID NO: 338428 - RNA, 31 nt, Homo Sapiens
gguucucucaaugaucuauugaucauuacac

SEQ ID NO: 338429 - RNA, 32 nt, Homo Sapiens
auuauuuuuaucaugaaaucauguuuuucucu

SEQ ID NO: 338430 - RNA, 32 nt, Homo Sapiens
caaaguuguacucagcauuucuuaaccaaagu

SEQ ID NO: 338431 - RNA, 32 nt, Homo Sapiens
auuuuuguuuucugaaagaaaucugaagagca

SEQ ID NO: 338432 - RNA, 32 nt, Homo Sapiens
ugugccucaauccucuuuccaagcaggccuca

SEQ ID NO: 338433 - RNA, 32 nt, Homo Sapiens
ccucuugcagaggaugccccaggccugaaccc

SEQ ID NO: 338434 - RNA, 32 nt, Homo Sapiens
auuccuccaccuuauucccagccccuggaaac

SEQ ID NO: 338435 - RNA, 32 nt, Homo Sapiens
uucccuccauguguuucucaguuucccguuuc

SEQ ID NO: 338436 - RNA, 32 nt, Homo Sapiens
gcugcucugaucuggucucagcgcggagggag

SEQ ID NO: 338437 - RNA, 32 nt, Homo Sapiens
ucugguggacauuuuauaagugcauuuuauau

SEQ ID NO: 338438 - RNA, 32 nt, Homo Sapiens
cacacccuuugaagagcaggaaggccagggca

SEQ ID NO: 338439 - RNA, 32 nt, Homo Sapiens
cucacuucucuggaauuuuaauccauuuaguu

SEQ ID NO: 338440 - RNA, 32 nt, Homo Sapiens
ccacucaaaaauaucuaaacugauagugggaa

SEQ ID NO: 338441 - RNA, 32 nt, Homo Sapiens
aucuagauuuucauauacaaucuguuaacuuu

SEQ ID NO: 338442 - RNA, 32 nt, Homo Sapiens
uuaagguauccaggugauuguuguguacagcc

SEQ ID NO: 338443 - RNA, 32 nt, Homo Sapiens
uggggguggcgcgcggccaggagcacgcaugg

SEQ ID NO: 338444 - RNA, 32 nt, Homo Sapiens
uauuugaaagguauucaugauguuguucucuu

SEQ ID NO: 338445 - RNA, 32 nt, Homo Sapiens
gcuguggagaggaggcgggcggggccggugga

SEQ ID NO: 338446 - RNA, 32 nt, Homo Sapiens
ucacgcggggggugggggucagaugcacugaa

SEQ ID NO: 338447 - RNA, 32 nt, Homo Sapiens
aggcgacgauggccgaggggcccgaggaagcc

SEQ ID NO: 338448 - RNA, 23 nt, Homo Sapiens
ggaggggccccggagcuccaccc

SEQ ID NO: 338449 - RNA, 32 nt, Homo Sapiens
acaaauuuucuuuucucaguuuuauaaacaca

SEQ ID NO: 338450 - RNA, 32 nt, Homo Sapiens
uuuucauacauuuucuaagaaacauuuauauu

SEQ ID NO: 338451 - RNA, 32 nt, Homo Sapiens
cuuuaaggcugcaauacaagcauucaguuccc

SEQ ID NO: 338452 - RNA, 32 nt, Homo Sapiens
cuuuggagaaaguggaguguggcgcuugguug

SEQ ID NO: 338453 - RNA, 32 nt, Homo Sapiens
uugugaaauuccaccauggcauacaguggcca

SEQ ID NO: 338454 - RNA, 32 nt, Homo Sapiens
ugcucuaaaaaguauuuuuuuauuuuccuuuu

SEQ ID NO: 338455 - RNA, 32 nt, Homo Sapiens
aaggaaagggcagucagacagcagccacaggg

SEQ ID NO: 338456 - RNA, 32 nt, Homo Sapiens
gguaugagccacaacacccagccuuuaacgug

SEQ ID NO: 338457 - RNA, 32 nt, Homo Sapiens
uauuuuacagacagcaaggaugcuucugagug

SEQ ID NO: 338458 - RNA, 32 nt, Homo Sapiens
ccggugggcggagcuuggaggcggcgggaacu

SEQ ID NO: 338459 - RNA, 32 nt, Homo Sapiens
cugcugaccccagccggcgccgagggcuugga

SEQ ID NO: 338460 - RNA, 32 nt, Homo Sapiens
cucacucugucgcgccagcuggagugcagugc

SEQ ID NO: 338461 - RNA, 32 nt, Homo Sapiens
ggugacaucauaggagcagcucgcuggccaga

SEQ ID NO: 338462 - RNA, 32 nt, Homo Sapiens
gcagcuggccccagcggucacuucugggccug

SEQ ID NO: 338463 - RNA, 32 nt, Homo Sapiens
guuuguuuaguuuuuucuuacuuuuaaauucc

SEQ ID NO: 338464 - RNA, 32 nt, Homo Sapiens
uggguguuagacaucaacucuacauuuauugc

SEQ ID NO: 338465 - RNA, 32 nt, Homo Sapiens
agguugucuuuuaaguuuuuuaaauauuuguu

SEQ ID NO: 338466 - RNA, 32 nt, Homo Sapiens
cguguaauauuuuaaaacuguuuaaugugaug

SEQ ID NO: 338467 - RNA, 32 nt, Homo Sapiens
ggccucuucuauccucaccauuccucagguau

SEQ ID NO: 338468 - RNA, 32 nt, Homo Sapiens
cgaacuguuguauaaauuuauuuacugcuagu

SEQ ID NO: 338469 - RNA, 32 nt, Homo Sapiens
gaggcgacgccgcgguccgcgcugaucuccag

SEQ ID NO: 338470 - RNA, 32 nt, Homo Sapiens
caaggaggggagaggaaagcugcccagggccc

SEQ ID NO: 338471 - RNA, 32 nt, Homo Sapiens
gccgaggaagguccggaggggccuagugccac

SEQ ID NO: 338472 - RNA, 32 nt, Homo Sapiens
gcaaaguagagcuguuauguuuuucuugaacu

SEQ ID NO: 338473 - RNA, 27 nt, Homo Sapiens
guuugggucuucuucagaaucccauac

SEQ ID NO: 338474 - RNA, 32 nt, Homo Sapiens
uggucuacauguuccaguaugauuccacccau

SEQ ID NO: 338475 - RNA, 32 nt, Homo Sapiens
aagcagggcaaauuuggugcugcaguucuggg

SEQ ID NO: 338476 - RNA, 32 nt, Homo Sapiens
caguuguggccacccaauuccuccucuucgaa

SEQ ID NO: 338477 - RNA, 32 nt, Homo Sapiens
ccuugcagcuggaagcacuuacgugggaacau

SEQ ID NO: 338478 - RNA, 32 nt, Homo Sapiens
ugggcgagcagcggcgggggcccgagggauuc

SEQ ID NO: 338479 - RNA, 32 nt, Homo Sapiens
gucucaggauacaaaaucaauguguaaaaauc

SEQ ID NO: 338480 - RNA, 32 nt, Homo Sapiens
cuuuauuuguguccuaaacauucuucagugaa

SEQ ID NO: 338481 - RNA, 32 nt, Homo Sapiens
ccacaugggucacgccuggugccuucacacgu

SEQ ID NO: 338482 - RNA, 32 nt, Homo Sapiens
agaaaaaaacaaaaacaaaaccccuuuacucu

SEQ ID NO: 338483 - RNA, 32 nt, Homo Sapiens
gggugaaaaauauuuuaaaacuuugaagauuu

SEQ ID NO: 338484 - RNA, 32 nt, Homo Sapiens
gugggccauggaccccaccuccucugcagccu

SEQ ID NO: 338485 - RNA, 32 nt, Homo Sapiens
gcgcagggucaggcgcggggcggcauggcggg

SEQ ID NO: 338486 - RNA, 32 nt, Homo Sapiens
uuuuccauauauugugauacaaacuuuugaau

SEQ ID NO: 338487 - RNA, 32 nt, Homo Sapiens
ccaauccagacccaccacagcuggagggccag

SEQ ID NO: 338488 - RNA, 30 nt, Homo Sapiens
acagagcugggcgagaacgcagcggcccgg

SEQ ID NO: 338489 - RNA, 32 nt, Homo Sapiens
acuuaguuuuaccuuuuuguuuauuuuuuguu

SEQ ID NO: 338490 - RNA, 32 nt, Homo Sapiens
cccucugaaaacaaaauggugcuuguaaugac

SEQ ID NO: 338491 - RNA, 32 nt, Homo Sapiens
acugggaccugccacccccagggagcuugcua

SEQ ID NO: 338492 - RNA, 32 nt, Homo Sapiens
uuccgcucccuggauauguccagucauccugc

SEQ ID NO: 338493 - RNA, 32 nt, Homo Sapiens
cgaugcguguguuugguuucccauugguucac

SEQ ID NO: 338494 - RNA, 32 nt, Homo Sapiens
cugcgcucgucccagcccacccgcccggugcg

SEQ ID NO: 338495 - RNA, 32 nt, Homo Sapiens
uguucccagaauuuauaugaagcaaaaagauc

SEQ ID NO: 338496 - RNA, 32 nt, Homo Sapiens
acacuguguuuucucaauuaaucucauugauu

SEQ ID NO: 338497 - RNA, 29 nt, Homo Sapiens
caccauggcagagcaugauuaccaugaag

SEQ ID NO: 338498 - RNA, 32 nt, Homo Sapiens
aaguaagugucugcagaugcaaguuuggaaga

SEQ ID NO: 338499 - RNA, 32 nt, Homo Sapiens
acucagggacggacagaacugugugagcccgc

SEQ ID NO: 338500 - RNA, 32 nt, Homo Sapiens
caggugggcuugcugcagggacacccccagug

SEQ ID NO: 338501 - RNA, 31 nt, Homo Sapiens
gugaccugucacugccucccgccgccuccug

SEQ ID NO: 338502 - RNA, 32 nt, Homo Sapiens
uugaaauaaguucuuaguuuuauauuauaccu

SEQ ID NO: 338503 - RNA, 32 nt, Homo Sapiens
acgacagccaccccggccguuuuccuuguucu

SEQ ID NO: 338504 - RNA, 32 nt, Homo Sapiens
gacagaguuucgcucuuguugcccagccuggc

SEQ ID NO: 338505 - RNA, 32 nt, Homo Sapiens
cuugaccuuguuuuccucucuucgcccugaca

SEQ ID NO: 338506 - RNA, 32 nt, Homo Sapiens
gaaggcagcugggacagggaaagggccaccac

SEQ ID NO: 338507 - RNA, 32 nt, Homo Sapiens
cauuuaugcugacaugccauccuuccagcaaa

SEQ ID NO: 338508 - RNA, 32 nt, Homo Sapiens
ucaucccuucaaugcccccucccuuucugaag

SEQ ID NO: 338509 - RNA, 32 nt, Homo Sapiens
caugacaguguuuaguuaauucuuguauaaau

SEQ ID NO: 338510 - RNA, 32 nt, Homo Sapiens
cagaugugcagguguuaaucuucucuaaaagc

SEQ ID NO: 338511 - RNA, 32 nt, Homo Sapiens
gcccuucguaaaauauucauuaaaguacauuc

SEQ ID NO: 338512 - RNA, 32 nt, Homo Sapiens
gaacuggguucaauuucuuuuuuaauuucuuc

SEQ ID NO: 338513 - RNA, 32 nt, Homo Sapiens
agccuguucucuccucucuccuccccagagca

SEQ ID NO: 338514 - RNA, 32 nt, Homo Sapiens
uggccaacggcgcggccgcgggcgcugagcgc

SEQ ID NO: 338515 - RNA, 32 nt, Homo Sapiens
auuugaccuccugagcacuuuagaagcugaaa

SEQ ID NO: 338516 - RNA, 32 nt, Homo Sapiens
gugaguccagcugaggcccacccagguggucc

SEQ ID NO: 338517 - RNA, 32 nt, Homo Sapiens
ucagccuggagguagggggcugucuuggucac

SEQ ID NO: 338518 - RNA, 32 nt, Homo Sapiens
ggcaagauggccgagucuacuucuucaagggc

SEQ ID NO: 338519 - RNA, 32 nt, Homo Sapiens
uugaguagugguaaguuuuguucaagcacaau

SEQ ID NO: 338520 - RNA, 32 nt, Homo Sapiens
auucauccgcuucagcaucccaaaguguuggg

SEQ ID NO: 338521 - RNA, 32 nt, Homo Sapiens
gucgggcaccagccagcguagcagggucggga

SEQ ID NO: 338522 - RNA, 32 nt, Homo Sapiens
acuugccucaccagcucuggcuuuucucuaac

SEQ ID NO: 338523 - RNA, 32 nt, Homo Sapiens
cgaggggcggggcagauggcgagggagcgggg

SEQ ID NO: 338524 - RNA, 32 nt, Homo Sapiens
cauucagaaagaugugagcugcuuacugauca

SEQ ID NO: 338525 - RNA, 32 nt, Homo Sapiens
gagagaagccggauggaugugcaugcagggag

SEQ ID NO: 338526 - RNA, 32 nt, Homo Sapiens
uucaaagggauacagagaaaagagagaaguag

SEQ ID NO: 338527 - RNA, 32 nt, Homo Sapiens
gaauaggggcuuuggaucaaaugguaucagcu

SEQ ID NO: 338528 - RNA, 32 nt, Homo Sapiens
acaucuggggcaauguagagaucugugcuuuu

SEQ ID NO: 338529 - RNA, 32 nt, Homo Sapiens
cagcaaugccauuucaguggcuucccagcucu

SEQ ID NO: 338530 - RNA, 32 nt, Homo Sapiens
uauuuuacaucauauaauuucugcccauaauu

SEQ ID NO: 338531 - RNA, 31 nt, Homo Sapiens
gauuaggcagaaucucucagagcugcuggac

SEQ ID NO: 338532 - RNA, 32 nt, Homo Sapiens
cuccaccccagcugccaagcccugggccagca

SEQ ID NO: 338533 - RNA, 32 nt, Homo Sapiens
cacaugccacuaugagcuuucagacuccagcu

SEQ ID NO: 338534 - RNA, 32 nt, Homo Sapiens
ggagaggccgcgugugggagcguguugaagau

SEQ ID NO: 338535 - RNA, 32 nt, Homo Sapiens
gcucuuucugccucugggcucauguaucugcg

SEQ ID NO: 338536 - RNA, 32 nt, Homo Sapiens
gagggaggguccggcuccccagcccuuccuua

SEQ ID NO: 338537 - RNA, 32 nt, Homo Sapiens
uuuauuuugaagagacuuacuaacuuacauau

SEQ ID NO: 338538 - RNA, 32 nt, Homo Sapiens
auauggagagccagcagggucugggaguucuc

SEQ ID NO: 338539 - RNA, 32 nt, Homo Sapiens
gccuggggaagaacaacgagauauauucgggu

SEQ ID NO: 338540 - RNA, 32 nt, Homo Sapiens
ucuaaagugucuucuuuuaauauaacacuagu

SEQ ID NO: 338541 - RNA, 32 nt, Homo Sapiens
ugccgaguguauuauaaagucguaggggagau

SEQ ID NO: 338542 - RNA, 32 nt, Homo Sapiens
aacuguacagugucuuuuuuuguauaguuaac

SEQ ID NO: 338543 - RNA, 32 nt, Homo Sapiens
ccuaaggaaggggccucuggggcugcccaccc

SEQ ID NO: 338544 - RNA, 32 nt, Homo Sapiens
ccugccugucucccacccuuucugccagggau

SEQ ID NO: 338545 - RNA, 32 nt, Homo Sapiens
aguggagcaccaagcaggcuccugggguuccc

SEQ ID NO: 338546 - RNA, 32 nt, Homo Sapiens
ggcaggucggagcucggagcugcugcuucugg

SEQ ID NO: 338547 - RNA, 32 nt, Homo Sapiens
ucuuauuuuucugcauggauuggcauaagacc

SEQ ID NO: 338548 - RNA, 32 nt, Homo Sapiens
gugaaggagauugguuaguccaaacuugcuaa

SEQ ID NO: 338549 - RNA, 32 nt, Homo Sapiens
aaaauuuaaaauugaaaugucuuaucauugcu

SEQ ID NO: 338550 - RNA, 32 nt, Homo Sapiens
ugagcacuuugagaccacuugguaccagggca

SEQ ID NO: 338551 - RNA, 32 nt, Homo Sapiens
caaaaaacucaaacgaauaaaaaagagaaagu

SEQ ID NO: 338552 - RNA, 32 nt, Homo Sapiens
caagggcaggugcggcagcucacaccuguaaa

SEQ ID NO: 338553 - RNA, 32 nt, Homo Sapiens
ugcagcaugaacugcaagcuccccucagccca

SEQ ID NO: 338554 - RNA, 32 nt, Homo Sapiens
aaaaauacauauauuuuuggaaaagcaugauc

SEQ ID NO: 338555 - RNA, 32 nt, Homo Sapiens
ccagggagccuggaagcagaugagauggggcc

SEQ ID NO: 338556 - RNA, 32 nt, Homo Sapiens
guugaggauuuuugcuuccauguucaucaugg

SEQ ID NO: 338557 - RNA, 32 nt, Homo Sapiens
ugugugcgcgcgcguguacguguggccccaca

SEQ ID NO: 338558 - RNA, 32 nt, Homo Sapiens
aagcagccgggcagaccccccuccccacaguc

SEQ ID NO: 338559 - RNA, 32 nt, Homo Sapiens
uuuuuuaaucauggugcuccaacaagcgggau

SEQ ID NO: 338560 - RNA, 27 nt, Homo Sapiens
caauccucucacuucagccuccugagu

SEQ ID NO: 338561 - RNA, 30 nt, Homo Sapiens
gacuacacgcggugccgcgcccugagaccg

SEQ ID NO: 338562 - RNA, 32 nt, Homo Sapiens
gccaggcgcaggugcuggaauaagaaugcuca

SEQ ID NO: 338563 - RNA, 32 nt, Homo Sapiens
augcacauauccugagaugaugccacuuugau

SEQ ID NO: 338564 - RNA, 32 nt, Homo Sapiens
uuagaugucgugaaacaaaaaccaucuauaac

SEQ ID NO: 338565 - RNA, 32 nt, Homo Sapiens
uacggcgugugggaccgacgggcccguccugc

SEQ ID NO: 338566 - RNA, 32 nt, Homo Sapiens
gaaaauuagugucuagaaauacucucccauua

SEQ ID NO: 338567 - RNA, 32 nt, Homo Sapiens
ccuggccaaaaucuauacuaaaaaaaauacaa

SEQ ID NO: 338568 - RNA, 31 nt, Homo Sapiens
cugcaccagcgcagccagcaggagccuggcc

SEQ ID NO: 338569 - RNA, 32 nt, Homo Sapiens
aaauuugguaaaauauaugcaacuauaaaaua

SEQ ID NO: 338570 - RNA, 32 nt, Homo Sapiens
cuugccaggaggaggaaugagagugauguugg

SEQ ID NO: 338571 - RNA, 32 nt, Homo Sapiens
gcaccugugcgcgcucugcuguugccggugag

SEQ ID NO: 338572 - RNA, 32 nt, Homo Sapiens
gagugaggcaaguucuccccagccccagcccu

SEQ ID NO: 338573 - RNA, 32 nt, Homo Sapiens
acugguacuuggagucuggacaucugaaacuu

SEQ ID NO: 338574 - RNA, 32 nt, Homo Sapiens
aauggaugaguggguggaugacagcacuuggg

SEQ ID NO: 338575 - RNA, 29 nt, Homo Sapiens
uaacuucauuugacuucucaauaaucuug

SEQ ID NO: 338576 - RNA, 32 nt, Homo Sapiens
aguagagaaagagauaaaaauaaaaguaucuc

SEQ ID NO: 338577 - RNA, 32 nt, Homo Sapiens
aaccauauuuccagagccacaaacaugaggac

SEQ ID NO: 338578 - RNA, 32 nt, Homo Sapiens
cggcugggggagccccgggcauggugugacgg

SEQ ID NO: 338579 - RNA, 32 nt, Homo Sapiens
ccugacuaaaauuugggagcauaugccuugcu

SEQ ID NO: 338580 - RNA, 32 nt, Homo Sapiens
cccagcccccgcagcccucuggcccccuccau

SEQ ID NO: 338581 - RNA, 32 nt, Homo Sapiens
caccggccaccagagggcgcugccgggcuacc

SEQ ID NO: 338582 - RNA, 32 nt, Homo Sapiens
uguugccugccagucgccaugagaacuuccua

SEQ ID NO: 338583 - RNA, 32 nt, Homo Sapiens
cccgucccgccagcgucugccaguccagccag

SEQ ID NO: 338584 - RNA, 32 nt, Homo Sapiens
agauucacaccagaaacacuagguguucauau

SEQ ID NO: 338585 - RNA, 32 nt, Homo Sapiens
ggaugggaaaaguuaacuggauuguucccacc

SEQ ID NO: 338586 - RNA, 32 nt, Homo Sapiens
gcagccgcaggugguggcgcgcgcccugugcu

SEQ ID NO: 338587 - RNA, 32 nt, Homo Sapiens
aggcuaccgcugucgggagugcgggcuguguu

SEQ ID NO: 338588 - RNA, 29 nt, Homo Sapiens
gauaugccauaauacugagaauggaggag

SEQ ID NO: 338589 - RNA, 32 nt, Homo Sapiens
cgccuguagucccagcacuuugggaggccgag

SEQ ID NO: 338590 - RNA, 32 nt, Homo Sapiens
aaaaauuuguucagaauaauuaaaagugaaca

SEQ ID NO: 338591 - RNA, 32 nt, Homo Sapiens
ucugucccugucaggaggcucugccaucgggc

SEQ ID NO: 338592 - RNA, 32 nt, Homo Sapiens
aaaucugcuugagggagggcagaauacuucau

SEQ ID NO: 338593 - RNA, 32 nt, Homo Sapiens
aguuuucauuucaagagucucccuuuaagagc

SEQ ID NO: 338594 - RNA, 32 nt, Homo Sapiens
ggaagucaguucguucucuccucuccucucuu

SEQ ID NO: 338595 - RNA, 32 nt, Homo Sapiens
augcuuuuuuuuuuuucuuuuuuagaaaacag

SEQ ID NO: 338596 - RNA, 32 nt, Homo Sapiens
gcagaaacgaguuuuccagaaaugagccgaug

SEQ ID NO: 338597 - RNA, 32 nt, Homo Sapiens
ucaugagaaaggauucuuaacaaauguuuaaa

SEQ ID NO: 338598 - RNA, 32 nt, Homo Sapiens
guaagcaauaauuuauauguaaaaauggccaa

SEQ ID NO: 338599 - RNA, 32 nt, Homo Sapiens
cauaagcccagaggauuuuagagcuucaugug

SEQ ID NO: 338600 - RNA, 32 nt, Homo Sapiens
uggcaggcauggcaagguugcauauguaauaa

SEQ ID NO: 338601 - RNA, 32 nt, Homo Sapiens
gguggccccuugugccagcaguggcuccucuc

SEQ ID NO: 338602 - RNA, 32 nt, Homo Sapiens
cuuauuauaaauggaaagaaaguuuuauuucc

SEQ ID NO: 338603 - RNA, 32 nt, Homo Sapiens
uacauuuucauuuauuuuggguaaaugccuug

SEQ ID NO: 338604 - RNA, 32 nt, Homo Sapiens
ccacuugugaauggguguauggagaacugaaa

SEQ ID NO: 338605 - RNA, 32 nt, Homo Sapiens
agauuucacucuccuuggugucgggcaugaca

SEQ ID NO: 338606 - RNA, 32 nt, Homo Sapiens
agguaaauuugaaaaauaaaaaugacuuggca

SEQ ID NO: 338607 - RNA, 32 nt, Homo Sapiens
ugcaagaaaaggaagagccguauucaaguccc

SEQ ID NO: 338608 - RNA, 32 nt, Homo Sapiens
ggccauggaagguucucugugcuccuccuacc

SEQ ID NO: 338609 - RNA, 32 nt, Homo Sapiens
uguggcccagucuccaggaucaacacagucag

SEQ ID NO: 338610 - RNA, 32 nt, Homo Sapiens
uuggggggugauaaaaguguucuaaaauugau

SEQ ID NO: 338611 - RNA, 32 nt, Homo Sapiens
ccacuggcaggagagagggaacugacccacuu

SEQ ID NO: 338612 - RNA, 32 nt, Homo Sapiens
cguuuggagggccgcggcaccccguccgaggc

SEQ ID NO: 338613 - RNA, 32 nt, Homo Sapiens
ugguuaacagagcucuguugucugguuuuagu

SEQ ID NO: 338614 - RNA, 32 nt, Homo Sapiens
gggcgggcugggaaggucuccuccccucacca

SEQ ID NO: 338615 - RNA, 32 nt, Homo Sapiens
gaagaucaagauuuaaaagaaagagcucaaag

SEQ ID NO: 338616 - RNA, 32 nt, Homo Sapiens
caaguggaaucacuggaaucccagaaacuucc

SEQ ID NO: 338617 - RNA, 32 nt, Homo Sapiens
uuagugccugugucccuggcaguguccagugu

SEQ ID NO: 338618 - RNA, 32 nt, Homo Sapiens
gggagacacccaggugcccagcccagcccucc

SEQ ID NO: 338619 - RNA, 31 nt, Homo Sapiens
ggcugucacaccugucugccccggcccccga

SEQ ID NO: 338620 - RNA, 32 nt, Homo Sapiens
gggcugcagcggaggcacuuuggaagaaugac

SEQ ID NO: 338621 - RNA, 32 nt, Homo Sapiens
uaucacagaaaagaacaaguggauuuuuaucu

SEQ ID NO: 338622 - RNA, 32 nt, Homo Sapiens
caccuaccccccacccccaguguggcugucug

SEQ ID NO: 338623 - RNA, 32 nt, Homo Sapiens
aaguguuuagauaauuucagauauauuccuaa

SEQ ID NO: 338624 - RNA, 32 nt, Homo Sapiens
uuucacagugguugguuuguuuuguuuuuaaa

SEQ ID NO: 338625 - RNA, 32 nt, Homo Sapiens
ugaagagaucguucuguaaaagguuuuuggaa

SEQ ID NO: 338626 - RNA, 32 nt, Homo Sapiens
gccuuuucaaggggaaggcauuggaucaacac

SEQ ID NO: 338627 - RNA, 32 nt, Homo Sapiens
gcaguccccgggucgcccagcccacgcgcgca

SEQ ID NO: 338628 - RNA, 32 nt, Homo Sapiens
caccucugccaccuccccugaugugcuggccu

SEQ ID NO: 338629 - RNA, 32 nt, Homo Sapiens
cccugguggccaagccugccccggccacucug

SEQ ID NO: 338630 - RNA, 32 nt, Homo Sapiens
cugucuccucacccacccccagcccuagcaua

SEQ ID NO: 338631 - RNA, 32 nt, Homo Sapiens
auuuaauagauuuguugacuagugcuugggca

SEQ ID NO: 338632 - RNA, 31 nt, Homo Sapiens
uugagagaaguaaaugucuguuguuauagcc

SEQ ID NO: 338633 - RNA, 32 nt, Homo Sapiens
gcagggcccgucuguccucugggggcugcuuc

SEQ ID NO: 338634 - RNA, 32 nt, Homo Sapiens
cgaggcagcucuuuccucucggggucugccag

SEQ ID NO: 338635 - RNA, 32 nt, Homo Sapiens
caggggggagacggggauuaggcaucccagag

SEQ ID NO: 338636 - RNA, 32 nt, Homo Sapiens
ccuggucgccuggcguucugauucgcccgccc

SEQ ID NO: 338637 - RNA, 32 nt, Homo Sapiens
gcuggccccucuagccuuuccgguccuuccug

SEQ ID NO: 338638 - RNA, 32 nt, Homo Sapiens
gagagcagccagcaggugcccggcagcucggc

SEQ ID NO: 338639 - RNA, 32 nt, Homo Sapiens
aaguuuuuccgcuuuuucaggaaggcgaccgg

SEQ ID NO: 338640 - RNA, 32 nt, Homo Sapiens
gaauucccuuucucuuuuuuuagugcaucguc

SEQ ID NO: 338641 - RNA, 32 nt, Homo Sapiens
agcauuccuuucucuucagugcccagcagcac

SEQ ID NO: 338642 - RNA, 32 nt, Homo Sapiens
uuaagcuuucuacuccaaguauuucacaaaug

SEQ ID NO: 338643 - RNA, 32 nt, Homo Sapiens
uccucccuccaagcagaccaccuguccccuuc

SEQ ID NO: 338644 - RNA, 32 nt, Homo Sapiens
aaccacaccaaaacccaucuguacaucaccau

SEQ ID NO: 338645 - RNA, 28 nt, Homo Sapiens
uuacaagucuguuuuauguguuuugauu

SEQ ID NO: 338646 - RNA, 32 nt, Homo Sapiens
aaacacaaaacugccaaaaucuuacucugcug

SEQ ID NO: 338647 - RNA, 32 nt, Homo Sapiens
aaaaaagaaaagacaguagcauauguucaugu

SEQ ID NO: 338648 - RNA, 32 nt, Homo Sapiens
uauuuauugucugacaaacucuuguguaccuu

SEQ ID NO: 338649 - RNA, 32 nt, Homo Sapiens
guuucuuaaaagacaaauacacaucccaaaug

SEQ ID NO: 338650 - RNA, 32 nt, Homo Sapiens
aauuuuguuuggacuucuuuuacucaugaucu

SEQ ID NO: 338651 - RNA, 32 nt, Homo Sapiens
ugauuucaaauuaaacuugcauuauguguuaa

SEQ ID NO: 338652 - RNA, 32 nt, Homo Sapiens
gcccuaccuccucauuuuagugaugaggaauc

SEQ ID NO: 338653 - RNA, 32 nt, Homo Sapiens
aucaugauguuuuggaguuauuacuguguauu

SEQ ID NO: 338654 - RNA, 32 nt, Homo Sapiens
cggcuugggcagcccgcgggcgccucagguag

SEQ ID NO: 338655 - RNA, 32 nt, Homo Sapiens
caaccucuagaguagcugggauuacaggcgca

SEQ ID NO: 338656 - RNA, 32 nt, Homo Sapiens
augaugguaaaauaaaagcauguuguucugcu

SEQ ID NO: 338657 - RNA, 32 nt, Homo Sapiens
uuuuuaaacuugaauuuuuuuaauuuacacuu

SEQ ID NO: 338658 - RNA, 32 nt, Homo Sapiens
caugcauguugaaauuuuuuagcaguacuuua

SEQ ID NO: 338659 - RNA, 32 nt, Homo Sapiens
ccuccugagcccacuucccccaucucaucaca

SEQ ID NO: 338660 - RNA, 32 nt, Homo Sapiens
uuuucuagguuuuuuccuuucauuuuauucuc

SEQ ID NO: 338661 - RNA, 32 nt, Homo Sapiens
ccuggcgccugcccugcccccgucacgggaug

SEQ ID NO: 338662 - RNA, 32 nt, Homo Sapiens
ggcaggcugguggguuaucaguccucacgugg

SEQ ID NO: 338663 - RNA, 27 nt, Homo Sapiens
cgccagcccugcuccagcccccguguc

SEQ ID NO: 338664 - RNA, 32 nt, Homo Sapiens
accaucacagugugucccuguccaguguuggu

SEQ ID NO: 338665 - RNA, 32 nt, Homo Sapiens
aaguuacccguccuggcguuucugggguucgc

SEQ ID NO: 338666 - RNA, 32 nt, Homo Sapiens
cugccggcccggagccgccgcgccgucagagc

SEQ ID NO: 338667 - RNA, 32 nt, Homo Sapiens
aaaauauauuuuauuucuuuuuuugguguugu

SEQ ID NO: 338668 - RNA, 32 nt, Homo Sapiens
cacugcacuccagcuugggugacagagcaaga

SEQ ID NO: 338669 - RNA, 32 nt, Homo Sapiens
cacugcacuccagccugggugauagagcaaga

SEQ ID NO: 338670 - RNA, 32 nt, Homo Sapiens
ggcgagcugucaugggaauuacugccaggaug

SEQ ID NO: 338671 - RNA, 32 nt, Homo Sapiens
agcagguuuguuucuuuuucuuuucuuuuuaa

SEQ ID NO: 338672 - RNA, 32 nt, Homo Sapiens
cggagccgcagccucugccgcagcgcccccgc

SEQ ID NO: 338673 - RNA, 32 nt, Homo Sapiens
ugggagugggagggauggggaaaauaaacuua

SEQ ID NO: 338674 - RNA, 32 nt, Homo Sapiens
cuacuuuuuguaucaggcuucaauuccauuau

SEQ ID NO: 338675 - RNA, 32 nt, Homo Sapiens
gggguaaacccauuuugaauauuagcauugcc

SEQ ID NO: 338676 - RNA, 32 nt, Homo Sapiens
accuacugcccccauucauccuggcuuuccac

SEQ ID NO: 338677 - RNA, 32 nt, Homo Sapiens
ugucuuuauuuuuucccugacaucagagguaa

SEQ ID NO: 338678 - RNA, 32 nt, Homo Sapiens
uucugucccacugagacgcagcugugugaaau

SEQ ID NO: 338679 - RNA, 32 nt, Homo Sapiens
aucccagcuucacuguuagaaacugcauuuuc

SEQ ID NO: 338680 - RNA, 32 nt, Homo Sapiens
ggaagaacuacugucgacagguccucugucug

SEQ ID NO: 338681 - RNA, 32 nt, Homo Sapiens
auuccuccacugggcugggccacggugcccgg

SEQ ID NO: 338682 - RNA, 32 nt, Homo Sapiens
gugcguggcuucuggggugggacccagagggg

SEQ ID NO: 338683 - RNA, 32 nt, Homo Sapiens
gcugccccugcgcucgucccagcccacccgcc

SEQ ID NO: 338684 - RNA, 32 nt, Homo Sapiens
uggggcacagaugccuggguugcugcugucca

SEQ ID NO: 338685 - RNA, 32 nt, Homo Sapiens
ugacucacugagcgccacuuguccuggaggcu

SEQ ID NO: 338686 - RNA, 32 nt, Homo Sapiens
aggcaggcagaucaccugaggucaggaguuug

SEQ ID NO: 338687 - RNA, 32 nt, Homo Sapiens
ucaguggguuuggagugcaagcacacaaccuu

SEQ ID NO: 338688 - RNA, 31 nt, Homo Sapiens
cagagcuggaacacucucugagaugccccuc

SEQ ID NO: 338689 - RNA, 32 nt, Homo Sapiens
gcuggccccucaggcuggcccccuccucucuu

SEQ ID NO: 338690 - RNA, 32 nt, Homo Sapiens
gccagagaauuaaagagaaccacaaagcugaa

SEQ ID NO: 338691 - RNA, 32 nt, Homo Sapiens
ggggcgccuggacuggggagggggcgggcacg

SEQ ID NO: 338692 - RNA, 32 nt, Homo Sapiens
aaaagcacauuuuaaaaaccagacaagauggc

SEQ ID NO: 338693 - RNA, 32 nt, Homo Sapiens
gugaggagaaaacaggaaacgggcuuucucug

SEQ ID NO: 338694 - RNA, 32 nt, Homo Sapiens
uuuuguuuuuuuccucuuucgaaugugcuuug

SEQ ID NO: 338695 - RNA, 31 nt, Homo Sapiens
aaaugguauugagcuguuuguuguauaugga

SEQ ID NO: 338696 - RNA, 32 nt, Homo Sapiens
guauuugucccuuucgcuuccacguccaaacc

SEQ ID NO: 338697 - RNA, 32 nt, Homo Sapiens
gacaacagccucuacaccaacgccaagggcag

SEQ ID NO: 338698 - RNA, 32 nt, Homo Sapiens
ugaaguuagagcacgucgccacagagcuugac

SEQ ID NO: 338699 - RNA, 32 nt, Homo Sapiens
uaauccacuucagaucugguugacucaucauc

SEQ ID NO: 338700 - RNA, 32 nt, Homo Sapiens
caccuuccccacccccuccccccaggcagaca

SEQ ID NO: 338701 - RNA, 32 nt, Homo Sapiens
ugacuugcuucuuuuugcauuguuaacuccau

SEQ ID NO: 338702 - RNA, 32 nt, Homo Sapiens
acuucugugugguggggggcccaggaugcugc

SEQ ID NO: 338703 - RNA, 32 nt, Homo Sapiens
cgcagcgguguugcaccucccucuccggcucu

SEQ ID NO: 338704 - RNA, 32 nt, Homo Sapiens
uccaaucacaguguuauguaguauuguucuau

SEQ ID NO: 338705 - RNA, 32 nt, Homo Sapiens
caagugugagagauaagggcuaaugaugacau

SEQ ID NO: 338706 - RNA, 32 nt, Homo Sapiens
ucguuuuugucacucagcauuguauaauccau

SEQ ID NO: 338707 - RNA, 32 nt, Homo Sapiens
aguccauagcccagccagaugagcuugcagcc

SEQ ID NO: 338708 - RNA, 32 nt, Homo Sapiens
cucacuccugucaucccaggacacuugaggcc

SEQ ID NO: 338709 - RNA, 32 nt, Homo Sapiens
gggcaagcugugcgacgugacccucaagauug

SEQ ID NO: 338710 - RNA, 32 nt, Homo Sapiens
cccagcagcuggauucucaggcugggccccuc

SEQ ID NO: 338711 - RNA, 32 nt, Homo Sapiens
caccugccgcagccuucguccgggagucgccc

SEQ ID NO: 338712 - RNA, 32 nt, Homo Sapiens
ucucaguagaagguccuagaaggucagaagac

SEQ ID NO: 338713 - RNA, 32 nt, Homo Sapiens
cuuccuccggugcucaccuggggccuccaucc

SEQ ID NO: 338714 - RNA, 32 nt, Homo Sapiens
ucauccccgcaccgccgcaucuccucgcugcc

SEQ ID NO: 338715 - RNA, 32 nt, Homo Sapiens
aacaacuuuuaaaagaaauaacuaaauuuuca

SEQ ID NO: 338716 - RNA, 32 nt, Homo Sapiens
cgcccgccgucucuggcgcgaacacuggaaug

SEQ ID NO: 338717 - RNA, 32 nt, Homo Sapiens
uguuuaguagaacgugauccggcaaccuauaa

SEQ ID NO: 338718 - RNA, 32 nt, Homo Sapiens
agccagccacgcugcgcccggcccugccccgg

SEQ ID NO: 338719 - RNA, 32 nt, Homo Sapiens
ugauuugcaacacuggccaaacaucagucauu

SEQ ID NO: 338720 - RNA, 32 nt, Homo Sapiens
guugccaaacaaaagccagucauguaacucua

SEQ ID NO: 338721 - RNA, 32 nt, Homo Sapiens
aaugucuuaucaaguucugucaauacuugccc

SEQ ID NO: 338722 - RNA, 32 nt, Homo Sapiens
uuuaagcaguacgugccuccaguuaccuccag

SEQ ID NO: 338723 - RNA, 32 nt, Homo Sapiens
gcugcaacuuggagaaccucccugcccugaaa

SEQ ID NO: 338724 - RNA, 32 nt, Homo Sapiens
cauugcuucugagggcagcugugugcccauga

SEQ ID NO: 338725 - RNA, 32 nt, Homo Sapiens
acacuggucaguauuucuuuuuuggggggaac

SEQ ID NO: 338726 - RNA, 32 nt, Homo Sapiens
aguaauguaugcuugcuguggaccucauuuaa

SEQ ID NO: 338727 - RNA, 32 nt, Homo Sapiens
ccgggcccugcgccucaggccugagaacuggg

SEQ ID NO: 338728 - RNA, 32 nt, Homo Sapiens
gaauugaagccuugaagaacuaccagaaggcc

SEQ ID NO: 338729 - RNA, 32 nt, Homo Sapiens
ccuuuccccuccccuccacuucuuggguaauc

SEQ ID NO: 338730 - RNA, 32 nt, Homo Sapiens
ggauggcucuggccucgguccucccccaaccc

SEQ ID NO: 338731 - RNA, 32 nt, Homo Sapiens
ggauauacggauuuuucucuuugugcaggcuu

SEQ ID NO: 338732 - RNA, 32 nt, Homo Sapiens
cccaaggccguuggcugcagcguucaccaucu

SEQ ID NO: 338733 - RNA, 32 nt, Homo Sapiens
acacauaagaugcuucccacucuagcuuccau

SEQ ID NO: 338734 - RNA, 32 nt, Homo Sapiens
uguaucauggaaguagcugcuugcuuguacug

SEQ ID NO: 338735 - RNA, 32 nt, Homo Sapiens
uguugaacuauauuuggagaaaacagccacug

SEQ ID NO: 338736 - RNA, 32 nt, Homo Sapiens
ccuucuugucuccugcagcaagcccuacauga

SEQ ID NO: 338737 - RNA, 32 nt, Homo Sapiens
auuugagaugacucaauauuacaaccucuucu

SEQ ID NO: 338738 - RNA, 32 nt, Homo Sapiens
ucuggauaacucacuuaauauuaaauuaaaga

SEQ ID NO: 338739 - RNA, 32 nt, Homo Sapiens
ggucugcggucagucggacgcggcgcuggaaa

SEQ ID NO: 338740 - RNA, 32 nt, Homo Sapiens
gcagcuaccuggguaaggacuugccagagaac

SEQ ID NO: 338741 - RNA, 32 nt, Homo Sapiens
ggugguccugggagcggccccggcgcccgaag

SEQ ID NO: 338742 - RNA, 32 nt, Homo Sapiens
caggaaaacgagccuaagaggacuuucauacc

SEQ ID NO: 338743 - RNA, 32 nt, Homo Sapiens
auaguaucaacugaaauguuuccauuccguug

SEQ ID NO: 338744 - RNA, 32 nt, Homo Sapiens
uguuuccugccaaauaaauguacaauagcaau

SEQ ID NO: 338745 - RNA, 32 nt, Homo Sapiens
ccuaaauuuuaugacuccauggaguucccgua

SEQ ID NO: 338746 - RNA, 32 nt, Homo Sapiens
uuucuguagucacugguccacucuguauugcu

SEQ ID NO: 338747 - RNA, 32 nt, Homo Sapiens
ugccagccucgaagccucuuugcugaccugga

SEQ ID NO: 338748 - RNA, 32 nt, Homo Sapiens
ucccuguucccccuccccaguuuuccaaagug

SEQ ID NO: 338749 - RNA, 32 nt, Homo Sapiens
ggcagccaaucucuguggccaagcuccagcca

SEQ ID NO: 338750 - RNA, 32 nt, Homo Sapiens
ucuccuaucaauuuauaguauuaucaucagua

SEQ ID NO: 338751 - RNA, 32 nt, Homo Sapiens
gugcccagauguugcuuucuccauuuauuuuu

SEQ ID NO: 338752 - RNA, 32 nt, Homo Sapiens
ucguguaagcaaguacauaaggacccuccuuu

SEQ ID NO: 338753 - RNA, 32 nt, Homo Sapiens
gccaggggcugccgucgccgccgucggggagu

SEQ ID NO: 338754 - RNA, 32 nt, Homo Sapiens
agacagcccuguagccuaguaguucaaagcgc

SEQ ID NO: 338755 - RNA, 32 nt, Homo Sapiens
caguucucucccuuccucucuccuuauagaca

SEQ ID NO: 338756 - RNA, 32 nt, Homo Sapiens
uuccucugccaguccugcuccccucaccuucc

SEQ ID NO: 338757 - RNA, 32 nt, Homo Sapiens
cgacugucuccucugccuuuuguuuuucagcu

SEQ ID NO: 338758 - RNA, 32 nt, Homo Sapiens
cucuacagcacaaccucuugaggguggacagg

SEQ ID NO: 338759 - RNA, 32 nt, Homo Sapiens
gaggcgcggagcaugcggagcggcgccccggg

SEQ ID NO: 338760 - RNA, 32 nt, Homo Sapiens
ugcagagaauccaguaaagggaauguaucaug

SEQ ID NO: 338761 - RNA, 32 nt, Homo Sapiens
gucuucucagccgggacgccagcgguucugau

SEQ ID NO: 338762 - RNA, 32 nt, Homo Sapiens
ccguggcccugccuauacucugguggccuggu

SEQ ID NO: 338763 - RNA, 32 nt, Homo Sapiens
uauucagaauaauaaacucaagcuggagaaau

SEQ ID NO: 338764 - RNA, 32 nt, Homo Sapiens
cuugucuucccguuccuccccgcagugguuuu

SEQ ID NO: 338765 - RNA, 32 nt, Homo Sapiens
uugcuuaaacaaagugacuguuuggcuuauaa

SEQ ID NO: 338766 - RNA, 32 nt, Homo Sapiens
ccggggcugcagagggcggcugggguuccguc

SEQ ID NO: 338767 - RNA, 32 nt, Homo Sapiens
gagcgcgcgggccgccaugucguacaugcucc

SEQ ID NO: 338768 - RNA, 32 nt, Homo Sapiens
agacagugacagauauaauuuacuacauauau

SEQ ID NO: 338769 - RNA, 32 nt, Homo Sapiens
ccuggggggaggaggggcuggcacugagauuu

SEQ ID NO: 338770 - RNA, 32 nt, Homo Sapiens
aucuaucuaaauauuauaucaacuguguagac

SEQ ID NO: 338771 - RNA, 32 nt, Homo Sapiens
gugcaacaagcacagauguccccauugucucc

SEQ ID NO: 338772 - RNA, 32 nt, Homo Sapiens
gucuccuaaaauugaucuauggauuuaauacc

SEQ ID NO: 338773 - RNA, 32 nt, Homo Sapiens
auaugcuugaaaaugagaaaacacgaaccuca

SEQ ID NO: 338774 - RNA, 32 nt, Homo Sapiens
cccaugacuagguggauaguacuccuuguacc

SEQ ID NO: 338775 - RNA, 32 nt, Homo Sapiens
agccuggccaacauggcaaaaccccgucucua

SEQ ID NO: 338776 - RNA, 32 nt, Homo Sapiens
ugucuacagauuccaacuuuaauagcaagccu

SEQ ID NO: 338777 - RNA, 32 nt, Homo Sapiens
aggaagucacuucucccuccaaugcaccaucu

SEQ ID NO: 338778 - RNA, 32 nt, Homo Sapiens
uuuuuccuucauucuauuaauguaauagacau

SEQ ID NO: 338779 - RNA, 32 nt, Homo Sapiens
cugcgguugucaaggauucagagcagauguga

SEQ ID NO: 338780 - RNA, 32 nt, Homo Sapiens
uucaucugcagucuccauucucuuuuugcuga

SEQ ID NO: 338781 - RNA, 32 nt, Homo Sapiens
cuucuccuuucugcugaccagaaugugagcau

SEQ ID NO: 338782 - RNA, 32 nt, Homo Sapiens
ggcaaaguggaccuggcaaccacaagacccuc

SEQ ID NO: 338783 - RNA, 32 nt, Homo Sapiens
accaagugucccugccucuccugccucccuuc

SEQ ID NO: 338784 - RNA, 30 nt, Homo Sapiens
ggucuguggggcggacucuggccaucaugu

SEQ ID NO: 338785 - RNA, 31 nt, Homo Sapiens
aauuggagggcggugaugugaucucggcuua

SEQ ID NO: 338786 - RNA, 32 nt, Homo Sapiens
ucagcagcccccaggaccggggaggcacaggu

SEQ ID NO: 338787 - RNA, 32 nt, Homo Sapiens
uguuaaaagacuuuaucuccaugaguauacug

SEQ ID NO: 338788 - RNA, 32 nt, Homo Sapiens
gaacccaaacuucccagagaguaucugagaac

SEQ ID NO: 338789 - RNA, 32 nt, Homo Sapiens
agagcaaauaaucuaaagguuuugguuuugug

SEQ ID NO: 338790 - RNA, 32 nt, Homo Sapiens
uuauucauauucuguuggaagcuuguuuucca

SEQ ID NO: 338791 - RNA, 32 nt, Homo Sapiens
uuaccuauuuuguaugcgacuccaccuccgca

SEQ ID NO: 338792 - RNA, 32 nt, Homo Sapiens
cucagaaaacuauuuuugucuccaucuuuuuu

SEQ ID NO: 338793 - RNA, 32 nt, Homo Sapiens
cucauugcuuggauuuaauuaaucggacuuuu

SEQ ID NO: 338794 - RNA, 32 nt, Homo Sapiens
guuggaauagagagcauaauagguacaaccua

SEQ ID NO: 338795 - RNA, 32 nt, Homo Sapiens
cuucaccggcugccacuccccggagugcucug

SEQ ID NO: 338796 - RNA, 32 nt, Homo Sapiens
gggaccugggccuggcccguguguguccucgg

SEQ ID NO: 338797 - RNA, 32 nt, Homo Sapiens
caguuucggcugcauuucuucacgcaccucgg

SEQ ID NO: 338798 - RNA, 32 nt, Homo Sapiens
gauuccugccccccuuucugcucacacaauug

SEQ ID NO: 338799 - RNA, 32 nt, Homo Sapiens
uuccugucuuucuggcccuuucuggaccagau

SEQ ID NO: 338800 - RNA, 32 nt, Homo Sapiens
acacauucugguuuuuguuuucuuccagucuu

SEQ ID NO: 338801 - RNA, 32 nt, Homo Sapiens
gccaggccacacuccaggagcuagcaaagcac

SEQ ID NO: 338802 - RNA, 32 nt, Homo Sapiens
cgauggcuuccccaggcccaggucuugccuuc

SEQ ID NO: 338803 - RNA, 32 nt, Homo Sapiens
uuguugucucugggguguggugucacagcacu

SEQ ID NO: 338804 - RNA, 32 nt, Homo Sapiens
ggaacagaggaaauaugucaaaaaauaaccug

SEQ ID NO: 338805 - RNA, 32 nt, Homo Sapiens
uuuggcacuccauuacguggaggcagcacagu

SEQ ID NO: 338806 - RNA, 32 nt, Homo Sapiens
cugguggaaagauagagauuguuuuuagaggu

SEQ ID NO: 338807 - RNA, 32 nt, Homo Sapiens
ucuuugaggccacugagugacaucaguuagag

SEQ ID NO: 338808 - RNA, 32 nt, Homo Sapiens
guuuguggcucucagcucucaaggcuguuuuc

SEQ ID NO: 338809 - RNA, 32 nt, Homo Sapiens
gccucgaccccauggcgcugcagacgcugcag

SEQ ID NO: 338810 - RNA, 32 nt, Homo Sapiens
caccagcagcgcccgggcggaugcagcgagcc

SEQ ID NO: 338811 - RNA, 32 nt, Homo Sapiens
aaggaaauauuuucaggaaguuuuucucaacc

SEQ ID NO: 338812 - RNA, 32 nt, Homo Sapiens
ggcacugggacuucaacccagcccaucggugg

SEQ ID NO: 338813 - RNA, 32 nt, Homo Sapiens
cugggccggcugagguggcugcgguacacggc

SEQ ID NO: 338814 - RNA, 32 nt, Homo Sapiens
cggccuagguguuucuuggggguguugggagg

SEQ ID NO: 338815 - RNA, 32 nt, Homo Sapiens
uggcuuucccccucuuucccacggagcccgag

SEQ ID NO: 338816 - RNA, 32 nt, Homo Sapiens
aucaaaaagaugacuacauuaagggaaaaugu

SEQ ID NO: 338817 - RNA, 32 nt, Homo Sapiens
acagaagccagaccuggguuggguccuggcga

SEQ ID NO: 338818 - RNA, 32 nt, Homo Sapiens
uccgagcauccgccgccucuuuucugcugggu

SEQ ID NO: 338819 - RNA, 32 nt, Homo Sapiens
uaaguucagggacacgcaaguuccucggguca

SEQ ID NO: 338820 - RNA, 32 nt, Homo Sapiens
cuaagacaccugcaauaaaguguagcacccug

SEQ ID NO: 338821 - RNA, 32 nt, Homo Sapiens
uuaggauugaagucacugaccauuccggcuau

SEQ ID NO: 338822 - RNA, 32 nt, Homo Sapiens
ccuguacaugcaaugccaggacaagagcacau

SEQ ID NO: 338823 - RNA, 32 nt, Homo Sapiens
cuccaggucauaaggaugagauauauuugggg

SEQ ID NO: 338824 - RNA, 32 nt, Homo Sapiens
aacccggccguggccuggcagcuccgccuccc

SEQ ID NO: 338825 - RNA, 32 nt, Homo Sapiens
agaucaccuuggcaacuccagggcgcuccguu

SEQ ID NO: 338826 - RNA, 32 nt, Homo Sapiens
acccuaccgagcggggaccccaggggaaggca

SEQ ID NO: 338827 - RNA, 32 nt, Homo Sapiens
gguuaccuccgaaacugagaucuccuagccug

SEQ ID NO: 338828 - RNA, 32 nt, Homo Sapiens
aucauucauucaagggcuaaauuuauauuuuu

SEQ ID NO: 338829 - RNA, 32 nt, Homo Sapiens
aucgcccggcccggccgcgcccgcggaaccag

SEQ ID NO: 338830 - RNA, 32 nt, Homo Sapiens
acuucaguuuaucagucuguaaccugcaaaug

SEQ ID NO: 338831 - RNA, 32 nt, Homo Sapiens
uuggaugcagaauaauaauuauaguaggggca

SEQ ID NO: 338832 - RNA, 32 nt, Homo Sapiens
uucauuguugccccuuaacaguuuuuccugag

SEQ ID NO: 338833 - RNA, 32 nt, Homo Sapiens
uugcggaggcgcccagaagagcauccaacacg

SEQ ID NO: 338834 - RNA, 32 nt, Homo Sapiens
ccaauuugacuguuaauuuaugcugagguaua

SEQ ID NO: 338835 - RNA, 32 nt, Homo Sapiens
aagccccuaccuucuuacuuucugguuuguug

SEQ ID NO: 338836 - RNA, 32 nt, Homo Sapiens
gcugaaaugcccaaaaugcaaaugaacuagac

SEQ ID NO: 338837 - RNA, 32 nt, Homo Sapiens
cucacuaugaaguggggaugacuguggcuuca

SEQ ID NO: 338838 - RNA, 32 nt, Homo Sapiens
uccaccagucugaccucaguccucccucccuc

SEQ ID NO: 338839 - RNA, 32 nt, Homo Sapiens
caucgcuugcacucaccuccagcccauacauc

SEQ ID NO: 338840 - RNA, 32 nt, Homo Sapiens
aauugaucucguagaauuaucuuaauaaaaua

SEQ ID NO: 338841 - RNA, 31 nt, Homo Sapiens
ugcggggcgggcuccgcaggcccagccgccu

SEQ ID NO: 338842 - RNA, 32 nt, Homo Sapiens
uccuucaucaugaucuaaauaaaggcagauau

SEQ ID NO: 338843 - RNA, 32 nt, Homo Sapiens
cugcagugggucuccgugucuaucaaauaccu

SEQ ID NO: 338844 - RNA, 32 nt, Homo Sapiens
ugcuacccaagccaguguccccgacgacagca

SEQ ID NO: 338845 - RNA, 32 nt, Homo Sapiens
cauuugucuauccuggccccagcaggaugacc

SEQ ID NO: 338846 - RNA, 32 nt, Homo Sapiens
uuauauagaaucugaguucaugcugaauacuu

SEQ ID NO: 338847 - RNA, 32 nt, Homo Sapiens
uauccggauuuuuuuucuuuuacauuaguuuu

SEQ ID NO: 338848 - RNA, 32 nt, Homo Sapiens
agucucucugccccuuugcacaugcugcaccc

SEQ ID NO: 338849 - RNA, 32 nt, Homo Sapiens
acuuuggguggccaaggcgggcagaugacuug

SEQ ID NO: 338850 - RNA, 32 nt, Homo Sapiens
ccagugguucccucucugcccggauucugagc

SEQ ID NO: 338851 - RNA, 32 nt, Homo Sapiens
aaagaaaucuucauuuauucuucuuuuccaau

SEQ ID NO: 338852 - RNA, 32 nt, Homo Sapiens
aacagcacauccucgagccagcccaggccccc

SEQ ID NO: 338853 - RNA, 32 nt, Homo Sapiens
ucacccggcgcgcgccuuucgcagagggaagg

SEQ ID NO: 338854 - RNA, 32 nt, Homo Sapiens
gcacccgcucugcgcugcacccucuuaacgcu

SEQ ID NO: 338855 - RNA, 32 nt, Homo Sapiens
cucugugauuaugcauuuguaacuguguucuu

SEQ ID NO: 338856 - RNA, 32 nt, Homo Sapiens
cccacuucuugucaucuucucauccucugcgc

SEQ ID NO: 338857 - RNA, 32 nt, Homo Sapiens
ucacauuuucuuucuucucggcaaaauggacc

SEQ ID NO: 338858 - RNA, 32 nt, Homo Sapiens
ucaucaucuuuucuaguucucuagccagaagg

SEQ ID NO: 338859 - RNA, 32 nt, Homo Sapiens
ucuguuagacauuguucagcccacuuguagaa

SEQ ID NO: 338860 - RNA, 32 nt, Homo Sapiens
cagagcugcaagcaaagggcgguggggccugg

SEQ ID NO: 338861 - RNA, 32 nt, Homo Sapiens
ugccauaaaggaaacuaagugcccaucaaaga

SEQ ID NO: 338862 - RNA, 32 nt, Homo Sapiens
cacaaggaucuuuauaagagaaugagguagga

SEQ ID NO: 338863 - RNA, 32 nt, Homo Sapiens
ucugagcuagcaccacccucagccaggcuaca

SEQ ID NO: 338864 - RNA, 32 nt, Homo Sapiens
gccagggcguucgggaggagcagcacgcaagu

SEQ ID NO: 338865 - RNA, 32 nt, Homo Sapiens
cccucgggguggaggucuuugguuucauaaga

SEQ ID NO: 338866 - RNA, 31 nt, Homo Sapiens
cccaucucucggagaaacccuguccacccaa

SEQ ID NO: 338867 - RNA, 32 nt, Homo Sapiens
cauuuggguucaguaacuacaguuuucaccau

SEQ ID NO: 338868 - RNA, 32 nt, Homo Sapiens
ugugaaggggagagggcgagguuccuuagugg

SEQ ID NO: 338869 - RNA, 32 nt, Homo Sapiens
guccacgugucugcgaccuguguggaguguca

SEQ ID NO: 338870 - RNA, 32 nt, Homo Sapiens
ccgaucagccugaguuccgccagcgccuacuu

SEQ ID NO: 338871 - RNA, 32 nt, Homo Sapiens
gggcggaggcagcugaggcgcuucuuuccggg

SEQ ID NO: 338872 - RNA, 32 nt, Homo Sapiens
agagccuucuauucugagaaucccaggggccc

SEQ ID NO: 338873 - RNA, 32 nt, Homo Sapiens
agacagaagucaggugucaucaucagacuugc

SEQ ID NO: 338874 - RNA, 32 nt, Homo Sapiens
cacagagcuccacagcaaguugugccaaaggg

SEQ ID NO: 338875 - RNA, 32 nt, Homo Sapiens
aagagguaagagaggcuugcugauuggauggu

SEQ ID NO: 338876 - RNA, 32 nt, Homo Sapiens
uuuaaauuacuacuccaugcuuuucuucuucu

SEQ ID NO: 338877 - RNA, 32 nt, Homo Sapiens
uuucgcgucuccccuuucccuccccagcccgg

SEQ ID NO: 338878 - RNA, 32 nt, Homo Sapiens
aaaauauuguuuucuuuuuugcuuccuguccu

SEQ ID NO: 338879 - RNA, 30 nt, Homo Sapiens
ggcacgagggcggcggcggcgguagaggcg

SEQ ID NO: 338880 - RNA, 32 nt, Homo Sapiens
agccagggccagggcugcagccugaggcucag

SEQ ID NO: 338881 - RNA, 32 nt, Homo Sapiens
uacaaagcacuacauucuuuuaucuuuuuugc

SEQ ID NO: 338882 - RNA, 32 nt, Homo Sapiens
cccgcuagccuggccugggcaaauggagcgag

SEQ ID NO: 338883 - RNA, 32 nt, Homo Sapiens
uccccagaccucuggucccagggcuggcuggg

SEQ ID NO: 338884 - RNA, 32 nt, Homo Sapiens
ugacugggcaacacugcaggacagucaaggug

SEQ ID NO: 338885 - RNA, 32 nt, Homo Sapiens
gccaguaguugaaaauauuuuacaauaggcca

SEQ ID NO: 338886 - RNA, 32 nt, Homo Sapiens
agcugggugcgguggcaggugccuguaguccc

SEQ ID NO: 338887 - RNA, 32 nt, Homo Sapiens
acuggacaaccuggaauguggcgacauccuag

SEQ ID NO: 338888 - RNA, 32 nt, Homo Sapiens
accgaggaaaggaaaagugguaaggaaguggg

SEQ ID NO: 338889 - RNA, 32 nt, Homo Sapiens
gugaagcaucaccagcagauccuuguuuugac

SEQ ID NO: 338890 - RNA, 32 nt, Homo Sapiens
aaagugauccugaagaauacagcuguggaauu

SEQ ID NO: 338891 - RNA, 32 nt, Homo Sapiens
ucccaaaccaaaccaaucauggaucuucccuu

SEQ ID NO: 338892 - RNA, 32 nt, Homo Sapiens
uugcaguguagcaggugccauccuucaagcca

SEQ ID NO: 338893 - RNA, 32 nt, Homo Sapiens
uggaugaccaacacugcacucaaugagccagc

SEQ ID NO: 338894 - RNA, 31 nt, Homo Sapiens
cuuuccacaaagagcugacugauauuugaag

SEQ ID NO: 338895 - RNA, 32 nt, Homo Sapiens
uccgccgcgggacgccucaucccgcgggagag

SEQ ID NO: 338896 - RNA, 32 nt, Homo Sapiens
uaaggaccccaaagucaggauguuguuugauc

SEQ ID NO: 338897 - RNA, 32 nt, Homo Sapiens
acuucugacuggccucccaguuaugccuccuc

SEQ ID NO: 338898 - RNA, 32 nt, Homo Sapiens
ggcagcacagaaaaauaaaguuaaacaagacu

SEQ ID NO: 338899 - RNA, 32 nt, Homo Sapiens
ugugcacaaccaccaugugucuucuaggugcu

SEQ ID NO: 338900 - RNA, 32 nt, Homo Sapiens
accgccgcccggccguuuucucuucuuccucu

SEQ ID NO: 338901 - RNA, 32 nt, Homo Sapiens
ugaccuuggaggaugccuguggccuugugaua

SEQ ID NO: 338902 - RNA, 32 nt, Homo Sapiens
ggcuuauguuuuaucuuacucuaggccauguu

SEQ ID NO: 338903 - RNA, 31 nt, Homo Sapiens
cacucacacuacugccugucccggcaucucu

SEQ ID NO: 338904 - RNA, 32 nt, Homo Sapiens
gcucaguccagauguccccauccaccuugggc

SEQ ID NO: 338905 - RNA, 32 nt, Homo Sapiens
gguacacacuguugcgaaggccguucugcacu

SEQ ID NO: 338906 - RNA, 32 nt, Homo Sapiens
uuucaucaauucuuaaauuucuuaaccuaggc

SEQ ID NO: 338907 - RNA, 32 nt, Homo Sapiens
ucaccuuguuuuuauaugcaacacaagccugu

SEQ ID NO: 338908 - RNA, 32 nt, Homo Sapiens
ugcuucuaucacacuccagugcuuuuaagcag

SEQ ID NO: 338909 - RNA, 32 nt, Homo Sapiens
ggaggcagaaccagcucuuuggugccagcugu

SEQ ID NO: 338910 - RNA, 32 nt, Homo Sapiens
uuuugugguguaaaaaacaaauuauggugcaa

SEQ ID NO: 338911 - RNA, 32 nt, Homo Sapiens
uccggaagauguugcuaauguauuuuacuuca

SEQ ID NO: 338912 - RNA, 32 nt, Homo Sapiens
cucugggcaacguccauucagggugcggcaug

SEQ ID NO: 338913 - RNA, 32 nt, Homo Sapiens
ggaggcccugucucuggugguuuuuaggauug

SEQ ID NO: 338914 - RNA, 32 nt, Homo Sapiens
gacguccuccaccaaccacgggcuccaggacc

SEQ ID NO: 338915 - RNA, 32 nt, Homo Sapiens
cucgucccauccccacguccccucaucccguc

SEQ ID NO: 338916 - RNA, 32 nt, Homo Sapiens
cccggcaccauucucccuucucucuuuucuuc

SEQ ID NO: 338917 - RNA, 32 nt, Homo Sapiens
gcgcagcuccagcucugucacucgcgcccuuc

SEQ ID NO: 338918 - RNA, 32 nt, Homo Sapiens
uggauggcagccuuacgucaguaguauaugcc

SEQ ID NO: 338919 - RNA, 32 nt, Homo Sapiens
cacaaauuuccacugguaaccaaagaguaccu

SEQ ID NO: 338920 - RNA, 32 nt, Homo Sapiens
ucuucuaguggguuuaauguuuagucagugua

SEQ ID NO: 338921 - RNA, 32 nt, Homo Sapiens
uucuccaccaaaacccucuacuucagaauuuu

SEQ ID NO: 338922 - RNA, 32 nt, Homo Sapiens
cagcaacagaugauugagaaagaaauguaaag

SEQ ID NO: 338923 - RNA, 32 nt, Homo Sapiens
aaaggcagaacuaaaaagugugucauuuuauu

SEQ ID NO: 338924 - RNA, 32 nt, Homo Sapiens
auugaggaaaucagcuaagaaaauggacuuua

SEQ ID NO: 338925 - RNA, 32 nt, Homo Sapiens
uaaugaugaugaugauggugguguugauggug

SEQ ID NO: 338926 - RNA, 32 nt, Homo Sapiens
accauauuaucccagacauguucuuucaagcc

SEQ ID NO: 338927 - RNA, 32 nt, Homo Sapiens
ugucucccccacaacccuccccuggcccucug

SEQ ID NO: 338928 - RNA, 32 nt, Homo Sapiens
auaaauaauauaaagcacuuagaacagugccu

SEQ ID NO: 338929 - RNA, 32 nt, Homo Sapiens
cccgcaauuggaaaggauauauguggcaauau

SEQ ID NO: 338930 - RNA, 32 nt, Homo Sapiens
uuauguacgagaucugucucugcuguuuaacu

SEQ ID NO: 338931 - RNA, 32 nt, Homo Sapiens
acuaaguuugcaacauuuauugagaucuaagu

SEQ ID NO: 338932 - RNA, 32 nt, Homo Sapiens
guuaaagagcgcccaauacauacauguuuuug

SEQ ID NO: 338933 - RNA, 29 nt, Homo Sapiens
ucaccugugacuuugagucggguuucugc

SEQ ID NO: 338934 - RNA, 32 nt, Homo Sapiens
uugguugggcuuugauucucacugcuuuguga

SEQ ID NO: 338935 - RNA, 32 nt, Homo Sapiens
cccacuggaaaagggaggauaccacauacccu

SEQ ID NO: 338936 - RNA, 32 nt, Homo Sapiens
cuccugcggcagggcagucgcugcuggcucug

SEQ ID NO: 338937 - RNA, 32 nt, Homo Sapiens
gcaggugcagcgguggggaguggcucuuucug

SEQ ID NO: 338938 - RNA, 32 nt, Homo Sapiens
auagaaacguguauauuuuuuaugaaacauua

SEQ ID NO: 338939 - RNA, 32 nt, Homo Sapiens
aacuguaaugacacguacacuaaugaagaauu

SEQ ID NO: 338940 - RNA, 32 nt, Homo Sapiens
ccccaaagugauuggauuggcaugaggaaugg

SEQ ID NO: 338941 - RNA, 32 nt, Homo Sapiens
cucacugcacccuccgccucucggguucaagc

SEQ ID NO: 338942 - RNA, 32 nt, Homo Sapiens
cccgcuccaugccucgcggcacugccgguguc

SEQ ID NO: 338943 - RNA, 32 nt, Homo Sapiens
gauuguugcauucauuccuccccaccccccau

SEQ ID NO: 338944 - RNA, 32 nt, Homo Sapiens
aaagcauauaaaauacaaggugaaagcccccc

SEQ ID NO: 338945 - RNA, 32 nt, Homo Sapiens
aguuuaguaccuuuucgauaucaaaaauucac

SEQ ID NO: 338946 - RNA, 32 nt, Homo Sapiens
uauuuucuucucuagacuuacuccaucucucc

SEQ ID NO: 338947 - RNA, 32 nt, Homo Sapiens
uccccacgaugauaucuauauauguaucuaca

SEQ ID NO: 338948 - RNA, 32 nt, Homo Sapiens
aggugaauguggauauaauuucccucuucuga

SEQ ID NO: 338949 - RNA, 32 nt, Homo Sapiens
aggggccccacuucuuauccacccuucccucu

SEQ ID NO: 338950 - RNA, 32 nt, Homo Sapiens
cagcauuuggugcuuuguuuuccuuuccguuu

SEQ ID NO: 338951 - RNA, 32 nt, Homo Sapiens
cggaggagggagaggcugagggugggguggcu

SEQ ID NO: 338952 - RNA, 32 nt, Homo Sapiens
caaaucucacauuaaccuugucuuugucccca

SEQ ID NO: 338953 - RNA, 32 nt, Homo Sapiens
aaauacggcuuuuccaaugaugaaauauaauc

SEQ ID NO: 338954 - RNA, 32 nt, Homo Sapiens
guagugaagauccauugcauuuagaaaaauac

SEQ ID NO: 338955 - RNA, 32 nt, Homo Sapiens
uugcucuaguucugugaggaaugccauuggua

SEQ ID NO: 338956 - RNA, 32 nt, Homo Sapiens
ccgggagcgcuaggccuggucccucuuccuag

SEQ ID NO: 338957 - RNA, 27 nt, Homo Sapiens
cgauccuccugccucagccccccacua

SEQ ID NO: 338958 - RNA, 32 nt, Homo Sapiens
caaucaugggaauuuuaacuuuugggauuugu

SEQ ID NO: 338959 - RNA, 32 nt, Homo Sapiens
guguuguucuaccugcugggaugggggucagc

SEQ ID NO: 338960 - RNA, 32 nt, Homo Sapiens
gaacgccgcuccccgacgcaccggccgccccc

SEQ ID NO: 338961 - RNA, 32 nt, Homo Sapiens
gaaagcgccacaagcagcagcugcugagccau

SEQ ID NO: 338962 - RNA, 32 nt, Homo Sapiens
ggaagcccaaaggacucugcauugaggguggg

SEQ ID NO: 338963 - RNA, 32 nt, Homo Sapiens
uguccccggaccagcccuugcucugacugcgg

SEQ ID NO: 338964 - RNA, 31 nt, Homo Sapiens
uuuuugaaauaaaacuuuuacagguaaaaaa

SEQ ID NO: 338965 - RNA, 32 nt, Homo Sapiens
ucuuucagaagagaugaagauaccuuauaugc

SEQ ID NO: 338966 - RNA, 32 nt, Homo Sapiens
acaaagcaccccacccaccccugacauaccua

SEQ ID NO: 338967 - RNA, 32 nt, Homo Sapiens
cacaaauuuuaaacucaaccaagcugugauaa

SEQ ID NO: 338968 - RNA, 32 nt, Homo Sapiens
gacaucaaaaauacucugcaacuuggcccagg

SEQ ID NO: 338969 - RNA, 32 nt, Homo Sapiens
accaggaggcuaagaacacugcucaugaauga

SEQ ID NO: 338970 - RNA, 32 nt, Homo Sapiens
auuuaugguuuaaguuuugauucuuagguauu

SEQ ID NO: 338971 - RNA, 32 nt, Homo Sapiens
uguaagccauguaacuaacaaaggauuugcuu

SEQ ID NO: 338972 - RNA, 32 nt, Homo Sapiens
ugguggacuuuccccaccuacucccaagagcc

SEQ ID NO: 338973 - RNA, 32 nt, Homo Sapiens
acugcaucugucagcaggcugcagggagugca

SEQ ID NO: 338974 - RNA, 32 nt, Homo Sapiens
aucauuccagagauauuccauguauuuacaag

SEQ ID NO: 338975 - RNA, 31 nt, Homo Sapiens
aacaagauggcagcugcggagccgucuccgc

SEQ ID NO: 338976 - RNA, 32 nt, Homo Sapiens
cguucuuuucuaaaugccaaugaguuggccuu

SEQ ID NO: 338977 - RNA, 32 nt, Homo Sapiens
accauagggcacuaaguaaggcugggauugga

SEQ ID NO: 338978 - RNA, 32 nt, Homo Sapiens
ccccgaggaaagggcugcuuucggcacucugc

SEQ ID NO: 338979 - RNA, 32 nt, Homo Sapiens
auuucuacagaaaaauggcauagaagucagua

SEQ ID NO: 338980 - RNA, 32 nt, Homo Sapiens
gaagaaagaaagacauucaacuugaacgucca

SEQ ID NO: 338981 - RNA, 32 nt, Homo Sapiens
caaauggaaugagggcugagaauagaauguga

SEQ ID NO: 338982 - RNA, 32 nt, Homo Sapiens
guugggggauggagggcgggugagcagucggg

SEQ ID NO: 338983 - RNA, 32 nt, Homo Sapiens
caggagggauugacucugaggaccugagcuac

SEQ ID NO: 338984 - RNA, 32 nt, Homo Sapiens
caaguggucaaagcucaggaaauacuagagcu

SEQ ID NO: 338985 - RNA, 32 nt, Homo Sapiens
uucacauuauuaccaacugaauaaaagaauga

SEQ ID NO: 338986 - RNA, 32 nt, Homo Sapiens
uguauaguguauauuucuuuuuuucuuuuuuu

SEQ ID NO: 338987 - RNA, 32 nt, Homo Sapiens
ccuguggcgcauccuugucgcucguguccuuc

SEQ ID NO: 338988 - RNA, 32 nt, Homo Sapiens
aagauaguuuucuccuuuuacuucacuucaaa

SEQ ID NO: 338989 - RNA, 32 nt, Homo Sapiens
agaguugaccuugcuguaaauucuuuauugcc

SEQ ID NO: 338990 - RNA, 32 nt, Homo Sapiens
uggagccagggagcggccgccugcgggcugcc

SEQ ID NO: 338991 - RNA, 32 nt, Homo Sapiens
gaagccucccuggcgggugcucuucuucggca

SEQ ID NO: 338992 - RNA, 32 nt, Homo Sapiens
cauagaugucauuauauuuaucacucauuauu

SEQ ID NO: 338993 - RNA, 32 nt, Homo Sapiens
cauuaagaaagaugaaguauuagauuuuacau

SEQ ID NO: 338994 - RNA, 32 nt, Homo Sapiens
ugcuaccguggcggcggcgcugugaggagcag

SEQ ID NO: 338995 - RNA, 32 nt, Homo Sapiens
uauacaaacauguauguauacaugaccuuaau

SEQ ID NO: 338996 - RNA, 32 nt, Homo Sapiens
ggauugccccuggcuuugccucuucuuugugc

SEQ ID NO: 338997 - RNA, 32 nt, Homo Sapiens
auuauauccauaauauuuuuuaaaagaaacag

SEQ ID NO: 338998 - RNA, 32 nt, Homo Sapiens
cuuuacaaaaaaagaaaggaaauauaaaagcc

SEQ ID NO: 338999 - RNA, 32 nt, Homo Sapiens
cgcccgggccgcggcgggcuguggucacaggu

SEQ ID NO: 339000 - RNA, 32 nt, Homo Sapiens
acaucccacuggacauuucucuaggccagcuu

SEQ ID NO: 339001 - RNA, 32 nt, Homo Sapiens
caacagaaguuuuauuucaaagauuggcuuac

SEQ ID NO: 339002 - RNA, 32 nt, Homo Sapiens
gaaacaucuucacccuuuaccaggcuuggcau

SEQ ID NO: 339003 - RNA, 32 nt, Homo Sapiens
cagcgcgggccuuugaggaugaggaggaggaa

SEQ ID NO: 339004 - RNA, 32 nt, Homo Sapiens
accaguuccuuucaaugguuugcaaggaagcc

SEQ ID NO: 339005 - RNA, 32 nt, Homo Sapiens
uuuaucugcugaccuucccuccccuauugucc

SEQ ID NO: 339006 - RNA, 32 nt, Homo Sapiens
agcgaggcgggugagggucuggagagugggca

SEQ ID NO: 339007 - RNA, 32 nt, Homo Sapiens
augugcaauaaaucaauaauucaccagcaaaa

SEQ ID NO: 339008 - RNA, 32 nt, Homo Sapiens
cauguuaaaaauucucaauaagcuagguauug

SEQ ID NO: 339009 - RNA, 32 nt, Homo Sapiens
ucugaucuauuuuuccucaucuguaaaauagg

SEQ ID NO: 339010 - RNA, 32 nt, Homo Sapiens
gagacuauuuuugcuagaagaugauuagcucu

SEQ ID NO: 339011 - RNA, 32 nt, Homo Sapiens
gguauuuuguucuggcaacaggaaauuuaccc

SEQ ID NO: 339012 - RNA, 32 nt, Homo Sapiens
auuuuacuuuuuuuuuuuuuuauuuuagagaa

SEQ ID NO: 339013 - RNA, 32 nt, Homo Sapiens
gggcguggaaagggcucuggcgcuacccgagg

SEQ ID NO: 339014 - RNA, 32 nt, Homo Sapiens
ccuuucucggcugccacccccucccccggucc

SEQ ID NO: 339015 - RNA, 32 nt, Homo Sapiens
ugaaggaccuugcucagccuccccucaguuug

SEQ ID NO: 339016 - RNA, 32 nt, Homo Sapiens
ccaaaauacugauuucuuccauggauuauuuu

SEQ ID NO: 339017 - RNA, 32 nt, Homo Sapiens
accgggacugggaagcugcccggagcggcugc

SEQ ID NO: 339018 - RNA, 32 nt, Homo Sapiens
uaaauagaaugcaacuaucugcuuuucuuaug

SEQ ID NO: 339019 - RNA, 32 nt, Homo Sapiens
uaccguuuucauuuuccaacagucuacuagag

SEQ ID NO: 339020 - RNA, 32 nt, Homo Sapiens
auaaauuagagcauuuaauugacuauuuuauu

SEQ ID NO: 339021 - RNA, 32 nt, Homo Sapiens
aaagaaaaucgcgggcgccggugccucagccg

SEQ ID NO: 339022 - RNA, 32 nt, Homo Sapiens
uuagugucgugcggcccguggcgaggcgaggu

SEQ ID NO: 339023 - RNA, 32 nt, Homo Sapiens
aaagaggauugugauguaucacuggacccagc

SEQ ID NO: 339024 - RNA, 32 nt, Homo Sapiens
uacuaacagccuuuaguuucuagacaggcagu

SEQ ID NO: 339025 - RNA, 32 nt, Homo Sapiens
uggggucaggagaggagaauaggagugacugc

SEQ ID NO: 339026 - RNA, 32 nt, Homo Sapiens
cccgaaugucuccuucauccccuuccaccccu

SEQ ID NO: 339027 - RNA, 32 nt, Homo Sapiens
ucuucuaaccucagccaaacacagagcgggag

SEQ ID NO: 339028 - RNA, 32 nt, Homo Sapiens
uccuuuguuacagggagggguuggcuuggggu

SEQ ID NO: 339029 - RNA, 32 nt, Homo Sapiens
cucuuccucugagaaccagugaaacagaaaag

SEQ ID NO: 339030 - RNA, 32 nt, Homo Sapiens
ggguguacuuggggggcaugauucccuccuuc

SEQ ID NO: 339031 - RNA, 32 nt, Homo Sapiens
ccauagacggaccccucguccucccccagcgg

SEQ ID NO: 339032 - RNA, 32 nt, Homo Sapiens
uaaugccagggguggggugggcacaggcccuc

SEQ ID NO: 339033 - RNA, 32 nt, Homo Sapiens
cugaugaaagcuucauaauuucacccugugac

SEQ ID NO: 339034 - RNA, 32 nt, Homo Sapiens
gcaguacuuugaaguuuuaauuauuaaccugc

SEQ ID NO: 339035 - RNA, 32 nt, Homo Sapiens
cucggggagggcccggccgagcgggcagggag

SEQ ID NO: 339036 - RNA, 32 nt, Homo Sapiens
ccucuggccguguucccuccccggcucagagc

SEQ ID NO: 339037 - RNA, 32 nt, Homo Sapiens
ggaccggagagccgccacugcccguaccugga

SEQ ID NO: 339038 - RNA, 32 nt, Homo Sapiens
guuccacugaagacaugaaaucuuuagagguu

SEQ ID NO: 339039 - RNA, 32 nt, Homo Sapiens
gagguucgggugggcaucgggcggcuggaaga

SEQ ID NO: 339040 - RNA, 32 nt, Homo Sapiens
ugguguuccgauuuucacauccuuccauguau

SEQ ID NO: 339041 - RNA, 32 nt, Homo Sapiens
uggcuggagaauguggagaacuaaagguggcc

SEQ ID NO: 339042 - RNA, 32 nt, Homo Sapiens
aaauaauuucugugguuuuucauuuuagguac

SEQ ID NO: 339043 - RNA, 32 nt, Homo Sapiens
uauuaucuauagauuauacauaacuacaucua

SEQ ID NO: 339044 - RNA, 32 nt, Homo Sapiens
cuuuuaaaaaagguuagcuuugugaaaauacc

SEQ ID NO: 339045 - RNA, 32 nt, Homo Sapiens
cacggcuggggccgcucugugcuggcgccugc

SEQ ID NO: 339046 - RNA, 32 nt, Homo Sapiens
gugugcuauguggcuuucucugcagaccuugc

SEQ ID NO: 339047 - RNA, 32 nt, Homo Sapiens
auuucacugaagauuccgccucucauuucuug

SEQ ID NO: 339048 - RNA, 32 nt, Homo Sapiens
cuguugucccuuugaccuuguuucuugaaggu

SEQ ID NO: 339049 - RNA, 32 nt, Homo Sapiens
aucugggagaggaaaagcguugugcuuuagac

SEQ ID NO: 339050 - RNA, 32 nt, Homo Sapiens
gguuucaaacuccuggccucaagcaauccucc

SEQ ID NO: 339051 - RNA, 32 nt, Homo Sapiens
ggucucaaacuccuggccucaagcaauucucc

SEQ ID NO: 339052 - RNA, 32 nt, Homo Sapiens
uuuauaccaccuuguuaagauuggugcuuuug

SEQ ID NO: 339053 - RNA, 32 nt, Homo Sapiens
uuggggugcagaauccugggaauguuaggaaa

SEQ ID NO: 339054 - RNA, 32 nt, Homo Sapiens
aagcggaaaacaaaauugaaagggcaaccugu

SEQ ID NO: 339055 - RNA, 32 nt, Homo Sapiens
auuugugcugcuuuugacagguagcagagggu

SEQ ID NO: 339056 - RNA, 32 nt, Homo Sapiens
gaagcaaaacgaaaucuuucauuucagucaaa

SEQ ID NO: 339057 - RNA, 32 nt, Homo Sapiens
aauaucaugcuucaucuuacugugcauagaug

SEQ ID NO: 339058 - RNA, 32 nt, Homo Sapiens
ggcaccacuuccugcccccaccagugcuucug

SEQ ID NO: 339059 - RNA, 32 nt, Homo Sapiens
ccuccuuugccugauccuccaacagcugucac

SEQ ID NO: 339060 - RNA, 32 nt, Homo Sapiens
gaccaggugugguggcucacgcauguaauccc

SEQ ID NO: 339061 - RNA, 32 nt, Homo Sapiens
uuagaggaggccgggcgagcccgguguucuga

SEQ ID NO: 339062 - RNA, 32 nt, Homo Sapiens
gaaacggacaacauggagcaaaagagacaggg

SEQ ID NO: 339063 - RNA, 32 nt, Homo Sapiens
cgccgcggucccagcccagggcgcggccgcaa

SEQ ID NO: 339064 - RNA, 32 nt, Homo Sapiens
gcccuucuuucugccucucaggaaugcagaga

SEQ ID NO: 339065 - RNA, 32 nt, Homo Sapiens
ugcugcagaaccacauccugaggagucucagc

SEQ ID NO: 339066 - RNA, 32 nt, Homo Sapiens
aagcauugugaguaaaucagauguugaauucu

SEQ ID NO: 339067 - RNA, 32 nt, Homo Sapiens
ggcuccaaggaaggauccguugccagaauuac

SEQ ID NO: 339068 - RNA, 32 nt, Homo Sapiens
aaggcucucggcucagcccaguaugaggaccc

SEQ ID NO: 339069 - RNA, 32 nt, Homo Sapiens
uugaagaggaggccgccuccucggggcuccag

SEQ ID NO: 339070 - RNA, 32 nt, Homo Sapiens
cagacugggcuuugggcucuggggcaaacuuc

SEQ ID NO: 339071 - RNA, 32 nt, Homo Sapiens
guggauuguuucugccuuugugggauucagug

SEQ ID NO: 339072 - RNA, 32 nt, Homo Sapiens
uucuaagccaaguuuuaaauauuaucuaacag

SEQ ID NO: 339073 - RNA, 31 nt, Homo Sapiens
uucguccauuugacuugacuuuggaauagca

SEQ ID NO: 339074 - RNA, 32 nt, Homo Sapiens
ucagagcuccagcuacacugagucuuucaauu

SEQ ID NO: 339075 - RNA, 30 nt, Homo Sapiens
aagacagagaagcuugcccuguuuuccuug

SEQ ID NO: 339076 - RNA, 32 nt, Homo Sapiens
uagaugcuaggauauauauaaauuauuuuaua

SEQ ID NO: 339077 - RNA, 32 nt, Homo Sapiens
cugccggccccugggcggcccgugccaugggc

SEQ ID NO: 339078 - RNA, 32 nt, Homo Sapiens
ggagauacuguguauuucuacaacucuuuggc

SEQ ID NO: 339079 - RNA, 32 nt, Homo Sapiens
agcccuggaggaacaaggggcuggcuguccug

SEQ ID NO: 339080 - RNA, 32 nt, Homo Sapiens
cucuucagugcccagcagcacccaguguuggu

SEQ ID NO: 339081 - RNA, 32 nt, Homo Sapiens
caggugggcuaaaagagggcuuagguuuggaa

SEQ ID NO: 339082 - RNA, 32 nt, Homo Sapiens
gagccacugcgacaggccucuuucucuuuuug

SEQ ID NO: 339083 - RNA, 32 nt, Homo Sapiens
gguuggccuaccuggguccuccgcggguggcu

SEQ ID NO: 339084 - RNA, 32 nt, Homo Sapiens
uuucaauucaguguuauacuguguguagguaa

SEQ ID NO: 339085 - RNA, 32 nt, Homo Sapiens
gucuuugccgugggcccccucgccagccacuc

SEQ ID NO: 339086 - RNA, 32 nt, Homo Sapiens
uaugaaauuagcuuuccuuauuuuauagauaa

SEQ ID NO: 339087 - RNA, 32 nt, Homo Sapiens
gagacacgggcuccccucgagggagacuugca

SEQ ID NO: 339088 - RNA, 32 nt, Homo Sapiens
ugagggacagcacuaacaggccuuuauuaagu

SEQ ID NO: 339089 - RNA, 32 nt, Homo Sapiens
guucccacagugaccccagagcccugggcuau

SEQ ID NO: 339090 - RNA, 32 nt, Homo Sapiens
cugaauuccuuccuccccugucucauuucuac

SEQ ID NO: 339091 - RNA, 32 nt, Homo Sapiens
gcaugugagcgcuggugggagacgccaggcug

SEQ ID NO: 339092 - RNA, 30 nt, Homo Sapiens
uguaaugguaucccuguuuuauuucugaaa

SEQ ID NO: 339093 - RNA, 32 nt, Homo Sapiens
ugcucgcuccgggucccggcgccgcgccaugu

SEQ ID NO: 339094 - RNA, 32 nt, Homo Sapiens
cucagaagaugauuuuaacaguucagaacaga

SEQ ID NO: 339095 - RNA, 32 nt, Homo Sapiens
ucauuuccagcaugaacagacugguccuugcu

SEQ ID NO: 339096 - RNA, 32 nt, Homo Sapiens
ccugugggggguaaucccugcuuuuuguguuu

SEQ ID NO: 339097 - RNA, 32 nt, Homo Sapiens
aaguggugcccucuccucuggucccccgcgaa

SEQ ID NO: 339098 - RNA, 32 nt, Homo Sapiens
ugagucuucuuuucauggguuuucauaauauu

SEQ ID NO: 339099 - RNA, 32 nt, Homo Sapiens
uuuuucauuccuguuuuucuuggcaggagaga

SEQ ID NO: 339100 - RNA, 32 nt, Homo Sapiens
ucacaaagcggcccuggagggcuggucuuuau

SEQ ID NO: 339101 - RNA, 32 nt, Homo Sapiens
cugcugaggcggagacugcagugagcugagau

SEQ ID NO: 339102 - RNA, 32 nt, Homo Sapiens
auguagaaggggaagacauaagagacuccauu

SEQ ID NO: 339103 - RNA, 32 nt, Homo Sapiens
gacagagaaccgcuacugcaugcagcuguccc

SEQ ID NO: 339104 - RNA, 32 nt, Homo Sapiens
cugugccuggauuauuucauuuagcauaaugu

SEQ ID NO: 339105 - RNA, 32 nt, Homo Sapiens
agugcggcuaccuguccaagaccgccaacaag

SEQ ID NO: 339106 - RNA, 32 nt, Homo Sapiens
ugcaaaucugccauaagcucaaggcugugacu

SEQ ID NO: 339107 - RNA, 32 nt, Homo Sapiens
cuuagguguugcaugucuaugcuugaggaacu

SEQ ID NO: 339108 - RNA, 32 nt, Homo Sapiens
aucaggaccccgagcccuccuggcccuccaag

SEQ ID NO: 339109 - RNA, 27 nt, Homo Sapiens
aucucuuccuucuuuaugcacuuaccu

SEQ ID NO: 339110 - RNA, 32 nt, Homo Sapiens
uggaccucuccuuuucuguguuuuccaccccu

SEQ ID NO: 339111 - RNA, 32 nt, Homo Sapiens
agcccuggcaggcagguguuuauuaaaauucu

SEQ ID NO: 339112 - RNA, 32 nt, Homo Sapiens
gggccuucgaauuuucauuuucauuuacguuc

SEQ ID NO: 339113 - RNA, 32 nt, Homo Sapiens
uuaacuaauguuucugcuauuuucucacuuuu

SEQ ID NO: 339114 - RNA, 32 nt, Homo Sapiens
uagaaaauucuggaaagccgccggcggggcaa

SEQ ID NO: 339115 - RNA, 32 nt, Homo Sapiens
cacacgccggagcccgguaacgugccuguggg

SEQ ID NO: 339116 - RNA, 32 nt, Homo Sapiens
gauaaugugcuaaauugauuaccucccccuua

SEQ ID NO: 339117 - RNA, 32 nt, Homo Sapiens
uaugcaaauaaauaaguaucuaugucuaaaaa

SEQ ID NO: 339118 - RNA, 32 nt, Homo Sapiens
aaguaauaaaaaggaugguugaacaaguuuuc

SEQ ID NO: 339119 - RNA, 32 nt, Homo Sapiens
ccucauuuuaauuuauaaugaagguaaaauua

SEQ ID NO: 339120 - RNA, 32 nt, Homo Sapiens
aguuuuuguauauaagauaaguacggucuuca

SEQ ID NO: 339121 - RNA, 32 nt, Homo Sapiens
agcacuuugggaggccgagaugggugaaucau

SEQ ID NO: 339122 - RNA, 32 nt, Homo Sapiens
gaugcacaccaccacacccagccuagaaugaa

SEQ ID NO: 339123 - RNA, 32 nt, Homo Sapiens
uaaaaucuuauagucaaucaauuuagaguauu

SEQ ID NO: 339124 - RNA, 32 nt, Homo Sapiens
aguuacaucucuauuucccacagagaggaaua

SEQ ID NO: 339125 - RNA, 32 nt, Homo Sapiens
agugugaaugauacuuuauuguccucacuugu

SEQ ID NO: 339126 - RNA, 32 nt, Homo Sapiens
aaacgccggccgccgagccgccgucggggaag

SEQ ID NO: 339127 - RNA, 32 nt, Homo Sapiens
cuuucccguggacagaguggaacgcuuggaau

SEQ ID NO: 339128 - RNA, 32 nt, Homo Sapiens
ggcggagaugagaacaucggcaccguuaccac

SEQ ID NO: 339129 - RNA, 32 nt, Homo Sapiens
gcugccucugggaggggugcugccuuguagau

SEQ ID NO: 339130 - RNA, 32 nt, Homo Sapiens
cgggggcgccgcggccgugcggggcgucaaug

SEQ ID NO: 339131 - RNA, 32 nt, Homo Sapiens
gccgcagagaaaaaccaagauuucacuuucaa

SEQ ID NO: 339132 - RNA, 32 nt, Homo Sapiens
guacauguuuacagaagcugcugggcuuggcu

SEQ ID NO: 339133 - RNA, 32 nt, Homo Sapiens
gccgccugcagggggguacccgggccaacggc

SEQ ID NO: 339134 - RNA, 32 nt, Homo Sapiens
aauauuuccaguugcacuguaucucuggaagu

SEQ ID NO: 339135 - RNA, 32 nt, Homo Sapiens
gggagccucuucccuuucucacucaccugcac

SEQ ID NO: 339136 - RNA, 32 nt, Homo Sapiens
ucggcguaggagaaggcgcccggcuccgagac

SEQ ID NO: 339137 - RNA, 32 nt, Homo Sapiens
ugauguuugcccgugugcgugugucuccuggg

SEQ ID NO: 339138 - RNA, 32 nt, Homo Sapiens
ggaccguggccauggcgggcgcugaguggaag

SEQ ID NO: 339139 - RNA, 32 nt, Homo Sapiens
aacuuaccuauuuuuucuuuuguugcuugugu

SEQ ID NO: 339140 - RNA, 32 nt, Homo Sapiens
ccauagaagagaggaagaaaacaaagggcaug

SEQ ID NO: 339141 - RNA, 32 nt, Homo Sapiens
ccgcuuguccugaccuacgugcggcccggugg

SEQ ID NO: 339142 - RNA, 32 nt, Homo Sapiens
acccuucuucguugcaccauccugcuucugac

SEQ ID NO: 339143 - RNA, 32 nt, Homo Sapiens
ucggaacuaugaaagaucauuuauguuucugc

SEQ ID NO: 339144 - RNA, 32 nt, Homo Sapiens
caacaacccacuuuucugccagcuccacaacc

SEQ ID NO: 339145 - RNA, 32 nt, Homo Sapiens
uugcgaaauaaaacuauugaaauauuugaaau

SEQ ID NO: 339146 - RNA, 32 nt, Homo Sapiens
guguuccugugaguaggcugugccgauggcag

SEQ ID NO: 339147 - RNA, 32 nt, Homo Sapiens
ucugaagugggaagaaagcuccgaaauagaaa

SEQ ID NO: 339148 - RNA, 32 nt, Homo Sapiens
gccugcccucccgcaccuuccuccuccccgcu

SEQ ID NO: 339149 - RNA, 32 nt, Homo Sapiens
uugccagauuguggucuauguuugaucugugu

SEQ ID NO: 339150 - RNA, 32 nt, Homo Sapiens
gccucuaacccguccugaauucuuacuaaaca

SEQ ID NO: 339151 - RNA, 32 nt, Homo Sapiens
aguugagagauggaggaagagauacagaaucu

SEQ ID NO: 339152 - RNA, 32 nt, Homo Sapiens
aacaacucugcugccagcaccaaaaagcccuc

SEQ ID NO: 339153 - RNA, 32 nt, Homo Sapiens
cguaagguuuuccucuuuaacaaggaaguaaa

SEQ ID NO: 339154 - RNA, 32 nt, Homo Sapiens
gucuccugucgccgccgccgccgccaccaccg

SEQ ID NO: 339155 - RNA, 32 nt, Homo Sapiens
cgauuccgccccaccccgcccucggaacucgc

SEQ ID NO: 339156 - RNA, 32 nt, Homo Sapiens
aagcugaggagcuuguccuguguaugugaaug

SEQ ID NO: 339157 - RNA, 32 nt, Homo Sapiens
uuuuucugcacacacgagguauuuuauacugg

SEQ ID NO: 339158 - RNA, 32 nt, Homo Sapiens
aaggaagcucaguuuucuuuuauuaugagcug

SEQ ID NO: 339159 - RNA, 32 nt, Homo Sapiens
uuccguuugcacaagaaaauaacgcuugggca

SEQ ID NO: 339160 - RNA, 32 nt, Homo Sapiens
gcuggggguagaaaugucaugggugacuucug

SEQ ID NO: 339161 - RNA, 32 nt, Homo Sapiens
gcagacuucggcuggacuugccugcggugaca

SEQ ID NO: 339162 - RNA, 32 nt, Homo Sapiens
gcuggucucugcuccacuccccggcuucccgu

SEQ ID NO: 339163 - RNA, 32 nt, Homo Sapiens
ggaggugacaacagaggcugcagaggccucag

SEQ ID NO: 339164 - RNA, 32 nt, Homo Sapiens
uauggaaaugggaaugggaugccaaggggauu

SEQ ID NO: 339165 - RNA, 32 nt, Homo Sapiens
aagaggaaaaggauguggcucaggcugggagg

SEQ ID NO: 339166 - RNA, 32 nt, Homo Sapiens
ccgccaucaugacgcucauacuggcuuuugcc

SEQ ID NO: 339167 - RNA, 32 nt, Homo Sapiens
ggaacugugaaaauaaauuuguuuuuuacgcc

SEQ ID NO: 339168 - RNA, 32 nt, Homo Sapiens
cuguaauagaaaguaaaaagacuguuauggaa

SEQ ID NO: 339169 - RNA, 32 nt, Homo Sapiens
ucuuugucuucucuggcccggcgugggggcag

SEQ ID NO: 339170 - RNA, 32 nt, Homo Sapiens
caugcuggcuccugaagggugcucagucuccu

SEQ ID NO: 339171 - RNA, 32 nt, Homo Sapiens
cgcauaccccggcggcgccgccgcggaaagcg

SEQ ID NO: 339172 - RNA, 32 nt, Homo Sapiens
acuccgugguuuugugaggagcagagugugua

SEQ ID NO: 339173 - RNA, 32 nt, Homo Sapiens
acguggcucaagugcuggcucaccuucuagcu

SEQ ID NO: 339174 - RNA, 32 nt, Homo Sapiens
ccugcagagucuuaguuacugauuucauuuuc

SEQ ID NO: 339175 - RNA, 32 nt, Homo Sapiens
guggcuggaaguucgagaagcuagcucggcug

SEQ ID NO: 339176 - RNA, 32 nt, Homo Sapiens
uuacuucaaccaaaagcaacggggagauguuu

SEQ ID NO: 339177 - RNA, 32 nt, Homo Sapiens
aagugccagggagaggagggcggguggggacc

SEQ ID NO: 339178 - RNA, 32 nt, Homo Sapiens
ggccguggugccugccaggugauguggggcaa

SEQ ID NO: 339179 - RNA, 32 nt, Homo Sapiens
agcguggcguguugcacauuuaacugugugau

SEQ ID NO: 339180 - RNA, 32 nt, Homo Sapiens
uacguuuucugcaaugguuuaguggcuggggu

SEQ ID NO: 339181 - RNA, 32 nt, Homo Sapiens
uggcuugagccugggaggucaaggcaucagug

SEQ ID NO: 339182 - RNA, 32 nt, Homo Sapiens
gccauuuagaggaaacuugugaauucuuucau

SEQ ID NO: 339183 - RNA, 32 nt, Homo Sapiens
uguuuguuucccccuuuacuaccuguucuugu

SEQ ID NO: 339184 - RNA, 32 nt, Homo Sapiens
uaaaaauaucuggguuggaauuugccccugac

SEQ ID NO: 339185 - RNA, 32 nt, Homo Sapiens
gccccuaugugacagcucuauauuuuaucccc

SEQ ID NO: 339186 - RNA, 32 nt, Homo Sapiens
cuaguuggauacagaacacacaaauccagggg

SEQ ID NO: 339187 - RNA, 32 nt, Homo Sapiens
cuccgccgcgcgccagcccgccuucgcugccc

SEQ ID NO: 339188 - RNA, 32 nt, Homo Sapiens
agacaugauaauuggcuguagacguucacagu

SEQ ID NO: 339189 - RNA, 32 nt, Homo Sapiens
ccagaaguucccuuugcccacgcaccuaccug

SEQ ID NO: 339190 - RNA, 32 nt, Homo Sapiens
ugaaauucuccauggguacuagaaagccaaua

SEQ ID NO: 339191 - RNA, 32 nt, Homo Sapiens
uucaccuuucguguuuuuuuuaauuuauccuc

SEQ ID NO: 339192 - RNA, 32 nt, Homo Sapiens
ccucuuuaguaaauuuagaacuguagaggcua

SEQ ID NO: 339193 - RNA, 32 nt, Homo Sapiens
aucugagggacuccucaguccuggggcgucgc

SEQ ID NO: 339194 - RNA, 32 nt, Homo Sapiens
ccuugagaguguauauucuaugaaauggaaga

SEQ ID NO: 339195 - RNA, 32 nt, Homo Sapiens
ccauucuaacugucacucagccauuucccugc

SEQ ID NO: 339196 - RNA, 32 nt, Homo Sapiens
ggucggcuugguuuucugcuacccggagcugg

SEQ ID NO: 339197 - RNA, 32 nt, Homo Sapiens
gugaggucgaaguucauuccaguguuucauuu

SEQ ID NO: 339198 - RNA, 32 nt, Homo Sapiens
acauuggacaacaugagcacauuccagucaau

SEQ ID NO: 339199 - RNA, 32 nt, Homo Sapiens
cgugcucuccugccuccaccgccuugguuuug

SEQ ID NO: 339200 - RNA, 32 nt, Homo Sapiens
ugugaugacuauuucuuauuccauucaucuaa

SEQ ID NO: 339201 - RNA, 32 nt, Homo Sapiens
ucagaugugcagguguuaaucuucucuaaaag

SEQ ID NO: 339202 - RNA, 32 nt, Homo Sapiens
acauuuacaacuaggccagggauuagccacug

SEQ ID NO: 339203 - RNA, 32 nt, Homo Sapiens
gcacuggcaggcgagggcucucguucauauuc

SEQ ID NO: 339204 - RNA, 32 nt, Homo Sapiens
accucugcauucaguuaggagcucuucacaug

SEQ ID NO: 339205 - RNA, 32 nt, Homo Sapiens
uaagccagaugugauuacauuacuagagcaag

SEQ ID NO: 339206 - RNA, 32 nt, Homo Sapiens
ugcuucucaucugggagcugguccuggggaug

SEQ ID NO: 339207 - RNA, 32 nt, Homo Sapiens
cccuguagcagcuccuuauugcuggagaagga

SEQ ID NO: 339208 - RNA, 32 nt, Homo Sapiens
aguugaaaggauuaaaaaauagugggcaaacg

SEQ ID NO: 339209 - RNA, 32 nt, Homo Sapiens
uuaaaaucaauacauuaucuuauuaaacaaag

SEQ ID NO: 339210 - RNA, 32 nt, Homo Sapiens
ccuguccccucuguucccgucuuccggucauu

SEQ ID NO: 339211 - RNA, 32 nt, Homo Sapiens
guucccugucucccgcgccccaauuucgauuu

SEQ ID NO: 339212 - RNA, 32 nt, Homo Sapiens
uugaaugaacaaagacugaacuuuguuuacag

SEQ ID NO: 339213 - RNA, 32 nt, Homo Sapiens
cccaaagccccggcuggggcccggccagcccg

SEQ ID NO: 339214 - RNA, 32 nt, Homo Sapiens
aguuuaacugauuuucuuuggugcugggacca

SEQ ID NO: 339215 - RNA, 32 nt, Homo Sapiens
cuaaaacaaacacaaaaugcaacaaagaccua

SEQ ID NO: 339216 - RNA, 32 nt, Homo Sapiens
uagaccaaugaaacagaaagagaacuuagaaa

SEQ ID NO: 339217 - RNA, 32 nt, Homo Sapiens
gccagaucugcaccaccuucgagcacuaugug

SEQ ID NO: 339218 - RNA, 32 nt, Homo Sapiens
aaccugggcccgaagucaucugcacaaggcua

SEQ ID NO: 339219 - RNA, 32 nt, Homo Sapiens
agcguuggguggcagccauggaggaaugcugu

SEQ ID NO: 339220 - RNA, 29 nt, Homo Sapiens
guugcugucucuaagugaaagcugaaccu

SEQ ID NO: 339221 - RNA, 32 nt, Homo Sapiens
gaccaagaggauaaacaggacaauauaagaag

SEQ ID NO: 339222 - RNA, 32 nt, Homo Sapiens
gcaugaaaucauguuggagaucucuauuguaa

SEQ ID NO: 339223 - RNA, 32 nt, Homo Sapiens
ucgggcuuugucucuaucccagccccuucucc

SEQ ID NO: 339224 - RNA, 32 nt, Homo Sapiens
aggaggggccgcgggcgggaggcgcugcgagg

SEQ ID NO: 339225 - RNA, 32 nt, Homo Sapiens
aaacugucauaauguuaccuagcugaguuuug

SEQ ID NO: 339226 - RNA, 32 nt, Homo Sapiens
ccgaggccgcccucgggccaugaucgacuccg

SEQ ID NO: 339227 - RNA, 32 nt, Homo Sapiens
agaaucagauauguuaucgaaauguuagcagc

SEQ ID NO: 339228 - RNA, 32 nt, Homo Sapiens
cacgcaccagugcauguggcuguguuccaaac

SEQ ID NO: 339229 - RNA, 32 nt, Homo Sapiens
ccuccuauuauaaggaaauuuuacagauucua

SEQ ID NO: 339230 - RNA, 32 nt, Homo Sapiens
acaauacuugaaaaauaaaaaugaacaagcua

SEQ ID NO: 339231 - RNA, 32 nt, Homo Sapiens
uaucagugcaacuuuaaugauuguacuugaua

SEQ ID NO: 339232 - RNA, 32 nt, Homo Sapiens
gcccccuuuuaagagaaucucccuuucaauuu

SEQ ID NO: 339233 - RNA, 32 nt, Homo Sapiens
aucacaagauauauuuuuuaucugcaaccaug

SEQ ID NO: 339234 - RNA, 32 nt, Homo Sapiens
gcuguguuacuaauuuuucagcuuaauccuca

SEQ ID NO: 339235 - RNA, 28 nt, Homo Sapiens
cacauggagguagguggcugcacauuca

SEQ ID NO: 339236 - RNA, 32 nt, Homo Sapiens
gccuggccccuggccccuccccaugucccucc

SEQ ID NO: 339237 - RNA, 32 nt, Homo Sapiens
uuguuuauuuuuucucuuugguuuuagauauu

SEQ ID NO: 339238 - RNA, 32 nt, Homo Sapiens
aggccugcuuuuuggaggaaacuagcuagauu

SEQ ID NO: 339239 - RNA, 32 nt, Homo Sapiens
uuuucccuuuuuccuuuuuaauaugaguaaug

SEQ ID NO: 339240 - RNA, 32 nt, Homo Sapiens
acgcugcaguagcggcuucugcggcuccaagc

SEQ ID NO: 339241 - RNA, 32 nt, Homo Sapiens
ugacgcuugugacagugccucuuccagugaac

SEQ ID NO: 339242 - RNA, 32 nt, Homo Sapiens
uaggcggcgggagcccggggcgccucgcggca

SEQ ID NO: 339243 - RNA, 32 nt, Homo Sapiens
ugggcgugguggcgcaugccuguaauccuagc

SEQ ID NO: 339244 - RNA, 32 nt, Homo Sapiens
uaucuuuugacugccacauauggaccccaaaa

SEQ ID NO: 339245 - RNA, 31 nt, Homo Sapiens
gauauuuauugagcuuuuccucuuugcccag

SEQ ID NO: 339246 - RNA, 32 nt, Homo Sapiens
uuuccugucuuacuagaucugggcagcauuug

SEQ ID NO: 339247 - RNA, 32 nt, Homo Sapiens
gcagcagagccgcagcagcaacagccaccaaa

SEQ ID NO: 339248 - RNA, 32 nt, Homo Sapiens
cgcaaucguccuccccgcacgagaggguggag

SEQ ID NO: 339249 - RNA, 30 nt, Homo Sapiens
gggugagacugcggcggcggcagggcgcgg

SEQ ID NO: 339250 - RNA, 32 nt, Homo Sapiens
gccugguccgcgcccugcacgaccagcgcguc

SEQ ID NO: 339251 - RNA, 32 nt, Homo Sapiens
aaccaaaaggacuuagagcaguuugcucauaa

SEQ ID NO: 339252 - RNA, 32 nt, Homo Sapiens
ggugggagccggccugggcagcuccaacucca

SEQ ID NO: 339253 - RNA, 32 nt, Homo Sapiens
uugcgcugcuaagaagcuaaagucauccaucc

SEQ ID NO: 339254 - RNA, 32 nt, Homo Sapiens
cucccuuuuuuuuuuuuuuuuaaagaaaaaag

SEQ ID NO: 339255 - RNA, 32 nt, Homo Sapiens
aagaaaaugcugucacagacccaucccugugg

SEQ ID NO: 339256 - RNA, 32 nt, Homo Sapiens
auuuuauuuuguauuacuuaaucuuuuaagca

SEQ ID NO: 339257 - RNA, 32 nt, Homo Sapiens
cauaauccaucccuccacggucacguuccugu

SEQ ID NO: 339258 - RNA, 32 nt, Homo Sapiens
aucuuucugcuguuuguuguccugcuugguug

SEQ ID NO: 339259 - RNA, 32 nt, Homo Sapiens
cgcaucgugcagugccgcucuguggagggcag

SEQ ID NO: 339260 - RNA, 32 nt, Homo Sapiens
ucagcuuguaaauuuuguggaaccacagguau

SEQ ID NO: 339261 - RNA, 32 nt, Homo Sapiens
aggcauuggaauguugacaaauuuagagguca

SEQ ID NO: 339262 - RNA, 32 nt, Homo Sapiens
uccucucucaggugcuggauugugggguuagu

SEQ ID NO: 339263 - RNA, 32 nt, Homo Sapiens
cccugucgccuggcuggaguggaguggcacaa

SEQ ID NO: 339264 - RNA, 32 nt, Homo Sapiens
uaaaagaauguuucauuaaugcauugauaaga

SEQ ID NO: 339265 - RNA, 32 nt, Homo Sapiens
ccccgggcugcagcugagcgggcgcagacggg

SEQ ID NO: 339266 - RNA, 32 nt, Homo Sapiens
agccucgacaccuggguucaagugauccuccc

SEQ ID NO: 339267 - RNA, 32 nt, Homo Sapiens
gauauguuaugaaaucagcugguaauuccucc

SEQ ID NO: 339268 - RNA, 30 nt, Homo Sapiens
aaugguggugucccugccaauuccuuccuu

SEQ ID NO: 339269 - RNA, 32 nt, Homo Sapiens
ugccaaaucaguaggauauauuuguuuuggca

SEQ ID NO: 339270 - RNA, 32 nt, Homo Sapiens
cuucaugccgugguaaguaccacaucuacaau

SEQ ID NO: 339271 - RNA, 32 nt, Homo Sapiens
agaaggguggugugggcccugcagguccuacc

SEQ ID NO: 339272 - RNA, 32 nt, Homo Sapiens
ccucucucuagcagaaaaauagacuaaaucua

SEQ ID NO: 339273 - RNA, 32 nt, Homo Sapiens
ggcaggagccuggccuggggagggcuugggcc

SEQ ID NO: 339274 - RNA, 32 nt, Homo Sapiens
gaugugggguggcaguggccugacccgaauca

SEQ ID NO: 339275 - RNA, 32 nt, Homo Sapiens
cccuugagugggccuuugagcugcugacuuuc

SEQ ID NO: 339276 - RNA, 32 nt, Homo Sapiens
cuguggguggaagagggaguagcugauuucuu

SEQ ID NO: 339277 - RNA, 32 nt, Homo Sapiens
ccugcucacaguguucugugccugugugcucc

SEQ ID NO: 339278 - RNA, 32 nt, Homo Sapiens
gcuauuuuucccuuuugggaaaacaaugaagu

SEQ ID NO: 339279 - RNA, 32 nt, Homo Sapiens
aauucaaaacuaaaaugucauuaauauguaug

SEQ ID NO: 339280 - RNA, 32 nt, Homo Sapiens
caaaccaccccucccccagaugguacuucagu

SEQ ID NO: 339281 - RNA, 32 nt, Homo Sapiens
gguguccguggcgugccuggguggaaaaugag

SEQ ID NO: 339282 - RNA, 32 nt, Homo Sapiens
gacccucggcgucccuuccccucccccgcccu

SEQ ID NO: 339283 - RNA, 32 nt, Homo Sapiens
gagggggagagccuggacucugugaaggcacu

SEQ ID NO: 339284 - RNA, 32 nt, Homo Sapiens
gucucggggcgggcgccgcgggaccucuccgg

SEQ ID NO: 339285 - RNA, 32 nt, Homo Sapiens
acaagacccagcuuauuuucugcuugcuguaa

SEQ ID NO: 339286 - RNA, 32 nt, Homo Sapiens
aagcuggguguuggccacucuugaugugaggc

SEQ ID NO: 339287 - RNA, 32 nt, Homo Sapiens
uugcugcccuucccccgggaccgcgggcccug

SEQ ID NO: 339288 - RNA, 32 nt, Homo Sapiens
gauaacacuucgcugugagaacaggagggaua

SEQ ID NO: 339289 - RNA, 32 nt, Homo Sapiens
ugcccaucugcacaaugaaaucauggcuaaga

SEQ ID NO: 339290 - RNA, 32 nt, Homo Sapiens
cacucuucaaggacugcacugccccuucuccc

SEQ ID NO: 339291 - RNA, 32 nt, Homo Sapiens
aaauauaauaacuugcuaguggucaaucagua

SEQ ID NO: 339292 - RNA, 32 nt, Homo Sapiens
uauacauauauauaaacuauucuuuuuugcca

SEQ ID NO: 339293 - RNA, 32 nt, Homo Sapiens
ccuccccaccaccccacccccaagacuugugu

SEQ ID NO: 339294 - RNA, 32 nt, Homo Sapiens
aauagaagggaagagauaggaugggaaagcua

SEQ ID NO: 339295 - RNA, 32 nt, Homo Sapiens
accgagcggcggggcgcuguggaacgcgggag

SEQ ID NO: 339296 - RNA, 32 nt, Homo Sapiens
aaagauauugcauuuucauauucuuuauuuau

SEQ ID NO: 339297 - RNA, 32 nt, Homo Sapiens
gccucuuuucuaaauguucaggaaaagcauug

SEQ ID NO: 339298 - RNA, 32 nt, Homo Sapiens
ccuuaggagccauagacuuuuauucuuucuua

SEQ ID NO: 339299 - RNA, 32 nt, Homo Sapiens
ucuuuucuguucccuuuuaauagaagcuacau

SEQ ID NO: 339300 - RNA, 32 nt, Homo Sapiens
cgcgcucccagguucuuggagacgccgaguga

SEQ ID NO: 339301 - RNA, 32 nt, Homo Sapiens
uggaagggaaagaaaccacagauuuuauuuca

SEQ ID NO: 339302 - RNA, 32 nt, Homo Sapiens
gaauucauugagcuaaccuugguuuuaaaaau

SEQ ID NO: 339303 - RNA, 32 nt, Homo Sapiens
aucauuuaaaaagcuugcuuguccucgaaagg

SEQ ID NO: 339304 - RNA, 32 nt, Homo Sapiens
aauugauccgccacucccaaaaguggccuugc

SEQ ID NO: 339305 - RNA, 32 nt, Homo Sapiens
gacuuuaauaaucaagauuuucuugaagauuu

SEQ ID NO: 339306 - RNA, 32 nt, Homo Sapiens
gauggagucucggucuuucacccaggcuggag

SEQ ID NO: 339307 - RNA, 32 nt, Homo Sapiens
gaaaauaaaaauacauuaagaugugcuuucau

SEQ ID NO: 339308 - RNA, 32 nt, Homo Sapiens
aagguggaacaaguacaagaauguggcucuuu

SEQ ID NO: 339309 - RNA, 32 nt, Homo Sapiens
gggaaaauguaccccaacccaucccuuaaggg

SEQ ID NO: 339310 - RNA, 31 nt, Homo Sapiens
auagcaauuagugauauagugcuguuuaagc

SEQ ID NO: 339311 - RNA, 32 nt, Homo Sapiens
ggcugcagagggaaauugaggaccuuagagac

SEQ ID NO: 339312 - RNA, 32 nt, Homo Sapiens
cacucggggaccucccugccccugccccgucc

SEQ ID NO: 339313 - RNA, 32 nt, Homo Sapiens
aauauuacugucauuuucauuuuagaaaugug

SEQ ID NO: 339314 - RNA, 32 nt, Homo Sapiens
aaggcgcccucccuggggucccuugagcugcu

SEQ ID NO: 339315 - RNA, 32 nt, Homo Sapiens
cuggcuuguugcagcccuccuuuaacccaaag

SEQ ID NO: 339316 - RNA, 32 nt, Homo Sapiens
uaaagccgagcauagcucucucuugcauguaa

SEQ ID NO: 339317 - RNA, 31 nt, Homo Sapiens
aagguuuccacauaggguuaccccuuaauag

SEQ ID NO: 339318 - RNA, 32 nt, Homo Sapiens
gugcguggggagagggugaagaagggcuuuug

SEQ ID NO: 339319 - RNA, 32 nt, Homo Sapiens
cuguuucuaaucuacaaacaaacaaaugugug

SEQ ID NO: 339320 - RNA, 32 nt, Homo Sapiens
ucugagggcuccugggucacucuugggccuuc

SEQ ID NO: 339321 - RNA, 30 nt, Homo Sapiens
cagcuagagaagcagugugggccugaagca

SEQ ID NO: 339322 - RNA, 31 nt, Homo Sapiens
acccagauguggcacgggaggccgugcggcu

SEQ ID NO: 339323 - RNA, 32 nt, Homo Sapiens
uguggaaaccaucccagaaucuggauguggcc

SEQ ID NO: 339324 - RNA, 30 nt, Homo Sapiens
gcagggcugcccgugccuaugaagcaugua

SEQ ID NO: 339325 - RNA, 32 nt, Homo Sapiens
ucauaauuugucccgaagcauaugguggagca

SEQ ID NO: 339326 - RNA, 32 nt, Homo Sapiens
aaugcguagaaaccaaauuaauuuagaccuua

SEQ ID NO: 339327 - RNA, 32 nt, Homo Sapiens
agacuuuccagugaggccguccuuuuauaaaa

SEQ ID NO: 339328 - RNA, 32 nt, Homo Sapiens
agaacagcauuggucccagagcccugggcauc

SEQ ID NO: 339329 - RNA, 32 nt, Homo Sapiens
ggaggggaaaauuaccggccuuccaacuuuug

SEQ ID NO: 339330 - RNA, 32 nt, Homo Sapiens
uguuguuguuguuuuuuaauucuaauguucaa

SEQ ID NO: 339331 - RNA, 32 nt, Homo Sapiens
cggcucagggagguacagcaacuggguggagg

SEQ ID NO: 339332 - RNA, 32 nt, Homo Sapiens
cguccuguacuaugccagcggggcugggcagg

SEQ ID NO: 339333 - RNA, 32 nt, Homo Sapiens
cggaccucgggcgggggcaggagacggagcug

SEQ ID NO: 339334 - RNA, 32 nt, Homo Sapiens
gccaggacugcguuuggcagggcugggggggc

SEQ ID NO: 339335 - RNA, 32 nt, Homo Sapiens
caggaagaaaguauuucaaacaacaaggugca

SEQ ID NO: 339336 - RNA, 32 nt, Homo Sapiens
uacaaaaauaaaauacacauugaaauacuuua

SEQ ID NO: 339337 - RNA, 32 nt, Homo Sapiens
cuccauccaggaacuguggucucguccaucug

SEQ ID NO: 339338 - RNA, 32 nt, Homo Sapiens
gcucugugcggugaagcuucucuucuuggcac

SEQ ID NO: 339339 - RNA, 32 nt, Homo Sapiens
agacaucaaaugcuagggauuggcauaggcua

SEQ ID NO: 339340 - RNA, 32 nt, Homo Sapiens
guguauuuguauuaauaaagcauucuucaaca

SEQ ID NO: 339341 - RNA, 32 nt, Homo Sapiens
cucuguauuuaguuugaacuucucucuaagcc

SEQ ID NO: 339342 - RNA, 32 nt, Homo Sapiens
uacaaaggggcaaggaccucucauggacacug

SEQ ID NO: 339343 - RNA, 32 nt, Homo Sapiens
guaaaaagaccuuuauuuuaaauaauagugga

SEQ ID NO: 339344 - RNA, 32 nt, Homo Sapiens
aacaucuccuucccagccacuggcugccagaa

SEQ ID NO: 339345 - RNA, 32 nt, Homo Sapiens
aggaauucaaagcugcuugcuguaacugugug

SEQ ID NO: 339346 - RNA, 32 nt, Homo Sapiens
uucaguacagaacacugacaaacaaggaaagc

SEQ ID NO: 339347 - RNA, 32 nt, Homo Sapiens
uccaaagaaaaguuuuaccugguuguguuauu

SEQ ID NO: 339348 - RNA, 32 nt, Homo Sapiens
gcugccgugccuggacuaucagcagcacaugu

SEQ ID NO: 339349 - RNA, 32 nt, Homo Sapiens
gaugauaguuauuauauuauaugacgacuuca

SEQ ID NO: 339350 - RNA, 32 nt, Homo Sapiens
uuaagaggagaguuaaaccgccgagaucccgg

SEQ ID NO: 339351 - RNA, 32 nt, Homo Sapiens
cucugccauccacaaugcuuguguucuaaugc

SEQ ID NO: 339352 - RNA, 32 nt, Homo Sapiens
ccugcaguggcuucuugucgccugcugcuggg

SEQ ID NO: 339353 - RNA, 32 nt, Homo Sapiens
auauuuucgugaauaaagugcauguaggugga

SEQ ID NO: 339354 - RNA, 32 nt, Homo Sapiens
agaaacaaggaagaaauugaccccgacaaaga

SEQ ID NO: 339355 - RNA, 32 nt, Homo Sapiens
uuaaaaaugcaagagggagaggggaaggagcu

SEQ ID NO: 339356 - RNA, 32 nt, Homo Sapiens
uauguaaauguguguauauacacacacauaaa

SEQ ID NO: 339357 - RNA, 32 nt, Homo Sapiens
aaguagggccaagcugugccccugcccggaag

SEQ ID NO: 339358 - RNA, 32 nt, Homo Sapiens
aggagaggucagagcuuuguccugcuguggcc

SEQ ID NO: 339359 - RNA, 32 nt, Homo Sapiens
aauaucagauuauuauuuuguaaguuguggaa

SEQ ID NO: 339360 - RNA, 32 nt, Homo Sapiens
ucuuuacaggaguuuaaaacguauagccuaca

SEQ ID NO: 339361 - RNA, 32 nt, Homo Sapiens
ugggauggggacggcauaccccucccaggccu

SEQ ID NO: 339362 - RNA, 32 nt, Homo Sapiens
cuaaaguuuccacaucccauuaacucagugcu

SEQ ID NO: 339363 - RNA, 30 nt, Homo Sapiens
aacuugugucuggaaauggaaaccgcuccu

SEQ ID NO: 339364 - RNA, 32 nt, Homo Sapiens
uuuucuguuguuuuuaaaauaguuuucagaau

SEQ ID NO: 339365 - RNA, 32 nt, Homo Sapiens
cauuguggaaagaaauaaaauaaaauuaaaaa

SEQ ID NO: 339366 - RNA, 32 nt, Homo Sapiens
uuuauucugaggaaacauaaauuauguuuugu

SEQ ID NO: 339367 - RNA, 32 nt, Homo Sapiens
uuucauuuucuuuggauauguauccagaagug

SEQ ID NO: 339368 - RNA, 32 nt, Homo Sapiens
gacucaccaaaauaauaaauguucuuuauuuu

SEQ ID NO: 339369 - RNA, 32 nt, Homo Sapiens
ucuguuggaagcagcaaagauuccaaguuuuu

SEQ ID NO: 339370 - RNA, 32 nt, Homo Sapiens
gguuuuacaagaagacugauagucuuucaagc

SEQ ID NO: 339371 - RNA, 32 nt, Homo Sapiens
guuacacaucugggaggauuugaaaguccugg

SEQ ID NO: 339372 - RNA, 32 nt, Homo Sapiens
ugacuugaaaauaaauagguuccauguguaag

SEQ ID NO: 339373 - RNA, 32 nt, Homo Sapiens
gcugguggagcucacagacggcggcuggugga

SEQ ID NO: 339374 - RNA, 32 nt, Homo Sapiens
guacucaccuuuauggaauccaaauacaucca

SEQ ID NO: 339375 - RNA, 30 nt, Homo Sapiens
agaucauguauuaccaacaggccuugauga

SEQ ID NO: 339376 - RNA, 32 nt, Homo Sapiens
gacacccgggccgcccucggaaggcacggacg

SEQ ID NO: 339377 - RNA, 32 nt, Homo Sapiens
auuucuauaugauaagcaguuuuuagggcaag

SEQ ID NO: 339378 - RNA, 32 nt, Homo Sapiens
caguuagcuagcaaauauggacagguuuacuu

SEQ ID NO: 339379 - RNA, 32 nt, Homo Sapiens
gaagcgggguaccccacgccccugccugcacu

SEQ ID NO: 339380 - RNA, 32 nt, Homo Sapiens
caaaauuuacuugguugguccaaauaaaauaa

SEQ ID NO: 339381 - RNA, 32 nt, Homo Sapiens
gaggccguccuuuuauaaaacgcaacacaacc

SEQ ID NO: 339382 - RNA, 32 nt, Homo Sapiens
acaguuuucuucaucaguagauucaucucaac

SEQ ID NO: 339383 - RNA, 31 nt, Homo Sapiens
cuguggcagguccagaaccagucagagacuu

SEQ ID NO: 339384 - RNA, 32 nt, Homo Sapiens
aauuugcuguacaguggggaagagggacggau

SEQ ID NO: 339385 - RNA, 32 nt, Homo Sapiens
ccugcgugaccuccccgccggcgggauguggc

SEQ ID NO: 339386 - RNA, 32 nt, Homo Sapiens
acaagcucaggcucagccaacacugagaccac

SEQ ID NO: 339387 - RNA, 32 nt, Homo Sapiens
cugcucugcuuggcuggaagugccaggggaau

SEQ ID NO: 339388 - RNA, 32 nt, Homo Sapiens
gaguuugacacugccggcuuccuuccauccag

SEQ ID NO: 339389 - RNA, 32 nt, Homo Sapiens
gaggcugcgaggggccggguuuagcggggugg

SEQ ID NO: 339390 - RNA, 32 nt, Homo Sapiens
ccgaaggccaggcuuuuaauucuaauagguaa

SEQ ID NO: 339391 - RNA, 32 nt, Homo Sapiens
accuguuugaccaagguguuaaggggauagua

SEQ ID NO: 339392 - RNA, 32 nt, Homo Sapiens
auaauauguacaaauaauauugccuugauguu

SEQ ID NO: 339393 - RNA, 32 nt, Homo Sapiens
aaggaagucaacaauauguggggagagcacuc

SEQ ID NO: 339394 - RNA, 32 nt, Homo Sapiens
agcuuauggguagaagaccaugucuacuaauu

SEQ ID NO: 339395 - RNA, 32 nt, Homo Sapiens
agucggcugugaccuccuguccccagagcugu

SEQ ID NO: 339396 - RNA, 32 nt, Homo Sapiens
acaucguggaagugaagaagauccacuucuuu

SEQ ID NO: 339397 - RNA, 32 nt, Homo Sapiens
ugggacucggaacgcagcgcucggagccaugg

SEQ ID NO: 339398 - RNA, 32 nt, Homo Sapiens
cuccgccucuggcgcgaccgacgacuggagcg

SEQ ID NO: 339399 - RNA, 32 nt, Homo Sapiens
uuuccacugacaauaaucugacccuugaauuu

SEQ ID NO: 339400 - RNA, 32 nt, Homo Sapiens
uuaggagaaaaauuaauauauucagugcuaau

SEQ ID NO: 339401 - RNA, 32 nt, Homo Sapiens
ucccuauccauggcacuaaaccacuucucugc

SEQ ID NO: 339402 - RNA, 32 nt, Homo Sapiens
cgcccgagcuucggaaacuucccggccgcgac

SEQ ID NO: 339403 - RNA, 32 nt, Homo Sapiens
cugauucuguuguucaccauuaagggguagac

SEQ ID NO: 339404 - RNA, 32 nt, Homo Sapiens
gggguccccccuccgcgcgggagccagcgaac

SEQ ID NO: 339405 - RNA, 32 nt, Homo Sapiens
gggaugaggguggcaggcagcggggagccgau

SEQ ID NO: 339406 - RNA, 32 nt, Homo Sapiens
uuguugagagaugugacaugguucuuggauuu

SEQ ID NO: 339407 - RNA, 30 nt, Homo Sapiens
agcgcuccacucggcggcggcagcggcuca

SEQ ID NO: 339408 - RNA, 32 nt, Homo Sapiens
ucacucagcccgcaguuuaugugugugcuuuu

SEQ ID NO: 339409 - RNA, 32 nt, Homo Sapiens
guguggacgacacgugggcacaggcagaagug

SEQ ID NO: 339410 - RNA, 32 nt, Homo Sapiens
uuccugucaugagaaggugugcagcuuaggga

SEQ ID NO: 339411 - RNA, 32 nt, Homo Sapiens
cgaaaucugaagaccugcagcagauuuaaauu

SEQ ID NO: 339412 - RNA, 32 nt, Homo Sapiens
ggcugccccuccccuccggcccucuccacugc

SEQ ID NO: 339413 - RNA, 31 nt, Homo Sapiens
guccuaaccagcugaccuugaguuaaucaaa

SEQ ID NO: 339414 - RNA, 32 nt, Homo Sapiens
aaagauaucucacucugucauuguuaaucuaa

SEQ ID NO: 339415 - RNA, 32 nt, Homo Sapiens
guccucugcugucuccccacuaggaucauucc

SEQ ID NO: 339416 - RNA, 32 nt, Homo Sapiens
uuucuagguuagaacuuuuuuauuuuauugca

SEQ ID NO: 339417 - RNA, 32 nt, Homo Sapiens
uccaguaacagugguuaacuaucaccagguua

SEQ ID NO: 339418 - RNA, 32 nt, Homo Sapiens
accccucacuacugccuaggaagauggcuaga

SEQ ID NO: 339419 - RNA, 32 nt, Homo Sapiens
gugcuucccgugaccuaggaccccagggccac

SEQ ID NO: 339420 - RNA, 32 nt, Homo Sapiens
gauguaauauagaaaccagucuccauguguag

SEQ ID NO: 339421 - RNA, 32 nt, Homo Sapiens
cggcggggcaacaugaagggcggcgacagggc

SEQ ID NO: 339422 - RNA, 32 nt, Homo Sapiens
gugaucguguggaaucgcgggucgcggacgcu

SEQ ID NO: 339423 - RNA, 32 nt, Homo Sapiens
ugaauguucuaucgguuuuuaagggacuugag

SEQ ID NO: 339424 - RNA, 32 nt, Homo Sapiens
ccugcucagaggucagagggucugggcagagg

SEQ ID NO: 339425 - RNA, 32 nt, Homo Sapiens
aucugggagagccugaugucaucauaagguuc

SEQ ID NO: 339426 - RNA, 32 nt, Homo Sapiens
ccaggaaaagcacuucuccccaggcagggcgg

SEQ ID NO: 339427 - RNA, 32 nt, Homo Sapiens
uauguagcaaugguuauuguagcuuuaauaga

SEQ ID NO: 339428 - RNA, 32 nt, Homo Sapiens
aguccaggcacaggcugguggugcuggagaag

SEQ ID NO: 339429 - RNA, 32 nt, Homo Sapiens
agguacccugcaugcauauagcugcugauucu

SEQ ID NO: 339430 - RNA, 32 nt, Homo Sapiens
auggcggggaggaggaggagaaggcggcggcg

SEQ ID NO: 339431 - RNA, 32 nt, Homo Sapiens
agaagauagaccaacuuuuuaugucgguuugg

SEQ ID NO: 339432 - RNA, 30 nt, Homo Sapiens
cgcccggcgcccgggcucaccucggccaug

SEQ ID NO: 339433 - RNA, 32 nt, Homo Sapiens
ugccacagaaaagaaggggagagauguucaug

SEQ ID NO: 339434 - RNA, 32 nt, Homo Sapiens
uugcuacuauuaugaauguuguuuugucuuug

SEQ ID NO: 339435 - RNA, 32 nt, Homo Sapiens
ugaugaugagagggagggcugcugccacagac

SEQ ID NO: 339436 - RNA, 32 nt, Homo Sapiens
uucuuugugcuaagguucuugcggugaaccag

SEQ ID NO: 339437 - RNA, 32 nt, Homo Sapiens
caaagguaggaacacaucccuggggcucuggg

SEQ ID NO: 339438 - RNA, 32 nt, Homo Sapiens
ccgggggcucccugugcccgcgugaggcgaga

SEQ ID NO: 339439 - RNA, 32 nt, Homo Sapiens
cuuauaugauugggaucagggaaugggagaag

SEQ ID NO: 339440 - RNA, 32 nt, Homo Sapiens
uggcagaaagcaggcgaagggcaggaggagcu

SEQ ID NO: 339441 - RNA, 32 nt, Homo Sapiens
uuugucgugucauuuggggacacgccacuggc

SEQ ID NO: 339442 - RNA, 32 nt, Homo Sapiens
agcuccgccucccggguucaugccauucuccu

SEQ ID NO: 339443 - RNA, 32 nt, Homo Sapiens
cggcuccgggggcagcagcggcagccucaccc

SEQ ID NO: 339444 - RNA, 32 nt, Homo Sapiens
agcuucgccucccggguucacgccauucuccu

SEQ ID NO: 339445 - RNA, 32 nt, Homo Sapiens
cucuuucuuccgggaagguuauuaggaaucug

SEQ ID NO: 339446 - RNA, 32 nt, Homo Sapiens
gaaccccacaguguggaugugcaaaugaaaau

SEQ ID NO: 339447 - RNA, 32 nt, Homo Sapiens
ccccggcccgcugagggcuaggcggcgggcuc

SEQ ID NO: 339448 - RNA, 32 nt, Homo Sapiens
ugaguagaagagcaauauggcauaaaaaguaa

SEQ ID NO: 339449 - RNA, 32 nt, Homo Sapiens
gggagggagggggaagccuuuauucuuuacug

SEQ ID NO: 339450 - RNA, 32 nt, Homo Sapiens
gaaaaugcaggugauguuuuaaaauuaaaauu

SEQ ID NO: 339451 - RNA, 32 nt, Homo Sapiens
accagcuguauauauuuuucuuauuuauguaa

SEQ ID NO: 339452 - RNA, 32 nt, Homo Sapiens
cuucaggauuuuuuuuuuuuuaaguaagaagg

SEQ ID NO: 339453 - RNA, 32 nt, Homo Sapiens
ccugggagacugccucuccgaagcggugaaac

SEQ ID NO: 339454 - RNA, 32 nt, Homo Sapiens
gcguggggcugagaggcgacaacaguggggag

SEQ ID NO: 339455 - RNA, 32 nt, Homo Sapiens
cgccccgccggcaguuuaacugcuuccgcagc

SEQ ID NO: 339456 - RNA, 32 nt, Homo Sapiens
uaggagccaaaauaauauuuaugucauaccuu

SEQ ID NO: 339457 - RNA, 32 nt, Homo Sapiens
uuuccaaugcuguugauauuuucuacccaccc

SEQ ID NO: 339458 - RNA, 32 nt, Homo Sapiens
ucuggacccgcugcugccccagggggcgggcc

SEQ ID NO: 339459 - RNA, 32 nt, Homo Sapiens
uguuauuuuuaaaaugaauaauugauuucuug

SEQ ID NO: 339460 - RNA, 32 nt, Homo Sapiens
uagcugagggugguugcuggggugguccucau

SEQ ID NO: 339461 - RNA, 32 nt, Homo Sapiens
cgcccuccgcgaggguggaggcggcggcugug

SEQ ID NO: 339462 - RNA, 32 nt, Homo Sapiens
cccuggcucuucucucggggcgaccccucagu

SEQ ID NO: 339463 - RNA, 32 nt, Homo Sapiens
ugguuguuacacaaagaaaauauuggggucac

SEQ ID NO: 339464 - RNA, 32 nt, Homo Sapiens
accccgcagaccagaaccaguacuggagcugg

SEQ ID NO: 339465 - RNA, 32 nt, Homo Sapiens
cuauagauguaaagauugaacuucuacaagaa

SEQ ID NO: 339466 - RNA, 32 nt, Homo Sapiens
uggcuccgugcagcuguggacucgagugccau

SEQ ID NO: 339467 - RNA, 32 nt, Homo Sapiens
aaggccacuuuucuuuuuguucugccucucaa

SEQ ID NO: 339468 - RNA, 32 nt, Homo Sapiens
gaguacuuugaucaugagacauagguaucuug

SEQ ID NO: 339469 - RNA, 32 nt, Homo Sapiens
uccagcugcacucuccucuccugggacccagc

SEQ ID NO: 339470 - RNA, 32 nt, Homo Sapiens
gauugcuacacacacacacacacacacacaca

SEQ ID NO: 339471 - RNA, 32 nt, Homo Sapiens
cccccaaggggaggauuugggcagaaccugag

SEQ ID NO: 339472 - RNA, 32 nt, Homo Sapiens
cuggaacugucaccugugaugugcugggcugu

SEQ ID NO: 339473 - RNA, 32 nt, Homo Sapiens
ccucauccccaggcuugaaggcacauggcuuu

SEQ ID NO: 339474 - RNA, 32 nt, Homo Sapiens
auauauuauuuuuucauaacuuauguggcuuu

SEQ ID NO: 339475 - RNA, 32 nt, Homo Sapiens
uuuuugcuauggauuuauacuaacaagaacau

SEQ ID NO: 339476 - RNA, 32 nt, Homo Sapiens
ccggcucucgcacucuguacagcccaccuucc

SEQ ID NO: 339477 - RNA, 32 nt, Homo Sapiens
auccccgcuggccuccgccuccccugggguuu

SEQ ID NO: 339478 - RNA, 32 nt, Homo Sapiens
uccccgcugggcggccccaccccugucugcaa

SEQ ID NO: 339479 - RNA, 32 nt, Homo Sapiens
caucagcuaaauaggaggacucugccaaauca

SEQ ID NO: 339480 - RNA, 32 nt, Homo Sapiens
cauggaacugucagcguuauucucagaaggcg

SEQ ID NO: 339481 - RNA, 32 nt, Homo Sapiens
ucccaaauuucuguucuacaagcauguugugu

SEQ ID NO: 339482 - RNA, 32 nt, Homo Sapiens
gacaugcauuguuggcuauuugaaauacuaaa

SEQ ID NO: 339483 - RNA, 32 nt, Homo Sapiens
aaguuauccucuccagagaaauuccugaaucu

SEQ ID NO: 339484 - RNA, 32 nt, Homo Sapiens
ggcccagaagggggcgcagucacugacgugaa

SEQ ID NO: 339485 - RNA, 32 nt, Homo Sapiens
cgggauguuuccauugcuucauguuucaguaa

SEQ ID NO: 339486 - RNA, 28 nt, Homo Sapiens
uggaggagucucaacauguguuucugac

SEQ ID NO: 339487 - RNA, 32 nt, Homo Sapiens
ucgggacuccuuuucuuucucuagcugccagu

SEQ ID NO: 339488 - RNA, 32 nt, Homo Sapiens
cucuguguaagucauaaugaugacucuuuagg

SEQ ID NO: 339489 - RNA, 32 nt, Homo Sapiens
uaggccaaaauaaacaacuuauaggguacaua

SEQ ID NO: 339490 - RNA, 32 nt, Homo Sapiens
ccauuugggcugaugcagcagauccagggaau

SEQ ID NO: 339491 - RNA, 32 nt, Homo Sapiens
auauuauuuaucgaaaguaaaaaagauggaag

SEQ ID NO: 339492 - RNA, 32 nt, Homo Sapiens
uccccagagaaaacaaggcaggauaugaucuu

SEQ ID NO: 339493 - RNA, 32 nt, Homo Sapiens
caguaggacaaagccacgugccgacuuccugg

SEQ ID NO: 339494 - RNA, 32 nt, Homo Sapiens
gcuuuaggaaaaaaagacugcaaccaacggaa

SEQ ID NO: 339495 - RNA, 32 nt, Homo Sapiens
uucguuguucucauagaaccaacagcaucuga

SEQ ID NO: 339496 - RNA, 32 nt, Homo Sapiens
cacuggcuguuugggaccauggagcgguaccu

SEQ ID NO: 339497 - RNA, 32 nt, Homo Sapiens
cacgugccaccgccuggcguucgcuuguggca

SEQ ID NO: 339498 - RNA, 32 nt, Homo Sapiens
caguuauucagauauagcucaguuuuauucag

SEQ ID NO: 339499 - RNA, 32 nt, Homo Sapiens
cagccuacuccugcgugagcugccagccuuuu

SEQ ID NO: 339500 - RNA, 32 nt, Homo Sapiens
ccucggcccucccgaccuuuccgagcccucuu

SEQ ID NO: 339501 - RNA, 31 nt, Homo Sapiens
ucuguaagggccugccugcugcucucggccu

SEQ ID NO: 339502 - RNA, 32 nt, Homo Sapiens
ucuuuugccccccagacagcugucugucucau

SEQ ID NO: 339503 - RNA, 32 nt, Homo Sapiens
uuucuuuucuuuucuuuuuuuuuuuuugagac

SEQ ID NO: 339504 - RNA, 32 nt, Homo Sapiens
ugaaugaugcaccccacccccaccccaauaaa

SEQ ID NO: 339505 - RNA, 32 nt, Homo Sapiens
cucagcucucugaauuugccaccaccaaucag

SEQ ID NO: 339506 - RNA, 32 nt, Homo Sapiens
gguugccacauagaagcagcucuccaguugaa

SEQ ID NO: 339507 - RNA, 32 nt, Homo Sapiens
augcuuauuacaaagacaaaauguggugcaga

SEQ ID NO: 339508 - RNA, 32 nt, Homo Sapiens
cugacaagcugccuuuucaaguauugugauuu

SEQ ID NO: 339509 - RNA, 32 nt, Homo Sapiens
ucucugcagcccaggacugugcaugugugcgc

SEQ ID NO: 339510 - RNA, 32 nt, Homo Sapiens
ucuccaagccccaaaugaguccuugugaacca

SEQ ID NO: 339511 - RNA, 32 nt, Homo Sapiens
uccucggcccuagcaugccgcggccgccucgc

SEQ ID NO: 339512 - RNA, 32 nt, Homo Sapiens
cugcugaugcccugaguuccacagcagggguc

SEQ ID NO: 339513 - RNA, 32 nt, Homo Sapiens
cccauucuuuuucucugcagugcauuucacag

SEQ ID NO: 339514 - RNA, 32 nt, Homo Sapiens
caucccuuguaagcuaaaauaguuacuucaaa

SEQ ID NO: 339515 - RNA, 32 nt, Homo Sapiens
uuugcacugccugaaaaaccccgguggucagg

SEQ ID NO: 339516 - RNA, 29 nt, Homo Sapiens
auacccgucuaagggagaaagcuaauguu

SEQ ID NO: 339517 - RNA, 32 nt, Homo Sapiens
aagggaggauuucugcgcggggugugaggugg

SEQ ID NO: 339518 - RNA, 32 nt, Homo Sapiens
aguuagguggguggagcaagaucauccuagaa

SEQ ID NO: 339519 - RNA, 32 nt, Homo Sapiens
uuccaaccgugguggaaggcgaagcgggagca

SEQ ID NO: 339520 - RNA, 32 nt, Homo Sapiens
gauauguguguauuucauacacacacaaggac

SEQ ID NO: 339521 - RNA, 32 nt, Homo Sapiens
ggagauauuuuuaacuuuuuuccacuuuggaa

SEQ ID NO: 339522 - RNA, 32 nt, Homo Sapiens
agucugaugauuaguuacugauccucuuugca

SEQ ID NO: 339523 - RNA, 32 nt, Homo Sapiens
aguuaaauugguuggccuaaggacuaaguaau

SEQ ID NO: 339524 - RNA, 32 nt, Homo Sapiens
agcuucaguccuucuggauuggcacugcugau

SEQ ID NO: 339525 - RNA, 32 nt, Homo Sapiens
auagugacauagugugcagagguguaccaggg

SEQ ID NO: 339526 - RNA, 32 nt, Homo Sapiens
auaauaguuuccauuaggugucagucugaacu

SEQ ID NO: 339527 - RNA, 32 nt, Homo Sapiens
gguguuguggcugacauccuuuccuggccuua

SEQ ID NO: 339528 - RNA, 31 nt, Homo Sapiens
ggacaaugcagaacugcaggaguuugccaac

SEQ ID NO: 339529 - RNA, 32 nt, Homo Sapiens
gguugucaagacacacccuugggcuuaucuac

SEQ ID NO: 339530 - RNA, 31 nt, Homo Sapiens
ugggagcugccggucccacucugucuuugcc

SEQ ID NO: 339531 - RNA, 32 nt, Homo Sapiens
ggcugggguuggggcugcugugaggaaaaccu

SEQ ID NO: 339532 - RNA, 32 nt, Homo Sapiens
gccugccuggugacugucucauccuuuaauaa

SEQ ID NO: 339533 - RNA, 32 nt, Homo Sapiens
cuuaggagucucuggaggacagauuaaaaacc

SEQ ID NO: 339534 - RNA, 32 nt, Homo Sapiens
uuuucuugcuccugggguuuugucugguuggg

SEQ ID NO: 339535 - RNA, 32 nt, Homo Sapiens
uccaagauuuacaauagcacaacgcuaaauca

SEQ ID NO: 339536 - RNA, 32 nt, Homo Sapiens
gcccaguggcaccugcccugccugcauccgga

SEQ ID NO: 339537 - RNA, 32 nt, Homo Sapiens
gaaaauuuguuuaauguacugaguuuaacuga

SEQ ID NO: 339538 - RNA, 32 nt, Homo Sapiens
cgggaggcugcgggcggcggcgcuggacccga

SEQ ID NO: 339539 - RNA, 32 nt, Homo Sapiens
augaggucaggagaucaagaccauccuggcca

SEQ ID NO: 339540 - RNA, 32 nt, Homo Sapiens
auccaggaucaucaaugcuauuaacaguauca

SEQ ID NO: 339541 - RNA, 32 nt, Homo Sapiens
uguguucuuugcaucauucacucucaaacgua

SEQ ID NO: 339542 - RNA, 32 nt, Homo Sapiens
aacaaaacaaacaaacaaaaauacaaaaaauu

SEQ ID NO: 339543 - RNA, 32 nt, Homo Sapiens
ucagaguuauuuaaaaauuguuuauuugagga

SEQ ID NO: 339544 - RNA, 32 nt, Homo Sapiens
uaggcauuuaaaauuucaaauuagauguuaaa

SEQ ID NO: 339545 - RNA, 32 nt, Homo Sapiens
auguccucacaggccugcucauuuucaguccu

SEQ ID NO: 339546 - RNA, 32 nt, Homo Sapiens
ccuucgucuccucucccggcccgggccacuag

SEQ ID NO: 339547 - RNA, 32 nt, Homo Sapiens
agaacccacacgcugguccugccuaugcuagc

SEQ ID NO: 339548 - RNA, 32 nt, Homo Sapiens
gccuccagaaaaggaagcuuuggagagauggg

SEQ ID NO: 339549 - RNA, 32 nt, Homo Sapiens
uuuuuauuuuuaaugucuugacucuucagagu

SEQ ID NO: 339550 - RNA, 32 nt, Homo Sapiens
gaagcgguuuacauuuacaccuguaaauuuau

SEQ ID NO: 339551 - RNA, 32 nt, Homo Sapiens
uggaucccauuguaggagagccagaauacugc

SEQ ID NO: 339552 - RNA, 32 nt, Homo Sapiens
gugcccucuggacuuuaguaggcuuugguaaa

SEQ ID NO: 339553 - RNA, 32 nt, Homo Sapiens
cuccagccuguuuguggggcugaaaccccauc

SEQ ID NO: 339554 - RNA, 32 nt, Homo Sapiens
gagguuuuggugucccugguccucugggaaua

SEQ ID NO: 339555 - RNA, 32 nt, Homo Sapiens
gaaaugaaaaucaaaaccacaaugagauauca

SEQ ID NO: 339556 - RNA, 32 nt, Homo Sapiens
uuuuaaaauaaauacaaauguuuauuucagaa

SEQ ID NO: 339557 - RNA, 32 nt, Homo Sapiens
uccaucuggcccagccccugaagguccugggg

SEQ ID NO: 339558 - RNA, 31 nt, Homo Sapiens
gucccugcucggggaucuccaaggggugacg

SEQ ID NO: 339559 - RNA, 32 nt, Homo Sapiens
cccucagccuccuggggacucgagccggggau

SEQ ID NO: 339560 - RNA, 32 nt, Homo Sapiens
aggacaggucaggaaggagagaucugacugag

SEQ ID NO: 339561 - RNA, 32 nt, Homo Sapiens
caaaaagccuagaaggacaggauacuuugugg

SEQ ID NO: 339562 - RNA, 32 nt, Homo Sapiens
ccccuucuagaauucccuauaagaucagagga

SEQ ID NO: 339563 - RNA, 32 nt, Homo Sapiens
gcugccugccaaaaucuguuccgcuguaacag

SEQ ID NO: 339564 - RNA, 32 nt, Homo Sapiens
uugucacaaaaauagauuugauuauauuuggu

SEQ ID NO: 339565 - RNA, 32 nt, Homo Sapiens
gggcuguguucggagucugcgucguuucguau

SEQ ID NO: 339566 - RNA, 32 nt, Homo Sapiens
ugcaaugugaaaccucucgcugcugcuagguu

SEQ ID NO: 339567 - RNA, 32 nt, Homo Sapiens
cacuguggaagacaguguggugauuccucaaa

SEQ ID NO: 339568 - RNA, 32 nt, Homo Sapiens
ccuggugggggagaggaagaaggaggguagaa

SEQ ID NO: 339569 - RNA, 32 nt, Homo Sapiens
ugacgaugaugaugaugaucggguuuuuggga

SEQ ID NO: 339570 - RNA, 32 nt, Homo Sapiens
ccauaggcauugcccaggauagcagccuugcc

SEQ ID NO: 339571 - RNA, 32 nt, Homo Sapiens
gcgugcaguggucccucuccccggacuugcac

SEQ ID NO: 339572 - RNA, 32 nt, Homo Sapiens
aggcugggccucaagacuagugaggccugucc

SEQ ID NO: 339573 - RNA, 32 nt, Homo Sapiens
aaaggcaaaugugaaucucaccaacauggcuc

SEQ ID NO: 339574 - RNA, 32 nt, Homo Sapiens
aucgaggaacagaagaaaguaauuauagaccu

SEQ ID NO: 339575 - RNA, 32 nt, Homo Sapiens
caguggcaggcaccuccuccucaggugccccc

SEQ ID NO: 339576 - RNA, 32 nt, Homo Sapiens
ggcaccuaugucugccguggcuccucgggugg

SEQ ID NO: 339577 - RNA, 32 nt, Homo Sapiens
ccguccggaaaagaaggacccagagggaagaa

SEQ ID NO: 339578 - RNA, 32 nt, Homo Sapiens
aaucucugaugauggggcccaggaucacaugu

SEQ ID NO: 339579 - RNA, 32 nt, Homo Sapiens
auaauuuguauuucuuuuuucuugcaauuuaa

SEQ ID NO: 339580 - RNA, 32 nt, Homo Sapiens
aguccggagaggaaaagggacauggcucccgu

SEQ ID NO: 339581 - RNA, 31 nt, Homo Sapiens
uagaaccgaaauuguaacuauguauuguauu

SEQ ID NO: 339582 - RNA, 32 nt, Homo Sapiens
caucauuaauuaugcacuuuguccucuggacc

SEQ ID NO: 339583 - RNA, 32 nt, Homo Sapiens
gcucugggagacgaggugcagguucuagagug

SEQ ID NO: 339584 - RNA, 32 nt, Homo Sapiens
agcgaccgagcccagagagacggagcaaguug

SEQ ID NO: 339585 - RNA, 32 nt, Homo Sapiens
cugagcuuaaaaucggcugcuuccuggacuug

SEQ ID NO: 339586 - RNA, 32 nt, Homo Sapiens
auggugaaagagaguggagauacggaaggggg

SEQ ID NO: 339587 - RNA, 32 nt, Homo Sapiens
uuuucuuaagggguaaaggccuuuuacagaag

SEQ ID NO: 339588 - RNA, 30 nt, Homo Sapiens
ccacaggagcccgugcccacgcuguggaac

SEQ ID NO: 339589 - RNA, 32 nt, Homo Sapiens
cuuccucugcaccugccuccucugggaugugc

SEQ ID NO: 339590 - RNA, 32 nt, Homo Sapiens
uucugggauacaugugcagaaugugcagguuu

SEQ ID NO: 339591 - RNA, 32 nt, Homo Sapiens
cuuacuuuuagauuuaaaguuacuuuggguau

SEQ ID NO: 339592 - RNA, 32 nt, Homo Sapiens
gcaugaggaaacaaaucauuggugauuuauuc

SEQ ID NO: 339593 - RNA, 32 nt, Homo Sapiens
uguguguaagauugauucagcauuccaugcac

SEQ ID NO: 339594 - RNA, 32 nt, Homo Sapiens
cugugggaggggcugcuacugcugccgcugcu

SEQ ID NO: 339595 - RNA, 32 nt, Homo Sapiens
cuacagaagacauagaagauggggaaaugcca

SEQ ID NO: 339596 - RNA, 32 nt, Homo Sapiens
ccaggccggggcucccaggcgagggggacuug

SEQ ID NO: 339597 - RNA, 32 nt, Homo Sapiens
uuuuaguagagacaguguuuugccauguuggc

SEQ ID NO: 339598 - RNA, 32 nt, Homo Sapiens
agcuuuggcuauacucucuccucccgaccccc

SEQ ID NO: 339599 - RNA, 32 nt, Homo Sapiens
acugcaugaagauaaagaggaagcuauucaga

SEQ ID NO: 339600 - RNA, 32 nt, Homo Sapiens
caugcugcacuaggagcagagcccugcaccug

SEQ ID NO: 339601 - RNA, 28 nt, Homo Sapiens
gugaagguuacaggugugagcccuuaua

SEQ ID NO: 339602 - RNA, 32 nt, Homo Sapiens
cacaauuuacacaauccuguggauaguccuac

SEQ ID NO: 339603 - RNA, 23 nt, Homo Sapiens
gcccuccuucgacgaggcgcugc

SEQ ID NO: 339604 - RNA, 32 nt, Homo Sapiens
auucuguaccagagguaacauaagugcuccaa

SEQ ID NO: 339605 - RNA, 32 nt, Homo Sapiens
ucuccuuucucuucuugcuucaauugcuuacc

SEQ ID NO: 339606 - RNA, 32 nt, Homo Sapiens
ggggccgccacggccuggcuggugggaaggcc

SEQ ID NO: 339607 - RNA, 32 nt, Homo Sapiens
aagcccagccaauuuuuuguauuuucaguaga

SEQ ID NO: 339608 - RNA, 32 nt, Homo Sapiens
ccugguucauuuccaagaaccaggugggcaua

SEQ ID NO: 339609 - RNA, 32 nt, Homo Sapiens
caacucuaaugcugcaucuuggacuauccgaa

SEQ ID NO: 339610 - RNA, 32 nt, Homo Sapiens
gaauucccgggucuuuuuuaguuccagcucuc

SEQ ID NO: 339611 - RNA, 32 nt, Homo Sapiens
ccccagcacauccucagccgcacagacacucg

SEQ ID NO: 339612 - RNA, 32 nt, Homo Sapiens
caucagauaugcuggaagauccaaacgugcau

SEQ ID NO: 339613 - RNA, 32 nt, Homo Sapiens
ucauuguuuguccuuuauguauucucuucuac

SEQ ID NO: 339614 - RNA, 32 nt, Homo Sapiens
gcugguucccaggcccugccagcccugcugca

SEQ ID NO: 339615 - RNA, 32 nt, Homo Sapiens
acccaccggacccucgcacgccgugccaggcc

SEQ ID NO: 339616 - RNA, 32 nt, Homo Sapiens
gaaauaaucuucuguguccuucaguuggacuc

SEQ ID NO: 339617 - RNA, 32 nt, Homo Sapiens
uacuccccaagccagagcccaucagccaggcc

SEQ ID NO: 339618 - RNA, 32 nt, Homo Sapiens
auaguugaaggcauucuccagauucuuuuuaa

SEQ ID NO: 339619 - RNA, 32 nt, Homo Sapiens
cugcuuccggugcagcacccgcaccacccauc

SEQ ID NO: 339620 - RNA, 32 nt, Homo Sapiens
guaaagaguuuaggguuugauuuuauaaaauc

SEQ ID NO: 339621 - RNA, 32 nt, Homo Sapiens
agaugaggaaacugaggcucagagaggcuagg

SEQ ID NO: 339622 - RNA, 32 nt, Homo Sapiens
auggggccugcagccacuggcauugccaagaa

SEQ ID NO: 339623 - RNA, 32 nt, Homo Sapiens
acaaauguauaaaugcuguagcucaggauuau

SEQ ID NO: 339624 - RNA, 32 nt, Homo Sapiens
ugccucccggccaccgccccagccucacccca

SEQ ID NO: 339625 - RNA, 32 nt, Homo Sapiens
guguaagaacugugacuucagaucauccaaug

SEQ ID NO: 339626 - RNA, 32 nt, Homo Sapiens
ugaauggccccugucccuggccccacagacuc

SEQ ID NO: 339627 - RNA, 32 nt, Homo Sapiens
gugagccaauccaacuguccugcacaagucuc

SEQ ID NO: 339628 - RNA, 32 nt, Homo Sapiens
aaaggcucccuguguucucaccgugaucaagu

SEQ ID NO: 339629 - RNA, 32 nt, Homo Sapiens
agcaggaauaaauuuuguuaaucuucaaaaag

SEQ ID NO: 339630 - RNA, 31 nt, Homo Sapiens
augauguucugcaugauugugcuguucggcu

SEQ ID NO: 339631 - RNA, 32 nt, Homo Sapiens
cuggucauuucccccaaaggcaucccagccug

SEQ ID NO: 339632 - RNA, 32 nt, Homo Sapiens
cuaucaugacuuuuuucuuucugcauuuuccu

SEQ ID NO: 339633 - RNA, 32 nt, Homo Sapiens
aaaauuauaaggucauaaauguuuugguacuu

SEQ ID NO: 339634 - RNA, 32 nt, Homo Sapiens
gaggacguugucagaugcuuguccucgucacc

SEQ ID NO: 339635 - RNA, 32 nt, Homo Sapiens
gcuuugcccugagacuccaagaagcugcggga

SEQ ID NO: 339636 - RNA, 27 nt, Homo Sapiens
gcauggagggcccugaagggcugggcc

SEQ ID NO: 339637 - RNA, 32 nt, Homo Sapiens
gugcuagucaagucaucaaaccacuucagguc

SEQ ID NO: 339638 - RNA, 32 nt, Homo Sapiens
auacaaaaauuguacacaucuuauagcugaac

SEQ ID NO: 339639 - RNA, 32 nt, Homo Sapiens
cuugucuuuuucuggacugaagccugcaggag

SEQ ID NO: 339640 - RNA, 32 nt, Homo Sapiens
cgaaagggguaauauaaaaaugugcucgugug

SEQ ID NO: 339641 - RNA, 32 nt, Homo Sapiens
gcgcggagaagcaaccggcacccccuuccggc

SEQ ID NO: 339642 - RNA, 32 nt, Homo Sapiens
ucauggcagucuuuuuaaucuuuuuaucauau

SEQ ID NO: 339643 - RNA, 32 nt, Homo Sapiens
ucucugaaacaaaaggaguuuaugauauagca

SEQ ID NO: 339644 - RNA, 32 nt, Homo Sapiens
gacacuguauauauuucuugccauaaugguaa

SEQ ID NO: 339645 - RNA, 32 nt, Homo Sapiens
agaaaaaagggauccuagccccugccaaauuc

SEQ ID NO: 339646 - RNA, 32 nt, Homo Sapiens
ggcgccgggggucugcgggcgaggggagcucu

SEQ ID NO: 339647 - RNA, 32 nt, Homo Sapiens
auuauuugauuugccucaaacauccacuguaa

SEQ ID NO: 339648 - RNA, 32 nt, Homo Sapiens
auucaggcugggaaccugaacacacacuugug

SEQ ID NO: 339649 - RNA, 32 nt, Homo Sapiens
ugugcgcuccgcccgcgcuccccucccggaga

SEQ ID NO: 339650 - RNA, 32 nt, Homo Sapiens
uuuucauuuacuaucuugaucauagaguuugg

SEQ ID NO: 339651 - RNA, 32 nt, Homo Sapiens
auuaguuucugagaaaacacaaugaagcacuu

SEQ ID NO: 339652 - RNA, 32 nt, Homo Sapiens
auuuuuguugguuuuuauuuuuggggggaaug

SEQ ID NO: 339653 - RNA, 32 nt, Homo Sapiens
ggauaaauuggaauuuuuuauguugucucucu

SEQ ID NO: 339654 - RNA, 32 nt, Homo Sapiens
gcggagccccgaugcuggcccggaggaagccg

SEQ ID NO: 339655 - RNA, 32 nt, Homo Sapiens
ccacaccucuucccggccccugaaguuggcac

SEQ ID NO: 339656 - RNA, 32 nt, Homo Sapiens
ggugggggaggguggggcgggggcagcuuucg

SEQ ID NO: 339657 - RNA, 30 nt, Homo Sapiens
agcccggugccagugccgcccgcagcccgc

SEQ ID NO: 339658 - RNA, 32 nt, Homo Sapiens
uacuuuaucucucacacguauuuuacaaaacg

SEQ ID NO: 339659 - RNA, 32 nt, Homo Sapiens
aguagugugucuucagccuuuaccaaauuauc

SEQ ID NO: 339660 - RNA, 28 nt, Homo Sapiens
uggugugggcggccuccgcuauggcugc

SEQ ID NO: 339661 - RNA, 32 nt, Homo Sapiens
ucuuuugauucccaaugagaaguucuauuuuc

SEQ ID NO: 339662 - RNA, 32 nt, Homo Sapiens
cggaagcugcaggggaagcggcugggccagcu

SEQ ID NO: 339663 - RNA, 32 nt, Homo Sapiens
agggccagccugccaugaucuuucucacuuac

SEQ ID NO: 339664 - RNA, 32 nt, Homo Sapiens
uaauguacagcauaggugguaauggauguaau

SEQ ID NO: 339665 - RNA, 32 nt, Homo Sapiens
ggggagggcauauuuacaguuuuucccacaga

SEQ ID NO: 339666 - RNA, 32 nt, Homo Sapiens
uuuuugaacuucuuggaucuguggguuuauug

SEQ ID NO: 339667 - RNA, 32 nt, Homo Sapiens
aagaauuuggugaauuuuaagaggaacaagau

SEQ ID NO: 339668 - RNA, 32 nt, Homo Sapiens
ccugugcggagcaaggcgguguuucugagagg

SEQ ID NO: 339669 - RNA, 32 nt, Homo Sapiens
gcggccucccgcuccagcccggcucauuccgc

SEQ ID NO: 339670 - RNA, 32 nt, Homo Sapiens
ugcaggcgggccuggggucucaguggagggga

SEQ ID NO: 339671 - RNA, 32 nt, Homo Sapiens
gcuuuggagaaaggacugcucuguggagcaga

SEQ ID NO: 339672 - RNA, 32 nt, Homo Sapiens
uuguccuucaguaccuggcucccuuuucagcu

SEQ ID NO: 339673 - RNA, 32 nt, Homo Sapiens
caaguguuuaucuccaggaucuagccaccggg

SEQ ID NO: 339674 - RNA, 32 nt, Homo Sapiens
gcgucucgggcgaggagaagaggugacccgcg

SEQ ID NO: 339675 - RNA, 29 nt, Homo Sapiens
uaugauuugucaauuaaaaauauuaguac

SEQ ID NO: 339676 - RNA, 32 nt, Homo Sapiens
accaccaauuagcuguaugaccuuuagcaagu

SEQ ID NO: 339677 - RNA, 32 nt, Homo Sapiens
augcauaggagcuucagggacaccugcuucca

SEQ ID NO: 339678 - RNA, 32 nt, Homo Sapiens
ugccucucguggccucaacgggcccauccccu

SEQ ID NO: 339679 - RNA, 32 nt, Homo Sapiens
ggagguugcagugagucagaucgugccacugc

SEQ ID NO: 339680 - RNA, 32 nt, Homo Sapiens
gguacccgccugagcuccugcugcggaggagc

SEQ ID NO: 339681 - RNA, 32 nt, Homo Sapiens
ggugaaaagagaugaaaugugguuguaugagc

SEQ ID NO: 339682 - RNA, 32 nt, Homo Sapiens
gcugcgcggcgguggcugaugcgguagccgug

SEQ ID NO: 339683 - RNA, 32 nt, Homo Sapiens
uaagagaauguuuuauacuauagccacaauuc

SEQ ID NO: 339684 - RNA, 32 nt, Homo Sapiens
ugauuugagauugguccauguugugugauuca

SEQ ID NO: 339685 - RNA, 32 nt, Homo Sapiens
gaaggagaccacuacuacucuugcugcccucc

SEQ ID NO: 339686 - RNA, 32 nt, Homo Sapiens
uuugaccaagacacagaagaugaugaauggga

SEQ ID NO: 339687 - RNA, 32 nt, Homo Sapiens
ccuggugcguccuggaggcguccccaggacuu

SEQ ID NO: 339688 - RNA, 32 nt, Homo Sapiens
aaacuucagacucgacggaacuucuggucugu

SEQ ID NO: 339689 - RNA, 32 nt, Homo Sapiens
cgcgaagaggggcggugcugacgccggccggu

SEQ ID NO: 339690 - RNA, 32 nt, Homo Sapiens
cugcauccuucugcccucccccagaagcagca

SEQ ID NO: 339691 - RNA, 32 nt, Homo Sapiens
gucgucgccauuuugagcuggugacuguggcc

SEQ ID NO: 339692 - RNA, 32 nt, Homo Sapiens
aucgacaaagauuacauucugaguaccaacca

SEQ ID NO: 339693 - RNA, 32 nt, Homo Sapiens
uuuuccucaaaauaaacaaguccuuauuaaac

SEQ ID NO: 339694 - RNA, 32 nt, Homo Sapiens
gucucgaaauggacaugauagauccagggaug

SEQ ID NO: 339695 - RNA, 32 nt, Homo Sapiens
aaucuuggagaaugaccauggagaaggggaug

SEQ ID NO: 339696 - RNA, 32 nt, Homo Sapiens
cugcaggccaaggggacaugccugccaccacc

SEQ ID NO: 339697 - RNA, 31 nt, Homo Sapiens
cugaggauggagaggagggcgcggagcuccu

SEQ ID NO: 339698 - RNA, 32 nt, Homo Sapiens
gcaacccuggcccacacccgcaugcgcccggu

SEQ ID NO: 339699 - RNA, 32 nt, Homo Sapiens
gccaggggccaucaaaaacaggcugaucacca

SEQ ID NO: 339700 - RNA, 32 nt, Homo Sapiens
gugaagagggauccugugcaggggccaccugg

SEQ ID NO: 339701 - RNA, 32 nt, Homo Sapiens
agggauuugcuuaaucaguaagucuuugugaa

SEQ ID NO: 339702 - RNA, 32 nt, Homo Sapiens
ucagggcccugccccaggccuggacgggcccu

SEQ ID NO: 339703 - RNA, 32 nt, Homo Sapiens
uuaccuuucuaccucuaacuaaucagguauug

SEQ ID NO: 339704 - RNA, 32 nt, Homo Sapiens
gucaacugcuguacccagaaaucuagaacucu

SEQ ID NO: 339705 - RNA, 32 nt, Homo Sapiens
uggcuuaauuuucuuuguguucugaauucuca

SEQ ID NO: 339706 - RNA, 32 nt, Homo Sapiens
uauuuuaaauguucuguaaauuauuagccaaa

SEQ ID NO: 339707 - RNA, 32 nt, Homo Sapiens
cacacuuauugcaggucagugauccuuuggag

SEQ ID NO: 339708 - RNA, 32 nt, Homo Sapiens
ccccccaacuuagcggguuaugcuggaccggg

SEQ ID NO: 339709 - RNA, 32 nt, Homo Sapiens
gccgagagaaggaaaagaaaugcuaggagaag

SEQ ID NO: 339710 - RNA, 32 nt, Homo Sapiens
gacacuguucuucucgaggccuggccagcccu

SEQ ID NO: 339711 - RNA, 32 nt, Homo Sapiens
aaauauuuaauccuaauucuuaguccuugccu

SEQ ID NO: 339712 - RNA, 32 nt, Homo Sapiens
cagcgagcaccgugaacgacugcaaugcaagc

SEQ ID NO: 339713 - RNA, 32 nt, Homo Sapiens
accgaccucugccuggagacgcagcagccugu

SEQ ID NO: 339714 - RNA, 32 nt, Homo Sapiens
cucuuuuuuuuuuuuuuuuuuaaaaggggcag

SEQ ID NO: 339715 - RNA, 32 nt, Homo Sapiens
augauagauaaugccuuuuugguuuugugugg

SEQ ID NO: 339716 - RNA, 32 nt, Homo Sapiens
acgcaggcacugggcucgugcggggccccggg

SEQ ID NO: 339717 - RNA, 32 nt, Homo Sapiens
auaauaaauuuuuaaaguacuaauuaggcauu

SEQ ID NO: 339718 - RNA, 32 nt, Homo Sapiens
ggagcuguuggaauucaaauagacuuucuggu

SEQ ID NO: 339719 - RNA, 31 nt, Homo Sapiens
auuagcaguuggucuauucagaaucaaaccu

SEQ ID NO: 339720 - RNA, 32 nt, Homo Sapiens
uaaauaauuuaaaaguuaacaaacuaaacugu

SEQ ID NO: 339721 - RNA, 32 nt, Homo Sapiens
gggcuggacgaggaggcgacgccggggacgcc

SEQ ID NO: 339722 - RNA, 32 nt, Homo Sapiens
uaggcuguagauggaagaugguccugggauuc

SEQ ID NO: 339723 - RNA, 32 nt, Homo Sapiens
ugggcaccucgcgacaggugggaggaaagggc

SEQ ID NO: 339724 - RNA, 32 nt, Homo Sapiens
uugacaaauuuggaagcagcagggccagagag

SEQ ID NO: 339725 - RNA, 32 nt, Homo Sapiens
uuugauucuauuucuuggccuucucuucucug

SEQ ID NO: 339726 - RNA, 32 nt, Homo Sapiens
uuggggacccugguaccccagccccaagccag

SEQ ID NO: 339727 - RNA, 32 nt, Homo Sapiens
gcugggcucucaaggcagcugcuccaggaggg

SEQ ID NO: 339728 - RNA, 32 nt, Homo Sapiens
cuugccuucuaaaugaucaauuuacuucuccc

SEQ ID NO: 339729 - RNA, 32 nt, Homo Sapiens
uuuuaaaaaaaauuauaauauucagacuauuc

SEQ ID NO: 339730 - RNA, 29 nt, Homo Sapiens
aauugguggcccugccugcccccagcagc

SEQ ID NO: 339731 - RNA, 27 nt, Homo Sapiens
uagcugagcuucuucauucuccuucuu

SEQ ID NO: 339732 - RNA, 32 nt, Homo Sapiens
aguauuaaugaaauagguuccagugaugaaaa

SEQ ID NO: 339733 - RNA, 32 nt, Homo Sapiens
acagcagaacagaggcaggucaggguuguccg

SEQ ID NO: 339734 - RNA, 32 nt, Homo Sapiens
cgaaguuuuauaucuuagaauuuuauauuuau

SEQ ID NO: 339735 - RNA, 32 nt, Homo Sapiens
gacagggucucacuuugucacccaggcuagag

SEQ ID NO: 339736 - RNA, 32 nt, Homo Sapiens
gguuggguguugugacucacuccaccucugug

SEQ ID NO: 339737 - RNA, 32 nt, Homo Sapiens
ucacgugucccgcuggccccagcacccaggua

SEQ ID NO: 339738 - RNA, 32 nt, Homo Sapiens
uggaaacugaaguucugcugagggcugagcag

SEQ ID NO: 339739 - RNA, 32 nt, Homo Sapiens
ccggggagggcgggccuuggccccgagugaag

SEQ ID NO: 339740 - RNA, 32 nt, Homo Sapiens
ggcacaccccccucaccccagcccugcgcaug

SEQ ID NO: 339741 - RNA, 32 nt, Homo Sapiens
aaauaagcuuuuccaaucuccuccccucuguu

SEQ ID NO: 339742 - RNA, 32 nt, Homo Sapiens
acucgaucccggccccacuuccaggccagugu

SEQ ID NO: 339743 - RNA, 32 nt, Homo Sapiens
cuugcuugacaacccucaaacaucuuugagca

SEQ ID NO: 339744 - RNA, 32 nt, Homo Sapiens
guauccugccccacccccuccucauccuaaga

SEQ ID NO: 339745 - RNA, 32 nt, Homo Sapiens
uggacacguggaccagggcccucuaccaagaa

SEQ ID NO: 339746 - RNA, 32 nt, Homo Sapiens
ugaggacaggugguguacaugcaucuuuucug

SEQ ID NO: 339747 - RNA, 32 nt, Homo Sapiens
ucuuuaggcauuuccucuuuuccccgccugca

SEQ ID NO: 339748 - RNA, 32 nt, Homo Sapiens
guuaaaguguuguuuuguuuugucuuuuuaag

SEQ ID NO: 339749 - RNA, 32 nt, Homo Sapiens
gugcaguggcgcagucucggcucacugcaacc

SEQ ID NO: 339750 - RNA, 32 nt, Homo Sapiens
ccugcuuuagaaugcuaguguguaucuaucau

SEQ ID NO: 339751 - RNA, 32 nt, Homo Sapiens
uuguuuuuugaagaacugucuuggauaccuau

SEQ ID NO: 339752 - RNA, 32 nt, Homo Sapiens
uuacucugucccucuggaccgaaucucuuuaa

SEQ ID NO: 339753 - RNA, 32 nt, Homo Sapiens
cccucucugugauauugacuuuccuguggauc

SEQ ID NO: 339754 - RNA, 32 nt, Homo Sapiens
gaugccccugcccucaguuuccccucaugauc

SEQ ID NO: 339755 - RNA, 32 nt, Homo Sapiens
uuauugccgucauucuguggcuugucaauucc

SEQ ID NO: 339756 - RNA, 30 nt, Homo Sapiens
auaaugcuuaaaagacauaugcaaauuguc

SEQ ID NO: 339757 - RNA, 32 nt, Homo Sapiens
gggccgccagugucgacaugcugcuggaggag

SEQ ID NO: 339758 - RNA, 32 nt, Homo Sapiens
cugcagggcgggaugaacagggaccaacggaa

SEQ ID NO: 339759 - RNA, 32 nt, Homo Sapiens
aaaucaguauaaaauguuuuaugauuguuaug

SEQ ID NO: 339760 - RNA, 32 nt, Homo Sapiens
ccagucucagauauuucuucauagcaguguga

SEQ ID NO: 339761 - RNA, 32 nt, Homo Sapiens
ggacucaggcuggcagaggggcuggugcccug

SEQ ID NO: 339762 - RNA, 32 nt, Homo Sapiens
uuuugucuguuguuuuucacugcaccucuuug

SEQ ID NO: 339763 - RNA, 32 nt, Homo Sapiens
ggcugucgccuggcgccgcgcauggcccacgc

SEQ ID NO: 339764 - RNA, 32 nt, Homo Sapiens
aaccaaagguaauaacauauuuagaccaauau

SEQ ID NO: 339765 - RNA, 32 nt, Homo Sapiens
ugccuggaaggggccgcgcguguguucaugcc

SEQ ID NO: 339766 - RNA, 32 nt, Homo Sapiens
ccuggcccuuuucucugggcuguagugaagcc

SEQ ID NO: 339767 - RNA, 32 nt, Homo Sapiens
auuccgauucccuccgggccuccccggccacg

SEQ ID NO: 339768 - RNA, 32 nt, Homo Sapiens
aagucuccuguccugcccuuuauguguguggg

SEQ ID NO: 339769 - RNA, 31 nt, Homo Sapiens
guuccugagaaugaacagguaauuucaugcu

SEQ ID NO: 339770 - RNA, 32 nt, Homo Sapiens
acagugagggugggagcagcggaacagggaau

SEQ ID NO: 339771 - RNA, 32 nt, Homo Sapiens
uuuugucuuagugcuugcaggcacuuuauaag

SEQ ID NO: 339772 - RNA, 32 nt, Homo Sapiens
ugaacuuugucaauuaauuugaggcuauuucc

SEQ ID NO: 339773 - RNA, 32 nt, Homo Sapiens
agggacggagccaagauggcggcggccgacgg

SEQ ID NO: 339774 - RNA, 27 nt, Homo Sapiens
agcuggcggcggcggcggcugugagcu

SEQ ID NO: 339775 - RNA, 32 nt, Homo Sapiens
gcuagucacacuuuucagaccaauucaaacug

SEQ ID NO: 339776 - RNA, 32 nt, Homo Sapiens
ucauuugauacuuuuaauuuacacuuaguaaa

SEQ ID NO: 339777 - RNA, 32 nt, Homo Sapiens
cucaggcauuggcucauguuuucagccaggga

SEQ ID NO: 339778 - RNA, 32 nt, Homo Sapiens
gaagagggaagcauagggcuccuagggcacca

SEQ ID NO: 339779 - RNA, 32 nt, Homo Sapiens
aaacccggaagugagcggcggcagcugcgagg

SEQ ID NO: 339780 - RNA, 32 nt, Homo Sapiens
ggcccuggccuggcccguggcgcauccucacu

SEQ ID NO: 339781 - RNA, 32 nt, Homo Sapiens
ugcugaaaauuugaguugacaaaauaaaauuc

SEQ ID NO: 339782 - RNA, 32 nt, Homo Sapiens
gggggaaaaauaaacgucgugccguuagcuuu

SEQ ID NO: 339783 - RNA, 32 nt, Homo Sapiens
ugcuugcucucuuccuucucauucaagaaacc

SEQ ID NO: 339784 - RNA, 31 nt, Homo Sapiens
uugcaaggugugaccgcaggaauccuggagg

SEQ ID NO: 339785 - RNA, 32 nt, Homo Sapiens
acugugggcuugccgcugcugcugaugucccu

SEQ ID NO: 339786 - RNA, 32 nt, Homo Sapiens
ugccacauccggagaauuaaggauaaagugua

SEQ ID NO: 339787 - RNA, 32 nt, Homo Sapiens
gaaguuguagcaugcauaccacagaaucaaaa

SEQ ID NO: 339788 - RNA, 32 nt, Homo Sapiens
gacaggacaggguggggguggacgccaggguu

SEQ ID NO: 339789 - RNA, 32 nt, Homo Sapiens
aacaaauaagucaauuaaguacacuuuauuga

SEQ ID NO: 339790 - RNA, 32 nt, Homo Sapiens
ccgccgaagcagagccggcgccgggguccuca

SEQ ID NO: 339791 - RNA, 32 nt, Homo Sapiens
ggugguccccgucuggggggccccuccagcca

SEQ ID NO: 339792 - RNA, 32 nt, Homo Sapiens
cgauucgggccagaagcagagaacaggaaguu

SEQ ID NO: 339793 - RNA, 32 nt, Homo Sapiens
uuuguuugagacagcaucuugcucugucuccc

SEQ ID NO: 339794 - RNA, 32 nt, Homo Sapiens
ggggagugggggagccuucggguguggcagaa

SEQ ID NO: 339795 - RNA, 32 nt, Homo Sapiens
uuuuuaauuuauuuuucuucaucuuuuauaac

SEQ ID NO: 339796 - RNA, 32 nt, Homo Sapiens
ggucuaauauccagcagcuauaaggaacuuaa

SEQ ID NO: 339797 - RNA, 32 nt, Homo Sapiens
guucucaaggguuauguggggcgugggcucuc

SEQ ID NO: 339798 - RNA, 32 nt, Homo Sapiens
gcuuugucuggaagaaagauaaaauagugaau

SEQ ID NO: 339799 - RNA, 32 nt, Homo Sapiens
uucacugccugcguuccugggagcgucuggag

SEQ ID NO: 339800 - RNA, 32 nt, Homo Sapiens
aaacauuuugggaaaucuuccaucuugcugug

SEQ ID NO: 339801 - RNA, 32 nt, Homo Sapiens
acagcauguaacauaacacuauuugucuaaag

SEQ ID NO: 339802 - RNA, 32 nt, Homo Sapiens
ccaggaguugugacagacuuuccuccucauca

SEQ ID NO: 339803 - RNA, 32 nt, Homo Sapiens
caggaugggcugagcuagccuccagcuuuggg

SEQ ID NO: 339804 - RNA, 32 nt, Homo Sapiens
cuuaaggagguagcucccagcacucaaccaac

SEQ ID NO: 339805 - RNA, 29 nt, Homo Sapiens
acaaaagaaacaaaaauaucugaagaaag

SEQ ID NO: 339806 - RNA, 32 nt, Homo Sapiens
gaggguaccacauagcagaugcugggaccuuu

SEQ ID NO: 339807 - RNA, 32 nt, Homo Sapiens
agcaggggcggggacuggagccugcugcccuu

SEQ ID NO: 339808 - RNA, 32 nt, Homo Sapiens
agaaaagaccucugaaucuagaaaugagagac

SEQ ID NO: 339809 - RNA, 32 nt, Homo Sapiens
guuuuuuaaagauaccgugcuucuccacaucc

SEQ ID NO: 339810 - RNA, 32 nt, Homo Sapiens
agauuccggaggguaccugugcagguuuauua

SEQ ID NO: 339811 - RNA, 32 nt, Homo Sapiens
ugcugacuguucuuguggaucuuguguccagg

SEQ ID NO: 339812 - RNA, 32 nt, Homo Sapiens
gccacuuucucuucuuuugaauuugaacucug

SEQ ID NO: 339813 - RNA, 32 nt, Homo Sapiens
aacauaccccuaacuuucucaccucugugccu

SEQ ID NO: 339814 - RNA, 28 nt, Homo Sapiens
uagaaacagcaggugaugacucugcacu

SEQ ID NO: 339815 - RNA, 32 nt, Homo Sapiens
ggccuuggagggcuggggagugucaugggggu

SEQ ID NO: 339816 - RNA, 32 nt, Homo Sapiens
ccugcggcaccugccccagagcccguuugugg

SEQ ID NO: 339817 - RNA, 32 nt, Homo Sapiens
agucucauugucugguaaaucuaauuuuaacc

SEQ ID NO: 339818 - RNA, 32 nt, Homo Sapiens
agugaaacauauuuaaugauuuaaauuucuua

SEQ ID NO: 339819 - RNA, 32 nt, Homo Sapiens
agguugcagugagcaguaaucccgccacugca

SEQ ID NO: 339820 - RNA, 32 nt, Homo Sapiens
uaauagguaaaacuucuucaaaaguagcuugc

SEQ ID NO: 339821 - RNA, 32 nt, Homo Sapiens
caucaaaucuucaacuguuagaauuucacuua

SEQ ID NO: 339822 - RNA, 32 nt, Homo Sapiens
gugcuguuggauggaaaggcuaaccugggagg

SEQ ID NO: 339823 - RNA, 32 nt, Homo Sapiens
uuugcagaugacucauaacuaagcuaaauggu

SEQ ID NO: 339824 - RNA, 32 nt, Homo Sapiens
agccaaauugcaaagaaaauuaugguuucuuu

SEQ ID NO: 339825 - RNA, 32 nt, Homo Sapiens
cuccgggggaggaggguguagcuggcauguca

SEQ ID NO: 339826 - RNA, 32 nt, Homo Sapiens
ugcagcuuucccuuagcucuccaagucugcgg

SEQ ID NO: 339827 - RNA, 32 nt, Homo Sapiens
gggugagggcagcagggaugcccgccagggac

SEQ ID NO: 339828 - RNA, 32 nt, Homo Sapiens
gcaacacagagccaaggcgggugcuggaagcc

SEQ ID NO: 339829 - RNA, 32 nt, Homo Sapiens
uugggccccacggugccacgggcucaggcagc

SEQ ID NO: 339830 - RNA, 32 nt, Homo Sapiens
ugcuuggaaugcugacagcaucaggcaacucu

SEQ ID NO: 339831 - RNA, 32 nt, Homo Sapiens
gggguugccauggacacagaguucuuaaucca

SEQ ID NO: 339832 - RNA, 32 nt, Homo Sapiens
uggagacacgggggacagcguccacacucaga

SEQ ID NO: 339833 - RNA, 32 nt, Homo Sapiens
agccugugcaacaucaugaaacaucaucucua

SEQ ID NO: 339834 - RNA, 32 nt, Homo Sapiens
uagaauuuuaaaacauugacuccaaacugaau

SEQ ID NO: 339835 - RNA, 32 nt, Homo Sapiens
gacauugaugagagaaucacauucagggcagg

SEQ ID NO: 339836 - RNA, 32 nt, Homo Sapiens
ccccaugcugcccacccgccugugggauccac

SEQ ID NO: 339837 - RNA, 32 nt, Homo Sapiens
ggaggauaugagaaaauaaauuccuucuaaac

SEQ ID NO: 339838 - RNA, 32 nt, Homo Sapiens
cugcuauuuggcagaagcugaaauuggagaac

SEQ ID NO: 339839 - RNA, 32 nt, Homo Sapiens
aacauacugucaaggcguaguugcauuugguc

SEQ ID NO: 339840 - RNA, 32 nt, Homo Sapiens
cauuuuauccuuucuuuuuauauucauaaugu

SEQ ID NO: 339841 - RNA, 32 nt, Homo Sapiens
ccacuggacccucucccgggaccuccugcugg

SEQ ID NO: 339842 - RNA, 32 nt, Homo Sapiens
auguaggguuuuaacccuuccauuacuugaau

SEQ ID NO: 339843 - RNA, 32 nt, Homo Sapiens
aaaauauucccgacugagccccguuuccuucg

SEQ ID NO: 339844 - RNA, 32 nt, Homo Sapiens
cggugggccccgugcccuccccgccccacuuu

SEQ ID NO: 339845 - RNA, 32 nt, Homo Sapiens
gguuacacucugggauccuggccaugagguug

SEQ ID NO: 339846 - RNA, 32 nt, Homo Sapiens
auugugguuucauucuguauuuuguuuuuguc

SEQ ID NO: 339847 - RNA, 32 nt, Homo Sapiens
gcugccgcuucucccgcguccgccauuuuguu

SEQ ID NO: 339848 - RNA, 32 nt, Homo Sapiens
ugagcccuacuuuuuuuuuuuaaagcaaugag

SEQ ID NO: 339849 - RNA, 32 nt, Homo Sapiens
ucauucaugcguguuugaauaguucuacaucu

SEQ ID NO: 339850 - RNA, 32 nt, Homo Sapiens
gauuuucugcucaguucaacaaugaaaugaag

SEQ ID NO: 339851 - RNA, 32 nt, Homo Sapiens
uuuggguaagggccgggcugggggcgacgcgc

SEQ ID NO: 339852 - RNA, 32 nt, Homo Sapiens
ucgugggcucagcugcagcugccaccugcaca

SEQ ID NO: 339853 - RNA, 32 nt, Homo Sapiens
uacaguugguauggaaauccacaauuugaugg

SEQ ID NO: 339854 - RNA, 32 nt, Homo Sapiens
ggagaaggcagccagcagcagcugcacuggaa

SEQ ID NO: 339855 - RNA, 32 nt, Homo Sapiens
uaagggggaaagggucuuuccugguuuuauuu

SEQ ID NO: 339856 - RNA, 32 nt, Homo Sapiens
caaauuugauguuaugcaaacaucuugcauuu

SEQ ID NO: 339857 - RNA, 32 nt, Homo Sapiens
gugaucuaguguaaugaaauaaaaugugaucu

SEQ ID NO: 339858 - RNA, 32 nt, Homo Sapiens
uuuuuuuuuuuuucuuuuuuuuuuugcccuua

SEQ ID NO: 339859 - RNA, 32 nt, Homo Sapiens
ugugcccauuuccuagggaaggggaaggagaa

SEQ ID NO: 339860 - RNA, 32 nt, Homo Sapiens
ucuguccuaugugcuauucaaaaauugugucc

SEQ ID NO: 339861 - RNA, 32 nt, Homo Sapiens
agugaccccacuuucacuccugcacagcccac

SEQ ID NO: 339862 - RNA, 32 nt, Homo Sapiens
aagagugagacauucagggccuuuucagcauu

SEQ ID NO: 339863 - RNA, 32 nt, Homo Sapiens
aagggugggucucaguuagcagggguccccag

SEQ ID NO: 339864 - RNA, 32 nt, Homo Sapiens
acucuagauaaaccauaccaugugcuaacugc

SEQ ID NO: 339865 - RNA, 30 nt, Homo Sapiens
gggugcggggcgcagcauugugcggucaug

SEQ ID NO: 339866 - RNA, 30 nt, Homo Sapiens
cggcgggcacuuccggggccggcgcccaga

SEQ ID NO: 339867 - RNA, 32 nt, Homo Sapiens
uuaaauaccgccaccgccgcgcggcggcagcg

SEQ ID NO: 339868 - RNA, 32 nt, Homo Sapiens
gacaguggucugagguugggacaguggcagga

SEQ ID NO: 339869 - RNA, 32 nt, Homo Sapiens
caccagcaccuuccuacaacccuaguuuucca

SEQ ID NO: 339870 - RNA, 32 nt, Homo Sapiens
acuugguuucaaguuaaaucuaauaaaaagga

SEQ ID NO: 339871 - RNA, 32 nt, Homo Sapiens
gugagcugagauugcaccauugcacuccagcc

SEQ ID NO: 339872 - RNA, 32 nt, Homo Sapiens
uggcugcuguguuuccagggggugcuggggga

SEQ ID NO: 339873 - RNA, 32 nt, Homo Sapiens
gaaaacuugaucugugguguuuuguuuuguuu

SEQ ID NO: 339874 - RNA, 32 nt, Homo Sapiens
uguuaagugcuguucauuuaaguuauugaaaa

SEQ ID NO: 339875 - RNA, 32 nt, Homo Sapiens
aaguugguaaaacaacuuuuuaaacucuuauu

SEQ ID NO: 339876 - RNA, 32 nt, Homo Sapiens
ccaaccucaccaucgucugacuacuauguccc

SEQ ID NO: 339877 - RNA, 32 nt, Homo Sapiens
ugaaugacgaaugaaacuauuguuccuguuuc

SEQ ID NO: 339878 - RNA, 32 nt, Homo Sapiens
ucgcuccucgcuccucgcuccucgccccuagg

SEQ ID NO: 339879 - RNA, 32 nt, Homo Sapiens
gcccgugucauucuuccaaccucccugccccc

SEQ ID NO: 339880 - RNA, 32 nt, Homo Sapiens
gcugcucugcccgugacccuuggggauggguu

SEQ ID NO: 339881 - RNA, 32 nt, Homo Sapiens
uguuuucuguuucauaacacaaggcugguugu

SEQ ID NO: 339882 - RNA, 32 nt, Homo Sapiens
guuucuuuaagauguguaaacucauuguccuu

SEQ ID NO: 339883 - RNA, 32 nt, Homo Sapiens
uaugucauuuucuccuuucuuuucacguuacu

SEQ ID NO: 339884 - RNA, 32 nt, Homo Sapiens
auaauguugacaaagaugacuaccucaaugga

SEQ ID NO: 339885 - RNA, 31 nt, Homo Sapiens
ucugcgaugauggcagaagagcacacagauc

SEQ ID NO: 339886 - RNA, 32 nt, Homo Sapiens
uauuuuguuacugugggaggagguggaacugg

SEQ ID NO: 339887 - RNA, 32 nt, Homo Sapiens
uguaaaggcagcuggcagcuuuuugggaaaag

SEQ ID NO: 339888 - RNA, 32 nt, Homo Sapiens
gaccccacugggugccgcuggcagcuuccaga

SEQ ID NO: 339889 - RNA, 32 nt, Homo Sapiens
uuaucugcaugggacauagcuugcuugcuuaa

SEQ ID NO: 339890 - RNA, 32 nt, Homo Sapiens
uuccggccgguccccauggaggcgcuggggaa

SEQ ID NO: 339891 - RNA, 31 nt, Homo Sapiens
gcagcgcagcgcaccgcgggaagauggcguu

SEQ ID NO: 339892 - RNA, 32 nt, Homo Sapiens
aaccugcaucgccccggagcuuauggaggcgu

SEQ ID NO: 339893 - RNA, 31 nt, Homo Sapiens
uccagggcuucuuggguccauccugucucuc

SEQ ID NO: 339894 - RNA, 32 nt, Homo Sapiens
ccugucucccggacgaggaccucaaccccuuc

SEQ ID NO: 339895 - RNA, 32 nt, Homo Sapiens
caagcaggagcuggacaaugcugcuggcaaca

SEQ ID NO: 339896 - RNA, 32 nt, Homo Sapiens
gucggcucgcggauccagcugcagagcgacgu

SEQ ID NO: 339897 - RNA, 32 nt, Homo Sapiens
cgcugcucggggcuuggagauccgcgcaggcu

SEQ ID NO: 339898 - RNA, 32 nt, Homo Sapiens
cuagucuaguuuuauaugaccugguauauuga

SEQ ID NO: 339899 - RNA, 32 nt, Homo Sapiens
cuucguacauucaaugcauggaucaaucagug

SEQ ID NO: 339900 - RNA, 32 nt, Homo Sapiens
uuauaaccaaaggccuccuguucuguuauuuc

SEQ ID NO: 339901 - RNA, 32 nt, Homo Sapiens
gcccaaaaugucaguuguacugaguuugagaa

SEQ ID NO: 339902 - RNA, 32 nt, Homo Sapiens
guugugcagggugaagaccgcuucccugagac

SEQ ID NO: 339903 - RNA, 32 nt, Homo Sapiens
gugagcugggcucgcggucgccccucucgcuc

SEQ ID NO: 339904 - RNA, 32 nt, Homo Sapiens
ggaacccgcggcuucccuggcucccgugagca

SEQ ID NO: 339905 - RNA, 32 nt, Homo Sapiens
cugcccaggccgcugcagcugcacagccucug

SEQ ID NO: 339906 - RNA, 32 nt, Homo Sapiens
auugaaaugaaauuauuuuauuaagagacaca

SEQ ID NO: 339907 - RNA, 32 nt, Homo Sapiens
gcgccgcucccucucaggaugaaggugacggu

SEQ ID NO: 339908 - RNA, 32 nt, Homo Sapiens
uuguguugauuucuuuccuucccaauagguga

SEQ ID NO: 339909 - RNA, 32 nt, Homo Sapiens
auguauuucccuaaguagcacuuuuggagcag

SEQ ID NO: 339910 - RNA, 32 nt, Homo Sapiens
uaggcauagucauuuucuguaucuuuucaccu

SEQ ID NO: 339911 - RNA, 32 nt, Homo Sapiens
ugauuuuucaaaaaguuuuuuuguagaaacag

SEQ ID NO: 339912 - RNA, 31 nt, Homo Sapiens
auuuugaaauaaaguuuagugucuagggcug

SEQ ID NO: 339913 - RNA, 32 nt, Homo Sapiens
gggagggacagagggacagagagauauaaaac

SEQ ID NO: 339914 - RNA, 32 nt, Homo Sapiens
auuuuuacuuguucuuuuuuuuuuuuuuuuuu

SEQ ID NO: 339915 - RNA, 32 nt, Homo Sapiens
guguccaugucugcaagcaguucuucaauaaa

SEQ ID NO: 339916 - RNA, 32 nt, Homo Sapiens
cuaaaaauuuaaaaucuaggaauuuacugaga

SEQ ID NO: 339917 - RNA, 32 nt, Homo Sapiens
uuuauuuauuuuuaagauggaaucuugcucug

SEQ ID NO: 339918 - RNA, 32 nt, Homo Sapiens
cgcccgcgcuggccgcugauagcgggcucaca

SEQ ID NO: 339919 - RNA, 28 nt, Homo Sapiens
cuaugugccuaaucaauguguuucccac

SEQ ID NO: 339920 - RNA, 32 nt, Homo Sapiens
ccagcucucaccagauggccuacguguuugaa

SEQ ID NO: 339921 - RNA, 32 nt, Homo Sapiens
ucauggagggggaggaggaggcggcggcggcg

SEQ ID NO: 339922 - RNA, 32 nt, Homo Sapiens
guugccugggucugugagagcaaagcugaguu

SEQ ID NO: 339923 - RNA, 31 nt, Homo Sapiens
aucaagaacauauuuaauuuaaacuaaugau

SEQ ID NO: 339924 - RNA, 32 nt, Homo Sapiens
cauuaucaaaguccucuuacaauuuauuuucc

SEQ ID NO: 339925 - RNA, 32 nt, Homo Sapiens
cugccgccauuccugcagcaucaccauaagca

SEQ ID NO: 339926 - RNA, 32 nt, Homo Sapiens
uucuugcuuguaaaaauauguauuauacaucu

SEQ ID NO: 339927 - RNA, 32 nt, Homo Sapiens
cgcccuccccucugaccccggccugggcuuca

SEQ ID NO: 339928 - RNA, 32 nt, Homo Sapiens
augccaaagugcuuuucaaucuaguaaaucua

SEQ ID NO: 339929 - RNA, 32 nt, Homo Sapiens
acucugguuuuaagauaaucugaaacaagguc

SEQ ID NO: 339930 - RNA, 32 nt, Homo Sapiens
acagaauucagagcucuuuuugaaagaacuag

SEQ ID NO: 339931 - RNA, 32 nt, Homo Sapiens
gaaauacugauauguaucaucaccuuuuccag

SEQ ID NO: 339932 - RNA, 32 nt, Homo Sapiens
ucaagcacacauaucaaaaaacaaaugagcuc

SEQ ID NO: 339933 - RNA, 32 nt, Homo Sapiens
caguuucagaggugguccaggacccuaugaua

SEQ ID NO: 339934 - RNA, 32 nt, Homo Sapiens
cgacgguacccgugcugcagucgggcacgccg

SEQ ID NO: 339935 - RNA, 32 nt, Homo Sapiens
gcauccggauccugaagugcuccguuugugcc

SEQ ID NO: 339936 - RNA, 32 nt, Homo Sapiens
acauuaaauucuccucuagaucuuuaaaaaua

SEQ ID NO: 339937 - RNA, 32 nt, Homo Sapiens
aggugagaggagaggaaggagaaaacugcauc

SEQ ID NO: 339938 - RNA, 32 nt, Homo Sapiens
gucgugggggacuggugacuccucgguggaaa

SEQ ID NO: 339939 - RNA, 31 nt, Homo Sapiens
uaagcuuugugcucugauaaauuguguucug

SEQ ID NO: 339940 - RNA, 32 nt, Homo Sapiens
gugaauguccgcccgccgcccuggacagaugg

SEQ ID NO: 339941 - RNA, 32 nt, Homo Sapiens
agagaauuucuuccuuuuuuuaaaaaaaaaua

SEQ ID NO: 339942 - RNA, 32 nt, Homo Sapiens
gguuugaaaaggaaaugugcuuuaggcaugag

SEQ ID NO: 339943 - RNA, 32 nt, Homo Sapiens
cagaagcuggcgcgcgcccuccgaaacuacgc

SEQ ID NO: 339944 - RNA, 32 nt, Homo Sapiens
ucgugaggacuguggcccaggaugcugccgaa

SEQ ID NO: 339945 - RNA, 32 nt, Homo Sapiens
gggcccgcugcagccgccgccggcgccgaacu

SEQ ID NO: 339946 - RNA, 32 nt, Homo Sapiens
ugugcagucgccccgcgccccgcgcgacccuu

SEQ ID NO: 339947 - RNA, 32 nt, Homo Sapiens
guggagcugccucuuccuuccccuccucccug

SEQ ID NO: 339948 - RNA, 32 nt, Homo Sapiens
ggggacaaguccguugaggcugccaggcgagu

SEQ ID NO: 339949 - RNA, 32 nt, Homo Sapiens
uuauuuuaaugauaaaaaugacacuaagcuau

SEQ ID NO: 339950 - RNA, 32 nt, Homo Sapiens
aauggaagcauucaaauguuuguuuuaagcuu

SEQ ID NO: 339951 - RNA, 32 nt, Homo Sapiens
uucuuguaaaauugauguucuuuaaaaucguu

SEQ ID NO: 339952 - RNA, 31 nt, Homo Sapiens
caaagggaacgagaaagagaacgugaaagau

SEQ ID NO: 339953 - RNA, 29 nt, Homo Sapiens
uuguccauggugaugucugcacacggaga

SEQ ID NO: 339954 - RNA, 32 nt, Homo Sapiens
ggugauuuuugcaaucuacucaucugacaaag

SEQ ID NO: 339955 - RNA, 32 nt, Homo Sapiens
cagcucuccguccaaagucaaauugcucuuuu

SEQ ID NO: 339956 - RNA, 32 nt, Homo Sapiens
ugccaagauccgagaaaaauuuuagcuuuagu

SEQ ID NO: 339957 - RNA, 32 nt, Homo Sapiens
gcggcuccgggaacauggcucgcuucgcucug

SEQ ID NO: 339958 - RNA, 32 nt, Homo Sapiens
guggaggccccggugucuggguguaauucucg

SEQ ID NO: 339959 - RNA, 32 nt, Homo Sapiens
uuauccaaggagguggcugugcagguggccac

SEQ ID NO: 339960 - RNA, 32 nt, Homo Sapiens
ucacugcuggcgcuuucuuaaucuuuauccaa

SEQ ID NO: 339961 - RNA, 32 nt, Homo Sapiens
guuaagucaaaacaacacguuccucuuucccc

SEQ ID NO: 339962 - RNA, 32 nt, Homo Sapiens
ggguggaggcucaguguguaauaaucucuugu

SEQ ID NO: 339963 - RNA, 32 nt, Homo Sapiens
aaaauccuuaggaaaauccuauagggucgggg

SEQ ID NO: 339964 - RNA, 32 nt, Homo Sapiens
accuauaauaauacaauuuguaguuguuucca

SEQ ID NO: 339965 - RNA, 32 nt, Homo Sapiens
ggccaagcuauaacaucagaaauggugaauga

SEQ ID NO: 339966 - RNA, 32 nt, Homo Sapiens
gccccuuugccugggcacaucugggcucacua

SEQ ID NO: 339967 - RNA, 31 nt, Homo Sapiens
gauggcucggcggugucgcggcugcgaugug

SEQ ID NO: 339968 - RNA, 32 nt, Homo Sapiens
gggguccgcgcgcucgcggcagcuccccgugg

SEQ ID NO: 339969 - RNA, 32 nt, Homo Sapiens
aucuacaucugccuguguacacacacaacuuu

SEQ ID NO: 339970 - RNA, 32 nt, Homo Sapiens
guagccugguguuuggcaucaaaccuggugac

SEQ ID NO: 339971 - RNA, 32 nt, Homo Sapiens
cuugucccaagcccagggacuggcuucucuuu

SEQ ID NO: 339972 - RNA, 32 nt, Homo Sapiens
acgaggucaggagaucgagaccauccuaacac

SEQ ID NO: 339973 - RNA, 32 nt, Homo Sapiens
uuuacguauuagggggaaaaccacuucuacug

SEQ ID NO: 339974 - RNA, 32 nt, Homo Sapiens
ucauguguuuuaaauugucacuucuauucuuu

SEQ ID NO: 339975 - RNA, 30 nt, Homo Sapiens
uguagagagaagcuuguguuuuuguuugua

SEQ ID NO: 339976 - RNA, 32 nt, Homo Sapiens
aggccugcuccccugcgaccgcccugcccccc

SEQ ID NO: 339977 - RNA, 32 nt, Homo Sapiens
aauuuaugucuugguucucaccacucacucau

SEQ ID NO: 339978 - RNA, 32 nt, Homo Sapiens
guacucuuuuauuuuucuuuuaauagcaaagu

SEQ ID NO: 339979 - RNA, 32 nt, Homo Sapiens
uucgcaaaggcgcuuuggugccugcugcgagc

SEQ ID NO: 339980 - RNA, 32 nt, Homo Sapiens
gucuuugccacauuuuaauuuuucauauggcu

SEQ ID NO: 339981 - RNA, 32 nt, Homo Sapiens
ucuuacuccuccugagauaauuccuaacauuu

SEQ ID NO: 339982 - RNA, 32 nt, Homo Sapiens
guugguagcagugacccagugauucacugcca

SEQ ID NO: 339983 - RNA, 32 nt, Homo Sapiens
ccagaagccaaauaaacucaaaagcugucucc

SEQ ID NO: 339984 - RNA, 32 nt, Homo Sapiens
ugaggaaaagcagagggaaugugaaagaaaau

SEQ ID NO: 339985 - RNA, 32 nt, Homo Sapiens
gcucgcccgagcucgcccgcuguccgccagcc

SEQ ID NO: 339986 - RNA, 32 nt, Homo Sapiens
uugcuaagccccagcaagcaauccuagguagg

SEQ ID NO: 339987 - RNA, 32 nt, Homo Sapiens
ggugcgcgagccgcccuccgggaggaaggcgc

SEQ ID NO: 339988 - RNA, 32 nt, Homo Sapiens
ucuggcugcccccuagagccugcccaucccag

SEQ ID NO: 339989 - RNA, 32 nt, Homo Sapiens
cauacuaccccuguagcugugaaccuccgggc

SEQ ID NO: 339990 - RNA, 32 nt, Homo Sapiens
aacagaagauaaacagcaaggaagagcaguug

SEQ ID NO: 339991 - RNA, 32 nt, Homo Sapiens
gggcucugacuucagcccaccagcagcaugug

SEQ ID NO: 339992 - RNA, 32 nt, Homo Sapiens
uuccaccucugccuaugugguguuuggcaaaa

SEQ ID NO: 339993 - RNA, 31 nt, Homo Sapiens
auccaguaucacaguauugugcuguuuauau

SEQ ID NO: 339994 - RNA, 32 nt, Homo Sapiens
uaccuauacaaggcuuuuuuuuuuuccccagc

SEQ ID NO: 339995 - RNA, 32 nt, Homo Sapiens
auaugacacaugcccaugugagaagcagaacg

SEQ ID NO: 339996 - RNA, 32 nt, Homo Sapiens
uacagagggugacguagaaacacgcagaaacc

SEQ ID NO: 339997 - RNA, 32 nt, Homo Sapiens
ucaccaaauggcaagcagaaccguaagcugaa

SEQ ID NO: 339998 - RNA, 32 nt, Homo Sapiens
gagccccacccccaugcagccucuuccccacc

SEQ ID NO: 339999 - RNA, 32 nt, Homo Sapiens
ugggggaauaucuauuuuaacugcuucagaca

SEQ ID NO: 340000 - RNA, 32 nt, Homo Sapiens
gggcugcaguucgacucugugcuggccagcga

SEQ ID NO: 340001 - RNA, 32 nt, Homo Sapiens
cugagcucuaaaggaaucucuugagauugucu

SEQ ID NO: 340002 - RNA, 32 nt, Homo Sapiens
ggccgggcgcgguggcucaggccuguaauccc

SEQ ID NO: 340003 - RNA, 32 nt, Homo Sapiens
gcagcuaggcaaagucgcccgccggccuccau

SEQ ID NO: 340004 - RNA, 32 nt, Homo Sapiens
gcccuucacugaagagcaaacacaaaaugaaa

SEQ ID NO: 340005 - RNA, 32 nt, Homo Sapiens
aguacaucuuggaaguuugacuuuacagaaga

SEQ ID NO: 340006 - RNA, 32 nt, Homo Sapiens
gugggagguaauuaaaucaugggugcaguuac

SEQ ID NO: 340007 - RNA, 32 nt, Homo Sapiens
uggggagcagcuuuuggggcucagaggccagu

SEQ ID NO: 340008 - RNA, 32 nt, Homo Sapiens
acccagcugcucuguacugcacuuaaaugaug

SEQ ID NO: 340009 - RNA, 32 nt, Homo Sapiens
uucagccgcacccacaccccaacucccuccca

SEQ ID NO: 340010 - RNA, 32 nt, Homo Sapiens
accaggucccggcguacuggucgggcauggcg

SEQ ID NO: 340011 - RNA, 32 nt, Homo Sapiens
aaauccuccaagccguugggcacuagcaagaa

SEQ ID NO: 340012 - RNA, 32 nt, Homo Sapiens
ccagcaucugauugagucaguguuugcuguuu

SEQ ID NO: 340013 - RNA, 32 nt, Homo Sapiens
ugccacuggugccuucucuuaguaacagggaa

SEQ ID NO: 340014 - RNA, 32 nt, Homo Sapiens
ucucaccccaacucucccccaagccccuuucu

SEQ ID NO: 340015 - RNA, 32 nt, Homo Sapiens
aggaggaauucgcccuuaacuugcuugccgcc

SEQ ID NO: 340016 - RNA, 32 nt, Homo Sapiens
acagguagugauuggguuuuuugaguauuuuu

SEQ ID NO: 340017 - RNA, 32 nt, Homo Sapiens
cuacugugguuuuacuauguaaggugaaaauu

SEQ ID NO: 340018 - RNA, 32 nt, Homo Sapiens
agaucaauuuguuuuucuuaauguuguuccua

SEQ ID NO: 340019 - RNA, 32 nt, Homo Sapiens
cccaccccugcccugcccucucucccaggauu

SEQ ID NO: 340020 - RNA, 32 nt, Homo Sapiens
uauuuaaugcccuuucuuaugccguggguuuu

SEQ ID NO: 340021 - RNA, 32 nt, Homo Sapiens
ccauuugccuugcuuuuuaaaugacuuuguuu

SEQ ID NO: 340022 - RNA, 32 nt, Homo Sapiens
uugagcccauucuucugggugugcuuuuuggg

SEQ ID NO: 340023 - RNA, 32 nt, Homo Sapiens
agggagaggucuuuauguuuuucugugauguu

SEQ ID NO: 340024 - RNA, 32 nt, Homo Sapiens
ggcgccgggaacggagcgcgcccaaucuccag

SEQ ID NO: 340025 - RNA, 32 nt, Homo Sapiens
gucaaucuccggcuccuccauggcuucuaugg

SEQ ID NO: 340026 - RNA, 32 nt, Homo Sapiens
cagacaaaauaaaaacaguuaagaaugcaucu

SEQ ID NO: 340027 - RNA, 32 nt, Homo Sapiens
agagacgggcaucaagucaucauccguagaaa

SEQ ID NO: 340028 - RNA, 32 nt, Homo Sapiens
gauaccaaaauuuuguugcaaauauaauggac

SEQ ID NO: 340029 - RNA, 32 nt, Homo Sapiens
ccacgaacgcucuuagcuuucucaggggguca

SEQ ID NO: 340030 - RNA, 31 nt, Homo Sapiens
caagauggcugcugccugcucauggcccucg

SEQ ID NO: 340031 - RNA, 32 nt, Homo Sapiens
augaaaauauuguagagacaucugacuuggua

SEQ ID NO: 340032 - RNA, 32 nt, Homo Sapiens
uccauuuugacaaagucuagaaauauuuuucu

SEQ ID NO: 340033 - RNA, 32 nt, Homo Sapiens
uguaauucugcaauuggggaaaauaguuacuu

SEQ ID NO: 340034 - RNA, 32 nt, Homo Sapiens
auauuuuuaaaaaacugacagggcccaguuaa

SEQ ID NO: 340035 - RNA, 32 nt, Homo Sapiens
gcagcuuggcgcccagcggcuacgugagccaa

SEQ ID NO: 340036 - RNA, 32 nt, Homo Sapiens
uccgccaaccccaucagcccagcccguuaaau

SEQ ID NO: 340037 - RNA, 32 nt, Homo Sapiens
uuaucaugugauuuuucuuuaacuuguuaaua

SEQ ID NO: 340038 - RNA, 32 nt, Homo Sapiens
gcucccucacucccuaauaaacaugagucuga

SEQ ID NO: 340039 - RNA, 32 nt, Homo Sapiens
gggcucacacccaaaucaggacauagccuauc

SEQ ID NO: 340040 - RNA, 32 nt, Homo Sapiens
agaagaagcagcguuguagccaguagggcuuc

SEQ ID NO: 340041 - RNA, 32 nt, Homo Sapiens
aggcggggcuccugggaggcuggggucauuca

SEQ ID NO: 340042 - RNA, 32 nt, Homo Sapiens
gucacaauuaauaagauauuuuauauauggca

SEQ ID NO: 340043 - RNA, 32 nt, Homo Sapiens
caucuguucccucuccucuccucauucccaac

SEQ ID NO: 340044 - RNA, 32 nt, Homo Sapiens
cucuuaaagagcaguugucaccaccugaacac

SEQ ID NO: 340045 - RNA, 32 nt, Homo Sapiens
cugacacaucuggguucaaauucugaaacugu

SEQ ID NO: 340046 - RNA, 32 nt, Homo Sapiens
ggugcuuggcgcuucucaggcuccuccucucc

SEQ ID NO: 340047 - RNA, 32 nt, Homo Sapiens
ugucacauaauuuauaaggcaauauaagagaa

SEQ ID NO: 340048 - RNA, 32 nt, Homo Sapiens
uccuucgccucccuggcucaagugauucuccu

SEQ ID NO: 340049 - RNA, 32 nt, Homo Sapiens
cuugagucaaaguuaacaguauuccuuugaau

SEQ ID NO: 340050 - RNA, 32 nt, Homo Sapiens
ggaagugaauuugcugugugauugugaacugg

SEQ ID NO: 340051 - RNA, 32 nt, Homo Sapiens
uguuuuuccuuccucuugccacccucagugcc

SEQ ID NO: 340052 - RNA, 32 nt, Homo Sapiens
cuuagguggcuuugggucauuacgcccucuca

SEQ ID NO: 340053 - RNA, 32 nt, Homo Sapiens
uggaucuaucuaaaugccgauuugaguucgcg

SEQ ID NO: 340054 - RNA, 32 nt, Homo Sapiens
guucacauaugauguacuuuuaugauguacuu

SEQ ID NO: 340055 - RNA, 32 nt, Homo Sapiens
acuggaggccgcgguggcuucuggccgaggcu

SEQ ID NO: 340056 - RNA, 32 nt, Homo Sapiens
aagcacaaacucccccaagcugacucauccua

SEQ ID NO: 340057 - RNA, 32 nt, Homo Sapiens
agacgauugucucauuggcuggcacucacgga

SEQ ID NO: 340058 - RNA, 32 nt, Homo Sapiens
ugcaggaguguccucagcauuagaccaggggg

SEQ ID NO: 340059 - RNA, 32 nt, Homo Sapiens
uuucuccauuuucuagaagcugcuguugcugc

SEQ ID NO: 340060 - RNA, 32 nt, Homo Sapiens
auguccucuauaugccaggugcuucaccuguu

SEQ ID NO: 340061 - RNA, 32 nt, Homo Sapiens
uuucccaaauuccauuauuugacauugagucu

SEQ ID NO: 340062 - RNA, 32 nt, Homo Sapiens
agcauauaccaccuuaguucauucauguaucc

SEQ ID NO: 340063 - RNA, 29 nt, Homo Sapiens
gaagagggaggacagaggccucugucgca

SEQ ID NO: 340064 - RNA, 30 nt, Homo Sapiens
gucuaaccacuugccuugucugcuaccagu

SEQ ID NO: 340065 - RNA, 31 nt, Homo Sapiens
ccaagauauccacuuaccugaguugaagagg

SEQ ID NO: 340066 - RNA, 32 nt, Homo Sapiens
aaaaagaaucaaaaacagaaaccaagauagca

SEQ ID NO: 340067 - RNA, 32 nt, Homo Sapiens
ucuucuucuuuucuauuuuuuauaaauaucau

SEQ ID NO: 340068 - RNA, 32 nt, Homo Sapiens
caccacgcccgucugacugaccucugaccucu

SEQ ID NO: 340069 - RNA, 32 nt, Homo Sapiens
auuacacaugugagauuugcugcuguugcagu

SEQ ID NO: 340070 - RNA, 32 nt, Homo Sapiens
cuuaccauccaaggggcacucccuugguugga

SEQ ID NO: 340071 - RNA, 32 nt, Homo Sapiens
ccacccuugggaacuggaugccuguguagcug

SEQ ID NO: 340072 - RNA, 32 nt, Homo Sapiens
gcaagcaagccugggagccggcgggaggucug

SEQ ID NO: 340073 - RNA, 32 nt, Homo Sapiens
uuccagagacucccaagcagccugggcaggca

SEQ ID NO: 340074 - RNA, 32 nt, Homo Sapiens
gagcaguccccuccccacucuugcccaugggu

SEQ ID NO: 340075 - RNA, 32 nt, Homo Sapiens
auuuuugaaacacauaagcuuugcucuuuagg

SEQ ID NO: 340076 - RNA, 32 nt, Homo Sapiens
ucuauuuauaacucuuuuuuuaugugauugcu

SEQ ID NO: 340077 - RNA, 32 nt, Homo Sapiens
uuuaguaacugauguauauaucugaaaggaga

SEQ ID NO: 340078 - RNA, 32 nt, Homo Sapiens
guccaacagggccagcuucccuugggggcccu

SEQ ID NO: 340079 - RNA, 32 nt, Homo Sapiens
cauguaucugcgcagcucugguacccucugug

SEQ ID NO: 340080 - RNA, 32 nt, Homo Sapiens
ggccccggcucgcaagccccagcucaccgcgc

SEQ ID NO: 340081 - RNA, 30 nt, Homo Sapiens
cugcccgcggcccuagcgccggcgcgagga

SEQ ID NO: 340082 - RNA, 32 nt, Homo Sapiens
uuucagcaauacuaauauucucauuuuuaaac

SEQ ID NO: 340083 - RNA, 32 nt, Homo Sapiens
uagaaacugcaucuaacaaauagaccacaucc

SEQ ID NO: 340084 - RNA, 32 nt, Homo Sapiens
gcugcaggauccggcugagaccaacccgcggc

SEQ ID NO: 340085 - RNA, 32 nt, Homo Sapiens
acucuucucggggcuccuggcccugaaugugg

SEQ ID NO: 340086 - RNA, 32 nt, Homo Sapiens
guuuggggucugucaggagacagaggcuuuuu

SEQ ID NO: 340087 - RNA, 32 nt, Homo Sapiens
ucauuagcccuauauggaaacuucuuuccuuu

SEQ ID NO: 340088 - RNA, 31 nt, Homo Sapiens
cugagggaggcggugucgccgccgcggcgcu

SEQ ID NO: 340089 - RNA, 32 nt, Homo Sapiens
cagcugagaaaggaagcagacaauaagggccu

SEQ ID NO: 340090 - RNA, 32 nt, Homo Sapiens
ugccagccgcguguauccuaaggagcagacca

SEQ ID NO: 340091 - RNA, 32 nt, Homo Sapiens
cugucugugggcuucagcacuuuaaagaggcu

SEQ ID NO: 340092 - RNA, 32 nt, Homo Sapiens
uaaggggcacaagggccucggguguggccaga

SEQ ID NO: 340093 - RNA, 31 nt, Homo Sapiens
cuguggcccuggcaccugccccugggcuggg

SEQ ID NO: 340094 - RNA, 32 nt, Homo Sapiens
ccggagaguagcgccauugugcucuucgccuu

SEQ ID NO: 340095 - RNA, 32 nt, Homo Sapiens
gaguggcuuuuucuuccacauacuaauucacg

SEQ ID NO: 340096 - RNA, 32 nt, Homo Sapiens
uuguucauuuccccucccuuagcuaccuucuu

SEQ ID NO: 340097 - RNA, 32 nt, Homo Sapiens
ucuuguaaacauugccugauuuguuccuucug

SEQ ID NO: 340098 - RNA, 32 nt, Homo Sapiens
cuaacccgcccucuccaguccaccccgguaaa

SEQ ID NO: 340099 - RNA, 32 nt, Homo Sapiens
ucuaauacuuggagaaugaccuucauauuuau

SEQ ID NO: 340100 - RNA, 32 nt, Homo Sapiens
aauauauuuuuaagauaaaggcacaaaaauaa

SEQ ID NO: 340101 - RNA, 31 nt, Homo Sapiens
uccuggcugggccccacccaggaagaucuuc

SEQ ID NO: 340102 - RNA, 32 nt, Homo Sapiens
ccgggagagggggagugcgcggcggccgcagc

SEQ ID NO: 340103 - RNA, 32 nt, Homo Sapiens
gggaggguguggugcuucggacacguugaggg

SEQ ID NO: 340104 - RNA, 32 nt, Homo Sapiens
gcacgagcuaccgcucgcucggucagggcgcc

SEQ ID NO: 340105 - RNA, 32 nt, Homo Sapiens
gugguaagaaauuuauaaaguuuugcuuuuaa

SEQ ID NO: 340106 - RNA, 32 nt, Homo Sapiens
acugguugcugggcaacacaccccaacacacc

SEQ ID NO: 340107 - RNA, 32 nt, Homo Sapiens
ugucuuauucagaagucacauucuuuucaguu

SEQ ID NO: 340108 - RNA, 32 nt, Homo Sapiens
cucgacaucuuguccccaauccuuccaaaaau

SEQ ID NO: 340109 - RNA, 29 nt, Homo Sapiens
gggguuuggggacagggacuguguccaug

SEQ ID NO: 340110 - RNA, 32 nt, Homo Sapiens
cacaugcugcccuuuuccucuccaccucacag

SEQ ID NO: 340111 - RNA, 32 nt, Homo Sapiens
cagcgauggggcagccagagggggcgguccug

SEQ ID NO: 340112 - RNA, 32 nt, Homo Sapiens
augauaccaaaggaaagauaauuaucaugaaa

SEQ ID NO: 340113 - RNA, 32 nt, Homo Sapiens
uccuccacaggugaccccgguggacacacgcg

SEQ ID NO: 340114 - RNA, 27 nt, Homo Sapiens
gaaaugaauuucuucagcucuucuuag

SEQ ID NO: 340115 - RNA, 32 nt, Homo Sapiens
ggcaagaggggguggaggcgccaggcugaaac

SEQ ID NO: 340116 - RNA, 32 nt, Homo Sapiens
auguuuuauuuuuuaaauuuguuaacagcauu

SEQ ID NO: 340117 - RNA, 32 nt, Homo Sapiens
accaucuggaaaucucuuggucucuuggcagu

SEQ ID NO: 340118 - RNA, 32 nt, Homo Sapiens
uagucaugaauacauaaacagucucaaacucg

SEQ ID NO: 340119 - RNA, 32 nt, Homo Sapiens
gcgcuuucccccuggcgggugagagugcagag

SEQ ID NO: 340120 - RNA, 32 nt, Homo Sapiens
cgacguggagcuagaaggaaaagcaugaaguc

SEQ ID NO: 340121 - RNA, 32 nt, Homo Sapiens
ggauauauuuugaauauugaccaucuagcuug

SEQ ID NO: 340122 - RNA, 32 nt, Homo Sapiens
cucugaaacaaggcccuggauuacaaguguca

SEQ ID NO: 340123 - RNA, 32 nt, Homo Sapiens
aacuguuaaacagaaaacaagaaauucccuau

SEQ ID NO: 340124 - RNA, 32 nt, Homo Sapiens
uuaggaggaauuugaaacaggauauuuaagag

SEQ ID NO: 340125 - RNA, 32 nt, Homo Sapiens
cucucgcccuguaucugucaacuuccgggacg

SEQ ID NO: 340126 - RNA, 32 nt, Homo Sapiens
agggcccugggagauagcauggacgugcauug

SEQ ID NO: 340127 - RNA, 32 nt, Homo Sapiens
uauuuucgccugccauaguguacaccagucuu

SEQ ID NO: 340128 - RNA, 32 nt, Homo Sapiens
cgcgucuccuguagccccaaggcgcugagcag

SEQ ID NO: 340129 - RNA, 32 nt, Homo Sapiens
auagggaagaacuucagaaaucugugguacuc

SEQ ID NO: 340130 - RNA, 29 nt, Homo Sapiens
agcagccggggacagaugccgaucgagau

SEQ ID NO: 340131 - RNA, 32 nt, Homo Sapiens
agaccgccgccagcuggacgcgagccccgggu

SEQ ID NO: 340132 - RNA, 32 nt, Homo Sapiens
cuaaaucaauuucaaagaagaaaaacuuggag

SEQ ID NO: 340133 - RNA, 32 nt, Homo Sapiens
gagagagagagaaaacaaaaccacaaaugaca

SEQ ID NO: 340134 - RNA, 32 nt, Homo Sapiens
guccgugccucacucugggaaccauucuuagu

SEQ ID NO: 340135 - RNA, 32 nt, Homo Sapiens
ccccccacugcucagcuucucauccuuuaaaa

SEQ ID NO: 340136 - RNA, 32 nt, Homo Sapiens
gcacagcagggccggugggugcagcuggcucg

SEQ ID NO: 340137 - RNA, 32 nt, Homo Sapiens
gcuaggcgcucgccacgcccaugccuccgucg

SEQ ID NO: 340138 - RNA, 32 nt, Homo Sapiens
cuucauggcugaggaggucgcagcgccaugaa

SEQ ID NO: 340139 - RNA, 32 nt, Homo Sapiens
augguauguguuggggcucugucaguucucag

SEQ ID NO: 340140 - RNA, 32 nt, Homo Sapiens
uagguuaauauuuaaauuguguuuccagagaa

SEQ ID NO: 340141 - RNA, 27 nt, Homo Sapiens
aaccugaaauaaauaaauguuagauug

SEQ ID NO: 340142 - RNA, 32 nt, Homo Sapiens
acugccuugggagagggcggcccggacgggua

SEQ ID NO: 340143 - RNA, 32 nt, Homo Sapiens
cgaggcugcagcccggcccagggcggcucagc

SEQ ID NO: 340144 - RNA, 32 nt, Homo Sapiens
guuguauguuuccauaaauuuauuuacucuaa

SEQ ID NO: 340145 - RNA, 32 nt, Homo Sapiens
guuucagacccuguuccaacccuguaacuuga

SEQ ID NO: 340146 - RNA, 32 nt, Homo Sapiens
uucaucuccaugagugcacaaucccugaacuc

SEQ ID NO: 340147 - RNA, 32 nt, Homo Sapiens
caauaagugucugcaggaggaguguccugcgc

SEQ ID NO: 340148 - RNA, 32 nt, Homo Sapiens
gaaacugaaaauaaagcuuguuuauuuccaaa

SEQ ID NO: 340149 - RNA, 32 nt, Homo Sapiens
cauugcucagguuguucuggaacuucugggcu

SEQ ID NO: 340150 - RNA, 32 nt, Homo Sapiens
uuuguuauuuguuguuugauaauuauauuaau

SEQ ID NO: 340151 - RNA, 32 nt, Homo Sapiens
acccuguucacccuccucucccacaucaggcu

SEQ ID NO: 340152 - RNA, 32 nt, Homo Sapiens
augagacagaucugggcuccaagccaggaaag

SEQ ID NO: 340153 - RNA, 32 nt, Homo Sapiens
gauaucaaacaugaaacuuauuugaaguccug

SEQ ID NO: 340154 - RNA, 32 nt, Homo Sapiens
gauuuagcuccaugccaaccacucccggcuug

SEQ ID NO: 340155 - RNA, 32 nt, Homo Sapiens
aaaucucuauauuaacauuacuauuuauuuug

SEQ ID NO: 340156 - RNA, 32 nt, Homo Sapiens
agucaguuaaaauacauaaauaaaaacauaaa

SEQ ID NO: 340157 - RNA, 32 nt, Homo Sapiens
gguggagccagacguacagggcggaacaugaa

SEQ ID NO: 340158 - RNA, 32 nt, Homo Sapiens
ucuuaauuuaauaacaagcauuacuguagagu

SEQ ID NO: 340159 - RNA, 29 nt, Homo Sapiens
gcagccuggggacagggaguugccuucuc

SEQ ID NO: 340160 - RNA, 32 nt, Homo Sapiens
aucacuaaaaauucccacaaaucuuguuucug

SEQ ID NO: 340161 - RNA, 32 nt, Homo Sapiens
uuucgagugcccagcccucugguucacauuca

SEQ ID NO: 340162 - RNA, 27 nt, Homo Sapiens
ggauggggucgcagacgcugcagaucc

SEQ ID NO: 340163 - RNA, 32 nt, Homo Sapiens
auacaaagcccuccagccuguuuguggggcug

SEQ ID NO: 340164 - RNA, 32 nt, Homo Sapiens
cugaugucuaaguggugaccgcagcaguaccc

SEQ ID NO: 340165 - RNA, 32 nt, Homo Sapiens
aaggguguucacccaucccacccaaggcuugg

SEQ ID NO: 340166 - RNA, 32 nt, Homo Sapiens
ucaaugcgaccccaggcauaggugggcugaau

SEQ ID NO: 340167 - RNA, 32 nt, Homo Sapiens
ccccaggccucuuccgagaggcacaugguucu

SEQ ID NO: 340168 - RNA, 32 nt, Homo Sapiens
ugacuuuccuuccuuuucuuuucucagauccc

SEQ ID NO: 340169 - RNA, 32 nt, Homo Sapiens
acccgcuucccggcugccuuuguggccgcagc

SEQ ID NO: 340170 - RNA, 32 nt, Homo Sapiens
uccaaauggugcccaaggcucugcugucugaa

SEQ ID NO: 340171 - RNA, 32 nt, Homo Sapiens
uuuauucacuuccguagcuccuccuugaaagu

SEQ ID NO: 340172 - RNA, 32 nt, Homo Sapiens
aauuaacuauauuggauagcacagccguaaaa

SEQ ID NO: 340173 - RNA, 32 nt, Homo Sapiens
gaccagaaucagauucaggagcucaguuucuu

SEQ ID NO: 340174 - RNA, 32 nt, Homo Sapiens
ccccgggacuaugggcaagggcccggggcggg

SEQ ID NO: 340175 - RNA, 32 nt, Homo Sapiens
cagguguccuuagugguguugcagcugucuac

SEQ ID NO: 340176 - RNA, 32 nt, Homo Sapiens
guguuugcuuccaucacuuaugcugagcaacc

SEQ ID NO: 340177 - RNA, 32 nt, Homo Sapiens
aaguccuagcugaguucucaaugguaaaggca

SEQ ID NO: 340178 - RNA, 32 nt, Homo Sapiens
gaccuccccugaucucccuccucccacccucu

SEQ ID NO: 340179 - RNA, 32 nt, Homo Sapiens
guucauacacgugcacacacacgcauacacag

SEQ ID NO: 340180 - RNA, 32 nt, Homo Sapiens
ucgguuccagacacugguuucuugcuuuguuu

SEQ ID NO: 340181 - RNA, 32 nt, Homo Sapiens
ggacacaaacacacguaagaaugcacucugua

SEQ ID NO: 340182 - RNA, 30 nt, Homo Sapiens
caggguuugaggaugggggaguagcuacag

SEQ ID NO: 340183 - RNA, 32 nt, Homo Sapiens
augaccaguggaccaucuccaaggccugcggg

SEQ ID NO: 340184 - RNA, 32 nt, Homo Sapiens
gaaauuaggaauuugcaaaacacaauaggaaa

SEQ ID NO: 340185 - RNA, 32 nt, Homo Sapiens
cgccucggcccggcccaauccaggccccggcc

SEQ ID NO: 340186 - RNA, 32 nt, Homo Sapiens
gaacuaaaauuuaauauuguauauaauaccgg

SEQ ID NO: 340187 - RNA, 31 nt, Homo Sapiens
gcgggcgcccacugccugagccggauggcag

SEQ ID NO: 340188 - RNA, 32 nt, Homo Sapiens
ugagcacgguggaucccauggguguggcucug

SEQ ID NO: 340189 - RNA, 32 nt, Homo Sapiens
ggccacagcuggggcggcaaggcgccgcccug

SEQ ID NO: 340190 - RNA, 32 nt, Homo Sapiens
uguauuuauucacaucagcccuuuaaacuuuc

SEQ ID NO: 340191 - RNA, 32 nt, Homo Sapiens
cuccacgcuguccugcucucgguccuuccaca

SEQ ID NO: 340192 - RNA, 32 nt, Homo Sapiens
ucucugggcuagcuacuccccccagcuccuag

SEQ ID NO: 340193 - RNA, 32 nt, Homo Sapiens
gcuguuggggguggggggaggggaaugggcag

SEQ ID NO: 340194 - RNA, 32 nt, Homo Sapiens
guagcucaccugagucaggagcucgagaccag

SEQ ID NO: 340195 - RNA, 32 nt, Homo Sapiens
uucaggguauucaaaucuuggacuaguccugc

SEQ ID NO: 340196 - RNA, 32 nt, Homo Sapiens
ggcgcggaggaggaggcggcggcgucgguggc

SEQ ID NO: 340197 - RNA, 32 nt, Homo Sapiens
cuggagacugagucuugaaccacagaagggaa

SEQ ID NO: 340198 - RNA, 32 nt, Homo Sapiens
uuuaucuccguacaugugggugucgccaugug

SEQ ID NO: 340199 - RNA, 32 nt, Homo Sapiens
cccacgucaggagaggagcguggggucagcuc

SEQ ID NO: 340200 - RNA, 32 nt, Homo Sapiens
aggacgaggaggaugaggagggggagagccug

SEQ ID NO: 340201 - RNA, 32 nt, Homo Sapiens
gaccuucagcgccucggcuccagcgccauggc

SEQ ID NO: 340202 - RNA, 32 nt, Homo Sapiens
ggcacgaggcgaggacuucaucgagucacugu

SEQ ID NO: 340203 - RNA, 32 nt, Homo Sapiens
cuguggucagagagggaagcugaggcccaugg

SEQ ID NO: 340204 - RNA, 32 nt, Homo Sapiens
ccaggagcuggagaggccugggacagagccuc

SEQ ID NO: 340205 - RNA, 32 nt, Homo Sapiens
auuucuuauacgcuuuucuguguuauaccauu

SEQ ID NO: 340206 - RNA, 32 nt, Homo Sapiens
cgagguucgggucguggggcggagggaagagc

SEQ ID NO: 340207 - RNA, 32 nt, Homo Sapiens
cauauauccucuuuuuguucuuucucugucag

SEQ ID NO: 340208 - RNA, 32 nt, Homo Sapiens
gcucacagggcugaaaggggcuuuuguccucc

SEQ ID NO: 340209 - RNA, 32 nt, Homo Sapiens
gguggaaacugaauauuugacuaugggucauc

SEQ ID NO: 340210 - RNA, 32 nt, Homo Sapiens
aaaauugaauucccaaccugcaaugaguaggc

SEQ ID NO: 340211 - RNA, 32 nt, Homo Sapiens
acagacccagggagcugcagcuggagcccguu

SEQ ID NO: 340212 - RNA, 32 nt, Homo Sapiens
aguaucaaggcuucagaaaaugccauuuacgg

SEQ ID NO: 340213 - RNA, 32 nt, Homo Sapiens
ggcugggaggggcugaguguacuugguggagg

SEQ ID NO: 340214 - RNA, 32 nt, Homo Sapiens
aagcuuuuugacaacuaauaaaugucuuggua

SEQ ID NO: 340215 - RNA, 32 nt, Homo Sapiens
cgggugaugcucugggaugugcagguacguug

SEQ ID NO: 340216 - RNA, 32 nt, Homo Sapiens
gaaugguauuuuuagguuuguauuuuaugucu

SEQ ID NO: 340217 - RNA, 32 nt, Homo Sapiens
gcauguucuccauuuuuucucauccuugcauu

SEQ ID NO: 340218 - RNA, 32 nt, Homo Sapiens
gacugcagaugaaauuaguaacuggugggguc

SEQ ID NO: 340219 - RNA, 32 nt, Homo Sapiens
uccuggccagcauggugaaaccccaucucuac

SEQ ID NO: 340220 - RNA, 32 nt, Homo Sapiens
gaccuuaaucugggauaaagguuuugguauuu

SEQ ID NO: 340221 - RNA, 27 nt, Homo Sapiens
ucauuuccaucucccagcccccagggg

SEQ ID NO: 340222 - RNA, 32 nt, Homo Sapiens
gcugagggacgccugguccaggguccgcagcg

SEQ ID NO: 340223 - RNA, 32 nt, Homo Sapiens
guuaaacaucuucaugcaccagcccucccggc

SEQ ID NO: 340224 - RNA, 32 nt, Homo Sapiens
uuuagccugggcaguauagugaaacccuuucu

SEQ ID NO: 340225 - RNA, 30 nt, Homo Sapiens
ugaacuauguguuugggggaaguuccucug

SEQ ID NO: 340226 - RNA, 32 nt, Homo Sapiens
cccaguucugugggugcagcucuuccagaaag

SEQ ID NO: 340227 - RNA, 32 nt, Homo Sapiens
cagcuuguugucccaaugaaauacugagaugc

SEQ ID NO: 340228 - RNA, 32 nt, Homo Sapiens
cuuacauuuucugcacaggucugcaaaaacaa

SEQ ID NO: 340229 - RNA, 32 nt, Homo Sapiens
gcugcugggcgucuguucuuuaccaaaaccau

SEQ ID NO: 340230 - RNA, 32 nt, Homo Sapiens
ugcaguuuccaaagcccacgggcucauuucac

SEQ ID NO: 340231 - RNA, 32 nt, Homo Sapiens
gguuuuugugcauuuucuuuuaaaauguaauc

SEQ ID NO: 340232 - RNA, 32 nt, Homo Sapiens
cccuccugcugccaccaccacccagguccucc

SEQ ID NO: 340233 - RNA, 32 nt, Homo Sapiens
gcggcauggugcccgccggccugccgggcucc

SEQ ID NO: 340234 - RNA, 32 nt, Homo Sapiens
uccuagagaggaauggacccaggcugucauuc

SEQ ID NO: 340235 - RNA, 32 nt, Homo Sapiens
uugaaauaaaaauuauuuaauuuuaauuaaua

SEQ ID NO: 340236 - RNA, 32 nt, Homo Sapiens
ugugacacggcucggaugacccccgcucgcca

SEQ ID NO: 340237 - RNA, 32 nt, Homo Sapiens
ugagucaauugcagaugaugcuauaacacuuc

SEQ ID NO: 340238 - RNA, 32 nt, Homo Sapiens
aaccuuuuguaaaguaaaauaguugucucaaa

SEQ ID NO: 340239 - RNA, 32 nt, Homo Sapiens
uuggugagagguuugguuugauaccucugccu

SEQ ID NO: 340240 - RNA, 32 nt, Homo Sapiens
aagccccaaacacaggugcacugagcaaagaa

SEQ ID NO: 340241 - RNA, 32 nt, Homo Sapiens
gcaguugggugaagugguuagagcugaaaggg

SEQ ID NO: 340242 - RNA, 32 nt, Homo Sapiens
uagcaggaggguggagugucggcugcaaaggc

SEQ ID NO: 340243 - RNA, 32 nt, Homo Sapiens
gucucucggcccagcccaccacgccgaguagc

SEQ ID NO: 340244 - RNA, 31 nt, Homo Sapiens
aauugucauuugacuuuuuucuguuaaaaaa

SEQ ID NO: 340245 - RNA, 32 nt, Homo Sapiens
auuauuugaaaacaaacuuauggguaauaaag

SEQ ID NO: 340246 - RNA, 32 nt, Homo Sapiens
cacaaccccugccagcagcccugggacccugc

SEQ ID NO: 340247 - RNA, 32 nt, Homo Sapiens
cccuuaucaguaguucugcuuuugcccuuugu

SEQ ID NO: 340248 - RNA, 32 nt, Homo Sapiens
ggggguucugguggacguuucaaguggcauuu

SEQ ID NO: 340249 - RNA, 32 nt, Homo Sapiens
gggucuuggcagcauggaagugagaggugaag

SEQ ID NO: 340250 - RNA, 32 nt, Homo Sapiens
uuacuuguauacggaacaaccacaagaaauuu

SEQ ID NO: 340251 - RNA, 32 nt, Homo Sapiens
auacccugaagaaaaguaguuaaugaauaaag

SEQ ID NO: 340252 - RNA, 32 nt, Homo Sapiens
gaacuuacuguaaagaaagaaaucugccuaga

SEQ ID NO: 340253 - RNA, 32 nt, Homo Sapiens
uugcacaugcccuuuuucaguccaauugaaca

SEQ ID NO: 340254 - RNA, 32 nt, Homo Sapiens
cauggccugccagcagucgcgguaccacagcu

SEQ ID NO: 340255 - RNA, 32 nt, Homo Sapiens
acugggguaaccucauuaggccuggccaccuc

SEQ ID NO: 340256 - RNA, 32 nt, Homo Sapiens
uccucacagucuuuuuuguuccauagcaauga

SEQ ID NO: 340257 - RNA, 32 nt, Homo Sapiens
ccucacucuucacuccugauugaggcccgggu

SEQ ID NO: 340258 - RNA, 32 nt, Homo Sapiens
gacagagucuggcucugucacccaggcuggag

SEQ ID NO: 340259 - RNA, 32 nt, Homo Sapiens
agcaucaccucuaucugccucaucucacacug

SEQ ID NO: 340260 - RNA, 32 nt, Homo Sapiens
augugacgccgcggcccggcgggugccagauu

SEQ ID NO: 340261 - RNA, 32 nt, Homo Sapiens
ccuuauccucuccaugcugagcuugacaacac

SEQ ID NO: 340262 - RNA, 32 nt, Homo Sapiens
ggaccuugcuccccgcgccgcggcgggagcug

SEQ ID NO: 340263 - RNA, 32 nt, Homo Sapiens
ccuaaaaugaacuuauggcaggucuaaucaaa

SEQ ID NO: 340264 - RNA, 32 nt, Homo Sapiens
caacagcuggaacggucacugcgcaggaucaa

SEQ ID NO: 340265 - RNA, 32 nt, Homo Sapiens
gcccggccccggcugggaccaugguguuucuc

SEQ ID NO: 340266 - RNA, 32 nt, Homo Sapiens
auuggauuaaaaauaaacuuuuacuuuuuugc

SEQ ID NO: 340267 - RNA, 32 nt, Homo Sapiens
aagcagcauuuaagagcacuuaaccauggacc

SEQ ID NO: 340268 - RNA, 32 nt, Homo Sapiens
aaauccgucaguauucacuggaccucaggccc

SEQ ID NO: 340269 - RNA, 32 nt, Homo Sapiens
caggaccagggccuuggccccucccccuccca

SEQ ID NO: 340270 - RNA, 32 nt, Homo Sapiens
agcauuuggugauaguuuuacaugaccaguua

SEQ ID NO: 340271 - RNA, 32 nt, Homo Sapiens
cgggaggaagggggcuuccggaggcggagggc

SEQ ID NO: 340272 - RNA, 32 nt, Homo Sapiens
ggccuuggagagcgcgugaaggcgggcauccc

SEQ ID NO: 340273 - RNA, 32 nt, Homo Sapiens
uaaauuugucuucaucucaaccagcuaauggu

SEQ ID NO: 340274 - RNA, 32 nt, Homo Sapiens
uaacuaugaugaugacggcagcugcugcugag

SEQ ID NO: 340275 - RNA, 32 nt, Homo Sapiens
cacuccuucccauggaaucuagauagcauuua

SEQ ID NO: 340276 - RNA, 32 nt, Homo Sapiens
ggggcgggggaaaggaggcggcagccaggcug

SEQ ID NO: 340277 - RNA, 32 nt, Homo Sapiens
ccucuaagauaaaacuucuauuuaaagacuuu

SEQ ID NO: 340278 - RNA, 32 nt, Homo Sapiens
aacagcagcucuuuaaguguuugcauuuucua

SEQ ID NO: 340279 - RNA, 32 nt, Homo Sapiens
caucucuacuaaaaauacaacaaaguuagccg

SEQ ID NO: 340280 - RNA, 32 nt, Homo Sapiens
cggacagcgacgcacagcgaggagccaaaaug

SEQ ID NO: 340281 - RNA, 32 nt, Homo Sapiens
uuccuuaugcaaauguuuagcaucauagugcu

SEQ ID NO: 340282 - RNA, 32 nt, Homo Sapiens
agcagaugagcgcagccuccuccagccgcgag

SEQ ID NO: 340283 - RNA, 32 nt, Homo Sapiens
cggaacuccgacggccacccccugccccugcc

SEQ ID NO: 340284 - RNA, 32 nt, Homo Sapiens
uucauuuaugaguuaucuuacauaucacaaag

SEQ ID NO: 340285 - RNA, 29 nt, Homo Sapiens
uuuagugugacuucuaagccugagcacuu

SEQ ID NO: 340286 - RNA, 32 nt, Homo Sapiens
gauaaauaacugugagcucgcacaaccgaaag

SEQ ID NO: 340287 - RNA, 32 nt, Homo Sapiens
uggccaaccccugccccuugccccacacagac

SEQ ID NO: 340288 - RNA, 27 nt, Homo Sapiens
cugcccaccuuccccagcccccgcagu

SEQ ID NO: 340289 - RNA, 32 nt, Homo Sapiens
gcggaucugguguggggaaggcggcgggacuc

SEQ ID NO: 340290 - RNA, 32 nt, Homo Sapiens
cuuuaguccuucugccauuuuuuauuuucagu

SEQ ID NO: 340291 - RNA, 32 nt, Homo Sapiens
gaaaccggguggcagcgcccagccuggcccca

SEQ ID NO: 340292 - RNA, 32 nt, Homo Sapiens
uaaagcuauuuauguacuuugcuuaauguaau

SEQ ID NO: 340293 - RNA, 32 nt, Homo Sapiens
aucuggcauauaaaaacugagcaaaaaguauc

SEQ ID NO: 340294 - RNA, 32 nt, Homo Sapiens
ggaaguguguaggguacaaaauuuaaagugug

SEQ ID NO: 340295 - RNA, 32 nt, Homo Sapiens
augucggugugagcgagcggcgccugaacaca

SEQ ID NO: 340296 - RNA, 32 nt, Homo Sapiens
guuuaggggaucuggaagggccaaggucugag

SEQ ID NO: 340297 - RNA, 32 nt, Homo Sapiens
uggagcuucaauggggccuuggcuccugucug

SEQ ID NO: 340298 - RNA, 32 nt, Homo Sapiens
cagccgccgccaccgcugccgccgccgagcuc

SEQ ID NO: 340299 - RNA, 28 nt, Homo Sapiens
aggauggccccgggucgcgcgguggccg

SEQ ID NO: 340300 - RNA, 32 nt, Homo Sapiens
uugucuacuuggaauucugauguguugugaca

SEQ ID NO: 340301 - RNA, 32 nt, Homo Sapiens
ugcgaccccccucccuaaauggaguugggugg

SEQ ID NO: 340302 - RNA, 32 nt, Homo Sapiens
acuguugcugccacugaccaccagguagacag

SEQ ID NO: 340303 - RNA, 32 nt, Homo Sapiens
cacaugauuuucuuuuguuuucuucauuucuc

SEQ ID NO: 340304 - RNA, 32 nt, Homo Sapiens
cauagaaauaaaguacacgauaaacguaaugu

SEQ ID NO: 340305 - RNA, 32 nt, Homo Sapiens
ggaggaguuccuugaucuguauauacaauaac

SEQ ID NO: 340306 - RNA, 32 nt, Homo Sapiens
cuggauccuuccugcucaaggauccucauuug

SEQ ID NO: 340307 - RNA, 32 nt, Homo Sapiens
aauuuuaaaaauuaauguuaauauggaaaugc

SEQ ID NO: 340308 - RNA, 32 nt, Homo Sapiens
gguuugaacuaaaagccauauguggaauauug

SEQ ID NO: 340309 - RNA, 32 nt, Homo Sapiens
ccugccucacacuggccucucuaggccgaggu

SEQ ID NO: 340310 - RNA, 31 nt, Homo Sapiens
cagccucuccggcgcgcuccaagggcuuccc

SEQ ID NO: 340311 - RNA, 32 nt, Homo Sapiens
gcuuggguggccugggacccugugggaggcuu

SEQ ID NO: 340312 - RNA, 31 nt, Homo Sapiens
cgagccauggcgccagcgcuguggcgggccu

SEQ ID NO: 340313 - RNA, 32 nt, Homo Sapiens
uaaaguugauuucugcacuaucuuuuucucag

SEQ ID NO: 340314 - RNA, 30 nt, Homo Sapiens
cugaugguuggaagacggauuugcuuuggu

SEQ ID NO: 340315 - RNA, 32 nt, Homo Sapiens
aaggaccagcuuuggggccuccaccugccguc

SEQ ID NO: 340316 - RNA, 32 nt, Homo Sapiens
cugggggucuggccuguccccggaggcauucc

SEQ ID NO: 340317 - RNA, 31 nt, Homo Sapiens
ucgcggggggcgguggcgcccggcacagagg

SEQ ID NO: 340318 - RNA, 32 nt, Homo Sapiens
cugcgccuaccccaucaccgcggccggcgccg

SEQ ID NO: 340319 - RNA, 32 nt, Homo Sapiens
ggcugggggccugcaacaggauguccucuucc

SEQ ID NO: 340320 - RNA, 32 nt, Homo Sapiens
gacaaaugacccccaucccaugggaguaauaa

SEQ ID NO: 340321 - RNA, 32 nt, Homo Sapiens
ggccugggcauauggaaagaaccaucaucuug

SEQ ID NO: 340322 - RNA, 32 nt, Homo Sapiens
uuuauauuucuuucuuuuuuaauguugccaaa

SEQ ID NO: 340323 - RNA, 32 nt, Homo Sapiens
aucaguuagugucaaggagucaaaacagauua

SEQ ID NO: 340324 - RNA, 32 nt, Homo Sapiens
cuaugcaaggguuggggugcugcuuguucagg

SEQ ID NO: 340325 - RNA, 32 nt, Homo Sapiens
guguauaagcucuguaaaauagcaaucacauu

SEQ ID NO: 340326 - RNA, 32 nt, Homo Sapiens
ccuuuuguguaauaagaaaguauaaagucacu

SEQ ID NO: 340327 - RNA, 32 nt, Homo Sapiens
cgacgaaugucugaucaccgccccgcuauggg

SEQ ID NO: 340328 - RNA, 32 nt, Homo Sapiens
ccaccuggagcggcgagcuagaggccuguugg

SEQ ID NO: 340329 - RNA, 32 nt, Homo Sapiens
ccuucacucugcaggggcgggccagcccugcc

SEQ ID NO: 340330 - RNA, 32 nt, Homo Sapiens
cuggggcuggacgaggcccaagcgccucuccc

SEQ ID NO: 340331 - RNA, 32 nt, Homo Sapiens
cccgcacccuccgcacucaccucccccucgcc

SEQ ID NO: 340332 - RNA, 32 nt, Homo Sapiens
cccuggcaaccacugaucugcuuucacaauaa

SEQ ID NO: 340333 - RNA, 32 nt, Homo Sapiens
agaguccuuucauuuuaagauucagaaacagc

SEQ ID NO: 340334 - RNA, 32 nt, Homo Sapiens
uuccuuucaacacagugcagauaagaguugaa

SEQ ID NO: 340335 - RNA, 30 nt, Homo Sapiens
aggagccaccuugccacccauucuucccgu

SEQ ID NO: 340336 - RNA, 32 nt, Homo Sapiens
agacguuuacucuggaggcacaagcuggcugc

SEQ ID NO: 340337 - RNA, 32 nt, Homo Sapiens
cggcccugccagcacucugucugguaccuucc

SEQ ID NO: 340338 - RNA, 32 nt, Homo Sapiens
uaacagucucugcuuugccuucugccugguag

SEQ ID NO: 340339 - RNA, 32 nt, Homo Sapiens
uuuuggcagcucuggaggaugagagagaacau

SEQ ID NO: 340340 - RNA, 32 nt, Homo Sapiens
acagcccuuccuggcucccccaucccccuaug

SEQ ID NO: 340341 - RNA, 32 nt, Homo Sapiens
gggaaaaaaggauauguaaaucaccuaagaug

SEQ ID NO: 340342 - RNA, 32 nt, Homo Sapiens
aucuaucugguuguucuucaccacccuccaag

SEQ ID NO: 340343 - RNA, 32 nt, Homo Sapiens
cggggaaagacauggacccuagaacucagucc

SEQ ID NO: 340344 - RNA, 32 nt, Homo Sapiens
gguccucuguucucuuuuuuuuuuucuuuuua

SEQ ID NO: 340345 - RNA, 32 nt, Homo Sapiens
aggguggggagguggcagcugccugcccugcc

SEQ ID NO: 340346 - RNA, 32 nt, Homo Sapiens
cggcggcgggcaagugacugcccgccaugccu

SEQ ID NO: 340347 - RNA, 32 nt, Homo Sapiens
ggccccuccccgcucccuuccacucugcacga

SEQ ID NO: 340348 - RNA, 28 nt, Homo Sapiens
acgugggggcggccacggcaggauuaac

SEQ ID NO: 340349 - RNA, 32 nt, Homo Sapiens
cuuugccguacugggaguccuccaucacguga

SEQ ID NO: 340350 - RNA, 32 nt, Homo Sapiens
cgguucuggggcggcccgagccccggcuccug

SEQ ID NO: 340351 - RNA, 32 nt, Homo Sapiens
ggccgggugaggcgcgcaccaagccgccccga

SEQ ID NO: 340352 - RNA, 32 nt, Homo Sapiens
ugucaaacgaggcuucuguuuugcaccugcag

SEQ ID NO: 340353 - RNA, 32 nt, Homo Sapiens
acaaggcagaaggaaacacaguagcaaugguu

SEQ ID NO: 340354 - RNA, 32 nt, Homo Sapiens
agaagcccugucagagcccugacuaaaaccca

SEQ ID NO: 340355 - RNA, 30 nt, Homo Sapiens
gguggcgucggcgcucacgcaggggcgggu

SEQ ID NO: 340356 - RNA, 32 nt, Homo Sapiens
uuuccaacccaggcccuugacucugcccugag

SEQ ID NO: 340357 - RNA, 32 nt, Homo Sapiens
ggcucuucacugcuccuccuggccugccuagu

SEQ ID NO: 340358 - RNA, 32 nt, Homo Sapiens
ucuauauaaaugcucagaguucuuuauguauu

SEQ ID NO: 340359 - RNA, 32 nt, Homo Sapiens
gcuuuuuugucaauuaaaaauagagacacaaa

SEQ ID NO: 340360 - RNA, 32 nt, Homo Sapiens
gcauuauguaaaggcucaaaacauuacccuaa

SEQ ID NO: 340361 - RNA, 32 nt, Homo Sapiens
gcccuggggcuacagcugcugcugccucuucu

SEQ ID NO: 340362 - RNA, 32 nt, Homo Sapiens
caggugauagccccggaauguacagugucuug

SEQ ID NO: 340363 - RNA, 32 nt, Homo Sapiens
cuaaaagcacuuucuucagcauucugaguuaa

SEQ ID NO: 340364 - RNA, 32 nt, Homo Sapiens
acagcgccgaggugcgccgagcaggagcaggg

SEQ ID NO: 340365 - RNA, 32 nt, Homo Sapiens
cuaggagcucuuuugucucuguccuuacgagg

SEQ ID NO: 340366 - RNA, 32 nt, Homo Sapiens
cauuguuuauuacuggucacuuagaaaauuaa

SEQ ID NO: 340367 - RNA, 32 nt, Homo Sapiens
cgcugggacgacuggcugaccgcggccaugca

SEQ ID NO: 340368 - RNA, 32 nt, Homo Sapiens
acugcuggagaaggaaucaugguuucuagaag

SEQ ID NO: 340369 - RNA, 32 nt, Homo Sapiens
ucaauguuaaaucagaaaugugaauguaguaa

SEQ ID NO: 340370 - RNA, 32 nt, Homo Sapiens
uccccccagagacaaagcugcagagcacauuc

SEQ ID NO: 340371 - RNA, 32 nt, Homo Sapiens
aauacauuaugaaaacagauguuuaggagauu

SEQ ID NO: 340372 - RNA, 32 nt, Homo Sapiens
uuuauuuguacaaauuacuucuuuguuuuucu

SEQ ID NO: 340373 - RNA, 32 nt, Homo Sapiens
acgcagagcagcgcccuggccgggccaagcag

SEQ ID NO: 340374 - RNA, 32 nt, Homo Sapiens
ggcgcggagagccgagccgggggcgcugugcg

SEQ ID NO: 340375 - RNA, 32 nt, Homo Sapiens
cauguugauuauccaaagaauugaaacuccua

SEQ ID NO: 340376 - RNA, 32 nt, Homo Sapiens
acacuccucugccccugcccacuuccucuccc

SEQ ID NO: 340377 - RNA, 32 nt, Homo Sapiens
ccccagcugggaagagggcgggaucgggcacu

SEQ ID NO: 340378 - RNA, 32 nt, Homo Sapiens
agggcaccgccaaggucugcggcggccucuga

SEQ ID NO: 340379 - RNA, 32 nt, Homo Sapiens
ucuuucuuuucucuuuuuguuguuuguuuuaa

SEQ ID NO: 340380 - RNA, 32 nt, Homo Sapiens
cugaauccuuaaauugggaguaccucaggcgg

SEQ ID NO: 340381 - RNA, 32 nt, Homo Sapiens
gaauuguugggaaugauuuaaucuuguuguug

SEQ ID NO: 340382 - RNA, 32 nt, Homo Sapiens
gacaagcggcccccgccuccauacccgggccc

SEQ ID NO: 340383 - RNA, 32 nt, Homo Sapiens
gccccgcuaaaugggguaccuaguccccagcc

SEQ ID NO: 340384 - RNA, 32 nt, Homo Sapiens
ccggaggccacuguaggagccuccagggaguu

SEQ ID NO: 340385 - RNA, 32 nt, Homo Sapiens
ccagaagaagccagggaagcagugcaauggcu

SEQ ID NO: 340386 - RNA, 32 nt, Homo Sapiens
ccaggaacgauggacucacgcuuuuguccuua

SEQ ID NO: 340387 - RNA, 32 nt, Homo Sapiens
aaucaagacaacacaagaauuauuuuauuuuu

SEQ ID NO: 340388 - RNA, 32 nt, Homo Sapiens
gccucaccuucagguagcgcuccagcuucuug

SEQ ID NO: 340389 - RNA, 32 nt, Homo Sapiens
caugagugcacauuuucauauauaagggcaaa

SEQ ID NO: 340390 - RNA, 32 nt, Homo Sapiens
ucagaacauuuaaauaaugauuuguuacauua

SEQ ID NO: 340391 - RNA, 32 nt, Homo Sapiens
auaguacgguauuccgaacagacacuaaaaau

SEQ ID NO: 340392 - RNA, 32 nt, Homo Sapiens
guauuucugaggugaaaguuaaauaggaacuu

SEQ ID NO: 340393 - RNA, 32 nt, Homo Sapiens
cagaugugagcucucugucuuuuacacgcuga

SEQ ID NO: 340394 - RNA, 32 nt, Homo Sapiens
ucaccuuguucccuuccaccccuccaguuagu

SEQ ID NO: 340395 - RNA, 32 nt, Homo Sapiens
cuaagcccuagacuagaggcaagcauuuagau

SEQ ID NO: 340396 - RNA, 32 nt, Homo Sapiens
aagggcggcgccugggucugcgguaucggaaa

SEQ ID NO: 340397 - RNA, 32 nt, Homo Sapiens
gagaauguggagggguggggggugucagugga

SEQ ID NO: 340398 - RNA, 32 nt, Homo Sapiens
auauacuaagaaccaaagaguuguguacuuua

SEQ ID NO: 340399 - RNA, 32 nt, Homo Sapiens
gccacgucggagggggaagugucgcagcauuc

SEQ ID NO: 340400 - RNA, 32 nt, Homo Sapiens
gucccccucaacuaagugggugucaccuggug

SEQ ID NO: 340401 - RNA, 32 nt, Homo Sapiens
aggaccaguggagagccccacccccgccucag

SEQ ID NO: 340402 - RNA, 32 nt, Homo Sapiens
auuugaaacaaauuaaaauaugcugcauuuga

SEQ ID NO: 340403 - RNA, 32 nt, Homo Sapiens
agauguauuauguaugaacuuuguacuaugua

SEQ ID NO: 340404 - RNA, 32 nt, Homo Sapiens
aaauaaaaacuauaaaaauguacuuuaggaca

SEQ ID NO: 340405 - RNA, 32 nt, Homo Sapiens
uccaggauccuccacugaugguaaaaucugag

SEQ ID NO: 340406 - RNA, 32 nt, Homo Sapiens
cucccgccgaguguccccccagcccucacugu

SEQ ID NO: 340407 - RNA, 32 nt, Homo Sapiens
uuuuucuuuuuuucuuuuuuuuuuugagaugg

SEQ ID NO: 340408 - RNA, 32 nt, Homo Sapiens
ucccccauaaaauuauuuuauuagagggagua

SEQ ID NO: 340409 - RNA, 32 nt, Homo Sapiens
agagaaugacuucagugccuuugguguuccag

SEQ ID NO: 340410 - RNA, 32 nt, Homo Sapiens
ccagauguguuccccccaugggugagaggccu

SEQ ID NO: 340411 - RNA, 32 nt, Homo Sapiens
ugccagugucccuccgucccagggggcugugc

SEQ ID NO: 340412 - RNA, 32 nt, Homo Sapiens
gaagagaaaagguaccugaggaugcagaagua

SEQ ID NO: 340413 - RNA, 32 nt, Homo Sapiens
ucagacugagaggacaaaccuccagcugaauu

SEQ ID NO: 340414 - RNA, 32 nt, Homo Sapiens
uagcgcauguuaugaaaaauucugcugacccc

SEQ ID NO: 340415 - RNA, 32 nt, Homo Sapiens
cccaucucagggcaugugggugucacaggauc

SEQ ID NO: 340416 - RNA, 32 nt, Homo Sapiens
gguucugucuaaucuuuuuuuuuucuuuugua

SEQ ID NO: 340417 - RNA, 32 nt, Homo Sapiens
ucagaaugaugaccuguaaauguaagaguggc

SEQ ID NO: 340418 - RNA, 32 nt, Homo Sapiens
ggagccacuccaguuaggagaccugggagacc

SEQ ID NO: 340419 - RNA, 32 nt, Homo Sapiens
cacuucugcugcugcaaaccccgugaggugua

SEQ ID NO: 340420 - RNA, 32 nt, Homo Sapiens
agaagaccugggcuuagcaaucuccuuaguuc

SEQ ID NO: 340421 - RNA, 32 nt, Homo Sapiens
cgcccggagcgcgggcuggguggugccgagcg

SEQ ID NO: 340422 - RNA, 32 nt, Homo Sapiens
ucagcccugcgguccugccgcgcacuccaccg

SEQ ID NO: 340423 - RNA, 32 nt, Homo Sapiens
uggggaccagaagccccccaccccagcuuucc

SEQ ID NO: 340424 - RNA, 32 nt, Homo Sapiens
acuucugggcccagcccucuugccaggcaugc

SEQ ID NO: 340425 - RNA, 32 nt, Homo Sapiens
agcaaacuauuuccaaacuaaaaaugugauag

SEQ ID NO: 340426 - RNA, 29 nt, Homo Sapiens
agcccgcgggagcccaggacgccgcuucc

SEQ ID NO: 340427 - RNA, 32 nt, Homo Sapiens
aaauuggggcucagggagaugaucuggccuga

SEQ ID NO: 340428 - RNA, 32 nt, Homo Sapiens
auauguguauauauuuuuuuuuaagcucugag

SEQ ID NO: 340429 - RNA, 32 nt, Homo Sapiens
accaggaguagugaugaagaugauggugggga

SEQ ID NO: 340430 - RNA, 32 nt, Homo Sapiens
cuaaaagggcaaacaguggagacgucugcucu

SEQ ID NO: 340431 - RNA, 32 nt, Homo Sapiens
cuggagaugacaugcauagaaagagggguugg

SEQ ID NO: 340432 - RNA, 32 nt, Homo Sapiens
cgacguugcugcuguuggcucuccucgccccu

SEQ ID NO: 340433 - RNA, 32 nt, Homo Sapiens
acugagauauaggagagcugauaauauauuau

SEQ ID NO: 340434 - RNA, 32 nt, Homo Sapiens
aaauugucuuugacuuccaucaccuuuuguaa

SEQ ID NO: 340435 - RNA, 32 nt, Homo Sapiens
cuguggcacuugggcugaaaggugauaauggc

SEQ ID NO: 340436 - RNA, 32 nt, Homo Sapiens
gucucugggcuuugugcaagcucaguuugaaa

SEQ ID NO: 340437 - RNA, 32 nt, Homo Sapiens
aguggagacaccuuucccagggcuacggggau

SEQ ID NO: 340438 - RNA, 32 nt, Homo Sapiens
aggacuugaagcccgguaaaccccgcccuuac

SEQ ID NO: 340439 - RNA, 32 nt, Homo Sapiens
agcucuggaggguggucuggggccuguggaca

SEQ ID NO: 340440 - RNA, 32 nt, Homo Sapiens
aggccgggagcccugcacccccgggagucauu

SEQ ID NO: 340441 - RNA, 32 nt, Homo Sapiens
auccuucuggggauagaacaagaccugggagg

SEQ ID NO: 340442 - RNA, 32 nt, Homo Sapiens
uugcugauauacagaugggaauaugagugcaa

SEQ ID NO: 340443 - RNA, 30 nt, Homo Sapiens
gaccucaccugucggaccuauagcuugcug

SEQ ID NO: 340444 - RNA, 32 nt, Homo Sapiens
cacagggagagcccaggcucucuuugcagccu

SEQ ID NO: 340445 - RNA, 32 nt, Homo Sapiens
cagagugccccgaggaucccgugggacagaau

SEQ ID NO: 340446 - RNA, 32 nt, Homo Sapiens
ccuggggagauggcggaacagcacggagcacc

SEQ ID NO: 340447 - RNA, 32 nt, Homo Sapiens
ggauuuuaugcaguaggcauuacuacaguaca

SEQ ID NO: 340448 - RNA, 32 nt, Homo Sapiens
ccacuuucauguccccucuggauuguccagug

SEQ ID NO: 340449 - RNA, 32 nt, Homo Sapiens
ggacaaggggacugggggaggggccaaagcag

SEQ ID NO: 340450 - RNA, 32 nt, Homo Sapiens
gcaggaggcaagggcugcaacagacccccucu

SEQ ID NO: 340451 - RNA, 32 nt, Homo Sapiens
uacacaccaaaaaauuacacauuuuaaaacug

SEQ ID NO: 340452 - RNA, 32 nt, Homo Sapiens
uccuccacagcccugagucuaagcaaaagccc

SEQ ID NO: 340453 - RNA, 32 nt, Homo Sapiens
gugucugacaccuugacugcaggcuugggagg

SEQ ID NO: 340454 - RNA, 32 nt, Homo Sapiens
gcaaagggcugaugucgguaguccccauccug

SEQ ID NO: 340455 - RNA, 32 nt, Homo Sapiens
cauuauaacuguaacguucuuugaguuuguga

SEQ ID NO: 340456 - RNA, 32 nt, Homo Sapiens
uaacccccaaaauaaguauuuaacuuugcauu

SEQ ID NO: 340457 - RNA, 32 nt, Homo Sapiens
uccuccucccagcagagcagcaggauccccag

SEQ ID NO: 340458 - RNA, 32 nt, Homo Sapiens
caccuggccugccuguggcacgaauccuacca

SEQ ID NO: 340459 - RNA, 32 nt, Homo Sapiens
gcacuaaaauguuuaauucauuaaucuguuug

SEQ ID NO: 340460 - RNA, 32 nt, Homo Sapiens
uauauacuccuacauauaaaauccaucuucua

SEQ ID NO: 340461 - RNA, 32 nt, Homo Sapiens
ucugcuuccaggugcugggggacuccugcagc

SEQ ID NO: 340462 - RNA, 32 nt, Homo Sapiens
ucgcgucggcgcccgacgcggagucagcaggg

SEQ ID NO: 340463 - RNA, 32 nt, Homo Sapiens
uggaguggcuguguacucucccauugacuaga

SEQ ID NO: 340464 - RNA, 32 nt, Homo Sapiens
auuauuagcuaauggucuucugcauuuuuugg

SEQ ID NO: 340465 - RNA, 32 nt, Homo Sapiens
guggcagggucaccccacuuccgaugcccucc

SEQ ID NO: 340466 - RNA, 32 nt, Homo Sapiens
cauuucuguuuaccaauagcucugccaguauu

SEQ ID NO: 340467 - RNA, 31 nt, Homo Sapiens
cuuuucagccuccagaaccaugagaaauaaa

SEQ ID NO: 340468 - RNA, 32 nt, Homo Sapiens
gccaccuccaggcugcaggggcgggucacuca

SEQ ID NO: 340469 - RNA, 31 nt, Homo Sapiens
agggagcagcgcagcgcgcgacugacaccca

SEQ ID NO: 340470 - RNA, 32 nt, Homo Sapiens
aggcugaggcaggagaauggugcggagcuugc

SEQ ID NO: 340471 - RNA, 32 nt, Homo Sapiens
cuccccagcccggcuuuccuccaagcgccccu

SEQ ID NO: 340472 - RNA, 32 nt, Homo Sapiens
cgccucaacgcacuucgcggaccucagcccug

SEQ ID NO: 340473 - RNA, 27 nt, Homo Sapiens
gcaguaucccuguucagcccaccuuaa

SEQ ID NO: 340474 - RNA, 32 nt, Homo Sapiens
gaggaacgauggccgacggcggcggcccuaag

SEQ ID NO: 340475 - RNA, 32 nt, Homo Sapiens
uccuuaaaaaagaauacaagauaauauaggua

SEQ ID NO: 340476 - RNA, 32 nt, Homo Sapiens
cguccccgcucggccuggccaggccccgcgcu

SEQ ID NO: 340477 - RNA, 32 nt, Homo Sapiens
ccccugcccagcugcuccucccaccuggccau

SEQ ID NO: 340478 - RNA, 32 nt, Homo Sapiens
gcgccggaguccacgcaccggggauggaggcg

SEQ ID NO: 340479 - RNA, 32 nt, Homo Sapiens
ggaaggggggccugggccacucucccaggaag

SEQ ID NO: 340480 - RNA, 32 nt, Homo Sapiens
cacuguuaaaauuuauccaaaagcaacuucac

SEQ ID NO: 340481 - RNA, 32 nt, Homo Sapiens
ccccugcuccagccacgccaacccuuuaaccu

SEQ ID NO: 340482 - RNA, 32 nt, Homo Sapiens
gaacaagggaagauugauauuuuuggauaugc

SEQ ID NO: 340483 - RNA, 32 nt, Homo Sapiens
cuuccuugcugugucauaccaggccgccccag

SEQ ID NO: 340484 - RNA, 32 nt, Homo Sapiens
ggcugcauucgagcaggucucaucuuuaugcc

SEQ ID NO: 340485 - RNA, 32 nt, Homo Sapiens
aggacccuccccacccaccaaaugccucugcc

SEQ ID NO: 340486 - RNA, 32 nt, Homo Sapiens
uauuaaucuauacauaauauguuuccucagca

SEQ ID NO: 340487 - RNA, 32 nt, Homo Sapiens
cuagagauugcaagggcggggagaggaggcuc

SEQ ID NO: 340488 - RNA, 32 nt, Homo Sapiens
gccagcgugguggacaggagcggagcccugca

SEQ ID NO: 340489 - RNA, 30 nt, Homo Sapiens
gauauucagugcucugcagaagccucuccc

SEQ ID NO: 340490 - RNA, 32 nt, Homo Sapiens
cucgaagugaaaugguuaaaaauauuuauccu

SEQ ID NO: 340491 - RNA, 32 nt, Homo Sapiens
uugggguagauggugugugugaaacagugaag

SEQ ID NO: 340492 - RNA, 32 nt, Homo Sapiens
uguggauuuguuucuguugucuuuuaaaaugu

SEQ ID NO: 340493 - RNA, 32 nt, Homo Sapiens
uaaucuguauaaacaaggaauguguuagcuua

SEQ ID NO: 340494 - RNA, 32 nt, Homo Sapiens
uggggccucgccuggcugcagccugcgccacc

SEQ ID NO: 340495 - RNA, 32 nt, Homo Sapiens
uuaaguuuuuuauugaauuccauccuuauuua

SEQ ID NO: 340496 - RNA, 32 nt, Homo Sapiens
gugagcugccugaggucagggauugcgcuuug

SEQ ID NO: 340497 - RNA, 32 nt, Homo Sapiens
auacccacccccacccaagggccuggccugag

SEQ ID NO: 340498 - RNA, 32 nt, Homo Sapiens
gugaaauaaaaauuauuuaauuuaugugaaca

SEQ ID NO: 340499 - RNA, 32 nt, Homo Sapiens
uucuuccacaguguaucggaucugucguucug

SEQ ID NO: 340500 - RNA, 32 nt, Homo Sapiens
gaggccacuaagcccacccccaacccaaggcc

SEQ ID NO: 340501 - RNA, 32 nt, Homo Sapiens
ugggucacggcugcuucccaccagcaaagacc

SEQ ID NO: 340502 - RNA, 32 nt, Homo Sapiens
cuucaaccuacuuuuccuuuucucuuuuuugu

SEQ ID NO: 340503 - RNA, 32 nt, Homo Sapiens
uuucuuggggcagagaagguggagaguaaaga

SEQ ID NO: 340504 - RNA, 32 nt, Homo Sapiens
uuggauuuugaaaagaaaacuuuccucccuca

SEQ ID NO: 340505 - RNA, 32 nt, Homo Sapiens
accggguuuggaaagcaccuuaacugaaucau

SEQ ID NO: 340506 - RNA, 32 nt, Homo Sapiens
cacacacacacacaccccaacacacacacaca

SEQ ID NO: 340507 - RNA, 32 nt, Homo Sapiens
uacauguuugaagugcaaaucuguggauauuc

SEQ ID NO: 340508 - RNA, 32 nt, Homo Sapiens
aggaggaggggaggcaaugucaaaauguacac

SEQ ID NO: 340509 - RNA, 32 nt, Homo Sapiens
ggagcucagucucccuggccuaggcaguuguc

SEQ ID NO: 340510 - RNA, 32 nt, Homo Sapiens
guaguugcaguugagaccauuccuccuguaug

SEQ ID NO: 340511 - RNA, 29 nt, Homo Sapiens
aggacauuagugaugccugugaagcagaa

SEQ ID NO: 340512 - RNA, 32 nt, Homo Sapiens
uugcuuuauuuuuucucugagaugauaccaaa

SEQ ID NO: 340513 - RNA, 32 nt, Homo Sapiens
uggccgaugauuuuugucaucagccaccaucc

SEQ ID NO: 340514 - RNA, 32 nt, Homo Sapiens
acagauaaauuaacuuguuaaagauuacacag

SEQ ID NO: 340515 - RNA, 32 nt, Homo Sapiens
acugacagugaggcugaaauguuugcacuuca

SEQ ID NO: 340516 - RNA, 30 nt, Homo Sapiens
uucauggguccccuaguuaggcccagauaa

SEQ ID NO: 340517 - RNA, 32 nt, Homo Sapiens
acugccacuccagccugggugacagagcaaga

SEQ ID NO: 340518 - RNA, 32 nt, Homo Sapiens
cacauugggucuuuaaaucuuuuagauauaua

SEQ ID NO: 340519 - RNA, 32 nt, Homo Sapiens
gcacccugcuccauguuaccuagagcaggcac

SEQ ID NO: 340520 - RNA, 32 nt, Homo Sapiens
accuccuguaguacaacaccauuucuuggcau

SEQ ID NO: 340521 - RNA, 31 nt, Homo Sapiens
gcugaggcgggcccugugcugggggugguag

SEQ ID NO: 340522 - RNA, 32 nt, Homo Sapiens
gacgcgcgggccccgcgcccacucccccucca

SEQ ID NO: 340523 - RNA, 32 nt, Homo Sapiens
ugaagagaaaguuauuucagauugcgagugug

SEQ ID NO: 340524 - RNA, 32 nt, Homo Sapiens
gcggcgcgccuggccuggccuggcugagggga

SEQ ID NO: 340525 - RNA, 32 nt, Homo Sapiens
ccugucuggaccccggccccaccuccggaccc

SEQ ID NO: 340526 - RNA, 32 nt, Homo Sapiens
guaauguuuguggaaaauuauuauuaagucaa

SEQ ID NO: 340527 - RNA, 32 nt, Homo Sapiens
agaaauaggauaugagucucagcaaauucuug

SEQ ID NO: 340528 - RNA, 32 nt, Homo Sapiens
auaaaaucaggaacuugacacaguguugcauu

SEQ ID NO: 340529 - RNA, 32 nt, Homo Sapiens
ggcauuucagauuuuccaaaacaaaagucaaa

SEQ ID NO: 340530 - RNA, 32 nt, Homo Sapiens
augagcccagggcuccacggucccuaccuaga

SEQ ID NO: 340531 - RNA, 32 nt, Homo Sapiens
ggcacccgcccggcccggcugcucccuggcuc

SEQ ID NO: 340532 - RNA, 32 nt, Homo Sapiens
uugaaacuaaaauaaauuaaguuacuggaaaa

SEQ ID NO: 340533 - RNA, 32 nt, Homo Sapiens
ugugcucugcggucgcagcugcagccgcuucg

SEQ ID NO: 340534 - RNA, 32 nt, Homo Sapiens
ggaucugaagaguaaagggcugggucugccuc

SEQ ID NO: 340535 - RNA, 32 nt, Homo Sapiens
uuccauacguaucucagacagggaagcuagcu

SEQ ID NO: 340536 - RNA, 32 nt, Homo Sapiens
cagacuuuuaucauuaccuccauuuuacagaa

SEQ ID NO: 340537 - RNA, 32 nt, Homo Sapiens
cgccgccgucgccaucgccgcggccaccaugc

SEQ ID NO: 340538 - RNA, 32 nt, Homo Sapiens
ccuugggacuguccugguuggccacgggcccu

SEQ ID NO: 340539 - RNA, 32 nt, Homo Sapiens
cauaugugcccauuuaagauauuugcauauac

SEQ ID NO: 340540 - RNA, 32 nt, Homo Sapiens
cuagcuuggucucuguuggccuugaagcaagc

SEQ ID NO: 340541 - RNA, 32 nt, Homo Sapiens
cggccgcugccuaagcugggaagaggaaugcc

SEQ ID NO: 340542 - RNA, 32 nt, Homo Sapiens
cacugcccucccucggccccacccacccucug

SEQ ID NO: 340543 - RNA, 32 nt, Homo Sapiens
uucauauuuuaaaauuuccagaauuuuaagca

SEQ ID NO: 340544 - RNA, 32 nt, Homo Sapiens
gcccagcacggcaagggugcaggggcugcccu

SEQ ID NO: 340545 - RNA, 32 nt, Homo Sapiens
ugcucaucuacucgggcgcgcugcugguguuc

SEQ ID NO: 340546 - RNA, 32 nt, Homo Sapiens
ccagcuaaaccacuuccagauuccuagaccuc

SEQ ID NO: 340547 - RNA, 32 nt, Homo Sapiens
ugccaggccccgggaguggggaccaagaugua

SEQ ID NO: 340548 - RNA, 32 nt, Homo Sapiens
cuuaagggauguaacuuuuuauaaccauuaag

SEQ ID NO: 340549 - RNA, 32 nt, Homo Sapiens
guauucucuaaagcuuaaauuguuauuaacua

SEQ ID NO: 340550 - RNA, 32 nt, Homo Sapiens
uucgguguggagggguggagugcugugaucuc

SEQ ID NO: 340551 - RNA, 32 nt, Homo Sapiens
aauucuaauuuuucccaacacauagugguaau

SEQ ID NO: 340552 - RNA, 27 nt, Homo Sapiens
accucacauuaauucauguauaaugcu

SEQ ID NO: 340553 - RNA, 32 nt, Homo Sapiens
cugaguagcuggaacuacaaggaagggccacc

SEQ ID NO: 340554 - RNA, 32 nt, Homo Sapiens
cuguccucccggcacaagaacccggcgccgcc

SEQ ID NO: 340555 - RNA, 32 nt, Homo Sapiens
ggagucacacugaguuccagugaccaccgugg

SEQ ID NO: 340556 - RNA, 32 nt, Homo Sapiens
uucauacuaggauuauggucuuuagauuaaua

SEQ ID NO: 340557 - RNA, 32 nt, Homo Sapiens
guccgccgccccaccaugccgcccccgccgcu

SEQ ID NO: 340558 - RNA, 32 nt, Homo Sapiens
cagaggaaggagaacggcuagcacugggagaa

SEQ ID NO: 340559 - RNA, 32 nt, Homo Sapiens
uauuuaaguuauuuuucuuccuccucucccuu

SEQ ID NO: 340560 - RNA, 32 nt, Homo Sapiens
gugugaauucaccgugaaauaggugagauaaa

SEQ ID NO: 340561 - RNA, 32 nt, Homo Sapiens
caaauaguccacugugcuuuguuuccucuguu

SEQ ID NO: 340562 - RNA, 32 nt, Homo Sapiens
gcaacgguugguccugcggcugugaugucggu

SEQ ID NO: 340563 - RNA, 30 nt, Homo Sapiens
gccgaggaagcgaccgcggguccgugaugg

SEQ ID NO: 340564 - RNA, 32 nt, Homo Sapiens
cccuacccuaaauaaucaaucggccuugugau

SEQ ID NO: 340565 - RNA, 32 nt, Homo Sapiens
ccagcaugggccggcacugccgccggauggcu

SEQ ID NO: 340566 - RNA, 32 nt, Homo Sapiens
guucaccgccuccagcugcugcucuccucgac

SEQ ID NO: 340567 - RNA, 32 nt, Homo Sapiens
aggcagccucugggggguggccaggccgggaa

SEQ ID NO: 340568 - RNA, 32 nt, Homo Sapiens
ggcuggugaaggggagcggggaggggcagagg

SEQ ID NO: 340569 - RNA, 32 nt, Homo Sapiens
uguguccaccuuucucuccucuucccaagccu

SEQ ID NO: 340570 - RNA, 32 nt, Homo Sapiens
uuugaaauaauuaguaaaauggucugguacag

SEQ ID NO: 340571 - RNA, 32 nt, Homo Sapiens
ugguucugguggaagcuguaggacgaagcuca

SEQ ID NO: 340572 - RNA, 32 nt, Homo Sapiens
acucuaccccacccuacaaaaugcauauggag

SEQ ID NO: 340573 - RNA, 32 nt, Homo Sapiens
gaggcuuccuucccauccuccugaccaccggg

SEQ ID NO: 340574 - RNA, 32 nt, Homo Sapiens
cuuaguuuugguuuuuuuaaaccacauugccc

SEQ ID NO: 340575 - RNA, 31 nt, Homo Sapiens
ccauggacggcgguguggccugaguugucag

SEQ ID NO: 340576 - RNA, 32 nt, Homo Sapiens
ggucuucccucaggccggacagauggcgccug

SEQ ID NO: 340577 - RNA, 32 nt, Homo Sapiens
cgguagagucaagacuguuacuuuuuagccau

SEQ ID NO: 340578 - RNA, 32 nt, Homo Sapiens
uaggacugaugaugcauuuuagcuuugagcuu

SEQ ID NO: 340579 - RNA, 32 nt, Homo Sapiens
cuccauccagguagcaagauguguguaugucu

SEQ ID NO: 340580 - RNA, 32 nt, Homo Sapiens
ggaaaucucucaucuuguuuuuguuucaugua

SEQ ID NO: 340581 - RNA, 32 nt, Homo Sapiens
gcccguaacuauugcgucacuccaccugccua

SEQ ID NO: 340582 - RNA, 32 nt, Homo Sapiens
uagaggcaugcgccaccacacccggcuaauuu

SEQ ID NO: 340583 - RNA, 32 nt, Homo Sapiens
uucuccuguggggucuugcccuugaagugcca

SEQ ID NO: 340584 - RNA, 31 nt, Homo Sapiens
cuguggcgugcggcuccuccccgcgccgcga

SEQ ID NO: 340585 - RNA, 32 nt, Homo Sapiens
acuucucucccucccccaucuacacagaagac

SEQ ID NO: 340586 - RNA, 32 nt, Homo Sapiens
cugaaucccuucccuguuccuuagguugcacu

SEQ ID NO: 340587 - RNA, 32 nt, Homo Sapiens
aaaauaacaaaguguuaguaaucauugcuuuc

SEQ ID NO: 340588 - RNA, 32 nt, Homo Sapiens
ccaucccccuccccccagcacccacaauuuuc

SEQ ID NO: 340589 - RNA, 32 nt, Homo Sapiens
guucugagucacuguagaagucaugcauuuau

SEQ ID NO: 340590 - RNA, 32 nt, Homo Sapiens
gcuucaucugugcgacagacaccaagcgccuu

SEQ ID NO: 340591 - RNA, 32 nt, Homo Sapiens
gagacccugcaagagauugaucggaagauguc

SEQ ID NO: 340592 - RNA, 32 nt, Homo Sapiens
gaaaucccaucccuaaaaccugccuucuccuu

SEQ ID NO: 340593 - RNA, 32 nt, Homo Sapiens
uuguaaggauugguacuaucuaucauuccuua

SEQ ID NO: 340594 - RNA, 32 nt, Homo Sapiens
cgucuagacuccuugggaccgugaguuccuag

SEQ ID NO: 340595 - RNA, 32 nt, Homo Sapiens
ucuugacuggcaccuggagagcccuuaagucu

SEQ ID NO: 340596 - RNA, 32 nt, Homo Sapiens
acaggguaucuaggaggggcggggaagacaug

SEQ ID NO: 340597 - RNA, 32 nt, Homo Sapiens
uccuaggagacgggauuccgggaagcggggag

SEQ ID NO: 340598 - RNA, 32 nt, Homo Sapiens
uuuugggcauuuguuuuuuguaaauaagauga

SEQ ID NO: 340599 - RNA, 32 nt, Homo Sapiens
gaauuguauuaaauaacagauguauucaaauu

SEQ ID NO: 340600 - RNA, 32 nt, Homo Sapiens
ugaggcuugcccagcccccaggcccucagauc

SEQ ID NO: 340601 - RNA, 32 nt, Homo Sapiens
ucccuggcaccaagucccaggcaggagcagcu

SEQ ID NO: 340602 - RNA, 32 nt, Homo Sapiens
aaguuucgcucuuguugcccaggcuggagugc

SEQ ID NO: 340603 - RNA, 32 nt, Homo Sapiens
aaggucaguccuaccuuuuucuuucugagagc

SEQ ID NO: 340604 - RNA, 32 nt, Homo Sapiens
caugccccuugguccuggcagggcgccaaguc

SEQ ID NO: 340605 - RNA, 32 nt, Homo Sapiens
cuuucaugccuacacaccccucauuaaagcag

SEQ ID NO: 340606 - RNA, 32 nt, Homo Sapiens
gagaaagagaaaacuuaaaacaauaugaacau

SEQ ID NO: 340607 - RNA, 32 nt, Homo Sapiens
aggagguaucauauaacuuuguagaacuuaaa

SEQ ID NO: 340608 - RNA, 32 nt, Homo Sapiens
ucccggcucccucccccuucggauguggcuug

SEQ ID NO: 340609 - RNA, 32 nt, Homo Sapiens
aaacaggucagcugggagcuucugcccccacu

SEQ ID NO: 340610 - RNA, 32 nt, Homo Sapiens
accaacaugaacaauuuuaauugaaaacacca

SEQ ID NO: 340611 - RNA, 32 nt, Homo Sapiens
aauagaaaauggaaaaguugagcuauuucagu

SEQ ID NO: 340612 - RNA, 32 nt, Homo Sapiens
ucugguacuguaaguguaaagaagcuuauuuu

SEQ ID NO: 340613 - RNA, 32 nt, Homo Sapiens
uuuucagccccucccuggaauagugaguuggg

SEQ ID NO: 340614 - RNA, 32 nt, Homo Sapiens
ggcagcggacccuggcgggggcugggaggaca

SEQ ID NO: 340615 - RNA, 32 nt, Homo Sapiens
caaguguucccagcaaccagcuccauccuggc

SEQ ID NO: 340616 - RNA, 32 nt, Homo Sapiens
aaucuuaaauaugcuuuuuaaaaauuggaaua

SEQ ID NO: 340617 - RNA, 32 nt, Homo Sapiens
uaaaggggccgcgcccggccgcggcgcgacuc

SEQ ID NO: 340618 - RNA, 32 nt, Homo Sapiens
uaauguugacuguuaauucuuaagcaagaaac

SEQ ID NO: 340619 - RNA, 32 nt, Homo Sapiens
uccgaacccaucuccuuccgcucucccgcccc

SEQ ID NO: 340620 - RNA, 32 nt, Homo Sapiens
uuugucaugaucucaauucucuucuuuccacc

SEQ ID NO: 340621 - RNA, 32 nt, Homo Sapiens
aaugaugaaaccuuauagagugagauuaucau

SEQ ID NO: 340622 - RNA, 32 nt, Homo Sapiens
cguuaugugggaagcgaauccagagauguuuc

SEQ ID NO: 340623 - RNA, 32 nt, Homo Sapiens
aguccuccaggauagugcuccucccccagcuc

SEQ ID NO: 340624 - RNA, 32 nt, Homo Sapiens
uaauugcuugaucaguuuaucagucaauuuca

SEQ ID NO: 340625 - RNA, 32 nt, Homo Sapiens
ggauguggacggacugguauggcauugagccu

SEQ ID NO: 340626 - RNA, 32 nt, Homo Sapiens
cugaaguauaaauuauuuauguaaauucauug

SEQ ID NO: 340627 - RNA, 32 nt, Homo Sapiens
acauauuuguuguuuuaacccacucaguuuug

SEQ ID NO: 340628 - RNA, 32 nt, Homo Sapiens
uaaaauacaguaaaauguuaagauugucaucu

SEQ ID NO: 340629 - RNA, 32 nt, Homo Sapiens
auagacugcccccuaccucccaccaccaccau

SEQ ID NO: 340630 - RNA, 32 nt, Homo Sapiens
ggauggggaaaauaaacuuaacucuacaaaag

SEQ ID NO: 340631 - RNA, 32 nt, Homo Sapiens
ucuggccaaaaauggcucucuaggugggcugu

SEQ ID NO: 340632 - RNA, 32 nt, Homo Sapiens
aaaaauaaaaaguuuuuuuuuauaauucaguc

SEQ ID NO: 340633 - RNA, 32 nt, Homo Sapiens
gagccucccuagcagcugggacuauuagugca

SEQ ID NO: 340634 - RNA, 32 nt, Homo Sapiens
aaauauggugcugcuuuauauaaaccuuacau

SEQ ID NO: 340635 - RNA, 32 nt, Homo Sapiens
cacacggucaauccacguggaccgucucccuc

SEQ ID NO: 340636 - RNA, 30 nt, Homo Sapiens
guucgggccaggcgcgguggcucacaccug

SEQ ID NO: 340637 - RNA, 32 nt, Homo Sapiens
aagaaaauuauguauuuuugucauauguauuu

SEQ ID NO: 340638 - RNA, 32 nt, Homo Sapiens
uguaucaauuuaacauauaguaaggauaguuu

SEQ ID NO: 340639 - RNA, 32 nt, Homo Sapiens
aaaaaaacaaaaaacaaacaaacaaaaaaaca

SEQ ID NO: 340640 - RNA, 32 nt, Homo Sapiens
ccuugcccgauuccuucaugcuauaucucaug

SEQ ID NO: 340641 - RNA, 32 nt, Homo Sapiens
acuuaauaguaauaaugaaagucauaguaauu

SEQ ID NO: 340642 - RNA, 32 nt, Homo Sapiens
cuagcuggaaagucuguaauguucaugucaua

SEQ ID NO: 340643 - RNA, 32 nt, Homo Sapiens
guucagggcccagcugccccccaggauggaua

SEQ ID NO: 340644 - RNA, 32 nt, Homo Sapiens
cuuguaguucucaggaccuguucaagaaggug

SEQ ID NO: 340645 - RNA, 32 nt, Homo Sapiens
acuuuuugguaauauuaacuuaccaaaucuuc

SEQ ID NO: 340646 - RNA, 32 nt, Homo Sapiens
aagcugcugaguuuguccuacuuucuccuggg

SEQ ID NO: 340647 - RNA, 32 nt, Homo Sapiens
cagacuacuuuuuaaaugauaugaagaaauca

SEQ ID NO: 340648 - RNA, 32 nt, Homo Sapiens
uuccgacccagcugugggcugcgccccacgcc

SEQ ID NO: 340649 - RNA, 32 nt, Homo Sapiens
aaaagaaaaauauauauucauaaaaaauaugg

SEQ ID NO: 340650 - RNA, 32 nt, Homo Sapiens
agcacccccucacgugacccagcccucggcug

SEQ ID NO: 340651 - RNA, 32 nt, Homo Sapiens
uggacucccuccccaccccaaccacucuuucu

SEQ ID NO: 340652 - RNA, 32 nt, Homo Sapiens
gacaguauuauuacauucaguauuacaauggc

SEQ ID NO: 340653 - RNA, 32 nt, Homo Sapiens
uuaacuguuauauucaagauuaaacuucaaaa

SEQ ID NO: 340654 - RNA, 32 nt, Homo Sapiens
auucugagcccugaguaugccuggacauugau

SEQ ID NO: 340655 - RNA, 32 nt, Homo Sapiens
gucucuuccgcggaaacugacauugcguuucc

SEQ ID NO: 340656 - RNA, 32 nt, Homo Sapiens
gccuucgauauuauuuguaaucuuauggagag

SEQ ID NO: 340657 - RNA, 32 nt, Homo Sapiens
ugccuuuuccucccauccaccucccccgcaca

SEQ ID NO: 340658 - RNA, 32 nt, Homo Sapiens
ggagacuguagagaaaaugaaaaaagauccac

SEQ ID NO: 340659 - RNA, 32 nt, Homo Sapiens
ugcaccacaguccagcagcaaggcuccuugcu

SEQ ID NO: 340660 - RNA, 32 nt, Homo Sapiens
gccuuauaucauuucauauaaaaaagacggga

SEQ ID NO: 340661 - RNA, 32 nt, Homo Sapiens
uauucaguucccuuuuucccuuuuaaaaugcu

SEQ ID NO: 340662 - RNA, 32 nt, Homo Sapiens
ugaugaaaacaaagacuagauggguaugugug

SEQ ID NO: 340663 - RNA, 32 nt, Homo Sapiens
ggccuguccugaugcccuccccaccucaaccg

SEQ ID NO: 340664 - RNA, 32 nt, Homo Sapiens
uauuaugaaagauguaaugguuugucagcugu

SEQ ID NO: 340665 - RNA, 32 nt, Homo Sapiens
acugaggcagagagugccguggagugguuuuu

SEQ ID NO: 340666 - RNA, 32 nt, Homo Sapiens
agagauguuuacaguaugaugaaaauaauuuu

SEQ ID NO: 340667 - RNA, 32 nt, Homo Sapiens
ggcgccgggccgggcccggcccuggagauggu

SEQ ID NO: 340668 - RNA, 32 nt, Homo Sapiens
cuggagcuccagagacccaccccucuccaggu

SEQ ID NO: 340669 - RNA, 32 nt, Homo Sapiens
auauguguaguugcuccuggcccgcuggggaa

SEQ ID NO: 340670 - RNA, 32 nt, Homo Sapiens
gucuucagaaauuuauaaaauguaaauacuga

SEQ ID NO: 340671 - RNA, 32 nt, Homo Sapiens
ucuaucacuuuuugcgaagguuucugcagccc

SEQ ID NO: 340672 - RNA, 30 nt, Homo Sapiens
gcccggccagcccgcuucgcccugaccugu

SEQ ID NO: 340673 - RNA, 32 nt, Homo Sapiens
acgccgccaugagcgccgcgcucuucagccug

SEQ ID NO: 340674 - RNA, 32 nt, Homo Sapiens
cacuugacucucuguaaaauggaccaaucagc

SEQ ID NO: 340675 - RNA, 32 nt, Homo Sapiens
gccugcccgugccugcccagcugggaggaguc

SEQ ID NO: 340676 - RNA, 32 nt, Homo Sapiens
aggcuggggguggaaggagcagggcucuggag

SEQ ID NO: 340677 - RNA, 32 nt, Homo Sapiens
cucucagucaacaucguggggcuggacagggc

SEQ ID NO: 340678 - RNA, 32 nt, Homo Sapiens
ucauguuccauuuugugccgcuuucccccuuc

SEQ ID NO: 340679 - RNA, 32 nt, Homo Sapiens
uauaaaggguuggggaggaaagagacacaaac

SEQ ID NO: 340680 - RNA, 32 nt, Homo Sapiens
auuuagaaaaauacccuaaccuuuaacugucu

SEQ ID NO: 340681 - RNA, 32 nt, Homo Sapiens
uuccugccgcaggaacgcuaggcagucucuuu

SEQ ID NO: 340682 - RNA, 32 nt, Homo Sapiens
uugccugugcgcgcgugcgcggacauggccuc

SEQ ID NO: 340683 - RNA, 32 nt, Homo Sapiens
uacugcaguggugccuucagggacucgaggaa

SEQ ID NO: 340684 - RNA, 32 nt, Homo Sapiens
aguaauauaacucgccaucuugcaggaagugc

SEQ ID NO: 340685 - RNA, 32 nt, Homo Sapiens
uguguagcacucaggacugcugaagacaucua

SEQ ID NO: 340686 - RNA, 32 nt, Homo Sapiens
aacaaaaaggggaaguaucaaacuacugccau

SEQ ID NO: 340687 - RNA, 32 nt, Homo Sapiens
gaugaaauguggagaccacgaugccgggugcg

SEQ ID NO: 340688 - RNA, 32 nt, Homo Sapiens
ggcuguaguuguuuauaauagcaacauaauug

SEQ ID NO: 340689 - RNA, 32 nt, Homo Sapiens
auugcuauuaaacuccuacuuaagguguucua

SEQ ID NO: 340690 - RNA, 32 nt, Homo Sapiens
caguauuacagagagcaaauaguuuccucucc

SEQ ID NO: 340691 - RNA, 32 nt, Homo Sapiens
ggguuuccuuuuggcgcuucccuuuggacccc

SEQ ID NO: 340692 - RNA, 32 nt, Homo Sapiens
accauucuaaauuuauccuguucugaaucauc

SEQ ID NO: 340693 - RNA, 32 nt, Homo Sapiens
augccccaguucaaaugggaacuauuaacaga

SEQ ID NO: 340694 - RNA, 32 nt, Homo Sapiens
uucggagucuuaggugaucgagggugugccca

SEQ ID NO: 340695 - RNA, 32 nt, Homo Sapiens
uguacguuaugaagcauagaaaauuaaacagu

SEQ ID NO: 340696 - RNA, 32 nt, Homo Sapiens
caugugagaguggcuucccuucugccugacuc

SEQ ID NO: 340697 - RNA, 32 nt, Homo Sapiens
aguacggggcgggggucggccgagggcgcggg

SEQ ID NO: 340698 - RNA, 32 nt, Homo Sapiens
ugucauauguaggauagccacuuuuuagguau

SEQ ID NO: 340699 - RNA, 32 nt, Homo Sapiens
ugauuuuguuucugaagggaaugccucuaaga

SEQ ID NO: 340700 - RNA, 32 nt, Homo Sapiens
acccuggccugcccccaccuccccaguaauug

SEQ ID NO: 340701 - RNA, 32 nt, Homo Sapiens
cgugcagccgggucacugcagcugccuggacc

SEQ ID NO: 340702 - RNA, 32 nt, Homo Sapiens
auuucucccuucaauccugucaauguuugcuu

SEQ ID NO: 340703 - RNA, 32 nt, Homo Sapiens
ggggagggagccagggagugggugugggggcu

SEQ ID NO: 340704 - RNA, 32 nt, Homo Sapiens
uaaucuaauucaguauagaauaugcuguuugg

SEQ ID NO: 340705 - RNA, 32 nt, Homo Sapiens
ccauuuuauaauaucacaauuggaaagaaaca

SEQ ID NO: 340706 - RNA, 32 nt, Homo Sapiens
auuuaccauaauguuccuuagugguagaggug

SEQ ID NO: 340707 - RNA, 32 nt, Homo Sapiens
aacagaaaacgaagccacaggaagggaaguag

SEQ ID NO: 340708 - RNA, 32 nt, Homo Sapiens
cuugcaguauauaaaauaguuagauaaugaga

SEQ ID NO: 340709 - RNA, 32 nt, Homo Sapiens
uguacauaucuaguuguaaaacaaguuuuagc

SEQ ID NO: 340710 - RNA, 32 nt, Homo Sapiens
cauauaaaaauaucaucauaaaaagcuuaauu

SEQ ID NO: 340711 - RNA, 32 nt, Homo Sapiens
gccggggagcccuccgcucgcgggcgcccuca

SEQ ID NO: 340712 - RNA, 32 nt, Homo Sapiens
uuuuuuuuugguuuuuuuguucuuuuuuguuu

SEQ ID NO: 340713 - RNA, 32 nt, Homo Sapiens
gaaauaugugaagggaaaauggcaguccaauu

SEQ ID NO: 340714 - RNA, 32 nt, Homo Sapiens
cucccugcgcguggcugccgccggggcggcag

SEQ ID NO: 340715 - RNA, 32 nt, Homo Sapiens
uuuguacguuauauauuguauuaagggcauuu

SEQ ID NO: 340716 - RNA, 32 nt, Homo Sapiens
gccugcuuuccacccuaugcuagaccucauca

SEQ ID NO: 340717 - RNA, 32 nt, Homo Sapiens
auuguucuucuuccuucagcuagagagaauaa

SEQ ID NO: 340718 - RNA, 32 nt, Homo Sapiens
ccccaguguccucuccucucaggcaggccauu

SEQ ID NO: 340719 - RNA, 32 nt, Homo Sapiens
cgggcguccccgagacgcggcugccuguccgu

SEQ ID NO: 340720 - RNA, 32 nt, Homo Sapiens
cggggcgccgucucagccccgggaagauggug

SEQ ID NO: 340721 - RNA, 32 nt, Homo Sapiens
gccucugaccagcaucgucuguaaagguuaag

SEQ ID NO: 340722 - RNA, 32 nt, Homo Sapiens
ugcuggcagaugaggccucaguggaagugacg

SEQ ID NO: 340723 - RNA, 32 nt, Homo Sapiens
auccuagcugucuccucaucucauccuagucu

SEQ ID NO: 340724 - RNA, 32 nt, Homo Sapiens
cacuucuauuaacugcuucucuucuauuccaa

SEQ ID NO: 340725 - RNA, 32 nt, Homo Sapiens
auaaauugaaagauggagucuaaaaauuauua

SEQ ID NO: 340726 - RNA, 32 nt, Homo Sapiens
ccuaauggccccagucgccuuaccucacccac

SEQ ID NO: 340727 - RNA, 32 nt, Homo Sapiens
aacuuaggaugguagaggaaaaaacagaucag

SEQ ID NO: 340728 - RNA, 32 nt, Homo Sapiens
cauuuccacaucuugcgaguccuuccgaacga

SEQ ID NO: 340729 - RNA, 32 nt, Homo Sapiens
gcccccucaauccauuucccacagugcagcca

SEQ ID NO: 340730 - RNA, 32 nt, Homo Sapiens
gcaggaggaggaggaagccggagcugccauga

SEQ ID NO: 340731 - RNA, 32 nt, Homo Sapiens
ucugguucuguccuagaggaaauaaauucacu

SEQ ID NO: 340732 - RNA, 32 nt, Homo Sapiens
aagggauuuuucccgcaguugcgaagggaagc

SEQ ID NO: 340733 - RNA, 32 nt, Homo Sapiens
guuauucucaaauauaaugugugaccgugaua

SEQ ID NO: 340734 - RNA, 32 nt, Homo Sapiens
agcagaaggggagauggacgacacgguggggg

SEQ ID NO: 340735 - RNA, 32 nt, Homo Sapiens
agcaacaaaaggcuccaaaacacacaugccuc

SEQ ID NO: 340736 - RNA, 32 nt, Homo Sapiens
cuuaacugcaaucuguuaacacugcugucucc

SEQ ID NO: 340737 - RNA, 32 nt, Homo Sapiens
gggccgcagggccagccuguuucucuaacaaa

SEQ ID NO: 340738 - RNA, 32 nt, Homo Sapiens
uucacuuuugaaaaguucuuaaugaacaguuu

SEQ ID NO: 340739 - RNA, 32 nt, Homo Sapiens
cauccaggaaugcacuuacugauaagauauug

SEQ ID NO: 340740 - RNA, 32 nt, Homo Sapiens
accgcgagccaugcuguccgccgcccgccccc

SEQ ID NO: 340741 - RNA, 32 nt, Homo Sapiens
acaccugcccuucucacccauggcccacccag

SEQ ID NO: 340742 - RNA, 32 nt, Homo Sapiens
cugagugggaggaaaagcaaacaucaaaacag

SEQ ID NO: 340743 - RNA, 32 nt, Homo Sapiens
cccuggaacugggagacagggagaauccccug

SEQ ID NO: 340744 - RNA, 32 nt, Homo Sapiens
uaaugcaaaaacaguaauccuugugaaauuac

SEQ ID NO: 340745 - RNA, 32 nt, Homo Sapiens
cgguacugugaaacagaagaauggacucagug

SEQ ID NO: 340746 - RNA, 32 nt, Homo Sapiens
acaugugugcgugugcacacacgcaaguaugc

SEQ ID NO: 340747 - RNA, 32 nt, Homo Sapiens
augaagaaacaaaguaaaaugccaagguguaa

SEQ ID NO: 340748 - RNA, 32 nt, Homo Sapiens
cggaaccgcuucugccgggaucuuccaggagg

SEQ ID NO: 340749 - RNA, 32 nt, Homo Sapiens
ggcugaccucaucugcuuugcuuuggcaugug

SEQ ID NO: 340750 - RNA, 32 nt, Homo Sapiens
ugauguaaaguuucuguaaaucuauuucauau

SEQ ID NO: 340751 - RNA, 32 nt, Homo Sapiens
gaugacaaaaaauguuuuaaagaauaugacuu

SEQ ID NO: 340752 - RNA, 32 nt, Homo Sapiens
aauaguuuacugaguugucaauuuuaucagua

SEQ ID NO: 340753 - RNA, 32 nt, Homo Sapiens
gucuaaagauaaaccuuaaguguaagaaaauu

SEQ ID NO: 340754 - RNA, 30 nt, Homo Sapiens
aguucuggagguggauggggaggaugguug

SEQ ID NO: 340755 - RNA, 32 nt, Homo Sapiens
cugcauuaucccauucuuauucuccucaaacc

SEQ ID NO: 340756 - RNA, 32 nt, Homo Sapiens
uuacacucccgcaacacagccauuauuuuauu

SEQ ID NO: 340757 - RNA, 32 nt, Homo Sapiens
uauuuaaaacuguauugauaccaagaguaugu

SEQ ID NO: 340758 - RNA, 32 nt, Homo Sapiens
cccgcggcccagacccagcccgcggccuggac

SEQ ID NO: 340759 - RNA, 32 nt, Homo Sapiens
acacaacacugggucuuaugugacuggcuucu

SEQ ID NO: 340760 - RNA, 32 nt, Homo Sapiens
ggccauaggcgguggcagcggcagcagagaag

SEQ ID NO: 340761 - RNA, 32 nt, Homo Sapiens
aaaaaagcuccauggcggcggcggccaagccc

SEQ ID NO: 340762 - RNA, 32 nt, Homo Sapiens
uuuguguauuguaucuguaguuuuguaauaaa

SEQ ID NO: 340763 - RNA, 29 nt, Homo Sapiens
cggcauggagguggcgcugcagacugagc

SEQ ID NO: 340764 - RNA, 32 nt, Homo Sapiens
ccuuggcuucccucccagucccagcccugcuu

SEQ ID NO: 340765 - RNA, 32 nt, Homo Sapiens
ccagccuacugcgcccgagucccgcggcccca

SEQ ID NO: 340766 - RNA, 32 nt, Homo Sapiens
aacccuggggccggcgucugggaucuguucug

SEQ ID NO: 340767 - RNA, 31 nt, Homo Sapiens
aaucccucagaaggaaaguccuuacuuuuca

SEQ ID NO: 340768 - RNA, 32 nt, Homo Sapiens
agccaaguuggggggagcuggugccuggagug

SEQ ID NO: 340769 - RNA, 32 nt, Homo Sapiens
acacagcggucagauagcaucagaccugcauu

SEQ ID NO: 340770 - RNA, 32 nt, Homo Sapiens
guauuaucuaaccugguugguauuuguaauga

SEQ ID NO: 340771 - RNA, 32 nt, Homo Sapiens
uauaugauugguuaaacucuguaagccccaug

SEQ ID NO: 340772 - RNA, 32 nt, Homo Sapiens
cgccgccaccgccgccucugcuuagucgccgc

SEQ ID NO: 340773 - RNA, 32 nt, Homo Sapiens
gaccuuuucugaaaauacauacuuuuacauuu

SEQ ID NO: 340774 - RNA, 32 nt, Homo Sapiens
uaacuauaaaacaaaauuauuuuacacaugca

SEQ ID NO: 340775 - RNA, 32 nt, Homo Sapiens
ugagcagggaauccggccggaggaaggagcag

SEQ ID NO: 340776 - RNA, 32 nt, Homo Sapiens
acuuuuuccuuccucccugucuaggcauuggg

SEQ ID NO: 340777 - RNA, 32 nt, Homo Sapiens
cugugagcagauaaaaaguacauauacaguuc

SEQ ID NO: 340778 - RNA, 32 nt, Homo Sapiens
auuuuuaaaaauuuuuguuugguuauaucgaa

SEQ ID NO: 340779 - RNA, 32 nt, Homo Sapiens
gcaggccccccggcccgguugcuuccucaguu

SEQ ID NO: 340780 - RNA, 32 nt, Homo Sapiens
ugcugucccucccccaccccaaccccaaucug

SEQ ID NO: 340781 - RNA, 32 nt, Homo Sapiens
gaugggggcagggcugugcuugaaggcccugc

SEQ ID NO: 340782 - RNA, 32 nt, Homo Sapiens
gucaggagggcgggagggcgcagcgcugggcc

SEQ ID NO: 340783 - RNA, 32 nt, Homo Sapiens
ggggucgcggcagccgcaccugcgcgggcgac

SEQ ID NO: 340784 - RNA, 32 nt, Homo Sapiens
accaggagggaagaucaguggagccuucuuuc

SEQ ID NO: 340785 - RNA, 32 nt, Homo Sapiens
ggguguggccagcccugaaagcuacuuggaca

SEQ ID NO: 340786 - RNA, 32 nt, Homo Sapiens
agcccuucgugcccaacguccacgccgccgag

SEQ ID NO: 340787 - RNA, 32 nt, Homo Sapiens
accagcagcaaccucaucauuguggccgaggc

SEQ ID NO: 340788 - RNA, 32 nt, Homo Sapiens
uaugaaaaugaagcauaugaaguaaaaguuug

SEQ ID NO: 340789 - RNA, 32 nt, Homo Sapiens
ucaacacucccuucccaugacccaggcugggc

SEQ ID NO: 340790 - RNA, 32 nt, Homo Sapiens
auuuccugcucggaaccuuguuuacuaauuuc

SEQ ID NO: 340791 - RNA, 32 nt, Homo Sapiens
acaacuuugucaaauaauguacaggcaaacac

SEQ ID NO: 340792 - RNA, 32 nt, Homo Sapiens
cuuuacucuuuggacuucuccucacgugugcc

SEQ ID NO: 340793 - RNA, 32 nt, Homo Sapiens
cuucagagggugggacaggggagacuugguag

SEQ ID NO: 340794 - RNA, 29 nt, Homo Sapiens
ggcucuuugaugaugaggacgaggaggag

SEQ ID NO: 340795 - RNA, 32 nt, Homo Sapiens
acccccgcgggccagcgccgcgcgccugaucc

SEQ ID NO: 340796 - RNA, 32 nt, Homo Sapiens
uuucucuaucacuaagaucacccauuaguaag

SEQ ID NO: 340797 - RNA, 32 nt, Homo Sapiens
cgucuuggcccagguccugggggcugcugaac

SEQ ID NO: 340798 - RNA, 32 nt, Homo Sapiens
uauggcccugaaaaucgucucccuccccuucu

SEQ ID NO: 340799 - RNA, 32 nt, Homo Sapiens
uugccuuaguucauucguuguuuacuuugcaa

SEQ ID NO: 340800 - RNA, 32 nt, Homo Sapiens
uuuuuucucacggcucugguuaggaagggccu

SEQ ID NO: 340801 - RNA, 32 nt, Homo Sapiens
gagggacaccgggaucgcacuccuguacuggc

SEQ ID NO: 340802 - RNA, 32 nt, Homo Sapiens
uuagccauuuuuuuuuuuuuuacuauuuuuuc

SEQ ID NO: 340803 - RNA, 32 nt, Homo Sapiens
gauaauuuugaaaugaagaugaaaauguauuc

SEQ ID NO: 340804 - RNA, 32 nt, Homo Sapiens
ggcacccaaaguucugguuaucuaugaauaau

SEQ ID NO: 340805 - RNA, 32 nt, Homo Sapiens
acauuuuuguuuucaauauccuccucaugguu

SEQ ID NO: 340806 - RNA, 32 nt, Homo Sapiens
ggagcuaccacguaucuagcuaauauguaugu

SEQ ID NO: 340807 - RNA, 32 nt, Homo Sapiens
ccuauucaugagcauggaauguuuuuccauuu

SEQ ID NO: 340808 - RNA, 32 nt, Homo Sapiens
ugauuauuugaaaagaauuagcuugagaguaa

SEQ ID NO: 340809 - RNA, 32 nt, Homo Sapiens
aacucaaaaaauguacuguaguauggaaaaug

SEQ ID NO: 340810 - RNA, 32 nt, Homo Sapiens
agaguugaaugagguaaaauggcauuagaugg

SEQ ID NO: 340811 - RNA, 32 nt, Homo Sapiens
cuucugcaaaauaacaugaguauauacuugag

SEQ ID NO: 340812 - RNA, 32 nt, Homo Sapiens
ccuugagcauaguaccacggacuccgugggcg

SEQ ID NO: 340813 - RNA, 32 nt, Homo Sapiens
ucuacuaaaauuacaaaaauuagccgggcaug

SEQ ID NO: 340814 - RNA, 32 nt, Homo Sapiens
cauaucuaaaauuaccuccauuugccauuuuu

SEQ ID NO: 340815 - RNA, 32 nt, Homo Sapiens
guuccgcaucgccccgggggccccuacgcgag

SEQ ID NO: 340816 - RNA, 32 nt, Homo Sapiens
uuuguuccagaggagcucucccccuuggauuu

SEQ ID NO: 340817 - RNA, 32 nt, Homo Sapiens
uggcaauuaugaaaaagaaauauuuuagcucu

SEQ ID NO: 340818 - RNA, 32 nt, Homo Sapiens
accuucugccccagcugggccuggugcccugc

SEQ ID NO: 340819 - RNA, 32 nt, Homo Sapiens
ccccagagccauggagagagccagucugaucc

SEQ ID NO: 340820 - RNA, 32 nt, Homo Sapiens
uggacccugaugggguggagggggugauucuc

SEQ ID NO: 340821 - RNA, 32 nt, Homo Sapiens
ucauuauuuuuccacuuuguucuuuaggagau

SEQ ID NO: 340822 - RNA, 32 nt, Homo Sapiens
gcaggaaggaacucaagguggcuggagauggc

SEQ ID NO: 340823 - RNA, 27 nt, Homo Sapiens
cacauccuuuucuucagaccacucucc

SEQ ID NO: 340824 - RNA, 32 nt, Homo Sapiens
ccaggccugccggcccggacccgucccagccu

SEQ ID NO: 340825 - RNA, 32 nt, Homo Sapiens
ggugguggggagggaagcuucuggccaugcuu

SEQ ID NO: 340826 - RNA, 32 nt, Homo Sapiens
acacaugaaaauugauauucucaugggcuuug

SEQ ID NO: 340827 - RNA, 32 nt, Homo Sapiens
ucagcuucuggccacugggaggcgcugcucga

SEQ ID NO: 340828 - RNA, 32 nt, Homo Sapiens
ggugacuucugcugcuggccccgccccugccc

SEQ ID NO: 340829 - RNA, 32 nt, Homo Sapiens
gguguacuuacuuccuuauuuaucuccaaaag

SEQ ID NO: 340830 - RNA, 32 nt, Homo Sapiens
ugcaucacccucagccuaagggagugggaagg

SEQ ID NO: 340831 - RNA, 32 nt, Homo Sapiens
uucccuuuuaaaaaauauuagagcaugcauuc

SEQ ID NO: 340832 - RNA, 32 nt, Homo Sapiens
uucucuauauauaaauaugugaaauauuauga

SEQ ID NO: 340833 - RNA, 32 nt, Homo Sapiens
ugaaggggucaauguauuaaaccugugauuag

SEQ ID NO: 340834 - RNA, 32 nt, Homo Sapiens
uacauguaauauguauuucuagaagagaauaa

SEQ ID NO: 340835 - RNA, 32 nt, Homo Sapiens
ugucuugccucagauuugauuuaaucuuaauu

SEQ ID NO: 340836 - RNA, 32 nt, Homo Sapiens
ggaaugaugcaacugguuuuacuagugugcaa

SEQ ID NO: 340837 - RNA, 32 nt, Homo Sapiens
ccggcaggaaaggguuccuucagcccaacaua

SEQ ID NO: 340838 - RNA, 31 nt, Homo Sapiens
ucacgagguguaauuuuuaauuugaucagaa

SEQ ID NO: 340839 - RNA, 32 nt, Homo Sapiens
aggcucuuuuuguaguugaauugucuucuaaa

SEQ ID NO: 340840 - RNA, 32 nt, Homo Sapiens
gucucccgcgcgcaccucagccgccuccuagc

SEQ ID NO: 340841 - RNA, 32 nt, Homo Sapiens
auuauaaaagauacauggaaggaaguggaacc

SEQ ID NO: 340842 - RNA, 32 nt, Homo Sapiens
agcuucccacugcagcagcaccagucugggga

SEQ ID NO: 340843 - RNA, 32 nt, Homo Sapiens
cagauuacugucugcugcuggcucugcccugu

SEQ ID NO: 340844 - RNA, 32 nt, Homo Sapiens
aacugaacugagugugucagaagugcugguua

SEQ ID NO: 340845 - RNA, 32 nt, Homo Sapiens
ccagggcccggggcgcugucagacggggcagc

SEQ ID NO: 340846 - RNA, 32 nt, Homo Sapiens
auagugcaaagcacccaauaccuguggaggau

SEQ ID NO: 340847 - RNA, 32 nt, Homo Sapiens
cguccacugcgcgcuucgcucuccgccgcccg

SEQ ID NO: 340848 - RNA, 32 nt, Homo Sapiens
aagaauaaaugaugaagaaauucuccuuguag

SEQ ID NO: 340849 - RNA, 32 nt, Homo Sapiens
cugcacuaacagaggaaagaaacaaguacaug

SEQ ID NO: 340850 - RNA, 32 nt, Homo Sapiens
ugccaggcagcgugcuggccccugcggcugcg

SEQ ID NO: 340851 - RNA, 32 nt, Homo Sapiens
guuuaguuucuuuucucccaaauuguuuaauu

SEQ ID NO: 340852 - RNA, 32 nt, Homo Sapiens
uggauuugccagcagucugagcuucuaccgag

SEQ ID NO: 340853 - RNA, 30 nt, Homo Sapiens
ugccgucuggacuuccaccuccagugccag

SEQ ID NO: 340854 - RNA, 32 nt, Homo Sapiens
cguuuggagaugggaggcucagggcugaaauu

SEQ ID NO: 340855 - RNA, 32 nt, Homo Sapiens
aauagauuagucauauaucuuuuagauuugug

SEQ ID NO: 340856 - RNA, 32 nt, Homo Sapiens
ccaaagucacacagcuaagaagcagugauggg

SEQ ID NO: 340857 - RNA, 32 nt, Homo Sapiens
gucugugagccucaaacucuaccuguucucug

SEQ ID NO: 340858 - RNA, 32 nt, Homo Sapiens
cguuccgggccgcgacccugacccugcagcgu

SEQ ID NO: 340859 - RNA, 32 nt, Homo Sapiens
guacccaugaugcacagcgcuacguccgccac

SEQ ID NO: 340860 - RNA, 32 nt, Homo Sapiens
caugccuggucuuuccucuguuucuccuucug

SEQ ID NO: 340861 - RNA, 32 nt, Homo Sapiens
cuuauuaucuggaacauagaaauauaaaaggu

SEQ ID NO: 340862 - RNA, 32 nt, Homo Sapiens
gggcagcugugcuugucuuugugugcaaagaa

SEQ ID NO: 340863 - RNA, 32 nt, Homo Sapiens
gauaaauuguauauuucuuaaaauagaaauau

SEQ ID NO: 340864 - RNA, 32 nt, Homo Sapiens
ccggagcagaagcagcagcagcagcagcagcc

SEQ ID NO: 340865 - RNA, 32 nt, Homo Sapiens
uaauaaaugacguccacccagccuuagucccu

SEQ ID NO: 340866 - RNA, 32 nt, Homo Sapiens
uaggccgaggggugggggucgcgccgggggcc

SEQ ID NO: 340867 - RNA, 32 nt, Homo Sapiens
agagccaagcaucuucccugggaagucuuucu

SEQ ID NO: 340868 - RNA, 32 nt, Homo Sapiens
uuuucaagaaaagagaaaugcaggaagcucag

SEQ ID NO: 340869 - RNA, 32 nt, Homo Sapiens
cgucucuggagacagauuaagugguggcaaga

SEQ ID NO: 340870 - RNA, 32 nt, Homo Sapiens
cucuccccaacaaccuagaugugaaaacagaa

SEQ ID NO: 340871 - RNA, 32 nt, Homo Sapiens
uggaggccugagugcuggcccucgugucucuu

SEQ ID NO: 340872 - RNA, 32 nt, Homo Sapiens
aguaaaaugcaaaagaccauagaauuuguauu

SEQ ID NO: 340873 - RNA, 32 nt, Homo Sapiens
uccauauuuuugggggaugacauucagugaau

SEQ ID NO: 340874 - RNA, 32 nt, Homo Sapiens
augaaaauauuuuauguuuucucaucacuuua

SEQ ID NO: 340875 - RNA, 32 nt, Homo Sapiens
auacaauaaguuuuuuuuuuuaaggaugauug

SEQ ID NO: 340876 - RNA, 31 nt, Homo Sapiens
aagcaugauugugguaauucgagccaucugg

SEQ ID NO: 340877 - RNA, 32 nt, Homo Sapiens
gucgcuggagcuuugccucucuaggccggcag

SEQ ID NO: 340878 - RNA, 32 nt, Homo Sapiens
uaaauaucuugacuguuucucccggccaguga

SEQ ID NO: 340879 - RNA, 32 nt, Homo Sapiens
ggaccuauacccauaauagaauuauggcacuc

SEQ ID NO: 340880 - RNA, 32 nt, Homo Sapiens
caaguuaccaauuuuuuaaaauuuauaggcaa

SEQ ID NO: 340881 - RNA, 32 nt, Homo Sapiens
gcucggaauauguuuggccuuuugcauguuuc

SEQ ID NO: 340882 - RNA, 32 nt, Homo Sapiens
gauauuuaacauuuuccaauucugcuuaagag

SEQ ID NO: 340883 - RNA, 32 nt, Homo Sapiens
aguacauugccagcucuuggucacugagugau

SEQ ID NO: 340884 - RNA, 32 nt, Homo Sapiens
gaacuucagucuuuuuacuguguuuuugcagu

SEQ ID NO: 340885 - RNA, 32 nt, Homo Sapiens
ucagcucaggaccgcgcgccguggucugaggu

SEQ ID NO: 340886 - RNA, 32 nt, Homo Sapiens
uccauccagguagacacagacacacacagaga

SEQ ID NO: 340887 - RNA, 32 nt, Homo Sapiens
uaauuagcugggugugguggcucaagccugua

SEQ ID NO: 340888 - RNA, 32 nt, Homo Sapiens
cauuauguuauuggaauuuucuuucauacauu

SEQ ID NO: 340889 - RNA, 32 nt, Homo Sapiens
gagcaaguggauggaaaugcugggagaauggg

SEQ ID NO: 340890 - RNA, 32 nt, Homo Sapiens
ggcgaggcugugcggcagggcgcacgggaccu

SEQ ID NO: 340891 - RNA, 32 nt, Homo Sapiens
aaccuagaaaacuacauagguuauuuugaucu

SEQ ID NO: 340892 - RNA, 32 nt, Homo Sapiens
guacuguguuucgcauuaagcacacacaucug

SEQ ID NO: 340893 - RNA, 32 nt, Homo Sapiens
ccuggcaucuucugcccuguucaucuacggau

SEQ ID NO: 340894 - RNA, 32 nt, Homo Sapiens
caaauauuuuuggcauaucuguugcuacucug

SEQ ID NO: 340895 - RNA, 32 nt, Homo Sapiens
augagucugcaccuccaggcaggcucugugca

SEQ ID NO: 340896 - RNA, 32 nt, Homo Sapiens
aauaaauuugaaaugauggagaaauuucagaa

SEQ ID NO: 340897 - RNA, 32 nt, Homo Sapiens
aaaaaauucuaccaucuuucuuuaucaucugg

SEQ ID NO: 340898 - RNA, 32 nt, Homo Sapiens
cagguuauggaaagaaucauggcauuacugag

SEQ ID NO: 340899 - RNA, 32 nt, Homo Sapiens
cggcugaagaacuuacucagcuggggcaagca

SEQ ID NO: 340900 - RNA, 32 nt, Homo Sapiens
ggccuucaucagcuccuccugcugcuuccgcu

SEQ ID NO: 340901 - RNA, 32 nt, Homo Sapiens
gccaagcccugccuguggccaagcccugagug

SEQ ID NO: 340902 - RNA, 32 nt, Homo Sapiens
uuaagguuacaaacagaaaagugucuuaaugc

SEQ ID NO: 340903 - RNA, 32 nt, Homo Sapiens
uaggggcugagaagcuggaguccugggcaagg

SEQ ID NO: 340904 - RNA, 32 nt, Homo Sapiens
aucuuagaaaaaacauagauagugcuaguaau

SEQ ID NO: 340905 - RNA, 32 nt, Homo Sapiens
gcccaagaacagaaagaaccuugcugggguug

SEQ ID NO: 340906 - RNA, 32 nt, Homo Sapiens
gaaagcucaugacauuuccccuaugauuucac

SEQ ID NO: 340907 - RNA, 32 nt, Homo Sapiens
guaggaggccccagccaugccuucaaccuggc

SEQ ID NO: 340908 - RNA, 32 nt, Homo Sapiens
uucaaauauuugaggaaaggugucgccucuuu

SEQ ID NO: 340909 - RNA, 32 nt, Homo Sapiens
gugguagaugagaaccucagcuggcaucucaa

SEQ ID NO: 340910 - RNA, 32 nt, Homo Sapiens
ucagauccaaaauaauuucauaccccauuuuu

SEQ ID NO: 340911 - RNA, 32 nt, Homo Sapiens
uaggccuaguaaccuggcauguuugauauaug

SEQ ID NO: 340912 - RNA, 32 nt, Homo Sapiens
gaggcggcacugugggggcugccggcagccgg

SEQ ID NO: 340913 - RNA, 32 nt, Homo Sapiens
aaggaaaagagaugauaaauucucuuacgguu

SEQ ID NO: 340914 - RNA, 32 nt, Homo Sapiens
auauagagagcaaaaacuggcaggaucguaag

SEQ ID NO: 340915 - RNA, 32 nt, Homo Sapiens
aagacuuaaauucuucguccacagcaagugaa

SEQ ID NO: 340916 - RNA, 32 nt, Homo Sapiens
gauccugaacuggaagaaaaugucuauccagg

SEQ ID NO: 340917 - RNA, 32 nt, Homo Sapiens
uccagccgcccggcagcucugaggauggagag

SEQ ID NO: 340918 - RNA, 32 nt, Homo Sapiens
uggaaccagacugcagaauggaggggugggaa

SEQ ID NO: 340919 - RNA, 32 nt, Homo Sapiens
aagacacgaaaacacuuccuccagggaccuuc

SEQ ID NO: 340920 - RNA, 32 nt, Homo Sapiens
uuuacauguuuauuugagucagaccacaucag

SEQ ID NO: 340921 - RNA, 32 nt, Homo Sapiens
ccaaaaugggguggaaggauauuguccuuuug

SEQ ID NO: 340922 - RNA, 32 nt, Homo Sapiens
cccacggaauggggaaagugggaacccuggag

SEQ ID NO: 340923 - RNA, 32 nt, Homo Sapiens
guccugucucugcucucacaguucuuuuucuu

SEQ ID NO: 340924 - RNA, 32 nt, Homo Sapiens
ugggguccacccccauuccugcucaagcaugg

SEQ ID NO: 340925 - RNA, 30 nt, Homo Sapiens
cagggggcgcugcgcgcggccuggggcaac

SEQ ID NO: 340926 - RNA, 32 nt, Homo Sapiens
cugugagagaaagacuguacuccauaacugac

SEQ ID NO: 340927 - RNA, 32 nt, Homo Sapiens
guggccugccccuccuccagcccuaagugccu

SEQ ID NO: 340928 - RNA, 32 nt, Homo Sapiens
acguugaagaagaaagaagagaaagguauagc

SEQ ID NO: 340929 - RNA, 32 nt, Homo Sapiens
ugaaaggaagcagugcaucaagcacaugaucu

SEQ ID NO: 340930 - RNA, 32 nt, Homo Sapiens
acaacuucgccggcugcuucggacgcccggag

SEQ ID NO: 340931 - RNA, 32 nt, Homo Sapiens
aaaguugugaaugcgacuuuggaugagauuaa

SEQ ID NO: 340932 - RNA, 29 nt, Homo Sapiens
uaccacaggaagguggccugccaagaguc

SEQ ID NO: 340933 - RNA, 32 nt, Homo Sapiens
gcaaugggcaacuggggugggcacagggcuua

SEQ ID NO: 340934 - RNA, 32 nt, Homo Sapiens
cgggagcccgcggcgagcguagcgcaaguccg

SEQ ID NO: 340935 - RNA, 32 nt, Homo Sapiens
cagucccaugggaggugggucuggccaaugga

SEQ ID NO: 340936 - RNA, 32 nt, Homo Sapiens
caaguagacaacauggccccagguuccaggua

SEQ ID NO: 340937 - RNA, 32 nt, Homo Sapiens
ucggacugggcggccgggagggagggcgcccc

SEQ ID NO: 340938 - RNA, 32 nt, Homo Sapiens
ccccgugcauccaggcggccaagcacaaacug

SEQ ID NO: 340939 - RNA, 32 nt, Homo Sapiens
gcuuguucaucggccuggcugggacaggggcu

SEQ ID NO: 340940 - RNA, 32 nt, Homo Sapiens
aaacccgaaaauaaaagacguucauuauguau

SEQ ID NO: 340941 - RNA, 32 nt, Homo Sapiens
gaagucuucuauuuauuuauuuauuuauuuau

SEQ ID NO: 340942 - RNA, 32 nt, Homo Sapiens
cuuuaaaguguggaagcagaaaggaccugcau

SEQ ID NO: 340943 - RNA, 32 nt, Homo Sapiens
auugagagcugggcaaacaggucccacugggg

SEQ ID NO: 340944 - RNA, 32 nt, Homo Sapiens
auagaauuuuuugcuuuuuuuguuacucccga

SEQ ID NO: 340945 - RNA, 32 nt, Homo Sapiens
ccgauaagggaggcggagugugcggagaggag

SEQ ID NO: 340946 - RNA, 32 nt, Homo Sapiens
ugaaaucaauuucaauaaccuuaaacaauuga

SEQ ID NO: 340947 - RNA, 32 nt, Homo Sapiens
caccgcaguuugccuuccuuccuggggacacu

SEQ ID NO: 340948 - RNA, 32 nt, Homo Sapiens
aacucugcccacccuccuguaccgucgacaag

SEQ ID NO: 340949 - RNA, 32 nt, Homo Sapiens
guuuuacagccugaauuuggagggauaacgau

SEQ ID NO: 340950 - RNA, 32 nt, Homo Sapiens
uuuauugagauauucacauaucauauaauuca

SEQ ID NO: 340951 - RNA, 32 nt, Homo Sapiens
cggcgccgucccggaguuccccggcccagacc

SEQ ID NO: 340952 - RNA, 32 nt, Homo Sapiens
ucaaucuguguucagguccaggguuacauaau

SEQ ID NO: 340953 - RNA, 32 nt, Homo Sapiens
cauccucaccauucccucccccaugcugcauc

SEQ ID NO: 340954 - RNA, 32 nt, Homo Sapiens
cauuuuaguuuugcacuugguuuucuauaaag

SEQ ID NO: 340955 - RNA, 32 nt, Homo Sapiens
auauauuucuaaaaauacauguacaugggcca

SEQ ID NO: 340956 - RNA, 32 nt, Homo Sapiens
auaaccaaaaagauuaaacaaaaaauacuaua

SEQ ID NO: 340957 - RNA, 32 nt, Homo Sapiens
cuugugaacaaaauaaaauacaaauuuaccuu

SEQ ID NO: 340958 - RNA, 32 nt, Homo Sapiens
ucuaauuuugcagaucuuuacauuuuuauugc

SEQ ID NO: 340959 - RNA, 32 nt, Homo Sapiens
gaccucaagugauccgcccaccuuggccuccc

SEQ ID NO: 340960 - RNA, 32 nt, Homo Sapiens
guacaaauauccuggugcgaugaugggccugg

SEQ ID NO: 340961 - RNA, 32 nt, Homo Sapiens
auacuuuaagcacaacuagaaaauuguaaaaa

SEQ ID NO: 340962 - RNA, 32 nt, Homo Sapiens
uugcacuaagcaaucauagccaucgaucuggg

SEQ ID NO: 340963 - RNA, 32 nt, Homo Sapiens
ccuaaaagagggccagaaggccugcugagggc

SEQ ID NO: 340964 - RNA, 32 nt, Homo Sapiens
caggcagugaugaacauuaugaacacagaaca

SEQ ID NO: 340965 - RNA, 32 nt, Homo Sapiens
cucagcguggagggguaggggcugggaacagu

SEQ ID NO: 340966 - RNA, 32 nt, Homo Sapiens
uccaguuuaaucugugauacagggcucuguuu

SEQ ID NO: 340967 - RNA, 32 nt, Homo Sapiens
uuuguuguuuuaaguugcucaguuuuggucua

SEQ ID NO: 340968 - RNA, 32 nt, Homo Sapiens
ccgccaccucugagcagccggcugggagcgag

SEQ ID NO: 340969 - RNA, 32 nt, Homo Sapiens
aaaacgucuaaugucggggacguagggacgcu

SEQ ID NO: 340970 - RNA, 32 nt, Homo Sapiens
cucuugaggguggacagggagaaagaugaugg

SEQ ID NO: 340971 - RNA, 32 nt, Homo Sapiens
gagccgcccccuccccggccagcauggcaucu

SEQ ID NO: 340972 - RNA, 32 nt, Homo Sapiens
cgaacccaggggugggggguggaggcggcucc

SEQ ID NO: 340973 - RNA, 32 nt, Homo Sapiens
guguauccuuuuuccucuggcucuacacuuuc

SEQ ID NO: 340974 - RNA, 32 nt, Homo Sapiens
gacaggucaccguguguaaaucuuucccaaua

SEQ ID NO: 340975 - RNA, 32 nt, Homo Sapiens
guaauugacacuauauauuucuuaauaaaaua

SEQ ID NO: 340976 - RNA, 32 nt, Homo Sapiens
uguugcaugcuucaauaccguguacugccuga

SEQ ID NO: 340977 - RNA, 32 nt, Homo Sapiens
cccccggcgacuuauaaauauuugcguauuca

SEQ ID NO: 340978 - RNA, 32 nt, Homo Sapiens
gccucgcgcugauucucacgggcccggcugcc

SEQ ID NO: 340979 - RNA, 32 nt, Homo Sapiens
aagaguugauaaagauuaccugugcagugcag

SEQ ID NO: 340980 - RNA, 32 nt, Homo Sapiens
aaggcaagccccauauaaugaagucucagggu

SEQ ID NO: 340981 - RNA, 32 nt, Homo Sapiens
acagagucuauuauacuagauaaaauguuguu

SEQ ID NO: 340982 - RNA, 32 nt, Homo Sapiens
ggagggaggucuucgugcaguaggccaguggg

SEQ ID NO: 340983 - RNA, 32 nt, Homo Sapiens
uuucggcggccgcgggaugccccugcgcugac

SEQ ID NO: 340984 - RNA, 32 nt, Homo Sapiens
gaaaggguguugcgcugucacccaggcuggag

SEQ ID NO: 340985 - RNA, 32 nt, Homo Sapiens
cugccuauggaaaugagccacccccacugcag

SEQ ID NO: 340986 - RNA, 32 nt, Homo Sapiens
uuaaaaaggugagcuuauauauuguuuauuaa

SEQ ID NO: 340987 - RNA, 32 nt, Homo Sapiens
uuauguuguguauauagcaaagaaauuaucuu

SEQ ID NO: 340988 - RNA, 32 nt, Homo Sapiens
guugaggaaggaagucaaaacagucaguaaug

SEQ ID NO: 340989 - RNA, 32 nt, Homo Sapiens
augcguucuuugagcugggccgauagauccag

SEQ ID NO: 340990 - RNA, 32 nt, Homo Sapiens
cugaauggucugaagaaggaaggccugagccc

SEQ ID NO: 340991 - RNA, 32 nt, Homo Sapiens
uaaacagcaugcuauauuguaauuguauuucu

SEQ ID NO: 340992 - RNA, 32 nt, Homo Sapiens
uuguuuuuaagugugaaugcaagugauuaaug

SEQ ID NO: 340993 - RNA, 32 nt, Homo Sapiens
caagcgucccggagaaagccaagcccucgggg

SEQ ID NO: 340994 - RNA, 32 nt, Homo Sapiens
agggcuaaagucacguuuuuccuccuuuaaga

SEQ ID NO: 340995 - RNA, 30 nt, Homo Sapiens
gcucggggaaggcgcgcucccgcgucccgc

SEQ ID NO: 340996 - RNA, 32 nt, Homo Sapiens
gcugaguuaugaagcuggaauugguucuagac

SEQ ID NO: 340997 - RNA, 32 nt, Homo Sapiens
caacgggccuacuuuagcuaaaacagaaacgu

SEQ ID NO: 340998 - RNA, 32 nt, Homo Sapiens
accauacccaaccccaggaaggaaggccuugg

SEQ ID NO: 340999 - RNA, 32 nt, Homo Sapiens
uaaagagauacgugccugaggacguugugugu

SEQ ID NO: 341000 - RNA, 32 nt, Homo Sapiens
aggcaauuucuuuuuaauaugcccgaaugaau

SEQ ID NO: 341001 - RNA, 32 nt, Homo Sapiens
agcaacugugcccuggagggcuccacauggcc

SEQ ID NO: 341002 - RNA, 32 nt, Homo Sapiens
cagauccgggccgcggcuguggggagggcgac

SEQ ID NO: 341003 - RNA, 32 nt, Homo Sapiens
auguuuuuaugccauuaaaugucugauuccaa

SEQ ID NO: 341004 - RNA, 32 nt, Homo Sapiens
auauacuguauauauaugcaacauuuuauauu

SEQ ID NO: 341005 - RNA, 32 nt, Homo Sapiens
acucucacuguaaaaacagcuguagguauaau

SEQ ID NO: 341006 - RNA, 32 nt, Homo Sapiens
ugaaccccuguauuuucuuuucaaaacccccu

SEQ ID NO: 341007 - RNA, 32 nt, Homo Sapiens
ugccuggcagaugguaagugcucgacacacau

SEQ ID NO: 341008 - RNA, 32 nt, Homo Sapiens
aauucagauagcucagggacugcuaacagaga

SEQ ID NO: 341009 - RNA, 32 nt, Homo Sapiens
ugauauugauucaucugcaccugacaucaacu

SEQ ID NO: 341010 - RNA, 32 nt, Homo Sapiens
agagagcgucccagcuucuuugaaagagggca

SEQ ID NO: 341011 - RNA, 32 nt, Homo Sapiens
agauacgcaugucuucuguucuuuucccguau

SEQ ID NO: 341012 - RNA, 32 nt, Homo Sapiens
ucuuagcucaguaucaucucccuucauguaag

SEQ ID NO: 341013 - RNA, 32 nt, Homo Sapiens
agagcguggaccgaggaggucuuugugcccug

SEQ ID NO: 341014 - RNA, 32 nt, Homo Sapiens
aaauuuuaaaaauaaauaaauaauaaaaggaa

SEQ ID NO: 341015 - RNA, 32 nt, Homo Sapiens
agugugccgggaugauguggacaggaggaagg

SEQ ID NO: 341016 - RNA, 32 nt, Homo Sapiens
ucuuagaggucuuugccaagucugagagugua

SEQ ID NO: 341017 - RNA, 32 nt, Homo Sapiens
acucugcuugcuugcuggccggccugccugcc

SEQ ID NO: 341018 - RNA, 32 nt, Homo Sapiens
aggcagcccagaaaccccaggcguggagauug

SEQ ID NO: 341019 - RNA, 32 nt, Homo Sapiens
ccgcuuuguccuaggaaacgggcugcgcguuu

SEQ ID NO: 341020 - RNA, 32 nt, Homo Sapiens
gauacaauuggaauuagcuuuuguaaagcuuu

SEQ ID NO: 341021 - RNA, 32 nt, Homo Sapiens
cugguuuuggcccagcucgaagagccugacac

SEQ ID NO: 341022 - RNA, 30 nt, Homo Sapiens
aaaauuuuggacugcuuuucgguuuuaaca

SEQ ID NO: 341023 - RNA, 32 nt, Homo Sapiens
ccccaggcgggaagaaagagggaguucuggcc

SEQ ID NO: 341024 - RNA, 32 nt, Homo Sapiens
caagcugcuuccugccggcaccucugaucaag

SEQ ID NO: 341025 - RNA, 32 nt, Homo Sapiens
aaaaaguauugaaauguuugcauaaagugucu

SEQ ID NO: 341026 - RNA, 32 nt, Homo Sapiens
uacacacacacacacacacacacacacacacu

SEQ ID NO: 341027 - RNA, 32 nt, Homo Sapiens
gcuuggaaaaggaguagggguauagcuugggu

SEQ ID NO: 341028 - RNA, 32 nt, Homo Sapiens
ccuugagcauuaggccaguucuccucuucucu

SEQ ID NO: 341029 - RNA, 32 nt, Homo Sapiens
gaacuccuuuugggauauacaugaugcagaaa

SEQ ID NO: 341030 - RNA, 32 nt, Homo Sapiens
cuguugcuggcaggcgggguggagcggagcug

SEQ ID NO: 341031 - RNA, 32 nt, Homo Sapiens
agagacacaacacacauguguagcugcuucug

SEQ ID NO: 341032 - RNA, 32 nt, Homo Sapiens
gauuauggguuauaaucagggaaacuaauugu

SEQ ID NO: 341033 - RNA, 32 nt, Homo Sapiens
aaaaauaaaacaaaauaaaauaaagcacaaug

SEQ ID NO: 341034 - RNA, 32 nt, Homo Sapiens
ggccuccgcccauuggugcucaugcagacucu

SEQ ID NO: 341035 - RNA, 32 nt, Homo Sapiens
auucucgagagacuggggggaguuaccaacuu

SEQ ID NO: 341036 - RNA, 30 nt, Homo Sapiens
ggagaggccguuccugccuggagagaagcu

SEQ ID NO: 341037 - RNA, 32 nt, Homo Sapiens
uuaaaaagugcaugaacuguagugcuuuaaac

SEQ ID NO: 341038 - RNA, 32 nt, Homo Sapiens
ucuguuacuguaaaauaauagcuauaauguau

SEQ ID NO: 341039 - RNA, 32 nt, Homo Sapiens
aaaaucacaaugagauuccaguuuacaaucac

SEQ ID NO: 341040 - RNA, 32 nt, Homo Sapiens
cggugcguuccacugcucuggggccggcgccg

SEQ ID NO: 341041 - RNA, 32 nt, Homo Sapiens
ggacaggaaugggaggggggagccccagaaau

SEQ ID NO: 341042 - RNA, 32 nt, Homo Sapiens
uauaggggaaugaaagcgucuguuguuaccca

SEQ ID NO: 341043 - RNA, 32 nt, Homo Sapiens
uguuucucucucccccuuucucucuucucuug

SEQ ID NO: 341044 - RNA, 32 nt, Homo Sapiens
aauaaauagguuacuuaccaucauauguucau

SEQ ID NO: 341045 - RNA, 32 nt, Homo Sapiens
gcuucuccggugccucccgacccgcaucgccg

SEQ ID NO: 341046 - RNA, 30 nt, Homo Sapiens
ccugggagcgcgcagcgcucuaggagccga

SEQ ID NO: 341047 - RNA, 32 nt, Homo Sapiens
uauaaauuuucuaauaagaaaucccugcuucu

SEQ ID NO: 341048 - RNA, 32 nt, Homo Sapiens
ugucugcagugcgaccccuuggugcuggaggc

SEQ ID NO: 341049 - RNA, 32 nt, Homo Sapiens
ccccccacccgcggccggcgcucuccuccucc

SEQ ID NO: 341050 - RNA, 32 nt, Homo Sapiens
augugauacuugguauuuuuuaagauaaacuu

SEQ ID NO: 341051 - RNA, 30 nt, Homo Sapiens
caaccugucugugccccagggcagcuuuga

SEQ ID NO: 341052 - RNA, 32 nt, Homo Sapiens
uaaccucucagugccuguucccucguuugcaa

SEQ ID NO: 341053 - RNA, 32 nt, Homo Sapiens
aaagguccuugacuugaugaauuuggucugcc

SEQ ID NO: 341054 - RNA, 32 nt, Homo Sapiens
uuuuaaagccccauacacagaaguauacgaaa

SEQ ID NO: 341055 - RNA, 32 nt, Homo Sapiens
acgucucuauguugcgaacacucuguauauuu

SEQ ID NO: 341056 - RNA, 32 nt, Homo Sapiens
guagaugggcucccggcccgggaggcggcggu

SEQ ID NO: 341057 - RNA, 32 nt, Homo Sapiens
ucaaaacaaaaauauuuucuaacuuguaaguu

SEQ ID NO: 341058 - RNA, 32 nt, Homo Sapiens
ggaagcagaagcggcguuugcggccgcugcag

SEQ ID NO: 341059 - RNA, 32 nt, Homo Sapiens
acuuguuggccuacagagguguggcaagcaga

SEQ ID NO: 341060 - RNA, 32 nt, Homo Sapiens
uguuaggccuucuuauuguccuccuccuccug

SEQ ID NO: 341061 - RNA, 32 nt, Homo Sapiens
accagugacuguucaaaccaaccauacuuuuu

SEQ ID NO: 341062 - RNA, 32 nt, Homo Sapiens
uaucaucgugcaucaucauguaucaugcaugu

SEQ ID NO: 341063 - RNA, 32 nt, Homo Sapiens
aaaacuacagaaaagagauuuagaguauaaca

SEQ ID NO: 341064 - RNA, 31 nt, Homo Sapiens
aaaaaagauuugacuuccgaauagaauguuu

SEQ ID NO: 341065 - RNA, 32 nt, Homo Sapiens
uagaacccacccacagcagcccucgggggugu

SEQ ID NO: 341066 - RNA, 32 nt, Homo Sapiens
ccugccagcuuaacaaaacauaaaacagcaau

SEQ ID NO: 341067 - RNA, 32 nt, Homo Sapiens
uucaauguagacugccauuauguguggucuuc

SEQ ID NO: 341068 - RNA, 32 nt, Homo Sapiens
gaggaagccagguggacccagccuuggaagag

SEQ ID NO: 341069 - RNA, 32 nt, Homo Sapiens
cugcaggggcgggucacucaccccccuguuuu

SEQ ID NO: 341070 - RNA, 32 nt, Homo Sapiens
gguggagcaaaggaaaauacaugaaauugaga

SEQ ID NO: 341071 - RNA, 32 nt, Homo Sapiens
uccucucggaagcugcagccaugauggaaguu

SEQ ID NO: 341072 - RNA, 32 nt, Homo Sapiens
cacacagccauauaguuuuuccuggaggguuu

SEQ ID NO: 341073 - RNA, 32 nt, Homo Sapiens
gaagaaggagcaaacuaacaaccaagaauugg

SEQ ID NO: 341074 - RNA, 32 nt, Homo Sapiens
ucuguguauuuuaauaaugaucuuaggaugga

SEQ ID NO: 341075 - RNA, 27 nt, Homo Sapiens
ccgugcuccuucuucugccgccacgcc

SEQ ID NO: 341076 - RNA, 32 nt, Homo Sapiens
gcuggguccgccccggccucagaguugcgcaa

SEQ ID NO: 341077 - RNA, 31 nt, Homo Sapiens
ggacugaacauauaacgcuggucagcucuuu

SEQ ID NO: 341078 - RNA, 32 nt, Homo Sapiens
aaaugucccugacacccuccccagcccccaca

SEQ ID NO: 341079 - RNA, 32 nt, Homo Sapiens
gcguggggacacacucuucaaggacugcacug

SEQ ID NO: 341080 - RNA, 32 nt, Homo Sapiens
agaugcuuuuuauuaguacugauaaaacaaac

SEQ ID NO: 341081 - RNA, 32 nt, Homo Sapiens
cgcccugacaccuggcuggccagccgcgugcc

SEQ ID NO: 341082 - RNA, 32 nt, Homo Sapiens
gaaccuuccuuccugcuugaguucccagaugg

SEQ ID NO: 341083 - RNA, 32 nt, Homo Sapiens
aaaauaaaaaucagaggccuaucuccacuuua

SEQ ID NO: 341084 - RNA, 32 nt, Homo Sapiens
uccccuuuuaucagcuccauuugaguuaaaca

SEQ ID NO: 341085 - RNA, 32 nt, Homo Sapiens
aagcacuuuguaguucucuauugccaacaauu

SEQ ID NO: 341086 - RNA, 32 nt, Homo Sapiens
gcacggagacccugccagcagcucccucccgu

SEQ ID NO: 341087 - RNA, 32 nt, Homo Sapiens
guauuuaaugguuuuuguuuuuguuuuuguuu

SEQ ID NO: 341088 - RNA, 32 nt, Homo Sapiens
cguugccacugacagccgcgggcgcucccauc

SEQ ID NO: 341089 - RNA, 32 nt, Homo Sapiens
uuuuguagacauuuuucuuaauauuuuuaaca

SEQ ID NO: 341090 - RNA, 32 nt, Homo Sapiens
aggcccagcagcaggccaaggcugugcucaag

SEQ ID NO: 341091 - RNA, 30 nt, Homo Sapiens
aggaggagaagaagcaugagauacaucugg

SEQ ID NO: 341092 - RNA, 32 nt, Homo Sapiens
aucuccagcuuuuguuagaaucuugcauguug

SEQ ID NO: 341093 - RNA, 32 nt, Homo Sapiens
aaaguugcuaaguguaacuguaucauacuuuu

SEQ ID NO: 341094 - RNA, 30 nt, Homo Sapiens
ccauugucuccugugccagaagcuuuguag

SEQ ID NO: 341095 - RNA, 32 nt, Homo Sapiens
agaauaagggaccccuggagagucccuaccaa

SEQ ID NO: 341096 - RNA, 32 nt, Homo Sapiens
guggcuggacauuuuucguggccacagcgagu

SEQ ID NO: 341097 - RNA, 32 nt, Homo Sapiens
cugcaccaguaagcauuccacuuugugaaugg

SEQ ID NO: 341098 - RNA, 32 nt, Homo Sapiens
aguggacaaagugaaucagagaagagcagagg

SEQ ID NO: 341099 - RNA, 32 nt, Homo Sapiens
ggugggugcuggcugaccccccggggcagcag

SEQ ID NO: 341100 - RNA, 32 nt, Homo Sapiens
ggcaccugccacugugcagagccuggggcugc

SEQ ID NO: 341101 - RNA, 31 nt, Homo Sapiens
aggcccugaaacacgucuaccugucugggau

SEQ ID NO: 341102 - RNA, 32 nt, Homo Sapiens
ugaauucuuggccccaggugaucugcccgccu

SEQ ID NO: 341103 - RNA, 32 nt, Homo Sapiens
ucccaggcccuccagauggcgccccgcaggug

SEQ ID NO: 341104 - RNA, 32 nt, Homo Sapiens
gcccagcagaacuuuaaccaguugugcaucuu

SEQ ID NO: 341105 - RNA, 32 nt, Homo Sapiens
cugcaguuccaccacacccuccagcccccucc

SEQ ID NO: 341106 - RNA, 32 nt, Homo Sapiens
uuggguucugccugccagcugcacugaugcug

SEQ ID NO: 341107 - RNA, 32 nt, Homo Sapiens
cagcccggccccaggcccaggucauggugcuu

SEQ ID NO: 341108 - RNA, 32 nt, Homo Sapiens
auucugaacuguauccauauuuuaaggaagga

SEQ ID NO: 341109 - RNA, 32 nt, Homo Sapiens
ggcagaaacuaggagaaaccacaggaggaaac

SEQ ID NO: 341110 - RNA, 32 nt, Homo Sapiens
guuacugaaaaauuauuuuugggauaagagaa

SEQ ID NO: 341111 - RNA, 32 nt, Homo Sapiens
cugcggccgucggugcugcugcuccugcagcu

SEQ ID NO: 341112 - RNA, 32 nt, Homo Sapiens
guguggacuuugagucagauagacuuggguuc

SEQ ID NO: 341113 - RNA, 29 nt, Homo Sapiens
uucuugggccucugggcacagagccaaug

SEQ ID NO: 341114 - RNA, 32 nt, Homo Sapiens
auggcuguacauauuuuuuucuuucuucagag

SEQ ID NO: 341115 - RNA, 32 nt, Homo Sapiens
auuuuugcuccaacugaggaaacuacagggga

SEQ ID NO: 341116 - RNA, 32 nt, Homo Sapiens
cacuacaaaaauacaauuacucaccaaaaagc

SEQ ID NO: 341117 - RNA, 32 nt, Homo Sapiens
gucgaugccggcgucugagcugcgcagugggg

SEQ ID NO: 341118 - RNA, 32 nt, Homo Sapiens
cccucccgcuccccgaugguggcguggacaug

SEQ ID NO: 341119 - RNA, 32 nt, Homo Sapiens
agucccggcuccccggccgccuccacccgggg

SEQ ID NO: 341120 - RNA, 32 nt, Homo Sapiens
gcugcugccggggguccugggaccgcgggaug

SEQ ID NO: 341121 - RNA, 32 nt, Homo Sapiens
ccaggcucacuuucugaauaagccacugccug

SEQ ID NO: 341122 - RNA, 32 nt, Homo Sapiens
uaugaauugagcagaaggaaacaaaguucugc

SEQ ID NO: 341123 - RNA, 32 nt, Homo Sapiens
uuaucuuauucccccaagagaaugggaugaug

SEQ ID NO: 341124 - RNA, 32 nt, Homo Sapiens
agguggggaaaggggggcuugcaccccugcug

SEQ ID NO: 341125 - RNA, 32 nt, Homo Sapiens
aacaucaugaaagcggcgucauguacugugua

SEQ ID NO: 341126 - RNA, 32 nt, Homo Sapiens
gggcgcggcaccugcgggcccgagggucuggc

SEQ ID NO: 341127 - RNA, 32 nt, Homo Sapiens
cauccaagcugcugaccuccucauggccgacu

SEQ ID NO: 341128 - RNA, 32 nt, Homo Sapiens
uuuuuauuaggcaucaauuuguauugguguga

SEQ ID NO: 341129 - RNA, 32 nt, Homo Sapiens
gaagaaaaacacuugccaaaacauuaagagaa

SEQ ID NO: 341130 - RNA, 32 nt, Homo Sapiens
ugagaggugaagaaauuugaccaagagugugg

SEQ ID NO: 341131 - RNA, 32 nt, Homo Sapiens
gugcacccacuuugacuaugaguauaccacca

SEQ ID NO: 341132 - RNA, 32 nt, Homo Sapiens
uggcuaagguaguuuuaaagacuuuguugauu

SEQ ID NO: 341133 - RNA, 32 nt, Homo Sapiens
acaguagucuuuguauucuauaguauguucug

SEQ ID NO: 341134 - RNA, 32 nt, Homo Sapiens
uaaagcauuaugugcaauuaaguuguuaugac

SEQ ID NO: 341135 - RNA, 32 nt, Homo Sapiens
uuguuuguuaggugaaauacaguguggugagc

SEQ ID NO: 341136 - RNA, 32 nt, Homo Sapiens
acauaucccuucccuuuagacagcagucauca

SEQ ID NO: 341137 - RNA, 32 nt, Homo Sapiens
agucucccacgggagacagacacauuaaacag

SEQ ID NO: 341138 - RNA, 32 nt, Homo Sapiens
acuguacuuuuuucuugaucugucuguaaccc

SEQ ID NO: 341139 - RNA, 32 nt, Homo Sapiens
ucuuccacuccagcaucggaucccggaaaggc

SEQ ID NO: 341140 - RNA, 32 nt, Homo Sapiens
ccccuuccuuggucuccacgggccccguggac

SEQ ID NO: 341141 - RNA, 32 nt, Homo Sapiens
ucaaagcaggcacacccaaaacacaagucugu

SEQ ID NO: 341142 - RNA, 32 nt, Homo Sapiens
gagggcacaggcauagagggaagagccauggu

SEQ ID NO: 341143 - RNA, 32 nt, Homo Sapiens
guugagcuccguuaagcacacacacacucaca

SEQ ID NO: 341144 - RNA, 32 nt, Homo Sapiens
ugggauggcagacauggcaggugccggugcuc

SEQ ID NO: 341145 - RNA, 32 nt, Homo Sapiens
ggucccggcggcggcuggaggaggaagccagg

SEQ ID NO: 341146 - RNA, 32 nt, Homo Sapiens
cuucccagccuggcccuggcaaggggcgggug

SEQ ID NO: 341147 - RNA, 32 nt, Homo Sapiens
uggcaccaccuggcccucgagcuccgaggccg

SEQ ID NO: 341148 - RNA, 32 nt, Homo Sapiens
uuccauuucugccuuuuguucauuucauccuu

SEQ ID NO: 341149 - RNA, 32 nt, Homo Sapiens
ugguuuguggcucaguuccacaaauuuuuggu

SEQ ID NO: 341150 - RNA, 32 nt, Homo Sapiens
guguguuuccucacuucucaauaaaaaugucu

SEQ ID NO: 341151 - RNA, 32 nt, Homo Sapiens
uggggaaggggaggauagcgagaagaugcucu

SEQ ID NO: 341152 - RNA, 32 nt, Homo Sapiens
gggacuaggccccgccauuuuggauccgcuga

SEQ ID NO: 341153 - RNA, 32 nt, Homo Sapiens
caguuccccuggcuuguuugaccgcugugggu

SEQ ID NO: 341154 - RNA, 32 nt, Homo Sapiens
agcaggagaggagagccagagaagugacaggg

SEQ ID NO: 341155 - RNA, 32 nt, Homo Sapiens
uggagugcgccgguggcagcgccugcagaccu

SEQ ID NO: 341156 - RNA, 32 nt, Homo Sapiens
gccacaccaccuuguugugugaccuugggcag

SEQ ID NO: 341157 - RNA, 32 nt, Homo Sapiens
agaagaaagcucuggaucuaucaaauaaagaa

SEQ ID NO: 341158 - RNA, 32 nt, Homo Sapiens
acucagauucuaugagaaacccagggucucug

SEQ ID NO: 341159 - RNA, 32 nt, Homo Sapiens
ugucuugacucccccauguacucuguauguga

SEQ ID NO: 341160 - RNA, 32 nt, Homo Sapiens
ccgggucucgaggagaaggcgagaggggucag

SEQ ID NO: 341161 - RNA, 32 nt, Homo Sapiens
cagcugugcccccgccgguggaccccguggcg

SEQ ID NO: 341162 - RNA, 32 nt, Homo Sapiens
ccuucugugggaaggaugugcgcgcggauggc

SEQ ID NO: 341163 - RNA, 32 nt, Homo Sapiens
uuguugccaaauccagugaaaacucucaguuc

SEQ ID NO: 341164 - RNA, 32 nt, Homo Sapiens
gauggaaaaauaucaaaauagaacuuuauauu

SEQ ID NO: 341165 - RNA, 32 nt, Homo Sapiens
agaaauuuguaugcguauauaagcaaauaugu

SEQ ID NO: 341166 - RNA, 30 nt, Homo Sapiens
gcgcgggccaggcgcgcggugucaccucca

SEQ ID NO: 341167 - RNA, 32 nt, Homo Sapiens
ccuucuuggaagucuuugauugacucagagag

SEQ ID NO: 341168 - RNA, 32 nt, Homo Sapiens
ccaggacaaaacgauuuaauaauuaaagucuc

SEQ ID NO: 341169 - RNA, 32 nt, Homo Sapiens
aaucacacuaagggucucucuauuucuucucu

SEQ ID NO: 341170 - RNA, 32 nt, Homo Sapiens
aggauguggaauguuggagaacauugugcacu

SEQ ID NO: 341171 - RNA, 31 nt, Homo Sapiens
ucuuguggcugcggccugccccucagccucc

SEQ ID NO: 341172 - RNA, 32 nt, Homo Sapiens
gcucgcuagggcugcgcguugggccagcgggg

SEQ ID NO: 341173 - RNA, 32 nt, Homo Sapiens
accuggaguacaagauaacacacacacacaca

SEQ ID NO: 341174 - RNA, 32 nt, Homo Sapiens
ugagugucuuauuuuccaacaucgucaauagc

SEQ ID NO: 341175 - RNA, 32 nt, Homo Sapiens
ugccacauccuggguucuugugggaagaacgg

SEQ ID NO: 341176 - RNA, 32 nt, Homo Sapiens
aaggugcccgagauggcugugcccgaugugca

SEQ ID NO: 341177 - RNA, 32 nt, Homo Sapiens
augugugauaaucuguuuuuacugguauuaau

SEQ ID NO: 341178 - RNA, 32 nt, Homo Sapiens
agaugcuuaacucguuguugaaugugagaacu

SEQ ID NO: 341179 - RNA, 32 nt, Homo Sapiens
uugcugccccaucaugggggcugggguuguca

SEQ ID NO: 341180 - RNA, 32 nt, Homo Sapiens
ggagaagcugcauccagaggcaaacggaggca

SEQ ID NO: 341181 - RNA, 32 nt, Homo Sapiens
aggggcagaacacuggggagccagguauagag

SEQ ID NO: 341182 - RNA, 32 nt, Homo Sapiens
agcauauauuuuacuaauuuguuauucccccg

SEQ ID NO: 341183 - RNA, 32 nt, Homo Sapiens
gacaggugcaaagggacgcagacgucugggac

SEQ ID NO: 341184 - RNA, 29 nt, Homo Sapiens
gccaguauagugaugauaugacaccagca

SEQ ID NO: 341185 - RNA, 32 nt, Homo Sapiens
uacacuugggcgcccuguaugggaucacuuug

SEQ ID NO: 341186 - RNA, 32 nt, Homo Sapiens
cagcuuccaguguggugcccucccucaauugu

SEQ ID NO: 341187 - RNA, 32 nt, Homo Sapiens
aaugguguccauccuuuccccaucccugccuc

SEQ ID NO: 341188 - RNA, 32 nt, Homo Sapiens
aaguuacaaacaauacguagauguugucaagu

SEQ ID NO: 341189 - RNA, 32 nt, Homo Sapiens
gcuguggacagaggaaccaacaucugccaccu

SEQ ID NO: 341190 - RNA, 32 nt, Homo Sapiens
uccuugguaugcugagcgccgguccccuaggu

SEQ ID NO: 341191 - RNA, 32 nt, Homo Sapiens
ugcucuaccuggccgguaggcugcuggcgccu

SEQ ID NO: 341192 - RNA, 32 nt, Homo Sapiens
aauacauccgguuuccuguguauuuuccucca

SEQ ID NO: 341193 - RNA, 32 nt, Homo Sapiens
uuauaguuauuuaaacauggucucauuauuuc

SEQ ID NO: 341194 - RNA, 32 nt, Homo Sapiens
gcuacuuguauuuuacaauacaauauuaaauu

SEQ ID NO: 341195 - RNA, 32 nt, Homo Sapiens
cuacagaaugggaaaacauauuugcaaaucau

SEQ ID NO: 341196 - RNA, 32 nt, Homo Sapiens
aucuggacguggcggcccgcgccgggcugagu

SEQ ID NO: 341197 - RNA, 32 nt, Homo Sapiens
agcaguguggacaucagccacuuuuuauauuc

SEQ ID NO: 341198 - RNA, 32 nt, Homo Sapiens
acaacccagugcaacuaacuacuaggcuuucg

SEQ ID NO: 341199 - RNA, 32 nt, Homo Sapiens
ggauauuuuagaaagagaaaugucugagauaa

SEQ ID NO: 341200 - RNA, 31 nt, Homo Sapiens
ucugagaaauaaacgagucuauuacuaaaaa

SEQ ID NO: 341201 - RNA, 32 nt, Homo Sapiens
gcguggcauggacgguggcagcuccugugguc

SEQ ID NO: 341202 - RNA, 32 nt, Homo Sapiens
ucccagauaaccuugaggccugggcacuggcu

SEQ ID NO: 341203 - RNA, 32 nt, Homo Sapiens
aacauacugauagaaaaagacuauauuuuauc

SEQ ID NO: 341204 - RNA, 32 nt, Homo Sapiens
cauucagccucccaaaguguugcacuacugaa

SEQ ID NO: 341205 - RNA, 30 nt, Homo Sapiens
aggcuggcgcccguaccaugagcgaggcgg

SEQ ID NO: 341206 - RNA, 32 nt, Homo Sapiens
ugaguugggacagucuuccuuuuguugggagg

SEQ ID NO: 341207 - RNA, 32 nt, Homo Sapiens
aaguguguuaugucuguaccugucugaagagu

SEQ ID NO: 341208 - RNA, 29 nt, Homo Sapiens
gacaucacauaaauaaaguuacaaaugga

SEQ ID NO: 341209 - RNA, 32 nt, Homo Sapiens
uugccaugccugaguucuuuccuaucccaccc

SEQ ID NO: 341210 - RNA, 32 nt, Homo Sapiens
uuaacccagccuuuuccaguguguaacccagu

SEQ ID NO: 341211 - RNA, 32 nt, Homo Sapiens
ggaaauacuacaguucggagaacugcuuauuu

SEQ ID NO: 341212 - RNA, 32 nt, Homo Sapiens
ccugacccauucuuuuuauucuucucuacagc

SEQ ID NO: 341213 - RNA, 32 nt, Homo Sapiens
gcagacaccuuugaaaacaauucagaucgugu

SEQ ID NO: 341214 - RNA, 32 nt, Homo Sapiens
augagcgugggcggggggcgcgcagagaacuc

SEQ ID NO: 341215 - RNA, 32 nt, Homo Sapiens
uauuuucagaucuccuuggagcaguagaguac

SEQ ID NO: 341216 - RNA, 32 nt, Homo Sapiens
ccugcccgcgcaccgcgcucagcgcccaccgc

SEQ ID NO: 341217 - RNA, 32 nt, Homo Sapiens
ucaugugggggccagaucugccugcuguuucc

SEQ ID NO: 341218 - RNA, 32 nt, Homo Sapiens
ccgggugcagagguggaggcccggggagaggc

SEQ ID NO: 341219 - RNA, 32 nt, Homo Sapiens
gucuuuuucuuuaugacuucugcuuuuuaugu

SEQ ID NO: 341220 - RNA, 29 nt, Homo Sapiens
uguguauugaagauuaggaaaaagauagu

SEQ ID NO: 341221 - RNA, 32 nt, Homo Sapiens
uggcugcugccccgucucccaccccugucccc

SEQ ID NO: 341222 - RNA, 32 nt, Homo Sapiens
gaggcggagguggcaaauaaaccugggcaauu

SEQ ID NO: 341223 - RNA, 32 nt, Homo Sapiens
uuuuaaauccugaaguguggguggcgcacaca

SEQ ID NO: 341224 - RNA, 32 nt, Homo Sapiens
guuugagugucugcgccccgccuccccauacu

SEQ ID NO: 341225 - RNA, 32 nt, Homo Sapiens
acaccccagcagcugcguccaauccauuuuau

SEQ ID NO: 341226 - RNA, 32 nt, Homo Sapiens
gcacaccacuccuuccagcaguagucgcuuua

SEQ ID NO: 341227 - RNA, 32 nt, Homo Sapiens
uggcuggaauuuacaagcuaauuguucaauaa

SEQ ID NO: 341228 - RNA, 32 nt, Homo Sapiens
ggauaacaaagauaucuuuucuuuagagaacu

SEQ ID NO: 341229 - RNA, 32 nt, Homo Sapiens
aggccacgacggagggcgacuaccucccuucu

SEQ ID NO: 341230 - RNA, 32 nt, Homo Sapiens
cggcgguagcggcggcagcggcugcggccaag

SEQ ID NO: 341231 - RNA, 32 nt, Homo Sapiens
cccgccuggagcugcguuucgcggcggcggcg

SEQ ID NO: 341232 - RNA, 32 nt, Homo Sapiens
gucccagggaccugggucucugggagaggaag

SEQ ID NO: 341233 - RNA, 32 nt, Homo Sapiens
uauucuguucuuccgacuccugcuaacacaca

SEQ ID NO: 341234 - RNA, 32 nt, Homo Sapiens
ggccccuccaugaaugagacaaacaaaacacu

SEQ ID NO: 341235 - RNA, 32 nt, Homo Sapiens
cgaggcggaaaauccucaccccggcccgcggg

SEQ ID NO: 341236 - RNA, 32 nt, Homo Sapiens
gcccgccccgcggaagccgccgguugccaggc

SEQ ID NO: 341237 - RNA, 32 nt, Homo Sapiens
gcgagcccccagcccagccuggcgacugggga

SEQ ID NO: 341238 - RNA, 32 nt, Homo Sapiens
cuuuuguagaaaguccaagaauaauaacucua

SEQ ID NO: 341239 - RNA, 32 nt, Homo Sapiens
uucuucucucuguguccuacuugggacguagg

SEQ ID NO: 341240 - RNA, 32 nt, Homo Sapiens
ucccugaccaguuuugcgggguugcucccagu

SEQ ID NO: 341241 - RNA, 32 nt, Homo Sapiens
auaagacaaaugugcuuguucuuuuaaauucu

SEQ ID NO: 341242 - RNA, 32 nt, Homo Sapiens
ggaccuggccccaggcugucacccuccaccga

SEQ ID NO: 341243 - RNA, 32 nt, Homo Sapiens
caccacgccaccccuguggcugcuacaggagc

SEQ ID NO: 341244 - RNA, 31 nt, Homo Sapiens
uuuuuccaagccauuccugggggauuccugg

SEQ ID NO: 341245 - RNA, 32 nt, Homo Sapiens
gaaguugcuugaaagcacucggagaauugugc

SEQ ID NO: 341246 - RNA, 32 nt, Homo Sapiens
aucccagcagacccaccuccccgccuggugcc

SEQ ID NO: 341247 - RNA, 32 nt, Homo Sapiens
cugaaagauggucauaugauauuccuucauuu

SEQ ID NO: 341248 - RNA, 32 nt, Homo Sapiens
uuuuugcugucauccccacuuuagucacgaga

SEQ ID NO: 341249 - RNA, 32 nt, Homo Sapiens
agagauaauugccuauacuaagaaucuauacu

SEQ ID NO: 341250 - RNA, 32 nt, Homo Sapiens
uucggccgggccauugcuuccuggacagggga

SEQ ID NO: 341251 - RNA, 32 nt, Homo Sapiens
aagccacaauaacaaauugaaaaaauaaaauu

SEQ ID NO: 341252 - RNA, 32 nt, Homo Sapiens
uccagggcugucuacugcucuucuuuagccug

SEQ ID NO: 341253 - RNA, 32 nt, Homo Sapiens
cuuauuaauggaauguuaaauaaaauguauac

SEQ ID NO: 341254 - RNA, 32 nt, Homo Sapiens
aucaugaaauguauacaaaauaaauaaaguag

SEQ ID NO: 341255 - RNA, 32 nt, Homo Sapiens
uuguuuucacucaaauauuuugccucauuauu

SEQ ID NO: 341256 - RNA, 32 nt, Homo Sapiens
caaaaggguggaugugcuggauugugucucuu

SEQ ID NO: 341257 - RNA, 32 nt, Homo Sapiens
cuaauauugggcaacaauuauuauuaaaugaa

SEQ ID NO: 341258 - RNA, 32 nt, Homo Sapiens
cacucccaggccagcucugucacuggucgcug

SEQ ID NO: 341259 - RNA, 32 nt, Homo Sapiens
auaugcacccagguuucuuuuacaguuuuuag

SEQ ID NO: 341260 - RNA, 32 nt, Homo Sapiens
uggcaaaagugauaucaagugauugucagacu

SEQ ID NO: 341261 - RNA, 32 nt, Homo Sapiens
ggagcagucccagagccagcccugcccucagc

SEQ ID NO: 341262 - RNA, 32 nt, Homo Sapiens
uuagccacucccugccucucacuccagaccug

SEQ ID NO: 341263 - RNA, 32 nt, Homo Sapiens
uggcauaacgcaggggagaagaaggggaaaga

SEQ ID NO: 341264 - RNA, 32 nt, Homo Sapiens
uauuaauuggggguuuuaauucuauuaucaug

SEQ ID NO: 341265 - RNA, 29 nt, Homo Sapiens
aauaaugcuagguuuuauuuucuaguauu

SEQ ID NO: 341266 - RNA, 32 nt, Homo Sapiens
accuuucguuucccuuuccccaaaaguagcgu

SEQ ID NO: 341267 - RNA, 32 nt, Homo Sapiens
uucuaaaccuaaaaucuacuugguuugaaauc

SEQ ID NO: 341268 - RNA, 32 nt, Homo Sapiens
ucccagugccccgaugaccaucuggucagccc

SEQ ID NO: 341269 - RNA, 32 nt, Homo Sapiens
aaacauuugucaucuaucaucucuaaggguag

SEQ ID NO: 341270 - RNA, 32 nt, Homo Sapiens
ggccugaaaaggaagagcaaccuguccagaau

SEQ ID NO: 341271 - RNA, 32 nt, Homo Sapiens
cugcauccauuuccucuugcugcaauaacaac

SEQ ID NO: 341272 - RNA, 32 nt, Homo Sapiens
aggaauacagucacguggcaguccucacaguu

SEQ ID NO: 341273 - RNA, 32 nt, Homo Sapiens
cuccugugcugcguguccaucaucagcugacc

SEQ ID NO: 341274 - RNA, 32 nt, Homo Sapiens
ugauuaccucuugagauauauuauugaugaca

SEQ ID NO: 341275 - RNA, 32 nt, Homo Sapiens
ccuagaaauggcaaugaaagucuucaaacuag

SEQ ID NO: 341276 - RNA, 32 nt, Homo Sapiens
acauggauauugugaaugguaugaacuuuuaa

SEQ ID NO: 341277 - RNA, 28 nt, Homo Sapiens
caaaccaauguguaaauguguuuuacuc

SEQ ID NO: 341278 - RNA, 32 nt, Homo Sapiens
agauugcuuagagauagcagauuauugcucac

SEQ ID NO: 341279 - RNA, 32 nt, Homo Sapiens
uuuaacucaauagaaaaauuauuuuagaacac

SEQ ID NO: 341280 - RNA, 32 nt, Homo Sapiens
cccucccucaggugcccaccuggggcugcugg

SEQ ID NO: 341281 - RNA, 32 nt, Homo Sapiens
auuaagaagcuacugguuuauucccaauuguu

SEQ ID NO: 341282 - RNA, 31 nt, Homo Sapiens
aucaccaggcaugucugcagagccuggacac

SEQ ID NO: 341283 - RNA, 32 nt, Homo Sapiens
ggaggaauggcaaugccuggauugugcucagc

SEQ ID NO: 341284 - RNA, 32 nt, Homo Sapiens
auauccaguuuucauuuuuuuacgucuugccu

SEQ ID NO: 341285 - RNA, 29 nt, Homo Sapiens
ccuagguuauaauuguagaacggacauua

SEQ ID NO: 341286 - RNA, 32 nt, Homo Sapiens
agccaacuugcagcaccugguuaugccuccuu

SEQ ID NO: 341287 - RNA, 32 nt, Homo Sapiens
uauuacaggaagaaaagauuugguuuucaugg

SEQ ID NO: 341288 - RNA, 32 nt, Homo Sapiens
uuguuuuuuaaauaaaguacuuugaaaugcau

SEQ ID NO: 341289 - RNA, 32 nt, Homo Sapiens
aauuccacccgccccaggacccccgcaccugc

SEQ ID NO: 341290 - RNA, 32 nt, Homo Sapiens
ugccccaaguuuugugaaauuuuucauauuuu

SEQ ID NO: 341291 - RNA, 32 nt, Homo Sapiens
ggccucucagaauugagugagcgugugacucc

SEQ ID NO: 341292 - RNA, 32 nt, Homo Sapiens
acuugcaaugaaauuaaugagauauauauuga

SEQ ID NO: 341293 - RNA, 32 nt, Homo Sapiens
ucaaccugaggguggcgucuuuagagacaggc

SEQ ID NO: 341294 - RNA, 32 nt, Homo Sapiens
acugaaaacucuuuugcauuaagggaucauuc

SEQ ID NO: 341295 - RNA, 32 nt, Homo Sapiens
gugagaauucagauguaauuuuuuaccuugau

SEQ ID NO: 341296 - RNA, 32 nt, Homo Sapiens
uuugaauacaaauaaugaauguaaacaauuaa

SEQ ID NO: 341297 - RNA, 32 nt, Homo Sapiens
aauaaaauauuguuacaaaaaauguacaguac

SEQ ID NO: 341298 - RNA, 32 nt, Homo Sapiens
guuuaggccccgggguggagucuccggaccgg

SEQ ID NO: 341299 - RNA, 32 nt, Homo Sapiens
aagaaaucuuccuggacagaagaggaggacag

SEQ ID NO: 341300 - RNA, 32 nt, Homo Sapiens
uaagauauuccaucgugaggaugagagagguc

SEQ ID NO: 341301 - RNA, 32 nt, Homo Sapiens
auuuguacaccagacugccauaaagaauaacc

SEQ ID NO: 341302 - RNA, 32 nt, Homo Sapiens
acugcccugccucuccucuggcccugggaaca

SEQ ID NO: 341303 - RNA, 32 nt, Homo Sapiens
uaggcucacuggaaaauguggcugggaagacu

SEQ ID NO: 341304 - RNA, 32 nt, Homo Sapiens
ucgaguaaggcacacccaaauguaaaaauccu

SEQ ID NO: 341305 - RNA, 32 nt, Homo Sapiens
augaaugaggugauauccacaguguccaacac

SEQ ID NO: 341306 - RNA, 32 nt, Homo Sapiens
gacuggggucuuccuccagcaguuacuugaug

SEQ ID NO: 341307 - RNA, 32 nt, Homo Sapiens
agagguccccugaggucaugcauuguaaucau

SEQ ID NO: 341308 - RNA, 32 nt, Homo Sapiens
gcugcggccccggccgcgcaauggggaaggag

SEQ ID NO: 341309 - RNA, 32 nt, Homo Sapiens
acaagaaaaagauaagaaauacuagaguaaag

SEQ ID NO: 341310 - RNA, 32 nt, Homo Sapiens
gacccaggcaggggcggggcucggagcggggc

SEQ ID NO: 341311 - RNA, 30 nt, Homo Sapiens
agaagauggaugcacaguguucagccaagg

SEQ ID NO: 341312 - RNA, 32 nt, Homo Sapiens
aggggagaaaaggagccgcuucugccucccuu

SEQ ID NO: 341313 - RNA, 32 nt, Homo Sapiens
uaaucaaaguugacgucaaacaucuuacuaca

SEQ ID NO: 341314 - RNA, 32 nt, Homo Sapiens
cuccccccaagccuacagggggcagcgggcac

SEQ ID NO: 341315 - RNA, 32 nt, Homo Sapiens
cccaccuacagagaugaaauccauuuagguca

SEQ ID NO: 341316 - RNA, 32 nt, Homo Sapiens
ucagcuggcagcgggaugaggcugguccccuc

SEQ ID NO: 341317 - RNA, 32 nt, Homo Sapiens
acuggagcugucugaaccuguggucaggcuca

SEQ ID NO: 341318 - RNA, 32 nt, Homo Sapiens
augccaggccaggccuggggccccggggccug

SEQ ID NO: 341319 - RNA, 32 nt, Homo Sapiens
cggucucgggagauggaggaaaaggagauguu

SEQ ID NO: 341320 - RNA, 32 nt, Homo Sapiens
ggggguccuuucugcccuccccacccugcauc

SEQ ID NO: 341321 - RNA, 32 nt, Homo Sapiens
uuuagcaugaauuguuuaaggguaagccacaa

SEQ ID NO: 341322 - RNA, 32 nt, Homo Sapiens
aagccccccacccagauggauuuuuucguuuc

SEQ ID NO: 341323 - RNA, 32 nt, Homo Sapiens
agcauuuaaaaauuauuauuguguucuuguga

SEQ ID NO: 341324 - RNA, 32 nt, Homo Sapiens
acgaggcaagaggacaugggggugugcagaag

SEQ ID NO: 341325 - RNA, 32 nt, Homo Sapiens
uggauacccacugucaccugcacuaugaagug

SEQ ID NO: 341326 - RNA, 32 nt, Homo Sapiens
gcgaucgguccggucgguggcuccccgcggcg

SEQ ID NO: 341327 - RNA, 32 nt, Homo Sapiens
augugguaaguaaaauuaaauaaaaucuaaau

SEQ ID NO: 341328 - RNA, 32 nt, Homo Sapiens
gaaauccaggcacuugagagccacuguaagua

SEQ ID NO: 341329 - RNA, 27 nt, Homo Sapiens
gagacggucagcuucagcccugacucg

SEQ ID NO: 341330 - RNA, 32 nt, Homo Sapiens
cgggagcgccuccggggcuggugcguggccgg

SEQ ID NO: 341331 - RNA, 30 nt, Homo Sapiens
ccagggugagguggcaugguccauucucaa

SEQ ID NO: 341332 - RNA, 32 nt, Homo Sapiens
ugagcccccucccccugaccucagcuuccugc

SEQ ID NO: 341333 - RNA, 32 nt, Homo Sapiens
cugauucuuuaaaugguuuguuuucuacauug

SEQ ID NO: 341334 - RNA, 32 nt, Homo Sapiens
cugggcaugguggugugcugcgugccuguggu

SEQ ID NO: 341335 - RNA, 32 nt, Homo Sapiens
aaggccuuuucucagaagucagaccuuguugu

SEQ ID NO: 341336 - RNA, 32 nt, Homo Sapiens
ccccgagugucuguaaugcaucccucaacuuu

SEQ ID NO: 341337 - RNA, 32 nt, Homo Sapiens
cagcgaggcgggugcgccaaagggcgccaguu

SEQ ID NO: 341338 - RNA, 32 nt, Homo Sapiens
cugaggggcccugcuccaagccugcaggaccg

SEQ ID NO: 341339 - RNA, 32 nt, Homo Sapiens
uucugugugcugucauauuuugguaucagagu

SEQ ID NO: 341340 - RNA, 32 nt, Homo Sapiens
aagguggcugcuucuuccccagccaugaguca

SEQ ID NO: 341341 - RNA, 32 nt, Homo Sapiens
gaaggugaacaagauaauauauguaaagugcu

SEQ ID NO: 341342 - RNA, 32 nt, Homo Sapiens
cugaaaucccucuaccuucucugggucuggca

SEQ ID NO: 341343 - RNA, 32 nt, Homo Sapiens
caggagaagguggaagagaaagggugggcgug

SEQ ID NO: 341344 - RNA, 32 nt, Homo Sapiens
gggcccgcgcgacaggagcgcggucucugagg

SEQ ID NO: 341345 - RNA, 32 nt, Homo Sapiens
accacacaccuguauauucucaucuuuugaga

SEQ ID NO: 341346 - RNA, 32 nt, Homo Sapiens
ccuggggcagacgaggccggcuucuccgcgga

SEQ ID NO: 341347 - RNA, 32 nt, Homo Sapiens
uaugucaugguuuucagauccauuccaaccug

SEQ ID NO: 341348 - RNA, 32 nt, Homo Sapiens
acacagugcucgggagguuucugcucugucug

SEQ ID NO: 341349 - RNA, 32 nt, Homo Sapiens
gaagcauggugcccuggcuucucugaggaagc

SEQ ID NO: 341350 - RNA, 32 nt, Homo Sapiens
aaaagaggauucaacaguauucauuguaagau

SEQ ID NO: 341351 - RNA, 32 nt, Homo Sapiens
ugugaagcugcagacuccaagcaacagagaga

SEQ ID NO: 341352 - RNA, 32 nt, Homo Sapiens
aacuuuccaaauaguuuaacauauugauucuu

SEQ ID NO: 341353 - RNA, 32 nt, Homo Sapiens
aauuuaauuuugcaggauuuguuguucugacc

SEQ ID NO: 341354 - RNA, 32 nt, Homo Sapiens
ucugcagcacucagccauacaccaacaguguu

SEQ ID NO: 341355 - RNA, 32 nt, Homo Sapiens
gugucuugagauuguucaaccugugcaggcag

SEQ ID NO: 341356 - RNA, 32 nt, Homo Sapiens
gggcaggaaauaccucacuaucccggcugccc

SEQ ID NO: 341357 - RNA, 32 nt, Homo Sapiens
ugaaaacuccuacaauauuauauuuggaggca

SEQ ID NO: 341358 - RNA, 32 nt, Homo Sapiens
gacggugacaauggcauuacuuauugaguguu

SEQ ID NO: 341359 - RNA, 32 nt, Homo Sapiens
acaguguuuuuugcaaauuagagcaggacaaa

SEQ ID NO: 341360 - RNA, 32 nt, Homo Sapiens
aaaacugcagauuuugccuugcacuuuuugaa

SEQ ID NO: 341361 - RNA, 32 nt, Homo Sapiens
cuguuauuuuucugcccuggguucuuccacag

SEQ ID NO: 341362 - RNA, 32 nt, Homo Sapiens
gaauacuggccagaaggcuaugcugaaguuug

SEQ ID NO: 341363 - RNA, 32 nt, Homo Sapiens
aauauaaaaaaguacaaagaagaaaaguaaaa

SEQ ID NO: 341364 - RNA, 32 nt, Homo Sapiens
cgcuggccgcgugccgccuccggagccggcag

SEQ ID NO: 341365 - RNA, 32 nt, Homo Sapiens
cugcaacccacccaaggaggcuacuggaucgg

SEQ ID NO: 341366 - RNA, 29 nt, Homo Sapiens
auacauguguguauguauacauguauaua

SEQ ID NO: 341367 - RNA, 32 nt, Homo Sapiens
accgcucucugacuucacauguuaauagagga

SEQ ID NO: 341368 - RNA, 32 nt, Homo Sapiens
guggccuccccgucccuuccccgguggcgaac

SEQ ID NO: 341369 - RNA, 31 nt, Homo Sapiens
auggagcacaagcagaacucgaguuugucgg

SEQ ID NO: 341370 - RNA, 32 nt, Homo Sapiens
gagaaaaauuuucauugacucccauuguggaa

SEQ ID NO: 341371 - RNA, 32 nt, Homo Sapiens
agggacuguaguggauuauggccaagcagcag

SEQ ID NO: 341372 - RNA, 32 nt, Homo Sapiens
uauucaguaucuuuuuaucaucugacagcuaa

SEQ ID NO: 341373 - RNA, 27 nt, Homo Sapiens
cuaugguccuucuucuguuaaauggag

SEQ ID NO: 341374 - RNA, 32 nt, Homo Sapiens
cuuaccaaacucagagcaucugaguagcagaa

SEQ ID NO: 341375 - RNA, 32 nt, Homo Sapiens
auugagaaaugaaucuccugggugcuacuugu

SEQ ID NO: 341376 - RNA, 32 nt, Homo Sapiens
cuaggacaucguuucauaaaauuaagguuuaa

SEQ ID NO: 341377 - RNA, 32 nt, Homo Sapiens
ggcgcgccugaagacgcagccgaggugggagc

SEQ ID NO: 341378 - RNA, 32 nt, Homo Sapiens
ucaacuagaucccuggaauuucugccuuucug

SEQ ID NO: 341379 - RNA, 32 nt, Homo Sapiens
uucuuuuugacaaagagaaaugcaguguagua

SEQ ID NO: 341380 - RNA, 32 nt, Homo Sapiens
gccgccgcagcgccagcuccgucgccagcggu

SEQ ID NO: 341381 - RNA, 32 nt, Homo Sapiens
ggccugggcuucugugguuuaagggaccuucc

SEQ ID NO: 341382 - RNA, 32 nt, Homo Sapiens
ggugagaugggaagaauggaaacagggaccga

SEQ ID NO: 341383 - RNA, 32 nt, Homo Sapiens
gccgcccacaggaguugagacaauggcaaucc

SEQ ID NO: 341384 - RNA, 32 nt, Homo Sapiens
acugagaaauuaagguuaagauucuccuuuug

SEQ ID NO: 341385 - RNA, 32 nt, Homo Sapiens
gcccugucccugucccccuccccucccagucc

SEQ ID NO: 341386 - RNA, 32 nt, Homo Sapiens
guuuguccacacucauuccagagaaaaccgag

SEQ ID NO: 341387 - RNA, 32 nt, Homo Sapiens
gaagagccaguggauguggaaaaaaugagaua

SEQ ID NO: 341388 - RNA, 32 nt, Homo Sapiens
uggaagaagaaaccacuauuucaugaaaagca

SEQ ID NO: 341389 - RNA, 32 nt, Homo Sapiens
uggauucaacaaaacugccagcuuuuauguau

SEQ ID NO: 341390 - RNA, 32 nt, Homo Sapiens
ccaagggcaggaccccauauuccuccuagucc

SEQ ID NO: 341391 - RNA, 32 nt, Homo Sapiens
acuagguaauuacacagaggcuugaaauguua

SEQ ID NO: 341392 - RNA, 32 nt, Homo Sapiens
guugccugugaguucugccucgcuggccagag

SEQ ID NO: 341393 - RNA, 32 nt, Homo Sapiens
ccgcuugggcucgcaacgccucauggccgcgc

SEQ ID NO: 341394 - RNA, 28 nt, Homo Sapiens
guucaaguuacagcaaacgaagcugggc

SEQ ID NO: 341395 - RNA, 32 nt, Homo Sapiens
aggcugggugaugaccugaggaccagagacac

SEQ ID NO: 341396 - RNA, 32 nt, Homo Sapiens
ucucuccuugccccccgcccucauggguccua

SEQ ID NO: 341397 - RNA, 32 nt, Homo Sapiens
augugguuuuucggguuccccagcagcaucuc

SEQ ID NO: 341398 - RNA, 32 nt, Homo Sapiens
gagcgugugcggggcggccggcggaggagcag

SEQ ID NO: 341399 - RNA, 32 nt, Homo Sapiens
gugaacccggcgcgaggucccgggccccgggg

SEQ ID NO: 341400 - RNA, 32 nt, Homo Sapiens
cuacugcuacuacuauuuauguuucuucaagu

SEQ ID NO: 341401 - RNA, 32 nt, Homo Sapiens
uggcauggucugaacuggaaacccugagaaug

SEQ ID NO: 341402 - RNA, 32 nt, Homo Sapiens
cgggcccgggcggcggcuguguugcgcagucu

SEQ ID NO: 341403 - RNA, 32 nt, Homo Sapiens
cgagcggugacaucacgggggcgacggcggcg

SEQ ID NO: 341404 - RNA, 32 nt, Homo Sapiens
gguccgccgcgcgccagagccagagucgcagc

SEQ ID NO: 341405 - RNA, 32 nt, Homo Sapiens
gcaccaugucccaucacccagcggccagccau

SEQ ID NO: 341406 - RNA, 32 nt, Homo Sapiens
accuggaggaggagcaggggcguggagggcgu

SEQ ID NO: 341407 - RNA, 32 nt, Homo Sapiens
uauuuucuuuuuucuuuuucuuuucuuuuuuu

SEQ ID NO: 341408 - RNA, 32 nt, Homo Sapiens
uuuugauaagaaaaaaucaaaguguaaaggag

SEQ ID NO: 341409 - RNA, 32 nt, Homo Sapiens
uugagggugagggagugaguguucaaggagga

SEQ ID NO: 341410 - RNA, 32 nt, Homo Sapiens
gccgccgcgagcccgcgcgacucgcacgagca

SEQ ID NO: 341411 - RNA, 32 nt, Homo Sapiens
gaagcucuuaaaacguguaaaacuucugauuu

SEQ ID NO: 341412 - RNA, 31 nt, Homo Sapiens
auauucagugaugcuuaccuaacugaucggg

SEQ ID NO: 341413 - RNA, 32 nt, Homo Sapiens
uggcuuacaccuguaaccccagcacuuuggga

SEQ ID NO: 341414 - RNA, 30 nt, Homo Sapiens
agcggcggcaggcgccauguccggccgcga

SEQ ID NO: 341415 - RNA, 32 nt, Homo Sapiens
gacuguggacugggcugcuggccugcuugcuu

SEQ ID NO: 341416 - RNA, 32 nt, Homo Sapiens
acaugcuguuggaaaauggugccaaauagacu

SEQ ID NO: 341417 - RNA, 32 nt, Homo Sapiens
cccucaggccucuccaagcccggagcaucccc

SEQ ID NO: 341418 - RNA, 32 nt, Homo Sapiens
aaaguuuaauguguauuuucuacagacaagua

SEQ ID NO: 341419 - RNA, 32 nt, Homo Sapiens
acaguuugcuuuccacaggugugugcaguugc

SEQ ID NO: 341420 - RNA, 32 nt, Homo Sapiens
aaaucugccgugggcccuccagauagcucauu

SEQ ID NO: 341421 - RNA, 32 nt, Homo Sapiens
caucuuguauaaaauaugaauguuucccaaau

SEQ ID NO: 341422 - RNA, 32 nt, Homo Sapiens
ugcucauauaugaauuuuuaaugcagcaaugu

SEQ ID NO: 341423 - RNA, 32 nt, Homo Sapiens
gacaaauaauuuaauaauacacauguugcuuc

SEQ ID NO: 341424 - RNA, 32 nt, Homo Sapiens
uuggguguucgcgucgccacuucggcuucucg

SEQ ID NO: 341425 - RNA, 29 nt, Homo Sapiens
gggauggggggacagggagccaagcugug

SEQ ID NO: 341426 - RNA, 32 nt, Homo Sapiens
gucaguuuugagcuucacaaaauaaucagugg

SEQ ID NO: 341427 - RNA, 32 nt, Homo Sapiens
agugcaauauucuugcaucuucaguagugggg

SEQ ID NO: 341428 - RNA, 32 nt, Homo Sapiens
cacuuucccagggccucaccuaccuagggucu

SEQ ID NO: 341429 - RNA, 32 nt, Homo Sapiens
gccgggccucguauggggacucgggugagggu

SEQ ID NO: 341430 - RNA, 32 nt, Homo Sapiens
augugggccaagggaaugucugcaggaccggg

SEQ ID NO: 341431 - RNA, 32 nt, Homo Sapiens
uagagaaaucagucauuugcaaugcuuuugag

SEQ ID NO: 341432 - RNA, 32 nt, Homo Sapiens
uaccaccuggggaugggcugacucaggguccc

SEQ ID NO: 341433 - RNA, 31 nt, Homo Sapiens
acagaggauccggaucucagagccugagacc

SEQ ID NO: 341434 - RNA, 32 nt, Homo Sapiens
uucuuguggcugccaucauuccuugguuugug

SEQ ID NO: 341435 - RNA, 31 nt, Homo Sapiens
gccccauuggaagaagaaccaggcauggaaa

SEQ ID NO: 341436 - RNA, 32 nt, Homo Sapiens
gcucccugucuccaguaaacauccagccauuc

SEQ ID NO: 341437 - RNA, 32 nt, Homo Sapiens
aacaggagagccauggccggccuccgagggaa

SEQ ID NO: 341438 - RNA, 27 nt, Homo Sapiens
uaauggcaggcacaaucuguuucauca

SEQ ID NO: 341439 - RNA, 32 nt, Homo Sapiens
gcccgccaggacccggccccggugaacgggcu

SEQ ID NO: 341440 - RNA, 32 nt, Homo Sapiens
accuccagcucuuccagguuuguuaccaggcc

SEQ ID NO: 341441 - RNA, 32 nt, Homo Sapiens
ccaucagcucagcagagcucgacagccacaag

SEQ ID NO: 341442 - RNA, 32 nt, Homo Sapiens
ccagcauccgcaugagaccauugagaugagga

SEQ ID NO: 341443 - RNA, 32 nt, Homo Sapiens
gaauaugcaugauuuuaaaucugugauaaugu

SEQ ID NO: 341444 - RNA, 32 nt, Homo Sapiens
auuguugaaaauagagugagcuccuccccagu

SEQ ID NO: 341445 - RNA, 32 nt, Homo Sapiens
aguugaaaaaucaguaacccaagaugacuaac

SEQ ID NO: 341446 - RNA, 32 nt, Homo Sapiens
uuuuauuugcaugauuauaguuaagcaaauuu

SEQ ID NO: 341447 - RNA, 32 nt, Homo Sapiens
ugggcgaagggggcgggagggcguggggggag

SEQ ID NO: 341448 - RNA, 32 nt, Homo Sapiens
uuuauucgcgccccgcuccgccaccagggcuu

SEQ ID NO: 341449 - RNA, 32 nt, Homo Sapiens
guuuggcagucagagucccacauccugcucaa

SEQ ID NO: 341450 - RNA, 32 nt, Homo Sapiens
cgacucugccagcagggauuggcuaacgggcc

SEQ ID NO: 341451 - RNA, 32 nt, Homo Sapiens
uucagccuguguagggcaaacacaaauccuua

SEQ ID NO: 341452 - RNA, 32 nt, Homo Sapiens
ccuaggcauagccugaaccagagcuauggcuc

SEQ ID NO: 341453 - RNA, 32 nt, Homo Sapiens
gccacgugcaggggucaaggcugggcccugca

SEQ ID NO: 341454 - RNA, 32 nt, Homo Sapiens
ggacauugcugagccuucaguccgaggcacuc

SEQ ID NO: 341455 - RNA, 32 nt, Homo Sapiens
gaaaaggagcagcuacuccuuuuaaauccacg

SEQ ID NO: 341456 - RNA, 32 nt, Homo Sapiens
aauuuaauacuagugucauagauacuuuuugu

SEQ ID NO: 341457 - RNA, 32 nt, Homo Sapiens
ggcuggacggagagggugacgggggcugggaa

SEQ ID NO: 341458 - RNA, 32 nt, Homo Sapiens
ugugaggcccgccgcucgcaugagcaccucau

SEQ ID NO: 341459 - RNA, 32 nt, Homo Sapiens
aacuuguaaacuaaauauuugguaacugaagc

SEQ ID NO: 341460 - RNA, 32 nt, Homo Sapiens
agugguguuauaacucucaauguaauaguaug

SEQ ID NO: 341461 - RNA, 32 nt, Homo Sapiens
uauuccuuagauagguuuuucuuugaaaaccu

SEQ ID NO: 341462 - RNA, 32 nt, Homo Sapiens
accgggugcgggggcugcugugcgagaaagcc

SEQ ID NO: 341463 - RNA, 32 nt, Homo Sapiens
gggagcgcgggccgugggcgucgcucggccuu

SEQ ID NO: 341464 - RNA, 32 nt, Homo Sapiens
uaaaccagcccauuuuauagaauuacuaagug

SEQ ID NO: 341465 - RNA, 32 nt, Homo Sapiens
ggagaaguagcagucgcuggcagagcacacag

SEQ ID NO: 341466 - RNA, 32 nt, Homo Sapiens
ggaaagaggucgggagcgcucgcgagaucucg

SEQ ID NO: 341467 - RNA, 32 nt, Homo Sapiens
agguucuucuaaaauugaagagauuucaacau

SEQ ID NO: 341468 - RNA, 32 nt, Homo Sapiens
uaccggcgugcgccagcgugauguugcugagg

SEQ ID NO: 341469 - RNA, 32 nt, Homo Sapiens
uggguguguaaauguugguucuuccacuacug

SEQ ID NO: 341470 - RNA, 29 nt, Homo Sapiens
gagaauguggccgccuugcgggacgcucc

SEQ ID NO: 341471 - RNA, 32 nt, Homo Sapiens
gcggggcaggagaggagccuggccagugugcc

SEQ ID NO: 341472 - RNA, 32 nt, Homo Sapiens
ccagccccguccgggaguccccggcccgcugc

SEQ ID NO: 341473 - RNA, 32 nt, Homo Sapiens
auuuggaaaaagagagggagguauggacuggg

SEQ ID NO: 341474 - RNA, 32 nt, Homo Sapiens
cuuuuauuuuauuuuauauuuaaacuucagga

SEQ ID NO: 341475 - RNA, 32 nt, Homo Sapiens
aagaacugacauuggacgagagauuggaaauc

SEQ ID NO: 341476 - RNA, 32 nt, Homo Sapiens
acuacccuagucuuucugggguguuuaugucc

SEQ ID NO: 341477 - RNA, 32 nt, Homo Sapiens
ccgaguccuugcccugcugccuccucauaccc

SEQ ID NO: 341478 - RNA, 32 nt, Homo Sapiens
uuuucucagcccugacuuucuaaugggcuuuc

SEQ ID NO: 341479 - RNA, 32 nt, Homo Sapiens
gaggggacaucugguguagagcccucucaacc

SEQ ID NO: 341480 - RNA, 32 nt, Homo Sapiens
auuaagaggauacacacguuuguuucuucgug

SEQ ID NO: 341481 - RNA, 28 nt, Homo Sapiens
cggcguugcagguggccgaggugcugga

SEQ ID NO: 341482 - RNA, 32 nt, Homo Sapiens
aagcuucuggcugauaaaucuccaggugcauc

SEQ ID NO: 341483 - RNA, 32 nt, Homo Sapiens
cugcgcaccccagcggagccaagccccacgcu

SEQ ID NO: 341484 - RNA, 32 nt, Homo Sapiens
agguucuccccugggagacucccuuugccacc

SEQ ID NO: 341485 - RNA, 31 nt, Homo Sapiens
ccaaacucaaccaccaccugcagcuugucuc

SEQ ID NO: 341486 - RNA, 32 nt, Homo Sapiens
uuucuaccuaggaugcaugacaauugucaggu

SEQ ID NO: 341487 - RNA, 32 nt, Homo Sapiens
ggugggucggagcccaggaggcagcugggggg

SEQ ID NO: 341488 - RNA, 28 nt, Homo Sapiens
cagguucggcggccgggaggugccauuc

SEQ ID NO: 341489 - RNA, 32 nt, Homo Sapiens
cuauuaauauaaagaaccaaauuuugucugcu

SEQ ID NO: 341490 - RNA, 32 nt, Homo Sapiens
cuccgcacugcuuuaugggaggcauuauggcc

SEQ ID NO: 341491 - RNA, 32 nt, Homo Sapiens
ugagaacagauacuauugggcuggaaaagagg

SEQ ID NO: 341492 - RNA, 32 nt, Homo Sapiens
gcuaggagccucuaccagcaucauccuggggc

SEQ ID NO: 341493 - RNA, 32 nt, Homo Sapiens
cacucccuuggguauacaauuugcuguguagu

SEQ ID NO: 341494 - RNA, 32 nt, Homo Sapiens
ccggacaguaggggcggggccgggccggcgau

SEQ ID NO: 341495 - RNA, 32 nt, Homo Sapiens
auugagauauuuuuaguauuucugcaacguga

SEQ ID NO: 341496 - RNA, 32 nt, Homo Sapiens
aguuuuucuuuuucuuuuuucuuuuucuuuuu

SEQ ID NO: 341497 - RNA, 32 nt, Homo Sapiens
ucauuuucuguuuuuccucuaugugagucagc

SEQ ID NO: 341498 - RNA, 32 nt, Homo Sapiens
cuggcaagccucuuucaguauaacuguauggg

SEQ ID NO: 341499 - RNA, 32 nt, Homo Sapiens
ggaaaaggcuuuuguuuuguuuuguuuuguuu

SEQ ID NO: 341500 - RNA, 32 nt, Homo Sapiens
uucuucaggacucaggcuucuccaucauucuc

SEQ ID NO: 341501 - RNA, 32 nt, Homo Sapiens
agaauauuuucaaagcuuaaauuuguauauua

SEQ ID NO: 341502 - RNA, 32 nt, Homo Sapiens
aacggcccuuuccccaggaaucccuccccaac

SEQ ID NO: 341503 - RNA, 32 nt, Homo Sapiens
aaugcacaguucuauuugcuaucugaacuaau

SEQ ID NO: 341504 - RNA, 32 nt, Homo Sapiens
augauuucuugcuuuuuucagucauuuauaaa

SEQ ID NO: 341505 - RNA, 32 nt, Homo Sapiens
uccuccacgaucucauggcuccaccugcuucu

SEQ ID NO: 341506 - RNA, 32 nt, Homo Sapiens
uuuucugagaucuucaauuaaucucacuuuaa

SEQ ID NO: 341507 - RNA, 32 nt, Homo Sapiens
agacggcaggggugugguguguuauacuauag

SEQ ID NO: 341508 - RNA, 32 nt, Homo Sapiens
aaaaaauucagcaauaaucuuaaggccagaga

SEQ ID NO: 341509 - RNA, 32 nt, Homo Sapiens
ugaugacccccgcuuccaggccuccucuuccu

SEQ ID NO: 341510 - RNA, 32 nt, Homo Sapiens
cuccgugaccaccugauggacgugcugggcag

SEQ ID NO: 341511 - RNA, 32 nt, Homo Sapiens
uauucuguuuacuaucuuuaagagugagaaca

SEQ ID NO: 341512 - RNA, 32 nt, Homo Sapiens
auggaagaauaaaaugccuacacaugaaccaa

SEQ ID NO: 341513 - RNA, 32 nt, Homo Sapiens
accacugcacuccagccugggcgacagagcga

SEQ ID NO: 341514 - RNA, 32 nt, Homo Sapiens
agggaaaauuccaauggaugauuuucugggag

SEQ ID NO: 341515 - RNA, 32 nt, Homo Sapiens
auuacuccaaaauaauuaaauuuaaggcuuua

SEQ ID NO: 341516 - RNA, 32 nt, Homo Sapiens
uguuaucguuuuucauuugucuacuaauuuuc

SEQ ID NO: 341517 - RNA, 32 nt, Homo Sapiens
ugggaaccugcgccagccggcaggagacgugg

SEQ ID NO: 341518 - RNA, 32 nt, Homo Sapiens
gcaaaauugcuaaagagagaugaaccacauua

SEQ ID NO: 341519 - RNA, 32 nt, Homo Sapiens
aauacacauaucuaaaaauaguuaacacagau

SEQ ID NO: 341520 - RNA, 32 nt, Homo Sapiens
gaccaaguccaaauggauuaauccaggacaga

SEQ ID NO: 341521 - RNA, 32 nt, Homo Sapiens
acgaggaggaggaggacaugacuuuucuugcg

SEQ ID NO: 341522 - RNA, 32 nt, Homo Sapiens
ccuugugugugagacaggacgcagcgggcccc

SEQ ID NO: 341523 - RNA, 32 nt, Homo Sapiens
cgcccggccccggucuaacugcccccgccccg

SEQ ID NO: 341524 - RNA, 32 nt, Homo Sapiens
ucaugcccaagccugagcucagauccagcuug

SEQ ID NO: 341525 - RNA, 32 nt, Homo Sapiens
ucuguaugaugaugugaaagugcaauuuuucu

SEQ ID NO: 341526 - RNA, 32 nt, Homo Sapiens
cgccuguaaucucggcacuuugggagacugag

SEQ ID NO: 341527 - RNA, 32 nt, Homo Sapiens
gucuaauugagucucuuuuuuauucuguuuuc

SEQ ID NO: 341528 - RNA, 32 nt, Homo Sapiens
agcgucuggcuucggaggaaagacaagcugga

SEQ ID NO: 341529 - RNA, 32 nt, Homo Sapiens
uggggaaggagaagggucgucucuggcacgga

SEQ ID NO: 341530 - RNA, 32 nt, Homo Sapiens
augaauguaaaauguguggagauucuucuuug

SEQ ID NO: 341531 - RNA, 32 nt, Homo Sapiens
auuuuuauuaaaauggcagucuacaucauaau

SEQ ID NO: 341532 - RNA, 26 nt, Homo Sapiens
caucuaauaaaaucauuuuguauauc

SEQ ID NO: 341533 - RNA, 32 nt, Homo Sapiens
cugugucccgguccgcucuccucagcaugagc

SEQ ID NO: 341534 - RNA, 32 nt, Homo Sapiens
ucugacugguuggcugcccuggaaggcaagaa

SEQ ID NO: 341535 - RNA, 32 nt, Homo Sapiens
uuuaggaagaucugaugggcucuacagugcuu

SEQ ID NO: 341536 - RNA, 32 nt, Homo Sapiens
gcucuucccucggcugccacccgcuucugugg

SEQ ID NO: 341537 - RNA, 32 nt, Homo Sapiens
uucucucuacagaaaugauauaaaaacuauag

SEQ ID NO: 341538 - RNA, 32 nt, Homo Sapiens
uaucccaaaccuaaucuuuuuaaaagauagaa

SEQ ID NO: 341539 - RNA, 32 nt, Homo Sapiens
gcaugugcgggaaggggggugcccuggguugg

SEQ ID NO: 341540 - RNA, 32 nt, Homo Sapiens
agaggcagagcugccuggagccugcugggcug

SEQ ID NO: 341541 - RNA, 32 nt, Homo Sapiens
gauuuuaauaauauauuuuaaauauuuuuucu

SEQ ID NO: 341542 - RNA, 32 nt, Homo Sapiens
cagggcugcagguggagcugccugcgagaacg

SEQ ID NO: 341543 - RNA, 32 nt, Homo Sapiens
guaaguggaaagggcauuguguuccgugugug

SEQ ID NO: 341544 - RNA, 32 nt, Homo Sapiens
uuuaugguauaaauaaagucaauggacauugc

SEQ ID NO: 341545 - RNA, 32 nt, Homo Sapiens
guugucaagauggcggcugcaggguugcugcc

SEQ ID NO: 341546 - RNA, 32 nt, Homo Sapiens
auaagugcaauaguuguaaaucuacuugacac

SEQ ID NO: 341547 - RNA, 32 nt, Homo Sapiens
uuuuauuuuuaaaauguguaaaacaucuuuug

SEQ ID NO: 341548 - RNA, 32 nt, Homo Sapiens
cucugugaccuugaaugcaucauuuccccucu

SEQ ID NO: 341549 - RNA, 32 nt, Homo Sapiens
gguuuggggaggagggcaggcgguaggaaggg

SEQ ID NO: 341550 - RNA, 32 nt, Homo Sapiens
gggcagcagcgacaggaugcuuguuuuucgcu

SEQ ID NO: 341551 - RNA, 32 nt, Homo Sapiens
auaaaaagaaaaaacuuguucagauaugccuu

SEQ ID NO: 341552 - RNA, 27 nt, Homo Sapiens
caaagguccuucuuggcccccaugacc

SEQ ID NO: 341553 - RNA, 30 nt, Homo Sapiens
uggagcgccaggcgcgggggcucugcacac

SEQ ID NO: 341554 - RNA, 32 nt, Homo Sapiens
gagggagcgaccugcgcagggcccggggaguc

SEQ ID NO: 341555 - RNA, 32 nt, Homo Sapiens
uuguuuuauuuuauuucaacucuggcagaugu

SEQ ID NO: 341556 - RNA, 32 nt, Homo Sapiens
ugguggguggagccaggcgccggcgucuucca

SEQ ID NO: 341557 - RNA, 30 nt, Homo Sapiens
gagcguggagggccggugggucccgcucgg

SEQ ID NO: 341558 - RNA, 32 nt, Homo Sapiens
uucgcugcugucagcauaaugauuguguuccu

SEQ ID NO: 341559 - RNA, 32 nt, Homo Sapiens
auuacgaagaucugcauuguauuuuggaauuu

SEQ ID NO: 341560 - RNA, 32 nt, Homo Sapiens
gcucacccuaaaacauuuauuucaaggagaaa

SEQ ID NO: 341561 - RNA, 32 nt, Homo Sapiens
auguagaaagacucuuugguucacauuccaau

SEQ ID NO: 341562 - RNA, 32 nt, Homo Sapiens
gcgucuuccaggcugcguggacccggcgcccc

SEQ ID NO: 341563 - RNA, 32 nt, Homo Sapiens
gaaauaaaagggaaaagucagcuaguaguuug

SEQ ID NO: 341564 - RNA, 27 nt, Homo Sapiens
gcucugucaguucucagccccugugau

SEQ ID NO: 341565 - RNA, 32 nt, Homo Sapiens
gacuuucccugcuucccaccacuucccucacu

SEQ ID NO: 341566 - RNA, 32 nt, Homo Sapiens
aacaguugauucuuuuuguguuuucuacaaac

SEQ ID NO: 341567 - RNA, 32 nt, Homo Sapiens
uagaggugagagauguuaaaaguaggaagcau

SEQ ID NO: 341568 - RNA, 32 nt, Homo Sapiens
gacacgugguggcgauggggaaaggucagcag

SEQ ID NO: 341569 - RNA, 32 nt, Homo Sapiens
ccugcuauccuucgcuucccccgccccaugug

SEQ ID NO: 341570 - RNA, 32 nt, Homo Sapiens
uuugggcagggaaggcgggcgggcgggggugg

SEQ ID NO: 341571 - RNA, 32 nt, Homo Sapiens
uucuccugccucaggcucccaaguagcuggga

SEQ ID NO: 341572 - RNA, 32 nt, Homo Sapiens
ccugugccucucgcggcgaucccggcccagcg

SEQ ID NO: 341573 - RNA, 32 nt, Homo Sapiens
accucccggacggggcggcuggccgggcggag

SEQ ID NO: 341574 - RNA, 32 nt, Homo Sapiens
ccacaccgucagccucccuccccucuccaccc

SEQ ID NO: 341575 - RNA, 32 nt, Homo Sapiens
acagcuggcagagcgagagaauaugucacauu

SEQ ID NO: 341576 - RNA, 32 nt, Homo Sapiens
ugccaccugcugcugcugcugcugcuaaucuu

SEQ ID NO: 341577 - RNA, 32 nt, Homo Sapiens
gaagacgugaugauuuuuuucuuuuaaucucu

SEQ ID NO: 341578 - RNA, 32 nt, Homo Sapiens
augugaagcuuauuuauaauagcaauaaaccu

SEQ ID NO: 341579 - RNA, 29 nt, Homo Sapiens
cgggguuggggacagagcaggugcagagg

SEQ ID NO: 341580 - RNA, 32 nt, Homo Sapiens
gugagcgucagcuguugcuuuauuuuccauca

SEQ ID NO: 341581 - RNA, 32 nt, Homo Sapiens
aauuauuuuuggagcugaaaucuuuguaauau

SEQ ID NO: 341582 - RNA, 32 nt, Homo Sapiens
uucgugcccgccccgcgccccgggcaggccag

SEQ ID NO: 341583 - RNA, 32 nt, Homo Sapiens
accuggaccaaagcugacgaggcugggccaag

SEQ ID NO: 341584 - RNA, 32 nt, Homo Sapiens
uuuucgggagaaaaaaccaaaggaggugaugg

SEQ ID NO: 341585 - RNA, 32 nt, Homo Sapiens
caguuauuuuaaaaauaaaaccuaucaacucc

SEQ ID NO: 341586 - RNA, 32 nt, Homo Sapiens
gcagugaaaagcaguugaaauaccauuaguua

SEQ ID NO: 341587 - RNA, 32 nt, Homo Sapiens
uaccaccccacccugggcaucuacgcccgcug

SEQ ID NO: 341588 - RNA, 28 nt, Homo Sapiens
gugauggcaggagagcuggcugacaaaa

SEQ ID NO: 341589 - RNA, 32 nt, Homo Sapiens
ccggggcugccuuuccggacaagccccucucc

SEQ ID NO: 341590 - RNA, 32 nt, Homo Sapiens
uauguguuuguaacugugauuaugauagaggc

SEQ ID NO: 341591 - RNA, 32 nt, Homo Sapiens
uuuguuuuuguuuucuucaaaaaagcuguaag

SEQ ID NO: 341592 - RNA, 32 nt, Homo Sapiens
ucuggaaaccgcaccuuuaacuuugcagaccu

SEQ ID NO: 341593 - RNA, 32 nt, Homo Sapiens
uucuuucucuccugggggacggccgccuccuc

SEQ ID NO: 341594 - RNA, 32 nt, Homo Sapiens
gaacauauauugcuguuuacuccaguguaaaa

SEQ ID NO: 341595 - RNA, 28 nt, Homo Sapiens
ccugggcaacagagagagaccuugucuc

SEQ ID NO: 341596 - RNA, 32 nt, Homo Sapiens
gagaguaacaacuauaugaaccacguggccaa

SEQ ID NO: 341597 - RNA, 32 nt, Homo Sapiens
ccuagcccuggggugaggcaagcccccuccua

SEQ ID NO: 341598 - RNA, 32 nt, Homo Sapiens
ccagaccugccagcagaugugcccaccagggg

SEQ ID NO: 341599 - RNA, 32 nt, Homo Sapiens
aggaggggaugcucccagggcuggggcugccu

SEQ ID NO: 341600 - RNA, 32 nt, Homo Sapiens
acuuggauaaaauaaauauauaaugcucuauu

SEQ ID NO: 341601 - RNA, 32 nt, Homo Sapiens
acuccccugcuuaauaaacucuaaaaauaaga

SEQ ID NO: 341602 - RNA, 32 nt, Homo Sapiens
cagacuugggggcaggcgccagggacggacgu

SEQ ID NO: 341603 - RNA, 32 nt, Homo Sapiens
aggcggaggcuccauguuguccccucagcgag

SEQ ID NO: 341604 - RNA, 32 nt, Homo Sapiens
guggggucaaggaacaggaagcugaccuggau

SEQ ID NO: 341605 - RNA, 32 nt, Homo Sapiens
uucuagagaaacaaaagcaaggggauggguga

SEQ ID NO: 341606 - RNA, 32 nt, Homo Sapiens
caacuagccugccuuagguacguaauaucucu

SEQ ID NO: 341607 - RNA, 32 nt, Homo Sapiens
caaaaagaugacccccaggcaauucggcaauu

SEQ ID NO: 341608 - RNA, 32 nt, Homo Sapiens
cgucacugcggugucgcccacccuucuucccc

SEQ ID NO: 341609 - RNA, 32 nt, Homo Sapiens
ugaagggcggccuggggguacagccgggcacc

SEQ ID NO: 341610 - RNA, 32 nt, Homo Sapiens
uguuauuuggacaacuaaaaaacaccaaacua

SEQ ID NO: 341611 - RNA, 32 nt, Homo Sapiens
guaauaguuuuauauuguuuuauauuaacccu

SEQ ID NO: 341612 - RNA, 32 nt, Homo Sapiens
uuccacauaugcuggcugcuguuuacacaccc

SEQ ID NO: 341613 - RNA, 32 nt, Homo Sapiens
uucaugaauaaucaaagugauuuuucagaauu

SEQ ID NO: 341614 - RNA, 32 nt, Homo Sapiens
ggaugauggggucagagaucacugagcugccc

SEQ ID NO: 341615 - RNA, 32 nt, Homo Sapiens
gacuucuacuauugucuugacagggaauuuaa

SEQ ID NO: 341616 - RNA, 32 nt, Homo Sapiens
ccggacaggaggagagcagugaugcggauggg

SEQ ID NO: 341617 - RNA, 30 nt, Homo Sapiens
aggccgcgcgcgccguuagccccuuccucg

SEQ ID NO: 341618 - RNA, 32 nt, Homo Sapiens
agauacaaagugggauggaagaauuaaaucca

SEQ ID NO: 341619 - RNA, 32 nt, Homo Sapiens
gaggggcagcauggcguccgugacgcugagcg

SEQ ID NO: 341620 - RNA, 32 nt, Homo Sapiens
acgagaggggaagaguguacuggggguugcgg

SEQ ID NO: 341621 - RNA, 32 nt, Homo Sapiens
acuggcuaauguugaauaaauuagggugccuu

SEQ ID NO: 341622 - RNA, 32 nt, Homo Sapiens
ucugccuguaaauuucagcaagccguguuaga

SEQ ID NO: 341623 - RNA, 32 nt, Homo Sapiens
uuugcaauauccacuuuauaaaauagcuccug

SEQ ID NO: 341624 - RNA, 32 nt, Homo Sapiens
gugcuuucaaggaaauuugucauauucucccu

SEQ ID NO: 341625 - RNA, 32 nt, Homo Sapiens
aaaaaaaaaaaauuauuauuauacacacacac

SEQ ID NO: 341626 - RNA, 32 nt, Homo Sapiens
aggguagugucuguaacuaccgucagaucuac

SEQ ID NO: 341627 - RNA, 32 nt, Homo Sapiens
cuacuauaaaaagccaggaccauguuagaauu

SEQ ID NO: 341628 - RNA, 32 nt, Homo Sapiens
acccaucccucugguggguaccucuggcaccc

SEQ ID NO: 341629 - RNA, 32 nt, Homo Sapiens
gcuccacagacaaccccccugccugggucaga

SEQ ID NO: 341630 - RNA, 32 nt, Homo Sapiens
agagcgggaaaggacugcagccggggagagca

SEQ ID NO: 341631 - RNA, 32 nt, Homo Sapiens
ccaauggacuccugccagcccaucgcagaguu

SEQ ID NO: 341632 - RNA, 32 nt, Homo Sapiens
agcggcuuucacccugggcugcggcucugagg

SEQ ID NO: 341633 - RNA, 32 nt, Homo Sapiens
agaauucuagaaguuuacuucuaaucaugucc

SEQ ID NO: 341634 - RNA, 32 nt, Homo Sapiens
uuuaaagccaaggugcgauuugggcaccugac

SEQ ID NO: 341635 - RNA, 32 nt, Homo Sapiens
cuguguggaaucuuccccacuccaucccuccc

SEQ ID NO: 341636 - RNA, 28 nt, Homo Sapiens
aagaugaaggauauuggacagcagcuau

SEQ ID NO: 341637 - RNA, 32 nt, Homo Sapiens
gggcuccagucgcugcucuugcuggcguccau

SEQ ID NO: 341638 - RNA, 31 nt, Homo Sapiens
gaacaguuaaaauaaacuauuguacauucuu

SEQ ID NO: 341639 - RNA, 32 nt, Homo Sapiens
uuacagcucuccaugaugccucagagagcugg

SEQ ID NO: 341640 - RNA, 32 nt, Homo Sapiens
auggcuuggguugggauuuugguuucuuccuu

SEQ ID NO: 341641 - RNA, 32 nt, Homo Sapiens
caaaccgaaggauuucugaggaccuaaaucac

SEQ ID NO: 341642 - RNA, 32 nt, Homo Sapiens
cuuugcugucccccggccucuaguuccccgca

SEQ ID NO: 341643 - RNA, 32 nt, Homo Sapiens
uccaaguggcuaaaaacgcaacuuuuaaauaa

SEQ ID NO: 341644 - RNA, 32 nt, Homo Sapiens
aaaugaaagagaugauguagauuuuucggaug

SEQ ID NO: 341645 - RNA, 32 nt, Homo Sapiens
ucuuggggccuuccccagcccuggacacagcc

SEQ ID NO: 341646 - RNA, 32 nt, Homo Sapiens
ugcgacguguggagaguuggggaccagggugu

SEQ ID NO: 341647 - RNA, 32 nt, Homo Sapiens
ugcccagagagagaccugcugcugcagagcag

SEQ ID NO: 341648 - RNA, 32 nt, Homo Sapiens
aguuuacuuuuguuccuguuguuuguaaacua

SEQ ID NO: 341649 - RNA, 32 nt, Homo Sapiens
ugugugcgcgcgcgacgcgcgagugugcugua

SEQ ID NO: 341650 - RNA, 32 nt, Homo Sapiens
agguguuuuuuaugaagugcgugaauguaugu

SEQ ID NO: 341651 - RNA, 32 nt, Homo Sapiens
guuaacugaauaggaaaauguacauacuaugu

SEQ ID NO: 341652 - RNA, 32 nt, Homo Sapiens
cagaggaaaccaaaagcaauaagagggaggga

SEQ ID NO: 341653 - RNA, 32 nt, Homo Sapiens
cacgccucaguccgccugcgcuccucagccug

SEQ ID NO: 341654 - RNA, 32 nt, Homo Sapiens
gcagaaacaaucuacauguauaucauagcucc

SEQ ID NO: 341655 - RNA, 32 nt, Homo Sapiens
acgaggucaggagaucgagaccauccuggcga

SEQ ID NO: 341656 - RNA, 32 nt, Homo Sapiens
acccugggagggcugcugcugcuccugccaac

SEQ ID NO: 341657 - RNA, 32 nt, Homo Sapiens
uuugaaaguugauuggaccacuguggaugggg

SEQ ID NO: 341658 - RNA, 32 nt, Homo Sapiens
ugaugagaauuuuagaugugggaaaacaccua

SEQ ID NO: 341659 - RNA, 32 nt, Homo Sapiens
uuauaccuugcaauuccauuucugggauuuua

SEQ ID NO: 341660 - RNA, 32 nt, Homo Sapiens
ccagucggcaccugguggcuggaagccacccu

SEQ ID NO: 341661 - RNA, 32 nt, Homo Sapiens
ggguuggggggccuuccuggagugucaggguc

SEQ ID NO: 341662 - RNA, 32 nt, Homo Sapiens
gccuggggcggcaccccagcccugcccuugcu

SEQ ID NO: 341663 - RNA, 32 nt, Homo Sapiens
caaccccccacagauacggggacaacuuuaug

SEQ ID NO: 341664 - RNA, 32 nt, Homo Sapiens
gccagaugaguauguuuaaguggagagugcuu

SEQ ID NO: 341665 - RNA, 32 nt, Homo Sapiens
accagcaggaggaagucccagggccgcgaagc

SEQ ID NO: 341666 - RNA, 32 nt, Homo Sapiens
ucuucggcgcccgagaagcagcagccaccgca

SEQ ID NO: 341667 - RNA, 32 nt, Homo Sapiens
ucauaauugcagugacaggacauugccaccaa

SEQ ID NO: 341668 - RNA, 32 nt, Homo Sapiens
caauguuuugaaaauaaugaucucagacuuuc

SEQ ID NO: 341669 - RNA, 32 nt, Homo Sapiens
uccuuuuaccuuuuuuuuuucuugguaauccc

SEQ ID NO: 341670 - RNA, 32 nt, Homo Sapiens
uuauuggguuuccuuuuauauucuugguuugu

SEQ ID NO: 341671 - RNA, 32 nt, Homo Sapiens
ucgcagccaugccguccaagggcccgcugcaa

SEQ ID NO: 341672 - RNA, 32 nt, Homo Sapiens
uguucccacgcggcacgugagaugcauugccg

SEQ ID NO: 341673 - RNA, 32 nt, Homo Sapiens
ucauguuuuuucugguguggaucuuugauaag

SEQ ID NO: 341674 - RNA, 32 nt, Homo Sapiens
uucuuucuugucaugcacagcugcugaggaag

SEQ ID NO: 341675 - RNA, 32 nt, Homo Sapiens
caacagcugagugcgggcgccggcgccgucua

SEQ ID NO: 341676 - RNA, 32 nt, Homo Sapiens
agacuaaggcaguagcucaaagggcuuugcaa

SEQ ID NO: 341677 - RNA, 32 nt, Homo Sapiens
ccuugagcuggguugauugaggaugugugaaa

SEQ ID NO: 341678 - RNA, 32 nt, Homo Sapiens
uaccauauuuacauauugauaaugucauuggu

SEQ ID NO: 341679 - RNA, 32 nt, Homo Sapiens
ccccacggcugccagaauguucccugagccca

SEQ ID NO: 341680 - RNA, 32 nt, Homo Sapiens
cgccccggccgcucagcccccgggcacugcug

SEQ ID NO: 341681 - RNA, 32 nt, Homo Sapiens
uagaugaaaaaauuauuuguagauaggauaau

SEQ ID NO: 341682 - RNA, 32 nt, Homo Sapiens
gauggcuacaccucaauuuaagaugggguauu

SEQ ID NO: 341683 - RNA, 32 nt, Homo Sapiens
uccuaacauccacagugucugcuggucguggu

SEQ ID NO: 341684 - RNA, 32 nt, Homo Sapiens
cucuacaaaaaauuaaaaaauuagccgggcgu

SEQ ID NO: 341685 - RNA, 32 nt, Homo Sapiens
ccgaggcgcaccugcuggcucuuguguguggc

SEQ ID NO: 341686 - RNA, 32 nt, Homo Sapiens
auccgaccgcgucgcugccgcucugcucucuc

SEQ ID NO: 341687 - RNA, 32 nt, Homo Sapiens
guggagagaauuaaccauugauaccuccuggc

SEQ ID NO: 341688 - RNA, 32 nt, Homo Sapiens
auggcacuuggaguauuaaaaaaggaauguga

SEQ ID NO: 341689 - RNA, 32 nt, Homo Sapiens
gcggcgcgccuggguaacaugcuugggguccu

SEQ ID NO: 341690 - RNA, 32 nt, Homo Sapiens
ugagcgaggaggcgguucgggcgaagagcggc

SEQ ID NO: 341691 - RNA, 31 nt, Homo Sapiens
uuggcacccagggcaacuggaguccauccug

SEQ ID NO: 341692 - RNA, 32 nt, Homo Sapiens
agaauuaauuuauggcacuuagaaaucacaga

SEQ ID NO: 341693 - RNA, 32 nt, Homo Sapiens
agacauuauuucauuggacuguucccaggccc

SEQ ID NO: 341694 - RNA, 32 nt, Homo Sapiens
gacucaacccugcuccucccgguaggccagcu

SEQ ID NO: 341695 - RNA, 32 nt, Homo Sapiens
ggaaggaggccaggguccgcgcggcuugggca

SEQ ID NO: 341696 - RNA, 29 nt, Homo Sapiens
aagaaaaaguuucuauauuuuguauuugu

SEQ ID NO: 341697 - RNA, 32 nt, Homo Sapiens
acgguuggagacagcucggccaggccugcccg

SEQ ID NO: 341698 - RNA, 32 nt, Homo Sapiens
ucacuuucuauuaaacauucugauguccaguu

SEQ ID NO: 341699 - RNA, 32 nt, Homo Sapiens
cuuucuucauugaacaaauggugccauaguua

SEQ ID NO: 341700 - RNA, 32 nt, Homo Sapiens
cacagaaagaaaacuacagaccucaagauucc

SEQ ID NO: 341701 - RNA, 30 nt, Homo Sapiens
gaggcccacggucuccugggucccggccac

SEQ ID NO: 341702 - RNA, 32 nt, Homo Sapiens
ugaauguguggacuuuuagaggaucaaaucaa

SEQ ID NO: 341703 - RNA, 32 nt, Homo Sapiens
gauaauuucuuaaaccacauuguuuuaauuga

SEQ ID NO: 341704 - RNA, 32 nt, Homo Sapiens
ccuucaucaguuccaaauucacacgaaaaauc

SEQ ID NO: 341705 - RNA, 32 nt, Homo Sapiens
cccgggagcccagggcuguccucggugcaucc

SEQ ID NO: 341706 - RNA, 32 nt, Homo Sapiens
ggucuuccuccccaucuuuccauccuuccugc

SEQ ID NO: 341707 - RNA, 32 nt, Homo Sapiens
cggaagcuagcauggcggccgccggggcugcg

SEQ ID NO: 341708 - RNA, 32 nt, Homo Sapiens
gacuugagucuuucuuuuucuguuuugaguug

SEQ ID NO: 341709 - RNA, 32 nt, Homo Sapiens
ccccccagcucccacaccgcgucccagcuccc

SEQ ID NO: 341710 - RNA, 32 nt, Homo Sapiens
ucgugucacugccaguuucugcggcugaagcc

SEQ ID NO: 341711 - RNA, 32 nt, Homo Sapiens
uuaguuuaauuuucuaaagaguuguuuaauag

SEQ ID NO: 341712 - RNA, 32 nt, Homo Sapiens
ugcccuugaaagaaaagucacuuuuuguggag

SEQ ID NO: 341713 - RNA, 32 nt, Homo Sapiens
gacaaaauauauuuauaacuacguauuaaaag

SEQ ID NO: 341714 - RNA, 32 nt, Homo Sapiens
aguuaagccuaccugauaaagaagcacgcuua

SEQ ID NO: 341715 - RNA, 32 nt, Homo Sapiens
agugagccaagaucgugccaaugcacuccauc

SEQ ID NO: 341716 - RNA, 32 nt, Homo Sapiens
aaaauacaacuaucagaaaauauaugucauag

SEQ ID NO: 341717 - RNA, 32 nt, Homo Sapiens
ggcagcucgugugccuggcccgagcccugcuc

SEQ ID NO: 341718 - RNA, 32 nt, Homo Sapiens
uguuaugaaaauuuauaacauaaagcuuaaug

SEQ ID NO: 341719 - RNA, 32 nt, Homo Sapiens
ccuaccaugcaaauacacagauuaugccaaga

SEQ ID NO: 341720 - RNA, 32 nt, Homo Sapiens
gcucugcggacagcucggggcccggcagcgug

SEQ ID NO: 341721 - RNA, 32 nt, Homo Sapiens
ucagagggucgggggaggcauuccuuccugug

SEQ ID NO: 341722 - RNA, 32 nt, Homo Sapiens
cagccucccugccccacccaucccugcaaagc

SEQ ID NO: 341723 - RNA, 32 nt, Homo Sapiens
gcagaagagaaaguacaaccacuaucuuuugu

SEQ ID NO: 341724 - RNA, 32 nt, Homo Sapiens
gcgauucuuuugccucagccaccugacuagcu

SEQ ID NO: 341725 - RNA, 32 nt, Homo Sapiens
gagcccagccccaccccacauacucagauccc

SEQ ID NO: 341726 - RNA, 32 nt, Homo Sapiens
gucagggggaaggaaacguugacuuucacugc

SEQ ID NO: 341727 - RNA, 32 nt, Homo Sapiens
caguuauuaacacaauauuccuuaguuuucau

SEQ ID NO: 341728 - RNA, 32 nt, Homo Sapiens
uugucugaugacccaaacugcccaugucauuu

SEQ ID NO: 341729 - RNA, 32 nt, Homo Sapiens
accccugcugucaucuguuuucauagugugag

SEQ ID NO: 341730 - RNA, 32 nt, Homo Sapiens
caauauacagaauugaauacuguagaauucug

SEQ ID NO: 341731 - RNA, 32 nt, Homo Sapiens
guguccagcggccaagcuuaagccaugaaguc

SEQ ID NO: 341732 - RNA, 32 nt, Homo Sapiens
gggguagaaaaauuauuucuuuauguaguaga

SEQ ID NO: 341733 - RNA, 32 nt, Homo Sapiens
caucgccucugucuccuccgugucucgcgcga

SEQ ID NO: 341734 - RNA, 32 nt, Homo Sapiens
aaaaaccuauucauaaguuuuacaaucaagua

SEQ ID NO: 341735 - RNA, 32 nt, Homo Sapiens
aaacaaagaugaugauaauguuuucagcagca

SEQ ID NO: 341736 - RNA, 32 nt, Homo Sapiens
cugagcccagcagaagcagcacaagaccccca

SEQ ID NO: 341737 - RNA, 32 nt, Homo Sapiens
ugcagccucugcuggagugaaacaggaugcuu

SEQ ID NO: 341738 - RNA, 32 nt, Homo Sapiens
auaccauauacauaagggaagagaggaggaug

SEQ ID NO: 341739 - RNA, 32 nt, Homo Sapiens
aauuagcucccuccuccucaccuacuccacuc

SEQ ID NO: 341740 - RNA, 32 nt, Homo Sapiens
aaauccaggugucaagaauccuaggaucugug

SEQ ID NO: 341741 - RNA, 32 nt, Homo Sapiens
aaaugaagaaacugaggcucagagggagaaag

SEQ ID NO: 341742 - RNA, 32 nt, Homo Sapiens
augagacaucaaucaauauauuuaagaaguac

SEQ ID NO: 341743 - RNA, 32 nt, Homo Sapiens
gaugguccacacgucucuccaacugcuguuuc

SEQ ID NO: 341744 - RNA, 32 nt, Homo Sapiens
cgcccccagcccccagccccagcagucagcgc

SEQ ID NO: 341745 - RNA, 32 nt, Homo Sapiens
cacuuggaaaacuccaaggggguguggcuucc

SEQ ID NO: 341746 - RNA, 32 nt, Homo Sapiens
ccacuggcuccacugagggcgccuaacucuac

SEQ ID NO: 341747 - RNA, 32 nt, Homo Sapiens
gggauucgagcuuucuuuuuuauuuaaauaaa

SEQ ID NO: 341748 - RNA, 30 nt, Homo Sapiens
ggcugguggggcggugcggaagcgagaggc

SEQ ID NO: 341749 - RNA, 32 nt, Homo Sapiens
uuuccccucccgucuuccuccuccccuggcaa

SEQ ID NO: 341750 - RNA, 32 nt, Homo Sapiens
uacguggcccuccugcgagucagugagugucu

SEQ ID NO: 341751 - RNA, 32 nt, Homo Sapiens
ccacccccacccaagauggagucuggcuuugu

SEQ ID NO: 341752 - RNA, 32 nt, Homo Sapiens
gaccaguaaaauuuauuuuguaauaccaaaua

SEQ ID NO: 341753 - RNA, 32 nt, Homo Sapiens
caggcgggcggcgaugagagggggcgcagccg

SEQ ID NO: 341754 - RNA, 32 nt, Homo Sapiens
guagcaguggauguuagccugcaaacaacauu

SEQ ID NO: 341755 - RNA, 32 nt, Homo Sapiens
uccaacugccagcacccugccauugcccagac

SEQ ID NO: 341756 - RNA, 32 nt, Homo Sapiens
ugucucuaaucccagcacuuugggagacugag

SEQ ID NO: 341757 - RNA, 32 nt, Homo Sapiens
cugugcuuuacuaagauggccucagucuccac

SEQ ID NO: 341758 - RNA, 32 nt, Homo Sapiens
ccuauugcaaaaauaaaaucuuuuuauaauau

SEQ ID NO: 341759 - RNA, 32 nt, Homo Sapiens
augcccaucagcuaaugaauagauaaacaaaa

SEQ ID NO: 341760 - RNA, 32 nt, Homo Sapiens
cagcggcacagcgaggucggcagcggcacagc

SEQ ID NO: 341761 - RNA, 32 nt, Homo Sapiens
gguggggucauagggucacuucaccugaccca

SEQ ID NO: 341762 - RNA, 32 nt, Homo Sapiens
cccaaacauauuugacuuuuuauuuucagaaa

SEQ ID NO: 341763 - RNA, 32 nt, Homo Sapiens
cggaaucuuagguauacagauuuugauacuuu

SEQ ID NO: 341764 - RNA, 32 nt, Homo Sapiens
ugaagugacgauggcugggggcccguuugaag

SEQ ID NO: 341765 - RNA, 32 nt, Homo Sapiens
gagagggaacauuugggguuggaagccugugc

SEQ ID NO: 341766 - RNA, 32 nt, Homo Sapiens
gcuuuuguccuguuauuuuuuauuuccacaua

SEQ ID NO: 341767 - RNA, 32 nt, Homo Sapiens
auuuuuacacugucuuauuauagagaaguaau

SEQ ID NO: 341768 - RNA, 32 nt, Homo Sapiens
cauuuuucacucugauuuuuuauuucuuguau

SEQ ID NO: 341769 - RNA, 32 nt, Homo Sapiens
ucagaaaaauucaaaacaaauguggauuaagu

SEQ ID NO: 341770 - RNA, 32 nt, Homo Sapiens
ggcggagcccgcccgcgccucccgcggcauuc

SEQ ID NO: 341771 - RNA, 32 nt, Homo Sapiens
acacugaggggaggcagugagacuguaagcag

SEQ ID NO: 341772 - RNA, 32 nt, Homo Sapiens
ucguuuuuauuccuccucucccagauuggcuc

SEQ ID NO: 341773 - RNA, 32 nt, Homo Sapiens
uaaauggaaaaauuauguacaacuuagagcuc

SEQ ID NO: 341774 - RNA, 32 nt, Homo Sapiens
agcccgccucggccgccgcgggagcgguucga

SEQ ID NO: 341775 - RNA, 32 nt, Homo Sapiens
agagauauuucuggaccacucaagcucuucga

SEQ ID NO: 341776 - RNA, 32 nt, Homo Sapiens
aaguaaauuacaaacaaacaaacaaagcagaa

SEQ ID NO: 341777 - RNA, 32 nt, Homo Sapiens
ucuaaauguauuuguaaugauacaauuguuua

SEQ ID NO: 341778 - RNA, 32 nt, Homo Sapiens
gacauuugcacugacuguuuccucugccugga

SEQ ID NO: 341779 - RNA, 32 nt, Homo Sapiens
cggagguagagcucauugaucaaacgcucugu

SEQ ID NO: 341780 - RNA, 32 nt, Homo Sapiens
acaucuguuuuaguauaacaaacaauugaaac

SEQ ID NO: 341781 - RNA, 32 nt, Homo Sapiens
auauuauuauuuuuuucuuagcuuuuucuuuc

SEQ ID NO: 341782 - RNA, 32 nt, Homo Sapiens
cagaccccaucccuucuccuuuuccuuugugg

SEQ ID NO: 341783 - RNA, 32 nt, Homo Sapiens
guuagccaggauggucccaaucuccugaccuu

SEQ ID NO: 341784 - RNA, 32 nt, Homo Sapiens
accgcggagaccccccucgcccggccccgcga

SEQ ID NO: 341785 - RNA, 32 nt, Homo Sapiens
uagcugaguuaaaugccuggacucuccccugg

SEQ ID NO: 341786 - RNA, 32 nt, Homo Sapiens
uggcaccgucuguguccccucggccgcuggac

SEQ ID NO: 341787 - RNA, 32 nt, Homo Sapiens
ucucuucccagcugcagaugccacaccugcuc

SEQ ID NO: 341788 - RNA, 32 nt, Homo Sapiens
caguuagagaauaaaugggauuugcaugaacu

SEQ ID NO: 341789 - RNA, 32 nt, Homo Sapiens
gaaaacaggggauccuuggagaggggaggauu

SEQ ID NO: 341790 - RNA, 32 nt, Homo Sapiens
uggggcuccgagucccuuccucuccccguccu

SEQ ID NO: 341791 - RNA, 32 nt, Homo Sapiens
cuggccgcaccucgaggugccagcagacaaag

SEQ ID NO: 341792 - RNA, 32 nt, Homo Sapiens
agaucagccacuuuuaaggugcugucauauau

SEQ ID NO: 341793 - RNA, 32 nt, Homo Sapiens
ggccugagauaaaacugagcagggugggacca

SEQ ID NO: 341794 - RNA, 32 nt, Homo Sapiens
uccccgaggaaaccggccgcccacgcccggag

SEQ ID NO: 341795 - RNA, 32 nt, Homo Sapiens
gaguaguugcuuacgugaagcucaagauaccu

SEQ ID NO: 341796 - RNA, 32 nt, Homo Sapiens
auagcaacguaccuucaccccagccacaugcc

SEQ ID NO: 341797 - RNA, 32 nt, Homo Sapiens
cggagggcgcagaugucccacugcacagcugg

SEQ ID NO: 341798 - RNA, 32 nt, Homo Sapiens
gaagugguuuuugaacugucaaacuuugaccu

SEQ ID NO: 341799 - RNA, 32 nt, Homo Sapiens
uaacggcagugccucaggaaaagcaggugaua

SEQ ID NO: 341800 - RNA, 32 nt, Homo Sapiens
gaagagacuguggaguuugauguuguugaagg

SEQ ID NO: 341801 - RNA, 32 nt, Homo Sapiens
cgugaaagaacagaagggcaucuguggcauau

SEQ ID NO: 341802 - RNA, 31 nt, Homo Sapiens
cuccugaggcacccccugccccugcccccca

SEQ ID NO: 341803 - RNA, 32 nt, Homo Sapiens
auaggacgucccgcacuugucacaguacagcu

SEQ ID NO: 341804 - RNA, 32 nt, Homo Sapiens
auuuaaagauuucugagcuauuuucagaccua

SEQ ID NO: 341805 - RNA, 32 nt, Homo Sapiens
ucgcgcgccggcccgcgucugcugagcccuga

SEQ ID NO: 341806 - RNA, 32 nt, Homo Sapiens
uaaccgcacugacuuugcccacucaacacuuc

SEQ ID NO: 341807 - RNA, 32 nt, Homo Sapiens
uuucaaauuuacaucaaagauaccugaagugu

SEQ ID NO: 341808 - RNA, 32 nt, Homo Sapiens
uauuuguacuugaguucuuguccuucuaccau

SEQ ID NO: 341809 - RNA, 32 nt, Homo Sapiens
gaggugguaagggacguccaguccucagguga

SEQ ID NO: 341810 - RNA, 32 nt, Homo Sapiens
agccuccugccagugaacggccaccauagcaa

SEQ ID NO: 341811 - RNA, 32 nt, Homo Sapiens
uaaaacaaaugcuguuaaaucaccuuaugcgu

SEQ ID NO: 341812 - RNA, 32 nt, Homo Sapiens
uuguagucauauuguaaauauuuuuguaccuu

SEQ ID NO: 341813 - RNA, 32 nt, Homo Sapiens
gugguucguccugucucagugaaacagcagcc

SEQ ID NO: 341814 - RNA, 32 nt, Homo Sapiens
ccuccgcccaaguugaagucugaaucacugcu

SEQ ID NO: 341815 - RNA, 32 nt, Homo Sapiens
acggggcuaucaucuuucuccuccucugcuaa

SEQ ID NO: 341816 - RNA, 32 nt, Homo Sapiens
acagaacucucucuccuuccuuccaccuguca

SEQ ID NO: 341817 - RNA, 32 nt, Homo Sapiens
auagucacauucacagggacagaaaguagacc

SEQ ID NO: 341818 - RNA, 32 nt, Homo Sapiens
auacgaacaacgaguuuugugguguuuuaacu

SEQ ID NO: 341819 - RNA, 32 nt, Homo Sapiens
uuacuuaaugaaauguuaaagccaauuaaaaa

SEQ ID NO: 341820 - RNA, 32 nt, Homo Sapiens
gcuccugugugagcugcagcacccacacgggg

SEQ ID NO: 341821 - RNA, 32 nt, Homo Sapiens
aagacuuuuuauuguguuuaauccucauccuu

SEQ ID NO: 341822 - RNA, 32 nt, Homo Sapiens
aggaaauuucuagauauagaaacuaaaggacu

SEQ ID NO: 341823 - RNA, 32 nt, Homo Sapiens
ggagcuuuuuaaaauuauguuauuaaucuuuu

SEQ ID NO: 341824 - RNA, 32 nt, Homo Sapiens
gggggagcagcugagggaaagggaauuuaauu

SEQ ID NO: 341825 - RNA, 32 nt, Homo Sapiens
uuguuugggguuuggaagugucugcacugggg

SEQ ID NO: 341826 - RNA, 32 nt, Homo Sapiens
uuguuuuguuuuuauuugccauauaucauccu

SEQ ID NO: 341827 - RNA, 32 nt, Homo Sapiens
uuaguuggccccaguaauucuccuuggaggac

SEQ ID NO: 341828 - RNA, 32 nt, Homo Sapiens
cuuguuacagaaaagugauaggaugaaagguc

SEQ ID NO: 341829 - RNA, 32 nt, Homo Sapiens
uucuauucaggccuuuaagugauuggaugagg

SEQ ID NO: 341830 - RNA, 32 nt, Homo Sapiens
gggccggggcgccgcguccgcaggaagaggcg

SEQ ID NO: 341831 - RNA, 32 nt, Homo Sapiens
gggaggcagcuguccuccccagcccuguggaa

SEQ ID NO: 341832 - RNA, 32 nt, Homo Sapiens
gaggcgggaggaugaaguugauugacuauggu

SEQ ID NO: 341833 - RNA, 32 nt, Homo Sapiens
acggcaggcaagcccccugugcuccucgcugg

SEQ ID NO: 341834 - RNA, 32 nt, Homo Sapiens
ggaaauaauuaucuuagaauauuuucaaagua

SEQ ID NO: 341835 - RNA, 32 nt, Homo Sapiens
uuucuucuuuugcaaaugccacucgacugccu

SEQ ID NO: 341836 - RNA, 32 nt, Homo Sapiens
aaauuuguagcaucugauacaaagccagagac

SEQ ID NO: 341837 - RNA, 32 nt, Homo Sapiens
agggaggggcuuugugauaacuacucccagcu

SEQ ID NO: 341838 - RNA, 32 nt, Homo Sapiens
gcucgcuccucaccucuccgccgcccgccccc

SEQ ID NO: 341839 - RNA, 32 nt, Homo Sapiens
agcuucauguucagaagcuccugcugggcucc

SEQ ID NO: 341840 - RNA, 32 nt, Homo Sapiens
cagcaaagggaagauauugaaaggcaaaggaa

SEQ ID NO: 341841 - RNA, 32 nt, Homo Sapiens
ucuucuucuuauugauuucaaguuuuauucca

SEQ ID NO: 341842 - RNA, 32 nt, Homo Sapiens
cuugcgaaccgaagggccucgcaguggaugga

SEQ ID NO: 341843 - RNA, 32 nt, Homo Sapiens
auaaaauguguaauuuuguuuauauuuuccca

SEQ ID NO: 341844 - RNA, 32 nt, Homo Sapiens
ugaggcgccugcacagcguggagcgcuacgac

SEQ ID NO: 341845 - RNA, 32 nt, Homo Sapiens
acacuuguauaaauacauggauauuuuuaugu

SEQ ID NO: 341846 - RNA, 32 nt, Homo Sapiens
uucucccuuuuggaaugggaacaucuauccua

SEQ ID NO: 341847 - RNA, 32 nt, Homo Sapiens
uuaacucuuucugcuucccauagcaggucugg

SEQ ID NO: 341848 - RNA, 32 nt, Homo Sapiens
cgugucuuauuuuuaugcagcucauuuuuucu

SEQ ID NO: 341849 - RNA, 32 nt, Homo Sapiens
uaauauuuuugggauuauacuuccuuucugua

SEQ ID NO: 341850 - RNA, 32 nt, Homo Sapiens
uucccaucuccucgccucccccaggucuuuca

SEQ ID NO: 341851 - RNA, 32 nt, Homo Sapiens
ggcuaaauuuuuguuguugucguugagauaca

SEQ ID NO: 341852 - RNA, 32 nt, Homo Sapiens
uaauggccguguuacuuucagaucuuucagcu

SEQ ID NO: 341853 - RNA, 32 nt, Homo Sapiens
gagauaauggaguggggaugacuguggcaaac

SEQ ID NO: 341854 - RNA, 32 nt, Homo Sapiens
aucuuuuuacuuugcaauagauuuguacuaac

SEQ ID NO: 341855 - RNA, 32 nt, Homo Sapiens
gggaagccaucccagccuuuaccacccaaugu

SEQ ID NO: 341856 - RNA, 32 nt, Homo Sapiens
ccugcauacucugaucacuacucuguuaaaca

SEQ ID NO: 341857 - RNA, 32 nt, Homo Sapiens
acaaguccuuuucacagcaccauucucagaac

SEQ ID NO: 341858 - RNA, 32 nt, Homo Sapiens
cugugauggacauuuguuuaguaaaucccuuc

SEQ ID NO: 341859 - RNA, 32 nt, Homo Sapiens
uuuccaucagugaagaaucaaccggaccuguu

SEQ ID NO: 341860 - RNA, 32 nt, Homo Sapiens
cuggcucugcggguugcugaugagauggaccu

SEQ ID NO: 341861 - RNA, 32 nt, Homo Sapiens
ugcuaaaugcuguuucaguaugaucagaacuu

SEQ ID NO: 341862 - RNA, 32 nt, Homo Sapiens
uccauguccuucccucccccaccccgccucau

SEQ ID NO: 341863 - RNA, 32 nt, Homo Sapiens
cugaaaagacccuacuacacacaggggcucug

SEQ ID NO: 341864 - RNA, 32 nt, Homo Sapiens
ugguuguugcccuagucuguugguagaaccag

SEQ ID NO: 341865 - RNA, 29 nt, Homo Sapiens
uuuguuuuauaccaauaccaaaaauucuc

SEQ ID NO: 341866 - RNA, 32 nt, Homo Sapiens
uuucugaguguuuuccucuuuuucugugugag

SEQ ID NO: 341867 - RNA, 32 nt, Homo Sapiens
caaaauccaauccauaagcuuaccacccaaga

SEQ ID NO: 341868 - RNA, 30 nt, Homo Sapiens
gcccagcgcaggcgcacgggcgucaggaug

SEQ ID NO: 341869 - RNA, 32 nt, Homo Sapiens
ggaaccugggaggggagggaacacugggguuu

SEQ ID NO: 341870 - RNA, 32 nt, Homo Sapiens
cuccucgcuugaaugauucagggucagggagg

SEQ ID NO: 341871 - RNA, 32 nt, Homo Sapiens
gucuggggccggcgccugggagggaucugcgc

SEQ ID NO: 341872 - RNA, 32 nt, Homo Sapiens
uaacagacaaaauaaacuuacucuaguuucca

SEQ ID NO: 341873 - RNA, 31 nt, Homo Sapiens
uuagcucauuugagauaaagucaaaugccaa

SEQ ID NO: 341874 - RNA, 32 nt, Homo Sapiens
guggugggaagaccuggcuuccgcgagagccu

SEQ ID NO: 341875 - RNA, 32 nt, Homo Sapiens
ccugcccccggggcagcuuucaggacuguuug

SEQ ID NO: 341876 - RNA, 32 nt, Homo Sapiens
agccaguguccccagagcugcuuguggguuuc

SEQ ID NO: 341877 - RNA, 32 nt, Homo Sapiens
ccccgucuuccggcugcccugaacgucaggcg

SEQ ID NO: 341878 - RNA, 32 nt, Homo Sapiens
uuuacuggaaacugaggcgucaagauggcugu

SEQ ID NO: 341879 - RNA, 31 nt, Homo Sapiens
caccacaggcccuuuccucaggcaaggucug

SEQ ID NO: 341880 - RNA, 32 nt, Homo Sapiens
gaauggcgcuggcccgcggcgcugcgcuggca

SEQ ID NO: 341881 - RNA, 32 nt, Homo Sapiens
ucucuucucguuggcucccucgaccugcuauc

SEQ ID NO: 341882 - RNA, 32 nt, Homo Sapiens
gccccagcugcgguuguccgcucuggggauca

SEQ ID NO: 341883 - RNA, 32 nt, Homo Sapiens
gugcuugagacuuagguacuuuucucacgugg

SEQ ID NO: 341884 - RNA, 32 nt, Homo Sapiens
cacucccgagggugccgcgagcccaggcggcg

SEQ ID NO: 341885 - RNA, 32 nt, Homo Sapiens
gcagaaaauuuaggaacaaaggucacagggag

SEQ ID NO: 341886 - RNA, 32 nt, Homo Sapiens
gaggcugaaauauuuauccgcuggcuccuguu

SEQ ID NO: 341887 - RNA, 32 nt, Homo Sapiens
auacacuccuucccuuccacugcugcagaccu

SEQ ID NO: 341888 - RNA, 32 nt, Homo Sapiens
agcagcaauugaagaugugucuggagacacug

SEQ ID NO: 341889 - RNA, 32 nt, Homo Sapiens
cauuuuaagcauaauuaauuuggacauuauuu

SEQ ID NO: 341890 - RNA, 32 nt, Homo Sapiens
uauccuaccuauuguuuuuuuaaucaacuuaa

SEQ ID NO: 341891 - RNA, 31 nt, Homo Sapiens
ucuccucccaccggccugcccuuccccgcgg

SEQ ID NO: 341892 - RNA, 32 nt, Homo Sapiens
uugauuauuuaguauguuuauguuucaugaca

SEQ ID NO: 341893 - RNA, 32 nt, Homo Sapiens
cauaauuauaaucaaaauuaguuuuauugaug

SEQ ID NO: 341894 - RNA, 32 nt, Homo Sapiens
gaacuuacaucacaaaccaaccccaaagcuag

SEQ ID NO: 341895 - RNA, 32 nt, Homo Sapiens
gccgcagucuccagaacccaugaugaacugug

SEQ ID NO: 341896 - RNA, 32 nt, Homo Sapiens
augcaacuuggaaaacuguuaguaauaaauuu

SEQ ID NO: 341897 - RNA, 32 nt, Homo Sapiens
ggagggugguaccgaucaggaacgcuuuuugg

SEQ ID NO: 341898 - RNA, 32 nt, Homo Sapiens
gaaggcuuggaaagaggcaugugaagagcuuu

SEQ ID NO: 341899 - RNA, 32 nt, Homo Sapiens
cuuauucugaugcagauggucaggaugguggu

SEQ ID NO: 341900 - RNA, 32 nt, Homo Sapiens
ucuugcuucuaaaacauauuucauguaaacau

SEQ ID NO: 341901 - RNA, 32 nt, Homo Sapiens
accccugggaugcagccugccuuuccauaaag

SEQ ID NO: 341902 - RNA, 32 nt, Homo Sapiens
gccagcugcccccuuccagccccuccaggacc

SEQ ID NO: 341903 - RNA, 32 nt, Homo Sapiens
acacguaugaccucagaaacacagcuggacac

SEQ ID NO: 341904 - RNA, 30 nt, Homo Sapiens
aguagggagaagcucuaagagcugaugcag

SEQ ID NO: 341905 - RNA, 32 nt, Homo Sapiens
auuuaaaaaaauuuuaaaggguugaaaaaagu

SEQ ID NO: 341906 - RNA, 32 nt, Homo Sapiens
uuccugcccgccagaugcugccugcacuuccg

SEQ ID NO: 341907 - RNA, 32 nt, Homo Sapiens
gccucuaaaaauuuaguuauugaagaacugaa

SEQ ID NO: 341908 - RNA, 32 nt, Homo Sapiens
ugaacauuggggauugaaaaucauauugguau

SEQ ID NO: 341909 - RNA, 32 nt, Homo Sapiens
cgccgccguugcugcccggcccggagagauga

SEQ ID NO: 341910 - RNA, 32 nt, Homo Sapiens
gggugaacgaggaugaggcaucugaucuauuc

SEQ ID NO: 341911 - RNA, 32 nt, Homo Sapiens
ggucaggaugccugggucucuucccguaacug

SEQ ID NO: 341912 - RNA, 32 nt, Homo Sapiens
auugaugggcauuuggguugauuccacgucuu

SEQ ID NO: 341913 - RNA, 32 nt, Homo Sapiens
ccuagaccucugcggcuucuccucuaacaugg

SEQ ID NO: 341914 - RNA, 32 nt, Homo Sapiens
uguaagcaaagugaggucauggccagagccca

SEQ ID NO: 341915 - RNA, 32 nt, Homo Sapiens
aagcagagauaaaacgcuuaaaaaauucugau

SEQ ID NO: 341916 - RNA, 32 nt, Homo Sapiens
cagguguucagaucaagggaaacuacucuaag

SEQ ID NO: 341917 - RNA, 32 nt, Homo Sapiens
aauuguguuacuagccucaaaauacaucaaaa

SEQ ID NO: 341918 - RNA, 32 nt, Homo Sapiens
ugaguuuaauggccaaagagaaguguuuuuaa

SEQ ID NO: 341919 - RNA, 32 nt, Homo Sapiens
ugguggccuucgggcaguggcuccggaaaggc

SEQ ID NO: 341920 - RNA, 32 nt, Homo Sapiens
ccccaggacccccuuucccagcccccaugcuu

SEQ ID NO: 341921 - RNA, 28 nt, Homo Sapiens
ggcauggugucugcguuccccuccuaug

SEQ ID NO: 341922 - RNA, 32 nt, Homo Sapiens
aagugggccauuagccagauuugucuuuuugu

SEQ ID NO: 341923 - RNA, 32 nt, Homo Sapiens
gugcccaggggcagggccggcccgccagggag

SEQ ID NO: 341924 - RNA, 32 nt, Homo Sapiens
uuuacugcaguauggggaguaaauuuauacca

SEQ ID NO: 341925 - RNA, 32 nt, Homo Sapiens
acccagagcuggaagcugcaaaggagcccaga

SEQ ID NO: 341926 - RNA, 31 nt, Homo Sapiens
caagagaauuggaaacagguguucaaacaaa

SEQ ID NO: 341927 - RNA, 32 nt, Homo Sapiens
cugcgcggagcuggaguccggcugggccgcag

SEQ ID NO: 341928 - RNA, 32 nt, Homo Sapiens
aaaaaagacaaaauauaauucaaacauaugca

SEQ ID NO: 341929 - RNA, 32 nt, Homo Sapiens
aaggacuagggucagggucucuggcucucagc

SEQ ID NO: 341930 - RNA, 32 nt, Homo Sapiens
cuuuuuucuuuuucuuuuuuuuuuuuuuuuug

SEQ ID NO: 341931 - RNA, 32 nt, Homo Sapiens
cauccccccguccccccauccuccuguccccg

SEQ ID NO: 341932 - RNA, 32 nt, Homo Sapiens
agggaguacagcugaccgcuucuggagggugu

SEQ ID NO: 341933 - RNA, 32 nt, Homo Sapiens
uuauguugacuucuguuucucacuuugauauu

SEQ ID NO: 341934 - RNA, 32 nt, Homo Sapiens
gcccagccgcgugccuuggcccauggccgccu

SEQ ID NO: 341935 - RNA, 32 nt, Homo Sapiens
uuccaaugaaaaacagaacacaaaagagcaga

SEQ ID NO: 341936 - RNA, 32 nt, Homo Sapiens
gguacauggaugcuuugaaagauauggaagac

SEQ ID NO: 341937 - RNA, 32 nt, Homo Sapiens
ugacaaagaauuuccuaauccaaauaucuuug

SEQ ID NO: 341938 - RNA, 32 nt, Homo Sapiens
aguuuugauaauuuauaguacuuugaugucau

SEQ ID NO: 341939 - RNA, 32 nt, Homo Sapiens
aguuacuuuacuucuuuuuuuuuuuuugagau

SEQ ID NO: 341940 - RNA, 32 nt, Homo Sapiens
guuucaaaggagaggagagaagagacugaguc

SEQ ID NO: 341941 - RNA, 32 nt, Homo Sapiens
caaaauccucaauaagacauuaguaaauuaaa

SEQ ID NO: 341942 - RNA, 32 nt, Homo Sapiens
ugccaggagaacagaacacacuccuggucugg

SEQ ID NO: 341943 - RNA, 32 nt, Homo Sapiens
cagaacagcuuuacuuuagauaggguuccauu

SEQ ID NO: 341944 - RNA, 32 nt, Homo Sapiens
uuagccgggagugguggcgcgcgccuguaauc

SEQ ID NO: 341945 - RNA, 32 nt, Homo Sapiens
ucaaacugaaacaaaauuagaaauguaauuau

SEQ ID NO: 341946 - RNA, 32 nt, Homo Sapiens
ugguggagaugacucaaacaaaaacuaugauu

SEQ ID NO: 341947 - RNA, 32 nt, Homo Sapiens
cacucuccagcauuguagaagacaguaaugaa

SEQ ID NO: 341948 - RNA, 32 nt, Homo Sapiens
uaaaugguauguugcugcugacaguagugcuu

SEQ ID NO: 341949 - RNA, 32 nt, Homo Sapiens
aauggccaaaacaauccagggauuguuaagug

SEQ ID NO: 341950 - RNA, 32 nt, Homo Sapiens
ucccacccucugcuucccuccuccucgugauc

SEQ ID NO: 341951 - RNA, 32 nt, Homo Sapiens
auagcaaagaauauaaauuugcuguugauuuu

SEQ ID NO: 341952 - RNA, 32 nt, Homo Sapiens
uagagcccggccugggccaaugauggagggcg

SEQ ID NO: 341953 - RNA, 32 nt, Homo Sapiens
cugucauuacaauccaaguuauauauguuugc

SEQ ID NO: 341954 - RNA, 32 nt, Homo Sapiens
aacauuguuuuaaaacaaguacuucuuuuaca

SEQ ID NO: 341955 - RNA, 30 nt, Homo Sapiens
gcagugugugguggcaugcagguaacauau

SEQ ID NO: 341956 - RNA, 32 nt, Homo Sapiens
uuucucacacgcgucaucacgcgaggccagug

SEQ ID NO: 341957 - RNA, 32 nt, Homo Sapiens
aacaaacccacuuuuuuagacauugauaaagu

SEQ ID NO: 341958 - RNA, 32 nt, Homo Sapiens
cuucccgcucccucacacaccgccucagcccg

SEQ ID NO: 341959 - RNA, 32 nt, Homo Sapiens
gcuugguguucccugccguggggccucagcac

SEQ ID NO: 341960 - RNA, 32 nt, Homo Sapiens
ggucaaguagccagaaacagguguucuggcuu

SEQ ID NO: 341961 - RNA, 32 nt, Homo Sapiens
agcccggugcuggggaccuccuggacacccug

SEQ ID NO: 341962 - RNA, 32 nt, Homo Sapiens
ucgcccccgccgggcgcucucgcuucagucag

SEQ ID NO: 341963 - RNA, 32 nt, Homo Sapiens
gcuguggugugaaaauguauggaugaauucug

SEQ ID NO: 341964 - RNA, 32 nt, Homo Sapiens
auuccagcugaaugcaaaaggcaacacucugu

SEQ ID NO: 341965 - RNA, 32 nt, Homo Sapiens
aaugaucucuguuguaaucauagagaaaagca

SEQ ID NO: 341966 - RNA, 32 nt, Homo Sapiens
gguaggagauaaagacuucggcgauuugggcu

SEQ ID NO: 341967 - RNA, 32 nt, Homo Sapiens
uauucuuguuuuccuuugauugauauagacca

SEQ ID NO: 341968 - RNA, 32 nt, Homo Sapiens
gaguuguuugcuaaucauuucauuugcaucau

SEQ ID NO: 341969 - RNA, 32 nt, Homo Sapiens
uaauuuuuauuacuuuauugguguuaaggaua

SEQ ID NO: 341970 - RNA, 31 nt, Homo Sapiens
ucccuucaagugugaaggaaggugugaugaa

SEQ ID NO: 341971 - RNA, 32 nt, Homo Sapiens
ggucccuaccccagagcuuccaugcaaaggaa

SEQ ID NO: 341972 - RNA, 32 nt, Homo Sapiens
aaaucucaguucccaccaguaaaauuauccug

SEQ ID NO: 341973 - RNA, 32 nt, Homo Sapiens
ugggaucaucuguuuacaggcauuauauuuau

SEQ ID NO: 341974 - RNA, 28 nt, Homo Sapiens
ugaaaaaucacaggaccaggugguccug

SEQ ID NO: 341975 - RNA, 32 nt, Homo Sapiens
gucccucccccuccucugcauggaggucucuu

SEQ ID NO: 341976 - RNA, 32 nt, Homo Sapiens
augagcaacucuccuggcaugccuuggucauu

SEQ ID NO: 341977 - RNA, 32 nt, Homo Sapiens
uuucaccuuugaaaaucacgugauguuaaagg

SEQ ID NO: 341978 - RNA, 32 nt, Homo Sapiens
cauuauguauaaaaaauuggaggaucagcaga

SEQ ID NO: 341979 - RNA, 32 nt, Homo Sapiens
gguggccccagcuuccucuccggagccugcgc

SEQ ID NO: 341980 - RNA, 32 nt, Homo Sapiens
aacuuuaaaaauuauaaucacccucaacaugg

SEQ ID NO: 341981 - RNA, 32 nt, Homo Sapiens
cgaaggcagaccugcagcagguccuggugaag

SEQ ID NO: 341982 - RNA, 32 nt, Homo Sapiens
aaauucaguauuuuaugauaaucacuucguuu

SEQ ID NO: 341983 - RNA, 32 nt, Homo Sapiens
cucacagaucccaguagcacaauugggcuuug

SEQ ID NO: 341984 - RNA, 32 nt, Homo Sapiens
ccugucugucccuuuucuuuuacuagaucuuu

SEQ ID NO: 341985 - RNA, 32 nt, Homo Sapiens
uguacuuccuuccacucuuuucuucuucacau

SEQ ID NO: 341986 - RNA, 32 nt, Homo Sapiens
aggcccacccucgucucugccugggugagccc

SEQ ID NO: 341987 - RNA, 32 nt, Homo Sapiens
accuccccaucccacccaggcccccagcuccc

SEQ ID NO: 341988 - RNA, 32 nt, Homo Sapiens
gccugcaccagcugccugggccccacccuccu

SEQ ID NO: 341989 - RNA, 32 nt, Homo Sapiens
gcggggaugugcggugaccacccugguccuga

SEQ ID NO: 341990 - RNA, 32 nt, Homo Sapiens
auaaauuguuuaaaacuuuucuuauuaaaaac

SEQ ID NO: 341991 - RNA, 32 nt, Homo Sapiens
cagaaaccacacucacaguccaaagcaguaga

SEQ ID NO: 341992 - RNA, 32 nt, Homo Sapiens
ggcccgucccuccgcggccccauccgcccggu

SEQ ID NO: 341993 - RNA, 32 nt, Homo Sapiens
uacagcuaggacccuccuguccugacaggcuc

SEQ ID NO: 341994 - RNA, 32 nt, Homo Sapiens
uucugggaccugccggccucccgggccagcug

SEQ ID NO: 341995 - RNA, 32 nt, Homo Sapiens
uuguacuuaaagcuagcggacccgugaacaac

SEQ ID NO: 341996 - RNA, 32 nt, Homo Sapiens
aauaaaggcagacaugguuugcaaaccacaag

SEQ ID NO: 341997 - RNA, 32 nt, Homo Sapiens
augggggccugccuagguugguggaacagugc

SEQ ID NO: 341998 - RNA, 30 nt, Homo Sapiens
cggcugcugcccgugcugccagaacuauga

SEQ ID NO: 341999 - RNA, 32 nt, Homo Sapiens
gcuccaugggaaauaaaaauggcacccugaau

SEQ ID NO: 342000 - RNA, 31 nt, Homo Sapiens
gauucagguggccccauggaaacuuuucaaa

SEQ ID NO: 342001 - RNA, 32 nt, Homo Sapiens
auaugucacaugcgggaacuguuuaacaaaua

SEQ ID NO: 342002 - RNA, 32 nt, Homo Sapiens
ugccugcuucuuaccuggcccuaagccgggcg

SEQ ID NO: 342003 - RNA, 29 nt, Homo Sapiens
uaaugucggggacguagggacgcuuccag

SEQ ID NO: 342004 - RNA, 32 nt, Homo Sapiens
gcugggccgcucugcugguccggcaugagacc

SEQ ID NO: 342005 - RNA, 32 nt, Homo Sapiens
ccucaugucucaaggcagcagcuccucucugg

SEQ ID NO: 342006 - RNA, 32 nt, Homo Sapiens
ccucacucacuacucuucggcggccccaaagc

SEQ ID NO: 342007 - RNA, 32 nt, Homo Sapiens
ggggucgucucagaucugguugugcucgagcu

SEQ ID NO: 342008 - RNA, 32 nt, Homo Sapiens
ggcuccagacugcucccagaacaaggccggcc

SEQ ID NO: 342009 - RNA, 32 nt, Homo Sapiens
cuuugggagaggagaaaggaguuuggcaggag

SEQ ID NO: 342010 - RNA, 32 nt, Homo Sapiens
gauacaugaaacaacagugucagaaacgaugc

SEQ ID NO: 342011 - RNA, 32 nt, Homo Sapiens
cggcucuggagccgcccggcccggacauggcg

SEQ ID NO: 342012 - RNA, 32 nt, Homo Sapiens
cagcaaagcaaguuuaaguccaaacacaauac

SEQ ID NO: 342013 - RNA, 31 nt, Homo Sapiens
ccaguucucgggagaaagaguccgcgaccag

SEQ ID NO: 342014 - RNA, 32 nt, Homo Sapiens
acacaagugcggcuacuagcuggucccaucac

SEQ ID NO: 342015 - RNA, 32 nt, Homo Sapiens
aaguuuucuuucucuuugguuuauugauuugg

SEQ ID NO: 342016 - RNA, 32 nt, Homo Sapiens
agcauuuuuuaaaaucugaaguugcucuuuuc

SEQ ID NO: 342017 - RNA, 32 nt, Homo Sapiens
ugacuggaaugaacuggcugggcuugucaggg

SEQ ID NO: 342018 - RNA, 32 nt, Homo Sapiens
cucgagugacagguccugggacagugggagcc

SEQ ID NO: 342019 - RNA, 32 nt, Homo Sapiens
cuaguuuuuuuuuuuuuuuuuaauggagucuc

SEQ ID NO: 342020 - RNA, 32 nt, Homo Sapiens
cagcauggacugaguucuugacaacagaaugu

SEQ ID NO: 342021 - RNA, 32 nt, Homo Sapiens
gaccgggaggcaccccacccuccccaccagug

SEQ ID NO: 342022 - RNA, 32 nt, Homo Sapiens
agagccgagccgagcgccggcgcacggugaga

SEQ ID NO: 342023 - RNA, 32 nt, Homo Sapiens
uaacuauacuugcuuuugcaauaaaacaacuu

SEQ ID NO: 342024 - RNA, 32 nt, Homo Sapiens
aaccuuccgcccagaccccccugcccagaccc

SEQ ID NO: 342025 - RNA, 32 nt, Homo Sapiens
ugcccuaaacuggcauccggccuugcugggag

SEQ ID NO: 342026 - RNA, 32 nt, Homo Sapiens
caguucuguuacccaauuuagauuaguaaagc

SEQ ID NO: 342027 - RNA, 32 nt, Homo Sapiens
acgcagugaacauauaugcauguacagugugg

SEQ ID NO: 342028 - RNA, 32 nt, Homo Sapiens
uccuaaagcuaaggccagccuccaucacaaau

SEQ ID NO: 342029 - RNA, 32 nt, Homo Sapiens
ccugaagcugaauaaaauaaucuuucagaguc

SEQ ID NO: 342030 - RNA, 32 nt, Homo Sapiens
gacauugcauuacgaguauucuuccaggucag

SEQ ID NO: 342031 - RNA, 32 nt, Homo Sapiens
cacgaggcgaugaguuccugcugcuguucacc

SEQ ID NO: 342032 - RNA, 32 nt, Homo Sapiens
ucccucuuuuucucccuucucuggggcgcagg

SEQ ID NO: 342033 - RNA, 32 nt, Homo Sapiens
ggucuccuuuccccuccugucuucccgguauc

SEQ ID NO: 342034 - RNA, 32 nt, Homo Sapiens
uuaaggccgggcgggugacucaggcagguaau

SEQ ID NO: 342035 - RNA, 32 nt, Homo Sapiens
ggagccucugcuguccuucccagccgccucug

SEQ ID NO: 342036 - RNA, 32 nt, Homo Sapiens
ggccggacaggccgcacagaccuacuguggcg

SEQ ID NO: 342037 - RNA, 32 nt, Homo Sapiens
acuuacagcaaccugauguuuggacaccuuuu

SEQ ID NO: 342038 - RNA, 32 nt, Homo Sapiens
agagaagaacucucauggcugcuggagguacc

SEQ ID NO: 342039 - RNA, 32 nt, Homo Sapiens
gacuuauuaaaaauugcugaucugguguaggu

SEQ ID NO: 342040 - RNA, 32 nt, Homo Sapiens
ccacggugaagauacuaggguccagaggccga

SEQ ID NO: 342041 - RNA, 32 nt, Homo Sapiens
gagguucaugucaaccucggaggcaucccugu

SEQ ID NO: 342042 - RNA, 32 nt, Homo Sapiens
uugagacaguccuuuaccuaggccuguggauu

SEQ ID NO: 342043 - RNA, 32 nt, Homo Sapiens
uaugccccuuauugggccccagaccccagggc

SEQ ID NO: 342044 - RNA, 32 nt, Homo Sapiens
uaauaugccuucuuuggauaaaauggaugggu

SEQ ID NO: 342045 - RNA, 32 nt, Homo Sapiens
gacagugggcugcgcgucucauuuucagccuu

SEQ ID NO: 342046 - RNA, 32 nt, Homo Sapiens
accccagccucccguccccagcccgcugcacc

SEQ ID NO: 342047 - RNA, 32 nt, Homo Sapiens
gacacauuuuuccugacuuuguucaaagagga

SEQ ID NO: 342048 - RNA, 31 nt, Homo Sapiens
cagaauauggcagaagugauguuguggcaau

SEQ ID NO: 342049 - RNA, 32 nt, Homo Sapiens
caguucugugaucugggucucuaaucugugcu

SEQ ID NO: 342050 - RNA, 32 nt, Homo Sapiens
cuccgauggcugccaggagcugagcucagggu

SEQ ID NO: 342051 - RNA, 32 nt, Homo Sapiens
agaggccucugauguccugaggucucagagga

SEQ ID NO: 342052 - RNA, 32 nt, Homo Sapiens
uuuuaaaaauugaaauuuuaaaauauggagaa

SEQ ID NO: 342053 - RNA, 32 nt, Homo Sapiens
uaccaggcaccucgacccgaguccucacucag

SEQ ID NO: 342054 - RNA, 32 nt, Homo Sapiens
caggccccacucggcuucggcugcccgcccag

SEQ ID NO: 342055 - RNA, 32 nt, Homo Sapiens
aauauguugaaccauccuugcaugccagaagu

SEQ ID NO: 342056 - RNA, 32 nt, Homo Sapiens
ugauaucaaaguuaaauuuaugaugaaugacu

SEQ ID NO: 342057 - RNA, 32 nt, Homo Sapiens
accuuccccuccccgugcgcucuggggacuga

SEQ ID NO: 342058 - RNA, 32 nt, Homo Sapiens
auuaaaauacguuuaaugacguuuuccucaau

SEQ ID NO: 342059 - RNA, 32 nt, Homo Sapiens
ccaugccgccgccgcugccgccuccuccucuc

SEQ ID NO: 342060 - RNA, 32 nt, Homo Sapiens
gcgcagcccgcacuauggcagccccgccgcag

SEQ ID NO: 342061 - RNA, 32 nt, Homo Sapiens
gcaucuguuuuuuccaagcacccagggaauuc

SEQ ID NO: 342062 - RNA, 31 nt, Homo Sapiens
ucugucugcugagaucucagagccugcccaa

SEQ ID NO: 342063 - RNA, 32 nt, Homo Sapiens
ugagacagcccgggcucugcuucccaucaccc

SEQ ID NO: 342064 - RNA, 32 nt, Homo Sapiens
accaaacuuguccuuaaagauguuguuauuaa

SEQ ID NO: 342065 - RNA, 32 nt, Homo Sapiens
gaggccaggaugccuccagucugggggaaaau

SEQ ID NO: 342066 - RNA, 32 nt, Homo Sapiens
gcagcgcacugacuggggccugggccauggag

SEQ ID NO: 342067 - RNA, 32 nt, Homo Sapiens
uccggcuccgcgggcggaagaggcggcggcgg

SEQ ID NO: 342068 - RNA, 32 nt, Homo Sapiens
uccugcugcuucggggacccggcuacgacaac

SEQ ID NO: 342069 - RNA, 32 nt, Homo Sapiens
aagaaaaguaacuauuugagacaugaggugcc

SEQ ID NO: 342070 - RNA, 32 nt, Homo Sapiens
cccaaauggccaguguaaaaauguccuuaugu

SEQ ID NO: 342071 - RNA, 32 nt, Homo Sapiens
cccgcccuuggugcugcccccgggcgguaccu

SEQ ID NO: 342072 - RNA, 32 nt, Homo Sapiens
gcaaaguuaaauagaaugaggcuggucgcaag

SEQ ID NO: 342073 - RNA, 32 nt, Homo Sapiens
aagcuaccagccucacggagaaggcgcagucc

SEQ ID NO: 342074 - RNA, 32 nt, Homo Sapiens
gaauuucagaucuggguuuuugaaagaaaaca

SEQ ID NO: 342075 - RNA, 32 nt, Homo Sapiens
ucuuuuucagacaaauuacugauaaaaaugau

SEQ ID NO: 342076 - RNA, 32 nt, Homo Sapiens
aaaguggucaaggggaccuccuuccagcucua

SEQ ID NO: 342077 - RNA, 32 nt, Homo Sapiens
agagcaucauucuuuuaauaaaacagaagaga

SEQ ID NO: 342078 - RNA, 32 nt, Homo Sapiens
ccgaggcccccuccccagcacuggccacaccc

SEQ ID NO: 342079 - RNA, 32 nt, Homo Sapiens
uccccggcagcucgcucucuccccucagcuua

SEQ ID NO: 342080 - RNA, 32 nt, Homo Sapiens
cccaagaggucuuucacugauacaaggaaaac

SEQ ID NO: 342081 - RNA, 32 nt, Homo Sapiens
aucugcagcaugcuauagaaaguggggaggaa

SEQ ID NO: 342082 - RNA, 32 nt, Homo Sapiens
agaaaaugaugaugacauuaggcuucuaaagg

SEQ ID NO: 342083 - RNA, 32 nt, Homo Sapiens
cuaaauagcccauuuuaagggagaacuuacua

SEQ ID NO: 342084 - RNA, 32 nt, Homo Sapiens
aauaccaaaaagacauauuuuauaaaaugaca

SEQ ID NO: 342085 - RNA, 32 nt, Homo Sapiens
agucccugaggguggagggaagcugaggauag

SEQ ID NO: 342086 - RNA, 32 nt, Homo Sapiens
cuagagggaaaguuaggaauaggccucccaga

SEQ ID NO: 342087 - RNA, 32 nt, Homo Sapiens
cucaucugcauuuuuguuuuuaugauagggcu

SEQ ID NO: 342088 - RNA, 32 nt, Homo Sapiens
cuugauuaaaagacagaguuuuauaaauguag

SEQ ID NO: 342089 - RNA, 32 nt, Homo Sapiens
ugggauuggggagagggaacaguugggacuag

SEQ ID NO: 342090 - RNA, 32 nt, Homo Sapiens
ucugcugucacccucuacucuccagcuuuagu

SEQ ID NO: 342091 - RNA, 32 nt, Homo Sapiens
gccugaauccaccguggcuaggcauauucuug

SEQ ID NO: 342092 - RNA, 32 nt, Homo Sapiens
uaguuuaugcaaacucagggguacaaaaugau

SEQ ID NO: 342093 - RNA, 32 nt, Homo Sapiens
ccccagcccucaggcccucccugccaaacugg

SEQ ID NO: 342094 - RNA, 32 nt, Homo Sapiens
uguggugggaauaugggcuggcacugcugcag

SEQ ID NO: 342095 - RNA, 32 nt, Homo Sapiens
uccuguacauagagauauauuuuuuaagugug

SEQ ID NO: 342096 - RNA, 32 nt, Homo Sapiens
ggcuccgucccccacaccacaguucugacugu

SEQ ID NO: 342097 - RNA, 32 nt, Homo Sapiens
auuucagugacaguuucuuuugcaauuuugug

SEQ ID NO: 342098 - RNA, 32 nt, Homo Sapiens
gcguuaagaaaaaugaggaaaacuacaauauu

SEQ ID NO: 342099 - RNA, 32 nt, Homo Sapiens
gugguauguuuaaaauauuucauuuucugcuu

SEQ ID NO: 342100 - RNA, 32 nt, Homo Sapiens
aaaugucgguaucuuuuuuucuuaaaccauuu

SEQ ID NO: 342101 - RNA, 32 nt, Homo Sapiens
uuccugauuuaagcaaauaaucauauuuguau

SEQ ID NO: 342102 - RNA, 32 nt, Homo Sapiens
ggcccugccuccccguuacccuccuucccugc

SEQ ID NO: 342103 - RNA, 32 nt, Homo Sapiens
uggccuccuaaaacaagccacuuaggucaucu

SEQ ID NO: 342104 - RNA, 32 nt, Homo Sapiens
accaguuaauguauuuuucaguuuucuuuccu

SEQ ID NO: 342105 - RNA, 32 nt, Homo Sapiens
ccaauuuuaaaauggaggaaaggacuugaaua

SEQ ID NO: 342106 - RNA, 32 nt, Homo Sapiens
ucccuagaaauuuuugugaauuguuugcacuu

SEQ ID NO: 342107 - RNA, 32 nt, Homo Sapiens
uuaggaaaacaaaaaugaaaaacuacuccauu

SEQ ID NO: 342108 - RNA, 32 nt, Homo Sapiens
gcccuaauccucugucagcagugcccagcgga

SEQ ID NO: 342109 - RNA, 32 nt, Homo Sapiens
ccacucccagagccugccccagcccuucgagc

SEQ ID NO: 342110 - RNA, 32 nt, Homo Sapiens
uccaugaccagggagaacuuacaggauguuag

SEQ ID NO: 342111 - RNA, 30 nt, Homo Sapiens
caacccucggcuccgccgccggcuccuugc

SEQ ID NO: 342112 - RNA, 32 nt, Homo Sapiens
ggaaacagaaaagagaagaaagaagcacucug

SEQ ID NO: 342113 - RNA, 32 nt, Homo Sapiens
cccuccccacugaaccaauguucuucuuacau

SEQ ID NO: 342114 - RNA, 32 nt, Homo Sapiens
uccucuccuuuccuccucccccucggagccgg

SEQ ID NO: 342115 - RNA, 32 nt, Homo Sapiens
gugguaaaauauacauaaaauaauacuuauua

SEQ ID NO: 342116 - RNA, 32 nt, Homo Sapiens
accccaccgacgaccgcgcgggccaccuucgc

SEQ ID NO: 342117 - RNA, 32 nt, Homo Sapiens
guagcaucucaacugcugguagcauuuaucug

SEQ ID NO: 342118 - RNA, 32 nt, Homo Sapiens
uuagccuaaguaugcucugaaaacacagugga

SEQ ID NO: 342119 - RNA, 32 nt, Homo Sapiens
aagucaacccucaauguaacaucagagaaauc

SEQ ID NO: 342120 - RNA, 32 nt, Homo Sapiens
caccgugcgcucucuggcuggugcacacacag

SEQ ID NO: 342121 - RNA, 32 nt, Homo Sapiens
uucuccuucuucuccuucuuccacaaagaccc

SEQ ID NO: 342122 - RNA, 32 nt, Homo Sapiens
gcccagcccacccacuggguaauaaaaguggu

SEQ ID NO: 342123 - RNA, 32 nt, Homo Sapiens
uuuuucagaguuggccaggagcuccuggcugg

SEQ ID NO: 342124 - RNA, 32 nt, Homo Sapiens
caaccgcauggugccuggaccugacuacaauu

SEQ ID NO: 342125 - RNA, 32 nt, Homo Sapiens
ggcgggcgggacugggcggggcggggcaucag

SEQ ID NO: 342126 - RNA, 32 nt, Homo Sapiens
caaaugggggcaaccacauccaguacaagcuu

SEQ ID NO: 342127 - RNA, 32 nt, Homo Sapiens
uggugagacaccuuaccucaauccucaagguu

SEQ ID NO: 342128 - RNA, 27 nt, Homo Sapiens
gugcccuccugccacagcccccggccc

SEQ ID NO: 342129 - RNA, 32 nt, Homo Sapiens
caucacauuuuucuggaaaacagacggauuuu

SEQ ID NO: 342130 - RNA, 32 nt, Homo Sapiens
gaaagcucuggcuauuugagacuugcuuuuca

SEQ ID NO: 342131 - RNA, 32 nt, Homo Sapiens
uuuuugcuaauagaaaaugcugauucugauuc

SEQ ID NO: 342132 - RNA, 32 nt, Homo Sapiens
uuagcagcaccggucuuaauuugauguuuuuc

SEQ ID NO: 342133 - RNA, 32 nt, Homo Sapiens
gcagaaaaugucagaucgacaucugugacaga

SEQ ID NO: 342134 - RNA, 32 nt, Homo Sapiens
ucacugaaauuccaguuucuaggauuagugua

SEQ ID NO: 342135 - RNA, 32 nt, Homo Sapiens
gaggccaugcucccuccaggcuugcggggaga

SEQ ID NO: 342136 - RNA, 32 nt, Homo Sapiens
gagccaagaauuugacucugagcaucuaggau

SEQ ID NO: 342137 - RNA, 32 nt, Homo Sapiens
uucccaauucuguuugccauuggccaauauaa

SEQ ID NO: 342138 - RNA, 32 nt, Homo Sapiens
uccuagaugaagcauuggggugggggagggag

SEQ ID NO: 342139 - RNA, 32 nt, Homo Sapiens
cgggggagcggccggagccacccccuucuacc

SEQ ID NO: 342140 - RNA, 32 nt, Homo Sapiens
accugcaggaccuccuccugcuggaccccaau

SEQ ID NO: 342141 - RNA, 32 nt, Homo Sapiens
aauagcugggacuggcuuccugccggggcggc

SEQ ID NO: 342142 - RNA, 32 nt, Homo Sapiens
gcucuaggccauggcgaggcucugccggcgug

SEQ ID NO: 342143 - RNA, 32 nt, Homo Sapiens
ggcacgcuggcugaagacauguugcccacaag

SEQ ID NO: 342144 - RNA, 32 nt, Homo Sapiens
guccccucuuucgucuuaauguucaccgucca

SEQ ID NO: 342145 - RNA, 32 nt, Homo Sapiens
uucuguuccgguuucuggucguaacucaagag

SEQ ID NO: 342146 - RNA, 28 nt, Homo Sapiens
gaagggguugcccgaaggaugacggugg

SEQ ID NO: 342147 - RNA, 32 nt, Homo Sapiens
gcaacuguucuuucuuuuuuuuucccuuccuu

SEQ ID NO: 342148 - RNA, 32 nt, Homo Sapiens
caugugccuuuaguccacggacccccagagca

SEQ ID NO: 342149 - RNA, 32 nt, Homo Sapiens
guuguucucuacugccuccagaaagacaguga

SEQ ID NO: 342150 - RNA, 32 nt, Homo Sapiens
aagauugcauuaguuuuuuucuuaacaacugc

SEQ ID NO: 342151 - RNA, 32 nt, Homo Sapiens
auacaaaugcaaaugaagcauuaguaauacuu

SEQ ID NO: 342152 - RNA, 32 nt, Homo Sapiens
gccuuuggaaauaaauggucauuaauuugugu

SEQ ID NO: 342153 - RNA, 32 nt, Homo Sapiens
ccuggccuggggagggcuugggccugugagga

SEQ ID NO: 342154 - RNA, 32 nt, Homo Sapiens
ccuaaugagcuggcaggugggcguggggggca

SEQ ID NO: 342155 - RNA, 32 nt, Homo Sapiens
gaaguuuccagaaacccgcuggacccucucuu

SEQ ID NO: 342156 - RNA, 32 nt, Homo Sapiens
cucaaggcucucgccccuccccucccuaaccc

SEQ ID NO: 342157 - RNA, 32 nt, Homo Sapiens
ucaagagcaaguacaucaaaauguagaaggua

SEQ ID NO: 342158 - RNA, 32 nt, Homo Sapiens
agaaggaaagcagggaggaagggagaccacug

SEQ ID NO: 342159 - RNA, 32 nt, Homo Sapiens
caguggugguggcugcgcacacagcuccacag

SEQ ID NO: 342160 - RNA, 32 nt, Homo Sapiens
aaguaagacuuuuauuaauaaaacaaaauguu

SEQ ID NO: 342161 - RNA, 32 nt, Homo Sapiens
gcccaccgccuggccaagcccacgccugggcu

SEQ ID NO: 342162 - RNA, 32 nt, Homo Sapiens
uauuucggaaauaaagugacuucauuuuucag

SEQ ID NO: 342163 - RNA, 32 nt, Homo Sapiens
ucacuuaagccugggaagucaagccugcagug

SEQ ID NO: 342164 - RNA, 32 nt, Homo Sapiens
cuaauuuuuuauuuuguuuaguucuuuuguau

SEQ ID NO: 342165 - RNA, 32 nt, Homo Sapiens
cugaggcuccugcucucccauccaccugucug

SEQ ID NO: 342166 - RNA, 32 nt, Homo Sapiens
aauguaauuauuaauauguuaggauuuauccu

SEQ ID NO: 342167 - RNA, 32 nt, Homo Sapiens
cuuggagaacacuugaguugugaagguuuugg

SEQ ID NO: 342168 - RNA, 32 nt, Homo Sapiens
ggaggggagacgggcagccgggcaguggccgg

SEQ ID NO: 342169 - RNA, 30 nt, Homo Sapiens
cugccucuggacugacacccucccuaauga

SEQ ID NO: 342170 - RNA, 32 nt, Homo Sapiens
cuggccgccgccgcuccuccccccaggaaagc

SEQ ID NO: 342171 - RNA, 32 nt, Homo Sapiens
ugcccugagcgcgggguggaagugcucccuuc

SEQ ID NO: 342172 - RNA, 32 nt, Homo Sapiens
uacaaacauauuuuuguuauauacaauauugc

SEQ ID NO: 342173 - RNA, 32 nt, Homo Sapiens
uauuuaagacucgcguauccaguguuuugucg

SEQ ID NO: 342174 - RNA, 32 nt, Homo Sapiens
acagggccgcuucaguacaggaccuuaccuau

SEQ ID NO: 342175 - RNA, 32 nt, Homo Sapiens
ugagcaaugcuguggguauuggauggaccacu

SEQ ID NO: 342176 - RNA, 32 nt, Homo Sapiens
agcuucccagcacccucagagcccccgcccgg

SEQ ID NO: 342177 - RNA, 32 nt, Homo Sapiens
auggaggaaacauuuuuguaaaaguuuaauga

SEQ ID NO: 342178 - RNA, 32 nt, Homo Sapiens
ugauggcggccccgcggagaccccgcugccac

SEQ ID NO: 342179 - RNA, 32 nt, Homo Sapiens
ccagggcaguguggugggagggguguuccaaa

SEQ ID NO: 342180 - RNA, 32 nt, Homo Sapiens
gccuagaccugggauuuguggggaaagcugcu

SEQ ID NO: 342181 - RNA, 32 nt, Homo Sapiens
cuuccccaggcuauaaauuuguucucacaaag

SEQ ID NO: 342182 - RNA, 32 nt, Homo Sapiens
cauuaagguauugaacacuggauugcaugguu

SEQ ID NO: 342183 - RNA, 32 nt, Homo Sapiens
gcugcgcccgcccgcgcccggggugaugcagu

SEQ ID NO: 342184 - RNA, 29 nt, Homo Sapiens
aaugaugugacuuucuuagucauuuagga

SEQ ID NO: 342185 - RNA, 32 nt, Homo Sapiens
uguuauuaaugauuaugaacuuuugcuuaaca

SEQ ID NO: 342186 - RNA, 32 nt, Homo Sapiens
agaggagcacucagggcuggccccacaaaggg

SEQ ID NO: 342187 - RNA, 32 nt, Homo Sapiens
cgccgcgaccccggauggaugcgcgccccccg

SEQ ID NO: 342188 - RNA, 32 nt, Homo Sapiens
guuuguuaauacgcuauauacuguguaauucu

SEQ ID NO: 342189 - RNA, 32 nt, Homo Sapiens
gacugauaaacaaaaaugaagcuaaaaugaau

SEQ ID NO: 342190 - RNA, 32 nt, Homo Sapiens
ccagaagggaagaaauuaaauaauccauccuc

SEQ ID NO: 342191 - RNA, 32 nt, Homo Sapiens
uuggcucagugcuauaaauuguagccaggaaa

SEQ ID NO: 342192 - RNA, 32 nt, Homo Sapiens
guggggacagagcugggaguccugaaggagaa

SEQ ID NO: 342193 - RNA, 32 nt, Homo Sapiens
acuugucuugcagauguagaaauuguugcuuu

SEQ ID NO: 342194 - RNA, 32 nt, Homo Sapiens
uggaagaggucaccuaggaaaagcaugaaauu

SEQ ID NO: 342195 - RNA, 32 nt, Homo Sapiens
acgaggucaggagauugagaccauccuggaua

SEQ ID NO: 342196 - RNA, 32 nt, Homo Sapiens
agcugaagcggaaaugugagacaggcuggcac

SEQ ID NO: 342197 - RNA, 32 nt, Homo Sapiens
uaacaagaccaucuugucuuucugggguagcc

SEQ ID NO: 342198 - RNA, 32 nt, Homo Sapiens
cagggccagcccagcccuguccggucccgucc

SEQ ID NO: 342199 - RNA, 32 nt, Homo Sapiens
ggaacuggugaauaauaauuaacuauugugaa

SEQ ID NO: 342200 - RNA, 32 nt, Homo Sapiens
ccagccugucagauccaggagcuccagugucc

SEQ ID NO: 342201 - RNA, 32 nt, Homo Sapiens
gucaucucacucgggcuaggucucucucaaug

SEQ ID NO: 342202 - RNA, 32 nt, Homo Sapiens
acuuuaguagccaugaagguccucauccuugc

SEQ ID NO: 342203 - RNA, 32 nt, Homo Sapiens
aacaaugcaauaauucacauugaaacagcgcu

SEQ ID NO: 342204 - RNA, 32 nt, Homo Sapiens
auuuaguguggccuuaggaaagcaaaagagca

SEQ ID NO: 342205 - RNA, 32 nt, Homo Sapiens
uaauguuuuucucgaagaaugugaaaauaauu

SEQ ID NO: 342206 - RNA, 32 nt, Homo Sapiens
aagggugagcagaggagagcggcagcuggggu

SEQ ID NO: 342207 - RNA, 32 nt, Homo Sapiens
cccuccugcuccccgccacacacacacacaga

SEQ ID NO: 342208 - RNA, 32 nt, Homo Sapiens
gcuaugagggggugggcccaccaccgcccagc

SEQ ID NO: 342209 - RNA, 32 nt, Homo Sapiens
gucacagcagugccgagguguccgcggcagac

SEQ ID NO: 342210 - RNA, 32 nt, Homo Sapiens
acagaaauuugcacagaagauagugucaagga

SEQ ID NO: 342211 - RNA, 32 nt, Homo Sapiens
aggcauugucauuguucugaacucucuuuuca

SEQ ID NO: 342212 - RNA, 32 nt, Homo Sapiens
aucacagcugaaugcaaugaaaggcuauccuc

SEQ ID NO: 342213 - RNA, 32 nt, Homo Sapiens
cucaacgcaaccuccgccucccagguucaagc

SEQ ID NO: 342214 - RNA, 32 nt, Homo Sapiens
acuuuuaaauacugagccugguugauguguuu

SEQ ID NO: 342215 - RNA, 32 nt, Homo Sapiens
uuuaacugaaucauauaucuuuuaucauguua

SEQ ID NO: 342216 - RNA, 32 nt, Homo Sapiens
gcccaggcccccggcuuuccuccggagccuca

SEQ ID NO: 342217 - RNA, 32 nt, Homo Sapiens
ucaauaaaagccauuuuaaaagaauauuguug

SEQ ID NO: 342218 - RNA, 32 nt, Homo Sapiens
ucacauacacauaaguuugucauuguucuuca

SEQ ID NO: 342219 - RNA, 32 nt, Homo Sapiens
uaaagacaaaauuuuucuuuucuugauuuuuu

SEQ ID NO: 342220 - RNA, 32 nt, Homo Sapiens
ugaaggccagcugaagaggccuuuuuguugug

SEQ ID NO: 342221 - RNA, 32 nt, Homo Sapiens
gggggaggggggcgggcggggugggaagugcc

SEQ ID NO: 342222 - RNA, 32 nt, Homo Sapiens
aguuaucuggaaagauaccuggauguuuacug

SEQ ID NO: 342223 - RNA, 32 nt, Homo Sapiens
gcucagcugaugcaggccgguuggaguggacg

SEQ ID NO: 342224 - RNA, 32 nt, Homo Sapiens
caagacauuuuauguauuauuucgauuuacuu

SEQ ID NO: 342225 - RNA, 32 nt, Homo Sapiens
cugaaacaaaaauucacuuuuaaucaagaaga

SEQ ID NO: 342226 - RNA, 32 nt, Homo Sapiens
uucugguuucuggcagggacacuggagcccaa

SEQ ID NO: 342227 - RNA, 32 nt, Homo Sapiens
gcaaaacuccaauacaaacaaacaaacaaaca

SEQ ID NO: 342228 - RNA, 32 nt, Homo Sapiens
uuuuuccuguuguuuucuuaacuucugaaaga

SEQ ID NO: 342229 - RNA, 32 nt, Homo Sapiens
aagcaguuuuauuacuugauaauuuuccaauu

SEQ ID NO: 342230 - RNA, 32 nt, Homo Sapiens
aauguuaguggugggucugaucugacugcagc

SEQ ID NO: 342231 - RNA, 27 nt, Homo Sapiens
uggagccuuuuuuuuucuuauuuuaau

SEQ ID NO: 342232 - RNA, 32 nt, Homo Sapiens
gaaucucgcucuguugcccagcccaucucggc

SEQ ID NO: 342233 - RNA, 32 nt, Homo Sapiens
aggggcucaggagagaagggagcagcuggcau

SEQ ID NO: 342234 - RNA, 32 nt, Homo Sapiens
caucaaguucccuucccuuuucauccuauccc

SEQ ID NO: 342235 - RNA, 32 nt, Homo Sapiens
ccugccgccguggucgcuggagcuuugccucu

SEQ ID NO: 342236 - RNA, 32 nt, Homo Sapiens
uucauucuauagaagaaaugcaaacuaucacu

SEQ ID NO: 342237 - RNA, 32 nt, Homo Sapiens
caaaugaaauauauuuaaaauauauugaauau

SEQ ID NO: 342238 - RNA, 32 nt, Homo Sapiens
cccauugcucaacacaacucucuucuugauug

SEQ ID NO: 342239 - RNA, 31 nt, Homo Sapiens
gcuacuucaucuuuuaaguccacucauccug

SEQ ID NO: 342240 - RNA, 32 nt, Homo Sapiens
uaauaaauaaaauuauuuaaaauguugauuuc

SEQ ID NO: 342241 - RNA, 32 nt, Homo Sapiens
ugcaucccaagccuuugaccuucccgcuaugg

SEQ ID NO: 342242 - RNA, 32 nt, Homo Sapiens
ggcuucccaagggauagcaccagacaagaaau

SEQ ID NO: 342243 - RNA, 32 nt, Homo Sapiens
ggccgucggcggaggcgccauuuuguguagcc

SEQ ID NO: 342244 - RNA, 32 nt, Homo Sapiens
auauaugccaaaaggaauauaaaucauucuac

SEQ ID NO: 342245 - RNA, 32 nt, Homo Sapiens
uuagaauuguguuaaauugauguuuugcauuu

SEQ ID NO: 342246 - RNA, 32 nt, Homo Sapiens
ugggggcucagccaaugcugcccagccugagg

SEQ ID NO: 342247 - RNA, 32 nt, Homo Sapiens
cgagcccucuccuggggggccugcugggcagg

SEQ ID NO: 342248 - RNA, 32 nt, Homo Sapiens
uucauagaucauauuuucuuagacaauguuua

SEQ ID NO: 342249 - RNA, 32 nt, Homo Sapiens
uuuuaaagacuuuaaagguuuuuuguaugcua

SEQ ID NO: 342250 - RNA, 32 nt, Homo Sapiens
uuuuaacuuauaguuuuuuuuaauauauauau

SEQ ID NO: 342251 - RNA, 32 nt, Homo Sapiens
accucaugcaccuuuacagauaucugggaaag

SEQ ID NO: 342252 - RNA, 32 nt, Homo Sapiens
cugguuggguggcaauuccaauauuucugcuu

SEQ ID NO: 342253 - RNA, 32 nt, Homo Sapiens
agcugccucacagaugcagacaugacaguggc

SEQ ID NO: 342254 - RNA, 32 nt, Homo Sapiens
ccgaugccugacggcucaugcggccuccuugu

SEQ ID NO: 342255 - RNA, 32 nt, Homo Sapiens
uagaagagggccugaagaagauauuuuuagca

SEQ ID NO: 342256 - RNA, 32 nt, Homo Sapiens
gacuuaaugacugaaauugcaaauuguccuuu

SEQ ID NO: 342257 - RNA, 32 nt, Homo Sapiens
aacacauucuuacuguucucugcaucucuaau

SEQ ID NO: 342258 - RNA, 32 nt, Homo Sapiens
gcugaaccgcgagguggcuaccaacagugagc

SEQ ID NO: 342259 - RNA, 32 nt, Homo Sapiens
caggcuuugcccgugcauagcucauaugaaca

SEQ ID NO: 342260 - RNA, 32 nt, Homo Sapiens
uucuaauaauuucuguuauaaauugccagcau

SEQ ID NO: 342261 - RNA, 32 nt, Homo Sapiens
ggcucugguggucaaggcagcaguccccuugg

SEQ ID NO: 342262 - RNA, 32 nt, Homo Sapiens
gcaccacacuccgggagcccagcccccaucgg

SEQ ID NO: 342263 - RNA, 32 nt, Homo Sapiens
aguagagauaaaaauauauacauuucucuaau

SEQ ID NO: 342264 - RNA, 32 nt, Homo Sapiens
accauuucaaauaugaauauuagaaaguucaa

SEQ ID NO: 342265 - RNA, 32 nt, Homo Sapiens
ccuggcccugcaggcuccugcugcaccgcuau

SEQ ID NO: 342266 - RNA, 32 nt, Homo Sapiens
gacgcccgacccgaaggccggcugcuagggag

SEQ ID NO: 342267 - RNA, 32 nt, Homo Sapiens
cuacaucugauuuaugcauauuuuauaugcag

SEQ ID NO: 342268 - RNA, 32 nt, Homo Sapiens
ucccaagacagaggcccggugacacaguucag

SEQ ID NO: 342269 - RNA, 32 nt, Homo Sapiens
acccagcaccaaucuacagacggaguagaaaa

SEQ ID NO: 342270 - RNA, 32 nt, Homo Sapiens
aaggcugugcggacacugggggcccgccaggg

SEQ ID NO: 342271 - RNA, 32 nt, Homo Sapiens
cgcaucgcggggcucagaugacuguaaaauga

SEQ ID NO: 342272 - RNA, 32 nt, Homo Sapiens
ggggcuccaaaaaacucaggaaucaagaucag

SEQ ID NO: 342273 - RNA, 32 nt, Homo Sapiens
cuuuuaaggugauguuggaaccacugaagcag

SEQ ID NO: 342274 - RNA, 32 nt, Homo Sapiens
uuagaugcccccacccaccuguacucuggaga

SEQ ID NO: 342275 - RNA, 32 nt, Homo Sapiens
ucuuugccugacgcccaauaccugaaaauuaa

SEQ ID NO: 342276 - RNA, 32 nt, Homo Sapiens
acugcuccaaaaaacgaagaaaaagauucagg

SEQ ID NO: 342277 - RNA, 32 nt, Homo Sapiens
acucuguguacaaacauuuuaaugugguuuug

SEQ ID NO: 342278 - RNA, 32 nt, Homo Sapiens
cucaaagcucuauauguuuacauauuauuucu

SEQ ID NO: 342279 - RNA, 32 nt, Homo Sapiens
guuuguuuauuugcuagugaguuucuuuguaa

SEQ ID NO: 342280 - RNA, 32 nt, Homo Sapiens
uuagaagaaaacauauauuuuauuuucauacu

SEQ ID NO: 342281 - RNA, 32 nt, Homo Sapiens
uugcagcugcaaauggucaguuguauauuugc

SEQ ID NO: 342282 - RNA, 32 nt, Homo Sapiens
cugggcuucaguuuccuccuugcuccaugagg

SEQ ID NO: 342283 - RNA, 32 nt, Homo Sapiens
uuccaucugaccaauccccaggccucugguca

SEQ ID NO: 342284 - RNA, 31 nt, Homo Sapiens
gccacuggcaggccuuccugaguuagauuug

SEQ ID NO: 342285 - RNA, 32 nt, Homo Sapiens
cacagcccaucccaucuccccgacgccgcccg

SEQ ID NO: 342286 - RNA, 32 nt, Homo Sapiens
uuccaguguggcaucucagcaguguccuggcc

SEQ ID NO: 342287 - RNA, 29 nt, Homo Sapiens
ccuggcauggugaugucuguaaucccagc

SEQ ID NO: 342288 - RNA, 32 nt, Homo Sapiens
acuucacaaguuaacuuuuucuuauuuuguau

SEQ ID NO: 342289 - RNA, 32 nt, Homo Sapiens
cagacccugaagauuucagaggcugcagaacu

SEQ ID NO: 342290 - RNA, 32 nt, Homo Sapiens
agaugaugcccugcccaccuccccugcagaca

SEQ ID NO: 342291 - RNA, 32 nt, Homo Sapiens
caaucugugaggaaggagcccuucuuaacucc

SEQ ID NO: 342292 - RNA, 32 nt, Homo Sapiens
cauugauucagcaaauauuuauugagcugaaa

SEQ ID NO: 342293 - RNA, 32 nt, Homo Sapiens
ccagcuccucccggucucgccuuccucgcggu

SEQ ID NO: 342294 - RNA, 32 nt, Homo Sapiens
ccuccccccagcucaugauccuccucccuccc

SEQ ID NO: 342295 - RNA, 32 nt, Homo Sapiens
aagaaacaaaaauacagugaucaucaaaugcc

SEQ ID NO: 342296 - RNA, 32 nt, Homo Sapiens
auugcugacauauuaaaugacucuugccuaug

SEQ ID NO: 342297 - RNA, 32 nt, Homo Sapiens
gugauuucaaaauuaggcuaagaucauuaauu

SEQ ID NO: 342298 - RNA, 30 nt, Homo Sapiens
gcggacgccugcucagugcgcgccggccgg

SEQ ID NO: 342299 - RNA, 32 nt, Homo Sapiens
aauaccuauuuugcaccuagccuugagcaccu

SEQ ID NO: 342300 - RNA, 32 nt, Homo Sapiens
aacuccuuuuaaaaauaaaaucugaggagugu

SEQ ID NO: 342301 - RNA, 32 nt, Homo Sapiens
ugggagucaguaguuuccuaagagggagugga

SEQ ID NO: 342302 - RNA, 31 nt, Homo Sapiens
uguguaaccaccaccaccuguguaaccacca

SEQ ID NO: 342303 - RNA, 32 nt, Homo Sapiens
cuaaagccuguucuuaauuuuaucucauuuuu

SEQ ID NO: 342304 - RNA, 32 nt, Homo Sapiens
ggagccccgccaugcauagugaagaagcuaga

SEQ ID NO: 342305 - RNA, 32 nt, Homo Sapiens
aucucccguggcgcuaccugguccagggaggu

SEQ ID NO: 342306 - RNA, 32 nt, Homo Sapiens
uuuuguaucuuacaacaguauauauaaagacu

SEQ ID NO: 342307 - RNA, 32 nt, Homo Sapiens
aagguucagggugugaauucccagugccacuc

SEQ ID NO: 342308 - RNA, 32 nt, Homo Sapiens
uucuugucugacaaaaucacagccuuccacgu

SEQ ID NO: 342309 - RNA, 32 nt, Homo Sapiens
uacauaugauucuccuaugguuuccucucauc

SEQ ID NO: 342310 - RNA, 32 nt, Homo Sapiens
gaacuuaucucacuccugugaacuuucaggcu

SEQ ID NO: 342311 - RNA, 32 nt, Homo Sapiens
ggcaugcaguugcgcgaucucuguucacugca

SEQ ID NO: 342312 - RNA, 32 nt, Homo Sapiens
uaaccuguuuuaacuuugaauucuugccgggc

SEQ ID NO: 342313 - RNA, 32 nt, Homo Sapiens
gcgcgguuccccagcccucgcggcccuccccg

SEQ ID NO: 342314 - RNA, 32 nt, Homo Sapiens
ccauggcagcggguggcauccaggcugcccgu

SEQ ID NO: 342315 - RNA, 32 nt, Homo Sapiens
agauuggugcagcuuuuucaguucagauauca

SEQ ID NO: 342316 - RNA, 32 nt, Homo Sapiens
gcacagugaacccccauguacuccauguagcc

SEQ ID NO: 342317 - RNA, 32 nt, Homo Sapiens
auguucaucugugcagaggaugcauuuucuuc

SEQ ID NO: 342318 - RNA, 32 nt, Homo Sapiens
gagaguauuuuaggaaucuaauuuaagugcau

SEQ ID NO: 342319 - RNA, 32 nt, Homo Sapiens
cuucggagaaacuaggagaacaacaacagaaa

SEQ ID NO: 342320 - RNA, 32 nt, Homo Sapiens
uacaacauuaccauucuucuauggaaagaaaa

SEQ ID NO: 342321 - RNA, 26 nt, Homo Sapiens
gaugccugacgagcugacggagcccg

SEQ ID NO: 342322 - RNA, 32 nt, Homo Sapiens
aauuaguauuuucucugacaucucaugacauu

SEQ ID NO: 342323 - RNA, 32 nt, Homo Sapiens
uuuuuaagcaaugaaaauucaacugaguacaa

SEQ ID NO: 342324 - RNA, 32 nt, Homo Sapiens
ucuaguucaagcgauuuuccugccucagccuc

SEQ ID NO: 342325 - RNA, 32 nt, Homo Sapiens
aacugcagccucagcccaucuggcagaguccc

SEQ ID NO: 342326 - RNA, 32 nt, Homo Sapiens
ccuuaugaaaucaacuguguucuagcgaccac

SEQ ID NO: 342327 - RNA, 32 nt, Homo Sapiens
caggccuugucaucucucaccuggacugcugu

SEQ ID NO: 342328 - RNA, 32 nt, Homo Sapiens
gaagaacaauuucacgaagaggauacacagau

SEQ ID NO: 342329 - RNA, 32 nt, Homo Sapiens
uuugcuucagauccaugguguuaauaccaugu

SEQ ID NO: 342330 - RNA, 32 nt, Homo Sapiens
auuucacuagaaaaaauuuaauaucaaggacu

SEQ ID NO: 342331 - RNA, 32 nt, Homo Sapiens
aaauugcaguguuccucucugggaugagagcu

SEQ ID NO: 342332 - RNA, 32 nt, Homo Sapiens
uccugguuuguaaggcagccccagcguucaug

SEQ ID NO: 342333 - RNA, 32 nt, Homo Sapiens
gauguuuucccucuccuacguuagaaaccauu

SEQ ID NO: 342334 - RNA, 32 nt, Homo Sapiens
gagagaaccaguaugagaagugggggcagggc

SEQ ID NO: 342335 - RNA, 32 nt, Homo Sapiens
ccucacauuguuacgggaaucuucugggauga

SEQ ID NO: 342336 - RNA, 32 nt, Homo Sapiens
auuccuggguggcaaguguuacaaaccuuagg

SEQ ID NO: 342337 - RNA, 32 nt, Homo Sapiens
gacaguugaauaaucaaaaauauuuuauuagg

SEQ ID NO: 342338 - RNA, 32 nt, Homo Sapiens
ucauuguucuucucuuuuuuuauuuauuuuau

SEQ ID NO: 342339 - RNA, 32 nt, Homo Sapiens
ugcuagugagcguaugacacacacagccauac

SEQ ID NO: 342340 - RNA, 32 nt, Homo Sapiens
uuuguagaacugacacuaaacuacccgaagga

SEQ ID NO: 342341 - RNA, 32 nt, Homo Sapiens
cuugguggcuguggagaugaggaacugauguu

SEQ ID NO: 342342 - RNA, 32 nt, Homo Sapiens
uccuuuuguguauauagagugagcugauuugg

SEQ ID NO: 342343 - RNA, 32 nt, Homo Sapiens
uucacccucacagcgcacaaauaaagcuacga

SEQ ID NO: 342344 - RNA, 32 nt, Homo Sapiens
aaagacaagcauauggcauaucaggucucuuc

SEQ ID NO: 342345 - RNA, 32 nt, Homo Sapiens
cucggcccggaacauggcugcgcgcccugcug

SEQ ID NO: 342346 - RNA, 32 nt, Homo Sapiens
gcacgaggccagcuuggccaguggcuccgcag

SEQ ID NO: 342347 - RNA, 32 nt, Homo Sapiens
ggagaagaaauggggaggacucggguggggga

SEQ ID NO: 342348 - RNA, 32 nt, Homo Sapiens
uguuuuacugucagauuaaauuacagcuuuua

SEQ ID NO: 342349 - RNA, 32 nt, Homo Sapiens
uggagaccaagccucagcggagggaucagcgc

SEQ ID NO: 342350 - RNA, 32 nt, Homo Sapiens
cuguacuccagccugggcgacggagugagacu

SEQ ID NO: 342351 - RNA, 32 nt, Homo Sapiens
uggcguggggacgggccaucacuguauguauu

SEQ ID NO: 342352 - RNA, 32 nt, Homo Sapiens
gccccggccucccagagugcuggguugggauu

SEQ ID NO: 342353 - RNA, 32 nt, Homo Sapiens
ugggacgcggcgaccccucucccgcggcggcc

SEQ ID NO: 342354 - RNA, 32 nt, Homo Sapiens
guauuaauauuuuacuguauuuucuuuucuuu

SEQ ID NO: 342355 - RNA, 32 nt, Homo Sapiens
augagaagugggucugagaacagucccugccc

SEQ ID NO: 342356 - RNA, 32 nt, Homo Sapiens
agacucacugguggacaagacccugcuggagc

SEQ ID NO: 342357 - RNA, 32 nt, Homo Sapiens
ugagugacagcuuucugggaugucacagucca

SEQ ID NO: 342358 - RNA, 32 nt, Homo Sapiens
uagucaauugugaaauuuuucuuaaggcaauu

SEQ ID NO: 342359 - RNA, 32 nt, Homo Sapiens
uagcuuuugcguuaggaaauuucugcaugauu

SEQ ID NO: 342360 - RNA, 32 nt, Homo Sapiens
ucaguauuaaaagaaaaauauaaugugaauua

SEQ ID NO: 342361 - RNA, 32 nt, Homo Sapiens
gcuggcuuccuccuucuggguuucacaggcuc

SEQ ID NO: 342362 - RNA, 32 nt, Homo Sapiens
aagccgcucgcaccccguaggugcccauccgc

SEQ ID NO: 342363 - RNA, 32 nt, Homo Sapiens
uauguucacuuaguaucuuuaagcaagucuca

SEQ ID NO: 342364 - RNA, 32 nt, Homo Sapiens
ugugagcguccauauguuaccuaauguguauu

SEQ ID NO: 342365 - RNA, 32 nt, Homo Sapiens
aggugguguguugggggccccuucagacccaa

SEQ ID NO: 342366 - RNA, 32 nt, Homo Sapiens
gaaaagccuuguacaagaggcuucgugccaug

SEQ ID NO: 342367 - RNA, 32 nt, Homo Sapiens
agcaagccccccaccccaaucaaccucuaugc

SEQ ID NO: 342368 - RNA, 32 nt, Homo Sapiens
gggucgugguggaguuucuccuccaccucuca

SEQ ID NO: 342369 - RNA, 32 nt, Homo Sapiens
aucucaucaguucucagauuuggcuauauauu

SEQ ID NO: 342370 - RNA, 32 nt, Homo Sapiens
gcaggcgcccggugccccggccggcgaagacc

SEQ ID NO: 342371 - RNA, 32 nt, Homo Sapiens
ugaggaaguaucuauuugagcacugauuuacu

SEQ ID NO: 342372 - RNA, 32 nt, Homo Sapiens
agauugacccucaaaauacagcccagagaaac

SEQ ID NO: 342373 - RNA, 32 nt, Homo Sapiens
uucacuugcaguuuccuguucuccucauugcc

SEQ ID NO: 342374 - RNA, 32 nt, Homo Sapiens
aguguuuauagcagauucugacauaggagaga

SEQ ID NO: 342375 - RNA, 32 nt, Homo Sapiens
uuuugggcccgggcggcuguagaggcggcggc

SEQ ID NO: 342376 - RNA, 32 nt, Homo Sapiens
auggaaauaaauuucacugagauccagaaagu

SEQ ID NO: 342377 - RNA, 32 nt, Homo Sapiens
gaaggcagaaucaguugaguugugagggugaa

SEQ ID NO: 342378 - RNA, 32 nt, Homo Sapiens
cugaugcaaaaaacagaaaaggggugauguag

SEQ ID NO: 342379 - RNA, 32 nt, Homo Sapiens
uucaucagccugggcagucuuaccaaaauguu

SEQ ID NO: 342380 - RNA, 32 nt, Homo Sapiens
gaauggcagaucugagacgauccaggaagagc

SEQ ID NO: 342381 - RNA, 32 nt, Homo Sapiens
acagaggccccggcacugggugcccaguggcc

SEQ ID NO: 342382 - RNA, 32 nt, Homo Sapiens
cgcaccccacccacuuccugugcucgcccggg

SEQ ID NO: 342383 - RNA, 32 nt, Homo Sapiens
ccugaaguccugggucuaggccaggcauuguc

SEQ ID NO: 342384 - RNA, 32 nt, Homo Sapiens
ucuaacagcuucugccucacuccuaagcucug

SEQ ID NO: 342385 - RNA, 32 nt, Homo Sapiens
uauuuauuuucagccaggaacuuuagcaaacu

SEQ ID NO: 342386 - RNA, 32 nt, Homo Sapiens
aggggggccccgggacccacggagcccucccu

SEQ ID NO: 342387 - RNA, 32 nt, Homo Sapiens
cagugacauucagcagcgugcucugaacgggg

SEQ ID NO: 342388 - RNA, 31 nt, Homo Sapiens
gaauccauucaagucuuucuaacugaauacu

SEQ ID NO: 342389 - RNA, 32 nt, Homo Sapiens
gggcccaagcugcggcagcggcucccaacgcc

SEQ ID NO: 342390 - RNA, 32 nt, Homo Sapiens
ugcuguguuuuaacaucgugcuucuuauaugg

SEQ ID NO: 342391 - RNA, 32 nt, Homo Sapiens
gcucaucugugccuuuguccaucuacaaugcc

SEQ ID NO: 342392 - RNA, 32 nt, Homo Sapiens
auuucucuuugacuagcaaggcuuguuagaua

SEQ ID NO: 342393 - RNA, 32 nt, Homo Sapiens
guaacugaaacacugcacuuuacuguuuuaua

SEQ ID NO: 342394 - RNA, 29 nt, Homo Sapiens
gacgaugcgugcgcuccgcgaccgagccg

SEQ ID NO: 342395 - RNA, 32 nt, Homo Sapiens
uuguagaaguauuagaaaaauauucuauuuuu

SEQ ID NO: 342396 - RNA, 32 nt, Homo Sapiens
cagggguuaauauauauacauacauacacaua

SEQ ID NO: 342397 - RNA, 32 nt, Homo Sapiens
auuaguaaauuaaauccaggaacauauauaaa

SEQ ID NO: 342398 - RNA, 32 nt, Homo Sapiens
uuuagacauuuaugagauucucugccacuaac

SEQ ID NO: 342399 - RNA, 32 nt, Homo Sapiens
caguuauuuguugacgaaucggaccccuucga

SEQ ID NO: 342400 - RNA, 32 nt, Homo Sapiens
uauguaguuugaaauguaaaaauguucuaaua

SEQ ID NO: 342401 - RNA, 32 nt, Homo Sapiens
uacauuuuccacuuacaaaaagaagacaauuc

SEQ ID NO: 342402 - RNA, 32 nt, Homo Sapiens
uaaccuuuacggggccuggcggugcugacgcc

SEQ ID NO: 342403 - RNA, 32 nt, Homo Sapiens
agaaagauuaaaccuacuuucauauguauuaa

SEQ ID NO: 342404 - RNA, 32 nt, Homo Sapiens
ucgcuccaccugcgaggccggcguggcugagc

SEQ ID NO: 342405 - RNA, 32 nt, Homo Sapiens
cagauuuugggguuguguugucacccaagaga

SEQ ID NO: 342406 - RNA, 32 nt, Homo Sapiens
acugauuucaauguuaaucuauuucaagagca

SEQ ID NO: 342407 - RNA, 32 nt, Homo Sapiens
uaagaaggggucugaagccccccaaaaaagga

SEQ ID NO: 342408 - RNA, 32 nt, Homo Sapiens
cucuguacgcauucaauuuccuccccuccaaa

SEQ ID NO: 342409 - RNA, 32 nt, Homo Sapiens
agccuaaucccaaccccagggcgaagguuuuc

SEQ ID NO: 342410 - RNA, 32 nt, Homo Sapiens
gaccccugaugcugugagcagugugagcccug

SEQ ID NO: 342411 - RNA, 32 nt, Homo Sapiens
gguuccgaugugucuccaugggcugugcuccc

SEQ ID NO: 342412 - RNA, 29 nt, Homo Sapiens
cucaauggccagcgccagcugcagccccg

SEQ ID NO: 342413 - RNA, 32 nt, Homo Sapiens
gccugggaggucguucuagggaugcuccugac

SEQ ID NO: 342414 - RNA, 32 nt, Homo Sapiens
aaaugccaauugacacaaagcauuccaguagc

SEQ ID NO: 342415 - RNA, 32 nt, Homo Sapiens
uuagaaauaaaauaaacugacuuauuucacua

SEQ ID NO: 342416 - RNA, 32 nt, Homo Sapiens
cuuuuuauaaagaucauuuauaauacuguuuu

SEQ ID NO: 342417 - RNA, 32 nt, Homo Sapiens
agccuuauuagcaaaaguuuuaagaaauggcu

SEQ ID NO: 342418 - RNA, 32 nt, Homo Sapiens
uccuagauuaccucacugggaauagcauugug

SEQ ID NO: 342419 - RNA, 30 nt, Homo Sapiens
ccagggcugcccgugccagccaugcuuuug

SEQ ID NO: 342420 - RNA, 32 nt, Homo Sapiens
uucuguucucauuuacuaaugaauuucaauaa

SEQ ID NO: 342421 - RNA, 32 nt, Homo Sapiens
agagcccuguacccucgacccggagcagccuc

SEQ ID NO: 342422 - RNA, 32 nt, Homo Sapiens
cuuccccggcugaggccgcugcgacccggccc

SEQ ID NO: 342423 - RNA, 31 nt, Homo Sapiens
aaauauuauuugacuauaauauaaaugugug

SEQ ID NO: 342424 - RNA, 30 nt, Homo Sapiens
gugggaagagguggcaggaaggggaucuga

SEQ ID NO: 342425 - RNA, 32 nt, Homo Sapiens
gcucuggaagcagauucaguagaugcuacucg

SEQ ID NO: 342426 - RNA, 32 nt, Homo Sapiens
ccacaacacaccucacaggccaggcaggaaca

SEQ ID NO: 342427 - RNA, 32 nt, Homo Sapiens
cuuguucugucagcugcauaccaguaauaaaa

SEQ ID NO: 342428 - RNA, 32 nt, Homo Sapiens
aaagauguuguaaucauaucugcauguccuaa

SEQ ID NO: 342429 - RNA, 32 nt, Homo Sapiens
uuacaaauguggugccauaguuugucaucccu

SEQ ID NO: 342430 - RNA, 32 nt, Homo Sapiens
acuccgaagcuacucccccagcacacagcccg

SEQ ID NO: 342431 - RNA, 32 nt, Homo Sapiens
gcuacaaagcuacaaucaucaagacauuauga

SEQ ID NO: 342432 - RNA, 32 nt, Homo Sapiens
ccccgucucauggcucuccgggccccgucccc

SEQ ID NO: 342433 - RNA, 32 nt, Homo Sapiens
auucaacaaucuuucaccuauuucauaaguca

SEQ ID NO: 342434 - RNA, 31 nt, Homo Sapiens
gaacaugcaagguaccugcaggauccacuug

SEQ ID NO: 342435 - RNA, 32 nt, Homo Sapiens
gaaccaaaaaagaguccauacagccaagacaa

SEQ ID NO: 342436 - RNA, 32 nt, Homo Sapiens
ucuguuuuuccuugcucauuucguuuugggga

SEQ ID NO: 342437 - RNA, 32 nt, Homo Sapiens
gcagaguggcaucagccaaggcugguuaggcu

SEQ ID NO: 342438 - RNA, 32 nt, Homo Sapiens
gcuucccagcucucccuguccuccuccccccg

SEQ ID NO: 342439 - RNA, 32 nt, Homo Sapiens
cagacauaaaagacaggggaaaacaugggaag

SEQ ID NO: 342440 - RNA, 32 nt, Homo Sapiens
cugccguguuccugguaccucagugaaaugaa

SEQ ID NO: 342441 - RNA, 32 nt, Homo Sapiens
ggugaaucagcaugucacauuccacuaaaaga

SEQ ID NO: 342442 - RNA, 32 nt, Homo Sapiens
uuagacucuccacagcauucaugucaauaugg

SEQ ID NO: 342443 - RNA, 32 nt, Homo Sapiens
gcugguucccgcccggcccuccugggacuugu

SEQ ID NO: 342444 - RNA, 32 nt, Homo Sapiens
gaaaucgggaucgccagacuguccuugagaga

SEQ ID NO: 342445 - RNA, 32 nt, Homo Sapiens
gccacgcccccgcuaccucgcuccuccuccca

SEQ ID NO: 342446 - RNA, 32 nt, Homo Sapiens
ccagccugcugagacucccuagccacagaaac

SEQ ID NO: 342447 - RNA, 32 nt, Homo Sapiens
uuguuucagauaaauuucaauuagauuuaaaa

SEQ ID NO: 342448 - RNA, 32 nt, Homo Sapiens
ugcaggaacuggaacagcugcucuguguagcc

SEQ ID NO: 342449 - RNA, 32 nt, Homo Sapiens
cccgcgcgucgguccccgcgcggccgccauga

SEQ ID NO: 342450 - RNA, 32 nt, Homo Sapiens
agccucagcucuagaaugcuuaccacuguuaa

SEQ ID NO: 342451 - RNA, 32 nt, Homo Sapiens
augagagggucagcaucuccacuaguggcugc

SEQ ID NO: 342452 - RNA, 32 nt, Homo Sapiens
ugauaaauauuuuuccuccucugaacuggauu

SEQ ID NO: 342453 - RNA, 30 nt, Homo Sapiens
uuuuuggugcuaauggaaaggacccgagau

SEQ ID NO: 342454 - RNA, 32 nt, Homo Sapiens
uauaacuguuucauauuuuucuuuugacaaag

SEQ ID NO: 342455 - RNA, 32 nt, Homo Sapiens
gaccuugccguggcuaaaucuuuaccuucuca

SEQ ID NO: 342456 - RNA, 32 nt, Homo Sapiens
uuucagaaguugcuuauacccuguucccaaac

SEQ ID NO: 342457 - RNA, 32 nt, Homo Sapiens
gcucaugugcuaagaggaucuguccacauuug

SEQ ID NO: 342458 - RNA, 32 nt, Homo Sapiens
ugauguguguugucagccugugcuguggcaua

SEQ ID NO: 342459 - RNA, 32 nt, Homo Sapiens
uucugccugcacuuacuuuguaaugccacggu

SEQ ID NO: 342460 - RNA, 32 nt, Homo Sapiens
cugaaggaaaagacauagggaauggugguugg

SEQ ID NO: 342461 - RNA, 32 nt, Homo Sapiens
ucaggaacagcuugaagcccccugcaaagucu

SEQ ID NO: 342462 - RNA, 32 nt, Homo Sapiens
gucuauacuucccccuccccagccccaaacau

SEQ ID NO: 342463 - RNA, 32 nt, Homo Sapiens
agccucguggggcagagggcccggggccgccg

SEQ ID NO: 342464 - RNA, 32 nt, Homo Sapiens
ucauaagcaugcaauaaauguuagccagcuua

SEQ ID NO: 342465 - RNA, 32 nt, Homo Sapiens
cccagcaucuacugaggcagaccugcaacaga

SEQ ID NO: 342466 - RNA, 32 nt, Homo Sapiens
caacuaugaagauaggaugcccauccagaaga

SEQ ID NO: 342467 - RNA, 32 nt, Homo Sapiens
agcagagauugugccacugcacuccagccugg

SEQ ID NO: 342468 - RNA, 32 nt, Homo Sapiens
cccuccacgguccgcggccugcaccgacccga

SEQ ID NO: 342469 - RNA, 32 nt, Homo Sapiens
cuuccucacuggcaucagaguauuucacuaua

SEQ ID NO: 342470 - RNA, 32 nt, Homo Sapiens
acuccgaguucgggcggugaggucucccgagc

SEQ ID NO: 342471 - RNA, 32 nt, Homo Sapiens
ucugggagaugcuggaauaaaagacaagaguu

SEQ ID NO: 342472 - RNA, 32 nt, Homo Sapiens
guuucugauuggcacaucuuuggaucuacuuu

SEQ ID NO: 342473 - RNA, 32 nt, Homo Sapiens
aauucucccugcagccugaagaacggauccuu

SEQ ID NO: 342474 - RNA, 32 nt, Homo Sapiens
guucgggggagcagagagagccagacagcccc

SEQ ID NO: 342475 - RNA, 32 nt, Homo Sapiens
auugaccaccggcagcagcagcagcacacaaa

SEQ ID NO: 342476 - RNA, 32 nt, Homo Sapiens
cgugagcccuugccccuguccacacagaaugg

SEQ ID NO: 342477 - RNA, 30 nt, Homo Sapiens
cggggagagaagcuggacugcagcugguuu

SEQ ID NO: 342478 - RNA, 32 nt, Homo Sapiens
gagggaggcaugccugggucccagguaagcug

SEQ ID NO: 342479 - RNA, 32 nt, Homo Sapiens
acucggucuuuguauuuuuaggauguagagag

SEQ ID NO: 342480 - RNA, 32 nt, Homo Sapiens
ccccacauucuauuuccuguuuucugaaucca

SEQ ID NO: 342481 - RNA, 32 nt, Homo Sapiens
aggcaccgggcuggcugcuugcagccaggaga

SEQ ID NO: 342482 - RNA, 32 nt, Homo Sapiens
ucuacuuuuuaaacucugcagggauuugguua

SEQ ID NO: 342483 - RNA, 32 nt, Homo Sapiens
cgcaggccucaguucuguauagcaaugcugug

SEQ ID NO: 342484 - RNA, 32 nt, Homo Sapiens
ccggcggcggguggccugcccaacgugugcug

SEQ ID NO: 342485 - RNA, 32 nt, Homo Sapiens
uucauucaaauuaauguaaguauguuguucaa

SEQ ID NO: 342486 - RNA, 32 nt, Homo Sapiens
ucccuucccccggccccccgggccucaugacc

SEQ ID NO: 342487 - RNA, 32 nt, Homo Sapiens
guugggguuuguggcaucaucauccccuggaa

SEQ ID NO: 342488 - RNA, 32 nt, Homo Sapiens
uaggauuccagaugggggccucauuucuacag

SEQ ID NO: 342489 - RNA, 32 nt, Homo Sapiens
ugaaguugcucaacaaacccacccauuuauau

SEQ ID NO: 342490 - RNA, 29 nt, Homo Sapiens
gacaucaguguugccaauaaaaccaaaaa

SEQ ID NO: 342491 - RNA, 32 nt, Homo Sapiens
gcaaggcuccacuuugccccagcuucaagcug

SEQ ID NO: 342492 - RNA, 32 nt, Homo Sapiens
agagaaagccuauagugauaauaaagucaaau

SEQ ID NO: 342493 - RNA, 32 nt, Homo Sapiens
aagccggccccggccucaggggacacccagac

SEQ ID NO: 342494 - RNA, 32 nt, Homo Sapiens
cuugcuugccagcaguugcucccuuaguccuu

SEQ ID NO: 342495 - RNA, 30 nt, Homo Sapiens
cuucuggagucccccauccgucuuggggcc

SEQ ID NO: 342496 - RNA, 32 nt, Homo Sapiens
cauauucccugccuuccuggggucauacagcu

SEQ ID NO: 342497 - RNA, 32 nt, Homo Sapiens
gaaaagauacgacuuuauuuucugguagauag

SEQ ID NO: 342498 - RNA, 28 nt, Homo Sapiens
ugauaaaguaaauuacauuugaauuggc

SEQ ID NO: 342499 - RNA, 32 nt, Homo Sapiens
caggauccgagagaggcgcgggcggguggccg

SEQ ID NO: 342500 - RNA, 32 nt, Homo Sapiens
uguguggggcuugauugggagggcggugggag

SEQ ID NO: 342501 - RNA, 28 nt, Homo Sapiens
uuuuaaguggaagaucauuugaaucuca

SEQ ID NO: 342502 - RNA, 32 nt, Homo Sapiens
ccucaacaccucagggcaggaaggaggggcuu

SEQ ID NO: 342503 - RNA, 32 nt, Homo Sapiens
guucugcccaaccucccucucgccucagcccc

SEQ ID NO: 342504 - RNA, 32 nt, Homo Sapiens
ggacacucacagcccuucccagccccaccucc

SEQ ID NO: 342505 - RNA, 32 nt, Homo Sapiens
cuuuuuuguuugcauccuuuauuuuuaauauu

SEQ ID NO: 342506 - RNA, 32 nt, Homo Sapiens
gauauguuuuuguuucauaaucacuaacuuua

SEQ ID NO: 342507 - RNA, 32 nt, Homo Sapiens
cccggagccuggaggagcugcugcuggacgcc

SEQ ID NO: 342508 - RNA, 31 nt, Homo Sapiens
aaaaguuucaggaaaaaacgaguuuguugga

SEQ ID NO: 342509 - RNA, 32 nt, Homo Sapiens
cuuuuagagcuguuaauagaaauuauauagca

SEQ ID NO: 342510 - RNA, 32 nt, Homo Sapiens
aguuccucaaacacagacccagggugcaugcc

SEQ ID NO: 342511 - RNA, 32 nt, Homo Sapiens
gguuucauuauguuggccaggcuggucucgaa

SEQ ID NO: 342512 - RNA, 32 nt, Homo Sapiens
uuuguuuuuuaaaacuucuguuucuugggagg

SEQ ID NO: 342513 - RNA, 32 nt, Homo Sapiens
auuauuuuuggaaaaaucguugugggaaccau

SEQ ID NO: 342514 - RNA, 32 nt, Homo Sapiens
ugugauggggaugugcagggacagugggaucc

SEQ ID NO: 342515 - RNA, 32 nt, Homo Sapiens
gcucgcaacuucggccucccccggcucccgcc

SEQ ID NO: 342516 - RNA, 32 nt, Homo Sapiens
auaaguucauuuccuguuaaucaaagacauuc

SEQ ID NO: 342517 - RNA, 32 nt, Homo Sapiens
accaggcggccuuuuccaaagcuugugcucug

SEQ ID NO: 342518 - RNA, 32 nt, Homo Sapiens
uuuuuccauaagauuuugauaauauauacaaa

SEQ ID NO: 342519 - RNA, 32 nt, Homo Sapiens
acuuacauuuucugcacaggucugcaaaaaca

SEQ ID NO: 342520 - RNA, 32 nt, Homo Sapiens
uuauguauauauauucugaaaugcucccuuuu

SEQ ID NO: 342521 - RNA, 32 nt, Homo Sapiens
cuguucuuauuaugaauccauucauucaagaa

SEQ ID NO: 342522 - RNA, 32 nt, Homo Sapiens
acgagggcugcccgggcugcgcggcgucugca

SEQ ID NO: 342523 - RNA, 32 nt, Homo Sapiens
cgccugugaucucagcacuuugaggggcggag

SEQ ID NO: 342524 - RNA, 32 nt, Homo Sapiens
gcagccgccccgaaggagcaagguguaaauua

SEQ ID NO: 342525 - RNA, 32 nt, Homo Sapiens
caggaagaauauggggucucuuucucugacuc

SEQ ID NO: 342526 - RNA, 32 nt, Homo Sapiens
uuaguuggagagaggggugugggaggaagcuu

SEQ ID NO: 342527 - RNA, 32 nt, Homo Sapiens
uaccaacaacugggcuuaucacugggaaaaca

SEQ ID NO: 342528 - RNA, 32 nt, Homo Sapiens
aaaacuuucuguuuucuggggucugggaaaau

SEQ ID NO: 342529 - RNA, 32 nt, Homo Sapiens
ugaaucuucaacaugauuguauuucuuuaacc

SEQ ID NO: 342530 - RNA, 32 nt, Homo Sapiens
aaacuucagcgaagagugcgcugguaaagugg

SEQ ID NO: 342531 - RNA, 32 nt, Homo Sapiens
cgagcgcacuuuuuucuuguccgggugcgcuc

SEQ ID NO: 342532 - RNA, 32 nt, Homo Sapiens
caucuucaagaggagggaggguccuggcccug

SEQ ID NO: 342533 - RNA, 32 nt, Homo Sapiens
aagcucuuugggacugaaauggcuguuuauga

SEQ ID NO: 342534 - RNA, 32 nt, Homo Sapiens
guccagcucuccagagggguguguguaugcgu

SEQ ID NO: 342535 - RNA, 32 nt, Homo Sapiens
ucggggagucagcccgccagcccgccagcucg

SEQ ID NO: 342536 - RNA, 32 nt, Homo Sapiens
aguugaacugguuuuucaguuuuuaaaaggcc

SEQ ID NO: 342537 - RNA, 32 nt, Homo Sapiens
uucaggcacagguggaauagaagaaaucguga

SEQ ID NO: 342538 - RNA, 31 nt, Homo Sapiens
agcugccggugugugagggugacuaguguug

SEQ ID NO: 342539 - RNA, 32 nt, Homo Sapiens
cagagacccaaguuuagguucucauaguguau

SEQ ID NO: 342540 - RNA, 32 nt, Homo Sapiens
aauaauaaacccaacacccaucccccagaaga

SEQ ID NO: 342541 - RNA, 30 nt, Homo Sapiens
ucucaguuuauaaugggggaaaacaggcaa

SEQ ID NO: 342542 - RNA, 32 nt, Homo Sapiens
ucaagggcaaaugcacccucauguggcccgga

SEQ ID NO: 342543 - RNA, 32 nt, Homo Sapiens
ugugaugaagauccagccggccuugggagccu

SEQ ID NO: 342544 - RNA, 32 nt, Homo Sapiens
caccaggggcuggggagaaggagggguggcau

SEQ ID NO: 342545 - RNA, 32 nt, Homo Sapiens
uuaccauuccaugugggaccauugugccaauu

SEQ ID NO: 342546 - RNA, 32 nt, Homo Sapiens
uauaccaaguccuccucucaugacucaaaguc

SEQ ID NO: 342547 - RNA, 32 nt, Homo Sapiens
uaguaaaaggcauucaaugaugagagcacaca

SEQ ID NO: 342548 - RNA, 32 nt, Homo Sapiens
caucccagagggaccggaguuaugacaagcuu

SEQ ID NO: 342549 - RNA, 32 nt, Homo Sapiens
gccgacugccgccccaggcuccgccaugggga

SEQ ID NO: 342550 - RNA, 32 nt, Homo Sapiens
caaucucaucccucccagcagcuccccuucca

SEQ ID NO: 342551 - RNA, 32 nt, Homo Sapiens
ucaaaaauaaauuuauacauagaaacaaauuu

SEQ ID NO: 342552 - RNA, 32 nt, Homo Sapiens
aaccucugacugcaaugaccuuucugugcaau

SEQ ID NO: 342553 - RNA, 32 nt, Homo Sapiens
guuguaaagauauuuucuuuuuguuauuagaa

SEQ ID NO: 342554 - RNA, 32 nt, Homo Sapiens
ggagaagcggcggggagacgccggcugccagc

SEQ ID NO: 342555 - RNA, 32 nt, Homo Sapiens
cggccccgccccacccugggccucacgcaccc

SEQ ID NO: 342556 - RNA, 32 nt, Homo Sapiens
uucaagccauucuccugucucagccucccaag

SEQ ID NO: 342557 - RNA, 32 nt, Homo Sapiens
gaagcaccuggggcuccagggagcaggcuggg

SEQ ID NO: 342558 - RNA, 32 nt, Homo Sapiens
aguucuaaccucaguccagaaacauaugugag

SEQ ID NO: 342559 - RNA, 32 nt, Homo Sapiens
caggccucaucccacuuccaccagcaccauag

SEQ ID NO: 342560 - RNA, 32 nt, Homo Sapiens
agagccuuccgcagguccccgccccgucacgu

SEQ ID NO: 342561 - RNA, 32 nt, Homo Sapiens
uguuuguuacaucaucuuucuguuucuauuuu

SEQ ID NO: 342562 - RNA, 32 nt, Homo Sapiens
cccuguaaggccagcccaacaccugccccacc

SEQ ID NO: 342563 - RNA, 32 nt, Homo Sapiens
aaaacauucaaaaaagacaaaaaugaaaaauu

SEQ ID NO: 342564 - RNA, 32 nt, Homo Sapiens
ucaugauauaaauuauugaaaacagaucacau

SEQ ID NO: 342565 - RNA, 32 nt, Homo Sapiens
agaaagcugcaagaauggcacuuuuugauuca

SEQ ID NO: 342566 - RNA, 32 nt, Homo Sapiens
ccuuuucccacagcagcauauuuuagaggcac

SEQ ID NO: 342567 - RNA, 32 nt, Homo Sapiens
ccauggagcuccugggugagcagcugcucuga

SEQ ID NO: 342568 - RNA, 32 nt, Homo Sapiens
ugauucugacuucuaacauuacaaauuaguuu

SEQ ID NO: 342569 - RNA, 32 nt, Homo Sapiens
agcaggagcagccagcagugcauucaccccac

SEQ ID NO: 342570 - RNA, 32 nt, Homo Sapiens
acguggggugugcugcugcugcuccccagccc

SEQ ID NO: 342571 - RNA, 32 nt, Homo Sapiens
aacgcucuccccacccacgccaugcugaccag

SEQ ID NO: 342572 - RNA, 32 nt, Homo Sapiens
agaguccccgguccaacaccauguccuccgcc

SEQ ID NO: 342573 - RNA, 32 nt, Homo Sapiens
gcuauuccaugacguuuguaaaauguuuguaa

SEQ ID NO: 342574 - RNA, 32 nt, Homo Sapiens
caccgcaccccgccauggagcggccgucgcug

SEQ ID NO: 342575 - RNA, 32 nt, Homo Sapiens
aucucggucacugaugucuccaaauacgccuu

SEQ ID NO: 342576 - RNA, 32 nt, Homo Sapiens
uaacgcagcacuuagacacguguuguuccacc

SEQ ID NO: 342577 - RNA, 32 nt, Homo Sapiens
cuuuucaagcauuuggggaguuuaucuugcca

SEQ ID NO: 342578 - RNA, 32 nt, Homo Sapiens
ccugauaacacuuuuaagauugauuagauuga

SEQ ID NO: 342579 - RNA, 32 nt, Homo Sapiens
ccgguuguuuagaaacagaaauagacuuaaua

SEQ ID NO: 342580 - RNA, 32 nt, Homo Sapiens
gccaccgcccccagccuggccuggcauuucuu

SEQ ID NO: 342581 - RNA, 32 nt, Homo Sapiens
ccuuucuuagccuuuuucuguuuccauucagu

SEQ ID NO: 342582 - RNA, 32 nt, Homo Sapiens
aguuaggugccugguuuauaguggugugugac

SEQ ID NO: 342583 - RNA, 32 nt, Homo Sapiens
cugucuguggagggguaguaguuuccgcuucc

SEQ ID NO: 342584 - RNA, 32 nt, Homo Sapiens
uuggauguuuuggaagcaaauucauacgaucg

SEQ ID NO: 342585 - RNA, 32 nt, Homo Sapiens
auaaauuuauuauauuugauauuuuuuuacuu

SEQ ID NO: 342586 - RNA, 31 nt, Homo Sapiens
uccagcagcugcugcucuccaaggcugcugu

SEQ ID NO: 342587 - RNA, 32 nt, Homo Sapiens
ucauucuaacaacccagguuauuuucaaucag

SEQ ID NO: 342588 - RNA, 31 nt, Homo Sapiens
gaaaugcugccggcugcacccagagggagca

SEQ ID NO: 342589 - RNA, 32 nt, Homo Sapiens
accuggcauccggcucgccgccgcccgggcug

SEQ ID NO: 342590 - RNA, 32 nt, Homo Sapiens
uaaguuuuucuuugcuuuaagauuauagguau

SEQ ID NO: 342591 - RNA, 32 nt, Homo Sapiens
aauagaaccucccagcucccagcccuuccuag

SEQ ID NO: 342592 - RNA, 32 nt, Homo Sapiens
acgagccccacucgggcuggcuccuccgcgcg

SEQ ID NO: 342593 - RNA, 32 nt, Homo Sapiens
aaaugaaggauggccacaagcguaaggcauau

SEQ ID NO: 342594 - RNA, 32 nt, Homo Sapiens
agugcugcugcuaccuaccauaauguguuugu

SEQ ID NO: 342595 - RNA, 32 nt, Homo Sapiens
acagggaagggaaagcacuggggugggggagc

SEQ ID NO: 342596 - RNA, 32 nt, Homo Sapiens
uuccucaaguuaguuauguuguaggaguguac

SEQ ID NO: 342597 - RNA, 32 nt, Homo Sapiens
accgccccggcugccaucuccuccuccugggc

SEQ ID NO: 342598 - RNA, 32 nt, Homo Sapiens
agccauucuaaagagaagagagaccaggugug

SEQ ID NO: 342599 - RNA, 31 nt, Homo Sapiens
ccgugcuguggugugaccugaguuggugaca

SEQ ID NO: 342600 - RNA, 32 nt, Homo Sapiens
aucauguuauagacauaacuugauauccugca

SEQ ID NO: 342601 - RNA, 32 nt, Homo Sapiens
gguaggggaaggaggauaagcuuuuguuuuuu

SEQ ID NO: 342602 - RNA, 32 nt, Homo Sapiens
cacgggcgagggcuugcucuggacucagucug

SEQ ID NO: 342603 - RNA, 32 nt, Homo Sapiens
uccucgcugggcccgccgaccccgguguuagc

SEQ ID NO: 342604 - RNA, 32 nt, Homo Sapiens
aaggauacugucauuugcauuuuuaaaaauau

SEQ ID NO: 342605 - RNA, 32 nt, Homo Sapiens
ccuuaccugcccuccgcccacccgugggcccc

SEQ ID NO: 342606 - RNA, 32 nt, Homo Sapiens
aagucguagucgugaacgaaagagaagcaaaa

SEQ ID NO: 342607 - RNA, 32 nt, Homo Sapiens
aucuucccgcaugcgcaguacaccgccccccu

SEQ ID NO: 342608 - RNA, 32 nt, Homo Sapiens
auugucugguucuuguaauauuguguuuccug

SEQ ID NO: 342609 - RNA, 32 nt, Homo Sapiens
acaagaggacuuggaggaaaagagcuacuaua

SEQ ID NO: 342610 - RNA, 32 nt, Homo Sapiens
ggaguuaggugucaagugaagucuccuuguua

SEQ ID NO: 342611 - RNA, 32 nt, Homo Sapiens
agccucuuaaaauaaacuuagagccaugcaaa

SEQ ID NO: 342612 - RNA, 32 nt, Homo Sapiens
cuugguggcgcuggcagccgugcuccugaaca

SEQ ID NO: 342613 - RNA, 32 nt, Homo Sapiens
ggagugagggaaggaggcaggggugcugagaa

SEQ ID NO: 342614 - RNA, 32 nt, Homo Sapiens
augaacaugggcaaauuaucuaaucucucuga

SEQ ID NO: 342615 - RNA, 32 nt, Homo Sapiens
uccgguguugcauccuuggagcgagcugagag

SEQ ID NO: 342616 - RNA, 32 nt, Homo Sapiens
ucaagagaaagaccagaagagaaggcaaaaau

SEQ ID NO: 342617 - RNA, 32 nt, Homo Sapiens
uuaugaguaaaaauaaguuacuuuaauugcuu

SEQ ID NO: 342618 - RNA, 29 nt, Homo Sapiens
uaauuugaaaguuuacauuuuuuaugcuu

SEQ ID NO: 342619 - RNA, 31 nt, Homo Sapiens
guagauuucacauaaaaguccagauccacag

SEQ ID NO: 342620 - RNA, 32 nt, Homo Sapiens
uugcugcauggguuaauugagaauagaaauuu

SEQ ID NO: 342621 - RNA, 32 nt, Homo Sapiens
ccccuuuggaaaucugucuucuuuuuaaacuc

SEQ ID NO: 342622 - RNA, 32 nt, Homo Sapiens
guagcugagaauucaaaaacauccuugcagaa

SEQ ID NO: 342623 - RNA, 32 nt, Homo Sapiens
ucccugcucccucccuccgugagguguccggg

SEQ ID NO: 342624 - RNA, 32 nt, Homo Sapiens
uccaagaccccucacauccaauccuguccugu

SEQ ID NO: 342625 - RNA, 32 nt, Homo Sapiens
cuugucucacaugagacuuuggacuguggacu

SEQ ID NO: 342626 - RNA, 32 nt, Homo Sapiens
ggaccccuccuucuccuccccgcgugcgcgug

SEQ ID NO: 342627 - RNA, 32 nt, Homo Sapiens
gagggcacccggugcguccccggagcggggag

SEQ ID NO: 342628 - RNA, 32 nt, Homo Sapiens
ggaacucacacacacacacacacacacacacg

SEQ ID NO: 342629 - RNA, 32 nt, Homo Sapiens
agggaauuaacagauaguaucaagcgcagaag

SEQ ID NO: 342630 - RNA, 32 nt, Homo Sapiens
ggcagugacaccuggccccugacaagccugag

SEQ ID NO: 342631 - RNA, 32 nt, Homo Sapiens
agcugauuccucccaauuuaucuguuauguuu

SEQ ID NO: 342632 - RNA, 32 nt, Homo Sapiens
aaaaauggggguggggggugggggguggacaa

SEQ ID NO: 342633 - RNA, 32 nt, Homo Sapiens
cucuuuccccuuccuuuuuuuuuuuaauuaaa

SEQ ID NO: 342634 - RNA, 32 nt, Homo Sapiens
caccuccccccgcaucccccaucugcagcccg

SEQ ID NO: 342635 - RNA, 32 nt, Homo Sapiens
cgaccgcuggagaccgagcggcguggggaaga

SEQ ID NO: 342636 - RNA, 32 nt, Homo Sapiens
uccaagcccccaaauagcuccaggcgcccucg

SEQ ID NO: 342637 - RNA, 32 nt, Homo Sapiens
uuuuuucuaaucuucaguauguagugagcauu

SEQ ID NO: 342638 - RNA, 32 nt, Homo Sapiens
gccucugucgccacucucucccccuguuccgc

SEQ ID NO: 342639 - RNA, 32 nt, Homo Sapiens
gucauuaauuuucaacucaaugaaauauguga

SEQ ID NO: 342640 - RNA, 32 nt, Homo Sapiens
uucuuuucugguggauuuaaugcugacucacu

SEQ ID NO: 342641 - RNA, 32 nt, Homo Sapiens
caccuaauuuuuauacugaaauguagaugccc

SEQ ID NO: 342642 - RNA, 32 nt, Homo Sapiens
cuccugccuugaugaagcccauguccugccuu

SEQ ID NO: 342643 - RNA, 32 nt, Homo Sapiens
ucggaggcgcccggccgccccggagccaagca

SEQ ID NO: 342644 - RNA, 32 nt, Homo Sapiens
ccagccgcuggcgcccgcacccgccgcacccc

SEQ ID NO: 342645 - RNA, 32 nt, Homo Sapiens
agugggcucugcggauaacucagacgccauua

SEQ ID NO: 342646 - RNA, 32 nt, Homo Sapiens
guuuuauuuaacaaaauucuagucaagggaua

SEQ ID NO: 342647 - RNA, 32 nt, Homo Sapiens
ccaggcucugagagcccagcucugggccaggc

SEQ ID NO: 342648 - RNA, 32 nt, Homo Sapiens
cagcaguuuggagaagaaaugaaggugucaaa

SEQ ID NO: 342649 - RNA, 32 nt, Homo Sapiens
cgccgcggccccagcacccagagcuguucucu

SEQ ID NO: 342650 - RNA, 32 nt, Homo Sapiens
ggugguuguuauauaguacugaugugguauua

SEQ ID NO: 342651 - RNA, 32 nt, Homo Sapiens
gucauuuuuaucuuugaaaauuuucauuuaug

SEQ ID NO: 342652 - RNA, 32 nt, Homo Sapiens
uucguguacacaggccggcugccaucacgcag

SEQ ID NO: 342653 - RNA, 32 nt, Homo Sapiens
ggcgauucuaggcggcccaggcggcggggagg

SEQ ID NO: 342654 - RNA, 32 nt, Homo Sapiens
uuuguucuauagaaaugcuuuucuucagagaa

SEQ ID NO: 342655 - RNA, 32 nt, Homo Sapiens
ccgugcgccagcugcucguccccgccggcguc

SEQ ID NO: 342656 - RNA, 32 nt, Homo Sapiens
gcaagaguuuccacauaaucccaaaaaacacu

SEQ ID NO: 342657 - RNA, 32 nt, Homo Sapiens
uacuguauaaugucccucaaguuuauggcagu

SEQ ID NO: 342658 - RNA, 32 nt, Homo Sapiens
gccuggguccccuccucccaauagaggcugag

SEQ ID NO: 342659 - RNA, 32 nt, Homo Sapiens
agccugcucccucacccaggcacugggcaagu

SEQ ID NO: 342660 - RNA, 31 nt, Homo Sapiens
agccggccucgcucccuuccccgcgcacccc

SEQ ID NO: 342661 - RNA, 32 nt, Homo Sapiens
guggccacacgcugcugccaguccuuguggaa

SEQ ID NO: 342662 - RNA, 32 nt, Homo Sapiens
gcgugcucgccuuccacccgccgcccgccgcc

SEQ ID NO: 342663 - RNA, 32 nt, Homo Sapiens
agugcaggcuccuggaggagcggugcgcacgc

SEQ ID NO: 342664 - RNA, 32 nt, Homo Sapiens
aguuucaccauauuggcuggucucaaacuccu

SEQ ID NO: 342665 - RNA, 32 nt, Homo Sapiens
gcugggaagucaguucguucucuccucuccuc

SEQ ID NO: 342666 - RNA, 32 nt, Homo Sapiens
cucugcuuuugccaggugaacuuugauuucug

SEQ ID NO: 342667 - RNA, 32 nt, Homo Sapiens
caaucagucaacaauaaagugaguguuccaac

SEQ ID NO: 342668 - RNA, 32 nt, Homo Sapiens
cucgacggcccggccccggcuccgcaggacgg

SEQ ID NO: 342669 - RNA, 32 nt, Homo Sapiens
gaggcccgguggagcgagggaugugugggugc

SEQ ID NO: 342670 - RNA, 32 nt, Homo Sapiens
cagugaccauccacagacacgcagcacaggcg

SEQ ID NO: 342671 - RNA, 32 nt, Homo Sapiens
auuaugauucagaaucauuuucuauuguggua

SEQ ID NO: 342672 - RNA, 32 nt, Homo Sapiens
uugacucugggcccaacccccauuucccuuca

SEQ ID NO: 342673 - RNA, 32 nt, Homo Sapiens
ugagcuggagcucgguuaggcuggggcugaug

SEQ ID NO: 342674 - RNA, 31 nt, Homo Sapiens
aaagagagggcggauucccuggccaaggaga

SEQ ID NO: 342675 - RNA, 32 nt, Homo Sapiens
agcuuuugguugucaucaugucuguguguaug

SEQ ID NO: 342676 - RNA, 32 nt, Homo Sapiens
aaaugcagaaaugaucuuaauauucaugacca

SEQ ID NO: 342677 - RNA, 32 nt, Homo Sapiens
accuccugcuuauugauucagaaucugcauuu

SEQ ID NO: 342678 - RNA, 32 nt, Homo Sapiens
cuuccaugcuucuccuuuucuuacucuauagu

SEQ ID NO: 342679 - RNA, 32 nt, Homo Sapiens
aaaaauugcccccaagggucuaucagaauccu

SEQ ID NO: 342680 - RNA, 32 nt, Homo Sapiens
cuucucuggucgccucauuuccugcuacacug

SEQ ID NO: 342681 - RNA, 32 nt, Homo Sapiens
uugccuuuaauuucuuuuuuauauauacucuc

SEQ ID NO: 342682 - RNA, 32 nt, Homo Sapiens
auauuuagaccaacaggugaucaauguuugga

SEQ ID NO: 342683 - RNA, 32 nt, Homo Sapiens
acaaauuggaauugauaaucuuuagucaagua

SEQ ID NO: 342684 - RNA, 32 nt, Homo Sapiens
uagaagucugcggucugaggcucuuuggguuc

SEQ ID NO: 342685 - RNA, 32 nt, Homo Sapiens
cuaagccuggagagucaccgccgagggaugag

SEQ ID NO: 342686 - RNA, 32 nt, Homo Sapiens
gaacucacccaagaguaugaccuggaccaaca

SEQ ID NO: 342687 - RNA, 32 nt, Homo Sapiens
cacugucgccccagccaggcuuggcacugccu

SEQ ID NO: 342688 - RNA, 32 nt, Homo Sapiens
uauucugauuuggaugauaaauuauacuguca

SEQ ID NO: 342689 - RNA, 32 nt, Homo Sapiens
cccuagcuacucuggaggcugaggcaggagaa

SEQ ID NO: 342690 - RNA, 32 nt, Homo Sapiens
ucccuuuuauuuucuuuuuuuugagauggagu

SEQ ID NO: 342691 - RNA, 32 nt, Homo Sapiens
cuccuggggaccuggacaccccugcccugaag

SEQ ID NO: 342692 - RNA, 32 nt, Homo Sapiens
uauugcaccuguccugguuagcaagaaacuga

SEQ ID NO: 342693 - RNA, 32 nt, Homo Sapiens
ucaccggcgcaggcuaggagggggcggccuga

SEQ ID NO: 342694 - RNA, 32 nt, Homo Sapiens
cagauugcaauaaaagcuuagauacauuuugu

SEQ ID NO: 342695 - RNA, 32 nt, Homo Sapiens
agcagaggucagagugaugcaauugcuggagg

SEQ ID NO: 342696 - RNA, 32 nt, Homo Sapiens
aaugaauagaaacaauccacuuugaagaagcc

SEQ ID NO: 342697 - RNA, 32 nt, Homo Sapiens
gaaacgaaacaauguuauuuggugguguauaa

SEQ ID NO: 342698 - RNA, 32 nt, Homo Sapiens
ggacuaggagugggaagggccuggacacucac

SEQ ID NO: 342699 - RNA, 31 nt, Homo Sapiens
cugacuacaaagaaaaacagaugcuaaaaau

SEQ ID NO: 342700 - RNA, 32 nt, Homo Sapiens
auucuuagaacucaacaauauaaagaaaaaua

SEQ ID NO: 342701 - RNA, 32 nt, Homo Sapiens
augcucaaauaaaacuuguucauaaaucuuca

SEQ ID NO: 342702 - RNA, 32 nt, Homo Sapiens
acaaaaccauauuuugacaaguuuauuuaauc

SEQ ID NO: 342703 - RNA, 32 nt, Homo Sapiens
ugaaauguuccuuggcagcuggacugcuguuu

SEQ ID NO: 342704 - RNA, 32 nt, Homo Sapiens
aucaggaggucaggagaucgcaaccauccugg

SEQ ID NO: 342705 - RNA, 32 nt, Homo Sapiens
uguaaaugaucaguggauaaaaucacagaaaa

SEQ ID NO: 342706 - RNA, 32 nt, Homo Sapiens
ccaggcccacgggcugcccuuggacggagagg

SEQ ID NO: 342707 - RNA, 32 nt, Homo Sapiens
ggcagggccuggcacagcugcagagugcacag

SEQ ID NO: 342708 - RNA, 32 nt, Homo Sapiens
uagccggcgagugaagacgaaccaucgacugc

SEQ ID NO: 342709 - RNA, 32 nt, Homo Sapiens
acacguucaggagaggagccuuaugaguauag

SEQ ID NO: 342710 - RNA, 32 nt, Homo Sapiens
uuuacugucauuguguuuaaaucucaacguuc

SEQ ID NO: 342711 - RNA, 32 nt, Homo Sapiens
guucccacagggcaugugacuuugaaagagac

SEQ ID NO: 342712 - RNA, 32 nt, Homo Sapiens
gagcuuuuuucucgguauaaugaaaauugaaa

SEQ ID NO: 342713 - RNA, 32 nt, Homo Sapiens
cagcgcgggugggaggcggggaggagcagcgg

SEQ ID NO: 342714 - RNA, 32 nt, Homo Sapiens
cacagcccugccuuugguuccuggacauuugg

SEQ ID NO: 342715 - RNA, 32 nt, Homo Sapiens
ccuaucacuuccacugcaccccgucucauucc

SEQ ID NO: 342716 - RNA, 32 nt, Homo Sapiens
agucucucaaaugaacaaauaagcaaacugua

SEQ ID NO: 342717 - RNA, 32 nt, Homo Sapiens
auccgccgacaccgggagcccgggcuccccgc

SEQ ID NO: 342718 - RNA, 32 nt, Homo Sapiens
gaauggccccacucuguucccaagcaguucau

SEQ ID NO: 342719 - RNA, 32 nt, Homo Sapiens
aauguggggacgagacccccucaucucagagu

SEQ ID NO: 342720 - RNA, 32 nt, Homo Sapiens
gggcugcuaccuugaaauccaagcccuaaaaa

SEQ ID NO: 342721 - RNA, 32 nt, Homo Sapiens
aggaggaugaacucagaaagcaccagccagag

SEQ ID NO: 342722 - RNA, 32 nt, Homo Sapiens
gggcucugcagcagcaguggcucuucgauuag

SEQ ID NO: 342723 - RNA, 32 nt, Homo Sapiens
accugccgcuggaagcuauugggcuggcagca

SEQ ID NO: 342724 - RNA, 32 nt, Homo Sapiens
uucauuggaaaccauggaaggacgguucuggg

SEQ ID NO: 342725 - RNA, 32 nt, Homo Sapiens
acacagaaggauucugcaaauagccugcggag

SEQ ID NO: 342726 - RNA, 32 nt, Homo Sapiens
cauuauaaugaaauuuuugucaaugucuuaga

SEQ ID NO: 342727 - RNA, 30 nt, Homo Sapiens
cucugugucugugagggauugguuccagga

SEQ ID NO: 342728 - RNA, 32 nt, Homo Sapiens
cccguggacgcuccaaugggcuugucaugaua

SEQ ID NO: 342729 - RNA, 32 nt, Homo Sapiens
gaacuccaaggugcagaaugguuuggaaagua

SEQ ID NO: 342730 - RNA, 30 nt, Homo Sapiens
cccucugggggcgauggcggggcgaggcuc

SEQ ID NO: 342731 - RNA, 32 nt, Homo Sapiens
uugugucuuagaugauaucuguaaccaguuuc

SEQ ID NO: 342732 - RNA, 32 nt, Homo Sapiens
cucuccaauuuaugcuuuuaacuuauuuucua

SEQ ID NO: 342733 - RNA, 32 nt, Homo Sapiens
aggggaagguggcaaugggacccagcuccauc

SEQ ID NO: 342734 - RNA, 32 nt, Homo Sapiens
uggggcugccgggccuggcucuccaggcccug

SEQ ID NO: 342735 - RNA, 32 nt, Homo Sapiens
uuuaaaucauucuccugacucuucagcaggaa

SEQ ID NO: 342736 - RNA, 32 nt, Homo Sapiens
aacuguuuugcacuaacagcuuccuccuuguc

SEQ ID NO: 342737 - RNA, 32 nt, Homo Sapiens
cguuucggagccgcugcccccagcgaagucca

SEQ ID NO: 342738 - RNA, 32 nt, Homo Sapiens
ggccugguccugcuauaugccggcgccucggc

SEQ ID NO: 342739 - RNA, 32 nt, Homo Sapiens
cggccugagucaccggccccgcccuccggagc

SEQ ID NO: 342740 - RNA, 32 nt, Homo Sapiens
caccgugcucccugagccccagaugggccucc

SEQ ID NO: 342741 - RNA, 32 nt, Homo Sapiens
cuuugcugggauggcugcuucccaacuccacc

SEQ ID NO: 342742 - RNA, 32 nt, Homo Sapiens
aaucacuugagcucaggaguuugagaccagcc

SEQ ID NO: 342743 - RNA, 32 nt, Homo Sapiens
uuaccagucuggauucagcaguuucuuuucua

SEQ ID NO: 342744 - RNA, 32 nt, Homo Sapiens
aucccagccaaggccauguccucucugcucag

SEQ ID NO: 342745 - RNA, 32 nt, Homo Sapiens
aaauaucaauggaacucagagaugaacaucua

SEQ ID NO: 342746 - RNA, 32 nt, Homo Sapiens
uggaauuacugauuauuacucuguccucugug

SEQ ID NO: 342747 - RNA, 32 nt, Homo Sapiens
gcauuucuuuugcaagauuccuuuccacucca

SEQ ID NO: 342748 - RNA, 32 nt, Homo Sapiens
ucaccgcgccgagcgcgccggcaccgccugca

SEQ ID NO: 342749 - RNA, 32 nt, Homo Sapiens
uuaauuuaagcacuucuguuuucgugaauuug

SEQ ID NO: 342750 - RNA, 32 nt, Homo Sapiens
gcaaggcagggacccacaguggcugccugccu

SEQ ID NO: 342751 - RNA, 32 nt, Homo Sapiens
acuuuuuaugggugaaaauaagacaaaaauaa

SEQ ID NO: 342752 - RNA, 32 nt, Homo Sapiens
caaacuguuugguguuuuaaauuuaaguguag

SEQ ID NO: 342753 - RNA, 32 nt, Homo Sapiens
gccucuaucaauaguuugacauuuuucccucu

SEQ ID NO: 342754 - RNA, 32 nt, Homo Sapiens
ugcaucauucugggcuuggccuggacagcacc

SEQ ID NO: 342755 - RNA, 30 nt, Homo Sapiens
cgggcucugaccgugccgccuucuuguggc

SEQ ID NO: 342756 - RNA, 32 nt, Homo Sapiens
gaguuucuccuccaccucucaaugcaaacacu

SEQ ID NO: 342757 - RNA, 32 nt, Homo Sapiens
cccaucccaucccaucccaucccgcucuuuuc

SEQ ID NO: 342758 - RNA, 32 nt, Homo Sapiens
cccaaaagggaaggcuggaggcugaggcuguu

SEQ ID NO: 342759 - RNA, 32 nt, Homo Sapiens
gggagggagguacccaugagcagaggguagug

SEQ ID NO: 342760 - RNA, 32 nt, Homo Sapiens
uccuuauucuugauuauaguuguaugguauug

SEQ ID NO: 342761 - RNA, 32 nt, Homo Sapiens
gaaggagggaggaaaagguguccuggcuagca

SEQ ID NO: 342762 - RNA, 32 nt, Homo Sapiens
cagaauaucccauggccaucaucaugucuccu

SEQ ID NO: 342763 - RNA, 32 nt, Homo Sapiens
gccgccacuccagccuaaucccaaccccaggg

SEQ ID NO: 342764 - RNA, 32 nt, Homo Sapiens
ucaggagcucacgccagggccuugaggacagg

SEQ ID NO: 342765 - RNA, 32 nt, Homo Sapiens
ccacuguuaccagaagcugcucuaggaguucc

SEQ ID NO: 342766 - RNA, 32 nt, Homo Sapiens
uucauaguuggaaaacuugugcccuuguauag

SEQ ID NO: 342767 - RNA, 32 nt, Homo Sapiens
uggccauaaccuguauuuugauagaauuagau

SEQ ID NO: 342768 - RNA, 32 nt, Homo Sapiens
caacaccacggcuggcaggagccccgcugcac

SEQ ID NO: 342769 - RNA, 32 nt, Homo Sapiens
caaucccugucacuggaacacuggccucucug

SEQ ID NO: 342770 - RNA, 32 nt, Homo Sapiens
ucagcuccaaagcgaaucuuugaaaacaccca

SEQ ID NO: 342771 - RNA, 32 nt, Homo Sapiens
aggcacagcaucaggauacccugauguggaag

SEQ ID NO: 342772 - RNA, 32 nt, Homo Sapiens
auuuuguauugucaaggcaugcauauucuaaa

SEQ ID NO: 342773 - RNA, 32 nt, Homo Sapiens
uuucagaugugaccucuuuuggacuaagcagc

SEQ ID NO: 342774 - RNA, 32 nt, Homo Sapiens
uuauaauauaaguauuuuucugauugaaaaaa

SEQ ID NO: 342775 - RNA, 32 nt, Homo Sapiens
caggcgccgggcggggagcaugggaaggggcu

SEQ ID NO: 342776 - RNA, 32 nt, Homo Sapiens
uuuucaccuuuguaaccucauggaaagaggcu

SEQ ID NO: 342777 - RNA, 32 nt, Homo Sapiens
cuccaggacagagggagaaagaucugauccaa

SEQ ID NO: 342778 - RNA, 32 nt, Homo Sapiens
ucugugccugguuucuucuccucuaucucaua

SEQ ID NO: 342779 - RNA, 32 nt, Homo Sapiens
ccuccuccaggccaugcuccuugaacuuggaa

SEQ ID NO: 342780 - RNA, 32 nt, Homo Sapiens
gaaauguguuguguugucuuagcuuuaaaaca

SEQ ID NO: 342781 - RNA, 32 nt, Homo Sapiens
ugccgccaggugucccucuccuccccuggggc

SEQ ID NO: 342782 - RNA, 32 nt, Homo Sapiens
cccacacuaugaaagaaauauuuguuuuauuu

SEQ ID NO: 342783 - RNA, 32 nt, Homo Sapiens
uagaccugcuucuccuucuccuuuuucucuga

SEQ ID NO: 342784 - RNA, 31 nt, Homo Sapiens
cgguggcucaggguucucagagccccuggca

SEQ ID NO: 342785 - RNA, 32 nt, Homo Sapiens
uuuacaugaugaugugaaaagcuguuuguccc

SEQ ID NO: 342786 - RNA, 32 nt, Homo Sapiens
gaaaagaagaaaguccagcaaaauucuacgag

SEQ ID NO: 342787 - RNA, 32 nt, Homo Sapiens
aagagccuggaaagauguggccucaggaaaag

SEQ ID NO: 342788 - RNA, 32 nt, Homo Sapiens
ccgcacacuccugcugcccccggacugcuuca

SEQ ID NO: 342789 - RNA, 32 nt, Homo Sapiens
ccagguugggguuuuuuuuuuaauauugugaa

SEQ ID NO: 342790 - RNA, 32 nt, Homo Sapiens
gugagcggaugcugggcggggcacucuuccac

SEQ ID NO: 342791 - RNA, 32 nt, Homo Sapiens
acuaaagaccacaagagaaacuucugaaccac

SEQ ID NO: 342792 - RNA, 32 nt, Homo Sapiens
cuccuggaugcauccuagagaagugccaugug

SEQ ID NO: 342793 - RNA, 32 nt, Homo Sapiens
uauuuuuguacuuuauuuugaauaucauccau

SEQ ID NO: 342794 - RNA, 32 nt, Homo Sapiens
cccgaagugugcuggaggaaaggccagaaaga

SEQ ID NO: 342795 - RNA, 32 nt, Homo Sapiens
guuuguuucuucaugccuuuacuuacuuuguc

SEQ ID NO: 342796 - RNA, 32 nt, Homo Sapiens
cuccuaaugcuuucccucccccacucccccac

SEQ ID NO: 342797 - RNA, 32 nt, Homo Sapiens
ucccuccucuccagcccucccagcccucccgc

SEQ ID NO: 342798 - RNA, 32 nt, Homo Sapiens
gccugggccgcccccggcccagcccugccuug

SEQ ID NO: 342799 - RNA, 32 nt, Homo Sapiens
auaacucucccuccccccauugaggugagaau

SEQ ID NO: 342800 - RNA, 27 nt, Homo Sapiens
uagcacuaaggauucugguaccuuuac

SEQ ID NO: 342801 - RNA, 32 nt, Homo Sapiens
ggccuuguccccagccccaccuggccccuucu

SEQ ID NO: 342802 - RNA, 32 nt, Homo Sapiens
caaagcgagacuccgucacacacacacacaca

SEQ ID NO: 342803 - RNA, 32 nt, Homo Sapiens
gaaaccuuauuuuuuccaaagccagaaccaga

SEQ ID NO: 342804 - RNA, 32 nt, Homo Sapiens
uacagaagauaaagcuggguauaguggcacau

SEQ ID NO: 342805 - RNA, 32 nt, Homo Sapiens
caucagguggcccagcgagagauggaggacug

SEQ ID NO: 342806 - RNA, 32 nt, Homo Sapiens
ggauauuucuaaaaggauacaaucucuagaag

SEQ ID NO: 342807 - RNA, 32 nt, Homo Sapiens
gaacuauuugaaacacacagugaccaagggaa

SEQ ID NO: 342808 - RNA, 32 nt, Homo Sapiens
guggauucuuugaggucccuguuaguggcguc

SEQ ID NO: 342809 - RNA, 32 nt, Homo Sapiens
uguucgaagcuuacagcuuguuuuccaggcau

SEQ ID NO: 342810 - RNA, 32 nt, Homo Sapiens
uggaaccaaagagacaguacuuugcaaagaaa

SEQ ID NO: 342811 - RNA, 32 nt, Homo Sapiens
aggcugcugcgagcuccgcgcguuccuucgcg

SEQ ID NO: 342812 - RNA, 32 nt, Homo Sapiens
guuacucagugaagcuccucuccaccuugcuc

SEQ ID NO: 342813 - RNA, 32 nt, Homo Sapiens
uugugcuuguauauuucuaaaaagaggaagga

SEQ ID NO: 342814 - RNA, 32 nt, Homo Sapiens
uucauuuuucuacuugcuaguuuucuagacaa

SEQ ID NO: 342815 - RNA, 32 nt, Homo Sapiens
uugagcauacccaggauuuaagucguggaacu

SEQ ID NO: 342816 - RNA, 28 nt, Homo Sapiens
auuauuaaagguuuacauuugauaggau

SEQ ID NO: 342817 - RNA, 32 nt, Homo Sapiens
acuauacugcugaguucuggucuguugcugcc

SEQ ID NO: 342818 - RNA, 32 nt, Homo Sapiens
auauuucauuggcauugagaagguggaaaaug

SEQ ID NO: 342819 - RNA, 32 nt, Homo Sapiens
gcacgcacuccagccugggugacagagcgaga

SEQ ID NO: 342820 - RNA, 32 nt, Homo Sapiens
gccccccagacgcggaacuugccggccuugaa

SEQ ID NO: 342821 - RNA, 32 nt, Homo Sapiens
ggccugcacggccccgcuccccgggagccgca

SEQ ID NO: 342822 - RNA, 32 nt, Homo Sapiens
aaaacaggacaaagaugagcugcgugcccaua

SEQ ID NO: 342823 - RNA, 32 nt, Homo Sapiens
uucccaggaucccacaccaugucucacauggu

SEQ ID NO: 342824 - RNA, 32 nt, Homo Sapiens
auacugguuuuuuuuucuugauuugcccauau

SEQ ID NO: 342825 - RNA, 32 nt, Homo Sapiens
gcuuggcgguggcggcggcggcagcuucgcgc

SEQ ID NO: 342826 - RNA, 32 nt, Homo Sapiens
cugaguggaguauucaaaaacuugcuuagaaa

SEQ ID NO: 342827 - RNA, 32 nt, Homo Sapiens
gcgucugggucuggcgcuucccgacuggacgg

SEQ ID NO: 342828 - RNA, 32 nt, Homo Sapiens
ggucauaugcggggguauguccugcuuaauug

SEQ ID NO: 342829 - RNA, 32 nt, Homo Sapiens
cuuacauagaaggccuaaccagcacccaagau

SEQ ID NO: 342830 - RNA, 32 nt, Homo Sapiens
ucaggagaaaagacauaagagaauuuacaaaa

SEQ ID NO: 342831 - RNA, 32 nt, Homo Sapiens
acugcuuuuaaauugcuguugaucagcuucug

SEQ ID NO: 342832 - RNA, 31 nt, Homo Sapiens
auggugucauucugccugcuccaucgcgcca

SEQ ID NO: 342833 - RNA, 32 nt, Homo Sapiens
agcuuggggaaauauggaggggugugugucug

SEQ ID NO: 342834 - RNA, 32 nt, Homo Sapiens
uugaacauuuaaaaauuacuguuuaauauugu

SEQ ID NO: 342835 - RNA, 32 nt, Homo Sapiens
cugaggugguaaauuaacuuuuuucuguucag

SEQ ID NO: 342836 - RNA, 32 nt, Homo Sapiens
auauaaagaggccagaauaaauacggagcauc

SEQ ID NO: 342837 - RNA, 32 nt, Homo Sapiens
gggccuucugagccuucccccggagcugcugc

SEQ ID NO: 342838 - RNA, 32 nt, Homo Sapiens
aaaacaccaauaucuaauaccacagugggaaa

SEQ ID NO: 342839 - RNA, 32 nt, Homo Sapiens
uaccucuuagugauauuuguuuccuguccuuu

SEQ ID NO: 342840 - RNA, 32 nt, Homo Sapiens
ucgacgaggaggagugcauggcgagaaucaag

SEQ ID NO: 342841 - RNA, 32 nt, Homo Sapiens
uuuuaguagagaugggguuuugccauguuugc

SEQ ID NO: 342842 - RNA, 32 nt, Homo Sapiens
aucucuucaugcuugacauaccuaccaguauu

SEQ ID NO: 342843 - RNA, 32 nt, Homo Sapiens
uaaaauuggaauuacaauuuucaacugggaaa

SEQ ID NO: 342844 - RNA, 32 nt, Homo Sapiens
caauguaaugaaauugauaguaccaccugaua

SEQ ID NO: 342845 - RNA, 32 nt, Homo Sapiens
ugagcggaugcaucuggggaugagguugcuua

SEQ ID NO: 342846 - RNA, 32 nt, Homo Sapiens
acaucuuuguuuuuauuuuuuauuuuuaguag

SEQ ID NO: 342847 - RNA, 31 nt, Homo Sapiens
uaggcacgugccaccacacccaguuaauuuu

SEQ ID NO: 342848 - RNA, 32 nt, Homo Sapiens
uaccuggcucugcuuccagcaguauugacacc

SEQ ID NO: 342849 - RNA, 32 nt, Homo Sapiens
uguguucuguuguuuuuauagcaggguugggg

SEQ ID NO: 342850 - RNA, 32 nt, Homo Sapiens
cuuugacugaggccgaggcaucuggaacuuuc

SEQ ID NO: 342851 - RNA, 32 nt, Homo Sapiens
cuggccagugauugcccggauugaugacauau

SEQ ID NO: 342852 - RNA, 32 nt, Homo Sapiens
ccccccaaacuuaucagaauccucguucuuuu

SEQ ID NO: 342853 - RNA, 32 nt, Homo Sapiens
ugcaacauuaaaccaagugcugugggcuuuuc

SEQ ID NO: 342854 - RNA, 32 nt, Homo Sapiens
ggagacgcggcgguaaccuggaccuuaaaagu

SEQ ID NO: 342855 - RNA, 32 nt, Homo Sapiens
aagcaggcagaaaaauaugaaaagagagacug

SEQ ID NO: 342856 - RNA, 32 nt, Homo Sapiens
uuccaagaccaaagauuaaauuaauaaaaggu

SEQ ID NO: 342857 - RNA, 32 nt, Homo Sapiens
ccgccguuauauuugcagaagcuuugagaacc

SEQ ID NO: 342858 - RNA, 32 nt, Homo Sapiens
ggugggcuuggaacacagguguguacagcgug

SEQ ID NO: 342859 - RNA, 32 nt, Homo Sapiens
ucgcaggggaggaggcggcgggaggcggagga

SEQ ID NO: 342860 - RNA, 32 nt, Homo Sapiens
ggucucucccugugugcggcgacgagagagug

SEQ ID NO: 342861 - RNA, 32 nt, Homo Sapiens
aaagcuacaugaaagauugauagaauauuuua

SEQ ID NO: 342862 - RNA, 32 nt, Homo Sapiens
cacccacuuccugugcucgcccggggggcgug

SEQ ID NO: 342863 - RNA, 32 nt, Homo Sapiens
agugccagugguccuuggaggucgaguccaag

SEQ ID NO: 342864 - RNA, 32 nt, Homo Sapiens
ccccgagaccgcgucccaggagcggaccgccu

SEQ ID NO: 342865 - RNA, 32 nt, Homo Sapiens
ugauggugccugugcuugggggagcuucucgg

SEQ ID NO: 342866 - RNA, 32 nt, Homo Sapiens
gccagcgacccucucccuguccgggcugcaga

SEQ ID NO: 342867 - RNA, 32 nt, Homo Sapiens
cucugcacccccagccuaucccagaggccuug

SEQ ID NO: 342868 - RNA, 32 nt, Homo Sapiens
cucggcacccacuugcagucacugccgccuga

SEQ ID NO: 342869 - RNA, 32 nt, Homo Sapiens
caacugugucucugaauuccugucuuccaaau

SEQ ID NO: 342870 - RNA, 32 nt, Homo Sapiens
augucuguagcgguaauugccucacauuaaac

SEQ ID NO: 342871 - RNA, 32 nt, Homo Sapiens
gcuuuuugugaucugacuucucucuuccuccc

SEQ ID NO: 342872 - RNA, 32 nt, Homo Sapiens
cgggugauuccagcuguguugcuggcaguguu

SEQ ID NO: 342873 - RNA, 32 nt, Homo Sapiens
aguucauaaaaugucauaaaaaauuguaaacu

SEQ ID NO: 342874 - RNA, 32 nt, Homo Sapiens
uuacuuuccuuccgcuccucacguguccugua

SEQ ID NO: 342875 - RNA, 32 nt, Homo Sapiens
ccccucgcccaccagcgccuccccucaccgac

SEQ ID NO: 342876 - RNA, 32 nt, Homo Sapiens
ucucugggacauuuuugaggcauuugaagcag

SEQ ID NO: 342877 - RNA, 32 nt, Homo Sapiens
ccuccccccgccaacacccccucccugcucuu

SEQ ID NO: 342878 - RNA, 32 nt, Homo Sapiens
cugcagaccacaugcuggccuagcggccuggc

SEQ ID NO: 342879 - RNA, 32 nt, Homo Sapiens
gccgcggccucucgacucccgccccgccgagc

SEQ ID NO: 342880 - RNA, 32 nt, Homo Sapiens
uacaugggacagacggggacgcacaggccacc

SEQ ID NO: 342881 - RNA, 32 nt, Homo Sapiens
cccuaccgcccuccccgauggcggggaucugg

SEQ ID NO: 342882 - RNA, 32 nt, Homo Sapiens
cgcugugcgcgccgcgauccgguacgugggcc

SEQ ID NO: 342883 - RNA, 32 nt, Homo Sapiens
acagugaauaauauguuuguguuaauguucua

SEQ ID NO: 342884 - RNA, 32 nt, Homo Sapiens
aggcccaguucgcuucagaggcgcgagacccg

SEQ ID NO: 342885 - RNA, 32 nt, Homo Sapiens
ucagaguguaaauuuuuucaagugcucauuag

SEQ ID NO: 342886 - RNA, 32 nt, Homo Sapiens
gcgcacuccccggacgucccgccccgcccccu

SEQ ID NO: 342887 - RNA, 32 nt, Homo Sapiens
caaauacaaaaauugguuuuucaaugcaucau

SEQ ID NO: 342888 - RNA, 32 nt, Homo Sapiens
acugugauaauacaacagauagcuuugaauga

SEQ ID NO: 342889 - RNA, 32 nt, Homo Sapiens
uuuguuuugacuugaauuuauccaccaaagac

SEQ ID NO: 342890 - RNA, 32 nt, Homo Sapiens
gguccaucaugaagaacauggccacggagcug

SEQ ID NO: 342891 - RNA, 32 nt, Homo Sapiens
ccucgccuuccucuucccggcgcggccccccg

SEQ ID NO: 342892 - RNA, 32 nt, Homo Sapiens
ucaacaguuacauuccaauuuuauacccaagu

SEQ ID NO: 342893 - RNA, 32 nt, Homo Sapiens
agcccaagagaccccuggaggggcuggaguuu

SEQ ID NO: 342894 - RNA, 32 nt, Homo Sapiens
gcaagaggcuggggcucugugcuccuccaggu

SEQ ID NO: 342895 - RNA, 32 nt, Homo Sapiens
cgcgcagcuccgccaacucccgggccggccca

SEQ ID NO: 342896 - RNA, 32 nt, Homo Sapiens
ggaguccgcaucucagcccccaggaagaggaa

SEQ ID NO: 342897 - RNA, 32 nt, Homo Sapiens
ggucagccuguggagcccuggaugcuauccac

SEQ ID NO: 342898 - RNA, 32 nt, Homo Sapiens
uaaacuguacaaucuguaaaguuuuuauagaa

SEQ ID NO: 342899 - RNA, 32 nt, Homo Sapiens
ugcccuguacuucacugugguccugaacugaa

SEQ ID NO: 342900 - RNA, 32 nt, Homo Sapiens
aguaaagaagucgccgaagcagugggacacua

SEQ ID NO: 342901 - RNA, 32 nt, Homo Sapiens
uuauuaauguuuagauuuuucauuuggugugu

SEQ ID NO: 342902 - RNA, 32 nt, Homo Sapiens
guuucuguuugugaaauguauguauuaaaaau

SEQ ID NO: 342903 - RNA, 32 nt, Homo Sapiens
cucuagggccgccgccaccuccccugggaccc

SEQ ID NO: 342904 - RNA, 32 nt, Homo Sapiens
uauuaacaaacuuuuauuacuagacaggauca

SEQ ID NO: 342905 - RNA, 32 nt, Homo Sapiens
accaaggcccugugcuaagcacucauaauccu

SEQ ID NO: 342906 - RNA, 32 nt, Homo Sapiens
cuggagcgcucgccgcuccggcgacaucgcga

SEQ ID NO: 342907 - RNA, 32 nt, Homo Sapiens
agugucuguguuguuuucccuugacccugggc

SEQ ID NO: 342908 - RNA, 32 nt, Homo Sapiens
guguuucugauccaaugauucaguaaugucau

SEQ ID NO: 342909 - RNA, 32 nt, Homo Sapiens
ugaucccgggcuaggggagcgcggcggccgcg

SEQ ID NO: 342910 - RNA, 32 nt, Homo Sapiens
uugcgccaguacuuuuuugugcaugcuuuuug

SEQ ID NO: 342911 - RNA, 32 nt, Homo Sapiens
gccuguuccagggcaggacccgggcccggccc

SEQ ID NO: 342912 - RNA, 32 nt, Homo Sapiens
ucaaaugcggggugggggcagcacaggagggc

SEQ ID NO: 342913 - RNA, 32 nt, Homo Sapiens
cuagauuucagcgccuuuggacucuccuguuu

SEQ ID NO: 342914 - RNA, 32 nt, Homo Sapiens
ggaccgcguccugccccgagaccgccaccaug

SEQ ID NO: 342915 - RNA, 32 nt, Homo Sapiens
uugaggucucgguggaugugucugcgccgaag

SEQ ID NO: 342916 - RNA, 30 nt, Homo Sapiens
gaggagaccgcagugcggccggcgcuagga

SEQ ID NO: 342917 - RNA, 32 nt, Homo Sapiens
ccucagcugucaucagcauuugcugcucccug

SEQ ID NO: 342918 - RNA, 32 nt, Homo Sapiens
auuuguuauuuucaguauuuuggagaaauuau

SEQ ID NO: 342919 - RNA, 32 nt, Homo Sapiens
agcugcagaucuaauguacugaaggcaaaccu

SEQ ID NO: 342920 - RNA, 32 nt, Homo Sapiens
guuuugcccccgcucuuuggacacgccgaccc

SEQ ID NO: 342921 - RNA, 32 nt, Homo Sapiens
aauccaggcguguucagccugagcuaggagag

SEQ ID NO: 342922 - RNA, 32 nt, Homo Sapiens
cuugugauauuucucauuuagcauugaaauaa

SEQ ID NO: 342923 - RNA, 32 nt, Homo Sapiens
guauggggaaaggcuguuauuaccuagaguuu

SEQ ID NO: 342924 - RNA, 32 nt, Homo Sapiens
uuuauagacaccauaugaucuaaucuucacaa

SEQ ID NO: 342925 - RNA, 32 nt, Homo Sapiens
cacacauaaaguuuguuuccuguggcauuuaa

SEQ ID NO: 342926 - RNA, 32 nt, Homo Sapiens
ucucccgcccgggcgcgccgcgcuucucccag

SEQ ID NO: 342927 - RNA, 32 nt, Homo Sapiens
uacuacuuuacuaucuauacuguuuaguuauu

SEQ ID NO: 342928 - RNA, 32 nt, Homo Sapiens
gaagacuucuaaagaaacugcuccagcuuuug

SEQ ID NO: 342929 - RNA, 32 nt, Homo Sapiens
ucccuaaguauuaaaagaaggggaaaaguuug

SEQ ID NO: 342930 - RNA, 32 nt, Homo Sapiens
agcaggagggagaggaaggggguccuguagga

SEQ ID NO: 342931 - RNA, 32 nt, Homo Sapiens
ugugcacugcacccucacggccacccgacuac

SEQ ID NO: 342932 - RNA, 32 nt, Homo Sapiens
ucccugagcggugggcgggccucguccgcagg

SEQ ID NO: 342933 - RNA, 32 nt, Homo Sapiens
aaggagaugugcguguuggaaucugcuuuucc

SEQ ID NO: 342934 - RNA, 32 nt, Homo Sapiens
ccugcugccugccuaccuggguaaucugaucu

SEQ ID NO: 342935 - RNA, 32 nt, Homo Sapiens
ggcagcugucuccagaggaucaaagccacacc

SEQ ID NO: 342936 - RNA, 32 nt, Homo Sapiens
cauacacuaugaaauucaagugcuuaaaaaua

SEQ ID NO: 342937 - RNA, 32 nt, Homo Sapiens
ugcgcccgcgucuucagggcccagucccucgg

SEQ ID NO: 342938 - RNA, 32 nt, Homo Sapiens
ggucaggccuguggagccccagcucugggucc

SEQ ID NO: 342939 - RNA, 32 nt, Homo Sapiens
ugcgggaggcggaggggugggaccggguggcu

SEQ ID NO: 342940 - RNA, 32 nt, Homo Sapiens
gaccaugcaggccccaggccccaugcucuuug

SEQ ID NO: 342941 - RNA, 32 nt, Homo Sapiens
uaucaaaaugucuuuuuuuuuauguugaccau

SEQ ID NO: 342942 - RNA, 32 nt, Homo Sapiens
gaaaugucagaugaacguauuuccuguuuuca

SEQ ID NO: 342943 - RNA, 32 nt, Homo Sapiens
uuaauaguugcagggucucaccacuucauuag

SEQ ID NO: 342944 - RNA, 32 nt, Homo Sapiens
ugaucaugugaacacaacacguuuuccucucu

SEQ ID NO: 342945 - RNA, 32 nt, Homo Sapiens
uaccagagggucaaaggagaacaagagaccag

SEQ ID NO: 342946 - RNA, 32 nt, Homo Sapiens
acuaacucaaaaauuuugauauuuucauuaac

SEQ ID NO: 342947 - RNA, 32 nt, Homo Sapiens
aauagucuuuugcaggguacuacgcaagccuu

SEQ ID NO: 342948 - RNA, 32 nt, Homo Sapiens
uaaagaauauuuucacuguuccuucuuucuua

SEQ ID NO: 342949 - RNA, 32 nt, Homo Sapiens
auuuuagaauacuaugggggcugauuuucaau

SEQ ID NO: 342950 - RNA, 32 nt, Homo Sapiens
cuuuuagucagcugaggagcugcgguggcucg

SEQ ID NO: 342951 - RNA, 32 nt, Homo Sapiens
gcacuuuguuucauauugaaaaguauaaaauu

SEQ ID NO: 342952 - RNA, 32 nt, Homo Sapiens
auuuuggugauuacaaacaguaagacauuguu

SEQ ID NO: 342953 - RNA, 32 nt, Homo Sapiens
cacugcacuccagccggggugacagaagagac

SEQ ID NO: 342954 - RNA, 32 nt, Homo Sapiens
gugagccagcccccaccuuccaggcgccuucg

SEQ ID NO: 342955 - RNA, 32 nt, Homo Sapiens
cugguucguuuuuauaagauuuugcuggguug

SEQ ID NO: 342956 - RNA, 32 nt, Homo Sapiens
cacaugggaaagggugguuaucauuuuccuuc

SEQ ID NO: 342957 - RNA, 32 nt, Homo Sapiens
gucacuuccagaauucagaguugugaugcucu

SEQ ID NO: 342958 - RNA, 32 nt, Homo Sapiens
ccauacacacucacaaguacaaacacaagcac

SEQ ID NO: 342959 - RNA, 32 nt, Homo Sapiens
gaaaauaggaagugaacccauauuuuaaauuc

SEQ ID NO: 342960 - RNA, 32 nt, Homo Sapiens
uaugagauuuaaaaucuuaaaauguuucuuau

SEQ ID NO: 342961 - RNA, 32 nt, Homo Sapiens
ugauggcaagacuuggccccuccaccuguccc

SEQ ID NO: 342962 - RNA, 32 nt, Homo Sapiens
ccccaguagcugagacuauacaggugcaggcc

SEQ ID NO: 342963 - RNA, 32 nt, Homo Sapiens
ucuauacuuuugcugagaucaacccaauauca

SEQ ID NO: 342964 - RNA, 32 nt, Homo Sapiens
acuguguagcagcuguguguuuaacauacugu

SEQ ID NO: 342965 - RNA, 32 nt, Homo Sapiens
gcugggggagcucgucgccgccgccggcggcu

SEQ ID NO: 342966 - RNA, 32 nt, Homo Sapiens
accuacuagagcagcgggccuguccaggggcu

SEQ ID NO: 342967 - RNA, 32 nt, Homo Sapiens
ggccgccgugaccagaucugcgcacgggguac

SEQ ID NO: 342968 - RNA, 32 nt, Homo Sapiens
acugcagacagagugaggugagcaccaugguu

SEQ ID NO: 342969 - RNA, 32 nt, Homo Sapiens
ucuggccuagggauugggccacccuacccagg

SEQ ID NO: 342970 - RNA, 32 nt, Homo Sapiens
guuucuauuaauuauauagacaguaaacaaaa

SEQ ID NO: 342971 - RNA, 32 nt, Homo Sapiens
ggccaggagguaguuucucaugacggcuuuug

SEQ ID NO: 342972 - RNA, 30 nt, Homo Sapiens
ccggacacugucccugccucgauuuuguuu

SEQ ID NO: 342973 - RNA, 32 nt, Homo Sapiens
uucaaacucagauuucugcaucugaaauaagu

SEQ ID NO: 342974 - RNA, 32 nt, Homo Sapiens
ugcagcuccgggaaacaagugaauucauggua

SEQ ID NO: 342975 - RNA, 32 nt, Homo Sapiens
uaaauugacuuggguugcaagcacugagcacu

SEQ ID NO: 342976 - RNA, 32 nt, Homo Sapiens
aggccuuugagcauauggguccagccacucag

SEQ ID NO: 342977 - RNA, 32 nt, Homo Sapiens
gcuccuuagcagagaccccugggguuuagcug

SEQ ID NO: 342978 - RNA, 32 nt, Homo Sapiens
cugcgcacagcuucucccggucauggcacaca

SEQ ID NO: 342979 - RNA, 32 nt, Homo Sapiens
uucuaacuccuugucugaauccugcuucucca

SEQ ID NO: 342980 - RNA, 32 nt, Homo Sapiens
aaagacagggugagggagauauguaaauuguc

SEQ ID NO: 342981 - RNA, 32 nt, Homo Sapiens
gucauuuaaauaacaaaauauuguauuguaaa

SEQ ID NO: 342982 - RNA, 30 nt, Homo Sapiens
uagugaacagaagaaucugagucugcuguc

SEQ ID NO: 342983 - RNA, 32 nt, Homo Sapiens
ucaccgcggacgugcuggccuugguaugugcc

SEQ ID NO: 342984 - RNA, 32 nt, Homo Sapiens
acgaaguguagaaaauaaaauaaauuucauaa

SEQ ID NO: 342985 - RNA, 32 nt, Homo Sapiens
ucaaugcagagcaugcgugggcagaugcuccc

SEQ ID NO: 342986 - RNA, 32 nt, Homo Sapiens
acgcaggguggcuggaggaagugagaggugaa

SEQ ID NO: 342987 - RNA, 32 nt, Homo Sapiens
cagugaggaaaauuucuguguuuucagaauuu

SEQ ID NO: 342988 - RNA, 32 nt, Homo Sapiens
cagugccccuccccagccucggccgggccucc

SEQ ID NO: 342989 - RNA, 32 nt, Homo Sapiens
ucuccugccccucccuccugaguccugggggu

SEQ ID NO: 342990 - RNA, 32 nt, Homo Sapiens
ggacagggaagaagaggcucucccgcgggagc

SEQ ID NO: 342991 - RNA, 32 nt, Homo Sapiens
ucaaacuguccacauucaugaagauuaugaau

SEQ ID NO: 342992 - RNA, 32 nt, Homo Sapiens
ucccuugggcccucgugacuaguacuggccag

SEQ ID NO: 342993 - RNA, 32 nt, Homo Sapiens
cagaccccugccuugagucucaucucagcaau

SEQ ID NO: 342994 - RNA, 32 nt, Homo Sapiens
ugcuugugggaaucuggugccuguuccacuag

SEQ ID NO: 342995 - RNA, 32 nt, Homo Sapiens
gguuauucauacaaguuuuuuuaguaacagcu

SEQ ID NO: 342996 - RNA, 32 nt, Homo Sapiens
ggggaagcgguuccgaaggcucgcggggagcg

SEQ ID NO: 342997 - RNA, 32 nt, Homo Sapiens
gcccagguagccccuccccagcccuuggcaca

SEQ ID NO: 342998 - RNA, 32 nt, Homo Sapiens
ugcaaguuugucuaccaguaagagagcaaagu

SEQ ID NO: 342999 - RNA, 32 nt, Homo Sapiens
cauggauugaucugagagagaaugaggcucag

SEQ ID NO: 343000 - RNA, 32 nt, Homo Sapiens
aaaucaucaaaauaaaccuuugugaauugaaa

SEQ ID NO: 343001 - RNA, 32 nt, Homo Sapiens
aaugugcugcguuuuguuuucuuuacuguaug

SEQ ID NO: 343002 - RNA, 32 nt, Homo Sapiens
cuggagaaacaaaauaaugauggaacacuaug

SEQ ID NO: 343003 - RNA, 32 nt, Homo Sapiens
auccugggaaaggugguaguaacccagaagau

SEQ ID NO: 343004 - RNA, 32 nt, Homo Sapiens
ugagauguuaaaauagucauacgucuuuagau

SEQ ID NO: 343005 - RNA, 32 nt, Homo Sapiens
gugucuugcacccaugaugucugagucauccg

SEQ ID NO: 343006 - RNA, 32 nt, Homo Sapiens
auuuaagaguuccauagguggaggcgcaguuc

SEQ ID NO: 343007 - RNA, 32 nt, Homo Sapiens
gcuguuuucuucaucuucucuaagccaagcaa

SEQ ID NO: 343008 - RNA, 32 nt, Homo Sapiens
acuguuguggggugggggaggggggagggaua

SEQ ID NO: 343009 - RNA, 32 nt, Homo Sapiens
aagaaaaaucaucagucuuggaauacagaaga

SEQ ID NO: 343010 - RNA, 32 nt, Homo Sapiens
ugggagcuggggaggaggcugcggaggcuggc

SEQ ID NO: 343011 - RNA, 32 nt, Homo Sapiens
uuguuucugagaaguugggaaauuaccauuau

SEQ ID NO: 343012 - RNA, 32 nt, Homo Sapiens
aagagcccuggggcccgggcugcgccccagca

SEQ ID NO: 343013 - RNA, 32 nt, Homo Sapiens
cauuggauacguauauuuuucuugacauugaa

SEQ ID NO: 343014 - RNA, 32 nt, Homo Sapiens
gggguaugagaacuggcagagccucggugcag

SEQ ID NO: 343015 - RNA, 32 nt, Homo Sapiens
cacuguacuccagccuggcccacagagugaga

SEQ ID NO: 343016 - RNA, 32 nt, Homo Sapiens
caguaaaggaauaccgugucuuacccaucguu

SEQ ID NO: 343017 - RNA, 32 nt, Homo Sapiens
gaaagugcauaugagcgagaaaagcauaaugc

SEQ ID NO: 343018 - RNA, 32 nt, Homo Sapiens
aaggacaggggcaaugccuucuccuuuucuuc

SEQ ID NO: 343019 - RNA, 32 nt, Homo Sapiens
aagugcagcugagacucagacaagauuacaau

SEQ ID NO: 343020 - RNA, 32 nt, Homo Sapiens
gggaaaugggagcacaguacugagaaauggga

SEQ ID NO: 343021 - RNA, 32 nt, Homo Sapiens
gaauuucuaaacaaagugauauuuuaaagaug

SEQ ID NO: 343022 - RNA, 32 nt, Homo Sapiens
gcugccgaggccuccugcagccaucauguccg

SEQ ID NO: 343023 - RNA, 32 nt, Homo Sapiens
ggaguuaagcuuuccuuggggagggaagagcc

SEQ ID NO: 343024 - RNA, 32 nt, Homo Sapiens
ccaccucuagaagggacuuuggccucccccca

SEQ ID NO: 343025 - RNA, 32 nt, Homo Sapiens
augagcuuggagcauggugaaccaucagagaa

SEQ ID NO: 343026 - RNA, 27 nt, Homo Sapiens
aaccaaccuuuuuucagcccuuuuugu

SEQ ID NO: 343027 - RNA, 32 nt, Homo Sapiens
uguucuggccgcucccagcugcacccugcccc

SEQ ID NO: 343028 - RNA, 32 nt, Homo Sapiens
uuugccagcagauaaaucaugcccguuccccu

SEQ ID NO: 343029 - RNA, 32 nt, Homo Sapiens
agagcaguggagauuugcuaccuggucugugu

SEQ ID NO: 343030 - RNA, 30 nt, Homo Sapiens
ccugcauuccagaugggggagccgcccggu

SEQ ID NO: 343031 - RNA, 32 nt, Homo Sapiens
cccaaagccgcgggcgcugaugaugggugagg

SEQ ID NO: 343032 - RNA, 32 nt, Homo Sapiens
guuauagaaaaaagaaggaugugauauauaca

SEQ ID NO: 343033 - RNA, 32 nt, Homo Sapiens
cuguggcggggggcgccguccaggccgagcgc

SEQ ID NO: 343034 - RNA, 32 nt, Homo Sapiens
cgaggcagccacccaugaugagcucugcagcc

SEQ ID NO: 343035 - RNA, 32 nt, Homo Sapiens
agaugaagguaacaaucaucuaaaagccagcc

SEQ ID NO: 343036 - RNA, 32 nt, Homo Sapiens
ugcugcccaagccuuugguugcugcccugacu

SEQ ID NO: 343037 - RNA, 32 nt, Homo Sapiens
gagcccgagccgcgcgcgacaugagccacggg

SEQ ID NO: 343038 - RNA, 32 nt, Homo Sapiens
aaucucccuuucucuucaguuccuuccuuguu

SEQ ID NO: 343039 - RNA, 32 nt, Homo Sapiens
aggcuggccaacacggugaaaccccgucucua

SEQ ID NO: 343040 - RNA, 32 nt, Homo Sapiens
cgcgcaccucagccgccuccuagcggcgcggc

SEQ ID NO: 343041 - RNA, 32 nt, Homo Sapiens
auuuaugagaaguuaguuucugaugcagaggu

SEQ ID NO: 343042 - RNA, 32 nt, Homo Sapiens
uagaaacaguauuuaauggucacucaauagcu

SEQ ID NO: 343043 - RNA, 31 nt, Homo Sapiens
gcccugagggcggcggcgaccgugguaauug

SEQ ID NO: 343044 - RNA, 32 nt, Homo Sapiens
cagucuguucuuccagaguccagagacauugu

SEQ ID NO: 343045 - RNA, 32 nt, Homo Sapiens
gugugucccacuuucccacacuuggugcgcug

SEQ ID NO: 343046 - RNA, 32 nt, Homo Sapiens
uaggucugagacgcgccggccucccgcugcug

SEQ ID NO: 343047 - RNA, 32 nt, Homo Sapiens
aggacauuccguugggcuagagagggagaacc

SEQ ID NO: 343048 - RNA, 32 nt, Homo Sapiens
uccuggcagaucugggcuccaagacacugacc

SEQ ID NO: 343049 - RNA, 30 nt, Homo Sapiens
cacgugggcgcgcagcagaccgcggugcag

SEQ ID NO: 343050 - RNA, 29 nt, Homo Sapiens
ccagaggacaaaguauauuuucuaaaguc

SEQ ID NO: 343051 - RNA, 32 nt, Homo Sapiens
gcugcccgccaccauugcccccggcccgcagc

SEQ ID NO: 343052 - RNA, 32 nt, Homo Sapiens
ccuguggaccccgaugccugcauccuucccga

SEQ ID NO: 343053 - RNA, 32 nt, Homo Sapiens
ugagcccuuucuacgggagugacuccaugcuu

SEQ ID NO: 343054 - RNA, 32 nt, Homo Sapiens
cacaaacuagaaaaccuagaaaaaauuaauaa

SEQ ID NO: 343055 - RNA, 32 nt, Homo Sapiens
aggcuccugccaguguggaaccacugacuacu

SEQ ID NO: 343056 - RNA, 32 nt, Homo Sapiens
uguauuuggucccaguuggguacauuuuaaaa

SEQ ID NO: 343057 - RNA, 32 nt, Homo Sapiens
auucagugacauccacagauuaugcagcuaua

SEQ ID NO: 343058 - RNA, 30 nt, Homo Sapiens
ggcgagcgcgcgccuggcgauuagaacuug

SEQ ID NO: 343059 - RNA, 32 nt, Homo Sapiens
cagcacacccucgcugcugguggacacagccc

SEQ ID NO: 343060 - RNA, 32 nt, Homo Sapiens
ucuaccaaaaauuucaaauaaagucaaacccc

SEQ ID NO: 343061 - RNA, 32 nt, Homo Sapiens
cuccagagugaugggagaagaaaaauccaagc

SEQ ID NO: 343062 - RNA, 32 nt, Homo Sapiens
acccuuuugccuuuauugucgacgugacucac

SEQ ID NO: 343063 - RNA, 32 nt, Homo Sapiens
ggacacagagcugcagaguccugaacaucccu

SEQ ID NO: 343064 - RNA, 32 nt, Homo Sapiens
aacuuauuuucacuuuuuguauuauuuuugag

SEQ ID NO: 343065 - RNA, 32 nt, Homo Sapiens
ucugggcuccgcggccucggccccgcugcacu

SEQ ID NO: 343066 - RNA, 32 nt, Homo Sapiens
guagacaacuuuagccacuccuguccguccuu

SEQ ID NO: 343067 - RNA, 32 nt, Homo Sapiens
ugucucucugggcugcagagucugccccacau

SEQ ID NO: 343068 - RNA, 32 nt, Homo Sapiens
accaagacgcagagaggccaagccccuugccu

SEQ ID NO: 343069 - RNA, 32 nt, Homo Sapiens
aagaccuggagaccugcugaauggcggagcua

SEQ ID NO: 343070 - RNA, 32 nt, Homo Sapiens
cacuuuaaaaauacagagaauuucuuccuuuu

SEQ ID NO: 343071 - RNA, 32 nt, Homo Sapiens
uugucauuuuuccaaacaaaacaaaacacugg

SEQ ID NO: 343072 - RNA, 32 nt, Homo Sapiens
ucaacgccucaaagcgagggggguacguuaaa

SEQ ID NO: 343073 - RNA, 32 nt, Homo Sapiens
gucucagacucuuuuuguaccuggugaccccu

SEQ ID NO: 343074 - RNA, 32 nt, Homo Sapiens
uagaaauuaguuuucuuuucuugcuugcaaua

SEQ ID NO: 343075 - RNA, 32 nt, Homo Sapiens
ccuuauauggcauauuuugauucaggccuaca

SEQ ID NO: 343076 - RNA, 32 nt, Homo Sapiens
uauguauuccauggcuaacaaacccuggcccc

SEQ ID NO: 343077 - RNA, 32 nt, Homo Sapiens
gaguaaauacugggcuucagguucuagggaau

SEQ ID NO: 343078 - RNA, 32 nt, Homo Sapiens
aaagugugagaaaaaaguuuguuuacaggagc

SEQ ID NO: 343079 - RNA, 32 nt, Homo Sapiens
cccccacucugcacagccuagacauccagguc

SEQ ID NO: 343080 - RNA, 30 nt, Homo Sapiens
guccucgcuaaaagacaguagauaugcaac

SEQ ID NO: 343081 - RNA, 32 nt, Homo Sapiens
aacacauguuccccuugggggugguggaugaa

SEQ ID NO: 343082 - RNA, 32 nt, Homo Sapiens
uccccaaugcccacucugcuaggcuggcauca

SEQ ID NO: 343083 - RNA, 32 nt, Homo Sapiens
ugugggugcagggcucugccgcacagccucuc

SEQ ID NO: 343084 - RNA, 32 nt, Homo Sapiens
cgcgcucugacucgcugugcgccccgcggccg

SEQ ID NO: 343085 - RNA, 32 nt, Homo Sapiens
ugccccgcccccgcgucugcaccucugugguu

SEQ ID NO: 343086 - RNA, 32 nt, Homo Sapiens
ccaucucuccagcagaacugcuuggauuuuuc

SEQ ID NO: 343087 - RNA, 32 nt, Homo Sapiens
ggacgcgcaacuccggccggagcuguccgggg

SEQ ID NO: 343088 - RNA, 32 nt, Homo Sapiens
cugauuucucugaacagaaaacaaaagagaga

SEQ ID NO: 343089 - RNA, 32 nt, Homo Sapiens
cgcagucucuucugcaccauuuucuacaccag

SEQ ID NO: 343090 - RNA, 32 nt, Homo Sapiens
acuuguagccccucagcgucagcucagcuggu

SEQ ID NO: 343091 - RNA, 32 nt, Homo Sapiens
ucuguggucuuagggaaggauccagacauaca

SEQ ID NO: 343092 - RNA, 29 nt, Homo Sapiens
ucuuuccauaucaaguaccauaugaguuc

SEQ ID NO: 343093 - RNA, 32 nt, Homo Sapiens
uacauuuuugacaagcuccucaugauucugau

SEQ ID NO: 343094 - RNA, 32 nt, Homo Sapiens
cccuggccuguucccccgaugauugaggcacu

SEQ ID NO: 343095 - RNA, 32 nt, Homo Sapiens
aagccagccccauuguccucaccaguacagca

SEQ ID NO: 343096 - RNA, 32 nt, Homo Sapiens
gaagcugggagagcagagaaaaggggccaccg

SEQ ID NO: 343097 - RNA, 32 nt, Homo Sapiens
aggcccagggaguggggcagggggcugcuuau

SEQ ID NO: 343098 - RNA, 32 nt, Homo Sapiens
gagcuguuguauugccuggggugucuacugca

SEQ ID NO: 343099 - RNA, 32 nt, Homo Sapiens
gacagggacuuugcugguguagucuuuuuaua

SEQ ID NO: 343100 - RNA, 32 nt, Homo Sapiens
uggcaauagaaagaagaauagaauucagguuu

SEQ ID NO: 343101 - RNA, 27 nt, Homo Sapiens
uucuguuauuaauucuuaugacgaaaa

SEQ ID NO: 343102 - RNA, 32 nt, Homo Sapiens
aggaauggaaaacccuugaaauacguuuuuua

SEQ ID NO: 343103 - RNA, 32 nt, Homo Sapiens
ccagcccgucuuccggaauuucucaacuaaau

SEQ ID NO: 343104 - RNA, 32 nt, Homo Sapiens
cgugacccuccggcugcucggagugaacaggc

SEQ ID NO: 343105 - RNA, 32 nt, Homo Sapiens
cuuucaugcuucugcccugucaaaggucccua

SEQ ID NO: 343106 - RNA, 32 nt, Homo Sapiens
acuccuuucuuuuuuccaguugcucccuuuug

SEQ ID NO: 343107 - RNA, 32 nt, Homo Sapiens
cuuccuacuccccaacaaggggcucacuaucc

SEQ ID NO: 343108 - RNA, 32 nt, Homo Sapiens
ugagggcucuccccacaccacccagcaggcgc

SEQ ID NO: 343109 - RNA, 32 nt, Homo Sapiens
uccccuauccaugcccccuaccucugacucuc

SEQ ID NO: 343110 - RNA, 32 nt, Homo Sapiens
gcacaggccaccugcuuggguuccucggaguu

SEQ ID NO: 343111 - RNA, 30 nt, Homo Sapiens
aaugauauguaaauaaagcucaauuuuuug

SEQ ID NO: 343112 - RNA, 32 nt, Homo Sapiens
cguuaccacuaauaaacuuauuuuacaguaag

SEQ ID NO: 343113 - RNA, 32 nt, Homo Sapiens
caaacgcagacacuguagucagaccucagcaa

SEQ ID NO: 343114 - RNA, 32 nt, Homo Sapiens
uuggaaaugugugugacuuuuacaaagagcaa

SEQ ID NO: 343115 - RNA, 32 nt, Homo Sapiens
aagauuuuuuaaauucuaucuugcugauuuuu

SEQ ID NO: 343116 - RNA, 32 nt, Homo Sapiens
acuuuuuguaaaugcuguaaauauuucauaaa

SEQ ID NO: 343117 - RNA, 32 nt, Homo Sapiens
ugacaauaaaauauuuaccaucacaugcugca

SEQ ID NO: 343118 - RNA, 32 nt, Homo Sapiens
accuccccuggccgcgcucucgcucuucucuu

SEQ ID NO: 343119 - RNA, 32 nt, Homo Sapiens
gaacagaaaugaauaaaagucgcuggcagagu

SEQ ID NO: 343120 - RNA, 32 nt, Homo Sapiens
gguaugaagaaaccccgaugacaaagauacaa

SEQ ID NO: 343121 - RNA, 32 nt, Homo Sapiens
acucuggggguccacaucaagauagcugggcc

SEQ ID NO: 343122 - RNA, 32 nt, Homo Sapiens
caugaaaacuaaagucugaaauaaauuacuug

SEQ ID NO: 343123 - RNA, 32 nt, Homo Sapiens
gggaaagugcauaugaaauccuugacuggacc

SEQ ID NO: 343124 - RNA, 32 nt, Homo Sapiens
acccccaaauccuuccucuccucccaguccca

SEQ ID NO: 343125 - RNA, 32 nt, Homo Sapiens
cugcucagcucuucuccuuguuacauaguaac

SEQ ID NO: 343126 - RNA, 31 nt, Homo Sapiens
gcaaucugucacacucucagagucugggacu

SEQ ID NO: 343127 - RNA, 32 nt, Homo Sapiens
gcuauuuuguagguuuugugggacauaauuug

SEQ ID NO: 343128 - RNA, 32 nt, Homo Sapiens
cgucuaugcuucccuugcccucuccagcucca

SEQ ID NO: 343129 - RNA, 32 nt, Homo Sapiens
ggugggcacgggggcccagacaguacucucca

SEQ ID NO: 343130 - RNA, 32 nt, Homo Sapiens
gggcagaauaaaaaccaugggaggcaaagaaa

SEQ ID NO: 343131 - RNA, 32 nt, Homo Sapiens
aauaaagaaaaaacccauuacuccaagacguu

SEQ ID NO: 343132 - RNA, 32 nt, Homo Sapiens
uuugguuuuaucauuccauuuugcuaauauuu

SEQ ID NO: 343133 - RNA, 32 nt, Homo Sapiens
ugaacucagagguagacaggucaccuuacuac

SEQ ID NO: 343134 - RNA, 32 nt, Homo Sapiens
agacacuccagaugaagguugguguggggcug

SEQ ID NO: 343135 - RNA, 32 nt, Homo Sapiens
ggguccugcccggcugcggaggcgggcgcgac

SEQ ID NO: 343136 - RNA, 32 nt, Homo Sapiens
gagcugcugcugcuccacggcgcggagcccaa

SEQ ID NO: 343137 - RNA, 32 nt, Homo Sapiens
caagaaagaugaauacauuuuguuaaaaaaaa

SEQ ID NO: 343138 - RNA, 32 nt, Homo Sapiens
ugaaugauauauuauuagggcauguuaacagu

SEQ ID NO: 343139 - RNA, 32 nt, Homo Sapiens
ugccauccugucauggaccagguguuauucau

SEQ ID NO: 343140 - RNA, 32 nt, Homo Sapiens
ccaaguccgaggaggaggagaagcuggcggag

SEQ ID NO: 343141 - RNA, 32 nt, Homo Sapiens
uaaccaggucacauuucagccgcgacccacuc

SEQ ID NO: 343142 - RNA, 32 nt, Homo Sapiens
gagccaagagaagaagcaggucccagggccga

SEQ ID NO: 343143 - RNA, 32 nt, Homo Sapiens
gacucuauucuuuacccuuccauugcuccagu

SEQ ID NO: 343144 - RNA, 32 nt, Homo Sapiens
aagccuaagcuacuaugaggcacucacaagug

SEQ ID NO: 343145 - RNA, 32 nt, Homo Sapiens
guuacgggacgccgcugccaucuacagcacuc

SEQ ID NO: 343146 - RNA, 32 nt, Homo Sapiens
cgggugugaaaagccagggaaugaagcccgcg

SEQ ID NO: 343147 - RNA, 32 nt, Homo Sapiens
cauaaaaaaguaaacaggauauuuuauuucca

SEQ ID NO: 343148 - RNA, 32 nt, Homo Sapiens
aaacaauacuuauuauccacaggguaacagug

SEQ ID NO: 343149 - RNA, 32 nt, Homo Sapiens
cccuagagucauuuacucuccucugccuccau

SEQ ID NO: 343150 - RNA, 32 nt, Homo Sapiens
uaguguauaagugaguacacucuaauuaacuu

SEQ ID NO: 343151 - RNA, 32 nt, Homo Sapiens
cuugcagugucugaggccugugggauccucaa

SEQ ID NO: 343152 - RNA, 32 nt, Homo Sapiens
uuccugcauuuucuuuuuuuuauuauuuguaa

SEQ ID NO: 343153 - RNA, 32 nt, Homo Sapiens
auauacaguugacccuuggacaacacaggagu

SEQ ID NO: 343154 - RNA, 28 nt, Homo Sapiens
gccaugcggaccgcggaccgggaggcgc

SEQ ID NO: 343155 - RNA, 32 nt, Homo Sapiens
guaaugcaagaauuuaaagaaauauuuuuaaa

SEQ ID NO: 343156 - RNA, 32 nt, Homo Sapiens
ggcgcccgccaccacacccggcucauuuuugu

SEQ ID NO: 343157 - RNA, 32 nt, Homo Sapiens
auagcacagcuauauaugcugaugaagaagaa

SEQ ID NO: 343158 - RNA, 32 nt, Homo Sapiens
aguaaaccaaacguugucacuuuucucuuguu

SEQ ID NO: 343159 - RNA, 32 nt, Homo Sapiens
gcgggagccucggccaagccgcgagcaggugu

SEQ ID NO: 343160 - RNA, 32 nt, Homo Sapiens
cuccgauauuuauguuuggguagaagaaaagg

SEQ ID NO: 343161 - RNA, 32 nt, Homo Sapiens
uucauuaugucuucuguacuagugggguagag

SEQ ID NO: 343162 - RNA, 32 nt, Homo Sapiens
auuuauauagagaugugauguuagagaacuac

SEQ ID NO: 343163 - RNA, 32 nt, Homo Sapiens
agaagggaaaaguaugaggaugaccuaugagc

SEQ ID NO: 343164 - RNA, 32 nt, Homo Sapiens
cuguaaaguaagcaaaaugacuaguugaauug

SEQ ID NO: 343165 - RNA, 32 nt, Homo Sapiens
ccguuugucccauggauauccuggggugugag

SEQ ID NO: 343166 - RNA, 32 nt, Homo Sapiens
augccaguaauaaucugcuuccucuauuguca

SEQ ID NO: 343167 - RNA, 32 nt, Homo Sapiens
uggggucucccucuccugccuuacucacgaua

SEQ ID NO: 343168 - RNA, 32 nt, Homo Sapiens
uccuaaaugaauuugaaggcaaaaccguggaa

SEQ ID NO: 343169 - RNA, 32 nt, Homo Sapiens
uucauggauuuguggaaccuuuuccagccuaa

SEQ ID NO: 343170 - RNA, 32 nt, Homo Sapiens
aggacggcucugcagcugcaaagggcgagugc

SEQ ID NO: 343171 - RNA, 32 nt, Homo Sapiens
ggcgaggauggcgaccccggaccagaagucgc

SEQ ID NO: 343172 - RNA, 31 nt, Homo Sapiens
uaaaaaccaaauuguaaauggaguguguacu

SEQ ID NO: 343173 - RNA, 32 nt, Homo Sapiens
gcgcugggccgcgggcagcgucgccucacgcg

SEQ ID NO: 343174 - RNA, 32 nt, Homo Sapiens
gauuucagaaaaggggugaaagagaagauugc

SEQ ID NO: 343175 - RNA, 32 nt, Homo Sapiens
ggcaugcugacuguccugauugcgauccagcc

SEQ ID NO: 343176 - RNA, 32 nt, Homo Sapiens
gagccggugugcgccaccugggcugcggcggc

SEQ ID NO: 343177 - RNA, 32 nt, Homo Sapiens
agaauacaaaaauuagccgggugugguggugg

SEQ ID NO: 343178 - RNA, 30 nt, Homo Sapiens
ccccggcgagguggcgcugcaggagcuuug

SEQ ID NO: 343179 - RNA, 32 nt, Homo Sapiens
ucacauugcauucuauugccuucuuugaagaa

SEQ ID NO: 343180 - RNA, 32 nt, Homo Sapiens
cuggccaaggccaucagggccguccacugugg

SEQ ID NO: 343181 - RNA, 32 nt, Homo Sapiens
cagauugucguccugagcacucccaccgcugu

SEQ ID NO: 343182 - RNA, 32 nt, Homo Sapiens
augucauguugcuugucgcuuucucagugugu

SEQ ID NO: 343183 - RNA, 32 nt, Homo Sapiens
uuucccuguggcucagcccguucgcuggacug

SEQ ID NO: 343184 - RNA, 32 nt, Homo Sapiens
ccaaagcauuaccgcaugguagagaacacacu

SEQ ID NO: 343185 - RNA, 32 nt, Homo Sapiens
ugcguuuacaauccuuuagcuagacagaaaag

SEQ ID NO: 343186 - RNA, 32 nt, Homo Sapiens
aagguuacagcugagaucuuuggaaccaaagg

SEQ ID NO: 343187 - RNA, 32 nt, Homo Sapiens
cacgccuguguccacccuggccugcaggaaca

SEQ ID NO: 343188 - RNA, 32 nt, Homo Sapiens
cauucuuggcucaacuaacagcuccaaaccuc

SEQ ID NO: 343189 - RNA, 32 nt, Homo Sapiens
guauccugucuccccuaauugacauucuauca

SEQ ID NO: 343190 - RNA, 32 nt, Homo Sapiens
cccaaauaugucuguauguuuauauuuugaua

SEQ ID NO: 343191 - RNA, 32 nt, Homo Sapiens
uuugcugacuaaaauaaaauaacuggugguuu

SEQ ID NO: 343192 - RNA, 32 nt, Homo Sapiens
uggaucgcgccggcugcgcggggcugcggaca

SEQ ID NO: 343193 - RNA, 32 nt, Homo Sapiens
cccuugccggagcugcccuucaccuuuggggc

SEQ ID NO: 343194 - RNA, 32 nt, Homo Sapiens
gaacuucccucauuucucucugcaaucugcaa

SEQ ID NO: 343195 - RNA, 32 nt, Homo Sapiens
ugccggcgucccgcgcuucaggagcaggugcc

SEQ ID NO: 343196 - RNA, 32 nt, Homo Sapiens
caguggccacaggaaccccgggccugagugga

SEQ ID NO: 343197 - RNA, 32 nt, Homo Sapiens
aaguaucaacugagauauuuccugcuucuuaa

SEQ ID NO: 343198 - RNA, 32 nt, Homo Sapiens
gcuggggaauugugcugcuuguccuguuggcu

SEQ ID NO: 343199 - RNA, 32 nt, Homo Sapiens
gaaccugcuugaaaugcagccgaggagccggg

SEQ ID NO: 343200 - RNA, 32 nt, Homo Sapiens
ccggucuagccgccgccuccuucgcucccuga

SEQ ID NO: 343201 - RNA, 32 nt, Homo Sapiens
guuugcuguugcacacugauugcugagggugc

SEQ ID NO: 343202 - RNA, 32 nt, Homo Sapiens
caaacaagugaacacauugcuuucaguggagg

SEQ ID NO: 343203 - RNA, 28 nt, Homo Sapiens
cccgcauguucaggaccaaacgaucugc

SEQ ID NO: 343204 - RNA, 32 nt, Homo Sapiens
accaguacauauaaaguaaaugacauggauuu

SEQ ID NO: 343205 - RNA, 32 nt, Homo Sapiens
gauuauuuccaagucacucuugaucauaguua

SEQ ID NO: 343206 - RNA, 32 nt, Homo Sapiens
gucccgacggcaucgccacgggcggcggcaaa

SEQ ID NO: 343207 - RNA, 32 nt, Homo Sapiens
uacuauuuacacaucauaggcucaagauugua

SEQ ID NO: 343208 - RNA, 31 nt, Homo Sapiens
ccuccggagcccugccugccccugcucccca

SEQ ID NO: 343209 - RNA, 32 nt, Homo Sapiens
gagacauacuuguuaacuuuggagcacagguu

SEQ ID NO: 343210 - RNA, 32 nt, Homo Sapiens
aguugggcugaauuuagguuuagguuugguag

SEQ ID NO: 343211 - RNA, 32 nt, Homo Sapiens
guacagggauucagguuucuuauucuuacaac

SEQ ID NO: 343212 - RNA, 32 nt, Homo Sapiens
uugaacagugcuucucuaaaaugcaauaauaa

SEQ ID NO: 343213 - RNA, 32 nt, Homo Sapiens
cccucagauccccacauuguuccuccuguagg

SEQ ID NO: 343214 - RNA, 32 nt, Homo Sapiens
ggcaauauuacaauccuugaccucagugaaag

SEQ ID NO: 343215 - RNA, 32 nt, Homo Sapiens
gugagccaccgcgcccggccgaaucuuguuuu

SEQ ID NO: 343216 - RNA, 32 nt, Homo Sapiens
guuuaaaucaguaggcuuaauguguucugggu

SEQ ID NO: 343217 - RNA, 32 nt, Homo Sapiens
accagcugguaguugucucagcauucuucaaa

SEQ ID NO: 343218 - RNA, 32 nt, Homo Sapiens
cucacccaguaaaugcagaaagcucuuaggac

SEQ ID NO: 343219 - RNA, 29 nt, Homo Sapiens
guccccugggcccacuauuguuucucuau

SEQ ID NO: 343220 - RNA, 32 nt, Homo Sapiens
cugggugagcugcagcggcugcugcuggacgc

SEQ ID NO: 343221 - RNA, 32 nt, Homo Sapiens
ugcuggaaacugucgacggccauccacuuauu

SEQ ID NO: 343222 - RNA, 32 nt, Homo Sapiens
ucccuuuucuucccuuucacucugaagcaguu

SEQ ID NO: 343223 - RNA, 29 nt, Homo Sapiens
cauuugauauguaucguagcuauagcaaa

SEQ ID NO: 343224 - RNA, 32 nt, Homo Sapiens
aacaauagacauuggggaccacuagacugggg

SEQ ID NO: 343225 - RNA, 32 nt, Homo Sapiens
ucuacuaaaaauacaaaaaauuagcucggcgu

SEQ ID NO: 343226 - RNA, 32 nt, Homo Sapiens
ucugugggaauuuccugugugaggaaaacgug

SEQ ID NO: 343227 - RNA, 32 nt, Homo Sapiens
acacaaacuuucucaugguuuguagguauuuu

SEQ ID NO: 343228 - RNA, 32 nt, Homo Sapiens
gccugcaggaggagaggcuggggaggguucuc

SEQ ID NO: 343229 - RNA, 32 nt, Homo Sapiens
auuucuugagucauuuuuuuuaaauuuccuua

SEQ ID NO: 343230 - RNA, 32 nt, Homo Sapiens
cggguccaggacuuggcguguuguuacauguu

SEQ ID NO: 343231 - RNA, 32 nt, Homo Sapiens
gacauuuugacuggcugggugcgguggcucac

SEQ ID NO: 343232 - RNA, 32 nt, Homo Sapiens
cuacccggaggcaccaugagcguggaggcgua

SEQ ID NO: 343233 - RNA, 32 nt, Homo Sapiens
gccuccuggccaaugcgagugacagcgaccuu

SEQ ID NO: 343234 - RNA, 28 nt, Homo Sapiens
ggguggggagggccgccgcaguccccag

SEQ ID NO: 343235 - RNA, 32 nt, Homo Sapiens
aaaugaaaaaucauauacuuuuaacaucacuu

SEQ ID NO: 343236 - RNA, 32 nt, Homo Sapiens
uuuuuauaucccauuuuuauaucgaucucuua

SEQ ID NO: 343237 - RNA, 32 nt, Homo Sapiens
uucugagguauuuuauguaucgauuuauuagu

SEQ ID NO: 343238 - RNA, 32 nt, Homo Sapiens
ggcccugcugccagcggccgggacucucagca

SEQ ID NO: 343239 - RNA, 32 nt, Homo Sapiens
accgaggggaggaggagaagcugagcacgugu

SEQ ID NO: 343240 - RNA, 32 nt, Homo Sapiens
caaggccaugucuguuccaucaucacugagcc

SEQ ID NO: 343241 - RNA, 32 nt, Homo Sapiens
caucaagaaugcaauuaacugauaagauacug

SEQ ID NO: 343242 - RNA, 32 nt, Homo Sapiens
gaggcaggggagagagaauggcaucucgcgug

SEQ ID NO: 343243 - RNA, 32 nt, Homo Sapiens
auguauacaaauaaaagaugauuugaaaauuu

SEQ ID NO: 343244 - RNA, 32 nt, Homo Sapiens
uuguuugugaaugcauuaugggacaugauugu

SEQ ID NO: 343245 - RNA, 32 nt, Homo Sapiens
uccucagcccuagaggcgagccaggcaagguu

SEQ ID NO: 343246 - RNA, 32 nt, Homo Sapiens
guguaugugucugaugauauucagucugaugu

SEQ ID NO: 343247 - RNA, 32 nt, Homo Sapiens
caggugucuccuccucaccacaggcugugccc

SEQ ID NO: 343248 - RNA, 32 nt, Homo Sapiens
ccagccauucaucggauccuucauuggguacu

SEQ ID NO: 343249 - RNA, 32 nt, Homo Sapiens
cgcguccgcagcgccgccagccaggcgagagc

SEQ ID NO: 343250 - RNA, 32 nt, Homo Sapiens
gggggcaucuucugaacagccugccucugccc

SEQ ID NO: 343251 - RNA, 32 nt, Homo Sapiens
uugucucaguguaaguuuuaaauaaacauauu

SEQ ID NO: 343252 - RNA, 32 nt, Homo Sapiens
gaguuguuggggguuuuuugcauccauagcac

SEQ ID NO: 343253 - RNA, 32 nt, Homo Sapiens
ucuaggaagaaaauuuuuuaaauuauuuauuu

SEQ ID NO: 343254 - RNA, 32 nt, Homo Sapiens
ggagaaccugcugcgcaacaggaacuucugga

SEQ ID NO: 343255 - RNA, 32 nt, Homo Sapiens
cagagaaagcugcagguggauaaagaagcugu

SEQ ID NO: 343256 - RNA, 32 nt, Homo Sapiens
ccaaacucuuauuucagcauuaacucaaaauu

SEQ ID NO: 343257 - RNA, 32 nt, Homo Sapiens
acauaaucuauuauuugcuaugcaauauuuua

SEQ ID NO: 343258 - RNA, 32 nt, Homo Sapiens
acuugcuacauaucauguuuuaauugcuugua

SEQ ID NO: 343259 - RNA, 32 nt, Homo Sapiens
cagccccugggcuacauaacagcaagacaguc

SEQ ID NO: 343260 - RNA, 32 nt, Homo Sapiens
uugaacacaacacuggaaaggguauccacagc

SEQ ID NO: 343261 - RNA, 32 nt, Homo Sapiens
gacgucugaaaaauaaaauauucaucauuuuu

SEQ ID NO: 343262 - RNA, 30 nt, Homo Sapiens
ccggcauguuucauaguccgcggcggcucu

SEQ ID NO: 343263 - RNA, 31 nt, Homo Sapiens
cuugcacccagcaccaccugagucuaaccag

SEQ ID NO: 343264 - RNA, 32 nt, Homo Sapiens
gagcaggagaaggagcaggucaugcucguggc

SEQ ID NO: 343265 - RNA, 32 nt, Homo Sapiens
auuuguaaauguuuguagcauuguuacuucua

SEQ ID NO: 343266 - RNA, 30 nt, Homo Sapiens
gucucugcugcccauggggaaacaggcugg

SEQ ID NO: 343267 - RNA, 32 nt, Homo Sapiens
uuuggggauuuaaugauauaauguaagaagca

SEQ ID NO: 343268 - RNA, 31 nt, Homo Sapiens
aagggaacaaauuauguggcagagagggaua

SEQ ID NO: 343269 - RNA, 32 nt, Homo Sapiens
cagagcguggagguguggaaggaguggcugcu

SEQ ID NO: 343270 - RNA, 32 nt, Homo Sapiens
cagcccuucaccagcaccacuucuaccagagc

SEQ ID NO: 343271 - RNA, 32 nt, Homo Sapiens
gaauuggagagcccugaagauaauaguggcuu

SEQ ID NO: 343272 - RNA, 32 nt, Homo Sapiens
uauaaagcaccgugauugggaguguuuuugcg

SEQ ID NO: 343273 - RNA, 32 nt, Homo Sapiens
acaauggcuucuaucaucucauaaauccugaa

SEQ ID NO: 343274 - RNA, 32 nt, Homo Sapiens
gcagcccacccuuuccucuccccacugccucc

SEQ ID NO: 343275 - RNA, 32 nt, Homo Sapiens
cacgccggaagcugcgauuccugcagcggaag

SEQ ID NO: 343276 - RNA, 32 nt, Homo Sapiens
augaaauauguuuuauauaaucuccuauuauu

SEQ ID NO: 343277 - RNA, 32 nt, Homo Sapiens
guagaugcacagaugguagguuguccugaauu

SEQ ID NO: 343278 - RNA, 32 nt, Homo Sapiens
acgguccccccaccccucuccugcccggcccc

SEQ ID NO: 343279 - RNA, 32 nt, Homo Sapiens
aacacgggagaaggauguaggcugggaggcua

SEQ ID NO: 343280 - RNA, 32 nt, Homo Sapiens
acguacacauaaauacacccagcacuugcaag

SEQ ID NO: 343281 - RNA, 32 nt, Homo Sapiens
ugaugagaugacuguauauucugcugcugcug

SEQ ID NO: 343282 - RNA, 32 nt, Homo Sapiens
agcccugcccucacuccacuccccucauccac

SEQ ID NO: 343283 - RNA, 32 nt, Homo Sapiens
aagaauuuguccuguauggaaaauaggagacu

SEQ ID NO: 343284 - RNA, 32 nt, Homo Sapiens
aaacccugucucugcaaaaaauaaaaaauuag

SEQ ID NO: 343285 - RNA, 32 nt, Homo Sapiens
gguggcugcccccaggacaugcaggauuucug

SEQ ID NO: 343286 - RNA, 32 nt, Homo Sapiens
gugcggcggccgcgacuuccccgacgcggggc

SEQ ID NO: 343287 - RNA, 32 nt, Homo Sapiens
gagccggcgggcgggcgccucucggccaggaa

SEQ ID NO: 343288 - RNA, 32 nt, Homo Sapiens
gugugagggcuggaaggcccugggcaggucac

SEQ ID NO: 343289 - RNA, 32 nt, Homo Sapiens
agcugccucugcggccacggacuucugcccuu

SEQ ID NO: 343290 - RNA, 32 nt, Homo Sapiens
cugaguauuuugaaacacauuuugaauaauau

SEQ ID NO: 343291 - RNA, 32 nt, Homo Sapiens
uaauaugccugacaggcaucugagcaaagguu

SEQ ID NO: 343292 - RNA, 32 nt, Homo Sapiens
ucucugacguaagcuuccaugcgacagccuga

SEQ ID NO: 343293 - RNA, 31 nt, Homo Sapiens
acagcucucaaugauguauaugaccucagcu

SEQ ID NO: 343294 - RNA, 32 nt, Homo Sapiens
uugguugacuacuccggagcagccacuaagag

SEQ ID NO: 343295 - RNA, 32 nt, Homo Sapiens
cauuaauuaaucgaucagauuuuuccagaauu

SEQ ID NO: 343296 - RNA, 31 nt, Homo Sapiens
aagggcacaaagacaagcuucuguuauuauc

SEQ ID NO: 343297 - RNA, 32 nt, Homo Sapiens
ggccggucacugcuacggagcccgccagaagg

SEQ ID NO: 343298 - RNA, 32 nt, Homo Sapiens
guuagggaagagaaaggaaaagagcccacaca

SEQ ID NO: 343299 - RNA, 32 nt, Homo Sapiens
ggagaauagccaugauuaacugcuauucgugg

SEQ ID NO: 343300 - RNA, 32 nt, Homo Sapiens
cucugcacccucggucauuguacacagcagcc

SEQ ID NO: 343301 - RNA, 32 nt, Homo Sapiens
uguaagauacuucuucaagauuggacagcugg

SEQ ID NO: 343302 - RNA, 32 nt, Homo Sapiens
gaauaagaccucuuaucaugagcagcugucag

SEQ ID NO: 343303 - RNA, 32 nt, Homo Sapiens
cggggggcaagcggcgggaggggaaacgugcg

SEQ ID NO: 343304 - RNA, 32 nt, Homo Sapiens
uaauuuuuuaaauuuuuuuuuauagagacagg

SEQ ID NO: 343305 - RNA, 32 nt, Homo Sapiens
acuguguuuucugcauguaauaaaggauggca

SEQ ID NO: 343306 - RNA, 32 nt, Homo Sapiens
accccacaccugaguucuugccuccuccuuuu

SEQ ID NO: 343307 - RNA, 32 nt, Homo Sapiens
uccagcuccuucuuggguguggggaaaugagu

SEQ ID NO: 343308 - RNA, 32 nt, Homo Sapiens
agggacugugugagaagggaagagacugcuau

SEQ ID NO: 343309 - RNA, 32 nt, Homo Sapiens
ugaagagaugagacaagguauauaaaaguccu

SEQ ID NO: 343310 - RNA, 32 nt, Homo Sapiens
acuaccagcguauauauaagaaagacaucuuu

SEQ ID NO: 343311 - RNA, 32 nt, Homo Sapiens
caggcggcggccaugaacuucuccgagguauu

SEQ ID NO: 343312 - RNA, 32 nt, Homo Sapiens
ugggacucugugucacaaguaagcaaaugaau

SEQ ID NO: 343313 - RNA, 32 nt, Homo Sapiens
guguuuucugcaaggguugugaccugaaacuu

SEQ ID NO: 343314 - RNA, 32 nt, Homo Sapiens
aucgcacuuucaguuccuccauuuggaauuca

SEQ ID NO: 343315 - RNA, 32 nt, Homo Sapiens
caccgucuuuuggcagaauggcauuuuugccu

SEQ ID NO: 343316 - RNA, 32 nt, Homo Sapiens
gaaagugcccucaaagaaugagaaccucaagc

SEQ ID NO: 343317 - RNA, 32 nt, Homo Sapiens
cuaacaguggugcugguuuguuugaacagugu

SEQ ID NO: 343318 - RNA, 32 nt, Homo Sapiens
cgaccuggauucuacggggcaagccccucugg

SEQ ID NO: 343319 - RNA, 32 nt, Homo Sapiens
cgcuggcacugacggcgggcgugcugguggac

SEQ ID NO: 343320 - RNA, 32 nt, Homo Sapiens
guuuaucuccagcccacagcucuuucccugaa

SEQ ID NO: 343321 - RNA, 32 nt, Homo Sapiens
ugugggggcuauugaguuuucuuguuucuuaa

SEQ ID NO: 343322 - RNA, 32 nt, Homo Sapiens
uuuccuggggaguagccuggaauuuaaaguug

SEQ ID NO: 343323 - RNA, 32 nt, Homo Sapiens
ucuuaccuuuaacgugaacucacaggcggauu

SEQ ID NO: 343324 - RNA, 32 nt, Homo Sapiens
uguucuuuaguguaaggcugcauuguggguuu

SEQ ID NO: 343325 - RNA, 32 nt, Homo Sapiens
gcugggcgccgguaguggaaagcgacggcgcg

SEQ ID NO: 343326 - RNA, 32 nt, Homo Sapiens
gccccggccccagcguucucgcaguggaauag

SEQ ID NO: 343327 - RNA, 32 nt, Homo Sapiens
guaaguagccacuuacugaguccaaucgauua

SEQ ID NO: 343328 - RNA, 32 nt, Homo Sapiens
ccuaaacaucuucuaguuauauucucauuucu

SEQ ID NO: 343329 - RNA, 32 nt, Homo Sapiens
ucaggccuugucugcuggcuccugccaggguc

SEQ ID NO: 343330 - RNA, 32 nt, Homo Sapiens
uaaaaugugccauuuuaaccauuuuugcugaa

SEQ ID NO: 343331 - RNA, 32 nt, Homo Sapiens
uucuuuuucuuuccuuuuuuuuuuuuguugua

SEQ ID NO: 343332 - RNA, 32 nt, Homo Sapiens
gcccuuugacuuuuccccaaucaaagggaacu

SEQ ID NO: 343333 - RNA, 32 nt, Homo Sapiens
cccggacccgggggcuggcccagggcccugca

SEQ ID NO: 343334 - RNA, 32 nt, Homo Sapiens
cgcccgcugcugccgcccgcccggggugugga

SEQ ID NO: 343335 - RNA, 32 nt, Homo Sapiens
caggaagaggagaaccggcagcugcuggcuga

SEQ ID NO: 343336 - RNA, 32 nt, Homo Sapiens
cuggcuuccggaccauucacugcuagcacagg

SEQ ID NO: 343337 - RNA, 32 nt, Homo Sapiens
cuugggaccugccacucccugggucgguccau

SEQ ID NO: 343338 - RNA, 32 nt, Homo Sapiens
auguaacuaggauaaaguauuuacgggaacuc

SEQ ID NO: 343339 - RNA, 32 nt, Homo Sapiens
cgcggagaugaaauucccggccucggugcugg

SEQ ID NO: 343340 - RNA, 32 nt, Homo Sapiens
ugcauuguuuuaaaucuuguucuugcuaggau

SEQ ID NO: 343341 - RNA, 32 nt, Homo Sapiens
ugauguuccaugaaacaaagcugcaggcuguu

SEQ ID NO: 343342 - RNA, 32 nt, Homo Sapiens
caaaggggguaguccucuuauaaccugauauu

SEQ ID NO: 343343 - RNA, 32 nt, Homo Sapiens
gccgagcgggggugcugcgcggcggccgugau

SEQ ID NO: 343344 - RNA, 29 nt, Homo Sapiens
aaaauuaugacuuucccuggguaaaaagu

SEQ ID NO: 343345 - RNA, 32 nt, Homo Sapiens
ucuucucuuccgcuccugccuccugucggauu

SEQ ID NO: 343346 - RNA, 31 nt, Homo Sapiens
uuccugaaauaaauaugcaauguuacauuuu

SEQ ID NO: 343347 - RNA, 32 nt, Homo Sapiens
uuuguaacuauaaaacaaaauuauuuuacaca

SEQ ID NO: 343348 - RNA, 31 nt, Homo Sapiens
aggagaguugacaucuugccaagggccuggu

SEQ ID NO: 343349 - RNA, 29 nt, Homo Sapiens
ugugaauaaaguuaguguguugucugugc

SEQ ID NO: 343350 - RNA, 32 nt, Homo Sapiens
cagcgcaaguuccaguaugggaauuauugcaa

SEQ ID NO: 343351 - RNA, 32 nt, Homo Sapiens
ccaaaagggcuccugagggucugggcaaggga

SEQ ID NO: 343352 - RNA, 32 nt, Homo Sapiens
gggcuuccucccgcccugaggcaagcaccucu

SEQ ID NO: 343353 - RNA, 32 nt, Homo Sapiens
gcccagggaaaugaaaacuuuucuuauucacc

SEQ ID NO: 343354 - RNA, 32 nt, Homo Sapiens
gccuguauuuuugugcucacugauggaugagc

SEQ ID NO: 343355 - RNA, 32 nt, Homo Sapiens
aauuacuaacuuuuguuauacugguacugaua

SEQ ID NO: 343356 - RNA, 32 nt, Homo Sapiens
ggccaccgccccagccucaccccaucccacga

SEQ ID NO: 343357 - RNA, 32 nt, Homo Sapiens
aauucucuuaguucuuugauaacaauuuguuc

SEQ ID NO: 343358 - RNA, 29 nt, Homo Sapiens
guggcaggaugucucagugguacgaacuu

SEQ ID NO: 343359 - RNA, 32 nt, Homo Sapiens
caauugccuuuguaggccaagaucaugccgcg

SEQ ID NO: 343360 - RNA, 32 nt, Homo Sapiens
ggcggggcaggcccgacuuucgccgucuucuu

SEQ ID NO: 343361 - RNA, 32 nt, Homo Sapiens
gcagacccugcgcccgcggguccuccccaccu

SEQ ID NO: 343362 - RNA, 32 nt, Homo Sapiens
cuuaauucucaguugauacaaaggcuuauaau

SEQ ID NO: 343363 - RNA, 32 nt, Homo Sapiens
cccugagaggggcuuauuggugauggcugugg

SEQ ID NO: 343364 - RNA, 32 nt, Homo Sapiens
cuucaaguguaacaaauuauauuuucaauuaa

SEQ ID NO: 343365 - RNA, 32 nt, Homo Sapiens
gauaaaugaaacaaaaagcugguucuuugaaa

SEQ ID NO: 343366 - RNA, 32 nt, Homo Sapiens
cuauccaugagcagauguuugauaguauugcg

SEQ ID NO: 343367 - RNA, 32 nt, Homo Sapiens
ugaaggaaacaugcacaaaucuguaaaacaua

SEQ ID NO: 343368 - RNA, 31 nt, Homo Sapiens
ccucuagggcagugccugcccucagcucuca

SEQ ID NO: 343369 - RNA, 32 nt, Homo Sapiens
cagaggugaucuuuauuuucuaaauauuucaa

SEQ ID NO: 343370 - RNA, 31 nt, Homo Sapiens
auuggcugcuguguucauccaaggggguucu

SEQ ID NO: 343371 - RNA, 32 nt, Homo Sapiens
cuccccagcugcgcugccccgggcguccacgc

SEQ ID NO: 343372 - RNA, 32 nt, Homo Sapiens
ugccacccacguaugccgaucuuggcaaaucu

SEQ ID NO: 343373 - RNA, 32 nt, Homo Sapiens
ugguuucuguucccuuucugacugcccaaggg

SEQ ID NO: 343374 - RNA, 32 nt, Homo Sapiens
uaaauucccagggcaaacuugggaggcgcuaa

SEQ ID NO: 343375 - RNA, 32 nt, Homo Sapiens
accagcugggagguggacaaggugauaugggg

SEQ ID NO: 343376 - RNA, 32 nt, Homo Sapiens
cggcgcggccccagccuuuccccgggacgcgc

SEQ ID NO: 343377 - RNA, 32 nt, Homo Sapiens
aaugcuuggaagcucucaagugcggagaauuc

SEQ ID NO: 343378 - RNA, 32 nt, Homo Sapiens
acaagacccagcuggugacaaagccuccaauc

SEQ ID NO: 343379 - RNA, 32 nt, Homo Sapiens
aagauuuccuccuacuuccccagcauucuuuc

SEQ ID NO: 343380 - RNA, 32 nt, Homo Sapiens
cacucuccgggcgggugcuggacggacggacg

SEQ ID NO: 343381 - RNA, 32 nt, Homo Sapiens
uuucaucauaauacauuauguuuaccuccauc

SEQ ID NO: 343382 - RNA, 32 nt, Homo Sapiens
auucuccuguuuguauuuuguaaaaugaagaa

SEQ ID NO: 343383 - RNA, 32 nt, Homo Sapiens
gucucuuccaggugggggaggggggagaguca

SEQ ID NO: 343384 - RNA, 32 nt, Homo Sapiens
agucccgccccagccgccgugugauuuagcaa

SEQ ID NO: 343385 - RNA, 32 nt, Homo Sapiens
gugcucccuccucggcggccacgcgcgcucgg

SEQ ID NO: 343386 - RNA, 32 nt, Homo Sapiens
gcaagauucuucaucgguuucuccaucucuga

SEQ ID NO: 343387 - RNA, 32 nt, Homo Sapiens
auuucagggacaguauguugcugcugaugugg

SEQ ID NO: 343388 - RNA, 32 nt, Homo Sapiens
ccugggagcuuauagcccauuauuuuuacuuu

SEQ ID NO: 343389 - RNA, 32 nt, Homo Sapiens
cccaccaucaacgcagcuccgcuuucauuucu

SEQ ID NO: 343390 - RNA, 32 nt, Homo Sapiens
cugaaagacaguaugagaaaaauauucaagua

SEQ ID NO: 343391 - RNA, 32 nt, Homo Sapiens
gggccagccuguuuccucccggucaccuccaa

SEQ ID NO: 343392 - RNA, 32 nt, Homo Sapiens
ccuucccgggggcuucagcagugcgccuggcu

SEQ ID NO: 343393 - RNA, 32 nt, Homo Sapiens
gugaggaggacaugugaguccuggcagaagcc

SEQ ID NO: 343394 - RNA, 32 nt, Homo Sapiens
gagcuuuggucacauguccuccccuuaaauca

SEQ ID NO: 343395 - RNA, 32 nt, Homo Sapiens
uguaaaauaauuacaugccuaaugaaaagaag

SEQ ID NO: 343396 - RNA, 32 nt, Homo Sapiens
uccccgcaguugccuccuucucugccugccug

SEQ ID NO: 343397 - RNA, 32 nt, Homo Sapiens
cccacuagacauuugaaguuccacagugaacc

SEQ ID NO: 343398 - RNA, 32 nt, Homo Sapiens
agaugagauucugaccaguaagcaaaaggagg

SEQ ID NO: 343399 - RNA, 32 nt, Homo Sapiens
uaaaugguuuguggaagagucaagggcuauau

SEQ ID NO: 343400 - RNA, 32 nt, Homo Sapiens
gacggguccaucguguuccucacaaacuggag

SEQ ID NO: 343401 - RNA, 32 nt, Homo Sapiens
cuaggcgugguggcgcacucuuguagucccag

SEQ ID NO: 343402 - RNA, 32 nt, Homo Sapiens
uuugaaugccauacauuuugcacauguacugu

SEQ ID NO: 343403 - RNA, 32 nt, Homo Sapiens
ugaggcugcacccacccaggaguguggccacg

SEQ ID NO: 343404 - RNA, 32 nt, Homo Sapiens
aaaauguugagcacuuuguacaugcuuugaga

SEQ ID NO: 343405 - RNA, 32 nt, Homo Sapiens
uugugauccgccaaccuuggccugucgaccuc

SEQ ID NO: 343406 - RNA, 32 nt, Homo Sapiens
auccuggccaacacggugaaaccccgucucua

SEQ ID NO: 343407 - RNA, 32 nt, Homo Sapiens
gcgagggcggaguggggcgcggcagccaggaa

SEQ ID NO: 343408 - RNA, 32 nt, Homo Sapiens
auaaaagaaaucaaccaaguucaaguuaauac

SEQ ID NO: 343409 - RNA, 32 nt, Homo Sapiens
aaucauuaaaauuguuaagcuauuuuauuguu

SEQ ID NO: 343410 - RNA, 32 nt, Homo Sapiens
uuguaaacacaaaaacaaaaauauacuuuaaa

SEQ ID NO: 343411 - RNA, 32 nt, Homo Sapiens
uuugggcaaggcaacauccccauuccaauucc

SEQ ID NO: 343412 - RNA, 32 nt, Homo Sapiens
acaagaaagggagaagaggugccugugggaga

SEQ ID NO: 343413 - RNA, 32 nt, Homo Sapiens
ugggcacucccgauauucccaggcccucaugg

SEQ ID NO: 343414 - RNA, 27 nt, Homo Sapiens
gaaauuaccuucuucaguguaccagaa

SEQ ID NO: 343415 - RNA, 32 nt, Homo Sapiens
agcaagugcugggccuggaaugucagaagcag

SEQ ID NO: 343416 - RNA, 32 nt, Homo Sapiens
uguucgguugaaggauucugugugcugucgga

SEQ ID NO: 343417 - RNA, 32 nt, Homo Sapiens
caaaggaaauaucaaaguguuuuucaagccug

SEQ ID NO: 343418 - RNA, 32 nt, Homo Sapiens
ugaagaaaagaaccuuuuuuuuucucucucuc

SEQ ID NO: 343419 - RNA, 29 nt, Homo Sapiens
augacgaugaagaagccuuggaugaagaa

SEQ ID NO: 343420 - RNA, 32 nt, Homo Sapiens
aaaagaagguaggagugccauuuuuagaaaag

SEQ ID NO: 343421 - RNA, 32 nt, Homo Sapiens
ugugccuuuccauuauggugugucacaggugc

SEQ ID NO: 343422 - RNA, 29 nt, Homo Sapiens
auucuagcagugauguaaugaaaaauuac

SEQ ID NO: 343423 - RNA, 32 nt, Homo Sapiens
agaaaagagugaaacuuuuaacugcuuagcac

SEQ ID NO: 343424 - RNA, 32 nt, Homo Sapiens
gacugaggcauaauuccuucucagauaccaug

SEQ ID NO: 343425 - RNA, 32 nt, Homo Sapiens
uaucuugcaauuuuucugucugauuuuuacaa

SEQ ID NO: 343426 - RNA, 32 nt, Homo Sapiens
cacaugaagaucuccuuaacagguugccaacc

SEQ ID NO: 343427 - RNA, 32 nt, Homo Sapiens
ucccucucaauccacuagcuuucauguugggc

SEQ ID NO: 343428 - RNA, 32 nt, Homo Sapiens
ccugacagccccugcuggcccggcgcgcggcg

SEQ ID NO: 343429 - RNA, 32 nt, Homo Sapiens
cagccgcucucgcgcccuccccgcccccuccg

SEQ ID NO: 343430 - RNA, 32 nt, Homo Sapiens
ggcagguuacaaugguaccaucuuugcauaug

SEQ ID NO: 343431 - RNA, 32 nt, Homo Sapiens
gugcgcagggccuggucuuccucccccaagcc

SEQ ID NO: 343432 - RNA, 32 nt, Homo Sapiens
cuuuuggacucucggauuuacaucagugguuu

SEQ ID NO: 343433 - RNA, 32 nt, Homo Sapiens
gggucgcagcccggcgugccugcagcugccgu

SEQ ID NO: 343434 - RNA, 32 nt, Homo Sapiens
uaucuaaacauagaaaagguacaguaaaaaua

SEQ ID NO: 343435 - RNA, 32 nt, Homo Sapiens
caucaucaaaagauuaaauuauguuuggguua

SEQ ID NO: 343436 - RNA, 32 nt, Homo Sapiens
aaccacaagguucgagccgccgggcccgacaa

SEQ ID NO: 343437 - RNA, 32 nt, Homo Sapiens
auuagaccagguaguuuguugcauugcaggua

SEQ ID NO: 343438 - RNA, 32 nt, Homo Sapiens
gcugauauuuuugcuuuagaugucaaucucgu

SEQ ID NO: 343439 - RNA, 32 nt, Homo Sapiens
ugaacaccuagaaguggcaauaaagaauucuc

SEQ ID NO: 343440 - RNA, 32 nt, Homo Sapiens
aggaggagugaaugucuguguguguguaccug

SEQ ID NO: 343441 - RNA, 32 nt, Homo Sapiens
ccggaaguagggcuggcguagggccgccaugu

SEQ ID NO: 343442 - RNA, 32 nt, Homo Sapiens
uugcagugagccgagaucccgccacugcacuc

SEQ ID NO: 343443 - RNA, 32 nt, Homo Sapiens
uggugccccccuccucugguggucagcucagg

SEQ ID NO: 343444 - RNA, 32 nt, Homo Sapiens
gggccgggacgccauguccauggaggaccccu

SEQ ID NO: 343445 - RNA, 32 nt, Homo Sapiens
uuuaagaccugcagcagugacucucaaccagg

SEQ ID NO: 343446 - RNA, 30 nt, Homo Sapiens
ucgagccgcgcgcagggugcgcucguuuga

SEQ ID NO: 343447 - RNA, 32 nt, Homo Sapiens
acugaaaaugucacauucuauuuuggguauua

SEQ ID NO: 343448 - RNA, 32 nt, Homo Sapiens
gcaggugguccgcgacaugaccuccgaguucu

SEQ ID NO: 343449 - RNA, 32 nt, Homo Sapiens
cuggcacccagcugccagccuucuguccuggg

SEQ ID NO: 343450 - RNA, 32 nt, Homo Sapiens
gacgacugucaggaagggucggagucuguaaa

SEQ ID NO: 343451 - RNA, 32 nt, Homo Sapiens
gccccagccccucuccuuuuccuggacucugg

SEQ ID NO: 343452 - RNA, 32 nt, Homo Sapiens
ccccacuguguccucagcuccuagaacaguuc

SEQ ID NO: 343453 - RNA, 32 nt, Homo Sapiens
acgcuacuuccgcuugcucccuggacauaaca

SEQ ID NO: 343454 - RNA, 32 nt, Homo Sapiens
agugcccgcccggccggccuucugccgcugcc

SEQ ID NO: 343455 - RNA, 32 nt, Homo Sapiens
cagcgccugccgcagcagcugcggcccagcga

SEQ ID NO: 343456 - RNA, 32 nt, Homo Sapiens
cugcaacuuuccugaagcaucuccagggcugg

SEQ ID NO: 343457 - RNA, 32 nt, Homo Sapiens
gcccgggccgcuccccgcaccugaggcgccug

SEQ ID NO: 343458 - RNA, 32 nt, Homo Sapiens
uucuggugacagagccgaagauggccuggagu

SEQ ID NO: 343459 - RNA, 32 nt, Homo Sapiens
cagugcuggggcugggggcggccgugcaaggc

SEQ ID NO: 343460 - RNA, 32 nt, Homo Sapiens
auccaugggcuuuggauuuaaauucugguuuu

SEQ ID NO: 343461 - RNA, 32 nt, Homo Sapiens
gauccgcagccccgcgccauggagccggccgc

SEQ ID NO: 343462 - RNA, 32 nt, Homo Sapiens
caagcccguggucugguuuuuaaaagaacaca

SEQ ID NO: 343463 - RNA, 32 nt, Homo Sapiens
gagaagaccaagaaagcagaggaaauggcccu

SEQ ID NO: 343464 - RNA, 32 nt, Homo Sapiens
cauagagaacaccagcacucuuugacaaaacu

SEQ ID NO: 343465 - RNA, 32 nt, Homo Sapiens
ugaaagaucuauauguuaagcuaacaugaaaa

SEQ ID NO: 343466 - RNA, 32 nt, Homo Sapiens
ucaucccuguaggaaagcuuaauuguauagga

SEQ ID NO: 343467 - RNA, 32 nt, Homo Sapiens
gguuucuguauuccucauggugccaaacacag

SEQ ID NO: 343468 - RNA, 32 nt, Homo Sapiens
cgugaaagcauguguggcugcagacgugucca

SEQ ID NO: 343469 - RNA, 32 nt, Homo Sapiens
auuggaagauaaaguugucaaacuugucaaga

SEQ ID NO: 343470 - RNA, 32 nt, Homo Sapiens
augcuguccucugcuccuggguguacugaguc

SEQ ID NO: 343471 - RNA, 32 nt, Homo Sapiens
gcuggacucugcagggggugagggggaacagc

SEQ ID NO: 343472 - RNA, 32 nt, Homo Sapiens
cguuuuguuguaauaaauguuuucaggccggg

SEQ ID NO: 343473 - RNA, 32 nt, Homo Sapiens
ccuaaggacauucccggaaggcaauggguuuc

SEQ ID NO: 343474 - RNA, 32 nt, Homo Sapiens
ucuggguccgucucgucgcguccggguuguca

SEQ ID NO: 343475 - RNA, 32 nt, Homo Sapiens
ggacaguacccguggcacugggcccgcagaag

SEQ ID NO: 343476 - RNA, 32 nt, Homo Sapiens
guggagcccagcuguguggaugccccagcaug

SEQ ID NO: 343477 - RNA, 32 nt, Homo Sapiens
caaacagugacuucuuuuuuucuggugacucc

SEQ ID NO: 343478 - RNA, 32 nt, Homo Sapiens
cuaaaauaucagcuuuaaaauaugaaagugcu

SEQ ID NO: 343479 - RNA, 32 nt, Homo Sapiens
guuuaucaguauucaucuuccauccuuucaua

SEQ ID NO: 343480 - RNA, 32 nt, Homo Sapiens
cuuugugcauauauuuucucugauccuuaaac

SEQ ID NO: 343481 - RNA, 32 nt, Homo Sapiens
uuuaaauuuuuccuucaugcucuagagaaaau

SEQ ID NO: 343482 - RNA, 32 nt, Homo Sapiens
caaguguuuuggcuuaagaaauccauaggccu

SEQ ID NO: 343483 - RNA, 32 nt, Homo Sapiens
agcauaaagaagaaaauaaaucuuuuacuaag

SEQ ID NO: 343484 - RNA, 32 nt, Homo Sapiens
gaggagguggguggaggcaugcaggggagacg

SEQ ID NO: 343485 - RNA, 32 nt, Homo Sapiens
uuuuuucucuuaaauuuuuggcaaguauaaaa

SEQ ID NO: 343486 - RNA, 32 nt, Homo Sapiens
guagcuccuuuggcaaauguccugcuguggcg

SEQ ID NO: 343487 - RNA, 32 nt, Homo Sapiens
ugucagcaguuucauaugguuccaccuaauau

SEQ ID NO: 343488 - RNA, 32 nt, Homo Sapiens
auauaaacuaaaagggauaauauuuuagaaua

SEQ ID NO: 343489 - RNA, 32 nt, Homo Sapiens
uguuaguacuuuggaugcaauuaaaacuaugu

SEQ ID NO: 343490 - RNA, 32 nt, Homo Sapiens
gagacagccucgcucugucacccaggcuggag

SEQ ID NO: 343491 - RNA, 32 nt, Homo Sapiens
aucagagauguaccuacccuucugggagccaa

SEQ ID NO: 343492 - RNA, 32 nt, Homo Sapiens
uuucaguucugugagcaaaaccaaggcugggu

SEQ ID NO: 343493 - RNA, 32 nt, Homo Sapiens
uuaguacuaauuaaguggauagauagaauggu

SEQ ID NO: 343494 - RNA, 32 nt, Homo Sapiens
gguggaauuggcccaggaugacagcuggagaa

SEQ ID NO: 343495 - RNA, 32 nt, Homo Sapiens
gacacccaagagggcugcuucccaugccugca

SEQ ID NO: 343496 - RNA, 32 nt, Homo Sapiens
gcaaauucaaggaaccaggcuaugacuaagaa

SEQ ID NO: 343497 - RNA, 32 nt, Homo Sapiens
uuugucaauuauaaccaaaaacaaugugacgg

SEQ ID NO: 343498 - RNA, 32 nt, Homo Sapiens
gugcgagcgggcgggcggcgagugcgugugag

SEQ ID NO: 343499 - RNA, 30 nt, Homo Sapiens
uccccacgcgggcgcgcgggcaugcggaca

SEQ ID NO: 343500 - RNA, 32 nt, Homo Sapiens
gaguccugggucugggguuugcugguccccaa

SEQ ID NO: 343501 - RNA, 32 nt, Homo Sapiens
cuggccgaggccucgcugcugcuggugacccu

SEQ ID NO: 343502 - RNA, 32 nt, Homo Sapiens
acugugaaugcuucaagagccacauaaaugcu

SEQ ID NO: 343503 - RNA, 32 nt, Homo Sapiens
acaauauuaauuuuuccaagcuaucaauaugg

SEQ ID NO: 343504 - RNA, 32 nt, Homo Sapiens
ugaccucugggcacgugcugcagcuguggcug

SEQ ID NO: 343505 - RNA, 32 nt, Homo Sapiens
acccuuccacugacacccucgcucucacaccc

SEQ ID NO: 343506 - RNA, 32 nt, Homo Sapiens
agggcgcccgucugcucaagccucaggaucug

SEQ ID NO: 343507 - RNA, 32 nt, Homo Sapiens
uggccuucccccucuuggccgggacguugccc

SEQ ID NO: 343508 - RNA, 32 nt, Homo Sapiens
gaaacaugggaaaaauugaaaacuucugcaga

SEQ ID NO: 343509 - RNA, 32 nt, Homo Sapiens
ccacgaacccaccagaaggaagaaacuccgaa

SEQ ID NO: 343510 - RNA, 32 nt, Homo Sapiens
aggagggggagcgugggaugcuguacccccgg

SEQ ID NO: 343511 - RNA, 32 nt, Homo Sapiens
auaugagacuaguagacuauagauuccuuaac

SEQ ID NO: 343512 - RNA, 32 nt, Homo Sapiens
cucgucagccuuccucuuccagaagcuguugg

SEQ ID NO: 343513 - RNA, 32 nt, Homo Sapiens
cauggugcuuucuuggaaagaucauugggaug

SEQ ID NO: 343514 - RNA, 32 nt, Homo Sapiens
cucuggggacugugguggggucgggggauggg

SEQ ID NO: 343515 - RNA, 32 nt, Homo Sapiens
accccaccccuuuuuguaaaucuuguucauug

SEQ ID NO: 343516 - RNA, 32 nt, Homo Sapiens
caugggauaugguccaaugaauuuaagcccca

SEQ ID NO: 343517 - RNA, 32 nt, Homo Sapiens
uuccaggagagccucacauucuucuuccaggu

SEQ ID NO: 343518 - RNA, 32 nt, Homo Sapiens
ugggugugagcacaacgaugggaaacagcgga

SEQ ID NO: 343519 - RNA, 32 nt, Homo Sapiens
ggaggaguggcaaugccuggauacugcacagc

SEQ ID NO: 343520 - RNA, 32 nt, Homo Sapiens
ugacauaacagucauuucuuccaauuuuaugg

SEQ ID NO: 343521 - RNA, 32 nt, Homo Sapiens
ggcacauuuuaaaagguuauguacuagguuuu

SEQ ID NO: 343522 - RNA, 32 nt, Homo Sapiens
caccuauucagcauucuuucugauuucuagaa

SEQ ID NO: 343523 - RNA, 32 nt, Homo Sapiens
ucagggugcacuggaagcugguguucgcuguc

SEQ ID NO: 343524 - RNA, 32 nt, Homo Sapiens
gagcaauuuuuccagcuagucaaauuacgaaa

SEQ ID NO: 343525 - RNA, 32 nt, Homo Sapiens
augugaagauguuuaauguuacaguguuguca

SEQ ID NO: 343526 - RNA, 32 nt, Homo Sapiens
ucgucccgcgcgcaccgccuccgcgcgccuau

SEQ ID NO: 343527 - RNA, 32 nt, Homo Sapiens
uaguccggaucuuugaauucucucagaguccc

SEQ ID NO: 343528 - RNA, 32 nt, Homo Sapiens
auaauccccugguauggacucccuuugauauu

SEQ ID NO: 343529 - RNA, 32 nt, Homo Sapiens
ucaccuguauucuaguaaauguugagacaccg

SEQ ID NO: 343530 - RNA, 32 nt, Homo Sapiens
uaugguuguaaauaucuauauauacauguacu

SEQ ID NO: 343531 - RNA, 32 nt, Homo Sapiens
gcugaggggcagaggagaggauggggaggcca

SEQ ID NO: 343532 - RNA, 32 nt, Homo Sapiens
gcccggagcuccaagaggccauaagcaaaggc

SEQ ID NO: 343533 - RNA, 32 nt, Homo Sapiens
gauaauaaaauauuguggguucucagcauucu

SEQ ID NO: 343534 - RNA, 32 nt, Homo Sapiens
acccgcccaggugcccggcgucgaccggcagc

SEQ ID NO: 343535 - RNA, 32 nt, Homo Sapiens
guucuggugacaagcuauaccuaauuauaagc

SEQ ID NO: 343536 - RNA, 32 nt, Homo Sapiens
guugggguguuguuuuuugagccccggcacuu

SEQ ID NO: 343537 - RNA, 32 nt, Homo Sapiens
gaaccccaaacguccggcgccaggcgcuagcc

SEQ ID NO: 343538 - RNA, 32 nt, Homo Sapiens
cuugccuuucagcgaugguacaugacuugauu

SEQ ID NO: 343539 - RNA, 29 nt, Homo Sapiens
cagaaagagaagguggucaaccuuaacaa

SEQ ID NO: 343540 - RNA, 32 nt, Homo Sapiens
aaugucuagugaaacuuaucugauggcauuua

SEQ ID NO: 343541 - RNA, 32 nt, Homo Sapiens
ccucauccaaccccagaacacuuucuguaauc

SEQ ID NO: 343542 - RNA, 32 nt, Homo Sapiens
cagguaaacaauuguuuucucaaauuuuuacc

SEQ ID NO: 343543 - RNA, 32 nt, Homo Sapiens
auuuuuaaaaauuacuuagcucaaaaugucag

SEQ ID NO: 343544 - RNA, 32 nt, Homo Sapiens
aauugguaaauaauauuuuaaaauuguuuuua

SEQ ID NO: 343545 - RNA, 32 nt, Homo Sapiens
cucuaucccuggagcgagccaggccgccugga

SEQ ID NO: 343546 - RNA, 32 nt, Homo Sapiens
ucagcugcugggcucagcaccggcgcccugcu

SEQ ID NO: 343547 - RNA, 32 nt, Homo Sapiens
agcaaaacaaagugaaaaccgaauggauuaac

SEQ ID NO: 343548 - RNA, 32 nt, Homo Sapiens
ucugccuuuacuauauguugaccauuccaaag

SEQ ID NO: 343549 - RNA, 32 nt, Homo Sapiens
cuuccaggaaaugcuuggauucauguggacau

SEQ ID NO: 343550 - RNA, 32 nt, Homo Sapiens
cagaaauggcuauuuuaacuguccuuuccuac

SEQ ID NO: 343551 - RNA, 32 nt, Homo Sapiens
acuacuggcuucgugaggggcccccagccaag

SEQ ID NO: 343552 - RNA, 32 nt, Homo Sapiens
uacuguugauaaauauuuauuuuuguaaacuu

SEQ ID NO: 343553 - RNA, 32 nt, Homo Sapiens
gguugguucuuacuguuugagucaaaaccuca

SEQ ID NO: 343554 - RNA, 32 nt, Homo Sapiens
gugcugcucugcucugcccacccuggguucug

SEQ ID NO: 343555 - RNA, 32 nt, Homo Sapiens
uggagggagcgcaccccuguuccccggugggc

SEQ ID NO: 343556 - RNA, 31 nt, Homo Sapiens
gaacugacacauucucucagagcucaagguc

SEQ ID NO: 343557 - RNA, 32 nt, Homo Sapiens
gugguggggcguguugguccgcgcucucagaa

SEQ ID NO: 343558 - RNA, 32 nt, Homo Sapiens
uguggaucaaggaaggcugccccuguacccug

SEQ ID NO: 343559 - RNA, 32 nt, Homo Sapiens
uugaggucaggaguuugagaccauccuggaca

SEQ ID NO: 343560 - RNA, 32 nt, Homo Sapiens
guugagggcaagccaccaaauuaccuaggcug

SEQ ID NO: 343561 - RNA, 32 nt, Homo Sapiens
guacagaaggaaaacaacuuuuuauguauagc

SEQ ID NO: 343562 - RNA, 32 nt, Homo Sapiens
auaagcuauauuaauuguguuuugcauaaaau

SEQ ID NO: 343563 - RNA, 32 nt, Homo Sapiens
aaccaguacuccaccaucgacuuuguuuccuc

SEQ ID NO: 343564 - RNA, 32 nt, Homo Sapiens
agaaaguguaucuugaguuugcuggcagcaca

SEQ ID NO: 343565 - RNA, 32 nt, Homo Sapiens
caaagcaaacucucuuuucuguggguuaauuu

SEQ ID NO: 343566 - RNA, 32 nt, Homo Sapiens
aacuggcuucaccccaccuugggcauuccuac

SEQ ID NO: 343567 - RNA, 32 nt, Homo Sapiens
ugagccuucuauuugccucaucuauaacauga

SEQ ID NO: 343568 - RNA, 32 nt, Homo Sapiens
guaggucgucguccuggaugcuggcgagauag

SEQ ID NO: 343569 - RNA, 32 nt, Homo Sapiens
acucucucugucccugccccagcggcuuccag

SEQ ID NO: 343570 - RNA, 32 nt, Homo Sapiens
acgccucugcccgaccucgcuggggaaggcug

SEQ ID NO: 343571 - RNA, 32 nt, Homo Sapiens
auucucugccagcugcugugcacugcugucag

SEQ ID NO: 343572 - RNA, 32 nt, Homo Sapiens
agaacauucugauauuucuccucaauucuagg

SEQ ID NO: 343573 - RNA, 32 nt, Homo Sapiens
cauacccccagcugugaagccuuccucuugag

SEQ ID NO: 343574 - RNA, 32 nt, Homo Sapiens
ugaggugggggcggcagcgggaggcggcgggg

SEQ ID NO: 343575 - RNA, 32 nt, Homo Sapiens
ugaguauaauuucauccaagccaucucagaaa

SEQ ID NO: 343576 - RNA, 32 nt, Homo Sapiens
aguuaugaucaucguuuuccugccuugacccc

SEQ ID NO: 343577 - RNA, 32 nt, Homo Sapiens
uuagaaacagagcaggugaaaacuccugggcu

SEQ ID NO: 343578 - RNA, 32 nt, Homo Sapiens
aaaagaucagucuaccucuacuccauucuaga

SEQ ID NO: 343579 - RNA, 32 nt, Homo Sapiens
agaccauguaaaauauguaaauucuaguaccu

SEQ ID NO: 343580 - RNA, 32 nt, Homo Sapiens
aaagaaaucugucuaauucuuaggaugaccac

SEQ ID NO: 343581 - RNA, 32 nt, Homo Sapiens
ggaggagcccccuccuucucaccucggucucc

SEQ ID NO: 343582 - RNA, 32 nt, Homo Sapiens
acccucacuccagccaucucggagcccuugug

SEQ ID NO: 343583 - RNA, 32 nt, Homo Sapiens
acgagagggaagaacaauuuuacuucuguccu

SEQ ID NO: 343584 - RNA, 32 nt, Homo Sapiens
gcagccauccauccccucacccgcccuuccug

SEQ ID NO: 343585 - RNA, 32 nt, Homo Sapiens
ggcacucacacgcccuccuguccacaacccuc

SEQ ID NO: 343586 - RNA, 32 nt, Homo Sapiens
gagacuuuuuaucuugccuuuggacucuggug

SEQ ID NO: 343587 - RNA, 32 nt, Homo Sapiens
uagucuucuuguggcaauugugaaugggauug

SEQ ID NO: 343588 - RNA, 32 nt, Homo Sapiens
uauaguaaaaucaaugcucccuuaauguuguu

SEQ ID NO: 343589 - RNA, 32 nt, Homo Sapiens
gagaaaaaauguauaguaaaucuaagucuuga

SEQ ID NO: 343590 - RNA, 32 nt, Homo Sapiens
ccuagcggccuggccccagugacggcccccuc

SEQ ID NO: 343591 - RNA, 32 nt, Homo Sapiens
gccgccggaccaggaggacgcugacgaggcac

SEQ ID NO: 343592 - RNA, 32 nt, Homo Sapiens
ugggaugugggaaacagaagaaaaguugagga

SEQ ID NO: 343593 - RNA, 32 nt, Homo Sapiens
aaagguaugugcuaugauaaagcagauggccu

SEQ ID NO: 343594 - RNA, 32 nt, Homo Sapiens
ggauagcuucuguguuaugauaccaaacaaaa

SEQ ID NO: 343595 - RNA, 32 nt, Homo Sapiens
ggcaacauuacagcaacacacacuggggcuau

SEQ ID NO: 343596 - RNA, 32 nt, Homo Sapiens
uuugcauccuguaucuuauguugcuuuuggug

SEQ ID NO: 343597 - RNA, 32 nt, Homo Sapiens
aauauguacuuugaguauaacaucaagcuuua

SEQ ID NO: 343598 - RNA, 32 nt, Homo Sapiens
cagaaagcauacaugauaaacaguuuauggua

SEQ ID NO: 343599 - RNA, 32 nt, Homo Sapiens
agcugauucaguacugguagaugugcucauuc

SEQ ID NO: 343600 - RNA, 32 nt, Homo Sapiens
agcgaucugcccgggcgccgguccggggcugg

SEQ ID NO: 343601 - RNA, 32 nt, Homo Sapiens
aaacgcccucggcgcgcacccacuggcgcgca

SEQ ID NO: 343602 - RNA, 32 nt, Homo Sapiens
agacagcccuggggcucugaaucugcacuugg

SEQ ID NO: 343603 - RNA, 32 nt, Homo Sapiens
ccacgccuccacuuacugguuggcuuugcgca

SEQ ID NO: 343604 - RNA, 32 nt, Homo Sapiens
auuuauaguaccuuauacuaagguuaaaaaaa

SEQ ID NO: 343605 - RNA, 32 nt, Homo Sapiens
uauagauuugcagcuuaauaacauuguuguac

SEQ ID NO: 343606 - RNA, 32 nt, Homo Sapiens
cguucagcaacaagacgcuggugcuggaugag

SEQ ID NO: 343607 - RNA, 32 nt, Homo Sapiens
ccuuuuuucauaagaauaaugacuccagaugc

SEQ ID NO: 343608 - RNA, 31 nt, Homo Sapiens
aagaaaaugaaugaguuuuucuccguagacg

SEQ ID NO: 343609 - RNA, 32 nt, Homo Sapiens
uuugggaggcggaggcggguggauccauugag

SEQ ID NO: 343610 - RNA, 32 nt, Homo Sapiens
auauuggaaucacuuuccuucuuccucgggcc

SEQ ID NO: 343611 - RNA, 32 nt, Homo Sapiens
uuaaagaauuguacugaauucuuuuuagauca

SEQ ID NO: 343612 - RNA, 32 nt, Homo Sapiens
uuuucacguuuacauuuuaauuauuacaaguu

SEQ ID NO: 343613 - RNA, 30 nt, Homo Sapiens
ugcauuuuucuaaugggcuaaacccagaug

SEQ ID NO: 343614 - RNA, 32 nt, Homo Sapiens
ugcccgccaagcccgcagccacccgggcgcgg

SEQ ID NO: 343615 - RNA, 32 nt, Homo Sapiens
gcgcagccgagccccaggagcccgucaggcca

SEQ ID NO: 343616 - RNA, 32 nt, Homo Sapiens
uuuuuccuuuuucuuuuuguguaccucuacag

SEQ ID NO: 343617 - RNA, 32 nt, Homo Sapiens
guucacauuccucuccuagugucagucuccaa

SEQ ID NO: 343618 - RNA, 32 nt, Homo Sapiens
gcucggauuaggugggggaggggcgacaguag

SEQ ID NO: 343619 - RNA, 32 nt, Homo Sapiens
agccaaucagacgucgcagagccccgacgaca

SEQ ID NO: 343620 - RNA, 32 nt, Homo Sapiens
uaaauagagggaugcagacucagguuuugcua

SEQ ID NO: 343621 - RNA, 32 nt, Homo Sapiens
uguauuuaaagaagaaagaaacaaaggcugaa

SEQ ID NO: 343622 - RNA, 32 nt, Homo Sapiens
aguaacuucuaaaauauaacaauacuaaauau

SEQ ID NO: 343623 - RNA, 32 nt, Homo Sapiens
ggguaaguaacaaaaaaacaaacaaaaaaaau

SEQ ID NO: 343624 - RNA, 32 nt, Homo Sapiens
ugguuugagguagucaccugcuuacagauaac

SEQ ID NO: 343625 - RNA, 32 nt, Homo Sapiens
gagaggugcugcccuccccccggaguuggaag

SEQ ID NO: 343626 - RNA, 32 nt, Homo Sapiens
cauggcgggucugcagaagaucagcagcuucu

SEQ ID NO: 343627 - RNA, 29 nt, Homo Sapiens
ugaaggcagaagauucugcuaaggaaaaa

SEQ ID NO: 343628 - RNA, 32 nt, Homo Sapiens
uagugcagcgccccgcgccuggcuccaggugg

SEQ ID NO: 343629 - RNA, 30 nt, Homo Sapiens
ucuaagggagguggcagcaucaaaggcucc

SEQ ID NO: 343630 - RNA, 32 nt, Homo Sapiens
ugaaagugcuuggaggccguggagcacaaagc

SEQ ID NO: 343631 - RNA, 32 nt, Homo Sapiens
gugugugagagagcggcugguucauugugugu

SEQ ID NO: 343632 - RNA, 32 nt, Homo Sapiens
acaaaaauuagcugggcguggaggcgcgugcc

SEQ ID NO: 343633 - RNA, 32 nt, Homo Sapiens
guauaauaaugucccacauccacacaucgggc

SEQ ID NO: 343634 - RNA, 31 nt, Homo Sapiens
agcuuuuccacauaagguguuuuugauuuga

SEQ ID NO: 343635 - RNA, 32 nt, Homo Sapiens
uuuucuuuugcugaucuuugucuuuauuagau

SEQ ID NO: 343636 - RNA, 32 nt, Homo Sapiens
cugacacacccucccccaccccggguagugga

SEQ ID NO: 343637 - RNA, 32 nt, Homo Sapiens
accucugaauggacgcaaccaauauuagccuu

SEQ ID NO: 343638 - RNA, 32 nt, Homo Sapiens
gaaaggaaaugaaugguuccacucaaaugucc

SEQ ID NO: 343639 - RNA, 32 nt, Homo Sapiens
gucauuaaaaggaaacagaaaaagagaaaaaa

SEQ ID NO: 343640 - RNA, 32 nt, Homo Sapiens
guuuccagaucuccgcaaaugacuucauugcc

SEQ ID NO: 343641 - RNA, 30 nt, Homo Sapiens
aaaaucagucugcugggggaaccuuucaga

SEQ ID NO: 343642 - RNA, 32 nt, Homo Sapiens
agugagaagcagagacccaaagggccuguuac

SEQ ID NO: 343643 - RNA, 32 nt, Homo Sapiens
cugcgcggucauuuagcaaaucugcaagagaa

SEQ ID NO: 343644 - RNA, 32 nt, Homo Sapiens
uuguacagucugauucuuuuuaucugggguag

SEQ ID NO: 343645 - RNA, 30 nt, Homo Sapiens
acuugggguuccccagugccuaggaaaguu

SEQ ID NO: 343646 - RNA, 32 nt, Homo Sapiens
caccccugcccggcucuggaguaccgucugcc

SEQ ID NO: 343647 - RNA, 32 nt, Homo Sapiens
uaauuggauaauuggugacugaggaagauggu

SEQ ID NO: 343648 - RNA, 32 nt, Homo Sapiens
aucaguuuucuuuaaaaaccuacaaaugggau

SEQ ID NO: 343649 - RNA, 32 nt, Homo Sapiens
aagcaucuugucaggaagcguccuuucucaua

SEQ ID NO: 343650 - RNA, 32 nt, Homo Sapiens
gcccgcggucugcggccaguggcccgggggaa

SEQ ID NO: 343651 - RNA, 32 nt, Homo Sapiens
uucguccccuccccggcagacccacccgcggc

SEQ ID NO: 343652 - RNA, 32 nt, Homo Sapiens
ccccaagagcagagaggccuacgggaggcacg

SEQ ID NO: 343653 - RNA, 32 nt, Homo Sapiens
cccgccccuguaucauaagccuuuaaauggag

SEQ ID NO: 343654 - RNA, 32 nt, Homo Sapiens
gcucccagguaaggcggaggcugcugguguga

SEQ ID NO: 343655 - RNA, 32 nt, Homo Sapiens
guguggccugcucagagcuggaugccaccuuu

SEQ ID NO: 343656 - RNA, 32 nt, Homo Sapiens
caggaaagauaaaaaguuuagagguaugugaa

SEQ ID NO: 343657 - RNA, 32 nt, Homo Sapiens
cacagcccgggcagaagcugugagguggguug

SEQ ID NO: 343658 - RNA, 32 nt, Homo Sapiens
cauaacguccgagcugcuggugcggggcagcc

SEQ ID NO: 343659 - RNA, 32 nt, Homo Sapiens
ucuugcaaggcaucagcuggcuccacucaugg

SEQ ID NO: 343660 - RNA, 32 nt, Homo Sapiens
uguauuuauggagagaaguaaaaauaaguucc

SEQ ID NO: 343661 - RNA, 32 nt, Homo Sapiens
agaaggcuuucaauguugaguggccuuuuauu

SEQ ID NO: 343662 - RNA, 32 nt, Homo Sapiens
gaggcagaaaucaaaagaaauccuugagggcu

SEQ ID NO: 343663 - RNA, 32 nt, Homo Sapiens
cucuggaggcaguggaccaagaugcagcaagg

SEQ ID NO: 343664 - RNA, 32 nt, Homo Sapiens
auagagaaugucagaggccuacuguguaauug

SEQ ID NO: 343665 - RNA, 32 nt, Homo Sapiens
aaguuaaauuuaugaugaaugacuaacuggac

SEQ ID NO: 343666 - RNA, 32 nt, Homo Sapiens
caagucucccaguugcugcugcuguuggugcu

SEQ ID NO: 343667 - RNA, 32 nt, Homo Sapiens
uuaacuaaacagccaaugauauguuuugauug

SEQ ID NO: 343668 - RNA, 30 nt, Homo Sapiens
ugaauauggugaagaagcuggugauggccc

SEQ ID NO: 343669 - RNA, 32 nt, Homo Sapiens
gagcuggcucacucuuccuucucugaaaugca

SEQ ID NO: 343670 - RNA, 32 nt, Homo Sapiens
ucuuugcuguucuucagacuccauuuauagag

SEQ ID NO: 343671 - RNA, 32 nt, Homo Sapiens
agugacucagaaugacuggcuucggacagaac

SEQ ID NO: 343672 - RNA, 32 nt, Homo Sapiens
ucgacagggggcccucugucucgccguuugug

SEQ ID NO: 343673 - RNA, 32 nt, Homo Sapiens
ccucacagugcagucuuaauugcuguggauuu

SEQ ID NO: 343674 - RNA, 32 nt, Homo Sapiens
gacuuuguuccacuuuuuguuucagccaguaa

SEQ ID NO: 343675 - RNA, 32 nt, Homo Sapiens
ucaguucugauauggaagcacccauuaugcgc

SEQ ID NO: 343676 - RNA, 32 nt, Homo Sapiens
gggucccgggagaggcggucauggccgcgcca

SEQ ID NO: 343677 - RNA, 32 nt, Homo Sapiens
ccucaaauacaugaaacgaaucaaacuggaga

SEQ ID NO: 343678 - RNA, 32 nt, Homo Sapiens
cauuccuuccccaccccugcccuaugcucugg

SEQ ID NO: 343679 - RNA, 32 nt, Homo Sapiens
gcuuauaucucacauuuugguuauauuugugg

SEQ ID NO: 343680 - RNA, 32 nt, Homo Sapiens
ccacagcugcaccugggaccugugcuugccgu

SEQ ID NO: 343681 - RNA, 32 nt, Homo Sapiens
aggaaagucccucuccuuuucuacagucucug

SEQ ID NO: 343682 - RNA, 32 nt, Homo Sapiens
ucucaaagcuuuuuacugauucuuauaccuua

SEQ ID NO: 343683 - RNA, 32 nt, Homo Sapiens
ugaggccaaacacaagaggcaggucaaagggc

SEQ ID NO: 343684 - RNA, 32 nt, Homo Sapiens
aacaacagaaauguggcaugauuacuuauuua

SEQ ID NO: 343685 - RNA, 32 nt, Homo Sapiens
acguccuugccuucuugggagcuccaagcggc

SEQ ID NO: 343686 - RNA, 32 nt, Homo Sapiens
ccacugggggugccucuuccugggcgcccgcc

SEQ ID NO: 343687 - RNA, 32 nt, Homo Sapiens
guuaaucacuuauguuuuuagagcaugcaauc

SEQ ID NO: 343688 - RNA, 32 nt, Homo Sapiens
cucuaaccagagaauuucugcuguuuuaaaga

SEQ ID NO: 343689 - RNA, 32 nt, Homo Sapiens
uacacuuucuucauguuucuucuuuguauauu

SEQ ID NO: 343690 - RNA, 32 nt, Homo Sapiens
uauuaguucuuuguaaaucacuuaguacauua

SEQ ID NO: 343691 - RNA, 32 nt, Homo Sapiens
acucauuucuuccaaugaagaaacaccaaacu

SEQ ID NO: 343692 - RNA, 32 nt, Homo Sapiens
ggccuuccagaccccaggaaguuggccuuccc

SEQ ID NO: 343693 - RNA, 32 nt, Homo Sapiens
cacacccaaagaauuuucaaaggaaagggugu

SEQ ID NO: 343694 - RNA, 32 nt, Homo Sapiens
uauuugauguguaagaaaauguucuuugugug

SEQ ID NO: 343695 - RNA, 32 nt, Homo Sapiens
guccacauggaugucgagggugguuugugugg

SEQ ID NO: 343696 - RNA, 32 nt, Homo Sapiens
cuagguccaaaaagacaguguuuaaaacuggu

SEQ ID NO: 343697 - RNA, 32 nt, Homo Sapiens
cuagauuuuuaaaaacacuguaaaauacuaaa

SEQ ID NO: 343698 - RNA, 32 nt, Homo Sapiens
aaaaaugaagagauuauaaaagucagcuaaug

SEQ ID NO: 343699 - RNA, 32 nt, Homo Sapiens
guccguuugcauuuuuaaccauuuucuauaaa

SEQ ID NO: 343700 - RNA, 32 nt, Homo Sapiens
uucaaggcagggccagcuccgggaccucuguc

SEQ ID NO: 343701 - RNA, 32 nt, Homo Sapiens
aauuaucuuuaucacaaacauuuuacaugcag

SEQ ID NO: 343702 - RNA, 32 nt, Homo Sapiens
ccugcucugauccggugggcuccacggguagu

SEQ ID NO: 343703 - RNA, 32 nt, Homo Sapiens
ugagguuaauguaauuacauauugauagaaga

SEQ ID NO: 343704 - RNA, 32 nt, Homo Sapiens
acugaaccacgauggcuguugaggaauugguc

SEQ ID NO: 343705 - RNA, 32 nt, Homo Sapiens
cuucugcccugccugcugugugcggagccguc

SEQ ID NO: 343706 - RNA, 32 nt, Homo Sapiens
auaacauuuaauuauaaugacauucugauuau

SEQ ID NO: 343707 - RNA, 32 nt, Homo Sapiens
auccuuuuagagaggucgcggcggaacuacuu

SEQ ID NO: 343708 - RNA, 32 nt, Homo Sapiens
aaacagguggaagagggaaggguccaauuaga

SEQ ID NO: 343709 - RNA, 32 nt, Homo Sapiens
uacgaugcuacuauuaugcucuguuuuaaagg

SEQ ID NO: 343710 - RNA, 32 nt, Homo Sapiens
gcucagcccuugucucgggaccgcagccuccg

SEQ ID NO: 343711 - RNA, 32 nt, Homo Sapiens
caaaucugucuccugggucugacugcuaccca

SEQ ID NO: 343712 - RNA, 32 nt, Homo Sapiens
gcacagcuaugucuucaggagcucccgucaaa

SEQ ID NO: 343713 - RNA, 32 nt, Homo Sapiens
ggugcuccucuuccucccuccuccugcucaca

SEQ ID NO: 343714 - RNA, 32 nt, Homo Sapiens
gagacgcucgccacgccggugccggagccgga

SEQ ID NO: 343715 - RNA, 32 nt, Homo Sapiens
gguuucaucauguuggccaggcuggucuugaa

SEQ ID NO: 343716 - RNA, 32 nt, Homo Sapiens
accucaccagccaccucugaggucauggaacc

SEQ ID NO: 343717 - RNA, 32 nt, Homo Sapiens
uuggaaugagucuccuuuaguuucagagugug

SEQ ID NO: 343718 - RNA, 32 nt, Homo Sapiens
ccucccccaccagugggaccaguacucaagag

SEQ ID NO: 343719 - RNA, 32 nt, Homo Sapiens
gaauuauuuuuagggaaagccccuauaaugaa

SEQ ID NO: 343720 - RNA, 32 nt, Homo Sapiens
ccuuccugcccaggggacguggcgcugucggu

SEQ ID NO: 343721 - RNA, 32 nt, Homo Sapiens
ccccuccgcuccccggcagcucgcucucuccc

SEQ ID NO: 343722 - RNA, 32 nt, Homo Sapiens
cuucccaaggaccauggcguuuaaugucuugg

SEQ ID NO: 343723 - RNA, 32 nt, Homo Sapiens
auggccaccucuucgccagcgccuccugugac

SEQ ID NO: 343724 - RNA, 32 nt, Homo Sapiens
caugggguuuucugccccacacccuuuaggau

SEQ ID NO: 343725 - RNA, 32 nt, Homo Sapiens
uauuuugccucauguauuuuuaucacacuuau

SEQ ID NO: 343726 - RNA, 32 nt, Homo Sapiens
ccaugggagccagcugaccugcuugaccgaag

SEQ ID NO: 343727 - RNA, 32 nt, Homo Sapiens
guuuuaauggguuagaaaauguuuacaaucuu

SEQ ID NO: 343728 - RNA, 32 nt, Homo Sapiens
auaucauccagaaaagaaaaacacgagaaacg

SEQ ID NO: 343729 - RNA, 32 nt, Homo Sapiens
caaaaccagaaaaugagaagauauuuuccaua

SEQ ID NO: 343730 - RNA, 32 nt, Homo Sapiens
uuccaauacagaaggguugaaaauauuacauu

SEQ ID NO: 343731 - RNA, 32 nt, Homo Sapiens
agaacugcuucuugcucuugggguauccuuca

SEQ ID NO: 343732 - RNA, 32 nt, Homo Sapiens
uguuguuguuuuucuuuuucuauuuuuguuua

SEQ ID NO: 343733 - RNA, 32 nt, Homo Sapiens
ggucaggaagcggcggucaggcaccgagaaaa

SEQ ID NO: 343734 - RNA, 32 nt, Homo Sapiens
acuggagauguuugugaagauaccuucaaaga

SEQ ID NO: 343735 - RNA, 32 nt, Homo Sapiens
cauguuguaaaauaauuugacuaaauaaaugg

SEQ ID NO: 343736 - RNA, 32 nt, Homo Sapiens
ugcccuuggcagugccccacauccucuuauuc

SEQ ID NO: 343737 - RNA, 32 nt, Homo Sapiens
guaaaacaaaaauuuauggucaaaauuucuaa

SEQ ID NO: 343738 - RNA, 32 nt, Homo Sapiens
agcugaucucaacugcuuugguuuucaguaaa

SEQ ID NO: 343739 - RNA, 32 nt, Homo Sapiens
uucuguaccauuuaaguauaguugauauaugu

SEQ ID NO: 343740 - RNA, 32 nt, Homo Sapiens
uuugcuaaggauguauuuugauuauugaaaag

SEQ ID NO: 343741 - RNA, 32 nt, Homo Sapiens
gcuccucagugaccagcuccugcucacugccc

SEQ ID NO: 343742 - RNA, 32 nt, Homo Sapiens
ucuuuugcacuucuaacauguagccaauaaau

SEQ ID NO: 343743 - RNA, 32 nt, Homo Sapiens
ugggugaaagugguucuagaaacugcacugaa

SEQ ID NO: 343744 - RNA, 32 nt, Homo Sapiens
uacccuaggccaacuuuuuuuucuuugcagag

SEQ ID NO: 343745 - RNA, 32 nt, Homo Sapiens
ucaaaauauuaauauguuuuuaucacagucgu

SEQ ID NO: 343746 - RNA, 32 nt, Homo Sapiens
gggguggggaguguuguuaaccggaggggcag

SEQ ID NO: 343747 - RNA, 32 nt, Homo Sapiens
cugcugacaauccuauuuagcauaugcaaauc

SEQ ID NO: 343748 - RNA, 32 nt, Homo Sapiens
gagcaaagaaggaaacacaucugucauugucu

SEQ ID NO: 343749 - RNA, 32 nt, Homo Sapiens
cuuuuccuggcagucgucugcacuguacacgc

SEQ ID NO: 343750 - RNA, 32 nt, Homo Sapiens
aguaauuuuuaaagccuugcucuguugugucc

SEQ ID NO: 343751 - RNA, 32 nt, Homo Sapiens
acccuaaagggagaaggaagggcagagaaugg

SEQ ID NO: 343752 - RNA, 32 nt, Homo Sapiens
aucucaaaagaaaagaaagaaagggaaguaga

SEQ ID NO: 343753 - RNA, 32 nt, Homo Sapiens
cacuagugcgucugcuagcucucggucccaca

SEQ ID NO: 343754 - RNA, 32 nt, Homo Sapiens
cuccucuggagaagggugagaagguggaggcu

SEQ ID NO: 343755 - RNA, 31 nt, Homo Sapiens
ccucgcggcgcugaaaccgugaggcccggac

SEQ ID NO: 343756 - RNA, 32 nt, Homo Sapiens
gaccaucuuugaauagcaaggcucuagauaac

SEQ ID NO: 343757 - RNA, 32 nt, Homo Sapiens
uagaaaacuacaugggaacaaacagaucgaac

SEQ ID NO: 343758 - RNA, 32 nt, Homo Sapiens
cuccuccuguacccaacccauccccaccccau

SEQ ID NO: 343759 - RNA, 32 nt, Homo Sapiens
aagcaggugguacuacuacaaguaauaauccg

SEQ ID NO: 343760 - RNA, 32 nt, Homo Sapiens
gucagagcaugcggggcgggggcggggggcgg

SEQ ID NO: 343761 - RNA, 32 nt, Homo Sapiens
gaaucugugaucaauugaaauguaaaugucug

SEQ ID NO: 343762 - RNA, 32 nt, Homo Sapiens
uuuugcaccacuuuuuuguuacugugaccacg

SEQ ID NO: 343763 - RNA, 27 nt, Homo Sapiens
ugccuucccuucuucuguuuuuuguga

SEQ ID NO: 343764 - RNA, 32 nt, Homo Sapiens
ucuuuuaguuuagaagacaaaaaauuucaaua

SEQ ID NO: 343765 - RNA, 32 nt, Homo Sapiens
ugauuacaaaaauccaguuuuguuuucuuucu

SEQ ID NO: 343766 - RNA, 32 nt, Homo Sapiens
acagucugugaaaaaagggugguuguacugcu

SEQ ID NO: 343767 - RNA, 32 nt, Homo Sapiens
ugccuuuguccaguuaaaucugcagagguugu

SEQ ID NO: 343768 - RNA, 32 nt, Homo Sapiens
cgucucucuccaugugaacacagccacugggu

SEQ ID NO: 343769 - RNA, 32 nt, Homo Sapiens
accgaggagcucucuguccgcggucccgcagg

SEQ ID NO: 343770 - RNA, 32 nt, Homo Sapiens
auuuugugccauaaaaauauuuuugugguaag

SEQ ID NO: 343771 - RNA, 32 nt, Homo Sapiens
accugcaccuguguccuccccuccccggcccu

SEQ ID NO: 343772 - RNA, 32 nt, Homo Sapiens
cuuugcuuuuucuaugggaccuccaggccacc

SEQ ID NO: 343773 - RNA, 32 nt, Homo Sapiens
aucuggauauuuuucaaagacuugcuuuuuac

SEQ ID NO: 343774 - RNA, 32 nt, Homo Sapiens
gggccuucucuccucgucaucauccagagcag

SEQ ID NO: 343775 - RNA, 32 nt, Homo Sapiens
uguauuucuuuagaacaacauaaaauuaaaau

SEQ ID NO: 343776 - RNA, 32 nt, Homo Sapiens
ugcggcguuggcaggacucgcugcugcugcug

SEQ ID NO: 343777 - RNA, 32 nt, Homo Sapiens
uaaucagacacacacacacacacacacacaca

SEQ ID NO: 343778 - RNA, 32 nt, Homo Sapiens
ucaaaggaauuguuugaaaccaaacauguuau

SEQ ID NO: 343779 - RNA, 32 nt, Homo Sapiens
gccggcgcucgcaguggcgcgccugcucgcuc

SEQ ID NO: 343780 - RNA, 32 nt, Homo Sapiens
uaacgauugucugcccauguccugccugaaau

SEQ ID NO: 343781 - RNA, 32 nt, Homo Sapiens
agacauucugcgcugcagaggcacuccacccu

SEQ ID NO: 343782 - RNA, 32 nt, Homo Sapiens
uagccccguucccugcccuccucccuucccug

SEQ ID NO: 343783 - RNA, 32 nt, Homo Sapiens
aucugccugcaggaagucucuaugugcuccag

SEQ ID NO: 343784 - RNA, 32 nt, Homo Sapiens
gaaaaauaacuucaagcaaacauccuaucaac

SEQ ID NO: 343785 - RNA, 32 nt, Homo Sapiens
ggccuccccagcugaguaagaagcugcuuccc

SEQ ID NO: 343786 - RNA, 32 nt, Homo Sapiens
aauagcgcuccaguuaccugcugcuggggucg

SEQ ID NO: 343787 - RNA, 32 nt, Homo Sapiens
uuaaacugucgcccucggcagcucaguguuca

SEQ ID NO: 343788 - RNA, 32 nt, Homo Sapiens
uggugaugggcacuucugggugauggaaucug

SEQ ID NO: 343789 - RNA, 32 nt, Homo Sapiens
cacacauuggccgcuucagacacgcacuucug

SEQ ID NO: 343790 - RNA, 32 nt, Homo Sapiens
acaacuaagucauucuauguccuggugcaagu

SEQ ID NO: 343791 - RNA, 32 nt, Homo Sapiens
ggauuuucauauauuuaacuuugcaaaaagau

SEQ ID NO: 343792 - RNA, 30 nt, Homo Sapiens
agguuuaucugugcugcaccucugaccagu

SEQ ID NO: 343793 - RNA, 32 nt, Homo Sapiens
uaacagcaccucagaaggggaaaagcuaaacc

SEQ ID NO: 343794 - RNA, 32 nt, Homo Sapiens
ccaguggccccgguggcuccaccgcagcgucu

SEQ ID NO: 343795 - RNA, 32 nt, Homo Sapiens
cuuugcuuuucuuuguguuaagagggacuugc

SEQ ID NO: 343796 - RNA, 32 nt, Homo Sapiens
ggucaccugauagggccgcccuggacuugggg

SEQ ID NO: 343797 - RNA, 32 nt, Homo Sapiens
ccuucuucuacaaagaggagaugugagcaaau

SEQ ID NO: 343798 - RNA, 32 nt, Homo Sapiens
ugaaucgcuuuuuaguuucccauuccggacaa

SEQ ID NO: 343799 - RNA, 32 nt, Homo Sapiens
aagcuggacuccagcccuucucccucagacca

SEQ ID NO: 343800 - RNA, 32 nt, Homo Sapiens
ucacaauguuguguccacuguuuaauuccaga

SEQ ID NO: 343801 - RNA, 32 nt, Homo Sapiens
ccucaccucuccggcaccuccuccuccuucug

SEQ ID NO: 343802 - RNA, 32 nt, Homo Sapiens
cccuccaggaguugcugaaauuuaggaaucau

SEQ ID NO: 343803 - RNA, 32 nt, Homo Sapiens
gagagcacagacgcgccagggagcccccucug

SEQ ID NO: 343804 - RNA, 32 nt, Homo Sapiens
ccuuaaacuuggcuuuccccagccuucagccu

SEQ ID NO: 343805 - RNA, 32 nt, Homo Sapiens
cggugagaugacccuugcgaagccucaaauac

SEQ ID NO: 343806 - RNA, 32 nt, Homo Sapiens
cugcggaggaccaguuccuggcccucuuuucu

SEQ ID NO: 343807 - RNA, 32 nt, Homo Sapiens
agggccugccagcuccguccucccugccgagg

SEQ ID NO: 343808 - RNA, 32 nt, Homo Sapiens
ccugacgccgcggaccgcagcuccucagcccc

SEQ ID NO: 343809 - RNA, 32 nt, Homo Sapiens
cucugcuagcuaagauucacaauguugaaagc

SEQ ID NO: 343810 - RNA, 31 nt, Homo Sapiens
ugcaugccugucugugugccccgcuggcgag

SEQ ID NO: 343811 - RNA, 32 nt, Homo Sapiens
aucugaagauauauuucacuuuuguucugcuu

SEQ ID NO: 343812 - RNA, 32 nt, Homo Sapiens
aauggccggcgguggcugcagugguagccuga

SEQ ID NO: 343813 - RNA, 32 nt, Homo Sapiens
aagccaggaaauggacucaguggucuuugagg

SEQ ID NO: 343814 - RNA, 32 nt, Homo Sapiens
gggaaugcaguggugccuggaaacuuggagau

SEQ ID NO: 343815 - RNA, 32 nt, Homo Sapiens
gaccauaauguuuauuauuaaauuuauauucu

SEQ ID NO: 343816 - RNA, 32 nt, Homo Sapiens
gcauucugacuuccugacccagauuucaagaa

SEQ ID NO: 343817 - RNA, 32 nt, Homo Sapiens
auccacugauaaugagaguauuugagugaugg

SEQ ID NO: 343818 - RNA, 32 nt, Homo Sapiens
aagacaacaaggaaagaaaccaugaaagucug

SEQ ID NO: 343819 - RNA, 32 nt, Homo Sapiens
ucgaagcccucccuacccaccccgugagaaac

SEQ ID NO: 343820 - RNA, 32 nt, Homo Sapiens
ugaaacaguguaagaaaucacuuuuaagaaaa

SEQ ID NO: 343821 - RNA, 32 nt, Homo Sapiens
ccagacaggaccaguugcccucauuuccaaag

SEQ ID NO: 343822 - RNA, 32 nt, Homo Sapiens
auuccccuggaaguuugcuacaugggauaagc

SEQ ID NO: 343823 - RNA, 32 nt, Homo Sapiens
ccugcaggccuggggcuccuucugggaaguau

SEQ ID NO: 343824 - RNA, 32 nt, Homo Sapiens
ggcucccaccugcuccuccagcgcaccaggug

SEQ ID NO: 343825 - RNA, 32 nt, Homo Sapiens
uggaguuuugucaucaggccagccucaucccg

SEQ ID NO: 343826 - RNA, 32 nt, Homo Sapiens
uguaggccaagcccgugccucagggcagccuu

SEQ ID NO: 343827 - RNA, 32 nt, Homo Sapiens
gacagcaucucagauaccgaugcugaaagaga

SEQ ID NO: 343828 - RNA, 32 nt, Homo Sapiens
ucucagcgagacagugaggugcucucugugag

SEQ ID NO: 343829 - RNA, 29 nt, Homo Sapiens
gaauguucuauccccacaagaaggauuau

SEQ ID NO: 343830 - RNA, 32 nt, Homo Sapiens
agccuucaaauuauaaaccaagggucaauugu

SEQ ID NO: 343831 - RNA, 32 nt, Homo Sapiens
cccagggcgcacccucagugcaggcaccucug

SEQ ID NO: 343832 - RNA, 32 nt, Homo Sapiens
uguugugaaauacuuaaaaaacugagcaaaau

SEQ ID NO: 343833 - RNA, 32 nt, Homo Sapiens
guaaauuguaaaugaaguaauacuguguuccu

SEQ ID NO: 343834 - RNA, 32 nt, Homo Sapiens
cuccaagcugucuuuguucauuccugggcgua

SEQ ID NO: 343835 - RNA, 32 nt, Homo Sapiens
agacacuuaaccuuuaccuuuacuucuguugg

SEQ ID NO: 343836 - RNA, 32 nt, Homo Sapiens
agcacaauuuaaaacaauccuuacuaaguagg

SEQ ID NO: 343837 - RNA, 32 nt, Homo Sapiens
gcucgcaugcugucacccauuccagccuaaau

SEQ ID NO: 343838 - RNA, 32 nt, Homo Sapiens
uuucagugucuggggcucugguagauguguug

SEQ ID NO: 343839 - RNA, 32 nt, Homo Sapiens
guuaagcaagcacuaaucucuuuuccuggaga

SEQ ID NO: 343840 - RNA, 32 nt, Homo Sapiens
aacagauauagugauuuuugcuuaguugcuua

SEQ ID NO: 343841 - RNA, 29 nt, Homo Sapiens
acuauuucaaaugcauaccacaaaugcaa

SEQ ID NO: 343842 - RNA, 32 nt, Homo Sapiens
aacacagccaaggggauauuuacugcucuuua

SEQ ID NO: 343843 - RNA, 32 nt, Homo Sapiens
cugaucuuuugaaauuugaaaaacgucuuuag

SEQ ID NO: 343844 - RNA, 32 nt, Homo Sapiens
accuucuuaggacuagagacugugccuuauag

SEQ ID NO: 343845 - RNA, 32 nt, Homo Sapiens
uagcaugucacaugugaccauguuggaucauu

SEQ ID NO: 343846 - RNA, 32 nt, Homo Sapiens
gcaaugcucccuccuucccaggguccacgggc

SEQ ID NO: 343847 - RNA, 32 nt, Homo Sapiens
gggugggaggggcugagauggcugcuggcccg

SEQ ID NO: 343848 - RNA, 32 nt, Homo Sapiens
caucuuaccauagcuguaaauuguaucaaaac

SEQ ID NO: 343849 - RNA, 32 nt, Homo Sapiens
gauuaucuccagaugcugacuaagguacagag

SEQ ID NO: 343850 - RNA, 32 nt, Homo Sapiens
cuccuugaaaaaccucuuuauuaaucucacca

SEQ ID NO: 343851 - RNA, 32 nt, Homo Sapiens
ccagcuagcucuuuguguaguguccagggccc

SEQ ID NO: 343852 - RNA, 32 nt, Homo Sapiens
aaagugcacauuuuuguuguugcagaaacugu

SEQ ID NO: 343853 - RNA, 32 nt, Homo Sapiens
caaaaaguggccugggcucuguuggugugcgu

SEQ ID NO: 343854 - RNA, 32 nt, Homo Sapiens
uuggucaaacacacaaaaauacugccuuguac

SEQ ID NO: 343855 - RNA, 32 nt, Homo Sapiens
aagugaccucauagcaagggcccgcagagcag

SEQ ID NO: 343856 - RNA, 32 nt, Homo Sapiens
aaacucauuacuuuuccauucccaaucuagug

SEQ ID NO: 343857 - RNA, 32 nt, Homo Sapiens
cccuguuuuuuggagaggguguaucauugccu

SEQ ID NO: 343858 - RNA, 32 nt, Homo Sapiens
caggucaggggugaagcucugucugaggagga

SEQ ID NO: 343859 - RNA, 32 nt, Homo Sapiens
acuaguuuggauaagaacuuugaaauguuccu

SEQ ID NO: 343860 - RNA, 32 nt, Homo Sapiens
gccuuaaaaaggaaaacuaguguugcuauugu

SEQ ID NO: 343861 - RNA, 32 nt, Homo Sapiens
cgaaccccggcgggcccugccagacgcacagg

SEQ ID NO: 343862 - RNA, 32 nt, Homo Sapiens
auuuuuuauuaagaauucauacuuaauuccac

SEQ ID NO: 343863 - RNA, 32 nt, Homo Sapiens
acuuuucaugaagagugcuuugaaaauuaaag

SEQ ID NO: 343864 - RNA, 32 nt, Homo Sapiens
uuucaacacauuuuauuuuaaaauauuauuuu

SEQ ID NO: 343865 - RNA, 32 nt, Homo Sapiens
cgggggacgaguccggagcagcagccagaguu

SEQ ID NO: 343866 - RNA, 32 nt, Homo Sapiens
ugguccgcuuccucgucugggaccacgauccc

SEQ ID NO: 343867 - RNA, 32 nt, Homo Sapiens
uuuauuaaagauugacauuuuaaguacaacuu

SEQ ID NO: 343868 - RNA, 32 nt, Homo Sapiens
cauuugcccagggcugcucccgagggggauga

SEQ ID NO: 343869 - RNA, 32 nt, Homo Sapiens
cccaggugaacauggcugaagauuuuucuagu

SEQ ID NO: 343870 - RNA, 32 nt, Homo Sapiens
auuguuuucuuacacccuggaaaucuuucuau

SEQ ID NO: 343871 - RNA, 32 nt, Homo Sapiens
gguggaacccgcggccggagacacacgccgug

SEQ ID NO: 343872 - RNA, 32 nt, Homo Sapiens
ccagaucccucauuugauacuccaaaaccauc

SEQ ID NO: 343873 - RNA, 32 nt, Homo Sapiens
cgggugcaagcacucggggucccuggagggca

SEQ ID NO: 343874 - RNA, 32 nt, Homo Sapiens
uuccaucuuuuugguguaauuuucauguuuuu

SEQ ID NO: 343875 - RNA, 32 nt, Homo Sapiens
uggacccugugcugagcuggugacucacuguc

SEQ ID NO: 343876 - RNA, 32 nt, Homo Sapiens
uguuuccccaugucauccaggcuggucuggaa

SEQ ID NO: 343877 - RNA, 32 nt, Homo Sapiens
ccuauuucaaaggagauauagcaguuuugcca

SEQ ID NO: 343878 - RNA, 32 nt, Homo Sapiens
uagcuggcgggaccguuagaucgaggcggaug

SEQ ID NO: 343879 - RNA, 32 nt, Homo Sapiens
aauucacacaugaaagauuaaucugaaagauc

SEQ ID NO: 343880 - RNA, 29 nt, Homo Sapiens
agcgaauaaaguuuuacugauuuuugaga

SEQ ID NO: 343881 - RNA, 32 nt, Homo Sapiens
ccuagcccgcggcuccggcuccaggcccucgg

SEQ ID NO: 343882 - RNA, 32 nt, Homo Sapiens
gagauuuuuuaaaauaccacaaucauuugaag

SEQ ID NO: 343883 - RNA, 32 nt, Homo Sapiens
acucuucucgucccgccagaggaggcgaccga

SEQ ID NO: 343884 - RNA, 32 nt, Homo Sapiens
aaacugucaucauauuauuuguuuuaaaacua

SEQ ID NO: 343885 - RNA, 32 nt, Homo Sapiens
cgccugaaaucccagcacuuugggaggccaag

SEQ ID NO: 343886 - RNA, 32 nt, Homo Sapiens
gugguucgggauaaagagaacuagucuuggga

SEQ ID NO: 343887 - RNA, 32 nt, Homo Sapiens
uugucuuuuuaaacuacuguuaaaagaacagc

SEQ ID NO: 343888 - RNA, 32 nt, Homo Sapiens
gaagcugagggcccgcugagggcgcaggaccu

SEQ ID NO: 343889 - RNA, 32 nt, Homo Sapiens
ugcgcaucuccaugucugcauacucuggaguu

SEQ ID NO: 343890 - RNA, 32 nt, Homo Sapiens
aagcaacagucagagacugcuauacauuucug

SEQ ID NO: 343891 - RNA, 32 nt, Homo Sapiens
uaaaauaauuuaauuuuacauuagauuccacg

SEQ ID NO: 343892 - RNA, 29 nt, Homo Sapiens
gcgggagucguagggaggacgccgggaca

SEQ ID NO: 343893 - RNA, 32 nt, Homo Sapiens
gcacugccagcuugccaguuucugcccagcaa

SEQ ID NO: 343894 - RNA, 32 nt, Homo Sapiens
cucccaggguaccuggccccagcacucuccca

SEQ ID NO: 343895 - RNA, 32 nt, Homo Sapiens
guggcacccccuccugcuggugccagugggag

SEQ ID NO: 343896 - RNA, 32 nt, Homo Sapiens
guuuauaaauguuuauuuuguacuuaauaccu

SEQ ID NO: 343897 - RNA, 32 nt, Homo Sapiens
acugaguccccucaccugaacucugggcugga

SEQ ID NO: 343898 - RNA, 32 nt, Homo Sapiens
aggggguaggggcaguguagguccuggggcag

SEQ ID NO: 343899 - RNA, 32 nt, Homo Sapiens
ccugcucgcuccucuccccaucgccugcguuc

SEQ ID NO: 343900 - RNA, 32 nt, Homo Sapiens
gggccgcugcggggcagucgcggccgccagag

SEQ ID NO: 343901 - RNA, 32 nt, Homo Sapiens
ccaccgccucgccgcuuccgccccucagaagc

SEQ ID NO: 343902 - RNA, 32 nt, Homo Sapiens
ugggaguaugguuaggcacagauuuuuggaau

SEQ ID NO: 343903 - RNA, 32 nt, Homo Sapiens
gguaaauauuccagaauccauaugaaauucau

SEQ ID NO: 343904 - RNA, 32 nt, Homo Sapiens
agacuguuucuuaaauuucaauuggauuggcu

SEQ ID NO: 343905 - RNA, 32 nt, Homo Sapiens
uauucagaaaaggugaauaaaauugggauaua

SEQ ID NO: 343906 - RNA, 32 nt, Homo Sapiens
cguugcacauaaagagcugaaaaacugaggaa

SEQ ID NO: 343907 - RNA, 32 nt, Homo Sapiens
uaaagacucaguauaaucauggccaaaaaaaa

SEQ ID NO: 343908 - RNA, 32 nt, Homo Sapiens
uuauuuauucgcaacagccagcgcuaaaagag

SEQ ID NO: 343909 - RNA, 32 nt, Homo Sapiens
ucuguggaaugggagaguuggauuaacaccag

SEQ ID NO: 343910 - RNA, 32 nt, Homo Sapiens
aacccccacgggggcgccugcagcggggacac

SEQ ID NO: 343911 - RNA, 32 nt, Homo Sapiens
ggaucaaaugcgagagaguucaccuuaaacaa

SEQ ID NO: 343912 - RNA, 32 nt, Homo Sapiens
cugccauccgaggcuuccuggucuaagaguug

SEQ ID NO: 343913 - RNA, 32 nt, Homo Sapiens
gugacaacugccuuuccuggggcgcuugcucu

SEQ ID NO: 343914 - RNA, 32 nt, Homo Sapiens
auagaggagaggaaaagguguaggccugccuu

SEQ ID NO: 343915 - RNA, 29 nt, Homo Sapiens
gauagaguaauucuguauuuucuaacggg

SEQ ID NO: 343916 - RNA, 27 nt, Homo Sapiens
uuuguucauuaauuuugucaguauuac

SEQ ID NO: 343917 - RNA, 32 nt, Homo Sapiens
uaaaugaaugaaauugugauuuccugagaauu

SEQ ID NO: 343918 - RNA, 31 nt, Homo Sapiens
gacaaaauaaauuguaaagagugacugccug

SEQ ID NO: 343919 - RNA, 32 nt, Homo Sapiens
uauaacuuuuuuaaaugaaaugcuucuuagag

SEQ ID NO: 343920 - RNA, 32 nt, Homo Sapiens
gccacuccgggaacgccuuugcgccgggacuu

SEQ ID NO: 343921 - RNA, 32 nt, Homo Sapiens
ggcagcauggcagagaaccagaaggaaguccg

SEQ ID NO: 343922 - RNA, 32 nt, Homo Sapiens
ucuacuaaaaauaccaaaaauuagccgagcgu

SEQ ID NO: 343923 - RNA, 32 nt, Homo Sapiens
ccuauugguugcgccguccgcgggccuugguc

SEQ ID NO: 343924 - RNA, 32 nt, Homo Sapiens
caaacauacuaaauuuuuuuuauuuuauugcu

SEQ ID NO: 343925 - RNA, 32 nt, Homo Sapiens
cucuaugauuauucaggaauauuaucucucag

SEQ ID NO: 343926 - RNA, 32 nt, Homo Sapiens
uggccgaggugcugagccgccggugcgucccc

SEQ ID NO: 343927 - RNA, 32 nt, Homo Sapiens
ucgggguacaguuguugaaaagagguugaaua

SEQ ID NO: 343928 - RNA, 32 nt, Homo Sapiens
gccggcgagcgcgcgcgaggccccggcuucug

SEQ ID NO: 343929 - RNA, 32 nt, Homo Sapiens
agcuguguccagcuuuuccccuggggcuccag

SEQ ID NO: 343930 - RNA, 32 nt, Homo Sapiens
uggagccgccgcaucagcggccucggggaaug

SEQ ID NO: 343931 - RNA, 32 nt, Homo Sapiens
uccuauguucuugugauagugaauaagucuca

SEQ ID NO: 343932 - RNA, 29 nt, Homo Sapiens
caggagucggagaccagccugggcaacau

SEQ ID NO: 343933 - RNA, 32 nt, Homo Sapiens
ggcagguggugggccauggccaugguccccag

SEQ ID NO: 343934 - RNA, 32 nt, Homo Sapiens
agccagagccccacccaaggggacccuggucu

SEQ ID NO: 343935 - RNA, 32 nt, Homo Sapiens
aacauuccaagcucauggauagaagaaucagu

SEQ ID NO: 343936 - RNA, 32 nt, Homo Sapiens
cgggccgagaccguucaccuccccuuaucccu

SEQ ID NO: 343937 - RNA, 32 nt, Homo Sapiens
aggaggggcacacagcugggggugcagagccc

SEQ ID NO: 343938 - RNA, 32 nt, Homo Sapiens
cccaaggaucacugcacccagcccaaggucuu

SEQ ID NO: 343939 - RNA, 32 nt, Homo Sapiens
cagcaaaccgcugacaagucuuucuagaaauu

SEQ ID NO: 343940 - RNA, 32 nt, Homo Sapiens
gauugcuuuaggggauaagugauuuaauauuc

SEQ ID NO: 343941 - RNA, 32 nt, Homo Sapiens
cgcucccgccccagcgccaucccuccuggcug

SEQ ID NO: 343942 - RNA, 32 nt, Homo Sapiens
uccaaugauggacuuuuuugaugaugccaauc

SEQ ID NO: 343943 - RNA, 29 nt, Homo Sapiens
auuuuuauagugauagcugaguagaaucu

SEQ ID NO: 343944 - RNA, 32 nt, Homo Sapiens
uccuucuccaugacucugaaauccaagggggg

SEQ ID NO: 343945 - RNA, 32 nt, Homo Sapiens
ggggcugucggguuagaagccucauggccaca

SEQ ID NO: 343946 - RNA, 32 nt, Homo Sapiens
uacacgcggaccucggcugugugcgagguggc

SEQ ID NO: 343947 - RNA, 32 nt, Homo Sapiens
caaccugcagcugaggucgccggcgccuuuuu

SEQ ID NO: 343948 - RNA, 32 nt, Homo Sapiens
gaccaggaugaagagggaucaaagagauaauu

SEQ ID NO: 343949 - RNA, 32 nt, Homo Sapiens
aguuuuaguaauaucaugaauuuaauuugcuu

SEQ ID NO: 343950 - RNA, 32 nt, Homo Sapiens
ugaaaaauguccacaauuuuaugaauugcugu

SEQ ID NO: 343951 - RNA, 32 nt, Homo Sapiens
guucacgaugacccgagagaacucgaggaagu

SEQ ID NO: 343952 - RNA, 32 nt, Homo Sapiens
aggcaccaaacacccacauaccuggcccaacc

SEQ ID NO: 343953 - RNA, 32 nt, Homo Sapiens
uguggcuuuccagggcagcugagagcccaggu

SEQ ID NO: 343954 - RNA, 32 nt, Homo Sapiens
auuauuauuuagugugauugauaguaucuaga

SEQ ID NO: 343955 - RNA, 32 nt, Homo Sapiens
guuaaagggaauggugucagaauauuugcaua

SEQ ID NO: 343956 - RNA, 32 nt, Homo Sapiens
guccuggacucccacugugcuccccagagggc

SEQ ID NO: 343957 - RNA, 32 nt, Homo Sapiens
gagcuggaguucaaugaguccuagacagugag

SEQ ID NO: 343958 - RNA, 28 nt, Homo Sapiens
gggacaguggcuagagguauggauggag

SEQ ID NO: 343959 - RNA, 31 nt, Homo Sapiens
auugucuaagccaccucugaaagcagguuuu

SEQ ID NO: 343960 - RNA, 32 nt, Homo Sapiens
cuuucccccucccccaucucuugacuuugcug

SEQ ID NO: 343961 - RNA, 32 nt, Homo Sapiens
gugccugguggagagcgagggcagccugacgg

SEQ ID NO: 343962 - RNA, 30 nt, Homo Sapiens
guacaucuaaguaugggggaaaaccugugc

SEQ ID NO: 343963 - RNA, 31 nt, Homo Sapiens
gaagagugaaacaccucgcaagacccagaga

SEQ ID NO: 343964 - RNA, 29 nt, Homo Sapiens
ccgacgaggcucugggcaccagagcaaaa

SEQ ID NO: 343965 - RNA, 32 nt, Homo Sapiens
ggaggagaagugacuggaaaagaacuggugug

SEQ ID NO: 343966 - RNA, 32 nt, Homo Sapiens
acagcucuaugggauaggaacugucaguguuu

SEQ ID NO: 343967 - RNA, 32 nt, Homo Sapiens
ccagagcagccugggcaaccuaucaagacgcu

SEQ ID NO: 343968 - RNA, 32 nt, Homo Sapiens
cacaauggaguaaauuacauugacacuuacug

SEQ ID NO: 343969 - RNA, 32 nt, Homo Sapiens
ucauuuuaaauauccuucucaugguucuugua

SEQ ID NO: 343970 - RNA, 32 nt, Homo Sapiens
uugacuuauuuucucuguguuuguuccuacag

SEQ ID NO: 343971 - RNA, 32 nt, Homo Sapiens
gugagaagauagaacaaugcuauaauauauaa

SEQ ID NO: 343972 - RNA, 32 nt, Homo Sapiens
aauuugcugccaaaugcaucucagguuuuuaa

SEQ ID NO: 343973 - RNA, 32 nt, Homo Sapiens
cucacagaacagaaccccacagcuggauaagg

SEQ ID NO: 343974 - RNA, 32 nt, Homo Sapiens
uggaggaauguggguguggccgaggugauggc

SEQ ID NO: 343975 - RNA, 32 nt, Homo Sapiens
gguuuuggaggaauauuuuaaguaugauccug

SEQ ID NO: 343976 - RNA, 32 nt, Homo Sapiens
cggacggcaggauggauucacuuggcgacaug

SEQ ID NO: 343977 - RNA, 32 nt, Homo Sapiens
gaccuucgcccugggagguucuggccaggugc

SEQ ID NO: 343978 - RNA, 32 nt, Homo Sapiens
gaaggggaggcagaggaggaacaucuggaaaa

SEQ ID NO: 343979 - RNA, 32 nt, Homo Sapiens
ggaaggcggcagucagacuuguccugugccgg

SEQ ID NO: 343980 - RNA, 32 nt, Homo Sapiens
cuucaccuggaacaucaaccacgcccggcuga

SEQ ID NO: 343981 - RNA, 32 nt, Homo Sapiens
uggcaggagaaucagccuggggccuggggaug

SEQ ID NO: 343982 - RNA, 32 nt, Homo Sapiens
cugcccugcgcucggcgggcuggcauccggcc

SEQ ID NO: 343983 - RNA, 32 nt, Homo Sapiens
ugauggcuuuuggcagggacagacuuggacac

SEQ ID NO: 343984 - RNA, 32 nt, Homo Sapiens
ggcugaaagugaguucuguuuuccggcagccc

SEQ ID NO: 343985 - RNA, 32 nt, Homo Sapiens
gggcgcggcgccggaggaggaaguggugaggu

SEQ ID NO: 343986 - RNA, 32 nt, Homo Sapiens
ccgggaggcuccuggggccggggcuccgaggu

SEQ ID NO: 343987 - RNA, 32 nt, Homo Sapiens
accccccuccugcuccucccugccccccaagg

SEQ ID NO: 343988 - RNA, 32 nt, Homo Sapiens
ugucggggcagcaugcccuucucccccacuuc

SEQ ID NO: 343989 - RNA, 32 nt, Homo Sapiens
ugcgagggaaaggccaguggcuggagacccca

SEQ ID NO: 343990 - RNA, 32 nt, Homo Sapiens
uggcucuggcgguggcuauggcagcagcuuug

SEQ ID NO: 343991 - RNA, 32 nt, Homo Sapiens
gaucaucuuuuauuuucuuuuccacuuuuucc

SEQ ID NO: 343992 - RNA, 32 nt, Homo Sapiens
gggaaauggaggaaacacaaaacuaugaauua

SEQ ID NO: 343993 - RNA, 32 nt, Homo Sapiens
ggcugccggcccggagccgccgcgccgucaga

SEQ ID NO: 343994 - RNA, 32 nt, Homo Sapiens
cgcgaagaagcuggcaggggcacgagccgggg

SEQ ID NO: 343995 - RNA, 29 nt, Homo Sapiens
gaaccucagggacagagguggcuggggcu

SEQ ID NO: 343996 - RNA, 32 nt, Homo Sapiens
gcggcacugcgucuccagccuaccuccuguag

SEQ ID NO: 343997 - RNA, 32 nt, Homo Sapiens
uuccuccccucugcacuuuguuuacuuguuuu

SEQ ID NO: 343998 - RNA, 32 nt, Homo Sapiens
cgguagcgggugugggggcgcgagcagcgcag

SEQ ID NO: 343999 - RNA, 32 nt, Homo Sapiens
caccugacugguuuuggagguucuguccacug

SEQ ID NO: 344000 - RNA, 32 nt, Homo Sapiens
gcugauauaucugcucuguguuugggccucuc

SEQ ID NO: 344001 - RNA, 30 nt, Homo Sapiens
cugggacugggcuugcggggucccgcggga

SEQ ID NO: 344002 - RNA, 32 nt, Homo Sapiens
uugcgggacgugucugcgcggcaguccuggcc

SEQ ID NO: 344003 - RNA, 32 nt, Homo Sapiens
ggggacuucuugaacuugcagggagaauaacu

SEQ ID NO: 344004 - RNA, 30 nt, Homo Sapiens
aacccgggagguggagcuugcagugggugg

SEQ ID NO: 344005 - RNA, 32 nt, Homo Sapiens
gaaauguaauaaauauuuguaauuuuacacaa

SEQ ID NO: 344006 - RNA, 32 nt, Homo Sapiens
aagaggcagacgacuagaugacuucugcacuu

SEQ ID NO: 344007 - RNA, 32 nt, Homo Sapiens
ugccggcuucugugccaggcacuuccuuuuau

SEQ ID NO: 344008 - RNA, 32 nt, Homo Sapiens
cuugauuuuuauuguuuugucauuucuugagg

SEQ ID NO: 344009 - RNA, 29 nt, Homo Sapiens
caccaugccgcgggccccggcgccgcugu

SEQ ID NO: 344010 - RNA, 32 nt, Homo Sapiens
ugcuucuuuuuggagagugcuauaaaagacua

SEQ ID NO: 344011 - RNA, 32 nt, Homo Sapiens
aucuguucaaggaaaacuauaagacauugaug

SEQ ID NO: 344012 - RNA, 32 nt, Homo Sapiens
uaaggaagacauuuucuaauugcaucuccaug

SEQ ID NO: 344013 - RNA, 32 nt, Homo Sapiens
gggcucugguuguaaaacacacuuccugcugc

SEQ ID NO: 344014 - RNA, 32 nt, Homo Sapiens
cuucccaauagcaaggcugugcaucuagccuc

SEQ ID NO: 344015 - RNA, 32 nt, Homo Sapiens
gcagccuuuuucuucugaaaggcuaagugggg

SEQ ID NO: 344016 - RNA, 32 nt, Homo Sapiens
gaaucuugguuucaguuuuuuauucuaugcua

SEQ ID NO: 344017 - RNA, 32 nt, Homo Sapiens
uuaaaauacuauuucuuauugagguuuaaccu

SEQ ID NO: 344018 - RNA, 32 nt, Homo Sapiens
cacaggcauaugguggagagggggguacccug

SEQ ID NO: 344019 - RNA, 32 nt, Homo Sapiens
ucucacagcugucucagaauuccuccuccugg

SEQ ID NO: 344020 - RNA, 32 nt, Homo Sapiens
ucaacccuggagaguucaauggcugcugaagc

SEQ ID NO: 344021 - RNA, 32 nt, Homo Sapiens
cccaagacugguuuuucuacucucaugcauuc

SEQ ID NO: 344022 - RNA, 32 nt, Homo Sapiens
aaaggcaccaaaagucaauuacacaagauaca

SEQ ID NO: 344023 - RNA, 32 nt, Homo Sapiens
gccugcacgugcccggcccugcuccacacgag

SEQ ID NO: 344024 - RNA, 32 nt, Homo Sapiens
uaauauuuaagguuaaaacauucaguauuaag

SEQ ID NO: 344025 - RNA, 32 nt, Homo Sapiens
ccugcaaacacacacacacacacacacacaca

SEQ ID NO: 344026 - RNA, 28 nt, Homo Sapiens
aacauggagcccccggacgcaccggccc

SEQ ID NO: 344027 - RNA, 32 nt, Homo Sapiens
acccugcagcccuguugagaagaaagauucca

SEQ ID NO: 344028 - RNA, 32 nt, Homo Sapiens
ggacccggaccaggagggacccugccccggga

SEQ ID NO: 344029 - RNA, 32 nt, Homo Sapiens
uaccgcugccagcucagcagccugcccggcaa

SEQ ID NO: 344030 - RNA, 32 nt, Homo Sapiens
aggggcgacauggcacaccucuggccaaugcc

SEQ ID NO: 344031 - RNA, 32 nt, Homo Sapiens
gcagcuuguggaggccguugguuccgcccacu

SEQ ID NO: 344032 - RNA, 32 nt, Homo Sapiens
guuacugguaaaauaugaagguuaaaaugcag

SEQ ID NO: 344033 - RNA, 32 nt, Homo Sapiens
uuuuucaacuguaguuggcuuuugaaugagga

SEQ ID NO: 344034 - RNA, 32 nt, Homo Sapiens
aagaagggaaugccuccacauccggcuuauga

SEQ ID NO: 344035 - RNA, 32 nt, Homo Sapiens
aaacuacauuuuaaagggaauguguaugugaa

SEQ ID NO: 344036 - RNA, 32 nt, Homo Sapiens
cacauucccuucccuguuccccagagagccca

SEQ ID NO: 344037 - RNA, 32 nt, Homo Sapiens
auguacccacccaaaaugauuauuuuuggaga

SEQ ID NO: 344038 - RNA, 31 nt, Homo Sapiens
agugugcggugcggguggcaaaagcagccuu

SEQ ID NO: 344039 - RNA, 32 nt, Homo Sapiens
gacuggccccacuucuggucucugucccucug

SEQ ID NO: 344040 - RNA, 32 nt, Homo Sapiens
uuuuuuaacaucuuaauugacaauggcguuuu

SEQ ID NO: 344041 - RNA, 32 nt, Homo Sapiens
acguucccaccuccucugacacugccgagucc

SEQ ID NO: 344042 - RNA, 32 nt, Homo Sapiens
gcugaggcugccugggaggcccggggcgaccg

SEQ ID NO: 344043 - RNA, 32 nt, Homo Sapiens
ucuaacagaaagaacuguacuccagaauugua

SEQ ID NO: 344044 - RNA, 32 nt, Homo Sapiens
ggacagcggcuuuggcuuuuccaauuuuccau

SEQ ID NO: 344045 - RNA, 32 nt, Homo Sapiens
gaagccuagcagcuaugaggauccauuaucuu

SEQ ID NO: 344046 - RNA, 32 nt, Homo Sapiens
ccagaccucuggcugccuggcucccuaggaau

SEQ ID NO: 344047 - RNA, 32 nt, Homo Sapiens
agcgguuuugggcccgggcggcuguagaggcg

SEQ ID NO: 344048 - RNA, 32 nt, Homo Sapiens
cugucacuuaauuauuuccuucuuuaucaaau

SEQ ID NO: 344049 - RNA, 32 nt, Homo Sapiens
ugggcaagcauugguaauaaauggaauaagac

SEQ ID NO: 344050 - RNA, 32 nt, Homo Sapiens
gcgcucccccgcggagauuggugugugagcag

SEQ ID NO: 344051 - RNA, 32 nt, Homo Sapiens
ugguacagauggcauugucccagucuguuccc

SEQ ID NO: 344052 - RNA, 32 nt, Homo Sapiens
ucaaagcccccuccuccaugagaggggacuga

SEQ ID NO: 344053 - RNA, 32 nt, Homo Sapiens
auuuuggggggacagugccaaguccaucuuug

SEQ ID NO: 344054 - RNA, 32 nt, Homo Sapiens
ugauccugccccaccguugcuguugucugcca

SEQ ID NO: 344055 - RNA, 32 nt, Homo Sapiens
aggggaucagugaaggaagagaaggccagcag

SEQ ID NO: 344056 - RNA, 32 nt, Homo Sapiens
aguuccugagauacugaugacugagagugcug

SEQ ID NO: 344057 - RNA, 32 nt, Homo Sapiens
cccacacugggcccgcgcgccggauacgaggu

SEQ ID NO: 344058 - RNA, 32 nt, Homo Sapiens
aguucuugaaaagaaucagccugggaggggcc

SEQ ID NO: 344059 - RNA, 32 nt, Homo Sapiens
uuuuaguagagaugggguuuugccauguuggc

SEQ ID NO: 344060 - RNA, 32 nt, Homo Sapiens
agccuguguuaagagauuacugugaauccuga

SEQ ID NO: 344061 - RNA, 32 nt, Homo Sapiens
gacauggcuucuggggacccagggcuuaauug

SEQ ID NO: 344062 - RNA, 32 nt, Homo Sapiens
aaaaaggagauuaaauauaugcauguauauca

SEQ ID NO: 344063 - RNA, 32 nt, Homo Sapiens
ggaggaggaaauggauuagguccuggagguug

SEQ ID NO: 344064 - RNA, 32 nt, Homo Sapiens
cucagcauuuuucuguaauaaucaccucagcu

SEQ ID NO: 344065 - RNA, 32 nt, Homo Sapiens
gagcucugggagggaagggaauggagcucugg

SEQ ID NO: 344066 - RNA, 32 nt, Homo Sapiens
gagacacuaacagauaggccaaaguagcaagc

SEQ ID NO: 344067 - RNA, 32 nt, Homo Sapiens
ccggcuaugugugggcgccgccgguggcuuug

SEQ ID NO: 344068 - RNA, 32 nt, Homo Sapiens
ggggucugccagccagcccuccuccccgaccc

SEQ ID NO: 344069 - RNA, 32 nt, Homo Sapiens
cagaaacuggacuccugcauguccuugggggc

SEQ ID NO: 344070 - RNA, 32 nt, Homo Sapiens
cucgagagcuuugaggccaugaucucugcucu

SEQ ID NO: 344071 - RNA, 32 nt, Homo Sapiens
aaaagugaucguuuucuuccaaacaaugugaa

SEQ ID NO: 344072 - RNA, 32 nt, Homo Sapiens
acaccggugaggggcgaggaaccaguguucau

SEQ ID NO: 344073 - RNA, 32 nt, Homo Sapiens
gcggaggaggagugaaggcggcggcggcggag

SEQ ID NO: 344074 - RNA, 32 nt, Homo Sapiens
uuuauagucaaaggacugguucugagagccuu

SEQ ID NO: 344075 - RNA, 32 nt, Homo Sapiens
uuauuuuaaaagaugcacuuugaguugcaaua

SEQ ID NO: 344076 - RNA, 32 nt, Homo Sapiens
cgcccccugagaaauguucacucuucaauguu

SEQ ID NO: 344077 - RNA, 32 nt, Homo Sapiens
cccaagagcugcagcccacgggcccggcccgg

SEQ ID NO: 344078 - RNA, 32 nt, Homo Sapiens
ggacuuccugggcccauagugaagccuucugg

SEQ ID NO: 344079 - RNA, 32 nt, Homo Sapiens
aaugggaugaaaauuggcagguccugggaugg

SEQ ID NO: 344080 - RNA, 32 nt, Homo Sapiens
acgugagccggccucagcuggugcugccgcgg

SEQ ID NO: 344081 - RNA, 32 nt, Homo Sapiens
ugguuuuuuauuucuuuuugguuugcuuucug

SEQ ID NO: 344082 - RNA, 32 nt, Homo Sapiens
aauuuaccaauauuuaaauaccaguaaggaau

SEQ ID NO: 344083 - RNA, 32 nt, Homo Sapiens
cuguuucugcugggggcaggcuccucuucccc

SEQ ID NO: 344084 - RNA, 32 nt, Homo Sapiens
gauucuugauaaaucaucauuagcaauucauu

SEQ ID NO: 344085 - RNA, 32 nt, Homo Sapiens
aaaucagcauucuaaucagggacacuacuuca

SEQ ID NO: 344086 - RNA, 32 nt, Homo Sapiens
agugcuuccacauuuucaugacuuccaaaggu

SEQ ID NO: 344087 - RNA, 32 nt, Homo Sapiens
gugccaagggggcaauggcggcuuccuguguu

SEQ ID NO: 344088 - RNA, 32 nt, Homo Sapiens
ccauuucauuggcguaacguaaaguguauucu

SEQ ID NO: 344089 - RNA, 32 nt, Homo Sapiens
cccgucuuuauuaaauacaaaaaauuagccag

SEQ ID NO: 344090 - RNA, 32 nt, Homo Sapiens
cuucguacuauauaaggaaaacaaagacacca

SEQ ID NO: 344091 - RNA, 32 nt, Homo Sapiens
gcaugaagccccaaauguagaaacucagccag

SEQ ID NO: 344092 - RNA, 32 nt, Homo Sapiens
acuaauuuaaacaaguccuccuuuagucuuuu

SEQ ID NO: 344093 - RNA, 32 nt, Homo Sapiens
aaaucacuugcccacaguuccacagcuaguga

SEQ ID NO: 344094 - RNA, 32 nt, Homo Sapiens
gacagacggccccucgaguguagcccaggauc

SEQ ID NO: 344095 - RNA, 32 nt, Homo Sapiens
cggcuaaccuggaccuggaacuguagggccag

SEQ ID NO: 344096 - RNA, 32 nt, Homo Sapiens
ugacuccuuuuggaacccccacuuuuacguug

SEQ ID NO: 344097 - RNA, 32 nt, Homo Sapiens
gagguuugcgccugcgcaggcgccugccuccg

SEQ ID NO: 344098 - RNA, 30 nt, Homo Sapiens
cggcauuuacuaaugggggacuacuguggg

SEQ ID NO: 344099 - RNA, 32 nt, Homo Sapiens
uggcccagggggaucagcuggcugggaggauu

SEQ ID NO: 344100 - RNA, 32 nt, Homo Sapiens
cgcccaccucuccagugcugccugcagucagc

SEQ ID NO: 344101 - RNA, 32 nt, Homo Sapiens
uuuauuguguuaccauuuguguuccauuugcu

SEQ ID NO: 344102 - RNA, 32 nt, Homo Sapiens
gauauguauaucaaagugauaauuuguaugaa

SEQ ID NO: 344103 - RNA, 32 nt, Homo Sapiens
gaagcuagaaaacaggcaaauuccugacugcu

SEQ ID NO: 344104 - RNA, 32 nt, Homo Sapiens
gaggaaaguuucaugagaaguaguguguuuaa

SEQ ID NO: 344105 - RNA, 32 nt, Homo Sapiens
uggucaucuucaguauuuucugucauuugcaa

SEQ ID NO: 344106 - RNA, 30 nt, Homo Sapiens
uccccacuggacugcauggcgacggcgugu

SEQ ID NO: 344107 - RNA, 32 nt, Homo Sapiens
aguguaccuucuacucuaccaguugcgcaaga

SEQ ID NO: 344108 - RNA, 32 nt, Homo Sapiens
uaguucuucuauuuuuaguguccaaaauuuac

SEQ ID NO: 344109 - RNA, 32 nt, Homo Sapiens
gagggaaaugacuaaugaagcuaauuaaaaga

SEQ ID NO: 344110 - RNA, 32 nt, Homo Sapiens
ucaugaauuaugugaauaauuuuuuaaagaaa

SEQ ID NO: 344111 - RNA, 32 nt, Homo Sapiens
cuuuuccccagcucugcccccaucguguuucu

SEQ ID NO: 344112 - RNA, 32 nt, Homo Sapiens
ggagaggagugggaaauugauuaaaggggcug

SEQ ID NO: 344113 - RNA, 32 nt, Homo Sapiens
gaaauugugcuccaaguguuuuccaagguucc

SEQ ID NO: 344114 - RNA, 32 nt, Homo Sapiens
gggaugcccugguggccucuccagggcugcuc

SEQ ID NO: 344115 - RNA, 32 nt, Homo Sapiens
uguauaggauaaaaaaucugauauaucaaacc

SEQ ID NO: 344116 - RNA, 32 nt, Homo Sapiens
uagggcaaggaccuaggcgucucuaagucuua

SEQ ID NO: 344117 - RNA, 32 nt, Homo Sapiens
uuuauuuuccacagcaaaauuacucuacuguu

SEQ ID NO: 344118 - RNA, 32 nt, Homo Sapiens
cagcagugacccccauggcacacaccugccaa

SEQ ID NO: 344119 - RNA, 32 nt, Homo Sapiens
ggguggguagggggcugcuugaguguggcccc

SEQ ID NO: 344120 - RNA, 28 nt, Homo Sapiens
cuguaggggcggccggcgagucccagug

SEQ ID NO: 344121 - RNA, 32 nt, Homo Sapiens
ugaguuccuuauaagaauuaaucuuaauuuug

SEQ ID NO: 344122 - RNA, 32 nt, Homo Sapiens
cguggguagaugggagugucgcuuguauguua

SEQ ID NO: 344123 - RNA, 32 nt, Homo Sapiens
ccgugggggagggacaugcuggcagcaggcgc

SEQ ID NO: 344124 - RNA, 32 nt, Homo Sapiens
ucucaccccacuucccaucuccagggaagcgu

SEQ ID NO: 344125 - RNA, 32 nt, Homo Sapiens
aaugaagaauuaggagaugaaaaaagacuuga

SEQ ID NO: 344126 - RNA, 32 nt, Homo Sapiens
ugaagccugauggccuggcucugugccucagu

SEQ ID NO: 344127 - RNA, 32 nt, Homo Sapiens
ugagaauaaacacaaguagacaugucaaaaaa

SEQ ID NO: 344128 - RNA, 32 nt, Homo Sapiens
caagguauaaaccaggucuguuuuuguaccag

SEQ ID NO: 344129 - RNA, 32 nt, Homo Sapiens
agcugggugugguggcucaugccuguaauccc

SEQ ID NO: 344130 - RNA, 32 nt, Homo Sapiens
ccggggccacgggcucagccgacgaccauggg

SEQ ID NO: 344131 - RNA, 32 nt, Homo Sapiens
cgcgcagcagucggcguccgccucccaguacc

SEQ ID NO: 344132 - RNA, 32 nt, Homo Sapiens
gccacuggaggcauuauaucaccaaauaaaaa

SEQ ID NO: 344133 - RNA, 32 nt, Homo Sapiens
gaguuucugcgcuuccuucucccucucuccag

SEQ ID NO: 344134 - RNA, 32 nt, Homo Sapiens
cuuugaaucugagggagggccaagcugccacu

SEQ ID NO: 344135 - RNA, 32 nt, Homo Sapiens
caggccagaaaaacugggaaaaucacaggcuc

SEQ ID NO: 344136 - RNA, 32 nt, Homo Sapiens
ccccaacucacagcaguagaaacugcuccauc

SEQ ID NO: 344137 - RNA, 32 nt, Homo Sapiens
ugcaccaccagacccgucucauuuuuucuauu

SEQ ID NO: 344138 - RNA, 32 nt, Homo Sapiens
ucuuuuaaagggguugguuugggauaggauga

SEQ ID NO: 344139 - RNA, 32 nt, Homo Sapiens
auuggcacuguggagauuaagaaaugugaggu

SEQ ID NO: 344140 - RNA, 32 nt, Homo Sapiens
agcagaacucaguauccagagcuuacaaggag

SEQ ID NO: 344141 - RNA, 32 nt, Homo Sapiens
ucccugcugauccagaaugucacgcaggagga

SEQ ID NO: 344142 - RNA, 31 nt, Homo Sapiens
ccugcagggugccaggcaggaguggucucag

SEQ ID NO: 344143 - RNA, 32 nt, Homo Sapiens
agaaacaccugccugcagugaaugggacugga

SEQ ID NO: 344144 - RNA, 32 nt, Homo Sapiens
ugucuggugugcuguaggcaucuggagaggga

SEQ ID NO: 344145 - RNA, 32 nt, Homo Sapiens
accccgcccuccccucucucauuuuucuuggu

SEQ ID NO: 344146 - RNA, 32 nt, Homo Sapiens
augagccaauucuccuucuuucucuuccugcu

SEQ ID NO: 344147 - RNA, 32 nt, Homo Sapiens
uccgaugggagaagaacaucacgcugggggag

SEQ ID NO: 344148 - RNA, 31 nt, Homo Sapiens
aggaugcagccccagaggcugguggcaguuu

SEQ ID NO: 344149 - RNA, 32 nt, Homo Sapiens
augcaaaaccugggaagcggagaccuacccca

SEQ ID NO: 344150 - RNA, 32 nt, Homo Sapiens
cagccucagucucucuuucguuuuccuuuucc

SEQ ID NO: 344151 - RNA, 32 nt, Homo Sapiens
gaccucugaaauaggaacaaucucuugaagag

SEQ ID NO: 344152 - RNA, 32 nt, Homo Sapiens
auuuugccuuggaaucaugauuacaauuuuuu

SEQ ID NO: 344153 - RNA, 32 nt, Homo Sapiens
acuaacgaacucccaagaggcaguaaacuuaa

SEQ ID NO: 344154 - RNA, 32 nt, Homo Sapiens
accagccuuuuggugugucuuuauguucauuu

SEQ ID NO: 344155 - RNA, 32 nt, Homo Sapiens
aacuuuuuucuaaggauaaacaucucuuccaa

SEQ ID NO: 344156 - RNA, 32 nt, Homo Sapiens
acucagcugaagaugaaucguugcagccucca

SEQ ID NO: 344157 - RNA, 32 nt, Homo Sapiens
ugcuuuuuacacaacucccuaagaguuauuuu

SEQ ID NO: 344158 - RNA, 31 nt, Homo Sapiens
gccuaaccaaggcugcugggaguccagcugg

SEQ ID NO: 344159 - RNA, 32 nt, Homo Sapiens
aaaggaguaaaauucuuuuuaccugauaagug

SEQ ID NO: 344160 - RNA, 32 nt, Homo Sapiens
gaaggacuaaaaauaucaacuuuugcuuuugg

SEQ ID NO: 344161 - RNA, 32 nt, Homo Sapiens
agaaaacaucuuuauauuaaaaacagaucuca

SEQ ID NO: 344162 - RNA, 32 nt, Homo Sapiens
acuguauuuuugccauuuauuuucauuuucua

SEQ ID NO: 344163 - RNA, 32 nt, Homo Sapiens
gguuccucaaaacaggccugagcgaugggcau

SEQ ID NO: 344164 - RNA, 30 nt, Homo Sapiens
aguucuuuaauaaaaguauuugaaaggcaa

SEQ ID NO: 344165 - RNA, 32 nt, Homo Sapiens
uccccuaguugcagacucaucaccaugguuac

SEQ ID NO: 344166 - RNA, 32 nt, Homo Sapiens
uuuuguggguuuucuuucuccuccuccaaccu

SEQ ID NO: 344167 - RNA, 32 nt, Homo Sapiens
guuucuaucauuucauuuucugcguuuccagc

SEQ ID NO: 344168 - RNA, 32 nt, Homo Sapiens
aaaaauuauuuuuugauuuuugcauuaagugg

SEQ ID NO: 344169 - RNA, 32 nt, Homo Sapiens
ucgcccggccccagccccucugguugauaaac

SEQ ID NO: 344170 - RNA, 32 nt, Homo Sapiens
uagauggaaaauuguauuucaaguaaauauau

SEQ ID NO: 344171 - RNA, 32 nt, Homo Sapiens
cacauaucucaaccggccuccuccuccucccc

SEQ ID NO: 344172 - RNA, 32 nt, Homo Sapiens
aaacgcccauguugaacaaaauggugacaauu

SEQ ID NO: 344173 - RNA, 32 nt, Homo Sapiens
ccacccuuuccugcggcaccaccacccuuuuu

SEQ ID NO: 344174 - RNA, 32 nt, Homo Sapiens
gggagaggcuggcccagcugcagacugcuuag

SEQ ID NO: 344175 - RNA, 32 nt, Homo Sapiens
auuuuuauaaggcuuuuuuauaauagcuucuu

SEQ ID NO: 344176 - RNA, 32 nt, Homo Sapiens
agggcacugagggguggcgcgcggccaggagc

SEQ ID NO: 344177 - RNA, 32 nt, Homo Sapiens
guagauauguaaaaagauuccuuuuucuaacc

SEQ ID NO: 344178 - RNA, 32 nt, Homo Sapiens
aagauauugaaaauauaaugaaauaaaagcau

SEQ ID NO: 344179 - RNA, 32 nt, Homo Sapiens
gcucuacaauugaaugagcucaccauggauga

SEQ ID NO: 344180 - RNA, 32 nt, Homo Sapiens
aaagaguaagguugaagugcuggaacaugcuc

SEQ ID NO: 344181 - RNA, 32 nt, Homo Sapiens
cucaaguauuaagagcacauauuuuugaccca

SEQ ID NO: 344182 - RNA, 32 nt, Homo Sapiens
ucuaagguuuaaucugaccaagaaauuggaau

SEQ ID NO: 344183 - RNA, 32 nt, Homo Sapiens
uaguaugaaaauagaugcuagaaaucacccuc

SEQ ID NO: 344184 - RNA, 32 nt, Homo Sapiens
gcgggcgcgggcggggagcgugcguccguucg

SEQ ID NO: 344185 - RNA, 32 nt, Homo Sapiens
ggcagaccuaggaaacaaauacagaggaucac

SEQ ID NO: 344186 - RNA, 32 nt, Homo Sapiens
uugucuguguguauauuguuugaucaggguac

SEQ ID NO: 344187 - RNA, 32 nt, Homo Sapiens
cucuggaccuuggagggaccaacuuccguaug

SEQ ID NO: 344188 - RNA, 32 nt, Homo Sapiens
cauccaugggccgcccucggagagaggcuugu

SEQ ID NO: 344189 - RNA, 32 nt, Homo Sapiens
aaaagcaccucuugaagaacugacuuccugaa

SEQ ID NO: 344190 - RNA, 32 nt, Homo Sapiens
caaauccuguucuccuuggccacucacccacu

SEQ ID NO: 344191 - RNA, 32 nt, Homo Sapiens
cuuaaccugccacgggagggggcccccaaacu

SEQ ID NO: 344192 - RNA, 32 nt, Homo Sapiens
aggaggccgcagccuuccaucaccggaucagu

SEQ ID NO: 344193 - RNA, 32 nt, Homo Sapiens
caguguuagaggaggagaugggagcggugacu

SEQ ID NO: 344194 - RNA, 32 nt, Homo Sapiens
gcaaagcuggggauguuagccuaugacuguca

SEQ ID NO: 344195 - RNA, 29 nt, Homo Sapiens
caaaggauggggggugcuauaaaagaagc

SEQ ID NO: 344196 - RNA, 32 nt, Homo Sapiens
ccaggaccccacagaacagccaaugcagggaa

SEQ ID NO: 344197 - RNA, 32 nt, Homo Sapiens
acauccaggaggaggaggagagaccuguagaa

SEQ ID NO: 344198 - RNA, 32 nt, Homo Sapiens
ucacgagcugcccacgucgucuccaggaaggg

SEQ ID NO: 344199 - RNA, 32 nt, Homo Sapiens
uuuuuauuuuuggggggaaugacauguuuggg

SEQ ID NO: 344200 - RNA, 31 nt, Homo Sapiens
cgcucugcaaggugcguggugcggcacucaa

SEQ ID NO: 344201 - RNA, 32 nt, Homo Sapiens
acauggaaaccuggucuaaagauguccaaagu

SEQ ID NO: 344202 - RNA, 32 nt, Homo Sapiens
ugacugcugggcucugggucuccccgcagcgc

SEQ ID NO: 344203 - RNA, 32 nt, Homo Sapiens
agguuguccuccgauuuuuagaugaguuuccu

SEQ ID NO: 344204 - RNA, 32 nt, Homo Sapiens
ucauuccauauguuuugcuuuacaauugcuau

SEQ ID NO: 344205 - RNA, 30 nt, Homo Sapiens
ggccaggcagguggcacguggcaucgcaug

SEQ ID NO: 344206 - RNA, 32 nt, Homo Sapiens
agaacauuuuuccuuuucaggaaaacggaggu

SEQ ID NO: 344207 - RNA, 32 nt, Homo Sapiens
augucagaaaaacaauaagagcguuugcccaa

SEQ ID NO: 344208 - RNA, 32 nt, Homo Sapiens
gccuggcccaggcucacccccaccuugggccu

SEQ ID NO: 344209 - RNA, 32 nt, Homo Sapiens
gauugcuugggguugaaauaagcugucucuuc

SEQ ID NO: 344210 - RNA, 32 nt, Homo Sapiens
agcucgucaaguugccguggcgcggagaacuc

SEQ ID NO: 344211 - RNA, 32 nt, Homo Sapiens
gcucccuuguuuucuuuuugugaucauguugc

SEQ ID NO: 344212 - RNA, 32 nt, Homo Sapiens
cugggcccaagccccuugucccuucuccacug

SEQ ID NO: 344213 - RNA, 32 nt, Homo Sapiens
cagagaucgcagugaguugagauuguaccacu

SEQ ID NO: 344214 - RNA, 32 nt, Homo Sapiens
cuacucuggaggcccuugaggaccacuugagc

SEQ ID NO: 344215 - RNA, 29 nt, Homo Sapiens
cagccugggggacagagagacuccgucuc

SEQ ID NO: 344216 - RNA, 32 nt, Homo Sapiens
gcagagagccccagccacgccggcccaggugg

SEQ ID NO: 344217 - RNA, 32 nt, Homo Sapiens
acaaguggcagggaucaguucucugacaacag

SEQ ID NO: 344218 - RNA, 30 nt, Homo Sapiens
uuccugcaccugaggccgccggccagccgc

SEQ ID NO: 344219 - RNA, 32 nt, Homo Sapiens
ccuaaggccucucugccgcgcgcgcagguacg

SEQ ID NO: 344220 - RNA, 32 nt, Homo Sapiens
caugaucucaguuuaugcaacuucugccuccc

SEQ ID NO: 344221 - RNA, 32 nt, Homo Sapiens
gcccuugccccgaggcugcacuaccacaggaa

SEQ ID NO: 344222 - RNA, 32 nt, Homo Sapiens
cacuauauuaauuuauauuacauguuucauau

SEQ ID NO: 344223 - RNA, 30 nt, Homo Sapiens
cguacugucuguguccuuguauaaggagcu

SEQ ID NO: 344224 - RNA, 32 nt, Homo Sapiens
cucccacucgcucguccuuauccaccacgcua

SEQ ID NO: 344225 - RNA, 32 nt, Homo Sapiens
uccagcagucagucccugguuccuagaugugu

SEQ ID NO: 344226 - RNA, 32 nt, Homo Sapiens
cuucaggaugcucaucaaggaauaccacauuc

SEQ ID NO: 344227 - RNA, 32 nt, Homo Sapiens
augcuauuccaagagaaggauaugcugaggga

SEQ ID NO: 344228 - RNA, 32 nt, Homo Sapiens
aaauaugucccauugauaugcaugucuauaga

SEQ ID NO: 344229 - RNA, 32 nt, Homo Sapiens
caauuaauuacauuguggaagauuauuuuuua

SEQ ID NO: 344230 - RNA, 32 nt, Homo Sapiens
ugcucuuggggaugucagugaggcugggagca

SEQ ID NO: 344231 - RNA, 30 nt, Homo Sapiens
cugguggggcccgugccaggggggcccagg

SEQ ID NO: 344232 - RNA, 32 nt, Homo Sapiens
uuacucaauuccuguacccccauuguaucuug

SEQ ID NO: 344233 - RNA, 32 nt, Homo Sapiens
uuuugcuuuucuccugugcaccuggcgaggcu

SEQ ID NO: 344234 - RNA, 32 nt, Homo Sapiens
ggaccuaguuuauuauuugguuauugauaaag

SEQ ID NO: 344235 - RNA, 32 nt, Homo Sapiens
ccuugggcguccccaccugccuggaucugaau

SEQ ID NO: 344236 - RNA, 32 nt, Homo Sapiens
acacuaaacaacagauuuuaaauguagauaaa

SEQ ID NO: 344237 - RNA, 32 nt, Homo Sapiens
aagugaaagggagugaggcggcguggacgagu

SEQ ID NO: 344238 - RNA, 32 nt, Homo Sapiens
agcccugggcggccguaucaucaggugcuccu

SEQ ID NO: 344239 - RNA, 32 nt, Homo Sapiens
aauauuuggccauuauucuauucaacagguuu

SEQ ID NO: 344240 - RNA, 32 nt, Homo Sapiens
acuucccuggagcuaccacguaucuagcuaau

SEQ ID NO: 344241 - RNA, 32 nt, Homo Sapiens
uuuccuugcaucugagggcagacgcugcuacc

SEQ ID NO: 344242 - RNA, 32 nt, Homo Sapiens
uacccuacugcccgcugcguccugcuggaggu

SEQ ID NO: 344243 - RNA, 32 nt, Homo Sapiens
gcacugggguuuggggggagggggguggccaa

SEQ ID NO: 344244 - RNA, 32 nt, Homo Sapiens
ugcugcagcuggagccacugcacacucagaac

SEQ ID NO: 344245 - RNA, 32 nt, Homo Sapiens
caagguuuuuucaaagggaugcacuaauuuuc

SEQ ID NO: 344246 - RNA, 32 nt, Homo Sapiens
ggacaggagacggcccugcugcggacggagcg

SEQ ID NO: 344247 - RNA, 32 nt, Homo Sapiens
gguguauauugcaaauguuuaucauuugucuu

SEQ ID NO: 344248 - RNA, 32 nt, Homo Sapiens
agacugcaagauuguuuguucagauguaggcc

SEQ ID NO: 344249 - RNA, 32 nt, Homo Sapiens
ccuccucuucucagagaccucccuuuccaagc

SEQ ID NO: 344250 - RNA, 32 nt, Homo Sapiens
auaguuuacuucagcucuuaauccccgaggag

SEQ ID NO: 344251 - RNA, 32 nt, Homo Sapiens
agcggacguuuacgucgaaucucucguuuggg

SEQ ID NO: 344252 - RNA, 32 nt, Homo Sapiens
uaagauucuguauuuggcauuuagacuaacuu

SEQ ID NO: 344253 - RNA, 32 nt, Homo Sapiens
ggcccacccugucugcaggugaaacaggaggg

SEQ ID NO: 344254 - RNA, 32 nt, Homo Sapiens
cccuucccacccacagaaaccaggagacaggg

SEQ ID NO: 344255 - RNA, 32 nt, Homo Sapiens
gaaucaugauauacucuuccauuuguuguguc

SEQ ID NO: 344256 - RNA, 30 nt, Homo Sapiens
caggaacccugguggacgggucccagcagg

SEQ ID NO: 344257 - RNA, 32 nt, Homo Sapiens
gccaugaacaugccacaugccagcaaagagaa

SEQ ID NO: 344258 - RNA, 32 nt, Homo Sapiens
cauugguucuuccuuucccuggagcugagguu

SEQ ID NO: 344259 - RNA, 32 nt, Homo Sapiens
uaccaaagccccuaccugcugcugggucccuu

SEQ ID NO: 344260 - RNA, 32 nt, Homo Sapiens
gaaagcuuucuuacaugguuauaagcccucag

SEQ ID NO: 344261 - RNA, 32 nt, Homo Sapiens
ugagucgaggggagggcgacugcgacgugguu

SEQ ID NO: 344262 - RNA, 32 nt, Homo Sapiens
ccuuugaauuaccuaaaauauuguuuaccaaa

SEQ ID NO: 344263 - RNA, 32 nt, Homo Sapiens
gugcugcccuuaugcccggcgccgggcaccaa

SEQ ID NO: 344264 - RNA, 32 nt, Homo Sapiens
ccaacugucugcugaaagaaaaagaagauauc

SEQ ID NO: 344265 - RNA, 32 nt, Homo Sapiens
gggauccggguggcugcaggcugcuggcuucu

SEQ ID NO: 344266 - RNA, 32 nt, Homo Sapiens
uuuucaaucuucaggcuucauuccuucccaag

SEQ ID NO: 344267 - RNA, 32 nt, Homo Sapiens
uuauggaacuguagucguggagguacuauagu

SEQ ID NO: 344268 - RNA, 32 nt, Homo Sapiens
guccagccaaacaggaaugacaauggccaaag

SEQ ID NO: 344269 - RNA, 32 nt, Homo Sapiens
gguucaagaucacugggaccaggccgugaucu

SEQ ID NO: 344270 - RNA, 32 nt, Homo Sapiens
uuucuguuaguagauuuauuuauaaacaccac

SEQ ID NO: 344271 - RNA, 32 nt, Homo Sapiens
ugcgaucgccgcggccggggcugcgaaccgaa

SEQ ID NO: 344272 - RNA, 32 nt, Homo Sapiens
cuaauuccaaauaggaguaauuguacugcaau

SEQ ID NO: 344273 - RNA, 32 nt, Homo Sapiens
uucucgcgcuccugcuccggcuccuccaucuu

SEQ ID NO: 344274 - RNA, 32 nt, Homo Sapiens
cuaaacugccccaccuccuaaccuaaucccca

SEQ ID NO: 344275 - RNA, 32 nt, Homo Sapiens
cccgccucaauccuaaaagcaugucaacaauc

SEQ ID NO: 344276 - RNA, 31 nt, Homo Sapiens
cagccuuugugcuuuuaagagugggcuggga

SEQ ID NO: 344277 - RNA, 32 nt, Homo Sapiens
gcaccugaguuguacauuuuugaagugugcag

SEQ ID NO: 344278 - RNA, 32 nt, Homo Sapiens
cucucucgcgcccaguccuccucccugguucu

SEQ ID NO: 344279 - RNA, 32 nt, Homo Sapiens
auauggauguguauuucuugcuaaaaugacag

SEQ ID NO: 344280 - RNA, 32 nt, Homo Sapiens
uaucagcuaccuacuacgcagcuucagcgcca

SEQ ID NO: 344281 - RNA, 32 nt, Homo Sapiens
cauuuaagugggugcucagccuuuuucauaau

SEQ ID NO: 344282 - RNA, 32 nt, Homo Sapiens
ugcuuggagagccaucugguccgucauuguga

SEQ ID NO: 344283 - RNA, 32 nt, Homo Sapiens
agcggccggugggcccucguccugucaguggc

SEQ ID NO: 344284 - RNA, 32 nt, Homo Sapiens
ggcuggugccugcacauggaacagucauugau

SEQ ID NO: 344285 - RNA, 32 nt, Homo Sapiens
ccacaccccccgcaccccuccguucuuucugc

SEQ ID NO: 344286 - RNA, 32 nt, Homo Sapiens
cauauaccauauuuuaauucuguuauagaggg

SEQ ID NO: 344287 - RNA, 32 nt, Homo Sapiens
ggaaggggccaagcugcagacacacacaguca

SEQ ID NO: 344288 - RNA, 32 nt, Homo Sapiens
gacgcccgcccggauugcuccccgagccccgg

SEQ ID NO: 344289 - RNA, 32 nt, Homo Sapiens
ccagggcagacacauuccucucagaagcccgu

SEQ ID NO: 344290 - RNA, 32 nt, Homo Sapiens
ucacugauuucugaaucauguucuacuugcuu

SEQ ID NO: 344291 - RNA, 32 nt, Homo Sapiens
aaaguauauucugauucgguguguguauaagg

SEQ ID NO: 344292 - RNA, 32 nt, Homo Sapiens
ugaaugggacgccuggggcuuucagggcaggc

SEQ ID NO: 344293 - RNA, 32 nt, Homo Sapiens
cguccuccccccacccccuucuuucaguggua

SEQ ID NO: 344294 - RNA, 32 nt, Homo Sapiens
guaauuauaaauauauaaauagauaagagccu

SEQ ID NO: 344295 - RNA, 32 nt, Homo Sapiens
auaaaaaugcaaacguacuagaccaguggaga

SEQ ID NO: 344296 - RNA, 32 nt, Homo Sapiens
ugaauaaucaagugcuaaaacaaaaucaggug

SEQ ID NO: 344297 - RNA, 32 nt, Homo Sapiens
ucggggaguauuuggguccggggucucaggga

SEQ ID NO: 344298 - RNA, 32 nt, Homo Sapiens
aggacgcggaucaggccuccccgcaacccggc

SEQ ID NO: 344299 - RNA, 32 nt, Homo Sapiens
auucauguuuuaccagucauuguuauauuaca

SEQ ID NO: 344300 - RNA, 32 nt, Homo Sapiens
gaggggguucuuccucaccuuguaaccagugc

SEQ ID NO: 344301 - RNA, 32 nt, Homo Sapiens
acuguccugucccagacuuuggcaccgucggg

SEQ ID NO: 344302 - RNA, 32 nt, Homo Sapiens
cagugccaaugucagacugugcuccucccucu

SEQ ID NO: 344303 - RNA, 32 nt, Homo Sapiens
uaucucagcucuuuuuggaagcuuauguccuc

SEQ ID NO: 344304 - RNA, 32 nt, Homo Sapiens
acgauguguuuguuccagugauacugaaagua

SEQ ID NO: 344305 - RNA, 32 nt, Homo Sapiens
cauuucgcacuaaaccauuggagggccaagcg

SEQ ID NO: 344306 - RNA, 32 nt, Homo Sapiens
uaacccauauaaggauaaaauaauaccauuga

SEQ ID NO: 344307 - RNA, 32 nt, Homo Sapiens
cugucucucugucuccugcacucucguuacua

SEQ ID NO: 344308 - RNA, 32 nt, Homo Sapiens
uacugguaagacuguuugacuaaucauacagg

SEQ ID NO: 344309 - RNA, 32 nt, Homo Sapiens
agcggcuccgcggcgggagcugagcggaaggc

SEQ ID NO: 344310 - RNA, 32 nt, Homo Sapiens
auuuugaauaguuuuuuguaaguagugcuuuu

SEQ ID NO: 344311 - RNA, 32 nt, Homo Sapiens
ugugaggaaggguucgggcagcuccuccugcu

SEQ ID NO: 344312 - RNA, 32 nt, Homo Sapiens
cuuggcccuauuaagauaaauacaguuccaaa

SEQ ID NO: 344313 - RNA, 32 nt, Homo Sapiens
ugggagggccugugggggcccuggacagucac

SEQ ID NO: 344314 - RNA, 32 nt, Homo Sapiens
ucugucccuggccagcuauuguucuuccacuu

SEQ ID NO: 344315 - RNA, 32 nt, Homo Sapiens
aagauuuaaauccuuuuaaaucuugauaccac

SEQ ID NO: 344316 - RNA, 32 nt, Homo Sapiens
uacauuuuaugaauaacuuuuguuaugaauau

SEQ ID NO: 344317 - RNA, 32 nt, Homo Sapiens
auaggcuugguggagaugcugcaccgcugcaa

SEQ ID NO: 344318 - RNA, 32 nt, Homo Sapiens
uccgggaucuggcuuccgcgggccgccgccgg

SEQ ID NO: 344319 - RNA, 32 nt, Homo Sapiens
agcccugugaauguuaacaaauguggaaaagc

SEQ ID NO: 344320 - RNA, 32 nt, Homo Sapiens
aggggcugggagagggguuugacggaauggag

SEQ ID NO: 344321 - RNA, 32 nt, Homo Sapiens
aucuaggggaaaacagaaguaugaggauugag

SEQ ID NO: 344322 - RNA, 32 nt, Homo Sapiens
agguucccccaccucaucuacucuguuccugc

SEQ ID NO: 344323 - RNA, 32 nt, Homo Sapiens
gagcagcgcggccgcgcggacccggcaaggcu

SEQ ID NO: 344324 - RNA, 29 nt, Homo Sapiens
caaaaugucaccauuccuguaccugguuc

SEQ ID NO: 344325 - RNA, 32 nt, Homo Sapiens
augggaaggugaggugucucccugccccccuc

SEQ ID NO: 344326 - RNA, 28 nt, Homo Sapiens
aagcgaguuacaggucguagcagauuca

SEQ ID NO: 344327 - RNA, 32 nt, Homo Sapiens
uuuauuuuaaaauaaaauauuuuaaaaucuac

SEQ ID NO: 344328 - RNA, 31 nt, Homo Sapiens
caaccgagggcggcccuuggcggcaacaugc

SEQ ID NO: 344329 - RNA, 32 nt, Homo Sapiens
aagcaccaacccaguucucaguuaccuccucu

SEQ ID NO: 344330 - RNA, 32 nt, Homo Sapiens
cuaagaggcuucugaggucauguguucaccau

SEQ ID NO: 344331 - RNA, 32 nt, Homo Sapiens
gcaagcaucucuucuuuuuuccaccucgccuu

SEQ ID NO: 344332 - RNA, 30 nt, Homo Sapiens
ucccaggcgcccgucaagcaggccucugag

SEQ ID NO: 344333 - RNA, 32 nt, Homo Sapiens
aagggcagacuacaauaaaaggauauaaaagg

SEQ ID NO: 344334 - RNA, 32 nt, Homo Sapiens
uaggcccucacaggaggccaccuucgcuagca

SEQ ID NO: 344335 - RNA, 27 nt, Homo Sapiens
cuggcuuuucuuuucagccccugacag

SEQ ID NO: 344336 - RNA, 32 nt, Homo Sapiens
ccacagccaaaauauucauaauguggaauuug

SEQ ID NO: 344337 - RNA, 32 nt, Homo Sapiens
gaugucaaauauauuucucuuucagggucaug

SEQ ID NO: 344338 - RNA, 32 nt, Homo Sapiens
ccccaucuccgccgcuauuaccacugaacccg

SEQ ID NO: 344339 - RNA, 32 nt, Homo Sapiens
aggagccacagcacaucaugcacuggggccau

SEQ ID NO: 344340 - RNA, 32 nt, Homo Sapiens
gagcaaggagaugcagcuguauuguguaacaa

SEQ ID NO: 344341 - RNA, 32 nt, Homo Sapiens
uuggccccucagcgcucgcgucuuuuccggca

SEQ ID NO: 344342 - RNA, 32 nt, Homo Sapiens
ucauguugccuucaggaucaagccauccagga

SEQ ID NO: 344343 - RNA, 32 nt, Homo Sapiens
uuuuucuaaaagaaagaaaaaaggaaacccga

SEQ ID NO: 344344 - RNA, 32 nt, Homo Sapiens
gggaggcagcuaggaggcccagcaggggggcu

SEQ ID NO: 344345 - RNA, 32 nt, Homo Sapiens
uuguuauugcugucucaacauuuacuacagcu

SEQ ID NO: 344346 - RNA, 30 nt, Homo Sapiens
gcggccggaggcggcggcgggaacggccau

SEQ ID NO: 344347 - RNA, 32 nt, Homo Sapiens
uuugcuaagcuggcagaaagauugcauaguca

SEQ ID NO: 344348 - RNA, 32 nt, Homo Sapiens
augggaauuugcuguugcacaauuugagaacc

SEQ ID NO: 344349 - RNA, 32 nt, Homo Sapiens
ccucgggcaccugagagagauguuuugcggcg

SEQ ID NO: 344350 - RNA, 32 nt, Homo Sapiens
cuuggccaggccauccuguugcagaucccagu

SEQ ID NO: 344351 - RNA, 32 nt, Homo Sapiens
ugugauugacaguagcuguagguuaccagacg

SEQ ID NO: 344352 - RNA, 32 nt, Homo Sapiens
aauuagcagcucucuuuuuuuuuuuuuuuuug

SEQ ID NO: 344353 - RNA, 32 nt, Homo Sapiens
uccuuauuucugagugaagaugaugauguugg

SEQ ID NO: 344354 - RNA, 32 nt, Homo Sapiens
guauguugccgcugcguugagguuuagaaaca

SEQ ID NO: 344355 - RNA, 32 nt, Homo Sapiens
gugggaacauggacuccacuuugucagagcuu

SEQ ID NO: 344356 - RNA, 32 nt, Homo Sapiens
cacugcagccucagcccaggagccaccagauc

SEQ ID NO: 344357 - RNA, 32 nt, Homo Sapiens
uucucgucccgcagcguccgcucccccgcgcc

SEQ ID NO: 344358 - RNA, 32 nt, Homo Sapiens
uucuugaacuguaaaguggagaugauguaaac

SEQ ID NO: 344359 - RNA, 32 nt, Homo Sapiens
cagcugccgcagccggccccagucaccaucac

SEQ ID NO: 344360 - RNA, 32 nt, Homo Sapiens
acugcuggaugaaucugaaaagacauuaaguu

SEQ ID NO: 344361 - RNA, 32 nt, Homo Sapiens
ggcugcugcauuucccccacccuaacagguca

SEQ ID NO: 344362 - RNA, 32 nt, Homo Sapiens
cuggucaggcugccuccuuaaucgagaaaacu

SEQ ID NO: 344363 - RNA, 32 nt, Homo Sapiens
uugagaccagcaugaaggucgaagcucacacc

SEQ ID NO: 344364 - RNA, 32 nt, Homo Sapiens
ugagcaguauuuccgagacgagaguggccuga

SEQ ID NO: 344365 - RNA, 32 nt, Homo Sapiens
uuucuaaggcaucuuaauagacuucuguugaa

SEQ ID NO: 344366 - RNA, 32 nt, Homo Sapiens
uaguacaugggcuuagugaccacaaaauauuu

SEQ ID NO: 344367 - RNA, 32 nt, Homo Sapiens
ucagugcacuaaguuacauuugccauauuucu

SEQ ID NO: 344368 - RNA, 32 nt, Homo Sapiens
cauggggagcccagcccccaccccccaccucc

SEQ ID NO: 344369 - RNA, 32 nt, Homo Sapiens
ccgaccuucgggcuuuccagugugcucagaaa

SEQ ID NO: 344370 - RNA, 32 nt, Homo Sapiens
uccuguugcugagacucgggguaccguucugc

SEQ ID NO: 344371 - RNA, 32 nt, Homo Sapiens
uguauuuugcuuaauggaaugcuuuauuuaag

SEQ ID NO: 344372 - RNA, 29 nt, Homo Sapiens
uccccuaauggugugucuauaauuguuaa

SEQ ID NO: 344373 - RNA, 32 nt, Homo Sapiens
caggccaccgcagaccaccuccccccagccug

SEQ ID NO: 344374 - RNA, 32 nt, Homo Sapiens
uucagucaaauuagaugcuccuuuguucuggu

SEQ ID NO: 344375 - RNA, 32 nt, Homo Sapiens
uguuuuuuccacucacuagccagcuuacaguu

SEQ ID NO: 344376 - RNA, 32 nt, Homo Sapiens
uaauuguguuuguccguccaugccaugaauga

SEQ ID NO: 344377 - RNA, 32 nt, Homo Sapiens
gcuaagccgcuucauucaugccuacacaauuu

SEQ ID NO: 344378 - RNA, 32 nt, Homo Sapiens
cugugggggguggccgggcgccagcucccagg

SEQ ID NO: 344379 - RNA, 32 nt, Homo Sapiens
aaaacacacacacacacacacacacacacaca

SEQ ID NO: 344380 - RNA, 32 nt, Homo Sapiens
cucggcuuggaccgcgauggggcugggcccug

SEQ ID NO: 344381 - RNA, 32 nt, Homo Sapiens
uguaaaaauggcauggugacucuuacaaucau

SEQ ID NO: 344382 - RNA, 32 nt, Homo Sapiens
aacacauaaaaagaaaguucagcaaaugcagg

SEQ ID NO: 344383 - RNA, 32 nt, Homo Sapiens
ccggagcccgcaccacagcccggccggucuag

SEQ ID NO: 344384 - RNA, 32 nt, Homo Sapiens
uuuaaaacaaacaaacaaaaaagccauagaga

SEQ ID NO: 344385 - RNA, 32 nt, Homo Sapiens
gacccagccagacuuugcccugacggaguggc

SEQ ID NO: 344386 - RNA, 32 nt, Homo Sapiens
ccugcugccccugcugccucagcccucaggcu

SEQ ID NO: 344387 - RNA, 32 nt, Homo Sapiens
uaguucugauuggauuucguuccuccugagga

SEQ ID NO: 344388 - RNA, 32 nt, Homo Sapiens
ccagugagacugccccacggagacagaggaaa

SEQ ID NO: 344389 - RNA, 32 nt, Homo Sapiens
cagggcuuaggacuugguuuguuauaucaggg

SEQ ID NO: 344390 - RNA, 31 nt, Homo Sapiens
guugggaggccauggaaccaggauuagaccc

SEQ ID NO: 344391 - RNA, 32 nt, Homo Sapiens
uccucaugucagcagaguggcgccugccugug

SEQ ID NO: 344392 - RNA, 32 nt, Homo Sapiens
caaagagggauuacaaggucaaagagcaugaa

SEQ ID NO: 344393 - RNA, 32 nt, Homo Sapiens
cgcucgcguccgccgggcaguccccugccgca

SEQ ID NO: 344394 - RNA, 32 nt, Homo Sapiens
acacccuaacucuccuuccuuggcucaaacaa

SEQ ID NO: 344395 - RNA, 32 nt, Homo Sapiens
uacagauaucuuaauaaaaauuuuauagugug

SEQ ID NO: 344396 - RNA, 32 nt, Homo Sapiens
uuucccugguaguguagcuguguggcuuuccu

SEQ ID NO: 344397 - RNA, 32 nt, Homo Sapiens
ucuucuguuuauuuucugagacuccuacagga

SEQ ID NO: 344398 - RNA, 32 nt, Homo Sapiens
uuaugcucaauccauguucuauuucagugcca

SEQ ID NO: 344399 - RNA, 32 nt, Homo Sapiens
ccugaaccuccagcuaaaccacuuccagauuc

SEQ ID NO: 344400 - RNA, 32 nt, Homo Sapiens
uucuuguaaaagaccaagcaaaugcacucugc

SEQ ID NO: 344401 - RNA, 32 nt, Homo Sapiens
uccgcggcccaggcuccuggugugucugcagu

SEQ ID NO: 344402 - RNA, 32 nt, Homo Sapiens
ugcuaaauacucagggagauggauuugcucgu

SEQ ID NO: 344403 - RNA, 32 nt, Homo Sapiens
cagaggauggauaaaaaugguuuguuauguuu

SEQ ID NO: 344404 - RNA, 32 nt, Homo Sapiens
agccuucuugucagaagugcugcuccuaaaaa

SEQ ID NO: 344405 - RNA, 32 nt, Homo Sapiens
uaugaguuuugauagcucuauaaaauguuuug

SEQ ID NO: 344406 - RNA, 32 nt, Homo Sapiens
aggcucugcucgcgccagcucgcucccgcagc

SEQ ID NO: 344407 - RNA, 32 nt, Homo Sapiens
agguggaggaggcggcggcggcggcggaagag

SEQ ID NO: 344408 - RNA, 32 nt, Homo Sapiens
ggccacugccagcagcuguuucuggaaauggc

SEQ ID NO: 344409 - RNA, 32 nt, Homo Sapiens
auauacuugcgcgccgacgccgccgcucgcuu

SEQ ID NO: 344410 - RNA, 32 nt, Homo Sapiens
ccaggugaaggcucaaggguggauccagcucg

SEQ ID NO: 344411 - RNA, 32 nt, Homo Sapiens
gacccgggccgcgugugagcgcgcuuugcacc

SEQ ID NO: 344412 - RNA, 32 nt, Homo Sapiens
uuuuaaaacuguaaauuacaucugaaggcuau

SEQ ID NO: 344413 - RNA, 32 nt, Homo Sapiens
gaggcuaggacuggaggccgccaggcaggcgu

SEQ ID NO: 344414 - RNA, 32 nt, Homo Sapiens
uuaauauaaaaugauuaccucugguguugaca

SEQ ID NO: 344415 - RNA, 32 nt, Homo Sapiens
ugccccaggugugguucaaaauaaaaacacaa

SEQ ID NO: 344416 - RNA, 32 nt, Homo Sapiens
uccuguuggccaucauaaccccaguacucagu

SEQ ID NO: 344417 - RNA, 32 nt, Homo Sapiens
gcgccccuuccaccuuuccccgagagccgucg

SEQ ID NO: 344418 - RNA, 32 nt, Homo Sapiens
ggggcuuccuuccuuucagauauuggugcuaa

SEQ ID NO: 344419 - RNA, 31 nt, Homo Sapiens
uuuuccaucugugugcaacuaacugacucug

SEQ ID NO: 344420 - RNA, 32 nt, Homo Sapiens
uuguuuuugucaagcauauucacuuuccuccu

SEQ ID NO: 344421 - RNA, 32 nt, Homo Sapiens
aacuuuggcaguuucaaugucugucucuguug

SEQ ID NO: 344422 - RNA, 32 nt, Homo Sapiens
acaucguuuacuuuuuaacuggcuucauuuua

SEQ ID NO: 344423 - RNA, 32 nt, Homo Sapiens
guugugauuuugucugcuuaguaucucaucaa

SEQ ID NO: 344424 - RNA, 32 nt, Homo Sapiens
gcucaucccgcaccaccccacccuccacacac

SEQ ID NO: 344425 - RNA, 32 nt, Homo Sapiens
aggcagagaaagugaagaccaaguccagaacu

SEQ ID NO: 344426 - RNA, 32 nt, Homo Sapiens
ccuacccugccagccacgacguuuccucuuuc

SEQ ID NO: 344427 - RNA, 32 nt, Homo Sapiens
aaacuuucucaagucggccucuccaugcccag

SEQ ID NO: 344428 - RNA, 26 nt, Homo Sapiens
aaagugaaauaaaaauuuuaucaguu

SEQ ID NO: 344429 - RNA, 32 nt, Homo Sapiens
caaaguauuuaaaaggagaguauuuaaaucau

SEQ ID NO: 344430 - RNA, 32 nt, Homo Sapiens
uacagagaucgcccuuugcccccuccccuccc

SEQ ID NO: 344431 - RNA, 32 nt, Homo Sapiens
uguuuugguuuggggcagcugucaccagcuaa

SEQ ID NO: 344432 - RNA, 32 nt, Homo Sapiens
gggccgggacgcggccgccgagcguagguucc

SEQ ID NO: 344433 - RNA, 32 nt, Homo Sapiens
cgccaauaugcagcucuuuguccgcgcccagg

SEQ ID NO: 344434 - RNA, 32 nt, Homo Sapiens
aggucaagggauggcauugaaaaaauauauuu

SEQ ID NO: 344435 - RNA, 32 nt, Homo Sapiens
uuugaauauuccaaguaguauauggacagucc

SEQ ID NO: 344436 - RNA, 32 nt, Homo Sapiens
agccaguggggaauccuuuuccccucagccac

SEQ ID NO: 344437 - RNA, 32 nt, Homo Sapiens
agaggaaaaaaaggaauuuaugcuguacauuu

SEQ ID NO: 344438 - RNA, 32 nt, Homo Sapiens
caaagaucuguuccuuuauuggguuuccagaa

SEQ ID NO: 344439 - RNA, 32 nt, Homo Sapiens
uccccguuccugucacauuuccccagccccac

SEQ ID NO: 344440 - RNA, 32 nt, Homo Sapiens
aagguuccuggaggagggaagagaggacaaga

SEQ ID NO: 344441 - RNA, 32 nt, Homo Sapiens
cuccucaggggaggaaagagagauccaguaug

SEQ ID NO: 344442 - RNA, 32 nt, Homo Sapiens
uggagagguggcagaggcagggccauaccauc

SEQ ID NO: 344443 - RNA, 32 nt, Homo Sapiens
agccuguuauuuaaauucuaauauaugaauua

SEQ ID NO: 344444 - RNA, 32 nt, Homo Sapiens
uuggacugagggugggaucgcagcuccgaaga

SEQ ID NO: 344445 - RNA, 31 nt, Homo Sapiens
ugcuugacggcgguguggcggaggccccgcc

SEQ ID NO: 344446 - RNA, 32 nt, Homo Sapiens
gcaacagaccaagaacaaaaccaccugaguau

SEQ ID NO: 344447 - RNA, 32 nt, Homo Sapiens
ucgccccgccggggaacggugaagugcuucuu

SEQ ID NO: 344448 - RNA, 32 nt, Homo Sapiens
augaggaaacacacuggaggccuugguguguc

SEQ ID NO: 344449 - RNA, 32 nt, Homo Sapiens
aggcaggaagcagcccugggggacuggacgcu

SEQ ID NO: 344450 - RNA, 32 nt, Homo Sapiens
aacagggcuccuccuccccacccagggcccug

SEQ ID NO: 344451 - RNA, 32 nt, Homo Sapiens
guccugacuuccuggaggagaaguauuccugu

SEQ ID NO: 344452 - RNA, 32 nt, Homo Sapiens
ucauucuugucacaaaagugccacuaaaacag

SEQ ID NO: 344453 - RNA, 32 nt, Homo Sapiens
uggguuugaauccuaaggagauugccacagug

SEQ ID NO: 344454 - RNA, 32 nt, Homo Sapiens
acagggagcccagucccgggccccauaguggu

SEQ ID NO: 344455 - RNA, 32 nt, Homo Sapiens
ucugagauucugugcaagccucauggaaauga

SEQ ID NO: 344456 - RNA, 32 nt, Homo Sapiens
gccgcgcccagcuccagucuccccuccccggg

SEQ ID NO: 344457 - RNA, 32 nt, Homo Sapiens
guuccauggcccaguccuccccggggacccug

SEQ ID NO: 344458 - RNA, 32 nt, Homo Sapiens
uuccuuuguaaaaaugacgagugcuggguuuu

SEQ ID NO: 344459 - RNA, 32 nt, Homo Sapiens
gcccccuggggacucuacccugcccgccucac

SEQ ID NO: 344460 - RNA, 32 nt, Homo Sapiens
ugucaaugaugaugacagugaugaugaugaug

SEQ ID NO: 344461 - RNA, 32 nt, Homo Sapiens
cuguggagaaaguagaaauauauccgucuuug

SEQ ID NO: 344462 - RNA, 27 nt, Homo Sapiens
auauggaccuucuucaauuccuggccu

SEQ ID NO: 344463 - RNA, 30 nt, Homo Sapiens
gagaaacuggacuggaacuucuggaagauu

SEQ ID NO: 344464 - RNA, 32 nt, Homo Sapiens
gcugugagugcgccucaccagaaccaguuaag

SEQ ID NO: 344465 - RNA, 32 nt, Homo Sapiens
ucugcaaaacuuuaguuuucugaugaucuaca

SEQ ID NO: 344466 - RNA, 32 nt, Homo Sapiens
aagauguaugugguggcugggucaggcagcug

SEQ ID NO: 344467 - RNA, 32 nt, Homo Sapiens
ucugaaauauuuuauggacuuauuucucccca

SEQ ID NO: 344468 - RNA, 32 nt, Homo Sapiens
cuccaccccccgcgcuggccaccccgccuccu

SEQ ID NO: 344469 - RNA, 32 nt, Homo Sapiens
cuuggagauaggaaaauaaacagccgggaaaa

SEQ ID NO: 344470 - RNA, 32 nt, Homo Sapiens
accucacacaugccccggcuaggagacaaggc

SEQ ID NO: 344471 - RNA, 32 nt, Homo Sapiens
aacuuuagacauucguuuagacaccauaacug

SEQ ID NO: 344472 - RNA, 32 nt, Homo Sapiens
uuuuuccaaaacaaaaagaugucucagguuug

SEQ ID NO: 344473 - RNA, 32 nt, Homo Sapiens
gccugccgcccggacgccugggccgcggaguu

SEQ ID NO: 344474 - RNA, 31 nt, Homo Sapiens
agccacauugaauuuuugccaaaugaaaaac

SEQ ID NO: 344475 - RNA, 32 nt, Homo Sapiens
uuucuaggaaaguuaaaagaauaaaucagaac

SEQ ID NO: 344476 - RNA, 32 nt, Homo Sapiens
gcuagcuagccagcuguguucacacuguaaac

SEQ ID NO: 344477 - RNA, 32 nt, Homo Sapiens
cacgcccgcgucugcggcucucuccaccugcc

SEQ ID NO: 344478 - RNA, 32 nt, Homo Sapiens
accaaaauguaguagacgagaauccagaugag

SEQ ID NO: 344479 - RNA, 32 nt, Homo Sapiens
guaagguuguuaauguacauaauugcagauug

SEQ ID NO: 344480 - RNA, 31 nt, Homo Sapiens
ucacugccaaacugccuguccugggaucuag

SEQ ID NO: 344481 - RNA, 32 nt, Homo Sapiens
gcuggagaagacuuaaacucucuggguugaaa

SEQ ID NO: 344482 - RNA, 32 nt, Homo Sapiens
ggaauacucacccaccaagcucugggguaccc

SEQ ID NO: 344483 - RNA, 32 nt, Homo Sapiens
gagcgcuguggcggcccugaaaggauauaggc

SEQ ID NO: 344484 - RNA, 32 nt, Homo Sapiens
ucccaguugcugucacaaaggagugagugaaa

SEQ ID NO: 344485 - RNA, 32 nt, Homo Sapiens
gugaccugcuccugggacuuugcuggcucacg

SEQ ID NO: 344486 - RNA, 32 nt, Homo Sapiens
cgcugcccuuggcucucgucgccauggccucc

SEQ ID NO: 344487 - RNA, 32 nt, Homo Sapiens
ccccugccccaccgcacccccagaauauaagc

SEQ ID NO: 344488 - RNA, 32 nt, Homo Sapiens
aaauaaauuugagaaauuuuguuuccuuacau

SEQ ID NO: 344489 - RNA, 32 nt, Homo Sapiens
gauuuuaaaaaauaaauggcaaagauauaaau

SEQ ID NO: 344490 - RNA, 32 nt, Homo Sapiens
ccccacugccccagcucugacuggaccccaag

SEQ ID NO: 344491 - RNA, 32 nt, Homo Sapiens
ccagagcagccuaucccccgggcccccuggag

SEQ ID NO: 344492 - RNA, 32 nt, Homo Sapiens
uaagggaagaccuucacacagauuuuucugua

SEQ ID NO: 344493 - RNA, 32 nt, Homo Sapiens
acuuuuccauucuccucuggccuccucuucua

SEQ ID NO: 344494 - RNA, 32 nt, Homo Sapiens
ugggggccugcgccaguccugcuaccucccuu

SEQ ID NO: 344495 - RNA, 32 nt, Homo Sapiens
uccccucagugcccuugccccauccccucauc

SEQ ID NO: 344496 - RNA, 32 nt, Homo Sapiens
augaggccauugcccuucuccagguggcuuca

SEQ ID NO: 344497 - RNA, 32 nt, Homo Sapiens
ugccacugcauuccagccugugugauggagag

SEQ ID NO: 344498 - RNA, 32 nt, Homo Sapiens
gguacuuaauaaauauuugcuguugaugauag

SEQ ID NO: 344499 - RNA, 32 nt, Homo Sapiens
gaugaaaccaaccgccagcgagcagcacggga

SEQ ID NO: 344500 - RNA, 32 nt, Homo Sapiens
uaacucuauuggucaguaauggucaguuugug

SEQ ID NO: 344501 - RNA, 32 nt, Homo Sapiens
ucugguggaaguguuucuuuuuccuuuuuugg

SEQ ID NO: 344502 - RNA, 32 nt, Homo Sapiens
agauguauguauucguuguucuguuuuuccag

SEQ ID NO: 344503 - RNA, 32 nt, Homo Sapiens
auuccagccugugugauggagagagacccugu

SEQ ID NO: 344504 - RNA, 32 nt, Homo Sapiens
ggaggaaggggcgagaggcaucgucaagggag

SEQ ID NO: 344505 - RNA, 32 nt, Homo Sapiens
aagucucauguugagcuuugacccucagugug

SEQ ID NO: 344506 - RNA, 31 nt, Homo Sapiens
cagaccagugccugccaaccagauguuacug

SEQ ID NO: 344507 - RNA, 32 nt, Homo Sapiens
uaguuuacaucauuuuuguaucuacaucuuuu

SEQ ID NO: 344508 - RNA, 32 nt, Homo Sapiens
gccuuggaauuugcucuugggggucugaauau

SEQ ID NO: 344509 - RNA, 32 nt, Homo Sapiens
agaaagucauauuuuugcauuucagccaaaau

SEQ ID NO: 344510 - RNA, 32 nt, Homo Sapiens
ugagcucagugucaaggugauucaacuguagu

SEQ ID NO: 344511 - RNA, 32 nt, Homo Sapiens
ccccuguaaucccagcacuuugggaagccaag

SEQ ID NO: 344512 - RNA, 32 nt, Homo Sapiens
cuugcaaacucuucccaccuccuucacgacac

SEQ ID NO: 344513 - RNA, 32 nt, Homo Sapiens
gaugucugagccuugaggaaaagcagcagggu

SEQ ID NO: 344514 - RNA, 32 nt, Homo Sapiens
uucacugccaagagucuagaaugccauuuuag

SEQ ID NO: 344515 - RNA, 32 nt, Homo Sapiens
cucucagcucccauccuguguacuuccacauu

SEQ ID NO: 344516 - RNA, 32 nt, Homo Sapiens
accgccugcuguacaaagacggcuucagcacc

SEQ ID NO: 344517 - RNA, 29 nt, Homo Sapiens
augcaguacuguuuauauuuuguauaccu

SEQ ID NO: 344518 - RNA, 32 nt, Homo Sapiens
uacugacaaaaauuauuuucuguuaguuugag

SEQ ID NO: 344519 - RNA, 32 nt, Homo Sapiens
auacuaaauuugcuuugggaaaucacaccaac

SEQ ID NO: 344520 - RNA, 32 nt, Homo Sapiens
uggaagucccgggucugucuuccuuaucaucg

SEQ ID NO: 344521 - RNA, 32 nt, Homo Sapiens
guaugagcagaugcugaagaccaagaaguacc

SEQ ID NO: 344522 - RNA, 32 nt, Homo Sapiens
uauucucauccaguauaugcaagauacuggca

SEQ ID NO: 344523 - RNA, 32 nt, Homo Sapiens
uguccaagauaaaaagguaaccccaaguauug

SEQ ID NO: 344524 - RNA, 32 nt, Homo Sapiens
acaacaaaggauuaauugcugcaaggacauuc

SEQ ID NO: 344525 - RNA, 32 nt, Homo Sapiens
uuccuuaauguuuuuccuucuauaaggugcca

SEQ ID NO: 344526 - RNA, 32 nt, Homo Sapiens
gaagcuacagaauuauuuucuaaaauaaaggc

SEQ ID NO: 344527 - RNA, 32 nt, Homo Sapiens
guuuugaacuaaugggucuuguccucaagcag

SEQ ID NO: 344528 - RNA, 32 nt, Homo Sapiens
agaguggauuuuguauuuuguauuuaacuugc

SEQ ID NO: 344529 - RNA, 32 nt, Homo Sapiens
cuuggcauccucauggaaaaauccacaggcaa

SEQ ID NO: 344530 - RNA, 32 nt, Homo Sapiens
uagguguacacauuuacccaguugagcguucu

SEQ ID NO: 344531 - RNA, 32 nt, Homo Sapiens
gcugggccacgggcucgcgggcacucucggcg

SEQ ID NO: 344532 - RNA, 32 nt, Homo Sapiens
gccuccagggugcgggggcgccuuucuugcag

SEQ ID NO: 344533 - RNA, 31 nt, Homo Sapiens
auuaucuauugagugugauaaagauuacauc

SEQ ID NO: 344534 - RNA, 32 nt, Homo Sapiens
acagugagaaaguucagccacuuccaauuucu

SEQ ID NO: 344535 - RNA, 32 nt, Homo Sapiens
ccucucuugccuuucuuauuugcaauaaaagg

SEQ ID NO: 344536 - RNA, 32 nt, Homo Sapiens
gauuuggugaauuguaauucuaguaaaacaug

SEQ ID NO: 344537 - RNA, 32 nt, Homo Sapiens
uucaagcaauucuccugccucagcuccucgag

SEQ ID NO: 344538 - RNA, 32 nt, Homo Sapiens
cacucuggugagggagcuuuccagacaucaac

SEQ ID NO: 344539 - RNA, 32 nt, Homo Sapiens
cacugaaggucuuugagaagaggccagacgcu

SEQ ID NO: 344540 - RNA, 29 nt, Homo Sapiens
uuaaaugaacauauuucuucuaacauuuc

SEQ ID NO: 344541 - RNA, 32 nt, Homo Sapiens
gcagaaacccaccuugucccauccacaucagg

SEQ ID NO: 344542 - RNA, 32 nt, Homo Sapiens
ggagggggagagucgcucccgccgggcgagca

SEQ ID NO: 344543 - RNA, 32 nt, Homo Sapiens
gcaucugucuaagagucacagaucugagaaau

SEQ ID NO: 344544 - RNA, 32 nt, Homo Sapiens
ugggacccacccagagcaccugugcuggagga

SEQ ID NO: 344545 - RNA, 32 nt, Homo Sapiens
augcgcccaagcccccgagggagaggccuggg

SEQ ID NO: 344546 - RNA, 32 nt, Homo Sapiens
gggagcuuuguucuuugcaauaaaucuugcua

SEQ ID NO: 344547 - RNA, 32 nt, Homo Sapiens
ucagacucugugagggggaggggguagcacug

SEQ ID NO: 344548 - RNA, 32 nt, Homo Sapiens
uggagugauguuucauuuaccuggguuguguu

SEQ ID NO: 344549 - RNA, 32 nt, Homo Sapiens
uuuuuauugucacuaaaaaauuuuacugucua

SEQ ID NO: 344550 - RNA, 32 nt, Homo Sapiens
uugugcuuuguuuuugcugacuuuucugcacc

SEQ ID NO: 344551 - RNA, 32 nt, Homo Sapiens
ucuaauucauauauuuaacaaacaugauggug

SEQ ID NO: 344552 - RNA, 32 nt, Homo Sapiens
cgggaagccagacgcagcggggggacacaucu

SEQ ID NO: 344553 - RNA, 32 nt, Homo Sapiens
auucaccacuuggcucgauauuacaagaccaa

SEQ ID NO: 344554 - RNA, 32 nt, Homo Sapiens
ccacauuaggauggugaaccagcagcuacuag

SEQ ID NO: 344555 - RNA, 32 nt, Homo Sapiens
cagcgcugcgggagcagccgccggcaccgccg

SEQ ID NO: 344556 - RNA, 32 nt, Homo Sapiens
gggagaggggagagggacgcacagcacugccu

SEQ ID NO: 344557 - RNA, 32 nt, Homo Sapiens
uuuuuauuuuuuacaaccggaccuccaccccc

SEQ ID NO: 344558 - RNA, 32 nt, Homo Sapiens
gacuuugaacaaaagucaacuguugucucuuu

SEQ ID NO: 344559 - RNA, 32 nt, Homo Sapiens
uauacauaaaaauuaaguucugagugaguucu

SEQ ID NO: 344560 - RNA, 32 nt, Homo Sapiens
ugcuagaaaaggaaaugaagcaacguucccag

SEQ ID NO: 344561 - RNA, 32 nt, Homo Sapiens
cuagagccuuugggaucguccuggauucacug

SEQ ID NO: 344562 - RNA, 32 nt, Homo Sapiens
ggccgcuccaggugcaaaaguuccucgaguca

SEQ ID NO: 344563 - RNA, 29 nt, Homo Sapiens
ucuauuaugaagauacugucugggcuaaa

SEQ ID NO: 344564 - RNA, 32 nt, Homo Sapiens
cuaagcuaagugaaggggaagaucugagagcg

SEQ ID NO: 344565 - RNA, 27 nt, Homo Sapiens
accguucccucuuucagcccuugguua

SEQ ID NO: 344566 - RNA, 32 nt, Homo Sapiens
ugcaccguggaaaagaaauugcagauugauca

SEQ ID NO: 344567 - RNA, 32 nt, Homo Sapiens
gagcuagccccggcggccgccgccgcccagac

SEQ ID NO: 344568 - RNA, 32 nt, Homo Sapiens
gcacagcagaauuuauauaggaaugugauguu

SEQ ID NO: 344569 - RNA, 32 nt, Homo Sapiens
ccaagcccaggcugcuggagccaggcacccuc

SEQ ID NO: 344570 - RNA, 32 nt, Homo Sapiens
aagacacucugaaaaaggaaaagaugagaguu

SEQ ID NO: 344571 - RNA, 32 nt, Homo Sapiens
aaugaagccgggacgcacuccggagcgcacug

SEQ ID NO: 344572 - RNA, 32 nt, Homo Sapiens
uuaaccauuuccuaugugccaagcugugccag

SEQ ID NO: 344573 - RNA, 32 nt, Homo Sapiens
gggagucgucgaaauguuuagauucuuuuagg

SEQ ID NO: 344574 - RNA, 32 nt, Homo Sapiens
guaaguuuggaugaaagugcaagauguggaac

SEQ ID NO: 344575 - RNA, 32 nt, Homo Sapiens
cccauaucaaaagaccuauucuacacaaaaua

SEQ ID NO: 344576 - RNA, 32 nt, Homo Sapiens
cccgggugucugcggccgcaacgcaacggaca

SEQ ID NO: 344577 - RNA, 32 nt, Homo Sapiens
ccgucucuaccaaaaaaacauaaaaauuagcc

SEQ ID NO: 344578 - RNA, 32 nt, Homo Sapiens
cugagagccaccacaagacuaaguaagaccga

SEQ ID NO: 344579 - RNA, 32 nt, Homo Sapiens
guacuagaucaccuuaaaauuauuucacguac

SEQ ID NO: 344580 - RNA, 32 nt, Homo Sapiens
caacuuucacgcugccucggcggcccggcccg

SEQ ID NO: 344581 - RNA, 32 nt, Homo Sapiens
uuuuccucgagccaacaaaaccaagucucuag

SEQ ID NO: 344582 - RNA, 32 nt, Homo Sapiens
cucaguuguucaaguguacaaauuuaaagcug

SEQ ID NO: 344583 - RNA, 32 nt, Homo Sapiens
guguuggggguggcggggcgccaggucgccga

SEQ ID NO: 344584 - RNA, 32 nt, Homo Sapiens
gucuuuguacucuugaguuguaccuuauucuu

SEQ ID NO: 344585 - RNA, 32 nt, Homo Sapiens
cuuccugaggguuugggaagguccuggggcag

SEQ ID NO: 344586 - RNA, 32 nt, Homo Sapiens
ggauacauguugaaccuaguugaauauaaaaa

SEQ ID NO: 344587 - RNA, 32 nt, Homo Sapiens
aaaaggaaaaacgaguaaaaauaauaaaaauu

SEQ ID NO: 344588 - RNA, 32 nt, Homo Sapiens
accucaagcagcuuaugcuacaguguguacaa

SEQ ID NO: 344589 - RNA, 32 nt, Homo Sapiens
caucuccaccaaaaauacaaaaaauuagccac

SEQ ID NO: 344590 - RNA, 32 nt, Homo Sapiens
aauguaccccucagccuucucagcauuuccuu

SEQ ID NO: 344591 - RNA, 32 nt, Homo Sapiens
gcagauuuaggacccugaggagucuuuuucac

SEQ ID NO: 344592 - RNA, 32 nt, Homo Sapiens
ucgaggcucccucuuccucuccauaccugccc

SEQ ID NO: 344593 - RNA, 32 nt, Homo Sapiens
uauuaaucuccauaagagaaaauauuuaugaa

SEQ ID NO: 344594 - RNA, 31 nt, Homo Sapiens
uucuggccagagguuuuccugaugggugagu

SEQ ID NO: 344595 - RNA, 32 nt, Homo Sapiens
ccagccaccccacuguggcucaucucuugcca

SEQ ID NO: 344596 - RNA, 32 nt, Homo Sapiens
ccgccaagccaaaggcgaguagcaaucccucg

SEQ ID NO: 344597 - RNA, 32 nt, Homo Sapiens
guaggggauguggcuugagcugcagucacagg

SEQ ID NO: 344598 - RNA, 32 nt, Homo Sapiens
ccuuggcucaccuuucucuccucagcagaaca

SEQ ID NO: 344599 - RNA, 32 nt, Homo Sapiens
cggcggcggccgggcgucccgggauggccuuc

SEQ ID NO: 344600 - RNA, 32 nt, Homo Sapiens
aagacaggugacuagaaauauuaaaacaaaaa

SEQ ID NO: 344601 - RNA, 32 nt, Homo Sapiens
gagaauuuuuauucccuucuuugacuuuuccu

SEQ ID NO: 344602 - RNA, 31 nt, Homo Sapiens
ggcuuugugucagguuuuucaguguuggcaa

SEQ ID NO: 344603 - RNA, 32 nt, Homo Sapiens
ugcugccuuccugccucuacuccaccuccauc

SEQ ID NO: 344604 - RNA, 32 nt, Homo Sapiens
accggcuuuccugcugcagaucugggcugcgg

SEQ ID NO: 344605 - RNA, 32 nt, Homo Sapiens
gagggaauacaugauaaaguaacugguuugau

SEQ ID NO: 344606 - RNA, 32 nt, Homo Sapiens
uggggcuugaguugauucugaaggacaagaag

SEQ ID NO: 344607 - RNA, 32 nt, Homo Sapiens
agggccaggccgcccccuccccgagaccuguc

SEQ ID NO: 344608 - RNA, 32 nt, Homo Sapiens
ugaugguccaacaaacucucaguguccacccu

SEQ ID NO: 344609 - RNA, 32 nt, Homo Sapiens
agcuguccaggcacagcuccguccccagcgcu

SEQ ID NO: 344610 - RNA, 32 nt, Homo Sapiens
cccucuccucuccgaacucccuggacauggcc

SEQ ID NO: 344611 - RNA, 32 nt, Homo Sapiens
uuaacaacuguagaucuuggaacuuggcagcu

SEQ ID NO: 344612 - RNA, 32 nt, Homo Sapiens
gcugccugugucuuauuuugacuugcacugcc

SEQ ID NO: 344613 - RNA, 32 nt, Homo Sapiens
uuauuggaauccauggauggacccuggggagc

SEQ ID NO: 344614 - RNA, 32 nt, Homo Sapiens
guucauuucuuacccucugcuuuggcuugacc

SEQ ID NO: 344615 - RNA, 32 nt, Homo Sapiens
ccuuaaguuuucuccccucucagcaauaggag

SEQ ID NO: 344616 - RNA, 32 nt, Homo Sapiens
gaaauguucuuagaggaggaaauauccuuugu

SEQ ID NO: 344617 - RNA, 32 nt, Homo Sapiens
aguggaauaagcgcccugaagaugccggagcu

SEQ ID NO: 344618 - RNA, 32 nt, Homo Sapiens
gacgcccugcgccuucgccuucuccgcccccg

SEQ ID NO: 344619 - RNA, 32 nt, Homo Sapiens
uuaguuccacccccaacccccauucccuggug

SEQ ID NO: 344620 - RNA, 31 nt, Homo Sapiens
uacauauagaugugaaggacacuugauuagu

SEQ ID NO: 344621 - RNA, 32 nt, Homo Sapiens
gcggucgccgguuucucuucccagcucugccc

SEQ ID NO: 344622 - RNA, 32 nt, Homo Sapiens
uuacacccaucccuuugcaaaaucccuaugga

SEQ ID NO: 344623 - RNA, 32 nt, Homo Sapiens
gguuaagacugcugaggccaagugcuauuuug

SEQ ID NO: 344624 - RNA, 32 nt, Homo Sapiens
gcauuucucuauauacauguuuuauauaccuc

SEQ ID NO: 344625 - RNA, 32 nt, Homo Sapiens
ucuuacauuagcuucagaaaacaagaaaaugc

SEQ ID NO: 344626 - RNA, 32 nt, Homo Sapiens
aauuacaaacuccugggcuuucuggggagggg

SEQ ID NO: 344627 - RNA, 32 nt, Homo Sapiens
caaaaggaaaacaaaagccucucuguuuucau

SEQ ID NO: 344628 - RNA, 32 nt, Homo Sapiens
ggcacuccacacacgacagagaugcaggggcc

SEQ ID NO: 344629 - RNA, 32 nt, Homo Sapiens
gagcucaacaccuucagcuucuguggaaaucc

SEQ ID NO: 344630 - RNA, 32 nt, Homo Sapiens
agacaggcaaggaaaggaauugguuuuucagg

SEQ ID NO: 344631 - RNA, 32 nt, Homo Sapiens
aaauaggugcuugguguacaaaacuuuuuaua

SEQ ID NO: 344632 - RNA, 32 nt, Homo Sapiens
agagaauggggguggggaggcaagaaccagug

SEQ ID NO: 344633 - RNA, 32 nt, Homo Sapiens
aacugauuguuuuuuucuuuccaguuuuccaa

SEQ ID NO: 344634 - RNA, 32 nt, Homo Sapiens
caacaggaucauuugagcccaggaauuugagg

SEQ ID NO: 344635 - RNA, 32 nt, Homo Sapiens
guguguuugugauguuuuggaguacauauaua

SEQ ID NO: 344636 - RNA, 32 nt, Homo Sapiens
aagcugaucugccugccccucacacacuugcu

SEQ ID NO: 344637 - RNA, 32 nt, Homo Sapiens
ucagucucaugggccaucucuuccucagaugu

SEQ ID NO: 344638 - RNA, 32 nt, Homo Sapiens
uuuaaauuccaauaaugcccaauacugacgug

SEQ ID NO: 344639 - RNA, 32 nt, Homo Sapiens
aggaauggcaagcccuggaaaccuguguuauu

SEQ ID NO: 344640 - RNA, 32 nt, Homo Sapiens
uuuggugacuggaagaggcaccagagacucuc

SEQ ID NO: 344641 - RNA, 32 nt, Homo Sapiens
ggugcucauuggcucccuuccaccugucauuc

SEQ ID NO: 344642 - RNA, 32 nt, Homo Sapiens
gggaggcugccgcgccagcugcgccgagcgag

SEQ ID NO: 344643 - RNA, 32 nt, Homo Sapiens
uggagauuuuggagagaauuuaaugaagaggc

SEQ ID NO: 344644 - RNA, 27 nt, Homo Sapiens
agaugucgucgucgucgccgccggcgg

SEQ ID NO: 344645 - RNA, 32 nt, Homo Sapiens
cucgcugcguccucauuuccccucccaauccu

SEQ ID NO: 344646 - RNA, 32 nt, Homo Sapiens
ucuuucccacuuuuguugauguuuauuucaga

SEQ ID NO: 344647 - RNA, 32 nt, Homo Sapiens
gugacacgggagacacauuaugagaacuaccg

SEQ ID NO: 344648 - RNA, 32 nt, Homo Sapiens
aaaaggauucuauuuucccugcuugguuaucu

SEQ ID NO: 344649 - RNA, 32 nt, Homo Sapiens
augugauggaccagcucagcuguccccagacc

SEQ ID NO: 344650 - RNA, 32 nt, Homo Sapiens
ucgcgcuuccggagaaaaucagcggucuaauu

SEQ ID NO: 344651 - RNA, 32 nt, Homo Sapiens
gaaaugaucagcccauguaguguuggucacuu

SEQ ID NO: 344652 - RNA, 32 nt, Homo Sapiens
ccuuuuucaaaauaaaaccuauugcugagacg

SEQ ID NO: 344653 - RNA, 32 nt, Homo Sapiens
acaccauuacaaucgggagacuaaaccaacaa

SEQ ID NO: 344654 - RNA, 32 nt, Homo Sapiens
ugguuugaaguuuccggcaccuccuuucccaa

SEQ ID NO: 344655 - RNA, 32 nt, Homo Sapiens
cccacgggcccggcccggccuggcccuucagg

SEQ ID NO: 344656 - RNA, 32 nt, Homo Sapiens
aagcugccgagcaggaguggaugcagccugau

SEQ ID NO: 344657 - RNA, 32 nt, Homo Sapiens
ccugagggcaguuguuugugauugccuucccu

SEQ ID NO: 344658 - RNA, 31 nt, Homo Sapiens
auuuaugugcacugccugcaugagcuggcaa

SEQ ID NO: 344659 - RNA, 32 nt, Homo Sapiens
uugucaguuguggucaugaucuuagucaccug

SEQ ID NO: 344660 - RNA, 32 nt, Homo Sapiens
uugacuuagauuuuaccuguuacucuacauua

SEQ ID NO: 344661 - RNA, 32 nt, Homo Sapiens
gaccacauuauuaaauuaauuguuaagcugca

SEQ ID NO: 344662 - RNA, 32 nt, Homo Sapiens
gggaacggauacuacuuuuugccucaccguaa

SEQ ID NO: 344663 - RNA, 32 nt, Homo Sapiens
aauuaucccgugaaccuguguacuuacagggu

SEQ ID NO: 344664 - RNA, 32 nt, Homo Sapiens
ucggaucggcccgcaguccgcuguccugcuga

SEQ ID NO: 344665 - RNA, 32 nt, Homo Sapiens
auuuucucauguuucuaauaaaacagagacga

SEQ ID NO: 344666 - RNA, 32 nt, Homo Sapiens
ucccauggcucuucuugauuguaccacugaag

SEQ ID NO: 344667 - RNA, 32 nt, Homo Sapiens
aaacccuguaguuaauacuccucccacacuag

SEQ ID NO: 344668 - RNA, 32 nt, Homo Sapiens
gccggccgcucgcccgccaugccuggcuucga

SEQ ID NO: 344669 - RNA, 32 nt, Homo Sapiens
auuuucaucuucuguuuuccaaaugaagcuuu

SEQ ID NO: 344670 - RNA, 30 nt, Homo Sapiens
cccgggaaagcucgcgcgggacccgggaac

SEQ ID NO: 344671 - RNA, 32 nt, Homo Sapiens
accagccugggcaacauagugagugagaccuc

SEQ ID NO: 344672 - RNA, 32 nt, Homo Sapiens
ucucgacggcaaggguggccccgccccagccc

SEQ ID NO: 344673 - RNA, 32 nt, Homo Sapiens
cuucccccgcucggggaccccggccacccgca

SEQ ID NO: 344674 - RNA, 32 nt, Homo Sapiens
ugaguugauaaacauuuccaucuucauuaaaa

SEQ ID NO: 344675 - RNA, 32 nt, Homo Sapiens
gaaggagaaggcagcucuguuucucugcagag

SEQ ID NO: 344676 - RNA, 32 nt, Homo Sapiens
cccgcacugcgguuaauuuauguguuguuuaa

SEQ ID NO: 344677 - RNA, 32 nt, Homo Sapiens
ccaggagaaaauuuauauucaaguagccuauu

SEQ ID NO: 344678 - RNA, 32 nt, Homo Sapiens
uuuuuaagaauauuuuuguaagaccaauaccu

SEQ ID NO: 344679 - RNA, 32 nt, Homo Sapiens
cggcagggcgggaggggcgcgccauggaggcg

SEQ ID NO: 344680 - RNA, 32 nt, Homo Sapiens
cauuuugggggagggaggaagaucugaauuau

SEQ ID NO: 344681 - RNA, 32 nt, Homo Sapiens
cgccaggcgagggucagcugccggggcgacgc

SEQ ID NO: 344682 - RNA, 32 nt, Homo Sapiens
gcaccaucccugagucauuacaauacacccgc

SEQ ID NO: 344683 - RNA, 32 nt, Homo Sapiens
ggccagcccgcagagguggggugcuggggcug

SEQ ID NO: 344684 - RNA, 32 nt, Homo Sapiens
uuuuggaauggacuugaccaacaaccuagaga

SEQ ID NO: 344685 - RNA, 32 nt, Homo Sapiens
aguuuuucuguacuuuuuaaguguuuuguguu

SEQ ID NO: 344686 - RNA, 32 nt, Homo Sapiens
guacguccuacggcugcaacacugcgccuggc

SEQ ID NO: 344687 - RNA, 32 nt, Homo Sapiens
cucuguucucguagccucugcacagcugcugg

SEQ ID NO: 344688 - RNA, 32 nt, Homo Sapiens
ccugcauuuuaaaaguaauaaaauauuauuug

SEQ ID NO: 344689 - RNA, 32 nt, Homo Sapiens
cugaaauaauuuccuaauaacuccuguaacau

SEQ ID NO: 344690 - RNA, 30 nt, Homo Sapiens
acaauucuaagcugcaucccuguaucaaaa

SEQ ID NO: 344691 - RNA, 32 nt, Homo Sapiens
cgucuguuuaaauuauuugauguagguuuggg

SEQ ID NO: 344692 - RNA, 32 nt, Homo Sapiens
aagcguuguaguaaacgcgugcucauccucua

SEQ ID NO: 344693 - RNA, 32 nt, Homo Sapiens
ggccuuugauagacccacuugggccuucaugc

SEQ ID NO: 344694 - RNA, 32 nt, Homo Sapiens
ggaaacacaauuuuugucauuaaauguuauau

SEQ ID NO: 344695 - RNA, 32 nt, Homo Sapiens
ggcugcccggccucccucccccugcagccauc

SEQ ID NO: 344696 - RNA, 32 nt, Homo Sapiens
gccgccgccgccgccuccuccuccucagccgg

SEQ ID NO: 344697 - RNA, 32 nt, Homo Sapiens
gugggaggaaauguuucagaugaaacuuacuc

SEQ ID NO: 344698 - RNA, 32 nt, Homo Sapiens
aguccguacucggcuuccugugggguguaggu

SEQ ID NO: 344699 - RNA, 32 nt, Homo Sapiens
agaagaaaaaaguuuucaaaaauuuuaucaaa

SEQ ID NO: 344700 - RNA, 32 nt, Homo Sapiens
aaacaaaacaaaauuagcugagcaugguggug

SEQ ID NO: 344701 - RNA, 32 nt, Homo Sapiens
aauauccacaacaaagucugaccucacucuga

SEQ ID NO: 344702 - RNA, 32 nt, Homo Sapiens
uguucugauguuguuucuuaauucauuaaaca

SEQ ID NO: 344703 - RNA, 32 nt, Homo Sapiens
cacuaaguuucucuugccauuaucucauuaau

SEQ ID NO: 344704 - RNA, 32 nt, Homo Sapiens
cgagaccaaccuggucagcauggcaaaacccc

SEQ ID NO: 344705 - RNA, 32 nt, Homo Sapiens
auccaaauagugcugcuagaaacugcacugaa

SEQ ID NO: 344706 - RNA, 32 nt, Homo Sapiens
ucacuggacuccagaaaugugcaugcagauca

SEQ ID NO: 344707 - RNA, 32 nt, Homo Sapiens
cuaccuguagcaagccauacaaacuucuuuga

SEQ ID NO: 344708 - RNA, 32 nt, Homo Sapiens
gggaggaggaggagcucacacccucaaacucc

SEQ ID NO: 344709 - RNA, 32 nt, Homo Sapiens
cagcuucggaagcaucucucgaggacucuggu

SEQ ID NO: 344710 - RNA, 32 nt, Homo Sapiens
agagggggccgcgcucggccgccuuccccugg

SEQ ID NO: 344711 - RNA, 32 nt, Homo Sapiens
cagcuucuccgggucucagcaugggcuuccag

SEQ ID NO: 344712 - RNA, 32 nt, Homo Sapiens
augauucugucauagacccugacuuaacauug

SEQ ID NO: 344713 - RNA, 32 nt, Homo Sapiens
uguucuccacacucacaagacaucagcuauau

SEQ ID NO: 344714 - RNA, 32 nt, Homo Sapiens
caguugugaaaauaaauggaaguugguugauu

SEQ ID NO: 344715 - RNA, 32 nt, Homo Sapiens
ccacuguuaaaauggauucagaagagguccua

SEQ ID NO: 344716 - RNA, 32 nt, Homo Sapiens
cacuggcggaagaggcuuggugccggggccug

SEQ ID NO: 344717 - RNA, 32 nt, Homo Sapiens
ccuugugaccccgggccccugccgccugcaag

SEQ ID NO: 344718 - RNA, 32 nt, Homo Sapiens
cagcgcccgccagccuucccggccggaccggc

SEQ ID NO: 344719 - RNA, 32 nt, Homo Sapiens
gggacaggggcgcaggugcaccaagagaucug

SEQ ID NO: 344720 - RNA, 32 nt, Homo Sapiens
uccuugagacacggagcccagcccuccccaug

SEQ ID NO: 344721 - RNA, 32 nt, Homo Sapiens
ugagcaggaagguggugguuccguggggaauc

SEQ ID NO: 344722 - RNA, 32 nt, Homo Sapiens
cccaggcggagggcggaaggcugcuggggugc

SEQ ID NO: 344723 - RNA, 32 nt, Homo Sapiens
ccugcccccucuuggccccauccauggacucu

SEQ ID NO: 344724 - RNA, 32 nt, Homo Sapiens
ugguaaaagaacaaaacugaucagaguaaauu

SEQ ID NO: 344725 - RNA, 32 nt, Homo Sapiens
aauuuucuguuaugaaaaccuauuuaauucca

SEQ ID NO: 344726 - RNA, 32 nt, Homo Sapiens
cggggcggccagcagggacgcgccccaggugg

SEQ ID NO: 344727 - RNA, 32 nt, Homo Sapiens
uacugcacuccagccugggugacagagugaga

SEQ ID NO: 344728 - RNA, 32 nt, Homo Sapiens
gcagcugcggagugggccagcagcgccgccug

SEQ ID NO: 344729 - RNA, 32 nt, Homo Sapiens
gcaaggacaugccugaucucaacgacugcguc

SEQ ID NO: 344730 - RNA, 32 nt, Homo Sapiens
ccuggcucccaggguccugggggcugcugcac

SEQ ID NO: 344731 - RNA, 32 nt, Homo Sapiens
gugauaguaaacaaaaucugugcagagggccu

SEQ ID NO: 344732 - RNA, 32 nt, Homo Sapiens
gcugaggggcaggaaggcagaaggucuuggug

SEQ ID NO: 344733 - RNA, 32 nt, Homo Sapiens
gcccuccccuccccagccuuuuccagaaacca

SEQ ID NO: 344734 - RNA, 32 nt, Homo Sapiens
guaccagugucuauauggaaagaaguagaugc

SEQ ID NO: 344735 - RNA, 32 nt, Homo Sapiens
cagcuugcugcuaugauuucagagcacauaag

SEQ ID NO: 344736 - RNA, 32 nt, Homo Sapiens
acacacagaccugaaaauaaccagagagggac

SEQ ID NO: 344737 - RNA, 32 nt, Homo Sapiens
auauguauauauacacguauguauagaugugu

SEQ ID NO: 344738 - RNA, 32 nt, Homo Sapiens
acaacacacacacacacacacacacacacaca

SEQ ID NO: 344739 - RNA, 32 nt, Homo Sapiens
ccuugaggacaaaccucugugcaggaccuugg

SEQ ID NO: 344740 - RNA, 32 nt, Homo Sapiens
ucacugaggaucuagaaacuacaggauggaua

SEQ ID NO: 344741 - RNA, 32 nt, Homo Sapiens
gagaugcguuugucccaggcucgggggcucag

SEQ ID NO: 344742 - RNA, 32 nt, Homo Sapiens
ugggcugucugcuugugucucggguggaacag

SEQ ID NO: 344743 - RNA, 32 nt, Homo Sapiens
aucuucacagaaaugacugagagaagaaucug

SEQ ID NO: 344744 - RNA, 32 nt, Homo Sapiens
ggcagggcaggcagcugcgcgcggcuggaguc

SEQ ID NO: 344745 - RNA, 32 nt, Homo Sapiens
ugacaccagcacuuuuucugcacauguaucuu

SEQ ID NO: 344746 - RNA, 32 nt, Homo Sapiens
ggaagccaagcccaugcugggguggugagaaa

SEQ ID NO: 344747 - RNA, 32 nt, Homo Sapiens
ucuuguugcccucuccuuccauucacuagagg

SEQ ID NO: 344748 - RNA, 29 nt, Homo Sapiens
caaguuacauaaaguaugagauauauuac

SEQ ID NO: 344749 - RNA, 32 nt, Homo Sapiens
aguaaccaugggcuugcugacuuaccaaagaa

SEQ ID NO: 344750 - RNA, 32 nt, Homo Sapiens
agcagucuuggcggagagacaccugaaguugg

SEQ ID NO: 344751 - RNA, 32 nt, Homo Sapiens
uguuucauuucaggaagauauaugcgucagga

SEQ ID NO: 344752 - RNA, 32 nt, Homo Sapiens
aagcaccucccgcuccggugaccccauccuug

SEQ ID NO: 344753 - RNA, 32 nt, Homo Sapiens
uucauacaugauuggauuuaauuuuggggggc

SEQ ID NO: 344754 - RNA, 32 nt, Homo Sapiens
cgacaccugauucagcgcacaaacacaggucc

SEQ ID NO: 344755 - RNA, 32 nt, Homo Sapiens
aaaggguucaacauaauguuuaauuuugucac

SEQ ID NO: 344756 - RNA, 32 nt, Homo Sapiens
cagcucagagggucucugcugcucuccccugg

SEQ ID NO: 344757 - RNA, 32 nt, Homo Sapiens
cuucccaucucuuuaguucuuccuccugguuc

SEQ ID NO: 344758 - RNA, 32 nt, Homo Sapiens
cuaugggacuuccagaaagaaguuaaauugag

SEQ ID NO: 344759 - RNA, 32 nt, Homo Sapiens
cguccugccuucgauggcuccucccuccgucc

SEQ ID NO: 344760 - RNA, 32 nt, Homo Sapiens
cgccagaggcugcgaccccccugccccgaauc

SEQ ID NO: 344761 - RNA, 32 nt, Homo Sapiens
acauguaguuuauagaaaguauacucuaaagg

SEQ ID NO: 344762 - RNA, 32 nt, Homo Sapiens
augaaucuucaauuuuuuuuuaaagcaaaacu

SEQ ID NO: 344763 - RNA, 32 nt, Homo Sapiens
aguugaaauguaaaaugugaaaacuuuagauc

SEQ ID NO: 344764 - RNA, 32 nt, Homo Sapiens
uacuuuuguguauuuaaaauuuuccaugaugu

SEQ ID NO: 344765 - RNA, 32 nt, Homo Sapiens
aucugugggugcccuccuuccucaccugugga

SEQ ID NO: 344766 - RNA, 32 nt, Homo Sapiens
gcgcugcugggucagggcugcccgugacccca

SEQ ID NO: 344767 - RNA, 32 nt, Homo Sapiens
gaaauccugcugugacgccacccucgagaccu

SEQ ID NO: 344768 - RNA, 32 nt, Homo Sapiens
aacuucaagugacgccaagaacaucaaaaucu

SEQ ID NO: 344769 - RNA, 32 nt, Homo Sapiens
uccgccacccccggcccgguuccgggggcgug

SEQ ID NO: 344770 - RNA, 32 nt, Homo Sapiens
gaaagcuauggaagaugauguacaaauguuau

SEQ ID NO: 344771 - RNA, 32 nt, Homo Sapiens
auuuacccuugaccccaguccacaguggucac

SEQ ID NO: 344772 - RNA, 32 nt, Homo Sapiens
uugcuccccuuggauaagagacuugacagaaa

SEQ ID NO: 344773 - RNA, 32 nt, Homo Sapiens
ucagugaugagaccaagagaucggagacaagc

SEQ ID NO: 344774 - RNA, 32 nt, Homo Sapiens
aagacaccaaggaaaacuacaacugucuuuag

SEQ ID NO: 344775 - RNA, 32 nt, Homo Sapiens
uuuccuuucaguuugugaaagcaggauuugac

SEQ ID NO: 344776 - RNA, 32 nt, Homo Sapiens
ugcagaguauuagaaauugaaccauugagcua

SEQ ID NO: 344777 - RNA, 32 nt, Homo Sapiens
uuuccccauguguccuggucaagccccccuca

SEQ ID NO: 344778 - RNA, 32 nt, Homo Sapiens
gaaaaucaccagucuuuucucauuauauugua

SEQ ID NO: 344779 - RNA, 32 nt, Homo Sapiens
gguuuuucacgcucagaaaugaugaggcccaa

SEQ ID NO: 344780 - RNA, 32 nt, Homo Sapiens
gagaagguugcuccaugauggauuuggaaacu

SEQ ID NO: 344781 - RNA, 32 nt, Homo Sapiens
uccugucacccacccuuucaucaucuuuuugc

SEQ ID NO: 344782 - RNA, 32 nt, Homo Sapiens
guguucuucucucaaguuaacaaaauuuuaca

SEQ ID NO: 344783 - RNA, 31 nt, Homo Sapiens
augcccaacuguugcauucaaguuuucugac

SEQ ID NO: 344784 - RNA, 32 nt, Homo Sapiens
agcuauuucugaggaugaaaugggagacauau

SEQ ID NO: 344785 - RNA, 32 nt, Homo Sapiens
ugccugucguguauaauuuuuagauacuuuug

SEQ ID NO: 344786 - RNA, 32 nt, Homo Sapiens
aauucaggcuagauauuauacuagguacuuca

SEQ ID NO: 344787 - RNA, 32 nt, Homo Sapiens
gacacaguaugucaaaaguaaugucagcaaag

SEQ ID NO: 344788 - RNA, 32 nt, Homo Sapiens
ccccuuuccgugccacuggugaauagggauug

SEQ ID NO: 344789 - RNA, 32 nt, Homo Sapiens
uucuccucucccucccucccagccccugaguc

SEQ ID NO: 344790 - RNA, 32 nt, Homo Sapiens
aagugagugucugcaccugaggcccucugugg

SEQ ID NO: 344791 - RNA, 32 nt, Homo Sapiens
agagugugagccagaagagaugcugaagacac

SEQ ID NO: 344792 - RNA, 32 nt, Homo Sapiens
cacauacccuacugccugagaugguuccagag

SEQ ID NO: 344793 - RNA, 32 nt, Homo Sapiens
gaaaaaaguuucacaaucaauuuauaaucuau

SEQ ID NO: 344794 - RNA, 32 nt, Homo Sapiens
cgcaauuucccucucucugccggugucugcuc

SEQ ID NO: 344795 - RNA, 32 nt, Homo Sapiens
guuacgggaaagggguccugauccagacccca

SEQ ID NO: 344796 - RNA, 32 nt, Homo Sapiens
gugcaugugucugagagugucaaugugugugu

SEQ ID NO: 344797 - RNA, 32 nt, Homo Sapiens
caauagaaaaggaagaagaagauccaagaagg

SEQ ID NO: 344798 - RNA, 32 nt, Homo Sapiens
gggaugagaacagaagcaggaccaggauucag

SEQ ID NO: 344799 - RNA, 32 nt, Homo Sapiens
aggaauacugcucugccaacaccuggaguuag

SEQ ID NO: 344800 - RNA, 32 nt, Homo Sapiens
uaaaaguguguuugaaaaauauuaucuugggu

SEQ ID NO: 344801 - RNA, 32 nt, Homo Sapiens
auuuggccucuacuccaguaaaccugauuggg

SEQ ID NO: 344802 - RNA, 32 nt, Homo Sapiens
aggugggccugagggauucauuagggagggag

SEQ ID NO: 344803 - RNA, 32 nt, Homo Sapiens
aaauaguugucuuuacugaaaaaugaagugaa

SEQ ID NO: 344804 - RNA, 32 nt, Homo Sapiens
uuucuuagaggugcuugaaaaaaguuauuucu

SEQ ID NO: 344805 - RNA, 32 nt, Homo Sapiens
gagccucagguggugacuauccuguugagaag

SEQ ID NO: 344806 - RNA, 32 nt, Homo Sapiens
uuuuaaguaugaaaauaaagauauauguacag

SEQ ID NO: 344807 - RNA, 32 nt, Homo Sapiens
aaaugggcucugcagacagcauuugcauaugc

SEQ ID NO: 344808 - RNA, 32 nt, Homo Sapiens
ucuuauuuuuauaacaaucuuauuuuucucaa

SEQ ID NO: 344809 - RNA, 32 nt, Homo Sapiens
uucgcagaggcaaaaacugaggcgcagaauga

SEQ ID NO: 344810 - RNA, 32 nt, Homo Sapiens
uauaugucugcacuuuuaaugcuccucuuaac

SEQ ID NO: 344811 - RNA, 32 nt, Homo Sapiens
cccugucugcuaggcgcuggggagacugauaa

SEQ ID NO: 344812 - RNA, 29 nt, Homo Sapiens
ggauccauauguauuuacuauccuuuuuc

SEQ ID NO: 344813 - RNA, 32 nt, Homo Sapiens
cucagggcccagaccuuccugcucuccagcag

SEQ ID NO: 344814 - RNA, 32 nt, Homo Sapiens
aucuucaaagcacaacucuauuucaugcuuuc

SEQ ID NO: 344815 - RNA, 32 nt, Homo Sapiens
ggaagaggcacuguagcagcugcugcuguugc

SEQ ID NO: 344816 - RNA, 32 nt, Homo Sapiens
gcaugcuucccgccucccacuccccagcgccc

SEQ ID NO: 344817 - RNA, 32 nt, Homo Sapiens
cagaaaauuuuuguuuauaaaagaugcauuau

SEQ ID NO: 344818 - RNA, 32 nt, Homo Sapiens
gggcggcaccccagcccugcccuugcuuccuu

SEQ ID NO: 344819 - RNA, 32 nt, Homo Sapiens
aaauuuagagauagaaucaugguacauuauug

SEQ ID NO: 344820 - RNA, 32 nt, Homo Sapiens
caggauuugaauuugucuuuuaauuuagcuua

SEQ ID NO: 344821 - RNA, 32 nt, Homo Sapiens
aagaccgagucuucuuuuuuuuuaaacaaaaa

SEQ ID NO: 344822 - RNA, 32 nt, Homo Sapiens
aucucuccaccuuguuuuucuucuauucuugg

SEQ ID NO: 344823 - RNA, 32 nt, Homo Sapiens
agacaggagccagccuccauggagaccuggag

SEQ ID NO: 344824 - RNA, 32 nt, Homo Sapiens
ccacagccuguuucugcugaguuucuuaucag

SEQ ID NO: 344825 - RNA, 32 nt, Homo Sapiens
gcugcggcgugugcggccggccuugggacagc

SEQ ID NO: 344826 - RNA, 30 nt, Homo Sapiens
gauuuggauaaaaggagaauuucugcagga

SEQ ID NO: 344827 - RNA, 32 nt, Homo Sapiens
gcaccagaugacugaacuuuguuggagauggg

SEQ ID NO: 344828 - RNA, 32 nt, Homo Sapiens
gggcuuccgagugcccucuguugaaauuguca

SEQ ID NO: 344829 - RNA, 32 nt, Homo Sapiens
ugcacaucucacuaucucuggcaugaaccagc

SEQ ID NO: 344830 - RNA, 32 nt, Homo Sapiens
ggucagguagccagcagggcucaguuccccuc

SEQ ID NO: 344831 - RNA, 32 nt, Homo Sapiens
uacacagacacacacacacacacacacacaca

SEQ ID NO: 344832 - RNA, 32 nt, Homo Sapiens
auggucuggggcuugaggaagaugaguuuguu

SEQ ID NO: 344833 - RNA, 32 nt, Homo Sapiens
ugacugaggcggggcggggagcagggggacac

SEQ ID NO: 344834 - RNA, 32 nt, Homo Sapiens
accgaaucugaugcugcugcugccuuugcaag

SEQ ID NO: 344835 - RNA, 32 nt, Homo Sapiens
ugcuccacugugacgguggcccggggggagga

SEQ ID NO: 344836 - RNA, 32 nt, Homo Sapiens
guaucauguuguauuaaagagcuuacuuagau

SEQ ID NO: 344837 - RNA, 32 nt, Homo Sapiens
cuccccaaacacaccaagaagcauuuuuaacg

SEQ ID NO: 344838 - RNA, 31 nt, Homo Sapiens
auauuuguagaaguaaagguauauucuguca

SEQ ID NO: 344839 - RNA, 32 nt, Homo Sapiens
gcguucuccaaccgcugcgccccagcagcguc

SEQ ID NO: 344840 - RNA, 32 nt, Homo Sapiens
cucaccagcaccagcucuccaugcaucuccug

SEQ ID NO: 344841 - RNA, 32 nt, Homo Sapiens
uguagcaagaaaugggaagcagggggaggggc

SEQ ID NO: 344842 - RNA, 32 nt, Homo Sapiens
ggaauucugaugcauuccaaaguuugguacua

SEQ ID NO: 344843 - RNA, 32 nt, Homo Sapiens
gagcgucuggcggccucuaccggagcaccucu

SEQ ID NO: 344844 - RNA, 32 nt, Homo Sapiens
cgugcaaaaacgccucuuauggaaaagccaga

SEQ ID NO: 344845 - RNA, 32 nt, Homo Sapiens
caggccuccgcccuccuccccuacuccagggc

SEQ ID NO: 344846 - RNA, 32 nt, Homo Sapiens
ggcagagguccgucugggagggugugucugug

SEQ ID NO: 344847 - RNA, 32 nt, Homo Sapiens
uguugccaauucuugcaaccacugcccuacca

SEQ ID NO: 344848 - RNA, 32 nt, Homo Sapiens
aaguuuucaguuuguaccgccugguaugucug

SEQ ID NO: 344849 - RNA, 32 nt, Homo Sapiens
gcugagacuguggccuggucuugguccuggug

SEQ ID NO: 344850 - RNA, 32 nt, Homo Sapiens
caguccccgcguggcgcagcgcggcggggacg

SEQ ID NO: 344851 - RNA, 32 nt, Homo Sapiens
gagaggaaaaauuuauucaagaagcacuuauu

SEQ ID NO: 344852 - RNA, 31 nt, Homo Sapiens
gcaguguuaaauuguaaauguguuuucuuua

SEQ ID NO: 344853 - RNA, 32 nt, Homo Sapiens
accugguggugcccucugccuguagggaacaa

SEQ ID NO: 344854 - RNA, 32 nt, Homo Sapiens
cucuuucuucccuuuuccaugguacuguuuug

SEQ ID NO: 344855 - RNA, 32 nt, Homo Sapiens
agaagcuacugcuaucugcugcucugggaaau

SEQ ID NO: 344856 - RNA, 32 nt, Homo Sapiens
guuuuuaaaagcugguuucaugugcuuuaugu

SEQ ID NO: 344857 - RNA, 32 nt, Homo Sapiens
gaugguuucccucucccucccucucuucccau

SEQ ID NO: 344858 - RNA, 32 nt, Homo Sapiens
uacagaacuaaauauagaguuuguaugauuag

SEQ ID NO: 344859 - RNA, 32 nt, Homo Sapiens
acuucaagaaguaagagcuaaguucuaaguuc

SEQ ID NO: 344860 - RNA, 32 nt, Homo Sapiens
guacacugagcagcugcauuggugcugucacu

SEQ ID NO: 344861 - RNA, 32 nt, Homo Sapiens
aaugaaaauuucaaaauuaaagggcaggagua

SEQ ID NO: 344862 - RNA, 32 nt, Homo Sapiens
acaagaagaaaaaugacaaccuuaaugaaauu

SEQ ID NO: 344863 - RNA, 32 nt, Homo Sapiens
cucccuucccuuccccgcacccggacuucgca

SEQ ID NO: 344864 - RNA, 32 nt, Homo Sapiens
cgucgccaggacuucucugggcuguguuuaaa

SEQ ID NO: 344865 - RNA, 32 nt, Homo Sapiens
cacaaugggccuuccuagcucuggccaccaag

SEQ ID NO: 344866 - RNA, 32 nt, Homo Sapiens
agccaauaaaaacgcugaguugugaaguccaa

SEQ ID NO: 344867 - RNA, 28 nt, Homo Sapiens
ccgcaguggagcgccaggauggcaggac

SEQ ID NO: 344868 - RNA, 32 nt, Homo Sapiens
auaccaucuccagcuauuuacacacaccuuuc

SEQ ID NO: 344869 - RNA, 32 nt, Homo Sapiens
ugucggcgacugucacaucucaaacuaauagc

SEQ ID NO: 344870 - RNA, 32 nt, Homo Sapiens
caggucucucacuuuacaauggcugccgccgc

SEQ ID NO: 344871 - RNA, 32 nt, Homo Sapiens
gcaauggaggcaaggugcugcagagcccaggu

SEQ ID NO: 344872 - RNA, 32 nt, Homo Sapiens
ugggcgccucuguccuggcccgggagccgcag

SEQ ID NO: 344873 - RNA, 32 nt, Homo Sapiens
guagugucuucucucuccaccaaaaagaggaa

SEQ ID NO: 344874 - RNA, 32 nt, Homo Sapiens
uccaaccucacuuuucacauguaaaauggcau

SEQ ID NO: 344875 - RNA, 32 nt, Homo Sapiens
cucccuuggccucgcccuccccgccaggcacc

SEQ ID NO: 344876 - RNA, 32 nt, Homo Sapiens
guaaucugggaccgacagggaugccagcaccc

SEQ ID NO: 344877 - RNA, 32 nt, Homo Sapiens
ccaucucaauuauagaagcaaguucagcuuua

SEQ ID NO: 344878 - RNA, 32 nt, Homo Sapiens
gacuguguuucaucaauugccuugacuuuugg

SEQ ID NO: 344879 - RNA, 32 nt, Homo Sapiens
ggcucccgggcuccuucccagcagcccucuca

SEQ ID NO: 344880 - RNA, 32 nt, Homo Sapiens
guggggcgggugggaugcacagagcacagcgc

SEQ ID NO: 344881 - RNA, 28 nt, Homo Sapiens
agcuuaaagauugagcauuugaaauaaa

SEQ ID NO: 344882 - RNA, 32 nt, Homo Sapiens
ggcacuaaacaaaacaaccaauaaagucacca

SEQ ID NO: 344883 - RNA, 32 nt, Homo Sapiens
acacagcucccuccacuccucucuuaucacug

SEQ ID NO: 344884 - RNA, 32 nt, Homo Sapiens
aaccagaaguugucauaaauggucagaaagaa

SEQ ID NO: 344885 - RNA, 32 nt, Homo Sapiens
gccuccucuucagacucuuugcauuucaguga

SEQ ID NO: 344886 - RNA, 32 nt, Homo Sapiens
gugugccaggggcagauggccuggaggcucca

SEQ ID NO: 344887 - RNA, 32 nt, Homo Sapiens
ugacccucauuuggagaggaaagauuccgccg

SEQ ID NO: 344888 - RNA, 31 nt, Homo Sapiens
uagaaaagcagucccauucauauuaagacag

SEQ ID NO: 344889 - RNA, 32 nt, Homo Sapiens
auaaaguucgacuuaaucauggcuguucuaag

SEQ ID NO: 344890 - RNA, 32 nt, Homo Sapiens
auccauggccagcagcaccugcccuaccugcc

SEQ ID NO: 344891 - RNA, 32 nt, Homo Sapiens
guuucugggauuggggacgugugugcuauggg

SEQ ID NO: 344892 - RNA, 32 nt, Homo Sapiens
accucccucaguggaugucuucccucccccga

SEQ ID NO: 344893 - RNA, 32 nt, Homo Sapiens
ucagaaaucucuuuucuagguuuguaaaauug

SEQ ID NO: 344894 - RNA, 32 nt, Homo Sapiens
uacggccauguacccccagcccggcccggacc

SEQ ID NO: 344895 - RNA, 32 nt, Homo Sapiens
ugugccuuucccgggcccucagcccucgggcc

SEQ ID NO: 344896 - RNA, 32 nt, Homo Sapiens
ucccagcccgcggcccucccccuccucggcgu

SEQ ID NO: 344897 - RNA, 32 nt, Homo Sapiens
gaagggagaguucaaggcaaacgcaaggacug

SEQ ID NO: 344898 - RNA, 32 nt, Homo Sapiens
augcagcguucaggcucaacccccgcugugcu

SEQ ID NO: 344899 - RNA, 32 nt, Homo Sapiens
agagggaaaggcagcagcggcggcagcuggag

SEQ ID NO: 344900 - RNA, 32 nt, Homo Sapiens
aaacaauacuaaauaaacaucugaucuguaua

SEQ ID NO: 344901 - RNA, 32 nt, Homo Sapiens
aauuagacacaaucucuuauuuuuauaccacu

SEQ ID NO: 344902 - RNA, 32 nt, Homo Sapiens
gauaaagcacgcuaagagcucuggacagagaa

SEQ ID NO: 344903 - RNA, 31 nt, Homo Sapiens
gucugagggcggcggucuccgacucaagacc

SEQ ID NO: 344904 - RNA, 32 nt, Homo Sapiens
caccuccuuccggcugccgaacccgagccccg

SEQ ID NO: 344905 - RNA, 32 nt, Homo Sapiens
gugccguggcacaggcgccggagggagcgcga

SEQ ID NO: 344906 - RNA, 31 nt, Homo Sapiens
aacaugacaaagaaucuagauuguuggaaaa

SEQ ID NO: 344907 - RNA, 32 nt, Homo Sapiens
cgauuccccucuaucagucacugacaguuaau

SEQ ID NO: 344908 - RNA, 30 nt, Homo Sapiens
ccguggucccggcgccgggucccggagaca

SEQ ID NO: 344909 - RNA, 32 nt, Homo Sapiens
cccacagaauccaccaugugugaaccagagag

SEQ ID NO: 344910 - RNA, 32 nt, Homo Sapiens
cuaggugucuccugggaggcaugaagggggca

SEQ ID NO: 344911 - RNA, 32 nt, Homo Sapiens
uaccuugucuuucaaaagacaccugccuuagu

SEQ ID NO: 344912 - RNA, 32 nt, Homo Sapiens
ucauucaaaaggaaacaaaaaauguugaguuu

SEQ ID NO: 344913 - RNA, 32 nt, Homo Sapiens
cagauauaugcacacgugugcugcugagguga

SEQ ID NO: 344914 - RNA, 32 nt, Homo Sapiens
cuggccagauggcguggcugguugccuuaaua

SEQ ID NO: 344915 - RNA, 32 nt, Homo Sapiens
gaggcggcugccugcugcucugcagguaccau

SEQ ID NO: 344916 - RNA, 32 nt, Homo Sapiens
cuaucgcugucaugucuggucguggcaagcaa

SEQ ID NO: 344917 - RNA, 32 nt, Homo Sapiens
gcugugagaaccccuuuauuccaggaagcccu

SEQ ID NO: 344918 - RNA, 32 nt, Homo Sapiens
auugguuggugggcccuuugccuguggaaugu

SEQ ID NO: 344919 - RNA, 32 nt, Homo Sapiens
accucaaauuccugagugugcucugccauguu

SEQ ID NO: 344920 - RNA, 32 nt, Homo Sapiens
cugggaagguauuauggggaggucuuguaaca

SEQ ID NO: 344921 - RNA, 32 nt, Homo Sapiens
guuauaccuauuuuacuacaauaaaaaguaua

SEQ ID NO: 344922 - RNA, 32 nt, Homo Sapiens
uuguuugucuaccugggacuagugggaugaga

SEQ ID NO: 344923 - RNA, 32 nt, Homo Sapiens
acuauuguauaaauaaauguauagcuuaauug

SEQ ID NO: 344924 - RNA, 32 nt, Homo Sapiens
ggggauuuucgucggauguugaguuuaccugg

SEQ ID NO: 344925 - RNA, 32 nt, Homo Sapiens
ugggacggcgagugaugcucagggccagcagc

SEQ ID NO: 344926 - RNA, 32 nt, Homo Sapiens
uucuagccgggcguucgcggccccgccggccc

SEQ ID NO: 344927 - RNA, 32 nt, Homo Sapiens
ggcacuuucaagauccuucucugagaccugca

SEQ ID NO: 344928 - RNA, 32 nt, Homo Sapiens
ucuucccaccaccuuaugaauaaucauguaag

SEQ ID NO: 344929 - RNA, 32 nt, Homo Sapiens
auggcuucagaauuaaaacuaugaaauauuuu

SEQ ID NO: 344930 - RNA, 32 nt, Homo Sapiens
ccggccaaaacccaccaaaaccaagaugguga

SEQ ID NO: 344931 - RNA, 32 nt, Homo Sapiens
ggcccugagcagcagagggccggccacaagcg

SEQ ID NO: 344932 - RNA, 32 nt, Homo Sapiens
auucaguaauaaauaugugaaagcuuuuguuu

SEQ ID NO: 344933 - RNA, 32 nt, Homo Sapiens
uuagaaucuauuauuuaaagaaguauuuguga

SEQ ID NO: 344934 - RNA, 32 nt, Homo Sapiens
guuuauaacacugcuuuuuuuuuucuguaauc

SEQ ID NO: 344935 - RNA, 32 nt, Homo Sapiens
ggcugggggugcuggguggagagaugagauuu

SEQ ID NO: 344936 - RNA, 32 nt, Homo Sapiens
cgucaaaguuuuuauccucauuuuacagcagu

SEQ ID NO: 344937 - RNA, 32 nt, Homo Sapiens
cuccugauugccaguagaaagccaacagaugg

SEQ ID NO: 344938 - RNA, 32 nt, Homo Sapiens
accaggaagcauugcuuuuggacaaggaagaa

SEQ ID NO: 344939 - RNA, 32 nt, Homo Sapiens
acagggccgggcgggcgccgccugcggagagc

SEQ ID NO: 344940 - RNA, 32 nt, Homo Sapiens
ccgugagaggccggacccgcggcggggaccag

SEQ ID NO: 344941 - RNA, 32 nt, Homo Sapiens
aaagcacaaaauguuguauauagagucaaagu

SEQ ID NO: 344942 - RNA, 32 nt, Homo Sapiens
acauacugcaucuauuuuauccucacaucucc

SEQ ID NO: 344943 - RNA, 32 nt, Homo Sapiens
gccccucggccacuccuggguuggagcccgau

SEQ ID NO: 344944 - RNA, 32 nt, Homo Sapiens
auuaauagaaaaucauucaaccaagagaagag

SEQ ID NO: 344945 - RNA, 32 nt, Homo Sapiens
ccgcugcgcgcggcuccugggcugucacaguc

SEQ ID NO: 344946 - RNA, 32 nt, Homo Sapiens
ccucucugcuacucuggugcugcgcugguucc

SEQ ID NO: 344947 - RNA, 32 nt, Homo Sapiens
cggaguccgggcggccaagacccgccgccggc

SEQ ID NO: 344948 - RNA, 32 nt, Homo Sapiens
uccugccggauccaugggggcggccagcugcg

SEQ ID NO: 344949 - RNA, 32 nt, Homo Sapiens
aggcuaaaacaaaucucagaacagucugaaau

SEQ ID NO: 344950 - RNA, 32 nt, Homo Sapiens
gcagggacucgcgagcgcuguggcggcccuga

SEQ ID NO: 344951 - RNA, 32 nt, Homo Sapiens
uagucaaacacucaacaauauuugaacaucua

SEQ ID NO: 344952 - RNA, 32 nt, Homo Sapiens
aaggagggugcauccugagagaggcucuggcu

SEQ ID NO: 344953 - RNA, 32 nt, Homo Sapiens
uucggaaaguuucuaaaaguuguacaacaugc

SEQ ID NO: 344954 - RNA, 27 nt, Homo Sapiens
aucuugugcuucuucacuuacccauua

SEQ ID NO: 344955 - RNA, 32 nt, Homo Sapiens
acugccauuuuuccuuuuuggaggaaauggac

SEQ ID NO: 344956 - RNA, 32 nt, Homo Sapiens
cucgaggggccacugcaaucuuugucaaaggc

SEQ ID NO: 344957 - RNA, 32 nt, Homo Sapiens
gggcugaguaaauaaacauguucugucacaaa

SEQ ID NO: 344958 - RNA, 32 nt, Homo Sapiens
cuggagcugcuggcgccgcgcagguugcugua

SEQ ID NO: 344959 - RNA, 32 nt, Homo Sapiens
aguccagcucaucugccaaaauguagggcuac

SEQ ID NO: 344960 - RNA, 32 nt, Homo Sapiens
ccccagccaggaggcgaccacucagaggaacu

SEQ ID NO: 344961 - RNA, 32 nt, Homo Sapiens
cucaauucggcgaugcugccuacgcgcguggc

SEQ ID NO: 344962 - RNA, 32 nt, Homo Sapiens
ugacuuugccccacccccaucaucugggaguc

SEQ ID NO: 344963 - RNA, 32 nt, Homo Sapiens
ccuucucuauggccuugcuaccugggauucca

SEQ ID NO: 344964 - RNA, 32 nt, Homo Sapiens
caauucuuacucccuuucacagacuguccgga

SEQ ID NO: 344965 - RNA, 32 nt, Homo Sapiens
acucuguuauuuaagauggcuauccagauaau

SEQ ID NO: 344966 - RNA, 32 nt, Homo Sapiens
gaccucaagagccaucuucgaucuuugcggcc

SEQ ID NO: 344967 - RNA, 30 nt, Homo Sapiens
gacucggcgcccgcaguucgggcgcagcac

SEQ ID NO: 344968 - RNA, 32 nt, Homo Sapiens
uucagcccucucucauugguuaccacaauauu

SEQ ID NO: 344969 - RNA, 32 nt, Homo Sapiens
cuauaaaaugcugaauuuuguuauguaaaaug

SEQ ID NO: 344970 - RNA, 32 nt, Homo Sapiens
cagguuuugugcuuauuuauuggggggugggu

SEQ ID NO: 344971 - RNA, 32 nt, Homo Sapiens
agaguucagugcuggcucucacacucaguggu

SEQ ID NO: 344972 - RNA, 32 nt, Homo Sapiens
cggcuggugcggaccugccugccgcccggagc

SEQ ID NO: 344973 - RNA, 32 nt, Homo Sapiens
ccgccccgagaccccagcccguaccugggcuu

SEQ ID NO: 344974 - RNA, 30 nt, Homo Sapiens
ggcgcggcacccgugccccggcauggcgac

SEQ ID NO: 344975 - RNA, 32 nt, Homo Sapiens
cgccccuuccccagccugaccuggcccgccgc

SEQ ID NO: 344976 - RNA, 32 nt, Homo Sapiens
cuccccauuguucuggaaaucuccaggcugcu

SEQ ID NO: 344977 - RNA, 32 nt, Homo Sapiens
caaagcucuaaaacgccgcuucuucagucucu

SEQ ID NO: 344978 - RNA, 32 nt, Homo Sapiens
ggcgugaagaaagcggcgcugugggcgcggga

SEQ ID NO: 344979 - RNA, 32 nt, Homo Sapiens
ggcucagggcuggaacugcugccugauuccug

SEQ ID NO: 344980 - RNA, 32 nt, Homo Sapiens
gcgaauuccucucuggaggccuugcuuucuag

SEQ ID NO: 344981 - RNA, 32 nt, Homo Sapiens
uaguugagaaagucacagauauauuucuccaa

SEQ ID NO: 344982 - RNA, 32 nt, Homo Sapiens
ccugcaucccucuauuuuuccaucccuccauu

SEQ ID NO: 344983 - RNA, 32 nt, Homo Sapiens
gagaaacaaaucuauuuagagaaacagcuggc

SEQ ID NO: 344984 - RNA, 32 nt, Homo Sapiens
uuuuauggaaagauuuuuuuaaccuuaccacg

SEQ ID NO: 344985 - RNA, 32 nt, Homo Sapiens
uucaucaaaaggauuaaugccugcaucaucau

SEQ ID NO: 344986 - RNA, 32 nt, Homo Sapiens
cuuccucccuucccucauccugcauguuccac

SEQ ID NO: 344987 - RNA, 32 nt, Homo Sapiens
agucuuuagaauuugggggaggguggggggag

SEQ ID NO: 344988 - RNA, 32 nt, Homo Sapiens
gaccaaagggcaucuaaaucugcagcaaccau

SEQ ID NO: 344989 - RNA, 32 nt, Homo Sapiens
aaaguguagcaucauauauaaaaagaguuucg

SEQ ID NO: 344990 - RNA, 32 nt, Homo Sapiens
aaggugagguauagaguccaagaucaaucagg

SEQ ID NO: 344991 - RNA, 32 nt, Homo Sapiens
agugacugcagccucauuucugauuggaacug

SEQ ID NO: 344992 - RNA, 32 nt, Homo Sapiens
uucuuauaccauaaguuuuauuugguaucauu

SEQ ID NO: 344993 - RNA, 31 nt, Homo Sapiens
acaagauggcacugccaucuuugagcagagc

SEQ ID NO: 344994 - RNA, 32 nt, Homo Sapiens
gggggccaccuaagcucugucuucucccucug

SEQ ID NO: 344995 - RNA, 30 nt, Homo Sapiens
ccaggaugacagagcugaggcagagggugg

SEQ ID NO: 344996 - RNA, 32 nt, Homo Sapiens
cgggcgggcggcgggcgggcgcggguuugauu

SEQ ID NO: 344997 - RNA, 32 nt, Homo Sapiens
agagaccucgcgggcgcggagcgaaaggccgg

SEQ ID NO: 344998 - RNA, 32 nt, Homo Sapiens
ccagccccaucccaaacccuucagugccaaaa

SEQ ID NO: 344999 - RNA, 32 nt, Homo Sapiens
ccacgaaauguuuuaacugccauuccaaguga

SEQ ID NO: 345000 - RNA, 32 nt, Homo Sapiens
uuccagcccuccggagagugggcuuggcccua

SEQ ID NO: 345001 - RNA, 32 nt, Homo Sapiens
gguaucccgcggcggcucuggaagcuggacgc

SEQ ID NO: 345002 - RNA, 32 nt, Homo Sapiens
auuguaauauauuucuguuauuuauagauguu

SEQ ID NO: 345003 - RNA, 32 nt, Homo Sapiens
cugacgcggccaccucuuucuggaggggcuga

SEQ ID NO: 345004 - RNA, 32 nt, Homo Sapiens
agggagggcacccacccaucagguugggcacu

SEQ ID NO: 345005 - RNA, 29 nt, Homo Sapiens
auguauguguguauguacuacacuuuaua

SEQ ID NO: 345006 - RNA, 32 nt, Homo Sapiens
ccuucccuuuucuccuucccuacuuuguacaa

SEQ ID NO: 345007 - RNA, 32 nt, Homo Sapiens
ucuuuucgcgauuuccucuaccuuggugcucu

SEQ ID NO: 345008 - RNA, 32 nt, Homo Sapiens
agaagagcaagauaaacuugaaaauaagcuca

SEQ ID NO: 345009 - RNA, 32 nt, Homo Sapiens
agagcccuuuugcuauaccacagucuuucguu

SEQ ID NO: 345010 - RNA, 32 nt, Homo Sapiens
uugagggagcguggagcugcggugcccuggcc

SEQ ID NO: 345011 - RNA, 32 nt, Homo Sapiens
augucuuagacaauuaccuuuacauuucaagc

SEQ ID NO: 345012 - RNA, 32 nt, Homo Sapiens
uagaaggagggucagggauuuuuuacagucug

SEQ ID NO: 345013 - RNA, 32 nt, Homo Sapiens
ggggaggcagccugagccccagcccacaugcc

SEQ ID NO: 345014 - RNA, 32 nt, Homo Sapiens
ccacccagccugcuccuccagcuggggagaga

SEQ ID NO: 345015 - RNA, 32 nt, Homo Sapiens
cagcuccugaggugcuggccagugcaccccca

SEQ ID NO: 345016 - RNA, 32 nt, Homo Sapiens
cacauuccuuccugagaacugucuaguccugg

SEQ ID NO: 345017 - RNA, 32 nt, Homo Sapiens
ugccuguaaucccagcacuuucaaaggcugag

SEQ ID NO: 345018 - RNA, 32 nt, Homo Sapiens
cugaaccugccagugcugacccugcagcacuu

SEQ ID NO: 345019 - RNA, 32 nt, Homo Sapiens
cuagaguggccucagcuagguaaccaacggga

SEQ ID NO: 345020 - RNA, 32 nt, Homo Sapiens
auuaaauguuuccucuguauucucagggugaa

SEQ ID NO: 345021 - RNA, 32 nt, Homo Sapiens
uaucgccucccauuuucccuucaaaguagaau

SEQ ID NO: 345022 - RNA, 32 nt, Homo Sapiens
cuuuagcauuuuucuuuuuucauuucauaauu

SEQ ID NO: 345023 - RNA, 32 nt, Homo Sapiens
uaagaagucacuucccucuacuccgagccccu

SEQ ID NO: 345024 - RNA, 32 nt, Homo Sapiens
acuagaagaggaagaagaagaggaaguaguug

SEQ ID NO: 345025 - RNA, 32 nt, Homo Sapiens
uuuuacaggcaaagaggcgaauuguagaauug

SEQ ID NO: 345026 - RNA, 32 nt, Homo Sapiens
gaccgcagcaaccaccggagcgugagcaacag

SEQ ID NO: 345027 - RNA, 32 nt, Homo Sapiens
uggguuuuuuucucuuuuuuucauucugguau

SEQ ID NO: 345028 - RNA, 32 nt, Homo Sapiens
cgggcgggggaucggggguuagggguggaguc

SEQ ID NO: 345029 - RNA, 32 nt, Homo Sapiens
agcccgcugggaagaggggacucgggaggaca

SEQ ID NO: 345030 - RNA, 31 nt, Homo Sapiens
cggccgucucagagaaaguuuuucccaucgg

SEQ ID NO: 345031 - RNA, 32 nt, Homo Sapiens
cucccucgccaauccggcuccggcgccggcgc

SEQ ID NO: 345032 - RNA, 32 nt, Homo Sapiens
uccaugccauuuagcagucucaucuccuagau

SEQ ID NO: 345033 - RNA, 32 nt, Homo Sapiens
gaaauaaaacaaaagcauauucaauggaaggu

SEQ ID NO: 345034 - RNA, 32 nt, Homo Sapiens
uuuugaauauggguaaaucagaauaaugagac

SEQ ID NO: 345035 - RNA, 32 nt, Homo Sapiens
acugggagggggugggggaucugggcaaggug

SEQ ID NO: 345036 - RNA, 32 nt, Homo Sapiens
gagaggcugggcuugcaggcgcaguagcucca

SEQ ID NO: 345037 - RNA, 32 nt, Homo Sapiens
ugggcaccucagccccaccuuccauuccucuc

SEQ ID NO: 345038 - RNA, 32 nt, Homo Sapiens
ugcaauuguaaauaaaagucaccacuuuugcc

SEQ ID NO: 345039 - RNA, 32 nt, Homo Sapiens
cuacuggggccgccuccuccaggcggggcccg

SEQ ID NO: 345040 - RNA, 32 nt, Homo Sapiens
ucauccccuuggcgcuauucucgugagaguaa

SEQ ID NO: 345041 - RNA, 32 nt, Homo Sapiens
gggagaaugaauugucaugaaaaauugggguu

SEQ ID NO: 345042 - RNA, 32 nt, Homo Sapiens
agaggaguuggucuuucugucccaguggcaga

SEQ ID NO: 345043 - RNA, 32 nt, Homo Sapiens
uuugaacucugcagcaggcuggugcuguguag

SEQ ID NO: 345044 - RNA, 32 nt, Homo Sapiens
acgccuccauccccggcuccccuaaagguaga

SEQ ID NO: 345045 - RNA, 32 nt, Homo Sapiens
agaugaaacacuucaaaacccugguuauagau

SEQ ID NO: 345046 - RNA, 32 nt, Homo Sapiens
uuuguuaaauuaaccaugacacaaauuauucu

SEQ ID NO: 345047 - RNA, 32 nt, Homo Sapiens
ugucuauuuuugacaauaaaacauuauauauu

SEQ ID NO: 345048 - RNA, 32 nt, Homo Sapiens
augccccauuccacagccccagccccagcccc

SEQ ID NO: 345049 - RNA, 32 nt, Homo Sapiens
gaaauuuaaugauuaaagagaagccagaauug

SEQ ID NO: 345050 - RNA, 32 nt, Homo Sapiens
gcgccccggcgcccagcuggcucggggacagc

SEQ ID NO: 345051 - RNA, 32 nt, Homo Sapiens
gcgaggccucccccuuccuccucgccauccua

SEQ ID NO: 345052 - RNA, 32 nt, Homo Sapiens
ugaaguguugacuuuguaaaucugcccacacc

SEQ ID NO: 345053 - RNA, 32 nt, Homo Sapiens
ggcagaucaccugaggccaggcuggucucgaa

SEQ ID NO: 345054 - RNA, 32 nt, Homo Sapiens
cagucccccuccccgggccucucuccucuugc

SEQ ID NO: 345055 - RNA, 32 nt, Homo Sapiens
uccguucugcccgaggaugaagaauaugagac

SEQ ID NO: 345056 - RNA, 32 nt, Homo Sapiens
agggccaggcaaaagguuugcuuguuuuuucu

SEQ ID NO: 345057 - RNA, 32 nt, Homo Sapiens
cacagucauuucuggucugugcaccaaaggau

SEQ ID NO: 345058 - RNA, 32 nt, Homo Sapiens
gggacucaggccaagaggcgugaccucgggcc

SEQ ID NO: 345059 - RNA, 32 nt, Homo Sapiens
aaagguuuuuucugauugaagcuuuaauggag

SEQ ID NO: 345060 - RNA, 32 nt, Homo Sapiens
agacuuauaaaaauaaaaaggcuauuuuauug

SEQ ID NO: 345061 - RNA, 32 nt, Homo Sapiens
uaaugucauuugaaugaaaaucuuaucacauu

SEQ ID NO: 345062 - RNA, 32 nt, Homo Sapiens
auugcccugaaauuauuuuguuuacuuuuuug

SEQ ID NO: 345063 - RNA, 32 nt, Homo Sapiens
aaaaaacagucaauauggauuuagaaaaagga

SEQ ID NO: 345064 - RNA, 32 nt, Homo Sapiens
gccgccacggcgucgcuuggcuccucacuccc

SEQ ID NO: 345065 - RNA, 32 nt, Homo Sapiens
aagggggaaacagucuguucucccuaauuaaa

SEQ ID NO: 345066 - RNA, 32 nt, Homo Sapiens
gucaaaggagaugaacaguuuuguagcgcuua

SEQ ID NO: 345067 - RNA, 32 nt, Homo Sapiens
gagucacuguaauaucaaaaaauccccagcag

SEQ ID NO: 345068 - RNA, 32 nt, Homo Sapiens
ggcgaugcaggucuuccacagcuaaggaacca

SEQ ID NO: 345069 - RNA, 32 nt, Homo Sapiens
aguaacaauggcuaaugauaauuuagcuuuau

SEQ ID NO: 345070 - RNA, 30 nt, Homo Sapiens
gucuaagagaagcucuaagacguuuaagga

SEQ ID NO: 345071 - RNA, 32 nt, Homo Sapiens
uugcaaucuugugcuuuucagacgaucccacu

SEQ ID NO: 345072 - RNA, 32 nt, Homo Sapiens
ggagcggugaggaggagccacagcacaugggg

SEQ ID NO: 345073 - RNA, 32 nt, Homo Sapiens
aagugugacugcagcaggcagcucuggaaaau

SEQ ID NO: 345074 - RNA, 32 nt, Homo Sapiens
aacgaugugaucgaaaggcaaauauuuauuuu

SEQ ID NO: 345075 - RNA, 32 nt, Homo Sapiens
uuaaguuaguaaauaccaaaauuuauuuaaag

SEQ ID NO: 345076 - RNA, 32 nt, Homo Sapiens
gguugguggucggagagggcgaggggucccag

SEQ ID NO: 345077 - RNA, 32 nt, Homo Sapiens
guuaggaagaucugggagauagggguugcugg

SEQ ID NO: 345078 - RNA, 32 nt, Homo Sapiens
aauuguguuagaaauuaugacuguaaagaaau

SEQ ID NO: 345079 - RNA, 32 nt, Homo Sapiens
uggccaggugguggagacagagacaggcccug

SEQ ID NO: 345080 - RNA, 32 nt, Homo Sapiens
guuccaggcaccuaaaaucaauuaggaagaca

SEQ ID NO: 345081 - RNA, 32 nt, Homo Sapiens
cggcccaucggaucgugccgcggcggccgagc

SEQ ID NO: 345082 - RNA, 32 nt, Homo Sapiens
aggucuccuaaaacugggauuaagaaaccuug

SEQ ID NO: 345083 - RNA, 32 nt, Homo Sapiens
cagccgcugugggcuccuggggagauggaggg

SEQ ID NO: 345084 - RNA, 32 nt, Homo Sapiens
acccugcgguccgugcacucccccgcugucuu

SEQ ID NO: 345085 - RNA, 32 nt, Homo Sapiens
gugcuggacauccuugcagcuccagcuggccu

SEQ ID NO: 345086 - RNA, 32 nt, Homo Sapiens
agguuauaacagaaaacugacagagaaguaau

SEQ ID NO: 345087 - RNA, 32 nt, Homo Sapiens
gagguuuauuuauuuuucucuuuccuacuccu

SEQ ID NO: 345088 - RNA, 32 nt, Homo Sapiens
ccuuucuuuuucugugucuugucugucuuuuc

SEQ ID NO: 345089 - RNA, 32 nt, Homo Sapiens
gcgcggcccacccagaggccgacggcgcuccc

SEQ ID NO: 345090 - RNA, 32 nt, Homo Sapiens
gaaagcacagaaacagugaauccaagaaaaca

SEQ ID NO: 345091 - RNA, 32 nt, Homo Sapiens
ccagcuuggugcccuuugauggguggugagug

SEQ ID NO: 345092 - RNA, 32 nt, Homo Sapiens
cagcuucaugacuacgcggagcgggagagcgg

SEQ ID NO: 345093 - RNA, 32 nt, Homo Sapiens
gucucccugcuggcacuucuccccucccuggc

SEQ ID NO: 345094 - RNA, 32 nt, Homo Sapiens
accaccuuucccuucagcauucccuuucauga

SEQ ID NO: 345095 - RNA, 32 nt, Homo Sapiens
gcgaagcccacuuuuguauaccggccggcgcg

SEQ ID NO: 345096 - RNA, 32 nt, Homo Sapiens
aggucccuuucugucacccagguuagaguaga

SEQ ID NO: 345097 - RNA, 32 nt, Homo Sapiens
ucccugaaagacugaagaaaguguagugcaug

SEQ ID NO: 345098 - RNA, 32 nt, Homo Sapiens
uucccacuuccacccccguuagcuuccugcag

SEQ ID NO: 345099 - RNA, 32 nt, Homo Sapiens
gcgcggggccgcggcggugcggguucuagggc

SEQ ID NO: 345100 - RNA, 32 nt, Homo Sapiens
uaauaaagaacaaaaaauugccuguagaaaac

SEQ ID NO: 345101 - RNA, 32 nt, Homo Sapiens
aaacgaguauauaaaaaauuugauccaguugg

SEQ ID NO: 345102 - RNA, 32 nt, Homo Sapiens
ccugaaugcccccacccuuccccuaagcacac

SEQ ID NO: 345103 - RNA, 32 nt, Homo Sapiens
cuccuuuaauaaaaugugucaguaauuuuaag

SEQ ID NO: 345104 - RNA, 32 nt, Homo Sapiens
uaggaagccuguggugagaacaacaacagugc

SEQ ID NO: 345105 - RNA, 32 nt, Homo Sapiens
gccacaaaaaagaaugagauccugucauuugc

SEQ ID NO: 345106 - RNA, 32 nt, Homo Sapiens
ugaaggcuugaaaagaggcaugugaagagcuu

SEQ ID NO: 345107 - RNA, 32 nt, Homo Sapiens
aaaauaauuuugaguuuagaguauuaucuuuu

SEQ ID NO: 345108 - RNA, 32 nt, Homo Sapiens
ucuugcucugucgcccacccaggcuggaguac

SEQ ID NO: 345109 - RNA, 32 nt, Homo Sapiens
cugagaaauuguuacaaacaaggucagauuuu

SEQ ID NO: 345110 - RNA, 32 nt, Homo Sapiens
gaagggugggacuggaaggcacuaaggggaag

SEQ ID NO: 345111 - RNA, 32 nt, Homo Sapiens
gcggcggacgggucggaucgugcucguggcca

SEQ ID NO: 345112 - RNA, 32 nt, Homo Sapiens
ccacgccucucgccgccucuggcacccugccc

SEQ ID NO: 345113 - RNA, 32 nt, Homo Sapiens
cagccucggcggcggcggccgaaccaaccgag

SEQ ID NO: 345114 - RNA, 32 nt, Homo Sapiens
agagggucaccggagugaggaacugauuuggc

SEQ ID NO: 345115 - RNA, 32 nt, Homo Sapiens
augaagaaagacucugagauguggagacugau

SEQ ID NO: 345116 - RNA, 32 nt, Homo Sapiens
ucggugcgcccggccgccugcacccccaggag

SEQ ID NO: 345117 - RNA, 32 nt, Homo Sapiens
uggggguuggcucugaugguauucaccauggg

SEQ ID NO: 345118 - RNA, 32 nt, Homo Sapiens
agauuucugaugaggaggcagaugaugcagau

SEQ ID NO: 345119 - RNA, 32 nt, Homo Sapiens
uugacaauauauaugcauguguuuaaaccaaa

SEQ ID NO: 345120 - RNA, 32 nt, Homo Sapiens
cuggcgagcgggcaggcggccggcgcccugga

SEQ ID NO: 345121 - RNA, 32 nt, Homo Sapiens
ugguggucaccuguagucccagcugcucggga

SEQ ID NO: 345122 - RNA, 32 nt, Homo Sapiens
uccuggcccucccccaaccccaaguccucgcc

SEQ ID NO: 345123 - RNA, 32 nt, Homo Sapiens
gcagauuuuuaaacuuuauuuucauaauuucu

SEQ ID NO: 345124 - RNA, 32 nt, Homo Sapiens
uuccugggaaaacaacugucucuuggaauuau

SEQ ID NO: 345125 - RNA, 32 nt, Homo Sapiens
ggagggugguguugcgcggggcugggauuagg

SEQ ID NO: 345126 - RNA, 32 nt, Homo Sapiens
ucaagauauuaagagguauccuugauuuauuu

SEQ ID NO: 345127 - RNA, 32 nt, Homo Sapiens
gcuacaauauuuuuaaagguuucuuuuuuaac

SEQ ID NO: 345128 - RNA, 32 nt, Homo Sapiens
acguccccaagcccugucucccugucucuaca

SEQ ID NO: 345129 - RNA, 32 nt, Homo Sapiens
uugaaaacuaaauuuucuacuguauucccagc

SEQ ID NO: 345130 - RNA, 32 nt, Homo Sapiens
caagcccugggccagcagcacccccuuguggc

SEQ ID NO: 345131 - RNA, 32 nt, Homo Sapiens
accuaggccaaggggaggucucugcccccuuc

SEQ ID NO: 345132 - RNA, 32 nt, Homo Sapiens
gacgagaacgacccuucggugagagagcaccc

SEQ ID NO: 345133 - RNA, 32 nt, Homo Sapiens
ugccuuuuguuguuuucucucuuuggugauuc

SEQ ID NO: 345134 - RNA, 32 nt, Homo Sapiens
aucggaagucauaaguugacucuuuuuugaug

SEQ ID NO: 345135 - RNA, 32 nt, Homo Sapiens
ugaaacuuaaaauugagacaaucuuguguuuc

SEQ ID NO: 345136 - RNA, 32 nt, Homo Sapiens
aggcccugggaggggcucucuaaucucccagc

SEQ ID NO: 345137 - RNA, 32 nt, Homo Sapiens
caaccugggcgacagagccagacucugucuca

SEQ ID NO: 345138 - RNA, 32 nt, Homo Sapiens
ucuggcuuuggccuguggucugugauacccau

SEQ ID NO: 345139 - RNA, 32 nt, Homo Sapiens
ggcagaccccccacccugcagaugcuucuaau

SEQ ID NO: 345140 - RNA, 32 nt, Homo Sapiens
augauuacugucaccuuguggugcuggacuug

SEQ ID NO: 345141 - RNA, 32 nt, Homo Sapiens
cugggcccaagccccaccguggagauggcggc

SEQ ID NO: 345142 - RNA, 32 nt, Homo Sapiens
uccucccugcccagggccugcccgccagagcc

SEQ ID NO: 345143 - RNA, 32 nt, Homo Sapiens
ggcugauccguuaugcagaaauccaaccaaca

SEQ ID NO: 345144 - RNA, 32 nt, Homo Sapiens
cagccgugccccagccuggaccccuggggcuc

SEQ ID NO: 345145 - RNA, 32 nt, Homo Sapiens
gguagcugcuccacacgcagcaaaggagccau

SEQ ID NO: 345146 - RNA, 32 nt, Homo Sapiens
gacgaccagggccagcuguucuagagcgggaa

SEQ ID NO: 345147 - RNA, 32 nt, Homo Sapiens
ccaagaaaacugcuuuggauauuuuuagauaa

SEQ ID NO: 345148 - RNA, 32 nt, Homo Sapiens
ugcagcucuuugacaaugucaucuacccccag

SEQ ID NO: 345149 - RNA, 32 nt, Homo Sapiens
ugcauuaauaaaaugaggcuuuuuuagaggaa

SEQ ID NO: 345150 - RNA, 32 nt, Homo Sapiens
ggaggcggcacugugggggcugccggcagccg

SEQ ID NO: 345151 - RNA, 32 nt, Homo Sapiens
uugaaccugccagcugauuugaaauacuuuca

SEQ ID NO: 345152 - RNA, 32 nt, Homo Sapiens
gaacaagccagacuuggugguuuccaagcaac

SEQ ID NO: 345153 - RNA, 32 nt, Homo Sapiens
gagacgggacccgacggugacugcgcaaggug

SEQ ID NO: 345154 - RNA, 32 nt, Homo Sapiens
caacuaugcugacuccacgauccugccacccu

SEQ ID NO: 345155 - RNA, 32 nt, Homo Sapiens
aguuacaauuacaucucuaauuuuggauaaua

SEQ ID NO: 345156 - RNA, 32 nt, Homo Sapiens
aaaggauggggagaaggcugcagaugccgagg

SEQ ID NO: 345157 - RNA, 32 nt, Homo Sapiens
ggguagaucuaguugaggaagugugggccugg

SEQ ID NO: 345158 - RNA, 32 nt, Homo Sapiens
aaccucuuuuguucucuuuagacaucuucuac

SEQ ID NO: 345159 - RNA, 32 nt, Homo Sapiens
agccugcuccaccauuaucuuuugcauuccaa

SEQ ID NO: 345160 - RNA, 32 nt, Homo Sapiens
aggcgccccucacccccacaccugcugcaugg

SEQ ID NO: 345161 - RNA, 32 nt, Homo Sapiens
gccucugcgccgggcagcuuaaagggaccacg

SEQ ID NO: 345162 - RNA, 32 nt, Homo Sapiens
uaaauaaaguguucuccuuuuaaggguggguu

SEQ ID NO: 345163 - RNA, 32 nt, Homo Sapiens
uuaaaauauuucaauaaagauagcauguuaga

SEQ ID NO: 345164 - RNA, 32 nt, Homo Sapiens
cuuuccagccggcggcagccgcggcggccgcc

SEQ ID NO: 345165 - RNA, 32 nt, Homo Sapiens
gucuaaggggcacguggagcaagagauccugg

SEQ ID NO: 345166 - RNA, 30 nt, Homo Sapiens
cgcugccgaggcucggggcgcgcgcaguug

SEQ ID NO: 345167 - RNA, 32 nt, Homo Sapiens
gggguuaaauuaauaguaaaauaauccaauau

SEQ ID NO: 345168 - RNA, 32 nt, Homo Sapiens
guacaaauaacaucuaugaauaucauaucugu

SEQ ID NO: 345169 - RNA, 32 nt, Homo Sapiens
aauacacauaaggcaauucaugcugaagagaa

SEQ ID NO: 345170 - RNA, 32 nt, Homo Sapiens
accuccuugggucaugcccacccacccuuucc

SEQ ID NO: 345171 - RNA, 32 nt, Homo Sapiens
uuucugaggagaaacucuuggugagaauuccc

SEQ ID NO: 345172 - RNA, 32 nt, Homo Sapiens
cucucaguacuuguuacccagcuucucaacau

SEQ ID NO: 345173 - RNA, 32 nt, Homo Sapiens
uuucuuuucuuuucuuuuuucuuuuuuuguuc

SEQ ID NO: 345174 - RNA, 32 nt, Homo Sapiens
uugacacuugaaaaaagauacuauuuauaagu

SEQ ID NO: 345175 - RNA, 32 nt, Homo Sapiens
gggagggagggagaguggaggguuugacgggc

SEQ ID NO: 345176 - RNA, 32 nt, Homo Sapiens
uauguuuaauauauuuuauuuuuuaauugucu

SEQ ID NO: 345177 - RNA, 32 nt, Homo Sapiens
aagugucaucuaugacaaaaccacagccaaca

SEQ ID NO: 345178 - RNA, 32 nt, Homo Sapiens
ccuauaaugaauucagaaaucacuacaagcag

SEQ ID NO: 345179 - RNA, 32 nt, Homo Sapiens
gugcggcggucccgcgcccggcgauguucccg

SEQ ID NO: 345180 - RNA, 32 nt, Homo Sapiens
ugccccagccuccgcagccgcggcgcguccac

SEQ ID NO: 345181 - RNA, 32 nt, Homo Sapiens
cggcaacugaaucuuggucccugugaugucaa

SEQ ID NO: 345182 - RNA, 32 nt, Homo Sapiens
uuccuagagaauaguaaccagguuuuguuuuu

SEQ ID NO: 345183 - RNA, 32 nt, Homo Sapiens
uaaauuacuuuaaaaauaaacuuuguaagcag

SEQ ID NO: 345184 - RNA, 32 nt, Homo Sapiens
gugaauuguguauaaauuuauucuaacauuua

SEQ ID NO: 345185 - RNA, 32 nt, Homo Sapiens
auacgugcugcuuuccuucucugagcuuaggc

SEQ ID NO: 345186 - RNA, 32 nt, Homo Sapiens
gcaaguuaagcagcagaguauaaggugcuuua

SEQ ID NO: 345187 - RNA, 32 nt, Homo Sapiens
aaacuucaguuauuguauugguaacuauaaaa

SEQ ID NO: 345188 - RNA, 32 nt, Homo Sapiens
cagccagcggcugcaggcgaguuucuagaacc

SEQ ID NO: 345189 - RNA, 32 nt, Homo Sapiens
auauuacauuuuaauaaugcuuuuguauggca

SEQ ID NO: 345190 - RNA, 32 nt, Homo Sapiens
cuugugaguccuccacacucguuccccauugg

SEQ ID NO: 345191 - RNA, 32 nt, Homo Sapiens
gacaggcagcggggcaguggugaucaggaagg

SEQ ID NO: 345192 - RNA, 32 nt, Homo Sapiens
agacagaccucuuuccucucucuggccuggga

SEQ ID NO: 345193 - RNA, 32 nt, Homo Sapiens
acugagaacuaguauuauaugguuuuuaaaaa

SEQ ID NO: 345194 - RNA, 32 nt, Homo Sapiens
cuuugcucaauccaugccucuugcccucaguc

SEQ ID NO: 345195 - RNA, 32 nt, Homo Sapiens
agaugggcucccggcccgggaggcggcggugg

SEQ ID NO: 345196 - RNA, 32 nt, Homo Sapiens
aggccaggcaguucugcguuugcaauggccuu

SEQ ID NO: 345197 - RNA, 32 nt, Homo Sapiens
cuugagccacuacucccucauccccucaggag

SEQ ID NO: 345198 - RNA, 32 nt, Homo Sapiens
uucuggcccucuccagugcucuaggaggucag

SEQ ID NO: 345199 - RNA, 32 nt, Homo Sapiens
ccucugucucuuaagugugaugguuuuccaga

SEQ ID NO: 345200 - RNA, 32 nt, Homo Sapiens
guuggauuuaauagaauugagggucaagcaac

SEQ ID NO: 345201 - RNA, 32 nt, Homo Sapiens
uuaauaucuaauguggcugagaauaaacuaga

SEQ ID NO: 345202 - RNA, 30 nt, Homo Sapiens
cccugcccaguguuccccuaacuccaccua

SEQ ID NO: 345203 - RNA, 32 nt, Homo Sapiens
ugagccacccuuccagccccagcccaccaugg

SEQ ID NO: 345204 - RNA, 32 nt, Homo Sapiens
ggaggcagagagaggagcaggggccaugggcu

SEQ ID NO: 345205 - RNA, 32 nt, Homo Sapiens
augacucuagauaauugugauuuuaaacacuu

SEQ ID NO: 345206 - RNA, 32 nt, Homo Sapiens
uuuucucuuccggaggggcgcuccucagugug

SEQ ID NO: 345207 - RNA, 32 nt, Homo Sapiens
caauuaaacaauuuauggcucuauuuuguaaa

SEQ ID NO: 345208 - RNA, 32 nt, Homo Sapiens
ccauauaagcuuaccuaacaaacaguuauauc

SEQ ID NO: 345209 - RNA, 32 nt, Homo Sapiens
auaauuaaggcacaguugauuuuguagaguau

SEQ ID NO: 345210 - RNA, 32 nt, Homo Sapiens
ugccagggaggccccaggacccuguggucccc

SEQ ID NO: 345211 - RNA, 32 nt, Homo Sapiens
aauugauaaaauuuugugauaauuaugauuau

SEQ ID NO: 345212 - RNA, 32 nt, Homo Sapiens
uucucuuccuucccuguuugucaauguuuuau

SEQ ID NO: 345213 - RNA, 31 nt, Homo Sapiens
uauucacaagagggugcuaaugagaugguuu

SEQ ID NO: 345214 - RNA, 32 nt, Homo Sapiens
aaagcagggcuuugaggacuccgauugucgag

SEQ ID NO: 345215 - RNA, 32 nt, Homo Sapiens
cccgggaggcggagguugcaugagcugagauc

SEQ ID NO: 345216 - RNA, 32 nt, Homo Sapiens
gcagcaggagccgcagccggagucacagccgc

SEQ ID NO: 345217 - RNA, 32 nt, Homo Sapiens
ccccgccuucucccgggaccgcccggccggag

SEQ ID NO: 345218 - RNA, 32 nt, Homo Sapiens
cccggugucuggggagcggcugccggccgggc

SEQ ID NO: 345219 - RNA, 32 nt, Homo Sapiens
ucugccuugcaucacccucagccuaagggagu

SEQ ID NO: 345220 - RNA, 32 nt, Homo Sapiens
uagccuggccgagccugggaaccaccuggggc

SEQ ID NO: 345221 - RNA, 32 nt, Homo Sapiens
uuucuucuugcaugcaugucagcuacauaaac

SEQ ID NO: 345222 - RNA, 32 nt, Homo Sapiens
auguguuugauacuguauacaaaagacaugaa

SEQ ID NO: 345223 - RNA, 32 nt, Homo Sapiens
gagagaggucuggauucuuauuuuuucugggc

SEQ ID NO: 345224 - RNA, 32 nt, Homo Sapiens
aacagggauguuuguuucuguuuuggcaagga

SEQ ID NO: 345225 - RNA, 32 nt, Homo Sapiens
ggaagcugaggcacaagaauugccugaaccca

SEQ ID NO: 345226 - RNA, 32 nt, Homo Sapiens
gaaacuacucacccugccacuccagcucauac

SEQ ID NO: 345227 - RNA, 29 nt, Homo Sapiens
ggaaauaaagcguauuauuuucuugggaa

SEQ ID NO: 345228 - RNA, 32 nt, Homo Sapiens
ugaagauauuccauggaucagaauauaaagca

SEQ ID NO: 345229 - RNA, 32 nt, Homo Sapiens
gguuuuuguuuuuucuuuucagauguuaaugu

SEQ ID NO: 345230 - RNA, 32 nt, Homo Sapiens
ucagccugcgcgcgccgcgcccugugucuccg

SEQ ID NO: 345231 - RNA, 32 nt, Homo Sapiens
aauaaggcuucucucauuuguuuuugauaccu

SEQ ID NO: 345232 - RNA, 32 nt, Homo Sapiens
ccacucgccaggaggccacgggccacgggaag

SEQ ID NO: 345233 - RNA, 32 nt, Homo Sapiens
ggacccccgcgccccagggccugcucagcccc

SEQ ID NO: 345234 - RNA, 30 nt, Homo Sapiens
ggaaaaaguauuagccaccaucuuaccuca

SEQ ID NO: 345235 - RNA, 32 nt, Homo Sapiens
uggaugaagagcaaaacugaggacaugguuga

SEQ ID NO: 345236 - RNA, 32 nt, Homo Sapiens
aaauacacugaauauguuuauuaguuccaguu

SEQ ID NO: 345237 - RNA, 32 nt, Homo Sapiens
gucgguucgugugccccgggccccauggagcu

SEQ ID NO: 345238 - RNA, 32 nt, Homo Sapiens
accaggggccggaagcgcgcgccgccacugcc

SEQ ID NO: 345239 - RNA, 32 nt, Homo Sapiens
aucauaugauaacucuguuuuaauuuuugaga

SEQ ID NO: 345240 - RNA, 32 nt, Homo Sapiens
auuuaaaugcccucauccguauucuuuguguu

SEQ ID NO: 345241 - RNA, 32 nt, Homo Sapiens
agaugcugcgccuccugggccacuggcccagc

SEQ ID NO: 345242 - RNA, 32 nt, Homo Sapiens
augauuccagucaaugggggaccgcccguguc

SEQ ID NO: 345243 - RNA, 32 nt, Homo Sapiens
gagggcggcaugccgaagggucugucugggug

SEQ ID NO: 345244 - RNA, 32 nt, Homo Sapiens
ucccuucugcaccacugcccguacccuuaccc

SEQ ID NO: 345245 - RNA, 32 nt, Homo Sapiens
cagaauguagaaaggacauauuugaggaagua

SEQ ID NO: 345246 - RNA, 32 nt, Homo Sapiens
agaauauuuuggaauuucucuuuugguauucu

SEQ ID NO: 345247 - RNA, 32 nt, Homo Sapiens
acaggcuugcugucaaaauauccaaacaggga

SEQ ID NO: 345248 - RNA, 32 nt, Homo Sapiens
cucucuuucuucugccaggguucuuccucucc

SEQ ID NO: 345249 - RNA, 32 nt, Homo Sapiens
aaaaugguucuuuacuuuugugaucuuccucc

SEQ ID NO: 345250 - RNA, 32 nt, Homo Sapiens
accauugcacuccagccugggcgacagagucu

SEQ ID NO: 345251 - RNA, 32 nt, Homo Sapiens
ccugaauucuaccugcauuucaauuaacuaua

SEQ ID NO: 345252 - RNA, 32 nt, Homo Sapiens
gguugugggcuccgaggcgcuccucgccacug

SEQ ID NO: 345253 - RNA, 32 nt, Homo Sapiens
cuggagaugacuugaggccuuacuuaaaccca

SEQ ID NO: 345254 - RNA, 31 nt, Homo Sapiens
aagcacugcagcugccugcacccccgggcuu

SEQ ID NO: 345255 - RNA, 32 nt, Homo Sapiens
gcccagcccuuccuuuauuuccaugggaauuu

SEQ ID NO: 345256 - RNA, 32 nt, Homo Sapiens
auuaucuugugauuuuaagaaaagaguuuucu

SEQ ID NO: 345257 - RNA, 32 nt, Homo Sapiens
cuuaauggccccagcaucugccucuggaaaac

SEQ ID NO: 345258 - RNA, 32 nt, Homo Sapiens
uacgucucaugcagaaaaucagcaaauccuca

SEQ ID NO: 345259 - RNA, 32 nt, Homo Sapiens
ggcgcucucccacccucaggcuccucgguggc

SEQ ID NO: 345260 - RNA, 32 nt, Homo Sapiens
cagaaggccccggccugaggaggccgcccacc

SEQ ID NO: 345261 - RNA, 32 nt, Homo Sapiens
cagagccgcgcaccgcccgccgccgcaggucg

SEQ ID NO: 345262 - RNA, 32 nt, Homo Sapiens
cucuacacucugggggucucugcccaggcacg

SEQ ID NO: 345263 - RNA, 32 nt, Homo Sapiens
guaaugaaggcacagcacagcaguacuccaca

SEQ ID NO: 345264 - RNA, 32 nt, Homo Sapiens
uaggaucaaggauagacaagguauaguaguua

SEQ ID NO: 345265 - RNA, 29 nt, Homo Sapiens
augaaaauauguauuaaucagagguggcu

SEQ ID NO: 345266 - RNA, 32 nt, Homo Sapiens
ugggagguggagguugcagugagcagagauca

SEQ ID NO: 345267 - RNA, 32 nt, Homo Sapiens
auuaaagaaugcugcaacuuuuuuaugucucu

SEQ ID NO: 345268 - RNA, 31 nt, Homo Sapiens
gaugggaaauaaagaaaauucucucaagacu

SEQ ID NO: 345269 - RNA, 32 nt, Homo Sapiens
ugauacaauuuaaugccauuacaauuauguug

SEQ ID NO: 345270 - RNA, 32 nt, Homo Sapiens
ugccuugccuucuggagccuguagggaguuuu

SEQ ID NO: 345271 - RNA, 32 nt, Homo Sapiens
uuaaacaggcaaaaauuccuccccuccuggag

SEQ ID NO: 345272 - RNA, 32 nt, Homo Sapiens
auaguagagcuguucauuauggauauuucugc

SEQ ID NO: 345273 - RNA, 30 nt, Homo Sapiens
ggcccaggcaggcugagugggugggccacc

SEQ ID NO: 345274 - RNA, 32 nt, Homo Sapiens
agaguucuuuguauuucuuucuucauaguguu

SEQ ID NO: 345275 - RNA, 32 nt, Homo Sapiens
agggaucuggggauggggugggcuuaggggaa

SEQ ID NO: 345276 - RNA, 32 nt, Homo Sapiens
acuucgcuguguuuuugaaauguugggcaugg

SEQ ID NO: 345277 - RNA, 32 nt, Homo Sapiens
auacaagccaucugguugguguuaguuauagc

SEQ ID NO: 345278 - RNA, 32 nt, Homo Sapiens
agcacaaguaugagaacaaguaguuccuugga

SEQ ID NO: 345279 - RNA, 32 nt, Homo Sapiens
uuucauaauguuucaagaaaauuuaugaauuu

SEQ ID NO: 345280 - RNA, 32 nt, Homo Sapiens
cagucggcgccauggcgucugccgagccccug

SEQ ID NO: 345281 - RNA, 32 nt, Homo Sapiens
gccgcugggcuggccugagagcgcagcgcgcc

SEQ ID NO: 345282 - RNA, 32 nt, Homo Sapiens
ggcggcgccauggagcuccgggugcugcucug

SEQ ID NO: 345283 - RNA, 32 nt, Homo Sapiens
ugaacuuuugcaucucaagaaaacauugaaaa

SEQ ID NO: 345284 - RNA, 32 nt, Homo Sapiens
ggaauucagugaaaucauguuaacucauauag

SEQ ID NO: 345285 - RNA, 32 nt, Homo Sapiens
caugguuaauacugagugucaacuugauugga

SEQ ID NO: 345286 - RNA, 32 nt, Homo Sapiens
auguacugagcuuuuguuuuagauggaauagc

SEQ ID NO: 345287 - RNA, 32 nt, Homo Sapiens
ggaugugaaaauaauuuuaugagguugucuaa

SEQ ID NO: 345288 - RNA, 32 nt, Homo Sapiens
acagcacauggguuuggagcuagacagaagga

SEQ ID NO: 345289 - RNA, 32 nt, Homo Sapiens
gaggcugcgaggaggggcgcggugcccgccgc

SEQ ID NO: 345290 - RNA, 32 nt, Homo Sapiens
uauguacuaauacauagcccuauguaccaaaa

SEQ ID NO: 345291 - RNA, 32 nt, Homo Sapiens
gucuggucucaaacuccugaccucaaggaucu

SEQ ID NO: 345292 - RNA, 32 nt, Homo Sapiens
agugagacggagcugccuccucugacugcgcg

SEQ ID NO: 345293 - RNA, 32 nt, Homo Sapiens
ucccuccauauuaucauggguguuguauuuuu

SEQ ID NO: 345294 - RNA, 28 nt, Homo Sapiens
ggaaugcaccggccgcgccgccgcggga

SEQ ID NO: 345295 - RNA, 32 nt, Homo Sapiens
auuauucuuuucuuuaaucuacaggaacaaaa

SEQ ID NO: 345296 - RNA, 32 nt, Homo Sapiens
ucaucaccauggaaacaacguuccucuccacc

SEQ ID NO: 345297 - RNA, 32 nt, Homo Sapiens
aauaaugguaauuauucuccuuugaaaaauua

SEQ ID NO: 345298 - RNA, 32 nt, Homo Sapiens
cuggaggcuggguacaguugcagguugcuuua

SEQ ID NO: 345299 - RNA, 32 nt, Homo Sapiens
cuucucaauuucccuuuuuaagccguugaugg

SEQ ID NO: 345300 - RNA, 32 nt, Homo Sapiens
uccauguguuguuuggggggaauuggcaccau

SEQ ID NO: 345301 - RNA, 32 nt, Homo Sapiens
acuagucacugugggcagaagcaagaagcaga

SEQ ID NO: 345302 - RNA, 32 nt, Homo Sapiens
uaaauaaaaauuuguccaucgaagauggagua

SEQ ID NO: 345303 - RNA, 32 nt, Homo Sapiens
ccagccuugcugucagauucaaaauugcuuuu

SEQ ID NO: 345304 - RNA, 32 nt, Homo Sapiens
uauaauuacaguguuugggggugucuuuaaau

SEQ ID NO: 345305 - RNA, 32 nt, Homo Sapiens
ccaggcugccguggggccgccgccucuuucaa

SEQ ID NO: 345306 - RNA, 32 nt, Homo Sapiens
aauugugggguuuuucuguauuagcuuaugaa

SEQ ID NO: 345307 - RNA, 32 nt, Homo Sapiens
uggcggucgggagagcggcggcagcgagaggc

SEQ ID NO: 345308 - RNA, 32 nt, Homo Sapiens
ugggucaauucucauauuuucaccuuaacuaa

SEQ ID NO: 345309 - RNA, 32 nt, Homo Sapiens
uuucaguacuuugggaggccaaggagggugga

SEQ ID NO: 345310 - RNA, 32 nt, Homo Sapiens
ccggaggaaaauuugacauuauccagcugguu

SEQ ID NO: 345311 - RNA, 32 nt, Homo Sapiens
guuacugaaaugacgagacccuuguuugcaca

SEQ ID NO: 345312 - RNA, 32 nt, Homo Sapiens
gacuguaaucccaacacuuuggaggaggcuga

SEQ ID NO: 345313 - RNA, 32 nt, Homo Sapiens
aggaaaauacaguaagugcuugaaagaugaag

SEQ ID NO: 345314 - RNA, 32 nt, Homo Sapiens
gcuggcucucaguccccgccucguggggggug

SEQ ID NO: 345315 - RNA, 32 nt, Homo Sapiens
gguguccccccgcugcucccuugaccucuugu

SEQ ID NO: 345316 - RNA, 32 nt, Homo Sapiens
ucucuaaugugagaaaaauauauccaguaaua

SEQ ID NO: 345317 - RNA, 32 nt, Homo Sapiens
cacccugcaguucccguuuccgccauggaugc

SEQ ID NO: 345318 - RNA, 32 nt, Homo Sapiens
augcaguggccccucucgggcuccaccgucca

SEQ ID NO: 345319 - RNA, 32 nt, Homo Sapiens
gccucuacugaauccuaugcaaccucagaaga

SEQ ID NO: 345320 - RNA, 32 nt, Homo Sapiens
agcgggaagggagauauuccagaggcaacuac

SEQ ID NO: 345321 - RNA, 32 nt, Homo Sapiens
cuuaucuucacagaugccagacaauggacaac

SEQ ID NO: 345322 - RNA, 32 nt, Homo Sapiens
cggaggagcggcugcugcugcugcugcugcug

SEQ ID NO: 345323 - RNA, 32 nt, Homo Sapiens
aucugucaaugaggaaggcagaacuauccgcu

SEQ ID NO: 345324 - RNA, 32 nt, Homo Sapiens
ucaugaucucuuaauguuagucuugaugaugu

SEQ ID NO: 345325 - RNA, 32 nt, Homo Sapiens
auguacuuauugauuaucaaaaacgaggauuu

SEQ ID NO: 345326 - RNA, 29 nt, Homo Sapiens
acaaauguacuaugcauguagugugugca

SEQ ID NO: 345327 - RNA, 32 nt, Homo Sapiens
accacaguugucuaggaaaugacaugaauuca

SEQ ID NO: 345328 - RNA, 32 nt, Homo Sapiens
acucaggcccuccuugucuuuuuacugcaacc

SEQ ID NO: 345329 - RNA, 32 nt, Homo Sapiens
aggucucgaccccgagccccacuggaugauag

SEQ ID NO: 345330 - RNA, 32 nt, Homo Sapiens
accaucaucccgcaggaccccauccuguucuc

SEQ ID NO: 345331 - RNA, 32 nt, Homo Sapiens
aaauuuuaaaaugugcaaagaaugaagugaaa

SEQ ID NO: 345332 - RNA, 30 nt, Homo Sapiens
ugugugcgcgcgcacgcacgccuugagcag

SEQ ID NO: 345333 - RNA, 32 nt, Homo Sapiens
aaucuauaacuugaacgaaaugucaaggaggc

SEQ ID NO: 345334 - RNA, 32 nt, Homo Sapiens
aaaacgaaguagguaauaaacaggaaaaagcc

SEQ ID NO: 345335 - RNA, 32 nt, Homo Sapiens
ucgaaauaacuuuuuucucaccuagguguacc

SEQ ID NO: 345336 - RNA, 32 nt, Homo Sapiens
gcguugccuuuucucccagcuaccucccaaag

SEQ ID NO: 345337 - RNA, 32 nt, Homo Sapiens
gccugcggacccagcccucugugcaaucccac

SEQ ID NO: 345338 - RNA, 31 nt, Homo Sapiens
uccaugucccagauaaaccaggccagacuga

SEQ ID NO: 345339 - RNA, 32 nt, Homo Sapiens
ggcccgacccucacuaccccugagauauuagu

SEQ ID NO: 345340 - RNA, 32 nt, Homo Sapiens
gcgucacuggguuucggcgucuggcaagcggu

SEQ ID NO: 345341 - RNA, 32 nt, Homo Sapiens
cgccgugcguggucgggcgggucgccagcggg

SEQ ID NO: 345342 - RNA, 32 nt, Homo Sapiens
ugccaagcuucguggaggaauguaggugacau

SEQ ID NO: 345343 - RNA, 32 nt, Homo Sapiens
guaaggcaauuuauuggacacaauggcaucga

SEQ ID NO: 345344 - RNA, 32 nt, Homo Sapiens
auguaaaacacacuaacacuaaccauaguuga

SEQ ID NO: 345345 - RNA, 32 nt, Homo Sapiens
guguccacgcguugacugccgugugugacucc

SEQ ID NO: 345346 - RNA, 32 nt, Homo Sapiens
cuaaaaauaacgaaagguugccaaguauuaau

SEQ ID NO: 345347 - RNA, 28 nt, Homo Sapiens
acuuggagacauuaacaugaaaaagucu

SEQ ID NO: 345348 - RNA, 32 nt, Homo Sapiens
uaccauuuuuaaagucaauacaauggaaauca

SEQ ID NO: 345349 - RNA, 32 nt, Homo Sapiens
ccugccugcgguguucuugcaauugccuuagg

SEQ ID NO: 345350 - RNA, 32 nt, Homo Sapiens
gcaugcccuucugcacaggagagcaaggcacu

SEQ ID NO: 345351 - RNA, 32 nt, Homo Sapiens
gccagcccaagcaucacugcccgaggcgccag

SEQ ID NO: 345352 - RNA, 32 nt, Homo Sapiens
acugcgcucgaggccggcaccuaccaugugca

SEQ ID NO: 345353 - RNA, 32 nt, Homo Sapiens
gaguuuggacauuucaaguugguaauaauaaa

SEQ ID NO: 345354 - RNA, 32 nt, Homo Sapiens
cgaaccucacgcccggccccuccuucauucuc

SEQ ID NO: 345355 - RNA, 32 nt, Homo Sapiens
ucuguccacuaacaagcuucacacgcaacaca

SEQ ID NO: 345356 - RNA, 32 nt, Homo Sapiens
ucuuucagcugugucugacauguuugugcucu

SEQ ID NO: 345357 - RNA, 32 nt, Homo Sapiens
gaaaacauauucugacccauugggaucaaauc

SEQ ID NO: 345358 - RNA, 32 nt, Homo Sapiens
cccacccaagcuccccauccagcccuuaaaac

SEQ ID NO: 345359 - RNA, 32 nt, Homo Sapiens
uguauagaaugcugcaccuucagccagcucug

SEQ ID NO: 345360 - RNA, 32 nt, Homo Sapiens
caagaauuguaucugaaacaagagaacaguuu

SEQ ID NO: 345361 - RNA, 30 nt, Homo Sapiens
auuucaaaaauuugcaugcaaaauauacac

SEQ ID NO: 345362 - RNA, 32 nt, Homo Sapiens
aaucugcccucccgcuucuccucgccacuccg

SEQ ID NO: 345363 - RNA, 32 nt, Homo Sapiens
uccucugcaggcuggagcugccuggggcaggg

SEQ ID NO: 345364 - RNA, 32 nt, Homo Sapiens
uuauuggccaauauuucuuucagccauuucau

SEQ ID NO: 345365 - RNA, 32 nt, Homo Sapiens
uccaaauagcuuugggcugaugcaaaaauauc

SEQ ID NO: 345366 - RNA, 32 nt, Homo Sapiens
cgcuggccggcagggggcgcugcggugccagc

SEQ ID NO: 345367 - RNA, 30 nt, Homo Sapiens
ugccauggagauuacaugcaaaauggcaug

SEQ ID NO: 345368 - RNA, 32 nt, Homo Sapiens
ugccuaggcccuuccauuucucuucuuugacc

SEQ ID NO: 345369 - RNA, 32 nt, Homo Sapiens
acccugcaacuccuauuauaucgccugguugg

SEQ ID NO: 345370 - RNA, 32 nt, Homo Sapiens
ugagaucaggaguucaagacuagccuggccaa

SEQ ID NO: 345371 - RNA, 32 nt, Homo Sapiens
aaguuuaaugaacuguuuucuacauuucacag

SEQ ID NO: 345372 - RNA, 32 nt, Homo Sapiens
cgccuguaaucccagcacuuugggaggcccag

SEQ ID NO: 345373 - RNA, 32 nt, Homo Sapiens
cuggaaauaaauccuguaaauguaaauauuau

SEQ ID NO: 345374 - RNA, 32 nt, Homo Sapiens
augggcgagcgcggcuggcggcuggcuagccu

SEQ ID NO: 345375 - RNA, 32 nt, Homo Sapiens
agcagcggccacgacgcggacgcgccugcggc

SEQ ID NO: 345376 - RNA, 32 nt, Homo Sapiens
uugugugcaaauauaaacuauuauaaaucaaa

SEQ ID NO: 345377 - RNA, 32 nt, Homo Sapiens
caucuguggagccccagagccugcggcugugg

SEQ ID NO: 345378 - RNA, 32 nt, Homo Sapiens
caugugggagcaacaugaauguucuacaaaag

SEQ ID NO: 345379 - RNA, 32 nt, Homo Sapiens
ggccggggcgggaguuccauggagacugggga

SEQ ID NO: 345380 - RNA, 32 nt, Homo Sapiens
aacugcugguagugccuucuuugguuguguug

SEQ ID NO: 345381 - RNA, 32 nt, Homo Sapiens
auuguguguuucaaauuaugcauuccaggcuc

SEQ ID NO: 345382 - RNA, 32 nt, Homo Sapiens
acgggaaaaagcuaugaaggguuugugaccac

SEQ ID NO: 345383 - RNA, 32 nt, Homo Sapiens
cggcugcagcggcgguagcggcggcgggaggc

SEQ ID NO: 345384 - RNA, 32 nt, Homo Sapiens
uacgagcauggaccaaaacauaccaaaucugc

SEQ ID NO: 345385 - RNA, 32 nt, Homo Sapiens
ggaaucaauguuguauguucuaaugagauacg

SEQ ID NO: 345386 - RNA, 32 nt, Homo Sapiens
augcccugccccagcccuggcucuuuccuaac

SEQ ID NO: 345387 - RNA, 32 nt, Homo Sapiens
aagcucucggugucucgggccaccauccgccc

SEQ ID NO: 345388 - RNA, 32 nt, Homo Sapiens
cggcagcagaaccaccugagcugcuuccugca

SEQ ID NO: 345389 - RNA, 32 nt, Homo Sapiens
ccccuccuccugccugcccccacgcgcgccag

SEQ ID NO: 345390 - RNA, 32 nt, Homo Sapiens
ccucaaguaaaauaaauaucaguuaaauauug

SEQ ID NO: 345391 - RNA, 32 nt, Homo Sapiens
gauuccuucccucuccagaacucuguacuuac

SEQ ID NO: 345392 - RNA, 32 nt, Homo Sapiens
gaaaaaauauuuuaaacuacugauugaauguu

SEQ ID NO: 345393 - RNA, 32 nt, Homo Sapiens
acagcaucugccucuauucaauuuaauucuua

SEQ ID NO: 345394 - RNA, 32 nt, Homo Sapiens
gagaaaugaggggagauggaccaagaaagacg

SEQ ID NO: 345395 - RNA, 32 nt, Homo Sapiens
gcguugccugacggcuucucggcucuacccuc

SEQ ID NO: 345396 - RNA, 32 nt, Homo Sapiens
guaccuuuauuuuugcccccaccacccucuuu

SEQ ID NO: 345397 - RNA, 32 nt, Homo Sapiens
acaagucuggugaacgaauggccagauuagug

SEQ ID NO: 345398 - RNA, 32 nt, Homo Sapiens
uuugaagaccucuggacaugagaacauauuuc

SEQ ID NO: 345399 - RNA, 32 nt, Homo Sapiens
gcuuuaggaaaugugcuuaggcaggguacuuc

SEQ ID NO: 345400 - RNA, 32 nt, Homo Sapiens
uuauuaaccgaaaaugauaauaccauuuaguu

SEQ ID NO: 345401 - RNA, 32 nt, Homo Sapiens
gagaaggugccguuauuuuccuccccucuugc

SEQ ID NO: 345402 - RNA, 32 nt, Homo Sapiens
cugagcagcucuugguuuuggcgucuuuuggg

SEQ ID NO: 345403 - RNA, 32 nt, Homo Sapiens
uuucaugcaaaucuuuguuagcuuauucuaag

SEQ ID NO: 345404 - RNA, 32 nt, Homo Sapiens
auaugucuuuuacccggcacauuccccuugcc

SEQ ID NO: 345405 - RNA, 32 nt, Homo Sapiens
ggcccuggaaagggguccccgcgcgccccggg

SEQ ID NO: 345406 - RNA, 32 nt, Homo Sapiens
gaaaucaauaugucuugguauaguggcuuaaa

SEQ ID NO: 345407 - RNA, 32 nt, Homo Sapiens
ccuggaaaaguaauauuuuaaggggaaauuau

SEQ ID NO: 345408 - RNA, 32 nt, Homo Sapiens
cucccgcccugccugcccggccccaccgaggc

SEQ ID NO: 345409 - RNA, 32 nt, Homo Sapiens
acauccauuuccccuccuucccaugggcagag

SEQ ID NO: 345410 - RNA, 29 nt, Homo Sapiens
ugcaagucauaugggggaacacuuuguaa

SEQ ID NO: 345411 - RNA, 32 nt, Homo Sapiens
uugaaguaaaacuaguuguuaucgaugacaau

SEQ ID NO: 345412 - RNA, 32 nt, Homo Sapiens
aaaaaaaaauucaaaucagagugaagugaaug

SEQ ID NO: 345413 - RNA, 32 nt, Homo Sapiens
ccuuggcucagguggcgggcacaggccaacua

SEQ ID NO: 345414 - RNA, 32 nt, Homo Sapiens
ugagaagaggucaugccugggaggaagggauc

SEQ ID NO: 345415 - RNA, 29 nt, Homo Sapiens
uguuuacacugaugugcuauaaaagcacc

SEQ ID NO: 345416 - RNA, 32 nt, Homo Sapiens
gagcucgcgccgcggcagcccagccgcucggc

SEQ ID NO: 345417 - RNA, 32 nt, Homo Sapiens
aggaaaggacccaagagaaaauccuucaaggu

SEQ ID NO: 345418 - RNA, 32 nt, Homo Sapiens
gacuuccaucucagcuuucucauugccaacua

SEQ ID NO: 345419 - RNA, 31 nt, Homo Sapiens
guguuucacaggagaaaguggccuuaacugc

SEQ ID NO: 345420 - RNA, 32 nt, Homo Sapiens
cuggagcgcuaccugggcgcggcggcccacgg

SEQ ID NO: 345421 - RNA, 32 nt, Homo Sapiens
ucccuuaucacuaacccccauccaaauggcuc

SEQ ID NO: 345422 - RNA, 32 nt, Homo Sapiens
uaaucaaaaauauuuggaaaacaaaaagggua

SEQ ID NO: 345423 - RNA, 32 nt, Homo Sapiens
gagcuguugaagaucccgugaucauuaccugg

SEQ ID NO: 345424 - RNA, 32 nt, Homo Sapiens
cucuuaacauagaugaaaauuaacucaagaua

SEQ ID NO: 345425 - RNA, 32 nt, Homo Sapiens
gcuucaccugguuuuacaaaugcggagacuga

SEQ ID NO: 345426 - RNA, 32 nt, Homo Sapiens
acuauuuaaaauuggcaccauaaaaaaaaaaa

SEQ ID NO: 345427 - RNA, 32 nt, Homo Sapiens
cuuugcagacgcuccccggcgccgggcauggg

SEQ ID NO: 345428 - RNA, 32 nt, Homo Sapiens
accgggcaaaauuuaguauccagcagguaaug

SEQ ID NO: 345429 - RNA, 32 nt, Homo Sapiens
augcucaauaccaugaaucaugugagaggacu

SEQ ID NO: 345430 - RNA, 32 nt, Homo Sapiens
uuugugaugaucuggagguauuugcugcucau

SEQ ID NO: 345431 - RNA, 32 nt, Homo Sapiens
uucugcaucacggaagaccuggcccucccagc

SEQ ID NO: 345432 - RNA, 32 nt, Homo Sapiens
cacugucaccagagaccccaccccucauaccc

SEQ ID NO: 345433 - RNA, 32 nt, Homo Sapiens
cucagauucaaacugcuagacgcacugcugcc

SEQ ID NO: 345434 - RNA, 32 nt, Homo Sapiens
cagauuugaaguaaaauaauuuaggaagauau

SEQ ID NO: 345435 - RNA, 32 nt, Homo Sapiens
ugcagggaggccacgucccaccccaccucuug

SEQ ID NO: 345436 - RNA, 32 nt, Homo Sapiens
accucgugccugcugcggcugcgcuggccugg

SEQ ID NO: 345437 - RNA, 32 nt, Homo Sapiens
ugaauggaaaaauacuuuucagggagaauuga

SEQ ID NO: 345438 - RNA, 32 nt, Homo Sapiens
cggcuucagcaagauuggacccgggcaccggg

SEQ ID NO: 345439 - RNA, 32 nt, Homo Sapiens
cauggaggugacagaccgcauugcuucacugg

SEQ ID NO: 345440 - RNA, 32 nt, Homo Sapiens
augugcuuaggaagaaaaaagugguaaugauu

SEQ ID NO: 345441 - RNA, 32 nt, Homo Sapiens
uagggaugcuucuuggagccuuuggcaggcug

SEQ ID NO: 345442 - RNA, 32 nt, Homo Sapiens
gaaggcacggacgucgcgccgcgcucccgggg

SEQ ID NO: 345443 - RNA, 32 nt, Homo Sapiens
ccccgccgcccucagcucgaagucagccacca

SEQ ID NO: 345444 - RNA, 32 nt, Homo Sapiens
guaaccagucguuucaaauauuuguuuuuuca

SEQ ID NO: 345445 - RNA, 32 nt, Homo Sapiens
acucagugcagcugcgauuaacccuaaaggcu

SEQ ID NO: 345446 - RNA, 32 nt, Homo Sapiens
guuucuccauucucuuauuuccuuucccagag

SEQ ID NO: 345447 - RNA, 28 nt, Homo Sapiens
augcaggaagauuaauuuuguggcaguu

SEQ ID NO: 345448 - RNA, 32 nt, Homo Sapiens
uuuuaaagaguugagugauagagcuaacccuu

SEQ ID NO: 345449 - RNA, 32 nt, Homo Sapiens
cuugucuuucccuucaguacccucucaugcuc

SEQ ID NO: 345450 - RNA, 32 nt, Homo Sapiens
caucagucaaggaagacccacuggagaggaca

SEQ ID NO: 345451 - RNA, 32 nt, Homo Sapiens
agccgccuuucugucugagagaaacugaggcc

SEQ ID NO: 345452 - RNA, 28 nt, Homo Sapiens
ccaguagggcggccgggcagaggcaccc

SEQ ID NO: 345453 - RNA, 32 nt, Homo Sapiens
uaugguuuaaacacuauggauacagggguuug

SEQ ID NO: 345454 - RNA, 32 nt, Homo Sapiens
ucuguuuaauuucaaaggaguuugugaaaaaa

SEQ ID NO: 345455 - RNA, 32 nt, Homo Sapiens
ucucggcucccacagcagagccaggugagggg

SEQ ID NO: 345456 - RNA, 32 nt, Homo Sapiens
cagaacugcgcacgcucccuuucugaaagaaa

SEQ ID NO: 345457 - RNA, 32 nt, Homo Sapiens
caagcaaauccuuccaagaauuuuauaguaca

SEQ ID NO: 345458 - RNA, 32 nt, Homo Sapiens
aaaaccauuuuaggaauuagaaaaaucaacau

SEQ ID NO: 345459 - RNA, 32 nt, Homo Sapiens
agagggcaaagaggugaacauaaaggauuugg

SEQ ID NO: 345460 - RNA, 32 nt, Homo Sapiens
cccagggcgaagacaccuucccugcccugguu

SEQ ID NO: 345461 - RNA, 32 nt, Homo Sapiens
accaacgagggucuggaauggucuggaguggu

SEQ ID NO: 345462 - RNA, 32 nt, Homo Sapiens
uuaaauccaguuccucagucacacuagccacu

SEQ ID NO: 345463 - RNA, 32 nt, Homo Sapiens
cagcgugguuuuuauguguauuaggauugggg

SEQ ID NO: 345464 - RNA, 32 nt, Homo Sapiens
ucuucuuugggaaguacaaugccaaguaaaua

SEQ ID NO: 345465 - RNA, 32 nt, Homo Sapiens
auggcagaagaaugggaauauuuuauacugac

SEQ ID NO: 345466 - RNA, 32 nt, Homo Sapiens
cugcugagaaaguuuaaggaaggcaaagcuug

SEQ ID NO: 345467 - RNA, 30 nt, Homo Sapiens
ugugacuucuguguuagccaucuuauuucu

SEQ ID NO: 345468 - RNA, 32 nt, Homo Sapiens
aggacuacagaaaagaaacgaaauccaauagu

SEQ ID NO: 345469 - RNA, 32 nt, Homo Sapiens
ugcaggagcugcuggaccaagagcagcuucug

SEQ ID NO: 345470 - RNA, 32 nt, Homo Sapiens
gcaccaggcuccugggcucuggggguuuuggu

SEQ ID NO: 345471 - RNA, 32 nt, Homo Sapiens
cuauaauuuuccuauuugaugugugugugugu

SEQ ID NO: 345472 - RNA, 32 nt, Homo Sapiens
ugggacuggaggaggaacggucacccuccucc

SEQ ID NO: 345473 - RNA, 32 nt, Homo Sapiens
cagauaaaagcauagaaguaaaucauucagau

SEQ ID NO: 345474 - RNA, 32 nt, Homo Sapiens
ccucgcgcugagcugcccggcgcggagggucu

SEQ ID NO: 345475 - RNA, 32 nt, Homo Sapiens
agcccgcagaacuuucgaaguugagaagagaa

SEQ ID NO: 345476 - RNA, 32 nt, Homo Sapiens
uugcaaugaccaucuugaaccacagauuucug

SEQ ID NO: 345477 - RNA, 32 nt, Homo Sapiens
ggcugcccgcagccccugacccggccccggac

SEQ ID NO: 345478 - RNA, 32 nt, Homo Sapiens
uaaaaagauggacuucagcagaaaucuuuaug

SEQ ID NO: 345479 - RNA, 32 nt, Homo Sapiens
caagaggagggagaaggcagggccgugacuau

SEQ ID NO: 345480 - RNA, 32 nt, Homo Sapiens
aaauauauaugauaaucauuuccacuuaacua

SEQ ID NO: 345481 - RNA, 32 nt, Homo Sapiens
auaccaauuuaaaaauauaaauuuuugccacu

SEQ ID NO: 345482 - RNA, 32 nt, Homo Sapiens
ugugucuuaggcaggcaagagaauugaaauga

SEQ ID NO: 345483 - RNA, 32 nt, Homo Sapiens
ucccagccaaggugcugguguugccagcagug

SEQ ID NO: 345484 - RNA, 32 nt, Homo Sapiens
ccggcccgugcagcagugucugagcuguagug

SEQ ID NO: 345485 - RNA, 32 nt, Homo Sapiens
agccugggaagaacugcccuucugcaaagggg

SEQ ID NO: 345486 - RNA, 32 nt, Homo Sapiens
ucauauaucacgugcuguaaaauaagaacuag

SEQ ID NO: 345487 - RNA, 32 nt, Homo Sapiens
cgcccggcagcgccagcucggcgaccuuccag

SEQ ID NO: 345488 - RNA, 32 nt, Homo Sapiens
aaguauacuuauauuucccuaaaauacauuua

SEQ ID NO: 345489 - RNA, 32 nt, Homo Sapiens
caauaaaggcagucuacccacuacuaucaugc

SEQ ID NO: 345490 - RNA, 29 nt, Homo Sapiens
gacaauucuauccagcccgccaccucugg

SEQ ID NO: 345491 - RNA, 32 nt, Homo Sapiens
uaaauuaaauuaauacauauauacgaguuugg

SEQ ID NO: 345492 - RNA, 32 nt, Homo Sapiens
auucuuaauuuucaggaauuuugugagccagu

SEQ ID NO: 345493 - RNA, 32 nt, Homo Sapiens
cugccagaccaugcugaguggagcacgcugca

SEQ ID NO: 345494 - RNA, 32 nt, Homo Sapiens
aauuaaaggggagcauggcagauaaccauaaa

SEQ ID NO: 345495 - RNA, 32 nt, Homo Sapiens
uugaaacuggugaguucugauuauuaaauauu

SEQ ID NO: 345496 - RNA, 32 nt, Homo Sapiens
gacccagagggaagaaggaacaguggaggcgg

SEQ ID NO: 345497 - RNA, 29 nt, Homo Sapiens
aagccgcggggacagaacugaacguccug

SEQ ID NO: 345498 - RNA, 32 nt, Homo Sapiens
cuucuucggucccgagcucgcguccagguggc

SEQ ID NO: 345499 - RNA, 32 nt, Homo Sapiens
uugagggagugaugagaaauaauuauuggacg

SEQ ID NO: 345500 - RNA, 32 nt, Homo Sapiens
aggagguugcagagcaggccaggcagacagug

SEQ ID NO: 345501 - RNA, 32 nt, Homo Sapiens
cccagagacccaggccgcggaacuggcaggcg

SEQ ID NO: 345502 - RNA, 32 nt, Homo Sapiens
aucccccucagcaucugugcugcgaggccuuc

SEQ ID NO: 345503 - RNA, 27 nt, Homo Sapiens
caauccucccacuucagccucccaaau

SEQ ID NO: 345504 - RNA, 32 nt, Homo Sapiens
cuggggcuggaucugggcacagcaauuugcag

SEQ ID NO: 345505 - RNA, 31 nt, Homo Sapiens
auuuggcaagagguuguccgaaaauaauucc

SEQ ID NO: 345506 - RNA, 32 nt, Homo Sapiens
uuaccagugggcccgcggcuaucauggacuuc

SEQ ID NO: 345507 - RNA, 32 nt, Homo Sapiens
acuucugggaggaacaaauuuaaucauuucuu

SEQ ID NO: 345508 - RNA, 32 nt, Homo Sapiens
cucauacaucaagccccagaggaggcggcaag

SEQ ID NO: 345509 - RNA, 32 nt, Homo Sapiens
gguauuuguccggcugcugggcgaccuuuccc

SEQ ID NO: 345510 - RNA, 32 nt, Homo Sapiens
ugggcauuuuuaguagcauagacccuuuguuc

SEQ ID NO: 345511 - RNA, 32 nt, Homo Sapiens
cggacccucggcgaagagcggcuuggagcggu

SEQ ID NO: 345512 - RNA, 32 nt, Homo Sapiens
cuuacucuacagccuugcucuccggggugguu

SEQ ID NO: 345513 - RNA, 32 nt, Homo Sapiens
cuacagaccucaaauaucaccaaacuagagca

SEQ ID NO: 345514 - RNA, 32 nt, Homo Sapiens
gagcggcggcgguggcgacggcgaugggaccc

SEQ ID NO: 345515 - RNA, 32 nt, Homo Sapiens
ccuccaucucugaccacccccacccuaacccc

SEQ ID NO: 345516 - RNA, 32 nt, Homo Sapiens
uuaggugaagaauuauuuguugaauauuguca

SEQ ID NO: 345517 - RNA, 32 nt, Homo Sapiens
aguucucagcaauaauaauaaugacgauaaua

SEQ ID NO: 345518 - RNA, 32 nt, Homo Sapiens
uguggucacccuggacagcagcagcccugugg

SEQ ID NO: 345519 - RNA, 32 nt, Homo Sapiens
acucagacccaccggagacccagaguuacaca

SEQ ID NO: 345520 - RNA, 32 nt, Homo Sapiens
uuaguauuuguaucuucaguucauuccacuuu

SEQ ID NO: 345521 - RNA, 32 nt, Homo Sapiens
cuguugauauugucuuuugaugcacaaacuuc

SEQ ID NO: 345522 - RNA, 32 nt, Homo Sapiens
ggcucacaccugagcgcgacugcagaggggcu

SEQ ID NO: 345523 - RNA, 32 nt, Homo Sapiens
ugaagguggggcggggcagugaggggugggag

SEQ ID NO: 345524 - RNA, 32 nt, Homo Sapiens
ugaaguauaaucuuauuuuaaccuaaaaucuu

SEQ ID NO: 345525 - RNA, 32 nt, Homo Sapiens
cuuugccuagucuccuucccaccuucuucuca

SEQ ID NO: 345526 - RNA, 32 nt, Homo Sapiens
gcagcucccuugcccuuccccagccucaggca

SEQ ID NO: 345527 - RNA, 32 nt, Homo Sapiens
uacuuuucuuaccagaaaggaauggagucugu

SEQ ID NO: 345528 - RNA, 32 nt, Homo Sapiens
aucauugguuaaacugaagaccaagaaaacuu

SEQ ID NO: 345529 - RNA, 32 nt, Homo Sapiens
aggaaagaugacugccaaugugugauuagaaa

SEQ ID NO: 345530 - RNA, 32 nt, Homo Sapiens
uuccugggcugcccuccccuccuccgggacug

SEQ ID NO: 345531 - RNA, 32 nt, Homo Sapiens
ccucagccccagcucugccaucuuggagccag

SEQ ID NO: 345532 - RNA, 32 nt, Homo Sapiens
uuuguuuuuuaaaacucugaugauugcuugag

SEQ ID NO: 345533 - RNA, 32 nt, Homo Sapiens
ccauacaccaaaaggauuuuagcauauguuaa

SEQ ID NO: 345534 - RNA, 32 nt, Homo Sapiens
aauucuaaaaauuagcacagaaaaauuaccca

SEQ ID NO: 345535 - RNA, 32 nt, Homo Sapiens
augaggaugauuauuuucaaggcccucagcau

SEQ ID NO: 345536 - RNA, 32 nt, Homo Sapiens
cugcaaacacuacugccgccucugccagcacc

SEQ ID NO: 345537 - RNA, 32 nt, Homo Sapiens
cugauuuuagcucauguauauuuuauaugaaa

SEQ ID NO: 345538 - RNA, 32 nt, Homo Sapiens
auccaaaagagcaauaaaaaguuuucagugaa

SEQ ID NO: 345539 - RNA, 32 nt, Homo Sapiens
ugcuaacugggaagaacaaggcccugaggggu

SEQ ID NO: 345540 - RNA, 32 nt, Homo Sapiens
aggaaacaaaugugaaguuguggacucuaccc

SEQ ID NO: 345541 - RNA, 32 nt, Homo Sapiens
ugauggccagggugggguguccagcaccagcc

SEQ ID NO: 345542 - RNA, 32 nt, Homo Sapiens
ggcuccuaccucaucaccauuucuacccaagg

SEQ ID NO: 345543 - RNA, 32 nt, Homo Sapiens
aacacucuugaauagacuuccacuuuguaauu

SEQ ID NO: 345544 - RNA, 32 nt, Homo Sapiens
cugucuuuaaugcugcaguggcauccagggau

SEQ ID NO: 345545 - RNA, 32 nt, Homo Sapiens
aaaagaagaaauuaauaaaauaauuaaugcac

SEQ ID NO: 345546 - RNA, 32 nt, Homo Sapiens
uguauguauugauguacagccuugaaugugaa

SEQ ID NO: 345547 - RNA, 32 nt, Homo Sapiens
uuacuguuauuuaaagauguuuuacauaauuc

SEQ ID NO: 345548 - RNA, 32 nt, Homo Sapiens
cagcgagggcucuaagaccacccagcucucuu

SEQ ID NO: 345549 - RNA, 31 nt, Homo Sapiens
gucaggugcagucuggcgggaguccaggagg

SEQ ID NO: 345550 - RNA, 31 nt, Homo Sapiens
uaaaagcaaugcaguaccccauagacuggug

SEQ ID NO: 345551 - RNA, 32 nt, Homo Sapiens
uugcagugugcagcugaguucggcagcucaca

SEQ ID NO: 345552 - RNA, 32 nt, Homo Sapiens
ucacaaaaagucuccauuuucauuuuacaucc

SEQ ID NO: 345553 - RNA, 32 nt, Homo Sapiens
aggaaauaaaaagcagaauuuaaacaaaugua

SEQ ID NO: 345554 - RNA, 32 nt, Homo Sapiens
ucuacagcaucuuuugauauauggaaauuugu

SEQ ID NO: 345555 - RNA, 32 nt, Homo Sapiens
gggaaauguuuuauuuuguaaaaugcauucau

SEQ ID NO: 345556 - RNA, 32 nt, Homo Sapiens
aggguucagcuuugggucaaauaacucgucug

SEQ ID NO: 345557 - RNA, 32 nt, Homo Sapiens
ggagcuggagcggcggggcggcggcggagucc

SEQ ID NO: 345558 - RNA, 32 nt, Homo Sapiens
uguaagcuagcuaauucuuguuuucugauuua

SEQ ID NO: 345559 - RNA, 32 nt, Homo Sapiens
uuauuuuaaauggacucaaaugucuaauuuac

SEQ ID NO: 345560 - RNA, 32 nt, Homo Sapiens
cucaaagaauccagugcuugugucacaguaug

SEQ ID NO: 345561 - RNA, 32 nt, Homo Sapiens
gcacaacgaugaugaacaguaugcuugggagu

SEQ ID NO: 345562 - RNA, 29 nt, Homo Sapiens
agaaggaagaccguguggacgaggacccc

SEQ ID NO: 345563 - RNA, 32 nt, Homo Sapiens
ggccuggggcuaauccugggaggugcguggca

SEQ ID NO: 345564 - RNA, 32 nt, Homo Sapiens
cgacugcgggccagcucuuccccuacucccuc

SEQ ID NO: 345565 - RNA, 32 nt, Homo Sapiens
gagcucgggaugcggacgcugcugccucccgc

SEQ ID NO: 345566 - RNA, 32 nt, Homo Sapiens
gauucuugucuccucuucagaauuagccauuu

SEQ ID NO: 345567 - RNA, 32 nt, Homo Sapiens
ggcagggggcccuccgcccccuccccauguau

SEQ ID NO: 345568 - RNA, 32 nt, Homo Sapiens
cagaugaccugccggccgccuuuguggauggc

SEQ ID NO: 345569 - RNA, 32 nt, Homo Sapiens
caacacacacuggggccugucacggggcgggg

SEQ ID NO: 345570 - RNA, 32 nt, Homo Sapiens
ggggagggcccucuggccccaggcaaccuuag

SEQ ID NO: 345571 - RNA, 32 nt, Homo Sapiens
ccugugaaagacucaaugagcuguuauguugu

SEQ ID NO: 345572 - RNA, 32 nt, Homo Sapiens
aacacccagagugcccguggcucccaccccag

SEQ ID NO: 345573 - RNA, 32 nt, Homo Sapiens
uacaccguguucaucaggaaaggucuuauucc

SEQ ID NO: 345574 - RNA, 32 nt, Homo Sapiens
acacaugugcauugcagagacgucaugauucg

SEQ ID NO: 345575 - RNA, 32 nt, Homo Sapiens
ggucuaauauccagcaucuguaaggaauuuaa

SEQ ID NO: 345576 - RNA, 28 nt, Homo Sapiens
gucuucuggagaugacauuugaggacug

SEQ ID NO: 345577 - RNA, 32 nt, Homo Sapiens
gacguguuacaguaugaacacacagcagaggc

SEQ ID NO: 345578 - RNA, 32 nt, Homo Sapiens
cuagaccaggaccucccucccccuggcacugg

SEQ ID NO: 345579 - RNA, 32 nt, Homo Sapiens
uuuuaaaagcuaaugucuccaauuuugucaac

SEQ ID NO: 345580 - RNA, 32 nt, Homo Sapiens
gcuauauuugaaauauuaaguaugaaaggagu

SEQ ID NO: 345581 - RNA, 32 nt, Homo Sapiens
gcucaguguggaugauugcauuacuucauuca

SEQ ID NO: 345582 - RNA, 32 nt, Homo Sapiens
aaauuauucugcccuccuuaauuugggaaggu

SEQ ID NO: 345583 - RNA, 32 nt, Homo Sapiens
cccuccgggcccagucugucuguccguggugg

SEQ ID NO: 345584 - RNA, 32 nt, Homo Sapiens
aucucccucuuugucagauacauccuggaguc

SEQ ID NO: 345585 - RNA, 32 nt, Homo Sapiens
guguugggaagcgggggcggcgggaggggcag

SEQ ID NO: 345586 - RNA, 32 nt, Homo Sapiens
gcgcagggcgcuaggaggcauugucgccgcuc

SEQ ID NO: 345587 - RNA, 32 nt, Homo Sapiens
caggcuggagugcaaugcugcgaucucagcuc

SEQ ID NO: 345588 - RNA, 32 nt, Homo Sapiens
gugagcggcgcucggggcgcgcuaggcgggga

SEQ ID NO: 345589 - RNA, 32 nt, Homo Sapiens
ccucuuuuggugcugucuuagacccguuuacc

SEQ ID NO: 345590 - RNA, 32 nt, Homo Sapiens
ggucucucugcaccccaccauccacauguauu

SEQ ID NO: 345591 - RNA, 32 nt, Homo Sapiens
uauguaaauauguuuauauuuauagagcauca

SEQ ID NO: 345592 - RNA, 32 nt, Homo Sapiens
cgcguccuacuuugacagcugcagggccgcgg

SEQ ID NO: 345593 - RNA, 32 nt, Homo Sapiens
gggccuguggauggaggcagggggcugaugga

SEQ ID NO: 345594 - RNA, 32 nt, Homo Sapiens
uucuuaccuguaaaaugggucucagaugcucc

SEQ ID NO: 345595 - RNA, 32 nt, Homo Sapiens
uccaguuacuauucccaaaacaaugugucaga

SEQ ID NO: 345596 - RNA, 32 nt, Homo Sapiens
ucgucuauauauacauauguaacagucaaaua

SEQ ID NO: 345597 - RNA, 32 nt, Homo Sapiens
ggcucagaaauauuuucuuuagauuugaguuu

SEQ ID NO: 345598 - RNA, 32 nt, Homo Sapiens
cgcuccugccccaccccaccuccuccgggcuu

SEQ ID NO: 345599 - RNA, 32 nt, Homo Sapiens
uuauacaaguuauaaguguuuggcauaguacu

SEQ ID NO: 345600 - RNA, 32 nt, Homo Sapiens
ggggguucuuucugcccuccccacccugcauc

SEQ ID NO: 345601 - RNA, 32 nt, Homo Sapiens
cuaaugcuuuuauucauuuuugaaguaugagu

SEQ ID NO: 345602 - RNA, 32 nt, Homo Sapiens
gcagucacgggggagcgaggccugcugggcuu

SEQ ID NO: 345603 - RNA, 32 nt, Homo Sapiens
gggccauccagcugccagagugcuccacaggg

SEQ ID NO: 345604 - RNA, 32 nt, Homo Sapiens
ccucagugggagaugagaauggucauuaugac

SEQ ID NO: 345605 - RNA, 32 nt, Homo Sapiens
caagcauuguaguugauggccuucagaagaau

SEQ ID NO: 345606 - RNA, 32 nt, Homo Sapiens
gaacagcuaccccuuccuuguuuccuuugacu

SEQ ID NO: 345607 - RNA, 32 nt, Homo Sapiens
augucuucaaaauaaccagugauuccuaucag

SEQ ID NO: 345608 - RNA, 32 nt, Homo Sapiens
aucucauauuuucucuuuagugcuuaucauga

SEQ ID NO: 345609 - RNA, 32 nt, Homo Sapiens
caguagacaacugguccacucagggcugccac

SEQ ID NO: 345610 - RNA, 32 nt, Homo Sapiens
aaauuagcugggugugguagcacgcacccgua

SEQ ID NO: 345611 - RNA, 31 nt, Homo Sapiens
agguggccaagaagccaaccaauaggccccc

SEQ ID NO: 345612 - RNA, 32 nt, Homo Sapiens
gaauguggcaaacuuuuaaccaauccucacac

SEQ ID NO: 345613 - RNA, 32 nt, Homo Sapiens
ugguuaaaaauauuuaugggcugguaaacuca

SEQ ID NO: 345614 - RNA, 32 nt, Homo Sapiens
caccccugucccacccacacagcugcccuagc

SEQ ID NO: 345615 - RNA, 32 nt, Homo Sapiens
ucucccugcauccaguuccccaguaugugcug

SEQ ID NO: 345616 - RNA, 32 nt, Homo Sapiens
uaggacacacacacacacacaaacaugcacac

SEQ ID NO: 345617 - RNA, 32 nt, Homo Sapiens
cccgggugggucagccugggcugggaggcagc

SEQ ID NO: 345618 - RNA, 32 nt, Homo Sapiens
ucaauggcagaucugcccuucugagaugcuga

SEQ ID NO: 345619 - RNA, 32 nt, Homo Sapiens
agguuuccuaugaccauagaaaguaacacccc

SEQ ID NO: 345620 - RNA, 32 nt, Homo Sapiens
gucagggagggugggaguugguaaagaguagg

SEQ ID NO: 345621 - RNA, 32 nt, Homo Sapiens
aaagcaaaacaucucugcaguuuuucccaagu

SEQ ID NO: 345622 - RNA, 30 nt, Homo Sapiens
ccgccgccgcugcugccgccguugcugaga

SEQ ID NO: 345623 - RNA, 32 nt, Homo Sapiens
ucaauccuaggcccuggccugauuccaagcca

SEQ ID NO: 345624 - RNA, 32 nt, Homo Sapiens
gagguguuucauaaguuuuuugguguguuuuc

SEQ ID NO: 345625 - RNA, 32 nt, Homo Sapiens
ccugcagaggggcuccagcuguucagaguaac

SEQ ID NO: 345626 - RNA, 32 nt, Homo Sapiens
gccugaauuuuaugaaauuagcuuucugauuc

SEQ ID NO: 345627 - RNA, 32 nt, Homo Sapiens
uggagcugccccgauguggagugggcaggaag

SEQ ID NO: 345628 - RNA, 32 nt, Homo Sapiens
ucuuagaacauuguauuacagaugccuuuuuu

SEQ ID NO: 345629 - RNA, 32 nt, Homo Sapiens
uaaggagaaaucaucaugcuaugauaaaacac

SEQ ID NO: 345630 - RNA, 32 nt, Homo Sapiens
agauuaugcauucuucaugaauacuuuuguau

SEQ ID NO: 345631 - RNA, 32 nt, Homo Sapiens
uguggaaaguagcugcuagugaaauggcuggg

SEQ ID NO: 345632 - RNA, 32 nt, Homo Sapiens
ugcuaaaugcaaaaaauaaucaccuuugauac

SEQ ID NO: 345633 - RNA, 32 nt, Homo Sapiens
acccacuucuaaauagcaauuucgccguugaa

SEQ ID NO: 345634 - RNA, 32 nt, Homo Sapiens
uuuuuacauuagggcauuuguauuucccucac

SEQ ID NO: 345635 - RNA, 32 nt, Homo Sapiens
agcuauggaggucgagggggucggggaggaug

SEQ ID NO: 345636 - RNA, 32 nt, Homo Sapiens
gggacuggagaggcgagaaggggggucgcugc

SEQ ID NO: 345637 - RNA, 32 nt, Homo Sapiens
cgaaauuaggagguagagguggcugccacauc

SEQ ID NO: 345638 - RNA, 32 nt, Homo Sapiens
uucauaauacucaccgaugauuuuauaacacu

SEQ ID NO: 345639 - RNA, 32 nt, Homo Sapiens
gcccgcccgccagcauggccaccaccgccacc

SEQ ID NO: 345640 - RNA, 32 nt, Homo Sapiens
cucugcccuucucugccaccccggggagagcc

SEQ ID NO: 345641 - RNA, 32 nt, Homo Sapiens
uauuccugaaaacaaaacgugauuauuuuucc

SEQ ID NO: 345642 - RNA, 32 nt, Homo Sapiens
ccgagguucacggucugaguaacaccucauua

SEQ ID NO: 345643 - RNA, 32 nt, Homo Sapiens
guacuccccuccccccaguuguucuuuauugu

SEQ ID NO: 345644 - RNA, 32 nt, Homo Sapiens
ccggacuuucccugcuucccaccacuucccuc

SEQ ID NO: 345645 - RNA, 32 nt, Homo Sapiens
agacuuccugacuggcaguugauugaguuauu

SEQ ID NO: 345646 - RNA, 32 nt, Homo Sapiens
ugcacagggguccucugagaccaccuggcgug

SEQ ID NO: 345647 - RNA, 32 nt, Homo Sapiens
gcugggcgagguggcgggcgccuguauuccca

SEQ ID NO: 345648 - RNA, 32 nt, Homo Sapiens
ugccuguaaucccagcacuuugggaagccaag

SEQ ID NO: 345649 - RNA, 32 nt, Homo Sapiens
uaccuguaaucccggcacuuugggaggccgag

SEQ ID NO: 345650 - RNA, 32 nt, Homo Sapiens
uguuuccccaauuccucugugcucuccuaaag

SEQ ID NO: 345651 - RNA, 32 nt, Homo Sapiens
cagcccugcccccgggcacugcacagccuguc

SEQ ID NO: 345652 - RNA, 32 nt, Homo Sapiens
uuuaagauuuaauuugccaaaauaaugucuug

SEQ ID NO: 345653 - RNA, 32 nt, Homo Sapiens
uaaggagcagugcucucuucucucaaagcuca

SEQ ID NO: 345654 - RNA, 32 nt, Homo Sapiens
auggaagcauugggcugguuauacauuucugu

SEQ ID NO: 345655 - RNA, 32 nt, Homo Sapiens
gaacaggcuaccaaucagaacuagaugacuuu

SEQ ID NO: 345656 - RNA, 31 nt, Homo Sapiens
auucgcggaaaaagaggcagagccugugcca

SEQ ID NO: 345657 - RNA, 32 nt, Homo Sapiens
cucuuuguuuuaaacuuaaggugucugcuuau

SEQ ID NO: 345658 - RNA, 32 nt, Homo Sapiens
aacacuggguggcauccaagucuuggaaaacc

SEQ ID NO: 345659 - RNA, 32 nt, Homo Sapiens
cgcgcccggccgccaggugccccaguagcccg

SEQ ID NO: 345660 - RNA, 32 nt, Homo Sapiens
gaaagacuuuuguauaaaguugaguacuuaga

SEQ ID NO: 345661 - RNA, 32 nt, Homo Sapiens
agaaagaucugggacuccaugucacccaccaa

SEQ ID NO: 345662 - RNA, 32 nt, Homo Sapiens
gugcucauuuucuguuuuccuguguuaggaaa

SEQ ID NO: 345663 - RNA, 32 nt, Homo Sapiens
ugaagaauugguuuaaacuuuuaaaugagaac

SEQ ID NO: 345664 - RNA, 30 nt, Homo Sapiens
cccuggggcaggcggccagcguguguuuuu

SEQ ID NO: 345665 - RNA, 32 nt, Homo Sapiens
uaauaaaggaaguaaagggcugcaagauuuga

SEQ ID NO: 345666 - RNA, 32 nt, Homo Sapiens
gaaauagggucuuuaggaggugaguggaaguc

SEQ ID NO: 345667 - RNA, 32 nt, Homo Sapiens
augcauccccgccccacuauccggguggggcg

SEQ ID NO: 345668 - RNA, 32 nt, Homo Sapiens
gggucugggcggcgcuucggcuccucccgagc

SEQ ID NO: 345669 - RNA, 32 nt, Homo Sapiens
ugaguauaacuauugagggaaauauuuuggcc

SEQ ID NO: 345670 - RNA, 32 nt, Homo Sapiens
cuggguugacuggccugguaacugcgccuuca

SEQ ID NO: 345671 - RNA, 32 nt, Homo Sapiens
cuaacaggagaaugcacaguggguggagccaa

SEQ ID NO: 345672 - RNA, 32 nt, Homo Sapiens
uacaguucauauuugcagugacauaaaaggca

SEQ ID NO: 345673 - RNA, 32 nt, Homo Sapiens
uggagcgccucccacugcagacgucuguccgc

SEQ ID NO: 345674 - RNA, 28 nt, Homo Sapiens
aggcccggggggaccaggaugacaccuc

SEQ ID NO: 345675 - RNA, 32 nt, Homo Sapiens
ugguuuccaagcuugauauccuuuaaaauuau

SEQ ID NO: 345676 - RNA, 32 nt, Homo Sapiens
cuuaucuaaucaugaaacucccuaguuccuuc

SEQ ID NO: 345677 - RNA, 32 nt, Homo Sapiens
aggguauugccaccucagggaauacugucaca

SEQ ID NO: 345678 - RNA, 32 nt, Homo Sapiens
cucuuuacagcuuuguuucugcaucaguucac

SEQ ID NO: 345679 - RNA, 32 nt, Homo Sapiens
ggcuguggccccagcucaucccuacugagaga

SEQ ID NO: 345680 - RNA, 32 nt, Homo Sapiens
uugaaccuugguuuccuaacccuaauugagga

SEQ ID NO: 345681 - RNA, 32 nt, Homo Sapiens
aauuaucuguguuuuucagugaaacgggucca

SEQ ID NO: 345682 - RNA, 32 nt, Homo Sapiens
ucaguuguccuuaauuuuuagaaagauuuugg

SEQ ID NO: 345683 - RNA, 32 nt, Homo Sapiens
ucagaaaggaaaaaaaucaugauacuuuaaaa

SEQ ID NO: 345684 - RNA, 32 nt, Homo Sapiens
cauugucucugcauuaacaaaauacacuguua

SEQ ID NO: 345685 - RNA, 32 nt, Homo Sapiens
uuauguguacuccaaggcaacuccuucuuuca

SEQ ID NO: 345686 - RNA, 32 nt, Homo Sapiens
acucugaaugagaagcccgcccugcccgucau

SEQ ID NO: 345687 - RNA, 32 nt, Homo Sapiens
agccaggugcgguggcacgugccuguaguccc

SEQ ID NO: 345688 - RNA, 32 nt, Homo Sapiens
uuguuccaacccggggccgcggugccuccugc

SEQ ID NO: 345689 - RNA, 32 nt, Homo Sapiens
uguuuguuuucuuuccaaaucauguagaauug

SEQ ID NO: 345690 - RNA, 32 nt, Homo Sapiens
gguuguucagagucuucccaauaaagaugagu

SEQ ID NO: 345691 - RNA, 32 nt, Homo Sapiens
ggacaaaagggcccaugcugcagccacugacu

SEQ ID NO: 345692 - RNA, 32 nt, Homo Sapiens
agggucuaugaguagcuguguaugaauaaaua

SEQ ID NO: 345693 - RNA, 32 nt, Homo Sapiens
ugagugcgagggugggcacagccugcacgugc

SEQ ID NO: 345694 - RNA, 32 nt, Homo Sapiens
uuuuauuguugagguuuuuuuaucuccaaggg

SEQ ID NO: 345695 - RNA, 32 nt, Homo Sapiens
cuggaggaaaaauacuucaggaggcuuagcau

SEQ ID NO: 345696 - RNA, 32 nt, Homo Sapiens
uuuuaguucuuuguucuuucuguaauuuuuua

SEQ ID NO: 345697 - RNA, 32 nt, Homo Sapiens
cugggaaguacucugaugagaaugggguccca

SEQ ID NO: 345698 - RNA, 32 nt, Homo Sapiens
aaccagcuuucuuuuuauuauugugagaucau

SEQ ID NO: 345699 - RNA, 32 nt, Homo Sapiens
gcccggcacugggagcugcaucugaggcuuag

SEQ ID NO: 345700 - RNA, 32 nt, Homo Sapiens
guucuacaauaagaaaucaugauuuagcuguu

SEQ ID NO: 345701 - RNA, 32 nt, Homo Sapiens
gaugggcagagcccccaccuucaagucucucc

SEQ ID NO: 345702 - RNA, 32 nt, Homo Sapiens
gaauucuaagugaaauuuuaaaaauuguuaau

SEQ ID NO: 345703 - RNA, 32 nt, Homo Sapiens
ucccgagugcugacccacauggucaagaccag

SEQ ID NO: 345704 - RNA, 32 nt, Homo Sapiens
uacuacauaaaacuugauucuguuucucuacu

SEQ ID NO: 345705 - RNA, 32 nt, Homo Sapiens
uucauuucagccucuggauggcuggcugccuu

SEQ ID NO: 345706 - RNA, 32 nt, Homo Sapiens
ugccccacgaguuugucucucaguggacucua

SEQ ID NO: 345707 - RNA, 32 nt, Homo Sapiens
agaaggaugcacuggaggaagccggacccuca

SEQ ID NO: 345708 - RNA, 32 nt, Homo Sapiens
gacaugcagaggaacugagaucgacagugacu

SEQ ID NO: 345709 - RNA, 32 nt, Homo Sapiens
aguaacuuucuucugcugcucuaaucugauaa

SEQ ID NO: 345710 - RNA, 32 nt, Homo Sapiens
augaaugucugggaguuuuucuguguggggag

SEQ ID NO: 345711 - RNA, 32 nt, Homo Sapiens
agccucccaagcccaggcuuuggcacucagaa

SEQ ID NO: 345712 - RNA, 32 nt, Homo Sapiens
guagcuuugucuuuuuauuuuucuuuucauua

SEQ ID NO: 345713 - RNA, 32 nt, Homo Sapiens
acuugaaucaagucagcaacagagcaaaauaa

SEQ ID NO: 345714 - RNA, 32 nt, Homo Sapiens
aguuuggggcgagguagaaacucuccagugcc

SEQ ID NO: 345715 - RNA, 32 nt, Homo Sapiens
uguuuucuuuugcaggggaucugggcaccugu

SEQ ID NO: 345716 - RNA, 32 nt, Homo Sapiens
cgggcccccaggggcaucaggugcugguccuc

SEQ ID NO: 345717 - RNA, 32 nt, Homo Sapiens
acauuugucugucuauaguuaguauuuuguau

SEQ ID NO: 345718 - RNA, 32 nt, Homo Sapiens
gguuuuucuuuauuuuucagugauuuccucug

SEQ ID NO: 345719 - RNA, 32 nt, Homo Sapiens
aaguuuaguuuguuaugcacuuuaaauggaau

SEQ ID NO: 345720 - RNA, 32 nt, Homo Sapiens
ugaaaauaaccaaauagauuggggaaaguacc

SEQ ID NO: 345721 - RNA, 32 nt, Homo Sapiens
aaagacaacauuuuccggaaauccacugcaca

SEQ ID NO: 345722 - RNA, 32 nt, Homo Sapiens
cucaagcaguucucccaccucagccucucgac

SEQ ID NO: 345723 - RNA, 32 nt, Homo Sapiens
acaugcaguuccugcuugggugcuuaucaggu

SEQ ID NO: 345724 - RNA, 32 nt, Homo Sapiens
acagucuggugggagagugcagacacacccgg

SEQ ID NO: 345725 - RNA, 32 nt, Homo Sapiens
cugggcugagaguucugcagucuagcucugac

SEQ ID NO: 345726 - RNA, 32 nt, Homo Sapiens
acccuagggcggcuugcgcagcugucgggacg

SEQ ID NO: 345727 - RNA, 32 nt, Homo Sapiens
agagauugcccccgcuacacuccagccugguc

SEQ ID NO: 345728 - RNA, 32 nt, Homo Sapiens
uagaaauaaaugaaaacaccugagcugguggc

SEQ ID NO: 345729 - RNA, 32 nt, Homo Sapiens
ucauuuuuauuuacgagacucucucauaucuc

SEQ ID NO: 345730 - RNA, 32 nt, Homo Sapiens
ugaaacaaaauuuggauuuccuuuuaggaaaa

SEQ ID NO: 345731 - RNA, 32 nt, Homo Sapiens
uugcaaccucaagcuucgcagcagcggcggcg

SEQ ID NO: 345732 - RNA, 32 nt, Homo Sapiens
uggauaguugccaguuaaauaagugaguaauu

SEQ ID NO: 345733 - RNA, 32 nt, Homo Sapiens
uguuccccuggccuccugcucuucuagggguc

SEQ ID NO: 345734 - RNA, 32 nt, Homo Sapiens
agaguuggggacgaauuccacugggucaacgg

SEQ ID NO: 345735 - RNA, 32 nt, Homo Sapiens
aaacaauaaaacaaaacaauauuuucccgcuc

SEQ ID NO: 345736 - RNA, 32 nt, Homo Sapiens
ugccccugcccgccggcgccuccagcugccuc

SEQ ID NO: 345737 - RNA, 32 nt, Homo Sapiens
ccaagucccacuuuugaacaagcugaugauuc

SEQ ID NO: 345738 - RNA, 32 nt, Homo Sapiens
cggugggccccgcgcccuccccgccccacuuu

SEQ ID NO: 345739 - RNA, 32 nt, Homo Sapiens
uccugacucccagauccuucccugcccucuug

SEQ ID NO: 345740 - RNA, 32 nt, Homo Sapiens
cuugcguuccuacauccucucaucugagaauc

SEQ ID NO: 345741 - RNA, 32 nt, Homo Sapiens
aaugccaacaauaguuugaauuguguucugua

SEQ ID NO: 345742 - RNA, 29 nt, Homo Sapiens
accucccuauuauuaaauguuuucuacag

SEQ ID NO: 345743 - RNA, 32 nt, Homo Sapiens
ccucagcacagcccggcccggagccccgccuc

SEQ ID NO: 345744 - RNA, 32 nt, Homo Sapiens
caucuguuacacaaagaaccaccaggaaagca

SEQ ID NO: 345745 - RNA, 32 nt, Homo Sapiens
cacucuugacauuccacugugcguuuuagaag

SEQ ID NO: 345746 - RNA, 32 nt, Homo Sapiens
ggcagacacugcuuugaacaaaaaccagccua

SEQ ID NO: 345747 - RNA, 32 nt, Homo Sapiens
guuccagguugcagcaggcgugaggcacugug

SEQ ID NO: 345748 - RNA, 32 nt, Homo Sapiens
gucugauucacaaagauugaaaugaaggaaaa

SEQ ID NO: 345749 - RNA, 32 nt, Homo Sapiens
cuauuucugauaauaauuuacaaacuacuaua

SEQ ID NO: 345750 - RNA, 32 nt, Homo Sapiens
ugccagagccccuuccucucuuguuucccaug

SEQ ID NO: 345751 - RNA, 32 nt, Homo Sapiens
cccgccagcccuucgucccccagccgcccaac

SEQ ID NO: 345752 - RNA, 32 nt, Homo Sapiens
ccagcaguucccuucgugcgcggggggcggcg

SEQ ID NO: 345753 - RNA, 30 nt, Homo Sapiens
gggagaaacaggcgcggggucucagguugg

SEQ ID NO: 345754 - RNA, 32 nt, Homo Sapiens
cucacugcaaccuccgccucccggguucaagu

SEQ ID NO: 345755 - RNA, 32 nt, Homo Sapiens
cucacuguaaccuccgccucccggguucaagc

SEQ ID NO: 345756 - RNA, 32 nt, Homo Sapiens
cucacuacaaccuccgccucccagguucaagu

SEQ ID NO: 345757 - RNA, 32 nt, Homo Sapiens
uucuggcagggcucuccguugcucucccugga

SEQ ID NO: 345758 - RNA, 32 nt, Homo Sapiens
accaucuuuccaucaaaucaauguagagauaa

SEQ ID NO: 345759 - RNA, 32 nt, Homo Sapiens
uaucuauuuauuuauuugaugacugucucucu

SEQ ID NO: 345760 - RNA, 32 nt, Homo Sapiens
aagcugccgcgugcugcugcacaugcgcuuuu

SEQ ID NO: 345761 - RNA, 32 nt, Homo Sapiens
aggggugauggauggcaccggaugcuggauuc

SEQ ID NO: 345762 - RNA, 32 nt, Homo Sapiens
uuuguggugggcgggggcuggaggagagggug

SEQ ID NO: 345763 - RNA, 32 nt, Homo Sapiens
uugaagagcaaacagccaaauaucaggagaca

SEQ ID NO: 345764 - RNA, 32 nt, Homo Sapiens
cucccgcgcugcugcuccagccgcccggcagc

SEQ ID NO: 345765 - RNA, 32 nt, Homo Sapiens
aucccacccccuccucccccaguguccccuuu

SEQ ID NO: 345766 - RNA, 32 nt, Homo Sapiens
aucuuacuaaacaaaauuaauacugaaaaugu

SEQ ID NO: 345767 - RNA, 32 nt, Homo Sapiens
cuuccugcuggggcucccuccuuguagcaccc

SEQ ID NO: 345768 - RNA, 32 nt, Homo Sapiens
auccgaggcagacgaggaagcugagaaaaccc

SEQ ID NO: 345769 - RNA, 32 nt, Homo Sapiens
agcccugccugcggauccccgccgggcgcaug

SEQ ID NO: 345770 - RNA, 32 nt, Homo Sapiens
uuuuuaaauguuucuuugggucuucauuugau

SEQ ID NO: 345771 - RNA, 32 nt, Homo Sapiens
caaguauguggagcugcagacgcuggcuagga

SEQ ID NO: 345772 - RNA, 32 nt, Homo Sapiens
gaaugacaucaucuaagaagcugauuuugcua

SEQ ID NO: 345773 - RNA, 32 nt, Homo Sapiens
ucaccagagguuggcucuggccucaguacccu

SEQ ID NO: 345774 - RNA, 32 nt, Homo Sapiens
gccuggagauaaaacuugucuccucuaccacc

SEQ ID NO: 345775 - RNA, 32 nt, Homo Sapiens
aacagccagaauucaauacaacaaagagcggg

SEQ ID NO: 345776 - RNA, 32 nt, Homo Sapiens
aaauccguaagagcgcacuacaacuucagggc

SEQ ID NO: 345777 - RNA, 32 nt, Homo Sapiens
cagagggguucgcuacggagggaggugggggc

SEQ ID NO: 345778 - RNA, 28 nt, Homo Sapiens
aaaaugaaauaaaaaagaauuaucuugc

SEQ ID NO: 345779 - RNA, 32 nt, Homo Sapiens
gcaauuacuacaaauggaugacacauuuaaug

SEQ ID NO: 345780 - RNA, 32 nt, Homo Sapiens
ccgagggguuccuuggagaagguggugcgucc

SEQ ID NO: 345781 - RNA, 32 nt, Homo Sapiens
ccggccucugcagcugcgcgggcgggcguggu

SEQ ID NO: 345782 - RNA, 32 nt, Homo Sapiens
agccgcggguuguuacagcugcuggagcagca

SEQ ID NO: 345783 - RNA, 32 nt, Homo Sapiens
ccggagcacuagccucacggagaaggaucuga

SEQ ID NO: 345784 - RNA, 32 nt, Homo Sapiens
ggugugccagccccucccccagccugccuaga

SEQ ID NO: 345785 - RNA, 32 nt, Homo Sapiens
acauguaagccauauaaaaauaaagggaacug

SEQ ID NO: 345786 - RNA, 30 nt, Homo Sapiens
cagguaggccuaaugggggaagaugguaau

SEQ ID NO: 345787 - RNA, 32 nt, Homo Sapiens
ccacucacaaaggucuauucaaaccugucuca

SEQ ID NO: 345788 - RNA, 32 nt, Homo Sapiens
agaggauggguaccauggaauaccaaagugaa

SEQ ID NO: 345789 - RNA, 29 nt, Homo Sapiens
ccacauuaauucuucagaggcagggcuaa

SEQ ID NO: 345790 - RNA, 32 nt, Homo Sapiens
ccuaggacugaugcuguggggugcugguggag

SEQ ID NO: 345791 - RNA, 31 nt, Homo Sapiens
aggucuguacuguguguagugcuguuuacau

SEQ ID NO: 345792 - RNA, 32 nt, Homo Sapiens
cuccugccaaccugucuucucuaugcccauga

SEQ ID NO: 345793 - RNA, 32 nt, Homo Sapiens
gggaauucuuagauuauaguaaaugccuuuua

SEQ ID NO: 345794 - RNA, 32 nt, Homo Sapiens
acuggacuaugaaccuggaccgcuaggauacc

SEQ ID NO: 345795 - RNA, 32 nt, Homo Sapiens
aaccauaaauacaguaaaaaugaaacaauguu

SEQ ID NO: 345796 - RNA, 32 nt, Homo Sapiens
gccaggccauugucacuguuaguugaagaaaa

SEQ ID NO: 345797 - RNA, 32 nt, Homo Sapiens
ugcgugagaggagagcagcucugagcccugcu

SEQ ID NO: 345798 - RNA, 32 nt, Homo Sapiens
caagacggguuaagccuuucuugcuuucaaau

SEQ ID NO: 345799 - RNA, 32 nt, Homo Sapiens
uagcucuuuuacuacugaccuuucacagagaa

SEQ ID NO: 345800 - RNA, 32 nt, Homo Sapiens
ccagaaaaaacgcuuauaaaaccagaggcccu

SEQ ID NO: 345801 - RNA, 32 nt, Homo Sapiens
ggggccaaggccacugggggaccugccacacu

SEQ ID NO: 345802 - RNA, 32 nt, Homo Sapiens
caauguugaaugaagucugaaacucuaguaug

SEQ ID NO: 345803 - RNA, 32 nt, Homo Sapiens
ugccaccuguuuuuauacaaccugugagcuaa

SEQ ID NO: 345804 - RNA, 32 nt, Homo Sapiens
gaccaucagauagaagcagggaagguagauaa

SEQ ID NO: 345805 - RNA, 32 nt, Homo Sapiens
acccugacgcagcgcaggacccgccccgcgcg

SEQ ID NO: 345806 - RNA, 32 nt, Homo Sapiens
uugggucaggaguucaagacuagccuggccaa

SEQ ID NO: 345807 - RNA, 32 nt, Homo Sapiens
ugcuuguguuuguuuguuugcagucucucucu

SEQ ID NO: 345808 - RNA, 32 nt, Homo Sapiens
gcccugcugaagcugcugcagcccugccaguu

SEQ ID NO: 345809 - RNA, 32 nt, Homo Sapiens
uuugaaccacuagagucuuuuaugaugcaaau

SEQ ID NO: 345810 - RNA, 32 nt, Homo Sapiens
gaugugcuguuuucuguaaauucauauuuagc

SEQ ID NO: 345811 - RNA, 32 nt, Homo Sapiens
aacuuagaaaugguaauaaaucuuggcuccug

SEQ ID NO: 345812 - RNA, 31 nt, Homo Sapiens
acaaugagggcggcggggcggcguugagcgg

SEQ ID NO: 345813 - RNA, 32 nt, Homo Sapiens
auuugagacguugaaauuggagcugcgugcug

SEQ ID NO: 345814 - RNA, 32 nt, Homo Sapiens
uuuuuguuuuuguuucguuucauuuuguacua

SEQ ID NO: 345815 - RNA, 32 nt, Homo Sapiens
cuuacuaaacacauccuguuauuacuuuaaac

SEQ ID NO: 345816 - RNA, 32 nt, Homo Sapiens
auuucauccaaauguuacccuguaauacuggc

SEQ ID NO: 345817 - RNA, 32 nt, Homo Sapiens
ggagaaggcgauuggaugcggcggcggcggcg

SEQ ID NO: 345818 - RNA, 32 nt, Homo Sapiens
gaggcugacaccuguugugaaucuuggaaacu

SEQ ID NO: 345819 - RNA, 32 nt, Homo Sapiens
ucuacuuuagagucuucuccaauguccaaaag

SEQ ID NO: 345820 - RNA, 32 nt, Homo Sapiens
ugguccggagucuggaaggcccuagagcggcg

SEQ ID NO: 345821 - RNA, 32 nt, Homo Sapiens
uagagcugucucccucucaaucccuccaggga

SEQ ID NO: 345822 - RNA, 32 nt, Homo Sapiens
ucuugugggcuuuauucucaccaccuaaucac

SEQ ID NO: 345823 - RNA, 32 nt, Homo Sapiens
ugccccuggaggugggggcugcuggcugagga

SEQ ID NO: 345824 - RNA, 32 nt, Homo Sapiens
uaaaaggaaaaauuguguuacuuuuuaaaaau

SEQ ID NO: 345825 - RNA, 32 nt, Homo Sapiens
uggggugggggcagcaccucuaugcuucaucu

SEQ ID NO: 345826 - RNA, 32 nt, Homo Sapiens
gucuccuggcagccagcuccucccuugcugac

SEQ ID NO: 345827 - RNA, 32 nt, Homo Sapiens
aaauagcauuuuacuuuguuaauaucuaguuu

SEQ ID NO: 345828 - RNA, 32 nt, Homo Sapiens
ggagaaggccccaggccuuucuuaauauauaa

SEQ ID NO: 345829 - RNA, 32 nt, Homo Sapiens
gaagauaauauuaauaaugauggaaggaagac

SEQ ID NO: 345830 - RNA, 32 nt, Homo Sapiens
cagcguggcucgcauucaguccuguguaggag

SEQ ID NO: 345831 - RNA, 32 nt, Homo Sapiens
ggccagcgccaggcacgguagcucgcuccugu

SEQ ID NO: 345832 - RNA, 32 nt, Homo Sapiens
aagcagcauccguuuuguuuucucuucuuggg

SEQ ID NO: 345833 - RNA, 32 nt, Homo Sapiens
gaccacgccccucggcggggccccccucugcu

SEQ ID NO: 345834 - RNA, 32 nt, Homo Sapiens
gucauacaaaauuuauacucaacagcaucagc

SEQ ID NO: 345835 - RNA, 32 nt, Homo Sapiens
acugagagcuccgagggugagccuuccuggcc

SEQ ID NO: 345836 - RNA, 32 nt, Homo Sapiens
ugcaucacaacugaagaaugggguucaacuug

SEQ ID NO: 345837 - RNA, 32 nt, Homo Sapiens
ggaaacggcacuacugcgcuucugccucggcu

SEQ ID NO: 345838 - RNA, 32 nt, Homo Sapiens
gcugugaacacuuuggguagauaccacgauau

SEQ ID NO: 345839 - RNA, 32 nt, Homo Sapiens
accaugcaggagagaacacagaaggacugaug

SEQ ID NO: 345840 - RNA, 32 nt, Homo Sapiens
uucuuguucugacuccacgugccugcccggcc

SEQ ID NO: 345841 - RNA, 32 nt, Homo Sapiens
aauccuaaauacuuugaaaauacaaaauauuc

SEQ ID NO: 345842 - RNA, 32 nt, Homo Sapiens
gagcuggggcgcuggauguggggaaagggaga

SEQ ID NO: 345843 - RNA, 32 nt, Homo Sapiens
gauugucuaacuuuuccagagaaaguggugau

SEQ ID NO: 345844 - RNA, 32 nt, Homo Sapiens
ucacacagcucuuucaccaugccuggaucacu

SEQ ID NO: 345845 - RNA, 32 nt, Homo Sapiens
uugauacugccagccucguggccugaggggca

SEQ ID NO: 345846 - RNA, 32 nt, Homo Sapiens
ccaugucucaauuuguuaaaucuuauuguucu

SEQ ID NO: 345847 - RNA, 32 nt, Homo Sapiens
auuaaugguuggaaaacacuuucauccggggc

SEQ ID NO: 345848 - RNA, 32 nt, Homo Sapiens
aagaaccccccuccccaaggaagaacaaauau

SEQ ID NO: 345849 - RNA, 32 nt, Homo Sapiens
ccccagcaaaagccacuggacacacagcucug

SEQ ID NO: 345850 - RNA, 32 nt, Homo Sapiens
cguguugaguacguucuggauuacucauaaga

SEQ ID NO: 345851 - RNA, 32 nt, Homo Sapiens
gauuuguauaaaauguacucuuaaaguauaaa

SEQ ID NO: 345852 - RNA, 32 nt, Homo Sapiens
gcacaccucccgggcccgcugcucuccaugcg

SEQ ID NO: 345853 - RNA, 32 nt, Homo Sapiens
cgauucuugccuuuuucucccgauugcggauu

SEQ ID NO: 345854 - RNA, 32 nt, Homo Sapiens
augcuuccccaguuucccuccuccuuuucacu

SEQ ID NO: 345855 - RNA, 32 nt, Homo Sapiens
uaaagguggcaucuuggugcuuucucaugccu

SEQ ID NO: 345856 - RNA, 32 nt, Homo Sapiens
gccugucgccguccuguccccagccugcuugu

SEQ ID NO: 345857 - RNA, 32 nt, Homo Sapiens
accacuacacuccagcccgggcgacagagcaa

SEQ ID NO: 345858 - RNA, 32 nt, Homo Sapiens
gcgcagggagggccagaugccucucaggagcc

SEQ ID NO: 345859 - RNA, 32 nt, Homo Sapiens
gguuucacccuguugcccacucuggucucaaa

SEQ ID NO: 345860 - RNA, 32 nt, Homo Sapiens
gucagacgcccacuggccccagaucucauccu

SEQ ID NO: 345861 - RNA, 32 nt, Homo Sapiens
auacagagauacaaaucuuggcuuauggguua

SEQ ID NO: 345862 - RNA, 32 nt, Homo Sapiens
uguggagcugggucuagggugcgaagaacugc

SEQ ID NO: 345863 - RNA, 32 nt, Homo Sapiens
gcacagucgcauuucuuuccccgccccugaga

SEQ ID NO: 345864 - RNA, 32 nt, Homo Sapiens
guugagucaaugugucccccucuuguuccuag

SEQ ID NO: 345865 - RNA, 32 nt, Homo Sapiens
gauaaugacuuugcaucugcaccuggaacggg

SEQ ID NO: 345866 - RNA, 32 nt, Homo Sapiens
cauuuauccagugucaaagcuaugauacauug

SEQ ID NO: 345867 - RNA, 32 nt, Homo Sapiens
gccugcagaacugacuccuagaaggaccccac

SEQ ID NO: 345868 - RNA, 29 nt, Homo Sapiens
uguucuucuauccaaaccuuucaauucau

SEQ ID NO: 345869 - RNA, 32 nt, Homo Sapiens
ggaagagacaccuuucagcucccuccugaagc

SEQ ID NO: 345870 - RNA, 32 nt, Homo Sapiens
gccuaugcccagccuccaacuccagcugaguc

SEQ ID NO: 345871 - RNA, 32 nt, Homo Sapiens
ggcagcugcuccacuguuacgguugagggaac

SEQ ID NO: 345872 - RNA, 32 nt, Homo Sapiens
cgcugggcuccacaacaucuccccucagauga

SEQ ID NO: 345873 - RNA, 29 nt, Homo Sapiens
cgggggaggaggaggaggacgccgcggug

SEQ ID NO: 345874 - RNA, 32 nt, Homo Sapiens
gggaguugcugccaaggcccucaaacaggggg

SEQ ID NO: 345875 - RNA, 32 nt, Homo Sapiens
uacagugggaaaaccagucgggaccuuuaaua

SEQ ID NO: 345876 - RNA, 32 nt, Homo Sapiens
ucaggugugggaagaggcgagagggcugugga

SEQ ID NO: 345877 - RNA, 32 nt, Homo Sapiens
cuccuuggugucguccucucccuagcccuggu

SEQ ID NO: 345878 - RNA, 32 nt, Homo Sapiens
gcugggugguagcugggaugucccaccuacgu

SEQ ID NO: 345879 - RNA, 32 nt, Homo Sapiens
uauagguggacuuuuuuacaggucaguugagg

SEQ ID NO: 345880 - RNA, 32 nt, Homo Sapiens
uguggugguucuguccgggcuaauccccaugc

SEQ ID NO: 345881 - RNA, 32 nt, Homo Sapiens
uauugcuuaaaauggcgaguucuauggauauu

SEQ ID NO: 345882 - RNA, 32 nt, Homo Sapiens
aaagaaauuugauugcccagauaauauauuag

SEQ ID NO: 345883 - RNA, 28 nt, Homo Sapiens
guuggcugcgcgccgccgaggcguuuug

SEQ ID NO: 345884 - RNA, 31 nt, Homo Sapiens
uauuagaacauauggaaugaaagccuacacc

SEQ ID NO: 345885 - RNA, 32 nt, Homo Sapiens
ugcgcagugacgacccagugaaguagaugccu

SEQ ID NO: 345886 - RNA, 32 nt, Homo Sapiens
accucagacaaggcccuuccaauauguuuacg

SEQ ID NO: 345887 - RNA, 32 nt, Homo Sapiens
gcgcugcuuuccccggccacccggcgcgauga

SEQ ID NO: 345888 - RNA, 32 nt, Homo Sapiens
uccauuucucccuccaucaccaccugcccuca

SEQ ID NO: 345889 - RNA, 32 nt, Homo Sapiens
caagauuuaacacuaaaaagguuucaccugau

SEQ ID NO: 345890 - RNA, 32 nt, Homo Sapiens
agggugaaggacugaggccuggguuccgagug

SEQ ID NO: 345891 - RNA, 32 nt, Homo Sapiens
aaucuguaaaaugggcaauaagacuagaugau

SEQ ID NO: 345892 - RNA, 32 nt, Homo Sapiens
uuacaugaguuaacauuuuuucauagaacuua

SEQ ID NO: 345893 - RNA, 32 nt, Homo Sapiens
auaaucugaauuugacacacagaaagcauuuc

SEQ ID NO: 345894 - RNA, 32 nt, Homo Sapiens
auaggcuccuaacuguuccuccugcuucuagu

SEQ ID NO: 345895 - RNA, 32 nt, Homo Sapiens
uccguagcaggucucagaggcugacgaugggg

SEQ ID NO: 345896 - RNA, 32 nt, Homo Sapiens
agucgggggaccugaagaaucaaucuguguga

SEQ ID NO: 345897 - RNA, 32 nt, Homo Sapiens
guauucaauaaaccucuucuuuagcaaguuaa

SEQ ID NO: 345898 - RNA, 32 nt, Homo Sapiens
ugccauccccuacagcacagaggaagagugau

SEQ ID NO: 345899 - RNA, 32 nt, Homo Sapiens
gcuccucaugcaaagcugggggccaccgggcu

SEQ ID NO: 345900 - RNA, 32 nt, Homo Sapiens
uacacuuucuucacugucccuauuccuagacc

SEQ ID NO: 345901 - RNA, 32 nt, Homo Sapiens
ugaagguuauuuaaaaauguauuuauuuuauc

SEQ ID NO: 345902 - RNA, 32 nt, Homo Sapiens
cccugcccccucucccgccgcgcggacccggg

SEQ ID NO: 345903 - RNA, 32 nt, Homo Sapiens
cccuccgcgggccugccccggccaccgcuuua

SEQ ID NO: 345904 - RNA, 32 nt, Homo Sapiens
uuggucuggauguagagagggugauaaaaugc

SEQ ID NO: 345905 - RNA, 32 nt, Homo Sapiens
ccuauagcugcuuuucgccggaggggccacgc

SEQ ID NO: 345906 - RNA, 32 nt, Homo Sapiens
ucaccacaaccucugccuccccgguucaagug

SEQ ID NO: 345907 - RNA, 32 nt, Homo Sapiens
ccgccucgccugucucggggagcccaggguaa

SEQ ID NO: 345908 - RNA, 32 nt, Homo Sapiens
ucuucaauugaaaaagauuaugaagucccaau

SEQ ID NO: 345909 - RNA, 32 nt, Homo Sapiens
uggcugugggucuagaguauauucauugugca

SEQ ID NO: 345910 - RNA, 32 nt, Homo Sapiens
gaacucuggguuccuguuuucucagucuuuuu

SEQ ID NO: 345911 - RNA, 32 nt, Homo Sapiens
cauggaagaaaauuaugcuugucccuucugac

SEQ ID NO: 345912 - RNA, 32 nt, Homo Sapiens
cugcagucaugaauggcaaguggucccugaug

SEQ ID NO: 345913 - RNA, 32 nt, Homo Sapiens
gaggcuugcagaagcuggugcgccugaaucgg

SEQ ID NO: 345914 - RNA, 31 nt, Homo Sapiens
gugggcaccuggugccugcccccugccgggc

SEQ ID NO: 345915 - RNA, 32 nt, Homo Sapiens
uaccuugaaauaugaagugccauuugaauguc

SEQ ID NO: 345916 - RNA, 32 nt, Homo Sapiens
auugaauaaaaagcaaaaucaaagaagcuaaa

SEQ ID NO: 345917 - RNA, 32 nt, Homo Sapiens
uaguuacaaccaucuguaaauaacuuaaaaga

SEQ ID NO: 345918 - RNA, 32 nt, Homo Sapiens
ccuucagaugagaauccaaagauacaagagaa

SEQ ID NO: 345919 - RNA, 32 nt, Homo Sapiens
gaccugggaaaggccaguggccugcuccugga

SEQ ID NO: 345920 - RNA, 32 nt, Homo Sapiens
cauaaucccucaugauuuuggugucaucaccu

SEQ ID NO: 345921 - RNA, 32 nt, Homo Sapiens
gcaguuugaauauuuuugugcaccuaaaacuu

SEQ ID NO: 345922 - RNA, 32 nt, Homo Sapiens
cgcgcagugucuguguccguccucuaccagcg

SEQ ID NO: 345923 - RNA, 32 nt, Homo Sapiens
cucgggcucggggucuccccggggacgcggcc

SEQ ID NO: 345924 - RNA, 32 nt, Homo Sapiens
uauuuucuaaaauaaaggcugaauugucugaa

SEQ ID NO: 345925 - RNA, 32 nt, Homo Sapiens
uggccaggggagaaggagcugccgugcgucuu

SEQ ID NO: 345926 - RNA, 32 nt, Homo Sapiens
augcuguggccccuccccagaccgccagcgcc

SEQ ID NO: 345927 - RNA, 32 nt, Homo Sapiens
gcaggacacugggcuccggcggccagaguggg

SEQ ID NO: 345928 - RNA, 32 nt, Homo Sapiens
aagagaaugaauuaucccccaaaaugcauuua

SEQ ID NO: 345929 - RNA, 32 nt, Homo Sapiens
gguguaauauaugaauugacuuaaguuaauau

SEQ ID NO: 345930 - RNA, 32 nt, Homo Sapiens
gcauccccuugaacucuucacucuucaaaugc

SEQ ID NO: 345931 - RNA, 32 nt, Homo Sapiens
ugccuuucucuugguguuuucuuucuuguauu

SEQ ID NO: 345932 - RNA, 32 nt, Homo Sapiens
guucaugccuucugcugggacaggccugggcu

SEQ ID NO: 345933 - RNA, 32 nt, Homo Sapiens
agcccagugucugcccugugucccugggcucg

SEQ ID NO: 345934 - RNA, 32 nt, Homo Sapiens
ggccccgagcgcgccuggaagccccgggcaac

SEQ ID NO: 345935 - RNA, 32 nt, Homo Sapiens
gggaagccgggcguggaggcagcaccgggcuc

SEQ ID NO: 345936 - RNA, 32 nt, Homo Sapiens
uggggccggcuugcuucaugggcuagagccgc

SEQ ID NO: 345937 - RNA, 32 nt, Homo Sapiens
uggaggcugaacugcguaaaucccaggugcug

SEQ ID NO: 345938 - RNA, 32 nt, Homo Sapiens
uccucgcgcgcuggccaucaggcgcugcugac

SEQ ID NO: 345939 - RNA, 32 nt, Homo Sapiens
aagugauucuucugccucagccucucaaguaa

SEQ ID NO: 345940 - RNA, 32 nt, Homo Sapiens
caucuacguuccgagucaggcugucacuccua

SEQ ID NO: 345941 - RNA, 32 nt, Homo Sapiens
cugcaaggauaaauguggagaaaaugaugaga

SEQ ID NO: 345942 - RNA, 32 nt, Homo Sapiens
cucaauggauacuggauuugcuccugucaaug

SEQ ID NO: 345943 - RNA, 32 nt, Homo Sapiens
ugcuacuggcuuuauugcaauauuuauuuuca

SEQ ID NO: 345944 - RNA, 32 nt, Homo Sapiens
uauauuuauagcaaaacuagacuuucagaguc

SEQ ID NO: 345945 - RNA, 28 nt, Homo Sapiens
agaauggagcccuccuggcuucaggaac

SEQ ID NO: 345946 - RNA, 32 nt, Homo Sapiens
auuuaugaucuggguuacgguauguucugggg

SEQ ID NO: 345947 - RNA, 32 nt, Homo Sapiens
gcuggggcgucccucccgcucgcuucuugacu

SEQ ID NO: 345948 - RNA, 32 nt, Homo Sapiens
aucccaggccccuccggggacccggccagccu

SEQ ID NO: 345949 - RNA, 32 nt, Homo Sapiens
aagucccuuauuauuuuauuuauuacacugga

SEQ ID NO: 345950 - RNA, 32 nt, Homo Sapiens
aggacaggcaccagggucauggccugggaccu

SEQ ID NO: 345951 - RNA, 32 nt, Homo Sapiens
caugucugcauccccuuuccaaggcugcuucc

SEQ ID NO: 345952 - RNA, 32 nt, Homo Sapiens
ugucaauccuggaaauggucuuucuuuuuugu

SEQ ID NO: 345953 - RNA, 32 nt, Homo Sapiens
cagguaaaaugaauucuuaaguugacgcuuuu

SEQ ID NO: 345954 - RNA, 32 nt, Homo Sapiens
aagguaguuuuaaagacuuuguugauuuuaga

SEQ ID NO: 345955 - RNA, 32 nt, Homo Sapiens
gaggcucgcucuuuccuugccuaacgcagcca

SEQ ID NO: 345956 - RNA, 32 nt, Homo Sapiens
ccguggccucgugcuccgcagggcgcccagcg

SEQ ID NO: 345957 - RNA, 32 nt, Homo Sapiens
cuacucuggccuuuuuucugguucccuuccaa

SEQ ID NO: 345958 - RNA, 32 nt, Homo Sapiens
guuauccugugcuacagagaaaaucaaagcag

SEQ ID NO: 345959 - RNA, 32 nt, Homo Sapiens
gcugggacagucccuuccuucccugaaacccu

SEQ ID NO: 345960 - RNA, 32 nt, Homo Sapiens
agcaaggaucaugcucaguuaagcagguggau

SEQ ID NO: 345961 - RNA, 32 nt, Homo Sapiens
cccuccaaaaagacaaaaaaaaaaaaaaaaaa

SEQ ID NO: 345962 - RNA, 32 nt, Homo Sapiens
ugucuagagauuaaugguguagauagaguuua

SEQ ID NO: 345963 - RNA, 32 nt, Homo Sapiens
cuuugaacgugccagcagcccuuguuuauaug

SEQ ID NO: 345964 - RNA, 32 nt, Homo Sapiens
gaauuuuuucccuuaguuucaggugucaagaa

SEQ ID NO: 345965 - RNA, 32 nt, Homo Sapiens
ugguucacaccuguaaucccggcacuuuggga

SEQ ID NO: 345966 - RNA, 32 nt, Homo Sapiens
cagcagcagcagcagcaaccacuagccuccug

SEQ ID NO: 345967 - RNA, 32 nt, Homo Sapiens
ccgggcacccucggcccucccugcagccuuaa

SEQ ID NO: 345968 - RNA, 31 nt, Homo Sapiens
gccacgauggaggugaugaaccugauggagc

SEQ ID NO: 345969 - RNA, 32 nt, Homo Sapiens
uucagggauguggguggaccgcauuuccccau

SEQ ID NO: 345970 - RNA, 32 nt, Homo Sapiens
uauauguuccuauacuuuucauuuucaagaug

SEQ ID NO: 345971 - RNA, 32 nt, Homo Sapiens
caccccggacuauaacgauaccugggggaaau

SEQ ID NO: 345972 - RNA, 32 nt, Homo Sapiens
cagauucgccaaagugaggacaaaaggaacca

SEQ ID NO: 345973 - RNA, 32 nt, Homo Sapiens
cgccccuggggagaggcagagaugggucuuuu

SEQ ID NO: 345974 - RNA, 32 nt, Homo Sapiens
ugcaaacccacccugccccuuggaugggggga

SEQ ID NO: 345975 - RNA, 32 nt, Homo Sapiens
aucacgccacugcacuccacuccaucucaaaa

SEQ ID NO: 345976 - RNA, 32 nt, Homo Sapiens
gcuuccuggaggaggggcugaggccgcguauu

SEQ ID NO: 345977 - RNA, 32 nt, Homo Sapiens
cccauggcuucagauuauggcuucagaccuug

SEQ ID NO: 345978 - RNA, 32 nt, Homo Sapiens
ucauaauauuacuaaauaaaauuaaaaagcac

SEQ ID NO: 345979 - RNA, 28 nt, Homo Sapiens
ccuggcugacagagcaagacucagucuc

SEQ ID NO: 345980 - RNA, 32 nt, Homo Sapiens
ucccccagcagcggccgcauugccagagcccc

SEQ ID NO: 345981 - RNA, 32 nt, Homo Sapiens
ugggaagcuucuuuucuguucuaacaguuccc

SEQ ID NO: 345982 - RNA, 32 nt, Homo Sapiens
gauggucacuuaaaaugugcaguaauagcacu

SEQ ID NO: 345983 - RNA, 32 nt, Homo Sapiens
gagcgccagacaccaugaaccuuccuuccaca

SEQ ID NO: 345984 - RNA, 32 nt, Homo Sapiens
acuuuucuguaguuugaaauguuuccaaauaa

SEQ ID NO: 345985 - RNA, 32 nt, Homo Sapiens
gccucaaaacaaugaaacaaagagcuugauau

SEQ ID NO: 345986 - RNA, 32 nt, Homo Sapiens
cuuggaacuaguaccuacuuuaaaagauggcc

SEQ ID NO: 345987 - RNA, 32 nt, Homo Sapiens
cccaucaggacgagaccucacaugacaccauc

SEQ ID NO: 345988 - RNA, 32 nt, Homo Sapiens
gcucgcgccucucguccaacuugugcccucgc

SEQ ID NO: 345989 - RNA, 31 nt, Homo Sapiens
ucuugggauuuguaccagccaaauaaacuug

SEQ ID NO: 345990 - RNA, 32 nt, Homo Sapiens
ucaagaccagccuggccaacguggugaaacac

SEQ ID NO: 345991 - RNA, 32 nt, Homo Sapiens
caucgaccgacucagccccaaccgggagccag

SEQ ID NO: 345992 - RNA, 32 nt, Homo Sapiens
uccggcccagugccagcuccagugccgcuccu

SEQ ID NO: 345993 - RNA, 32 nt, Homo Sapiens
gagagccucacgggaagcuuuuagaacuuuua

SEQ ID NO: 345994 - RNA, 32 nt, Homo Sapiens
cccacggucuccugggucccggccaccugucc

SEQ ID NO: 345995 - RNA, 32 nt, Homo Sapiens
cugcggguggagccccugagcugguucugcag

SEQ ID NO: 345996 - RNA, 32 nt, Homo Sapiens
guacuguaauccuugaauuguuguguaacugu

SEQ ID NO: 345997 - RNA, 32 nt, Homo Sapiens
caagccaauauuugugacuuugcucugcuacc

SEQ ID NO: 345998 - RNA, 32 nt, Homo Sapiens
uuuagaucggaagccaguuucuacacacuugc

SEQ ID NO: 345999 - RNA, 32 nt, Homo Sapiens
ccgcggaggagcccgcgccgccccgaugccca

SEQ ID NO: 346000 - RNA, 32 nt, Homo Sapiens
ccgcccgcucgcucgcccggcccgcgacucau

SEQ ID NO: 346001 - RNA, 32 nt, Homo Sapiens
uugcuagauuuaacuuuuuuuuuuuuuuucca

SEQ ID NO: 346002 - RNA, 30 nt, Homo Sapiens
auggugcagcgcucgccgccgggcccgaga

SEQ ID NO: 346003 - RNA, 32 nt, Homo Sapiens
cagcaacggcggccuccaggccucaggccccc

SEQ ID NO: 346004 - RNA, 32 nt, Homo Sapiens
cauuuccaccaacuggggaacugugacuaucu

SEQ ID NO: 346005 - RNA, 32 nt, Homo Sapiens
cacggucccggcgucaccccuccggcgcccag

SEQ ID NO: 346006 - RNA, 32 nt, Homo Sapiens
ugcguuccaucccaccaucaaccuccacguga

SEQ ID NO: 346007 - RNA, 32 nt, Homo Sapiens
aaaugucuucaguuguaaaucuuaccauuauu

SEQ ID NO: 346008 - RNA, 32 nt, Homo Sapiens
gcugggccagcugcgccgcggcucacagcuga

SEQ ID NO: 346009 - RNA, 32 nt, Homo Sapiens
cccaugauguuguauuaugcuucuuucuccuc

SEQ ID NO: 346010 - RNA, 32 nt, Homo Sapiens
ccccccgaucugccuccagucucggacuuggu

SEQ ID NO: 346011 - RNA, 32 nt, Homo Sapiens
cuacauccuggaguuuggcucuagucacuucu

SEQ ID NO: 346012 - RNA, 27 nt, Homo Sapiens
agaugguaaauggccagaggggacuag

SEQ ID NO: 346013 - RNA, 32 nt, Homo Sapiens
uuuggcccagcauguaaaacuucaguccugaa

SEQ ID NO: 346014 - RNA, 31 nt, Homo Sapiens
aucuccagagccaccaucaccaguucugcca

SEQ ID NO: 346015 - RNA, 32 nt, Homo Sapiens
auguaccaugccagcaagagugccaagcgggc

SEQ ID NO: 346016 - RNA, 32 nt, Homo Sapiens
cccagcgcgccgcccgcuccucacgugucccu

SEQ ID NO: 346017 - RNA, 32 nt, Homo Sapiens
gcaggccuaaaugagaggcauucugacugguu

SEQ ID NO: 346018 - RNA, 32 nt, Homo Sapiens
aggcgagcacacccccgcccagguuugacuca

SEQ ID NO: 346019 - RNA, 32 nt, Homo Sapiens
gccgccgggcgccaggccugagcggugggagg

SEQ ID NO: 346020 - RNA, 32 nt, Homo Sapiens
uaggcggagccucggccgcgggccgccuuggu

SEQ ID NO: 346021 - RNA, 32 nt, Homo Sapiens
uauaauguugagcagaacagugaggcauccuu

SEQ ID NO: 346022 - RNA, 32 nt, Homo Sapiens
agccuuacuuuuccuuuguggaaauauuaagu

SEQ ID NO: 346023 - RNA, 32 nt, Homo Sapiens
gagaaaaaacaaugcagauuugugguaaaguc

SEQ ID NO: 346024 - RNA, 32 nt, Homo Sapiens
guaagccccaguguccccccagcccccaugcu

SEQ ID NO: 346025 - RNA, 32 nt, Homo Sapiens
ugaccauuguuauuuccacuuucuccaauacu

SEQ ID NO: 346026 - RNA, 32 nt, Homo Sapiens
gcugccuccauuauauagguccuuccaggaac

SEQ ID NO: 346027 - RNA, 32 nt, Homo Sapiens
ucugcgcacucucucccgcgccggcggcucag

SEQ ID NO: 346028 - RNA, 32 nt, Homo Sapiens
cagugugggccagggaggaaaaccagagcaca

SEQ ID NO: 346029 - RNA, 32 nt, Homo Sapiens
gugauuuuacuuuuuaauagauaugacuuugc

SEQ ID NO: 346030 - RNA, 32 nt, Homo Sapiens
gucuuagucaauccuaucccaccucuucuucc

SEQ ID NO: 346031 - RNA, 32 nt, Homo Sapiens
gcaucuggaaaacaagcugcaaauccaucugg

SEQ ID NO: 346032 - RNA, 32 nt, Homo Sapiens
cuccaaauauccaacagccuuucuggauuucu

SEQ ID NO: 346033 - RNA, 31 nt, Homo Sapiens
gcgcugcaaggcugccugcgcgcgguucgcu

SEQ ID NO: 346034 - RNA, 32 nt, Homo Sapiens
cugacacccugggcuuccugagccagcccucc

SEQ ID NO: 346035 - RNA, 32 nt, Homo Sapiens
cccucgauggagaucaagugucggacugaaca

SEQ ID NO: 346036 - RNA, 32 nt, Homo Sapiens
auaacuuccaaacaugcaaaguagaaggggcc

SEQ ID NO: 346037 - RNA, 32 nt, Homo Sapiens
aucacaagcagcauccguuuuguuuucucuuc

SEQ ID NO: 346038 - RNA, 32 nt, Homo Sapiens
gucaucaugagagaaaaauguaaauggccaaa

SEQ ID NO: 346039 - RNA, 32 nt, Homo Sapiens
cccaucccaucccuuucuaagcaggaaggucu

SEQ ID NO: 346040 - RNA, 32 nt, Homo Sapiens
uucuucccauucuguucuguucuguucuccua

SEQ ID NO: 346041 - RNA, 32 nt, Homo Sapiens
ucccagggccccacucuccuccccucauuaaa

SEQ ID NO: 346042 - RNA, 31 nt, Homo Sapiens
gagccagaugccagcaccugagguugcccac

SEQ ID NO: 346043 - RNA, 32 nt, Homo Sapiens
agccugaccaacauggcgaaaccccgucucua

SEQ ID NO: 346044 - RNA, 32 nt, Homo Sapiens
cguagagcacaccagaagcaggcaaguucugu

SEQ ID NO: 346045 - RNA, 32 nt, Homo Sapiens
agccuggccaacauagcgaaaccccgucucua

SEQ ID NO: 346046 - RNA, 29 nt, Homo Sapiens
cgcagaggaagcugggcacugggugcaga

SEQ ID NO: 346047 - RNA, 32 nt, Homo Sapiens
gucccgggcugugacccuccccgaggccccgc

SEQ ID NO: 346048 - RNA, 32 nt, Homo Sapiens
uuaguaaaaaucaugcucguaauggcugaaua

SEQ ID NO: 346049 - RNA, 32 nt, Homo Sapiens
gaggguguaaacaauuaacuccaggguuuuau

SEQ ID NO: 346050 - RNA, 32 nt, Homo Sapiens
uauuaagguauuaacuauuacauggaaagcaa

SEQ ID NO: 346051 - RNA, 32 nt, Homo Sapiens
gaagcgcugcggcauggcgcgcgccugccucc

SEQ ID NO: 346052 - RNA, 32 nt, Homo Sapiens
cgcgcgcggagucggaggaagaggagggagga

SEQ ID NO: 346053 - RNA, 32 nt, Homo Sapiens
ucugcaugagccgguuucaucaucuugggugg

SEQ ID NO: 346054 - RNA, 32 nt, Homo Sapiens
uaaaaugaauuuucuagaugauugaauaacag

SEQ ID NO: 346055 - RNA, 32 nt, Homo Sapiens
accuauuugacuguucagaaaaguggggacca

SEQ ID NO: 346056 - RNA, 32 nt, Homo Sapiens
aaaggugaaaguagcaggaacaacaacaaaag

SEQ ID NO: 346057 - RNA, 32 nt, Homo Sapiens
uaccuaugcuucaccuucagcuccugggaguu

SEQ ID NO: 346058 - RNA, 32 nt, Homo Sapiens
gcuuugucauucccagaggaaauguucucuuc

SEQ ID NO: 346059 - RNA, 31 nt, Homo Sapiens
ggagagcggcacucgcuggccuggauguggu

SEQ ID NO: 346060 - RNA, 32 nt, Homo Sapiens
uggguccagugcugucaccauccacuaggauc

SEQ ID NO: 346061 - RNA, 32 nt, Homo Sapiens
ugaguucuuuugcuguuucuuugcuuucuccu

SEQ ID NO: 346062 - RNA, 32 nt, Homo Sapiens
aggguggccuaucauugggguaugaguggcug

SEQ ID NO: 346063 - RNA, 32 nt, Homo Sapiens
cgucucaaacuccugaacccuaguaauucucc

SEQ ID NO: 346064 - RNA, 32 nt, Homo Sapiens
ggcuggucaccugccuuaggcuccacagcccu

SEQ ID NO: 346065 - RNA, 32 nt, Homo Sapiens
ggagagucugcagauagcaggggagcagaaag

SEQ ID NO: 346066 - RNA, 32 nt, Homo Sapiens
guggacgguguggggcggucccggccccgcag

SEQ ID NO: 346067 - RNA, 28 nt, Homo Sapiens
guuaauggaaauaaaugucuccauuccc

SEQ ID NO: 346068 - RNA, 32 nt, Homo Sapiens
gugaacuugagcucaguguaugcuaggcaaca

SEQ ID NO: 346069 - RNA, 32 nt, Homo Sapiens
gaucuaucuaauguggaggcacgaaaggauca

SEQ ID NO: 346070 - RNA, 32 nt, Homo Sapiens
ccccuggcccagaguugcugugccguguccaa

SEQ ID NO: 346071 - RNA, 32 nt, Homo Sapiens
auauuucaagacaaagugaauuagguuggcau

SEQ ID NO: 346072 - RNA, 32 nt, Homo Sapiens
ggugugugauagguguaacaaacaaaauguca

SEQ ID NO: 346073 - RNA, 32 nt, Homo Sapiens
gugagcugguagaggggagacauuagaaaaaa

SEQ ID NO: 346074 - RNA, 32 nt, Homo Sapiens
caauucuccaauccccucuccuuugguccagu

SEQ ID NO: 346075 - RNA, 32 nt, Homo Sapiens
ugaacuuaaauuauauucuauauguguaucuu

SEQ ID NO: 346076 - RNA, 32 nt, Homo Sapiens
aauucguuaaugauuccacuugauuuucagaa

SEQ ID NO: 346077 - RNA, 32 nt, Homo Sapiens
acauauuagcagaaagcauuagucuuuguacu

SEQ ID NO: 346078 - RNA, 32 nt, Homo Sapiens
cugugguuaaccuguuauguugcuuuuggaag

SEQ ID NO: 346079 - RNA, 32 nt, Homo Sapiens
ggucgggugggggagggaaagggagggaugac

SEQ ID NO: 346080 - RNA, 32 nt, Homo Sapiens
cacccaccugggcgaccuccgcggcggcggcg

SEQ ID NO: 346081 - RNA, 32 nt, Homo Sapiens
uuauuuauaaauuuaucugguucagaaauaug

SEQ ID NO: 346082 - RNA, 30 nt, Homo Sapiens
cgcccccaugcucggcuuccucacauucag

SEQ ID NO: 346083 - RNA, 32 nt, Homo Sapiens
ugauguguauaaaagacgugaugugcaccacc

SEQ ID NO: 346084 - RNA, 32 nt, Homo Sapiens
uuuuuuaaaauaugaagcuauuagauuuuaag

SEQ ID NO: 346085 - RNA, 32 nt, Homo Sapiens
guucugccuguucucagggcacagcaacugcc

SEQ ID NO: 346086 - RNA, 32 nt, Homo Sapiens
aucuaaauugaauaaugguacuagauaaaauu

SEQ ID NO: 346087 - RNA, 32 nt, Homo Sapiens
uggggauggacuggguaaauguugacagaggc

SEQ ID NO: 346088 - RNA, 32 nt, Homo Sapiens
cccuucagagucggcccugugcucgccaccgu

SEQ ID NO: 346089 - RNA, 32 nt, Homo Sapiens
ugccugaaggagcgccagguccuccuugcugg

SEQ ID NO: 346090 - RNA, 32 nt, Homo Sapiens
guuaaaaaacaaucaaauguaauagucauaaa

SEQ ID NO: 346091 - RNA, 32 nt, Homo Sapiens
uacccugcuuuuccucgcucuccguggguugu

SEQ ID NO: 346092 - RNA, 32 nt, Homo Sapiens
gcugcugcccgaagguuuggccgccgcgggac

SEQ ID NO: 346093 - RNA, 32 nt, Homo Sapiens
uuuagccauaaacuuucuuuuaaaagugacaa

SEQ ID NO: 346094 - RNA, 32 nt, Homo Sapiens
uuucuuuccaaaaggcagcuugaaauguuggu

SEQ ID NO: 346095 - RNA, 32 nt, Homo Sapiens
uaacgugcugucagcauuauaaaccccuccaa

SEQ ID NO: 346096 - RNA, 32 nt, Homo Sapiens
cuuauuuccagaagauaccgcucuaaaaauga

SEQ ID NO: 346097 - RNA, 32 nt, Homo Sapiens
aacccuacuggacagugacauaaaaggcaaug

SEQ ID NO: 346098 - RNA, 32 nt, Homo Sapiens
agagagugauuucacgaaaaagugccuuacuc

SEQ ID NO: 346099 - RNA, 32 nt, Homo Sapiens
cuggcaaaagcuucuuuucugccuaucuugga

SEQ ID NO: 346100 - RNA, 32 nt, Homo Sapiens
aaaaaugcaguccaugauguaaaauuguacau

SEQ ID NO: 346101 - RNA, 29 nt, Homo Sapiens
acacaugugacuuucuagaagaaauguuu

SEQ ID NO: 346102 - RNA, 32 nt, Homo Sapiens
cauguacauaucuguuuaguuuggguucauuu

SEQ ID NO: 346103 - RNA, 32 nt, Homo Sapiens
cccaaggaggaggcugauagggggguggauaa

SEQ ID NO: 346104 - RNA, 32 nt, Homo Sapiens
uuuaauacugucacugcgcucuccaguauaua

SEQ ID NO: 346105 - RNA, 32 nt, Homo Sapiens
cuuuaacucugcagcaccgcugcagcugccga

SEQ ID NO: 346106 - RNA, 32 nt, Homo Sapiens
cuuuucuacugguguaauuuaaguauaaagua

SEQ ID NO: 346107 - RNA, 32 nt, Homo Sapiens
cuucagcuucuggguggugggugggguggggu

SEQ ID NO: 346108 - RNA, 32 nt, Homo Sapiens
auuaagaguagauuugugaagauucuucuuca

SEQ ID NO: 346109 - RNA, 32 nt, Homo Sapiens
uaagcaaagguauuuuugaagugguguagaac

SEQ ID NO: 346110 - RNA, 32 nt, Homo Sapiens
gcuuuucaccccacccccaaguccugggagaa

SEQ ID NO: 346111 - RNA, 32 nt, Homo Sapiens
ugaugugcgagcagcccgcgacgaggcagugc

SEQ ID NO: 346112 - RNA, 32 nt, Homo Sapiens
aucuguguuuugaauuuuuuuauuguguguua

SEQ ID NO: 346113 - RNA, 32 nt, Homo Sapiens
cuuggccccggacuguggggccccaccuguug

SEQ ID NO: 346114 - RNA, 32 nt, Homo Sapiens
uguucuuuguuuaaguuuuuuuuccugaaugu

SEQ ID NO: 346115 - RNA, 32 nt, Homo Sapiens
cccggcgucucgucugcagagggagcacuaug

SEQ ID NO: 346116 - RNA, 32 nt, Homo Sapiens
cagccugccuacuccuucuccaucuuuucuuu

SEQ ID NO: 346117 - RNA, 32 nt, Homo Sapiens
aaaagucauuggcuuuagaaacuguacaaaac

SEQ ID NO: 346118 - RNA, 32 nt, Homo Sapiens
ucaaucuaaucugauauugacauauuagaagg

SEQ ID NO: 346119 - RNA, 32 nt, Homo Sapiens
ucccuggcuggagggucggggaggggcuggca

SEQ ID NO: 346120 - RNA, 32 nt, Homo Sapiens
guuaaagcugucuccaaggcagugauucuuac

SEQ ID NO: 346121 - RNA, 32 nt, Homo Sapiens
ucaugcccugaacaaugucaacaaggcacugc

SEQ ID NO: 346122 - RNA, 32 nt, Homo Sapiens
ggaagcucugccucuuuccccagugggcgagg

SEQ ID NO: 346123 - RNA, 32 nt, Homo Sapiens
uuugccggcaaaugcagggcaugugcccaaga

SEQ ID NO: 346124 - RNA, 32 nt, Homo Sapiens
guuccucuguugucuucaguggucuuccugug

SEQ ID NO: 346125 - RNA, 32 nt, Homo Sapiens
ugagauucuuaaaacuuuuuugcuucauaaua

SEQ ID NO: 346126 - RNA, 32 nt, Homo Sapiens
ccugcucuuuugcucuagcaccugggucccag

SEQ ID NO: 346127 - RNA, 32 nt, Homo Sapiens
gauuuuuaugaugaugaaaauuuuaccagcag

SEQ ID NO: 346128 - RNA, 31 nt, Homo Sapiens
ugcucuguugcccacgcaggagugcaguggc

SEQ ID NO: 346129 - RNA, 32 nt, Homo Sapiens
aggaacauaggcaucaugugucuggaugaagc

SEQ ID NO: 346130 - RNA, 32 nt, Homo Sapiens
uuugccaaaaucaacauauaaugaagagaugc

SEQ ID NO: 346131 - RNA, 32 nt, Homo Sapiens
ccccacugccugucccuccccauccugugucc

SEQ ID NO: 346132 - RNA, 31 nt, Homo Sapiens
gugguacagccaagcagacaggcaaguaagu

SEQ ID NO: 346133 - RNA, 32 nt, Homo Sapiens
uccuaccaaugcaugcagccacugugcugaau

SEQ ID NO: 346134 - RNA, 32 nt, Homo Sapiens
ugaaaauuugaaaauauuuaauguugaaagac

SEQ ID NO: 346135 - RNA, 32 nt, Homo Sapiens
gguuucaccauguuggcuaggcuggucucaaa

SEQ ID NO: 346136 - RNA, 32 nt, Homo Sapiens
ggccuguuugauguaugugugaaacaauguug

SEQ ID NO: 346137 - RNA, 32 nt, Homo Sapiens
gacuugguccuaaggccacagaaucucucuca

SEQ ID NO: 346138 - RNA, 32 nt, Homo Sapiens
cugcaucauccaagcaaugaccucagacuucu

SEQ ID NO: 346139 - RNA, 32 nt, Homo Sapiens
ccagcuccugaucuagaccaagagggagauau

SEQ ID NO: 346140 - RNA, 32 nt, Homo Sapiens
guggucagagugguaggagcuggccaucggug

SEQ ID NO: 346141 - RNA, 32 nt, Homo Sapiens
uggcuuuggaacaccucccuccccuuccuccu

SEQ ID NO: 346142 - RNA, 32 nt, Homo Sapiens
cucugugucacucucaacacacacagcuccuu

SEQ ID NO: 346143 - RNA, 32 nt, Homo Sapiens
uugccacauuuuaauuuuucauauggcuucuc

SEQ ID NO: 346144 - RNA, 32 nt, Homo Sapiens
cuuaguuuacacaucugccaaagggguagaau

SEQ ID NO: 346145 - RNA, 32 nt, Homo Sapiens
gccucugggauuagcacagguuauucauaacc

SEQ ID NO: 346146 - RNA, 32 nt, Homo Sapiens
cuaccuguaacaucagauacaaaugaaaaggu

SEQ ID NO: 346147 - RNA, 32 nt, Homo Sapiens
accagaggggagaggagagagccuggacagcc

SEQ ID NO: 346148 - RNA, 32 nt, Homo Sapiens
cuuuaggcccagcucauuccucacgucggcca

SEQ ID NO: 346149 - RNA, 32 nt, Homo Sapiens
guucccucggcggcugccggcguagugagccc

SEQ ID NO: 346150 - RNA, 32 nt, Homo Sapiens
ggcuuagggcuuuauggccaaauaacuucacu

SEQ ID NO: 346151 - RNA, 32 nt, Homo Sapiens
gagaccucccuuuccaagccugccuggguggg

SEQ ID NO: 346152 - RNA, 32 nt, Homo Sapiens
uuugguuuaugcggugcuguccgggugccagg

SEQ ID NO: 346153 - RNA, 32 nt, Homo Sapiens
cagccccggggcccggcccuagccagcugggc

SEQ ID NO: 346154 - RNA, 32 nt, Homo Sapiens
uacaucucuuucgacagagcuucuuuuguaaa

SEQ ID NO: 346155 - RNA, 32 nt, Homo Sapiens
uacuuuuguaaaaacacugguuaauuuguaua

SEQ ID NO: 346156 - RNA, 32 nt, Homo Sapiens
cugcauaaaagaucugguaggcuggucagcua

SEQ ID NO: 346157 - RNA, 32 nt, Homo Sapiens
cuuaccugcugauuuucuuaacuguucuugug

SEQ ID NO: 346158 - RNA, 32 nt, Homo Sapiens
gggcauuugucaaccugucugaaccuuaguau

SEQ ID NO: 346159 - RNA, 32 nt, Homo Sapiens
uuccaacucucagaucuugugcuuuaguuagu

SEQ ID NO: 346160 - RNA, 32 nt, Homo Sapiens
gccacgcugcuggccuggguuggcgucuccug

SEQ ID NO: 346161 - RNA, 32 nt, Homo Sapiens
ccucugcccccgcugacgcuucccuugccguu

SEQ ID NO: 346162 - RNA, 32 nt, Homo Sapiens
uugccaaggaaggcuuuuucugauuuuuugac

SEQ ID NO: 346163 - RNA, 32 nt, Homo Sapiens
cuuuccuuuguuuggcucauuaacuuuugacu

SEQ ID NO: 346164 - RNA, 32 nt, Homo Sapiens
gcuaaauucuagugacccaugugucaaaaauc

SEQ ID NO: 346165 - RNA, 32 nt, Homo Sapiens
cgguaucuggaagcugcagauucagcgugugg

SEQ ID NO: 346166 - RNA, 32 nt, Homo Sapiens
ccagucacuucauaugucuugaacaucuguau

SEQ ID NO: 346167 - RNA, 32 nt, Homo Sapiens
cauucucuagacaaaaucaaauuguccuauug

SEQ ID NO: 346168 - RNA, 32 nt, Homo Sapiens
aaguaagucauguaucucugaaagccccagac

SEQ ID NO: 346169 - RNA, 32 nt, Homo Sapiens
ucugauuugcgugaggacguggcauccuacuu

SEQ ID NO: 346170 - RNA, 32 nt, Homo Sapiens
gcgccagaaccucggcccgggcgcccucgucg

SEQ ID NO: 346171 - RNA, 32 nt, Homo Sapiens
ccccggugcuccuggggcuaaggcuggggcug

SEQ ID NO: 346172 - RNA, 32 nt, Homo Sapiens
uacauguguaauuugaauccauuuggaugaaa

SEQ ID NO: 346173 - RNA, 32 nt, Homo Sapiens
caggagugguggcucacgccuguggucccagc

SEQ ID NO: 346174 - RNA, 32 nt, Homo Sapiens
uguugacguagauauugaaagaauaaugaagg

SEQ ID NO: 346175 - RNA, 32 nt, Homo Sapiens
aauauacguaugaaaugaaauauuugguuagg

SEQ ID NO: 346176 - RNA, 32 nt, Homo Sapiens
ugcauaauacaguggaucugaauuuauuauug

SEQ ID NO: 346177 - RNA, 32 nt, Homo Sapiens
ugagacccccaucucuacaaaaauaaagaaaa

SEQ ID NO: 346178 - RNA, 32 nt, Homo Sapiens
uggcacccaagccccucaugucugcccugcug

SEQ ID NO: 346179 - RNA, 32 nt, Homo Sapiens
ggccaguugcuguuuuuucaugcagugcccug

SEQ ID NO: 346180 - RNA, 31 nt, Homo Sapiens
gcccaugcaagguuccuacugaccauauguu

SEQ ID NO: 346181 - RNA, 32 nt, Homo Sapiens
ggaugugcgcaucacuggcuggcgguggagcu

SEQ ID NO: 346182 - RNA, 32 nt, Homo Sapiens
ucucucgaauacuuugaauguuguguaacagu

SEQ ID NO: 346183 - RNA, 32 nt, Homo Sapiens
uaaccaagauguuggcuguaggugucucuuag

SEQ ID NO: 346184 - RNA, 32 nt, Homo Sapiens
aaagggggaccauuggggccugagccaaggaa

SEQ ID NO: 346185 - RNA, 32 nt, Homo Sapiens
gauguggaugauaauggugccuugauuuccaa

SEQ ID NO: 346186 - RNA, 32 nt, Homo Sapiens
uugagacagucgcucugucacccaggcuggag

SEQ ID NO: 346187 - RNA, 32 nt, Homo Sapiens
acggcugccccgacgaguguguguauaucugu

SEQ ID NO: 346188 - RNA, 32 nt, Homo Sapiens
uuaagaaguuggaauuugauuucaugcauaac

SEQ ID NO: 346189 - RNA, 32 nt, Homo Sapiens
gccuuccugccgcccuugccagaugggcuccc

SEQ ID NO: 346190 - RNA, 32 nt, Homo Sapiens
aaaagaccgagggaucggagaaugcucccgaa

SEQ ID NO: 346191 - RNA, 32 nt, Homo Sapiens
ugaagccccaugcucaguccccucccaucccc

SEQ ID NO: 346192 - RNA, 32 nt, Homo Sapiens
ugugacccggagguccucagggggcgaagccc

SEQ ID NO: 346193 - RNA, 32 nt, Homo Sapiens
gccagucagagagaagcagaugaaggagccau

SEQ ID NO: 346194 - RNA, 32 nt, Homo Sapiens
cccugcugggcggucgucugcugcugauggac

SEQ ID NO: 346195 - RNA, 32 nt, Homo Sapiens
auugcuuuuuauuuuuaaugucuugacucuuc

SEQ ID NO: 346196 - RNA, 32 nt, Homo Sapiens
guuucuuucguuucuccuucuucagggcggcc

SEQ ID NO: 346197 - RNA, 32 nt, Homo Sapiens
ugcuccuauguauucagcaucguuucuaaaaa

SEQ ID NO: 346198 - RNA, 32 nt, Homo Sapiens
ccgcugccgccgcgacccuuggcgccugcccc

SEQ ID NO: 346199 - RNA, 32 nt, Homo Sapiens
ucugcagaucuaaaaucugugcuuuuuaaaag

SEQ ID NO: 346200 - RNA, 32 nt, Homo Sapiens
cagcagagaaagugaacagcauuuguuggaag

SEQ ID NO: 346201 - RNA, 32 nt, Homo Sapiens
ugcauguuacuuaauguagcucaauccaucuu

SEQ ID NO: 346202 - RNA, 32 nt, Homo Sapiens
cgcugcagccagguugcaccccgauggucucc

SEQ ID NO: 346203 - RNA, 32 nt, Homo Sapiens
gccccuggccccagccuccaugcugggucugg

SEQ ID NO: 346204 - RNA, 32 nt, Homo Sapiens
ccuuuuauaccagagaccugaggcagaugaaa

SEQ ID NO: 346205 - RNA, 32 nt, Homo Sapiens
gaugucaaaaccugggggcccgggggcggggc

SEQ ID NO: 346206 - RNA, 32 nt, Homo Sapiens
ccaauuuuaguaaaaugugucuauugcuaugc

SEQ ID NO: 346207 - RNA, 32 nt, Homo Sapiens
cccucaccuugaugggugcguucccgcagacc

SEQ ID NO: 346208 - RNA, 32 nt, Homo Sapiens
uuucaaccauguucugaacugcagcuuuacag

SEQ ID NO: 346209 - RNA, 32 nt, Homo Sapiens
ggcaguaacaagggcuuuuacuguucuguuca

SEQ ID NO: 346210 - RNA, 32 nt, Homo Sapiens
gacaucuuugauucuguggugaugcggacuuu

SEQ ID NO: 346211 - RNA, 32 nt, Homo Sapiens
guaucacccuccgaacuccccccacaccuucc

SEQ ID NO: 346212 - RNA, 32 nt, Homo Sapiens
uuuacaugaugaugauuauguugcuguagcua

SEQ ID NO: 346213 - RNA, 32 nt, Homo Sapiens
cuuugaaugacaaagaguagacauuucucuua

SEQ ID NO: 346214 - RNA, 32 nt, Homo Sapiens
aguggucccugucucccuucuuguacaaucca

SEQ ID NO: 346215 - RNA, 32 nt, Homo Sapiens
uaaauggucuguaucuggauuuuaagagcccu

SEQ ID NO: 346216 - RNA, 32 nt, Homo Sapiens
ucuauuuaaguaccuacuacauacugcucuag

SEQ ID NO: 346217 - RNA, 32 nt, Homo Sapiens
cccaggcucacucgcucaccccccugggcccu

SEQ ID NO: 346218 - RNA, 32 nt, Homo Sapiens
ggucugucagcuugcccuccccucuccgccua

SEQ ID NO: 346219 - RNA, 32 nt, Homo Sapiens
aggaaaucuucagaacacugguaacuuuuagu

SEQ ID NO: 346220 - RNA, 32 nt, Homo Sapiens
uguuuuuacaagcuaauacugaagacucgacu

SEQ ID NO: 346221 - RNA, 31 nt, Homo Sapiens
gggcugcagcgcagcagcacccaacgcagug

SEQ ID NO: 346222 - RNA, 32 nt, Homo Sapiens
gggucagcgguugaugaaaaccacugugaucc

SEQ ID NO: 346223 - RNA, 32 nt, Homo Sapiens
ggaaggugucauuugacaacacaugugggaga

SEQ ID NO: 346224 - RNA, 32 nt, Homo Sapiens
auucaagucacugcucuucagaauacacucua

SEQ ID NO: 346225 - RNA, 32 nt, Homo Sapiens
gacaaaugggaggacggagccuucccgccagg

SEQ ID NO: 346226 - RNA, 32 nt, Homo Sapiens
uuagcuacagcuccuuguuuguuaguuuucau

SEQ ID NO: 346227 - RNA, 32 nt, Homo Sapiens
gggguauagcuauauuuuuuguaauuucuuua

SEQ ID NO: 346228 - RNA, 32 nt, Homo Sapiens
ggucucaaacuccugagcacaagcaauacgcu

SEQ ID NO: 346229 - RNA, 32 nt, Homo Sapiens
gguagcccuguccugacccauccaagcgcugu

SEQ ID NO: 346230 - RNA, 32 nt, Homo Sapiens
aacucgaaguaccccacgacuaaacgcuaaug

SEQ ID NO: 346231 - RNA, 32 nt, Homo Sapiens
cccgcgcccucgccgcugcugcgucccgcgag

SEQ ID NO: 346232 - RNA, 32 nt, Homo Sapiens
gauaauaauucacaaaguacaugcuaucagaa

SEQ ID NO: 346233 - RNA, 32 nt, Homo Sapiens
ucuggugcugaagcagccaagagacccaagcc

SEQ ID NO: 346234 - RNA, 32 nt, Homo Sapiens
acaccuggcacacuggggucugcacaaggcuu

SEQ ID NO: 346235 - RNA, 32 nt, Homo Sapiens
accuuggaccugccggcuuccacggucacaca

SEQ ID NO: 346236 - RNA, 32 nt, Homo Sapiens
ccaacacucuacagauuauuaucucuggacuc

SEQ ID NO: 346237 - RNA, 32 nt, Homo Sapiens
cucaggcuggagcaggcauaugagcaacaccc

SEQ ID NO: 346238 - RNA, 32 nt, Homo Sapiens
aaguuaaaaaucagcuggguaugguggcacgu

SEQ ID NO: 346239 - RNA, 32 nt, Homo Sapiens
uuuauucgugguuugucuuacucaguucaguc

SEQ ID NO: 346240 - RNA, 32 nt, Homo Sapiens
uccgguguugcauccuuggagagagcugagag

SEQ ID NO: 346241 - RNA, 32 nt, Homo Sapiens
uccaaagaacguaguuuggaaaacacuggccu

SEQ ID NO: 346242 - RNA, 32 nt, Homo Sapiens
gccuuguauaaaauccaaaaugaaugcaaaau

SEQ ID NO: 346243 - RNA, 32 nt, Homo Sapiens
auugauucauugauuucucaaguauggauuau

SEQ ID NO: 346244 - RNA, 30 nt, Homo Sapiens
ggggcaggcaggcaggcccccucccgugcg

SEQ ID NO: 346245 - RNA, 32 nt, Homo Sapiens
ugucaauaaaaugacuuuugauaaaugauuua

SEQ ID NO: 346246 - RNA, 32 nt, Homo Sapiens
gacauggcccugccugagcccgggccggccuc

SEQ ID NO: 346247 - RNA, 32 nt, Homo Sapiens
uccaaagucugcugcucuuaagugguagugcu

SEQ ID NO: 346248 - RNA, 32 nt, Homo Sapiens
uugggcuuugacuuaaauuuccaucaggccuc

SEQ ID NO: 346249 - RNA, 32 nt, Homo Sapiens
acggggucaggagaucgagaccauccuggcua

SEQ ID NO: 346250 - RNA, 32 nt, Homo Sapiens
auccagcugguucaugggucccucaugcagag

SEQ ID NO: 346251 - RNA, 32 nt, Homo Sapiens
gguccugggagcggccccggcgcccgaagccg

SEQ ID NO: 346252 - RNA, 32 nt, Homo Sapiens
auucuccuugaagaccuucucccuuuuaugug

SEQ ID NO: 346253 - RNA, 32 nt, Homo Sapiens
gagaauggugugaaccugugagguggagcuug

SEQ ID NO: 346254 - RNA, 32 nt, Homo Sapiens
acccgcacccucggcggccgcagccucagcac

SEQ ID NO: 346255 - RNA, 32 nt, Homo Sapiens
cagagaaggguaagaaaggaaauugcugaaag

SEQ ID NO: 346256 - RNA, 32 nt, Homo Sapiens
uggcuugggccaaaugccaacaaaacaaaccc

SEQ ID NO: 346257 - RNA, 32 nt, Homo Sapiens
aauuucuaauguuuacuauauagaauuuccug

SEQ ID NO: 346258 - RNA, 32 nt, Homo Sapiens
agccagugucgucggaucggcccgcaguccgc

SEQ ID NO: 346259 - RNA, 32 nt, Homo Sapiens
acaugaggguuucaaaaauuugcagccuauga

SEQ ID NO: 346260 - RNA, 32 nt, Homo Sapiens
cagcagcagaccuugggaccugugagcgcugc

SEQ ID NO: 346261 - RNA, 32 nt, Homo Sapiens
gaaaagggaaaugugacugguucagaaauagc

SEQ ID NO: 346262 - RNA, 32 nt, Homo Sapiens
cagcccugcucaccccagccccacagccgggg

SEQ ID NO: 346263 - RNA, 32 nt, Homo Sapiens
auuuauuuuuauuuucucuuuguggguguuau

SEQ ID NO: 346264 - RNA, 32 nt, Homo Sapiens
uacccaccaugugccaggauccacccuggccu

SEQ ID NO: 346265 - RNA, 32 nt, Homo Sapiens
gaacagaaggcacaacucaaauguguaaagaa

SEQ ID NO: 346266 - RNA, 32 nt, Homo Sapiens
guccagcauccugauuaaaugucugacacauu

SEQ ID NO: 346267 - RNA, 32 nt, Homo Sapiens
aacauuauaugaucccauuguguguaucugug

SEQ ID NO: 346268 - RNA, 32 nt, Homo Sapiens
ccugagccccccucccuucccuccccccuugg

SEQ ID NO: 346269 - RNA, 27 nt, Homo Sapiens
gcccuauccuucuuugauucuuuaaca

SEQ ID NO: 346270 - RNA, 31 nt, Homo Sapiens
gcacugccccacugccugucccuucugguaa

SEQ ID NO: 346271 - RNA, 32 nt, Homo Sapiens
acuuuauaaaugacaagugcuuugaaaugcag

SEQ ID NO: 346272 - RNA, 32 nt, Homo Sapiens
gguugggauuguagggacuggauguggggcaa

SEQ ID NO: 346273 - RNA, 32 nt, Homo Sapiens
auccccugaggguggucagccaaggcucccgu

SEQ ID NO: 346274 - RNA, 32 nt, Homo Sapiens
cauuccccgguuccucauuacuuacgagagaa

SEQ ID NO: 346275 - RNA, 32 nt, Homo Sapiens
ccacuguuuuauuauuuuacuaacauggugau

SEQ ID NO: 346276 - RNA, 32 nt, Homo Sapiens
guggcccucaggauccucagccaggccugacu

SEQ ID NO: 346277 - RNA, 32 nt, Homo Sapiens
ggagaaggaaagggucugcgccagcccugucc

SEQ ID NO: 346278 - RNA, 32 nt, Homo Sapiens
uccaggggcuccugggaaauuaaggagggauu

SEQ ID NO: 346279 - RNA, 32 nt, Homo Sapiens
agugguuuaaacaaucauuauugaauaccaag

SEQ ID NO: 346280 - RNA, 32 nt, Homo Sapiens
aguaagaggagcuucaucucagccugcuagcc

SEQ ID NO: 346281 - RNA, 32 nt, Homo Sapiens
gcugcugggagucagaguccaagcauaacccg

SEQ ID NO: 346282 - RNA, 32 nt, Homo Sapiens
uggucaauauauuugguucuaguauuaauaaa

SEQ ID NO: 346283 - RNA, 32 nt, Homo Sapiens
agauagugaagugaucaaaugccagugucauu

SEQ ID NO: 346284 - RNA, 32 nt, Homo Sapiens
cacacacguguaugcacagcagagagacguau

SEQ ID NO: 346285 - RNA, 32 nt, Homo Sapiens
guggacccaagcccaggaccuucguggagcug

SEQ ID NO: 346286 - RNA, 32 nt, Homo Sapiens
gcugcugcucugccuucauugcuggagacagu

SEQ ID NO: 346287 - RNA, 32 nt, Homo Sapiens
aggaggaaugcaccacggcagcucuccgccaa

SEQ ID NO: 346288 - RNA, 32 nt, Homo Sapiens
aauucggucucuaugaucaaagccuuauaaga

SEQ ID NO: 346289 - RNA, 32 nt, Homo Sapiens
uuccuggccugcccuccuccuccaggcagccu

SEQ ID NO: 346290 - RNA, 30 nt, Homo Sapiens
aggaccggcgggcgcgcgcgggcucuggag

SEQ ID NO: 346291 - RNA, 32 nt, Homo Sapiens
gucccacaacuccccuucccagccccagccaa

SEQ ID NO: 346292 - RNA, 32 nt, Homo Sapiens
gcugcccuugaguccccugugcccuagcaacc

SEQ ID NO: 346293 - RNA, 32 nt, Homo Sapiens
ccaggaccgacgggaagguuuuccaguuucuu

SEQ ID NO: 346294 - RNA, 32 nt, Homo Sapiens
cgguagaagggagaaggacagagcucucuuca

SEQ ID NO: 346295 - RNA, 32 nt, Homo Sapiens
uuguauacagaguauuuauacaaauguuuuag

SEQ ID NO: 346296 - RNA, 32 nt, Homo Sapiens
uugauuucuuugcauuuauuauagauauuaua

SEQ ID NO: 346297 - RNA, 32 nt, Homo Sapiens
aucucggcccuggcccgggagacgcggcccgc

SEQ ID NO: 346298 - RNA, 32 nt, Homo Sapiens
aggucacagggggacagguugggacucaacau

SEQ ID NO: 346299 - RNA, 32 nt, Homo Sapiens
gccagugaaacacuugcuugccaacugccaag

SEQ ID NO: 346300 - RNA, 32 nt, Homo Sapiens
ucuugaaguuaguuugauuuuaucuuuguaug

SEQ ID NO: 346301 - RNA, 32 nt, Homo Sapiens
gcaugcgugggcagcagggggcgugggcagcg

SEQ ID NO: 346302 - RNA, 32 nt, Homo Sapiens
caacagcgcgccccaagcugcgcagcucugca

SEQ ID NO: 346303 - RNA, 32 nt, Homo Sapiens
aggagcucccccagcccccagguccuccugac

SEQ ID NO: 346304 - RNA, 32 nt, Homo Sapiens
ggugugugcagggguguggggggcgcaggggu

SEQ ID NO: 346305 - RNA, 32 nt, Homo Sapiens
uccaugguauaggugauggccugguggggugg

SEQ ID NO: 346306 - RNA, 32 nt, Homo Sapiens
gcucaggggaccacagcugcaaugacaguuug

SEQ ID NO: 346307 - RNA, 32 nt, Homo Sapiens
ccucuguacuaauggaggaagggcagagagau

SEQ ID NO: 346308 - RNA, 32 nt, Homo Sapiens
cgcccgcccucuccggccccggcgacgaggua

SEQ ID NO: 346309 - RNA, 32 nt, Homo Sapiens
cucccacuccccagccccccagcagcccccag

SEQ ID NO: 346310 - RNA, 32 nt, Homo Sapiens
cgcuacguccccguucgcccgccgggccgccc

SEQ ID NO: 346311 - RNA, 32 nt, Homo Sapiens
aagcugaauauguuggaacugaggaggaagcc

SEQ ID NO: 346312 - RNA, 32 nt, Homo Sapiens
uuucugaggcuggggagccggauaaugggggg

SEQ ID NO: 346313 - RNA, 32 nt, Homo Sapiens
ggucuauccuaccaaccugaguugggggaaua

SEQ ID NO: 346314 - RNA, 32 nt, Homo Sapiens
uauuuuuaaaaccaacuugcaaugcuguucau

SEQ ID NO: 346315 - RNA, 32 nt, Homo Sapiens
cccuugugggucucugcuccuggaaaaggugc

SEQ ID NO: 346316 - RNA, 32 nt, Homo Sapiens
gcggcuggaagaaugagcuuguccuuccuccu

SEQ ID NO: 346317 - RNA, 29 nt, Homo Sapiens
uaaucuucaaaauaaaacuuuuuuuuuga

SEQ ID NO: 346318 - RNA, 32 nt, Homo Sapiens
uaauuuuuuuugccucuuucaaaagguuaaca

SEQ ID NO: 346319 - RNA, 32 nt, Homo Sapiens
ccaaagaagcaaggaaccaaauuuaagacucu

SEQ ID NO: 346320 - RNA, 32 nt, Homo Sapiens
aauuacacagaaaaaauggaauaggaaaaauu

SEQ ID NO: 346321 - RNA, 31 nt, Homo Sapiens
aguccccugggccccaauucagaguuauguu

SEQ ID NO: 346322 - RNA, 32 nt, Homo Sapiens
ccaaggccgagaccccaucuuccagccaccua

SEQ ID NO: 346323 - RNA, 31 nt, Homo Sapiens
ugcccucggccggugucgguagcggcacucg

SEQ ID NO: 346324 - RNA, 32 nt, Homo Sapiens
cggggggcguggcugcaguucuggacgggcug

SEQ ID NO: 346325 - RNA, 32 nt, Homo Sapiens
caguuccaugagcuuuuccccagugcccuuug

SEQ ID NO: 346326 - RNA, 32 nt, Homo Sapiens
cggccauuguccgaccccggugcggcugaggc

SEQ ID NO: 346327 - RNA, 32 nt, Homo Sapiens
cuccuguguccuugcuuggcugccuugcaaua

SEQ ID NO: 346328 - RNA, 32 nt, Homo Sapiens
uugaacccauucugauagucucuuuuaacugg

SEQ ID NO: 346329 - RNA, 32 nt, Homo Sapiens
aaagauauaaccaaauaaacaagucauccaca

SEQ ID NO: 346330 - RNA, 32 nt, Homo Sapiens
ccggccaggccccgcuuggaggaggcaucguc

SEQ ID NO: 346331 - RNA, 32 nt, Homo Sapiens
cagagcauuccaugguaugagagacagugagg

SEQ ID NO: 346332 - RNA, 32 nt, Homo Sapiens
uuuacuuucuucauggauauucuuggucucac

SEQ ID NO: 346333 - RNA, 32 nt, Homo Sapiens
uucuccucaauaaccuuuaaaaaguagcugua

SEQ ID NO: 346334 - RNA, 32 nt, Homo Sapiens
uauagaugaugauguguuugggauacugcuua

SEQ ID NO: 346335 - RNA, 32 nt, Homo Sapiens
gagccaggggacacagaagagaagcccacuau

SEQ ID NO: 346336 - RNA, 32 nt, Homo Sapiens
uccugucccucauuggcucugugcuuuccacu

SEQ ID NO: 346337 - RNA, 32 nt, Homo Sapiens
agauuuuucuaccugccccucuucaguacagg

SEQ ID NO: 346338 - RNA, 32 nt, Homo Sapiens
gaggcuggggaugggggcgccgcugcucucuc

SEQ ID NO: 346339 - RNA, 32 nt, Homo Sapiens
guggauuuuuaaaguuuuccuuuuaucuuuua

SEQ ID NO: 346340 - RNA, 32 nt, Homo Sapiens
cacauaugucauauauuacuagcauaugaguu

SEQ ID NO: 346341 - RNA, 32 nt, Homo Sapiens
auauaaagcugcuacuuuuuauagaagguugg

SEQ ID NO: 346342 - RNA, 32 nt, Homo Sapiens
cuuuggccgcgaccacgggaaccagcggugag

SEQ ID NO: 346343 - RNA, 32 nt, Homo Sapiens
aaucucuugagcccaggaguuugagacuagcc

SEQ ID NO: 346344 - RNA, 32 nt, Homo Sapiens
ucccccugcgagccggcggcagcccucccggc

SEQ ID NO: 346345 - RNA, 32 nt, Homo Sapiens
cagcccgaguuccaggggccucgggggcuguu

SEQ ID NO: 346346 - RNA, 32 nt, Homo Sapiens
ggguucuggagccuucggggcccgugcgcccc

SEQ ID NO: 346347 - RNA, 32 nt, Homo Sapiens
uuggagcccgcggcgcuugggggaaaugcguu

SEQ ID NO: 346348 - RNA, 32 nt, Homo Sapiens
uuuagagaaaucacaugauaauaauuaugaag

SEQ ID NO: 346349 - RNA, 32 nt, Homo Sapiens
auggaguuaagcauuuuuauacuaguaacuau

SEQ ID NO: 346350 - RNA, 32 nt, Homo Sapiens
uccuuugccucccaaauaugucuguauguuua

SEQ ID NO: 346351 - RNA, 32 nt, Homo Sapiens
aacugacaggauuccaaaagccugcuguuuga

SEQ ID NO: 346352 - RNA, 30 nt, Homo Sapiens
ccuugguggggcgagguuuccgugacgaau

SEQ ID NO: 346353 - RNA, 31 nt, Homo Sapiens
ccgugaggccccucucccagagccugacaca

SEQ ID NO: 346354 - RNA, 32 nt, Homo Sapiens
gaaguuuuaagugaguauuuguuccaaacaag

SEQ ID NO: 346355 - RNA, 32 nt, Homo Sapiens
aagggcuguaggguacuugucaauucgccgcc

SEQ ID NO: 346356 - RNA, 32 nt, Homo Sapiens
auacuguuugaccuccucccccucugcuuaug

SEQ ID NO: 346357 - RNA, 32 nt, Homo Sapiens
ucaugccuccaagucagaguuuccccuggugc

SEQ ID NO: 346358 - RNA, 32 nt, Homo Sapiens
uugcaggaaugggaaugagagcugaauguagg

SEQ ID NO: 346359 - RNA, 32 nt, Homo Sapiens
gcugaugguuggaagacagauuugcuuuggua

SEQ ID NO: 346360 - RNA, 32 nt, Homo Sapiens
aaucgcaucccggcugacccucugccccaguu

SEQ ID NO: 346361 - RNA, 32 nt, Homo Sapiens
uccugacagccuggcgacguggcgaagaugca

SEQ ID NO: 346362 - RNA, 32 nt, Homo Sapiens
gcggccugcgggccuuggcagcgccgccccug

SEQ ID NO: 346363 - RNA, 32 nt, Homo Sapiens
caagggugcgucaaaauaaauuccuuucuuaa

SEQ ID NO: 346364 - RNA, 32 nt, Homo Sapiens
cuagaauaaugaacaaggaauugauuugcucu

SEQ ID NO: 346365 - RNA, 32 nt, Homo Sapiens
cucccucccaggucugggcugugcaguuccuc

SEQ ID NO: 346366 - RNA, 32 nt, Homo Sapiens
cucauaugggggugggggguaccugcacuguc

SEQ ID NO: 346367 - RNA, 32 nt, Homo Sapiens
gaagggagggcuucaggcccgaaggucucucu

SEQ ID NO: 346368 - RNA, 32 nt, Homo Sapiens
agcccagccccgcccaccccagccccuaugug

SEQ ID NO: 346369 - RNA, 32 nt, Homo Sapiens
aaaagccaccugcuuccccagcccugacuugg

SEQ ID NO: 346370 - RNA, 27 nt, Homo Sapiens
uaccauucauucuucugguauuuguaa

SEQ ID NO: 346371 - RNA, 32 nt, Homo Sapiens
ggacaacucggggccgcaucaacgacucagcu

SEQ ID NO: 346372 - RNA, 32 nt, Homo Sapiens
acuccacuaauauauuuacguugcauucagaa

SEQ ID NO: 346373 - RNA, 32 nt, Homo Sapiens
aaaggcccccuggggcccugccccacagcauc

SEQ ID NO: 346374 - RNA, 32 nt, Homo Sapiens
aagcagagaaagaaaaguuaaauaccagauaa

SEQ ID NO: 346375 - RNA, 32 nt, Homo Sapiens
agacccugccagcagcucccucccguccccca

SEQ ID NO: 346376 - RNA, 32 nt, Homo Sapiens
cccuccccgcgcggguuccgggcccggcgaga

SEQ ID NO: 346377 - RNA, 32 nt, Homo Sapiens
cagucuccauucucccuccuacccaggccucc

SEQ ID NO: 346378 - RNA, 32 nt, Homo Sapiens
agaauuugcuuggccuuuaaacacgaaccauu

SEQ ID NO: 346379 - RNA, 32 nt, Homo Sapiens
gugacaagaugguguucugcuaauguuaaaug

SEQ ID NO: 346380 - RNA, 32 nt, Homo Sapiens
cugcagggccucagccucaggaugcauuuaau

SEQ ID NO: 346381 - RNA, 32 nt, Homo Sapiens
aaauuuuuaagugauaauaccaugccgaguua

SEQ ID NO: 346382 - RNA, 32 nt, Homo Sapiens
uccagcucugcucuguuuucucuuccucagca

SEQ ID NO: 346383 - RNA, 32 nt, Homo Sapiens
ugauacaaaaauuuaaauaguuauguuacuuc

SEQ ID NO: 346384 - RNA, 32 nt, Homo Sapiens
ccagauccuaaaaccacagaaaacaagggaag

SEQ ID NO: 346385 - RNA, 32 nt, Homo Sapiens
ugucagaauaagucaguacuuggguuguguaa

SEQ ID NO: 346386 - RNA, 32 nt, Homo Sapiens
aaauccugugcccuucccauggccagcagagc

SEQ ID NO: 346387 - RNA, 32 nt, Homo Sapiens
uccuucccugccaguuuucucauuuauuacag

SEQ ID NO: 346388 - RNA, 32 nt, Homo Sapiens
caucgagcuguggccaacauggagcuagcuca

SEQ ID NO: 346389 - RNA, 32 nt, Homo Sapiens
uuccuggaaaucaguguaaaucuugcaacaua

SEQ ID NO: 346390 - RNA, 32 nt, Homo Sapiens
aaauuguuaagagagaucuuauaaugcaacau

SEQ ID NO: 346391 - RNA, 32 nt, Homo Sapiens
gcugucaauauuucuuugacuucagcauuguu

SEQ ID NO: 346392 - RNA, 32 nt, Homo Sapiens
acgcauuuccaauaaugcugaccauuggcauu

SEQ ID NO: 346393 - RNA, 32 nt, Homo Sapiens
aagaccaauuuaaugguccugucauguuacug

SEQ ID NO: 346394 - RNA, 32 nt, Homo Sapiens
cagaagaaaaacaugcacagaugguaguuuua

SEQ ID NO: 346395 - RNA, 32 nt, Homo Sapiens
ccguccccauccccugcccucagcacacacau

SEQ ID NO: 346396 - RNA, 32 nt, Homo Sapiens
ccuggcccaggcugcaggagccaggcuggggg

SEQ ID NO: 346397 - RNA, 32 nt, Homo Sapiens
aaagacauccagaucagcuguuuugccuguug

SEQ ID NO: 346398 - RNA, 32 nt, Homo Sapiens
aaaucuauuuucucauggcuggguguggggag

SEQ ID NO: 346399 - RNA, 32 nt, Homo Sapiens
cagauguggguucugugggucggguguggguu

SEQ ID NO: 346400 - RNA, 32 nt, Homo Sapiens
aagacaguuuuaauguugaauuugguauuuug

SEQ ID NO: 346401 - RNA, 32 nt, Homo Sapiens
ccugcaucgcagcccaccguguauagagauau

SEQ ID NO: 346402 - RNA, 32 nt, Homo Sapiens
cuacauucccuggccuggcucuccuguagcuc

SEQ ID NO: 346403 - RNA, 31 nt, Homo Sapiens
uugcaugcaaaaugcaaaggaguccugguga

SEQ ID NO: 346404 - RNA, 32 nt, Homo Sapiens
ugccugcaguaguucuguuuccuguagaaaag

SEQ ID NO: 346405 - RNA, 32 nt, Homo Sapiens
cacgaucucaggccccaccuccugcuuauuga

SEQ ID NO: 346406 - RNA, 31 nt, Homo Sapiens
aagugcuuggccuggucgacggucuuugcuc

SEQ ID NO: 346407 - RNA, 32 nt, Homo Sapiens
ugugucacaugguuauuuuuuaaaugaggauu

SEQ ID NO: 346408 - RNA, 32 nt, Homo Sapiens
aaaaauuauaaaaggauuuuugaaaguauaaa

SEQ ID NO: 346409 - RNA, 32 nt, Homo Sapiens
ugaaggccuccauggagcaaacggagccaccu

SEQ ID NO: 346410 - RNA, 32 nt, Homo Sapiens
aucggcaccguuaccacccuggcgaacauccu

SEQ ID NO: 346411 - RNA, 32 nt, Homo Sapiens
gagggugggaccaagggugcugcuggaccaag

SEQ ID NO: 346412 - RNA, 32 nt, Homo Sapiens
aagucuucauggauguucugcaugucaugcgg

SEQ ID NO: 346413 - RNA, 32 nt, Homo Sapiens
uggggacuggagggaccaggaugcugguugga

SEQ ID NO: 346414 - RNA, 32 nt, Homo Sapiens
aacuucucacuagucaggcuaguggagagaug

SEQ ID NO: 346415 - RNA, 32 nt, Homo Sapiens
acucgcugcggccuaucuggcuccagaccgcc

SEQ ID NO: 346416 - RNA, 32 nt, Homo Sapiens
gaaguaagccagcuguggaucccgcccacuca

SEQ ID NO: 346417 - RNA, 32 nt, Homo Sapiens
guauccuccaauuugacauuuucaucauagau

SEQ ID NO: 346418 - RNA, 32 nt, Homo Sapiens
cacaccauauccuuuccccagauccaccuguc

SEQ ID NO: 346419 - RNA, 32 nt, Homo Sapiens
cgccuuccgcgcgcucugcacugccgaagggg

SEQ ID NO: 346420 - RNA, 32 nt, Homo Sapiens
aguucuguagaguuuauugucaauugcuucuc

SEQ ID NO: 346421 - RNA, 32 nt, Homo Sapiens
ccugcggccccgaggaagaagagcaagguuga

SEQ ID NO: 346422 - RNA, 32 nt, Homo Sapiens
uccugcucagcugcgucaugggccccccaugc

SEQ ID NO: 346423 - RNA, 32 nt, Homo Sapiens
ucagcugugcuuuguuaugcuguuuaaaauau

SEQ ID NO: 346424 - RNA, 32 nt, Homo Sapiens
gguuuccgcggugaccccgcggcggccugagg

SEQ ID NO: 346425 - RNA, 32 nt, Homo Sapiens
cugguuagucacauaacuuaguagcaggauug

SEQ ID NO: 346426 - RNA, 32 nt, Homo Sapiens
gauggagccucccauggauaggaacucuuccu

SEQ ID NO: 346427 - RNA, 32 nt, Homo Sapiens
gcuccuuggaacuuauggcccaaucuuaccug

SEQ ID NO: 346428 - RNA, 32 nt, Homo Sapiens
ugccaaaccaugucuuuuuuucuguuuucaga

SEQ ID NO: 346429 - RNA, 32 nt, Homo Sapiens
ggcaucccaggccggcccgaacguccgcccgc

SEQ ID NO: 346430 - RNA, 32 nt, Homo Sapiens
aaaaugaauuuucuaauucaguuuuuucaaug

SEQ ID NO: 346431 - RNA, 32 nt, Homo Sapiens
aaagcgaggggguggggggcuucccgggacga

SEQ ID NO: 346432 - RNA, 32 nt, Homo Sapiens
auuccaaagacuuuuucuuaaccuaaaggaag

SEQ ID NO: 346433 - RNA, 32 nt, Homo Sapiens
cuaugugugacugcagucaguguuccgucuga

SEQ ID NO: 346434 - RNA, 32 nt, Homo Sapiens
cacaucuuuccucuuacucagcccuuuauggc

SEQ ID NO: 346435 - RNA, 32 nt, Homo Sapiens
ugaaagaagaacuccaaguuacuggacaccag

SEQ ID NO: 346436 - RNA, 32 nt, Homo Sapiens
ucaaagguuuccgguccauuucugggguuccc

SEQ ID NO: 346437 - RNA, 32 nt, Homo Sapiens
agccagguccugaaauggauuggagagaccac

SEQ ID NO: 346438 - RNA, 31 nt, Homo Sapiens
agggccugcugccugccgccccgcgggaccu

SEQ ID NO: 346439 - RNA, 32 nt, Homo Sapiens
uugaagaaacauaggaauuaaaaaagaagaca

SEQ ID NO: 346440 - RNA, 32 nt, Homo Sapiens
aguuugauaaaaaugcuuaugucuaaagagcu

SEQ ID NO: 346441 - RNA, 32 nt, Homo Sapiens
cucuuuuauaugcuaaaggagcaucuaucaga

SEQ ID NO: 346442 - RNA, 32 nt, Homo Sapiens
gaagugaaacggagccagcggcugaggagggg

SEQ ID NO: 346443 - RNA, 32 nt, Homo Sapiens
agugagaaaaauuuaaaacacgagaauacaua

SEQ ID NO: 346444 - RNA, 32 nt, Homo Sapiens
caauucuagacaagcucuuugguaggaccuuu

SEQ ID NO: 346445 - RNA, 32 nt, Homo Sapiens
gaggggcucguguggccgccuaccucccccac

SEQ ID NO: 346446 - RNA, 32 nt, Homo Sapiens
cuuuuuacugguuuauacugaacuaucugaug

SEQ ID NO: 346447 - RNA, 32 nt, Homo Sapiens
gaagaaaauuuaaagaaaagcuagagaaaaaa

SEQ ID NO: 346448 - RNA, 32 nt, Homo Sapiens
ccaaggcugcccggcggccgggaucgccaccu

SEQ ID NO: 346449 - RNA, 32 nt, Homo Sapiens
ucgggagccuacaguccaccccugcccugggc

SEQ ID NO: 346450 - RNA, 32 nt, Homo Sapiens
uguaccuggugauuguaaaaauauuagacaga

SEQ ID NO: 346451 - RNA, 32 nt, Homo Sapiens
uuaguggugguagaaaugauucaccaggucca

SEQ ID NO: 346452 - RNA, 32 nt, Homo Sapiens
auguuuuguacuuugauuauuuuuauuucuua

SEQ ID NO: 346453 - RNA, 32 nt, Homo Sapiens
agaugggcuugagggggcucagagcauaaggc

SEQ ID NO: 346454 - RNA, 32 nt, Homo Sapiens
ccgaggcucgccccaaacggauuugcgugaaa

SEQ ID NO: 346455 - RNA, 31 nt, Homo Sapiens
cgcccggcagccuccgcaggaaccaggcacc

SEQ ID NO: 346456 - RNA, 32 nt, Homo Sapiens
ugcaccuugacaaugguacuaacuuguuauuc

SEQ ID NO: 346457 - RNA, 32 nt, Homo Sapiens
ugucuuuguucuauguuguaacuaaucaugua

SEQ ID NO: 346458 - RNA, 32 nt, Homo Sapiens
guuaagcaguuuguuaguuacauauucccucg

SEQ ID NO: 346459 - RNA, 32 nt, Homo Sapiens
cuggccguguggaacucucaucccaagaccua

SEQ ID NO: 346460 - RNA, 32 nt, Homo Sapiens
cacauaaaaaauacgguaaggauacuuuacau

SEQ ID NO: 346461 - RNA, 32 nt, Homo Sapiens
cuggcaucuuccuguucuaccuccucauucag

SEQ ID NO: 346462 - RNA, 32 nt, Homo Sapiens
gucccacaaccuggucaaaaacuccaagaaga

SEQ ID NO: 346463 - RNA, 32 nt, Homo Sapiens
agcccagauugugccacugcauucuagccugg

SEQ ID NO: 346464 - RNA, 29 nt, Homo Sapiens
ucaugaaaagguuuauauucacuauucuu

SEQ ID NO: 346465 - RNA, 32 nt, Homo Sapiens
ccuguacuucauagcuggagaauggggaaaga

SEQ ID NO: 346466 - RNA, 32 nt, Homo Sapiens
uaauacuuggcgcuugaaaaugcaguagugaa

SEQ ID NO: 346467 - RNA, 32 nt, Homo Sapiens
ucuuuggaaggggaugguggccuugcauccaa

SEQ ID NO: 346468 - RNA, 32 nt, Homo Sapiens
agaugcuugggaccagaaguguuuuggauuuc

SEQ ID NO: 346469 - RNA, 32 nt, Homo Sapiens
ccaggcugggagcuugccaggaacccaguggc

SEQ ID NO: 346470 - RNA, 32 nt, Homo Sapiens
uacaauaaucucuauuugagaaguucucagaa

SEQ ID NO: 346471 - RNA, 32 nt, Homo Sapiens
gcccuugccccggcccggacucccugucccac

SEQ ID NO: 346472 - RNA, 32 nt, Homo Sapiens
uucaccugugucagcaccaucuucaggugcuu

SEQ ID NO: 346473 - RNA, 32 nt, Homo Sapiens
ccccaagagguucucgcaaccuugugucccgc

SEQ ID NO: 346474 - RNA, 32 nt, Homo Sapiens
aaauuugcauuucuaacacauucucagcugau

SEQ ID NO: 346475 - RNA, 32 nt, Homo Sapiens
gacuuccagcagccugaguuucuguggaacaa

SEQ ID NO: 346476 - RNA, 32 nt, Homo Sapiens
uauaguaaaaauacccuuuacuucugacauuu

SEQ ID NO: 346477 - RNA, 32 nt, Homo Sapiens
agaacacaggucacuuuucaaaacacuugcau

SEQ ID NO: 346478 - RNA, 32 nt, Homo Sapiens
auccaucaaaaauaaaguaugcaaauguaucu

SEQ ID NO: 346479 - RNA, 32 nt, Homo Sapiens
guuuucuuauucuccuuaaauuaagaguuauu

SEQ ID NO: 346480 - RNA, 32 nt, Homo Sapiens
gagcaggcuuguggcagccugauucggggcug

SEQ ID NO: 346481 - RNA, 31 nt, Homo Sapiens
cugcccgcugcccgccugcccggccgcuagc

SEQ ID NO: 346482 - RNA, 32 nt, Homo Sapiens
ccugugaagacauaagaaaaucuuaguaacua

SEQ ID NO: 346483 - RNA, 32 nt, Homo Sapiens
gucccaccccagaauuggggucgccccucccc

SEQ ID NO: 346484 - RNA, 32 nt, Homo Sapiens
cuaggccccauucaagccuccuccuccaggaa

SEQ ID NO: 346485 - RNA, 32 nt, Homo Sapiens
cauuaccauaauacauuuuucaucucauggcu

SEQ ID NO: 346486 - RNA, 32 nt, Homo Sapiens
uuuucucuucaggacaacacugcacaauggca

SEQ ID NO: 346487 - RNA, 32 nt, Homo Sapiens
cugcccagccaucugcugguggcaccucuccc

SEQ ID NO: 346488 - RNA, 30 nt, Homo Sapiens
uccuuucugcaucugggggaaggaaaaaaa

SEQ ID NO: 346489 - RNA, 32 nt, Homo Sapiens
auaaugagaaaggccagaggcugcaaagacag

SEQ ID NO: 346490 - RNA, 30 nt, Homo Sapiens
cgcgugacaagaacgccggguuuaaugagg

SEQ ID NO: 346491 - RNA, 32 nt, Homo Sapiens
caugccccauuccacagccccagccccagccc

SEQ ID NO: 346492 - RNA, 32 nt, Homo Sapiens
uuuuauauagaguaucucugcugcuuuuguuu

SEQ ID NO: 346493 - RNA, 32 nt, Homo Sapiens
gcagcgacaaucaguggauggugcugucuaug

SEQ ID NO: 346494 - RNA, 32 nt, Homo Sapiens
ccggcccugccuguagauacgccccgcugucu

SEQ ID NO: 346495 - RNA, 32 nt, Homo Sapiens
agguuggaaagagaagagaggcugggagcgga

SEQ ID NO: 346496 - RNA, 32 nt, Homo Sapiens
ccagucaucuacaacaaaucugccugguucuc

SEQ ID NO: 346497 - RNA, 32 nt, Homo Sapiens
gcugcuggcaggagcuguuuggaccaacgcgc

SEQ ID NO: 346498 - RNA, 32 nt, Homo Sapiens
ggagguuuguggaacccaguccccugcagaau

SEQ ID NO: 346499 - RNA, 32 nt, Homo Sapiens
aaagcuguuuauuauuauaucauuccugauaa

SEQ ID NO: 346500 - RNA, 32 nt, Homo Sapiens
aucugcaguaagauuauauacguguagcuggc

SEQ ID NO: 346501 - RNA, 32 nt, Homo Sapiens
aucuaaauaauuucucugauauuucucuauau

SEQ ID NO: 346502 - RNA, 32 nt, Homo Sapiens
cuagcaguuguguuuaagcaaacucugcaggu

SEQ ID NO: 346503 - RNA, 32 nt, Homo Sapiens
cagcccugcacccucagcuccaaauacacauu

SEQ ID NO: 346504 - RNA, 32 nt, Homo Sapiens
ggggccggcagagcgcgcggcgucggugcccu

SEQ ID NO: 346505 - RNA, 32 nt, Homo Sapiens
ggguucauugaaaacuuagucuguggagaaca

SEQ ID NO: 346506 - RNA, 32 nt, Homo Sapiens
agucccagggcuuagccggaggaagcacauuu

SEQ ID NO: 346507 - RNA, 32 nt, Homo Sapiens
uaauguguuucaugaauagaauauccaauaga

SEQ ID NO: 346508 - RNA, 32 nt, Homo Sapiens
cagcccagccccagcuucucugcccacucauu

SEQ ID NO: 346509 - RNA, 32 nt, Homo Sapiens
cugagcuugguguggcuugguguggcagaagg

SEQ ID NO: 346510 - RNA, 32 nt, Homo Sapiens
guuggggcaacgcaccagcuccucgaagacgc

SEQ ID NO: 346511 - RNA, 32 nt, Homo Sapiens
gagauggaaugggacaaccgcaguuuuacuac

SEQ ID NO: 346512 - RNA, 32 nt, Homo Sapiens
aucacuuccagaagguggcuggcaaaucucuc

SEQ ID NO: 346513 - RNA, 32 nt, Homo Sapiens
gggcagcccuggccagcucccuguggccuugg

SEQ ID NO: 346514 - RNA, 32 nt, Homo Sapiens
gcugaggcggguggaucaugaggucaagagau

SEQ ID NO: 346515 - RNA, 32 nt, Homo Sapiens
aaacaugaauuccucccuguauguuuuguucu

SEQ ID NO: 346516 - RNA, 32 nt, Homo Sapiens
gaccucgcaugcgcgccgcgucgccucugggg

SEQ ID NO: 346517 - RNA, 32 nt, Homo Sapiens
gcuuggcccauccacuggcaccuaccacggag

SEQ ID NO: 346518 - RNA, 32 nt, Homo Sapiens
uguaugaucagaugaaguaugaguucuuuugg

SEQ ID NO: 346519 - RNA, 32 nt, Homo Sapiens
cucuuccuuuaccccuucuccuccagcagugg

SEQ ID NO: 346520 - RNA, 32 nt, Homo Sapiens
gggaagaaagagaaacuagugcugguuuuaag

SEQ ID NO: 346521 - RNA, 31 nt, Homo Sapiens
gugggggaagcuuggcagguauauuauauuu

SEQ ID NO: 346522 - RNA, 32 nt, Homo Sapiens
uucauaaagcaagacaacauuaugacacuuua

SEQ ID NO: 346523 - RNA, 32 nt, Homo Sapiens
cgauacucaauguagucagucuacaccuggac

SEQ ID NO: 346524 - RNA, 32 nt, Homo Sapiens
uucucaaccuuaaauuucagacagucuugggc

SEQ ID NO: 346525 - RNA, 32 nt, Homo Sapiens
cugggaacagagcaacagucuuucugggucua

SEQ ID NO: 346526 - RNA, 32 nt, Homo Sapiens
cgugcgcggguuucugcagaucuagggcgagc

SEQ ID NO: 346527 - RNA, 32 nt, Homo Sapiens
cgccgcggacugcggcagcuuuaucgccagag

SEQ ID NO: 346528 - RNA, 32 nt, Homo Sapiens
uacagcugauauuauggaugacaacugcuaag

SEQ ID NO: 346529 - RNA, 32 nt, Homo Sapiens
guuuuguuucacuuuucuuaauuugcccccca

SEQ ID NO: 346530 - RNA, 32 nt, Homo Sapiens
gcaagcuagaaccagaaagaaaaacuaugaag

SEQ ID NO: 346531 - RNA, 32 nt, Homo Sapiens
gacccugagugcagccugacccgcccucgcgc

SEQ ID NO: 346532 - RNA, 32 nt, Homo Sapiens
cuucaagaaacgugcaccuugggcacucaaag

SEQ ID NO: 346533 - RNA, 32 nt, Homo Sapiens
ccuccccaggugccuuuggagagaacuguugc

SEQ ID NO: 346534 - RNA, 32 nt, Homo Sapiens
agaguagagaaauuauuugguuggcaaaaauu

SEQ ID NO: 346535 - RNA, 32 nt, Homo Sapiens
aagggaggcacuuuucacacucugucuuaaaa

SEQ ID NO: 346536 - RNA, 32 nt, Homo Sapiens
aagguguggaaauaaaccuacugauuuguaua

SEQ ID NO: 346537 - RNA, 32 nt, Homo Sapiens
aaauacugcuucucccaccccaucccuaaggg

SEQ ID NO: 346538 - RNA, 32 nt, Homo Sapiens
gauaugggaaauacuaauaacaacaauguaau

SEQ ID NO: 346539 - RNA, 32 nt, Homo Sapiens
cggcuacucuccggcccgggguacuggcauuu

SEQ ID NO: 346540 - RNA, 32 nt, Homo Sapiens
uccgggucgccgcuccgccgggacgcguuggc

SEQ ID NO: 346541 - RNA, 32 nt, Homo Sapiens
aaucgcuggguugcaggguggccugugaccug

SEQ ID NO: 346542 - RNA, 32 nt, Homo Sapiens
gcuggacuaugaaucauauaaguuuaacugau

SEQ ID NO: 346543 - RNA, 28 nt, Homo Sapiens
gaaauggcggccuccauguucuacggca

SEQ ID NO: 346544 - RNA, 32 nt, Homo Sapiens
gguuucaccauaucggccaggcuggucuugaa

SEQ ID NO: 346545 - RNA, 32 nt, Homo Sapiens
ccagagggcgaccugggcuauggcggccgugg

SEQ ID NO: 346546 - RNA, 32 nt, Homo Sapiens
aucaucucuauccaugagucaccccagccucu

SEQ ID NO: 346547 - RNA, 32 nt, Homo Sapiens
gcgugccaggcggcaacaccagaaucuuccag

SEQ ID NO: 346548 - RNA, 32 nt, Homo Sapiens
ucuucccuuucccccaaauuccuagggcaaaa

SEQ ID NO: 346549 - RNA, 32 nt, Homo Sapiens
agaaggaacgagccaucuuccuggcugcucag

SEQ ID NO: 346550 - RNA, 32 nt, Homo Sapiens
uuuacaauacagccuguaaauuccuuaugaca

SEQ ID NO: 346551 - RNA, 32 nt, Homo Sapiens
aaaaucuguauucuagucugaaccaugggaag

SEQ ID NO: 346552 - RNA, 32 nt, Homo Sapiens
uucaguauaauggcaucacugccuguuuuuca

SEQ ID NO: 346553 - RNA, 32 nt, Homo Sapiens
ugacaggagaggagagggcggcggcggcggug

SEQ ID NO: 346554 - RNA, 32 nt, Homo Sapiens
cagaagacccggguuaauaaaaauaggaaggu

SEQ ID NO: 346555 - RNA, 32 nt, Homo Sapiens
uuugggcuggaacagauucacacugucugguu

SEQ ID NO: 346556 - RNA, 32 nt, Homo Sapiens
aggagggauuaaaagagucaggaagaagacag

SEQ ID NO: 346557 - RNA, 32 nt, Homo Sapiens
aaauugcugagauguuuaguagcugauaaaga

SEQ ID NO: 346558 - RNA, 32 nt, Homo Sapiens
caaguuucugguuuuucucugcucucauuuaa

SEQ ID NO: 346559 - RNA, 32 nt, Homo Sapiens
caucuuccugagcaugcugaggaucugggcau

SEQ ID NO: 346560 - RNA, 32 nt, Homo Sapiens
aaauagauauauauuuacaacagucaucuuca

SEQ ID NO: 346561 - RNA, 32 nt, Homo Sapiens
ggaagcuccucgggagcauguguuuugauuaa

SEQ ID NO: 346562 - RNA, 32 nt, Homo Sapiens
uuaaguucuuugauuuguaccauuccugcaaa

SEQ ID NO: 346563 - RNA, 32 nt, Homo Sapiens
ccauuugcacgcccggccgggaggcagagacg

SEQ ID NO: 346564 - RNA, 32 nt, Homo Sapiens
guuggagcugggugcaguggcuugugccugua

SEQ ID NO: 346565 - RNA, 32 nt, Homo Sapiens
ccaucgggcugggcaccuccccgcggcgcccg

SEQ ID NO: 346566 - RNA, 32 nt, Homo Sapiens
aauaaauagaaagcaaaaagaucugggauaug

SEQ ID NO: 346567 - RNA, 32 nt, Homo Sapiens
aaacuuguacuuacacugaaauccaaaauagu

SEQ ID NO: 346568 - RNA, 30 nt, Homo Sapiens
uccggggaacaaagacggguauuguuggga

SEQ ID NO: 346569 - RNA, 32 nt, Homo Sapiens
ccccaggcuccagccgcgaggacucugugcac

SEQ ID NO: 346570 - RNA, 32 nt, Homo Sapiens
ggaggauuuuuuuuccacggacauucuuccuc

SEQ ID NO: 346571 - RNA, 32 nt, Homo Sapiens
uaacagagaguaagcacuuaaaaaauauuugu

SEQ ID NO: 346572 - RNA, 32 nt, Homo Sapiens
cccagaagccccacgacgauggcggcaauggc

SEQ ID NO: 346573 - RNA, 32 nt, Homo Sapiens
acaauuucuuuuuucuuuugguuuaauagggg

SEQ ID NO: 346574 - RNA, 32 nt, Homo Sapiens
ugcguuccagccccaguuccccggcagcggga

SEQ ID NO: 346575 - RNA, 32 nt, Homo Sapiens
gagguguagaaacuguuuuuuguuuuccuuuu

SEQ ID NO: 346576 - RNA, 32 nt, Homo Sapiens
ccacccaggcagagacccucggcccccucucc

SEQ ID NO: 346577 - RNA, 32 nt, Homo Sapiens
ccgcauuggagggcucgauuggcugcccggcu

SEQ ID NO: 346578 - RNA, 32 nt, Homo Sapiens
ugucaguccgccagccaaaaccagggaggaga

SEQ ID NO: 346579 - RNA, 32 nt, Homo Sapiens
cccugaguuuguuaaaauaccauacuguauuu

SEQ ID NO: 346580 - RNA, 32 nt, Homo Sapiens
ggggagaaacucccuccacugugaacaguaag

SEQ ID NO: 346581 - RNA, 32 nt, Homo Sapiens
uccccuauugaggauagucaggagcgucaaug

SEQ ID NO: 346582 - RNA, 32 nt, Homo Sapiens
ccagcucugcccgugucuuccgaagauaccaa

SEQ ID NO: 346583 - RNA, 32 nt, Homo Sapiens
uggugcugccgccgcugcagcaucuccuaggg

SEQ ID NO: 346584 - RNA, 32 nt, Homo Sapiens
cucauccggcccagcccccauccagccaaaga

SEQ ID NO: 346585 - RNA, 32 nt, Homo Sapiens
acaccccccgggccggccgcugucuguccccu

SEQ ID NO: 346586 - RNA, 32 nt, Homo Sapiens
gguuaggggcuuugcuguaaguuucuuuuucu

SEQ ID NO: 346587 - RNA, 31 nt, Homo Sapiens
gacuuucuccccucagcuugagacugcaugu

SEQ ID NO: 346588 - RNA, 32 nt, Homo Sapiens
uuaacuguuuuggggagggagggagugauagc

SEQ ID NO: 346589 - RNA, 31 nt, Homo Sapiens
aaaaugaaauaaaaaggaugcaaaucaacaa

SEQ ID NO: 346590 - RNA, 32 nt, Homo Sapiens
gcauuaaaaggcauauccuuuucccaacaaaa

SEQ ID NO: 346591 - RNA, 28 nt, Homo Sapiens
ugucuggggcggcugcugacccuguggc

SEQ ID NO: 346592 - RNA, 32 nt, Homo Sapiens
gcugcaaaaauauuuuacaaacuuuaccuuca

SEQ ID NO: 346593 - RNA, 32 nt, Homo Sapiens
gauauuuugugauuggcaagacauguauuuaa

SEQ ID NO: 346594 - RNA, 32 nt, Homo Sapiens
cugaagaggaagauggugggcaauaggaagga

SEQ ID NO: 346595 - RNA, 32 nt, Homo Sapiens
aaacauacaaagugauaaaauaaucgugccua

SEQ ID NO: 346596 - RNA, 32 nt, Homo Sapiens
auggugcccucuccaaagggucgggaggguag

SEQ ID NO: 346597 - RNA, 32 nt, Homo Sapiens
agaagcaggccuccaagaaguacgccauccug

SEQ ID NO: 346598 - RNA, 32 nt, Homo Sapiens
guguugaaguuaugaucgaugaacuacuuacu

SEQ ID NO: 346599 - RNA, 32 nt, Homo Sapiens
uggggggcugugugagucucgcaguggggcug

SEQ ID NO: 346600 - RNA, 32 nt, Homo Sapiens
uccugucagcccuccgcuccgccggcccuccu

SEQ ID NO: 346601 - RNA, 32 nt, Homo Sapiens
aacagugagagauuuuuaaauaaagccucuaa

SEQ ID NO: 346602 - RNA, 30 nt, Homo Sapiens
uacagguggcuguaggcagaagcccaccgg

SEQ ID NO: 346603 - RNA, 32 nt, Homo Sapiens
cuggaguggcagcuggggugauggccagggca

SEQ ID NO: 346604 - RNA, 32 nt, Homo Sapiens
cccuuccccucccccacuccucuaagacaaag

SEQ ID NO: 346605 - RNA, 32 nt, Homo Sapiens
aguggcccugaaccuggucuggugcccccgaa

SEQ ID NO: 346606 - RNA, 32 nt, Homo Sapiens
auauguaccucaaagauuuuuacaauucuguc

SEQ ID NO: 346607 - RNA, 32 nt, Homo Sapiens
cccugcucagccagcgccagcggccgcagcac

SEQ ID NO: 346608 - RNA, 32 nt, Homo Sapiens
ccuuggcuuccaugguaguauuaccaacuaag

SEQ ID NO: 346609 - RNA, 32 nt, Homo Sapiens
agugcucaggguggcgggcccuuugccagccc

SEQ ID NO: 346610 - RNA, 32 nt, Homo Sapiens
cuguguacaaaguuuuauuguaaauguuuuuu

SEQ ID NO: 346611 - RNA, 32 nt, Homo Sapiens
gaauccguacccuagggaucugucugucauuu

SEQ ID NO: 346612 - RNA, 32 nt, Homo Sapiens
accuccgccucccggauucaagccauucuccu

SEQ ID NO: 346613 - RNA, 32 nt, Homo Sapiens
gcaaacacccccuugguucgcacauguacagg

SEQ ID NO: 346614 - RNA, 32 nt, Homo Sapiens
ggccgccuaccuuugcuggucccacuucagag

SEQ ID NO: 346615 - RNA, 32 nt, Homo Sapiens
gcccagcaacuucccggcauccgcgcucuagc

SEQ ID NO: 346616 - RNA, 32 nt, Homo Sapiens
ucccuccccuccccuccagcccaccccugcac

SEQ ID NO: 346617 - RNA, 32 nt, Homo Sapiens
ccagaugccaaccagacaccuccuucuuccua

SEQ ID NO: 346618 - RNA, 32 nt, Homo Sapiens
uggcccugggggcuacaaugguugcugagaaa

SEQ ID NO: 346619 - RNA, 32 nt, Homo Sapiens
agcagagaauaaaagucgcaagaagaaacccc

SEQ ID NO: 346620 - RNA, 32 nt, Homo Sapiens
acugggugaucccccugaaggcccagccuauc

SEQ ID NO: 346621 - RNA, 32 nt, Homo Sapiens
gccgaggcggguggaucaugugaggccaggag

SEQ ID NO: 346622 - RNA, 32 nt, Homo Sapiens
agggacucuggcgucccggcaggcgagaggcg

SEQ ID NO: 346623 - RNA, 32 nt, Homo Sapiens
uugguuuuaaaaauauuaagcuuuuugcucau

SEQ ID NO: 346624 - RNA, 32 nt, Homo Sapiens
accccccuccuccucaccagacuuccagacga

SEQ ID NO: 346625 - RNA, 32 nt, Homo Sapiens
ggcugggggcuguaggcaccggacggaagcag

SEQ ID NO: 346626 - RNA, 32 nt, Homo Sapiens
uauggguaacuuaugguauaaaaguuaugaaa

SEQ ID NO: 346627 - RNA, 30 nt, Homo Sapiens
gggcgugagcccgugccgucaucuaccacc

SEQ ID NO: 346628 - RNA, 32 nt, Homo Sapiens
uauuucauuauaaaauguaaugcugaaggguu

SEQ ID NO: 346629 - RNA, 32 nt, Homo Sapiens
ccgaggaggcgaagguugcagugagccgagau

SEQ ID NO: 346630 - RNA, 32 nt, Homo Sapiens
gaaugcaacuguagguuuuaacaauguuuauu

SEQ ID NO: 346631 - RNA, 32 nt, Homo Sapiens
ugggggaagaguuuguuaccuaccuuacuauu

SEQ ID NO: 346632 - RNA, 32 nt, Homo Sapiens
aaacuccccuccccguuccccuuccccucucg

SEQ ID NO: 346633 - RNA, 32 nt, Homo Sapiens
guuagcucccugcacucuggcucuuuacuggc

SEQ ID NO: 346634 - RNA, 32 nt, Homo Sapiens
uguaacuuacuagcacugaaaauacauguuug

SEQ ID NO: 346635 - RNA, 32 nt, Homo Sapiens
agccccuccuguccaccucuccaggucucacu

SEQ ID NO: 346636 - RNA, 32 nt, Homo Sapiens
acacuggcccgccccagcucucagaggcccgc

SEQ ID NO: 346637 - RNA, 32 nt, Homo Sapiens
auaaauguuguaauaaauauuccuuugaucuu

SEQ ID NO: 346638 - RNA, 31 nt, Homo Sapiens
ccacaggaaaagaaaaucuuagugaucccuc

SEQ ID NO: 346639 - RNA, 32 nt, Homo Sapiens
guguuuguaaaauggauagcugggguuggcag

SEQ ID NO: 346640 - RNA, 32 nt, Homo Sapiens
aaucauguuagcuguuaaaaaauguauaauaa

SEQ ID NO: 346641 - RNA, 32 nt, Homo Sapiens
gaacagcuugaguugucucuuaagagucaucu

SEQ ID NO: 346642 - RNA, 32 nt, Homo Sapiens
ucuggcucuuaaauaacaaacaucaucaucca

SEQ ID NO: 346643 - RNA, 32 nt, Homo Sapiens
ccaagggauaaaacuguucauggaugcaacuc

SEQ ID NO: 346644 - RNA, 32 nt, Homo Sapiens
agcucagcacccccagccuggugcuuggcaga

SEQ ID NO: 346645 - RNA, 32 nt, Homo Sapiens
ucccguuauggacucugucuccaggagagggg

SEQ ID NO: 346646 - RNA, 30 nt, Homo Sapiens
uugacucaucuuauaugggaaaccauguag

SEQ ID NO: 346647 - RNA, 32 nt, Homo Sapiens
acauuccccucccccuggccaguuuuauauuu

SEQ ID NO: 346648 - RNA, 32 nt, Homo Sapiens
ggacaagcugaauuugaaauagacugugaagu

SEQ ID NO: 346649 - RNA, 32 nt, Homo Sapiens
cccgagucuaaaauaaaaauuuuuuaaaaaag

SEQ ID NO: 346650 - RNA, 32 nt, Homo Sapiens
cgcccugcccugcucagcccagcccacguugc

SEQ ID NO: 346651 - RNA, 32 nt, Homo Sapiens
acagacuucaugguacacaacuucaacagauu

SEQ ID NO: 346652 - RNA, 32 nt, Homo Sapiens
aucuacuuuaacaaaacaaaaaggagaaaaag

SEQ ID NO: 346653 - RNA, 32 nt, Homo Sapiens
ccucuaggaaauguacgauagguagaauugug

SEQ ID NO: 346654 - RNA, 32 nt, Homo Sapiens
ucaauuugaugaaagaaaaauuacuccuggga

SEQ ID NO: 346655 - RNA, 32 nt, Homo Sapiens
cugacagguaauuaaauguguauuuuguggac

SEQ ID NO: 346656 - RNA, 32 nt, Homo Sapiens
uggaaaugcauuugcguagcaccacccagggg

SEQ ID NO: 346657 - RNA, 32 nt, Homo Sapiens
uuugacuuugaaaaaauuccuuuggaaaaacg

SEQ ID NO: 346658 - RNA, 32 nt, Homo Sapiens
gcaggguuaagacucagcacagggccagcagc

SEQ ID NO: 346659 - RNA, 32 nt, Homo Sapiens
acuggugggcccugaccuccccgcggggaggg

SEQ ID NO: 346660 - RNA, 32 nt, Homo Sapiens
gguccugguuuugugucuuuugucaauaccug

SEQ ID NO: 346661 - RNA, 32 nt, Homo Sapiens
gagaagccauauaaauguaagaaaugugggaa

SEQ ID NO: 346662 - RNA, 32 nt, Homo Sapiens
uagccagguguagugacacaugcuuguagucc

SEQ ID NO: 346663 - RNA, 32 nt, Homo Sapiens
gacgcugcuggccagguguucuccuggggcgg

SEQ ID NO: 346664 - RNA, 32 nt, Homo Sapiens
gagaaugucuguuuccucuccuuguuaaccau

SEQ ID NO: 346665 - RNA, 32 nt, Homo Sapiens
cacuguacuccagccugggugacagagugaga

SEQ ID NO: 346666 - RNA, 32 nt, Homo Sapiens
gaguaggggacccuugaacaccaagagcaacc

SEQ ID NO: 346667 - RNA, 32 nt, Homo Sapiens
cacugcacuccagucugggugacagagugaga

SEQ ID NO: 346668 - RNA, 32 nt, Homo Sapiens
uuuuuuuuaaaaaaguuuuuauaauuaaaggu

SEQ ID NO: 346669 - RNA, 32 nt, Homo Sapiens
ugguguguucagagaugacacaugacaacaaa

SEQ ID NO: 346670 - RNA, 32 nt, Homo Sapiens
ucauuagccccggccugguuaaagccccucag

SEQ ID NO: 346671 - RNA, 32 nt, Homo Sapiens
ccagguugcugaacacauccacgggccaggag

SEQ ID NO: 346672 - RNA, 27 nt, Homo Sapiens
ccaagcaccuucuucaacucucccaaa

SEQ ID NO: 346673 - RNA, 32 nt, Homo Sapiens
gucggguguguucugcucuccauccuccgucg

SEQ ID NO: 346674 - RNA, 32 nt, Homo Sapiens
ucacggcagggagggggcgcgggagccgccgg

SEQ ID NO: 346675 - RNA, 32 nt, Homo Sapiens
guuuggggggcugaggaggguggaucacuuaa

SEQ ID NO: 346676 - RNA, 32 nt, Homo Sapiens
aagcugugacuaacucuuuuuaucucucaaua

SEQ ID NO: 346677 - RNA, 32 nt, Homo Sapiens
uaaucuauguauauacauuuaugaauuaaagu

SEQ ID NO: 346678 - RNA, 32 nt, Homo Sapiens
agauuuacuuggaucugugcaagcaaaaguuc

SEQ ID NO: 346679 - RNA, 32 nt, Homo Sapiens
uccuuuguuucauacggaacuccagauccuga

SEQ ID NO: 346680 - RNA, 32 nt, Homo Sapiens
aguggcucucugcggcccuguguuccugcuac

SEQ ID NO: 346681 - RNA, 32 nt, Homo Sapiens
aaacaaagcaaaugcaaacaucucugcuucug

SEQ ID NO: 346682 - RNA, 32 nt, Homo Sapiens
cuguuauuucuuaaauguuauaggauguagcu

SEQ ID NO: 346683 - RNA, 32 nt, Homo Sapiens
ccuccagcccagacacacuccuccucuugggc

SEQ ID NO: 346684 - RNA, 32 nt, Homo Sapiens
aaucgccuugugccgccgcagcgccagcuccg

SEQ ID NO: 346685 - RNA, 32 nt, Homo Sapiens
uggaggcugcgcacagcuucucccggucaugg

SEQ ID NO: 346686 - RNA, 32 nt, Homo Sapiens
ucccucaaggaccacccccuacucagacaaaa

SEQ ID NO: 346687 - RNA, 32 nt, Homo Sapiens
aauguuuguuauauuucuuuucuuuuuucuuu

SEQ ID NO: 346688 - RNA, 32 nt, Homo Sapiens
agggguggggaauacuggaaauaaucagggca

SEQ ID NO: 346689 - RNA, 32 nt, Homo Sapiens
ucuccuuuguccaagcucaaggccugugauga

SEQ ID NO: 346690 - RNA, 32 nt, Homo Sapiens
ccacacccuggggccacccaucagaccuucug

SEQ ID NO: 346691 - RNA, 32 nt, Homo Sapiens
ucaaggcuuguacaucugaaguuugcucuuca

SEQ ID NO: 346692 - RNA, 32 nt, Homo Sapiens
ggaggaccggaccccgagcggcugggagcgca

SEQ ID NO: 346693 - RNA, 32 nt, Homo Sapiens
gagggacggccgcgaugcgcucggccugaggu

SEQ ID NO: 346694 - RNA, 32 nt, Homo Sapiens
ugccuguaaucccagcacuuugggaggaggcc

SEQ ID NO: 346695 - RNA, 32 nt, Homo Sapiens
uacacccacccacagcagcacuggcucgcuac

SEQ ID NO: 346696 - RNA, 32 nt, Homo Sapiens
gcauuucugucauuuacuucugcuaugauaca

SEQ ID NO: 346697 - RNA, 32 nt, Homo Sapiens
uuaguuugucuaaaguaaaaauccacauaaau

SEQ ID NO: 346698 - RNA, 32 nt, Homo Sapiens
ucagcugcccacagcccucuugccugaccccu

SEQ ID NO: 346699 - RNA, 32 nt, Homo Sapiens
agaucaaaucaucaaguccuauaugucaccca

SEQ ID NO: 346700 - RNA, 32 nt, Homo Sapiens
aguccuuuuuucuguuccuacuguggaaguag

SEQ ID NO: 346701 - RNA, 32 nt, Homo Sapiens
caaguaugaccacuuuuaauacacuuuuuuga

SEQ ID NO: 346702 - RNA, 32 nt, Homo Sapiens
auuuuguuauauauauuacagaugaaaucuca

SEQ ID NO: 346703 - RNA, 32 nt, Homo Sapiens
ugagaucaccuguuuggcagguccuggacugg

SEQ ID NO: 346704 - RNA, 32 nt, Homo Sapiens
ucaggccucuucgcucuugacuugaccagaaa

SEQ ID NO: 346705 - RNA, 32 nt, Homo Sapiens
cagaggcaacaucaaaaaccagcaaauuuuaa

SEQ ID NO: 346706 - RNA, 32 nt, Homo Sapiens
gccauugcucuccagccugggcgacaagagcg

SEQ ID NO: 346707 - RNA, 32 nt, Homo Sapiens
cugcaccaacugggaaggagcuggagaagcuc

SEQ ID NO: 346708 - RNA, 32 nt, Homo Sapiens
acuaucucauuuccaagcaaguauuagaauac

SEQ ID NO: 346709 - RNA, 32 nt, Homo Sapiens
accuuugugugucuuuccugaagacuaucuuc

SEQ ID NO: 346710 - RNA, 32 nt, Homo Sapiens
gcagcguuuccccccaucccuguugccugugu

SEQ ID NO: 346711 - RNA, 32 nt, Homo Sapiens
gcaacccuguuucuuuggugccugcaguuuag

SEQ ID NO: 346712 - RNA, 32 nt, Homo Sapiens
uuccuuguggacuucacauggucaugcaggaa

SEQ ID NO: 346713 - RNA, 32 nt, Homo Sapiens
agacagccugggagggagaaggaguuggagcu

SEQ ID NO: 346714 - RNA, 32 nt, Homo Sapiens
agugucuugccuugcuuucucuucuuacuguc

SEQ ID NO: 346715 - RNA, 32 nt, Homo Sapiens
cuggggucaggaguucgagaccagccugacca

SEQ ID NO: 346716 - RNA, 32 nt, Homo Sapiens
uugaagauuuuuauaccacuugaaagaggcgc

SEQ ID NO: 346717 - RNA, 32 nt, Homo Sapiens
uagaggugaacacaauuauuuuaaggcaguua

SEQ ID NO: 346718 - RNA, 32 nt, Homo Sapiens
auagacaaaaaauuaugggauguaacuaaugc

SEQ ID NO: 346719 - RNA, 32 nt, Homo Sapiens
ccuuuaacccucaguaucaagcacaaaaauug

SEQ ID NO: 346720 - RNA, 32 nt, Homo Sapiens
aguucaugugcagugaugugggaaauuauuuu

SEQ ID NO: 346721 - RNA, 32 nt, Homo Sapiens
guggauuuuuugucaccuaaggaaaugcauuu

SEQ ID NO: 346722 - RNA, 32 nt, Homo Sapiens
auaacggguuggccccuggugcaucccuggaa

SEQ ID NO: 346723 - RNA, 32 nt, Homo Sapiens
ggaagaucuucagcaucuuuugcugcuaccuu

SEQ ID NO: 346724 - RNA, 32 nt, Homo Sapiens
uggacucaugucccugcaauuaaacuuacuuc

SEQ ID NO: 346725 - RNA, 32 nt, Homo Sapiens
uaaucuuauuuuuuaggcuucuauacaguuaa

SEQ ID NO: 346726 - RNA, 32 nt, Homo Sapiens
cuguacucgggccuagaaauuauuuaaaaugg

SEQ ID NO: 346727 - RNA, 32 nt, Homo Sapiens
ugccuuuuacacacaggcaaauguaaguauuu

SEQ ID NO: 346728 - RNA, 32 nt, Homo Sapiens
cccacagacaccuguaccuccucccccuucau

SEQ ID NO: 346729 - RNA, 32 nt, Homo Sapiens
uacaauaucuguguaaaacgauuuccuguaga

SEQ ID NO: 346730 - RNA, 32 nt, Homo Sapiens
uguggggaugaacuuuuuguuuuguuucuucc

SEQ ID NO: 346731 - RNA, 32 nt, Homo Sapiens
cccuuuugauuuguuuuaaccuuuaacuuuuc

SEQ ID NO: 346732 - RNA, 32 nt, Homo Sapiens
ucuccagaccccagccuuucuccucaggccua

SEQ ID NO: 346733 - RNA, 32 nt, Homo Sapiens
ggagaguagggaggagggguucuggguccauc

SEQ ID NO: 346734 - RNA, 32 nt, Homo Sapiens
aaucccgccgcccuccugucagcccuccgcuc

SEQ ID NO: 346735 - RNA, 32 nt, Homo Sapiens
uggacacuccgucaccuuuuggaacacaagua

SEQ ID NO: 346736 - RNA, 32 nt, Homo Sapiens
caaagggacucccccucugcccccuguccgaa

SEQ ID NO: 346737 - RNA, 32 nt, Homo Sapiens
aaaguagcccugaacuucaucaucuucuacuu

SEQ ID NO: 346738 - RNA, 32 nt, Homo Sapiens
gacuggcggggguggacgcccgggccgggcug

SEQ ID NO: 346739 - RNA, 32 nt, Homo Sapiens
ucuguugcacaaaauuacaaccgcucucugcu

SEQ ID NO: 346740 - RNA, 32 nt, Homo Sapiens
uccaggcagucacuucuguuucuuaaacauag

SEQ ID NO: 346741 - RNA, 32 nt, Homo Sapiens
gggccaacaaaguggagagguggacacauuuu

SEQ ID NO: 346742 - RNA, 32 nt, Homo Sapiens
uagcacuugcaaaaauacagucuugguaccua

SEQ ID NO: 346743 - RNA, 32 nt, Homo Sapiens
uccuuucuauagacucaacaugcgguugcccg

SEQ ID NO: 346744 - RNA, 32 nt, Homo Sapiens
auuuugggacucucaugaugcugaggucaaga

SEQ ID NO: 346745 - RNA, 31 nt, Homo Sapiens
uuucuuaguacauuguaauagauucaaacca

SEQ ID NO: 346746 - RNA, 32 nt, Homo Sapiens
uugcucuguauuaaaacaaauccaccaaacaa

SEQ ID NO: 346747 - RNA, 32 nt, Homo Sapiens
acuuuugaaaaacuuuuuauacucuaaaguga

SEQ ID NO: 346748 - RNA, 32 nt, Homo Sapiens
ugugucaaccaccauuucagcuauuaaaaacu

SEQ ID NO: 346749 - RNA, 32 nt, Homo Sapiens
auguauguuaccauuaauuucuauuugaccuc

SEQ ID NO: 346750 - RNA, 30 nt, Homo Sapiens
ccucuggccguucagagcaccuuguggugu

SEQ ID NO: 346751 - RNA, 32 nt, Homo Sapiens
guacugcaaccucagcuggcaucauggaccau

SEQ ID NO: 346752 - RNA, 32 nt, Homo Sapiens
uguggcaaagucuuuaguguauuuucaguccu

SEQ ID NO: 346753 - RNA, 32 nt, Homo Sapiens
ggugugaaaaacaguuugugaaggucagagau

SEQ ID NO: 346754 - RNA, 32 nt, Homo Sapiens
ccaagcacccucgagugccaucccugccaaac

SEQ ID NO: 346755 - RNA, 32 nt, Homo Sapiens
gugccucugcucgugggucccuggacacggcc

SEQ ID NO: 346756 - RNA, 32 nt, Homo Sapiens
cccccgcucuggcuaccaggcucucccggcug

SEQ ID NO: 346757 - RNA, 32 nt, Homo Sapiens
cagaaagaccaucauuggguagggcaaacuga

SEQ ID NO: 346758 - RNA, 32 nt, Homo Sapiens
auauggaaaaggaagaaagccacaggacugcc

SEQ ID NO: 346759 - RNA, 32 nt, Homo Sapiens
ucucaaccaaaggagauggggaucugguuuag

SEQ ID NO: 346760 - RNA, 32 nt, Homo Sapiens
uccuaguauauugucccauuaagcaaaaagca

SEQ ID NO: 346761 - RNA, 32 nt, Homo Sapiens
ccggacgcacugccuccccgccggcgugaagc

SEQ ID NO: 346762 - RNA, 32 nt, Homo Sapiens
ugugagccaaaggauccuuccuuauuccuaag

SEQ ID NO: 346763 - RNA, 32 nt, Homo Sapiens
uuccuucgccugcuuuuucucaggcugcccug

SEQ ID NO: 346764 - RNA, 32 nt, Homo Sapiens
ugcugaagcuccugggguguggggugugggcu

SEQ ID NO: 346765 - RNA, 32 nt, Homo Sapiens
aguucaugaggucagagggagcuagccuggca

SEQ ID NO: 346766 - RNA, 32 nt, Homo Sapiens
caaacucuuuugccagugaccucaauuuuguu

SEQ ID NO: 346767 - RNA, 32 nt, Homo Sapiens
ccacauggguuguuucuguuucuuuggcuuuu

SEQ ID NO: 346768 - RNA, 32 nt, Homo Sapiens
cauugagccaaauauguagaggaccuaccaag

SEQ ID NO: 346769 - RNA, 32 nt, Homo Sapiens
cagagugaggagggcccagagcagaauucugg

SEQ ID NO: 346770 - RNA, 32 nt, Homo Sapiens
caucacaccaacucugacacauggauguaccu

SEQ ID NO: 346771 - RNA, 32 nt, Homo Sapiens
cuggugcccuuaaccuccaaagcaggcaacau

SEQ ID NO: 346772 - RNA, 32 nt, Homo Sapiens
agcaggcugggggcggcugcuguuggucuguu

SEQ ID NO: 346773 - RNA, 32 nt, Homo Sapiens
uuuuuuauuuuuuauagagacgauguauuagu

SEQ ID NO: 346774 - RNA, 32 nt, Homo Sapiens
uucuucuccgcggggugauucaguccagugau

SEQ ID NO: 346775 - RNA, 32 nt, Homo Sapiens
cagcuagggcuugucauuuguguauuuagugu

SEQ ID NO: 346776 - RNA, 32 nt, Homo Sapiens
cuauagguaaacaggaaaauugguugugcaaa

SEQ ID NO: 346777 - RNA, 31 nt, Homo Sapiens
auuacugcuaaaaauagagugcuguuacacu

SEQ ID NO: 346778 - RNA, 32 nt, Homo Sapiens
auauugguaaagaaagaacauaaauguaaguu

SEQ ID NO: 346779 - RNA, 32 nt, Homo Sapiens
ugcagcaagauugaggauaagauggaaggcag

SEQ ID NO: 346780 - RNA, 32 nt, Homo Sapiens
cacgccugccccccagcgcccugcaagucuuc

SEQ ID NO: 346781 - RNA, 32 nt, Homo Sapiens
uggcacccacaggcuuccaggacggaucauag

SEQ ID NO: 346782 - RNA, 32 nt, Homo Sapiens
ccucucagcguaggaagcuggcugcuuaauga

SEQ ID NO: 346783 - RNA, 32 nt, Homo Sapiens
aguaccuccagccccagggcccugaccugcgc

SEQ ID NO: 346784 - RNA, 32 nt, Homo Sapiens
cugcugccgccuuucuauggcugugcgucuca

SEQ ID NO: 346785 - RNA, 26 nt, Homo Sapiens
cauggguuucggagaccugaaaagcc

SEQ ID NO: 346786 - RNA, 32 nt, Homo Sapiens
uacagaaccuugauguuguccgggccacuccu

SEQ ID NO: 346787 - RNA, 32 nt, Homo Sapiens
gccuuuuggccauagucacugucauggcuaag

SEQ ID NO: 346788 - RNA, 32 nt, Homo Sapiens
ccuugugcguggguaagccgcugcuggguuuu

SEQ ID NO: 346789 - RNA, 30 nt, Homo Sapiens
aggggaaauaucccacucaagaucauauaa

SEQ ID NO: 346790 - RNA, 32 nt, Homo Sapiens
guguagacaugggaaacugaccuaucaguguu

SEQ ID NO: 346791 - RNA, 32 nt, Homo Sapiens
gcuagucugagguaguuacuucauuggaggua

SEQ ID NO: 346792 - RNA, 31 nt, Homo Sapiens
cauauuuuuuguaauuaagauuuuccuuuuu

SEQ ID NO: 346793 - RNA, 32 nt, Homo Sapiens
ucugggcugggcgccggacaagaggagggggc

SEQ ID NO: 346794 - RNA, 32 nt, Homo Sapiens
uugaggugggguggagguggggagcaagaauu

SEQ ID NO: 346795 - RNA, 32 nt, Homo Sapiens
acgagcuaaaauuuaccaacccauuuaucagg

SEQ ID NO: 346796 - RNA, 32 nt, Homo Sapiens
guuuaggagucuuuucacauuuuuuggggaua

SEQ ID NO: 346797 - RNA, 32 nt, Homo Sapiens
uaaagucaaaacaguuuuguggaacugugauu

SEQ ID NO: 346798 - RNA, 32 nt, Homo Sapiens
aacucccugaaaccucuuucuaugucccagcu

SEQ ID NO: 346799 - RNA, 32 nt, Homo Sapiens
agaacguuugggagugugcagcuccugggccc

SEQ ID NO: 346800 - RNA, 32 nt, Homo Sapiens
gaguucuuuacuagacaucugguuucuuacua

SEQ ID NO: 346801 - RNA, 32 nt, Homo Sapiens
acugcccggaggcacccggcccugggccuuag

SEQ ID NO: 346802 - RNA, 32 nt, Homo Sapiens
agugcuauaacucuccugcccaugauagugua

SEQ ID NO: 346803 - RNA, 32 nt, Homo Sapiens
guggccucuacccaccaguagacaagaugagu

SEQ ID NO: 346804 - RNA, 32 nt, Homo Sapiens
uucaugaggaaguuuuaaaagaccauguuccu

SEQ ID NO: 346805 - RNA, 32 nt, Homo Sapiens
cucgccugacuuccuaauuugcuacuuauccc

SEQ ID NO: 346806 - RNA, 32 nt, Homo Sapiens
cccgggccugacccggccccuaccagccacgg

SEQ ID NO: 346807 - RNA, 32 nt, Homo Sapiens
agcgggcgcuggguuccugcgucccgccaaag

SEQ ID NO: 346808 - RNA, 32 nt, Homo Sapiens
aagggagaaggaagggcagagaauggcugggu

SEQ ID NO: 346809 - RNA, 32 nt, Homo Sapiens
gauugagauguuuuucuaaaucuuagaacuau

SEQ ID NO: 346810 - RNA, 32 nt, Homo Sapiens
uuaugauguuaagagaaacacuaguguuuagu

SEQ ID NO: 346811 - RNA, 32 nt, Homo Sapiens
cagccgucuuucugcugguguugucuuucugc

SEQ ID NO: 346812 - RNA, 32 nt, Homo Sapiens
gacaggugaggggcuuccugaggaccuggggc

SEQ ID NO: 346813 - RNA, 32 nt, Homo Sapiens
ccucugcccgcggcgguggauggcaugauggu

SEQ ID NO: 346814 - RNA, 32 nt, Homo Sapiens
ggcugcugagaaaaauacacugugcagcucag

SEQ ID NO: 346815 - RNA, 32 nt, Homo Sapiens
gggcacaugccucccccacccgagggcagacc

SEQ ID NO: 346816 - RNA, 31 nt, Homo Sapiens
aaaguuugcuggagaaagcgucuacucacag

SEQ ID NO: 346817 - RNA, 32 nt, Homo Sapiens
uauacucccgguuucccugccccuccauugcc

SEQ ID NO: 346818 - RNA, 32 nt, Homo Sapiens
ugucgaguauauuauuauuaauauuauuauga

SEQ ID NO: 346819 - RNA, 32 nt, Homo Sapiens
gcccugggcccagugauguggggcucaagggg

SEQ ID NO: 346820 - RNA, 32 nt, Homo Sapiens
ugaggccacccugcugggccacuucccggauu

SEQ ID NO: 346821 - RNA, 32 nt, Homo Sapiens
ucugucugccagcauaugcagagccccaaggc

SEQ ID NO: 346822 - RNA, 29 nt, Homo Sapiens
ccgggguacaggaggaggacgccgcagag

SEQ ID NO: 346823 - RNA, 32 nt, Homo Sapiens
cacagagcucacgugcacuucccgcagcugcu

SEQ ID NO: 346824 - RNA, 32 nt, Homo Sapiens
ccccggcuccuccggaccuccucggcaggcgg

SEQ ID NO: 346825 - RNA, 32 nt, Homo Sapiens
uaaugaaaggauuaccgagcuucacugacgau

SEQ ID NO: 346826 - RNA, 32 nt, Homo Sapiens
gccccugcgagggugccuggaguucccacgug

SEQ ID NO: 346827 - RNA, 32 nt, Homo Sapiens
guguggugauguacaagauacuuuuaaaguuu

SEQ ID NO: 346828 - RNA, 32 nt, Homo Sapiens
uuuuuuuuaaaccagcaggauacaaguugcaa

SEQ ID NO: 346829 - RNA, 32 nt, Homo Sapiens
gcgggcgcaagggggcgggcgcugccguacuc

SEQ ID NO: 346830 - RNA, 32 nt, Homo Sapiens
ccggccccaagcacggaccuggcgagcgccgg

SEQ ID NO: 346831 - RNA, 32 nt, Homo Sapiens
cucuggcuagugggaaggagggggugaacuaa

SEQ ID NO: 346832 - RNA, 32 nt, Homo Sapiens
acagguagcuccgagggaggacuucuggcaug

SEQ ID NO: 346833 - RNA, 32 nt, Homo Sapiens
ugcacugucuuacugauuuacaaacugaaauc

SEQ ID NO: 346834 - RNA, 31 nt, Homo Sapiens
ggaaaugcaaagaaacauauauuuuauuaac

SEQ ID NO: 346835 - RNA, 32 nt, Homo Sapiens
gguucagagagauaaagcacuuuaguacauag

SEQ ID NO: 346836 - RNA, 32 nt, Homo Sapiens
agacaucucugcaucuuuguaccugcaagugc

SEQ ID NO: 346837 - RNA, 32 nt, Homo Sapiens
uccaccccauccccacagggccccgauaaccu

SEQ ID NO: 346838 - RNA, 32 nt, Homo Sapiens
uggcaggggacagaugugcugcuguucccagg

SEQ ID NO: 346839 - RNA, 32 nt, Homo Sapiens
cugcaagugccauccuuguacaguguuaagag

SEQ ID NO: 346840 - RNA, 32 nt, Homo Sapiens
aacccauaauuuucuucaaugaguuaauaaac

SEQ ID NO: 346841 - RNA, 32 nt, Homo Sapiens
ugggaggagggucggauucaaucugacuuaga

SEQ ID NO: 346842 - RNA, 32 nt, Homo Sapiens
auacagcucugugugauucaaguucuggcaga

SEQ ID NO: 346843 - RNA, 32 nt, Homo Sapiens
ugcacaguccggcugaggugcacgggagcccg

SEQ ID NO: 346844 - RNA, 32 nt, Homo Sapiens
cagccccaguuucuggaggcagauggguaacc

SEQ ID NO: 346845 - RNA, 32 nt, Homo Sapiens
ucuguuacaaauuuauaauuucaagacaaauu

SEQ ID NO: 346846 - RNA, 31 nt, Homo Sapiens
gccaccaugggcuucgagcuggaccgcuucg

SEQ ID NO: 346847 - RNA, 32 nt, Homo Sapiens
ccaccaagauaucugagcaaccaagaguccca

SEQ ID NO: 346848 - RNA, 32 nt, Homo Sapiens
uuuuuuuuguaauaaaaauuauagaaucugca

SEQ ID NO: 346849 - RNA, 32 nt, Homo Sapiens
aagcaaguagacgcccaggagccccgggaggg

SEQ ID NO: 346850 - RNA, 32 nt, Homo Sapiens
uugucagaccaucaaucucuuggggugauuaa

SEQ ID NO: 346851 - RNA, 32 nt, Homo Sapiens
uguugaaaagacugggaggcugcgugucuccc

SEQ ID NO: 346852 - RNA, 32 nt, Homo Sapiens
cgccguccugugcuagcagcccggggcgcugg

SEQ ID NO: 346853 - RNA, 32 nt, Homo Sapiens
accacugggacucuccuuccaucuguggccac

SEQ ID NO: 346854 - RNA, 32 nt, Homo Sapiens
ccucccccgcggcggcgcgaggucucucggcc

SEQ ID NO: 346855 - RNA, 32 nt, Homo Sapiens
guggagcugaggaaucugcauuauuaacaguu

SEQ ID NO: 346856 - RNA, 32 nt, Homo Sapiens
cucaaacaguuuuuuggaguugcaauaugaaa

SEQ ID NO: 346857 - RNA, 32 nt, Homo Sapiens
augauaggguucucacagcgucauccaugauc

SEQ ID NO: 346858 - RNA, 32 nt, Homo Sapiens
aauaaaaccuugcauagcacaaaaaaaaaaaa

SEQ ID NO: 346859 - RNA, 32 nt, Homo Sapiens
aagauuuuuccacaaauauuuauauguacuaa

SEQ ID NO: 346860 - RNA, 32 nt, Homo Sapiens
gcacgagggaggaacgcguggagcaugaaaag

SEQ ID NO: 346861 - RNA, 32 nt, Homo Sapiens
ccugcaugaagaugaaauuauagggaggacgc

SEQ ID NO: 346862 - RNA, 32 nt, Homo Sapiens
caaaccagcucgucucagaggccagcaagcug

SEQ ID NO: 346863 - RNA, 32 nt, Homo Sapiens
gacacucagguggucagugacucgccugugau

SEQ ID NO: 346864 - RNA, 32 nt, Homo Sapiens
aagaacacaaaaauaaaaugcaaauacagagc

SEQ ID NO: 346865 - RNA, 32 nt, Homo Sapiens
ccacuguauuccagcccgggugacagagcaag

SEQ ID NO: 346866 - RNA, 32 nt, Homo Sapiens
caacucuagaaaugcaaaauguuaacagguac

SEQ ID NO: 346867 - RNA, 32 nt, Homo Sapiens
aagucaggucauaaguuucauguuugcuuuug

SEQ ID NO: 346868 - RNA, 32 nt, Homo Sapiens
gaagcggggcuuugaugacccgcaaagggcga

SEQ ID NO: 346869 - RNA, 32 nt, Homo Sapiens
cuuugaaagaaucaaguaugugaauggaugga

SEQ ID NO: 346870 - RNA, 32 nt, Homo Sapiens
uuggugcccgucuuggggccucgccacacaug

SEQ ID NO: 346871 - RNA, 32 nt, Homo Sapiens
cagaacuguagacaccaaaauggaaagcaauc

SEQ ID NO: 346872 - RNA, 32 nt, Homo Sapiens
ggccuuggccgcgucacagcacccacauggcc

SEQ ID NO: 346873 - RNA, 32 nt, Homo Sapiens
gagaacagaagggugacgcugcccagacucac

SEQ ID NO: 346874 - RNA, 32 nt, Homo Sapiens
uuucauuaauacuuuuuuaauguuugagaagu

SEQ ID NO: 346875 - RNA, 32 nt, Homo Sapiens
gcucuccacaccuuucacagccccagcccuca

SEQ ID NO: 346876 - RNA, 32 nt, Homo Sapiens
gaggccaggaggagcaguaugugcacagccga

SEQ ID NO: 346877 - RNA, 32 nt, Homo Sapiens
ccgggacuugggcagcggcgccggcagcccag

SEQ ID NO: 346878 - RNA, 32 nt, Homo Sapiens
cacuucauguugucuguaaagguguucuaugg

SEQ ID NO: 346879 - RNA, 32 nt, Homo Sapiens
aaccccuaccgccagccuccccgccacccgcg

SEQ ID NO: 346880 - RNA, 32 nt, Homo Sapiens
ccugaccuucacucugugguuggggcggugag

SEQ ID NO: 346881 - RNA, 32 nt, Homo Sapiens
gccauuccuaaaaauuuuuagggacaaguuuu

SEQ ID NO: 346882 - RNA, 32 nt, Homo Sapiens
uuagauaaauuucaaucaggguuuuuagauua

SEQ ID NO: 346883 - RNA, 32 nt, Homo Sapiens
agcugccaagguggagagagggauuacagaaa

SEQ ID NO: 346884 - RNA, 32 nt, Homo Sapiens
acuuuaucauagaaacaaagucucagauauuu

SEQ ID NO: 346885 - RNA, 32 nt, Homo Sapiens
uaucuaaaguguguucaugaugacugaggaaa

SEQ ID NO: 346886 - RNA, 32 nt, Homo Sapiens
uuauaaaaucauaguauauguucuuuguagaa

SEQ ID NO: 346887 - RNA, 32 nt, Homo Sapiens
auauucuaacugagauauauugagauuaaugc

SEQ ID NO: 346888 - RNA, 32 nt, Homo Sapiens
cucauuccucaagagaaagagaaggaucccca

SEQ ID NO: 346889 - RNA, 32 nt, Homo Sapiens
cauuccaaacuuuucuguauuuucauucuaua

SEQ ID NO: 346890 - RNA, 32 nt, Homo Sapiens
ccagcuccagcauucagccuacagagaccaug

SEQ ID NO: 346891 - RNA, 32 nt, Homo Sapiens
ugauuuuuuuuauauuuuuuuauuuauuuauu

SEQ ID NO: 346892 - RNA, 32 nt, Homo Sapiens
cccagaagcaggaugagaagauggcaaacuuc

SEQ ID NO: 346893 - RNA, 32 nt, Homo Sapiens
gccuacagaccucauccccccauccccuggcu

SEQ ID NO: 346894 - RNA, 32 nt, Homo Sapiens
ugugaccuagacuauggauuuauuuaagggau

SEQ ID NO: 346895 - RNA, 32 nt, Homo Sapiens
uuuuucaguucaaauggucauuauuugcuuuu

SEQ ID NO: 346896 - RNA, 32 nt, Homo Sapiens
ucggcgcguggggggcggugcucgagcugagc

SEQ ID NO: 346897 - RNA, 32 nt, Homo Sapiens
aaaucuaacaaggugguuuguaauaaugcuga

SEQ ID NO: 346898 - RNA, 32 nt, Homo Sapiens
ggugggguagagaguagggggcgguagucggg

SEQ ID NO: 346899 - RNA, 32 nt, Homo Sapiens
cugcuacuagcuuuuuuuuuuaaaaaaaguaa

SEQ ID NO: 346900 - RNA, 32 nt, Homo Sapiens
gcuucucuguucauucuucauggcauccuugg

SEQ ID NO: 346901 - RNA, 32 nt, Homo Sapiens
gguuuggcuuguuuuucuugcaugguuuggag

SEQ ID NO: 346902 - RNA, 32 nt, Homo Sapiens
cugcccaccugagguccuggcuccccacccug

SEQ ID NO: 346903 - RNA, 32 nt, Homo Sapiens
guagccgccccucccaccccggcacgaugggg

SEQ ID NO: 346904 - RNA, 31 nt, Homo Sapiens
uggaugcagccccaguaagcuggcuuuaacu

SEQ ID NO: 346905 - RNA, 32 nt, Homo Sapiens
gccugcggccagcagcguccucgcaagccgag

SEQ ID NO: 346906 - RNA, 27 nt, Homo Sapiens
ccaugcaggaugaagauggauacauca

SEQ ID NO: 346907 - RNA, 32 nt, Homo Sapiens
ccugggucucagucagggaagaacgaacauuc

SEQ ID NO: 346908 - RNA, 32 nt, Homo Sapiens
ucaggauggaaauaccuggacuuuucuuugcu

SEQ ID NO: 346909 - RNA, 32 nt, Homo Sapiens
uucaacggaaacaaauacacucaagggaaguu

SEQ ID NO: 346910 - RNA, 32 nt, Homo Sapiens
ggagucgugcgcgcgggcggcgagggggcgcu

SEQ ID NO: 346911 - RNA, 30 nt, Homo Sapiens
gcccuugucugugaccugcuucagccuggc

SEQ ID NO: 346912 - RNA, 31 nt, Homo Sapiens
agcacgcagccccagacugcagguugggaag

SEQ ID NO: 346913 - RNA, 32 nt, Homo Sapiens
uuuuuaaaacuguuuuacagaaaucucuuuaa

SEQ ID NO: 346914 - RNA, 32 nt, Homo Sapiens
uucuucauaaauuuuuguugcaguacaccaua

SEQ ID NO: 346915 - RNA, 32 nt, Homo Sapiens
ugacauucaaggacauagcuguuaucuucacc

SEQ ID NO: 346916 - RNA, 32 nt, Homo Sapiens
agugcuggacgaagaauggccugggcagaaca

SEQ ID NO: 346917 - RNA, 32 nt, Homo Sapiens
cuuugguuuucuuuuuugcguguggcaguuuu

SEQ ID NO: 346918 - RNA, 32 nt, Homo Sapiens
guccccaaacucccugugggaugcaaguaacc

SEQ ID NO: 346919 - RNA, 32 nt, Homo Sapiens
guaugcauuguuccagaugcgcucuugccaaa

SEQ ID NO: 346920 - RNA, 32 nt, Homo Sapiens
aaugggacugaagcaggagagaaggcugggca

SEQ ID NO: 346921 - RNA, 32 nt, Homo Sapiens
guacucagcuuaaauauuuaugcuggucaaau

SEQ ID NO: 346922 - RNA, 32 nt, Homo Sapiens
ggggagaccccacacccaagcacauggaggua

SEQ ID NO: 346923 - RNA, 32 nt, Homo Sapiens
acuugagccuggggagguccaggccgcaguga

SEQ ID NO: 346924 - RNA, 32 nt, Homo Sapiens
cgccgccgcgaugggcaacgccgccgccgcca

SEQ ID NO: 346925 - RNA, 32 nt, Homo Sapiens
acgcugcgcgcgcgaggugggccccugucuuc

SEQ ID NO: 346926 - RNA, 32 nt, Homo Sapiens
gugccuccagcuuuucugggggucucauaaag

SEQ ID NO: 346927 - RNA, 32 nt, Homo Sapiens
auuuagaaugucaugaaaaauaugaacauuuc

SEQ ID NO: 346928 - RNA, 32 nt, Homo Sapiens
uccagagacagugaaacugcaagaugcucuca

SEQ ID NO: 346929 - RNA, 32 nt, Homo Sapiens
guagcagcauaaagguuaggcaaucacuggga

SEQ ID NO: 346930 - RNA, 32 nt, Homo Sapiens
cggaagcgagaggcgaggagcgcgcgggccgu

SEQ ID NO: 346931 - RNA, 32 nt, Homo Sapiens
cgggcaccguacuggccacgggcugacgccgg

SEQ ID NO: 346932 - RNA, 32 nt, Homo Sapiens
gaagaaaaaaaauaagucuguuugucauauuu

SEQ ID NO: 346933 - RNA, 32 nt, Homo Sapiens
acagccuguaauuauugagguucacauucuuc

SEQ ID NO: 346934 - RNA, 32 nt, Homo Sapiens
aagauauaauuucuugaaaaucuuaucagaag

SEQ ID NO: 346935 - RNA, 32 nt, Homo Sapiens
ugccuuguuuggccccuaaaucaauaaaauau

SEQ ID NO: 346936 - RNA, 32 nt, Homo Sapiens
cuuaaaaaucauacacauuaaaauuugauaau

SEQ ID NO: 346937 - RNA, 32 nt, Homo Sapiens
cgccuuggggucugcugggcugugaaggagaa

SEQ ID NO: 346938 - RNA, 32 nt, Homo Sapiens
guggggcaggaguucccaccucaugggguccu

SEQ ID NO: 346939 - RNA, 32 nt, Homo Sapiens
guauuccuuuuucucuccucuccccaugaugu

SEQ ID NO: 346940 - RNA, 32 nt, Homo Sapiens
ucucccccucgguuaagucccucccccucgcc

SEQ ID NO: 346941 - RNA, 32 nt, Homo Sapiens
gccuuggauaaagggauuauuucucugaaggg

SEQ ID NO: 346942 - RNA, 32 nt, Homo Sapiens
agugcauaagauucaaacuuugagugacauuu

SEQ ID NO: 346943 - RNA, 32 nt, Homo Sapiens
aaacuaccccuaccuauaagccagaacgagaa

SEQ ID NO: 346944 - RNA, 32 nt, Homo Sapiens
gaucauagcauuaacaaguucuguacgagaua

SEQ ID NO: 346945 - RNA, 32 nt, Homo Sapiens
ucggccucuguucucucgucccaccugacgag

SEQ ID NO: 346946 - RNA, 32 nt, Homo Sapiens
uguauguaaaauuuauauuuuguuuuuuguaa

SEQ ID NO: 346947 - RNA, 32 nt, Homo Sapiens
auuaagaccugccaacuuuuugauaaucucgu

SEQ ID NO: 346948 - RNA, 32 nt, Homo Sapiens
ucacugcuauagaaagucuuaugacagugacc

SEQ ID NO: 346949 - RNA, 32 nt, Homo Sapiens
gguacggacuuccuuuaggaucucaggcuucu

SEQ ID NO: 346950 - RNA, 32 nt, Homo Sapiens
acaacauaaaucaacgugaggaccugagagcu

SEQ ID NO: 346951 - RNA, 32 nt, Homo Sapiens
ggugccuggaagcgggaugcgccugugcgucu

SEQ ID NO: 346952 - RNA, 32 nt, Homo Sapiens
gagagguaaaaauacagauauucugggagagu

SEQ ID NO: 346953 - RNA, 32 nt, Homo Sapiens
cgcgcugcggggccgcccacgcugcgcuccag

SEQ ID NO: 346954 - RNA, 32 nt, Homo Sapiens
cccacucugguuucucugaaaaaacgagguaa

SEQ ID NO: 346955 - RNA, 32 nt, Homo Sapiens
gugaaaaaggauuuguagggcuagucuugggc

SEQ ID NO: 346956 - RNA, 32 nt, Homo Sapiens
ccauccugucuucucagcaucuccuugccugu

SEQ ID NO: 346957 - RNA, 32 nt, Homo Sapiens
aaugugagaugugcgacucuuaugauacugau

SEQ ID NO: 346958 - RNA, 32 nt, Homo Sapiens
gcgcguggccgcuggccgcccgcggcgaucuc

SEQ ID NO: 346959 - RNA, 32 nt, Homo Sapiens
acuauuuggccaugugcucccuggguacacaa

SEQ ID NO: 346960 - RNA, 32 nt, Homo Sapiens
aauuguuuuccacagugguuggaccaauuuuc

SEQ ID NO: 346961 - RNA, 32 nt, Homo Sapiens
caguuccauuuacagcucuguuuuuuacguag

SEQ ID NO: 346962 - RNA, 31 nt, Homo Sapiens
uuucuaaugaggaugucugauacuguuacug

SEQ ID NO: 346963 - RNA, 32 nt, Homo Sapiens
ugcacguguucgcagucguuuccgcgaugcug

SEQ ID NO: 346964 - RNA, 32 nt, Homo Sapiens
cuugccacucuuuuaaaacgcugcugucauuu

SEQ ID NO: 346965 - RNA, 32 nt, Homo Sapiens
aacccagggucauagucauuuauucaauaagu

SEQ ID NO: 346966 - RNA, 32 nt, Homo Sapiens
uauauucauaauuuacuuuaugaccuagaagg

SEQ ID NO: 346967 - RNA, 32 nt, Homo Sapiens
aaaaauuguguuacuuuuuuuaaauucccugu

SEQ ID NO: 346968 - RNA, 32 nt, Homo Sapiens
ucuuggcugcccaugaacauuauucuauugau

SEQ ID NO: 346969 - RNA, 32 nt, Homo Sapiens
uuggucuucccugccccuccccuaaccguguu

SEQ ID NO: 346970 - RNA, 32 nt, Homo Sapiens
uaaugcuuuuaagauuugaacuuguccucaaa

SEQ ID NO: 346971 - RNA, 32 nt, Homo Sapiens
gcacuuaauggcaaaaagcagugaucucugcu

SEQ ID NO: 346972 - RNA, 32 nt, Homo Sapiens
ccgagcccgggguccgcugaccacgugggugc

SEQ ID NO: 346973 - RNA, 32 nt, Homo Sapiens
ggccucgcugagcggcugcccgaggaggagcu

SEQ ID NO: 346974 - RNA, 32 nt, Homo Sapiens
cugugggcacuggugggccauuagauuuggag

SEQ ID NO: 346975 - RNA, 32 nt, Homo Sapiens
agaaaccaggugguacauggcuccagcaccau

SEQ ID NO: 346976 - RNA, 32 nt, Homo Sapiens
gcucccgcaaguuuccuucucuggagcuuccc

SEQ ID NO: 346977 - RNA, 32 nt, Homo Sapiens
gaaauaggaaaugcagaaauagguuuugucug

SEQ ID NO: 346978 - RNA, 32 nt, Homo Sapiens
gaggagucagcuugcucucuauugaugaugcu

SEQ ID NO: 346979 - RNA, 32 nt, Homo Sapiens
acaagagcauggcugccuccucugagcccuag

SEQ ID NO: 346980 - RNA, 32 nt, Homo Sapiens
cugagaagggaaggcagaugggagaagccaau

SEQ ID NO: 346981 - RNA, 32 nt, Homo Sapiens
ccugcauccaaauuccaggaagcucuuagggg

SEQ ID NO: 346982 - RNA, 32 nt, Homo Sapiens
ggccgggcucguggggcgccuggagugagggu

SEQ ID NO: 346983 - RNA, 32 nt, Homo Sapiens
ggggacagcagcagcccucuggccuugggaug

SEQ ID NO: 346984 - RNA, 32 nt, Homo Sapiens
ucuuuuuucuuuucuuuuuuuuuuugagaugg

SEQ ID NO: 346985 - RNA, 32 nt, Homo Sapiens
ccaguuuggaauguaucugcaauuguguggcu

SEQ ID NO: 346986 - RNA, 32 nt, Homo Sapiens
uuagcaacuugcaguauauaaaauaguuagau

SEQ ID NO: 346987 - RNA, 32 nt, Homo Sapiens
uggcuggguagucagcugagccuguugcugag

SEQ ID NO: 346988 - RNA, 32 nt, Homo Sapiens
gacugaacaauaaauuuuuaaauauaucuagu

SEQ ID NO: 346989 - RNA, 32 nt, Homo Sapiens
ccucgaccucguccuccuccccgcuccggacg

SEQ ID NO: 346990 - RNA, 32 nt, Homo Sapiens
cucagcuuccaggcugcucauuuccuuggcuu

SEQ ID NO: 346991 - RNA, 32 nt, Homo Sapiens
aauuaaaaggauuuuuaaaaaguaauuacugc

SEQ ID NO: 346992 - RNA, 32 nt, Homo Sapiens
uauauguccauuucuauucauguaacuucuuu

SEQ ID NO: 346993 - RNA, 32 nt, Homo Sapiens
uuucuuauauaaaaucccuuuauuuguaaccu

SEQ ID NO: 346994 - RNA, 32 nt, Homo Sapiens
cacaaacgcugcuaugggagggguggggggcu

SEQ ID NO: 346995 - RNA, 32 nt, Homo Sapiens
gggccccagcccagcccucugcaccccccagc

SEQ ID NO: 346996 - RNA, 32 nt, Homo Sapiens
cauguccugcagcagagcugggcaggcugggg

SEQ ID NO: 346997 - RNA, 32 nt, Homo Sapiens
acaaauuaguguuggauuacuaauuauuuuaa

SEQ ID NO: 346998 - RNA, 32 nt, Homo Sapiens
gguagcaauuuaaucauaacuuucauuugcug

SEQ ID NO: 346999 - RNA, 32 nt, Homo Sapiens
ggcacguggcagcagucgcugaucucccagcu

SEQ ID NO: 347000 - RNA, 32 nt, Homo Sapiens
gagaaucccuagcugccccagcccagucuuuc

SEQ ID NO: 347001 - RNA, 32 nt, Homo Sapiens
aauaaaucugcuccuauaauugaggcauacca

SEQ ID NO: 347002 - RNA, 32 nt, Homo Sapiens
ucucauuucuucccuuuguuccuuagucaucc

SEQ ID NO: 347003 - RNA, 32 nt, Homo Sapiens
ccuuagcaguaauaaugacauacacugaauug

SEQ ID NO: 347004 - RNA, 32 nt, Homo Sapiens
uauguuaaugaaauuuugucauguuucaaaua

SEQ ID NO: 347005 - RNA, 32 nt, Homo Sapiens
acuuggagccggguagacucgguggguggcga

SEQ ID NO: 347006 - RNA, 32 nt, Homo Sapiens
cgcaggcccaaccgccgccagcaccauggcca

SEQ ID NO: 347007 - RNA, 32 nt, Homo Sapiens
acccuccgcacucaccucccccucgccgcucg

SEQ ID NO: 347008 - RNA, 32 nt, Homo Sapiens
cccggggauccggcccgggcccccacuuccga

SEQ ID NO: 347009 - RNA, 32 nt, Homo Sapiens
uuugugaaaguucuuaaccugcccaaaaaccc

SEQ ID NO: 347010 - RNA, 32 nt, Homo Sapiens
gcccugaggguggagugacuggggcagggccu

SEQ ID NO: 347011 - RNA, 32 nt, Homo Sapiens
gagaggccgagccccaggccacugucacucuu

SEQ ID NO: 347012 - RNA, 32 nt, Homo Sapiens
guauaauagcaaaaaguugaacaaagaugaac

SEQ ID NO: 347013 - RNA, 32 nt, Homo Sapiens
caacaagacucuaugauucugucuauuggaac

SEQ ID NO: 347014 - RNA, 32 nt, Homo Sapiens
uuggccauguucucucuucucuagguucaggu

SEQ ID NO: 347015 - RNA, 32 nt, Homo Sapiens
uguuucuuccugggauucugcacauagccagg

SEQ ID NO: 347016 - RNA, 32 nt, Homo Sapiens
ugaaaauaaauuucuuuuuuaugucgugagau

SEQ ID NO: 347017 - RNA, 32 nt, Homo Sapiens
ugaagaguggcacaacuguguugugaccacag

SEQ ID NO: 347018 - RNA, 32 nt, Homo Sapiens
aaaucggcagccucagaaagguggaccgaggc

SEQ ID NO: 347019 - RNA, 32 nt, Homo Sapiens
uauagaagaguaccuugaaccuauaguuuccu

SEQ ID NO: 347020 - RNA, 32 nt, Homo Sapiens
agagaaagaaauuuauuuuacauugacauugc

SEQ ID NO: 347021 - RNA, 32 nt, Homo Sapiens
guugaguagucuuuuuguggcuucugguuugg

SEQ ID NO: 347022 - RNA, 32 nt, Homo Sapiens
ucaggcuucauuaucaucucauuuccaugcua

SEQ ID NO: 347023 - RNA, 32 nt, Homo Sapiens
uguuuacagcacuacucugugccagccacaca

SEQ ID NO: 347024 - RNA, 32 nt, Homo Sapiens
gcgucucagaucuaacgugguuucacaucaau

SEQ ID NO: 347025 - RNA, 32 nt, Homo Sapiens
gugcucacugacagaagaccuggucaccaaag

SEQ ID NO: 347026 - RNA, 32 nt, Homo Sapiens
uaagaacugaccaauagcuccaagugucacac

SEQ ID NO: 347027 - RNA, 32 nt, Homo Sapiens
gcagaaauaaucaacaugcccauuaauacagg

SEQ ID NO: 347028 - RNA, 32 nt, Homo Sapiens
uccccaguccuggccucugcccgccccugcug

SEQ ID NO: 347029 - RNA, 32 nt, Homo Sapiens
uuggguagacaggcugagccugccccauggaa

SEQ ID NO: 347030 - RNA, 32 nt, Homo Sapiens
gcggaggaacgauggccgacggcggcggcccu

SEQ ID NO: 347031 - RNA, 32 nt, Homo Sapiens
uacagagcucuuuuuuccccucauaaccuugu

SEQ ID NO: 347032 - RNA, 32 nt, Homo Sapiens
aggauuguuuuaaaucuguuauuuugcuauuu

SEQ ID NO: 347033 - RNA, 32 nt, Homo Sapiens
aaauccgcgccggggacagucagggaugcucc

SEQ ID NO: 347034 - RNA, 32 nt, Homo Sapiens
aacaaaacauuagcagagcaaacaaguaccac

SEQ ID NO: 347035 - RNA, 32 nt, Homo Sapiens
uauacauguacaaaauacauauaauuguuaac

SEQ ID NO: 347036 - RNA, 31 nt, Homo Sapiens
ccgcucggcgccugccugcucagaagcggcc

SEQ ID NO: 347037 - RNA, 32 nt, Homo Sapiens
cucagaugguaguggauaggccugugacgaag

SEQ ID NO: 347038 - RNA, 32 nt, Homo Sapiens
gggacuccuauugagacagcugcaaaacaggc

SEQ ID NO: 347039 - RNA, 32 nt, Homo Sapiens
uggacaugcugagacacucuggggcuccucau

SEQ ID NO: 347040 - RNA, 32 nt, Homo Sapiens
gaggcacaggugccggcccugcagcccccaga

SEQ ID NO: 347041 - RNA, 32 nt, Homo Sapiens
cggaggaagcuacuagggucaucagaguguug

SEQ ID NO: 347042 - RNA, 32 nt, Homo Sapiens
caaaaaacaaaaacaagacaugugagcuugga

SEQ ID NO: 347043 - RNA, 32 nt, Homo Sapiens
aucucuuccccuccccccaaacuggagcuguc

SEQ ID NO: 347044 - RNA, 32 nt, Homo Sapiens
ucagggccauucaaauuguugguguugcauca

SEQ ID NO: 347045 - RNA, 32 nt, Homo Sapiens
cccucuugggccucugacccagccccuccccg

SEQ ID NO: 347046 - RNA, 32 nt, Homo Sapiens
agggacccugguggggguggcuccuucucacu

SEQ ID NO: 347047 - RNA, 32 nt, Homo Sapiens
ucuaagaaggagcugauguggaggagcagcug

SEQ ID NO: 347048 - RNA, 32 nt, Homo Sapiens
aaaauucuguugucauaccagugaauaaaaug

SEQ ID NO: 347049 - RNA, 32 nt, Homo Sapiens
ccuugccccgauccgcgcccgccccguccgug

SEQ ID NO: 347050 - RNA, 32 nt, Homo Sapiens
auuugcuuauuuuuuauaauuaaagaugccau

SEQ ID NO: 347051 - RNA, 32 nt, Homo Sapiens
ucacuuucucccuguuugcuggccagcagggu

SEQ ID NO: 347052 - RNA, 31 nt, Homo Sapiens
gcuuucuauugagagucagguaugugagcau

SEQ ID NO: 347053 - RNA, 32 nt, Homo Sapiens
aacaggauacaggugacagugaagauagaaga

SEQ ID NO: 347054 - RNA, 32 nt, Homo Sapiens
uuugauaaugaaaaugguuugagacacuaagc

SEQ ID NO: 347055 - RNA, 32 nt, Homo Sapiens
uccgggguccgcgguuucacaucggaaacaaa

SEQ ID NO: 347056 - RNA, 32 nt, Homo Sapiens
aagauuagaaauaacauuaaaguuggauuauu

SEQ ID NO: 347057 - RNA, 32 nt, Homo Sapiens
uggugcuauccuggugcuauugggguggggag

SEQ ID NO: 347058 - RNA, 32 nt, Homo Sapiens
uguuggagccugcucugugcuccccacuccau

SEQ ID NO: 347059 - RNA, 31 nt, Homo Sapiens
gcacuucacuggaaaaugccaaauagcucug

SEQ ID NO: 347060 - RNA, 32 nt, Homo Sapiens
ggauuuacuggaaucuauuggugcugcugcau

SEQ ID NO: 347061 - RNA, 32 nt, Homo Sapiens
cugacgggaaaggcagcccuuugacacgcacg

SEQ ID NO: 347062 - RNA, 32 nt, Homo Sapiens
acacccuuaagccccaggcuccccguuuaccu

SEQ ID NO: 347063 - RNA, 32 nt, Homo Sapiens
ugauaccuuccauuccaauaccuuauguuuca

SEQ ID NO: 347064 - RNA, 32 nt, Homo Sapiens
guccugggagcugccugcucccggcccacccu

SEQ ID NO: 347065 - RNA, 32 nt, Homo Sapiens
ucuagcaagccuuugaaguuuaccaaguauag

SEQ ID NO: 347066 - RNA, 32 nt, Homo Sapiens
ugaaaaucuaaugauguaauaggcauuuucuu

SEQ ID NO: 347067 - RNA, 32 nt, Homo Sapiens
cguaggaaccggcuccggggccccgauaacgg

SEQ ID NO: 347068 - RNA, 32 nt, Homo Sapiens
uaccugcagagggguccauacggcgcuguucu

SEQ ID NO: 347069 - RNA, 32 nt, Homo Sapiens
aaacagauauuguaccauguaccuaauccaaa

SEQ ID NO: 347070 - RNA, 32 nt, Homo Sapiens
accugccccggccaggccugcagacccagacu

SEQ ID NO: 347071 - RNA, 32 nt, Homo Sapiens
cuaaaacucuauguaaauuuaaguaugcaaaa

SEQ ID NO: 347072 - RNA, 32 nt, Homo Sapiens
cucaguugguggagacuggggcugggacugga

SEQ ID NO: 347073 - RNA, 32 nt, Homo Sapiens
cgucgccgccgccgccauuuucgcgcccggcc

SEQ ID NO: 347074 - RNA, 32 nt, Homo Sapiens
gagcuacugcuucuaacaccucuuuucccuug

SEQ ID NO: 347075 - RNA, 32 nt, Homo Sapiens
gcucaaauaaaguuuaauuccaacacaaaaaa

SEQ ID NO: 347076 - RNA, 32 nt, Homo Sapiens
ggaaugucaguguaugugugugaauguacaug

SEQ ID NO: 347077 - RNA, 32 nt, Homo Sapiens
aucaauaaaaauuauccuugaaaaaaaaaaaa

SEQ ID NO: 347078 - RNA, 32 nt, Homo Sapiens
uacccaaaggauuauaaaucaugcugcuauga

SEQ ID NO: 347079 - RNA, 32 nt, Homo Sapiens
caugguaggagcuggaccaacuguauauaguu

SEQ ID NO: 347080 - RNA, 32 nt, Homo Sapiens
aagaucuuuugugccaagaugcagggaaauga

SEQ ID NO: 347081 - RNA, 32 nt, Homo Sapiens
ccgucccggcgccgcagccgccugcguuucgg

SEQ ID NO: 347082 - RNA, 32 nt, Homo Sapiens
uauauuuuucuuuuccccagaauuacuuagau

SEQ ID NO: 347083 - RNA, 32 nt, Homo Sapiens
uggggcugccagcauuucauggccuccaagcu

SEQ ID NO: 347084 - RNA, 32 nt, Homo Sapiens
uuaaauugauucccaggggccuuuuuuuuuuu

SEQ ID NO: 347085 - RNA, 32 nt, Homo Sapiens
ucccaaguuucuuuuucccuggaaaauaaaaa

SEQ ID NO: 347086 - RNA, 32 nt, Homo Sapiens
caggcacugugcuaggcguggugggcaguaua

SEQ ID NO: 347087 - RNA, 32 nt, Homo Sapiens
aguacuuuuuaaaugcuguguauuggguguaa

SEQ ID NO: 347088 - RNA, 29 nt, Homo Sapiens
acgcguccgguccugaacugggcugaaua

SEQ ID NO: 347089 - RNA, 32 nt, Homo Sapiens
cuauggauucccagcccaucccugugaaggag

SEQ ID NO: 347090 - RNA, 32 nt, Homo Sapiens
caacaguguucuaacuauuaacgcuacgaugc

SEQ ID NO: 347091 - RNA, 32 nt, Homo Sapiens
ccacagacagcucuugccccagccagaaucag

SEQ ID NO: 347092 - RNA, 32 nt, Homo Sapiens
ucuguuuucuaaaaauguauuuuacuguggug

SEQ ID NO: 347093 - RNA, 32 nt, Homo Sapiens
gaaagcagacuuauggccaaaaaacaaucuga

SEQ ID NO: 347094 - RNA, 32 nt, Homo Sapiens
uuuggauacuaaaauaaauauaguuaucauug

SEQ ID NO: 347095 - RNA, 32 nt, Homo Sapiens
agccucugcccccaggcugggccugucacugg

SEQ ID NO: 347096 - RNA, 32 nt, Homo Sapiens
acaaaucuuuuuagucaucuuuuauauacuuu

SEQ ID NO: 347097 - RNA, 32 nt, Homo Sapiens
gauggagggucaaugagagcucgcggggugac

SEQ ID NO: 347098 - RNA, 32 nt, Homo Sapiens
aguuauuuuuuggucucccccucccccuugag

SEQ ID NO: 347099 - RNA, 32 nt, Homo Sapiens
uacaacuuguuguuccuuuguuuuccauuccu

SEQ ID NO: 347100 - RNA, 32 nt, Homo Sapiens
uuggcaauauguguuuauguuguacaauguaa

SEQ ID NO: 347101 - RNA, 32 nt, Homo Sapiens
cugacagggucucacuuugucgcccgggcagg

SEQ ID NO: 347102 - RNA, 32 nt, Homo Sapiens
ggccgggcgcgguagcucacgccuguaauccc

SEQ ID NO: 347103 - RNA, 32 nt, Homo Sapiens
ccuacccaacugagugccugggcccccagcuu

SEQ ID NO: 347104 - RNA, 32 nt, Homo Sapiens
auuuaucagaaaguauacagagaaacuauaag

SEQ ID NO: 347105 - RNA, 32 nt, Homo Sapiens
uaucaacguuuuggagacuacacaaugaaaac

SEQ ID NO: 347106 - RNA, 32 nt, Homo Sapiens
accaagaagacgggaagaccuggcuugugacc

SEQ ID NO: 347107 - RNA, 32 nt, Homo Sapiens
ggcagaggcccacauuggaagagcagcaccuc

SEQ ID NO: 347108 - RNA, 32 nt, Homo Sapiens
gaggggagcagcggcucugguccucggagcug

SEQ ID NO: 347109 - RNA, 32 nt, Homo Sapiens
cucuagcccugccacuaucauugucuucucug

SEQ ID NO: 347110 - RNA, 32 nt, Homo Sapiens
aggccauugggaagagacggcaccgaaagcga

SEQ ID NO: 347111 - RNA, 32 nt, Homo Sapiens
agaggucauaacgaaagcaagcgagugaauua

SEQ ID NO: 347112 - RNA, 30 nt, Homo Sapiens
cuucgagagaagcuucaaaauugucacaau

SEQ ID NO: 347113 - RNA, 32 nt, Homo Sapiens
uacugcuugaccguacucucacauguggcaaa

SEQ ID NO: 347114 - RNA, 32 nt, Homo Sapiens
agucccugcccccaaguaguucacaaaucuca

SEQ ID NO: 347115 - RNA, 32 nt, Homo Sapiens
ugcgccgcccggccucacuccgcggcccgcca

SEQ ID NO: 347116 - RNA, 31 nt, Homo Sapiens
auuguguguuauugagacgugcuguucccau

SEQ ID NO: 347117 - RNA, 32 nt, Homo Sapiens
gcccgcaggacggucaggugggccccccagcu

SEQ ID NO: 347118 - RNA, 32 nt, Homo Sapiens
ccagugaaauuuuauuguugcauauuaaugau

SEQ ID NO: 347119 - RNA, 32 nt, Homo Sapiens
guccggaggaggagaagcggcggcgccgggaa

SEQ ID NO: 347120 - RNA, 32 nt, Homo Sapiens
guuaguguuuuaauguuugggugcuuggcuuu

SEQ ID NO: 347121 - RNA, 32 nt, Homo Sapiens
ucagacagcgcuuccuucuggauguuauggag

SEQ ID NO: 347122 - RNA, 32 nt, Homo Sapiens
aagagauuuaaaaagaaauucacugguucuuu

SEQ ID NO: 347123 - RNA, 32 nt, Homo Sapiens
ucucaugguuuaaaagacuuugaagcaggaau

SEQ ID NO: 347124 - RNA, 32 nt, Homo Sapiens
aguacugacaccugagaauuucugcucaagua

SEQ ID NO: 347125 - RNA, 32 nt, Homo Sapiens
gcauucuagggccgcacgguccagugcggugc

SEQ ID NO: 347126 - RNA, 32 nt, Homo Sapiens
gggcaguggaggugcugcauugccugcgguca

SEQ ID NO: 347127 - RNA, 32 nt, Homo Sapiens
ggaggcugacgcgcuagcguggcucuaagacg

SEQ ID NO: 347128 - RNA, 32 nt, Homo Sapiens
augcuuugagacuucugcccaaggcuguggca

SEQ ID NO: 347129 - RNA, 32 nt, Homo Sapiens
uuauaacaaaauuuaaaguagcauaucuccuc

SEQ ID NO: 347130 - RNA, 32 nt, Homo Sapiens
ccauaugggugaaagcaaccagcacugcccug

SEQ ID NO: 347131 - RNA, 32 nt, Homo Sapiens
ccacucucuggacaccaauccugggagguggg

SEQ ID NO: 347132 - RNA, 32 nt, Homo Sapiens
ugaagguggauggggacacagcuccuggcuuc

SEQ ID NO: 347133 - RNA, 32 nt, Homo Sapiens
ggacacugccagcgucuuaacuugucacuaag

SEQ ID NO: 347134 - RNA, 32 nt, Homo Sapiens
gaguacuauccuguucuucucuccucuaaucc

SEQ ID NO: 347135 - RNA, 32 nt, Homo Sapiens
uuucuugcccgaaauaagaacccauuauuucc

SEQ ID NO: 347136 - RNA, 32 nt, Homo Sapiens
guugaugaaauauuuaacuagagcaugauauu

SEQ ID NO: 347137 - RNA, 29 nt, Homo Sapiens
uuuguuuuguguuucauuggucucuaucu

SEQ ID NO: 347138 - RNA, 32 nt, Homo Sapiens
gaccugucaccauguccuguacuauuuggaau

SEQ ID NO: 347139 - RNA, 32 nt, Homo Sapiens
acuaauaagcagacacuagaaaacagaucuug

SEQ ID NO: 347140 - RNA, 32 nt, Homo Sapiens
auagccaaagcugaaagacauaaaaaucuuua

SEQ ID NO: 347141 - RNA, 32 nt, Homo Sapiens
ucauuguuuacauaagcuuuuacaguuucaga

SEQ ID NO: 347142 - RNA, 32 nt, Homo Sapiens
gugcagugucuuguaacaacuaauuaauaaug

SEQ ID NO: 347143 - RNA, 32 nt, Homo Sapiens
cuggggcucagguugggucuaggguguccuca

SEQ ID NO: 347144 - RNA, 30 nt, Homo Sapiens
gaaaaucgcaggcgcgcggcccaccccgcc

SEQ ID NO: 347145 - RNA, 32 nt, Homo Sapiens
uuccugccugaagagcagaggugaggaccugg

SEQ ID NO: 347146 - RNA, 32 nt, Homo Sapiens
ggcuaauugguaguuguucauuucagccucug

SEQ ID NO: 347147 - RNA, 32 nt, Homo Sapiens
cacguggacuugggcggugcugcccggguggg

SEQ ID NO: 347148 - RNA, 32 nt, Homo Sapiens
gcgucuacaccugcaagcucagcacggccaaa

SEQ ID NO: 347149 - RNA, 32 nt, Homo Sapiens
gagaguaggcgcggccggucagauucgaugca

SEQ ID NO: 347150 - RNA, 32 nt, Homo Sapiens
gcaguccuggggaggcaggaggcacaugugag

SEQ ID NO: 347151 - RNA, 32 nt, Homo Sapiens
ucauguuuucuguguucccuggaggagacaac

SEQ ID NO: 347152 - RNA, 32 nt, Homo Sapiens
guucagggcuccugggcggccgcuuuuuccag

SEQ ID NO: 347153 - RNA, 32 nt, Homo Sapiens
accauauggaacaauuuugaacuucuaagauc

SEQ ID NO: 347154 - RNA, 32 nt, Homo Sapiens
agaacuucaaaagggcaagaucuuuuuuccuu

SEQ ID NO: 347155 - RNA, 32 nt, Homo Sapiens
aacuaccauggucccaggauuccauccugaaa

SEQ ID NO: 347156 - RNA, 32 nt, Homo Sapiens
acuaaucauauuuaaauauauuucacuuugac

SEQ ID NO: 347157 - RNA, 32 nt, Homo Sapiens
cagaggucaggaguucgagaccagccuggcca

SEQ ID NO: 347158 - RNA, 32 nt, Homo Sapiens
ugcaauuuaacacuucaguuaaagaaauacau

SEQ ID NO: 347159 - RNA, 29 nt, Homo Sapiens
aaacgagccuguuucagaggaacaucguc

SEQ ID NO: 347160 - RNA, 32 nt, Homo Sapiens
ccuaaccccagacagcucuacugcaccacccc

SEQ ID NO: 347161 - RNA, 32 nt, Homo Sapiens
ucagccucccuuguagcugggaccacaggugc

SEQ ID NO: 347162 - RNA, 32 nt, Homo Sapiens
auguucaccugcuuuccuguccguuggugaag

SEQ ID NO: 347163 - RNA, 32 nt, Homo Sapiens
aacuucagccagaaagcagaguggcaucacau

SEQ ID NO: 347164 - RNA, 32 nt, Homo Sapiens
gacggcgcggacggagcgaagcgccgagccau

SEQ ID NO: 347165 - RNA, 32 nt, Homo Sapiens
uguucuuucuucaggaauacugauauaucuuu

SEQ ID NO: 347166 - RNA, 32 nt, Homo Sapiens
cggcaggauugccgcacaaguuuauaugaugg

SEQ ID NO: 347167 - RNA, 32 nt, Homo Sapiens
cuucugccugcaggugucugcggcgaggcccc

SEQ ID NO: 347168 - RNA, 32 nt, Homo Sapiens
gguuucagcaaugccacauuccagucagagaa

SEQ ID NO: 347169 - RNA, 32 nt, Homo Sapiens
ucgauaccuuccuggaggaacgcggggacauc

SEQ ID NO: 347170 - RNA, 32 nt, Homo Sapiens
cacagcgucgccaggaagaagaucugauaaac

SEQ ID NO: 347171 - RNA, 32 nt, Homo Sapiens
uaggggcaggggcagcggcggcugggguuggg

SEQ ID NO: 347172 - RNA, 32 nt, Homo Sapiens
ccggucagcccagguggaaaacgagagugaaa

SEQ ID NO: 347173 - RNA, 32 nt, Homo Sapiens
aguccuggaaaacaagcggacugucaucgagc

SEQ ID NO: 347174 - RNA, 32 nt, Homo Sapiens
uuauugccugucaucacuuugcuggccuccuc

SEQ ID NO: 347175 - RNA, 32 nt, Homo Sapiens
uagacugaguaaaguguuaauaccauacccag

SEQ ID NO: 347176 - RNA, 32 nt, Homo Sapiens
caaugcaauaauauucauuuaaaaauacaauu

SEQ ID NO: 347177 - RNA, 32 nt, Homo Sapiens
gccuggggggcuuuucggaucggcaggaugua

SEQ ID NO: 347178 - RNA, 32 nt, Homo Sapiens
ucagcuggguggcaccaggugaccaggcccag

SEQ ID NO: 347179 - RNA, 32 nt, Homo Sapiens
ccacccacucgcgugcccacggcggcauuauu

SEQ ID NO: 347180 - RNA, 32 nt, Homo Sapiens
ccaugaacaaauucuuuaguacucaauguuuc

SEQ ID NO: 347181 - RNA, 32 nt, Homo Sapiens
ucugauuaacucucuguaugacaacucuacag

SEQ ID NO: 347182 - RNA, 32 nt, Homo Sapiens
uuuuugaaauuucaaaugagcuuauaaauaag

SEQ ID NO: 347183 - RNA, 32 nt, Homo Sapiens
cgcggucgcuacugaucaugcuugggccaggg

SEQ ID NO: 347184 - RNA, 32 nt, Homo Sapiens
caaggaauuagaauuguuuaaucuuauuaauc

SEQ ID NO: 347185 - RNA, 32 nt, Homo Sapiens
cggcuaugaugaaacgaaagugcggggcgccg

SEQ ID NO: 347186 - RNA, 32 nt, Homo Sapiens
ggcgccgggcgcggcgggaggaugccgaagcc

SEQ ID NO: 347187 - RNA, 32 nt, Homo Sapiens
gcccgccugcgcuugaggccugucugcguuug

SEQ ID NO: 347188 - RNA, 32 nt, Homo Sapiens
cucgcgucugggaacggccgggcccccagcgg

SEQ ID NO: 347189 - RNA, 32 nt, Homo Sapiens
ccggcggcccagagccgagccaagcgugcccg

SEQ ID NO: 347190 - RNA, 32 nt, Homo Sapiens
uggcccugcaggaagacucuccaggugagggu

SEQ ID NO: 347191 - RNA, 32 nt, Homo Sapiens
uaagaaacagagcaguaccagcgcucuaaaag

SEQ ID NO: 347192 - RNA, 32 nt, Homo Sapiens
cuucccugccugagacacguauggaagccaag

SEQ ID NO: 347193 - RNA, 32 nt, Homo Sapiens
ucccagacacguagcugggcuggagaagcggc

SEQ ID NO: 347194 - RNA, 32 nt, Homo Sapiens
uccgaccguguuggggugcaggcgcugucaga

SEQ ID NO: 347195 - RNA, 32 nt, Homo Sapiens
cguccccagcccuaucaccucaucucccgaaa

SEQ ID NO: 347196 - RNA, 32 nt, Homo Sapiens
uuuuuuaguccuuuuguuaccuuuaaguuguc

SEQ ID NO: 347197 - RNA, 32 nt, Homo Sapiens
ccccaaagauauuuaaacaagguuauaauuua

SEQ ID NO: 347198 - RNA, 32 nt, Homo Sapiens
guauuauucaaauauauggcacaaugacauuu

SEQ ID NO: 347199 - RNA, 32 nt, Homo Sapiens
uguuagcauugaaaucaagacuauuuaguugg

SEQ ID NO: 347200 - RNA, 32 nt, Homo Sapiens
uauucaacccacccucuugucaauaacucuau

SEQ ID NO: 347201 - RNA, 32 nt, Homo Sapiens
cucagcccauucaaagagcaaggauucaggaa

SEQ ID NO: 347202 - RNA, 32 nt, Homo Sapiens
agcccggccucgucucgccggaggagacgcug

SEQ ID NO: 347203 - RNA, 32 nt, Homo Sapiens
auguugcaaugcaaaguaaucuaguaguacug

SEQ ID NO: 347204 - RNA, 32 nt, Homo Sapiens
gauauggugcguuuccuguccacugaacaaau

SEQ ID NO: 347205 - RNA, 32 nt, Homo Sapiens
cuuuauaaaagucuuauugaagaaguguaaga

SEQ ID NO: 347206 - RNA, 30 nt, Homo Sapiens
gccguccucccgcagcaccagccaggccac

SEQ ID NO: 347207 - RNA, 32 nt, Homo Sapiens
ggacauuuuguacagugcucuccggugcugug

SEQ ID NO: 347208 - RNA, 32 nt, Homo Sapiens
acggggugucugcgcauguuuccuccuccuag

SEQ ID NO: 347209 - RNA, 32 nt, Homo Sapiens
aaaaccacaccuaaaauagaccacugaggaga

SEQ ID NO: 347210 - RNA, 32 nt, Homo Sapiens
gcuguacuuuugugggccugucaucuugauga

SEQ ID NO: 347211 - RNA, 32 nt, Homo Sapiens
cuuuggccccacuuugaagggcaagaaauggc

SEQ ID NO: 347212 - RNA, 32 nt, Homo Sapiens
uggcuucuguuuuauucagggauuuuuuuaaa

SEQ ID NO: 347213 - RNA, 32 nt, Homo Sapiens
uguucuuaauaaaguguucuuggaguuuaacc

SEQ ID NO: 347214 - RNA, 32 nt, Homo Sapiens
ugccagggcccacuugacccuguuucccaccu

SEQ ID NO: 347215 - RNA, 31 nt, Homo Sapiens
ucagucccaaggucccaggugccacuggggu

SEQ ID NO: 347216 - RNA, 32 nt, Homo Sapiens
gucucugucccucucugggccucugcacgaug

SEQ ID NO: 347217 - RNA, 32 nt, Homo Sapiens
guaaaauacuauuuucaccugguagucugggg

SEQ ID NO: 347218 - RNA, 32 nt, Homo Sapiens
uacgggcugaauugugucaccucgaaauucau

SEQ ID NO: 347219 - RNA, 30 nt, Homo Sapiens
agggcauagcugaaaggggaaacagaauua

SEQ ID NO: 347220 - RNA, 32 nt, Homo Sapiens
uuaucauucauuucuuuuucuaaaaguuguua

SEQ ID NO: 347221 - RNA, 32 nt, Homo Sapiens
uccuucccagcugauugucagagccuuagacc

SEQ ID NO: 347222 - RNA, 32 nt, Homo Sapiens
cauuuuuaaugaucucggaugaccaaaccagc

SEQ ID NO: 347223 - RNA, 32 nt, Homo Sapiens
uguacagccaucugggacaugccugucuuccu

SEQ ID NO: 347224 - RNA, 32 nt, Homo Sapiens
uggccaucugaauacucccccaucacuaauug

SEQ ID NO: 347225 - RNA, 32 nt, Homo Sapiens
uguuuuuauuuuuuauuuuuaguagcauugag

SEQ ID NO: 347226 - RNA, 32 nt, Homo Sapiens
aaaucuggguuagcuuuuuuuguuuucuugac

SEQ ID NO: 347227 - RNA, 30 nt, Homo Sapiens
ucagucggagguggcaugcaagaugaagcu

SEQ ID NO: 347228 - RNA, 32 nt, Homo Sapiens
gccgggaggggcggacgugagaaggacggauu

SEQ ID NO: 347229 - RNA, 32 nt, Homo Sapiens
uauacuugguaaccgagggaauuacuaagacu

SEQ ID NO: 347230 - RNA, 30 nt, Homo Sapiens
gcgccauggagccggccgcgggcauccagc

SEQ ID NO: 347231 - RNA, 32 nt, Homo Sapiens
gggaggaucuuugaagaguugaggauauggcu

SEQ ID NO: 347232 - RNA, 32 nt, Homo Sapiens
caggauuuuagagagcacuuugaaagauaaca

SEQ ID NO: 347233 - RNA, 32 nt, Homo Sapiens
agaguaccauuaggaauucuuaaugggaugaa

SEQ ID NO: 347234 - RNA, 32 nt, Homo Sapiens
uucccuucgugcgcggggggcggcgagggucu

SEQ ID NO: 347235 - RNA, 32 nt, Homo Sapiens
guaguaguucuguccuuuugccugcaggucag

SEQ ID NO: 347236 - RNA, 31 nt, Homo Sapiens
uaugcagagccccaugaguagccaggauaca

SEQ ID NO: 347237 - RNA, 32 nt, Homo Sapiens
uuagccaguauuuuaauagaacaugauuaaug

SEQ ID NO: 347238 - RNA, 32 nt, Homo Sapiens
aguacaguauacauuucuuuacaggggauucu

SEQ ID NO: 347239 - RNA, 32 nt, Homo Sapiens
auacaucuauagaaguauaugcauaugacauu

SEQ ID NO: 347240 - RNA, 32 nt, Homo Sapiens
gaaauuaaauuuuaacagaaaucuuuuaagua

SEQ ID NO: 347241 - RNA, 32 nt, Homo Sapiens
augcccgccucggccucccaaaauguugggau

SEQ ID NO: 347242 - RNA, 32 nt, Homo Sapiens
cuuaugguaucaguuuucuuuauuuucuugaa

SEQ ID NO: 347243 - RNA, 32 nt, Homo Sapiens
ucagccauagaacaaagauuuauuguugccac

SEQ ID NO: 347244 - RNA, 32 nt, Homo Sapiens
gaacaaggccccucugaggcagauggggcagg

SEQ ID NO: 347245 - RNA, 32 nt, Homo Sapiens
ucccuggcccccagcccaugccucccugggau

SEQ ID NO: 347246 - RNA, 32 nt, Homo Sapiens
cagugguggcagggccuagcugcuacaaagaa

SEQ ID NO: 347247 - RNA, 32 nt, Homo Sapiens
guuacauuacgagagggaagggagaaggggac

SEQ ID NO: 347248 - RNA, 32 nt, Homo Sapiens
cgcgggucucggucgcggggcccguuugcaga

SEQ ID NO: 347249 - RNA, 32 nt, Homo Sapiens
acagagcaccgcccagcuccagcccuccucuc

SEQ ID NO: 347250 - RNA, 32 nt, Homo Sapiens
ccaggcuucccggcccgccacucccgcugcca

SEQ ID NO: 347251 - RNA, 32 nt, Homo Sapiens
acuaucucuggccacacuuuuccugagcuaca

SEQ ID NO: 347252 - RNA, 32 nt, Homo Sapiens
cucuguuugggaagacguggaggaaaagguga

SEQ ID NO: 347253 - RNA, 32 nt, Homo Sapiens
uguggccccaggugccaccaauaaaaauccua

SEQ ID NO: 347254 - RNA, 29 nt, Homo Sapiens
uugguuagauguauguguguuauaaccau

SEQ ID NO: 347255 - RNA, 32 nt, Homo Sapiens
gcuggcgccgccggagcgcggagccacgaccc

SEQ ID NO: 347256 - RNA, 32 nt, Homo Sapiens
ccacgcgcgccgggcgggcgccauggaggagg

SEQ ID NO: 347257 - RNA, 32 nt, Homo Sapiens
ggguguuguccaguauuuuucccuuuuuaacc

SEQ ID NO: 347258 - RNA, 32 nt, Homo Sapiens
aaaacgaaagacuuuuaaaaacauacaucaaa

SEQ ID NO: 347259 - RNA, 32 nt, Homo Sapiens
agggagccauuucagcuggagucucaggucuc

SEQ ID NO: 347260 - RNA, 32 nt, Homo Sapiens
ggaucugaagcaaauguaccauaaagcagaug

SEQ ID NO: 347261 - RNA, 32 nt, Homo Sapiens
uuguucaucucuucuuuuagauguaacucuua

SEQ ID NO: 347262 - RNA, 32 nt, Homo Sapiens
agagccagagagaaagaggaagagacugagug

SEQ ID NO: 347263 - RNA, 32 nt, Homo Sapiens
ucauacuuuugaccacuugugacuggaguuca

SEQ ID NO: 347264 - RNA, 32 nt, Homo Sapiens
uauuccagagaucuggacaaucucuagcacag

SEQ ID NO: 347265 - RNA, 32 nt, Homo Sapiens
ggcggcggcuccccgcuugccucagcugcagc

SEQ ID NO: 347266 - RNA, 32 nt, Homo Sapiens
agcuuuuguugcacccaugcaggggcaaucag

SEQ ID NO: 347267 - RNA, 32 nt, Homo Sapiens
cuauuuauaugcccugaccaccauaggaugcu

SEQ ID NO: 347268 - RNA, 32 nt, Homo Sapiens
uguugaugguuuauuuugcugugcagaaacuu

SEQ ID NO: 347269 - RNA, 32 nt, Homo Sapiens
cauauaagggaaggagcucagggaggccuccu

SEQ ID NO: 347270 - RNA, 32 nt, Homo Sapiens
gugucccguccccaccccuccagccgcaguuu

SEQ ID NO: 347271 - RNA, 32 nt, Homo Sapiens
ugacugagccuaaaguugagaaaauggguggc

SEQ ID NO: 347272 - RNA, 32 nt, Homo Sapiens
cuauccugggcuaggaggccacaggggcuguc

SEQ ID NO: 347273 - RNA, 32 nt, Homo Sapiens
cuggauaugugucuuacaaauuugcaugcuuu

SEQ ID NO: 347274 - RNA, 32 nt, Homo Sapiens
cagugaaauauaggaagugcugaauuacaaug

SEQ ID NO: 347275 - RNA, 32 nt, Homo Sapiens
gcauucgcacaaacugcuuccuuucuugauuc

SEQ ID NO: 347276 - RNA, 32 nt, Homo Sapiens
ggcauagcuccccgcuucugccugcaccccug

SEQ ID NO: 347277 - RNA, 32 nt, Homo Sapiens
cugaauuuuuauugggucccuguuuucucucc

SEQ ID NO: 347278 - RNA, 32 nt, Homo Sapiens
ugucaugaagauugaaacuguaggugcuuugu

SEQ ID NO: 347279 - RNA, 32 nt, Homo Sapiens
cacgggcccugccccaccugcucgggggaagc

SEQ ID NO: 347280 - RNA, 31 nt, Homo Sapiens
agucacagacagaaaaaaggaaguuaaugua

SEQ ID NO: 347281 - RNA, 32 nt, Homo Sapiens
acaaauugcuggaagcugagcgccuaaagcug

SEQ ID NO: 347282 - RNA, 32 nt, Homo Sapiens
gcuggggccccuugaggcugcgggucuuucuu

SEQ ID NO: 347283 - RNA, 32 nt, Homo Sapiens
gccaagggccccagcccaccccaccgucccac

SEQ ID NO: 347284 - RNA, 32 nt, Homo Sapiens
uauaugccacaugguucuauagauaaauauuu

SEQ ID NO: 347285 - RNA, 32 nt, Homo Sapiens
uaugucuuguauaguucauauucauggcugaa

SEQ ID NO: 347286 - RNA, 32 nt, Homo Sapiens
ccauuaucauuuuacuaaauucuuauauauac

SEQ ID NO: 347287 - RNA, 28 nt, Homo Sapiens
cgcgcggggugcccgccgagaggccaug

SEQ ID NO: 347288 - RNA, 32 nt, Homo Sapiens
ccuagagggagauuguuagaucaugaaacuaa

SEQ ID NO: 347289 - RNA, 32 nt, Homo Sapiens
uaugaaauauauuccuuuguauauugaagaga

SEQ ID NO: 347290 - RNA, 32 nt, Homo Sapiens
ccggccccgcuccagauccccccagcucucgg

SEQ ID NO: 347291 - RNA, 32 nt, Homo Sapiens
uuuguacugggaagaacacagcccaugugcuc

SEQ ID NO: 347292 - RNA, 32 nt, Homo Sapiens
agauuauccaaauauuuuccuaauacuaugug

SEQ ID NO: 347293 - RNA, 32 nt, Homo Sapiens
cccagggcaacacuaggauugguggguuucug

SEQ ID NO: 347294 - RNA, 32 nt, Homo Sapiens
ucaguugccuuauucuaagauuucauaaggcu

SEQ ID NO: 347295 - RNA, 32 nt, Homo Sapiens
uguguucuauguuauauucagaaugggaaaga

SEQ ID NO: 347296 - RNA, 32 nt, Homo Sapiens
cacauaugucucuguggcuuuucuuuugugug

SEQ ID NO: 347297 - RNA, 32 nt, Homo Sapiens
acauuuuccagauggcgaggucacagcagaga

SEQ ID NO: 347298 - RNA, 32 nt, Homo Sapiens
accaugcaggacuagcaucuggccuuuuaaau

SEQ ID NO: 347299 - RNA, 30 nt, Homo Sapiens
gcugccgccuuaauggggggaacugccuug

SEQ ID NO: 347300 - RNA, 32 nt, Homo Sapiens
gucaugaggucuuuuuggcauauacaugaagu

SEQ ID NO: 347301 - RNA, 32 nt, Homo Sapiens
uuguaaaccuucgucucccucucuuuuaccca

SEQ ID NO: 347302 - RNA, 32 nt, Homo Sapiens
aguaauucuugccugcuucuuagucuuuguug

SEQ ID NO: 347303 - RNA, 32 nt, Homo Sapiens
uggacgucucaaagagagucccacauuccagg

SEQ ID NO: 347304 - RNA, 32 nt, Homo Sapiens
acucuuuuaccagagggccuccugguguuugg

SEQ ID NO: 347305 - RNA, 32 nt, Homo Sapiens
uucccaauaaaguggaaacuugaaaaauguua

SEQ ID NO: 347306 - RNA, 32 nt, Homo Sapiens
gccgcgcgaggucccuccucuccgggcguccg

SEQ ID NO: 347307 - RNA, 32 nt, Homo Sapiens
agcaugucaugugaggacggucgggcccugaa

SEQ ID NO: 347308 - RNA, 32 nt, Homo Sapiens
cccgcaggcacaccgcugucagagccgccgag

SEQ ID NO: 347309 - RNA, 32 nt, Homo Sapiens
ccugcugagccggcugcccugggcacccgguu

SEQ ID NO: 347310 - RNA, 32 nt, Homo Sapiens
uucuaagcauuuuuuauaucuguggaguaaua

SEQ ID NO: 347311 - RNA, 32 nt, Homo Sapiens
cuggccccaagcccagggacagucggccuuau

SEQ ID NO: 347312 - RNA, 32 nt, Homo Sapiens
acaaagugauacuccaccugggccacagugcc

SEQ ID NO: 347313 - RNA, 32 nt, Homo Sapiens
cugaagagcuuaacuuuuuaaaggcuuugucc

SEQ ID NO: 347314 - RNA, 32 nt, Homo Sapiens
gagcgccgcgcgccgccgccacugcagcucgc

SEQ ID NO: 347315 - RNA, 32 nt, Homo Sapiens
agccccuggcccagccccagcaggcccucagc

SEQ ID NO: 347316 - RNA, 32 nt, Homo Sapiens
uccacguggccuuugccuggccccacgugcuc

SEQ ID NO: 347317 - RNA, 32 nt, Homo Sapiens
ugcagucagaacuugaagaaagugcuaucccc

SEQ ID NO: 347318 - RNA, 32 nt, Homo Sapiens
accuccagccaaugaaugggaucauucuggau

SEQ ID NO: 347319 - RNA, 32 nt, Homo Sapiens
aagagcugagcggcggccgccgagcgucgagc

SEQ ID NO: 347320 - RNA, 32 nt, Homo Sapiens
ucagaccgggguucucccggaucuggauggcg

SEQ ID NO: 347321 - RNA, 32 nt, Homo Sapiens
ucugauuuaauacauauuauugaauaucaguc

SEQ ID NO: 347322 - RNA, 32 nt, Homo Sapiens
uggcaccguggcgcguggcgcuggagcgggcg

SEQ ID NO: 347323 - RNA, 32 nt, Homo Sapiens
cgcaggaucuggaagcucagccggcagagcug

SEQ ID NO: 347324 - RNA, 31 nt, Homo Sapiens
uaugcagagccccaaggccaccccaccagaa

SEQ ID NO: 347325 - RNA, 32 nt, Homo Sapiens
cguugcagaggucuaggaaggcugguuugaag

SEQ ID NO: 347326 - RNA, 32 nt, Homo Sapiens
ggcucucccucccccagccuggagcacgggag

SEQ ID NO: 347327 - RNA, 32 nt, Homo Sapiens
uucuggaagggcccggauggggccugacugga

SEQ ID NO: 347328 - RNA, 32 nt, Homo Sapiens
ccccgcaggaacgcgccgaggucucccucacc

SEQ ID NO: 347329 - RNA, 27 nt, Homo Sapiens
ggccucgccuccuucagccuccuccuc

SEQ ID NO: 347330 - RNA, 32 nt, Homo Sapiens
ccggacgggacgggaccggcuaggcugggcgc

SEQ ID NO: 347331 - RNA, 32 nt, Homo Sapiens
ggggcaggaaauguaccugaaaaggauuuuag

SEQ ID NO: 347332 - RNA, 32 nt, Homo Sapiens
gcaggaaggaacucaaggugguggcuggagau

SEQ ID NO: 347333 - RNA, 32 nt, Homo Sapiens
acacgcagcagggaggugggcggcagcgucgc

SEQ ID NO: 347334 - RNA, 32 nt, Homo Sapiens
gcagaacccuggggcuagcaguguggggcgcu

SEQ ID NO: 347335 - RNA, 32 nt, Homo Sapiens
ucuagugcucuuguugguuugaagaugaaccg

SEQ ID NO: 347336 - RNA, 32 nt, Homo Sapiens
auuauuguuucaugaugacucuugaugagaug

SEQ ID NO: 347337 - RNA, 32 nt, Homo Sapiens
aauacucguaauuacuuuucaguucuaguuca

SEQ ID NO: 347338 - RNA, 32 nt, Homo Sapiens
uguaacggcggcggcggcugcugcuccagaca

SEQ ID NO: 347339 - RNA, 32 nt, Homo Sapiens
gguugggugugguggcucacacuuguaauccc

SEQ ID NO: 347340 - RNA, 32 nt, Homo Sapiens
cuucaggaugaccccuuggaacugugccgagu

SEQ ID NO: 347341 - RNA, 32 nt, Homo Sapiens
cagccgggauuugggucgcaguucuuguuugu

SEQ ID NO: 347342 - RNA, 32 nt, Homo Sapiens
gaguuguucgcaccacugcaccacaacucaau

SEQ ID NO: 347343 - RNA, 32 nt, Homo Sapiens
auuagcaguaacagacaaauuauuuaguaauc

SEQ ID NO: 347344 - RNA, 32 nt, Homo Sapiens
uccgcccgccuucuccucacucgcccaaacag

SEQ ID NO: 347345 - RNA, 32 nt, Homo Sapiens
ucaaacugcuccaaguggugggaaucagaucu

SEQ ID NO: 347346 - RNA, 32 nt, Homo Sapiens
gcaccgagccgggaaagccuggucuggagccg

SEQ ID NO: 347347 - RNA, 32 nt, Homo Sapiens
ucagaaguucccucucugacccaggcugaguc

SEQ ID NO: 347348 - RNA, 32 nt, Homo Sapiens
aaguaaucuugcuccuaauuauagaaaugauu

SEQ ID NO: 347349 - RNA, 32 nt, Homo Sapiens
gugacggucuggucuugcaggcagaggcccag

SEQ ID NO: 347350 - RNA, 32 nt, Homo Sapiens
ccccgcccuucccgagaccccagccgggcugc

SEQ ID NO: 347351 - RNA, 32 nt, Homo Sapiens
auauauugauuagaaaaacgucaauugucuau

SEQ ID NO: 347352 - RNA, 32 nt, Homo Sapiens
uccuuuuucuuguagagguaaguaaaaucuuc

SEQ ID NO: 347353 - RNA, 32 nt, Homo Sapiens
gagcaccagggauguagaagcuagacaccuga

SEQ ID NO: 347354 - RNA, 32 nt, Homo Sapiens
uuaaaaagcuuuaacuauaaaaacagaagcua

SEQ ID NO: 347355 - RNA, 32 nt, Homo Sapiens
auucuaaaauuuguaaagaaaagcaaaggacc

SEQ ID NO: 347356 - RNA, 32 nt, Homo Sapiens
ccucggcccucccugguuuugucuagucuccc

SEQ ID NO: 347357 - RNA, 32 nt, Homo Sapiens
cguuugaccuaaugaaacugaucauggcuucc

SEQ ID NO: 347358 - RNA, 32 nt, Homo Sapiens
auaaguucauauauuuuuuaauccagcucccc

SEQ ID NO: 347359 - RNA, 32 nt, Homo Sapiens
auguuauuuuaaaaacaaaacaauuguuaagu

SEQ ID NO: 347360 - RNA, 32 nt, Homo Sapiens
aaaauguuacaucugcagaaaaguugaaagua

SEQ ID NO: 347361 - RNA, 32 nt, Homo Sapiens
gguguccacaguguauuagugacauucuuuca

SEQ ID NO: 347362 - RNA, 32 nt, Homo Sapiens
gggggaggcacuggcgggaggccucgggcucc

SEQ ID NO: 347363 - RNA, 32 nt, Homo Sapiens
caugcuuuucccagcccugccccgaaucccug

SEQ ID NO: 347364 - RNA, 32 nt, Homo Sapiens
aagacugaaaaauuauuuacugaaaucuguaa

SEQ ID NO: 347365 - RNA, 32 nt, Homo Sapiens
aggagcaaacuccugacacgccaccuuuaaga

SEQ ID NO: 347366 - RNA, 32 nt, Homo Sapiens
aucuuauuuugugaacuauauguaucagcagu

SEQ ID NO: 347367 - RNA, 32 nt, Homo Sapiens
uccacaaacguuuuuaaaaugugccgggugua

SEQ ID NO: 347368 - RNA, 32 nt, Homo Sapiens
agguacuuccugaaacuuuugauucaauaaug

SEQ ID NO: 347369 - RNA, 32 nt, Homo Sapiens
gagacgggccugggucuuggggacuggagggc

SEQ ID NO: 347370 - RNA, 32 nt, Homo Sapiens
augauguaauaggcauuuucuuuauuugaacc

SEQ ID NO: 347371 - RNA, 32 nt, Homo Sapiens
agcauagaugaaauaacuguccugucacaugu

SEQ ID NO: 347372 - RNA, 32 nt, Homo Sapiens
aggagcccaagccccagcuccauccuccacuu

SEQ ID NO: 347373 - RNA, 32 nt, Homo Sapiens
guaucccuaccuggccucccccuggccucugg

SEQ ID NO: 347374 - RNA, 32 nt, Homo Sapiens
gcuuuuaugugaucaauaaaucuuuuacaaac

SEQ ID NO: 347375 - RNA, 32 nt, Homo Sapiens
uucccugccagcccaagaacuccagcuucccc

SEQ ID NO: 347376 - RNA, 32 nt, Homo Sapiens
cagagauuuuaaucagcuuccuuaauggguau

SEQ ID NO: 347377 - RNA, 32 nt, Homo Sapiens
aauguuuagugucaauacuaaugcucuaauaa

SEQ ID NO: 347378 - RNA, 32 nt, Homo Sapiens
aaacguugcaccggugccugaggugggaggau

SEQ ID NO: 347379 - RNA, 32 nt, Homo Sapiens
aaucccugugugaaaauggguguuaacaaaau

SEQ ID NO: 347380 - RNA, 32 nt, Homo Sapiens
agccccaaagagaaagaagagagcaaaaagcu

SEQ ID NO: 347381 - RNA, 32 nt, Homo Sapiens
ugccccuggacucccgucuccuccuguccucc

SEQ ID NO: 347382 - RNA, 32 nt, Homo Sapiens
guggcgccacaggcgcugggaccgcgggcgga

SEQ ID NO: 347383 - RNA, 32 nt, Homo Sapiens
uggaaaggacauuuuugaagaucaacuauauc

SEQ ID NO: 347384 - RNA, 32 nt, Homo Sapiens
ugauuauaccuacaaccuguucugggacagua

SEQ ID NO: 347385 - RNA, 32 nt, Homo Sapiens
uggcuucauccacagugucggagcagcagcga

SEQ ID NO: 347386 - RNA, 32 nt, Homo Sapiens
aaaauuuauuuuugacucuuuuaucacaugcu

SEQ ID NO: 347387 - RNA, 32 nt, Homo Sapiens
gaggcugguguuggugaucucucaaugacucu

SEQ ID NO: 347388 - RNA, 31 nt, Homo Sapiens
ccagauaugcugcugcugcugcugcugcccc

SEQ ID NO: 347389 - RNA, 32 nt, Homo Sapiens
ccaaugaaauuugaacaucacuaaacaagcaa

SEQ ID NO: 347390 - RNA, 32 nt, Homo Sapiens
guggccaaacuaaauauaauuucuuuaaaaaa

SEQ ID NO: 347391 - RNA, 32 nt, Homo Sapiens
aaaaaugguaauuauuucacgcaucaaccuuu

SEQ ID NO: 347392 - RNA, 32 nt, Homo Sapiens
acagagguguuuuuccuagaaaacgaugacca

SEQ ID NO: 347393 - RNA, 32 nt, Homo Sapiens
ggcugaugcuggaagcaagaagaagccaggga

SEQ ID NO: 347394 - RNA, 32 nt, Homo Sapiens
ucugaacgugugugcgcacgcugggcggguuc

SEQ ID NO: 347395 - RNA, 32 nt, Homo Sapiens
ccuggccgcugagaccggugagggggaggggg

SEQ ID NO: 347396 - RNA, 27 nt, Homo Sapiens
aaugcuuaauaaaugcuugugaaaucc

SEQ ID NO: 347397 - RNA, 32 nt, Homo Sapiens
auaggugggaguuccaaugccaugaugagaac

SEQ ID NO: 347398 - RNA, 32 nt, Homo Sapiens
aguugauaaaugaaaaucacuggccuauguuu

SEQ ID NO: 347399 - RNA, 32 nt, Homo Sapiens
gagcuuguuuuuugugaccuucaugacagcug

SEQ ID NO: 347400 - RNA, 30 nt, Homo Sapiens
ucugaaugaagaugaaguuauuucagacca

SEQ ID NO: 347401 - RNA, 32 nt, Homo Sapiens
ucucucaauuggcuuuugucacuacacauaau

SEQ ID NO: 347402 - RNA, 32 nt, Homo Sapiens
uuuuuuacugguuuguguuuauauuuucgggg

SEQ ID NO: 347403 - RNA, 32 nt, Homo Sapiens
cuccugggacgccuucucgggacacauucuua

SEQ ID NO: 347404 - RNA, 32 nt, Homo Sapiens
uucuacuaagauauuucuuucccuaaccauca

SEQ ID NO: 347405 - RNA, 32 nt, Homo Sapiens
uuugaguggaacaaagugaccucuugcaucca

SEQ ID NO: 347406 - RNA, 32 nt, Homo Sapiens
auaaguuagucauauggccugauuuucccauu

SEQ ID NO: 347407 - RNA, 32 nt, Homo Sapiens
uauccuguauuauuuauuaauauccuaccuag

SEQ ID NO: 347408 - RNA, 32 nt, Homo Sapiens
gguuucaccauguugaucaggcuggucuuuaa

SEQ ID NO: 347409 - RNA, 32 nt, Homo Sapiens
acacugccagcaaccucugcucucuggagagg

SEQ ID NO: 347410 - RNA, 32 nt, Homo Sapiens
acucucauccucaucgucuccuccuacgccuu

SEQ ID NO: 347411 - RNA, 32 nt, Homo Sapiens
uuagacugacuucuauaugugcucuuuuacuc

SEQ ID NO: 347412 - RNA, 29 nt, Homo Sapiens
uuuguuuaaaguuuuuacuuuuugugguu

SEQ ID NO: 347413 - RNA, 32 nt, Homo Sapiens
agguggagcaguuggauucugugcagugcuag

SEQ ID NO: 347414 - RNA, 32 nt, Homo Sapiens
uacuuaacagaaaauaaacugagaaauagaag

SEQ ID NO: 347415 - RNA, 32 nt, Homo Sapiens
gaaguaaagaucaugaagaaagaaauugauag

SEQ ID NO: 347416 - RNA, 32 nt, Homo Sapiens
guccggcagugccagcagcggcguguccuccu

SEQ ID NO: 347417 - RNA, 32 nt, Homo Sapiens
gccgcccucccccgccgccagcaagaaggugg

SEQ ID NO: 347418 - RNA, 32 nt, Homo Sapiens
cuggugcagagcaucagucccacgcugggagu

SEQ ID NO: 347419 - RNA, 32 nt, Homo Sapiens
uggacuucuagccuauggaacuguaagauugg

SEQ ID NO: 347420 - RNA, 32 nt, Homo Sapiens
uuuuaaauaaguagaaugacaguucaaguuag

SEQ ID NO: 347421 - RNA, 32 nt, Homo Sapiens
cuuuagcuuuuaaucauuuuuaccaauuugaa

SEQ ID NO: 347422 - RNA, 32 nt, Homo Sapiens
ugaccaagacaauuaaugauguuuugaaauug

SEQ ID NO: 347423 - RNA, 32 nt, Homo Sapiens
ugaccugucacuauaauauacuguauguuuac

SEQ ID NO: 347424 - RNA, 32 nt, Homo Sapiens
ggcgacucuauacucuccgcccgccccagggc

SEQ ID NO: 347425 - RNA, 32 nt, Homo Sapiens
gggcagcgggcucgcuccaggccgucgggggc

SEQ ID NO: 347426 - RNA, 32 nt, Homo Sapiens
uugcaggugaauggcuggggccccaaauccag

SEQ ID NO: 347427 - RNA, 32 nt, Homo Sapiens
guuguacguucacaucaggucccggcccgccg

SEQ ID NO: 347428 - RNA, 32 nt, Homo Sapiens
guaccugagaaccucacugaugugguagagaa

SEQ ID NO: 347429 - RNA, 32 nt, Homo Sapiens
gcaucauggaggagggcgucuugagccuggug

SEQ ID NO: 347430 - RNA, 32 nt, Homo Sapiens
gcgaacucuuugccaaccaaauaucaucauga

SEQ ID NO: 347431 - RNA, 32 nt, Homo Sapiens
cugugaagaaacaugaacauaacucaauccag

SEQ ID NO: 347432 - RNA, 29 nt, Homo Sapiens
aacaaaauauguauguccgaagggaaaaa

SEQ ID NO: 347433 - RNA, 32 nt, Homo Sapiens
cuuugcucacugcaacauccaccucaugggcu

SEQ ID NO: 347434 - RNA, 32 nt, Homo Sapiens
cggaagcggcggcggcgcgaugaccacgcuac

SEQ ID NO: 347435 - RNA, 32 nt, Homo Sapiens
agugacgaacagagggugcccuuggccaaugu

SEQ ID NO: 347436 - RNA, 32 nt, Homo Sapiens
cugaggucaggaguacgagaucagccuggcca

SEQ ID NO: 347437 - RNA, 32 nt, Homo Sapiens
gguccucgaagacgcguccgccgccgugcccg

SEQ ID NO: 347438 - RNA, 32 nt, Homo Sapiens
cucccccggccgccgaccgcuccccggaaccg

SEQ ID NO: 347439 - RNA, 32 nt, Homo Sapiens
guaccugcucccggccgcugcccguccuccca

SEQ ID NO: 347440 - RNA, 32 nt, Homo Sapiens
auggauuucuaaaaguaaauucucauauauuu

SEQ ID NO: 347441 - RNA, 32 nt, Homo Sapiens
uucauuggggaagagggagugaggccuaggca

SEQ ID NO: 347442 - RNA, 32 nt, Homo Sapiens
guuucccgucuggguccaacuccuuucuuugu

SEQ ID NO: 347443 - RNA, 32 nt, Homo Sapiens
cgggccuuuucuuucagcacaaacgucaguuu

SEQ ID NO: 347444 - RNA, 32 nt, Homo Sapiens
cuccaggccugugaugggaggggcugcuguga

SEQ ID NO: 347445 - RNA, 32 nt, Homo Sapiens
ucacgcccucucuuccucucagccuuccgccc

SEQ ID NO: 347446 - RNA, 32 nt, Homo Sapiens
cucuuugggcguccccggauaccgccugacgu

SEQ ID NO: 347447 - RNA, 32 nt, Homo Sapiens
agaucacccugcucugcccagcccccagcccu

SEQ ID NO: 347448 - RNA, 32 nt, Homo Sapiens
accacaccuggcuaauuuuuuauuuuuuguag

SEQ ID NO: 347449 - RNA, 32 nt, Homo Sapiens
gagccucgcgggggcgggggcggggcgccaag

SEQ ID NO: 347450 - RNA, 32 nt, Homo Sapiens
agugucaguuuaggaaauuauuacuacuuuga

SEQ ID NO: 347451 - RNA, 32 nt, Homo Sapiens
agagcugaugguccaauaaggggggugugagc

SEQ ID NO: 347452 - RNA, 32 nt, Homo Sapiens
cugaggccuuacauccugggggagaggggaac

SEQ ID NO: 347453 - RNA, 32 nt, Homo Sapiens
cuaggaugugauuucaucugguaaaugucuua

SEQ ID NO: 347454 - RNA, 32 nt, Homo Sapiens
agucuggcugcugcccgggccccuggaggcac

SEQ ID NO: 347455 - RNA, 32 nt, Homo Sapiens
cggaacccgcggcuucccuggcucccgugagc

SEQ ID NO: 347456 - RNA, 32 nt, Homo Sapiens
uguucuaccuggauugucaacaacugaaagua

SEQ ID NO: 347457 - RNA, 32 nt, Homo Sapiens
uaacuucacagcaguuaaguuaaacuaaaaga

SEQ ID NO: 347458 - RNA, 32 nt, Homo Sapiens
ggugagaaagcuacuuuguggugucuagguuu

SEQ ID NO: 347459 - RNA, 32 nt, Homo Sapiens
aaguuuacugaaucagaggaaucagacagagg

SEQ ID NO: 347460 - RNA, 32 nt, Homo Sapiens
gauuaaaaguguguuuaccauacuguauaauu

SEQ ID NO: 347461 - RNA, 32 nt, Homo Sapiens
cugcagugguaaugugugggacaccuugacca

SEQ ID NO: 347462 - RNA, 32 nt, Homo Sapiens
cagggcgcccccuccgcccgccuccugcuucc

SEQ ID NO: 347463 - RNA, 32 nt, Homo Sapiens
uggggcuggcugccagcucaguucugggagcg

SEQ ID NO: 347464 - RNA, 32 nt, Homo Sapiens
uguuuggaauaugcuuugauaaguuaugauuu

SEQ ID NO: 347465 - RNA, 32 nt, Homo Sapiens
cgcugcccucaggcuugaggggugcuuggggc

SEQ ID NO: 347466 - RNA, 32 nt, Homo Sapiens
ccccagugaccguguuacagucuaggcuuaag

SEQ ID NO: 347467 - RNA, 32 nt, Homo Sapiens
cgaacacaguuuaugaaacuaccugcacuccc

SEQ ID NO: 347468 - RNA, 32 nt, Homo Sapiens
ccagaggggaaggggcugcugcuugcaucagc

SEQ ID NO: 347469 - RNA, 32 nt, Homo Sapiens
aaauccgccgguugcggucgccggcaaaaacc

SEQ ID NO: 347470 - RNA, 32 nt, Homo Sapiens
uguguuccaaauaaucuuaagcugaguugugg

SEQ ID NO: 347471 - RNA, 32 nt, Homo Sapiens
agcaaggggcucuggaggccagaaaaugccua

SEQ ID NO: 347472 - RNA, 32 nt, Homo Sapiens
uuaacuuuguguauauaguguaaauaucccca

SEQ ID NO: 347473 - RNA, 32 nt, Homo Sapiens
cgucaccacagugcugcccuggcgagggcugc

SEQ ID NO: 347474 - RNA, 32 nt, Homo Sapiens
uuauagaagagaagagcauguuagaauuuaug

SEQ ID NO: 347475 - RNA, 31 nt, Homo Sapiens
caggucuugcaggugucgacugucuuccggc

SEQ ID NO: 347476 - RNA, 29 nt, Homo Sapiens
caccauggacaaccccaccaccacccagu

SEQ ID NO: 347477 - RNA, 32 nt, Homo Sapiens
guaaaguauuguuuuuaaauauugccagauuu

SEQ ID NO: 347478 - RNA, 32 nt, Homo Sapiens
ggggggccgacacccccaccucccucccggac

SEQ ID NO: 347479 - RNA, 32 nt, Homo Sapiens
ggggggcugacacccccaccucccucccggau

SEQ ID NO: 347480 - RNA, 32 nt, Homo Sapiens
ggccuaauuuucucugucauucccucagcaac

SEQ ID NO: 347481 - RNA, 32 nt, Homo Sapiens
agggagggggucuucagcaagcaccagccccc

SEQ ID NO: 347482 - RNA, 32 nt, Homo Sapiens
aggggcucaggucgugugggccccagugcuag

SEQ ID NO: 347483 - RNA, 32 nt, Homo Sapiens
gugggggcgggguggggggucuggacggaguc

SEQ ID NO: 347484 - RNA, 32 nt, Homo Sapiens
gguacauguucccaccucaugggaucucuguu

SEQ ID NO: 347485 - RNA, 31 nt, Homo Sapiens
caccugucugccugggcuccaagugggcagg

SEQ ID NO: 347486 - RNA, 32 nt, Homo Sapiens
uucauuuugacuguuccauagcaaaauaaagc

SEQ ID NO: 347487 - RNA, 32 nt, Homo Sapiens
uuuauuuccuguagcuugacuaccacacaaau

SEQ ID NO: 347488 - RNA, 32 nt, Homo Sapiens
accuucgcuccggaggucgccucgguaaaccu

SEQ ID NO: 347489 - RNA, 32 nt, Homo Sapiens
gcagacaauugaggcuuugaaaaggaaagugg

SEQ ID NO: 347490 - RNA, 32 nt, Homo Sapiens
gaggcaguugguugggggcgggcaggcaggaa

SEQ ID NO: 347491 - RNA, 32 nt, Homo Sapiens
ggacacugauaaaauucagcuauauuguugac

SEQ ID NO: 347492 - RNA, 32 nt, Homo Sapiens
gcuucuuaaaauugauauguugaaacuuuaau

SEQ ID NO: 347493 - RNA, 32 nt, Homo Sapiens
ugccagcccugagugacccccucccccaacuu

SEQ ID NO: 347494 - RNA, 32 nt, Homo Sapiens
cuuguaagauaguuuucuauuuccuucaguaa

SEQ ID NO: 347495 - RNA, 32 nt, Homo Sapiens
gcgugguggugggcaucuguaauccuagcugc

SEQ ID NO: 347496 - RNA, 32 nt, Homo Sapiens
uuuuaagguugagacuccaagucuccuaaaau

SEQ ID NO: 347497 - RNA, 32 nt, Homo Sapiens
ccugggggcgggacuccucccugggggugggg

SEQ ID NO: 347498 - RNA, 32 nt, Homo Sapiens
agacacacguaugccauggccccuucagacug

SEQ ID NO: 347499 - RNA, 32 nt, Homo Sapiens
auggacuggaacucccaauaccccugacaugg

SEQ ID NO: 347500 - RNA, 32 nt, Homo Sapiens
gggccgccgacccaaaggagccgucugacuau

SEQ ID NO: 347501 - RNA, 32 nt, Homo Sapiens
ggugcuauaaaagaagcagggggguccuuuga

SEQ ID NO: 347502 - RNA, 30 nt, Homo Sapiens
agugaauggcggcggcggcugggaugcugc

SEQ ID NO: 347503 - RNA, 32 nt, Homo Sapiens
gaauuugagagaaauaguaauuugauuauuuc

SEQ ID NO: 347504 - RNA, 32 nt, Homo Sapiens
gcucauuucacaaucagcccaaggcugggaaa

SEQ ID NO: 347505 - RNA, 32 nt, Homo Sapiens
ugcgccagcuccggccgcugcccgcuuuaaag

SEQ ID NO: 347506 - RNA, 32 nt, Homo Sapiens
aauuagccgggcgcgguggcgggcgccugugg

SEQ ID NO: 347507 - RNA, 32 nt, Homo Sapiens
gggaccugccagcaccguuuuugucguuagcu

SEQ ID NO: 347508 - RNA, 32 nt, Homo Sapiens
agaaguuauuuuucccuuccagaggggucuau

SEQ ID NO: 347509 - RNA, 32 nt, Homo Sapiens
uucaggaguaggauccagaaaacuauauuuaa

SEQ ID NO: 347510 - RNA, 32 nt, Homo Sapiens
gucagcgggcuccgccaugcgcggcacgcauc

SEQ ID NO: 347511 - RNA, 32 nt, Homo Sapiens
ugaguacucugcagcuggcgaggaguugguug

SEQ ID NO: 347512 - RNA, 32 nt, Homo Sapiens
cauacgaucugugcuucagugggacacuacau

SEQ ID NO: 347513 - RNA, 32 nt, Homo Sapiens
cauuguaaaaauuuuuaaaacacagaaacuau

SEQ ID NO: 347514 - RNA, 32 nt, Homo Sapiens
auuaaaaagagauaccaaugguuuacacuuua

SEQ ID NO: 347515 - RNA, 32 nt, Homo Sapiens
uaagaggaaguuuaggaagcagcccaggaggu

SEQ ID NO: 347516 - RNA, 32 nt, Homo Sapiens
ccaguguuuaggguacgugcuuccuaaguaaa

SEQ ID NO: 347517 - RNA, 32 nt, Homo Sapiens
cucuguucuggugcgggcaggaggcgggagcc

SEQ ID NO: 347518 - RNA, 32 nt, Homo Sapiens
agaaagggaggguggagggugaggccaaauca

SEQ ID NO: 347519 - RNA, 32 nt, Homo Sapiens
ucaaauuucuucacagauuucaagucucucaa

SEQ ID NO: 347520 - RNA, 32 nt, Homo Sapiens
guccccucaucuccaaagaaaaguucaucgga

SEQ ID NO: 347521 - RNA, 32 nt, Homo Sapiens
cuuccccccgccgccccuccccggacucccca

SEQ ID NO: 347522 - RNA, 32 nt, Homo Sapiens
uuucaggaggcgugccugggaauccaggaacu

SEQ ID NO: 347523 - RNA, 32 nt, Homo Sapiens
ggucuucagaucuagauucccaucaguugaau

SEQ ID NO: 347524 - RNA, 32 nt, Homo Sapiens
aaaccuucgugcccggcccguccucgcccccg

SEQ ID NO: 347525 - RNA, 32 nt, Homo Sapiens
cuaccuucugguucccaauugggagagcacau

SEQ ID NO: 347526 - RNA, 32 nt, Homo Sapiens
ucacaggaccccggagaguccuggcaugguau

SEQ ID NO: 347527 - RNA, 32 nt, Homo Sapiens
gacagauaauauuuuugaaacuuugaaaagua

SEQ ID NO: 347528 - RNA, 32 nt, Homo Sapiens
cuuggaacagagccugacauauacuaggcacu

SEQ ID NO: 347529 - RNA, 28 nt, Homo Sapiens
cacccgguuacaggcccaaaaacugcga

SEQ ID NO: 347530 - RNA, 32 nt, Homo Sapiens
auuauaggcguccgccaccaugccuggcuaau

SEQ ID NO: 347531 - RNA, 32 nt, Homo Sapiens
uguuugcaugcgccaggcggugggcagcgggg

SEQ ID NO: 347532 - RNA, 32 nt, Homo Sapiens
ggcgcuugaaaaugcaguagugaauguggaac

SEQ ID NO: 347533 - RNA, 29 nt, Homo Sapiens
caaaauggaaggguuuccccucguccccc

SEQ ID NO: 347534 - RNA, 32 nt, Homo Sapiens
gagacgcuggucaggcuccgcggcgcagcucg

SEQ ID NO: 347535 - RNA, 32 nt, Homo Sapiens
cauuuuauuaauuuauacuaaucuucauauuu

SEQ ID NO: 347536 - RNA, 32 nt, Homo Sapiens
cugguucuuccucuccuuuagugucuuuccug

SEQ ID NO: 347537 - RNA, 32 nt, Homo Sapiens
gcacucugcccccauuuccccgauguccccug

SEQ ID NO: 347538 - RNA, 32 nt, Homo Sapiens
uuuccuucccaauugccucucagggguaguga

SEQ ID NO: 347539 - RNA, 30 nt, Homo Sapiens
cuuuuaccacuugaauugaucuucuugcca

SEQ ID NO: 347540 - RNA, 31 nt, Homo Sapiens
caaagugagccccagauaaaaacaaaaacuu

SEQ ID NO: 347541 - RNA, 32 nt, Homo Sapiens
cccgacucuaucacaagaagguaucucaaauc

SEQ ID NO: 347542 - RNA, 32 nt, Homo Sapiens
aaaaaccauugugucuugagguaaaugaggag

SEQ ID NO: 347543 - RNA, 32 nt, Homo Sapiens
acuggcgguuucccggccggacugagaagggg

SEQ ID NO: 347544 - RNA, 32 nt, Homo Sapiens
ccagguguucccuggaaaggucaagugagucu

SEQ ID NO: 347545 - RNA, 32 nt, Homo Sapiens
caggccccugucacgcuucucugugcccacgu

SEQ ID NO: 347546 - RNA, 32 nt, Homo Sapiens
guuguagucgggacaccccggccgcgggugau

SEQ ID NO: 347547 - RNA, 32 nt, Homo Sapiens
gcuggagaagacugagguccaaggcuugaagc

SEQ ID NO: 347548 - RNA, 32 nt, Homo Sapiens
aaagauuuuuauucugauuuuuucauaaucaa

SEQ ID NO: 347549 - RNA, 32 nt, Homo Sapiens
ucgaccugugacucacacccaguggacagugc

SEQ ID NO: 347550 - RNA, 32 nt, Homo Sapiens
cacugaacgcucucggaaagcucccaucauuc

SEQ ID NO: 347551 - RNA, 32 nt, Homo Sapiens
augggcgcgggccagggacgcugagcggucgc

SEQ ID NO: 347552 - RNA, 32 nt, Homo Sapiens
uuagagaagaccaaaaaacaaacaaacaaacu

SEQ ID NO: 347553 - RNA, 32 nt, Homo Sapiens
auuccagaaggagggaaggaaauccugggcgu

SEQ ID NO: 347554 - RNA, 32 nt, Homo Sapiens
auucugcccucccggcuucccaguaagcacac

SEQ ID NO: 347555 - RNA, 32 nt, Homo Sapiens
agaauccugugcugugaacagugagagaguuu

SEQ ID NO: 347556 - RNA, 32 nt, Homo Sapiens
auguaggcaagagauguuugcuuuuguuaaaa

SEQ ID NO: 347557 - RNA, 32 nt, Homo Sapiens
ucaggcaaacuuaagguaccugaggagaauuu

SEQ ID NO: 347558 - RNA, 32 nt, Homo Sapiens
auauaugaacaaaccugguauaaaaugaaugu

SEQ ID NO: 347559 - RNA, 32 nt, Homo Sapiens
uaagcaaaaucaacuauauaggaggaaaaauc

SEQ ID NO: 347560 - RNA, 32 nt, Homo Sapiens
ccccuccugggccuccccggccaggcacgugg

SEQ ID NO: 347561 - RNA, 32 nt, Homo Sapiens
ccagcugaccuguccuggacgcagcauaacua

SEQ ID NO: 347562 - RNA, 32 nt, Homo Sapiens
uacagauguuuuuaauucuacuauuuuaucug

SEQ ID NO: 347563 - RNA, 32 nt, Homo Sapiens
uucacaaaacgaaaugcuaugacuguaucuug

SEQ ID NO: 347564 - RNA, 32 nt, Homo Sapiens
cuuugagcuacugccgucagugcugugcugug

SEQ ID NO: 347565 - RNA, 32 nt, Homo Sapiens
guaauguggucuuuuuuuuagauuuugugcag

SEQ ID NO: 347566 - RNA, 32 nt, Homo Sapiens
cauuauauccguucuuuuuuuuuuuuuaaaaa

SEQ ID NO: 347567 - RNA, 32 nt, Homo Sapiens
ugaguccugugcuguuggcaaagugccaggca

SEQ ID NO: 347568 - RNA, 32 nt, Homo Sapiens
uauucuguauugccauggucuuuccacuuuca

SEQ ID NO: 347569 - RNA, 32 nt, Homo Sapiens
agcaccgcccgcgucccggcccccggcaccau

SEQ ID NO: 347570 - RNA, 32 nt, Homo Sapiens
acaaaggccccggagcugggggaccacaaaca

SEQ ID NO: 347571 - RNA, 32 nt, Homo Sapiens
ugaugugugucauaaaaccuuuagacaacuag

SEQ ID NO: 347572 - RNA, 32 nt, Homo Sapiens
cccuaaggaauuuuucuucccuccucauucuu

SEQ ID NO: 347573 - RNA, 32 nt, Homo Sapiens
ggggagucugguuuuucucuucauccugucuc

SEQ ID NO: 347574 - RNA, 32 nt, Homo Sapiens
uggccuguuugccugccugaggaguuacaguu

SEQ ID NO: 347575 - RNA, 32 nt, Homo Sapiens
uuuuaaaggugauucuuggguuugaagacauu

SEQ ID NO: 347576 - RNA, 32 nt, Homo Sapiens
ugcaggcccaaugcagaagaguauuaagaaag

SEQ ID NO: 347577 - RNA, 32 nt, Homo Sapiens
cuacccuauucucaccuucucuccgcccacau

SEQ ID NO: 347578 - RNA, 32 nt, Homo Sapiens
cccagguuuggucucagggggaccccagggau

SEQ ID NO: 347579 - RNA, 32 nt, Homo Sapiens
uauugucucguguuuuuauuuuuacaccauau

SEQ ID NO: 347580 - RNA, 32 nt, Homo Sapiens
aaguggccugcugcuccgaggacccagcucgc

SEQ ID NO: 347581 - RNA, 32 nt, Homo Sapiens
cguaugcacucucaggggcagcgcccaccugc

SEQ ID NO: 347582 - RNA, 32 nt, Homo Sapiens
auggcagaauauuuauacaugaaaaaauaauu

SEQ ID NO: 347583 - RNA, 32 nt, Homo Sapiens
agcugcuaccagguuucaggggcucacugagc

SEQ ID NO: 347584 - RNA, 32 nt, Homo Sapiens
cgccgagcucgcgacccccgagggagccacgg

SEQ ID NO: 347585 - RNA, 32 nt, Homo Sapiens
auucauaggaccagcgugucccccacauccuc

SEQ ID NO: 347586 - RNA, 32 nt, Homo Sapiens
ccauacccuguguauguaugcauguuuuugua

SEQ ID NO: 347587 - RNA, 32 nt, Homo Sapiens
cuccagcgcgccccuucccuccugccgcagcc

SEQ ID NO: 347588 - RNA, 32 nt, Homo Sapiens
cacccuccgggcauccucuccgggcccagcuc

SEQ ID NO: 347589 - RNA, 32 nt, Homo Sapiens
gauggcaccagggacuggcagcuccacugccg

SEQ ID NO: 347590 - RNA, 32 nt, Homo Sapiens
uuucugucccucgcacagaagccaguaauuag

SEQ ID NO: 347591 - RNA, 32 nt, Homo Sapiens
agugaucuuauaaccucauuguuuccuaaucu

SEQ ID NO: 347592 - RNA, 32 nt, Homo Sapiens
gccgacccguggcugggucggagcuccauguu

SEQ ID NO: 347593 - RNA, 32 nt, Homo Sapiens
aacuucucagaaaaaacauuugaaaacaaaga

SEQ ID NO: 347594 - RNA, 32 nt, Homo Sapiens
uucacuguauaaauaggagaggaugagagccc

SEQ ID NO: 347595 - RNA, 32 nt, Homo Sapiens
auuuguggaaagcggcuuggcuuggaagauuc

SEQ ID NO: 347596 - RNA, 32 nt, Homo Sapiens
agccucugacaguccguccagguguugguaaa

SEQ ID NO: 347597 - RNA, 32 nt, Homo Sapiens
uuggcuggcgaccagcaggauugcuccaggau

SEQ ID NO: 347598 - RNA, 32 nt, Homo Sapiens
uagcaggcaacaguucuccuccccuaguggca

SEQ ID NO: 347599 - RNA, 29 nt, Homo Sapiens
caacaaauauguauggagcaucuacuaug

SEQ ID NO: 347600 - RNA, 32 nt, Homo Sapiens
ccaugggggcccccucgccacccccagccccu

SEQ ID NO: 347601 - RNA, 32 nt, Homo Sapiens
gauccuucucucuggaggaagagggaagccca

SEQ ID NO: 347602 - RNA, 32 nt, Homo Sapiens
ugugccccuuugcugcuggcuaccacucuucc

SEQ ID NO: 347603 - RNA, 32 nt, Homo Sapiens
auaugguacaagcaauaaaacacagggcuggg

SEQ ID NO: 347604 - RNA, 32 nt, Homo Sapiens
agcaccugaguuaaaaagugauuuuuauguua

SEQ ID NO: 347605 - RNA, 32 nt, Homo Sapiens
uuuaaaugggagauguaagugauuuaauucau

SEQ ID NO: 347606 - RNA, 32 nt, Homo Sapiens
aagugcugcaguuuagauaccucuggaauuuu

SEQ ID NO: 347607 - RNA, 32 nt, Homo Sapiens
cagcuguguuggauuugguuuguaguacugaa

SEQ ID NO: 347608 - RNA, 32 nt, Homo Sapiens
gccccucucucuucuuuuuucuuguugcaaaa

SEQ ID NO: 347609 - RNA, 32 nt, Homo Sapiens
aguugaauagauuaguuuuucucaguaacuua

SEQ ID NO: 347610 - RNA, 32 nt, Homo Sapiens
ggucucuggacgcugcgcggcgcuccuaggag

SEQ ID NO: 347611 - RNA, 32 nt, Homo Sapiens
gcuggucuugaacuccugacguggugauccac

SEQ ID NO: 347612 - RNA, 28 nt, Homo Sapiens
aggacagggaaaccgccgaggugggggg

SEQ ID NO: 347613 - RNA, 32 nt, Homo Sapiens
gaggcgccugucgcgcgccggcccgcgucugc

SEQ ID NO: 347614 - RNA, 32 nt, Homo Sapiens
uggugaccuuuaguuacccagugucaucuauu

SEQ ID NO: 347615 - RNA, 32 nt, Homo Sapiens
caugccccuuccuuccuucuccugggacuggu

SEQ ID NO: 347616 - RNA, 32 nt, Homo Sapiens
uuguuauauaucuaucauggugaucaaugacc

SEQ ID NO: 347617 - RNA, 32 nt, Homo Sapiens
guggcccuugcacuagcagcucuggauggggg

SEQ ID NO: 347618 - RNA, 32 nt, Homo Sapiens
cacacgcauagcaaaccuccaaugcauguaca

SEQ ID NO: 347619 - RNA, 32 nt, Homo Sapiens
cugagccccccgcagcggcccgagcuggcgga

SEQ ID NO: 347620 - RNA, 32 nt, Homo Sapiens
gccaagucccccuguauugggaagugugugau

SEQ ID NO: 347621 - RNA, 32 nt, Homo Sapiens
uuucuacacauaaaguuuuuaaaaugaauuuu

SEQ ID NO: 347622 - RNA, 32 nt, Homo Sapiens
gcacugagccgcauaagccggcgcugggcugg

SEQ ID NO: 347623 - RNA, 32 nt, Homo Sapiens
ugcauguaaauuuuaaauggguacuuugugca

SEQ ID NO: 347624 - RNA, 32 nt, Homo Sapiens
uccaggcuuucaauguuuguucauuacuuuuu

SEQ ID NO: 347625 - RNA, 32 nt, Homo Sapiens
cauuuggggacgcucucagcucucggcgcacg

SEQ ID NO: 347626 - RNA, 32 nt, Homo Sapiens
uuauuuuuucuuucuuucuuuuuaaauagaga

SEQ ID NO: 347627 - RNA, 28 nt, Homo Sapiens
uucaccguguuagccaggauggacucca

SEQ ID NO: 347628 - RNA, 32 nt, Homo Sapiens
guuaaaaggacauuguuuuuauagggucauuu

SEQ ID NO: 347629 - RNA, 32 nt, Homo Sapiens
auggaaggcuuugccaugggccugcugcguca

SEQ ID NO: 347630 - RNA, 32 nt, Homo Sapiens
agaacaugauaccacuccaaguaaaucauugc

SEQ ID NO: 347631 - RNA, 32 nt, Homo Sapiens
aaaucccccaaguucucaugauccuugcuucc

SEQ ID NO: 347632 - RNA, 32 nt, Homo Sapiens
guggaauggggcggggugggggguggccauag

SEQ ID NO: 347633 - RNA, 27 nt, Homo Sapiens
ccauggagggcggcuucggcuccgauu

SEQ ID NO: 347634 - RNA, 32 nt, Homo Sapiens
aaguagauggcaaugguuaugauaaaaaggga

SEQ ID NO: 347635 - RNA, 32 nt, Homo Sapiens
aaaccacuuccacuuuccaggaggcuggaugg

SEQ ID NO: 347636 - RNA, 32 nt, Homo Sapiens
agcccagcccaccucccucccccggccccugg

SEQ ID NO: 347637 - RNA, 32 nt, Homo Sapiens
auuucuuucugucuuucaaaccuuacagcuuu

SEQ ID NO: 347638 - RNA, 32 nt, Homo Sapiens
cccuuggcccagcugggaccaaacucugauca

SEQ ID NO: 347639 - RNA, 32 nt, Homo Sapiens
ucccucugccccccagcagccggcaccaugga

SEQ ID NO: 347640 - RNA, 32 nt, Homo Sapiens
aaguuaaaugucagcauucccuuuaaaagugu

SEQ ID NO: 347641 - RNA, 32 nt, Homo Sapiens
aaccuuccuguuaaauucgguguauggauuuu

SEQ ID NO: 347642 - RNA, 32 nt, Homo Sapiens
uuuucuauuguugcaaugaccuugcuuugcuc

SEQ ID NO: 347643 - RNA, 32 nt, Homo Sapiens
ucagacaacuucuuccuucuccguggagcuca

SEQ ID NO: 347644 - RNA, 32 nt, Homo Sapiens
ugcaaggaccugcggcaguccuguuggaaaau

SEQ ID NO: 347645 - RNA, 32 nt, Homo Sapiens
uuucuuucucuuucuuuuuuuuuuuuuuacuu

SEQ ID NO: 347646 - RNA, 32 nt, Homo Sapiens
cugaguguuuuuugacaaucacuuccuuaaag

SEQ ID NO: 347647 - RNA, 32 nt, Homo Sapiens
uacauuuuuuaaacugcuauuuucugaaugga

SEQ ID NO: 347648 - RNA, 32 nt, Homo Sapiens
gccgcugcaagucugagcugccucagcuguga

SEQ ID NO: 347649 - RNA, 32 nt, Homo Sapiens
uguuucaauauugguucaguacugccuaaauu

SEQ ID NO: 347650 - RNA, 32 nt, Homo Sapiens
gucugaauagaaucuggaguauuuuuaacagu

SEQ ID NO: 347651 - RNA, 32 nt, Homo Sapiens
gcugacccucagucuccuccccugcccucuac

SEQ ID NO: 347652 - RNA, 32 nt, Homo Sapiens
cuuccagaaauaaaaguguuuccaugggaaaa

SEQ ID NO: 347653 - RNA, 30 nt, Homo Sapiens
cugugauucuaagugggggaaauaggcuuu

SEQ ID NO: 347654 - RNA, 32 nt, Homo Sapiens
aggcgccgaggcuccaccgcgcagccacagaa

SEQ ID NO: 347655 - RNA, 30 nt, Homo Sapiens
gaauggaauauccucugaucagcugaagca

SEQ ID NO: 347656 - RNA, 32 nt, Homo Sapiens
uacauguaugugccaccacaccuggcuaauuu

SEQ ID NO: 347657 - RNA, 32 nt, Homo Sapiens
ugaaggugaugguaacugccacagcaaaggca

SEQ ID NO: 347658 - RNA, 32 nt, Homo Sapiens
uguaagaugcaauuaaaauagauggaagacaa

SEQ ID NO: 347659 - RNA, 32 nt, Homo Sapiens
aaauggaaggauuguuccuuagagcuucucug

SEQ ID NO: 347660 - RNA, 32 nt, Homo Sapiens
gcagaucaaaaauacaguauucgugggaugca

SEQ ID NO: 347661 - RNA, 32 nt, Homo Sapiens
uccaacaagggucuuuuggcugccuggcccca

SEQ ID NO: 347662 - RNA, 32 nt, Homo Sapiens
ucacuagaacauccggcagcucuguucugcug

SEQ ID NO: 347663 - RNA, 32 nt, Homo Sapiens
gagaaacgaucugaucuucuuaaacuucaagg

SEQ ID NO: 347664 - RNA, 32 nt, Homo Sapiens
ugccucuccuuaaaugcuucuagggaccagca

SEQ ID NO: 347665 - RNA, 32 nt, Homo Sapiens
cugacuuugucaaacuugcauuuauaugaaaa

SEQ ID NO: 347666 - RNA, 32 nt, Homo Sapiens
cuaaccuacucugaaauugugauucaaaagca

SEQ ID NO: 347667 - RNA, 32 nt, Homo Sapiens
gucugauguuuuuucuuuuguagugucuuaug

SEQ ID NO: 347668 - RNA, 32 nt, Homo Sapiens
augaagggauauaaaaauaaugucauagguaa

SEQ ID NO: 347669 - RNA, 32 nt, Homo Sapiens
uucaaaaaacaaaagugaauuuacugguaugu

SEQ ID NO: 347670 - RNA, 32 nt, Homo Sapiens
gcugggugaggguggcgggccugcggggacau

SEQ ID NO: 347671 - RNA, 32 nt, Homo Sapiens
uggucguagcgguggcggaggaggcggguacg

SEQ ID NO: 347672 - RNA, 32 nt, Homo Sapiens
caggugcucgcggccuggcuccauggcccugg

SEQ ID NO: 347673 - RNA, 32 nt, Homo Sapiens
cuaauuuuguaagccugagaucaauaagaaau

SEQ ID NO: 347674 - RNA, 32 nt, Homo Sapiens
ggacaacgggcgucgccggcgccgugugacuu

SEQ ID NO: 347675 - RNA, 32 nt, Homo Sapiens
ucuguuuuuagcacuguagacacaacauuaug

SEQ ID NO: 347676 - RNA, 32 nt, Homo Sapiens
agaggagaacgauguuuaacucggucaaccug

SEQ ID NO: 347677 - RNA, 32 nt, Homo Sapiens
cuggcuucuggccacugccuccucccucuucu

SEQ ID NO: 347678 - RNA, 29 nt, Homo Sapiens
uccagugugacuuuaucuucugggugguu

SEQ ID NO: 347679 - RNA, 32 nt, Homo Sapiens
ucggccacgcccgcugcgggacccgugguucc

SEQ ID NO: 347680 - RNA, 32 nt, Homo Sapiens
ugcugagaagggggcagguaaagcagagauuu

SEQ ID NO: 347681 - RNA, 32 nt, Homo Sapiens
caggugcccagucgcuauccacagcucgguuc

SEQ ID NO: 347682 - RNA, 32 nt, Homo Sapiens
gcucuucugaacaaauaaaggagcaugccgau

SEQ ID NO: 347683 - RNA, 32 nt, Homo Sapiens
guauuagguugaaccauagaaacugcuauucu

SEQ ID NO: 347684 - RNA, 32 nt, Homo Sapiens
cugaggcggcugaggcggcugaggggcugagg

SEQ ID NO: 347685 - RNA, 32 nt, Homo Sapiens
caaacacauaucuuucugauaaaaacaucucc

SEQ ID NO: 347686 - RNA, 32 nt, Homo Sapiens
ucagauugacuauuuuaaccaauauugucacg

SEQ ID NO: 347687 - RNA, 32 nt, Homo Sapiens
gacguggcggcccagcugggcgaguaucugga

SEQ ID NO: 347688 - RNA, 32 nt, Homo Sapiens
ggcggcacaccuguagcacaccugcguaaugu

SEQ ID NO: 347689 - RNA, 32 nt, Homo Sapiens
ucaccugcgcgggaucgcugcgggaaaccagg

SEQ ID NO: 347690 - RNA, 32 nt, Homo Sapiens
uaaugguuuccaaacuguaucguagccgucca

SEQ ID NO: 347691 - RNA, 32 nt, Homo Sapiens
ggggcgcguggcccagauaagaauagguguuc

SEQ ID NO: 347692 - RNA, 32 nt, Homo Sapiens
cguauguugcugucuccauccgucuuuaaugg

SEQ ID NO: 347693 - RNA, 32 nt, Homo Sapiens
uggaaguaauuuuaguauaauuagauuuuuuc

SEQ ID NO: 347694 - RNA, 32 nt, Homo Sapiens
augguuucuggugagggcccacuuccuggcuc

SEQ ID NO: 347695 - RNA, 32 nt, Homo Sapiens
agaauuugaagauauuaaaucagguuacagaa

SEQ ID NO: 347696 - RNA, 32 nt, Homo Sapiens
cccaccaccccauuuuauuuuauaugauuuuc

SEQ ID NO: 347697 - RNA, 32 nt, Homo Sapiens
aagcuggagacggucccguuuguggucagcac

SEQ ID NO: 347698 - RNA, 32 nt, Homo Sapiens
auaaauccaucagaaugacaccuucucagguu

SEQ ID NO: 347699 - RNA, 32 nt, Homo Sapiens
ucccaaccuccuuguuaggugcuuucccauag

SEQ ID NO: 347700 - RNA, 32 nt, Homo Sapiens
cuuccaagccucacuucuccaguguucaaagc

SEQ ID NO: 347701 - RNA, 32 nt, Homo Sapiens
uuacuuuguaagguaagagaguauccauaugc

SEQ ID NO: 347702 - RNA, 32 nt, Homo Sapiens
caggaacccaaaacagaagaaaggaaaagcaa

SEQ ID NO: 347703 - RNA, 32 nt, Homo Sapiens
ggcguuagcccggcccucggccccucuuugcg

SEQ ID NO: 347704 - RNA, 32 nt, Homo Sapiens
cuagcauucugcaacauuuauauagacuguug

SEQ ID NO: 347705 - RNA, 32 nt, Homo Sapiens
uugagacuucugugucuccuucccauuuggga

SEQ ID NO: 347706 - RNA, 32 nt, Homo Sapiens
cuggcaacuguaaauggaaaaauauauggacu

SEQ ID NO: 347707 - RNA, 32 nt, Homo Sapiens
cuuucccauuuuccuuuaaccauggguugugu

SEQ ID NO: 347708 - RNA, 29 nt, Homo Sapiens
gaagaccugggacagaggacugcugucug

SEQ ID NO: 347709 - RNA, 32 nt, Homo Sapiens
gagcagcuacugggcugggcugcggaagcucu

SEQ ID NO: 347710 - RNA, 32 nt, Homo Sapiens
uccuaaguuuauguaccuuguuuccauccauu

SEQ ID NO: 347711 - RNA, 32 nt, Homo Sapiens
ugauccccgcugugucccucaccccugcgccc

SEQ ID NO: 347712 - RNA, 32 nt, Homo Sapiens
uugcuaagaacaauuuaaugauuaaguaaggu

SEQ ID NO: 347713 - RNA, 32 nt, Homo Sapiens
acauccagaaaagauuuugacugaaagacaac

SEQ ID NO: 347714 - RNA, 32 nt, Homo Sapiens
cggcagcugagcggugggaggcgaguccgggg

SEQ ID NO: 347715 - RNA, 32 nt, Homo Sapiens
guugguugcuccaucaugucaucaauagccca

SEQ ID NO: 347716 - RNA, 32 nt, Homo Sapiens
aauacuucugggaugauacauaaaaacagcaa

SEQ ID NO: 347717 - RNA, 32 nt, Homo Sapiens
ugcuaaaaauggucuuaguugucugaaaagcc

SEQ ID NO: 347718 - RNA, 32 nt, Homo Sapiens
aacgguuccuuccuucuucuacugugcaagga

SEQ ID NO: 347719 - RNA, 32 nt, Homo Sapiens
cuccaccggcgccucccccuccgcucugcgcg

SEQ ID NO: 347720 - RNA, 32 nt, Homo Sapiens
gacucaagguggacgugcguucugccuuccuu

SEQ ID NO: 347721 - RNA, 32 nt, Homo Sapiens
ccaagguagcuuagaacguccuggacagacuc

SEQ ID NO: 347722 - RNA, 32 nt, Homo Sapiens
cucaugguguggcaauggacugaacuguaaug

SEQ ID NO: 347723 - RNA, 30 nt, Homo Sapiens
uauauaauucccuugagccaucuuaucaga

SEQ ID NO: 347724 - RNA, 32 nt, Homo Sapiens
gcgagggcgacuacgaccagugaggcggccgc

SEQ ID NO: 347725 - RNA, 32 nt, Homo Sapiens
gucaggcccuccacaagagguggaggagcaga

SEQ ID NO: 347726 - RNA, 32 nt, Homo Sapiens
uuuuacccauuagcucaaaccaaauaccaaga

SEQ ID NO: 347727 - RNA, 32 nt, Homo Sapiens
auuuacuuggaaagauuuuaccugugaaguga

SEQ ID NO: 347728 - RNA, 31 nt, Homo Sapiens
gcuuaagggagguuuguaggaguccucggac

SEQ ID NO: 347729 - RNA, 30 nt, Homo Sapiens
uacgucacuuuuagcuacaagaguaggaag

SEQ ID NO: 347730 - RNA, 32 nt, Homo Sapiens
cccggccuacuguuaguugaucuuaaagauac

SEQ ID NO: 347731 - RNA, 32 nt, Homo Sapiens
ccugaucagcgcgaccccggcccgcgcccgcc

SEQ ID NO: 347732 - RNA, 32 nt, Homo Sapiens
ugagcuggcucagaagacaaaccaauuaagau

SEQ ID NO: 347733 - RNA, 32 nt, Homo Sapiens
ugugccgaccacgccccaggaccuccggagcg

SEQ ID NO: 347734 - RNA, 32 nt, Homo Sapiens
cagcucaaaugaucacauuagauggaauagau

SEQ ID NO: 347735 - RNA, 32 nt, Homo Sapiens
caguggcuauagaagcacuuggaaaaugcacu

SEQ ID NO: 347736 - RNA, 32 nt, Homo Sapiens
uuucgaaaucugguguguauuuuacacuuucu

SEQ ID NO: 347737 - RNA, 32 nt, Homo Sapiens
aaaauaugguagaauuaauuuaugacauggaa

SEQ ID NO: 347738 - RNA, 32 nt, Homo Sapiens
aauccuggggaagggagaagggguaagcuuuu

SEQ ID NO: 347739 - RNA, 31 nt, Homo Sapiens
gggaggcggcacuggucucgacguggggcgg

SEQ ID NO: 347740 - RNA, 32 nt, Homo Sapiens
gagcccagggaccauggaagucagcuagaaga

SEQ ID NO: 347741 - RNA, 32 nt, Homo Sapiens
guuuugccuguaaaugugaguaaauugaauau

SEQ ID NO: 347742 - RNA, 32 nt, Homo Sapiens
cuugaaaacuaaaaggucccugacucccaguc

SEQ ID NO: 347743 - RNA, 29 nt, Homo Sapiens
agaagcaucuguauaggaggcaagagauc

SEQ ID NO: 347744 - RNA, 32 nt, Homo Sapiens
accugcugggagacaauggggguggggaaaag

SEQ ID NO: 347745 - RNA, 32 nt, Homo Sapiens
cuccucaggcucggcguccccggccguggcug

SEQ ID NO: 347746 - RNA, 32 nt, Homo Sapiens
aucucccuggggaguggguccugggcuuggau

SEQ ID NO: 347747 - RNA, 32 nt, Homo Sapiens
uaauucaccauuucuuuuuuaagaucugauau

SEQ ID NO: 347748 - RNA, 32 nt, Homo Sapiens
uuuaaguacucuauagaaaauuugugaaguca

SEQ ID NO: 347749 - RNA, 32 nt, Homo Sapiens
gcuuuguagcauaugccuguggucccagcuac

SEQ ID NO: 347750 - RNA, 31 nt, Homo Sapiens
aaaguucaguugacuuuccccaccaaauggu

SEQ ID NO: 347751 - RNA, 32 nt, Homo Sapiens
uugcugggcaguuuuucuguauuuuauaagua

SEQ ID NO: 347752 - RNA, 32 nt, Homo Sapiens
uuacagacacaggaauuuacauuuucaaaguc

SEQ ID NO: 347753 - RNA, 32 nt, Homo Sapiens
ugcugagaccucuaagaaguccagauacuaag

SEQ ID NO: 347754 - RNA, 32 nt, Homo Sapiens
uugagaugaucaauguuuuucuuuuuuagucu

SEQ ID NO: 347755 - RNA, 32 nt, Homo Sapiens
gguccugcccuuuuugaccagcagccaacagu

SEQ ID NO: 347756 - RNA, 31 nt, Homo Sapiens
gaauuccucaaugacugcccucuaaaggaag

SEQ ID NO: 347757 - RNA, 32 nt, Homo Sapiens
uugugcggcgcgcgccgggacucugcccacuu

SEQ ID NO: 347758 - RNA, 32 nt, Homo Sapiens
gugggaaguggggaggcggggagggaucuuga

SEQ ID NO: 347759 - RNA, 32 nt, Homo Sapiens
accagcccccuuucaccuccagugccacaaua

SEQ ID NO: 347760 - RNA, 32 nt, Homo Sapiens
ucaucaucuucaggauguuucuucaggacuuc

SEQ ID NO: 347761 - RNA, 32 nt, Homo Sapiens
gcagaaauauaccacccuagaggacacaccuc

SEQ ID NO: 347762 - RNA, 32 nt, Homo Sapiens
uugccuuuggguuuucuguacagauuguuuuu

SEQ ID NO: 347763 - RNA, 32 nt, Homo Sapiens
uggacuccauacaaagauugaccuuaggagga

SEQ ID NO: 347764 - RNA, 32 nt, Homo Sapiens
acgauacgcucuucuauugucuuauucuggca

SEQ ID NO: 347765 - RNA, 32 nt, Homo Sapiens
uugauucuaaaguagcuucucuaaaguaggcu

SEQ ID NO: 347766 - RNA, 32 nt, Homo Sapiens
ggccucaggugggccgcaggcgggaaaagcag

SEQ ID NO: 347767 - RNA, 32 nt, Homo Sapiens
gaguuugguugcaguguucuuaucuugugggc

SEQ ID NO: 347768 - RNA, 32 nt, Homo Sapiens
cagccugacuuccagcggucccaagaacaccu

SEQ ID NO: 347769 - RNA, 32 nt, Homo Sapiens
guuuccccuagagcuuccauugcaagagauga

SEQ ID NO: 347770 - RNA, 32 nt, Homo Sapiens
gaaaucacagaaaacaccagaaacaacaacug

SEQ ID NO: 347771 - RNA, 32 nt, Homo Sapiens
aaauuacugugaaaaugagguauucuguacuu

SEQ ID NO: 347772 - RNA, 32 nt, Homo Sapiens
caaacuucagaugggaggaaagagagcaggac

SEQ ID NO: 347773 - RNA, 32 nt, Homo Sapiens
cgcaccccccucccguuggcaauuggcggcuc

SEQ ID NO: 347774 - RNA, 32 nt, Homo Sapiens
cagccagaguucuagcaucuucuuugucaagc

SEQ ID NO: 347775 - RNA, 32 nt, Homo Sapiens
agaagagcacugggcaccuaggccguucaugg

SEQ ID NO: 347776 - RNA, 32 nt, Homo Sapiens
uuauugaaaugaauuccugcauuugauagcaa

SEQ ID NO: 347777 - RNA, 32 nt, Homo Sapiens
uggcagaucuguuuuucuguguagucagggga

SEQ ID NO: 347778 - RNA, 32 nt, Homo Sapiens
ggaagucacuucccuucucucagcugaguuuu

SEQ ID NO: 347779 - RNA, 32 nt, Homo Sapiens
gaauuuguuuccugccuaugaaauaaaauuau

SEQ ID NO: 347780 - RNA, 32 nt, Homo Sapiens
ccauaaaugugugccaagagggucuccuuucc

SEQ ID NO: 347781 - RNA, 32 nt, Homo Sapiens
gccuguggacuuccaaaccaccaccucucuuc

SEQ ID NO: 347782 - RNA, 32 nt, Homo Sapiens
guggcccaggaggggucgagggggccaacuca

SEQ ID NO: 347783 - RNA, 32 nt, Homo Sapiens
aaaaaagaaacauuaucuguauggagauuugg

SEQ ID NO: 347784 - RNA, 32 nt, Homo Sapiens
gcaaaaaaaaauuuagcuaggcauggcggcgc

SEQ ID NO: 347785 - RNA, 32 nt, Homo Sapiens
ggauggaaaugauaaaacuuugaaagaagaga

SEQ ID NO: 347786 - RNA, 32 nt, Homo Sapiens
uaccccagcgcugaggguggguugggcaacag

SEQ ID NO: 347787 - RNA, 32 nt, Homo Sapiens
ggaauagauggacaguuuguuuccugucugau

SEQ ID NO: 347788 - RNA, 32 nt, Homo Sapiens
uagcaugguaguccaugccuguagucccagcu

SEQ ID NO: 347789 - RNA, 32 nt, Homo Sapiens
uuacaggcgugagccaccacgcccggccccca

SEQ ID NO: 347790 - RNA, 32 nt, Homo Sapiens
acuucaucaaggaacacagcaucauuaugcaa

SEQ ID NO: 347791 - RNA, 32 nt, Homo Sapiens
cauaggaaaugccaaaauauauauucccguau

SEQ ID NO: 347792 - RNA, 32 nt, Homo Sapiens
caagauauuuuuguugcaucagguguauuccc

SEQ ID NO: 347793 - RNA, 32 nt, Homo Sapiens
acucccaggugugcauucucuuucucaaggau

SEQ ID NO: 347794 - RNA, 32 nt, Homo Sapiens
agcccagaugccaagcucccuggcugagcuga

SEQ ID NO: 347795 - RNA, 32 nt, Homo Sapiens
uguguuuucgucuacauuuucuuagugucauu

SEQ ID NO: 347796 - RNA, 32 nt, Homo Sapiens
aguagguuuugguaagugcacacgcgugugua

SEQ ID NO: 347797 - RNA, 32 nt, Homo Sapiens
gcgagcaaggaugcguugaggaccgcgagggc

SEQ ID NO: 347798 - RNA, 32 nt, Homo Sapiens
gccuacgccuggccgcgcccuugggcuuccug

SEQ ID NO: 347799 - RNA, 32 nt, Homo Sapiens
caguuuaggauuucuuuuuuucuauaccuuga

SEQ ID NO: 347800 - RNA, 32 nt, Homo Sapiens
uuucuggcccagcagagguaccuagucuguga

SEQ ID NO: 347801 - RNA, 29 nt, Homo Sapiens
cuagaggaaaguuuauuucugcaaaugau

SEQ ID NO: 347802 - RNA, 32 nt, Homo Sapiens
ggguccgccugaagcucuggcugccuauagug

SEQ ID NO: 347803 - RNA, 31 nt, Homo Sapiens
uuuugcuauugagcauauaagauauuaguaa

SEQ ID NO: 347804 - RNA, 32 nt, Homo Sapiens
aacauguauauucuuucccugucuuguuccau

SEQ ID NO: 347805 - RNA, 32 nt, Homo Sapiens
cucauuuuuugauuuauuuuuauuuucucuuu

SEQ ID NO: 347806 - RNA, 32 nt, Homo Sapiens
uccauucacuuucaaaauuacacagucacagg

SEQ ID NO: 347807 - RNA, 32 nt, Homo Sapiens
ucuguuagacauuuugaccauguuuauaauug

SEQ ID NO: 347808 - RNA, 32 nt, Homo Sapiens
aguuuauuaaccuuuaccuggaucuuuauaua

SEQ ID NO: 347809 - RNA, 32 nt, Homo Sapiens
guaagagaauaaacacuuguacugggaucaga

SEQ ID NO: 347810 - RNA, 32 nt, Homo Sapiens
uuuaaaguauuuuaauuuuaaagaguguguua

SEQ ID NO: 347811 - RNA, 32 nt, Homo Sapiens
augauuucugaagagcacaucuccacugacuu

SEQ ID NO: 347812 - RNA, 32 nt, Homo Sapiens
aggaagcacuguagcagagacucuggccuugu

SEQ ID NO: 347813 - RNA, 32 nt, Homo Sapiens
cuucuggccagugugccaggcacaugucccug

SEQ ID NO: 347814 - RNA, 32 nt, Homo Sapiens
ugaggcuggcccccuccucuuuggugacagga

SEQ ID NO: 347815 - RNA, 32 nt, Homo Sapiens
ugccuaaggcuuuuugcuuuuuuauuuauugu

SEQ ID NO: 347816 - RNA, 32 nt, Homo Sapiens
ucaaaucugagaauuuggacuaacugcaccaa

SEQ ID NO: 347817 - RNA, 32 nt, Homo Sapiens
uguccuuccagggagcucuuuuaaucuuaaag

SEQ ID NO: 347818 - RNA, 32 nt, Homo Sapiens
acauaaaccaacauuauaaacaauggccacau

SEQ ID NO: 347819 - RNA, 32 nt, Homo Sapiens
aacccguggacgcuccaaugggcuugucauga

SEQ ID NO: 347820 - RNA, 32 nt, Homo Sapiens
aacuuggccugagaacauuuucugggaagagg

SEQ ID NO: 347821 - RNA, 31 nt, Homo Sapiens
gggaaguuacggcgaaguccacccagcguuu

SEQ ID NO: 347822 - RNA, 32 nt, Homo Sapiens
guuguucuuuugccagaggaacaucaaagggc

SEQ ID NO: 347823 - RNA, 32 nt, Homo Sapiens
gacuuucaggcacuucuucccuuuugauuucu

SEQ ID NO: 347824 - RNA, 32 nt, Homo Sapiens
acuuucccuuucgaauuccucgguauaucuug

SEQ ID NO: 347825 - RNA, 32 nt, Homo Sapiens
cauuagcccaugagugggucccggguucacac

SEQ ID NO: 347826 - RNA, 32 nt, Homo Sapiens
cauggcugcauaaucucagccacucuuucaca

SEQ ID NO: 347827 - RNA, 32 nt, Homo Sapiens
gcggggaggcgaggccucgggaagcugaauuu

SEQ ID NO: 347828 - RNA, 32 nt, Homo Sapiens
aacccccuccugccuccauccaccggggcuau

SEQ ID NO: 347829 - RNA, 32 nt, Homo Sapiens
gaggcgaccucggcccggcccugcacuggccg

SEQ ID NO: 347830 - RNA, 32 nt, Homo Sapiens
aagaaaacacaagaaaaauauuugagaguccu

SEQ ID NO: 347831 - RNA, 32 nt, Homo Sapiens
ucaccuggaaauaaaaguauuuuugugcgggg

SEQ ID NO: 347832 - RNA, 32 nt, Homo Sapiens
aaguaaugaacaauucuuaaucaguuauaaua

SEQ ID NO: 347833 - RNA, 32 nt, Homo Sapiens
cugggccagaggacccuuucugauggacuuca

SEQ ID NO: 347834 - RNA, 32 nt, Homo Sapiens
ggcagggagagcccugcauuuccucuacgccc

SEQ ID NO: 347835 - RNA, 32 nt, Homo Sapiens
auuuuugcauauucuuuuuuaagggaaugccu

SEQ ID NO: 347836 - RNA, 30 nt, Homo Sapiens
auuuugaauauccuggucacaucuuuggau

SEQ ID NO: 347837 - RNA, 32 nt, Homo Sapiens
cauaacccugucacccacagaccgccgucuaa

SEQ ID NO: 347838 - RNA, 32 nt, Homo Sapiens
agcacccauggcucugguuuuauuuucagccc

SEQ ID NO: 347839 - RNA, 32 nt, Homo Sapiens
gaagauaaauuaaaucuuagcuaaaucauugu

SEQ ID NO: 347840 - RNA, 32 nt, Homo Sapiens
guucguggccgcgguuuccccaggcagcuggc

SEQ ID NO: 347841 - RNA, 32 nt, Homo Sapiens
cuggcugcacuucaccugcugcuugagcuucu

SEQ ID NO: 347842 - RNA, 32 nt, Homo Sapiens
cagaacaauugaggcgaggccuuugggaguac

SEQ ID NO: 347843 - RNA, 32 nt, Homo Sapiens
guuugcuauauuucuuuuuuuccuuuuccuuu

SEQ ID NO: 347844 - RNA, 32 nt, Homo Sapiens
agcauaaaggacaaguagaacugcacauuaag

SEQ ID NO: 347845 - RNA, 32 nt, Homo Sapiens
cagggguguggagggcgugcugccggagacgu

SEQ ID NO: 347846 - RNA, 32 nt, Homo Sapiens
uggccacagcccagcccagccugacguggaug

SEQ ID NO: 347847 - RNA, 32 nt, Homo Sapiens
ccuagcucaggccggcagagccagcgcucgcg

SEQ ID NO: 347848 - RNA, 32 nt, Homo Sapiens
ugggauaugguccucuuaggcucuguuguaca

SEQ ID NO: 347849 - RNA, 32 nt, Homo Sapiens
ucuaucuaaaagacagaaaaggauuuaggaag

SEQ ID NO: 347850 - RNA, 32 nt, Homo Sapiens
aaguggaagaaccuuguuagaccgagagcuug

SEQ ID NO: 347851 - RNA, 32 nt, Homo Sapiens
agcaugaaaaagaaacagagcauaacuacuga

SEQ ID NO: 347852 - RNA, 32 nt, Homo Sapiens
cugugccaaggagagaggcuaucaccagcaau

SEQ ID NO: 347853 - RNA, 32 nt, Homo Sapiens
cgcuggucguauccggggcagcggagcagggc

SEQ ID NO: 347854 - RNA, 32 nt, Homo Sapiens
uuaugacuacacauacacuauuucaugaagau

SEQ ID NO: 347855 - RNA, 32 nt, Homo Sapiens
agcccugguucucuccauuccuccucuuuucc

SEQ ID NO: 347856 - RNA, 32 nt, Homo Sapiens
acagacccaagcauacacaccaggccgucacu

SEQ ID NO: 347857 - RNA, 30 nt, Homo Sapiens
gggcccggccgcugugucgcccugagcgga

SEQ ID NO: 347858 - RNA, 32 nt, Homo Sapiens
uuuuuccucuuucgaacucccuccucaauauc

SEQ ID NO: 347859 - RNA, 32 nt, Homo Sapiens
uuaugcgggaaagagggagggggacuccagga

SEQ ID NO: 347860 - RNA, 32 nt, Homo Sapiens
auucugauauaaaacucaaaguuugaagucag

SEQ ID NO: 347861 - RNA, 32 nt, Homo Sapiens
cuuaaaaugugcuacauuugagaauagcucac

SEQ ID NO: 347862 - RNA, 32 nt, Homo Sapiens
ggggugggcaccagcucaggggcuuccauuug

SEQ ID NO: 347863 - RNA, 32 nt, Homo Sapiens
uaggcguggguugccugugucaugggcugugu

SEQ ID NO: 347864 - RNA, 32 nt, Homo Sapiens
ugggugcgggcuccgagagggggcgacuugca

SEQ ID NO: 347865 - RNA, 32 nt, Homo Sapiens
cuagugcagcggccccucuggacccggaaguc

SEQ ID NO: 347866 - RNA, 32 nt, Homo Sapiens
uucugacagccauugggaccgccccaguaccc

SEQ ID NO: 347867 - RNA, 32 nt, Homo Sapiens
cgggcuucaggagggggaagggcgagcugccc

SEQ ID NO: 347868 - RNA, 32 nt, Homo Sapiens
caaaugucuguuuuuauuugccugcuaggauu

SEQ ID NO: 347869 - RNA, 32 nt, Homo Sapiens
cagagaggagaggaggcuguugguaggaaagu

SEQ ID NO: 347870 - RNA, 32 nt, Homo Sapiens
gcuuccuucacaugcucuuguuuuccagcugc

SEQ ID NO: 347871 - RNA, 32 nt, Homo Sapiens
caagugaagaugugacugacuaccuccucgag

SEQ ID NO: 347872 - RNA, 32 nt, Homo Sapiens
cuuuuuuaauaaacuacucuuugauuuaaaaa

SEQ ID NO: 347873 - RNA, 32 nt, Homo Sapiens
ggaagucccagggcccgggguccacagaggau

SEQ ID NO: 347874 - RNA, 32 nt, Homo Sapiens
gagucuuccuugcugcagcaucgcuugcacau

SEQ ID NO: 347875 - RNA, 32 nt, Homo Sapiens
uuccggguuaggguggaaugggcuuugcaggg

SEQ ID NO: 347876 - RNA, 32 nt, Homo Sapiens
aaauguauuguaaaaauaauuuuguggcauuu

SEQ ID NO: 347877 - RNA, 32 nt, Homo Sapiens
aaugaacaaaggagauuuuaaaguuuaagaug

SEQ ID NO: 347878 - RNA, 32 nt, Homo Sapiens
gaacaggguggaggggugugggaaagaaacca

SEQ ID NO: 347879 - RNA, 32 nt, Homo Sapiens
uccugucccagggccaaaccccuaggaguccu

SEQ ID NO: 347880 - RNA, 32 nt, Homo Sapiens
acaggauucagcaaacauuuucuguaaagggc

SEQ ID NO: 347881 - RNA, 32 nt, Homo Sapiens
caggguccuggggcccggggucuccuacgucg

SEQ ID NO: 347882 - RNA, 32 nt, Homo Sapiens
uagagaaugaggacuucugugcuguuugccuc

SEQ ID NO: 347883 - RNA, 32 nt, Homo Sapiens
cgcuuagccugcgacggcagcccgagaggaug

SEQ ID NO: 347884 - RNA, 32 nt, Homo Sapiens
agggaacgaaacaugagaggcugugugagaag

SEQ ID NO: 347885 - RNA, 32 nt, Homo Sapiens
ucccccuccuccucaccacggggcuccuguga

SEQ ID NO: 347886 - RNA, 32 nt, Homo Sapiens
gggucuuggggcugggucugccuggagaccag

SEQ ID NO: 347887 - RNA, 32 nt, Homo Sapiens
uuccaguacgaccacgaggccuuccugggcaa

SEQ ID NO: 347888 - RNA, 31 nt, Homo Sapiens
cucugcuguuauccugccccaagggccuggg

SEQ ID NO: 347889 - RNA, 32 nt, Homo Sapiens
gagggugaguuggcccugucucuucuuuuuuc

SEQ ID NO: 347890 - RNA, 32 nt, Homo Sapiens
aacuuugcuguaaaccuuuugguuuuccuacu

SEQ ID NO: 347891 - RNA, 32 nt, Homo Sapiens
auuguauaaucuucaggaauuuuuagauucuu

SEQ ID NO: 347892 - RNA, 32 nt, Homo Sapiens
gccagccuuggaauuuacuucucuagcuuaca

SEQ ID NO: 347893 - RNA, 32 nt, Homo Sapiens
gggacucccccggcugcucccgaacaucugau

SEQ ID NO: 347894 - RNA, 32 nt, Homo Sapiens
acacgccagcugcgguuucccggagcguggag

SEQ ID NO: 347895 - RNA, 32 nt, Homo Sapiens
gggugacggcggcuaccagcccgggcgggcac

SEQ ID NO: 347896 - RNA, 32 nt, Homo Sapiens
uccaccgugcucccggcuccccgcccccgccg

SEQ ID NO: 347897 - RNA, 32 nt, Homo Sapiens
uucaaacaucacaguuugaaugccugugaaug

SEQ ID NO: 347898 - RNA, 32 nt, Homo Sapiens
gcagggguuggucaaggccaccucugccucua

SEQ ID NO: 347899 - RNA, 32 nt, Homo Sapiens
aucugcuuugccucuggugguacaagguuuuu

SEQ ID NO: 347900 - RNA, 32 nt, Homo Sapiens
gcagugggugccuagugaggcuggagcuagaa

SEQ ID NO: 347901 - RNA, 32 nt, Homo Sapiens
gaggauuuuauggcacauuugaaugagaugaa

SEQ ID NO: 347902 - RNA, 32 nt, Homo Sapiens
auuccaacugccaguguagauuuuaaaagugu

SEQ ID NO: 347903 - RNA, 30 nt, Homo Sapiens
cgagcgcacgccuugccgccgccccgcaga

SEQ ID NO: 347904 - RNA, 32 nt, Homo Sapiens
caagauggauuuuccccuuuuaucucugcccu

SEQ ID NO: 347905 - RNA, 32 nt, Homo Sapiens
uugcucaccucauuuuccuucaucuuucuuga

SEQ ID NO: 347906 - RNA, 32 nt, Homo Sapiens
gguggcacugcugguuaccccugggcccugaa

SEQ ID NO: 347907 - RNA, 32 nt, Homo Sapiens
gugcaaaguucuaaauuuuucuuaaucauagc

SEQ ID NO: 347908 - RNA, 32 nt, Homo Sapiens
aucucccccuagcuccuccugggcagccugcc

SEQ ID NO: 347909 - RNA, 32 nt, Homo Sapiens
cagaguucauaaaguuugauuggaacauacca

SEQ ID NO: 347910 - RNA, 32 nt, Homo Sapiens
caauguggaaaacauacccuuuuucuucaaca

SEQ ID NO: 347911 - RNA, 32 nt, Homo Sapiens
gggagacccgucuuuaguaaauaaaaauaaau

SEQ ID NO: 347912 - RNA, 32 nt, Homo Sapiens
agcgcugcuccuccacggccuccugacguccg

SEQ ID NO: 347913 - RNA, 32 nt, Homo Sapiens
uaaaaccauuuucuagaaggcuaccaugagcu

SEQ ID NO: 347914 - RNA, 32 nt, Homo Sapiens
uggggaggagggagaagaaugccaaauguaug

SEQ ID NO: 347915 - RNA, 32 nt, Homo Sapiens
uuuuauuugaagaaacaaacugaagaaaaaau

SEQ ID NO: 347916 - RNA, 32 nt, Homo Sapiens
ugccugugggucugcucuggugugugaagguc

SEQ ID NO: 347917 - RNA, 32 nt, Homo Sapiens
uuuuacauuuuuccucaccauuuagcaauuuu

SEQ ID NO: 347918 - RNA, 32 nt, Homo Sapiens
aggcccaaagagggccguggggccugaggagg

SEQ ID NO: 347919 - RNA, 32 nt, Homo Sapiens
ucugcacccccaucuuccuccucccgacaucg

SEQ ID NO: 347920 - RNA, 32 nt, Homo Sapiens
aguaugucugaagaguacagugagagguuaau

SEQ ID NO: 347921 - RNA, 32 nt, Homo Sapiens
gagggcuuccacgcccucuaagggguggcggg

SEQ ID NO: 347922 - RNA, 32 nt, Homo Sapiens
gagcagaucccccaucucuggcagugcagugu

SEQ ID NO: 347923 - RNA, 32 nt, Homo Sapiens
uuugaagcaaagaaaacugaaaaaaugaaguc

SEQ ID NO: 347924 - RNA, 32 nt, Homo Sapiens
uuuuccuaccucuccuucuaaucucuucuaga

SEQ ID NO: 347925 - RNA, 32 nt, Homo Sapiens
uauuuuuuauacauucagucacucuguaaaua

SEQ ID NO: 347926 - RNA, 32 nt, Homo Sapiens
ggaucugcaguagggagggaaggcccccagcc

SEQ ID NO: 347927 - RNA, 32 nt, Homo Sapiens
ugugcaaaaguaccccuuugcacagauaguua

SEQ ID NO: 347928 - RNA, 32 nt, Homo Sapiens
augagcagcacuggagccugguaaaugcagau

SEQ ID NO: 347929 - RNA, 32 nt, Homo Sapiens
gagccuugggcugggcagcugcuggccuggau

SEQ ID NO: 347930 - RNA, 32 nt, Homo Sapiens
uuaaguuccccucuuuauccugcccauguuca

SEQ ID NO: 347931 - RNA, 32 nt, Homo Sapiens
ccaucuguucuucugacucaacucacuggcua

SEQ ID NO: 347932 - RNA, 32 nt, Homo Sapiens
ccguggugcugauucugucaggcgcuggcggc

SEQ ID NO: 347933 - RNA, 32 nt, Homo Sapiens
guucuuaaagaaucaagaaguuguguaaucuu

SEQ ID NO: 347934 - RNA, 30 nt, Homo Sapiens
uggggggcuuuucggaucggcaggauguac

SEQ ID NO: 347935 - RNA, 32 nt, Homo Sapiens
ggucuucaaaggaaaagccuguccgauuuuuc

SEQ ID NO: 347936 - RNA, 32 nt, Homo Sapiens
ucuucaucgugcugcccuuuccaggcuucuuu

SEQ ID NO: 347937 - RNA, 32 nt, Homo Sapiens
auucauuuacaauggaagaccaaaaauuuuuc

SEQ ID NO: 347938 - RNA, 32 nt, Homo Sapiens
ugacucucucuucuccagacaccccugcucua

SEQ ID NO: 347939 - RNA, 32 nt, Homo Sapiens
uggccuuucaucuggcuucucucucuuaagug

SEQ ID NO: 347940 - RNA, 32 nt, Homo Sapiens
cacuggucugugcccucacagcaccgcacauc

SEQ ID NO: 347941 - RNA, 32 nt, Homo Sapiens
guaagaagccagcagggcuggugcuggggcuu

SEQ ID NO: 347942 - RNA, 32 nt, Homo Sapiens
cgccauaauaauguauuuauagaauuaaacau

SEQ ID NO: 347943 - RNA, 32 nt, Homo Sapiens
uuaggacucacagauugguuugaucagguguu

SEQ ID NO: 347944 - RNA, 32 nt, Homo Sapiens
cagccaaggugggcaggcagggacuguggcag

SEQ ID NO: 347945 - RNA, 32 nt, Homo Sapiens
ggcaacugcuugaccacuggcccagcaagcag

SEQ ID NO: 347946 - RNA, 32 nt, Homo Sapiens
uuaagaugaaauuuauaugaaagcauuuuuau

SEQ ID NO: 347947 - RNA, 32 nt, Homo Sapiens
cacgccucccugggcagugcuucuaaggugcc

SEQ ID NO: 347948 - RNA, 32 nt, Homo Sapiens
gaggguucuggcggcccaccgagagggcgccu

SEQ ID NO: 347949 - RNA, 32 nt, Homo Sapiens
agaaggaagcaacagugccagguuccagcgug

SEQ ID NO: 347950 - RNA, 32 nt, Homo Sapiens
cucacuuuacuuucccuccaagacugugugaa

SEQ ID NO: 347951 - RNA, 32 nt, Homo Sapiens
uucuuugccugcgccgucccucguuccauggc

SEQ ID NO: 347952 - RNA, 32 nt, Homo Sapiens
aguuucucuucagaguuguugacucauaguac

SEQ ID NO: 347953 - RNA, 29 nt, Homo Sapiens
gguguuuuguguuucaucuccagcuuggu

SEQ ID NO: 347954 - RNA, 32 nt, Homo Sapiens
agggaagccagcugcgcauaucuccuggaucc

SEQ ID NO: 347955 - RNA, 32 nt, Homo Sapiens
ggcaucucguaaucacuuuucuuaggggacag

SEQ ID NO: 347956 - RNA, 32 nt, Homo Sapiens
aaaucagauugugcaaguuugaacgcuuguuu

SEQ ID NO: 347957 - RNA, 32 nt, Homo Sapiens
ccagccuggacaacauaaugagacccucgucu

SEQ ID NO: 347958 - RNA, 32 nt, Homo Sapiens
gaucugguaccgcagguacgccgccgccgccg

SEQ ID NO: 347959 - RNA, 32 nt, Homo Sapiens
ccacuccccucuacuugcugcucugggccucc

SEQ ID NO: 347960 - RNA, 32 nt, Homo Sapiens
gauuuauuuauuucuaccuuucugagucucuu

SEQ ID NO: 347961 - RNA, 32 nt, Homo Sapiens
ggcgcggcgacggcguuagcccggcccucggc

SEQ ID NO: 347962 - RNA, 32 nt, Homo Sapiens
aauuuacucucucuccuuugugaguaaaugcc

SEQ ID NO: 347963 - RNA, 31 nt, Homo Sapiens
uacaaaacaaauuuagaaacugggaucauga

SEQ ID NO: 347964 - RNA, 32 nt, Homo Sapiens
cggggugugggguuggguggggaauuaaggcu

SEQ ID NO: 347965 - RNA, 32 nt, Homo Sapiens
uuuucuuuuuaaaaauacuucuacaugacugc

SEQ ID NO: 347966 - RNA, 32 nt, Homo Sapiens
ggagccagcggugggcagcgcugcugggaugg

SEQ ID NO: 347967 - RNA, 32 nt, Homo Sapiens
aaccgccggcgcccggccauggcggucuccag

SEQ ID NO: 347968 - RNA, 32 nt, Homo Sapiens
guaauaugauacauuuucuuaaaaacuucucu

SEQ ID NO: 347969 - RNA, 32 nt, Homo Sapiens
ccucacuaucuccugcagggugucacagagcc

SEQ ID NO: 347970 - RNA, 32 nt, Homo Sapiens
uguguaguucccucugccugggaugcccuucc

SEQ ID NO: 347971 - RNA, 32 nt, Homo Sapiens
uuagucagaaauuuauuuugguauuaaagaag

SEQ ID NO: 347972 - RNA, 32 nt, Homo Sapiens
gaaauuuaauuugcagaaugcuuuaugaguua

SEQ ID NO: 347973 - RNA, 32 nt, Homo Sapiens
cucugcucacagcagagcuguauuuuaucucu

SEQ ID NO: 347974 - RNA, 32 nt, Homo Sapiens
cggacggcuguggaccguggacaggcccagcg

SEQ ID NO: 347975 - RNA, 32 nt, Homo Sapiens
ggugggggaaaacaaucagguuucuucaggcu

SEQ ID NO: 347976 - RNA, 32 nt, Homo Sapiens
aagcaguauuaacuucacagaaaaguagugaa

SEQ ID NO: 347977 - RNA, 32 nt, Homo Sapiens
gaggaagaaaauuuaaagaaaagcuagagaaa

SEQ ID NO: 347978 - RNA, 32 nt, Homo Sapiens
uuauuucugugcuaauaaacgagaugcagaac

SEQ ID NO: 347979 - RNA, 28 nt, Homo Sapiens
cagccugggcaacacaggaugaccccau

SEQ ID NO: 347980 - RNA, 31 nt, Homo Sapiens
accauguugacuucugauaaccaguuccugg

SEQ ID NO: 347981 - RNA, 32 nt, Homo Sapiens
aacccagggucccagcuggcuggguccucuuc

SEQ ID NO: 347982 - RNA, 32 nt, Homo Sapiens
auuauauagucccauuuuuacuuucuguaugc

SEQ ID NO: 347983 - RNA, 32 nt, Homo Sapiens
gaauauauacuucuauuguacagacucaacuu

SEQ ID NO: 347984 - RNA, 32 nt, Homo Sapiens
uucuuuuagcuuuggacuuugggggucgaaag

SEQ ID NO: 347985 - RNA, 32 nt, Homo Sapiens
cccgguccuccucauuagggugcagggccuag

SEQ ID NO: 347986 - RNA, 32 nt, Homo Sapiens
ccaggaaagggaguugcugagggcaggucccc

SEQ ID NO: 347987 - RNA, 32 nt, Homo Sapiens
gucugaggaaguucuaucuuggcgcuaaagcg

SEQ ID NO: 347988 - RNA, 32 nt, Homo Sapiens
aagugagcagcaacguaaaaacguaugugaag

SEQ ID NO: 347989 - RNA, 32 nt, Homo Sapiens
uucacccacucuggggcuggccucaugacuuu

SEQ ID NO: 347990 - RNA, 32 nt, Homo Sapiens
auggccuuucgaaggccuggaaguauuucacu

SEQ ID NO: 347991 - RNA, 27 nt, Homo Sapiens
aggacuccuuaauucugcuagaguuaa

SEQ ID NO: 347992 - RNA, 32 nt, Homo Sapiens
cuuuuaaugccaucuuaaucugaugguugagc

SEQ ID NO: 347993 - RNA, 32 nt, Homo Sapiens
acauggucuugcuggguaggacacggcuugaa

SEQ ID NO: 347994 - RNA, 32 nt, Homo Sapiens
gugccagcaccgcacgcagagccuggugugug

SEQ ID NO: 347995 - RNA, 32 nt, Homo Sapiens
gcuugcagugauuggagaucgcgccacugcac

SEQ ID NO: 347996 - RNA, 32 nt, Homo Sapiens
guccaccggccgcgccacgaaccccuugccga

SEQ ID NO: 347997 - RNA, 32 nt, Homo Sapiens
agccugggagggccgccgaacuacccccggag

SEQ ID NO: 347998 - RNA, 32 nt, Homo Sapiens
caccauguuggccaugcuggucuugaaccccc

SEQ ID NO: 347999 - RNA, 32 nt, Homo Sapiens
aaguguguaaaaauguauagccauuuauaucc

SEQ ID NO: 348000 - RNA, 32 nt, Homo Sapiens
aaucuuauuaaacugcuggucugacuuuaugg

SEQ ID NO: 348001 - RNA, 32 nt, Homo Sapiens
accccuccaugggccuggccaagcccccaaga

SEQ ID NO: 348002 - RNA, 32 nt, Homo Sapiens
ugcccagaggcagagcucgugcaugcccgacc

SEQ ID NO: 348003 - RNA, 32 nt, Homo Sapiens
uaaucuauuuaaauuuacuuugaaauauauac

SEQ ID NO: 348004 - RNA, 32 nt, Homo Sapiens
cgucauaugagaugcguguucccgcggccuca

SEQ ID NO: 348005 - RNA, 32 nt, Homo Sapiens
uuuuaauagaaagagucaguuaaaauucagca

SEQ ID NO: 348006 - RNA, 27 nt, Homo Sapiens
gacccgaccuugugcagccccccugcc

SEQ ID NO: 348007 - RNA, 32 nt, Homo Sapiens
uggcgcugcuaaggcaauggcggcccgaaaga

SEQ ID NO: 348008 - RNA, 32 nt, Homo Sapiens
gucaguggaaguuagggaaaagauucuuggac

SEQ ID NO: 348009 - RNA, 32 nt, Homo Sapiens
auaggguaagguuguuucugaugcagcugaga

SEQ ID NO: 348010 - RNA, 32 nt, Homo Sapiens
ggcggccgcccggucaugucaggauggagauc

SEQ ID NO: 348011 - RNA, 25 nt, Homo Sapiens
auggaggaggccggagcagcggugg

SEQ ID NO: 348012 - RNA, 31 nt, Homo Sapiens
cugucaacaagguccgcaaguucuggccuuu

SEQ ID NO: 348013 - RNA, 32 nt, Homo Sapiens
ggugcacuaggcgcugugcgggccccccuucc

SEQ ID NO: 348014 - RNA, 32 nt, Homo Sapiens
uggcagccugaagagagucgcuggccgugguc

SEQ ID NO: 348015 - RNA, 32 nt, Homo Sapiens
gcccucaccaaaaggacccuacagcaaacggg

SEQ ID NO: 348016 - RNA, 32 nt, Homo Sapiens
guuaauauuuaaccucuuuuuaaggacacugg

SEQ ID NO: 348017 - RNA, 32 nt, Homo Sapiens
augaaaacaugaucauuauauguauauagaua

SEQ ID NO: 348018 - RNA, 32 nt, Homo Sapiens
guggucucccuggccucagggcucugacucug

SEQ ID NO: 348019 - RNA, 32 nt, Homo Sapiens
agcacacuuccccuccccaucuucccacuuaa

SEQ ID NO: 348020 - RNA, 32 nt, Homo Sapiens
aggcagaggaggaguaccccccugagagcaug

SEQ ID NO: 348021 - RNA, 32 nt, Homo Sapiens
acuaagauuuuaugaaaagaugacauguuggg

SEQ ID NO: 348022 - RNA, 32 nt, Homo Sapiens
cagcaaugcuccuuccuucucaggguccacag

SEQ ID NO: 348023 - RNA, 32 nt, Homo Sapiens
cccugagcgcucuucccucguuuuacauccuc

SEQ ID NO: 348024 - RNA, 32 nt, Homo Sapiens
ggcccccgaaggcggugcugcagcagcccggg

SEQ ID NO: 348025 - RNA, 32 nt, Homo Sapiens
guguguggagggccggcggggaccgccgggag

SEQ ID NO: 348026 - RNA, 32 nt, Homo Sapiens
acgaauuggggaugucagagacuccuccuugg

SEQ ID NO: 348027 - RNA, 32 nt, Homo Sapiens
uggguggacagcuuuucuuaagcaccagaaac

SEQ ID NO: 348028 - RNA, 32 nt, Homo Sapiens
gcuaguauaagaggaagaauuuuuugagacua

SEQ ID NO: 348029 - RNA, 32 nt, Homo Sapiens
ccccaucucuucuccuuuguaccugucaacac

SEQ ID NO: 348030 - RNA, 32 nt, Homo Sapiens
ggggcugccugggccucuggcuuccaggcccu

SEQ ID NO: 348031 - RNA, 32 nt, Homo Sapiens
uugcucagucuccuccccuuaagucauuucca

SEQ ID NO: 348032 - RNA, 32 nt, Homo Sapiens
uuugaauuaaguuauagcauuacuaauucaug

SEQ ID NO: 348033 - RNA, 31 nt, Homo Sapiens
aaagcagaaacaacucucagcuuguugcugc

SEQ ID NO: 348034 - RNA, 32 nt, Homo Sapiens
gcuccacccggacgccguacccgcccuuuucc

SEQ ID NO: 348035 - RNA, 32 nt, Homo Sapiens
uuuuuaaaacaaagguacggaccaugugcuau

SEQ ID NO: 348036 - RNA, 32 nt, Homo Sapiens
ggcaggcuagguccucuccagagagcaucugg

SEQ ID NO: 348037 - RNA, 32 nt, Homo Sapiens
gggagucaggugggggcugugcuggggaucac

SEQ ID NO: 348038 - RNA, 32 nt, Homo Sapiens
cccuguacaucccacaccccacccucccuucc

SEQ ID NO: 348039 - RNA, 32 nt, Homo Sapiens
gcaccgggcgcccucccccagcccgccccgcc

SEQ ID NO: 348040 - RNA, 32 nt, Homo Sapiens
ugcccaccaggccucagacucccucuuuuccc

SEQ ID NO: 348041 - RNA, 32 nt, Homo Sapiens
cuugaauccauacaguuucuuaaaagacaaua

SEQ ID NO: 348042 - RNA, 32 nt, Homo Sapiens
ugcuucuccugcaucuuguuccugcuuauuua

SEQ ID NO: 348043 - RNA, 32 nt, Homo Sapiens
ucaaauugucaaauucacuuugaauaauaaua

SEQ ID NO: 348044 - RNA, 32 nt, Homo Sapiens
augaauguuuuuaauauucucaucucaacauu

SEQ ID NO: 348045 - RNA, 32 nt, Homo Sapiens
ccgccugagcccgcugccccagcaggaggucu

SEQ ID NO: 348046 - RNA, 32 nt, Homo Sapiens
gugucguucuuuccaauuccgaaaguagaaag

SEQ ID NO: 348047 - RNA, 32 nt, Homo Sapiens
aaacuugcaagcauaucaaccaggcaagucuu

SEQ ID NO: 348048 - RNA, 32 nt, Homo Sapiens
gacagugucucucucugucacccaggcuagag

SEQ ID NO: 348049 - RNA, 32 nt, Homo Sapiens
guucaauuccaagaauugcaaauguuuauugg

SEQ ID NO: 348050 - RNA, 32 nt, Homo Sapiens
gaacguucucucccggcccugcggcgcggucu

SEQ ID NO: 348051 - RNA, 32 nt, Homo Sapiens
uauguacuauccccaaacuccuuuacugcagc

SEQ ID NO: 348052 - RNA, 32 nt, Homo Sapiens
ggcugagccuuugagcacaccaccauuacauc

SEQ ID NO: 348053 - RNA, 32 nt, Homo Sapiens
ccuucuuugcugcugcuuccugucccacuacu

SEQ ID NO: 348054 - RNA, 32 nt, Homo Sapiens
gagcccaggacacuugucccuggacacagugg

SEQ ID NO: 348055 - RNA, 32 nt, Homo Sapiens
uuucuccucccucuccuuuuccugccacaaaa

SEQ ID NO: 348056 - RNA, 32 nt, Homo Sapiens
aucuucgcugagguuuccuccucccccuccuc

SEQ ID NO: 348057 - RNA, 32 nt, Homo Sapiens
uuuuccuuggugauccaggaaaacgaagcccc

SEQ ID NO: 348058 - RNA, 32 nt, Homo Sapiens
guaauuugccagcagaccucccaacuccacca

SEQ ID NO: 348059 - RNA, 32 nt, Homo Sapiens
gcucauaaaaauuuguuuauuaauauuuccca

SEQ ID NO: 348060 - RNA, 32 nt, Homo Sapiens
cuaaguagauuaaauagugugauaaaaguuuu

SEQ ID NO: 348061 - RNA, 32 nt, Homo Sapiens
acuuaaaagucaggaacugccuugguuucccc

SEQ ID NO: 348062 - RNA, 32 nt, Homo Sapiens
uaaaaacuuagugcgagagcugaaacaucuaa

SEQ ID NO: 348063 - RNA, 32 nt, Homo Sapiens
ccggccgagucgcugagccgcggcugccggac

SEQ ID NO: 348064 - RNA, 32 nt, Homo Sapiens
uuacgaccauuugguuucagcaugucaggaga

SEQ ID NO: 348065 - RNA, 32 nt, Homo Sapiens
acuuuuucuaaucagcacugucuuaagacaac

SEQ ID NO: 348066 - RNA, 32 nt, Homo Sapiens
cucauucccuugcucguucucuagcccacccu

SEQ ID NO: 348067 - RNA, 32 nt, Homo Sapiens
cacguugggacagggaggugugaggcaggaga

SEQ ID NO: 348068 - RNA, 32 nt, Homo Sapiens
cuagaguaaacuguuggaauggcuguuuuacu

SEQ ID NO: 348069 - RNA, 32 nt, Homo Sapiens
cuaagcccugccgugggcccagccccugccag

SEQ ID NO: 348070 - RNA, 32 nt, Homo Sapiens
ucccugagaggagccgcgcgcgccgcaugcug

SEQ ID NO: 348071 - RNA, 32 nt, Homo Sapiens
gaggugggaaguaucuugugggaaaguaguua

SEQ ID NO: 348072 - RNA, 32 nt, Homo Sapiens
cucccaaugcuguguaucaugacacuaucuuc

SEQ ID NO: 348073 - RNA, 32 nt, Homo Sapiens
ccuggcuccugcuuuuuccccacagcccgugu

SEQ ID NO: 348074 - RNA, 30 nt, Homo Sapiens
guggcugggucugcugcagagcuccuuggc

SEQ ID NO: 348075 - RNA, 32 nt, Homo Sapiens
uuuuuuuuuuuaucuuuuuuaacagugcaauc

SEQ ID NO: 348076 - RNA, 32 nt, Homo Sapiens
agagguguuuuggggguggggcgaggguuucu

SEQ ID NO: 348077 - RNA, 32 nt, Homo Sapiens
gcggucggggccgggcccgggaagcgcgagga

SEQ ID NO: 348078 - RNA, 32 nt, Homo Sapiens
gccaggccgggcgggaggcauucugaaggcaa

SEQ ID NO: 348079 - RNA, 32 nt, Homo Sapiens
gagccauggggagcaagugugcucuccugggg

SEQ ID NO: 348080 - RNA, 32 nt, Homo Sapiens
gugggcugcggaacgcagacuucggcuggacu

SEQ ID NO: 348081 - RNA, 32 nt, Homo Sapiens
uaacagcagagucugguguggugcuggugagg

SEQ ID NO: 348082 - RNA, 32 nt, Homo Sapiens
uuaaauuauuuuacuguucuguguucaugagg

SEQ ID NO: 348083 - RNA, 30 nt, Homo Sapiens
uaguccugggacugcaaaacuguucggugg

SEQ ID NO: 348084 - RNA, 32 nt, Homo Sapiens
gacuccaccaguuugaugugggaaguguuagc

SEQ ID NO: 348085 - RNA, 32 nt, Homo Sapiens
cucaucaaaguagauuucugcaguugagacag

SEQ ID NO: 348086 - RNA, 32 nt, Homo Sapiens
agggcaggguguuccuuccagggaacucgagg

SEQ ID NO: 348087 - RNA, 32 nt, Homo Sapiens
uaugcgggugacgucugcugcugcugacugag

SEQ ID NO: 348088 - RNA, 32 nt, Homo Sapiens
guggcuaauaaaaacuaagugugagcgucaaa

SEQ ID NO: 348089 - RNA, 32 nt, Homo Sapiens
uagugaaacuggggcuugcaagaggagguggu

SEQ ID NO: 348090 - RNA, 32 nt, Homo Sapiens
acaaugaaguugaaaaucauaggcaccuuuua

SEQ ID NO: 348091 - RNA, 32 nt, Homo Sapiens
ugcaaauaauaugaaagugaaguaaaagcaau

SEQ ID NO: 348092 - RNA, 32 nt, Homo Sapiens
agggauucuaagucaguugcacuuacaugauu

SEQ ID NO: 348093 - RNA, 32 nt, Homo Sapiens
aaugaaggagagaggagcauggggugucccgu

SEQ ID NO: 348094 - RNA, 31 nt, Homo Sapiens
uugugagugagcugccugcccauugcccaug

SEQ ID NO: 348095 - RNA, 32 nt, Homo Sapiens
cauccugcugccaaggguggacacagcugcag

SEQ ID NO: 348096 - RNA, 32 nt, Homo Sapiens
ccucucuuuuccauugaacaaacauuuauuga

SEQ ID NO: 348097 - RNA, 32 nt, Homo Sapiens
cugcaaguguuggccguggguccagccaacaa

SEQ ID NO: 348098 - RNA, 32 nt, Homo Sapiens
uaguccuggcuucccuugggcuccucagagcu

SEQ ID NO: 348099 - RNA, 32 nt, Homo Sapiens
gcaguggcgcggucuuggcucacugcaaccuc

SEQ ID NO: 348100 - RNA, 32 nt, Homo Sapiens
ugggacgugcaguguucauaguagcaauguau

SEQ ID NO: 348101 - RNA, 32 nt, Homo Sapiens
gccccccuuucugcucacacaauugcacucca

SEQ ID NO: 348102 - RNA, 32 nt, Homo Sapiens
gaacagaggaagccagagccccugccccauuc

SEQ ID NO: 348103 - RNA, 32 nt, Homo Sapiens
cugggagccccacccccgccucuggauggacc

SEQ ID NO: 348104 - RNA, 30 nt, Homo Sapiens
cgcgcuccggccuugccgccgccaccucgc

SEQ ID NO: 348105 - RNA, 32 nt, Homo Sapiens
aaauuuuguaaauaugcaaaucagcuuuauag

SEQ ID NO: 348106 - RNA, 32 nt, Homo Sapiens
augauuaaacacauuacuagugggagaacucc

SEQ ID NO: 348107 - RNA, 32 nt, Homo Sapiens
cauccucccccucccuuuccucaugaacccca

SEQ ID NO: 348108 - RNA, 32 nt, Homo Sapiens
ugaauaaagcagaauaaaaauaaaauacuuuc

SEQ ID NO: 348109 - RNA, 32 nt, Homo Sapiens
ucucugagggggugggggugccgcuuucucug

SEQ ID NO: 348110 - RNA, 32 nt, Homo Sapiens
agucauuaauuccuuaaauuauuuuacuguuc

SEQ ID NO: 348111 - RNA, 32 nt, Homo Sapiens
ucagguaguugaaaguuuuuuuuuagagauga

SEQ ID NO: 348112 - RNA, 32 nt, Homo Sapiens
gguguucagaucuaugaccggacaucuguucu

SEQ ID NO: 348113 - RNA, 32 nt, Homo Sapiens
agaaaugccaacgggagcaaauaaaaaauccc

SEQ ID NO: 348114 - RNA, 32 nt, Homo Sapiens
cucucaagugauccuccugccucagccuccug

SEQ ID NO: 348115 - RNA, 32 nt, Homo Sapiens
ggagaauuugguguggaaagcauaggaggccc

SEQ ID NO: 348116 - RNA, 32 nt, Homo Sapiens
ugccgcgcgaggcgcuguggcugcugaccagg

SEQ ID NO: 348117 - RNA, 32 nt, Homo Sapiens
ggagcagcagcguggacgcggcuggcgcuggc

SEQ ID NO: 348118 - RNA, 32 nt, Homo Sapiens
uauauuauaaauuuaucuuuugggauauaaua

SEQ ID NO: 348119 - RNA, 32 nt, Homo Sapiens
ccccuagaaacacuuaaagaagaaagucaguc

SEQ ID NO: 348120 - RNA, 32 nt, Homo Sapiens
ggggugcccaacgcaauccuugggggugcagg

SEQ ID NO: 348121 - RNA, 32 nt, Homo Sapiens
cucugggcacuaggugggcccuugaaggggag

SEQ ID NO: 348122 - RNA, 32 nt, Homo Sapiens
ucaaggcugggucuuucgcccccucaggcuca

SEQ ID NO: 348123 - RNA, 32 nt, Homo Sapiens
cauugagggguuaacauuaggcugggaagaug

SEQ ID NO: 348124 - RNA, 32 nt, Homo Sapiens
uuuguguggugggacagauuuuuuaaacacac

SEQ ID NO: 348125 - RNA, 32 nt, Homo Sapiens
cgacccccugcaccauggaccccgcucgcccc

SEQ ID NO: 348126 - RNA, 32 nt, Homo Sapiens
uauggggaaucuccucuugguuucugguugca

SEQ ID NO: 348127 - RNA, 32 nt, Homo Sapiens
ucacucccuguagccccgucacguucucaaaa

SEQ ID NO: 348128 - RNA, 32 nt, Homo Sapiens
gaaaugagaaaaagguuauaucugacucccuc

SEQ ID NO: 348129 - RNA, 32 nt, Homo Sapiens
gcacuuaauauugaaauguacuguauaggaac

SEQ ID NO: 348130 - RNA, 32 nt, Homo Sapiens
gguuauguuuuaagauuaugaagccuuugauu

SEQ ID NO: 348131 - RNA, 32 nt, Homo Sapiens
acucccucuccccagcuguccuccccuuggug

SEQ ID NO: 348132 - RNA, 32 nt, Homo Sapiens
uuuuccauauccuugcuguggagcucuggaac

SEQ ID NO: 348133 - RNA, 32 nt, Homo Sapiens
cuauacugaaagaucucugucacauccaacug

SEQ ID NO: 348134 - RNA, 32 nt, Homo Sapiens
uccuggacgguggcggccgccggcucuaugau

SEQ ID NO: 348135 - RNA, 32 nt, Homo Sapiens
uggcggggacggugcagcaggcggcgggaugc

SEQ ID NO: 348136 - RNA, 32 nt, Homo Sapiens
guuggaaaaguggaacagauagacuugcugga

SEQ ID NO: 348137 - RNA, 32 nt, Homo Sapiens
auaaaauccaaauaaucuuguaaccuauuuau

SEQ ID NO: 348138 - RNA, 32 nt, Homo Sapiens
cacuuagaauauauuuuauuuaauaaguuaaa

SEQ ID NO: 348139 - RNA, 28 nt, Homo Sapiens
gacgcugaggaagccaggauggcgacuc

SEQ ID NO: 348140 - RNA, 32 nt, Homo Sapiens
ucucuuucuaacauguugugguaaaucuguuc

SEQ ID NO: 348141 - RNA, 32 nt, Homo Sapiens
uccaggguguucaucugcacagaugggagagg

SEQ ID NO: 348142 - RNA, 32 nt, Homo Sapiens
accucccucacaggacaaucagacaugaaggg

SEQ ID NO: 348143 - RNA, 32 nt, Homo Sapiens
ccuaaacucuugaugaaagaacuuuaaaaaga

SEQ ID NO: 348144 - RNA, 32 nt, Homo Sapiens
gggaccagcuggaagacuagccucacucuguc

SEQ ID NO: 348145 - RNA, 32 nt, Homo Sapiens
uguugccuuuuuagauggcuuucuacccccug

SEQ ID NO: 348146 - RNA, 32 nt, Homo Sapiens
auuaguuccuaguagcagcaguggggccaaca

SEQ ID NO: 348147 - RNA, 32 nt, Homo Sapiens
acauguaucaagcugagccagaugaauaaguc

SEQ ID NO: 348148 - RNA, 32 nt, Homo Sapiens
ugccuacgcagcuccaggauccagcaaaccgu

SEQ ID NO: 348149 - RNA, 32 nt, Homo Sapiens
uagggaaaugacauuguaaaucauaguagccu

SEQ ID NO: 348150 - RNA, 32 nt, Homo Sapiens
agcgucuuguggucugcgaguucuggccaacu

SEQ ID NO: 348151 - RNA, 32 nt, Homo Sapiens
uccaugcccaaguucaucuccugagcaacagu

SEQ ID NO: 348152 - RNA, 32 nt, Homo Sapiens
aaaaccguuauaaauaagaauaaaauaggcca

SEQ ID NO: 348153 - RNA, 32 nt, Homo Sapiens
uggcauuggagaaggucccacccccaaaugca

SEQ ID NO: 348154 - RNA, 32 nt, Homo Sapiens
gucugcugcuccacgagcugccugaccgccgc

SEQ ID NO: 348155 - RNA, 32 nt, Homo Sapiens
gauuuuauagcuuuugagcuaacguaacuuuu

SEQ ID NO: 348156 - RNA, 32 nt, Homo Sapiens
uaucaauuucuuauuaauuaaucuugaugauu

SEQ ID NO: 348157 - RNA, 32 nt, Homo Sapiens
aaaacauggaugucugggucccgccccauaga

SEQ ID NO: 348158 - RNA, 32 nt, Homo Sapiens
gauauuuugucccauuucacucucuucucaua

SEQ ID NO: 348159 - RNA, 32 nt, Homo Sapiens
acuuugguguaaaauuccaccaguuuccagcc

SEQ ID NO: 348160 - RNA, 32 nt, Homo Sapiens
acaaaacaaaaaucuguguaacuguaaaacau

SEQ ID NO: 348161 - RNA, 32 nt, Homo Sapiens
cgccccaugcucuucccuccccucgagugugg

SEQ ID NO: 348162 - RNA, 32 nt, Homo Sapiens
guuuuuauuuuaaaaggcacaaacucuagaua

SEQ ID NO: 348163 - RNA, 32 nt, Homo Sapiens
ccacaaggaguauguuaaauuuggaauacccu

SEQ ID NO: 348164 - RNA, 30 nt, Homo Sapiens
uccuacuugccauucacccaucaaugugaa

SEQ ID NO: 348165 - RNA, 32 nt, Homo Sapiens
ccaagacccgagcugggaccaguaccuggguc

SEQ ID NO: 348166 - RNA, 32 nt, Homo Sapiens
ccggaccugccaggaggugggcuggcgcggag

SEQ ID NO: 348167 - RNA, 32 nt, Homo Sapiens
gucugcccucccccacucaaaccgggaucaug

SEQ ID NO: 348168 - RNA, 32 nt, Homo Sapiens
gcugccagccucuacuuguaagucagcuaaag

SEQ ID NO: 348169 - RNA, 32 nt, Homo Sapiens
ugugauuuaaacaaacuaguaaaguuaaauag

SEQ ID NO: 348170 - RNA, 32 nt, Homo Sapiens
gcagacgccuggagagggacaggccgcuuccg

SEQ ID NO: 348171 - RNA, 32 nt, Homo Sapiens
ggcaggaucgggagaccccaacucccccugaa

SEQ ID NO: 348172 - RNA, 32 nt, Homo Sapiens
gcuugcucacuuugcuggccuuugaaaugugu

SEQ ID NO: 348173 - RNA, 32 nt, Homo Sapiens
gguuucaugggccucugcuuuaugaugcaaag

SEQ ID NO: 348174 - RNA, 32 nt, Homo Sapiens
uuaucauacuaaaguuguucuuuuaauuuagc

SEQ ID NO: 348175 - RNA, 32 nt, Homo Sapiens
acgguguguucauuuguuuaaaacaguuuaau

SEQ ID NO: 348176 - RNA, 32 nt, Homo Sapiens
caguguagcaacaacagugugaggacaaaagc

SEQ ID NO: 348177 - RNA, 32 nt, Homo Sapiens
cuaaaaauaggaacaauuagccaggcauggug

SEQ ID NO: 348178 - RNA, 32 nt, Homo Sapiens
uguuucuguauauuuauuuuuauguacagaac

SEQ ID NO: 348179 - RNA, 32 nt, Homo Sapiens
ucauagaguauauaacauugucuaacagagag

SEQ ID NO: 348180 - RNA, 32 nt, Homo Sapiens
uaguccuuucugccuccaggagcggcuccgug

SEQ ID NO: 348181 - RNA, 32 nt, Homo Sapiens
uuguguaauauccacaaucauagacaaccaaa

SEQ ID NO: 348182 - RNA, 28 nt, Homo Sapiens
cccugggagccgccgccgagggccugcu

SEQ ID NO: 348183 - RNA, 31 nt, Homo Sapiens
ccagcacacuaaauaaaguauuugagcaaua

SEQ ID NO: 348184 - RNA, 29 nt, Homo Sapiens
gaccugucauaugauuagcugcuuuuguu

SEQ ID NO: 348185 - RNA, 32 nt, Homo Sapiens
ccaggccuauauuuccucuucuguaaaauggg

SEQ ID NO: 348186 - RNA, 32 nt, Homo Sapiens
ugggcacuagaagcagcggggagggguucuag

SEQ ID NO: 348187 - RNA, 32 nt, Homo Sapiens
uagggggaaugggaaacggacaccucauaaag

SEQ ID NO: 348188 - RNA, 32 nt, Homo Sapiens
ugcaaucaaaaauauguguuuuuaagauuagu

SEQ ID NO: 348189 - RNA, 32 nt, Homo Sapiens
cuauaagaauauauuuaguuuacaguauaugg

SEQ ID NO: 348190 - RNA, 32 nt, Homo Sapiens
agcuuauccaaauguuccguuggucccuguuc

SEQ ID NO: 348191 - RNA, 32 nt, Homo Sapiens
uaaaagaaaguaguguuaaauguaucaguaac

SEQ ID NO: 348192 - RNA, 32 nt, Homo Sapiens
ggccaggcaggcagccggggccugacauuuga

SEQ ID NO: 348193 - RNA, 32 nt, Homo Sapiens
uggggguuugaaaaaucaaagauaauuaacca

SEQ ID NO: 348194 - RNA, 32 nt, Homo Sapiens
ggcugcugauuggcugcccugggacuggggcu

SEQ ID NO: 348195 - RNA, 32 nt, Homo Sapiens
ugugaaaaaucugaugacuuuaauuuuaaaau

SEQ ID NO: 348196 - RNA, 32 nt, Homo Sapiens
ucaguauuuguuauugugaaagaaguuaauuc

SEQ ID NO: 348197 - RNA, 28 nt, Homo Sapiens
gccaaggggcggcuccggcgggcggacu

SEQ ID NO: 348198 - RNA, 32 nt, Homo Sapiens
caggcccggcccgggcggcgcgacgggaggau

SEQ ID NO: 348199 - RNA, 32 nt, Homo Sapiens
ucuuuaaauaauaaaauucaagaagcauauuc

SEQ ID NO: 348200 - RNA, 32 nt, Homo Sapiens
gaauuggacaaaacacacaaacaaagcaagga

SEQ ID NO: 348201 - RNA, 32 nt, Homo Sapiens
uuuggcccauggggcccucccaggccccugcc

SEQ ID NO: 348202 - RNA, 31 nt, Homo Sapiens
cacauggcaaggucaggauucaagcuaggua

SEQ ID NO: 348203 - RNA, 32 nt, Homo Sapiens
gugcuacuauacaguggaugucaucuguagaa

SEQ ID NO: 348204 - RNA, 32 nt, Homo Sapiens
uaaguuuccagaacaaauuuccuaauaacaca

SEQ ID NO: 348205 - RNA, 32 nt, Homo Sapiens
cgaguggcacgcgggggcgugugcucugcggg

SEQ ID NO: 348206 - RNA, 32 nt, Homo Sapiens
uacucugucuccauuaucuccuccugcaaacc

SEQ ID NO: 348207 - RNA, 32 nt, Homo Sapiens
aacaaggggaagaugcuggacucauugaaagg

SEQ ID NO: 348208 - RNA, 31 nt, Homo Sapiens
cgcaggcgcaacugccuggcucugcucgcuc

SEQ ID NO: 348209 - RNA, 32 nt, Homo Sapiens
ccacagcccccaccccagcacagcuccucccc

SEQ ID NO: 348210 - RNA, 32 nt, Homo Sapiens
agcugcucaugagugauaaaugucuccccaua

SEQ ID NO: 348211 - RNA, 32 nt, Homo Sapiens
aaccuuacaaauacauuuauauauauguugcu

SEQ ID NO: 348212 - RNA, 32 nt, Homo Sapiens
ccgcugcugcagcagcagcugcucugcagagu

SEQ ID NO: 348213 - RNA, 32 nt, Homo Sapiens
gcccuguguucuagcacuuuguccauuucccg

SEQ ID NO: 348214 - RNA, 32 nt, Homo Sapiens
gcacuguagcagcugcugcuguugcugcgacu

SEQ ID NO: 348215 - RNA, 32 nt, Homo Sapiens
ggccuauauuuccucuucuguaaaauggguau

SEQ ID NO: 348216 - RNA, 32 nt, Homo Sapiens
acagaggauaccaccgagacucggaggggaca

SEQ ID NO: 348217 - RNA, 32 nt, Homo Sapiens
agcaccagucacuuacuccaagaagucguuuc

SEQ ID NO: 348218 - RNA, 32 nt, Homo Sapiens
aagguguuucaguuuuucuuuacuucuuuuga

SEQ ID NO: 348219 - RNA, 32 nt, Homo Sapiens
uagauuuuacacacacuccacagccaagcacu

SEQ ID NO: 348220 - RNA, 32 nt, Homo Sapiens
uugaaagacaaugaaaaaugguuuuguaugac

SEQ ID NO: 348221 - RNA, 32 nt, Homo Sapiens
cccuuucagagccccagggaucucaucugggg

SEQ ID NO: 348222 - RNA, 32 nt, Homo Sapiens
ggcuaauacaggaaacaagagguaccaaaaaa

SEQ ID NO: 348223 - RNA, 32 nt, Homo Sapiens
ccuuauucagaauugagcagugauugucaguu

SEQ ID NO: 348224 - RNA, 32 nt, Homo Sapiens
ucaaaacaagacaaauggggauagauugugcc

SEQ ID NO: 348225 - RNA, 32 nt, Homo Sapiens
ugugccccaucccacagugacuggccuagggu

SEQ ID NO: 348226 - RNA, 32 nt, Homo Sapiens
ccagcaguggcuggguccuuccgcgccccucc

SEQ ID NO: 348227 - RNA, 32 nt, Homo Sapiens
aauaggacacucaagacuuuugacugccauuu

SEQ ID NO: 348228 - RNA, 32 nt, Homo Sapiens
uuagcagcuuuuuuuuuuuuuaaaugaagaga

SEQ ID NO: 348229 - RNA, 31 nt, Homo Sapiens
cucugcagguagcuccugccccacacaccug

SEQ ID NO: 348230 - RNA, 32 nt, Homo Sapiens
agaaaagacauuuuaaguuuguaguaaaagug

SEQ ID NO: 348231 - RNA, 32 nt, Homo Sapiens
gucgggagggucaugggauugggaccgaggug

SEQ ID NO: 348232 - RNA, 32 nt, Homo Sapiens
ucuuucagaauaaaccaaguuuuuguaaauuu

SEQ ID NO: 348233 - RNA, 32 nt, Homo Sapiens
caaaugcuuuugucuugaaacaaaacagauuc

SEQ ID NO: 348234 - RNA, 32 nt, Homo Sapiens
guauaguuucuuuaucuuccaagagggugcug

SEQ ID NO: 348235 - RNA, 29 nt, Homo Sapiens
ugggugacacgucucagccuuagcccugu

SEQ ID NO: 348236 - RNA, 32 nt, Homo Sapiens
gaacagaucccagauuauuccagacuuaagac

SEQ ID NO: 348237 - RNA, 29 nt, Homo Sapiens
cccuggucuggggccaggacgccagcuga

SEQ ID NO: 348238 - RNA, 32 nt, Homo Sapiens
gcacacauaaaacuuaccaacagauuucauug

SEQ ID NO: 348239 - RNA, 32 nt, Homo Sapiens
agcgacucuuaauugggacaugggcguugucu

SEQ ID NO: 348240 - RNA, 32 nt, Homo Sapiens
aaauggagaaagcccaagaguuagaacaguug

SEQ ID NO: 348241 - RNA, 32 nt, Homo Sapiens
cuguuauauguuuauguaacuaucaaaugguu

SEQ ID NO: 348242 - RNA, 27 nt, Homo Sapiens
ugaaauaaacuuaugugauguucuggu

SEQ ID NO: 348243 - RNA, 32 nt, Homo Sapiens
gacccucggcggugguugcuguauuuugacuu

SEQ ID NO: 348244 - RNA, 32 nt, Homo Sapiens
uaaaccagguuugcaccuaaguguguacuagu

SEQ ID NO: 348245 - RNA, 32 nt, Homo Sapiens
caccuguaaucccagcacuuugggaggacaag

SEQ ID NO: 348246 - RNA, 32 nt, Homo Sapiens
caccuguaaucacagcacuuugggaggccaag

SEQ ID NO: 348247 - RNA, 32 nt, Homo Sapiens
cccaagguggcaguuguggaaccaucagagag

SEQ ID NO: 348248 - RNA, 32 nt, Homo Sapiens
aauauuuuuuauucacagugaaauuucauuca

SEQ ID NO: 348249 - RNA, 30 nt, Homo Sapiens
agcacagggcacccggcggguccugagggu

SEQ ID NO: 348250 - RNA, 32 nt, Homo Sapiens
gauugagggagaaauguauuuguguguucauu

SEQ ID NO: 348251 - RNA, 32 nt, Homo Sapiens
aggcaguugaaggaggcagagaagggguuggu

SEQ ID NO: 348252 - RNA, 32 nt, Homo Sapiens
cgcguucugcuguaacgagcgggcucggaggu

SEQ ID NO: 348253 - RNA, 32 nt, Homo Sapiens
ccacccuacuuuugacucuauccuggacuacc

SEQ ID NO: 348254 - RNA, 32 nt, Homo Sapiens
cagauuaccaugcagagcuucacguuaucauc

SEQ ID NO: 348255 - RNA, 32 nt, Homo Sapiens
acaaucagccucuggagaagcuaggacuauag

SEQ ID NO: 348256 - RNA, 32 nt, Homo Sapiens
uuuuccuuuacuacgucagguuugaggacauc

SEQ ID NO: 348257 - RNA, 32 nt, Homo Sapiens
gcuugcuaucauggcagcaugcgaugucauau

SEQ ID NO: 348258 - RNA, 32 nt, Homo Sapiens
cuuuuaauauuuuauuuuucuuuuuaugccac

SEQ ID NO: 348259 - RNA, 32 nt, Homo Sapiens
aaccagcauaauaaaaaggcaaucacauaaaa

SEQ ID NO: 348260 - RNA, 32 nt, Homo Sapiens
cuuaugaagauaaauaaagucaagggaaaaaa

SEQ ID NO: 348261 - RNA, 32 nt, Homo Sapiens
agccuuccucauuaucagaaauuaaagaaauu

SEQ ID NO: 348262 - RNA, 32 nt, Homo Sapiens
cuugugauacggaaacaauaaauuccugagau

SEQ ID NO: 348263 - RNA, 32 nt, Homo Sapiens
ggcggacuccucuuccucucucuucuccuacu

SEQ ID NO: 348264 - RNA, 32 nt, Homo Sapiens
uuccagauuaaagaaaaauguuuuuuaauaaa

SEQ ID NO: 348265 - RNA, 32 nt, Homo Sapiens
caggccacugccugggggcucuagucauucca

SEQ ID NO: 348266 - RNA, 32 nt, Homo Sapiens
accacaaaugcuugcuuggacuugcccaucua

SEQ ID NO: 348267 - RNA, 32 nt, Homo Sapiens
uagguuugggcagggacaaagaauacauggau

SEQ ID NO: 348268 - RNA, 32 nt, Homo Sapiens
ccuuggucucccgugcggugcccugagcgcug

SEQ ID NO: 348269 - RNA, 32 nt, Homo Sapiens
gucaggugacuaucagcccuucugccuuuuug

SEQ ID NO: 348270 - RNA, 32 nt, Homo Sapiens
cucaccagggccuuaaauuuaauauaucccaa

SEQ ID NO: 348271 - RNA, 32 nt, Homo Sapiens
aucauuccccacucacagggggaccgauaugc

SEQ ID NO: 348272 - RNA, 32 nt, Homo Sapiens
cgccucugcccagcugccccuacugggaagug

SEQ ID NO: 348273 - RNA, 32 nt, Homo Sapiens
gcggagagcucauggaaggcgagugggaaccc

SEQ ID NO: 348274 - RNA, 32 nt, Homo Sapiens
acaccagggccccagccacgugucucaggggc

SEQ ID NO: 348275 - RNA, 32 nt, Homo Sapiens
cucugucccuucccuccuggcccgcuggcaac

SEQ ID NO: 348276 - RNA, 32 nt, Homo Sapiens
aauaaauaaaaauaauaaaaccuccauaagua

SEQ ID NO: 348277 - RNA, 32 nt, Homo Sapiens
uuagccgggcguggugccgcuccagcuacuca

SEQ ID NO: 348278 - RNA, 32 nt, Homo Sapiens
ugggaggggcagcggcagcaguggcagcgccg

SEQ ID NO: 348279 - RNA, 32 nt, Homo Sapiens
uccucauuggcggcgccuggugcaagaaguug

SEQ ID NO: 348280 - RNA, 32 nt, Homo Sapiens
ggucuugaggcaugggacagguccaggcuggc

SEQ ID NO: 348281 - RNA, 32 nt, Homo Sapiens
ugcugauccgcacuaacucaucuuugcaaaag

SEQ ID NO: 348282 - RNA, 32 nt, Homo Sapiens
cagauuaucuucuguaaaguuuugucuucucg

SEQ ID NO: 348283 - RNA, 31 nt, Homo Sapiens
aggguccaucuacagaaccaaggaaugggcu

SEQ ID NO: 348284 - RNA, 28 nt, Homo Sapiens
auguagaaaggauaacauuucucaugaa

SEQ ID NO: 348285 - RNA, 32 nt, Homo Sapiens
guagcuuagaaguaggagccugcacggcuuca

SEQ ID NO: 348286 - RNA, 32 nt, Homo Sapiens
aaauuccuugagggcauugacuuuacaaaaga

SEQ ID NO: 348287 - RNA, 32 nt, Homo Sapiens
agccggcccaggcucggugaggaggcaagucc

SEQ ID NO: 348288 - RNA, 32 nt, Homo Sapiens
gcaucuuggcaaagaaugauguuuccuguggg

SEQ ID NO: 348289 - RNA, 32 nt, Homo Sapiens
gggaaaacagcuuauaaauccaaauaucaauu

SEQ ID NO: 348290 - RNA, 32 nt, Homo Sapiens
cagugaucaucuuguucaucuuguucaguccu

SEQ ID NO: 348291 - RNA, 31 nt, Homo Sapiens
acagcugagccccagugcugugcagucugac

SEQ ID NO: 348292 - RNA, 32 nt, Homo Sapiens
acugggggaaagggaugguugugggucuuucu

SEQ ID NO: 348293 - RNA, 32 nt, Homo Sapiens
ggccuccauguguugugcugcacgggcuacug

SEQ ID NO: 348294 - RNA, 32 nt, Homo Sapiens
auccucuccccgcucuagguuucuucucccaa

SEQ ID NO: 348295 - RNA, 32 nt, Homo Sapiens
gauggaggcuugcucugucacccaggcuggag

SEQ ID NO: 348296 - RNA, 32 nt, Homo Sapiens
cucugacccagcuagccagaucccggacccaa

SEQ ID NO: 348297 - RNA, 32 nt, Homo Sapiens
uuguauuuuccacuucauuucuuuuaaaauau

SEQ ID NO: 348298 - RNA, 31 nt, Homo Sapiens
ucugcugcaagguccccuggcaguggcccau

SEQ ID NO: 348299 - RNA, 29 nt, Homo Sapiens
ucccaauaaaguuuaaaauuuucuuaaua

SEQ ID NO: 348300 - RNA, 32 nt, Homo Sapiens
ucucagcccugccugcccuggccugggcucuc

SEQ ID NO: 348301 - RNA, 32 nt, Homo Sapiens
ugauagcaacuuuccacacaggacguugaaaa

SEQ ID NO: 348302 - RNA, 32 nt, Homo Sapiens
ggcaggagagaacaacaggggcugggaaugga

SEQ ID NO: 348303 - RNA, 32 nt, Homo Sapiens
cucggcgguuugcggaggaugcagggauaugc

SEQ ID NO: 348304 - RNA, 32 nt, Homo Sapiens
uccagacauuuuaauagagauugcuugagcca

SEQ ID NO: 348305 - RNA, 32 nt, Homo Sapiens
cucucauuuuuccucuuuccaaagaggaaugu

SEQ ID NO: 348306 - RNA, 32 nt, Homo Sapiens
agcccucgcccggcccggacacagggaggacg

SEQ ID NO: 348307 - RNA, 32 nt, Homo Sapiens
ggguauaaaucuugcuugaugugugugcaaug

SEQ ID NO: 348308 - RNA, 32 nt, Homo Sapiens
ggugggugugugagggcaagaaaaacuuuuuu

SEQ ID NO: 348309 - RNA, 32 nt, Homo Sapiens
cccauggccggcuuucaggagcuccauacaca

SEQ ID NO: 348310 - RNA, 32 nt, Homo Sapiens
ugucuggcaucuagcaaacauucuucacaugu

SEQ ID NO: 348311 - RNA, 32 nt, Homo Sapiens
gcaaaggugaugugaagcaggagaaguugugg

SEQ ID NO: 348312 - RNA, 32 nt, Homo Sapiens
uuuguuucuccaucuaccaccauccaccaguc

SEQ ID NO: 348313 - RNA, 32 nt, Homo Sapiens
gcuaauuuuuaaaauuuuuuguagagaugggg

SEQ ID NO: 348314 - RNA, 32 nt, Homo Sapiens
aaucucaccucugccacccaucuacuugcauu

SEQ ID NO: 348315 - RNA, 32 nt, Homo Sapiens
cccacgcguccgcgccugcuuccuccgaagac

SEQ ID NO: 348316 - RNA, 32 nt, Homo Sapiens
uucucucucuuuuuuucuuagucuagauaaag

SEQ ID NO: 348317 - RNA, 32 nt, Homo Sapiens
agagcugacccggcauccugacgccucaaauc

SEQ ID NO: 348318 - RNA, 32 nt, Homo Sapiens
auuauugaugauuuuguaauucuuaugacuaa

SEQ ID NO: 348319 - RNA, 32 nt, Homo Sapiens
ggacagcaggacuucaggucuuccugggggug

SEQ ID NO: 348320 - RNA, 32 nt, Homo Sapiens
ugaagacgcccuugacccccagcccauucgac

SEQ ID NO: 348321 - RNA, 32 nt, Homo Sapiens
aaccacugacagagcuagaggaguccauugag

SEQ ID NO: 348322 - RNA, 32 nt, Homo Sapiens
ggacacaaccucaaaucaguggugccuucuua

SEQ ID NO: 348323 - RNA, 32 nt, Homo Sapiens
uauagauguuuugagagacacuuuuuguuaaa

SEQ ID NO: 348324 - RNA, 32 nt, Homo Sapiens
ugguguuucaggcagagcucuggccaggcugu

SEQ ID NO: 348325 - RNA, 32 nt, Homo Sapiens
agguauaucugccugcggggcuggggaggcag

SEQ ID NO: 348326 - RNA, 32 nt, Homo Sapiens
aaaggacagggcagucuuggaacuuucugaga

SEQ ID NO: 348327 - RNA, 32 nt, Homo Sapiens
gauuuuaaagcaccagaccugcuccuuugacc

SEQ ID NO: 348328 - RNA, 32 nt, Homo Sapiens
gcgccgcccgccaccccacaccucccacgcua

SEQ ID NO: 348329 - RNA, 32 nt, Homo Sapiens
ugcuucuagcucaggacaccccugcccgcgau

SEQ ID NO: 348330 - RNA, 32 nt, Homo Sapiens
acuaccugcagcuuugagucuugcccuacauu

SEQ ID NO: 348331 - RNA, 32 nt, Homo Sapiens
ggccccggccccagccagaguuccugcggagu

SEQ ID NO: 348332 - RNA, 32 nt, Homo Sapiens
gugcccucgcgugccaggcccgcggcggccga

SEQ ID NO: 348333 - RNA, 32 nt, Homo Sapiens
aacccgggaggcggaggcugcagugagucgag

SEQ ID NO: 348334 - RNA, 32 nt, Homo Sapiens
cauugccucaugaaagaaaugauccuuuuggu

SEQ ID NO: 348335 - RNA, 32 nt, Homo Sapiens
guaucuacuuagccagaugcuuggccuggugg

SEQ ID NO: 348336 - RNA, 32 nt, Homo Sapiens
accaggucggaaggaggagacccacgagggag

SEQ ID NO: 348337 - RNA, 32 nt, Homo Sapiens
gcccucugcccggcccuacugagauucccaag

SEQ ID NO: 348338 - RNA, 32 nt, Homo Sapiens
ucuuacuuaacacacccacaaacaauucugau

SEQ ID NO: 348339 - RNA, 32 nt, Homo Sapiens
gaauuuggagggcaggcacgaagaacagugag

SEQ ID NO: 348340 - RNA, 32 nt, Homo Sapiens
aagaaauguuacauguguacuccacaggcaua

SEQ ID NO: 348341 - RNA, 32 nt, Homo Sapiens
ucuuugauguuuuaacuuuugcuggcaaaaaa

SEQ ID NO: 348342 - RNA, 32 nt, Homo Sapiens
gccuccgcuccuuaaugugaaacuucaugaag

SEQ ID NO: 348343 - RNA, 32 nt, Homo Sapiens
uuauaaacauucuauuugauuuuaagcaaaau

SEQ ID NO: 348344 - RNA, 32 nt, Homo Sapiens
cugggcuguggcuggcuguggagcuagagccc

SEQ ID NO: 348345 - RNA, 32 nt, Homo Sapiens
acugccacaagccccucccucucugucacccc

SEQ ID NO: 348346 - RNA, 32 nt, Homo Sapiens
uaaaucucaauccagguuuacuuuaguauaga

SEQ ID NO: 348347 - RNA, 32 nt, Homo Sapiens
aaaauaagaacaaagagaaaaguaaguuuugu

SEQ ID NO: 348348 - RNA, 32 nt, Homo Sapiens
cccagaccccaucccuucuccuuuuccuuugu

SEQ ID NO: 348349 - RNA, 32 nt, Homo Sapiens
aacauuuaggacuuaaugcuguccacaaauug

SEQ ID NO: 348350 - RNA, 32 nt, Homo Sapiens
gugcuagaggggugucgugugcaugcgcguug

SEQ ID NO: 348351 - RNA, 32 nt, Homo Sapiens
gcugccggcgucggccgagaucccucugggca

SEQ ID NO: 348352 - RNA, 32 nt, Homo Sapiens
auugcgcgcggcugggcccgcggccggcggcu

SEQ ID NO: 348353 - RNA, 32 nt, Homo Sapiens
uauccuuuuuaaaaaauguuguuagcuuggug

SEQ ID NO: 348354 - RNA, 32 nt, Homo Sapiens
gagagguugccugguggcccugagagagccau

SEQ ID NO: 348355 - RNA, 32 nt, Homo Sapiens
caucuuccacuuuaagcuaaguuaugauaccu

SEQ ID NO: 348356 - RNA, 32 nt, Homo Sapiens
uuccuggccccgggcucuggccacccuggccc

SEQ ID NO: 348357 - RNA, 32 nt, Homo Sapiens
cgcgggaggaggaggagccggagccucugccu

SEQ ID NO: 348358 - RNA, 32 nt, Homo Sapiens
gucucugaggcacaaccuuuaugaaaggaagg

SEQ ID NO: 348359 - RNA, 32 nt, Homo Sapiens
agccaccugccagccucgcugggcagggcugg

SEQ ID NO: 348360 - RNA, 32 nt, Homo Sapiens
agccaucugcacccacuuuugcuuguagucau

SEQ ID NO: 348361 - RNA, 32 nt, Homo Sapiens
ucuugccuguuuacacucuaucuuacagaggu

SEQ ID NO: 348362 - RNA, 32 nt, Homo Sapiens
uauuauuuuccuaggcgcaauuuccuuaaacg

SEQ ID NO: 348363 - RNA, 32 nt, Homo Sapiens
ugcuccugcugcgucgugaggacccggggccg

SEQ ID NO: 348364 - RNA, 26 nt, Homo Sapiens
ugacaauaaagauuauuuuuugauac

SEQ ID NO: 348365 - RNA, 32 nt, Homo Sapiens
cgccgcccgcuucccgccccuggcgccucaca

SEQ ID NO: 348366 - RNA, 32 nt, Homo Sapiens
ggcgccccggugccucgggccgaaggucggcc

SEQ ID NO: 348367 - RNA, 32 nt, Homo Sapiens
caaaacuaaaauuguuagguaaguuauuuaua

SEQ ID NO: 348368 - RNA, 32 nt, Homo Sapiens
gacguacggagcccgcaagucccggcccgagg

SEQ ID NO: 348369 - RNA, 32 nt, Homo Sapiens
uaauguaaagauuguuucuuguuucaggaaug

SEQ ID NO: 348370 - RNA, 32 nt, Homo Sapiens
uacuuaacuaaaacucgugacuguauaaguuu

SEQ ID NO: 348371 - RNA, 32 nt, Homo Sapiens
ucuccuacauguauugcugcuacuucaagcuc

SEQ ID NO: 348372 - RNA, 32 nt, Homo Sapiens
ccugccuccaaaugcgucuuggagcauccccu

SEQ ID NO: 348373 - RNA, 32 nt, Homo Sapiens
uauacaaauagcaaaauugaggccaagggcca

SEQ ID NO: 348374 - RNA, 32 nt, Homo Sapiens
gggacugcucggccgccuccugcccggcgagc

SEQ ID NO: 348375 - RNA, 32 nt, Homo Sapiens
uacccugcucccagcaucacaaggcacuuguc

SEQ ID NO: 348376 - RNA, 32 nt, Homo Sapiens
uuuacauaaacuaaaugugagguuuguuacug

SEQ ID NO: 348377 - RNA, 32 nt, Homo Sapiens
aaccugggucauuuguccuguagaguguuucc

SEQ ID NO: 348378 - RNA, 32 nt, Homo Sapiens
agccgggcccucacugaagggcagcauuugga

SEQ ID NO: 348379 - RNA, 32 nt, Homo Sapiens
auuuucccauaugaaaaaaggagagaacacug

SEQ ID NO: 348380 - RNA, 32 nt, Homo Sapiens
cgaucagcggcuggggcagguuaugguagugc

SEQ ID NO: 348381 - RNA, 32 nt, Homo Sapiens
ccuggaucucccagcugaaauccuaguuauua

SEQ ID NO: 348382 - RNA, 32 nt, Homo Sapiens
uggggaugcaagaagacaguggucaucuauaa

SEQ ID NO: 348383 - RNA, 32 nt, Homo Sapiens
ggggcggcugggcagaggggccccucaccucc

SEQ ID NO: 348384 - RNA, 32 nt, Homo Sapiens
agguauggugugcaacagauuguacaauuaca

SEQ ID NO: 348385 - RNA, 32 nt, Homo Sapiens
aaacuuaaguguucuguuuuuaucaggacuau

SEQ ID NO: 348386 - RNA, 32 nt, Homo Sapiens
ucacauuuuaagacuuuuuuuuuuuccauaua

SEQ ID NO: 348387 - RNA, 32 nt, Homo Sapiens
ugugugaccagggcuagucacuuuuuacuucu

SEQ ID NO: 348388 - RNA, 25 nt, Homo Sapiens
augauggcugcggugccgccgggcc

SEQ ID NO: 348389 - RNA, 32 nt, Homo Sapiens
uggcgggcugguggccggcguugucgcgcacg

SEQ ID NO: 348390 - RNA, 32 nt, Homo Sapiens
cauguuaaaaauuuagguuuuauucauguuua

SEQ ID NO: 348391 - RNA, 32 nt, Homo Sapiens
gugccuuuuuaaauaaauugcugaaauuuggc

SEQ ID NO: 348392 - RNA, 32 nt, Homo Sapiens
gugguuugccccaccagauggcuuuagagauc

SEQ ID NO: 348393 - RNA, 32 nt, Homo Sapiens
ccagucucggcagucgagagccagccaauaga

SEQ ID NO: 348394 - RNA, 32 nt, Homo Sapiens
gugugugcugagagaauccguccccggcacca

SEQ ID NO: 348395 - RNA, 32 nt, Homo Sapiens
guagguugcacaagaacuuuuacucacuugua

SEQ ID NO: 348396 - RNA, 32 nt, Homo Sapiens
ccuuucuccgugucccccgcccgccccgucca

SEQ ID NO: 348397 - RNA, 32 nt, Homo Sapiens
ugcuauuaauucuccuucucugaaugacucag

SEQ ID NO: 348398 - RNA, 32 nt, Homo Sapiens
gaagguagacagcaacaagauuuuaaucaccu

SEQ ID NO: 348399 - RNA, 32 nt, Homo Sapiens
cucuaggcauauugaucauuuuagacacuggg

SEQ ID NO: 348400 - RNA, 32 nt, Homo Sapiens
cugugggcuggcacucgauaccucuggcaaga

SEQ ID NO: 348401 - RNA, 32 nt, Homo Sapiens
cagggugcgggcgggcggagcgaggagggacg

SEQ ID NO: 348402 - RNA, 32 nt, Homo Sapiens
guguuaccaaaguuguguuaucuugaaagcau

SEQ ID NO: 348403 - RNA, 32 nt, Homo Sapiens
gcugugcuccauguggcaagguggaaggcaug

SEQ ID NO: 348404 - RNA, 32 nt, Homo Sapiens
gaacauuuauauaucuacaaaaauauggagaa

SEQ ID NO: 348405 - RNA, 32 nt, Homo Sapiens
aggcuggcggacucuucauccuggacaguccc

SEQ ID NO: 348406 - RNA, 32 nt, Homo Sapiens
gcucugugcccuggaccgcaccucaagguuga

SEQ ID NO: 348407 - RNA, 32 nt, Homo Sapiens
acuuucaugaacugaauucuuauuuaaauagu

SEQ ID NO: 348408 - RNA, 32 nt, Homo Sapiens
gggagcaggccccacucccuccccuccccccu

SEQ ID NO: 348409 - RNA, 32 nt, Homo Sapiens
aacauuuccagaauacaaauuuccaaacuuaa

SEQ ID NO: 348410 - RNA, 32 nt, Homo Sapiens
ggcaggaaaaggauauguaagagguggccuuc

SEQ ID NO: 348411 - RNA, 32 nt, Homo Sapiens
cuacccucagggacacauucucuuucucaggg

SEQ ID NO: 348412 - RNA, 32 nt, Homo Sapiens
aauauguaaucuuuuuaugauuguugaaucaa

SEQ ID NO: 348413 - RNA, 32 nt, Homo Sapiens
ccaaaacagccuguucucuccucucuccuccc

SEQ ID NO: 348414 - RNA, 32 nt, Homo Sapiens
cgaggaucccuacccccuggccccacaauaaa

SEQ ID NO: 348415 - RNA, 32 nt, Homo Sapiens
aagagaaacaaauaaacuagucuguuggcaau

SEQ ID NO: 348416 - RNA, 32 nt, Homo Sapiens
acgagggcgggaggaguggcagcggcaaggca

SEQ ID NO: 348417 - RNA, 32 nt, Homo Sapiens
ccuggccugccgagacauggagaagugugagg

SEQ ID NO: 348418 - RNA, 30 nt, Homo Sapiens
uugaaacaguugcugggggaaguggccaga

SEQ ID NO: 348419 - RNA, 32 nt, Homo Sapiens
ggggaggcgagggcggggcggucacgugagag

SEQ ID NO: 348420 - RNA, 32 nt, Homo Sapiens
uuucuuucagccuuuuuccuucccccauuaug

SEQ ID NO: 348421 - RNA, 32 nt, Homo Sapiens
uuccuguguggcucaaggguucucugugagag

SEQ ID NO: 348422 - RNA, 32 nt, Homo Sapiens
cagguccucucgguccucuccauccugugcuu

SEQ ID NO: 348423 - RNA, 32 nt, Homo Sapiens
ugaccuuguggaggccgcgucucugcugcgug

SEQ ID NO: 348424 - RNA, 32 nt, Homo Sapiens
cauuuucuuucugcaaauaaaaacguguguau

SEQ ID NO: 348425 - RNA, 32 nt, Homo Sapiens
ugggaguagcagccugcaggaguguccucagc

SEQ ID NO: 348426 - RNA, 32 nt, Homo Sapiens
uguguaaguuucacacaaaaacaaaaagacaa

SEQ ID NO: 348427 - RNA, 32 nt, Homo Sapiens
cccuggcuguuccuuucaggcuuccgugcagg

SEQ ID NO: 348428 - RNA, 32 nt, Homo Sapiens
cucuagugcaggaggagaaggaggaggagcag

SEQ ID NO: 348429 - RNA, 32 nt, Homo Sapiens
agcuguguuccaggggagcccuggacaagccc

SEQ ID NO: 348430 - RNA, 32 nt, Homo Sapiens
cggcggcggccacuggccaggcguggacgcgc

SEQ ID NO: 348431 - RNA, 32 nt, Homo Sapiens
cugccaguucccuacagccauccccagucaag

SEQ ID NO: 348432 - RNA, 32 nt, Homo Sapiens
aggccgccacagagcccccuccccuccgacaa

SEQ ID NO: 348433 - RNA, 32 nt, Homo Sapiens
uuccuuggugauuuuugugucguagagagcag

SEQ ID NO: 348434 - RNA, 32 nt, Homo Sapiens
auucugagucugucagcuuucauuuuauuuug

SEQ ID NO: 348435 - RNA, 32 nt, Homo Sapiens
uuuaaaauaauuuaucaaaaaacaagucuuua

SEQ ID NO: 348436 - RNA, 32 nt, Homo Sapiens
cuuguauauauuuggauguagcccuuauuuaa

SEQ ID NO: 348437 - RNA, 32 nt, Homo Sapiens
gauugggcgcgguggcucgcaccuguaauccc

SEQ ID NO: 348438 - RNA, 32 nt, Homo Sapiens
uuuauauucuuaaaauggcaaaaaagaaaaga

SEQ ID NO: 348439 - RNA, 32 nt, Homo Sapiens
ugccccgcccucucccgcacacucaguccccc

SEQ ID NO: 348440 - RNA, 32 nt, Homo Sapiens
uauucauuuuauuuauuuuuuaaacuugccug

SEQ ID NO: 348441 - RNA, 32 nt, Homo Sapiens
gggaaggaaaggaaauaccaaaauauuugcag

SEQ ID NO: 348442 - RNA, 32 nt, Homo Sapiens
caaaccucaguucugaaagagcuacagaaugc

SEQ ID NO: 348443 - RNA, 30 nt, Homo Sapiens
cccagccuggacugcacccuuauucuggca

SEQ ID NO: 348444 - RNA, 32 nt, Homo Sapiens
ucauuaaggagaggaguguggaggccgaggag

SEQ ID NO: 348445 - RNA, 32 nt, Homo Sapiens
agaauuuuauuuuauuuuuuuaaaaugcaaag

SEQ ID NO: 348446 - RNA, 32 nt, Homo Sapiens
cagcuguuauugcugcagggccaagcccuuuu

SEQ ID NO: 348447 - RNA, 32 nt, Homo Sapiens
ggcuccagggccugggggcgacagcaacugcg

SEQ ID NO: 348448 - RNA, 32 nt, Homo Sapiens
cuggggaccgggacagccgcuccagcuucugc

SEQ ID NO: 348449 - RNA, 32 nt, Homo Sapiens
gccccucuucccugaauaaccaagaacauguu

SEQ ID NO: 348450 - RNA, 32 nt, Homo Sapiens
cucaugucuugccgcccuuccuccauguguuu

SEQ ID NO: 348451 - RNA, 32 nt, Homo Sapiens
aaagaccuuggcuuuggaaacaucuuaccccu

SEQ ID NO: 348452 - RNA, 31 nt, Homo Sapiens
uuuugggacaauuguuuuaaucugaaauucu

SEQ ID NO: 348453 - RNA, 29 nt, Homo Sapiens
ugcccguggcauuuccugcugagaggcga

SEQ ID NO: 348454 - RNA, 32 nt, Homo Sapiens
uggggcugaccccaaugcugcagagcagucag

SEQ ID NO: 348455 - RNA, 32 nt, Homo Sapiens
acauucugcuugagggagggaauagaaagggg

SEQ ID NO: 348456 - RNA, 32 nt, Homo Sapiens
gguggacugagccucacuuccacacaaaacca

SEQ ID NO: 348457 - RNA, 32 nt, Homo Sapiens
ccggggcguaggggccguugcccgcgauggac

SEQ ID NO: 348458 - RNA, 29 nt, Homo Sapiens
cgucagcccggccggguacgaggcgccuc

SEQ ID NO: 348459 - RNA, 32 nt, Homo Sapiens
accaugaccagaguuuccagaugauacacguu

SEQ ID NO: 348460 - RNA, 32 nt, Homo Sapiens
aggagcgagcggcggcgguggcggcgguggcg

SEQ ID NO: 348461 - RNA, 32 nt, Homo Sapiens
cagcuccaccaauaaacuugugucucacugca

SEQ ID NO: 348462 - RNA, 32 nt, Homo Sapiens
cgcuuccauuccugcccuuggauuucaggauc

SEQ ID NO: 348463 - RNA, 32 nt, Homo Sapiens
acacggcggggcccgguggccggcaucuggcc

SEQ ID NO: 348464 - RNA, 32 nt, Homo Sapiens
guucauuuuccuucuuuuuaauuuuuaauguu

SEQ ID NO: 348465 - RNA, 32 nt, Homo Sapiens
uauccauuacacaauagacuacuuacuacuca

SEQ ID NO: 348466 - RNA, 32 nt, Homo Sapiens
caggccccgccuuuuuugcggcccccauugug

SEQ ID NO: 348467 - RNA, 32 nt, Homo Sapiens
agccugcagggcggggccgcggcgcgugcuga

SEQ ID NO: 348468 - RNA, 32 nt, Homo Sapiens
acaugcuaagcugguuaguauaaagaaagaua

SEQ ID NO: 348469 - RNA, 32 nt, Homo Sapiens
gucgcucccccguaccucuccuggcccccuca

SEQ ID NO: 348470 - RNA, 32 nt, Homo Sapiens
acacacuccacagcaggaagugccacugccug

SEQ ID NO: 348471 - RNA, 26 nt, Homo Sapiens
gaugggaaacagugcgcuccgcgcuc

SEQ ID NO: 348472 - RNA, 32 nt, Homo Sapiens
gggcuuaaauaucuuuuuccuagacagguuuu

SEQ ID NO: 348473 - RNA, 32 nt, Homo Sapiens
cugaauaaugaccugcaauuauaguaacuaaa

SEQ ID NO: 348474 - RNA, 32 nt, Homo Sapiens
agcaggaugcugcggcgacgggcccaggaaga

SEQ ID NO: 348475 - RNA, 32 nt, Homo Sapiens
ggcauuggccccagccuucugaaagccggcgc

SEQ ID NO: 348476 - RNA, 32 nt, Homo Sapiens
gacaggaagggagaagacagaagccucucagc

SEQ ID NO: 348477 - RNA, 32 nt, Homo Sapiens
uaaauguuuauacuguauuucuaagaaguugu

SEQ ID NO: 348478 - RNA, 32 nt, Homo Sapiens
accacacagggauauuucugcuaugcaccagc

SEQ ID NO: 348479 - RNA, 30 nt, Homo Sapiens
cuaguaggcaggcgcucucagcucucuccc

SEQ ID NO: 348480 - RNA, 32 nt, Homo Sapiens
cgccucccaccuuccacccccaacucccuucc

SEQ ID NO: 348481 - RNA, 32 nt, Homo Sapiens
uggaguucagagaucguuccuauacauuucug

SEQ ID NO: 348482 - RNA, 32 nt, Homo Sapiens
uccuccuguaauuucacuaacuuuuuauucau

SEQ ID NO: 348483 - RNA, 32 nt, Homo Sapiens
auggagaaaccucgucucuacugaaaauucaa

SEQ ID NO: 348484 - RNA, 32 nt, Homo Sapiens
cuugagccugccccagccccagccguagcccu

SEQ ID NO: 348485 - RNA, 32 nt, Homo Sapiens
guuuugaccuacaacuaagugaacauaaucua

SEQ ID NO: 348486 - RNA, 32 nt, Homo Sapiens
aaucuuccagaacacuagcaccaugacucccc

SEQ ID NO: 348487 - RNA, 32 nt, Homo Sapiens
guuuguccggcauaugcaaagauaggcagugc

SEQ ID NO: 348488 - RNA, 32 nt, Homo Sapiens
gagauuuuccggggggcgcucggcggcuuccc

SEQ ID NO: 348489 - RNA, 32 nt, Homo Sapiens
agagucaucaugccacuugagcagaggaguca

SEQ ID NO: 348490 - RNA, 27 nt, Homo Sapiens
gaggauuccuucuucuccgccaccgag

SEQ ID NO: 348491 - RNA, 31 nt, Homo Sapiens
gacggcacuuacugccuggcgccgcccccuc

SEQ ID NO: 348492 - RNA, 32 nt, Homo Sapiens
aggcgcauccugcagcccaugcuugaugccag

SEQ ID NO: 348493 - RNA, 32 nt, Homo Sapiens
uccucucuucuuuucccauuuacaaaugauuu

SEQ ID NO: 348494 - RNA, 32 nt, Homo Sapiens
uuaccugcugguuuugauucaaguuaaaaaca

SEQ ID NO: 348495 - RNA, 32 nt, Homo Sapiens
ucggcauugaccggccggcggagcucuccaag

SEQ ID NO: 348496 - RNA, 32 nt, Homo Sapiens
auucaaauaaaccauuuuguauguuuggaaaa

SEQ ID NO: 348497 - RNA, 32 nt, Homo Sapiens
uuauugucaaaaaacgauuuaauguaaaaagu

SEQ ID NO: 348498 - RNA, 32 nt, Homo Sapiens
auuguauaaaaaguuucacaggucaauaaacu

SEQ ID NO: 348499 - RNA, 32 nt, Homo Sapiens
guagagaggagcuuugaggccacccgcacaaa

SEQ ID NO: 348500 - RNA, 32 nt, Homo Sapiens
ucaguucuuacgauagucucaaggcuguguau

SEQ ID NO: 348501 - RNA, 32 nt, Homo Sapiens
aacugggaagacgaggcguucucaucccauag

SEQ ID NO: 348502 - RNA, 32 nt, Homo Sapiens
gaguuucacccaguccccacuccacggugcag

SEQ ID NO: 348503 - RNA, 32 nt, Homo Sapiens
ccugggauacagagcuagacuccaucucaaaa

SEQ ID NO: 348504 - RNA, 32 nt, Homo Sapiens
gaggccauccccacccccuccaucugccccug

SEQ ID NO: 348505 - RNA, 32 nt, Homo Sapiens
cgcuaagggagaggagcaugucugcaacucga

SEQ ID NO: 348506 - RNA, 32 nt, Homo Sapiens
gcaggggccucugagugccaagcgacguggcg

SEQ ID NO: 348507 - RNA, 32 nt, Homo Sapiens
accugucaaagccuucuuaauuaugucugaga

SEQ ID NO: 348508 - RNA, 32 nt, Homo Sapiens
auuccauaauuucuauacaacaaaauuauguc

SEQ ID NO: 348509 - RNA, 32 nt, Homo Sapiens
gauuggaauuggaauauaucaaaaaagguuag

SEQ ID NO: 348510 - RNA, 32 nt, Homo Sapiens
uauauguaaaauauauacuuuuccaagacaaa

SEQ ID NO: 348511 - RNA, 32 nt, Homo Sapiens
ccuguuaaggacgaggccuccccagcccugcc

SEQ ID NO: 348512 - RNA, 32 nt, Homo Sapiens
ggccaaacaaaacacaucugugggcuggaugc

SEQ ID NO: 348513 - RNA, 32 nt, Homo Sapiens
cgucugccgcggcuccgaggggguggggcugc

SEQ ID NO: 348514 - RNA, 32 nt, Homo Sapiens
gaagauagcugugacuucuauuuuaaagacaa

SEQ ID NO: 348515 - RNA, 32 nt, Homo Sapiens
uacaaugccgugggguucacuuacgguagcga

SEQ ID NO: 348516 - RNA, 32 nt, Homo Sapiens
uggcaaugagggccgugggucuguggaaaaca

SEQ ID NO: 348517 - RNA, 32 nt, Homo Sapiens
gcgugcugagccccggccgccggcccggcaug

SEQ ID NO: 348518 - RNA, 32 nt, Homo Sapiens
gauuuucaguuauaauaauguguacuggcaug

SEQ ID NO: 348519 - RNA, 32 nt, Homo Sapiens
aacagcuguucacagcuuccccuuucaucccg

SEQ ID NO: 348520 - RNA, 32 nt, Homo Sapiens
ccuaaguauaauaccuuacauguauaaacuuc

SEQ ID NO: 348521 - RNA, 32 nt, Homo Sapiens
aucauuggcauuuaagacaccaaaaaagaaaa

SEQ ID NO: 348522 - RNA, 32 nt, Homo Sapiens
ggaggcggagacggaggaaggucugaggagca

SEQ ID NO: 348523 - RNA, 32 nt, Homo Sapiens
aaauuguuuuuaacagaagcaaaauggcuuuu

SEQ ID NO: 348524 - RNA, 32 nt, Homo Sapiens
cgggugggaaagggugguuggggggaccgaug

SEQ ID NO: 348525 - RNA, 32 nt, Homo Sapiens
ccuauauuaaggguccacacggcggcugcugc

SEQ ID NO: 348526 - RNA, 32 nt, Homo Sapiens
aauaucuuaugauugaauauuuacaugaaggc

SEQ ID NO: 348527 - RNA, 32 nt, Homo Sapiens
gcucgagacccggccugugcugcccugcccgu

SEQ ID NO: 348528 - RNA, 29 nt, Homo Sapiens
auaauuugccugaugucugugagauuuga

SEQ ID NO: 348529 - RNA, 32 nt, Homo Sapiens
uuugagaauuguaaauucaucaaauaauugcu

SEQ ID NO: 348530 - RNA, 32 nt, Homo Sapiens
aaaaaaagccagugccuauugaguauaucaaa

SEQ ID NO: 348531 - RNA, 32 nt, Homo Sapiens
gugcuaccccuacaaacagcacccccaccaug

SEQ ID NO: 348532 - RNA, 32 nt, Homo Sapiens
gcuuugggagacugaggcaggaggaucacuua

SEQ ID NO: 348533 - RNA, 32 nt, Homo Sapiens
ccgcucgcggcucggcgggucuagggacuucg

SEQ ID NO: 348534 - RNA, 32 nt, Homo Sapiens
aacuuuaauaccagcucuuuguuuuccuugua

SEQ ID NO: 348535 - RNA, 32 nt, Homo Sapiens
gugacauaaaaaggauccagguaaauggguau

SEQ ID NO: 348536 - RNA, 30 nt, Homo Sapiens
ggcgaaccuggugccaccccuuagacaaag

SEQ ID NO: 348537 - RNA, 32 nt, Homo Sapiens
gcuaguagaaaaguacagaaaauuugacuauu

SEQ ID NO: 348538 - RNA, 32 nt, Homo Sapiens
uaucuagcauauagcagagaauaaaugguugc

SEQ ID NO: 348539 - RNA, 31 nt, Homo Sapiens
guagugcgucggcugcugccccgggucuggc

SEQ ID NO: 348540 - RNA, 32 nt, Homo Sapiens
cuggacgcugccgcgcagcccgagggccagcu

SEQ ID NO: 348541 - RNA, 32 nt, Homo Sapiens
uuuauacauuagaacaagauaagauuugaaau

SEQ ID NO: 348542 - RNA, 32 nt, Homo Sapiens
cugccugcccgcgcagcagacccggggcggcc

SEQ ID NO: 348543 - RNA, 32 nt, Homo Sapiens
agagacgggaucuugcuuugcugcugaggcug

SEQ ID NO: 348544 - RNA, 32 nt, Homo Sapiens
uaccuaacuucuaguguaguacugguucuaac

SEQ ID NO: 348545 - RNA, 32 nt, Homo Sapiens
ccaccugauuauguucucugguuaguuuagcc

SEQ ID NO: 348546 - RNA, 32 nt, Homo Sapiens
uaggucaauucguaacaguuuauuuuggacac

SEQ ID NO: 348547 - RNA, 32 nt, Homo Sapiens
ccccugccuccccacccuccccauggcccacc

SEQ ID NO: 348548 - RNA, 32 nt, Homo Sapiens
cuugucuuaguggguauuuaaaauaguaaaua

SEQ ID NO: 348549 - RNA, 32 nt, Homo Sapiens
guuugcucuuagaagucauacuccauggucuu

SEQ ID NO: 348550 - RNA, 32 nt, Homo Sapiens
uuuaaugagauaacaaaguaccuaguaaaaac

SEQ ID NO: 348551 - RNA, 32 nt, Homo Sapiens
uuccuuuccuuaccuuguuucuucccagaaaa

SEQ ID NO: 348552 - RNA, 32 nt, Homo Sapiens
cguggcggcggcugcccuccucacacucggcu

SEQ ID NO: 348553 - RNA, 32 nt, Homo Sapiens
gauaaccaguuuuugcagagaaacguguaccc

SEQ ID NO: 348554 - RNA, 32 nt, Homo Sapiens
ggcagugcacuugccccuccucaugccccuuc

SEQ ID NO: 348555 - RNA, 32 nt, Homo Sapiens
uauguaaaucaucaugguuauguauaacuuaa

SEQ ID NO: 348556 - RNA, 32 nt, Homo Sapiens
ugcagcugauugcagagcuggacccggaucug

SEQ ID NO: 348557 - RNA, 32 nt, Homo Sapiens
cacggcgggggccuggccggccgaggaagcgc

SEQ ID NO: 348558 - RNA, 32 nt, Homo Sapiens
uuguaguuuuuaaauuuggggaaugcaaauau

SEQ ID NO: 348559 - RNA, 32 nt, Homo Sapiens
aauauaccccccaugcagaaauucauuucaca

SEQ ID NO: 348560 - RNA, 32 nt, Homo Sapiens
agcaggcaggggugggggccgggcccgcaaga

SEQ ID NO: 348561 - RNA, 32 nt, Homo Sapiens
gccccacccagcucagcugccaggcccuuccc

SEQ ID NO: 348562 - RNA, 32 nt, Homo Sapiens
auuuugaccuuaccauuauuccagagauucag

SEQ ID NO: 348563 - RNA, 32 nt, Homo Sapiens
cgcuccacuuggcccccgcucccggcccgccc

SEQ ID NO: 348564 - RNA, 32 nt, Homo Sapiens
guucucuggguguagaccacaccaccucccac

SEQ ID NO: 348565 - RNA, 32 nt, Homo Sapiens
uggaucgcccuucaucucucucccuccaucug

SEQ ID NO: 348566 - RNA, 32 nt, Homo Sapiens
ugaaaaggccccagccggggugaaucaucagu

SEQ ID NO: 348567 - RNA, 32 nt, Homo Sapiens
gugucugguggcugggcggggccggcaggcac

SEQ ID NO: 348568 - RNA, 32 nt, Homo Sapiens
uuuagguuaccaauguauucuuucucauuugg

SEQ ID NO: 348569 - RNA, 32 nt, Homo Sapiens
cagaauauuaaacauugaucacauaaaaaaaa

SEQ ID NO: 348570 - RNA, 32 nt, Homo Sapiens
aucuucuggggucagauaaauuuguaugagcu

SEQ ID NO: 348571 - RNA, 32 nt, Homo Sapiens
ccuuugguguggcuuacuauuucauugugugc

SEQ ID NO: 348572 - RNA, 32 nt, Homo Sapiens
augauucccagcugguggacuccuguggcuac

SEQ ID NO: 348573 - RNA, 32 nt, Homo Sapiens
ggaaaaucagccuucuucuggaugccuccagc

SEQ ID NO: 348574 - RNA, 32 nt, Homo Sapiens
gcuuugcuaauccagaaauuguucccaaauga

SEQ ID NO: 348575 - RNA, 32 nt, Homo Sapiens
augaccaugcucgaauaaaaauguagccaaac

SEQ ID NO: 348576 - RNA, 32 nt, Homo Sapiens
cagaaaggaggagucaaggaagcccuuaguga

SEQ ID NO: 348577 - RNA, 30 nt, Homo Sapiens
ggugauggagguggagagcauuaaacuguc

SEQ ID NO: 348578 - RNA, 32 nt, Homo Sapiens
aauaguagacauuuguguggaaaucauaccag

SEQ ID NO: 348579 - RNA, 32 nt, Homo Sapiens
augcgucgugacggcccggcuuaggcgacucu

SEQ ID NO: 348580 - RNA, 32 nt, Homo Sapiens
ccuggucaccgccgaccucaucugugcagcgc

SEQ ID NO: 348581 - RNA, 32 nt, Homo Sapiens
uaguuugauuggcaaugaucauggcaaacaug

SEQ ID NO: 348582 - RNA, 32 nt, Homo Sapiens
aucggggaggagaggagggcgagggccgaagg

SEQ ID NO: 348583 - RNA, 32 nt, Homo Sapiens
guccgggugugguggcgggcgccuguaguccc

SEQ ID NO: 348584 - RNA, 31 nt, Homo Sapiens
gauugcuggaggucuuuuaaucugauguucu

SEQ ID NO: 348585 - RNA, 32 nt, Homo Sapiens
acagacgaggcagagacaaaacacugagaaag

SEQ ID NO: 348586 - RNA, 32 nt, Homo Sapiens
uccgcuucauucucuaccauaccacuugugca

SEQ ID NO: 348587 - RNA, 32 nt, Homo Sapiens
gcaaagcucugcucgccccccaucucaccccc

SEQ ID NO: 348588 - RNA, 32 nt, Homo Sapiens
gagccuaagcaaagaauccuuuccaagauuca

SEQ ID NO: 348589 - RNA, 32 nt, Homo Sapiens
cauuucucaauuauauuaaaucuucugugaau

SEQ ID NO: 348590 - RNA, 32 nt, Homo Sapiens
augugcugcuggaagacucuaguaggccugca

SEQ ID NO: 348591 - RNA, 32 nt, Homo Sapiens
gugguccccgucuggggggccccuccagccag

SEQ ID NO: 348592 - RNA, 32 nt, Homo Sapiens
gcugaguccuugcugugggaugugccaguguc

SEQ ID NO: 348593 - RNA, 32 nt, Homo Sapiens
uggaagaacuacuauaaaaacaauauaugugg

SEQ ID NO: 348594 - RNA, 32 nt, Homo Sapiens
aaauaauuaaagaaaugcauguguguaaagua

SEQ ID NO: 348595 - RNA, 32 nt, Homo Sapiens
uaacgauguuuuugagaucugugcauguuacu

SEQ ID NO: 348596 - RNA, 32 nt, Homo Sapiens
acagcaguucauccucauccacacuaagccau

SEQ ID NO: 348597 - RNA, 32 nt, Homo Sapiens
gugcuuuuacaaggaaaaaaggugauauguuu

SEQ ID NO: 348598 - RNA, 32 nt, Homo Sapiens
aagcaaaaacaaaaugggaugugaagaauuga

SEQ ID NO: 348599 - RNA, 32 nt, Homo Sapiens
cauugugugugaacaccuccagugauauuauc

SEQ ID NO: 348600 - RNA, 32 nt, Homo Sapiens
auuauaguuaggcuuccaugauguuacauuag

SEQ ID NO: 348601 - RNA, 32 nt, Homo Sapiens
cagggauaugacgaggcugcguuuccucugga

SEQ ID NO: 348602 - RNA, 32 nt, Homo Sapiens
gaauggaaacggaggccgccccugccagccgc

SEQ ID NO: 348603 - RNA, 32 nt, Homo Sapiens
gauucuauuuagucaaaccaccuuuuauguuu

SEQ ID NO: 348604 - RNA, 32 nt, Homo Sapiens
agugcauagcuacuaaaaucagugaccuugaa

SEQ ID NO: 348605 - RNA, 32 nt, Homo Sapiens
caaaauaguuuagggaccaccaccauauuuua

SEQ ID NO: 348606 - RNA, 32 nt, Homo Sapiens
ggccaauaaaaaguucagaguucauuggaugu

SEQ ID NO: 348607 - RNA, 32 nt, Homo Sapiens
aaaagcugcaaggaucauuugcuggcuguccc

SEQ ID NO: 348608 - RNA, 32 nt, Homo Sapiens
ugaaaaugguugacagaagagggaagaguuag

SEQ ID NO: 348609 - RNA, 32 nt, Homo Sapiens
gcagcccagcucuucuugggguuguuuacgcc

SEQ ID NO: 348610 - RNA, 32 nt, Homo Sapiens
caugcucagaggugggaagggaaggaggagaa

SEQ ID NO: 348611 - RNA, 32 nt, Homo Sapiens
uuucauaacgcaaagagaggcuagaaauaguu

SEQ ID NO: 348612 - RNA, 32 nt, Homo Sapiens
auugaggugcggacgcucagcggcgagaugga

SEQ ID NO: 348613 - RNA, 32 nt, Homo Sapiens
gagcggccgggcgggcggccgaguuuuccaag

SEQ ID NO: 348614 - RNA, 32 nt, Homo Sapiens
gacagagggaggagggcucuauagccgagaua

SEQ ID NO: 348615 - RNA, 32 nt, Homo Sapiens
augguugcguguccagccgaagcaguguaaua

SEQ ID NO: 348616 - RNA, 32 nt, Homo Sapiens
ccgaggaggaucuggagagcugcuggagaaca

SEQ ID NO: 348617 - RNA, 32 nt, Homo Sapiens
aauucagggaugaaaagaaagaauaauuucca

SEQ ID NO: 348618 - RNA, 32 nt, Homo Sapiens
aggagaaguauuucgaauauuuucucaaucuu

SEQ ID NO: 348619 - RNA, 32 nt, Homo Sapiens
gaaacgucccgugugggaggggcgggucuggg

SEQ ID NO: 348620 - RNA, 32 nt, Homo Sapiens
aggaugcugugagcugcgucaggucugcgcgu

SEQ ID NO: 348621 - RNA, 32 nt, Homo Sapiens
cccaugcacucgccgcgccgcgcagcccgcgc

SEQ ID NO: 348622 - RNA, 32 nt, Homo Sapiens
ucaugugagaaaaaccuguuucccucugguuc

SEQ ID NO: 348623 - RNA, 32 nt, Homo Sapiens
uucacgcauuccucccaccuccaccucccaaa

SEQ ID NO: 348624 - RNA, 32 nt, Homo Sapiens
aguaacuauagaacaaugcaaaaacaaaaaca

SEQ ID NO: 348625 - RNA, 32 nt, Homo Sapiens
acgugacgcagcgcccggggcgcggaugaaga

SEQ ID NO: 348626 - RNA, 32 nt, Homo Sapiens
gauuauuugucaaacagaaaacacugacacuu

SEQ ID NO: 348627 - RNA, 32 nt, Homo Sapiens
aguggugggccagggcgggcuggccuccgucu

SEQ ID NO: 348628 - RNA, 32 nt, Homo Sapiens
gugccccugguucuccuccccaucgagcccac

SEQ ID NO: 348629 - RNA, 32 nt, Homo Sapiens
gucuaugaugucccccuucucugaggccugga

SEQ ID NO: 348630 - RNA, 32 nt, Homo Sapiens
aagcaaugucauuucuagauggguuucuaauu

SEQ ID NO: 348631 - RNA, 32 nt, Homo Sapiens
gccacagcgcagcggcccggcccgccacuauu

SEQ ID NO: 348632 - RNA, 30 nt, Homo Sapiens
gugagacauuuugccaccuucuuguguaua

SEQ ID NO: 348633 - RNA, 32 nt, Homo Sapiens
caguguuaguguuccucaaaagucggaacaau

SEQ ID NO: 348634 - RNA, 32 nt, Homo Sapiens
auuuacaguagacacuccaugaaauuugucaa

SEQ ID NO: 348635 - RNA, 32 nt, Homo Sapiens
augggugguggcacgggaauagauagcccuua

SEQ ID NO: 348636 - RNA, 32 nt, Homo Sapiens
cucaggucaacaccaucauuaaaugcgaguuu

SEQ ID NO: 348637 - RNA, 32 nt, Homo Sapiens
cgcccagcucuguagccuccuccgucgacuca

SEQ ID NO: 348638 - RNA, 32 nt, Homo Sapiens
guuuuggggacaaaagugacuugacaugucca

SEQ ID NO: 348639 - RNA, 31 nt, Homo Sapiens
ggcuauguacauugccugcccguggcaucaa

SEQ ID NO: 348640 - RNA, 32 nt, Homo Sapiens
cccaucucaauuuuaauccccaugugucagag

SEQ ID NO: 348641 - RNA, 32 nt, Homo Sapiens
guacagagaaauguguggucguauuuuuuacu

SEQ ID NO: 348642 - RNA, 32 nt, Homo Sapiens
gcagcgcggacucgcgucccguggagcguucc

SEQ ID NO: 348643 - RNA, 32 nt, Homo Sapiens
cacaaaacuuauauuucaugucaauuguauuu

SEQ ID NO: 348644 - RNA, 32 nt, Homo Sapiens
uuaaagcaagcggaaacaccacaggcucggga

SEQ ID NO: 348645 - RNA, 32 nt, Homo Sapiens
cuucaggacuuccucagcugacaaggaauuuu

SEQ ID NO: 348646 - RNA, 32 nt, Homo Sapiens
ggcuggagcuagggugacaucuccagggcaga

SEQ ID NO: 348647 - RNA, 32 nt, Homo Sapiens
gccgcgccuggcagguuucugaaacagaucgu

SEQ ID NO: 348648 - RNA, 32 nt, Homo Sapiens
ccaguaguauccucuguuuucagacauccuag

SEQ ID NO: 348649 - RNA, 32 nt, Homo Sapiens
ggauguuugacaaaauauucuucuugggccaa

SEQ ID NO: 348650 - RNA, 32 nt, Homo Sapiens
augugucuucucuacgugaugugacuaaauuc

SEQ ID NO: 348651 - RNA, 32 nt, Homo Sapiens
cauacacacaugcgugcaggcuugugcagaca

SEQ ID NO: 348652 - RNA, 32 nt, Homo Sapiens
caccgcugucagagccgccgagcagcacgcca

SEQ ID NO: 348653 - RNA, 32 nt, Homo Sapiens
cccgcgccgcggcucggggacccguagagccc

SEQ ID NO: 348654 - RNA, 32 nt, Homo Sapiens
ucaaggcugaggcagaaaaaacagagcaggag

SEQ ID NO: 348655 - RNA, 32 nt, Homo Sapiens
gagggggagcagccggccccugaggaggacga

SEQ ID NO: 348656 - RNA, 32 nt, Homo Sapiens
aaacaaucgaauaacaauuauuucauguauua

SEQ ID NO: 348657 - RNA, 32 nt, Homo Sapiens
cagaggaugcccucuucgcccuguggcagcuc

SEQ ID NO: 348658 - RNA, 32 nt, Homo Sapiens
uugcauuuauuuacauagugucauuccaaauc

SEQ ID NO: 348659 - RNA, 32 nt, Homo Sapiens
ccuccacugcuguccagguggguguuauaucc

SEQ ID NO: 348660 - RNA, 32 nt, Homo Sapiens
ucagaaauaaguccauuaucaauauaauuuga

SEQ ID NO: 348661 - RNA, 32 nt, Homo Sapiens
uagguagaggugagaauggggaggcaagaucu

SEQ ID NO: 348662 - RNA, 32 nt, Homo Sapiens
cccucggagaguccacaacagcagccaaucca

SEQ ID NO: 348663 - RNA, 32 nt, Homo Sapiens
uucuuccuuucuuccuuggccaagagaagggc

SEQ ID NO: 348664 - RNA, 32 nt, Homo Sapiens
auguuaaucagugauaugcuuuagucaauaau

SEQ ID NO: 348665 - RNA, 32 nt, Homo Sapiens
ucauccgggcuggaauucuugguuuuucagcc

SEQ ID NO: 348666 - RNA, 32 nt, Homo Sapiens
accaaggagcugcagcagcacguaaagucagu

SEQ ID NO: 348667 - RNA, 31 nt, Homo Sapiens
gcagacccuaucagauuuggauauguccuuc

SEQ ID NO: 348668 - RNA, 32 nt, Homo Sapiens
gcucuuggagacaccugaccccugcccugcaa

SEQ ID NO: 348669 - RNA, 32 nt, Homo Sapiens
ugaagacaucacauuucuauauggaaaaagga

SEQ ID NO: 348670 - RNA, 32 nt, Homo Sapiens
gaagucgccgaguuaauugaccagcaugagac

SEQ ID NO: 348671 - RNA, 32 nt, Homo Sapiens
agaagccucacaggucaagacuggcuccaagg

SEQ ID NO: 348672 - RNA, 32 nt, Homo Sapiens
ugugggaaagacuauaggcaauaggaaucucc

SEQ ID NO: 348673 - RNA, 32 nt, Homo Sapiens
cauguauuacuucuuaaucacuuguuaugauu

SEQ ID NO: 348674 - RNA, 32 nt, Homo Sapiens
aggaaucccccauuuuuucugcaugcaguuug

SEQ ID NO: 348675 - RNA, 32 nt, Homo Sapiens
ucugugaaaaggacagugaagccagcuauuuu

SEQ ID NO: 348676 - RNA, 32 nt, Homo Sapiens
uuaacuaaucggaacauguaaaacaguuacaa

SEQ ID NO: 348677 - RNA, 32 nt, Homo Sapiens
aaaaacacagauuuauacuuuaagcuuauuuu

SEQ ID NO: 348678 - RNA, 32 nt, Homo Sapiens
ccucaccccggcagggcugugcgugacccccu

SEQ ID NO: 348679 - RNA, 32 nt, Homo Sapiens
gauaauacuucuuuuccacaucucauugucac

SEQ ID NO: 348680 - RNA, 32 nt, Homo Sapiens
ggguggguagacuuaggaauuuucuacuuggu

SEQ ID NO: 348681 - RNA, 32 nt, Homo Sapiens
caacccaaaaauaagaaaaaauagcucuaaau

SEQ ID NO: 348682 - RNA, 32 nt, Homo Sapiens
agagagagggagaggaagggcugaaagcccca

SEQ ID NO: 348683 - RNA, 32 nt, Homo Sapiens
agacgagaaaccgaaagaaucagaaagaaguc

SEQ ID NO: 348684 - RNA, 32 nt, Homo Sapiens
cuggggacuccgccuacuccagcccucuuggg

SEQ ID NO: 348685 - RNA, 32 nt, Homo Sapiens
uaguccacaccuguggucccagcugccucagc

SEQ ID NO: 348686 - RNA, 32 nt, Homo Sapiens
uggucucccguccagaaguguuuggcccgugg

SEQ ID NO: 348687 - RNA, 32 nt, Homo Sapiens
gcccgacaccaguaaagggucugugcugaggu

SEQ ID NO: 348688 - RNA, 29 nt, Homo Sapiens
ggaaaaauaaagucuuauuuucuauguuu

SEQ ID NO: 348689 - RNA, 32 nt, Homo Sapiens
aucuuuuaaaaauaauaauuuacaguauggca

SEQ ID NO: 348690 - RNA, 32 nt, Homo Sapiens
uugaaucuggguucuuuuuugacuuuuuuuuu

SEQ ID NO: 348691 - RNA, 32 nt, Homo Sapiens
uaguacaaaaggaauacuuagccagggccuca

SEQ ID NO: 348692 - RNA, 32 nt, Homo Sapiens
agguagaggagcuacauuggccgcguccccug

SEQ ID NO: 348693 - RNA, 32 nt, Homo Sapiens
uuuucuauaaugguaagauguuuauaggaaag

SEQ ID NO: 348694 - RNA, 32 nt, Homo Sapiens
agcuucaaaaccauccauuacaaaaucgaauc

SEQ ID NO: 348695 - RNA, 30 nt, Homo Sapiens
gagagugcuaugugggggccuccagcucug

SEQ ID NO: 348696 - RNA, 32 nt, Homo Sapiens
auuuaaagaacaagaguauauaaaguuauucu

SEQ ID NO: 348697 - RNA, 32 nt, Homo Sapiens
ucccugcuccuggccuaccccucccccagcuc

SEQ ID NO: 348698 - RNA, 32 nt, Homo Sapiens
gcaggcaucugggcaggccaguccucaaagca

SEQ ID NO: 348699 - RNA, 32 nt, Homo Sapiens
augcuaagccccauaaugaacguuucaagcaa

SEQ ID NO: 348700 - RNA, 32 nt, Homo Sapiens
cccaacuucugacuuuggggucccccagcccu

SEQ ID NO: 348701 - RNA, 32 nt, Homo Sapiens
uucagcauuuaaaauuuuuggcauuuuacagc

SEQ ID NO: 348702 - RNA, 32 nt, Homo Sapiens
gagccaagcagaggcgggcagcuccuccucca

SEQ ID NO: 348703 - RNA, 29 nt, Homo Sapiens
ccaaaaauauguaugugugggcuugcuua

SEQ ID NO: 348704 - RNA, 32 nt, Homo Sapiens
agguggggccccugcaugugucugcguucaca

SEQ ID NO: 348705 - RNA, 30 nt, Homo Sapiens
auuuguaaauuaaaucaagauguuacccac

SEQ ID NO: 348706 - RNA, 32 nt, Homo Sapiens
agagcccccucgccccaaaggucacugggacu

SEQ ID NO: 348707 - RNA, 32 nt, Homo Sapiens
accucaugaaugggacccggccaggcauggcc

SEQ ID NO: 348708 - RNA, 32 nt, Homo Sapiens
gaaguugguuuuuuauuuucuauuuuuguuug

SEQ ID NO: 348709 - RNA, 32 nt, Homo Sapiens
cgccgcgcggacuccugccccgaggguccgga

SEQ ID NO: 348710 - RNA, 32 nt, Homo Sapiens
caacgcagguccagcucuaugcccucuacuga

SEQ ID NO: 348711 - RNA, 29 nt, Homo Sapiens
uaacauucuauccucaucuguaaaacuuc

SEQ ID NO: 348712 - RNA, 32 nt, Homo Sapiens
ccguuucccgguuuccccccucguugguaagg

SEQ ID NO: 348713 - RNA, 32 nt, Homo Sapiens
guggguggaggggacaguguucuggauagauc

SEQ ID NO: 348714 - RNA, 32 nt, Homo Sapiens
gcacagaccacccaggcauaugggcaacaaag

SEQ ID NO: 348715 - RNA, 32 nt, Homo Sapiens
ccgcugcgggcucgguuuccacaggcgaaugg

SEQ ID NO: 348716 - RNA, 32 nt, Homo Sapiens
ugccuggagcugcuggucccugagagaaagga

SEQ ID NO: 348717 - RNA, 32 nt, Homo Sapiens
ggaggaacaaugaaauucaguguuacguuaau

SEQ ID NO: 348718 - RNA, 32 nt, Homo Sapiens
gaagguugcuuuucuuuuuaauuuuuucuaac

SEQ ID NO: 348719 - RNA, 32 nt, Homo Sapiens
cuuuuauuugaaaaaaugugagcaguaauuug

SEQ ID NO: 348720 - RNA, 32 nt, Homo Sapiens
aguuuggagaaccucuucaaaagagacaggag

SEQ ID NO: 348721 - RNA, 32 nt, Homo Sapiens
guagucaggcggcggcgcaggcggcggcggcg

SEQ ID NO: 348722 - RNA, 32 nt, Homo Sapiens
aaaauggugccgccauuucucauuuuuuaacu

SEQ ID NO: 348723 - RNA, 32 nt, Homo Sapiens
aaaggcccugcuggacaagcaguuggagugag

SEQ ID NO: 348724 - RNA, 32 nt, Homo Sapiens
auucauuuacucuuuuucauauuuucagagaa

SEQ ID NO: 348725 - RNA, 32 nt, Homo Sapiens
aaugccugauaaaauauauucuuaauaaaagu

SEQ ID NO: 348726 - RNA, 32 nt, Homo Sapiens
ggcaagccaaggaaagaccaaaacugucaagg

SEQ ID NO: 348727 - RNA, 32 nt, Homo Sapiens
gggguggggggaggggggagggauacauuagg

SEQ ID NO: 348728 - RNA, 32 nt, Homo Sapiens
uuacuggcugggcgcaguggcuuacaccugua

SEQ ID NO: 348729 - RNA, 32 nt, Homo Sapiens
uaucuagacaccugggguggcguguuuucuuu

SEQ ID NO: 348730 - RNA, 32 nt, Homo Sapiens
agaccagggagccuuugguucuggccagaaug

SEQ ID NO: 348731 - RNA, 32 nt, Homo Sapiens
aggugauuguagaaaaggaugauuaaugaucu

SEQ ID NO: 348732 - RNA, 32 nt, Homo Sapiens
guacaugaaaaguuuuaaagauauguuuaaga

SEQ ID NO: 348733 - RNA, 32 nt, Homo Sapiens
uuuuuucauaguucuuguuuucauguuuuauu

SEQ ID NO: 348734 - RNA, 32 nt, Homo Sapiens
caguuugcuccacaaagcacaaugucucgauc

SEQ ID NO: 348735 - RNA, 32 nt, Homo Sapiens
agugcucuguuguuuacaaacucagguacccg

SEQ ID NO: 348736 - RNA, 32 nt, Homo Sapiens
ccccucuuucccuuuccccacucugcaagcac

SEQ ID NO: 348737 - RNA, 32 nt, Homo Sapiens
agaagaugaugaugauaucugaauucaccagc

SEQ ID NO: 348738 - RNA, 32 nt, Homo Sapiens
acgccgggaaaggccuccguguuccgcuuccu

SEQ ID NO: 348739 - RNA, 32 nt, Homo Sapiens
aagccuguguagcacugagacaucagugaguu

SEQ ID NO: 348740 - RNA, 32 nt, Homo Sapiens
ucaaggcuugggggcgggugacgggcgggcgg

SEQ ID NO: 348741 - RNA, 32 nt, Homo Sapiens
ugggaccgcccgccgcgcaucugcccuucuuc

SEQ ID NO: 348742 - RNA, 32 nt, Homo Sapiens
ucuuugcaaucauauuuuuguuuucaauaucc

SEQ ID NO: 348743 - RNA, 32 nt, Homo Sapiens
ccaaucguuuucgucuuucuuugccgcaguuu

SEQ ID NO: 348744 - RNA, 32 nt, Homo Sapiens
aaacaagaauacuuccaacauaaaaauuauaa

SEQ ID NO: 348745 - RNA, 32 nt, Homo Sapiens
uagagcuuaaaauaaacauucuuuuugaacuu

SEQ ID NO: 348746 - RNA, 29 nt, Homo Sapiens
aguaacguagggucagcuauaaaaucaga

SEQ ID NO: 348747 - RNA, 32 nt, Homo Sapiens
agggcugcccuccagaggcugcacccagaaca

SEQ ID NO: 348748 - RNA, 32 nt, Homo Sapiens
caguuucccuccccagaagcaaccucuggaag

SEQ ID NO: 348749 - RNA, 30 nt, Homo Sapiens
cagccuuggcgguuuaucgcccuggcaggc

SEQ ID NO: 348750 - RNA, 32 nt, Homo Sapiens
gaauuacuagaaugucagcaacaaacucacaa

SEQ ID NO: 348751 - RNA, 32 nt, Homo Sapiens
uuacugucuauugucagcaucauuuucaucug

SEQ ID NO: 348752 - RNA, 32 nt, Homo Sapiens
agauguugggccuuuuggauagauucugugag

SEQ ID NO: 348753 - RNA, 32 nt, Homo Sapiens
uucauucccccuccuguggugagggcuaggug

SEQ ID NO: 348754 - RNA, 32 nt, Homo Sapiens
uucuuggaaaugcaaaagauuaugcauauuuc

SEQ ID NO: 348755 - RNA, 32 nt, Homo Sapiens
gaucuuuaaaacauuuuuaaugaacuaaguug

SEQ ID NO: 348756 - RNA, 32 nt, Homo Sapiens
cucacuguuuuaaauaaagaaucuuacauaag

SEQ ID NO: 348757 - RNA, 32 nt, Homo Sapiens
caccaaggaaauuuauacaaauuaagacuaac

SEQ ID NO: 348758 - RNA, 32 nt, Homo Sapiens
aaggaaacuugacuaauguaaugauugucacc

SEQ ID NO: 348759 - RNA, 32 nt, Homo Sapiens
cagcgagaauucuucauccuccacgguucacu

SEQ ID NO: 348760 - RNA, 32 nt, Homo Sapiens
gacagaggagugaagcuggaaccaucagggaa

SEQ ID NO: 348761 - RNA, 32 nt, Homo Sapiens
cacgagccccgggcugccggcgcgggcgccgc

SEQ ID NO: 348762 - RNA, 32 nt, Homo Sapiens
aauagcagagaugaaaggccccugcccccgcc

SEQ ID NO: 348763 - RNA, 31 nt, Homo Sapiens
ccgcgcgcaguccagcggccccgcgugugug

SEQ ID NO: 348764 - RNA, 32 nt, Homo Sapiens
gaggagcgccgccgccgccgcugcugggcacc

SEQ ID NO: 348765 - RNA, 32 nt, Homo Sapiens
augccaaaauggaucaaguaucaucagauuca

SEQ ID NO: 348766 - RNA, 32 nt, Homo Sapiens
gucaugcccagcuuggagugccacguggccgc

SEQ ID NO: 348767 - RNA, 32 nt, Homo Sapiens
uguugccuaggcuugucuggaacuccugggcu

SEQ ID NO: 348768 - RNA, 32 nt, Homo Sapiens
accuagggagaaugagauuugauggaaggaua

SEQ ID NO: 348769 - RNA, 32 nt, Homo Sapiens
gugcucugcuuuuuuccaacuacggaguguca

SEQ ID NO: 348770 - RNA, 32 nt, Homo Sapiens
cgcaacaaacgcaacaguggcuuucaaaguua

SEQ ID NO: 348771 - RNA, 32 nt, Homo Sapiens
cgggcgcccccucccccuagcagcggaggagg

SEQ ID NO: 348772 - RNA, 32 nt, Homo Sapiens
cccccgcuaccucgcuccuccucccacccaau

SEQ ID NO: 348773 - RNA, 32 nt, Homo Sapiens
acuaggacucugaggcucuuucugggccaagu

SEQ ID NO: 348774 - RNA, 32 nt, Homo Sapiens
cggcuccgcggucccuuuugccuguccagccg

SEQ ID NO: 348775 - RNA, 32 nt, Homo Sapiens
uucuccaaacgauuagucuaaauuuucagaga

SEQ ID NO: 348776 - RNA, 32 nt, Homo Sapiens
aaaacagaccaaaaccacccuaggaaauugcu

SEQ ID NO: 348777 - RNA, 32 nt, Homo Sapiens
aagaaacuaggccuccgauucccuuuauuucc

SEQ ID NO: 348778 - RNA, 32 nt, Homo Sapiens
uucuuagagacuacacauuuggaauagcagag

SEQ ID NO: 348779 - RNA, 32 nt, Homo Sapiens
ucuugggcgcuaacggcggcggcggccuugug

SEQ ID NO: 348780 - RNA, 32 nt, Homo Sapiens
uccugccacgggcuugcagauugaagcacuuu

SEQ ID NO: 348781 - RNA, 32 nt, Homo Sapiens
acgaaguacuuauguuuauuucuuagugagcu

SEQ ID NO: 348782 - RNA, 32 nt, Homo Sapiens
ccugggucuuccuggaggaaugacaucucaga

SEQ ID NO: 348783 - RNA, 32 nt, Homo Sapiens
cagcgcuccgcagcuucccaccaccgcccgcc

SEQ ID NO: 348784 - RNA, 32 nt, Homo Sapiens
guuuuguuuuguuauuugcaguuuacaaauau

SEQ ID NO: 348785 - RNA, 32 nt, Homo Sapiens
auuguggggaggggaaagaaauccaucugcuc

SEQ ID NO: 348786 - RNA, 32 nt, Homo Sapiens
aaggauauuaccauuccaaauacaaucuuaag

SEQ ID NO: 348787 - RNA, 32 nt, Homo Sapiens
guggaucucuacuuguuggguguuaugaauuc

SEQ ID NO: 348788 - RNA, 32 nt, Homo Sapiens
uuugggguaaggaggacaguuuuuguuauggu

SEQ ID NO: 348789 - RNA, 32 nt, Homo Sapiens
cuccgcagggcagaguggagacaggcugacac

SEQ ID NO: 348790 - RNA, 32 nt, Homo Sapiens
uccuaccuguguuucuaggagcaaaagagagg

SEQ ID NO: 348791 - RNA, 32 nt, Homo Sapiens
gaguauuuuuuauagacuuuaaauacuggguu

SEQ ID NO: 348792 - RNA, 32 nt, Homo Sapiens
uguuucugccccacccuagcugaucaauguac

SEQ ID NO: 348793 - RNA, 32 nt, Homo Sapiens
gccacaacauucaaagaagauggauuauggac

SEQ ID NO: 348794 - RNA, 32 nt, Homo Sapiens
acgcgcagcugggccaggccuacgaaggcgcc

SEQ ID NO: 348795 - RNA, 32 nt, Homo Sapiens
uccuguccgaggggcugucucccuuuauuuac

SEQ ID NO: 348796 - RNA, 32 nt, Homo Sapiens
uaaauagcucucauagucugcuccaucuugau

SEQ ID NO: 348797 - RNA, 32 nt, Homo Sapiens
agggaaagugaacaugaguuccgaauuccugc

SEQ ID NO: 348798 - RNA, 32 nt, Homo Sapiens
uugugaacggugccgaaaaacacacucgagcc

SEQ ID NO: 348799 - RNA, 32 nt, Homo Sapiens
aaaccaaggcuuuauuuucuuuuguuuuuuaa

SEQ ID NO: 348800 - RNA, 32 nt, Homo Sapiens
agggugagaagggcagggguguccugaugcaa

SEQ ID NO: 348801 - RNA, 32 nt, Homo Sapiens
gucuuauuaugccuuuaaaauaugaguaguua

SEQ ID NO: 348802 - RNA, 32 nt, Homo Sapiens
cacacgcgcacacacacacacacacacacaga

SEQ ID NO: 348803 - RNA, 32 nt, Homo Sapiens
gggucuugucgcgcccaggccagcgccagccc

SEQ ID NO: 348804 - RNA, 32 nt, Homo Sapiens
aauaagauguacacuugucauguuuuauauac

SEQ ID NO: 348805 - RNA, 29 nt, Homo Sapiens
cuaugaggguguauauauuuuuuacccaa

SEQ ID NO: 348806 - RNA, 32 nt, Homo Sapiens
aacuauuuuaaucaaccauacuauucuuaugg

SEQ ID NO: 348807 - RNA, 32 nt, Homo Sapiens
gauaaucaguuucaaaaggaguauucagguua

SEQ ID NO: 348808 - RNA, 32 nt, Homo Sapiens
gggaagcccgucuuggguccucgcugcuggcu

SEQ ID NO: 348809 - RNA, 32 nt, Homo Sapiens
ggaggacagcggagccaggagcuccgcagcug

SEQ ID NO: 348810 - RNA, 32 nt, Homo Sapiens
ugaauacugucaacacucuuaucuaaguuugc

SEQ ID NO: 348811 - RNA, 32 nt, Homo Sapiens
aagucaacguuaggauuaaauauauauucaau

SEQ ID NO: 348812 - RNA, 32 nt, Homo Sapiens
uauaaguccuuggaugaggaugaccuaggucc

SEQ ID NO: 348813 - RNA, 32 nt, Homo Sapiens
ucuccuuguccucauuuaugcauguuuggagg

SEQ ID NO: 348814 - RNA, 32 nt, Homo Sapiens
gacugucccucauguccauggccuaccauccc

SEQ ID NO: 348815 - RNA, 32 nt, Homo Sapiens
ugcugcuucucaaaaaaacaaacaaacaaaca

SEQ ID NO: 348816 - RNA, 32 nt, Homo Sapiens
uauuuggaugcaucugaaccagcagagcugug

SEQ ID NO: 348817 - RNA, 32 nt, Homo Sapiens
cgccaggaaucccagcacuuugggaggccgag

SEQ ID NO: 348818 - RNA, 32 nt, Homo Sapiens
gaguguggaguccagagugcugccaggaccca

SEQ ID NO: 348819 - RNA, 32 nt, Homo Sapiens
accccagcacagcuccuccccugccgccuccc

SEQ ID NO: 348820 - RNA, 32 nt, Homo Sapiens
uaauaauucuauuuguguaauuuguuuccucc

SEQ ID NO: 348821 - RNA, 32 nt, Homo Sapiens
gguggucauaguccucccgugcugugucagcu

SEQ ID NO: 348822 - RNA, 32 nt, Homo Sapiens
ccgugguagccgagggcggaggcgacacucuc

SEQ ID NO: 348823 - RNA, 32 nt, Homo Sapiens
ucgaagaaaaacccuguaaauguaauaaauuu

SEQ ID NO: 348824 - RNA, 32 nt, Homo Sapiens
aauucagguuuggggcucguugguauccaugc

SEQ ID NO: 348825 - RNA, 32 nt, Homo Sapiens
ugucucccuaaaauguauaaaaccaagguaug

SEQ ID NO: 348826 - RNA, 32 nt, Homo Sapiens
uugaccuuguacacaagaaugagauuaaucug

SEQ ID NO: 348827 - RNA, 32 nt, Homo Sapiens
gaacagacccucacucucucugucagaaaaau

SEQ ID NO: 348828 - RNA, 32 nt, Homo Sapiens
gagguaaaagguggcgacaguuucccuuaggg

SEQ ID NO: 348829 - RNA, 32 nt, Homo Sapiens
caauaccccacuucaccuacaauaauuguuga

SEQ ID NO: 348830 - RNA, 32 nt, Homo Sapiens
uuacucauuuuucuugacaguucaaauggauu

SEQ ID NO: 348831 - RNA, 31 nt, Homo Sapiens
ucaguguggccccagaucaagucaugggagg

SEQ ID NO: 348832 - RNA, 32 nt, Homo Sapiens
gaucuggcacuuacugauacaagcauuuggag

SEQ ID NO: 348833 - RNA, 32 nt, Homo Sapiens
cccuuuuguuuucuuuuugucccuuauuaguu

SEQ ID NO: 348834 - RNA, 32 nt, Homo Sapiens
cgcguccgcccacgcguccgcccacgcguccg

SEQ ID NO: 348835 - RNA, 32 nt, Homo Sapiens
cgcguccgcccacgcguccgcggacgcguggg

SEQ ID NO: 348836 - RNA, 32 nt, Homo Sapiens
cggaccgggucguucucuaaacucgccgcgau

SEQ ID NO: 348837 - RNA, 32 nt, Homo Sapiens
auguauauagacaguaauauauuuauaaaaca

SEQ ID NO: 348838 - RNA, 32 nt, Homo Sapiens
guguuuuuuguaauuuauuauuuuacaaaaac

SEQ ID NO: 348839 - RNA, 32 nt, Homo Sapiens
cucaucauacuggcacuguugcuggggugacg

SEQ ID NO: 348840 - RNA, 32 nt, Homo Sapiens
agucuuuauuuuuucuucuaucccugucuggu

SEQ ID NO: 348841 - RNA, 32 nt, Homo Sapiens
cugagaggcuggagaccccaggcucgccaagg

SEQ ID NO: 348842 - RNA, 32 nt, Homo Sapiens
accaauuuauuuucuuaguauuacaaaauaau

SEQ ID NO: 348843 - RNA, 32 nt, Homo Sapiens
ucaacuuuuauugcuguauucuagucagacca

SEQ ID NO: 348844 - RNA, 32 nt, Homo Sapiens
acaucggagcugagaacugaacaaagaagagg

SEQ ID NO: 348845 - RNA, 32 nt, Homo Sapiens
gaccgcccugcuccggccccaguguggugggc

SEQ ID NO: 348846 - RNA, 32 nt, Homo Sapiens
agggaccgcaugcugauuuguacugcucucug

SEQ ID NO: 348847 - RNA, 32 nt, Homo Sapiens
augaucauuaggacauaacagacuaggccaga

SEQ ID NO: 348848 - RNA, 30 nt, Homo Sapiens
cagcuagugggagagcaccaguugggccua

SEQ ID NO: 348849 - RNA, 32 nt, Homo Sapiens
cuaaacaguauuuggaguguuuucagugucug

SEQ ID NO: 348850 - RNA, 31 nt, Homo Sapiens
agcaagaggagcaugugcagagccugccccu

SEQ ID NO: 348851 - RNA, 32 nt, Homo Sapiens
cuaauaaaauuuaugauaugaauauaaaggaa

SEQ ID NO: 348852 - RNA, 32 nt, Homo Sapiens
ggagggcauccacaccuccauuuuaugcuugu

SEQ ID NO: 348853 - RNA, 32 nt, Homo Sapiens
cauccugucuucugcuugagugucuucacucu

SEQ ID NO: 348854 - RNA, 32 nt, Homo Sapiens
gauacccggaaacacacacacacacacaucau

SEQ ID NO: 348855 - RNA, 32 nt, Homo Sapiens
agggcaaaugacaugcacugacccuuccagac

SEQ ID NO: 348856 - RNA, 32 nt, Homo Sapiens
auuuggugaacagaacuuaaauugccauucug

SEQ ID NO: 348857 - RNA, 32 nt, Homo Sapiens
gggaccuggagagggaggggcuguguagccuu

SEQ ID NO: 348858 - RNA, 32 nt, Homo Sapiens
gaccacuaucaugggcugggggagcucccgcc

SEQ ID NO: 348859 - RNA, 32 nt, Homo Sapiens
cagccuuacucccggccccccagcccagucuu

SEQ ID NO: 348860 - RNA, 31 nt, Homo Sapiens
uguggacaagaggugguugguggguggugaa

SEQ ID NO: 348861 - RNA, 32 nt, Homo Sapiens
aucugugguuguaucuguucaauucuaaagua

SEQ ID NO: 348862 - RNA, 32 nt, Homo Sapiens
gaacuccacggagagacuguccugcuaggacc

SEQ ID NO: 348863 - RNA, 32 nt, Homo Sapiens
cucugcaacuucucuguaaaucuaguaucauu

SEQ ID NO: 348864 - RNA, 32 nt, Homo Sapiens
cccccagaagggcuccugagcguagggaguug

SEQ ID NO: 348865 - RNA, 32 nt, Homo Sapiens
uaccuuggcuaauggaguucuuuacucuguuu

SEQ ID NO: 348866 - RNA, 32 nt, Homo Sapiens
cuuaaugaucacauuuuacauaugaaagagug

SEQ ID NO: 348867 - RNA, 32 nt, Homo Sapiens
uuuguggguggguggcucacacgguuauggag

SEQ ID NO: 348868 - RNA, 32 nt, Homo Sapiens
uccccugccggggucccuggaaacagugccca

SEQ ID NO: 348869 - RNA, 32 nt, Homo Sapiens
cuagucaacucaacaggaagugaggccaugga

SEQ ID NO: 348870 - RNA, 31 nt, Homo Sapiens
cccgccagaugcugccugcacuuccgcagcc

SEQ ID NO: 348871 - RNA, 32 nt, Homo Sapiens
ccaucucagggauugcuuaaccagagaaacag

SEQ ID NO: 348872 - RNA, 32 nt, Homo Sapiens
uuugcaaucuugugucccgcucggugauguuc

SEQ ID NO: 348873 - RNA, 32 nt, Homo Sapiens
uucgguuucugcacaugguuuuuuccgcuggg

SEQ ID NO: 348874 - RNA, 32 nt, Homo Sapiens
cuucuacuuuuuccuauagaguuaguuguucu

SEQ ID NO: 348875 - RNA, 32 nt, Homo Sapiens
ggggaggcuaggcucuccccagcccuaugguu

SEQ ID NO: 348876 - RNA, 32 nt, Homo Sapiens
cuagugacagagaacaggguguuauggggagc

SEQ ID NO: 348877 - RNA, 32 nt, Homo Sapiens
aaugcgaaaaauuuacacacuucaaagagcag

SEQ ID NO: 348878 - RNA, 32 nt, Homo Sapiens
caggcuggccccaggccuaugccuuggccguc

SEQ ID NO: 348879 - RNA, 32 nt, Homo Sapiens
aaaaggacucacuggagagauacucuauaaau

SEQ ID NO: 348880 - RNA, 32 nt, Homo Sapiens
cgcaccgccugccgcgucggccucgggccugc

SEQ ID NO: 348881 - RNA, 32 nt, Homo Sapiens
accaagaucacaggugcacucuacacauaaca

SEQ ID NO: 348882 - RNA, 32 nt, Homo Sapiens
cuugaagaaccaaaacagaaggaauauguaca

SEQ ID NO: 348883 - RNA, 32 nt, Homo Sapiens
ccagucccucccgaccccgcgccccgcgcgga

SEQ ID NO: 348884 - RNA, 32 nt, Homo Sapiens
gugugaggccagugguggcguccccagggcca

SEQ ID NO: 348885 - RNA, 31 nt, Homo Sapiens
agcgcccggcacugagccucgcauccacauu

SEQ ID NO: 348886 - RNA, 32 nt, Homo Sapiens
uucuuaggaaaacuuuuuuuuauuuuuuacau

SEQ ID NO: 348887 - RNA, 32 nt, Homo Sapiens
aaagaaccacaagaaaucaugaaguaaaaacu

SEQ ID NO: 348888 - RNA, 32 nt, Homo Sapiens
cccgagcggaggccgcggcgccgcccuccgau

SEQ ID NO: 348889 - RNA, 32 nt, Homo Sapiens
uaagcuaugcacuagccuugcccucuuagguu

SEQ ID NO: 348890 - RNA, 32 nt, Homo Sapiens
acguccuccccaguccucuccuggcaccagca

SEQ ID NO: 348891 - RNA, 32 nt, Homo Sapiens
ugucuagcauguccaguaugagugguggaugg

SEQ ID NO: 348892 - RNA, 32 nt, Homo Sapiens
gagcgaguggggccgggcguugucacggguau

SEQ ID NO: 348893 - RNA, 32 nt, Homo Sapiens
cacauggagggugacuugcgaugauauauuua

SEQ ID NO: 348894 - RNA, 32 nt, Homo Sapiens
aggcggagggggucccuggccugggcggagag

SEQ ID NO: 348895 - RNA, 32 nt, Homo Sapiens
ggagggccguaccccacccucagcaccccuuc

SEQ ID NO: 348896 - RNA, 32 nt, Homo Sapiens
accuugguguccugggccccagaguuccuuug

SEQ ID NO: 348897 - RNA, 32 nt, Homo Sapiens
acccggcacuuccaacauuauuaaauaauaag

SEQ ID NO: 348898 - RNA, 32 nt, Homo Sapiens
cuucccuggagucuccucccagaccacgcgac

SEQ ID NO: 348899 - RNA, 32 nt, Homo Sapiens
uuuccuucccucaaagcuuccauuccacaucc

SEQ ID NO: 348900 - RNA, 32 nt, Homo Sapiens
ggcugcauacacagugcuaaugaggugccuuc

SEQ ID NO: 348901 - RNA, 32 nt, Homo Sapiens
augcugucucucugcccuggccucuuccaccc

SEQ ID NO: 348902 - RNA, 32 nt, Homo Sapiens
uaauaaugaugacauggcauuaugcuuagaaa

SEQ ID NO: 348903 - RNA, 32 nt, Homo Sapiens
acggugauucuugcccuuaauucauaauugaa

SEQ ID NO: 348904 - RNA, 32 nt, Homo Sapiens
aaaaaacauaaagagagacauaaaaugggaga

SEQ ID NO: 348905 - RNA, 32 nt, Homo Sapiens
agcaauuauuuuuccuggugucucuucuuggu

SEQ ID NO: 348906 - RNA, 32 nt, Homo Sapiens
ugggggguugggggguuagggcagggagggga

SEQ ID NO: 348907 - RNA, 32 nt, Homo Sapiens
aggcagcugcggggggagccggcggccgcugc

SEQ ID NO: 348908 - RNA, 32 nt, Homo Sapiens
ccagccugagcaaccuaaugagacccucccuc

SEQ ID NO: 348909 - RNA, 32 nt, Homo Sapiens
uuugaaaaaaugucugucacauaugaugauuc

SEQ ID NO: 348910 - RNA, 32 nt, Homo Sapiens
gugaggcggcggcggcagcagcagcagcagcg

SEQ ID NO: 348911 - RNA, 32 nt, Homo Sapiens
auccccaauuuaauauuaaauuaacaggcaag

SEQ ID NO: 348912 - RNA, 32 nt, Homo Sapiens
cuaaaagauauuugguaucuuuagagaaugaa

SEQ ID NO: 348913 - RNA, 32 nt, Homo Sapiens
gcuaccccacaagcuugucagaucgcccaggu

SEQ ID NO: 348914 - RNA, 32 nt, Homo Sapiens
ugagcuggaagacaggaucaggugccagcgga

SEQ ID NO: 348915 - RNA, 32 nt, Homo Sapiens
aaaggacgaaacaagguacaguucuugcccca

SEQ ID NO: 348916 - RNA, 32 nt, Homo Sapiens
gaggggugcacgcccgcagucccucaucagca

SEQ ID NO: 348917 - RNA, 32 nt, Homo Sapiens
agacgcggagaaaaaaguucucgccaccaaag

SEQ ID NO: 348918 - RNA, 32 nt, Homo Sapiens
aggagucggggauaaacaucaaacaucaaucg

SEQ ID NO: 348919 - RNA, 32 nt, Homo Sapiens
aaaaaucaguaagaaaaaugucuugagcuaga

SEQ ID NO: 348920 - RNA, 32 nt, Homo Sapiens
gaaggcagaaaagaaggagagaggcagaccuu

SEQ ID NO: 348921 - RNA, 32 nt, Homo Sapiens
accuggcccacggcugcugugcaccugacggc

SEQ ID NO: 348922 - RNA, 32 nt, Homo Sapiens
gucugaguaucuccaggggaugauuucuggcu

SEQ ID NO: 348923 - RNA, 32 nt, Homo Sapiens
aauauaaaucauaugguccuuuguaaaauaua

SEQ ID NO: 348924 - RNA, 32 nt, Homo Sapiens
gaggugggauucauuacaagacuuugggcucu

SEQ ID NO: 348925 - RNA, 30 nt, Homo Sapiens
ggcuccugcugugcugcugagccgcacacg

SEQ ID NO: 348926 - RNA, 32 nt, Homo Sapiens
auccuuuaacacuaagguaacaugacauaauc

SEQ ID NO: 348927 - RNA, 32 nt, Homo Sapiens
uguucccacuaauuuccagccaucaccuuugg

SEQ ID NO: 348928 - RNA, 32 nt, Homo Sapiens
agcuggagggcggccuccugccaccaccaggc

SEQ ID NO: 348929 - RNA, 32 nt, Homo Sapiens
ccugcagcagcugccaguggagccgccugaca

SEQ ID NO: 348930 - RNA, 32 nt, Homo Sapiens
gaaaagaacaugaacgaauuccagagucauga

SEQ ID NO: 348931 - RNA, 31 nt, Homo Sapiens
gagguucauuugauuguuguaugcaaauagc

SEQ ID NO: 348932 - RNA, 32 nt, Homo Sapiens
gacagcucgguuaaugaaaaaauggacacaga

SEQ ID NO: 348933 - RNA, 32 nt, Homo Sapiens
cagccucgcgccccgcguuccgggcggcucca

SEQ ID NO: 348934 - RNA, 32 nt, Homo Sapiens
uuaaaaagaaaauuauugcauuugaucuggau

SEQ ID NO: 348935 - RNA, 32 nt, Homo Sapiens
caaugcucagaauugaaaguuacuacuuaaaa

SEQ ID NO: 348936 - RNA, 32 nt, Homo Sapiens
ugagagggacagguagccccccugccugcggc

SEQ ID NO: 348937 - RNA, 32 nt, Homo Sapiens
gaggaugccuucaccagcccagccccuugccu

SEQ ID NO: 348938 - RNA, 32 nt, Homo Sapiens
aggggaaggggagcaggugugucacacaguga

SEQ ID NO: 348939 - RNA, 32 nt, Homo Sapiens
ggaggcaggacacaggcagcguguggcccauu

SEQ ID NO: 348940 - RNA, 32 nt, Homo Sapiens
ugacaauacccuccccucccuugggcuggacc

SEQ ID NO: 348941 - RNA, 32 nt, Homo Sapiens
uugucggcuugcucuucuccccggcccucaga

SEQ ID NO: 348942 - RNA, 32 nt, Homo Sapiens
gagagcuggucugcguuucccaggcgcggcgg

SEQ ID NO: 348943 - RNA, 32 nt, Homo Sapiens
aggugagauucugucuccaaauaaaaaauaaa

SEQ ID NO: 348944 - RNA, 32 nt, Homo Sapiens
aggaguuaccuguguccugcauuaugauuaaa

SEQ ID NO: 348945 - RNA, 32 nt, Homo Sapiens
cggcccagacccagcccgcggccuggaccccu

SEQ ID NO: 348946 - RNA, 32 nt, Homo Sapiens
auugaauuagaaaacaagugggacauauuuuc

SEQ ID NO: 348947 - RNA, 32 nt, Homo Sapiens
gaugccauucuuucuuuuuuuuuaccccgcaa

SEQ ID NO: 348948 - RNA, 30 nt, Homo Sapiens
agcaaugucugugcucaaggagcaaaacug

SEQ ID NO: 348949 - RNA, 32 nt, Homo Sapiens
gucagcauugauuucuuaauuuugauaccugu

SEQ ID NO: 348950 - RNA, 32 nt, Homo Sapiens
guccccacgccgggcgauauggggugccugcu

SEQ ID NO: 348951 - RNA, 32 nt, Homo Sapiens
uucuugcuucugucuguucuuaauuuuugggu

SEQ ID NO: 348952 - RNA, 32 nt, Homo Sapiens
ggugcggccuccccaggagcgggcccugcugg

SEQ ID NO: 348953 - RNA, 32 nt, Homo Sapiens
gccagaaagugcacuuugaggaccacuuuuuc

SEQ ID NO: 348954 - RNA, 32 nt, Homo Sapiens
guaccugugauguauauagaauuaguacuuua

SEQ ID NO: 348955 - RNA, 32 nt, Homo Sapiens
cucacuaaugauacacacauagauaaagcaag

SEQ ID NO: 348956 - RNA, 26 nt, Homo Sapiens
aaugcagcauagucuuguuuucuuuu

SEQ ID NO: 348957 - RNA, 32 nt, Homo Sapiens
uucucucucccucuuugcccagagcuucccuu

SEQ ID NO: 348958 - RNA, 32 nt, Homo Sapiens
acccuguccuguauauuuucuacauuucuauu

SEQ ID NO: 348959 - RNA, 32 nt, Homo Sapiens
uuuaaagaaaucaaaagaaucuauuagauuuu

SEQ ID NO: 348960 - RNA, 32 nt, Homo Sapiens
aguucgacagcgcgcugcugccugcaguccgc

SEQ ID NO: 348961 - RNA, 32 nt, Homo Sapiens
aucuugcucccucucccaggccuuuacccgcu

SEQ ID NO: 348962 - RNA, 32 nt, Homo Sapiens
gugcagcaacagcagcagcagcccccgcagca

SEQ ID NO: 348963 - RNA, 32 nt, Homo Sapiens
cggaggcugcucggccgcaaggaggcaggcgg

SEQ ID NO: 348964 - RNA, 32 nt, Homo Sapiens
ccgcgcaucguccgcagacgccgccaccgcca

SEQ ID NO: 348965 - RNA, 32 nt, Homo Sapiens
agggcuugcaagaucacggaaaaccuucuugg

SEQ ID NO: 348966 - RNA, 32 nt, Homo Sapiens
gaucaaauuaagaauauaaaauuugaucuucu

SEQ ID NO: 348967 - RNA, 32 nt, Homo Sapiens
aaauggaggaaccucggaggugaccagaaaga

SEQ ID NO: 348968 - RNA, 32 nt, Homo Sapiens
aagcagucgggacgggagcgcgggcguccgcg

SEQ ID NO: 348969 - RNA, 32 nt, Homo Sapiens
aggccagagcuggaagcagacaguaaggggaa

SEQ ID NO: 348970 - RNA, 32 nt, Homo Sapiens
aggcagccucgcugcgccccaucccgucccgc

SEQ ID NO: 348971 - RNA, 32 nt, Homo Sapiens
cucuuuguauuaccaaauaguugggguguuga

SEQ ID NO: 348972 - RNA, 32 nt, Homo Sapiens
aguuuggccuuuugaagaaaaacagcauguga

SEQ ID NO: 348973 - RNA, 32 nt, Homo Sapiens
cccaaacccccgcugccucucuuccuuccccc

SEQ ID NO: 348974 - RNA, 32 nt, Homo Sapiens
ucagagaccagaggaacagagaagaggcccca

SEQ ID NO: 348975 - RNA, 32 nt, Homo Sapiens
cagaggcaccucacgccagccaucgcggagag

SEQ ID NO: 348976 - RNA, 32 nt, Homo Sapiens
cgugugcccucccagcccacaccagugcucuc

SEQ ID NO: 348977 - RNA, 32 nt, Homo Sapiens
cccucuuucagggguguguacagugcauugau

SEQ ID NO: 348978 - RNA, 32 nt, Homo Sapiens
gggagaagccccaaacuguggcuucaggggaa

SEQ ID NO: 348979 - RNA, 32 nt, Homo Sapiens
uugugcuggugcccguuccagcugcaggggug

SEQ ID NO: 348980 - RNA, 32 nt, Homo Sapiens
uguggaaagaauuuaaagagaagcugaacaau

SEQ ID NO: 348981 - RNA, 32 nt, Homo Sapiens
aagugcacggggcacagcggagucuguccugu

SEQ ID NO: 348982 - RNA, 32 nt, Homo Sapiens
uuccaacuccuucuccuccucccacuucccag

SEQ ID NO: 348983 - RNA, 30 nt, Homo Sapiens
ggcccguucugugcucuggaggcuuugggc

SEQ ID NO: 348984 - RNA, 32 nt, Homo Sapiens
auuggaugucuaggaaugacugaaagaaacca

SEQ ID NO: 348985 - RNA, 32 nt, Homo Sapiens
accgaguacuagagcugcuugcaugcguuacu

SEQ ID NO: 348986 - RNA, 32 nt, Homo Sapiens
ggggaguugccauggcgucgcugagcggccug

SEQ ID NO: 348987 - RNA, 32 nt, Homo Sapiens
cccugcccuggggaaccccuggcccugugggg

SEQ ID NO: 348988 - RNA, 32 nt, Homo Sapiens
aaacuaugcuuaauguaugauuuucgagcuuc

SEQ ID NO: 348989 - RNA, 32 nt, Homo Sapiens
gacaacauugaugaacauccgaaacuacaacg

SEQ ID NO: 348990 - RNA, 32 nt, Homo Sapiens
cucugcugcugcggcgggaccggcaggcccag

SEQ ID NO: 348991 - RNA, 32 nt, Homo Sapiens
aagauuaaaaauuaaaauucguuuuugcaaua

SEQ ID NO: 348992 - RNA, 32 nt, Homo Sapiens
ccuuuuggguuugccuuaauucuuaccucauu

SEQ ID NO: 348993 - RNA, 32 nt, Homo Sapiens
gguuucaccaugucucccaggcuggucucaaa

SEQ ID NO: 348994 - RNA, 32 nt, Homo Sapiens
gccgcguggacagccggagcaguuggccugug

SEQ ID NO: 348995 - RNA, 32 nt, Homo Sapiens
gaauugcauugcagcaggccgacucuuugugg

SEQ ID NO: 348996 - RNA, 32 nt, Homo Sapiens
cagguucucaauauauuaaaauucacaugaaa

SEQ ID NO: 348997 - RNA, 32 nt, Homo Sapiens
guggcagcacugggcucgggggucaguuuggu

SEQ ID NO: 348998 - RNA, 32 nt, Homo Sapiens
ccagggaaggagaucaagguagucaagcgggg

SEQ ID NO: 348999 - RNA, 30 nt, Homo Sapiens
gcccucuccgcacguccgccggcgccucag

SEQ ID NO: 349000 - RNA, 32 nt, Homo Sapiens
guucuccacccugugcgcugggcuuggagccc

SEQ ID NO: 349001 - RNA, 32 nt, Homo Sapiens
cuuaccuaauuauucuuacaaguuuuaaguug

SEQ ID NO: 349002 - RNA, 32 nt, Homo Sapiens
uucccagcuccccccgcccacccacgcauaca

SEQ ID NO: 349003 - RNA, 31 nt, Homo Sapiens
aacaagguucccccuccuccauucuugcccu

SEQ ID NO: 349004 - RNA, 32 nt, Homo Sapiens
gccaccucuaaaguugggagggacaggggcgg

SEQ ID NO: 349005 - RNA, 32 nt, Homo Sapiens
guuaagacaauuuuuguuguauguauauaaau

SEQ ID NO: 349006 - RNA, 32 nt, Homo Sapiens
aaggcaggcaggagcucugucucccggccuuc

SEQ ID NO: 349007 - RNA, 32 nt, Homo Sapiens
gcacccccagcccaugcaccccggaaggcacg

SEQ ID NO: 349008 - RNA, 32 nt, Homo Sapiens
ggccuaccacccuaaugugucuggaauuggug

SEQ ID NO: 349009 - RNA, 32 nt, Homo Sapiens
uguuugcaguguaguccuguccccucaggcuc

SEQ ID NO: 349010 - RNA, 32 nt, Homo Sapiens
ccgagcuggaggaugcccuggaacucggagca

SEQ ID NO: 349011 - RNA, 32 nt, Homo Sapiens
gaaauguucauuucagaccucgucauggaaga

SEQ ID NO: 349012 - RNA, 32 nt, Homo Sapiens
caaacacuuaauauuucuuacaucaaagcaac

SEQ ID NO: 349013 - RNA, 32 nt, Homo Sapiens
aucguuacuauuauuucuuuuuauucuaaugu

SEQ ID NO: 349014 - RNA, 32 nt, Homo Sapiens
cuuauaucuagacauuugugucuaaauaagcu

SEQ ID NO: 349015 - RNA, 32 nt, Homo Sapiens
cgaccccgccccauucccagaaauuaccaccc

SEQ ID NO: 349016 - RNA, 32 nt, Homo Sapiens
aggcaugugagauccuggcuccccucccucuu

SEQ ID NO: 349017 - RNA, 30 nt, Homo Sapiens
gaauaguaucaccacugacacacaagcacu

SEQ ID NO: 349018 - RNA, 32 nt, Homo Sapiens
ugacuaauuuuuuguauuguuaguagagaugg

SEQ ID NO: 349019 - RNA, 32 nt, Homo Sapiens
gguagucugaauagaaggguuuucaggugcag

SEQ ID NO: 349020 - RNA, 32 nt, Homo Sapiens
aaaaauauguuugcuuuuuuugguuuuuguuu

SEQ ID NO: 349021 - RNA, 32 nt, Homo Sapiens
gccuaggccaaagcuagcccaaggcuggggaa

SEQ ID NO: 349022 - RNA, 29 nt, Homo Sapiens
uaguaguuuuguuucaguggcauuagcaa

SEQ ID NO: 349023 - RNA, 27 nt, Homo Sapiens
gagcucccauucuucaggacccugcug

SEQ ID NO: 349024 - RNA, 32 nt, Homo Sapiens
agcucugaaaucaacucucuucggucguaucc

SEQ ID NO: 349025 - RNA, 32 nt, Homo Sapiens
cuucuguccuuguccuggaccucagguuccca

SEQ ID NO: 349026 - RNA, 32 nt, Homo Sapiens
uuuuaauuuaacaugaacacccuuagaaaaug

SEQ ID NO: 349027 - RNA, 32 nt, Homo Sapiens
uaagaagaaaucaucucuacaauguagacaac

SEQ ID NO: 349028 - RNA, 32 nt, Homo Sapiens
aauuuuaauuuucauugucaauauuuugagcu

SEQ ID NO: 349029 - RNA, 31 nt, Homo Sapiens
cagccggcuccgcagugguccacuccgguug

SEQ ID NO: 349030 - RNA, 32 nt, Homo Sapiens
uggguugccggggguagggguggggccacaca

SEQ ID NO: 349031 - RNA, 32 nt, Homo Sapiens
aaaauguguacaaaguuaauuuauugcauuaa

SEQ ID NO: 349032 - RNA, 32 nt, Homo Sapiens
gcgcaucgagaucgcgcacgcccugugccuga

SEQ ID NO: 349033 - RNA, 32 nt, Homo Sapiens
ucuggcaggggaggaggacugacacggaggca

SEQ ID NO: 349034 - RNA, 32 nt, Homo Sapiens
accacugcauuuaccagccugauacugccaag

SEQ ID NO: 349035 - RNA, 32 nt, Homo Sapiens
gauguugccgccguccccacccuaacccccac

SEQ ID NO: 349036 - RNA, 32 nt, Homo Sapiens
aggcucugggaacaccucuacugguugcuggg

SEQ ID NO: 349037 - RNA, 32 nt, Homo Sapiens
uccuugccccuaacccaaaaagcuucauuuuu

SEQ ID NO: 349038 - RNA, 32 nt, Homo Sapiens
agauuuguagggcacuuggauuaggguucucu

SEQ ID NO: 349039 - RNA, 32 nt, Homo Sapiens
aaucacauaauugucuuuggaacuuggucucc

SEQ ID NO: 349040 - RNA, 32 nt, Homo Sapiens
uaggagcagcgggaccaucugaccccacuugc

SEQ ID NO: 349041 - RNA, 32 nt, Homo Sapiens
gcucggacgucgucgcgccauggcggagacca

SEQ ID NO: 349042 - RNA, 32 nt, Homo Sapiens
cucaucuugauaaaauaugaccuagaaguguu

SEQ ID NO: 349043 - RNA, 32 nt, Homo Sapiens
cuagcggaaaauuuauuaaauuaacuauuaac

SEQ ID NO: 349044 - RNA, 32 nt, Homo Sapiens
ugauaauauuuugaaucugagacgaauacaac

SEQ ID NO: 349045 - RNA, 32 nt, Homo Sapiens
gucugccccugaugccagcagggggcgcccgc

SEQ ID NO: 349046 - RNA, 32 nt, Homo Sapiens
uacaucauuaaucaggaauauuacaguaauga

SEQ ID NO: 349047 - RNA, 32 nt, Homo Sapiens
gccccaaaucaucuugagugcacuccauaaaa

SEQ ID NO: 349048 - RNA, 32 nt, Homo Sapiens
cucaugcccucucccucuagugugggaaaaca

SEQ ID NO: 349049 - RNA, 32 nt, Homo Sapiens
uccgccuuuggggcaggcgaucgagcgccgcg

SEQ ID NO: 349050 - RNA, 32 nt, Homo Sapiens
gcccuuaaaaauuaguuuucauuaaaaagaaa

SEQ ID NO: 349051 - RNA, 32 nt, Homo Sapiens
ccgagucaggacuugagguggaugaugggucu

SEQ ID NO: 349052 - RNA, 32 nt, Homo Sapiens
gcauggaaugcugaugacuuggagcaggcccc

SEQ ID NO: 349053 - RNA, 32 nt, Homo Sapiens
caguucacaaaacauuuucauaugucaguaaa

SEQ ID NO: 349054 - RNA, 32 nt, Homo Sapiens
gugauucugaaucaaggugauugugauuauag

SEQ ID NO: 349055 - RNA, 32 nt, Homo Sapiens
cuuucaggcguauugggggguuugauuuacuu

SEQ ID NO: 349056 - RNA, 32 nt, Homo Sapiens
augcagguuugaucuggugggucuuuggggug

SEQ ID NO: 349057 - RNA, 32 nt, Homo Sapiens
cugcacgccuagcguugucccgcggccaggcc

SEQ ID NO: 349058 - RNA, 32 nt, Homo Sapiens
aaacugcuuugcauggguuuucugggaaauua

SEQ ID NO: 349059 - RNA, 30 nt, Homo Sapiens
gggguguggggcggaaaggcagagaucucu

SEQ ID NO: 349060 - RNA, 32 nt, Homo Sapiens
ccccagcgcgccccgaucuggcccccugcccc

SEQ ID NO: 349061 - RNA, 32 nt, Homo Sapiens
uucaguuacggauucgagaccuugaaggagcu

SEQ ID NO: 349062 - RNA, 32 nt, Homo Sapiens
auuuuagaauuaacagcugcuucaauauguua

SEQ ID NO: 349063 - RNA, 32 nt, Homo Sapiens
acacagcagcaggcagggaggaggcggaggug

SEQ ID NO: 349064 - RNA, 32 nt, Homo Sapiens
cagguagccccggccugggucaaucaaggcac

SEQ ID NO: 349065 - RNA, 32 nt, Homo Sapiens
ucagaaguggagccugaagauuaaacugaauu

SEQ ID NO: 349066 - RNA, 32 nt, Homo Sapiens
gaucuaccugucuacagcaucagcuucuguga

SEQ ID NO: 349067 - RNA, 32 nt, Homo Sapiens
caauuagcauauagaaaaauauuacuuuaaga

SEQ ID NO: 349068 - RNA, 32 nt, Homo Sapiens
cucccccgccccaauugccuugagaucucugc

SEQ ID NO: 349069 - RNA, 32 nt, Homo Sapiens
cccgucugccagcaucuaguuucccucuaauu

SEQ ID NO: 349070 - RNA, 32 nt, Homo Sapiens
ggaaucccaaggccagagagccuggaguuugg

SEQ ID NO: 349071 - RNA, 32 nt, Homo Sapiens
uaagcugcucgacucauucccccucccagucc

SEQ ID NO: 349072 - RNA, 32 nt, Homo Sapiens
cagaauuuccucaaaauguagaggaggagaag

SEQ ID NO: 349073 - RNA, 32 nt, Homo Sapiens
ggagggcaggauuggagaagggggcggggcag

SEQ ID NO: 349074 - RNA, 32 nt, Homo Sapiens
augugaacaaccugcucacaguccucauuuac

SEQ ID NO: 349075 - RNA, 32 nt, Homo Sapiens
gccugucgccggggcccagcaaauacagccuu

SEQ ID NO: 349076 - RNA, 32 nt, Homo Sapiens
caacuaaucccucuccucucugauuccuuucu

SEQ ID NO: 349077 - RNA, 32 nt, Homo Sapiens
ccugugcaguacguggagaggacccccaaucc

SEQ ID NO: 349078 - RNA, 32 nt, Homo Sapiens
uuaccagacuuccaaaaagaugauuucaaggg

SEQ ID NO: 349079 - RNA, 32 nt, Homo Sapiens
ugggaucaugagcguccggucuggcccacagg

SEQ ID NO: 349080 - RNA, 32 nt, Homo Sapiens
cuuuacugcaaguuuaaauaguuguacagaua

SEQ ID NO: 349081 - RNA, 32 nt, Homo Sapiens
uuuguucucugccuauguauuucugucuauuu

SEQ ID NO: 349082 - RNA, 32 nt, Homo Sapiens
gggaaacauuuuaguuuuuguuaagguuccaa

SEQ ID NO: 349083 - RNA, 32 nt, Homo Sapiens
gugcugggaggaggcugcaguacuccugugug

SEQ ID NO: 349084 - RNA, 32 nt, Homo Sapiens
uucuguagccaggucuucccaaggauuuuagu

SEQ ID NO: 349085 - RNA, 32 nt, Homo Sapiens
uuaauagagaugaaucaguuuuggaaucuaag

SEQ ID NO: 349086 - RNA, 32 nt, Homo Sapiens
ugaauggaugaaacuuuuuuaaaguuucagau

SEQ ID NO: 349087 - RNA, 32 nt, Homo Sapiens
agaggcggccucgugccaugaucuguauuuaa

SEQ ID NO: 349088 - RNA, 32 nt, Homo Sapiens
gucaagaacgguuuaaacaggaaggauugugc

SEQ ID NO: 349089 - RNA, 32 nt, Homo Sapiens
augggguaggggugggggugggcaccagcuca

SEQ ID NO: 349090 - RNA, 32 nt, Homo Sapiens
aaaagcuguggaaaaugaaugugcuaauuacu

SEQ ID NO: 349091 - RNA, 32 nt, Homo Sapiens
cagcggguuaguggucgcgcgcccgaccuccg

SEQ ID NO: 349092 - RNA, 32 nt, Homo Sapiens
aaagagaauacaccaacaaagaguuucgggac

SEQ ID NO: 349093 - RNA, 32 nt, Homo Sapiens
accucccggacgggguggcuggccgggcgggg

SEQ ID NO: 349094 - RNA, 32 nt, Homo Sapiens
acacaggccgcggcggcuggcucgggccccua

SEQ ID NO: 349095 - RNA, 32 nt, Homo Sapiens
caaccuuugccuuuuucuuugcugcggccaau

SEQ ID NO: 349096 - RNA, 32 nt, Homo Sapiens
gccccaguacccaaaaaacaauggcuaucaug

SEQ ID NO: 349097 - RNA, 32 nt, Homo Sapiens
cgcgggaggucgcggcgcgccauggggcuccc

SEQ ID NO: 349098 - RNA, 32 nt, Homo Sapiens
cccauagccacccauggaccaaucagcaagca

SEQ ID NO: 349099 - RNA, 32 nt, Homo Sapiens
aguuaucuuuacguggacuggcuuggugccuu

SEQ ID NO: 349100 - RNA, 32 nt, Homo Sapiens
agcacguaugagaagagaaaacaaaauaaauc

SEQ ID NO: 349101 - RNA, 32 nt, Homo Sapiens
ucccugggaagcugcauguguggaacacgugc

SEQ ID NO: 349102 - RNA, 32 nt, Homo Sapiens
cggggucggacggggcaggcgcugcggacacc

SEQ ID NO: 349103 - RNA, 32 nt, Homo Sapiens
guucagugcacucuagaaacacugcuguggug

SEQ ID NO: 349104 - RNA, 32 nt, Homo Sapiens
cccaucugacaggcucucuuuugucaaggugg

SEQ ID NO: 349105 - RNA, 32 nt, Homo Sapiens
acaaacacagagcugcccaggcuuucuggaag

SEQ ID NO: 349106 - RNA, 32 nt, Homo Sapiens
agccagaguuuaucuuuucuauaaguuuacag

SEQ ID NO: 349107 - RNA, 32 nt, Homo Sapiens
ugcaaagaucauaauaaagucauuuuuauaga

SEQ ID NO: 349108 - RNA, 32 nt, Homo Sapiens
agggguggcucuggcaggaaaagccagaaucc

SEQ ID NO: 349109 - RNA, 32 nt, Homo Sapiens
ccacccuuucgccuccuccccguggagagcuc

SEQ ID NO: 349110 - RNA, 32 nt, Homo Sapiens
ccagauuuuguuuuccuccccccgcugcaguu

SEQ ID NO: 349111 - RNA, 32 nt, Homo Sapiens
cgggcuguggcaggagggcggcggcggcggcu

SEQ ID NO: 349112 - RNA, 32 nt, Homo Sapiens
acagccacuccuggaagugcugccugacugaa

SEQ ID NO: 349113 - RNA, 32 nt, Homo Sapiens
aaacaccaaauauugguuaugaugaaacacca

SEQ ID NO: 349114 - RNA, 32 nt, Homo Sapiens
cuccuagggaggagguggcggcuguggcggcc

SEQ ID NO: 349115 - RNA, 32 nt, Homo Sapiens
aguauaaucuuauuuuaaccuaaaaucuuacu

SEQ ID NO: 349116 - RNA, 32 nt, Homo Sapiens
ccgaaguguuuugugguggaguaucugaacaa

SEQ ID NO: 349117 - RNA, 32 nt, Homo Sapiens
ccgcgucuguccgugcgcccgagcgcccacuc

SEQ ID NO: 349118 - RNA, 32 nt, Homo Sapiens
cguaagggggugcacagccuguccacuagccc

SEQ ID NO: 349119 - RNA, 27 nt, Homo Sapiens
agaugcaugcacacgcacacacauauu

SEQ ID NO: 349120 - RNA, 32 nt, Homo Sapiens
aagaauaugaggaacaguacucggaggccaga

SEQ ID NO: 349121 - RNA, 32 nt, Homo Sapiens
cccccagcuccgucucggaggaccuuucgccg

SEQ ID NO: 349122 - RNA, 32 nt, Homo Sapiens
ugauugccaaggaaaccuccucauugggcuaa

SEQ ID NO: 349123 - RNA, 32 nt, Homo Sapiens
acauaaaaugaacaguagacagcaaauaauuu

SEQ ID NO: 349124 - RNA, 32 nt, Homo Sapiens
uuuauuaucuaaucauuccaaguuuugcauug

SEQ ID NO: 349125 - RNA, 32 nt, Homo Sapiens
auguuuucccugauuucacaaacaaggauagu

SEQ ID NO: 349126 - RNA, 32 nt, Homo Sapiens
guggaacccgcggcgagcugcugcuucacacu

SEQ ID NO: 349127 - RNA, 32 nt, Homo Sapiens
agccacaauuucuauuugaaaauucaaguauc

SEQ ID NO: 349128 - RNA, 32 nt, Homo Sapiens
aagauccuguagccccacggaccuggcgacuc

SEQ ID NO: 349129 - RNA, 32 nt, Homo Sapiens
ucugccuacucaccccaggggccacagccaca

SEQ ID NO: 349130 - RNA, 32 nt, Homo Sapiens
ugccaggaaugggaacaaaacuggauggagaa

SEQ ID NO: 349131 - RNA, 32 nt, Homo Sapiens
ucuccaagccucccaacagaagacagaggucc

SEQ ID NO: 349132 - RNA, 32 nt, Homo Sapiens
guuauagucaacacagagaucacaacuuagaa

SEQ ID NO: 349133 - RNA, 32 nt, Homo Sapiens
uggcugccauggccgcagccccggccccacac

SEQ ID NO: 349134 - RNA, 32 nt, Homo Sapiens
acacccugcauggaaucaggcuccucagccag

SEQ ID NO: 349135 - RNA, 32 nt, Homo Sapiens
auugcugcuggggcuccccauuugcuuacuuu
